United States Patent Application Publication US 2014/0004565 A1 - sequence listing, part 88

SEQ ID NO: 2171899 - RNA, 19 nt, Artificial Sequence
  Description of Artificial Sequence: Synthetic oligonucleotide
caguguggcauagcagggc

SEQ ID NO: 2171900 - RNA, 19 nt, Artificial Sequence
  Description of Artificial Sequence: Synthetic oligonucleotide
caucaugcucagcguggcc

SEQ ID NO: 2171901 - RNA, 19 nt, Artificial Sequence
  Description of Artificial Sequence: Synthetic oligonucleotide
uugggacacuuggaggcca

SEQ ID NO: 2171902 - RNA, 19 nt, Artificial Sequence
  Description of Artificial Sequence: Synthetic oligonucleotide
cacggucuugucacacuug

SEQ ID NO: 2171903 - RNA, 19 nt, Artificial Sequence
  Description of Artificial Sequence: Synthetic oligonucleotide
ucgguccgcgcccuccacc

SEQ ID NO: 2171904 - RNA, 19 nt, Artificial Sequence
  Description of Artificial Sequence: Synthetic oligonucleotide
agcgggucguuuucccuca

SEQ ID NO: 2171905 - RNA, 19 nt, Artificial Sequence
  Description of Artificial Sequence: Synthetic oligonucleotide
ccucuuguugcaucgagga

SEQ ID NO: 2171906 - RNA, 19 nt, Artificial Sequence
  Description of Artificial Sequence: Synthetic oligonucleotide
cccuauauucacaccuuug

SEQ ID NO: 2171907 - RNA, 19 nt, Artificial Sequence
  Description of Artificial Sequence: Synthetic oligonucleotide
agggaccucgauggggccg

SEQ ID NO: 2171908 - RNA, 19 nt, Artificial Sequence
  Description of Artificial Sequence: Synthetic oligonucleotide
uggcaguagggcuggccgu

SEQ ID NO: 2171909 - RNA, 19 nt, Artificial Sequence
  Description of Artificial Sequence: Synthetic oligonucleotide
agcgcucacagcgcaagca

SEQ ID NO: 2171910 - RNA, 19 nt, Artificial Sequence
  Description of Artificial Sequence: Synthetic oligonucleotide
gcuaucgggaacaugggaa

SEQ ID NO: 2171911 - RNA, 19 nt, Artificial Sequence
  Description of Artificial Sequence: Synthetic oligonucleotide
cagcgggucguuuucccuc

SEQ ID NO: 2171912 - RNA, 19 nt, Artificial Sequence
  Description of Artificial Sequence: Synthetic oligonucleotide
gugaucugagggcccucag

SEQ ID NO: 2171913 - RNA, 19 nt, Artificial Sequence
  Description of Artificial Sequence: Synthetic oligonucleotide
gacacuuggaggccauggu

SEQ ID NO: 2171914 - RNA, 19 nt, Artificial Sequence
  Description of Artificial Sequence: Synthetic oligonucleotide
cuccguagcugugaaccac

SEQ ID NO: 2171915 - RNA, 19 nt, Artificial Sequence
  Description of Artificial Sequence: Synthetic oligonucleotide
cuucucguagauguaggaa

SEQ ID NO: 2171916 - RNA, 19 nt, Artificial Sequence
  Description of Artificial Sequence: Synthetic oligonucleotide
aggcagcgggucguuuucc

SEQ ID NO: 2171917 - RNA, 19 nt, Artificial Sequence
  Description of Artificial Sequence: Synthetic oligonucleotide
guacacggucuugucacac

SEQ ID NO: 2171918 - RNA, 19 nt, Artificial Sequence
  Description of Artificial Sequence: Synthetic oligonucleotide
cucacagcgcaagcagggc

SEQ ID NO: 2171919 - RNA, 19 nt, Artificial Sequence
  Description of Artificial Sequence: Synthetic oligonucleotide
caagcagagcauaaauaau

SEQ ID NO: 2171920 - RNA, 19 nt, Artificial Sequence
  Description of Artificial Sequence: Synthetic oligonucleotide
cccucuuguugcaucgagg

SEQ ID NO: 2171921 - RNA, 19 nt, Artificial Sequence
  Description of Artificial Sequence: Synthetic oligonucleotide
uccgcgcccuccacccgcg

SEQ ID NO: 2171922 - RNA, 19 nt, Artificial Sequence
  Description of Artificial Sequence: Synthetic oligonucleotide
acccgcgcucgucucggcg

SEQ ID NO: 2171923 - RNA, 19 nt, Artificial Sequence
  Description of Artificial Sequence: Synthetic oligonucleotide
ucccacagcaccgguguuc

SEQ ID NO: 2171924 - RNA, 19 nt, Artificial Sequence
  Description of Artificial Sequence: Synthetic oligonucleotide
cagagagcucaccuucuca

SEQ ID NO: 2171925 - RNA, 19 nt, Artificial Sequence
  Description of Artificial Sequence: Synthetic oligonucleotide
agggucccguaggcgaccc

SEQ ID NO: 2171926 - RNA, 19 nt, Artificial Sequence
  Description of Artificial Sequence: Synthetic oligonucleotide
aucgguccgcgcccuccac

SEQ ID NO: 2171927 - RNA, 19 nt, Artificial Sequence
  Description of Artificial Sequence: Synthetic oligonucleotide
uaggagcgccaccucggaa

SEQ ID NO: 2171928 - RNA, 19 nt, Artificial Sequence
  Description of Artificial Sequence: Synthetic oligonucleotide
gccauggucggugcgcucg

SEQ ID NO: 2171929 - RNA, 19 nt, Artificial Sequence
  Description of Artificial Sequence: Synthetic oligonucleotide
gccaucaccggcaagcaga

SEQ ID NO: 2171930 - RNA, 19 nt, Artificial Sequence
  Description of Artificial Sequence: Synthetic oligonucleotide
agcgcaagcagggccggug

SEQ ID NO: 2171931 - RNA, 19 nt, Artificial Sequence
  Description of Artificial Sequence: Synthetic oligonucleotide
gcagcgcucacacuugaga

SEQ ID NO: 2171932 - RNA, 19 nt, Artificial Sequence
  Description of Artificial Sequence: Synthetic oligonucleotide
cuucccacagcaccggugu

SEQ ID NO: 2171933 - RNA, 19 nt, Artificial Sequence
  Description of Artificial Sequence: Synthetic oligonucleotide
ugcgcucgaucgguccgcg

SEQ ID NO: 2171934 - RNA, 19 nt, Artificial Sequence
  Description of Artificial Sequence: Synthetic oligonucleotide
ugggcaugugugggcaaca

SEQ ID NO: 2171935 - RNA, 19 nt, Artificial Sequence
  Description of Artificial Sequence: Synthetic oligonucleotide
gagcagcgcucacagcgca

SEQ ID NO: 2171936 - RNA, 19 nt, Artificial Sequence
  Description of Artificial Sequence: Synthetic oligonucleotide
caaaguacacccucuuguu

SEQ ID NO: 2171937 - RNA, 19 nt, Artificial Sequence
  Description of Artificial Sequence: Synthetic oligonucleotide
gccgucaugcucagcaugc

SEQ ID NO: 2171938 - RNA, 19 nt, Artificial Sequence
  Description of Artificial Sequence: Synthetic oligonucleotide
cagagaggucaccuucuca

SEQ ID NO: 2171939 - RNA, 19 nt, Artificial Sequence
  Description of Artificial Sequence: Synthetic oligonucleotide
acagcgcaagcagggccgg

SEQ ID NO: 2171940 - RNA, 19 nt, Artificial Sequence
  Description of Artificial Sequence: Synthetic oligonucleotide
ugggacacuuggaggccau

SEQ ID NO: 2171941 - RNA, 19 nt, Artificial Sequence
  Description of Artificial Sequence: Synthetic oligonucleotide
uggccaucaccggcaagca

SEQ ID NO: 2171942 - RNA, 19 nt, Artificial Sequence
  Description of Artificial Sequence: Synthetic oligonucleotide
gaucgguccgcgcccucca

SEQ ID NO: 2171943 - RNA, 19 nt, Artificial Sequence
  Description of Artificial Sequence: Synthetic oligonucleotide
gucucggcgccgccgcccg

SEQ ID NO: 2171944 - RNA, 19 nt, Artificial Sequence
  Description of Artificial Sequence: Synthetic oligonucleotide
ggccgucaugcucagcaug

SEQ ID NO: 2171945 - RNA, 19 nt, Artificial Sequence
  Description of Artificial Sequence: Synthetic oligonucleotide
gggccggugaucugagggc

SEQ ID NO: 2171946 - RNA, 19 nt, Artificial Sequence
  Description of Artificial Sequence: Synthetic oligonucleotide
gccggugccaguccuugcc

SEQ ID NO: 2171947 - RNA, 19 nt, Artificial Sequence
  Description of Artificial Sequence: Synthetic oligonucleotide
uccgcuccucgguucgcac

SEQ ID NO: 2171948 - RNA, 19 nt, Artificial Sequence
  Description of Artificial Sequence: Synthetic oligonucleotide
cucguagauguaggaacca

SEQ ID NO: 2171949 - RNA, 19 nt, Artificial Sequence
  Description of Artificial Sequence: Synthetic oligonucleotide
guugcaucgaggacacaua

SEQ ID NO: 2171950 - RNA, 19 nt, Artificial Sequence
  Description of Artificial Sequence: Synthetic oligonucleotide
ccuucucagcaaaguacac

SEQ ID NO: 2171951 - RNA, 19 nt, Artificial Sequence
  Description of Artificial Sequence: Synthetic oligonucleotide
gacagcaucugcagaucua

SEQ ID NO: 2171952 - RNA, 19 nt, Artificial Sequence
  Description of Artificial Sequence: Synthetic oligonucleotide
gcagagcauaaauaauacu

SEQ ID NO: 2171953 - RNA, 19 nt, Artificial Sequence
  Description of Artificial Sequence: Synthetic oligonucleotide
cauggccaucaccggcaag

SEQ ID NO: 2171954 - RNA, 19 nt, Artificial Sequence
  Description of Artificial Sequence: Synthetic oligonucleotide
ccuuccgcuccucgguucg

SEQ ID NO: 2171955 - RNA, 19 nt, Artificial Sequence
  Description of Artificial Sequence: Synthetic oligonucleotide
guccgcgcccuccacccgc

SEQ ID NO: 2171956 - RNA, 19 nt, Artificial Sequence
  Description of Artificial Sequence: Synthetic oligonucleotide
ccucgguucgcaccacagg

SEQ ID NO: 2171957 - RNA, 19 nt, Artificial Sequence
  Description of Artificial Sequence: Synthetic oligonucleotide
ggcagcgggucguuuuccc

SEQ ID NO: 2171958 - RNA, 19 nt, Artificial Sequence
  Description of Artificial Sequence: Synthetic oligonucleotide
uuccgcuccucgguucgca

SEQ ID NO: 2171959 - RNA, 19 nt, Artificial Sequence
  Description of Artificial Sequence: Synthetic oligonucleotide
cagucagaggcuucucgua

SEQ ID NO: 2171960 - RNA, 19 nt, Artificial Sequence
  Description of Artificial Sequence: Synthetic oligonucleotide
gugggcaugugugggcaac

SEQ ID NO: 2171961 - RNA, 19 nt, Artificial Sequence
  Description of Artificial Sequence: Synthetic oligonucleotide
gggaccucgauggggccgg

SEQ ID NO: 2171962 - RNA, 19 nt, Artificial Sequence
  Description of Artificial Sequence: Synthetic oligonucleotide
cagcgcucacagcgcaagc

SEQ ID NO: 2171963 - RNA, 19 nt, Artificial Sequence
  Description of Artificial Sequence: Synthetic oligonucleotide
ggucccguaggcgacccug

SEQ ID NO: 2171964 - RNA, 19 nt, Artificial Sequence
  Description of Artificial Sequence: Synthetic oligonucleotide
cuagggcugaacugugccu

SEQ ID NO: 2171965 - RNA, 19 nt, Artificial Sequence
  Description of Artificial Sequence: Synthetic oligonucleotide
uggccgucaugcucagcau

SEQ ID NO: 2171966 - RNA, 19 nt, Artificial Sequence
  Description of Artificial Sequence: Synthetic oligonucleotide
ucggugcgcucgaucgguc

SEQ ID NO: 2171967 - RNA, 19 nt, Artificial Sequence
  Description of Artificial Sequence: Synthetic oligonucleotide
cacgugcacccugggaaug

SEQ ID NO: 2171968 - RNA, 19 nt, Artificial Sequence
  Description of Artificial Sequence: Synthetic oligonucleotide
gguccaaagagaauuccau

SEQ ID NO: 2171969 - RNA, 19 nt, Artificial Sequence
  Description of Artificial Sequence: Synthetic oligonucleotide
gcagcgcucacagcgcaag

SEQ ID NO: 2171970 - RNA, 19 nt, Artificial Sequence
  Description of Artificial Sequence: Synthetic oligonucleotide
gcucgaucgguccgcgccc

SEQ ID NO: 2171971 - RNA, 19 nt, Artificial Sequence
  Description of Artificial Sequence: Synthetic oligonucleotide
cagggcuaggcagcggguc

SEQ ID NO: 2171972 - RNA, 19 nt, Artificial Sequence
  Description of Artificial Sequence: Synthetic oligonucleotide
ggccggugaucugagggcc

SEQ ID NO: 2171973 - RNA, 19 nt, Artificial Sequence
  Description of Artificial Sequence: Synthetic oligonucleotide
ggagcagcgcucacagcgc

SEQ ID NO: 2171974 - RNA, 19 nt, Artificial Sequence
  Description of Artificial Sequence: Synthetic oligonucleotide
cccgccaggggucaguguc

SEQ ID NO: 2171975 - RNA, 19 nt, Artificial Sequence
  Description of Artificial Sequence: Synthetic oligonucleotide
gugacgcucgaggcuuugc

SEQ ID NO: 2171976 - RNA, 19 nt, Artificial Sequence
  Description of Artificial Sequence: Synthetic oligonucleotide
gcucacacuugagacagaa

SEQ ID NO: 2171977 - RNA, 19 nt, Artificial Sequence
  Description of Artificial Sequence: Synthetic oligonucleotide
ggacacauauuggguuccc

SEQ ID NO: 2171978 - RNA, 19 nt, Artificial Sequence
  Description of Artificial Sequence: Synthetic oligonucleotide
ucgucucggcgccgccgcc

SEQ ID NO: 2171979 - RNA, 19 nt, Artificial Sequence
  Description of Artificial Sequence: Synthetic oligonucleotide
cgcucgaucgguccgcgcc

SEQ ID NO: 2171980 - RNA, 19 nt, Artificial Sequence
  Description of Artificial Sequence: Synthetic oligonucleotide
ugcccgccaggggucagug

SEQ ID NO: 2171981 - RNA, 19 nt, Artificial Sequence
  Description of Artificial Sequence: Synthetic oligonucleotide
ggguccgcuggccuuccgc

SEQ ID NO: 2171982 - RNA, 19 nt, Artificial Sequence
  Description of Artificial Sequence: Synthetic oligonucleotide
accggcaagcagagcauaa

SEQ ID NO: 2171983 - RNA, 19 nt, Artificial Sequence
  Description of Artificial Sequence: Synthetic oligonucleotide
ggagcgccaccucggaaga

SEQ ID NO: 2171984 - RNA, 19 nt, Artificial Sequence
  Description of Artificial Sequence: Synthetic oligonucleotide
gguucgcaccacagggacc

SEQ ID NO: 2171985 - RNA, 19 nt, Artificial Sequence
  Description of Artificial Sequence: Synthetic oligonucleotide
auggggccggugaucugag

SEQ ID NO: 2171986 - RNA, 19 nt, Artificial Sequence
  Description of Artificial Sequence: Synthetic oligonucleotide
cugagggcccucagucaga

SEQ ID NO: 2171987 - RNA, 19 nt, Artificial Sequence
  Description of Artificial Sequence: Synthetic oligonucleotide
ggguccaaacaguguggca

SEQ ID NO: 2171988 - RNA, 19 nt, Artificial Sequence
  Description of Artificial Sequence: Synthetic oligonucleotide
gcgcaagcagggccggugc

SEQ ID NO: 2171989 - RNA, 19 nt, Artificial Sequence
  Description of Artificial Sequence: Synthetic oligonucleotide
ggauaucauaggagcgcca

SEQ ID NO: 2171990 - RNA, 19 nt, Artificial Sequence
  Description of Artificial Sequence: Synthetic oligonucleotide
guuuucccucagggucccg

SEQ ID NO: 2171991 - RNA, 19 nt, Artificial Sequence
  Description of Artificial Sequence: Synthetic oligonucleotide
cagggucccguaggcgacc

SEQ ID NO: 2171992 - RNA, 19 nt, Artificial Sequence
  Description of Artificial Sequence: Synthetic oligonucleotide
gugcgcucgaucgguccgc

SEQ ID NO: 2171993 - RNA, 19 nt, Artificial Sequence
  Description of Artificial Sequence: Synthetic oligonucleotide
cuuccgcuccucgguucgc

SEQ ID NO: 2171994 - RNA, 19 nt, Artificial Sequence
  Description of Artificial Sequence: Synthetic oligonucleotide
cgguucgcaccacagggac

SEQ ID NO: 2171995 - RNA, 19 nt, Artificial Sequence
  Description of Artificial Sequence: Synthetic oligonucleotide
uggugacgcucgaggcuuu

SEQ ID NO: 2171996 - RNA, 19 nt, Artificial Sequence
  Description of Artificial Sequence: Synthetic oligonucleotide
cuaggcagcgggucguuuu

SEQ ID NO: 2171997 - RNA, 19 nt, Artificial Sequence
  Description of Artificial Sequence: Synthetic oligonucleotide
caucaccggcaagcagagc

SEQ ID NO: 2171998 - RNA, 19 nt, Artificial Sequence
  Description of Artificial Sequence: Synthetic oligonucleotide
cccgcgcucgucucggcgc

SEQ ID NO: 2171999 - RNA, 19 nt, Artificial Sequence
  Description of Artificial Sequence: Synthetic oligonucleotide
ucgaucgguccgcgcccuc

SEQ ID NO: 2172000 - RNA, 19 nt, Artificial Sequence
  Description of Artificial Sequence: Synthetic oligonucleotide
cggucuugucacacuuggg

SEQ ID NO: 2172001 - RNA, 19 nt, Artificial Sequence
  Description of Artificial Sequence: Synthetic oligonucleotide
gaccucgauggggccggug

SEQ ID NO: 2172002 - RNA, 19 nt, Artificial Sequence
  Description of Artificial Sequence: Synthetic oligonucleotide
cuccacccgcgcucgucuc

SEQ ID NO: 2172003 - RNA, 19 nt, Artificial Sequence
  Description of Artificial Sequence: Synthetic oligonucleotide
guggugacgcucgaggcuu

SEQ ID NO: 2172004 - RNA, 19 nt, Artificial Sequence
  Description of Artificial Sequence: Synthetic oligonucleotide
ccggugccaguccuugccc

SEQ ID NO: 2172005 - RNA, 19 nt, Artificial Sequence
  Description of Artificial Sequence: Synthetic oligonucleotide
ccucagggucccguaggcg

SEQ ID NO: 2172006 - RNA, 19 nt, Artificial Sequence
  Description of Artificial Sequence: Synthetic oligonucleotide
gcucgucucggcgccgccg

SEQ ID NO: 2172007 - RNA, 19 nt, Artificial Sequence
  Description of Artificial Sequence: Synthetic oligonucleotide
aggcgacccugaggacagc

SEQ ID NO: 2172008 - RNA, 19 nt, Artificial Sequence
  Description of Artificial Sequence: Synthetic oligonucleotide
gggcaacagggauaucaua

SEQ ID NO: 2172009 - RNA, 19 nt, Artificial Sequence
  Description of Artificial Sequence: Synthetic oligonucleotide
uucacaccuuuggguccaa

SEQ ID NO: 2172010 - RNA, 19 nt, Artificial Sequence
  Description of Artificial Sequence: Synthetic oligonucleotide
gguccgcgcccuccacccg

SEQ ID NO: 2172011 - RNA, 19 nt, Artificial Sequence
  Description of Artificial Sequence: Synthetic oligonucleotide
gguccgcuggccuuccgcu

SEQ ID NO: 2172012 - RNA, 19 nt, Artificial Sequence
  Description of Artificial Sequence: Synthetic oligonucleotide
cggaagaagcuaucgggaa

SEQ ID NO: 2172013 - RNA, 19 nt, Artificial Sequence
  Description of Artificial Sequence: Synthetic oligonucleotide
gguuugcaggcaagacaca

SEQ ID NO: 2172014 - RNA, 19 nt, Artificial Sequence
  Description of Artificial Sequence: Synthetic oligonucleotide
gccaccucggaagaagcua

SEQ ID NO: 2172015 - RNA, 19 nt, Artificial Sequence
  Description of Artificial Sequence: Synthetic oligonucleotide
ggugacgcucgaggcuuug

SEQ ID NO: 2172016 - RNA, 19 nt, Artificial Sequence
  Description of Artificial Sequence: Synthetic oligonucleotide
cgguccgcgcccuccaccc

SEQ ID NO: 2172017 - RNA, 19 nt, Artificial Sequence
  Description of Artificial Sequence: Synthetic oligonucleotide
gcagggccggugccagucc

SEQ ID NO: 2172018 - RNA, 19 nt, Artificial Sequence
  Description of Artificial Sequence: Synthetic oligonucleotide
guccuugcccagagagcuc

SEQ ID NO: 2172019 - RNA, 19 nt, Artificial Sequence
  Description of Artificial Sequence: Synthetic oligonucleotide
caugcccgccaggggucag

SEQ ID NO: 2172020 - RNA, 19 nt, Artificial Sequence
  Description of Artificial Sequence: Synthetic oligonucleotide
ugugggcaacagggauauc

SEQ ID NO: 2172021 - RNA, 19 nt, Artificial Sequence
  Description of Artificial Sequence: Synthetic oligonucleotide
gggccggugccaguccuug

SEQ ID NO: 2172022 - RNA, 19 nt, Artificial Sequence
  Description of Artificial Sequence: Synthetic oligonucleotide
cccggucguccauuggcuc

SEQ ID NO: 2172023 - RNA, 19 nt, Artificial Sequence
  Description of Artificial Sequence: Synthetic oligonucleotide
cacccgcgcucgucucggc

SEQ ID NO: 2172024 - RNA, 19 nt, Artificial Sequence
  Description of Artificial Sequence: Synthetic oligonucleotide
ggcuggccgucaugcucag

SEQ ID NO: 2172025 - RNA, 19 nt, Artificial Sequence
  Description of Artificial Sequence: Synthetic oligonucleotide
gcucaccuucucagcgaag

SEQ ID NO: 2172026 - RNA, 19 nt, Artificial Sequence
  Description of Artificial Sequence: Synthetic oligonucleotide
agcagcgcucacagcgcaa

SEQ ID NO: 2172027 - RNA, 19 nt, Artificial Sequence
  Description of Artificial Sequence: Synthetic oligonucleotide
ccgucaugcucagcaugcc

SEQ ID NO: 2172028 - RNA, 19 nt, Artificial Sequence
  Description of Artificial Sequence: Synthetic oligonucleotide
cggugcgcucgaucggucc

SEQ ID NO: 2172029 - RNA, 19 nt, Artificial Sequence
  Description of Artificial Sequence: Synthetic oligonucleotide
gccggugaucugagggccc

SEQ ID NO: 2172030 - RNA, 19 nt, Artificial Sequence
  Description of Artificial Sequence: Synthetic oligonucleotide
cacccucuuguugcaucga

SEQ ID NO: 2172031 - RNA, 19 nt, Artificial Sequence
  Description of Artificial Sequence: Synthetic oligonucleotide
uucgcaccacagggaccuc

SEQ ID NO: 2172032 - RNA, 19 nt, Artificial Sequence
  Description of Artificial Sequence: Synthetic oligonucleotide
cagcgaaguacacggucuu

SEQ ID NO: 2172033 - RNA, 19 nt, Artificial Sequence
  Description of Artificial Sequence: Synthetic oligonucleotide
ccacccgcgcucgucucgg

SEQ ID NO: 2172034 - RNA, 19 nt, Artificial Sequence
  Description of Artificial Sequence: Synthetic oligonucleotide
cugcagaucuagggcugaa

SEQ ID NO: 2172035 - RNA, 19 nt, Artificial Sequence
  Description of Artificial Sequence: Synthetic oligonucleotide
gccaggggucagugucuug

SEQ ID NO: 2172036 - RNA, 19 nt, Artificial Sequence
  Description of Artificial Sequence: Synthetic oligonucleotide
ccaccucggaagaagcuau

SEQ ID NO: 2172037 - RNA, 19 nt, Artificial Sequence
  Description of Artificial Sequence: Synthetic oligonucleotide
gcagcgggucguuuucccu

SEQ ID NO: 2172038 - RNA, 19 nt, Artificial Sequence
  Description of Artificial Sequence: Synthetic oligonucleotide
cgaggacacauauuggguu

SEQ ID NO: 2172039 - RNA, 19 nt, Artificial Sequence
  Description of Artificial Sequence: Synthetic oligonucleotide
gcgggucguuuucccucag

SEQ ID NO: 2172040 - RNA, 19 nt, Artificial Sequence
  Description of Artificial Sequence: Synthetic oligonucleotide
caccggcaagcagagcaua

SEQ ID NO: 2172041 - RNA, 19 nt, Artificial Sequence
  Description of Artificial Sequence: Synthetic oligonucleotide
gguccuugucauagauaua

SEQ ID NO: 2172042 - RNA, 19 nt, Artificial Sequence
  Description of Artificial Sequence: Synthetic oligonucleotide
ccgcgcucgucucggcgcc

SEQ ID NO: 2172043 - RNA, 19 nt, Artificial Sequence
  Description of Artificial Sequence: Synthetic oligonucleotide
gggguccgcuggccuuccg

SEQ ID NO: 2172044 - RNA, 19 nt, Artificial Sequence
  Description of Artificial Sequence: Synthetic oligonucleotide
cguaggcgacccugaggac

SEQ ID NO: 2172045 - RNA, 19 nt, Artificial Sequence
  Description of Artificial Sequence: Synthetic oligonucleotide
cgaucgguccgcgcccucc

SEQ ID NO: 2172046 - RNA, 19 nt, Artificial Sequence
  Description of Artificial Sequence: Synthetic oligonucleotide
gcgccugcccugcccgccc

SEQ ID NO: 2172047 - RNA, 19 nt, Artificial Sequence
  Description of Artificial Sequence: Synthetic oligonucleotide
guacacccucuuguugcau

SEQ ID NO: 2172048 - RNA, 19 nt, Artificial Sequence
  Description of Artificial Sequence: Synthetic oligonucleotide
ccucagucagaggcuucuc

SEQ ID NO: 2172049 - RNA, 19 nt, Artificial Sequence
  Description of Artificial Sequence: Synthetic oligonucleotide
cagggccggugccaguccu

SEQ ID NO: 2172050 - RNA, 19 nt, Artificial Sequence
  Description of Artificial Sequence: Synthetic oligonucleotide
gcgucuuguugcagcgcuc

SEQ ID NO: 2172051 - RNA, 19 nt, Artificial Sequence
  Description of Artificial Sequence: Synthetic oligonucleotide
gcgcucgaucgguccgcgc

SEQ ID NO: 2172052 - RNA, 19 nt, Artificial Sequence
  Description of Artificial Sequence: Synthetic oligonucleotide
ccggcaagcagagcauaaa

SEQ ID NO: 2172053 - RNA, 19 nt, Artificial Sequence
  Description of Artificial Sequence: Synthetic oligonucleotide
agggccggugccaguccuu

SEQ ID NO: 2172054 - RNA, 19 nt, Artificial Sequence
  Description of Artificial Sequence: Synthetic oligonucleotide
cucgaucgguccgcgcccu

SEQ ID NO: 2172055 - RNA, 19 nt, Artificial Sequence
  Description of Artificial Sequence: Synthetic oligonucleotide
ccauggucggugcgcucga

SEQ ID NO: 2172056 - RNA, 19 nt, Artificial Sequence
  Description of Artificial Sequence: Synthetic oligonucleotide
gcgcucgucucggcgccgc

SEQ ID NO: 2172057 - RNA, 19 nt, Artificial Sequence
  Description of Artificial Sequence: Synthetic oligonucleotide
cccucagucagaggcuucu

SEQ ID NO: 2172058 - RNA, 19 nt, Artificial Sequence
  Description of Artificial Sequence: Synthetic oligonucleotide
gcuggccgucaugcucagc

SEQ ID NO: 2172059 - RNA, 19 nt, Artificial Sequence
  Description of Artificial Sequence: Synthetic oligonucleotide
ccccuauauucacaccuuu

SEQ ID NO: 2172060 - RNA, 19 nt, Artificial Sequence
  Description of Artificial Sequence: Synthetic oligonucleotide
gcccucagucagaggcuuc

SEQ ID NO: 2172061 - RNA, 19 nt, Artificial Sequence
  Description of Artificial Sequence: Synthetic oligonucleotide
ccccggucguccauuggcu

SEQ ID NO: 2172062 - RNA, 19 nt, Artificial Sequence
  Description of Artificial Sequence: Synthetic oligonucleotide
ccguagcugugaaccacgu

SEQ ID NO: 2172063 - RNA, 19 nt, Artificial Sequence
  Description of Artificial Sequence: Synthetic oligonucleotide
ccuccacccgcgcucgucu

SEQ ID NO: 2172064 - RNA, 19 nt, Artificial Sequence
  Description of Artificial Sequence: Synthetic oligonucleotide
gcaccgguguucacucccu

SEQ ID NO: 2172065 - RNA, 19 nt, Artificial Sequence
  Description of Artificial Sequence: Synthetic oligonucleotide
gggcuaggcagcgggucgu

SEQ ID NO: 2172066 - RNA, 19 nt, Artificial Sequence
  Description of Artificial Sequence: Synthetic oligonucleotide
caccgguguucacucccuu

SEQ ID NO: 2172067 - RNA, 19 nt, Artificial Sequence
  Description of Artificial Sequence: Synthetic oligonucleotide
ccgcgccugcccugcccgc

SEQ ID NO: 2172068 - RNA, 19 nt, Artificial Sequence
  Description of Artificial Sequence: Synthetic oligonucleotide
gcagggcuaggcagcgggu

SEQ ID NO: 2172069 - RNA, 19 nt, Artificial Sequence
  Description of Artificial Sequence: Synthetic oligonucleotide
cauggucggugcgcucgau

SEQ ID NO: 2172070 - RNA, 19 nt, Artificial Sequence
  Description of Artificial Sequence: Synthetic oligonucleotide
ccgcccgcgccugcccugc

SEQ ID NO: 2172071 - RNA, 19 nt, Artificial Sequence
  Description of Artificial Sequence: Synthetic oligonucleotide
gcgacccugaggacagcau

SEQ ID NO: 2172072 - RNA, 19 nt, Artificial Sequence
  Description of Artificial Sequence: Synthetic oligonucleotide
ccggugaucugagggcccu

SEQ ID NO: 2172073 - RNA, 19 nt, Artificial Sequence
  Description of Artificial Sequence: Synthetic oligonucleotide
gcuaggcagcgggucguuu

SEQ ID NO: 2172074 - RNA, 19 nt, Artificial Sequence
  Description of Artificial Sequence: Synthetic oligonucleotide
cgcgcucgucucggcgccg

SEQ ID NO: 2172075 - RNA, 19 nt, Artificial Sequence
  Description of Artificial Sequence: Synthetic oligonucleotide
gggucccguaggcgacccu

SEQ ID NO: 2172076 - RNA, 19 nt, Artificial Sequence
  Description of Artificial Sequence: Synthetic oligonucleotide
cagcgcaagcagggccggu

SEQ ID NO: 2172077 - RNA, 19 nt, Artificial Sequence
  Description of Artificial Sequence: Synthetic oligonucleotide
gcccgccaggggucagugu

SEQ ID NO: 2172078 - RNA, 19 nt, Artificial Sequence
  Description of Artificial Sequence: Synthetic oligonucleotide
cgugcacccugggaaugcu

SEQ ID NO: 2172079 - RNA, 19 nt, Artificial Sequence
  Description of Artificial Sequence: Synthetic oligonucleotide
cgcgcccuccacccgcgcu

SEQ ID NO: 2172080 - RNA, 19 nt, Artificial Sequence
  Description of Artificial Sequence: Synthetic oligonucleotide
gcccuccacccgcgcucgu

SEQ ID NO: 2172081 - RNA, 19 nt, Artificial Sequence
  Description of Artificial Sequence: Synthetic oligonucleotide
aaagucuugcucuugagga

SEQ ID NO: 2172082 - RNA, 19 nt, Artificial Sequence
  Description of Artificial Sequence: Synthetic oligonucleotide
aauauucuugucugggagg

SEQ ID NO: 2172083 - RNA, 19 nt, Artificial Sequence
  Description of Artificial Sequence: Synthetic oligonucleotide
aguaucacaagcucccagc

SEQ ID NO: 2172084 - RNA, 19 nt, Artificial Sequence
  Description of Artificial Sequence: Synthetic oligonucleotide
ugugaaacacccuugguca

SEQ ID NO: 2172085 - RNA, 19 nt, Artificial Sequence
  Description of Artificial Sequence: Synthetic oligonucleotide
ucaacgacucauaggaggg

SEQ ID NO: 2172086 - RNA, 19 nt, Artificial Sequence
  Description of Artificial Sequence: Synthetic oligonucleotide
aaaggcucaauagagggag

SEQ ID NO: 2172087 - RNA, 19 nt, Artificial Sequence
  Description of Artificial Sequence: Synthetic oligonucleotide
gaauauucuugucugggag

SEQ ID NO: 2172088 - RNA, 19 nt, Artificial Sequence
  Description of Artificial Sequence: Synthetic oligonucleotide
gaaaccagggacuagguuc

SEQ ID NO: 2172089 - RNA, 19 nt, Artificial Sequence
  Description of Artificial Sequence: Synthetic oligonucleotide
uugucugggagguugaucc

SEQ ID NO: 2172090 - RNA, 19 nt, Artificial Sequence
  Description of Artificial Sequence: Synthetic oligonucleotide
acauacgccacugagaaag

SEQ ID NO: 2172091 - RNA, 19 nt, Artificial Sequence
  Description of Artificial Sequence: Synthetic oligonucleotide
cauaguaccgugaggaagc

SEQ ID NO: 2172092 - RNA, 19 nt, Artificial Sequence
  Description of Artificial Sequence: Synthetic oligonucleotide
aucacaagcucccagcauc

SEQ ID NO: 2172093 - RNA, 19 nt, Artificial Sequence
  Description of Artificial Sequence: Synthetic oligonucleotide
ugauccuucgaacuuugag

SEQ ID NO: 2172094 - RNA, 19 nt, Artificial Sequence
  Description of Artificial Sequence: Synthetic oligonucleotide
aaaccagggacuagguucc

SEQ ID NO: 2172095 - RNA, 19 nt, Artificial Sequence
  Description of Artificial Sequence: Synthetic oligonucleotide
aguuuugccuguccggagc

SEQ ID NO: 2172096 - RNA, 19 nt, Artificial Sequence
  Description of Artificial Sequence: Synthetic oligonucleotide
uuucagauuugauccuucg

SEQ ID NO: 2172097 - RNA, 19 nt, Artificial Sequence
  Description of Artificial Sequence: Synthetic oligonucleotide
uuugagugguuucaggcgu

SEQ ID NO: 2172098 - RNA, 19 nt, Artificial Sequence
  Description of Artificial Sequence: Synthetic oligonucleotide
uucucugcagcgcugaaac

SEQ ID NO: 2172099 - RNA, 19 nt, Artificial Sequence
  Description of Artificial Sequence: Synthetic oligonucleotide
auccuucgaacuuugagug

SEQ ID NO: 2172100 - RNA, 19 nt, Artificial Sequence
  Description of Artificial Sequence: Synthetic oligonucleotide
cagaguaucacaagcuccc

SEQ ID NO: 2172101 - RNA, 19 nt, Artificial Sequence
  Description of Artificial Sequence: Synthetic oligonucleotide
agauuugauccuucgaacu

SEQ ID NO: 2172102 - RNA, 19 nt, Artificial Sequence
  Description of Artificial Sequence: Synthetic oligonucleotide
uggaccucgucauacugcg

SEQ ID NO: 2172103 - RNA, 19 nt, Artificial Sequence
  Description of Artificial Sequence: Synthetic oligonucleotide
cacauggccaugaucaccc

SEQ ID NO: 2172104 - RNA, 19 nt, Artificial Sequence
  Description of Artificial Sequence: Synthetic oligonucleotide
agagggaggaggaauauuc

SEQ ID NO: 2172105 - RNA, 19 nt, Artificial Sequence
  Description of Artificial Sequence: Synthetic oligonucleotide
aagucuuugaggugaaguu

SEQ ID NO: 2172106 - RNA, 19 nt, Artificial Sequence
  Description of Artificial Sequence: Synthetic oligonucleotide
agucaaaggcucaauagag

SEQ ID NO: 2172107 - RNA, 19 nt, Artificial Sequence
  Description of Artificial Sequence: Synthetic oligonucleotide
aguaccgugaggaagccuc

SEQ ID NO: 2172108 - RNA, 19 nt, Artificial Sequence
  Description of Artificial Sequence: Synthetic oligonucleotide
gagagagaugcuuagucuc

SEQ ID NO: 2172109 - RNA, 19 nt, Artificial Sequence
  Description of Artificial Sequence: Synthetic oligonucleotide
gagucaaaggcucaauaga

SEQ ID NO: 2172110 - RNA, 19 nt, Artificial Sequence
  Description of Artificial Sequence: Synthetic oligonucleotide
uuugauccuucgaacuuug

SEQ ID NO: 2172111 - RNA, 19 nt, Artificial Sequence
  Description of Artificial Sequence: Synthetic oligonucleotide
guacauaguaccgugagga

SEQ ID NO: 2172112 - RNA, 19 nt, Artificial Sequence
  Description of Artificial Sequence: Synthetic oligonucleotide
uucagauuugauccuucga

SEQ ID NO: 2172113 - RNA, 19 nt, Artificial Sequence
  Description of Artificial Sequence: Synthetic oligonucleotide
uagcuggguacauaguacc

SEQ ID NO: 2172114 - RNA, 19 nt, Artificial Sequence
  Description of Artificial Sequence: Synthetic oligonucleotide
ggagucaaaggcucaauag

SEQ ID NO: 2172115 - RNA, 19 nt, Artificial Sequence
  Description of Artificial Sequence: Synthetic oligonucleotide
cugugaaacacccuugguc

SEQ ID NO: 2172116 - RNA, 19 nt, Artificial Sequence
  Description of Artificial Sequence: Synthetic oligonucleotide
ggaggaauauucuugucug

SEQ ID NO: 2172117 - RNA, 19 nt, Artificial Sequence
  Description of Artificial Sequence: Synthetic oligonucleotide
gacuagguuccacauggcc

SEQ ID NO: 2172118 - RNA, 19 nt, Artificial Sequence
  Description of Artificial Sequence: Synthetic oligonucleotide
uacgccacugagaaagucu

SEQ ID NO: 2172119 - RNA, 19 nt, Artificial Sequence
  Description of Artificial Sequence: Synthetic oligonucleotide
cuucggugcagucugucgg

SEQ ID NO: 2172120 - RNA, 19 nt, Artificial Sequence
  Description of Artificial Sequence: Synthetic oligonucleotide
cagauuugauccuucgaac

SEQ ID NO: 2172121 - RNA, 19 nt, Artificial Sequence
  Description of Artificial Sequence: Synthetic oligonucleotide
ucugcagcgcugaaaccag

SEQ ID NO: 2172122 - RNA, 19 nt, Artificial Sequence
  Description of Artificial Sequence: Synthetic oligonucleotide
cucugugaaacacccuugg

SEQ ID NO: 2172123 - RNA, 19 nt, Artificial Sequence
  Description of Artificial Sequence: Synthetic oligonucleotide
agcgccgaccagcacauac

SEQ ID NO: 2172124 - RNA, 19 nt, Artificial Sequence
  Description of Artificial Sequence: Synthetic oligonucleotide
ugaugcucccgcuacguga

SEQ ID NO: 2172125 - RNA, 19 nt, Artificial Sequence
  Description of Artificial Sequence: Synthetic oligonucleotide
gauccuucgaacuuugagu

SEQ ID NO: 2172126 - RNA, 19 nt, Artificial Sequence
  Description of Artificial Sequence: Synthetic oligonucleotide
cugguuuccgaguagccug

SEQ ID NO: 2172127 - RNA, 19 nt, Artificial Sequence
  Description of Artificial Sequence: Synthetic oligonucleotide
ugaggcucugugaaacacc

SEQ ID NO: 2172128 - RNA, 19 nt, Artificial Sequence
  Description of Artificial Sequence: Synthetic oligonucleotide
acauaguaccgugaggaag

SEQ ID NO: 2172129 - RNA, 19 nt, Artificial Sequence
  Description of Artificial Sequence: Synthetic oligonucleotide
uuggucacucccucuaccc

SEQ ID NO: 2172130 - RNA, 19 nt, Artificial Sequence
  Description of Artificial Sequence: Synthetic oligonucleotide
gcagaaaggggcaagaccc

SEQ ID NO: 2172131 - RNA, 19 nt, Artificial Sequence
  Description of Artificial Sequence: Synthetic oligonucleotide
ucacaagcucccagcaucc

SEQ ID NO: 2172132 - RNA, 19 nt, Artificial Sequence
  Description of Artificial Sequence: Synthetic oligonucleotide
cuaagugugcccugacccc

SEQ ID NO: 2172133 - RNA, 19 nt, Artificial Sequence
  Description of Artificial Sequence: Synthetic oligonucleotide
uguugcccugagcuguugg

SEQ ID NO: 2172134 - RNA, 19 nt, Artificial Sequence
  Description of Artificial Sequence: Synthetic oligonucleotide
cauggccgcagaaaggggc

SEQ ID NO: 2172135 - RNA, 19 nt, Artificial Sequence
  Description of Artificial Sequence: Synthetic oligonucleotide
uggggcugaagugacuucg

SEQ ID NO: 2172136 - RNA, 19 nt, Artificial Sequence
  Description of Artificial Sequence: Synthetic oligonucleotide
uuuucagauuugauccuuc

SEQ ID NO: 2172137 - RNA, 19 nt, Artificial Sequence
  Description of Artificial Sequence: Synthetic oligonucleotide
gaauccccaucacaguggc

SEQ ID NO: 2172138 - RNA, 19 nt, Artificial Sequence
  Description of Artificial Sequence: Synthetic oligonucleotide
gaguaucacaagcucccag

SEQ ID NO: 2172139 - RNA, 19 nt, Artificial Sequence
  Description of Artificial Sequence: Synthetic oligonucleotide
acuucggugcagucugucg

SEQ ID NO: 2172140 - RNA, 19 nt, Artificial Sequence
  Description of Artificial Sequence: Synthetic oligonucleotide
ggugaagucagaagggccg

SEQ ID NO: 2172141 - RNA, 19 nt, Artificial Sequence
  Description of Artificial Sequence: Synthetic oligonucleotide
uuuccgaguagccuguguu

SEQ ID NO: 2172142 - RNA, 19 nt, Artificial Sequence
  Description of Artificial Sequence: Synthetic oligonucleotide
ucagugcguagugugagcc

SEQ ID NO: 2172143 - RNA, 19 nt, Artificial Sequence
  Description of Artificial Sequence: Synthetic oligonucleotide
cagaauccccaucacagug

SEQ ID NO: 2172144 - RNA, 19 nt, Artificial Sequence
  Description of Artificial Sequence: Synthetic oligonucleotide
agagagaugcuuagucucg

SEQ ID NO: 2172145 - RNA, 19 nt, Artificial Sequence
  Description of Artificial Sequence: Synthetic oligonucleotide
uccuucgaacuuugagugg

SEQ ID NO: 2172146 - RNA, 19 nt, Artificial Sequence
  Description of Artificial Sequence: Synthetic oligonucleotide
ugagccguuggccuuggac

SEQ ID NO: 2172147 - RNA, 19 nt, Artificial Sequence
  Description of Artificial Sequence: Synthetic oligonucleotide
ucgucgagccccgucaacg

SEQ ID NO: 2172148 - RNA, 19 nt, Artificial Sequence
  Description of Artificial Sequence: Synthetic oligonucleotide
auauucuugucugggaggu

SEQ ID NO: 2172149 - RNA, 19 nt, Artificial Sequence
  Description of Artificial Sequence: Synthetic oligonucleotide
gagaaagucuugcucuuga

SEQ ID NO: 2172150 - RNA, 19 nt, Artificial Sequence
  Description of Artificial Sequence: Synthetic oligonucleotide
aauagagggaggaggaaua

SEQ ID NO: 2172151 - RNA, 19 nt, Artificial Sequence
  Description of Artificial Sequence: Synthetic oligonucleotide
caugaucaccccgaggacc

SEQ ID NO: 2172152 - RNA, 19 nt, Artificial Sequence
  Description of Artificial Sequence: Synthetic oligonucleotide
acgugaggcucugugaaac

SEQ ID NO: 2172153 - RNA, 19 nt, Artificial Sequence
  Description of Artificial Sequence: Synthetic oligonucleotide
gaggcucugugaaacaccc

SEQ ID NO: 2172154 - RNA, 19 nt, Artificial Sequence
  Description of Artificial Sequence: Synthetic oligonucleotide
uucugaugcucccgcuacg

SEQ ID NO: 2172155 - RNA, 19 nt, Artificial Sequence
  Description of Artificial Sequence: Synthetic oligonucleotide
aguagccuguguucaucac

SEQ ID NO: 2172156 - RNA, 19 nt, Artificial Sequence
  Description of Artificial Sequence: Synthetic oligonucleotide
cuugucuggggcugaagug

SEQ ID NO: 2172157 - RNA, 19 nt, Artificial Sequence
  Description of Artificial Sequence: Synthetic oligonucleotide
cucauucugccgaagcuuc

SEQ ID NO: 2172158 - RNA, 19 nt, Artificial Sequence
  Description of Artificial Sequence: Synthetic oligonucleotide
acuagguuccacauggcca

SEQ ID NO: 2172159 - RNA, 19 nt, Artificial Sequence
  Description of Artificial Sequence: Synthetic oligonucleotide
aagucuugcucuugaggau

SEQ ID NO: 2172160 - RNA, 19 nt, Artificial Sequence
  Description of Artificial Sequence: Synthetic oligonucleotide
aacgacucauaggagggga

SEQ ID NO: 2172161 - RNA, 19 nt, Artificial Sequence
  Description of Artificial Sequence: Synthetic oligonucleotide
agaauccccaucacagugg

SEQ ID NO: 2172162 - RNA, 19 nt, Artificial Sequence
  Description of Artificial Sequence: Synthetic oligonucleotide
cccagaauccccaucacag

SEQ ID NO: 2172163 - RNA, 19 nt, Artificial Sequence
  Description of Artificial Sequence: Synthetic oligonucleotide
gaccucgucauacugcgga

SEQ ID NO: 2172164 - RNA, 19 nt, Artificial Sequence
  Description of Artificial Sequence: Synthetic oligonucleotide
cuggguacauaguaccgug

SEQ ID NO: 2172165 - RNA, 19 nt, Artificial Sequence
  Description of Artificial Sequence: Synthetic oligonucleotide
gguacauaguaccgugagg

SEQ ID NO: 2172166 - RNA, 19 nt, Artificial Sequence
  Description of Artificial Sequence: Synthetic oligonucleotide
ugguuucaggcguuuggcc

SEQ ID NO: 2172167 - RNA, 19 nt, Artificial Sequence
  Description of Artificial Sequence: Synthetic oligonucleotide
uugauccugaagucuuuga

SEQ ID NO: 2172168 - RNA, 19 nt, Artificial Sequence
  Description of Artificial Sequence: Synthetic oligonucleotide
uuagucucggguucugcuc

SEQ ID NO: 2172169 - RNA, 19 nt, Artificial Sequence
  Description of Artificial Sequence: Synthetic oligonucleotide
aagugacuucggugcaguc

SEQ ID NO: 2172170 - RNA, 19 nt, Artificial Sequence
  Description of Artificial Sequence: Synthetic oligonucleotide
gcugaaaccagggacuagg

SEQ ID NO: 2172171 - RNA, 19 nt, Artificial Sequence
  Description of Artificial Sequence: Synthetic oligonucleotide
cuggaccucgucauacugc

SEQ ID NO: 2172172 - RNA, 19 nt, Artificial Sequence
  Description of Artificial Sequence: Synthetic oligonucleotide
uucgacuggaccucgucau

SEQ ID NO: 2172173 - RNA, 19 nt, Artificial Sequence
  Description of Artificial Sequence: Synthetic oligonucleotide
cuucugaugcucccgcuac

SEQ ID NO: 2172174 - RNA, 19 nt, Artificial Sequence
  Description of Artificial Sequence: Synthetic oligonucleotide
auaguaccgugaggaagcc

SEQ ID NO: 2172175 - RNA, 19 nt, Artificial Sequence
  Description of Artificial Sequence: Synthetic oligonucleotide
cuacccagaauccccauca

SEQ ID NO: 2172176 - RNA, 19 nt, Artificial Sequence
  Description of Artificial Sequence: Synthetic oligonucleotide
aggggagagagaugcuuag

SEQ ID NO: 2172177 - RNA, 19 nt, Artificial Sequence
  Description of Artificial Sequence: Synthetic oligonucleotide
ucgaacuuugagugguuuc

SEQ ID NO: 2172178 - RNA, 19 nt, Artificial Sequence
  Description of Artificial Sequence: Synthetic oligonucleotide
ggcaagacccagcucaaag

SEQ ID NO: 2172179 - RNA, 19 nt, Artificial Sequence
  Description of Artificial Sequence: Synthetic oligonucleotide
ucauucugccgaagcuucc

SEQ ID NO: 2172180 - RNA, 19 nt, Artificial Sequence
  Description of Artificial Sequence: Synthetic oligonucleotide
cuuggaguuuugccugucc

SEQ ID NO: 2172181 - RNA, 19 nt, Artificial Sequence
  Description of Artificial Sequence: Synthetic oligonucleotide
ugaagugacuucggugcag

SEQ ID NO: 2172182 - RNA, 19 nt, Artificial Sequence
  Description of Artificial Sequence: Synthetic oligonucleotide
cagaagggccguucagucg

SEQ ID NO: 2172183 - RNA, 19 nt, Artificial Sequence
  Description of Artificial Sequence: Synthetic oligonucleotide
cagcuuggaguuuugccug

SEQ ID NO: 2172184 - RNA, 19 nt, Artificial Sequence
  Description of Artificial Sequence: Synthetic oligonucleotide
gaguuuugccuguccggag

SEQ ID NO: 2172185 - RNA, 19 nt, Artificial Sequence
  Description of Artificial Sequence: Synthetic oligonucleotide
uggguacauaguaccguga

SEQ ID NO: 2172186 - RNA, 19 nt, Artificial Sequence
  Description of Artificial Sequence: Synthetic oligonucleotide
ugcggaggaggagucaaag

SEQ ID NO: 2172187 - RNA, 19 nt, Artificial Sequence
  Description of Artificial Sequence: Synthetic oligonucleotide
ucuacccagaauccccauc

SEQ ID NO: 2172188 - RNA, 19 nt, Artificial Sequence
  Description of Artificial Sequence: Synthetic oligonucleotide
ucagucgggaggccgggca

SEQ ID NO: 2172189 - RNA, 19 nt, Artificial Sequence
  Description of Artificial Sequence: Synthetic oligonucleotide
cagcgcugaaaccagggac

SEQ ID NO: 2172190 - RNA, 19 nt, Artificial Sequence
  Description of Artificial Sequence: Synthetic oligonucleotide
caucaggggccuucgacug

SEQ ID NO: 2172191 - RNA, 19 nt, Artificial Sequence
  Description of Artificial Sequence: Synthetic oligonucleotide
ggguacauaguaccgugag

SEQ ID NO: 2172192 - RNA, 19 nt, Artificial Sequence
  Description of Artificial Sequence: Synthetic oligonucleotide
ugagaaagucuugcucuug

SEQ ID NO: 2172193 - RNA, 19 nt, Artificial Sequence
  Description of Artificial Sequence: Synthetic oligonucleotide
uaucacaagcucccagcau

SEQ ID NO: 2172194 - RNA, 19 nt, Artificial Sequence
  Description of Artificial Sequence: Synthetic oligonucleotide
guagugugagccguuggcc

SEQ ID NO: 2172195 - RNA, 19 nt, Artificial Sequence
  Description of Artificial Sequence: Synthetic oligonucleotide
uacauaguaccgugaggaa

SEQ ID NO: 2172196 - RNA, 19 nt, Artificial Sequence
  Description of Artificial Sequence: Synthetic oligonucleotide
guaucacaagcucccagca

SEQ ID NO: 2172197 - RNA, 19 nt, Artificial Sequence
  Description of Artificial Sequence: Synthetic oligonucleotide
agugacuucggugcagucu

SEQ ID NO: 2172198 - RNA, 19 nt, Artificial Sequence
  Description of Artificial Sequence: Synthetic oligonucleotide
cucccucuacccagaaucc

SEQ ID NO: 2172199 - RNA, 19 nt, Artificial Sequence
  Description of Artificial Sequence: Synthetic oligonucleotide
ucgguguggagggugagac

SEQ ID NO: 2172200 - RNA, 19 nt, Artificial Sequence
  Description of Artificial Sequence: Synthetic oligonucleotide
guagcuggguacauaguac

SEQ ID NO: 2172201 - RNA, 19 nt, Artificial Sequence
  Description of Artificial Sequence: Synthetic oligonucleotide
agccuccuccuccuccucc

SEQ ID NO: 2172202 - RNA, 19 nt, Artificial Sequence
  Description of Artificial Sequence: Synthetic oligonucleotide
ugccgaagcuuccucuugu

SEQ ID NO: 2172203 - RNA, 19 nt, Artificial Sequence
  Description of Artificial Sequence: Synthetic oligonucleotide
uggucacucccucuaccca

SEQ ID NO: 2172204 - RNA, 19 nt, Artificial Sequence
  Description of Artificial Sequence: Synthetic oligonucleotide
gaguagccuguguucauca

SEQ ID NO: 2172205 - RNA, 19 nt, Artificial Sequence
  Description of Artificial Sequence: Synthetic oligonucleotide
gggguugucucgucgagcc

SEQ ID NO: 2172206 - RNA, 19 nt, Artificial Sequence
  Description of Artificial Sequence: Synthetic oligonucleotide
aggagucaaaggcucaaua

SEQ ID NO: 2172207 - RNA, 19 nt, Artificial Sequence
  Description of Artificial Sequence: Synthetic oligonucleotide
cuuccucguagcuggguac

SEQ ID NO: 2172208 - RNA, 19 nt, Artificial Sequence
  Description of Artificial Sequence: Synthetic oligonucleotide
agccguuggccuuggacug

SEQ ID NO: 2172209 - RNA, 19 nt, Artificial Sequence
  Description of Artificial Sequence: Synthetic oligonucleotide
agcuccggccugcuguugg

SEQ ID NO: 2172210 - RNA, 19 nt, Artificial Sequence
  Description of Artificial Sequence: Synthetic oligonucleotide
uuccgaguagccuguguuc

SEQ ID NO: 2172211 - RNA, 19 nt, Artificial Sequence
  Description of Artificial Sequence: Synthetic oligonucleotide
guugcccugagcuguuggc

SEQ ID NO: 2172212 - RNA, 19 nt, Artificial Sequence
  Description of Artificial Sequence: Synthetic oligonucleotide
ucugaugcucccgcuacgu

SEQ ID NO: 2172213 - RNA, 19 nt, Artificial Sequence
  Description of Artificial Sequence: Synthetic oligonucleotide
ugugcccugaccccuuguc

SEQ ID NO: 2172214 - RNA, 19 nt, Artificial Sequence
  Description of Artificial Sequence: Synthetic oligonucleotide
aggccgauggccgucagug

SEQ ID NO: 2172215 - RNA, 19 nt, Artificial Sequence
  Description of Artificial Sequence: Synthetic oligonucleotide
gggagagagaugcuuaguc

SEQ ID NO: 2172216 - RNA, 19 nt, Artificial Sequence
  Description of Artificial Sequence: Synthetic oligonucleotide
auuugauccuucgaacuuu

SEQ ID NO: 2172217 - RNA, 19 nt, Artificial Sequence
  Description of Artificial Sequence: Synthetic oligonucleotide
accgugaggaagccuccuc

SEQ ID NO: 2172218 - RNA, 19 nt, Artificial Sequence
  Description of Artificial Sequence: Synthetic oligonucleotide
ccgucaacgacucauagga

SEQ ID NO: 2172219 - RNA, 19 nt, Artificial Sequence
  Description of Artificial Sequence: Synthetic oligonucleotide
agugcguagugugagccgu

SEQ ID NO: 2172220 - RNA, 19 nt, Artificial Sequence
  Description of Artificial Sequence: Synthetic oligonucleotide
ugguuuccgaguagccugu

SEQ ID NO: 2172221 - RNA, 19 nt, Artificial Sequence
  Description of Artificial Sequence: Synthetic oligonucleotide
agcuggguacauaguaccg

SEQ ID NO: 2172222 - RNA, 19 nt, Artificial Sequence
  Description of Artificial Sequence: Synthetic oligonucleotide
gauuugauccuucgaacuu

SEQ ID NO: 2172223 - RNA, 19 nt, Artificial Sequence
  Description of Artificial Sequence: Synthetic oligonucleotide
gugguuucaggcguuuggc

SEQ ID NO: 2172224 - RNA, 19 nt, Artificial Sequence
  Description of Artificial Sequence: Synthetic oligonucleotide
guugauccugaagucuuug

SEQ ID NO: 2172225 - RNA, 19 nt, Artificial Sequence
  Description of Artificial Sequence: Synthetic oligonucleotide
auacgccacugagaaaguc

SEQ ID NO: 2172226 - RNA, 19 nt, Artificial Sequence
  Description of Artificial Sequence: Synthetic oligonucleotide
gcacauacgccacugagaa

SEQ ID NO: 2172227 - RNA, 19 nt, Artificial Sequence
  Description of Artificial Sequence: Synthetic oligonucleotide
agcgcugaaaccagggacu

SEQ ID NO: 2172228 - RNA, 19 nt, Artificial Sequence
  Description of Artificial Sequence: Synthetic oligonucleotide
gccgauggccgucagugcg

SEQ ID NO: 2172229 - RNA, 19 nt, Artificial Sequence
  Description of Artificial Sequence: Synthetic oligonucleotide
uugauccuucgaacuuuga

SEQ ID NO: 2172230 - RNA, 19 nt, Artificial Sequence
  Description of Artificial Sequence: Synthetic oligonucleotide
accucgucauacugcggag

SEQ ID NO: 2172231 - RNA, 19 nt, Artificial Sequence
  Description of Artificial Sequence: Synthetic oligonucleotide
gaaacacccuuggucacuc

SEQ ID NO: 2172232 - RNA, 19 nt, Artificial Sequence
  Description of Artificial Sequence: Synthetic oligonucleotide
cagugcguagugugagccg

SEQ ID NO: 2172233 - RNA, 19 nt, Artificial Sequence
  Description of Artificial Sequence: Synthetic oligonucleotide
ugugucagcccuggugccc

SEQ ID NO: 2172234 - RNA, 19 nt, Artificial Sequence
  Description of Artificial Sequence: Synthetic oligonucleotide
aguggcuaagugugcccug

SEQ ID NO: 2172235 - RNA, 19 nt, Artificial Sequence
  Description of Artificial Sequence: Synthetic oligonucleotide
cuacgugaggcucugugaa

SEQ ID NO: 2172236 - RNA, 19 nt, Artificial Sequence
  Description of Artificial Sequence: Synthetic oligonucleotide
augaucaccccgaggacca

SEQ ID NO: 2172237 - RNA, 19 nt, Artificial Sequence
  Description of Artificial Sequence: Synthetic oligonucleotide
gguugucucgucgagcccc

SEQ ID NO: 2172238 - RNA, 19 nt, Artificial Sequence
  Description of Artificial Sequence: Synthetic oligonucleotide
aucacgccagcgccgacca

SEQ ID NO: 2172239 - RNA, 19 nt, Artificial Sequence
  Description of Artificial Sequence: Synthetic oligonucleotide
gugaaacacccuuggucac

SEQ ID NO: 2172240 - RNA, 19 nt, Artificial Sequence
  Description of Artificial Sequence: Synthetic oligonucleotide
gccuguguucaucacuucc

SEQ ID NO: 2172241 - RNA, 19 nt, Artificial Sequence
  Description of Artificial Sequence: Synthetic oligonucleotide
ucugccgaagcuuccucuu

SEQ ID NO: 2172242 - RNA, 19 nt, Artificial Sequence
  Description of Artificial Sequence: Synthetic oligonucleotide
gagaugcuuagucucgggu

SEQ ID NO: 2172243 - RNA, 19 nt, Artificial Sequence
  Description of Artificial Sequence: Synthetic oligonucleotide
gucagugcguagugugagc

SEQ ID NO: 2172244 - RNA, 19 nt, Artificial Sequence
  Description of Artificial Sequence: Synthetic oligonucleotide
gggccguucagucgggagg

SEQ ID NO: 2172245 - RNA, 19 nt, Artificial Sequence
  Description of Artificial Sequence: Synthetic oligonucleotide
caguuccucauucugccga

SEQ ID NO: 2172246 - RNA, 19 nt, Artificial Sequence
  Description of Artificial Sequence: Synthetic oligonucleotide
guuuugccuguccggagca

SEQ ID NO: 2172247 - RNA, 19 nt, Artificial Sequence
  Description of Artificial Sequence: Synthetic oligonucleotide
caucacaguggcuaagugu

SEQ ID NO: 2172248 - RNA, 19 nt, Artificial Sequence
  Description of Artificial Sequence: Synthetic oligonucleotide
uggccgucagugcguagug

SEQ ID NO: 2172249 - RNA, 19 nt, Artificial Sequence
  Description of Artificial Sequence: Synthetic oligonucleotide
aggcguuuggccagcuugg

SEQ ID NO: 2172250 - RNA, 19 nt, Artificial Sequence
  Description of Artificial Sequence: Synthetic oligonucleotide
cucgucauacugcggagga

SEQ ID NO: 2172251 - RNA, 19 nt, Artificial Sequence
  Description of Artificial Sequence: Synthetic oligonucleotide
cuucgacuggaccucguca

SEQ ID NO: 2172252 - RNA, 19 nt, Artificial Sequence
  Description of Artificial Sequence: Synthetic oligonucleotide
cugucuuguugcccugagc

SEQ ID NO: 2172253 - RNA, 19 nt, Artificial Sequence
  Description of Artificial Sequence: Synthetic oligonucleotide
caacgacucauaggagggg

SEQ ID NO: 2172254 - RNA, 19 nt, Artificial Sequence
  Description of Artificial Sequence: Synthetic oligonucleotide
uccggccugcuguuggaug

SEQ ID NO: 2172255 - RNA, 19 nt, Artificial Sequence
  Description of Artificial Sequence: Synthetic oligonucleotide
uacgugaggcucugugaaa

SEQ ID NO: 2172256 - RNA, 19 nt, Artificial Sequence
  Description of Artificial Sequence: Synthetic oligonucleotide
ugcucccgcuacgugaggc

SEQ ID NO: 2172257 - RNA, 19 nt, Artificial Sequence
  Description of Artificial Sequence: Synthetic oligonucleotide
uuccucguagcuggguaca

SEQ ID NO: 2172258 - RNA, 19 nt, Artificial Sequence
  Description of Artificial Sequence: Synthetic oligonucleotide
ugcguagugugagccguug

SEQ ID NO: 2172259 - RNA, 19 nt, Artificial Sequence
  Description of Artificial Sequence: Synthetic oligonucleotide
cagcaucacgccagcgccg

SEQ ID NO: 2172260 - RNA, 19 nt, Artificial Sequence
  Description of Artificial Sequence: Synthetic oligonucleotide
uguccggagcaugcccugg

SEQ ID NO: 2172261 - RNA, 19 nt, Artificial Sequence
  Description of Artificial Sequence: Synthetic oligonucleotide
ucgucauacugcggaggag

SEQ ID NO: 2172262 - RNA, 19 nt, Artificial Sequence
  Description of Artificial Sequence: Synthetic oligonucleotide
gucucgucgagccccguca

SEQ ID NO: 2172263 - RNA, 19 nt, Artificial Sequence
  Description of Artificial Sequence: Synthetic oligonucleotide
uccugcgugggaggcacag

SEQ ID NO: 2172264 - RNA, 19 nt, Artificial Sequence
  Description of Artificial Sequence: Synthetic oligonucleotide
uugcccugagcuguuggcu

SEQ ID NO: 2172265 - RNA, 19 nt, Artificial Sequence
  Description of Artificial Sequence: Synthetic oligonucleotide
caucacgccagcgccgacc

SEQ ID NO: 2172266 - RNA, 19 nt, Artificial Sequence
  Description of Artificial Sequence: Synthetic oligonucleotide
cauaggaggggagagagau

SEQ ID NO: 2172267 - RNA, 19 nt, Artificial Sequence
  Description of Artificial Sequence: Synthetic oligonucleotide
auggccgucagugcguagu

SEQ ID NO: 2172268 - RNA, 19 nt, Artificial Sequence
  Description of Artificial Sequence: Synthetic oligonucleotide
auacugcggaggaggaguc

SEQ ID NO: 2172269 - RNA, 19 nt, Artificial Sequence
  Description of Artificial Sequence: Synthetic oligonucleotide
uccuccuccuccuccuccu

SEQ ID NO: 2172270 - RNA, 19 nt, Artificial Sequence
  Description of Artificial Sequence: Synthetic oligonucleotide
uugagugguuucaggcguu

SEQ ID NO: 2172271 - RNA, 19 nt, Artificial Sequence
  Description of Artificial Sequence: Synthetic oligonucleotide
uucgaacuuugagugguuu

SEQ ID NO: 2172272 - RNA, 19 nt, Artificial Sequence
  Description of Artificial Sequence: Synthetic oligonucleotide
cuugucugggagguugauc

SEQ ID NO: 2172273 - RNA, 19 nt, Artificial Sequence
  Description of Artificial Sequence: Synthetic oligonucleotide
acucauaggaggggagaga

SEQ ID NO: 2172274 - RNA, 19 nt, Artificial Sequence
  Description of Artificial Sequence: Synthetic oligonucleotide
auagagggaggaggaauau

SEQ ID NO: 2172275 - RNA, 19 nt, Artificial Sequence
  Description of Artificial Sequence: Synthetic oligonucleotide
cuagguuccacauggccau

SEQ ID NO: 2172276 - RNA, 19 nt, Artificial Sequence
  Description of Artificial Sequence: Synthetic oligonucleotide
cuccuccuccuccuccugg

SEQ ID NO: 2172277 - RNA, 19 nt, Artificial Sequence
  Description of Artificial Sequence: Synthetic oligonucleotide
gcggaggaggagucaaagg

SEQ ID NO: 2172278 - RNA, 19 nt, Artificial Sequence
  Description of Artificial Sequence: Synthetic oligonucleotide
guuggaugcgggccaguuc

SEQ ID NO: 2172279 - RNA, 19 nt, Artificial Sequence
  Description of Artificial Sequence: Synthetic oligonucleotide
ucccggaugcucagacaga

SEQ ID NO: 2172280 - RNA, 19 nt, Artificial Sequence
  Description of Artificial Sequence: Synthetic oligonucleotide
cauccccaggccgauggcc

SEQ ID NO: 2172281 - RNA, 19 nt, Artificial Sequence
  Description of Artificial Sequence: Synthetic oligonucleotide
caccccgaggaccagcauc

SEQ ID NO: 2172282 - RNA, 19 nt, Artificial Sequence
  Description of Artificial Sequence: Synthetic oligonucleotide
gagguugauccugaagucu

SEQ ID NO: 2172283 - RNA, 19 nt, Artificial Sequence
  Description of Artificial Sequence: Synthetic oligonucleotide
gccgucagugcguagugug

SEQ ID NO: 2172284 - RNA, 19 nt, Artificial Sequence
  Description of Artificial Sequence: Synthetic oligonucleotide
ccgaccagcacauacgcca

SEQ ID NO: 2172285 - RNA, 19 nt, Artificial Sequence
  Description of Artificial Sequence: Synthetic oligonucleotide
cccgucaacgacucauagg

SEQ ID NO: 2172286 - RNA, 19 nt, Artificial Sequence
  Description of Artificial Sequence: Synthetic oligonucleotide
ggcuaagugugcccugacc

SEQ ID NO: 2172287 - RNA, 19 nt, Artificial Sequence
  Description of Artificial Sequence: Synthetic oligonucleotide
agaguaucacaagcuccca

SEQ ID NO: 2172288 - RNA, 19 nt, Artificial Sequence
  Description of Artificial Sequence: Synthetic oligonucleotide
cgucauacugcggaggagg

SEQ ID NO: 2172289 - RNA, 19 nt, Artificial Sequence
  Description of Artificial Sequence: Synthetic oligonucleotide
ucucgucgagccccgucaa

SEQ ID NO: 2172290 - RNA, 19 nt, Artificial Sequence
  Description of Artificial Sequence: Synthetic oligonucleotide
ucccgcuacgugaggcucu

SEQ ID NO: 2172291 - RNA, 19 nt, Artificial Sequence
  Description of Artificial Sequence: Synthetic oligonucleotide
agguugauccugaagucuu

SEQ ID NO: 2172292 - RNA, 19 nt, Artificial Sequence
  Description of Artificial Sequence: Synthetic oligonucleotide
uggcuaagugugcccugac

SEQ ID NO: 2172293 - RNA, 19 nt, Artificial Sequence
  Description of Artificial Sequence: Synthetic oligonucleotide
cuccuccuccuccuccucc

SEQ ID NO: 2172294 - RNA, 19 nt, Artificial Sequence
  Description of Artificial Sequence: Synthetic oligonucleotide
gggugaagucagaagggcc

SEQ ID NO: 2172295 - RNA, 19 nt, Artificial Sequence
  Description of Artificial Sequence: Synthetic oligonucleotide
cugggcuggccucuguguc

SEQ ID NO: 2172296 - RNA, 19 nt, Artificial Sequence
  Description of Artificial Sequence: Synthetic oligonucleotide
acgacucauaggaggggag

SEQ ID NO: 2172297 - RNA, 19 nt, Artificial Sequence
  Description of Artificial Sequence: Synthetic oligonucleotide
cguagugugagccguuggc

SEQ ID NO: 2172298 - RNA, 19 nt, Artificial Sequence
  Description of Artificial Sequence: Synthetic oligonucleotide
ucgacuggaccucgucaua

SEQ ID NO: 2172299 - RNA, 19 nt, Artificial Sequence
  Description of Artificial Sequence: Synthetic oligonucleotide
gugggaggcacagcuccgg

SEQ ID NO: 2172300 - RNA, 19 nt, Artificial Sequence
  Description of Artificial Sequence: Synthetic oligonucleotide
acugcggaggaggagucaa

SEQ ID NO: 2172301 - RNA, 19 nt, Artificial Sequence
  Description of Artificial Sequence: Synthetic oligonucleotide
uguuggaugcgggccaguu

SEQ ID NO: 2172302 - RNA, 19 nt, Artificial Sequence
  Description of Artificial Sequence: Synthetic oligonucleotide
augcucagacagauggaca

SEQ ID NO: 2172303 - RNA, 19 nt, Artificial Sequence
  Description of Artificial Sequence: Synthetic oligonucleotide
cugaagugacuucggugca

SEQ ID NO: 2172304 - RNA, 19 nt, Artificial Sequence
  Description of Artificial Sequence: Synthetic oligonucleotide
cugaugcucccgcuacgug

SEQ ID NO: 2172305 - RNA, 19 nt, Artificial Sequence
  Description of Artificial Sequence: Synthetic oligonucleotide
gaccccuugucuggggcug

SEQ ID NO: 2172306 - RNA, 19 nt, Artificial Sequence
  Description of Artificial Sequence: Synthetic oligonucleotide
caugcccugggcuggccuc

SEQ ID NO: 2172307 - RNA, 19 nt, Artificial Sequence
  Description of Artificial Sequence: Synthetic oligonucleotide
guucagucgggaggccggg

SEQ ID NO: 2172308 - RNA, 19 nt, Artificial Sequence
  Description of Artificial Sequence: Synthetic oligonucleotide
gcuacgugaggcucuguga

SEQ ID NO: 2172309 - RNA, 19 nt, Artificial Sequence
  Description of Artificial Sequence: Synthetic oligonucleotide
ugacuucggugcagucugu

SEQ ID NO: 2172310 - RNA, 19 nt, Artificial Sequence
  Description of Artificial Sequence: Synthetic oligonucleotide
ucccucugucuuguugccc

SEQ ID NO: 2172311 - RNA, 19 nt, Artificial Sequence
  Description of Artificial Sequence: Synthetic oligonucleotide
agugugcccugaccccuug

SEQ ID NO: 2172312 - RNA, 19 nt, Artificial Sequence
  Description of Artificial Sequence: Synthetic oligonucleotide
gauggccgucagugcguag

SEQ ID NO: 2172313 - RNA, 19 nt, Artificial Sequence
  Description of Artificial Sequence: Synthetic oligonucleotide
agccccgucaacgacucau

SEQ ID NO: 2172314 - RNA, 19 nt, Artificial Sequence
  Description of Artificial Sequence: Synthetic oligonucleotide
gaggggagagagaugcuua

SEQ ID NO: 2172315 - RNA, 19 nt, Artificial Sequence
  Description of Artificial Sequence: Synthetic oligonucleotide
gaagugacuucggugcagu

SEQ ID NO: 2172316 - RNA, 19 nt, Artificial Sequence
  Description of Artificial Sequence: Synthetic oligonucleotide
gaagggccguucagucggg

SEQ ID NO: 2172317 - RNA, 19 nt, Artificial Sequence
  Description of Artificial Sequence: Synthetic oligonucleotide
ugucgguguggagggugag

SEQ ID NO: 2172318 - RNA, 19 nt, Artificial Sequence
  Description of Artificial Sequence: Synthetic oligonucleotide
agcaucacgccagcgccga

SEQ ID NO: 2172319 - RNA, 19 nt, Artificial Sequence
  Description of Artificial Sequence: Synthetic oligonucleotide
ggcucaauagagggaggag

SEQ ID NO: 2172320 - RNA, 19 nt, Artificial Sequence
  Description of Artificial Sequence: Synthetic oligonucleotide
ucacucccucuacccagaa

SEQ ID NO: 2172321 - RNA, 19 nt, Artificial Sequence
  Description of Artificial Sequence: Synthetic oligonucleotide
agucgggaggccgggcauc

SEQ ID NO: 2172322 - RNA, 19 nt, Artificial Sequence
  Description of Artificial Sequence: Synthetic oligonucleotide
ccgugaggaagccuccucc

SEQ ID NO: 2172323 - RNA, 19 nt, Artificial Sequence
  Description of Artificial Sequence: Synthetic oligonucleotide
guaccgugaggaagccucc

SEQ ID NO: 2172324 - RNA, 19 nt, Artificial Sequence
  Description of Artificial Sequence: Synthetic oligonucleotide
ucggugcagucugucggug

SEQ ID NO: 2172325 - RNA, 19 nt, Artificial Sequence
  Description of Artificial Sequence: Synthetic oligonucleotide
augcuuagucucggguucu

SEQ ID NO: 2172326 - RNA, 19 nt, Artificial Sequence
  Description of Artificial Sequence: Synthetic oligonucleotide
gaggcacagcuccggccug

SEQ ID NO: 2172327 - RNA, 19 nt, Artificial Sequence
  Description of Artificial Sequence: Synthetic oligonucleotide
acacccuuggucacucccu

SEQ ID NO: 2172328 - RNA, 19 nt, Artificial Sequence
  Description of Artificial Sequence: Synthetic oligonucleotide
cuguccggagcaugcccug

SEQ ID NO: 2172329 - RNA, 19 nt, Artificial Sequence
  Description of Artificial Sequence: Synthetic oligonucleotide
gucauacugcggaggagga

SEQ ID NO: 2172330 - RNA, 19 nt, Artificial Sequence
  Description of Artificial Sequence: Synthetic oligonucleotide
gacuucggugcagucuguc

SEQ ID NO: 2172331 - RNA, 19 nt, Artificial Sequence
  Description of Artificial Sequence: Synthetic oligonucleotide
ccggccugcuguuggaugc

SEQ ID NO: 2172332 - RNA, 19 nt, Artificial Sequence
  Description of Artificial Sequence: Synthetic oligonucleotide
auggccgcagaaaggggca

SEQ ID NO: 2172333 - RNA, 19 nt, Artificial Sequence
  Description of Artificial Sequence: Synthetic oligonucleotide
acccuuggucacucccucu

SEQ ID NO: 2172334 - RNA, 19 nt, Artificial Sequence
  Description of Artificial Sequence: Synthetic oligonucleotide
gcguagugugagccguugg

SEQ ID NO: 2172335 - RNA, 19 nt, Artificial Sequence
  Description of Artificial Sequence: Synthetic oligonucleotide
gucuuugaggugaaguuuu

SEQ ID NO: 2172336 - RNA, 19 nt, Artificial Sequence
  Description of Artificial Sequence: Synthetic oligonucleotide
uaguaccgugaggaagccu

SEQ ID NO: 2172337 - RNA, 19 nt, Artificial Sequence
  Description of Artificial Sequence: Synthetic oligonucleotide
gcccugaccccuugucugg

SEQ ID NO: 2172338 - RNA, 19 nt, Artificial Sequence
  Description of Artificial Sequence: Synthetic oligonucleotide
cuggggcugaagugacuuc

SEQ ID NO: 2172339 - RNA, 19 nt, Artificial Sequence
  Description of Artificial Sequence: Synthetic oligonucleotide
uacugcggaggaggaguca

SEQ ID NO: 2172340 - RNA, 19 nt, Artificial Sequence
  Description of Artificial Sequence: Synthetic oligonucleotide
cacagcuccggccugcugu

SEQ ID NO: 2172341 - RNA, 19 nt, Artificial Sequence
  Description of Artificial Sequence: Synthetic oligonucleotide
guggcuaagugugcccuga

SEQ ID NO: 2172342 - RNA, 19 nt, Artificial Sequence
  Description of Artificial Sequence: Synthetic oligonucleotide
caauagagggaggaggaau

SEQ ID NO: 2172343 - RNA, 19 nt, Artificial Sequence
  Description of Artificial Sequence: Synthetic oligonucleotide
uaccgugaggaagccuccu

SEQ ID NO: 2172344 - RNA, 19 nt, Artificial Sequence
  Description of Artificial Sequence: Synthetic oligonucleotide
ugagugguuucaggcguuu

SEQ ID NO: 2172345 - RNA, 19 nt, Artificial Sequence
  Description of Artificial Sequence: Synthetic oligonucleotide
acgccacugagaaagucuu

SEQ ID NO: 2172346 - RNA, 19 nt, Artificial Sequence
  Description of Artificial Sequence: Synthetic oligonucleotide
gucagaagggccguucagu

SEQ ID NO: 2172347 - RNA, 19 nt, Artificial Sequence
  Description of Artificial Sequence: Synthetic oligonucleotide
cguucagucgggaggccgg

SEQ ID NO: 2172348 - RNA, 19 nt, Artificial Sequence
  Description of Artificial Sequence: Synthetic oligonucleotide
aauccccaucacaguggcu

SEQ ID NO: 2172349 - RNA, 19 nt, Artificial Sequence
  Description of Artificial Sequence: Synthetic oligonucleotide
ggccguucagucgggaggc

SEQ ID NO: 2172350 - RNA, 19 nt, Artificial Sequence
  Description of Artificial Sequence: Synthetic oligonucleotide
agcaugcccugggcuggcc

SEQ ID NO: 2172351 - RNA, 19 nt, Artificial Sequence
  Description of Artificial Sequence: Synthetic oligonucleotide
gcucugugaaacacccuug

SEQ ID NO: 2172352 - RNA, 19 nt, Artificial Sequence
  Description of Artificial Sequence: Synthetic oligonucleotide
ugaucaccccgaggaccag

SEQ ID NO: 2172353 - RNA, 19 nt, Artificial Sequence
  Description of Artificial Sequence: Synthetic oligonucleotide
uuguugcccugagcuguug

SEQ ID NO: 2172354 - RNA, 19 nt, Artificial Sequence
  Description of Artificial Sequence: Synthetic oligonucleotide
ggggcugaagugacuucgg

SEQ ID NO: 2172355 - RNA, 19 nt, Artificial Sequence
  Description of Artificial Sequence: Synthetic oligonucleotide
gugugagccguuggccuug

SEQ ID NO: 2172356 - RNA, 19 nt, Artificial Sequence
  Description of Artificial Sequence: Synthetic oligonucleotide
ucaggcguuuggccagcuu

SEQ ID NO: 2172357 - RNA, 19 nt, Artificial Sequence
  Description of Artificial Sequence: Synthetic oligonucleotide
cucgucgagccccgucaac

SEQ ID NO: 2172358 - RNA, 19 nt, Artificial Sequence
  Description of Artificial Sequence: Synthetic oligonucleotide
ggcucugugaaacacccuu

SEQ ID NO: 2172359 - RNA, 19 nt, Artificial Sequence
  Description of Artificial Sequence: Synthetic oligonucleotide
cugaaaccagggacuaggu

SEQ ID NO: 2172360 - RNA, 19 nt, Artificial Sequence
  Description of Artificial Sequence: Synthetic oligonucleotide
gcgccgaccagcacauacg

SEQ ID NO: 2172361 - RNA, 19 nt, Artificial Sequence
  Description of Artificial Sequence: Synthetic oligonucleotide
gcaucaggggccuucgacu

SEQ ID NO: 2172362 - RNA, 19 nt, Artificial Sequence
  Description of Artificial Sequence: Synthetic oligonucleotide
gcucuugaggaugccacca

SEQ ID NO: 2172363 - RNA, 19 nt, Artificial Sequence
  Description of Artificial Sequence: Synthetic oligonucleotide
ccucgucauacugcggagg

SEQ ID NO: 2172364 - RNA, 19 nt, Artificial Sequence
  Description of Artificial Sequence: Synthetic oligonucleotide
aagggccguucagucggga

SEQ ID NO: 2172365 - RNA, 19 nt, Artificial Sequence
  Description of Artificial Sequence: Synthetic oligonucleotide
ucacgccagcgccgaccag

SEQ ID NO: 2172366 - RNA, 19 nt, Artificial Sequence
  Description of Artificial Sequence: Synthetic oligonucleotide
cccugguuuccgaguagcc

SEQ ID NO: 2172367 - RNA, 19 nt, Artificial Sequence
  Description of Artificial Sequence: Synthetic oligonucleotide
gcucagacagauggacagc

SEQ ID NO: 2172368 - RNA, 19 nt, Artificial Sequence
  Description of Artificial Sequence: Synthetic oligonucleotide
cgaacuuugagugguuuca

SEQ ID NO: 2172369 - RNA, 19 nt, Artificial Sequence
  Description of Artificial Sequence: Synthetic oligonucleotide
cucccgcuacgugaggcuc

SEQ ID NO: 2172370 - RNA, 19 nt, Artificial Sequence
  Description of Artificial Sequence: Synthetic oligonucleotide
uccucguagcuggguacau

SEQ ID NO: 2172371 - RNA, 19 nt, Artificial Sequence
  Description of Artificial Sequence: Synthetic oligonucleotide
gucacucccucuacccaga

SEQ ID NO: 2172372 - RNA, 19 nt, Artificial Sequence
  Description of Artificial Sequence: Synthetic oligonucleotide
gcuuagucucggguucugc

SEQ ID NO: 2172373 - RNA, 19 nt, Artificial Sequence
  Description of Artificial Sequence: Synthetic oligonucleotide
cagcagcaucacgccagcg

SEQ ID NO: 2172374 - RNA, 19 nt, Artificial Sequence
  Description of Artificial Sequence: Synthetic oligonucleotide
cugagaaagucuugcucuu

SEQ ID NO: 2172375 - RNA, 19 nt, Artificial Sequence
  Description of Artificial Sequence: Synthetic oligonucleotide
cguagcuggguacauagua

SEQ ID NO: 2172376 - RNA, 19 nt, Artificial Sequence
  Description of Artificial Sequence: Synthetic oligonucleotide
cgucaacgacucauaggag

SEQ ID NO: 2172377 - RNA, 19 nt, Artificial Sequence
  Description of Artificial Sequence: Synthetic oligonucleotide
gagcaugcccugggcuggc

SEQ ID NO: 2172378 - RNA, 19 nt, Artificial Sequence
  Description of Artificial Sequence: Synthetic oligonucleotide
aagugugcccugaccccuu

SEQ ID NO: 2172379 - RNA, 19 nt, Artificial Sequence
  Description of Artificial Sequence: Synthetic oligonucleotide
cacauacgccacugagaaa

SEQ ID NO: 2172380 - RNA, 19 nt, Artificial Sequence
  Description of Artificial Sequence: Synthetic oligonucleotide
gugcccugaccccuugucu

SEQ ID NO: 2172381 - RNA, 19 nt, Artificial Sequence
  Description of Artificial Sequence: Synthetic oligonucleotide
ggacuagguuccacauggc

SEQ ID NO: 2172382 - RNA, 19 nt, Artificial Sequence
  Description of Artificial Sequence: Synthetic oligonucleotide
gucgguguggagggugaga

SEQ ID NO: 2172383 - RNA, 19 nt, Artificial Sequence
  Description of Artificial Sequence: Synthetic oligonucleotide
cauacgccacugagaaagu

SEQ ID NO: 2172384 - RNA, 19 nt, Artificial Sequence
  Description of Artificial Sequence: Synthetic oligonucleotide
ccucuacccagaaucccca

SEQ ID NO: 2172385 - RNA, 19 nt, Artificial Sequence
  Description of Artificial Sequence: Synthetic oligonucleotide
gcagucugucgguguggag

SEQ ID NO: 2172386 - RNA, 19 nt, Artificial Sequence
  Description of Artificial Sequence: Synthetic oligonucleotide
cguuuggccagcuuggagu

SEQ ID NO: 2172387 - RNA, 19 nt, Artificial Sequence
  Description of Artificial Sequence: Synthetic oligonucleotide
ugcgggccaguuccucauu

SEQ ID NO: 2172388 - RNA, 19 nt, Artificial Sequence
  Description of Artificial Sequence: Synthetic oligonucleotide
cauucugccgaagcuuccu

SEQ ID NO: 2172389 - RNA, 19 nt, Artificial Sequence
  Description of Artificial Sequence: Synthetic oligonucleotide
cgucagugcguagugugag

SEQ ID NO: 2172390 - RNA, 19 nt, Artificial Sequence
  Description of Artificial Sequence: Synthetic oligonucleotide
ccguucagucgggaggccg

SEQ ID NO: 2172391 - RNA, 19 nt, Artificial Sequence
  Description of Artificial Sequence: Synthetic oligonucleotide
cgcuacgugaggcucugug

SEQ ID NO: 2172392 - RNA, 19 nt, Artificial Sequence
  Description of Artificial Sequence: Synthetic oligonucleotide
cagggacuagguuccacau

SEQ ID NO: 2172393 - RNA, 19 nt, Artificial Sequence
  Description of Artificial Sequence: Synthetic oligonucleotide
ggccgauggccgucagugc

SEQ ID NO: 2172394 - RNA, 19 nt, Artificial Sequence
  Description of Artificial Sequence: Synthetic oligonucleotide
ggaccucgucauacugcgg

SEQ ID NO: 2172395 - RNA, 19 nt, Artificial Sequence
  Description of Artificial Sequence: Synthetic oligonucleotide
ccuucgacuggaccucguc

SEQ ID NO: 2172396 - RNA, 19 nt, Artificial Sequence
  Description of Artificial Sequence: Synthetic oligonucleotide
cgccgaccagcacauacgc

SEQ ID NO: 2172397 - RNA, 19 nt, Artificial Sequence
  Description of Artificial Sequence: Synthetic oligonucleotide
ccccugguuuccgaguagc

SEQ ID NO: 2172398 - RNA, 19 nt, Artificial Sequence
  Description of Artificial Sequence: Synthetic oligonucleotide
uggccgcagaaaggggcaa

SEQ ID NO: 2172399 - RNA, 19 nt, Artificial Sequence
  Description of Artificial Sequence: Synthetic oligonucleotide
ggaugccaccaccucccuc

SEQ ID NO: 2172400 - RNA, 19 nt, Artificial Sequence
  Description of Artificial Sequence: Synthetic oligonucleotide
gcuggguacauaguaccgu

SEQ ID NO: 2172401 - RNA, 19 nt, Artificial Sequence
  Description of Artificial Sequence: Synthetic oligonucleotide
gccguuggccuuggacugg

SEQ ID NO: 2172402 - RNA, 19 nt, Artificial Sequence
  Description of Artificial Sequence: Synthetic oligonucleotide
ggccuucgacuggaccucg

SEQ ID NO: 2172403 - RNA, 19 nt, Artificial Sequence
  Description of Artificial Sequence: Synthetic oligonucleotide
gucgggaggccgggcauca

SEQ ID NO: 2172404 - RNA, 19 nt, Artificial Sequence
  Description of Artificial Sequence: Synthetic oligonucleotide
aggcucugugaaacacccu

SEQ ID NO: 2172405 - RNA, 19 nt, Artificial Sequence
  Description of Artificial Sequence: Synthetic oligonucleotide
ggccgcagaaaggggcaag

SEQ ID NO: 2172406 - RNA, 19 nt, Artificial Sequence
  Description of Artificial Sequence: Synthetic oligonucleotide
ccuccugcgugggaggcac

SEQ ID NO: 2172407 - RNA, 19 nt, Artificial Sequence
  Description of Artificial Sequence: Synthetic oligonucleotide
gucucggguucugcuccug

SEQ ID NO: 2172408 - RNA, 19 nt, Artificial Sequence
  Description of Artificial Sequence: Synthetic oligonucleotide
cugcggaggaggagucaaa

SEQ ID NO: 2172409 - RNA, 19 nt, Artificial Sequence
  Description of Artificial Sequence: Synthetic oligonucleotide
cugggagguugauccugaa

SEQ ID NO: 2172410 - RNA, 19 nt, Artificial Sequence
  Description of Artificial Sequence: Synthetic oligonucleotide
ccggaugcucagacagaug

SEQ ID NO: 2172411 - RNA, 19 nt, Artificial Sequence
  Description of Artificial Sequence: Synthetic oligonucleotide
caggggccuucgacuggac

SEQ ID NO: 2172412 - RNA, 19 nt, Artificial Sequence
  Description of Artificial Sequence: Synthetic oligonucleotide
gguuuccgaguagccugug

SEQ ID NO: 2172413 - RNA, 19 nt, Artificial Sequence
  Description of Artificial Sequence: Synthetic oligonucleotide
gccgaccagcacauacgcc

SEQ ID NO: 2172414 - RNA, 19 nt, Artificial Sequence
  Description of Artificial Sequence: Synthetic oligonucleotide
gccgcagaaaggggcaaga

SEQ ID NO: 2172415 - RNA, 19 nt, Artificial Sequence
  Description of Artificial Sequence: Synthetic oligonucleotide
ccgucagugcguaguguga

SEQ ID NO: 2172416 - RNA, 19 nt, Artificial Sequence
  Description of Artificial Sequence: Synthetic oligonucleotide
cuuguugcccugagcuguu

SEQ ID NO: 2172417 - RNA, 19 nt, Artificial Sequence
  Description of Artificial Sequence: Synthetic oligonucleotide
uugucucgucgagccccgu

SEQ ID NO: 2172418 - RNA, 19 nt, Artificial Sequence
  Description of Artificial Sequence: Synthetic oligonucleotide
cuucgaacuuugagugguu

SEQ ID NO: 2172419 - RNA, 19 nt, Artificial Sequence
  Description of Artificial Sequence: Synthetic oligonucleotide
gggccuucgacuggaccuc

SEQ ID NO: 2172420 - RNA, 19 nt, Artificial Sequence
  Description of Artificial Sequence: Synthetic oligonucleotide
cgagccccgucaacgacuc

SEQ ID NO: 2172421 - RNA, 19 nt, Artificial Sequence
  Description of Artificial Sequence: Synthetic oligonucleotide
accccuugucuggggcuga

SEQ ID NO: 2172422 - RNA, 19 nt, Artificial Sequence
  Description of Artificial Sequence: Synthetic oligonucleotide
ccgcagaaaggggcaagac

SEQ ID NO: 2172423 - RNA, 19 nt, Artificial Sequence
  Description of Artificial Sequence: Synthetic oligonucleotide
cgaguagccuguguucauc

SEQ ID NO: 2172424 - RNA, 19 nt, Artificial Sequence
  Description of Artificial Sequence: Synthetic oligonucleotide
ggaugcgggccaguuccuc

SEQ ID NO: 2172425 - RNA, 19 nt, Artificial Sequence
  Description of Artificial Sequence: Synthetic oligonucleotide
ccagcacauacgccacuga

SEQ ID NO: 2172426 - RNA, 19 nt, Artificial Sequence
  Description of Artificial Sequence: Synthetic oligonucleotide
ccuguccggagcaugcccu

SEQ ID NO: 2172427 - RNA, 19 nt, Artificial Sequence
  Description of Artificial Sequence: Synthetic oligonucleotide
gguuccacauggccaugau

SEQ ID NO: 2172428 - RNA, 19 nt, Artificial Sequence
  Description of Artificial Sequence: Synthetic oligonucleotide
cucuacccagaauccccau

SEQ ID NO: 2172429 - RNA, 19 nt, Artificial Sequence
  Description of Artificial Sequence: Synthetic oligonucleotide
gagccccgucaacgacuca

SEQ ID NO: 2172430 - RNA, 19 nt, Artificial Sequence
  Description of Artificial Sequence: Synthetic oligonucleotide
cgugaggcucugugaaaca

SEQ ID NO: 2172431 - RNA, 19 nt, Artificial Sequence
  Description of Artificial Sequence: Synthetic oligonucleotide
gcuccggccugcuguugga

SEQ ID NO: 2172432 - RNA, 19 nt, Artificial Sequence
  Description of Artificial Sequence: Synthetic oligonucleotide
ccugcgugggaggcacagc

SEQ ID NO: 2172433 - RNA, 19 nt, Artificial Sequence
  Description of Artificial Sequence: Synthetic oligonucleotide
gcacagcuccggccugcug

SEQ ID NO: 2172434 - RNA, 19 nt, Artificial Sequence
  Description of Artificial Sequence: Synthetic oligonucleotide
gcucccgcuacgugaggcu

SEQ ID NO: 2172435 - RNA, 19 nt, Artificial Sequence
  Description of Artificial Sequence: Synthetic oligonucleotide
ggggagagagaugcuuagu

SEQ ID NO: 2172436 - RNA, 19 nt, Artificial Sequence
  Description of Artificial Sequence: Synthetic oligonucleotide
ggggcaagacccagcucaa

SEQ ID NO: 2172437 - RNA, 19 nt, Artificial Sequence
  Description of Artificial Sequence: Synthetic oligonucleotide
cgacucauaggaggggaga

SEQ ID NO: 2172438 - RNA, 19 nt, Artificial Sequence
  Description of Artificial Sequence: Synthetic oligonucleotide
gugugcccugaccccuugu

SEQ ID NO: 2172439 - RNA, 19 nt, Artificial Sequence
  Description of Artificial Sequence: Synthetic oligonucleotide
cccgcuacgugaggcucug

SEQ ID NO: 2172440 - RNA, 19 nt, Artificial Sequence
  Description of Artificial Sequence: Synthetic oligonucleotide
gugagccguuggccuugga

SEQ ID NO: 2172441 - RNA, 19 nt, Artificial Sequence
  Description of Artificial Sequence: Synthetic oligonucleotide
ccuccuccuccuccuccug

SEQ ID NO: 2172442 - RNA, 19 nt, Artificial Sequence
  Description of Artificial Sequence: Synthetic oligonucleotide
gguugauccugaagucuuu

SEQ ID NO: 2172443 - RNA, 19 nt, Artificial Sequence
  Description of Artificial Sequence: Synthetic oligonucleotide
gcgcugaaaccagggacua

SEQ ID NO: 2172444 - RNA, 19 nt, Artificial Sequence
  Description of Artificial Sequence: Synthetic oligonucleotide
gccuccuccuccuccuccu

SEQ ID NO: 2172445 - RNA, 19 nt, Artificial Sequence
  Description of Artificial Sequence: Synthetic oligonucleotide
cgucgagccccgucaacga

SEQ ID NO: 2172446 - RNA, 19 nt, Artificial Sequence
  Description of Artificial Sequence: Synthetic oligonucleotide
cacaagcucccagcauccu

SEQ ID NO: 2172447 - RNA, 19 nt, Artificial Sequence
  Description of Artificial Sequence: Synthetic oligonucleotide
cgcugaaaccagggacuag

SEQ ID NO: 2172448 - RNA, 19 nt, Artificial Sequence
  Description of Artificial Sequence: Synthetic oligonucleotide
cgugaggaagccuccuccu

SEQ ID NO: 2172449 - RNA, 19 nt, Artificial Sequence
  Description of Artificial Sequence: Synthetic oligonucleotide
gcaucacgccagcgccgac

SEQ ID NO: 2172450 - RNA, 19 nt, Artificial Sequence
  Description of Artificial Sequence: Synthetic oligonucleotide
gccguucagucgggaggcc

SEQ ID NO: 2172451 - RNA, 19 nt, Artificial Sequence
  Description of Artificial Sequence: Synthetic oligonucleotide
caggccgauggccgucagu

SEQ ID NO: 2172452 - RNA, 19 nt, Artificial Sequence
  Description of Artificial Sequence: Synthetic oligonucleotide
ccuccuccuccuccuccuc

SEQ ID NO: 2172453 - RNA, 19 nt, Artificial Sequence
  Description of Artificial Sequence: Synthetic oligonucleotide
ccaggccgauggccgucag

SEQ ID NO: 2172454 - RNA, 19 nt, Artificial Sequence
  Description of Artificial Sequence: Synthetic oligonucleotide
ccagcgccgaccagcacau

SEQ ID NO: 2172455 - RNA, 19 nt, Artificial Sequence
  Description of Artificial Sequence: Synthetic oligonucleotide
gggcaagacccagcucaaa

SEQ ID NO: 2172456 - RNA, 19 nt, Artificial Sequence
  Description of Artificial Sequence: Synthetic oligonucleotide
cccggaugcucagacagau

SEQ ID NO: 2172457 - RNA, 19 nt, Artificial Sequence
  Description of Artificial Sequence: Synthetic oligonucleotide
ccgauggccgucagugcgu

SEQ ID NO: 2172458 - RNA, 19 nt, Artificial Sequence
  Description of Artificial Sequence: Synthetic oligonucleotide
gucugucgguguggagggu

SEQ ID NO: 2172459 - RNA, 19 nt, Artificial Sequence
  Description of Artificial Sequence: Synthetic oligonucleotide
cgguguggagggugagaca

SEQ ID NO: 2172460 - RNA, 19 nt, Artificial Sequence
  Description of Artificial Sequence: Synthetic oligonucleotide
ccccgaggaccagcauccc

SEQ ID NO: 2172461 - RNA, 19 nt, Artificial Sequence
  Description of Artificial Sequence: Synthetic oligonucleotide
ggccgucagugcguagugu

SEQ ID NO: 2172462 - RNA, 19 nt, Artificial Sequence
  Description of Artificial Sequence: Synthetic oligonucleotide
gugcguagugugagccguu

SEQ ID NO: 2172463 - RNA, 19 nt, Artificial Sequence
  Description of Artificial Sequence: Synthetic oligonucleotide
cuccggccugcuguuggau

SEQ ID NO: 2172464 - RNA, 19 nt, Artificial Sequence
  Description of Artificial Sequence: Synthetic oligonucleotide
cccaggccgauggccguca

SEQ ID NO: 2172465 - RNA, 19 nt, Artificial Sequence
  Description of Artificial Sequence: Synthetic oligonucleotide
gccuucgacuggaccucgu

SEQ ID NO: 2172466 - RNA, 19 nt, Artificial Sequence
  Description of Artificial Sequence: Synthetic oligonucleotide
cgauggccgucagugcgua

SEQ ID NO: 2172467 - RNA, 19 nt, Artificial Sequence
  Description of Artificial Sequence: Synthetic oligonucleotide
ccccuugucuggggcugaa

SEQ ID NO: 2172468 - RNA, 19 nt, Artificial Sequence
  Description of Artificial Sequence: Synthetic oligonucleotide
cagcgccgaccagcacaua

SEQ ID NO: 2172469 - RNA, 19 nt, Artificial Sequence
  Description of Artificial Sequence: Synthetic oligonucleotide
ccgcuacgugaggcucugu

SEQ ID NO: 2172470 - RNA, 19 nt, Artificial Sequence
  Description of Artificial Sequence: Synthetic oligonucleotide
aaaauuugaacgucgacgg

SEQ ID NO: 2172471 - RNA, 19 nt, Artificial Sequence
  Description of Artificial Sequence: Synthetic oligonucleotide
uuugauaucaguaugaguu

SEQ ID NO: 2172472 - RNA, 19 nt, Artificial Sequence
  Description of Artificial Sequence: Synthetic oligonucleotide
uuuaugguucuuaaggugg

SEQ ID NO: 2172473 - RNA, 19 nt, Artificial Sequence
  Description of Artificial Sequence: Synthetic oligonucleotide
aaagguuucacauuagugu

SEQ ID NO: 2172474 - RNA, 19 nt, Artificial Sequence
  Description of Artificial Sequence: Synthetic oligonucleotide
agaguggauacucugaugc

SEQ ID NO: 2172475 - RNA, 19 nt, Artificial Sequence
  Description of Artificial Sequence: Synthetic oligonucleotide
uaaaauuugaacgucgacg

SEQ ID NO: 2172476 - RNA, 19 nt, Artificial Sequence
  Description of Artificial Sequence: Synthetic oligonucleotide
uuuaacauugguaagguuc

SEQ ID NO: 2172477 - RNA, 19 nt, Artificial Sequence
  Description of Artificial Sequence: Synthetic oligonucleotide
uggauauuaagucugaaga

SEQ ID NO: 2172478 - RNA, 19 nt, Artificial Sequence
  Description of Artificial Sequence: Synthetic oligonucleotide
uuucacaccagcaugaaug

SEQ ID NO: 2172479 - RNA, 19 nt, Artificial Sequence
  Description of Artificial Sequence: Synthetic oligonucleotide
ucuaacauguccaagaaau

SEQ ID NO: 2172480 - RNA, 19 nt, Artificial Sequence
  Description of Artificial Sequence: Synthetic oligonucleotide
acuccguacauucaaaagc

SEQ ID NO: 2172481 - RNA, 19 nt, Artificial Sequence
  Description of Artificial Sequence: Synthetic oligonucleotide
agaguuuacacuugaaagg

SEQ ID NO: 2172482 - RNA, 19 nt, Artificial Sequence
  Description of Artificial Sequence: Synthetic oligonucleotide
acucaaaagacuucuuucc

SEQ ID NO: 2172483 - RNA, 19 nt, Artificial Sequence
  Description of Artificial Sequence: Synthetic oligonucleotide
acuaugaaaucucuggugg

SEQ ID NO: 2172484 - RNA, 19 nt, Artificial Sequence
  Description of Artificial Sequence: Synthetic oligonucleotide
acucguugcauucauaugg

SEQ ID NO: 2172485 - RNA, 19 nt, Artificial Sequence
  Description of Artificial Sequence: Synthetic oligonucleotide
uuugccugcauucugaaca

SEQ ID NO: 2172486 - RNA, 19 nt, Artificial Sequence
  Description of Artificial Sequence: Synthetic oligonucleotide
uaaguucugacccacacug

SEQ ID NO: 2172487 - RNA, 19 nt, Artificial Sequence
  Description of Artificial Sequence: Synthetic oligonucleotide
ucuaccacgagcaaagccc

SEQ ID NO: 2172488 - RNA, 19 nt, Artificial Sequence
  Description of Artificial Sequence: Synthetic oligonucleotide
uuuaagguauccaucacga

SEQ ID NO: 2172489 - RNA, 19 nt, Artificial Sequence
  Description of Artificial Sequence: Synthetic oligonucleotide
augagauggauauuaaguc

SEQ ID NO: 2172490 - RNA, 19 nt, Artificial Sequence
  Description of Artificial Sequence: Synthetic oligonucleotide
aaugagauggauauuaagu

SEQ ID NO: 2172491 - RNA, 19 nt, Artificial Sequence
  Description of Artificial Sequence: Synthetic oligonucleotide
auuccucacauucaaacgg

SEQ ID NO: 2172492 - RNA, 19 nt, Artificial Sequence
  Description of Artificial Sequence: Synthetic oligonucleotide
guugugugagguuugagcg

SEQ ID NO: 2172493 - RNA, 19 nt, Artificial Sequence
  Description of Artificial Sequence: Synthetic oligonucleotide
aagacugaaaggccucucc

SEQ ID NO: 2172494 - RNA, 19 nt, Artificial Sequence
  Description of Artificial Sequence: Synthetic oligonucleotide
aaugauaucgaaagguuug

SEQ ID NO: 2172495 - RNA, 19 nt, Artificial Sequence
  Description of Artificial Sequence: Synthetic oligonucleotide
auugguaagguuccucacc

SEQ ID NO: 2172496 - RNA, 19 nt, Artificial Sequence
  Description of Artificial Sequence: Synthetic oligonucleotide
augguaaggucucucaucg

SEQ ID NO: 2172497 - RNA, 19 nt, Artificial Sequence
  Description of Artificial Sequence: Synthetic oligonucleotide
agucugaagacuuucccac

SEQ ID NO: 2172498 - RNA, 19 nt, Artificial Sequence
  Description of Artificial Sequence: Synthetic oligonucleotide
uuuuaggaacauuuuaaca

SEQ ID NO: 2172499 - RNA, 19 nt, Artificial Sequence
  Description of Artificial Sequence: Synthetic oligonucleotide
auguuggguaaguagagac

SEQ ID NO: 2172500 - RNA, 19 nt, Artificial Sequence
  Description of Artificial Sequence: Synthetic oligonucleotide
uaagguauccaucacgagu

SEQ ID NO: 2172501 - RNA, 19 nt, Artificial Sequence
  Description of Artificial Sequence: Synthetic oligonucleotide
gcucaguaaaauuugaacg

SEQ ID NO: 2172502 - RNA, 19 nt, Artificial Sequence
  Description of Artificial Sequence: Synthetic oligonucleotide
ucacgaguaacguagcucc

SEQ ID NO: 2172503 - RNA, 19 nt, Artificial Sequence
  Description of Artificial Sequence: Synthetic oligonucleotide
cuuuaagguauccaucacg

SEQ ID NO: 2172504 - RNA, 19 nt, Artificial Sequence
  Description of Artificial Sequence: Synthetic oligonucleotide
caugcauucuaacaugucc

SEQ ID NO: 2172505 - RNA, 19 nt, Artificial Sequence
  Description of Artificial Sequence: Synthetic oligonucleotide
auucaaaagcucucucgcc

SEQ ID NO: 2172506 - RNA, 19 nt, Artificial Sequence
  Description of Artificial Sequence: Synthetic oligonucleotide
cuauguuggacaagggugg

SEQ ID NO: 2172507 - RNA, 19 nt, Artificial Sequence
  Description of Artificial Sequence: Synthetic oligonucleotide
uguugugugagguuugagc

SEQ ID NO: 2172508 - RNA, 19 nt, Artificial Sequence
  Description of Artificial Sequence: Synthetic oligonucleotide
uugagcgccgauuaaaggc

SEQ ID NO: 2172509 - RNA, 19 nt, Artificial Sequence
  Description of Artificial Sequence: Synthetic oligonucleotide
uucacauuaguguggauac

SEQ ID NO: 2172510 - RNA, 19 nt, Artificial Sequence
  Description of Artificial Sequence: Synthetic oligonucleotide
auaucgaaagguuugccug

SEQ ID NO: 2172511 - RNA, 19 nt, Artificial Sequence
  Description of Artificial Sequence: Synthetic oligonucleotide
agagugaauuuucugaugu

SEQ ID NO: 2172512 - RNA, 19 nt, Artificial Sequence
  Description of Artificial Sequence: Synthetic oligonucleotide
guuggguaaguucugaccc

SEQ ID NO: 2172513 - RNA, 19 nt, Artificial Sequence
  Description of Artificial Sequence: Synthetic oligonucleotide
ugcuuuaagguauccauca

SEQ ID NO: 2172514 - RNA, 19 nt, Artificial Sequence
  Description of Artificial Sequence: Synthetic oligonucleotide
uaugaauuguuuuaugguu

SEQ ID NO: 2172515 - RNA, 19 nt, Artificial Sequence
  Description of Artificial Sequence: Synthetic oligonucleotide
uaaguagagacugaagucu

SEQ ID NO: 2172516 - RNA, 19 nt, Artificial Sequence
  Description of Artificial Sequence: Synthetic oligonucleotide
ugagauggauauuaagucu

SEQ ID NO: 2172517 - RNA, 19 nt, Artificial Sequence
  Description of Artificial Sequence: Synthetic oligonucleotide
uuuugguuuguaugaauug

SEQ ID NO: 2172518 - RNA, 19 nt, Artificial Sequence
  Description of Artificial Sequence: Synthetic oligonucleotide
auggauauuaagucugaag

SEQ ID NO: 2172519 - RNA, 19 nt, Artificial Sequence
  Description of Artificial Sequence: Synthetic oligonucleotide
ucucucaucgguaugaauu

SEQ ID NO: 2172520 - RNA, 19 nt, Artificial Sequence
  Description of Artificial Sequence: Synthetic oligonucleotide
uaacauguccaagaaauug

SEQ ID NO: 2172521 - RNA, 19 nt, Artificial Sequence
  Description of Artificial Sequence: Synthetic oligonucleotide
cauucaaaagcucucucgc

SEQ ID NO: 2172522 - RNA, 19 nt, Artificial Sequence
  Description of Artificial Sequence: Synthetic oligonucleotide
aaggauucuugccagcaug

SEQ ID NO: 2172523 - RNA, 19 nt, Artificial Sequence
  Description of Artificial Sequence: Synthetic oligonucleotide
uuaugguucuuaagguggg

SEQ ID NO: 2172524 - RNA, 19 nt, Artificial Sequence
  Description of Artificial Sequence: Synthetic oligonucleotide
aucgguaugaauucuguga

SEQ ID NO: 2172525 - RNA, 19 nt, Artificial Sequence
  Description of Artificial Sequence: Synthetic oligonucleotide
ucucucgccacuaugaaau

SEQ ID NO: 2172526 - RNA, 19 nt, Artificial Sequence
  Description of Artificial Sequence: Synthetic oligonucleotide
uccucuaccacgagcaaag

SEQ ID NO: 2172527 - RNA, 19 nt, Artificial Sequence
  Description of Artificial Sequence: Synthetic oligonucleotide
gaaugagauggauauuaag

SEQ ID NO: 2172528 - RNA, 19 nt, Artificial Sequence
  Description of Artificial Sequence: Synthetic oligonucleotide
uaacguagcucccacauuc

SEQ ID NO: 2172529 - RNA, 19 nt, Artificial Sequence
  Description of Artificial Sequence: Synthetic oligonucleotide
ugaugcucaguaaaauuug

SEQ ID NO: 2172530 - RNA, 19 nt, Artificial Sequence
  Description of Artificial Sequence: Synthetic oligonucleotide
ugcucaguaaaauuugaac

SEQ ID NO: 2172531 - RNA, 19 nt, Artificial Sequence
  Description of Artificial Sequence: Synthetic oligonucleotide
caguaaaauuugaacgucg

SEQ ID NO: 2172532 - RNA, 19 nt, Artificial Sequence
  Description of Artificial Sequence: Synthetic oligonucleotide
guauccaucacgaguaacg

SEQ ID NO: 2172533 - RNA, 19 nt, Artificial Sequence
  Description of Artificial Sequence: Synthetic oligonucleotide
ugugcuuuaagguauccau

SEQ ID NO: 2172534 - RNA, 19 nt, Artificial Sequence
  Description of Artificial Sequence: Synthetic oligonucleotide
augaauguuccuauguugg

SEQ ID NO: 2172535 - RNA, 19 nt, Artificial Sequence
  Description of Artificial Sequence: Synthetic oligonucleotide
aagucugaagacuuuccca

SEQ ID NO: 2172536 - RNA, 19 nt, Artificial Sequence
  Description of Artificial Sequence: Synthetic oligonucleotide
auugcuugcacugguaggg

SEQ ID NO: 2172537 - RNA, 19 nt, Artificial Sequence
  Description of Artificial Sequence: Synthetic oligonucleotide
cugguggcgaaugagaugg

SEQ ID NO: 2172538 - RNA, 19 nt, Artificial Sequence
  Description of Artificial Sequence: Synthetic oligonucleotide
uguuggacaaggguggagg

SEQ ID NO: 2172539 - RNA, 19 nt, Artificial Sequence
  Description of Artificial Sequence: Synthetic oligonucleotide
uuugcaaugguaaggucuc

SEQ ID NO: 2172540 - RNA, 19 nt, Artificial Sequence
  Description of Artificial Sequence: Synthetic oligonucleotide
uaggaacauuuuaacauug

SEQ ID NO: 2172541 - RNA, 19 nt, Artificial Sequence
  Description of Artificial Sequence: Synthetic oligonucleotide
gagacugaagucugaaggc

SEQ ID NO: 2172542 - RNA, 19 nt, Artificial Sequence
  Description of Artificial Sequence: Synthetic oligonucleotide
uuucucgugaagucgaagu

SEQ ID NO: 2172543 - RNA, 19 nt, Artificial Sequence
  Description of Artificial Sequence: Synthetic oligonucleotide
uguuggguaaguucugacc

SEQ ID NO: 2172544 - RNA, 19 nt, Artificial Sequence
  Description of Artificial Sequence: Synthetic oligonucleotide
caugaauguuccuauguug

SEQ ID NO: 2172545 - RNA, 19 nt, Artificial Sequence
  Description of Artificial Sequence: Synthetic oligonucleotide
guuccuauguuggacaagg

SEQ ID NO: 2172546 - RNA, 19 nt, Artificial Sequence
  Description of Artificial Sequence: Synthetic oligonucleotide
accgaaagggcuucucacc

SEQ ID NO: 2172547 - RNA, 19 nt, Artificial Sequence
  Description of Artificial Sequence: Synthetic oligonucleotide
ugaaagguuucacauuagu

SEQ ID NO: 2172548 - RNA, 19 nt, Artificial Sequence
  Description of Artificial Sequence: Synthetic oligonucleotide
ucugauguuggguaaguuc

SEQ ID NO: 2172549 - RNA, 19 nt, Artificial Sequence
  Description of Artificial Sequence: Synthetic oligonucleotide
ucugaugugcuuuaaggua

SEQ ID NO: 2172550 - RNA, 19 nt, Artificial Sequence
  Description of Artificial Sequence: Synthetic oligonucleotide
acauuuuaacauugguaag

SEQ ID NO: 2172551 - RNA, 19 nt, Artificial Sequence
  Description of Artificial Sequence: Synthetic oligonucleotide
aagucgaaguccucuacca

SEQ ID NO: 2172552 - RNA, 19 nt, Artificial Sequence
  Description of Artificial Sequence: Synthetic oligonucleotide
uucugaacaccgaaagggc

SEQ ID NO: 2172553 - RNA, 19 nt, Artificial Sequence
  Description of Artificial Sequence: Synthetic oligonucleotide
gaaagguuugccugcauuc

SEQ ID NO: 2172554 - RNA, 19 nt, Artificial Sequence
  Description of Artificial Sequence: Synthetic oligonucleotide
augaauuguuuuaugguuc

SEQ ID NO: 2172555 - RNA, 19 nt, Artificial Sequence
  Description of Artificial Sequence: Synthetic oligonucleotide
gucgaaguccucuaccacg

SEQ ID NO: 2172556 - RNA, 19 nt, Artificial Sequence
  Description of Artificial Sequence: Synthetic oligonucleotide
gagauggauauuaagucug

SEQ ID NO: 2172557 - RNA, 19 nt, Artificial Sequence
  Description of Artificial Sequence: Synthetic oligonucleotide
cauucuaacauguccaaga

SEQ ID NO: 2172558 - RNA, 19 nt, Artificial Sequence
  Description of Artificial Sequence: Synthetic oligonucleotide
augauaucgaaagguuugc

SEQ ID NO: 2172559 - RNA, 19 nt, Artificial Sequence
  Description of Artificial Sequence: Synthetic oligonucleotide
uaaugauaucgaaagguuu

SEQ ID NO: 2172560 - RNA, 19 nt, Artificial Sequence
  Description of Artificial Sequence: Synthetic oligonucleotide
guaaguagagacugaaguc

SEQ ID NO: 2172561 - RNA, 19 nt, Artificial Sequence
  Description of Artificial Sequence: Synthetic oligonucleotide
gccacuaugaaaucucugg

SEQ ID NO: 2172562 - RNA, 19 nt, Artificial Sequence
  Description of Artificial Sequence: Synthetic oligonucleotide
uccuauguuggacaagggu

SEQ ID NO: 2172563 - RNA, 19 nt, Artificial Sequence
  Description of Artificial Sequence: Synthetic oligonucleotide
aaggccucuccacacuccg

SEQ ID NO: 2172564 - RNA, 19 nt, Artificial Sequence
  Description of Artificial Sequence: Synthetic oligonucleotide
uuaggaacauuuuaacauu

SEQ ID NO: 2172565 - RNA, 19 nt, Artificial Sequence
  Description of Artificial Sequence: Synthetic oligonucleotide
guaugaauguucugguggc

SEQ ID NO: 2172566 - RNA, 19 nt, Artificial Sequence
  Description of Artificial Sequence: Synthetic oligonucleotide
uuuguaugaauuguuuuau

SEQ ID NO: 2172567 - RNA, 19 nt, Artificial Sequence
  Description of Artificial Sequence: Synthetic oligonucleotide
gaagucgaaguccucuacc

SEQ ID NO: 2172568 - RNA, 19 nt, Artificial Sequence
  Description of Artificial Sequence: Synthetic oligonucleotide
uaucgaaagguuugccugc

SEQ ID NO: 2172569 - RNA, 19 nt, Artificial Sequence
  Description of Artificial Sequence: Synthetic oligonucleotide
ucugaacaccgaaagggcu

SEQ ID NO: 2172570 - RNA, 19 nt, Artificial Sequence
  Description of Artificial Sequence: Synthetic oligonucleotide
aacauugguaagguuccuc

SEQ ID NO: 2172571 - RNA, 19 nt, Artificial Sequence
  Description of Artificial Sequence: Synthetic oligonucleotide
acagaguuuacacuugaaa

SEQ ID NO: 2172572 - RNA, 19 nt, Artificial Sequence
  Description of Artificial Sequence: Synthetic oligonucleotide
aguaacguagcucccacau

SEQ ID NO: 2172573 - RNA, 19 nt, Artificial Sequence
  Description of Artificial Sequence: Synthetic oligonucleotide
guuggguaaguagagacug

SEQ ID NO: 2172574 - RNA, 19 nt, Artificial Sequence
  Description of Artificial Sequence: Synthetic oligonucleotide
agcaugaauguuccuaugu

SEQ ID NO: 2172575 - RNA, 19 nt, Artificial Sequence
  Description of Artificial Sequence: Synthetic oligonucleotide
acauugcuugcacugguag

SEQ ID NO: 2172576 - RNA, 19 nt, Artificial Sequence
  Description of Artificial Sequence: Synthetic oligonucleotide
acauugguaagguuccuca

SEQ ID NO: 2172577 - RNA, 19 nt, Artificial Sequence
  Description of Artificial Sequence: Synthetic oligonucleotide
uggcgaaugagauggauau

SEQ ID NO: 2172578 - RNA, 19 nt, Artificial Sequence
  Description of Artificial Sequence: Synthetic oligonucleotide
aggguuugauaucaguaug

SEQ ID NO: 2172579 - RNA, 19 nt, Artificial Sequence
  Description of Artificial Sequence: Synthetic oligonucleotide
gauauuaagucugaagacu

SEQ ID NO: 2172580 - RNA, 19 nt, Artificial Sequence
  Description of Artificial Sequence: Synthetic oligonucleotide
aauguucugguggcgagug

SEQ ID NO: 2172581 - RNA, 19 nt, Artificial Sequence
  Description of Artificial Sequence: Synthetic oligonucleotide
uguuggguaaguagagacu

SEQ ID NO: 2172582 - RNA, 19 nt, Artificial Sequence
  Description of Artificial Sequence: Synthetic oligonucleotide
uuaguguggauacucugau

SEQ ID NO: 2172583 - RNA, 19 nt, Artificial Sequence
  Description of Artificial Sequence: Synthetic oligonucleotide
ugagcgccgauuaaaggcu

SEQ ID NO: 2172584 - RNA, 19 nt, Artificial Sequence
  Description of Artificial Sequence: Synthetic oligonucleotide
auuuuaacauugguaaggu

SEQ ID NO: 2172585 - RNA, 19 nt, Artificial Sequence
  Description of Artificial Sequence: Synthetic oligonucleotide
ugguuucacaccagcauga

SEQ ID NO: 2172586 - RNA, 19 nt, Artificial Sequence
  Description of Artificial Sequence: Synthetic oligonucleotide
uaggguuugauaucaguau

SEQ ID NO: 2172587 - RNA, 19 nt, Artificial Sequence
  Description of Artificial Sequence: Synthetic oligonucleotide
cacuaugaaaucucuggug

SEQ ID NO: 2172588 - RNA, 19 nt, Artificial Sequence
  Description of Artificial Sequence: Synthetic oligonucleotide
ugugugagguuugagcgcc

SEQ ID NO: 2172589 - RNA, 19 nt, Artificial Sequence
  Description of Artificial Sequence: Synthetic oligonucleotide
aguggauacucugaugcuc

SEQ ID NO: 2172590 - RNA, 19 nt, Artificial Sequence
  Description of Artificial Sequence: Synthetic oligonucleotide
guuuguaugaauuguuuua

SEQ ID NO: 2172591 - RNA, 19 nt, Artificial Sequence
  Description of Artificial Sequence: Synthetic oligonucleotide
aagguuugccugcauucug

SEQ ID NO: 2172592 - RNA, 19 nt, Artificial Sequence
  Description of Artificial Sequence: Synthetic oligonucleotide
aaauuugaacgucgacgga

SEQ ID NO: 2172593 - RNA, 19 nt, Artificial Sequence
  Description of Artificial Sequence: Synthetic oligonucleotide
acacugcuugcacugaaag

SEQ ID NO: 2172594 - RNA, 19 nt, Artificial Sequence
  Description of Artificial Sequence: Synthetic oligonucleotide
uugaaagguuucacauuag

SEQ ID NO: 2172595 - RNA, 19 nt, Artificial Sequence
  Description of Artificial Sequence: Synthetic oligonucleotide
aagguauccaucacgagua

SEQ ID NO: 2172596 - RNA, 19 nt, Artificial Sequence
  Description of Artificial Sequence: Synthetic oligonucleotide
aguucugacccacacugcu

SEQ ID NO: 2172597 - RNA, 19 nt, Artificial Sequence
  Description of Artificial Sequence: Synthetic oligonucleotide
ucaucgguaugaauucugu

SEQ ID NO: 2172598 - RNA, 19 nt, Artificial Sequence
  Description of Artificial Sequence: Synthetic oligonucleotide
ucgaaguccucuaccacga

SEQ ID NO: 2172599 - RNA, 19 nt, Artificial Sequence
  Description of Artificial Sequence: Synthetic oligonucleotide
uugauaucaguaugaguuc

SEQ ID NO: 2172600 - RNA, 19 nt, Artificial Sequence
  Description of Artificial Sequence: Synthetic oligonucleotide
ccuauguuggacaagggug

SEQ ID NO: 2172601 - RNA, 19 nt, Artificial Sequence
  Description of Artificial Sequence: Synthetic oligonucleotide
auguuggguaaguucugac

SEQ ID NO: 2172602 - RNA, 19 nt, Artificial Sequence
  Description of Artificial Sequence: Synthetic oligonucleotide
ucugaugcucaguaaaauu

SEQ ID NO: 2172603 - RNA, 19 nt, Artificial Sequence
  Description of Artificial Sequence: Synthetic oligonucleotide
gaaguccucuaccacgagc

SEQ ID NO: 2172604 - RNA, 19 nt, Artificial Sequence
  Description of Artificial Sequence: Synthetic oligonucleotide
agucgaaguccucuaccac

SEQ ID NO: 2172605 - RNA, 19 nt, Artificial Sequence
  Description of Artificial Sequence: Synthetic oligonucleotide
ggauauuaagucugaagac

SEQ ID NO: 2172606 - RNA, 19 nt, Artificial Sequence
  Description of Artificial Sequence: Synthetic oligonucleotide
cauugcuugcacugguagg

SEQ ID NO: 2172607 - RNA, 19 nt, Artificial Sequence
  Description of Artificial Sequence: Synthetic oligonucleotide
guaaaauuugaacgucgac

SEQ ID NO: 2172608 - RNA, 19 nt, Artificial Sequence
  Description of Artificial Sequence: Synthetic oligonucleotide
aucacgaguaacguagcuc

SEQ ID NO: 2172609 - RNA, 19 nt, Artificial Sequence
  Description of Artificial Sequence: Synthetic oligonucleotide
ugaauguuccuauguugga

SEQ ID NO: 2172610 - RNA, 19 nt, Artificial Sequence
  Description of Artificial Sequence: Synthetic oligonucleotide
aggauucuugccagcaugc

SEQ ID NO: 2172611 - RNA, 19 nt, Artificial Sequence
  Description of Artificial Sequence: Synthetic oligonucleotide
aaagguuugccugcauucu

SEQ ID NO: 2172612 - RNA, 19 nt, Artificial Sequence
  Description of Artificial Sequence: Synthetic oligonucleotide
acaccagcaugaauguucc

SEQ ID NO: 2172613 - RNA, 19 nt, Artificial Sequence
  Description of Artificial Sequence: Synthetic oligonucleotide
uaugaauguucugguggcg

SEQ ID NO: 2172614 - RNA, 19 nt, Artificial Sequence
  Description of Artificial Sequence: Synthetic oligonucleotide
gauaucgaaagguuugccu

SEQ ID NO: 2172615 - RNA, 19 nt, Artificial Sequence
  Description of Artificial Sequence: Synthetic oligonucleotide
auucuaacauguccaagaa

SEQ ID NO: 2172616 - RNA, 19 nt, Artificial Sequence
  Description of Artificial Sequence: Synthetic oligonucleotide
ugguucuuaaggugggcug

SEQ ID NO: 2172617 - RNA, 19 nt, Artificial Sequence
  Description of Artificial Sequence: Synthetic oligonucleotide
uucacaccagcaugaaugu

SEQ ID NO: 2172618 - RNA, 19 nt, Artificial Sequence
  Description of Artificial Sequence: Synthetic oligonucleotide
ugauguugugugagguuug

SEQ ID NO: 2172619 - RNA, 19 nt, Artificial Sequence
  Description of Artificial Sequence: Synthetic oligonucleotide
aaguagagacugaagucug

SEQ ID NO: 2172620 - RNA, 19 nt, Artificial Sequence
  Description of Artificial Sequence: Synthetic oligonucleotide
aguaaaauuugaacgucga

SEQ ID NO: 2172621 - RNA, 19 nt, Artificial Sequence
  Description of Artificial Sequence: Synthetic oligonucleotide
gcauucugaacaccgaaag

SEQ ID NO: 2172622 - RNA, 19 nt, Artificial Sequence
  Description of Artificial Sequence: Synthetic oligonucleotide
aaguucugacccacacugc

SEQ ID NO: 2172623 - RNA, 19 nt, Artificial Sequence
  Description of Artificial Sequence: Synthetic oligonucleotide
gauuuucucgugaagucga

SEQ ID NO: 2172624 - RNA, 19 nt, Artificial Sequence
  Description of Artificial Sequence: Synthetic oligonucleotide
ugaagucgaaguccucuac

SEQ ID NO: 2172625 - RNA, 19 nt, Artificial Sequence
  Description of Artificial Sequence: Synthetic oligonucleotide
uccacauugcuugcacugg

SEQ ID NO: 2172626 - RNA, 19 nt, Artificial Sequence
  Description of Artificial Sequence: Synthetic oligonucleotide
uucucgugaagucgaaguc

SEQ ID NO: 2172627 - RNA, 19 nt, Artificial Sequence
  Description of Artificial Sequence: Synthetic oligonucleotide
uucuaacauguccaagaaa

SEQ ID NO: 2172628 - RNA, 19 nt, Artificial Sequence
  Description of Artificial Sequence: Synthetic oligonucleotide
uggauacucugaugcacag

SEQ ID NO: 2172629 - RNA, 19 nt, Artificial Sequence
  Description of Artificial Sequence: Synthetic oligonucleotide
ugauguuggguaaguucug

SEQ ID NO: 2172630 - RNA, 19 nt, Artificial Sequence
  Description of Artificial Sequence: Synthetic oligonucleotide
guagcucccacauucuuuc

SEQ ID NO: 2172631 - RNA, 19 nt, Artificial Sequence
  Description of Artificial Sequence: Synthetic oligonucleotide
cacugcuugcacugaaagg

SEQ ID NO: 2172632 - RNA, 19 nt, Artificial Sequence
  Description of Artificial Sequence: Synthetic oligonucleotide
cuuugcaaugguaaggucu

SEQ ID NO: 2172633 - RNA, 19 nt, Artificial Sequence
  Description of Artificial Sequence: Synthetic oligonucleotide
guaugaauuguuuuauggu

SEQ ID NO: 2172634 - RNA, 19 nt, Artificial Sequence
  Description of Artificial Sequence: Synthetic oligonucleotide
auuaguguggauacucuga

SEQ ID NO: 2172635 - RNA, 19 nt, Artificial Sequence
  Description of Artificial Sequence: Synthetic oligonucleotide
ugguuuguaugaauuguuu

SEQ ID NO: 2172636 - RNA, 19 nt, Artificial Sequence
  Description of Artificial Sequence: Synthetic oligonucleotide
cucucaucgguaugaauuc

SEQ ID NO: 2172637 - RNA, 19 nt, Artificial Sequence
  Description of Artificial Sequence: Synthetic oligonucleotide
cacuccguacauucaaaag

SEQ ID NO: 2172638 - RNA, 19 nt, Artificial Sequence
  Description of Artificial Sequence: Synthetic oligonucleotide
uugugugagguuugagcgc

SEQ ID NO: 2172639 - RNA, 19 nt, Artificial Sequence
  Description of Artificial Sequence: Synthetic oligonucleotide
aaggguggaggcucucuug

SEQ ID NO: 2172640 - RNA, 19 nt, Artificial Sequence
  Description of Artificial Sequence: Synthetic oligonucleotide
ucccacauucuuugcaaug

SEQ ID NO: 2172641 - RNA, 19 nt, Artificial Sequence
  Description of Artificial Sequence: Synthetic oligonucleotide
ugccccacagaguuuacac

SEQ ID NO: 2172642 - RNA, 19 nt, Artificial Sequence
  Description of Artificial Sequence: Synthetic oligonucleotide
cucuaccacgagcaaagcc

SEQ ID NO: 2172643 - RNA, 19 nt, Artificial Sequence
  Description of Artificial Sequence: Synthetic oligonucleotide
guuugagcgccgauuaaag

SEQ ID NO: 2172644 - RNA, 19 nt, Artificial Sequence
  Description of Artificial Sequence: Synthetic oligonucleotide
ugauaucgaaagguuugcc

SEQ ID NO: 2172645 - RNA, 19 nt, Artificial Sequence
  Description of Artificial Sequence: Synthetic oligonucleotide
acgagcaaagcccuuucca

SEQ ID NO: 2172646 - RNA, 19 nt, Artificial Sequence
  Description of Artificial Sequence: Synthetic oligonucleotide
ggauuuucucgugaagucg

SEQ ID NO: 2172647 - RNA, 19 nt, Artificial Sequence
  Description of Artificial Sequence: Synthetic oligonucleotide
auuuucugauguuguguga

SEQ ID NO: 2172648 - RNA, 19 nt, Artificial Sequence
  Description of Artificial Sequence: Synthetic oligonucleotide
ggcuggaagacugaaaggc

SEQ ID NO: 2172649 - RNA, 19 nt, Artificial Sequence
  Description of Artificial Sequence: Synthetic oligonucleotide
guaagguuccucaccagug

SEQ ID NO: 2172650 - RNA, 19 nt, Artificial Sequence
  Description of Artificial Sequence: Synthetic oligonucleotide
ucugguggcgaaugagaug

SEQ ID NO: 2172651 - RNA, 19 nt, Artificial Sequence
  Description of Artificial Sequence: Synthetic oligonucleotide
cuuuccagaguggauacuc

SEQ ID NO: 2172652 - RNA, 19 nt, Artificial Sequence
  Description of Artificial Sequence: Synthetic oligonucleotide
agacugaaaggccucucca

SEQ ID NO: 2172653 - RNA, 19 nt, Artificial Sequence
  Description of Artificial Sequence: Synthetic oligonucleotide
gugauguuggguaaguaga

SEQ ID NO: 2172654 - RNA, 19 nt, Artificial Sequence
  Description of Artificial Sequence: Synthetic oligonucleotide
auuugaacgucgacggaag

SEQ ID NO: 2172655 - RNA, 19 nt, Artificial Sequence
  Description of Artificial Sequence: Synthetic oligonucleotide
auauuaagucugaagacuu

SEQ ID NO: 2172656 - RNA, 19 nt, Artificial Sequence
  Description of Artificial Sequence: Synthetic oligonucleotide
ugaacgucgacggaaguuu

SEQ ID NO: 2172657 - RNA, 19 nt, Artificial Sequence
  Description of Artificial Sequence: Synthetic oligonucleotide
uauccaucacgaguaacgu

SEQ ID NO: 2172658 - RNA, 19 nt, Artificial Sequence
  Description of Artificial Sequence: Synthetic oligonucleotide
cacauuaguguggauacuc

SEQ ID NO: 2172659 - RNA, 19 nt, Artificial Sequence
  Description of Artificial Sequence: Synthetic oligonucleotide
ugcauucuaacauguccaa

SEQ ID NO: 2172660 - RNA, 19 nt, Artificial Sequence
  Description of Artificial Sequence: Synthetic oligonucleotide
uuuucucgugaagucgaag

SEQ ID NO: 2172661 - RNA, 19 nt, Artificial Sequence
  Description of Artificial Sequence: Synthetic oligonucleotide
cucucuugaaggacuuccc

SEQ ID NO: 2172662 - RNA, 19 nt, Artificial Sequence
  Description of Artificial Sequence: Synthetic oligonucleotide
cugauguuggguaaguucu

SEQ ID NO: 2172663 - RNA, 19 nt, Artificial Sequence
  Description of Artificial Sequence: Synthetic oligonucleotide
uuaaggugggcuggaagac

SEQ ID NO: 2172664 - RNA, 19 nt, Artificial Sequence
  Description of Artificial Sequence: Synthetic oligonucleotide
auaucaguaugaguucucu

SEQ ID NO: 2172665 - RNA, 19 nt, Artificial Sequence
  Description of Artificial Sequence: Synthetic oligonucleotide
cucgccacuaugaaaucuc

SEQ ID NO: 2172666 - RNA, 19 nt, Artificial Sequence
  Description of Artificial Sequence: Synthetic oligonucleotide
aaggucucucaucgguaug

SEQ ID NO: 2172667 - RNA, 19 nt, Artificial Sequence
  Description of Artificial Sequence: Synthetic oligonucleotide
uuggguaaguucugaccca

SEQ ID NO: 2172668 - RNA, 19 nt, Artificial Sequence
  Description of Artificial Sequence: Synthetic oligonucleotide
gaguuuacacuugaaaggu

SEQ ID NO: 2172669 - RNA, 19 nt, Artificial Sequence
  Description of Artificial Sequence: Synthetic oligonucleotide
uuugaacgucgacggaagu

SEQ ID NO: 2172670 - RNA, 19 nt, Artificial Sequence
  Description of Artificial Sequence: Synthetic oligonucleotide
aagcucucucgccacuaug

SEQ ID NO: 2172671 - RNA, 19 nt, Artificial Sequence
  Description of Artificial Sequence: Synthetic oligonucleotide
uggaagacugaaaggccuc

SEQ ID NO: 2172672 - RNA, 19 nt, Artificial Sequence
  Description of Artificial Sequence: Synthetic oligonucleotide
uuggguaaguagagacuga

SEQ ID NO: 2172673 - RNA, 19 nt, Artificial Sequence
  Description of Artificial Sequence: Synthetic oligonucleotide
gaugcucaguaaaauuuga

SEQ ID NO: 2172674 - RNA, 19 nt, Artificial Sequence
  Description of Artificial Sequence: Synthetic oligonucleotide
cauugguaagguuccucac

SEQ ID NO: 2172675 - RNA, 19 nt, Artificial Sequence
  Description of Artificial Sequence: Synthetic oligonucleotide
guuggacaaggguggaggc

SEQ ID NO: 2172676 - RNA, 19 nt, Artificial Sequence
  Description of Artificial Sequence: Synthetic oligonucleotide
ucccacauucuuucauuca

SEQ ID NO: 2172677 - RNA, 19 nt, Artificial Sequence
  Description of Artificial Sequence: Synthetic oligonucleotide
cagcaugcauucuaacaug

SEQ ID NO: 2172678 - RNA, 19 nt, Artificial Sequence
  Description of Artificial Sequence: Synthetic oligonucleotide
gguaaguucugacccacac

SEQ ID NO: 2172679 - RNA, 19 nt, Artificial Sequence
  Description of Artificial Sequence: Synthetic oligonucleotide
caucgguaugaauucugug

SEQ ID NO: 2172680 - RNA, 19 nt, Artificial Sequence
  Description of Artificial Sequence: Synthetic oligonucleotide
agguuucacauuagugugg

SEQ ID NO: 2172681 - RNA, 19 nt, Artificial Sequence
  Description of Artificial Sequence: Synthetic oligonucleotide
gguuugauaucaguaugag

SEQ ID NO: 2172682 - RNA, 19 nt, Artificial Sequence
  Description of Artificial Sequence: Synthetic oligonucleotide
uuuuaacauugguaagguu

SEQ ID NO: 2172683 - RNA, 19 nt, Artificial Sequence
  Description of Artificial Sequence: Synthetic oligonucleotide
ugguaaggucucucaucgg

SEQ ID NO: 2172684 - RNA, 19 nt, Artificial Sequence
  Description of Artificial Sequence: Synthetic oligonucleotide
agacugaagucugaaggcu

SEQ ID NO: 2172685 - RNA, 19 nt, Artificial Sequence
  Description of Artificial Sequence: Synthetic oligonucleotide
uggacaaggguggaggcuc

SEQ ID NO: 2172686 - RNA, 19 nt, Artificial Sequence
  Description of Artificial Sequence: Synthetic oligonucleotide
uggguaaguagagacugaa

SEQ ID NO: 2172687 - RNA, 19 nt, Artificial Sequence
  Description of Artificial Sequence: Synthetic oligonucleotide
gguucuuaaggugggcugg

SEQ ID NO: 2172688 - RNA, 19 nt, Artificial Sequence
  Description of Artificial Sequence: Synthetic oligonucleotide
aaagcucucucgccacuau

SEQ ID NO: 2172689 - RNA, 19 nt, Artificial Sequence
  Description of Artificial Sequence: Synthetic oligonucleotide
uucugugauguuggguaag

SEQ ID NO: 2172690 - RNA, 19 nt, Artificial Sequence
  Description of Artificial Sequence: Synthetic oligonucleotide
ugaugugcuuuaagguauc

SEQ ID NO: 2172691 - RNA, 19 nt, Artificial Sequence
  Description of Artificial Sequence: Synthetic oligonucleotide
gauaucaguaugaguucuc

SEQ ID NO: 2172692 - RNA, 19 nt, Artificial Sequence
  Description of Artificial Sequence: Synthetic oligonucleotide
caccgaaagggcuucucac

SEQ ID NO: 2172693 - RNA, 19 nt, Artificial Sequence
  Description of Artificial Sequence: Synthetic oligonucleotide
uugccugcauucugaacac

SEQ ID NO: 2172694 - RNA, 19 nt, Artificial Sequence
  Description of Artificial Sequence: Synthetic oligonucleotide
ucugauguugugugagguu

SEQ ID NO: 2172695 - RNA, 19 nt, Artificial Sequence
  Description of Artificial Sequence: Synthetic oligonucleotide
uaugguucuuaaggugggc

SEQ ID NO: 2172696 - RNA, 19 nt, Artificial Sequence
  Description of Artificial Sequence: Synthetic oligonucleotide
augaauguucugguggcga

SEQ ID NO: 2172697 - RNA, 19 nt, Artificial Sequence
  Description of Artificial Sequence: Synthetic oligonucleotide
gagguuugagcgccgauua

SEQ ID NO: 2172698 - RNA, 19 nt, Artificial Sequence
  Description of Artificial Sequence: Synthetic oligonucleotide
ugcuugcacugaaaggguc

SEQ ID NO: 2172699 - RNA, 19 nt, Artificial Sequence
  Description of Artificial Sequence: Synthetic oligonucleotide
agucugaaggcugccccac

SEQ ID NO: 2172700 - RNA, 19 nt, Artificial Sequence
  Description of Artificial Sequence: Synthetic oligonucleotide
uguuccuauguuggacaag

SEQ ID NO: 2172701 - RNA, 19 nt, Artificial Sequence
  Description of Artificial Sequence: Synthetic oligonucleotide
gauguuggguaaguagaga

SEQ ID NO: 2172702 - RNA, 19 nt, Artificial Sequence
  Description of Artificial Sequence: Synthetic oligonucleotide
gauguuggguaaguucuga

SEQ ID NO: 2172703 - RNA, 19 nt, Artificial Sequence
  Description of Artificial Sequence: Synthetic oligonucleotide
acacuccguacauucaaaa

SEQ ID NO: 2172704 - RNA, 19 nt, Artificial Sequence
  Description of Artificial Sequence: Synthetic oligonucleotide
acauguccaagaaauuggu

SEQ ID NO: 2172705 - RNA, 19 nt, Artificial Sequence
  Description of Artificial Sequence: Synthetic oligonucleotide
ucgccacuaugaaaucucu

SEQ ID NO: 2172706 - RNA, 19 nt, Artificial Sequence
  Description of Artificial Sequence: Synthetic oligonucleotide
auucugugauguuggguaa

SEQ ID NO: 2172707 - RNA, 19 nt, Artificial Sequence
  Description of Artificial Sequence: Synthetic oligonucleotide
uccguacauucaaaagcuc

SEQ ID NO: 2172708 - RNA, 19 nt, Artificial Sequence
  Description of Artificial Sequence: Synthetic oligonucleotide
ucucgccacuaugaaaucu

SEQ ID NO: 2172709 - RNA, 19 nt, Artificial Sequence
  Description of Artificial Sequence: Synthetic oligonucleotide
cuccguacauucaaaagcu

SEQ ID NO: 2172710 - RNA, 19 nt, Artificial Sequence
  Description of Artificial Sequence: Synthetic oligonucleotide
ugguaagguuccucaccag

SEQ ID NO: 2172711 - RNA, 19 nt, Artificial Sequence
  Description of Artificial Sequence: Synthetic oligonucleotide
ugguaggguuugauaucag

SEQ ID NO: 2172712 - RNA, 19 nt, Artificial Sequence
  Description of Artificial Sequence: Synthetic oligonucleotide
augguucuuaaggugggcu

SEQ ID NO: 2172713 - RNA, 19 nt, Artificial Sequence
  Description of Artificial Sequence: Synthetic oligonucleotide
gguggaggcucucuugaag

SEQ ID NO: 2172714 - RNA, 19 nt, Artificial Sequence
  Description of Artificial Sequence: Synthetic oligonucleotide
uauguuggacaagggugga

SEQ ID NO: 2172715 - RNA, 19 nt, Artificial Sequence
  Description of Artificial Sequence: Synthetic oligonucleotide
ugagguuugagcgccgauu

SEQ ID NO: 2172716 - RNA, 19 nt, Artificial Sequence
  Description of Artificial Sequence: Synthetic oligonucleotide
cugaugcucaguaaaauuu

SEQ ID NO: 2172717 - RNA, 19 nt, Artificial Sequence
  Description of Artificial Sequence: Synthetic oligonucleotide
ugaacaccgaaagggcuuc

SEQ ID NO: 2172718 - RNA, 19 nt, Artificial Sequence
  Description of Artificial Sequence: Synthetic oligonucleotide
acauuaguguggauacucu

SEQ ID NO: 2172719 - RNA, 19 nt, Artificial Sequence
  Description of Artificial Sequence: Synthetic oligonucleotide
cacucguugcauucauaug

SEQ ID NO: 2172720 - RNA, 19 nt, Artificial Sequence
  Description of Artificial Sequence: Synthetic oligonucleotide
accagcaugaauguuccua

SEQ ID NO: 2172721 - RNA, 19 nt, Artificial Sequence
  Description of Artificial Sequence: Synthetic oligonucleotide
uggguaaguucugacccac

SEQ ID NO: 2172722 - RNA, 19 nt, Artificial Sequence
  Description of Artificial Sequence: Synthetic oligonucleotide
augaaaucucugguggcga

SEQ ID NO: 2172723 - RNA, 19 nt, Artificial Sequence
  Description of Artificial Sequence: Synthetic oligonucleotide
guuugauaucaguaugagu

SEQ ID NO: 2172724 - RNA, 19 nt, Artificial Sequence
  Description of Artificial Sequence: Synthetic oligonucleotide
ugcaaugguaaggucucuc

SEQ ID NO: 2172725 - RNA, 19 nt, Artificial Sequence
  Description of Artificial Sequence: Synthetic oligonucleotide
auguuccuauguuggacaa

SEQ ID NO: 2172726 - RNA, 19 nt, Artificial Sequence
  Description of Artificial Sequence: Synthetic oligonucleotide
uugaacgucgacggaaguu

SEQ ID NO: 2172727 - RNA, 19 nt, Artificial Sequence
  Description of Artificial Sequence: Synthetic oligonucleotide
ugcauucauaugguuucac

SEQ ID NO: 2172728 - RNA, 19 nt, Artificial Sequence
  Description of Artificial Sequence: Synthetic oligonucleotide
cucugaugugcuuuaaggu

SEQ ID NO: 2172729 - RNA, 19 nt, Artificial Sequence
  Description of Artificial Sequence: Synthetic oligonucleotide
guggauacucugaugcuca

SEQ ID NO: 2172730 - RNA, 19 nt, Artificial Sequence
  Description of Artificial Sequence: Synthetic oligonucleotide
cacuugaaagguuucacau

SEQ ID NO: 2172731 - RNA, 19 nt, Artificial Sequence
  Description of Artificial Sequence: Synthetic oligonucleotide
cugguaggguuugauauca

SEQ ID NO: 2172732 - RNA, 19 nt, Artificial Sequence
  Description of Artificial Sequence: Synthetic oligonucleotide
cacgagcaaagcccuuucc

SEQ ID NO: 2172733 - RNA, 19 nt, Artificial Sequence
  Description of Artificial Sequence: Synthetic oligonucleotide
cuugccagcaugcauucua

SEQ ID NO: 2172734 - RNA, 19 nt, Artificial Sequence
  Description of Artificial Sequence: Synthetic oligonucleotide
cacgaguaacguagcuccc

SEQ ID NO: 2172735 - RNA, 19 nt, Artificial Sequence
  Description of Artificial Sequence: Synthetic oligonucleotide
gauguugugugagguuuga

SEQ ID NO: 2172736 - RNA, 19 nt, Artificial Sequence
  Description of Artificial Sequence: Synthetic oligonucleotide
gccugcauucugaacaccg

SEQ ID NO: 2172737 - RNA, 19 nt, Artificial Sequence
  Description of Artificial Sequence: Synthetic oligonucleotide
uuggacaaggguggaggcu

SEQ ID NO: 2172738 - RNA, 19 nt, Artificial Sequence
  Description of Artificial Sequence: Synthetic oligonucleotide
agauggauauuaagucuga

SEQ ID NO: 2172739 - RNA, 19 nt, Artificial Sequence
  Description of Artificial Sequence: Synthetic oligonucleotide
agcucucucgccacuauga

SEQ ID NO: 2172740 - RNA, 19 nt, Artificial Sequence
  Description of Artificial Sequence: Synthetic oligonucleotide
cacugguaggguuugauau

SEQ ID NO: 2172741 - RNA, 19 nt, Artificial Sequence
  Description of Artificial Sequence: Synthetic oligonucleotide
augugcuuuaagguaucca

SEQ ID NO: 2172742 - RNA, 19 nt, Artificial Sequence
  Description of Artificial Sequence: Synthetic oligonucleotide
aacguagcucccacauucu

SEQ ID NO: 2172743 - RNA, 19 nt, Artificial Sequence
  Description of Artificial Sequence: Synthetic oligonucleotide
gauggauauuaagucugaa

SEQ ID NO: 2172744 - RNA, 19 nt, Artificial Sequence
  Description of Artificial Sequence: Synthetic oligonucleotide
gcucucuugaaggacuucc

SEQ ID NO: 2172745 - RNA, 19 nt, Artificial Sequence
  Description of Artificial Sequence: Synthetic oligonucleotide
cugaugugcuuuaagguau

SEQ ID NO: 2172746 - RNA, 19 nt, Artificial Sequence
  Description of Artificial Sequence: Synthetic oligonucleotide
agcucccacauucuuucau

SEQ ID NO: 2172747 - RNA, 19 nt, Artificial Sequence
  Description of Artificial Sequence: Synthetic oligonucleotide
guaaugauaucgaaagguu

SEQ ID NO: 2172748 - RNA, 19 nt, Artificial Sequence
  Description of Artificial Sequence: Synthetic oligonucleotide
ucacauuaguguggauacu

SEQ ID NO: 2172749 - RNA, 19 nt, Artificial Sequence
  Description of Artificial Sequence: Synthetic oligonucleotide
cagcaugaauguuccuaug

SEQ ID NO: 2172750 - RNA, 19 nt, Artificial Sequence
  Description of Artificial Sequence: Synthetic oligonucleotide
gccagcaugcauucuaaca

SEQ ID NO: 2172751 - RNA, 19 nt, Artificial Sequence
  Description of Artificial Sequence: Synthetic oligonucleotide
gguaaggucucucaucggu

SEQ ID NO: 2172752 - RNA, 19 nt, Artificial Sequence
  Description of Artificial Sequence: Synthetic oligonucleotide
acgaguaacguagcuccca

SEQ ID NO: 2172753 - RNA, 19 nt, Artificial Sequence
  Description of Artificial Sequence: Synthetic oligonucleotide
gugcuuuaagguauccauc

SEQ ID NO: 2172754 - RNA, 19 nt, Artificial Sequence
  Description of Artificial Sequence: Synthetic oligonucleotide
cguacauucaaaagcucuc

SEQ ID NO: 2172755 - RNA, 19 nt, Artificial Sequence
  Description of Artificial Sequence: Synthetic oligonucleotide
gaguaacguagcucccaca

SEQ ID NO: 2172756 - RNA, 19 nt, Artificial Sequence
  Description of Artificial Sequence: Synthetic oligonucleotide
gaagacugaaaggccucuc

SEQ ID NO: 2172757 - RNA, 19 nt, Artificial Sequence
  Description of Artificial Sequence: Synthetic oligonucleotide
guaaguucugacccacacu

SEQ ID NO: 2172758 - RNA, 19 nt, Artificial Sequence
  Description of Artificial Sequence: Synthetic oligonucleotide
aguagagacugaagucuga

SEQ ID NO: 2172759 - RNA, 19 nt, Artificial Sequence
  Description of Artificial Sequence: Synthetic oligonucleotide
auguuggacaaggguggag

SEQ ID NO: 2172760 - RNA, 19 nt, Artificial Sequence
  Description of Artificial Sequence: Synthetic oligonucleotide
auccaucacgaguaacgua

SEQ ID NO: 2172761 - RNA, 19 nt, Artificial Sequence
  Description of Artificial Sequence: Synthetic oligonucleotide
agguuugccugcauucuga

SEQ ID NO: 2172762 - RNA, 19 nt, Artificial Sequence
  Description of Artificial Sequence: Synthetic oligonucleotide
gguuucacauuagugugga

SEQ ID NO: 2172763 - RNA, 19 nt, Artificial Sequence
  Description of Artificial Sequence: Synthetic oligonucleotide
auguugugugagguuugag

SEQ ID NO: 2172764 - RNA, 19 nt, Artificial Sequence
  Description of Artificial Sequence: Synthetic oligonucleotide
aucgaaagguuugccugca

SEQ ID NO: 2172765 - RNA, 19 nt, Artificial Sequence
  Description of Artificial Sequence: Synthetic oligonucleotide
ugccagcaugcauucuaac

SEQ ID NO: 2172766 - RNA, 19 nt, Artificial Sequence
  Description of Artificial Sequence: Synthetic oligonucleotide
gcgaaugagauggauauua

SEQ ID NO: 2172767 - RNA, 19 nt, Artificial Sequence
  Description of Artificial Sequence: Synthetic oligonucleotide
gcuuuaagguauccaucac

SEQ ID NO: 2172768 - RNA, 19 nt, Artificial Sequence
  Description of Artificial Sequence: Synthetic oligonucleotide
ucguugcauucauaugguu

SEQ ID NO: 2172769 - RNA, 19 nt, Artificial Sequence
  Description of Artificial Sequence: Synthetic oligonucleotide
gcauucuaacauguccaag

SEQ ID NO: 2172770 - RNA, 19 nt, Artificial Sequence
  Description of Artificial Sequence: Synthetic oligonucleotide
ggguaaguagagacugaag

SEQ ID NO: 2172771 - RNA, 19 nt, Artificial Sequence
  Description of Artificial Sequence: Synthetic oligonucleotide
gaguggauacucugaugcu

SEQ ID NO: 2172772 - RNA, 19 nt, Artificial Sequence
  Description of Artificial Sequence: Synthetic oligonucleotide
ucgaaagguuugccugcau

SEQ ID NO: 2172773 - RNA, 19 nt, Artificial Sequence
  Description of Artificial Sequence: Synthetic oligonucleotide
gguuuguaugaauuguuuu

SEQ ID NO: 2172774 - RNA, 19 nt, Artificial Sequence
  Description of Artificial Sequence: Synthetic oligonucleotide
acaaggguggaggcucucu

SEQ ID NO: 2172775 - RNA, 19 nt, Artificial Sequence
  Description of Artificial Sequence: Synthetic oligonucleotide
uagcucccacauucuuuca

SEQ ID NO: 2172776 - RNA, 19 nt, Artificial Sequence
  Description of Artificial Sequence: Synthetic oligonucleotide
cucguugcauucauauggu

SEQ ID NO: 2172777 - RNA, 19 nt, Artificial Sequence
  Description of Artificial Sequence: Synthetic oligonucleotide
agguuugagcgccgauuaa

SEQ ID NO: 2172778 - RNA, 19 nt, Artificial Sequence
  Description of Artificial Sequence: Synthetic oligonucleotide
cucucucgccacuaugaaa

SEQ ID NO: 2172779 - RNA, 19 nt, Artificial Sequence
  Description of Artificial Sequence: Synthetic oligonucleotide
cacagaguuuacacuugaa

SEQ ID NO: 2172780 - RNA, 19 nt, Artificial Sequence
  Description of Artificial Sequence: Synthetic oligonucleotide
gguuugagcgccgauuaaa

SEQ ID NO: 2172781 - RNA, 19 nt, Artificial Sequence
  Description of Artificial Sequence: Synthetic oligonucleotide
gguaggguuugauaucagu

SEQ ID NO: 2172782 - RNA, 19 nt, Artificial Sequence
  Description of Artificial Sequence: Synthetic oligonucleotide
cacacuccguacauucaaa

SEQ ID NO: 2172783 - RNA, 19 nt, Artificial Sequence
  Description of Artificial Sequence: Synthetic oligonucleotide
acguagcucccacauucuu

SEQ ID NO: 2172784 - RNA, 19 nt, Artificial Sequence
  Description of Artificial Sequence: Synthetic oligonucleotide
aguccucuaccacgagcaa

SEQ ID NO: 2172785 - RNA, 19 nt, Artificial Sequence
  Description of Artificial Sequence: Synthetic oligonucleotide
uugcaaugguaaggucucu

SEQ ID NO: 2172786 - RNA, 19 nt, Artificial Sequence
  Description of Artificial Sequence: Synthetic oligonucleotide
gguauccaucacgaguaac

SEQ ID NO: 2172787 - RNA, 19 nt, Artificial Sequence
  Description of Artificial Sequence: Synthetic oligonucleotide
agcccuuuccacauugcuu

SEQ ID NO: 2172788 - RNA, 19 nt, Artificial Sequence
  Description of Artificial Sequence: Synthetic oligonucleotide
cuaccacgagcaaagcccu

SEQ ID NO: 2172789 - RNA, 19 nt, Artificial Sequence
  Description of Artificial Sequence: Synthetic oligonucleotide
auguucugguggcgaguga

SEQ ID NO: 2172790 - RNA, 19 nt, Artificial Sequence
  Description of Artificial Sequence: Synthetic oligonucleotide
guucuuaaggugggcugga

SEQ ID NO: 2172791 - RNA, 19 nt, Artificial Sequence
  Description of Artificial Sequence: Synthetic oligonucleotide
cuaacauguccaagaaauu

SEQ ID NO: 2172792 - RNA, 19 nt, Artificial Sequence
  Description of Artificial Sequence: Synthetic oligonucleotide
accacgagcaaagcccuuu

SEQ ID NO: 2172793 - RNA, 19 nt, Artificial Sequence
  Description of Artificial Sequence: Synthetic oligonucleotide
ccaucacgaguaacguagc

SEQ ID NO: 2172794 - RNA, 19 nt, Artificial Sequence
  Description of Artificial Sequence: Synthetic oligonucleotide
guggcgaaugagauggaua

SEQ ID NO: 2172795 - RNA, 19 nt, Artificial Sequence
  Description of Artificial Sequence: Synthetic oligonucleotide
auuuucucgugaagucgaa

SEQ ID NO: 2172796 - RNA, 19 nt, Artificial Sequence
  Description of Artificial Sequence: Synthetic oligonucleotide
cacacugcuugcacugaaa

SEQ ID NO: 2172797 - RNA, 19 nt, Artificial Sequence
  Description of Artificial Sequence: Synthetic oligonucleotide
cugauguugugugagguuu

SEQ ID NO: 2172798 - RNA, 19 nt, Artificial Sequence
  Description of Artificial Sequence: Synthetic oligonucleotide
cugaacaccgaaagggcuu

SEQ ID NO: 2172799 - RNA, 19 nt, Artificial Sequence
  Description of Artificial Sequence: Synthetic oligonucleotide
auacucugaugcacaguaa

SEQ ID NO: 2172800 - RNA, 19 nt, Artificial Sequence
  Description of Artificial Sequence: Synthetic oligonucleotide
cacauugcuugcacuggua

SEQ ID NO: 2172801 - RNA, 19 nt, Artificial Sequence
  Description of Artificial Sequence: Synthetic oligonucleotide
ccagcaugcauucuaacau

SEQ ID NO: 2172802 - RNA, 19 nt, Artificial Sequence
  Description of Artificial Sequence: Synthetic oligonucleotide
ccguacauucaaaagcucu

SEQ ID NO: 2172803 - RNA, 19 nt, Artificial Sequence
  Description of Artificial Sequence: Synthetic oligonucleotide
guccucuaccacgagcaaa

SEQ ID NO: 2172804 - RNA, 19 nt, Artificial Sequence
  Description of Artificial Sequence: Synthetic oligonucleotide
gugugagguuugagcgccg

SEQ ID NO: 2172805 - RNA, 19 nt, Artificial Sequence
  Description of Artificial Sequence: Synthetic oligonucleotide
caucacgaguaacguagcu

SEQ ID NO: 2172806 - RNA, 19 nt, Artificial Sequence
  Description of Artificial Sequence: Synthetic oligonucleotide
cugcuugcacugaaagggu

SEQ ID NO: 2172807 - RNA, 19 nt, Artificial Sequence
  Description of Artificial Sequence: Synthetic oligonucleotide
gcaugaauguuccuauguu

SEQ ID NO: 2172808 - RNA, 19 nt, Artificial Sequence
  Description of Artificial Sequence: Synthetic oligonucleotide
cgaguaacguagcucccac

SEQ ID NO: 2172809 - RNA, 19 nt, Artificial Sequence
  Description of Artificial Sequence: Synthetic oligonucleotide
uaccacgagcaaagcccuu

SEQ ID NO: 2172810 - RNA, 19 nt, Artificial Sequence
  Description of Artificial Sequence: Synthetic oligonucleotide
ccugcauucugaacaccga

SEQ ID NO: 2172811 - RNA, 19 nt, Artificial Sequence
  Description of Artificial Sequence: Synthetic oligonucleotide
ggauucuugccagcaugca

SEQ ID NO: 2172812 - RNA, 19 nt, Artificial Sequence
  Description of Artificial Sequence: Synthetic oligonucleotide
ccagagugaauuuucugau

SEQ ID NO: 2172813 - RNA, 19 nt, Artificial Sequence
  Description of Artificial Sequence: Synthetic oligonucleotide
guaacguagcucccacauu

SEQ ID NO: 2172814 - RNA, 19 nt, Artificial Sequence
  Description of Artificial Sequence: Synthetic oligonucleotide
ccacagaguuuacacuuga

SEQ ID NO: 2172815 - RNA, 19 nt, Artificial Sequence
  Description of Artificial Sequence: Synthetic oligonucleotide
gacaaggguggaggcucuc

SEQ ID NO: 2172816 - RNA, 19 nt, Artificial Sequence
  Description of Artificial Sequence: Synthetic oligonucleotide
gcaugcauucuaacauguc

SEQ ID NO: 2172817 - RNA, 19 nt, Artificial Sequence
  Description of Artificial Sequence: Synthetic oligonucleotide
ggccucuccacacuccgua

SEQ ID NO: 2172818 - RNA, 19 nt, Artificial Sequence
  Description of Artificial Sequence: Synthetic oligonucleotide
gaauuguuuuaugguucuu

SEQ ID NO: 2172819 - RNA, 19 nt, Artificial Sequence
  Description of Artificial Sequence: Synthetic oligonucleotide
ccacuaugaaaucucuggu

SEQ ID NO: 2172820 - RNA, 19 nt, Artificial Sequence
  Description of Artificial Sequence: Synthetic oligonucleotide
gcucucucgccacuaugaa

SEQ ID NO: 2172821 - RNA, 19 nt, Artificial Sequence
  Description of Artificial Sequence: Synthetic oligonucleotide
gucucucaucgguaugaau

SEQ ID NO: 2172822 - RNA, 19 nt, Artificial Sequence
  Description of Artificial Sequence: Synthetic oligonucleotide
ccagcaugaauguuccuau

SEQ ID NO: 2172823 - RNA, 19 nt, Artificial Sequence
  Description of Artificial Sequence: Synthetic oligonucleotide
cgaaugagauggauauuaa

SEQ ID NO: 2172824 - RNA, 19 nt, Artificial Sequence
  Description of Artificial Sequence: Synthetic oligonucleotide
cgccacuaugaaaucucug

SEQ ID NO: 2172825 - RNA, 19 nt, Artificial Sequence
  Description of Artificial Sequence: Synthetic oligonucleotide
ccacgagcaaagcccuuuc

SEQ ID NO: 2172826 - RNA, 19 nt, Artificial Sequence
  Description of Artificial Sequence: Synthetic oligonucleotide
cugccccacagaguuuaca

SEQ ID NO: 2172827 - RNA, 19 nt, Artificial Sequence
  Description of Artificial Sequence: Synthetic oligonucleotide
guuucacauuaguguggau

SEQ ID NO: 2172828 - RNA, 19 nt, Artificial Sequence
  Description of Artificial Sequence: Synthetic oligonucleotide
agcgccgauuaaaggcuuu

SEQ ID NO: 2172829 - RNA, 19 nt, Artificial Sequence
  Description of Artificial Sequence: Synthetic oligonucleotide
gaacgucgacggaaguuuu

SEQ ID NO: 2172830 - RNA, 19 nt, Artificial Sequence
  Description of Artificial Sequence: Synthetic oligonucleotide
ggcugccccacagaguuua

SEQ ID NO: 2172831 - RNA, 19 nt, Artificial Sequence
  Description of Artificial Sequence: Synthetic oligonucleotide
cgccgauuaaaggcuuucc

SEQ ID NO: 2172832 - RNA, 19 nt, Artificial Sequence
  Description of Artificial Sequence: Synthetic oligonucleotide
gcucccacauucuuucauu

SEQ ID NO: 2172833 - RNA, 19 nt, Artificial Sequence
  Description of Artificial Sequence: Synthetic oligonucleotide
aggccucuccacacuccgu

SEQ ID NO: 2172834 - RNA, 19 nt, Artificial Sequence
  Description of Artificial Sequence: Synthetic oligonucleotide
ccucuaccacgagcaaagc

SEQ ID NO: 2172835 - RNA, 19 nt, Artificial Sequence
  Description of Artificial Sequence: Synthetic oligonucleotide
gccccacagaguuuacacu

SEQ ID NO: 2172836 - RNA, 19 nt, Artificial Sequence
  Description of Artificial Sequence: Synthetic oligonucleotide
ggguggaggcucucuugaa

SEQ ID NO: 2172837 - RNA, 19 nt, Artificial Sequence
  Description of Artificial Sequence: Synthetic oligonucleotide
gaacaccgaaagggcuucu

SEQ ID NO: 2172838 - RNA, 19 nt, Artificial Sequence
  Description of Artificial Sequence: Synthetic oligonucleotide
gcgccgauuaaaggcuuuc

SEQ ID NO: 2172839 - RNA, 19 nt, Artificial Sequence
  Description of Artificial Sequence: Synthetic oligonucleotide
ggguaaguucugacccaca

SEQ ID NO: 2172840 - RNA, 19 nt, Artificial Sequence
  Description of Artificial Sequence: Synthetic oligonucleotide
ggauacucugaugcucagu

SEQ ID NO: 2172841 - RNA, 19 nt, Artificial Sequence
  Description of Artificial Sequence: Synthetic oligonucleotide
ggauacucugaugcacagu

SEQ ID NO: 2172842 - RNA, 19 nt, Artificial Sequence
  Description of Artificial Sequence: Synthetic oligonucleotide
cgaaguccucuaccacgag

SEQ ID NO: 2172843 - RNA, 19 nt, Artificial Sequence
  Description of Artificial Sequence: Synthetic oligonucleotide
gguggcgaaugagauggau

SEQ ID NO: 2172844 - RNA, 19 nt, Artificial Sequence
  Description of Artificial Sequence: Synthetic oligonucleotide
gagcgccgauuaaaggcuu

SEQ ID NO: 2172845 - RNA, 19 nt, Artificial Sequence
  Description of Artificial Sequence: Synthetic oligonucleotide
caccagcaugaauguuccu

SEQ ID NO: 2172846 - RNA, 19 nt, Artificial Sequence
  Description of Artificial Sequence: Synthetic oligonucleotide
cgaaagguuugccugcauu

SEQ ID NO: 2172847 - RNA, 19 nt, Artificial Sequence
  Description of Artificial Sequence: Synthetic oligonucleotide
gcugccccacagaguuuac

SEQ ID NO: 2172848 - RNA, 19 nt, Artificial Sequence
  Description of Artificial Sequence: Synthetic oligonucleotide
ggacaaggguggaggcucu

SEQ ID NO: 2172849 - RNA, 19 nt, Artificial Sequence
  Description of Artificial Sequence: Synthetic oligonucleotide
ggcgaaugagauggauauu

SEQ ID NO: 2172850 - RNA, 19 nt, Artificial Sequence
  Description of Artificial Sequence: Synthetic oligonucleotide
uuuauaguggaauuuaggg

SEQ ID NO: 2172851 - RNA, 19 nt, Artificial Sequence
  Description of Artificial Sequence: Synthetic oligonucleotide
auuaaauugucggacaucc

SEQ ID NO: 2172852 - RNA, 19 nt, Artificial Sequence
  Description of Artificial Sequence: Synthetic oligonucleotide
uauaguggaauuuagggug

SEQ ID NO: 2172853 - RNA, 19 nt, Artificial Sequence
  Description of Artificial Sequence: Synthetic oligonucleotide
uauucuucuaaauuuuacg

SEQ ID NO: 2172854 - RNA, 19 nt, Artificial Sequence
  Description of Artificial Sequence: Synthetic oligonucleotide
aacugucaaguuucgaucc

SEQ ID NO: 2172855 - RNA, 19 nt, Artificial Sequence
  Description of Artificial Sequence: Synthetic oligonucleotide
uuuggcaugacgcaaaaug

SEQ ID NO: 2172856 - RNA, 19 nt, Artificial Sequence
  Description of Artificial Sequence: Synthetic oligonucleotide
uguaucaucaccuccacga

SEQ ID NO: 2172857 - RNA, 19 nt, Artificial Sequence
  Description of Artificial Sequence: Synthetic oligonucleotide
aauuucauacacccuuugg

SEQ ID NO: 2172858 - RNA, 19 nt, Artificial Sequence
  Description of Artificial Sequence: Synthetic oligonucleotide
uggcuuauuaaauugucgg

SEQ ID NO: 2172859 - RNA, 19 nt, Artificial Sequence
  Description of Artificial Sequence: Synthetic oligonucleotide
ucggucauuggaaacaagg

SEQ ID NO: 2172860 - RNA, 19 nt, Artificial Sequence
  Description of Artificial Sequence: Synthetic oligonucleotide
uaaauugucggacauccca

SEQ ID NO: 2172861 - RNA, 19 nt, Artificial Sequence
  Description of Artificial Sequence: Synthetic oligonucleotide
aucucuacuauauguacac

SEQ ID NO: 2172862 - RNA, 19 nt, Artificial Sequence
  Description of Artificial Sequence: Synthetic oligonucleotide
aaugauguaguccuggguu

SEQ ID NO: 2172863 - RNA, 19 nt, Artificial Sequence
  Description of Artificial Sequence: Synthetic oligonucleotide
uuggcaugacgcaaaaugg

SEQ ID NO: 2172864 - RNA, 19 nt, Artificial Sequence
  Description of Artificial Sequence: Synthetic oligonucleotide
uaauguaucaucaccucca

SEQ ID NO: 2172865 - RNA, 19 nt, Artificial Sequence
  Description of Artificial Sequence: Synthetic oligonucleotide
ucacaauguaggaugacag

SEQ ID NO: 2172866 - RNA, 19 nt, Artificial Sequence
  Description of Artificial Sequence: Synthetic oligonucleotide
uuaauguaucaucaccucc

SEQ ID NO: 2172867 - RNA, 19 nt, Artificial Sequence
  Description of Artificial Sequence: Synthetic oligonucleotide
gaguuuuggaauaugcugg

SEQ ID NO: 2172868 - RNA, 19 nt, Artificial Sequence
  Description of Artificial Sequence: Synthetic oligonucleotide
uuaucgucaggacugaaac

SEQ ID NO: 2172869 - RNA, 19 nt, Artificial Sequence
  Description of Artificial Sequence: Synthetic oligonucleotide
acaaguuugccguugccac

SEQ ID NO: 2172870 - RNA, 19 nt, Artificial Sequence
  Description of Artificial Sequence: Synthetic oligonucleotide
ugaguauucuucuaaauuu

SEQ ID NO: 2172871 - RNA, 19 nt, Artificial Sequence
  Description of Artificial Sequence: Synthetic oligonucleotide
aagacaaguuugccguugc

SEQ ID NO: 2172872 - RNA, 19 nt, Artificial Sequence
  Description of Artificial Sequence: Synthetic oligonucleotide
uuauaguggaauuuagggu

SEQ ID NO: 2172873 - RNA, 19 nt, Artificial Sequence
  Description of Artificial Sequence: Synthetic oligonucleotide
uaaaugaguauucuucuaa

SEQ ID NO: 2172874 - RNA, 19 nt, Artificial Sequence
  Description of Artificial Sequence: Synthetic oligonucleotide
ucauacacccuuuggaaag

SEQ ID NO: 2172875 - RNA, 19 nt, Artificial Sequence
  Description of Artificial Sequence: Synthetic oligonucleotide
acaauguaggaugacaggg

SEQ ID NO: 2172876 - RNA, 19 nt, Artificial Sequence
  Description of Artificial Sequence: Synthetic oligonucleotide
uguuuauaguggaauuuag

SEQ ID NO: 2172877 - RNA, 19 nt, Artificial Sequence
  Description of Artificial Sequence: Synthetic oligonucleotide
uaugaguuuaucgucagga

SEQ ID NO: 2172878 - RNA, 19 nt, Artificial Sequence
  Description of Artificial Sequence: Synthetic oligonucleotide
acaagcagcugccacaagg

SEQ ID NO: 2172879 - RNA, 19 nt, Artificial Sequence
  Description of Artificial Sequence: Synthetic oligonucleotide
aaguuucgaucccagaucu

SEQ ID NO: 2172880 - RNA, 19 nt, Artificial Sequence
  Description of Artificial Sequence: Synthetic oligonucleotide
ucggacaacacucgcaucc

SEQ ID NO: 2172881 - RNA, 19 nt, Artificial Sequence
  Description of Artificial Sequence: Synthetic oligonucleotide
ucuucuaaauuuuacguuu

SEQ ID NO: 2172882 - RNA, 19 nt, Artificial Sequence
  Description of Artificial Sequence: Synthetic oligonucleotide
aauggcuuauuaaauuguc

SEQ ID NO: 2172883 - RNA, 19 nt, Artificial Sequence
  Description of Artificial Sequence: Synthetic oligonucleotide
aucaucagauuccacuugg

SEQ ID NO: 2172884 - RNA, 19 nt, Artificial Sequence
  Description of Artificial Sequence: Synthetic oligonucleotide
cuggcgacacccaauaugg

SEQ ID NO: 2172885 - RNA, 19 nt, Artificial Sequence
  Description of Artificial Sequence: Synthetic oligonucleotide
uuuagggugaacugucaag

SEQ ID NO: 2172886 - RNA, 19 nt, Artificial Sequence
  Description of Artificial Sequence: Synthetic oligonucleotide
ugaaaauaauggcuuauua

SEQ ID NO: 2172887 - RNA, 19 nt, Artificial Sequence
  Description of Artificial Sequence: Synthetic oligonucleotide
aaugaguauucuucuaaau

SEQ ID NO: 2172888 - RNA, 19 nt, Artificial Sequence
  Description of Artificial Sequence: Synthetic oligonucleotide
aguacacuuuugccaaucc

SEQ ID NO: 2172889 - RNA, 19 nt, Artificial Sequence
  Description of Artificial Sequence: Synthetic oligonucleotide
ucguaguacacuuuugcca

SEQ ID NO: 2172890 - RNA, 19 nt, Artificial Sequence
  Description of Artificial Sequence: Synthetic oligonucleotide
ugaacugucaaguuucgau

SEQ ID NO: 2172891 - RNA, 19 nt, Artificial Sequence
  Description of Artificial Sequence: Synthetic oligonucleotide
ugcugcuuuggcaugacgc

SEQ ID NO: 2172892 - RNA, 19 nt, Artificial Sequence
  Description of Artificial Sequence: Synthetic oligonucleotide
uuucauacacccuuuggaa

SEQ ID NO: 2172893 - RNA, 19 nt, Artificial Sequence
  Description of Artificial Sequence: Synthetic oligonucleotide
uacuauauguacacguagu

SEQ ID NO: 2172894 - RNA, 19 nt, Artificial Sequence
  Description of Artificial Sequence: Synthetic oligonucleotide
uccacgagaggcaaggaca

SEQ ID NO: 2172895 - RNA, 19 nt, Artificial Sequence
  Description of Artificial Sequence: Synthetic oligonucleotide
uuuaaccacacauaauuuu

SEQ ID NO: 2172896 - RNA, 19 nt, Artificial Sequence
  Description of Artificial Sequence: Synthetic oligonucleotide
uuugccaauccauuuccag

SEQ ID NO: 2172897 - RNA, 19 nt, Artificial Sequence
  Description of Artificial Sequence: Synthetic oligonucleotide
uguacacguaguaggaaug

SEQ ID NO: 2172898 - RNA, 19 nt, Artificial Sequence
  Description of Artificial Sequence: Synthetic oligonucleotide
uuauuaaauugucggacau

SEQ ID NO: 2172899 - RNA, 19 nt, Artificial Sequence
  Description of Artificial Sequence: Synthetic oligonucleotide
gaauaugcuggcgacaccc

SEQ ID NO: 2172900 - RNA, 19 nt, Artificial Sequence
  Description of Artificial Sequence: Synthetic oligonucleotide
uuggaugccacaggcaucg

SEQ ID NO: 2172901 - RNA, 19 nt, Artificial Sequence
  Description of Artificial Sequence: Synthetic oligonucleotide
uaaccacacauaauuuugc

SEQ ID NO: 2172902 - RNA, 19 nt, Artificial Sequence
  Description of Artificial Sequence: Synthetic oligonucleotide
uuuccucguacuucguugg

SEQ ID NO: 2172903 - RNA, 19 nt, Artificial Sequence
  Description of Artificial Sequence: Synthetic oligonucleotide
aaguccugcgcucaaagaa

SEQ ID NO: 2172904 - RNA, 19 nt, Artificial Sequence
  Description of Artificial Sequence: Synthetic oligonucleotide
aucgucaggacugaaacag

SEQ ID NO: 2172905 - RNA, 19 nt, Artificial Sequence
  Description of Artificial Sequence: Synthetic oligonucleotide
uggaauuuagggugaacug

SEQ ID NO: 2172906 - RNA, 19 nt, Artificial Sequence
  Description of Artificial Sequence: Synthetic oligonucleotide
uuuaauguaucaucaccuc

SEQ ID NO: 2172907 - RNA, 19 nt, Artificial Sequence
  Description of Artificial Sequence: Synthetic oligonucleotide
aaauaauggcuuauuaaau

SEQ ID NO: 2172908 - RNA, 19 nt, Artificial Sequence
  Description of Artificial Sequence: Synthetic oligonucleotide
uguaggaugacagggugcc

SEQ ID NO: 2172909 - RNA, 19 nt, Artificial Sequence
  Description of Artificial Sequence: Synthetic oligonucleotide
ccacacauaauuuugcucc

SEQ ID NO: 2172910 - RNA, 19 nt, Artificial Sequence
  Description of Artificial Sequence: Synthetic oligonucleotide
cuacuauauguacacguag

SEQ ID NO: 2172911 - RNA, 19 nt, Artificial Sequence
  Description of Artificial Sequence: Synthetic oligonucleotide
acaagguucccaucucuac

SEQ ID NO: 2172912 - RNA, 19 nt, Artificial Sequence
  Description of Artificial Sequence: Synthetic oligonucleotide
accacacauaauuuugcuc

SEQ ID NO: 2172913 - RNA, 19 nt, Artificial Sequence
  Description of Artificial Sequence: Synthetic oligonucleotide
auauggguuaucuucugcu

SEQ ID NO: 2172914 - RNA, 19 nt, Artificial Sequence
  Description of Artificial Sequence: Synthetic oligonucleotide
uuuggaauaugcuggcgac

SEQ ID NO: 2172915 - RNA, 19 nt, Artificial Sequence
  Description of Artificial Sequence: Synthetic oligonucleotide
uuccguucugacaagcagc

SEQ ID NO: 2172916 - RNA, 19 nt, Artificial Sequence
  Description of Artificial Sequence: Synthetic oligonucleotide
gucaugagccuguuuauag

SEQ ID NO: 2172917 - RNA, 19 nt, Artificial Sequence
  Description of Artificial Sequence: Synthetic oligonucleotide
guaaugauguaguccuggg

SEQ ID NO: 2172918 - RNA, 19 nt, Artificial Sequence
  Description of Artificial Sequence: Synthetic oligonucleotide
acugucaaguuucgauccc

SEQ ID NO: 2172919 - RNA, 19 nt, Artificial Sequence
  Description of Artificial Sequence: Synthetic oligonucleotide
ucuacuauauguacacgua

SEQ ID NO: 2172920 - RNA, 19 nt, Artificial Sequence
  Description of Artificial Sequence: Synthetic oligonucleotide
uuuaucgucaggacugaaa

SEQ ID NO: 2172921 - RNA, 19 nt, Artificial Sequence
  Description of Artificial Sequence: Synthetic oligonucleotide
gacauuaccaucauaggaa

SEQ ID NO: 2172922 - RNA, 19 nt, Artificial Sequence
  Description of Artificial Sequence: Synthetic oligonucleotide
aaccacacauaauuuugcu

SEQ ID NO: 2172923 - RNA, 19 nt, Artificial Sequence
  Description of Artificial Sequence: Synthetic oligonucleotide
caugggcaaggcaugaggg

SEQ ID NO: 2172924 - RNA, 19 nt, Artificial Sequence
  Description of Artificial Sequence: Synthetic oligonucleotide
aguuccaaccaugaucugg

SEQ ID NO: 2172925 - RNA, 19 nt, Artificial Sequence
  Description of Artificial Sequence: Synthetic oligonucleotide
uuuuaaccacacauaauuu

SEQ ID NO: 2172926 - RNA, 19 nt, Artificial Sequence
  Description of Artificial Sequence: Synthetic oligonucleotide
cacaagaagugucugugcc

SEQ ID NO: 2172927 - RNA, 19 nt, Artificial Sequence
  Description of Artificial Sequence: Synthetic oligonucleotide
auaauuuugcuccccucug

SEQ ID NO: 2172928 - RNA, 19 nt, Artificial Sequence
  Description of Artificial Sequence: Synthetic oligonucleotide
aggacauuaccaucauagg

SEQ ID NO: 2172929 - RNA, 19 nt, Artificial Sequence
  Description of Artificial Sequence: Synthetic oligonucleotide
aaagccacacaagaagugu

SEQ ID NO: 2172930 - RNA, 19 nt, Artificial Sequence
  Description of Artificial Sequence: Synthetic oligonucleotide
cuuauuaaauugucggaca

SEQ ID NO: 2172931 - RNA, 19 nt, Artificial Sequence
  Description of Artificial Sequence: Synthetic oligonucleotide
gaacugucaaguuucgauc

SEQ ID NO: 2172932 - RNA, 19 nt, Artificial Sequence
  Description of Artificial Sequence: Synthetic oligonucleotide
accaugaucugguucagcu

SEQ ID NO: 2172933 - RNA, 19 nt, Artificial Sequence
  Description of Artificial Sequence: Synthetic oligonucleotide
uggcaugacgcaaaauggc

SEQ ID NO: 2172934 - RNA, 19 nt, Artificial Sequence
  Description of Artificial Sequence: Synthetic oligonucleotide
uucacaauguaggaugaca

SEQ ID NO: 2172935 - RNA, 19 nt, Artificial Sequence
  Description of Artificial Sequence: Synthetic oligonucleotide
ugaacagagguacccguga

SEQ ID NO: 2172936 - RNA, 19 nt, Artificial Sequence
  Description of Artificial Sequence: Synthetic oligonucleotide
uauggguuaucuucugcug

SEQ ID NO: 2172937 - RNA, 19 nt, Artificial Sequence
  Description of Artificial Sequence: Synthetic oligonucleotide
cacaauguaggaugacagg

SEQ ID NO: 2172938 - RNA, 19 nt, Artificial Sequence
  Description of Artificial Sequence: Synthetic oligonucleotide
caugagccuguuuauagug

SEQ ID NO: 2172939 - RNA, 19 nt, Artificial Sequence
  Description of Artificial Sequence: Synthetic oligonucleotide
uccccucugacuuuuguug

SEQ ID NO: 2172940 - RNA, 19 nt, Artificial Sequence
  Description of Artificial Sequence: Synthetic oligonucleotide
uguuuugccuuccgcuggg

SEQ ID NO: 2172941 - RNA, 19 nt, Artificial Sequence
  Description of Artificial Sequence: Synthetic oligonucleotide
acuaugaguuuaucgucag

SEQ ID NO: 2172942 - RNA, 19 nt, Artificial Sequence
  Description of Artificial Sequence: Synthetic oligonucleotide
cuuccgcuggguuuuaacc

SEQ ID NO: 2172943 - RNA, 19 nt, Artificial Sequence
  Description of Artificial Sequence: Synthetic oligonucleotide
uaauuuugcuccccucuga

SEQ ID NO: 2172944 - RNA, 19 nt, Artificial Sequence
  Description of Artificial Sequence: Synthetic oligonucleotide
agcuuguuuugccuuccgc

SEQ ID NO: 2172945 - RNA, 19 nt, Artificial Sequence
  Description of Artificial Sequence: Synthetic oligonucleotide
ugggauuacugucaucagu

SEQ ID NO: 2172946 - RNA, 19 nt, Artificial Sequence
  Description of Artificial Sequence: Synthetic oligonucleotide
uaaugauguaguccugggu

SEQ ID NO: 2172947 - RNA, 19 nt, Artificial Sequence
  Description of Artificial Sequence: Synthetic oligonucleotide
ugacuaugaguuuaucguc

SEQ ID NO: 2172948 - RNA, 19 nt, Artificial Sequence
  Description of Artificial Sequence: Synthetic oligonucleotide
acagcagucggucauugga

SEQ ID NO: 2172949 - RNA, 19 nt, Artificial Sequence
  Description of Artificial Sequence: Synthetic oligonucleotide
guuuccucguacuucguug

SEQ ID NO: 2172950 - RNA, 19 nt, Artificial Sequence
  Description of Artificial Sequence: Synthetic oligonucleotide
uuaaauugucggacauccc

SEQ ID NO: 2172951 - RNA, 19 nt, Artificial Sequence
  Description of Artificial Sequence: Synthetic oligonucleotide
auggguuccaacucggcca

SEQ ID NO: 2172952 - RNA, 19 nt, Artificial Sequence
  Description of Artificial Sequence: Synthetic oligonucleotide
uuugccguugccacauccc

SEQ ID NO: 2172953 - RNA, 19 nt, Artificial Sequence
  Description of Artificial Sequence: Synthetic oligonucleotide
uccaacucggccaccacga

SEQ ID NO: 2172954 - RNA, 19 nt, Artificial Sequence
  Description of Artificial Sequence: Synthetic oligonucleotide
uuaaaugaguauucuucua

SEQ ID NO: 2172955 - RNA, 19 nt, Artificial Sequence
  Description of Artificial Sequence: Synthetic oligonucleotide
aucaucaccuccacgagag

SEQ ID NO: 2172956 - RNA, 19 nt, Artificial Sequence
  Description of Artificial Sequence: Synthetic oligonucleotide
ugcuacaggagguucuggc

SEQ ID NO: 2172957 - RNA, 19 nt, Artificial Sequence
  Description of Artificial Sequence: Synthetic oligonucleotide
gugacuaugaguuuaucgu

SEQ ID NO: 2172958 - RNA, 19 nt, Artificial Sequence
  Description of Artificial Sequence: Synthetic oligonucleotide
agcucuuaaaugaguauuc

SEQ ID NO: 2172959 - RNA, 19 nt, Artificial Sequence
  Description of Artificial Sequence: Synthetic oligonucleotide
auggcuuauuaaauugucg

SEQ ID NO: 2172960 - RNA, 19 nt, Artificial Sequence
  Description of Artificial Sequence: Synthetic oligonucleotide
aaaguccugcgcucaaaga

SEQ ID NO: 2172961 - RNA, 19 nt, Artificial Sequence
  Description of Artificial Sequence: Synthetic oligonucleotide
acuauauguacacguagua

SEQ ID NO: 2172962 - RNA, 19 nt, Artificial Sequence
  Description of Artificial Sequence: Synthetic oligonucleotide
uccguucugacaagcagcu

SEQ ID NO: 2172963 - RNA, 19 nt, Artificial Sequence
  Description of Artificial Sequence: Synthetic oligonucleotide
aacacucgcauccgugaug

SEQ ID NO: 2172964 - RNA, 19 nt, Artificial Sequence
  Description of Artificial Sequence: Synthetic oligonucleotide
caggcaucggacaacacuc

SEQ ID NO: 2172965 - RNA, 19 nt, Artificial Sequence
  Description of Artificial Sequence: Synthetic oligonucleotide
ugccacaagguucccaucu

SEQ ID NO: 2172966 - RNA, 19 nt, Artificial Sequence
  Description of Artificial Sequence: Synthetic oligonucleotide
uugccaauccauuuccagu

SEQ ID NO: 2172967 - RNA, 19 nt, Artificial Sequence
  Description of Artificial Sequence: Synthetic oligonucleotide
gucguaguacacuuuugcc

SEQ ID NO: 2172968 - RNA, 19 nt, Artificial Sequence
  Description of Artificial Sequence: Synthetic oligonucleotide
ugucggacaucccauaauu

SEQ ID NO: 2172969 - RNA, 19 nt, Artificial Sequence
  Description of Artificial Sequence: Synthetic oligonucleotide
uggguuuuaaccacacaua

SEQ ID NO: 2172970 - RNA, 19 nt, Artificial Sequence
  Description of Artificial Sequence: Synthetic oligonucleotide
aaacaaggugggaaggucu

SEQ ID NO: 2172971 - RNA, 19 nt, Artificial Sequence
  Description of Artificial Sequence: Synthetic oligonucleotide
aacucggccaccacgaccu

SEQ ID NO: 2172972 - RNA, 19 nt, Artificial Sequence
  Description of Artificial Sequence: Synthetic oligonucleotide
aagguucccaucucuacua

SEQ ID NO: 2172973 - RNA, 19 nt, Artificial Sequence
  Description of Artificial Sequence: Synthetic oligonucleotide
agacaaguuugccguugcc

SEQ ID NO: 2172974 - RNA, 19 nt, Artificial Sequence
  Description of Artificial Sequence: Synthetic oligonucleotide
ucugaacagagguacccgu

SEQ ID NO: 2172975 - RNA, 19 nt, Artificial Sequence
  Description of Artificial Sequence: Synthetic oligonucleotide
ucgaucccagaucuggaug

SEQ ID NO: 2172976 - RNA, 19 nt, Artificial Sequence
  Description of Artificial Sequence: Synthetic oligonucleotide
caugacgcaaaauggcuuc

SEQ ID NO: 2172977 - RNA, 19 nt, Artificial Sequence
  Description of Artificial Sequence: Synthetic oligonucleotide
aagccacacaagaaguguc

SEQ ID NO: 2172978 - RNA, 19 nt, Artificial Sequence
  Description of Artificial Sequence: Synthetic oligonucleotide
uuccgcuggguuuuaacca

SEQ ID NO: 2172979 - RNA, 19 nt, Artificial Sequence
  Description of Artificial Sequence: Synthetic oligonucleotide
cauggguuccaacucggcc

SEQ ID NO: 2172980 - RNA, 19 nt, Artificial Sequence
  Description of Artificial Sequence: Synthetic oligonucleotide
ucguuggcggggcucacgg

SEQ ID NO: 2172981 - RNA, 19 nt, Artificial Sequence
  Description of Artificial Sequence: Synthetic oligonucleotide
uggcuugugcgacuucagg

SEQ ID NO: 2172982 - RNA, 19 nt, Artificial Sequence
  Description of Artificial Sequence: Synthetic oligonucleotide
aauggcuucucugggauua

SEQ ID NO: 2172983 - RNA, 19 nt, Artificial Sequence
  Description of Artificial Sequence: Synthetic oligonucleotide
agaggcaaggacauuacca

SEQ ID NO: 2172984 - RNA, 19 nt, Artificial Sequence
  Description of Artificial Sequence: Synthetic oligonucleotide
caaguuucgaucccagauc

SEQ ID NO: 2172985 - RNA, 19 nt, Artificial Sequence
  Description of Artificial Sequence: Synthetic oligonucleotide
cuuccguucugacaagcag

SEQ ID NO: 2172986 - RNA, 19 nt, Artificial Sequence
  Description of Artificial Sequence: Synthetic oligonucleotide
augggcaaggcaugagggg

SEQ ID NO: 2172987 - RNA, 19 nt, Artificial Sequence
  Description of Artificial Sequence: Synthetic oligonucleotide
cuuaaaugaguauucuucu

SEQ ID NO: 2172988 - RNA, 19 nt, Artificial Sequence
  Description of Artificial Sequence: Synthetic oligonucleotide
uaggaugacagggugcccc

SEQ ID NO: 2172989 - RNA, 19 nt, Artificial Sequence
  Description of Artificial Sequence: Synthetic oligonucleotide
gguaaugauguaguccugg

SEQ ID NO: 2172990 - RNA, 19 nt, Artificial Sequence
  Description of Artificial Sequence: Synthetic oligonucleotide
acauuaccaucauaggaaa

SEQ ID NO: 2172991 - RNA, 19 nt, Artificial Sequence
  Description of Artificial Sequence: Synthetic oligonucleotide
ucaugagccuguuuauagu

SEQ ID NO: 2172992 - RNA, 19 nt, Artificial Sequence
  Description of Artificial Sequence: Synthetic oligonucleotide
uacacccuuuggaaagucc

SEQ ID NO: 2172993 - RNA, 19 nt, Artificial Sequence
  Description of Artificial Sequence: Synthetic oligonucleotide
ggcuugugcgacuucaggg

SEQ ID NO: 2172994 - RNA, 19 nt, Artificial Sequence
  Description of Artificial Sequence: Synthetic oligonucleotide
guauucuucuaaauuuuac

SEQ ID NO: 2172995 - RNA, 19 nt, Artificial Sequence
  Description of Artificial Sequence: Synthetic oligonucleotide
cacacauaauuuugcuccc

SEQ ID NO: 2172996 - RNA, 19 nt, Artificial Sequence
  Description of Artificial Sequence: Synthetic oligonucleotide
ucucuacuauauguacacg

SEQ ID NO: 2172997 - RNA, 19 nt, Artificial Sequence
  Description of Artificial Sequence: Synthetic oligonucleotide
aaccaugaucugguucagc

SEQ ID NO: 2172998 - RNA, 19 nt, Artificial Sequence
  Description of Artificial Sequence: Synthetic oligonucleotide
gcuugugcgacuucagggg

SEQ ID NO: 2172999 - RNA, 19 nt, Artificial Sequence
  Description of Artificial Sequence: Synthetic oligonucleotide
ggucguaguacacuuuugc

SEQ ID NO: 2173000 - RNA, 19 nt, Artificial Sequence
  Description of Artificial Sequence: Synthetic oligonucleotide
uaucgucaggacugaaaca

SEQ ID NO: 2173001 - RNA, 19 nt, Artificial Sequence
  Description of Artificial Sequence: Synthetic oligonucleotide
acuuuuguuggggucguag

SEQ ID NO: 2173002 - RNA, 19 nt, Artificial Sequence
  Description of Artificial Sequence: Synthetic oligonucleotide
uugccguugccacaucccc

SEQ ID NO: 2173003 - RNA, 19 nt, Artificial Sequence
  Description of Artificial Sequence: Synthetic oligonucleotide
uuucgaucccagaucugga

SEQ ID NO: 2173004 - RNA, 19 nt, Artificial Sequence
  Description of Artificial Sequence: Synthetic oligonucleotide
ggacauuaccaucauagga

SEQ ID NO: 2173005 - RNA, 19 nt, Artificial Sequence
  Description of Artificial Sequence: Synthetic oligonucleotide
gaagacaaguuugccguug

SEQ ID NO: 2173006 - RNA, 19 nt, Artificial Sequence
  Description of Artificial Sequence: Synthetic oligonucleotide
cacacaagaagugucugug

SEQ ID NO: 2173007 - RNA, 19 nt, Artificial Sequence
  Description of Artificial Sequence: Synthetic oligonucleotide
uccgugaugucaauuucau

SEQ ID NO: 2173008 - RNA, 19 nt, Artificial Sequence
  Description of Artificial Sequence: Synthetic oligonucleotide
auguaggaugacagggugc

SEQ ID NO: 2173009 - RNA, 19 nt, Artificial Sequence
  Description of Artificial Sequence: Synthetic oligonucleotide
uguaguccuggguuagugu

SEQ ID NO: 2173010 - RNA, 19 nt, Artificial Sequence
  Description of Artificial Sequence: Synthetic oligonucleotide
aggcaaggacauuaccauc

SEQ ID NO: 2173011 - RNA, 19 nt, Artificial Sequence
  Description of Artificial Sequence: Synthetic oligonucleotide
guaucaucaccuccacgag

SEQ ID NO: 2173012 - RNA, 19 nt, Artificial Sequence
  Description of Artificial Sequence: Synthetic oligonucleotide
guaguccuggguuaguguc

SEQ ID NO: 2173013 - RNA, 19 nt, Artificial Sequence
  Description of Artificial Sequence: Synthetic oligonucleotide
aaauugucggacaucccau

SEQ ID NO: 2173014 - RNA, 19 nt, Artificial Sequence
  Description of Artificial Sequence: Synthetic oligonucleotide
ugauguaguccuggguuag

SEQ ID NO: 2173015 - RNA, 19 nt, Artificial Sequence
  Description of Artificial Sequence: Synthetic oligonucleotide
aacaaggugggaaggucug

SEQ ID NO: 2173016 - RNA, 19 nt, Artificial Sequence
  Description of Artificial Sequence: Synthetic oligonucleotide
uccucguacuucguuggcg

SEQ ID NO: 2173017 - RNA, 19 nt, Artificial Sequence
  Description of Artificial Sequence: Synthetic oligonucleotide
gcuuauuaaauugucggac

SEQ ID NO: 2173018 - RNA, 19 nt, Artificial Sequence
  Description of Artificial Sequence: Synthetic oligonucleotide
gcaaacaugguuuugggcu

SEQ ID NO: 2173019 - RNA, 19 nt, Artificial Sequence
  Description of Artificial Sequence: Synthetic oligonucleotide
aauuuagggugaacuguca

SEQ ID NO: 2173020 - RNA, 19 nt, Artificial Sequence
  Description of Artificial Sequence: Synthetic oligonucleotide
aauugucggacaucccaua

SEQ ID NO: 2173021 - RNA, 19 nt, Artificial Sequence
  Description of Artificial Sequence: Synthetic oligonucleotide
uuccauucgggcucauucu

SEQ ID NO: 2173022 - RNA, 19 nt, Artificial Sequence
  Description of Artificial Sequence: Synthetic oligonucleotide
caucaccuccacgagaggc

SEQ ID NO: 2173023 - RNA, 19 nt, Artificial Sequence
  Description of Artificial Sequence: Synthetic oligonucleotide
gaggcugaaaauaauggcu

SEQ ID NO: 2173024 - RNA, 19 nt, Artificial Sequence
  Description of Artificial Sequence: Synthetic oligonucleotide
cgugacuaugaguuuaucg

SEQ ID NO: 2173025 - RNA, 19 nt, Artificial Sequence
  Description of Artificial Sequence: Synthetic oligonucleotide
gacaaguuugccguugcca

SEQ ID NO: 2173026 - RNA, 19 nt, Artificial Sequence
  Description of Artificial Sequence: Synthetic oligonucleotide
agagguacccgugacuaug

SEQ ID NO: 2173027 - RNA, 19 nt, Artificial Sequence
  Description of Artificial Sequence: Synthetic oligonucleotide
ggacugaaacagcagucgg

SEQ ID NO: 2173028 - RNA, 19 nt, Artificial Sequence
  Description of Artificial Sequence: Synthetic oligonucleotide
ugcgcucaaagaagacaag

SEQ ID NO: 2173029 - RNA, 19 nt, Artificial Sequence
  Description of Artificial Sequence: Synthetic oligonucleotide
uuuggaugccacaggcauc

SEQ ID NO: 2173030 - RNA, 19 nt, Artificial Sequence
  Description of Artificial Sequence: Synthetic oligonucleotide
ucguacuucguuggcgggg

SEQ ID NO: 2173031 - RNA, 19 nt, Artificial Sequence
  Description of Artificial Sequence: Synthetic oligonucleotide
guuuuggaauaugcuggcg

SEQ ID NO: 2173032 - RNA, 19 nt, Artificial Sequence
  Description of Artificial Sequence: Synthetic oligonucleotide
aaguuugccguugccacau

SEQ ID NO: 2173033 - RNA, 19 nt, Artificial Sequence
  Description of Artificial Sequence: Synthetic oligonucleotide
uucagcuuuggaugccaca

SEQ ID NO: 2173034 - RNA, 19 nt, Artificial Sequence
  Description of Artificial Sequence: Synthetic oligonucleotide
caauauggguuaucuucug

SEQ ID NO: 2173035 - RNA, 19 nt, Artificial Sequence
  Description of Artificial Sequence: Synthetic oligonucleotide
guuugccguugccacaucc

SEQ ID NO: 2173036 - RNA, 19 nt, Artificial Sequence
  Description of Artificial Sequence: Synthetic oligonucleotide
accuccacgagaggcaagg

SEQ ID NO: 2173037 - RNA, 19 nt, Artificial Sequence
  Description of Artificial Sequence: Synthetic oligonucleotide
ucgucaggacugaaacagc

SEQ ID NO: 2173038 - RNA, 19 nt, Artificial Sequence
  Description of Artificial Sequence: Synthetic oligonucleotide
auugucggacaucccauaa

SEQ ID NO: 2173039 - RNA, 19 nt, Artificial Sequence
  Description of Artificial Sequence: Synthetic oligonucleotide
ugguuuugggcugaguuuu

SEQ ID NO: 2173040 - RNA, 19 nt, Artificial Sequence
  Description of Artificial Sequence: Synthetic oligonucleotide
cucuacuauauguacacgu

SEQ ID NO: 2173041 - RNA, 19 nt, Artificial Sequence
  Description of Artificial Sequence: Synthetic oligonucleotide
aguccugcgcucaaagaag

SEQ ID NO: 2173042 - RNA, 19 nt, Artificial Sequence
  Description of Artificial Sequence: Synthetic oligonucleotide
agggugaacugucaaguuu

SEQ ID NO: 2173043 - RNA, 19 nt, Artificial Sequence
  Description of Artificial Sequence: Synthetic oligonucleotide
ucaucaccuccacgagagg

SEQ ID NO: 2173044 - RNA, 19 nt, Artificial Sequence
  Description of Artificial Sequence: Synthetic oligonucleotide
auuuugcuccccucugacu

SEQ ID NO: 2173045 - RNA, 19 nt, Artificial Sequence
  Description of Artificial Sequence: Synthetic oligonucleotide
uuagugucucagcuuguuu

SEQ ID NO: 2173046 - RNA, 19 nt, Artificial Sequence
  Description of Artificial Sequence: Synthetic oligonucleotide
cauaauuuugcuccccucu

SEQ ID NO: 2173047 - RNA, 19 nt, Artificial Sequence
  Description of Artificial Sequence: Synthetic oligonucleotide
cguucugacaagcagcugc

SEQ ID NO: 2173048 - RNA, 19 nt, Artificial Sequence
  Description of Artificial Sequence: Synthetic oligonucleotide
augauguaguccuggguua

SEQ ID NO: 2173049 - RNA, 19 nt, Artificial Sequence
  Description of Artificial Sequence: Synthetic oligonucleotide
caaggcaugagggguaaug

SEQ ID NO: 2173050 - RNA, 19 nt, Artificial Sequence
  Description of Artificial Sequence: Synthetic oligonucleotide
uguuuccucguacuucguu

SEQ ID NO: 2173051 - RNA, 19 nt, Artificial Sequence
  Description of Artificial Sequence: Synthetic oligonucleotide
uucgaucccagaucuggau

SEQ ID NO: 2173052 - RNA, 19 nt, Artificial Sequence
  Description of Artificial Sequence: Synthetic oligonucleotide
ggguuuuaaccacacauaa

SEQ ID NO: 2173053 - RNA, 19 nt, Artificial Sequence
  Description of Artificial Sequence: Synthetic oligonucleotide
ugcuccaugcaaacagcuc

SEQ ID NO: 2173054 - RNA, 19 nt, Artificial Sequence
  Description of Artificial Sequence: Synthetic oligonucleotide
cugcgcucaaagaagacaa

SEQ ID NO: 2173055 - RNA, 19 nt, Artificial Sequence
  Description of Artificial Sequence: Synthetic oligonucleotide
uuggaaaguccugcgcuca

SEQ ID NO: 2173056 - RNA, 19 nt, Artificial Sequence
  Description of Artificial Sequence: Synthetic oligonucleotide
acucgcauccgugauguca

SEQ ID NO: 2173057 - RNA, 19 nt, Artificial Sequence
  Description of Artificial Sequence: Synthetic oligonucleotide
ugggccugcuacaggaggu

SEQ ID NO: 2173058 - RNA, 19 nt, Artificial Sequence
  Description of Artificial Sequence: Synthetic oligonucleotide
guucugacaagcagcugcc

SEQ ID NO: 2173059 - RNA, 19 nt, Artificial Sequence
  Description of Artificial Sequence: Synthetic oligonucleotide
acacucgcauccgugaugu

SEQ ID NO: 2173060 - RNA, 19 nt, Artificial Sequence
  Description of Artificial Sequence: Synthetic oligonucleotide
gggguaaugauguaguccu

SEQ ID NO: 2173061 - RNA, 19 nt, Artificial Sequence
  Description of Artificial Sequence: Synthetic oligonucleotide
uugucggacaucccauaau

SEQ ID NO: 2173062 - RNA, 19 nt, Artificial Sequence
  Description of Artificial Sequence: Synthetic oligonucleotide
uggcgacacccaauauggg

SEQ ID NO: 2173063 - RNA, 19 nt, Artificial Sequence
  Description of Artificial Sequence: Synthetic oligonucleotide
cuggguuuuaaccacacau

SEQ ID NO: 2173064 - RNA, 19 nt, Artificial Sequence
  Description of Artificial Sequence: Synthetic oligonucleotide
ucagcuuguuuugccuucc

SEQ ID NO: 2173065 - RNA, 19 nt, Artificial Sequence
  Description of Artificial Sequence: Synthetic oligonucleotide
aucggacaacacucgcauc

SEQ ID NO: 2173066 - RNA, 19 nt, Artificial Sequence
  Description of Artificial Sequence: Synthetic oligonucleotide
uuggaauaugcuggcgaca

SEQ ID NO: 2173067 - RNA, 19 nt, Artificial Sequence
  Description of Artificial Sequence: Synthetic oligonucleotide
uuggggucguaguacacuu

SEQ ID NO: 2173068 - RNA, 19 nt, Artificial Sequence
  Description of Artificial Sequence: Synthetic oligonucleotide
gcuggcgacacccaauaug

SEQ ID NO: 2173069 - RNA, 19 nt, Artificial Sequence
  Description of Artificial Sequence: Synthetic oligonucleotide
ggcuuauuaaauugucgga

SEQ ID NO: 2173070 - RNA, 19 nt, Artificial Sequence
  Description of Artificial Sequence: Synthetic oligonucleotide
caacucggccaccacgacc

SEQ ID NO: 2173071 - RNA, 19 nt, Artificial Sequence
  Description of Artificial Sequence: Synthetic oligonucleotide
gauuacugucaucaguuuu

SEQ ID NO: 2173072 - RNA, 19 nt, Artificial Sequence
  Description of Artificial Sequence: Synthetic oligonucleotide
guggaauuuagggugaacu

SEQ ID NO: 2173073 - RNA, 19 nt, Artificial Sequence
  Description of Artificial Sequence: Synthetic oligonucleotide
acacccuuuggaaaguccu

SEQ ID NO: 2173074 - RNA, 19 nt, Artificial Sequence
  Description of Artificial Sequence: Synthetic oligonucleotide
cuccacgagaggcaaggac

SEQ ID NO: 2173075 - RNA, 19 nt, Artificial Sequence
  Description of Artificial Sequence: Synthetic oligonucleotide
cauccgugaugucaauuuc

SEQ ID NO: 2173076 - RNA, 19 nt, Artificial Sequence
  Description of Artificial Sequence: Synthetic oligonucleotide
auaguggaauuuaggguga

SEQ ID NO: 2173077 - RNA, 19 nt, Artificial Sequence
  Description of Artificial Sequence: Synthetic oligonucleotide
gagggguaaugauguaguc

SEQ ID NO: 2173078 - RNA, 19 nt, Artificial Sequence
  Description of Artificial Sequence: Synthetic oligonucleotide
uuccucguacuucguuggc

SEQ ID NO: 2173079 - RNA, 19 nt, Artificial Sequence
  Description of Artificial Sequence: Synthetic oligonucleotide
ccucguacuucguuggcgg

SEQ ID NO: 2173080 - RNA, 19 nt, Artificial Sequence
  Description of Artificial Sequence: Synthetic oligonucleotide
auguaguccuggguuagug

SEQ ID NO: 2173081 - RNA, 19 nt, Artificial Sequence
  Description of Artificial Sequence: Synthetic oligonucleotide
uaguacacuuuugccaauc

SEQ ID NO: 2173082 - RNA, 19 nt, Artificial Sequence
  Description of Artificial Sequence: Synthetic oligonucleotide
agcagucggucauuggaaa

SEQ ID NO: 2173083 - RNA, 19 nt, Artificial Sequence
  Description of Artificial Sequence: Synthetic oligonucleotide
cucguacuucguuggcggg

SEQ ID NO: 2173084 - RNA, 19 nt, Artificial Sequence
  Description of Artificial Sequence: Synthetic oligonucleotide
auacacccuuuggaaaguc

SEQ ID NO: 2173085 - RNA, 19 nt, Artificial Sequence
  Description of Artificial Sequence: Synthetic oligonucleotide
acgagaggcaaggacauua

SEQ ID NO: 2173086 - RNA, 19 nt, Artificial Sequence
  Description of Artificial Sequence: Synthetic oligonucleotide
cagcuuuggaugccacagg

SEQ ID NO: 2173087 - RNA, 19 nt, Artificial Sequence
  Description of Artificial Sequence: Synthetic oligonucleotide
cugaguuuuggaauaugcu

SEQ ID NO: 2173088 - RNA, 19 nt, Artificial Sequence
  Description of Artificial Sequence: Synthetic oligonucleotide
cugugccagggucaugagc

SEQ ID NO: 2173089 - RNA, 19 nt, Artificial Sequence
  Description of Artificial Sequence: Synthetic oligonucleotide
uggguuagugucucagcuu

SEQ ID NO: 2173090 - RNA, 19 nt, Artificial Sequence
  Description of Artificial Sequence: Synthetic oligonucleotide
aggcaugagggguaaugau

SEQ ID NO: 2173091 - RNA, 19 nt, Artificial Sequence
  Description of Artificial Sequence: Synthetic oligonucleotide
auccgugaugucaauuuca

SEQ ID NO: 2173092 - RNA, 19 nt, Artificial Sequence
  Description of Artificial Sequence: Synthetic oligonucleotide
cacgaccugggccugcuac

SEQ ID NO: 2173093 - RNA, 19 nt, Artificial Sequence
  Description of Artificial Sequence: Synthetic oligonucleotide
cacccuuuggaaaguccug

SEQ ID NO: 2173094 - RNA, 19 nt, Artificial Sequence
  Description of Artificial Sequence: Synthetic oligonucleotide
agccuguuuauaguggaau

SEQ ID NO: 2173095 - RNA, 19 nt, Artificial Sequence
  Description of Artificial Sequence: Synthetic oligonucleotide
auaugcuggcgacacccaa

SEQ ID NO: 2173096 - RNA, 19 nt, Artificial Sequence
  Description of Artificial Sequence: Synthetic oligonucleotide
guacccgugacuaugaguu

SEQ ID NO: 2173097 - RNA, 19 nt, Artificial Sequence
  Description of Artificial Sequence: Synthetic oligonucleotide
ugcuuccguucugacaagc

SEQ ID NO: 2173098 - RNA, 19 nt, Artificial Sequence
  Description of Artificial Sequence: Synthetic oligonucleotide
uagggugaacugucaaguu

SEQ ID NO: 2173099 - RNA, 19 nt, Artificial Sequence
  Description of Artificial Sequence: Synthetic oligonucleotide
gggugaacugucaaguuuc

SEQ ID NO: 2173100 - RNA, 19 nt, Artificial Sequence
  Description of Artificial Sequence: Synthetic oligonucleotide
uggaaaguccugcgcucaa

SEQ ID NO: 2173101 - RNA, 19 nt, Artificial Sequence
  Description of Artificial Sequence: Synthetic oligonucleotide
guacacguaguaggaauga

SEQ ID NO: 2173102 - RNA, 19 nt, Artificial Sequence
  Description of Artificial Sequence: Synthetic oligonucleotide
gggcucacggaacaugggc

SEQ ID NO: 2173103 - RNA, 19 nt, Artificial Sequence
  Description of Artificial Sequence: Synthetic oligonucleotide
uccugcgcucaaagaagac

SEQ ID NO: 2173104 - RNA, 19 nt, Artificial Sequence
  Description of Artificial Sequence: Synthetic oligonucleotide
cuggcuugugcgacuucag

SEQ ID NO: 2173105 - RNA, 19 nt, Artificial Sequence
  Description of Artificial Sequence: Synthetic oligonucleotide
uucguuggcggggcucacg

SEQ ID NO: 2173106 - RNA, 19 nt, Artificial Sequence
  Description of Artificial Sequence: Synthetic oligonucleotide
cucgcauccgugaugucaa

SEQ ID NO: 2173107 - RNA, 19 nt, Artificial Sequence
  Description of Artificial Sequence: Synthetic oligonucleotide
guuggcggggcucacggaa

SEQ ID NO: 2173108 - RNA, 19 nt, Artificial Sequence
  Description of Artificial Sequence: Synthetic oligonucleotide
ucgggcucauucuuugauu

SEQ ID NO: 2173109 - RNA, 19 nt, Artificial Sequence
  Description of Artificial Sequence: Synthetic oligonucleotide
uuggcggggcucacggaac

SEQ ID NO: 2173110 - RNA, 19 nt, Artificial Sequence
  Description of Artificial Sequence: Synthetic oligonucleotide
guuuuguccaaagcaauau

SEQ ID NO: 2173111 - RNA, 19 nt, Artificial Sequence
  Description of Artificial Sequence: Synthetic oligonucleotide
auucgggcucauucuuuga

SEQ ID NO: 2173112 - RNA, 19 nt, Artificial Sequence
  Description of Artificial Sequence: Synthetic oligonucleotide
agaagacaaguuugccguu

SEQ ID NO: 2173113 - RNA, 19 nt, Artificial Sequence
  Description of Artificial Sequence: Synthetic oligonucleotide
agguacccgugacuaugag

SEQ ID NO: 2173114 - RNA, 19 nt, Artificial Sequence
  Description of Artificial Sequence: Synthetic oligonucleotide
acacccaauauggguuauc

SEQ ID NO: 2173115 - RNA, 19 nt, Artificial Sequence
  Description of Artificial Sequence: Synthetic oligonucleotide
acggaacaugggcaaggca

SEQ ID NO: 2173116 - RNA, 19 nt, Artificial Sequence
  Description of Artificial Sequence: Synthetic oligonucleotide
gaacaugggcaaggcauga

SEQ ID NO: 2173117 - RNA, 19 nt, Artificial Sequence
  Description of Artificial Sequence: Synthetic oligonucleotide
ggaauuuagggugaacugu

SEQ ID NO: 2173118 - RNA, 19 nt, Artificial Sequence
  Description of Artificial Sequence: Synthetic oligonucleotide
acauccccucugaacagag

SEQ ID NO: 2173119 - RNA, 19 nt, Artificial Sequence
  Description of Artificial Sequence: Synthetic oligonucleotide
acuucguuggcggggcuca

SEQ ID NO: 2173120 - RNA, 19 nt, Artificial Sequence
  Description of Artificial Sequence: Synthetic oligonucleotide
cacggaacaugggcaaggc

SEQ ID NO: 2173121 - RNA, 19 nt, Artificial Sequence
  Description of Artificial Sequence: Synthetic oligonucleotide
acgaccugggccugcuaca

SEQ ID NO: 2173122 - RNA, 19 nt, Artificial Sequence
  Description of Artificial Sequence: Synthetic oligonucleotide
ugguucagcuuuggaugcc

SEQ ID NO: 2173123 - RNA, 19 nt, Artificial Sequence
  Description of Artificial Sequence: Synthetic oligonucleotide
cuggguuagugucucagcu

SEQ ID NO: 2173124 - RNA, 19 nt, Artificial Sequence
  Description of Artificial Sequence: Synthetic oligonucleotide
cagcuuguuuugccuuccg

SEQ ID NO: 2173125 - RNA, 19 nt, Artificial Sequence
  Description of Artificial Sequence: Synthetic oligonucleotide
aguuugccguugccacauc

SEQ ID NO: 2173126 - RNA, 19 nt, Artificial Sequence
  Description of Artificial Sequence: Synthetic oligonucleotide
cagucggucauuggaaaca

SEQ ID NO: 2173127 - RNA, 19 nt, Artificial Sequence
  Description of Artificial Sequence: Synthetic oligonucleotide
uggcggggcucacggaaca

SEQ ID NO: 2173128 - RNA, 19 nt, Artificial Sequence
  Description of Artificial Sequence: Synthetic oligonucleotide
acacuuuugccaauccauu

SEQ ID NO: 2173129 - RNA, 19 nt, Artificial Sequence
  Description of Artificial Sequence: Synthetic oligonucleotide
gacaagcagcugccacaag

SEQ ID NO: 2173130 - RNA, 19 nt, Artificial Sequence
  Description of Artificial Sequence: Synthetic oligonucleotide
cccuuuggaaaguccugcg

SEQ ID NO: 2173131 - RNA, 19 nt, Artificial Sequence
  Description of Artificial Sequence: Synthetic oligonucleotide
augcuuccguucugacaag

SEQ ID NO: 2173132 - RNA, 19 nt, Artificial Sequence
  Description of Artificial Sequence: Synthetic oligonucleotide
acccaauauggguuaucuu

SEQ ID NO: 2173133 - RNA, 19 nt, Artificial Sequence
  Description of Artificial Sequence: Synthetic oligonucleotide
ccucugaacagagguaccc

SEQ ID NO: 2173134 - RNA, 19 nt, Artificial Sequence
  Description of Artificial Sequence: Synthetic oligonucleotide
cucacggaacaugggcaag

SEQ ID NO: 2173135 - RNA, 19 nt, Artificial Sequence
  Description of Artificial Sequence: Synthetic oligonucleotide
augacgcaaaauggcuucu

SEQ ID NO: 2173136 - RNA, 19 nt, Artificial Sequence
  Description of Artificial Sequence: Synthetic oligonucleotide
ggaauaugcuggcgacacc

SEQ ID NO: 2173137 - RNA, 19 nt, Artificial Sequence
  Description of Artificial Sequence: Synthetic oligonucleotide
caagguucccaucucuacu

SEQ ID NO: 2173138 - RNA, 19 nt, Artificial Sequence
  Description of Artificial Sequence: Synthetic oligonucleotide
gagguacccgugacuauga

SEQ ID NO: 2173139 - RNA, 19 nt, Artificial Sequence
  Description of Artificial Sequence: Synthetic oligonucleotide
cuucuaaauuuuacguuuu

SEQ ID NO: 2173140 - RNA, 19 nt, Artificial Sequence
  Description of Artificial Sequence: Synthetic oligonucleotide
cguaguacacuuuugccaa

SEQ ID NO: 2173141 - RNA, 19 nt, Artificial Sequence
  Description of Artificial Sequence: Synthetic oligonucleotide
agguucccaucucuacuau

SEQ ID NO: 2173142 - RNA, 19 nt, Artificial Sequence
  Description of Artificial Sequence: Synthetic oligonucleotide
cacaagguucccaucucua

SEQ ID NO: 2173143 - RNA, 19 nt, Artificial Sequence
  Description of Artificial Sequence: Synthetic oligonucleotide
cccauggguuccaacucgg

SEQ ID NO: 2173144 - RNA, 19 nt, Artificial Sequence
  Description of Artificial Sequence: Synthetic oligonucleotide
cagcagucggucauuggaa

SEQ ID NO: 2173145 - RNA, 19 nt, Artificial Sequence
  Description of Artificial Sequence: Synthetic oligonucleotide
gcagucggucauuggaaac

SEQ ID NO: 2173146 - RNA, 19 nt, Artificial Sequence
  Description of Artificial Sequence: Synthetic oligonucleotide
cugucaaguuucgauccca

SEQ ID NO: 2173147 - RNA, 19 nt, Artificial Sequence
  Description of Artificial Sequence: Synthetic oligonucleotide
caucggacaacacucgcau

SEQ ID NO: 2173148 - RNA, 19 nt, Artificial Sequence
  Description of Artificial Sequence: Synthetic oligonucleotide
uacuucguuggcggggcuc

SEQ ID NO: 2173149 - RNA, 19 nt, Artificial Sequence
  Description of Artificial Sequence: Synthetic oligonucleotide
caaccaugaucugguucag

SEQ ID NO: 2173150 - RNA, 19 nt, Artificial Sequence
  Description of Artificial Sequence: Synthetic oligonucleotide
ccuggguuagugucucagc

SEQ ID NO: 2173151 - RNA, 19 nt, Artificial Sequence
  Description of Artificial Sequence: Synthetic oligonucleotide
ccccauggguuccaacucg

SEQ ID NO: 2173152 - RNA, 19 nt, Artificial Sequence
  Description of Artificial Sequence: Synthetic oligonucleotide
uaguggaauuuagggugaa

SEQ ID NO: 2173153 - RNA, 19 nt, Artificial Sequence
  Description of Artificial Sequence: Synthetic oligonucleotide
acccgugacuaugaguuua

SEQ ID NO: 2173154 - RNA, 19 nt, Artificial Sequence
  Description of Artificial Sequence: Synthetic oligonucleotide
ccaauauggguuaucuucu

SEQ ID NO: 2173155 - RNA, 19 nt, Artificial Sequence
  Description of Artificial Sequence: Synthetic oligonucleotide
uggggucguaguacacuuu

SEQ ID NO: 2173156 - RNA, 19 nt, Artificial Sequence
  Description of Artificial Sequence: Synthetic oligonucleotide
ugcuggcgacacccaauau

SEQ ID NO: 2173157 - RNA, 19 nt, Artificial Sequence
  Description of Artificial Sequence: Synthetic oligonucleotide
cucggccaccacgaccugg

SEQ ID NO: 2173158 - RNA, 19 nt, Artificial Sequence
  Description of Artificial Sequence: Synthetic oligonucleotide
guccugcgcucaaagaaga

SEQ ID NO: 2173159 - RNA, 19 nt, Artificial Sequence
  Description of Artificial Sequence: Synthetic oligonucleotide
gucggucauuggaaacaag

SEQ ID NO: 2173160 - RNA, 19 nt, Artificial Sequence
  Description of Artificial Sequence: Synthetic oligonucleotide
ggcgacacccaauaugggu

SEQ ID NO: 2173161 - RNA, 19 nt, Artificial Sequence
  Description of Artificial Sequence: Synthetic oligonucleotide
gggauuacugucaucaguu

SEQ ID NO: 2173162 - RNA, 19 nt, Artificial Sequence
  Description of Artificial Sequence: Synthetic oligonucleotide
guaggaugacagggugccc

SEQ ID NO: 2173163 - RNA, 19 nt, Artificial Sequence
  Description of Artificial Sequence: Synthetic oligonucleotide
cucugggauuacugucauc

SEQ ID NO: 2173164 - RNA, 19 nt, Artificial Sequence
  Description of Artificial Sequence: Synthetic oligonucleotide
cggggcucacggaacaugg

SEQ ID NO: 2173165 - RNA, 19 nt, Artificial Sequence
  Description of Artificial Sequence: Synthetic oligonucleotide
cacccaauauggguuaucu

SEQ ID NO: 2173166 - RNA, 19 nt, Artificial Sequence
  Description of Artificial Sequence: Synthetic oligonucleotide
ggcucacggaacaugggca

SEQ ID NO: 2173167 - RNA, 19 nt, Artificial Sequence
  Description of Artificial Sequence: Synthetic oligonucleotide
guuggggucguaguacacu

SEQ ID NO: 2173168 - RNA, 19 nt, Artificial Sequence
  Description of Artificial Sequence: Synthetic oligonucleotide
uacccgugacuaugaguuu

SEQ ID NO: 2173169 - RNA, 19 nt, Artificial Sequence
  Description of Artificial Sequence: Synthetic oligonucleotide
cugccacaagguucccauc

SEQ ID NO: 2173170 - RNA, 19 nt, Artificial Sequence
  Description of Artificial Sequence: Synthetic oligonucleotide
ggcaugacgcaaaauggcu

SEQ ID NO: 2173171 - RNA, 19 nt, Artificial Sequence
  Description of Artificial Sequence: Synthetic oligonucleotide
ccuuccgcuggguuuuaac

SEQ ID NO: 2173172 - RNA, 19 nt, Artificial Sequence
  Description of Artificial Sequence: Synthetic oligonucleotide
gguacccgugacuaugagu

SEQ ID NO: 2173173 - RNA, 19 nt, Artificial Sequence
  Description of Artificial Sequence: Synthetic oligonucleotide
acaugguuuugggcugagu

SEQ ID NO: 2173174 - RNA, 19 nt, Artificial Sequence
  Description of Artificial Sequence: Synthetic oligonucleotide
ggugggaaggucugaggcu

SEQ ID NO: 2173175 - RNA, 19 nt, Artificial Sequence
  Description of Artificial Sequence: Synthetic oligonucleotide
gcucacggaacaugggcaa

SEQ ID NO: 2173176 - RNA, 19 nt, Artificial Sequence
  Description of Artificial Sequence: Synthetic oligonucleotide
caccuccacgagaggcaag

SEQ ID NO: 2173177 - RNA, 19 nt, Artificial Sequence
  Description of Artificial Sequence: Synthetic oligonucleotide
cccucugaacagagguacc

SEQ ID NO: 2173178 - RNA, 19 nt, Artificial Sequence
  Description of Artificial Sequence: Synthetic oligonucleotide
cgucaggacugaaacagca

SEQ ID NO: 2173179 - RNA, 19 nt, Artificial Sequence
  Description of Artificial Sequence: Synthetic oligonucleotide
gccaauccauuuccaguuc

SEQ ID NO: 2173180 - RNA, 19 nt, Artificial Sequence
  Description of Artificial Sequence: Synthetic oligonucleotide
gcauccgugaugucaauuu

SEQ ID NO: 2173181 - RNA, 19 nt, Artificial Sequence
  Description of Artificial Sequence: Synthetic oligonucleotide
cacuugggcaaacaugguu

SEQ ID NO: 2173182 - RNA, 19 nt, Artificial Sequence
  Description of Artificial Sequence: Synthetic oligonucleotide
gguuuugggcugaguuuug

SEQ ID NO: 2173183 - RNA, 19 nt, Artificial Sequence
  Description of Artificial Sequence: Synthetic oligonucleotide
cuugggcaaacaugguuuu

SEQ ID NO: 2173184 - RNA, 19 nt, Artificial Sequence
  Description of Artificial Sequence: Synthetic oligonucleotide
acaggagguucuggcuugu

SEQ ID NO: 2173185 - RNA, 19 nt, Artificial Sequence
  Description of Artificial Sequence: Synthetic oligonucleotide
gcaucggacaacacucgca

SEQ ID NO: 2173186 - RNA, 19 nt, Artificial Sequence
  Description of Artificial Sequence: Synthetic oligonucleotide
gauguaguccuggguuagu

SEQ ID NO: 2173187 - RNA, 19 nt, Artificial Sequence
  Description of Artificial Sequence: Synthetic oligonucleotide
cgagaggcaaggacauuac

SEQ ID NO: 2173188 - RNA, 19 nt, Artificial Sequence
  Description of Artificial Sequence: Synthetic oligonucleotide
ugucugugccagggucaug

SEQ ID NO: 2173189 - RNA, 19 nt, Artificial Sequence
  Description of Artificial Sequence: Synthetic oligonucleotide
gggucguaguacacuuuug

SEQ ID NO: 2173190 - RNA, 19 nt, Artificial Sequence
  Description of Artificial Sequence: Synthetic oligonucleotide
cacauccccucugaacaga

SEQ ID NO: 2173191 - RNA, 19 nt, Artificial Sequence
  Description of Artificial Sequence: Synthetic oligonucleotide
ggguaaugauguaguccug

SEQ ID NO: 2173192 - RNA, 19 nt, Artificial Sequence
  Description of Artificial Sequence: Synthetic oligonucleotide
guuagugucucagcuuguu

SEQ ID NO: 2173193 - RNA, 19 nt, Artificial Sequence
  Description of Artificial Sequence: Synthetic oligonucleotide
gguuuuaaccacacauaau

SEQ ID NO: 2173194 - RNA, 19 nt, Artificial Sequence
  Description of Artificial Sequence: Synthetic oligonucleotide
ggggcucacggaacauggg

SEQ ID NO: 2173195 - RNA, 19 nt, Artificial Sequence
  Description of Artificial Sequence: Synthetic oligonucleotide
ccugcgcucaaagaagaca

SEQ ID NO: 2173196 - RNA, 19 nt, Artificial Sequence
  Description of Artificial Sequence: Synthetic oligonucleotide
cguacuucguuggcggggc

SEQ ID NO: 2173197 - RNA, 19 nt, Artificial Sequence
  Description of Artificial Sequence: Synthetic oligonucleotide
gcugaaaauaauggcuuau

SEQ ID NO: 2173198 - RNA, 19 nt, Artificial Sequence
  Description of Artificial Sequence: Synthetic oligonucleotide
cauacacccuuuggaaagu

SEQ ID NO: 2173199 - RNA, 19 nt, Artificial Sequence
  Description of Artificial Sequence: Synthetic oligonucleotide
guaguacacuuuugccaau

SEQ ID NO: 2173200 - RNA, 19 nt, Artificial Sequence
  Description of Artificial Sequence: Synthetic oligonucleotide
ucgcauccgugaugucaau

SEQ ID NO: 2173201 - RNA, 19 nt, Artificial Sequence
  Description of Artificial Sequence: Synthetic oligonucleotide
gguucccaucucuacuaua

SEQ ID NO: 2173202 - RNA, 19 nt, Artificial Sequence
  Description of Artificial Sequence: Synthetic oligonucleotide
ggucaugagccuguuuaua

SEQ ID NO: 2173203 - RNA, 19 nt, Artificial Sequence
  Description of Artificial Sequence: Synthetic oligonucleotide
gcuuccguucugacaagca

SEQ ID NO: 2173204 - RNA, 19 nt, Artificial Sequence
  Description of Artificial Sequence: Synthetic oligonucleotide
aucccagaucuggaugcuu

SEQ ID NO: 2173205 - RNA, 19 nt, Artificial Sequence
  Description of Artificial Sequence: Synthetic oligonucleotide
gcgcucaaagaagacaagu

SEQ ID NO: 2173206 - RNA, 19 nt, Artificial Sequence
  Description of Artificial Sequence: Synthetic oligonucleotide
ggggucguaguacacuuuu

SEQ ID NO: 2173207 - RNA, 19 nt, Artificial Sequence
  Description of Artificial Sequence: Synthetic oligonucleotide
cggacaacacucgcauccg

SEQ ID NO: 2173208 - RNA, 19 nt, Artificial Sequence
  Description of Artificial Sequence: Synthetic oligonucleotide
ccaugcaaacagcucuuaa

SEQ ID NO: 2173209 - RNA, 19 nt, Artificial Sequence
  Description of Artificial Sequence: Synthetic oligonucleotide
caacacucgcauccgugau

SEQ ID NO: 2173210 - RNA, 19 nt, Artificial Sequence
  Description of Artificial Sequence: Synthetic oligonucleotide
ggaaaguccugcgcucaaa

SEQ ID NO: 2173211 - RNA, 19 nt, Artificial Sequence
  Description of Artificial Sequence: Synthetic oligonucleotide
cuucguuggcggggcucac

SEQ ID NO: 2173212 - RNA, 19 nt, Artificial Sequence
  Description of Artificial Sequence: Synthetic oligonucleotide
gacacccaauauggguuau

SEQ ID NO: 2173213 - RNA, 19 nt, Artificial Sequence
  Description of Artificial Sequence: Synthetic oligonucleotide
ggcucauucuuugauucuu

SEQ ID NO: 2173214 - RNA, 19 nt, Artificial Sequence
  Description of Artificial Sequence: Synthetic oligonucleotide
ccaacucggccaccacgac

SEQ ID NO: 2173215 - RNA, 19 nt, Artificial Sequence
  Description of Artificial Sequence: Synthetic oligonucleotide
caccacgaccugggccugc

SEQ ID NO: 2173216 - RNA, 19 nt, Artificial Sequence
  Description of Artificial Sequence: Synthetic oligonucleotide
gcgacacccaauauggguu

SEQ ID NO: 2173217 - RNA, 19 nt, Artificial Sequence
  Description of Artificial Sequence: Synthetic oligonucleotide
ggacaacacucgcauccgu

SEQ ID NO: 2173218 - RNA, 19 nt, Artificial Sequence
  Description of Artificial Sequence: Synthetic oligonucleotide
gacuuuuguuggggucgua

SEQ ID NO: 2173219 - RNA, 19 nt, Artificial Sequence
  Description of Artificial Sequence: Synthetic oligonucleotide
ggccugcuacaggagguuc

SEQ ID NO: 2173220 - RNA, 19 nt, Artificial Sequence
  Description of Artificial Sequence: Synthetic oligonucleotide
gcaugacgcaaaauggcuu

SEQ ID NO: 2173221 - RNA, 19 nt, Artificial Sequence
  Description of Artificial Sequence: Synthetic oligonucleotide
gugucugugccagggucau

SEQ ID NO: 2173222 - RNA, 19 nt, Artificial Sequence
  Description of Artificial Sequence: Synthetic oligonucleotide
cagagguacccgugacuau

SEQ ID NO: 2173223 - RNA, 19 nt, Artificial Sequence
  Description of Artificial Sequence: Synthetic oligonucleotide
cgaccugggccugcuacag

SEQ ID NO: 2173224 - RNA, 19 nt, Artificial Sequence
  Description of Artificial Sequence: Synthetic oligonucleotide
ccacaagguucccaucucu

SEQ ID NO: 2173225 - RNA, 19 nt, Artificial Sequence
  Description of Artificial Sequence: Synthetic oligonucleotide
guacuucguuggcggggcu

SEQ ID NO: 2173226 - RNA, 19 nt, Artificial Sequence
  Description of Artificial Sequence: Synthetic oligonucleotide
gguuagugucucagcuugu

SEQ ID NO: 2173227 - RNA, 19 nt, Artificial Sequence
  Description of Artificial Sequence: Synthetic oligonucleotide
gcuccccucugacuuuugu

SEQ ID NO: 2173228 - RNA, 19 nt, Artificial Sequence
  Description of Artificial Sequence: Synthetic oligonucleotide
ccgcuggguuuuaaccaca

SEQ ID NO: 2173229 - RNA, 19 nt, Artificial Sequence
  Description of Artificial Sequence: Synthetic oligonucleotide
ccgugaugucaauuucaua

SEQ ID NO: 2173230 - RNA, 19 nt, Artificial Sequence
  Description of Artificial Sequence: Synthetic oligonucleotide
ccgugacuaugaguuuauc

SEQ ID NO: 2173231 - RNA, 19 nt, Artificial Sequence
  Description of Artificial Sequence: Synthetic oligonucleotide
cgacacccaauauggguua

SEQ ID NO: 2173232 - RNA, 19 nt, Artificial Sequence
  Description of Artificial Sequence: Synthetic oligonucleotide
ugccuuccgcuggguuuua

SEQ ID NO: 2173233 - RNA, 19 nt, Artificial Sequence
  Description of Artificial Sequence: Synthetic oligonucleotide
ggguuccaacucggccacc

SEQ ID NO: 2173234 - RNA, 19 nt, Artificial Sequence
  Description of Artificial Sequence: Synthetic oligonucleotide
cccgugacuaugaguuuau

SEQ ID NO: 2173235 - RNA, 19 nt, Artificial Sequence
  Description of Artificial Sequence: Synthetic oligonucleotide
ccacuugggcaaacauggu

SEQ ID NO: 2173236 - RNA, 19 nt, Artificial Sequence
  Description of Artificial Sequence: Synthetic oligonucleotide
cagggucaugagccuguuu

SEQ ID NO: 2173237 - RNA, 19 nt, Artificial Sequence
  Description of Artificial Sequence: Synthetic oligonucleotide
ccuccacgagaggcaagga

SEQ ID NO: 2173238 - RNA, 19 nt, Artificial Sequence
  Description of Artificial Sequence: Synthetic oligonucleotide
cacgagaggcaaggacauu

SEQ ID NO: 2173239 - RNA, 19 nt, Artificial Sequence
  Description of Artificial Sequence: Synthetic oligonucleotide
gccuuccgcuggguuuuaa

SEQ ID NO: 2173240 - RNA, 19 nt, Artificial Sequence
  Description of Artificial Sequence: Synthetic oligonucleotide
gcaaggcaugagggguaau

SEQ ID NO: 2173241 - RNA, 19 nt, Artificial Sequence
  Description of Artificial Sequence: Synthetic oligonucleotide
ggcggggcucacggaacau

SEQ ID NO: 2173242 - RNA, 19 nt, Artificial Sequence
  Description of Artificial Sequence: Synthetic oligonucleotide
ccguugccacauccccucu

SEQ ID NO: 2173243 - RNA, 19 nt, Artificial Sequence
  Description of Artificial Sequence: Synthetic oligonucleotide
cgcauccgugaugucaauu

SEQ ID NO: 2173244 - RNA, 19 nt, Artificial Sequence
  Description of Artificial Sequence: Synthetic oligonucleotide
aaucauacaucuccacucc

SEQ ID NO: 2173245 - RNA, 19 nt, Artificial Sequence
  Description of Artificial Sequence: Synthetic oligonucleotide
uaccaaaucauacaucucc

SEQ ID NO: 2173246 - RNA, 19 nt, Artificial Sequence
  Description of Artificial Sequence: Synthetic oligonucleotide
acuaccaaaucauacaucu

SEQ ID NO: 2173247 - RNA, 19 nt, Artificial Sequence
  Description of Artificial Sequence: Synthetic oligonucleotide
uuuccaaucaggacggggc

SEQ ID NO: 2173248 - RNA, 19 nt, Artificial Sequence
  Description of Artificial Sequence: Synthetic oligonucleotide
uuaaaccguuccaacacag

SEQ ID NO: 2173249 - RNA, 19 nt, Artificial Sequence
  Description of Artificial Sequence: Synthetic oligonucleotide
ggguuuuccaaucaggacg

SEQ ID NO: 2173250 - RNA, 19 nt, Artificial Sequence
  Description of Artificial Sequence: Synthetic oligonucleotide
aacacagcuguccagcgcu

SEQ ID NO: 2173251 - RNA, 19 nt, Artificial Sequence
  Description of Artificial Sequence: Synthetic oligonucleotide
uugggaaagaaggacauca

SEQ ID NO: 2173252 - RNA, 19 nt, Artificial Sequence
  Description of Artificial Sequence: Synthetic oligonucleotide
uuuaaaccguuccaacaca

SEQ ID NO: 2173253 - RNA, 19 nt, Artificial Sequence
  Description of Artificial Sequence: Synthetic oligonucleotide
uccgcauccuuguugcucg

SEQ ID NO: 2173254 - RNA, 19 nt, Artificial Sequence
  Description of Artificial Sequence: Synthetic oligonucleotide
ucauccgcauccuuguugc

SEQ ID NO: 2173255 - RNA, 19 nt, Artificial Sequence
  Description of Artificial Sequence: Synthetic oligonucleotide
ucggguuuuccaaucagga

SEQ ID NO: 2173256 - RNA, 19 nt, Artificial Sequence
  Description of Artificial Sequence: Synthetic oligonucleotide
aggguagcgccccaggcgc

SEQ ID NO: 2173257 - RNA, 19 nt, Artificial Sequence
  Description of Artificial Sequence: Synthetic oligonucleotide
uuccaaucaggacggggcg

SEQ ID NO: 2173258 - RNA, 19 nt, Artificial Sequence
  Description of Artificial Sequence: Synthetic oligonucleotide
agcgcuucgguucagugug

SEQ ID NO: 2173259 - RNA, 19 nt, Artificial Sequence
  Description of Artificial Sequence: Synthetic oligonucleotide
uuuuccaaucaggacgggg

SEQ ID NO: 2173260 - RNA, 19 nt, Artificial Sequence
  Description of Artificial Sequence: Synthetic oligonucleotide
ugcagcgccagacucagcu

SEQ ID NO: 2173261 - RNA, 19 nt, Artificial Sequence
  Description of Artificial Sequence: Synthetic oligonucleotide
ugcggagugcuccuccucg

SEQ ID NO: 2173262 - RNA, 19 nt, Artificial Sequence
  Description of Artificial Sequence: Synthetic oligonucleotide
ugauugagcaccggcauga

SEQ ID NO: 2173263 - RNA, 19 nt, Artificial Sequence
  Description of Artificial Sequence: Synthetic oligonucleotide
ugggaaagaaggacaucag

SEQ ID NO: 2173264 - RNA, 19 nt, Artificial Sequence
  Description of Artificial Sequence: Synthetic oligonucleotide
ucccgcgucggccagggcg

SEQ ID NO: 2173265 - RNA, 19 nt, Artificial Sequence
  Description of Artificial Sequence: Synthetic oligonucleotide
uaaaccguuccaacacagc

SEQ ID NO: 2173266 - RNA, 19 nt, Artificial Sequence
  Description of Artificial Sequence: Synthetic oligonucleotide
gaggguagcgccccaggcg

SEQ ID NO: 2173267 - RNA, 19 nt, Artificial Sequence
  Description of Artificial Sequence: Synthetic oligonucleotide
cauacaucuccacucccgc

SEQ ID NO: 2173268 - RNA, 19 nt, Artificial Sequence
  Description of Artificial Sequence: Synthetic oligonucleotide
accguuccaacacagcugu

SEQ ID NO: 2173269 - RNA, 19 nt, Artificial Sequence
  Description of Artificial Sequence: Synthetic oligonucleotide
agucuggccgccuuccccg

SEQ ID NO: 2173270 - RNA, 19 nt, Artificial Sequence
  Description of Artificial Sequence: Synthetic oligonucleotide
ccaacucucagucuggccg

SEQ ID NO: 2173271 - RNA, 19 nt, Artificial Sequence
  Description of Artificial Sequence: Synthetic oligonucleotide
ucguuucucagcucggcca

SEQ ID NO: 2173272 - RNA, 19 nt, Artificial Sequence
  Description of Artificial Sequence: Synthetic oligonucleotide
ggccguuugggaaagaagg

SEQ ID NO: 2173273 - RNA, 19 nt, Artificial Sequence
  Description of Artificial Sequence: Synthetic oligonucleotide
auacaucuccacucccgcg

SEQ ID NO: 2173274 - RNA, 19 nt, Artificial Sequence
  Description of Artificial Sequence: Synthetic oligonucleotide
ggaaagaaggacaucagca

SEQ ID NO: 2173275 - RNA, 19 nt, Artificial Sequence
  Description of Artificial Sequence: Synthetic oligonucleotide
ggguccagcagccaagugg

SEQ ID NO: 2173276 - RNA, 19 nt, Artificial Sequence
  Description of Artificial Sequence: Synthetic oligonucleotide
gguuuuccaaucaggacgg

SEQ ID NO: 2173277 - RNA, 19 nt, Artificial Sequence
  Description of Artificial Sequence: Synthetic oligonucleotide
uucagugugcgcugccucc

SEQ ID NO: 2173278 - RNA, 19 nt, Artificial Sequence
  Description of Artificial Sequence: Synthetic oligonucleotide
accggcaugagcgccaccg

SEQ ID NO: 2173279 - RNA, 19 nt, Artificial Sequence
  Description of Artificial Sequence: Synthetic oligonucleotide
agccaagugggcgaggguc

SEQ ID NO: 2173280 - RNA, 19 nt, Artificial Sequence
  Description of Artificial Sequence: Synthetic oligonucleotide
aaccguuccaacacagcug

SEQ ID NO: 2173281 - RNA, 19 nt, Artificial Sequence
  Description of Artificial Sequence: Synthetic oligonucleotide
aaucaggacggggcggcgg

SEQ ID NO: 2173282 - RNA, 19 nt, Artificial Sequence
  Description of Artificial Sequence: Synthetic oligonucleotide
ugggcgagggucccggugc

SEQ ID NO: 2173283 - RNA, 19 nt, Artificial Sequence
  Description of Artificial Sequence: Synthetic oligonucleotide
aacccggccaccugauuga

SEQ ID NO: 2173284 - RNA, 19 nt, Artificial Sequence
  Description of Artificial Sequence: Synthetic oligonucleotide
gucauccgcauccuuguug

SEQ ID NO: 2173285 - RNA, 19 nt, Artificial Sequence
  Description of Artificial Sequence: Synthetic oligonucleotide
cuguccagcgcuucgguuc

SEQ ID NO: 2173286 - RNA, 19 nt, Artificial Sequence
  Description of Artificial Sequence: Synthetic oligonucleotide
gggaaagaaggacaucagc

SEQ ID NO: 2173287 - RNA, 19 nt, Artificial Sequence
  Description of Artificial Sequence: Synthetic oligonucleotide
cagcgccagacucagcucg

SEQ ID NO: 2173288 - RNA, 19 nt, Artificial Sequence
  Description of Artificial Sequence: Synthetic oligonucleotide
caacccggccaccugauug

SEQ ID NO: 2173289 - RNA, 19 nt, Artificial Sequence
  Description of Artificial Sequence: Synthetic oligonucleotide
aacucucagucuggccgcc

SEQ ID NO: 2173290 - RNA, 19 nt, Artificial Sequence
  Description of Artificial Sequence: Synthetic oligonucleotide
uccaaucaggacggggcgg

SEQ ID NO: 2173291 - RNA, 19 nt, Artificial Sequence
  Description of Artificial Sequence: Synthetic oligonucleotide
caacucucagucuggccgc

SEQ ID NO: 2173292 - RNA, 19 nt, Artificial Sequence
  Description of Artificial Sequence: Synthetic oligonucleotide
ucgcaccaagcacugcugc

SEQ ID NO: 2173293 - RNA, 19 nt, Artificial Sequence
  Description of Artificial Sequence: Synthetic oligonucleotide
accgcguccguccaacucu

SEQ ID NO: 2173294 - RNA, 19 nt, Artificial Sequence
  Description of Artificial Sequence: Synthetic oligonucleotide
uucgguucagugugcgcug

SEQ ID NO: 2173295 - RNA, 19 nt, Artificial Sequence
  Description of Artificial Sequence: Synthetic oligonucleotide
uuccccgcugcccagcaac

SEQ ID NO: 2173296 - RNA, 19 nt, Artificial Sequence
  Description of Artificial Sequence: Synthetic oligonucleotide
cucguuucucagcucggcc

SEQ ID NO: 2173297 - RNA, 19 nt, Artificial Sequence
  Description of Artificial Sequence: Synthetic oligonucleotide
cacuaccaaaucauacauc

SEQ ID NO: 2173298 - RNA, 19 nt, Artificial Sequence
  Description of Artificial Sequence: Synthetic oligonucleotide
ugcucggguuuuccaauca

SEQ ID NO: 2173299 - RNA, 19 nt, Artificial Sequence
  Description of Artificial Sequence: Synthetic oligonucleotide
caggcgaccagcagccggg

SEQ ID NO: 2173300 - RNA, 19 nt, Artificial Sequence
  Description of Artificial Sequence: Synthetic oligonucleotide
caccugauugagcaccggc

SEQ ID NO: 2173301 - RNA, 19 nt, Artificial Sequence
  Description of Artificial Sequence: Synthetic oligonucleotide
aagugggcgagggucccgg

SEQ ID NO: 2173302 - RNA, 19 nt, Artificial Sequence
  Description of Artificial Sequence: Synthetic oligonucleotide
caaaucauacaucuccacu

SEQ ID NO: 2173303 - RNA, 19 nt, Artificial Sequence
  Description of Artificial Sequence: Synthetic oligonucleotide
cuaccaaaucauacaucuc

SEQ ID NO: 2173304 - RNA, 19 nt, Artificial Sequence
  Description of Artificial Sequence: Synthetic oligonucleotide
ucccacucucguuucucag

SEQ ID NO: 2173305 - RNA, 19 nt, Artificial Sequence
  Description of Artificial Sequence: Synthetic oligonucleotide
agcgccgcggccgugagag

SEQ ID NO: 2173306 - RNA, 19 nt, Artificial Sequence
  Description of Artificial Sequence: Synthetic oligonucleotide
caggcggccacggagggcg

SEQ ID NO: 2173307 - RNA, 19 nt, Artificial Sequence
  Description of Artificial Sequence: Synthetic oligonucleotide
auccgcauccuuguugcuc

SEQ ID NO: 2173308 - RNA, 19 nt, Artificial Sequence
  Description of Artificial Sequence: Synthetic oligonucleotide
guccguccaacucucaguc

SEQ ID NO: 2173309 - RNA, 19 nt, Artificial Sequence
  Description of Artificial Sequence: Synthetic oligonucleotide
caggccgcagcccacuacc

SEQ ID NO: 2173310 - RNA, 19 nt, Artificial Sequence
  Description of Artificial Sequence: Synthetic oligonucleotide
agaaggacaucagcaguca

SEQ ID NO: 2173311 - RNA, 19 nt, Artificial Sequence
  Description of Artificial Sequence: Synthetic oligonucleotide
cucucguuucucagcucgg

SEQ ID NO: 2173312 - RNA, 19 nt, Artificial Sequence
  Description of Artificial Sequence: Synthetic oligonucleotide
cugauugagcaccggcaug

SEQ ID NO: 2173313 - RNA, 19 nt, Artificial Sequence
  Description of Artificial Sequence: Synthetic oligonucleotide
agugugcgcugccucccac

SEQ ID NO: 2173314 - RNA, 19 nt, Artificial Sequence
  Description of Artificial Sequence: Synthetic oligonucleotide
caccgcgggcuccagagcc

SEQ ID NO: 2173315 - RNA, 19 nt, Artificial Sequence
  Description of Artificial Sequence: Synthetic oligonucleotide
ugugcgcugccucccacuc

SEQ ID NO: 2173316 - RNA, 19 nt, Artificial Sequence
  Description of Artificial Sequence: Synthetic oligonucleotide
auccuuguugcucggguuu

SEQ ID NO: 2173317 - RNA, 19 nt, Artificial Sequence
  Description of Artificial Sequence: Synthetic oligonucleotide
ggacaccucgagcugggcg

SEQ ID NO: 2173318 - RNA, 19 nt, Artificial Sequence
  Description of Artificial Sequence: Synthetic oligonucleotide
gugagagccgcggccagcg

SEQ ID NO: 2173319 - RNA, 19 nt, Artificial Sequence
  Description of Artificial Sequence: Synthetic oligonucleotide
ucagugugcgcugccuccc

SEQ ID NO: 2173320 - RNA, 19 nt, Artificial Sequence
  Description of Artificial Sequence: Synthetic oligonucleotide
accugauugagcaccggca

SEQ ID NO: 2173321 - RNA, 19 nt, Artificial Sequence
  Description of Artificial Sequence: Synthetic oligonucleotide
caccaagcacugcugcagc

SEQ ID NO: 2173322 - RNA, 19 nt, Artificial Sequence
  Description of Artificial Sequence: Synthetic oligonucleotide
cugagacuccuccggcccg

SEQ ID NO: 2173323 - RNA, 19 nt, Artificial Sequence
  Description of Artificial Sequence: Synthetic oligonucleotide
cucgagcugggcgcgaggg

SEQ ID NO: 2173324 - RNA, 19 nt, Artificial Sequence
  Description of Artificial Sequence: Synthetic oligonucleotide
gcgaccagcagccgggccg

SEQ ID NO: 2173325 - RNA, 19 nt, Artificial Sequence
  Description of Artificial Sequence: Synthetic oligonucleotide
cucgcaccaagcacugcug

SEQ ID NO: 2173326 - RNA, 19 nt, Artificial Sequence
  Description of Artificial Sequence: Synthetic oligonucleotide
gauugagcaccggcaugag

SEQ ID NO: 2173327 - RNA, 19 nt, Artificial Sequence
  Description of Artificial Sequence: Synthetic oligonucleotide
aagggcgcgcggcggaagu

SEQ ID NO: 2173328 - RNA, 19 nt, Artificial Sequence
  Description of Artificial Sequence: Synthetic oligonucleotide
ccaaaucauacaucuccac

SEQ ID NO: 2173329 - RNA, 19 nt, Artificial Sequence
  Description of Artificial Sequence: Synthetic oligonucleotide
gcugagacuccuccggccc

SEQ ID NO: 2173330 - RNA, 19 nt, Artificial Sequence
  Description of Artificial Sequence: Synthetic oligonucleotide
cagucuggccgccuucccc

SEQ ID NO: 2173331 - RNA, 19 nt, Artificial Sequence
  Description of Artificial Sequence: Synthetic oligonucleotide
uugcucggguuuuccaauc

SEQ ID NO: 2173332 - RNA, 19 nt, Artificial Sequence
  Description of Artificial Sequence: Synthetic oligonucleotide
uccuccggcccgcggauac

SEQ ID NO: 2173333 - RNA, 19 nt, Artificial Sequence
  Description of Artificial Sequence: Synthetic oligonucleotide
ugggcgcgaggguagcgcc

SEQ ID NO: 2173334 - RNA, 19 nt, Artificial Sequence
  Description of Artificial Sequence: Synthetic oligonucleotide
ucaggccgcagcccacuac

SEQ ID NO: 2173335 - RNA, 19 nt, Artificial Sequence
  Description of Artificial Sequence: Synthetic oligonucleotide
cccacuaccaaaucauaca

SEQ ID NO: 2173336 - RNA, 19 nt, Artificial Sequence
  Description of Artificial Sequence: Synthetic oligonucleotide
uccucgagccgcguggggu

SEQ ID NO: 2173337 - RNA, 19 nt, Artificial Sequence
  Description of Artificial Sequence: Synthetic oligonucleotide
caucuccacucccgcgucg

SEQ ID NO: 2173338 - RNA, 19 nt, Artificial Sequence
  Description of Artificial Sequence: Synthetic oligonucleotide
cacuggguagaggcgcugg

SEQ ID NO: 2173339 - RNA, 19 nt, Artificial Sequence
  Description of Artificial Sequence: Synthetic oligonucleotide
uccccgcugcccagcaacc

SEQ ID NO: 2173340 - RNA, 19 nt, Artificial Sequence
  Description of Artificial Sequence: Synthetic oligonucleotide
uccguccaacucucagucu

SEQ ID NO: 2173341 - RNA, 19 nt, Artificial Sequence
  Description of Artificial Sequence: Synthetic oligonucleotide
agcgccagacucagcucgc

SEQ ID NO: 2173342 - RNA, 19 nt, Artificial Sequence
  Description of Artificial Sequence: Synthetic oligonucleotide
ccguccaacucucagucug

SEQ ID NO: 2173343 - RNA, 19 nt, Artificial Sequence
  Description of Artificial Sequence: Synthetic oligonucleotide
cagcucgcgcuccucgccg

SEQ ID NO: 2173344 - RNA, 19 nt, Artificial Sequence
  Description of Artificial Sequence: Synthetic oligonucleotide
gcaggcgaccagcagccgg

SEQ ID NO: 2173345 - RNA, 19 nt, Artificial Sequence
  Description of Artificial Sequence: Synthetic oligonucleotide
gcagcccacuaccaaauca

SEQ ID NO: 2173346 - RNA, 19 nt, Artificial Sequence
  Description of Artificial Sequence: Synthetic oligonucleotide
guuuuccaaucaggacggg

SEQ ID NO: 2173347 - RNA, 19 nt, Artificial Sequence
  Description of Artificial Sequence: Synthetic oligonucleotide
ggcagcucgcaccaagcac

SEQ ID NO: 2173348 - RNA, 19 nt, Artificial Sequence
  Description of Artificial Sequence: Synthetic oligonucleotide
gcucggguuuuccaaucag

SEQ ID NO: 2173349 - RNA, 19 nt, Artificial Sequence
  Description of Artificial Sequence: Synthetic oligonucleotide
cuucgguucagugugcgcu

SEQ ID NO: 2173350 - RNA, 19 nt, Artificial Sequence
  Description of Artificial Sequence: Synthetic oligonucleotide
ucgguucagugugcgcugc

SEQ ID NO: 2173351 - RNA, 19 nt, Artificial Sequence
  Description of Artificial Sequence: Synthetic oligonucleotide
cguuccaacacagcugucc

SEQ ID NO: 2173352 - RNA, 19 nt, Artificial Sequence
  Description of Artificial Sequence: Synthetic oligonucleotide
agcgccaccgugaggccgg

SEQ ID NO: 2173353 - RNA, 19 nt, Artificial Sequence
  Description of Artificial Sequence: Synthetic oligonucleotide
cccggugcgaggcucaggc

SEQ ID NO: 2173354 - RNA, 19 nt, Artificial Sequence
  Description of Artificial Sequence: Synthetic oligonucleotide
acaccucgagcugggcgcg

SEQ ID NO: 2173355 - RNA, 19 nt, Artificial Sequence
  Description of Artificial Sequence: Synthetic oligonucleotide
ucgagcugggcgcgagggu

SEQ ID NO: 2173356 - RNA, 19 nt, Artificial Sequence
  Description of Artificial Sequence: Synthetic oligonucleotide
ugagcgccaccgugaggcc

SEQ ID NO: 2173357 - RNA, 19 nt, Artificial Sequence
  Description of Artificial Sequence: Synthetic oligonucleotide
gagaagggcgcgcggcgga

SEQ ID NO: 2173358 - RNA, 19 nt, Artificial Sequence
  Description of Artificial Sequence: Synthetic oligonucleotide
agcagccgggccguuuggg

SEQ ID NO: 2173359 - RNA, 19 nt, Artificial Sequence
  Description of Artificial Sequence: Synthetic oligonucleotide
cagcuguccagcgcuucgg

SEQ ID NO: 2173360 - RNA, 19 nt, Artificial Sequence
  Description of Artificial Sequence: Synthetic oligonucleotide
gugggguccagcagccaag

SEQ ID NO: 2173361 - RNA, 19 nt, Artificial Sequence
  Description of Artificial Sequence: Synthetic oligonucleotide
gccgccguccuccagcagc

SEQ ID NO: 2173362 - RNA, 19 nt, Artificial Sequence
  Description of Artificial Sequence: Synthetic oligonucleotide
gcaugagcgccaccgugag

SEQ ID NO: 2173363 - RNA, 19 nt, Artificial Sequence
  Description of Artificial Sequence: Synthetic oligonucleotide
cccgcggauacgacggugg

SEQ ID NO: 2173364 - RNA, 19 nt, Artificial Sequence
  Description of Artificial Sequence: Synthetic oligonucleotide
acucccgcgucggccaggg

SEQ ID NO: 2173365 - RNA, 19 nt, Artificial Sequence
  Description of Artificial Sequence: Synthetic oligonucleotide
gcgcuggcagccuuccagg

SEQ ID NO: 2173366 - RNA, 19 nt, Artificial Sequence
  Description of Artificial Sequence: Synthetic oligonucleotide
agacuccuccggcccgcgg

SEQ ID NO: 2173367 - RNA, 19 nt, Artificial Sequence
  Description of Artificial Sequence: Synthetic oligonucleotide
ccguuugggaaagaaggac

SEQ ID NO: 2173368 - RNA, 19 nt, Artificial Sequence
  Description of Artificial Sequence: Synthetic oligonucleotide
gagcaccggcaugagcgcc

SEQ ID NO: 2173369 - RNA, 19 nt, Artificial Sequence
  Description of Artificial Sequence: Synthetic oligonucleotide
gcccacuaccaaaucauac

SEQ ID NO: 2173370 - RNA, 19 nt, Artificial Sequence
  Description of Artificial Sequence: Synthetic oligonucleotide
agaggcgcuggcagccuuc

SEQ ID NO: 2173371 - RNA, 19 nt, Artificial Sequence
  Description of Artificial Sequence: Synthetic oligonucleotide
guugcucggguuuuccaau

SEQ ID NO: 2173372 - RNA, 19 nt, Artificial Sequence
  Description of Artificial Sequence: Synthetic oligonucleotide
guuucucagcucggccaag

SEQ ID NO: 2173373 - RNA, 19 nt, Artificial Sequence
  Description of Artificial Sequence: Synthetic oligonucleotide
agcugggcgcgaggguagc

SEQ ID NO: 2173374 - RNA, 19 nt, Artificial Sequence
  Description of Artificial Sequence: Synthetic oligonucleotide
gccaccgugaggccggcug

SEQ ID NO: 2173375 - RNA, 19 nt, Artificial Sequence
  Description of Artificial Sequence: Synthetic oligonucleotide
gugggcgagggucccggug

SEQ ID NO: 2173376 - RNA, 19 nt, Artificial Sequence
  Description of Artificial Sequence: Synthetic oligonucleotide
caaucaggacggggcggcg

SEQ ID NO: 2173377 - RNA, 19 nt, Artificial Sequence
  Description of Artificial Sequence: Synthetic oligonucleotide
gaggcgcuggcagccuucc

SEQ ID NO: 2173378 - RNA, 19 nt, Artificial Sequence
  Description of Artificial Sequence: Synthetic oligonucleotide
agccgggccguuugggaaa

SEQ ID NO: 2173379 - RNA, 19 nt, Artificial Sequence
  Description of Artificial Sequence: Synthetic oligonucleotide
gcguccguccaacucucag

SEQ ID NO: 2173380 - RNA, 19 nt, Artificial Sequence
  Description of Artificial Sequence: Synthetic oligonucleotide
cagcccacuaccaaaucau

SEQ ID NO: 2173381 - RNA, 19 nt, Artificial Sequence
  Description of Artificial Sequence: Synthetic oligonucleotide
agucauccgcauccuuguu

SEQ ID NO: 2173382 - RNA, 19 nt, Artificial Sequence
  Description of Artificial Sequence: Synthetic oligonucleotide
gaagggcgcgcggcggaag

SEQ ID NO: 2173383 - RNA, 19 nt, Artificial Sequence
  Description of Artificial Sequence: Synthetic oligonucleotide
gggccguuugggaaagaag

SEQ ID NO: 2173384 - RNA, 19 nt, Artificial Sequence
  Description of Artificial Sequence: Synthetic oligonucleotide
caagugggcgagggucccg

SEQ ID NO: 2173385 - RNA, 19 nt, Artificial Sequence
  Description of Artificial Sequence: Synthetic oligonucleotide
cucggccaaggcaggcgac

SEQ ID NO: 2173386 - RNA, 19 nt, Artificial Sequence
  Description of Artificial Sequence: Synthetic oligonucleotide
uagaggcgcuggcagccuu

SEQ ID NO: 2173387 - RNA, 19 nt, Artificial Sequence
  Description of Artificial Sequence: Synthetic oligonucleotide
caccgcguccguccaacuc

SEQ ID NO: 2173388 - RNA, 19 nt, Artificial Sequence
  Description of Artificial Sequence: Synthetic oligonucleotide
caccgugaggccggcugcg

SEQ ID NO: 2173389 - RNA, 19 nt, Artificial Sequence
  Description of Artificial Sequence: Synthetic oligonucleotide
cacucucguuucucagcuc

SEQ ID NO: 2173390 - RNA, 19 nt, Artificial Sequence
  Description of Artificial Sequence: Synthetic oligonucleotide
uccagcgcuucgguucagu

SEQ ID NO: 2173391 - RNA, 19 nt, Artificial Sequence
  Description of Artificial Sequence: Synthetic oligonucleotide
ggcaugagcgccaccguga

SEQ ID NO: 2173392 - RNA, 19 nt, Artificial Sequence
  Description of Artificial Sequence: Synthetic oligonucleotide
gccaaggcaggcgaccagc

SEQ ID NO: 2173393 - RNA, 19 nt, Artificial Sequence
  Description of Artificial Sequence: Synthetic oligonucleotide
ggccgugagagccgcggcc

SEQ ID NO: 2173394 - RNA, 19 nt, Artificial Sequence
  Description of Artificial Sequence: Synthetic oligonucleotide
cuccucgagccgcgugggg

SEQ ID NO: 2173395 - RNA, 19 nt, Artificial Sequence
  Description of Artificial Sequence: Synthetic oligonucleotide
cccuccggcgggcagcucg

SEQ ID NO: 2173396 - RNA, 19 nt, Artificial Sequence
  Description of Artificial Sequence: Synthetic oligonucleotide
cacggagggcggccggagc

SEQ ID NO: 2173397 - RNA, 19 nt, Artificial Sequence
  Description of Artificial Sequence: Synthetic oligonucleotide
ggcugcggagugcuccucc

SEQ ID NO: 2173398 - RNA, 19 nt, Artificial Sequence
  Description of Artificial Sequence: Synthetic oligonucleotide
gcuucgguucagugugcgc

SEQ ID NO: 2173399 - RNA, 19 nt, Artificial Sequence
  Description of Artificial Sequence: Synthetic oligonucleotide
gccaagugggcgagggucc

SEQ ID NO: 2173400 - RNA, 19 nt, Artificial Sequence
  Description of Artificial Sequence: Synthetic oligonucleotide
cuggguagaggcgcuggca

SEQ ID NO: 2173401 - RNA, 19 nt, Artificial Sequence
  Description of Artificial Sequence: Synthetic oligonucleotide
agcaccggcaugagcgcca

SEQ ID NO: 2173402 - RNA, 19 nt, Artificial Sequence
  Description of Artificial Sequence: Synthetic oligonucleotide
gcggccagcgcagagccgc

SEQ ID NO: 2173403 - RNA, 19 nt, Artificial Sequence
  Description of Artificial Sequence: Synthetic oligonucleotide
ggugcgaggcucaggccgc

SEQ ID NO: 2173404 - RNA, 19 nt, Artificial Sequence
  Description of Artificial Sequence: Synthetic oligonucleotide
cccgcugcccagcaacccg

SEQ ID NO: 2173405 - RNA, 19 nt, Artificial Sequence
  Description of Artificial Sequence: Synthetic oligonucleotide
ggcggcgccccuccggcgg

SEQ ID NO: 2173406 - RNA, 19 nt, Artificial Sequence
  Description of Artificial Sequence: Synthetic oligonucleotide
gcucgcaccaagcacugcu

SEQ ID NO: 2173407 - RNA, 19 nt, Artificial Sequence
  Description of Artificial Sequence: Synthetic oligonucleotide
cagcagccgggccguuugg

SEQ ID NO: 2173408 - RNA, 19 nt, Artificial Sequence
  Description of Artificial Sequence: Synthetic oligonucleotide
ccagcgcuucgguucagug

SEQ ID NO: 2173409 - RNA, 19 nt, Artificial Sequence
  Description of Artificial Sequence: Synthetic oligonucleotide
gccguuugggaaagaagga

SEQ ID NO: 2173410 - RNA, 19 nt, Artificial Sequence
  Description of Artificial Sequence: Synthetic oligonucleotide
cucgagccgcguggggucc

SEQ ID NO: 2173411 - RNA, 19 nt, Artificial Sequence
  Description of Artificial Sequence: Synthetic oligonucleotide
agcagcgcggacaccucga

SEQ ID NO: 2173412 - RNA, 19 nt, Artificial Sequence
  Description of Artificial Sequence: Synthetic oligonucleotide
ugcgaggcucaggccgcag

SEQ ID NO: 2173413 - RNA, 19 nt, Artificial Sequence
  Description of Artificial Sequence: Synthetic oligonucleotide
cugcggagugcuccuccuc

SEQ ID NO: 2173414 - RNA, 19 nt, Artificial Sequence
  Description of Artificial Sequence: Synthetic oligonucleotide
gaggccggcugcggagugc

SEQ ID NO: 2173415 - RNA, 19 nt, Artificial Sequence
  Description of Artificial Sequence: Synthetic oligonucleotide
uccggcccgcggauacgac

SEQ ID NO: 2173416 - RNA, 19 nt, Artificial Sequence
  Description of Artificial Sequence: Synthetic oligonucleotide
ccggcgggcagcucgcacc

SEQ ID NO: 2173417 - RNA, 19 nt, Artificial Sequence
  Description of Artificial Sequence: Synthetic oligonucleotide
ccgcugcccagcaacccgg

SEQ ID NO: 2173418 - RNA, 19 nt, Artificial Sequence
  Description of Artificial Sequence: Synthetic oligonucleotide
gucuggccgccuuccccgc

SEQ ID NO: 2173419 - RNA, 19 nt, Artificial Sequence
  Description of Artificial Sequence: Synthetic oligonucleotide
gacggggcggcggcgcccc

SEQ ID NO: 2173420 - RNA, 19 nt, Artificial Sequence
  Description of Artificial Sequence: Synthetic oligonucleotide
gcagcgcggacaccucgag

SEQ ID NO: 2173421 - RNA, 19 nt, Artificial Sequence
  Description of Artificial Sequence: Synthetic oligonucleotide
cgcaccgcgggcuccagag

SEQ ID NO: 2173422 - RNA, 19 nt, Artificial Sequence
  Description of Artificial Sequence: Synthetic oligonucleotide
cagggcgagcgccgcggcc

SEQ ID NO: 2173423 - RNA, 19 nt, Artificial Sequence
  Description of Artificial Sequence: Synthetic oligonucleotide
cagccgggccguuugggaa

SEQ ID NO: 2173424 - RNA, 19 nt, Artificial Sequence
  Description of Artificial Sequence: Synthetic oligonucleotide
cagcgcuucgguucagugu

SEQ ID NO: 2173425 - RNA, 19 nt, Artificial Sequence
  Description of Artificial Sequence: Synthetic oligonucleotide
acccggccaccugauugag

SEQ ID NO: 2173426 - RNA, 19 nt, Artificial Sequence
  Description of Artificial Sequence: Synthetic oligonucleotide
gggcgagggucccggugcg

SEQ ID NO: 2173427 - RNA, 19 nt, Artificial Sequence
  Description of Artificial Sequence: Synthetic oligonucleotide
agcccacuaccaaaucaua

SEQ ID NO: 2173428 - RNA, 19 nt, Artificial Sequence
  Description of Artificial Sequence: Synthetic oligonucleotide
gccgcagcccacuaccaaa

SEQ ID NO: 2173429 - RNA, 19 nt, Artificial Sequence
  Description of Artificial Sequence: Synthetic oligonucleotide
agggcgcgcggcggaaguc

SEQ ID NO: 2173430 - RNA, 19 nt, Artificial Sequence
  Description of Artificial Sequence: Synthetic oligonucleotide
gggcagcucgcaccaagca

SEQ ID NO: 2173431 - RNA, 19 nt, Artificial Sequence
  Description of Artificial Sequence: Synthetic oligonucleotide
gcgaggcucaggccgcagc

SEQ ID NO: 2173432 - RNA, 19 nt, Artificial Sequence
  Description of Artificial Sequence: Synthetic oligonucleotide
gcucggccaaggcaggcga

SEQ ID NO: 2173433 - RNA, 19 nt, Artificial Sequence
  Description of Artificial Sequence: Synthetic oligonucleotide
ccacuaccaaaucauacau

SEQ ID NO: 2173434 - RNA, 19 nt, Artificial Sequence
  Description of Artificial Sequence: Synthetic oligonucleotide
gcauccuuguugcucgggu

SEQ ID NO: 2173435 - RNA, 19 nt, Artificial Sequence
  Description of Artificial Sequence: Synthetic oligonucleotide
gccagacucagcucgcgcu

SEQ ID NO: 2173436 - RNA, 19 nt, Artificial Sequence
  Description of Artificial Sequence: Synthetic oligonucleotide
cauccuuguugcucggguu

SEQ ID NO: 2173437 - RNA, 19 nt, Artificial Sequence
  Description of Artificial Sequence: Synthetic oligonucleotide
acucucagucuggccgccu

SEQ ID NO: 2173438 - RNA, 19 nt, Artificial Sequence
  Description of Artificial Sequence: Synthetic oligonucleotide
ggcgcgaggguagcgcccc

SEQ ID NO: 2173439 - RNA, 19 nt, Artificial Sequence
  Description of Artificial Sequence: Synthetic oligonucleotide
gcggccggagccucgccgc

SEQ ID NO: 2173440 - RNA, 19 nt, Artificial Sequence
  Description of Artificial Sequence: Synthetic oligonucleotide
gcggacaccucgagcuggg

SEQ ID NO: 2173441 - RNA, 19 nt, Artificial Sequence
  Description of Artificial Sequence: Synthetic oligonucleotide
agcaacccggccaccugau

SEQ ID NO: 2173442 - RNA, 19 nt, Artificial Sequence
  Description of Artificial Sequence: Synthetic oligonucleotide
cagagccgccguccuccag

SEQ ID NO: 2173443 - RNA, 19 nt, Artificial Sequence
  Description of Artificial Sequence: Synthetic oligonucleotide
cugccucccacucucguuu

SEQ ID NO: 2173444 - RNA, 19 nt, Artificial Sequence
  Description of Artificial Sequence: Synthetic oligonucleotide
gcagccgggccguuuggga

SEQ ID NO: 2173445 - RNA, 19 nt, Artificial Sequence
  Description of Artificial Sequence: Synthetic oligonucleotide
guagcgccccaggcgcacc

SEQ ID NO: 2173446 - RNA, 19 nt, Artificial Sequence
  Description of Artificial Sequence: Synthetic oligonucleotide
agaagggcgcgcggcggaa

SEQ ID NO: 2173447 - RNA, 19 nt, Artificial Sequence
  Description of Artificial Sequence: Synthetic oligonucleotide
cugcagcgccagacucagc

SEQ ID NO: 2173448 - RNA, 19 nt, Artificial Sequence
  Description of Artificial Sequence: Synthetic oligonucleotide
gcugcccagcaacccggcc

SEQ ID NO: 2173449 - RNA, 19 nt, Artificial Sequence
  Description of Artificial Sequence: Synthetic oligonucleotide
cggagaagggcgcgcggcg

SEQ ID NO: 2173450 - RNA, 19 nt, Artificial Sequence
  Description of Artificial Sequence: Synthetic oligonucleotide
ccucgagccgcgugggguc

SEQ ID NO: 2173451 - RNA, 19 nt, Artificial Sequence
  Description of Artificial Sequence: Synthetic oligonucleotide
ccggagaagggcgcgcggc

SEQ ID NO: 2173452 - RNA, 19 nt, Artificial Sequence
  Description of Artificial Sequence: Synthetic oligonucleotide
ccacucucguuucucagcu

SEQ ID NO: 2173453 - RNA, 19 nt, Artificial Sequence
  Description of Artificial Sequence: Synthetic oligonucleotide
gugugcgcugccucccacu

SEQ ID NO: 2173454 - RNA, 19 nt, Artificial Sequence
  Description of Artificial Sequence: Synthetic oligonucleotide
ggcgaccagcagccgggcc

SEQ ID NO: 2173455 - RNA, 19 nt, Artificial Sequence
  Description of Artificial Sequence: Synthetic oligonucleotide
cagugugcgcugccuccca

SEQ ID NO: 2173456 - RNA, 19 nt, Artificial Sequence
  Description of Artificial Sequence: Synthetic oligonucleotide
ggccacggagggcggccgg

SEQ ID NO: 2173457 - RNA, 19 nt, Artificial Sequence
  Description of Artificial Sequence: Synthetic oligonucleotide
ucgagccgcguggggucca

SEQ ID NO: 2173458 - RNA, 19 nt, Artificial Sequence
  Description of Artificial Sequence: Synthetic oligonucleotide
gcgccccaggcgcaccgcg

SEQ ID NO: 2173459 - RNA, 19 nt, Artificial Sequence
  Description of Artificial Sequence: Synthetic oligonucleotide
aggcgcuggcagccuucca

SEQ ID NO: 2173460 - RNA, 19 nt, Artificial Sequence
  Description of Artificial Sequence: Synthetic oligonucleotide
ccugauugagcaccggcau

SEQ ID NO: 2173461 - RNA, 19 nt, Artificial Sequence
  Description of Artificial Sequence: Synthetic oligonucleotide
gguagcgccccaggcgcac

SEQ ID NO: 2173462 - RNA, 19 nt, Artificial Sequence
  Description of Artificial Sequence: Synthetic oligonucleotide
aggccgcagcccacuacca

SEQ ID NO: 2173463 - RNA, 19 nt, Artificial Sequence
  Description of Artificial Sequence: Synthetic oligonucleotide
ggagccucgccgcccgcuc

SEQ ID NO: 2173464 - RNA, 19 nt, Artificial Sequence
  Description of Artificial Sequence: Synthetic oligonucleotide
gcggcggcgccccuccggc

SEQ ID NO: 2173465 - RNA, 19 nt, Artificial Sequence
  Description of Artificial Sequence: Synthetic oligonucleotide
cuccggcccgcggauacga

SEQ ID NO: 2173466 - RNA, 19 nt, Artificial Sequence
  Description of Artificial Sequence: Synthetic oligonucleotide
gucccggugcgaggcucag

SEQ ID NO: 2173467 - RNA, 19 nt, Artificial Sequence
  Description of Artificial Sequence: Synthetic oligonucleotide
accgcgggcuccagagccu

SEQ ID NO: 2173468 - RNA, 19 nt, Artificial Sequence
  Description of Artificial Sequence: Synthetic oligonucleotide
gccgugagagccgcggcca

SEQ ID NO: 2173469 - RNA, 19 nt, Artificial Sequence
  Description of Artificial Sequence: Synthetic oligonucleotide
gcgccagacucagcucgcg

SEQ ID NO: 2173470 - RNA, 19 nt, Artificial Sequence
  Description of Artificial Sequence: Synthetic oligonucleotide
cgcuucgguucagugugcg

SEQ ID NO: 2173471 - RNA, 19 nt, Artificial Sequence
  Description of Artificial Sequence: Synthetic oligonucleotide
cgcgcggcggaagucacag

SEQ ID NO: 2173472 - RNA, 19 nt, Artificial Sequence
  Description of Artificial Sequence: Synthetic oligonucleotide
ccuccggcgggcagcucgc

SEQ ID NO: 2173473 - RNA, 19 nt, Artificial Sequence
  Description of Artificial Sequence: Synthetic oligonucleotide
ccucgagcugggcgcgagg

SEQ ID NO: 2173474 - RNA, 19 nt, Artificial Sequence
  Description of Artificial Sequence: Synthetic oligonucleotide
gcgcggacaccucgagcug

SEQ ID NO: 2173475 - RNA, 19 nt, Artificial Sequence
  Description of Artificial Sequence: Synthetic oligonucleotide
ccaccugauugagcaccgg

SEQ ID NO: 2173476 - RNA, 19 nt, Artificial Sequence
  Description of Artificial Sequence: Synthetic oligonucleotide
cccggccaccugauugagc

SEQ ID NO: 2173477 - RNA, 19 nt, Artificial Sequence
  Description of Artificial Sequence: Synthetic oligonucleotide
gccgcggccgugagagccg

SEQ ID NO: 2173478 - RNA, 19 nt, Artificial Sequence
  Description of Artificial Sequence: Synthetic oligonucleotide
cgagggucccggugcgagg

SEQ ID NO: 2173479 - RNA, 19 nt, Artificial Sequence
  Description of Artificial Sequence: Synthetic oligonucleotide
ccgcauccuuguugcucgg

SEQ ID NO: 2173480 - RNA, 19 nt, Artificial Sequence
  Description of Artificial Sequence: Synthetic oligonucleotide
caccggcaugagcgccacc

SEQ ID NO: 2173481 - RNA, 19 nt, Artificial Sequence
  Description of Artificial Sequence: Synthetic oligonucleotide
cguuucucagcucggccaa

SEQ ID NO: 2173482 - RNA, 19 nt, Artificial Sequence
  Description of Artificial Sequence: Synthetic oligonucleotide
ggccgcagcccacuaccaa

SEQ ID NO: 2173483 - RNA, 19 nt, Artificial Sequence
  Description of Artificial Sequence: Synthetic oligonucleotide
aggcgcaccgcgggcucca

SEQ ID NO: 2173484 - RNA, 19 nt, Artificial Sequence
  Description of Artificial Sequence: Synthetic oligonucleotide
gccgggccguuugggaaag

SEQ ID NO: 2173485 - RNA, 19 nt, Artificial Sequence
  Description of Artificial Sequence: Synthetic oligonucleotide
cgccagacucagcucgcgc

SEQ ID NO: 2173486 - RNA, 19 nt, Artificial Sequence
  Description of Artificial Sequence: Synthetic oligonucleotide
cccgcgucggccagggcga

SEQ ID NO: 2173487 - RNA, 19 nt, Artificial Sequence
  Description of Artificial Sequence: Synthetic oligonucleotide
caggcgcaccgcguccguc

SEQ ID NO: 2173488 - RNA, 19 nt, Artificial Sequence
  Description of Artificial Sequence: Synthetic oligonucleotide
ccgcguccguccaacucuc

SEQ ID NO: 2173489 - RNA, 19 nt, Artificial Sequence
  Description of Artificial Sequence: Synthetic oligonucleotide
guagaggcgcuggcagccu

SEQ ID NO: 2173490 - RNA, 19 nt, Artificial Sequence
  Description of Artificial Sequence: Synthetic oligonucleotide
ggcgcaccgcguccgucca

SEQ ID NO: 2173491 - RNA, 19 nt, Artificial Sequence
  Description of Artificial Sequence: Synthetic oligonucleotide
guccagcgcuucgguucag

SEQ ID NO: 2173492 - RNA, 19 nt, Artificial Sequence
  Description of Artificial Sequence: Synthetic oligonucleotide
cauccgcauccuuguugcu

SEQ ID NO: 2173493 - RNA, 19 nt, Artificial Sequence
  Description of Artificial Sequence: Synthetic oligonucleotide
ccgugagagccgcggccag

SEQ ID NO: 2173494 - RNA, 19 nt, Artificial Sequence
  Description of Artificial Sequence: Synthetic oligonucleotide
cgcauccuuguugcucggg

SEQ ID NO: 2173495 - RNA, 19 nt, Artificial Sequence
  Description of Artificial Sequence: Synthetic oligonucleotide
gcugcggagugcuccuccu

SEQ ID NO: 2173496 - RNA, 19 nt, Artificial Sequence
  Description of Artificial Sequence: Synthetic oligonucleotide
gcccgcggauacgacggug

SEQ ID NO: 2173497 - RNA, 19 nt, Artificial Sequence
  Description of Artificial Sequence: Synthetic oligonucleotide
gggcgcgaggguagcgccc

SEQ ID NO: 2173498 - RNA, 19 nt, Artificial Sequence
  Description of Artificial Sequence: Synthetic oligonucleotide
ggucccggugcgaggcuca

SEQ ID NO: 2173499 - RNA, 19 nt, Artificial Sequence
  Description of Artificial Sequence: Synthetic oligonucleotide
gggcgcgcggcggaaguca

SEQ ID NO: 2173500 - RNA, 19 nt, Artificial Sequence
  Description of Artificial Sequence: Synthetic oligonucleotide
cuuccccgcugcccagcaa

SEQ ID NO: 2173501 - RNA, 19 nt, Artificial Sequence
  Description of Artificial Sequence: Synthetic oligonucleotide
gcggccacggagggcggcc

SEQ ID NO: 2173502 - RNA, 19 nt, Artificial Sequence
  Description of Artificial Sequence: Synthetic oligonucleotide
ccgccuuccccgcugccca

SEQ ID NO: 2173503 - RNA, 19 nt, Artificial Sequence
  Description of Artificial Sequence: Synthetic oligonucleotide
gggucccggugcgaggcuc

SEQ ID NO: 2173504 - RNA, 19 nt, Artificial Sequence
  Description of Artificial Sequence: Synthetic oligonucleotide
gcgcuucgguucagugugc

SEQ ID NO: 2173505 - RNA, 19 nt, Artificial Sequence
  Description of Artificial Sequence: Synthetic oligonucleotide
ggccggagccucgccgccc

SEQ ID NO: 2173506 - RNA, 19 nt, Artificial Sequence
  Description of Artificial Sequence: Synthetic oligonucleotide
gugcgaggcucaggccgca

SEQ ID NO: 2173507 - RNA, 19 nt, Artificial Sequence
  Description of Artificial Sequence: Synthetic oligonucleotide
ccacggagggcggccggag

SEQ ID NO: 2173508 - RNA, 19 nt, Artificial Sequence
  Description of Artificial Sequence: Synthetic oligonucleotide
gcugccucccacucucguu

SEQ ID NO: 2173509 - RNA, 19 nt, Artificial Sequence
  Description of Artificial Sequence: Synthetic oligonucleotide
ggcgcgcggcggaagucac

SEQ ID NO: 2173510 - RNA, 19 nt, Artificial Sequence
  Description of Artificial Sequence: Synthetic oligonucleotide
cguccguccaacucucagu

SEQ ID NO: 2173511 - RNA, 19 nt, Artificial Sequence
  Description of Artificial Sequence: Synthetic oligonucleotide
ccuccggcccgcggauacg

SEQ ID NO: 2173512 - RNA, 19 nt, Artificial Sequence
  Description of Artificial Sequence: Synthetic oligonucleotide
gcuguccagcgcuucgguu

SEQ ID NO: 2173513 - RNA, 19 nt, Artificial Sequence
  Description of Artificial Sequence: Synthetic oligonucleotide
cgcaccgcguccguccaac

SEQ ID NO: 2173514 - RNA, 19 nt, Artificial Sequence
  Description of Artificial Sequence: Synthetic oligonucleotide
gcgcugccucccacucucg

SEQ ID NO: 2173515 - RNA, 19 nt, Artificial Sequence
  Description of Artificial Sequence: Synthetic oligonucleotide
ccguuccaacacagcuguc

SEQ ID NO: 2173516 - RNA, 19 nt, Artificial Sequence
  Description of Artificial Sequence: Synthetic oligonucleotide
ccacucccgcgucggccag

SEQ ID NO: 2173517 - RNA, 19 nt, Artificial Sequence
  Description of Artificial Sequence: Synthetic oligonucleotide
ggccgccuuccccgcugcc

SEQ ID NO: 2173518 - RNA, 19 nt, Artificial Sequence
  Description of Artificial Sequence: Synthetic oligonucleotide
cagcagucauccgcauccu

SEQ ID NO: 2173519 - RNA, 19 nt, Artificial Sequence
  Description of Artificial Sequence: Synthetic oligonucleotide
ggcggccacggagggcggc

SEQ ID NO: 2173520 - RNA, 19 nt, Artificial Sequence
  Description of Artificial Sequence: Synthetic oligonucleotide
gcgcagagccgccguccuc

SEQ ID NO: 2173521 - RNA, 19 nt, Artificial Sequence
  Description of Artificial Sequence: Synthetic oligonucleotide
ggguagcgccccaggcgca

SEQ ID NO: 2173522 - RNA, 19 nt, Artificial Sequence
  Description of Artificial Sequence: Synthetic oligonucleotide
cggccaccugauugagcac

SEQ ID NO: 2173523 - RNA, 19 nt, Artificial Sequence
  Description of Artificial Sequence: Synthetic oligonucleotide
gcgccccuccggcgggcag

SEQ ID NO: 2173524 - RNA, 19 nt, Artificial Sequence
  Description of Artificial Sequence: Synthetic oligonucleotide
gccacggagggcggccgga

SEQ ID NO: 2173525 - RNA, 19 nt, Artificial Sequence
  Description of Artificial Sequence: Synthetic oligonucleotide
ccgcagcccacuaccaaau

SEQ ID NO: 2173526 - RNA, 19 nt, Artificial Sequence
  Description of Artificial Sequence: Synthetic oligonucleotide
ccgcggccgugagagccgc

SEQ ID NO: 2173527 - RNA, 19 nt, Artificial Sequence
  Description of Artificial Sequence: Synthetic oligonucleotide
cggccagcgcagagccgcc

SEQ ID NO: 2173528 - RNA, 19 nt, Artificial Sequence
  Description of Artificial Sequence: Synthetic oligonucleotide
ccgcgggcuccagagccuc

SEQ ID NO: 2173529 - RNA, 19 nt, Artificial Sequence
  Description of Artificial Sequence: Synthetic oligonucleotide
cgggccguuugggaaagaa

SEQ ID NO: 2173530 - RNA, 19 nt, Artificial Sequence
  Description of Artificial Sequence: Synthetic oligonucleotide
cuccggcgggcagcucgca

SEQ ID NO: 2173531 - RNA, 19 nt, Artificial Sequence
  Description of Artificial Sequence: Synthetic oligonucleotide
gcgcaccgcgggcuccaga

SEQ ID NO: 2173532 - RNA, 19 nt, Artificial Sequence
  Description of Artificial Sequence: Synthetic oligonucleotide
cggacaccucgagcugggc

SEQ ID NO: 2173533 - RNA, 19 nt, Artificial Sequence
  Description of Artificial Sequence: Synthetic oligonucleotide
gcaccgcguccguccaacu

SEQ ID NO: 2173534 - RNA, 19 nt, Artificial Sequence
  Description of Artificial Sequence: Synthetic oligonucleotide
cgccccuccggcgggcagc

SEQ ID NO: 2173535 - RNA, 19 nt, Artificial Sequence
  Description of Artificial Sequence: Synthetic oligonucleotide
gcaacccggccaccugauu

SEQ ID NO: 2173536 - RNA, 19 nt, Artificial Sequence
  Description of Artificial Sequence: Synthetic oligonucleotide
cuccuccggcccgcggaua

SEQ ID NO: 2173537 - RNA, 19 nt, Artificial Sequence
  Description of Artificial Sequence: Synthetic oligonucleotide
ccggcugcggagugcuccu

SEQ ID NO: 2173538 - RNA, 19 nt, Artificial Sequence
  Description of Artificial Sequence: Synthetic oligonucleotide
cgcggccgugagagccgcg

SEQ ID NO: 2173539 - RNA, 19 nt, Artificial Sequence
  Description of Artificial Sequence: Synthetic oligonucleotide
ccgcggauacgacgguggu

SEQ ID NO: 2173540 - RNA, 19 nt, Artificial Sequence
  Description of Artificial Sequence: Synthetic oligonucleotide
ggcccgcggauacgacggu

SEQ ID NO: 2173541 - RNA, 19 nt, Artificial Sequence
  Description of Artificial Sequence: Synthetic oligonucleotide
gcgcgaggguagcgcccca

SEQ ID NO: 2173542 - RNA, 19 nt, Artificial Sequence
  Description of Artificial Sequence: Synthetic oligonucleotide
ccggcaugagcgccaccgu

SEQ ID NO: 2173543 - RNA, 19 nt, Artificial Sequence
  Description of Artificial Sequence: Synthetic oligonucleotide
gcgcgcggcggaagucaca

SEQ ID NO: 2173544 - RNA, 19 nt, Artificial Sequence
  Description of Artificial Sequence: Synthetic oligonucleotide
ggcgccccuccggcgggca

SEQ ID NO: 2173545 - RNA, 19 nt, Artificial Sequence
  Description of Artificial Sequence: Synthetic oligonucleotide
gggcgagcgccgcggccgu

SEQ ID NO: 2173546 - RNA, 19 nt, Artificial Sequence
  Description of Artificial Sequence: Synthetic oligonucleotide
gcgcaccgcguccguccaa

SEQ ID NO: 2173547 - RNA, 19 nt, Artificial Sequence
  Description of Artificial Sequence: Synthetic oligonucleotide
gcgccaccgugaggccggc

SEQ ID NO: 2173548 - RNA, 19 nt, Artificial Sequence
  Description of Artificial Sequence: Synthetic oligonucleotide
ccgcgucggccagggcgag

SEQ ID NO: 2173549 - RNA, 19 nt, Artificial Sequence
  Description of Artificial Sequence: Synthetic oligonucleotide
cgcgucggccagggcgagc

SEQ ID NO: 2173550 - RNA, 19 nt, Artificial Sequence
  Description of Artificial Sequence: Synthetic oligonucleotide
cgaccagcagccgggccgu

SEQ ID NO: 2173551 - RNA, 19 nt, Artificial Sequence
  Description of Artificial Sequence: Synthetic oligonucleotide
gaccagcagccgggccguu

SEQ ID NO: 2173552 - RNA, 19 nt, Artificial Sequence
  Description of Artificial Sequence: Synthetic oligonucleotide
ccgggccguuugggaaaga

SEQ ID NO: 2173553 - RNA, 19 nt, Artificial Sequence
  Description of Artificial Sequence: Synthetic oligonucleotide
cggcgccccuccggcgggc

SEQ ID NO: 2173554 - RNA, 19 nt, Artificial Sequence
  Description of Artificial Sequence: Synthetic oligonucleotide
ccccuccggcgggcagcuc

SEQ ID NO: 2173555 - RNA, 19 nt, Artificial Sequence
  Description of Artificial Sequence: Synthetic oligonucleotide
cgccaccgugaggccggcu

SEQ ID NO: 2173556 - RNA, 19 nt, Artificial Sequence
  Description of Artificial Sequence: Synthetic oligonucleotide
uuugauacaaauaaugaca

SEQ ID NO: 2173557 - RNA, 19 nt, Artificial Sequence
  Description of Artificial Sequence: Synthetic oligonucleotide
aguaaaaccagacccaacc

SEQ ID NO: 2173558 - RNA, 19 nt, Artificial Sequence
  Description of Artificial Sequence: Synthetic oligonucleotide
acaaagaaggucuucauac

SEQ ID NO: 2173559 - RNA, 19 nt, Artificial Sequence
  Description of Artificial Sequence: Synthetic oligonucleotide
aaaaguucuggauaacagg

SEQ ID NO: 2173560 - RNA, 19 nt, Artificial Sequence
  Description of Artificial Sequence: Synthetic oligonucleotide
uggaaguaaaaccagaccc

SEQ ID NO: 2173561 - RNA, 19 nt, Artificial Sequence
  Description of Artificial Sequence: Synthetic oligonucleotide
uggagaguaacuuagcagg

SEQ ID NO: 2173562 - RNA, 19 nt, Artificial Sequence
  Description of Artificial Sequence: Synthetic oligonucleotide
uugauacaaauaaugacag

SEQ ID NO: 2173563 - RNA, 19 nt, Artificial Sequence
  Description of Artificial Sequence: Synthetic oligonucleotide
uguggguuggugaugaugg

SEQ ID NO: 2173564 - RNA, 19 nt, Artificial Sequence
  Description of Artificial Sequence: Synthetic oligonucleotide
aaaguucuggauaacaggg

SEQ ID NO: 2173565 - RNA, 19 nt, Artificial Sequence
  Description of Artificial Sequence: Synthetic oligonucleotide
uccaguuuugcaaaagccg

SEQ ID NO: 2173566 - RNA, 19 nt, Artificial Sequence
  Description of Artificial Sequence: Synthetic oligonucleotide
uuuguggagaguaacuuag

SEQ ID NO: 2173567 - RNA, 19 nt, Artificial Sequence
  Description of Artificial Sequence: Synthetic oligonucleotide
cauucauggaaguaaaacc

SEQ ID NO: 2173568 - RNA, 19 nt, Artificial Sequence
  Description of Artificial Sequence: Synthetic oligonucleotide
uuuugauacaaauaaugac

SEQ ID NO: 2173569 - RNA, 19 nt, Artificial Sequence
  Description of Artificial Sequence: Synthetic oligonucleotide
agauucagauuucaaugcc

SEQ ID NO: 2173570 - RNA, 19 nt, Artificial Sequence
  Description of Artificial Sequence: Synthetic oligonucleotide
uuagcuucugaguuguagg

SEQ ID NO: 2173571 - RNA, 19 nt, Artificial Sequence
  Description of Artificial Sequence: Synthetic oligonucleotide
auggaaguaaaaccagacc

SEQ ID NO: 2173572 - RNA, 19 nt, Artificial Sequence
  Description of Artificial Sequence: Synthetic oligonucleotide
gauggugaugcugacaugg

SEQ ID NO: 2173573 - RNA, 19 nt, Artificial Sequence
  Description of Artificial Sequence: Synthetic oligonucleotide
ugcuagauuaggaaguacc

SEQ ID NO: 2173574 - RNA, 19 nt, Artificial Sequence
  Description of Artificial Sequence: Synthetic oligonucleotide
ucggauaauguucaggaga

SEQ ID NO: 2173575 - RNA, 19 nt, Artificial Sequence
  Description of Artificial Sequence: Synthetic oligonucleotide
cagguuacuucauucaugg

SEQ ID NO: 2173576 - RNA, 19 nt, Artificial Sequence
  Description of Artificial Sequence: Synthetic oligonucleotide
ucucggauaauguucagga

SEQ ID NO: 2173577 - RNA, 19 nt, Artificial Sequence
  Description of Artificial Sequence: Synthetic oligonucleotide
gaaaaguucuggauaacag

SEQ ID NO: 2173578 - RNA, 19 nt, Artificial Sequence
  Description of Artificial Sequence: Synthetic oligonucleotide
uucauggaaguaaaaccag

SEQ ID NO: 2173579 - RNA, 19 nt, Artificial Sequence
  Description of Artificial Sequence: Synthetic oligonucleotide
agucuugugcaguugacag

SEQ ID NO: 2173580 - RNA, 19 nt, Artificial Sequence
  Description of Artificial Sequence: Synthetic oligonucleotide
agaaggucuucauacuugg

SEQ ID NO: 2173581 - RNA, 19 nt, Artificial Sequence
  Description of Artificial Sequence: Synthetic oligonucleotide
uagauugucuggcugaagu

SEQ ID NO: 2173582 - RNA, 19 nt, Artificial Sequence
  Description of Artificial Sequence: Synthetic oligonucleotide
uuuugaagccuuuucaaau

SEQ ID NO: 2173583 - RNA, 19 nt, Artificial Sequence
  Description of Artificial Sequence: Synthetic oligonucleotide
uccagucucauucuagcag

SEQ ID NO: 2173584 - RNA, 19 nt, Artificial Sequence
  Description of Artificial Sequence: Synthetic oligonucleotide
aacugcuacaaagaagguc

SEQ ID NO: 2173585 - RNA, 19 nt, Artificial Sequence
  Description of Artificial Sequence: Synthetic oligonucleotide
gaagguuucauaggaaaag

SEQ ID NO: 2173586 - RNA, 19 nt, Artificial Sequence
  Description of Artificial Sequence: Synthetic oligonucleotide
aagucucagaaacccuccc

SEQ ID NO: 2173587 - RNA, 19 nt, Artificial Sequence
  Description of Artificial Sequence: Synthetic oligonucleotide
ucugagcaagccuuugugg

SEQ ID NO: 2173588 - RNA, 19 nt, Artificial Sequence
  Description of Artificial Sequence: Synthetic oligonucleotide
cagauucagauuucaaugc

SEQ ID NO: 2173589 - RNA, 19 nt, Artificial Sequence
  Description of Artificial Sequence: Synthetic oligonucleotide
aguacucuggcuguccucc

SEQ ID NO: 2173590 - RNA, 19 nt, Artificial Sequence
  Description of Artificial Sequence: Synthetic oligonucleotide
aaagaaggucuucauacuu

SEQ ID NO: 2173591 - RNA, 19 nt, Artificial Sequence
  Description of Artificial Sequence: Synthetic oligonucleotide
ucugcuuauugucaugcga

SEQ ID NO: 2173592 - RNA, 19 nt, Artificial Sequence
  Description of Artificial Sequence: Synthetic oligonucleotide
gauagugcaguguagccuc

SEQ ID NO: 2173593 - RNA, 19 nt, Artificial Sequence
  Description of Artificial Sequence: Synthetic oligonucleotide
caugcccuaggacagauag

SEQ ID NO: 2173594 - RNA, 19 nt, Artificial Sequence
  Description of Artificial Sequence: Synthetic oligonucleotide
ugaguuguaggguccuugg

SEQ ID NO: 2173595 - RNA, 19 nt, Artificial Sequence
  Description of Artificial Sequence: Synthetic oligonucleotide
auucauggaaguaaaacca

SEQ ID NO: 2173596 - RNA, 19 nt, Artificial Sequence
  Description of Artificial Sequence: Synthetic oligonucleotide
aguucuggauaacagggug

SEQ ID NO: 2173597 - RNA, 19 nt, Artificial Sequence
  Description of Artificial Sequence: Synthetic oligonucleotide
aagcgcaacaucuucugcu

SEQ ID NO: 2173598 - RNA, 19 nt, Artificial Sequence
  Description of Artificial Sequence: Synthetic oligonucleotide
aggagaucaguucuuagcu

SEQ ID NO: 2173599 - RNA, 19 nt, Artificial Sequence
  Description of Artificial Sequence: Synthetic oligonucleotide
ucuggcugaagucucagaa

SEQ ID NO: 2173600 - RNA, 19 nt, Artificial Sequence
  Description of Artificial Sequence: Synthetic oligonucleotide
ugaagucucagaaacccuc

SEQ ID NO: 2173601 - RNA, 19 nt, Artificial Sequence
  Description of Artificial Sequence: Synthetic oligonucleotide
aguucuuagcuucugaguu

SEQ ID NO: 2173602 - RNA, 19 nt, Artificial Sequence
  Description of Artificial Sequence: Synthetic oligonucleotide
uucucaugcccuaggacag

SEQ ID NO: 2173603 - RNA, 19 nt, Artificial Sequence
  Description of Artificial Sequence: Synthetic oligonucleotide
ugaaggcucucucaguggc

SEQ ID NO: 2173604 - RNA, 19 nt, Artificial Sequence
  Description of Artificial Sequence: Synthetic oligonucleotide
uucucucggauaauguuca

SEQ ID NO: 2173605 - RNA, 19 nt, Artificial Sequence
  Description of Artificial Sequence: Synthetic oligonucleotide
ucauaggaaaaguucugga

SEQ ID NO: 2173606 - RNA, 19 nt, Artificial Sequence
  Description of Artificial Sequence: Synthetic oligonucleotide
agggacugcuacuugucgc

SEQ ID NO: 2173607 - RNA, 19 nt, Artificial Sequence
  Description of Artificial Sequence: Synthetic oligonucleotide
uuuugcaaaagccgccucu

SEQ ID NO: 2173608 - RNA, 19 nt, Artificial Sequence
  Description of Artificial Sequence: Synthetic oligonucleotide
uaacuuagcagguuacuuc

SEQ ID NO: 2173609 - RNA, 19 nt, Artificial Sequence
  Description of Artificial Sequence: Synthetic oligonucleotide
acuugucgcucccugcucc

SEQ ID NO: 2173610 - RNA, 19 nt, Artificial Sequence
  Description of Artificial Sequence: Synthetic oligonucleotide
auccaaguggcucucuagg

SEQ ID NO: 2173611 - RNA, 19 nt, Artificial Sequence
  Description of Artificial Sequence: Synthetic oligonucleotide
gagaucaguucuuagcuuc

SEQ ID NO: 2173612 - RNA, 19 nt, Artificial Sequence
  Description of Artificial Sequence: Synthetic oligonucleotide
ugcccuaggacagauagug

SEQ ID NO: 2173613 - RNA, 19 nt, Artificial Sequence
  Description of Artificial Sequence: Synthetic oligonucleotide
uccaauggugguuggagug

SEQ ID NO: 2173614 - RNA, 19 nt, Artificial Sequence
  Description of Artificial Sequence: Synthetic oligonucleotide
aguaccagaucuuucuggu

SEQ ID NO: 2173615 - RNA, 19 nt, Artificial Sequence
  Description of Artificial Sequence: Synthetic oligonucleotide
acuuagauugucuggcuga

SEQ ID NO: 2173616 - RNA, 19 nt, Artificial Sequence
  Description of Artificial Sequence: Synthetic oligonucleotide
uccgugucauccaaguggc

SEQ ID NO: 2173617 - RNA, 19 nt, Artificial Sequence
  Description of Artificial Sequence: Synthetic oligonucleotide
caggagaucaguucuuagc

SEQ ID NO: 2173618 - RNA, 19 nt, Artificial Sequence
  Description of Artificial Sequence: Synthetic oligonucleotide
ugguugagagcucugggcu

SEQ ID NO: 2173619 - RNA, 19 nt, Artificial Sequence
  Description of Artificial Sequence: Synthetic oligonucleotide
cugcuuauugucaugcgac

SEQ ID NO: 2173620 - RNA, 19 nt, Artificial Sequence
  Description of Artificial Sequence: Synthetic oligonucleotide
agauugucuggcugaaguc

SEQ ID NO: 2173621 - RNA, 19 nt, Artificial Sequence
  Description of Artificial Sequence: Synthetic oligonucleotide
uugguugagagcucugggc

SEQ ID NO: 2173622 - RNA, 19 nt, Artificial Sequence
  Description of Artificial Sequence: Synthetic oligonucleotide
ugucaugcgacuguucuug

SEQ ID NO: 2173623 - RNA, 19 nt, Artificial Sequence
  Description of Artificial Sequence: Synthetic oligonucleotide
acugcuacuugucgcuccc

SEQ ID NO: 2173624 - RNA, 19 nt, Artificial Sequence
  Description of Artificial Sequence: Synthetic oligonucleotide
aaccagacccaaccaggac

SEQ ID NO: 2173625 - RNA, 19 nt, Artificial Sequence
  Description of Artificial Sequence: Synthetic oligonucleotide
gauaacagggugugccaag

SEQ ID NO: 2173626 - RNA, 19 nt, Artificial Sequence
  Description of Artificial Sequence: Synthetic oligonucleotide
aagaaggucuucauacuug

SEQ ID NO: 2173627 - RNA, 19 nt, Artificial Sequence
  Description of Artificial Sequence: Synthetic oligonucleotide
aguguagccuccaaugagg

SEQ ID NO: 2173628 - RNA, 19 nt, Artificial Sequence
  Description of Artificial Sequence: Synthetic oligonucleotide
caugcgacuguucuugggc

SEQ ID NO: 2173629 - RNA, 19 nt, Artificial Sequence
  Description of Artificial Sequence: Synthetic oligonucleotide
cuggauaacagggugugcc

SEQ ID NO: 2173630 - RNA, 19 nt, Artificial Sequence
  Description of Artificial Sequence: Synthetic oligonucleotide
ucucauucuagcagucuga

SEQ ID NO: 2173631 - RNA, 19 nt, Artificial Sequence
  Description of Artificial Sequence: Synthetic oligonucleotide
ugauggggaugcuagauua

SEQ ID NO: 2173632 - RNA, 19 nt, Artificial Sequence
  Description of Artificial Sequence: Synthetic oligonucleotide
guugguugagagcucuggg

SEQ ID NO: 2173633 - RNA, 19 nt, Artificial Sequence
  Description of Artificial Sequence: Synthetic oligonucleotide
gaggcacuuagauugucug

SEQ ID NO: 2173634 - RNA, 19 nt, Artificial Sequence
  Description of Artificial Sequence: Synthetic oligonucleotide
uuuucucucggauaauguu

SEQ ID NO: 2173635 - RNA, 19 nt, Artificial Sequence
  Description of Artificial Sequence: Synthetic oligonucleotide
auggugguuggaguguucc

SEQ ID NO: 2173636 - RNA, 19 nt, Artificial Sequence
  Description of Artificial Sequence: Synthetic oligonucleotide
aaacccucccuccuucuca

SEQ ID NO: 2173637 - RNA, 19 nt, Artificial Sequence
  Description of Artificial Sequence: Synthetic oligonucleotide
cuuagcuucugaguuguag

SEQ ID NO: 2173638 - RNA, 19 nt, Artificial Sequence
  Description of Artificial Sequence: Synthetic oligonucleotide
agaguaacuuagcagguua

SEQ ID NO: 2173639 - RNA, 19 nt, Artificial Sequence
  Description of Artificial Sequence: Synthetic oligonucleotide
acuugggauucuucucccc

SEQ ID NO: 2173640 - RNA, 19 nt, Artificial Sequence
  Description of Artificial Sequence: Synthetic oligonucleotide
aacagggugugccaaguuu

SEQ ID NO: 2173641 - RNA, 19 nt, Artificial Sequence
  Description of Artificial Sequence: Synthetic oligonucleotide
gguuacuucauucauggaa

SEQ ID NO: 2173642 - RNA, 19 nt, Artificial Sequence
  Description of Artificial Sequence: Synthetic oligonucleotide
uaauguucaggagaucagu

SEQ ID NO: 2173643 - RNA, 19 nt, Artificial Sequence
  Description of Artificial Sequence: Synthetic oligonucleotide
uccuccuccaaaaccaauc

SEQ ID NO: 2173644 - RNA, 19 nt, Artificial Sequence
  Description of Artificial Sequence: Synthetic oligonucleotide
ugaggcacuuagauugucu

SEQ ID NO: 2173645 - RNA, 19 nt, Artificial Sequence
  Description of Artificial Sequence: Synthetic oligonucleotide
cauacuugggauucuucuc

SEQ ID NO: 2173646 - RNA, 19 nt, Artificial Sequence
  Description of Artificial Sequence: Synthetic oligonucleotide
aggcacuuagauugucugg

SEQ ID NO: 2173647 - RNA, 19 nt, Artificial Sequence
  Description of Artificial Sequence: Synthetic oligonucleotide
uuucaucuuuccugggucu

SEQ ID NO: 2173648 - RNA, 19 nt, Artificial Sequence
  Description of Artificial Sequence: Synthetic oligonucleotide
cagauagugcaguguagcc

SEQ ID NO: 2173649 - RNA, 19 nt, Artificial Sequence
  Description of Artificial Sequence: Synthetic oligonucleotide
guccugauuccaauggugg

SEQ ID NO: 2173650 - RNA, 19 nt, Artificial Sequence
  Description of Artificial Sequence: Synthetic oligonucleotide
ucuagcagucugagcaagc

SEQ ID NO: 2173651 - RNA, 19 nt, Artificial Sequence
  Description of Artificial Sequence: Synthetic oligonucleotide
cuugggaacuggcagggac

SEQ ID NO: 2173652 - RNA, 19 nt, Artificial Sequence
  Description of Artificial Sequence: Synthetic oligonucleotide
aggucuucauacuugggau

SEQ ID NO: 2173653 - RNA, 19 nt, Artificial Sequence
  Description of Artificial Sequence: Synthetic oligonucleotide
ugaggcuugggaacuggca

SEQ ID NO: 2173654 - RNA, 19 nt, Artificial Sequence
  Description of Artificial Sequence: Synthetic oligonucleotide
ucaugcgacuguucuuggg

SEQ ID NO: 2173655 - RNA, 19 nt, Artificial Sequence
  Description of Artificial Sequence: Synthetic oligonucleotide
caguuuugcaaaagccgcc

SEQ ID NO: 2173656 - RNA, 19 nt, Artificial Sequence
  Description of Artificial Sequence: Synthetic oligonucleotide
uggggaugcuagauuagga

SEQ ID NO: 2173657 - RNA, 19 nt, Artificial Sequence
  Description of Artificial Sequence: Synthetic oligonucleotide
caaaagccgccucugaguc

SEQ ID NO: 2173658 - RNA, 19 nt, Artificial Sequence
  Description of Artificial Sequence: Synthetic oligonucleotide
aguugacagagcuuugaaa

SEQ ID NO: 2173659 - RNA, 19 nt, Artificial Sequence
  Description of Artificial Sequence: Synthetic oligonucleotide
uaggaagcgcaacaucuuc

SEQ ID NO: 2173660 - RNA, 19 nt, Artificial Sequence
  Description of Artificial Sequence: Synthetic oligonucleotide
uuuucuuccuucgcuguac

SEQ ID NO: 2173661 - RNA, 19 nt, Artificial Sequence
  Description of Artificial Sequence: Synthetic oligonucleotide
gaagucucagaaacccucc

SEQ ID NO: 2173662 - RNA, 19 nt, Artificial Sequence
  Description of Artificial Sequence: Synthetic oligonucleotide
aggcuugggaacuggcagg

SEQ ID NO: 2173663 - RNA, 19 nt, Artificial Sequence
  Description of Artificial Sequence: Synthetic oligonucleotide
uggauaacagggugugcca

SEQ ID NO: 2173664 - RNA, 19 nt, Artificial Sequence
  Description of Artificial Sequence: Synthetic oligonucleotide
agcgcaacaucuucugcug

SEQ ID NO: 2173665 - RNA, 19 nt, Artificial Sequence
  Description of Artificial Sequence: Synthetic oligonucleotide
uucauucauggaaguaaaa

SEQ ID NO: 2173666 - RNA, 19 nt, Artificial Sequence
  Description of Artificial Sequence: Synthetic oligonucleotide
ugcuuauugucaugcgacu

SEQ ID NO: 2173667 - RNA, 19 nt, Artificial Sequence
  Description of Artificial Sequence: Synthetic oligonucleotide
ucugcuggaagguuucaua

SEQ ID NO: 2173668 - RNA, 19 nt, Artificial Sequence
  Description of Artificial Sequence: Synthetic oligonucleotide
auggggaugcuagauuagg

SEQ ID NO: 2173669 - RNA, 19 nt, Artificial Sequence
  Description of Artificial Sequence: Synthetic oligonucleotide
caguguagccuccaaugag

SEQ ID NO: 2173670 - RNA, 19 nt, Artificial Sequence
  Description of Artificial Sequence: Synthetic oligonucleotide
cucaguggcuuuuccacug

SEQ ID NO: 2173671 - RNA, 19 nt, Artificial Sequence
  Description of Artificial Sequence: Synthetic oligonucleotide
gugguuggaguguuccggg

SEQ ID NO: 2173672 - RNA, 19 nt, Artificial Sequence
  Description of Artificial Sequence: Synthetic oligonucleotide
ucgcuguacuugaagcagc

SEQ ID NO: 2173673 - RNA, 19 nt, Artificial Sequence
  Description of Artificial Sequence: Synthetic oligonucleotide
gaagcgcaacaucuucugc

SEQ ID NO: 2173674 - RNA, 19 nt, Artificial Sequence
  Description of Artificial Sequence: Synthetic oligonucleotide
cuagcagucugagcaagcc

SEQ ID NO: 2173675 - RNA, 19 nt, Artificial Sequence
  Description of Artificial Sequence: Synthetic oligonucleotide
ucaguacucuggcuguccu

SEQ ID NO: 2173676 - RNA, 19 nt, Artificial Sequence
  Description of Artificial Sequence: Synthetic oligonucleotide
cauccaaguggcucucuag

SEQ ID NO: 2173677 - RNA, 19 nt, Artificial Sequence
  Description of Artificial Sequence: Synthetic oligonucleotide
cuguccuccuccaaaacca

SEQ ID NO: 2173678 - RNA, 19 nt, Artificial Sequence
  Description of Artificial Sequence: Synthetic oligonucleotide
ugagucuugugcaguugac

SEQ ID NO: 2173679 - RNA, 19 nt, Artificial Sequence
  Description of Artificial Sequence: Synthetic oligonucleotide
gacagauagugcaguguag

SEQ ID NO: 2173680 - RNA, 19 nt, Artificial Sequence
  Description of Artificial Sequence: Synthetic oligonucleotide
cucggauaauguucaggag

SEQ ID NO: 2173681 - RNA, 19 nt, Artificial Sequence
  Description of Artificial Sequence: Synthetic oligonucleotide
gaaguaaaaccagacccaa

SEQ ID NO: 2173682 - RNA, 19 nt, Artificial Sequence
  Description of Artificial Sequence: Synthetic oligonucleotide
agcagguuacuucauucau

SEQ ID NO: 2173683 - RNA, 19 nt, Artificial Sequence
  Description of Artificial Sequence: Synthetic oligonucleotide
aaaccagacccaaccagga

SEQ ID NO: 2173684 - RNA, 19 nt, Artificial Sequence
  Description of Artificial Sequence: Synthetic oligonucleotide
agucucagaaacccucccu

SEQ ID NO: 2173685 - RNA, 19 nt, Artificial Sequence
  Description of Artificial Sequence: Synthetic oligonucleotide
uuccaauggugguuggagu

SEQ ID NO: 2173686 - RNA, 19 nt, Artificial Sequence
  Description of Artificial Sequence: Synthetic oligonucleotide
cugauuccaauggugguug

SEQ ID NO: 2173687 - RNA, 19 nt, Artificial Sequence
  Description of Artificial Sequence: Synthetic oligonucleotide
cucucggauaauguucagg

SEQ ID NO: 2173688 - RNA, 19 nt, Artificial Sequence
  Description of Artificial Sequence: Synthetic oligonucleotide
aguaacuuagcagguuacu

SEQ ID NO: 2173689 - RNA, 19 nt, Artificial Sequence
  Description of Artificial Sequence: Synthetic oligonucleotide
cacuuagauugucuggcug

SEQ ID NO: 2173690 - RNA, 19 nt, Artificial Sequence
  Description of Artificial Sequence: Synthetic oligonucleotide
uccugauuccaaugguggu

SEQ ID NO: 2173691 - RNA, 19 nt, Artificial Sequence
  Description of Artificial Sequence: Synthetic oligonucleotide
gucucagaaacccucccuc

SEQ ID NO: 2173692 - RNA, 19 nt, Artificial Sequence
  Description of Artificial Sequence: Synthetic oligonucleotide
ugcugacauggccuccggg

SEQ ID NO: 2173693 - RNA, 19 nt, Artificial Sequence
  Description of Artificial Sequence: Synthetic oligonucleotide
uuguggguuggugaugaug

SEQ ID NO: 2173694 - RNA, 19 nt, Artificial Sequence
  Description of Artificial Sequence: Synthetic oligonucleotide
ggcacuuagauugucuggc

SEQ ID NO: 2173695 - RNA, 19 nt, Artificial Sequence
  Description of Artificial Sequence: Synthetic oligonucleotide
cagagcuuugaaagcugcc

SEQ ID NO: 2173696 - RNA, 19 nt, Artificial Sequence
  Description of Artificial Sequence: Synthetic oligonucleotide
aaagccgccucugagucuu

SEQ ID NO: 2173697 - RNA, 19 nt, Artificial Sequence
  Description of Artificial Sequence: Synthetic oligonucleotide
aggaaaaguucuggauaac

SEQ ID NO: 2173698 - RNA, 19 nt, Artificial Sequence
  Description of Artificial Sequence: Synthetic oligonucleotide
uagcagucugagcaagccu

SEQ ID NO: 2173699 - RNA, 19 nt, Artificial Sequence
  Description of Artificial Sequence: Synthetic oligonucleotide
agucugagcaagccuuugu

SEQ ID NO: 2173700 - RNA, 19 nt, Artificial Sequence
  Description of Artificial Sequence: Synthetic oligonucleotide
uuagauugucuggcugaag

SEQ ID NO: 2173701 - RNA, 19 nt, Artificial Sequence
  Description of Artificial Sequence: Synthetic oligonucleotide
cucccucacccucagcagg

SEQ ID NO: 2173702 - RNA, 19 nt, Artificial Sequence
  Description of Artificial Sequence: Synthetic oligonucleotide
gaguaacuuagcagguuac

SEQ ID NO: 2173703 - RNA, 19 nt, Artificial Sequence
  Description of Artificial Sequence: Synthetic oligonucleotide
cuucgcuguacuugaagca

SEQ ID NO: 2173704 - RNA, 19 nt, Artificial Sequence
  Description of Artificial Sequence: Synthetic oligonucleotide
aauggugguuggaguguuc

SEQ ID NO: 2173705 - RNA, 19 nt, Artificial Sequence
  Description of Artificial Sequence: Synthetic oligonucleotide
augcuagauuaggaaguac

SEQ ID NO: 2173706 - RNA, 19 nt, Artificial Sequence
  Description of Artificial Sequence: Synthetic oligonucleotide
ucagaaacccucccuccuu

SEQ ID NO: 2173707 - RNA, 19 nt, Artificial Sequence
  Description of Artificial Sequence: Synthetic oligonucleotide
ugcaguugacagagcuuug

SEQ ID NO: 2173708 - RNA, 19 nt, Artificial Sequence
  Description of Artificial Sequence: Synthetic oligonucleotide
gauugucuggcugaagucu

SEQ ID NO: 2173709 - RNA, 19 nt, Artificial Sequence
  Description of Artificial Sequence: Synthetic oligonucleotide
uguuccggggcugucuuga

SEQ ID NO: 2173710 - RNA, 19 nt, Artificial Sequence
  Description of Artificial Sequence: Synthetic oligonucleotide
gagcugaguuuucauuuuc

SEQ ID NO: 2173711 - RNA, 19 nt, Artificial Sequence
  Description of Artificial Sequence: Synthetic oligonucleotide
ugcgacuguucuugggcug

SEQ ID NO: 2173712 - RNA, 19 nt, Artificial Sequence
  Description of Artificial Sequence: Synthetic oligonucleotide
uugaagcagcagauucaga

SEQ ID NO: 2173713 - RNA, 19 nt, Artificial Sequence
  Description of Artificial Sequence: Synthetic oligonucleotide
gauucagauuucaaugccu

SEQ ID NO: 2173714 - RNA, 19 nt, Artificial Sequence
  Description of Artificial Sequence: Synthetic oligonucleotide
ucccucacccucagcagga

SEQ ID NO: 2173715 - RNA, 19 nt, Artificial Sequence
  Description of Artificial Sequence: Synthetic oligonucleotide
ggaagcgcaacaucuucug

SEQ ID NO: 2173716 - RNA, 19 nt, Artificial Sequence
  Description of Artificial Sequence: Synthetic oligonucleotide
auaacagggugugccaagu

SEQ ID NO: 2173717 - RNA, 19 nt, Artificial Sequence
  Description of Artificial Sequence: Synthetic oligonucleotide
ggaaguaaaaccagaccca

SEQ ID NO: 2173718 - RNA, 19 nt, Artificial Sequence
  Description of Artificial Sequence: Synthetic oligonucleotide
uguagccuccaaugaggcu

SEQ ID NO: 2173719 - RNA, 19 nt, Artificial Sequence
  Description of Artificial Sequence: Synthetic oligonucleotide
cauaggaaaaguucuggau

SEQ ID NO: 2173720 - RNA, 19 nt, Artificial Sequence
  Description of Artificial Sequence: Synthetic oligonucleotide
uuguaggguccuuggacau

SEQ ID NO: 2173721 - RNA, 19 nt, Artificial Sequence
  Description of Artificial Sequence: Synthetic oligonucleotide
auucagauuucaaugccuu

SEQ ID NO: 2173722 - RNA, 19 nt, Artificial Sequence
  Description of Artificial Sequence: Synthetic oligonucleotide
gcuacaaagaaggucuuca

SEQ ID NO: 2173723 - RNA, 19 nt, Artificial Sequence
  Description of Artificial Sequence: Synthetic oligonucleotide
cuuuguggagaguaacuua

SEQ ID NO: 2173724 - RNA, 19 nt, Artificial Sequence
  Description of Artificial Sequence: Synthetic oligonucleotide
ugggaacuggcagggacug

SEQ ID NO: 2173725 - RNA, 19 nt, Artificial Sequence
  Description of Artificial Sequence: Synthetic oligonucleotide
gguugguugagagcucugg

SEQ ID NO: 2173726 - RNA, 19 nt, Artificial Sequence
  Description of Artificial Sequence: Synthetic oligonucleotide
gucaugcgacuguucuugg

SEQ ID NO: 2173727 - RNA, 19 nt, Artificial Sequence
  Description of Artificial Sequence: Synthetic oligonucleotide
ugcaguucugagccucccu

SEQ ID NO: 2173728 - RNA, 19 nt, Artificial Sequence
  Description of Artificial Sequence: Synthetic oligonucleotide
cucuaggaagcgcaacauc

SEQ ID NO: 2173729 - RNA, 19 nt, Artificial Sequence
  Description of Artificial Sequence: Synthetic oligonucleotide
guagggcuccgugucaucc

SEQ ID NO: 2173730 - RNA, 19 nt, Artificial Sequence
  Description of Artificial Sequence: Synthetic oligonucleotide
ucucucggauaauguucag

SEQ ID NO: 2173731 - RNA, 19 nt, Artificial Sequence
  Description of Artificial Sequence: Synthetic oligonucleotide
ucucuaggaagcgcaacau

SEQ ID NO: 2173732 - RNA, 19 nt, Artificial Sequence
  Description of Artificial Sequence: Synthetic oligonucleotide
ugucuggcugaagucucag

SEQ ID NO: 2173733 - RNA, 19 nt, Artificial Sequence
  Description of Artificial Sequence: Synthetic oligonucleotide
aaacugcuacaaagaaggu

SEQ ID NO: 2173734 - RNA, 19 nt, Artificial Sequence
  Description of Artificial Sequence: Synthetic oligonucleotide
aacccucccuccuucucau

SEQ ID NO: 2173735 - RNA, 19 nt, Artificial Sequence
  Description of Artificial Sequence: Synthetic oligonucleotide
cuuggauggugaugcugac

SEQ ID NO: 2173736 - RNA, 19 nt, Artificial Sequence
  Description of Artificial Sequence: Synthetic oligonucleotide
cuccaaugaggcuugggaa

SEQ ID NO: 2173737 - RNA, 19 nt, Artificial Sequence
  Description of Artificial Sequence: Synthetic oligonucleotide
ugggacuggcugcuuuucu

SEQ ID NO: 2173738 - RNA, 19 nt, Artificial Sequence
  Description of Artificial Sequence: Synthetic oligonucleotide
aggacagauagugcagugu

SEQ ID NO: 2173739 - RNA, 19 nt, Artificial Sequence
  Description of Artificial Sequence: Synthetic oligonucleotide
gguuggaguguuccggggc

SEQ ID NO: 2173740 - RNA, 19 nt, Artificial Sequence
  Description of Artificial Sequence: Synthetic oligonucleotide
cugaguuguaggguccuug

SEQ ID NO: 2173741 - RNA, 19 nt, Artificial Sequence
  Description of Artificial Sequence: Synthetic oligonucleotide
uguaggguccuuggacaug

SEQ ID NO: 2173742 - RNA, 19 nt, Artificial Sequence
  Description of Artificial Sequence: Synthetic oligonucleotide
uucaggagaucaguucuua

SEQ ID NO: 2173743 - RNA, 19 nt, Artificial Sequence
  Description of Artificial Sequence: Synthetic oligonucleotide
guguagccuccaaugaggc

SEQ ID NO: 2173744 - RNA, 19 nt, Artificial Sequence
  Description of Artificial Sequence: Synthetic oligonucleotide
agcagucugagcaagccuu

SEQ ID NO: 2173745 - RNA, 19 nt, Artificial Sequence
  Description of Artificial Sequence: Synthetic oligonucleotide
cucucucaguggcuuuucc

SEQ ID NO: 2173746 - RNA, 19 nt, Artificial Sequence
  Description of Artificial Sequence: Synthetic oligonucleotide
cucaguacucuggcugucc

SEQ ID NO: 2173747 - RNA, 19 nt, Artificial Sequence
  Description of Artificial Sequence: Synthetic oligonucleotide
gcuagauuaggaaguacca

SEQ ID NO: 2173748 - RNA, 19 nt, Artificial Sequence
  Description of Artificial Sequence: Synthetic oligonucleotide
caagccuuuguggagagua

SEQ ID NO: 2173749 - RNA, 19 nt, Artificial Sequence
  Description of Artificial Sequence: Synthetic oligonucleotide
uucugaguuguaggguccu

SEQ ID NO: 2173750 - RNA, 19 nt, Artificial Sequence
  Description of Artificial Sequence: Synthetic oligonucleotide
cuugugcaguugacagagc

SEQ ID NO: 2173751 - RNA, 19 nt, Artificial Sequence
  Description of Artificial Sequence: Synthetic oligonucleotide
ucgugaggagguagggcuc

SEQ ID NO: 2173752 - RNA, 19 nt, Artificial Sequence
  Description of Artificial Sequence: Synthetic oligonucleotide
uacuugucgcucccugcuc

SEQ ID NO: 2173753 - RNA, 19 nt, Artificial Sequence
  Description of Artificial Sequence: Synthetic oligonucleotide
ugcuacaaagaaggucuuc

SEQ ID NO: 2173754 - RNA, 19 nt, Artificial Sequence
  Description of Artificial Sequence: Synthetic oligonucleotide
gauuccaauggugguugga

SEQ ID NO: 2173755 - RNA, 19 nt, Artificial Sequence
  Description of Artificial Sequence: Synthetic oligonucleotide
aggaagcgcaacaucuucu

SEQ ID NO: 2173756 - RNA, 19 nt, Artificial Sequence
  Description of Artificial Sequence: Synthetic oligonucleotide
agcuucugaguuguagggu

SEQ ID NO: 2173757 - RNA, 19 nt, Artificial Sequence
  Description of Artificial Sequence: Synthetic oligonucleotide
guuuugcaaaagccgccuc

SEQ ID NO: 2173758 - RNA, 19 nt, Artificial Sequence
  Description of Artificial Sequence: Synthetic oligonucleotide
agucucauucuagcagucu

SEQ ID NO: 2173759 - RNA, 19 nt, Artificial Sequence
  Description of Artificial Sequence: Synthetic oligonucleotide
gcuuauugucaugcgacug

SEQ ID NO: 2173760 - RNA, 19 nt, Artificial Sequence
  Description of Artificial Sequence: Synthetic oligonucleotide
ucugggacuggcugcuuuu

SEQ ID NO: 2173761 - RNA, 19 nt, Artificial Sequence
  Description of Artificial Sequence: Synthetic oligonucleotide
ggacagauagugcagugua

SEQ ID NO: 2173762 - RNA, 19 nt, Artificial Sequence
  Description of Artificial Sequence: Synthetic oligonucleotide
uugucaugcgacuguucuu

SEQ ID NO: 2173763 - RNA, 19 nt, Artificial Sequence
  Description of Artificial Sequence: Synthetic oligonucleotide
agaucaguucuuagcuucu

SEQ ID NO: 2173764 - RNA, 19 nt, Artificial Sequence
  Description of Artificial Sequence: Synthetic oligonucleotide
gcugcuuuucuuccuucgc

SEQ ID NO: 2173765 - RNA, 19 nt, Artificial Sequence
  Description of Artificial Sequence: Synthetic oligonucleotide
uagggcuccgugucaucca

SEQ ID NO: 2173766 - RNA, 19 nt, Artificial Sequence
  Description of Artificial Sequence: Synthetic oligonucleotide
augcugacauggccuccgg

SEQ ID NO: 2173767 - RNA, 19 nt, Artificial Sequence
  Description of Artificial Sequence: Synthetic oligonucleotide
guaccagaucuuucugguc

SEQ ID NO: 2173768 - RNA, 19 nt, Artificial Sequence
  Description of Artificial Sequence: Synthetic oligonucleotide
agguuucauaggaaaaguu

SEQ ID NO: 2173769 - RNA, 19 nt, Artificial Sequence
  Description of Artificial Sequence: Synthetic oligonucleotide
ggggaugcuagauuaggaa

SEQ ID NO: 2173770 - RNA, 19 nt, Artificial Sequence
  Description of Artificial Sequence: Synthetic oligonucleotide
gaugauggggaugcuagau

SEQ ID NO: 2173771 - RNA, 19 nt, Artificial Sequence
  Description of Artificial Sequence: Synthetic oligonucleotide
ugaugcugacauggccucc

SEQ ID NO: 2173772 - RNA, 19 nt, Artificial Sequence
  Description of Artificial Sequence: Synthetic oligonucleotide
aguguuccggggcugucuu

SEQ ID NO: 2173773 - RNA, 19 nt, Artificial Sequence
  Description of Artificial Sequence: Synthetic oligonucleotide
agguuacuucauucaugga

SEQ ID NO: 2173774 - RNA, 19 nt, Artificial Sequence
  Description of Artificial Sequence: Synthetic oligonucleotide
cagucucauucuagcaguc

SEQ ID NO: 2173775 - RNA, 19 nt, Artificial Sequence
  Description of Artificial Sequence: Synthetic oligonucleotide
acagggugugccaaguuuu

SEQ ID NO: 2173776 - RNA, 19 nt, Artificial Sequence
  Description of Artificial Sequence: Synthetic oligonucleotide
cuccagucucauucuagca

SEQ ID NO: 2173777 - RNA, 19 nt, Artificial Sequence
  Description of Artificial Sequence: Synthetic oligonucleotide
gcagguuacuucauucaug

SEQ ID NO: 2173778 - RNA, 19 nt, Artificial Sequence
  Description of Artificial Sequence: Synthetic oligonucleotide
cucacccucagcaggagcu

SEQ ID NO: 2173779 - RNA, 19 nt, Artificial Sequence
  Description of Artificial Sequence: Synthetic oligonucleotide
cccuaggacagauagugca

SEQ ID NO: 2173780 - RNA, 19 nt, Artificial Sequence
  Description of Artificial Sequence: Synthetic oligonucleotide
ggcuugggaacuggcaggg

SEQ ID NO: 2173781 - RNA, 19 nt, Artificial Sequence
  Description of Artificial Sequence: Synthetic oligonucleotide
auggccuccggggaggagu

SEQ ID NO: 2173782 - RNA, 19 nt, Artificial Sequence
  Description of Artificial Sequence: Synthetic oligonucleotide
gcaguguagccuccaauga

SEQ ID NO: 2173783 - RNA, 19 nt, Artificial Sequence
  Description of Artificial Sequence: Synthetic oligonucleotide
cugagccucccucacccuc

SEQ ID NO: 2173784 - RNA, 19 nt, Artificial Sequence
  Description of Artificial Sequence: Synthetic oligonucleotide
uuggaguguuccggggcug

SEQ ID NO: 2173785 - RNA, 19 nt, Artificial Sequence
  Description of Artificial Sequence: Synthetic oligonucleotide
caaccaggaccuccaacca

SEQ ID NO: 2173786 - RNA, 19 nt, Artificial Sequence
  Description of Artificial Sequence: Synthetic oligonucleotide
gagguagggcuccguguca

SEQ ID NO: 2173787 - RNA, 19 nt, Artificial Sequence
  Description of Artificial Sequence: Synthetic oligonucleotide
cuuagauugucuggcugaa

SEQ ID NO: 2173788 - RNA, 19 nt, Artificial Sequence
  Description of Artificial Sequence: Synthetic oligonucleotide
caguucuuagcuucugagu

SEQ ID NO: 2173789 - RNA, 19 nt, Artificial Sequence
  Description of Artificial Sequence: Synthetic oligonucleotide
ggaugcuagauuaggaagu

SEQ ID NO: 2173790 - RNA, 19 nt, Artificial Sequence
  Description of Artificial Sequence: Synthetic oligonucleotide
ucugagccucccucacccu

SEQ ID NO: 2173791 - RNA, 19 nt, Artificial Sequence
  Description of Artificial Sequence: Synthetic oligonucleotide
ucucaugcccuaggacaga

SEQ ID NO: 2173792 - RNA, 19 nt, Artificial Sequence
  Description of Artificial Sequence: Synthetic oligonucleotide
uugaggcacuuagauuguc

SEQ ID NO: 2173793 - RNA, 19 nt, Artificial Sequence
  Description of Artificial Sequence: Synthetic oligonucleotide
ccagccccaaaacugcuac

SEQ ID NO: 2173794 - RNA, 19 nt, Artificial Sequence
  Description of Artificial Sequence: Synthetic oligonucleotide
guaacuuagcagguuacuu

SEQ ID NO: 2173795 - RNA, 19 nt, Artificial Sequence
  Description of Artificial Sequence: Synthetic oligonucleotide
caguugacagagcuuugaa

SEQ ID NO: 2173796 - RNA, 19 nt, Artificial Sequence
  Description of Artificial Sequence: Synthetic oligonucleotide
caggaccuccaaccagccc

SEQ ID NO: 2173797 - RNA, 19 nt, Artificial Sequence
  Description of Artificial Sequence: Synthetic oligonucleotide
uggaguguuccggggcugu

SEQ ID NO: 2173798 - RNA, 19 nt, Artificial Sequence
  Description of Artificial Sequence: Synthetic oligonucleotide
ucaugcccuaggacagaua

SEQ ID NO: 2173799 - RNA, 19 nt, Artificial Sequence
  Description of Artificial Sequence: Synthetic oligonucleotide
agggcuccgugucauccaa

SEQ ID NO: 2173800 - RNA, 19 nt, Artificial Sequence
  Description of Artificial Sequence: Synthetic oligonucleotide
ucuccccugugugggguug

SEQ ID NO: 2173801 - RNA, 19 nt, Artificial Sequence
  Description of Artificial Sequence: Synthetic oligonucleotide
guaggguccuuggacaugu

SEQ ID NO: 2173802 - RNA, 19 nt, Artificial Sequence
  Description of Artificial Sequence: Synthetic oligonucleotide
cugggcuuggauggugaug

SEQ ID NO: 2173803 - RNA, 19 nt, Artificial Sequence
  Description of Artificial Sequence: Synthetic oligonucleotide
uuuguggguuggugaugau

SEQ ID NO: 2173804 - RNA, 19 nt, Artificial Sequence
  Description of Artificial Sequence: Synthetic oligonucleotide
uuccuucgcuguacuugaa

SEQ ID NO: 2173805 - RNA, 19 nt, Artificial Sequence
  Description of Artificial Sequence: Synthetic oligonucleotide
guucuggauaacagggugu

SEQ ID NO: 2173806 - RNA, 19 nt, Artificial Sequence
  Description of Artificial Sequence: Synthetic oligonucleotide
cuacaaagaaggucuucau

SEQ ID NO: 2173807 - RNA, 19 nt, Artificial Sequence
  Description of Artificial Sequence: Synthetic oligonucleotide
ggggcugucuugaaggcuc

SEQ ID NO: 2173808 - RNA, 19 nt, Artificial Sequence
  Description of Artificial Sequence: Synthetic oligonucleotide
uugucgcucccugcuccag

SEQ ID NO: 2173809 - RNA, 19 nt, Artificial Sequence
  Description of Artificial Sequence: Synthetic oligonucleotide
cuccggggaggaguugagg

SEQ ID NO: 2173810 - RNA, 19 nt, Artificial Sequence
  Description of Artificial Sequence: Synthetic oligonucleotide
gcaaaagccgccucugagu

SEQ ID NO: 2173811 - RNA, 19 nt, Artificial Sequence
  Description of Artificial Sequence: Synthetic oligonucleotide
aguugaggccugggcuggg

SEQ ID NO: 2173812 - RNA, 19 nt, Artificial Sequence
  Description of Artificial Sequence: Synthetic oligonucleotide
cugaagucucagaaacccu

SEQ ID NO: 2173813 - RNA, 19 nt, Artificial Sequence
  Description of Artificial Sequence: Synthetic oligonucleotide
cuugucgcucccugcucca

SEQ ID NO: 2173814 - RNA, 19 nt, Artificial Sequence
  Description of Artificial Sequence: Synthetic oligonucleotide
cagucugagcaagccuuug

SEQ ID NO: 2173815 - RNA, 19 nt, Artificial Sequence
  Description of Artificial Sequence: Synthetic oligonucleotide
cagcagauucagauuucaa

SEQ ID NO: 2173816 - RNA, 19 nt, Artificial Sequence
  Description of Artificial Sequence: Synthetic oligonucleotide
cuugaggcacuuagauugu

SEQ ID NO: 2173817 - RNA, 19 nt, Artificial Sequence
  Description of Artificial Sequence: Synthetic oligonucleotide
cugcaguucugagccuccc

SEQ ID NO: 2173818 - RNA, 19 nt, Artificial Sequence
  Description of Artificial Sequence: Synthetic oligonucleotide
cucagaaacccucccuccu

SEQ ID NO: 2173819 - RNA, 19 nt, Artificial Sequence
  Description of Artificial Sequence: Synthetic oligonucleotide
cuaggacagauagugcagu

SEQ ID NO: 2173820 - RNA, 19 nt, Artificial Sequence
  Description of Artificial Sequence: Synthetic oligonucleotide
gcaguugacagagcuuuga

SEQ ID NO: 2173821 - RNA, 19 nt, Artificial Sequence
  Description of Artificial Sequence: Synthetic oligonucleotide
cuuagcagguuacuucauu

SEQ ID NO: 2173822 - RNA, 19 nt, Artificial Sequence
  Description of Artificial Sequence: Synthetic oligonucleotide
ucugaguuguaggguccuu

SEQ ID NO: 2173823 - RNA, 19 nt, Artificial Sequence
  Description of Artificial Sequence: Synthetic oligonucleotide
ccaucgugaggagguaggg

SEQ ID NO: 2173824 - RNA, 19 nt, Artificial Sequence
  Description of Artificial Sequence: Synthetic oligonucleotide
accuccaaccagccccaaa

SEQ ID NO: 2173825 - RNA, 19 nt, Artificial Sequence
  Description of Artificial Sequence: Synthetic oligonucleotide
gggauucuucuccccugug

SEQ ID NO: 2173826 - RNA, 19 nt, Artificial Sequence
  Description of Artificial Sequence: Synthetic oligonucleotide
gggacugcuacuugucgcu

SEQ ID NO: 2173827 - RNA, 19 nt, Artificial Sequence
  Description of Artificial Sequence: Synthetic oligonucleotide
guguuccggggcugucuug

SEQ ID NO: 2173828 - RNA, 19 nt, Artificial Sequence
  Description of Artificial Sequence: Synthetic oligonucleotide
gcgacuguucuugggcugc

SEQ ID NO: 2173829 - RNA, 19 nt, Artificial Sequence
  Description of Artificial Sequence: Synthetic oligonucleotide
cugggacuggcugcuuuuc

SEQ ID NO: 2173830 - RNA, 19 nt, Artificial Sequence
  Description of Artificial Sequence: Synthetic oligonucleotide
ggauaacagggugugccaa

SEQ ID NO: 2173831 - RNA, 19 nt, Artificial Sequence
  Description of Artificial Sequence: Synthetic oligonucleotide
ccagucucauucuagcagu

SEQ ID NO: 2173832 - RNA, 19 nt, Artificial Sequence
  Description of Artificial Sequence: Synthetic oligonucleotide
uucuccccugugugggguu

SEQ ID NO: 2173833 - RNA, 19 nt, Artificial Sequence
  Description of Artificial Sequence: Synthetic oligonucleotide
augcccuaggacagauagu

SEQ ID NO: 2173834 - RNA, 19 nt, Artificial Sequence
  Description of Artificial Sequence: Synthetic oligonucleotide
ggagaguaacuuagcaggu

SEQ ID NO: 2173835 - RNA, 19 nt, Artificial Sequence
  Description of Artificial Sequence: Synthetic oligonucleotide
gaguguuccggggcugucu

SEQ ID NO: 2173836 - RNA, 19 nt, Artificial Sequence
  Description of Artificial Sequence: Synthetic oligonucleotide
cccaaccaggaccuccaac

SEQ ID NO: 2173837 - RNA, 19 nt, Artificial Sequence
  Description of Artificial Sequence: Synthetic oligonucleotide
gcugcaguucugagccucc

SEQ ID NO: 2173838 - RNA, 19 nt, Artificial Sequence
  Description of Artificial Sequence: Synthetic oligonucleotide
ccucacccucagcaggagc

SEQ ID NO: 2173839 - RNA, 19 nt, Artificial Sequence
  Description of Artificial Sequence: Synthetic oligonucleotide
ggucuucauacuugggauu

SEQ ID NO: 2173840 - RNA, 19 nt, Artificial Sequence
  Description of Artificial Sequence: Synthetic oligonucleotide
gaacuggcagggacugcua

SEQ ID NO: 2173841 - RNA, 19 nt, Artificial Sequence
  Description of Artificial Sequence: Synthetic oligonucleotide
agccuccaaugaggcuugg

SEQ ID NO: 2173842 - RNA, 19 nt, Artificial Sequence
  Description of Artificial Sequence: Synthetic oligonucleotide
gcccuaggacagauagugc

SEQ ID NO: 2173843 - RNA, 19 nt, Artificial Sequence
  Description of Artificial Sequence: Synthetic oligonucleotide
gcacuuagauugucuggcu

SEQ ID NO: 2173844 - RNA, 19 nt, Artificial Sequence
  Description of Artificial Sequence: Synthetic oligonucleotide
uccccugugugggguuggu

SEQ ID NO: 2173845 - RNA, 19 nt, Artificial Sequence
  Description of Artificial Sequence: Synthetic oligonucleotide
cgcaacaucuucugcugga

SEQ ID NO: 2173846 - RNA, 19 nt, Artificial Sequence
  Description of Artificial Sequence: Synthetic oligonucleotide
cauggccuccggggaggag

SEQ ID NO: 2173847 - RNA, 19 nt, Artificial Sequence
  Description of Artificial Sequence: Synthetic oligonucleotide
guuccggggcugucuugaa

SEQ ID NO: 2173848 - RNA, 19 nt, Artificial Sequence
  Description of Artificial Sequence: Synthetic oligonucleotide
gccuuuguggagaguaacu

SEQ ID NO: 2173849 - RNA, 19 nt, Artificial Sequence
  Description of Artificial Sequence: Synthetic oligonucleotide
cugcuccagucucauucua

SEQ ID NO: 2173850 - RNA, 19 nt, Artificial Sequence
  Description of Artificial Sequence: Synthetic oligonucleotide
guacucuggcuguccuccu

SEQ ID NO: 2173851 - RNA, 19 nt, Artificial Sequence
  Description of Artificial Sequence: Synthetic oligonucleotide
ggguugguugagagcucug

SEQ ID NO: 2173852 - RNA, 19 nt, Artificial Sequence
  Description of Artificial Sequence: Synthetic oligonucleotide
aagccgccucugagucuug

SEQ ID NO: 2173853 - RNA, 19 nt, Artificial Sequence
  Description of Artificial Sequence: Synthetic oligonucleotide
gggguugguugagagcucu

SEQ ID NO: 2173854 - RNA, 19 nt, Artificial Sequence
  Description of Artificial Sequence: Synthetic oligonucleotide
cucaugcccuaggacagau

SEQ ID NO: 2173855 - RNA, 19 nt, Artificial Sequence
  Description of Artificial Sequence: Synthetic oligonucleotide
ggggaggaguugaggccug

SEQ ID NO: 2173856 - RNA, 19 nt, Artificial Sequence
  Description of Artificial Sequence: Synthetic oligonucleotide
cugcuacaaagaaggucuu

SEQ ID NO: 2173857 - RNA, 19 nt, Artificial Sequence
  Description of Artificial Sequence: Synthetic oligonucleotide
caauggugguuggaguguu

SEQ ID NO: 2173858 - RNA, 19 nt, Artificial Sequence
  Description of Artificial Sequence: Synthetic oligonucleotide
cucugggacuggcugcuuu

SEQ ID NO: 2173859 - RNA, 19 nt, Artificial Sequence
  Description of Artificial Sequence: Synthetic oligonucleotide
ggaguguuccggggcuguc

SEQ ID NO: 2173860 - RNA, 19 nt, Artificial Sequence
  Description of Artificial Sequence: Synthetic oligonucleotide
caucuucugcuggaagguu

SEQ ID NO: 2173861 - RNA, 19 nt, Artificial Sequence
  Description of Artificial Sequence: Synthetic oligonucleotide
gcucccugcuccagucuca

SEQ ID NO: 2173862 - RNA, 19 nt, Artificial Sequence
  Description of Artificial Sequence: Synthetic oligonucleotide
ccugauuccaauggugguu

SEQ ID NO: 2173863 - RNA, 19 nt, Artificial Sequence
  Description of Artificial Sequence: Synthetic oligonucleotide
ccaauggugguuggagugu

SEQ ID NO: 2173864 - RNA, 19 nt, Artificial Sequence
  Description of Artificial Sequence: Synthetic oligonucleotide
gaccuccaaccagccccaa

SEQ ID NO: 2173865 - RNA, 19 nt, Artificial Sequence
  Description of Artificial Sequence: Synthetic oligonucleotide
gggcugucuugaaggcucu

SEQ ID NO: 2173866 - RNA, 19 nt, Artificial Sequence
  Description of Artificial Sequence: Synthetic oligonucleotide
ccgugucauccaaguggcu

SEQ ID NO: 2173867 - RNA, 19 nt, Artificial Sequence
  Description of Artificial Sequence: Synthetic oligonucleotide
cgacuguucuugggcugca

SEQ ID NO: 2173868 - RNA, 19 nt, Artificial Sequence
  Description of Artificial Sequence: Synthetic oligonucleotide
aaucacuacacuuuggucc

SEQ ID NO: 2173869 - RNA, 19 nt, Artificial Sequence
  Description of Artificial Sequence: Synthetic oligonucleotide
uguaaaaguagaauuaugg

SEQ ID NO: 2173870 - RNA, 19 nt, Artificial Sequence
  Description of Artificial Sequence: Synthetic oligonucleotide
uaugacuugaauaagacac

SEQ ID NO: 2173871 - RNA, 19 nt, Artificial Sequence
  Description of Artificial Sequence: Synthetic oligonucleotide
uguagugggauccagaagg

SEQ ID NO: 2173872 - RNA, 19 nt, Artificial Sequence
  Description of Artificial Sequence: Synthetic oligonucleotide
gaugaauucaauuccaccg

SEQ ID NO: 2173873 - RNA, 19 nt, Artificial Sequence
  Description of Artificial Sequence: Synthetic oligonucleotide
aauauucuuaggcucaugg

SEQ ID NO: 2173874 - RNA, 19 nt, Artificial Sequence
  Description of Artificial Sequence: Synthetic oligonucleotide
aauucaauuccaccgagcg

SEQ ID NO: 2173875 - RNA, 19 nt, Artificial Sequence
  Description of Artificial Sequence: Synthetic oligonucleotide
caaagaaccacacaaagcg

SEQ ID NO: 2173876 - RNA, 19 nt, Artificial Sequence
  Description of Artificial Sequence: Synthetic oligonucleotide
aauagcuacauaugccucc

SEQ ID NO: 2173877 - RNA, 19 nt, Artificial Sequence
  Description of Artificial Sequence: Synthetic oligonucleotide
agaaaauagggucacauuc

SEQ ID NO: 2173878 - RNA, 19 nt, Artificial Sequence
  Description of Artificial Sequence: Synthetic oligonucleotide
ugaauaagacacaagauga

SEQ ID NO: 2173879 - RNA, 19 nt, Artificial Sequence
  Description of Artificial Sequence: Synthetic oligonucleotide
uuagcuacgaugcagagga

SEQ ID NO: 2173880 - RNA, 19 nt, Artificial Sequence
  Description of Artificial Sequence: Synthetic oligonucleotide
caaaauauuagcuacgaug

SEQ ID NO: 2173881 - RNA, 19 nt, Artificial Sequence
  Description of Artificial Sequence: Synthetic oligonucleotide
aagaggauagaaaauaggg

SEQ ID NO: 2173882 - RNA, 19 nt, Artificial Sequence
  Description of Artificial Sequence: Synthetic oligonucleotide
uaugcugaaaugcaaacgc

SEQ ID NO: 2173883 - RNA, 19 nt, Artificial Sequence
  Description of Artificial Sequence: Synthetic oligonucleotide
aaugcaaacgcugacauca

SEQ ID NO: 2173884 - RNA, 19 nt, Artificial Sequence
  Description of Artificial Sequence: Synthetic oligonucleotide
acuugaauaagacacaaga

SEQ ID NO: 2173885 - RNA, 19 nt, Artificial Sequence
  Description of Artificial Sequence: Synthetic oligonucleotide
uacaaaguugcauaacacg

SEQ ID NO: 2173886 - RNA, 19 nt, Artificial Sequence
  Description of Artificial Sequence: Synthetic oligonucleotide
uaaaaguagaauuauggaa

SEQ ID NO: 2173887 - RNA, 19 nt, Artificial Sequence
  Description of Artificial Sequence: Synthetic oligonucleotide
uuuaucucagcuaugcuga

SEQ ID NO: 2173888 - RNA, 19 nt, Artificial Sequence
  Description of Artificial Sequence: Synthetic oligonucleotide
ugcacaauaguuaaaugug

SEQ ID NO: 2173889 - RNA, 19 nt, Artificial Sequence
  Description of Artificial Sequence: Synthetic oligonucleotide
aacaacaccagagaguguc

SEQ ID NO: 2173890 - RNA, 19 nt, Artificial Sequence
  Description of Artificial Sequence: Synthetic oligonucleotide
uguaguuccacacaccgug

SEQ ID NO: 2173891 - RNA, 19 nt, Artificial Sequence
  Description of Artificial Sequence: Synthetic oligonucleotide
aauauuagcuacgaugcag

SEQ ID NO: 2173892 - RNA, 19 nt, Artificial Sequence
  Description of Artificial Sequence: Synthetic oligonucleotide
uuagcagucauauugcugu

SEQ ID NO: 2173893 - RNA, 19 nt, Artificial Sequence
  Description of Artificial Sequence: Synthetic oligonucleotide
aaugaacacaaacgcgggc

SEQ ID NO: 2173894 - RNA, 19 nt, Artificial Sequence
  Description of Artificial Sequence: Synthetic oligonucleotide
cuugccauaguucucacgg

SEQ ID NO: 2173895 - RNA, 19 nt, Artificial Sequence
  Description of Artificial Sequence: Synthetic oligonucleotide
aaaaguagaauuauggaau

SEQ ID NO: 2173896 - RNA, 19 nt, Artificial Sequence
  Description of Artificial Sequence: Synthetic oligonucleotide
agaugaauucaauuccacc

SEQ ID NO: 2173897 - RNA, 19 nt, Artificial Sequence
  Description of Artificial Sequence: Synthetic oligonucleotide
aaauauugaagaguuuauc

SEQ ID NO: 2173898 - RNA, 19 nt, Artificial Sequence
  Description of Artificial Sequence: Synthetic oligonucleotide
acuuggaccauguaguggg

SEQ ID NO: 2173899 - RNA, 19 nt, Artificial Sequence
  Description of Artificial Sequence: Synthetic oligonucleotide
ugcaaugccaaugagagca

SEQ ID NO: 2173900 - RNA, 19 nt, Artificial Sequence
  Description of Artificial Sequence: Synthetic oligonucleotide
aagaguuuaucucagcuau

SEQ ID NO: 2173901 - RNA, 19 nt, Artificial Sequence
  Description of Artificial Sequence: Synthetic oligonucleotide
gaggauagaaaauaggguc

SEQ ID NO: 2173902 - RNA, 19 nt, Artificial Sequence
  Description of Artificial Sequence: Synthetic oligonucleotide
uuuaugacuugaauaagac

SEQ ID NO: 2173903 - RNA, 19 nt, Artificial Sequence
  Description of Artificial Sequence: Synthetic oligonucleotide
aagaaccacacaaagcggc

SEQ ID NO: 2173904 - RNA, 19 nt, Artificial Sequence
  Description of Artificial Sequence: Synthetic oligonucleotide
gaucagacaacacugugcc

SEQ ID NO: 2173905 - RNA, 19 nt, Artificial Sequence
  Description of Artificial Sequence: Synthetic oligonucleotide
uucaauuccaccgagcgcc

SEQ ID NO: 2173906 - RNA, 19 nt, Artificial Sequence
  Description of Artificial Sequence: Synthetic oligonucleotide
agaauuauggaauaugaua

SEQ ID NO: 2173907 - RNA, 19 nt, Artificial Sequence
  Description of Artificial Sequence: Synthetic oligonucleotide
aacgcugacaucaugugac

SEQ ID NO: 2173908 - RNA, 19 nt, Artificial Sequence
  Description of Artificial Sequence: Synthetic oligonucleotide
ccugcuaccacuuaaauag

SEQ ID NO: 2173909 - RNA, 19 nt, Artificial Sequence
  Description of Artificial Sequence: Synthetic oligonucleotide
caucaugugacgauguccg

SEQ ID NO: 2173910 - RNA, 19 nt, Artificial Sequence
  Description of Artificial Sequence: Synthetic oligonucleotide
uccagaucagacaacacug

SEQ ID NO: 2173911 - RNA, 19 nt, Artificial Sequence
  Description of Artificial Sequence: Synthetic oligonucleotide
aguacaaaguugcauaaca

SEQ ID NO: 2173912 - RNA, 19 nt, Artificial Sequence
  Description of Artificial Sequence: Synthetic oligonucleotide
auuauggaauaugauacac

SEQ ID NO: 2173913 - RNA, 19 nt, Artificial Sequence
  Description of Artificial Sequence: Synthetic oligonucleotide
ugaagaguuuaucucagcu

SEQ ID NO: 2173914 - RNA, 19 nt, Artificial Sequence
  Description of Artificial Sequence: Synthetic oligonucleotide
augcacaauaguuaaaugu

SEQ ID NO: 2173915 - RNA, 19 nt, Artificial Sequence
  Description of Artificial Sequence: Synthetic oligonucleotide
aauagggucacauuccauu

SEQ ID NO: 2173916 - RNA, 19 nt, Artificial Sequence
  Description of Artificial Sequence: Synthetic oligonucleotide
aaaauagggucacauucca

SEQ ID NO: 2173917 - RNA, 19 nt, Artificial Sequence
  Description of Artificial Sequence: Synthetic oligonucleotide
auguaucuugcacacuugc

SEQ ID NO: 2173918 - RNA, 19 nt, Artificial Sequence
  Description of Artificial Sequence: Synthetic oligonucleotide
agcgcugccacaaugacgc

SEQ ID NO: 2173919 - RNA, 19 nt, Artificial Sequence
  Description of Artificial Sequence: Synthetic oligonucleotide
cuuuuagcagucauauugc

SEQ ID NO: 2173920 - RNA, 19 nt, Artificial Sequence
  Description of Artificial Sequence: Synthetic oligonucleotide
uacgaugccagcaaagaac

SEQ ID NO: 2173921 - RNA, 19 nt, Artificial Sequence
  Description of Artificial Sequence: Synthetic oligonucleotide
uccucaacagcauacuuug

SEQ ID NO: 2173922 - RNA, 19 nt, Artificial Sequence
  Description of Artificial Sequence: Synthetic oligonucleotide
caagaggauagaaaauagg

SEQ ID NO: 2173923 - RNA, 19 nt, Artificial Sequence
  Description of Artificial Sequence: Synthetic oligonucleotide
caaacaacaccagagagug

SEQ ID NO: 2173924 - RNA, 19 nt, Artificial Sequence
  Description of Artificial Sequence: Synthetic oligonucleotide
uaugccuccaagcacuuca

SEQ ID NO: 2173925 - RNA, 19 nt, Artificial Sequence
  Description of Artificial Sequence: Synthetic oligonucleotide
agcaucguacaucucuugc

SEQ ID NO: 2173926 - RNA, 19 nt, Artificial Sequence
  Description of Artificial Sequence: Synthetic oligonucleotide
agcagcaauagcuacauau

SEQ ID NO: 2173927 - RNA, 19 nt, Artificial Sequence
  Description of Artificial Sequence: Synthetic oligonucleotide
agcaaacaacaccagagag

SEQ ID NO: 2173928 - RNA, 19 nt, Artificial Sequence
  Description of Artificial Sequence: Synthetic oligonucleotide
acaaguuacagugaaauaa

SEQ ID NO: 2173929 - RNA, 19 nt, Artificial Sequence
  Description of Artificial Sequence: Synthetic oligonucleotide
gaaaauagggucacauucc

SEQ ID NO: 2173930 - RNA, 19 nt, Artificial Sequence
  Description of Artificial Sequence: Synthetic oligonucleotide
ugaauucaauuccaccgag

SEQ ID NO: 2173931 - RNA, 19 nt, Artificial Sequence
  Description of Artificial Sequence: Synthetic oligonucleotide
acuuuguuuccccauuagg

SEQ ID NO: 2173932 - RNA, 19 nt, Artificial Sequence
  Description of Artificial Sequence: Synthetic oligonucleotide
aaagcggcugagguggucc

SEQ ID NO: 2173933 - RNA, 19 nt, Artificial Sequence
  Description of Artificial Sequence: Synthetic oligonucleotide
agcaauagcuacauaugcc

SEQ ID NO: 2173934 - RNA, 19 nt, Artificial Sequence
  Description of Artificial Sequence: Synthetic oligonucleotide
guaaaaguagaauuaugga

SEQ ID NO: 2173935 - RNA, 19 nt, Artificial Sequence
  Description of Artificial Sequence: Synthetic oligonucleotide
auucaauuccaccgagcgc

SEQ ID NO: 2173936 - RNA, 19 nt, Artificial Sequence
  Description of Artificial Sequence: Synthetic oligonucleotide
cuugcuagagcacauggug

SEQ ID NO: 2173937 - RNA, 19 nt, Artificial Sequence
  Description of Artificial Sequence: Synthetic oligonucleotide
acaaugacgcaguagccag

SEQ ID NO: 2173938 - RNA, 19 nt, Artificial Sequence
  Description of Artificial Sequence: Synthetic oligonucleotide
agaucagacaacacugugc

SEQ ID NO: 2173939 - RNA, 19 nt, Artificial Sequence
  Description of Artificial Sequence: Synthetic oligonucleotide
ccaaugaacacaaacgcgg

SEQ ID NO: 2173940 - RNA, 19 nt, Artificial Sequence
  Description of Artificial Sequence: Synthetic oligonucleotide
aguacagaagaaagcaucg

SEQ ID NO: 2173941 - RNA, 19 nt, Artificial Sequence
  Description of Artificial Sequence: Synthetic oligonucleotide
aagaugaauucaauuccac

SEQ ID NO: 2173942 - RNA, 19 nt, Artificial Sequence
  Description of Artificial Sequence: Synthetic oligonucleotide
ugguccuucugccaaaccc

SEQ ID NO: 2173943 - RNA, 19 nt, Artificial Sequence
  Description of Artificial Sequence: Synthetic oligonucleotide
aauaagacacaagaugaau

SEQ ID NO: 2173944 - RNA, 19 nt, Artificial Sequence
  Description of Artificial Sequence: Synthetic oligonucleotide
aguagaauuauggaauaug

SEQ ID NO: 2173945 - RNA, 19 nt, Artificial Sequence
  Description of Artificial Sequence: Synthetic oligonucleotide
uuuguuuccccauuaggaa

SEQ ID NO: 2173946 - RNA, 19 nt, Artificial Sequence
  Description of Artificial Sequence: Synthetic oligonucleotide
auagggucacauuccauuc

SEQ ID NO: 2173947 - RNA, 19 nt, Artificial Sequence
  Description of Artificial Sequence: Synthetic oligonucleotide
cauaacacgaguaaaauau

SEQ ID NO: 2173948 - RNA, 19 nt, Artificial Sequence
  Description of Artificial Sequence: Synthetic oligonucleotide
cuuuguuuccccauuagga

SEQ ID NO: 2173949 - RNA, 19 nt, Artificial Sequence
  Description of Artificial Sequence: Synthetic oligonucleotide
aaagaaccacacaaagcgg

SEQ ID NO: 2173950 - RNA, 19 nt, Artificial Sequence
  Description of Artificial Sequence: Synthetic oligonucleotide
aguaccagaaggccuccgc

SEQ ID NO: 2173951 - RNA, 19 nt, Artificial Sequence
  Description of Artificial Sequence: Synthetic oligonucleotide
agagauguccagaucagac

SEQ ID NO: 2173952 - RNA, 19 nt, Artificial Sequence
  Description of Artificial Sequence: Synthetic oligonucleotide
aaauauuagcuacgaugca

SEQ ID NO: 2173953 - RNA, 19 nt, Artificial Sequence
  Description of Artificial Sequence: Synthetic oligonucleotide
cacgaguaaaauauacaag

SEQ ID NO: 2173954 - RNA, 19 nt, Artificial Sequence
  Description of Artificial Sequence: Synthetic oligonucleotide
uguagauccuuuauuuaaa

SEQ ID NO: 2173955 - RNA, 19 nt, Artificial Sequence
  Description of Artificial Sequence: Synthetic oligonucleotide
ugucuuguguucuuuuagc

SEQ ID NO: 2173956 - RNA, 19 nt, Artificial Sequence
  Description of Artificial Sequence: Synthetic oligonucleotide
cacaaagcggcugaggugg

SEQ ID NO: 2173957 - RNA, 19 nt, Artificial Sequence
  Description of Artificial Sequence: Synthetic oligonucleotide
gguguaguuccacacaccg

SEQ ID NO: 2173958 - RNA, 19 nt, Artificial Sequence
  Description of Artificial Sequence: Synthetic oligonucleotide
gaguuuaucucagcuaugc

SEQ ID NO: 2173959 - RNA, 19 nt, Artificial Sequence
  Description of Artificial Sequence: Synthetic oligonucleotide
acgaugccagcaaagaacc

SEQ ID NO: 2173960 - RNA, 19 nt, Artificial Sequence
  Description of Artificial Sequence: Synthetic oligonucleotide
uaugcacaauaguuaaaug

SEQ ID NO: 2173961 - RNA, 19 nt, Artificial Sequence
  Description of Artificial Sequence: Synthetic oligonucleotide
acaaaguugcauaacacga

SEQ ID NO: 2173962 - RNA, 19 nt, Artificial Sequence
  Description of Artificial Sequence: Synthetic oligonucleotide
augauacaccaguacaaag

SEQ ID NO: 2173963 - RNA, 19 nt, Artificial Sequence
  Description of Artificial Sequence: Synthetic oligonucleotide
uuuguggagaaagcagacg

SEQ ID NO: 2173964 - RNA, 19 nt, Artificial Sequence
  Description of Artificial Sequence: Synthetic oligonucleotide
caaugaacacaaacgcggg

SEQ ID NO: 2173965 - RNA, 19 nt, Artificial Sequence
  Description of Artificial Sequence: Synthetic oligonucleotide
uacauaugccuccaagcac

SEQ ID NO: 2173966 - RNA, 19 nt, Artificial Sequence
  Description of Artificial Sequence: Synthetic oligonucleotide
auacaaguuacagugaaau

SEQ ID NO: 2173967 - RNA, 19 nt, Artificial Sequence
  Description of Artificial Sequence: Synthetic oligonucleotide
gaaagcaucguacaucucu

SEQ ID NO: 2173968 - RNA, 19 nt, Artificial Sequence
  Description of Artificial Sequence: Synthetic oligonucleotide
uagaauuauggaauaugau

SEQ ID NO: 2173969 - RNA, 19 nt, Artificial Sequence
  Description of Artificial Sequence: Synthetic oligonucleotide
augaauucaauuccaccga

SEQ ID NO: 2173970 - RNA, 19 nt, Artificial Sequence
  Description of Artificial Sequence: Synthetic oligonucleotide
aaacuguagauccuuuauu

SEQ ID NO: 2173971 - RNA, 19 nt, Artificial Sequence
  Description of Artificial Sequence: Synthetic oligonucleotide
aaacgcugacaucauguga

SEQ ID NO: 2173972 - RNA, 19 nt, Artificial Sequence
  Description of Artificial Sequence: Synthetic oligonucleotide
agccagauccugcaaugcc

SEQ ID NO: 2173973 - RNA, 19 nt, Artificial Sequence
  Description of Artificial Sequence: Synthetic oligonucleotide
ugaacacaaacgcgggcag

SEQ ID NO: 2173974 - RNA, 19 nt, Artificial Sequence
  Description of Artificial Sequence: Synthetic oligonucleotide
cagcaauagcuacauaugc

SEQ ID NO: 2173975 - RNA, 19 nt, Artificial Sequence
  Description of Artificial Sequence: Synthetic oligonucleotide
cucagcuaugcugaaaugc

SEQ ID NO: 2173976 - RNA, 19 nt, Artificial Sequence
  Description of Artificial Sequence: Synthetic oligonucleotide
agauguccagaucagacaa

SEQ ID NO: 2173977 - RNA, 19 nt, Artificial Sequence
  Description of Artificial Sequence: Synthetic oligonucleotide
agucauauugcuguuggug

SEQ ID NO: 2173978 - RNA, 19 nt, Artificial Sequence
  Description of Artificial Sequence: Synthetic oligonucleotide
caguacagaagaaagcauc

SEQ ID NO: 2173979 - RNA, 19 nt, Artificial Sequence
  Description of Artificial Sequence: Synthetic oligonucleotide
aacacgaguaaaauauaca

SEQ ID NO: 2173980 - RNA, 19 nt, Artificial Sequence
  Description of Artificial Sequence: Synthetic oligonucleotide
uguccgauguaucuugcac

SEQ ID NO: 2173981 - RNA, 19 nt, Artificial Sequence
  Description of Artificial Sequence: Synthetic oligonucleotide
aauuccaccgagcgccaag

SEQ ID NO: 2173982 - RNA, 19 nt, Artificial Sequence
  Description of Artificial Sequence: Synthetic oligonucleotide
ugcuagagcacaugguggc

SEQ ID NO: 2173983 - RNA, 19 nt, Artificial Sequence
  Description of Artificial Sequence: Synthetic oligonucleotide
gaaauaaaggaagcaugug

SEQ ID NO: 2173984 - RNA, 19 nt, Artificial Sequence
  Description of Artificial Sequence: Synthetic oligonucleotide
aaguuacagugaaauaaag

SEQ ID NO: 2173985 - RNA, 19 nt, Artificial Sequence
  Description of Artificial Sequence: Synthetic oligonucleotide
cuaugcugaaaugcaaacg

SEQ ID NO: 2173986 - RNA, 19 nt, Artificial Sequence
  Description of Artificial Sequence: Synthetic oligonucleotide
uguaucuugcacacuugcu

SEQ ID NO: 2173987 - RNA, 19 nt, Artificial Sequence
  Description of Artificial Sequence: Synthetic oligonucleotide
ugcuaccacuuaaauagug

SEQ ID NO: 2173988 - RNA, 19 nt, Artificial Sequence
  Description of Artificial Sequence: Synthetic oligonucleotide
ucucacggccgcaacagcc

SEQ ID NO: 2173989 - RNA, 19 nt, Artificial Sequence
  Description of Artificial Sequence: Synthetic oligonucleotide
uccaccgagcgccaagagg

SEQ ID NO: 2173990 - RNA, 19 nt, Artificial Sequence
  Description of Artificial Sequence: Synthetic oligonucleotide
uauuagcuacgaugcagag

SEQ ID NO: 2173991 - RNA, 19 nt, Artificial Sequence
  Description of Artificial Sequence: Synthetic oligonucleotide
aguugcauaacacgaguaa

SEQ ID NO: 2173992 - RNA, 19 nt, Artificial Sequence
  Description of Artificial Sequence: Synthetic oligonucleotide
gagcaaaauauuagcuacg

SEQ ID NO: 2173993 - RNA, 19 nt, Artificial Sequence
  Description of Artificial Sequence: Synthetic oligonucleotide
agcuacauaugccuccaag

SEQ ID NO: 2173994 - RNA, 19 nt, Artificial Sequence
  Description of Artificial Sequence: Synthetic oligonucleotide
cagccaguacagaagaaag

SEQ ID NO: 2173995 - RNA, 19 nt, Artificial Sequence
  Description of Artificial Sequence: Synthetic oligonucleotide
aucacuacacuuugguccu

SEQ ID NO: 2173996 - RNA, 19 nt, Artificial Sequence
  Description of Artificial Sequence: Synthetic oligonucleotide
uguucuuuuagcagucaua

SEQ ID NO: 2173997 - RNA, 19 nt, Artificial Sequence
  Description of Artificial Sequence: Synthetic oligonucleotide
auuagcuacgaugcagagg

SEQ ID NO: 2173998 - RNA, 19 nt, Artificial Sequence
  Description of Artificial Sequence: Synthetic oligonucleotide
gcagacgcgauucacagcc

SEQ ID NO: 2173999 - RNA, 19 nt, Artificial Sequence
  Description of Artificial Sequence: Synthetic oligonucleotide
aagacacaagaugaauuca

SEQ ID NO: 2174000 - RNA, 19 nt, Artificial Sequence
  Description of Artificial Sequence: Synthetic oligonucleotide
cacuugcuagagcacaugg

SEQ ID NO: 2174001 - RNA, 19 nt, Artificial Sequence
  Description of Artificial Sequence: Synthetic oligonucleotide
uucugccaaacccagcgcu

SEQ ID NO: 2174002 - RNA, 19 nt, Artificial Sequence
  Description of Artificial Sequence: Synthetic oligonucleotide
uacgaugcagaggacagca

SEQ ID NO: 2174003 - RNA, 19 nt, Artificial Sequence
  Description of Artificial Sequence: Synthetic oligonucleotide
uaugauacaccaguacaaa

SEQ ID NO: 2174004 - RNA, 19 nt, Artificial Sequence
  Description of Artificial Sequence: Synthetic oligonucleotide
ugaggugguccucaacagc

SEQ ID NO: 2174005 - RNA, 19 nt, Artificial Sequence
  Description of Artificial Sequence: Synthetic oligonucleotide
acgauguccgcacauuucu

SEQ ID NO: 2174006 - RNA, 19 nt, Artificial Sequence
  Description of Artificial Sequence: Synthetic oligonucleotide
uguccaucaguguuggcaa

SEQ ID NO: 2174007 - RNA, 19 nt, Artificial Sequence
  Description of Artificial Sequence: Synthetic oligonucleotide
acaauaguuaaaugugauu

SEQ ID NO: 2174008 - RNA, 19 nt, Artificial Sequence
  Description of Artificial Sequence: Synthetic oligonucleotide
agaggauagaaaauagggu

SEQ ID NO: 2174009 - RNA, 19 nt, Artificial Sequence
  Description of Artificial Sequence: Synthetic oligonucleotide
cuacauaugccuccaagca

SEQ ID NO: 2174010 - RNA, 19 nt, Artificial Sequence
  Description of Artificial Sequence: Synthetic oligonucleotide
ucuugcacacuugcuagag

SEQ ID NO: 2174011 - RNA, 19 nt, Artificial Sequence
  Description of Artificial Sequence: Synthetic oligonucleotide
uuguuuccccauuaggaaa

SEQ ID NO: 2174012 - RNA, 19 nt, Artificial Sequence
  Description of Artificial Sequence: Synthetic oligonucleotide
gaguguccgauguaucuug

SEQ ID NO: 2174013 - RNA, 19 nt, Artificial Sequence
  Description of Artificial Sequence: Synthetic oligonucleotide
gcagucauauugcuguugg

SEQ ID NO: 2174014 - RNA, 19 nt, Artificial Sequence
  Description of Artificial Sequence: Synthetic oligonucleotide
uagggucacauuccauucc

SEQ ID NO: 2174015 - RNA, 19 nt, Artificial Sequence
  Description of Artificial Sequence: Synthetic oligonucleotide
agcaaaauauuagcuacga

SEQ ID NO: 2174016 - RNA, 19 nt, Artificial Sequence
  Description of Artificial Sequence: Synthetic oligonucleotide
gcuacauaugccuccaagc

SEQ ID NO: 2174017 - RNA, 19 nt, Artificial Sequence
  Description of Artificial Sequence: Synthetic oligonucleotide
aaagcagacgcgauucaca

SEQ ID NO: 2174018 - RNA, 19 nt, Artificial Sequence
  Description of Artificial Sequence: Synthetic oligonucleotide
agccaguacagaagaaagc

SEQ ID NO: 2174019 - RNA, 19 nt, Artificial Sequence
  Description of Artificial Sequence: Synthetic oligonucleotide
gagaaagcagacgcgauuc

SEQ ID NO: 2174020 - RNA, 19 nt, Artificial Sequence
  Description of Artificial Sequence: Synthetic oligonucleotide
aaacgcgggcaggaguacc

SEQ ID NO: 2174021 - RNA, 19 nt, Artificial Sequence
  Description of Artificial Sequence: Synthetic oligonucleotide
ugacaucaugugacgaugu

SEQ ID NO: 2174022 - RNA, 19 nt, Artificial Sequence
  Description of Artificial Sequence: Synthetic oligonucleotide
caugugacgauguccgcac

SEQ ID NO: 2174023 - RNA, 19 nt, Artificial Sequence
  Description of Artificial Sequence: Synthetic oligonucleotide
aggauagaaaauaggguca

SEQ ID NO: 2174024 - RNA, 19 nt, Artificial Sequence
  Description of Artificial Sequence: Synthetic oligonucleotide
aucaugugacgauguccgc

SEQ ID NO: 2174025 - RNA, 19 nt, Artificial Sequence
  Description of Artificial Sequence: Synthetic oligonucleotide
acauaugccuccaagcacu

SEQ ID NO: 2174026 - RNA, 19 nt, Artificial Sequence
  Description of Artificial Sequence: Synthetic oligonucleotide
ugacuugaauaagacacaa

SEQ ID NO: 2174027 - RNA, 19 nt, Artificial Sequence
  Description of Artificial Sequence: Synthetic oligonucleotide
auauuagcuacgaugcaga

SEQ ID NO: 2174028 - RNA, 19 nt, Artificial Sequence
  Description of Artificial Sequence: Synthetic oligonucleotide
guagccagauccugcaaug

SEQ ID NO: 2174029 - RNA, 19 nt, Artificial Sequence
  Description of Artificial Sequence: Synthetic oligonucleotide
gaauucaauuccaccgagc

SEQ ID NO: 2174030 - RNA, 19 nt, Artificial Sequence
  Description of Artificial Sequence: Synthetic oligonucleotide
auaugauacaccaguacaa

SEQ ID NO: 2174031 - RNA, 19 nt, Artificial Sequence
  Description of Artificial Sequence: Synthetic oligonucleotide
aagcaucguacaucucuug

SEQ ID NO: 2174032 - RNA, 19 nt, Artificial Sequence
  Description of Artificial Sequence: Synthetic oligonucleotide
auaagacacaagaugaauu

SEQ ID NO: 2174033 - RNA, 19 nt, Artificial Sequence
  Description of Artificial Sequence: Synthetic oligonucleotide
caaacgcugacaucaugug

SEQ ID NO: 2174034 - RNA, 19 nt, Artificial Sequence
  Description of Artificial Sequence: Synthetic oligonucleotide
aggaguaccagaaggccuc

SEQ ID NO: 2174035 - RNA, 19 nt, Artificial Sequence
  Description of Artificial Sequence: Synthetic oligonucleotide
ucaugugacgauguccgca

SEQ ID NO: 2174036 - RNA, 19 nt, Artificial Sequence
  Description of Artificial Sequence: Synthetic oligonucleotide
uagaaaauagggucacauu

SEQ ID NO: 2174037 - RNA, 19 nt, Artificial Sequence
  Description of Artificial Sequence: Synthetic oligonucleotide
uacuguccaucaguguugg

SEQ ID NO: 2174038 - RNA, 19 nt, Artificial Sequence
  Description of Artificial Sequence: Synthetic oligonucleotide
guaucuugcacacuugcua

SEQ ID NO: 2174039 - RNA, 19 nt, Artificial Sequence
  Description of Artificial Sequence: Synthetic oligonucleotide
aacaccagagaguguccga

SEQ ID NO: 2174040 - RNA, 19 nt, Artificial Sequence
  Description of Artificial Sequence: Synthetic oligonucleotide
agcagacgcgauucacagc

SEQ ID NO: 2174041 - RNA, 19 nt, Artificial Sequence
  Description of Artificial Sequence: Synthetic oligonucleotide
aaugacgcaguagccagau

SEQ ID NO: 2174042 - RNA, 19 nt, Artificial Sequence
  Description of Artificial Sequence: Synthetic oligonucleotide
uccaagcacuucauuuaug

SEQ ID NO: 2174043 - RNA, 19 nt, Artificial Sequence
  Description of Artificial Sequence: Synthetic oligonucleotide
acaccgugggaaucacuac

SEQ ID NO: 2174044 - RNA, 19 nt, Artificial Sequence
  Description of Artificial Sequence: Synthetic oligonucleotide
ugcaaacgcugacaucaug

SEQ ID NO: 2174045 - RNA, 19 nt, Artificial Sequence
  Description of Artificial Sequence: Synthetic oligonucleotide
ccauuaggaaaguagagca

SEQ ID NO: 2174046 - RNA, 19 nt, Artificial Sequence
  Description of Artificial Sequence: Synthetic oligonucleotide
caauaguuaaaugugauuu

SEQ ID NO: 2174047 - RNA, 19 nt, Artificial Sequence
  Description of Artificial Sequence: Synthetic oligonucleotide
cccaaugaacacaaacgcg

SEQ ID NO: 2174048 - RNA, 19 nt, Artificial Sequence
  Description of Artificial Sequence: Synthetic oligonucleotide
agggucacauuccauucca

SEQ ID NO: 2174049 - RNA, 19 nt, Artificial Sequence
  Description of Artificial Sequence: Synthetic oligonucleotide
aguagggaccuacaggcuu

SEQ ID NO: 2174050 - RNA, 19 nt, Artificial Sequence
  Description of Artificial Sequence: Synthetic oligonucleotide
gauacaccaguacaaaguu

SEQ ID NO: 2174051 - RNA, 19 nt, Artificial Sequence
  Description of Artificial Sequence: Synthetic oligonucleotide
gaaagcagacgcgauucac

SEQ ID NO: 2174052 - RNA, 19 nt, Artificial Sequence
  Description of Artificial Sequence: Synthetic oligonucleotide
gaauaagacacaagaugaa

SEQ ID NO: 2174053 - RNA, 19 nt, Artificial Sequence
  Description of Artificial Sequence: Synthetic oligonucleotide
agcucagagauguccagau

SEQ ID NO: 2174054 - RNA, 19 nt, Artificial Sequence
  Description of Artificial Sequence: Synthetic oligonucleotide
guaccagaaggccuccgcc

SEQ ID NO: 2174055 - RNA, 19 nt, Artificial Sequence
  Description of Artificial Sequence: Synthetic oligonucleotide
accgugggaaucacuacac

SEQ ID NO: 2174056 - RNA, 19 nt, Artificial Sequence
  Description of Artificial Sequence: Synthetic oligonucleotide
caucguacaucucuugcca

SEQ ID NO: 2174057 - RNA, 19 nt, Artificial Sequence
  Description of Artificial Sequence: Synthetic oligonucleotide
aaagcaucguacaucucuu

SEQ ID NO: 2174058 - RNA, 19 nt, Artificial Sequence
  Description of Artificial Sequence: Synthetic oligonucleotide
aguucucacggccgcaaca

SEQ ID NO: 2174059 - RNA, 19 nt, Artificial Sequence
  Description of Artificial Sequence: Synthetic oligonucleotide
cugacaucaugugacgaug

SEQ ID NO: 2174060 - RNA, 19 nt, Artificial Sequence
  Description of Artificial Sequence: Synthetic oligonucleotide
uaccagaaggccuccgccu

SEQ ID NO: 2174061 - RNA, 19 nt, Artificial Sequence
  Description of Artificial Sequence: Synthetic oligonucleotide
acgcugacaucaugugacg

SEQ ID NO: 2174062 - RNA, 19 nt, Artificial Sequence
  Description of Artificial Sequence: Synthetic oligonucleotide
cuugaauaagacacaagau

SEQ ID NO: 2174063 - RNA, 19 nt, Artificial Sequence
  Description of Artificial Sequence: Synthetic oligonucleotide
ugggagcagcaauagcuac

SEQ ID NO: 2174064 - RNA, 19 nt, Artificial Sequence
  Description of Artificial Sequence: Synthetic oligonucleotide
guucucacggccgcaacag

SEQ ID NO: 2174065 - RNA, 19 nt, Artificial Sequence
  Description of Artificial Sequence: Synthetic oligonucleotide
aguguccgauguaucuugc

SEQ ID NO: 2174066 - RNA, 19 nt, Artificial Sequence
  Description of Artificial Sequence: Synthetic oligonucleotide
uucuuaggcucauggcacu

SEQ ID NO: 2174067 - RNA, 19 nt, Artificial Sequence
  Description of Artificial Sequence: Synthetic oligonucleotide
cuugcacacuugcuagagc

SEQ ID NO: 2174068 - RNA, 19 nt, Artificial Sequence
  Description of Artificial Sequence: Synthetic oligonucleotide
uguccagaucagacaacac

SEQ ID NO: 2174069 - RNA, 19 nt, Artificial Sequence
  Description of Artificial Sequence: Synthetic oligonucleotide
ggaaaguagagcaaaauau

SEQ ID NO: 2174070 - RNA, 19 nt, Artificial Sequence
  Description of Artificial Sequence: Synthetic oligonucleotide
guccgauguaucuugcaca

SEQ ID NO: 2174071 - RNA, 19 nt, Artificial Sequence
  Description of Artificial Sequence: Synthetic oligonucleotide
gcaaagaaccacacaaagc

SEQ ID NO: 2174072 - RNA, 19 nt, Artificial Sequence
  Description of Artificial Sequence: Synthetic oligonucleotide
agaaagcagacgcgauuca

SEQ ID NO: 2174073 - RNA, 19 nt, Artificial Sequence
  Description of Artificial Sequence: Synthetic oligonucleotide
guuuguggagaaagcagac

SEQ ID NO: 2174074 - RNA, 19 nt, Artificial Sequence
  Description of Artificial Sequence: Synthetic oligonucleotide
caacaccagagaguguccg

SEQ ID NO: 2174075 - RNA, 19 nt, Artificial Sequence
  Description of Artificial Sequence: Synthetic oligonucleotide
guagagcaaaauauuagcu

SEQ ID NO: 2174076 - RNA, 19 nt, Artificial Sequence
  Description of Artificial Sequence: Synthetic oligonucleotide
auagcuacauaugccucca

SEQ ID NO: 2174077 - RNA, 19 nt, Artificial Sequence
  Description of Artificial Sequence: Synthetic oligonucleotide
auacuuuguuuccccauua

SEQ ID NO: 2174078 - RNA, 19 nt, Artificial Sequence
  Description of Artificial Sequence: Synthetic oligonucleotide
gcucauggcacuuggacca

SEQ ID NO: 2174079 - RNA, 19 nt, Artificial Sequence
  Description of Artificial Sequence: Synthetic oligonucleotide
cacuuggaccauguagugg

SEQ ID NO: 2174080 - RNA, 19 nt, Artificial Sequence
  Description of Artificial Sequence: Synthetic oligonucleotide
ugugccuguuuguggagaa

SEQ ID NO: 2174081 - RNA, 19 nt, Artificial Sequence
  Description of Artificial Sequence: Synthetic oligonucleotide
agguguaguuccacacacc

SEQ ID NO: 2174082 - RNA, 19 nt, Artificial Sequence
  Description of Artificial Sequence: Synthetic oligonucleotide
guucuuuuagcagucauau

SEQ ID NO: 2174083 - RNA, 19 nt, Artificial Sequence
  Description of Artificial Sequence: Synthetic oligonucleotide
caucucuugccauaguucu

SEQ ID NO: 2174084 - RNA, 19 nt, Artificial Sequence
  Description of Artificial Sequence: Synthetic oligonucleotide
ggcucauggcacuuggacc

SEQ ID NO: 2174085 - RNA, 19 nt, Artificial Sequence
  Description of Artificial Sequence: Synthetic oligonucleotide
augacuugaauaagacaca

SEQ ID NO: 2174086 - RNA, 19 nt, Artificial Sequence
  Description of Artificial Sequence: Synthetic oligonucleotide
gcuaccacuuaaauagugc

SEQ ID NO: 2174087 - RNA, 19 nt, Artificial Sequence
  Description of Artificial Sequence: Synthetic oligonucleotide
agcuacgaugcagaggaca

SEQ ID NO: 2174088 - RNA, 19 nt, Artificial Sequence
  Description of Artificial Sequence: Synthetic oligonucleotide
gcaauagcuacauaugccu

SEQ ID NO: 2174089 - RNA, 19 nt, Artificial Sequence
  Description of Artificial Sequence: Synthetic oligonucleotide
agagaguguccgauguauc

SEQ ID NO: 2174090 - RNA, 19 nt, Artificial Sequence
  Description of Artificial Sequence: Synthetic oligonucleotide
gggaccuacaggcuuuugc

SEQ ID NO: 2174091 - RNA, 19 nt, Artificial Sequence
  Description of Artificial Sequence: Synthetic oligonucleotide
gaagcaugugguucugucu

SEQ ID NO: 2174092 - RNA, 19 nt, Artificial Sequence
  Description of Artificial Sequence: Synthetic oligonucleotide
agacgcgauucacagccca

SEQ ID NO: 2174093 - RNA, 19 nt, Artificial Sequence
  Description of Artificial Sequence: Synthetic oligonucleotide
agcaugugguucugucuug

SEQ ID NO: 2174094 - RNA, 19 nt, Artificial Sequence
  Description of Artificial Sequence: Synthetic oligonucleotide
ucguacaucucuugccaua

SEQ ID NO: 2174095 - RNA, 19 nt, Artificial Sequence
  Description of Artificial Sequence: Synthetic oligonucleotide
gcuacgaugcagaggacag

SEQ ID NO: 2174096 - RNA, 19 nt, Artificial Sequence
  Description of Artificial Sequence: Synthetic oligonucleotide
uccgccuacgaugccagca

SEQ ID NO: 2174097 - RNA, 19 nt, Artificial Sequence
  Description of Artificial Sequence: Synthetic oligonucleotide
aggccuccgccuacgaugc

SEQ ID NO: 2174098 - RNA, 19 nt, Artificial Sequence
  Description of Artificial Sequence: Synthetic oligonucleotide
auacaccaguacaaaguug

SEQ ID NO: 2174099 - RNA, 19 nt, Artificial Sequence
  Description of Artificial Sequence: Synthetic oligonucleotide
aucuugcacacuugcuaga

SEQ ID NO: 2174100 - RNA, 19 nt, Artificial Sequence
  Description of Artificial Sequence: Synthetic oligonucleotide
uagagcacaugguggcagu

SEQ ID NO: 2174101 - RNA, 19 nt, Artificial Sequence
  Description of Artificial Sequence: Synthetic oligonucleotide
aaauagggucacauuccau

SEQ ID NO: 2174102 - RNA, 19 nt, Artificial Sequence
  Description of Artificial Sequence: Synthetic oligonucleotide
cacaaugacgcaguagcca

SEQ ID NO: 2174103 - RNA, 19 nt, Artificial Sequence
  Description of Artificial Sequence: Synthetic oligonucleotide
uucucacggccgcaacagc

SEQ ID NO: 2174104 - RNA, 19 nt, Artificial Sequence
  Description of Artificial Sequence: Synthetic oligonucleotide
gcagcaauagcuacauaug

SEQ ID NO: 2174105 - RNA, 19 nt, Artificial Sequence
  Description of Artificial Sequence: Synthetic oligonucleotide
acuacacuuugguccuucu

SEQ ID NO: 2174106 - RNA, 19 nt, Artificial Sequence
  Description of Artificial Sequence: Synthetic oligonucleotide
uucccucucuucagcucag

SEQ ID NO: 2174107 - RNA, 19 nt, Artificial Sequence
  Description of Artificial Sequence: Synthetic oligonucleotide
cacaccgugggaaucacua

SEQ ID NO: 2174108 - RNA, 19 nt, Artificial Sequence
  Description of Artificial Sequence: Synthetic oligonucleotide
uuaucucagcuaugcugaa

SEQ ID NO: 2174109 - RNA, 19 nt, Artificial Sequence
  Description of Artificial Sequence: Synthetic oligonucleotide
uuccaccgagcgccaagag

SEQ ID NO: 2174110 - RNA, 19 nt, Artificial Sequence
  Description of Artificial Sequence: Synthetic oligonucleotide
cacaauaguuaaaugugau

SEQ ID NO: 2174111 - RNA, 19 nt, Artificial Sequence
  Description of Artificial Sequence: Synthetic oligonucleotide
ugccaaacccagcgcugcc

SEQ ID NO: 2174112 - RNA, 19 nt, Artificial Sequence
  Description of Artificial Sequence: Synthetic oligonucleotide
uucuuuuagcagucauauu

SEQ ID NO: 2174113 - RNA, 19 nt, Artificial Sequence
  Description of Artificial Sequence: Synthetic oligonucleotide
gacgauguccgcacauuuc

SEQ ID NO: 2174114 - RNA, 19 nt, Artificial Sequence
  Description of Artificial Sequence: Synthetic oligonucleotide
agaaccacacaaagcggcu

SEQ ID NO: 2174115 - RNA, 19 nt, Artificial Sequence
  Description of Artificial Sequence: Synthetic oligonucleotide
cacacaaagcggcugaggu

SEQ ID NO: 2174116 - RNA, 19 nt, Artificial Sequence
  Description of Artificial Sequence: Synthetic oligonucleotide
aucguacaucucuugccau

SEQ ID NO: 2174117 - RNA, 19 nt, Artificial Sequence
  Description of Artificial Sequence: Synthetic oligonucleotide
caaugagagcagccaguac

SEQ ID NO: 2174118 - RNA, 19 nt, Artificial Sequence
  Description of Artificial Sequence: Synthetic oligonucleotide
cauaugcacaauaguuaaa

SEQ ID NO: 2174119 - RNA, 19 nt, Artificial Sequence
  Description of Artificial Sequence: Synthetic oligonucleotide
auaacacgaguaaaauaua

SEQ ID NO: 2174120 - RNA, 19 nt, Artificial Sequence
  Description of Artificial Sequence: Synthetic oligonucleotide
aucagacaacacugugccu

SEQ ID NO: 2174121 - RNA, 19 nt, Artificial Sequence
  Description of Artificial Sequence: Synthetic oligonucleotide
caaugccaaugagagcagc

SEQ ID NO: 2174122 - RNA, 19 nt, Artificial Sequence
  Description of Artificial Sequence: Synthetic oligonucleotide
aacgcgggcaggaguacca

SEQ ID NO: 2174123 - RNA, 19 nt, Artificial Sequence
  Description of Artificial Sequence: Synthetic oligonucleotide
acggccgcaacagccacag

SEQ ID NO: 2174124 - RNA, 19 nt, Artificial Sequence
  Description of Artificial Sequence: Synthetic oligonucleotide
agaguuuaucucagcuaug

SEQ ID NO: 2174125 - RNA, 19 nt, Artificial Sequence
  Description of Artificial Sequence: Synthetic oligonucleotide
uaguucucacggccgcaac

SEQ ID NO: 2174126 - RNA, 19 nt, Artificial Sequence
  Description of Artificial Sequence: Synthetic oligonucleotide
caccgugggaaucacuaca

SEQ ID NO: 2174127 - RNA, 19 nt, Artificial Sequence
  Description of Artificial Sequence: Synthetic oligonucleotide
uaucucagcuaugcugaaa

SEQ ID NO: 2174128 - RNA, 19 nt, Artificial Sequence
  Description of Artificial Sequence: Synthetic oligonucleotide
acaaacgcgggcaggagua

SEQ ID NO: 2174129 - RNA, 19 nt, Artificial Sequence
  Description of Artificial Sequence: Synthetic oligonucleotide
cuacgaugccagcaaagaa

SEQ ID NO: 2174130 - RNA, 19 nt, Artificial Sequence
  Description of Artificial Sequence: Synthetic oligonucleotide
gcugaaaugcaaacgcuga

SEQ ID NO: 2174131 - RNA, 19 nt, Artificial Sequence
  Description of Artificial Sequence: Synthetic oligonucleotide
cuuaggcucauggcacuug

SEQ ID NO: 2174132 - RNA, 19 nt, Artificial Sequence
  Description of Artificial Sequence: Synthetic oligonucleotide
ucacggccgcaacagccac

SEQ ID NO: 2174133 - RNA, 19 nt, Artificial Sequence
  Description of Artificial Sequence: Synthetic oligonucleotide
gauguccgcacauuucuuu

SEQ ID NO: 2174134 - RNA, 19 nt, Artificial Sequence
  Description of Artificial Sequence: Synthetic oligonucleotide
auuccugcuaccacuuaaa

SEQ ID NO: 2174135 - RNA, 19 nt, Artificial Sequence
  Description of Artificial Sequence: Synthetic oligonucleotide
agcgccaagaggauagaaa

SEQ ID NO: 2174136 - RNA, 19 nt, Artificial Sequence
  Description of Artificial Sequence: Synthetic oligonucleotide
ccgagcgccaagaggauag

SEQ ID NO: 2174137 - RNA, 19 nt, Artificial Sequence
  Description of Artificial Sequence: Synthetic oligonucleotide
gcaggaguaccagaaggcc

SEQ ID NO: 2174138 - RNA, 19 nt, Artificial Sequence
  Description of Artificial Sequence: Synthetic oligonucleotide
auuccaccgagcgccaaga

SEQ ID NO: 2174139 - RNA, 19 nt, Artificial Sequence
  Description of Artificial Sequence: Synthetic oligonucleotide
cuacgaugcagaggacagc

SEQ ID NO: 2174140 - RNA, 19 nt, Artificial Sequence
  Description of Artificial Sequence: Synthetic oligonucleotide
gaguaccagaaggccuccg

SEQ ID NO: 2174141 - RNA, 19 nt, Artificial Sequence
  Description of Artificial Sequence: Synthetic oligonucleotide
augacgcaguagccagauc

SEQ ID NO: 2174142 - RNA, 19 nt, Artificial Sequence
  Description of Artificial Sequence: Synthetic oligonucleotide
gcauaacacgaguaaaaua

SEQ ID NO: 2174143 - RNA, 19 nt, Artificial Sequence
  Description of Artificial Sequence: Synthetic oligonucleotide
gcacaauaguuaaauguga

SEQ ID NO: 2174144 - RNA, 19 nt, Artificial Sequence
  Description of Artificial Sequence: Synthetic oligonucleotide
auaguucucacggccgcaa

SEQ ID NO: 2174145 - RNA, 19 nt, Artificial Sequence
  Description of Artificial Sequence: Synthetic oligonucleotide
acccagcgcugccacaaug

SEQ ID NO: 2174146 - RNA, 19 nt, Artificial Sequence
  Description of Artificial Sequence: Synthetic oligonucleotide
acacuugcuagagcacaug

SEQ ID NO: 2174147 - RNA, 19 nt, Artificial Sequence
  Description of Artificial Sequence: Synthetic oligonucleotide
gcgauucacagcccauucc

SEQ ID NO: 2174148 - RNA, 19 nt, Artificial Sequence
  Description of Artificial Sequence: Synthetic oligonucleotide
aaacaacaccagagagugu

SEQ ID NO: 2174149 - RNA, 19 nt, Artificial Sequence
  Description of Artificial Sequence: Synthetic oligonucleotide
accagaaggccuccgccua

SEQ ID NO: 2174150 - RNA, 19 nt, Artificial Sequence
  Description of Artificial Sequence: Synthetic oligonucleotide
agaaagcaucguacaucuc

SEQ ID NO: 2174151 - RNA, 19 nt, Artificial Sequence
  Description of Artificial Sequence: Synthetic oligonucleotide
guuggugggagcagcaaua

SEQ ID NO: 2174152 - RNA, 19 nt, Artificial Sequence
  Description of Artificial Sequence: Synthetic oligonucleotide
cagaaggccuccgccuacg

SEQ ID NO: 2174153 - RNA, 19 nt, Artificial Sequence
  Description of Artificial Sequence: Synthetic oligonucleotide
ggaaacuguagauccuuua

SEQ ID NO: 2174154 - RNA, 19 nt, Artificial Sequence
  Description of Artificial Sequence: Synthetic oligonucleotide
cucacggccgcaacagcca

SEQ ID NO: 2174155 - RNA, 19 nt, Artificial Sequence
  Description of Artificial Sequence: Synthetic oligonucleotide
uuggaccauguagugggau

SEQ ID NO: 2174156 - RNA, 19 nt, Artificial Sequence
  Description of Artificial Sequence: Synthetic oligonucleotide
gcacuuggaccauguagug

SEQ ID NO: 2174157 - RNA, 19 nt, Artificial Sequence
  Description of Artificial Sequence: Synthetic oligonucleotide
gacacaagaugaauucaau

SEQ ID NO: 2174158 - RNA, 19 nt, Artificial Sequence
  Description of Artificial Sequence: Synthetic oligonucleotide
cuuaaauauugaagaguuu

SEQ ID NO: 2174159 - RNA, 19 nt, Artificial Sequence
  Description of Artificial Sequence: Synthetic oligonucleotide
acacaaacgcgggcaggag

SEQ ID NO: 2174160 - RNA, 19 nt, Artificial Sequence
  Description of Artificial Sequence: Synthetic oligonucleotide
cagacgcgauucacagccc

SEQ ID NO: 2174161 - RNA, 19 nt, Artificial Sequence
  Description of Artificial Sequence: Synthetic oligonucleotide
uuuccccauuaggaaagua

SEQ ID NO: 2174162 - RNA, 19 nt, Artificial Sequence
  Description of Artificial Sequence: Synthetic oligonucleotide
cacuuugguccuucugcca

SEQ ID NO: 2174163 - RNA, 19 nt, Artificial Sequence
  Description of Artificial Sequence: Synthetic oligonucleotide
guguccgauguaucuugca

SEQ ID NO: 2174164 - RNA, 19 nt, Artificial Sequence
  Description of Artificial Sequence: Synthetic oligonucleotide
caggaguaccagaaggccu

SEQ ID NO: 2174165 - RNA, 19 nt, Artificial Sequence
  Description of Artificial Sequence: Synthetic oligonucleotide
agaaggccuccgccuacga

SEQ ID NO: 2174166 - RNA, 19 nt, Artificial Sequence
  Description of Artificial Sequence: Synthetic oligonucleotide
augugacgauguccgcaca

SEQ ID NO: 2174167 - RNA, 19 nt, Artificial Sequence
  Description of Artificial Sequence: Synthetic oligonucleotide
gguggcaguagggaccuac

SEQ ID NO: 2174168 - RNA, 19 nt, Artificial Sequence
  Description of Artificial Sequence: Synthetic oligonucleotide
caaugacgcaguagccaga

SEQ ID NO: 2174169 - RNA, 19 nt, Artificial Sequence
  Description of Artificial Sequence: Synthetic oligonucleotide
uagugggauccagaaggua

SEQ ID NO: 2174170 - RNA, 19 nt, Artificial Sequence
  Description of Artificial Sequence: Synthetic oligonucleotide
cauacuuuguuuccccauu

SEQ ID NO: 2174171 - RNA, 19 nt, Artificial Sequence
  Description of Artificial Sequence: Synthetic oligonucleotide
gugggaaucacuacacuuu

SEQ ID NO: 2174172 - RNA, 19 nt, Artificial Sequence
  Description of Artificial Sequence: Synthetic oligonucleotide
gcaaacaacaccagagagu

SEQ ID NO: 2174173 - RNA, 19 nt, Artificial Sequence
  Description of Artificial Sequence: Synthetic oligonucleotide
cuuggaccauguaguggga

SEQ ID NO: 2174174 - RNA, 19 nt, Artificial Sequence
  Description of Artificial Sequence: Synthetic oligonucleotide
cguacaucucuugccauag

SEQ ID NO: 2174175 - RNA, 19 nt, Artificial Sequence
  Description of Artificial Sequence: Synthetic oligonucleotide
uagcuacgaugcagaggac

SEQ ID NO: 2174176 - RNA, 19 nt, Artificial Sequence
  Description of Artificial Sequence: Synthetic oligonucleotide
caucaguguuggcaaaggu

SEQ ID NO: 2174177 - RNA, 19 nt, Artificial Sequence
  Description of Artificial Sequence: Synthetic oligonucleotide
gacgcaguagccagauccu

SEQ ID NO: 2174178 - RNA, 19 nt, Artificial Sequence
  Description of Artificial Sequence: Synthetic oligonucleotide
guccgcacauuucuuugua

SEQ ID NO: 2174179 - RNA, 19 nt, Artificial Sequence
  Description of Artificial Sequence: Synthetic oligonucleotide
cagagauguccagaucaga

SEQ ID NO: 2174180 - RNA, 19 nt, Artificial Sequence
  Description of Artificial Sequence: Synthetic oligonucleotide
gccuacgaugccagcaaag

SEQ ID NO: 2174181 - RNA, 19 nt, Artificial Sequence
  Description of Artificial Sequence: Synthetic oligonucleotide
ccaaacccagcgcugccac

SEQ ID NO: 2174182 - RNA, 19 nt, Artificial Sequence
  Description of Artificial Sequence: Synthetic oligonucleotide
ccuacgaugccagcaaaga

SEQ ID NO: 2174183 - RNA, 19 nt, Artificial Sequence
  Description of Artificial Sequence: Synthetic oligonucleotide
ccuccaagcacuucauuua

SEQ ID NO: 2174184 - RNA, 19 nt, Artificial Sequence
  Description of Artificial Sequence: Synthetic oligonucleotide
auggcacuuggaccaugua

SEQ ID NO: 2174185 - RNA, 19 nt, Artificial Sequence
  Description of Artificial Sequence: Synthetic oligonucleotide
gcugacaucaugugacgau

SEQ ID NO: 2174186 - RNA, 19 nt, Artificial Sequence
  Description of Artificial Sequence: Synthetic oligonucleotide
cacaaacgcgggcaggagu

SEQ ID NO: 2174187 - RNA, 19 nt, Artificial Sequence
  Description of Artificial Sequence: Synthetic oligonucleotide
cagagaguguccgauguau

SEQ ID NO: 2174188 - RNA, 19 nt, Artificial Sequence
  Description of Artificial Sequence: Synthetic oligonucleotide
guagugggauccagaaggu

SEQ ID NO: 2174189 - RNA, 19 nt, Artificial Sequence
  Description of Artificial Sequence: Synthetic oligonucleotide
cagacaacacugugccugu

SEQ ID NO: 2174190 - RNA, 19 nt, Artificial Sequence
  Description of Artificial Sequence: Synthetic oligonucleotide
agagcacaugguggcagua

SEQ ID NO: 2174191 - RNA, 19 nt, Artificial Sequence
  Description of Artificial Sequence: Synthetic oligonucleotide
ccuccgccuacgaugccag

SEQ ID NO: 2174192 - RNA, 19 nt, Artificial Sequence
  Description of Artificial Sequence: Synthetic oligonucleotide
ccgcacauuucuuuguaaa

SEQ ID NO: 2174193 - RNA, 19 nt, Artificial Sequence
  Description of Artificial Sequence: Synthetic oligonucleotide
gcaaaauauuagcuacgau

SEQ ID NO: 2174194 - RNA, 19 nt, Artificial Sequence
  Description of Artificial Sequence: Synthetic oligonucleotide
acgcgauucacagcccauu

SEQ ID NO: 2174195 - RNA, 19 nt, Artificial Sequence
  Description of Artificial Sequence: Synthetic oligonucleotide
gagcgccaagaggauagaa

SEQ ID NO: 2174196 - RNA, 19 nt, Artificial Sequence
  Description of Artificial Sequence: Synthetic oligonucleotide
cacacuugcuagagcacau

SEQ ID NO: 2174197 - RNA, 19 nt, Artificial Sequence
  Description of Artificial Sequence: Synthetic oligonucleotide
caacacugugccuguuugu

SEQ ID NO: 2174198 - RNA, 19 nt, Artificial Sequence
  Description of Artificial Sequence: Synthetic oligonucleotide
ggaguaccagaaggccucc

SEQ ID NO: 2174199 - RNA, 19 nt, Artificial Sequence
  Description of Artificial Sequence: Synthetic oligonucleotide
ggugguccucaacagcaua

SEQ ID NO: 2174200 - RNA, 19 nt, Artificial Sequence
  Description of Artificial Sequence: Synthetic oligonucleotide
acgcgggcaggaguaccag

SEQ ID NO: 2174201 - RNA, 19 nt, Artificial Sequence
  Description of Artificial Sequence: Synthetic oligonucleotide
gaaggccuccgccuacgau

SEQ ID NO: 2174202 - RNA, 19 nt, Artificial Sequence
  Description of Artificial Sequence: Synthetic oligonucleotide
cuccgccuacgaugccagc

SEQ ID NO: 2174203 - RNA, 19 nt, Artificial Sequence
  Description of Artificial Sequence: Synthetic oligonucleotide
augcaaacgcugacaucau

SEQ ID NO: 2174204 - RNA, 19 nt, Artificial Sequence
  Description of Artificial Sequence: Synthetic oligonucleotide
cugcuaccacuuaaauagu

SEQ ID NO: 2174205 - RNA, 19 nt, Artificial Sequence
  Description of Artificial Sequence: Synthetic oligonucleotide
aggugguccucaacagcau

SEQ ID NO: 2174206 - RNA, 19 nt, Artificial Sequence
  Description of Artificial Sequence: Synthetic oligonucleotide
guguaguuccacacaccgu

SEQ ID NO: 2174207 - RNA, 19 nt, Artificial Sequence
  Description of Artificial Sequence: Synthetic oligonucleotide
cagucauauugcuguuggu

SEQ ID NO: 2174208 - RNA, 19 nt, Artificial Sequence
  Description of Artificial Sequence: Synthetic oligonucleotide
agggaccuacaggcuuuug

SEQ ID NO: 2174209 - RNA, 19 nt, Artificial Sequence
  Description of Artificial Sequence: Synthetic oligonucleotide
guagggaccuacaggcuuu

SEQ ID NO: 2174210 - RNA, 19 nt, Artificial Sequence
  Description of Artificial Sequence: Synthetic oligonucleotide
ggcugaggugguccucaac

SEQ ID NO: 2174211 - RNA, 19 nt, Artificial Sequence
  Description of Artificial Sequence: Synthetic oligonucleotide
cgcgauucacagcccauuc

SEQ ID NO: 2174212 - RNA, 19 nt, Artificial Sequence
  Description of Artificial Sequence: Synthetic oligonucleotide
acgaugcagaggacagcaa

SEQ ID NO: 2174213 - RNA, 19 nt, Artificial Sequence
  Description of Artificial Sequence: Synthetic oligonucleotide
cuuuugcccuucccucucu

SEQ ID NO: 2174214 - RNA, 19 nt, Artificial Sequence
  Description of Artificial Sequence: Synthetic oligonucleotide
gcgggcaggaguaccagaa

SEQ ID NO: 2174215 - RNA, 19 nt, Artificial Sequence
  Description of Artificial Sequence: Synthetic oligonucleotide
gggucacauuccauuccac

SEQ ID NO: 2174216 - RNA, 19 nt, Artificial Sequence
  Description of Artificial Sequence: Synthetic oligonucleotide
cacggccgcaacagccaca

SEQ ID NO: 2174217 - RNA, 19 nt, Artificial Sequence
  Description of Artificial Sequence: Synthetic oligonucleotide
agacaacacugugccuguu

SEQ ID NO: 2174218 - RNA, 19 nt, Artificial Sequence
  Description of Artificial Sequence: Synthetic oligonucleotide
gacgcgauucacagcccau

SEQ ID NO: 2174219 - RNA, 19 nt, Artificial Sequence
  Description of Artificial Sequence: Synthetic oligonucleotide
gguccucaacagcauacuu

SEQ ID NO: 2174220 - RNA, 19 nt, Artificial Sequence
  Description of Artificial Sequence: Synthetic oligonucleotide
gugccuguuuguggagaaa

SEQ ID NO: 2174221 - RNA, 19 nt, Artificial Sequence
  Description of Artificial Sequence: Synthetic oligonucleotide
cgugggaaucacuacacuu

SEQ ID NO: 2174222 - RNA, 19 nt, Artificial Sequence
  Description of Artificial Sequence: Synthetic oligonucleotide
cugccacaaugacgcagua

SEQ ID NO: 2174223 - RNA, 19 nt, Artificial Sequence
  Description of Artificial Sequence: Synthetic oligonucleotide
gggauccagaagguacugu

SEQ ID NO: 2174224 - RNA, 19 nt, Artificial Sequence
  Description of Artificial Sequence: Synthetic oligonucleotide
ccgccuacgaugccagcaa

SEQ ID NO: 2174225 - RNA, 19 nt, Artificial Sequence
  Description of Artificial Sequence: Synthetic oligonucleotide
ccagagaguguccgaugua

SEQ ID NO: 2174226 - RNA, 19 nt, Artificial Sequence
  Description of Artificial Sequence: Synthetic oligonucleotide
caccgagcgccaagaggau

SEQ ID NO: 2174227 - RNA, 19 nt, Artificial Sequence
  Description of Artificial Sequence: Synthetic oligonucleotide
cgcugacaucaugugacga

SEQ ID NO: 2174228 - RNA, 19 nt, Artificial Sequence
  Description of Artificial Sequence: Synthetic oligonucleotide
cucauggcacuuggaccau

SEQ ID NO: 2174229 - RNA, 19 nt, Artificial Sequence
  Description of Artificial Sequence: Synthetic oligonucleotide
ccuacaggcuuuugcccuu

SEQ ID NO: 2174230 - RNA, 19 nt, Artificial Sequence
  Description of Artificial Sequence: Synthetic oligonucleotide
ccauuccugcuaccacuua

SEQ ID NO: 2174231 - RNA, 19 nt, Artificial Sequence
  Description of Artificial Sequence: Synthetic oligonucleotide
ccgugggaaucacuacacu

SEQ ID NO: 2174232 - RNA, 19 nt, Artificial Sequence
  Description of Artificial Sequence: Synthetic oligonucleotide
gcgcugccacaaugacgca

SEQ ID NO: 2174233 - RNA, 19 nt, Artificial Sequence
  Description of Artificial Sequence: Synthetic oligonucleotide
cgccuacgaugccagcaaa

SEQ ID NO: 2174234 - RNA, 19 nt, Artificial Sequence
  Description of Artificial Sequence: Synthetic oligonucleotide
ccgauguaucuugcacacu

SEQ ID NO: 2174235 - RNA, 19 nt, Artificial Sequence
  Description of Artificial Sequence: Synthetic oligonucleotide
cgagcgccaagaggauaga

SEQ ID NO: 2174236 - RNA, 19 nt, Artificial Sequence
  Description of Artificial Sequence: Synthetic oligonucleotide
cggccgcaacagccacagc

SEQ ID NO: 2174237 - RNA, 19 nt, Artificial Sequence
  Description of Artificial Sequence: Synthetic oligonucleotide
auuauuuccaggcauacgc

SEQ ID NO: 2174238 - RNA, 19 nt, Artificial Sequence
  Description of Artificial Sequence: Synthetic oligonucleotide
aaaguaaacagccugagcu

SEQ ID NO: 2174239 - RNA, 19 nt, Artificial Sequence
  Description of Artificial Sequence: Synthetic oligonucleotide
acaaggauuauuuccaggc

SEQ ID NO: 2174240 - RNA, 19 nt, Artificial Sequence
  Description of Artificial Sequence: Synthetic oligonucleotide
auuaauucuucucuggacg

SEQ ID NO: 2174241 - RNA, 19 nt, Artificial Sequence
  Description of Artificial Sequence: Synthetic oligonucleotide
gaagacaaggauuauuucc

SEQ ID NO: 2174242 - RNA, 19 nt, Artificial Sequence
  Description of Artificial Sequence: Synthetic oligonucleotide
uuuaauuagguucucacua

SEQ ID NO: 2174243 - RNA, 19 nt, Artificial Sequence
  Description of Artificial Sequence: Synthetic oligonucleotide
acuacaacuagacauggag

SEQ ID NO: 2174244 - RNA, 19 nt, Artificial Sequence
  Description of Artificial Sequence: Synthetic oligonucleotide
agaaaugugcuuuccuucc

SEQ ID NO: 2174245 - RNA, 19 nt, Artificial Sequence
  Description of Artificial Sequence: Synthetic oligonucleotide
aagcaaaucagauguaugu

SEQ ID NO: 2174246 - RNA, 19 nt, Artificial Sequence
  Description of Artificial Sequence: Synthetic oligonucleotide
aaaugugcuuuccuucccc

SEQ ID NO: 2174247 - RNA, 19 nt, Artificial Sequence
  Description of Artificial Sequence: Synthetic oligonucleotide
ugaugaaccauuccaagug

SEQ ID NO: 2174248 - RNA, 19 nt, Artificial Sequence
  Description of Artificial Sequence: Synthetic oligonucleotide
aaccauuccaagugguagc

SEQ ID NO: 2174249 - RNA, 19 nt, Artificial Sequence
  Description of Artificial Sequence: Synthetic oligonucleotide
acauagggagcauagguac

SEQ ID NO: 2174250 - RNA, 19 nt, Artificial Sequence
  Description of Artificial Sequence: Synthetic oligonucleotide
ugauaaagggacaauugug

SEQ ID NO: 2174251 - RNA, 19 nt, Artificial Sequence
  Description of Artificial Sequence: Synthetic oligonucleotide
uaacggaucagccaguaug

SEQ ID NO: 2174252 - RNA, 19 nt, Artificial Sequence
  Description of Artificial Sequence: Synthetic oligonucleotide
agugguagcccacagcccc

SEQ ID NO: 2174253 - RNA, 19 nt, Artificial Sequence
  Description of Artificial Sequence: Synthetic oligonucleotide
uuaauucuucucuggacgg

SEQ ID NO: 2174254 - RNA, 19 nt, Artificial Sequence
  Description of Artificial Sequence: Synthetic oligonucleotide
uccaguuuguccuuaaggc

SEQ ID NO: 2174255 - RNA, 19 nt, Artificial Sequence
  Description of Artificial Sequence: Synthetic oligonucleotide
aaguaaacagccugagcuc

SEQ ID NO: 2174256 - RNA, 19 nt, Artificial Sequence
  Description of Artificial Sequence: Synthetic oligonucleotide
auagccauaacggaucagc

SEQ ID NO: 2174257 - RNA, 19 nt, Artificial Sequence
  Description of Artificial Sequence: Synthetic oligonucleotide
gaucacagggaccugagcc

SEQ ID NO: 2174258 - RNA, 19 nt, Artificial Sequence
  Description of Artificial Sequence: Synthetic oligonucleotide
auagguacgcaccacggac

SEQ ID NO: 2174259 - RNA, 19 nt, Artificial Sequence
  Description of Artificial Sequence: Synthetic oligonucleotide
aaagggacaauugugccag

SEQ ID NO: 2174260 - RNA, 19 nt, Artificial Sequence
  Description of Artificial Sequence: Synthetic oligonucleotide
aaaacuacaacuagacaug

SEQ ID NO: 2174261 - RNA, 19 nt, Artificial Sequence
  Description of Artificial Sequence: Synthetic oligonucleotide
uuuuauuuucucaggugcc

SEQ ID NO: 2174262 - RNA, 19 nt, Artificial Sequence
  Description of Artificial Sequence: Synthetic oligonucleotide
uuagguucucacuacaugu

SEQ ID NO: 2174263 - RNA, 19 nt, Artificial Sequence
  Description of Artificial Sequence: Synthetic oligonucleotide
agcuguauagccauaacgg

SEQ ID NO: 2174264 - RNA, 19 nt, Artificial Sequence
  Description of Artificial Sequence: Synthetic oligonucleotide
uguauagccauaacggauc

SEQ ID NO: 2174265 - RNA, 19 nt, Artificial Sequence
  Description of Artificial Sequence: Synthetic oligonucleotide
aguaaacagccugagcucc

SEQ ID NO: 2174266 - RNA, 19 nt, Artificial Sequence
  Description of Artificial Sequence: Synthetic oligonucleotide
cuagccgggagcaacacgg

SEQ ID NO: 2174267 - RNA, 19 nt, Artificial Sequence
  Description of Artificial Sequence: Synthetic oligonucleotide
ugacauagggagcauaggu

SEQ ID NO: 2174268 - RNA, 19 nt, Artificial Sequence
  Description of Artificial Sequence: Synthetic oligonucleotide
ucugaauucuguccagugc

SEQ ID NO: 2174269 - RNA, 19 nt, Artificial Sequence
  Description of Artificial Sequence: Synthetic oligonucleotide
acaagccccaaccauuccc

SEQ ID NO: 2174270 - RNA, 19 nt, Artificial Sequence
  Description of Artificial Sequence: Synthetic oligonucleotide
aaacuacaacuagacaugg

SEQ ID NO: 2174271 - RNA, 19 nt, Artificial Sequence
  Description of Artificial Sequence: Synthetic oligonucleotide
gagagcauuguucauuccc

SEQ ID NO: 2174272 - RNA, 19 nt, Artificial Sequence
  Description of Artificial Sequence: Synthetic oligonucleotide
cagauguauguucugaagc

SEQ ID NO: 2174273 - RNA, 19 nt, Artificial Sequence
  Description of Artificial Sequence: Synthetic oligonucleotide
aaggauuauuuccaggcau

SEQ ID NO: 2174274 - RNA, 19 nt, Artificial Sequence
  Description of Artificial Sequence: Synthetic oligonucleotide
cuagacauggaggugaccc

SEQ ID NO: 2174275 - RNA, 19 nt, Artificial Sequence
  Description of Artificial Sequence: Synthetic oligonucleotide
uuguucauuccccagggcu

SEQ ID NO: 2174276 - RNA, 19 nt, Artificial Sequence
  Description of Artificial Sequence: Synthetic oligonucleotide
uguauguucugaagcuggg

SEQ ID NO: 2174277 - RNA, 19 nt, Artificial Sequence
  Description of Artificial Sequence: Synthetic oligonucleotide
agauguauguucugaagcu

SEQ ID NO: 2174278 - RNA, 19 nt, Artificial Sequence
  Description of Artificial Sequence: Synthetic oligonucleotide
uacaugugaggaagggugg

SEQ ID NO: 2174279 - RNA, 19 nt, Artificial Sequence
  Description of Artificial Sequence: Synthetic oligonucleotide
cucauggcaacaacaagcc

SEQ ID NO: 2174280 - RNA, 19 nt, Artificial Sequence
  Description of Artificial Sequence: Synthetic oligonucleotide
uuauuuccaggcauacgcc

SEQ ID NO: 2174281 - RNA, 19 nt, Artificial Sequence
  Description of Artificial Sequence: Synthetic oligonucleotide
ugugccagcgaacaggaaa

SEQ ID NO: 2174282 - RNA, 19 nt, Artificial Sequence
  Description of Artificial Sequence: Synthetic oligonucleotide
aacaacaagccccaaccau

SEQ ID NO: 2174283 - RNA, 19 nt, Artificial Sequence
  Description of Artificial Sequence: Synthetic oligonucleotide
agagcauuguucauucccc

SEQ ID NO: 2174284 - RNA, 19 nt, Artificial Sequence
  Description of Artificial Sequence: Synthetic oligonucleotide
auagggagcauagguacgc

SEQ ID NO: 2174285 - RNA, 19 nt, Artificial Sequence
  Description of Artificial Sequence: Synthetic oligonucleotide
cagcuguauagccauaacg

SEQ ID NO: 2174286 - RNA, 19 nt, Artificial Sequence
  Description of Artificial Sequence: Synthetic oligonucleotide
cuuucgguccucucgacgc

SEQ ID NO: 2174287 - RNA, 19 nt, Artificial Sequence
  Description of Artificial Sequence: Synthetic oligonucleotide
agcauagguacgcaccacg

SEQ ID NO: 2174288 - RNA, 19 nt, Artificial Sequence
  Description of Artificial Sequence: Synthetic oligonucleotide
cauuguucauuccccaggg

SEQ ID NO: 2174289 - RNA, 19 nt, Artificial Sequence
  Description of Artificial Sequence: Synthetic oligonucleotide
cagcccaucccacagaugc

SEQ ID NO: 2174290 - RNA, 19 nt, Artificial Sequence
  Description of Artificial Sequence: Synthetic oligonucleotide
aacaagccccaaccauucc

SEQ ID NO: 2174291 - RNA, 19 nt, Artificial Sequence
  Description of Artificial Sequence: Synthetic oligonucleotide
cucacuacaugugaggaag

SEQ ID NO: 2174292 - RNA, 19 nt, Artificial Sequence
  Description of Artificial Sequence: Synthetic oligonucleotide
cauagcacaggccacauga

SEQ ID NO: 2174293 - RNA, 19 nt, Artificial Sequence
  Description of Artificial Sequence: Synthetic oligonucleotide
guucucacuacaugugagg

SEQ ID NO: 2174294 - RNA, 19 nt, Artificial Sequence
  Description of Artificial Sequence: Synthetic oligonucleotide
aggcauacgccuucugccc

SEQ ID NO: 2174295 - RNA, 19 nt, Artificial Sequence
  Description of Artificial Sequence: Synthetic oligonucleotide
uuaaggcucaccaccugug

SEQ ID NO: 2174296 - RNA, 19 nt, Artificial Sequence
  Description of Artificial Sequence: Synthetic oligonucleotide
auuguucauuccccagggc

SEQ ID NO: 2174297 - RNA, 19 nt, Artificial Sequence
  Description of Artificial Sequence: Synthetic oligonucleotide
gauuauuuccaggcauacg

SEQ ID NO: 2174298 - RNA, 19 nt, Artificial Sequence
  Description of Artificial Sequence: Synthetic oligonucleotide
acgguuucuguucaggacu

SEQ ID NO: 2174299 - RNA, 19 nt, Artificial Sequence
  Description of Artificial Sequence: Synthetic oligonucleotide
cacaugacaucuacggccc

SEQ ID NO: 2174300 - RNA, 19 nt, Artificial Sequence
  Description of Artificial Sequence: Synthetic oligonucleotide
guccuuaaggcucaccacc

SEQ ID NO: 2174301 - RNA, 19 nt, Artificial Sequence
  Description of Artificial Sequence: Synthetic oligonucleotide
gcaacaacaagccccaacc

SEQ ID NO: 2174302 - RNA, 19 nt, Artificial Sequence
  Description of Artificial Sequence: Synthetic oligonucleotide
uagguucucacuacaugug

SEQ ID NO: 2174303 - RNA, 19 nt, Artificial Sequence
  Description of Artificial Sequence: Synthetic oligonucleotide
ggccacaugacaucuacgg

SEQ ID NO: 2174304 - RNA, 19 nt, Artificial Sequence
  Description of Artificial Sequence: Synthetic oligonucleotide
auguauguucugaagcugg

SEQ ID NO: 2174305 - RNA, 19 nt, Artificial Sequence
  Description of Artificial Sequence: Synthetic oligonucleotide
gaagcccgcagucauggag

SEQ ID NO: 2174306 - RNA, 19 nt, Artificial Sequence
  Description of Artificial Sequence: Synthetic oligonucleotide
aacacggacgucgcuacuc

SEQ ID NO: 2174307 - RNA, 19 nt, Artificial Sequence
  Description of Artificial Sequence: Synthetic oligonucleotide
ccucauggcaacaacaagc

SEQ ID NO: 2174308 - RNA, 19 nt, Artificial Sequence
  Description of Artificial Sequence: Synthetic oligonucleotide
accauuccaagugguagcc

SEQ ID NO: 2174309 - RNA, 19 nt, Artificial Sequence
  Description of Artificial Sequence: Synthetic oligonucleotide
uacgccuucugccccaaag

SEQ ID NO: 2174310 - RNA, 19 nt, Artificial Sequence
  Description of Artificial Sequence: Synthetic oligonucleotide
ugagcuccccacaacagaa

SEQ ID NO: 2174311 - RNA, 19 nt, Artificial Sequence
  Description of Artificial Sequence: Synthetic oligonucleotide
caggcauacgccuucugcc

SEQ ID NO: 2174312 - RNA, 19 nt, Artificial Sequence
  Description of Artificial Sequence: Synthetic oligonucleotide
uccucauggcaacaacaag

SEQ ID NO: 2174313 - RNA, 19 nt, Artificial Sequence
  Description of Artificial Sequence: Synthetic oligonucleotide
caaaguaaacagccugagc

SEQ ID NO: 2174314 - RNA, 19 nt, Artificial Sequence
  Description of Artificial Sequence: Synthetic oligonucleotide
cugaauucuguccagugca

SEQ ID NO: 2174315 - RNA, 19 nt, Artificial Sequence
  Description of Artificial Sequence: Synthetic oligonucleotide
cauagggagcauagguacg

SEQ ID NO: 2174316 - RNA, 19 nt, Artificial Sequence
  Description of Artificial Sequence: Synthetic oligonucleotide
gagacagcccaucccacag

SEQ ID NO: 2174317 - RNA, 19 nt, Artificial Sequence
  Description of Artificial Sequence: Synthetic oligonucleotide
aagguggcagggcauguca

SEQ ID NO: 2174318 - RNA, 19 nt, Artificial Sequence
  Description of Artificial Sequence: Synthetic oligonucleotide
acacggacgucgcuacucc

SEQ ID NO: 2174319 - RNA, 19 nt, Artificial Sequence
  Description of Artificial Sequence: Synthetic oligonucleotide
gccauaacggaucagccag

SEQ ID NO: 2174320 - RNA, 19 nt, Artificial Sequence
  Description of Artificial Sequence: Synthetic oligonucleotide
acaauugugccagcgaaca

SEQ ID NO: 2174321 - RNA, 19 nt, Artificial Sequence
  Description of Artificial Sequence: Synthetic oligonucleotide
gaaccugagagcauuguuc

SEQ ID NO: 2174322 - RNA, 19 nt, Artificial Sequence
  Description of Artificial Sequence: Synthetic oligonucleotide
agacaaggauuauuuccag

SEQ ID NO: 2174323 - RNA, 19 nt, Artificial Sequence
  Description of Artificial Sequence: Synthetic oligonucleotide
uucucacuacaugugagga

SEQ ID NO: 2174324 - RNA, 19 nt, Artificial Sequence
  Description of Artificial Sequence: Synthetic oligonucleotide
uagguacgcaccacggacc

SEQ ID NO: 2174325 - RNA, 19 nt, Artificial Sequence
  Description of Artificial Sequence: Synthetic oligonucleotide
uccuuaaggcucaccaccu

SEQ ID NO: 2174326 - RNA, 19 nt, Artificial Sequence
  Description of Artificial Sequence: Synthetic oligonucleotide
gacgucgcuacucccagug

SEQ ID NO: 2174327 - RNA, 19 nt, Artificial Sequence
  Description of Artificial Sequence: Synthetic oligonucleotide
cugagagcauuguucauuc

SEQ ID NO: 2174328 - RNA, 19 nt, Artificial Sequence
  Description of Artificial Sequence: Synthetic oligonucleotide
ucugaagcugggucgacaa

SEQ ID NO: 2174329 - RNA, 19 nt, Artificial Sequence
  Description of Artificial Sequence: Synthetic oligonucleotide
aacggaucagccaguaugu

SEQ ID NO: 2174330 - RNA, 19 nt, Artificial Sequence
  Description of Artificial Sequence: Synthetic oligonucleotide
ucuggacgguuucuguuca

SEQ ID NO: 2174331 - RNA, 19 nt, Artificial Sequence
  Description of Artificial Sequence: Synthetic oligonucleotide
cuucguuggccccugcugc

SEQ ID NO: 2174332 - RNA, 19 nt, Artificial Sequence
  Description of Artificial Sequence: Synthetic oligonucleotide
aagugguagcccacagccc

SEQ ID NO: 2174333 - RNA, 19 nt, Artificial Sequence
  Description of Artificial Sequence: Synthetic oligonucleotide
gacgguuucuguucaggac

SEQ ID NO: 2174334 - RNA, 19 nt, Artificial Sequence
  Description of Artificial Sequence: Synthetic oligonucleotide
aggaaagaucagaagcccg

SEQ ID NO: 2174335 - RNA, 19 nt, Artificial Sequence
  Description of Artificial Sequence: Synthetic oligonucleotide
cauggagacagcccauccc

SEQ ID NO: 2174336 - RNA, 19 nt, Artificial Sequence
  Description of Artificial Sequence: Synthetic oligonucleotide
caaccauucccaguugagg

SEQ ID NO: 2174337 - RNA, 19 nt, Artificial Sequence
  Description of Artificial Sequence: Synthetic oligonucleotide
ugaggaaggguggaagaca

SEQ ID NO: 2174338 - RNA, 19 nt, Artificial Sequence
  Description of Artificial Sequence: Synthetic oligonucleotide
cucucgacgcuccaggaug

SEQ ID NO: 2174339 - RNA, 19 nt, Artificial Sequence
  Description of Artificial Sequence: Synthetic oligonucleotide
gcauuguucauuccccagg

SEQ ID NO: 2174340 - RNA, 19 nt, Artificial Sequence
  Description of Artificial Sequence: Synthetic oligonucleotide
cuugccuagcagcucauuc

SEQ ID NO: 2174341 - RNA, 19 nt, Artificial Sequence
  Description of Artificial Sequence: Synthetic oligonucleotide
cacaucaagggagccaggg

SEQ ID NO: 2174342 - RNA, 19 nt, Artificial Sequence
  Description of Artificial Sequence: Synthetic oligonucleotide
aucagauguauguucugaa

SEQ ID NO: 2174343 - RNA, 19 nt, Artificial Sequence
  Description of Artificial Sequence: Synthetic oligonucleotide
aauuccaguuuguccuuaa

SEQ ID NO: 2174344 - RNA, 19 nt, Artificial Sequence
  Description of Artificial Sequence: Synthetic oligonucleotide
uugagggcaagccccuccc

SEQ ID NO: 2174345 - RNA, 19 nt, Artificial Sequence
  Description of Artificial Sequence: Synthetic oligonucleotide
gaaaggugacauagggagc

SEQ ID NO: 2174346 - RNA, 19 nt, Artificial Sequence
  Description of Artificial Sequence: Synthetic oligonucleotide
ggauccuuuccccugauga

SEQ ID NO: 2174347 - RNA, 19 nt, Artificial Sequence
  Description of Artificial Sequence: Synthetic oligonucleotide
cauuccaagugguagccca

SEQ ID NO: 2174348 - RNA, 19 nt, Artificial Sequence
  Description of Artificial Sequence: Synthetic oligonucleotide
aucagaagcccgcagucau

SEQ ID NO: 2174349 - RNA, 19 nt, Artificial Sequence
  Description of Artificial Sequence: Synthetic oligonucleotide
agccauaacggaucagcca

SEQ ID NO: 2174350 - RNA, 19 nt, Artificial Sequence
  Description of Artificial Sequence: Synthetic oligonucleotide
gggagcaacacggacgucg

SEQ ID NO: 2174351 - RNA, 19 nt, Artificial Sequence
  Description of Artificial Sequence: Synthetic oligonucleotide
cuguucaggacugcuuugg

SEQ ID NO: 2174352 - RNA, 19 nt, Artificial Sequence
  Description of Artificial Sequence: Synthetic oligonucleotide
ucucgacgcuccaggaugc

SEQ ID NO: 2174353 - RNA, 19 nt, Artificial Sequence
  Description of Artificial Sequence: Synthetic oligonucleotide
agagugagcagcaaagcaa

SEQ ID NO: 2174354 - RNA, 19 nt, Artificial Sequence
  Description of Artificial Sequence: Synthetic oligonucleotide
ugggucgacaagguggcag

SEQ ID NO: 2174355 - RNA, 19 nt, Artificial Sequence
  Description of Artificial Sequence: Synthetic oligonucleotide
uuucuguucaggacugcuu

SEQ ID NO: 2174356 - RNA, 19 nt, Artificial Sequence
  Description of Artificial Sequence: Synthetic oligonucleotide
caacaagccccaaccauuc

SEQ ID NO: 2174357 - RNA, 19 nt, Artificial Sequence
  Description of Artificial Sequence: Synthetic oligonucleotide
uucugccccaaaguaaaca

SEQ ID NO: 2174358 - RNA, 19 nt, Artificial Sequence
  Description of Artificial Sequence: Synthetic oligonucleotide
ccaguugagggcaagcccc

SEQ ID NO: 2174359 - RNA, 19 nt, Artificial Sequence
  Description of Artificial Sequence: Synthetic oligonucleotide
cagaagcccgcagucaugg

SEQ ID NO: 2174360 - RNA, 19 nt, Artificial Sequence
  Description of Artificial Sequence: Synthetic oligonucleotide
ucucacuacaugugaggaa

SEQ ID NO: 2174361 - RNA, 19 nt, Artificial Sequence
  Description of Artificial Sequence: Synthetic oligonucleotide
agacauggaggugacccuc

SEQ ID NO: 2174362 - RNA, 19 nt, Artificial Sequence
  Description of Artificial Sequence: Synthetic oligonucleotide
ggugacauagggagcauag

SEQ ID NO: 2174363 - RNA, 19 nt, Artificial Sequence
  Description of Artificial Sequence: Synthetic oligonucleotide
acaugacaucuacggcccc

SEQ ID NO: 2174364 - RNA, 19 nt, Artificial Sequence
  Description of Artificial Sequence: Synthetic oligonucleotide
gcugauaaagggacaauug

SEQ ID NO: 2174365 - RNA, 19 nt, Artificial Sequence
  Description of Artificial Sequence: Synthetic oligonucleotide
cuuuaauuagguucucacu

SEQ ID NO: 2174366 - RNA, 19 nt, Artificial Sequence
  Description of Artificial Sequence: Synthetic oligonucleotide
agggacaauugugccagcg

SEQ ID NO: 2174367 - RNA, 19 nt, Artificial Sequence
  Description of Artificial Sequence: Synthetic oligonucleotide
aggcucaccaccugugugu

SEQ ID NO: 2174368 - RNA, 19 nt, Artificial Sequence
  Description of Artificial Sequence: Synthetic oligonucleotide
uccccugaugaaccauucc

SEQ ID NO: 2174369 - RNA, 19 nt, Artificial Sequence
  Description of Artificial Sequence: Synthetic oligonucleotide
guugagggcaagccccucc

SEQ ID NO: 2174370 - RNA, 19 nt, Artificial Sequence
  Description of Artificial Sequence: Synthetic oligonucleotide
gacaauugugccagcgaac

SEQ ID NO: 2174371 - RNA, 19 nt, Artificial Sequence
  Description of Artificial Sequence: Synthetic oligonucleotide
ugagagcauuguucauucc

SEQ ID NO: 2174372 - RNA, 19 nt, Artificial Sequence
  Description of Artificial Sequence: Synthetic oligonucleotide
ggcagggcaugucauagcc

SEQ ID NO: 2174373 - RNA, 19 nt, Artificial Sequence
  Description of Artificial Sequence: Synthetic oligonucleotide
cugauaaagggacaauugu

SEQ ID NO: 2174374 - RNA, 19 nt, Artificial Sequence
  Description of Artificial Sequence: Synthetic oligonucleotide
uucucuggacgguuucugu

SEQ ID NO: 2174375 - RNA, 19 nt, Artificial Sequence
  Description of Artificial Sequence: Synthetic oligonucleotide
caggccacaugacaucuac

SEQ ID NO: 2174376 - RNA, 19 nt, Artificial Sequence
  Description of Artificial Sequence: Synthetic oligonucleotide
uaaacagccugagcucccc

SEQ ID NO: 2174377 - RNA, 19 nt, Artificial Sequence
  Description of Artificial Sequence: Synthetic oligonucleotide
aagccccaaccauucccag

SEQ ID NO: 2174378 - RNA, 19 nt, Artificial Sequence
  Description of Artificial Sequence: Synthetic oligonucleotide
gauccuuuccccugaugaa

SEQ ID NO: 2174379 - RNA, 19 nt, Artificial Sequence
  Description of Artificial Sequence: Synthetic oligonucleotide
cucccuacagugcucccag

SEQ ID NO: 2174380 - RNA, 19 nt, Artificial Sequence
  Description of Artificial Sequence: Synthetic oligonucleotide
agccgggagcaacacggac

SEQ ID NO: 2174381 - RNA, 19 nt, Artificial Sequence
  Description of Artificial Sequence: Synthetic oligonucleotide
guauagccauaacggauca

SEQ ID NO: 2174382 - RNA, 19 nt, Artificial Sequence
  Description of Artificial Sequence: Synthetic oligonucleotide
auagcacaggccacaugac

SEQ ID NO: 2174383 - RNA, 19 nt, Artificial Sequence
  Description of Artificial Sequence: Synthetic oligonucleotide
agcugauaaagggacaauu

SEQ ID NO: 2174384 - RNA, 19 nt, Artificial Sequence
  Description of Artificial Sequence: Synthetic oligonucleotide
gugacauagggagcauagg

SEQ ID NO: 2174385 - RNA, 19 nt, Artificial Sequence
  Description of Artificial Sequence: Synthetic oligonucleotide
caaggauuauuuccaggca

SEQ ID NO: 2174386 - RNA, 19 nt, Artificial Sequence
  Description of Artificial Sequence: Synthetic oligonucleotide
uuccuuccccugagaaucc

SEQ ID NO: 2174387 - RNA, 19 nt, Artificial Sequence
  Description of Artificial Sequence: Synthetic oligonucleotide
gacauagggagcauaggua

SEQ ID NO: 2174388 - RNA, 19 nt, Artificial Sequence
  Description of Artificial Sequence: Synthetic oligonucleotide
auuccaagugguagcccac

SEQ ID NO: 2174389 - RNA, 19 nt, Artificial Sequence
  Description of Artificial Sequence: Synthetic oligonucleotide
aacuacaacuagacaugga

SEQ ID NO: 2174390 - RNA, 19 nt, Artificial Sequence
  Description of Artificial Sequence: Synthetic oligonucleotide
caacagaaaugugcuuucc

SEQ ID NO: 2174391 - RNA, 19 nt, Artificial Sequence
  Description of Artificial Sequence: Synthetic oligonucleotide
agcuuucgguccucucgac

SEQ ID NO: 2174392 - RNA, 19 nt, Artificial Sequence
  Description of Artificial Sequence: Synthetic oligonucleotide
agcccgcagucauggagac

SEQ ID NO: 2174393 - RNA, 19 nt, Artificial Sequence
  Description of Artificial Sequence: Synthetic oligonucleotide
cugagcccuccauuaauuc

SEQ ID NO: 2174394 - RNA, 19 nt, Artificial Sequence
  Description of Artificial Sequence: Synthetic oligonucleotide
agcuccccacaacagaaau

SEQ ID NO: 2174395 - RNA, 19 nt, Artificial Sequence
  Description of Artificial Sequence: Synthetic oligonucleotide
agguacgcaccacggacca

SEQ ID NO: 2174396 - RNA, 19 nt, Artificial Sequence
  Description of Artificial Sequence: Synthetic oligonucleotide
caauugugccagcgaacag

SEQ ID NO: 2174397 - RNA, 19 nt, Artificial Sequence
  Description of Artificial Sequence: Synthetic oligonucleotide
cacggaccauagcacaggc

SEQ ID NO: 2174398 - RNA, 19 nt, Artificial Sequence
  Description of Artificial Sequence: Synthetic oligonucleotide
guucauuccccagggcucc

SEQ ID NO: 2174399 - RNA, 19 nt, Artificial Sequence
  Description of Artificial Sequence: Synthetic oligonucleotide
gcuguauagccauaacgga

SEQ ID NO: 2174400 - RNA, 19 nt, Artificial Sequence
  Description of Artificial Sequence: Synthetic oligonucleotide
acaacaagccccaaccauu

SEQ ID NO: 2174401 - RNA, 19 nt, Artificial Sequence
  Description of Artificial Sequence: Synthetic oligonucleotide
cagcucauucagcuuucgg

SEQ ID NO: 2174402 - RNA, 19 nt, Artificial Sequence
  Description of Artificial Sequence: Synthetic oligonucleotide
uuccccugaugaaccauuc

SEQ ID NO: 2174403 - RNA, 19 nt, Artificial Sequence
  Description of Artificial Sequence: Synthetic oligonucleotide
uuucgguccucucgacgcu

SEQ ID NO: 2174404 - RNA, 19 nt, Artificial Sequence
  Description of Artificial Sequence: Synthetic oligonucleotide
cucuacaggcuggggaucc

SEQ ID NO: 2174405 - RNA, 19 nt, Artificial Sequence
  Description of Artificial Sequence: Synthetic oligonucleotide
agccagggaaacuucugaa

SEQ ID NO: 2174406 - RNA, 19 nt, Artificial Sequence
  Description of Artificial Sequence: Synthetic oligonucleotide
gggucgacaagguggcagg

SEQ ID NO: 2174407 - RNA, 19 nt, Artificial Sequence
  Description of Artificial Sequence: Synthetic oligonucleotide
gaggaaggguggaagacaa

SEQ ID NO: 2174408 - RNA, 19 nt, Artificial Sequence
  Description of Artificial Sequence: Synthetic oligonucleotide
uggagacagcccaucccac

SEQ ID NO: 2174409 - RNA, 19 nt, Artificial Sequence
  Description of Artificial Sequence: Synthetic oligonucleotide
gacauggaggugacccucc

SEQ ID NO: 2174410 - RNA, 19 nt, Artificial Sequence
  Description of Artificial Sequence: Synthetic oligonucleotide
cuacagugcucccaggaaa

SEQ ID NO: 2174411 - RNA, 19 nt, Artificial Sequence
  Description of Artificial Sequence: Synthetic oligonucleotide
aguuuguccuuaaggcuca

SEQ ID NO: 2174412 - RNA, 19 nt, Artificial Sequence
  Description of Artificial Sequence: Synthetic oligonucleotide
cugaugaaccauuccaagu

SEQ ID NO: 2174413 - RNA, 19 nt, Artificial Sequence
  Description of Artificial Sequence: Synthetic oligonucleotide
gaucagaagcccgcaguca

SEQ ID NO: 2174414 - RNA, 19 nt, Artificial Sequence
  Description of Artificial Sequence: Synthetic oligonucleotide
cucccaggaaagaucagaa

SEQ ID NO: 2174415 - RNA, 19 nt, Artificial Sequence
  Description of Artificial Sequence: Synthetic oligonucleotide
ggacaauugugccagcgaa

SEQ ID NO: 2174416 - RNA, 19 nt, Artificial Sequence
  Description of Artificial Sequence: Synthetic oligonucleotide
ugagggcaagccccucccc

SEQ ID NO: 2174417 - RNA, 19 nt, Artificial Sequence
  Description of Artificial Sequence: Synthetic oligonucleotide
agccaguauguuuguggcu

SEQ ID NO: 2174418 - RNA, 19 nt, Artificial Sequence
  Description of Artificial Sequence: Synthetic oligonucleotide
uucguuggccccugcugcu

SEQ ID NO: 2174419 - RNA, 19 nt, Artificial Sequence
  Description of Artificial Sequence: Synthetic oligonucleotide
aaauuccaguuuguccuua

SEQ ID NO: 2174420 - RNA, 19 nt, Artificial Sequence
  Description of Artificial Sequence: Synthetic oligonucleotide
gcuuucgguccucucgacg

SEQ ID NO: 2174421 - RNA, 19 nt, Artificial Sequence
  Description of Artificial Sequence: Synthetic oligonucleotide
cuguauagccauaacggau

SEQ ID NO: 2174422 - RNA, 19 nt, Artificial Sequence
  Description of Artificial Sequence: Synthetic oligonucleotide
acgucgcuacucccagugg

SEQ ID NO: 2174423 - RNA, 19 nt, Artificial Sequence
  Description of Artificial Sequence: Synthetic oligonucleotide
auaacggaucagccaguau

SEQ ID NO: 2174424 - RNA, 19 nt, Artificial Sequence
  Description of Artificial Sequence: Synthetic oligonucleotide
ggagcauagguacgcacca

SEQ ID NO: 2174425 - RNA, 19 nt, Artificial Sequence
  Description of Artificial Sequence: Synthetic oligonucleotide
gcaugucauagccccgugg

SEQ ID NO: 2174426 - RNA, 19 nt, Artificial Sequence
  Description of Artificial Sequence: Synthetic oligonucleotide
guaaacagccugagcuccc

SEQ ID NO: 2174427 - RNA, 19 nt, Artificial Sequence
  Description of Artificial Sequence: Synthetic oligonucleotide
cauagguacgcaccacgga

SEQ ID NO: 2174428 - RNA, 19 nt, Artificial Sequence
  Description of Artificial Sequence: Synthetic oligonucleotide
acggaccauagcacaggcc

SEQ ID NO: 2174429 - RNA, 19 nt, Artificial Sequence
  Description of Artificial Sequence: Synthetic oligonucleotide
gagggcaagccccucccca

SEQ ID NO: 2174430 - RNA, 19 nt, Artificial Sequence
  Description of Artificial Sequence: Synthetic oligonucleotide
ggcaacaacaagccccaac

SEQ ID NO: 2174431 - RNA, 19 nt, Artificial Sequence
  Description of Artificial Sequence: Synthetic oligonucleotide
ggauuauuuccaggcauac

SEQ ID NO: 2174432 - RNA, 19 nt, Artificial Sequence
  Description of Artificial Sequence: Synthetic oligonucleotide
uccucucgacgcuccagga

SEQ ID NO: 2174433 - RNA, 19 nt, Artificial Sequence
  Description of Artificial Sequence: Synthetic oligonucleotide
ugcucccaggaaagaucag

SEQ ID NO: 2174434 - RNA, 19 nt, Artificial Sequence
  Description of Artificial Sequence: Synthetic oligonucleotide
uucccaguugagggcaagc

SEQ ID NO: 2174435 - RNA, 19 nt, Artificial Sequence
  Description of Artificial Sequence: Synthetic oligonucleotide
ugcuuuccuuccccugaga

SEQ ID NO: 2174436 - RNA, 19 nt, Artificial Sequence
  Description of Artificial Sequence: Synthetic oligonucleotide
aggugccacuuuaauuagg

SEQ ID NO: 2174437 - RNA, 19 nt, Artificial Sequence
  Description of Artificial Sequence: Synthetic oligonucleotide
accacggaccauagcacag

SEQ ID NO: 2174438 - RNA, 19 nt, Artificial Sequence
  Description of Artificial Sequence: Synthetic oligonucleotide
gaccauagcacaggccaca

SEQ ID NO: 2174439 - RNA, 19 nt, Artificial Sequence
  Description of Artificial Sequence: Synthetic oligonucleotide
ccaggcauacgccuucugc

SEQ ID NO: 2174440 - RNA, 19 nt, Artificial Sequence
  Description of Artificial Sequence: Synthetic oligonucleotide
gucgcuacucccaguggcc

SEQ ID NO: 2174441 - RNA, 19 nt, Artificial Sequence
  Description of Artificial Sequence: Synthetic oligonucleotide
ccaaccauucccaguugag

SEQ ID NO: 2174442 - RNA, 19 nt, Artificial Sequence
  Description of Artificial Sequence: Synthetic oligonucleotide
auagccccguggaucacag

SEQ ID NO: 2174443 - RNA, 19 nt, Artificial Sequence
  Description of Artificial Sequence: Synthetic oligonucleotide
cuuaaggcucaccaccugu

SEQ ID NO: 2174444 - RNA, 19 nt, Artificial Sequence
  Description of Artificial Sequence: Synthetic oligonucleotide
acauggaggugacccuccu

SEQ ID NO: 2174445 - RNA, 19 nt, Artificial Sequence
  Description of Artificial Sequence: Synthetic oligonucleotide
gccgggagcaacacggacg

SEQ ID NO: 2174446 - RNA, 19 nt, Artificial Sequence
  Description of Artificial Sequence: Synthetic oligonucleotide
caccacggaccauagcaca

SEQ ID NO: 2174447 - RNA, 19 nt, Artificial Sequence
  Description of Artificial Sequence: Synthetic oligonucleotide
uagggagcauagguacgca

SEQ ID NO: 2174448 - RNA, 19 nt, Artificial Sequence
  Description of Artificial Sequence: Synthetic oligonucleotide
cacggacgucgcuacuccc

SEQ ID NO: 2174449 - RNA, 19 nt, Artificial Sequence
  Description of Artificial Sequence: Synthetic oligonucleotide
ccaguauguuuguggcugg

SEQ ID NO: 2174450 - RNA, 19 nt, Artificial Sequence
  Description of Artificial Sequence: Synthetic oligonucleotide
gucgacaagguggcagggc

SEQ ID NO: 2174451 - RNA, 19 nt, Artificial Sequence
  Description of Artificial Sequence: Synthetic oligonucleotide
gcaacacggacgucgcuac

SEQ ID NO: 2174452 - RNA, 19 nt, Artificial Sequence
  Description of Artificial Sequence: Synthetic oligonucleotide
cccaaaguaaacagccuga

SEQ ID NO: 2174453 - RNA, 19 nt, Artificial Sequence
  Description of Artificial Sequence: Synthetic oligonucleotide
ggacgguuucuguucagga

SEQ ID NO: 2174454 - RNA, 19 nt, Artificial Sequence
  Description of Artificial Sequence: Synthetic oligonucleotide
gugccagcgaacaggaaaa

SEQ ID NO: 2174455 - RNA, 19 nt, Artificial Sequence
  Description of Artificial Sequence: Synthetic oligonucleotide
gcuagccgggagcaacacg

SEQ ID NO: 2174456 - RNA, 19 nt, Artificial Sequence
  Description of Artificial Sequence: Synthetic oligonucleotide
cagcuuucgguccucucga

SEQ ID NO: 2174457 - RNA, 19 nt, Artificial Sequence
  Description of Artificial Sequence: Synthetic oligonucleotide
cuggacgguuucuguucag

SEQ ID NO: 2174458 - RNA, 19 nt, Artificial Sequence
  Description of Artificial Sequence: Synthetic oligonucleotide
auuuccaggcauacgccuu

SEQ ID NO: 2174459 - RNA, 19 nt, Artificial Sequence
  Description of Artificial Sequence: Synthetic oligonucleotide
ggaaacuucugaauucugu

SEQ ID NO: 2174460 - RNA, 19 nt, Artificial Sequence
  Description of Artificial Sequence: Synthetic oligonucleotide
guggaucacagggaccuga

SEQ ID NO: 2174461 - RNA, 19 nt, Artificial Sequence
  Description of Artificial Sequence: Synthetic oligonucleotide
gagcauagguacgcaccac

SEQ ID NO: 2174462 - RNA, 19 nt, Artificial Sequence
  Description of Artificial Sequence: Synthetic oligonucleotide
gcugggucgacaagguggc

SEQ ID NO: 2174463 - RNA, 19 nt, Artificial Sequence
  Description of Artificial Sequence: Synthetic oligonucleotide
uggaggugacccuccucau

SEQ ID NO: 2174464 - RNA, 19 nt, Artificial Sequence
  Description of Artificial Sequence: Synthetic oligonucleotide
cggaccauagcacaggcca

SEQ ID NO: 2174465 - RNA, 19 nt, Artificial Sequence
  Description of Artificial Sequence: Synthetic oligonucleotide
ggguggaagacaaggauua

SEQ ID NO: 2174466 - RNA, 19 nt, Artificial Sequence
  Description of Artificial Sequence: Synthetic oligonucleotide
gucauggagacagcccauc

SEQ ID NO: 2174467 - RNA, 19 nt, Artificial Sequence
  Description of Artificial Sequence: Synthetic oligonucleotide
ggaucacagggaccugagc

SEQ ID NO: 2174468 - RNA, 19 nt, Artificial Sequence
  Description of Artificial Sequence: Synthetic oligonucleotide
accugagagcauuguucau

SEQ ID NO: 2174469 - RNA, 19 nt, Artificial Sequence
  Description of Artificial Sequence: Synthetic oligonucleotide
gaagcugggucgacaaggu

SEQ ID NO: 2174470 - RNA, 19 nt, Artificial Sequence
  Description of Artificial Sequence: Synthetic oligonucleotide
gaccugagcccuccauuaa

SEQ ID NO: 2174471 - RNA, 19 nt, Artificial Sequence
  Description of Artificial Sequence: Synthetic oligonucleotide
ggagcaacacggacgucgc

SEQ ID NO: 2174472 - RNA, 19 nt, Artificial Sequence
  Description of Artificial Sequence: Synthetic oligonucleotide
ccagagugagcagcaaagc

SEQ ID NO: 2174473 - RNA, 19 nt, Artificial Sequence
  Description of Artificial Sequence: Synthetic oligonucleotide
cccacaacagaaaugugcu

SEQ ID NO: 2174474 - RNA, 19 nt, Artificial Sequence
  Description of Artificial Sequence: Synthetic oligonucleotide
ggugccacuuuaauuaggu

SEQ ID NO: 2174475 - RNA, 19 nt, Artificial Sequence
  Description of Artificial Sequence: Synthetic oligonucleotide
acggacgucgcuacuccca

SEQ ID NO: 2174476 - RNA, 19 nt, Artificial Sequence
  Description of Artificial Sequence: Synthetic oligonucleotide
uagccccguggaucacagg

SEQ ID NO: 2174477 - RNA, 19 nt, Artificial Sequence
  Description of Artificial Sequence: Synthetic oligonucleotide
ggugacccuccucauggca

SEQ ID NO: 2174478 - RNA, 19 nt, Artificial Sequence
  Description of Artificial Sequence: Synthetic oligonucleotide
auucagcuuucgguccucu

SEQ ID NO: 2174479 - RNA, 19 nt, Artificial Sequence
  Description of Artificial Sequence: Synthetic oligonucleotide
agggaccugagcccuccau

SEQ ID NO: 2174480 - RNA, 19 nt, Artificial Sequence
  Description of Artificial Sequence: Synthetic oligonucleotide
cucaggugccacuuuaauu

SEQ ID NO: 2174481 - RNA, 19 nt, Artificial Sequence
  Description of Artificial Sequence: Synthetic oligonucleotide
guacgcaccacggaccaua

SEQ ID NO: 2174482 - RNA, 19 nt, Artificial Sequence
  Description of Artificial Sequence: Synthetic oligonucleotide
gcccaucccacagaugcag

SEQ ID NO: 2174483 - RNA, 19 nt, Artificial Sequence
  Description of Artificial Sequence: Synthetic oligonucleotide
cgucgcuacucccaguggc

SEQ ID NO: 2174484 - RNA, 19 nt, Artificial Sequence
  Description of Artificial Sequence: Synthetic oligonucleotide
agggaaccugagagcauug

SEQ ID NO: 2174485 - RNA, 19 nt, Artificial Sequence
  Description of Artificial Sequence: Synthetic oligonucleotide
uucgguccucucgacgcuc

SEQ ID NO: 2174486 - RNA, 19 nt, Artificial Sequence
  Description of Artificial Sequence: Synthetic oligonucleotide
cauaacggaucagccagua

SEQ ID NO: 2174487 - RNA, 19 nt, Artificial Sequence
  Description of Artificial Sequence: Synthetic oligonucleotide
uccuugccuagcagcucau

SEQ ID NO: 2174488 - RNA, 19 nt, Artificial Sequence
  Description of Artificial Sequence: Synthetic oligonucleotide
ggucgacaagguggcaggg

SEQ ID NO: 2174489 - RNA, 19 nt, Artificial Sequence
  Description of Artificial Sequence: Synthetic oligonucleotide
gagcccuccauuaauucuu

SEQ ID NO: 2174490 - RNA, 19 nt, Artificial Sequence
  Description of Artificial Sequence: Synthetic oligonucleotide
gcucccaggaaagaucaga

SEQ ID NO: 2174491 - RNA, 19 nt, Artificial Sequence
  Description of Artificial Sequence: Synthetic oligonucleotide
ucgacgcuccaggaugcuc

SEQ ID NO: 2174492 - RNA, 19 nt, Artificial Sequence
  Description of Artificial Sequence: Synthetic oligonucleotide
cauucagcuuucgguccuc

SEQ ID NO: 2174493 - RNA, 19 nt, Artificial Sequence
  Description of Artificial Sequence: Synthetic oligonucleotide
cauagccccguggaucaca

SEQ ID NO: 2174494 - RNA, 19 nt, Artificial Sequence
  Description of Artificial Sequence: Synthetic oligonucleotide
gggcaaauuccaguuuguc

SEQ ID NO: 2174495 - RNA, 19 nt, Artificial Sequence
  Description of Artificial Sequence: Synthetic oligonucleotide
ccacggaccauagcacagg

SEQ ID NO: 2174496 - RNA, 19 nt, Artificial Sequence
  Description of Artificial Sequence: Synthetic oligonucleotide
cuccccagggaaccugaga

SEQ ID NO: 2174497 - RNA, 19 nt, Artificial Sequence
  Description of Artificial Sequence: Synthetic oligonucleotide
guggaagacaaggauuauu

SEQ ID NO: 2174498 - RNA, 19 nt, Artificial Sequence
  Description of Artificial Sequence: Synthetic oligonucleotide
ccuuaaggcucaccaccug

SEQ ID NO: 2174499 - RNA, 19 nt, Artificial Sequence
  Description of Artificial Sequence: Synthetic oligonucleotide
ccccguggaucacagggac

SEQ ID NO: 2174500 - RNA, 19 nt, Artificial Sequence
  Description of Artificial Sequence: Synthetic oligonucleotide
guucugaagcugggucgac

SEQ ID NO: 2174501 - RNA, 19 nt, Artificial Sequence
  Description of Artificial Sequence: Synthetic oligonucleotide
ucauagccccguggaucac

SEQ ID NO: 2174502 - RNA, 19 nt, Artificial Sequence
  Description of Artificial Sequence: Synthetic oligonucleotide
ggaccauagcacaggccac

SEQ ID NO: 2174503 - RNA, 19 nt, Artificial Sequence
  Description of Artificial Sequence: Synthetic oligonucleotide
caaauuccaguuuguccuu

SEQ ID NO: 2174504 - RNA, 19 nt, Artificial Sequence
  Description of Artificial Sequence: Synthetic oligonucleotide
augcagccuuccucuucgu

SEQ ID NO: 2174505 - RNA, 19 nt, Artificial Sequence
  Description of Artificial Sequence: Synthetic oligonucleotide
gcaccacggaccauagcac

SEQ ID NO: 2174506 - RNA, 19 nt, Artificial Sequence
  Description of Artificial Sequence: Synthetic oligonucleotide
acagcccaucccacagaug

SEQ ID NO: 2174507 - RNA, 19 nt, Artificial Sequence
  Description of Artificial Sequence: Synthetic oligonucleotide
gcagaaggggccagaguga

SEQ ID NO: 2174508 - RNA, 19 nt, Artificial Sequence
  Description of Artificial Sequence: Synthetic oligonucleotide
cccguggaucacagggacc

SEQ ID NO: 2174509 - RNA, 19 nt, Artificial Sequence
  Description of Artificial Sequence: Synthetic oligonucleotide
ggaaccugagagcauuguu

SEQ ID NO: 2174510 - RNA, 19 nt, Artificial Sequence
  Description of Artificial Sequence: Synthetic oligonucleotide
gagcuccccacaacagaaa

SEQ ID NO: 2174511 - RNA, 19 nt, Artificial Sequence
  Description of Artificial Sequence: Synthetic oligonucleotide
guuggccccugcugcugca

SEQ ID NO: 2174512 - RNA, 19 nt, Artificial Sequence
  Description of Artificial Sequence: Synthetic oligonucleotide
agcccaucccacagaugca

SEQ ID NO: 2174513 - RNA, 19 nt, Artificial Sequence
  Description of Artificial Sequence: Synthetic oligonucleotide
cagcacgccccggaccggc

SEQ ID NO: 2174514 - RNA, 19 nt, Artificial Sequence
  Description of Artificial Sequence: Synthetic oligonucleotide
cgcugcgcccgcuagccgg

SEQ ID NO: 2174515 - RNA, 19 nt, Artificial Sequence
  Description of Artificial Sequence: Synthetic oligonucleotide
guuuguccuuaaggcucac

SEQ ID NO: 2174516 - RNA, 19 nt, Artificial Sequence
  Description of Artificial Sequence: Synthetic oligonucleotide
cauucccaguugagggcaa

SEQ ID NO: 2174517 - RNA, 19 nt, Artificial Sequence
  Description of Artificial Sequence: Synthetic oligonucleotide
gcauacgccuucugcccca

SEQ ID NO: 2174518 - RNA, 19 nt, Artificial Sequence
  Description of Artificial Sequence: Synthetic oligonucleotide
ggggaugcagaaggggcca

SEQ ID NO: 2174519 - RNA, 19 nt, Artificial Sequence
  Description of Artificial Sequence: Synthetic oligonucleotide
ccauuccaagugguagccc

SEQ ID NO: 2174520 - RNA, 19 nt, Artificial Sequence
  Description of Artificial Sequence: Synthetic oligonucleotide
acggaucagccaguauguu

SEQ ID NO: 2174521 - RNA, 19 nt, Artificial Sequence
  Description of Artificial Sequence: Synthetic oligonucleotide
ccuacagugcucccaggaa

SEQ ID NO: 2174522 - RNA, 19 nt, Artificial Sequence
  Description of Artificial Sequence: Synthetic oligonucleotide
gccagggaaacuucugaau

SEQ ID NO: 2174523 - RNA, 19 nt, Artificial Sequence
  Description of Artificial Sequence: Synthetic oligonucleotide
caucccacagaugcagccu

SEQ ID NO: 2174524 - RNA, 19 nt, Artificial Sequence
  Description of Artificial Sequence: Synthetic oligonucleotide
gccuucugccccaaaguaa

SEQ ID NO: 2174525 - RNA, 19 nt, Artificial Sequence
  Description of Artificial Sequence: Synthetic oligonucleotide
cccuccucauggcaacaac

SEQ ID NO: 2174526 - RNA, 19 nt, Artificial Sequence
  Description of Artificial Sequence: Synthetic oligonucleotide
gccccaaccauucccaguu

SEQ ID NO: 2174527 - RNA, 19 nt, Artificial Sequence
  Description of Artificial Sequence: Synthetic oligonucleotide
ccauagcacaggccacaug

SEQ ID NO: 2174528 - RNA, 19 nt, Artificial Sequence
  Description of Artificial Sequence: Synthetic oligonucleotide
ggaccggccccgcgcugcg

SEQ ID NO: 2174529 - RNA, 19 nt, Artificial Sequence
  Description of Artificial Sequence: Synthetic oligonucleotide
gcugcgcccgcuagccggg

SEQ ID NO: 2174530 - RNA, 19 nt, Artificial Sequence
  Description of Artificial Sequence: Synthetic oligonucleotide
auccacuccugagcugaua

SEQ ID NO: 2174531 - RNA, 19 nt, Artificial Sequence
  Description of Artificial Sequence: Synthetic oligonucleotide
gcaaagcaaaucagaugua

SEQ ID NO: 2174532 - RNA, 19 nt, Artificial Sequence
  Description of Artificial Sequence: Synthetic oligonucleotide
gagcaacacggacgucgcu

SEQ ID NO: 2174533 - RNA, 19 nt, Artificial Sequence
  Description of Artificial Sequence: Synthetic oligonucleotide
auacgccuucugccccaaa

SEQ ID NO: 2174534 - RNA, 19 nt, Artificial Sequence
  Description of Artificial Sequence: Synthetic oligonucleotide
cggacgucgcuacucccag

SEQ ID NO: 2174535 - RNA, 19 nt, Artificial Sequence
  Description of Artificial Sequence: Synthetic oligonucleotide
gugccacuuuaauuagguu

SEQ ID NO: 2174536 - RNA, 19 nt, Artificial Sequence
  Description of Artificial Sequence: Synthetic oligonucleotide
gcgcccgcuagccgggagc

SEQ ID NO: 2174537 - RNA, 19 nt, Artificial Sequence
  Description of Artificial Sequence: Synthetic oligonucleotide
cagggaaccugagagcauu

SEQ ID NO: 2174538 - RNA, 19 nt, Artificial Sequence
  Description of Artificial Sequence: Synthetic oligonucleotide
acaggccacaugacaucua

SEQ ID NO: 2174539 - RNA, 19 nt, Artificial Sequence
  Description of Artificial Sequence: Synthetic oligonucleotide
uggcaacaacaagccccaa

SEQ ID NO: 2174540 - RNA, 19 nt, Artificial Sequence
  Description of Artificial Sequence: Synthetic oligonucleotide
ccguggaucacagggaccu

SEQ ID NO: 2174541 - RNA, 19 nt, Artificial Sequence
  Description of Artificial Sequence: Synthetic oligonucleotide
cguuggccccugcugcugc

SEQ ID NO: 2174542 - RNA, 19 nt, Artificial Sequence
  Description of Artificial Sequence: Synthetic oligonucleotide
ccccugagaauccacuccu

SEQ ID NO: 2174543 - RNA, 19 nt, Artificial Sequence
  Description of Artificial Sequence: Synthetic oligonucleotide
ccgggagcaacacggacgu

SEQ ID NO: 2174544 - RNA, 19 nt, Artificial Sequence
  Description of Artificial Sequence: Synthetic oligonucleotide
gggagccagggaaacuucu

SEQ ID NO: 2174545 - RNA, 19 nt, Artificial Sequence
  Description of Artificial Sequence: Synthetic oligonucleotide
ccccaaccauucccaguug

SEQ ID NO: 2174546 - RNA, 19 nt, Artificial Sequence
  Description of Artificial Sequence: Synthetic oligonucleotide
cauacgccuucugccccaa

SEQ ID NO: 2174547 - RNA, 19 nt, Artificial Sequence
  Description of Artificial Sequence: Synthetic oligonucleotide
ccucuacaggcuggggauc

SEQ ID NO: 2174548 - RNA, 19 nt, Artificial Sequence
  Description of Artificial Sequence: Synthetic oligonucleotide
gggcaugucauagccccgu

SEQ ID NO: 2174549 - RNA, 19 nt, Artificial Sequence
  Description of Artificial Sequence: Synthetic oligonucleotide
cgcgcugcgcccgcuagcc

SEQ ID NO: 2174550 - RNA, 19 nt, Artificial Sequence
  Description of Artificial Sequence: Synthetic oligonucleotide
gccccguggaucacaggga

SEQ ID NO: 2174551 - RNA, 19 nt, Artificial Sequence
  Description of Artificial Sequence: Synthetic oligonucleotide
gcgcugcgcccgcuagccg

SEQ ID NO: 2174552 - RNA, 19 nt, Artificial Sequence
  Description of Artificial Sequence: Synthetic oligonucleotide
ccucccuacagugcuccca

SEQ ID NO: 2174553 - RNA, 19 nt, Artificial Sequence
  Description of Artificial Sequence: Synthetic oligonucleotide
ccugagcccuccauuaauu

SEQ ID NO: 2174554 - RNA, 19 nt, Artificial Sequence
  Description of Artificial Sequence: Synthetic oligonucleotide
ccccggaccggccccgcgc

SEQ ID NO: 2174555 - RNA, 19 nt, Artificial Sequence
  Description of Artificial Sequence: Synthetic oligonucleotide
caacacggacgucgcuacu

SEQ ID NO: 2174556 - RNA, 19 nt, Artificial Sequence
  Description of Artificial Sequence: Synthetic oligonucleotide
cgacgcuccaggaugcucu

SEQ ID NO: 2174557 - RNA, 19 nt, Artificial Sequence
  Description of Artificial Sequence: Synthetic oligonucleotide
gguggaagacaaggauuau

SEQ ID NO: 2174558 - RNA, 19 nt, Artificial Sequence
  Description of Artificial Sequence: Synthetic oligonucleotide
ccacuccugagcugauaaa

SEQ ID NO: 2174559 - RNA, 19 nt, Artificial Sequence
  Description of Artificial Sequence: Synthetic oligonucleotide
ccgcuagccgggagcaaca

SEQ ID NO: 2174560 - RNA, 19 nt, Artificial Sequence
  Description of Artificial Sequence: Synthetic oligonucleotide
gaccggccccgcgcugcgc

SEQ ID NO: 2174561 - RNA, 19 nt, Artificial Sequence
  Description of Artificial Sequence: Synthetic oligonucleotide
cccgcgcugcgcccgcuag

SEQ ID NO: 2174562 - RNA, 19 nt, Artificial Sequence
  Description of Artificial Sequence: Synthetic oligonucleotide
ccauaacggaucagccagu

SEQ ID NO: 2174563 - RNA, 19 nt, Artificial Sequence
  Description of Artificial Sequence: Synthetic oligonucleotide
cugggucgacaagguggca

SEQ ID NO: 2174564 - RNA, 19 nt, Artificial Sequence
  Description of Artificial Sequence: Synthetic oligonucleotide
gccccaaaguaaacagccu

SEQ ID NO: 2174565 - RNA, 19 nt, Artificial Sequence
  Description of Artificial Sequence: Synthetic oligonucleotide
ccucuucguuggccccugc

SEQ ID NO: 2174566 - RNA, 19 nt, Artificial Sequence
  Description of Artificial Sequence: Synthetic oligonucleotide
cuacaggcuggggauccuu

SEQ ID NO: 2174567 - RNA, 19 nt, Artificial Sequence
  Description of Artificial Sequence: Synthetic oligonucleotide
ggacgucgcuacucccagu

SEQ ID NO: 2174568 - RNA, 19 nt, Artificial Sequence
  Description of Artificial Sequence: Synthetic oligonucleotide
cggaucagccaguauguuu

SEQ ID NO: 2174569 - RNA, 19 nt, Artificial Sequence
  Description of Artificial Sequence: Synthetic oligonucleotide
ccagcacgccccggaccgg

SEQ ID NO: 2174570 - RNA, 19 nt, Artificial Sequence
  Description of Artificial Sequence: Synthetic oligonucleotide
ccacaacagaaaugugcuu

SEQ ID NO: 2174571 - RNA, 19 nt, Artificial Sequence
  Description of Artificial Sequence: Synthetic oligonucleotide
cucgacgcuccaggaugcu

SEQ ID NO: 2174572 - RNA, 19 nt, Artificial Sequence
  Description of Artificial Sequence: Synthetic oligonucleotide
cgcuagccgggagcaacac

SEQ ID NO: 2174573 - RNA, 19 nt, Artificial Sequence
  Description of Artificial Sequence: Synthetic oligonucleotide
ccggccccgcgcugcgccc

SEQ ID NO: 2174574 - RNA, 19 nt, Artificial Sequence
  Description of Artificial Sequence: Synthetic oligonucleotide
ggggauccuuuccccugau

SEQ ID NO: 2174575 - RNA, 19 nt, Artificial Sequence
  Description of Artificial Sequence: Synthetic oligonucleotide
cugcgcccgcuagccggga

SEQ ID NO: 2174576 - RNA, 19 nt, Artificial Sequence
  Description of Artificial Sequence: Synthetic oligonucleotide
gguacgcaccacggaccau

SEQ ID NO: 2174577 - RNA, 19 nt, Artificial Sequence
  Description of Artificial Sequence: Synthetic oligonucleotide
ccacagccccaaccacaaa

SEQ ID NO: 2174578 - RNA, 19 nt, Artificial Sequence
  Description of Artificial Sequence: Synthetic oligonucleotide
cggccccgcgcugcgcccg

SEQ ID NO: 2174579 - RNA, 19 nt, Artificial Sequence
  Description of Artificial Sequence: Synthetic oligonucleotide
cccggaccggccccgcgcu

SEQ ID NO: 2174580 - RNA, 19 nt, Artificial Sequence
  Description of Artificial Sequence: Synthetic oligonucleotide
ccuugccuagcagcucauu

SEQ ID NO: 2174581 - RNA, 19 nt, Artificial Sequence
  Description of Artificial Sequence: Synthetic oligonucleotide
cgggagcaacacggacguc

SEQ ID NO: 2174582 - RNA, 19 nt, Artificial Sequence
  Description of Artificial Sequence: Synthetic oligonucleotide
ccccgcgcugcgcccgcua

SEQ ID NO: 2174583 - RNA, 19 nt, Artificial Sequence
  Description of Artificial Sequence: Synthetic oligonucleotide
  modified_base (7)..(7): a, c, u, g, unknown or other
uaaaacncaagacaaaccc

SEQ ID NO: 2174584 - RNA, 19 nt, Artificial Sequence
  Description of Artificial Sequence: Synthetic oligonucleotide
uuggauaucacacaaaagc

SEQ ID NO: 2174585 - RNA, 19 nt, Artificial Sequence
  Description of Artificial Sequence: Synthetic oligonucleotide
aaugauaaguuucucuugg

SEQ ID NO: 2174586 - RNA, 19 nt, Artificial Sequence
  Description of Artificial Sequence: Synthetic oligonucleotide
auuuauuaguguuacaagg

SEQ ID NO: 2174587 - RNA, 19 nt, Artificial Sequence
  Description of Artificial Sequence: Synthetic oligonucleotide
aaaagcuacuuacacacac

SEQ ID NO: 2174588 - RNA, 19 nt, Artificial Sequence
  Description of Artificial Sequence: Synthetic oligonucleotide
uuugagaugagccaaaggu

SEQ ID NO: 2174589 - RNA, 19 nt, Artificial Sequence
  Description of Artificial Sequence: Synthetic oligonucleotide
aguguuacaaggcuguucc

SEQ ID NO: 2174590 - RNA, 19 nt, Artificial Sequence
  Description of Artificial Sequence: Synthetic oligonucleotide
aaugcauagaacuuaggug

SEQ ID NO: 2174591 - RNA, 19 nt, Artificial Sequence
  Description of Artificial Sequence: Synthetic oligonucleotide
uuacaauuaaccauuacac

SEQ ID NO: 2174592 - RNA, 19 nt, Artificial Sequence
  Description of Artificial Sequence: Synthetic oligonucleotide
ucuaauauuuugaggauag

SEQ ID NO: 2174593 - RNA, 19 nt, Artificial Sequence
  Description of Artificial Sequence: Synthetic oligonucleotide
acaagucugaaauaaauag

SEQ ID NO: 2174594 - RNA, 19 nt, Artificial Sequence
  Description of Artificial Sequence: Synthetic oligonucleotide
uuuauuaguguuacaaggc

SEQ ID NO: 2174595 - RNA, 19 nt, Artificial Sequence
  Description of Artificial Sequence: Synthetic oligonucleotide
uauuaugucauaaccaugu

SEQ ID NO: 2174596 - RNA, 19 nt, Artificial Sequence
  Description of Artificial Sequence: Synthetic oligonucleotide
aaaugcauagaacuuaggu

SEQ ID NO: 2174597 - RNA, 19 nt, Artificial Sequence
  Description of Artificial Sequence: Synthetic oligonucleotide
acaauuaaccauuacacga

SEQ ID NO: 2174598 - RNA, 19 nt, Artificial Sequence
  Description of Artificial Sequence: Synthetic oligonucleotide
aaccauuacacgaugaagg

SEQ ID NO: 2174599 - RNA, 19 nt, Artificial Sequence
  Description of Artificial Sequence: Synthetic oligonucleotide
uuaacaaugauaaguuucu

SEQ ID NO: 2174600 - RNA, 19 nt, Artificial Sequence
  Description of Artificial Sequence: Synthetic oligonucleotide
uagguguuaacaaugauaa

SEQ ID NO: 2174601 - RNA, 19 nt, Artificial Sequence
  Description of Artificial Sequence: Synthetic oligonucleotide
aguuaaacuaguucucuac

SEQ ID NO: 2174602 - RNA, 19 nt, Artificial Sequence
  Description of Artificial Sequence: Synthetic oligonucleotide
ucaaucuaauauuuugagg

SEQ ID NO: 2174603 - RNA, 19 nt, Artificial Sequence
  Description of Artificial Sequence: Synthetic oligonucleotide
aagcuacuuacacacacac

SEQ ID NO: 2174604 - RNA, 19 nt, Artificial Sequence
  Description of Artificial Sequence: Synthetic oligonucleotide
gauagaagugaacuuuugg

SEQ ID NO: 2174605 - RNA, 19 nt, Artificial Sequence
  Description of Artificial Sequence: Synthetic oligonucleotide
uacaauuaaccauuacacg

SEQ ID NO: 2174606 - RNA, 19 nt, Artificial Sequence
  Description of Artificial Sequence: Synthetic oligonucleotide
uuuauuaugucauaaccau

SEQ ID NO: 2174607 - RNA, 19 nt, Artificial Sequence
  Description of Artificial Sequence: Synthetic oligonucleotide
uuucgaacaagucugaaau

SEQ ID NO: 2174608 - RNA, 19 nt, Artificial Sequence
  Description of Artificial Sequence: Synthetic oligonucleotide
  modified_base (9)..(9): a, c, u, g, unknown or other
uuuaaaacncaagacaaac

SEQ ID NO: 2174609 - RNA, 19 nt, Artificial Sequence
  Description of Artificial Sequence: Synthetic oligonucleotide
aaccauauaaauacauuac

SEQ ID NO: 2174610 - RNA, 19 nt, Artificial Sequence
  Description of Artificial Sequence: Synthetic oligonucleotide
auucacuagacugagugcc

SEQ ID NO: 2174611 - RNA, 19 nt, Artificial Sequence
  Description of Artificial Sequence: Synthetic oligonucleotide
aguggcucaacacagcugg

SEQ ID NO: 2174612 - RNA, 19 nt, Artificial Sequence
  Description of Artificial Sequence: Synthetic oligonucleotide
  modified_base (8)..(8): a, c, u, g, unknown or other
uuaaaacncaagacaaacc

SEQ ID NO: 2174613 - RNA, 19 nt, Artificial Sequence
  Description of Artificial Sequence: Synthetic oligonucleotide
augcauagaacuuaggugu

SEQ ID NO: 2174614 - RNA, 19 nt, Artificial Sequence
  Description of Artificial Sequence: Synthetic oligonucleotide
uagaagugaacuuuuggag

SEQ ID NO: 2174615 - RNA, 19 nt, Artificial Sequence
  Description of Artificial Sequence: Synthetic oligonucleotide
acauucacuagacugagug

SEQ ID NO: 2174616 - RNA, 19 nt, Artificial Sequence
  Description of Artificial Sequence: Synthetic oligonucleotide
aucaagagccaacacuucc

SEQ ID NO: 2174617 - RNA, 19 nt, Artificial Sequence
  Description of Artificial Sequence: Synthetic oligonucleotide
gaaccguaugcucagagag

SEQ ID NO: 2174618 - RNA, 19 nt, Artificial Sequence
  Description of Artificial Sequence: Synthetic oligonucleotide
acauuacuuacaauuaacc

SEQ ID NO: 2174619 - RNA, 19 nt, Artificial Sequence
  Description of Artificial Sequence: Synthetic oligonucleotide
ugaacuuuuggagucagag

SEQ ID NO: 2174620 - RNA, 19 nt, Artificial Sequence
  Description of Artificial Sequence: Synthetic oligonucleotide
  modified_base (6)..(6): a, c, u, g, unknown or other
aaaacncaagacaaacccg

SEQ ID NO: 2174621 - RNA, 19 nt, Artificial Sequence
  Description of Artificial Sequence: Synthetic oligonucleotide
aacuacaccaaucuauuaa

SEQ ID NO: 2174622 - RNA, 19 nt, Artificial Sequence
  Description of Artificial Sequence: Synthetic oligonucleotide
  modified_base (2)..(2): a, c, u, g, unknown or other
cncaagacaaacccgaggc

SEQ ID NO: 2174623 - RNA, 19 nt, Artificial Sequence
  Description of Artificial Sequence: Synthetic oligonucleotide
cuauuaaugaggccgagac

SEQ ID NO: 2174624 - RNA, 19 nt, Artificial Sequence
  Description of Artificial Sequence: Synthetic oligonucleotide
cuuacaauuaaccauuaca

SEQ ID NO: 2174625 - RNA, 19 nt, Artificial Sequence
  Description of Artificial Sequence: Synthetic oligonucleotide
uuauuaguguuacaaggcu

SEQ ID NO: 2174626 - RNA, 19 nt, Artificial Sequence
  Description of Artificial Sequence: Synthetic oligonucleotide
uuaaacuaguucucuacug

SEQ ID NO: 2174627 - RNA, 19 nt, Artificial Sequence
  Description of Artificial Sequence: Synthetic oligonucleotide
uuagguguuaacaaugaua

SEQ ID NO: 2174628 - RNA, 19 nt, Artificial Sequence
  Description of Artificial Sequence: Synthetic oligonucleotide
uuacuuacaauuaaccauu

SEQ ID NO: 2174629 - RNA, 19 nt, Artificial Sequence
  Description of Artificial Sequence: Synthetic oligonucleotide
cuuacacacacacacacac

SEQ ID NO: 2174630 - RNA, 19 nt, Artificial Sequence
  Description of Artificial Sequence: Synthetic oligonucleotide
acaccaaucuauuaaugag

SEQ ID NO: 2174631 - RNA, 19 nt, Artificial Sequence
  Description of Artificial Sequence: Synthetic oligonucleotide
gauaucacacaaaagcagc

SEQ ID NO: 2174632 - RNA, 19 nt, Artificial Sequence
  Description of Artificial Sequence: Synthetic oligonucleotide
uauuaguguuacaaggcug

SEQ ID NO: 2174633 - RNA, 19 nt, Artificial Sequence
  Description of Artificial Sequence: Synthetic oligonucleotide
uucucuacuguacauggug

SEQ ID NO: 2174634 - RNA, 19 nt, Artificial Sequence
  Description of Artificial Sequence: Synthetic oligonucleotide
uaaacuaguucucuacugu

SEQ ID NO: 2174635 - RNA, 19 nt, Artificial Sequence
  Description of Artificial Sequence: Synthetic oligonucleotide
uaaccauguuuaauguugg

SEQ ID NO: 2174636 - RNA, 19 nt, Artificial Sequence
  Description of Artificial Sequence: Synthetic oligonucleotide
uacacacacacacacacac

SEQ ID NO: 2174637 - RNA, 19 nt, Artificial Sequence
  Description of Artificial Sequence: Synthetic oligonucleotide
uacauuacuuacaauuaac

SEQ ID NO: 2174638 - RNA, 19 nt, Artificial Sequence
  Description of Artificial Sequence: Synthetic oligonucleotide
accaaucuauuaaugaggc

SEQ ID NO: 2174639 - RNA, 19 nt, Artificial Sequence
  Description of Artificial Sequence: Synthetic oligonucleotide
ucuguuuugacuccuguau

SEQ ID NO: 2174640 - RNA, 19 nt, Artificial Sequence
  Description of Artificial Sequence: Synthetic oligonucleotide
ugagaugagccaaagguuc

SEQ ID NO: 2174641 - RNA, 19 nt, Artificial Sequence
  Description of Artificial Sequence: Synthetic oligonucleotide
uacaccaaucuauuaauga

SEQ ID NO: 2174642 - RNA, 19 nt, Artificial Sequence
  Description of Artificial Sequence: Synthetic oligonucleotide
uaguucuaggaacacagca

SEQ ID NO: 2174643 - RNA, 19 nt, Artificial Sequence
  Description of Artificial Sequence: Synthetic oligonucleotide
gucaaucuaauauuuugag

SEQ ID NO: 2174644 - RNA, 19 nt, Artificial Sequence
  Description of Artificial Sequence: Synthetic oligonucleotide
caccaaucuauuaaugagg

SEQ ID NO: 2174645 - RNA, 19 nt, Artificial Sequence
  Description of Artificial Sequence: Synthetic oligonucleotide
auuagcagagggcugucac

SEQ ID NO: 2174646 - RNA, 19 nt, Artificial Sequence
  Description of Artificial Sequence: Synthetic oligonucleotide
uuguacgccaccuuguuca

SEQ ID NO: 2174647 - RNA, 19 nt, Artificial Sequence
  Description of Artificial Sequence: Synthetic oligonucleotide
acacaaaagcagcauuagc

SEQ ID NO: 2174648 - RNA, 19 nt, Artificial Sequence
  Description of Artificial Sequence: Synthetic oligonucleotide
accauauaaauacauuacu

SEQ ID NO: 2174649 - RNA, 19 nt, Artificial Sequence
  Description of Artificial Sequence: Synthetic oligonucleotide
uacuuacacacacacacac

SEQ ID NO: 2174650 - RNA, 19 nt, Artificial Sequence
  Description of Artificial Sequence: Synthetic oligonucleotide
auaaccauguuuaauguug

SEQ ID NO: 2174651 - RNA, 19 nt, Artificial Sequence
  Description of Artificial Sequence: Synthetic oligonucleotide
ugcucuacacaauugaaaa

SEQ ID NO: 2174652 - RNA, 19 nt, Artificial Sequence
  Description of Artificial Sequence: Synthetic oligonucleotide
ugagccaaagguucauugg

SEQ ID NO: 2174653 - RNA, 19 nt, Artificial Sequence
  Description of Artificial Sequence: Synthetic oligonucleotide
uuauuaugucauaaccaug

SEQ ID NO: 2174654 - RNA, 19 nt, Artificial Sequence
  Description of Artificial Sequence: Synthetic oligonucleotide
uuggcggucaaucuaauau

SEQ ID NO: 2174655 - RNA, 19 nt, Artificial Sequence
  Description of Artificial Sequence: Synthetic oligonucleotide
aaagguucauuggauauca

SEQ ID NO: 2174656 - RNA, 19 nt, Artificial Sequence
  Description of Artificial Sequence: Synthetic oligonucleotide
uggaucaagagccaacacu

SEQ ID NO: 2174657 - RNA, 19 nt, Artificial Sequence
  Description of Artificial Sequence: Synthetic oligonucleotide
  modified_base (5)..(5): a, c, u, g, unknown or other
aaacncaagacaaacccga

SEQ ID NO: 2174658 - RNA, 19 nt, Artificial Sequence
  Description of Artificial Sequence: Synthetic oligonucleotide
aaaguuaaacuaguucucu

SEQ ID NO: 2174659 - RNA, 19 nt, Artificial Sequence
  Description of Artificial Sequence: Synthetic oligonucleotide
gcuacuuacacacacacac

SEQ ID NO: 2174660 - RNA, 19 nt, Artificial Sequence
  Description of Artificial Sequence: Synthetic oligonucleotide
cacaaacuaaauaaauuuc

SEQ ID NO: 2174661 - RNA, 19 nt, Artificial Sequence
  Description of Artificial Sequence: Synthetic oligonucleotide
aaucuaauauuuugaggau

SEQ ID NO: 2174662 - RNA, 19 nt, Artificial Sequence
  Description of Artificial Sequence: Synthetic oligonucleotide
cacacacacacauacacac

SEQ ID NO: 2174663 - RNA, 19 nt, Artificial Sequence
  Description of Artificial Sequence: Synthetic oligonucleotide
auuaaugaggccgagacuu

SEQ ID NO: 2174664 - RNA, 19 nt, Artificial Sequence
  Description of Artificial Sequence: Synthetic oligonucleotide
uuaaccauuacacgaugaa

SEQ ID NO: 2174665 - RNA, 19 nt, Artificial Sequence
  Description of Artificial Sequence: Synthetic oligonucleotide
acaaacuaaauaaauuuca

SEQ ID NO: 2174666 - RNA, 19 nt, Artificial Sequence
  Description of Artificial Sequence: Synthetic oligonucleotide
aacuaguucucuacuguac

SEQ ID NO: 2174667 - RNA, 19 nt, Artificial Sequence
  Description of Artificial Sequence: Synthetic oligonucleotide
cauuacacgaugaaggaga

SEQ ID NO: 2174668 - RNA, 19 nt, Artificial Sequence
  Description of Artificial Sequence: Synthetic oligonucleotide
uguacauggugacaucaca

SEQ ID NO: 2174669 - RNA, 19 nt, Artificial Sequence
  Description of Artificial Sequence: Synthetic oligonucleotide
cacacacacacacacauac

SEQ ID NO: 2174670 - RNA, 19 nt, Artificial Sequence
  Description of Artificial Sequence: Synthetic oligonucleotide
uguucccucuuuauuaugu

SEQ ID NO: 2174671 - RNA, 19 nt, Artificial Sequence
  Description of Artificial Sequence: Synthetic oligonucleotide
accauguuuaauguuggcg

SEQ ID NO: 2174672 - RNA, 19 nt, Artificial Sequence
  Description of Artificial Sequence: Synthetic oligonucleotide
ugacaucacauucacuaga

SEQ ID NO: 2174673 - RNA, 19 nt, Artificial Sequence
  Description of Artificial Sequence: Synthetic oligonucleotide
ucagccuaguucuaggaac

SEQ ID NO: 2174674 - RNA, 19 nt, Artificial Sequence
  Description of Artificial Sequence: Synthetic oligonucleotide
auuugagaugagccaaagg

SEQ ID NO: 2174675 - RNA, 19 nt, Artificial Sequence
  Description of Artificial Sequence: Synthetic oligonucleotide
uguauccaggcuuugcucu

SEQ ID NO: 2174676 - RNA, 19 nt, Artificial Sequence
  Description of Artificial Sequence: Synthetic oligonucleotide
gaggacagggcuuucauga

SEQ ID NO: 2174677 - RNA, 19 nt, Artificial Sequence
  Description of Artificial Sequence: Synthetic oligonucleotide
acuuacaauuaaccauuac

SEQ ID NO: 2174678 - RNA, 19 nt, Artificial Sequence
  Description of Artificial Sequence: Synthetic oligonucleotide
ugauaaguuucucuugguc

SEQ ID NO: 2174679 - RNA, 19 nt, Artificial Sequence
  Description of Artificial Sequence: Synthetic oligonucleotide
cauuacuuacaauuaacca

SEQ ID NO: 2174680 - RNA, 19 nt, Artificial Sequence
  Description of Artificial Sequence: Synthetic oligonucleotide
uucaacuguauccaggcuu

SEQ ID NO: 2174681 - RNA, 19 nt, Artificial Sequence
  Description of Artificial Sequence: Synthetic oligonucleotide
  modified_base (3)..(3): a, c, u, g, unknown or other
acncaagacaaacccgagg

SEQ ID NO: 2174682 - RNA, 19 nt, Artificial Sequence
  Description of Artificial Sequence: Synthetic oligonucleotide
ccauguuuaauguuggcgg

SEQ ID NO: 2174683 - RNA, 19 nt, Artificial Sequence
  Description of Artificial Sequence: Synthetic oligonucleotide
cauacacacacaaccuucc

SEQ ID NO: 2174684 - RNA, 19 nt, Artificial Sequence
  Description of Artificial Sequence: Synthetic oligonucleotide
aauguuggcggucaaucua

SEQ ID NO: 2174685 - RNA, 19 nt, Artificial Sequence
  Description of Artificial Sequence: Synthetic oligonucleotide
cacacacacacacauacac

SEQ ID NO: 2174686 - RNA, 19 nt, Artificial Sequence
  Description of Artificial Sequence: Synthetic oligonucleotide
uaaccauuacacgaugaag

SEQ ID NO: 2174687 - RNA, 19 nt, Artificial Sequence
  Description of Artificial Sequence: Synthetic oligonucleotide
uuuucgaacaagucugaaa

SEQ ID NO: 2174688 - RNA, 19 nt, Artificial Sequence
  Description of Artificial Sequence: Synthetic oligonucleotide
ucgaacaagucugaaauaa

SEQ ID NO: 2174689 - RNA, 19 nt, Artificial Sequence
  Description of Artificial Sequence: Synthetic oligonucleotide
ugaacuacaccaaucuauu

SEQ ID NO: 2174690 - RNA, 19 nt, Artificial Sequence
  Description of Artificial Sequence: Synthetic oligonucleotide
auacacacacaaccuuccc

SEQ ID NO: 2174691 - RNA, 19 nt, Artificial Sequence
  Description of Artificial Sequence: Synthetic oligonucleotide
uuaugucauaaccauguuu

SEQ ID NO: 2174692 - RNA, 19 nt, Artificial Sequence
  Description of Artificial Sequence: Synthetic oligonucleotide
uggucuuucuguuuugacu

SEQ ID NO: 2174693 - RNA, 19 nt, Artificial Sequence
  Description of Artificial Sequence: Synthetic oligonucleotide
ucucuacuguacaugguga

SEQ ID NO: 2174694 - RNA, 19 nt, Artificial Sequence
  Description of Artificial Sequence: Synthetic oligonucleotide
uuugcucuacacaauugaa

SEQ ID NO: 2174695 - RNA, 19 nt, Artificial Sequence
  Description of Artificial Sequence: Synthetic oligonucleotide
cacacacacacacacacac

SEQ ID NO: 2174696 - RNA, 19 nt, Artificial Sequence
  Description of Artificial Sequence: Synthetic oligonucleotide
cacacacacauacacacac

SEQ ID NO: 2174697 - RNA, 19 nt, Artificial Sequence
  Description of Artificial Sequence: Synthetic oligonucleotide
ggcggaaucugcuaggagg

SEQ ID NO: 2174698 - RNA, 19 nt, Artificial Sequence
  Description of Artificial Sequence: Synthetic oligonucleotide
gacagcgccucuuuaaaac

SEQ ID NO: 2174699 - RNA, 19 nt, Artificial Sequence
  Description of Artificial Sequence: Synthetic oligonucleotide
agggcugucaccccuagug

SEQ ID NO: 2174700 - RNA, 19 nt, Artificial Sequence
  Description of Artificial Sequence: Synthetic oligonucleotide
acuacaccaaucuauuaau

SEQ ID NO: 2174701 - RNA, 19 nt, Artificial Sequence
  Description of Artificial Sequence: Synthetic oligonucleotide
acuaguucucuacuguaca

SEQ ID NO: 2174702 - RNA, 19 nt, Artificial Sequence
  Description of Artificial Sequence: Synthetic oligonucleotide
ucaugcucuggaucaagag

SEQ ID NO: 2174703 - RNA, 19 nt, Artificial Sequence
  Description of Artificial Sequence: Synthetic oligonucleotide
uccuauuuauuaguguuac

SEQ ID NO: 2174704 - RNA, 19 nt, Artificial Sequence
  Description of Artificial Sequence: Synthetic oligonucleotide
aaaaccauauaaauacauu

SEQ ID NO: 2174705 - RNA, 19 nt, Artificial Sequence
  Description of Artificial Sequence: Synthetic oligonucleotide
guauccauccuauuuauua

SEQ ID NO: 2174706 - RNA, 19 nt, Artificial Sequence
  Description of Artificial Sequence: Synthetic oligonucleotide
aaacuaguucucuacugua

SEQ ID NO: 2174707 - RNA, 19 nt, Artificial Sequence
  Description of Artificial Sequence: Synthetic oligonucleotide
uauuaaugaggccgagacu

SEQ ID NO: 2174708 - RNA, 19 nt, Artificial Sequence
  Description of Artificial Sequence: Synthetic oligonucleotide
aaaaugcauagaacuuagg

SEQ ID NO: 2174709 - RNA, 19 nt, Artificial Sequence
  Description of Artificial Sequence: Synthetic oligonucleotide
aaccguaugcucagagagc

SEQ ID NO: 2174710 - RNA, 19 nt, Artificial Sequence
  Description of Artificial Sequence: Synthetic oligonucleotide
ugaggccgagacuugaggc

SEQ ID NO: 2174711 - RNA, 19 nt, Artificial Sequence
  Description of Artificial Sequence: Synthetic oligonucleotide
caaugauaaguuucucuug

SEQ ID NO: 2174712 - RNA, 19 nt, Artificial Sequence
  Description of Artificial Sequence: Synthetic oligonucleotide
uugagaugagccaaagguu

SEQ ID NO: 2174713 - RNA, 19 nt, Artificial Sequence
  Description of Artificial Sequence: Synthetic oligonucleotide
auuaguguuacaaggcugu

SEQ ID NO: 2174714 - RNA, 19 nt, Artificial Sequence
  Description of Artificial Sequence: Synthetic oligonucleotide
uugcucuacacaauugaaa

SEQ ID NO: 2174715 - RNA, 19 nt, Artificial Sequence
  Description of Artificial Sequence: Synthetic oligonucleotide
uuugacuccuguauccauc

SEQ ID NO: 2174716 - RNA, 19 nt, Artificial Sequence
  Description of Artificial Sequence: Synthetic oligonucleotide
augagccaaagguucauug

SEQ ID NO: 2174717 - RNA, 19 nt, Artificial Sequence
  Description of Artificial Sequence: Synthetic oligonucleotide
aaucuauuaaugaggccga

SEQ ID NO: 2174718 - RNA, 19 nt, Artificial Sequence
  Description of Artificial Sequence: Synthetic oligonucleotide
ccuaguucuaggaacacag

SEQ ID NO: 2174719 - RNA, 19 nt, Artificial Sequence
  Description of Artificial Sequence: Synthetic oligonucleotide
agguucauuggauaucaca

SEQ ID NO: 2174720 - RNA, 19 nt, Artificial Sequence
  Description of Artificial Sequence: Synthetic oligonucleotide
agagccaacacuuccuuaa

SEQ ID NO: 2174721 - RNA, 19 nt, Artificial Sequence
  Description of Artificial Sequence: Synthetic oligonucleotide
gaucugccggagcagacag

SEQ ID NO: 2174722 - RNA, 19 nt, Artificial Sequence
  Description of Artificial Sequence: Synthetic oligonucleotide
uguuacaaggcuguucccu

SEQ ID NO: 2174723 - RNA, 19 nt, Artificial Sequence
  Description of Artificial Sequence: Synthetic oligonucleotide
agcacacugccucaugcuc

SEQ ID NO: 2174724 - RNA, 19 nt, Artificial Sequence
  Description of Artificial Sequence: Synthetic oligonucleotide
aaguuaaacuaguucucua

SEQ ID NO: 2174725 - RNA, 19 nt, Artificial Sequence
  Description of Artificial Sequence: Synthetic oligonucleotide
agggauuugagaugagcca

SEQ ID NO: 2174726 - RNA, 19 nt, Artificial Sequence
  Description of Artificial Sequence: Synthetic oligonucleotide
acaaacccgaggcggaauc

SEQ ID NO: 2174727 - RNA, 19 nt, Artificial Sequence
  Description of Artificial Sequence: Synthetic oligonucleotide
uccuguauccauccuauuu

SEQ ID NO: 2174728 - RNA, 19 nt, Artificial Sequence
  Description of Artificial Sequence: Synthetic oligonucleotide
uacgccaccuuguucaacu

SEQ ID NO: 2174729 - RNA, 19 nt, Artificial Sequence
  Description of Artificial Sequence: Synthetic oligonucleotide
cauucacuagacugagugc

SEQ ID NO: 2174730 - RNA, 19 nt, Artificial Sequence
  Description of Artificial Sequence: Synthetic oligonucleotide
augcucagagagcagagga

SEQ ID NO: 2174731 - RNA, 19 nt, Artificial Sequence
  Description of Artificial Sequence: Synthetic oligonucleotide
gucagagggaaccguaugc

SEQ ID NO: 2174732 - RNA, 19 nt, Artificial Sequence
  Description of Artificial Sequence: Synthetic oligonucleotide
uaaaagcuacuuacacaca

SEQ ID NO: 2174733 - RNA, 19 nt, Artificial Sequence
  Description of Artificial Sequence: Synthetic oligonucleotide
ggucuuucuguuuugacuc

SEQ ID NO: 2174734 - RNA, 19 nt, Artificial Sequence
  Description of Artificial Sequence: Synthetic oligonucleotide
uucacuagacugagugccc

SEQ ID NO: 2174735 - RNA, 19 nt, Artificial Sequence
  Description of Artificial Sequence: Synthetic oligonucleotide
uuaaugaggccgagacuug

SEQ ID NO: 2174736 - RNA, 19 nt, Artificial Sequence
  Description of Artificial Sequence: Synthetic oligonucleotide
aacacagcacacugccuca

SEQ ID NO: 2174737 - RNA, 19 nt, Artificial Sequence
  Description of Artificial Sequence: Synthetic oligonucleotide
acacagcuggaucugccgg

SEQ ID NO: 2174738 - RNA, 19 nt, Artificial Sequence
  Description of Artificial Sequence: Synthetic oligonucleotide
gagaggaccuacuucacaa

SEQ ID NO: 2174739 - RNA, 19 nt, Artificial Sequence
  Description of Artificial Sequence: Synthetic oligonucleotide
uuagcagagggcugucacc

SEQ ID NO: 2174740 - RNA, 19 nt, Artificial Sequence
  Description of Artificial Sequence: Synthetic oligonucleotide
  modified_base (4)..(4): a, c, u, g, unknown or other
aacncaagacaaacccgag

SEQ ID NO: 2174741 - RNA, 19 nt, Artificial Sequence
  Description of Artificial Sequence: Synthetic oligonucleotide
gauuugagaugagccaaag

SEQ ID NO: 2174742 - RNA, 19 nt, Artificial Sequence
  Description of Artificial Sequence: Synthetic oligonucleotide
cuagacugagugcccaggg

SEQ ID NO: 2174743 - RNA, 19 nt, Artificial Sequence
  Description of Artificial Sequence: Synthetic oligonucleotide
gaggaccuacuucacaaac

SEQ ID NO: 2174744 - RNA, 19 nt, Artificial Sequence
  Description of Artificial Sequence: Synthetic oligonucleotide
uggcuagcuauguacagaa

SEQ ID NO: 2174745 - RNA, 19 nt, Artificial Sequence
  Description of Artificial Sequence: Synthetic oligonucleotide
uguuaacaaugauaaguuu

SEQ ID NO: 2174746 - RNA, 19 nt, Artificial Sequence
  Description of Artificial Sequence: Synthetic oligonucleotide
uuacacacacacacacaca

SEQ ID NO: 2174747 - RNA, 19 nt, Artificial Sequence
  Description of Artificial Sequence: Synthetic oligonucleotide
cuacaccaaucuauuaaug

SEQ ID NO: 2174748 - RNA, 19 nt, Artificial Sequence
  Description of Artificial Sequence: Synthetic oligonucleotide
uaggagggcaaaucucucc

SEQ ID NO: 2174749 - RNA, 19 nt, Artificial Sequence
  Description of Artificial Sequence: Synthetic oligonucleotide
cacacaaccuucccucugg

SEQ ID NO: 2174750 - RNA, 19 nt, Artificial Sequence
  Description of Artificial Sequence: Synthetic oligonucleotide
ucuaggaacacagcacacu

SEQ ID NO: 2174751 - RNA, 19 nt, Artificial Sequence
  Description of Artificial Sequence: Synthetic oligonucleotide
ucuauuaaugaggccgaga

SEQ ID NO: 2174752 - RNA, 19 nt, Artificial Sequence
  Description of Artificial Sequence: Synthetic oligonucleotide
aucacauucacuagacuga

SEQ ID NO: 2174753 - RNA, 19 nt, Artificial Sequence
  Description of Artificial Sequence: Synthetic oligonucleotide
gagccaaagguucauugga

SEQ ID NO: 2174754 - RNA, 19 nt, Artificial Sequence
  Description of Artificial Sequence: Synthetic oligonucleotide
agucugaaauaaauagcuc

SEQ ID NO: 2174755 - RNA, 19 nt, Artificial Sequence
  Description of Artificial Sequence: Synthetic oligonucleotide
aaagcuacuuacacacaca

SEQ ID NO: 2174756 - RNA, 19 nt, Artificial Sequence
  Description of Artificial Sequence: Synthetic oligonucleotide
gguguuaacaaugauaagu

SEQ ID NO: 2174757 - RNA, 19 nt, Artificial Sequence
  Description of Artificial Sequence: Synthetic oligonucleotide
cuagcuauguacagaacaa

SEQ ID NO: 2174758 - RNA, 19 nt, Artificial Sequence
  Description of Artificial Sequence: Synthetic oligonucleotide
gaggccgagacuugaggcc

SEQ ID NO: 2174759 - RNA, 19 nt, Artificial Sequence
  Description of Artificial Sequence: Synthetic oligonucleotide
gagggaaccguaugcucag

SEQ ID NO: 2174760 - RNA, 19 nt, Artificial Sequence
  Description of Artificial Sequence: Synthetic oligonucleotide
ucaccccuagugcugggag

SEQ ID NO: 2174761 - RNA, 19 nt, Artificial Sequence
  Description of Artificial Sequence: Synthetic oligonucleotide
cauggugacaucacauuca

SEQ ID NO: 2174762 - RNA, 19 nt, Artificial Sequence
  Description of Artificial Sequence: Synthetic oligonucleotide
uucuaggaacacagcacac

SEQ ID NO: 2174763 - RNA, 19 nt, Artificial Sequence
  Description of Artificial Sequence: Synthetic oligonucleotide
ccuuaaaagcuacuuacac

SEQ ID NO: 2174764 - RNA, 19 nt, Artificial Sequence
  Description of Artificial Sequence: Synthetic oligonucleotide
uuuguacgccaccuuguuc

SEQ ID NO: 2174765 - RNA, 19 nt, Artificial Sequence
  Description of Artificial Sequence: Synthetic oligonucleotide
ucugccggagcagacagac

SEQ ID NO: 2174766 - RNA, 19 nt, Artificial Sequence
  Description of Artificial Sequence: Synthetic oligonucleotide
  modified_base (19)..(19): a, c, u, g, unknown or other
acagcgccucuuuaaaacn

SEQ ID NO: 2174767 - RNA, 19 nt, Artificial Sequence
  Description of Artificial Sequence: Synthetic oligonucleotide
agacugagugcccagggau

SEQ ID NO: 2174768 - RNA, 19 nt, Artificial Sequence
  Description of Artificial Sequence: Synthetic oligonucleotide
aggagggcaaaucucuccu

SEQ ID NO: 2174769 - RNA, 19 nt, Artificial Sequence
  Description of Artificial Sequence: Synthetic oligonucleotide
gaugaaggagaggaccuac

SEQ ID NO: 2174770 - RNA, 19 nt, Artificial Sequence
  Description of Artificial Sequence: Synthetic oligonucleotide
uuuuguacgccaccuuguu

SEQ ID NO: 2174771 - RNA, 19 nt, Artificial Sequence
  Description of Artificial Sequence: Synthetic oligonucleotide
accguaugcucagagagca

SEQ ID NO: 2174772 - RNA, 19 nt, Artificial Sequence
  Description of Artificial Sequence: Synthetic oligonucleotide
ugucauaaccauguuuaau

SEQ ID NO: 2174773 - RNA, 19 nt, Artificial Sequence
  Description of Artificial Sequence: Synthetic oligonucleotide
agucagagggaaccguaug

SEQ ID NO: 2174774 - RNA, 19 nt, Artificial Sequence
  Description of Artificial Sequence: Synthetic oligonucleotide
augauaaguuucucuuggu

SEQ ID NO: 2174775 - RNA, 19 nt, Artificial Sequence
  Description of Artificial Sequence: Synthetic oligonucleotide
uacauggugacaucacauu

SEQ ID NO: 2174776 - RNA, 19 nt, Artificial Sequence
  Description of Artificial Sequence: Synthetic oligonucleotide
cucuacuguacauggugac

SEQ ID NO: 2174777 - RNA, 19 nt, Artificial Sequence
  Description of Artificial Sequence: Synthetic oligonucleotide
ucugcuaggagggcaaauc

SEQ ID NO: 2174778 - RNA, 19 nt, Artificial Sequence
  Description of Artificial Sequence: Synthetic oligonucleotide
cacacaaaagcagcauuag

SEQ ID NO: 2174779 - RNA, 19 nt, Artificial Sequence
  Description of Artificial Sequence: Synthetic oligonucleotide
guuacaaggcuguucccuc

SEQ ID NO: 2174780 - RNA, 19 nt, Artificial Sequence
  Description of Artificial Sequence: Synthetic oligonucleotide
ggagcagucagccuaguuc

SEQ ID NO: 2174781 - RNA, 19 nt, Artificial Sequence
  Description of Artificial Sequence: Synthetic oligonucleotide
aaugaggccgagacuugag

SEQ ID NO: 2174782 - RNA, 19 nt, Artificial Sequence
  Description of Artificial Sequence: Synthetic oligonucleotide
uagacugagugcccaggga

SEQ ID NO: 2174783 - RNA, 19 nt, Artificial Sequence
  Description of Artificial Sequence: Synthetic oligonucleotide
aggccgagacuugaggccc

SEQ ID NO: 2174784 - RNA, 19 nt, Artificial Sequence
  Description of Artificial Sequence: Synthetic oligonucleotide
acacuuccuuaaaagcuac

SEQ ID NO: 2174785 - RNA, 19 nt, Artificial Sequence
  Description of Artificial Sequence: Synthetic oligonucleotide
auuacacgaugaaggagag

SEQ ID NO: 2174786 - RNA, 19 nt, Artificial Sequence
  Description of Artificial Sequence: Synthetic oligonucleotide
auaucacacaaaagcagca

SEQ ID NO: 2174787 - RNA, 19 nt, Artificial Sequence
  Description of Artificial Sequence: Synthetic oligonucleotide
guuaaacuaguucucuacu

SEQ ID NO: 2174788 - RNA, 19 nt, Artificial Sequence
  Description of Artificial Sequence: Synthetic oligonucleotide
accuacuucacaaacuaaa

SEQ ID NO: 2174789 - RNA, 19 nt, Artificial Sequence
  Description of Artificial Sequence: Synthetic oligonucleotide
agguguuaacaaugauaag

SEQ ID NO: 2174790 - RNA, 19 nt, Artificial Sequence
  Description of Artificial Sequence: Synthetic oligonucleotide
cagucagccuaguucuagg

SEQ ID NO: 2174791 - RNA, 19 nt, Artificial Sequence
  Description of Artificial Sequence: Synthetic oligonucleotide
acuuagguguuaacaauga

SEQ ID NO: 2174792 - RNA, 19 nt, Artificial Sequence
  Description of Artificial Sequence: Synthetic oligonucleotide
acacacauacacacacaac

SEQ ID NO: 2174793 - RNA, 19 nt, Artificial Sequence
  Description of Artificial Sequence: Synthetic oligonucleotide
cuguuuugacuccuguauc

SEQ ID NO: 2174794 - RNA, 19 nt, Artificial Sequence
  Description of Artificial Sequence: Synthetic oligonucleotide
uuacaaggcuguucccucu

SEQ ID NO: 2174795 - RNA, 19 nt, Artificial Sequence
  Description of Artificial Sequence: Synthetic oligonucleotide
uuuaauguuggcggucaau

SEQ ID NO: 2174796 - RNA, 19 nt, Artificial Sequence
  Description of Artificial Sequence: Synthetic oligonucleotide
uaucacacaaaagcagcau

SEQ ID NO: 2174797 - RNA, 19 nt, Artificial Sequence
  Description of Artificial Sequence: Synthetic oligonucleotide
agucagccuaguucuagga

SEQ ID NO: 2174798 - RNA, 19 nt, Artificial Sequence
  Description of Artificial Sequence: Synthetic oligonucleotide
cugaacuacaccaaucuau

SEQ ID NO: 2174799 - RNA, 19 nt, Artificial Sequence
  Description of Artificial Sequence: Synthetic oligonucleotide
uacuuacaauuaaccauua

SEQ ID NO: 2174800 - RNA, 19 nt, Artificial Sequence
  Description of Artificial Sequence: Synthetic oligonucleotide
cuguacauggugacaucac

SEQ ID NO: 2174801 - RNA, 19 nt, Artificial Sequence
  Description of Artificial Sequence: Synthetic oligonucleotide
uuacacgaugaaggagagg

SEQ ID NO: 2174802 - RNA, 19 nt, Artificial Sequence
  Description of Artificial Sequence: Synthetic oligonucleotide
uucgaacaagucugaaaua

SEQ ID NO: 2174803 - RNA, 19 nt, Artificial Sequence
  Description of Artificial Sequence: Synthetic oligonucleotide
agguguuucugggagucag

SEQ ID NO: 2174804 - RNA, 19 nt, Artificial Sequence
  Description of Artificial Sequence: Synthetic oligonucleotide
aucuaauauuuugaggaua

SEQ ID NO: 2174805 - RNA, 19 nt, Artificial Sequence
  Description of Artificial Sequence: Synthetic oligonucleotide
aaacccgaggcggaaucug

SEQ ID NO: 2174806 - RNA, 19 nt, Artificial Sequence
  Description of Artificial Sequence: Synthetic oligonucleotide
auccugaacuacaccaauc

SEQ ID NO: 2174807 - RNA, 19 nt, Artificial Sequence
  Description of Artificial Sequence: Synthetic oligonucleotide
uaaugaggccgagacuuga

SEQ ID NO: 2174808 - RNA, 19 nt, Artificial Sequence
  Description of Artificial Sequence: Synthetic oligonucleotide
uccaccucacauccugaac

SEQ ID NO: 2174809 - RNA, 19 nt, Artificial Sequence
  Description of Artificial Sequence: Synthetic oligonucleotide
cacacacauacacacacaa

SEQ ID NO: 2174810 - RNA, 19 nt, Artificial Sequence
  Description of Artificial Sequence: Synthetic oligonucleotide
ugggcaucccaggaggacc

SEQ ID NO: 2174811 - RNA, 19 nt, Artificial Sequence
  Description of Artificial Sequence: Synthetic oligonucleotide
gaacuuagguguuaacaau

SEQ ID NO: 2174812 - RNA, 19 nt, Artificial Sequence
  Description of Artificial Sequence: Synthetic oligonucleotide
auuaugucauaaccauguu

SEQ ID NO: 2174813 - RNA, 19 nt, Artificial Sequence
  Description of Artificial Sequence: Synthetic oligonucleotide
aagguucauuggauaucac

SEQ ID NO: 2174814 - RNA, 19 nt, Artificial Sequence
  Description of Artificial Sequence: Synthetic oligonucleotide
caaagguucauuggauauc

SEQ ID NO: 2174815 - RNA, 19 nt, Artificial Sequence
  Description of Artificial Sequence: Synthetic oligonucleotide
agcagagggcugucacccc

SEQ ID NO: 2174816 - RNA, 19 nt, Artificial Sequence
  Description of Artificial Sequence: Synthetic oligonucleotide
ugcauagaacuuagguguu

SEQ ID NO: 2174817 - RNA, 19 nt, Artificial Sequence
  Description of Artificial Sequence: Synthetic oligonucleotide
cuacuucacaaacuaaaua

SEQ ID NO: 2174818 - RNA, 19 nt, Artificial Sequence
  Description of Artificial Sequence: Synthetic oligonucleotide
ugcccagggauuugagaug

SEQ ID NO: 2174819 - RNA, 19 nt, Artificial Sequence
  Description of Artificial Sequence: Synthetic oligonucleotide
uguauccauccuauuuauu

SEQ ID NO: 2174820 - RNA, 19 nt, Artificial Sequence
  Description of Artificial Sequence: Synthetic oligonucleotide
  modified_base (18)..(18): a, c, u, g, unknown or other
cagcgccucuuuaaaacnc

SEQ ID NO: 2174821 - RNA, 19 nt, Artificial Sequence
  Description of Artificial Sequence: Synthetic oligonucleotide
acacacaaccuucccucug

SEQ ID NO: 2174822 - RNA, 19 nt, Artificial Sequence
  Description of Artificial Sequence: Synthetic oligonucleotide
uggcggucaaucuaauauu

SEQ ID NO: 2174823 - RNA, 19 nt, Artificial Sequence
  Description of Artificial Sequence: Synthetic oligonucleotide
aagagccaacacuuccuua

SEQ ID NO: 2174824 - RNA, 19 nt, Artificial Sequence
  Description of Artificial Sequence: Synthetic oligonucleotide
cauccuauuuauuaguguu

SEQ ID NO: 2174825 - RNA, 19 nt, Artificial Sequence
  Description of Artificial Sequence: Synthetic oligonucleotide
ugcucuggaucaagagcca

SEQ ID NO: 2174826 - RNA, 19 nt, Artificial Sequence
  Description of Artificial Sequence: Synthetic oligonucleotide
uagcuauguacagaacaaa

SEQ ID NO: 2174827 - RNA, 19 nt, Artificial Sequence
  Description of Artificial Sequence: Synthetic oligonucleotide
cuacuuacacacacacaca

SEQ ID NO: 2174828 - RNA, 19 nt, Artificial Sequence
  Description of Artificial Sequence: Synthetic oligonucleotide
caauuaaccauuacacgau

SEQ ID NO: 2174829 - RNA, 19 nt, Artificial Sequence
  Description of Artificial Sequence: Synthetic oligonucleotide
cuaggagggcaaaucucuc

SEQ ID NO: 2174830 - RNA, 19 nt, Artificial Sequence
  Description of Artificial Sequence: Synthetic oligonucleotide
ugagugcccagggauuuga

SEQ ID NO: 2174831 - RNA, 19 nt, Artificial Sequence
  Description of Artificial Sequence: Synthetic oligonucleotide
gacuccuguauccauccua

SEQ ID NO: 2174832 - RNA, 19 nt, Artificial Sequence
  Description of Artificial Sequence: Synthetic oligonucleotide
caccuuguucaacuguauc

SEQ ID NO: 2174833 - RNA, 19 nt, Artificial Sequence
  Description of Artificial Sequence: Synthetic oligonucleotide
guucccucuuuauuauguc

SEQ ID NO: 2174834 - RNA, 19 nt, Artificial Sequence
  Description of Artificial Sequence: Synthetic oligonucleotide
aucuauuaaugaggccgag

SEQ ID NO: 2174835 - RNA, 19 nt, Artificial Sequence
  Description of Artificial Sequence: Synthetic oligonucleotide
gagaugagccaaagguuca

SEQ ID NO: 2174836 - RNA, 19 nt, Artificial Sequence
  Description of Artificial Sequence: Synthetic oligonucleotide
cugggagcagucagccuag

SEQ ID NO: 2174837 - RNA, 19 nt, Artificial Sequence
  Description of Artificial Sequence: Synthetic oligonucleotide
gaacuacaccaaucuauua

SEQ ID NO: 2174838 - RNA, 19 nt, Artificial Sequence
  Description of Artificial Sequence: Synthetic oligonucleotide
cuggaucaagagccaacac

SEQ ID NO: 2174839 - RNA, 19 nt, Artificial Sequence
  Description of Artificial Sequence: Synthetic oligonucleotide
aggaccuacuucacaaacu

SEQ ID NO: 2174840 - RNA, 19 nt, Artificial Sequence
  Description of Artificial Sequence: Synthetic oligonucleotide
guuuugacuccuguaucca

SEQ ID NO: 2174841 - RNA, 19 nt, Artificial Sequence
  Description of Artificial Sequence: Synthetic oligonucleotide
agcagacagacagcgccuc

SEQ ID NO: 2174842 - RNA, 19 nt, Artificial Sequence
  Description of Artificial Sequence: Synthetic oligonucleotide
cggucaaucuaauauuuug

SEQ ID NO: 2174843 - RNA, 19 nt, Artificial Sequence
  Description of Artificial Sequence: Synthetic oligonucleotide
agaggaccuacuucacaaa

SEQ ID NO: 2174844 - RNA, 19 nt, Artificial Sequence
  Description of Artificial Sequence: Synthetic oligonucleotide
acacacacacacauacaca

SEQ ID NO: 2174845 - RNA, 19 nt, Artificial Sequence
  Description of Artificial Sequence: Synthetic oligonucleotide
acuuacacacacacacaca

SEQ ID NO: 2174846 - RNA, 19 nt, Artificial Sequence
  Description of Artificial Sequence: Synthetic oligonucleotide
gagggcaaaucucuccucu

SEQ ID NO: 2174847 - RNA, 19 nt, Artificial Sequence
  Description of Artificial Sequence: Synthetic oligonucleotide
gaucaagagccaacacuuc

SEQ ID NO: 2174848 - RNA, 19 nt, Artificial Sequence
  Description of Artificial Sequence: Synthetic oligonucleotide
agacagcgccucuuuaaaa

SEQ ID NO: 2174849 - RNA, 19 nt, Artificial Sequence
  Description of Artificial Sequence: Synthetic oligonucleotide
cauagaacuuagguguuaa

SEQ ID NO: 2174850 - RNA, 19 nt, Artificial Sequence
  Description of Artificial Sequence: Synthetic oligonucleotide
guguuaacaaugauaaguu

SEQ ID NO: 2174851 - RNA, 19 nt, Artificial Sequence
  Description of Artificial Sequence: Synthetic oligonucleotide
ggaccuacuucacaaacua

SEQ ID NO: 2174852 - RNA, 19 nt, Artificial Sequence
  Description of Artificial Sequence: Synthetic oligonucleotide
acuccuguauccauccuau

SEQ ID NO: 2174853 - RNA, 19 nt, Artificial Sequence
  Description of Artificial Sequence: Synthetic oligonucleotide
agccuaguucuaggaacac

SEQ ID NO: 2174854 - RNA, 19 nt, Artificial Sequence
  Description of Artificial Sequence: Synthetic oligonucleotide
acugccucaugcucuggau

SEQ ID NO: 2174855 - RNA, 19 nt, Artificial Sequence
  Description of Artificial Sequence: Synthetic oligonucleotide
uggugacaucacauucacu

SEQ ID NO: 2174856 - RNA, 19 nt, Artificial Sequence
  Description of Artificial Sequence: Synthetic oligonucleotide
gggaaccguaugcucagag

SEQ ID NO: 2174857 - RNA, 19 nt, Artificial Sequence
  Description of Artificial Sequence: Synthetic oligonucleotide
ccaaucuauuaaugaggcc

SEQ ID NO: 2174858 - RNA, 19 nt, Artificial Sequence
  Description of Artificial Sequence: Synthetic oligonucleotide
acuuuuggagucagaggga

SEQ ID NO: 2174859 - RNA, 19 nt, Artificial Sequence
  Description of Artificial Sequence: Synthetic oligonucleotide
cauguuuaauguuggcggu

SEQ ID NO: 2174860 - RNA, 19 nt, Artificial Sequence
  Description of Artificial Sequence: Synthetic oligonucleotide
uacaaggcuguucccucuu

SEQ ID NO: 2174861 - RNA, 19 nt, Artificial Sequence
  Description of Artificial Sequence: Synthetic oligonucleotide
aggauagaagugaacuuuu

SEQ ID NO: 2174862 - RNA, 19 nt, Artificial Sequence
  Description of Artificial Sequence: Synthetic oligonucleotide
cugucaccccuagugcugg

SEQ ID NO: 2174863 - RNA, 19 nt, Artificial Sequence
  Description of Artificial Sequence: Synthetic oligonucleotide
aggcggaaucugcuaggag

SEQ ID NO: 2174864 - RNA, 19 nt, Artificial Sequence
  Description of Artificial Sequence: Synthetic oligonucleotide
cacacacacacacacacau

SEQ ID NO: 2174865 - RNA, 19 nt, Artificial Sequence
  Description of Artificial Sequence: Synthetic oligonucleotide
guguuacaaggcuguuccc

SEQ ID NO: 2174866 - RNA, 19 nt, Artificial Sequence
  Description of Artificial Sequence: Synthetic oligonucleotide
auccuauuuauuaguguua

SEQ ID NO: 2174867 - RNA, 19 nt, Artificial Sequence
  Description of Artificial Sequence: Synthetic oligonucleotide
cagcauuagcagagggcug

SEQ ID NO: 2174868 - RNA, 19 nt, Artificial Sequence
  Description of Artificial Sequence: Synthetic oligonucleotide
cugccucaugcucuggauc

SEQ ID NO: 2174869 - RNA, 19 nt, Artificial Sequence
  Description of Artificial Sequence: Synthetic oligonucleotide
accccuagugcugggagca

SEQ ID NO: 2174870 - RNA, 19 nt, Artificial Sequence
  Description of Artificial Sequence: Synthetic oligonucleotide
ggauagaagugaacuuuug

SEQ ID NO: 2174871 - RNA, 19 nt, Artificial Sequence
  Description of Artificial Sequence: Synthetic oligonucleotide
uguacgccaccuuguucaa

SEQ ID NO: 2174872 - RNA, 19 nt, Artificial Sequence
  Description of Artificial Sequence: Synthetic oligonucleotide
caccccuagugcugggagc

SEQ ID NO: 2174873 - RNA, 19 nt, Artificial Sequence
  Description of Artificial Sequence: Synthetic oligonucleotide
auguuggcggucaaucuaa

SEQ ID NO: 2174874 - RNA, 19 nt, Artificial Sequence
  Description of Artificial Sequence: Synthetic oligonucleotide
gucagccuaguucuaggaa

SEQ ID NO: 2174875 - RNA, 19 nt, Artificial Sequence
  Description of Artificial Sequence: Synthetic oligonucleotide
uauccaggcuuugcucuac

SEQ ID NO: 2174876 - RNA, 19 nt, Artificial Sequence
  Description of Artificial Sequence: Synthetic oligonucleotide
gugcugggagcagucagcc

SEQ ID NO: 2174877 - RNA, 19 nt, Artificial Sequence
  Description of Artificial Sequence: Synthetic oligonucleotide
cuaauauuuugaggauaga

SEQ ID NO: 2174878 - RNA, 19 nt, Artificial Sequence
  Description of Artificial Sequence: Synthetic oligonucleotide
ggaaccguaugcucagaga

SEQ ID NO: 2174879 - RNA, 19 nt, Artificial Sequence
  Description of Artificial Sequence: Synthetic oligonucleotide
augaaggagaggaccuacu

SEQ ID NO: 2174880 - RNA, 19 nt, Artificial Sequence
  Description of Artificial Sequence: Synthetic oligonucleotide
aggcuguucccucuuuauu

SEQ ID NO: 2174881 - RNA, 19 nt, Artificial Sequence
  Description of Artificial Sequence: Synthetic oligonucleotide
  modified_base (17)..(17): a, c, u, g, unknown or other
agcgccucuuuaaaacnca

SEQ ID NO: 2174882 - RNA, 19 nt, Artificial Sequence
  Description of Artificial Sequence: Synthetic oligonucleotide
agcuacuuacacacacaca

SEQ ID NO: 2174883 - RNA, 19 nt, Artificial Sequence
  Description of Artificial Sequence: Synthetic oligonucleotide
gggauuugagaugagccaa

SEQ ID NO: 2174884 - RNA, 19 nt, Artificial Sequence
  Description of Artificial Sequence: Synthetic oligonucleotide
acacacacacauacacaca

SEQ ID NO: 2174885 - RNA, 19 nt, Artificial Sequence
  Description of Artificial Sequence: Synthetic oligonucleotide
uuaguguuacaaggcuguu

SEQ ID NO: 2174886 - RNA, 19 nt, Artificial Sequence
  Description of Artificial Sequence: Synthetic oligonucleotide
acacacacauacacacaca

SEQ ID NO: 2174887 - RNA, 19 nt, Artificial Sequence
  Description of Artificial Sequence: Synthetic oligonucleotide
ccuggcuagcuauguacag

SEQ ID NO: 2174888 - RNA, 19 nt, Artificial Sequence
  Description of Artificial Sequence: Synthetic oligonucleotide
agaugagccaaagguucau

SEQ ID NO: 2174889 - RNA, 19 nt, Artificial Sequence
  Description of Artificial Sequence: Synthetic oligonucleotide
ccauuacacgaugaaggag

SEQ ID NO: 2174890 - RNA, 19 nt, Artificial Sequence
  Description of Artificial Sequence: Synthetic oligonucleotide
gaggcggaaucugcuagga

SEQ ID NO: 2174891 - RNA, 19 nt, Artificial Sequence
  Description of Artificial Sequence: Synthetic oligonucleotide
acacacacacacacauaca

SEQ ID NO: 2174892 - RNA, 19 nt, Artificial Sequence
  Description of Artificial Sequence: Synthetic oligonucleotide
ggaucaagagccaacacuu

SEQ ID NO: 2174893 - RNA, 19 nt, Artificial Sequence
  Description of Artificial Sequence: Synthetic oligonucleotide
cuacuguacauggugacau

SEQ ID NO: 2174894 - RNA, 19 nt, Artificial Sequence
  Description of Artificial Sequence: Synthetic oligonucleotide
ggagaggaccuacuucaca

SEQ ID NO: 2174895 - RNA, 19 nt, Artificial Sequence
  Description of Artificial Sequence: Synthetic oligonucleotide
cagacagcgccucuuuaaa

SEQ ID NO: 2174896 - RNA, 19 nt, Artificial Sequence
  Description of Artificial Sequence: Synthetic oligonucleotide
ccuguauccauccuauuua

SEQ ID NO: 2174897 - RNA, 19 nt, Artificial Sequence
  Description of Artificial Sequence: Synthetic oligonucleotide
ggagguguuucugggaguc

SEQ ID NO: 2174898 - RNA, 19 nt, Artificial Sequence
  Description of Artificial Sequence: Synthetic oligonucleotide
acacacacacacacacaca

SEQ ID NO: 2174899 - RNA, 19 nt, Artificial Sequence
  Description of Artificial Sequence: Synthetic oligonucleotide
ccuuguucaacuguaucca

SEQ ID NO: 2174900 - RNA, 19 nt, Artificial Sequence
  Description of Artificial Sequence: Synthetic oligonucleotide
gcagucagccuaguucuag

SEQ ID NO: 2174901 - RNA, 19 nt, Artificial Sequence
  Description of Artificial Sequence: Synthetic oligonucleotide
guacauggugacaucacau

SEQ ID NO: 2174902 - RNA, 19 nt, Artificial Sequence
  Description of Artificial Sequence: Synthetic oligonucleotide
cuaguucucuacuguacau

SEQ ID NO: 2174903 - RNA, 19 nt, Artificial Sequence
  Description of Artificial Sequence: Synthetic oligonucleotide
auccaggcuuugcucuaca

SEQ ID NO: 2174904 - RNA, 19 nt, Artificial Sequence
  Description of Artificial Sequence: Synthetic oligonucleotide
guuuaauguuggcggucaa

SEQ ID NO: 2174905 - RNA, 19 nt, Artificial Sequence
  Description of Artificial Sequence: Synthetic oligonucleotide
gggcugucaccccuagugc

SEQ ID NO: 2174906 - RNA, 19 nt, Artificial Sequence
  Description of Artificial Sequence: Synthetic oligonucleotide
acgccaccuuguucaacug

SEQ ID NO: 2174907 - RNA, 19 nt, Artificial Sequence
  Description of Artificial Sequence: Synthetic oligonucleotide
gcucaacacagcuggaucu

SEQ ID NO: 2174908 - RNA, 19 nt, Artificial Sequence
  Description of Artificial Sequence: Synthetic oligonucleotide
gaccuacuucacaaacuaa

SEQ ID NO: 2174909 - RNA, 19 nt, Artificial Sequence
  Description of Artificial Sequence: Synthetic oligonucleotide
cuguauccauccuauuuau

SEQ ID NO: 2174910 - RNA, 19 nt, Artificial Sequence
  Description of Artificial Sequence: Synthetic oligonucleotide
cuuagguguuaacaaugau

SEQ ID NO: 2174911 - RNA, 19 nt, Artificial Sequence
  Description of Artificial Sequence: Synthetic oligonucleotide
ccucacauccugaacuaca

SEQ ID NO: 2174912 - RNA, 19 nt, Artificial Sequence
  Description of Artificial Sequence: Synthetic oligonucleotide
cugcuaggagggcaaaucu

SEQ ID NO: 2174913 - RNA, 19 nt, Artificial Sequence
  Description of Artificial Sequence: Synthetic oligonucleotide
guauccaggcuuugcucua

SEQ ID NO: 2174914 - RNA, 19 nt, Artificial Sequence
  Description of Artificial Sequence: Synthetic oligonucleotide
gccaaagguucauuggaua

SEQ ID NO: 2174915 - RNA, 19 nt, Artificial Sequence
  Description of Artificial Sequence: Synthetic oligonucleotide
ccgaggcggaaucugcuag

SEQ ID NO: 2174916 - RNA, 19 nt, Artificial Sequence
  Description of Artificial Sequence: Synthetic oligonucleotide
gcuaggagggcaaaucucu

SEQ ID NO: 2174917 - RNA, 19 nt, Artificial Sequence
  Description of Artificial Sequence: Synthetic oligonucleotide
caccucacauccugaacua

SEQ ID NO: 2174918 - RNA, 19 nt, Artificial Sequence
  Description of Artificial Sequence: Synthetic oligonucleotide
ccuagugcugggagcaguc

SEQ ID NO: 2174919 - RNA, 19 nt, Artificial Sequence
  Description of Artificial Sequence: Synthetic oligonucleotide
cacugccucaugcucugga

SEQ ID NO: 2174920 - RNA, 19 nt, Artificial Sequence
  Description of Artificial Sequence: Synthetic oligonucleotide
agacaaacccgaggcggaa

SEQ ID NO: 2174921 - RNA, 19 nt, Artificial Sequence
  Description of Artificial Sequence: Synthetic oligonucleotide
ccuauuuauuaguguuaca

SEQ ID NO: 2174922 - RNA, 19 nt, Artificial Sequence
  Description of Artificial Sequence: Synthetic oligonucleotide
cuccaccucacauccugaa

SEQ ID NO: 2174923 - RNA, 19 nt, Artificial Sequence
  Description of Artificial Sequence: Synthetic oligonucleotide
ggagggcaaaucucuccuc

SEQ ID NO: 2174924 - RNA, 19 nt, Artificial Sequence
  Description of Artificial Sequence: Synthetic oligonucleotide
cauccugaacuacaccaau

SEQ ID NO: 2174925 - RNA, 19 nt, Artificial Sequence
  Description of Artificial Sequence: Synthetic oligonucleotide
caacuguauccaggcuuug

SEQ ID NO: 2174926 - RNA, 19 nt, Artificial Sequence
  Description of Artificial Sequence: Synthetic oligonucleotide
cugagugcccagggauuug

SEQ ID NO: 2174927 - RNA, 19 nt, Artificial Sequence
  Description of Artificial Sequence: Synthetic oligonucleotide
ccucuuuauuaugucauaa

SEQ ID NO: 2174928 - RNA, 19 nt, Artificial Sequence
  Description of Artificial Sequence: Synthetic oligonucleotide
cgaggcggaaucugcuagg

SEQ ID NO: 2174929 - RNA, 19 nt, Artificial Sequence
  Description of Artificial Sequence: Synthetic oligonucleotide
ccaaagguucauuggauau

SEQ ID NO: 2174930 - RNA, 19 nt, Artificial Sequence
  Description of Artificial Sequence: Synthetic oligonucleotide
  modified_base (15)..(15): a, c, u, g, unknown or other
cgccucuuuaaaacncaag

SEQ ID NO: 2174931 - RNA, 19 nt, Artificial Sequence
  Description of Artificial Sequence: Synthetic oligonucleotide
gugaacuuuuggagucaga

SEQ ID NO: 2174932 - RNA, 19 nt, Artificial Sequence
  Description of Artificial Sequence: Synthetic oligonucleotide
acacacacacacacacaua

SEQ ID NO: 2174933 - RNA, 19 nt, Artificial Sequence
  Description of Artificial Sequence: Synthetic oligonucleotide
gagcagacagacagcgccu

SEQ ID NO: 2174934 - RNA, 19 nt, Artificial Sequence
  Description of Artificial Sequence: Synthetic oligonucleotide
caaccuucccucugggcau

SEQ ID NO: 2174935 - RNA, 19 nt, Artificial Sequence
  Description of Artificial Sequence: Synthetic oligonucleotide
gagucagagggaaccguau

SEQ ID NO: 2174936 - RNA, 19 nt, Artificial Sequence
  Description of Artificial Sequence: Synthetic oligonucleotide
ggcugucaccccuagugcu

SEQ ID NO: 2174937 - RNA, 19 nt, Artificial Sequence
  Description of Artificial Sequence: Synthetic oligonucleotide
ggaucugccggagcagaca

SEQ ID NO: 2174938 - RNA, 19 nt, Artificial Sequence
  Description of Artificial Sequence: Synthetic oligonucleotide
cacacacaaccuucccucu

SEQ ID NO: 2174939 - RNA, 19 nt, Artificial Sequence
  Description of Artificial Sequence: Synthetic oligonucleotide
ggcuuugcucuacacaauu

SEQ ID NO: 2174940 - RNA, 19 nt, Artificial Sequence
  Description of Artificial Sequence: Synthetic oligonucleotide
aggcuuugcucuacacaau

SEQ ID NO: 2174941 - RNA, 19 nt, Artificial Sequence
  Description of Artificial Sequence: Synthetic oligonucleotide
guacgccaccuuguucaac

SEQ ID NO: 2174942 - RNA, 19 nt, Artificial Sequence
  Description of Artificial Sequence: Synthetic oligonucleotide
cguaugcucagagagcaga

SEQ ID NO: 2174943 - RNA, 19 nt, Artificial Sequence
  Description of Artificial Sequence: Synthetic oligonucleotide
ggagucagagggaaccgua

SEQ ID NO: 2174944 - RNA, 19 nt, Artificial Sequence
  Description of Artificial Sequence: Synthetic oligonucleotide
cccuggcuagcuauguaca

SEQ ID NO: 2174945 - RNA, 19 nt, Artificial Sequence
  Description of Artificial Sequence: Synthetic oligonucleotide
gccuaguucuaggaacaca

SEQ ID NO: 2174946 - RNA, 19 nt, Artificial Sequence
  Description of Artificial Sequence: Synthetic oligonucleotide
guucucuacuguacauggu

SEQ ID NO: 2174947 - RNA, 19 nt, Artificial Sequence
  Description of Artificial Sequence: Synthetic oligonucleotide
gucaccccuagugcuggga

SEQ ID NO: 2174948 - RNA, 19 nt, Artificial Sequence
  Description of Artificial Sequence: Synthetic oligonucleotide
cgaacaagucugaaauaaa

SEQ ID NO: 2174949 - RNA, 19 nt, Artificial Sequence
  Description of Artificial Sequence: Synthetic oligonucleotide
cacuuccuuaaaagcuacu

SEQ ID NO: 2174950 - RNA, 19 nt, Artificial Sequence
  Description of Artificial Sequence: Synthetic oligonucleotide
gacugagugcccagggauu

SEQ ID NO: 2174951 - RNA, 19 nt, Artificial Sequence
  Description of Artificial Sequence: Synthetic oligonucleotide
agggaaccguaugcucaga

SEQ ID NO: 2174952 - RNA, 19 nt, Artificial Sequence
  Description of Artificial Sequence: Synthetic oligonucleotide
ugggagcagucagccuagu

SEQ ID NO: 2174953 - RNA, 19 nt, Artificial Sequence
  Description of Artificial Sequence: Synthetic oligonucleotide
gacaaacccgaggcggaau

SEQ ID NO: 2174954 - RNA, 19 nt, Artificial Sequence
  Description of Artificial Sequence: Synthetic oligonucleotide
ccugaacuacaccaaucua

SEQ ID NO: 2174955 - RNA, 19 nt, Artificial Sequence
  Description of Artificial Sequence: Synthetic oligonucleotide
ggcggucaaucuaauauuu

SEQ ID NO: 2174956 - RNA, 19 nt, Artificial Sequence
  Description of Artificial Sequence: Synthetic oligonucleotide
cuugaggcccuggcuagcu

SEQ ID NO: 2174957 - RNA, 19 nt, Artificial Sequence
  Description of Artificial Sequence: Synthetic oligonucleotide
gcauagaacuuagguguua

SEQ ID NO: 2174958 - RNA, 19 nt, Artificial Sequence
  Description of Artificial Sequence: Synthetic oligonucleotide
aggaggaccugggcauuuu

SEQ ID NO: 2174959 - RNA, 19 nt, Artificial Sequence
  Description of Artificial Sequence: Synthetic oligonucleotide
  modified_base (16)..(16): a, c, u, g, unknown or other
gcgccucuuuaaaacncaa

SEQ ID NO: 2174960 - RNA, 19 nt, Artificial Sequence
  Description of Artificial Sequence: Synthetic oligonucleotide
aucugccggagcagacaga

SEQ ID NO: 2174961 - RNA, 19 nt, Artificial Sequence
  Description of Artificial Sequence: Synthetic oligonucleotide
cugccggagcagacagaca

SEQ ID NO: 2174962 - RNA, 19 nt, Artificial Sequence
  Description of Artificial Sequence: Synthetic oligonucleotide
gggagucagccagugccuc

SEQ ID NO: 2174963 - RNA, 19 nt, Artificial Sequence
  Description of Artificial Sequence: Synthetic oligonucleotide
caaacccgaggcggaaucu

SEQ ID NO: 2174964 - RNA, 19 nt, Artificial Sequence
  Description of Artificial Sequence: Synthetic oligonucleotide
guggcucaacacagcugga

SEQ ID NO: 2174965 - RNA, 19 nt, Artificial Sequence
  Description of Artificial Sequence: Synthetic oligonucleotide
agcagucagccuaguucua

SEQ ID NO: 2174966 - RNA, 19 nt, Artificial Sequence
  Description of Artificial Sequence: Synthetic oligonucleotide
gcauuagcagagggcuguc

SEQ ID NO: 2174967 - RNA, 19 nt, Artificial Sequence
  Description of Artificial Sequence: Synthetic oligonucleotide
ccgagacuugaggcccugg

SEQ ID NO: 2174968 - RNA, 19 nt, Artificial Sequence
  Description of Artificial Sequence: Synthetic oligonucleotide
cagacagacagcgccucuu

SEQ ID NO: 2174969 - RNA, 19 nt, Artificial Sequence
  Description of Artificial Sequence: Synthetic oligonucleotide
ggcaucccaggaggaccug

SEQ ID NO: 2174970 - RNA, 19 nt, Artificial Sequence
  Description of Artificial Sequence: Synthetic oligonucleotide
gccgagacuugaggcccug

SEQ ID NO: 2174971 - RNA, 19 nt, Artificial Sequence
  Description of Artificial Sequence: Synthetic oligonucleotide
cuccuguauccauccuauu

SEQ ID NO: 2174972 - RNA, 19 nt, Artificial Sequence
  Description of Artificial Sequence: Synthetic oligonucleotide
cccucaggugaaggaggug

SEQ ID NO: 2174973 - RNA, 19 nt, Artificial Sequence
  Description of Artificial Sequence: Synthetic oligonucleotide
gcggucaaucuaauauuuu

SEQ ID NO: 2174974 - RNA, 19 nt, Artificial Sequence
  Description of Artificial Sequence: Synthetic oligonucleotide
gggagcagucagccuaguu

SEQ ID NO: 2174975 - RNA, 19 nt, Artificial Sequence
  Description of Artificial Sequence: Synthetic oligonucleotide
cccgaggcggaaucugcua

SEQ ID NO: 2174976 - RNA, 19 nt, Artificial Sequence
  Description of Artificial Sequence: Synthetic oligonucleotide
gccucaugcucuggaucaa

SEQ ID NO: 2174977 - RNA, 19 nt, Artificial Sequence
  Description of Artificial Sequence: Synthetic oligonucleotide
cgaugaaggagaggaccua

SEQ ID NO: 2174978 - RNA, 19 nt, Artificial Sequence
  Description of Artificial Sequence: Synthetic oligonucleotide
ggccgagacuugaggcccu

SEQ ID NO: 2174979 - RNA, 19 nt, Artificial Sequence
  Description of Artificial Sequence: Synthetic oligonucleotide
  modified_base (1)..(1): a, c, u, g, unknown or other
ncaagacaaacccgaggcg

SEQ ID NO: 2174980 - RNA, 19 nt, Artificial Sequence
  Description of Artificial Sequence: Synthetic oligonucleotide
aguaauauuucuuucauuc

SEQ ID NO: 2174981 - RNA, 19 nt, Artificial Sequence
  Description of Artificial Sequence: Synthetic oligonucleotide
aauaucagaaucaaaauuc

SEQ ID NO: 2174982 - RNA, 19 nt, Artificial Sequence
  Description of Artificial Sequence: Synthetic oligonucleotide
aaaugacagaaguaaaagc

SEQ ID NO: 2174983 - RNA, 19 nt, Artificial Sequence
  Description of Artificial Sequence: Synthetic oligonucleotide
aaaaucgccauauaguaag

SEQ ID NO: 2174984 - RNA, 19 nt, Artificial Sequence
  Description of Artificial Sequence: Synthetic oligonucleotide
uguauacauaacaagaaag

SEQ ID NO: 2174985 - RNA, 19 nt, Artificial Sequence
  Description of Artificial Sequence: Synthetic oligonucleotide
uuauguauacauaacaaga

SEQ ID NO: 2174986 - RNA, 19 nt, Artificial Sequence
  Description of Artificial Sequence: Synthetic oligonucleotide
gaaacgaagaccaagagug

SEQ ID NO: 2174987 - RNA, 19 nt, Artificial Sequence
  Description of Artificial Sequence: Synthetic oligonucleotide
ugucaaacuacuaugaaga

SEQ ID NO: 2174988 - RNA, 19 nt, Artificial Sequence
  Description of Artificial Sequence: Synthetic oligonucleotide
ucaaacauaugccaggaag

SEQ ID NO: 2174989 - RNA, 19 nt, Artificial Sequence
  Description of Artificial Sequence: Synthetic oligonucleotide
accauuaaacauuuuauuc

SEQ ID NO: 2174990 - RNA, 19 nt, Artificial Sequence
  Description of Artificial Sequence: Synthetic oligonucleotide
aaauucguuguauaaccac

SEQ ID NO: 2174991 - RNA, 19 nt, Artificial Sequence
  Description of Artificial Sequence: Synthetic oligonucleotide
uaauuauguauacauaaca

SEQ ID NO: 2174992 - RNA, 19 nt, Artificial Sequence
  Description of Artificial Sequence: Synthetic oligonucleotide
ugggauuuuaaacaggaag

SEQ ID NO: 2174993 - RNA, 19 nt, Artificial Sequence
  Description of Artificial Sequence: Synthetic oligonucleotide
cuauggacaacucaaaugc

SEQ ID NO: 2174994 - RNA, 19 nt, Artificial Sequence
  Description of Artificial Sequence: Synthetic oligonucleotide
ugaucagaaacgaagacca

SEQ ID NO: 2174995 - RNA, 19 nt, Artificial Sequence
  Description of Artificial Sequence: Synthetic oligonucleotide
agaauuuucauuuaauuau

SEQ ID NO: 2174996 - RNA, 19 nt, Artificial Sequence
  Description of Artificial Sequence: Synthetic oligonucleotide
cuauguaacacccaucugg

SEQ ID NO: 2174997 - RNA, 19 nt, Artificial Sequence
  Description of Artificial Sequence: Synthetic oligonucleotide
uuuggaauuuaucacagcu

SEQ ID NO: 2174998 - RNA, 19 nt, Artificial Sequence
  Description of Artificial Sequence: Synthetic oligonucleotide
aaugacagaaguaaaagca

SEQ ID NO: 2174999 - RNA, 19 nt, Artificial Sequence
  Description of Artificial Sequence: Synthetic oligonucleotide
auuguuaucuguuguuugc

SEQ ID NO: 2175000 - RNA, 19 nt, Artificial Sequence
  Description of Artificial Sequence: Synthetic oligonucleotide
uaagcuaauaucagaauca

SEQ ID NO: 2175001 - RNA, 19 nt, Artificial Sequence
  Description of Artificial Sequence: Synthetic oligonucleotide
uacuugaucagaaacgaag

SEQ ID NO: 2175002 - RNA, 19 nt, Artificial Sequence
  Description of Artificial Sequence: Synthetic oligonucleotide
agacagacaguccagauuc

SEQ ID NO: 2175003 - RNA, 19 nt, Artificial Sequence
  Description of Artificial Sequence: Synthetic oligonucleotide
ugacuuugaagcaagagcu

SEQ ID NO: 2175004 - RNA, 19 nt, Artificial Sequence
  Description of Artificial Sequence: Synthetic oligonucleotide
aaaaccugcacugaaugac

SEQ ID NO: 2175005 - RNA, 19 nt, Artificial Sequence
  Description of Artificial Sequence: Synthetic oligonucleotide
aaaagcccuauguaacacc

SEQ ID NO: 2175006 - RNA, 19 nt, Artificial Sequence
  Description of Artificial Sequence: Synthetic oligonucleotide
uauuuacuugaucagaaac

SEQ ID NO: 2175007 - RNA, 19 nt, Artificial Sequence
  Description of Artificial Sequence: Synthetic oligonucleotide
aaucugucaaacuacuaug

SEQ ID NO: 2175008 - RNA, 19 nt, Artificial Sequence
  Description of Artificial Sequence: Synthetic oligonucleotide
uccacaaacacgcucaagc

SEQ ID NO: 2175009 - RNA, 19 nt, Artificial Sequence
  Description of Artificial Sequence: Synthetic oligonucleotide
acuacuaugaagaauuuuc

SEQ ID NO: 2175010 - RNA, 19 nt, Artificial Sequence
  Description of Artificial Sequence: Synthetic oligonucleotide
auaaccacaauucaaucug

SEQ ID NO: 2175011 - RNA, 19 nt, Artificial Sequence
  Description of Artificial Sequence: Synthetic oligonucleotide
aauggaucgcucuugucuc

SEQ ID NO: 2175012 - RNA, 19 nt, Artificial Sequence
  Description of Artificial Sequence: Synthetic oligonucleotide
caagcuuacaauuaucgag

SEQ ID NO: 2175013 - RNA, 19 nt, Artificial Sequence
  Description of Artificial Sequence: Synthetic oligonucleotide
uguaacacccaucuggagc

SEQ ID NO: 2175014 - RNA, 19 nt, Artificial Sequence
  Description of Artificial Sequence: Synthetic oligonucleotide
uaucccaacaaacuaagcu

SEQ ID NO: 2175015 - RNA, 19 nt, Artificial Sequence
  Description of Artificial Sequence: Synthetic oligonucleotide
ugguguauuuacuugauca

SEQ ID NO: 2175016 - RNA, 19 nt, Artificial Sequence
  Description of Artificial Sequence: Synthetic oligonucleotide
uguauaaccacaauucaau

SEQ ID NO: 2175017 - RNA, 19 nt, Artificial Sequence
  Description of Artificial Sequence: Synthetic oligonucleotide
auuaucgagaaaaugacag

SEQ ID NO: 2175018 - RNA, 19 nt, Artificial Sequence
  Description of Artificial Sequence: Synthetic oligonucleotide
cucaagcuuacaauuaucg

SEQ ID NO: 2175019 - RNA, 19 nt, Artificial Sequence
  Description of Artificial Sequence: Synthetic oligonucleotide
auaacaagaaagaaaguuc

SEQ ID NO: 2175020 - RNA, 19 nt, Artificial Sequence
  Description of Artificial Sequence: Synthetic oligonucleotide
agcaacauaaauuuggaau

SEQ ID NO: 2175021 - RNA, 19 nt, Artificial Sequence
  Description of Artificial Sequence: Synthetic oligonucleotide
uuugcuaccauuaaacauu

SEQ ID NO: 2175022 - RNA, 19 nt, Artificial Sequence
  Description of Artificial Sequence: Synthetic oligonucleotide
auaucaaacauaugccagg

SEQ ID NO: 2175023 - RNA, 19 nt, Artificial Sequence
  Description of Artificial Sequence: Synthetic oligonucleotide
uggacuuuguuccauuggg

SEQ ID NO: 2175024 - RNA, 19 nt, Artificial Sequence
  Description of Artificial Sequence: Synthetic oligonucleotide
uuaauuauguauacauaac

SEQ ID NO: 2175025 - RNA, 19 nt, Artificial Sequence
  Description of Artificial Sequence: Synthetic oligonucleotide
uauguauacauaacaagaa

SEQ ID NO: 2175026 - RNA, 19 nt, Artificial Sequence
  Description of Artificial Sequence: Synthetic oligonucleotide
caaacauaugccaggaagg

SEQ ID NO: 2175027 - RNA, 19 nt, Artificial Sequence
  Description of Artificial Sequence: Synthetic oligonucleotide
aacaaacucauuucuucag

SEQ ID NO: 2175028 - RNA, 19 nt, Artificial Sequence
  Description of Artificial Sequence: Synthetic oligonucleotide
uuuaucacagcuuucuuaa

SEQ ID NO: 2175029 - RNA, 19 nt, Artificial Sequence
  Description of Artificial Sequence: Synthetic oligonucleotide
uuuuaauuugcuaccauua

SEQ ID NO: 2175030 - RNA, 19 nt, Artificial Sequence
  Description of Artificial Sequence: Synthetic oligonucleotide
acaauuaucgagaaaauga

SEQ ID NO: 2175031 - RNA, 19 nt, Artificial Sequence
  Description of Artificial Sequence: Synthetic oligonucleotide
aaagcccuauguaacaccc

SEQ ID NO: 2175032 - RNA, 19 nt, Artificial Sequence
  Description of Artificial Sequence: Synthetic oligonucleotide
acaucagccugcuaaauuc

SEQ ID NO: 2175033 - RNA, 19 nt, Artificial Sequence
  Description of Artificial Sequence: Synthetic oligonucleotide
acaacucaaaugcaggcgg

SEQ ID NO: 2175034 - RNA, 19 nt, Artificial Sequence
  Description of Artificial Sequence: Synthetic oligonucleotide
auaauaugaccacaaacca

SEQ ID NO: 2175035 - RNA, 19 nt, Artificial Sequence
  Description of Artificial Sequence: Synthetic oligonucleotide
auaucuguuuggcaucucc

SEQ ID NO: 2175036 - RNA, 19 nt, Artificial Sequence
  Description of Artificial Sequence: Synthetic oligonucleotide
uauaaccacaauucaaucu

SEQ ID NO: 2175037 - RNA, 19 nt, Artificial Sequence
  Description of Artificial Sequence: Synthetic oligonucleotide
ucagaaacgaagaccaaga

SEQ ID NO: 2175038 - RNA, 19 nt, Artificial Sequence
  Description of Artificial Sequence: Synthetic oligonucleotide
aucgccauauaguaaguac

SEQ ID NO: 2175039 - RNA, 19 nt, Artificial Sequence
  Description of Artificial Sequence: Synthetic oligonucleotide
aauaugaccacaaaccaau

SEQ ID NO: 2175040 - RNA, 19 nt, Artificial Sequence
  Description of Artificial Sequence: Synthetic oligonucleotide
ucgaauguacccauaauuc

SEQ ID NO: 2175041 - RNA, 19 nt, Artificial Sequence
  Description of Artificial Sequence: Synthetic oligonucleotide
ucacuuacaaauugcaaac

SEQ ID NO: 2175042 - RNA, 19 nt, Artificial Sequence
  Description of Artificial Sequence: Synthetic oligonucleotide
ugauauaauaugaccacaa

SEQ ID NO: 2175043 - RNA, 19 nt, Artificial Sequence
  Description of Artificial Sequence: Synthetic oligonucleotide
uuuacuugaucagaaacga

SEQ ID NO: 2175044 - RNA, 19 nt, Artificial Sequence
  Description of Artificial Sequence: Synthetic oligonucleotide
aaacuaagcuaauaucaga

SEQ ID NO: 2175045 - RNA, 19 nt, Artificial Sequence
  Description of Artificial Sequence: Synthetic oligonucleotide
ucucacaucagccugcuaa

SEQ ID NO: 2175046 - RNA, 19 nt, Artificial Sequence
  Description of Artificial Sequence: Synthetic oligonucleotide
cuaagcuaauaucagaauc

SEQ ID NO: 2175047 - RNA, 19 nt, Artificial Sequence
  Description of Artificial Sequence: Synthetic oligonucleotide
caauuaucgagaaaaugac

SEQ ID NO: 2175048 - RNA, 19 nt, Artificial Sequence
  Description of Artificial Sequence: Synthetic oligonucleotide
aaaccaauuucauggguga

SEQ ID NO: 2175049 - RNA, 19 nt, Artificial Sequence
  Description of Artificial Sequence: Synthetic oligonucleotide
ccugcuaaauucaugaugg

SEQ ID NO: 2175050 - RNA, 19 nt, Artificial Sequence
  Description of Artificial Sequence: Synthetic oligonucleotide
caaauugcaaacaaacuca

SEQ ID NO: 2175051 - RNA, 19 nt, Artificial Sequence
  Description of Artificial Sequence: Synthetic oligonucleotide
uuaauuugcuaccauuaaa

SEQ ID NO: 2175052 - RNA, 19 nt, Artificial Sequence
  Description of Artificial Sequence: Synthetic oligonucleotide
aguuuucacuuacaaauug

SEQ ID NO: 2175053 - RNA, 19 nt, Artificial Sequence
  Description of Artificial Sequence: Synthetic oligonucleotide
cuuucauucucacaucagc

SEQ ID NO: 2175054 - RNA, 19 nt, Artificial Sequence
  Description of Artificial Sequence: Synthetic oligonucleotide
uuuaauuugcuaccauuaa

SEQ ID NO: 2175055 - RNA, 19 nt, Artificial Sequence
  Description of Artificial Sequence: Synthetic oligonucleotide
augaugggauuuuaaacag

SEQ ID NO: 2175056 - RNA, 19 nt, Artificial Sequence
  Description of Artificial Sequence: Synthetic oligonucleotide
aauauuucuuucauucuca

SEQ ID NO: 2175057 - RNA, 19 nt, Artificial Sequence
  Description of Artificial Sequence: Synthetic oligonucleotide
uugaucagaaacgaagacc

SEQ ID NO: 2175058 - RNA, 19 nt, Artificial Sequence
  Description of Artificial Sequence: Synthetic oligonucleotide
uggaauuuaucacagcuuu

SEQ ID NO: 2175059 - RNA, 19 nt, Artificial Sequence
  Description of Artificial Sequence: Synthetic oligonucleotide
gagaaaaugacagaaguaa

SEQ ID NO: 2175060 - RNA, 19 nt, Artificial Sequence
  Description of Artificial Sequence: Synthetic oligonucleotide
uuugcugacgaagacagac

SEQ ID NO: 2175061 - RNA, 19 nt, Artificial Sequence
  Description of Artificial Sequence: Synthetic oligonucleotide
caucucuugauauaauaug

SEQ ID NO: 2175062 - RNA, 19 nt, Artificial Sequence
  Description of Artificial Sequence: Synthetic oligonucleotide
uguuguuugcugacgaaga

SEQ ID NO: 2175063 - RNA, 19 nt, Artificial Sequence
  Description of Artificial Sequence: Synthetic oligonucleotide
ugcacagcuuauuaacccg

SEQ ID NO: 2175064 - RNA, 19 nt, Artificial Sequence
  Description of Artificial Sequence: Synthetic oligonucleotide
agaaguaaaagcaggagga

SEQ ID NO: 2175065 - RNA, 19 nt, Artificial Sequence
  Description of Artificial Sequence: Synthetic oligonucleotide
agcaaauucguuguauaac

SEQ ID NO: 2175066 - RNA, 19 nt, Artificial Sequence
  Description of Artificial Sequence: Synthetic oligonucleotide
gaaguguuccaccaucacc

SEQ ID NO: 2175067 - RNA, 19 nt, Artificial Sequence
  Description of Artificial Sequence: Synthetic oligonucleotide
ugaugggauuuuaaacagg

SEQ ID NO: 2175068 - RNA, 19 nt, Artificial Sequence
  Description of Artificial Sequence: Synthetic oligonucleotide
auugagaagccguuggcug

SEQ ID NO: 2175069 - RNA, 19 nt, Artificial Sequence
  Description of Artificial Sequence: Synthetic oligonucleotide
uaauaugaccacaaaccaa

SEQ ID NO: 2175070 - RNA, 19 nt, Artificial Sequence
  Description of Artificial Sequence: Synthetic oligonucleotide
ucucuugauauaauaugac

SEQ ID NO: 2175071 - RNA, 19 nt, Artificial Sequence
  Description of Artificial Sequence: Synthetic oligonucleotide
aaagcaaauucguuguaua

SEQ ID NO: 2175072 - RNA, 19 nt, Artificial Sequence
  Description of Artificial Sequence: Synthetic oligonucleotide
agaaacgaagaccaagagu

SEQ ID NO: 2175073 - RNA, 19 nt, Artificial Sequence
  Description of Artificial Sequence: Synthetic oligonucleotide
ugaccacaaaccaauuuca

SEQ ID NO: 2175074 - RNA, 19 nt, Artificial Sequence
  Description of Artificial Sequence: Synthetic oligonucleotide
ucgccauauaguaaguaca

SEQ ID NO: 2175075 - RNA, 19 nt, Artificial Sequence
  Description of Artificial Sequence: Synthetic oligonucleotide
aacuaagcuaauaucagaa

SEQ ID NO: 2175076 - RNA, 19 nt, Artificial Sequence
  Description of Artificial Sequence: Synthetic oligonucleotide
aagcuuacaauuaucgaga

SEQ ID NO: 2175077 - RNA, 19 nt, Artificial Sequence
  Description of Artificial Sequence: Synthetic oligonucleotide
uucaaucugucaaacuacu

SEQ ID NO: 2175078 - RNA, 19 nt, Artificial Sequence
  Description of Artificial Sequence: Synthetic oligonucleotide
acuuugaagcaagagcugg

SEQ ID NO: 2175079 - RNA, 19 nt, Artificial Sequence
  Description of Artificial Sequence: Synthetic oligonucleotide
uucaugaugggauuuuaaa

SEQ ID NO: 2175080 - RNA, 19 nt, Artificial Sequence
  Description of Artificial Sequence: Synthetic oligonucleotide
gcaaauucguuguauaacc

SEQ ID NO: 2175081 - RNA, 19 nt, Artificial Sequence
  Description of Artificial Sequence: Synthetic oligonucleotide
uaucgagaaaaugacagaa

SEQ ID NO: 2175082 - RNA, 19 nt, Artificial Sequence
  Description of Artificial Sequence: Synthetic oligonucleotide
uauggacauuuuaauuugc

SEQ ID NO: 2175083 - RNA, 19 nt, Artificial Sequence
  Description of Artificial Sequence: Synthetic oligonucleotide
accaucaccucauugagaa

SEQ ID NO: 2175084 - RNA, 19 nt, Artificial Sequence
  Description of Artificial Sequence: Synthetic oligonucleotide
aacucaaaugcaggcgggc

SEQ ID NO: 2175085 - RNA, 19 nt, Artificial Sequence
  Description of Artificial Sequence: Synthetic oligonucleotide
gacaacucaaaugcaggcg

SEQ ID NO: 2175086 - RNA, 19 nt, Artificial Sequence
  Description of Artificial Sequence: Synthetic oligonucleotide
ugaaugacaacugcuggug

SEQ ID NO: 2175087 - RNA, 19 nt, Artificial Sequence
  Description of Artificial Sequence: Synthetic oligonucleotide
ucaagcuuacaauuaucga

SEQ ID NO: 2175088 - RNA, 19 nt, Artificial Sequence
  Description of Artificial Sequence: Synthetic oligonucleotide
aauuaucgagaaaaugaca

SEQ ID NO: 2175089 - RNA, 19 nt, Artificial Sequence
  Description of Artificial Sequence: Synthetic oligonucleotide
aacacgcucaagcuuacaa

SEQ ID NO: 2175090 - RNA, 19 nt, Artificial Sequence
  Description of Artificial Sequence: Synthetic oligonucleotide
uuauucagggcaucucuug

SEQ ID NO: 2175091 - RNA, 19 nt, Artificial Sequence
  Description of Artificial Sequence: Synthetic oligonucleotide
ucuugucucgaauguaccc

SEQ ID NO: 2175092 - RNA, 19 nt, Artificial Sequence
  Description of Artificial Sequence: Synthetic oligonucleotide
aagcaaauucguuguauaa

SEQ ID NO: 2175093 - RNA, 19 nt, Artificial Sequence
  Description of Artificial Sequence: Synthetic oligonucleotide
aauuucaugggugauuguu

SEQ ID NO: 2175094 - RNA, 19 nt, Artificial Sequence
  Description of Artificial Sequence: Synthetic oligonucleotide
aaacauaugccaggaaggu

SEQ ID NO: 2175095 - RNA, 19 nt, Artificial Sequence
  Description of Artificial Sequence: Synthetic oligonucleotide
gaugggauuuuaaacagga

SEQ ID NO: 2175096 - RNA, 19 nt, Artificial Sequence
  Description of Artificial Sequence: Synthetic oligonucleotide
uuaucgagaaaaugacaga

SEQ ID NO: 2175097 - RNA, 19 nt, Artificial Sequence
  Description of Artificial Sequence: Synthetic oligonucleotide
aacauaugccaggaagguc

SEQ ID NO: 2175098 - RNA, 19 nt, Artificial Sequence
  Description of Artificial Sequence: Synthetic oligonucleotide
aaugcaggcgggcugacuu

SEQ ID NO: 2175099 - RNA, 19 nt, Artificial Sequence
  Description of Artificial Sequence: Synthetic oligonucleotide
ucguuguauaaccacaauu

SEQ ID NO: 2175100 - RNA, 19 nt, Artificial Sequence
  Description of Artificial Sequence: Synthetic oligonucleotide
acauaugccaggaagguca

SEQ ID NO: 2175101 - RNA, 19 nt, Artificial Sequence
  Description of Artificial Sequence: Synthetic oligonucleotide
ggaauaucaaacauaugcc

SEQ ID NO: 2175102 - RNA, 19 nt, Artificial Sequence
  Description of Artificial Sequence: Synthetic oligonucleotide
gggauuuuaaacaggaagc

SEQ ID NO: 2175103 - RNA, 19 nt, Artificial Sequence
  Description of Artificial Sequence: Synthetic oligonucleotide
ucccaacaaacuaagcuaa

SEQ ID NO: 2175104 - RNA, 19 nt, Artificial Sequence
  Description of Artificial Sequence: Synthetic oligonucleotide
uauucagggcaucucuuga

SEQ ID NO: 2175105 - RNA, 19 nt, Artificial Sequence
  Description of Artificial Sequence: Synthetic oligonucleotide
cugacgaagacagacaguc

SEQ ID NO: 2175106 - RNA, 19 nt, Artificial Sequence
  Description of Artificial Sequence: Synthetic oligonucleotide
acacucgcgugucagcagc

SEQ ID NO: 2175107 - RNA, 19 nt, Artificial Sequence
  Description of Artificial Sequence: Synthetic oligonucleotide
agaaguguuccaccaucac

SEQ ID NO: 2175108 - RNA, 19 nt, Artificial Sequence
  Description of Artificial Sequence: Synthetic oligonucleotide
uuuggcaucuccuggacuu

SEQ ID NO: 2175109 - RNA, 19 nt, Artificial Sequence
  Description of Artificial Sequence: Synthetic oligonucleotide
cacaaaccaauuucauggg

SEQ ID NO: 2175110 - RNA, 19 nt, Artificial Sequence
  Description of Artificial Sequence: Synthetic oligonucleotide
aaugacaacugcuggugua

SEQ ID NO: 2175111 - RNA, 19 nt, Artificial Sequence
  Description of Artificial Sequence: Synthetic oligonucleotide
uuaucuguuguuugcugac

SEQ ID NO: 2175112 - RNA, 19 nt, Artificial Sequence
  Description of Artificial Sequence: Synthetic oligonucleotide
auacauaacaagaaagaaa

SEQ ID NO: 2175113 - RNA, 19 nt, Artificial Sequence
  Description of Artificial Sequence: Synthetic oligonucleotide
ugcuaaauucaugauggga

SEQ ID NO: 2175114 - RNA, 19 nt, Artificial Sequence
  Description of Artificial Sequence: Synthetic oligonucleotide
ugcugguguauuuacuuga

SEQ ID NO: 2175115 - RNA, 19 nt, Artificial Sequence
  Description of Artificial Sequence: Synthetic oligonucleotide
cuugaucagaaacgaagac

SEQ ID NO: 2175116 - RNA, 19 nt, Artificial Sequence
  Description of Artificial Sequence: Synthetic oligonucleotide
guaacacccaucuggagca

SEQ ID NO: 2175117 - RNA, 19 nt, Artificial Sequence
  Description of Artificial Sequence: Synthetic oligonucleotide
uaccauuaaacauuuuauu

SEQ ID NO: 2175118 - RNA, 19 nt, Artificial Sequence
  Description of Artificial Sequence: Synthetic oligonucleotide
uauggacaacucaaaugca

SEQ ID NO: 2175119 - RNA, 19 nt, Artificial Sequence
  Description of Artificial Sequence: Synthetic oligonucleotide
uaucaaacauaugccagga

SEQ ID NO: 2175120 - RNA, 19 nt, Artificial Sequence
  Description of Artificial Sequence: Synthetic oligonucleotide
cagcuuauuaacccggcag

SEQ ID NO: 2175121 - RNA, 19 nt, Artificial Sequence
  Description of Artificial Sequence: Synthetic oligonucleotide
aauguacccauaauucagu

SEQ ID NO: 2175122 - RNA, 19 nt, Artificial Sequence
  Description of Artificial Sequence: Synthetic oligonucleotide
uacuaugaagaauuuucau

SEQ ID NO: 2175123 - RNA, 19 nt, Artificial Sequence
  Description of Artificial Sequence: Synthetic oligonucleotide
agcuuauuaacccggcagu

SEQ ID NO: 2175124 - RNA, 19 nt, Artificial Sequence
  Description of Artificial Sequence: Synthetic oligonucleotide
augacagaaguaaaagcag

SEQ ID NO: 2175125 - RNA, 19 nt, Artificial Sequence
  Description of Artificial Sequence: Synthetic oligonucleotide
gauauaauaugaccacaaa

SEQ ID NO: 2175126 - RNA, 19 nt, Artificial Sequence
  Description of Artificial Sequence: Synthetic oligonucleotide
uccauugggcaauauggac

SEQ ID NO: 2175127 - RNA, 19 nt, Artificial Sequence
  Description of Artificial Sequence: Synthetic oligonucleotide
aaggucaacuucuguuucu

SEQ ID NO: 2175128 - RNA, 19 nt, Artificial Sequence
  Description of Artificial Sequence: Synthetic oligonucleotide
auuuuauucagggcaucuc

SEQ ID NO: 2175129 - RNA, 19 nt, Artificial Sequence
  Description of Artificial Sequence: Synthetic oligonucleotide
gguguauuuacuugaucag

SEQ ID NO: 2175130 - RNA, 19 nt, Artificial Sequence
  Description of Artificial Sequence: Synthetic oligonucleotide
aagacagacaguccagauu

SEQ ID NO: 2175131 - RNA, 19 nt, Artificial Sequence
  Description of Artificial Sequence: Synthetic oligonucleotide
uuucaugggugauuguuau

SEQ ID NO: 2175132 - RNA, 19 nt, Artificial Sequence
  Description of Artificial Sequence: Synthetic oligonucleotide
uaugaccacaaaccaauuu

SEQ ID NO: 2175133 - RNA, 19 nt, Artificial Sequence
  Description of Artificial Sequence: Synthetic oligonucleotide
uggagcacuccccuugugc

SEQ ID NO: 2175134 - RNA, 19 nt, Artificial Sequence
  Description of Artificial Sequence: Synthetic oligonucleotide
accacaauucaaucuguca

SEQ ID NO: 2175135 - RNA, 19 nt, Artificial Sequence
  Description of Artificial Sequence: Synthetic oligonucleotide
aucgcucuugucucgaaug

SEQ ID NO: 2175136 - RNA, 19 nt, Artificial Sequence
  Description of Artificial Sequence: Synthetic oligonucleotide
uuggaauuuaucacagcuu

SEQ ID NO: 2175137 - RNA, 19 nt, Artificial Sequence
  Description of Artificial Sequence: Synthetic oligonucleotide
uccacgcaugccuugucgg

SEQ ID NO: 2175138 - RNA, 19 nt, Artificial Sequence
  Description of Artificial Sequence: Synthetic oligonucleotide
aacauuuuauucagggcau

SEQ ID NO: 2175139 - RNA, 19 nt, Artificial Sequence
  Description of Artificial Sequence: Synthetic oligonucleotide
ucaaacuacuaugaagaau

SEQ ID NO: 2175140 - RNA, 19 nt, Artificial Sequence
  Description of Artificial Sequence: Synthetic oligonucleotide
gcuauggacaacucaaaug

SEQ ID NO: 2175141 - RNA, 19 nt, Artificial Sequence
  Description of Artificial Sequence: Synthetic oligonucleotide
uuuauucagggcaucucuu

SEQ ID NO: 2175142 - RNA, 19 nt, Artificial Sequence
  Description of Artificial Sequence: Synthetic oligonucleotide
cauucucacaucagccugc

SEQ ID NO: 2175143 - RNA, 19 nt, Artificial Sequence
  Description of Artificial Sequence: Synthetic oligonucleotide
gaauuuaucacagcuuucu

SEQ ID NO: 2175144 - RNA, 19 nt, Artificial Sequence
  Description of Artificial Sequence: Synthetic oligonucleotide
ugccuugucggaagaagug

SEQ ID NO: 2175145 - RNA, 19 nt, Artificial Sequence
  Description of Artificial Sequence: Synthetic oligonucleotide
ucuggugcacagcuuauua

SEQ ID NO: 2175146 - RNA, 19 nt, Artificial Sequence
  Description of Artificial Sequence: Synthetic oligonucleotide
ucagccugcuaaauucaug

SEQ ID NO: 2175147 - RNA, 19 nt, Artificial Sequence
  Description of Artificial Sequence: Synthetic oligonucleotide
acuaagcuaauaucagaau

SEQ ID NO: 2175148 - RNA, 19 nt, Artificial Sequence
  Description of Artificial Sequence: Synthetic oligonucleotide
uucuuccacaaacacgcuc

SEQ ID NO: 2175149 - RNA, 19 nt, Artificial Sequence
  Description of Artificial Sequence: Synthetic oligonucleotide
uuaucacagcuuucuuaag

SEQ ID NO: 2175150 - RNA, 19 nt, Artificial Sequence
  Description of Artificial Sequence: Synthetic oligonucleotide
ccauuaaacauuuuauuca

SEQ ID NO: 2175151 - RNA, 19 nt, Artificial Sequence
  Description of Artificial Sequence: Synthetic oligonucleotide
cguuguauaaccacaauuc

SEQ ID NO: 2175152 - RNA, 19 nt, Artificial Sequence
  Description of Artificial Sequence: Synthetic oligonucleotide
uugucggaagaaguguucc

SEQ ID NO: 2175153 - RNA, 19 nt, Artificial Sequence
  Description of Artificial Sequence: Synthetic oligonucleotide
aguaaaagcaggaggaaua

SEQ ID NO: 2175154 - RNA, 19 nt, Artificial Sequence
  Description of Artificial Sequence: Synthetic oligonucleotide
acuugaucagaaacgaaga

SEQ ID NO: 2175155 - RNA, 19 nt, Artificial Sequence
  Description of Artificial Sequence: Synthetic oligonucleotide
auccacgcaugccuugucg

SEQ ID NO: 2175156 - RNA, 19 nt, Artificial Sequence
  Description of Artificial Sequence: Synthetic oligonucleotide
aagcuaauaucagaaucaa

SEQ ID NO: 2175157 - RNA, 19 nt, Artificial Sequence
  Description of Artificial Sequence: Synthetic oligonucleotide
gacagaaguaaaagcagga

SEQ ID NO: 2175158 - RNA, 19 nt, Artificial Sequence
  Description of Artificial Sequence: Synthetic oligonucleotide
aauucaguuuucacuuaca

SEQ ID NO: 2175159 - RNA, 19 nt, Artificial Sequence
  Description of Artificial Sequence: Synthetic oligonucleotide
aacgaagaccaagagugaa

SEQ ID NO: 2175160 - RNA, 19 nt, Artificial Sequence
  Description of Artificial Sequence: Synthetic oligonucleotide
uuacuugaucagaaacgaa

SEQ ID NO: 2175161 - RNA, 19 nt, Artificial Sequence
  Description of Artificial Sequence: Synthetic oligonucleotide
augggugauuguuaucugu

SEQ ID NO: 2175162 - RNA, 19 nt, Artificial Sequence
  Description of Artificial Sequence: Synthetic oligonucleotide
ucaaaugcaggcgggcuga

SEQ ID NO: 2175163 - RNA, 19 nt, Artificial Sequence
  Description of Artificial Sequence: Synthetic oligonucleotide
cagaaacgaagaccaagag

SEQ ID NO: 2175164 - RNA, 19 nt, Artificial Sequence
  Description of Artificial Sequence: Synthetic oligonucleotide
uuucuuucauucucacauc

SEQ ID NO: 2175165 - RNA, 19 nt, Artificial Sequence
  Description of Artificial Sequence: Synthetic oligonucleotide
uugcugacgaagacagaca

SEQ ID NO: 2175166 - RNA, 19 nt, Artificial Sequence
  Description of Artificial Sequence: Synthetic oligonucleotide
ggcgggcugacuuugaagc

SEQ ID NO: 2175167 - RNA, 19 nt, Artificial Sequence
  Description of Artificial Sequence: Synthetic oligonucleotide
ugacgaagacagacagucc

SEQ ID NO: 2175168 - RNA, 19 nt, Artificial Sequence
  Description of Artificial Sequence: Synthetic oligonucleotide
guacccauaauucaguuuu

SEQ ID NO: 2175169 - RNA, 19 nt, Artificial Sequence
  Description of Artificial Sequence: Synthetic oligonucleotide
aaaccugcacugaaugaca

SEQ ID NO: 2175170 - RNA, 19 nt, Artificial Sequence
  Description of Artificial Sequence: Synthetic oligonucleotide
cuguuguuugcugacgaag

SEQ ID NO: 2175171 - RNA, 19 nt, Artificial Sequence
  Description of Artificial Sequence: Synthetic oligonucleotide
ugggugauuguuaucuguu

SEQ ID NO: 2175172 - RNA, 19 nt, Artificial Sequence
  Description of Artificial Sequence: Synthetic oligonucleotide
guuguuugcugacgaagac

SEQ ID NO: 2175173 - RNA, 19 nt, Artificial Sequence
  Description of Artificial Sequence: Synthetic oligonucleotide
cagccugcuaaauucauga

SEQ ID NO: 2175174 - RNA, 19 nt, Artificial Sequence
  Description of Artificial Sequence: Synthetic oligonucleotide
uggggcuauggacaacuca

SEQ ID NO: 2175175 - RNA, 19 nt, Artificial Sequence
  Description of Artificial Sequence: Synthetic oligonucleotide
acuccccuugugcacacuc

SEQ ID NO: 2175176 - RNA, 19 nt, Artificial Sequence
  Description of Artificial Sequence: Synthetic oligonucleotide
uccccuugugcacacucgc

SEQ ID NO: 2175177 - RNA, 19 nt, Artificial Sequence
  Description of Artificial Sequence: Synthetic oligonucleotide
ucaaucugucaaacuacua

SEQ ID NO: 2175178 - RNA, 19 nt, Artificial Sequence
  Description of Artificial Sequence: Synthetic oligonucleotide
aucgagaaaaugacagaag

SEQ ID NO: 2175179 - RNA, 19 nt, Artificial Sequence
  Description of Artificial Sequence: Synthetic oligonucleotide
ugauuguuaucuguuguuu

SEQ ID NO: 2175180 - RNA, 19 nt, Artificial Sequence
  Description of Artificial Sequence: Synthetic oligonucleotide
caaauucguuguauaacca

SEQ ID NO: 2175181 - RNA, 19 nt, Artificial Sequence
  Description of Artificial Sequence: Synthetic oligonucleotide
uugggcaauauggacauuu

SEQ ID NO: 2175182 - RNA, 19 nt, Artificial Sequence
  Description of Artificial Sequence: Synthetic oligonucleotide
uuguuaucuguuguuugcu

SEQ ID NO: 2175183 - RNA, 19 nt, Artificial Sequence
  Description of Artificial Sequence: Synthetic oligonucleotide
aacuacuaugaagaauuuu

SEQ ID NO: 2175184 - RNA, 19 nt, Artificial Sequence
  Description of Artificial Sequence: Synthetic oligonucleotide
cauaacaagaaagaaaguu

SEQ ID NO: 2175185 - RNA, 19 nt, Artificial Sequence
  Description of Artificial Sequence: Synthetic oligonucleotide
caguccagauuccuggcag

SEQ ID NO: 2175186 - RNA, 19 nt, Artificial Sequence
  Description of Artificial Sequence: Synthetic oligonucleotide
ugucggaagaaguguucca

SEQ ID NO: 2175187 - RNA, 19 nt, Artificial Sequence
  Description of Artificial Sequence: Synthetic oligonucleotide
gcuaccauuaaacauuuua

SEQ ID NO: 2175188 - RNA, 19 nt, Artificial Sequence
  Description of Artificial Sequence: Synthetic oligonucleotide
uguacccauaauucaguuu

SEQ ID NO: 2175189 - RNA, 19 nt, Artificial Sequence
  Description of Artificial Sequence: Synthetic oligonucleotide
agaaaaugacagaaguaaa

SEQ ID NO: 2175190 - RNA, 19 nt, Artificial Sequence
  Description of Artificial Sequence: Synthetic oligonucleotide
acauaaauuuggaauuuau

SEQ ID NO: 2175191 - RNA, 19 nt, Artificial Sequence
  Description of Artificial Sequence: Synthetic oligonucleotide
cugcuaaauucaugauggg

SEQ ID NO: 2175192 - RNA, 19 nt, Artificial Sequence
  Description of Artificial Sequence: Synthetic oligonucleotide
cuugucggaagaaguguuc

SEQ ID NO: 2175193 - RNA, 19 nt, Artificial Sequence
  Description of Artificial Sequence: Synthetic oligonucleotide
cucaaaugcaggcgggcug

SEQ ID NO: 2175194 - RNA, 19 nt, Artificial Sequence
  Description of Artificial Sequence: Synthetic oligonucleotide
guaauauuucuuucauucu

SEQ ID NO: 2175195 - RNA, 19 nt, Artificial Sequence
  Description of Artificial Sequence: Synthetic oligonucleotide
accugcacugaaugacaac

SEQ ID NO: 2175196 - RNA, 19 nt, Artificial Sequence
  Description of Artificial Sequence: Synthetic oligonucleotide
ucgcucuugucucgaaugu

SEQ ID NO: 2175197 - RNA, 19 nt, Artificial Sequence
  Description of Artificial Sequence: Synthetic oligonucleotide
ucucgaauguacccauaau

SEQ ID NO: 2175198 - RNA, 19 nt, Artificial Sequence
  Description of Artificial Sequence: Synthetic oligonucleotide
uucagggcaucucuugaua

SEQ ID NO: 2175199 - RNA, 19 nt, Artificial Sequence
  Description of Artificial Sequence: Synthetic oligonucleotide
uugcuaccauuaaacauuu

SEQ ID NO: 2175200 - RNA, 19 nt, Artificial Sequence
  Description of Artificial Sequence: Synthetic oligonucleotide
acagcuuauuaacccggca

SEQ ID NO: 2175201 - RNA, 19 nt, Artificial Sequence
  Description of Artificial Sequence: Synthetic oligonucleotide
uucguuguauaaccacaau

SEQ ID NO: 2175202 - RNA, 19 nt, Artificial Sequence
  Description of Artificial Sequence: Synthetic oligonucleotide
uccuuggauagcugcaguc

SEQ ID NO: 2175203 - RNA, 19 nt, Artificial Sequence
  Description of Artificial Sequence: Synthetic oligonucleotide
agcccuauguaacacccau

SEQ ID NO: 2175204 - RNA, 19 nt, Artificial Sequence
  Description of Artificial Sequence: Synthetic oligonucleotide
cacaauucaaucugucaaa

SEQ ID NO: 2175205 - RNA, 19 nt, Artificial Sequence
  Description of Artificial Sequence: Synthetic oligonucleotide
aagccugcuggggcuaugg

SEQ ID NO: 2175206 - RNA, 19 nt, Artificial Sequence
  Description of Artificial Sequence: Synthetic oligonucleotide
auaauucaguuuucacuua

SEQ ID NO: 2175207 - RNA, 19 nt, Artificial Sequence
  Description of Artificial Sequence: Synthetic oligonucleotide
auguaacacccaucuggag

SEQ ID NO: 2175208 - RNA, 19 nt, Artificial Sequence
  Description of Artificial Sequence: Synthetic oligonucleotide
uuaacccggcaguccuugg

SEQ ID NO: 2175209 - RNA, 19 nt, Artificial Sequence
  Description of Artificial Sequence: Synthetic oligonucleotide
cagacaguccagauuccug

SEQ ID NO: 2175210 - RNA, 19 nt, Artificial Sequence
  Description of Artificial Sequence: Synthetic oligonucleotide
caauggaucgcucuugucu

SEQ ID NO: 2175211 - RNA, 19 nt, Artificial Sequence
  Description of Artificial Sequence: Synthetic oligonucleotide
acacgcucaagcuuacaau

SEQ ID NO: 2175212 - RNA, 19 nt, Artificial Sequence
  Description of Artificial Sequence: Synthetic oligonucleotide
cugcugguguauuuacuug

SEQ ID NO: 2175213 - RNA, 19 nt, Artificial Sequence
  Description of Artificial Sequence: Synthetic oligonucleotide
aucuaucccaacaaacuaa

SEQ ID NO: 2175214 - RNA, 19 nt, Artificial Sequence
  Description of Artificial Sequence: Synthetic oligonucleotide
guguauuuacuugaucaga

SEQ ID NO: 2175215 - RNA, 19 nt, Artificial Sequence
  Description of Artificial Sequence: Synthetic oligonucleotide
aaacgaagaccaagaguga

SEQ ID NO: 2175216 - RNA, 19 nt, Artificial Sequence
  Description of Artificial Sequence: Synthetic oligonucleotide
uaacccggcaguccuugga

SEQ ID NO: 2175217 - RNA, 19 nt, Artificial Sequence
  Description of Artificial Sequence: Synthetic oligonucleotide
ucgcgugucagcagcuucu

SEQ ID NO: 2175218 - RNA, 19 nt, Artificial Sequence
  Description of Artificial Sequence: Synthetic oligonucleotide
aacccggcaguccuuggau

SEQ ID NO: 2175219 - RNA, 19 nt, Artificial Sequence
  Description of Artificial Sequence: Synthetic oligonucleotide
ggauagcugcagucaaugg

SEQ ID NO: 2175220 - RNA, 19 nt, Artificial Sequence
  Description of Artificial Sequence: Synthetic oligonucleotide
uugucucgaauguacccau

SEQ ID NO: 2175221 - RNA, 19 nt, Artificial Sequence
  Description of Artificial Sequence: Synthetic oligonucleotide
ucuggagcacuccccuugu

SEQ ID NO: 2175222 - RNA, 19 nt, Artificial Sequence
  Description of Artificial Sequence: Synthetic oligonucleotide
cuugucucgaauguaccca

SEQ ID NO: 2175223 - RNA, 19 nt, Artificial Sequence
  Description of Artificial Sequence: Synthetic oligonucleotide
aaucgccauauaguaagua

SEQ ID NO: 2175224 - RNA, 19 nt, Artificial Sequence
  Description of Artificial Sequence: Synthetic oligonucleotide
ucugccugccagcagccau

SEQ ID NO: 2175225 - RNA, 19 nt, Artificial Sequence
  Description of Artificial Sequence: Synthetic oligonucleotide
ugucugccugccagcagcc

SEQ ID NO: 2175226 - RNA, 19 nt, Artificial Sequence
  Description of Artificial Sequence: Synthetic oligonucleotide
ccaauuucaugggugauug

SEQ ID NO: 2175227 - RNA, 19 nt, Artificial Sequence
  Description of Artificial Sequence: Synthetic oligonucleotide
caucuaucccaacaaacua

SEQ ID NO: 2175228 - RNA, 19 nt, Artificial Sequence
  Description of Artificial Sequence: Synthetic oligonucleotide
auucguuguauaaccacaa

SEQ ID NO: 2175229 - RNA, 19 nt, Artificial Sequence
  Description of Artificial Sequence: Synthetic oligonucleotide
aggaggaauaucaaacaua

SEQ ID NO: 2175230 - RNA, 19 nt, Artificial Sequence
  Description of Artificial Sequence: Synthetic oligonucleotide
gcaguccuuggauagcugc

SEQ ID NO: 2175231 - RNA, 19 nt, Artificial Sequence
  Description of Artificial Sequence: Synthetic oligonucleotide
ggugcacagcuuauuaacc

SEQ ID NO: 2175232 - RNA, 19 nt, Artificial Sequence
  Description of Artificial Sequence: Synthetic oligonucleotide
auguacccauaauucaguu

SEQ ID NO: 2175233 - RNA, 19 nt, Artificial Sequence
  Description of Artificial Sequence: Synthetic oligonucleotide
ucaauggaucgcucuuguc

SEQ ID NO: 2175234 - RNA, 19 nt, Artificial Sequence
  Description of Artificial Sequence: Synthetic oligonucleotide
gaggaauaucaaacauaug

SEQ ID NO: 2175235 - RNA, 19 nt, Artificial Sequence
  Description of Artificial Sequence: Synthetic oligonucleotide
acauaacaagaaagaaagu

SEQ ID NO: 2175236 - RNA, 19 nt, Artificial Sequence
  Description of Artificial Sequence: Synthetic oligonucleotide
acgcaugccuugucggaag

SEQ ID NO: 2175237 - RNA, 19 nt, Artificial Sequence
  Description of Artificial Sequence: Synthetic oligonucleotide
ugcacacucgcgugucagc

SEQ ID NO: 2175238 - RNA, 19 nt, Artificial Sequence
  Description of Artificial Sequence: Synthetic oligonucleotide
cuguuucugcuuuuaagua

SEQ ID NO: 2175239 - RNA, 19 nt, Artificial Sequence
  Description of Artificial Sequence: Synthetic oligonucleotide
gucucgaauguacccauaa

SEQ ID NO: 2175240 - RNA, 19 nt, Artificial Sequence
  Description of Artificial Sequence: Synthetic oligonucleotide
aucaaacauaugccaggaa

SEQ ID NO: 2175241 - RNA, 19 nt, Artificial Sequence
  Description of Artificial Sequence: Synthetic oligonucleotide
ggaggaauaucaaacauau

SEQ ID NO: 2175242 - RNA, 19 nt, Artificial Sequence
  Description of Artificial Sequence: Synthetic oligonucleotide
aggcgggcugacuuugaag

SEQ ID NO: 2175243 - RNA, 19 nt, Artificial Sequence
  Description of Artificial Sequence: Synthetic oligonucleotide
uucaugggugauuguuauc

SEQ ID NO: 2175244 - RNA, 19 nt, Artificial Sequence
  Description of Artificial Sequence: Synthetic oligonucleotide
caauauggacauuuuaauu

SEQ ID NO: 2175245 - RNA, 19 nt, Artificial Sequence
  Description of Artificial Sequence: Synthetic oligonucleotide
ugggcaauauggacauuuu

SEQ ID NO: 2175246 - RNA, 19 nt, Artificial Sequence
  Description of Artificial Sequence: Synthetic oligonucleotide
cuuggauagcugcagucaa

SEQ ID NO: 2175247 - RNA, 19 nt, Artificial Sequence
  Description of Artificial Sequence: Synthetic oligonucleotide
acucaaaugcaggcgggcu

SEQ ID NO: 2175248 - RNA, 19 nt, Artificial Sequence
  Description of Artificial Sequence: Synthetic oligonucleotide
acgaagacagacaguccag

SEQ ID NO: 2175249 - RNA, 19 nt, Artificial Sequence
  Description of Artificial Sequence: Synthetic oligonucleotide
uuccacaaacacgcucaag

SEQ ID NO: 2175250 - RNA, 19 nt, Artificial Sequence
  Description of Artificial Sequence: Synthetic oligonucleotide
caucagccugcuaaauuca

SEQ ID NO: 2175251 - RNA, 19 nt, Artificial Sequence
  Description of Artificial Sequence: Synthetic oligonucleotide
cucgaauguacccauaauu

SEQ ID NO: 2175252 - RNA, 19 nt, Artificial Sequence
  Description of Artificial Sequence: Synthetic oligonucleotide
gggugauuguuaucuguug

SEQ ID NO: 2175253 - RNA, 19 nt, Artificial Sequence
  Description of Artificial Sequence: Synthetic oligonucleotide
caaacacgcucaagcuuac

SEQ ID NO: 2175254 - RNA, 19 nt, Artificial Sequence
  Description of Artificial Sequence: Synthetic oligonucleotide
uccagauuccuggcagagc

SEQ ID NO: 2175255 - RNA, 19 nt, Artificial Sequence
  Description of Artificial Sequence: Synthetic oligonucleotide
cugccagcagccaucuauc

SEQ ID NO: 2175256 - RNA, 19 nt, Artificial Sequence
  Description of Artificial Sequence: Synthetic oligonucleotide
acaacugcugguguauuua

SEQ ID NO: 2175257 - RNA, 19 nt, Artificial Sequence
  Description of Artificial Sequence: Synthetic oligonucleotide
augacaacugcugguguau

SEQ ID NO: 2175258 - RNA, 19 nt, Artificial Sequence
  Description of Artificial Sequence: Synthetic oligonucleotide
uauuaacccggcaguccuu

SEQ ID NO: 2175259 - RNA, 19 nt, Artificial Sequence
  Description of Artificial Sequence: Synthetic oligonucleotide
gaagacagacaguccagau

SEQ ID NO: 2175260 - RNA, 19 nt, Artificial Sequence
  Description of Artificial Sequence: Synthetic oligonucleotide
gcacagcuuauuaacccgg

SEQ ID NO: 2175261 - RNA, 19 nt, Artificial Sequence
  Description of Artificial Sequence: Synthetic oligonucleotide
accaauuucaugggugauu

SEQ ID NO: 2175262 - RNA, 19 nt, Artificial Sequence
  Description of Artificial Sequence: Synthetic oligonucleotide
ccacaauucaaucugucaa

SEQ ID NO: 2175263 - RNA, 19 nt, Artificial Sequence
  Description of Artificial Sequence: Synthetic oligonucleotide
augccuugucggaagaagu

SEQ ID NO: 2175264 - RNA, 19 nt, Artificial Sequence
  Description of Artificial Sequence: Synthetic oligonucleotide
ggugauuguuaucuguugu

SEQ ID NO: 2175265 - RNA, 19 nt, Artificial Sequence
  Description of Artificial Sequence: Synthetic oligonucleotide
gcaauauggacauuuuaau

SEQ ID NO: 2175266 - RNA, 19 nt, Artificial Sequence
  Description of Artificial Sequence: Synthetic oligonucleotide
gagcacuccccuugugcac

SEQ ID NO: 2175267 - RNA, 19 nt, Artificial Sequence
  Description of Artificial Sequence: Synthetic oligonucleotide
cucacaucagccugcuaaa

SEQ ID NO: 2175268 - RNA, 19 nt, Artificial Sequence
  Description of Artificial Sequence: Synthetic oligonucleotide
aaaugcaggcgggcugacu

SEQ ID NO: 2175269 - RNA, 19 nt, Artificial Sequence
  Description of Artificial Sequence: Synthetic oligonucleotide
ggcaucucuugauauaaua

SEQ ID NO: 2175270 - RNA, 19 nt, Artificial Sequence
  Description of Artificial Sequence: Synthetic oligonucleotide
cacacucgcgugucagcag

SEQ ID NO: 2175271 - RNA, 19 nt, Artificial Sequence
  Description of Artificial Sequence: Synthetic oligonucleotide
ugcaggcgggcugacuuug

SEQ ID NO: 2175272 - RNA, 19 nt, Artificial Sequence
  Description of Artificial Sequence: Synthetic oligonucleotide
ggucaacuucuguuucugc

SEQ ID NO: 2175273 - RNA, 19 nt, Artificial Sequence
  Description of Artificial Sequence: Synthetic oligonucleotide
ugucucgaauguacccaua

SEQ ID NO: 2175274 - RNA, 19 nt, Artificial Sequence
  Description of Artificial Sequence: Synthetic oligonucleotide
aaacacgcucaagcuuaca

SEQ ID NO: 2175275 - RNA, 19 nt, Artificial Sequence
  Description of Artificial Sequence: Synthetic oligonucleotide
agccugcuaaauucaugau

SEQ ID NO: 2175276 - RNA, 19 nt, Artificial Sequence
  Description of Artificial Sequence: Synthetic oligonucleotide
auaugccaggaaggucaac

SEQ ID NO: 2175277 - RNA, 19 nt, Artificial Sequence
  Description of Artificial Sequence: Synthetic oligonucleotide
cuggugcacagcuuauuaa

SEQ ID NO: 2175278 - RNA, 19 nt, Artificial Sequence
  Description of Artificial Sequence: Synthetic oligonucleotide
agcacuccccuugugcaca

SEQ ID NO: 2175279 - RNA, 19 nt, Artificial Sequence
  Description of Artificial Sequence: Synthetic oligonucleotide
acgaagaccaagagugaaa

SEQ ID NO: 2175280 - RNA, 19 nt, Artificial Sequence
  Description of Artificial Sequence: Synthetic oligonucleotide
ucacaucagccugcuaaau

SEQ ID NO: 2175281 - RNA, 19 nt, Artificial Sequence
  Description of Artificial Sequence: Synthetic oligonucleotide
acauccacgcaugccuugu

SEQ ID NO: 2175282 - RNA, 19 nt, Artificial Sequence
  Description of Artificial Sequence: Synthetic oligonucleotide
cucgcgugucagcagcuuc

SEQ ID NO: 2175283 - RNA, 19 nt, Artificial Sequence
  Description of Artificial Sequence: Synthetic oligonucleotide
guaaaagcaggaggaauau

SEQ ID NO: 2175284 - RNA, 19 nt, Artificial Sequence
  Description of Artificial Sequence: Synthetic oligonucleotide
gugauuguuaucuguuguu

SEQ ID NO: 2175285 - RNA, 19 nt, Artificial Sequence
  Description of Artificial Sequence: Synthetic oligonucleotide
uggcagagcucuucagcua

SEQ ID NO: 2175286 - RNA, 19 nt, Artificial Sequence
  Description of Artificial Sequence: Synthetic oligonucleotide
gucaauggaucgcucuugu

SEQ ID NO: 2175287 - RNA, 19 nt, Artificial Sequence
  Description of Artificial Sequence: Synthetic oligonucleotide
gugcacacucgcgugucag

SEQ ID NO: 2175288 - RNA, 19 nt, Artificial Sequence
  Description of Artificial Sequence: Synthetic oligonucleotide
aagcccuauguaacaccca

SEQ ID NO: 2175289 - RNA, 19 nt, Artificial Sequence
  Description of Artificial Sequence: Synthetic oligonucleotide
uugugcacacucgcguguc

SEQ ID NO: 2175290 - RNA, 19 nt, Artificial Sequence
  Description of Artificial Sequence: Synthetic oligonucleotide
gcuucuggugcacagcuua

SEQ ID NO: 2175291 - RNA, 19 nt, Artificial Sequence
  Description of Artificial Sequence: Synthetic oligonucleotide
ggaauuuaucacagcuuuc

SEQ ID NO: 2175292 - RNA, 19 nt, Artificial Sequence
  Description of Artificial Sequence: Synthetic oligonucleotide
cacgcucaagcuuacaauu

SEQ ID NO: 2175293 - RNA, 19 nt, Artificial Sequence
  Description of Artificial Sequence: Synthetic oligonucleotide
uccuggacuuuguuccauu

SEQ ID NO: 2175294 - RNA, 19 nt, Artificial Sequence
  Description of Artificial Sequence: Synthetic oligonucleotide
ccaucuaucccaacaaacu

SEQ ID NO: 2175295 - RNA, 19 nt, Artificial Sequence
  Description of Artificial Sequence: Synthetic oligonucleotide
caccucauugagaagccgu

SEQ ID NO: 2175296 - RNA, 19 nt, Artificial Sequence
  Description of Artificial Sequence: Synthetic oligonucleotide
cccggcaguccuuggauag

SEQ ID NO: 2175297 - RNA, 19 nt, Artificial Sequence
  Description of Artificial Sequence: Synthetic oligonucleotide
cccaucuggagcacucccc

SEQ ID NO: 2175298 - RNA, 19 nt, Artificial Sequence
  Description of Artificial Sequence: Synthetic oligonucleotide
augggauuuuaaacaggaa

SEQ ID NO: 2175299 - RNA, 19 nt, Artificial Sequence
  Description of Artificial Sequence: Synthetic oligonucleotide
cauaugccaggaaggucaa

SEQ ID NO: 2175300 - RNA, 19 nt, Artificial Sequence
  Description of Artificial Sequence: Synthetic oligonucleotide
gacaacugcugguguauuu

SEQ ID NO: 2175301 - RNA, 19 nt, Artificial Sequence
  Description of Artificial Sequence: Synthetic oligonucleotide
ccuauguaacacccaucug

SEQ ID NO: 2175302 - RNA, 19 nt, Artificial Sequence
  Description of Artificial Sequence: Synthetic oligonucleotide
gccguuggcugucugccug

SEQ ID NO: 2175303 - RNA, 19 nt, Artificial Sequence
  Description of Artificial Sequence: Synthetic oligonucleotide
cccuauguaacacccaucu

SEQ ID NO: 2175304 - RNA, 19 nt, Artificial Sequence
  Description of Artificial Sequence: Synthetic oligonucleotide
accucauugagaagccguu

SEQ ID NO: 2175305 - RNA, 19 nt, Artificial Sequence
  Description of Artificial Sequence: Synthetic oligonucleotide
aucagccugcuaaauucau

SEQ ID NO: 2175306 - RNA, 19 nt, Artificial Sequence
  Description of Artificial Sequence: Synthetic oligonucleotide
ccagauuccuggcagagcu

SEQ ID NO: 2175307 - RNA, 19 nt, Artificial Sequence
  Description of Artificial Sequence: Synthetic oligonucleotide
caguuuucacuuacaaauu

SEQ ID NO: 2175308 - RNA, 19 nt, Artificial Sequence
  Description of Artificial Sequence: Synthetic oligonucleotide
auaugaccacaaaccaauu

SEQ ID NO: 2175309 - RNA, 19 nt, Artificial Sequence
  Description of Artificial Sequence: Synthetic oligonucleotide
ugcuaccauuaaacauuuu

SEQ ID NO: 2175310 - RNA, 19 nt, Artificial Sequence
  Description of Artificial Sequence: Synthetic oligonucleotide
cacccaucuggagcacucc

SEQ ID NO: 2175311 - RNA, 19 nt, Artificial Sequence
  Description of Artificial Sequence: Synthetic oligonucleotide
gaucgcucuugucucgaau

SEQ ID NO: 2175312 - RNA, 19 nt, Artificial Sequence
  Description of Artificial Sequence: Synthetic oligonucleotide
guuuggcaucuccuggacu

SEQ ID NO: 2175313 - RNA, 19 nt, Artificial Sequence
  Description of Artificial Sequence: Synthetic oligonucleotide
gcuuacaauuaucgagaaa

SEQ ID NO: 2175314 - RNA, 19 nt, Artificial Sequence
  Description of Artificial Sequence: Synthetic oligonucleotide
acgcucaagcuuacaauua

SEQ ID NO: 2175315 - RNA, 19 nt, Artificial Sequence
  Description of Artificial Sequence: Synthetic oligonucleotide
cuugugcacacucgcgugu

SEQ ID NO: 2175316 - RNA, 19 nt, Artificial Sequence
  Description of Artificial Sequence: Synthetic oligonucleotide
cauccacgcaugccuuguc

SEQ ID NO: 2175317 - RNA, 19 nt, Artificial Sequence
  Description of Artificial Sequence: Synthetic oligonucleotide
gcagucaauggaucgcucu

SEQ ID NO: 2175318 - RNA, 19 nt, Artificial Sequence
  Description of Artificial Sequence: Synthetic oligonucleotide
gggcaauauggacauuuua

SEQ ID NO: 2175319 - RNA, 19 nt, Artificial Sequence
  Description of Artificial Sequence: Synthetic oligonucleotide
cuucagcuacauccacgca

SEQ ID NO: 2175320 - RNA, 19 nt, Artificial Sequence
  Description of Artificial Sequence: Synthetic oligonucleotide
uaacacccaucuggagcac

SEQ ID NO: 2175321 - RNA, 19 nt, Artificial Sequence
  Description of Artificial Sequence: Synthetic oligonucleotide
ccccuugugcacacucgcg

SEQ ID NO: 2175322 - RNA, 19 nt, Artificial Sequence
  Description of Artificial Sequence: Synthetic oligonucleotide
gcaucucuugauauaauau

SEQ ID NO: 2175323 - RNA, 19 nt, Artificial Sequence
  Description of Artificial Sequence: Synthetic oligonucleotide
cuggagcacuccccuugug

SEQ ID NO: 2175324 - RNA, 19 nt, Artificial Sequence
  Description of Artificial Sequence: Synthetic oligonucleotide
ggcuauggacaacucaaau

SEQ ID NO: 2175325 - RNA, 19 nt, Artificial Sequence
  Description of Artificial Sequence: Synthetic oligonucleotide
ccugcacugaaugacaacu

SEQ ID NO: 2175326 - RNA, 19 nt, Artificial Sequence
  Description of Artificial Sequence: Synthetic oligonucleotide
cacaucagccugcuaaauu

SEQ ID NO: 2175327 - RNA, 19 nt, Artificial Sequence
  Description of Artificial Sequence: Synthetic oligonucleotide
augcaggcgggcugacuuu

SEQ ID NO: 2175328 - RNA, 19 nt, Artificial Sequence
  Description of Artificial Sequence: Synthetic oligonucleotide
guuggcugucugccugcca

SEQ ID NO: 2175329 - RNA, 19 nt, Artificial Sequence
  Description of Artificial Sequence: Synthetic oligonucleotide
acccggcaguccuuggaua

SEQ ID NO: 2175330 - RNA, 19 nt, Artificial Sequence
  Description of Artificial Sequence: Synthetic oligonucleotide
ccucauugagaagccguug

SEQ ID NO: 2175331 - RNA, 19 nt, Artificial Sequence
  Description of Artificial Sequence: Synthetic oligonucleotide
gcugucugccugccagcag

SEQ ID NO: 2175332 - RNA, 19 nt, Artificial Sequence
  Description of Artificial Sequence: Synthetic oligonucleotide
cacgcaugccuugucggaa

SEQ ID NO: 2175333 - RNA, 19 nt, Artificial Sequence
  Description of Artificial Sequence: Synthetic oligonucleotide
cagucaauggaucgcucuu

SEQ ID NO: 2175334 - RNA, 19 nt, Artificial Sequence
  Description of Artificial Sequence: Synthetic oligonucleotide
gcgggcugacuuugaagca

SEQ ID NO: 2175335 - RNA, 19 nt, Artificial Sequence
  Description of Artificial Sequence: Synthetic oligonucleotide
gagcuggagcagaguaaaa

SEQ ID NO: 2175336 - RNA, 19 nt, Artificial Sequence
  Description of Artificial Sequence: Synthetic oligonucleotide
ccguuggcugucugccugc

SEQ ID NO: 2175337 - RNA, 19 nt, Artificial Sequence
  Description of Artificial Sequence: Synthetic oligonucleotide
cuucuggugcacagcuuau

SEQ ID NO: 2175338 - RNA, 19 nt, Artificial Sequence
  Description of Artificial Sequence: Synthetic oligonucleotide
ggcaguccuuggauagcug

SEQ ID NO: 2175339 - RNA, 19 nt, Artificial Sequence
  Description of Artificial Sequence: Synthetic oligonucleotide
caggcgggcugacuuugaa

SEQ ID NO: 2175340 - RNA, 19 nt, Artificial Sequence
  Description of Artificial Sequence: Synthetic oligonucleotide
acucgcgugucagcagcuu

SEQ ID NO: 2175341 - RNA, 19 nt, Artificial Sequence
  Description of Artificial Sequence: Synthetic oligonucleotide
ggcugucugccugccagca

SEQ ID NO: 2175342 - RNA, 19 nt, Artificial Sequence
  Description of Artificial Sequence: Synthetic oligonucleotide
gccuugucggaagaagugu

SEQ ID NO: 2175343 - RNA, 19 nt, Artificial Sequence
  Description of Artificial Sequence: Synthetic oligonucleotide
ccacgcaugccuugucgga

SEQ ID NO: 2175344 - RNA, 19 nt, Artificial Sequence
  Description of Artificial Sequence: Synthetic oligonucleotide
gcccuauguaacacccauc

SEQ ID NO: 2175345 - RNA, 19 nt, Artificial Sequence
  Description of Artificial Sequence: Synthetic oligonucleotide
ggaucgcucuugucucgaa

SEQ ID NO: 2175346 - RNA, 19 nt, Artificial Sequence
  Description of Artificial Sequence: Synthetic oligonucleotide
ggcugacuuugaagcaaga

SEQ ID NO: 2175347 - RNA, 19 nt, Artificial Sequence
  Description of Artificial Sequence: Synthetic oligonucleotide
gcacuccccuugugcacac

SEQ ID NO: 2175348 - RNA, 19 nt, Artificial Sequence
  Description of Artificial Sequence: Synthetic oligonucleotide
gcugguguauuuacuugau

SEQ ID NO: 2175349 - RNA, 19 nt, Artificial Sequence
  Description of Artificial Sequence: Synthetic oligonucleotide
ccggcaguccuuggauagc

SEQ ID NO: 2175350 - RNA, 19 nt, Artificial Sequence
  Description of Artificial Sequence: Synthetic oligonucleotide
gagaagccguuggcugucu

SEQ ID NO: 2175351 - RNA, 19 nt, Artificial Sequence
  Description of Artificial Sequence: Synthetic oligonucleotide
ccuugucggaagaaguguu

SEQ ID NO: 2175352 - RNA, 19 nt, Artificial Sequence
  Description of Artificial Sequence: Synthetic oligonucleotide
cccuugugcacacucgcgu

SEQ ID NO: 2175353 - RNA, 19 nt, Artificial Sequence
  Description of Artificial Sequence: Synthetic oligonucleotide
cacucgcgugucagcagcu

SEQ ID NO: 2175354 - RNA, 19 nt, Artificial Sequence
  Description of Artificial Sequence: Synthetic oligonucleotide
gucugccugccagcagcca

SEQ ID NO: 2175355 - RNA, 19 nt, Artificial Sequence
  Description of Artificial Sequence: Synthetic oligonucleotide
gcugacgaagacagacagu

SEQ ID NO: 2175356 - RNA, 19 nt, Artificial Sequence
  Description of Artificial Sequence: Synthetic oligonucleotide
guuccaccaucaccucauu

SEQ ID NO: 2175357 - RNA, 19 nt, Artificial Sequence
  Description of Artificial Sequence: Synthetic oligonucleotide
caucuggagcacuccccuu

SEQ ID NO: 2175358 - RNA, 19 nt, Artificial Sequence
  Description of Artificial Sequence: Synthetic oligonucleotide
gcaugccuugucggaagaa

SEQ ID NO: 2175359 - RNA, 19 nt, Artificial Sequence
  Description of Artificial Sequence: Synthetic oligonucleotide
cgcucaagcuuacaauuau

SEQ ID NO: 2175360 - RNA, 19 nt, Artificial Sequence
  Description of Artificial Sequence: Synthetic oligonucleotide
cgcgugucagcagcuucug

SEQ ID NO: 2175361 - RNA, 19 nt, Artificial Sequence
  Description of Artificial Sequence: Synthetic oligonucleotide
cgcaugccuugucggaaga

SEQ ID NO: 2175362 - RNA, 19 nt, Artificial Sequence
  Description of Artificial Sequence: Synthetic oligonucleotide
gcaggcgggcugacuuuga

SEQ ID NO: 2175363 - RNA, 19 nt, Artificial Sequence
  Description of Artificial Sequence: Synthetic oligonucleotide
gggcaucucuugauauaau

SEQ ID NO: 2175364 - RNA, 19 nt, Artificial Sequence
  Description of Artificial Sequence: Synthetic oligonucleotide
ggaagccugcuggggcuau

SEQ ID NO: 2175365 - RNA, 19 nt, Artificial Sequence
  Description of Artificial Sequence: Synthetic oligonucleotide
ucuuuuaaagcacaaaacg

SEQ ID NO: 2175366 - RNA, 19 nt, Artificial Sequence
  Description of Artificial Sequence: Synthetic oligonucleotide
auaauuauucagcauaugc

SEQ ID NO: 2175367 - RNA, 19 nt, Artificial Sequence
  Description of Artificial Sequence: Synthetic oligonucleotide
auaugcaaagcuuugagcc

SEQ ID NO: 2175368 - RNA, 19 nt, Artificial Sequence
  Description of Artificial Sequence: Synthetic oligonucleotide
uuggaaacgacaaaguugg

SEQ ID NO: 2175369 - RNA, 19 nt, Artificial Sequence
  Description of Artificial Sequence: Synthetic oligonucleotide
aaagcuuugagcccuaucu

SEQ ID NO: 2175370 - RNA, 19 nt, Artificial Sequence
  Description of Artificial Sequence: Synthetic oligonucleotide
aagaccuuguaccagcugg

SEQ ID NO: 2175371 - RNA, 19 nt, Artificial Sequence
  Description of Artificial Sequence: Synthetic oligonucleotide
aauuauucagcauaugcaa

SEQ ID NO: 2175372 - RNA, 19 nt, Artificial Sequence
  Description of Artificial Sequence: Synthetic oligonucleotide
uaauuauucagcauaugca

SEQ ID NO: 2175373 - RNA, 19 nt, Artificial Sequence
  Description of Artificial Sequence: Synthetic oligonucleotide
cuucucaugauuucuaucc

SEQ ID NO: 2175374 - RNA, 19 nt, Artificial Sequence
  Description of Artificial Sequence: Synthetic oligonucleotide
uugugaaauaauuauucag

SEQ ID NO: 2175375 - RNA, 19 nt, Artificial Sequence
  Description of Artificial Sequence: Synthetic oligonucleotide
augauuucuauccaccuuc

SEQ ID NO: 2175376 - RNA, 19 nt, Artificial Sequence
  Description of Artificial Sequence: Synthetic oligonucleotide
agaaagaaaggcaaacugc

SEQ ID NO: 2175377 - RNA, 19 nt, Artificial Sequence
  Description of Artificial Sequence: Synthetic oligonucleotide
aaggcaaacugccaaagcu

SEQ ID NO: 2175378 - RNA, 19 nt, Artificial Sequence
  Description of Artificial Sequence: Synthetic oligonucleotide
ucauuugugaaauaauuau

SEQ ID NO: 2175379 - RNA, 19 nt, Artificial Sequence
  Description of Artificial Sequence: Synthetic oligonucleotide
aagggaguccacaagaagg

SEQ ID NO: 2175380 - RNA, 19 nt, Artificial Sequence
  Description of Artificial Sequence: Synthetic oligonucleotide
uuugucauagcuccgcucu

SEQ ID NO: 2175381 - RNA, 19 nt, Artificial Sequence
  Description of Artificial Sequence: Synthetic oligonucleotide
acaagaagggucaaagacc

SEQ ID NO: 2175382 - RNA, 19 nt, Artificial Sequence
  Description of Artificial Sequence: Synthetic oligonucleotide
uuugugaaauaauuauuca

SEQ ID NO: 2175383 - RNA, 19 nt, Artificial Sequence
  Description of Artificial Sequence: Synthetic oligonucleotide
uuaaagcacaaaacgcucc

SEQ ID NO: 2175384 - RNA, 19 nt, Artificial Sequence
  Description of Artificial Sequence: Synthetic oligonucleotide
auuacuguuccugaguuuc

SEQ ID NO: 2175385 - RNA, 19 nt, Artificial Sequence
  Description of Artificial Sequence: Synthetic oligonucleotide
auagcuccgcucucgaucc

SEQ ID NO: 2175386 - RNA, 19 nt, Artificial Sequence
  Description of Artificial Sequence: Synthetic oligonucleotide
uguggugagagccaugaca

SEQ ID NO: 2175387 - RNA, 19 nt, Artificial Sequence
  Description of Artificial Sequence: Synthetic oligonucleotide
cuucucaugauuccggucc

SEQ ID NO: 2175388 - RNA, 19 nt, Artificial Sequence
  Description of Artificial Sequence: Synthetic oligonucleotide
uuuaaagcacaaaacgcuc

SEQ ID NO: 2175389 - RNA, 19 nt, Artificial Sequence
  Description of Artificial Sequence: Synthetic oligonucleotide
aaacguucaguccugcugu

SEQ ID NO: 2175390 - RNA, 19 nt, Artificial Sequence
  Description of Artificial Sequence: Synthetic oligonucleotide
agauuuggaaacgacaaag

SEQ ID NO: 2175391 - RNA, 19 nt, Artificial Sequence
  Description of Artificial Sequence: Synthetic oligonucleotide
aacugccaaagcuccaugg

SEQ ID NO: 2175392 - RNA, 19 nt, Artificial Sequence
  Description of Artificial Sequence: Synthetic oligonucleotide
aagaaaggcaaacugccaa

SEQ ID NO: 2175393 - RNA, 19 nt, Artificial Sequence
  Description of Artificial Sequence: Synthetic oligonucleotide
auuccgguccaacuugucc

SEQ ID NO: 2175394 - RNA, 19 nt, Artificial Sequence
  Description of Artificial Sequence: Synthetic oligonucleotide
auggaacaaacguucaguc

SEQ ID NO: 2175395 - RNA, 19 nt, Artificial Sequence
  Description of Artificial Sequence: Synthetic oligonucleotide
aaacgacaaaguugggguc

SEQ ID NO: 2175396 - RNA, 19 nt, Artificial Sequence
  Description of Artificial Sequence: Synthetic oligonucleotide
agcccuguugaccaugugc

SEQ ID NO: 2175397 - RNA, 19 nt, Artificial Sequence
  Description of Artificial Sequence: Synthetic oligonucleotide
ucaaagaccuuguaccagc

SEQ ID NO: 2175398 - RNA, 19 nt, Artificial Sequence
  Description of Artificial Sequence: Synthetic oligonucleotide
aguaagggaguccacaaga

SEQ ID NO: 2175399 - RNA, 19 nt, Artificial Sequence
  Description of Artificial Sequence: Synthetic oligonucleotide
ucuuggguagcccuguuga

SEQ ID NO: 2175400 - RNA, 19 nt, Artificial Sequence
  Description of Artificial Sequence: Synthetic oligonucleotide
cucaugauuucuauccacc

SEQ ID NO: 2175401 - RNA, 19 nt, Artificial Sequence
  Description of Artificial Sequence: Synthetic oligonucleotide
aaauaauuauucagcauau

SEQ ID NO: 2175402 - RNA, 19 nt, Artificial Sequence
  Description of Artificial Sequence: Synthetic oligonucleotide
uccacaagaagggucaaag

SEQ ID NO: 2175403 - RNA, 19 nt, Artificial Sequence
  Description of Artificial Sequence: Synthetic oligonucleotide
uaugcaaagcuuugagccc

SEQ ID NO: 2175404 - RNA, 19 nt, Artificial Sequence
  Description of Artificial Sequence: Synthetic oligonucleotide
ucagcauuggcgcggagca

SEQ ID NO: 2175405 - RNA, 19 nt, Artificial Sequence
  Description of Artificial Sequence: Synthetic oligonucleotide
cuucucauacccacggucc

SEQ ID NO: 2175406 - RNA, 19 nt, Artificial Sequence
  Description of Artificial Sequence: Synthetic oligonucleotide
gaaacgacaaaguuggggu

SEQ ID NO: 2175407 - RNA, 19 nt, Artificial Sequence
  Description of Artificial Sequence: Synthetic oligonucleotide
guuccuaucuggcuucucg

SEQ ID NO: 2175408 - RNA, 19 nt, Artificial Sequence
  Description of Artificial Sequence: Synthetic oligonucleotide
aauaauuauucagcauaug

SEQ ID NO: 2175409 - RNA, 19 nt, Artificial Sequence
  Description of Artificial Sequence: Synthetic oligonucleotide
ugaguuucuuggcagauuu

SEQ ID NO: 2175410 - RNA, 19 nt, Artificial Sequence
  Description of Artificial Sequence: Synthetic oligonucleotide
aacacggagcggcauugcg

SEQ ID NO: 2175411 - RNA, 19 nt, Artificial Sequence
  Description of Artificial Sequence: Synthetic oligonucleotide
auagucaacagggucauca

SEQ ID NO: 2175412 - RNA, 19 nt, Artificial Sequence
  Description of Artificial Sequence: Synthetic oligonucleotide
uugaccaugugccccgggg

SEQ ID NO: 2175413 - RNA, 19 nt, Artificial Sequence
  Description of Artificial Sequence: Synthetic oligonucleotide
ugccuucucauacccacgg

SEQ ID NO: 2175414 - RNA, 19 nt, Artificial Sequence
  Description of Artificial Sequence: Synthetic oligonucleotide
gggucaaagaccuuguacc

SEQ ID NO: 2175415 - RNA, 19 nt, Artificial Sequence
  Description of Artificial Sequence: Synthetic oligonucleotide
ucugcauuacuguuccuga

SEQ ID NO: 2175416 - RNA, 19 nt, Artificial Sequence
  Description of Artificial Sequence: Synthetic oligonucleotide
gaccagaccaauaucgaag

SEQ ID NO: 2175417 - RNA, 19 nt, Artificial Sequence
  Description of Artificial Sequence: Synthetic oligonucleotide
aagcacaaaacgcucccca

SEQ ID NO: 2175418 - RNA, 19 nt, Artificial Sequence
  Description of Artificial Sequence: Synthetic oligonucleotide
uauccggguggccucauag

SEQ ID NO: 2175419 - RNA, 19 nt, Artificial Sequence
  Description of Artificial Sequence: Synthetic oligonucleotide
cuguuccugaguuucuugg

SEQ ID NO: 2175420 - RNA, 19 nt, Artificial Sequence
  Description of Artificial Sequence: Synthetic oligonucleotide
ugcauuacuguuccugagu

SEQ ID NO: 2175421 - RNA, 19 nt, Artificial Sequence
  Description of Artificial Sequence: Synthetic oligonucleotide
uaugagcugggguccauag

SEQ ID NO: 2175422 - RNA, 19 nt, Artificial Sequence
  Description of Artificial Sequence: Synthetic oligonucleotide
auaguccucagcaaugauc

SEQ ID NO: 2175423 - RNA, 19 nt, Artificial Sequence
  Description of Artificial Sequence: Synthetic oligonucleotide
aacaaacguucaguccugc

SEQ ID NO: 2175424 - RNA, 19 nt, Artificial Sequence
  Description of Artificial Sequence: Synthetic oligonucleotide
uguugugucagcaccuguc

SEQ ID NO: 2175425 - RNA, 19 nt, Artificial Sequence
  Description of Artificial Sequence: Synthetic oligonucleotide
caaacguucaguccugcug

SEQ ID NO: 2175426 - RNA, 19 nt, Artificial Sequence
  Description of Artificial Sequence: Synthetic oligonucleotide
ugccaaagcuccauggaac

SEQ ID NO: 2175427 - RNA, 19 nt, Artificial Sequence
  Description of Artificial Sequence: Synthetic oligonucleotide
uguccacuuugucauagcu

SEQ ID NO: 2175428 - RNA, 19 nt, Artificial Sequence
  Description of Artificial Sequence: Synthetic oligonucleotide
agcacaaaacgcuccccac

SEQ ID NO: 2175429 - RNA, 19 nt, Artificial Sequence
  Description of Artificial Sequence: Synthetic oligonucleotide
cuccauggaacaaacguuc

SEQ ID NO: 2175430 - RNA, 19 nt, Artificial Sequence
  Description of Artificial Sequence: Synthetic oligonucleotide
ggugcaucggaauaugagc

SEQ ID NO: 2175431 - RNA, 19 nt, Artificial Sequence
  Description of Artificial Sequence: Synthetic oligonucleotide
agacccucuauccgggugg

SEQ ID NO: 2175432 - RNA, 19 nt, Artificial Sequence
  Description of Artificial Sequence: Synthetic oligonucleotide
uuccugaguuucuuggcag

SEQ ID NO: 2175433 - RNA, 19 nt, Artificial Sequence
  Description of Artificial Sequence: Synthetic oligonucleotide
uggcagacccucuauccgg

SEQ ID NO: 2175434 - RNA, 19 nt, Artificial Sequence
  Description of Artificial Sequence: Synthetic oligonucleotide
aacgacaaaguugggguca

SEQ ID NO: 2175435 - RNA, 19 nt, Artificial Sequence
  Description of Artificial Sequence: Synthetic oligonucleotide
gaguguagcucauuuguga

SEQ ID NO: 2175436 - RNA, 19 nt, Artificial Sequence
  Description of Artificial Sequence: Synthetic oligonucleotide
agacuuaucaugguuucug

SEQ ID NO: 2175437 - RNA, 19 nt, Artificial Sequence
  Description of Artificial Sequence: Synthetic oligonucleotide
ucggucugacuucucauga

SEQ ID NO: 2175438 - RNA, 19 nt, Artificial Sequence
  Description of Artificial Sequence: Synthetic oligonucleotide
ucggaauaugagcuggggu

SEQ ID NO: 2175439 - RNA, 19 nt, Artificial Sequence
  Description of Artificial Sequence: Synthetic oligonucleotide
uguuccugaguuucuuggc

SEQ ID NO: 2175440 - RNA, 19 nt, Artificial Sequence
  Description of Artificial Sequence: Synthetic oligonucleotide
ggaaacgacaaaguugggg

SEQ ID NO: 2175441 - RNA, 19 nt, Artificial Sequence
  Description of Artificial Sequence: Synthetic oligonucleotide
uggguagcccuguugacca

SEQ ID NO: 2175442 - RNA, 19 nt, Artificial Sequence
  Description of Artificial Sequence: Synthetic oligonucleotide
ucaugauuccgguccaacu

SEQ ID NO: 2175443 - RNA, 19 nt, Artificial Sequence
  Description of Artificial Sequence: Synthetic oligonucleotide
uagggucuaauucuucauc

SEQ ID NO: 2175444 - RNA, 19 nt, Artificial Sequence
  Description of Artificial Sequence: Synthetic oligonucleotide
ugauuucuauccaccuucu

SEQ ID NO: 2175445 - RNA, 19 nt, Artificial Sequence
  Description of Artificial Sequence: Synthetic oligonucleotide
ucuguccacuuugucauag

SEQ ID NO: 2175446 - RNA, 19 nt, Artificial Sequence
  Description of Artificial Sequence: Synthetic oligonucleotide
uucucauacccacgguccc

SEQ ID NO: 2175447 - RNA, 19 nt, Artificial Sequence
  Description of Artificial Sequence: Synthetic oligonucleotide
cacggagcggcauugcggg

SEQ ID NO: 2175448 - RNA, 19 nt, Artificial Sequence
  Description of Artificial Sequence: Synthetic oligonucleotide
augguuccuaucuggcuuc

SEQ ID NO: 2175449 - RNA, 19 nt, Artificial Sequence
  Description of Artificial Sequence: Synthetic oligonucleotide
uaucgaagggcucuucuuu

SEQ ID NO: 2175450 - RNA, 19 nt, Artificial Sequence
  Description of Artificial Sequence: Synthetic oligonucleotide
guuggggucauguggugag

SEQ ID NO: 2175451 - RNA, 19 nt, Artificial Sequence
  Description of Artificial Sequence: Synthetic oligonucleotide
gaggaugccccucuucgcc

SEQ ID NO: 2175452 - RNA, 19 nt, Artificial Sequence
  Description of Artificial Sequence: Synthetic oligonucleotide
ggccucauagucaacaggg

SEQ ID NO: 2175453 - RNA, 19 nt, Artificial Sequence
  Description of Artificial Sequence: Synthetic oligonucleotide
agaccaauaucgaagggcu

SEQ ID NO: 2175454 - RNA, 19 nt, Artificial Sequence
  Description of Artificial Sequence: Synthetic oligonucleotide
cauagcuccgcucucgauc

SEQ ID NO: 2175455 - RNA, 19 nt, Artificial Sequence
  Description of Artificial Sequence: Synthetic oligonucleotide
accaauaucgaagggcucu

SEQ ID NO: 2175456 - RNA, 19 nt, Artificial Sequence
  Description of Artificial Sequence: Synthetic oligonucleotide
agcaucugcauuacuguuc

SEQ ID NO: 2175457 - RNA, 19 nt, Artificial Sequence
  Description of Artificial Sequence: Synthetic oligonucleotide
cauagggucuaauucuuca

SEQ ID NO: 2175458 - RNA, 19 nt, Artificial Sequence
  Description of Artificial Sequence: Synthetic oligonucleotide
guggugagagccaugacac

SEQ ID NO: 2175459 - RNA, 19 nt, Artificial Sequence
  Description of Artificial Sequence: Synthetic oligonucleotide
ugcaucggaauaugagcug

SEQ ID NO: 2175460 - RNA, 19 nt, Artificial Sequence
  Description of Artificial Sequence: Synthetic oligonucleotide
cugcuguugugucagcacc

SEQ ID NO: 2175461 - RNA, 19 nt, Artificial Sequence
  Description of Artificial Sequence: Synthetic oligonucleotide
gcauaugcaaagcuuugag

SEQ ID NO: 2175462 - RNA, 19 nt, Artificial Sequence
  Description of Artificial Sequence: Synthetic oligonucleotide
cuguugaccaugugccccg

SEQ ID NO: 2175463 - RNA, 19 nt, Artificial Sequence
  Description of Artificial Sequence: Synthetic oligonucleotide
acugccaaagcuccaugga

SEQ ID NO: 2175464 - RNA, 19 nt, Artificial Sequence
  Description of Artificial Sequence: Synthetic oligonucleotide
caucuuuccggcucaccgc

SEQ ID NO: 2175465 - RNA, 19 nt, Artificial Sequence
  Description of Artificial Sequence: Synthetic oligonucleotide
ugaccagaccaauaucgaa

SEQ ID NO: 2175466 - RNA, 19 nt, Artificial Sequence
  Description of Artificial Sequence: Synthetic oligonucleotide
uccuaucuggcuucucgug

SEQ ID NO: 2175467 - RNA, 19 nt, Artificial Sequence
  Description of Artificial Sequence: Synthetic oligonucleotide
gaggucugucuccacauuc

SEQ ID NO: 2175468 - RNA, 19 nt, Artificial Sequence
  Description of Artificial Sequence: Synthetic oligonucleotide
accaucuucccggucugcc

SEQ ID NO: 2175469 - RNA, 19 nt, Artificial Sequence
  Description of Artificial Sequence: Synthetic oligonucleotide
cacaaaacgcuccccacuc

SEQ ID NO: 2175470 - RNA, 19 nt, Artificial Sequence
  Description of Artificial Sequence: Synthetic oligonucleotide
ugacuucucaugauuucua

SEQ ID NO: 2175471 - RNA, 19 nt, Artificial Sequence
  Description of Artificial Sequence: Synthetic oligonucleotide
uggcucgggcuccagaugu

SEQ ID NO: 2175472 - RNA, 19 nt, Artificial Sequence
  Description of Artificial Sequence: Synthetic oligonucleotide
uucucaugauuccggucca

SEQ ID NO: 2175473 - RNA, 19 nt, Artificial Sequence
  Description of Artificial Sequence: Synthetic oligonucleotide
ucucauacccacggucccg

SEQ ID NO: 2175474 - RNA, 19 nt, Artificial Sequence
  Description of Artificial Sequence: Synthetic oligonucleotide
cagugcaacacggagcggc

SEQ ID NO: 2175475 - RNA, 19 nt, Artificial Sequence
  Description of Artificial Sequence: Synthetic oligonucleotide
caucggaauaugagcuggg

SEQ ID NO: 2175476 - RNA, 19 nt, Artificial Sequence
  Description of Artificial Sequence: Synthetic oligonucleotide
ugggaguguagcucauuug

SEQ ID NO: 2175477 - RNA, 19 nt, Artificial Sequence
  Description of Artificial Sequence: Synthetic oligonucleotide
gguccauagggucuaauuc

SEQ ID NO: 2175478 - RNA, 19 nt, Artificial Sequence
  Description of Artificial Sequence: Synthetic oligonucleotide
ugugccccggggugcaucg

SEQ ID NO: 2175479 - RNA, 19 nt, Artificial Sequence
  Description of Artificial Sequence: Synthetic oligonucleotide
aucggaauaugagcugggg

SEQ ID NO: 2175480 - RNA, 19 nt, Artificial Sequence
  Description of Artificial Sequence: Synthetic oligonucleotide
augagcugggguccauagg

SEQ ID NO: 2175481 - RNA, 19 nt, Artificial Sequence
  Description of Artificial Sequence: Synthetic oligonucleotide
uuccuaucuggcuucucgu

SEQ ID NO: 2175482 - RNA, 19 nt, Artificial Sequence
  Description of Artificial Sequence: Synthetic oligonucleotide
ccucauuucucuuggguag

SEQ ID NO: 2175483 - RNA, 19 nt, Artificial Sequence
  Description of Artificial Sequence: Synthetic oligonucleotide
uggaaacgacaaaguuggg

SEQ ID NO: 2175484 - RNA, 19 nt, Artificial Sequence
  Description of Artificial Sequence: Synthetic oligonucleotide
gguggcagacccucuaucc

SEQ ID NO: 2175485 - RNA, 19 nt, Artificial Sequence
  Description of Artificial Sequence: Synthetic oligonucleotide
aaguuggggucauguggug

SEQ ID NO: 2175486 - RNA, 19 nt, Artificial Sequence
  Description of Artificial Sequence: Synthetic oligonucleotide
cugcuguuugguucgggag

SEQ ID NO: 2175487 - RNA, 19 nt, Artificial Sequence
  Description of Artificial Sequence: Synthetic oligonucleotide
gagccagcuccucucugcg

SEQ ID NO: 2175488 - RNA, 19 nt, Artificial Sequence
  Description of Artificial Sequence: Synthetic oligonucleotide
ugagcccuaucuccagagc

SEQ ID NO: 2175489 - RNA, 19 nt, Artificial Sequence
  Description of Artificial Sequence: Synthetic oligonucleotide
uggcagauuuggaaacgac

SEQ ID NO: 2175490 - RNA, 19 nt, Artificial Sequence
  Description of Artificial Sequence: Synthetic oligonucleotide
auuauucagcauaugcaaa

SEQ ID NO: 2175491 - RNA, 19 nt, Artificial Sequence
  Description of Artificial Sequence: Synthetic oligonucleotide
uggugagagccaugacacg

SEQ ID NO: 2175492 - RNA, 19 nt, Artificial Sequence
  Description of Artificial Sequence: Synthetic oligonucleotide
gucaaagaccuuguaccag

SEQ ID NO: 2175493 - RNA, 19 nt, Artificial Sequence
  Description of Artificial Sequence: Synthetic oligonucleotide
ucuggcucgggcuccagau

SEQ ID NO: 2175494 - RNA, 19 nt, Artificial Sequence
  Description of Artificial Sequence: Synthetic oligonucleotide
uucccggucugccuucuca

SEQ ID NO: 2175495 - RNA, 19 nt, Artificial Sequence
  Description of Artificial Sequence: Synthetic oligonucleotide
cugcauuacuguuccugag

SEQ ID NO: 2175496 - RNA, 19 nt, Artificial Sequence
  Description of Artificial Sequence: Synthetic oligonucleotide
uccugaguuucuuggcaga

SEQ ID NO: 2175497 - RNA, 19 nt, Artificial Sequence
  Description of Artificial Sequence: Synthetic oligonucleotide
ccggucagacuuaucaugg

SEQ ID NO: 2175498 - RNA, 19 nt, Artificial Sequence
  Description of Artificial Sequence: Synthetic oligonucleotide
ggaauaugagcuggggucc

SEQ ID NO: 2175499 - RNA, 19 nt, Artificial Sequence
  Description of Artificial Sequence: Synthetic oligonucleotide
uucgggaggccucagcauu

SEQ ID NO: 2175500 - RNA, 19 nt, Artificial Sequence
  Description of Artificial Sequence: Synthetic oligonucleotide
guaugggcgcugcuggaag

SEQ ID NO: 2175501 - RNA, 19 nt, Artificial Sequence
  Description of Artificial Sequence: Synthetic oligonucleotide
caaaacgcuccccacucuc

SEQ ID NO: 2175502 - RNA, 19 nt, Artificial Sequence
  Description of Artificial Sequence: Synthetic oligonucleotide
gaccaugugccccggggug

SEQ ID NO: 2175503 - RNA, 19 nt, Artificial Sequence
  Description of Artificial Sequence: Synthetic oligonucleotide
cuuugucauagcuccgcuc

SEQ ID NO: 2175504 - RNA, 19 nt, Artificial Sequence
  Description of Artificial Sequence: Synthetic oligonucleotide
gaacaaacguucaguccug

SEQ ID NO: 2175505 - RNA, 19 nt, Artificial Sequence
  Description of Artificial Sequence: Synthetic oligonucleotide
ccggucuuuaccaucuucc

SEQ ID NO: 2175506 - RNA, 19 nt, Artificial Sequence
  Description of Artificial Sequence: Synthetic oligonucleotide
augcaaagcuuugagcccu

SEQ ID NO: 2175507 - RNA, 19 nt, Artificial Sequence
  Description of Artificial Sequence: Synthetic oligonucleotide
uucucgugacuucggucug

SEQ ID NO: 2175508 - RNA, 19 nt, Artificial Sequence
  Description of Artificial Sequence: Synthetic oligonucleotide
uguuugguucgggaggccu

SEQ ID NO: 2175509 - RNA, 19 nt, Artificial Sequence
  Description of Artificial Sequence: Synthetic oligonucleotide
ugccccucuucgccaagcg

SEQ ID NO: 2175510 - RNA, 19 nt, Artificial Sequence
  Description of Artificial Sequence: Synthetic oligonucleotide
agcauaugcaaagcuuuga

SEQ ID NO: 2175511 - RNA, 19 nt, Artificial Sequence
  Description of Artificial Sequence: Synthetic oligonucleotide
ucuuuaccaucuucccggu

SEQ ID NO: 2175512 - RNA, 19 nt, Artificial Sequence
  Description of Artificial Sequence: Synthetic oligonucleotide
cucagcauuggcgcggagc

SEQ ID NO: 2175513 - RNA, 19 nt, Artificial Sequence
  Description of Artificial Sequence: Synthetic oligonucleotide
agaccuuguaccagcuggg

SEQ ID NO: 2175514 - RNA, 19 nt, Artificial Sequence
  Description of Artificial Sequence: Synthetic oligonucleotide
uuugguucgggaggccuca

SEQ ID NO: 2175515 - RNA, 19 nt, Artificial Sequence
  Description of Artificial Sequence: Synthetic oligonucleotide
gucaugguuccuaucuggc

SEQ ID NO: 2175516 - RNA, 19 nt, Artificial Sequence
  Description of Artificial Sequence: Synthetic oligonucleotide
gugacuucggucugacuuc

SEQ ID NO: 2175517 - RNA, 19 nt, Artificial Sequence
  Description of Artificial Sequence: Synthetic oligonucleotide
acaaacguucaguccugcu

SEQ ID NO: 2175518 - RNA, 19 nt, Artificial Sequence
  Description of Artificial Sequence: Synthetic oligonucleotide
gauuucuauccaccuucuc

SEQ ID NO: 2175519 - RNA, 19 nt, Artificial Sequence
  Description of Artificial Sequence: Synthetic oligonucleotide
accaugugccccggggugc

SEQ ID NO: 2175520 - RNA, 19 nt, Artificial Sequence
  Description of Artificial Sequence: Synthetic oligonucleotide
ggcaaacugccaaagcucc

SEQ ID NO: 2175521 - RNA, 19 nt, Artificial Sequence
  Description of Artificial Sequence: Synthetic oligonucleotide
gcaucggaauaugagcugg

SEQ ID NO: 2175522 - RNA, 19 nt, Artificial Sequence
  Description of Artificial Sequence: Synthetic oligonucleotide
gggucugcagugcaacacg

SEQ ID NO: 2175523 - RNA, 19 nt, Artificial Sequence
  Description of Artificial Sequence: Synthetic oligonucleotide
ucgggcuccagauguuuga

SEQ ID NO: 2175524 - RNA, 19 nt, Artificial Sequence
  Description of Artificial Sequence: Synthetic oligonucleotide
uggcuucucgugacuucgg

SEQ ID NO: 2175525 - RNA, 19 nt, Artificial Sequence
  Description of Artificial Sequence: Synthetic oligonucleotide
uaugggcgcugcuggaaga

SEQ ID NO: 2175526 - RNA, 19 nt, Artificial Sequence
  Description of Artificial Sequence: Synthetic oligonucleotide
gggguaugggcgcugcugg

SEQ ID NO: 2175527 - RNA, 19 nt, Artificial Sequence
  Description of Artificial Sequence: Synthetic oligonucleotide
cucauuucucuuggguagc

SEQ ID NO: 2175528 - RNA, 19 nt, Artificial Sequence
  Description of Artificial Sequence: Synthetic oligonucleotide
gacaaaguuggggucaugu

SEQ ID NO: 2175529 - RNA, 19 nt, Artificial Sequence
  Description of Artificial Sequence: Synthetic oligonucleotide
agcgggucugcagugcaac

SEQ ID NO: 2175530 - RNA, 19 nt, Artificial Sequence
  Description of Artificial Sequence: Synthetic oligonucleotide
cauguggugagagccauga

SEQ ID NO: 2175531 - RNA, 19 nt, Artificial Sequence
  Description of Artificial Sequence: Synthetic oligonucleotide
acacggagcggcauugcgg

SEQ ID NO: 2175532 - RNA, 19 nt, Artificial Sequence
  Description of Artificial Sequence: Synthetic oligonucleotide
ugcggguugcugaccagac

SEQ ID NO: 2175533 - RNA, 19 nt, Artificial Sequence
  Description of Artificial Sequence: Synthetic oligonucleotide
agcauuggcgcggagcaca

SEQ ID NO: 2175534 - RNA, 19 nt, Artificial Sequence
  Description of Artificial Sequence: Synthetic oligonucleotide
ggucaaagaccuuguacca

SEQ ID NO: 2175535 - RNA, 19 nt, Artificial Sequence
  Description of Artificial Sequence: Synthetic oligonucleotide
ucauguggugagagccaug

SEQ ID NO: 2175536 - RNA, 19 nt, Artificial Sequence
  Description of Artificial Sequence: Synthetic oligonucleotide
uagucaacagggucaucau

SEQ ID NO: 2175537 - RNA, 19 nt, Artificial Sequence
  Description of Artificial Sequence: Synthetic oligonucleotide
uaucuggcuucucgugacu

SEQ ID NO: 2175538 - RNA, 19 nt, Artificial Sequence
  Description of Artificial Sequence: Synthetic oligonucleotide
cauuugugaaauaauuauu

SEQ ID NO: 2175539 - RNA, 19 nt, Artificial Sequence
  Description of Artificial Sequence: Synthetic oligonucleotide
aagggucaaagaccuugua

SEQ ID NO: 2175540 - RNA, 19 nt, Artificial Sequence
  Description of Artificial Sequence: Synthetic oligonucleotide
ccccucuucgccaagcggg

SEQ ID NO: 2175541 - RNA, 19 nt, Artificial Sequence
  Description of Artificial Sequence: Synthetic oligonucleotide
aucucuuccucuggcucgg

SEQ ID NO: 2175542 - RNA, 19 nt, Artificial Sequence
  Description of Artificial Sequence: Synthetic oligonucleotide
cggaauaugagcugggguc

SEQ ID NO: 2175543 - RNA, 19 nt, Artificial Sequence
  Description of Artificial Sequence: Synthetic oligonucleotide
cugaccagaccaauaucga

SEQ ID NO: 2175544 - RNA, 19 nt, Artificial Sequence
  Description of Artificial Sequence: Synthetic oligonucleotide
aguccucagcaaugaucuc

SEQ ID NO: 2175545 - RNA, 19 nt, Artificial Sequence
  Description of Artificial Sequence: Synthetic oligonucleotide
gacuuaucaugguuucugu

SEQ ID NO: 2175546 - RNA, 19 nt, Artificial Sequence
  Description of Artificial Sequence: Synthetic oligonucleotide
ugcaacacggagcggcauu

SEQ ID NO: 2175547 - RNA, 19 nt, Artificial Sequence
  Description of Artificial Sequence: Synthetic oligonucleotide
ucgccaagcgggucugcag

SEQ ID NO: 2175548 - RNA, 19 nt, Artificial Sequence
  Description of Artificial Sequence: Synthetic oligonucleotide
cuuguaccagcuggguggc

SEQ ID NO: 2175549 - RNA, 19 nt, Artificial Sequence
  Description of Artificial Sequence: Synthetic oligonucleotide
cauuucucuuggguagccc

SEQ ID NO: 2175550 - RNA, 19 nt, Artificial Sequence
  Description of Artificial Sequence: Synthetic oligonucleotide
caugacacgaggucugucu

SEQ ID NO: 2175551 - RNA, 19 nt, Artificial Sequence
  Description of Artificial Sequence: Synthetic oligonucleotide
gugagagccaugacacgag

SEQ ID NO: 2175552 - RNA, 19 nt, Artificial Sequence
  Description of Artificial Sequence: Synthetic oligonucleotide
caaagcuuugagcccuauc

SEQ ID NO: 2175553 - RNA, 19 nt, Artificial Sequence
  Description of Artificial Sequence: Synthetic oligonucleotide
uugucauagcuccgcucuc

SEQ ID NO: 2175554 - RNA, 19 nt, Artificial Sequence
  Description of Artificial Sequence: Synthetic oligonucleotide
uuggcgcggagcacagccc

SEQ ID NO: 2175555 - RNA, 19 nt, Artificial Sequence
  Description of Artificial Sequence: Synthetic oligonucleotide
cauugcggguugcugacca

SEQ ID NO: 2175556 - RNA, 19 nt, Artificial Sequence
  Description of Artificial Sequence: Synthetic oligonucleotide
cuaucuccagagccacaag

SEQ ID NO: 2175557 - RNA, 19 nt, Artificial Sequence
  Description of Artificial Sequence: Synthetic oligonucleotide
gacacgaggucugucucca

SEQ ID NO: 2175558 - RNA, 19 nt, Artificial Sequence
  Description of Artificial Sequence: Synthetic oligonucleotide
cucaugauuccgguccaac

SEQ ID NO: 2175559 - RNA, 19 nt, Artificial Sequence
  Description of Artificial Sequence: Synthetic oligonucleotide
auugcggguugcugaccag

SEQ ID NO: 2175560 - RNA, 19 nt, Artificial Sequence
  Description of Artificial Sequence: Synthetic oligonucleotide
ugacuucggucugacuucu

SEQ ID NO: 2175561 - RNA, 19 nt, Artificial Sequence
  Description of Artificial Sequence: Synthetic oligonucleotide
ggucugccuucucauaccc

SEQ ID NO: 2175562 - RNA, 19 nt, Artificial Sequence
  Description of Artificial Sequence: Synthetic oligonucleotide
uucucuuggguagcccugu

SEQ ID NO: 2175563 - RNA, 19 nt, Artificial Sequence
  Description of Artificial Sequence: Synthetic oligonucleotide
gggugcaucggaauaugag

SEQ ID NO: 2175564 - RNA, 19 nt, Artificial Sequence
  Description of Artificial Sequence: Synthetic oligonucleotide
uuccaguaguaagggaguc

SEQ ID NO: 2175565 - RNA, 19 nt, Artificial Sequence
  Description of Artificial Sequence: Synthetic oligonucleotide
ugucccgaucucucucucu

SEQ ID NO: 2175566 - RNA, 19 nt, Artificial Sequence
  Description of Artificial Sequence: Synthetic oligonucleotide
gaguuucuuggcagauuug

SEQ ID NO: 2175567 - RNA, 19 nt, Artificial Sequence
  Description of Artificial Sequence: Synthetic oligonucleotide
gguggcgccggucuuuacc

SEQ ID NO: 2175568 - RNA, 19 nt, Artificial Sequence
  Description of Artificial Sequence: Synthetic oligonucleotide
aggaugccccucuucgcca

SEQ ID NO: 2175569 - RNA, 19 nt, Artificial Sequence
  Description of Artificial Sequence: Synthetic oligonucleotide
ugguucgggaggccucagc

SEQ ID NO: 2175570 - RNA, 19 nt, Artificial Sequence
  Description of Artificial Sequence: Synthetic oligonucleotide
gguucgggaggccucagca

SEQ ID NO: 2175571 - RNA, 19 nt, Artificial Sequence
  Description of Artificial Sequence: Synthetic oligonucleotide
ucuccacauuccaguagua

SEQ ID NO: 2175572 - RNA, 19 nt, Artificial Sequence
  Description of Artificial Sequence: Synthetic oligonucleotide
cacggucccgaucucguuc

SEQ ID NO: 2175573 - RNA, 19 nt, Artificial Sequence
  Description of Artificial Sequence: Synthetic oligonucleotide
cagcuccucucugcgaugg

SEQ ID NO: 2175574 - RNA, 19 nt, Artificial Sequence
  Description of Artificial Sequence: Synthetic oligonucleotide
uugcggguugcugaccaga

SEQ ID NO: 2175575 - RNA, 19 nt, Artificial Sequence
  Description of Artificial Sequence: Synthetic oligonucleotide
cucgggcuccagauguuug

SEQ ID NO: 2175576 - RNA, 19 nt, Artificial Sequence
  Description of Artificial Sequence: Synthetic oligonucleotide
uguugaccaugugccccgg

SEQ ID NO: 2175577 - RNA, 19 nt, Artificial Sequence
  Description of Artificial Sequence: Synthetic oligonucleotide
guggcgccggucuuuacca

SEQ ID NO: 2175578 - RNA, 19 nt, Artificial Sequence
  Description of Artificial Sequence: Synthetic oligonucleotide
guugaccaugugccccggg

SEQ ID NO: 2175579 - RNA, 19 nt, Artificial Sequence
  Description of Artificial Sequence: Synthetic oligonucleotide
gaauaugagcuggggucca

SEQ ID NO: 2175580 - RNA, 19 nt, Artificial Sequence
  Description of Artificial Sequence: Synthetic oligonucleotide
ccggggagggguaugggcg

SEQ ID NO: 2175581 - RNA, 19 nt, Artificial Sequence
  Description of Artificial Sequence: Synthetic oligonucleotide
cagacccucuauccgggug

SEQ ID NO: 2175582 - RNA, 19 nt, Artificial Sequence
  Description of Artificial Sequence: Synthetic oligonucleotide
gugcaucggaauaugagcu

SEQ ID NO: 2175583 - RNA, 19 nt, Artificial Sequence
  Description of Artificial Sequence: Synthetic oligonucleotide
ucuucgccaagcgggucug

SEQ ID NO: 2175584 - RNA, 19 nt, Artificial Sequence
  Description of Artificial Sequence: Synthetic oligonucleotide
guaagggaguccacaagaa

SEQ ID NO: 2175585 - RNA, 19 nt, Artificial Sequence
  Description of Artificial Sequence: Synthetic oligonucleotide
ugccuugucaugguuccua

SEQ ID NO: 2175586 - RNA, 19 nt, Artificial Sequence
  Description of Artificial Sequence: Synthetic oligonucleotide
gacuucucaugauuucuau

SEQ ID NO: 2175587 - RNA, 19 nt, Artificial Sequence
  Description of Artificial Sequence: Synthetic oligonucleotide
cuugcucuugggguaagga

SEQ ID NO: 2175588 - RNA, 19 nt, Artificial Sequence
  Description of Artificial Sequence: Synthetic oligonucleotide
cagauuuggaaacgacaaa

SEQ ID NO: 2175589 - RNA, 19 nt, Artificial Sequence
  Description of Artificial Sequence: Synthetic oligonucleotide
cauacccacggucccgauc

SEQ ID NO: 2175590 - RNA, 19 nt, Artificial Sequence
  Description of Artificial Sequence: Synthetic oligonucleotide
uucgccaagcgggucugca

SEQ ID NO: 2175591 - RNA, 19 nt, Artificial Sequence
  Description of Artificial Sequence: Synthetic oligonucleotide
uggguggcagacccucuau

SEQ ID NO: 2175592 - RNA, 19 nt, Artificial Sequence
  Description of Artificial Sequence: Synthetic oligonucleotide
acacgaggucugucuccac

SEQ ID NO: 2175593 - RNA, 19 nt, Artificial Sequence
  Description of Artificial Sequence: Synthetic oligonucleotide
gcuguuugguucgggaggc

SEQ ID NO: 2175594 - RNA, 19 nt, Artificial Sequence
  Description of Artificial Sequence: Synthetic oligonucleotide
ccuguugaccaugugcccc

SEQ ID NO: 2175595 - RNA, 19 nt, Artificial Sequence
  Description of Artificial Sequence: Synthetic oligonucleotide
ucauagcuccgcucucgau

SEQ ID NO: 2175596 - RNA, 19 nt, Artificial Sequence
  Description of Artificial Sequence: Synthetic oligonucleotide
ucuuuccggcucaccgccu

SEQ ID NO: 2175597 - RNA, 19 nt, Artificial Sequence
  Description of Artificial Sequence: Synthetic oligonucleotide
cccggucagacuuaucaug

SEQ ID NO: 2175598 - RNA, 19 nt, Artificial Sequence
  Description of Artificial Sequence: Synthetic oligonucleotide
caugauuccgguccaacuu

SEQ ID NO: 2175599 - RNA, 19 nt, Artificial Sequence
  Description of Artificial Sequence: Synthetic oligonucleotide
augggcgcugcuggaagag

SEQ ID NO: 2175600 - RNA, 19 nt, Artificial Sequence
  Description of Artificial Sequence: Synthetic oligonucleotide
ucucgugacuucggucuga

SEQ ID NO: 2175601 - RNA, 19 nt, Artificial Sequence
  Description of Artificial Sequence: Synthetic oligonucleotide
agcccuaucuccagagcca

SEQ ID NO: 2175602 - RNA, 19 nt, Artificial Sequence
  Description of Artificial Sequence: Synthetic oligonucleotide
ugccccggggugcaucgga

SEQ ID NO: 2175603 - RNA, 19 nt, Artificial Sequence
  Description of Artificial Sequence: Synthetic oligonucleotide
ucccggucugccuucucau

SEQ ID NO: 2175604 - RNA, 19 nt, Artificial Sequence
  Description of Artificial Sequence: Synthetic oligonucleotide
caugguuccuaucuggcuu

SEQ ID NO: 2175605 - RNA, 19 nt, Artificial Sequence
  Description of Artificial Sequence: Synthetic oligonucleotide
ggcauugcggguugcugac

SEQ ID NO: 2175606 - RNA, 19 nt, Artificial Sequence
  Description of Artificial Sequence: Synthetic oligonucleotide
acccacggucccgaucucg

SEQ ID NO: 2175607 - RNA, 19 nt, Artificial Sequence
  Description of Artificial Sequence: Synthetic oligonucleotide
gucagacuuaucaugguuu

SEQ ID NO: 2175608 - RNA, 19 nt, Artificial Sequence
  Description of Artificial Sequence: Synthetic oligonucleotide
agugcaacacggagcggca

SEQ ID NO: 2175609 - RNA, 19 nt, Artificial Sequence
  Description of Artificial Sequence: Synthetic oligonucleotide
ugcaaagcuuugagcccua

SEQ ID NO: 2175610 - RNA, 19 nt, Artificial Sequence
  Description of Artificial Sequence: Synthetic oligonucleotide
gaccaauaucgaagggcuc

SEQ ID NO: 2175611 - RNA, 19 nt, Artificial Sequence
  Description of Artificial Sequence: Synthetic oligonucleotide
aagagggguccagcugcug

SEQ ID NO: 2175612 - RNA, 19 nt, Artificial Sequence
  Description of Artificial Sequence: Synthetic oligonucleotide
gagccaugacacgaggucu

SEQ ID NO: 2175613 - RNA, 19 nt, Artificial Sequence
  Description of Artificial Sequence: Synthetic oligonucleotide
guuugguucgggaggccuc

SEQ ID NO: 2175614 - RNA, 19 nt, Artificial Sequence
  Description of Artificial Sequence: Synthetic oligonucleotide
cugacuucucaugauuucu

SEQ ID NO: 2175615 - RNA, 19 nt, Artificial Sequence
  Description of Artificial Sequence: Synthetic oligonucleotide
ggcagacccucuauccggg

SEQ ID NO: 2175616 - RNA, 19 nt, Artificial Sequence
  Description of Artificial Sequence: Synthetic oligonucleotide
uagcccuguugaccaugug

SEQ ID NO: 2175617 - RNA, 19 nt, Artificial Sequence
  Description of Artificial Sequence: Synthetic oligonucleotide
gccucauuucucuugggua

SEQ ID NO: 2175618 - RNA, 19 nt, Artificial Sequence
  Description of Artificial Sequence: Synthetic oligonucleotide
ccgaucucucucucugucc

SEQ ID NO: 2175619 - RNA, 19 nt, Artificial Sequence
  Description of Artificial Sequence: Synthetic oligonucleotide
ucgaucccggucagacuua

SEQ ID NO: 2175620 - RNA, 19 nt, Artificial Sequence
  Description of Artificial Sequence: Synthetic oligonucleotide
ucucaugauuccgguccaa

SEQ ID NO: 2175621 - RNA, 19 nt, Artificial Sequence
  Description of Artificial Sequence: Synthetic oligonucleotide
gacccucuauccggguggc

SEQ ID NO: 2175622 - RNA, 19 nt, Artificial Sequence
  Description of Artificial Sequence: Synthetic oligonucleotide
gauuccgguccaacuuguc

SEQ ID NO: 2175623 - RNA, 19 nt, Artificial Sequence
  Description of Artificial Sequence: Synthetic oligonucleotide
ggggucauguggugagagc

SEQ ID NO: 2175624 - RNA, 19 nt, Artificial Sequence
  Description of Artificial Sequence: Synthetic oligonucleotide
cuggcucgggcuccagaug

SEQ ID NO: 2175625 - RNA, 19 nt, Artificial Sequence
  Description of Artificial Sequence: Synthetic oligonucleotide
ccggucugccuucucauac

SEQ ID NO: 2175626 - RNA, 19 nt, Artificial Sequence
  Description of Artificial Sequence: Synthetic oligonucleotide
gcuucucgugacuucgguc

SEQ ID NO: 2175627 - RNA, 19 nt, Artificial Sequence
  Description of Artificial Sequence: Synthetic oligonucleotide
caugauuucuauccaccuu

SEQ ID NO: 2175628 - RNA, 19 nt, Artificial Sequence
  Description of Artificial Sequence: Synthetic oligonucleotide
caaagaccuuguaccagcu

SEQ ID NO: 2175629 - RNA, 19 nt, Artificial Sequence
  Description of Artificial Sequence: Synthetic oligonucleotide
cuccacauuccaguaguaa

SEQ ID NO: 2175630 - RNA, 19 nt, Artificial Sequence
  Description of Artificial Sequence: Synthetic oligonucleotide
gcuuugagcccuaucucca

SEQ ID NO: 2175631 - RNA, 19 nt, Artificial Sequence
  Description of Artificial Sequence: Synthetic oligonucleotide
guaccagcuggguggcaga

SEQ ID NO: 2175632 - RNA, 19 nt, Artificial Sequence
  Description of Artificial Sequence: Synthetic oligonucleotide
gcaacacggagcggcauug

SEQ ID NO: 2175633 - RNA, 19 nt, Artificial Sequence
  Description of Artificial Sequence: Synthetic oligonucleotide
ccuaucuggcuucucguga

SEQ ID NO: 2175634 - RNA, 19 nt, Artificial Sequence
  Description of Artificial Sequence: Synthetic oligonucleotide
caacacggagcggcauugc

SEQ ID NO: 2175635 - RNA, 19 nt, Artificial Sequence
  Description of Artificial Sequence: Synthetic oligonucleotide
ucgugacuucggucugacu

SEQ ID NO: 2175636 - RNA, 19 nt, Artificial Sequence
  Description of Artificial Sequence: Synthetic oligonucleotide
gagccacaaggaagaaaga

SEQ ID NO: 2175637 - RNA, 19 nt, Artificial Sequence
  Description of Artificial Sequence: Synthetic oligonucleotide
acgacaaaguuggggucau

SEQ ID NO: 2175638 - RNA, 19 nt, Artificial Sequence
  Description of Artificial Sequence: Synthetic oligonucleotide
ggagcggcauugcggguug

SEQ ID NO: 2175639 - RNA, 19 nt, Artificial Sequence
  Description of Artificial Sequence: Synthetic oligonucleotide
cucauacccacggucccga

SEQ ID NO: 2175640 - RNA, 19 nt, Artificial Sequence
  Description of Artificial Sequence: Synthetic oligonucleotide
uagcuccgcucucgauccc

SEQ ID NO: 2175641 - RNA, 19 nt, Artificial Sequence
  Description of Artificial Sequence: Synthetic oligonucleotide
acccucuauccggguggcc

SEQ ID NO: 2175642 - RNA, 19 nt, Artificial Sequence
  Description of Artificial Sequence: Synthetic oligonucleotide
uugguucgggaggccucag

SEQ ID NO: 2175643 - RNA, 19 nt, Artificial Sequence
  Description of Artificial Sequence: Synthetic oligonucleotide
gcuggaagagggguccagc

SEQ ID NO: 2175644 - RNA, 19 nt, Artificial Sequence
  Description of Artificial Sequence: Synthetic oligonucleotide
gccccucuucgccaagcgg

SEQ ID NO: 2175645 - RNA, 19 nt, Artificial Sequence
  Description of Artificial Sequence: Synthetic oligonucleotide
gcauuacuguuccugaguu

SEQ ID NO: 2175646 - RNA, 19 nt, Artificial Sequence
  Description of Artificial Sequence: Synthetic oligonucleotide
gcuguugugucagcaccug

SEQ ID NO: 2175647 - RNA, 19 nt, Artificial Sequence
  Description of Artificial Sequence: Synthetic oligonucleotide
cuguuugguucgggaggcc

SEQ ID NO: 2175648 - RNA, 19 nt, Artificial Sequence
  Description of Artificial Sequence: Synthetic oligonucleotide
ugcgaugguggcgccgguc

SEQ ID NO: 2175649 - RNA, 19 nt, Artificial Sequence
  Description of Artificial Sequence: Synthetic oligonucleotide
gccaagcgggucugcagug

SEQ ID NO: 2175650 - RNA, 19 nt, Artificial Sequence
  Description of Artificial Sequence: Synthetic oligonucleotide
cucuucgccaagcgggucu

SEQ ID NO: 2175651 - RNA, 19 nt, Artificial Sequence
  Description of Artificial Sequence: Synthetic oligonucleotide
ccacaagaagggucaaaga

SEQ ID NO: 2175652 - RNA, 19 nt, Artificial Sequence
  Description of Artificial Sequence: Synthetic oligonucleotide
gucugacuucucaugauuu

SEQ ID NO: 2175653 - RNA, 19 nt, Artificial Sequence
  Description of Artificial Sequence: Synthetic oligonucleotide
aagaagggucaaagaccuu

SEQ ID NO: 2175654 - RNA, 19 nt, Artificial Sequence
  Description of Artificial Sequence: Synthetic oligonucleotide
ggucagacuuaucaugguu

SEQ ID NO: 2175655 - RNA, 19 nt, Artificial Sequence
  Description of Artificial Sequence: Synthetic oligonucleotide
gcacaaaacgcuccccacu

SEQ ID NO: 2175656 - RNA, 19 nt, Artificial Sequence
  Description of Artificial Sequence: Synthetic oligonucleotide
ggccucauuucucuugggu

SEQ ID NO: 2175657 - RNA, 19 nt, Artificial Sequence
  Description of Artificial Sequence: Synthetic oligonucleotide
aguccacaagaagggucaa

SEQ ID NO: 2175658 - RNA, 19 nt, Artificial Sequence
  Description of Artificial Sequence: Synthetic oligonucleotide
aagcgggucugcagugcaa

SEQ ID NO: 2175659 - RNA, 19 nt, Artificial Sequence
  Description of Artificial Sequence: Synthetic oligonucleotide
cccgaucucucucucuguc

SEQ ID NO: 2175660 - RNA, 19 nt, Artificial Sequence
  Description of Artificial Sequence: Synthetic oligonucleotide
ggguggcagacccucuauc

SEQ ID NO: 2175661 - RNA, 19 nt, Artificial Sequence
  Description of Artificial Sequence: Synthetic oligonucleotide
agcaccugucuuggccuca

SEQ ID NO: 2175662 - RNA, 19 nt, Artificial Sequence
  Description of Artificial Sequence: Synthetic oligonucleotide
cauuacuguuccugaguuu

SEQ ID NO: 2175663 - RNA, 19 nt, Artificial Sequence
  Description of Artificial Sequence: Synthetic oligonucleotide
gcggguugcugaccagacc

SEQ ID NO: 2175664 - RNA, 19 nt, Artificial Sequence
  Description of Artificial Sequence: Synthetic oligonucleotide
cauuggcgcggagcacagc

SEQ ID NO: 2175665 - RNA, 19 nt, Artificial Sequence
  Description of Artificial Sequence: Synthetic oligonucleotide
gagggguccagcugcuguu

SEQ ID NO: 2175666 - RNA, 19 nt, Artificial Sequence
  Description of Artificial Sequence: Synthetic oligonucleotide
gaagagggguccagcugcu

SEQ ID NO: 2175667 - RNA, 19 nt, Artificial Sequence
  Description of Artificial Sequence: Synthetic oligonucleotide
acggagcggcauugcgggu

SEQ ID NO: 2175668 - RNA, 19 nt, Artificial Sequence
  Description of Artificial Sequence: Synthetic oligonucleotide
uuguaccagcuggguggca

SEQ ID NO: 2175669 - RNA, 19 nt, Artificial Sequence
  Description of Artificial Sequence: Synthetic oligonucleotide
ccuugucaugguuccuauc

SEQ ID NO: 2175670 - RNA, 19 nt, Artificial Sequence
  Description of Artificial Sequence: Synthetic oligonucleotide
gucauguggugagagccau

SEQ ID NO: 2175671 - RNA, 19 nt, Artificial Sequence
  Description of Artificial Sequence: Synthetic oligonucleotide
ccucuauccggguggccuc

SEQ ID NO: 2175672 - RNA, 19 nt, Artificial Sequence
  Description of Artificial Sequence: Synthetic oligonucleotide
ccucucugcgaugguggcg

SEQ ID NO: 2175673 - RNA, 19 nt, Artificial Sequence
  Description of Artificial Sequence: Synthetic oligonucleotide
uggcgccggucuuuaccau

SEQ ID NO: 2175674 - RNA, 19 nt, Artificial Sequence
  Description of Artificial Sequence: Synthetic oligonucleotide
ucuauccggguggccucau

SEQ ID NO: 2175675 - RNA, 19 nt, Artificial Sequence
  Description of Artificial Sequence: Synthetic oligonucleotide
cuucgccaagcgggucugc

SEQ ID NO: 2175676 - RNA, 19 nt, Artificial Sequence
  Description of Artificial Sequence: Synthetic oligonucleotide
gguaugggcgcugcuggaa

SEQ ID NO: 2175677 - RNA, 19 nt, Artificial Sequence
  Description of Artificial Sequence: Synthetic oligonucleotide
guagcccuguugaccaugu

SEQ ID NO: 2175678 - RNA, 19 nt, Artificial Sequence
  Description of Artificial Sequence: Synthetic oligonucleotide
cgugacuucggucugacuu

SEQ ID NO: 2175679 - RNA, 19 nt, Artificial Sequence
  Description of Artificial Sequence: Synthetic oligonucleotide
cuggguggcagacccucua

SEQ ID NO: 2175680 - RNA, 19 nt, Artificial Sequence
  Description of Artificial Sequence: Synthetic oligonucleotide
gcauuggcgcggagcacag

SEQ ID NO: 2175681 - RNA, 19 nt, Artificial Sequence
  Description of Artificial Sequence: Synthetic oligonucleotide
gcccuaucuccagagccac

SEQ ID NO: 2175682 - RNA, 19 nt, Artificial Sequence
  Description of Artificial Sequence: Synthetic oligonucleotide
ccaagcgggucugcagugc

SEQ ID NO: 2175683 - RNA, 19 nt, Artificial Sequence
  Description of Artificial Sequence: Synthetic oligonucleotide
gaucccggucagacuuauc

SEQ ID NO: 2175684 - RNA, 19 nt, Artificial Sequence
  Description of Artificial Sequence: Synthetic oligonucleotide
cagcauuggcgcggagcac

SEQ ID NO: 2175685 - RNA, 19 nt, Artificial Sequence
  Description of Artificial Sequence: Synthetic oligonucleotide
cagacuuaucaugguuucu

SEQ ID NO: 2175686 - RNA, 19 nt, Artificial Sequence
  Description of Artificial Sequence: Synthetic oligonucleotide
cugucugccuugucauggu

SEQ ID NO: 2175687 - RNA, 19 nt, Artificial Sequence
  Description of Artificial Sequence: Synthetic oligonucleotide
cucuauccggguggccuca

SEQ ID NO: 2175688 - RNA, 19 nt, Artificial Sequence
  Description of Artificial Sequence: Synthetic oligonucleotide
gcaaacugccaaagcucca

SEQ ID NO: 2175689 - RNA, 19 nt, Artificial Sequence
  Description of Artificial Sequence: Synthetic oligonucleotide
cuguugugucagcaccugu

SEQ ID NO: 2175690 - RNA, 19 nt, Artificial Sequence
  Description of Artificial Sequence: Synthetic oligonucleotide
gacuucggucugacuucuc

SEQ ID NO: 2175691 - RNA, 19 nt, Artificial Sequence
  Description of Artificial Sequence: Synthetic oligonucleotide
ugguggcgccggucuuuac

SEQ ID NO: 2175692 - RNA, 19 nt, Artificial Sequence
  Description of Artificial Sequence: Synthetic oligonucleotide
ggguaugggcgcugcugga

SEQ ID NO: 2175693 - RNA, 19 nt, Artificial Sequence
  Description of Artificial Sequence: Synthetic oligonucleotide
gcuccauggaacaaacguu

SEQ ID NO: 2175694 - RNA, 19 nt, Artificial Sequence
  Description of Artificial Sequence: Synthetic oligonucleotide
cucuguccacuuugucaua

SEQ ID NO: 2175695 - RNA, 19 nt, Artificial Sequence
  Description of Artificial Sequence: Synthetic oligonucleotide
ggggugcaucggaauauga

SEQ ID NO: 2175696 - RNA, 19 nt, Artificial Sequence
  Description of Artificial Sequence: Synthetic oligonucleotide
gcgaugguggcgccggucu

SEQ ID NO: 2175697 - RNA, 19 nt, Artificial Sequence
  Description of Artificial Sequence: Synthetic oligonucleotide
gcauugcggguugcugacc

SEQ ID NO: 2175698 - RNA, 19 nt, Artificial Sequence
  Description of Artificial Sequence: Synthetic oligonucleotide
ggcuucucgugacuucggu

SEQ ID NO: 2175699 - RNA, 19 nt, Artificial Sequence
  Description of Artificial Sequence: Synthetic oligonucleotide
gccagcuccucucugcgau

SEQ ID NO: 2175700 - RNA, 19 nt, Artificial Sequence
  Description of Artificial Sequence: Synthetic oligonucleotide
gcucaccgccuucuugcuc

SEQ ID NO: 2175701 - RNA, 19 nt, Artificial Sequence
  Description of Artificial Sequence: Synthetic oligonucleotide
gagcggcauugcggguugc

SEQ ID NO: 2175702 - RNA, 19 nt, Artificial Sequence
  Description of Artificial Sequence: Synthetic oligonucleotide
gcgggucugcagugcaaca

SEQ ID NO: 2175703 - RNA, 19 nt, Artificial Sequence
  Description of Artificial Sequence: Synthetic oligonucleotide
cgggucugcagugcaacac

SEQ ID NO: 2175704 - RNA, 19 nt, Artificial Sequence
  Description of Artificial Sequence: Synthetic oligonucleotide
cucuugggguaaggagcca

SEQ ID NO: 2175705 - RNA, 19 nt, Artificial Sequence
  Description of Artificial Sequence: Synthetic oligonucleotide
cuuuccggcucaccgccuu

SEQ ID NO: 2175706 - RNA, 19 nt, Artificial Sequence
  Description of Artificial Sequence: Synthetic oligonucleotide
gguuccuaucuggcuucuc

SEQ ID NO: 2175707 - RNA, 19 nt, Artificial Sequence
  Description of Artificial Sequence: Synthetic oligonucleotide
gugccccggggugcaucgg

SEQ ID NO: 2175708 - RNA, 19 nt, Artificial Sequence
  Description of Artificial Sequence: Synthetic oligonucleotide
cugaguuucuuggcagauu

SEQ ID NO: 2175709 - RNA, 19 nt, Artificial Sequence
  Description of Artificial Sequence: Synthetic oligonucleotide
cuauccggguggccucaua

SEQ ID NO: 2175710 - RNA, 19 nt, Artificial Sequence
  Description of Artificial Sequence: Synthetic oligonucleotide
ccaugacacgaggucuguc

SEQ ID NO: 2175711 - RNA, 19 nt, Artificial Sequence
  Description of Artificial Sequence: Synthetic oligonucleotide
cggguggccucauagucaa

SEQ ID NO: 2175712 - RNA, 19 nt, Artificial Sequence
  Description of Artificial Sequence: Synthetic oligonucleotide
gguugcugaccagaccaau

SEQ ID NO: 2175713 - RNA, 19 nt, Artificial Sequence
  Description of Artificial Sequence: Synthetic oligonucleotide
ggguugcugaccagaccaa

SEQ ID NO: 2175714 - RNA, 19 nt, Artificial Sequence
  Description of Artificial Sequence: Synthetic oligonucleotide
gggagggguaugggcgcug

SEQ ID NO: 2175715 - RNA, 19 nt, Artificial Sequence
  Description of Artificial Sequence: Synthetic oligonucleotide
ccaucuucccggucugccu

SEQ ID NO: 2175716 - RNA, 19 nt, Artificial Sequence
  Description of Artificial Sequence: Synthetic oligonucleotide
ggcucaccgccuucuugcu

SEQ ID NO: 2175717 - RNA, 19 nt, Artificial Sequence
  Description of Artificial Sequence: Synthetic oligonucleotide
cccucuauccggguggccu

SEQ ID NO: 2175718 - RNA, 19 nt, Artificial Sequence
  Description of Artificial Sequence: Synthetic oligonucleotide
gcgccggucuuuaccaucu

SEQ ID NO: 2175719 - RNA, 19 nt, Artificial Sequence
  Description of Artificial Sequence: Synthetic oligonucleotide
cggggugcaucggaauaug

SEQ ID NO: 2175720 - RNA, 19 nt, Artificial Sequence
  Description of Artificial Sequence: Synthetic oligonucleotide
cccggggugcaucggaaua

SEQ ID NO: 2175721 - RNA, 19 nt, Artificial Sequence
  Description of Artificial Sequence: Synthetic oligonucleotide
ccucuucgccaagcggguc

SEQ ID NO: 2175722 - RNA, 19 nt, Artificial Sequence
  Description of Artificial Sequence: Synthetic oligonucleotide
gugcaacacggagcggcau

SEQ ID NO: 2175723 - RNA, 19 nt, Artificial Sequence
  Description of Artificial Sequence: Synthetic oligonucleotide
gcagacccucuauccgggu

SEQ ID NO: 2175724 - RNA, 19 nt, Artificial Sequence
  Description of Artificial Sequence: Synthetic oligonucleotide
cguucccugucccgaucuc

SEQ ID NO: 2175725 - RNA, 19 nt, Artificial Sequence
  Description of Artificial Sequence: Synthetic oligonucleotide
gccaugacacgaggucugu

SEQ ID NO: 2175726 - RNA, 19 nt, Artificial Sequence
  Description of Artificial Sequence: Synthetic oligonucleotide
ccaugugccccggggugca

SEQ ID NO: 2175727 - RNA, 19 nt, Artificial Sequence
  Description of Artificial Sequence: Synthetic oligonucleotide
cugccuugucaugguuccu

SEQ ID NO: 2175728 - RNA, 19 nt, Artificial Sequence
  Description of Artificial Sequence: Synthetic oligonucleotide
ccaauaucgaagggcucuu

SEQ ID NO: 2175729 - RNA, 19 nt, Artificial Sequence
  Description of Artificial Sequence: Synthetic oligonucleotide
cgccaagcgggucugcagu

SEQ ID NO: 2175730 - RNA, 19 nt, Artificial Sequence
  Description of Artificial Sequence: Synthetic oligonucleotide
cgacaaaguuggggucaug

SEQ ID NO: 2175731 - RNA, 19 nt, Artificial Sequence
  Description of Artificial Sequence: Synthetic oligonucleotide
gcaaagcuuugagcccuau

SEQ ID NO: 2175732 - RNA, 19 nt, Artificial Sequence
  Description of Artificial Sequence: Synthetic oligonucleotide
cggucagacuuaucauggu

SEQ ID NO: 2175733 - RNA, 19 nt, Artificial Sequence
  Description of Artificial Sequence: Synthetic oligonucleotide
gcucgggcuccagauguuu

SEQ ID NO: 2175734 - RNA, 19 nt, Artificial Sequence
  Description of Artificial Sequence: Synthetic oligonucleotide
gccccggggugcaucggaa

SEQ ID NO: 2175735 - RNA, 19 nt, Artificial Sequence
  Description of Artificial Sequence: Synthetic oligonucleotide
ggguagcccuguugaccau

SEQ ID NO: 2175736 - RNA, 19 nt, Artificial Sequence
  Description of Artificial Sequence: Synthetic oligonucleotide
cugcgaugguggcgccggu

SEQ ID NO: 2175737 - RNA, 19 nt, Artificial Sequence
  Description of Artificial Sequence: Synthetic oligonucleotide
ccggggugcaucggaauau

SEQ ID NO: 2175738 - RNA, 19 nt, Artificial Sequence
  Description of Artificial Sequence: Synthetic oligonucleotide
cggucugacuucucaugau

SEQ ID NO: 2175739 - RNA, 19 nt, Artificial Sequence
  Description of Artificial Sequence: Synthetic oligonucleotide
gggguccauagggucuaau

SEQ ID NO: 2175740 - RNA, 19 nt, Artificial Sequence
  Description of Artificial Sequence: Synthetic oligonucleotide
ggcucgggcuccagauguu

SEQ ID NO: 2175741 - RNA, 19 nt, Artificial Sequence
  Description of Artificial Sequence: Synthetic oligonucleotide
ccccggggugcaucggaau

SEQ ID NO: 2175742 - RNA, 19 nt, Artificial Sequence
  Description of Artificial Sequence: Synthetic oligonucleotide
cgaggucugucuccacauu

SEQ ID NO: 2175743 - RNA, 19 nt, Artificial Sequence
  Description of Artificial Sequence: Synthetic oligonucleotide
ccacggucccgaucucguu

SEQ ID NO: 2175744 - RNA, 19 nt, Artificial Sequence
  Description of Artificial Sequence: Synthetic oligonucleotide
cgaucccggucagacuuau

SEQ ID NO: 2175745 - RNA, 19 nt, Artificial Sequence
  Description of Artificial Sequence: Synthetic oligonucleotide
cgccggucuuuaccaucuu

SEQ ID NO: 2175746 - RNA, 19 nt, Artificial Sequence
  Description of Artificial Sequence: Synthetic oligonucleotide
agauaauucuuacagaaag

SEQ ID NO: 2175747 - RNA, 19 nt, Artificial Sequence
  Description of Artificial Sequence: Synthetic oligonucleotide
uuuggcaucaauuuguagc

SEQ ID NO: 2175748 - RNA, 19 nt, Artificial Sequence
  Description of Artificial Sequence: Synthetic oligonucleotide
aaaagcagagaugaagucg

SEQ ID NO: 2175749 - RNA, 19 nt, Artificial Sequence
  Description of Artificial Sequence: Synthetic oligonucleotide
gauauuucugcucugaguc

SEQ ID NO: 2175750 - RNA, 19 nt, Artificial Sequence
  Description of Artificial Sequence: Synthetic oligonucleotide
guuaucuagacuuagccug

SEQ ID NO: 2175751 - RNA, 19 nt, Artificial Sequence
  Description of Artificial Sequence: Synthetic oligonucleotide
aauuuguagccccucauca

SEQ ID NO: 2175752 - RNA, 19 nt, Artificial Sequence
  Description of Artificial Sequence: Synthetic oligonucleotide
uucaagauggcacauggca

SEQ ID NO: 2175753 - RNA, 19 nt, Artificial Sequence
  Description of Artificial Sequence: Synthetic oligonucleotide
uguaagggcuuucacagag

SEQ ID NO: 2175754 - RNA, 19 nt, Artificial Sequence
  Description of Artificial Sequence: Synthetic oligonucleotide
ucuucuuuaauccuucagu

SEQ ID NO: 2175755 - RNA, 19 nt, Artificial Sequence
  Description of Artificial Sequence: Synthetic oligonucleotide
agcuucacuaaacaucacc

SEQ ID NO: 2175756 - RNA, 19 nt, Artificial Sequence
  Description of Artificial Sequence: Synthetic oligonucleotide
aaguagaccuccaaguuac

SEQ ID NO: 2175757 - RNA, 19 nt, Artificial Sequence
  Description of Artificial Sequence: Synthetic oligonucleotide
agggcuuucacagaguacc

SEQ ID NO: 2175758 - RNA, 19 nt, Artificial Sequence
  Description of Artificial Sequence: Synthetic oligonucleotide
caucauugagugcagagcg

SEQ ID NO: 2175759 - RNA, 19 nt, Artificial Sequence
  Description of Artificial Sequence: Synthetic oligonucleotide
uucacuaaacaucaccgug

SEQ ID NO: 2175760 - RNA, 19 nt, Artificial Sequence
  Description of Artificial Sequence: Synthetic oligonucleotide
auagucuuucucuuuaaag

SEQ ID NO: 2175761 - RNA, 19 nt, Artificial Sequence
  Description of Artificial Sequence: Synthetic oligonucleotide
uaauucuuacagaaaggag

SEQ ID NO: 2175762 - RNA, 19 nt, Artificial Sequence
  Description of Artificial Sequence: Synthetic oligonucleotide
ucguuaucuagacuuagcc

SEQ ID NO: 2175763 - RNA, 19 nt, Artificial Sequence
  Description of Artificial Sequence: Synthetic oligonucleotide
gauaauucuuacagaaagg

SEQ ID NO: 2175764 - RNA, 19 nt, Artificial Sequence
  Description of Artificial Sequence: Synthetic oligonucleotide
ucuuacuacggcuuucagg

SEQ ID NO: 2175765 - RNA, 19 nt, Artificial Sequence
  Description of Artificial Sequence: Synthetic oligonucleotide
aaaguguuucaguucaaga

SEQ ID NO: 2175766 - RNA, 19 nt, Artificial Sequence
  Description of Artificial Sequence: Synthetic oligonucleotide
uacuacggcuuucaggugg

SEQ ID NO: 2175767 - RNA, 19 nt, Artificial Sequence
  Description of Artificial Sequence: Synthetic oligonucleotide
uuaucuagacuuagccugg

SEQ ID NO: 2175768 - RNA, 19 nt, Artificial Sequence
  Description of Artificial Sequence: Synthetic oligonucleotide
aaaccuggaguccucauga

SEQ ID NO: 2175769 - RNA, 19 nt, Artificial Sequence
  Description of Artificial Sequence: Synthetic oligonucleotide
ucaguuguaggaaaccaca

SEQ ID NO: 2175770 - RNA, 19 nt, Artificial Sequence
  Description of Artificial Sequence: Synthetic oligonucleotide
caagauaguacugugcugc

SEQ ID NO: 2175771 - RNA, 19 nt, Artificial Sequence
  Description of Artificial Sequence: Synthetic oligonucleotide
aguagagccucauucugac

SEQ ID NO: 2175772 - RNA, 19 nt, Artificial Sequence
  Description of Artificial Sequence: Synthetic oligonucleotide
auacucuggguacaggaac

SEQ ID NO: 2175773 - RNA, 19 nt, Artificial Sequence
  Description of Artificial Sequence: Synthetic oligonucleotide
auaauucuuacagaaagga

SEQ ID NO: 2175774 - RNA, 19 nt, Artificial Sequence
  Description of Artificial Sequence: Synthetic oligonucleotide
uagaccuccaaguuacccg

SEQ ID NO: 2175775 - RNA, 19 nt, Artificial Sequence
  Description of Artificial Sequence: Synthetic oligonucleotide
aguacugugcugcugcccg

SEQ ID NO: 2175776 - RNA, 19 nt, Artificial Sequence
  Description of Artificial Sequence: Synthetic oligonucleotide
aaaggacagcauucaaauc

SEQ ID NO: 2175777 - RNA, 19 nt, Artificial Sequence
  Description of Artificial Sequence: Synthetic oligonucleotide
uccuucuuuucuuucaacc

SEQ ID NO: 2175778 - RNA, 19 nt, Artificial Sequence
  Description of Artificial Sequence: Synthetic oligonucleotide
auauuucugcucugagucc

SEQ ID NO: 2175779 - RNA, 19 nt, Artificial Sequence
  Description of Artificial Sequence: Synthetic oligonucleotide
gcgaaaauugccaagauag

SEQ ID NO: 2175780 - RNA, 19 nt, Artificial Sequence
  Description of Artificial Sequence: Synthetic oligonucleotide
cauggcaccucuuacuacg

SEQ ID NO: 2175781 - RNA, 19 nt, Artificial Sequence
  Description of Artificial Sequence: Synthetic oligonucleotide
gagaggauccuacacagac

SEQ ID NO: 2175782 - RNA, 19 nt, Artificial Sequence
  Description of Artificial Sequence: Synthetic oligonucleotide
ugagauggucaauaaaccu

SEQ ID NO: 2175783 - RNA, 19 nt, Artificial Sequence
  Description of Artificial Sequence: Synthetic oligonucleotide
uuuguagccccucaucaca

SEQ ID NO: 2175784 - RNA, 19 nt, Artificial Sequence
  Description of Artificial Sequence: Synthetic oligonucleotide
gguguaagggcuuucacag

SEQ ID NO: 2175785 - RNA, 19 nt, Artificial Sequence
  Description of Artificial Sequence: Synthetic oligonucleotide
accuguguacccuuuuccc

SEQ ID NO: 2175786 - RNA, 19 nt, Artificial Sequence
  Description of Artificial Sequence: Synthetic oligonucleotide
uauagcucugccuuguccu

SEQ ID NO: 2175787 - RNA, 19 nt, Artificial Sequence
  Description of Artificial Sequence: Synthetic oligonucleotide
acaucauugagugcagagc

SEQ ID NO: 2175788 - RNA, 19 nt, Artificial Sequence
  Description of Artificial Sequence: Synthetic oligonucleotide
ugagcugagcccauccagg

SEQ ID NO: 2175789 - RNA, 19 nt, Artificial Sequence
  Description of Artificial Sequence: Synthetic oligonucleotide
auuuguagccccucaucac

SEQ ID NO: 2175790 - RNA, 19 nt, Artificial Sequence
  Description of Artificial Sequence: Synthetic oligonucleotide
aaaguagaccuccaaguua

SEQ ID NO: 2175791 - RNA, 19 nt, Artificial Sequence
  Description of Artificial Sequence: Synthetic oligonucleotide
ugcagagcgaaaauugcca

SEQ ID NO: 2175792 - RNA, 19 nt, Artificial Sequence
  Description of Artificial Sequence: Synthetic oligonucleotide
gagauggucaauaaaccug

SEQ ID NO: 2175793 - RNA, 19 nt, Artificial Sequence
  Description of Artificial Sequence: Synthetic oligonucleotide
aggagaggauccuacacag

SEQ ID NO: 2175794 - RNA, 19 nt, Artificial Sequence
  Description of Artificial Sequence: Synthetic oligonucleotide
cuuacuacggcuuucaggu

SEQ ID NO: 2175795 - RNA, 19 nt, Artificial Sequence
  Description of Artificial Sequence: Synthetic oligonucleotide
gaaacaagucugauguucc

SEQ ID NO: 2175796 - RNA, 19 nt, Artificial Sequence
  Description of Artificial Sequence: Synthetic oligonucleotide
ucuagacuuagccuggcuc

SEQ ID NO: 2175797 - RNA, 19 nt, Artificial Sequence
  Description of Artificial Sequence: Synthetic oligonucleotide
uugccuucauccuuauagg

SEQ ID NO: 2175798 - RNA, 19 nt, Artificial Sequence
  Description of Artificial Sequence: Synthetic oligonucleotide
acccgggugauauuucugc

SEQ ID NO: 2175799 - RNA, 19 nt, Artificial Sequence
  Description of Artificial Sequence: Synthetic oligonucleotide
uucacagaguaccuggggu

SEQ ID NO: 2175800 - RNA, 19 nt, Artificial Sequence
  Description of Artificial Sequence: Synthetic oligonucleotide
uccucuucaacuugucugc

SEQ ID NO: 2175801 - RNA, 19 nt, Artificial Sequence
  Description of Artificial Sequence: Synthetic oligonucleotide
ugguauaaaggacagcauu

SEQ ID NO: 2175802 - RNA, 19 nt, Artificial Sequence
  Description of Artificial Sequence: Synthetic oligonucleotide
uccuacacagaccaggaau

SEQ ID NO: 2175803 - RNA, 19 nt, Artificial Sequence
  Description of Artificial Sequence: Synthetic oligonucleotide
acaagucugauguuccuug

SEQ ID NO: 2175804 - RNA, 19 nt, Artificial Sequence
  Description of Artificial Sequence: Synthetic oligonucleotide
agaccuccaaguuacccgg

SEQ ID NO: 2175805 - RNA, 19 nt, Artificial Sequence
  Description of Artificial Sequence: Synthetic oligonucleotide
cucaaaguagaccuccaag

SEQ ID NO: 2175806 - RNA, 19 nt, Artificial Sequence
  Description of Artificial Sequence: Synthetic oligonucleotide
ugauauuucugcucugagu

SEQ ID NO: 2175807 - RNA, 19 nt, Artificial Sequence
  Description of Artificial Sequence: Synthetic oligonucleotide
uuugcccucacuucuagaa

SEQ ID NO: 2175808 - RNA, 19 nt, Artificial Sequence
  Description of Artificial Sequence: Synthetic oligonucleotide
uucaguuguaggaaaccac

SEQ ID NO: 2175809 - RNA, 19 nt, Artificial Sequence
  Description of Artificial Sequence: Synthetic oligonucleotide
uuuaauccuucaguuguag

SEQ ID NO: 2175810 - RNA, 19 nt, Artificial Sequence
  Description of Artificial Sequence: Synthetic oligonucleotide
agucggacugugcauacuc

SEQ ID NO: 2175811 - RNA, 19 nt, Artificial Sequence
  Description of Artificial Sequence: Synthetic oligonucleotide
uucguuaucuagacuuagc

SEQ ID NO: 2175812 - RNA, 19 nt, Artificial Sequence
  Description of Artificial Sequence: Synthetic oligonucleotide
agugcagagcgaaaauugc

SEQ ID NO: 2175813 - RNA, 19 nt, Artificial Sequence
  Description of Artificial Sequence: Synthetic oligonucleotide
auguuccuugccuggaugg

SEQ ID NO: 2175814 - RNA, 19 nt, Artificial Sequence
  Description of Artificial Sequence: Synthetic oligonucleotide
agggaaggaucccaggguc

SEQ ID NO: 2175815 - RNA, 19 nt, Artificial Sequence
  Description of Artificial Sequence: Synthetic oligonucleotide
ugguguaagggcuuucaca

SEQ ID NO: 2175816 - RNA, 19 nt, Artificial Sequence
  Description of Artificial Sequence: Synthetic oligonucleotide
ggagauaauucuuacagaa

SEQ ID NO: 2175817 - RNA, 19 nt, Artificial Sequence
  Description of Artificial Sequence: Synthetic oligonucleotide
auggucaauaaaccuggag

SEQ ID NO: 2175818 - RNA, 19 nt, Artificial Sequence
  Description of Artificial Sequence: Synthetic oligonucleotide
cucagcuggaccaucggag

SEQ ID NO: 2175819 - RNA, 19 nt, Artificial Sequence
  Description of Artificial Sequence: Synthetic oligonucleotide
cuggaguagagccucauuc

SEQ ID NO: 2175820 - RNA, 19 nt, Artificial Sequence
  Description of Artificial Sequence: Synthetic oligonucleotide
ucacagaguaccuggggug

SEQ ID NO: 2175821 - RNA, 19 nt, Artificial Sequence
  Description of Artificial Sequence: Synthetic oligonucleotide
auaguacugugcugcugcc

SEQ ID NO: 2175822 - RNA, 19 nt, Artificial Sequence
  Description of Artificial Sequence: Synthetic oligonucleotide
uaccuguguacccuuuucc

SEQ ID NO: 2175823 - RNA, 19 nt, Artificial Sequence
  Description of Artificial Sequence: Synthetic oligonucleotide
uuacagaaaggagaggauc

SEQ ID NO: 2175824 - RNA, 19 nt, Artificial Sequence
  Description of Artificial Sequence: Synthetic oligonucleotide
cuaaacaucaccgugagau

SEQ ID NO: 2175825 - RNA, 19 nt, Artificial Sequence
  Description of Artificial Sequence: Synthetic oligonucleotide
gcuucacuaaacaucaccg

SEQ ID NO: 2175826 - RNA, 19 nt, Artificial Sequence
  Description of Artificial Sequence: Synthetic oligonucleotide
gagugcagagcgaaaauug

SEQ ID NO: 2175827 - RNA, 19 nt, Artificial Sequence
  Description of Artificial Sequence: Synthetic oligonucleotide
ucauccuuauaggucuugg

SEQ ID NO: 2175828 - RNA, 19 nt, Artificial Sequence
  Description of Artificial Sequence: Synthetic oligonucleotide
cuuagccuggcucugcaag

SEQ ID NO: 2175829 - RNA, 19 nt, Artificial Sequence
  Description of Artificial Sequence: Synthetic oligonucleotide
acggcuuucagguggccgg

SEQ ID NO: 2175830 - RNA, 19 nt, Artificial Sequence
  Description of Artificial Sequence: Synthetic oligonucleotide
ggucaauaaaccuggaguc

SEQ ID NO: 2175831 - RNA, 19 nt, Artificial Sequence
  Description of Artificial Sequence: Synthetic oligonucleotide
uaagggcuuucacagagua

SEQ ID NO: 2175832 - RNA, 19 nt, Artificial Sequence
  Description of Artificial Sequence: Synthetic oligonucleotide
cacagaccaggaaugcugg

SEQ ID NO: 2175833 - RNA, 19 nt, Artificial Sequence
  Description of Artificial Sequence: Synthetic oligonucleotide
aauaaaccuggaguccuca

SEQ ID NO: 2175834 - RNA, 19 nt, Artificial Sequence
  Description of Artificial Sequence: Synthetic oligonucleotide
aaguugagggaaggauccc

SEQ ID NO: 2175835 - RNA, 19 nt, Artificial Sequence
  Description of Artificial Sequence: Synthetic oligonucleotide
ucaauuuguagccccucau

SEQ ID NO: 2175836 - RNA, 19 nt, Artificial Sequence
  Description of Artificial Sequence: Synthetic oligonucleotide
agagcgaaaauugccaaga

SEQ ID NO: 2175837 - RNA, 19 nt, Artificial Sequence
  Description of Artificial Sequence: Synthetic oligonucleotide
aagauaguacugugcugcu

SEQ ID NO: 2175838 - RNA, 19 nt, Artificial Sequence
  Description of Artificial Sequence: Synthetic oligonucleotide
ucaaccucgcuuuccucag

SEQ ID NO: 2175839 - RNA, 19 nt, Artificial Sequence
  Description of Artificial Sequence: Synthetic oligonucleotide
uuuccccuggagauaauuc

SEQ ID NO: 2175840 - RNA, 19 nt, Artificial Sequence
  Description of Artificial Sequence: Synthetic oligonucleotide
uucaaaucagggucugcac

SEQ ID NO: 2175841 - RNA, 19 nt, Artificial Sequence
  Description of Artificial Sequence: Synthetic oligonucleotide
ucugagucccaggagggag

SEQ ID NO: 2175842 - RNA, 19 nt, Artificial Sequence
  Description of Artificial Sequence: Synthetic oligonucleotide
cacuaaacaucaccgugag

SEQ ID NO: 2175843 - RNA, 19 nt, Artificial Sequence
  Description of Artificial Sequence: Synthetic oligonucleotide
aucaauuuguagccccuca

SEQ ID NO: 2175844 - RNA, 19 nt, Artificial Sequence
  Description of Artificial Sequence: Synthetic oligonucleotide
uguuucaguucaagauggc

SEQ ID NO: 2175845 - RNA, 19 nt, Artificial Sequence
  Description of Artificial Sequence: Synthetic oligonucleotide
agaggauccuacacagacc

SEQ ID NO: 2175846 - RNA, 19 nt, Artificial Sequence
  Description of Artificial Sequence: Synthetic oligonucleotide
cauccuuauaggucuuggc

SEQ ID NO: 2175847 - RNA, 19 nt, Artificial Sequence
  Description of Artificial Sequence: Synthetic oligonucleotide
uccauccucuucaacuugu

SEQ ID NO: 2175848 - RNA, 19 nt, Artificial Sequence
  Description of Artificial Sequence: Synthetic oligonucleotide
guauagcucugccuugucc

SEQ ID NO: 2175849 - RNA, 19 nt, Artificial Sequence
  Description of Artificial Sequence: Synthetic oligonucleotide
gucaauaaaccuggagucc

SEQ ID NO: 2175850 - RNA, 19 nt, Artificial Sequence
  Description of Artificial Sequence: Synthetic oligonucleotide
gugauauuucugcucugag

SEQ ID NO: 2175851 - RNA, 19 nt, Artificial Sequence
  Description of Artificial Sequence: Synthetic oligonucleotide
acauggcaccucuuacuac

SEQ ID NO: 2175852 - RNA, 19 nt, Artificial Sequence
  Description of Artificial Sequence: Synthetic oligonucleotide
uucuuauagucuuucucuu

SEQ ID NO: 2175853 - RNA, 19 nt, Artificial Sequence
  Description of Artificial Sequence: Synthetic oligonucleotide
uuacccaccgcuucagaaa

SEQ ID NO: 2175854 - RNA, 19 nt, Artificial Sequence
  Description of Artificial Sequence: Synthetic oligonucleotide
ucucagcuggaccaucgga

SEQ ID NO: 2175855 - RNA, 19 nt, Artificial Sequence
  Description of Artificial Sequence: Synthetic oligonucleotide
caaaguguuucaguucaag

SEQ ID NO: 2175856 - RNA, 19 nt, Artificial Sequence
  Description of Artificial Sequence: Synthetic oligonucleotide
ucggacugugcauacucug

SEQ ID NO: 2175857 - RNA, 19 nt, Artificial Sequence
  Description of Artificial Sequence: Synthetic oligonucleotide
ucccacuuuaccuguguac

SEQ ID NO: 2175858 - RNA, 19 nt, Artificial Sequence
  Description of Artificial Sequence: Synthetic oligonucleotide
ggauccuacacagaccagg

SEQ ID NO: 2175859 - RNA, 19 nt, Artificial Sequence
  Description of Artificial Sequence: Synthetic oligonucleotide
ucauugagugcagagcgaa

SEQ ID NO: 2175860 - RNA, 19 nt, Artificial Sequence
  Description of Artificial Sequence: Synthetic oligonucleotide
uuaccuguguacccuuuuc

SEQ ID NO: 2175861 - RNA, 19 nt, Artificial Sequence
  Description of Artificial Sequence: Synthetic oligonucleotide
ucuuucaaccucgcuuucc

SEQ ID NO: 2175862 - RNA, 19 nt, Artificial Sequence
  Description of Artificial Sequence: Synthetic oligonucleotide
gguauaaaggacagcauuc

SEQ ID NO: 2175863 - RNA, 19 nt, Artificial Sequence
  Description of Artificial Sequence: Synthetic oligonucleotide
auugagugcagagcgaaaa

SEQ ID NO: 2175864 - RNA, 19 nt, Artificial Sequence
  Description of Artificial Sequence: Synthetic oligonucleotide
ucuuuggcaucaauuugua

SEQ ID NO: 2175865 - RNA, 19 nt, Artificial Sequence
  Description of Artificial Sequence: Synthetic oligonucleotide
guauaaaggacagcauuca

SEQ ID NO: 2175866 - RNA, 19 nt, Artificial Sequence
  Description of Artificial Sequence: Synthetic oligonucleotide
uuacccgggugauauuucu

SEQ ID NO: 2175867 - RNA, 19 nt, Artificial Sequence
  Description of Artificial Sequence: Synthetic oligonucleotide
caagucugauguuccuugc

SEQ ID NO: 2175868 - RNA, 19 nt, Artificial Sequence
  Description of Artificial Sequence: Synthetic oligonucleotide
cagagcgaaaauugccaag

SEQ ID NO: 2175869 - RNA, 19 nt, Artificial Sequence
  Description of Artificial Sequence: Synthetic oligonucleotide
cugagcugagcccauccag

SEQ ID NO: 2175870 - RNA, 19 nt, Artificial Sequence
  Description of Artificial Sequence: Synthetic oligonucleotide
ggcaucaauuuguagcccc

SEQ ID NO: 2175871 - RNA, 19 nt, Artificial Sequence
  Description of Artificial Sequence: Synthetic oligonucleotide
aucaccgugagauggucaa

SEQ ID NO: 2175872 - RNA, 19 nt, Artificial Sequence
  Description of Artificial Sequence: Synthetic oligonucleotide
agcgaaaauugccaagaua

SEQ ID NO: 2175873 - RNA, 19 nt, Artificial Sequence
  Description of Artificial Sequence: Synthetic oligonucleotide
aaucagggucugcacacuu

SEQ ID NO: 2175874 - RNA, 19 nt, Artificial Sequence
  Description of Artificial Sequence: Synthetic oligonucleotide
gagggagcuucacuaaaca

SEQ ID NO: 2175875 - RNA, 19 nt, Artificial Sequence
  Description of Artificial Sequence: Synthetic oligonucleotide
uacggcuuucagguggccg

SEQ ID NO: 2175876 - RNA, 19 nt, Artificial Sequence
  Description of Artificial Sequence: Synthetic oligonucleotide
cagcacaucauugagugca

SEQ ID NO: 2175877 - RNA, 19 nt, Artificial Sequence
  Description of Artificial Sequence: Synthetic oligonucleotide
gagaugaagucggacugug

SEQ ID NO: 2175878 - RNA, 19 nt, Artificial Sequence
  Description of Artificial Sequence: Synthetic oligonucleotide
cuucguuaucuagacuuag

SEQ ID NO: 2175879 - RNA, 19 nt, Artificial Sequence
  Description of Artificial Sequence: Synthetic oligonucleotide
gaccaucggaggcugaauc

SEQ ID NO: 2175880 - RNA, 19 nt, Artificial Sequence
  Description of Artificial Sequence: Synthetic oligonucleotide
agaguaccuggggugcugc

SEQ ID NO: 2175881 - RNA, 19 nt, Artificial Sequence
  Description of Artificial Sequence: Synthetic oligonucleotide
ggaaugcugguguaagggc

SEQ ID NO: 2175882 - RNA, 19 nt, Artificial Sequence
  Description of Artificial Sequence: Synthetic oligonucleotide
uuuaccuguguacccuuuu

SEQ ID NO: 2175883 - RNA, 19 nt, Artificial Sequence
  Description of Artificial Sequence: Synthetic oligonucleotide
acuacggcuuucagguggc

SEQ ID NO: 2175884 - RNA, 19 nt, Artificial Sequence
  Description of Artificial Sequence: Synthetic oligonucleotide
cuuuugcccucacuucuag

SEQ ID NO: 2175885 - RNA, 19 nt, Artificial Sequence
  Description of Artificial Sequence: Synthetic oligonucleotide
guagaccuccaaguuaccc

SEQ ID NO: 2175886 - RNA, 19 nt, Artificial Sequence
  Description of Artificial Sequence: Synthetic oligonucleotide
gaagucggacugugcauac

SEQ ID NO: 2175887 - RNA, 19 nt, Artificial Sequence
  Description of Artificial Sequence: Synthetic oligonucleotide
guugagggaaggaucccag

SEQ ID NO: 2175888 - RNA, 19 nt, Artificial Sequence
  Description of Artificial Sequence: Synthetic oligonucleotide
cugaaucuucauccuuacc

SEQ ID NO: 2175889 - RNA, 19 nt, Artificial Sequence
  Description of Artificial Sequence: Synthetic oligonucleotide
ggaguagagccucauucug

SEQ ID NO: 2175890 - RNA, 19 nt, Artificial Sequence
  Description of Artificial Sequence: Synthetic oligonucleotide
agacuuagccuggcucugc

SEQ ID NO: 2175891 - RNA, 19 nt, Artificial Sequence
  Description of Artificial Sequence: Synthetic oligonucleotide
uguguacccuuuuccccug

SEQ ID NO: 2175892 - RNA, 19 nt, Artificial Sequence
  Description of Artificial Sequence: Synthetic oligonucleotide
uuuagcuuccuggcagcca

SEQ ID NO: 2175893 - RNA, 19 nt, Artificial Sequence
  Description of Artificial Sequence: Synthetic oligonucleotide
uccucaugaaaagcagaga

SEQ ID NO: 2175894 - RNA, 19 nt, Artificial Sequence
  Description of Artificial Sequence: Synthetic oligonucleotide
aaaucagggucugcacacu

SEQ ID NO: 2175895 - RNA, 19 nt, Artificial Sequence
  Description of Artificial Sequence: Synthetic oligonucleotide
cugagucccaggagggagc

SEQ ID NO: 2175896 - RNA, 19 nt, Artificial Sequence
  Description of Artificial Sequence: Synthetic oligonucleotide
augaagucggacugugcau

SEQ ID NO: 2175897 - RNA, 19 nt, Artificial Sequence
  Description of Artificial Sequence: Synthetic oligonucleotide
ugcauacucuggguacagg

SEQ ID NO: 2175898 - RNA, 19 nt, Artificial Sequence
  Description of Artificial Sequence: Synthetic oligonucleotide
ucauccuuacccaccgcuu

SEQ ID NO: 2175899 - RNA, 19 nt, Artificial Sequence
  Description of Artificial Sequence: Synthetic oligonucleotide
uacacagaccaggaaugcu

SEQ ID NO: 2175900 - RNA, 19 nt, Artificial Sequence
  Description of Artificial Sequence: Synthetic oligonucleotide
ugcccggguugguauaaag

SEQ ID NO: 2175901 - RNA, 19 nt, Artificial Sequence
  Description of Artificial Sequence: Synthetic oligonucleotide
agggagcuucacuaaacau

SEQ ID NO: 2175902 - RNA, 19 nt, Artificial Sequence
  Description of Artificial Sequence: Synthetic oligonucleotide
ccuuauaggucuuggcuug

SEQ ID NO: 2175903 - RNA, 19 nt, Artificial Sequence
  Description of Artificial Sequence: Synthetic oligonucleotide
uacccgggugauauuucug

SEQ ID NO: 2175904 - RNA, 19 nt, Artificial Sequence
  Description of Artificial Sequence: Synthetic oligonucleotide
ugcacacuucuucuuuaau

SEQ ID NO: 2175905 - RNA, 19 nt, Artificial Sequence
  Description of Artificial Sequence: Synthetic oligonucleotide
cauccuuacccaccgcuuc

SEQ ID NO: 2175906 - RNA, 19 nt, Artificial Sequence
  Description of Artificial Sequence: Synthetic oligonucleotide
caaggguucucugagcuga

SEQ ID NO: 2175907 - RNA, 19 nt, Artificial Sequence
  Description of Artificial Sequence: Synthetic oligonucleotide
cuucaguuguaggaaacca

SEQ ID NO: 2175908 - RNA, 19 nt, Artificial Sequence
  Description of Artificial Sequence: Synthetic oligonucleotide
cuagacuuagccuggcucu

SEQ ID NO: 2175909 - RNA, 19 nt, Artificial Sequence
  Description of Artificial Sequence: Synthetic oligonucleotide
uguuccuugccuggauggc

SEQ ID NO: 2175910 - RNA, 19 nt, Artificial Sequence
  Description of Artificial Sequence: Synthetic oligonucleotide
uacugugcugcugcccggg

SEQ ID NO: 2175911 - RNA, 19 nt, Artificial Sequence
  Description of Artificial Sequence: Synthetic oligonucleotide
uuacuacggcuuucaggug

SEQ ID NO: 2175912 - RNA, 19 nt, Artificial Sequence
  Description of Artificial Sequence: Synthetic oligonucleotide
gggagcuucacuaaacauc

SEQ ID NO: 2175913 - RNA, 19 nt, Artificial Sequence
  Description of Artificial Sequence: Synthetic oligonucleotide
gaguagagccucauucuga

SEQ ID NO: 2175914 - RNA, 19 nt, Artificial Sequence
  Description of Artificial Sequence: Synthetic oligonucleotide
cugguauagcucugccuug

SEQ ID NO: 2175915 - RNA, 19 nt, Artificial Sequence
  Description of Artificial Sequence: Synthetic oligonucleotide
ugguauagcucugccuugu

SEQ ID NO: 2175916 - RNA, 19 nt, Artificial Sequence
  Description of Artificial Sequence: Synthetic oligonucleotide
cuuacccaccgcuucagaa

SEQ ID NO: 2175917 - RNA, 19 nt, Artificial Sequence
  Description of Artificial Sequence: Synthetic oligonucleotide
uaucuagacuuagccuggc

SEQ ID NO: 2175918 - RNA, 19 nt, Artificial Sequence
  Description of Artificial Sequence: Synthetic oligonucleotide
acaucaccgugagaugguc

SEQ ID NO: 2175919 - RNA, 19 nt, Artificial Sequence
  Description of Artificial Sequence: Synthetic oligonucleotide
cuccaaguuacccggguga

SEQ ID NO: 2175920 - RNA, 19 nt, Artificial Sequence
  Description of Artificial Sequence: Synthetic oligonucleotide
uagacuuagccuggcucug

SEQ ID NO: 2175921 - RNA, 19 nt, Artificial Sequence
  Description of Artificial Sequence: Synthetic oligonucleotide
cuuauaggucuuggcuugc

SEQ ID NO: 2175922 - RNA, 19 nt, Artificial Sequence
  Description of Artificial Sequence: Synthetic oligonucleotide
ccuguguacccuuuucccc

SEQ ID NO: 2175923 - RNA, 19 nt, Artificial Sequence
  Description of Artificial Sequence: Synthetic oligonucleotide
acuaaacaucaccgugaga

SEQ ID NO: 2175924 - RNA, 19 nt, Artificial Sequence
  Description of Artificial Sequence: Synthetic oligonucleotide
auaaaccuggaguccucau

SEQ ID NO: 2175925 - RNA, 19 nt, Artificial Sequence
  Description of Artificial Sequence: Synthetic oligonucleotide
aguuacccgggugauauuu

SEQ ID NO: 2175926 - RNA, 19 nt, Artificial Sequence
  Description of Artificial Sequence: Synthetic oligonucleotide
caccgcuucagaaacaagu

SEQ ID NO: 2175927 - RNA, 19 nt, Artificial Sequence
  Description of Artificial Sequence: Synthetic oligonucleotide
cauacucuggguacaggaa

SEQ ID NO: 2175928 - RNA, 19 nt, Artificial Sequence
  Description of Artificial Sequence: Synthetic oligonucleotide
auccuucaguuguaggaaa

SEQ ID NO: 2175929 - RNA, 19 nt, Artificial Sequence
  Description of Artificial Sequence: Synthetic oligonucleotide
ggaguccucaugaaaagca

SEQ ID NO: 2175930 - RNA, 19 nt, Artificial Sequence
  Description of Artificial Sequence: Synthetic oligonucleotide
gauggcacauggcaccucu

SEQ ID NO: 2175931 - RNA, 19 nt, Artificial Sequence
  Description of Artificial Sequence: Synthetic oligonucleotide
aucuagacuuagccuggcu

SEQ ID NO: 2175932 - RNA, 19 nt, Artificial Sequence
  Description of Artificial Sequence: Synthetic oligonucleotide
guuccuugccuggauggcc

SEQ ID NO: 2175933 - RNA, 19 nt, Artificial Sequence
  Description of Artificial Sequence: Synthetic oligonucleotide
caucggaggcugaaucuuc

SEQ ID NO: 2175934 - RNA, 19 nt, Artificial Sequence
  Description of Artificial Sequence: Synthetic oligonucleotide
agguggccgggcuuuagcu

SEQ ID NO: 2175935 - RNA, 19 nt, Artificial Sequence
  Description of Artificial Sequence: Synthetic oligonucleotide
cccacuuuaccuguguacc

SEQ ID NO: 2175936 - RNA, 19 nt, Artificial Sequence
  Description of Artificial Sequence: Synthetic oligonucleotide
uuuuccccuggagauaauu

SEQ ID NO: 2175937 - RNA, 19 nt, Artificial Sequence
  Description of Artificial Sequence: Synthetic oligonucleotide
uggcaccucuuacuacggc

SEQ ID NO: 2175938 - RNA, 19 nt, Artificial Sequence
  Description of Artificial Sequence: Synthetic oligonucleotide
uuauaggucuuggcuugcu

SEQ ID NO: 2175939 - RNA, 19 nt, Artificial Sequence
  Description of Artificial Sequence: Synthetic oligonucleotide
agauaguacugugcugcug

SEQ ID NO: 2175940 - RNA, 19 nt, Artificial Sequence
  Description of Artificial Sequence: Synthetic oligonucleotide
uaguacugugcugcugccc

SEQ ID NO: 2175941 - RNA, 19 nt, Artificial Sequence
  Description of Artificial Sequence: Synthetic oligonucleotide
cauucaaaucagggucugc

SEQ ID NO: 2175942 - RNA, 19 nt, Artificial Sequence
  Description of Artificial Sequence: Synthetic oligonucleotide
guucaagauggcacauggc

SEQ ID NO: 2175943 - RNA, 19 nt, Artificial Sequence
  Description of Artificial Sequence: Synthetic oligonucleotide
cugcaaggguucucugagc

SEQ ID NO: 2175944 - RNA, 19 nt, Artificial Sequence
  Description of Artificial Sequence: Synthetic oligonucleotide
cuugucugcuuuugcccuc

SEQ ID NO: 2175945 - RNA, 19 nt, Artificial Sequence
  Description of Artificial Sequence: Synthetic oligonucleotide
uggcaucaauuuguagccc

SEQ ID NO: 2175946 - RNA, 19 nt, Artificial Sequence
  Description of Artificial Sequence: Synthetic oligonucleotide
accgugagauggucaauaa

SEQ ID NO: 2175947 - RNA, 19 nt, Artificial Sequence
  Description of Artificial Sequence: Synthetic oligonucleotide
accucuuacuacggcuuuc

SEQ ID NO: 2175948 - RNA, 19 nt, Artificial Sequence
  Description of Artificial Sequence: Synthetic oligonucleotide
gacuuagccuggcucugca

SEQ ID NO: 2175949 - RNA, 19 nt, Artificial Sequence
  Description of Artificial Sequence: Synthetic oligonucleotide
uccuuacccaccgcuucag

SEQ ID NO: 2175950 - RNA, 19 nt, Artificial Sequence
  Description of Artificial Sequence: Synthetic oligonucleotide
cucuuacuacggcuuucag

SEQ ID NO: 2175951 - RNA, 19 nt, Artificial Sequence
  Description of Artificial Sequence: Synthetic oligonucleotide
ugccuucguuaucuagacu

SEQ ID NO: 2175952 - RNA, 19 nt, Artificial Sequence
  Description of Artificial Sequence: Synthetic oligonucleotide
accuccaaguuacccgggu

SEQ ID NO: 2175953 - RNA, 19 nt, Artificial Sequence
  Description of Artificial Sequence: Synthetic oligonucleotide
cuuuaauccuucaguugua

SEQ ID NO: 2175954 - RNA, 19 nt, Artificial Sequence
  Description of Artificial Sequence: Synthetic oligonucleotide
agcucagucugccuucguu

SEQ ID NO: 2175955 - RNA, 19 nt, Artificial Sequence
  Description of Artificial Sequence: Synthetic oligonucleotide
gccaagauaguacugugcu

SEQ ID NO: 2175956 - RNA, 19 nt, Artificial Sequence
  Description of Artificial Sequence: Synthetic oligonucleotide
acuuuaccuguguacccuu

SEQ ID NO: 2175957 - RNA, 19 nt, Artificial Sequence
  Description of Artificial Sequence: Synthetic oligonucleotide
caccugguauagcucugcc

SEQ ID NO: 2175958 - RNA, 19 nt, Artificial Sequence
  Description of Artificial Sequence: Synthetic oligonucleotide
caccaguucacagccucag

SEQ ID NO: 2175959 - RNA, 19 nt, Artificial Sequence
  Description of Artificial Sequence: Synthetic oligonucleotide
cuucacuaaacaucaccgu

SEQ ID NO: 2175960 - RNA, 19 nt, Artificial Sequence
  Description of Artificial Sequence: Synthetic oligonucleotide
ggugauauuucugcucuga

SEQ ID NO: 2175961 - RNA, 19 nt, Artificial Sequence
  Description of Artificial Sequence: Synthetic oligonucleotide
uccaaguuacccgggugau

SEQ ID NO: 2175962 - RNA, 19 nt, Artificial Sequence
  Description of Artificial Sequence: Synthetic oligonucleotide
ggguugguauaaaggacag

SEQ ID NO: 2175963 - RNA, 19 nt, Artificial Sequence
  Description of Artificial Sequence: Synthetic oligonucleotide
auggcaccucuuacuacgg

SEQ ID NO: 2175964 - RNA, 19 nt, Artificial Sequence
  Description of Artificial Sequence: Synthetic oligonucleotide
cacauggcaccucuuacua

SEQ ID NO: 2175965 - RNA, 19 nt, Artificial Sequence
  Description of Artificial Sequence: Synthetic oligonucleotide
uuucagguggccgggcuuu

SEQ ID NO: 2175966 - RNA, 19 nt, Artificial Sequence
  Description of Artificial Sequence: Synthetic oligonucleotide
cuucauccuuacccaccgc

SEQ ID NO: 2175967 - RNA, 19 nt, Artificial Sequence
  Description of Artificial Sequence: Synthetic oligonucleotide
ccacuuuaccuguguaccc

SEQ ID NO: 2175968 - RNA, 19 nt, Artificial Sequence
  Description of Artificial Sequence: Synthetic oligonucleotide
gacaccugguauagcucug

SEQ ID NO: 2175969 - RNA, 19 nt, Artificial Sequence
  Description of Artificial Sequence: Synthetic oligonucleotide
uggcucccacuuuaccugu

SEQ ID NO: 2175970 - RNA, 19 nt, Artificial Sequence
  Description of Artificial Sequence: Synthetic oligonucleotide
aucauugagugcagagcga

SEQ ID NO: 2175971 - RNA, 19 nt, Artificial Sequence
  Description of Artificial Sequence: Synthetic oligonucleotide
cuguguacccuuuuccccu

SEQ ID NO: 2175972 - RNA, 19 nt, Artificial Sequence
  Description of Artificial Sequence: Synthetic oligonucleotide
caguucacagccucagcaa

SEQ ID NO: 2175973 - RNA, 19 nt, Artificial Sequence
  Description of Artificial Sequence: Synthetic oligonucleotide
ccaagauaguacugugcug

SEQ ID NO: 2175974 - RNA, 19 nt, Artificial Sequence
  Description of Artificial Sequence: Synthetic oligonucleotide
aagucggacugugcauacu

SEQ ID NO: 2175975 - RNA, 19 nt, Artificial Sequence
  Description of Artificial Sequence: Synthetic oligonucleotide
uggaccaucggaggcugaa

SEQ ID NO: 2175976 - RNA, 19 nt, Artificial Sequence
  Description of Artificial Sequence: Synthetic oligonucleotide
cccggguugguauaaagga

SEQ ID NO: 2175977 - RNA, 19 nt, Artificial Sequence
  Description of Artificial Sequence: Synthetic oligonucleotide
ccaguucacagccucagca

SEQ ID NO: 2175978 - RNA, 19 nt, Artificial Sequence
  Description of Artificial Sequence: Synthetic oligonucleotide
caaccucgcuuuccucagg

SEQ ID NO: 2175979 - RNA, 19 nt, Artificial Sequence
  Description of Artificial Sequence: Synthetic oligonucleotide
gagcccauccaggaagauc

SEQ ID NO: 2175980 - RNA, 19 nt, Artificial Sequence
  Description of Artificial Sequence: Synthetic oligonucleotide
ccuucaguuguaggaaacc

SEQ ID NO: 2175981 - RNA, 19 nt, Artificial Sequence
  Description of Artificial Sequence: Synthetic oligonucleotide
gccuucguuaucuagacuu

SEQ ID NO: 2175982 - RNA, 19 nt, Artificial Sequence
  Description of Artificial Sequence: Synthetic oligonucleotide
aggcugaaucuucauccuu

SEQ ID NO: 2175983 - RNA, 19 nt, Artificial Sequence
  Description of Artificial Sequence: Synthetic oligonucleotide
guguacccuuuuccccugg

SEQ ID NO: 2175984 - RNA, 19 nt, Artificial Sequence
  Description of Artificial Sequence: Synthetic oligonucleotide
gacugugcauacucugggu

SEQ ID NO: 2175985 - RNA, 19 nt, Artificial Sequence
  Description of Artificial Sequence: Synthetic oligonucleotide
gaccuccaaguuacccggg

SEQ ID NO: 2175986 - RNA, 19 nt, Artificial Sequence
  Description of Artificial Sequence: Synthetic oligonucleotide
gcccggguugguauaaagg

SEQ ID NO: 2175987 - RNA, 19 nt, Artificial Sequence
  Description of Artificial Sequence: Synthetic oligonucleotide
uggccgggcuuuagcuucc

SEQ ID NO: 2175988 - RNA, 19 nt, Artificial Sequence
  Description of Artificial Sequence: Synthetic oligonucleotide
cuuuccucaggaucccucu

SEQ ID NO: 2175989 - RNA, 19 nt, Artificial Sequence
  Description of Artificial Sequence: Synthetic oligonucleotide
ucggaggcugaaucuucau

SEQ ID NO: 2175990 - RNA, 19 nt, Artificial Sequence
  Description of Artificial Sequence: Synthetic oligonucleotide
ggacagcauucaaaucagg

SEQ ID NO: 2175991 - RNA, 19 nt, Artificial Sequence
  Description of Artificial Sequence: Synthetic oligonucleotide
ucgcuuuccucaggauccc

SEQ ID NO: 2175992 - RNA, 19 nt, Artificial Sequence
  Description of Artificial Sequence: Synthetic oligonucleotide
guuacccgggugauauuuc

SEQ ID NO: 2175993 - RNA, 19 nt, Artificial Sequence
  Description of Artificial Sequence: Synthetic oligonucleotide
ccucaugaaaagcagagau

SEQ ID NO: 2175994 - RNA, 19 nt, Artificial Sequence
  Description of Artificial Sequence: Synthetic oligonucleotide
accaggaaugcugguguaa

SEQ ID NO: 2175995 - RNA, 19 nt, Artificial Sequence
  Description of Artificial Sequence: Synthetic oligonucleotide
ggacaccugguauagcucu

SEQ ID NO: 2175996 - RNA, 19 nt, Artificial Sequence
  Description of Artificial Sequence: Synthetic oligonucleotide
ccucgcuuuccucaggauc

SEQ ID NO: 2175997 - RNA, 19 nt, Artificial Sequence
  Description of Artificial Sequence: Synthetic oligonucleotide
agauggcacauggcaccuc

SEQ ID NO: 2175998 - RNA, 19 nt, Artificial Sequence
  Description of Artificial Sequence: Synthetic oligonucleotide
cgggcuuuagcuuccuggc

SEQ ID NO: 2175999 - RNA, 19 nt, Artificial Sequence
  Description of Artificial Sequence: Synthetic oligonucleotide
cuuccauccucuucaacuu

SEQ ID NO: 2176000 - RNA, 19 nt, Artificial Sequence
  Description of Artificial Sequence: Synthetic oligonucleotide
ggaucccagggucuggcuc

SEQ ID NO: 2176001 - RNA, 19 nt, Artificial Sequence
  Description of Artificial Sequence: Synthetic oligonucleotide
gcagagcgaaaauugccaa

SEQ ID NO: 2176002 - RNA, 19 nt, Artificial Sequence
  Description of Artificial Sequence: Synthetic oligonucleotide
cauugagugcagagcgaaa

SEQ ID NO: 2176003 - RNA, 19 nt, Artificial Sequence
  Description of Artificial Sequence: Synthetic oligonucleotide
gcaaggguucucugagcug

SEQ ID NO: 2176004 - RNA, 19 nt, Artificial Sequence
  Description of Artificial Sequence: Synthetic oligonucleotide
cugcacacuucuucuuuaa

SEQ ID NO: 2176005 - RNA, 19 nt, Artificial Sequence
  Description of Artificial Sequence: Synthetic oligonucleotide
gagcgaaaauugccaagau

SEQ ID NO: 2176006 - RNA, 19 nt, Artificial Sequence
  Description of Artificial Sequence: Synthetic oligonucleotide
cuggauggccuggaguaga

SEQ ID NO: 2176007 - RNA, 19 nt, Artificial Sequence
  Description of Artificial Sequence: Synthetic oligonucleotide
ggcaccucuuacuacggcu

SEQ ID NO: 2176008 - RNA, 19 nt, Artificial Sequence
  Description of Artificial Sequence: Synthetic oligonucleotide
caggagggagcuucacuaa

SEQ ID NO: 2176009 - RNA, 19 nt, Artificial Sequence
  Description of Artificial Sequence: Synthetic oligonucleotide
gggugauauuucugcucug

SEQ ID NO: 2176010 - RNA, 19 nt, Artificial Sequence
  Description of Artificial Sequence: Synthetic oligonucleotide
ccaggagggagcuucacua

SEQ ID NO: 2176011 - RNA, 19 nt, Artificial Sequence
  Description of Artificial Sequence: Synthetic oligonucleotide
aggauccuacacagaccag

SEQ ID NO: 2176012 - RNA, 19 nt, Artificial Sequence
  Description of Artificial Sequence: Synthetic oligonucleotide
ccgggugauauuucugcuc

SEQ ID NO: 2176013 - RNA, 19 nt, Artificial Sequence
  Description of Artificial Sequence: Synthetic oligonucleotide
gguauagcucugccuuguc

SEQ ID NO: 2176014 - RNA, 19 nt, Artificial Sequence
  Description of Artificial Sequence: Synthetic oligonucleotide
ccagcacaucauugagugc

SEQ ID NO: 2176015 - RNA, 19 nt, Artificial Sequence
  Description of Artificial Sequence: Synthetic oligonucleotide
cuagaagcuucuucucuuu

SEQ ID NO: 2176016 - RNA, 19 nt, Artificial Sequence
  Description of Artificial Sequence: Synthetic oligonucleotide
cacuuuaccuguguacccu

SEQ ID NO: 2176017 - RNA, 19 nt, Artificial Sequence
  Description of Artificial Sequence: Synthetic oligonucleotide
ccuccaaguuacccgggug

SEQ ID NO: 2176018 - RNA, 19 nt, Artificial Sequence
  Description of Artificial Sequence: Synthetic oligonucleotide
caccgugagauggucaaua

SEQ ID NO: 2176019 - RNA, 19 nt, Artificial Sequence
  Description of Artificial Sequence: Synthetic oligonucleotide
ccugguauagcucugccuu

SEQ ID NO: 2176020 - RNA, 19 nt, Artificial Sequence
  Description of Artificial Sequence: Synthetic oligonucleotide
ugcugcccggguugguaua

SEQ ID NO: 2176021 - RNA, 19 nt, Artificial Sequence
  Description of Artificial Sequence: Synthetic oligonucleotide
gcacauggcaccucuuacu

SEQ ID NO: 2176022 - RNA, 19 nt, Artificial Sequence
  Description of Artificial Sequence: Synthetic oligonucleotide
agucugccuucguuaucua

SEQ ID NO: 2176023 - RNA, 19 nt, Artificial Sequence
  Description of Artificial Sequence: Synthetic oligonucleotide
gggucuggcucccacuuua

SEQ ID NO: 2176024 - RNA, 19 nt, Artificial Sequence
  Description of Artificial Sequence: Synthetic oligonucleotide
guagagccucauucugacu

SEQ ID NO: 2176025 - RNA, 19 nt, Artificial Sequence
  Description of Artificial Sequence: Synthetic oligonucleotide
agccucauucugacucugu

SEQ ID NO: 2176026 - RNA, 19 nt, Artificial Sequence
  Description of Artificial Sequence: Synthetic oligonucleotide
cuacggcuuucagguggcc

SEQ ID NO: 2176027 - RNA, 19 nt, Artificial Sequence
  Description of Artificial Sequence: Synthetic oligonucleotide
cguuaucuagacuuagccu

SEQ ID NO: 2176028 - RNA, 19 nt, Artificial Sequence
  Description of Artificial Sequence: Synthetic oligonucleotide
gcucugcaaggguucucug

SEQ ID NO: 2176029 - RNA, 19 nt, Artificial Sequence
  Description of Artificial Sequence: Synthetic oligonucleotide
cauucugacucuguuccuu

SEQ ID NO: 2176030 - RNA, 19 nt, Artificial Sequence
  Description of Artificial Sequence: Synthetic oligonucleotide
ggauggccuggaguagagc

SEQ ID NO: 2176031 - RNA, 19 nt, Artificial Sequence
  Description of Artificial Sequence: Synthetic oligonucleotide
ccuucguuaucuagacuua

SEQ ID NO: 2176032 - RNA, 19 nt, Artificial Sequence
  Description of Artificial Sequence: Synthetic oligonucleotide
ccaccgcuucagaaacaag

SEQ ID NO: 2176033 - RNA, 19 nt, Artificial Sequence
  Description of Artificial Sequence: Synthetic oligonucleotide
ggagaggauccuacacaga

SEQ ID NO: 2176034 - RNA, 19 nt, Artificial Sequence
  Description of Artificial Sequence: Synthetic oligonucleotide
cuuuaccuguguacccuuu

SEQ ID NO: 2176035 - RNA, 19 nt, Artificial Sequence
  Description of Artificial Sequence: Synthetic oligonucleotide
gucggacugugcauacucu

SEQ ID NO: 2176036 - RNA, 19 nt, Artificial Sequence
  Description of Artificial Sequence: Synthetic oligonucleotide
uucagguggccgggcuuua

SEQ ID NO: 2176037 - RNA, 19 nt, Artificial Sequence
  Description of Artificial Sequence: Synthetic oligonucleotide
cagaaacaagucugauguu

SEQ ID NO: 2176038 - RNA, 19 nt, Artificial Sequence
  Description of Artificial Sequence: Synthetic oligonucleotide
ggucuggcucccacuuuac

SEQ ID NO: 2176039 - RNA, 19 nt, Artificial Sequence
  Description of Artificial Sequence: Synthetic oligonucleotide
cuggggugcugcagcaccu

SEQ ID NO: 2176040 - RNA, 19 nt, Artificial Sequence
  Description of Artificial Sequence: Synthetic oligonucleotide
cgggugauauuucugcucu

SEQ ID NO: 2176041 - RNA, 19 nt, Artificial Sequence
  Description of Artificial Sequence: Synthetic oligonucleotide
ccgugagauggucaauaaa

SEQ ID NO: 2176042 - RNA, 19 nt, Artificial Sequence
  Description of Artificial Sequence: Synthetic oligonucleotide
gcacaucauugagugcaga

SEQ ID NO: 2176043 - RNA, 19 nt, Artificial Sequence
  Description of Artificial Sequence: Synthetic oligonucleotide
cuggaccaucggaggcuga

SEQ ID NO: 2176044 - RNA, 19 nt, Artificial Sequence
  Description of Artificial Sequence: Synthetic oligonucleotide
gcuuuugcccucacuucua

SEQ ID NO: 2176045 - RNA, 19 nt, Artificial Sequence
  Description of Artificial Sequence: Synthetic oligonucleotide
gggaaggaucccagggucu

SEQ ID NO: 2176046 - RNA, 19 nt, Artificial Sequence
  Description of Artificial Sequence: Synthetic oligonucleotide
cccaccgcuucagaaacaa

SEQ ID NO: 2176047 - RNA, 19 nt, Artificial Sequence
  Description of Artificial Sequence: Synthetic oligonucleotide
cugcugcccggguugguau

SEQ ID NO: 2176048 - RNA, 19 nt, Artificial Sequence
  Description of Artificial Sequence: Synthetic oligonucleotide
auggcacauggcaccucuu

SEQ ID NO: 2176049 - RNA, 19 nt, Artificial Sequence
  Description of Artificial Sequence: Synthetic oligonucleotide
gccgggcuuuagcuuccug

SEQ ID NO: 2176050 - RNA, 19 nt, Artificial Sequence
  Description of Artificial Sequence: Synthetic oligonucleotide
gguggccgggcuuuagcuu

SEQ ID NO: 2176051 - RNA, 19 nt, Artificial Sequence
  Description of Artificial Sequence: Synthetic oligonucleotide
ccuuacccaccgcuucaga

SEQ ID NO: 2176052 - RNA, 19 nt, Artificial Sequence
  Description of Artificial Sequence: Synthetic oligonucleotide
gcaccucuuacuacggcuu

SEQ ID NO: 2176053 - RNA, 19 nt, Artificial Sequence
  Description of Artificial Sequence: Synthetic oligonucleotide
gcugcugcccggguuggua

SEQ ID NO: 2176054 - RNA, 19 nt, Artificial Sequence
  Description of Artificial Sequence: Synthetic oligonucleotide
gcugcccggguugguauaa

SEQ ID NO: 2176055 - RNA, 19 nt, Artificial Sequence
  Description of Artificial Sequence: Synthetic oligonucleotide
cuuuuccccuggagauaau

SEQ ID NO: 2176056 - RNA, 19 nt, Artificial Sequence
  Description of Artificial Sequence: Synthetic oligonucleotide
cccaggagggagcuucacu

SEQ ID NO: 2176057 - RNA, 19 nt, Artificial Sequence
  Description of Artificial Sequence: Synthetic oligonucleotide
cugcccggguugguauaaa

SEQ ID NO: 2176058 - RNA, 19 nt, Artificial Sequence
  Description of Artificial Sequence: Synthetic oligonucleotide
ccaaguuacccgggugaua

SEQ ID NO: 2176059 - RNA, 19 nt, Artificial Sequence
  Description of Artificial Sequence: Synthetic oligonucleotide
ccuggaguagagccucauu

SEQ ID NO: 2176060 - RNA, 19 nt, Artificial Sequence
  Description of Artificial Sequence: Synthetic oligonucleotide
gccuggaguagagccucau

SEQ ID NO: 2176061 - RNA, 19 nt, Artificial Sequence
  Description of Artificial Sequence: Synthetic oligonucleotide
cccucacuucuagaagcuu

SEQ ID NO: 2176062 - RNA, 19 nt, Artificial Sequence
  Description of Artificial Sequence: Synthetic oligonucleotide
gccccucaucacaccaguu

SEQ ID NO: 2176063 - RNA, 19 nt, Artificial Sequence
  Description of Artificial Sequence: Synthetic oligonucleotide
ggccgggcuuuagcuuccu

SEQ ID NO: 2176064 - RNA, 19 nt, Artificial Sequence
  Description of Artificial Sequence: Synthetic oligonucleotide
aacaguaucucucucauac

SEQ ID NO: 2176065 - RNA, 19 nt, Artificial Sequence
  Description of Artificial Sequence: Synthetic oligonucleotide
aaguucuucugcuagacgc

SEQ ID NO: 2176066 - RNA, 19 nt, Artificial Sequence
  Description of Artificial Sequence: Synthetic oligonucleotide
aaauaauucugucuguuuc

SEQ ID NO: 2176067 - RNA, 19 nt, Artificial Sequence
  Description of Artificial Sequence: Synthetic oligonucleotide
aauaacaucugauaaguca

SEQ ID NO: 2176068 - RNA, 19 nt, Artificial Sequence
  Description of Artificial Sequence: Synthetic oligonucleotide
uaagcaauaaaucagucac

SEQ ID NO: 2176069 - RNA, 19 nt, Artificial Sequence
  Description of Artificial Sequence: Synthetic oligonucleotide
aaaaguugucaucuaacac

SEQ ID NO: 2176070 - RNA, 19 nt, Artificial Sequence
  Description of Artificial Sequence: Synthetic oligonucleotide
aaaaucuucccacacagcu

SEQ ID NO: 2176071 - RNA, 19 nt, Artificial Sequence
  Description of Artificial Sequence: Synthetic oligonucleotide
caauaaaucagucaccucc

SEQ ID NO: 2176072 - RNA, 19 nt, Artificial Sequence
  Description of Artificial Sequence: Synthetic oligonucleotide
gaacaaauaauucugucug

SEQ ID NO: 2176073 - RNA, 19 nt, Artificial Sequence
  Description of Artificial Sequence: Synthetic oligonucleotide
guuauuaagagguaucugc

SEQ ID NO: 2176074 - RNA, 19 nt, Artificial Sequence
  Description of Artificial Sequence: Synthetic oligonucleotide
aagaaauaacaucugauaa

SEQ ID NO: 2176075 - RNA, 19 nt, Artificial Sequence
  Description of Artificial Sequence: Synthetic oligonucleotide
auagauauuuucuguuucc

SEQ ID NO: 2176076 - RNA, 19 nt, Artificial Sequence
  Description of Artificial Sequence: Synthetic oligonucleotide
uccucaacacauuuuaugg

SEQ ID NO: 2176077 - RNA, 19 nt, Artificial Sequence
  Description of Artificial Sequence: Synthetic oligonucleotide
uuuuccauugggauggccg

SEQ ID NO: 2176078 - RNA, 19 nt, Artificial Sequence
  Description of Artificial Sequence: Synthetic oligonucleotide
aagcccagggaauauuucc

SEQ ID NO: 2176079 - RNA, 19 nt, Artificial Sequence
  Description of Artificial Sequence: Synthetic oligonucleotide
auauuuccgagccaguugg

SEQ ID NO: 2176080 - RNA, 19 nt, Artificial Sequence
  Description of Artificial Sequence: Synthetic oligonucleotide
ugaaucaugaggcuguugu

SEQ ID NO: 2176081 - RNA, 19 nt, Artificial Sequence
  Description of Artificial Sequence: Synthetic oligonucleotide
uaugggauuuuccaaagca

SEQ ID NO: 2176082 - RNA, 19 nt, Artificial Sequence
  Description of Artificial Sequence: Synthetic oligonucleotide
uguuaaguucuucugcuag

SEQ ID NO: 2176083 - RNA, 19 nt, Artificial Sequence
  Description of Artificial Sequence: Synthetic oligonucleotide
uguauuguccucaacacau

SEQ ID NO: 2176084 - RNA, 19 nt, Artificial Sequence
  Description of Artificial Sequence: Synthetic oligonucleotide
aaacauagauauuuucugu

SEQ ID NO: 2176085 - RNA, 19 nt, Artificial Sequence
  Description of Artificial Sequence: Synthetic oligonucleotide
ucugcuuugagccuguuaa

SEQ ID NO: 2176086 - RNA, 19 nt, Artificial Sequence
  Description of Artificial Sequence: Synthetic oligonucleotide
uuuagucaaguuuauaaaa

SEQ ID NO: 2176087 - RNA, 19 nt, Artificial Sequence
  Description of Artificial Sequence: Synthetic oligonucleotide
aauauuuccgagccaguug

SEQ ID NO: 2176088 - RNA, 19 nt, Artificial Sequence
  Description of Artificial Sequence: Synthetic oligonucleotide
uucauggucugagagaugg

SEQ ID NO: 2176089 - RNA, 19 nt, Artificial Sequence
  Description of Artificial Sequence: Synthetic oligonucleotide
agcaguaagcaauaaauca

SEQ ID NO: 2176090 - RNA, 19 nt, Artificial Sequence
  Description of Artificial Sequence: Synthetic oligonucleotide
aagaagaaauaacaucuga

SEQ ID NO: 2176091 - RNA, 19 nt, Artificial Sequence
  Description of Artificial Sequence: Synthetic oligonucleotide
uaaaaguugucaucuaaca

SEQ ID NO: 2176092 - RNA, 19 nt, Artificial Sequence
  Description of Artificial Sequence: Synthetic oligonucleotide
uuauggaggauguuaguag

SEQ ID NO: 2176093 - RNA, 19 nt, Artificial Sequence
  Description of Artificial Sequence: Synthetic oligonucleotide
uuauuaagagguaucugcu

SEQ ID NO: 2176094 - RNA, 19 nt, Artificial Sequence
  Description of Artificial Sequence: Synthetic oligonucleotide
aguuuauaaaaucuuccca

SEQ ID NO: 2176095 - RNA, 19 nt, Artificial Sequence
  Description of Artificial Sequence: Synthetic oligonucleotide
uuagucaaguuuauaaaau

SEQ ID NO: 2176096 - RNA, 19 nt, Artificial Sequence
  Description of Artificial Sequence: Synthetic oligonucleotide
uugguaauaaaaguuguca

SEQ ID NO: 2176097 - RNA, 19 nt, Artificial Sequence
  Description of Artificial Sequence: Synthetic oligonucleotide
auuaagagguaucugcuca

SEQ ID NO: 2176098 - RNA, 19 nt, Artificial Sequence
  Description of Artificial Sequence: Synthetic oligonucleotide
uguuaguagaacaaauaau

SEQ ID NO: 2176099 - RNA, 19 nt, Artificial Sequence
  Description of Artificial Sequence: Synthetic oligonucleotide
agugguuuguuguaaaaca

SEQ ID NO: 2176100 - RNA, 19 nt, Artificial Sequence
  Description of Artificial Sequence: Synthetic oligonucleotide
uuuuagucaaguuuauaaa

SEQ ID NO: 2176101 - RNA, 19 nt, Artificial Sequence
  Description of Artificial Sequence: Synthetic oligonucleotide
cucuccaugagguggaugg

SEQ ID NO: 2176102 - RNA, 19 nt, Artificial Sequence
  Description of Artificial Sequence: Synthetic oligonucleotide
auaaaaguugucaucuaac

SEQ ID NO: 2176103 - RNA, 19 nt, Artificial Sequence
  Description of Artificial Sequence: Synthetic oligonucleotide
acagcuucagugcuguugg

SEQ ID NO: 2176104 - RNA, 19 nt, Artificial Sequence
  Description of Artificial Sequence: Synthetic oligonucleotide
auaacaucugauaagucag

SEQ ID NO: 2176105 - RNA, 19 nt, Artificial Sequence
  Description of Artificial Sequence: Synthetic oligonucleotide
aaggucuagaaacaacagu

SEQ ID NO: 2176106 - RNA, 19 nt, Artificial Sequence
  Description of Artificial Sequence: Synthetic oligonucleotide
aacauagauauuuucuguu

SEQ ID NO: 2176107 - RNA, 19 nt, Artificial Sequence
  Description of Artificial Sequence: Synthetic oligonucleotide
uucauaucucauacuuugg

SEQ ID NO: 2176108 - RNA, 19 nt, Artificial Sequence
  Description of Artificial Sequence: Synthetic oligonucleotide
ucauaucucauacuuuggu

SEQ ID NO: 2176109 - RNA, 19 nt, Artificial Sequence
  Description of Artificial Sequence: Synthetic oligonucleotide
auacuuugguaauaaaagu

SEQ ID NO: 2176110 - RNA, 19 nt, Artificial Sequence
  Description of Artificial Sequence: Synthetic oligonucleotide
cucauacacacaaaagaag

SEQ ID NO: 2176111 - RNA, 19 nt, Artificial Sequence
  Description of Artificial Sequence: Synthetic oligonucleotide
gaagaaauaacaucugaua

SEQ ID NO: 2176112 - RNA, 19 nt, Artificial Sequence
  Description of Artificial Sequence: Synthetic oligonucleotide
ucugcuagacgcuucaagu

SEQ ID NO: 2176113 - RNA, 19 nt, Artificial Sequence
  Description of Artificial Sequence: Synthetic oligonucleotide
auaucucauacuuugguaa

SEQ ID NO: 2176114 - RNA, 19 nt, Artificial Sequence
  Description of Artificial Sequence: Synthetic oligonucleotide
ucuguauuguccucaacac

SEQ ID NO: 2176115 - RNA, 19 nt, Artificial Sequence
  Description of Artificial Sequence: Synthetic oligonucleotide
aaguuauuaagagguaucu

SEQ ID NO: 2176116 - RNA, 19 nt, Artificial Sequence
  Description of Artificial Sequence: Synthetic oligonucleotide
gcuuuaacaguucuugucg

SEQ ID NO: 2176117 - RNA, 19 nt, Artificial Sequence
  Description of Artificial Sequence: Synthetic oligonucleotide
acaucugauaagucagugg

SEQ ID NO: 2176118 - RNA, 19 nt, Artificial Sequence
  Description of Artificial Sequence: Synthetic oligonucleotide
aagcaauaaaucagucacc

SEQ ID NO: 2176119 - RNA, 19 nt, Artificial Sequence
  Description of Artificial Sequence: Synthetic oligonucleotide
ucaaucuuucucuccauga

SEQ ID NO: 2176120 - RNA, 19 nt, Artificial Sequence
  Description of Artificial Sequence: Synthetic oligonucleotide
aacaaauaauucugucugu

SEQ ID NO: 2176121 - RNA, 19 nt, Artificial Sequence
  Description of Artificial Sequence: Synthetic oligonucleotide
aagcaguaagcaauaaauc

SEQ ID NO: 2176122 - RNA, 19 nt, Artificial Sequence
  Description of Artificial Sequence: Synthetic oligonucleotide
aaaaucugcuuugagccug

SEQ ID NO: 2176123 - RNA, 19 nt, Artificial Sequence
  Description of Artificial Sequence: Synthetic oligonucleotide
gaggaagcauuccaggugc

SEQ ID NO: 2176124 - RNA, 19 nt, Artificial Sequence
  Description of Artificial Sequence: Synthetic oligonucleotide
ucuucggagugucucauca

SEQ ID NO: 2176125 - RNA, 19 nt, Artificial Sequence
  Description of Artificial Sequence: Synthetic oligonucleotide
ucagcuuuauggaggaugu

SEQ ID NO: 2176126 - RNA, 19 nt, Artificial Sequence
  Description of Artificial Sequence: Synthetic oligonucleotide
uuugagccuguuaaguucu

SEQ ID NO: 2176127 - RNA, 19 nt, Artificial Sequence
  Description of Artificial Sequence: Synthetic oligonucleotide
acuuugguaauaaaaguug

SEQ ID NO: 2176128 - RNA, 19 nt, Artificial Sequence
  Description of Artificial Sequence: Synthetic oligonucleotide
uccaaacauguuuccaggg

SEQ ID NO: 2176129 - RNA, 19 nt, Artificial Sequence
  Description of Artificial Sequence: Synthetic oligonucleotide
aaacauguuuccaggggac

SEQ ID NO: 2176130 - RNA, 19 nt, Artificial Sequence
  Description of Artificial Sequence: Synthetic oligonucleotide
uauggaggauguuaguaga

SEQ ID NO: 2176131 - RNA, 19 nt, Artificial Sequence
  Description of Artificial Sequence: Synthetic oligonucleotide
cauuuuaugggauuuucca

SEQ ID NO: 2176132 - RNA, 19 nt, Artificial Sequence
  Description of Artificial Sequence: Synthetic oligonucleotide
aaucaugaggcuguugugu

SEQ ID NO: 2176133 - RNA, 19 nt, Artificial Sequence
  Description of Artificial Sequence: Synthetic oligonucleotide
caaaggucuagaaacaaca

SEQ ID NO: 2176134 - RNA, 19 nt, Artificial Sequence
  Description of Artificial Sequence: Synthetic oligonucleotide
acauuuuaugggauuuucc

SEQ ID NO: 2176135 - RNA, 19 nt, Artificial Sequence
  Description of Artificial Sequence: Synthetic oligonucleotide
guaucucucucauacacac

SEQ ID NO: 2176136 - RNA, 19 nt, Artificial Sequence
  Description of Artificial Sequence: Synthetic oligonucleotide
uuuccgagccaguugguag

SEQ ID NO: 2176137 - RNA, 19 nt, Artificial Sequence
  Description of Artificial Sequence: Synthetic oligonucleotide
aaaggucuagaaacaacag

SEQ ID NO: 2176138 - RNA, 19 nt, Artificial Sequence
  Description of Artificial Sequence: Synthetic oligonucleotide
aaauaacaucugauaaguc

SEQ ID NO: 2176139 - RNA, 19 nt, Artificial Sequence
  Description of Artificial Sequence: Synthetic oligonucleotide
gaaauaacaucugauaagu

SEQ ID NO: 2176140 - RNA, 19 nt, Artificial Sequence
  Description of Artificial Sequence: Synthetic oligonucleotide
uucggagugucucaucagc

SEQ ID NO: 2176141 - RNA, 19 nt, Artificial Sequence
  Description of Artificial Sequence: Synthetic oligonucleotide
uggggcagacaucugaccc

SEQ ID NO: 2176142 - RNA, 19 nt, Artificial Sequence
  Description of Artificial Sequence: Synthetic oligonucleotide
ugguaauaaaaguugucau

SEQ ID NO: 2176143 - RNA, 19 nt, Artificial Sequence
  Description of Artificial Sequence: Synthetic oligonucleotide
aagagguaucugcucaucu

SEQ ID NO: 2176144 - RNA, 19 nt, Artificial Sequence
  Description of Artificial Sequence: Synthetic oligonucleotide
cauagauauuuucuguuuc

SEQ ID NO: 2176145 - RNA, 19 nt, Artificial Sequence
  Description of Artificial Sequence: Synthetic oligonucleotide
agcaauaaaucagucaccu

SEQ ID NO: 2176146 - RNA, 19 nt, Artificial Sequence
  Description of Artificial Sequence: Synthetic oligonucleotide
uucugcuagacgcuucaag

SEQ ID NO: 2176147 - RNA, 19 nt, Artificial Sequence
  Description of Artificial Sequence: Synthetic oligonucleotide
aacaucugauaagucagug

SEQ ID NO: 2176148 - RNA, 19 nt, Artificial Sequence
  Description of Artificial Sequence: Synthetic oligonucleotide
gagaggacggcccacggcc

SEQ ID NO: 2176149 - RNA, 19 nt, Artificial Sequence
  Description of Artificial Sequence: Synthetic oligonucleotide
gguuuguuguaaaacauag

SEQ ID NO: 2176150 - RNA, 19 nt, Artificial Sequence
  Description of Artificial Sequence: Synthetic oligonucleotide
ugcuuuaacaguucuuguc

SEQ ID NO: 2176151 - RNA, 19 nt, Artificial Sequence
  Description of Artificial Sequence: Synthetic oligonucleotide
uuguccucaacacauuuua

SEQ ID NO: 2176152 - RNA, 19 nt, Artificial Sequence
  Description of Artificial Sequence: Synthetic oligonucleotide
uaaaaucuucccacacagc

SEQ ID NO: 2176153 - RNA, 19 nt, Artificial Sequence
  Description of Artificial Sequence: Synthetic oligonucleotide
uuaugggauuuuccaaagc

SEQ ID NO: 2176154 - RNA, 19 nt, Artificial Sequence
  Description of Artificial Sequence: Synthetic oligonucleotide
guaauaaaaguugucaucu

SEQ ID NO: 2176155 - RNA, 19 nt, Artificial Sequence
  Description of Artificial Sequence: Synthetic oligonucleotide
uuuauggaggauguuagua

SEQ ID NO: 2176156 - RNA, 19 nt, Artificial Sequence
  Description of Artificial Sequence: Synthetic oligonucleotide
cuuugagccuguuaaguuc

SEQ ID NO: 2176157 - RNA, 19 nt, Artificial Sequence
  Description of Artificial Sequence: Synthetic oligonucleotide
ucugauaagucagugguuu

SEQ ID NO: 2176158 - RNA, 19 nt, Artificial Sequence
  Description of Artificial Sequence: Synthetic oligonucleotide
ucgucguaggagaggacgg

SEQ ID NO: 2176159 - RNA, 19 nt, Artificial Sequence
  Description of Artificial Sequence: Synthetic oligonucleotide
uauuaagagguaucugcuc

SEQ ID NO: 2176160 - RNA, 19 nt, Artificial Sequence
  Description of Artificial Sequence: Synthetic oligonucleotide
gguaauaaaaguugucauc

SEQ ID NO: 2176161 - RNA, 19 nt, Artificial Sequence
  Description of Artificial Sequence: Synthetic oligonucleotide
aucgucguaggagaggacg

SEQ ID NO: 2176162 - RNA, 19 nt, Artificial Sequence
  Description of Artificial Sequence: Synthetic oligonucleotide
cucaacacauuuuauggga

SEQ ID NO: 2176163 - RNA, 19 nt, Artificial Sequence
  Description of Artificial Sequence: Synthetic oligonucleotide
uuuccaggggacaaucuaa

SEQ ID NO: 2176164 - RNA, 19 nt, Artificial Sequence
  Description of Artificial Sequence: Synthetic oligonucleotide
agcacaucgucguaggaga

SEQ ID NO: 2176165 - RNA, 19 nt, Artificial Sequence
  Description of Artificial Sequence: Synthetic oligonucleotide
guccucaacacauuuuaug

SEQ ID NO: 2176166 - RNA, 19 nt, Artificial Sequence
  Description of Artificial Sequence: Synthetic oligonucleotide
acaaaggucuagaaacaac

SEQ ID NO: 2176167 - RNA, 19 nt, Artificial Sequence
  Description of Artificial Sequence: Synthetic oligonucleotide
augaccgccacgaggaagc

SEQ ID NO: 2176168 - RNA, 19 nt, Artificial Sequence
  Description of Artificial Sequence: Synthetic oligonucleotide
guugguagacuucauaucu

SEQ ID NO: 2176169 - RNA, 19 nt, Artificial Sequence
  Description of Artificial Sequence: Synthetic oligonucleotide
caaucuuucucuccaugag

SEQ ID NO: 2176170 - RNA, 19 nt, Artificial Sequence
  Description of Artificial Sequence: Synthetic oligonucleotide
ucaacacauuuuaugggau

SEQ ID NO: 2176171 - RNA, 19 nt, Artificial Sequence
  Description of Artificial Sequence: Synthetic oligonucleotide
uccaugagguggauggucu

SEQ ID NO: 2176172 - RNA, 19 nt, Artificial Sequence
  Description of Artificial Sequence: Synthetic oligonucleotide
ucaagcgcugcagaaaaga

SEQ ID NO: 2176173 - RNA, 19 nt, Artificial Sequence
  Description of Artificial Sequence: Synthetic oligonucleotide
agaagaaauaacaucugau

SEQ ID NO: 2176174 - RNA, 19 nt, Artificial Sequence
  Description of Artificial Sequence: Synthetic oligonucleotide
auaagucagugguuuguug

SEQ ID NO: 2176175 - RNA, 19 nt, Artificial Sequence
  Description of Artificial Sequence: Synthetic oligonucleotide
ucgacuuuccggccgccgg

SEQ ID NO: 2176176 - RNA, 19 nt, Artificial Sequence
  Description of Artificial Sequence: Synthetic oligonucleotide
acaacaguaucucucucau

SEQ ID NO: 2176177 - RNA, 19 nt, Artificial Sequence
  Description of Artificial Sequence: Synthetic oligonucleotide
aagcgcugcagaaaagauc

SEQ ID NO: 2176178 - RNA, 19 nt, Artificial Sequence
  Description of Artificial Sequence: Synthetic oligonucleotide
uuuaacaguucuugucgaa

SEQ ID NO: 2176179 - RNA, 19 nt, Artificial Sequence
  Description of Artificial Sequence: Synthetic oligonucleotide
cacgaggaagcauuccagg

SEQ ID NO: 2176180 - RNA, 19 nt, Artificial Sequence
  Description of Artificial Sequence: Synthetic oligonucleotide
gcaguaagcaauaaaucag

SEQ ID NO: 2176181 - RNA, 19 nt, Artificial Sequence
  Description of Artificial Sequence: Synthetic oligonucleotide
ugguuuguuguaaaacaua

SEQ ID NO: 2176182 - RNA, 19 nt, Artificial Sequence
  Description of Artificial Sequence: Synthetic oligonucleotide
acauagauauuuucuguuu

SEQ ID NO: 2176183 - RNA, 19 nt, Artificial Sequence
  Description of Artificial Sequence: Synthetic oligonucleotide
ugcuagacgcuucaaguua

SEQ ID NO: 2176184 - RNA, 19 nt, Artificial Sequence
  Description of Artificial Sequence: Synthetic oligonucleotide
ugcuguacucugaaucaug

SEQ ID NO: 2176185 - RNA, 19 nt, Artificial Sequence
  Description of Artificial Sequence: Synthetic oligonucleotide
gaaucaugaggcuguugug

SEQ ID NO: 2176186 - RNA, 19 nt, Artificial Sequence
  Description of Artificial Sequence: Synthetic oligonucleotide
agguggauggucucauuag

SEQ ID NO: 2176187 - RNA, 19 nt, Artificial Sequence
  Description of Artificial Sequence: Synthetic oligonucleotide
auaaaucagucaccuccag

SEQ ID NO: 2176188 - RNA, 19 nt, Artificial Sequence
  Description of Artificial Sequence: Synthetic oligonucleotide
ugauaagucagugguuugu

SEQ ID NO: 2176189 - RNA, 19 nt, Artificial Sequence
  Description of Artificial Sequence: Synthetic oligonucleotide
uggccauuccuccaaacau

SEQ ID NO: 2176190 - RNA, 19 nt, Artificial Sequence
  Description of Artificial Sequence: Synthetic oligonucleotide
aggucuagaaacaacaguu

SEQ ID NO: 2176191 - RNA, 19 nt, Artificial Sequence
  Description of Artificial Sequence: Synthetic oligonucleotide
uaacaucugauaagucagu

SEQ ID NO: 2176192 - RNA, 19 nt, Artificial Sequence
  Description of Artificial Sequence: Synthetic oligonucleotide
uuaacaguucuugucgaaa

SEQ ID NO: 2176193 - RNA, 19 nt, Artificial Sequence
  Description of Artificial Sequence: Synthetic oligonucleotide
uagauauuuucuguuuccu

SEQ ID NO: 2176194 - RNA, 19 nt, Artificial Sequence
  Description of Artificial Sequence: Synthetic oligonucleotide
caugcuguacucugaauca

SEQ ID NO: 2176195 - RNA, 19 nt, Artificial Sequence
  Description of Artificial Sequence: Synthetic oligonucleotide
auggccgaggcugugugcc

SEQ ID NO: 2176196 - RNA, 19 nt, Artificial Sequence
  Description of Artificial Sequence: Synthetic oligonucleotide
uaucucauacuuugguaau

SEQ ID NO: 2176197 - RNA, 19 nt, Artificial Sequence
  Description of Artificial Sequence: Synthetic oligonucleotide
guaucugcucaucuuuggc

SEQ ID NO: 2176198 - RNA, 19 nt, Artificial Sequence
  Description of Artificial Sequence: Synthetic oligonucleotide
uccaggugcuuuaacaguu

SEQ ID NO: 2176199 - RNA, 19 nt, Artificial Sequence
  Description of Artificial Sequence: Synthetic oligonucleotide
agagaugguucuucggagu

SEQ ID NO: 2176200 - RNA, 19 nt, Artificial Sequence
  Description of Artificial Sequence: Synthetic oligonucleotide
gguggauggucucauuagg

SEQ ID NO: 2176201 - RNA, 19 nt, Artificial Sequence
  Description of Artificial Sequence: Synthetic oligonucleotide
uaauaaaaguugucaucua

SEQ ID NO: 2176202 - RNA, 19 nt, Artificial Sequence
  Description of Artificial Sequence: Synthetic oligonucleotide
uugguagacuucauaucuc

SEQ ID NO: 2176203 - RNA, 19 nt, Artificial Sequence
  Description of Artificial Sequence: Synthetic oligonucleotide
ucguaggagaggacggccc

SEQ ID NO: 2176204 - RNA, 19 nt, Artificial Sequence
  Description of Artificial Sequence: Synthetic oligonucleotide
ugcuuugagccuguuaagu

SEQ ID NO: 2176205 - RNA, 19 nt, Artificial Sequence
  Description of Artificial Sequence: Synthetic oligonucleotide
ucggagugucucaucagcu

SEQ ID NO: 2176206 - RNA, 19 nt, Artificial Sequence
  Description of Artificial Sequence: Synthetic oligonucleotide
uuccaggugcuuuaacagu

SEQ ID NO: 2176207 - RNA, 19 nt, Artificial Sequence
  Description of Artificial Sequence: Synthetic oligonucleotide
aagucagugguuuguugua

SEQ ID NO: 2176208 - RNA, 19 nt, Artificial Sequence
  Description of Artificial Sequence: Synthetic oligonucleotide
uugggcuuuucaaucuuuc

SEQ ID NO: 2176209 - RNA, 19 nt, Artificial Sequence
  Description of Artificial Sequence: Synthetic oligonucleotide
cuggcaaaagcccagggaa

SEQ ID NO: 2176210 - RNA, 19 nt, Artificial Sequence
  Description of Artificial Sequence: Synthetic oligonucleotide
agccuguuaaguucuucug

SEQ ID NO: 2176211 - RNA, 19 nt, Artificial Sequence
  Description of Artificial Sequence: Synthetic oligonucleotide
agugcuguuggguggggca

SEQ ID NO: 2176212 - RNA, 19 nt, Artificial Sequence
  Description of Artificial Sequence: Synthetic oligonucleotide
uguuuccaggggacaaucu

SEQ ID NO: 2176213 - RNA, 19 nt, Artificial Sequence
  Description of Artificial Sequence: Synthetic oligonucleotide
aaaagcccagggaauauuu

SEQ ID NO: 2176214 - RNA, 19 nt, Artificial Sequence
  Description of Artificial Sequence: Synthetic oligonucleotide
uugccaagagguggcacgg

SEQ ID NO: 2176215 - RNA, 19 nt, Artificial Sequence
  Description of Artificial Sequence: Synthetic oligonucleotide
ugggcuuuucaaucuuucu

SEQ ID NO: 2176216 - RNA, 19 nt, Artificial Sequence
  Description of Artificial Sequence: Synthetic oligonucleotide
aggucgacuuuccggccgc

SEQ ID NO: 2176217 - RNA, 19 nt, Artificial Sequence
  Description of Artificial Sequence: Synthetic oligonucleotide
uccauugggauggccgagg

SEQ ID NO: 2176218 - RNA, 19 nt, Artificial Sequence
  Description of Artificial Sequence: Synthetic oligonucleotide
uuccaggggacaaucuaaa

SEQ ID NO: 2176219 - RNA, 19 nt, Artificial Sequence
  Description of Artificial Sequence: Synthetic oligonucleotide
agcgccgucagggagcgcg

SEQ ID NO: 2176220 - RNA, 19 nt, Artificial Sequence
  Description of Artificial Sequence: Synthetic oligonucleotide
gcuuuauggaggauguuag

SEQ ID NO: 2176221 - RNA, 19 nt, Artificial Sequence
  Description of Artificial Sequence: Synthetic oligonucleotide
uuccgagccaguugguaga

SEQ ID NO: 2176222 - RNA, 19 nt, Artificial Sequence
  Description of Artificial Sequence: Synthetic oligonucleotide
uggaggauguuaguagaac

SEQ ID NO: 2176223 - RNA, 19 nt, Artificial Sequence
  Description of Artificial Sequence: Synthetic oligonucleotide
gaggauguuaguagaacaa

SEQ ID NO: 2176224 - RNA, 19 nt, Artificial Sequence
  Description of Artificial Sequence: Synthetic oligonucleotide
gcgaaggucgacuuuccgg

SEQ ID NO: 2176225 - RNA, 19 nt, Artificial Sequence
  Description of Artificial Sequence: Synthetic oligonucleotide
cuugucuuagaucuuccaa

SEQ ID NO: 2176226 - RNA, 19 nt, Artificial Sequence
  Description of Artificial Sequence: Synthetic oligonucleotide
acaucgucguaggagagga

SEQ ID NO: 2176227 - RNA, 19 nt, Artificial Sequence
  Description of Artificial Sequence: Synthetic oligonucleotide
cuuugguaauaaaaguugu

SEQ ID NO: 2176228 - RNA, 19 nt, Artificial Sequence
  Description of Artificial Sequence: Synthetic oligonucleotide
ccucaacacauuuuauggg

SEQ ID NO: 2176229 - RNA, 19 nt, Artificial Sequence
  Description of Artificial Sequence: Synthetic oligonucleotide
aaccgcacgcgcgaagguc

SEQ ID NO: 2176230 - RNA, 19 nt, Artificial Sequence
  Description of Artificial Sequence: Synthetic oligonucleotide
cauaucucauacuuuggua

SEQ ID NO: 2176231 - RNA, 19 nt, Artificial Sequence
  Description of Artificial Sequence: Synthetic oligonucleotide
ggaggauguuaguagaaca

SEQ ID NO: 2176232 - RNA, 19 nt, Artificial Sequence
  Description of Artificial Sequence: Synthetic oligonucleotide
cacauuuuaugggauuuuc

SEQ ID NO: 2176233 - RNA, 19 nt, Artificial Sequence
  Description of Artificial Sequence: Synthetic oligonucleotide
cugauaagucagugguuug

SEQ ID NO: 2176234 - RNA, 19 nt, Artificial Sequence
  Description of Artificial Sequence: Synthetic oligonucleotide
agcuuuauggaggauguua

SEQ ID NO: 2176235 - RNA, 19 nt, Artificial Sequence
  Description of Artificial Sequence: Synthetic oligonucleotide
cuguacucugaaucaugag

SEQ ID NO: 2176236 - RNA, 19 nt, Artificial Sequence
  Description of Artificial Sequence: Synthetic oligonucleotide
cagugguuuguuguaaaac

SEQ ID NO: 2176237 - RNA, 19 nt, Artificial Sequence
  Description of Artificial Sequence: Synthetic oligonucleotide
agcuggcaaaagcccaggg

SEQ ID NO: 2176238 - RNA, 19 nt, Artificial Sequence
  Description of Artificial Sequence: Synthetic oligonucleotide
agagguaucugcucaucuu

SEQ ID NO: 2176239 - RNA, 19 nt, Artificial Sequence
  Description of Artificial Sequence: Synthetic oligonucleotide
gaugguucuucggaguguc

SEQ ID NO: 2176240 - RNA, 19 nt, Artificial Sequence
  Description of Artificial Sequence: Synthetic oligonucleotide
agacuucauaucucauacu

SEQ ID NO: 2176241 - RNA, 19 nt, Artificial Sequence
  Description of Artificial Sequence: Synthetic oligonucleotide
gaaggucgacuuuccggcc

SEQ ID NO: 2176242 - RNA, 19 nt, Artificial Sequence
  Description of Artificial Sequence: Synthetic oligonucleotide
aguucuugucgaaacauuu

SEQ ID NO: 2176243 - RNA, 19 nt, Artificial Sequence
  Description of Artificial Sequence: Synthetic oligonucleotide
gccuguuaaguucuucugc

SEQ ID NO: 2176244 - RNA, 19 nt, Artificial Sequence
  Description of Artificial Sequence: Synthetic oligonucleotide
aguaucucucucauacaca

SEQ ID NO: 2176245 - RNA, 19 nt, Artificial Sequence
  Description of Artificial Sequence: Synthetic oligonucleotide
uccuuuuguucuguauugu

SEQ ID NO: 2176246 - RNA, 19 nt, Artificial Sequence
  Description of Artificial Sequence: Synthetic oligonucleotide
ugugugccagcgccgucag

SEQ ID NO: 2176247 - RNA, 19 nt, Artificial Sequence
  Description of Artificial Sequence: Synthetic oligonucleotide
aggauguuaguagaacaaa

SEQ ID NO: 2176248 - RNA, 19 nt, Artificial Sequence
  Description of Artificial Sequence: Synthetic oligonucleotide
cuucggagugucucaucag

SEQ ID NO: 2176249 - RNA, 19 nt, Artificial Sequence
  Description of Artificial Sequence: Synthetic oligonucleotide
aaucccguuccugccgcag

SEQ ID NO: 2176250 - RNA, 19 nt, Artificial Sequence
  Description of Artificial Sequence: Synthetic oligonucleotide
caguaagcaauaaaucagu

SEQ ID NO: 2176251 - RNA, 19 nt, Artificial Sequence
  Description of Artificial Sequence: Synthetic oligonucleotide
gagccuguuaaguucuucu

SEQ ID NO: 2176252 - RNA, 19 nt, Artificial Sequence
  Description of Artificial Sequence: Synthetic oligonucleotide
ugguucuucggagugucuc

SEQ ID NO: 2176253 - RNA, 19 nt, Artificial Sequence
  Description of Artificial Sequence: Synthetic oligonucleotide
ccagggaauauuuccgagc

SEQ ID NO: 2176254 - RNA, 19 nt, Artificial Sequence
  Description of Artificial Sequence: Synthetic oligonucleotide
guuuguuguaaaacauaga

SEQ ID NO: 2176255 - RNA, 19 nt, Artificial Sequence
  Description of Artificial Sequence: Synthetic oligonucleotide
cuguauuguccucaacaca

SEQ ID NO: 2176256 - RNA, 19 nt, Artificial Sequence
  Description of Artificial Sequence: Synthetic oligonucleotide
cgaaggucgacuuuccggc

SEQ ID NO: 2176257 - RNA, 19 nt, Artificial Sequence
  Description of Artificial Sequence: Synthetic oligonucleotide
aggagaggacggcccacgg

SEQ ID NO: 2176258 - RNA, 19 nt, Artificial Sequence
  Description of Artificial Sequence: Synthetic oligonucleotide
uauuuccgagccaguuggu

SEQ ID NO: 2176259 - RNA, 19 nt, Artificial Sequence
  Description of Artificial Sequence: Synthetic oligonucleotide
cacaucgucguaggagagg

SEQ ID NO: 2176260 - RNA, 19 nt, Artificial Sequence
  Description of Artificial Sequence: Synthetic oligonucleotide
ugccagcgccgucagggag

SEQ ID NO: 2176261 - RNA, 19 nt, Artificial Sequence
  Description of Artificial Sequence: Synthetic oligonucleotide
agccaguugguagacuuca

SEQ ID NO: 2176262 - RNA, 19 nt, Artificial Sequence
  Description of Artificial Sequence: Synthetic oligonucleotide
uuuccggccgccggcaagc

SEQ ID NO: 2176263 - RNA, 19 nt, Artificial Sequence
  Description of Artificial Sequence: Synthetic oligonucleotide
gcuguuguguucccaggag

SEQ ID NO: 2176264 - RNA, 19 nt, Artificial Sequence
  Description of Artificial Sequence: Synthetic oligonucleotide
accgcacgcgcgaaggucg

SEQ ID NO: 2176265 - RNA, 19 nt, Artificial Sequence
  Description of Artificial Sequence: Synthetic oligonucleotide
cucaagcgcugcagaaaag

SEQ ID NO: 2176266 - RNA, 19 nt, Artificial Sequence
  Description of Artificial Sequence: Synthetic oligonucleotide
cgcuucaaguuauuaagag

SEQ ID NO: 2176267 - RNA, 19 nt, Artificial Sequence
  Description of Artificial Sequence: Synthetic oligonucleotide
gcagaaaagaucaaauccu

SEQ ID NO: 2176268 - RNA, 19 nt, Artificial Sequence
  Description of Artificial Sequence: Synthetic oligonucleotide
aaaucugcuuugagccugu

SEQ ID NO: 2176269 - RNA, 19 nt, Artificial Sequence
  Description of Artificial Sequence: Synthetic oligonucleotide
guagaacaaauaauucugu

SEQ ID NO: 2176270 - RNA, 19 nt, Artificial Sequence
  Description of Artificial Sequence: Synthetic oligonucleotide
cucugaaucaugaggcugu

SEQ ID NO: 2176271 - RNA, 19 nt, Artificial Sequence
  Description of Artificial Sequence: Synthetic oligonucleotide
ugggccucaagcgcugcag

SEQ ID NO: 2176272 - RNA, 19 nt, Artificial Sequence
  Description of Artificial Sequence: Synthetic oligonucleotide
ucauggucugagagauggu

SEQ ID NO: 2176273 - RNA, 19 nt, Artificial Sequence
  Description of Artificial Sequence: Synthetic oligonucleotide
acgcuucaaguuauuaaga

SEQ ID NO: 2176274 - RNA, 19 nt, Artificial Sequence
  Description of Artificial Sequence: Synthetic oligonucleotide
cacggcccaaucccguucc

SEQ ID NO: 2176275 - RNA, 19 nt, Artificial Sequence
  Description of Artificial Sequence: Synthetic oligonucleotide
gucuagaaacaacaguuuu

SEQ ID NO: 2176276 - RNA, 19 nt, Artificial Sequence
  Description of Artificial Sequence: Synthetic oligonucleotide
gagguaucugcucaucuuu

SEQ ID NO: 2176277 - RNA, 19 nt, Artificial Sequence
  Description of Artificial Sequence: Synthetic oligonucleotide
gucguaggagaggacggcc

SEQ ID NO: 2176278 - RNA, 19 nt, Artificial Sequence
  Description of Artificial Sequence: Synthetic oligonucleotide
uagacgcuucaaguuauua

SEQ ID NO: 2176279 - RNA, 19 nt, Artificial Sequence
  Description of Artificial Sequence: Synthetic oligonucleotide
agaggacggcccacggccc

SEQ ID NO: 2176280 - RNA, 19 nt, Artificial Sequence
  Description of Artificial Sequence: Synthetic oligonucleotide
gccuccacaggacaugcug

SEQ ID NO: 2176281 - RNA, 19 nt, Artificial Sequence
  Description of Artificial Sequence: Synthetic oligonucleotide
uccacaggacaugcuguac

SEQ ID NO: 2176282 - RNA, 19 nt, Artificial Sequence
  Description of Artificial Sequence: Synthetic oligonucleotide
agggccaaccgcacgcgcg

SEQ ID NO: 2176283 - RNA, 19 nt, Artificial Sequence
  Description of Artificial Sequence: Synthetic oligonucleotide
agaugguucuucggagugu

SEQ ID NO: 2176284 - RNA, 19 nt, Artificial Sequence
  Description of Artificial Sequence: Synthetic oligonucleotide
gucagugguuuguuguaaa

SEQ ID NO: 2176285 - RNA, 19 nt, Artificial Sequence
  Description of Artificial Sequence: Synthetic oligonucleotide
cuucauggucugagagaug

SEQ ID NO: 2176286 - RNA, 19 nt, Artificial Sequence
  Description of Artificial Sequence: Synthetic oligonucleotide
caagccgcagaggacgcac

SEQ ID NO: 2176287 - RNA, 19 nt, Artificial Sequence
  Description of Artificial Sequence: Synthetic oligonucleotide
uggggucucuggccauucc

SEQ ID NO: 2176288 - RNA, 19 nt, Artificial Sequence
  Description of Artificial Sequence: Synthetic oligonucleotide
acaggacaugcuguacucu

SEQ ID NO: 2176289 - RNA, 19 nt, Artificial Sequence
  Description of Artificial Sequence: Synthetic oligonucleotide
ucucuccaugagguggaug

SEQ ID NO: 2176290 - RNA, 19 nt, Artificial Sequence
  Description of Artificial Sequence: Synthetic oligonucleotide
aucucauacuuugguaaua

SEQ ID NO: 2176291 - RNA, 19 nt, Artificial Sequence
  Description of Artificial Sequence: Synthetic oligonucleotide
cuuuccggccgccggcaag

SEQ ID NO: 2176292 - RNA, 19 nt, Artificial Sequence
  Description of Artificial Sequence: Synthetic oligonucleotide
cucaggguugggcuuuuca

SEQ ID NO: 2176293 - RNA, 19 nt, Artificial Sequence
  Description of Artificial Sequence: Synthetic oligonucleotide
ggccauuccuccaaacaug

SEQ ID NO: 2176294 - RNA, 19 nt, Artificial Sequence
  Description of Artificial Sequence: Synthetic oligonucleotide
cucauacuuugguaauaaa

SEQ ID NO: 2176295 - RNA, 19 nt, Artificial Sequence
  Description of Artificial Sequence: Synthetic oligonucleotide
gcuguacucugaaucauga

SEQ ID NO: 2176296 - RNA, 19 nt, Artificial Sequence
  Description of Artificial Sequence: Synthetic oligonucleotide
ccacgaggaagcauuccag

SEQ ID NO: 2176297 - RNA, 19 nt, Artificial Sequence
  Description of Artificial Sequence: Synthetic oligonucleotide
auuuccgagccaguuggua

SEQ ID NO: 2176298 - RNA, 19 nt, Artificial Sequence
  Description of Artificial Sequence: Synthetic oligonucleotide
accgccacgaggaagcauu

SEQ ID NO: 2176299 - RNA, 19 nt, Artificial Sequence
  Description of Artificial Sequence: Synthetic oligonucleotide
gagggccaaccgcacgcgc

SEQ ID NO: 2176300 - RNA, 19 nt, Artificial Sequence
  Description of Artificial Sequence: Synthetic oligonucleotide
gcaauaaaucagucaccuc

SEQ ID NO: 2176301 - RNA, 19 nt, Artificial Sequence
  Description of Artificial Sequence: Synthetic oligonucleotide
auggaggauguuaguagaa

SEQ ID NO: 2176302 - RNA, 19 nt, Artificial Sequence
  Description of Artificial Sequence: Synthetic oligonucleotide
gaagcauuccaggugcuuu

SEQ ID NO: 2176303 - RNA, 19 nt, Artificial Sequence
  Description of Artificial Sequence: Synthetic oligonucleotide
gauaagucagugguuuguu

SEQ ID NO: 2176304 - RNA, 19 nt, Artificial Sequence
  Description of Artificial Sequence: Synthetic oligonucleotide
cccagggaauauuuccgag

SEQ ID NO: 2176305 - RNA, 19 nt, Artificial Sequence
  Description of Artificial Sequence: Synthetic oligonucleotide
cagcuucagugcuguuggg

SEQ ID NO: 2176306 - RNA, 19 nt, Artificial Sequence
  Description of Artificial Sequence: Synthetic oligonucleotide
gugucucaucagcuuuaug

SEQ ID NO: 2176307 - RNA, 19 nt, Artificial Sequence
  Description of Artificial Sequence: Synthetic oligonucleotide
cuguuaaguucuucugcua

SEQ ID NO: 2176308 - RNA, 19 nt, Artificial Sequence
  Description of Artificial Sequence: Synthetic oligonucleotide
cugaaucaugaggcuguug

SEQ ID NO: 2176309 - RNA, 19 nt, Artificial Sequence
  Description of Artificial Sequence: Synthetic oligonucleotide
ucugaaucaugaggcuguu

SEQ ID NO: 2176310 - RNA, 19 nt, Artificial Sequence
  Description of Artificial Sequence: Synthetic oligonucleotide
gucgacuuuccggccgccg

SEQ ID NO: 2176311 - RNA, 19 nt, Artificial Sequence
  Description of Artificial Sequence: Synthetic oligonucleotide
ggauggccgaggcugugug

SEQ ID NO: 2176312 - RNA, 19 nt, Artificial Sequence
  Description of Artificial Sequence: Synthetic oligonucleotide
gugcuuuaacaguucuugu

SEQ ID NO: 2176313 - RNA, 19 nt, Artificial Sequence
  Description of Artificial Sequence: Synthetic oligonucleotide
ggagaggacggcccacggc

SEQ ID NO: 2176314 - RNA, 19 nt, Artificial Sequence
  Description of Artificial Sequence: Synthetic oligonucleotide
gcagccggagggccaaccg

SEQ ID NO: 2176315 - RNA, 19 nt, Artificial Sequence
  Description of Artificial Sequence: Synthetic oligonucleotide
cccaaucccguuccugccg

SEQ ID NO: 2176316 - RNA, 19 nt, Artificial Sequence
  Description of Artificial Sequence: Synthetic oligonucleotide
aucugauaagucagugguu

SEQ ID NO: 2176317 - RNA, 19 nt, Artificial Sequence
  Description of Artificial Sequence: Synthetic oligonucleotide
caucgucguaggagaggac

SEQ ID NO: 2176318 - RNA, 19 nt, Artificial Sequence
  Description of Artificial Sequence: Synthetic oligonucleotide
gagugucucaucagcuuua

SEQ ID NO: 2176319 - RNA, 19 nt, Artificial Sequence
  Description of Artificial Sequence: Synthetic oligonucleotide
ugagguggauggucucauu

SEQ ID NO: 2176320 - RNA, 19 nt, Artificial Sequence
  Description of Artificial Sequence: Synthetic oligonucleotide
ccaaccgcacgcgcgaagg

SEQ ID NO: 2176321 - RNA, 19 nt, Artificial Sequence
  Description of Artificial Sequence: Synthetic oligonucleotide
cuguuguguucccaggagu

SEQ ID NO: 2176322 - RNA, 19 nt, Artificial Sequence
  Description of Artificial Sequence: Synthetic oligonucleotide
uugagccuguuaaguucuu

SEQ ID NO: 2176323 - RNA, 19 nt, Artificial Sequence
  Description of Artificial Sequence: Synthetic oligonucleotide
caccaaugaccgccacgag

SEQ ID NO: 2176324 - RNA, 19 nt, Artificial Sequence
  Description of Artificial Sequence: Synthetic oligonucleotide
ccaaucccguuccugccgc

SEQ ID NO: 2176325 - RNA, 19 nt, Artificial Sequence
  Description of Artificial Sequence: Synthetic oligonucleotide
ugccaagagguggcacggc

SEQ ID NO: 2176326 - RNA, 19 nt, Artificial Sequence
  Description of Artificial Sequence: Synthetic oligonucleotide
agguggcacggcugggccu

SEQ ID NO: 2176327 - RNA, 19 nt, Artificial Sequence
  Description of Artificial Sequence: Synthetic oligonucleotide
gggauuuuccaaagcagua

SEQ ID NO: 2176328 - RNA, 19 nt, Artificial Sequence
  Description of Artificial Sequence: Synthetic oligonucleotide
gucucauuaggcaguggcu

SEQ ID NO: 2176329 - RNA, 19 nt, Artificial Sequence
  Description of Artificial Sequence: Synthetic oligonucleotide
caagcgcugcagaaaagau

SEQ ID NO: 2176330 - RNA, 19 nt, Artificial Sequence
  Description of Artificial Sequence: Synthetic oligonucleotide
ccauugggauggccgaggc

SEQ ID NO: 2176331 - RNA, 19 nt, Artificial Sequence
  Description of Artificial Sequence: Synthetic oligonucleotide
gaggacggcccacggccca

SEQ ID NO: 2176332 - RNA, 19 nt, Artificial Sequence
  Description of Artificial Sequence: Synthetic oligonucleotide
gacuuuccggccgccggca

SEQ ID NO: 2176333 - RNA, 19 nt, Artificial Sequence
  Description of Artificial Sequence: Synthetic oligonucleotide
cugcuagacgcuucaaguu

SEQ ID NO: 2176334 - RNA, 19 nt, Artificial Sequence
  Description of Artificial Sequence: Synthetic oligonucleotide
ccucaagcgcugcagaaaa

SEQ ID NO: 2176335 - RNA, 19 nt, Artificial Sequence
  Description of Artificial Sequence: Synthetic oligonucleotide
aggugcuuuaacaguucuu

SEQ ID NO: 2176336 - RNA, 19 nt, Artificial Sequence
  Description of Artificial Sequence: Synthetic oligonucleotide
gcccaaucccguuccugcc

SEQ ID NO: 2176337 - RNA, 19 nt, Artificial Sequence
  Description of Artificial Sequence: Synthetic oligonucleotide
gcccagggaauauuuccga

SEQ ID NO: 2176338 - RNA, 19 nt, Artificial Sequence
  Description of Artificial Sequence: Synthetic oligonucleotide
caggugcuuuaacaguucu

SEQ ID NO: 2176339 - RNA, 19 nt, Artificial Sequence
  Description of Artificial Sequence: Synthetic oligonucleotide
ggagugucucaucagcuuu

SEQ ID NO: 2176340 - RNA, 19 nt, Artificial Sequence
  Description of Artificial Sequence: Synthetic oligonucleotide
gcauuccaggugcuuuaac

SEQ ID NO: 2176341 - RNA, 19 nt, Artificial Sequence
  Description of Artificial Sequence: Synthetic oligonucleotide
aggaagcauuccaggugcu

SEQ ID NO: 2176342 - RNA, 19 nt, Artificial Sequence
  Description of Artificial Sequence: Synthetic oligonucleotide
ugaccgccacgaggaagca

SEQ ID NO: 2176343 - RNA, 19 nt, Artificial Sequence
  Description of Artificial Sequence: Synthetic oligonucleotide
gcuuugagccuguuaaguu

SEQ ID NO: 2176344 - RNA, 19 nt, Artificial Sequence
  Description of Artificial Sequence: Synthetic oligonucleotide
cuguuuccuugucuuagau

SEQ ID NO: 2176345 - RNA, 19 nt, Artificial Sequence
  Description of Artificial Sequence: Synthetic oligonucleotide
aaucugcuuugagccuguu

SEQ ID NO: 2176346 - RNA, 19 nt, Artificial Sequence
  Description of Artificial Sequence: Synthetic oligonucleotide
gggucucuggccauuccuc

SEQ ID NO: 2176347 - RNA, 19 nt, Artificial Sequence
  Description of Artificial Sequence: Synthetic oligonucleotide
uucucuccaugagguggau

SEQ ID NO: 2176348 - RNA, 19 nt, Artificial Sequence
  Description of Artificial Sequence: Synthetic oligonucleotide
ggguugggcuuuucaaucu

SEQ ID NO: 2176349 - RNA, 19 nt, Artificial Sequence
  Description of Artificial Sequence: Synthetic oligonucleotide
augguucuucggagugucu

SEQ ID NO: 2176350 - RNA, 19 nt, Artificial Sequence
  Description of Artificial Sequence: Synthetic oligonucleotide
gguggcacggcugggccuc

SEQ ID NO: 2176351 - RNA, 19 nt, Artificial Sequence
  Description of Artificial Sequence: Synthetic oligonucleotide
gacggcccacggcccaauc

SEQ ID NO: 2176352 - RNA, 19 nt, Artificial Sequence
  Description of Artificial Sequence: Synthetic oligonucleotide
ggccucaagcgcugcagaa

SEQ ID NO: 2176353 - RNA, 19 nt, Artificial Sequence
  Description of Artificial Sequence: Synthetic oligonucleotide
acggcccaaucccguuccu

SEQ ID NO: 2176354 - RNA, 19 nt, Artificial Sequence
  Description of Artificial Sequence: Synthetic oligonucleotide
gccaaccgcacgcgcgaag

SEQ ID NO: 2176355 - RNA, 19 nt, Artificial Sequence
  Description of Artificial Sequence: Synthetic oligonucleotide
ggucuagaaacaacaguuu

SEQ ID NO: 2176356 - RNA, 19 nt, Artificial Sequence
  Description of Artificial Sequence: Synthetic oligonucleotide
gugccagcgccgucaggga

SEQ ID NO: 2176357 - RNA, 19 nt, Artificial Sequence
  Description of Artificial Sequence: Synthetic oligonucleotide
ggcccacggcccaaucccg

SEQ ID NO: 2176358 - RNA, 19 nt, Artificial Sequence
  Description of Artificial Sequence: Synthetic oligonucleotide
gggccaaccgcacgcgcga

SEQ ID NO: 2176359 - RNA, 19 nt, Artificial Sequence
  Description of Artificial Sequence: Synthetic oligonucleotide
guucuucggagugucucau

SEQ ID NO: 2176360 - RNA, 19 nt, Artificial Sequence
  Description of Artificial Sequence: Synthetic oligonucleotide
cgcgaaggucgacuuuccg

SEQ ID NO: 2176361 - RNA, 19 nt, Artificial Sequence
  Description of Artificial Sequence: Synthetic oligonucleotide
caaucccguuccugccgca

SEQ ID NO: 2176362 - RNA, 19 nt, Artificial Sequence
  Description of Artificial Sequence: Synthetic oligonucleotide
ggccgaggcugugugccag

SEQ ID NO: 2176363 - RNA, 19 nt, Artificial Sequence
  Description of Artificial Sequence: Synthetic oligonucleotide
ucucaggguugggcuuuuc

SEQ ID NO: 2176364 - RNA, 19 nt, Artificial Sequence
  Description of Artificial Sequence: Synthetic oligonucleotide
cauugggauggccgaggcu

SEQ ID NO: 2176365 - RNA, 19 nt, Artificial Sequence
  Description of Artificial Sequence: Synthetic oligonucleotide
caccuccaggcuggccucc

SEQ ID NO: 2176366 - RNA, 19 nt, Artificial Sequence
  Description of Artificial Sequence: Synthetic oligonucleotide
ccgccggcaagccgcagag

SEQ ID NO: 2176367 - RNA, 19 nt, Artificial Sequence
  Description of Artificial Sequence: Synthetic oligonucleotide
caaugaccgccacgaggaa

SEQ ID NO: 2176368 - RNA, 19 nt, Artificial Sequence
  Description of Artificial Sequence: Synthetic oligonucleotide
uucucaggguugggcuuuu

SEQ ID NO: 2176369 - RNA, 19 nt, Artificial Sequence
  Description of Artificial Sequence: Synthetic oligonucleotide
acgcgcgaaggucgacuuu

SEQ ID NO: 2176370 - RNA, 19 nt, Artificial Sequence
  Description of Artificial Sequence: Synthetic oligonucleotide
ccggagggccaaccgcacg

SEQ ID NO: 2176371 - RNA, 19 nt, Artificial Sequence
  Description of Artificial Sequence: Synthetic oligonucleotide
guauuguccucaacacauu

SEQ ID NO: 2176372 - RNA, 19 nt, Artificial Sequence
  Description of Artificial Sequence: Synthetic oligonucleotide
gcuagacgcuucaaguuau

SEQ ID NO: 2176373 - RNA, 19 nt, Artificial Sequence
  Description of Artificial Sequence: Synthetic oligonucleotide
ggaauauuuccgagccagu

SEQ ID NO: 2176374 - RNA, 19 nt, Artificial Sequence
  Description of Artificial Sequence: Synthetic oligonucleotide
cucuggccauuccuccaaa

SEQ ID NO: 2176375 - RNA, 19 nt, Artificial Sequence
  Description of Artificial Sequence: Synthetic oligonucleotide
cgacuuuccggccgccggc

SEQ ID NO: 2176376 - RNA, 19 nt, Artificial Sequence
  Description of Artificial Sequence: Synthetic oligonucleotide
gcuguuggguggggcagac

SEQ ID NO: 2176377 - RNA, 19 nt, Artificial Sequence
  Description of Artificial Sequence: Synthetic oligonucleotide
gguagacuucauaucucau

SEQ ID NO: 2176378 - RNA, 19 nt, Artificial Sequence
  Description of Artificial Sequence: Synthetic oligonucleotide
cgcgcgaaggucgacuuuc

SEQ ID NO: 2176379 - RNA, 19 nt, Artificial Sequence
  Description of Artificial Sequence: Synthetic oligonucleotide
cgucguaggagaggacggc

SEQ ID NO: 2176380 - RNA, 19 nt, Artificial Sequence
  Description of Artificial Sequence: Synthetic oligonucleotide
cuagacgcuucaaguuauu

SEQ ID NO: 2176381 - RNA, 19 nt, Artificial Sequence
  Description of Artificial Sequence: Synthetic oligonucleotide
gcgcgaaggucgacuuucc

SEQ ID NO: 2176382 - RNA, 19 nt, Artificial Sequence
  Description of Artificial Sequence: Synthetic oligonucleotide
ccacggcccaaucccguuc

SEQ ID NO: 2176383 - RNA, 19 nt, Artificial Sequence
  Description of Artificial Sequence: Synthetic oligonucleotide
gcaaaagcccagggaauau

SEQ ID NO: 2176384 - RNA, 19 nt, Artificial Sequence
  Description of Artificial Sequence: Synthetic oligonucleotide
aggacggcccacggcccaa

SEQ ID NO: 2176385 - RNA, 19 nt, Artificial Sequence
  Description of Artificial Sequence: Synthetic oligonucleotide
cacgcgcgaaggucgacuu

SEQ ID NO: 2176386 - RNA, 19 nt, Artificial Sequence
  Description of Artificial Sequence: Synthetic oligonucleotide
ggucgacuuuccggccgcc

SEQ ID NO: 2176387 - RNA, 19 nt, Artificial Sequence
  Description of Artificial Sequence: Synthetic oligonucleotide
caaccgcacgcgcgaaggu

SEQ ID NO: 2176388 - RNA, 19 nt, Artificial Sequence
  Description of Artificial Sequence: Synthetic oligonucleotide
ccgccacgaggaagcauuc

SEQ ID NO: 2176389 - RNA, 19 nt, Artificial Sequence
  Description of Artificial Sequence: Synthetic oligonucleotide
cuguuggguggggcagaca

SEQ ID NO: 2176390 - RNA, 19 nt, Artificial Sequence
  Description of Artificial Sequence: Synthetic oligonucleotide
gcgccgucagggagcgcgg

SEQ ID NO: 2176391 - RNA, 19 nt, Artificial Sequence
  Description of Artificial Sequence: Synthetic oligonucleotide
gaccgccacgaggaagcau

SEQ ID NO: 2176392 - RNA, 19 nt, Artificial Sequence
  Description of Artificial Sequence: Synthetic oligonucleotide
cgccacgaggaagcauucc

SEQ ID NO: 2176393 - RNA, 19 nt, Artificial Sequence
  Description of Artificial Sequence: Synthetic oligonucleotide
gggauggccgaggcugugu

SEQ ID NO: 2176394 - RNA, 19 nt, Artificial Sequence
  Description of Artificial Sequence: Synthetic oligonucleotide
cggcccaaucccguuccug

SEQ ID NO: 2176395 - RNA, 19 nt, Artificial Sequence
  Description of Artificial Sequence: Synthetic oligonucleotide
cagcuuuauggaggauguu

SEQ ID NO: 2176396 - RNA, 19 nt, Artificial Sequence
  Description of Artificial Sequence: Synthetic oligonucleotide
gccgcagccggagggccaa

SEQ ID NO: 2176397 - RNA, 19 nt, Artificial Sequence
  Description of Artificial Sequence: Synthetic oligonucleotide
ccgcacgcgcgaaggucga

SEQ ID NO: 2176398 - RNA, 19 nt, Artificial Sequence
  Description of Artificial Sequence: Synthetic oligonucleotide
ggccaaccgcacgcgcgaa

SEQ ID NO: 2176399 - RNA, 19 nt, Artificial Sequence
  Description of Artificial Sequence: Synthetic oligonucleotide
gcccacggcccaaucccgu

SEQ ID NO: 2176400 - RNA, 19 nt, Artificial Sequence
  Description of Artificial Sequence: Synthetic oligonucleotide
cgcacgcgcgaaggucgac

SEQ ID NO: 2176401 - RNA, 19 nt, Artificial Sequence
  Description of Artificial Sequence: Synthetic oligonucleotide
cccacggcccaaucccguu

SEQ ID NO: 2176402 - RNA, 19 nt, Artificial Sequence
  Description of Artificial Sequence: Synthetic oligonucleotide
ccgagccaguugguagacu

SEQ ID NO: 2176403 - RNA, 19 nt, Artificial Sequence
  Description of Artificial Sequence: Synthetic oligonucleotide
ggacggcccacggcccaau

SEQ ID NO: 2176404 - RNA, 19 nt, Artificial Sequence
  Description of Artificial Sequence: Synthetic oligonucleotide
ccgcagccggagggccaac

SEQ ID NO: 2176405 - RNA, 19 nt, Artificial Sequence
  Description of Artificial Sequence: Synthetic oligonucleotide
cggccgccggcaagccgca

SEQ ID NO: 2176406 - RNA, 19 nt, Artificial Sequence
  Description of Artificial Sequence: Synthetic oligonucleotide
aaggauaaaagcuccaggc

SEQ ID NO: 2176407 - RNA, 19 nt, Artificial Sequence
  Description of Artificial Sequence: Synthetic oligonucleotide
aauguagccauuuauugac

SEQ ID NO: 2176408 - RNA, 19 nt, Artificial Sequence
  Description of Artificial Sequence: Synthetic oligonucleotide
uuuauugacagcuucaucu

SEQ ID NO: 2176409 - RNA, 19 nt, Artificial Sequence
  Description of Artificial Sequence: Synthetic oligonucleotide
agaaaauucaauacaagcc

SEQ ID NO: 2176410 - RNA, 19 nt, Artificial Sequence
  Description of Artificial Sequence: Synthetic oligonucleotide
ugaacaauuggcaugaacu

SEQ ID NO: 2176411 - RNA, 19 nt, Artificial Sequence
  Description of Artificial Sequence: Synthetic oligonucleotide
uuaaguaaggcacaccucc

SEQ ID NO: 2176412 - RNA, 19 nt, Artificial Sequence
  Description of Artificial Sequence: Synthetic oligonucleotide
aagauuagccaguagugcg

SEQ ID NO: 2176413 - RNA, 19 nt, Artificial Sequence
  Description of Artificial Sequence: Synthetic oligonucleotide
aauuaaguuguccuguucu

SEQ ID NO: 2176414 - RNA, 19 nt, Artificial Sequence
  Description of Artificial Sequence: Synthetic oligonucleotide
aaagauuagccaguagugc

SEQ ID NO: 2176415 - RNA, 19 nt, Artificial Sequence
  Description of Artificial Sequence: Synthetic oligonucleotide
uuugcaaucucauuuaggu

SEQ ID NO: 2176416 - RNA, 19 nt, Artificial Sequence
  Description of Artificial Sequence: Synthetic oligonucleotide
ucugaaauggaccugcccc

SEQ ID NO: 2176417 - RNA, 19 nt, Artificial Sequence
  Description of Artificial Sequence: Synthetic oligonucleotide
gaagaaaugagugugcucc

SEQ ID NO: 2176418 - RNA, 19 nt, Artificial Sequence
  Description of Artificial Sequence: Synthetic oligonucleotide
uucaauacaagccauuuuc

SEQ ID NO: 2176419 - RNA, 19 nt, Artificial Sequence
  Description of Artificial Sequence: Synthetic oligonucleotide
uugaucaaugcgauaaagg

SEQ ID NO: 2176420 - RNA, 19 nt, Artificial Sequence
  Description of Artificial Sequence: Synthetic oligonucleotide
uaucauagugguaaugucc

SEQ ID NO: 2176421 - RNA, 19 nt, Artificial Sequence
  Description of Artificial Sequence: Synthetic oligonucleotide
ucugcaaaacuucagcaag

SEQ ID NO: 2176422 - RNA, 19 nt, Artificial Sequence
  Description of Artificial Sequence: Synthetic oligonucleotide
ugaucaaugcgauaaagga

SEQ ID NO: 2176423 - RNA, 19 nt, Artificial Sequence
  Description of Artificial Sequence: Synthetic oligonucleotide
gauaaaggaacugugcagg

SEQ ID NO: 2176424 - RNA, 19 nt, Artificial Sequence
  Description of Artificial Sequence: Synthetic oligonucleotide
uuuggguugaucaaugcga

SEQ ID NO: 2176425 - RNA, 19 nt, Artificial Sequence
  Description of Artificial Sequence: Synthetic oligonucleotide
aaaugcaugggucucuuug

SEQ ID NO: 2176426 - RNA, 19 nt, Artificial Sequence
  Description of Artificial Sequence: Synthetic oligonucleotide
aucaaugcgauaaaggaac

SEQ ID NO: 2176427 - RNA, 19 nt, Artificial Sequence
  Description of Artificial Sequence: Synthetic oligonucleotide
uuugcaagaggcauuaagu

SEQ ID NO: 2176428 - RNA, 19 nt, Artificial Sequence
  Description of Artificial Sequence: Synthetic oligonucleotide
guaauguccaccuucuccg

SEQ ID NO: 2176429 - RNA, 19 nt, Artificial Sequence
  Description of Artificial Sequence: Synthetic oligonucleotide
aaugcaugggucucuuugg

SEQ ID NO: 2176430 - RNA, 19 nt, Artificial Sequence
  Description of Artificial Sequence: Synthetic oligonucleotide
cuaguuugcccacagaugc

SEQ ID NO: 2176431 - RNA, 19 nt, Artificial Sequence
  Description of Artificial Sequence: Synthetic oligonucleotide
aaauguagccauuuauuga

SEQ ID NO: 2176432 - RNA, 19 nt, Artificial Sequence
  Description of Artificial Sequence: Synthetic oligonucleotide
auacaagccauuuucuuuc

SEQ ID NO: 2176433 - RNA, 19 nt, Artificial Sequence
  Description of Artificial Sequence: Synthetic oligonucleotide
uggaaagaaaauucaauac

SEQ ID NO: 2176434 - RNA, 19 nt, Artificial Sequence
  Description of Artificial Sequence: Synthetic oligonucleotide
uuaauucgggcaaaguagc

SEQ ID NO: 2176435 - RNA, 19 nt, Artificial Sequence
  Description of Artificial Sequence: Synthetic oligonucleotide
aaauuaaguuguccuguuc

SEQ ID NO: 2176436 - RNA, 19 nt, Artificial Sequence
  Description of Artificial Sequence: Synthetic oligonucleotide
uucacuugccguuugaaca

SEQ ID NO: 2176437 - RNA, 19 nt, Artificial Sequence
  Description of Artificial Sequence: Synthetic oligonucleotide
aaaagauuagccaguagug

SEQ ID NO: 2176438 - RNA, 19 nt, Artificial Sequence
  Description of Artificial Sequence: Synthetic oligonucleotide
guuaauucgggcaaaguag

SEQ ID NO: 2176439 - RNA, 19 nt, Artificial Sequence
  Description of Artificial Sequence: Synthetic oligonucleotide
aauccaagcgucugaaaug

SEQ ID NO: 2176440 - RNA, 19 nt, Artificial Sequence
  Description of Artificial Sequence: Synthetic oligonucleotide
cuuuguuaaaucugggcag

SEQ ID NO: 2176441 - RNA, 19 nt, Artificial Sequence
  Description of Artificial Sequence: Synthetic oligonucleotide
aaugcgauaaaggaacugu

SEQ ID NO: 2176442 - RNA, 19 nt, Artificial Sequence
  Description of Artificial Sequence: Synthetic oligonucleotide
auagugcuucucuagaguc

SEQ ID NO: 2176443 - RNA, 19 nt, Artificial Sequence
  Description of Artificial Sequence: Synthetic oligonucleotide
aauucuaguuugcccacag

SEQ ID NO: 2176444 - RNA, 19 nt, Artificial Sequence
  Description of Artificial Sequence: Synthetic oligonucleotide
uggacaucagcaaaguugu

SEQ ID NO: 2176445 - RNA, 19 nt, Artificial Sequence
  Description of Artificial Sequence: Synthetic oligonucleotide
ucaucugaguucaaugggc

SEQ ID NO: 2176446 - RNA, 19 nt, Artificial Sequence
  Description of Artificial Sequence: Synthetic oligonucleotide
cucagaauugaauccaagc

SEQ ID NO: 2176447 - RNA, 19 nt, Artificial Sequence
  Description of Artificial Sequence: Synthetic oligonucleotide
ugccguuugaacaauuggc

SEQ ID NO: 2176448 - RNA, 19 nt, Artificial Sequence
  Description of Artificial Sequence: Synthetic oligonucleotide
uuaaucucucccaaaugca

SEQ ID NO: 2176449 - RNA, 19 nt, Artificial Sequence
  Description of Artificial Sequence: Synthetic oligonucleotide
aaaagcuccaggcagcuuu

SEQ ID NO: 2176450 - RNA, 19 nt, Artificial Sequence
  Description of Artificial Sequence: Synthetic oligonucleotide
ugaugacugaagaaaugag

SEQ ID NO: 2176451 - RNA, 19 nt, Artificial Sequence
  Description of Artificial Sequence: Synthetic oligonucleotide
caaaguuguccuuuagucc

SEQ ID NO: 2176452 - RNA, 19 nt, Artificial Sequence
  Description of Artificial Sequence: Synthetic oligonucleotide
agacuuggcacauggaaag

SEQ ID NO: 2176453 - RNA, 19 nt, Artificial Sequence
  Description of Artificial Sequence: Synthetic oligonucleotide
agaauugaauccaagcguc

SEQ ID NO: 2176454 - RNA, 19 nt, Artificial Sequence
  Description of Artificial Sequence: Synthetic oligonucleotide
agaggcauuaaguaaggca

SEQ ID NO: 2176455 - RNA, 19 nt, Artificial Sequence
  Description of Artificial Sequence: Synthetic oligonucleotide
uguccuguucuucucuugg

SEQ ID NO: 2176456 - RNA, 19 nt, Artificial Sequence
  Description of Artificial Sequence: Synthetic oligonucleotide
uauucuuuugcaaucucau

SEQ ID NO: 2176457 - RNA, 19 nt, Artificial Sequence
  Description of Artificial Sequence: Synthetic oligonucleotide
ugcgcauccaaaaucguga

SEQ ID NO: 2176458 - RNA, 19 nt, Artificial Sequence
  Description of Artificial Sequence: Synthetic oligonucleotide
ucuaguuugcccacagaug

SEQ ID NO: 2176459 - RNA, 19 nt, Artificial Sequence
  Description of Artificial Sequence: Synthetic oligonucleotide
aguaaggcacaccuccuac

SEQ ID NO: 2176460 - RNA, 19 nt, Artificial Sequence
  Description of Artificial Sequence: Synthetic oligonucleotide
uguagccauuuauugacag

SEQ ID NO: 2176461 - RNA, 19 nt, Artificial Sequence
  Description of Artificial Sequence: Synthetic oligonucleotide
uaaaucugggcagucaacc

SEQ ID NO: 2176462 - RNA, 19 nt, Artificial Sequence
  Description of Artificial Sequence: Synthetic oligonucleotide
uacaggaaagguaaauggu

SEQ ID NO: 2176463 - RNA, 19 nt, Artificial Sequence
  Description of Artificial Sequence: Synthetic oligonucleotide
ugcgauaaaggaacugugc

SEQ ID NO: 2176464 - RNA, 19 nt, Artificial Sequence
  Description of Artificial Sequence: Synthetic oligonucleotide
agucacaaaauuaaguugu

SEQ ID NO: 2176465 - RNA, 19 nt, Artificial Sequence
  Description of Artificial Sequence: Synthetic oligonucleotide
aguaucauagugguaaugu

SEQ ID NO: 2176466 - RNA, 19 nt, Artificial Sequence
  Description of Artificial Sequence: Synthetic oligonucleotide
aacugugcaggugagaagu

SEQ ID NO: 2176467 - RNA, 19 nt, Artificial Sequence
  Description of Artificial Sequence: Synthetic oligonucleotide
cuuuggguugaucaaugcg

SEQ ID NO: 2176468 - RNA, 19 nt, Artificial Sequence
  Description of Artificial Sequence: Synthetic oligonucleotide
gacaucagcaaaguugucc

SEQ ID NO: 2176469 - RNA, 19 nt, Artificial Sequence
  Description of Artificial Sequence: Synthetic oligonucleotide
guuugcaagaggcauuaag

SEQ ID NO: 2176470 - RNA, 19 nt, Artificial Sequence
  Description of Artificial Sequence: Synthetic oligonucleotide
gcaacuuccaucugcaggg

SEQ ID NO: 2176471 - RNA, 19 nt, Artificial Sequence
  Description of Artificial Sequence: Synthetic oligonucleotide
ggauaaaagcuccaggcag

SEQ ID NO: 2176472 - RNA, 19 nt, Artificial Sequence
  Description of Artificial Sequence: Synthetic oligonucleotide
ucugcaggguuaauucggg

SEQ ID NO: 2176473 - RNA, 19 nt, Artificial Sequence
  Description of Artificial Sequence: Synthetic oligonucleotide
caaggauaaaagcuccagg

SEQ ID NO: 2176474 - RNA, 19 nt, Artificial Sequence
  Description of Artificial Sequence: Synthetic oligonucleotide
auagugguaauguccaccu

SEQ ID NO: 2176475 - RNA, 19 nt, Artificial Sequence
  Description of Artificial Sequence: Synthetic oligonucleotide
aaugguuccuuuguuaaau

SEQ ID NO: 2176476 - RNA, 19 nt, Artificial Sequence
  Description of Artificial Sequence: Synthetic oligonucleotide
gaaguagccaagauacucc

SEQ ID NO: 2176477 - RNA, 19 nt, Artificial Sequence
  Description of Artificial Sequence: Synthetic oligonucleotide
aauugaauccaagcgucug

SEQ ID NO: 2176478 - RNA, 19 nt, Artificial Sequence
  Description of Artificial Sequence: Synthetic oligonucleotide
aaaauuaaguuguccuguu

SEQ ID NO: 2176479 - RNA, 19 nt, Artificial Sequence
  Description of Artificial Sequence: Synthetic oligonucleotide
gaacaauuggcaugaacuc

SEQ ID NO: 2176480 - RNA, 19 nt, Artificial Sequence
  Description of Artificial Sequence: Synthetic oligonucleotide
aacaauuggcaugaacuca

SEQ ID NO: 2176481 - RNA, 19 nt, Artificial Sequence
  Description of Artificial Sequence: Synthetic oligonucleotide
caagcgucugaaauggacc

SEQ ID NO: 2176482 - RNA, 19 nt, Artificial Sequence
  Description of Artificial Sequence: Synthetic oligonucleotide
aaagguaaaugguuccuuu

SEQ ID NO: 2176483 - RNA, 19 nt, Artificial Sequence
  Description of Artificial Sequence: Synthetic oligonucleotide
ugugcaggugagaaguagc

SEQ ID NO: 2176484 - RNA, 19 nt, Artificial Sequence
  Description of Artificial Sequence: Synthetic oligonucleotide
gaguucaaugggcaggaag

SEQ ID NO: 2176485 - RNA, 19 nt, Artificial Sequence
  Description of Artificial Sequence: Synthetic oligonucleotide
uucauucacaggacgguug

SEQ ID NO: 2176486 - RNA, 19 nt, Artificial Sequence
  Description of Artificial Sequence: Synthetic oligonucleotide
ugaaacgugccucccauuc

SEQ ID NO: 2176487 - RNA, 19 nt, Artificial Sequence
  Description of Artificial Sequence: Synthetic oligonucleotide
uuaggucauaaacuuuugu

SEQ ID NO: 2176488 - RNA, 19 nt, Artificial Sequence
  Description of Artificial Sequence: Synthetic oligonucleotide
aagcgucugaaauggaccu

SEQ ID NO: 2176489 - RNA, 19 nt, Artificial Sequence
  Description of Artificial Sequence: Synthetic oligonucleotide
aauucaauacaagccauuu

SEQ ID NO: 2176490 - RNA, 19 nt, Artificial Sequence
  Description of Artificial Sequence: Synthetic oligonucleotide
ucgcaaaucaagccccggg

SEQ ID NO: 2176491 - RNA, 19 nt, Artificial Sequence
  Description of Artificial Sequence: Synthetic oligonucleotide
auuggcaugaacucagaau

SEQ ID NO: 2176492 - RNA, 19 nt, Artificial Sequence
  Description of Artificial Sequence: Synthetic oligonucleotide
ugcaagaggcauuaaguaa

SEQ ID NO: 2176493 - RNA, 19 nt, Artificial Sequence
  Description of Artificial Sequence: Synthetic oligonucleotide
gaugccuuuuacaggaaag

SEQ ID NO: 2176494 - RNA, 19 nt, Artificial Sequence
  Description of Artificial Sequence: Synthetic oligonucleotide
cuggcagacaaaccaaagg

SEQ ID NO: 2176495 - RNA, 19 nt, Artificial Sequence
  Description of Artificial Sequence: Synthetic oligonucleotide
aaguagccaagauacucca

SEQ ID NO: 2176496 - RNA, 19 nt, Artificial Sequence
  Description of Artificial Sequence: Synthetic oligonucleotide
uuuggcuguacuucuccag

SEQ ID NO: 2176497 - RNA, 19 nt, Artificial Sequence
  Description of Artificial Sequence: Synthetic oligonucleotide
ucugccucaugcaagucac

SEQ ID NO: 2176498 - RNA, 19 nt, Artificial Sequence
  Description of Artificial Sequence: Synthetic oligonucleotide
ugcaggguuaauucgggca

SEQ ID NO: 2176499 - RNA, 19 nt, Artificial Sequence
  Description of Artificial Sequence: Synthetic oligonucleotide
uugaacaauuggcaugaac

SEQ ID NO: 2176500 - RNA, 19 nt, Artificial Sequence
  Description of Artificial Sequence: Synthetic oligonucleotide
cacaaugaaacgugccucc

SEQ ID NO: 2176501 - RNA, 19 nt, Artificial Sequence
  Description of Artificial Sequence: Synthetic oligonucleotide
auccaagcgucugaaaugg

SEQ ID NO: 2176502 - RNA, 19 nt, Artificial Sequence
  Description of Artificial Sequence: Synthetic oligonucleotide
agauuagccaguagugcgc

SEQ ID NO: 2176503 - RNA, 19 nt, Artificial Sequence
  Description of Artificial Sequence: Synthetic oligonucleotide
aggauaaaagcuccaggca

SEQ ID NO: 2176504 - RNA, 19 nt, Artificial Sequence
  Description of Artificial Sequence: Synthetic oligonucleotide
uccagucgcaaaucaagcc

SEQ ID NO: 2176505 - RNA, 19 nt, Artificial Sequence
  Description of Artificial Sequence: Synthetic oligonucleotide
uguccuuuagucccuucug

SEQ ID NO: 2176506 - RNA, 19 nt, Artificial Sequence
  Description of Artificial Sequence: Synthetic oligonucleotide
aaugaccuugccagguugg

SEQ ID NO: 2176507 - RNA, 19 nt, Artificial Sequence
  Description of Artificial Sequence: Synthetic oligonucleotide
uucugcaaaacuucagcaa

SEQ ID NO: 2176508 - RNA, 19 nt, Artificial Sequence
  Description of Artificial Sequence: Synthetic oligonucleotide
aguucaaugggcaggaaga

SEQ ID NO: 2176509 - RNA, 19 nt, Artificial Sequence
  Description of Artificial Sequence: Synthetic oligonucleotide
acaauuggcaugaacucag

SEQ ID NO: 2176510 - RNA, 19 nt, Artificial Sequence
  Description of Artificial Sequence: Synthetic oligonucleotide
caagaggcauuaaguaagg

SEQ ID NO: 2176511 - RNA, 19 nt, Artificial Sequence
  Description of Artificial Sequence: Synthetic oligonucleotide
aaaacuucagcaagcuccu

SEQ ID NO: 2176512 - RNA, 19 nt, Artificial Sequence
  Description of Artificial Sequence: Synthetic oligonucleotide
uuucacuugccguuugaac

SEQ ID NO: 2176513 - RNA, 19 nt, Artificial Sequence
  Description of Artificial Sequence: Synthetic oligonucleotide
caagauacuccacuguguc

SEQ ID NO: 2176514 - RNA, 19 nt, Artificial Sequence
  Description of Artificial Sequence: Synthetic oligonucleotide
auugaauccaagcgucuga

SEQ ID NO: 2176515 - RNA, 19 nt, Artificial Sequence
  Description of Artificial Sequence: Synthetic oligonucleotide
ucauucacaggacgguugu

SEQ ID NO: 2176516 - RNA, 19 nt, Artificial Sequence
  Description of Artificial Sequence: Synthetic oligonucleotide
gguaguaucauagugguaa

SEQ ID NO: 2176517 - RNA, 19 nt, Artificial Sequence
  Description of Artificial Sequence: Synthetic oligonucleotide
uuuguuaaaucugggcagu

SEQ ID NO: 2176518 - RNA, 19 nt, Artificial Sequence
  Description of Artificial Sequence: Synthetic oligonucleotide
aaacucugcuggcaugaug

SEQ ID NO: 2176519 - RNA, 19 nt, Artificial Sequence
  Description of Artificial Sequence: Synthetic oligonucleotide
cauagugguaauguccacc

SEQ ID NO: 2176520 - RNA, 19 nt, Artificial Sequence
  Description of Artificial Sequence: Synthetic oligonucleotide
uuuuacaggaaagguaaau

SEQ ID NO: 2176521 - RNA, 19 nt, Artificial Sequence
  Description of Artificial Sequence: Synthetic oligonucleotide
gacgguuguuuucacuugc

SEQ ID NO: 2176522 - RNA, 19 nt, Artificial Sequence
  Description of Artificial Sequence: Synthetic oligonucleotide
aagaaaugagugugcucca

SEQ ID NO: 2176523 - RNA, 19 nt, Artificial Sequence
  Description of Artificial Sequence: Synthetic oligonucleotide
uugcaagaggcauuaagua

SEQ ID NO: 2176524 - RNA, 19 nt, Artificial Sequence
  Description of Artificial Sequence: Synthetic oligonucleotide
cugcaaaacuucagcaagc

SEQ ID NO: 2176525 - RNA, 19 nt, Artificial Sequence
  Description of Artificial Sequence: Synthetic oligonucleotide
uucccagcaaggcugcuca

SEQ ID NO: 2176526 - RNA, 19 nt, Artificial Sequence
  Description of Artificial Sequence: Synthetic oligonucleotide
ggcaacuuccaucugcagg

SEQ ID NO: 2176527 - RNA, 19 nt, Artificial Sequence
  Description of Artificial Sequence: Synthetic oligonucleotide
guuugaacaauuggcauga

SEQ ID NO: 2176528 - RNA, 19 nt, Artificial Sequence
  Description of Artificial Sequence: Synthetic oligonucleotide
aauggaccugccccugcuc

SEQ ID NO: 2176529 - RNA, 19 nt, Artificial Sequence
  Description of Artificial Sequence: Synthetic oligonucleotide
uuuguuugcaagaggcauu

SEQ ID NO: 2176530 - RNA, 19 nt, Artificial Sequence
  Description of Artificial Sequence: Synthetic oligonucleotide
cugcaauucuaguuugccc

SEQ ID NO: 2176531 - RNA, 19 nt, Artificial Sequence
  Description of Artificial Sequence: Synthetic oligonucleotide
caaggcugcucacacacag

SEQ ID NO: 2176532 - RNA, 19 nt, Artificial Sequence
  Description of Artificial Sequence: Synthetic oligonucleotide
aaaugguuccuuuguuaaa

SEQ ID NO: 2176533 - RNA, 19 nt, Artificial Sequence
  Description of Artificial Sequence: Synthetic oligonucleotide
ucuuuggguugaucaaugc

SEQ ID NO: 2176534 - RNA, 19 nt, Artificial Sequence
  Description of Artificial Sequence: Synthetic oligonucleotide
aaucucucccaaaugcaug

SEQ ID NO: 2176535 - RNA, 19 nt, Artificial Sequence
  Description of Artificial Sequence: Synthetic oligonucleotide
acaaugaaacgugccuccc

SEQ ID NO: 2176536 - RNA, 19 nt, Artificial Sequence
  Description of Artificial Sequence: Synthetic oligonucleotide
cauuaaguaaggcacaccu

SEQ ID NO: 2176537 - RNA, 19 nt, Artificial Sequence
  Description of Artificial Sequence: Synthetic oligonucleotide
auuaaguaaggcacaccuc

SEQ ID NO: 2176538 - RNA, 19 nt, Artificial Sequence
  Description of Artificial Sequence: Synthetic oligonucleotide
cuucucuagagucugccuc

SEQ ID NO: 2176539 - RNA, 19 nt, Artificial Sequence
  Description of Artificial Sequence: Synthetic oligonucleotide
auaaaggaacugugcaggu

SEQ ID NO: 2176540 - RNA, 19 nt, Artificial Sequence
  Description of Artificial Sequence: Synthetic oligonucleotide
uggcaugaacucagaauug

SEQ ID NO: 2176541 - RNA, 19 nt, Artificial Sequence
  Description of Artificial Sequence: Synthetic oligonucleotide
aaauggaccugccccugcu

SEQ ID NO: 2176542 - RNA, 19 nt, Artificial Sequence
  Description of Artificial Sequence: Synthetic oligonucleotide
gcaagaggcauuaaguaag

SEQ ID NO: 2176543 - RNA, 19 nt, Artificial Sequence
  Description of Artificial Sequence: Synthetic oligonucleotide
uacuucuccagcaggcaac

SEQ ID NO: 2176544 - RNA, 19 nt, Artificial Sequence
  Description of Artificial Sequence: Synthetic oligonucleotide
guuaaaucugggcagucaa

SEQ ID NO: 2176545 - RNA, 19 nt, Artificial Sequence
  Description of Artificial Sequence: Synthetic oligonucleotide
caggaagaaaacucugcug

SEQ ID NO: 2176546 - RNA, 19 nt, Artificial Sequence
  Description of Artificial Sequence: Synthetic oligonucleotide
cuccagucgcaaaucaagc

SEQ ID NO: 2176547 - RNA, 19 nt, Artificial Sequence
  Description of Artificial Sequence: Synthetic oligonucleotide
augcaugggucucuuuggg

SEQ ID NO: 2176548 - RNA, 19 nt, Artificial Sequence
  Description of Artificial Sequence: Synthetic oligonucleotide
gaaacgugccucccauucc

SEQ ID NO: 2176549 - RNA, 19 nt, Artificial Sequence
  Description of Artificial Sequence: Synthetic oligonucleotide
gagccuucaucucauaaaa

SEQ ID NO: 2176550 - RNA, 19 nt, Artificial Sequence
  Description of Artificial Sequence: Synthetic oligonucleotide
cuucugcaaaacuucagca

SEQ ID NO: 2176551 - RNA, 19 nt, Artificial Sequence
  Description of Artificial Sequence: Synthetic oligonucleotide
ucaaugcgauaaaggaacu

SEQ ID NO: 2176552 - RNA, 19 nt, Artificial Sequence
  Description of Artificial Sequence: Synthetic oligonucleotide
augaugugggcccuugaca

SEQ ID NO: 2176553 - RNA, 19 nt, Artificial Sequence
  Description of Artificial Sequence: Synthetic oligonucleotide
aucugcaggguuaauucgg

SEQ ID NO: 2176554 - RNA, 19 nt, Artificial Sequence
  Description of Artificial Sequence: Synthetic oligonucleotide
guagugcgcauccaaaauc

SEQ ID NO: 2176555 - RNA, 19 nt, Artificial Sequence
  Description of Artificial Sequence: Synthetic oligonucleotide
gaauccaagcgucugaaau

SEQ ID NO: 2176556 - RNA, 19 nt, Artificial Sequence
  Description of Artificial Sequence: Synthetic oligonucleotide
aguagugcgcauccaaaau

SEQ ID NO: 2176557 - RNA, 19 nt, Artificial Sequence
  Description of Artificial Sequence: Synthetic oligonucleotide
gaucaaugcgauaaaggaa

SEQ ID NO: 2176558 - RNA, 19 nt, Artificial Sequence
  Description of Artificial Sequence: Synthetic oligonucleotide
uaauucgggcaaaguagcu

SEQ ID NO: 2176559 - RNA, 19 nt, Artificial Sequence
  Description of Artificial Sequence: Synthetic oligonucleotide
uuggguugaucaaugcgau

SEQ ID NO: 2176560 - RNA, 19 nt, Artificial Sequence
  Description of Artificial Sequence: Synthetic oligonucleotide
ugacauuccccuucugcac

SEQ ID NO: 2176561 - RNA, 19 nt, Artificial Sequence
  Description of Artificial Sequence: Synthetic oligonucleotide
uccaaggauaaaagcucca

SEQ ID NO: 2176562 - RNA, 19 nt, Artificial Sequence
  Description of Artificial Sequence: Synthetic oligonucleotide
guagccauuuauugacagc

SEQ ID NO: 2176563 - RNA, 19 nt, Artificial Sequence
  Description of Artificial Sequence: Synthetic oligonucleotide
caggcuuguuuccauagug

SEQ ID NO: 2176564 - RNA, 19 nt, Artificial Sequence
  Description of Artificial Sequence: Synthetic oligonucleotide
ucacacacagcuguuggcu

SEQ ID NO: 2176565 - RNA, 19 nt, Artificial Sequence
  Description of Artificial Sequence: Synthetic oligonucleotide
auucgggcaaaguagcuuu

SEQ ID NO: 2176566 - RNA, 19 nt, Artificial Sequence
  Description of Artificial Sequence: Synthetic oligonucleotide
aggacgguuguuuucacuu

SEQ ID NO: 2176567 - RNA, 19 nt, Artificial Sequence
  Description of Artificial Sequence: Synthetic oligonucleotide
guaucauagugguaauguc

SEQ ID NO: 2176568 - RNA, 19 nt, Artificial Sequence
  Description of Artificial Sequence: Synthetic oligonucleotide
uccuacuucugcaauucua

SEQ ID NO: 2176569 - RNA, 19 nt, Artificial Sequence
  Description of Artificial Sequence: Synthetic oligonucleotide
uuaaguuguccuguucuuc

SEQ ID NO: 2176570 - RNA, 19 nt, Artificial Sequence
  Description of Artificial Sequence: Synthetic oligonucleotide
cuguucuucucuuggcuug

SEQ ID NO: 2176571 - RNA, 19 nt, Artificial Sequence
  Description of Artificial Sequence: Synthetic oligonucleotide
uaaggcacaccuccuacuu

SEQ ID NO: 2176572 - RNA, 19 nt, Artificial Sequence
  Description of Artificial Sequence: Synthetic oligonucleotide
gucaaccacagagaccugg

SEQ ID NO: 2176573 - RNA, 19 nt, Artificial Sequence
  Description of Artificial Sequence: Synthetic oligonucleotide
auuaaguuguccuguucuu

SEQ ID NO: 2176574 - RNA, 19 nt, Artificial Sequence
  Description of Artificial Sequence: Synthetic oligonucleotide
caugaugugggcccuugac

SEQ ID NO: 2176575 - RNA, 19 nt, Artificial Sequence
  Description of Artificial Sequence: Synthetic oligonucleotide
uggcacauggaaagaaaau

SEQ ID NO: 2176576 - RNA, 19 nt, Artificial Sequence
  Description of Artificial Sequence: Synthetic oligonucleotide
augcaagucacaaaauuaa

SEQ ID NO: 2176577 - RNA, 19 nt, Artificial Sequence
  Description of Artificial Sequence: Synthetic oligonucleotide
guccuuuagucccuucugc

SEQ ID NO: 2176578 - RNA, 19 nt, Artificial Sequence
  Description of Artificial Sequence: Synthetic oligonucleotide
aauucgggcaaaguagcuu

SEQ ID NO: 2176579 - RNA, 19 nt, Artificial Sequence
  Description of Artificial Sequence: Synthetic oligonucleotide
ucugggcagucaaccacag

SEQ ID NO: 2176580 - RNA, 19 nt, Artificial Sequence
  Description of Artificial Sequence: Synthetic oligonucleotide
aaguaaggcacaccuccua

SEQ ID NO: 2176581 - RNA, 19 nt, Artificial Sequence
  Description of Artificial Sequence: Synthetic oligonucleotide
gguuaauucgggcaaagua

SEQ ID NO: 2176582 - RNA, 19 nt, Artificial Sequence
  Description of Artificial Sequence: Synthetic oligonucleotide
ucccauucccacaggcuug

SEQ ID NO: 2176583 - RNA, 19 nt, Artificial Sequence
  Description of Artificial Sequence: Synthetic oligonucleotide
caaaggagccuucaucuca

SEQ ID NO: 2176584 - RNA, 19 nt, Artificial Sequence
  Description of Artificial Sequence: Synthetic oligonucleotide
gcagacaaaccaaaggagc

SEQ ID NO: 2176585 - RNA, 19 nt, Artificial Sequence
  Description of Artificial Sequence: Synthetic oligonucleotide
uaguaucauagugguaaug

SEQ ID NO: 2176586 - RNA, 19 nt, Artificial Sequence
  Description of Artificial Sequence: Synthetic oligonucleotide
cucacacacagcuguuggc

SEQ ID NO: 2176587 - RNA, 19 nt, Artificial Sequence
  Description of Artificial Sequence: Synthetic oligonucleotide
ccuuuuacaggaaagguaa

SEQ ID NO: 2176588 - RNA, 19 nt, Artificial Sequence
  Description of Artificial Sequence: Synthetic oligonucleotide
ccuuuguuaaaucugggca

SEQ ID NO: 2176589 - RNA, 19 nt, Artificial Sequence
  Description of Artificial Sequence: Synthetic oligonucleotide
gaaauggaccugccccugc

SEQ ID NO: 2176590 - RNA, 19 nt, Artificial Sequence
  Description of Artificial Sequence: Synthetic oligonucleotide
agagaccuggacaucagca

SEQ ID NO: 2176591 - RNA, 19 nt, Artificial Sequence
  Description of Artificial Sequence: Synthetic oligonucleotide
cagucaaccacagagaccu

SEQ ID NO: 2176592 - RNA, 19 nt, Artificial Sequence
  Description of Artificial Sequence: Synthetic oligonucleotide
ccagucgcaaaucaagccc

SEQ ID NO: 2176593 - RNA, 19 nt, Artificial Sequence
  Description of Artificial Sequence: Synthetic oligonucleotide
cagaauugaauccaagcgu

SEQ ID NO: 2176594 - RNA, 19 nt, Artificial Sequence
  Description of Artificial Sequence: Synthetic oligonucleotide
uagucccuucugcaaaacu

SEQ ID NO: 2176595 - RNA, 19 nt, Artificial Sequence
  Description of Artificial Sequence: Synthetic oligonucleotide
caaugaccuugccagguug

SEQ ID NO: 2176596 - RNA, 19 nt, Artificial Sequence
  Description of Artificial Sequence: Synthetic oligonucleotide
agaccuggacaucagcaaa

SEQ ID NO: 2176597 - RNA, 19 nt, Artificial Sequence
  Description of Artificial Sequence: Synthetic oligonucleotide
caggugagaaguagccaag

SEQ ID NO: 2176598 - RNA, 19 nt, Artificial Sequence
  Description of Artificial Sequence: Synthetic oligonucleotide
guagccaagauacuccacu

SEQ ID NO: 2176599 - RNA, 19 nt, Artificial Sequence
  Description of Artificial Sequence: Synthetic oligonucleotide
gguuccuuuguuaaaucug

SEQ ID NO: 2176600 - RNA, 19 nt, Artificial Sequence
  Description of Artificial Sequence: Synthetic oligonucleotide
uuguuugcaagaggcauua

SEQ ID NO: 2176601 - RNA, 19 nt, Artificial Sequence
  Description of Artificial Sequence: Synthetic oligonucleotide
auaaaagcuccaggcagcu

SEQ ID NO: 2176602 - RNA, 19 nt, Artificial Sequence
  Description of Artificial Sequence: Synthetic oligonucleotide
gucugaaauggaccugccc

SEQ ID NO: 2176603 - RNA, 19 nt, Artificial Sequence
  Description of Artificial Sequence: Synthetic oligonucleotide
agacaaaccaaaggagccu

SEQ ID NO: 2176604 - RNA, 19 nt, Artificial Sequence
  Description of Artificial Sequence: Synthetic oligonucleotide
auucuuuugcaaucucauu

SEQ ID NO: 2176605 - RNA, 19 nt, Artificial Sequence
  Description of Artificial Sequence: Synthetic oligonucleotide
acgguuguuuucacuugcc

SEQ ID NO: 2176606 - RNA, 19 nt, Artificial Sequence
  Description of Artificial Sequence: Synthetic oligonucleotide
augaccuugccagguuggc

SEQ ID NO: 2176607 - RNA, 19 nt, Artificial Sequence
  Description of Artificial Sequence: Synthetic oligonucleotide
uuuucacuugccguuugaa

SEQ ID NO: 2176608 - RNA, 19 nt, Artificial Sequence
  Description of Artificial Sequence: Synthetic oligonucleotide
cagguuggcccucacuggc

SEQ ID NO: 2176609 - RNA, 19 nt, Artificial Sequence
  Description of Artificial Sequence: Synthetic oligonucleotide
gcuguacuucuccagcagg

SEQ ID NO: 2176610 - RNA, 19 nt, Artificial Sequence
  Description of Artificial Sequence: Synthetic oligonucleotide
aaaggagccuucaucucau

SEQ ID NO: 2176611 - RNA, 19 nt, Artificial Sequence
  Description of Artificial Sequence: Synthetic oligonucleotide
gcuggcaugaugugggccc

SEQ ID NO: 2176612 - RNA, 19 nt, Artificial Sequence
  Description of Artificial Sequence: Synthetic oligonucleotide
acuccacugugucuggggu

SEQ ID NO: 2176613 - RNA, 19 nt, Artificial Sequence
  Description of Artificial Sequence: Synthetic oligonucleotide
uuagccaguagugcgcauc

SEQ ID NO: 2176614 - RNA, 19 nt, Artificial Sequence
  Description of Artificial Sequence: Synthetic oligonucleotide
ggcagucaaccacagagac

SEQ ID NO: 2176615 - RNA, 19 nt, Artificial Sequence
  Description of Artificial Sequence: Synthetic oligonucleotide
auccaaaaucgugauauuu

SEQ ID NO: 2176616 - RNA, 19 nt, Artificial Sequence
  Description of Artificial Sequence: Synthetic oligonucleotide
gcgauaaaggaacugugca

SEQ ID NO: 2176617 - RNA, 19 nt, Artificial Sequence
  Description of Artificial Sequence: Synthetic oligonucleotide
uguucuucucuuggcuugc

SEQ ID NO: 2176618 - RNA, 19 nt, Artificial Sequence
  Description of Artificial Sequence: Synthetic oligonucleotide
ugagugugcuccagucgca

SEQ ID NO: 2176619 - RNA, 19 nt, Artificial Sequence
  Description of Artificial Sequence: Synthetic oligonucleotide
gagaccuggacaucagcaa

SEQ ID NO: 2176620 - RNA, 19 nt, Artificial Sequence
  Description of Artificial Sequence: Synthetic oligonucleotide
ugcaugggucucuuugggu

SEQ ID NO: 2176621 - RNA, 19 nt, Artificial Sequence
  Description of Artificial Sequence: Synthetic oligonucleotide
ucaaugaccuugccagguu

SEQ ID NO: 2176622 - RNA, 19 nt, Artificial Sequence
  Description of Artificial Sequence: Synthetic oligonucleotide
cugugucugggguaguauc

SEQ ID NO: 2176623 - RNA, 19 nt, Artificial Sequence
  Description of Artificial Sequence: Synthetic oligonucleotide
ucauagugguaauguccac

SEQ ID NO: 2176624 - RNA, 19 nt, Artificial Sequence
  Description of Artificial Sequence: Synthetic oligonucleotide
ugggcccuugacauucccc

SEQ ID NO: 2176625 - RNA, 19 nt, Artificial Sequence
  Description of Artificial Sequence: Synthetic oligonucleotide
uucaaugggcaggaagaaa

SEQ ID NO: 2176626 - RNA, 19 nt, Artificial Sequence
  Description of Artificial Sequence: Synthetic oligonucleotide
aaggaacugugcaggugag

SEQ ID NO: 2176627 - RNA, 19 nt, Artificial Sequence
  Description of Artificial Sequence: Synthetic oligonucleotide
guuguuuucacuugccguu

SEQ ID NO: 2176628 - RNA, 19 nt, Artificial Sequence
  Description of Artificial Sequence: Synthetic oligonucleotide
acucagaauugaauccaag

SEQ ID NO: 2176629 - RNA, 19 nt, Artificial Sequence
  Description of Artificial Sequence: Synthetic oligonucleotide
ugcaggugagaaguagcca

SEQ ID NO: 2176630 - RNA, 19 nt, Artificial Sequence
  Description of Artificial Sequence: Synthetic oligonucleotide
cagacuuggcacauggaaa

SEQ ID NO: 2176631 - RNA, 19 nt, Artificial Sequence
  Description of Artificial Sequence: Synthetic oligonucleotide
augcgauaaaggaacugug

SEQ ID NO: 2176632 - RNA, 19 nt, Artificial Sequence
  Description of Artificial Sequence: Synthetic oligonucleotide
acaggcuuguuuccauagu

SEQ ID NO: 2176633 - RNA, 19 nt, Artificial Sequence
  Description of Artificial Sequence: Synthetic oligonucleotide
aguagccaagauacuccac

SEQ ID NO: 2176634 - RNA, 19 nt, Artificial Sequence
  Description of Artificial Sequence: Synthetic oligonucleotide
cacacacagcuguuggcug

SEQ ID NO: 2176635 - RNA, 19 nt, Artificial Sequence
  Description of Artificial Sequence: Synthetic oligonucleotide
uccaucugcaggguuaauu

SEQ ID NO: 2176636 - RNA, 19 nt, Artificial Sequence
  Description of Artificial Sequence: Synthetic oligonucleotide
ccaucugcaggguuaauuc

SEQ ID NO: 2176637 - RNA, 19 nt, Artificial Sequence
  Description of Artificial Sequence: Synthetic oligonucleotide
gauuagccaguagugcgca

SEQ ID NO: 2176638 - RNA, 19 nt, Artificial Sequence
  Description of Artificial Sequence: Synthetic oligonucleotide
acgugccucccauucccac

SEQ ID NO: 2176639 - RNA, 19 nt, Artificial Sequence
  Description of Artificial Sequence: Synthetic oligonucleotide
aggagccuucaucucauaa

SEQ ID NO: 2176640 - RNA, 19 nt, Artificial Sequence
  Description of Artificial Sequence: Synthetic oligonucleotide
caaugcgauaaaggaacug

SEQ ID NO: 2176641 - RNA, 19 nt, Artificial Sequence
  Description of Artificial Sequence: Synthetic oligonucleotide
auucacaggacgguuguuu

SEQ ID NO: 2176642 - RNA, 19 nt, Artificial Sequence
  Description of Artificial Sequence: Synthetic oligonucleotide
cuagagucugccucaugca

SEQ ID NO: 2176643 - RNA, 19 nt, Artificial Sequence
  Description of Artificial Sequence: Synthetic oligonucleotide
aacuggcagacaaaccaaa

SEQ ID NO: 2176644 - RNA, 19 nt, Artificial Sequence
  Description of Artificial Sequence: Synthetic oligonucleotide
uccagacuuggcacaugga

SEQ ID NO: 2176645 - RNA, 19 nt, Artificial Sequence
  Description of Artificial Sequence: Synthetic oligonucleotide
ggguugaucaaugcgauaa

SEQ ID NO: 2176646 - RNA, 19 nt, Artificial Sequence
  Description of Artificial Sequence: Synthetic oligonucleotide
ugaccuugccagguuggcc

SEQ ID NO: 2176647 - RNA, 19 nt, Artificial Sequence
  Description of Artificial Sequence: Synthetic oligonucleotide
ugcucacacacagcuguug

SEQ ID NO: 2176648 - RNA, 19 nt, Artificial Sequence
  Description of Artificial Sequence: Synthetic oligonucleotide
cguuugaacaauuggcaug

SEQ ID NO: 2176649 - RNA, 19 nt, Artificial Sequence
  Description of Artificial Sequence: Synthetic oligonucleotide
aggguuaauucgggcaaag

SEQ ID NO: 2176650 - RNA, 19 nt, Artificial Sequence
  Description of Artificial Sequence: Synthetic oligonucleotide
cugugcaggugagaaguag

SEQ ID NO: 2176651 - RNA, 19 nt, Artificial Sequence
  Description of Artificial Sequence: Synthetic oligonucleotide
caugaacucagaauugaau

SEQ ID NO: 2176652 - RNA, 19 nt, Artificial Sequence
  Description of Artificial Sequence: Synthetic oligonucleotide
gcuccagucgcaaaucaag

SEQ ID NO: 2176653 - RNA, 19 nt, Artificial Sequence
  Description of Artificial Sequence: Synthetic oligonucleotide
ccaagcgucugaaauggac

SEQ ID NO: 2176654 - RNA, 19 nt, Artificial Sequence
  Description of Artificial Sequence: Synthetic oligonucleotide
ugugcuccagucgcaaauc

SEQ ID NO: 2176655 - RNA, 19 nt, Artificial Sequence
  Description of Artificial Sequence: Synthetic oligonucleotide
cugcaggguuaauucgggc

SEQ ID NO: 2176656 - RNA, 19 nt, Artificial Sequence
  Description of Artificial Sequence: Synthetic oligonucleotide
gcaggugagaaguagccaa

SEQ ID NO: 2176657 - RNA, 19 nt, Artificial Sequence
  Description of Artificial Sequence: Synthetic oligonucleotide
gugcgcauccaaaaucgug

SEQ ID NO: 2176658 - RNA, 19 nt, Artificial Sequence
  Description of Artificial Sequence: Synthetic oligonucleotide
uccaagcgucugaaaugga

SEQ ID NO: 2176659 - RNA, 19 nt, Artificial Sequence
  Description of Artificial Sequence: Synthetic oligonucleotide
uuguuaaaucugggcaguc

SEQ ID NO: 2176660 - RNA, 19 nt, Artificial Sequence
  Description of Artificial Sequence: Synthetic oligonucleotide
uucgggcaaaguagcuuuc

SEQ ID NO: 2176661 - RNA, 19 nt, Artificial Sequence
  Description of Artificial Sequence: Synthetic oligonucleotide
ugcuggcaugaugugggcc

SEQ ID NO: 2176662 - RNA, 19 nt, Artificial Sequence
  Description of Artificial Sequence: Synthetic oligonucleotide
ggaacugugcaggugagaa

SEQ ID NO: 2176663 - RNA, 19 nt, Artificial Sequence
  Description of Artificial Sequence: Synthetic oligonucleotide
ggagccuucaucucauaaa

SEQ ID NO: 2176664 - RNA, 19 nt, Artificial Sequence
  Description of Artificial Sequence: Synthetic oligonucleotide
uuagucccuucugcaaaac

SEQ ID NO: 2176665 - RNA, 19 nt, Artificial Sequence
  Description of Artificial Sequence: Synthetic oligonucleotide
gcauccaaaaucgugauau

SEQ ID NO: 2176666 - RNA, 19 nt, Artificial Sequence
  Description of Artificial Sequence: Synthetic oligonucleotide
gguuguuuucacuugccgu

SEQ ID NO: 2176667 - RNA, 19 nt, Artificial Sequence
  Description of Artificial Sequence: Synthetic oligonucleotide
caaugaaacgugccuccca

SEQ ID NO: 2176668 - RNA, 19 nt, Artificial Sequence
  Description of Artificial Sequence: Synthetic oligonucleotide
ugugggcccuugacauucc

SEQ ID NO: 2176669 - RNA, 19 nt, Artificial Sequence
  Description of Artificial Sequence: Synthetic oligonucleotide
caaccacagagaccuggac

SEQ ID NO: 2176670 - RNA, 19 nt, Artificial Sequence
  Description of Artificial Sequence: Synthetic oligonucleotide
gagucugccucaugcaagu

SEQ ID NO: 2176671 - RNA, 19 nt, Artificial Sequence
  Description of Artificial Sequence: Synthetic oligonucleotide
caaaucaagccccgggucu

SEQ ID NO: 2176672 - RNA, 19 nt, Artificial Sequence
  Description of Artificial Sequence: Synthetic oligonucleotide
cauagugcuucucuagagu

SEQ ID NO: 2176673 - RNA, 19 nt, Artificial Sequence
  Description of Artificial Sequence: Synthetic oligonucleotide
acucugcuggcaugaugug

SEQ ID NO: 2176674 - RNA, 19 nt, Artificial Sequence
  Description of Artificial Sequence: Synthetic oligonucleotide
ccaaggauaaaagcuccag

SEQ ID NO: 2176675 - RNA, 19 nt, Artificial Sequence
  Description of Artificial Sequence: Synthetic oligonucleotide
ccauuuauugacagcuuca

SEQ ID NO: 2176676 - RNA, 19 nt, Artificial Sequence
  Description of Artificial Sequence: Synthetic oligonucleotide
gcaauucuaguuugcccac

SEQ ID NO: 2176677 - RNA, 19 nt, Artificial Sequence
  Description of Artificial Sequence: Synthetic oligonucleotide
ggcauuaaguaaggcacac

SEQ ID NO: 2176678 - RNA, 19 nt, Artificial Sequence
  Description of Artificial Sequence: Synthetic oligonucleotide
caguagugcgcauccaaaa

SEQ ID NO: 2176679 - RNA, 19 nt, Artificial Sequence
  Description of Artificial Sequence: Synthetic oligonucleotide
ugucugggguaguaucaua

SEQ ID NO: 2176680 - RNA, 19 nt, Artificial Sequence
  Description of Artificial Sequence: Synthetic oligonucleotide
gucgcaaaucaagccccgg

SEQ ID NO: 2176681 - RNA, 19 nt, Artificial Sequence
  Description of Artificial Sequence: Synthetic oligonucleotide
ggacgguuguuuucacuug

SEQ ID NO: 2176682 - RNA, 19 nt, Artificial Sequence
  Description of Artificial Sequence: Synthetic oligonucleotide
acauuccccuucugcacaa

SEQ ID NO: 2176683 - RNA, 19 nt, Artificial Sequence
  Description of Artificial Sequence: Synthetic oligonucleotide
gaauugaauccaagcgucu

SEQ ID NO: 2176684 - RNA, 19 nt, Artificial Sequence
  Description of Artificial Sequence: Synthetic oligonucleotide
gcuuuaaucucucccaaau

SEQ ID NO: 2176685 - RNA, 19 nt, Artificial Sequence
  Description of Artificial Sequence: Synthetic oligonucleotide
gggguaguaucauaguggu

SEQ ID NO: 2176686 - RNA, 19 nt, Artificial Sequence
  Description of Artificial Sequence: Synthetic oligonucleotide
gcaagucacaaaauuaagu

SEQ ID NO: 2176687 - RNA, 19 nt, Artificial Sequence
  Description of Artificial Sequence: Synthetic oligonucleotide
auguagccauuuauugaca

SEQ ID NO: 2176688 - RNA, 19 nt, Artificial Sequence
  Description of Artificial Sequence: Synthetic oligonucleotide
uggguugaucaaugcgaua

SEQ ID NO: 2176689 - RNA, 19 nt, Artificial Sequence
  Description of Artificial Sequence: Synthetic oligonucleotide
aaagcuccaggcagcuuua

SEQ ID NO: 2176690 - RNA, 19 nt, Artificial Sequence
  Description of Artificial Sequence: Synthetic oligonucleotide
guaaggcacaccuccuacu

SEQ ID NO: 2176691 - RNA, 19 nt, Artificial Sequence
  Description of Artificial Sequence: Synthetic oligonucleotide
cuucugcacaaugaaacgu

SEQ ID NO: 2176692 - RNA, 19 nt, Artificial Sequence
  Description of Artificial Sequence: Synthetic oligonucleotide
gcacaaugaaacgugccuc

SEQ ID NO: 2176693 - RNA, 19 nt, Artificial Sequence
  Description of Artificial Sequence: Synthetic oligonucleotide
agugugcuccagucgcaaa

SEQ ID NO: 2176694 - RNA, 19 nt, Artificial Sequence
  Description of Artificial Sequence: Synthetic oligonucleotide
uguuuccauagugcuucuc

SEQ ID NO: 2176695 - RNA, 19 nt, Artificial Sequence
  Description of Artificial Sequence: Synthetic oligonucleotide
acugugucugggguaguau

SEQ ID NO: 2176696 - RNA, 19 nt, Artificial Sequence
  Description of Artificial Sequence: Synthetic oligonucleotide
uuugaacaauuggcaugaa

SEQ ID NO: 2176697 - RNA, 19 nt, Artificial Sequence
  Description of Artificial Sequence: Synthetic oligonucleotide
caauuggcaugaacucaga

SEQ ID NO: 2176698 - RNA, 19 nt, Artificial Sequence
  Description of Artificial Sequence: Synthetic oligonucleotide
uagugguaauguccaccuu

SEQ ID NO: 2176699 - RNA, 19 nt, Artificial Sequence
  Description of Artificial Sequence: Synthetic oligonucleotide
gcauuaaguaaggcacacc

SEQ ID NO: 2176700 - RNA, 19 nt, Artificial Sequence
  Description of Artificial Sequence: Synthetic oligonucleotide
gcuugcaccucaaugaccu

SEQ ID NO: 2176701 - RNA, 19 nt, Artificial Sequence
  Description of Artificial Sequence: Synthetic oligonucleotide
auuagccaguagugcgcau

SEQ ID NO: 2176702 - RNA, 19 nt, Artificial Sequence
  Description of Artificial Sequence: Synthetic oligonucleotide
augaaacgugccucccauu

SEQ ID NO: 2176703 - RNA, 19 nt, Artificial Sequence
  Description of Artificial Sequence: Synthetic oligonucleotide
aaggagccuucaucucaua

SEQ ID NO: 2176704 - RNA, 19 nt, Artificial Sequence
  Description of Artificial Sequence: Synthetic oligonucleotide
cccuucugcaaaacuucag

SEQ ID NO: 2176705 - RNA, 19 nt, Artificial Sequence
  Description of Artificial Sequence: Synthetic oligonucleotide
accuugccagguuggcccu

SEQ ID NO: 2176706 - RNA, 19 nt, Artificial Sequence
  Description of Artificial Sequence: Synthetic oligonucleotide
guaguaucauagugguaau

SEQ ID NO: 2176707 - RNA, 19 nt, Artificial Sequence
  Description of Artificial Sequence: Synthetic oligonucleotide
uccuccagacuuggcacau

SEQ ID NO: 2176708 - RNA, 19 nt, Artificial Sequence
  Description of Artificial Sequence: Synthetic oligonucleotide
ucucuagagucugccucau

SEQ ID NO: 2176709 - RNA, 19 nt, Artificial Sequence
  Description of Artificial Sequence: Synthetic oligonucleotide
gcagucaaccacagagacc

SEQ ID NO: 2176710 - RNA, 19 nt, Artificial Sequence
  Description of Artificial Sequence: Synthetic oligonucleotide
gacaaaccaaaggagccuu

SEQ ID NO: 2176711 - RNA, 19 nt, Artificial Sequence
  Description of Artificial Sequence: Synthetic oligonucleotide
agugcgcauccaaaaucgu

SEQ ID NO: 2176712 - RNA, 19 nt, Artificial Sequence
  Description of Artificial Sequence: Synthetic oligonucleotide
cgguuguuuucacuugccg

SEQ ID NO: 2176713 - RNA, 19 nt, Artificial Sequence
  Description of Artificial Sequence: Synthetic oligonucleotide
cuccuccagacuuggcaca

SEQ ID NO: 2176714 - RNA, 19 nt, Artificial Sequence
  Description of Artificial Sequence: Synthetic oligonucleotide
cacacagcuguuggcugac

SEQ ID NO: 2176715 - RNA, 19 nt, Artificial Sequence
  Description of Artificial Sequence: Synthetic oligonucleotide
aaucaagccccgggucuuu

SEQ ID NO: 2176716 - RNA, 19 nt, Artificial Sequence
  Description of Artificial Sequence: Synthetic oligonucleotide
agcuccaggcagcuuuauu

SEQ ID NO: 2176717 - RNA, 19 nt, Artificial Sequence
  Description of Artificial Sequence: Synthetic oligonucleotide
uguuugcaagaggcauuaa

SEQ ID NO: 2176718 - RNA, 19 nt, Artificial Sequence
  Description of Artificial Sequence: Synthetic oligonucleotide
ggcacauggaaagaaaauu

SEQ ID NO: 2176719 - RNA, 19 nt, Artificial Sequence
  Description of Artificial Sequence: Synthetic oligonucleotide
aggaacugugcaggugaga

SEQ ID NO: 2176720 - RNA, 19 nt, Artificial Sequence
  Description of Artificial Sequence: Synthetic oligonucleotide
caauucuaguuugcccaca

SEQ ID NO: 2176721 - RNA, 19 nt, Artificial Sequence
  Description of Artificial Sequence: Synthetic oligonucleotide
cucaaugaccuugccaggu

SEQ ID NO: 2176722 - RNA, 19 nt, Artificial Sequence
  Description of Artificial Sequence: Synthetic oligonucleotide
gugggcccuugacauuccc

SEQ ID NO: 2176723 - RNA, 19 nt, Artificial Sequence
  Description of Artificial Sequence: Synthetic oligonucleotide
caagccccgggucuuugga

SEQ ID NO: 2176724 - RNA, 19 nt, Artificial Sequence
  Description of Artificial Sequence: Synthetic oligonucleotide
gugugcuccagucgcaaau

SEQ ID NO: 2176725 - RNA, 19 nt, Artificial Sequence
  Description of Artificial Sequence: Synthetic oligonucleotide
ggaaagguaaaugguuccu

SEQ ID NO: 2176726 - RNA, 19 nt, Artificial Sequence
  Description of Artificial Sequence: Synthetic oligonucleotide
ggcuugcaccucaaugacc

SEQ ID NO: 2176727 - RNA, 19 nt, Artificial Sequence
  Description of Artificial Sequence: Synthetic oligonucleotide
aucaagccccgggucuuug

SEQ ID NO: 2176728 - RNA, 19 nt, Artificial Sequence
  Description of Artificial Sequence: Synthetic oligonucleotide
gagugugcuccagucgcaa

SEQ ID NO: 2176729 - RNA, 19 nt, Artificial Sequence
  Description of Artificial Sequence: Synthetic oligonucleotide
gcccuugacauuccccuuc

SEQ ID NO: 2176730 - RNA, 19 nt, Artificial Sequence
  Description of Artificial Sequence: Synthetic oligonucleotide
ggugagaaguagccaagau

SEQ ID NO: 2176731 - RNA, 19 nt, Artificial Sequence
  Description of Artificial Sequence: Synthetic oligonucleotide
ucccagcaaggcugcucac

SEQ ID NO: 2176732 - RNA, 19 nt, Artificial Sequence
  Description of Artificial Sequence: Synthetic oligonucleotide
gggcccuugacauuccccu

SEQ ID NO: 2176733 - RNA, 19 nt, Artificial Sequence
  Description of Artificial Sequence: Synthetic oligonucleotide
aagcuccaggcagcuuuau

SEQ ID NO: 2176734 - RNA, 19 nt, Artificial Sequence
  Description of Artificial Sequence: Synthetic oligonucleotide
gcaugggucucuuuggguu

SEQ ID NO: 2176735 - RNA, 19 nt, Artificial Sequence
  Description of Artificial Sequence: Synthetic oligonucleotide
gcaugaacucagaauugaa

SEQ ID NO: 2176736 - RNA, 19 nt, Artificial Sequence
  Description of Artificial Sequence: Synthetic oligonucleotide
uugccagguuggcccucac

SEQ ID NO: 2176737 - RNA, 19 nt, Artificial Sequence
  Description of Artificial Sequence: Synthetic oligonucleotide
ggcaugaugugggcccuug

SEQ ID NO: 2176738 - RNA, 19 nt, Artificial Sequence
  Description of Artificial Sequence: Synthetic oligonucleotide
acuugccguuugaacaauu

SEQ ID NO: 2176739 - RNA, 19 nt, Artificial Sequence
  Description of Artificial Sequence: Synthetic oligonucleotide
cuccacugugucuggggua

SEQ ID NO: 2176740 - RNA, 19 nt, Artificial Sequence
  Description of Artificial Sequence: Synthetic oligonucleotide
cuugccagguuggcccuca

SEQ ID NO: 2176741 - RNA, 19 nt, Artificial Sequence
  Description of Artificial Sequence: Synthetic oligonucleotide
gggcaaaguagcuuucauu

SEQ ID NO: 2176742 - RNA, 19 nt, Artificial Sequence
  Description of Artificial Sequence: Synthetic oligonucleotide
gcaccucaaugaccuugcc

SEQ ID NO: 2176743 - RNA, 19 nt, Artificial Sequence
  Description of Artificial Sequence: Synthetic oligonucleotide
cauccaaaaucgugauauu

SEQ ID NO: 2176744 - RNA, 19 nt, Artificial Sequence
  Description of Artificial Sequence: Synthetic oligonucleotide
agucaaccacagagaccug

SEQ ID NO: 2176745 - RNA, 19 nt, Artificial Sequence
  Description of Artificial Sequence: Synthetic oligonucleotide
gcuucucuagagucugccu

SEQ ID NO: 2176746 - RNA, 19 nt, Artificial Sequence
  Description of Artificial Sequence: Synthetic oligonucleotide
gcaugaugugggcccuuga

SEQ ID NO: 2176747 - RNA, 19 nt, Artificial Sequence
  Description of Artificial Sequence: Synthetic oligonucleotide
cccugcuccaaggauaaaa

SEQ ID NO: 2176748 - RNA, 19 nt, Artificial Sequence
  Description of Artificial Sequence: Synthetic oligonucleotide
gccccgggucuuuggagac

SEQ ID NO: 2176749 - RNA, 19 nt, Artificial Sequence
  Description of Artificial Sequence: Synthetic oligonucleotide
cacugugucugggguagua

SEQ ID NO: 2176750 - RNA, 19 nt, Artificial Sequence
  Description of Artificial Sequence: Synthetic oligonucleotide
ccuugacauuccccuucug

SEQ ID NO: 2176751 - RNA, 19 nt, Artificial Sequence
  Description of Artificial Sequence: Synthetic oligonucleotide
ugggucucuuuggguugau

SEQ ID NO: 2176752 - RNA, 19 nt, Artificial Sequence
  Description of Artificial Sequence: Synthetic oligonucleotide
ggguuaauucgggcaaagu

SEQ ID NO: 2176753 - RNA, 19 nt, Artificial Sequence
  Description of Artificial Sequence: Synthetic oligonucleotide
cagcaagcuccuccagacu

SEQ ID NO: 2176754 - RNA, 19 nt, Artificial Sequence
  Description of Artificial Sequence: Synthetic oligonucleotide
caccuccuacuucugcaau

SEQ ID NO: 2176755 - RNA, 19 nt, Artificial Sequence
  Description of Artificial Sequence: Synthetic oligonucleotide
gcgcauccaaaaucgugau

SEQ ID NO: 2176756 - RNA, 19 nt, Artificial Sequence
  Description of Artificial Sequence: Synthetic oligonucleotide
gccccugcuccaaggauaa

SEQ ID NO: 2176757 - RNA, 19 nt, Artificial Sequence
  Description of Artificial Sequence: Synthetic oligonucleotide
gggucucuuuggguugauc

SEQ ID NO: 2176758 - RNA, 19 nt, Artificial Sequence
  Description of Artificial Sequence: Synthetic oligonucleotide
gcaaggcugcucacacaca

SEQ ID NO: 2176759 - RNA, 19 nt, Artificial Sequence
  Description of Artificial Sequence: Synthetic oligonucleotide
cgugccucccauucccaca

SEQ ID NO: 2176760 - RNA, 19 nt, Artificial Sequence
  Description of Artificial Sequence: Synthetic oligonucleotide
ggguaguaucauaguggua

SEQ ID NO: 2176761 - RNA, 19 nt, Artificial Sequence
  Description of Artificial Sequence: Synthetic oligonucleotide
caacuuccaucugcagggu

SEQ ID NO: 2176762 - RNA, 19 nt, Artificial Sequence
  Description of Artificial Sequence: Synthetic oligonucleotide
caaucucauuuaggucaua

SEQ ID NO: 2176763 - RNA, 19 nt, Artificial Sequence
  Description of Artificial Sequence: Synthetic oligonucleotide
cuggcaugaugugggcccu

SEQ ID NO: 2176764 - RNA, 19 nt, Artificial Sequence
  Description of Artificial Sequence: Synthetic oligonucleotide
cugccccugcuccaaggau

SEQ ID NO: 2176765 - RNA, 19 nt, Artificial Sequence
  Description of Artificial Sequence: Synthetic oligonucleotide
cccgggucuuuggagacaa

SEQ ID NO: 2176766 - RNA, 19 nt, Artificial Sequence
  Description of Artificial Sequence: Synthetic oligonucleotide
cccuugacauuccccuucu

SEQ ID NO: 2176767 - RNA, 19 nt, Artificial Sequence
  Description of Artificial Sequence: Synthetic oligonucleotide
cacuugccguuugaacaau

SEQ ID NO: 2176768 - RNA, 19 nt, Artificial Sequence
  Description of Artificial Sequence: Synthetic oligonucleotide
cauucacaggacgguuguu

SEQ ID NO: 2176769 - RNA, 19 nt, Artificial Sequence
  Description of Artificial Sequence: Synthetic oligonucleotide
cgcauccaaaaucgugaua

SEQ ID NO: 2176770 - RNA, 19 nt, Artificial Sequence
  Description of Artificial Sequence: Synthetic oligonucleotide
ccccgggucuuuggagaca

SEQ ID NO: 2176771 - RNA, 19 nt, Artificial Sequence
  Description of Artificial Sequence: Synthetic oligonucleotide
ccgggucuuuggagacaaa

SEQ ID NO: 2176772 - RNA, 19 nt, Artificial Sequence
  Description of Artificial Sequence: Synthetic oligonucleotide
cuuuucuggacauugagcg

SEQ ID NO: 2176773 - RNA, 19 nt, Artificial Sequence
  Description of Artificial Sequence: Synthetic oligonucleotide
gaaagcagcagcuuguugg

SEQ ID NO: 2176774 - RNA, 19 nt, Artificial Sequence
  Description of Artificial Sequence: Synthetic oligonucleotide
auauauaugccuaacaccg

SEQ ID NO: 2176775 - RNA, 19 nt, Artificial Sequence
  Description of Artificial Sequence: Synthetic oligonucleotide
gaauuuguaguacacaagc

SEQ ID NO: 2176776 - RNA, 19 nt, Artificial Sequence
  Description of Artificial Sequence: Synthetic oligonucleotide
uugguugucacuuuucugg

SEQ ID NO: 2176777 - RNA, 19 nt, Artificial Sequence
  Description of Artificial Sequence: Synthetic oligonucleotide
aaucuuucggcuuuugcuc

SEQ ID NO: 2176778 - RNA, 19 nt, Artificial Sequence
  Description of Artificial Sequence: Synthetic oligonucleotide
aaauguucguucucuaagg

SEQ ID NO: 2176779 - RNA, 19 nt, Artificial Sequence
  Description of Artificial Sequence: Synthetic oligonucleotide
aauguucguucucuaaggc

SEQ ID NO: 2176780 - RNA, 19 nt, Artificial Sequence
  Description of Artificial Sequence: Synthetic oligonucleotide
uucuguaccaaucugguca

SEQ ID NO: 2176781 - RNA, 19 nt, Artificial Sequence
  Description of Artificial Sequence: Synthetic oligonucleotide
acuguuagcccacagcagc

SEQ ID NO: 2176782 - RNA, 19 nt, Artificial Sequence
  Description of Artificial Sequence: Synthetic oligonucleotide
uguuccuucacaaauuugu

SEQ ID NO: 2176783 - RNA, 19 nt, Artificial Sequence
  Description of Artificial Sequence: Synthetic oligonucleotide
aaagguguacuucucaccu

SEQ ID NO: 2176784 - RNA, 19 nt, Artificial Sequence
  Description of Artificial Sequence: Synthetic oligonucleotide
aauuuguaguacacaagcc

SEQ ID NO: 2176785 - RNA, 19 nt, Artificial Sequence
  Description of Artificial Sequence: Synthetic oligonucleotide
gaagcuuagacaucauggg

SEQ ID NO: 2176786 - RNA, 19 nt, Artificial Sequence
  Description of Artificial Sequence: Synthetic oligonucleotide
ugcaccauacuucacaucu

SEQ ID NO: 2176787 - RNA, 19 nt, Artificial Sequence
  Description of Artificial Sequence: Synthetic oligonucleotide
uuuaccagucuauucuugg

SEQ ID NO: 2176788 - RNA, 19 nt, Artificial Sequence
  Description of Artificial Sequence: Synthetic oligonucleotide
aauuugugguuuuccauug

SEQ ID NO: 2176789 - RNA, 19 nt, Artificial Sequence
  Description of Artificial Sequence: Synthetic oligonucleotide
aagucaggggugcauaccg

SEQ ID NO: 2176790 - RNA, 19 nt, Artificial Sequence
  Description of Artificial Sequence: Synthetic oligonucleotide
ugucgaaagaauuuguagu

SEQ ID NO: 2176791 - RNA, 19 nt, Artificial Sequence
  Description of Artificial Sequence: Synthetic oligonucleotide
uaucauacuggucuugcgc

SEQ ID NO: 2176792 - RNA, 19 nt, Artificial Sequence
  Description of Artificial Sequence: Synthetic oligonucleotide
uucucuaaggcauaugcac

SEQ ID NO: 2176793 - RNA, 19 nt, Artificial Sequence
  Description of Artificial Sequence: Synthetic oligonucleotide
ugagcggagaaucuuucgg

SEQ ID NO: 2176794 - RNA, 19 nt, Artificial Sequence
  Description of Artificial Sequence: Synthetic oligonucleotide
aguuucgaagcuuagacau

SEQ ID NO: 2176795 - RNA, 19 nt, Artificial Sequence
  Description of Artificial Sequence: Synthetic oligonucleotide
uggcaauccgaugagaacg

SEQ ID NO: 2176796 - RNA, 19 nt, Artificial Sequence
  Description of Artificial Sequence: Synthetic oligonucleotide
uucuguggcaauccgauga

SEQ ID NO: 2176797 - RNA, 19 nt, Artificial Sequence
  Description of Artificial Sequence: Synthetic oligonucleotide
cuugguacguuccaacugg

SEQ ID NO: 2176798 - RNA, 19 nt, Artificial Sequence
  Description of Artificial Sequence: Synthetic oligonucleotide
agaaucuuucggcuuuugc

SEQ ID NO: 2176799 - RNA, 19 nt, Artificial Sequence
  Description of Artificial Sequence: Synthetic oligonucleotide
guaguuucgaagcuuagac

SEQ ID NO: 2176800 - RNA, 19 nt, Artificial Sequence
  Description of Artificial Sequence: Synthetic oligonucleotide
ucuauucuugguacguucc

SEQ ID NO: 2176801 - RNA, 19 nt, Artificial Sequence
  Description of Artificial Sequence: Synthetic oligonucleotide
accagucuauucuugguac

SEQ ID NO: 2176802 - RNA, 19 nt, Artificial Sequence
  Description of Artificial Sequence: Synthetic oligonucleotide
auaccguaguucuuccucc

SEQ ID NO: 2176803 - RNA, 19 nt, Artificial Sequence
  Description of Artificial Sequence: Synthetic oligonucleotide
uagccgauucaaauguucg

SEQ ID NO: 2176804 - RNA, 19 nt, Artificial Sequence
  Description of Artificial Sequence: Synthetic oligonucleotide
ugaacuguuagcccacagc

SEQ ID NO: 2176805 - RNA, 19 nt, Artificial Sequence
  Description of Artificial Sequence: Synthetic oligonucleotide
accuuaguauaucauacug

SEQ ID NO: 2176806 - RNA, 19 nt, Artificial Sequence
  Description of Artificial Sequence: Synthetic oligonucleotide
gaacuguuagcccacagca

SEQ ID NO: 2176807 - RNA, 19 nt, Artificial Sequence
  Description of Artificial Sequence: Synthetic oligonucleotide
uaaggcauaugcaccauac

SEQ ID NO: 2176808 - RNA, 19 nt, Artificial Sequence
  Description of Artificial Sequence: Synthetic oligonucleotide
caaauguucguucucuaag

SEQ ID NO: 2176809 - RNA, 19 nt, Artificial Sequence
  Description of Artificial Sequence: Synthetic oligonucleotide
ucaagauucugguccacag

SEQ ID NO: 2176810 - RNA, 19 nt, Artificial Sequence
  Description of Artificial Sequence: Synthetic oligonucleotide
agcagcaauauauaugccu

SEQ ID NO: 2176811 - RNA, 19 nt, Artificial Sequence
  Description of Artificial Sequence: Synthetic oligonucleotide
aaaugcucggaggaggcgg

SEQ ID NO: 2176812 - RNA, 19 nt, Artificial Sequence
  Description of Artificial Sequence: Synthetic oligonucleotide
auucuugguacguuccaac

SEQ ID NO: 2176813 - RNA, 19 nt, Artificial Sequence
  Description of Artificial Sequence: Synthetic oligonucleotide
uucauuuguguuuaccagu

SEQ ID NO: 2176814 - RNA, 19 nt, Artificial Sequence
  Description of Artificial Sequence: Synthetic oligonucleotide
uuauuaccuuaguauauca

SEQ ID NO: 2176815 - RNA, 19 nt, Artificial Sequence
  Description of Artificial Sequence: Synthetic oligonucleotide
auuaccuuaguauaucaua

SEQ ID NO: 2176816 - RNA, 19 nt, Artificial Sequence
  Description of Artificial Sequence: Synthetic oligonucleotide
uuguaguacacaagcccgg

SEQ ID NO: 2176817 - RNA, 19 nt, Artificial Sequence
  Description of Artificial Sequence: Synthetic oligonucleotide
uucucgaaaugcucggagg

SEQ ID NO: 2176818 - RNA, 19 nt, Artificial Sequence
  Description of Artificial Sequence: Synthetic oligonucleotide
gagcaaugcucuuugagac

SEQ ID NO: 2176819 - RNA, 19 nt, Artificial Sequence
  Description of Artificial Sequence: Synthetic oligonucleotide
ucauuuguguuuaccaguc

SEQ ID NO: 2176820 - RNA, 19 nt, Artificial Sequence
  Description of Artificial Sequence: Synthetic oligonucleotide
ucucgaaaugcucggagga

SEQ ID NO: 2176821 - RNA, 19 nt, Artificial Sequence
  Description of Artificial Sequence: Synthetic oligonucleotide
ugugguuuuccauugcccu

SEQ ID NO: 2176822 - RNA, 19 nt, Artificial Sequence
  Description of Artificial Sequence: Synthetic oligonucleotide
gugucgaaagaauuuguag

SEQ ID NO: 2176823 - RNA, 19 nt, Artificial Sequence
  Description of Artificial Sequence: Synthetic oligonucleotide
uuuucuggacauugagcgg

SEQ ID NO: 2176824 - RNA, 19 nt, Artificial Sequence
  Description of Artificial Sequence: Synthetic oligonucleotide
acuguagccgauucaaaug

SEQ ID NO: 2176825 - RNA, 19 nt, Artificial Sequence
  Description of Artificial Sequence: Synthetic oligonucleotide
gauucugguccacaguccc

SEQ ID NO: 2176826 - RNA, 19 nt, Artificial Sequence
  Description of Artificial Sequence: Synthetic oligonucleotide
uauaucauacuggucuugc

SEQ ID NO: 2176827 - RNA, 19 nt, Artificial Sequence
  Description of Artificial Sequence: Synthetic oligonucleotide
uuuauuaccuuaguauauc

SEQ ID NO: 2176828 - RNA, 19 nt, Artificial Sequence
  Description of Artificial Sequence: Synthetic oligonucleotide
aaugcuuuggguggcccgg

SEQ ID NO: 2176829 - RNA, 19 nt, Artificial Sequence
  Description of Artificial Sequence: Synthetic oligonucleotide
aauccgaugagaacgcuca

SEQ ID NO: 2176830 - RNA, 19 nt, Artificial Sequence
  Description of Artificial Sequence: Synthetic oligonucleotide
gaaagaauuuguaguacac

SEQ ID NO: 2176831 - RNA, 19 nt, Artificial Sequence
  Description of Artificial Sequence: Synthetic oligonucleotide
uaugccuaacaccguuugg

SEQ ID NO: 2176832 - RNA, 19 nt, Artificial Sequence
  Description of Artificial Sequence: Synthetic oligonucleotide
aaagcagcagcuuguuggu

SEQ ID NO: 2176833 - RNA, 19 nt, Artificial Sequence
  Description of Artificial Sequence: Synthetic oligonucleotide
gaacgcucaaugcuuuggg

SEQ ID NO: 2176834 - RNA, 19 nt, Artificial Sequence
  Description of Artificial Sequence: Synthetic oligonucleotide
cucuuugagacuguagccg

SEQ ID NO: 2176835 - RNA, 19 nt, Artificial Sequence
  Description of Artificial Sequence: Synthetic oligonucleotide
cuucuaugauuucuguacc

SEQ ID NO: 2176836 - RNA, 19 nt, Artificial Sequence
  Description of Artificial Sequence: Synthetic oligonucleotide
uuuguguuuaccagucuau

SEQ ID NO: 2176837 - RNA, 19 nt, Artificial Sequence
  Description of Artificial Sequence: Synthetic oligonucleotide
agcaauauauaugccuaac

SEQ ID NO: 2176838 - RNA, 19 nt, Artificial Sequence
  Description of Artificial Sequence: Synthetic oligonucleotide
uccucguaggucuucaaga

SEQ ID NO: 2176839 - RNA, 19 nt, Artificial Sequence
  Description of Artificial Sequence: Synthetic oligonucleotide
uuagcaagguccuuccggu

SEQ ID NO: 2176840 - RNA, 19 nt, Artificial Sequence
  Description of Artificial Sequence: Synthetic oligonucleotide
ucuucaagaaggccgcgga

SEQ ID NO: 2176841 - RNA, 19 nt, Artificial Sequence
  Description of Artificial Sequence: Synthetic oligonucleotide
auaucauacuggucuugcg

SEQ ID NO: 2176842 - RNA, 19 nt, Artificial Sequence
  Description of Artificial Sequence: Synthetic oligonucleotide
ucuuugagacuguagccga

SEQ ID NO: 2176843 - RNA, 19 nt, Artificial Sequence
  Description of Artificial Sequence: Synthetic oligonucleotide
uguguuuaccagucuauuc

SEQ ID NO: 2176844 - RNA, 19 nt, Artificial Sequence
  Description of Artificial Sequence: Synthetic oligonucleotide
aucauacuggucuugcgcu

SEQ ID NO: 2176845 - RNA, 19 nt, Artificial Sequence
  Description of Artificial Sequence: Synthetic oligonucleotide
ucgaaaugcucggaggagg

SEQ ID NO: 2176846 - RNA, 19 nt, Artificial Sequence
  Description of Artificial Sequence: Synthetic oligonucleotide
uuacggaaagucaggggug

SEQ ID NO: 2176847 - RNA, 19 nt, Artificial Sequence
  Description of Artificial Sequence: Synthetic oligonucleotide
uugugguuuuccauugccc

SEQ ID NO: 2176848 - RNA, 19 nt, Artificial Sequence
  Description of Artificial Sequence: Synthetic oligonucleotide
uucaagaaggccgcggaag

SEQ ID NO: 2176849 - RNA, 19 nt, Artificial Sequence
  Description of Artificial Sequence: Synthetic oligonucleotide
cucgguggaguuuagcaag

SEQ ID NO: 2176850 - RNA, 19 nt, Artificial Sequence
  Description of Artificial Sequence: Synthetic oligonucleotide
uuagacaucaugggguuac

SEQ ID NO: 2176851 - RNA, 19 nt, Artificial Sequence
  Description of Artificial Sequence: Synthetic oligonucleotide
uuggagucaagauucuggu

SEQ ID NO: 2176852 - RNA, 19 nt, Artificial Sequence
  Description of Artificial Sequence: Synthetic oligonucleotide
auacuucacaucuccucgg

SEQ ID NO: 2176853 - RNA, 19 nt, Artificial Sequence
  Description of Artificial Sequence: Synthetic oligonucleotide
gaugagaacgcucaaugcu

SEQ ID NO: 2176854 - RNA, 19 nt, Artificial Sequence
  Description of Artificial Sequence: Synthetic oligonucleotide
uauuaccuuaguauaucau

SEQ ID NO: 2176855 - RNA, 19 nt, Artificial Sequence
  Description of Artificial Sequence: Synthetic oligonucleotide
caaagguguacuucucacc

SEQ ID NO: 2176856 - RNA, 19 nt, Artificial Sequence
  Description of Artificial Sequence: Synthetic oligonucleotide
aggagcaaugcucuuugag

SEQ ID NO: 2176857 - RNA, 19 nt, Artificial Sequence
  Description of Artificial Sequence: Synthetic oligonucleotide
agguccuuccgguaguuuc

SEQ ID NO: 2176858 - RNA, 19 nt, Artificial Sequence
  Description of Artificial Sequence: Synthetic oligonucleotide
aagguguacuucucaccuc

SEQ ID NO: 2176859 - RNA, 19 nt, Artificial Sequence
  Description of Artificial Sequence: Synthetic oligonucleotide
gaaucuuucggcuuuugcu

SEQ ID NO: 2176860 - RNA, 19 nt, Artificial Sequence
  Description of Artificial Sequence: Synthetic oligonucleotide
ucaauggugucgaaagaau

SEQ ID NO: 2176861 - RNA, 19 nt, Artificial Sequence
  Description of Artificial Sequence: Synthetic oligonucleotide
uucuaugauuucuguacca

SEQ ID NO: 2176862 - RNA, 19 nt, Artificial Sequence
  Description of Artificial Sequence: Synthetic oligonucleotide
uucaauggugucgaaagaa

SEQ ID NO: 2176863 - RNA, 19 nt, Artificial Sequence
  Description of Artificial Sequence: Synthetic oligonucleotide
ugcucaaguuuucauuugu

SEQ ID NO: 2176864 - RNA, 19 nt, Artificial Sequence
  Description of Artificial Sequence: Synthetic oligonucleotide
uugagcggagaaucuuucg

SEQ ID NO: 2176865 - RNA, 19 nt, Artificial Sequence
  Description of Artificial Sequence: Synthetic oligonucleotide
uaguuucgaagcuuagaca

SEQ ID NO: 2176866 - RNA, 19 nt, Artificial Sequence
  Description of Artificial Sequence: Synthetic oligonucleotide
uauauaugccuaacaccgu

SEQ ID NO: 2176867 - RNA, 19 nt, Artificial Sequence
  Description of Artificial Sequence: Synthetic oligonucleotide
auaugccuaacaccguuug

SEQ ID NO: 2176868 - RNA, 19 nt, Artificial Sequence
  Description of Artificial Sequence: Synthetic oligonucleotide
agcaagguccuuccgguag

SEQ ID NO: 2176869 - RNA, 19 nt, Artificial Sequence
  Description of Artificial Sequence: Synthetic oligonucleotide
ccuuaguauaucauacugg

SEQ ID NO: 2176870 - RNA, 19 nt, Artificial Sequence
  Description of Artificial Sequence: Synthetic oligonucleotide
aauggugucgaaagaauuu

SEQ ID NO: 2176871 - RNA, 19 nt, Artificial Sequence
  Description of Artificial Sequence: Synthetic oligonucleotide
caccauacuucacaucucc

SEQ ID NO: 2176872 - RNA, 19 nt, Artificial Sequence
  Description of Artificial Sequence: Synthetic oligonucleotide
agcauuuauuaccuuagua

SEQ ID NO: 2176873 - RNA, 19 nt, Artificial Sequence
  Description of Artificial Sequence: Synthetic oligonucleotide
guuacggaaagucaggggu

SEQ ID NO: 2176874 - RNA, 19 nt, Artificial Sequence
  Description of Artificial Sequence: Synthetic oligonucleotide
acaucaugggguuacggaa

SEQ ID NO: 2176875 - RNA, 19 nt, Artificial Sequence
  Description of Artificial Sequence: Synthetic oligonucleotide
gacaucaugggguuacgga

SEQ ID NO: 2176876 - RNA, 19 nt, Artificial Sequence
  Description of Artificial Sequence: Synthetic oligonucleotide
gagcggagaaucuuucggc

SEQ ID NO: 2176877 - RNA, 19 nt, Artificial Sequence
  Description of Artificial Sequence: Synthetic oligonucleotide
uagucuggcuacacaauac

SEQ ID NO: 2176878 - RNA, 19 nt, Artificial Sequence
  Description of Artificial Sequence: Synthetic oligonucleotide
agaauuuguaguacacaag

SEQ ID NO: 2176879 - RNA, 19 nt, Artificial Sequence
  Description of Artificial Sequence: Synthetic oligonucleotide
acgcucaaugcuuugggug

SEQ ID NO: 2176880 - RNA, 19 nt, Artificial Sequence
  Description of Artificial Sequence: Synthetic oligonucleotide
ucgguggaguuuagcaagg

SEQ ID NO: 2176881 - RNA, 19 nt, Artificial Sequence
  Description of Artificial Sequence: Synthetic oligonucleotide
uaugcaccauacuucacau

SEQ ID NO: 2176882 - RNA, 19 nt, Artificial Sequence
  Description of Artificial Sequence: Synthetic oligonucleotide
ucaguuucuguggcaaucc

SEQ ID NO: 2176883 - RNA, 19 nt, Artificial Sequence
  Description of Artificial Sequence: Synthetic oligonucleotide
aacgcucaaugcuuugggu

SEQ ID NO: 2176884 - RNA, 19 nt, Artificial Sequence
  Description of Artificial Sequence: Synthetic oligonucleotide
ucuucuguccccgcggucc

SEQ ID NO: 2176885 - RNA, 19 nt, Artificial Sequence
  Description of Artificial Sequence: Synthetic oligonucleotide
gucacuuuucuggacauug

SEQ ID NO: 2176886 - RNA, 19 nt, Artificial Sequence
  Description of Artificial Sequence: Synthetic oligonucleotide
ugccuaacaccguuuggag

SEQ ID NO: 2176887 - RNA, 19 nt, Artificial Sequence
  Description of Artificial Sequence: Synthetic oligonucleotide
agcuucucgaaaugcucgg

SEQ ID NO: 2176888 - RNA, 19 nt, Artificial Sequence
  Description of Artificial Sequence: Synthetic oligonucleotide
cauaccguaguucuuccuc

SEQ ID NO: 2176889 - RNA, 19 nt, Artificial Sequence
  Description of Artificial Sequence: Synthetic oligonucleotide
gauucaaauguucguucuc

SEQ ID NO: 2176890 - RNA, 19 nt, Artificial Sequence
  Description of Artificial Sequence: Synthetic oligonucleotide
aggucuucaagaaggccgc

SEQ ID NO: 2176891 - RNA, 19 nt, Artificial Sequence
  Description of Artificial Sequence: Synthetic oligonucleotide
aaggcauaugcaccauacu

SEQ ID NO: 2176892 - RNA, 19 nt, Artificial Sequence
  Description of Artificial Sequence: Synthetic oligonucleotide
auuuauuaccuuaguauau

SEQ ID NO: 2176893 - RNA, 19 nt, Artificial Sequence
  Description of Artificial Sequence: Synthetic oligonucleotide
uaccuuaguauaucauacu

SEQ ID NO: 2176894 - RNA, 19 nt, Artificial Sequence
  Description of Artificial Sequence: Synthetic oligonucleotide
cuucucgaaaugcucggag

SEQ ID NO: 2176895 - RNA, 19 nt, Artificial Sequence
  Description of Artificial Sequence: Synthetic oligonucleotide
auauaugccuaacaccguu

SEQ ID NO: 2176896 - RNA, 19 nt, Artificial Sequence
  Description of Artificial Sequence: Synthetic oligonucleotide
ucgaaagaauuuguaguac

SEQ ID NO: 2176897 - RNA, 19 nt, Artificial Sequence
  Description of Artificial Sequence: Synthetic oligonucleotide
aucaugggguuacggaaag

SEQ ID NO: 2176898 - RNA, 19 nt, Artificial Sequence
  Description of Artificial Sequence: Synthetic oligonucleotide
auguucguucucuaaggca

SEQ ID NO: 2176899 - RNA, 19 nt, Artificial Sequence
  Description of Artificial Sequence: Synthetic oligonucleotide
guuccaacuggucucgcug

SEQ ID NO: 2176900 - RNA, 19 nt, Artificial Sequence
  Description of Artificial Sequence: Synthetic oligonucleotide
agaacgcucaaugcuuugg

SEQ ID NO: 2176901 - RNA, 19 nt, Artificial Sequence
  Description of Artificial Sequence: Synthetic oligonucleotide
uuaccagucuauucuuggu

SEQ ID NO: 2176902 - RNA, 19 nt, Artificial Sequence
  Description of Artificial Sequence: Synthetic oligonucleotide
cucgggaacuccucguagg

SEQ ID NO: 2176903 - RNA, 19 nt, Artificial Sequence
  Description of Artificial Sequence: Synthetic oligonucleotide
aguacacaagcccggccag

SEQ ID NO: 2176904 - RNA, 19 nt, Artificial Sequence
  Description of Artificial Sequence: Synthetic oligonucleotide
uucagcgcucagcugccgg

SEQ ID NO: 2176905 - RNA, 19 nt, Artificial Sequence
  Description of Artificial Sequence: Synthetic oligonucleotide
gucgaaagaauuuguagua

SEQ ID NO: 2176906 - RNA, 19 nt, Artificial Sequence
  Description of Artificial Sequence: Synthetic oligonucleotide
auagucuggcuacacaaua

SEQ ID NO: 2176907 - RNA, 19 nt, Artificial Sequence
  Description of Artificial Sequence: Synthetic oligonucleotide
auggugucgaaagaauuug

SEQ ID NO: 2176908 - RNA, 19 nt, Artificial Sequence
  Description of Artificial Sequence: Synthetic oligonucleotide
aguauaucauacuggucuu

SEQ ID NO: 2176909 - RNA, 19 nt, Artificial Sequence
  Description of Artificial Sequence: Synthetic oligonucleotide
uguaguacacaagcccggc

SEQ ID NO: 2176910 - RNA, 19 nt, Artificial Sequence
  Description of Artificial Sequence: Synthetic oligonucleotide
ccuaacaccguuuggaguc

SEQ ID NO: 2176911 - RNA, 19 nt, Artificial Sequence
  Description of Artificial Sequence: Synthetic oligonucleotide
aacuguuagcccacagcag

SEQ ID NO: 2176912 - RNA, 19 nt, Artificial Sequence
  Description of Artificial Sequence: Synthetic oligonucleotide
uggugucgaaagaauuugu

SEQ ID NO: 2176913 - RNA, 19 nt, Artificial Sequence
  Description of Artificial Sequence: Synthetic oligonucleotide
uacguuccaacuggucucg

SEQ ID NO: 2176914 - RNA, 19 nt, Artificial Sequence
  Description of Artificial Sequence: Synthetic oligonucleotide
ugguugucacuuuucugga

SEQ ID NO: 2176915 - RNA, 19 nt, Artificial Sequence
  Description of Artificial Sequence: Synthetic oligonucleotide
ucggccucugagauuccgg

SEQ ID NO: 2176916 - RNA, 19 nt, Artificial Sequence
  Description of Artificial Sequence: Synthetic oligonucleotide
ucauacuggucuugcgcug

SEQ ID NO: 2176917 - RNA, 19 nt, Artificial Sequence
  Description of Artificial Sequence: Synthetic oligonucleotide
caaugcuuuggguggcccg

SEQ ID NO: 2176918 - RNA, 19 nt, Artificial Sequence
  Description of Artificial Sequence: Synthetic oligonucleotide
ugcauaccguaguucuucc

SEQ ID NO: 2176919 - RNA, 19 nt, Artificial Sequence
  Description of Artificial Sequence: Synthetic oligonucleotide
auugagcggagaaucuuuc

SEQ ID NO: 2176920 - RNA, 19 nt, Artificial Sequence
  Description of Artificial Sequence: Synthetic oligonucleotide
cugcuagcguuucauuugc

SEQ ID NO: 2176921 - RNA, 19 nt, Artificial Sequence
  Description of Artificial Sequence: Synthetic oligonucleotide
augccuaacaccguuugga

SEQ ID NO: 2176922 - RNA, 19 nt, Artificial Sequence
  Description of Artificial Sequence: Synthetic oligonucleotide
guacguuccaacuggucuc

SEQ ID NO: 2176923 - RNA, 19 nt, Artificial Sequence
  Description of Artificial Sequence: Synthetic oligonucleotide
gucuauucuugguacguuc

SEQ ID NO: 2176924 - RNA, 19 nt, Artificial Sequence
  Description of Artificial Sequence: Synthetic oligonucleotide
gguuacggaaagucagggg

SEQ ID NO: 2176925 - RNA, 19 nt, Artificial Sequence
  Description of Artificial Sequence: Synthetic oligonucleotide
uacggaaagucaggggugc

SEQ ID NO: 2176926 - RNA, 19 nt, Artificial Sequence
  Description of Artificial Sequence: Synthetic oligonucleotide
gccucugagauuccgggcg

SEQ ID NO: 2176927 - RNA, 19 nt, Artificial Sequence
  Description of Artificial Sequence: Synthetic oligonucleotide
gaaaugcucggaggaggcg

SEQ ID NO: 2176928 - RNA, 19 nt, Artificial Sequence
  Description of Artificial Sequence: Synthetic oligonucleotide
uucuggacauugagcggag

SEQ ID NO: 2176929 - RNA, 19 nt, Artificial Sequence
  Description of Artificial Sequence: Synthetic oligonucleotide
aggagucauaaacagcauu

SEQ ID NO: 2176930 - RNA, 19 nt, Artificial Sequence
  Description of Artificial Sequence: Synthetic oligonucleotide
gugagcgucggccucugag

SEQ ID NO: 2176931 - RNA, 19 nt, Artificial Sequence
  Description of Artificial Sequence: Synthetic oligonucleotide
uuguugguugucacuuuuc

SEQ ID NO: 2176932 - RNA, 19 nt, Artificial Sequence
  Description of Artificial Sequence: Synthetic oligonucleotide
uucaaauguucguucucua

SEQ ID NO: 2176933 - RNA, 19 nt, Artificial Sequence
  Description of Artificial Sequence: Synthetic oligonucleotide
ucgggaacuccucguaggu

SEQ ID NO: 2176934 - RNA, 19 nt, Artificial Sequence
  Description of Artificial Sequence: Synthetic oligonucleotide
ccguuuggagucaagauuc

SEQ ID NO: 2176935 - RNA, 19 nt, Artificial Sequence
  Description of Artificial Sequence: Synthetic oligonucleotide
gagucaagauucuggucca

SEQ ID NO: 2176936 - RNA, 19 nt, Artificial Sequence
  Description of Artificial Sequence: Synthetic oligonucleotide
gcaauauauaugccuaaca

SEQ ID NO: 2176937 - RNA, 19 nt, Artificial Sequence
  Description of Artificial Sequence: Synthetic oligonucleotide
agcaaugcucuuugagacu

SEQ ID NO: 2176938 - RNA, 19 nt, Artificial Sequence
  Description of Artificial Sequence: Synthetic oligonucleotide
caauccgaugagaacgcuc

SEQ ID NO: 2176939 - RNA, 19 nt, Artificial Sequence
  Description of Artificial Sequence: Synthetic oligonucleotide
guaguacacaagcccggcc

SEQ ID NO: 2176940 - RNA, 19 nt, Artificial Sequence
  Description of Artificial Sequence: Synthetic oligonucleotide
ucgugcagcuucucgaaau

SEQ ID NO: 2176941 - RNA, 19 nt, Artificial Sequence
  Description of Artificial Sequence: Synthetic oligonucleotide
agccgauucaaauguucgu

SEQ ID NO: 2176942 - RNA, 19 nt, Artificial Sequence
  Description of Artificial Sequence: Synthetic oligonucleotide
uguaccaaucuggucaguu

SEQ ID NO: 2176943 - RNA, 19 nt, Artificial Sequence
  Description of Artificial Sequence: Synthetic oligonucleotide
agacaucaugggguuacgg

SEQ ID NO: 2176944 - RNA, 19 nt, Artificial Sequence
  Description of Artificial Sequence: Synthetic oligonucleotide
gcucuuugagacuguagcc

SEQ ID NO: 2176945 - RNA, 19 nt, Artificial Sequence
  Description of Artificial Sequence: Synthetic oligonucleotide
caguuucuguggcaauccg

SEQ ID NO: 2176946 - RNA, 19 nt, Artificial Sequence
  Description of Artificial Sequence: Synthetic oligonucleotide
uuucggcuuuugcucaagu

SEQ ID NO: 2176947 - RNA, 19 nt, Artificial Sequence
  Description of Artificial Sequence: Synthetic oligonucleotide
cacaagcccggccaggaug

SEQ ID NO: 2176948 - RNA, 19 nt, Artificial Sequence
  Description of Artificial Sequence: Synthetic oligonucleotide
cuccucguaggucuucaag

SEQ ID NO: 2176949 - RNA, 19 nt, Artificial Sequence
  Description of Artificial Sequence: Synthetic oligonucleotide
gucuucaagaaggccgcgg

SEQ ID NO: 2176950 - RNA, 19 nt, Artificial Sequence
  Description of Artificial Sequence: Synthetic oligonucleotide
ucucgugcagcuucucgaa

SEQ ID NO: 2176951 - RNA, 19 nt, Artificial Sequence
  Description of Artificial Sequence: Synthetic oligonucleotide
gagaacgcucaaugcuuug

SEQ ID NO: 2176952 - RNA, 19 nt, Artificial Sequence
  Description of Artificial Sequence: Synthetic oligonucleotide
ugcacgugagcgucggccu

SEQ ID NO: 2176953 - RNA, 19 nt, Artificial Sequence
  Description of Artificial Sequence: Synthetic oligonucleotide
gacuguagccgauucaaau

SEQ ID NO: 2176954 - RNA, 19 nt, Artificial Sequence
  Description of Artificial Sequence: Synthetic oligonucleotide
guauaucauacuggucuug

SEQ ID NO: 2176955 - RNA, 19 nt, Artificial Sequence
  Description of Artificial Sequence: Synthetic oligonucleotide
guggcaauccgaugagaac

SEQ ID NO: 2176956 - RNA, 19 nt, Artificial Sequence
  Description of Artificial Sequence: Synthetic oligonucleotide
ucaaugcuuuggguggccc

SEQ ID NO: 2176957 - RNA, 19 nt, Artificial Sequence
  Description of Artificial Sequence: Synthetic oligonucleotide
uugguacguuccaacuggu

SEQ ID NO: 2176958 - RNA, 19 nt, Artificial Sequence
  Description of Artificial Sequence: Synthetic oligonucleotide
ucacccuucagcgcucagc

SEQ ID NO: 2176959 - RNA, 19 nt, Artificial Sequence
  Description of Artificial Sequence: Synthetic oligonucleotide
cagguguggcugucaaagg

SEQ ID NO: 2176960 - RNA, 19 nt, Artificial Sequence
  Description of Artificial Sequence: Synthetic oligonucleotide
uagacaucaugggguuacg

SEQ ID NO: 2176961 - RNA, 19 nt, Artificial Sequence
  Description of Artificial Sequence: Synthetic oligonucleotide
uggacauugagcggagaau

SEQ ID NO: 2176962 - RNA, 19 nt, Artificial Sequence
  Description of Artificial Sequence: Synthetic oligonucleotide
guucaauggugucgaaaga

SEQ ID NO: 2176963 - RNA, 19 nt, Artificial Sequence
  Description of Artificial Sequence: Synthetic oligonucleotide
cucgaaaugcucggaggag

SEQ ID NO: 2176964 - RNA, 19 nt, Artificial Sequence
  Description of Artificial Sequence: Synthetic oligonucleotide
uguagccgauucaaauguu

SEQ ID NO: 2176965 - RNA, 19 nt, Artificial Sequence
  Description of Artificial Sequence: Synthetic oligonucleotide
guagccgauucaaauguuc

SEQ ID NO: 2176966 - RNA, 19 nt, Artificial Sequence
  Description of Artificial Sequence: Synthetic oligonucleotide
acaccguuuggagucaaga

SEQ ID NO: 2176967 - RNA, 19 nt, Artificial Sequence
  Description of Artificial Sequence: Synthetic oligonucleotide
cugcacgugagcgucggcc

SEQ ID NO: 2176968 - RNA, 19 nt, Artificial Sequence
  Description of Artificial Sequence: Synthetic oligonucleotide
ggcauaugcaccauacuuc

SEQ ID NO: 2176969 - RNA, 19 nt, Artificial Sequence
  Description of Artificial Sequence: Synthetic oligonucleotide
gguacguuccaacuggucu

SEQ ID NO: 2176970 - RNA, 19 nt, Artificial Sequence
  Description of Artificial Sequence: Synthetic oligonucleotide
ggaaguucaauggugucga

SEQ ID NO: 2176971 - RNA, 19 nt, Artificial Sequence
  Description of Artificial Sequence: Synthetic oligonucleotide
uucggcuuuugcucaaguu

SEQ ID NO: 2176972 - RNA, 19 nt, Artificial Sequence
  Description of Artificial Sequence: Synthetic oligonucleotide
aacuccucguaggucuuca

SEQ ID NO: 2176973 - RNA, 19 nt, Artificial Sequence
  Description of Artificial Sequence: Synthetic oligonucleotide
agcuuguugguugucacuu

SEQ ID NO: 2176974 - RNA, 19 nt, Artificial Sequence
  Description of Artificial Sequence: Synthetic oligonucleotide
ccgaugagaacgcucaaug

SEQ ID NO: 2176975 - RNA, 19 nt, Artificial Sequence
  Description of Artificial Sequence: Synthetic oligonucleotide
aguuucuguggcaauccga

SEQ ID NO: 2176976 - RNA, 19 nt, Artificial Sequence
  Description of Artificial Sequence: Synthetic oligonucleotide
ugcgcuguuccuucacaaa

SEQ ID NO: 2176977 - RNA, 19 nt, Artificial Sequence
  Description of Artificial Sequence: Synthetic oligonucleotide
cuauucuugguacguucca

SEQ ID NO: 2176978 - RNA, 19 nt, Artificial Sequence
  Description of Artificial Sequence: Synthetic oligonucleotide
cagcagcaauauauaugcc

SEQ ID NO: 2176979 - RNA, 19 nt, Artificial Sequence
  Description of Artificial Sequence: Synthetic oligonucleotide
ggguuacggaaagucaggg

SEQ ID NO: 2176980 - RNA, 19 nt, Artificial Sequence
  Description of Artificial Sequence: Synthetic oligonucleotide
cuucacaucuccucggccu

SEQ ID NO: 2176981 - RNA, 19 nt, Artificial Sequence
  Description of Artificial Sequence: Synthetic oligonucleotide
cuuuggguggcccgguuca

SEQ ID NO: 2176982 - RNA, 19 nt, Artificial Sequence
  Description of Artificial Sequence: Synthetic oligonucleotide
ugguacguuccaacugguc

SEQ ID NO: 2176983 - RNA, 19 nt, Artificial Sequence
  Description of Artificial Sequence: Synthetic oligonucleotide
cuguagccgauucaaaugu

SEQ ID NO: 2176984 - RNA, 19 nt, Artificial Sequence
  Description of Artificial Sequence: Synthetic oligonucleotide
uuugagacuguagccgauu

SEQ ID NO: 2176985 - RNA, 19 nt, Artificial Sequence
  Description of Artificial Sequence: Synthetic oligonucleotide
gguccuuccgguaguuucg

SEQ ID NO: 2176986 - RNA, 19 nt, Artificial Sequence
  Description of Artificial Sequence: Synthetic oligonucleotide
uccgugccuuguaggagca

SEQ ID NO: 2176987 - RNA, 19 nt, Artificial Sequence
  Description of Artificial Sequence: Synthetic oligonucleotide
gugcauaccguaguucuuc

SEQ ID NO: 2176988 - RNA, 19 nt, Artificial Sequence
  Description of Artificial Sequence: Synthetic oligonucleotide
ccagucuauucuugguacg

SEQ ID NO: 2176989 - RNA, 19 nt, Artificial Sequence
  Description of Artificial Sequence: Synthetic oligonucleotide
ucuuucggcuuuugcucaa

SEQ ID NO: 2176990 - RNA, 19 nt, Artificial Sequence
  Description of Artificial Sequence: Synthetic oligonucleotide
uccgaugagaacgcucaau

SEQ ID NO: 2176991 - RNA, 19 nt, Artificial Sequence
  Description of Artificial Sequence: Synthetic oligonucleotide
aacaccguuuggagucaag

SEQ ID NO: 2176992 - RNA, 19 nt, Artificial Sequence
  Description of Artificial Sequence: Synthetic oligonucleotide
uggcgcaggcugcacguga

SEQ ID NO: 2176993 - RNA, 19 nt, Artificial Sequence
  Description of Artificial Sequence: Synthetic oligonucleotide
gagucauaaacagcauuua

SEQ ID NO: 2176994 - RNA, 19 nt, Artificial Sequence
  Description of Artificial Sequence: Synthetic oligonucleotide
cuggacauugagcggagaa

SEQ ID NO: 2176995 - RNA, 19 nt, Artificial Sequence
  Description of Artificial Sequence: Synthetic oligonucleotide
aaggagucauaaacagcau

SEQ ID NO: 2176996 - RNA, 19 nt, Artificial Sequence
  Description of Artificial Sequence: Synthetic oligonucleotide
uucguucucuaaggcauau

SEQ ID NO: 2176997 - RNA, 19 nt, Artificial Sequence
  Description of Artificial Sequence: Synthetic oligonucleotide
ugcuagcguuucauuugcu

SEQ ID NO: 2176998 - RNA, 19 nt, Artificial Sequence
  Description of Artificial Sequence: Synthetic oligonucleotide
gauuccgggcgcagggccc

SEQ ID NO: 2176999 - RNA, 19 nt, Artificial Sequence
  Description of Artificial Sequence: Synthetic oligonucleotide
ucuaaggcauaugcaccau

SEQ ID NO: 2177000 - RNA, 19 nt, Artificial Sequence
  Description of Artificial Sequence: Synthetic oligonucleotide
gggguuacggaaagucagg

SEQ ID NO: 2177001 - RNA, 19 nt, Artificial Sequence
  Description of Artificial Sequence: Synthetic oligonucleotide
gguggaguuuagcaagguc

SEQ ID NO: 2177002 - RNA, 19 nt, Artificial Sequence
  Description of Artificial Sequence: Synthetic oligonucleotide
guacacaagcccggccagg

SEQ ID NO: 2177003 - RNA, 19 nt, Artificial Sequence
  Description of Artificial Sequence: Synthetic oligonucleotide
cuucucaccucucggugga

SEQ ID NO: 2177004 - RNA, 19 nt, Artificial Sequence
  Description of Artificial Sequence: Synthetic oligonucleotide
gagaaucuuucggcuuuug

SEQ ID NO: 2177005 - RNA, 19 nt, Artificial Sequence
  Description of Artificial Sequence: Synthetic oligonucleotide
ccgauucaaauguucguuc

SEQ ID NO: 2177006 - RNA, 19 nt, Artificial Sequence
  Description of Artificial Sequence: Synthetic oligonucleotide
guuucuguggcaauccgau

SEQ ID NO: 2177007 - RNA, 19 nt, Artificial Sequence
  Description of Artificial Sequence: Synthetic oligonucleotide
uguggcugucaaaggugua

SEQ ID NO: 2177008 - RNA, 19 nt, Artificial Sequence
  Description of Artificial Sequence: Synthetic oligonucleotide
ucguucucuaaggcauaug

SEQ ID NO: 2177009 - RNA, 19 nt, Artificial Sequence
  Description of Artificial Sequence: Synthetic oligonucleotide
cgaugagaacgcucaaugc

SEQ ID NO: 2177010 - RNA, 19 nt, Artificial Sequence
  Description of Artificial Sequence: Synthetic oligonucleotide
gucaagauucugguccaca

SEQ ID NO: 2177011 - RNA, 19 nt, Artificial Sequence
  Description of Artificial Sequence: Synthetic oligonucleotide
gagauuccgggcgcagggc

SEQ ID NO: 2177012 - RNA, 19 nt, Artificial Sequence
  Description of Artificial Sequence: Synthetic oligonucleotide
cucaaugcuuuggguggcc

SEQ ID NO: 2177013 - RNA, 19 nt, Artificial Sequence
  Description of Artificial Sequence: Synthetic oligonucleotide
gcagcaauauauaugccua

SEQ ID NO: 2177014 - RNA, 19 nt, Artificial Sequence
  Description of Artificial Sequence: Synthetic oligonucleotide
uccgguaguuucgaagcuu

SEQ ID NO: 2177015 - RNA, 19 nt, Artificial Sequence
  Description of Artificial Sequence: Synthetic oligonucleotide
cgaaagaauuuguaguaca

SEQ ID NO: 2177016 - RNA, 19 nt, Artificial Sequence
  Description of Artificial Sequence: Synthetic oligonucleotide
cagcaauauauaugccuaa

SEQ ID NO: 2177017 - RNA, 19 nt, Artificial Sequence
  Description of Artificial Sequence: Synthetic oligonucleotide
ccauagucuggcuacacaa

SEQ ID NO: 2177018 - RNA, 19 nt, Artificial Sequence
  Description of Artificial Sequence: Synthetic oligonucleotide
ggcaauccgaugagaacgc

SEQ ID NO: 2177019 - RNA, 19 nt, Artificial Sequence
  Description of Artificial Sequence: Synthetic oligonucleotide
ggcccacucacccuucagc

SEQ ID NO: 2177020 - RNA, 19 nt, Artificial Sequence
  Description of Artificial Sequence: Synthetic oligonucleotide
gccgcggaagaucucgugc

SEQ ID NO: 2177021 - RNA, 19 nt, Artificial Sequence
  Description of Artificial Sequence: Synthetic oligonucleotide
gcucaaguuuucauuugug

SEQ ID NO: 2177022 - RNA, 19 nt, Artificial Sequence
  Description of Artificial Sequence: Synthetic oligonucleotide
gcccgguucaggcuuuccg

SEQ ID NO: 2177023 - RNA, 19 nt, Artificial Sequence
  Description of Artificial Sequence: Synthetic oligonucleotide
caggcugcacgugagcguc

SEQ ID NO: 2177024 - RNA, 19 nt, Artificial Sequence
  Description of Artificial Sequence: Synthetic oligonucleotide
gacauugagcggagaaucu

SEQ ID NO: 2177025 - RNA, 19 nt, Artificial Sequence
  Description of Artificial Sequence: Synthetic oligonucleotide
aggggugcauaccguaguu

SEQ ID NO: 2177026 - RNA, 19 nt, Artificial Sequence
  Description of Artificial Sequence: Synthetic oligonucleotide
guuuuccauugcccucccc

SEQ ID NO: 2177027 - RNA, 19 nt, Artificial Sequence
  Description of Artificial Sequence: Synthetic oligonucleotide
accauacuucacaucuccu

SEQ ID NO: 2177028 - RNA, 19 nt, Artificial Sequence
  Description of Artificial Sequence: Synthetic oligonucleotide
uggaaagcagcagcuuguu

SEQ ID NO: 2177029 - RNA, 19 nt, Artificial Sequence
  Description of Artificial Sequence: Synthetic oligonucleotide
agucuauucuugguacguu

SEQ ID NO: 2177030 - RNA, 19 nt, Artificial Sequence
  Description of Artificial Sequence: Synthetic oligonucleotide
ggagucauaaacagcauuu

SEQ ID NO: 2177031 - RNA, 19 nt, Artificial Sequence
  Description of Artificial Sequence: Synthetic oligonucleotide
caauggugucgaaagaauu

SEQ ID NO: 2177032 - RNA, 19 nt, Artificial Sequence
  Description of Artificial Sequence: Synthetic oligonucleotide
ucaugggguuacggaaagu

SEQ ID NO: 2177033 - RNA, 19 nt, Artificial Sequence
  Description of Artificial Sequence: Synthetic oligonucleotide
ucuggacauugagcggaga

SEQ ID NO: 2177034 - RNA, 19 nt, Artificial Sequence
  Description of Artificial Sequence: Synthetic oligonucleotide
gcucgggaacuccucguag

SEQ ID NO: 2177035 - RNA, 19 nt, Artificial Sequence
  Description of Artificial Sequence: Synthetic oligonucleotide
accguaguucuuccuccau

SEQ ID NO: 2177036 - RNA, 19 nt, Artificial Sequence
  Description of Artificial Sequence: Synthetic oligonucleotide
gaaguucaauggugucgaa

SEQ ID NO: 2177037 - RNA, 19 nt, Artificial Sequence
  Description of Artificial Sequence: Synthetic oligonucleotide
cuaaggcauaugcaccaua

SEQ ID NO: 2177038 - RNA, 19 nt, Artificial Sequence
  Description of Artificial Sequence: Synthetic oligonucleotide
ggucuugcgcuguuccuuc

SEQ ID NO: 2177039 - RNA, 19 nt, Artificial Sequence
  Description of Artificial Sequence: Synthetic oligonucleotide
cuucaagaaggccgcggaa

SEQ ID NO: 2177040 - RNA, 19 nt, Artificial Sequence
  Description of Artificial Sequence: Synthetic oligonucleotide
uagcaagguccuuccggua

SEQ ID NO: 2177041 - RNA, 19 nt, Artificial Sequence
  Description of Artificial Sequence: Synthetic oligonucleotide
cuucacaaauuugugguuu

SEQ ID NO: 2177042 - RNA, 19 nt, Artificial Sequence
  Description of Artificial Sequence: Synthetic oligonucleotide
uguccccgcgguccccagc

SEQ ID NO: 2177043 - RNA, 19 nt, Artificial Sequence
  Description of Artificial Sequence: Synthetic oligonucleotide
gccgcucgggaacuccucg

SEQ ID NO: 2177044 - RNA, 19 nt, Artificial Sequence
  Description of Artificial Sequence: Synthetic oligonucleotide
caagauucugguccacagu

SEQ ID NO: 2177045 - RNA, 19 nt, Artificial Sequence
  Description of Artificial Sequence: Synthetic oligonucleotide
cauagucuggcuacacaau

SEQ ID NO: 2177046 - RNA, 19 nt, Artificial Sequence
  Description of Artificial Sequence: Synthetic oligonucleotide
cucugcuagcguuucauuu

SEQ ID NO: 2177047 - RNA, 19 nt, Artificial Sequence
  Description of Artificial Sequence: Synthetic oligonucleotide
aagcccggccaggauggcu

SEQ ID NO: 2177048 - RNA, 19 nt, Artificial Sequence
  Description of Artificial Sequence: Synthetic oligonucleotide
cacccuucagcgcucagcu

SEQ ID NO: 2177049 - RNA, 19 nt, Artificial Sequence
  Description of Artificial Sequence: Synthetic oligonucleotide
uucucaccucucgguggag

SEQ ID NO: 2177050 - RNA, 19 nt, Artificial Sequence
  Description of Artificial Sequence: Synthetic oligonucleotide
gcgucggccucugagauuc

SEQ ID NO: 2177051 - RNA, 19 nt, Artificial Sequence
  Description of Artificial Sequence: Synthetic oligonucleotide
ugucacuuuucuggacauu

SEQ ID NO: 2177052 - RNA, 19 nt, Artificial Sequence
  Description of Artificial Sequence: Synthetic oligonucleotide
cuucagcgcucagcugccg

SEQ ID NO: 2177053 - RNA, 19 nt, Artificial Sequence
  Description of Artificial Sequence: Synthetic oligonucleotide
uaacaccguuuggagucaa

SEQ ID NO: 2177054 - RNA, 19 nt, Artificial Sequence
  Description of Artificial Sequence: Synthetic oligonucleotide
guccccgcgguccccagca

SEQ ID NO: 2177055 - RNA, 19 nt, Artificial Sequence
  Description of Artificial Sequence: Synthetic oligonucleotide
ccgguucaggcuuuccgug

SEQ ID NO: 2177056 - RNA, 19 nt, Artificial Sequence
  Description of Artificial Sequence: Synthetic oligonucleotide
aggcuuuccgugccuugua

SEQ ID NO: 2177057 - RNA, 19 nt, Artificial Sequence
  Description of Artificial Sequence: Synthetic oligonucleotide
auacuggucuugcgcuguu

SEQ ID NO: 2177058 - RNA, 19 nt, Artificial Sequence
  Description of Artificial Sequence: Synthetic oligonucleotide
ccucugagauuccgggcgc

SEQ ID NO: 2177059 - RNA, 19 nt, Artificial Sequence
  Description of Artificial Sequence: Synthetic oligonucleotide
ggucuucaagaaggccgcg

SEQ ID NO: 2177060 - RNA, 19 nt, Artificial Sequence
  Description of Artificial Sequence: Synthetic oligonucleotide
cauggcgcaggcugcacgu

SEQ ID NO: 2177061 - RNA, 19 nt, Artificial Sequence
  Description of Artificial Sequence: Synthetic oligonucleotide
cccacucacccuucagcgc

SEQ ID NO: 2177062 - RNA, 19 nt, Artificial Sequence
  Description of Artificial Sequence: Synthetic oligonucleotide
gagcgucggccucugagau

SEQ ID NO: 2177063 - RNA, 19 nt, Artificial Sequence
  Description of Artificial Sequence: Synthetic oligonucleotide
cggccucugagauuccggg

SEQ ID NO: 2177064 - RNA, 19 nt, Artificial Sequence
  Description of Artificial Sequence: Synthetic oligonucleotide
ccguaguucuuccuccauc

SEQ ID NO: 2177065 - RNA, 19 nt, Artificial Sequence
  Description of Artificial Sequence: Synthetic oligonucleotide
cagucuauucuugguacgu

SEQ ID NO: 2177066 - RNA, 19 nt, Artificial Sequence
  Description of Artificial Sequence: Synthetic oligonucleotide
agggcccacucacccuuca

SEQ ID NO: 2177067 - RNA, 19 nt, Artificial Sequence
  Description of Artificial Sequence: Synthetic oligonucleotide
cucuucuguccccgcgguc

SEQ ID NO: 2177068 - RNA, 19 nt, Artificial Sequence
  Description of Artificial Sequence: Synthetic oligonucleotide
gcucaaugcuuuggguggc

SEQ ID NO: 2177069 - RNA, 19 nt, Artificial Sequence
  Description of Artificial Sequence: Synthetic oligonucleotide
gcuuuggguggcccgguuc

SEQ ID NO: 2177070 - RNA, 19 nt, Artificial Sequence
  Description of Artificial Sequence: Synthetic oligonucleotide
acggaaagucaggggugca

SEQ ID NO: 2177071 - RNA, 19 nt, Artificial Sequence
  Description of Artificial Sequence: Synthetic oligonucleotide
ggcugcacgugagcgucgg

SEQ ID NO: 2177072 - RNA, 19 nt, Artificial Sequence
  Description of Artificial Sequence: Synthetic oligonucleotide
cagcauuuauuaccuuagu

SEQ ID NO: 2177073 - RNA, 19 nt, Artificial Sequence
  Description of Artificial Sequence: Synthetic oligonucleotide
agccgcucgggaacuccuc

SEQ ID NO: 2177074 - RNA, 19 nt, Artificial Sequence
  Description of Artificial Sequence: Synthetic oligonucleotide
gucuggcuacacaauacau

SEQ ID NO: 2177075 - RNA, 19 nt, Artificial Sequence
  Description of Artificial Sequence: Synthetic oligonucleotide
agcgucggccucugagauu

SEQ ID NO: 2177076 - RNA, 19 nt, Artificial Sequence
  Description of Artificial Sequence: Synthetic oligonucleotide
cgguucaggcuuuccgugc

SEQ ID NO: 2177077 - RNA, 19 nt, Artificial Sequence
  Description of Artificial Sequence: Synthetic oligonucleotide
cucgugcagcuucucgaaa

SEQ ID NO: 2177078 - RNA, 19 nt, Artificial Sequence
  Description of Artificial Sequence: Synthetic oligonucleotide
guucguucucuaaggcaua

SEQ ID NO: 2177079 - RNA, 19 nt, Artificial Sequence
  Description of Artificial Sequence: Synthetic oligonucleotide
agcccggccaggauggcua

SEQ ID NO: 2177080 - RNA, 19 nt, Artificial Sequence
  Description of Artificial Sequence: Synthetic oligonucleotide
gcuagcguuucauuugcuu

SEQ ID NO: 2177081 - RNA, 19 nt, Artificial Sequence
  Description of Artificial Sequence: Synthetic oligonucleotide
aggcugcacgugagcgucg

SEQ ID NO: 2177082 - RNA, 19 nt, Artificial Sequence
  Description of Artificial Sequence: Synthetic oligonucleotide
auggcgcaggcugcacgug

SEQ ID NO: 2177083 - RNA, 19 nt, Artificial Sequence
  Description of Artificial Sequence: Synthetic oligonucleotide
ggccgcggaagaucucgug

SEQ ID NO: 2177084 - RNA, 19 nt, Artificial Sequence
  Description of Artificial Sequence: Synthetic oligonucleotide
caggggugcauaccguagu

SEQ ID NO: 2177085 - RNA, 19 nt, Artificial Sequence
  Description of Artificial Sequence: Synthetic oligonucleotide
gccuaacaccguuuggagu

SEQ ID NO: 2177086 - RNA, 19 nt, Artificial Sequence
  Description of Artificial Sequence: Synthetic oligonucleotide
ggggugcauaccguaguuc

SEQ ID NO: 2177087 - RNA, 19 nt, Artificial Sequence
  Description of Artificial Sequence: Synthetic oligonucleotide
gcggcggagguggccaugg

SEQ ID NO: 2177088 - RNA, 19 nt, Artificial Sequence
  Description of Artificial Sequence: Synthetic oligonucleotide
gcgcuguuccuucacaaau

SEQ ID NO: 2177089 - RNA, 19 nt, Artificial Sequence
  Description of Artificial Sequence: Synthetic oligonucleotide
cccauagucuggcuacaca

SEQ ID NO: 2177090 - RNA, 19 nt, Artificial Sequence
  Description of Artificial Sequence: Synthetic oligonucleotide
cucugagauuccgggcgca

SEQ ID NO: 2177091 - RNA, 19 nt, Artificial Sequence
  Description of Artificial Sequence: Synthetic oligonucleotide
caccucucgguggaguuua

SEQ ID NO: 2177092 - RNA, 19 nt, Artificial Sequence
  Description of Artificial Sequence: Synthetic oligonucleotide
gggcccacucacccuucag

SEQ ID NO: 2177093 - RNA, 19 nt, Artificial Sequence
  Description of Artificial Sequence: Synthetic oligonucleotide
gcguuucauuugcuuccug

SEQ ID NO: 2177094 - RNA, 19 nt, Artificial Sequence
  Description of Artificial Sequence: Synthetic oligonucleotide
ccgguaguuucgaagcuua

SEQ ID NO: 2177095 - RNA, 19 nt, Artificial Sequence
  Description of Artificial Sequence: Synthetic oligonucleotide
guucaggcuuuccgugccu

SEQ ID NO: 2177096 - RNA, 19 nt, Artificial Sequence
  Description of Artificial Sequence: Synthetic oligonucleotide
cagggcccacucacccuuc

SEQ ID NO: 2177097 - RNA, 19 nt, Artificial Sequence
  Description of Artificial Sequence: Synthetic oligonucleotide
caaugcucuuugagacugu

SEQ ID NO: 2177098 - RNA, 19 nt, Artificial Sequence
  Description of Artificial Sequence: Synthetic oligonucleotide
gguguacuucucaccucuc

SEQ ID NO: 2177099 - RNA, 19 nt, Artificial Sequence
  Description of Artificial Sequence: Synthetic oligonucleotide
gccgauucaaauguucguu

SEQ ID NO: 2177100 - RNA, 19 nt, Artificial Sequence
  Description of Artificial Sequence: Synthetic oligonucleotide
gcagccgcucgggaacucc

SEQ ID NO: 2177101 - RNA, 19 nt, Artificial Sequence
  Description of Artificial Sequence: Synthetic oligonucleotide
cuguccccgcgguccccag

SEQ ID NO: 2177102 - RNA, 19 nt, Artificial Sequence
  Description of Artificial Sequence: Synthetic oligonucleotide
acgugagcgucggccucug

SEQ ID NO: 2177103 - RNA, 19 nt, Artificial Sequence
  Description of Artificial Sequence: Synthetic oligonucleotide
gcaagguccuuccgguagu

SEQ ID NO: 2177104 - RNA, 19 nt, Artificial Sequence
  Description of Artificial Sequence: Synthetic oligonucleotide
caagcccggccaggauggc

SEQ ID NO: 2177105 - RNA, 19 nt, Artificial Sequence
  Description of Artificial Sequence: Synthetic oligonucleotide
ggcgcagggcccacucacc

SEQ ID NO: 2177106 - RNA, 19 nt, Artificial Sequence
  Description of Artificial Sequence: Synthetic oligonucleotide
caggcuuuccgugccuugu

SEQ ID NO: 2177107 - RNA, 19 nt, Artificial Sequence
  Description of Artificial Sequence: Synthetic oligonucleotide
gguggcccgguucaggcuu

SEQ ID NO: 2177108 - RNA, 19 nt, Artificial Sequence
  Description of Artificial Sequence: Synthetic oligonucleotide
gcacgugagcgucggccuc

SEQ ID NO: 2177109 - RNA, 19 nt, Artificial Sequence
  Description of Artificial Sequence: Synthetic oligonucleotide
aggccgcggaagaucucgu

SEQ ID NO: 2177110 - RNA, 19 nt, Artificial Sequence
  Description of Artificial Sequence: Synthetic oligonucleotide
gcauaccguaguucuuccu

SEQ ID NO: 2177111 - RNA, 19 nt, Artificial Sequence
  Description of Artificial Sequence: Synthetic oligonucleotide
gcugcacgugagcgucggc

SEQ ID NO: 2177112 - RNA, 19 nt, Artificial Sequence
  Description of Artificial Sequence: Synthetic oligonucleotide
cccgguucaggcuuuccgu

SEQ ID NO: 2177113 - RNA, 19 nt, Artificial Sequence
  Description of Artificial Sequence: Synthetic oligonucleotide
ccccgcgguccccagcagc

SEQ ID NO: 2177114 - RNA, 19 nt, Artificial Sequence
  Description of Artificial Sequence: Synthetic oligonucleotide
ccccauagucuggcuacac

SEQ ID NO: 2177115 - RNA, 19 nt, Artificial Sequence
  Description of Artificial Sequence: Synthetic oligonucleotide
cagccgcucgggaacuccu

SEQ ID NO: 2177116 - RNA, 19 nt, Artificial Sequence
  Description of Artificial Sequence: Synthetic oligonucleotide
cacgugagcgucggccucu

SEQ ID NO: 2177117 - RNA, 19 nt, Artificial Sequence
  Description of Artificial Sequence: Synthetic oligonucleotide
ggccauggcgcaggcugca

SEQ ID NO: 2177118 - RNA, 19 nt, Artificial Sequence
  Description of Artificial Sequence: Synthetic oligonucleotide
ggcccgguucaggcuuucc

SEQ ID NO: 2177119 - RNA, 19 nt, Artificial Sequence
  Description of Artificial Sequence: Synthetic oligonucleotide
ggugcauaccguaguucuu

SEQ ID NO: 2177120 - RNA, 19 nt, Artificial Sequence
  Description of Artificial Sequence: Synthetic oligonucleotide
uuccgggcgcagggcccac

SEQ ID NO: 2177121 - RNA, 19 nt, Artificial Sequence
  Description of Artificial Sequence: Synthetic oligonucleotide
gcaauccgaugagaacgcu

SEQ ID NO: 2177122 - RNA, 19 nt, Artificial Sequence
  Description of Artificial Sequence: Synthetic oligonucleotide
ggagaaucuuucggcuuuu

SEQ ID NO: 2177123 - RNA, 19 nt, Artificial Sequence
  Description of Artificial Sequence: Synthetic oligonucleotide
caagguccuuccgguaguu

SEQ ID NO: 2177124 - RNA, 19 nt, Artificial Sequence
  Description of Artificial Sequence: Synthetic oligonucleotide
ccgggucccgaagccauca

SEQ ID NO: 2177125 - RNA, 19 nt, Artificial Sequence
  Description of Artificial Sequence: Synthetic oligonucleotide
cuguaccaaucuggucagu

SEQ ID NO: 2177126 - RNA, 19 nt, Artificial Sequence
  Description of Artificial Sequence: Synthetic oligonucleotide
ccgcgguccccagcagccg

SEQ ID NO: 2177127 - RNA, 19 nt, Artificial Sequence
  Description of Artificial Sequence: Synthetic oligonucleotide
cagcagccgcucgggaacu

SEQ ID NO: 2177128 - RNA, 19 nt, Artificial Sequence
  Description of Artificial Sequence: Synthetic oligonucleotide
ccggccaggauggcuagcu

SEQ ID NO: 2177129 - RNA, 19 nt, Artificial Sequence
  Description of Artificial Sequence: Synthetic oligonucleotide
cgugccuuguaggagcaau

SEQ ID NO: 2177130 - RNA, 19 nt, Artificial Sequence
  Description of Artificial Sequence: Synthetic oligonucleotide
cgucggccucugagauucc

SEQ ID NO: 2177131 - RNA, 19 nt, Artificial Sequence
  Description of Artificial Sequence: Synthetic oligonucleotide
cccggccaggauggcuagc

SEQ ID NO: 2177132 - RNA, 19 nt, Artificial Sequence
  Description of Artificial Sequence: Synthetic oligonucleotide
cgcucgggaacuccucgua

SEQ ID NO: 2177133 - RNA, 19 nt, Artificial Sequence
  Description of Artificial Sequence: Synthetic oligonucleotide
ccgcucgggaacuccucgu

SEQ ID NO: 2177134 - RNA, 19 nt, Artificial Sequence
  Description of Artificial Sequence: Synthetic oligonucleotide
cgguggaguuuagcaaggu

SEQ ID NO: 2177135 - RNA, 19 nt, Artificial Sequence
  Description of Artificial Sequence: Synthetic oligonucleotide
cgugagcgucggccucuga

SEQ ID NO: 2177136 - RNA, 19 nt, Artificial Sequence
  Description of Artificial Sequence: Synthetic oligonucleotide
ccgugccuuguaggagcaa

SEQ ID NO: 2177137 - RNA, 19 nt, Artificial Sequence
  Description of Artificial Sequence: Synthetic oligonucleotide
cccuucccuccaggaaguu

SEQ ID NO: 2177138 - RNA, 19 nt, Artificial Sequence
  Description of Artificial Sequence: Synthetic oligonucleotide
aauaauggaggacaaucac

SEQ ID NO: 2177139 - RNA, 19 nt, Artificial Sequence
  Description of Artificial Sequence: Synthetic oligonucleotide
aaugauuuguccuugccug

SEQ ID NO: 2177140 - RNA, 19 nt, Artificial Sequence
  Description of Artificial Sequence: Synthetic oligonucleotide
uguagcaucagccaggggu

SEQ ID NO: 2177141 - RNA, 19 nt, Artificial Sequence
  Description of Artificial Sequence: Synthetic oligonucleotide
auggguaugguauaguggg

SEQ ID NO: 2177142 - RNA, 19 nt, Artificial Sequence
  Description of Artificial Sequence: Synthetic oligonucleotide
gacauuggaagaauaaugg

SEQ ID NO: 2177143 - RNA, 19 nt, Artificial Sequence
  Description of Artificial Sequence: Synthetic oligonucleotide
uaauggaggacaaucacug

SEQ ID NO: 2177144 - RNA, 19 nt, Artificial Sequence
  Description of Artificial Sequence: Synthetic oligonucleotide
acgucguuugaacaaaucc

SEQ ID NO: 2177145 - RNA, 19 nt, Artificial Sequence
  Description of Artificial Sequence: Synthetic oligonucleotide
ugacauuggaagaauaaug

SEQ ID NO: 2177146 - RNA, 19 nt, Artificial Sequence
  Description of Artificial Sequence: Synthetic oligonucleotide
cauuggaagaauaauggag

SEQ ID NO: 2177147 - RNA, 19 nt, Artificial Sequence
  Description of Artificial Sequence: Synthetic oligonucleotide
agaauaauggaggacaauc

SEQ ID NO: 2177148 - RNA, 19 nt, Artificial Sequence
  Description of Artificial Sequence: Synthetic oligonucleotide
uuuguuacagaaguuaucu

SEQ ID NO: 2177149 - RNA, 19 nt, Artificial Sequence
  Description of Artificial Sequence: Synthetic oligonucleotide
uaucuagacaaacagcaca

SEQ ID NO: 2177150 - RNA, 19 nt, Artificial Sequence
  Description of Artificial Sequence: Synthetic oligonucleotide
uuuaggaugaggagaagca

SEQ ID NO: 2177151 - RNA, 19 nt, Artificial Sequence
  Description of Artificial Sequence: Synthetic oligonucleotide
gauggcauuccauagcugc

SEQ ID NO: 2177152 - RNA, 19 nt, Artificial Sequence
  Description of Artificial Sequence: Synthetic oligonucleotide
ugugucuucagccuagggc

SEQ ID NO: 2177153 - RNA, 19 nt, Artificial Sequence
  Description of Artificial Sequence: Synthetic oligonucleotide
auggaggacaaucacuggc

SEQ ID NO: 2177154 - RNA, 19 nt, Artificial Sequence
  Description of Artificial Sequence: Synthetic oligonucleotide
uuccccaaaguccugagag

SEQ ID NO: 2177155 - RNA, 19 nt, Artificial Sequence
  Description of Artificial Sequence: Synthetic oligonucleotide
uaggaugaggagaagcagg

SEQ ID NO: 2177156 - RNA, 19 nt, Artificial Sequence
  Description of Artificial Sequence: Synthetic oligonucleotide
ucgauguuggcugacaggg

SEQ ID NO: 2177157 - RNA, 19 nt, Artificial Sequence
  Description of Artificial Sequence: Synthetic oligonucleotide
auauguccaacucucggac

SEQ ID NO: 2177158 - RNA, 19 nt, Artificial Sequence
  Description of Artificial Sequence: Synthetic oligonucleotide
uguaguguaggcugggaag

SEQ ID NO: 2177159 - RNA, 19 nt, Artificial Sequence
  Description of Artificial Sequence: Synthetic oligonucleotide
auagauauccuaggguugc

SEQ ID NO: 2177160 - RNA, 19 nt, Artificial Sequence
  Description of Artificial Sequence: Synthetic oligonucleotide
acaaucacuggccugagca

SEQ ID NO: 2177161 - RNA, 19 nt, Artificial Sequence
  Description of Artificial Sequence: Synthetic oligonucleotide
guuaucuagacaaacagca

SEQ ID NO: 2177162 - RNA, 19 nt, Artificial Sequence
  Description of Artificial Sequence: Synthetic oligonucleotide
uauaagggcaggcauagau

SEQ ID NO: 2177163 - RNA, 19 nt, Artificial Sequence
  Description of Artificial Sequence: Synthetic oligonucleotide
aguuaucuagacaaacagc

SEQ ID NO: 2177164 - RNA, 19 nt, Artificial Sequence
  Description of Artificial Sequence: Synthetic oligonucleotide
agggcaggcauagauaucc

SEQ ID NO: 2177165 - RNA, 19 nt, Artificial Sequence
  Description of Artificial Sequence: Synthetic oligonucleotide
uaaugauuuguccuugccu

SEQ ID NO: 2177166 - RNA, 19 nt, Artificial Sequence
  Description of Artificial Sequence: Synthetic oligonucleotide
uauaguggggccuugacuu

SEQ ID NO: 2177167 - RNA, 19 nt, Artificial Sequence
  Description of Artificial Sequence: Synthetic oligonucleotide
aacucaugcuuacagggca

SEQ ID NO: 2177168 - RNA, 19 nt, Artificial Sequence
  Description of Artificial Sequence: Synthetic oligonucleotide
aaccacacgucguuugaac

SEQ ID NO: 2177169 - RNA, 19 nt, Artificial Sequence
  Description of Artificial Sequence: Synthetic oligonucleotide
augcuuacagggcaauacc

SEQ ID NO: 2177170 - RNA, 19 nt, Artificial Sequence
  Description of Artificial Sequence: Synthetic oligonucleotide
ggaacucaugcuuacaggg

SEQ ID NO: 2177171 - RNA, 19 nt, Artificial Sequence
  Description of Artificial Sequence: Synthetic oligonucleotide
ucagcaguagccugggucc

SEQ ID NO: 2177172 - RNA, 19 nt, Artificial Sequence
  Description of Artificial Sequence: Synthetic oligonucleotide
ugaaccacaaggccugugc

SEQ ID NO: 2177173 - RNA, 19 nt, Artificial Sequence
  Description of Artificial Sequence: Synthetic oligonucleotide
cuuacagggcaauacccgg

SEQ ID NO: 2177174 - RNA, 19 nt, Artificial Sequence
  Description of Artificial Sequence: Synthetic oligonucleotide
auauccuaggguugcagag

SEQ ID NO: 2177175 - RNA, 19 nt, Artificial Sequence
  Description of Artificial Sequence: Synthetic oligonucleotide
uguuuguuacagaaguuau

SEQ ID NO: 2177176 - RNA, 19 nt, Artificial Sequence
  Description of Artificial Sequence: Synthetic oligonucleotide
aaagugcagaaucuccacu

SEQ ID NO: 2177177 - RNA, 19 nt, Artificial Sequence
  Description of Artificial Sequence: Synthetic oligonucleotide
gacagggacucucugcugg

SEQ ID NO: 2177178 - RNA, 19 nt, Artificial Sequence
  Description of Artificial Sequence: Synthetic oligonucleotide
ugcuuacagggcaauaccc

SEQ ID NO: 2177179 - RNA, 19 nt, Artificial Sequence
  Description of Artificial Sequence: Synthetic oligonucleotide
uggaacucaugcuuacagg

SEQ ID NO: 2177180 - RNA, 19 nt, Artificial Sequence
  Description of Artificial Sequence: Synthetic oligonucleotide
cauauuucuuuccccaaag

SEQ ID NO: 2177181 - RNA, 19 nt, Artificial Sequence
  Description of Artificial Sequence: Synthetic oligonucleotide
uggaggacaaucacuggcc

SEQ ID NO: 2177182 - RNA, 19 nt, Artificial Sequence
  Description of Artificial Sequence: Synthetic oligonucleotide
uacagaaguuaucuagaca

SEQ ID NO: 2177183 - RNA, 19 nt, Artificial Sequence
  Description of Artificial Sequence: Synthetic oligonucleotide
uagucuccgaaccacacgu

SEQ ID NO: 2177184 - RNA, 19 nt, Artificial Sequence
  Description of Artificial Sequence: Synthetic oligonucleotide
aucuagacaaacagcacac

SEQ ID NO: 2177185 - RNA, 19 nt, Artificial Sequence
  Description of Artificial Sequence: Synthetic oligonucleotide
ugugcugcccugcucagcc

SEQ ID NO: 2177186 - RNA, 19 nt, Artificial Sequence
  Description of Artificial Sequence: Synthetic oligonucleotide
gauauguccaacucucgga

SEQ ID NO: 2177187 - RNA, 19 nt, Artificial Sequence
  Description of Artificial Sequence: Synthetic oligonucleotide
cuaugguuuaggaugagga

SEQ ID NO: 2177188 - RNA, 19 nt, Artificial Sequence
  Description of Artificial Sequence: Synthetic oligonucleotide
agauguaguggccauauuu

SEQ ID NO: 2177189 - RNA, 19 nt, Artificial Sequence
  Description of Artificial Sequence: Synthetic oligonucleotide
aacagcacacgucuccaug

SEQ ID NO: 2177190 - RNA, 19 nt, Artificial Sequence
  Description of Artificial Sequence: Synthetic oligonucleotide
uuaucuagacaaacagcac

SEQ ID NO: 2177191 - RNA, 19 nt, Artificial Sequence
  Description of Artificial Sequence: Synthetic oligonucleotide
acaauccuguaguguaggc

SEQ ID NO: 2177192 - RNA, 19 nt, Artificial Sequence
  Description of Artificial Sequence: Synthetic oligonucleotide
uagacaaacagcacacguc

SEQ ID NO: 2177193 - RNA, 19 nt, Artificial Sequence
  Description of Artificial Sequence: Synthetic oligonucleotide
acagguaguccacaauguc

SEQ ID NO: 2177194 - RNA, 19 nt, Artificial Sequence
  Description of Artificial Sequence: Synthetic oligonucleotide
aggcauagauauccuaggg

SEQ ID NO: 2177195 - RNA, 19 nt, Artificial Sequence
  Description of Artificial Sequence: Synthetic oligonucleotide
uguccaagccacaauccug

SEQ ID NO: 2177196 - RNA, 19 nt, Artificial Sequence
  Description of Artificial Sequence: Synthetic oligonucleotide
caguuagucaucugaguag

SEQ ID NO: 2177197 - RNA, 19 nt, Artificial Sequence
  Description of Artificial Sequence: Synthetic oligonucleotide
cauugaacuugcacagugg

SEQ ID NO: 2177198 - RNA, 19 nt, Artificial Sequence
  Description of Artificial Sequence: Synthetic oligonucleotide
uuccacucgauguuggcug

SEQ ID NO: 2177199 - RNA, 19 nt, Artificial Sequence
  Description of Artificial Sequence: Synthetic oligonucleotide
ucuaaugauuuguccuugc

SEQ ID NO: 2177200 - RNA, 19 nt, Artificial Sequence
  Description of Artificial Sequence: Synthetic oligonucleotide
cuaaugauuuguccuugcc

SEQ ID NO: 2177201 - RNA, 19 nt, Artificial Sequence
  Description of Artificial Sequence: Synthetic oligonucleotide
cauagauauccuaggguug

SEQ ID NO: 2177202 - RNA, 19 nt, Artificial Sequence
  Description of Artificial Sequence: Synthetic oligonucleotide
gaaguuaucuagacaaaca

SEQ ID NO: 2177203 - RNA, 19 nt, Artificial Sequence
  Description of Artificial Sequence: Synthetic oligonucleotide
acauuggaagaauaaugga

SEQ ID NO: 2177204 - RNA, 19 nt, Artificial Sequence
  Description of Artificial Sequence: Synthetic oligonucleotide
cagaagcugggauaugucc

SEQ ID NO: 2177205 - RNA, 19 nt, Artificial Sequence
  Description of Artificial Sequence: Synthetic oligonucleotide
uugaagaagugccuccaac

SEQ ID NO: 2177206 - RNA, 19 nt, Artificial Sequence
  Description of Artificial Sequence: Synthetic oligonucleotide
gucucgguggaacucaugc

SEQ ID NO: 2177207 - RNA, 19 nt, Artificial Sequence
  Description of Artificial Sequence: Synthetic oligonucleotide
gaauaauggaggacaauca

SEQ ID NO: 2177208 - RNA, 19 nt, Artificial Sequence
  Description of Artificial Sequence: Synthetic oligonucleotide
gucguuugaacaaaucccc

SEQ ID NO: 2177209 - RNA, 19 nt, Artificial Sequence
  Description of Artificial Sequence: Synthetic oligonucleotide
ggacauugaacuugcacag

SEQ ID NO: 2177210 - RNA, 19 nt, Artificial Sequence
  Description of Artificial Sequence: Synthetic oligonucleotide
augagucccuccuacccac

SEQ ID NO: 2177211 - RNA, 19 nt, Artificial Sequence
  Description of Artificial Sequence: Synthetic oligonucleotide
caggcauagauauccuagg

SEQ ID NO: 2177212 - RNA, 19 nt, Artificial Sequence
  Description of Artificial Sequence: Synthetic oligonucleotide
guaguguaggcugggaagg

SEQ ID NO: 2177213 - RNA, 19 nt, Artificial Sequence
  Description of Artificial Sequence: Synthetic oligonucleotide
augauuuguccuugccugg

SEQ ID NO: 2177214 - RNA, 19 nt, Artificial Sequence
  Description of Artificial Sequence: Synthetic oligonucleotide
gagagcugccuauaagggc

SEQ ID NO: 2177215 - RNA, 19 nt, Artificial Sequence
  Description of Artificial Sequence: Synthetic oligonucleotide
ucaucugaguagugguucc

SEQ ID NO: 2177216 - RNA, 19 nt, Artificial Sequence
  Description of Artificial Sequence: Synthetic oligonucleotide
uguaggcugggaagggucc

SEQ ID NO: 2177217 - RNA, 19 nt, Artificial Sequence
  Description of Artificial Sequence: Synthetic oligonucleotide
cagccuagggccaugaguc

SEQ ID NO: 2177218 - RNA, 19 nt, Artificial Sequence
  Description of Artificial Sequence: Synthetic oligonucleotide
ugagggaugcuagucuccg

SEQ ID NO: 2177219 - RNA, 19 nt, Artificial Sequence
  Description of Artificial Sequence: Synthetic oligonucleotide
cagggcaauacccggagcc

SEQ ID NO: 2177220 - RNA, 19 nt, Artificial Sequence
  Description of Artificial Sequence: Synthetic oligonucleotide
gguccuuugaagaagugcc

SEQ ID NO: 2177221 - RNA, 19 nt, Artificial Sequence
  Description of Artificial Sequence: Synthetic oligonucleotide
gucuccgaaccacacgucg

SEQ ID NO: 2177222 - RNA, 19 nt, Artificial Sequence
  Description of Artificial Sequence: Synthetic oligonucleotide
gauauccuaggguugcaga

SEQ ID NO: 2177223 - RNA, 19 nt, Artificial Sequence
  Description of Artificial Sequence: Synthetic oligonucleotide
acuaugguuuaggaugagg

SEQ ID NO: 2177224 - RNA, 19 nt, Artificial Sequence
  Description of Artificial Sequence: Synthetic oligonucleotide
aauacccggagccacuguu

SEQ ID NO: 2177225 - RNA, 19 nt, Artificial Sequence
  Description of Artificial Sequence: Synthetic oligonucleotide
ugcugguucugucuugaug

SEQ ID NO: 2177226 - RNA, 19 nt, Artificial Sequence
  Description of Artificial Sequence: Synthetic oligonucleotide
uggguaugguauagugggg

SEQ ID NO: 2177227 - RNA, 19 nt, Artificial Sequence
  Description of Artificial Sequence: Synthetic oligonucleotide
auguccaacucucggacca

SEQ ID NO: 2177228 - RNA, 19 nt, Artificial Sequence
  Description of Artificial Sequence: Synthetic oligonucleotide
ugaucucagcaguagccug

SEQ ID NO: 2177229 - RNA, 19 nt, Artificial Sequence
  Description of Artificial Sequence: Synthetic oligonucleotide
caugcuuacagggcaauac

SEQ ID NO: 2177230 - RNA, 19 nt, Artificial Sequence
  Description of Artificial Sequence: Synthetic oligonucleotide
auaauggaggacaaucacu

SEQ ID NO: 2177231 - RNA, 19 nt, Artificial Sequence
  Description of Artificial Sequence: Synthetic oligonucleotide
cucucggaccacacuaugg

SEQ ID NO: 2177232 - RNA, 19 nt, Artificial Sequence
  Description of Artificial Sequence: Synthetic oligonucleotide
auguaguggccauauuucu

SEQ ID NO: 2177233 - RNA, 19 nt, Artificial Sequence
  Description of Artificial Sequence: Synthetic oligonucleotide
aguuagucaucugaguagu

SEQ ID NO: 2177234 - RNA, 19 nt, Artificial Sequence
  Description of Artificial Sequence: Synthetic oligonucleotide
aucugaguagugguucccc

SEQ ID NO: 2177235 - RNA, 19 nt, Artificial Sequence
  Description of Artificial Sequence: Synthetic oligonucleotide
aaucacuggccugagcaga

SEQ ID NO: 2177236 - RNA, 19 nt, Artificial Sequence
  Description of Artificial Sequence: Synthetic oligonucleotide
uuacagggcaauacccgga

SEQ ID NO: 2177237 - RNA, 19 nt, Artificial Sequence
  Description of Artificial Sequence: Synthetic oligonucleotide
cuugagggaugcuagucuc

SEQ ID NO: 2177238 - RNA, 19 nt, Artificial Sequence
  Description of Artificial Sequence: Synthetic oligonucleotide
gaugcuagucuccgaacca

SEQ ID NO: 2177239 - RNA, 19 nt, Artificial Sequence
  Description of Artificial Sequence: Synthetic oligonucleotide
acucgauguuggcugacag

SEQ ID NO: 2177240 - RNA, 19 nt, Artificial Sequence
  Description of Artificial Sequence: Synthetic oligonucleotide
cuagucuccgaaccacacg

SEQ ID NO: 2177241 - RNA, 19 nt, Artificial Sequence
  Description of Artificial Sequence: Synthetic oligonucleotide
uccacuugggcaguuaguc

SEQ ID NO: 2177242 - RNA, 19 nt, Artificial Sequence
  Description of Artificial Sequence: Synthetic oligonucleotide
cucagcaguagccuggguc

SEQ ID NO: 2177243 - RNA, 19 nt, Artificial Sequence
  Description of Artificial Sequence: Synthetic oligonucleotide
cauuccauagcugcugcag

SEQ ID NO: 2177244 - RNA, 19 nt, Artificial Sequence
  Description of Artificial Sequence: Synthetic oligonucleotide
uugagggaugcuagucucc

SEQ ID NO: 2177245 - RNA, 19 nt, Artificial Sequence
  Description of Artificial Sequence: Synthetic oligonucleotide
ucggaccacacuaugguuu

SEQ ID NO: 2177246 - RNA, 19 nt, Artificial Sequence
  Description of Artificial Sequence: Synthetic oligonucleotide
ugagcagaagcugggauau

SEQ ID NO: 2177247 - RNA, 19 nt, Artificial Sequence
  Description of Artificial Sequence: Synthetic oligonucleotide
ucugaguagugguucccca

SEQ ID NO: 2177248 - RNA, 19 nt, Artificial Sequence
  Description of Artificial Sequence: Synthetic oligonucleotide
guagugguuccccaggaca

SEQ ID NO: 2177249 - RNA, 19 nt, Artificial Sequence
  Description of Artificial Sequence: Synthetic oligonucleotide
cuacccaccauggguaugg

SEQ ID NO: 2177250 - RNA, 19 nt, Artificial Sequence
  Description of Artificial Sequence: Synthetic oligonucleotide
cuagcuggccuguccaagc

SEQ ID NO: 2177251 - RNA, 19 nt, Artificial Sequence
  Description of Artificial Sequence: Synthetic oligonucleotide
aucagccagggguccacgc

SEQ ID NO: 2177252 - RNA, 19 nt, Artificial Sequence
  Description of Artificial Sequence: Synthetic oligonucleotide
aggacaaucacuggccuga

SEQ ID NO: 2177253 - RNA, 19 nt, Artificial Sequence
  Description of Artificial Sequence: Synthetic oligonucleotide
guccacgcagucucggugg

SEQ ID NO: 2177254 - RNA, 19 nt, Artificial Sequence
  Description of Artificial Sequence: Synthetic oligonucleotide
uccauuccaaagugcagaa

SEQ ID NO: 2177255 - RNA, 19 nt, Artificial Sequence
  Description of Artificial Sequence: Synthetic oligonucleotide
cagaaucuccacuugggca

SEQ ID NO: 2177256 - RNA, 19 nt, Artificial Sequence
  Description of Artificial Sequence: Synthetic oligonucleotide
ucccuccuacccaccaugg

SEQ ID NO: 2177257 - RNA, 19 nt, Artificial Sequence
  Description of Artificial Sequence: Synthetic oligonucleotide
uagugguuccccaggacau

SEQ ID NO: 2177258 - RNA, 19 nt, Artificial Sequence
  Description of Artificial Sequence: Synthetic oligonucleotide
acgucuccaugccaggcuc

SEQ ID NO: 2177259 - RNA, 19 nt, Artificial Sequence
  Description of Artificial Sequence: Synthetic oligonucleotide
ugccuauaagggcaggcau

SEQ ID NO: 2177260 - RNA, 19 nt, Artificial Sequence
  Description of Artificial Sequence: Synthetic oligonucleotide
cugaguagugguuccccag

SEQ ID NO: 2177261 - RNA, 19 nt, Artificial Sequence
  Description of Artificial Sequence: Synthetic oligonucleotide
accacacgucguuugaaca

SEQ ID NO: 2177262 - RNA, 19 nt, Artificial Sequence
  Description of Artificial Sequence: Synthetic oligonucleotide
ugaugccugccgcugggcc

SEQ ID NO: 2177263 - RNA, 19 nt, Artificial Sequence
  Description of Artificial Sequence: Synthetic oligonucleotide
augcuagucuccgaaccac

SEQ ID NO: 2177264 - RNA, 19 nt, Artificial Sequence
  Description of Artificial Sequence: Synthetic oligonucleotide
cgucguuugaacaaauccc

SEQ ID NO: 2177265 - RNA, 19 nt, Artificial Sequence
  Description of Artificial Sequence: Synthetic oligonucleotide
ggaugcuagucuccgaacc

SEQ ID NO: 2177266 - RNA, 19 nt, Artificial Sequence
  Description of Artificial Sequence: Synthetic oligonucleotide
auuccaaagugcagaaucu

SEQ ID NO: 2177267 - RNA, 19 nt, Artificial Sequence
  Description of Artificial Sequence: Synthetic oligonucleotide
gauuuguccuugccuggug

SEQ ID NO: 2177268 - RNA, 19 nt, Artificial Sequence
  Description of Artificial Sequence: Synthetic oligonucleotide
ucuccgaaccacacgucgu

SEQ ID NO: 2177269 - RNA, 19 nt, Artificial Sequence
  Description of Artificial Sequence: Synthetic oligonucleotide
uagcuguccuuggagaggc

SEQ ID NO: 2177270 - RNA, 19 nt, Artificial Sequence
  Description of Artificial Sequence: Synthetic oligonucleotide
agagcauggccacaagcaa

SEQ ID NO: 2177271 - RNA, 19 nt, Artificial Sequence
  Description of Artificial Sequence: Synthetic oligonucleotide
cacaauccuguaguguagg

SEQ ID NO: 2177272 - RNA, 19 nt, Artificial Sequence
  Description of Artificial Sequence: Synthetic oligonucleotide
uauccuaggguugcagaga

SEQ ID NO: 2177273 - RNA, 19 nt, Artificial Sequence
  Description of Artificial Sequence: Synthetic oligonucleotide
gaggacaaucacuggccug

SEQ ID NO: 2177274 - RNA, 19 nt, Artificial Sequence
  Description of Artificial Sequence: Synthetic oligonucleotide
agccuagggccaugagucc

SEQ ID NO: 2177275 - RNA, 19 nt, Artificial Sequence
  Description of Artificial Sequence: Synthetic oligonucleotide
agcagaagcugggauaugu

SEQ ID NO: 2177276 - RNA, 19 nt, Artificial Sequence
  Description of Artificial Sequence: Synthetic oligonucleotide
cacuguuuguuacagaagu

SEQ ID NO: 2177277 - RNA, 19 nt, Artificial Sequence
  Description of Artificial Sequence: Synthetic oligonucleotide
ggugaucucagcaguagcc

SEQ ID NO: 2177278 - RNA, 19 nt, Artificial Sequence
  Description of Artificial Sequence: Synthetic oligonucleotide
uccccaaaguccugagagc

SEQ ID NO: 2177279 - RNA, 19 nt, Artificial Sequence
  Description of Artificial Sequence: Synthetic oligonucleotide
gagacagauguaguggcca

SEQ ID NO: 2177280 - RNA, 19 nt, Artificial Sequence
  Description of Artificial Sequence: Synthetic oligonucleotide
agggaugcuagucuccgaa

SEQ ID NO: 2177281 - RNA, 19 nt, Artificial Sequence
  Description of Artificial Sequence: Synthetic oligonucleotide
gcaggcauagauauccuag

SEQ ID NO: 2177282 - RNA, 19 nt, Artificial Sequence
  Description of Artificial Sequence: Synthetic oligonucleotide
gguaugguauaguggggcc

SEQ ID NO: 2177283 - RNA, 19 nt, Artificial Sequence
  Description of Artificial Sequence: Synthetic oligonucleotide
acaaggccugugcacaaga

SEQ ID NO: 2177284 - RNA, 19 nt, Artificial Sequence
  Description of Artificial Sequence: Synthetic oligonucleotide
agauauccuaggguugcag

SEQ ID NO: 2177285 - RNA, 19 nt, Artificial Sequence
  Description of Artificial Sequence: Synthetic oligonucleotide
gaaccacaaggccugugca

SEQ ID NO: 2177286 - RNA, 19 nt, Artificial Sequence
  Description of Artificial Sequence: Synthetic oligonucleotide
uuguuacagaaguuaucua

SEQ ID NO: 2177287 - RNA, 19 nt, Artificial Sequence
  Description of Artificial Sequence: Synthetic oligonucleotide
aagcugggauauguccaac

SEQ ID NO: 2177288 - RNA, 19 nt, Artificial Sequence
  Description of Artificial Sequence: Synthetic oligonucleotide
auccuaggguugcagagaa

SEQ ID NO: 2177289 - RNA, 19 nt, Artificial Sequence
  Description of Artificial Sequence: Synthetic oligonucleotide
guuuguuacagaaguuauc

SEQ ID NO: 2177290 - RNA, 19 nt, Artificial Sequence
  Description of Artificial Sequence: Synthetic oligonucleotide
aagagggcacggcgcaucu

SEQ ID NO: 2177291 - RNA, 19 nt, Artificial Sequence
  Description of Artificial Sequence: Synthetic oligonucleotide
acacgucuccaugccaggc

SEQ ID NO: 2177292 - RNA, 19 nt, Artificial Sequence
  Description of Artificial Sequence: Synthetic oligonucleotide
caagccacaauccuguagu

SEQ ID NO: 2177293 - RNA, 19 nt, Artificial Sequence
  Description of Artificial Sequence: Synthetic oligonucleotide
aggguccauuccaaagugc

SEQ ID NO: 2177294 - RNA, 19 nt, Artificial Sequence
  Description of Artificial Sequence: Synthetic oligonucleotide
aaacagcacacgucuccau

SEQ ID NO: 2177295 - RNA, 19 nt, Artificial Sequence
  Description of Artificial Sequence: Synthetic oligonucleotide
cugccgcugggccugaacc

SEQ ID NO: 2177296 - RNA, 19 nt, Artificial Sequence
  Description of Artificial Sequence: Synthetic oligonucleotide
ugauuuguccuugccuggu

SEQ ID NO: 2177297 - RNA, 19 nt, Artificial Sequence
  Description of Artificial Sequence: Synthetic oligonucleotide
cucuaaugauuuguccuug

SEQ ID NO: 2177298 - RNA, 19 nt, Artificial Sequence
  Description of Artificial Sequence: Synthetic oligonucleotide
gaagggcucuaaugauuug

SEQ ID NO: 2177299 - RNA, 19 nt, Artificial Sequence
  Description of Artificial Sequence: Synthetic oligonucleotide
aggguugcagagaagggcu

SEQ ID NO: 2177300 - RNA, 19 nt, Artificial Sequence
  Description of Artificial Sequence: Synthetic oligonucleotide
guccauuccaaagugcaga

SEQ ID NO: 2177301 - RNA, 19 nt, Artificial Sequence
  Description of Artificial Sequence: Synthetic oligonucleotide
cuagacaaacagcacacgu

SEQ ID NO: 2177302 - RNA, 19 nt, Artificial Sequence
  Description of Artificial Sequence: Synthetic oligonucleotide
acucucggaccacacuaug

SEQ ID NO: 2177303 - RNA, 19 nt, Artificial Sequence
  Description of Artificial Sequence: Synthetic oligonucleotide
cagcgccgggucuugaggg

SEQ ID NO: 2177304 - RNA, 19 nt, Artificial Sequence
  Description of Artificial Sequence: Synthetic oligonucleotide
aguagccuggguccuuuga

SEQ ID NO: 2177305 - RNA, 19 nt, Artificial Sequence
  Description of Artificial Sequence: Synthetic oligonucleotide
agaagggcucuaaugauuu

SEQ ID NO: 2177306 - RNA, 19 nt, Artificial Sequence
  Description of Artificial Sequence: Synthetic oligonucleotide
uaugguauaguggggccuu

SEQ ID NO: 2177307 - RNA, 19 nt, Artificial Sequence
  Description of Artificial Sequence: Synthetic oligonucleotide
gcagaaucuccacuugggc

SEQ ID NO: 2177308 - RNA, 19 nt, Artificial Sequence
  Description of Artificial Sequence: Synthetic oligonucleotide
cagggguccacgcagucuc

SEQ ID NO: 2177309 - RNA, 19 nt, Artificial Sequence
  Description of Artificial Sequence: Synthetic oligonucleotide
uucagccuagggccaugag

SEQ ID NO: 2177310 - RNA, 19 nt, Artificial Sequence
  Description of Artificial Sequence: Synthetic oligonucleotide
guagcaucagccagggguc

SEQ ID NO: 2177311 - RNA, 19 nt, Artificial Sequence
  Description of Artificial Sequence: Synthetic oligonucleotide
agggacucucugcugguga

SEQ ID NO: 2177312 - RNA, 19 nt, Artificial Sequence
  Description of Artificial Sequence: Synthetic oligonucleotide
uccugagagcugccuauaa

SEQ ID NO: 2177313 - RNA, 19 nt, Artificial Sequence
  Description of Artificial Sequence: Synthetic oligonucleotide
gaguagugguuccccagga

SEQ ID NO: 2177314 - RNA, 19 nt, Artificial Sequence
  Description of Artificial Sequence: Synthetic oligonucleotide
cuuggugacauuggaagaa

SEQ ID NO: 2177315 - RNA, 19 nt, Artificial Sequence
  Description of Artificial Sequence: Synthetic oligonucleotide
uccacucgauguuggcuga

SEQ ID NO: 2177316 - RNA, 19 nt, Artificial Sequence
  Description of Artificial Sequence: Synthetic oligonucleotide
uccgaggaagagggcacgg

SEQ ID NO: 2177317 - RNA, 19 nt, Artificial Sequence
  Description of Artificial Sequence: Synthetic oligonucleotide
ccuauaagggcaggcauag

SEQ ID NO: 2177318 - RNA, 19 nt, Artificial Sequence
  Description of Artificial Sequence: Synthetic oligonucleotide
gcaguuagucaucugagua

SEQ ID NO: 2177319 - RNA, 19 nt, Artificial Sequence
  Description of Artificial Sequence: Synthetic oligonucleotide
ggguaugguauaguggggc

SEQ ID NO: 2177320 - RNA, 19 nt, Artificial Sequence
  Description of Artificial Sequence: Synthetic oligonucleotide
cacacgucuccaugccagg

SEQ ID NO: 2177321 - RNA, 19 nt, Artificial Sequence
  Description of Artificial Sequence: Synthetic oligonucleotide
ugacagggacucucugcug

SEQ ID NO: 2177322 - RNA, 19 nt, Artificial Sequence
  Description of Artificial Sequence: Synthetic oligonucleotide
cacgucguuugaacaaauc

SEQ ID NO: 2177323 - RNA, 19 nt, Artificial Sequence
  Description of Artificial Sequence: Synthetic oligonucleotide
ccauggguaugguauagug

SEQ ID NO: 2177324 - RNA, 19 nt, Artificial Sequence
  Description of Artificial Sequence: Synthetic oligonucleotide
uggguccuuugaagaagug

SEQ ID NO: 2177325 - RNA, 19 nt, Artificial Sequence
  Description of Artificial Sequence: Synthetic oligonucleotide
ggcucuaaugauuuguccu

SEQ ID NO: 2177326 - RNA, 19 nt, Artificial Sequence
  Description of Artificial Sequence: Synthetic oligonucleotide
uccuaggguugcagagaag

SEQ ID NO: 2177327 - RNA, 19 nt, Artificial Sequence
  Description of Artificial Sequence: Synthetic oligonucleotide
caacucucggaccacacua

SEQ ID NO: 2177328 - RNA, 19 nt, Artificial Sequence
  Description of Artificial Sequence: Synthetic oligonucleotide
caugagucccuccuaccca

SEQ ID NO: 2177329 - RNA, 19 nt, Artificial Sequence
  Description of Artificial Sequence: Synthetic oligonucleotide
ccaugagucccuccuaccc

SEQ ID NO: 2177330 - RNA, 19 nt, Artificial Sequence
  Description of Artificial Sequence: Synthetic oligonucleotide
gggcucuaaugauuugucc

SEQ ID NO: 2177331 - RNA, 19 nt, Artificial Sequence
  Description of Artificial Sequence: Synthetic oligonucleotide
agcacacgucuccaugcca

SEQ ID NO: 2177332 - RNA, 19 nt, Artificial Sequence
  Description of Artificial Sequence: Synthetic oligonucleotide
caucugaguagugguuccc

SEQ ID NO: 2177333 - RNA, 19 nt, Artificial Sequence
  Description of Artificial Sequence: Synthetic oligonucleotide
gcauagauauccuaggguu

SEQ ID NO: 2177334 - RNA, 19 nt, Artificial Sequence
  Description of Artificial Sequence: Synthetic oligonucleotide
uaguggccauauuucuuuc

SEQ ID NO: 2177335 - RNA, 19 nt, Artificial Sequence
  Description of Artificial Sequence: Synthetic oligonucleotide
guaguggccauauuucuuu

SEQ ID NO: 2177336 - RNA, 19 nt, Artificial Sequence
  Description of Artificial Sequence: Synthetic oligonucleotide
uucugucuugaugccugcc

SEQ ID NO: 2177337 - RNA, 19 nt, Artificial Sequence
  Description of Artificial Sequence: Synthetic oligonucleotide
ccugugcacaagagcaugg

SEQ ID NO: 2177338 - RNA, 19 nt, Artificial Sequence
  Description of Artificial Sequence: Synthetic oligonucleotide
auaagggcaggcauagaua

SEQ ID NO: 2177339 - RNA, 19 nt, Artificial Sequence
  Description of Artificial Sequence: Synthetic oligonucleotide
ugccgcugggccugaacca

SEQ ID NO: 2177340 - RNA, 19 nt, Artificial Sequence
  Description of Artificial Sequence: Synthetic oligonucleotide
cagcacacgucuccaugcc

SEQ ID NO: 2177341 - RNA, 19 nt, Artificial Sequence
  Description of Artificial Sequence: Synthetic oligonucleotide
gguauaguggggccuugac

SEQ ID NO: 2177342 - RNA, 19 nt, Artificial Sequence
  Description of Artificial Sequence: Synthetic oligonucleotide
aacucucggaccacacuau

SEQ ID NO: 2177343 - RNA, 19 nt, Artificial Sequence
  Description of Artificial Sequence: Synthetic oligonucleotide
guuagucaucugaguagug

SEQ ID NO: 2177344 - RNA, 19 nt, Artificial Sequence
  Description of Artificial Sequence: Synthetic oligonucleotide
uagauauccuaggguugca

SEQ ID NO: 2177345 - RNA, 19 nt, Artificial Sequence
  Description of Artificial Sequence: Synthetic oligonucleotide
guaguccacaaugucagcu

SEQ ID NO: 2177346 - RNA, 19 nt, Artificial Sequence
  Description of Artificial Sequence: Synthetic oligonucleotide
ggugacauuggaagaauaa

SEQ ID NO: 2177347 - RNA, 19 nt, Artificial Sequence
  Description of Artificial Sequence: Synthetic oligonucleotide
uccacgcagucucggugga

SEQ ID NO: 2177348 - RNA, 19 nt, Artificial Sequence
  Description of Artificial Sequence: Synthetic oligonucleotide
gccacaauccuguagugua

SEQ ID NO: 2177349 - RNA, 19 nt, Artificial Sequence
  Description of Artificial Sequence: Synthetic oligonucleotide
cagaaguuaucuagacaaa

SEQ ID NO: 2177350 - RNA, 19 nt, Artificial Sequence
  Description of Artificial Sequence: Synthetic oligonucleotide
cugacagggacucucugcu

SEQ ID NO: 2177351 - RNA, 19 nt, Artificial Sequence
  Description of Artificial Sequence: Synthetic oligonucleotide
ugguauaguggggccuuga

SEQ ID NO: 2177352 - RNA, 19 nt, Artificial Sequence
  Description of Artificial Sequence: Synthetic oligonucleotide
ggcauagauauccuagggu

SEQ ID NO: 2177353 - RNA, 19 nt, Artificial Sequence
  Description of Artificial Sequence: Synthetic oligonucleotide
gggauauguccaacucucg

SEQ ID NO: 2177354 - RNA, 19 nt, Artificial Sequence
  Description of Artificial Sequence: Synthetic oligonucleotide
cuccuacccaccaugggua

SEQ ID NO: 2177355 - RNA, 19 nt, Artificial Sequence
  Description of Artificial Sequence: Synthetic oligonucleotide
caggucugcuguagcauca

SEQ ID NO: 2177356 - RNA, 19 nt, Artificial Sequence
  Description of Artificial Sequence: Synthetic oligonucleotide
gcacacgucuccaugccag

SEQ ID NO: 2177357 - RNA, 19 nt, Artificial Sequence
  Description of Artificial Sequence: Synthetic oligonucleotide
gcuuggugacauuggaaga

SEQ ID NO: 2177358 - RNA, 19 nt, Artificial Sequence
  Description of Artificial Sequence: Synthetic oligonucleotide
ggguccauuccaaagugca

SEQ ID NO: 2177359 - RNA, 19 nt, Artificial Sequence
  Description of Artificial Sequence: Synthetic oligonucleotide
gugacauuggaagaauaau

SEQ ID NO: 2177360 - RNA, 19 nt, Artificial Sequence
  Description of Artificial Sequence: Synthetic oligonucleotide
ccaagccacaauccuguag

SEQ ID NO: 2177361 - RNA, 19 nt, Artificial Sequence
  Description of Artificial Sequence: Synthetic oligonucleotide
auaguggggccuugacuuu

SEQ ID NO: 2177362 - RNA, 19 nt, Artificial Sequence
  Description of Artificial Sequence: Synthetic oligonucleotide
cacuugggcaguuagucau

SEQ ID NO: 2177363 - RNA, 19 nt, Artificial Sequence
  Description of Artificial Sequence: Synthetic oligonucleotide
agggcaauacccggagcca

SEQ ID NO: 2177364 - RNA, 19 nt, Artificial Sequence
  Description of Artificial Sequence: Synthetic oligonucleotide
ccacaauccuguaguguag

SEQ ID NO: 2177365 - RNA, 19 nt, Artificial Sequence
  Description of Artificial Sequence: Synthetic oligonucleotide
aggcugugugcugcccugc

SEQ ID NO: 2177366 - RNA, 19 nt, Artificial Sequence
  Description of Artificial Sequence: Synthetic oligonucleotide
cuccgaggaagagggcacg

SEQ ID NO: 2177367 - RNA, 19 nt, Artificial Sequence
  Description of Artificial Sequence: Synthetic oligonucleotide
gguccauuccaaagugcag

SEQ ID NO: 2177368 - RNA, 19 nt, Artificial Sequence
  Description of Artificial Sequence: Synthetic oligonucleotide
agucuccgaaccacacguc

SEQ ID NO: 2177369 - RNA, 19 nt, Artificial Sequence
  Description of Artificial Sequence: Synthetic oligonucleotide
uccuacccaccauggguau

SEQ ID NO: 2177370 - RNA, 19 nt, Artificial Sequence
  Description of Artificial Sequence: Synthetic oligonucleotide
acgcagucucgguggaacu

SEQ ID NO: 2177371 - RNA, 19 nt, Artificial Sequence
  Description of Artificial Sequence: Synthetic oligonucleotide
uugaugccugccgcugggc

SEQ ID NO: 2177372 - RNA, 19 nt, Artificial Sequence
  Description of Artificial Sequence: Synthetic oligonucleotide
gcagcgccgggucuugagg

SEQ ID NO: 2177373 - RNA, 19 nt, Artificial Sequence
  Description of Artificial Sequence: Synthetic oligonucleotide
agucaucugaguagugguu

SEQ ID NO: 2177374 - RNA, 19 nt, Artificial Sequence
  Description of Artificial Sequence: Synthetic oligonucleotide
cugccuauaagggcaggca

SEQ ID NO: 2177375 - RNA, 19 nt, Artificial Sequence
  Description of Artificial Sequence: Synthetic oligonucleotide
gugggcaggucugcuguag

SEQ ID NO: 2177376 - RNA, 19 nt, Artificial Sequence
  Description of Artificial Sequence: Synthetic oligonucleotide
uggccuguccaagccacaa

SEQ ID NO: 2177377 - RNA, 19 nt, Artificial Sequence
  Description of Artificial Sequence: Synthetic oligonucleotide
uguccaacucucggaccac

SEQ ID NO: 2177378 - RNA, 19 nt, Artificial Sequence
  Description of Artificial Sequence: Synthetic oligonucleotide
guccaagccacaauccugu

SEQ ID NO: 2177379 - RNA, 19 nt, Artificial Sequence
  Description of Artificial Sequence: Synthetic oligonucleotide
uccccaggacauugaacuu

SEQ ID NO: 2177380 - RNA, 19 nt, Artificial Sequence
  Description of Artificial Sequence: Synthetic oligonucleotide
auguuggcugacagggacu

SEQ ID NO: 2177381 - RNA, 19 nt, Artificial Sequence
  Description of Artificial Sequence: Synthetic oligonucleotide
ggagaggccacagguaguc

SEQ ID NO: 2177382 - RNA, 19 nt, Artificial Sequence
  Description of Artificial Sequence: Synthetic oligonucleotide
gggaugcuagucuccgaac

SEQ ID NO: 2177383 - RNA, 19 nt, Artificial Sequence
  Description of Artificial Sequence: Synthetic oligonucleotide
gcugccuauaagggcaggc

SEQ ID NO: 2177384 - RNA, 19 nt, Artificial Sequence
  Description of Artificial Sequence: Synthetic oligonucleotide
caucagccagggguccacg

SEQ ID NO: 2177385 - RNA, 19 nt, Artificial Sequence
  Description of Artificial Sequence: Synthetic oligonucleotide
agcgccgggucuugaggga

SEQ ID NO: 2177386 - RNA, 19 nt, Artificial Sequence
  Description of Artificial Sequence: Synthetic oligonucleotide
acucaugcuuacagggcaa

SEQ ID NO: 2177387 - RNA, 19 nt, Artificial Sequence
  Description of Artificial Sequence: Synthetic oligonucleotide
gccaugagucccuccuacc

SEQ ID NO: 2177388 - RNA, 19 nt, Artificial Sequence
  Description of Artificial Sequence: Synthetic oligonucleotide
uccaagccacaauccugua

SEQ ID NO: 2177389 - RNA, 19 nt, Artificial Sequence
  Description of Artificial Sequence: Synthetic oligonucleotide
gacuuugcccacagggcua

SEQ ID NO: 2177390 - RNA, 19 nt, Artificial Sequence
  Description of Artificial Sequence: Synthetic oligonucleotide
guaugguauaguggggccu

SEQ ID NO: 2177391 - RNA, 19 nt, Artificial Sequence
  Description of Artificial Sequence: Synthetic oligonucleotide
cauagcugcugcaggggcu

SEQ ID NO: 2177392 - RNA, 19 nt, Artificial Sequence
  Description of Artificial Sequence: Synthetic oligonucleotide
cuguagcaucagccagggg

SEQ ID NO: 2177393 - RNA, 19 nt, Artificial Sequence
  Description of Artificial Sequence: Synthetic oligonucleotide
ccgaaccacacgucguuug

SEQ ID NO: 2177394 - RNA, 19 nt, Artificial Sequence
  Description of Artificial Sequence: Synthetic oligonucleotide
cacacgucguuugaacaaa

SEQ ID NO: 2177395 - RNA, 19 nt, Artificial Sequence
  Description of Artificial Sequence: Synthetic oligonucleotide
uccgaaccacacgucguuu

SEQ ID NO: 2177396 - RNA, 19 nt, Artificial Sequence
  Description of Artificial Sequence: Synthetic oligonucleotide
ggcuccgaggaagagggca

SEQ ID NO: 2177397 - RNA, 19 nt, Artificial Sequence
  Description of Artificial Sequence: Synthetic oligonucleotide
gccugugcacaagagcaug

SEQ ID NO: 2177398 - RNA, 19 nt, Artificial Sequence
  Description of Artificial Sequence: Synthetic oligonucleotide
cccaccauggguaugguau

SEQ ID NO: 2177399 - RNA, 19 nt, Artificial Sequence
  Description of Artificial Sequence: Synthetic oligonucleotide
ggcugggaaggguccauuc

SEQ ID NO: 2177400 - RNA, 19 nt, Artificial Sequence
  Description of Artificial Sequence: Synthetic oligonucleotide
ggcaguuagucaucugagu

SEQ ID NO: 2177401 - RNA, 19 nt, Artificial Sequence
  Description of Artificial Sequence: Synthetic oligonucleotide
gcucuaaugauuuguccuu

SEQ ID NO: 2177402 - RNA, 19 nt, Artificial Sequence
  Description of Artificial Sequence: Synthetic oligonucleotide
agugggcaggucugcugua

SEQ ID NO: 2177403 - RNA, 19 nt, Artificial Sequence
  Description of Artificial Sequence: Synthetic oligonucleotide
cccaaaguccugagagcug

SEQ ID NO: 2177404 - RNA, 19 nt, Artificial Sequence
  Description of Artificial Sequence: Synthetic oligonucleotide
gguuccccaggacauugaa

SEQ ID NO: 2177405 - RNA, 19 nt, Artificial Sequence
  Description of Artificial Sequence: Synthetic oligonucleotide
ggcagcgccgggucuugag

SEQ ID NO: 2177406 - RNA, 19 nt, Artificial Sequence
  Description of Artificial Sequence: Synthetic oligonucleotide
acacgucguuugaacaaau

SEQ ID NO: 2177407 - RNA, 19 nt, Artificial Sequence
  Description of Artificial Sequence: Synthetic oligonucleotide
cuuccacucgauguuggcu

SEQ ID NO: 2177408 - RNA, 19 nt, Artificial Sequence
  Description of Artificial Sequence: Synthetic oligonucleotide
caguagccuggguccuuug

SEQ ID NO: 2177409 - RNA, 19 nt, Artificial Sequence
  Description of Artificial Sequence: Synthetic oligonucleotide
agggguccacgcagucucg

SEQ ID NO: 2177410 - RNA, 19 nt, Artificial Sequence
  Description of Artificial Sequence: Synthetic oligonucleotide
acagggcuagcuggccugu

SEQ ID NO: 2177411 - RNA, 19 nt, Artificial Sequence
  Description of Artificial Sequence: Synthetic oligonucleotide
agugguuccccaggacauu

SEQ ID NO: 2177412 - RNA, 19 nt, Artificial Sequence
  Description of Artificial Sequence: Synthetic oligonucleotide
auacccggagccacuguuu

SEQ ID NO: 2177413 - RNA, 19 nt, Artificial Sequence
  Description of Artificial Sequence: Synthetic oligonucleotide
gcagucucgguggaacuca

SEQ ID NO: 2177414 - RNA, 19 nt, Artificial Sequence
  Description of Artificial Sequence: Synthetic oligonucleotide
acccaccauggguauggua

SEQ ID NO: 2177415 - RNA, 19 nt, Artificial Sequence
  Description of Artificial Sequence: Synthetic oligonucleotide
ccacacgucguuugaacaa

SEQ ID NO: 2177416 - RNA, 19 nt, Artificial Sequence
  Description of Artificial Sequence: Synthetic oligonucleotide
cagggacucucugcuggug

SEQ ID NO: 2177417 - RNA, 19 nt, Artificial Sequence
  Description of Artificial Sequence: Synthetic oligonucleotide
gcuguccuuggagaggcca

SEQ ID NO: 2177418 - RNA, 19 nt, Artificial Sequence
  Description of Artificial Sequence: Synthetic oligonucleotide
ggcaggcauagauauccua

SEQ ID NO: 2177419 - RNA, 19 nt, Artificial Sequence
  Description of Artificial Sequence: Synthetic oligonucleotide
gggcaauacccggagccac

SEQ ID NO: 2177420 - RNA, 19 nt, Artificial Sequence
  Description of Artificial Sequence: Synthetic oligonucleotide
cuucagccuagggccauga

SEQ ID NO: 2177421 - RNA, 19 nt, Artificial Sequence
  Description of Artificial Sequence: Synthetic oligonucleotide
cacucgauguuggcugaca

SEQ ID NO: 2177422 - RNA, 19 nt, Artificial Sequence
  Description of Artificial Sequence: Synthetic oligonucleotide
aggcuccgaggaagagggc

SEQ ID NO: 2177423 - RNA, 19 nt, Artificial Sequence
  Description of Artificial Sequence: Synthetic oligonucleotide
ggacaaucacuggccugag

SEQ ID NO: 2177424 - RNA, 19 nt, Artificial Sequence
  Description of Artificial Sequence: Synthetic oligonucleotide
gcuccgaggaagagggcac

SEQ ID NO: 2177425 - RNA, 19 nt, Artificial Sequence
  Description of Artificial Sequence: Synthetic oligonucleotide
cuauaagggcaggcauaga

SEQ ID NO: 2177426 - RNA, 19 nt, Artificial Sequence
  Description of Artificial Sequence: Synthetic oligonucleotide
gggguccacgcagucucgg

SEQ ID NO: 2177427 - RNA, 19 nt, Artificial Sequence
  Description of Artificial Sequence: Synthetic oligonucleotide
cccuccuacccaccauggg

SEQ ID NO: 2177428 - RNA, 19 nt, Artificial Sequence
  Description of Artificial Sequence: Synthetic oligonucleotide
cacgucuccaugccaggcu

SEQ ID NO: 2177429 - RNA, 19 nt, Artificial Sequence
  Description of Artificial Sequence: Synthetic oligonucleotide
cagccggcagcgccggguc

SEQ ID NO: 2177430 - RNA, 19 nt, Artificial Sequence
  Description of Artificial Sequence: Synthetic oligonucleotide
ggaccacacuaugguuuag

SEQ ID NO: 2177431 - RNA, 19 nt, Artificial Sequence
  Description of Artificial Sequence: Synthetic oligonucleotide
gccuauaagggcaggcaua

SEQ ID NO: 2177432 - RNA, 19 nt, Artificial Sequence
  Description of Artificial Sequence: Synthetic oligonucleotide
ccuccuacccaccaugggu

SEQ ID NO: 2177433 - RNA, 19 nt, Artificial Sequence
  Description of Artificial Sequence: Synthetic oligonucleotide
gggccuugacuuugcccac

SEQ ID NO: 2177434 - RNA, 19 nt, Artificial Sequence
  Description of Artificial Sequence: Synthetic oligonucleotide
cuggccuguccaagccaca

SEQ ID NO: 2177435 - RNA, 19 nt, Artificial Sequence
  Description of Artificial Sequence: Synthetic oligonucleotide
gccgggucuugagggaugc

SEQ ID NO: 2177436 - RNA, 19 nt, Artificial Sequence
  Description of Artificial Sequence: Synthetic oligonucleotide
cucggaccacacuaugguu

SEQ ID NO: 2177437 - RNA, 19 nt, Artificial Sequence
  Description of Artificial Sequence: Synthetic oligonucleotide
ccgaggaagagggcacggc

SEQ ID NO: 2177438 - RNA, 19 nt, Artificial Sequence
  Description of Artificial Sequence: Synthetic oligonucleotide
agccggcagcgccgggucu

SEQ ID NO: 2177439 - RNA, 19 nt, Artificial Sequence
  Description of Artificial Sequence: Synthetic oligonucleotide
agcaguagccuggguccuu

SEQ ID NO: 2177440 - RNA, 19 nt, Artificial Sequence
  Description of Artificial Sequence: Synthetic oligonucleotide
gccgcugggccugaaccac

SEQ ID NO: 2177441 - RNA, 19 nt, Artificial Sequence
  Description of Artificial Sequence: Synthetic oligonucleotide
cuccgaaccacacgucguu

SEQ ID NO: 2177442 - RNA, 19 nt, Artificial Sequence
  Description of Artificial Sequence: Synthetic oligonucleotide
ccccaaaguccugagagcu

SEQ ID NO: 2177443 - RNA, 19 nt, Artificial Sequence
  Description of Artificial Sequence: Synthetic oligonucleotide
ggcuagcuggccuguccaa

SEQ ID NO: 2177444 - RNA, 19 nt, Artificial Sequence
  Description of Artificial Sequence: Synthetic oligonucleotide
ccacacuaugguuuaggau

SEQ ID NO: 2177445 - RNA, 19 nt, Artificial Sequence
  Description of Artificial Sequence: Synthetic oligonucleotide
caauacccggagccacugu

SEQ ID NO: 2177446 - RNA, 19 nt, Artificial Sequence
  Description of Artificial Sequence: Synthetic oligonucleotide
cucaugcuuacagggcaau

SEQ ID NO: 2177447 - RNA, 19 nt, Artificial Sequence
  Description of Artificial Sequence: Synthetic oligonucleotide
ccuacccaccauggguaug

SEQ ID NO: 2177448 - RNA, 19 nt, Artificial Sequence
  Description of Artificial Sequence: Synthetic oligonucleotide
ccaccauggguaugguaua

SEQ ID NO: 2177449 - RNA, 19 nt, Artificial Sequence
  Description of Artificial Sequence: Synthetic oligonucleotide
ggcaggucugcuguagcau

SEQ ID NO: 2177450 - RNA, 19 nt, Artificial Sequence
  Description of Artificial Sequence: Synthetic oligonucleotide
ccuguaguguaggcuggga

SEQ ID NO: 2177451 - RNA, 19 nt, Artificial Sequence
  Description of Artificial Sequence: Synthetic oligonucleotide
guuggcugacagggacucu

SEQ ID NO: 2177452 - RNA, 19 nt, Artificial Sequence
  Description of Artificial Sequence: Synthetic oligonucleotide
cagucucgguggaacucau

SEQ ID NO: 2177453 - RNA, 19 nt, Artificial Sequence
  Description of Artificial Sequence: Synthetic oligonucleotide
cggaccacacuaugguuua

SEQ ID NO: 2177454 - RNA, 19 nt, Artificial Sequence
  Description of Artificial Sequence: Synthetic oligonucleotide
cgcagucucgguggaacuc

SEQ ID NO: 2177455 - RNA, 19 nt, Artificial Sequence
  Description of Artificial Sequence: Synthetic oligonucleotide
ccaggacauugaacuugca

SEQ ID NO: 2177456 - RNA, 19 nt, Artificial Sequence
  Description of Artificial Sequence: Synthetic oligonucleotide
gguccuggcucugugucuu

SEQ ID NO: 2177457 - RNA, 19 nt, Artificial Sequence
  Description of Artificial Sequence: Synthetic oligonucleotide
gggccaugagucccuccua

SEQ ID NO: 2177458 - RNA, 19 nt, Artificial Sequence
  Description of Artificial Sequence: Synthetic oligonucleotide
ggguccacgcagucucggu

SEQ ID NO: 2177459 - RNA, 19 nt, Artificial Sequence
  Description of Artificial Sequence: Synthetic oligonucleotide
ccacucgauguuggcugac

SEQ ID NO: 2177460 - RNA, 19 nt, Artificial Sequence
  Description of Artificial Sequence: Synthetic oligonucleotide
cagauguaguggccauauu

SEQ ID NO: 2177461 - RNA, 19 nt, Artificial Sequence
  Description of Artificial Sequence: Synthetic oligonucleotide
cagcaguagccuggguccu

SEQ ID NO: 2177462 - RNA, 19 nt, Artificial Sequence
  Description of Artificial Sequence: Synthetic oligonucleotide
ccccguagcuguccuugga

SEQ ID NO: 2177463 - RNA, 19 nt, Artificial Sequence
  Description of Artificial Sequence: Synthetic oligonucleotide
cugcugguucugucuugau

SEQ ID NO: 2177464 - RNA, 19 nt, Artificial Sequence
  Description of Artificial Sequence: Synthetic oligonucleotide
cuggugguccuggcucugu

SEQ ID NO: 2177465 - RNA, 19 nt, Artificial Sequence
  Description of Artificial Sequence: Synthetic oligonucleotide
cgggucuugagggaugcua

SEQ ID NO: 2177466 - RNA, 19 nt, Artificial Sequence
  Description of Artificial Sequence: Synthetic oligonucleotide
gggcaggcauagauauccu

SEQ ID NO: 2177467 - RNA, 19 nt, Artificial Sequence
  Description of Artificial Sequence: Synthetic oligonucleotide
gcaguagccuggguccuuu

SEQ ID NO: 2177468 - RNA, 19 nt, Artificial Sequence
  Description of Artificial Sequence: Synthetic oligonucleotide
ccggcagcgccgggucuug

SEQ ID NO: 2177469 - RNA, 19 nt, Artificial Sequence
  Description of Artificial Sequence: Synthetic oligonucleotide
gcgccgggucuugagggau

SEQ ID NO: 2177470 - RNA, 19 nt, Artificial Sequence
  Description of Artificial Sequence: Synthetic oligonucleotide
gccggcagcgccgggucuu

SEQ ID NO: 2177471 - RNA, 19 nt, Artificial Sequence
  Description of Artificial Sequence: Synthetic oligonucleotide
ccgggucuugagggaugcu

SEQ ID NO: 2177472 - RNA, 19 nt, Artificial Sequence
  Description of Artificial Sequence: Synthetic oligonucleotide
cggcagcgccgggucuuga

SEQ ID NO: 2177473 - RNA, 19 nt, Artificial Sequence
  Description of Artificial Sequence: Synthetic oligonucleotide
uaaaauaucaucuuggcgg

SEQ ID NO: 2177474 - RNA, 19 nt, Artificial Sequence
  Description of Artificial Sequence: Synthetic oligonucleotide
aagauucucagguacauuc

SEQ ID NO: 2177475 - RNA, 19 nt, Artificial Sequence
  Description of Artificial Sequence: Synthetic oligonucleotide
cugacaacaaacuugaagc

SEQ ID NO: 2177476 - RNA, 19 nt, Artificial Sequence
  Description of Artificial Sequence: Synthetic oligonucleotide
aacagagagaacaagaauc

SEQ ID NO: 2177477 - RNA, 19 nt, Artificial Sequence
  Description of Artificial Sequence: Synthetic oligonucleotide
uuaaaauaucaucuuggcg

SEQ ID NO: 2177478 - RNA, 19 nt, Artificial Sequence
  Description of Artificial Sequence: Synthetic oligonucleotide
gauguuuccugguacaucg

SEQ ID NO: 2177479 - RNA, 19 nt, Artificial Sequence
  Description of Artificial Sequence: Synthetic oligonucleotide
aaaauaucaucuuggcggg

SEQ ID NO: 2177480 - RNA, 19 nt, Artificial Sequence
  Description of Artificial Sequence: Synthetic oligonucleotide
uuucuggccaaacagagag

SEQ ID NO: 2177481 - RNA, 19 nt, Artificial Sequence
  Description of Artificial Sequence: Synthetic oligonucleotide
uuugcguugaucacgaugu

SEQ ID NO: 2177482 - RNA, 19 nt, Artificial Sequence
  Description of Artificial Sequence: Synthetic oligonucleotide
uaaagugaagcccagcuga

SEQ ID NO: 2177483 - RNA, 19 nt, Artificial Sequence
  Description of Artificial Sequence: Synthetic oligonucleotide
uagaacuuacuuaaggagc

SEQ ID NO: 2177484 - RNA, 19 nt, Artificial Sequence
  Description of Artificial Sequence: Synthetic oligonucleotide
uguaucauucuuauguuga

SEQ ID NO: 2177485 - RNA, 19 nt, Artificial Sequence
  Description of Artificial Sequence: Synthetic oligonucleotide
uuuccugacaacaaacuug

SEQ ID NO: 2177486 - RNA, 19 nt, Artificial Sequence
  Description of Artificial Sequence: Synthetic oligonucleotide
augaggguuaaauugacag

SEQ ID NO: 2177487 - RNA, 19 nt, Artificial Sequence
  Description of Artificial Sequence: Synthetic oligonucleotide
gaggguuaaauugacagcg

SEQ ID NO: 2177488 - RNA, 19 nt, Artificial Sequence
  Description of Artificial Sequence: Synthetic oligonucleotide
ugcuagaacuuacuuaagg

SEQ ID NO: 2177489 - RNA, 19 nt, Artificial Sequence
  Description of Artificial Sequence: Synthetic oligonucleotide
agugaagcccagcugauac

SEQ ID NO: 2177490 - RNA, 19 nt, Artificial Sequence
  Description of Artificial Sequence: Synthetic oligonucleotide
uguacgcugaacuucaucu

SEQ ID NO: 2177491 - RNA, 19 nt, Artificial Sequence
  Description of Artificial Sequence: Synthetic oligonucleotide
gauucaagggcuugcaaag

SEQ ID NO: 2177492 - RNA, 19 nt, Artificial Sequence
  Description of Artificial Sequence: Synthetic oligonucleotide
ucaucugugucuuaggcac

SEQ ID NO: 2177493 - RNA, 19 nt, Artificial Sequence
  Description of Artificial Sequence: Synthetic oligonucleotide
ugagaagauucucagguac

SEQ ID NO: 2177494 - RNA, 19 nt, Artificial Sequence
  Description of Artificial Sequence: Synthetic oligonucleotide
aagaaucgugcaauguucc

SEQ ID NO: 2177495 - RNA, 19 nt, Artificial Sequence
  Description of Artificial Sequence: Synthetic oligonucleotide
aauuaaagugaagcccagc

SEQ ID NO: 2177496 - RNA, 19 nt, Artificial Sequence
  Description of Artificial Sequence: Synthetic oligonucleotide
uucaacucauauaagcgcu

SEQ ID NO: 2177497 - RNA, 19 nt, Artificial Sequence
  Description of Artificial Sequence: Synthetic oligonucleotide
accaaauucaaguccagug

SEQ ID NO: 2177498 - RNA, 19 nt, Artificial Sequence
  Description of Artificial Sequence: Synthetic oligonucleotide
cuucaacucauauaagcgc

SEQ ID NO: 2177499 - RNA, 19 nt, Artificial Sequence
  Description of Artificial Sequence: Synthetic oligonucleotide
aaugugugugcacaguaga

SEQ ID NO: 2177500 - RNA, 19 nt, Artificial Sequence
  Description of Artificial Sequence: Synthetic oligonucleotide
caagggcuugcaaagaugg

SEQ ID NO: 2177501 - RNA, 19 nt, Artificial Sequence
  Description of Artificial Sequence: Synthetic oligonucleotide
agcacaagcagggaaaugg

SEQ ID NO: 2177502 - RNA, 19 nt, Artificial Sequence
  Description of Artificial Sequence: Synthetic oligonucleotide
uucccaaccagccaugggc

SEQ ID NO: 2177503 - RNA, 19 nt, Artificial Sequence
  Description of Artificial Sequence: Synthetic oligonucleotide
ucauagagcggaaaacagc

SEQ ID NO: 2177504 - RNA, 19 nt, Artificial Sequence
  Description of Artificial Sequence: Synthetic oligonucleotide
cugaaacauggcaauaucc

SEQ ID NO: 2177505 - RNA, 19 nt, Artificial Sequence
  Description of Artificial Sequence: Synthetic oligonucleotide
gagagaacaagaaucgugc

SEQ ID NO: 2177506 - RNA, 19 nt, Artificial Sequence
  Description of Artificial Sequence: Synthetic oligonucleotide
aacuuacuuaaggagcugg

SEQ ID NO: 2177507 - RNA, 19 nt, Artificial Sequence
  Description of Artificial Sequence: Synthetic oligonucleotide
caaauuaaagugaagccca

SEQ ID NO: 2177508 - RNA, 19 nt, Artificial Sequence
  Description of Artificial Sequence: Synthetic oligonucleotide
uuaaagugaagcccagcug

SEQ ID NO: 2177509 - RNA, 19 nt, Artificial Sequence
  Description of Artificial Sequence: Synthetic oligonucleotide
aguacugaaggggacaagg

SEQ ID NO: 2177510 - RNA, 19 nt, Artificial Sequence
  Description of Artificial Sequence: Synthetic oligonucleotide
ucuuugaaaggccaucaac

SEQ ID NO: 2177511 - RNA, 19 nt, Artificial Sequence
  Description of Artificial Sequence: Synthetic oligonucleotide
uaagcgcuuuaaaauauca

SEQ ID NO: 2177512 - RNA, 19 nt, Artificial Sequence
  Description of Artificial Sequence: Synthetic oligonucleotide
uugaaaggccaucaacugc

SEQ ID NO: 2177513 - RNA, 19 nt, Artificial Sequence
  Description of Artificial Sequence: Synthetic oligonucleotide
ucauucuuauguugaaccc

SEQ ID NO: 2177514 - RNA, 19 nt, Artificial Sequence
  Description of Artificial Sequence: Synthetic oligonucleotide
acagagagaacaagaaucg

SEQ ID NO: 2177515 - RNA, 19 nt, Artificial Sequence
  Description of Artificial Sequence: Synthetic oligonucleotide
uguaagacaagcugcuaga

SEQ ID NO: 2177516 - RNA, 19 nt, Artificial Sequence
  Description of Artificial Sequence: Synthetic oligonucleotide
auugacagcgcuguguuuc

SEQ ID NO: 2177517 - RNA, 19 nt, Artificial Sequence
  Description of Artificial Sequence: Synthetic oligonucleotide
uauaagcgcuuuaaaauau

SEQ ID NO: 2177518 - RNA, 19 nt, Artificial Sequence
  Description of Artificial Sequence: Synthetic oligonucleotide
ucuugacugacgaaugugu

SEQ ID NO: 2177519 - RNA, 19 nt, Artificial Sequence
  Description of Artificial Sequence: Synthetic oligonucleotide
aucuuggcgggauucaagg

SEQ ID NO: 2177520 - RNA, 19 nt, Artificial Sequence
  Description of Artificial Sequence: Synthetic oligonucleotide
uucagcugaaacauggcaa

SEQ ID NO: 2177521 - RNA, 19 nt, Artificial Sequence
  Description of Artificial Sequence: Synthetic oligonucleotide
auauaagcgcuuuaaaaua

SEQ ID NO: 2177522 - RNA, 19 nt, Artificial Sequence
  Description of Artificial Sequence: Synthetic oligonucleotide
gaaacauggcaauauccac

SEQ ID NO: 2177523 - RNA, 19 nt, Artificial Sequence
  Description of Artificial Sequence: Synthetic oligonucleotide
uguugaacccuguaagaca

SEQ ID NO: 2177524 - RNA, 19 nt, Artificial Sequence
  Description of Artificial Sequence: Synthetic oligonucleotide
aagguagcgggcgagggac

SEQ ID NO: 2177525 - RNA, 19 nt, Artificial Sequence
  Description of Artificial Sequence: Synthetic oligonucleotide
aguucauagagcggaaaac

SEQ ID NO: 2177526 - RNA, 19 nt, Artificial Sequence
  Description of Artificial Sequence: Synthetic oligonucleotide
agaaucgugcaauguuccc

SEQ ID NO: 2177527 - RNA, 19 nt, Artificial Sequence
  Description of Artificial Sequence: Synthetic oligonucleotide
uggagugugaaucaucuuu

SEQ ID NO: 2177528 - RNA, 19 nt, Artificial Sequence
  Description of Artificial Sequence: Synthetic oligonucleotide
gugcauuugugguuaaagg

SEQ ID NO: 2177529 - RNA, 19 nt, Artificial Sequence
  Description of Artificial Sequence: Synthetic oligonucleotide
gacccuguagcguucacag

SEQ ID NO: 2177530 - RNA, 19 nt, Artificial Sequence
  Description of Artificial Sequence: Synthetic oligonucleotide
ugaggguuaaauugacagc

SEQ ID NO: 2177531 - RNA, 19 nt, Artificial Sequence
  Description of Artificial Sequence: Synthetic oligonucleotide
auguugaacccuguaagac

SEQ ID NO: 2177532 - RNA, 19 nt, Artificial Sequence
  Description of Artificial Sequence: Synthetic oligonucleotide
cuguaagacaagcugcuag

SEQ ID NO: 2177533 - RNA, 19 nt, Artificial Sequence
  Description of Artificial Sequence: Synthetic oligonucleotide
gucuuaggcacauucuucc

SEQ ID NO: 2177534 - RNA, 19 nt, Artificial Sequence
  Description of Artificial Sequence: Synthetic oligonucleotide
caagaaucgugcaauguuc

SEQ ID NO: 2177535 - RNA, 19 nt, Artificial Sequence
  Description of Artificial Sequence: Synthetic oligonucleotide
uucucagguacauucuuga

SEQ ID NO: 2177536 - RNA, 19 nt, Artificial Sequence
  Description of Artificial Sequence: Synthetic oligonucleotide
uuacauccaagucugcauc

SEQ ID NO: 2177537 - RNA, 19 nt, Artificial Sequence
  Description of Artificial Sequence: Synthetic oligonucleotide
uaaauugacagcgcugugu

SEQ ID NO: 2177538 - RNA, 19 nt, Artificial Sequence
  Description of Artificial Sequence: Synthetic oligonucleotide
ugacugacgaaugugugug

SEQ ID NO: 2177539 - RNA, 19 nt, Artificial Sequence
  Description of Artificial Sequence: Synthetic oligonucleotide
uucaucugugucuuaggca

SEQ ID NO: 2177540 - RNA, 19 nt, Artificial Sequence
  Description of Artificial Sequence: Synthetic oligonucleotide
cuuggcgggauucaagggc

SEQ ID NO: 2177541 - RNA, 19 nt, Artificial Sequence
  Description of Artificial Sequence: Synthetic oligonucleotide
ucucacaggacuucagcca

SEQ ID NO: 2177542 - RNA, 19 nt, Artificial Sequence
  Description of Artificial Sequence: Synthetic oligonucleotide
uggugggaaccaaaggaag

SEQ ID NO: 2177543 - RNA, 19 nt, Artificial Sequence
  Description of Artificial Sequence: Synthetic oligonucleotide
accaaaggaaggaagguag

SEQ ID NO: 2177544 - RNA, 19 nt, Artificial Sequence
  Description of Artificial Sequence: Synthetic oligonucleotide
caccucugcacauuggcgg

SEQ ID NO: 2177545 - RNA, 19 nt, Artificial Sequence
  Description of Artificial Sequence: Synthetic oligonucleotide
gacaacaaacuugaagcug

SEQ ID NO: 2177546 - RNA, 19 nt, Artificial Sequence
  Description of Artificial Sequence: Synthetic oligonucleotide
uggguuugcguugaucacg

SEQ ID NO: 2177547 - RNA, 19 nt, Artificial Sequence
  Description of Artificial Sequence: Synthetic oligonucleotide
agaacaagaaucgugcaau

SEQ ID NO: 2177548 - RNA, 19 nt, Artificial Sequence
  Description of Artificial Sequence: Synthetic oligonucleotide
acaagaaucgugcaauguu

SEQ ID NO: 2177549 - RNA, 19 nt, Artificial Sequence
  Description of Artificial Sequence: Synthetic oligonucleotide
uguugguuacauccaaguc

SEQ ID NO: 2177550 - RNA, 19 nt, Artificial Sequence
  Description of Artificial Sequence: Synthetic oligonucleotide
gaaucaucuuugaaaggcc

SEQ ID NO: 2177551 - RNA, 19 nt, Artificial Sequence
  Description of Artificial Sequence: Synthetic oligonucleotide
guuugcguugaucacgaug

SEQ ID NO: 2177552 - RNA, 19 nt, Artificial Sequence
  Description of Artificial Sequence: Synthetic oligonucleotide
aaauuaaagugaagcccag

SEQ ID NO: 2177553 - RNA, 19 nt, Artificial Sequence
  Description of Artificial Sequence: Synthetic oligonucleotide
caaaggaaggaagguagcg

SEQ ID NO: 2177554 - RNA, 19 nt, Artificial Sequence
  Description of Artificial Sequence: Synthetic oligonucleotide
cuugagaagauucucaggu

SEQ ID NO: 2177555 - RNA, 19 nt, Artificial Sequence
  Description of Artificial Sequence: Synthetic oligonucleotide
ugcaucuggagugugaauc

SEQ ID NO: 2177556 - RNA, 19 nt, Artificial Sequence
  Description of Artificial Sequence: Synthetic oligonucleotide
ccaaauuaaagugaagccc

SEQ ID NO: 2177557 - RNA, 19 nt, Artificial Sequence
  Description of Artificial Sequence: Synthetic oligonucleotide
acccuguaagacaagcugc

SEQ ID NO: 2177558 - RNA, 19 nt, Artificial Sequence
  Description of Artificial Sequence: Synthetic oligonucleotide
aacaagaaucgugcaaugu

SEQ ID NO: 2177559 - RNA, 19 nt, Artificial Sequence
  Description of Artificial Sequence: Synthetic oligonucleotide
uuaaauugacagcgcugug

SEQ ID NO: 2177560 - RNA, 19 nt, Artificial Sequence
  Description of Artificial Sequence: Synthetic oligonucleotide
uuaaggagcuggagggcag

SEQ ID NO: 2177561 - RNA, 19 nt, Artificial Sequence
  Description of Artificial Sequence: Synthetic oligonucleotide
cauucuugacugacgaaug

SEQ ID NO: 2177562 - RNA, 19 nt, Artificial Sequence
  Description of Artificial Sequence: Synthetic oligonucleotide
agaacuuacuuaaggagcu

SEQ ID NO: 2177563 - RNA, 19 nt, Artificial Sequence
  Description of Artificial Sequence: Synthetic oligonucleotide
ucagcugaaacauggcaau

SEQ ID NO: 2177564 - RNA, 19 nt, Artificial Sequence
  Description of Artificial Sequence: Synthetic oligonucleotide
gguacaucggcaugguggg

SEQ ID NO: 2177565 - RNA, 19 nt, Artificial Sequence
  Description of Artificial Sequence: Synthetic oligonucleotide
aaucgugcaauguucccuu

SEQ ID NO: 2177566 - RNA, 19 nt, Artificial Sequence
  Description of Artificial Sequence: Synthetic oligonucleotide
uugacugacgaaugugugu

SEQ ID NO: 2177567 - RNA, 19 nt, Artificial Sequence
  Description of Artificial Sequence: Synthetic oligonucleotide
aauaucaucuuggcgggau

SEQ ID NO: 2177568 - RNA, 19 nt, Artificial Sequence
  Description of Artificial Sequence: Synthetic oligonucleotide
uccaagucugcaucuggag

SEQ ID NO: 2177569 - RNA, 19 nt, Artificial Sequence
  Description of Artificial Sequence: Synthetic oligonucleotide
ucuuggcgggauucaaggg

SEQ ID NO: 2177570 - RNA, 19 nt, Artificial Sequence
  Description of Artificial Sequence: Synthetic oligonucleotide
uuaggcacauucuuccaaa

SEQ ID NO: 2177571 - RNA, 19 nt, Artificial Sequence
  Description of Artificial Sequence: Synthetic oligonucleotide
uguagcguucacagaggag

SEQ ID NO: 2177572 - RNA, 19 nt, Artificial Sequence
  Description of Artificial Sequence: Synthetic oligonucleotide
caagcaccaaauucaaguc

SEQ ID NO: 2177573 - RNA, 19 nt, Artificial Sequence
  Description of Artificial Sequence: Synthetic oligonucleotide
cuugacugacgaaugugug

SEQ ID NO: 2177574 - RNA, 19 nt, Artificial Sequence
  Description of Artificial Sequence: Synthetic oligonucleotide
cugccuucaacucauauaa

SEQ ID NO: 2177575 - RNA, 19 nt, Artificial Sequence
  Description of Artificial Sequence: Synthetic oligonucleotide
gaaugugugugcacaguag

SEQ ID NO: 2177576 - RNA, 19 nt, Artificial Sequence
  Description of Artificial Sequence: Synthetic oligonucleotide
cuguaucauucuuauguug

SEQ ID NO: 2177577 - RNA, 19 nt, Artificial Sequence
  Description of Artificial Sequence: Synthetic oligonucleotide
guacauucuugacugacga

SEQ ID NO: 2177578 - RNA, 19 nt, Artificial Sequence
  Description of Artificial Sequence: Synthetic oligonucleotide
acauucuugacugacgaau

SEQ ID NO: 2177579 - RNA, 19 nt, Artificial Sequence
  Description of Artificial Sequence: Synthetic oligonucleotide
agguacauucuugacugac

SEQ ID NO: 2177580 - RNA, 19 nt, Artificial Sequence
  Description of Artificial Sequence: Synthetic oligonucleotide
cuuacuuaaggagcuggag

SEQ ID NO: 2177581 - RNA, 19 nt, Artificial Sequence
  Description of Artificial Sequence: Synthetic oligonucleotide
cauaauccuuuccaagcac

SEQ ID NO: 2177582 - RNA, 19 nt, Artificial Sequence
  Description of Artificial Sequence: Synthetic oligonucleotide
cuuauguugaacccuguaa

SEQ ID NO: 2177583 - RNA, 19 nt, Artificial Sequence
  Description of Artificial Sequence: Synthetic oligonucleotide
uucaaguccagugcauuug

SEQ ID NO: 2177584 - RNA, 19 nt, Artificial Sequence
  Description of Artificial Sequence: Synthetic oligonucleotide
gccuucaacucauauaagc

SEQ ID NO: 2177585 - RNA, 19 nt, Artificial Sequence
  Description of Artificial Sequence: Synthetic oligonucleotide
cuuucagcugaaacauggc

SEQ ID NO: 2177586 - RNA, 19 nt, Artificial Sequence
  Description of Artificial Sequence: Synthetic oligonucleotide
acuuaaggagcuggagggc

SEQ ID NO: 2177587 - RNA, 19 nt, Artificial Sequence
  Description of Artificial Sequence: Synthetic oligonucleotide
auucuuauguugaacccug

SEQ ID NO: 2177588 - RNA, 19 nt, Artificial Sequence
  Description of Artificial Sequence: Synthetic oligonucleotide
uccccgaagcacuugagaa

SEQ ID NO: 2177589 - RNA, 19 nt, Artificial Sequence
  Description of Artificial Sequence: Synthetic oligonucleotide
gacgaaugugugugcacag

SEQ ID NO: 2177590 - RNA, 19 nt, Artificial Sequence
  Description of Artificial Sequence: Synthetic oligonucleotide
guucauagagcggaaaaca

SEQ ID NO: 2177591 - RNA, 19 nt, Artificial Sequence
  Description of Artificial Sequence: Synthetic oligonucleotide
ugacgaaugugugugcaca

SEQ ID NO: 2177592 - RNA, 19 nt, Artificial Sequence
  Description of Artificial Sequence: Synthetic oligonucleotide
uaucauucuuauguugaac

SEQ ID NO: 2177593 - RNA, 19 nt, Artificial Sequence
  Description of Artificial Sequence: Synthetic oligonucleotide
uuggcgggauucaagggcu

SEQ ID NO: 2177594 - RNA, 19 nt, Artificial Sequence
  Description of Artificial Sequence: Synthetic oligonucleotide
ccugacaacaaacuugaag

SEQ ID NO: 2177595 - RNA, 19 nt, Artificial Sequence
  Description of Artificial Sequence: Synthetic oligonucleotide
uucuugacugacgaaugug

SEQ ID NO: 2177596 - RNA, 19 nt, Artificial Sequence
  Description of Artificial Sequence: Synthetic oligonucleotide
acauuggcgggugcuaccc

SEQ ID NO: 2177597 - RNA, 19 nt, Artificial Sequence
  Description of Artificial Sequence: Synthetic oligonucleotide
aaacuugaagcuguaucau

SEQ ID NO: 2177598 - RNA, 19 nt, Artificial Sequence
  Description of Artificial Sequence: Synthetic oligonucleotide
cauagagcggaaaacagcu

SEQ ID NO: 2177599 - RNA, 19 nt, Artificial Sequence
  Description of Artificial Sequence: Synthetic oligonucleotide
gagaacaagaaucgugcaa

SEQ ID NO: 2177600 - RNA, 19 nt, Artificial Sequence
  Description of Artificial Sequence: Synthetic oligonucleotide
ucuuauguugaacccugua

SEQ ID NO: 2177601 - RNA, 19 nt, Artificial Sequence
  Description of Artificial Sequence: Synthetic oligonucleotide
caaugaggguuaaauugac

SEQ ID NO: 2177602 - RNA, 19 nt, Artificial Sequence
  Description of Artificial Sequence: Synthetic oligonucleotide
gcuagaacuuacuuaagga

SEQ ID NO: 2177603 - RNA, 19 nt, Artificial Sequence
  Description of Artificial Sequence: Synthetic oligonucleotide
ugaucacgaugucuuucag

SEQ ID NO: 2177604 - RNA, 19 nt, Artificial Sequence
  Description of Artificial Sequence: Synthetic oligonucleotide
agagaacaagaaucgugca

SEQ ID NO: 2177605 - RNA, 19 nt, Artificial Sequence
  Description of Artificial Sequence: Synthetic oligonucleotide
uccaagcaccaaauucaag

SEQ ID NO: 2177606 - RNA, 19 nt, Artificial Sequence
  Description of Artificial Sequence: Synthetic oligonucleotide
auaagcgcuuuaaaauauc

SEQ ID NO: 2177607 - RNA, 19 nt, Artificial Sequence
  Description of Artificial Sequence: Synthetic oligonucleotide
aaugaggguuaaauugaca

SEQ ID NO: 2177608 - RNA, 19 nt, Artificial Sequence
  Description of Artificial Sequence: Synthetic oligonucleotide
aauucaaguccagugcauu

SEQ ID NO: 2177609 - RNA, 19 nt, Artificial Sequence
  Description of Artificial Sequence: Synthetic oligonucleotide
uacugaaggggacaagguu

SEQ ID NO: 2177610 - RNA, 19 nt, Artificial Sequence
  Description of Artificial Sequence: Synthetic oligonucleotide
guuaaauugacagcgcugu

SEQ ID NO: 2177611 - RNA, 19 nt, Artificial Sequence
  Description of Artificial Sequence: Synthetic oligonucleotide
accucugcacauuggcggg

SEQ ID NO: 2177612 - RNA, 19 nt, Artificial Sequence
  Description of Artificial Sequence: Synthetic oligonucleotide
gaguucauagagcggaaaa

SEQ ID NO: 2177613 - RNA, 19 nt, Artificial Sequence
  Description of Artificial Sequence: Synthetic oligonucleotide
agcaccacaucugccacgg

SEQ ID NO: 2177614 - RNA, 19 nt, Artificial Sequence
  Description of Artificial Sequence: Synthetic oligonucleotide
agcggaaaacagcugcucu

SEQ ID NO: 2177615 - RNA, 19 nt, Artificial Sequence
  Description of Artificial Sequence: Synthetic oligonucleotide
acacaaacgcucagaggcc

SEQ ID NO: 2177616 - RNA, 19 nt, Artificial Sequence
  Description of Artificial Sequence: Synthetic oligonucleotide
uugcaaagauggcucagau

SEQ ID NO: 2177617 - RNA, 19 nt, Artificial Sequence
  Description of Artificial Sequence: Synthetic oligonucleotide
uuccaagcaccaaauucaa

SEQ ID NO: 2177618 - RNA, 19 nt, Artificial Sequence
  Description of Artificial Sequence: Synthetic oligonucleotide
cuugcaggauguugguuac

SEQ ID NO: 2177619 - RNA, 19 nt, Artificial Sequence
  Description of Artificial Sequence: Synthetic oligonucleotide
aggguuaaauugacagcgc

SEQ ID NO: 2177620 - RNA, 19 nt, Artificial Sequence
  Description of Artificial Sequence: Synthetic oligonucleotide
gaagcuguaucauucuuau

SEQ ID NO: 2177621 - RNA, 19 nt, Artificial Sequence
  Description of Artificial Sequence: Synthetic oligonucleotide
ucgauggggcacauugucu

SEQ ID NO: 2177622 - RNA, 19 nt, Artificial Sequence
  Description of Artificial Sequence: Synthetic oligonucleotide
uccuuuccaagcaccaaau

SEQ ID NO: 2177623 - RNA, 19 nt, Artificial Sequence
  Description of Artificial Sequence: Synthetic oligonucleotide
aaccaaaggaaggaaggua

SEQ ID NO: 2177624 - RNA, 19 nt, Artificial Sequence
  Description of Artificial Sequence: Synthetic oligonucleotide
aacucauauaagcgcuuua

SEQ ID NO: 2177625 - RNA, 19 nt, Artificial Sequence
  Description of Artificial Sequence: Synthetic oligonucleotide
agcugcuagaacuuacuua

SEQ ID NO: 2177626 - RNA, 19 nt, Artificial Sequence
  Description of Artificial Sequence: Synthetic oligonucleotide
gcaauauccacccagcugu

SEQ ID NO: 2177627 - RNA, 19 nt, Artificial Sequence
  Description of Artificial Sequence: Synthetic oligonucleotide
aagcuguaucauucuuaug

SEQ ID NO: 2177628 - RNA, 19 nt, Artificial Sequence
  Description of Artificial Sequence: Synthetic oligonucleotide
agucccuuuccugacaaca

SEQ ID NO: 2177629 - RNA, 19 nt, Artificial Sequence
  Description of Artificial Sequence: Synthetic oligonucleotide
ucccaaccagccaugggcu

SEQ ID NO: 2177630 - RNA, 19 nt, Artificial Sequence
  Description of Artificial Sequence: Synthetic oligonucleotide
cccaguuugcuguagcacg

SEQ ID NO: 2177631 - RNA, 19 nt, Artificial Sequence
  Description of Artificial Sequence: Synthetic oligonucleotide
gguacauucuugacugacg

SEQ ID NO: 2177632 - RNA, 19 nt, Artificial Sequence
  Description of Artificial Sequence: Synthetic oligonucleotide
acaucggcauggugggaac

SEQ ID NO: 2177633 - RNA, 19 nt, Artificial Sequence
  Description of Artificial Sequence: Synthetic oligonucleotide
gaaauggguggggaggcug

SEQ ID NO: 2177634 - RNA, 19 nt, Artificial Sequence
  Description of Artificial Sequence: Synthetic oligonucleotide
uggcgggacuguuuucugg

SEQ ID NO: 2177635 - RNA, 19 nt, Artificial Sequence
  Description of Artificial Sequence: Synthetic oligonucleotide
ucacgaugucuuucagugc

SEQ ID NO: 2177636 - RNA, 19 nt, Artificial Sequence
  Description of Artificial Sequence: Synthetic oligonucleotide
aaauucaaguccagugcau

SEQ ID NO: 2177637 - RNA, 19 nt, Artificial Sequence
  Description of Artificial Sequence: Synthetic oligonucleotide
cacaaacgcucagaggccg

SEQ ID NO: 2177638 - RNA, 19 nt, Artificial Sequence
  Description of Artificial Sequence: Synthetic oligonucleotide
caucuuggcgggauucaag

SEQ ID NO: 2177639 - RNA, 19 nt, Artificial Sequence
  Description of Artificial Sequence: Synthetic oligonucleotide
cacauugucuguacgcuga

SEQ ID NO: 2177640 - RNA, 19 nt, Artificial Sequence
  Description of Artificial Sequence: Synthetic oligonucleotide
ccuucgauggggcacauug

SEQ ID NO: 2177641 - RNA, 19 nt, Artificial Sequence
  Description of Artificial Sequence: Synthetic oligonucleotide
aagcccagcugauacucau

SEQ ID NO: 2177642 - RNA, 19 nt, Artificial Sequence
  Description of Artificial Sequence: Synthetic oligonucleotide
ggugggaaccaaaggaagg

SEQ ID NO: 2177643 - RNA, 19 nt, Artificial Sequence
  Description of Artificial Sequence: Synthetic oligonucleotide
aggaaggaagguagcgggc

SEQ ID NO: 2177644 - RNA, 19 nt, Artificial Sequence
  Description of Artificial Sequence: Synthetic oligonucleotide
ggcaauauccacccagcug

SEQ ID NO: 2177645 - RNA, 19 nt, Artificial Sequence
  Description of Artificial Sequence: Synthetic oligonucleotide
ucuuucagugccccauaau

SEQ ID NO: 2177646 - RNA, 19 nt, Artificial Sequence
  Description of Artificial Sequence: Synthetic oligonucleotide
guacgcugaacuucaucug

SEQ ID NO: 2177647 - RNA, 19 nt, Artificial Sequence
  Description of Artificial Sequence: Synthetic oligonucleotide
ucaacucauauaagcgcuu

SEQ ID NO: 2177648 - RNA, 19 nt, Artificial Sequence
  Description of Artificial Sequence: Synthetic oligonucleotide
aauauccacccagcuguca

SEQ ID NO: 2177649 - RNA, 19 nt, Artificial Sequence
  Description of Artificial Sequence: Synthetic oligonucleotide
ugcguugaucacgaugucu

SEQ ID NO: 2177650 - RNA, 19 nt, Artificial Sequence
  Description of Artificial Sequence: Synthetic oligonucleotide
agaagauucucagguacau

SEQ ID NO: 2177651 - RNA, 19 nt, Artificial Sequence
  Description of Artificial Sequence: Synthetic oligonucleotide
uucuuauguugaacccugu

SEQ ID NO: 2177652 - RNA, 19 nt, Artificial Sequence
  Description of Artificial Sequence: Synthetic oligonucleotide
aauggguggggaggcuggg

SEQ ID NO: 2177653 - RNA, 19 nt, Artificial Sequence
  Description of Artificial Sequence: Synthetic oligonucleotide
ugcuccccgaagcacuuga

SEQ ID NO: 2177654 - RNA, 19 nt, Artificial Sequence
  Description of Artificial Sequence: Synthetic oligonucleotide
gagugugaaucaucuuuga

SEQ ID NO: 2177655 - RNA, 19 nt, Artificial Sequence
  Description of Artificial Sequence: Synthetic oligonucleotide
auuggcgggugcuacccca

SEQ ID NO: 2177656 - RNA, 19 nt, Artificial Sequence
  Description of Artificial Sequence: Synthetic oligonucleotide
ggagugugaaucaucuuug

SEQ ID NO: 2177657 - RNA, 19 nt, Artificial Sequence
  Description of Artificial Sequence: Synthetic oligonucleotide
gguuaaauugacagcgcug

SEQ ID NO: 2177658 - RNA, 19 nt, Artificial Sequence
  Description of Artificial Sequence: Synthetic oligonucleotide
gagaagauucucagguaca

SEQ ID NO: 2177659 - RNA, 19 nt, Artificial Sequence
  Description of Artificial Sequence: Synthetic oligonucleotide
ccaaacagagagaacaaga

SEQ ID NO: 2177660 - RNA, 19 nt, Artificial Sequence
  Description of Artificial Sequence: Synthetic oligonucleotide
aagcgcuuuaaaauaucau

SEQ ID NO: 2177661 - RNA, 19 nt, Artificial Sequence
  Description of Artificial Sequence: Synthetic oligonucleotide
agcugaaacauggcaauau

SEQ ID NO: 2177662 - RNA, 19 nt, Artificial Sequence
  Description of Artificial Sequence: Synthetic oligonucleotide
agugccccauaauccuuuc

SEQ ID NO: 2177663 - RNA, 19 nt, Artificial Sequence
  Description of Artificial Sequence: Synthetic oligonucleotide
uucuccuucgauggggcac

SEQ ID NO: 2177664 - RNA, 19 nt, Artificial Sequence
  Description of Artificial Sequence: Synthetic oligonucleotide
cacagaggagccugugcag

SEQ ID NO: 2177665 - RNA, 19 nt, Artificial Sequence
  Description of Artificial Sequence: Synthetic oligonucleotide
gacugacgaaugugugugc

SEQ ID NO: 2177666 - RNA, 19 nt, Artificial Sequence
  Description of Artificial Sequence: Synthetic oligonucleotide
gugcaauguucccuucucc

SEQ ID NO: 2177667 - RNA, 19 nt, Artificial Sequence
  Description of Artificial Sequence: Synthetic oligonucleotide
acugacgaaugugugugca

SEQ ID NO: 2177668 - RNA, 19 nt, Artificial Sequence
  Description of Artificial Sequence: Synthetic oligonucleotide
ggauucaagggcuugcaaa

SEQ ID NO: 2177669 - RNA, 19 nt, Artificial Sequence
  Description of Artificial Sequence: Synthetic oligonucleotide
aagucugcaucuggagugu

SEQ ID NO: 2177670 - RNA, 19 nt, Artificial Sequence
  Description of Artificial Sequence: Synthetic oligonucleotide
aauccuuuccaagcaccaa

SEQ ID NO: 2177671 - RNA, 19 nt, Artificial Sequence
  Description of Artificial Sequence: Synthetic oligonucleotide
gaaggggacaagguucuca

SEQ ID NO: 2177672 - RNA, 19 nt, Artificial Sequence
  Description of Artificial Sequence: Synthetic oligonucleotide
guucccaaccagccauggg

SEQ ID NO: 2177673 - RNA, 19 nt, Artificial Sequence
  Description of Artificial Sequence: Synthetic oligonucleotide
ucccuucuccuucgauggg

SEQ ID NO: 2177674 - RNA, 19 nt, Artificial Sequence
  Description of Artificial Sequence: Synthetic oligonucleotide
gaacuuacuuaaggagcug

SEQ ID NO: 2177675 - RNA, 19 nt, Artificial Sequence
  Description of Artificial Sequence: Synthetic oligonucleotide
cugacgaaugugugugcac

SEQ ID NO: 2177676 - RNA, 19 nt, Artificial Sequence
  Description of Artificial Sequence: Synthetic oligonucleotide
acaagucccuuuccugaca

SEQ ID NO: 2177677 - RNA, 19 nt, Artificial Sequence
  Description of Artificial Sequence: Synthetic oligonucleotide
ucuccuucgauggggcaca

SEQ ID NO: 2177678 - RNA, 19 nt, Artificial Sequence
  Description of Artificial Sequence: Synthetic oligonucleotide
aucuuugaaaggccaucaa

SEQ ID NO: 2177679 - RNA, 19 nt, Artificial Sequence
  Description of Artificial Sequence: Synthetic oligonucleotide
aucuggagugugaaucauc

SEQ ID NO: 2177680 - RNA, 19 nt, Artificial Sequence
  Description of Artificial Sequence: Synthetic oligonucleotide
guuacauccaagucugcau

SEQ ID NO: 2177681 - RNA, 19 nt, Artificial Sequence
  Description of Artificial Sequence: Synthetic oligonucleotide
aaagugaagcccagcugau

SEQ ID NO: 2177682 - RNA, 19 nt, Artificial Sequence
  Description of Artificial Sequence: Synthetic oligonucleotide
cucauauaagcgcuuuaaa

SEQ ID NO: 2177683 - RNA, 19 nt, Artificial Sequence
  Description of Artificial Sequence: Synthetic oligonucleotide
aaauaucaucuuggcggga

SEQ ID NO: 2177684 - RNA, 19 nt, Artificial Sequence
  Description of Artificial Sequence: Synthetic oligonucleotide
cuuaaggagcuggagggca

SEQ ID NO: 2177685 - RNA, 19 nt, Artificial Sequence
  Description of Artificial Sequence: Synthetic oligonucleotide
gcauggugggaaccaaagg

SEQ ID NO: 2177686 - RNA, 19 nt, Artificial Sequence
  Description of Artificial Sequence: Synthetic oligonucleotide
ccaguuugcuguagcacgg

SEQ ID NO: 2177687 - RNA, 19 nt, Artificial Sequence
  Description of Artificial Sequence: Synthetic oligonucleotide
ugcugccuucaacucauau

SEQ ID NO: 2177688 - RNA, 19 nt, Artificial Sequence
  Description of Artificial Sequence: Synthetic oligonucleotide
uugacagcgcuguguuucu

SEQ ID NO: 2177689 - RNA, 19 nt, Artificial Sequence
  Description of Artificial Sequence: Synthetic oligonucleotide
cucagguacauucuugacu

SEQ ID NO: 2177690 - RNA, 19 nt, Artificial Sequence
  Description of Artificial Sequence: Synthetic oligonucleotide
cacauuggcgggugcuacc

SEQ ID NO: 2177691 - RNA, 19 nt, Artificial Sequence
  Description of Artificial Sequence: Synthetic oligonucleotide
ggacaagucccuuuccuga

SEQ ID NO: 2177692 - RNA, 19 nt, Artificial Sequence
  Description of Artificial Sequence: Synthetic oligonucleotide
agcagaguucauagagcgg

SEQ ID NO: 2177693 - RNA, 19 nt, Artificial Sequence
  Description of Artificial Sequence: Synthetic oligonucleotide
aucgugcaauguucccuuc

SEQ ID NO: 2177694 - RNA, 19 nt, Artificial Sequence
  Description of Artificial Sequence: Synthetic oligonucleotide
ugcucucucuuuacugcuc

SEQ ID NO: 2177695 - RNA, 19 nt, Artificial Sequence
  Description of Artificial Sequence: Synthetic oligonucleotide
acuuacuuaaggagcugga

SEQ ID NO: 2177696 - RNA, 19 nt, Artificial Sequence
  Description of Artificial Sequence: Synthetic oligonucleotide
gaagguagcgggcgaggga

SEQ ID NO: 2177697 - RNA, 19 nt, Artificial Sequence
  Description of Artificial Sequence: Synthetic oligonucleotide
gggcacauugucuguacgc

SEQ ID NO: 2177698 - RNA, 19 nt, Artificial Sequence
  Description of Artificial Sequence: Synthetic oligonucleotide
cugauacucauggcgggac

SEQ ID NO: 2177699 - RNA, 19 nt, Artificial Sequence
  Description of Artificial Sequence: Synthetic oligonucleotide
gaaucgugcaauguucccu

SEQ ID NO: 2177700 - RNA, 19 nt, Artificial Sequence
  Description of Artificial Sequence: Synthetic oligonucleotide
ucguucccaaccagccaug

SEQ ID NO: 2177701 - RNA, 19 nt, Artificial Sequence
  Description of Artificial Sequence: Synthetic oligonucleotide
uaggcacauucuuccaaau

SEQ ID NO: 2177702 - RNA, 19 nt, Artificial Sequence
  Description of Artificial Sequence: Synthetic oligonucleotide
auucaagggcuugcaaaga

SEQ ID NO: 2177703 - RNA, 19 nt, Artificial Sequence
  Description of Artificial Sequence: Synthetic oligonucleotide
gucuguacgcugaacuuca

SEQ ID NO: 2177704 - RNA, 19 nt, Artificial Sequence
  Description of Artificial Sequence: Synthetic oligonucleotide
ugggaaccaaaggaaggaa

SEQ ID NO: 2177705 - RNA, 19 nt, Artificial Sequence
  Description of Artificial Sequence: Synthetic oligonucleotide
aggagcuggagggcaguac

SEQ ID NO: 2177706 - RNA, 19 nt, Artificial Sequence
  Description of Artificial Sequence: Synthetic oligonucleotide
ucagugccccauaauccuu

SEQ ID NO: 2177707 - RNA, 19 nt, Artificial Sequence
  Description of Artificial Sequence: Synthetic oligonucleotide
ggcgggacuguuuucuggc

SEQ ID NO: 2177708 - RNA, 19 nt, Artificial Sequence
  Description of Artificial Sequence: Synthetic oligonucleotide
agcagggaaaugggugggg

SEQ ID NO: 2177709 - RNA, 19 nt, Artificial Sequence
  Description of Artificial Sequence: Synthetic oligonucleotide
guguuucuggccaaacaga

SEQ ID NO: 2177710 - RNA, 19 nt, Artificial Sequence
  Description of Artificial Sequence: Synthetic oligonucleotide
aggaagguagcgggcgagg

SEQ ID NO: 2177711 - RNA, 19 nt, Artificial Sequence
  Description of Artificial Sequence: Synthetic oligonucleotide
cuguacgcugaacuucauc

SEQ ID NO: 2177712 - RNA, 19 nt, Artificial Sequence
  Description of Artificial Sequence: Synthetic oligonucleotide
ggcauggugggaaccaaag

SEQ ID NO: 2177713 - RNA, 19 nt, Artificial Sequence
  Description of Artificial Sequence: Synthetic oligonucleotide
gcuugcaggauguugguua

SEQ ID NO: 2177714 - RNA, 19 nt, Artificial Sequence
  Description of Artificial Sequence: Synthetic oligonucleotide
cacaguagacaggacccug

SEQ ID NO: 2177715 - RNA, 19 nt, Artificial Sequence
  Description of Artificial Sequence: Synthetic oligonucleotide
agggacacaaacgcucaga

SEQ ID NO: 2177716 - RNA, 19 nt, Artificial Sequence
  Description of Artificial Sequence: Synthetic oligonucleotide
ucuuuacugcucccuucuu

SEQ ID NO: 2177717 - RNA, 19 nt, Artificial Sequence
  Description of Artificial Sequence: Synthetic oligonucleotide
caaacgcucagaggccgcc

SEQ ID NO: 2177718 - RNA, 19 nt, Artificial Sequence
  Description of Artificial Sequence: Synthetic oligonucleotide
gguuacauccaagucugca

SEQ ID NO: 2177719 - RNA, 19 nt, Artificial Sequence
  Description of Artificial Sequence: Synthetic oligonucleotide
auagagcggaaaacagcug

SEQ ID NO: 2177720 - RNA, 19 nt, Artificial Sequence
  Description of Artificial Sequence: Synthetic oligonucleotide
caauauccacccagcuguc

SEQ ID NO: 2177721 - RNA, 19 nt, Artificial Sequence
  Description of Artificial Sequence: Synthetic oligonucleotide
ccuguagcguucacagagg

SEQ ID NO: 2177722 - RNA, 19 nt, Artificial Sequence
  Description of Artificial Sequence: Synthetic oligonucleotide
auaucaucuuggcgggauu

SEQ ID NO: 2177723 - RNA, 19 nt, Artificial Sequence
  Description of Artificial Sequence: Synthetic oligonucleotide
ccccauaauccuuuccaag

SEQ ID NO: 2177724 - RNA, 19 nt, Artificial Sequence
  Description of Artificial Sequence: Synthetic oligonucleotide
cuguagcguucacagagga

SEQ ID NO: 2177725 - RNA, 19 nt, Artificial Sequence
  Description of Artificial Sequence: Synthetic oligonucleotide
cauucuuauguugaacccu

SEQ ID NO: 2177726 - RNA, 19 nt, Artificial Sequence
  Description of Artificial Sequence: Synthetic oligonucleotide
ggaagguagcgggcgaggg

SEQ ID NO: 2177727 - RNA, 19 nt, Artificial Sequence
  Description of Artificial Sequence: Synthetic oligonucleotide
gauggcucagauguuuccu

SEQ ID NO: 2177728 - RNA, 19 nt, Artificial Sequence
  Description of Artificial Sequence: Synthetic oligonucleotide
agaguucauagagcggaaa

SEQ ID NO: 2177729 - RNA, 19 nt, Artificial Sequence
  Description of Artificial Sequence: Synthetic oligonucleotide
ggggcacauugucuguacg

SEQ ID NO: 2177730 - RNA, 19 nt, Artificial Sequence
  Description of Artificial Sequence: Synthetic oligonucleotide
gcacauugucuguacgcug

SEQ ID NO: 2177731 - RNA, 19 nt, Artificial Sequence
  Description of Artificial Sequence: Synthetic oligonucleotide
acgaaugugugugcacagu

SEQ ID NO: 2177732 - RNA, 19 nt, Artificial Sequence
  Description of Artificial Sequence: Synthetic oligonucleotide
gcaucuggagugugaauca

SEQ ID NO: 2177733 - RNA, 19 nt, Artificial Sequence
  Description of Artificial Sequence: Synthetic oligonucleotide
aggccaucaacugcugccu

SEQ ID NO: 2177734 - RNA, 19 nt, Artificial Sequence
  Description of Artificial Sequence: Synthetic oligonucleotide
gguuaaaggcacaggcuca

SEQ ID NO: 2177735 - RNA, 19 nt, Artificial Sequence
  Description of Artificial Sequence: Synthetic oligonucleotide
aggacccuguagcguucac

SEQ ID NO: 2177736 - RNA, 19 nt, Artificial Sequence
  Description of Artificial Sequence: Synthetic oligonucleotide
cugaaggggacaagguucu

SEQ ID NO: 2177737 - RNA, 19 nt, Artificial Sequence
  Description of Artificial Sequence: Synthetic oligonucleotide
guagcacggaccacagcac

SEQ ID NO: 2177738 - RNA, 19 nt, Artificial Sequence
  Description of Artificial Sequence: Synthetic oligonucleotide
uugcguugaucacgauguc

SEQ ID NO: 2177739 - RNA, 19 nt, Artificial Sequence
  Description of Artificial Sequence: Synthetic oligonucleotide
gagcggaaaacagcugcuc

SEQ ID NO: 2177740 - RNA, 19 nt, Artificial Sequence
  Description of Artificial Sequence: Synthetic oligonucleotide
cccuucuuucagcugaaac

SEQ ID NO: 2177741 - RNA, 19 nt, Artificial Sequence
  Description of Artificial Sequence: Synthetic oligonucleotide
uagcgggcgagggacacaa

SEQ ID NO: 2177742 - RNA, 19 nt, Artificial Sequence
  Description of Artificial Sequence: Synthetic oligonucleotide
ucuguacgcugaacuucau

SEQ ID NO: 2177743 - RNA, 19 nt, Artificial Sequence
  Description of Artificial Sequence: Synthetic oligonucleotide
ccauaauccuuuccaagca

SEQ ID NO: 2177744 - RNA, 19 nt, Artificial Sequence
  Description of Artificial Sequence: Synthetic oligonucleotide
gggaaauggguggggaggc

SEQ ID NO: 2177745 - RNA, 19 nt, Artificial Sequence
  Description of Artificial Sequence: Synthetic oligonucleotide
caagcugcuagaacuuacu

SEQ ID NO: 2177746 - RNA, 19 nt, Artificial Sequence
  Description of Artificial Sequence: Synthetic oligonucleotide
cauuggcgggugcuacccc

SEQ ID NO: 2177747 - RNA, 19 nt, Artificial Sequence
  Description of Artificial Sequence: Synthetic oligonucleotide
gugccccauaauccuuucc

SEQ ID NO: 2177748 - RNA, 19 nt, Artificial Sequence
  Description of Artificial Sequence: Synthetic oligonucleotide
gcggaaaacagcugcucuc

SEQ ID NO: 2177749 - RNA, 19 nt, Artificial Sequence
  Description of Artificial Sequence: Synthetic oligonucleotide
uccugacaacaaacuugaa

SEQ ID NO: 2177750 - RNA, 19 nt, Artificial Sequence
  Description of Artificial Sequence: Synthetic oligonucleotide
ggguuaaauugacagcgcu

SEQ ID NO: 2177751 - RNA, 19 nt, Artificial Sequence
  Description of Artificial Sequence: Synthetic oligonucleotide
gcugccuucaacucauaua

SEQ ID NO: 2177752 - RNA, 19 nt, Artificial Sequence
  Description of Artificial Sequence: Synthetic oligonucleotide
ccccgaagcacuugagaag

SEQ ID NO: 2177753 - RNA, 19 nt, Artificial Sequence
  Description of Artificial Sequence: Synthetic oligonucleotide
ucauggcgggacuguuuuc

SEQ ID NO: 2177754 - RNA, 19 nt, Artificial Sequence
  Description of Artificial Sequence: Synthetic oligonucleotide
gacaagcugcuagaacuua

SEQ ID NO: 2177755 - RNA, 19 nt, Artificial Sequence
  Description of Artificial Sequence: Synthetic oligonucleotide
gaggcuggguuugcguuga

SEQ ID NO: 2177756 - RNA, 19 nt, Artificial Sequence
  Description of Artificial Sequence: Synthetic oligonucleotide
cuccccgaagcacuugaga

SEQ ID NO: 2177757 - RNA, 19 nt, Artificial Sequence
  Description of Artificial Sequence: Synthetic oligonucleotide
acaggacccuguagcguuc

SEQ ID NO: 2177758 - RNA, 19 nt, Artificial Sequence
  Description of Artificial Sequence: Synthetic oligonucleotide
ggugcuaccccacugccau

SEQ ID NO: 2177759 - RNA, 19 nt, Artificial Sequence
  Description of Artificial Sequence: Synthetic oligonucleotide
cacaagcagggaaaugggu

SEQ ID NO: 2177760 - RNA, 19 nt, Artificial Sequence
  Description of Artificial Sequence: Synthetic oligonucleotide
gcgggcgagggacacaaac

SEQ ID NO: 2177761 - RNA, 19 nt, Artificial Sequence
  Description of Artificial Sequence: Synthetic oligonucleotide
cucguucccaaccagccau

SEQ ID NO: 2177762 - RNA, 19 nt, Artificial Sequence
  Description of Artificial Sequence: Synthetic oligonucleotide
cgggcgagggacacaaacg

SEQ ID NO: 2177763 - RNA, 19 nt, Artificial Sequence
  Description of Artificial Sequence: Synthetic oligonucleotide
uugcaggauguugguuaca

SEQ ID NO: 2177764 - RNA, 19 nt, Artificial Sequence
  Description of Artificial Sequence: Synthetic oligonucleotide
gcgagggacacaaacgcuc

SEQ ID NO: 2177765 - RNA, 19 nt, Artificial Sequence
  Description of Artificial Sequence: Synthetic oligonucleotide
ugacagcgcuguguuucug

SEQ ID NO: 2177766 - RNA, 19 nt, Artificial Sequence
  Description of Artificial Sequence: Synthetic oligonucleotide
caguacugaaggggacaag

SEQ ID NO: 2177767 - RNA, 19 nt, Artificial Sequence
  Description of Artificial Sequence: Synthetic oligonucleotide
cagaggccgcccaaagcca

SEQ ID NO: 2177768 - RNA, 19 nt, Artificial Sequence
  Description of Artificial Sequence: Synthetic oligonucleotide
agcguucacagaggagccu

SEQ ID NO: 2177769 - RNA, 19 nt, Artificial Sequence
  Description of Artificial Sequence: Synthetic oligonucleotide
caagguucucacaggacuu

SEQ ID NO: 2177770 - RNA, 19 nt, Artificial Sequence
  Description of Artificial Sequence: Synthetic oligonucleotide
cuuuacugcucccuucuuu

SEQ ID NO: 2177771 - RNA, 19 nt, Artificial Sequence
  Description of Artificial Sequence: Synthetic oligonucleotide
ggcaguacugaaggggaca

SEQ ID NO: 2177772 - RNA, 19 nt, Artificial Sequence
  Description of Artificial Sequence: Synthetic oligonucleotide
ggcuugcaaagauggcuca

SEQ ID NO: 2177773 - RNA, 19 nt, Artificial Sequence
  Description of Artificial Sequence: Synthetic oligonucleotide
aaggagcuggagggcagua

SEQ ID NO: 2177774 - RNA, 19 nt, Artificial Sequence
  Description of Artificial Sequence: Synthetic oligonucleotide
caacaaacuugaagcugua

SEQ ID NO: 2177775 - RNA, 19 nt, Artificial Sequence
  Description of Artificial Sequence: Synthetic oligonucleotide
guacugaaggggacaaggu

SEQ ID NO: 2177776 - RNA, 19 nt, Artificial Sequence
  Description of Artificial Sequence: Synthetic oligonucleotide
ggguuugcguugaucacga

SEQ ID NO: 2177777 - RNA, 19 nt, Artificial Sequence
  Description of Artificial Sequence: Synthetic oligonucleotide
cauggcgggacuguuuucu

SEQ ID NO: 2177778 - RNA, 19 nt, Artificial Sequence
  Description of Artificial Sequence: Synthetic oligonucleotide
cagcugucaaugaggguua

SEQ ID NO: 2177779 - RNA, 19 nt, Artificial Sequence
  Description of Artificial Sequence: Synthetic oligonucleotide
uacucauggcgggacuguu

SEQ ID NO: 2177780 - RNA, 19 nt, Artificial Sequence
  Description of Artificial Sequence: Synthetic oligonucleotide
uggcgggugcuaccccacu

SEQ ID NO: 2177781 - RNA, 19 nt, Artificial Sequence
  Description of Artificial Sequence: Synthetic oligonucleotide
gaggccgcccaaagccacc

SEQ ID NO: 2177782 - RNA, 19 nt, Artificial Sequence
  Description of Artificial Sequence: Synthetic oligonucleotide
ggaccacagcaccacaucu

SEQ ID NO: 2177783 - RNA, 19 nt, Artificial Sequence
  Description of Artificial Sequence: Synthetic oligonucleotide
acggaccacagcaccacau

SEQ ID NO: 2177784 - RNA, 19 nt, Artificial Sequence
  Description of Artificial Sequence: Synthetic oligonucleotide
gcaccaaauucaaguccag

SEQ ID NO: 2177785 - RNA, 19 nt, Artificial Sequence
  Description of Artificial Sequence: Synthetic oligonucleotide
cuucgauggggcacauugu

SEQ ID NO: 2177786 - RNA, 19 nt, Artificial Sequence
  Description of Artificial Sequence: Synthetic oligonucleotide
gaagauucucagguacauu

SEQ ID NO: 2177787 - RNA, 19 nt, Artificial Sequence
  Description of Artificial Sequence: Synthetic oligonucleotide
cagguacauucuugacuga

SEQ ID NO: 2177788 - RNA, 19 nt, Artificial Sequence
  Description of Artificial Sequence: Synthetic oligonucleotide
gcgggacuguuuucuggcc

SEQ ID NO: 2177789 - RNA, 19 nt, Artificial Sequence
  Description of Artificial Sequence: Synthetic oligonucleotide
cgugcaauguucccuucuc

SEQ ID NO: 2177790 - RNA, 19 nt, Artificial Sequence
  Description of Artificial Sequence: Synthetic oligonucleotide
ggcacauugucuguacgcu

SEQ ID NO: 2177791 - RNA, 19 nt, Artificial Sequence
  Description of Artificial Sequence: Synthetic oligonucleotide
caguagacaggacccugua

SEQ ID NO: 2177792 - RNA, 19 nt, Artificial Sequence
  Description of Artificial Sequence: Synthetic oligonucleotide
gggauucaagggcuugcaa

SEQ ID NO: 2177793 - RNA, 19 nt, Artificial Sequence
  Description of Artificial Sequence: Synthetic oligonucleotide
gcgggauucaagggcuugc

SEQ ID NO: 2177794 - RNA, 19 nt, Artificial Sequence
  Description of Artificial Sequence: Synthetic oligonucleotide
gcugauacucauggcggga

SEQ ID NO: 2177795 - RNA, 19 nt, Artificial Sequence
  Description of Artificial Sequence: Synthetic oligonucleotide
uggcgggauucaagggcuu

SEQ ID NO: 2177796 - RNA, 19 nt, Artificial Sequence
  Description of Artificial Sequence: Synthetic oligonucleotide
cacggugagcucguuccca

SEQ ID NO: 2177797 - RNA, 19 nt, Artificial Sequence
  Description of Artificial Sequence: Synthetic oligonucleotide
ucccuucuuucagcugaaa

SEQ ID NO: 2177798 - RNA, 19 nt, Artificial Sequence
  Description of Artificial Sequence: Synthetic oligonucleotide
gccccauaauccuuuccaa

SEQ ID NO: 2177799 - RNA, 19 nt, Artificial Sequence
  Description of Artificial Sequence: Synthetic oligonucleotide
gcaguacugaaggggacaa

SEQ ID NO: 2177800 - RNA, 19 nt, Artificial Sequence
  Description of Artificial Sequence: Synthetic oligonucleotide
gguagcgggcgagggacac

SEQ ID NO: 2177801 - RNA, 19 nt, Artificial Sequence
  Description of Artificial Sequence: Synthetic oligonucleotide
aggccgcccaaagccaccu

SEQ ID NO: 2177802 - RNA, 19 nt, Artificial Sequence
  Description of Artificial Sequence: Synthetic oligonucleotide
gcacauuggcgggugcuac

SEQ ID NO: 2177803 - RNA, 19 nt, Artificial Sequence
  Description of Artificial Sequence: Synthetic oligonucleotide
gcucguucccaaccagcca

SEQ ID NO: 2177804 - RNA, 19 nt, Artificial Sequence
  Description of Artificial Sequence: Synthetic oligonucleotide
ggacccuguagcguucaca

SEQ ID NO: 2177805 - RNA, 19 nt, Artificial Sequence
  Description of Artificial Sequence: Synthetic oligonucleotide
ggcgggauucaagggcuug

SEQ ID NO: 2177806 - RNA, 19 nt, Artificial Sequence
  Description of Artificial Sequence: Synthetic oligonucleotide
caccaaauucaaguccagu

SEQ ID NO: 2177807 - RNA, 19 nt, Artificial Sequence
  Description of Artificial Sequence: Synthetic oligonucleotide
cgaugucuuucagugcccc

SEQ ID NO: 2177808 - RNA, 19 nt, Artificial Sequence
  Description of Artificial Sequence: Synthetic oligonucleotide
cacggaccacagcaccaca

SEQ ID NO: 2177809 - RNA, 19 nt, Artificial Sequence
  Description of Artificial Sequence: Synthetic oligonucleotide
ccaagucugcaucuggagu

SEQ ID NO: 2177810 - RNA, 19 nt, Artificial Sequence
  Description of Artificial Sequence: Synthetic oligonucleotide
agcugucaaugaggguuaa

SEQ ID NO: 2177811 - RNA, 19 nt, Artificial Sequence
  Description of Artificial Sequence: Synthetic oligonucleotide
gcacggaccacagcaccac

SEQ ID NO: 2177812 - RNA, 19 nt, Artificial Sequence
  Description of Artificial Sequence: Synthetic oligonucleotide
gcaauguucccuucuccuu

SEQ ID NO: 2177813 - RNA, 19 nt, Artificial Sequence
  Description of Artificial Sequence: Synthetic oligonucleotide
cacaggacuucagccaccu

SEQ ID NO: 2177814 - RNA, 19 nt, Artificial Sequence
  Description of Artificial Sequence: Synthetic oligonucleotide
ccacggugagcucguuccc

SEQ ID NO: 2177815 - RNA, 19 nt, Artificial Sequence
  Description of Artificial Sequence: Synthetic oligonucleotide
cccuguaagacaagcugcu

SEQ ID NO: 2177816 - RNA, 19 nt, Artificial Sequence
  Description of Artificial Sequence: Synthetic oligonucleotide
caacucauauaagcgcuuu

SEQ ID NO: 2177817 - RNA, 19 nt, Artificial Sequence
  Description of Artificial Sequence: Synthetic oligonucleotide
caucaacugcugccuucaa

SEQ ID NO: 2177818 - RNA, 19 nt, Artificial Sequence
  Description of Artificial Sequence: Synthetic oligonucleotide
guacaucggcaugguggga

SEQ ID NO: 2177819 - RNA, 19 nt, Artificial Sequence
  Description of Artificial Sequence: Synthetic oligonucleotide
cagauguuuccugguacau

SEQ ID NO: 2177820 - RNA, 19 nt, Artificial Sequence
  Description of Artificial Sequence: Synthetic oligonucleotide
gggcaguacugaaggggac

SEQ ID NO: 2177821 - RNA, 19 nt, Artificial Sequence
  Description of Artificial Sequence: Synthetic oligonucleotide
cguucccaaccagccaugg

SEQ ID NO: 2177822 - RNA, 19 nt, Artificial Sequence
  Description of Artificial Sequence: Synthetic oligonucleotide
gugcuaccccacugccauc

SEQ ID NO: 2177823 - RNA, 19 nt, Artificial Sequence
  Description of Artificial Sequence: Synthetic oligonucleotide
cagugccccauaauccuuu

SEQ ID NO: 2177824 - RNA, 19 nt, Artificial Sequence
  Description of Artificial Sequence: Synthetic oligonucleotide
agguagcgggcgagggaca

SEQ ID NO: 2177825 - RNA, 19 nt, Artificial Sequence
  Description of Artificial Sequence: Synthetic oligonucleotide
gcuccccgaagcacuugag

SEQ ID NO: 2177826 - RNA, 19 nt, Artificial Sequence
  Description of Artificial Sequence: Synthetic oligonucleotide
ggcuggguuugcguugauc

SEQ ID NO: 2177827 - RNA, 19 nt, Artificial Sequence
  Description of Artificial Sequence: Synthetic oligonucleotide
guagcgggcgagggacaca

SEQ ID NO: 2177828 - RNA, 19 nt, Artificial Sequence
  Description of Artificial Sequence: Synthetic oligonucleotide
cagugcauuugugguuaaa

SEQ ID NO: 2177829 - RNA, 19 nt, Artificial Sequence
  Description of Artificial Sequence: Synthetic oligonucleotide
cccaaccagccaugggcuc

SEQ ID NO: 2177830 - RNA, 19 nt, Artificial Sequence
  Description of Artificial Sequence: Synthetic oligonucleotide
cggaccacagcaccacauc

SEQ ID NO: 2177831 - RNA, 19 nt, Artificial Sequence
  Description of Artificial Sequence: Synthetic oligonucleotide
caggacccuguagcguuca

SEQ ID NO: 2177832 - RNA, 19 nt, Artificial Sequence
  Description of Artificial Sequence: Synthetic oligonucleotide
caucuggagugugaaucau

SEQ ID NO: 2177833 - RNA, 19 nt, Artificial Sequence
  Description of Artificial Sequence: Synthetic oligonucleotide
uccuucgauggggcacauu

SEQ ID NO: 2177834 - RNA, 19 nt, Artificial Sequence
  Description of Artificial Sequence: Synthetic oligonucleotide
cugcacauuggcgggugcu

SEQ ID NO: 2177835 - RNA, 19 nt, Artificial Sequence
  Description of Artificial Sequence: Synthetic oligonucleotide
gggugcuaccccacugcca

SEQ ID NO: 2177836 - RNA, 19 nt, Artificial Sequence
  Description of Artificial Sequence: Synthetic oligonucleotide
cuggagugugaaucaucuu

SEQ ID NO: 2177837 - RNA, 19 nt, Artificial Sequence
  Description of Artificial Sequence: Synthetic oligonucleotide
ggccugcuccccgaagcac

SEQ ID NO: 2177838 - RNA, 19 nt, Artificial Sequence
  Description of Artificial Sequence: Synthetic oligonucleotide
ggcgagggacacaaacgcu

SEQ ID NO: 2177839 - RNA, 19 nt, Artificial Sequence
  Description of Artificial Sequence: Synthetic oligonucleotide
ggaaauggguggggaggcu

SEQ ID NO: 2177840 - RNA, 19 nt, Artificial Sequence
  Description of Artificial Sequence: Synthetic oligonucleotide
cggaaaacagcugcucucu

SEQ ID NO: 2177841 - RNA, 19 nt, Artificial Sequence
  Description of Artificial Sequence: Synthetic oligonucleotide
ccaaccagccaugggcucu

SEQ ID NO: 2177842 - RNA, 19 nt, Artificial Sequence
  Description of Artificial Sequence: Synthetic oligonucleotide
cgcugaacuucaucugugu

SEQ ID NO: 2177843 - RNA, 19 nt, Artificial Sequence
  Description of Artificial Sequence: Synthetic oligonucleotide
cgggauucaagggcuugca

SEQ ID NO: 2177844 - RNA, 19 nt, Artificial Sequence
  Description of Artificial Sequence: Synthetic oligonucleotide
gguuugcguugaucacgau

SEQ ID NO: 2177845 - RNA, 19 nt, Artificial Sequence
  Description of Artificial Sequence: Synthetic oligonucleotide
agcgggcgagggacacaaa

SEQ ID NO: 2177846 - RNA, 19 nt, Artificial Sequence
  Description of Artificial Sequence: Synthetic oligonucleotide
cgaagcacuugagaagauu

SEQ ID NO: 2177847 - RNA, 19 nt, Artificial Sequence
  Description of Artificial Sequence: Synthetic oligonucleotide
cuccuucgauggggcacau

SEQ ID NO: 2177848 - RNA, 19 nt, Artificial Sequence
  Description of Artificial Sequence: Synthetic oligonucleotide
ccacugccauccccaguuu

SEQ ID NO: 2177849 - RNA, 19 nt, Artificial Sequence
  Description of Artificial Sequence: Synthetic oligonucleotide
cugccacggugagcucguu

SEQ ID NO: 2177850 - RNA, 19 nt, Artificial Sequence
  Description of Artificial Sequence: Synthetic oligonucleotide
uaagaguaguuucugaggc

SEQ ID NO: 2177851 - RNA, 19 nt, Artificial Sequence
  Description of Artificial Sequence: Synthetic oligonucleotide
uuaagaguaguuucugagg

SEQ ID NO: 2177852 - RNA, 19 nt, Artificial Sequence
  Description of Artificial Sequence: Synthetic oligonucleotide
aagacauguggccucuugc

SEQ ID NO: 2177853 - RNA, 19 nt, Artificial Sequence
  Description of Artificial Sequence: Synthetic oligonucleotide
ugcagauagaggaucaugc

SEQ ID NO: 2177854 - RNA, 19 nt, Artificial Sequence
  Description of Artificial Sequence: Synthetic oligonucleotide
aagaguaguuucugaggcc

SEQ ID NO: 2177855 - RNA, 19 nt, Artificial Sequence
  Description of Artificial Sequence: Synthetic oligonucleotide
agcagcgcugcauaggugc

SEQ ID NO: 2177856 - RNA, 19 nt, Artificial Sequence
  Description of Artificial Sequence: Synthetic oligonucleotide
agguagaagacauguggcc

SEQ ID NO: 2177857 - RNA, 19 nt, Artificial Sequence
  Description of Artificial Sequence: Synthetic oligonucleotide
aauuaagaguaguuucuga

SEQ ID NO: 2177858 - RNA, 19 nt, Artificial Sequence
  Description of Artificial Sequence: Synthetic oligonucleotide
uuuguaauuaagaguaguu

SEQ ID NO: 2177859 - RNA, 19 nt, Artificial Sequence
  Description of Artificial Sequence: Synthetic oligonucleotide
uugaggaucccguggaagg

SEQ ID NO: 2177860 - RNA, 19 nt, Artificial Sequence
  Description of Artificial Sequence: Synthetic oligonucleotide
acguugaugcgagugaucc

SEQ ID NO: 2177861 - RNA, 19 nt, Artificial Sequence
  Description of Artificial Sequence: Synthetic oligonucleotide
auagcgggauuucucaaac

SEQ ID NO: 2177862 - RNA, 19 nt, Artificial Sequence
  Description of Artificial Sequence: Synthetic oligonucleotide
uucugagccagaaugcuga

SEQ ID NO: 2177863 - RNA, 19 nt, Artificial Sequence
  Description of Artificial Sequence: Synthetic oligonucleotide
ugcgagugauccaugacug

SEQ ID NO: 2177864 - RNA, 19 nt, Artificial Sequence
  Description of Artificial Sequence: Synthetic oligonucleotide
uguacugccugccccagcc

SEQ ID NO: 2177865 - RNA, 19 nt, Artificial Sequence
  Description of Artificial Sequence: Synthetic oligonucleotide
cuucaucuugacucgaagc

SEQ ID NO: 2177866 - RNA, 19 nt, Artificial Sequence
  Description of Artificial Sequence: Synthetic oligonucleotide
gcagguagaagacaugugg

SEQ ID NO: 2177867 - RNA, 19 nt, Artificial Sequence
  Description of Artificial Sequence: Synthetic oligonucleotide
cagauagaggaucaugccc

SEQ ID NO: 2177868 - RNA, 19 nt, Artificial Sequence
  Description of Artificial Sequence: Synthetic oligonucleotide
ucggaaagagccuucccag

SEQ ID NO: 2177869 - RNA, 19 nt, Artificial Sequence
  Description of Artificial Sequence: Synthetic oligonucleotide
agaaugcugagcccggguc

SEQ ID NO: 2177870 - RNA, 19 nt, Artificial Sequence
  Description of Artificial Sequence: Synthetic oligonucleotide
aggaagacccgccagucag

SEQ ID NO: 2177871 - RNA, 19 nt, Artificial Sequence
  Description of Artificial Sequence: Synthetic oligonucleotide
agguaggccuccuuccugc

SEQ ID NO: 2177872 - RNA, 19 nt, Artificial Sequence
  Description of Artificial Sequence: Synthetic oligonucleotide
cagguagaagacauguggc

SEQ ID NO: 2177873 - RNA, 19 nt, Artificial Sequence
  Description of Artificial Sequence: Synthetic oligonucleotide
uaaucgcuggcucgagugg

SEQ ID NO: 2177874 - RNA, 19 nt, Artificial Sequence
  Description of Artificial Sequence: Synthetic oligonucleotide
auggcauccagcuccucac

SEQ ID NO: 2177875 - RNA, 19 nt, Artificial Sequence
  Description of Artificial Sequence: Synthetic oligonucleotide
caucuugacucgaagcagc

SEQ ID NO: 2177876 - RNA, 19 nt, Artificial Sequence
  Description of Artificial Sequence: Synthetic oligonucleotide
guaaucgcuggcucgagug

SEQ ID NO: 2177877 - RNA, 19 nt, Artificial Sequence
  Description of Artificial Sequence: Synthetic oligonucleotide
aagaggaagacccgccagu

SEQ ID NO: 2177878 - RNA, 19 nt, Artificial Sequence
  Description of Artificial Sequence: Synthetic oligonucleotide
ucaucuugacucgaagcag

SEQ ID NO: 2177879 - RNA, 19 nt, Artificial Sequence
  Description of Artificial Sequence: Synthetic oligonucleotide
uuguaauuaagaguaguuu

SEQ ID NO: 2177880 - RNA, 19 nt, Artificial Sequence
  Description of Artificial Sequence: Synthetic oligonucleotide
augcgagugauccaugacu

SEQ ID NO: 2177881 - RNA, 19 nt, Artificial Sequence
  Description of Artificial Sequence: Synthetic oligonucleotide
cuaacggcagcugggaagg

SEQ ID NO: 2177882 - RNA, 19 nt, Artificial Sequence
  Description of Artificial Sequence: Synthetic oligonucleotide
gguacuaccgcguuccggc

SEQ ID NO: 2177883 - RNA, 19 nt, Artificial Sequence
  Description of Artificial Sequence: Synthetic oligonucleotide
uuuggccuuguacugccug

SEQ ID NO: 2177884 - RNA, 19 nt, Artificial Sequence
  Description of Artificial Sequence: Synthetic oligonucleotide
uggccucuugcuguaaucg

SEQ ID NO: 2177885 - RNA, 19 nt, Artificial Sequence
  Description of Artificial Sequence: Synthetic oligonucleotide
gcauaggugccauagcggg

SEQ ID NO: 2177886 - RNA, 19 nt, Artificial Sequence
  Description of Artificial Sequence: Synthetic oligonucleotide
gauccaugacugcaucugc

SEQ ID NO: 2177887 - RNA, 19 nt, Artificial Sequence
  Description of Artificial Sequence: Synthetic oligonucleotide
aguaguuucugaggcccgc

SEQ ID NO: 2177888 - RNA, 19 nt, Artificial Sequence
  Description of Artificial Sequence: Synthetic oligonucleotide
ucuugcuguaaucgcuggc

SEQ ID NO: 2177889 - RNA, 19 nt, Artificial Sequence
  Description of Artificial Sequence: Synthetic oligonucleotide
agccagaaugcugagcccg

SEQ ID NO: 2177890 - RNA, 19 nt, Artificial Sequence
  Description of Artificial Sequence: Synthetic oligonucleotide
cguuucaucaugcagcagg

SEQ ID NO: 2177891 - RNA, 19 nt, Artificial Sequence
  Description of Artificial Sequence: Synthetic oligonucleotide
gcuagcugagcucaggcag

SEQ ID NO: 2177892 - RNA, 19 nt, Artificial Sequence
  Description of Artificial Sequence: Synthetic oligonucleotide
ugaugcgagugauccauga

SEQ ID NO: 2177893 - RNA, 19 nt, Artificial Sequence
  Description of Artificial Sequence: Synthetic oligonucleotide
agacccgccagucagcggu

SEQ ID NO: 2177894 - RNA, 19 nt, Artificial Sequence
  Description of Artificial Sequence: Synthetic oligonucleotide
uaggccuccuuccugccgc

SEQ ID NO: 2177895 - RNA, 19 nt, Artificial Sequence
  Description of Artificial Sequence: Synthetic oligonucleotide
gaucaugcccuugaggauc

SEQ ID NO: 2177896 - RNA, 19 nt, Artificial Sequence
  Description of Artificial Sequence: Synthetic oligonucleotide
gaagacccgccagucagcg

SEQ ID NO: 2177897 - RNA, 19 nt, Artificial Sequence
  Description of Artificial Sequence: Synthetic oligonucleotide
acuaccgcguuccggcgcg

SEQ ID NO: 2177898 - RNA, 19 nt, Artificial Sequence
  Description of Artificial Sequence: Synthetic oligonucleotide
gacggcugaauuucuucug

SEQ ID NO: 2177899 - RNA, 19 nt, Artificial Sequence
  Description of Artificial Sequence: Synthetic oligonucleotide
guaauuaagaguaguuucu

SEQ ID NO: 2177900 - RNA, 19 nt, Artificial Sequence
  Description of Artificial Sequence: Synthetic oligonucleotide
aggcggagggcauccgucc

SEQ ID NO: 2177901 - RNA, 19 nt, Artificial Sequence
  Description of Artificial Sequence: Synthetic oligonucleotide
aacggcagcugggaagggg

SEQ ID NO: 2177902 - RNA, 19 nt, Artificial Sequence
  Description of Artificial Sequence: Synthetic oligonucleotide
ggaaagagccuucccaggc

SEQ ID NO: 2177903 - RNA, 19 nt, Artificial Sequence
  Description of Artificial Sequence: Synthetic oligonucleotide
gaugcgagugauccaugac

SEQ ID NO: 2177904 - RNA, 19 nt, Artificial Sequence
  Description of Artificial Sequence: Synthetic oligonucleotide
uugacucgaagcagcgcug

SEQ ID NO: 2177905 - RNA, 19 nt, Artificial Sequence
  Description of Artificial Sequence: Synthetic oligonucleotide
uguaaucgcuggcucgagu

SEQ ID NO: 2177906 - RNA, 19 nt, Artificial Sequence
  Description of Artificial Sequence: Synthetic oligonucleotide
cugccuucaucuugacucg

SEQ ID NO: 2177907 - RNA, 19 nt, Artificial Sequence
  Description of Artificial Sequence: Synthetic oligonucleotide
ggaaggacuggagugaggc

SEQ ID NO: 2177908 - RNA, 19 nt, Artificial Sequence
  Description of Artificial Sequence: Synthetic oligonucleotide
ucaucuuggccucgugggu

SEQ ID NO: 2177909 - RNA, 19 nt, Artificial Sequence
  Description of Artificial Sequence: Synthetic oligonucleotide
agaugugcagcccggugcu

SEQ ID NO: 2177910 - RNA, 19 nt, Artificial Sequence
  Description of Artificial Sequence: Synthetic oligonucleotide
uguccccgguacuaccgcg

SEQ ID NO: 2177911 - RNA, 19 nt, Artificial Sequence
  Description of Artificial Sequence: Synthetic oligonucleotide
ggugucuuucugcagucag

SEQ ID NO: 2177912 - RNA, 19 nt, Artificial Sequence
  Description of Artificial Sequence: Synthetic oligonucleotide
accacguugaugcgaguga

SEQ ID NO: 2177913 - RNA, 19 nt, Artificial Sequence
  Description of Artificial Sequence: Synthetic oligonucleotide
aucccguggaaggucuucc

SEQ ID NO: 2177914 - RNA, 19 nt, Artificial Sequence
  Description of Artificial Sequence: Synthetic oligonucleotide
agggcauccguccuccgug

SEQ ID NO: 2177915 - RNA, 19 nt, Artificial Sequence
  Description of Artificial Sequence: Synthetic oligonucleotide
aguucacuugccauggccu

SEQ ID NO: 2177916 - RNA, 19 nt, Artificial Sequence
  Description of Artificial Sequence: Synthetic oligonucleotide
gcuaacggcagcugggaag

SEQ ID NO: 2177917 - RNA, 19 nt, Artificial Sequence
  Description of Artificial Sequence: Synthetic oligonucleotide
ugccucuauggcauccagc

SEQ ID NO: 2177918 - RNA, 19 nt, Artificial Sequence
  Description of Artificial Sequence: Synthetic oligonucleotide
guuguccccgguacuaccg

SEQ ID NO: 2177919 - RNA, 19 nt, Artificial Sequence
  Description of Artificial Sequence: Synthetic oligonucleotide
ugccauagcgggauuucuc

SEQ ID NO: 2177920 - RNA, 19 nt, Artificial Sequence
  Description of Artificial Sequence: Synthetic oligonucleotide
aucuugacucgaagcagcg

SEQ ID NO: 2177921 - RNA, 19 nt, Artificial Sequence
  Description of Artificial Sequence: Synthetic oligonucleotide
gaagcagcgcugcauaggu

SEQ ID NO: 2177922 - RNA, 19 nt, Artificial Sequence
  Description of Artificial Sequence: Synthetic oligonucleotide
ggccguuucaucaugcagc

SEQ ID NO: 2177923 - RNA, 19 nt, Artificial Sequence
  Description of Artificial Sequence: Synthetic oligonucleotide
uugaugcgagugauccaug

SEQ ID NO: 2177924 - RNA, 19 nt, Artificial Sequence
  Description of Artificial Sequence: Synthetic oligonucleotide
cuugacucgaagcagcgcu

SEQ ID NO: 2177925 - RNA, 19 nt, Artificial Sequence
  Description of Artificial Sequence: Synthetic oligonucleotide
aagacccgccagucagcgg

SEQ ID NO: 2177926 - RNA, 19 nt, Artificial Sequence
  Description of Artificial Sequence: Synthetic oligonucleotide
uacuaccgcguuccggcgc

SEQ ID NO: 2177927 - RNA, 19 nt, Artificial Sequence
  Description of Artificial Sequence: Synthetic oligonucleotide
cagaggacggcugaauuuc

SEQ ID NO: 2177928 - RNA, 19 nt, Artificial Sequence
  Description of Artificial Sequence: Synthetic oligonucleotide
auaggugccauagcgggau

SEQ ID NO: 2177929 - RNA, 19 nt, Artificial Sequence
  Description of Artificial Sequence: Synthetic oligonucleotide
aggcagggccguuucauca

SEQ ID NO: 2177930 - RNA, 19 nt, Artificial Sequence
  Description of Artificial Sequence: Synthetic oligonucleotide
caugguggaugcugauggc

SEQ ID NO: 2177931 - RNA, 19 nt, Artificial Sequence
  Description of Artificial Sequence: Synthetic oligonucleotide
gaguaguuucugaggcccg

SEQ ID NO: 2177932 - RNA, 19 nt, Artificial Sequence
  Description of Artificial Sequence: Synthetic oligonucleotide
cauccguccuccgugcucc

SEQ ID NO: 2177933 - RNA, 19 nt, Artificial Sequence
  Description of Artificial Sequence: Synthetic oligonucleotide
ugcccguuguccccgguac

SEQ ID NO: 2177934 - RNA, 19 nt, Artificial Sequence
  Description of Artificial Sequence: Synthetic oligonucleotide
gugucuuucugcagucagg

SEQ ID NO: 2177935 - RNA, 19 nt, Artificial Sequence
  Description of Artificial Sequence: Synthetic oligonucleotide
ugcgcagguagaagacaug

SEQ ID NO: 2177936 - RNA, 19 nt, Artificial Sequence
  Description of Artificial Sequence: Synthetic oligonucleotide
ucugcccugcccguugucc

SEQ ID NO: 2177937 - RNA, 19 nt, Artificial Sequence
  Description of Artificial Sequence: Synthetic oligonucleotide
uuguccccgguacuaccgc

SEQ ID NO: 2177938 - RNA, 19 nt, Artificial Sequence
  Description of Artificial Sequence: Synthetic oligonucleotide
cugccgcugcucaucagcc

SEQ ID NO: 2177939 - RNA, 19 nt, Artificial Sequence
  Description of Artificial Sequence: Synthetic oligonucleotide
ugacucgaagcagcgcugc

SEQ ID NO: 2177940 - RNA, 19 nt, Artificial Sequence
  Description of Artificial Sequence: Synthetic oligonucleotide
ucuugacucgaagcagcgc

SEQ ID NO: 2177941 - RNA, 19 nt, Artificial Sequence
  Description of Artificial Sequence: Synthetic oligonucleotide
cuuucugcagucagggucu

SEQ ID NO: 2177942 - RNA, 19 nt, Artificial Sequence
  Description of Artificial Sequence: Synthetic oligonucleotide
uaguuucugaggcccgcuc

SEQ ID NO: 2177943 - RNA, 19 nt, Artificial Sequence
  Description of Artificial Sequence: Synthetic oligonucleotide
gaggcuagcugagcucagg

SEQ ID NO: 2177944 - RNA, 19 nt, Artificial Sequence
  Description of Artificial Sequence: Synthetic oligonucleotide
cacgaggugucuuucugca

SEQ ID NO: 2177945 - RNA, 19 nt, Artificial Sequence
  Description of Artificial Sequence: Synthetic oligonucleotide
ucgaguggccagggcaugg

SEQ ID NO: 2177946 - RNA, 19 nt, Artificial Sequence
  Description of Artificial Sequence: Synthetic oligonucleotide
cucguggguccucaccugc

SEQ ID NO: 2177947 - RNA, 19 nt, Artificial Sequence
  Description of Artificial Sequence: Synthetic oligonucleotide
ugaggcggagggcauccgu

SEQ ID NO: 2177948 - RNA, 19 nt, Artificial Sequence
  Description of Artificial Sequence: Synthetic oligonucleotide
guacuaccgcguuccggcg

SEQ ID NO: 2177949 - RNA, 19 nt, Artificial Sequence
  Description of Artificial Sequence: Synthetic oligonucleotide
cucguggguggcccgaggc

SEQ ID NO: 2177950 - RNA, 19 nt, Artificial Sequence
  Description of Artificial Sequence: Synthetic oligonucleotide
ucuuccagccccgcuugcc

SEQ ID NO: 2177951 - RNA, 19 nt, Artificial Sequence
  Description of Artificial Sequence: Synthetic oligonucleotide
ucgcgcaguucacuugcca

SEQ ID NO: 2177952 - RNA, 19 nt, Artificial Sequence
  Description of Artificial Sequence: Synthetic oligonucleotide
ugcucgcgcaguucacuug

SEQ ID NO: 2177953 - RNA, 19 nt, Artificial Sequence
  Description of Artificial Sequence: Synthetic oligonucleotide
cauagcgggauuucucaaa

SEQ ID NO: 2177954 - RNA, 19 nt, Artificial Sequence
  Description of Artificial Sequence: Synthetic oligonucleotide
cagggccguuucaucaugc

SEQ ID NO: 2177955 - RNA, 19 nt, Artificial Sequence
  Description of Artificial Sequence: Synthetic oligonucleotide
gaaugcugagcccgggucu

SEQ ID NO: 2177956 - RNA, 19 nt, Artificial Sequence
  Description of Artificial Sequence: Synthetic oligonucleotide
uagcgggauuucucaaacu

SEQ ID NO: 2177957 - RNA, 19 nt, Artificial Sequence
  Description of Artificial Sequence: Synthetic oligonucleotide
uuguacugccugccccagc

SEQ ID NO: 2177958 - RNA, 19 nt, Artificial Sequence
  Description of Artificial Sequence: Synthetic oligonucleotide
aggucuuccagccccgcuu

SEQ ID NO: 2177959 - RNA, 19 nt, Artificial Sequence
  Description of Artificial Sequence: Synthetic oligonucleotide
caccacguugaugcgagug

SEQ ID NO: 2177960 - RNA, 19 nt, Artificial Sequence
  Description of Artificial Sequence: Synthetic oligonucleotide
gaggaagacccgccaguca

SEQ ID NO: 2177961 - RNA, 19 nt, Artificial Sequence
  Description of Artificial Sequence: Synthetic oligonucleotide
ucguggguggcccgaggcu

SEQ ID NO: 2177962 - RNA, 19 nt, Artificial Sequence
  Description of Artificial Sequence: Synthetic oligonucleotide
cagggcaugguggaugcug

SEQ ID NO: 2177963 - RNA, 19 nt, Artificial Sequence
  Description of Artificial Sequence: Synthetic oligonucleotide
aggaggcccucgugggugg

SEQ ID NO: 2177964 - RNA, 19 nt, Artificial Sequence
  Description of Artificial Sequence: Synthetic oligonucleotide
aucgcuggcucgaguggcc

SEQ ID NO: 2177965 - RNA, 19 nt, Artificial Sequence
  Description of Artificial Sequence: Synthetic oligonucleotide
guugaugcgagugauccau

SEQ ID NO: 2177966 - RNA, 19 nt, Artificial Sequence
  Description of Artificial Sequence: Synthetic oligonucleotide
ugcagcccggugcucgcgc

SEQ ID NO: 2177967 - RNA, 19 nt, Artificial Sequence
  Description of Artificial Sequence: Synthetic oligonucleotide
caucuuggccucguggguc

SEQ ID NO: 2177968 - RNA, 19 nt, Artificial Sequence
  Description of Artificial Sequence: Synthetic oligonucleotide
auccaugacugcaucugcu

SEQ ID NO: 2177969 - RNA, 19 nt, Artificial Sequence
  Description of Artificial Sequence: Synthetic oligonucleotide
ucccguggaaggucuucca

SEQ ID NO: 2177970 - RNA, 19 nt, Artificial Sequence
  Description of Artificial Sequence: Synthetic oligonucleotide
ccuucaucuugacucgaag

SEQ ID NO: 2177971 - RNA, 19 nt, Artificial Sequence
  Description of Artificial Sequence: Synthetic oligonucleotide
ugccucgggccuucuuucc

SEQ ID NO: 2177972 - RNA, 19 nt, Artificial Sequence
  Description of Artificial Sequence: Synthetic oligonucleotide
gcucgcgcaguucacuugc

SEQ ID NO: 2177973 - RNA, 19 nt, Artificial Sequence
  Description of Artificial Sequence: Synthetic oligonucleotide
gggccguuucaucaugcag

SEQ ID NO: 2177974 - RNA, 19 nt, Artificial Sequence
  Description of Artificial Sequence: Synthetic oligonucleotide
agggcugccucuauggcau

SEQ ID NO: 2177975 - RNA, 19 nt, Artificial Sequence
  Description of Artificial Sequence: Synthetic oligonucleotide
cuugcuguaaucgcuggcu

SEQ ID NO: 2177976 - RNA, 19 nt, Artificial Sequence
  Description of Artificial Sequence: Synthetic oligonucleotide
cauaggugccauagcggga

SEQ ID NO: 2177977 - RNA, 19 nt, Artificial Sequence
  Description of Artificial Sequence: Synthetic oligonucleotide
agggccguuucaucaugca

SEQ ID NO: 2177978 - RNA, 19 nt, Artificial Sequence
  Description of Artificial Sequence: Synthetic oligonucleotide
cacguugaugcgagugauc

SEQ ID NO: 2177979 - RNA, 19 nt, Artificial Sequence
  Description of Artificial Sequence: Synthetic oligonucleotide
aggcccucguggguggccc

SEQ ID NO: 2177980 - RNA, 19 nt, Artificial Sequence
  Description of Artificial Sequence: Synthetic oligonucleotide
ccgugcuccagccugggcc

SEQ ID NO: 2177981 - RNA, 19 nt, Artificial Sequence
  Description of Artificial Sequence: Synthetic oligonucleotide
cagguaggccuccuuccug

SEQ ID NO: 2177982 - RNA, 19 nt, Artificial Sequence
  Description of Artificial Sequence: Synthetic oligonucleotide
ccguggaaggucuuccagc

SEQ ID NO: 2177983 - RNA, 19 nt, Artificial Sequence
  Description of Artificial Sequence: Synthetic oligonucleotide
cugccucuauggcauccag

SEQ ID NO: 2177984 - RNA, 19 nt, Artificial Sequence
  Description of Artificial Sequence: Synthetic oligonucleotide
gcugcauaggugccauagc

SEQ ID NO: 2177985 - RNA, 19 nt, Artificial Sequence
  Description of Artificial Sequence: Synthetic oligonucleotide
cuccuguucccugcucagg

SEQ ID NO: 2177986 - RNA, 19 nt, Artificial Sequence
  Description of Artificial Sequence: Synthetic oligonucleotide
gagcuaacggcagcuggga

SEQ ID NO: 2177987 - RNA, 19 nt, Artificial Sequence
  Description of Artificial Sequence: Synthetic oligonucleotide
gccguuucaucaugcagca

SEQ ID NO: 2177988 - RNA, 19 nt, Artificial Sequence
  Description of Artificial Sequence: Synthetic oligonucleotide
ggucuuccagccccgcuug

SEQ ID NO: 2177989 - RNA, 19 nt, Artificial Sequence
  Description of Artificial Sequence: Synthetic oligonucleotide
gggcuuuggccuuguacug

SEQ ID NO: 2177990 - RNA, 19 nt, Artificial Sequence
  Description of Artificial Sequence: Synthetic oligonucleotide
ugagcucaggcagggccgu

SEQ ID NO: 2177991 - RNA, 19 nt, Artificial Sequence
  Description of Artificial Sequence: Synthetic oligonucleotide
guuccggcgcggucgggcc

SEQ ID NO: 2177992 - RNA, 19 nt, Artificial Sequence
  Description of Artificial Sequence: Synthetic oligonucleotide
gcgcaguucacuugccaug

SEQ ID NO: 2177993 - RNA, 19 nt, Artificial Sequence
  Description of Artificial Sequence: Synthetic oligonucleotide
augcccuugaggaucccgu

SEQ ID NO: 2177994 - RNA, 19 nt, Artificial Sequence
  Description of Artificial Sequence: Synthetic oligonucleotide
agcggugcgcagguagaag

SEQ ID NO: 2177995 - RNA, 19 nt, Artificial Sequence
  Description of Artificial Sequence: Synthetic oligonucleotide
uuggccucguggguccuca

SEQ ID NO: 2177996 - RNA, 19 nt, Artificial Sequence
  Description of Artificial Sequence: Synthetic oligonucleotide
cucgcgcaguucacuugcc

SEQ ID NO: 2177997 - RNA, 19 nt, Artificial Sequence
  Description of Artificial Sequence: Synthetic oligonucleotide
accgcguuccggcgcgguc

SEQ ID NO: 2177998 - RNA, 19 nt, Artificial Sequence
  Description of Artificial Sequence: Synthetic oligonucleotide
agcuaacggcagcugggaa

SEQ ID NO: 2177999 - RNA, 19 nt, Artificial Sequence
  Description of Artificial Sequence: Synthetic oligonucleotide
cuccucacuggcugccuuc

SEQ ID NO: 2178000 - RNA, 19 nt, Artificial Sequence
  Description of Artificial Sequence: Synthetic oligonucleotide
ccacgaggugucuuucugc

SEQ ID NO: 2178001 - RNA, 19 nt, Artificial Sequence
  Description of Artificial Sequence: Synthetic oligonucleotide
gaucccguggaaggucuuc

SEQ ID NO: 2178002 - RNA, 19 nt, Artificial Sequence
  Description of Artificial Sequence: Synthetic oligonucleotide
aggaucccguggaaggucu

SEQ ID NO: 2178003 - RNA, 19 nt, Artificial Sequence
  Description of Artificial Sequence: Synthetic oligonucleotide
gccaccacguugaugcgag

SEQ ID NO: 2178004 - RNA, 19 nt, Artificial Sequence
  Description of Artificial Sequence: Synthetic oligonucleotide
cucgaagcagcgcugcaua

SEQ ID NO: 2178005 - RNA, 19 nt, Artificial Sequence
  Description of Artificial Sequence: Synthetic oligonucleotide
uccgugcuccagccugggc

SEQ ID NO: 2178006 - RNA, 19 nt, Artificial Sequence
  Description of Artificial Sequence: Synthetic oligonucleotide
cccgguacuaccgcguucc

SEQ ID NO: 2178007 - RNA, 19 nt, Artificial Sequence
  Description of Artificial Sequence: Synthetic oligonucleotide
gacucgaagcagcgcugca

SEQ ID NO: 2178008 - RNA, 19 nt, Artificial Sequence
  Description of Artificial Sequence: Synthetic oligonucleotide
gaggcggagggcauccguc

SEQ ID NO: 2178009 - RNA, 19 nt, Artificial Sequence
  Description of Artificial Sequence: Synthetic oligonucleotide
agggcaugguggaugcuga

SEQ ID NO: 2178010 - RNA, 19 nt, Artificial Sequence
  Description of Artificial Sequence: Synthetic oligonucleotide
caggcagggccguuucauc

SEQ ID NO: 2178011 - RNA, 19 nt, Artificial Sequence
  Description of Artificial Sequence: Synthetic oligonucleotide
ugccuucaucuugacucga

SEQ ID NO: 2178012 - RNA, 19 nt, Artificial Sequence
  Description of Artificial Sequence: Synthetic oligonucleotide
cugggcagcagaggacggc

SEQ ID NO: 2178013 - RNA, 19 nt, Artificial Sequence
  Description of Artificial Sequence: Synthetic oligonucleotide
guacugccugccccagccc

SEQ ID NO: 2178014 - RNA, 19 nt, Artificial Sequence
  Description of Artificial Sequence: Synthetic oligonucleotide
cuguaaucgcuggcucgag

SEQ ID NO: 2178015 - RNA, 19 nt, Artificial Sequence
  Description of Artificial Sequence: Synthetic oligonucleotide
gcggugcgcagguagaaga

SEQ ID NO: 2178016 - RNA, 19 nt, Artificial Sequence
  Description of Artificial Sequence: Synthetic oligonucleotide
cugggagaggcggguggcg

SEQ ID NO: 2178017 - RNA, 19 nt, Artificial Sequence
  Description of Artificial Sequence: Synthetic oligonucleotide
agaggacggcugaauuucu

SEQ ID NO: 2178018 - RNA, 19 nt, Artificial Sequence
  Description of Artificial Sequence: Synthetic oligonucleotide
cuggagugaggcggagggc

SEQ ID NO: 2178019 - RNA, 19 nt, Artificial Sequence
  Description of Artificial Sequence: Synthetic oligonucleotide
uggcucgaguggccagggc

SEQ ID NO: 2178020 - RNA, 19 nt, Artificial Sequence
  Description of Artificial Sequence: Synthetic oligonucleotide
gcuguaaucgcuggcucga

SEQ ID NO: 2178021 - RNA, 19 nt, Artificial Sequence
  Description of Artificial Sequence: Synthetic oligonucleotide
ggcuagcugagcucaggca

SEQ ID NO: 2178022 - RNA, 19 nt, Artificial Sequence
  Description of Artificial Sequence: Synthetic oligonucleotide
gcgagugauccaugacugc

SEQ ID NO: 2178023 - RNA, 19 nt, Artificial Sequence
  Description of Artificial Sequence: Synthetic oligonucleotide
gcccgcucugcccugcccg

SEQ ID NO: 2178024 - RNA, 19 nt, Artificial Sequence
  Description of Artificial Sequence: Synthetic oligonucleotide
uuccggcgcggucgggccc

SEQ ID NO: 2178025 - RNA, 19 nt, Artificial Sequence
  Description of Artificial Sequence: Synthetic oligonucleotide
agccaccacguugaugcga

SEQ ID NO: 2178026 - RNA, 19 nt, Artificial Sequence
  Description of Artificial Sequence: Synthetic oligonucleotide
gguggcccgaggcuagcug

SEQ ID NO: 2178027 - RNA, 19 nt, Artificial Sequence
  Description of Artificial Sequence: Synthetic oligonucleotide
ggacggcugaauuucuucu

SEQ ID NO: 2178028 - RNA, 19 nt, Artificial Sequence
  Description of Artificial Sequence: Synthetic oligonucleotide
ugaggcccgcucugcccug

SEQ ID NO: 2178029 - RNA, 19 nt, Artificial Sequence
  Description of Artificial Sequence: Synthetic oligonucleotide
uccccgguacuaccgcguu

SEQ ID NO: 2178030 - RNA, 19 nt, Artificial Sequence
  Description of Artificial Sequence: Synthetic oligonucleotide
acccgccagucagcggugc

SEQ ID NO: 2178031 - RNA, 19 nt, Artificial Sequence
  Description of Artificial Sequence: Synthetic oligonucleotide
ggucugcgugcaccuuucg

SEQ ID NO: 2178032 - RNA, 19 nt, Artificial Sequence
  Description of Artificial Sequence: Synthetic oligonucleotide
ccagucagcggugcgcagg

SEQ ID NO: 2178033 - RNA, 19 nt, Artificial Sequence
  Description of Artificial Sequence: Synthetic oligonucleotide
gccagaaugcugagcccgg

SEQ ID NO: 2178034 - RNA, 19 nt, Artificial Sequence
  Description of Artificial Sequence: Synthetic oligonucleotide
uugccacgaggugucuuuc

SEQ ID NO: 2178035 - RNA, 19 nt, Artificial Sequence
  Description of Artificial Sequence: Synthetic oligonucleotide
gcagagaacauggcagcca

SEQ ID NO: 2178036 - RNA, 19 nt, Artificial Sequence
  Description of Artificial Sequence: Synthetic oligonucleotide
gguggcggcacugggcagc

SEQ ID NO: 2178037 - RNA, 19 nt, Artificial Sequence
  Description of Artificial Sequence: Synthetic oligonucleotide
cauguggccucuugcugua

SEQ ID NO: 2178038 - RNA, 19 nt, Artificial Sequence
  Description of Artificial Sequence: Synthetic oligonucleotide
cggcugaauuucuucuggg

SEQ ID NO: 2178039 - RNA, 19 nt, Artificial Sequence
  Description of Artificial Sequence: Synthetic oligonucleotide
cuguucccugcucagggcu

SEQ ID NO: 2178040 - RNA, 19 nt, Artificial Sequence
  Description of Artificial Sequence: Synthetic oligonucleotide
ggugccauagcgggauuuc

SEQ ID NO: 2178041 - RNA, 19 nt, Artificial Sequence
  Description of Artificial Sequence: Synthetic oligonucleotide
cccguggaaggucuuccag

SEQ ID NO: 2178042 - RNA, 19 nt, Artificial Sequence
  Description of Artificial Sequence: Synthetic oligonucleotide
cuugccacgaggugucuuu

SEQ ID NO: 2178043 - RNA, 19 nt, Artificial Sequence
  Description of Artificial Sequence: Synthetic oligonucleotide
ggcggcacugggcagcaga

SEQ ID NO: 2178044 - RNA, 19 nt, Artificial Sequence
  Description of Artificial Sequence: Synthetic oligonucleotide
ggaagacccgccagucagc

SEQ ID NO: 2178045 - RNA, 19 nt, Artificial Sequence
  Description of Artificial Sequence: Synthetic oligonucleotide
gggaaggacuggagugagg

SEQ ID NO: 2178046 - RNA, 19 nt, Artificial Sequence
  Description of Artificial Sequence: Synthetic oligonucleotide
gcagggccguuucaucaug

SEQ ID NO: 2178047 - RNA, 19 nt, Artificial Sequence
  Description of Artificial Sequence: Synthetic oligonucleotide
gaggcggguggcggcacug

SEQ ID NO: 2178048 - RNA, 19 nt, Artificial Sequence
  Description of Artificial Sequence: Synthetic oligonucleotide
agaggcggguggcggcacu

SEQ ID NO: 2178049 - RNA, 19 nt, Artificial Sequence
  Description of Artificial Sequence: Synthetic oligonucleotide
uccguccuccgugcuccag

SEQ ID NO: 2178050 - RNA, 19 nt, Artificial Sequence
  Description of Artificial Sequence: Synthetic oligonucleotide
cgcugcauaggugccauag

SEQ ID NO: 2178051 - RNA, 19 nt, Artificial Sequence
  Description of Artificial Sequence: Synthetic oligonucleotide
gagugaggcggagggcauc

SEQ ID NO: 2178052 - RNA, 19 nt, Artificial Sequence
  Description of Artificial Sequence: Synthetic oligonucleotide
cucgaguggccagggcaug

SEQ ID NO: 2178053 - RNA, 19 nt, Artificial Sequence
  Description of Artificial Sequence: Synthetic oligonucleotide
gggccuucuuucccagaug

SEQ ID NO: 2178054 - RNA, 19 nt, Artificial Sequence
  Description of Artificial Sequence: Synthetic oligonucleotide
ggccucguggguccucacc

SEQ ID NO: 2178055 - RNA, 19 nt, Artificial Sequence
  Description of Artificial Sequence: Synthetic oligonucleotide
ggugcgcagguagaagaca

SEQ ID NO: 2178056 - RNA, 19 nt, Artificial Sequence
  Description of Artificial Sequence: Synthetic oligonucleotide
gggcauccguccuccgugc

SEQ ID NO: 2178057 - RNA, 19 nt, Artificial Sequence
  Description of Artificial Sequence: Synthetic oligonucleotide
gccucgggccuucuuuccc

SEQ ID NO: 2178058 - RNA, 19 nt, Artificial Sequence
  Description of Artificial Sequence: Synthetic oligonucleotide
aggugccauagcgggauuu

SEQ ID NO: 2178059 - RNA, 19 nt, Artificial Sequence
  Description of Artificial Sequence: Synthetic oligonucleotide
ggcgcggucgggcccuggg

SEQ ID NO: 2178060 - RNA, 19 nt, Artificial Sequence
  Description of Artificial Sequence: Synthetic oligonucleotide
uaggugccauagcgggauu

SEQ ID NO: 2178061 - RNA, 19 nt, Artificial Sequence
  Description of Artificial Sequence: Synthetic oligonucleotide
caucugcuccaggcucggg

SEQ ID NO: 2178062 - RNA, 19 nt, Artificial Sequence
  Description of Artificial Sequence: Synthetic oligonucleotide
gcaucugcuccaggcucgg

SEQ ID NO: 2178063 - RNA, 19 nt, Artificial Sequence
  Description of Artificial Sequence: Synthetic oligonucleotide
ggcugccucuauggcaucc

SEQ ID NO: 2178064 - RNA, 19 nt, Artificial Sequence
  Description of Artificial Sequence: Synthetic oligonucleotide
ggagggcauccguccuccg

SEQ ID NO: 2178065 - RNA, 19 nt, Artificial Sequence
  Description of Artificial Sequence: Synthetic oligonucleotide
cagaaugcugagcccgggu

SEQ ID NO: 2178066 - RNA, 19 nt, Artificial Sequence
  Description of Artificial Sequence: Synthetic oligonucleotide
cagucagggucugcgugca

SEQ ID NO: 2178067 - RNA, 19 nt, Artificial Sequence
  Description of Artificial Sequence: Synthetic oligonucleotide
gacccgccagucagcggug

SEQ ID NO: 2178068 - RNA, 19 nt, Artificial Sequence
  Description of Artificial Sequence: Synthetic oligonucleotide
cgagugauccaugacugca

SEQ ID NO: 2178069 - RNA, 19 nt, Artificial Sequence
  Description of Artificial Sequence: Synthetic oligonucleotide
gcuucugagccagaaugcu

SEQ ID NO: 2178070 - RNA, 19 nt, Artificial Sequence
  Description of Artificial Sequence: Synthetic oligonucleotide
ggccagggcugccucuaug

SEQ ID NO: 2178071 - RNA, 19 nt, Artificial Sequence
  Description of Artificial Sequence: Synthetic oligonucleotide
gccucguggguccucaccu

SEQ ID NO: 2178072 - RNA, 19 nt, Artificial Sequence
  Description of Artificial Sequence: Synthetic oligonucleotide
ggaucaugcccuugaggau

SEQ ID NO: 2178073 - RNA, 19 nt, Artificial Sequence
  Description of Artificial Sequence: Synthetic oligonucleotide
gcagaggacggcugaauuu

SEQ ID NO: 2178074 - RNA, 19 nt, Artificial Sequence
  Description of Artificial Sequence: Synthetic oligonucleotide
gaggcccgcucugcccugc

SEQ ID NO: 2178075 - RNA, 19 nt, Artificial Sequence
  Description of Artificial Sequence: Synthetic oligonucleotide
ggggugcagagaacauggc

SEQ ID NO: 2178076 - RNA, 19 nt, Artificial Sequence
  Description of Artificial Sequence: Synthetic oligonucleotide
ggcucggggccuggaagag

SEQ ID NO: 2178077 - RNA, 19 nt, Artificial Sequence
  Description of Artificial Sequence: Synthetic oligonucleotide
gagaggcggguggcggcac

SEQ ID NO: 2178078 - RNA, 19 nt, Artificial Sequence
  Description of Artificial Sequence: Synthetic oligonucleotide
ggcagccaccacguugaug

SEQ ID NO: 2178079 - RNA, 19 nt, Artificial Sequence
  Description of Artificial Sequence: Synthetic oligonucleotide
cccgaggcuagcugagcuc

SEQ ID NO: 2178080 - RNA, 19 nt, Artificial Sequence
  Description of Artificial Sequence: Synthetic oligonucleotide
ccucguggguccucaccug

SEQ ID NO: 2178081 - RNA, 19 nt, Artificial Sequence
  Description of Artificial Sequence: Synthetic oligonucleotide
uaccgcguuccggcgcggu

SEQ ID NO: 2178082 - RNA, 19 nt, Artificial Sequence
  Description of Artificial Sequence: Synthetic oligonucleotide
auccguccuccgugcucca

SEQ ID NO: 2178083 - RNA, 19 nt, Artificial Sequence
  Description of Artificial Sequence: Synthetic oligonucleotide
ccgaggcuagcugagcuca

SEQ ID NO: 2178084 - RNA, 19 nt, Artificial Sequence
  Description of Artificial Sequence: Synthetic oligonucleotide
gugccauagcgggauuucu

SEQ ID NO: 2178085 - RNA, 19 nt, Artificial Sequence
  Description of Artificial Sequence: Synthetic oligonucleotide
cggugcgcagguagaagac

SEQ ID NO: 2178086 - RNA, 19 nt, Artificial Sequence
  Description of Artificial Sequence: Synthetic oligonucleotide
aggugcccagcgggcacug

SEQ ID NO: 2178087 - RNA, 19 nt, Artificial Sequence
  Description of Artificial Sequence: Synthetic oligonucleotide
gggccaggaggcccucgug

SEQ ID NO: 2178088 - RNA, 19 nt, Artificial Sequence
  Description of Artificial Sequence: Synthetic oligonucleotide
gccagucagcggugcgcag

SEQ ID NO: 2178089 - RNA, 19 nt, Artificial Sequence
  Description of Artificial Sequence: Synthetic oligonucleotide
cuaccgcguuccggcgcgg

SEQ ID NO: 2178090 - RNA, 19 nt, Artificial Sequence
  Description of Artificial Sequence: Synthetic oligonucleotide
gggucugcgugcaccuuuc

SEQ ID NO: 2178091 - RNA, 19 nt, Artificial Sequence
  Description of Artificial Sequence: Synthetic oligonucleotide
gugcucgcgcaguucacuu

SEQ ID NO: 2178092 - RNA, 19 nt, Artificial Sequence
  Description of Artificial Sequence: Synthetic oligonucleotide
ggcccucguggguggcccg

SEQ ID NO: 2178093 - RNA, 19 nt, Artificial Sequence
  Description of Artificial Sequence: Synthetic oligonucleotide
gcugccucuauggcaucca

SEQ ID NO: 2178094 - RNA, 19 nt, Artificial Sequence
  Description of Artificial Sequence: Synthetic oligonucleotide
ggagaggcggguggcggca

SEQ ID NO: 2178095 - RNA, 19 nt, Artificial Sequence
  Description of Artificial Sequence: Synthetic oligonucleotide
ccucgggccuucuuuccca

SEQ ID NO: 2178096 - RNA, 19 nt, Artificial Sequence
  Description of Artificial Sequence: Synthetic oligonucleotide
cgguacuaccgcguuccgg

SEQ ID NO: 2178097 - RNA, 19 nt, Artificial Sequence
  Description of Artificial Sequence: Synthetic oligonucleotide
cccgccagucagcggugcg

SEQ ID NO: 2178098 - RNA, 19 nt, Artificial Sequence
  Description of Artificial Sequence: Synthetic oligonucleotide
cagcgcugcauaggugcca

SEQ ID NO: 2178099 - RNA, 19 nt, Artificial Sequence
  Description of Artificial Sequence: Synthetic oligonucleotide
cugcccguuguccccggua

SEQ ID NO: 2178100 - RNA, 19 nt, Artificial Sequence
  Description of Artificial Sequence: Synthetic oligonucleotide
ccgguacuaccgcguuccg

SEQ ID NO: 2178101 - RNA, 19 nt, Artificial Sequence
  Description of Artificial Sequence: Synthetic oligonucleotide
gcccugcccguuguccccg

SEQ ID NO: 2178102 - RNA, 19 nt, Artificial Sequence
  Description of Artificial Sequence: Synthetic oligonucleotide
ggugcucgcgcaguucacu

SEQ ID NO: 2178103 - RNA, 19 nt, Artificial Sequence
  Description of Artificial Sequence: Synthetic oligonucleotide
cggagggcauccguccucc

SEQ ID NO: 2178104 - RNA, 19 nt, Artificial Sequence
  Description of Artificial Sequence: Synthetic oligonucleotide
gccuucaucuugacucgaa

SEQ ID NO: 2178105 - RNA, 19 nt, Artificial Sequence
  Description of Artificial Sequence: Synthetic oligonucleotide
cguugaugcgagugaucca

SEQ ID NO: 2178106 - RNA, 19 nt, Artificial Sequence
  Description of Artificial Sequence: Synthetic oligonucleotide
ccguuguccccgguacuac

SEQ ID NO: 2178107 - RNA, 19 nt, Artificial Sequence
  Description of Artificial Sequence: Synthetic oligonucleotide
gcgcggucgggcccugggc

SEQ ID NO: 2178108 - RNA, 19 nt, Artificial Sequence
  Description of Artificial Sequence: Synthetic oligonucleotide
cguuccggcgcggucgggc

SEQ ID NO: 2178109 - RNA, 19 nt, Artificial Sequence
  Description of Artificial Sequence: Synthetic oligonucleotide
cgaggcuagcugagcucag

SEQ ID NO: 2178110 - RNA, 19 nt, Artificial Sequence
  Description of Artificial Sequence: Synthetic oligonucleotide
ggcccgaggcuagcugagc

SEQ ID NO: 2178111 - RNA, 19 nt, Artificial Sequence
  Description of Artificial Sequence: Synthetic oligonucleotide
cguggguccucaccugcuc

SEQ ID NO: 2178112 - RNA, 19 nt, Artificial Sequence
  Description of Artificial Sequence: Synthetic oligonucleotide
guccccgguacuaccgcgu

SEQ ID NO: 2178113 - RNA, 19 nt, Artificial Sequence
  Description of Artificial Sequence: Synthetic oligonucleotide
uccuugccucgggccuucu

SEQ ID NO: 2178114 - RNA, 19 nt, Artificial Sequence
  Description of Artificial Sequence: Synthetic oligonucleotide
ccguuucaucaugcagcag

SEQ ID NO: 2178115 - RNA, 19 nt, Artificial Sequence
  Description of Artificial Sequence: Synthetic oligonucleotide
cugccucggaaagagccuu

SEQ ID NO: 2178116 - RNA, 19 nt, Artificial Sequence
  Description of Artificial Sequence: Synthetic oligonucleotide
ccccgcuugccacgaggug

SEQ ID NO: 2178117 - RNA, 19 nt, Artificial Sequence
  Description of Artificial Sequence: Synthetic oligonucleotide
gcucgaguggccagggcau

SEQ ID NO: 2178118 - RNA, 19 nt, Artificial Sequence
  Description of Artificial Sequence: Synthetic oligonucleotide
agucagcggugcgcaggua

SEQ ID NO: 2178119 - RNA, 19 nt, Artificial Sequence
  Description of Artificial Sequence: Synthetic oligonucleotide
cgcuggcucgaguggccag

SEQ ID NO: 2178120 - RNA, 19 nt, Artificial Sequence
  Description of Artificial Sequence: Synthetic oligonucleotide
ccccgguacuaccgcguuc

SEQ ID NO: 2178121 - RNA, 19 nt, Artificial Sequence
  Description of Artificial Sequence: Synthetic oligonucleotide
ggcauccguccuccgugcu

SEQ ID NO: 2178122 - RNA, 19 nt, Artificial Sequence
  Description of Artificial Sequence: Synthetic oligonucleotide
cccugcccguuguccccgg

SEQ ID NO: 2178123 - RNA, 19 nt, Artificial Sequence
  Description of Artificial Sequence: Synthetic oligonucleotide
cccguuguccccgguacua

SEQ ID NO: 2178124 - RNA, 19 nt, Artificial Sequence
  Description of Artificial Sequence: Synthetic oligonucleotide
cggugcucgcgcaguucac

SEQ ID NO: 2178125 - RNA, 19 nt, Artificial Sequence
  Description of Artificial Sequence: Synthetic oligonucleotide
ccacguugaugcgagugau

SEQ ID NO: 2178126 - RNA, 19 nt, Artificial Sequence
  Description of Artificial Sequence: Synthetic oligonucleotide
gggcaugguggaugcugau

SEQ ID NO: 2178127 - RNA, 19 nt, Artificial Sequence
  Description of Artificial Sequence: Synthetic oligonucleotide
cccucguggguggcccgag

SEQ ID NO: 2178128 - RNA, 19 nt, Artificial Sequence
  Description of Artificial Sequence: Synthetic oligonucleotide
ccgggcuucugagccagaa

SEQ ID NO: 2178129 - RNA, 19 nt, Artificial Sequence
  Description of Artificial Sequence: Synthetic oligonucleotide
cccggugcucgcgcaguuc

SEQ ID NO: 2178130 - RNA, 19 nt, Artificial Sequence
  Description of Artificial Sequence: Synthetic oligonucleotide
gagcccgggucuggcuggu

SEQ ID NO: 2178131 - RNA, 19 nt, Artificial Sequence
  Description of Artificial Sequence: Synthetic oligonucleotide
gcccguuguccccgguacu

SEQ ID NO: 2178132 - RNA, 19 nt, Artificial Sequence
  Description of Artificial Sequence: Synthetic oligonucleotide
cgccagucagcggugcgca

SEQ ID NO: 2178133 - RNA, 19 nt, Artificial Sequence
  Description of Artificial Sequence: Synthetic oligonucleotide
gcccucguggguggcccga

SEQ ID NO: 2178134 - RNA, 19 nt, Artificial Sequence
  Description of Artificial Sequence: Synthetic oligonucleotide
gcguuccggcgcggucggg

SEQ ID NO: 2178135 - RNA, 19 nt, Artificial Sequence
  Description of Artificial Sequence: Synthetic oligonucleotide
ccccagcccgggcuucuga

SEQ ID NO: 2178136 - RNA, 19 nt, Artificial Sequence
  Description of Artificial Sequence: Synthetic oligonucleotide
gcuugccacgaggugucuu

SEQ ID NO: 2178137 - RNA, 19 nt, Artificial Sequence
  Description of Artificial Sequence: Synthetic oligonucleotide
cacuugccauggccuucau

SEQ ID NO: 2178138 - RNA, 19 nt, Artificial Sequence
  Description of Artificial Sequence: Synthetic oligonucleotide
cggucgggcccugggccag

SEQ ID NO: 2178139 - RNA, 19 nt, Artificial Sequence
  Description of Artificial Sequence: Synthetic oligonucleotide
cccagaugugcagcccggu

SEQ ID NO: 2178140 - RNA, 19 nt, Artificial Sequence
  Description of Artificial Sequence: Synthetic oligonucleotide
cccgcucugcccugcccgu

SEQ ID NO: 2178141 - RNA, 19 nt, Artificial Sequence
  Description of Artificial Sequence: Synthetic oligonucleotide
ggaucccguggaaggucuu

SEQ ID NO: 2178142 - RNA, 19 nt, Artificial Sequence
  Description of Artificial Sequence: Synthetic oligonucleotide
ccaccacguugaugcgagu

SEQ ID NO: 2178143 - RNA, 19 nt, Artificial Sequence
  Description of Artificial Sequence: Synthetic oligonucleotide
cccgggcuucugagccaga

SEQ ID NO: 2178144 - RNA, 19 nt, Artificial Sequence
  Description of Artificial Sequence: Synthetic oligonucleotide
gcccggugcucgcgcaguu

SEQ ID NO: 2178145 - RNA, 19 nt, Artificial Sequence
  Description of Artificial Sequence: Synthetic oligonucleotide
ccugcccguuguccccggu

SEQ ID NO: 2178146 - RNA, 19 nt, Artificial Sequence
  Description of Artificial Sequence: Synthetic oligonucleotide
cggcgcggucgggcccugg

SEQ ID NO: 2178147 - RNA, 19 nt, Artificial Sequence
  Description of Artificial Sequence: Synthetic oligonucleotide
ccggcgcggucgggcccug

SEQ ID NO: 2178148 - RNA, 19 nt, Artificial Sequence
  Description of Artificial Sequence: Synthetic oligonucleotide
cgcuugccacgaggugucu

SEQ ID NO: 2178149 - RNA, 19 nt, Artificial Sequence
  Description of Artificial Sequence: Synthetic oligonucleotide
ccgcucugcccugcccguu

SEQ ID NO: 2178150 - RNA, 19 nt, Artificial Sequence
  Description of Artificial Sequence: Synthetic oligonucleotide
auaaacaugaaucacgucc

SEQ ID NO: 2178151 - RNA, 19 nt, Artificial Sequence
  Description of Artificial Sequence: Synthetic oligonucleotide
auauuuaauguccaaaugg

SEQ ID NO: 2178152 - RNA, 19 nt, Artificial Sequence
  Description of Artificial Sequence: Synthetic oligonucleotide
uauuuaauguccaaauggc

SEQ ID NO: 2178153 - RNA, 19 nt, Artificial Sequence
  Description of Artificial Sequence: Synthetic oligonucleotide
uuuugucaaagaaaugacg

SEQ ID NO: 2178154 - RNA, 19 nt, Artificial Sequence
  Description of Artificial Sequence: Synthetic oligonucleotide
uucgauauugucauaaaca

SEQ ID NO: 2178155 - RNA, 19 nt, Artificial Sequence
  Description of Artificial Sequence: Synthetic oligonucleotide
uuuaauguccaaauggcac

SEQ ID NO: 2178156 - RNA, 19 nt, Artificial Sequence
  Description of Artificial Sequence: Synthetic oligonucleotide
cuuuagaccauuuauugug

SEQ ID NO: 2178157 - RNA, 19 nt, Artificial Sequence
  Description of Artificial Sequence: Synthetic oligonucleotide
caggauauauuuaaugucc

SEQ ID NO: 2178158 - RNA, 19 nt, Artificial Sequence
  Description of Artificial Sequence: Synthetic oligonucleotide
uuugaguuggggaugaacu

SEQ ID NO: 2178159 - RNA, 19 nt, Artificial Sequence
  Description of Artificial Sequence: Synthetic oligonucleotide
ucaauaguugacuugggca

SEQ ID NO: 2178160 - RNA, 19 nt, Artificial Sequence
  Description of Artificial Sequence: Synthetic oligonucleotide
ucaaucgccaguuccaggg

SEQ ID NO: 2178161 - RNA, 19 nt, Artificial Sequence
  Description of Artificial Sequence: Synthetic oligonucleotide
uuuacugaagauucgacuc

SEQ ID NO: 2178162 - RNA, 19 nt, Artificial Sequence
  Description of Artificial Sequence: Synthetic oligonucleotide
aacugucuaaccuguuacc

SEQ ID NO: 2178163 - RNA, 19 nt, Artificial Sequence
  Description of Artificial Sequence: Synthetic oligonucleotide
gacuuuagaccauuuauug

SEQ ID NO: 2178164 - RNA, 19 nt, Artificial Sequence
  Description of Artificial Sequence: Synthetic oligonucleotide
ucgauaaugccucaacgag

SEQ ID NO: 2178165 - RNA, 19 nt, Artificial Sequence
  Description of Artificial Sequence: Synthetic oligonucleotide
gaacaagccggucaggacg

SEQ ID NO: 2178166 - RNA, 19 nt, Artificial Sequence
  Description of Artificial Sequence: Synthetic oligonucleotide
aaugacgcgcuccuucagc

SEQ ID NO: 2178167 - RNA, 19 nt, Artificial Sequence
  Description of Artificial Sequence: Synthetic oligonucleotide
auucgauauugucauaaac

SEQ ID NO: 2178168 - RNA, 19 nt, Artificial Sequence
  Description of Artificial Sequence: Synthetic oligonucleotide
ucauaaacaugaaucacgu

SEQ ID NO: 2178169 - RNA, 19 nt, Artificial Sequence
  Description of Artificial Sequence: Synthetic oligonucleotide
gacucaauaguugacuugg

SEQ ID NO: 2178170 - RNA, 19 nt, Artificial Sequence
  Description of Artificial Sequence: Synthetic oligonucleotide
uguuaccggaacaagccgg

SEQ ID NO: 2178171 - RNA, 19 nt, Artificial Sequence
  Description of Artificial Sequence: Synthetic oligonucleotide
uaaacaugaaucacguccu

SEQ ID NO: 2178172 - RNA, 19 nt, Artificial Sequence
  Description of Artificial Sequence: Synthetic oligonucleotide
aaagaaaugacgcgcuccu

SEQ ID NO: 2178173 - RNA, 19 nt, Artificial Sequence
  Description of Artificial Sequence: Synthetic oligonucleotide
agaccauuuauuguguccc

SEQ ID NO: 2178174 - RNA, 19 nt, Artificial Sequence
  Description of Artificial Sequence: Synthetic oligonucleotide
gucauaaacaugaaucacg

SEQ ID NO: 2178175 - RNA, 19 nt, Artificial Sequence
  Description of Artificial Sequence: Synthetic oligonucleotide
agugcaaaagaggagcggc

SEQ ID NO: 2178176 - RNA, 19 nt, Artificial Sequence
  Description of Artificial Sequence: Synthetic oligonucleotide
agaaaugacgcgcuccuuc

SEQ ID NO: 2178177 - RNA, 19 nt, Artificial Sequence
  Description of Artificial Sequence: Synthetic oligonucleotide
uucgacacaucucuaagac

SEQ ID NO: 2178178 - RNA, 19 nt, Artificial Sequence
  Description of Artificial Sequence: Synthetic oligonucleotide
uuaauguccaaauggcacu

SEQ ID NO: 2178179 - RNA, 19 nt, Artificial Sequence
  Description of Artificial Sequence: Synthetic oligonucleotide
ugucaaagaaaugacgcgc

SEQ ID NO: 2178180 - RNA, 19 nt, Artificial Sequence
  Description of Artificial Sequence: Synthetic oligonucleotide
ugaguuuacugaagauucg

SEQ ID NO: 2178181 - RNA, 19 nt, Artificial Sequence
  Description of Artificial Sequence: Synthetic oligonucleotide
ucagcuccggcuucaaucg

SEQ ID NO: 2178182 - RNA, 19 nt, Artificial Sequence
  Description of Artificial Sequence: Synthetic oligonucleotide
cucuuuaaccgccaggcgg

SEQ ID NO: 2178183 - RNA, 19 nt, Artificial Sequence
  Description of Artificial Sequence: Synthetic oligonucleotide
uuacugaagauucgacucc

SEQ ID NO: 2178184 - RNA, 19 nt, Artificial Sequence
  Description of Artificial Sequence: Synthetic oligonucleotide
uuuauugugucccgcggug

SEQ ID NO: 2178185 - RNA, 19 nt, Artificial Sequence
  Description of Artificial Sequence: Synthetic oligonucleotide
ugugccggacuuuagacca

SEQ ID NO: 2178186 - RNA, 19 nt, Artificial Sequence
  Description of Artificial Sequence: Synthetic oligonucleotide
augaaucacguccucgugg

SEQ ID NO: 2178187 - RNA, 19 nt, Artificial Sequence
  Description of Artificial Sequence: Synthetic oligonucleotide
ucucagguuaacagcagcc

SEQ ID NO: 2178188 - RNA, 19 nt, Artificial Sequence
  Description of Artificial Sequence: Synthetic oligonucleotide
caacgagcagagaagagcc

SEQ ID NO: 2178189 - RNA, 19 nt, Artificial Sequence
  Description of Artificial Sequence: Synthetic oligonucleotide
uuaaccgccaggcggauac

SEQ ID NO: 2178190 - RNA, 19 nt, Artificial Sequence
  Description of Artificial Sequence: Synthetic oligonucleotide
aacaugaaucacguccucg

SEQ ID NO: 2178191 - RNA, 19 nt, Artificial Sequence
  Description of Artificial Sequence: Synthetic oligonucleotide
uuguucaggauauauuuaa

SEQ ID NO: 2178192 - RNA, 19 nt, Artificial Sequence
  Description of Artificial Sequence: Synthetic oligonucleotide
aaagugcaaaagaggagcg

SEQ ID NO: 2178193 - RNA, 19 nt, Artificial Sequence
  Description of Artificial Sequence: Synthetic oligonucleotide
aguugacuugggcauauuc

SEQ ID NO: 2178194 - RNA, 19 nt, Artificial Sequence
  Description of Artificial Sequence: Synthetic oligonucleotide
ucaacgagcagagaagagc

SEQ ID NO: 2178195 - RNA, 19 nt, Artificial Sequence
  Description of Artificial Sequence: Synthetic oligonucleotide
acuugaugcagugaagagg

SEQ ID NO: 2178196 - RNA, 19 nt, Artificial Sequence
  Description of Artificial Sequence: Synthetic oligonucleotide
uuguugagagccuggauga

SEQ ID NO: 2178197 - RNA, 19 nt, Artificial Sequence
  Description of Artificial Sequence: Synthetic oligonucleotide
uuuagaccauuuauugugu

SEQ ID NO: 2178198 - RNA, 19 nt, Artificial Sequence
  Description of Artificial Sequence: Synthetic oligonucleotide
uuauucgauauugucauaa

SEQ ID NO: 2178199 - RNA, 19 nt, Artificial Sequence
  Description of Artificial Sequence: Synthetic oligonucleotide
gauaaugccucaacgagca

SEQ ID NO: 2178200 - RNA, 19 nt, Artificial Sequence
  Description of Artificial Sequence: Synthetic oligonucleotide
aaugccucaacgagcagag

SEQ ID NO: 2178201 - RNA, 19 nt, Artificial Sequence
  Description of Artificial Sequence: Synthetic oligonucleotide
cugcaaagugcaaaagagg

SEQ ID NO: 2178202 - RNA, 19 nt, Artificial Sequence
  Description of Artificial Sequence: Synthetic oligonucleotide
uguccaaauggcacuuggg

SEQ ID NO: 2178203 - RNA, 19 nt, Artificial Sequence
  Description of Artificial Sequence: Synthetic oligonucleotide
aaacaugaaucacguccuc

SEQ ID NO: 2178204 - RNA, 19 nt, Artificial Sequence
  Description of Artificial Sequence: Synthetic oligonucleotide
uagaccauuuauugugucc

SEQ ID NO: 2178205 - RNA, 19 nt, Artificial Sequence
  Description of Artificial Sequence: Synthetic oligonucleotide
augacgcgcuccuucagcc

SEQ ID NO: 2178206 - RNA, 19 nt, Artificial Sequence
  Description of Artificial Sequence: Synthetic oligonucleotide
acugucuaaccuguuaccg

SEQ ID NO: 2178207 - RNA, 19 nt, Artificial Sequence
  Description of Artificial Sequence: Synthetic oligonucleotide
agagugaguuuacugaaga

SEQ ID NO: 2178208 - RNA, 19 nt, Artificial Sequence
  Description of Artificial Sequence: Synthetic oligonucleotide
gauacugagagugaguuua

SEQ ID NO: 2178209 - RNA, 19 nt, Artificial Sequence
  Description of Artificial Sequence: Synthetic oligonucleotide
ugaagaggcaucacaaaua

SEQ ID NO: 2178210 - RNA, 19 nt, Artificial Sequence
  Description of Artificial Sequence: Synthetic oligonucleotide
ucagugcugacucaauagu

SEQ ID NO: 2178211 - RNA, 19 nt, Artificial Sequence
  Description of Artificial Sequence: Synthetic oligonucleotide
ucagguuaacagcagccca

SEQ ID NO: 2178212 - RNA, 19 nt, Artificial Sequence
  Description of Artificial Sequence: Synthetic oligonucleotide
gauucgacuccuuuccaug

SEQ ID NO: 2178213 - RNA, 19 nt, Artificial Sequence
  Description of Artificial Sequence: Synthetic oligonucleotide
agagaagagccaccagggc

SEQ ID NO: 2178214 - RNA, 19 nt, Artificial Sequence
  Description of Artificial Sequence: Synthetic oligonucleotide
augugccggacuuuagacc

SEQ ID NO: 2178215 - RNA, 19 nt, Artificial Sequence
  Description of Artificial Sequence: Synthetic oligonucleotide
acuuuagaccauuuauugu

SEQ ID NO: 2178216 - RNA, 19 nt, Artificial Sequence
  Description of Artificial Sequence: Synthetic oligonucleotide
aaucacguccucgugguug

SEQ ID NO: 2178217 - RNA, 19 nt, Artificial Sequence
  Description of Artificial Sequence: Synthetic oligonucleotide
gaagaggcaucacaaauaa

SEQ ID NO: 2178218 - RNA, 19 nt, Artificial Sequence
  Description of Artificial Sequence: Synthetic oligonucleotide
ucuguuuucagugcugacu

SEQ ID NO: 2178219 - RNA, 19 nt, Artificial Sequence
  Description of Artificial Sequence: Synthetic oligonucleotide
cucaauaguugacuugggc

SEQ ID NO: 2178220 - RNA, 19 nt, Artificial Sequence
  Description of Artificial Sequence: Synthetic oligonucleotide
ugagagugaguuuacugaa

SEQ ID NO: 2178221 - RNA, 19 nt, Artificial Sequence
  Description of Artificial Sequence: Synthetic oligonucleotide
gaugugccggacuuuagac

SEQ ID NO: 2178222 - RNA, 19 nt, Artificial Sequence
  Description of Artificial Sequence: Synthetic oligonucleotide
ugaaucacguccucguggu

SEQ ID NO: 2178223 - RNA, 19 nt, Artificial Sequence
  Description of Artificial Sequence: Synthetic oligonucleotide
cauuuauugugucccgcgg

SEQ ID NO: 2178224 - RNA, 19 nt, Artificial Sequence
  Description of Artificial Sequence: Synthetic oligonucleotide
ugccucaacgagcagagaa

SEQ ID NO: 2178225 - RNA, 19 nt, Artificial Sequence
  Description of Artificial Sequence: Synthetic oligonucleotide
uucagcuccggcuucaauc

SEQ ID NO: 2178226 - RNA, 19 nt, Artificial Sequence
  Description of Artificial Sequence: Synthetic oligonucleotide
gugaguuuacugaagauuc

SEQ ID NO: 2178227 - RNA, 19 nt, Artificial Sequence
  Description of Artificial Sequence: Synthetic oligonucleotide
ucacuugaugcagugaaga

SEQ ID NO: 2178228 - RNA, 19 nt, Artificial Sequence
  Description of Artificial Sequence: Synthetic oligonucleotide
ugucauaaacaugaaucac

SEQ ID NO: 2178229 - RNA, 19 nt, Artificial Sequence
  Description of Artificial Sequence: Synthetic oligonucleotide
acagaacacaggcccaggg

SEQ ID NO: 2178230 - RNA, 19 nt, Artificial Sequence
  Description of Artificial Sequence: Synthetic oligonucleotide
cugucuaaccuguuaccgg

SEQ ID NO: 2178231 - RNA, 19 nt, Artificial Sequence
  Description of Artificial Sequence: Synthetic oligonucleotide
uuuuccugcugggagacgc

SEQ ID NO: 2178232 - RNA, 19 nt, Artificial Sequence
  Description of Artificial Sequence: Synthetic oligonucleotide
ugacucaauaguugacuug

SEQ ID NO: 2178233 - RNA, 19 nt, Artificial Sequence
  Description of Artificial Sequence: Synthetic oligonucleotide
ugaugugccggacuuuaga

SEQ ID NO: 2178234 - RNA, 19 nt, Artificial Sequence
  Description of Artificial Sequence: Synthetic oligonucleotide
uauucuugcuucgacacau

SEQ ID NO: 2178235 - RNA, 19 nt, Artificial Sequence
  Description of Artificial Sequence: Synthetic oligonucleotide
agguucagccagcugcacc

SEQ ID NO: 2178236 - RNA, 19 nt, Artificial Sequence
  Description of Artificial Sequence: Synthetic oligonucleotide
auuuauugugucccgcggu

SEQ ID NO: 2178237 - RNA, 19 nt, Artificial Sequence
  Description of Artificial Sequence: Synthetic oligonucleotide
accuguuaccggaacaagc

SEQ ID NO: 2178238 - RNA, 19 nt, Artificial Sequence
  Description of Artificial Sequence: Synthetic oligonucleotide
ugaacagccugcuccaggu

SEQ ID NO: 2178239 - RNA, 19 nt, Artificial Sequence
  Description of Artificial Sequence: Synthetic oligonucleotide
uuguucucgggguuggggc

SEQ ID NO: 2178240 - RNA, 19 nt, Artificial Sequence
  Description of Artificial Sequence: Synthetic oligonucleotide
uucgcgcacgaaagcaucg

SEQ ID NO: 2178241 - RNA, 19 nt, Artificial Sequence
  Description of Artificial Sequence: Synthetic oligonucleotide
aacagcagcccaccacauc

SEQ ID NO: 2178242 - RNA, 19 nt, Artificial Sequence
  Description of Artificial Sequence: Synthetic oligonucleotide
aacacaggcccagggaguc

SEQ ID NO: 2178243 - RNA, 19 nt, Artificial Sequence
  Description of Artificial Sequence: Synthetic oligonucleotide
uaaugccucaacgagcaga

SEQ ID NO: 2178244 - RNA, 19 nt, Artificial Sequence
  Description of Artificial Sequence: Synthetic oligonucleotide
cacaucucuaagacauugg

SEQ ID NO: 2178245 - RNA, 19 nt, Artificial Sequence
  Description of Artificial Sequence: Synthetic oligonucleotide
ugggcauauucuugcuucg

SEQ ID NO: 2178246 - RNA, 19 nt, Artificial Sequence
  Description of Artificial Sequence: Synthetic oligonucleotide
accauuuauugugucccgc

SEQ ID NO: 2178247 - RNA, 19 nt, Artificial Sequence
  Description of Artificial Sequence: Synthetic oligonucleotide
acagcuuucuucucucugu

SEQ ID NO: 2178248 - RNA, 19 nt, Artificial Sequence
  Description of Artificial Sequence: Synthetic oligonucleotide
ucgaccaggggcugcaaag

SEQ ID NO: 2178249 - RNA, 19 nt, Artificial Sequence
  Description of Artificial Sequence: Synthetic oligonucleotide
uucaaucgccaguuccagg

SEQ ID NO: 2178250 - RNA, 19 nt, Artificial Sequence
  Description of Artificial Sequence: Synthetic oligonucleotide
aaaugacgcgcuccuucag

SEQ ID NO: 2178251 - RNA, 19 nt, Artificial Sequence
  Description of Artificial Sequence: Synthetic oligonucleotide
aaucgccaguuccagggca

SEQ ID NO: 2178252 - RNA, 19 nt, Artificial Sequence
  Description of Artificial Sequence: Synthetic oligonucleotide
gaccauuuauugugucccg

SEQ ID NO: 2178253 - RNA, 19 nt, Artificial Sequence
  Description of Artificial Sequence: Synthetic oligonucleotide
cuccuuuccauguccuugg

SEQ ID NO: 2178254 - RNA, 19 nt, Artificial Sequence
  Description of Artificial Sequence: Synthetic oligonucleotide
ccaaauggcacuugggacc

SEQ ID NO: 2178255 - RNA, 19 nt, Artificial Sequence
  Description of Artificial Sequence: Synthetic oligonucleotide
cucgauaaugccucaacga

SEQ ID NO: 2178256 - RNA, 19 nt, Artificial Sequence
  Description of Artificial Sequence: Synthetic oligonucleotide
ucuaaccuguuaccggaac

SEQ ID NO: 2178257 - RNA, 19 nt, Artificial Sequence
  Description of Artificial Sequence: Synthetic oligonucleotide
ugggagacgcaccaaggac

SEQ ID NO: 2178258 - RNA, 19 nt, Artificial Sequence
  Description of Artificial Sequence: Synthetic oligonucleotide
gcugcaaagugcaaaagag

SEQ ID NO: 2178259 - RNA, 19 nt, Artificial Sequence
  Description of Artificial Sequence: Synthetic oligonucleotide
auuuaauguccaaauggca

SEQ ID NO: 2178260 - RNA, 19 nt, Artificial Sequence
  Description of Artificial Sequence: Synthetic oligonucleotide
uaccggaacaagccgguca

SEQ ID NO: 2178261 - RNA, 19 nt, Artificial Sequence
  Description of Artificial Sequence: Synthetic oligonucleotide
uuauugugucccgcggugg

SEQ ID NO: 2178262 - RNA, 19 nt, Artificial Sequence
  Description of Artificial Sequence: Synthetic oligonucleotide
gaaaugacgcgcuccuuca

SEQ ID NO: 2178263 - RNA, 19 nt, Artificial Sequence
  Description of Artificial Sequence: Synthetic oligonucleotide
acgagcagagaagagccac

SEQ ID NO: 2178264 - RNA, 19 nt, Artificial Sequence
  Description of Artificial Sequence: Synthetic oligonucleotide
aagauucgacuccuuucca

SEQ ID NO: 2178265 - RNA, 19 nt, Artificial Sequence
  Description of Artificial Sequence: Synthetic oligonucleotide
uauucgauauugucauaaa

SEQ ID NO: 2178266 - RNA, 19 nt, Artificial Sequence
  Description of Artificial Sequence: Synthetic oligonucleotide
ggucaaacugucuaaccug

SEQ ID NO: 2178267 - RNA, 19 nt, Artificial Sequence
  Description of Artificial Sequence: Synthetic oligonucleotide
ucccucuuuaaccgccagg

SEQ ID NO: 2178268 - RNA, 19 nt, Artificial Sequence
  Description of Artificial Sequence: Synthetic oligonucleotide
accggaacaagccggucag

SEQ ID NO: 2178269 - RNA, 19 nt, Artificial Sequence
  Description of Artificial Sequence: Synthetic oligonucleotide
guuggggaugaacuccagg

SEQ ID NO: 2178270 - RNA, 19 nt, Artificial Sequence
  Description of Artificial Sequence: Synthetic oligonucleotide
ugcucgauaaugccucaac

SEQ ID NO: 2178271 - RNA, 19 nt, Artificial Sequence
  Description of Artificial Sequence: Synthetic oligonucleotide
aaagcaucgggcagccguc

SEQ ID NO: 2178272 - RNA, 19 nt, Artificial Sequence
  Description of Artificial Sequence: Synthetic oligonucleotide
ccuguuaccggaacaagcc

SEQ ID NO: 2178273 - RNA, 19 nt, Artificial Sequence
  Description of Artificial Sequence: Synthetic oligonucleotide
agguuaacagcagcccacc

SEQ ID NO: 2178274 - RNA, 19 nt, Artificial Sequence
  Description of Artificial Sequence: Synthetic oligonucleotide
agaggagcggccaagguca

SEQ ID NO: 2178275 - RNA, 19 nt, Artificial Sequence
  Description of Artificial Sequence: Synthetic oligonucleotide
gaaagcaucgggcagccgu

SEQ ID NO: 2178276 - RNA, 19 nt, Artificial Sequence
  Description of Artificial Sequence: Synthetic oligonucleotide
uugaguuggggaugaacuc

SEQ ID NO: 2178277 - RNA, 19 nt, Artificial Sequence
  Description of Artificial Sequence: Synthetic oligonucleotide
cuguuaccggaacaagccg

SEQ ID NO: 2178278 - RNA, 19 nt, Artificial Sequence
  Description of Artificial Sequence: Synthetic oligonucleotide
cuugcuucgacacaucucu

SEQ ID NO: 2178279 - RNA, 19 nt, Artificial Sequence
  Description of Artificial Sequence: Synthetic oligonucleotide
gaggcuucgcgcacgaaag

SEQ ID NO: 2178280 - RNA, 19 nt, Artificial Sequence
  Description of Artificial Sequence: Synthetic oligonucleotide
aggacacagaacacaggcc

SEQ ID NO: 2178281 - RNA, 19 nt, Artificial Sequence
  Description of Artificial Sequence: Synthetic oligonucleotide
gcucgauaaugccucaacg

SEQ ID NO: 2178282 - RNA, 19 nt, Artificial Sequence
  Description of Artificial Sequence: Synthetic oligonucleotide
uguucucgggguuggggcc

SEQ ID NO: 2178283 - RNA, 19 nt, Artificial Sequence
  Description of Artificial Sequence: Synthetic oligonucleotide
ugcaaaagaggagcggcca

SEQ ID NO: 2178284 - RNA, 19 nt, Artificial Sequence
  Description of Artificial Sequence: Synthetic oligonucleotide
auucgacuccuuuccaugu

SEQ ID NO: 2178285 - RNA, 19 nt, Artificial Sequence
  Description of Artificial Sequence: Synthetic oligonucleotide
uguccucuacuccaaccac

SEQ ID NO: 2178286 - RNA, 19 nt, Artificial Sequence
  Description of Artificial Sequence: Synthetic oligonucleotide
cacugcucgauaaugccuc

SEQ ID NO: 2178287 - RNA, 19 nt, Artificial Sequence
  Description of Artificial Sequence: Synthetic oligonucleotide
agacgcaccaaggacccac

SEQ ID NO: 2178288 - RNA, 19 nt, Artificial Sequence
  Description of Artificial Sequence: Synthetic oligonucleotide
ggucaggacguccuggccg

SEQ ID NO: 2178289 - RNA, 19 nt, Artificial Sequence
  Description of Artificial Sequence: Synthetic oligonucleotide
acacgcagcguccugugug

SEQ ID NO: 2178290 - RNA, 19 nt, Artificial Sequence
  Description of Artificial Sequence: Synthetic oligonucleotide
cucucagguuaacagcagc

SEQ ID NO: 2178291 - RNA, 19 nt, Artificial Sequence
  Description of Artificial Sequence: Synthetic oligonucleotide
gaguuuacugaagauucga

SEQ ID NO: 2178292 - RNA, 19 nt, Artificial Sequence
  Description of Artificial Sequence: Synthetic oligonucleotide
agugaagaggcaucacaaa

SEQ ID NO: 2178293 - RNA, 19 nt, Artificial Sequence
  Description of Artificial Sequence: Synthetic oligonucleotide
cucacuugaugcagugaag

SEQ ID NO: 2178294 - RNA, 19 nt, Artificial Sequence
  Description of Artificial Sequence: Synthetic oligonucleotide
cacuugggaccacugcucg

SEQ ID NO: 2178295 - RNA, 19 nt, Artificial Sequence
  Description of Artificial Sequence: Synthetic oligonucleotide
aaccuguuaccggaacaag

SEQ ID NO: 2178296 - RNA, 19 nt, Artificial Sequence
  Description of Artificial Sequence: Synthetic oligonucleotide
aaccccgaggcuucgcgca

SEQ ID NO: 2178297 - RNA, 19 nt, Artificial Sequence
  Description of Artificial Sequence: Synthetic oligonucleotide
ugcuucgacacaucucuaa

SEQ ID NO: 2178298 - RNA, 19 nt, Artificial Sequence
  Description of Artificial Sequence: Synthetic oligonucleotide
acgaaagcaucgggcagcc

SEQ ID NO: 2178299 - RNA, 19 nt, Artificial Sequence
  Description of Artificial Sequence: Synthetic oligonucleotide
uucacaucuucagcuccgg

SEQ ID NO: 2178300 - RNA, 19 nt, Artificial Sequence
  Description of Artificial Sequence: Synthetic oligonucleotide
uugaugugccggacuuuag

SEQ ID NO: 2178301 - RNA, 19 nt, Artificial Sequence
  Description of Artificial Sequence: Synthetic oligonucleotide
cucaacgagcagagaagag

SEQ ID NO: 2178302 - RNA, 19 nt, Artificial Sequence
  Description of Artificial Sequence: Synthetic oligonucleotide
ugaugcagugaagaggcau

SEQ ID NO: 2178303 - RNA, 19 nt, Artificial Sequence
  Description of Artificial Sequence: Synthetic oligonucleotide
uccagggaacaggacacag

SEQ ID NO: 2178304 - RNA, 19 nt, Artificial Sequence
  Description of Artificial Sequence: Synthetic oligonucleotide
guggaguugggccgcagcc

SEQ ID NO: 2178305 - RNA, 19 nt, Artificial Sequence
  Description of Artificial Sequence: Synthetic oligonucleotide
agauucgacuccuuuccau

SEQ ID NO: 2178306 - RNA, 19 nt, Artificial Sequence
  Description of Artificial Sequence: Synthetic oligonucleotide
cauaaacaugaaucacguc

SEQ ID NO: 2178307 - RNA, 19 nt, Artificial Sequence
  Description of Artificial Sequence: Synthetic oligonucleotide
aggauauauuuaaugucca

SEQ ID NO: 2178308 - RNA, 19 nt, Artificial Sequence
  Description of Artificial Sequence: Synthetic oligonucleotide
uguuuucagugcugacuca

SEQ ID NO: 2178309 - RNA, 19 nt, Artificial Sequence
  Description of Artificial Sequence: Synthetic oligonucleotide
uggaguugggccgcagccg

SEQ ID NO: 2178310 - RNA, 19 nt, Artificial Sequence
  Description of Artificial Sequence: Synthetic oligonucleotide
agcggccaaggucaaacug

SEQ ID NO: 2178311 - RNA, 19 nt, Artificial Sequence
  Description of Artificial Sequence: Synthetic oligonucleotide
aggcuucgcgcacgaaagc

SEQ ID NO: 2178312 - RNA, 19 nt, Artificial Sequence
  Description of Artificial Sequence: Synthetic oligonucleotide
cuuugaguuggggaugaac

SEQ ID NO: 2178313 - RNA, 19 nt, Artificial Sequence
  Description of Artificial Sequence: Synthetic oligonucleotide
ccauuuauugugucccgcg

SEQ ID NO: 2178314 - RNA, 19 nt, Artificial Sequence
  Description of Artificial Sequence: Synthetic oligonucleotide
uccggcuucaaucgccagu

SEQ ID NO: 2178315 - RNA, 19 nt, Artificial Sequence
  Description of Artificial Sequence: Synthetic oligonucleotide
ccguacagcaaaugaaugc

SEQ ID NO: 2178316 - RNA, 19 nt, Artificial Sequence
  Description of Artificial Sequence: Synthetic oligonucleotide
cacgaaagcaucgggcagc

SEQ ID NO: 2178317 - RNA, 19 nt, Artificial Sequence
  Description of Artificial Sequence: Synthetic oligonucleotide
cuuggggcccuugaugugc

SEQ ID NO: 2178318 - RNA, 19 nt, Artificial Sequence
  Description of Artificial Sequence: Synthetic oligonucleotide
acguccuggccgcuucugc

SEQ ID NO: 2178319 - RNA, 19 nt, Artificial Sequence
  Description of Artificial Sequence: Synthetic oligonucleotide
aauaguugacuugggcaua

SEQ ID NO: 2178320 - RNA, 19 nt, Artificial Sequence
  Description of Artificial Sequence: Synthetic oligonucleotide
caaggucaaacugucuaac

SEQ ID NO: 2178321 - RNA, 19 nt, Artificial Sequence
  Description of Artificial Sequence: Synthetic oligonucleotide
cacgcuccagguuuacagc

SEQ ID NO: 2178322 - RNA, 19 nt, Artificial Sequence
  Description of Artificial Sequence: Synthetic oligonucleotide
aacaagccggucaggacgu

SEQ ID NO: 2178323 - RNA, 19 nt, Artificial Sequence
  Description of Artificial Sequence: Synthetic oligonucleotide
uugugucccgcgguggccg

SEQ ID NO: 2178324 - RNA, 19 nt, Artificial Sequence
  Description of Artificial Sequence: Synthetic oligonucleotide
agcuccggcuucaaucgcc

SEQ ID NO: 2178325 - RNA, 19 nt, Artificial Sequence
  Description of Artificial Sequence: Synthetic oligonucleotide
cacgcagcguccugugugg

SEQ ID NO: 2178326 - RNA, 19 nt, Artificial Sequence
  Description of Artificial Sequence: Synthetic oligonucleotide
cagugaagaggcaucacaa

SEQ ID NO: 2178327 - RNA, 19 nt, Artificial Sequence
  Description of Artificial Sequence: Synthetic oligonucleotide
aggugaacagccugcucca

SEQ ID NO: 2178328 - RNA, 19 nt, Artificial Sequence
  Description of Artificial Sequence: Synthetic oligonucleotide
cuaaccuguuaccggaaca

SEQ ID NO: 2178329 - RNA, 19 nt, Artificial Sequence
  Description of Artificial Sequence: Synthetic oligonucleotide
gcuucgacacaucucuaag

SEQ ID NO: 2178330 - RNA, 19 nt, Artificial Sequence
  Description of Artificial Sequence: Synthetic oligonucleotide
gcacgcuccagguuuacag

SEQ ID NO: 2178331 - RNA, 19 nt, Artificial Sequence
  Description of Artificial Sequence: Synthetic oligonucleotide
acccacgcgaaccccgagg

SEQ ID NO: 2178332 - RNA, 19 nt, Artificial Sequence
  Description of Artificial Sequence: Synthetic oligonucleotide
caauaguugacuugggcau

SEQ ID NO: 2178333 - RNA, 19 nt, Artificial Sequence
  Description of Artificial Sequence: Synthetic oligonucleotide
gaccaggggcugcaaagug

SEQ ID NO: 2178334 - RNA, 19 nt, Artificial Sequence
  Description of Artificial Sequence: Synthetic oligonucleotide
ggaguugggccgcagccgg

SEQ ID NO: 2178335 - RNA, 19 nt, Artificial Sequence
  Description of Artificial Sequence: Synthetic oligonucleotide
gucaggacguccuggccgc

SEQ ID NO: 2178336 - RNA, 19 nt, Artificial Sequence
  Description of Artificial Sequence: Synthetic oligonucleotide
auacugagagugaguuuac

SEQ ID NO: 2178337 - RNA, 19 nt, Artificial Sequence
  Description of Artificial Sequence: Synthetic oligonucleotide
ggaugaggugaacagccug

SEQ ID NO: 2178338 - RNA, 19 nt, Artificial Sequence
  Description of Artificial Sequence: Synthetic oligonucleotide
acgcaccaaggacccacgc

SEQ ID NO: 2178339 - RNA, 19 nt, Artificial Sequence
  Description of Artificial Sequence: Synthetic oligonucleotide
ggggccucccucuuuaacc

SEQ ID NO: 2178340 - RNA, 19 nt, Artificial Sequence
  Description of Artificial Sequence: Synthetic oligonucleotide
cuucgcgcacgaaagcauc

SEQ ID NO: 2178341 - RNA, 19 nt, Artificial Sequence
  Description of Artificial Sequence: Synthetic oligonucleotide
cguacagcaaaugaaugcc

SEQ ID NO: 2178342 - RNA, 19 nt, Artificial Sequence
  Description of Artificial Sequence: Synthetic oligonucleotide
aggacguccuggccgcuuc

SEQ ID NO: 2178343 - RNA, 19 nt, Artificial Sequence
  Description of Artificial Sequence: Synthetic oligonucleotide
gugaagaggcaucacaaau

SEQ ID NO: 2178344 - RNA, 19 nt, Artificial Sequence
  Description of Artificial Sequence: Synthetic oligonucleotide
cagcccaccacaucaucug

SEQ ID NO: 2178345 - RNA, 19 nt, Artificial Sequence
  Description of Artificial Sequence: Synthetic oligonucleotide
uuuccugcugggagacgca

SEQ ID NO: 2178346 - RNA, 19 nt, Artificial Sequence
  Description of Artificial Sequence: Synthetic oligonucleotide
guugacuugggcauauucu

SEQ ID NO: 2178347 - RNA, 19 nt, Artificial Sequence
  Description of Artificial Sequence: Synthetic oligonucleotide
acucaauaguugacuuggg

SEQ ID NO: 2178348 - RNA, 19 nt, Artificial Sequence
  Description of Artificial Sequence: Synthetic oligonucleotide
ugggaccacugcucgauaa

SEQ ID NO: 2178349 - RNA, 19 nt, Artificial Sequence
  Description of Artificial Sequence: Synthetic oligonucleotide
auaaugccucaacgagcag

SEQ ID NO: 2178350 - RNA, 19 nt, Artificial Sequence
  Description of Artificial Sequence: Synthetic oligonucleotide
guccuggccgcuucugcgg

SEQ ID NO: 2178351 - RNA, 19 nt, Artificial Sequence
  Description of Artificial Sequence: Synthetic oligonucleotide
gaaccccgaggcuucgcgc

SEQ ID NO: 2178352 - RNA, 19 nt, Artificial Sequence
  Description of Artificial Sequence: Synthetic oligonucleotide
acguccucgugguuguuga

SEQ ID NO: 2178353 - RNA, 19 nt, Artificial Sequence
  Description of Artificial Sequence: Synthetic oligonucleotide
ugacacgcagcguccugug

SEQ ID NO: 2178354 - RNA, 19 nt, Artificial Sequence
  Description of Artificial Sequence: Synthetic oligonucleotide
gggagacgcaccaaggacc

SEQ ID NO: 2178355 - RNA, 19 nt, Artificial Sequence
  Description of Artificial Sequence: Synthetic oligonucleotide
uuggggcccuugaugugcc

SEQ ID NO: 2178356 - RNA, 19 nt, Artificial Sequence
  Description of Artificial Sequence: Synthetic oligonucleotide
gccaggcggauacugagag

SEQ ID NO: 2178357 - RNA, 19 nt, Artificial Sequence
  Description of Artificial Sequence: Synthetic oligonucleotide
ucaaacugucuaaccuguu

SEQ ID NO: 2178358 - RNA, 19 nt, Artificial Sequence
  Description of Artificial Sequence: Synthetic oligonucleotide
cgauaaugccucaacgagc

SEQ ID NO: 2178359 - RNA, 19 nt, Artificial Sequence
  Description of Artificial Sequence: Synthetic oligonucleotide
uugaugcagugaagaggca

SEQ ID NO: 2178360 - RNA, 19 nt, Artificial Sequence
  Description of Artificial Sequence: Synthetic oligonucleotide
cccucuuuaaccgccaggc

SEQ ID NO: 2178361 - RNA, 19 nt, Artificial Sequence
  Description of Artificial Sequence: Synthetic oligonucleotide
gugguuguugagagccugg

SEQ ID NO: 2178362 - RNA, 19 nt, Artificial Sequence
  Description of Artificial Sequence: Synthetic oligonucleotide
gugcaaaagaggagcggcc

SEQ ID NO: 2178363 - RNA, 19 nt, Artificial Sequence
  Description of Artificial Sequence: Synthetic oligonucleotide
agguggcuguuguucucgg

SEQ ID NO: 2178364 - RNA, 19 nt, Artificial Sequence
  Description of Artificial Sequence: Synthetic oligonucleotide
caaucgccaguuccagggc

SEQ ID NO: 2178365 - RNA, 19 nt, Artificial Sequence
  Description of Artificial Sequence: Synthetic oligonucleotide
gcaccaaggacccacgcga

SEQ ID NO: 2178366 - RNA, 19 nt, Artificial Sequence
  Description of Artificial Sequence: Synthetic oligonucleotide
uacugagagugaguuuacu

SEQ ID NO: 2178367 - RNA, 19 nt, Artificial Sequence
  Description of Artificial Sequence: Synthetic oligonucleotide
auaguugacuugggcauau

SEQ ID NO: 2178368 - RNA, 19 nt, Artificial Sequence
  Description of Artificial Sequence: Synthetic oligonucleotide
cucuguuuucagugcugac

SEQ ID NO: 2178369 - RNA, 19 nt, Artificial Sequence
  Description of Artificial Sequence: Synthetic oligonucleotide
uucgaccaggggcugcaaa

SEQ ID NO: 2178370 - RNA, 19 nt, Artificial Sequence
  Description of Artificial Sequence: Synthetic oligonucleotide
aaccgccaggcggauacug

SEQ ID NO: 2178371 - RNA, 19 nt, Artificial Sequence
  Description of Artificial Sequence: Synthetic oligonucleotide
aguugggccgcagccgggg

SEQ ID NO: 2178372 - RNA, 19 nt, Artificial Sequence
  Description of Artificial Sequence: Synthetic oligonucleotide
uaaccccguacagcaaaug

SEQ ID NO: 2178373 - RNA, 19 nt, Artificial Sequence
  Description of Artificial Sequence: Synthetic oligonucleotide
gacgcaccaaggacccacg

SEQ ID NO: 2178374 - RNA, 19 nt, Artificial Sequence
  Description of Artificial Sequence: Synthetic oligonucleotide
cagcuuucuucucucuguc

SEQ ID NO: 2178375 - RNA, 19 nt, Artificial Sequence
  Description of Artificial Sequence: Synthetic oligonucleotide
aacgagcagagaagagcca

SEQ ID NO: 2178376 - RNA, 19 nt, Artificial Sequence
  Description of Artificial Sequence: Synthetic oligonucleotide
acugcucgauaaugccuca

SEQ ID NO: 2178377 - RNA, 19 nt, Artificial Sequence
  Description of Artificial Sequence: Synthetic oligonucleotide
uggggccucccucuuuaac

SEQ ID NO: 2178378 - RNA, 19 nt, Artificial Sequence
  Description of Artificial Sequence: Synthetic oligonucleotide
ucgugguuguugagagccu

SEQ ID NO: 2178379 - RNA, 19 nt, Artificial Sequence
  Description of Artificial Sequence: Synthetic oligonucleotide
ggagacgcaccaaggaccc

SEQ ID NO: 2178380 - RNA, 19 nt, Artificial Sequence
  Description of Artificial Sequence: Synthetic oligonucleotide
ggaacaagccggucaggac

SEQ ID NO: 2178381 - RNA, 19 nt, Artificial Sequence
  Description of Artificial Sequence: Synthetic oligonucleotide
auucuugcuucgacacauc

SEQ ID NO: 2178382 - RNA, 19 nt, Artificial Sequence
  Description of Artificial Sequence: Synthetic oligonucleotide
cacaaauaaacuggaaaau

SEQ ID NO: 2178383 - RNA, 19 nt, Artificial Sequence
  Description of Artificial Sequence: Synthetic oligonucleotide
ggggaugaacuccagggaa

SEQ ID NO: 2178384 - RNA, 19 nt, Artificial Sequence
  Description of Artificial Sequence: Synthetic oligonucleotide
aggacccacgcgaaccccg

SEQ ID NO: 2178385 - RNA, 19 nt, Artificial Sequence
  Description of Artificial Sequence: Synthetic oligonucleotide
uccucacuugaugcaguga

SEQ ID NO: 2178386 - RNA, 19 nt, Artificial Sequence
  Description of Artificial Sequence: Synthetic oligonucleotide
acuugggaccacugcucga

SEQ ID NO: 2178387 - RNA, 19 nt, Artificial Sequence
  Description of Artificial Sequence: Synthetic oligonucleotide
aguuucuuccucacuugau

SEQ ID NO: 2178388 - RNA, 19 nt, Artificial Sequence
  Description of Artificial Sequence: Synthetic oligonucleotide
gcacgaaagcaucgggcag

SEQ ID NO: 2178389 - RNA, 19 nt, Artificial Sequence
  Description of Artificial Sequence: Synthetic oligonucleotide
uucugcgggucuccagaaa

SEQ ID NO: 2178390 - RNA, 19 nt, Artificial Sequence
  Description of Artificial Sequence: Synthetic oligonucleotide
ggagcggccaaggucaaac

SEQ ID NO: 2178391 - RNA, 19 nt, Artificial Sequence
  Description of Artificial Sequence: Synthetic oligonucleotide
agccgucccucucagguua

SEQ ID NO: 2178392 - RNA, 19 nt, Artificial Sequence
  Description of Artificial Sequence: Synthetic oligonucleotide
cuugaugugccggacuuua

SEQ ID NO: 2178393 - RNA, 19 nt, Artificial Sequence
  Description of Artificial Sequence: Synthetic oligonucleotide
ucgccaguuccagggcacg

SEQ ID NO: 2178394 - RNA, 19 nt, Artificial Sequence
  Description of Artificial Sequence: Synthetic oligonucleotide
caagccggucaggacgucc

SEQ ID NO: 2178395 - RNA, 19 nt, Artificial Sequence
  Description of Artificial Sequence: Synthetic oligonucleotide
aagaaaugacgcgcuccuu

SEQ ID NO: 2178396 - RNA, 19 nt, Artificial Sequence
  Description of Artificial Sequence: Synthetic oligonucleotide
cccguacagcaaaugaaug

SEQ ID NO: 2178397 - RNA, 19 nt, Artificial Sequence
  Description of Artificial Sequence: Synthetic oligonucleotide
ggaccacugcucgauaaug

SEQ ID NO: 2178398 - RNA, 19 nt, Artificial Sequence
  Description of Artificial Sequence: Synthetic oligonucleotide
caccuuugaguuggggaug

SEQ ID NO: 2178399 - RNA, 19 nt, Artificial Sequence
  Description of Artificial Sequence: Synthetic oligonucleotide
accccguacagcaaaugaa

SEQ ID NO: 2178400 - RNA, 19 nt, Artificial Sequence
  Description of Artificial Sequence: Synthetic oligonucleotide
gcugggagacgcaccaagg

SEQ ID NO: 2178401 - RNA, 19 nt, Artificial Sequence
  Description of Artificial Sequence: Synthetic oligonucleotide
gccgcgcugacacgcagcg

SEQ ID NO: 2178402 - RNA, 19 nt, Artificial Sequence
  Description of Artificial Sequence: Synthetic oligonucleotide
caucugcuucgaccagggg

SEQ ID NO: 2178403 - RNA, 19 nt, Artificial Sequence
  Description of Artificial Sequence: Synthetic oligonucleotide
gaacagccugcuccagguc

SEQ ID NO: 2178404 - RNA, 19 nt, Artificial Sequence
  Description of Artificial Sequence: Synthetic oligonucleotide
uugcuucgacacaucucua

SEQ ID NO: 2178405 - RNA, 19 nt, Artificial Sequence
  Description of Artificial Sequence: Synthetic oligonucleotide
ggaugaacuccagggaaca

SEQ ID NO: 2178406 - RNA, 19 nt, Artificial Sequence
  Description of Artificial Sequence: Synthetic oligonucleotide
gggaugaacuccagggaac

SEQ ID NO: 2178407 - RNA, 19 nt, Artificial Sequence
  Description of Artificial Sequence: Synthetic oligonucleotide
ugucccgcgguggccgccg

SEQ ID NO: 2178408 - RNA, 19 nt, Artificial Sequence
  Description of Artificial Sequence: Synthetic oligonucleotide
cccucucagguuaacagca

SEQ ID NO: 2178409 - RNA, 19 nt, Artificial Sequence
  Description of Artificial Sequence: Synthetic oligonucleotide
guuggggccucccucuuua

SEQ ID NO: 2178410 - RNA, 19 nt, Artificial Sequence
  Description of Artificial Sequence: Synthetic oligonucleotide
ccucuuuaaccgccaggcg

SEQ ID NO: 2178411 - RNA, 19 nt, Artificial Sequence
  Description of Artificial Sequence: Synthetic oligonucleotide
ccucacuugaugcagugaa

SEQ ID NO: 2178412 - RNA, 19 nt, Artificial Sequence
  Description of Artificial Sequence: Synthetic oligonucleotide
gccucuaaccccguacagc

SEQ ID NO: 2178413 - RNA, 19 nt, Artificial Sequence
  Description of Artificial Sequence: Synthetic oligonucleotide
agacauuggccagguggcu

SEQ ID NO: 2178414 - RNA, 19 nt, Artificial Sequence
  Description of Artificial Sequence: Synthetic oligonucleotide
cugacucaauaguugacuu

SEQ ID NO: 2178415 - RNA, 19 nt, Artificial Sequence
  Description of Artificial Sequence: Synthetic oligonucleotide
ggccucuaaccccguacag

SEQ ID NO: 2178416 - RNA, 19 nt, Artificial Sequence
  Description of Artificial Sequence: Synthetic oligonucleotide
uggggcccuugaugugccg

SEQ ID NO: 2178417 - RNA, 19 nt, Artificial Sequence
  Description of Artificial Sequence: Synthetic oligonucleotide
gacccacgcgaaccccgag

SEQ ID NO: 2178418 - RNA, 19 nt, Artificial Sequence
  Description of Artificial Sequence: Synthetic oligonucleotide
cccacgcgaaccccgaggc

SEQ ID NO: 2178419 - RNA, 19 nt, Artificial Sequence
  Description of Artificial Sequence: Synthetic oligonucleotide
cacguccucgugguuguug

SEQ ID NO: 2178420 - RNA, 19 nt, Artificial Sequence
  Description of Artificial Sequence: Synthetic oligonucleotide
gcaccuuugaguuggggau

SEQ ID NO: 2178421 - RNA, 19 nt, Artificial Sequence
  Description of Artificial Sequence: Synthetic oligonucleotide
gguuuacagcuuucuucuc

SEQ ID NO: 2178422 - RNA, 19 nt, Artificial Sequence
  Description of Artificial Sequence: Synthetic oligonucleotide
uuaccggaacaagccgguc

SEQ ID NO: 2178423 - RNA, 19 nt, Artificial Sequence
  Description of Artificial Sequence: Synthetic oligonucleotide
gcguccuguguggaguugg

SEQ ID NO: 2178424 - RNA, 19 nt, Artificial Sequence
  Description of Artificial Sequence: Synthetic oligonucleotide
uuuaaccgccaggcggaua

SEQ ID NO: 2178425 - RNA, 19 nt, Artificial Sequence
  Description of Artificial Sequence: Synthetic oligonucleotide
cgacacaucucuaagacau

SEQ ID NO: 2178426 - RNA, 19 nt, Artificial Sequence
  Description of Artificial Sequence: Synthetic oligonucleotide
acgcgaaccccgaggcuuc

SEQ ID NO: 2178427 - RNA, 19 nt, Artificial Sequence
  Description of Artificial Sequence: Synthetic oligonucleotide
gguuaacagcagcccacca

SEQ ID NO: 2178428 - RNA, 19 nt, Artificial Sequence
  Description of Artificial Sequence: Synthetic oligonucleotide
ccucucagguuaacagcag

SEQ ID NO: 2178429 - RNA, 19 nt, Artificial Sequence
  Description of Artificial Sequence: Synthetic oligonucleotide
gcgcacgaaagcaucgggc

SEQ ID NO: 2178430 - RNA, 19 nt, Artificial Sequence
  Description of Artificial Sequence: Synthetic oligonucleotide
guuaccggaacaagccggu

SEQ ID NO: 2178431 - RNA, 19 nt, Artificial Sequence
  Description of Artificial Sequence: Synthetic oligonucleotide
cagcuccggcuucaaucgc

SEQ ID NO: 2178432 - RNA, 19 nt, Artificial Sequence
  Description of Artificial Sequence: Synthetic oligonucleotide
ucgggcagccgucccucuc

SEQ ID NO: 2178433 - RNA, 19 nt, Artificial Sequence
  Description of Artificial Sequence: Synthetic oligonucleotide
cuucugcgggucuccagaa

SEQ ID NO: 2178434 - RNA, 19 nt, Artificial Sequence
  Description of Artificial Sequence: Synthetic oligonucleotide
ccaaggucaaacugucuaa

SEQ ID NO: 2178435 - RNA, 19 nt, Artificial Sequence
  Description of Artificial Sequence: Synthetic oligonucleotide
cuccggcuucaaucgccag

SEQ ID NO: 2178436 - RNA, 19 nt, Artificial Sequence
  Description of Artificial Sequence: Synthetic oligonucleotide
gcagccgucccucucaggu

SEQ ID NO: 2178437 - RNA, 19 nt, Artificial Sequence
  Description of Artificial Sequence: Synthetic oligonucleotide
gacgcgcuccuucagccau

SEQ ID NO: 2178438 - RNA, 19 nt, Artificial Sequence
  Description of Artificial Sequence: Synthetic oligonucleotide
gggccucuaaccccguaca

SEQ ID NO: 2178439 - RNA, 19 nt, Artificial Sequence
  Description of Artificial Sequence: Synthetic oligonucleotide
ucccgcgguggccgccgcg

SEQ ID NO: 2178440 - RNA, 19 nt, Artificial Sequence
  Description of Artificial Sequence: Synthetic oligonucleotide
ggcuucgcgcacgaaagca

SEQ ID NO: 2178441 - RNA, 19 nt, Artificial Sequence
  Description of Artificial Sequence: Synthetic oligonucleotide
ggggcccuugaugugccgg

SEQ ID NO: 2178442 - RNA, 19 nt, Artificial Sequence
  Description of Artificial Sequence: Synthetic oligonucleotide
cagugcugacucaauaguu

SEQ ID NO: 2178443 - RNA, 19 nt, Artificial Sequence
  Description of Artificial Sequence: Synthetic oligonucleotide
cgcgcugacacgcagcguc

SEQ ID NO: 2178444 - RNA, 19 nt, Artificial Sequence
  Description of Artificial Sequence: Synthetic oligonucleotide
uuggggccucccucuuuaa

SEQ ID NO: 2178445 - RNA, 19 nt, Artificial Sequence
  Description of Artificial Sequence: Synthetic oligonucleotide
cgcacgaaagcaucgggca

SEQ ID NO: 2178446 - RNA, 19 nt, Artificial Sequence
  Description of Artificial Sequence: Synthetic oligonucleotide
ccuuucuuguucaggauau

SEQ ID NO: 2178447 - RNA, 19 nt, Artificial Sequence
  Description of Artificial Sequence: Synthetic oligonucleotide
ccgccaggcggauacugag

SEQ ID NO: 2178448 - RNA, 19 nt, Artificial Sequence
  Description of Artificial Sequence: Synthetic oligonucleotide
cgaaccccgaggcuucgcg

SEQ ID NO: 2178449 - RNA, 19 nt, Artificial Sequence
  Description of Artificial Sequence: Synthetic oligonucleotide
ugccggacuuuagaccauu

SEQ ID NO: 2178450 - RNA, 19 nt, Artificial Sequence
  Description of Artificial Sequence: Synthetic oligonucleotide
ccucaacgagcagagaaga

SEQ ID NO: 2178451 - RNA, 19 nt, Artificial Sequence
  Description of Artificial Sequence: Synthetic oligonucleotide
uggccgccgcgcugacacg

SEQ ID NO: 2178452 - RNA, 19 nt, Artificial Sequence
  Description of Artificial Sequence: Synthetic oligonucleotide
cucuaaccccguacagcaa

SEQ ID NO: 2178453 - RNA, 19 nt, Artificial Sequence
  Description of Artificial Sequence: Synthetic oligonucleotide
acaagccggucaggacguc

SEQ ID NO: 2178454 - RNA, 19 nt, Artificial Sequence
  Description of Artificial Sequence: Synthetic oligonucleotide
agccgggguuuuccugcug

SEQ ID NO: 2178455 - RNA, 19 nt, Artificial Sequence
  Description of Artificial Sequence: Synthetic oligonucleotide
cuugggaccacugcucgau

SEQ ID NO: 2178456 - RNA, 19 nt, Artificial Sequence
  Description of Artificial Sequence: Synthetic oligonucleotide
caccaaggacccacgcgaa

SEQ ID NO: 2178457 - RNA, 19 nt, Artificial Sequence
  Description of Artificial Sequence: Synthetic oligonucleotide
cuugggcauauucuugcuu

SEQ ID NO: 2178458 - RNA, 19 nt, Artificial Sequence
  Description of Artificial Sequence: Synthetic oligonucleotide
uggccgcuucugcgggucu

SEQ ID NO: 2178459 - RNA, 19 nt, Artificial Sequence
  Description of Artificial Sequence: Synthetic oligonucleotide
ugggccgcagccgggguuu

SEQ ID NO: 2178460 - RNA, 19 nt, Artificial Sequence
  Description of Artificial Sequence: Synthetic oligonucleotide
cagggcacgcuccagguuu

SEQ ID NO: 2178461 - RNA, 19 nt, Artificial Sequence
  Description of Artificial Sequence: Synthetic oligonucleotide
agcguccuguguggaguug

SEQ ID NO: 2178462 - RNA, 19 nt, Artificial Sequence
  Description of Artificial Sequence: Synthetic oligonucleotide
cuaaccccguacagcaaau

SEQ ID NO: 2178463 - RNA, 19 nt, Artificial Sequence
  Description of Artificial Sequence: Synthetic oligonucleotide
aucgggcagccgucccucu

SEQ ID NO: 2178464 - RNA, 19 nt, Artificial Sequence
  Description of Artificial Sequence: Synthetic oligonucleotide
gacacgcagcguccugugu

SEQ ID NO: 2178465 - RNA, 19 nt, Artificial Sequence
  Description of Artificial Sequence: Synthetic oligonucleotide
aggcggauacugagaguga

SEQ ID NO: 2178466 - RNA, 19 nt, Artificial Sequence
  Description of Artificial Sequence: Synthetic oligonucleotide
ccgggguuuuccugcuggg

SEQ ID NO: 2178467 - RNA, 19 nt, Artificial Sequence
  Description of Artificial Sequence: Synthetic oligonucleotide
gucuaaccuguuaccggaa

SEQ ID NO: 2178468 - RNA, 19 nt, Artificial Sequence
  Description of Artificial Sequence: Synthetic oligonucleotide
ccagggaacaggacacaga

SEQ ID NO: 2178469 - RNA, 19 nt, Artificial Sequence
  Description of Artificial Sequence: Synthetic oligonucleotide
uaaccgccaggcggauacu

SEQ ID NO: 2178470 - RNA, 19 nt, Artificial Sequence
  Description of Artificial Sequence: Synthetic oligonucleotide
cuggccgcuucugcggguc

SEQ ID NO: 2178471 - RNA, 19 nt, Artificial Sequence
  Description of Artificial Sequence: Synthetic oligonucleotide
cgcgcacgaaagcaucggg

SEQ ID NO: 2178472 - RNA, 19 nt, Artificial Sequence
  Description of Artificial Sequence: Synthetic oligonucleotide
uaguugacuugggcauauu

SEQ ID NO: 2178473 - RNA, 19 nt, Artificial Sequence
  Description of Artificial Sequence: Synthetic oligonucleotide
cguccuguguggaguuggg

SEQ ID NO: 2178474 - RNA, 19 nt, Artificial Sequence
  Description of Artificial Sequence: Synthetic oligonucleotide
cucgggguuggggccuccc

SEQ ID NO: 2178475 - RNA, 19 nt, Artificial Sequence
  Description of Artificial Sequence: Synthetic oligonucleotide
ggcagccgucccucucagg

SEQ ID NO: 2178476 - RNA, 19 nt, Artificial Sequence
  Description of Artificial Sequence: Synthetic oligonucleotide
acgcgcuccuucagccauc

SEQ ID NO: 2178477 - RNA, 19 nt, Artificial Sequence
  Description of Artificial Sequence: Synthetic oligonucleotide
cggacuuuagaccauuuau

SEQ ID NO: 2178478 - RNA, 19 nt, Artificial Sequence
  Description of Artificial Sequence: Synthetic oligonucleotide
gggcccuugaugugccgga

SEQ ID NO: 2178479 - RNA, 19 nt, Artificial Sequence
  Description of Artificial Sequence: Synthetic oligonucleotide
cgugguuguugagagccug

SEQ ID NO: 2178480 - RNA, 19 nt, Artificial Sequence
  Description of Artificial Sequence: Synthetic oligonucleotide
gcggccaaggucaaacugu

SEQ ID NO: 2178481 - RNA, 19 nt, Artificial Sequence
  Description of Artificial Sequence: Synthetic oligonucleotide
cggccaaggucaaacuguc

SEQ ID NO: 2178482 - RNA, 19 nt, Artificial Sequence
  Description of Artificial Sequence: Synthetic oligonucleotide
cugacacgcagcguccugu

SEQ ID NO: 2178483 - RNA, 19 nt, Artificial Sequence
  Description of Artificial Sequence: Synthetic oligonucleotide
ccuuggggcccuugaugug

SEQ ID NO: 2178484 - RNA, 19 nt, Artificial Sequence
  Description of Artificial Sequence: Synthetic oligonucleotide
gggcagccgucccucucag

SEQ ID NO: 2178485 - RNA, 19 nt, Artificial Sequence
  Description of Artificial Sequence: Synthetic oligonucleotide
gcaaaugaaugcccuuguu

SEQ ID NO: 2178486 - RNA, 19 nt, Artificial Sequence
  Description of Artificial Sequence: Synthetic oligonucleotide
augccucaacgagcagaga

SEQ ID NO: 2178487 - RNA, 19 nt, Artificial Sequence
  Description of Artificial Sequence: Synthetic oligonucleotide
cacgcgaaccccgaggcuu

SEQ ID NO: 2178488 - RNA, 19 nt, Artificial Sequence
  Description of Artificial Sequence: Synthetic oligonucleotide
ccucuacuccaaccacaac

SEQ ID NO: 2178489 - RNA, 19 nt, Artificial Sequence
  Description of Artificial Sequence: Synthetic oligonucleotide
ccccguacagcaaaugaau

SEQ ID NO: 2178490 - RNA, 19 nt, Artificial Sequence
  Description of Artificial Sequence: Synthetic oligonucleotide
gagacgcaccaaggaccca

SEQ ID NO: 2178491 - RNA, 19 nt, Artificial Sequence
  Description of Artificial Sequence: Synthetic oligonucleotide
gaaucacguccucgugguu

SEQ ID NO: 2178492 - RNA, 19 nt, Artificial Sequence
  Description of Artificial Sequence: Synthetic oligonucleotide
cugcuucgaccaggggcug

SEQ ID NO: 2178493 - RNA, 19 nt, Artificial Sequence
  Description of Artificial Sequence: Synthetic oligonucleotide
gcugcaccuuugaguuggg

SEQ ID NO: 2178494 - RNA, 19 nt, Artificial Sequence
  Description of Artificial Sequence: Synthetic oligonucleotide
guucucgggguuggggccu

SEQ ID NO: 2178495 - RNA, 19 nt, Artificial Sequence
  Description of Artificial Sequence: Synthetic oligonucleotide
cugcucgauaaugccucaa

SEQ ID NO: 2178496 - RNA, 19 nt, Artificial Sequence
  Description of Artificial Sequence: Synthetic oligonucleotide
acgcagcguccugugugga

SEQ ID NO: 2178497 - RNA, 19 nt, Artificial Sequence
  Description of Artificial Sequence: Synthetic oligonucleotide
cgaggcuucgcgcacgaaa

SEQ ID NO: 2178498 - RNA, 19 nt, Artificial Sequence
  Description of Artificial Sequence: Synthetic oligonucleotide
gcagcguccuguguggagu

SEQ ID NO: 2178499 - RNA, 19 nt, Artificial Sequence
  Description of Artificial Sequence: Synthetic oligonucleotide
gcgcugacacgcagcgucc

SEQ ID NO: 2178500 - RNA, 19 nt, Artificial Sequence
  Description of Artificial Sequence: Synthetic oligonucleotide
gccgcuucugcgggucucc

SEQ ID NO: 2178501 - RNA, 19 nt, Artificial Sequence
  Description of Artificial Sequence: Synthetic oligonucleotide
gggaccacugcucgauaau

SEQ ID NO: 2178502 - RNA, 19 nt, Artificial Sequence
  Description of Artificial Sequence: Synthetic oligonucleotide
ccggacuuuagaccauuua

SEQ ID NO: 2178503 - RNA, 19 nt, Artificial Sequence
  Description of Artificial Sequence: Synthetic oligonucleotide
cggaacaagccggucagga

SEQ ID NO: 2178504 - RNA, 19 nt, Artificial Sequence
  Description of Artificial Sequence: Synthetic oligonucleotide
cgcagcguccuguguggag

SEQ ID NO: 2178505 - RNA, 19 nt, Artificial Sequence
  Description of Artificial Sequence: Synthetic oligonucleotide
ccggaacaagccggucagg

SEQ ID NO: 2178506 - RNA, 19 nt, Artificial Sequence
  Description of Artificial Sequence: Synthetic oligonucleotide
guugggccgcagccggggu

SEQ ID NO: 2178507 - RNA, 19 nt, Artificial Sequence
  Description of Artificial Sequence: Synthetic oligonucleotide
cuucagcuccggcuucaau

SEQ ID NO: 2178508 - RNA, 19 nt, Artificial Sequence
  Description of Artificial Sequence: Synthetic oligonucleotide
ggacccacgcgaaccccga

SEQ ID NO: 2178509 - RNA, 19 nt, Artificial Sequence
  Description of Artificial Sequence: Synthetic oligonucleotide
cgcagccgggguuuuccug

SEQ ID NO: 2178510 - RNA, 19 nt, Artificial Sequence
  Description of Artificial Sequence: Synthetic oligonucleotide
cgggguuggggccucccuc

SEQ ID NO: 2178511 - RNA, 19 nt, Artificial Sequence
  Description of Artificial Sequence: Synthetic oligonucleotide
gcuucgcgcacgaaagcau

SEQ ID NO: 2178512 - RNA, 19 nt, Artificial Sequence
  Description of Artificial Sequence: Synthetic oligonucleotide
gcccuugaugugccggacu

SEQ ID NO: 2178513 - RNA, 19 nt, Artificial Sequence
  Description of Artificial Sequence: Synthetic oligonucleotide
cuuuaaccgccaggcggau

SEQ ID NO: 2178514 - RNA, 19 nt, Artificial Sequence
  Description of Artificial Sequence: Synthetic oligonucleotide
cgccgcgcugacacgcagc

SEQ ID NO: 2178515 - RNA, 19 nt, Artificial Sequence
  Description of Artificial Sequence: Synthetic oligonucleotide
cagccgggguuuuccugcu

SEQ ID NO: 2178516 - RNA, 19 nt, Artificial Sequence
  Description of Artificial Sequence: Synthetic oligonucleotide
cuucgaccaggggcugcaa

SEQ ID NO: 2178517 - RNA, 19 nt, Artificial Sequence
  Description of Artificial Sequence: Synthetic oligonucleotide
gcgaaccccgaggcuucgc

SEQ ID NO: 2178518 - RNA, 19 nt, Artificial Sequence
  Description of Artificial Sequence: Synthetic oligonucleotide
cagggccucuaaccccgua

SEQ ID NO: 2178519 - RNA, 19 nt, Artificial Sequence
  Description of Artificial Sequence: Synthetic oligonucleotide
cagcguccuguguggaguu

SEQ ID NO: 2178520 - RNA, 19 nt, Artificial Sequence
  Description of Artificial Sequence: Synthetic oligonucleotide
ggccgcuucugcgggucuc

SEQ ID NO: 2178521 - RNA, 19 nt, Artificial Sequence
  Description of Artificial Sequence: Synthetic oligonucleotide
cgaaagcaucgggcagccg

SEQ ID NO: 2178522 - RNA, 19 nt, Artificial Sequence
  Description of Artificial Sequence: Synthetic oligonucleotide
cagccgucccucucagguu

SEQ ID NO: 2178523 - RNA, 19 nt, Artificial Sequence
  Description of Artificial Sequence: Synthetic oligonucleotide
ccgccgcgcugacacgcag

SEQ ID NO: 2178524 - RNA, 19 nt, Artificial Sequence
  Description of Artificial Sequence: Synthetic oligonucleotide
ggccaaggucaaacugucu

SEQ ID NO: 2178525 - RNA, 19 nt, Artificial Sequence
  Description of Artificial Sequence: Synthetic oligonucleotide
ccggcuucaaucgccaguu

SEQ ID NO: 2178526 - RNA, 19 nt, Artificial Sequence
  Description of Artificial Sequence: Synthetic oligonucleotide
ggacguccuggccgcuucu

SEQ ID NO: 2178527 - RNA, 19 nt, Artificial Sequence
  Description of Artificial Sequence: Synthetic oligonucleotide
gguuggggccucccucuuu

SEQ ID NO: 2178528 - RNA, 19 nt, Artificial Sequence
  Description of Artificial Sequence: Synthetic oligonucleotide
cccgaggcuucgcgcacga

SEQ ID NO: 2178529 - RNA, 19 nt, Artificial Sequence
  Description of Artificial Sequence: Synthetic oligonucleotide
gugccggacuuuagaccau

SEQ ID NO: 2178530 - RNA, 19 nt, Artificial Sequence
  Description of Artificial Sequence: Synthetic oligonucleotide
cgcgaaccccgaggcuucg

SEQ ID NO: 2178531 - RNA, 19 nt, Artificial Sequence
  Description of Artificial Sequence: Synthetic oligonucleotide
ccgucccucucagguuaac

SEQ ID NO: 2178532 - RNA, 19 nt, Artificial Sequence
  Description of Artificial Sequence: Synthetic oligonucleotide
gguggccgccgcgcugaca

SEQ ID NO: 2178533 - RNA, 19 nt, Artificial Sequence
  Description of Artificial Sequence: Synthetic oligonucleotide
cggcuucaaucgccaguuc

SEQ ID NO: 2178534 - RNA, 19 nt, Artificial Sequence
  Description of Artificial Sequence: Synthetic oligonucleotide
gccgucccucucagguuaa

SEQ ID NO: 2178535 - RNA, 19 nt, Artificial Sequence
  Description of Artificial Sequence: Synthetic oligonucleotide
ccuuugaguuggggaugaa

SEQ ID NO: 2178536 - RNA, 19 nt, Artificial Sequence
  Description of Artificial Sequence: Synthetic oligonucleotide
cgcgcuccuucagccauca

SEQ ID NO: 2178537 - RNA, 19 nt, Artificial Sequence
  Description of Artificial Sequence: Synthetic oligonucleotide
gccgccgcgcugacacgca

SEQ ID NO: 2178538 - RNA, 19 nt, Artificial Sequence
  Description of Artificial Sequence: Synthetic oligonucleotide
ggguuggggccucccucuu

SEQ ID NO: 2178539 - RNA, 19 nt, Artificial Sequence
  Description of Artificial Sequence: Synthetic oligonucleotide
gccggacuuuagaccauuu

SEQ ID NO: 2178540 - RNA, 19 nt, Artificial Sequence
  Description of Artificial Sequence: Synthetic oligonucleotide
ccacgcgaaccccgaggcu

SEQ ID NO: 2178541 - RNA, 19 nt, Artificial Sequence
  Description of Artificial Sequence: Synthetic oligonucleotide
ccagggcacgcuccagguu

SEQ ID NO: 2178542 - RNA, 19 nt, Artificial Sequence
  Description of Artificial Sequence: Synthetic oligonucleotide
ccgcagccgggguuuuccu

SEQ ID NO: 2178543 - RNA, 19 nt, Artificial Sequence
  Description of Artificial Sequence: Synthetic oligonucleotide
ccgaggcuucgcgcacgaa

SEQ ID NO: 2178544 - RNA, 19 nt, Artificial Sequence
  Description of Artificial Sequence: Synthetic oligonucleotide
cgguggccgccgcgcugac

SEQ ID NO: 2178545 - RNA, 19 nt, Artificial Sequence
  Description of Artificial Sequence: Synthetic oligonucleotide
gcgcuccuucagccaucau

SEQ ID NO: 2178546 - RNA, 19 nt, Artificial Sequence
  Description of Artificial Sequence: Synthetic oligonucleotide
ccgcgcugacacgcagcgu

SEQ ID NO: 2178547 - RNA, 19 nt, Artificial Sequence
  Description of Artificial Sequence: Synthetic oligonucleotide
uuuggguuaauuaagagca

SEQ ID NO: 2178548 - RNA, 19 nt, Artificial Sequence
  Description of Artificial Sequence: Synthetic oligonucleotide
uuaagcaucaggaugagcu

SEQ ID NO: 2178549 - RNA, 19 nt, Artificial Sequence
  Description of Artificial Sequence: Synthetic oligonucleotide
ugaguuucagaaaagagca

SEQ ID NO: 2178550 - RNA, 19 nt, Artificial Sequence
  Description of Artificial Sequence: Synthetic oligonucleotide
aacgugugcaguuggaagc

SEQ ID NO: 2178551 - RNA, 19 nt, Artificial Sequence
  Description of Artificial Sequence: Synthetic oligonucleotide
uuuguacugugucacaucg

SEQ ID NO: 2178552 - RNA, 19 nt, Artificial Sequence
  Description of Artificial Sequence: Synthetic oligonucleotide
uagaaauccauauauauau

SEQ ID NO: 2178553 - RNA, 19 nt, Artificial Sequence
  Description of Artificial Sequence: Synthetic oligonucleotide
uaaacauucaucgauugag

SEQ ID NO: 2178554 - RNA, 19 nt, Artificial Sequence
  Description of Artificial Sequence: Synthetic oligonucleotide
aauguuuacugagcgauac

SEQ ID NO: 2178555 - RNA, 19 nt, Artificial Sequence
  Description of Artificial Sequence: Synthetic oligonucleotide
uuaagagcaauguuuacug

SEQ ID NO: 2178556 - RNA, 19 nt, Artificial Sequence
  Description of Artificial Sequence: Synthetic oligonucleotide
uacuuaggaauuacaaugg

SEQ ID NO: 2178557 - RNA, 19 nt, Artificial Sequence
  Description of Artificial Sequence: Synthetic oligonucleotide
uauagaaauccauauauau

SEQ ID NO: 2178558 - RNA, 19 nt, Artificial Sequence
  Description of Artificial Sequence: Synthetic oligonucleotide
uuuuggguuaauuaagagc

SEQ ID NO: 2178559 - RNA, 19 nt, Artificial Sequence
  Description of Artificial Sequence: Synthetic oligonucleotide
ucagaaaagagcagacugg

SEQ ID NO: 2178560 - RNA, 19 nt, Artificial Sequence
  Description of Artificial Sequence: Synthetic oligonucleotide
uuuacugagcgauacagga

SEQ ID NO: 2178561 - RNA, 19 nt, Artificial Sequence
  Description of Artificial Sequence: Synthetic oligonucleotide
uguacugugucacaucgag

SEQ ID NO: 2178562 - RNA, 19 nt, Artificial Sequence
  Description of Artificial Sequence: Synthetic oligonucleotide
gucaacuuuggucucaucg

SEQ ID NO: 2178563 - RNA, 19 nt, Artificial Sequence
  Description of Artificial Sequence: Synthetic oligonucleotide
aauuacaauggcuguaacu

SEQ ID NO: 2178564 - RNA, 19 nt, Artificial Sequence
  Description of Artificial Sequence: Synthetic oligonucleotide
uacugugucacaucgagug

SEQ ID NO: 2178565 - RNA, 19 nt, Artificial Sequence
  Description of Artificial Sequence: Synthetic oligonucleotide
gaaggguuuacaaggaugg

SEQ ID NO: 2178566 - RNA, 19 nt, Artificial Sequence
  Description of Artificial Sequence: Synthetic oligonucleotide
auggaaaugcaccccaccc

SEQ ID NO: 2178567 - RNA, 19 nt, Artificial Sequence
  Description of Artificial Sequence: Synthetic oligonucleotide
cuaaguuccauccucggcc

SEQ ID NO: 2178568 - RNA, 19 nt, Artificial Sequence
  Description of Artificial Sequence: Synthetic oligonucleotide
aacauucaucgauugagug

SEQ ID NO: 2178569 - RNA, 19 nt, Artificial Sequence
  Description of Artificial Sequence: Synthetic oligonucleotide
uugucaugcucccaggagg

SEQ ID NO: 2178570 - RNA, 19 nt, Artificial Sequence
  Description of Artificial Sequence: Synthetic oligonucleotide
agcauauuuguacuguguc

SEQ ID NO: 2178571 - RNA, 19 nt, Artificial Sequence
  Description of Artificial Sequence: Synthetic oligonucleotide
aucauagaguuugucaugc

SEQ ID NO: 2178572 - RNA, 19 nt, Artificial Sequence
  Description of Artificial Sequence: Synthetic oligonucleotide
cuaacaacagaccauagca

SEQ ID NO: 2178573 - RNA, 19 nt, Artificial Sequence
  Description of Artificial Sequence: Synthetic oligonucleotide
aaacgugugcaguuggaag

SEQ ID NO: 2178574 - RNA, 19 nt, Artificial Sequence
  Description of Artificial Sequence: Synthetic oligonucleotide
ugauuauagaaauccauau

SEQ ID NO: 2178575 - RNA, 19 nt, Artificial Sequence
  Description of Artificial Sequence: Synthetic oligonucleotide
uguuuacugagcgauacag

SEQ ID NO: 2178576 - RNA, 19 nt, Artificial Sequence
  Description of Artificial Sequence: Synthetic oligonucleotide
gaccauagcauauuuguac

SEQ ID NO: 2178577 - RNA, 19 nt, Artificial Sequence
  Description of Artificial Sequence: Synthetic oligonucleotide
ucaucauagaguuugucau

SEQ ID NO: 2178578 - RNA, 19 nt, Artificial Sequence
  Description of Artificial Sequence: Synthetic oligonucleotide
ucaacuuuggucucaucgc

SEQ ID NO: 2178579 - RNA, 19 nt, Artificial Sequence
  Description of Artificial Sequence: Synthetic oligonucleotide
ugucccuaacaacagacca

SEQ ID NO: 2178580 - RNA, 19 nt, Artificial Sequence
  Description of Artificial Sequence: Synthetic oligonucleotide
uuacaauggcuguaacugg

SEQ ID NO: 2178581 - RNA, 19 nt, Artificial Sequence
  Description of Artificial Sequence: Synthetic oligonucleotide
gaaccuacaguacuuagga

SEQ ID NO: 2178582 - RNA, 19 nt, Artificial Sequence
  Description of Artificial Sequence: Synthetic oligonucleotide
guuaugcuaagucucauca

SEQ ID NO: 2178583 - RNA, 19 nt, Artificial Sequence
  Description of Artificial Sequence: Synthetic oligonucleotide
agucucaucauagaguuug

SEQ ID NO: 2178584 - RNA, 19 nt, Artificial Sequence
  Description of Artificial Sequence: Synthetic oligonucleotide
ugucaugcucccaggaggg

SEQ ID NO: 2178585 - RNA, 19 nt, Artificial Sequence
  Description of Artificial Sequence: Synthetic oligonucleotide
uacaggacugaguacuagg

SEQ ID NO: 2178586 - RNA, 19 nt, Artificial Sequence
  Description of Artificial Sequence: Synthetic oligonucleotide
aguggauugcgguccacgc

SEQ ID NO: 2178587 - RNA, 19 nt, Artificial Sequence
  Description of Artificial Sequence: Synthetic oligonucleotide
aguacuuaggaauuacaau

SEQ ID NO: 2178588 - RNA, 19 nt, Artificial Sequence
  Description of Artificial Sequence: Synthetic oligonucleotide
guugccuucggacucaggc

SEQ ID NO: 2178589 - RNA, 19 nt, Artificial Sequence
  Description of Artificial Sequence: Synthetic oligonucleotide
auuaagagcaauguuuacu

SEQ ID NO: 2178590 - RNA, 19 nt, Artificial Sequence
  Description of Artificial Sequence: Synthetic oligonucleotide
cauauuuguacugugucac

SEQ ID NO: 2178591 - RNA, 19 nt, Artificial Sequence
  Description of Artificial Sequence: Synthetic oligonucleotide
cauucaucgauugagugug

SEQ ID NO: 2178592 - RNA, 19 nt, Artificial Sequence
  Description of Artificial Sequence: Synthetic oligonucleotide
acaucgagugauuauagaa

SEQ ID NO: 2178593 - RNA, 19 nt, Artificial Sequence
  Description of Artificial Sequence: Synthetic oligonucleotide
ucacaucgagugauuauag

SEQ ID NO: 2178594 - RNA, 19 nt, Artificial Sequence
  Description of Artificial Sequence: Synthetic oligonucleotide
cuuggagugggacagcccc

SEQ ID NO: 2178595 - RNA, 19 nt, Artificial Sequence
  Description of Artificial Sequence: Synthetic oligonucleotide
accuacaguacuuaggaau

SEQ ID NO: 2178596 - RNA, 19 nt, Artificial Sequence
  Description of Artificial Sequence: Synthetic oligonucleotide
aguuaugcuaagucucauc

SEQ ID NO: 2178597 - RNA, 19 nt, Artificial Sequence
  Description of Artificial Sequence: Synthetic oligonucleotide
uccacgcuaaguuccaucc

SEQ ID NO: 2178598 - RNA, 19 nt, Artificial Sequence
  Description of Artificial Sequence: Synthetic oligonucleotide
ugugugcuuuggaagggcg

SEQ ID NO: 2178599 - RNA, 19 nt, Artificial Sequence
  Description of Artificial Sequence: Synthetic oligonucleotide
gacgcauggcuuuucuugg

SEQ ID NO: 2178600 - RNA, 19 nt, Artificial Sequence
  Description of Artificial Sequence: Synthetic oligonucleotide
ugcucgguaguccuuuggg

SEQ ID NO: 2178601 - RNA, 19 nt, Artificial Sequence
  Description of Artificial Sequence: Synthetic oligonucleotide
uggcgguuaagcaucagga

SEQ ID NO: 2178602 - RNA, 19 nt, Artificial Sequence
  Description of Artificial Sequence: Synthetic oligonucleotide
ucugugcgcacgaugcagg

SEQ ID NO: 2178603 - RNA, 19 nt, Artificial Sequence
  Description of Artificial Sequence: Synthetic oligonucleotide
ugaggugcccuucaagcug

SEQ ID NO: 2178604 - RNA, 19 nt, Artificial Sequence
  Description of Artificial Sequence: Synthetic oligonucleotide
aucgagugauuauagaaau

SEQ ID NO: 2178605 - RNA, 19 nt, Artificial Sequence
  Description of Artificial Sequence: Synthetic oligonucleotide
cuugcuuuuguguggccgg

SEQ ID NO: 2178606 - RNA, 19 nt, Artificial Sequence
  Description of Artificial Sequence: Synthetic oligonucleotide
aaauccauauauauauaaa

SEQ ID NO: 2178607 - RNA, 19 nt, Artificial Sequence
  Description of Artificial Sequence: Synthetic oligonucleotide
gaggcuaccuguuuggaca

SEQ ID NO: 2178608 - RNA, 19 nt, Artificial Sequence
  Description of Artificial Sequence: Synthetic oligonucleotide
aggccaguuaugcuaaguc

SEQ ID NO: 2178609 - RNA, 19 nt, Artificial Sequence
  Description of Artificial Sequence: Synthetic oligonucleotide
aguacuaggaaggguuuac

SEQ ID NO: 2178610 - RNA, 19 nt, Artificial Sequence
  Description of Artificial Sequence: Synthetic oligonucleotide
aguuucagaaaagagcaga

SEQ ID NO: 2178611 - RNA, 19 nt, Artificial Sequence
  Description of Artificial Sequence: Synthetic oligonucleotide
uucaagcugggccuuggag

SEQ ID NO: 2178612 - RNA, 19 nt, Artificial Sequence
  Description of Artificial Sequence: Synthetic oligonucleotide
auagcauauuuguacugug

SEQ ID NO: 2178613 - RNA, 19 nt, Artificial Sequence
  Description of Artificial Sequence: Synthetic oligonucleotide
gauggaaaugcaccccacc

SEQ ID NO: 2178614 - RNA, 19 nt, Artificial Sequence
  Description of Artificial Sequence: Synthetic oligonucleotide
ugugcaguuggaagccccg

SEQ ID NO: 2178615 - RNA, 19 nt, Artificial Sequence
  Description of Artificial Sequence: Synthetic oligonucleotide
ugcucuugcuuuugugugg

SEQ ID NO: 2178616 - RNA, 19 nt, Artificial Sequence
  Description of Artificial Sequence: Synthetic oligonucleotide
gaugucccuaacaacagac

SEQ ID NO: 2178617 - RNA, 19 nt, Artificial Sequence
  Description of Artificial Sequence: Synthetic oligonucleotide
gugcgcacgaugcaggugg

SEQ ID NO: 2178618 - RNA, 19 nt, Artificial Sequence
  Description of Artificial Sequence: Synthetic oligonucleotide
agaaccuacaguacuuagg

SEQ ID NO: 2178619 - RNA, 19 nt, Artificial Sequence
  Description of Artificial Sequence: Synthetic oligonucleotide
gcuaagucucaucauagag

SEQ ID NO: 2178620 - RNA, 19 nt, Artificial Sequence
  Description of Artificial Sequence: Synthetic oligonucleotide
uugccuucggacucaggcg

SEQ ID NO: 2178621 - RNA, 19 nt, Artificial Sequence
  Description of Artificial Sequence: Synthetic oligonucleotide
uugagugugugcuuuggaa

SEQ ID NO: 2178622 - RNA, 19 nt, Artificial Sequence
  Description of Artificial Sequence: Synthetic oligonucleotide
uuggcagagaggccagagg

SEQ ID NO: 2178623 - RNA, 19 nt, Artificial Sequence
  Description of Artificial Sequence: Synthetic oligonucleotide
uagcauauuuguacugugu

SEQ ID NO: 2178624 - RNA, 19 nt, Artificial Sequence
  Description of Artificial Sequence: Synthetic oligonucleotide
aaguggauugcgguccacg

SEQ ID NO: 2178625 - RNA, 19 nt, Artificial Sequence
  Description of Artificial Sequence: Synthetic oligonucleotide
cuuuccauccggcuugggc

SEQ ID NO: 2178626 - RNA, 19 nt, Artificial Sequence
  Description of Artificial Sequence: Synthetic oligonucleotide
uccugacacugucugugcg

SEQ ID NO: 2178627 - RNA, 19 nt, Artificial Sequence
  Description of Artificial Sequence: Synthetic oligonucleotide
aaacauucaucgauugagu

SEQ ID NO: 2178628 - RNA, 19 nt, Artificial Sequence
  Description of Artificial Sequence: Synthetic oligonucleotide
aaaugcaccccacccgccu

SEQ ID NO: 2178629 - RNA, 19 nt, Artificial Sequence
  Description of Artificial Sequence: Synthetic oligonucleotide
aacagaccauagcauauuu

SEQ ID NO: 2178630 - RNA, 19 nt, Artificial Sequence
  Description of Artificial Sequence: Synthetic oligonucleotide
guuuacaaggauggaaaug

SEQ ID NO: 2178631 - RNA, 19 nt, Artificial Sequence
  Description of Artificial Sequence: Synthetic oligonucleotide
aggacagccagucuguaaa

SEQ ID NO: 2178632 - RNA, 19 nt, Artificial Sequence
  Description of Artificial Sequence: Synthetic oligonucleotide
ugugcuuuggaagggcgcc

SEQ ID NO: 2178633 - RNA, 19 nt, Artificial Sequence
  Description of Artificial Sequence: Synthetic oligonucleotide
agugauuauagaaauccau

SEQ ID NO: 2178634 - RNA, 19 nt, Artificial Sequence
  Description of Artificial Sequence: Synthetic oligonucleotide
uacuaggaaggguuuacaa

SEQ ID NO: 2178635 - RNA, 19 nt, Artificial Sequence
  Description of Artificial Sequence: Synthetic oligonucleotide
uuuggaagggcgcccgcgc

SEQ ID NO: 2178636 - RNA, 19 nt, Artificial Sequence
  Description of Artificial Sequence: Synthetic oligonucleotide
ugagcgauacaggacugag

SEQ ID NO: 2178637 - RNA, 19 nt, Artificial Sequence
  Description of Artificial Sequence: Synthetic oligonucleotide
acaucucucuggcugaggu

SEQ ID NO: 2178638 - RNA, 19 nt, Artificial Sequence
  Description of Artificial Sequence: Synthetic oligonucleotide
caucauagaguuugucaug

SEQ ID NO: 2178639 - RNA, 19 nt, Artificial Sequence
  Description of Artificial Sequence: Synthetic oligonucleotide
uaaguuccauccucggcca

SEQ ID NO: 2178640 - RNA, 19 nt, Artificial Sequence
  Description of Artificial Sequence: Synthetic oligonucleotide
caucaggaugagcuguugg

SEQ ID NO: 2178641 - RNA, 19 nt, Artificial Sequence
  Description of Artificial Sequence: Synthetic oligonucleotide
guggcgguuaagcaucagg

SEQ ID NO: 2178642 - RNA, 19 nt, Artificial Sequence
  Description of Artificial Sequence: Synthetic oligonucleotide
uggauugcgguccacgcua

SEQ ID NO: 2178643 - RNA, 19 nt, Artificial Sequence
  Description of Artificial Sequence: Synthetic oligonucleotide
uuuuguguggccgggcuga

SEQ ID NO: 2178644 - RNA, 19 nt, Artificial Sequence
  Description of Artificial Sequence: Synthetic oligonucleotide
caggaugagcuguuggcgc

SEQ ID NO: 2178645 - RNA, 19 nt, Artificial Sequence
  Description of Artificial Sequence: Synthetic oligonucleotide
ugccuucggacucaggcgu

SEQ ID NO: 2178646 - RNA, 19 nt, Artificial Sequence
  Description of Artificial Sequence: Synthetic oligonucleotide
aaaacgugugcaguuggaa

SEQ ID NO: 2178647 - RNA, 19 nt, Artificial Sequence
  Description of Artificial Sequence: Synthetic oligonucleotide
agucacuucuuguccagcu

SEQ ID NO: 2178648 - RNA, 19 nt, Artificial Sequence
  Description of Artificial Sequence: Synthetic oligonucleotide
ugcuaagucucaucauaga

SEQ ID NO: 2178649 - RNA, 19 nt, Artificial Sequence
  Description of Artificial Sequence: Synthetic oligonucleotide
uggucucaucgcuuggucc

SEQ ID NO: 2178650 - RNA, 19 nt, Artificial Sequence
  Description of Artificial Sequence: Synthetic oligonucleotide
guaaacauucaucgauuga

SEQ ID NO: 2178651 - RNA, 19 nt, Artificial Sequence
  Description of Artificial Sequence: Synthetic oligonucleotide
acgugugcaguuggaagcc

SEQ ID NO: 2178652 - RNA, 19 nt, Artificial Sequence
  Description of Artificial Sequence: Synthetic oligonucleotide
caucgagugauuauagaaa

SEQ ID NO: 2178653 - RNA, 19 nt, Artificial Sequence
  Description of Artificial Sequence: Synthetic oligonucleotide
cacacuguguucgcgacgc

SEQ ID NO: 2178654 - RNA, 19 nt, Artificial Sequence
  Description of Artificial Sequence: Synthetic oligonucleotide
ggacugaguacuaggaagg

SEQ ID NO: 2178655 - RNA, 19 nt, Artificial Sequence
  Description of Artificial Sequence: Synthetic oligonucleotide
auauuuguacugugucaca

SEQ ID NO: 2178656 - RNA, 19 nt, Artificial Sequence
  Description of Artificial Sequence: Synthetic oligonucleotide
ucgagugauuauagaaauc

SEQ ID NO: 2178657 - RNA, 19 nt, Artificial Sequence
  Description of Artificial Sequence: Synthetic oligonucleotide
gacugaguacuaggaaggg

SEQ ID NO: 2178658 - RNA, 19 nt, Artificial Sequence
  Description of Artificial Sequence: Synthetic oligonucleotide
augcuaagucucaucauag

SEQ ID NO: 2178659 - RNA, 19 nt, Artificial Sequence
  Description of Artificial Sequence: Synthetic oligonucleotide
uggggaaguggauugcggu

SEQ ID NO: 2178660 - RNA, 19 nt, Artificial Sequence
  Description of Artificial Sequence: Synthetic oligonucleotide
agcaauguuuacugagcga

SEQ ID NO: 2178661 - RNA, 19 nt, Artificial Sequence
  Description of Artificial Sequence: Synthetic oligonucleotide
acgcauggcuuuucuuggc

SEQ ID NO: 2178662 - RNA, 19 nt, Artificial Sequence
  Description of Artificial Sequence: Synthetic oligonucleotide
caguacuuaggaauuacaa

SEQ ID NO: 2178663 - RNA, 19 nt, Artificial Sequence
  Description of Artificial Sequence: Synthetic oligonucleotide
acugucugugcgcacgaug

SEQ ID NO: 2178664 - RNA, 19 nt, Artificial Sequence
  Description of Artificial Sequence: Synthetic oligonucleotide
acccagaaccuacaguacu

SEQ ID NO: 2178665 - RNA, 19 nt, Artificial Sequence
  Description of Artificial Sequence: Synthetic oligonucleotide
aguuggaagccccgccagg

SEQ ID NO: 2178666 - RNA, 19 nt, Artificial Sequence
  Description of Artificial Sequence: Synthetic oligonucleotide
cagaaccuacaguacuuag

SEQ ID NO: 2178667 - RNA, 19 nt, Artificial Sequence
  Description of Artificial Sequence: Synthetic oligonucleotide
acagccagucuguaaacau

SEQ ID NO: 2178668 - RNA, 19 nt, Artificial Sequence
  Description of Artificial Sequence: Synthetic oligonucleotide
cagaccauagcauauuugu

SEQ ID NO: 2178669 - RNA, 19 nt, Artificial Sequence
  Description of Artificial Sequence: Synthetic oligonucleotide
ugcaccccuuuccauccgg

SEQ ID NO: 2178670 - RNA, 19 nt, Artificial Sequence
  Description of Artificial Sequence: Synthetic oligonucleotide
cuguguucgcgacgcaugg

SEQ ID NO: 2178671 - RNA, 19 nt, Artificial Sequence
  Description of Artificial Sequence: Synthetic oligonucleotide
aaguuccauccucggccac

SEQ ID NO: 2178672 - RNA, 19 nt, Artificial Sequence
  Description of Artificial Sequence: Synthetic oligonucleotide
cacgcuaaguuccauccuc

SEQ ID NO: 2178673 - RNA, 19 nt, Artificial Sequence
  Description of Artificial Sequence: Synthetic oligonucleotide
ggucucaucgcuugguccc

SEQ ID NO: 2178674 - RNA, 19 nt, Artificial Sequence
  Description of Artificial Sequence: Synthetic oligonucleotide
uggguuaauuaagagcaau

SEQ ID NO: 2178675 - RNA, 19 nt, Artificial Sequence
  Description of Artificial Sequence: Synthetic oligonucleotide
gaggugcccuucaagcugg

SEQ ID NO: 2178676 - RNA, 19 nt, Artificial Sequence
  Description of Artificial Sequence: Synthetic oligonucleotide
caucgcuuggucccucugg

SEQ ID NO: 2178677 - RNA, 19 nt, Artificial Sequence
  Description of Artificial Sequence: Synthetic oligonucleotide
gugauuauagaaauccaua

SEQ ID NO: 2178678 - RNA, 19 nt, Artificial Sequence
  Description of Artificial Sequence: Synthetic oligonucleotide
ugaguacuaggaaggguuu

SEQ ID NO: 2178679 - RNA, 19 nt, Artificial Sequence
  Description of Artificial Sequence: Synthetic oligonucleotide
ccuaacaacagaccauagc

SEQ ID NO: 2178680 - RNA, 19 nt, Artificial Sequence
  Description of Artificial Sequence: Synthetic oligonucleotide
aaccuacaguacuuaggaa

SEQ ID NO: 2178681 - RNA, 19 nt, Artificial Sequence
  Description of Artificial Sequence: Synthetic oligonucleotide
uggaggccaguuaugcuaa

SEQ ID NO: 2178682 - RNA, 19 nt, Artificial Sequence
  Description of Artificial Sequence: Synthetic oligonucleotide
cucggccacacuguguucg

SEQ ID NO: 2178683 - RNA, 19 nt, Artificial Sequence
  Description of Artificial Sequence: Synthetic oligonucleotide
gaguuucagaaaagagcag

SEQ ID NO: 2178684 - RNA, 19 nt, Artificial Sequence
  Description of Artificial Sequence: Synthetic oligonucleotide
uugcgguccacgcuaaguu

SEQ ID NO: 2178685 - RNA, 19 nt, Artificial Sequence
  Description of Artificial Sequence: Synthetic oligonucleotide
ugcuuuggaagggcgcccg

SEQ ID NO: 2178686 - RNA, 19 nt, Artificial Sequence
  Description of Artificial Sequence: Synthetic oligonucleotide
cucugaugccuccuccagg

SEQ ID NO: 2178687 - RNA, 19 nt, Artificial Sequence
  Description of Artificial Sequence: Synthetic oligonucleotide
uuguacugugucacaucga

SEQ ID NO: 2178688 - RNA, 19 nt, Artificial Sequence
  Description of Artificial Sequence: Synthetic oligonucleotide
gagugauuauagaaaucca

SEQ ID NO: 2178689 - RNA, 19 nt, Artificial Sequence
  Description of Artificial Sequence: Synthetic oligonucleotide
ucccuaacaacagaccaua

SEQ ID NO: 2178690 - RNA, 19 nt, Artificial Sequence
  Description of Artificial Sequence: Synthetic oligonucleotide
ugggcggaugucccuaaca

SEQ ID NO: 2178691 - RNA, 19 nt, Artificial Sequence
  Description of Artificial Sequence: Synthetic oligonucleotide
ggaaggguuuacaaggaug

SEQ ID NO: 2178692 - RNA, 19 nt, Artificial Sequence
  Description of Artificial Sequence: Synthetic oligonucleotide
uccggcuugggcagggcug

SEQ ID NO: 2178693 - RNA, 19 nt, Artificial Sequence
  Description of Artificial Sequence: Synthetic oligonucleotide
aggguuuacaaggauggaa

SEQ ID NO: 2178694 - RNA, 19 nt, Artificial Sequence
  Description of Artificial Sequence: Synthetic oligonucleotide
ucauagaguuugucaugcu

SEQ ID NO: 2178695 - RNA, 19 nt, Artificial Sequence
  Description of Artificial Sequence: Synthetic oligonucleotide
agaaaagagcagacuggag

SEQ ID NO: 2178696 - RNA, 19 nt, Artificial Sequence
  Description of Artificial Sequence: Synthetic oligonucleotide
uuggucucaucgcuugguc

SEQ ID NO: 2178697 - RNA, 19 nt, Artificial Sequence
  Description of Artificial Sequence: Synthetic oligonucleotide
agcggguugccuucggacu

SEQ ID NO: 2178698 - RNA, 19 nt, Artificial Sequence
  Description of Artificial Sequence: Synthetic oligonucleotide
auguuuacugagcgauaca

SEQ ID NO: 2178699 - RNA, 19 nt, Artificial Sequence
  Description of Artificial Sequence: Synthetic oligonucleotide
gucuguaaacauucaucga

SEQ ID NO: 2178700 - RNA, 19 nt, Artificial Sequence
  Description of Artificial Sequence: Synthetic oligonucleotide
acaggacugaguacuagga

SEQ ID NO: 2178701 - RNA, 19 nt, Artificial Sequence
  Description of Artificial Sequence: Synthetic oligonucleotide
uuggaagggcgcccgcgcc

SEQ ID NO: 2178702 - RNA, 19 nt, Artificial Sequence
  Description of Artificial Sequence: Synthetic oligonucleotide
ggguuaauuaagagcaaug

SEQ ID NO: 2178703 - RNA, 19 nt, Artificial Sequence
  Description of Artificial Sequence: Synthetic oligonucleotide
uggcuguaacuggugggcg

SEQ ID NO: 2178704 - RNA, 19 nt, Artificial Sequence
  Description of Artificial Sequence: Synthetic oligonucleotide
gcauauuuguacuguguca

SEQ ID NO: 2178705 - RNA, 19 nt, Artificial Sequence
  Description of Artificial Sequence: Synthetic oligonucleotide
cuuuggaagggcgcccgcg

SEQ ID NO: 2178706 - RNA, 19 nt, Artificial Sequence
  Description of Artificial Sequence: Synthetic oligonucleotide
auacaggacugaguacuag

SEQ ID NO: 2178707 - RNA, 19 nt, Artificial Sequence
  Description of Artificial Sequence: Synthetic oligonucleotide
uaccugcgggucaacuuug

SEQ ID NO: 2178708 - RNA, 19 nt, Artificial Sequence
  Description of Artificial Sequence: Synthetic oligonucleotide
aagccccgccaggacagcc

SEQ ID NO: 2178709 - RNA, 19 nt, Artificial Sequence
  Description of Artificial Sequence: Synthetic oligonucleotide
acaguacuuaggaauuaca

SEQ ID NO: 2178710 - RNA, 19 nt, Artificial Sequence
  Description of Artificial Sequence: Synthetic oligonucleotide
acaacagaccauagcauau

SEQ ID NO: 2178711 - RNA, 19 nt, Artificial Sequence
  Description of Artificial Sequence: Synthetic oligonucleotide
acgcuaaguuccauccucg

SEQ ID NO: 2178712 - RNA, 19 nt, Artificial Sequence
  Description of Artificial Sequence: Synthetic oligonucleotide
acagaccauagcauauuug

SEQ ID NO: 2178713 - RNA, 19 nt, Artificial Sequence
  Description of Artificial Sequence: Synthetic oligonucleotide
uguaacuggugggcggaug

SEQ ID NO: 2178714 - RNA, 19 nt, Artificial Sequence
  Description of Artificial Sequence: Synthetic oligonucleotide
cuuggcagagaggccagag

SEQ ID NO: 2178715 - RNA, 19 nt, Artificial Sequence
  Description of Artificial Sequence: Synthetic oligonucleotide
ucgauugagugugugcuuu

SEQ ID NO: 2178716 - RNA, 19 nt, Artificial Sequence
  Description of Artificial Sequence: Synthetic oligonucleotide
cuuuuguguggccgggcug

SEQ ID NO: 2178717 - RNA, 19 nt, Artificial Sequence
  Description of Artificial Sequence: Synthetic oligonucleotide
gcuaaguuccauccucggc

SEQ ID NO: 2178718 - RNA, 19 nt, Artificial Sequence
  Description of Artificial Sequence: Synthetic oligonucleotide
aaggguuuacaaggaugga

SEQ ID NO: 2178719 - RNA, 19 nt, Artificial Sequence
  Description of Artificial Sequence: Synthetic oligonucleotide
auugcgguccacgcuaagu

SEQ ID NO: 2178720 - RNA, 19 nt, Artificial Sequence
  Description of Artificial Sequence: Synthetic oligonucleotide
cagugcaccccuuuccauc

SEQ ID NO: 2178721 - RNA, 19 nt, Artificial Sequence
  Description of Artificial Sequence: Synthetic oligonucleotide
ugugucacaucgagugauu

SEQ ID NO: 2178722 - RNA, 19 nt, Artificial Sequence
  Description of Artificial Sequence: Synthetic oligonucleotide
acuguguucgcgacgcaug

SEQ ID NO: 2178723 - RNA, 19 nt, Artificial Sequence
  Description of Artificial Sequence: Synthetic oligonucleotide
cuguuggcgcuccagcuuc

SEQ ID NO: 2178724 - RNA, 19 nt, Artificial Sequence
  Description of Artificial Sequence: Synthetic oligonucleotide
agagccugaggaggcuacc

SEQ ID NO: 2178725 - RNA, 19 nt, Artificial Sequence
  Description of Artificial Sequence: Synthetic oligonucleotide
ugcgguccacgcuaaguuc

SEQ ID NO: 2178726 - RNA, 19 nt, Artificial Sequence
  Description of Artificial Sequence: Synthetic oligonucleotide
cuuggcugcucgguagucc

SEQ ID NO: 2178727 - RNA, 19 nt, Artificial Sequence
  Description of Artificial Sequence: Synthetic oligonucleotide
ggcuguaacuggugggcgg

SEQ ID NO: 2178728 - RNA, 19 nt, Artificial Sequence
  Description of Artificial Sequence: Synthetic oligonucleotide
gucacaucgagugauuaua

SEQ ID NO: 2178729 - RNA, 19 nt, Artificial Sequence
  Description of Artificial Sequence: Synthetic oligonucleotide
cacgaugcagguggggcgg

SEQ ID NO: 2178730 - RNA, 19 nt, Artificial Sequence
  Description of Artificial Sequence: Synthetic oligonucleotide
agccugaggaggcuaccug

SEQ ID NO: 2178731 - RNA, 19 nt, Artificial Sequence
  Description of Artificial Sequence: Synthetic oligonucleotide
gucugugcgcacgaugcag

SEQ ID NO: 2178732 - RNA, 19 nt, Artificial Sequence
  Description of Artificial Sequence: Synthetic oligonucleotide
ucaggcguccugacacugu

SEQ ID NO: 2178733 - RNA, 19 nt, Artificial Sequence
  Description of Artificial Sequence: Synthetic oligonucleotide
aggaauuacaauggcugua

SEQ ID NO: 2178734 - RNA, 19 nt, Artificial Sequence
  Description of Artificial Sequence: Synthetic oligonucleotide
caguuggaagccccgccag

SEQ ID NO: 2178735 - RNA, 19 nt, Artificial Sequence
  Description of Artificial Sequence: Synthetic oligonucleotide
ucggacucaggcguccuga

SEQ ID NO: 2178736 - RNA, 19 nt, Artificial Sequence
  Description of Artificial Sequence: Synthetic oligonucleotide
cacccagaaccuacaguac

SEQ ID NO: 2178737 - RNA, 19 nt, Artificial Sequence
  Description of Artificial Sequence: Synthetic oligonucleotide
uucggacucaggcguccug

SEQ ID NO: 2178738 - RNA, 19 nt, Artificial Sequence
  Description of Artificial Sequence: Synthetic oligonucleotide
caucucucuggcugaggug

SEQ ID NO: 2178739 - RNA, 19 nt, Artificial Sequence
  Description of Artificial Sequence: Synthetic oligonucleotide
ggaauuacaauggcuguaa

SEQ ID NO: 2178740 - RNA, 19 nt, Artificial Sequence
  Description of Artificial Sequence: Synthetic oligonucleotide
gacaucucucuggcugagg

SEQ ID NO: 2178741 - RNA, 19 nt, Artificial Sequence
  Description of Artificial Sequence: Synthetic oligonucleotide
gcggaugucccuaacaaca

SEQ ID NO: 2178742 - RNA, 19 nt, Artificial Sequence
  Description of Artificial Sequence: Synthetic oligonucleotide
cugcucgguaguccuuugg

SEQ ID NO: 2178743 - RNA, 19 nt, Artificial Sequence
  Description of Artificial Sequence: Synthetic oligonucleotide
gauugcgguccacgcuaag

SEQ ID NO: 2178744 - RNA, 19 nt, Artificial Sequence
  Description of Artificial Sequence: Synthetic oligonucleotide
ggguuuacaaggauggaaa

SEQ ID NO: 2178745 - RNA, 19 nt, Artificial Sequence
  Description of Artificial Sequence: Synthetic oligonucleotide
cauagcauauuuguacugu

SEQ ID NO: 2178746 - RNA, 19 nt, Artificial Sequence
  Description of Artificial Sequence: Synthetic oligonucleotide
guccugacacugucugugc

SEQ ID NO: 2178747 - RNA, 19 nt, Artificial Sequence
  Description of Artificial Sequence: Synthetic oligonucleotide
guaacuggugggcggaugu

SEQ ID NO: 2178748 - RNA, 19 nt, Artificial Sequence
  Description of Artificial Sequence: Synthetic oligonucleotide
caucgauugagugugugcu

SEQ ID NO: 2178749 - RNA, 19 nt, Artificial Sequence
  Description of Artificial Sequence: Synthetic oligonucleotide
uguguucgcgacgcauggc

SEQ ID NO: 2178750 - RNA, 19 nt, Artificial Sequence
  Description of Artificial Sequence: Synthetic oligonucleotide
cacagugcaccccuuucca

SEQ ID NO: 2178751 - RNA, 19 nt, Artificial Sequence
  Description of Artificial Sequence: Synthetic oligonucleotide
guuggaagccccgccagga

SEQ ID NO: 2178752 - RNA, 19 nt, Artificial Sequence
  Description of Artificial Sequence: Synthetic oligonucleotide
ccugacacugucugugcgc

SEQ ID NO: 2178753 - RNA, 19 nt, Artificial Sequence
  Description of Artificial Sequence: Synthetic oligonucleotide
ccauagcauauuuguacug

SEQ ID NO: 2178754 - RNA, 19 nt, Artificial Sequence
  Description of Artificial Sequence: Synthetic oligonucleotide
cccaacacccagaaccuac

SEQ ID NO: 2178755 - RNA, 19 nt, Artificial Sequence
  Description of Artificial Sequence: Synthetic oligonucleotide
gugugcaguuggaagcccc

SEQ ID NO: 2178756 - RNA, 19 nt, Artificial Sequence
  Description of Artificial Sequence: Synthetic oligonucleotide
ugugcgcacgaugcaggug

SEQ ID NO: 2178757 - RNA, 19 nt, Artificial Sequence
  Description of Artificial Sequence: Synthetic oligonucleotide
ggaggcuaccuguuuggac

SEQ ID NO: 2178758 - RNA, 19 nt, Artificial Sequence
  Description of Artificial Sequence: Synthetic oligonucleotide
gugugcuuuggaagggcgc

SEQ ID NO: 2178759 - RNA, 19 nt, Artificial Sequence
  Description of Artificial Sequence: Synthetic oligonucleotide
accccuuuccauccggcuu

SEQ ID NO: 2178760 - RNA, 19 nt, Artificial Sequence
  Description of Artificial Sequence: Synthetic oligonucleotide
ugcuuuuguguggccgggc

SEQ ID NO: 2178761 - RNA, 19 nt, Artificial Sequence
  Description of Artificial Sequence: Synthetic oligonucleotide
cauccucggccacacugug

SEQ ID NO: 2178762 - RNA, 19 nt, Artificial Sequence
  Description of Artificial Sequence: Synthetic oligonucleotide
guccacgcuaaguuccauc

SEQ ID NO: 2178763 - RNA, 19 nt, Artificial Sequence
  Description of Artificial Sequence: Synthetic oligonucleotide
gauacaggacugaguacua

SEQ ID NO: 2178764 - RNA, 19 nt, Artificial Sequence
  Description of Artificial Sequence: Synthetic oligonucleotide
ggucccucugguuucuuca

SEQ ID NO: 2178765 - RNA, 19 nt, Artificial Sequence
  Description of Artificial Sequence: Synthetic oligonucleotide
cgacgcauggcuuuucuug

SEQ ID NO: 2178766 - RNA, 19 nt, Artificial Sequence
  Description of Artificial Sequence: Synthetic oligonucleotide
uuuguguggccgggcugag

SEQ ID NO: 2178767 - RNA, 19 nt, Artificial Sequence
  Description of Artificial Sequence: Synthetic oligonucleotide
guacuaggaaggguuuaca

SEQ ID NO: 2178768 - RNA, 19 nt, Artificial Sequence
  Description of Artificial Sequence: Synthetic oligonucleotide
caggcguccugacacuguc

SEQ ID NO: 2178769 - RNA, 19 nt, Artificial Sequence
  Description of Artificial Sequence: Synthetic oligonucleotide
gagagccugaggaggcuac

SEQ ID NO: 2178770 - RNA, 19 nt, Artificial Sequence
  Description of Artificial Sequence: Synthetic oligonucleotide
guguucgcgacgcauggcu

SEQ ID NO: 2178771 - RNA, 19 nt, Artificial Sequence
  Description of Artificial Sequence: Synthetic oligonucleotide
gugugugcuuuggaagggc

SEQ ID NO: 2178772 - RNA, 19 nt, Artificial Sequence
  Description of Artificial Sequence: Synthetic oligonucleotide
ccaucacagccccacagug

SEQ ID NO: 2178773 - RNA, 19 nt, Artificial Sequence
  Description of Artificial Sequence: Synthetic oligonucleotide
caacuuuggucucaucgcu

SEQ ID NO: 2178774 - RNA, 19 nt, Artificial Sequence
  Description of Artificial Sequence: Synthetic oligonucleotide
cgguuaagcaucaggauga

SEQ ID NO: 2178775 - RNA, 19 nt, Artificial Sequence
  Description of Artificial Sequence: Synthetic oligonucleotide
agcagcggguugccuucgg

SEQ ID NO: 2178776 - RNA, 19 nt, Artificial Sequence
  Description of Artificial Sequence: Synthetic oligonucleotide
auccggcuugggcagggcu

SEQ ID NO: 2178777 - RNA, 19 nt, Artificial Sequence
  Description of Artificial Sequence: Synthetic oligonucleotide
ggggaaguggauugcgguc

SEQ ID NO: 2178778 - RNA, 19 nt, Artificial Sequence
  Description of Artificial Sequence: Synthetic oligonucleotide
ggcggaugucccuaacaac

SEQ ID NO: 2178779 - RNA, 19 nt, Artificial Sequence
  Description of Artificial Sequence: Synthetic oligonucleotide
ccaguuaugcuaagucuca

SEQ ID NO: 2178780 - RNA, 19 nt, Artificial Sequence
  Description of Artificial Sequence: Synthetic oligonucleotide
cagucacuucuuguccagc

SEQ ID NO: 2178781 - RNA, 19 nt, Artificial Sequence
  Description of Artificial Sequence: Synthetic oligonucleotide
ugacacugucugugcgcac

SEQ ID NO: 2178782 - RNA, 19 nt, Artificial Sequence
  Description of Artificial Sequence: Synthetic oligonucleotide
ucacagccccacagugcac

SEQ ID NO: 2178783 - RNA, 19 nt, Artificial Sequence
  Description of Artificial Sequence: Synthetic oligonucleotide
ggaugucccuaacaacaga

SEQ ID NO: 2178784 - RNA, 19 nt, Artificial Sequence
  Description of Artificial Sequence: Synthetic oligonucleotide
gggacagccccuaccugcg

SEQ ID NO: 2178785 - RNA, 19 nt, Artificial Sequence
  Description of Artificial Sequence: Synthetic oligonucleotide
gcgguccacgcuaaguucc

SEQ ID NO: 2178786 - RNA, 19 nt, Artificial Sequence
  Description of Artificial Sequence: Synthetic oligonucleotide
gaguacuaggaaggguuua

SEQ ID NO: 2178787 - RNA, 19 nt, Artificial Sequence
  Description of Artificial Sequence: Synthetic oligonucleotide
uccauccggcuugggcagg

SEQ ID NO: 2178788 - RNA, 19 nt, Artificial Sequence
  Description of Artificial Sequence: Synthetic oligonucleotide
gcagguggggcgguggcgg

SEQ ID NO: 2178789 - RNA, 19 nt, Artificial Sequence
  Description of Artificial Sequence: Synthetic oligonucleotide
ggcagagaggccagaggag

SEQ ID NO: 2178790 - RNA, 19 nt, Artificial Sequence
  Description of Artificial Sequence: Synthetic oligonucleotide
gugggacagccccuaccug

SEQ ID NO: 2178791 - RNA, 19 nt, Artificial Sequence
  Description of Artificial Sequence: Synthetic oligonucleotide
gcaguuggaagccccgcca

SEQ ID NO: 2178792 - RNA, 19 nt, Artificial Sequence
  Description of Artificial Sequence: Synthetic oligonucleotide
ucuuggcugcucgguaguc

SEQ ID NO: 2178793 - RNA, 19 nt, Artificial Sequence
  Description of Artificial Sequence: Synthetic oligonucleotide
uggagugggacagccccua

SEQ ID NO: 2178794 - RNA, 19 nt, Artificial Sequence
  Description of Artificial Sequence: Synthetic oligonucleotide
agccccuaccugcggguca

SEQ ID NO: 2178795 - RNA, 19 nt, Artificial Sequence
  Description of Artificial Sequence: Synthetic oligonucleotide
gggcggaugucccuaacaa

SEQ ID NO: 2178796 - RNA, 19 nt, Artificial Sequence
  Description of Artificial Sequence: Synthetic oligonucleotide
ggggcgguggcgguuaagc

SEQ ID NO: 2178797 - RNA, 19 nt, Artificial Sequence
  Description of Artificial Sequence: Synthetic oligonucleotide
ccacucuuccucugaugcc

SEQ ID NO: 2178798 - RNA, 19 nt, Artificial Sequence
  Description of Artificial Sequence: Synthetic oligonucleotide
ccuccaggccuucagucac

SEQ ID NO: 2178799 - RNA, 19 nt, Artificial Sequence
  Description of Artificial Sequence: Synthetic oligonucleotide
aagucucaucauagaguuu

SEQ ID NO: 2178800 - RNA, 19 nt, Artificial Sequence
  Description of Artificial Sequence: Synthetic oligonucleotide
caccccacccgccuggcca

SEQ ID NO: 2178801 - RNA, 19 nt, Artificial Sequence
  Description of Artificial Sequence: Synthetic oligonucleotide
gccgggcugaguuucagaa

SEQ ID NO: 2178802 - RNA, 19 nt, Artificial Sequence
  Description of Artificial Sequence: Synthetic oligonucleotide
gcgauacaggacugaguac

SEQ ID NO: 2178803 - RNA, 19 nt, Artificial Sequence
  Description of Artificial Sequence: Synthetic oligonucleotide
gugcaguuggaagccccgc

SEQ ID NO: 2178804 - RNA, 19 nt, Artificial Sequence
  Description of Artificial Sequence: Synthetic oligonucleotide
gaaguggauugcgguccac

SEQ ID NO: 2178805 - RNA, 19 nt, Artificial Sequence
  Description of Artificial Sequence: Synthetic oligonucleotide
cccuaacaacagaccauag

SEQ ID NO: 2178806 - RNA, 19 nt, Artificial Sequence
  Description of Artificial Sequence: Synthetic oligonucleotide
ggccuucagucacuucuug

SEQ ID NO: 2178807 - RNA, 19 nt, Artificial Sequence
  Description of Artificial Sequence: Synthetic oligonucleotide
aagggcgcccgcgccucag

SEQ ID NO: 2178808 - RNA, 19 nt, Artificial Sequence
  Description of Artificial Sequence: Synthetic oligonucleotide
guggauugcgguccacgcu

SEQ ID NO: 2178809 - RNA, 19 nt, Artificial Sequence
  Description of Artificial Sequence: Synthetic oligonucleotide
ggaaguggauugcggucca

SEQ ID NO: 2178810 - RNA, 19 nt, Artificial Sequence
  Description of Artificial Sequence: Synthetic oligonucleotide
gccacacuguguucgcgac

SEQ ID NO: 2178811 - RNA, 19 nt, Artificial Sequence
  Description of Artificial Sequence: Synthetic oligonucleotide
ggccacacuguguucgcga

SEQ ID NO: 2178812 - RNA, 19 nt, Artificial Sequence
  Description of Artificial Sequence: Synthetic oligonucleotide
auucaucgauugagugugu

SEQ ID NO: 2178813 - RNA, 19 nt, Artificial Sequence
  Description of Artificial Sequence: Synthetic oligonucleotide
ccuguuuggacaucucucu

SEQ ID NO: 2178814 - RNA, 19 nt, Artificial Sequence
  Description of Artificial Sequence: Synthetic oligonucleotide
gugucacaucgagugauua

SEQ ID NO: 2178815 - RNA, 19 nt, Artificial Sequence
  Description of Artificial Sequence: Synthetic oligonucleotide
uucgcgacgcauggcuuuu

SEQ ID NO: 2178816 - RNA, 19 nt, Artificial Sequence
  Description of Artificial Sequence: Synthetic oligonucleotide
ccacacuguguucgcgacg

SEQ ID NO: 2178817 - RNA, 19 nt, Artificial Sequence
  Description of Artificial Sequence: Synthetic oligonucleotide
cuugggcagggcuggggaa

SEQ ID NO: 2178818 - RNA, 19 nt, Artificial Sequence
  Description of Artificial Sequence: Synthetic oligonucleotide
cgcuaaguuccauccucgg

SEQ ID NO: 2178819 - RNA, 19 nt, Artificial Sequence
  Description of Artificial Sequence: Synthetic oligonucleotide
ggauggaaaugcaccccac

SEQ ID NO: 2178820 - RNA, 19 nt, Artificial Sequence
  Description of Artificial Sequence: Synthetic oligonucleotide
cugagcgauacaggacuga

SEQ ID NO: 2178821 - RNA, 19 nt, Artificial Sequence
  Description of Artificial Sequence: Synthetic oligonucleotide
uggugggcggaugucccua

SEQ ID NO: 2178822 - RNA, 19 nt, Artificial Sequence
  Description of Artificial Sequence: Synthetic oligonucleotide
aggagagccugaggaggcu

SEQ ID NO: 2178823 - RNA, 19 nt, Artificial Sequence
  Description of Artificial Sequence: Synthetic oligonucleotide
gggcugaguuucagaaaag

SEQ ID NO: 2178824 - RNA, 19 nt, Artificial Sequence
  Description of Artificial Sequence: Synthetic oligonucleotide
acacuguguucgcgacgca

SEQ ID NO: 2178825 - RNA, 19 nt, Artificial Sequence
  Description of Artificial Sequence: Synthetic oligonucleotide
augagcuguuggcgcucca

SEQ ID NO: 2178826 - RNA, 19 nt, Artificial Sequence
  Description of Artificial Sequence: Synthetic oligonucleotide
ucucaucgcuuggucccuc

SEQ ID NO: 2178827 - RNA, 19 nt, Artificial Sequence
  Description of Artificial Sequence: Synthetic oligonucleotide
ccuacaguacuuaggaauu

SEQ ID NO: 2178828 - RNA, 19 nt, Artificial Sequence
  Description of Artificial Sequence: Synthetic oligonucleotide
gagcgauacaggacugagu

SEQ ID NO: 2178829 - RNA, 19 nt, Artificial Sequence
  Description of Artificial Sequence: Synthetic oligonucleotide
cugugucacaucgagugau

SEQ ID NO: 2178830 - RNA, 19 nt, Artificial Sequence
  Description of Artificial Sequence: Synthetic oligonucleotide
gcggguugccuucggacuc

SEQ ID NO: 2178831 - RNA, 19 nt, Artificial Sequence
  Description of Artificial Sequence: Synthetic oligonucleotide
ggacaucucucuggcugag

SEQ ID NO: 2178832 - RNA, 19 nt, Artificial Sequence
  Description of Artificial Sequence: Synthetic oligonucleotide
ggacagccccuaccugcgg

SEQ ID NO: 2178833 - RNA, 19 nt, Artificial Sequence
  Description of Artificial Sequence: Synthetic oligonucleotide
ccaacacccagaaccuaca

SEQ ID NO: 2178834 - RNA, 19 nt, Artificial Sequence
  Description of Artificial Sequence: Synthetic oligonucleotide
gcgcccgcgccucagugcc

SEQ ID NO: 2178835 - RNA, 19 nt, Artificial Sequence
  Description of Artificial Sequence: Synthetic oligonucleotide
gcgguggcgguuaagcauc

SEQ ID NO: 2178836 - RNA, 19 nt, Artificial Sequence
  Description of Artificial Sequence: Synthetic oligonucleotide
cgggcugaguuucagaaaa

SEQ ID NO: 2178837 - RNA, 19 nt, Artificial Sequence
  Description of Artificial Sequence: Synthetic oligonucleotide
ccuucaagcugggccuugg

SEQ ID NO: 2178838 - RNA, 19 nt, Artificial Sequence
  Description of Artificial Sequence: Synthetic oligonucleotide
gucccuaacaacagaccau

SEQ ID NO: 2178839 - RNA, 19 nt, Artificial Sequence
  Description of Artificial Sequence: Synthetic oligonucleotide
ccagcagcggguugccuuc

SEQ ID NO: 2178840 - RNA, 19 nt, Artificial Sequence
  Description of Artificial Sequence: Synthetic oligonucleotide
uuguguggccgggcugagu

SEQ ID NO: 2178841 - RNA, 19 nt, Artificial Sequence
  Description of Artificial Sequence: Synthetic oligonucleotide
gaagccccgccaggacagc

SEQ ID NO: 2178842 - RNA, 19 nt, Artificial Sequence
  Description of Artificial Sequence: Synthetic oligonucleotide
gguaguccuuugggugggg

SEQ ID NO: 2178843 - RNA, 19 nt, Artificial Sequence
  Description of Artificial Sequence: Synthetic oligonucleotide
ggacucaggcguccugaca

SEQ ID NO: 2178844 - RNA, 19 nt, Artificial Sequence
  Description of Artificial Sequence: Synthetic oligonucleotide
ugcaccccacccgccuggc

SEQ ID NO: 2178845 - RNA, 19 nt, Artificial Sequence
  Description of Artificial Sequence: Synthetic oligonucleotide
gcuuuuguguggccgggcu

SEQ ID NO: 2178846 - RNA, 19 nt, Artificial Sequence
  Description of Artificial Sequence: Synthetic oligonucleotide
gugggcggaugucccuaac

SEQ ID NO: 2178847 - RNA, 19 nt, Artificial Sequence
  Description of Artificial Sequence: Synthetic oligonucleotide
gcuuuggaagggcgcccgc

SEQ ID NO: 2178848 - RNA, 19 nt, Artificial Sequence
  Description of Artificial Sequence: Synthetic oligonucleotide
guacugugucacaucgagu

SEQ ID NO: 2178849 - RNA, 19 nt, Artificial Sequence
  Description of Artificial Sequence: Synthetic oligonucleotide
cgauacaggacugaguacu

SEQ ID NO: 2178850 - RNA, 19 nt, Artificial Sequence
  Description of Artificial Sequence: Synthetic oligonucleotide
guucgcgacgcauggcuuu

SEQ ID NO: 2178851 - RNA, 19 nt, Artificial Sequence
  Description of Artificial Sequence: Synthetic oligonucleotide
gcugcucgguaguccuuug

SEQ ID NO: 2178852 - RNA, 19 nt, Artificial Sequence
  Description of Artificial Sequence: Synthetic oligonucleotide
gagccugaggaggcuaccu

SEQ ID NO: 2178853 - RNA, 19 nt, Artificial Sequence
  Description of Artificial Sequence: Synthetic oligonucleotide
ggcgguuaagcaucaggau

SEQ ID NO: 2178854 - RNA, 19 nt, Artificial Sequence
  Description of Artificial Sequence: Synthetic oligonucleotide
gcgccucagugccacagca

SEQ ID NO: 2178855 - RNA, 19 nt, Artificial Sequence
  Description of Artificial Sequence: Synthetic oligonucleotide
cagcagcggguugccuucg

SEQ ID NO: 2178856 - RNA, 19 nt, Artificial Sequence
  Description of Artificial Sequence: Synthetic oligonucleotide
uggggcgguggcgguuaag

SEQ ID NO: 2178857 - RNA, 19 nt, Artificial Sequence
  Description of Artificial Sequence: Synthetic oligonucleotide
ggcgguggcgguuaagcau

SEQ ID NO: 2178858 - RNA, 19 nt, Artificial Sequence
  Description of Artificial Sequence: Synthetic oligonucleotide
cgauugagugugugcuuug

SEQ ID NO: 2178859 - RNA, 19 nt, Artificial Sequence
  Description of Artificial Sequence: Synthetic oligonucleotide
ccggcuugggcagggcugg

SEQ ID NO: 2178860 - RNA, 19 nt, Artificial Sequence
  Description of Artificial Sequence: Synthetic oligonucleotide
ccuucggacucaggcgucc

SEQ ID NO: 2178861 - RNA, 19 nt, Artificial Sequence
  Description of Artificial Sequence: Synthetic oligonucleotide
gccugaggaggcuaccugu

SEQ ID NO: 2178862 - RNA, 19 nt, Artificial Sequence
  Description of Artificial Sequence: Synthetic oligonucleotide
ggagugggacagccccuac

SEQ ID NO: 2178863 - RNA, 19 nt, Artificial Sequence
  Description of Artificial Sequence: Synthetic oligonucleotide
cccgccaggacagccaguc

SEQ ID NO: 2178864 - RNA, 19 nt, Artificial Sequence
  Description of Artificial Sequence: Synthetic oligonucleotide
agccccgccaggacagcca

SEQ ID NO: 2178865 - RNA, 19 nt, Artificial Sequence
  Description of Artificial Sequence: Synthetic oligonucleotide
cugugcgcacgaugcaggu

SEQ ID NO: 2178866 - RNA, 19 nt, Artificial Sequence
  Description of Artificial Sequence: Synthetic oligonucleotide
aggugcccuucaagcuggg

SEQ ID NO: 2178867 - RNA, 19 nt, Artificial Sequence
  Description of Artificial Sequence: Synthetic oligonucleotide
caacagaccauagcauauu

SEQ ID NO: 2178868 - RNA, 19 nt, Artificial Sequence
  Description of Artificial Sequence: Synthetic oligonucleotide
gguggcgguuaagcaucag

SEQ ID NO: 2178869 - RNA, 19 nt, Artificial Sequence
  Description of Artificial Sequence: Synthetic oligonucleotide
cucaucgcuuggucccucu

SEQ ID NO: 2178870 - RNA, 19 nt, Artificial Sequence
  Description of Artificial Sequence: Synthetic oligonucleotide
gcagcggguugccuucgga

SEQ ID NO: 2178871 - RNA, 19 nt, Artificial Sequence
  Description of Artificial Sequence: Synthetic oligonucleotide
ucgcgacgcauggcuuuuc

SEQ ID NO: 2178872 - RNA, 19 nt, Artificial Sequence
  Description of Artificial Sequence: Synthetic oligonucleotide
ccauccggcuugggcaggg

SEQ ID NO: 2178873 - RNA, 19 nt, Artificial Sequence
  Description of Artificial Sequence: Synthetic oligonucleotide
gcgggucaacuuuggucuc

SEQ ID NO: 2178874 - RNA, 19 nt, Artificial Sequence
  Description of Artificial Sequence: Synthetic oligonucleotide
ggugggcggaugucccuaa

SEQ ID NO: 2178875 - RNA, 19 nt, Artificial Sequence
  Description of Artificial Sequence: Synthetic oligonucleotide
cacuguguucgcgacgcau

SEQ ID NO: 2178876 - RNA, 19 nt, Artificial Sequence
  Description of Artificial Sequence: Synthetic oligonucleotide
cagccccuaccugcggguc

SEQ ID NO: 2178877 - RNA, 19 nt, Artificial Sequence
  Description of Artificial Sequence: Synthetic oligonucleotide
ggccgggcugaguuucaga

SEQ ID NO: 2178878 - RNA, 19 nt, Artificial Sequence
  Description of Artificial Sequence: Synthetic oligonucleotide
gggcgcccgcgccucagug

SEQ ID NO: 2178879 - RNA, 19 nt, Artificial Sequence
  Description of Artificial Sequence: Synthetic oligonucleotide
ggaagggcgcccgcgccuc

SEQ ID NO: 2178880 - RNA, 19 nt, Artificial Sequence
  Description of Artificial Sequence: Synthetic oligonucleotide
gcgcacgaugcaggugggg

SEQ ID NO: 2178881 - RNA, 19 nt, Artificial Sequence
  Description of Artificial Sequence: Synthetic oligonucleotide
gucucaucgcuuggucccu

SEQ ID NO: 2178882 - RNA, 19 nt, Artificial Sequence
  Description of Artificial Sequence: Synthetic oligonucleotide
gcuguuggcgcuccagcuu

SEQ ID NO: 2178883 - RNA, 19 nt, Artificial Sequence
  Description of Artificial Sequence: Synthetic oligonucleotide
ggagagccugaggaggcua

SEQ ID NO: 2178884 - RNA, 19 nt, Artificial Sequence
  Description of Artificial Sequence: Synthetic oligonucleotide
cuggugggcggaugucccu

SEQ ID NO: 2178885 - RNA, 19 nt, Artificial Sequence
  Description of Artificial Sequence: Synthetic oligonucleotide
guggccgggcugaguuuca

SEQ ID NO: 2178886 - RNA, 19 nt, Artificial Sequence
  Description of Artificial Sequence: Synthetic oligonucleotide
ccgcgccucagugccacag

SEQ ID NO: 2178887 - RNA, 19 nt, Artificial Sequence
  Description of Artificial Sequence: Synthetic oligonucleotide
ggccuuggagugggacagc

SEQ ID NO: 2178888 - RNA, 19 nt, Artificial Sequence
  Description of Artificial Sequence: Synthetic oligonucleotide
ccgggcugaguuucagaaa

SEQ ID NO: 2178889 - RNA, 19 nt, Artificial Sequence
  Description of Artificial Sequence: Synthetic oligonucleotide
gguggggcgguggcgguua

SEQ ID NO: 2178890 - RNA, 19 nt, Artificial Sequence
  Description of Artificial Sequence: Synthetic oligonucleotide
cuucggacucaggcguccu

SEQ ID NO: 2178891 - RNA, 19 nt, Artificial Sequence
  Description of Artificial Sequence: Synthetic oligonucleotide
gccuucggacucaggcguc

SEQ ID NO: 2178892 - RNA, 19 nt, Artificial Sequence
  Description of Artificial Sequence: Synthetic oligonucleotide
gcccgcgccucagugccac

SEQ ID NO: 2178893 - RNA, 19 nt, Artificial Sequence
  Description of Artificial Sequence: Synthetic oligonucleotide
gcguccugacacugucugu

SEQ ID NO: 2178894 - RNA, 19 nt, Artificial Sequence
  Description of Artificial Sequence: Synthetic oligonucleotide
gggucaacuuuggucucau

SEQ ID NO: 2178895 - RNA, 19 nt, Artificial Sequence
  Description of Artificial Sequence: Synthetic oligonucleotide
ccacgcuaaguuccauccu

SEQ ID NO: 2178896 - RNA, 19 nt, Artificial Sequence
  Description of Artificial Sequence: Synthetic oligonucleotide
guggggcgguggcgguuaa

SEQ ID NO: 2178897 - RNA, 19 nt, Artificial Sequence
  Description of Artificial Sequence: Synthetic oligonucleotide
gccccuaccugcgggucaa

SEQ ID NO: 2178898 - RNA, 19 nt, Artificial Sequence
  Description of Artificial Sequence: Synthetic oligonucleotide
cgguccacgcuaaguucca

SEQ ID NO: 2178899 - RNA, 19 nt, Artificial Sequence
  Description of Artificial Sequence: Synthetic oligonucleotide
cuguaacuggugggcggau

SEQ ID NO: 2178900 - RNA, 19 nt, Artificial Sequence
  Description of Artificial Sequence: Synthetic oligonucleotide
cgcuuggucccucugguuu

SEQ ID NO: 2178901 - RNA, 19 nt, Artificial Sequence
  Description of Artificial Sequence: Synthetic oligonucleotide
gcgacgcauggcuuuucuu

SEQ ID NO: 2178902 - RNA, 19 nt, Artificial Sequence
  Description of Artificial Sequence: Synthetic oligonucleotide
ccugcgggucaacuuuggu

SEQ ID NO: 2178903 - RNA, 19 nt, Artificial Sequence
  Description of Artificial Sequence: Synthetic oligonucleotide
cgccucagugccacagcaa

SEQ ID NO: 2178904 - RNA, 19 nt, Artificial Sequence
  Description of Artificial Sequence: Synthetic oligonucleotide
cggguugccuucggacuca

SEQ ID NO: 2178905 - RNA, 19 nt, Artificial Sequence
  Description of Artificial Sequence: Synthetic oligonucleotide
cgcgacgcauggcuuuucu

SEQ ID NO: 2178906 - RNA, 19 nt, Artificial Sequence
  Description of Artificial Sequence: Synthetic oligonucleotide
cccuaccugcgggucaacu

SEQ ID NO: 2178907 - RNA, 19 nt, Artificial Sequence
  Description of Artificial Sequence: Synthetic oligonucleotide
ccccacccgccuggccacc

SEQ ID NO: 2178908 - RNA, 19 nt, Artificial Sequence
  Description of Artificial Sequence: Synthetic oligonucleotide
ccccuaccugcgggucaac

SEQ ID NO: 2178909 - RNA, 19 nt, Artificial Sequence
  Description of Artificial Sequence: Synthetic oligonucleotide
ccgccaggacagccagucu

SEQ ID NO: 2178910 - RNA, 19 nt, Artificial Sequence
  Description of Artificial Sequence: Synthetic oligonucleotide
cccgcgccucagugccaca

SEQ ID NO: 2178911 - RNA, 19 nt, Artificial Sequence
  Description of Artificial Sequence: Synthetic oligonucleotide
ccccgccaggacagccagu

SEQ ID NO: 2178912 - RNA, 19 nt, Artificial Sequence
  Description of Artificial Sequence: Synthetic oligonucleotide
cgcccgcgccucagugcca

SEQ ID NO: 2178913 - RNA, 19 nt, Artificial Sequence
  Description of Artificial Sequence: Synthetic oligonucleotide
aacaagaaaaguuaagagc

SEQ ID NO: 2178914 - RNA, 19 nt, Artificial Sequence
  Description of Artificial Sequence: Synthetic oligonucleotide
aacuauauagccucuaagg

SEQ ID NO: 2178915 - RNA, 19 nt, Artificial Sequence
  Description of Artificial Sequence: Synthetic oligonucleotide
uggacuaucacaaacaagc

SEQ ID NO: 2178916 - RNA, 19 nt, Artificial Sequence
  Description of Artificial Sequence: Synthetic oligonucleotide
aaggcagagagcuauaugg

SEQ ID NO: 2178917 - RNA, 19 nt, Artificial Sequence
  Description of Artificial Sequence: Synthetic oligonucleotide
uauauagccucuaaggagg

SEQ ID NO: 2178918 - RNA, 19 nt, Artificial Sequence
  Description of Artificial Sequence: Synthetic oligonucleotide
aagaguaugagagaugccc

SEQ ID NO: 2178919 - RNA, 19 nt, Artificial Sequence
  Description of Artificial Sequence: Synthetic oligonucleotide
ucaaguuugggacugaaag

SEQ ID NO: 2178920 - RNA, 19 nt, Artificial Sequence
  Description of Artificial Sequence: Synthetic oligonucleotide
aauggcuggaucuggaggc

SEQ ID NO: 2178921 - RNA, 19 nt, Artificial Sequence
  Description of Artificial Sequence: Synthetic oligonucleotide
aacuuggaacuauauagcc

SEQ ID NO: 2178922 - RNA, 19 nt, Artificial Sequence
  Description of Artificial Sequence: Synthetic oligonucleotide
ucagaaacuagaacaaugg

SEQ ID NO: 2178923 - RNA, 19 nt, Artificial Sequence
  Description of Artificial Sequence: Synthetic oligonucleotide
uuguuugagaacuucaugc

SEQ ID NO: 2178924 - RNA, 19 nt, Artificial Sequence
  Description of Artificial Sequence: Synthetic oligonucleotide
agaugaaggaaacccaugc

SEQ ID NO: 2178925 - RNA, 19 nt, Artificial Sequence
  Description of Artificial Sequence: Synthetic oligonucleotide
ucaacagcaagugaggugg

SEQ ID NO: 2178926 - RNA, 19 nt, Artificial Sequence
  Description of Artificial Sequence: Synthetic oligonucleotide
acuaaguacaucugcaagg

SEQ ID NO: 2178927 - RNA, 19 nt, Artificial Sequence
  Description of Artificial Sequence: Synthetic oligonucleotide
uucacacuaaggcagagag

SEQ ID NO: 2178928 - RNA, 19 nt, Artificial Sequence
  Description of Artificial Sequence: Synthetic oligonucleotide
uucuguaugacuuaaggaa

SEQ ID NO: 2178929 - RNA, 19 nt, Artificial Sequence
  Description of Artificial Sequence: Synthetic oligonucleotide
aaguuugggacugaaaguc

SEQ ID NO: 2178930 - RNA, 19 nt, Artificial Sequence
  Description of Artificial Sequence: Synthetic oligonucleotide
guuagaaguaccuuugaag

SEQ ID NO: 2178931 - RNA, 19 nt, Artificial Sequence
  Description of Artificial Sequence: Synthetic oligonucleotide
aacuaaguacaucugcaag

SEQ ID NO: 2178932 - RNA, 19 nt, Artificial Sequence
  Description of Artificial Sequence: Synthetic oligonucleotide
gaaagaguaugagagaugc

SEQ ID NO: 2178933 - RNA, 19 nt, Artificial Sequence
  Description of Artificial Sequence: Synthetic oligonucleotide
aacaaggugcccaaguccc

SEQ ID NO: 2178934 - RNA, 19 nt, Artificial Sequence
  Description of Artificial Sequence: Synthetic oligonucleotide
aaggaaugacagcagacag

SEQ ID NO: 2178935 - RNA, 19 nt, Artificial Sequence
  Description of Artificial Sequence: Synthetic oligonucleotide
ugucuuuauguacaguaag

SEQ ID NO: 2178936 - RNA, 19 nt, Artificial Sequence
  Description of Artificial Sequence: Synthetic oligonucleotide
aaacuagaacaauggagag

SEQ ID NO: 2178937 - RNA, 19 nt, Artificial Sequence
  Description of Artificial Sequence: Synthetic oligonucleotide
cuauauagccucuaaggag

SEQ ID NO: 2178938 - RNA, 19 nt, Artificial Sequence
  Description of Artificial Sequence: Synthetic oligonucleotide
guaacaugucaguugaggg

SEQ ID NO: 2178939 - RNA, 19 nt, Artificial Sequence
  Description of Artificial Sequence: Synthetic oligonucleotide
uguacaguaagaaaauaua

SEQ ID NO: 2178940 - RNA, 19 nt, Artificial Sequence
  Description of Artificial Sequence: Synthetic oligonucleotide
ugucaaacaagaaaaguua

SEQ ID NO: 2178941 - RNA, 19 nt, Artificial Sequence
  Description of Artificial Sequence: Synthetic oligonucleotide
cauucuguaugacuuaagg

SEQ ID NO: 2178942 - RNA, 19 nt, Artificial Sequence
  Description of Artificial Sequence: Synthetic oligonucleotide
gaguagacgaacuuggaac

SEQ ID NO: 2178943 - RNA, 19 nt, Artificial Sequence
  Description of Artificial Sequence: Synthetic oligonucleotide
ucagacaucagccuuucac

SEQ ID NO: 2178944 - RNA, 19 nt, Artificial Sequence
  Description of Artificial Sequence: Synthetic oligonucleotide
acuagaacaauggagagga

SEQ ID NO: 2178945 - RNA, 19 nt, Artificial Sequence
  Description of Artificial Sequence: Synthetic oligonucleotide
acuauauagccucuaagga

SEQ ID NO: 2178946 - RNA, 19 nt, Artificial Sequence
  Description of Artificial Sequence: Synthetic oligonucleotide
aagaaaagugguagcaugg

SEQ ID NO: 2178947 - RNA, 19 nt, Artificial Sequence
  Description of Artificial Sequence: Synthetic oligonucleotide
agaaacuagaacaauggag

SEQ ID NO: 2178948 - RNA, 19 nt, Artificial Sequence
  Description of Artificial Sequence: Synthetic oligonucleotide
cuuggaacuauauagccuc

SEQ ID NO: 2178949 - RNA, 19 nt, Artificial Sequence
  Description of Artificial Sequence: Synthetic oligonucleotide
ugaacaguuagaaguaccu

SEQ ID NO: 2178950 - RNA, 19 nt, Artificial Sequence
  Description of Artificial Sequence: Synthetic oligonucleotide
aacaguuagaaguaccuuu

SEQ ID NO: 2178951 - RNA, 19 nt, Artificial Sequence
  Description of Artificial Sequence: Synthetic oligonucleotide
augacuggugaagacaucc

SEQ ID NO: 2178952 - RNA, 19 nt, Artificial Sequence
  Description of Artificial Sequence: Synthetic oligonucleotide
aacauauugucaucaggcu

SEQ ID NO: 2178953 - RNA, 19 nt, Artificial Sequence
  Description of Artificial Sequence: Synthetic oligonucleotide
agaacagaugcccaauguc

SEQ ID NO: 2178954 - RNA, 19 nt, Artificial Sequence
  Description of Artificial Sequence: Synthetic oligonucleotide
ucacaaacaagcacagcag

SEQ ID NO: 2178955 - RNA, 19 nt, Artificial Sequence
  Description of Artificial Sequence: Synthetic oligonucleotide
uaacaugucaguugagggc

SEQ ID NO: 2178956 - RNA, 19 nt, Artificial Sequence
  Description of Artificial Sequence: Synthetic oligonucleotide
aacuagaacaauggagagg

SEQ ID NO: 2178957 - RNA, 19 nt, Artificial Sequence
  Description of Artificial Sequence: Synthetic oligonucleotide
cagccuuucacacuaaggc

SEQ ID NO: 2178958 - RNA, 19 nt, Artificial Sequence
  Description of Artificial Sequence: Synthetic oligonucleotide
acugaaagucaacagcaag

SEQ ID NO: 2178959 - RNA, 19 nt, Artificial Sequence
  Description of Artificial Sequence: Synthetic oligonucleotide
aagacauccuccuccaaga

SEQ ID NO: 2178960 - RNA, 19 nt, Artificial Sequence
  Description of Artificial Sequence: Synthetic oligonucleotide
gaacuauauagccucuaag

SEQ ID NO: 2178961 - RNA, 19 nt, Artificial Sequence
  Description of Artificial Sequence: Synthetic oligonucleotide
caaacauauugucaucagg

SEQ ID NO: 2178962 - RNA, 19 nt, Artificial Sequence
  Description of Artificial Sequence: Synthetic oligonucleotide
cacacaagagaucagucag

SEQ ID NO: 2178963 - RNA, 19 nt, Artificial Sequence
  Description of Artificial Sequence: Synthetic oligonucleotide
uguuugagaacuucaugca

SEQ ID NO: 2178964 - RNA, 19 nt, Artificial Sequence
  Description of Artificial Sequence: Synthetic oligonucleotide
ugaaagucaacagcaagug

SEQ ID NO: 2178965 - RNA, 19 nt, Artificial Sequence
  Description of Artificial Sequence: Synthetic oligonucleotide
agacaucagccuuucacac

SEQ ID NO: 2178966 - RNA, 19 nt, Artificial Sequence
  Description of Artificial Sequence: Synthetic oligonucleotide
cuugagagaacagaugccc

SEQ ID NO: 2178967 - RNA, 19 nt, Artificial Sequence
  Description of Artificial Sequence: Synthetic oligonucleotide
acauauugucaucaggcug

SEQ ID NO: 2178968 - RNA, 19 nt, Artificial Sequence
  Description of Artificial Sequence: Synthetic oligonucleotide
cagagagcuauauggaggg

SEQ ID NO: 2178969 - RNA, 19 nt, Artificial Sequence
  Description of Artificial Sequence: Synthetic oligonucleotide
ucacaacacauucuguaug

SEQ ID NO: 2178970 - RNA, 19 nt, Artificial Sequence
  Description of Artificial Sequence: Synthetic oligonucleotide
augagagaugcccucagag

SEQ ID NO: 2178971 - RNA, 19 nt, Artificial Sequence
  Description of Artificial Sequence: Synthetic oligonucleotide
auauauacaucuugagaga

SEQ ID NO: 2178972 - RNA, 19 nt, Artificial Sequence
  Description of Artificial Sequence: Synthetic oligonucleotide
gaacugaugucaagaaugg

SEQ ID NO: 2178973 - RNA, 19 nt, Artificial Sequence
  Description of Artificial Sequence: Synthetic oligonucleotide
ucucccuguaacaugucag

SEQ ID NO: 2178974 - RNA, 19 nt, Artificial Sequence
  Description of Artificial Sequence: Synthetic oligonucleotide
acaacaaggugcccaaguc

SEQ ID NO: 2178975 - RNA, 19 nt, Artificial Sequence
  Description of Artificial Sequence: Synthetic oligonucleotide
auucuguaugacuuaagga

SEQ ID NO: 2178976 - RNA, 19 nt, Artificial Sequence
  Description of Artificial Sequence: Synthetic oligonucleotide
aaacuaaguacaucugcaa

SEQ ID NO: 2178977 - RNA, 19 nt, Artificial Sequence
  Description of Artificial Sequence: Synthetic oligonucleotide
gacaggguuggguaguccg

SEQ ID NO: 2178978 - RNA, 19 nt, Artificial Sequence
  Description of Artificial Sequence: Synthetic oligonucleotide
aguagacgaacuuggaacu

SEQ ID NO: 2178979 - RNA, 19 nt, Artificial Sequence
  Description of Artificial Sequence: Synthetic oligonucleotide
uaaggaaugucuuuaugua

SEQ ID NO: 2178980 - RNA, 19 nt, Artificial Sequence
  Description of Artificial Sequence: Synthetic oligonucleotide
cgaacuuggaacuauauag

SEQ ID NO: 2178981 - RNA, 19 nt, Artificial Sequence
  Description of Artificial Sequence: Synthetic oligonucleotide
gcugucagaaacuagaaca

SEQ ID NO: 2178982 - RNA, 19 nt, Artificial Sequence
  Description of Artificial Sequence: Synthetic oligonucleotide
ucuugagagaacagaugcc

SEQ ID NO: 2178983 - RNA, 19 nt, Artificial Sequence
  Description of Artificial Sequence: Synthetic oligonucleotide
ucacacaagagaucaguca

SEQ ID NO: 2178984 - RNA, 19 nt, Artificial Sequence
  Description of Artificial Sequence: Synthetic oligonucleotide
uagaacaauggagaggaug

SEQ ID NO: 2178985 - RNA, 19 nt, Artificial Sequence
  Description of Artificial Sequence: Synthetic oligonucleotide
ugaacacacagagaauucc

SEQ ID NO: 2178986 - RNA, 19 nt, Artificial Sequence
  Description of Artificial Sequence: Synthetic oligonucleotide
gacuaucacaaacaagcac

SEQ ID NO: 2178987 - RNA, 19 nt, Artificial Sequence
  Description of Artificial Sequence: Synthetic oligonucleotide
gaacuuggaacuauauagc

SEQ ID NO: 2178988 - RNA, 19 nt, Artificial Sequence
  Description of Artificial Sequence: Synthetic oligonucleotide
uuuagagugagagcugccc

SEQ ID NO: 2178989 - RNA, 19 nt, Artificial Sequence
  Description of Artificial Sequence: Synthetic oligonucleotide
acauucaggaacugauguc

SEQ ID NO: 2178990 - RNA, 19 nt, Artificial Sequence
  Description of Artificial Sequence: Synthetic oligonucleotide
agagcuauauggagggugc

SEQ ID NO: 2178991 - RNA, 19 nt, Artificial Sequence
  Description of Artificial Sequence: Synthetic oligonucleotide
agaucagucagugcuuggc

SEQ ID NO: 2178992 - RNA, 19 nt, Artificial Sequence
  Description of Artificial Sequence: Synthetic oligonucleotide
auggagggugcucuguagc

SEQ ID NO: 2178993 - RNA, 19 nt, Artificial Sequence
  Description of Artificial Sequence: Synthetic oligonucleotide
gaaaagugguagcauggug

SEQ ID NO: 2178994 - RNA, 19 nt, Artificial Sequence
  Description of Artificial Sequence: Synthetic oligonucleotide
ugaugucaagaauggcugg

SEQ ID NO: 2178995 - RNA, 19 nt, Artificial Sequence
  Description of Artificial Sequence: Synthetic oligonucleotide
ugucacaacacauucugua

SEQ ID NO: 2178996 - RNA, 19 nt, Artificial Sequence
  Description of Artificial Sequence: Synthetic oligonucleotide
acaagagaucagucagugc

SEQ ID NO: 2178997 - RNA, 19 nt, Artificial Sequence
  Description of Artificial Sequence: Synthetic oligonucleotide
ggaacugaugucaagaaug

SEQ ID NO: 2178998 - RNA, 19 nt, Artificial Sequence
  Description of Artificial Sequence: Synthetic oligonucleotide
uaguccgcuucuuacaggc

SEQ ID NO: 2178999 - RNA, 19 nt, Artificial Sequence
  Description of Artificial Sequence: Synthetic oligonucleotide
aaagaguaugagagaugcc

SEQ ID NO: 2179000 - RNA, 19 nt, Artificial Sequence
  Description of Artificial Sequence: Synthetic oligonucleotide
ugggcuacauucaggaacu

SEQ ID NO: 2179001 - RNA, 19 nt, Artificial Sequence
  Description of Artificial Sequence: Synthetic oligonucleotide
uucaugcaagcucacagau

SEQ ID NO: 2179002 - RNA, 19 nt, Artificial Sequence
  Description of Artificial Sequence: Synthetic oligonucleotide
gacauccuccuccaagagg

SEQ ID NO: 2179003 - RNA, 19 nt, Artificial Sequence
  Description of Artificial Sequence: Synthetic oligonucleotide
agaacuucaugcaagcuca

SEQ ID NO: 2179004 - RNA, 19 nt, Artificial Sequence
  Description of Artificial Sequence: Synthetic oligonucleotide
cugggcuacauucaggaac

SEQ ID NO: 2179005 - RNA, 19 nt, Artificial Sequence
  Description of Artificial Sequence: Synthetic oligonucleotide
uggagaggaugauuucugg

SEQ ID NO: 2179006 - RNA, 19 nt, Artificial Sequence
  Description of Artificial Sequence: Synthetic oligonucleotide
acaagcacagcagaugaag

SEQ ID NO: 2179007 - RNA, 19 nt, Artificial Sequence
  Description of Artificial Sequence: Synthetic oligonucleotide
ugggacugaaagucaacag

SEQ ID NO: 2179008 - RNA, 19 nt, Artificial Sequence
  Description of Artificial Sequence: Synthetic oligonucleotide
ugcccaaugucaauggaaa

SEQ ID NO: 2179009 - RNA, 19 nt, Artificial Sequence
  Description of Artificial Sequence: Synthetic oligonucleotide
caugaauaugacagccugc

SEQ ID NO: 2179010 - RNA, 19 nt, Artificial Sequence
  Description of Artificial Sequence: Synthetic oligonucleotide
gugaauggcaugaauauga

SEQ ID NO: 2179011 - RNA, 19 nt, Artificial Sequence
  Description of Artificial Sequence: Synthetic oligonucleotide
gaugcccucagaguagacg

SEQ ID NO: 2179012 - RNA, 19 nt, Artificial Sequence
  Description of Artificial Sequence: Synthetic oligonucleotide
cagcagaugaaggaaaccc

SEQ ID NO: 2179013 - RNA, 19 nt, Artificial Sequence
  Description of Artificial Sequence: Synthetic oligonucleotide
uggcauucacaacaaggug

SEQ ID NO: 2179014 - RNA, 19 nt, Artificial Sequence
  Description of Artificial Sequence: Synthetic oligonucleotide
uggguugugaacacacaga

SEQ ID NO: 2179015 - RNA, 19 nt, Artificial Sequence
  Description of Artificial Sequence: Synthetic oligonucleotide
gcaagcucccuuuagagug

SEQ ID NO: 2179016 - RNA, 19 nt, Artificial Sequence
  Description of Artificial Sequence: Synthetic oligonucleotide
uuaagagcuggguugugaa

SEQ ID NO: 2179017 - RNA, 19 nt, Artificial Sequence
  Description of Artificial Sequence: Synthetic oligonucleotide
cuguaugacuuaaggaaug

SEQ ID NO: 2179018 - RNA, 19 nt, Artificial Sequence
  Description of Artificial Sequence: Synthetic oligonucleotide
caacaaggugcccaagucc

SEQ ID NO: 2179019 - RNA, 19 nt, Artificial Sequence
  Description of Artificial Sequence: Synthetic oligonucleotide
uggcaugaauaugacagcc

SEQ ID NO: 2179020 - RNA, 19 nt, Artificial Sequence
  Description of Artificial Sequence: Synthetic oligonucleotide
agaaaaguuaagagcuggg

SEQ ID NO: 2179021 - RNA, 19 nt, Artificial Sequence
  Description of Artificial Sequence: Synthetic oligonucleotide
cuuacaggccagcugggcc

SEQ ID NO: 2179022 - RNA, 19 nt, Artificial Sequence
  Description of Artificial Sequence: Synthetic oligonucleotide
ugagagaugcccucagagu

SEQ ID NO: 2179023 - RNA, 19 nt, Artificial Sequence
  Description of Artificial Sequence: Synthetic oligonucleotide
cuggguugugaacacacag

SEQ ID NO: 2179024 - RNA, 19 nt, Artificial Sequence
  Description of Artificial Sequence: Synthetic oligonucleotide
uugagagaacagaugccca

SEQ ID NO: 2179025 - RNA, 19 nt, Artificial Sequence
  Description of Artificial Sequence: Synthetic oligonucleotide
caagagaucagucagugcu

SEQ ID NO: 2179026 - RNA, 19 nt, Artificial Sequence
  Description of Artificial Sequence: Synthetic oligonucleotide
uucccaauggcugucagaa

SEQ ID NO: 2179027 - RNA, 19 nt, Artificial Sequence
  Description of Artificial Sequence: Synthetic oligonucleotide
ggguugugaacacacagag

SEQ ID NO: 2179028 - RNA, 19 nt, Artificial Sequence
  Description of Artificial Sequence: Synthetic oligonucleotide
gaugaaggaaacccaugca

SEQ ID NO: 2179029 - RNA, 19 nt, Artificial Sequence
  Description of Artificial Sequence: Synthetic oligonucleotide
aguuugcccaaacaggaaa

SEQ ID NO: 2179030 - RNA, 19 nt, Artificial Sequence
  Description of Artificial Sequence: Synthetic oligonucleotide
caagaaaaguuaagagcug

SEQ ID NO: 2179031 - RNA, 19 nt, Artificial Sequence
  Description of Artificial Sequence: Synthetic oligonucleotide
acugaacaguuagaaguac

SEQ ID NO: 2179032 - RNA, 19 nt, Artificial Sequence
  Description of Artificial Sequence: Synthetic oligonucleotide
aguuagaaguaccuuugaa

SEQ ID NO: 2179033 - RNA, 19 nt, Artificial Sequence
  Description of Artificial Sequence: Synthetic oligonucleotide
uaccuuugaagugagcacu

SEQ ID NO: 2179034 - RNA, 19 nt, Artificial Sequence
  Description of Artificial Sequence: Synthetic oligonucleotide
auauacaucuugagagaac

SEQ ID NO: 2179035 - RNA, 19 nt, Artificial Sequence
  Description of Artificial Sequence: Synthetic oligonucleotide
gagagcuauauggagggug

SEQ ID NO: 2179036 - RNA, 19 nt, Artificial Sequence
  Description of Artificial Sequence: Synthetic oligonucleotide
uauggagggugcucuguag

SEQ ID NO: 2179037 - RNA, 19 nt, Artificial Sequence
  Description of Artificial Sequence: Synthetic oligonucleotide
ugaugcacuggacuaucac

SEQ ID NO: 2179038 - RNA, 19 nt, Artificial Sequence
  Description of Artificial Sequence: Synthetic oligonucleotide
auggcauucacaacaaggu

SEQ ID NO: 2179039 - RNA, 19 nt, Artificial Sequence
  Description of Artificial Sequence: Synthetic oligonucleotide
agaguagacgaacuuggaa

SEQ ID NO: 2179040 - RNA, 19 nt, Artificial Sequence
  Description of Artificial Sequence: Synthetic oligonucleotide
gugagagcugcccagcacc

SEQ ID NO: 2179041 - RNA, 19 nt, Artificial Sequence
  Description of Artificial Sequence: Synthetic oligonucleotide
caucuugagagaacagaug

SEQ ID NO: 2179042 - RNA, 19 nt, Artificial Sequence
  Description of Artificial Sequence: Synthetic oligonucleotide
aagucucccuguaacaugu

SEQ ID NO: 2179043 - RNA, 19 nt, Artificial Sequence
  Description of Artificial Sequence: Synthetic oligonucleotide
ucaguugagggcuucccaa

SEQ ID NO: 2179044 - RNA, 19 nt, Artificial Sequence
  Description of Artificial Sequence: Synthetic oligonucleotide
acaguuagaaguaccuuug

SEQ ID NO: 2179045 - RNA, 19 nt, Artificial Sequence
  Description of Artificial Sequence: Synthetic oligonucleotide
ugaauaugacagccugcug

SEQ ID NO: 2179046 - RNA, 19 nt, Artificial Sequence
  Description of Artificial Sequence: Synthetic oligonucleotide
caaacaggaaagaguauga

SEQ ID NO: 2179047 - RNA, 19 nt, Artificial Sequence
  Description of Artificial Sequence: Synthetic oligonucleotide
auucacaacaaggugccca

SEQ ID NO: 2179048 - RNA, 19 nt, Artificial Sequence
  Description of Artificial Sequence: Synthetic oligonucleotide
acuggacuaucacaaacaa

SEQ ID NO: 2179049 - RNA, 19 nt, Artificial Sequence
  Description of Artificial Sequence: Synthetic oligonucleotide
uguaugacuuaaggaaugu

SEQ ID NO: 2179050 - RNA, 19 nt, Artificial Sequence
  Description of Artificial Sequence: Synthetic oligonucleotide
acacacagagaauuccaca

SEQ ID NO: 2179051 - RNA, 19 nt, Artificial Sequence
  Description of Artificial Sequence: Synthetic oligonucleotide
cugcaagcucccuuuagag

SEQ ID NO: 2179052 - RNA, 19 nt, Artificial Sequence
  Description of Artificial Sequence: Synthetic oligonucleotide
agccuuucacacuaaggca

SEQ ID NO: 2179053 - RNA, 19 nt, Artificial Sequence
  Description of Artificial Sequence: Synthetic oligonucleotide
ggagaggaugauuucuggg

SEQ ID NO: 2179054 - RNA, 19 nt, Artificial Sequence
  Description of Artificial Sequence: Synthetic oligonucleotide
ugggacuacaaaugagacu

SEQ ID NO: 2179055 - RNA, 19 nt, Artificial Sequence
  Description of Artificial Sequence: Synthetic oligonucleotide
aaguccccuugucacaaca

SEQ ID NO: 2179056 - RNA, 19 nt, Artificial Sequence
  Description of Artificial Sequence: Synthetic oligonucleotide
caugcaaacauauugucau

SEQ ID NO: 2179057 - RNA, 19 nt, Artificial Sequence
  Description of Artificial Sequence: Synthetic oligonucleotide
agucuuguuugagaacuuc

SEQ ID NO: 2179058 - RNA, 19 nt, Artificial Sequence
  Description of Artificial Sequence: Synthetic oligonucleotide
uucuuacaggccagcuggg

SEQ ID NO: 2179059 - RNA, 19 nt, Artificial Sequence
  Description of Artificial Sequence: Synthetic oligonucleotide
ugucaagaauggcuggauc

SEQ ID NO: 2179060 - RNA, 19 nt, Artificial Sequence
  Description of Artificial Sequence: Synthetic oligonucleotide
cuggacuaucacaaacaag

SEQ ID NO: 2179061 - RNA, 19 nt, Artificial Sequence
  Description of Artificial Sequence: Synthetic oligonucleotide
ucaggcugacccaagucuc

SEQ ID NO: 2179062 - RNA, 19 nt, Artificial Sequence
  Description of Artificial Sequence: Synthetic oligonucleotide
gcaugaauaugacagccug

SEQ ID NO: 2179063 - RNA, 19 nt, Artificial Sequence
  Description of Artificial Sequence: Synthetic oligonucleotide
ucccaaggugacaggaagc

SEQ ID NO: 2179064 - RNA, 19 nt, Artificial Sequence
  Description of Artificial Sequence: Synthetic oligonucleotide
uugcccaaacaggaaagag

SEQ ID NO: 2179065 - RNA, 19 nt, Artificial Sequence
  Description of Artificial Sequence: Synthetic oligonucleotide
guaccuuugaagugagcac

SEQ ID NO: 2179066 - RNA, 19 nt, Artificial Sequence
  Description of Artificial Sequence: Synthetic oligonucleotide
uggguaguccgcuucuuac

SEQ ID NO: 2179067 - RNA, 19 nt, Artificial Sequence
  Description of Artificial Sequence: Synthetic oligonucleotide
agagugagagcugcccagc

SEQ ID NO: 2179068 - RNA, 19 nt, Artificial Sequence
  Description of Artificial Sequence: Synthetic oligonucleotide
auggcugucagaaacuaga

SEQ ID NO: 2179069 - RNA, 19 nt, Artificial Sequence
  Description of Artificial Sequence: Synthetic oligonucleotide
uuugguugcagagggcugu

SEQ ID NO: 2179070 - RNA, 19 nt, Artificial Sequence
  Description of Artificial Sequence: Synthetic oligonucleotide
uacaucugcaaggaaugac

SEQ ID NO: 2179071 - RNA, 19 nt, Artificial Sequence
  Description of Artificial Sequence: Synthetic oligonucleotide
ggugcagacuucugcaggg

SEQ ID NO: 2179072 - RNA, 19 nt, Artificial Sequence
  Description of Artificial Sequence: Synthetic oligonucleotide
cucccaaggugacaggaag

SEQ ID NO: 2179073 - RNA, 19 nt, Artificial Sequence
  Description of Artificial Sequence: Synthetic oligonucleotide
cucacacaagagaucaguc

SEQ ID NO: 2179074 - RNA, 19 nt, Artificial Sequence
  Description of Artificial Sequence: Synthetic oligonucleotide
gaauggcaugaauaugaca

SEQ ID NO: 2179075 - RNA, 19 nt, Artificial Sequence
  Description of Artificial Sequence: Synthetic oligonucleotide
guuugcccaaacaggaaag

SEQ ID NO: 2179076 - RNA, 19 nt, Artificial Sequence
  Description of Artificial Sequence: Synthetic oligonucleotide
caaaugagacuccaggaaa

SEQ ID NO: 2179077 - RNA, 19 nt, Artificial Sequence
  Description of Artificial Sequence: Synthetic oligonucleotide
ggcuauggagucuuguuug

SEQ ID NO: 2179078 - RNA, 19 nt, Artificial Sequence
  Description of Artificial Sequence: Synthetic oligonucleotide
cacaagagaucagucagug

SEQ ID NO: 2179079 - RNA, 19 nt, Artificial Sequence
  Description of Artificial Sequence: Synthetic oligonucleotide
cacagcagaugaaggaaac

SEQ ID NO: 2179080 - RNA, 19 nt, Artificial Sequence
  Description of Artificial Sequence: Synthetic oligonucleotide
cacacagagaauuccacaa

SEQ ID NO: 2179081 - RNA, 19 nt, Artificial Sequence
  Description of Artificial Sequence: Synthetic oligonucleotide
gagaucagucagugcuugg

SEQ ID NO: 2179082 - RNA, 19 nt, Artificial Sequence
  Description of Artificial Sequence: Synthetic oligonucleotide
aacaauggagaggaugauu

SEQ ID NO: 2179083 - RNA, 19 nt, Artificial Sequence
  Description of Artificial Sequence: Synthetic oligonucleotide
gguaguccgcuucuuacag

SEQ ID NO: 2179084 - RNA, 19 nt, Artificial Sequence
  Description of Artificial Sequence: Synthetic oligonucleotide
cagacaucagccuuucaca

SEQ ID NO: 2179085 - RNA, 19 nt, Artificial Sequence
  Description of Artificial Sequence: Synthetic oligonucleotide
caagaauggcuggaucugg

SEQ ID NO: 2179086 - RNA, 19 nt, Artificial Sequence
  Description of Artificial Sequence: Synthetic oligonucleotide
cacacuaaggcagagagcu

SEQ ID NO: 2179087 - RNA, 19 nt, Artificial Sequence
  Description of Artificial Sequence: Synthetic oligonucleotide
acaacacauucuguaugac

SEQ ID NO: 2179088 - RNA, 19 nt, Artificial Sequence
  Description of Artificial Sequence: Synthetic oligonucleotide
guaugagagaugcccucag

SEQ ID NO: 2179089 - RNA, 19 nt, Artificial Sequence
  Description of Artificial Sequence: Synthetic oligonucleotide
gaacacacagagaauucca

SEQ ID NO: 2179090 - RNA, 19 nt, Artificial Sequence
  Description of Artificial Sequence: Synthetic oligonucleotide
ggaaugucuuuauguacag

SEQ ID NO: 2179091 - RNA, 19 nt, Artificial Sequence
  Description of Artificial Sequence: Synthetic oligonucleotide
gucaagaauggcuggaucu

SEQ ID NO: 2179092 - RNA, 19 nt, Artificial Sequence
  Description of Artificial Sequence: Synthetic oligonucleotide
agugcuuggcuggcuaugg

SEQ ID NO: 2179093 - RNA, 19 nt, Artificial Sequence
  Description of Artificial Sequence: Synthetic oligonucleotide
uugucacaacacauucugu

SEQ ID NO: 2179094 - RNA, 19 nt, Artificial Sequence
  Description of Artificial Sequence: Synthetic oligonucleotide
aggcucacacaagagauca

SEQ ID NO: 2179095 - RNA, 19 nt, Artificial Sequence
  Description of Artificial Sequence: Synthetic oligonucleotide
ugcaagcucacagauuuau

SEQ ID NO: 2179096 - RNA, 19 nt, Artificial Sequence
  Description of Artificial Sequence: Synthetic oligonucleotide
cugaaagucaacagcaagu

SEQ ID NO: 2179097 - RNA, 19 nt, Artificial Sequence
  Description of Artificial Sequence: Synthetic oligonucleotide
cagaugaaggaaacccaug

SEQ ID NO: 2179098 - RNA, 19 nt, Artificial Sequence
  Description of Artificial Sequence: Synthetic oligonucleotide
ugacuggugaagacauccu

SEQ ID NO: 2179099 - RNA, 19 nt, Artificial Sequence
  Description of Artificial Sequence: Synthetic oligonucleotide
caagugaggugggaggugc

SEQ ID NO: 2179100 - RNA, 19 nt, Artificial Sequence
  Description of Artificial Sequence: Synthetic oligonucleotide
gaguaugagagaugcccuc

SEQ ID NO: 2179101 - RNA, 19 nt, Artificial Sequence
  Description of Artificial Sequence: Synthetic oligonucleotide
acuuggaacuauauagccu

SEQ ID NO: 2179102 - RNA, 19 nt, Artificial Sequence
  Description of Artificial Sequence: Synthetic oligonucleotide
uccccuugucacaacacau

SEQ ID NO: 2179103 - RNA, 19 nt, Artificial Sequence
  Description of Artificial Sequence: Synthetic oligonucleotide
gaugucaagaauggcugga

SEQ ID NO: 2179104 - RNA, 19 nt, Artificial Sequence
  Description of Artificial Sequence: Synthetic oligonucleotide
cucccuuuagagugagagc

SEQ ID NO: 2179105 - RNA, 19 nt, Artificial Sequence
  Description of Artificial Sequence: Synthetic oligonucleotide
acgaacuuggaacuauaua

SEQ ID NO: 2179106 - RNA, 19 nt, Artificial Sequence
  Description of Artificial Sequence: Synthetic oligonucleotide
uugucaucaggcugaccca

SEQ ID NO: 2179107 - RNA, 19 nt, Artificial Sequence
  Description of Artificial Sequence: Synthetic oligonucleotide
agacauccuccuccaagag

SEQ ID NO: 2179108 - RNA, 19 nt, Artificial Sequence
  Description of Artificial Sequence: Synthetic oligonucleotide
cacuggacuaucacaaaca

SEQ ID NO: 2179109 - RNA, 19 nt, Artificial Sequence
  Description of Artificial Sequence: Synthetic oligonucleotide
guaguccgcuucuuacagg

SEQ ID NO: 2179110 - RNA, 19 nt, Artificial Sequence
  Description of Artificial Sequence: Synthetic oligonucleotide
uaaguacaucugcaaggaa

SEQ ID NO: 2179111 - RNA, 19 nt, Artificial Sequence
  Description of Artificial Sequence: Synthetic oligonucleotide
cucuaaggagggcacauca

SEQ ID NO: 2179112 - RNA, 19 nt, Artificial Sequence
  Description of Artificial Sequence: Synthetic oligonucleotide
agaaaagugguagcauggu

SEQ ID NO: 2179113 - RNA, 19 nt, Artificial Sequence
  Description of Artificial Sequence: Synthetic oligonucleotide
uuggaacuauauagccucu

SEQ ID NO: 2179114 - RNA, 19 nt, Artificial Sequence
  Description of Artificial Sequence: Synthetic oligonucleotide
caucaggcucacacaagag

SEQ ID NO: 2179115 - RNA, 19 nt, Artificial Sequence
  Description of Artificial Sequence: Synthetic oligonucleotide
uuucacacuaaggcagaga

SEQ ID NO: 2179116 - RNA, 19 nt, Artificial Sequence
  Description of Artificial Sequence: Synthetic oligonucleotide
aguaugagagaugcccuca

SEQ ID NO: 2179117 - RNA, 19 nt, Artificial Sequence
  Description of Artificial Sequence: Synthetic oligonucleotide
gcaaacauauugucaucag

SEQ ID NO: 2179118 - RNA, 19 nt, Artificial Sequence
  Description of Artificial Sequence: Synthetic oligonucleotide
gaaaaguuaagagcugggu

SEQ ID NO: 2179119 - RNA, 19 nt, Artificial Sequence
  Description of Artificial Sequence: Synthetic oligonucleotide
agagaucagucagugcuug

SEQ ID NO: 2179120 - RNA, 19 nt, Artificial Sequence
  Description of Artificial Sequence: Synthetic oligonucleotide
agcugugggacuacaaaug

SEQ ID NO: 2179121 - RNA, 19 nt, Artificial Sequence
  Description of Artificial Sequence: Synthetic oligonucleotide
cuucaugcaagcucacaga

SEQ ID NO: 2179122 - RNA, 19 nt, Artificial Sequence
  Description of Artificial Sequence: Synthetic oligonucleotide
uugugaacacacagagaau

SEQ ID NO: 2179123 - RNA, 19 nt, Artificial Sequence
  Description of Artificial Sequence: Synthetic oligonucleotide
uaucacaaacaagcacagc

SEQ ID NO: 2179124 - RNA, 19 nt, Artificial Sequence
  Description of Artificial Sequence: Synthetic oligonucleotide
agaguaugagagaugcccu

SEQ ID NO: 2179125 - RNA, 19 nt, Artificial Sequence
  Description of Artificial Sequence: Synthetic oligonucleotide
cagaugcccaaugucaaug

SEQ ID NO: 2179126 - RNA, 19 nt, Artificial Sequence
  Description of Artificial Sequence: Synthetic oligonucleotide
uggcugucagaaacuagaa

SEQ ID NO: 2179127 - RNA, 19 nt, Artificial Sequence
  Description of Artificial Sequence: Synthetic oligonucleotide
auauagccucuaaggaggg

SEQ ID NO: 2179128 - RNA, 19 nt, Artificial Sequence
  Description of Artificial Sequence: Synthetic oligonucleotide
cagaaacuagaacaaugga

SEQ ID NO: 2179129 - RNA, 19 nt, Artificial Sequence
  Description of Artificial Sequence: Synthetic oligonucleotide
gacuacaaaugagacucca

SEQ ID NO: 2179130 - RNA, 19 nt, Artificial Sequence
  Description of Artificial Sequence: Synthetic oligonucleotide
acccaugcaaacauauugu

SEQ ID NO: 2179131 - RNA, 19 nt, Artificial Sequence
  Description of Artificial Sequence: Synthetic oligonucleotide
ugagaacuucaugcaagcu

SEQ ID NO: 2179132 - RNA, 19 nt, Artificial Sequence
  Description of Artificial Sequence: Synthetic oligonucleotide
ucuuacaggccagcugggc

SEQ ID NO: 2179133 - RNA, 19 nt, Artificial Sequence
  Description of Artificial Sequence: Synthetic oligonucleotide
gaugcccaaugucaaugga

SEQ ID NO: 2179134 - RNA, 19 nt, Artificial Sequence
  Description of Artificial Sequence: Synthetic oligonucleotide
gguagcauggugaauggca

SEQ ID NO: 2179135 - RNA, 19 nt, Artificial Sequence
  Description of Artificial Sequence: Synthetic oligonucleotide
cacaucaggcucacacaag

SEQ ID NO: 2179136 - RNA, 19 nt, Artificial Sequence
  Description of Artificial Sequence: Synthetic oligonucleotide
ggugacaggaagccucucc

SEQ ID NO: 2179137 - RNA, 19 nt, Artificial Sequence
  Description of Artificial Sequence: Synthetic oligonucleotide
gcauucacaacaaggugcc

SEQ ID NO: 2179138 - RNA, 19 nt, Artificial Sequence
  Description of Artificial Sequence: Synthetic oligonucleotide
uagacgaacuuggaacuau

SEQ ID NO: 2179139 - RNA, 19 nt, Artificial Sequence
  Description of Artificial Sequence: Synthetic oligonucleotide
gggcacaucaggcucacac

SEQ ID NO: 2179140 - RNA, 19 nt, Artificial Sequence
  Description of Artificial Sequence: Synthetic oligonucleotide
augcacuggacuaucacaa

SEQ ID NO: 2179141 - RNA, 19 nt, Artificial Sequence
  Description of Artificial Sequence: Synthetic oligonucleotide
cuauggagucuuguuugag

SEQ ID NO: 2179142 - RNA, 19 nt, Artificial Sequence
  Description of Artificial Sequence: Synthetic oligonucleotide
aggcugacccaagucuccc

SEQ ID NO: 2179143 - RNA, 19 nt, Artificial Sequence
  Description of Artificial Sequence: Synthetic oligonucleotide
guuaagagcuggguuguga

SEQ ID NO: 2179144 - RNA, 19 nt, Artificial Sequence
  Description of Artificial Sequence: Synthetic oligonucleotide
guccgcuucuuacaggcca

SEQ ID NO: 2179145 - RNA, 19 nt, Artificial Sequence
  Description of Artificial Sequence: Synthetic oligonucleotide
acaaggugcccaagucccc

SEQ ID NO: 2179146 - RNA, 19 nt, Artificial Sequence
  Description of Artificial Sequence: Synthetic oligonucleotide
aggugggaggugcagacuu

SEQ ID NO: 2179147 - RNA, 19 nt, Artificial Sequence
  Description of Artificial Sequence: Synthetic oligonucleotide
gagggugcucuguagccuc

SEQ ID NO: 2179148 - RNA, 19 nt, Artificial Sequence
  Description of Artificial Sequence: Synthetic oligonucleotide
uuggguaguccgcuucuua

SEQ ID NO: 2179149 - RNA, 19 nt, Artificial Sequence
  Description of Artificial Sequence: Synthetic oligonucleotide
ccuggaaaagcugugggac

SEQ ID NO: 2179150 - RNA, 19 nt, Artificial Sequence
  Description of Artificial Sequence: Synthetic oligonucleotide
ccuguaacaugucaguuga

SEQ ID NO: 2179151 - RNA, 19 nt, Artificial Sequence
  Description of Artificial Sequence: Synthetic oligonucleotide
aguccccuugucacaacac

SEQ ID NO: 2179152 - RNA, 19 nt, Artificial Sequence
  Description of Artificial Sequence: Synthetic oligonucleotide
gaucagucagugcuuggcu

SEQ ID NO: 2179153 - RNA, 19 nt, Artificial Sequence
  Description of Artificial Sequence: Synthetic oligonucleotide
caaguuugggacugaaagu

SEQ ID NO: 2179154 - RNA, 19 nt, Artificial Sequence
  Description of Artificial Sequence: Synthetic oligonucleotide
uauagccucuaaggagggc

SEQ ID NO: 2179155 - RNA, 19 nt, Artificial Sequence
  Description of Artificial Sequence: Synthetic oligonucleotide
gcuucuuacaggccagcug

SEQ ID NO: 2179156 - RNA, 19 nt, Artificial Sequence
  Description of Artificial Sequence: Synthetic oligonucleotide
aagagaucagucagugcuu

SEQ ID NO: 2179157 - RNA, 19 nt, Artificial Sequence
  Description of Artificial Sequence: Synthetic oligonucleotide
gcacuggacuaucacaaac

SEQ ID NO: 2179158 - RNA, 19 nt, Artificial Sequence
  Description of Artificial Sequence: Synthetic oligonucleotide
caacagcaagugagguggg

SEQ ID NO: 2179159 - RNA, 19 nt, Artificial Sequence
  Description of Artificial Sequence: Synthetic oligonucleotide
cccagcacccucaaguuug

SEQ ID NO: 2179160 - RNA, 19 nt, Artificial Sequence
  Description of Artificial Sequence: Synthetic oligonucleotide
ccaguuugcccaaacagga

SEQ ID NO: 2179161 - RNA, 19 nt, Artificial Sequence
  Description of Artificial Sequence: Synthetic oligonucleotide
aagcucccuuuagagugag

SEQ ID NO: 2179162 - RNA, 19 nt, Artificial Sequence
  Description of Artificial Sequence: Synthetic oligonucleotide
ggaacuauauagccucuaa

SEQ ID NO: 2179163 - RNA, 19 nt, Artificial Sequence
  Description of Artificial Sequence: Synthetic oligonucleotide
guaugacuuaaggaauguc

SEQ ID NO: 2179164 - RNA, 19 nt, Artificial Sequence
  Description of Artificial Sequence: Synthetic oligonucleotide
gucucccuguaacauguca

SEQ ID NO: 2179165 - RNA, 19 nt, Artificial Sequence
  Description of Artificial Sequence: Synthetic oligonucleotide
gucaguugagggcuuccca

SEQ ID NO: 2179166 - RNA, 19 nt, Artificial Sequence
  Description of Artificial Sequence: Synthetic oligonucleotide
cccuguaacaugucaguug

SEQ ID NO: 2179167 - RNA, 19 nt, Artificial Sequence
  Description of Artificial Sequence: Synthetic oligonucleotide
aaacccaugcaaacauauu

SEQ ID NO: 2179168 - RNA, 19 nt, Artificial Sequence
  Description of Artificial Sequence: Synthetic oligonucleotide
acaauggcauucacaacaa

SEQ ID NO: 2179169 - RNA, 19 nt, Artificial Sequence
  Description of Artificial Sequence: Synthetic oligonucleotide
caggcucacacaagagauc

SEQ ID NO: 2179170 - RNA, 19 nt, Artificial Sequence
  Description of Artificial Sequence: Synthetic oligonucleotide
ucagugcuuggcuggcuau

SEQ ID NO: 2179171 - RNA, 19 nt, Artificial Sequence
  Description of Artificial Sequence: Synthetic oligonucleotide
guccccuugucacaacaca

SEQ ID NO: 2179172 - RNA, 19 nt, Artificial Sequence
  Description of Artificial Sequence: Synthetic oligonucleotide
gucacaacacauucuguau

SEQ ID NO: 2179173 - RNA, 19 nt, Artificial Sequence
  Description of Artificial Sequence: Synthetic oligonucleotide
ugguagcauggugaauggc

SEQ ID NO: 2179174 - RNA, 19 nt, Artificial Sequence
  Description of Artificial Sequence: Synthetic oligonucleotide
agguuugguugcagagggc

SEQ ID NO: 2179175 - RNA, 19 nt, Artificial Sequence
  Description of Artificial Sequence: Synthetic oligonucleotide
gacaucagccuuucacacu

SEQ ID NO: 2179176 - RNA, 19 nt, Artificial Sequence
  Description of Artificial Sequence: Synthetic oligonucleotide
aguccgcuucuuacaggcc

SEQ ID NO: 2179177 - RNA, 19 nt, Artificial Sequence
  Description of Artificial Sequence: Synthetic oligonucleotide
gagugagagcugcccagca

SEQ ID NO: 2179178 - RNA, 19 nt, Artificial Sequence
  Description of Artificial Sequence: Synthetic oligonucleotide
ucacaacaaggugcccaag

SEQ ID NO: 2179179 - RNA, 19 nt, Artificial Sequence
  Description of Artificial Sequence: Synthetic oligonucleotide
ccaugcaaacauauuguca

SEQ ID NO: 2179180 - RNA, 19 nt, Artificial Sequence
  Description of Artificial Sequence: Synthetic oligonucleotide
uggaacuauauagccucua

SEQ ID NO: 2179181 - RNA, 19 nt, Artificial Sequence
  Description of Artificial Sequence: Synthetic oligonucleotide
cuuugaagugagcacugcu

SEQ ID NO: 2179182 - RNA, 19 nt, Artificial Sequence
  Description of Artificial Sequence: Synthetic oligonucleotide
augcccaaugucaauggaa

SEQ ID NO: 2179183 - RNA, 19 nt, Artificial Sequence
  Description of Artificial Sequence: Synthetic oligonucleotide
aggcagagagcuauaugga

SEQ ID NO: 2179184 - RNA, 19 nt, Artificial Sequence
  Description of Artificial Sequence: Synthetic oligonucleotide
guagcagguuugguugcag

SEQ ID NO: 2179185 - RNA, 19 nt, Artificial Sequence
  Description of Artificial Sequence: Synthetic oligonucleotide
augucaagaauggcuggau

SEQ ID NO: 2179186 - RNA, 19 nt, Artificial Sequence
  Description of Artificial Sequence: Synthetic oligonucleotide
cagaguagacgaacuugga

SEQ ID NO: 2179187 - RNA, 19 nt, Artificial Sequence
  Description of Artificial Sequence: Synthetic oligonucleotide
gcaaggaaugacagcagac

SEQ ID NO: 2179188 - RNA, 19 nt, Artificial Sequence
  Description of Artificial Sequence: Synthetic oligonucleotide
caguuagaaguaccuuuga

SEQ ID NO: 2179189 - RNA, 19 nt, Artificial Sequence
  Description of Artificial Sequence: Synthetic oligonucleotide
cccaugcaaacauauuguc

SEQ ID NO: 2179190 - RNA, 19 nt, Artificial Sequence
  Description of Artificial Sequence: Synthetic oligonucleotide
ucccuguaacaugucaguu

SEQ ID NO: 2179191 - RNA, 19 nt, Artificial Sequence
  Description of Artificial Sequence: Synthetic oligonucleotide
cccuugucacaacacauuc

SEQ ID NO: 2179192 - RNA, 19 nt, Artificial Sequence
  Description of Artificial Sequence: Synthetic oligonucleotide
caagcucccuuuagaguga

SEQ ID NO: 2179193 - RNA, 19 nt, Artificial Sequence
  Description of Artificial Sequence: Synthetic oligonucleotide
gcccaaguccccuugucac

SEQ ID NO: 2179194 - RNA, 19 nt, Artificial Sequence
  Description of Artificial Sequence: Synthetic oligonucleotide
auucaggaacugaugucaa

SEQ ID NO: 2179195 - RNA, 19 nt, Artificial Sequence
  Description of Artificial Sequence: Synthetic oligonucleotide
cauucacaacaaggugccc

SEQ ID NO: 2179196 - RNA, 19 nt, Artificial Sequence
  Description of Artificial Sequence: Synthetic oligonucleotide
aguuaagagcuggguugug

SEQ ID NO: 2179197 - RNA, 19 nt, Artificial Sequence
  Description of Artificial Sequence: Synthetic oligonucleotide
agggugcucuguagccucc

SEQ ID NO: 2179198 - RNA, 19 nt, Artificial Sequence
  Description of Artificial Sequence: Synthetic oligonucleotide
cacaacaaggugcccaagu

SEQ ID NO: 2179199 - RNA, 19 nt, Artificial Sequence
  Description of Artificial Sequence: Synthetic oligonucleotide
gcuauggagucuuguuuga

SEQ ID NO: 2179200 - RNA, 19 nt, Artificial Sequence
  Description of Artificial Sequence: Synthetic oligonucleotide
gaacuucaugcaagcucac

SEQ ID NO: 2179201 - RNA, 19 nt, Artificial Sequence
  Description of Artificial Sequence: Synthetic oligonucleotide
gucaucaggcugacccaag

SEQ ID NO: 2179202 - RNA, 19 nt, Artificial Sequence
  Description of Artificial Sequence: Synthetic oligonucleotide
cugaugcacuggacuauca

SEQ ID NO: 2179203 - RNA, 19 nt, Artificial Sequence
  Description of Artificial Sequence: Synthetic oligonucleotide
ggacuaucacaaacaagca

SEQ ID NO: 2179204 - RNA, 19 nt, Artificial Sequence
  Description of Artificial Sequence: Synthetic oligonucleotide
cagcagacaggguugggua

SEQ ID NO: 2179205 - RNA, 19 nt, Artificial Sequence
  Description of Artificial Sequence: Synthetic oligonucleotide
gcuacauucaggaacugau

SEQ ID NO: 2179206 - RNA, 19 nt, Artificial Sequence
  Description of Artificial Sequence: Synthetic oligonucleotide
gacccaagucucccuguaa

SEQ ID NO: 2179207 - RNA, 19 nt, Artificial Sequence
  Description of Artificial Sequence: Synthetic oligonucleotide
ggguaguccgcuucuuaca

SEQ ID NO: 2179208 - RNA, 19 nt, Artificial Sequence
  Description of Artificial Sequence: Synthetic oligonucleotide
gaaugucuuuauguacagu

SEQ ID NO: 2179209 - RNA, 19 nt, Artificial Sequence
  Description of Artificial Sequence: Synthetic oligonucleotide
cagucagugcuuggcuggc

SEQ ID NO: 2179210 - RNA, 19 nt, Artificial Sequence
  Description of Artificial Sequence: Synthetic oligonucleotide
cucccuguaacaugucagu

SEQ ID NO: 2179211 - RNA, 19 nt, Artificial Sequence
  Description of Artificial Sequence: Synthetic oligonucleotide
cugcucccaaggugacagg

SEQ ID NO: 2179212 - RNA, 19 nt, Artificial Sequence
  Description of Artificial Sequence: Synthetic oligonucleotide
agagagcuauauggagggu

SEQ ID NO: 2179213 - RNA, 19 nt, Artificial Sequence
  Description of Artificial Sequence: Synthetic oligonucleotide
cucacagauuuaugucaaa

SEQ ID NO: 2179214 - RNA, 19 nt, Artificial Sequence
  Description of Artificial Sequence: Synthetic oligonucleotide
gaacaguuagaaguaccuu

SEQ ID NO: 2179215 - RNA, 19 nt, Artificial Sequence
  Description of Artificial Sequence: Synthetic oligonucleotide
caguuugcccaaacaggaa

SEQ ID NO: 2179216 - RNA, 19 nt, Artificial Sequence
  Description of Artificial Sequence: Synthetic oligonucleotide
caaguccccuugucacaac

SEQ ID NO: 2179217 - RNA, 19 nt, Artificial Sequence
  Description of Artificial Sequence: Synthetic oligonucleotide
guagcauggugaauggcau

SEQ ID NO: 2179218 - RNA, 19 nt, Artificial Sequence
  Description of Artificial Sequence: Synthetic oligonucleotide
gcuauauggagggugcucu

SEQ ID NO: 2179219 - RNA, 19 nt, Artificial Sequence
  Description of Artificial Sequence: Synthetic oligonucleotide
gacgaacuuggaacuauau

SEQ ID NO: 2179220 - RNA, 19 nt, Artificial Sequence
  Description of Artificial Sequence: Synthetic oligonucleotide
aggucagacaucagccuuu

SEQ ID NO: 2179221 - RNA, 19 nt, Artificial Sequence
  Description of Artificial Sequence: Synthetic oligonucleotide
cauccuccuccaagagguc

SEQ ID NO: 2179222 - RNA, 19 nt, Artificial Sequence
  Description of Artificial Sequence: Synthetic oligonucleotide
gguugugaacacacagaga

SEQ ID NO: 2179223 - RNA, 19 nt, Artificial Sequence
  Description of Artificial Sequence: Synthetic oligonucleotide
agacgaacuuggaacuaua

SEQ ID NO: 2179224 - RNA, 19 nt, Artificial Sequence
  Description of Artificial Sequence: Synthetic oligonucleotide
guagacgaacuuggaacua

SEQ ID NO: 2179225 - RNA, 19 nt, Artificial Sequence
  Description of Artificial Sequence: Synthetic oligonucleotide
ggaggccacuggaugacug

SEQ ID NO: 2179226 - RNA, 19 nt, Artificial Sequence
  Description of Artificial Sequence: Synthetic oligonucleotide
uggaggccacuggaugacu

SEQ ID NO: 2179227 - RNA, 19 nt, Artificial Sequence
  Description of Artificial Sequence: Synthetic oligonucleotide
gagggcacaucaggcucac

SEQ ID NO: 2179228 - RNA, 19 nt, Artificial Sequence
  Description of Artificial Sequence: Synthetic oligonucleotide
gcucacagauuuaugucaa

SEQ ID NO: 2179229 - RNA, 19 nt, Artificial Sequence
  Description of Artificial Sequence: Synthetic oligonucleotide
ggaaaagcugugggacuac

SEQ ID NO: 2179230 - RNA, 19 nt, Artificial Sequence
  Description of Artificial Sequence: Synthetic oligonucleotide
acuaaggcagagagcuaua

SEQ ID NO: 2179231 - RNA, 19 nt, Artificial Sequence
  Description of Artificial Sequence: Synthetic oligonucleotide
ggguuggguaguccgcuuc

SEQ ID NO: 2179232 - RNA, 19 nt, Artificial Sequence
  Description of Artificial Sequence: Synthetic oligonucleotide
agccucuaaggagggcaca

SEQ ID NO: 2179233 - RNA, 19 nt, Artificial Sequence
  Description of Artificial Sequence: Synthetic oligonucleotide
agucagugcuuggcuggcu

SEQ ID NO: 2179234 - RNA, 19 nt, Artificial Sequence
  Description of Artificial Sequence: Synthetic oligonucleotide
cuggcuauggagucuuguu

SEQ ID NO: 2179235 - RNA, 19 nt, Artificial Sequence
  Description of Artificial Sequence: Synthetic oligonucleotide
gcugaugcacuggacuauc

SEQ ID NO: 2179236 - RNA, 19 nt, Artificial Sequence
  Description of Artificial Sequence: Synthetic oligonucleotide
gcucacacaagagaucagu

SEQ ID NO: 2179237 - RNA, 19 nt, Artificial Sequence
  Description of Artificial Sequence: Synthetic oligonucleotide
gaucuggaggccacuggau

SEQ ID NO: 2179238 - RNA, 19 nt, Artificial Sequence
  Description of Artificial Sequence: Synthetic oligonucleotide
cuaaggcagagagcuauau

SEQ ID NO: 2179239 - RNA, 19 nt, Artificial Sequence
  Description of Artificial Sequence: Synthetic oligonucleotide
gcaagugaggugggaggug

SEQ ID NO: 2179240 - RNA, 19 nt, Artificial Sequence
  Description of Artificial Sequence: Synthetic oligonucleotide
cccuggaaaagcuguggga

SEQ ID NO: 2179241 - RNA, 19 nt, Artificial Sequence
  Description of Artificial Sequence: Synthetic oligonucleotide
ggucagacaucagccuuuc

SEQ ID NO: 2179242 - RNA, 19 nt, Artificial Sequence
  Description of Artificial Sequence: Synthetic oligonucleotide
gcccucagaguagacgaac

SEQ ID NO: 2179243 - RNA, 19 nt, Artificial Sequence
  Description of Artificial Sequence: Synthetic oligonucleotide
gcccaaugucaauggaaaa

SEQ ID NO: 2179244 - RNA, 19 nt, Artificial Sequence
  Description of Artificial Sequence: Synthetic oligonucleotide
gguuggguaguccgcuucu

SEQ ID NO: 2179245 - RNA, 19 nt, Artificial Sequence
  Description of Artificial Sequence: Synthetic oligonucleotide
gcagaugaaggaaacccau

SEQ ID NO: 2179246 - RNA, 19 nt, Artificial Sequence
  Description of Artificial Sequence: Synthetic oligonucleotide
ggcaugaauaugacagccu

SEQ ID NO: 2179247 - RNA, 19 nt, Artificial Sequence
  Description of Artificial Sequence: Synthetic oligonucleotide
cacccucaaguuugggacu

SEQ ID NO: 2179248 - RNA, 19 nt, Artificial Sequence
  Description of Artificial Sequence: Synthetic oligonucleotide
gugggaggugcagacuucu

SEQ ID NO: 2179249 - RNA, 19 nt, Artificial Sequence
  Description of Artificial Sequence: Synthetic oligonucleotide
caguugagggcuucccaau

SEQ ID NO: 2179250 - RNA, 19 nt, Artificial Sequence
  Description of Artificial Sequence: Synthetic oligonucleotide
gaaugacagcagacagggu

SEQ ID NO: 2179251 - RNA, 19 nt, Artificial Sequence
  Description of Artificial Sequence: Synthetic oligonucleotide
ccuugucacaacacauucu

SEQ ID NO: 2179252 - RNA, 19 nt, Artificial Sequence
  Description of Artificial Sequence: Synthetic oligonucleotide
gcuggguugugaacacaca

SEQ ID NO: 2179253 - RNA, 19 nt, Artificial Sequence
  Description of Artificial Sequence: Synthetic oligonucleotide
cccaaguccccuugucaca

SEQ ID NO: 2179254 - RNA, 19 nt, Artificial Sequence
  Description of Artificial Sequence: Synthetic oligonucleotide
ggcuggaucuggaggccac

SEQ ID NO: 2179255 - RNA, 19 nt, Artificial Sequence
  Description of Artificial Sequence: Synthetic oligonucleotide
augcaagcucacagauuua

SEQ ID NO: 2179256 - RNA, 19 nt, Artificial Sequence
  Description of Artificial Sequence: Synthetic oligonucleotide
gaggugggaggugcagacu

SEQ ID NO: 2179257 - RNA, 19 nt, Artificial Sequence
  Description of Artificial Sequence: Synthetic oligonucleotide
cuagaacaauggagaggau

SEQ ID NO: 2179258 - RNA, 19 nt, Artificial Sequence
  Description of Artificial Sequence: Synthetic oligonucleotide
ccaaguccccuugucacaa

SEQ ID NO: 2179259 - RNA, 19 nt, Artificial Sequence
  Description of Artificial Sequence: Synthetic oligonucleotide
agcugggccugggcuacau

SEQ ID NO: 2179260 - RNA, 19 nt, Artificial Sequence
  Description of Artificial Sequence: Synthetic oligonucleotide
ccucuaaggagggcacauc

SEQ ID NO: 2179261 - RNA, 19 nt, Artificial Sequence
  Description of Artificial Sequence: Synthetic oligonucleotide
cacugcucccaaggugaca

SEQ ID NO: 2179262 - RNA, 19 nt, Artificial Sequence
  Description of Artificial Sequence: Synthetic oligonucleotide
gggugcucuguagccuccc

SEQ ID NO: 2179263 - RNA, 19 nt, Artificial Sequence
  Description of Artificial Sequence: Synthetic oligonucleotide
cccucagaguagacgaacu

SEQ ID NO: 2179264 - RNA, 19 nt, Artificial Sequence
  Description of Artificial Sequence: Synthetic oligonucleotide
gcucccaaggugacaggaa

SEQ ID NO: 2179265 - RNA, 19 nt, Artificial Sequence
  Description of Artificial Sequence: Synthetic oligonucleotide
ggugcccaaguccccuugu

SEQ ID NO: 2179266 - RNA, 19 nt, Artificial Sequence
  Description of Artificial Sequence: Synthetic oligonucleotide
gcuggcuauggagucuugu

SEQ ID NO: 2179267 - RNA, 19 nt, Artificial Sequence
  Description of Artificial Sequence: Synthetic oligonucleotide
gcacugcucccaaggugac

SEQ ID NO: 2179268 - RNA, 19 nt, Artificial Sequence
  Description of Artificial Sequence: Synthetic oligonucleotide
ccgcuucuuacaggccagc

SEQ ID NO: 2179269 - RNA, 19 nt, Artificial Sequence
  Description of Artificial Sequence: Synthetic oligonucleotide
guuggguaguccgcuucuu

SEQ ID NO: 2179270 - RNA, 19 nt, Artificial Sequence
  Description of Artificial Sequence: Synthetic oligonucleotide
gccucuaaggagggcacau

SEQ ID NO: 2179271 - RNA, 19 nt, Artificial Sequence
  Description of Artificial Sequence: Synthetic oligonucleotide
ccaaggugacaggaagccu

SEQ ID NO: 2179272 - RNA, 19 nt, Artificial Sequence
  Description of Artificial Sequence: Synthetic oligonucleotide
auaaauacccauucugugc

SEQ ID NO: 2179273 - RNA, 19 nt, Artificial Sequence
  Description of Artificial Sequence: Synthetic oligonucleotide
uguaaucuugucauucugg

SEQ ID NO: 2179274 - RNA, 19 nt, Artificial Sequence
  Description of Artificial Sequence: Synthetic oligonucleotide
aacuguguaaucuugucau

SEQ ID NO: 2179275 - RNA, 19 nt, Artificial Sequence
  Description of Artificial Sequence: Synthetic oligonucleotide
uccucauacaaacggagag

SEQ ID NO: 2179276 - RNA, 19 nt, Artificial Sequence
  Description of Artificial Sequence: Synthetic oligonucleotide
ugcuguacagcccaagcag

SEQ ID NO: 2179277 - RNA, 19 nt, Artificial Sequence
  Description of Artificial Sequence: Synthetic oligonucleotide
uugucauucugguaggcag

SEQ ID NO: 2179278 - RNA, 19 nt, Artificial Sequence
  Description of Artificial Sequence: Synthetic oligonucleotide
uucacgugcaggcggaggg

SEQ ID NO: 2179279 - RNA, 19 nt, Artificial Sequence
  Description of Artificial Sequence: Synthetic oligonucleotide
uugucgaucuucaacugug

SEQ ID NO: 2179280 - RNA, 19 nt, Artificial Sequence
  Description of Artificial Sequence: Synthetic oligonucleotide
accgggaucugguaggggc

SEQ ID NO: 2179281 - RNA, 19 nt, Artificial Sequence
  Description of Artificial Sequence: Synthetic oligonucleotide
ucggguucggucaagcgag

SEQ ID NO: 2179282 - RNA, 19 nt, Artificial Sequence
  Description of Artificial Sequence: Synthetic oligonucleotide
aaugggcuccgugauaggg

SEQ ID NO: 2179283 - RNA, 19 nt, Artificial Sequence
  Description of Artificial Sequence: Synthetic oligonucleotide
aaggcuucuccucggcucg

SEQ ID NO: 2179284 - RNA, 19 nt, Artificial Sequence
  Description of Artificial Sequence: Synthetic oligonucleotide
ucauacaaacggagagucg

SEQ ID NO: 2179285 - RNA, 19 nt, Artificial Sequence
  Description of Artificial Sequence: Synthetic oligonucleotide
aacggguuguugucgaucu

SEQ ID NO: 2179286 - RNA, 19 nt, Artificial Sequence
  Description of Artificial Sequence: Synthetic oligonucleotide
agggcggagguucacgugc

SEQ ID NO: 2179287 - RNA, 19 nt, Artificial Sequence
  Description of Artificial Sequence: Synthetic oligonucleotide
cuaggugggauggugaccg

SEQ ID NO: 2179288 - RNA, 19 nt, Artificial Sequence
  Description of Artificial Sequence: Synthetic oligonucleotide
aaacgggccguccccaccg

SEQ ID NO: 2179289 - RNA, 19 nt, Artificial Sequence
  Description of Artificial Sequence: Synthetic oligonucleotide
caguguuccucauacaaac

SEQ ID NO: 2179290 - RNA, 19 nt, Artificial Sequence
  Description of Artificial Sequence: Synthetic oligonucleotide
ugugcuguacagcccaagc

SEQ ID NO: 2179291 - RNA, 19 nt, Artificial Sequence
  Description of Artificial Sequence: Synthetic oligonucleotide
agcuccgcaggccaaacgg

SEQ ID NO: 2179292 - RNA, 19 nt, Artificial Sequence
  Description of Artificial Sequence: Synthetic oligonucleotide
uccgcagcuagcccggugg

SEQ ID NO: 2179293 - RNA, 19 nt, Artificial Sequence
  Description of Artificial Sequence: Synthetic oligonucleotide
uccgugauagggaaccagc

SEQ ID NO: 2179294 - RNA, 19 nt, Artificial Sequence
  Description of Artificial Sequence: Synthetic oligonucleotide
uucggguucggucaagcga

SEQ ID NO: 2179295 - RNA, 19 nt, Artificial Sequence
  Description of Artificial Sequence: Synthetic oligonucleotide
ucgaucuucaacuguguaa

SEQ ID NO: 2179296 - RNA, 19 nt, Artificial Sequence
  Description of Artificial Sequence: Synthetic oligonucleotide
uucugguaggcaguaacag

SEQ ID NO: 2179297 - RNA, 19 nt, Artificial Sequence
  Description of Artificial Sequence: Synthetic oligonucleotide
aaacggagagucggcagcg

SEQ ID NO: 2179298 - RNA, 19 nt, Artificial Sequence
  Description of Artificial Sequence: Synthetic oligonucleotide
agucggcagcguuagcugc

SEQ ID NO: 2179299 - RNA, 19 nt, Artificial Sequence
  Description of Artificial Sequence: Synthetic oligonucleotide
cauucugguaggcaguaac

SEQ ID NO: 2179300 - RNA, 19 nt, Artificial Sequence
  Description of Artificial Sequence: Synthetic oligonucleotide
uagcccggugguaaggagg

SEQ ID NO: 2179301 - RNA, 19 nt, Artificial Sequence
  Description of Artificial Sequence: Synthetic oligonucleotide
aaacggguuguugucgauc

SEQ ID NO: 2179302 - RNA, 19 nt, Artificial Sequence
  Description of Artificial Sequence: Synthetic oligonucleotide
uccgccugcagccuuggag

SEQ ID NO: 2179303 - RNA, 19 nt, Artificial Sequence
  Description of Artificial Sequence: Synthetic oligonucleotide
auagggaaccagcggcggc

SEQ ID NO: 2179304 - RNA, 19 nt, Artificial Sequence
  Description of Artificial Sequence: Synthetic oligonucleotide
uuccucauacaaacggaga

SEQ ID NO: 2179305 - RNA, 19 nt, Artificial Sequence
  Description of Artificial Sequence: Synthetic oligonucleotide
uucuccaagcuccgcaggc

SEQ ID NO: 2179306 - RNA, 19 nt, Artificial Sequence
  Description of Artificial Sequence: Synthetic oligonucleotide
acaaacggagagucggcag

SEQ ID NO: 2179307 - RNA, 19 nt, Artificial Sequence
  Description of Artificial Sequence: Synthetic oligonucleotide
cucauacaaacggagaguc

SEQ ID NO: 2179308 - RNA, 19 nt, Artificial Sequence
  Description of Artificial Sequence: Synthetic oligonucleotide
guucggucaagcgagcggg

SEQ ID NO: 2179309 - RNA, 19 nt, Artificial Sequence
  Description of Artificial Sequence: Synthetic oligonucleotide
uguugucgaucuucaacug

SEQ ID NO: 2179310 - RNA, 19 nt, Artificial Sequence
  Description of Artificial Sequence: Synthetic oligonucleotide
ugucauucugguaggcagu

SEQ ID NO: 2179311 - RNA, 19 nt, Artificial Sequence
  Description of Artificial Sequence: Synthetic oligonucleotide
ucucccgacggccauuccc

SEQ ID NO: 2179312 - RNA, 19 nt, Artificial Sequence
  Description of Artificial Sequence: Synthetic oligonucleotide
ucacuggccgccucuuugg

SEQ ID NO: 2179313 - RNA, 19 nt, Artificial Sequence
  Description of Artificial Sequence: Synthetic oligonucleotide
aaauacccauucugugcug

SEQ ID NO: 2179314 - RNA, 19 nt, Artificial Sequence
  Description of Artificial Sequence: Synthetic oligonucleotide
gauggugaccgggaucugg

SEQ ID NO: 2179315 - RNA, 19 nt, Artificial Sequence
  Description of Artificial Sequence: Synthetic oligonucleotide
ugggcucacggcuacuucc

SEQ ID NO: 2179316 - RNA, 19 nt, Artificial Sequence
  Description of Artificial Sequence: Synthetic oligonucleotide
acuugggcgacuccccggg

SEQ ID NO: 2179317 - RNA, 19 nt, Artificial Sequence
  Description of Artificial Sequence: Synthetic oligonucleotide
uguacagcccaagcagccg

SEQ ID NO: 2179318 - RNA, 19 nt, Artificial Sequence
  Description of Artificial Sequence: Synthetic oligonucleotide
uuucggagagccagcucag

SEQ ID NO: 2179319 - RNA, 19 nt, Artificial Sequence
  Description of Artificial Sequence: Synthetic oligonucleotide
aggacgaggcgucggacuc

SEQ ID NO: 2179320 - RNA, 19 nt, Artificial Sequence
  Description of Artificial Sequence: Synthetic oligonucleotide
auacaaacggagagucggc

SEQ ID NO: 2179321 - RNA, 19 nt, Artificial Sequence
  Description of Artificial Sequence: Synthetic oligonucleotide
gauagggaaccagcggcgg

SEQ ID NO: 2179322 - RNA, 19 nt, Artificial Sequence
  Description of Artificial Sequence: Synthetic oligonucleotide
cuguacagcccaagcagcc

SEQ ID NO: 2179323 - RNA, 19 nt, Artificial Sequence
  Description of Artificial Sequence: Synthetic oligonucleotide
cuagugcuaggugggaugg

SEQ ID NO: 2179324 - RNA, 19 nt, Artificial Sequence
  Description of Artificial Sequence: Synthetic oligonucleotide
aggccaaacgggccguccc

SEQ ID NO: 2179325 - RNA, 19 nt, Artificial Sequence
  Description of Artificial Sequence: Synthetic oligonucleotide
ucacgcuccgguuugcagu

SEQ ID NO: 2179326 - RNA, 19 nt, Artificial Sequence
  Description of Artificial Sequence: Synthetic oligonucleotide
cucccgacggccauucccg

SEQ ID NO: 2179327 - RNA, 19 nt, Artificial Sequence
  Description of Artificial Sequence: Synthetic oligonucleotide
aagcuccgcaggccaaacg

SEQ ID NO: 2179328 - RNA, 19 nt, Artificial Sequence
  Description of Artificial Sequence: Synthetic oligonucleotide
ugucccguggaggacugcg

SEQ ID NO: 2179329 - RNA, 19 nt, Artificial Sequence
  Description of Artificial Sequence: Synthetic oligonucleotide
agagucggcagcguuagcu

SEQ ID NO: 2179330 - RNA, 19 nt, Artificial Sequence
  Description of Artificial Sequence: Synthetic oligonucleotide
aagcagccgaggcaggcca

SEQ ID NO: 2179331 - RNA, 19 nt, Artificial Sequence
  Description of Artificial Sequence: Synthetic oligonucleotide
agccccacucaccagucuc

SEQ ID NO: 2179332 - RNA, 19 nt, Artificial Sequence
  Description of Artificial Sequence: Synthetic oligonucleotide
gauagggccccacgggaug

SEQ ID NO: 2179333 - RNA, 19 nt, Artificial Sequence
  Description of Artificial Sequence: Synthetic oligonucleotide
aagcgagcggggcuggugu

SEQ ID NO: 2179334 - RNA, 19 nt, Artificial Sequence
  Description of Artificial Sequence: Synthetic oligonucleotide
gaggcgucggacucggcgc

SEQ ID NO: 2179335 - RNA, 19 nt, Artificial Sequence
  Description of Artificial Sequence: Synthetic oligonucleotide
ugucgaucuucaacugugu

SEQ ID NO: 2179336 - RNA, 19 nt, Artificial Sequence
  Description of Artificial Sequence: Synthetic oligonucleotide
uacaaacggagagucggca

SEQ ID NO: 2179337 - RNA, 19 nt, Artificial Sequence
  Description of Artificial Sequence: Synthetic oligonucleotide
caaggcuucuccucggcuc

SEQ ID NO: 2179338 - RNA, 19 nt, Artificial Sequence
  Description of Artificial Sequence: Synthetic oligonucleotide
ucggucgguuccuugcugc

SEQ ID NO: 2179339 - RNA, 19 nt, Artificial Sequence
  Description of Artificial Sequence: Synthetic oligonucleotide
gagucggcagcguuagcug

SEQ ID NO: 2179340 - RNA, 19 nt, Artificial Sequence
  Description of Artificial Sequence: Synthetic oligonucleotide
gaggacugcggcccagggg

SEQ ID NO: 2179341 - RNA, 19 nt, Artificial Sequence
  Description of Artificial Sequence: Synthetic oligonucleotide
agcccggugguaaggaggc

SEQ ID NO: 2179342 - RNA, 19 nt, Artificial Sequence
  Description of Artificial Sequence: Synthetic oligonucleotide
accgcccucggucgguucc

SEQ ID NO: 2179343 - RNA, 19 nt, Artificial Sequence
  Description of Artificial Sequence: Synthetic oligonucleotide
uucggucaagcgagcgggg

SEQ ID NO: 2179344 - RNA, 19 nt, Artificial Sequence
  Description of Artificial Sequence: Synthetic oligonucleotide
ugcuaggugggauggugac

SEQ ID NO: 2179345 - RNA, 19 nt, Artificial Sequence
  Description of Artificial Sequence: Synthetic oligonucleotide
gagcguucggguucgguca

SEQ ID NO: 2179346 - RNA, 19 nt, Artificial Sequence
  Description of Artificial Sequence: Synthetic oligonucleotide
cuuccuccgggccucggcg

SEQ ID NO: 2179347 - RNA, 19 nt, Artificial Sequence
  Description of Artificial Sequence: Synthetic oligonucleotide
guucggguucggucaagcg

SEQ ID NO: 2179348 - RNA, 19 nt, Artificial Sequence
  Description of Artificial Sequence: Synthetic oligonucleotide
ucccguggaggacugcggc

SEQ ID NO: 2179349 - RNA, 19 nt, Artificial Sequence
  Description of Artificial Sequence: Synthetic oligonucleotide
cagcgcagcagccaagcag

SEQ ID NO: 2179350 - RNA, 19 nt, Artificial Sequence
  Description of Artificial Sequence: Synthetic oligonucleotide
uccgcaggccaaacgggcc

SEQ ID NO: 2179351 - RNA, 19 nt, Artificial Sequence
  Description of Artificial Sequence: Synthetic oligonucleotide
uugggcgacuccccgggcc

SEQ ID NO: 2179352 - RNA, 19 nt, Artificial Sequence
  Description of Artificial Sequence: Synthetic oligonucleotide
agcguuagcugcuuccuuu

SEQ ID NO: 2179353 - RNA, 19 nt, Artificial Sequence
  Description of Artificial Sequence: Synthetic oligonucleotide
ggugaccgggaucugguag

SEQ ID NO: 2179354 - RNA, 19 nt, Artificial Sequence
  Description of Artificial Sequence: Synthetic oligonucleotide
gacugggcgcugcacuggg

SEQ ID NO: 2179355 - RNA, 19 nt, Artificial Sequence
  Description of Artificial Sequence: Synthetic oligonucleotide
gagccgcugggcgauaggg

SEQ ID NO: 2179356 - RNA, 19 nt, Artificial Sequence
  Description of Artificial Sequence: Synthetic oligonucleotide
gguucggucaagcgagcgg

SEQ ID NO: 2179357 - RNA, 19 nt, Artificial Sequence
  Description of Artificial Sequence: Synthetic oligonucleotide
cuccgcaggccaaacgggc

SEQ ID NO: 2179358 - RNA, 19 nt, Artificial Sequence
  Description of Artificial Sequence: Synthetic oligonucleotide
ucuugucauucugguaggc

SEQ ID NO: 2179359 - RNA, 19 nt, Artificial Sequence
  Description of Artificial Sequence: Synthetic oligonucleotide
cacuuuucggagagccagc

SEQ ID NO: 2179360 - RNA, 19 nt, Artificial Sequence
  Description of Artificial Sequence: Synthetic oligonucleotide
agagggcggagguucacgu

SEQ ID NO: 2179361 - RNA, 19 nt, Artificial Sequence
  Description of Artificial Sequence: Synthetic oligonucleotide
cuccgguuugcaguguucc

SEQ ID NO: 2179362 - RNA, 19 nt, Artificial Sequence
  Description of Artificial Sequence: Synthetic oligonucleotide
auucugguaggcaguaaca

SEQ ID NO: 2179363 - RNA, 19 nt, Artificial Sequence
  Description of Artificial Sequence: Synthetic oligonucleotide
uggagcccuccgcagcuag

SEQ ID NO: 2179364 - RNA, 19 nt, Artificial Sequence
  Description of Artificial Sequence: Synthetic oligonucleotide
acggccauucccggugucc

SEQ ID NO: 2179365 - RNA, 19 nt, Artificial Sequence
  Description of Artificial Sequence: Synthetic oligonucleotide
ugaccgggaucugguaggg

SEQ ID NO: 2179366 - RNA, 19 nt, Artificial Sequence
  Description of Artificial Sequence: Synthetic oligonucleotide
cugggcgcugcacugggag

SEQ ID NO: 2179367 - RNA, 19 nt, Artificial Sequence
  Description of Artificial Sequence: Synthetic oligonucleotide
uccccaccgcccucggucg

SEQ ID NO: 2179368 - RNA, 19 nt, Artificial Sequence
  Description of Artificial Sequence: Synthetic oligonucleotide
gugcuguacagcccaagca

SEQ ID NO: 2179369 - RNA, 19 nt, Artificial Sequence
  Description of Artificial Sequence: Synthetic oligonucleotide
uggcaaacggguuguuguc

SEQ ID NO: 2179370 - RNA, 19 nt, Artificial Sequence
  Description of Artificial Sequence: Synthetic oligonucleotide
gcuagugcuaggugggaug

SEQ ID NO: 2179371 - RNA, 19 nt, Artificial Sequence
  Description of Artificial Sequence: Synthetic oligonucleotide
ggcgauagggccccacggg

SEQ ID NO: 2179372 - RNA, 19 nt, Artificial Sequence
  Description of Artificial Sequence: Synthetic oligonucleotide
agggucgcaggacgaggcg

SEQ ID NO: 2179373 - RNA, 19 nt, Artificial Sequence
  Description of Artificial Sequence: Synthetic oligonucleotide
gccucuuuggcugagccgc

SEQ ID NO: 2179374 - RNA, 19 nt, Artificial Sequence
  Description of Artificial Sequence: Synthetic oligonucleotide
gaaccagcggcggcggcgg

SEQ ID NO: 2179375 - RNA, 19 nt, Artificial Sequence
  Description of Artificial Sequence: Synthetic oligonucleotide
auagggccccacgggaugg

SEQ ID NO: 2179376 - RNA, 19 nt, Artificial Sequence
  Description of Artificial Sequence: Synthetic oligonucleotide
cacgcuccgguuugcagug

SEQ ID NO: 2179377 - RNA, 19 nt, Artificial Sequence
  Description of Artificial Sequence: Synthetic oligonucleotide
gagggucgcaggacgaggc

SEQ ID NO: 2179378 - RNA, 19 nt, Artificial Sequence
  Description of Artificial Sequence: Synthetic oligonucleotide
agcccuccgcagcuagccc

SEQ ID NO: 2179379 - RNA, 19 nt, Artificial Sequence
  Description of Artificial Sequence: Synthetic oligonucleotide
gacgaggcgucggacucgg

SEQ ID NO: 2179380 - RNA, 19 nt, Artificial Sequence
  Description of Artificial Sequence: Synthetic oligonucleotide
cucggcgcguuccuucucc

SEQ ID NO: 2179381 - RNA, 19 nt, Artificial Sequence
  Description of Artificial Sequence: Synthetic oligonucleotide
agccuuggagcccuccgca

SEQ ID NO: 2179382 - RNA, 19 nt, Artificial Sequence
  Description of Artificial Sequence: Synthetic oligonucleotide
gucacgcuccgguuugcag

SEQ ID NO: 2179383 - RNA, 19 nt, Artificial Sequence
  Description of Artificial Sequence: Synthetic oligonucleotide
cucggcucgggcccggugc

SEQ ID NO: 2179384 - RNA, 19 nt, Artificial Sequence
  Description of Artificial Sequence: Synthetic oligonucleotide
ggugguaaggaggcuagug

SEQ ID NO: 2179385 - RNA, 19 nt, Artificial Sequence
  Description of Artificial Sequence: Synthetic oligonucleotide
cuggaugcucugcaguuca

SEQ ID NO: 2179386 - RNA, 19 nt, Artificial Sequence
  Description of Artificial Sequence: Synthetic oligonucleotide
cuagcccggugguaaggag

SEQ ID NO: 2179387 - RNA, 19 nt, Artificial Sequence
  Description of Artificial Sequence: Synthetic oligonucleotide
uucggagagccagcucagg

SEQ ID NO: 2179388 - RNA, 19 nt, Artificial Sequence
  Description of Artificial Sequence: Synthetic oligonucleotide
gaucugguaggggcugaag

SEQ ID NO: 2179389 - RNA, 19 nt, Artificial Sequence
  Description of Artificial Sequence: Synthetic oligonucleotide
ccgugauagggaaccagcg

SEQ ID NO: 2179390 - RNA, 19 nt, Artificial Sequence
  Description of Artificial Sequence: Synthetic oligonucleotide
guacagcccaagcagccga

SEQ ID NO: 2179391 - RNA, 19 nt, Artificial Sequence
  Description of Artificial Sequence: Synthetic oligonucleotide
uccgguuugcaguguuccu

SEQ ID NO: 2179392 - RNA, 19 nt, Artificial Sequence
  Description of Artificial Sequence: Synthetic oligonucleotide
ucggacucggcgccgucac

SEQ ID NO: 2179393 - RNA, 19 nt, Artificial Sequence
  Description of Artificial Sequence: Synthetic oligonucleotide
ggcagcguuagcugcuucc

SEQ ID NO: 2179394 - RNA, 19 nt, Artificial Sequence
  Description of Artificial Sequence: Synthetic oligonucleotide
ggcuccgugauagggaacc

SEQ ID NO: 2179395 - RNA, 19 nt, Artificial Sequence
  Description of Artificial Sequence: Synthetic oligonucleotide
guucacgugcaggcggagg

SEQ ID NO: 2179396 - RNA, 19 nt, Artificial Sequence
  Description of Artificial Sequence: Synthetic oligonucleotide
ccacuuuucggagagccag

SEQ ID NO: 2179397 - RNA, 19 nt, Artificial Sequence
  Description of Artificial Sequence: Synthetic oligonucleotide
cuugucauucugguaggca

SEQ ID NO: 2179398 - RNA, 19 nt, Artificial Sequence
  Description of Artificial Sequence: Synthetic oligonucleotide
gagcccuccgcagcuagcc

SEQ ID NO: 2179399 - RNA, 19 nt, Artificial Sequence
  Description of Artificial Sequence: Synthetic oligonucleotide
agcgcaggcggggucgggc

SEQ ID NO: 2179400 - RNA, 19 nt, Artificial Sequence
  Description of Artificial Sequence: Synthetic oligonucleotide
guugucgaucuucaacugu

SEQ ID NO: 2179401 - RNA, 19 nt, Artificial Sequence
  Description of Artificial Sequence: Synthetic oligonucleotide
ugucggcugcgcaaggcuu

SEQ ID NO: 2179402 - RNA, 19 nt, Artificial Sequence
  Description of Artificial Sequence: Synthetic oligonucleotide
caaacgggccguccccacc

SEQ ID NO: 2179403 - RNA, 19 nt, Artificial Sequence
  Description of Artificial Sequence: Synthetic oligonucleotide
ucggucaagcgagcggggc

SEQ ID NO: 2179404 - RNA, 19 nt, Artificial Sequence
  Description of Artificial Sequence: Synthetic oligonucleotide
ugggcgacuccccgggccu

SEQ ID NO: 2179405 - RNA, 19 nt, Artificial Sequence
  Description of Artificial Sequence: Synthetic oligonucleotide
guaggggcugaagcgcagg

SEQ ID NO: 2179406 - RNA, 19 nt, Artificial Sequence
  Description of Artificial Sequence: Synthetic oligonucleotide
ggagcguucggguucgguc

SEQ ID NO: 2179407 - RNA, 19 nt, Artificial Sequence
  Description of Artificial Sequence: Synthetic oligonucleotide
ggagagucggcagcguuag

SEQ ID NO: 2179408 - RNA, 19 nt, Artificial Sequence
  Description of Artificial Sequence: Synthetic oligonucleotide
uggugucccguggaggacu

SEQ ID NO: 2179409 - RNA, 19 nt, Artificial Sequence
  Description of Artificial Sequence: Synthetic oligonucleotide
gagggcggagguucacgug

SEQ ID NO: 2179410 - RNA, 19 nt, Artificial Sequence
  Description of Artificial Sequence: Synthetic oligonucleotide
uaggugggauggugaccgg

SEQ ID NO: 2179411 - RNA, 19 nt, Artificial Sequence
  Description of Artificial Sequence: Synthetic oligonucleotide
cuccgugauagggaaccag

SEQ ID NO: 2179412 - RNA, 19 nt, Artificial Sequence
  Description of Artificial Sequence: Synthetic oligonucleotide
gccgcugggcgauagggcc

SEQ ID NO: 2179413 - RNA, 19 nt, Artificial Sequence
  Description of Artificial Sequence: Synthetic oligonucleotide
agcuagcccggugguaagg

SEQ ID NO: 2179414 - RNA, 19 nt, Artificial Sequence
  Description of Artificial Sequence: Synthetic oligonucleotide
ucccgacggccauucccgg

SEQ ID NO: 2179415 - RNA, 19 nt, Artificial Sequence
  Description of Artificial Sequence: Synthetic oligonucleotide
ucgcugucggcugcgcaag

SEQ ID NO: 2179416 - RNA, 19 nt, Artificial Sequence
  Description of Artificial Sequence: Synthetic oligonucleotide
ucgucucccgggcgcuccg

SEQ ID NO: 2179417 - RNA, 19 nt, Artificial Sequence
  Description of Artificial Sequence: Synthetic oligonucleotide
accagucucuggaugcucu

SEQ ID NO: 2179418 - RNA, 19 nt, Artificial Sequence
  Description of Artificial Sequence: Synthetic oligonucleotide
agcgagcggggcugguguc

SEQ ID NO: 2179419 - RNA, 19 nt, Artificial Sequence
  Description of Artificial Sequence: Synthetic oligonucleotide
gcuggugucccguggagga

SEQ ID NO: 2179420 - RNA, 19 nt, Artificial Sequence
  Description of Artificial Sequence: Synthetic oligonucleotide
auggugaccgggaucuggu

SEQ ID NO: 2179421 - RNA, 19 nt, Artificial Sequence
  Description of Artificial Sequence: Synthetic oligonucleotide
gcuguacagcccaagcagc

SEQ ID NO: 2179422 - RNA, 19 nt, Artificial Sequence
  Description of Artificial Sequence: Synthetic oligonucleotide
ucggcucgggcccggugca

SEQ ID NO: 2179423 - RNA, 19 nt, Artificial Sequence
  Description of Artificial Sequence: Synthetic oligonucleotide
cacggcuacuuccgccugc

SEQ ID NO: 2179424 - RNA, 19 nt, Artificial Sequence
  Description of Artificial Sequence: Synthetic oligonucleotide
gucgaucuucaacugugua

SEQ ID NO: 2179425 - RNA, 19 nt, Artificial Sequence
  Description of Artificial Sequence: Synthetic oligonucleotide
cucgcccgcguccuugcgc

SEQ ID NO: 2179426 - RNA, 19 nt, Artificial Sequence
  Description of Artificial Sequence: Synthetic oligonucleotide
gaagcgcaggcggggucgg

SEQ ID NO: 2179427 - RNA, 19 nt, Artificial Sequence
  Description of Artificial Sequence: Synthetic oligonucleotide
ucgcaggacgaggcgucgg

SEQ ID NO: 2179428 - RNA, 19 nt, Artificial Sequence
  Description of Artificial Sequence: Synthetic oligonucleotide
gcccuccgcagcuagcccg

SEQ ID NO: 2179429 - RNA, 19 nt, Artificial Sequence
  Description of Artificial Sequence: Synthetic oligonucleotide
gucgcugucggcugcgcaa

SEQ ID NO: 2179430 - RNA, 19 nt, Artificial Sequence
  Description of Artificial Sequence: Synthetic oligonucleotide
gcaaacggguuguugucga

SEQ ID NO: 2179431 - RNA, 19 nt, Artificial Sequence
  Description of Artificial Sequence: Synthetic oligonucleotide
ugcaguucacuggccgccu

SEQ ID NO: 2179432 - RNA, 19 nt, Artificial Sequence
  Description of Artificial Sequence: Synthetic oligonucleotide
ucauucugguaggcaguaa

SEQ ID NO: 2179433 - RNA, 19 nt, Artificial Sequence
  Description of Artificial Sequence: Synthetic oligonucleotide
cucggucgguuccuugcug

SEQ ID NO: 2179434 - RNA, 19 nt, Artificial Sequence
  Description of Artificial Sequence: Synthetic oligonucleotide
augggcuccgugauaggga

SEQ ID NO: 2179435 - RNA, 19 nt, Artificial Sequence
  Description of Artificial Sequence: Synthetic oligonucleotide
gcucacggcuacuuccgcc

SEQ ID NO: 2179436 - RNA, 19 nt, Artificial Sequence
  Description of Artificial Sequence: Synthetic oligonucleotide
ugcaggcggagggucgcag

SEQ ID NO: 2179437 - RNA, 19 nt, Artificial Sequence
  Description of Artificial Sequence: Synthetic oligonucleotide
gcccaagcagccgaggcag

SEQ ID NO: 2179438 - RNA, 19 nt, Artificial Sequence
  Description of Artificial Sequence: Synthetic oligonucleotide
ggaggcucguguggcagcg

SEQ ID NO: 2179439 - RNA, 19 nt, Artificial Sequence
  Description of Artificial Sequence: Synthetic oligonucleotide
ggcgcuccggcucaggguc

SEQ ID NO: 2179440 - RNA, 19 nt, Artificial Sequence
  Description of Artificial Sequence: Synthetic oligonucleotide
gggacugggcgcugcacug

SEQ ID NO: 2179441 - RNA, 19 nt, Artificial Sequence
  Description of Artificial Sequence: Synthetic oligonucleotide
ccccacuuuucggagagcc

SEQ ID NO: 2179442 - RNA, 19 nt, Artificial Sequence
  Description of Artificial Sequence: Synthetic oligonucleotide
acggagagucggcagcguu

SEQ ID NO: 2179443 - RNA, 19 nt, Artificial Sequence
  Description of Artificial Sequence: Synthetic oligonucleotide
ucggcgccgucacgcuccg

SEQ ID NO: 2179444 - RNA, 19 nt, Artificial Sequence
  Description of Artificial Sequence: Synthetic oligonucleotide
ggucaagcgagcggggcug

SEQ ID NO: 2179445 - RNA, 19 nt, Artificial Sequence
  Description of Artificial Sequence: Synthetic oligonucleotide
ucacgugcaggcggagggu

SEQ ID NO: 2179446 - RNA, 19 nt, Artificial Sequence
  Description of Artificial Sequence: Synthetic oligonucleotide
cagcuagcccggugguaag

SEQ ID NO: 2179447 - RNA, 19 nt, Artificial Sequence
  Description of Artificial Sequence: Synthetic oligonucleotide
gucccguggaggacugcgg

SEQ ID NO: 2179448 - RNA, 19 nt, Artificial Sequence
  Description of Artificial Sequence: Synthetic oligonucleotide
ggacucggcgccgucacgc

SEQ ID NO: 2179449 - RNA, 19 nt, Artificial Sequence
  Description of Artificial Sequence: Synthetic oligonucleotide
aggcggagggucgcaggac

SEQ ID NO: 2179450 - RNA, 19 nt, Artificial Sequence
  Description of Artificial Sequence: Synthetic oligonucleotide
uucucccgacggccauucc

SEQ ID NO: 2179451 - RNA, 19 nt, Artificial Sequence
  Description of Artificial Sequence: Synthetic oligonucleotide
acgugcaggcggagggucg

SEQ ID NO: 2179452 - RNA, 19 nt, Artificial Sequence
  Description of Artificial Sequence: Synthetic oligonucleotide
ucggcgcguuccuucucca

SEQ ID NO: 2179453 - RNA, 19 nt, Artificial Sequence
  Description of Artificial Sequence: Synthetic oligonucleotide
gggcucacggcuacuuccg

SEQ ID NO: 2179454 - RNA, 19 nt, Artificial Sequence
  Description of Artificial Sequence: Synthetic oligonucleotide
uacuuccgccugcagccuu

SEQ ID NO: 2179455 - RNA, 19 nt, Artificial Sequence
  Description of Artificial Sequence: Synthetic oligonucleotide
gucgcaggacgaggcgucg

SEQ ID NO: 2179456 - RNA, 19 nt, Artificial Sequence
  Description of Artificial Sequence: Synthetic oligonucleotide
cgaggcgucggacucggcg

SEQ ID NO: 2179457 - RNA, 19 nt, Artificial Sequence
  Description of Artificial Sequence: Synthetic oligonucleotide
guggcagcgcagcagccaa

SEQ ID NO: 2179458 - RNA, 19 nt, Artificial Sequence
  Description of Artificial Sequence: Synthetic oligonucleotide
agggccccacgggaugggc

SEQ ID NO: 2179459 - RNA, 19 nt, Artificial Sequence
  Description of Artificial Sequence: Synthetic oligonucleotide
ccggugguaaggaggcuag

SEQ ID NO: 2179460 - RNA, 19 nt, Artificial Sequence
  Description of Artificial Sequence: Synthetic oligonucleotide
gagagucggcagcguuagc

SEQ ID NO: 2179461 - RNA, 19 nt, Artificial Sequence
  Description of Artificial Sequence: Synthetic oligonucleotide
cugggcucacggcuacuuc

SEQ ID NO: 2179462 - RNA, 19 nt, Artificial Sequence
  Description of Artificial Sequence: Synthetic oligonucleotide
cugaagcgcaggcgggguc

SEQ ID NO: 2179463 - RNA, 19 nt, Artificial Sequence
  Description of Artificial Sequence: Synthetic oligonucleotide
agcguucggguucggucaa

SEQ ID NO: 2179464 - RNA, 19 nt, Artificial Sequence
  Description of Artificial Sequence: Synthetic oligonucleotide
cuugggcgacuccccgggc

SEQ ID NO: 2179465 - RNA, 19 nt, Artificial Sequence
  Description of Artificial Sequence: Synthetic oligonucleotide
cccucggucgguuccuugc

SEQ ID NO: 2179466 - RNA, 19 nt, Artificial Sequence
  Description of Artificial Sequence: Synthetic oligonucleotide
ggccccacgggaugggccc

SEQ ID NO: 2179467 - RNA, 19 nt, Artificial Sequence
  Description of Artificial Sequence: Synthetic oligonucleotide
ggguucggucaagcgagcg

SEQ ID NO: 2179468 - RNA, 19 nt, Artificial Sequence
  Description of Artificial Sequence: Synthetic oligonucleotide
caagcgagcggggcuggug

SEQ ID NO: 2179469 - RNA, 19 nt, Artificial Sequence
  Description of Artificial Sequence: Synthetic oligonucleotide
gucauucugguaggcagua

SEQ ID NO: 2179470 - RNA, 19 nt, Artificial Sequence
  Description of Artificial Sequence: Synthetic oligonucleotide
uagggccccacgggauggg

SEQ ID NO: 2179471 - RNA, 19 nt, Artificial Sequence
  Description of Artificial Sequence: Synthetic oligonucleotide
agguucacgugcaggcgga

SEQ ID NO: 2179472 - RNA, 19 nt, Artificial Sequence
  Description of Artificial Sequence: Synthetic oligonucleotide
caggccaaacgggccgucc

SEQ ID NO: 2179473 - RNA, 19 nt, Artificial Sequence
  Description of Artificial Sequence: Synthetic oligonucleotide
ucccgggcgcuccggcuca

SEQ ID NO: 2179474 - RNA, 19 nt, Artificial Sequence
  Description of Artificial Sequence: Synthetic oligonucleotide
cagggucgcugucggcugc

SEQ ID NO: 2179475 - RNA, 19 nt, Artificial Sequence
  Description of Artificial Sequence: Synthetic oligonucleotide
gugcuaggugggaugguga

SEQ ID NO: 2179476 - RNA, 19 nt, Artificial Sequence
  Description of Artificial Sequence: Synthetic oligonucleotide
ggccaaacgggccgucccc

SEQ ID NO: 2179477 - RNA, 19 nt, Artificial Sequence
  Description of Artificial Sequence: Synthetic oligonucleotide
caagcuccgcaggccaaac

SEQ ID NO: 2179478 - RNA, 19 nt, Artificial Sequence
  Description of Artificial Sequence: Synthetic oligonucleotide
agggucgcugucggcugcg

SEQ ID NO: 2179479 - RNA, 19 nt, Artificial Sequence
  Description of Artificial Sequence: Synthetic oligonucleotide
gcgauagggccccacggga

SEQ ID NO: 2179480 - RNA, 19 nt, Artificial Sequence
  Description of Artificial Sequence: Synthetic oligonucleotide
cuuggagcccuccgcagcu

SEQ ID NO: 2179481 - RNA, 19 nt, Artificial Sequence
  Description of Artificial Sequence: Synthetic oligonucleotide
gcuaggugggauggugacc

SEQ ID NO: 2179482 - RNA, 19 nt, Artificial Sequence
  Description of Artificial Sequence: Synthetic oligonucleotide
uagugcuaggugggauggu

SEQ ID NO: 2179483 - RNA, 19 nt, Artificial Sequence
  Description of Artificial Sequence: Synthetic oligonucleotide
gcucccgggagcguucggg

SEQ ID NO: 2179484 - RNA, 19 nt, Artificial Sequence
  Description of Artificial Sequence: Synthetic oligonucleotide
cacgugcaggcggaggguc

SEQ ID NO: 2179485 - RNA, 19 nt, Artificial Sequence
  Description of Artificial Sequence: Synthetic oligonucleotide
caggcggagggucgcagga

SEQ ID NO: 2179486 - RNA, 19 nt, Artificial Sequence
  Description of Artificial Sequence: Synthetic oligonucleotide
gccgucacgcuccgguuug

SEQ ID NO: 2179487 - RNA, 19 nt, Artificial Sequence
  Description of Artificial Sequence: Synthetic oligonucleotide
gcucguguggcagcgcagc

SEQ ID NO: 2179488 - RNA, 19 nt, Artificial Sequence
  Description of Artificial Sequence: Synthetic oligonucleotide
cugagccgcugggcgauag

SEQ ID NO: 2179489 - RNA, 19 nt, Artificial Sequence
  Description of Artificial Sequence: Synthetic oligonucleotide
cuugcgccccucguccuuc

SEQ ID NO: 2179490 - RNA, 19 nt, Artificial Sequence
  Description of Artificial Sequence: Synthetic oligonucleotide
ggacugggcgcugcacugg

SEQ ID NO: 2179491 - RNA, 19 nt, Artificial Sequence
  Description of Artificial Sequence: Synthetic oligonucleotide
gucggcugcgcaaggcuuc

SEQ ID NO: 2179492 - RNA, 19 nt, Artificial Sequence
  Description of Artificial Sequence: Synthetic oligonucleotide
gcagcuagcccggugguaa

SEQ ID NO: 2179493 - RNA, 19 nt, Artificial Sequence
  Description of Artificial Sequence: Synthetic oligonucleotide
gcgcaaggcuucuccucgg

SEQ ID NO: 2179494 - RNA, 19 nt, Artificial Sequence
  Description of Artificial Sequence: Synthetic oligonucleotide
ccgacggccauucccggug

SEQ ID NO: 2179495 - RNA, 19 nt, Artificial Sequence
  Description of Artificial Sequence: Synthetic oligonucleotide
ccgccucuuuggcugagcc

SEQ ID NO: 2179496 - RNA, 19 nt, Artificial Sequence
  Description of Artificial Sequence: Synthetic oligonucleotide
ggacgaggcgucggacucg

SEQ ID NO: 2179497 - RNA, 19 nt, Artificial Sequence
  Description of Artificial Sequence: Synthetic oligonucleotide
ucccgggagcguucggguu

SEQ ID NO: 2179498 - RNA, 19 nt, Artificial Sequence
  Description of Artificial Sequence: Synthetic oligonucleotide
gguaggggcugaagcgcag

SEQ ID NO: 2179499 - RNA, 19 nt, Artificial Sequence
  Description of Artificial Sequence: Synthetic oligonucleotide
uuccgccugcagccuugga

SEQ ID NO: 2179500 - RNA, 19 nt, Artificial Sequence
  Description of Artificial Sequence: Synthetic oligonucleotide
cucguguggcagcgcagca

SEQ ID NO: 2179501 - RNA, 19 nt, Artificial Sequence
  Description of Artificial Sequence: Synthetic oligonucleotide
gacggccauucccgguguc

SEQ ID NO: 2179502 - RNA, 19 nt, Artificial Sequence
  Description of Artificial Sequence: Synthetic oligonucleotide
cuccgcagcuagcccggug

SEQ ID NO: 2179503 - RNA, 19 nt, Artificial Sequence
  Description of Artificial Sequence: Synthetic oligonucleotide
aggcuagugcuagguggga

SEQ ID NO: 2179504 - RNA, 19 nt, Artificial Sequence
  Description of Artificial Sequence: Synthetic oligonucleotide
ccgguuugcaguguuccuc

SEQ ID NO: 2179505 - RNA, 19 nt, Artificial Sequence
  Description of Artificial Sequence: Synthetic oligonucleotide
caggacgaggcgucggacu

SEQ ID NO: 2179506 - RNA, 19 nt, Artificial Sequence
  Description of Artificial Sequence: Synthetic oligonucleotide
cucgggcccggugcaggcg

SEQ ID NO: 2179507 - RNA, 19 nt, Artificial Sequence
  Description of Artificial Sequence: Synthetic oligonucleotide
gcggcggcugcccucgccc

SEQ ID NO: 2179508 - RNA, 19 nt, Artificial Sequence
  Description of Artificial Sequence: Synthetic oligonucleotide
ggcucacggcuacuuccgc

SEQ ID NO: 2179509 - RNA, 19 nt, Artificial Sequence
  Description of Artificial Sequence: Synthetic oligonucleotide
cccaggaaugggcuccgug

SEQ ID NO: 2179510 - RNA, 19 nt, Artificial Sequence
  Description of Artificial Sequence: Synthetic oligonucleotide
cccuccgcagcuagcccgg

SEQ ID NO: 2179511 - RNA, 19 nt, Artificial Sequence
  Description of Artificial Sequence: Synthetic oligonucleotide
gcugucggcugcgcaaggc

SEQ ID NO: 2179512 - RNA, 19 nt, Artificial Sequence
  Description of Artificial Sequence: Synthetic oligonucleotide
acggguuguugucgaucuu

SEQ ID NO: 2179513 - RNA, 19 nt, Artificial Sequence
  Description of Artificial Sequence: Synthetic oligonucleotide
guggaggacugcggcccag

SEQ ID NO: 2179514 - RNA, 19 nt, Artificial Sequence
  Description of Artificial Sequence: Synthetic oligonucleotide
gaggcucguguggcagcgc

SEQ ID NO: 2179515 - RNA, 19 nt, Artificial Sequence
  Description of Artificial Sequence: Synthetic oligonucleotide
cccggugucccggaagccc

SEQ ID NO: 2179516 - RNA, 19 nt, Artificial Sequence
  Description of Artificial Sequence: Synthetic oligonucleotide
cugucggcugcgcaaggcu

SEQ ID NO: 2179517 - RNA, 19 nt, Artificial Sequence
  Description of Artificial Sequence: Synthetic oligonucleotide
gcugcgccgcucccgggag

SEQ ID NO: 2179518 - RNA, 19 nt, Artificial Sequence
  Description of Artificial Sequence: Synthetic oligonucleotide
gucggacucggcgccguca

SEQ ID NO: 2179519 - RNA, 19 nt, Artificial Sequence
  Description of Artificial Sequence: Synthetic oligonucleotide
ucggcagcguuagcugcuu

SEQ ID NO: 2179520 - RNA, 19 nt, Artificial Sequence
  Description of Artificial Sequence: Synthetic oligonucleotide
gcuagcccggugguaagga

SEQ ID NO: 2179521 - RNA, 19 nt, Artificial Sequence
  Description of Artificial Sequence: Synthetic oligonucleotide
cgccucuuuggcugagccg

SEQ ID NO: 2179522 - RNA, 19 nt, Artificial Sequence
  Description of Artificial Sequence: Synthetic oligonucleotide
gguucacgugcaggcggag

SEQ ID NO: 2179523 - RNA, 19 nt, Artificial Sequence
  Description of Artificial Sequence: Synthetic oligonucleotide
cccgggagcguucggguuc

SEQ ID NO: 2179524 - RNA, 19 nt, Artificial Sequence
  Description of Artificial Sequence: Synthetic oligonucleotide
gcgcucgucucccgggcgc

SEQ ID NO: 2179525 - RNA, 19 nt, Artificial Sequence
  Description of Artificial Sequence: Synthetic oligonucleotide
gcugcgcgcucgucucccg

SEQ ID NO: 2179526 - RNA, 19 nt, Artificial Sequence
  Description of Artificial Sequence: Synthetic oligonucleotide
ggcgcugcacugggagagg

SEQ ID NO: 2179527 - RNA, 19 nt, Artificial Sequence
  Description of Artificial Sequence: Synthetic oligonucleotide
ccaaacgggccguccccac

SEQ ID NO: 2179528 - RNA, 19 nt, Artificial Sequence
  Description of Artificial Sequence: Synthetic oligonucleotide
ggcgccgucacgcuccggu

SEQ ID NO: 2179529 - RNA, 19 nt, Artificial Sequence
  Description of Artificial Sequence: Synthetic oligonucleotide
cugggcgauagggccccac

SEQ ID NO: 2179530 - RNA, 19 nt, Artificial Sequence
  Description of Artificial Sequence: Synthetic oligonucleotide
cugcgccgcucccgggagc

SEQ ID NO: 2179531 - RNA, 19 nt, Artificial Sequence
  Description of Artificial Sequence: Synthetic oligonucleotide
ggggucgggcacugcccag

SEQ ID NO: 2179532 - RNA, 19 nt, Artificial Sequence
  Description of Artificial Sequence: Synthetic oligonucleotide
ggcucguguggcagcgcag

SEQ ID NO: 2179533 - RNA, 19 nt, Artificial Sequence
  Description of Artificial Sequence: Synthetic oligonucleotide
ggggacugggcgcugcacu

SEQ ID NO: 2179534 - RNA, 19 nt, Artificial Sequence
  Description of Artificial Sequence: Synthetic oligonucleotide
ggaugcucugcaguucacu

SEQ ID NO: 2179535 - RNA, 19 nt, Artificial Sequence
  Description of Artificial Sequence: Synthetic oligonucleotide
ggcugcgccgcucccggga

SEQ ID NO: 2179536 - RNA, 19 nt, Artificial Sequence
  Description of Artificial Sequence: Synthetic oligonucleotide
cguucggguucggucaagc

SEQ ID NO: 2179537 - RNA, 19 nt, Artificial Sequence
  Description of Artificial Sequence: Synthetic oligonucleotide
cccacuuuucggagagcca

SEQ ID NO: 2179538 - RNA, 19 nt, Artificial Sequence
  Description of Artificial Sequence: Synthetic oligonucleotide
caaacggguuguugucgau

SEQ ID NO: 2179539 - RNA, 19 nt, Artificial Sequence
  Description of Artificial Sequence: Synthetic oligonucleotide
ggcgacuccccgggccugg

SEQ ID NO: 2179540 - RNA, 19 nt, Artificial Sequence
  Description of Artificial Sequence: Synthetic oligonucleotide
acgaggcgucggacucggc

SEQ ID NO: 2179541 - RNA, 19 nt, Artificial Sequence
  Description of Artificial Sequence: Synthetic oligonucleotide
cauucccggugucccggaa

SEQ ID NO: 2179542 - RNA, 19 nt, Artificial Sequence
  Description of Artificial Sequence: Synthetic oligonucleotide
ccgggagcguucggguucg

SEQ ID NO: 2179543 - RNA, 19 nt, Artificial Sequence
  Description of Artificial Sequence: Synthetic oligonucleotide
cccggugcaggcgcagggg

SEQ ID NO: 2179544 - RNA, 19 nt, Artificial Sequence
  Description of Artificial Sequence: Synthetic oligonucleotide
ccggaggcucguguggcag

SEQ ID NO: 2179545 - RNA, 19 nt, Artificial Sequence
  Description of Artificial Sequence: Synthetic oligonucleotide
gcaggacgaggcgucggac

SEQ ID NO: 2179546 - RNA, 19 nt, Artificial Sequence
  Description of Artificial Sequence: Synthetic oligonucleotide
gcgagcggggcuggugucc

SEQ ID NO: 2179547 - RNA, 19 nt, Artificial Sequence
  Description of Artificial Sequence: Synthetic oligonucleotide
gcagccgaggcaggccagc

SEQ ID NO: 2179548 - RNA, 19 nt, Artificial Sequence
  Description of Artificial Sequence: Synthetic oligonucleotide
ggagagggcggagguucac

SEQ ID NO: 2179549 - RNA, 19 nt, Artificial Sequence
  Description of Artificial Sequence: Synthetic oligonucleotide
ggagcccuccgcagcuagc

SEQ ID NO: 2179550 - RNA, 19 nt, Artificial Sequence
  Description of Artificial Sequence: Synthetic oligonucleotide
caggcggggucgggcacug

SEQ ID NO: 2179551 - RNA, 19 nt, Artificial Sequence
  Description of Artificial Sequence: Synthetic oligonucleotide
cggucgguuccuugcugcc

SEQ ID NO: 2179552 - RNA, 19 nt, Artificial Sequence
  Description of Artificial Sequence: Synthetic oligonucleotide
gcagcgcagcagccaagca

SEQ ID NO: 2179553 - RNA, 19 nt, Artificial Sequence
  Description of Artificial Sequence: Synthetic oligonucleotide
ggcgucggacucggcgccg

SEQ ID NO: 2179554 - RNA, 19 nt, Artificial Sequence
  Description of Artificial Sequence: Synthetic oligonucleotide
gcagcguuagcugcuuccu

SEQ ID NO: 2179555 - RNA, 19 nt, Artificial Sequence
  Description of Artificial Sequence: Synthetic oligonucleotide
gcgcgcucgucucccgggc

SEQ ID NO: 2179556 - RNA, 19 nt, Artificial Sequence
  Description of Artificial Sequence: Synthetic oligonucleotide
gccaaacgggccgucccca

SEQ ID NO: 2179557 - RNA, 19 nt, Artificial Sequence
  Description of Artificial Sequence: Synthetic oligonucleotide
cggccauucccgguguccc

SEQ ID NO: 2179558 - RNA, 19 nt, Artificial Sequence
  Description of Artificial Sequence: Synthetic oligonucleotide
caccgcccucggucgguuc

SEQ ID NO: 2179559 - RNA, 19 nt, Artificial Sequence
  Description of Artificial Sequence: Synthetic oligonucleotide
gucgggcacugcccaggaa

SEQ ID NO: 2179560 - RNA, 19 nt, Artificial Sequence
  Description of Artificial Sequence: Synthetic oligonucleotide
gcuccgguuugcaguguuc

SEQ ID NO: 2179561 - RNA, 19 nt, Artificial Sequence
  Description of Artificial Sequence: Synthetic oligonucleotide
cuccucggcucgggcccgg

SEQ ID NO: 2179562 - RNA, 19 nt, Artificial Sequence
  Description of Artificial Sequence: Synthetic oligonucleotide
ggauggugaccgggaucug

SEQ ID NO: 2179563 - RNA, 19 nt, Artificial Sequence
  Description of Artificial Sequence: Synthetic oligonucleotide
gcccucggucgguuccuug

SEQ ID NO: 2179564 - RNA, 19 nt, Artificial Sequence
  Description of Artificial Sequence: Synthetic oligonucleotide
cgggcugcgccgcucccgg

SEQ ID NO: 2179565 - RNA, 19 nt, Artificial Sequence
  Description of Artificial Sequence: Synthetic oligonucleotide
guucacuggccgccucuuu

SEQ ID NO: 2179566 - RNA, 19 nt, Artificial Sequence
  Description of Artificial Sequence: Synthetic oligonucleotide
uccgggccucggcgcguuc

SEQ ID NO: 2179567 - RNA, 19 nt, Artificial Sequence
  Description of Artificial Sequence: Synthetic oligonucleotide
gcguuagcugcuuccuuuu

SEQ ID NO: 2179568 - RNA, 19 nt, Artificial Sequence
  Description of Artificial Sequence: Synthetic oligonucleotide
ccggugcaggcgcagggga

SEQ ID NO: 2179569 - RNA, 19 nt, Artificial Sequence
  Description of Artificial Sequence: Synthetic oligonucleotide
cggugcaggcgcaggggac

SEQ ID NO: 2179570 - RNA, 19 nt, Artificial Sequence
  Description of Artificial Sequence: Synthetic oligonucleotide
gcuccgugauagggaacca

SEQ ID NO: 2179571 - RNA, 19 nt, Artificial Sequence
  Description of Artificial Sequence: Synthetic oligonucleotide
cuacuuccgccugcagccu

SEQ ID NO: 2179572 - RNA, 19 nt, Artificial Sequence
  Description of Artificial Sequence: Synthetic oligonucleotide
gcggggcuggugucccgug

SEQ ID NO: 2179573 - RNA, 19 nt, Artificial Sequence
  Description of Artificial Sequence: Synthetic oligonucleotide
gggucgcaggacgaggcgu

SEQ ID NO: 2179574 - RNA, 19 nt, Artificial Sequence
  Description of Artificial Sequence: Synthetic oligonucleotide
cggguucggucaagcgagc

SEQ ID NO: 2179575 - RNA, 19 nt, Artificial Sequence
  Description of Artificial Sequence: Synthetic oligonucleotide
gcccgcguccuugcgcccc

SEQ ID NO: 2179576 - RNA, 19 nt, Artificial Sequence
  Description of Artificial Sequence: Synthetic oligonucleotide
gcggagggucgcaggacga

SEQ ID NO: 2179577 - RNA, 19 nt, Artificial Sequence
  Description of Artificial Sequence: Synthetic oligonucleotide
ggcuagugcuaggugggau

SEQ ID NO: 2179578 - RNA, 19 nt, Artificial Sequence
  Description of Artificial Sequence: Synthetic oligonucleotide
gcguucggguucggucaag

SEQ ID NO: 2179579 - RNA, 19 nt, Artificial Sequence
  Description of Artificial Sequence: Synthetic oligonucleotide
cggagagucggcagcguua

SEQ ID NO: 2179580 - RNA, 19 nt, Artificial Sequence
  Description of Artificial Sequence: Synthetic oligonucleotide
gcccucgcccgcguccuug

SEQ ID NO: 2179581 - RNA, 19 nt, Artificial Sequence
  Description of Artificial Sequence: Synthetic oligonucleotide
cccggugguaaggaggcua

SEQ ID NO: 2179582 - RNA, 19 nt, Artificial Sequence
  Description of Artificial Sequence: Synthetic oligonucleotide
ccgggccucggcgcguucc

SEQ ID NO: 2179583 - RNA, 19 nt, Artificial Sequence
  Description of Artificial Sequence: Synthetic oligonucleotide
cagcguuagcugcuuccuu

SEQ ID NO: 2179584 - RNA, 19 nt, Artificial Sequence
  Description of Artificial Sequence: Synthetic oligonucleotide
ccgggaucugguaggggcu

SEQ ID NO: 2179585 - RNA, 19 nt, Artificial Sequence
  Description of Artificial Sequence: Synthetic oligonucleotide
gcugaagcgcaggcggggu

SEQ ID NO: 2179586 - RNA, 19 nt, Artificial Sequence
  Description of Artificial Sequence: Synthetic oligonucleotide
gggcuccgugauagggaac

SEQ ID NO: 2179587 - RNA, 19 nt, Artificial Sequence
  Description of Artificial Sequence: Synthetic oligonucleotide
gggucgcugucggcugcgc

SEQ ID NO: 2179588 - RNA, 19 nt, Artificial Sequence
  Description of Artificial Sequence: Synthetic oligonucleotide
cggacucggcgccgucacg

SEQ ID NO: 2179589 - RNA, 19 nt, Artificial Sequence
  Description of Artificial Sequence: Synthetic oligonucleotide
ccgcucccgggagcguucg

SEQ ID NO: 2179590 - RNA, 19 nt, Artificial Sequence
  Description of Artificial Sequence: Synthetic oligonucleotide
ccucggcucgggcccggug

SEQ ID NO: 2179591 - RNA, 19 nt, Artificial Sequence
  Description of Artificial Sequence: Synthetic oligonucleotide
gggcgacuccccgggccug

SEQ ID NO: 2179592 - RNA, 19 nt, Artificial Sequence
  Description of Artificial Sequence: Synthetic oligonucleotide
ccgucacgcuccgguuugc

SEQ ID NO: 2179593 - RNA, 19 nt, Artificial Sequence
  Description of Artificial Sequence: Synthetic oligonucleotide
cccggaggcucguguggca

SEQ ID NO: 2179594 - RNA, 19 nt, Artificial Sequence
  Description of Artificial Sequence: Synthetic oligonucleotide
gcguccuugcgccccucgu

SEQ ID NO: 2179595 - RNA, 19 nt, Artificial Sequence
  Description of Artificial Sequence: Synthetic oligonucleotide
ggcugcccucgcccgcguc

SEQ ID NO: 2179596 - RNA, 19 nt, Artificial Sequence
  Description of Artificial Sequence: Synthetic oligonucleotide
ccucggucgguuccuugcu

SEQ ID NO: 2179597 - RNA, 19 nt, Artificial Sequence
  Description of Artificial Sequence: Synthetic oligonucleotide
gcugggcucacggcuacuu

SEQ ID NO: 2179598 - RNA, 19 nt, Artificial Sequence
  Description of Artificial Sequence: Synthetic oligonucleotide
ccguccccaccgcccucgg

SEQ ID NO: 2179599 - RNA, 19 nt, Artificial Sequence
  Description of Artificial Sequence: Synthetic oligonucleotide
gggagcguucggguucggu

SEQ ID NO: 2179600 - RNA, 19 nt, Artificial Sequence
  Description of Artificial Sequence: Synthetic oligonucleotide
cugggagagggcggagguu

SEQ ID NO: 2179601 - RNA, 19 nt, Artificial Sequence
  Description of Artificial Sequence: Synthetic oligonucleotide
cgcaggcggggucgggcac

SEQ ID NO: 2179602 - RNA, 19 nt, Artificial Sequence
  Description of Artificial Sequence: Synthetic oligonucleotide
ggggcgcugcugcgcgcuc

SEQ ID NO: 2179603 - RNA, 19 nt, Artificial Sequence
  Description of Artificial Sequence: Synthetic oligonucleotide
ccucuuuggcugagccgcu

SEQ ID NO: 2179604 - RNA, 19 nt, Artificial Sequence
  Description of Artificial Sequence: Synthetic oligonucleotide
cgauagggccccacgggau

SEQ ID NO: 2179605 - RNA, 19 nt, Artificial Sequence
  Description of Artificial Sequence: Synthetic oligonucleotide
cguggaggacugcggccca

SEQ ID NO: 2179606 - RNA, 19 nt, Artificial Sequence
  Description of Artificial Sequence: Synthetic oligonucleotide
cggucaagcgagcggggcu

SEQ ID NO: 2179607 - RNA, 19 nt, Artificial Sequence
  Description of Artificial Sequence: Synthetic oligonucleotide
gcucgucucccgggcgcuc

SEQ ID NO: 2179608 - RNA, 19 nt, Artificial Sequence
  Description of Artificial Sequence: Synthetic oligonucleotide
gcaggcggggucgggcacu

SEQ ID NO: 2179609 - RNA, 19 nt, Artificial Sequence
  Description of Artificial Sequence: Synthetic oligonucleotide
cccgacggccauucccggu

SEQ ID NO: 2179610 - RNA, 19 nt, Artificial Sequence
  Description of Artificial Sequence: Synthetic oligonucleotide
cgucacgcuccgguuugca

SEQ ID NO: 2179611 - RNA, 19 nt, Artificial Sequence
  Description of Artificial Sequence: Synthetic oligonucleotide
ccgcagcuagcccgguggu

SEQ ID NO: 2179612 - RNA, 19 nt, Artificial Sequence
  Description of Artificial Sequence: Synthetic oligonucleotide
cggcgcguuccuucuccaa

SEQ ID NO: 2179613 - RNA, 19 nt, Artificial Sequence
  Description of Artificial Sequence: Synthetic oligonucleotide
gcgucggacucggcgccgu

SEQ ID NO: 2179614 - RNA, 19 nt, Artificial Sequence
  Description of Artificial Sequence: Synthetic oligonucleotide
gcugggcgauagggcccca

SEQ ID NO: 2179615 - RNA, 19 nt, Artificial Sequence
  Description of Artificial Sequence: Synthetic oligonucleotide
gcgcugcugcgcgcucguc

SEQ ID NO: 2179616 - RNA, 19 nt, Artificial Sequence
  Description of Artificial Sequence: Synthetic oligonucleotide
cccgggcgcuccggcucag

SEQ ID NO: 2179617 - RNA, 19 nt, Artificial Sequence
  Description of Artificial Sequence: Synthetic oligonucleotide
cgacggccauucccggugu

SEQ ID NO: 2179618 - RNA, 19 nt, Artificial Sequence
  Description of Artificial Sequence: Synthetic oligonucleotide
cgggagcguucggguucgg

SEQ ID NO: 2179619 - RNA, 19 nt, Artificial Sequence
  Description of Artificial Sequence: Synthetic oligonucleotide
cgcuccgguuugcaguguu

SEQ ID NO: 2179620 - RNA, 19 nt, Artificial Sequence
  Description of Artificial Sequence: Synthetic oligonucleotide
cgccgucacgcuccgguuu

SEQ ID NO: 2179621 - RNA, 19 nt, Artificial Sequence
  Description of Artificial Sequence: Synthetic oligonucleotide
cccgcguccuugcgccccu

SEQ ID NO: 2179622 - RNA, 19 nt, Artificial Sequence
  Description of Artificial Sequence: Synthetic oligonucleotide
gcccaggaaugggcuccgu

SEQ ID NO: 2179623 - RNA, 19 nt, Artificial Sequence
  Description of Artificial Sequence: Synthetic oligonucleotide
cggcugcgcaaggcuucuc

SEQ ID NO: 2179624 - RNA, 19 nt, Artificial Sequence
  Description of Artificial Sequence: Synthetic oligonucleotide
ccgcguccuugcgccccuc

SEQ ID NO: 2179625 - RNA, 19 nt, Artificial Sequence
  Description of Artificial Sequence: Synthetic oligonucleotide
cgggccucggcgcguuccu

SEQ ID NO: 2179626 - RNA, 19 nt, Artificial Sequence
  Description of Artificial Sequence: Synthetic oligonucleotide
ccgcccucggucgguuccu

SEQ ID NO: 2179627 - RNA, 19 nt, Artificial Sequence
  Description of Artificial Sequence: Synthetic oligonucleotide
cgccgcucccgggagcguu

SEQ ID NO: 2179628 - RNA, 19 nt, Artificial Sequence
  Description of Artificial Sequence: Synthetic oligonucleotide
cgcccucggucgguuccuu

SEQ ID NO: 2179629 - RNA, 19 nt, Artificial Sequence
  Description of Artificial Sequence: Synthetic oligonucleotide
aaaugaacaagccacauag

SEQ ID NO: 2179630 - RNA, 19 nt, Artificial Sequence
  Description of Artificial Sequence: Synthetic oligonucleotide
uuauuuagcaccaacagag

SEQ ID NO: 2179631 - RNA, 19 nt, Artificial Sequence
  Description of Artificial Sequence: Synthetic oligonucleotide
gaugagauuagcuugagcc

SEQ ID NO: 2179632 - RNA, 19 nt, Artificial Sequence
  Description of Artificial Sequence: Synthetic oligonucleotide
uauuccuagagaaagagag

SEQ ID NO: 2179633 - RNA, 19 nt, Artificial Sequence
  Description of Artificial Sequence: Synthetic oligonucleotide
guaacaauuauuuagcacc

SEQ ID NO: 2179634 - RNA, 19 nt, Artificial Sequence
  Description of Artificial Sequence: Synthetic oligonucleotide
aguagaacagcugaaaucc

SEQ ID NO: 2179635 - RNA, 19 nt, Artificial Sequence
  Description of Artificial Sequence: Synthetic oligonucleotide
gagacuugaaaacugaccg

SEQ ID NO: 2179636 - RNA, 19 nt, Artificial Sequence
  Description of Artificial Sequence: Synthetic oligonucleotide
uguaauagcacccaccaug

SEQ ID NO: 2179637 - RNA, 19 nt, Artificial Sequence
  Description of Artificial Sequence: Synthetic oligonucleotide
uaaauauuccuagagaaag

SEQ ID NO: 2179638 - RNA, 19 nt, Artificial Sequence
  Description of Artificial Sequence: Synthetic oligonucleotide
augaaugacaccaaggccc

SEQ ID NO: 2179639 - RNA, 19 nt, Artificial Sequence
  Description of Artificial Sequence: Synthetic oligonucleotide
ucuaaauauuccuagagaa

SEQ ID NO: 2179640 - RNA, 19 nt, Artificial Sequence
  Description of Artificial Sequence: Synthetic oligonucleotide
acaccaauagaauucaggg

SEQ ID NO: 2179641 - RNA, 19 nt, Artificial Sequence
  Description of Artificial Sequence: Synthetic oligonucleotide
ucuauagacucuuucagcc

SEQ ID NO: 2179642 - RNA, 19 nt, Artificial Sequence
  Description of Artificial Sequence: Synthetic oligonucleotide
uagagaaagagagagagag

SEQ ID NO: 2179643 - RNA, 19 nt, Artificial Sequence
  Description of Artificial Sequence: Synthetic oligonucleotide
uauaaucaaguauauaaac

SEQ ID NO: 2179644 - RNA, 19 nt, Artificial Sequence
  Description of Artificial Sequence: Synthetic oligonucleotide
aguaacaauuauuuagcac

SEQ ID NO: 2179645 - RNA, 19 nt, Artificial Sequence
  Description of Artificial Sequence: Synthetic oligonucleotide
uuuguugagauucacaaua

SEQ ID NO: 2179646 - RNA, 19 nt, Artificial Sequence
  Description of Artificial Sequence: Synthetic oligonucleotide
gaaagagagagagagagag

SEQ ID NO: 2179647 - RNA, 19 nt, Artificial Sequence
  Description of Artificial Sequence: Synthetic oligonucleotide
aauagcacccaccauguug

SEQ ID NO: 2179648 - RNA, 19 nt, Artificial Sequence
  Description of Artificial Sequence: Synthetic oligonucleotide
uucauguacaaccggaucc

SEQ ID NO: 2179649 - RNA, 19 nt, Artificial Sequence
  Description of Artificial Sequence: Synthetic oligonucleotide
ucugguaagaccuuugucu

SEQ ID NO: 2179650 - RNA, 19 nt, Artificial Sequence
  Description of Artificial Sequence: Synthetic oligonucleotide
aagagagagagagagagag

SEQ ID NO: 2179651 - RNA, 19 nt, Artificial Sequence
  Description of Artificial Sequence: Synthetic oligonucleotide
accaauagaauucagggcu

SEQ ID NO: 2179652 - RNA, 19 nt, Artificial Sequence
  Description of Artificial Sequence: Synthetic oligonucleotide
ugcaguauaaucaaguaua

SEQ ID NO: 2179653 - RNA, 19 nt, Artificial Sequence
  Description of Artificial Sequence: Synthetic oligonucleotide
aauguuugcacauuguauu

SEQ ID NO: 2179654 - RNA, 19 nt, Artificial Sequence
  Description of Artificial Sequence: Synthetic oligonucleotide
auuagcuugagccucagca

SEQ ID NO: 2179655 - RNA, 19 nt, Artificial Sequence
  Description of Artificial Sequence: Synthetic oligonucleotide
acaauuauuuagcaccaac

SEQ ID NO: 2179656 - RNA, 19 nt, Artificial Sequence
  Description of Artificial Sequence: Synthetic oligonucleotide
gagaaagagagagagagag

SEQ ID NO: 2179657 - RNA, 19 nt, Artificial Sequence
  Description of Artificial Sequence: Synthetic oligonucleotide
accuuugucugauaguccc

SEQ ID NO: 2179658 - RNA, 19 nt, Artificial Sequence
  Description of Artificial Sequence: Synthetic oligonucleotide
aucuauagacucuuucagc

SEQ ID NO: 2179659 - RNA, 19 nt, Artificial Sequence
  Description of Artificial Sequence: Synthetic oligonucleotide
uuuucugagugcuuggaag

SEQ ID NO: 2179660 - RNA, 19 nt, Artificial Sequence
  Description of Artificial Sequence: Synthetic oligonucleotide
ucauauuccaccaaaugau

SEQ ID NO: 2179661 - RNA, 19 nt, Artificial Sequence
  Description of Artificial Sequence: Synthetic oligonucleotide
auuaacuucagcacaaguc

SEQ ID NO: 2179662 - RNA, 19 nt, Artificial Sequence
  Description of Artificial Sequence: Synthetic oligonucleotide
ugagauucacaauauuugc

SEQ ID NO: 2179663 - RNA, 19 nt, Artificial Sequence
  Description of Artificial Sequence: Synthetic oligonucleotide
uguuuguugagauucacaa

SEQ ID NO: 2179664 - RNA, 19 nt, Artificial Sequence
  Description of Artificial Sequence: Synthetic oligonucleotide
auagaaauuuccccacagc

SEQ ID NO: 2179665 - RNA, 19 nt, Artificial Sequence
  Description of Artificial Sequence: Synthetic oligonucleotide
ugagccucagcauuuaaag

SEQ ID NO: 2179666 - RNA, 19 nt, Artificial Sequence
  Description of Artificial Sequence: Synthetic oligonucleotide
auugauucagcuuuucugu

SEQ ID NO: 2179667 - RNA, 19 nt, Artificial Sequence
  Description of Artificial Sequence: Synthetic oligonucleotide
aaacaacuccuuucaggcc

SEQ ID NO: 2179668 - RNA, 19 nt, Artificial Sequence
  Description of Artificial Sequence: Synthetic oligonucleotide
uauccaucaagguacagac

SEQ ID NO: 2179669 - RNA, 19 nt, Artificial Sequence
  Description of Artificial Sequence: Synthetic oligonucleotide
guuguugguaauuagggac

SEQ ID NO: 2179670 - RNA, 19 nt, Artificial Sequence
  Description of Artificial Sequence: Synthetic oligonucleotide
cauauugacagccaagcac

SEQ ID NO: 2179671 - RNA, 19 nt, Artificial Sequence
  Description of Artificial Sequence: Synthetic oligonucleotide
cacagcuucaucuuggaag

SEQ ID NO: 2179672 - RNA, 19 nt, Artificial Sequence
  Description of Artificial Sequence: Synthetic oligonucleotide
uaauuagggacaagcaggc

SEQ ID NO: 2179673 - RNA, 19 nt, Artificial Sequence
  Description of Artificial Sequence: Synthetic oligonucleotide
aguaguuucaaguaacaau

SEQ ID NO: 2179674 - RNA, 19 nt, Artificial Sequence
  Description of Artificial Sequence: Synthetic oligonucleotide
gaaauuuccccacagcuuc

SEQ ID NO: 2179675 - RNA, 19 nt, Artificial Sequence
  Description of Artificial Sequence: Synthetic oligonucleotide
gagagagagagagagagag

SEQ ID NO: 2179676 - RNA, 19 nt, Artificial Sequence
  Description of Artificial Sequence: Synthetic oligonucleotide
uuccuagagaaagagagag

SEQ ID NO: 2179677 - RNA, 19 nt, Artificial Sequence
  Description of Artificial Sequence: Synthetic oligonucleotide
agauacagcagucucacga

SEQ ID NO: 2179678 - RNA, 19 nt, Artificial Sequence
  Description of Artificial Sequence: Synthetic oligonucleotide
uugacagccaagcacuucc

SEQ ID NO: 2179679 - RNA, 19 nt, Artificial Sequence
  Description of Artificial Sequence: Synthetic oligonucleotide
gaugaaugacaccaaggcc

SEQ ID NO: 2179680 - RNA, 19 nt, Artificial Sequence
  Description of Artificial Sequence: Synthetic oligonucleotide
aauagaauucagggcuucc

SEQ ID NO: 2179681 - RNA, 19 nt, Artificial Sequence
  Description of Artificial Sequence: Synthetic oligonucleotide
ucaagagugucucugguaa

SEQ ID NO: 2179682 - RNA, 19 nt, Artificial Sequence
  Description of Artificial Sequence: Synthetic oligonucleotide
gauccguuuauccaucaag

SEQ ID NO: 2179683 - RNA, 19 nt, Artificial Sequence
  Description of Artificial Sequence: Synthetic oligonucleotide
gaggucuaaauauuccuag

SEQ ID NO: 2179684 - RNA, 19 nt, Artificial Sequence
  Description of Artificial Sequence: Synthetic oligonucleotide
gauagucccacugaaguag

SEQ ID NO: 2179685 - RNA, 19 nt, Artificial Sequence
  Description of Artificial Sequence: Synthetic oligonucleotide
auuauuuagcaccaacaga

SEQ ID NO: 2179686 - RNA, 19 nt, Artificial Sequence
  Description of Artificial Sequence: Synthetic oligonucleotide
ucacaauauuugcauauug

SEQ ID NO: 2179687 - RNA, 19 nt, Artificial Sequence
  Description of Artificial Sequence: Synthetic oligonucleotide
agccucagcauuuaaagug

SEQ ID NO: 2179688 - RNA, 19 nt, Artificial Sequence
  Description of Artificial Sequence: Synthetic oligonucleotide
aaguaacaauuauuuagca

SEQ ID NO: 2179689 - RNA, 19 nt, Artificial Sequence
  Description of Artificial Sequence: Synthetic oligonucleotide
uaacaauuauuuagcacca

SEQ ID NO: 2179690 - RNA, 19 nt, Artificial Sequence
  Description of Artificial Sequence: Synthetic oligonucleotide
uuauucaugccuucgagua

SEQ ID NO: 2179691 - RNA, 19 nt, Artificial Sequence
  Description of Artificial Sequence: Synthetic oligonucleotide
acagccaagcacuuccagc

SEQ ID NO: 2179692 - RNA, 19 nt, Artificial Sequence
  Description of Artificial Sequence: Synthetic oligonucleotide
aaacugaccgaugagauua

SEQ ID NO: 2179693 - RNA, 19 nt, Artificial Sequence
  Description of Artificial Sequence: Synthetic oligonucleotide
cugaacaccaauagaauuc

SEQ ID NO: 2179694 - RNA, 19 nt, Artificial Sequence
  Description of Artificial Sequence: Synthetic oligonucleotide
uuuaaagugggugagccuc

SEQ ID NO: 2179695 - RNA, 19 nt, Artificial Sequence
  Description of Artificial Sequence: Synthetic oligonucleotide
cugaugaaugacaccaagg

SEQ ID NO: 2179696 - RNA, 19 nt, Artificial Sequence
  Description of Artificial Sequence: Synthetic oligonucleotide
ugcauauugacagccaagc

SEQ ID NO: 2179697 - RNA, 19 nt, Artificial Sequence
  Description of Artificial Sequence: Synthetic oligonucleotide
agaccuuugucugauaguc

SEQ ID NO: 2179698 - RNA, 19 nt, Artificial Sequence
  Description of Artificial Sequence: Synthetic oligonucleotide
gguaauuagggacaagcag

SEQ ID NO: 2179699 - RNA, 19 nt, Artificial Sequence
  Description of Artificial Sequence: Synthetic oligonucleotide
uuuauucaugccuucgagu

SEQ ID NO: 2179700 - RNA, 19 nt, Artificial Sequence
  Description of Artificial Sequence: Synthetic oligonucleotide
uggaguuucuucuaaaauu

SEQ ID NO: 2179701 - RNA, 19 nt, Artificial Sequence
  Description of Artificial Sequence: Synthetic oligonucleotide
aggauuguccuucucuccg

SEQ ID NO: 2179702 - RNA, 19 nt, Artificial Sequence
  Description of Artificial Sequence: Synthetic oligonucleotide
uuguugguaauuagggaca

SEQ ID NO: 2179703 - RNA, 19 nt, Artificial Sequence
  Description of Artificial Sequence: Synthetic oligonucleotide
caucuauagacucuuucag

SEQ ID NO: 2179704 - RNA, 19 nt, Artificial Sequence
  Description of Artificial Sequence: Synthetic oligonucleotide
gagagagagagagaguuag

SEQ ID NO: 2179705 - RNA, 19 nt, Artificial Sequence
  Description of Artificial Sequence: Synthetic oligonucleotide
gaacaagccacauagaaau

SEQ ID NO: 2179706 - RNA, 19 nt, Artificial Sequence
  Description of Artificial Sequence: Synthetic oligonucleotide
ugaacaagccacauagaaa

SEQ ID NO: 2179707 - RNA, 19 nt, Artificial Sequence
  Description of Artificial Sequence: Synthetic oligonucleotide
aaaggaguucuucaucuau

SEQ ID NO: 2179708 - RNA, 19 nt, Artificial Sequence
  Description of Artificial Sequence: Synthetic oligonucleotide
caugccuucgaguagaaca

SEQ ID NO: 2179709 - RNA, 19 nt, Artificial Sequence
  Description of Artificial Sequence: Synthetic oligonucleotide
ucugauagucccacugaag

SEQ ID NO: 2179710 - RNA, 19 nt, Artificial Sequence
  Description of Artificial Sequence: Synthetic oligonucleotide
augaacaagccacauagaa

SEQ ID NO: 2179711 - RNA, 19 nt, Artificial Sequence
  Description of Artificial Sequence: Synthetic oligonucleotide
uugucugauagucccacug

SEQ ID NO: 2179712 - RNA, 19 nt, Artificial Sequence
  Description of Artificial Sequence: Synthetic oligonucleotide
uauuaacuucagcacaagu

SEQ ID NO: 2179713 - RNA, 19 nt, Artificial Sequence
  Description of Artificial Sequence: Synthetic oligonucleotide
cuuaggcuugguuuguggg

SEQ ID NO: 2179714 - RNA, 19 nt, Artificial Sequence
  Description of Artificial Sequence: Synthetic oligonucleotide
uuugcauauugacagccaa

SEQ ID NO: 2179715 - RNA, 19 nt, Artificial Sequence
  Description of Artificial Sequence: Synthetic oligonucleotide
auuagggacaagcaggcaa

SEQ ID NO: 2179716 - RNA, 19 nt, Artificial Sequence
  Description of Artificial Sequence: Synthetic oligonucleotide
cauagaaauuuccccacag

SEQ ID NO: 2179717 - RNA, 19 nt, Artificial Sequence
  Description of Artificial Sequence: Synthetic oligonucleotide
ucaucuuggaagagcagcu

SEQ ID NO: 2179718 - RNA, 19 nt, Artificial Sequence
  Description of Artificial Sequence: Synthetic oligonucleotide
cuuuauucaugccuucgag

SEQ ID NO: 2179719 - RNA, 19 nt, Artificial Sequence
  Description of Artificial Sequence: Synthetic oligonucleotide
auuguauuccuguccagca

SEQ ID NO: 2179720 - RNA, 19 nt, Artificial Sequence
  Description of Artificial Sequence: Synthetic oligonucleotide
uauagacucuuucagccau

SEQ ID NO: 2179721 - RNA, 19 nt, Artificial Sequence
  Description of Artificial Sequence: Synthetic oligonucleotide
caauuauuuagcaccaaca

SEQ ID NO: 2179722 - RNA, 19 nt, Artificial Sequence
  Description of Artificial Sequence: Synthetic oligonucleotide
ugguaauuagggacaagca

SEQ ID NO: 2179723 - RNA, 19 nt, Artificial Sequence
  Description of Artificial Sequence: Synthetic oligonucleotide
gaccgaugagauuagcuug

SEQ ID NO: 2179724 - RNA, 19 nt, Artificial Sequence
  Description of Artificial Sequence: Synthetic oligonucleotide
uauucaugccuucgaguag

SEQ ID NO: 2179725 - RNA, 19 nt, Artificial Sequence
  Description of Artificial Sequence: Synthetic oligonucleotide
aaauguuugcacauuguau

SEQ ID NO: 2179726 - RNA, 19 nt, Artificial Sequence
  Description of Artificial Sequence: Synthetic oligonucleotide
caauauuugcauauugaca

SEQ ID NO: 2179727 - RNA, 19 nt, Artificial Sequence
  Description of Artificial Sequence: Synthetic oligonucleotide
uucggaauauauuugcaua

SEQ ID NO: 2179728 - RNA, 19 nt, Artificial Sequence
  Description of Artificial Sequence: Synthetic oligonucleotide
guuccaucugucaagagug

SEQ ID NO: 2179729 - RNA, 19 nt, Artificial Sequence
  Description of Artificial Sequence: Synthetic oligonucleotide
uuuucaauugauucagcuu

SEQ ID NO: 2179730 - RNA, 19 nt, Artificial Sequence
  Description of Artificial Sequence: Synthetic oligonucleotide
uuauccaucaagguacaga

SEQ ID NO: 2179731 - RNA, 19 nt, Artificial Sequence
  Description of Artificial Sequence: Synthetic oligonucleotide
uuucagggccuuauuaacu

SEQ ID NO: 2179732 - RNA, 19 nt, Artificial Sequence
  Description of Artificial Sequence: Synthetic oligonucleotide
gaaaaggaguucuucaucu

SEQ ID NO: 2179733 - RNA, 19 nt, Artificial Sequence
  Description of Artificial Sequence: Synthetic oligonucleotide
ggucuaaauauuccuagag

SEQ ID NO: 2179734 - RNA, 19 nt, Artificial Sequence
  Description of Artificial Sequence: Synthetic oligonucleotide
ucugaacaccaauagaauu

SEQ ID NO: 2179735 - RNA, 19 nt, Artificial Sequence
  Description of Artificial Sequence: Synthetic oligonucleotide
uuucggaauauauuugcau

SEQ ID NO: 2179736 - RNA, 19 nt, Artificial Sequence
  Description of Artificial Sequence: Synthetic oligonucleotide
uugcauauugacagccaag

SEQ ID NO: 2179737 - RNA, 19 nt, Artificial Sequence
  Description of Artificial Sequence: Synthetic oligonucleotide
cuugaaaacugaccgauga

SEQ ID NO: 2179738 - RNA, 19 nt, Artificial Sequence
  Description of Artificial Sequence: Synthetic oligonucleotide
aagugcaguauaaucaagu

SEQ ID NO: 2179739 - RNA, 19 nt, Artificial Sequence
  Description of Artificial Sequence: Synthetic oligonucleotide
auccguuuauccaucaagg

SEQ ID NO: 2179740 - RNA, 19 nt, Artificial Sequence
  Description of Artificial Sequence: Synthetic oligonucleotide
acugaaggcauuuggaguu

SEQ ID NO: 2179741 - RNA, 19 nt, Artificial Sequence
  Description of Artificial Sequence: Synthetic oligonucleotide
agccacauagaaauuuccc

SEQ ID NO: 2179742 - RNA, 19 nt, Artificial Sequence
  Description of Artificial Sequence: Synthetic oligonucleotide
cuuccuucaaguuaaaggu

SEQ ID NO: 2179743 - RNA, 19 nt, Artificial Sequence
  Description of Artificial Sequence: Synthetic oligonucleotide
ugucaguucuugaagccgu

SEQ ID NO: 2179744 - RNA, 19 nt, Artificial Sequence
  Description of Artificial Sequence: Synthetic oligonucleotide
uuucauguacaaccggauc

SEQ ID NO: 2179745 - RNA, 19 nt, Artificial Sequence
  Description of Artificial Sequence: Synthetic oligonucleotide
caccaauagaauucagggc

SEQ ID NO: 2179746 - RNA, 19 nt, Artificial Sequence
  Description of Artificial Sequence: Synthetic oligonucleotide
cuuuucauguacaaccgga

SEQ ID NO: 2179747 - RNA, 19 nt, Artificial Sequence
  Description of Artificial Sequence: Synthetic oligonucleotide
ugucugauagucccacuga

SEQ ID NO: 2179748 - RNA, 19 nt, Artificial Sequence
  Description of Artificial Sequence: Synthetic oligonucleotide
ugcaagcucaggcaggccu

SEQ ID NO: 2179749 - RNA, 19 nt, Artificial Sequence
  Description of Artificial Sequence: Synthetic oligonucleotide
agugucucugguaagaccu

SEQ ID NO: 2179750 - RNA, 19 nt, Artificial Sequence
  Description of Artificial Sequence: Synthetic oligonucleotide
cuuucagggccuuauuaac

SEQ ID NO: 2179751 - RNA, 19 nt, Artificial Sequence
  Description of Artificial Sequence: Synthetic oligonucleotide
cuuucaggccaaaugaaca

SEQ ID NO: 2179752 - RNA, 19 nt, Artificial Sequence
  Description of Artificial Sequence: Synthetic oligonucleotide
ugaggucuaaauauuccua

SEQ ID NO: 2179753 - RNA, 19 nt, Artificial Sequence
  Description of Artificial Sequence: Synthetic oligonucleotide
uuucaggccaaaugaacaa

SEQ ID NO: 2179754 - RNA, 19 nt, Artificial Sequence
  Description of Artificial Sequence: Synthetic oligonucleotide
aagaccuuugucugauagu

SEQ ID NO: 2179755 - RNA, 19 nt, Artificial Sequence
  Description of Artificial Sequence: Synthetic oligonucleotide
uuaggcuugguuuguggga

SEQ ID NO: 2179756 - RNA, 19 nt, Artificial Sequence
  Description of Artificial Sequence: Synthetic oligonucleotide
cugguaagaccuuugucug

SEQ ID NO: 2179757 - RNA, 19 nt, Artificial Sequence
  Description of Artificial Sequence: Synthetic oligonucleotide
gucuaaauauuccuagaga

SEQ ID NO: 2179758 - RNA, 19 nt, Artificial Sequence
  Description of Artificial Sequence: Synthetic oligonucleotide
aaccggauccguuuaucca

SEQ ID NO: 2179759 - RNA, 19 nt, Artificial Sequence
  Description of Artificial Sequence: Synthetic oligonucleotide
cguuuauccaucaagguac

SEQ ID NO: 2179760 - RNA, 19 nt, Artificial Sequence
  Description of Artificial Sequence: Synthetic oligonucleotide
uuagggacaagcaggcaau

SEQ ID NO: 2179761 - RNA, 19 nt, Artificial Sequence
  Description of Artificial Sequence: Synthetic oligonucleotide
agcauuuaaagugggugag

SEQ ID NO: 2179762 - RNA, 19 nt, Artificial Sequence
  Description of Artificial Sequence: Synthetic oligonucleotide
ugaccgaugagauuagcuu

SEQ ID NO: 2179763 - RNA, 19 nt, Artificial Sequence
  Description of Artificial Sequence: Synthetic oligonucleotide
aggcaaucauuuucaauug

SEQ ID NO: 2179764 - RNA, 19 nt, Artificial Sequence
  Description of Artificial Sequence: Synthetic oligonucleotide
uccgagacuugaaaacuga

SEQ ID NO: 2179765 - RNA, 19 nt, Artificial Sequence
  Description of Artificial Sequence: Synthetic oligonucleotide
cuuggaagacagaguaggc

SEQ ID NO: 2179766 - RNA, 19 nt, Artificial Sequence
  Description of Artificial Sequence: Synthetic oligonucleotide
ucucacgaaaaggaguucu

SEQ ID NO: 2179767 - RNA, 19 nt, Artificial Sequence
  Description of Artificial Sequence: Synthetic oligonucleotide
cucuccgagacuugaaaac

SEQ ID NO: 2179768 - RNA, 19 nt, Artificial Sequence
  Description of Artificial Sequence: Synthetic oligonucleotide
aagagugucucugguaaga

SEQ ID NO: 2179769 - RNA, 19 nt, Artificial Sequence
  Description of Artificial Sequence: Synthetic oligonucleotide
aaaaugguccauacaccug

SEQ ID NO: 2179770 - RNA, 19 nt, Artificial Sequence
  Description of Artificial Sequence: Synthetic oligonucleotide
uuugcacauuguauuccug

SEQ ID NO: 2179771 - RNA, 19 nt, Artificial Sequence
  Description of Artificial Sequence: Synthetic oligonucleotide
uuguugagauucacaauau

SEQ ID NO: 2179772 - RNA, 19 nt, Artificial Sequence
  Description of Artificial Sequence: Synthetic oligonucleotide
uuauuaacuucagcacaag

SEQ ID NO: 2179773 - RNA, 19 nt, Artificial Sequence
  Description of Artificial Sequence: Synthetic oligonucleotide
guucaguuccaggagauac

SEQ ID NO: 2179774 - RNA, 19 nt, Artificial Sequence
  Description of Artificial Sequence: Synthetic oligonucleotide
aguuaaaggucucuuuauu

SEQ ID NO: 2179775 - RNA, 19 nt, Artificial Sequence
  Description of Artificial Sequence: Synthetic oligonucleotide
gcuuucggaauauauuugc

SEQ ID NO: 2179776 - RNA, 19 nt, Artificial Sequence
  Description of Artificial Sequence: Synthetic oligonucleotide
ugcuuggaagacagaguag

SEQ ID NO: 2179777 - RNA, 19 nt, Artificial Sequence
  Description of Artificial Sequence: Synthetic oligonucleotide
ucucugguaagaccuuugu

SEQ ID NO: 2179778 - RNA, 19 nt, Artificial Sequence
  Description of Artificial Sequence: Synthetic oligonucleotide
uuaaccuguuugcaagcuc

SEQ ID NO: 2179779 - RNA, 19 nt, Artificial Sequence
  Description of Artificial Sequence: Synthetic oligonucleotide
uuccaccaaaugauguuga

SEQ ID NO: 2179780 - RNA, 19 nt, Artificial Sequence
  Description of Artificial Sequence: Synthetic oligonucleotide
uccguuuauccaucaaggu

SEQ ID NO: 2179781 - RNA, 19 nt, Artificial Sequence
  Description of Artificial Sequence: Synthetic oligonucleotide
agugcaguauaaucaagua

SEQ ID NO: 2179782 - RNA, 19 nt, Artificial Sequence
  Description of Artificial Sequence: Synthetic oligonucleotide
uuaaagugggugagccucu

SEQ ID NO: 2179783 - RNA, 19 nt, Artificial Sequence
  Description of Artificial Sequence: Synthetic oligonucleotide
uuccuucaaguuaaagguc

SEQ ID NO: 2179784 - RNA, 19 nt, Artificial Sequence
  Description of Artificial Sequence: Synthetic oligonucleotide
guauaaucaaguauauaaa

SEQ ID NO: 2179785 - RNA, 19 nt, Artificial Sequence
  Description of Artificial Sequence: Synthetic oligonucleotide
aaugugaggucuaaauauu

SEQ ID NO: 2179786 - RNA, 19 nt, Artificial Sequence
  Description of Artificial Sequence: Synthetic oligonucleotide
gccacauagaaauuucccc

SEQ ID NO: 2179787 - RNA, 19 nt, Artificial Sequence
  Description of Artificial Sequence: Synthetic oligonucleotide
agagagagagaguuagaaa

SEQ ID NO: 2179788 - RNA, 19 nt, Artificial Sequence
  Description of Artificial Sequence: Synthetic oligonucleotide
agacucuuucagccauucc

SEQ ID NO: 2179789 - RNA, 19 nt, Artificial Sequence
  Description of Artificial Sequence: Synthetic oligonucleotide
ugucaagagugucucuggu

SEQ ID NO: 2179790 - RNA, 19 nt, Artificial Sequence
  Description of Artificial Sequence: Synthetic oligonucleotide
caggccaaaugaacaagcc

SEQ ID NO: 2179791 - RNA, 19 nt, Artificial Sequence
  Description of Artificial Sequence: Synthetic oligonucleotide
cuucgaguagaacagcuga

SEQ ID NO: 2179792 - RNA, 19 nt, Artificial Sequence
  Description of Artificial Sequence: Synthetic oligonucleotide
aaaaggaguucuucaucua

SEQ ID NO: 2179793 - RNA, 19 nt, Artificial Sequence
  Description of Artificial Sequence: Synthetic oligonucleotide
gaguaggcuuuucauguac

SEQ ID NO: 2179794 - RNA, 19 nt, Artificial Sequence
  Description of Artificial Sequence: Synthetic oligonucleotide
gguacagacaggauugucc

SEQ ID NO: 2179795 - RNA, 19 nt, Artificial Sequence
  Description of Artificial Sequence: Synthetic oligonucleotide
aaguaguuucaaguaacaa

SEQ ID NO: 2179796 - RNA, 19 nt, Artificial Sequence
  Description of Artificial Sequence: Synthetic oligonucleotide
uuuaaccuguuugcaagcu

SEQ ID NO: 2179797 - RNA, 19 nt, Artificial Sequence
  Description of Artificial Sequence: Synthetic oligonucleotide
auuuaaagugggugagccu

SEQ ID NO: 2179798 - RNA, 19 nt, Artificial Sequence
  Description of Artificial Sequence: Synthetic oligonucleotide
uucaggccaaaugaacaag

SEQ ID NO: 2179799 - RNA, 19 nt, Artificial Sequence
  Description of Artificial Sequence: Synthetic oligonucleotide
ucuccgagacuugaaaacu

SEQ ID NO: 2179800 - RNA, 19 nt, Artificial Sequence
  Description of Artificial Sequence: Synthetic oligonucleotide
uccagcaagugcaguauaa

SEQ ID NO: 2179801 - RNA, 19 nt, Artificial Sequence
  Description of Artificial Sequence: Synthetic oligonucleotide
agacuugaaaacugaccga

SEQ ID NO: 2179802 - RNA, 19 nt, Artificial Sequence
  Description of Artificial Sequence: Synthetic oligonucleotide
cuccuuucaggccaaauga

SEQ ID NO: 2179803 - RNA, 19 nt, Artificial Sequence
  Description of Artificial Sequence: Synthetic oligonucleotide
ucucuccgagacuugaaaa

SEQ ID NO: 2179804 - RNA, 19 nt, Artificial Sequence
  Description of Artificial Sequence: Synthetic oligonucleotide
auagcacccaccauguugu

SEQ ID NO: 2179805 - RNA, 19 nt, Artificial Sequence
  Description of Artificial Sequence: Synthetic oligonucleotide
uucgaguagaacagcugaa

SEQ ID NO: 2179806 - RNA, 19 nt, Artificial Sequence
  Description of Artificial Sequence: Synthetic oligonucleotide
caggccuucuguaauagca

SEQ ID NO: 2179807 - RNA, 19 nt, Artificial Sequence
  Description of Artificial Sequence: Synthetic oligonucleotide
ccuguuugcaagcucaggc

SEQ ID NO: 2179808 - RNA, 19 nt, Artificial Sequence
  Description of Artificial Sequence: Synthetic oligonucleotide
gauguugaaugugaggucu

SEQ ID NO: 2179809 - RNA, 19 nt, Artificial Sequence
  Description of Artificial Sequence: Synthetic oligonucleotide
gauacagcagucucacgaa

SEQ ID NO: 2179810 - RNA, 19 nt, Artificial Sequence
  Description of Artificial Sequence: Synthetic oligonucleotide
ucagcacaagucugaacac

SEQ ID NO: 2179811 - RNA, 19 nt, Artificial Sequence
  Description of Artificial Sequence: Synthetic oligonucleotide
uagaacagcugaaauccuu

SEQ ID NO: 2179812 - RNA, 19 nt, Artificial Sequence
  Description of Artificial Sequence: Synthetic oligonucleotide
uccuuucaggccaaaugaa

SEQ ID NO: 2179813 - RNA, 19 nt, Artificial Sequence
  Description of Artificial Sequence: Synthetic oligonucleotide
agagugucucugguaagac

SEQ ID NO: 2179814 - RNA, 19 nt, Artificial Sequence
  Description of Artificial Sequence: Synthetic oligonucleotide
gaaguaguuucaaguaaca

SEQ ID NO: 2179815 - RNA, 19 nt, Artificial Sequence
  Description of Artificial Sequence: Synthetic oligonucleotide
caccuguuuguugagauuc

SEQ ID NO: 2179816 - RNA, 19 nt, Artificial Sequence
  Description of Artificial Sequence: Synthetic oligonucleotide
auauuccaccaaaugaugu

SEQ ID NO: 2179817 - RNA, 19 nt, Artificial Sequence
  Description of Artificial Sequence: Synthetic oligonucleotide
uguugagauucacaauauu

SEQ ID NO: 2179818 - RNA, 19 nt, Artificial Sequence
  Description of Artificial Sequence: Synthetic oligonucleotide
guaguuucaaguaacaauu

SEQ ID NO: 2179819 - RNA, 19 nt, Artificial Sequence
  Description of Artificial Sequence: Synthetic oligonucleotide
cacgaaaaggaguucuuca

SEQ ID NO: 2179820 - RNA, 19 nt, Artificial Sequence
  Description of Artificial Sequence: Synthetic oligonucleotide
gagagagagagaguuagaa

SEQ ID NO: 2179821 - RNA, 19 nt, Artificial Sequence
  Description of Artificial Sequence: Synthetic oligonucleotide
uucagggccuuauuaacuu

SEQ ID NO: 2179822 - RNA, 19 nt, Artificial Sequence
  Description of Artificial Sequence: Synthetic oligonucleotide
uuguauuccuguccagcaa

SEQ ID NO: 2179823 - RNA, 19 nt, Artificial Sequence
  Description of Artificial Sequence: Synthetic oligonucleotide
uuugcauaaaaugguccau

SEQ ID NO: 2179824 - RNA, 19 nt, Artificial Sequence
  Description of Artificial Sequence: Synthetic oligonucleotide
aaugaacaagccacauaga

SEQ ID NO: 2179825 - RNA, 19 nt, Artificial Sequence
  Description of Artificial Sequence: Synthetic oligonucleotide
uuugugggacucuguucag

SEQ ID NO: 2179826 - RNA, 19 nt, Artificial Sequence
  Description of Artificial Sequence: Synthetic oligonucleotide
ucagccauuccguggucug

SEQ ID NO: 2179827 - RNA, 19 nt, Artificial Sequence
  Description of Artificial Sequence: Synthetic oligonucleotide
uucaauugauucagcuuuu

SEQ ID NO: 2179828 - RNA, 19 nt, Artificial Sequence
  Description of Artificial Sequence: Synthetic oligonucleotide
uugaagccguguuccaucu

SEQ ID NO: 2179829 - RNA, 19 nt, Artificial Sequence
  Description of Artificial Sequence: Synthetic oligonucleotide
cuuucggaauauauuugca

SEQ ID NO: 2179830 - RNA, 19 nt, Artificial Sequence
  Description of Artificial Sequence: Synthetic oligonucleotide
auagaauucagggcuuccu

SEQ ID NO: 2179831 - RNA, 19 nt, Artificial Sequence
  Description of Artificial Sequence: Synthetic oligonucleotide
uucaaguuaaaggucucuu

SEQ ID NO: 2179832 - RNA, 19 nt, Artificial Sequence
  Description of Artificial Sequence: Synthetic oligonucleotide
aaagagagagagagagaga

SEQ ID NO: 2179833 - RNA, 19 nt, Artificial Sequence
  Description of Artificial Sequence: Synthetic oligonucleotide
cuccgagacuugaaaacug

SEQ ID NO: 2179834 - RNA, 19 nt, Artificial Sequence
  Description of Artificial Sequence: Synthetic oligonucleotide
gacaggauuguccuucucu

SEQ ID NO: 2179835 - RNA, 19 nt, Artificial Sequence
  Description of Artificial Sequence: Synthetic oligonucleotide
augccuucgaguagaacag

SEQ ID NO: 2179836 - RNA, 19 nt, Artificial Sequence
  Description of Artificial Sequence: Synthetic oligonucleotide
cugacugaaggcauuugga

SEQ ID NO: 2179837 - RNA, 19 nt, Artificial Sequence
  Description of Artificial Sequence: Synthetic oligonucleotide
uccaggagauacagcaguc

SEQ ID NO: 2179838 - RNA, 19 nt, Artificial Sequence
  Description of Artificial Sequence: Synthetic oligonucleotide
ucccacugaaguaguuuca

SEQ ID NO: 2179839 - RNA, 19 nt, Artificial Sequence
  Description of Artificial Sequence: Synthetic oligonucleotide
uaggcuugguuugugggac

SEQ ID NO: 2179840 - RNA, 19 nt, Artificial Sequence
  Description of Artificial Sequence: Synthetic oligonucleotide
gagauacagcagucucacg

SEQ ID NO: 2179841 - RNA, 19 nt, Artificial Sequence
  Description of Artificial Sequence: Synthetic oligonucleotide
gccuuauuaacuucagcac

SEQ ID NO: 2179842 - RNA, 19 nt, Artificial Sequence
  Description of Artificial Sequence: Synthetic oligonucleotide
auugacagccaagcacuuc

SEQ ID NO: 2179843 - RNA, 19 nt, Artificial Sequence
  Description of Artificial Sequence: Synthetic oligonucleotide
ugguuugugggacucuguu

SEQ ID NO: 2179844 - RNA, 19 nt, Artificial Sequence
  Description of Artificial Sequence: Synthetic oligonucleotide
ucgaguagaacagcugaaa

SEQ ID NO: 2179845 - RNA, 19 nt, Artificial Sequence
  Description of Artificial Sequence: Synthetic oligonucleotide
uagcuugagccucagcauu

SEQ ID NO: 2179846 - RNA, 19 nt, Artificial Sequence
  Description of Artificial Sequence: Synthetic oligonucleotide
ugguaagaccuuugucuga

SEQ ID NO: 2179847 - RNA, 19 nt, Artificial Sequence
  Description of Artificial Sequence: Synthetic oligonucleotide
caucaagguacagacagga

SEQ ID NO: 2179848 - RNA, 19 nt, Artificial Sequence
  Description of Artificial Sequence: Synthetic oligonucleotide
uuuauccaucaagguacag

SEQ ID NO: 2179849 - RNA, 19 nt, Artificial Sequence
  Description of Artificial Sequence: Synthetic oligonucleotide
cugauagucccacugaagu

SEQ ID NO: 2179850 - RNA, 19 nt, Artificial Sequence
  Description of Artificial Sequence: Synthetic oligonucleotide
uaggcuuuucauguacaac

SEQ ID NO: 2179851 - RNA, 19 nt, Artificial Sequence
  Description of Artificial Sequence: Synthetic oligonucleotide
ucacgaaaaggaguucuuc

SEQ ID NO: 2179852 - RNA, 19 nt, Artificial Sequence
  Description of Artificial Sequence: Synthetic oligonucleotide
agcacaagucugaacacca

SEQ ID NO: 2179853 - RNA, 19 nt, Artificial Sequence
  Description of Artificial Sequence: Synthetic oligonucleotide
ggcuuuucauguacaaccg

SEQ ID NO: 2179854 - RNA, 19 nt, Artificial Sequence
  Description of Artificial Sequence: Synthetic oligonucleotide
ucucuuuauucaugccuuc

SEQ ID NO: 2179855 - RNA, 19 nt, Artificial Sequence
  Description of Artificial Sequence: Synthetic oligonucleotide
aucuuggaagagcagcuuu

SEQ ID NO: 2179856 - RNA, 19 nt, Artificial Sequence
  Description of Artificial Sequence: Synthetic oligonucleotide
caagagugucucugguaag

SEQ ID NO: 2179857 - RNA, 19 nt, Artificial Sequence
  Description of Artificial Sequence: Synthetic oligonucleotide
ugggaggcaugcuuuucug

SEQ ID NO: 2179858 - RNA, 19 nt, Artificial Sequence
  Description of Artificial Sequence: Synthetic oligonucleotide
cuucaucuuggaagagcag

SEQ ID NO: 2179859 - RNA, 19 nt, Artificial Sequence
  Description of Artificial Sequence: Synthetic oligonucleotide
ucaggcaggccuucuguaa

SEQ ID NO: 2179860 - RNA, 19 nt, Artificial Sequence
  Description of Artificial Sequence: Synthetic oligonucleotide
cuguuugcaagcucaggca

SEQ ID NO: 2179861 - RNA, 19 nt, Artificial Sequence
  Description of Artificial Sequence: Synthetic oligonucleotide
cuauagacucuuucagcca

SEQ ID NO: 2179862 - RNA, 19 nt, Artificial Sequence
  Description of Artificial Sequence: Synthetic oligonucleotide
aacaauuauuuagcaccaa

SEQ ID NO: 2179863 - RNA, 19 nt, Artificial Sequence
  Description of Artificial Sequence: Synthetic oligonucleotide
cuucuguaauagcacccac

SEQ ID NO: 2179864 - RNA, 19 nt, Artificial Sequence
  Description of Artificial Sequence: Synthetic oligonucleotide
acugaccgaugagauuagc

SEQ ID NO: 2179865 - RNA, 19 nt, Artificial Sequence
  Description of Artificial Sequence: Synthetic oligonucleotide
aauuagggacaagcaggca

SEQ ID NO: 2179866 - RNA, 19 nt, Artificial Sequence
  Description of Artificial Sequence: Synthetic oligonucleotide
uguugguaauuagggacaa

SEQ ID NO: 2179867 - RNA, 19 nt, Artificial Sequence
  Description of Artificial Sequence: Synthetic oligonucleotide
gcacauuguauuccugucc

SEQ ID NO: 2179868 - RNA, 19 nt, Artificial Sequence
  Description of Artificial Sequence: Synthetic oligonucleotide
acaaccggauccguuuauc

SEQ ID NO: 2179869 - RNA, 19 nt, Artificial Sequence
  Description of Artificial Sequence: Synthetic oligonucleotide
guacagacaggauuguccu

SEQ ID NO: 2179870 - RNA, 19 nt, Artificial Sequence
  Description of Artificial Sequence: Synthetic oligonucleotide
agucucacgaaaaggaguu

SEQ ID NO: 2179871 - RNA, 19 nt, Artificial Sequence
  Description of Artificial Sequence: Synthetic oligonucleotide
cagcagucucacgaaaagg

SEQ ID NO: 2179872 - RNA, 19 nt, Artificial Sequence
  Description of Artificial Sequence: Synthetic oligonucleotide
uucacaauauuugcauauu

SEQ ID NO: 2179873 - RNA, 19 nt, Artificial Sequence
  Description of Artificial Sequence: Synthetic oligonucleotide
acucuuucagccauuccgu

SEQ ID NO: 2179874 - RNA, 19 nt, Artificial Sequence
  Description of Artificial Sequence: Synthetic oligonucleotide
gaagccguguuccaucugu

SEQ ID NO: 2179875 - RNA, 19 nt, Artificial Sequence
  Description of Artificial Sequence: Synthetic oligonucleotide
gauuagcuugagccucagc

SEQ ID NO: 2179876 - RNA, 19 nt, Artificial Sequence
  Description of Artificial Sequence: Synthetic oligonucleotide
cuagagaaagagagagaga

SEQ ID NO: 2179877 - RNA, 19 nt, Artificial Sequence
  Description of Artificial Sequence: Synthetic oligonucleotide
gagagagagagagagaguu

SEQ ID NO: 2179878 - RNA, 19 nt, Artificial Sequence
  Description of Artificial Sequence: Synthetic oligonucleotide
auauuccuagagaaagaga

SEQ ID NO: 2179879 - RNA, 19 nt, Artificial Sequence
  Description of Artificial Sequence: Synthetic oligonucleotide
caucugucaagagugucuc

SEQ ID NO: 2179880 - RNA, 19 nt, Artificial Sequence
  Description of Artificial Sequence: Synthetic oligonucleotide
ucaauugauucagcuuuuc

SEQ ID NO: 2179881 - RNA, 19 nt, Artificial Sequence
  Description of Artificial Sequence: Synthetic oligonucleotide
agaaauuuccccacagcuu

SEQ ID NO: 2179882 - RNA, 19 nt, Artificial Sequence
  Description of Artificial Sequence: Synthetic oligonucleotide
aaggaguucuucaucuaua

SEQ ID NO: 2179883 - RNA, 19 nt, Artificial Sequence
  Description of Artificial Sequence: Synthetic oligonucleotide
uuccaucugucaagagugu

SEQ ID NO: 2179884 - RNA, 19 nt, Artificial Sequence
  Description of Artificial Sequence: Synthetic oligonucleotide
acaagucugaacaccaaua

SEQ ID NO: 2179885 - RNA, 19 nt, Artificial Sequence
  Description of Artificial Sequence: Synthetic oligonucleotide
uucuugaagccguguucca

SEQ ID NO: 2179886 - RNA, 19 nt, Artificial Sequence
  Description of Artificial Sequence: Synthetic oligonucleotide
gugaggucuaaauauuccu

SEQ ID NO: 2179887 - RNA, 19 nt, Artificial Sequence
  Description of Artificial Sequence: Synthetic oligonucleotide
cucugguaagaccuuuguc

SEQ ID NO: 2179888 - RNA, 19 nt, Artificial Sequence
  Description of Artificial Sequence: Synthetic oligonucleotide
agccauuccguggucugac

SEQ ID NO: 2179889 - RNA, 19 nt, Artificial Sequence
  Description of Artificial Sequence: Synthetic oligonucleotide
uucugagugcuuggaagac

SEQ ID NO: 2179890 - RNA, 19 nt, Artificial Sequence
  Description of Artificial Sequence: Synthetic oligonucleotide
cagcacaagucugaacacc

SEQ ID NO: 2179891 - RNA, 19 nt, Artificial Sequence
  Description of Artificial Sequence: Synthetic oligonucleotide
uugguuugugggacucugu

SEQ ID NO: 2179892 - RNA, 19 nt, Artificial Sequence
  Description of Artificial Sequence: Synthetic oligonucleotide
uguugaaugugaggucuaa

SEQ ID NO: 2179893 - RNA, 19 nt, Artificial Sequence
  Description of Artificial Sequence: Synthetic oligonucleotide
gacagaguaggcuuuucau

SEQ ID NO: 2179894 - RNA, 19 nt, Artificial Sequence
  Description of Artificial Sequence: Synthetic oligonucleotide
ccuuauuaacuucagcaca

SEQ ID NO: 2179895 - RNA, 19 nt, Artificial Sequence
  Description of Artificial Sequence: Synthetic oligonucleotide
gaccuuugucugauagucc

SEQ ID NO: 2179896 - RNA, 19 nt, Artificial Sequence
  Description of Artificial Sequence: Synthetic oligonucleotide
cgagacuugaaaacugacc

SEQ ID NO: 2179897 - RNA, 19 nt, Artificial Sequence
  Description of Artificial Sequence: Synthetic oligonucleotide
agggcuuccuucaaguuaa

SEQ ID NO: 2179898 - RNA, 19 nt, Artificial Sequence
  Description of Artificial Sequence: Synthetic oligonucleotide
gacuugaaaacugaccgau

SEQ ID NO: 2179899 - RNA, 19 nt, Artificial Sequence
  Description of Artificial Sequence: Synthetic oligonucleotide
uauugacagccaagcacuu

SEQ ID NO: 2179900 - RNA, 19 nt, Artificial Sequence
  Description of Artificial Sequence: Synthetic oligonucleotide
guaggcuuuucauguacaa

SEQ ID NO: 2179901 - RNA, 19 nt, Artificial Sequence
  Description of Artificial Sequence: Synthetic oligonucleotide
ccuuucaggccaaaugaac

SEQ ID NO: 2179902 - RNA, 19 nt, Artificial Sequence
  Description of Artificial Sequence: Synthetic oligonucleotide
aacugaccgaugagauuag

SEQ ID NO: 2179903 - RNA, 19 nt, Artificial Sequence
  Description of Artificial Sequence: Synthetic oligonucleotide
agacaggauuguccuucuc

SEQ ID NO: 2179904 - RNA, 19 nt, Artificial Sequence
  Description of Artificial Sequence: Synthetic oligonucleotide
aggagauacagcagucuca

SEQ ID NO: 2179905 - RNA, 19 nt, Artificial Sequence
  Description of Artificial Sequence: Synthetic oligonucleotide
aagccguguuccaucuguc

SEQ ID NO: 2179906 - RNA, 19 nt, Artificial Sequence
  Description of Artificial Sequence: Synthetic oligonucleotide
ccugaugaaugacaccaag

SEQ ID NO: 2179907 - RNA, 19 nt, Artificial Sequence
  Description of Artificial Sequence: Synthetic oligonucleotide
agaaagagagagagagaga

SEQ ID NO: 2179908 - RNA, 19 nt, Artificial Sequence
  Description of Artificial Sequence: Synthetic oligonucleotide
accgaugagauuagcuuga

SEQ ID NO: 2179909 - RNA, 19 nt, Artificial Sequence
  Description of Artificial Sequence: Synthetic oligonucleotide
uacaaccggauccguuuau

SEQ ID NO: 2179910 - RNA, 19 nt, Artificial Sequence
  Description of Artificial Sequence: Synthetic oligonucleotide
ucaguucuugaagccgugu

SEQ ID NO: 2179911 - RNA, 19 nt, Artificial Sequence
  Description of Artificial Sequence: Synthetic oligonucleotide
cauuccguggucugacuga

SEQ ID NO: 2179912 - RNA, 19 nt, Artificial Sequence
  Description of Artificial Sequence: Synthetic oligonucleotide
cuuuucugucaguucuuga

SEQ ID NO: 2179913 - RNA, 19 nt, Artificial Sequence
  Description of Artificial Sequence: Synthetic oligonucleotide
acuugaaaacugaccgaug

SEQ ID NO: 2179914 - RNA, 19 nt, Artificial Sequence
  Description of Artificial Sequence: Synthetic oligonucleotide
agaacagcugaaauccuuu

SEQ ID NO: 2179915 - RNA, 19 nt, Artificial Sequence
  Description of Artificial Sequence: Synthetic oligonucleotide
agagaaagagagagagaga

SEQ ID NO: 2179916 - RNA, 19 nt, Artificial Sequence
  Description of Artificial Sequence: Synthetic oligonucleotide
accuguuugcaagcucagg

SEQ ID NO: 2179917 - RNA, 19 nt, Artificial Sequence
  Description of Artificial Sequence: Synthetic oligonucleotide
gucugauagucccacugaa

SEQ ID NO: 2179918 - RNA, 19 nt, Artificial Sequence
  Description of Artificial Sequence: Synthetic oligonucleotide
ugaagccguguuccaucug

SEQ ID NO: 2179919 - RNA, 19 nt, Artificial Sequence
  Description of Artificial Sequence: Synthetic oligonucleotide
ugagugcuuggaagacaga

SEQ ID NO: 2179920 - RNA, 19 nt, Artificial Sequence
  Description of Artificial Sequence: Synthetic oligonucleotide
guaauagcacccaccaugu

SEQ ID NO: 2179921 - RNA, 19 nt, Artificial Sequence
  Description of Artificial Sequence: Synthetic oligonucleotide
ccauacaccuguuuguuga

SEQ ID NO: 2179922 - RNA, 19 nt, Artificial Sequence
  Description of Artificial Sequence: Synthetic oligonucleotide
agaguaggcuuuucaugua

SEQ ID NO: 2179923 - RNA, 19 nt, Artificial Sequence
  Description of Artificial Sequence: Synthetic oligonucleotide
gugcaguauaaucaaguau

SEQ ID NO: 2179924 - RNA, 19 nt, Artificial Sequence
  Description of Artificial Sequence: Synthetic oligonucleotide
guugguaauuagggacaag

SEQ ID NO: 2179925 - RNA, 19 nt, Artificial Sequence
  Description of Artificial Sequence: Synthetic oligonucleotide
uuccccacagcuucaucuu

SEQ ID NO: 2179926 - RNA, 19 nt, Artificial Sequence
  Description of Artificial Sequence: Synthetic oligonucleotide
aacuccuuucaggccaaau

SEQ ID NO: 2179927 - RNA, 19 nt, Artificial Sequence
  Description of Artificial Sequence: Synthetic oligonucleotide
uucaugccuucgaguagaa

SEQ ID NO: 2179928 - RNA, 19 nt, Artificial Sequence
  Description of Artificial Sequence: Synthetic oligonucleotide
uuccguggucugacugaag

SEQ ID NO: 2179929 - RNA, 19 nt, Artificial Sequence
  Description of Artificial Sequence: Synthetic oligonucleotide
ugaaggcauuuggaguuuc

SEQ ID NO: 2179930 - RNA, 19 nt, Artificial Sequence
  Description of Artificial Sequence: Synthetic oligonucleotide
gucaagagugucucuggua

SEQ ID NO: 2179931 - RNA, 19 nt, Artificial Sequence
  Description of Artificial Sequence: Synthetic oligonucleotide
guuuauccaucaagguaca

SEQ ID NO: 2179932 - RNA, 19 nt, Artificial Sequence
  Description of Artificial Sequence: Synthetic oligonucleotide
auacaccuguuuguugaga

SEQ ID NO: 2179933 - RNA, 19 nt, Artificial Sequence
  Description of Artificial Sequence: Synthetic oligonucleotide
agcaccaacagagggcuua

SEQ ID NO: 2179934 - RNA, 19 nt, Artificial Sequence
  Description of Artificial Sequence: Synthetic oligonucleotide
aacaagccacauagaaauu

SEQ ID NO: 2179935 - RNA, 19 nt, Artificial Sequence
  Description of Artificial Sequence: Synthetic oligonucleotide
ugccuucgaguagaacagc

SEQ ID NO: 2179936 - RNA, 19 nt, Artificial Sequence
  Description of Artificial Sequence: Synthetic oligonucleotide
cugaccgaugagauuagcu

SEQ ID NO: 2179937 - RNA, 19 nt, Artificial Sequence
  Description of Artificial Sequence: Synthetic oligonucleotide
caauugauucagcuuuucu

SEQ ID NO: 2179938 - RNA, 19 nt, Artificial Sequence
  Description of Artificial Sequence: Synthetic oligonucleotide
cagucucacgaaaaggagu

SEQ ID NO: 2179939 - RNA, 19 nt, Artificial Sequence
  Description of Artificial Sequence: Synthetic oligonucleotide
gucucugguaagaccuuug

SEQ ID NO: 2179940 - RNA, 19 nt, Artificial Sequence
  Description of Artificial Sequence: Synthetic oligonucleotide
agauuagcuugagccucag

SEQ ID NO: 2179941 - RNA, 19 nt, Artificial Sequence
  Description of Artificial Sequence: Synthetic oligonucleotide
guguuccaucugucaagag

SEQ ID NO: 2179942 - RNA, 19 nt, Artificial Sequence
  Description of Artificial Sequence: Synthetic oligonucleotide
agagagagagagagagaga

SEQ ID NO: 2179943 - RNA, 19 nt, Artificial Sequence
  Description of Artificial Sequence: Synthetic oligonucleotide
agagagagagagagagagu

SEQ ID NO: 2179944 - RNA, 19 nt, Artificial Sequence
  Description of Artificial Sequence: Synthetic oligonucleotide
auagucccacugaaguagu

SEQ ID NO: 2179945 - RNA, 19 nt, Artificial Sequence
  Description of Artificial Sequence: Synthetic oligonucleotide
acaccuguuuguugagauu

SEQ ID NO: 2179946 - RNA, 19 nt, Artificial Sequence
  Description of Artificial Sequence: Synthetic oligonucleotide
agggccuuauuaacuucag

SEQ ID NO: 2179947 - RNA, 19 nt, Artificial Sequence
  Description of Artificial Sequence: Synthetic oligonucleotide
agcacccaccauguuguug

SEQ ID NO: 2179948 - RNA, 19 nt, Artificial Sequence
  Description of Artificial Sequence: Synthetic oligonucleotide
agagggcuuaggcuugguu

SEQ ID NO: 2179949 - RNA, 19 nt, Artificial Sequence
  Description of Artificial Sequence: Synthetic oligonucleotide
gcauauugacagccaagca

SEQ ID NO: 2179950 - RNA, 19 nt, Artificial Sequence
  Description of Artificial Sequence: Synthetic oligonucleotide
ccuucgaguagaacagcug

SEQ ID NO: 2179951 - RNA, 19 nt, Artificial Sequence
  Description of Artificial Sequence: Synthetic oligonucleotide
agagcagcuuucggaauau

SEQ ID NO: 2179952 - RNA, 19 nt, Artificial Sequence
  Description of Artificial Sequence: Synthetic oligonucleotide
uaaagugggugagccucuc

SEQ ID NO: 2179953 - RNA, 19 nt, Artificial Sequence
  Description of Artificial Sequence: Synthetic oligonucleotide
uguucaguuccaggagaua

SEQ ID NO: 2179954 - RNA, 19 nt, Artificial Sequence
  Description of Artificial Sequence: Synthetic oligonucleotide
auuccguggucugacugaa

SEQ ID NO: 2179955 - RNA, 19 nt, Artificial Sequence
  Description of Artificial Sequence: Synthetic oligonucleotide
agagagagagagaguuaga

SEQ ID NO: 2179956 - RNA, 19 nt, Artificial Sequence
  Description of Artificial Sequence: Synthetic oligonucleotide
ccguguuccaucugucaag

SEQ ID NO: 2179957 - RNA, 19 nt, Artificial Sequence
  Description of Artificial Sequence: Synthetic oligonucleotide
gacaagcaggcaaucauuu

SEQ ID NO: 2179958 - RNA, 19 nt, Artificial Sequence
  Description of Artificial Sequence: Synthetic oligonucleotide
cagggcuuccuucaaguua

SEQ ID NO: 2179959 - RNA, 19 nt, Artificial Sequence
  Description of Artificial Sequence: Synthetic oligonucleotide
guugaaugugaggucuaaa

SEQ ID NO: 2179960 - RNA, 19 nt, Artificial Sequence
  Description of Artificial Sequence: Synthetic oligonucleotide
ucaugccuucgaguagaac

SEQ ID NO: 2179961 - RNA, 19 nt, Artificial Sequence
  Description of Artificial Sequence: Synthetic oligonucleotide
aaugguccauacaccuguu

SEQ ID NO: 2179962 - RNA, 19 nt, Artificial Sequence
  Description of Artificial Sequence: Synthetic oligonucleotide
ccgagacuugaaaacugac

SEQ ID NO: 2179963 - RNA, 19 nt, Artificial Sequence
  Description of Artificial Sequence: Synthetic oligonucleotide
guacaaccggauccguuua

SEQ ID NO: 2179964 - RNA, 19 nt, Artificial Sequence
  Description of Artificial Sequence: Synthetic oligonucleotide
ggcaugcuuuucugagugc

SEQ ID NO: 2179965 - RNA, 19 nt, Artificial Sequence
  Description of Artificial Sequence: Synthetic oligonucleotide
caugggaggcaugcuuuuc

SEQ ID NO: 2179966 - RNA, 19 nt, Artificial Sequence
  Description of Artificial Sequence: Synthetic oligonucleotide
agagagagagagagaguua

SEQ ID NO: 2179967 - RNA, 19 nt, Artificial Sequence
  Description of Artificial Sequence: Synthetic oligonucleotide
aucaagguacagacaggau

SEQ ID NO: 2179968 - RNA, 19 nt, Artificial Sequence
  Description of Artificial Sequence: Synthetic oligonucleotide
auccaucaagguacagaca

SEQ ID NO: 2179969 - RNA, 19 nt, Artificial Sequence
  Description of Artificial Sequence: Synthetic oligonucleotide
ccauuccguggucugacug

SEQ ID NO: 2179970 - RNA, 19 nt, Artificial Sequence
  Description of Artificial Sequence: Synthetic oligonucleotide
ggauuguccuucucuccga

SEQ ID NO: 2179971 - RNA, 19 nt, Artificial Sequence
  Description of Artificial Sequence: Synthetic oligonucleotide
ggcaggccuucuguaauag

SEQ ID NO: 2179972 - RNA, 19 nt, Artificial Sequence
  Description of Artificial Sequence: Synthetic oligonucleotide
cucagcauuuaaagugggu

SEQ ID NO: 2179973 - RNA, 19 nt, Artificial Sequence
  Description of Artificial Sequence: Synthetic oligonucleotide
ggcuuccuucaaguuaaag

SEQ ID NO: 2179974 - RNA, 19 nt, Artificial Sequence
  Description of Artificial Sequence: Synthetic oligonucleotide
aggcaggccuucuguaaua

SEQ ID NO: 2179975 - RNA, 19 nt, Artificial Sequence
  Description of Artificial Sequence: Synthetic oligonucleotide
gggugagccucucucuuuc

SEQ ID NO: 2179976 - RNA, 19 nt, Artificial Sequence
  Description of Artificial Sequence: Synthetic oligonucleotide
ccguuuauccaucaaggua

SEQ ID NO: 2179977 - RNA, 19 nt, Artificial Sequence
  Description of Artificial Sequence: Synthetic oligonucleotide
cuucaaguuaaaggucucu

SEQ ID NO: 2179978 - RNA, 19 nt, Artificial Sequence
  Description of Artificial Sequence: Synthetic oligonucleotide
gucugaacaccaauagaau

SEQ ID NO: 2179979 - RNA, 19 nt, Artificial Sequence
  Description of Artificial Sequence: Synthetic oligonucleotide
agcuugagccucagcauuu

SEQ ID NO: 2179980 - RNA, 19 nt, Artificial Sequence
  Description of Artificial Sequence: Synthetic oligonucleotide
cuguucaguuccaggagau

SEQ ID NO: 2179981 - RNA, 19 nt, Artificial Sequence
  Description of Artificial Sequence: Synthetic oligonucleotide
gggacaagcaggcaaucau

SEQ ID NO: 2179982 - RNA, 19 nt, Artificial Sequence
  Description of Artificial Sequence: Synthetic oligonucleotide
caccaacagagggcuuagg

SEQ ID NO: 2179983 - RNA, 19 nt, Artificial Sequence
  Description of Artificial Sequence: Synthetic oligonucleotide
gggaggcaugcuuuucuga

SEQ ID NO: 2179984 - RNA, 19 nt, Artificial Sequence
  Description of Artificial Sequence: Synthetic oligonucleotide
gucucacgaaaaggaguuc

SEQ ID NO: 2179985 - RNA, 19 nt, Artificial Sequence
  Description of Artificial Sequence: Synthetic oligonucleotide
guagaacagcugaaauccu

SEQ ID NO: 2179986 - RNA, 19 nt, Artificial Sequence
  Description of Artificial Sequence: Synthetic oligonucleotide
gguaagaccuuugucugau

SEQ ID NO: 2179987 - RNA, 19 nt, Artificial Sequence
  Description of Artificial Sequence: Synthetic oligonucleotide
auguugaaugugaggucua

SEQ ID NO: 2179988 - RNA, 19 nt, Artificial Sequence
  Description of Artificial Sequence: Synthetic oligonucleotide
guaagaccuuugucugaua

SEQ ID NO: 2179989 - RNA, 19 nt, Artificial Sequence
  Description of Artificial Sequence: Synthetic oligonucleotide
ccuucuguaauagcaccca

SEQ ID NO: 2179990 - RNA, 19 nt, Artificial Sequence
  Description of Artificial Sequence: Synthetic oligonucleotide
guauuccuguccagcaagu

SEQ ID NO: 2179991 - RNA, 19 nt, Artificial Sequence
  Description of Artificial Sequence: Synthetic oligonucleotide
ccaucugucaagagugucu

SEQ ID NO: 2179992 - RNA, 19 nt, Artificial Sequence
  Description of Artificial Sequence: Synthetic oligonucleotide
cucacgaaaaggaguucuu

SEQ ID NO: 2179993 - RNA, 19 nt, Artificial Sequence
  Description of Artificial Sequence: Synthetic oligonucleotide
gcaugcuuuucugagugcu

SEQ ID NO: 2179994 - RNA, 19 nt, Artificial Sequence
  Description of Artificial Sequence: Synthetic oligonucleotide
ggauccguuuauccaucaa

SEQ ID NO: 2179995 - RNA, 19 nt, Artificial Sequence
  Description of Artificial Sequence: Synthetic oligonucleotide
gcaguauaaucaaguauau

SEQ ID NO: 2179996 - RNA, 19 nt, Artificial Sequence
  Description of Artificial Sequence: Synthetic oligonucleotide
ggugagccucucucuuuca

SEQ ID NO: 2179997 - RNA, 19 nt, Artificial Sequence
  Description of Artificial Sequence: Synthetic oligonucleotide
caguucuugaagccguguu

SEQ ID NO: 2179998 - RNA, 19 nt, Artificial Sequence
  Description of Artificial Sequence: Synthetic oligonucleotide
guccauacaccuguuuguu

SEQ ID NO: 2179999 - RNA, 19 nt, Artificial Sequence
  Description of Artificial Sequence: Synthetic oligonucleotide
gcaggcaaucauuuucaau

SEQ ID NO: 2180000 - RNA, 19 nt, Artificial Sequence
  Description of Artificial Sequence: Synthetic oligonucleotide
ggcuuaggcuugguuugug

SEQ ID NO: 2180001 - RNA, 19 nt, Artificial Sequence
  Description of Artificial Sequence: Synthetic oligonucleotide
caugcuuuucugagugcuu

SEQ ID NO: 2180002 - RNA, 19 nt, Artificial Sequence
  Description of Artificial Sequence: Synthetic oligonucleotide
ggcuugguuugugggacuc

SEQ ID NO: 2180003 - RNA, 19 nt, Artificial Sequence
  Description of Artificial Sequence: Synthetic oligonucleotide
ccggauccguuuauccauc

SEQ ID NO: 2180004 - RNA, 19 nt, Artificial Sequence
  Description of Artificial Sequence: Synthetic oligonucleotide
gugggugagccucucucuu

SEQ ID NO: 2180005 - RNA, 19 nt, Artificial Sequence
  Description of Artificial Sequence: Synthetic oligonucleotide
caggcaggccuucuguaau

SEQ ID NO: 2180006 - RNA, 19 nt, Artificial Sequence
  Description of Artificial Sequence: Synthetic oligonucleotide
cuguaauagcacccaccau

SEQ ID NO: 2180007 - RNA, 19 nt, Artificial Sequence
  Description of Artificial Sequence: Synthetic oligonucleotide
uagcacccaccauguuguu

SEQ ID NO: 2180008 - RNA, 19 nt, Artificial Sequence
  Description of Artificial Sequence: Synthetic oligonucleotide
ccgaugagauuagcuugag

SEQ ID NO: 2180009 - RNA, 19 nt, Artificial Sequence
  Description of Artificial Sequence: Synthetic oligonucleotide
ccuucucuccgagacuuga

SEQ ID NO: 2180010 - RNA, 19 nt, Artificial Sequence
  Description of Artificial Sequence: Synthetic oligonucleotide
cauguacaaccggauccgu

SEQ ID NO: 2180011 - RNA, 19 nt, Artificial Sequence
  Description of Artificial Sequence: Synthetic oligonucleotide
gccuucgaguagaacagcu

SEQ ID NO: 2180012 - RNA, 19 nt, Artificial Sequence
  Description of Artificial Sequence: Synthetic oligonucleotide
acccaccauguuguuggua

SEQ ID NO: 2180013 - RNA, 19 nt, Artificial Sequence
  Description of Artificial Sequence: Synthetic oligonucleotide
cguguuccaucugucaaga

SEQ ID NO: 2180014 - RNA, 19 nt, Artificial Sequence
  Description of Artificial Sequence: Synthetic oligonucleotide
ccaauagaauucagggcuu

SEQ ID NO: 2180015 - RNA, 19 nt, Artificial Sequence
  Description of Artificial Sequence: Synthetic oligonucleotide
ggcaugggaggcaugcuuu

SEQ ID NO: 2180016 - RNA, 19 nt, Artificial Sequence
  Description of Artificial Sequence: Synthetic oligonucleotide
cugaaggcauuuggaguuu

SEQ ID NO: 2180017 - RNA, 19 nt, Artificial Sequence
  Description of Artificial Sequence: Synthetic oligonucleotide
cggauccguuuauccauca

SEQ ID NO: 2180018 - RNA, 19 nt, Artificial Sequence
  Description of Artificial Sequence: Synthetic oligonucleotide
gccauuccguggucugacu

SEQ ID NO: 2180019 - RNA, 19 nt, Artificial Sequence
  Description of Artificial Sequence: Synthetic oligonucleotide
gcuugguuugugggacucu

SEQ ID NO: 2180020 - RNA, 19 nt, Artificial Sequence
  Description of Artificial Sequence: Synthetic oligonucleotide
caacuccuuucaggccaaa

SEQ ID NO: 2180021 - RNA, 19 nt, Artificial Sequence
  Description of Artificial Sequence: Synthetic oligonucleotide
ccaccauguuguugguaau

SEQ ID NO: 2180022 - RNA, 19 nt, Artificial Sequence
  Description of Artificial Sequence: Synthetic oligonucleotide
cuaauuaccacuauugugc

SEQ ID NO: 2180023 - RNA, 19 nt, Artificial Sequence
  Description of Artificial Sequence: Synthetic oligonucleotide
uacuuuauaauucaagaca

SEQ ID NO: 2180024 - RNA, 19 nt, Artificial Sequence
  Description of Artificial Sequence: Synthetic oligonucleotide
uuaucaguuaccaacagga

SEQ ID NO: 2180025 - RNA, 19 nt, Artificial Sequence
  Description of Artificial Sequence: Synthetic oligonucleotide
auugaguggaaguaggacc

SEQ ID NO: 2180026 - RNA, 19 nt, Artificial Sequence
  Description of Artificial Sequence: Synthetic oligonucleotide
ucaaaagucagaaaaguga

SEQ ID NO: 2180027 - RNA, 19 nt, Artificial Sequence
  Description of Artificial Sequence: Synthetic oligonucleotide
ucuuuuaucaguuaccaac

SEQ ID NO: 2180028 - RNA, 19 nt, Artificial Sequence
  Description of Artificial Sequence: Synthetic oligonucleotide
aggagaacuaaacagacag

SEQ ID NO: 2180029 - RNA, 19 nt, Artificial Sequence
  Description of Artificial Sequence: Synthetic oligonucleotide
uccuagauaaccuaucucc

SEQ ID NO: 2180030 - RNA, 19 nt, Artificial Sequence
  Description of Artificial Sequence: Synthetic oligonucleotide
aaaggaauaagggaaucac

SEQ ID NO: 2180031 - RNA, 19 nt, Artificial Sequence
  Description of Artificial Sequence: Synthetic oligonucleotide
uuuuguguaugaaacguag

SEQ ID NO: 2180032 - RNA, 19 nt, Artificial Sequence
  Description of Artificial Sequence: Synthetic oligonucleotide
aaaguagacaucugaccac

SEQ ID NO: 2180033 - RNA, 19 nt, Artificial Sequence
  Description of Artificial Sequence: Synthetic oligonucleotide
ugaucugaggaacaagagg

SEQ ID NO: 2180034 - RNA, 19 nt, Artificial Sequence
  Description of Artificial Sequence: Synthetic oligonucleotide
ugcaguuaaaagcucaacc

SEQ ID NO: 2180035 - RNA, 19 nt, Artificial Sequence
  Description of Artificial Sequence: Synthetic oligonucleotide
aggcacaugaguuacugcc

SEQ ID NO: 2180036 - RNA, 19 nt, Artificial Sequence
  Description of Artificial Sequence: Synthetic oligonucleotide
uuuuaucuauguauuacug

SEQ ID NO: 2180037 - RNA, 19 nt, Artificial Sequence
  Description of Artificial Sequence: Synthetic oligonucleotide
uguacaaccagaaaagcau

SEQ ID NO: 2180038 - RNA, 19 nt, Artificial Sequence
  Description of Artificial Sequence: Synthetic oligonucleotide
cuuaggaccaagaaauagg

SEQ ID NO: 2180039 - RNA, 19 nt, Artificial Sequence
  Description of Artificial Sequence: Synthetic oligonucleotide
auuaccacuauugugcugg

SEQ ID NO: 2180040 - RNA, 19 nt, Artificial Sequence
  Description of Artificial Sequence: Synthetic oligonucleotide
ugucucacuaugcagguag

SEQ ID NO: 2180041 - RNA, 19 nt, Artificial Sequence
  Description of Artificial Sequence: Synthetic oligonucleotide
aguauaugagcugggaacc

SEQ ID NO: 2180042 - RNA, 19 nt, Artificial Sequence
  Description of Artificial Sequence: Synthetic oligonucleotide
ucaucugcagaacaggccc

SEQ ID NO: 2180043 - RNA, 19 nt, Artificial Sequence
  Description of Artificial Sequence: Synthetic oligonucleotide
acuagacuaguuuuggauc

SEQ ID NO: 2180044 - RNA, 19 nt, Artificial Sequence
  Description of Artificial Sequence: Synthetic oligonucleotide
aucuauguauuacugaugu

SEQ ID NO: 2180045 - RNA, 19 nt, Artificial Sequence
  Description of Artificial Sequence: Synthetic oligonucleotide
caagaaauaggcuggacac

SEQ ID NO: 2180046 - RNA, 19 nt, Artificial Sequence
  Description of Artificial Sequence: Synthetic oligonucleotide
uuuguguaugaaacguagg

SEQ ID NO: 2180047 - RNA, 19 nt, Artificial Sequence
  Description of Artificial Sequence: Synthetic oligonucleotide
guuaccaacaggaucaugc

SEQ ID NO: 2180048 - RNA, 19 nt, Artificial Sequence
  Description of Artificial Sequence: Synthetic oligonucleotide
aagcucaacccacagccac

SEQ ID NO: 2180049 - RNA, 19 nt, Artificial Sequence
  Description of Artificial Sequence: Synthetic oligonucleotide
cuagacuaguuuuggaucc

SEQ ID NO: 2180050 - RNA, 19 nt, Artificial Sequence
  Description of Artificial Sequence: Synthetic oligonucleotide
auuuuaucuauguauuacu

SEQ ID NO: 2180051 - RNA, 19 nt, Artificial Sequence
  Description of Artificial Sequence: Synthetic oligonucleotide
ucauuugucucccaaagua

SEQ ID NO: 2180052 - RNA, 19 nt, Artificial Sequence
  Description of Artificial Sequence: Synthetic oligonucleotide
agcaaaguuuuccagaccu

SEQ ID NO: 2180053 - RNA, 19 nt, Artificial Sequence
  Description of Artificial Sequence: Synthetic oligonucleotide
ugaaacguagggcauugag

SEQ ID NO: 2180054 - RNA, 19 nt, Artificial Sequence
  Description of Artificial Sequence: Synthetic oligonucleotide
uaguuuuggauccugggcu

SEQ ID NO: 2180055 - RNA, 19 nt, Artificial Sequence
  Description of Artificial Sequence: Synthetic oligonucleotide
uaauucaagacagagcccu

SEQ ID NO: 2180056 - RNA, 19 nt, Artificial Sequence
  Description of Artificial Sequence: Synthetic oligonucleotide
aauagcugauaucgcuugg

SEQ ID NO: 2180057 - RNA, 19 nt, Artificial Sequence
  Description of Artificial Sequence: Synthetic oligonucleotide
aagaaauaggcuggacacc

SEQ ID NO: 2180058 - RNA, 19 nt, Artificial Sequence
  Description of Artificial Sequence: Synthetic oligonucleotide
accuaucucccuuuuauuc

SEQ ID NO: 2180059 - RNA, 19 nt, Artificial Sequence
  Description of Artificial Sequence: Synthetic oligonucleotide
cugggaaccaucuagaaga

SEQ ID NO: 2180060 - RNA, 19 nt, Artificial Sequence
  Description of Artificial Sequence: Synthetic oligonucleotide
accacuauugugcugggag

SEQ ID NO: 2180061 - RNA, 19 nt, Artificial Sequence
  Description of Artificial Sequence: Synthetic oligonucleotide
ggagguugcaguuaaaagc

SEQ ID NO: 2180062 - RNA, 19 nt, Artificial Sequence
  Description of Artificial Sequence: Synthetic oligonucleotide
gaagacagggacuagacua

SEQ ID NO: 2180063 - RNA, 19 nt, Artificial Sequence
  Description of Artificial Sequence: Synthetic oligonucleotide
uuguggaaggucucgaacc

SEQ ID NO: 2180064 - RNA, 19 nt, Artificial Sequence
  Description of Artificial Sequence: Synthetic oligonucleotide
gacucccuuaaucugaccc

SEQ ID NO: 2180065 - RNA, 19 nt, Artificial Sequence
  Description of Artificial Sequence: Synthetic oligonucleotide
aguaaaaggacuuguggaa

SEQ ID NO: 2180066 - RNA, 19 nt, Artificial Sequence
  Description of Artificial Sequence: Synthetic oligonucleotide
aguuaaaagcucaacccac

SEQ ID NO: 2180067 - RNA, 19 nt, Artificial Sequence
  Description of Artificial Sequence: Synthetic oligonucleotide
caguauaugagcugggaac

SEQ ID NO: 2180068 - RNA, 19 nt, Artificial Sequence
  Description of Artificial Sequence: Synthetic oligonucleotide
gaacuaaacagacagcaaa

SEQ ID NO: 2180069 - RNA, 19 nt, Artificial Sequence
  Description of Artificial Sequence: Synthetic oligonucleotide
uuagacuccccuugagugg

SEQ ID NO: 2180070 - RNA, 19 nt, Artificial Sequence
  Description of Artificial Sequence: Synthetic oligonucleotide
agcugauaucgcuuggggc

SEQ ID NO: 2180071 - RNA, 19 nt, Artificial Sequence
  Description of Artificial Sequence: Synthetic oligonucleotide
aaggcacaugaguuacugc

SEQ ID NO: 2180072 - RNA, 19 nt, Artificial Sequence
  Description of Artificial Sequence: Synthetic oligonucleotide
aggacugccuccuagauaa

SEQ ID NO: 2180073 - RNA, 19 nt, Artificial Sequence
  Description of Artificial Sequence: Synthetic oligonucleotide
cuucaaaggaauaagggaa

SEQ ID NO: 2180074 - RNA, 19 nt, Artificial Sequence
  Description of Artificial Sequence: Synthetic oligonucleotide
uauuacugaugucauuugu

SEQ ID NO: 2180075 - RNA, 19 nt, Artificial Sequence
  Description of Artificial Sequence: Synthetic oligonucleotide
cuauguauuacugauguca

SEQ ID NO: 2180076 - RNA, 19 nt, Artificial Sequence
  Description of Artificial Sequence: Synthetic oligonucleotide
uguguaugaaacguagggc

SEQ ID NO: 2180077 - RNA, 19 nt, Artificial Sequence
  Description of Artificial Sequence: Synthetic oligonucleotide
uaucuauguauuacugaug

SEQ ID NO: 2180078 - RNA, 19 nt, Artificial Sequence
  Description of Artificial Sequence: Synthetic oligonucleotide
uaaccuaucucccuuuuau

SEQ ID NO: 2180079 - RNA, 19 nt, Artificial Sequence
  Description of Artificial Sequence: Synthetic oligonucleotide
aggaacaagaggugagugg

SEQ ID NO: 2180080 - RNA, 19 nt, Artificial Sequence
  Description of Artificial Sequence: Synthetic oligonucleotide
ugucaaaagucagaaaagu

SEQ ID NO: 2180081 - RNA, 19 nt, Artificial Sequence
  Description of Artificial Sequence: Synthetic oligonucleotide
cuaguuuuggauccugggc

SEQ ID NO: 2180082 - RNA, 19 nt, Artificial Sequence
  Description of Artificial Sequence: Synthetic oligonucleotide
guguaugaaacguagggca

SEQ ID NO: 2180083 - RNA, 19 nt, Artificial Sequence
  Description of Artificial Sequence: Synthetic oligonucleotide
aauaggcuggacaccaggg

SEQ ID NO: 2180084 - RNA, 19 nt, Artificial Sequence
  Description of Artificial Sequence: Synthetic oligonucleotide
aauaagggaaucacuaaaa

SEQ ID NO: 2180085 - RNA, 19 nt, Artificial Sequence
  Description of Artificial Sequence: Synthetic oligonucleotide
gcaguuaaaagcucaaccc

SEQ ID NO: 2180086 - RNA, 19 nt, Artificial Sequence
  Description of Artificial Sequence: Synthetic oligonucleotide
uggagguugcaguuaaaag

SEQ ID NO: 2180087 - RNA, 19 nt, Artificial Sequence
  Description of Artificial Sequence: Synthetic oligonucleotide
accacaguauaugagcugg

SEQ ID NO: 2180088 - RNA, 19 nt, Artificial Sequence
  Description of Artificial Sequence: Synthetic oligonucleotide
cauaggacacagcugaaac

SEQ ID NO: 2180089 - RNA, 19 nt, Artificial Sequence
  Description of Artificial Sequence: Synthetic oligonucleotide
agagcuuagacuccccuug

SEQ ID NO: 2180090 - RNA, 19 nt, Artificial Sequence
  Description of Artificial Sequence: Synthetic oligonucleotide
ugcuaauuaccacuauugu

SEQ ID NO: 2180091 - RNA, 19 nt, Artificial Sequence
  Description of Artificial Sequence: Synthetic oligonucleotide
ucacuaugcagguagugcu

SEQ ID NO: 2180092 - RNA, 19 nt, Artificial Sequence
  Description of Artificial Sequence: Synthetic oligonucleotide
ucaugcaaugugucaaaag

SEQ ID NO: 2180093 - RNA, 19 nt, Artificial Sequence
  Description of Artificial Sequence: Synthetic oligonucleotide
aaaggcacaugaguuacug

SEQ ID NO: 2180094 - RNA, 19 nt, Artificial Sequence
  Description of Artificial Sequence: Synthetic oligonucleotide
aacguagggcauugagugg

SEQ ID NO: 2180095 - RNA, 19 nt, Artificial Sequence
  Description of Artificial Sequence: Synthetic oligonucleotide
caaaguuuuccagaccugg

SEQ ID NO: 2180096 - RNA, 19 nt, Artificial Sequence
  Description of Artificial Sequence: Synthetic oligonucleotide
ggaaccaucuagaagacag

SEQ ID NO: 2180097 - RNA, 19 nt, Artificial Sequence
  Description of Artificial Sequence: Synthetic oligonucleotide
gaauaagggaaucacuaaa

SEQ ID NO: 2180098 - RNA, 19 nt, Artificial Sequence
  Description of Artificial Sequence: Synthetic oligonucleotide
uagcugauaucgcuugggg

SEQ ID NO: 2180099 - RNA, 19 nt, Artificial Sequence
  Description of Artificial Sequence: Synthetic oligonucleotide
uuuguacaaccagaaaagc

SEQ ID NO: 2180100 - RNA, 19 nt, Artificial Sequence
  Description of Artificial Sequence: Synthetic oligonucleotide
uaauaucuugaagccauag

SEQ ID NO: 2180101 - RNA, 19 nt, Artificial Sequence
  Description of Artificial Sequence: Synthetic oligonucleotide
caacccacagccacgaaag

SEQ ID NO: 2180102 - RNA, 19 nt, Artificial Sequence
  Description of Artificial Sequence: Synthetic oligonucleotide
ccaagugugauccuggagg

SEQ ID NO: 2180103 - RNA, 19 nt, Artificial Sequence
  Description of Artificial Sequence: Synthetic oligonucleotide
ugugccuuagucuuuuauc

SEQ ID NO: 2180104 - RNA, 19 nt, Artificial Sequence
  Description of Artificial Sequence: Synthetic oligonucleotide
uucaaaggaauaagggaau

SEQ ID NO: 2180105 - RNA, 19 nt, Artificial Sequence
  Description of Artificial Sequence: Synthetic oligonucleotide
gauccugaugcuaauuacc

SEQ ID NO: 2180106 - RNA, 19 nt, Artificial Sequence
  Description of Artificial Sequence: Synthetic oligonucleotide
aaucugacccugucccuuc

SEQ ID NO: 2180107 - RNA, 19 nt, Artificial Sequence
  Description of Artificial Sequence: Synthetic oligonucleotide
ggcccaauagcugauaucg

SEQ ID NO: 2180108 - RNA, 19 nt, Artificial Sequence
  Description of Artificial Sequence: Synthetic oligonucleotide
uuugucucccaaaguagac

SEQ ID NO: 2180109 - RNA, 19 nt, Artificial Sequence
  Description of Artificial Sequence: Synthetic oligonucleotide
auaauucaagacagagccc

SEQ ID NO: 2180110 - RNA, 19 nt, Artificial Sequence
  Description of Artificial Sequence: Synthetic oligonucleotide
uguuccuguucucaagcca

SEQ ID NO: 2180111 - RNA, 19 nt, Artificial Sequence
  Description of Artificial Sequence: Synthetic oligonucleotide
aguuacugccuguguagac

SEQ ID NO: 2180112 - RNA, 19 nt, Artificial Sequence
  Description of Artificial Sequence: Synthetic oligonucleotide
uaugagcugggaaccaucu

SEQ ID NO: 2180113 - RNA, 19 nt, Artificial Sequence
  Description of Artificial Sequence: Synthetic oligonucleotide
aucgcuuggggcuuccagg

SEQ ID NO: 2180114 - RNA, 19 nt, Artificial Sequence
  Description of Artificial Sequence: Synthetic oligonucleotide
augcuaauuaccacuauug

SEQ ID NO: 2180115 - RNA, 19 nt, Artificial Sequence
  Description of Artificial Sequence: Synthetic oligonucleotide
gaucugaggaacaagaggu

SEQ ID NO: 2180116 - RNA, 19 nt, Artificial Sequence
  Description of Artificial Sequence: Synthetic oligonucleotide
agaaauaggcuggacacca

SEQ ID NO: 2180117 - RNA, 19 nt, Artificial Sequence
  Description of Artificial Sequence: Synthetic oligonucleotide
aucucgguccuucaaagga

SEQ ID NO: 2180118 - RNA, 19 nt, Artificial Sequence
  Description of Artificial Sequence: Synthetic oligonucleotide
uaucucgguccuucaaagg

SEQ ID NO: 2180119 - RNA, 19 nt, Artificial Sequence
  Description of Artificial Sequence: Synthetic oligonucleotide
uguaugaaacguagggcau

SEQ ID NO: 2180120 - RNA, 19 nt, Artificial Sequence
  Description of Artificial Sequence: Synthetic oligonucleotide
uaauuaccacuauugugcu

SEQ ID NO: 2180121 - RNA, 19 nt, Artificial Sequence
  Description of Artificial Sequence: Synthetic oligonucleotide
aauuaccacuauugugcug

SEQ ID NO: 2180122 - RNA, 19 nt, Artificial Sequence
  Description of Artificial Sequence: Synthetic oligonucleotide
agucuuuuaucaguuacca

SEQ ID NO: 2180123 - RNA, 19 nt, Artificial Sequence
  Description of Artificial Sequence: Synthetic oligonucleotide
ucaacccacagccacgaaa

SEQ ID NO: 2180124 - RNA, 19 nt, Artificial Sequence
  Description of Artificial Sequence: Synthetic oligonucleotide
aagacagggacuagacuag

SEQ ID NO: 2180125 - RNA, 19 nt, Artificial Sequence
  Description of Artificial Sequence: Synthetic oligonucleotide
auguacuuuauaauucaag

SEQ ID NO: 2180126 - RNA, 19 nt, Artificial Sequence
  Description of Artificial Sequence: Synthetic oligonucleotide
uaugaaacguagggcauug

SEQ ID NO: 2180127 - RNA, 19 nt, Artificial Sequence
  Description of Artificial Sequence: Synthetic oligonucleotide
acaggucccaagacgagcc

SEQ ID NO: 2180128 - RNA, 19 nt, Artificial Sequence
  Description of Artificial Sequence: Synthetic oligonucleotide
caauagcugauaucgcuug

SEQ ID NO: 2180129 - RNA, 19 nt, Artificial Sequence
  Description of Artificial Sequence: Synthetic oligonucleotide
agugugauccuggagguug

SEQ ID NO: 2180130 - RNA, 19 nt, Artificial Sequence
  Description of Artificial Sequence: Synthetic oligonucleotide
ugucucccaaaguagacau

SEQ ID NO: 2180131 - RNA, 19 nt, Artificial Sequence
  Description of Artificial Sequence: Synthetic oligonucleotide
gucaaaagucagaaaagug

SEQ ID NO: 2180132 - RNA, 19 nt, Artificial Sequence
  Description of Artificial Sequence: Synthetic oligonucleotide
aaguagacaucugaccaca

SEQ ID NO: 2180133 - RNA, 19 nt, Artificial Sequence
  Description of Artificial Sequence: Synthetic oligonucleotide
augcaaugugucaaaaguc

SEQ ID NO: 2180134 - RNA, 19 nt, Artificial Sequence
  Description of Artificial Sequence: Synthetic oligonucleotide
ugauccuggagguugcagu

SEQ ID NO: 2180135 - RNA, 19 nt, Artificial Sequence
  Description of Artificial Sequence: Synthetic oligonucleotide
cugaguaaaaggacuugug

SEQ ID NO: 2180136 - RNA, 19 nt, Artificial Sequence
  Description of Artificial Sequence: Synthetic oligonucleotide
gugccuuagucuuuuauca

SEQ ID NO: 2180137 - RNA, 19 nt, Artificial Sequence
  Description of Artificial Sequence: Synthetic oligonucleotide
cucacuaugcagguagugc

SEQ ID NO: 2180138 - RNA, 19 nt, Artificial Sequence
  Description of Artificial Sequence: Synthetic oligonucleotide
uagauaaccuaucucccuu

SEQ ID NO: 2180139 - RNA, 19 nt, Artificial Sequence
  Description of Artificial Sequence: Synthetic oligonucleotide
auagcugauaucgcuuggg

SEQ ID NO: 2180140 - RNA, 19 nt, Artificial Sequence
  Description of Artificial Sequence: Synthetic oligonucleotide
aaggaauaagggaaucacu

SEQ ID NO: 2180141 - RNA, 19 nt, Artificial Sequence
  Description of Artificial Sequence: Synthetic oligonucleotide
uaucgcuuggggcuuccag

SEQ ID NO: 2180142 - RNA, 19 nt, Artificial Sequence
  Description of Artificial Sequence: Synthetic oligonucleotide
ccaucuagaagacagggac

SEQ ID NO: 2180143 - RNA, 19 nt, Artificial Sequence
  Description of Artificial Sequence: Synthetic oligonucleotide
cucgaaccagcccaagucc

SEQ ID NO: 2180144 - RNA, 19 nt, Artificial Sequence
  Description of Artificial Sequence: Synthetic oligonucleotide
guauuacugaugucauuug

SEQ ID NO: 2180145 - RNA, 19 nt, Artificial Sequence
  Description of Artificial Sequence: Synthetic oligonucleotide
uagggcauugaguggaagu

SEQ ID NO: 2180146 - RNA, 19 nt, Artificial Sequence
  Description of Artificial Sequence: Synthetic oligonucleotide
cuuguggaaggucucgaac

SEQ ID NO: 2180147 - RNA, 19 nt, Artificial Sequence
  Description of Artificial Sequence: Synthetic oligonucleotide
agggaaaccccagagugag

SEQ ID NO: 2180148 - RNA, 19 nt, Artificial Sequence
  Description of Artificial Sequence: Synthetic oligonucleotide
ugacccugucccuucaucu

SEQ ID NO: 2180149 - RNA, 19 nt, Artificial Sequence
  Description of Artificial Sequence: Synthetic oligonucleotide
aggaucaugcaauguguca

SEQ ID NO: 2180150 - RNA, 19 nt, Artificial Sequence
  Description of Artificial Sequence: Synthetic oligonucleotide
ucagagcuuagacuccccu

SEQ ID NO: 2180151 - RNA, 19 nt, Artificial Sequence
  Description of Artificial Sequence: Synthetic oligonucleotide
gaaggucucgaaccagccc

SEQ ID NO: 2180152 - RNA, 19 nt, Artificial Sequence
  Description of Artificial Sequence: Synthetic oligonucleotide
aggaauaagggaaucacua

SEQ ID NO: 2180153 - RNA, 19 nt, Artificial Sequence
  Description of Artificial Sequence: Synthetic oligonucleotide
aggcuggacucccuuaauc

SEQ ID NO: 2180154 - RNA, 19 nt, Artificial Sequence
  Description of Artificial Sequence: Synthetic oligonucleotide
uaucaguuaccaacaggau

SEQ ID NO: 2180155 - RNA, 19 nt, Artificial Sequence
  Description of Artificial Sequence: Synthetic oligonucleotide
agaagacagggacuagacu

SEQ ID NO: 2180156 - RNA, 19 nt, Artificial Sequence
  Description of Artificial Sequence: Synthetic oligonucleotide
caagacagagcccuaucuc

SEQ ID NO: 2180157 - RNA, 19 nt, Artificial Sequence
  Description of Artificial Sequence: Synthetic oligonucleotide
uuaaucugacccugucccu

SEQ ID NO: 2180158 - RNA, 19 nt, Artificial Sequence
  Description of Artificial Sequence: Synthetic oligonucleotide
cauugaguggaaguaggac

SEQ ID NO: 2180159 - RNA, 19 nt, Artificial Sequence
  Description of Artificial Sequence: Synthetic oligonucleotide
acucccuuaaucugacccu

SEQ ID NO: 2180160 - RNA, 19 nt, Artificial Sequence
  Description of Artificial Sequence: Synthetic oligonucleotide
ucgaaccagcccaaguccu

SEQ ID NO: 2180161 - RNA, 19 nt, Artificial Sequence
  Description of Artificial Sequence: Synthetic oligonucleotide
uucacucuggggcucccug

SEQ ID NO: 2180162 - RNA, 19 nt, Artificial Sequence
  Description of Artificial Sequence: Synthetic oligonucleotide
gagguugcaguuaaaagcu

SEQ ID NO: 2180163 - RNA, 19 nt, Artificial Sequence
  Description of Artificial Sequence: Synthetic oligonucleotide
gccuucagagcuuagacuc

SEQ ID NO: 2180164 - RNA, 19 nt, Artificial Sequence
  Description of Artificial Sequence: Synthetic oligonucleotide
uccugggcugucuagcugu

SEQ ID NO: 2180165 - RNA, 19 nt, Artificial Sequence
  Description of Artificial Sequence: Synthetic oligonucleotide
uacugaugucauuugucuc

SEQ ID NO: 2180166 - RNA, 19 nt, Artificial Sequence
  Description of Artificial Sequence: Synthetic oligonucleotide
ccuaucucccuuuuauucc

SEQ ID NO: 2180167 - RNA, 19 nt, Artificial Sequence
  Description of Artificial Sequence: Synthetic oligonucleotide
caucugaccacaguauaug

SEQ ID NO: 2180168 - RNA, 19 nt, Artificial Sequence
  Description of Artificial Sequence: Synthetic oligonucleotide
acagagcccuaucucgguc

SEQ ID NO: 2180169 - RNA, 19 nt, Artificial Sequence
  Description of Artificial Sequence: Synthetic oligonucleotide
ccuagauaaccuaucuccc

SEQ ID NO: 2180170 - RNA, 19 nt, Artificial Sequence
  Description of Artificial Sequence: Synthetic oligonucleotide
gacuagacuaguuuuggau

SEQ ID NO: 2180171 - RNA, 19 nt, Artificial Sequence
  Description of Artificial Sequence: Synthetic oligonucleotide
uugucucccaaaguagaca

SEQ ID NO: 2180172 - RNA, 19 nt, Artificial Sequence
  Description of Artificial Sequence: Synthetic oligonucleotide
accucgcugugccuuaguc

SEQ ID NO: 2180173 - RNA, 19 nt, Artificial Sequence
  Description of Artificial Sequence: Synthetic oligonucleotide
aaccuaucucccuuuuauu

SEQ ID NO: 2180174 - RNA, 19 nt, Artificial Sequence
  Description of Artificial Sequence: Synthetic oligonucleotide
uacaggucccaagacgagc

SEQ ID NO: 2180175 - RNA, 19 nt, Artificial Sequence
  Description of Artificial Sequence: Synthetic oligonucleotide
ugggcaaggaagggaaacc

SEQ ID NO: 2180176 - RNA, 19 nt, Artificial Sequence
  Description of Artificial Sequence: Synthetic oligonucleotide
agacacuacugguggcagg

SEQ ID NO: 2180177 - RNA, 19 nt, Artificial Sequence
  Description of Artificial Sequence: Synthetic oligonucleotide
cagagcccuaucucggucc

SEQ ID NO: 2180178 - RNA, 19 nt, Artificial Sequence
  Description of Artificial Sequence: Synthetic oligonucleotide
uccugaugcuaauuaccac

SEQ ID NO: 2180179 - RNA, 19 nt, Artificial Sequence
  Description of Artificial Sequence: Synthetic oligonucleotide
cuucagagcuuagacuccc

SEQ ID NO: 2180180 - RNA, 19 nt, Artificial Sequence
  Description of Artificial Sequence: Synthetic oligonucleotide
auguuggccauguacuuua

SEQ ID NO: 2180181 - RNA, 19 nt, Artificial Sequence
  Description of Artificial Sequence: Synthetic oligonucleotide
uuaccacuauugugcuggg

SEQ ID NO: 2180182 - RNA, 19 nt, Artificial Sequence
  Description of Artificial Sequence: Synthetic oligonucleotide
agacagagcccuaucucgg

SEQ ID NO: 2180183 - RNA, 19 nt, Artificial Sequence
  Description of Artificial Sequence: Synthetic oligonucleotide
uggacucccuuaaucugac

SEQ ID NO: 2180184 - RNA, 19 nt, Artificial Sequence
  Description of Artificial Sequence: Synthetic oligonucleotide
aggcccaauagcugauauc

SEQ ID NO: 2180185 - RNA, 19 nt, Artificial Sequence
  Description of Artificial Sequence: Synthetic oligonucleotide
ucgcuuggggcuuccagga

SEQ ID NO: 2180186 - RNA, 19 nt, Artificial Sequence
  Description of Artificial Sequence: Synthetic oligonucleotide
guuaaaagcucaacccaca

SEQ ID NO: 2180187 - RNA, 19 nt, Artificial Sequence
  Description of Artificial Sequence: Synthetic oligonucleotide
ucuagaagacagggacuag

SEQ ID NO: 2180188 - RNA, 19 nt, Artificial Sequence
  Description of Artificial Sequence: Synthetic oligonucleotide
agcuuagacuccccuugag

SEQ ID NO: 2180189 - RNA, 19 nt, Artificial Sequence
  Description of Artificial Sequence: Synthetic oligonucleotide
ugggaaccaucuagaagac

SEQ ID NO: 2180190 - RNA, 19 nt, Artificial Sequence
  Description of Artificial Sequence: Synthetic oligonucleotide
gaugcuaauuaccacuauu

SEQ ID NO: 2180191 - RNA, 19 nt, Artificial Sequence
  Description of Artificial Sequence: Synthetic oligonucleotide
cacuauugugcugggagac

SEQ ID NO: 2180192 - RNA, 19 nt, Artificial Sequence
  Description of Artificial Sequence: Synthetic oligonucleotide
ggcauugaguggaaguagg

SEQ ID NO: 2180193 - RNA, 19 nt, Artificial Sequence
  Description of Artificial Sequence: Synthetic oligonucleotide
gaucaugcaaugugucaaa

SEQ ID NO: 2180194 - RNA, 19 nt, Artificial Sequence
  Description of Artificial Sequence: Synthetic oligonucleotide
caggaucaugcaauguguc

SEQ ID NO: 2180195 - RNA, 19 nt, Artificial Sequence
  Description of Artificial Sequence: Synthetic oligonucleotide
uucagagcuuagacucccc

SEQ ID NO: 2180196 - RNA, 19 nt, Artificial Sequence
  Description of Artificial Sequence: Synthetic oligonucleotide
cccaagacgagccuuggcc

SEQ ID NO: 2180197 - RNA, 19 nt, Artificial Sequence
  Description of Artificial Sequence: Synthetic oligonucleotide
cagaacaggcccaauagcu

SEQ ID NO: 2180198 - RNA, 19 nt, Artificial Sequence
  Description of Artificial Sequence: Synthetic oligonucleotide
ugaugcuaauuaccacuau

SEQ ID NO: 2180199 - RNA, 19 nt, Artificial Sequence
  Description of Artificial Sequence: Synthetic oligonucleotide
gguccuucaaaggaauaag

SEQ ID NO: 2180200 - RNA, 19 nt, Artificial Sequence
  Description of Artificial Sequence: Synthetic oligonucleotide
guguuccuguucucaagcc

SEQ ID NO: 2180201 - RNA, 19 nt, Artificial Sequence
  Description of Artificial Sequence: Synthetic oligonucleotide
cuccuagauaaccuaucuc

SEQ ID NO: 2180202 - RNA, 19 nt, Artificial Sequence
  Description of Artificial Sequence: Synthetic oligonucleotide
gggacuagacuaguuuugg

SEQ ID NO: 2180203 - RNA, 19 nt, Artificial Sequence
  Description of Artificial Sequence: Synthetic oligonucleotide
agcccuaucucgguccuuc

SEQ ID NO: 2180204 - RNA, 19 nt, Artificial Sequence
  Description of Artificial Sequence: Synthetic oligonucleotide
acguagggcauugagugga

SEQ ID NO: 2180205 - RNA, 19 nt, Artificial Sequence
  Description of Artificial Sequence: Synthetic oligonucleotide
cuaugcagguagugcuuag

SEQ ID NO: 2180206 - RNA, 19 nt, Artificial Sequence
  Description of Artificial Sequence: Synthetic oligonucleotide
ggauccugaugcuaauuac

SEQ ID NO: 2180207 - RNA, 19 nt, Artificial Sequence
  Description of Artificial Sequence: Synthetic oligonucleotide
gaaauaggcuggacaccag

SEQ ID NO: 2180208 - RNA, 19 nt, Artificial Sequence
  Description of Artificial Sequence: Synthetic oligonucleotide
uugcaguuaaaagcucaac

SEQ ID NO: 2180209 - RNA, 19 nt, Artificial Sequence
  Description of Artificial Sequence: Synthetic oligonucleotide
ugccuccuagauaaccuau

SEQ ID NO: 2180210 - RNA, 19 nt, Artificial Sequence
  Description of Artificial Sequence: Synthetic oligonucleotide
accagcccaaguccugauc

SEQ ID NO: 2180211 - RNA, 19 nt, Artificial Sequence
  Description of Artificial Sequence: Synthetic oligonucleotide
uguguagacugggcaagga

SEQ ID NO: 2180212 - RNA, 19 nt, Artificial Sequence
  Description of Artificial Sequence: Synthetic oligonucleotide
ggaaaggcacaugaguuac

SEQ ID NO: 2180213 - RNA, 19 nt, Artificial Sequence
  Description of Artificial Sequence: Synthetic oligonucleotide
gcugauaucgcuuggggcu

SEQ ID NO: 2180214 - RNA, 19 nt, Artificial Sequence
  Description of Artificial Sequence: Synthetic oligonucleotide
cuagaagacagggacuaga

SEQ ID NO: 2180215 - RNA, 19 nt, Artificial Sequence
  Description of Artificial Sequence: Synthetic oligonucleotide
acugccuccuagauaaccu

SEQ ID NO: 2180216 - RNA, 19 nt, Artificial Sequence
  Description of Artificial Sequence: Synthetic oligonucleotide
agauaaccuaucucccuuu

SEQ ID NO: 2180217 - RNA, 19 nt, Artificial Sequence
  Description of Artificial Sequence: Synthetic oligonucleotide
guaggacccugaguaaaag

SEQ ID NO: 2180218 - RNA, 19 nt, Artificial Sequence
  Description of Artificial Sequence: Synthetic oligonucleotide
agggacuagacuaguuuug

SEQ ID NO: 2180219 - RNA, 19 nt, Artificial Sequence
  Description of Artificial Sequence: Synthetic oligonucleotide
cauguacuuuauaauucaa

SEQ ID NO: 2180220 - RNA, 19 nt, Artificial Sequence
  Description of Artificial Sequence: Synthetic oligonucleotide
ugcuuaggaccaagaaaua

SEQ ID NO: 2180221 - RNA, 19 nt, Artificial Sequence
  Description of Artificial Sequence: Synthetic oligonucleotide
ggaauaagggaaucacuaa

SEQ ID NO: 2180222 - RNA, 19 nt, Artificial Sequence
  Description of Artificial Sequence: Synthetic oligonucleotide
auugugcugggagaccuca

SEQ ID NO: 2180223 - RNA, 19 nt, Artificial Sequence
  Description of Artificial Sequence: Synthetic oligonucleotide
auaaccuaucucccuuuua

SEQ ID NO: 2180224 - RNA, 19 nt, Artificial Sequence
  Description of Artificial Sequence: Synthetic oligonucleotide
ccuuaaucugacccugucc

SEQ ID NO: 2180225 - RNA, 19 nt, Artificial Sequence
  Description of Artificial Sequence: Synthetic oligonucleotide
aagacgagccuuggcccag

SEQ ID NO: 2180226 - RNA, 19 nt, Artificial Sequence
  Description of Artificial Sequence: Synthetic oligonucleotide
acuuguggaaggucucgaa

SEQ ID NO: 2180227 - RNA, 19 nt, Artificial Sequence
  Description of Artificial Sequence: Synthetic oligonucleotide
ccaagacgagccuuggccc

SEQ ID NO: 2180228 - RNA, 19 nt, Artificial Sequence
  Description of Artificial Sequence: Synthetic oligonucleotide
ccaagaaauaggcuggaca

SEQ ID NO: 2180229 - RNA, 19 nt, Artificial Sequence
  Description of Artificial Sequence: Synthetic oligonucleotide
agaacuaaacagacagcaa

SEQ ID NO: 2180230 - RNA, 19 nt, Artificial Sequence
  Description of Artificial Sequence: Synthetic oligonucleotide
cugaugcuaauuaccacua

SEQ ID NO: 2180231 - RNA, 19 nt, Artificial Sequence
  Description of Artificial Sequence: Synthetic oligonucleotide
gcagaacaggcccaauagc

SEQ ID NO: 2180232 - RNA, 19 nt, Artificial Sequence
  Description of Artificial Sequence: Synthetic oligonucleotide
ucacucuggggcucccuga

SEQ ID NO: 2180233 - RNA, 19 nt, Artificial Sequence
  Description of Artificial Sequence: Synthetic oligonucleotide
cuagauaaccuaucucccu

SEQ ID NO: 2180234 - RNA, 19 nt, Artificial Sequence
  Description of Artificial Sequence: Synthetic oligonucleotide
acuacugguggcagguuca

SEQ ID NO: 2180235 - RNA, 19 nt, Artificial Sequence
  Description of Artificial Sequence: Synthetic oligonucleotide
auguauuacugaugucauu

SEQ ID NO: 2180236 - RNA, 19 nt, Artificial Sequence
  Description of Artificial Sequence: Synthetic oligonucleotide
cucccuuaaucugacccug

SEQ ID NO: 2180237 - RNA, 19 nt, Artificial Sequence
  Description of Artificial Sequence: Synthetic oligonucleotide
agcucaacccacagccacg

SEQ ID NO: 2180238 - RNA, 19 nt, Artificial Sequence
  Description of Artificial Sequence: Synthetic oligonucleotide
ccauguacuuuauaauuca

SEQ ID NO: 2180239 - RNA, 19 nt, Artificial Sequence
  Description of Artificial Sequence: Synthetic oligonucleotide
uagacuaguuuuggauccu

SEQ ID NO: 2180240 - RNA, 19 nt, Artificial Sequence
  Description of Artificial Sequence: Synthetic oligonucleotide
agacaucugaccacaguau

SEQ ID NO: 2180241 - RNA, 19 nt, Artificial Sequence
  Description of Artificial Sequence: Synthetic oligonucleotide
auucaagacagagcccuau

SEQ ID NO: 2180242 - RNA, 19 nt, Artificial Sequence
  Description of Artificial Sequence: Synthetic oligonucleotide
cuguguagacugggcaagg

SEQ ID NO: 2180243 - RNA, 19 nt, Artificial Sequence
  Description of Artificial Sequence: Synthetic oligonucleotide
cugccuguguagacugggc

SEQ ID NO: 2180244 - RNA, 19 nt, Artificial Sequence
  Description of Artificial Sequence: Synthetic oligonucleotide
ggcugucuagcuguguggg

SEQ ID NO: 2180245 - RNA, 19 nt, Artificial Sequence
  Description of Artificial Sequence: Synthetic oligonucleotide
gccauguacuuuauaauuc

SEQ ID NO: 2180246 - RNA, 19 nt, Artificial Sequence
  Description of Artificial Sequence: Synthetic oligonucleotide
caggagaacuaaacagaca

SEQ ID NO: 2180247 - RNA, 19 nt, Artificial Sequence
  Description of Artificial Sequence: Synthetic oligonucleotide
gaaaccccagagugagauc

SEQ ID NO: 2180248 - RNA, 19 nt, Artificial Sequence
  Description of Artificial Sequence: Synthetic oligonucleotide
agggcauugaguggaagua

SEQ ID NO: 2180249 - RNA, 19 nt, Artificial Sequence
  Description of Artificial Sequence: Synthetic oligonucleotide
gagcuuagacuccccuuga

SEQ ID NO: 2180250 - RNA, 19 nt, Artificial Sequence
  Description of Artificial Sequence: Synthetic oligonucleotide
agagcccuaucucgguccu

SEQ ID NO: 2180251 - RNA, 19 nt, Artificial Sequence
  Description of Artificial Sequence: Synthetic oligonucleotide
ggagaacuaaacagacagc

SEQ ID NO: 2180252 - RNA, 19 nt, Artificial Sequence
  Description of Artificial Sequence: Synthetic oligonucleotide
accaucuagaagacaggga

SEQ ID NO: 2180253 - RNA, 19 nt, Artificial Sequence
  Description of Artificial Sequence: Synthetic oligonucleotide
cucuaggggaguguuccug

SEQ ID NO: 2180254 - RNA, 19 nt, Artificial Sequence
  Description of Artificial Sequence: Synthetic oligonucleotide
cuuagucuuuuaucaguua

SEQ ID NO: 2180255 - RNA, 19 nt, Artificial Sequence
  Description of Artificial Sequence: Synthetic oligonucleotide
aguagacaucugaccacag

SEQ ID NO: 2180256 - RNA, 19 nt, Artificial Sequence
  Description of Artificial Sequence: Synthetic oligonucleotide
agguugcaguuaaaagcuc

SEQ ID NO: 2180257 - RNA, 19 nt, Artificial Sequence
  Description of Artificial Sequence: Synthetic oligonucleotide
cagacacuacugguggcag

SEQ ID NO: 2180258 - RNA, 19 nt, Artificial Sequence
  Description of Artificial Sequence: Synthetic oligonucleotide
gacccugaguaaaaggacu

SEQ ID NO: 2180259 - RNA, 19 nt, Artificial Sequence
  Description of Artificial Sequence: Synthetic oligonucleotide
gacacuacugguggcaggu

SEQ ID NO: 2180260 - RNA, 19 nt, Artificial Sequence
  Description of Artificial Sequence: Synthetic oligonucleotide
gggcugucuagcugugugg

SEQ ID NO: 2180261 - RNA, 19 nt, Artificial Sequence
  Description of Artificial Sequence: Synthetic oligonucleotide
caagacgagccuuggccca

SEQ ID NO: 2180262 - RNA, 19 nt, Artificial Sequence
  Description of Artificial Sequence: Synthetic oligonucleotide
uucucaagccagacuucuu

SEQ ID NO: 2180263 - RNA, 19 nt, Artificial Sequence
  Description of Artificial Sequence: Synthetic oligonucleotide
guuacugccuguguagacu

SEQ ID NO: 2180264 - RNA, 19 nt, Artificial Sequence
  Description of Artificial Sequence: Synthetic oligonucleotide
auacaggucccaagacgag

SEQ ID NO: 2180265 - RNA, 19 nt, Artificial Sequence
  Description of Artificial Sequence: Synthetic oligonucleotide
aaccagcccaaguccugau

SEQ ID NO: 2180266 - RNA, 19 nt, Artificial Sequence
  Description of Artificial Sequence: Synthetic oligonucleotide
aauucaagacagagcccua

SEQ ID NO: 2180267 - RNA, 19 nt, Artificial Sequence
  Description of Artificial Sequence: Synthetic oligonucleotide
acuaugcagguagugcuua

SEQ ID NO: 2180268 - RNA, 19 nt, Artificial Sequence
  Description of Artificial Sequence: Synthetic oligonucleotide
gauaucgcuuggggcuucc

SEQ ID NO: 2180269 - RNA, 19 nt, Artificial Sequence
  Description of Artificial Sequence: Synthetic oligonucleotide
caagugugauccuggaggu

SEQ ID NO: 2180270 - RNA, 19 nt, Artificial Sequence
  Description of Artificial Sequence: Synthetic oligonucleotide
guauaugagcugggaacca

SEQ ID NO: 2180271 - RNA, 19 nt, Artificial Sequence
  Description of Artificial Sequence: Synthetic oligonucleotide
gguagugcuuaggaccaag

SEQ ID NO: 2180272 - RNA, 19 nt, Artificial Sequence
  Description of Artificial Sequence: Synthetic oligonucleotide
guggguugcaggcuggacu

SEQ ID NO: 2180273 - RNA, 19 nt, Artificial Sequence
  Description of Artificial Sequence: Synthetic oligonucleotide
aguuaccaacaggaucaug

SEQ ID NO: 2180274 - RNA, 19 nt, Artificial Sequence
  Description of Artificial Sequence: Synthetic oligonucleotide
ucgguccuucaaaggaaua

SEQ ID NO: 2180275 - RNA, 19 nt, Artificial Sequence
  Description of Artificial Sequence: Synthetic oligonucleotide
caaguccugaucugaggaa

SEQ ID NO: 2180276 - RNA, 19 nt, Artificial Sequence
  Description of Artificial Sequence: Synthetic oligonucleotide
aguccugaucugaggaaca

SEQ ID NO: 2180277 - RNA, 19 nt, Artificial Sequence
  Description of Artificial Sequence: Synthetic oligonucleotide
gggcaaggaagggaaaccc

SEQ ID NO: 2180278 - RNA, 19 nt, Artificial Sequence
  Description of Artificial Sequence: Synthetic oligonucleotide
cacaguauaugagcuggga

SEQ ID NO: 2180279 - RNA, 19 nt, Artificial Sequence
  Description of Artificial Sequence: Synthetic oligonucleotide
guagacaucugaccacagu

SEQ ID NO: 2180280 - RNA, 19 nt, Artificial Sequence
  Description of Artificial Sequence: Synthetic oligonucleotide
ugaguggaaguaggacccu

SEQ ID NO: 2180281 - RNA, 19 nt, Artificial Sequence
  Description of Artificial Sequence: Synthetic oligonucleotide
cugacccugucccuucauc

SEQ ID NO: 2180282 - RNA, 19 nt, Artificial Sequence
  Description of Artificial Sequence: Synthetic oligonucleotide
agcccaaguccugaucuga

SEQ ID NO: 2180283 - RNA, 19 nt, Artificial Sequence
  Description of Artificial Sequence: Synthetic oligonucleotide
cuggagguugcaguuaaaa

SEQ ID NO: 2180284 - RNA, 19 nt, Artificial Sequence
  Description of Artificial Sequence: Synthetic oligonucleotide
gaggacugccuccuagaua

SEQ ID NO: 2180285 - RNA, 19 nt, Artificial Sequence
  Description of Artificial Sequence: Synthetic oligonucleotide
gauccugggcugucuagcu

SEQ ID NO: 2180286 - RNA, 19 nt, Artificial Sequence
  Description of Artificial Sequence: Synthetic oligonucleotide
guagugcuuaggaccaaga

SEQ ID NO: 2180287 - RNA, 19 nt, Artificial Sequence
  Description of Artificial Sequence: Synthetic oligonucleotide
aacaggcccaauagcugau

SEQ ID NO: 2180288 - RNA, 19 nt, Artificial Sequence
  Description of Artificial Sequence: Synthetic oligonucleotide
ggaaggucucgaaccagcc

SEQ ID NO: 2180289 - RNA, 19 nt, Artificial Sequence
  Description of Artificial Sequence: Synthetic oligonucleotide
gauccuggagguugcaguu

SEQ ID NO: 2180290 - RNA, 19 nt, Artificial Sequence
  Description of Artificial Sequence: Synthetic oligonucleotide
gggauccugaugcuaauua

SEQ ID NO: 2180291 - RNA, 19 nt, Artificial Sequence
  Description of Artificial Sequence: Synthetic oligonucleotide
gauaaccuaucucccuuuu

SEQ ID NO: 2180292 - RNA, 19 nt, Artificial Sequence
  Description of Artificial Sequence: Synthetic oligonucleotide
ggacccugaguaaaaggac

SEQ ID NO: 2180293 - RNA, 19 nt, Artificial Sequence
  Description of Artificial Sequence: Synthetic oligonucleotide
ggacuagacuaguuuugga

SEQ ID NO: 2180294 - RNA, 19 nt, Artificial Sequence
  Description of Artificial Sequence: Synthetic oligonucleotide
guucucaagccagacuucu

SEQ ID NO: 2180295 - RNA, 19 nt, Artificial Sequence
  Description of Artificial Sequence: Synthetic oligonucleotide
gucccaagacgagccuugg

SEQ ID NO: 2180296 - RNA, 19 nt, Artificial Sequence
  Description of Artificial Sequence: Synthetic oligonucleotide
cuauugugcugggagaccu

SEQ ID NO: 2180297 - RNA, 19 nt, Artificial Sequence
  Description of Artificial Sequence: Synthetic oligonucleotide
uaccacuauugugcuggga

SEQ ID NO: 2180298 - RNA, 19 nt, Artificial Sequence
  Description of Artificial Sequence: Synthetic oligonucleotide
cucccugaccucgcugugc

SEQ ID NO: 2180299 - RNA, 19 nt, Artificial Sequence
  Description of Artificial Sequence: Synthetic oligonucleotide
gacagagcccuaucucggu

SEQ ID NO: 2180300 - RNA, 19 nt, Artificial Sequence
  Description of Artificial Sequence: Synthetic oligonucleotide
cugcagaacaggcccaaua

SEQ ID NO: 2180301 - RNA, 19 nt, Artificial Sequence
  Description of Artificial Sequence: Synthetic oligonucleotide
ugaccucgcugugccuuag

SEQ ID NO: 2180302 - RNA, 19 nt, Artificial Sequence
  Description of Artificial Sequence: Synthetic oligonucleotide
ccuugaguggggcugucuc

SEQ ID NO: 2180303 - RNA, 19 nt, Artificial Sequence
  Description of Artificial Sequence: Synthetic oligonucleotide
gccuuagucuuuuaucagu

SEQ ID NO: 2180304 - RNA, 19 nt, Artificial Sequence
  Description of Artificial Sequence: Synthetic oligonucleotide
acgagccuuggcccagaca

SEQ ID NO: 2180305 - RNA, 19 nt, Artificial Sequence
  Description of Artificial Sequence: Synthetic oligonucleotide
agccagacuucuugauguu

SEQ ID NO: 2180306 - RNA, 19 nt, Artificial Sequence
  Description of Artificial Sequence: Synthetic oligonucleotide
cagggacuagacuaguuuu

SEQ ID NO: 2180307 - RNA, 19 nt, Artificial Sequence
  Description of Artificial Sequence: Synthetic oligonucleotide
augaaacguagggcauuga

SEQ ID NO: 2180308 - RNA, 19 nt, Artificial Sequence
  Description of Artificial Sequence: Synthetic oligonucleotide
ugauaucgcuuggggcuuc

SEQ ID NO: 2180309 - RNA, 19 nt, Artificial Sequence
  Description of Artificial Sequence: Synthetic oligonucleotide
aucugcagaacaggcccaa

SEQ ID NO: 2180310 - RNA, 19 nt, Artificial Sequence
  Description of Artificial Sequence: Synthetic oligonucleotide
ggaaaccccagagugagau

SEQ ID NO: 2180311 - RNA, 19 nt, Artificial Sequence
  Description of Artificial Sequence: Synthetic oligonucleotide
gguugcaggcuggacuccc

SEQ ID NO: 2180312 - RNA, 19 nt, Artificial Sequence
  Description of Artificial Sequence: Synthetic oligonucleotide
gacgagccuuggcccagac

SEQ ID NO: 2180313 - RNA, 19 nt, Artificial Sequence
  Description of Artificial Sequence: Synthetic oligonucleotide
ucugcagaacaggcccaau

SEQ ID NO: 2180314 - RNA, 19 nt, Artificial Sequence
  Description of Artificial Sequence: Synthetic oligonucleotide
gucucgaaccagcccaagu

SEQ ID NO: 2180315 - RNA, 19 nt, Artificial Sequence
  Description of Artificial Sequence: Synthetic oligonucleotide
cugccuccuagauaaccua

SEQ ID NO: 2180316 - RNA, 19 nt, Artificial Sequence
  Description of Artificial Sequence: Synthetic oligonucleotide
gcugggauccugaugcuaa

SEQ ID NO: 2180317 - RNA, 19 nt, Artificial Sequence
  Description of Artificial Sequence: Synthetic oligonucleotide
cccaauagcugauaucgcu

SEQ ID NO: 2180318 - RNA, 19 nt, Artificial Sequence
  Description of Artificial Sequence: Synthetic oligonucleotide
gcauugaguggaaguagga

SEQ ID NO: 2180319 - RNA, 19 nt, Artificial Sequence
  Description of Artificial Sequence: Synthetic oligonucleotide
ccuaucucgguccuucaaa

SEQ ID NO: 2180320 - RNA, 19 nt, Artificial Sequence
  Description of Artificial Sequence: Synthetic oligonucleotide
ccacuauugugcugggaga

SEQ ID NO: 2180321 - RNA, 19 nt, Artificial Sequence
  Description of Artificial Sequence: Synthetic oligonucleotide
cccuuaaucugacccuguc

SEQ ID NO: 2180322 - RNA, 19 nt, Artificial Sequence
  Description of Artificial Sequence: Synthetic oligonucleotide
guaugaaacguagggcauu

SEQ ID NO: 2180323 - RNA, 19 nt, Artificial Sequence
  Description of Artificial Sequence: Synthetic oligonucleotide
guccugaucugaggaacaa

SEQ ID NO: 2180324 - RNA, 19 nt, Artificial Sequence
  Description of Artificial Sequence: Synthetic oligonucleotide
ggacucccuuaaucugacc

SEQ ID NO: 2180325 - RNA, 19 nt, Artificial Sequence
  Description of Artificial Sequence: Synthetic oligonucleotide
aggucccaagacgagccuu

SEQ ID NO: 2180326 - RNA, 19 nt, Artificial Sequence
  Description of Artificial Sequence: Synthetic oligonucleotide
gcccaaguccugaucugag

SEQ ID NO: 2180327 - RNA, 19 nt, Artificial Sequence
  Description of Artificial Sequence: Synthetic oligonucleotide
gaccugggcugggauccug

SEQ ID NO: 2180328 - RNA, 19 nt, Artificial Sequence
  Description of Artificial Sequence: Synthetic oligonucleotide
auaucgcuuggggcuucca

SEQ ID NO: 2180329 - RNA, 19 nt, Artificial Sequence
  Description of Artificial Sequence: Synthetic oligonucleotide
gcccaauagcugauaucgc

SEQ ID NO: 2180330 - RNA, 19 nt, Artificial Sequence
  Description of Artificial Sequence: Synthetic oligonucleotide
cccugaguaaaaggacuug

SEQ ID NO: 2180331 - RNA, 19 nt, Artificial Sequence
  Description of Artificial Sequence: Synthetic oligonucleotide
cugugccuuagucuuuuau

SEQ ID NO: 2180332 - RNA, 19 nt, Artificial Sequence
  Description of Artificial Sequence: Synthetic oligonucleotide
gcucaacccacagccacga

SEQ ID NO: 2180333 - RNA, 19 nt, Artificial Sequence
  Description of Artificial Sequence: Synthetic oligonucleotide
cugucuagcuguguggguu

SEQ ID NO: 2180334 - RNA, 19 nt, Artificial Sequence
  Description of Artificial Sequence: Synthetic oligonucleotide
ccuuagucuuuuaucaguu

SEQ ID NO: 2180335 - RNA, 19 nt, Artificial Sequence
  Description of Artificial Sequence: Synthetic oligonucleotide
acaggcccaauagcugaua

SEQ ID NO: 2180336 - RNA, 19 nt, Artificial Sequence
  Description of Artificial Sequence: Synthetic oligonucleotide
gccuccuagauaaccuauc

SEQ ID NO: 2180337 - RNA, 19 nt, Artificial Sequence
  Description of Artificial Sequence: Synthetic oligonucleotide
cacuaugcagguagugcuu

SEQ ID NO: 2180338 - RNA, 19 nt, Artificial Sequence
  Description of Artificial Sequence: Synthetic oligonucleotide
cagagcuuagacuccccuu

SEQ ID NO: 2180339 - RNA, 19 nt, Artificial Sequence
  Description of Artificial Sequence: Synthetic oligonucleotide
ccuccuagauaaccuaucu

SEQ ID NO: 2180340 - RNA, 19 nt, Artificial Sequence
  Description of Artificial Sequence: Synthetic oligonucleotide
gggagaccucagucaggcc

SEQ ID NO: 2180341 - RNA, 19 nt, Artificial Sequence
  Description of Artificial Sequence: Synthetic oligonucleotide
aggucucgaaccagcccaa

SEQ ID NO: 2180342 - RNA, 19 nt, Artificial Sequence
  Description of Artificial Sequence: Synthetic oligonucleotide
ggcacaugaguuacugccu

SEQ ID NO: 2180343 - RNA, 19 nt, Artificial Sequence
  Description of Artificial Sequence: Synthetic oligonucleotide
ggucucgaaccagcccaag

SEQ ID NO: 2180344 - RNA, 19 nt, Artificial Sequence
  Description of Artificial Sequence: Synthetic oligonucleotide
ccaauagcugauaucgcuu

SEQ ID NO: 2180345 - RNA, 19 nt, Artificial Sequence
  Description of Artificial Sequence: Synthetic oligonucleotide
caggcccaauagcugauau

SEQ ID NO: 2180346 - RNA, 19 nt, Artificial Sequence
  Description of Artificial Sequence: Synthetic oligonucleotide
gggaaccaucuagaagaca

SEQ ID NO: 2180347 - RNA, 19 nt, Artificial Sequence
  Description of Artificial Sequence: Synthetic oligonucleotide
cugaccucgcugugccuua

SEQ ID NO: 2180348 - RNA, 19 nt, Artificial Sequence
  Description of Artificial Sequence: Synthetic oligonucleotide
gcucccugaccucgcugug

SEQ ID NO: 2180349 - RNA, 19 nt, Artificial Sequence
  Description of Artificial Sequence: Synthetic oligonucleotide
agacgagccuuggcccaga

SEQ ID NO: 2180350 - RNA, 19 nt, Artificial Sequence
  Description of Artificial Sequence: Synthetic oligonucleotide
agguagugcuuaggaccaa

SEQ ID NO: 2180351 - RNA, 19 nt, Artificial Sequence
  Description of Artificial Sequence: Synthetic oligonucleotide
acacuacugguggcagguu

SEQ ID NO: 2180352 - RNA, 19 nt, Artificial Sequence
  Description of Artificial Sequence: Synthetic oligonucleotide
gggaggauacaggucccaa

SEQ ID NO: 2180353 - RNA, 19 nt, Artificial Sequence
  Description of Artificial Sequence: Synthetic oligonucleotide
gagccuuggcccagacacu

SEQ ID NO: 2180354 - RNA, 19 nt, Artificial Sequence
  Description of Artificial Sequence: Synthetic oligonucleotide
gaccucgcugugccuuagu

SEQ ID NO: 2180355 - RNA, 19 nt, Artificial Sequence
  Description of Artificial Sequence: Synthetic oligonucleotide
ggggaggauacagguccca

SEQ ID NO: 2180356 - RNA, 19 nt, Artificial Sequence
  Description of Artificial Sequence: Synthetic oligonucleotide
cugauaucgcuuggggcuu

SEQ ID NO: 2180357 - RNA, 19 nt, Artificial Sequence
  Description of Artificial Sequence: Synthetic oligonucleotide
ccucgcugugccuuagucu

SEQ ID NO: 2180358 - RNA, 19 nt, Artificial Sequence
  Description of Artificial Sequence: Synthetic oligonucleotide
ggugcucuaggggaguguu

SEQ ID NO: 2180359 - RNA, 19 nt, Artificial Sequence
  Description of Artificial Sequence: Synthetic oligonucleotide
gcugucuagcugugugggu

SEQ ID NO: 2180360 - RNA, 19 nt, Artificial Sequence
  Description of Artificial Sequence: Synthetic oligonucleotide
cugucucacuaugcaggua

SEQ ID NO: 2180361 - RNA, 19 nt, Artificial Sequence
  Description of Artificial Sequence: Synthetic oligonucleotide
ccccaagugugauccugga

SEQ ID NO: 2180362 - RNA, 19 nt, Artificial Sequence
  Description of Artificial Sequence: Synthetic oligonucleotide
gcccuaucucgguccuuca

SEQ ID NO: 2180363 - RNA, 19 nt, Artificial Sequence
  Description of Artificial Sequence: Synthetic oligonucleotide
caggucccaagacgagccu

SEQ ID NO: 2180364 - RNA, 19 nt, Artificial Sequence
  Description of Artificial Sequence: Synthetic oligonucleotide
gggaaaccccagagugaga

SEQ ID NO: 2180365 - RNA, 19 nt, Artificial Sequence
  Description of Artificial Sequence: Synthetic oligonucleotide
cccuaucucgguccuucaa

SEQ ID NO: 2180366 - RNA, 19 nt, Artificial Sequence
  Description of Artificial Sequence: Synthetic oligonucleotide
ggacugccuccuagauaac

SEQ ID NO: 2180367 - RNA, 19 nt, Artificial Sequence
  Description of Artificial Sequence: Synthetic oligonucleotide
caguuaccaacaggaucau

SEQ ID NO: 2180368 - RNA, 19 nt, Artificial Sequence
  Description of Artificial Sequence: Synthetic oligonucleotide
ccuggagguugcaguuaaa

SEQ ID NO: 2180369 - RNA, 19 nt, Artificial Sequence
  Description of Artificial Sequence: Synthetic oligonucleotide
cagggaggacugccuccua

SEQ ID NO: 2180370 - RNA, 19 nt, Artificial Sequence
  Description of Artificial Sequence: Synthetic oligonucleotide
ccugaccucgcugugccuu

SEQ ID NO: 2180371 - RNA, 19 nt, Artificial Sequence
  Description of Artificial Sequence: Synthetic oligonucleotide
gagcccuaucucgguccuu

SEQ ID NO: 2180372 - RNA, 19 nt, Artificial Sequence
  Description of Artificial Sequence: Synthetic oligonucleotide
ccuggugcucuaggggagu

SEQ ID NO: 2180373 - RNA, 19 nt, Artificial Sequence
  Description of Artificial Sequence: Synthetic oligonucleotide
ccccuugaguggggcuguc

SEQ ID NO: 2180374 - RNA, 19 nt, Artificial Sequence
  Description of Artificial Sequence: Synthetic oligonucleotide
cccugaccucgcugugccu

SEQ ID NO: 2180375 - RNA, 19 nt, Artificial Sequence
  Description of Artificial Sequence: Synthetic oligonucleotide
uauuuauuaccaaagagag

SEQ ID NO: 2180376 - RNA, 19 nt, Artificial Sequence
  Description of Artificial Sequence: Synthetic oligonucleotide
uuuauuaccaaagagagug

SEQ ID NO: 2180377 - RNA, 19 nt, Artificial Sequence
  Description of Artificial Sequence: Synthetic oligonucleotide
uuuauuuacaaaauuguca

SEQ ID NO: 2180378 - RNA, 19 nt, Artificial Sequence
  Description of Artificial Sequence: Synthetic oligonucleotide
cuauuuauuaccaaagaga

SEQ ID NO: 2180379 - RNA, 19 nt, Artificial Sequence
  Description of Artificial Sequence: Synthetic oligonucleotide
uacaaaauugucauugcac

SEQ ID NO: 2180380 - RNA, 19 nt, Artificial Sequence
  Description of Artificial Sequence: Synthetic oligonucleotide
uagaaagcuacuuuuauuu

SEQ ID NO: 2180381 - RNA, 19 nt, Artificial Sequence
  Description of Artificial Sequence: Synthetic oligonucleotide
uuuacaaaauugucauugc

SEQ ID NO: 2180382 - RNA, 19 nt, Artificial Sequence
  Description of Artificial Sequence: Synthetic oligonucleotide
gaaagcuacuuuuauuuac

SEQ ID NO: 2180383 - RNA, 19 nt, Artificial Sequence
  Description of Artificial Sequence: Synthetic oligonucleotide
uguucacuuucacagagaa

SEQ ID NO: 2180384 - RNA, 19 nt, Artificial Sequence
  Description of Artificial Sequence: Synthetic oligonucleotide
ugcuauuuauuaccaaaga

SEQ ID NO: 2180385 - RNA, 19 nt, Artificial Sequence
  Description of Artificial Sequence: Synthetic oligonucleotide
gcuauuuauuaccaaagag

SEQ ID NO: 2180386 - RNA, 19 nt, Artificial Sequence
  Description of Artificial Sequence: Synthetic oligonucleotide
cuuguucacuuucacagag

SEQ ID NO: 2180387 - RNA, 19 nt, Artificial Sequence
  Description of Artificial Sequence: Synthetic oligonucleotide
acuuggguguggcagcugc

SEQ ID NO: 2180388 - RNA, 19 nt, Artificial Sequence
  Description of Artificial Sequence: Synthetic oligonucleotide
uuaccaaagagagugccug

SEQ ID NO: 2180389 - RNA, 19 nt, Artificial Sequence
  Description of Artificial Sequence: Synthetic oligonucleotide
uauuaccaaagagagugcc

SEQ ID NO: 2180390 - RNA, 19 nt, Artificial Sequence
  Description of Artificial Sequence: Synthetic oligonucleotide
aaagcuacuuuuauuuaca

SEQ ID NO: 2180391 - RNA, 19 nt, Artificial Sequence
  Description of Artificial Sequence: Synthetic oligonucleotide
uggggugcuagaaagcuac

SEQ ID NO: 2180392 - RNA, 19 nt, Artificial Sequence
  Description of Artificial Sequence: Synthetic oligonucleotide
uuauuaccaaagagagugc

SEQ ID NO: 2180393 - RNA, 19 nt, Artificial Sequence
  Description of Artificial Sequence: Synthetic oligonucleotide
agcugcaggccucugugcc

SEQ ID NO: 2180394 - RNA, 19 nt, Artificial Sequence
  Description of Artificial Sequence: Synthetic oligonucleotide
uuuuggggugcuagaaagc

SEQ ID NO: 2180395 - RNA, 19 nt, Artificial Sequence
  Description of Artificial Sequence: Synthetic oligonucleotide
aaggucacuuggguguggc

SEQ ID NO: 2180396 - RNA, 19 nt, Artificial Sequence
  Description of Artificial Sequence: Synthetic oligonucleotide
uuuggggugcuagaaagcu

SEQ ID NO: 2180397 - RNA, 19 nt, Artificial Sequence
  Description of Artificial Sequence: Synthetic oligonucleotide
uccuccaccuccauucgcc

SEQ ID NO: 2180398 - RNA, 19 nt, Artificial Sequence
  Description of Artificial Sequence: Synthetic oligonucleotide
ucacuuucacagagaagug

SEQ ID NO: 2180399 - RNA, 19 nt, Artificial Sequence
  Description of Artificial Sequence: Synthetic oligonucleotide
aagcuacuuuuauuuacaa

SEQ ID NO: 2180400 - RNA, 19 nt, Artificial Sequence
  Description of Artificial Sequence: Synthetic oligonucleotide
ugcuagaaagcuacuuuua

SEQ ID NO: 2180401 - RNA, 19 nt, Artificial Sequence
  Description of Artificial Sequence: Synthetic oligonucleotide
agaaagcuacuuuuauuua

SEQ ID NO: 2180402 - RNA, 19 nt, Artificial Sequence
  Description of Artificial Sequence: Synthetic oligonucleotide
uauuuacaaaauugucauu

SEQ ID NO: 2180403 - RNA, 19 nt, Artificial Sequence
  Description of Artificial Sequence: Synthetic oligonucleotide
cagguggacauccuccacc

SEQ ID NO: 2180404 - RNA, 19 nt, Artificial Sequence
  Description of Artificial Sequence: Synthetic oligonucleotide
uggguguggcagcugcagg

SEQ ID NO: 2180405 - RNA, 19 nt, Artificial Sequence
  Description of Artificial Sequence: Synthetic oligonucleotide
agcuacuuuuauuuacaaa

SEQ ID NO: 2180406 - RNA, 19 nt, Artificial Sequence
  Description of Artificial Sequence: Synthetic oligonucleotide
gccgcugcuauuuauuacc

SEQ ID NO: 2180407 - RNA, 19 nt, Artificial Sequence
  Description of Artificial Sequence: Synthetic oligonucleotide
auuuauuaccaaagagagu

SEQ ID NO: 2180408 - RNA, 19 nt, Artificial Sequence
  Description of Artificial Sequence: Synthetic oligonucleotide
auccuccaccuccauucgc

SEQ ID NO: 2180409 - RNA, 19 nt, Artificial Sequence
  Description of Artificial Sequence: Synthetic oligonucleotide
agguggacauccuccaccu

SEQ ID NO: 2180410 - RNA, 19 nt, Artificial Sequence
  Description of Artificial Sequence: Synthetic oligonucleotide
gucacuuggguguggcagc

SEQ ID NO: 2180411 - RNA, 19 nt, Artificial Sequence
  Description of Artificial Sequence: Synthetic oligonucleotide
auuaccaaagagagugccu

SEQ ID NO: 2180412 - RNA, 19 nt, Artificial Sequence
  Description of Artificial Sequence: Synthetic oligonucleotide
gcugcuauuuauuaccaaa

SEQ ID NO: 2180413 - RNA, 19 nt, Artificial Sequence
  Description of Artificial Sequence: Synthetic oligonucleotide
uaccaaagagagugccuga

SEQ ID NO: 2180414 - RNA, 19 nt, Artificial Sequence
  Description of Artificial Sequence: Synthetic oligonucleotide
uuggguguggcagcugcag

SEQ ID NO: 2180415 - RNA, 19 nt, Artificial Sequence
  Description of Artificial Sequence: Synthetic oligonucleotide
ggucacuuggguguggcag

SEQ ID NO: 2180416 - RNA, 19 nt, Artificial Sequence
  Description of Artificial Sequence: Synthetic oligonucleotide
auaaggucacuugggugug

SEQ ID NO: 2180417 - RNA, 19 nt, Artificial Sequence
  Description of Artificial Sequence: Synthetic oligonucleotide
uucgccgcugcuauuuauu

SEQ ID NO: 2180418 - RNA, 19 nt, Artificial Sequence
  Description of Artificial Sequence: Synthetic oligonucleotide
agcccagguggacauccuc

SEQ ID NO: 2180419 - RNA, 19 nt, Artificial Sequence
  Description of Artificial Sequence: Synthetic oligonucleotide
uaaggucacuugggugugg

SEQ ID NO: 2180420 - RNA, 19 nt, Artificial Sequence
  Description of Artificial Sequence: Synthetic oligonucleotide
uuggggugcuagaaagcua

SEQ ID NO: 2180421 - RNA, 19 nt, Artificial Sequence
  Description of Artificial Sequence: Synthetic oligonucleotide
ggguguggcagcugcaggc

SEQ ID NO: 2180422 - RNA, 19 nt, Artificial Sequence
  Description of Artificial Sequence: Synthetic oligonucleotide
cacuuucacagagaaguga

SEQ ID NO: 2180423 - RNA, 19 nt, Artificial Sequence
  Description of Artificial Sequence: Synthetic oligonucleotide
cuagaaagcuacuuuuauu

SEQ ID NO: 2180424 - RNA, 19 nt, Artificial Sequence
  Description of Artificial Sequence: Synthetic oligonucleotide
ucgccgcugcuauuuauua

SEQ ID NO: 2180425 - RNA, 19 nt, Artificial Sequence
  Description of Artificial Sequence: Synthetic oligonucleotide
cuccaccuccauucgccgc

SEQ ID NO: 2180426 - RNA, 19 nt, Artificial Sequence
  Description of Artificial Sequence: Synthetic oligonucleotide
ucacuuggguguggcagcu

SEQ ID NO: 2180427 - RNA, 19 nt, Artificial Sequence
  Description of Artificial Sequence: Synthetic oligonucleotide
auucgccgcugcuauuuau

SEQ ID NO: 2180428 - RNA, 19 nt, Artificial Sequence
  Description of Artificial Sequence: Synthetic oligonucleotide
gugcuagaaagcuacuuuu

SEQ ID NO: 2180429 - RNA, 19 nt, Artificial Sequence
  Description of Artificial Sequence: Synthetic oligonucleotide
cagcugcaggccucugugc

SEQ ID NO: 2180430 - RNA, 19 nt, Artificial Sequence
  Description of Artificial Sequence: Synthetic oligonucleotide
accuccauucgccgcugcu

SEQ ID NO: 2180431 - RNA, 19 nt, Artificial Sequence
  Description of Artificial Sequence: Synthetic oligonucleotide
cuuucacagagaagugacu

SEQ ID NO: 2180432 - RNA, 19 nt, Artificial Sequence
  Description of Artificial Sequence: Synthetic oligonucleotide
ggugcuagaaagcuacuuu

SEQ ID NO: 2180433 - RNA, 19 nt, Artificial Sequence
  Description of Artificial Sequence: Synthetic oligonucleotide
gcuagaaagcuacuuuuau

SEQ ID NO: 2180434 - RNA, 19 nt, Artificial Sequence
  Description of Artificial Sequence: Synthetic oligonucleotide
aggucacuuggguguggca

SEQ ID NO: 2180435 - RNA, 19 nt, Artificial Sequence
  Description of Artificial Sequence: Synthetic oligonucleotide
aggccucugugcccuccuc

SEQ ID NO: 2180436 - RNA, 19 nt, Artificial Sequence
  Description of Artificial Sequence: Synthetic oligonucleotide
cuuggguguggcagcugca

SEQ ID NO: 2180437 - RNA, 19 nt, Artificial Sequence
  Description of Artificial Sequence: Synthetic oligonucleotide
gcugcaggccucugugccc

SEQ ID NO: 2180438 - RNA, 19 nt, Artificial Sequence
  Description of Artificial Sequence: Synthetic oligonucleotide
ccuccaccuccauucgccg

SEQ ID NO: 2180439 - RNA, 19 nt, Artificial Sequence
  Description of Artificial Sequence: Synthetic oligonucleotide
gcccagguggacauccucc

SEQ ID NO: 2180440 - RNA, 19 nt, Artificial Sequence
  Description of Artificial Sequence: Synthetic oligonucleotide
uccauucgccgcugcuauu

SEQ ID NO: 2180441 - RNA, 19 nt, Artificial Sequence
  Description of Artificial Sequence: Synthetic oligonucleotide
gacauccuccaccuccauu

SEQ ID NO: 2180442 - RNA, 19 nt, Artificial Sequence
  Description of Artificial Sequence: Synthetic oligonucleotide
cuccauucgccgcugcuau

SEQ ID NO: 2180443 - RNA, 19 nt, Artificial Sequence
  Description of Artificial Sequence: Synthetic oligonucleotide
caccuccauucgccgcugc

SEQ ID NO: 2180444 - RNA, 19 nt, Artificial Sequence
  Description of Artificial Sequence: Synthetic oligonucleotide
ccgcugcuauuuauuacca

SEQ ID NO: 2180445 - RNA, 19 nt, Artificial Sequence
  Description of Artificial Sequence: Synthetic oligonucleotide
cccagguggacauccucca

SEQ ID NO: 2180446 - RNA, 19 nt, Artificial Sequence
  Description of Artificial Sequence: Synthetic oligonucleotide
cauucgccgcugcuauuua

SEQ ID NO: 2180447 - RNA, 19 nt, Artificial Sequence
  Description of Artificial Sequence: Synthetic oligonucleotide
cacuuggguguggcagcug

SEQ ID NO: 2180448 - RNA, 19 nt, Artificial Sequence
  Description of Artificial Sequence: Synthetic oligonucleotide
guguggcagcugcaggccu

SEQ ID NO: 2180449 - RNA, 19 nt, Artificial Sequence
  Description of Artificial Sequence: Synthetic oligonucleotide
gguggacauccuccaccuc

SEQ ID NO: 2180450 - RNA, 19 nt, Artificial Sequence
  Description of Artificial Sequence: Synthetic oligonucleotide
cgccgcugcuauuuauuac

SEQ ID NO: 2180451 - RNA, 19 nt, Artificial Sequence
  Description of Artificial Sequence: Synthetic oligonucleotide
ugcaggccucugugcccuc

SEQ ID NO: 2180452 - RNA, 19 nt, Artificial Sequence
  Description of Artificial Sequence: Synthetic oligonucleotide
uggcagcugcaggccucug

SEQ ID NO: 2180453 - RNA, 19 nt, Artificial Sequence
  Description of Artificial Sequence: Synthetic oligonucleotide
gggugcuagaaagcuacuu

SEQ ID NO: 2180454 - RNA, 19 nt, Artificial Sequence
  Description of Artificial Sequence: Synthetic oligonucleotide
ccuccauucgccgcugcua

SEQ ID NO: 2180455 - RNA, 19 nt, Artificial Sequence
  Description of Artificial Sequence: Synthetic oligonucleotide
cgcugcuauuuauuaccaa

SEQ ID NO: 2180456 - RNA, 19 nt, Artificial Sequence
  Description of Artificial Sequence: Synthetic oligonucleotide
ccaccuccauucgccgcug

SEQ ID NO: 2180457 - RNA, 19 nt, Artificial Sequence
  Description of Artificial Sequence: Synthetic oligonucleotide
ccauucgccgcugcuauuu

SEQ ID NO: 2180458 - RNA, 19 nt, Artificial Sequence
  Description of Artificial Sequence: Synthetic oligonucleotide
ggggugcuagaaagcuacu

SEQ ID NO: 2180459 - RNA, 19 nt, Artificial Sequence
  Description of Artificial Sequence: Synthetic oligonucleotide
aguaauggaagcugguagc

SEQ ID NO: 2180460 - RNA, 19 nt, Artificial Sequence
  Description of Artificial Sequence: Synthetic oligonucleotide
uuaaguagcaggcaagaca

SEQ ID NO: 2180461 - RNA, 19 nt, Artificial Sequence
  Description of Artificial Sequence: Synthetic oligonucleotide
uaaguagcaggcaagacac

SEQ ID NO: 2180462 - RNA, 19 nt, Artificial Sequence
  Description of Artificial Sequence: Synthetic oligonucleotide
ugugcuauuuccaacuuug

SEQ ID NO: 2180463 - RNA, 19 nt, Artificial Sequence
  Description of Artificial Sequence: Synthetic oligonucleotide
auagcucagaaacaauggc

SEQ ID NO: 2180464 - RNA, 19 nt, Artificial Sequence
  Description of Artificial Sequence: Synthetic oligonucleotide
uguccaguuaaguagcagg

SEQ ID NO: 2180465 - RNA, 19 nt, Artificial Sequence
  Description of Artificial Sequence: Synthetic oligonucleotide
aaaacuugugucaacuuag

SEQ ID NO: 2180466 - RNA, 19 nt, Artificial Sequence
  Description of Artificial Sequence: Synthetic oligonucleotide
acgucauagucuuugcucc

SEQ ID NO: 2180467 - RNA, 19 nt, Artificial Sequence
  Description of Artificial Sequence: Synthetic oligonucleotide
uccagauagcguaugacag

SEQ ID NO: 2180468 - RNA, 19 nt, Artificial Sequence
  Description of Artificial Sequence: Synthetic oligonucleotide
acuugugucaacuuagugu

SEQ ID NO: 2180469 - RNA, 19 nt, Artificial Sequence
  Description of Artificial Sequence: Synthetic oligonucleotide
acaaucucuugacaacucc

SEQ ID NO: 2180470 - RNA, 19 nt, Artificial Sequence
  Description of Artificial Sequence: Synthetic oligonucleotide
uauggugcaacccuccgcc

SEQ ID NO: 2180471 - RNA, 19 nt, Artificial Sequence
  Description of Artificial Sequence: Synthetic oligonucleotide
cauaguacaugaaucggag

SEQ ID NO: 2180472 - RNA, 19 nt, Artificial Sequence
  Description of Artificial Sequence: Synthetic oligonucleotide
uugacaacuccaaacuuug

SEQ ID NO: 2180473 - RNA, 19 nt, Artificial Sequence
  Description of Artificial Sequence: Synthetic oligonucleotide
guaaaagccaccaucccgg

SEQ ID NO: 2180474 - RNA, 19 nt, Artificial Sequence
  Description of Artificial Sequence: Synthetic oligonucleotide
uuuuguuauguuuuggguu

SEQ ID NO: 2180475 - RNA, 19 nt, Artificial Sequence
  Description of Artificial Sequence: Synthetic oligonucleotide
aguguuuccagauagcgua

SEQ ID NO: 2180476 - RNA, 19 nt, Artificial Sequence
  Description of Artificial Sequence: Synthetic oligonucleotide
uaguacaugaaucggaguu

SEQ ID NO: 2180477 - RNA, 19 nt, Artificial Sequence
  Description of Artificial Sequence: Synthetic oligonucleotide
acuccaaacuuugacuucc

SEQ ID NO: 2180478 - RNA, 19 nt, Artificial Sequence
  Description of Artificial Sequence: Synthetic oligonucleotide
cuugguaaaagccaccauc

SEQ ID NO: 2180479 - RNA, 19 nt, Artificial Sequence
  Description of Artificial Sequence: Synthetic oligonucleotide
ucaacuuaguguuuccaga

SEQ ID NO: 2180480 - RNA, 19 nt, Artificial Sequence
  Description of Artificial Sequence: Synthetic oligonucleotide
cuauuuccaacuuugguca

SEQ ID NO: 2180481 - RNA, 19 nt, Artificial Sequence
  Description of Artificial Sequence: Synthetic oligonucleotide
aauggaagcugguagcaau

SEQ ID NO: 2180482 - RNA, 19 nt, Artificial Sequence
  Description of Artificial Sequence: Synthetic oligonucleotide
ugguacuugcaaaccaggg

SEQ ID NO: 2180483 - RNA, 19 nt, Artificial Sequence
  Description of Artificial Sequence: Synthetic oligonucleotide
accacaaucucuugacaac

SEQ ID NO: 2180484 - RNA, 19 nt, Artificial Sequence
  Description of Artificial Sequence: Synthetic oligonucleotide
caaguaggagaccagcucc

SEQ ID NO: 2180485 - RNA, 19 nt, Artificial Sequence
  Description of Artificial Sequence: Synthetic oligonucleotide
uagucuuugcuccagcgac

SEQ ID NO: 2180486 - RNA, 19 nt, Artificial Sequence
  Description of Artificial Sequence: Synthetic oligonucleotide
agugacuuguagcuagggg

SEQ ID NO: 2180487 - RNA, 19 nt, Artificial Sequence
  Description of Artificial Sequence: Synthetic oligonucleotide
uuccagauagcguaugaca

SEQ ID NO: 2180488 - RNA, 19 nt, Artificial Sequence
  Description of Artificial Sequence: Synthetic oligonucleotide
aacuugugucaacuuagug

SEQ ID NO: 2180489 - RNA, 19 nt, Artificial Sequence
  Description of Artificial Sequence: Synthetic oligonucleotide
gguaaaagccaccaucccg

SEQ ID NO: 2180490 - RNA, 19 nt, Artificial Sequence
  Description of Artificial Sequence: Synthetic oligonucleotide
gacaucagggguauggugc

SEQ ID NO: 2180491 - RNA, 19 nt, Artificial Sequence
  Description of Artificial Sequence: Synthetic oligonucleotide
uuuggucaggaaaacuugu

SEQ ID NO: 2180492 - RNA, 19 nt, Artificial Sequence
  Description of Artificial Sequence: Synthetic oligonucleotide
aguuccggcggauaagcgg

SEQ ID NO: 2180493 - RNA, 19 nt, Artificial Sequence
  Description of Artificial Sequence: Synthetic oligonucleotide
gaaacaauggcgccaccug

SEQ ID NO: 2180494 - RNA, 19 nt, Artificial Sequence
  Description of Artificial Sequence: Synthetic oligonucleotide
uguguugguugcagggugg

SEQ ID NO: 2180495 - RNA, 19 nt, Artificial Sequence
  Description of Artificial Sequence: Synthetic oligonucleotide
caguaauggaagcugguag

SEQ ID NO: 2180496 - RNA, 19 nt, Artificial Sequence
  Description of Artificial Sequence: Synthetic oligonucleotide
cauagucuuugcuccagcg

SEQ ID NO: 2180497 - RNA, 19 nt, Artificial Sequence
  Description of Artificial Sequence: Synthetic oligonucleotide
gacgucauagucuuugcuc

SEQ ID NO: 2180498 - RNA, 19 nt, Artificial Sequence
  Description of Artificial Sequence: Synthetic oligonucleotide
ugcuauuuccaacuuuggu

SEQ ID NO: 2180499 - RNA, 19 nt, Artificial Sequence
  Description of Artificial Sequence: Synthetic oligonucleotide
augaaucggaguuccggcg

SEQ ID NO: 2180500 - RNA, 19 nt, Artificial Sequence
  Description of Artificial Sequence: Synthetic oligonucleotide
aacccuccgccccuggggc

SEQ ID NO: 2180501 - RNA, 19 nt, Artificial Sequence
  Description of Artificial Sequence: Synthetic oligonucleotide
gaagcugcaggaagcagcg

SEQ ID NO: 2180502 - RNA, 19 nt, Artificial Sequence
  Description of Artificial Sequence: Synthetic oligonucleotide
gucaacuuaguguuuccag

SEQ ID NO: 2180503 - RNA, 19 nt, Artificial Sequence
  Description of Artificial Sequence: Synthetic oligonucleotide
gauagcguaugacagccuc

SEQ ID NO: 2180504 - RNA, 19 nt, Artificial Sequence
  Description of Artificial Sequence: Synthetic oligonucleotide
aguacaugaaucggaguuc

SEQ ID NO: 2180505 - RNA, 19 nt, Artificial Sequence
  Description of Artificial Sequence: Synthetic oligonucleotide
gaagccauuccugaacugc

SEQ ID NO: 2180506 - RNA, 19 nt, Artificial Sequence
  Description of Artificial Sequence: Synthetic oligonucleotide
ucgggagugacuuguagcu

SEQ ID NO: 2180507 - RNA, 19 nt, Artificial Sequence
  Description of Artificial Sequence: Synthetic oligonucleotide
gcuauuuccaacuuugguc

SEQ ID NO: 2180508 - RNA, 19 nt, Artificial Sequence
  Description of Artificial Sequence: Synthetic oligonucleotide
cuggcuacccuccaaguag

SEQ ID NO: 2180509 - RNA, 19 nt, Artificial Sequence
  Description of Artificial Sequence: Synthetic oligonucleotide
acugggauccagcacccgg

SEQ ID NO: 2180510 - RNA, 19 nt, Artificial Sequence
  Description of Artificial Sequence: Synthetic oligonucleotide
cuuaguguuuccagauagc

SEQ ID NO: 2180511 - RNA, 19 nt, Artificial Sequence
  Description of Artificial Sequence: Synthetic oligonucleotide
uuuccuguccaguuaagua

SEQ ID NO: 2180512 - RNA, 19 nt, Artificial Sequence
  Description of Artificial Sequence: Synthetic oligonucleotide
ccuggcauagcucagaaac

SEQ ID NO: 2180513 - RNA, 19 nt, Artificial Sequence
  Description of Artificial Sequence: Synthetic oligonucleotide
ccacauaguacaugaaucg

SEQ ID NO: 2180514 - RNA, 19 nt, Artificial Sequence
  Description of Artificial Sequence: Synthetic oligonucleotide
gccucugccauccacauag

SEQ ID NO: 2180515 - RNA, 19 nt, Artificial Sequence
  Description of Artificial Sequence: Synthetic oligonucleotide
cagauagcguaugacagcc

SEQ ID NO: 2180516 - RNA, 19 nt, Artificial Sequence
  Description of Artificial Sequence: Synthetic oligonucleotide
acuugcaaaccaggggucc

SEQ ID NO: 2180517 - RNA, 19 nt, Artificial Sequence
  Description of Artificial Sequence: Synthetic oligonucleotide
cacauaguacaugaaucgg

SEQ ID NO: 2180518 - RNA, 19 nt, Artificial Sequence
  Description of Artificial Sequence: Synthetic oligonucleotide
aauggcgccaccugggguu

SEQ ID NO: 2180519 - RNA, 19 nt, Artificial Sequence
  Description of Artificial Sequence: Synthetic oligonucleotide
uaucuacugggauccagca

SEQ ID NO: 2180520 - RNA, 19 nt, Artificial Sequence
  Description of Artificial Sequence: Synthetic oligonucleotide
uguggagcccacaguaaug

SEQ ID NO: 2180521 - RNA, 19 nt, Artificial Sequence
  Description of Artificial Sequence: Synthetic oligonucleotide
guagcaaucugauccugug

SEQ ID NO: 2180522 - RNA, 19 nt, Artificial Sequence
  Description of Artificial Sequence: Synthetic oligonucleotide
ugguaaaagccaccauccc

SEQ ID NO: 2180523 - RNA, 19 nt, Artificial Sequence
  Description of Artificial Sequence: Synthetic oligonucleotide
aucuacugggauccagcac

SEQ ID NO: 2180524 - RNA, 19 nt, Artificial Sequence
  Description of Artificial Sequence: Synthetic oligonucleotide
cugguacuugcaaaccagg

SEQ ID NO: 2180525 - RNA, 19 nt, Artificial Sequence
  Description of Artificial Sequence: Synthetic oligonucleotide
uggcuacccuccaaguagg

SEQ ID NO: 2180526 - RNA, 19 nt, Artificial Sequence
  Description of Artificial Sequence: Synthetic oligonucleotide
guugguugcaggguggaag

SEQ ID NO: 2180527 - RNA, 19 nt, Artificial Sequence
  Description of Artificial Sequence: Synthetic oligonucleotide
ugugucaacuuaguguuuc

SEQ ID NO: 2180528 - RNA, 19 nt, Artificial Sequence
  Description of Artificial Sequence: Synthetic oligonucleotide
gaagcugguagcaaucuga

SEQ ID NO: 2180529 - RNA, 19 nt, Artificial Sequence
  Description of Artificial Sequence: Synthetic oligonucleotide
uguaucuacugggauccag

SEQ ID NO: 2180530 - RNA, 19 nt, Artificial Sequence
  Description of Artificial Sequence: Synthetic oligonucleotide
cucgggagugacuuguagc

SEQ ID NO: 2180531 - RNA, 19 nt, Artificial Sequence
  Description of Artificial Sequence: Synthetic oligonucleotide
caguuaaguagcaggcaag

SEQ ID NO: 2180532 - RNA, 19 nt, Artificial Sequence
  Description of Artificial Sequence: Synthetic oligonucleotide
ucagaaacaauggcgccac

SEQ ID NO: 2180533 - RNA, 19 nt, Artificial Sequence
  Description of Artificial Sequence: Synthetic oligonucleotide
aggaaaacuugugucaacu

SEQ ID NO: 2180534 - RNA, 19 nt, Artificial Sequence
  Description of Artificial Sequence: Synthetic oligonucleotide
ucauagucuuugcuccagc

SEQ ID NO: 2180535 - RNA, 19 nt, Artificial Sequence
  Description of Artificial Sequence: Synthetic oligonucleotide
uuuccaacuuuggucagga

SEQ ID NO: 2180536 - RNA, 19 nt, Artificial Sequence
  Description of Artificial Sequence: Synthetic oligonucleotide
agcccacaguaauggaagc

SEQ ID NO: 2180537 - RNA, 19 nt, Artificial Sequence
  Description of Artificial Sequence: Synthetic oligonucleotide
cuacccuccaaguaggaga

SEQ ID NO: 2180538 - RNA, 19 nt, Artificial Sequence
  Description of Artificial Sequence: Synthetic oligonucleotide
uauuuccaacuuuggucag

SEQ ID NO: 2180539 - RNA, 19 nt, Artificial Sequence
  Description of Artificial Sequence: Synthetic oligonucleotide
agggguauggugcaacccu

SEQ ID NO: 2180540 - RNA, 19 nt, Artificial Sequence
  Description of Artificial Sequence: Synthetic oligonucleotide
aggcaagacacugcugacc

SEQ ID NO: 2180541 - RNA, 19 nt, Artificial Sequence
  Description of Artificial Sequence: Synthetic oligonucleotide
aacuuuggucaggaaaacu

SEQ ID NO: 2180542 - RNA, 19 nt, Artificial Sequence
  Description of Artificial Sequence: Synthetic oligonucleotide
auagcguaugacagccucc

SEQ ID NO: 2180543 - RNA, 19 nt, Artificial Sequence
  Description of Artificial Sequence: Synthetic oligonucleotide
guacaugaaucggaguucc

SEQ ID NO: 2180544 - RNA, 19 nt, Artificial Sequence
  Description of Artificial Sequence: Synthetic oligonucleotide
ucaggaaaacuugugucaa

SEQ ID NO: 2180545 - RNA, 19 nt, Artificial Sequence
  Description of Artificial Sequence: Synthetic oligonucleotide
guacuugcaaaccaggggu

SEQ ID NO: 2180546 - RNA, 19 nt, Artificial Sequence
  Description of Artificial Sequence: Synthetic oligonucleotide
ggauaagcggcucugguca

SEQ ID NO: 2180547 - RNA, 19 nt, Artificial Sequence
  Description of Artificial Sequence: Synthetic oligonucleotide
aacuuaguguuuccagaua

SEQ ID NO: 2180548 - RNA, 19 nt, Artificial Sequence
  Description of Artificial Sequence: Synthetic oligonucleotide
agacaucagggguauggug

SEQ ID NO: 2180549 - RNA, 19 nt, Artificial Sequence
  Description of Artificial Sequence: Synthetic oligonucleotide
uuuccagauagcguaugac

SEQ ID NO: 2180550 - RNA, 19 nt, Artificial Sequence
  Description of Artificial Sequence: Synthetic oligonucleotide
ucccgaagcugcaggaagc

SEQ ID NO: 2180551 - RNA, 19 nt, Artificial Sequence
  Description of Artificial Sequence: Synthetic oligonucleotide
aaucucuugacaacuccaa

SEQ ID NO: 2180552 - RNA, 19 nt, Artificial Sequence
  Description of Artificial Sequence: Synthetic oligonucleotide
ccuugacuugguaaaagcc

SEQ ID NO: 2180553 - RNA, 19 nt, Artificial Sequence
  Description of Artificial Sequence: Synthetic oligonucleotide
caaaccaggggucccgaag

SEQ ID NO: 2180554 - RNA, 19 nt, Artificial Sequence
  Description of Artificial Sequence: Synthetic oligonucleotide
uagguccuccucacugugg

SEQ ID NO: 2180555 - RNA, 19 nt, Artificial Sequence
  Description of Artificial Sequence: Synthetic oligonucleotide
uggggccucuguuagggcc

SEQ ID NO: 2180556 - RNA, 19 nt, Artificial Sequence
  Description of Artificial Sequence: Synthetic oligonucleotide
gggagugacuuguagcuag

SEQ ID NO: 2180557 - RNA, 19 nt, Artificial Sequence
  Description of Artificial Sequence: Synthetic oligonucleotide
guaucuacugggauccagc

SEQ ID NO: 2180558 - RNA, 19 nt, Artificial Sequence
  Description of Artificial Sequence: Synthetic oligonucleotide
guccaguuaaguagcaggc

SEQ ID NO: 2180559 - RNA, 19 nt, Artificial Sequence
  Description of Artificial Sequence: Synthetic oligonucleotide
ucagggguauggugcaacc

SEQ ID NO: 2180560 - RNA, 19 nt, Artificial Sequence
  Description of Artificial Sequence: Synthetic oligonucleotide
ugucaacuuaguguuucca

SEQ ID NO: 2180561 - RNA, 19 nt, Artificial Sequence
  Description of Artificial Sequence: Synthetic oligonucleotide
cuugugucaacuuaguguu

SEQ ID NO: 2180562 - RNA, 19 nt, Artificial Sequence
  Description of Artificial Sequence: Synthetic oligonucleotide
gauaagcggcucuggucag

SEQ ID NO: 2180563 - RNA, 19 nt, Artificial Sequence
  Description of Artificial Sequence: Synthetic oligonucleotide
aaacuugugucaacuuagu

SEQ ID NO: 2180564 - RNA, 19 nt, Artificial Sequence
  Description of Artificial Sequence: Synthetic oligonucleotide
agucuuugcuccagcgacc

SEQ ID NO: 2180565 - RNA, 19 nt, Artificial Sequence
  Description of Artificial Sequence: Synthetic oligonucleotide
ggucaggaaaacuuguguc

SEQ ID NO: 2180566 - RNA, 19 nt, Artificial Sequence
  Description of Artificial Sequence: Synthetic oligonucleotide
auaccacaaucucuugaca

SEQ ID NO: 2180567 - RNA, 19 nt, Artificial Sequence
  Description of Artificial Sequence: Synthetic oligonucleotide
accgccaccaggcucucag

SEQ ID NO: 2180568 - RNA, 19 nt, Artificial Sequence
  Description of Artificial Sequence: Synthetic oligonucleotide
caaucucuugacaacucca

SEQ ID NO: 2180569 - RNA, 19 nt, Artificial Sequence
  Description of Artificial Sequence: Synthetic oligonucleotide
uggugcaacccuccgcccc

SEQ ID NO: 2180570 - RNA, 19 nt, Artificial Sequence
  Description of Artificial Sequence: Synthetic oligonucleotide
aucagggguauggugcaac

SEQ ID NO: 2180571 - RNA, 19 nt, Artificial Sequence
  Description of Artificial Sequence: Synthetic oligonucleotide
ugacaacuccaaacuuuga

SEQ ID NO: 2180572 - RNA, 19 nt, Artificial Sequence
  Description of Artificial Sequence: Synthetic oligonucleotide
uacuugcaaaccagggguc

SEQ ID NO: 2180573 - RNA, 19 nt, Artificial Sequence
  Description of Artificial Sequence: Synthetic oligonucleotide
acaucagggguauggugca

SEQ ID NO: 2180574 - RNA, 19 nt, Artificial Sequence
  Description of Artificial Sequence: Synthetic oligonucleotide
caaacuuugacuuccucau

SEQ ID NO: 2180575 - RNA, 19 nt, Artificial Sequence
  Description of Artificial Sequence: Synthetic oligonucleotide
guauggugcaacccuccgc

SEQ ID NO: 2180576 - RNA, 19 nt, Artificial Sequence
  Description of Artificial Sequence: Synthetic oligonucleotide
guuccggcggauaagcggc

SEQ ID NO: 2180577 - RNA, 19 nt, Artificial Sequence
  Description of Artificial Sequence: Synthetic oligonucleotide
gguugcaucccgaagcugc

SEQ ID NO: 2180578 - RNA, 19 nt, Artificial Sequence
  Description of Artificial Sequence: Synthetic oligonucleotide
agacgucauagucuuugcu

SEQ ID NO: 2180579 - RNA, 19 nt, Artificial Sequence
  Description of Artificial Sequence: Synthetic oligonucleotide
ucuguguugguugcagggu

SEQ ID NO: 2180580 - RNA, 19 nt, Artificial Sequence
  Description of Artificial Sequence: Synthetic oligonucleotide
cuguguugguugcagggug

SEQ ID NO: 2180581 - RNA, 19 nt, Artificial Sequence
  Description of Artificial Sequence: Synthetic oligonucleotide
agcggcucuggucaggcca

SEQ ID NO: 2180582 - RNA, 19 nt, Artificial Sequence
  Description of Artificial Sequence: Synthetic oligonucleotide
gagugacuuguagcuaggg

SEQ ID NO: 2180583 - RNA, 19 nt, Artificial Sequence
  Description of Artificial Sequence: Synthetic oligonucleotide
agcugguagcaaucugauc

SEQ ID NO: 2180584 - RNA, 19 nt, Artificial Sequence
  Description of Artificial Sequence: Synthetic oligonucleotide
auggugcaacccuccgccc

SEQ ID NO: 2180585 - RNA, 19 nt, Artificial Sequence
  Description of Artificial Sequence: Synthetic oligonucleotide
ucggaguuccggcggauaa

SEQ ID NO: 2180586 - RNA, 19 nt, Artificial Sequence
  Description of Artificial Sequence: Synthetic oligonucleotide
uguuuccagauagcguaug

SEQ ID NO: 2180587 - RNA, 19 nt, Artificial Sequence
  Description of Artificial Sequence: Synthetic oligonucleotide
aucugauccuguguggugu

SEQ ID NO: 2180588 - RNA, 19 nt, Artificial Sequence
  Description of Artificial Sequence: Synthetic oligonucleotide
cuacugggauccagcaccc

SEQ ID NO: 2180589 - RNA, 19 nt, Artificial Sequence
  Description of Artificial Sequence: Synthetic oligonucleotide
cacaaucucuugacaacuc

SEQ ID NO: 2180590 - RNA, 19 nt, Artificial Sequence
  Description of Artificial Sequence: Synthetic oligonucleotide
caucugguacuugcaaacc

SEQ ID NO: 2180591 - RNA, 19 nt, Artificial Sequence
  Description of Artificial Sequence: Synthetic oligonucleotide
cuccugauaccacaaucuc

SEQ ID NO: 2180592 - RNA, 19 nt, Artificial Sequence
  Description of Artificial Sequence: Synthetic oligonucleotide
guaauggaagcugguagca

SEQ ID NO: 2180593 - RNA, 19 nt, Artificial Sequence
  Description of Artificial Sequence: Synthetic oligonucleotide
uagcguaugacagccuccu

SEQ ID NO: 2180594 - RNA, 19 nt, Artificial Sequence
  Description of Artificial Sequence: Synthetic oligonucleotide
ugugugcuauuuccaacuu

SEQ ID NO: 2180595 - RNA, 19 nt, Artificial Sequence
  Description of Artificial Sequence: Synthetic oligonucleotide
gcaucugguacuugcaaac

SEQ ID NO: 2180596 - RNA, 19 nt, Artificial Sequence
  Description of Artificial Sequence: Synthetic oligonucleotide
gguauggugcaacccuccg

SEQ ID NO: 2180597 - RNA, 19 nt, Artificial Sequence
  Description of Artificial Sequence: Synthetic oligonucleotide
cagacgucauagucuuugc

SEQ ID NO: 2180598 - RNA, 19 nt, Artificial Sequence
  Description of Artificial Sequence: Synthetic oligonucleotide
gugucaacuuaguguuucc

SEQ ID NO: 2180599 - RNA, 19 nt, Artificial Sequence
  Description of Artificial Sequence: Synthetic oligonucleotide
gcguaugacagccuccuug

SEQ ID NO: 2180600 - RNA, 19 nt, Artificial Sequence
  Description of Artificial Sequence: Synthetic oligonucleotide
caggaaaacuugugucaac

SEQ ID NO: 2180601 - RNA, 19 nt, Artificial Sequence
  Description of Artificial Sequence: Synthetic oligonucleotide
cuccuugacuugguaaaag

SEQ ID NO: 2180602 - RNA, 19 nt, Artificial Sequence
  Description of Artificial Sequence: Synthetic oligonucleotide
acgcagacgucauagucuu

SEQ ID NO: 2180603 - RNA, 19 nt, Artificial Sequence
  Description of Artificial Sequence: Synthetic oligonucleotide
cuagguccuccucacugug

SEQ ID NO: 2180604 - RNA, 19 nt, Artificial Sequence
  Description of Artificial Sequence: Synthetic oligonucleotide
ccaaacuuugacuuccuca

SEQ ID NO: 2180605 - RNA, 19 nt, Artificial Sequence
  Description of Artificial Sequence: Synthetic oligonucleotide
gugugugcuauuuccaacu

SEQ ID NO: 2180606 - RNA, 19 nt, Artificial Sequence
  Description of Artificial Sequence: Synthetic oligonucleotide
acuugguaaaagccaccau

SEQ ID NO: 2180607 - RNA, 19 nt, Artificial Sequence
  Description of Artificial Sequence: Synthetic oligonucleotide
aagcugguagcaaucugau

SEQ ID NO: 2180608 - RNA, 19 nt, Artificial Sequence
  Description of Artificial Sequence: Synthetic oligonucleotide
cucagaaacaauggcgcca

SEQ ID NO: 2180609 - RNA, 19 nt, Artificial Sequence
  Description of Artificial Sequence: Synthetic oligonucleotide
acaguaauggaagcuggua

SEQ ID NO: 2180610 - RNA, 19 nt, Artificial Sequence
  Description of Artificial Sequence: Synthetic oligonucleotide
gcagacgucauagucuuug

SEQ ID NO: 2180611 - RNA, 19 nt, Artificial Sequence
  Description of Artificial Sequence: Synthetic oligonucleotide
caacucggcugugagcugc

SEQ ID NO: 2180612 - RNA, 19 nt, Artificial Sequence
  Description of Artificial Sequence: Synthetic oligonucleotide
cuggcauagcucagaaaca

SEQ ID NO: 2180613 - RNA, 19 nt, Artificial Sequence
  Description of Artificial Sequence: Synthetic oligonucleotide
cugauaccacaaucucuug

SEQ ID NO: 2180614 - RNA, 19 nt, Artificial Sequence
  Description of Artificial Sequence: Synthetic oligonucleotide
uguggcacacgcagacguc

SEQ ID NO: 2180615 - RNA, 19 nt, Artificial Sequence
  Description of Artificial Sequence: Synthetic oligonucleotide
gaguuccggcggauaagcg

SEQ ID NO: 2180616 - RNA, 19 nt, Artificial Sequence
  Description of Artificial Sequence: Synthetic oligonucleotide
gaaucggaguuccggcgga

SEQ ID NO: 2180617 - RNA, 19 nt, Artificial Sequence
  Description of Artificial Sequence: Synthetic oligonucleotide
auaagcggcucuggucagg

SEQ ID NO: 2180618 - RNA, 19 nt, Artificial Sequence
  Description of Artificial Sequence: Synthetic oligonucleotide
uguuauguuuuggguuuuc

SEQ ID NO: 2180619 - RNA, 19 nt, Artificial Sequence
  Description of Artificial Sequence: Synthetic oligonucleotide
caacuuuggucaggaaaac

SEQ ID NO: 2180620 - RNA, 19 nt, Artificial Sequence
  Description of Artificial Sequence: Synthetic oligonucleotide
cugggguugcaucccgaag

SEQ ID NO: 2180621 - RNA, 19 nt, Artificial Sequence
  Description of Artificial Sequence: Synthetic oligonucleotide
gcucagaaacaauggcgcc

SEQ ID NO: 2180622 - RNA, 19 nt, Artificial Sequence
  Description of Artificial Sequence: Synthetic oligonucleotide
caggcaagacacugcugac

SEQ ID NO: 2180623 - RNA, 19 nt, Artificial Sequence
  Description of Artificial Sequence: Synthetic oligonucleotide
gugugguguacagagugca

SEQ ID NO: 2180624 - RNA, 19 nt, Artificial Sequence
  Description of Artificial Sequence: Synthetic oligonucleotide
cucggcugugagcugcggc

SEQ ID NO: 2180625 - RNA, 19 nt, Artificial Sequence
  Description of Artificial Sequence: Synthetic oligonucleotide
ggaguuccggcggauaagc

SEQ ID NO: 2180626 - RNA, 19 nt, Artificial Sequence
  Description of Artificial Sequence: Synthetic oligonucleotide
gaagcagcguaggcuggcc

SEQ ID NO: 2180627 - RNA, 19 nt, Artificial Sequence
  Description of Artificial Sequence: Synthetic oligonucleotide
gcacacgcagacgucauag

SEQ ID NO: 2180628 - RNA, 19 nt, Artificial Sequence
  Description of Artificial Sequence: Synthetic oligonucleotide
cuguccaguuaaguagcag

SEQ ID NO: 2180629 - RNA, 19 nt, Artificial Sequence
  Description of Artificial Sequence: Synthetic oligonucleotide
uccagcgaccacugcugca

SEQ ID NO: 2180630 - RNA, 19 nt, Artificial Sequence
  Description of Artificial Sequence: Synthetic oligonucleotide
uggcucccaaagcuguauc

SEQ ID NO: 2180631 - RNA, 19 nt, Artificial Sequence
  Description of Artificial Sequence: Synthetic oligonucleotide
ugcaacccuccgccccugg

SEQ ID NO: 2180632 - RNA, 19 nt, Artificial Sequence
  Description of Artificial Sequence: Synthetic oligonucleotide
acccggugugugcuauuuc

SEQ ID NO: 2180633 - RNA, 19 nt, Artificial Sequence
  Description of Artificial Sequence: Synthetic oligonucleotide
caacuuaguguuuccagau

SEQ ID NO: 2180634 - RNA, 19 nt, Artificial Sequence
  Description of Artificial Sequence: Synthetic oligonucleotide
gucccgaaggcagugccug

SEQ ID NO: 2180635 - RNA, 19 nt, Artificial Sequence
  Description of Artificial Sequence: Synthetic oligonucleotide
uugugucaacuuaguguuu

SEQ ID NO: 2180636 - RNA, 19 nt, Artificial Sequence
  Description of Artificial Sequence: Synthetic oligonucleotide
cagggguauggugcaaccc

SEQ ID NO: 2180637 - RNA, 19 nt, Artificial Sequence
  Description of Artificial Sequence: Synthetic oligonucleotide
ucuggcucccaaagcugua

SEQ ID NO: 2180638 - RNA, 19 nt, Artificial Sequence
  Description of Artificial Sequence: Synthetic oligonucleotide
agcgaccacugcugcagcu

SEQ ID NO: 2180639 - RNA, 19 nt, Artificial Sequence
  Description of Artificial Sequence: Synthetic oligonucleotide
accaucccggccucugcca

SEQ ID NO: 2180640 - RNA, 19 nt, Artificial Sequence
  Description of Artificial Sequence: Synthetic oligonucleotide
ugacagccuccuugacuug

SEQ ID NO: 2180641 - RNA, 19 nt, Artificial Sequence
  Description of Artificial Sequence: Synthetic oligonucleotide
cucuggucaggccagacau

SEQ ID NO: 2180642 - RNA, 19 nt, Artificial Sequence
  Description of Artificial Sequence: Synthetic oligonucleotide
cuccagcgaccacugcugc

SEQ ID NO: 2180643 - RNA, 19 nt, Artificial Sequence
  Description of Artificial Sequence: Synthetic oligonucleotide
ggagugacuuguagcuagg

SEQ ID NO: 2180644 - RNA, 19 nt, Artificial Sequence
  Description of Artificial Sequence: Synthetic oligonucleotide
gcugcaggaagcagcguag

SEQ ID NO: 2180645 - RNA, 19 nt, Artificial Sequence
  Description of Artificial Sequence: Synthetic oligonucleotide
ucuuugcuccagcgaccac

SEQ ID NO: 2180646 - RNA, 19 nt, Artificial Sequence
  Description of Artificial Sequence: Synthetic oligonucleotide
caccugggguugcaucccg

SEQ ID NO: 2180647 - RNA, 19 nt, Artificial Sequence
  Description of Artificial Sequence: Synthetic oligonucleotide
ugcaaaccaggggucccga

SEQ ID NO: 2180648 - RNA, 19 nt, Artificial Sequence
  Description of Artificial Sequence: Synthetic oligonucleotide
ucccuggcuuccuccugcc

SEQ ID NO: 2180649 - RNA, 19 nt, Artificial Sequence
  Description of Artificial Sequence: Synthetic oligonucleotide
uggcacacgcagacgucau

SEQ ID NO: 2180650 - RNA, 19 nt, Artificial Sequence
  Description of Artificial Sequence: Synthetic oligonucleotide
ggccuggcuacccuccaag

SEQ ID NO: 2180651 - RNA, 19 nt, Artificial Sequence
  Description of Artificial Sequence: Synthetic oligonucleotide
cuuugcuccagcgaccacu

SEQ ID NO: 2180652 - RNA, 19 nt, Artificial Sequence
  Description of Artificial Sequence: Synthetic oligonucleotide
agugccuggcauagcucag

SEQ ID NO: 2180653 - RNA, 19 nt, Artificial Sequence
  Description of Artificial Sequence: Synthetic oligonucleotide
guggcacacgcagacguca

SEQ ID NO: 2180654 - RNA, 19 nt, Artificial Sequence
  Description of Artificial Sequence: Synthetic oligonucleotide
gccuccuugacuugguaaa

SEQ ID NO: 2180655 - RNA, 19 nt, Artificial Sequence
  Description of Artificial Sequence: Synthetic oligonucleotide
aaucggaguuccggcggau

SEQ ID NO: 2180656 - RNA, 19 nt, Artificial Sequence
  Description of Artificial Sequence: Synthetic oligonucleotide
ggcucucaguuuccugucc

SEQ ID NO: 2180657 - RNA, 19 nt, Artificial Sequence
  Description of Artificial Sequence: Synthetic oligonucleotide
uguugguugcaggguggaa

SEQ ID NO: 2180658 - RNA, 19 nt, Artificial Sequence
  Description of Artificial Sequence: Synthetic oligonucleotide
gcuacccuccaaguaggag

SEQ ID NO: 2180659 - RNA, 19 nt, Artificial Sequence
  Description of Artificial Sequence: Synthetic oligonucleotide
gguguacagagugcagcug

SEQ ID NO: 2180660 - RNA, 19 nt, Artificial Sequence
  Description of Artificial Sequence: Synthetic oligonucleotide
cugugagcugcggcuagug

SEQ ID NO: 2180661 - RNA, 19 nt, Artificial Sequence
  Description of Artificial Sequence: Synthetic oligonucleotide
gggucccgaaggcagugcc

SEQ ID NO: 2180662 - RNA, 19 nt, Artificial Sequence
  Description of Artificial Sequence: Synthetic oligonucleotide
ccugauaccacaaucucuu

SEQ ID NO: 2180663 - RNA, 19 nt, Artificial Sequence
  Description of Artificial Sequence: Synthetic oligonucleotide
caggguggaagccauuccu

SEQ ID NO: 2180664 - RNA, 19 nt, Artificial Sequence
  Description of Artificial Sequence: Synthetic oligonucleotide
cucaguuuccuguccaguu

SEQ ID NO: 2180665 - RNA, 19 nt, Artificial Sequence
  Description of Artificial Sequence: Synthetic oligonucleotide
cacaguaauggaagcuggu

SEQ ID NO: 2180666 - RNA, 19 nt, Artificial Sequence
  Description of Artificial Sequence: Synthetic oligonucleotide
caaucugauccuguguggu

SEQ ID NO: 2180667 - RNA, 19 nt, Artificial Sequence
  Description of Artificial Sequence: Synthetic oligonucleotide
agcguaggcuggccuggcu

SEQ ID NO: 2180668 - RNA, 19 nt, Artificial Sequence
  Description of Artificial Sequence: Synthetic oligonucleotide
cuccugcccuucuugggga

SEQ ID NO: 2180669 - RNA, 19 nt, Artificial Sequence
  Description of Artificial Sequence: Synthetic oligonucleotide
auccugugugguguacaga

SEQ ID NO: 2180670 - RNA, 19 nt, Artificial Sequence
  Description of Artificial Sequence: Synthetic oligonucleotide
ggguauggugcaacccucc

SEQ ID NO: 2180671 - RNA, 19 nt, Artificial Sequence
  Description of Artificial Sequence: Synthetic oligonucleotide
ggcggauaagcggcucugg

SEQ ID NO: 2180672 - RNA, 19 nt, Artificial Sequence
  Description of Artificial Sequence: Synthetic oligonucleotide
ccuccugauaccacaaucu

SEQ ID NO: 2180673 - RNA, 19 nt, Artificial Sequence
  Description of Artificial Sequence: Synthetic oligonucleotide
acccuccugauaccacaau

SEQ ID NO: 2180674 - RNA, 19 nt, Artificial Sequence
  Description of Artificial Sequence: Synthetic oligonucleotide
cagcgaccacugcugcagc

SEQ ID NO: 2180675 - RNA, 19 nt, Artificial Sequence
  Description of Artificial Sequence: Synthetic oligonucleotide
aggccagacaucaggggua

SEQ ID NO: 2180676 - RNA, 19 nt, Artificial Sequence
  Description of Artificial Sequence: Synthetic oligonucleotide
cugcccuucuuggggaguc

SEQ ID NO: 2180677 - RNA, 19 nt, Artificial Sequence
  Description of Artificial Sequence: Synthetic oligonucleotide
gcaucccgaagcugcagga

SEQ ID NO: 2180678 - RNA, 19 nt, Artificial Sequence
  Description of Artificial Sequence: Synthetic oligonucleotide
guguugguugcagggugga

SEQ ID NO: 2180679 - RNA, 19 nt, Artificial Sequence
  Description of Artificial Sequence: Synthetic oligonucleotide
cuguggagcccacaguaau

SEQ ID NO: 2180680 - RNA, 19 nt, Artificial Sequence
  Description of Artificial Sequence: Synthetic oligonucleotide
gcucuggucaggccagaca

SEQ ID NO: 2180681 - RNA, 19 nt, Artificial Sequence
  Description of Artificial Sequence: Synthetic oligonucleotide
cgaccacugcugcagcugg

SEQ ID NO: 2180682 - RNA, 19 nt, Artificial Sequence
  Description of Artificial Sequence: Synthetic oligonucleotide
cggauaagcggcucugguc

SEQ ID NO: 2180683 - RNA, 19 nt, Artificial Sequence
  Description of Artificial Sequence: Synthetic oligonucleotide
agcguaugacagccuccuu

SEQ ID NO: 2180684 - RNA, 19 nt, Artificial Sequence
  Description of Artificial Sequence: Synthetic oligonucleotide
gcugguguccaucuguguu

SEQ ID NO: 2180685 - RNA, 19 nt, Artificial Sequence
  Description of Artificial Sequence: Synthetic oligonucleotide
auggcgccaccugggguug

SEQ ID NO: 2180686 - RNA, 19 nt, Artificial Sequence
  Description of Artificial Sequence: Synthetic oligonucleotide
agcacccggugugugcuau

SEQ ID NO: 2180687 - RNA, 19 nt, Artificial Sequence
  Description of Artificial Sequence: Synthetic oligonucleotide
gggguauggugcaacccuc

SEQ ID NO: 2180688 - RNA, 19 nt, Artificial Sequence
  Description of Artificial Sequence: Synthetic oligonucleotide
cccuucuuggggagucccc

SEQ ID NO: 2180689 - RNA, 19 nt, Artificial Sequence
  Description of Artificial Sequence: Synthetic oligonucleotide
gguagcaaucugauccugu

SEQ ID NO: 2180690 - RNA, 19 nt, Artificial Sequence
  Description of Artificial Sequence: Synthetic oligonucleotide
gcgaccacugcugcagcug

SEQ ID NO: 2180691 - RNA, 19 nt, Artificial Sequence
  Description of Artificial Sequence: Synthetic oligonucleotide
ggugagcugcaacucggcu

SEQ ID NO: 2180692 - RNA, 19 nt, Artificial Sequence
  Description of Artificial Sequence: Synthetic oligonucleotide
uccggcggauaagcggcuc

SEQ ID NO: 2180693 - RNA, 19 nt, Artificial Sequence
  Description of Artificial Sequence: Synthetic oligonucleotide
gcaacucggcugugagcug

SEQ ID NO: 2180694 - RNA, 19 nt, Artificial Sequence
  Description of Artificial Sequence: Synthetic oligonucleotide
guacagagugcagcuggcu

SEQ ID NO: 2180695 - RNA, 19 nt, Artificial Sequence
  Description of Artificial Sequence: Synthetic oligonucleotide
caucccgaagcugcaggaa

SEQ ID NO: 2180696 - RNA, 19 nt, Artificial Sequence
  Description of Artificial Sequence: Synthetic oligonucleotide
aucggaguuccggcggaua

SEQ ID NO: 2180697 - RNA, 19 nt, Artificial Sequence
  Description of Artificial Sequence: Synthetic oligonucleotide
cacacgcagacgucauagu

SEQ ID NO: 2180698 - RNA, 19 nt, Artificial Sequence
  Description of Artificial Sequence: Synthetic oligonucleotide
cagcguaggcuggccuggc

SEQ ID NO: 2180699 - RNA, 19 nt, Artificial Sequence
  Description of Artificial Sequence: Synthetic oligonucleotide
ccggugugugcuauuucca

SEQ ID NO: 2180700 - RNA, 19 nt, Artificial Sequence
  Description of Artificial Sequence: Synthetic oligonucleotide
cccgaaggcagugccuggc

SEQ ID NO: 2180701 - RNA, 19 nt, Artificial Sequence
  Description of Artificial Sequence: Synthetic oligonucleotide
ggugcaacccuccgccccu

SEQ ID NO: 2180702 - RNA, 19 nt, Artificial Sequence
  Description of Artificial Sequence: Synthetic oligonucleotide
caauggcgccaccuggggu

SEQ ID NO: 2180703 - RNA, 19 nt, Artificial Sequence
  Description of Artificial Sequence: Synthetic oligonucleotide
ccuucuuggggagucccca

SEQ ID NO: 2180704 - RNA, 19 nt, Artificial Sequence
  Description of Artificial Sequence: Synthetic oligonucleotide
accugggguugcaucccga

SEQ ID NO: 2180705 - RNA, 19 nt, Artificial Sequence
  Description of Artificial Sequence: Synthetic oligonucleotide
ggguugcaucccgaagcug

SEQ ID NO: 2180706 - RNA, 19 nt, Artificial Sequence
  Description of Artificial Sequence: Synthetic oligonucleotide
gcggauaagcggcucuggu

SEQ ID NO: 2180707 - RNA, 19 nt, Artificial Sequence
  Description of Artificial Sequence: Synthetic oligonucleotide
gcguaggcuggccuggcua

SEQ ID NO: 2180708 - RNA, 19 nt, Artificial Sequence
  Description of Artificial Sequence: Synthetic oligonucleotide
guguuuccagauagcguau

SEQ ID NO: 2180709 - RNA, 19 nt, Artificial Sequence
  Description of Artificial Sequence: Synthetic oligonucleotide
gcuggcucuggcucccaaa

SEQ ID NO: 2180710 - RNA, 19 nt, Artificial Sequence
  Description of Artificial Sequence: Synthetic oligonucleotide
ccuggcuacccuccaagua

SEQ ID NO: 2180711 - RNA, 19 nt, Artificial Sequence
  Description of Artificial Sequence: Synthetic oligonucleotide
cgucauagucuuugcucca

SEQ ID NO: 2180712 - RNA, 19 nt, Artificial Sequence
  Description of Artificial Sequence: Synthetic oligonucleotide
ggcucuggucaggccagac

SEQ ID NO: 2180713 - RNA, 19 nt, Artificial Sequence
  Description of Artificial Sequence: Synthetic oligonucleotide
gugcaacccuccgccccug

SEQ ID NO: 2180714 - RNA, 19 nt, Artificial Sequence
  Description of Artificial Sequence: Synthetic oligonucleotide
ccugggguugcaucccgaa

SEQ ID NO: 2180715 - RNA, 19 nt, Artificial Sequence
  Description of Artificial Sequence: Synthetic oligonucleotide
caucagggguauggugcaa

SEQ ID NO: 2180716 - RNA, 19 nt, Artificial Sequence
  Description of Artificial Sequence: Synthetic oligonucleotide
gcccacaguaauggaagcu

SEQ ID NO: 2180717 - RNA, 19 nt, Artificial Sequence
  Description of Artificial Sequence: Synthetic oligonucleotide
cuggcucccaaagcuguau

SEQ ID NO: 2180718 - RNA, 19 nt, Artificial Sequence
  Description of Artificial Sequence: Synthetic oligonucleotide
ggcacacgcagacgucaua

SEQ ID NO: 2180719 - RNA, 19 nt, Artificial Sequence
  Description of Artificial Sequence: Synthetic oligonucleotide
agcucgggagugacuugua

SEQ ID NO: 2180720 - RNA, 19 nt, Artificial Sequence
  Description of Artificial Sequence: Synthetic oligonucleotide
ggcauagcucagaaacaau

SEQ ID NO: 2180721 - RNA, 19 nt, Artificial Sequence
  Description of Artificial Sequence: Synthetic oligonucleotide
cagccuccuugacuuggua

SEQ ID NO: 2180722 - RNA, 19 nt, Artificial Sequence
  Description of Artificial Sequence: Synthetic oligonucleotide
caggggucccgaaggcagu

SEQ ID NO: 2180723 - RNA, 19 nt, Artificial Sequence
  Description of Artificial Sequence: Synthetic oligonucleotide
gccuggcauagcucagaaa

SEQ ID NO: 2180724 - RNA, 19 nt, Artificial Sequence
  Description of Artificial Sequence: Synthetic oligonucleotide
cggaguuccggcggauaag

SEQ ID NO: 2180725 - RNA, 19 nt, Artificial Sequence
  Description of Artificial Sequence: Synthetic oligonucleotide
gccccuggggccucuguua

SEQ ID NO: 2180726 - RNA, 19 nt, Artificial Sequence
  Description of Artificial Sequence: Synthetic oligonucleotide
ggcuacccuccaaguagga

SEQ ID NO: 2180727 - RNA, 19 nt, Artificial Sequence
  Description of Artificial Sequence: Synthetic oligonucleotide
ccgaaggcagugccuggca

SEQ ID NO: 2180728 - RNA, 19 nt, Artificial Sequence
  Description of Artificial Sequence: Synthetic oligonucleotide
uccgccccuggggccucug

SEQ ID NO: 2180729 - RNA, 19 nt, Artificial Sequence
  Description of Artificial Sequence: Synthetic oligonucleotide
gccuggcuacccuccaagu

SEQ ID NO: 2180730 - RNA, 19 nt, Artificial Sequence
  Description of Artificial Sequence: Synthetic oligonucleotide
ggccagacaucagggguau

SEQ ID NO: 2180731 - RNA, 19 nt, Artificial Sequence
  Description of Artificial Sequence: Synthetic oligonucleotide
gccagacaucagggguaug

SEQ ID NO: 2180732 - RNA, 19 nt, Artificial Sequence
  Description of Artificial Sequence: Synthetic oligonucleotide
ggccucugccauccacaua

SEQ ID NO: 2180733 - RNA, 19 nt, Artificial Sequence
  Description of Artificial Sequence: Synthetic oligonucleotide
cggcggauaagcggcucug

SEQ ID NO: 2180734 - RNA, 19 nt, Artificial Sequence
  Description of Artificial Sequence: Synthetic oligonucleotide
cagcacccggugugugcua

SEQ ID NO: 2180735 - RNA, 19 nt, Artificial Sequence
  Description of Artificial Sequence: Synthetic oligonucleotide
ggcgccaccugggguugca

SEQ ID NO: 2180736 - RNA, 19 nt, Artificial Sequence
  Description of Artificial Sequence: Synthetic oligonucleotide
gcugugagcugcggcuagu

SEQ ID NO: 2180737 - RNA, 19 nt, Artificial Sequence
  Description of Artificial Sequence: Synthetic oligonucleotide
ccggcggauaagcggcucu

SEQ ID NO: 2180738 - RNA, 19 nt, Artificial Sequence
  Description of Artificial Sequence: Synthetic oligonucleotide
ccaucccggccucugccau

SEQ ID NO: 2180739 - RNA, 19 nt, Artificial Sequence
  Description of Artificial Sequence: Synthetic oligonucleotide
cgggagugacuuguagcua

SEQ ID NO: 2180740 - RNA, 19 nt, Artificial Sequence
  Description of Artificial Sequence: Synthetic oligonucleotide
gcacccggugugugcuauu

SEQ ID NO: 2180741 - RNA, 19 nt, Artificial Sequence
  Description of Artificial Sequence: Synthetic oligonucleotide
ccgccaccaggcucucagu

SEQ ID NO: 2180742 - RNA, 19 nt, Artificial Sequence
  Description of Artificial Sequence: Synthetic oligonucleotide
cuccgccccuggggccucu

SEQ ID NO: 2180743 - RNA, 19 nt, Artificial Sequence
  Description of Artificial Sequence: Synthetic oligonucleotide
cgcagacgucauagucuuu

SEQ ID NO: 2180744 - RNA, 19 nt, Artificial Sequence
  Description of Artificial Sequence: Synthetic oligonucleotide
cggcucuggucaggccaga

SEQ ID NO: 2180745 - RNA, 19 nt, Artificial Sequence
  Description of Artificial Sequence: Synthetic oligonucleotide
ccgccccuggggccucugu

SEQ ID NO: 2180746 - RNA, 19 nt, Artificial Sequence
  Description of Artificial Sequence: Synthetic oligonucleotide
aaaacuucgacuuugccuc

SEQ ID NO: 2180747 - RNA, 19 nt, Artificial Sequence
  Description of Artificial Sequence: Synthetic oligonucleotide
aaugugucuacuucgaccc

SEQ ID NO: 2180748 - RNA, 19 nt, Artificial Sequence
  Description of Artificial Sequence: Synthetic oligonucleotide
acaaccaacaccuuguggc

SEQ ID NO: 2180749 - RNA, 19 nt, Artificial Sequence
  Description of Artificial Sequence: Synthetic oligonucleotide
aagucgacugucuugaugg

SEQ ID NO: 2180750 - RNA, 19 nt, Artificial Sequence
  Description of Artificial Sequence: Synthetic oligonucleotide
uaauacugaaucuugauac

SEQ ID NO: 2180751 - RNA, 19 nt, Artificial Sequence
  Description of Artificial Sequence: Synthetic oligonucleotide
ugaaucuugauacucacug

SEQ ID NO: 2180752 - RNA, 19 nt, Artificial Sequence
  Description of Artificial Sequence: Synthetic oligonucleotide
aucaggaacaccuuccucc

SEQ ID NO: 2180753 - RNA, 19 nt, Artificial Sequence
  Description of Artificial Sequence: Synthetic oligonucleotide
auagaaguugagcagcucc

SEQ ID NO: 2180754 - RNA, 19 nt, Artificial Sequence
  Description of Artificial Sequence: Synthetic oligonucleotide
aaagggucuuauuaggagg

SEQ ID NO: 2180755 - RNA, 19 nt, Artificial Sequence
  Description of Artificial Sequence: Synthetic oligonucleotide
uaagcuacccgaaagcccg

SEQ ID NO: 2180756 - RNA, 19 nt, Artificial Sequence
  Description of Artificial Sequence: Synthetic oligonucleotide
aauaccacauaagcuaccc

SEQ ID NO: 2180757 - RNA, 19 nt, Artificial Sequence
  Description of Artificial Sequence: Synthetic oligonucleotide
aaaagggucuuauuaggag

SEQ ID NO: 2180758 - RNA, 19 nt, Artificial Sequence
  Description of Artificial Sequence: Synthetic oligonucleotide
uuauuaggaggccacgugg

SEQ ID NO: 2180759 - RNA, 19 nt, Artificial Sequence
  Description of Artificial Sequence: Synthetic oligonucleotide
aaguugagcagcuccuugc

SEQ ID NO: 2180760 - RNA, 19 nt, Artificial Sequence
  Description of Artificial Sequence: Synthetic oligonucleotide
ucauaagccuccaugaaug

SEQ ID NO: 2180761 - RNA, 19 nt, Artificial Sequence
  Description of Artificial Sequence: Synthetic oligonucleotide
uucucuuucaagucgacug

SEQ ID NO: 2180762 - RNA, 19 nt, Artificial Sequence
  Description of Artificial Sequence: Synthetic oligonucleotide
acauaagcuacccgaaagc

SEQ ID NO: 2180763 - RNA, 19 nt, Artificial Sequence
  Description of Artificial Sequence: Synthetic oligonucleotide
caugaaugugucuacuucg

SEQ ID NO: 2180764 - RNA, 19 nt, Artificial Sequence
  Description of Artificial Sequence: Synthetic oligonucleotide
ucuguagaaaccagcaaug

SEQ ID NO: 2180765 - RNA, 19 nt, Artificial Sequence
  Description of Artificial Sequence: Synthetic oligonucleotide
ucgacuuugccucuuuagg

SEQ ID NO: 2180766 - RNA, 19 nt, Artificial Sequence
  Description of Artificial Sequence: Synthetic oligonucleotide
uuucacauacagguaaugg

SEQ ID NO: 2180767 - RNA, 19 nt, Artificial Sequence
  Description of Artificial Sequence: Synthetic oligonucleotide
aaucuugauacucacugau

SEQ ID NO: 2180768 - RNA, 19 nt, Artificial Sequence
  Description of Artificial Sequence: Synthetic oligonucleotide
aggaauagcugaauaaccc

SEQ ID NO: 2180769 - RNA, 19 nt, Artificial Sequence
  Description of Artificial Sequence: Synthetic oligonucleotide
cuaucuucuugucauaagc

SEQ ID NO: 2180770 - RNA, 19 nt, Artificial Sequence
  Description of Artificial Sequence: Synthetic oligonucleotide
aagggucuuauuaggaggc

SEQ ID NO: 2180771 - RNA, 19 nt, Artificial Sequence
  Description of Artificial Sequence: Synthetic oligonucleotide
aauacugaaucuugauacu

SEQ ID NO: 2180772 - RNA, 19 nt, Artificial Sequence
  Description of Artificial Sequence: Synthetic oligonucleotide
aaucccggucuucacaggg

SEQ ID NO: 2180773 - RNA, 19 nt, Artificial Sequence
  Description of Artificial Sequence: Synthetic oligonucleotide
aggaacaccuuccuccucc

SEQ ID NO: 2180774 - RNA, 19 nt, Artificial Sequence
  Description of Artificial Sequence: Synthetic oligonucleotide
uguucgagggagcacaggc

SEQ ID NO: 2180775 - RNA, 19 nt, Artificial Sequence
  Description of Artificial Sequence: Synthetic oligonucleotide
agcugaauaacccgguggg

SEQ ID NO: 2180776 - RNA, 19 nt, Artificial Sequence
  Description of Artificial Sequence: Synthetic oligonucleotide
aacaaccaacaccuugugg

SEQ ID NO: 2180777 - RNA, 19 nt, Artificial Sequence
  Description of Artificial Sequence: Synthetic oligonucleotide
gaauagcugaauaacccgg

SEQ ID NO: 2180778 - RNA, 19 nt, Artificial Sequence
  Description of Artificial Sequence: Synthetic oligonucleotide
uccaguauguggaaauccc

SEQ ID NO: 2180779 - RNA, 19 nt, Artificial Sequence
  Description of Artificial Sequence: Synthetic oligonucleotide
gauucaaggcagcugacac

SEQ ID NO: 2180780 - RNA, 19 nt, Artificial Sequence
  Description of Artificial Sequence: Synthetic oligonucleotide
uacccgaaagcccggaacg

SEQ ID NO: 2180781 - RNA, 19 nt, Artificial Sequence
  Description of Artificial Sequence: Synthetic oligonucleotide
uaccacauaagcuacccga

SEQ ID NO: 2180782 - RNA, 19 nt, Artificial Sequence
  Description of Artificial Sequence: Synthetic oligonucleotide
uggacugagugucuccucg

SEQ ID NO: 2180783 - RNA, 19 nt, Artificial Sequence
  Description of Artificial Sequence: Synthetic oligonucleotide
ugaaucccggucuucacag

SEQ ID NO: 2180784 - RNA, 19 nt, Artificial Sequence
  Description of Artificial Sequence: Synthetic oligonucleotide
aaucccaggcaaucacuac

SEQ ID NO: 2180785 - RNA, 19 nt, Artificial Sequence
  Description of Artificial Sequence: Synthetic oligonucleotide
guaaugggaagccugcugc

SEQ ID NO: 2180786 - RNA, 19 nt, Artificial Sequence
  Description of Artificial Sequence: Synthetic oligonucleotide
ugugcuccccucauggccg

SEQ ID NO: 2180787 - RNA, 19 nt, Artificial Sequence
  Description of Artificial Sequence: Synthetic oligonucleotide
uacguccacaugaacaacc

SEQ ID NO: 2180788 - RNA, 19 nt, Artificial Sequence
  Description of Artificial Sequence: Synthetic oligonucleotide
caggaauagcugaauaacc

SEQ ID NO: 2180789 - RNA, 19 nt, Artificial Sequence
  Description of Artificial Sequence: Synthetic oligonucleotide
uacuucgacccucagggcc

SEQ ID NO: 2180790 - RNA, 19 nt, Artificial Sequence
  Description of Artificial Sequence: Synthetic oligonucleotide
augaacaaccaacaccuug

SEQ ID NO: 2180791 - RNA, 19 nt, Artificial Sequence
  Description of Artificial Sequence: Synthetic oligonucleotide
gacuuugccucuuuagggc

SEQ ID NO: 2180792 - RNA, 19 nt, Artificial Sequence
  Description of Artificial Sequence: Synthetic oligonucleotide
accaccugacccuuucucc

SEQ ID NO: 2180793 - RNA, 19 nt, Artificial Sequence
  Description of Artificial Sequence: Synthetic oligonucleotide
uauguggaaaucccaggca

SEQ ID NO: 2180794 - RNA, 19 nt, Artificial Sequence
  Description of Artificial Sequence: Synthetic oligonucleotide
guauguggaaaucccaggc

SEQ ID NO: 2180795 - RNA, 19 nt, Artificial Sequence
  Description of Artificial Sequence: Synthetic oligonucleotide
auaagcuacccgaaagccc

SEQ ID NO: 2180796 - RNA, 19 nt, Artificial Sequence
  Description of Artificial Sequence: Synthetic oligonucleotide
aucccaggcaaucacuacg

SEQ ID NO: 2180797 - RNA, 19 nt, Artificial Sequence
  Description of Artificial Sequence: Synthetic oligonucleotide
ucuaauacugaaucuugau

SEQ ID NO: 2180798 - RNA, 19 nt, Artificial Sequence
  Description of Artificial Sequence: Synthetic oligonucleotide
ucggaauuugcguugggca

SEQ ID NO: 2180799 - RNA, 19 nt, Artificial Sequence
  Description of Artificial Sequence: Synthetic oligonucleotide
ugcacguuuccuuuucucc

SEQ ID NO: 2180800 - RNA, 19 nt, Artificial Sequence
  Description of Artificial Sequence: Synthetic oligonucleotide
uuucaagucgacugucuug

SEQ ID NO: 2180801 - RNA, 19 nt, Artificial Sequence
  Description of Artificial Sequence: Synthetic oligonucleotide
cacauaagcuacccgaaag

SEQ ID NO: 2180802 - RNA, 19 nt, Artificial Sequence
  Description of Artificial Sequence: Synthetic oligonucleotide
cucgagaacacgcaggcug

SEQ ID NO: 2180803 - RNA, 19 nt, Artificial Sequence
  Description of Artificial Sequence: Synthetic oligonucleotide
auacagguaaugggaagcc

SEQ ID NO: 2180804 - RNA, 19 nt, Artificial Sequence
  Description of Artificial Sequence: Synthetic oligonucleotide
uauuaggaggccacgugga

SEQ ID NO: 2180805 - RNA, 19 nt, Artificial Sequence
  Description of Artificial Sequence: Synthetic oligonucleotide
ucgagaacacgcaggcugg

SEQ ID NO: 2180806 - RNA, 19 nt, Artificial Sequence
  Description of Artificial Sequence: Synthetic oligonucleotide
uucaagucgacugucuuga

SEQ ID NO: 2180807 - RNA, 19 nt, Artificial Sequence
  Description of Artificial Sequence: Synthetic oligonucleotide
auacugaaucuugauacuc

SEQ ID NO: 2180808 - RNA, 19 nt, Artificial Sequence
  Description of Artificial Sequence: Synthetic oligonucleotide
cauacagguaaugggaagc

SEQ ID NO: 2180809 - RNA, 19 nt, Artificial Sequence
  Description of Artificial Sequence: Synthetic oligonucleotide
acugauccacuuaugaauc

SEQ ID NO: 2180810 - RNA, 19 nt, Artificial Sequence
  Description of Artificial Sequence: Synthetic oligonucleotide
guggcuggaauugucagcg

SEQ ID NO: 2180811 - RNA, 19 nt, Artificial Sequence
  Description of Artificial Sequence: Synthetic oligonucleotide
acuacguccacaugaacaa

SEQ ID NO: 2180812 - RNA, 19 nt, Artificial Sequence
  Description of Artificial Sequence: Synthetic oligonucleotide
cugcgggucaccuucaccc

SEQ ID NO: 2180813 - RNA, 19 nt, Artificial Sequence
  Description of Artificial Sequence: Synthetic oligonucleotide
caguauguggaaaucccag

SEQ ID NO: 2180814 - RNA, 19 nt, Artificial Sequence
  Description of Artificial Sequence: Synthetic oligonucleotide
ugaauaacccggugggcug

SEQ ID NO: 2180815 - RNA, 19 nt, Artificial Sequence
  Description of Artificial Sequence: Synthetic oligonucleotide
cugggucuaauacugaauc

SEQ ID NO: 2180816 - RNA, 19 nt, Artificial Sequence
  Description of Artificial Sequence: Synthetic oligonucleotide
acauacagguaaugggaag

SEQ ID NO: 2180817 - RNA, 19 nt, Artificial Sequence
  Description of Artificial Sequence: Synthetic oligonucleotide
aggcuucucuuucaagucg

SEQ ID NO: 2180818 - RNA, 19 nt, Artificial Sequence
  Description of Artificial Sequence: Synthetic oligonucleotide
auuaggaggccacguggac

SEQ ID NO: 2180819 - RNA, 19 nt, Artificial Sequence
  Description of Artificial Sequence: Synthetic oligonucleotide
gauccacuuaugaaucccg

SEQ ID NO: 2180820 - RNA, 19 nt, Artificial Sequence
  Description of Artificial Sequence: Synthetic oligonucleotide
uucgagggagcacaggccu

SEQ ID NO: 2180821 - RNA, 19 nt, Artificial Sequence
  Description of Artificial Sequence: Synthetic oligonucleotide
gaacagcucaguagggucg

SEQ ID NO: 2180822 - RNA, 19 nt, Artificial Sequence
  Description of Artificial Sequence: Synthetic oligonucleotide
uacucacugauccacuuau

SEQ ID NO: 2180823 - RNA, 19 nt, Artificial Sequence
  Description of Artificial Sequence: Synthetic oligonucleotide
uugauacucacugauccac

SEQ ID NO: 2180824 - RNA, 19 nt, Artificial Sequence
  Description of Artificial Sequence: Synthetic oligonucleotide
uuaugaaucccggucuuca

SEQ ID NO: 2180825 - RNA, 19 nt, Artificial Sequence
  Description of Artificial Sequence: Synthetic oligonucleotide
aguagggucggaauuugcg

SEQ ID NO: 2180826 - RNA, 19 nt, Artificial Sequence
  Description of Artificial Sequence: Synthetic oligonucleotide
cuuauuaggaggccacgug

SEQ ID NO: 2180827 - RNA, 19 nt, Artificial Sequence
  Description of Artificial Sequence: Synthetic oligonucleotide
uucaaggcagcugacacuc

SEQ ID NO: 2180828 - RNA, 19 nt, Artificial Sequence
  Description of Artificial Sequence: Synthetic oligonucleotide
cuuuagggcucucagcaug

SEQ ID NO: 2180829 - RNA, 19 nt, Artificial Sequence
  Description of Artificial Sequence: Synthetic oligonucleotide
uuugcguugggcacgcauc

SEQ ID NO: 2180830 - RNA, 19 nt, Artificial Sequence
  Description of Artificial Sequence: Synthetic oligonucleotide
ugauccacuuaugaauccc

SEQ ID NO: 2180831 - RNA, 19 nt, Artificial Sequence
  Description of Artificial Sequence: Synthetic oligonucleotide
aauagcugaauaacccggu

SEQ ID NO: 2180832 - RNA, 19 nt, Artificial Sequence
  Description of Artificial Sequence: Synthetic oligonucleotide
uuccaguauguggaaaucc

SEQ ID NO: 2180833 - RNA, 19 nt, Artificial Sequence
  Description of Artificial Sequence: Synthetic oligonucleotide
cucucgagaacacgcaggc

SEQ ID NO: 2180834 - RNA, 19 nt, Artificial Sequence
  Description of Artificial Sequence: Synthetic oligonucleotide
uucuguucgagggagcaca

SEQ ID NO: 2180835 - RNA, 19 nt, Artificial Sequence
  Description of Artificial Sequence: Synthetic oligonucleotide
agcaaugggcccuucagau

SEQ ID NO: 2180836 - RNA, 19 nt, Artificial Sequence
  Description of Artificial Sequence: Synthetic oligonucleotide
caggcaaucacuacgucca

SEQ ID NO: 2180837 - RNA, 19 nt, Artificial Sequence
  Description of Artificial Sequence: Synthetic oligonucleotide
auaccacauaagcuacccg

SEQ ID NO: 2180838 - RNA, 19 nt, Artificial Sequence
  Description of Artificial Sequence: Synthetic oligonucleotide
gcacgcaucaguucaaucc

SEQ ID NO: 2180839 - RNA, 19 nt, Artificial Sequence
  Description of Artificial Sequence: Synthetic oligonucleotide
uguggcuggaauugucagc

SEQ ID NO: 2180840 - RNA, 19 nt, Artificial Sequence
  Description of Artificial Sequence: Synthetic oligonucleotide
ugucauaagccuccaugaa

SEQ ID NO: 2180841 - RNA, 19 nt, Artificial Sequence
  Description of Artificial Sequence: Synthetic oligonucleotide
aacagcucaguagggucgg

SEQ ID NO: 2180842 - RNA, 19 nt, Artificial Sequence
  Description of Artificial Sequence: Synthetic oligonucleotide
ugaaugugucuacuucgac

SEQ ID NO: 2180843 - RNA, 19 nt, Artificial Sequence
  Description of Artificial Sequence: Synthetic oligonucleotide
cacuacguccacaugaaca

SEQ ID NO: 2180844 - RNA, 19 nt, Artificial Sequence
  Description of Artificial Sequence: Synthetic oligonucleotide
uguuucacauacagguaau

SEQ ID NO: 2180845 - RNA, 19 nt, Artificial Sequence
  Description of Artificial Sequence: Synthetic oligonucleotide
ccagcuuuccucuugcgcg

SEQ ID NO: 2180846 - RNA, 19 nt, Artificial Sequence
  Description of Artificial Sequence: Synthetic oligonucleotide
auagcugaauaacccggug

SEQ ID NO: 2180847 - RNA, 19 nt, Artificial Sequence
  Description of Artificial Sequence: Synthetic oligonucleotide
ucuuauuaggaggccacgu

SEQ ID NO: 2180848 - RNA, 19 nt, Artificial Sequence
  Description of Artificial Sequence: Synthetic oligonucleotide
cagguaaugggaagccugc

SEQ ID NO: 2180849 - RNA, 19 nt, Artificial Sequence
  Description of Artificial Sequence: Synthetic oligonucleotide
cucccucucgagaacacgc

SEQ ID NO: 2180850 - RNA, 19 nt, Artificial Sequence
  Description of Artificial Sequence: Synthetic oligonucleotide
ugacaggaauagcugaaua

SEQ ID NO: 2180851 - RNA, 19 nt, Artificial Sequence
  Description of Artificial Sequence: Synthetic oligonucleotide
ucgaacucugugcuguuuc

SEQ ID NO: 2180852 - RNA, 19 nt, Artificial Sequence
  Description of Artificial Sequence: Synthetic oligonucleotide
gaacuugacaggaauagcu

SEQ ID NO: 2180853 - RNA, 19 nt, Artificial Sequence
  Description of Artificial Sequence: Synthetic oligonucleotide
ucaggaacaccuuccuccu

SEQ ID NO: 2180854 - RNA, 19 nt, Artificial Sequence
  Description of Artificial Sequence: Synthetic oligonucleotide
ugcuuguccuccucaaacu

SEQ ID NO: 2180855 - RNA, 19 nt, Artificial Sequence
  Description of Artificial Sequence: Synthetic oligonucleotide
cuaauacugaaucuugaua

SEQ ID NO: 2180856 - RNA, 19 nt, Artificial Sequence
  Description of Artificial Sequence: Synthetic oligonucleotide
caguucaauccucugcuug

SEQ ID NO: 2180857 - RNA, 19 nt, Artificial Sequence
  Description of Artificial Sequence: Synthetic oligonucleotide
uccacuuaugaaucccggu

SEQ ID NO: 2180858 - RNA, 19 nt, Artificial Sequence
  Description of Artificial Sequence: Synthetic oligonucleotide
ucccaggcaaucacuacgu

SEQ ID NO: 2180859 - RNA, 19 nt, Artificial Sequence
  Description of Artificial Sequence: Synthetic oligonucleotide
gaacacgcaggcuggcugc

SEQ ID NO: 2180860 - RNA, 19 nt, Artificial Sequence
  Description of Artificial Sequence: Synthetic oligonucleotide
aaugggaagccugcugcug

SEQ ID NO: 2180861 - RNA, 19 nt, Artificial Sequence
  Description of Artificial Sequence: Synthetic oligonucleotide
cucacugauccacuuauga

SEQ ID NO: 2180862 - RNA, 19 nt, Artificial Sequence
  Description of Artificial Sequence: Synthetic oligonucleotide
gaacaaccaacaccuugug

SEQ ID NO: 2180863 - RNA, 19 nt, Artificial Sequence
  Description of Artificial Sequence: Synthetic oligonucleotide
ucuguucgagggagcacag

SEQ ID NO: 2180864 - RNA, 19 nt, Artificial Sequence
  Description of Artificial Sequence: Synthetic oligonucleotide
uugcguugggcacgcauca

SEQ ID NO: 2180865 - RNA, 19 nt, Artificial Sequence
  Description of Artificial Sequence: Synthetic oligonucleotide
augaaucccggucuucaca

SEQ ID NO: 2180866 - RNA, 19 nt, Artificial Sequence
  Description of Artificial Sequence: Synthetic oligonucleotide
uccuuuucucccucucgag

SEQ ID NO: 2180867 - RNA, 19 nt, Artificial Sequence
  Description of Artificial Sequence: Synthetic oligonucleotide
acagguaaugggaagccug

SEQ ID NO: 2180868 - RNA, 19 nt, Artificial Sequence
  Description of Artificial Sequence: Synthetic oligonucleotide
caucuuggucucucggugc

SEQ ID NO: 2180869 - RNA, 19 nt, Artificial Sequence
  Description of Artificial Sequence: Synthetic oligonucleotide
ugucuccucgaacucugug

SEQ ID NO: 2180870 - RNA, 19 nt, Artificial Sequence
  Description of Artificial Sequence: Synthetic oligonucleotide
gaauaacccggugggcugg

SEQ ID NO: 2180871 - RNA, 19 nt, Artificial Sequence
  Description of Artificial Sequence: Synthetic oligonucleotide
cagcgguuccaguaugugg

SEQ ID NO: 2180872 - RNA, 19 nt, Artificial Sequence
  Description of Artificial Sequence: Synthetic oligonucleotide
uguggaaaucccaggcaau

SEQ ID NO: 2180873 - RNA, 19 nt, Artificial Sequence
  Description of Artificial Sequence: Synthetic oligonucleotide
aacccggugggcugggugu

SEQ ID NO: 2180874 - RNA, 19 nt, Artificial Sequence
  Description of Artificial Sequence: Synthetic oligonucleotide
agcccuccucaucaggaac

SEQ ID NO: 2180875 - RNA, 19 nt, Artificial Sequence
  Description of Artificial Sequence: Synthetic oligonucleotide
acguggacugagugucucc

SEQ ID NO: 2180876 - RNA, 19 nt, Artificial Sequence
  Description of Artificial Sequence: Synthetic oligonucleotide
cuguuucacauacagguaa

SEQ ID NO: 2180877 - RNA, 19 nt, Artificial Sequence
  Description of Artificial Sequence: Synthetic oligonucleotide
uaugaaucccggucuucac

SEQ ID NO: 2180878 - RNA, 19 nt, Artificial Sequence
  Description of Artificial Sequence: Synthetic oligonucleotide
agcgguuccaguaugugga

SEQ ID NO: 2180879 - RNA, 19 nt, Artificial Sequence
  Description of Artificial Sequence: Synthetic oligonucleotide
aucuugauacucacugauc

SEQ ID NO: 2180880 - RNA, 19 nt, Artificial Sequence
  Description of Artificial Sequence: Synthetic oligonucleotide
caggagucgggacaggcac

SEQ ID NO: 2180881 - RNA, 19 nt, Artificial Sequence
  Description of Artificial Sequence: Synthetic oligonucleotide
ggaauugucagcgccuucc

SEQ ID NO: 2180882 - RNA, 19 nt, Artificial Sequence
  Description of Artificial Sequence: Synthetic oligonucleotide
gaauaccacauaagcuacc

SEQ ID NO: 2180883 - RNA, 19 nt, Artificial Sequence
  Description of Artificial Sequence: Synthetic oligonucleotide
caagucgacugucuugaug

SEQ ID NO: 2180884 - RNA, 19 nt, Artificial Sequence
  Description of Artificial Sequence: Synthetic oligonucleotide
acucugugcuguuucacau

SEQ ID NO: 2180885 - RNA, 19 nt, Artificial Sequence
  Description of Artificial Sequence: Synthetic oligonucleotide
uaaugggaagccugcugcu

SEQ ID NO: 2180886 - RNA, 19 nt, Artificial Sequence
  Description of Artificial Sequence: Synthetic oligonucleotide
acagggugguucucuguag

SEQ ID NO: 2180887 - RNA, 19 nt, Artificial Sequence
  Description of Artificial Sequence: Synthetic oligonucleotide
aaacuucgacuuugccucu

SEQ ID NO: 2180888 - RNA, 19 nt, Artificial Sequence
  Description of Artificial Sequence: Synthetic oligonucleotide
ucccggucuucacagggug

SEQ ID NO: 2180889 - RNA, 19 nt, Artificial Sequence
  Description of Artificial Sequence: Synthetic oligonucleotide
uuucucccucucgagaaca

SEQ ID NO: 2180890 - RNA, 19 nt, Artificial Sequence
  Description of Artificial Sequence: Synthetic oligonucleotide
gugugcuccccucauggcc

SEQ ID NO: 2180891 - RNA, 19 nt, Artificial Sequence
  Description of Artificial Sequence: Synthetic oligonucleotide
cacaggaggacaggagucg

SEQ ID NO: 2180892 - RNA, 19 nt, Artificial Sequence
  Description of Artificial Sequence: Synthetic oligonucleotide
agggucggaauuugcguug

SEQ ID NO: 2180893 - RNA, 19 nt, Artificial Sequence
  Description of Artificial Sequence: Synthetic oligonucleotide
aaaucccaggcaaucacua

SEQ ID NO: 2180894 - RNA, 19 nt, Artificial Sequence
  Description of Artificial Sequence: Synthetic oligonucleotide
gaaucccggucuucacagg

SEQ ID NO: 2180895 - RNA, 19 nt, Artificial Sequence
  Description of Artificial Sequence: Synthetic oligonucleotide
cuugauacucacugaucca

SEQ ID NO: 2180896 - RNA, 19 nt, Artificial Sequence
  Description of Artificial Sequence: Synthetic oligonucleotide
ucaguagggucggaauuug

SEQ ID NO: 2180897 - RNA, 19 nt, Artificial Sequence
  Description of Artificial Sequence: Synthetic oligonucleotide
cuacccgaaagcccggaac

SEQ ID NO: 2180898 - RNA, 19 nt, Artificial Sequence
  Description of Artificial Sequence: Synthetic oligonucleotide
gggugugcuccccucaugg

SEQ ID NO: 2180899 - RNA, 19 nt, Artificial Sequence
  Description of Artificial Sequence: Synthetic oligonucleotide
gguaaugggaagccugcug

SEQ ID NO: 2180900 - RNA, 19 nt, Artificial Sequence
  Description of Artificial Sequence: Synthetic oligonucleotide
auuugcguugggcacgcau

SEQ ID NO: 2180901 - RNA, 19 nt, Artificial Sequence
  Description of Artificial Sequence: Synthetic oligonucleotide
aauaacccggugggcuggg

SEQ ID NO: 2180902 - RNA, 19 nt, Artificial Sequence
  Description of Artificial Sequence: Synthetic oligonucleotide
ggugcugccaggcauagaa

SEQ ID NO: 2180903 - RNA, 19 nt, Artificial Sequence
  Description of Artificial Sequence: Synthetic oligonucleotide
agggucuuauuaggaggcc

SEQ ID NO: 2180904 - RNA, 19 nt, Artificial Sequence
  Description of Artificial Sequence: Synthetic oligonucleotide
ggucuaauacugaaucuug

SEQ ID NO: 2180905 - RNA, 19 nt, Artificial Sequence
  Description of Artificial Sequence: Synthetic oligonucleotide
auaagccuccaugaaugug

SEQ ID NO: 2180906 - RNA, 19 nt, Artificial Sequence
  Description of Artificial Sequence: Synthetic oligonucleotide
gaugcuccaucuuggucuc

SEQ ID NO: 2180907 - RNA, 19 nt, Artificial Sequence
  Description of Artificial Sequence: Synthetic oligonucleotide
guuucacauacagguaaug

SEQ ID NO: 2180908 - RNA, 19 nt, Artificial Sequence
  Description of Artificial Sequence: Synthetic oligonucleotide
uaacccggugggcugggug

SEQ ID NO: 2180909 - RNA, 19 nt, Artificial Sequence
  Description of Artificial Sequence: Synthetic oligonucleotide
auccacuuaugaaucccgg

SEQ ID NO: 2180910 - RNA, 19 nt, Artificial Sequence
  Description of Artificial Sequence: Synthetic oligonucleotide
ucuccagcgguuccaguau

SEQ ID NO: 2180911 - RNA, 19 nt, Artificial Sequence
  Description of Artificial Sequence: Synthetic oligonucleotide
ccaggcaaucacuacgucc

SEQ ID NO: 2180912 - RNA, 19 nt, Artificial Sequence
  Description of Artificial Sequence: Synthetic oligonucleotide
uagggucggaauuugcguu

SEQ ID NO: 2180913 - RNA, 19 nt, Artificial Sequence
  Description of Artificial Sequence: Synthetic oligonucleotide
gucuuauuaggaggccacg

SEQ ID NO: 2180914 - RNA, 19 nt, Artificial Sequence
  Description of Artificial Sequence: Synthetic oligonucleotide
aggacaggagucgggacag

SEQ ID NO: 2180915 - RNA, 19 nt, Artificial Sequence
  Description of Artificial Sequence: Synthetic oligonucleotide
gacaggagucgggacaggc

SEQ ID NO: 2180916 - RNA, 19 nt, Artificial Sequence
  Description of Artificial Sequence: Synthetic oligonucleotide
cuuggucucucggugcugc

SEQ ID NO: 2180917 - RNA, 19 nt, Artificial Sequence
  Description of Artificial Sequence: Synthetic oligonucleotide
acuuaugaaucccggucuu

SEQ ID NO: 2180918 - RNA, 19 nt, Artificial Sequence
  Description of Artificial Sequence: Synthetic oligonucleotide
ugugucuacuucgacccuc

SEQ ID NO: 2180919 - RNA, 19 nt, Artificial Sequence
  Description of Artificial Sequence: Synthetic oligonucleotide
ucucggugcugccaggcau

SEQ ID NO: 2180920 - RNA, 19 nt, Artificial Sequence
  Description of Artificial Sequence: Synthetic oligonucleotide
uucccagaacagcucagua

SEQ ID NO: 2180921 - RNA, 19 nt, Artificial Sequence
  Description of Artificial Sequence: Synthetic oligonucleotide
agucgggacaggcacuccu

SEQ ID NO: 2180922 - RNA, 19 nt, Artificial Sequence
  Description of Artificial Sequence: Synthetic oligonucleotide
gcacguuuccuuuucuccc

SEQ ID NO: 2180923 - RNA, 19 nt, Artificial Sequence
  Description of Artificial Sequence: Synthetic oligonucleotide
augaaugugucuacuucga

SEQ ID NO: 2180924 - RNA, 19 nt, Artificial Sequence
  Description of Artificial Sequence: Synthetic oligonucleotide
cacuccacuuggcuucugg

SEQ ID NO: 2180925 - RNA, 19 nt, Artificial Sequence
  Description of Artificial Sequence: Synthetic oligonucleotide
uugucagcgccuuccucca

SEQ ID NO: 2180926 - RNA, 19 nt, Artificial Sequence
  Description of Artificial Sequence: Synthetic oligonucleotide
gucggaauuugcguugggc

SEQ ID NO: 2180927 - RNA, 19 nt, Artificial Sequence
  Description of Artificial Sequence: Synthetic oligonucleotide
ggaauaccacauaagcuac

SEQ ID NO: 2180928 - RNA, 19 nt, Artificial Sequence
  Description of Artificial Sequence: Synthetic oligonucleotide
ucccucucgagaacacgca

SEQ ID NO: 2180929 - RNA, 19 nt, Artificial Sequence
  Description of Artificial Sequence: Synthetic oligonucleotide
aaagcccggaacgggcuug

SEQ ID NO: 2180930 - RNA, 19 nt, Artificial Sequence
  Description of Artificial Sequence: Synthetic oligonucleotide
ucacuacguccacaugaac

SEQ ID NO: 2180931 - RNA, 19 nt, Artificial Sequence
  Description of Artificial Sequence: Synthetic oligonucleotide
cacugauccacuuaugaau

SEQ ID NO: 2180932 - RNA, 19 nt, Artificial Sequence
  Description of Artificial Sequence: Synthetic oligonucleotide
uggucaggcuucucuuuca

SEQ ID NO: 2180933 - RNA, 19 nt, Artificial Sequence
  Description of Artificial Sequence: Synthetic oligonucleotide
gcuaucuucuugucauaag

SEQ ID NO: 2180934 - RNA, 19 nt, Artificial Sequence
  Description of Artificial Sequence: Synthetic oligonucleotide
aggcaaucacuacguccac

SEQ ID NO: 2180935 - RNA, 19 nt, Artificial Sequence
  Description of Artificial Sequence: Synthetic oligonucleotide
gucuaauacugaaucuuga

SEQ ID NO: 2180936 - RNA, 19 nt, Artificial Sequence
  Description of Artificial Sequence: Synthetic oligonucleotide
cagcuuuccucuugcgcgc

SEQ ID NO: 2180937 - RNA, 19 nt, Artificial Sequence
  Description of Artificial Sequence: Synthetic oligonucleotide
agcucaguagggucggaau

SEQ ID NO: 2180938 - RNA, 19 nt, Artificial Sequence
  Description of Artificial Sequence: Synthetic oligonucleotide
cccuucagauucaaggcag

SEQ ID NO: 2180939 - RNA, 19 nt, Artificial Sequence
  Description of Artificial Sequence: Synthetic oligonucleotide
agugucuccucgaacucug

SEQ ID NO: 2180940 - RNA, 19 nt, Artificial Sequence
  Description of Artificial Sequence: Synthetic oligonucleotide
caccuuguggcuggaauug

SEQ ID NO: 2180941 - RNA, 19 nt, Artificial Sequence
  Description of Artificial Sequence: Synthetic oligonucleotide
ugcuucuguucgagggagc

SEQ ID NO: 2180942 - RNA, 19 nt, Artificial Sequence
  Description of Artificial Sequence: Synthetic oligonucleotide
auacucacugauccacuua

SEQ ID NO: 2180943 - RNA, 19 nt, Artificial Sequence
  Description of Artificial Sequence: Synthetic oligonucleotide
ucaaggcagcugacacucc

SEQ ID NO: 2180944 - RNA, 19 nt, Artificial Sequence
  Description of Artificial Sequence: Synthetic oligonucleotide
caauccucugcuuguccuc

SEQ ID NO: 2180945 - RNA, 19 nt, Artificial Sequence
  Description of Artificial Sequence: Synthetic oligonucleotide
ccacuuaugaaucccgguc

SEQ ID NO: 2180946 - RNA, 19 nt, Artificial Sequence
  Description of Artificial Sequence: Synthetic oligonucleotide
cuacuucgacccucagggc

SEQ ID NO: 2180947 - RNA, 19 nt, Artificial Sequence
  Description of Artificial Sequence: Synthetic oligonucleotide
guggaaaucccaggcaauc

SEQ ID NO: 2180948 - RNA, 19 nt, Artificial Sequence
  Description of Artificial Sequence: Synthetic oligonucleotide
aggccacguggacugagug

SEQ ID NO: 2180949 - RNA, 19 nt, Artificial Sequence
  Description of Artificial Sequence: Synthetic oligonucleotide
cuuaugaaucccggucuuc

SEQ ID NO: 2180950 - RNA, 19 nt, Artificial Sequence
  Description of Artificial Sequence: Synthetic oligonucleotide
gucauaagccuccaugaau

SEQ ID NO: 2180951 - RNA, 19 nt, Artificial Sequence
  Description of Artificial Sequence: Synthetic oligonucleotide
ucaguucaauccucugcuu

SEQ ID NO: 2180952 - RNA, 19 nt, Artificial Sequence
  Description of Artificial Sequence: Synthetic oligonucleotide
ucucucggugcugccaggc

SEQ ID NO: 2180953 - RNA, 19 nt, Artificial Sequence
  Description of Artificial Sequence: Synthetic oligonucleotide
guucgagggagcacaggcc

SEQ ID NO: 2180954 - RNA, 19 nt, Artificial Sequence
  Description of Artificial Sequence: Synthetic oligonucleotide
auggccgcacgcuccagcu

SEQ ID NO: 2180955 - RNA, 19 nt, Artificial Sequence
  Description of Artificial Sequence: Synthetic oligonucleotide
cugacccuuucuccagcgg

SEQ ID NO: 2180956 - RNA, 19 nt, Artificial Sequence
  Description of Artificial Sequence: Synthetic oligonucleotide
aucacuacguccacaugaa

SEQ ID NO: 2180957 - RNA, 19 nt, Artificial Sequence
  Description of Artificial Sequence: Synthetic oligonucleotide
guagggucggaauuugcgu

SEQ ID NO: 2180958 - RNA, 19 nt, Artificial Sequence
  Description of Artificial Sequence: Synthetic oligonucleotide
ccuggugucugcuucccag

SEQ ID NO: 2180959 - RNA, 19 nt, Artificial Sequence
  Description of Artificial Sequence: Synthetic oligonucleotide
cacuuaugaaucccggucu

SEQ ID NO: 2180960 - RNA, 19 nt, Artificial Sequence
  Description of Artificial Sequence: Synthetic oligonucleotide
ggucucucggugcugccag

SEQ ID NO: 2180961 - RNA, 19 nt, Artificial Sequence
  Description of Artificial Sequence: Synthetic oligonucleotide
acccgaaagcccggaacgg

SEQ ID NO: 2180962 - RNA, 19 nt, Artificial Sequence
  Description of Artificial Sequence: Synthetic oligonucleotide
ugggugugcuccccucaug

SEQ ID NO: 2180963 - RNA, 19 nt, Artificial Sequence
  Description of Artificial Sequence: Synthetic oligonucleotide
uggccuggugucugcuucc

SEQ ID NO: 2180964 - RNA, 19 nt, Artificial Sequence
  Description of Artificial Sequence: Synthetic oligonucleotide
aacgggcuuggggugaaaa

SEQ ID NO: 2180965 - RNA, 19 nt, Artificial Sequence
  Description of Artificial Sequence: Synthetic oligonucleotide
ugcgggucaccuucaccca

SEQ ID NO: 2180966 - RNA, 19 nt, Artificial Sequence
  Description of Artificial Sequence: Synthetic oligonucleotide
cauggccgcacgcuccagc

SEQ ID NO: 2180967 - RNA, 19 nt, Artificial Sequence
  Description of Artificial Sequence: Synthetic oligonucleotide
gauacucacugauccacuu

SEQ ID NO: 2180968 - RNA, 19 nt, Artificial Sequence
  Description of Artificial Sequence: Synthetic oligonucleotide
aagcccggaacgggcuugg

SEQ ID NO: 2180969 - RNA, 19 nt, Artificial Sequence
  Description of Artificial Sequence: Synthetic oligonucleotide
ggucuuauuaggaggccac

SEQ ID NO: 2180970 - RNA, 19 nt, Artificial Sequence
  Description of Artificial Sequence: Synthetic oligonucleotide
uugcgugcacguuuccuuu

SEQ ID NO: 2180971 - RNA, 19 nt, Artificial Sequence
  Description of Artificial Sequence: Synthetic oligonucleotide
acuucgacccucagggccu

SEQ ID NO: 2180972 - RNA, 19 nt, Artificial Sequence
  Description of Artificial Sequence: Synthetic oligonucleotide
cuccuugcgugcacguuuc

SEQ ID NO: 2180973 - RNA, 19 nt, Artificial Sequence
  Description of Artificial Sequence: Synthetic oligonucleotide
gaaaucccaggcaaucacu

SEQ ID NO: 2180974 - RNA, 19 nt, Artificial Sequence
  Description of Artificial Sequence: Synthetic oligonucleotide
guuccaguauguggaaauc

SEQ ID NO: 2180975 - RNA, 19 nt, Artificial Sequence
  Description of Artificial Sequence: Synthetic oligonucleotide
gacugagugucuccucgaa

SEQ ID NO: 2180976 - RNA, 19 nt, Artificial Sequence
  Description of Artificial Sequence: Synthetic oligonucleotide
uccccucauggccgcacgc

SEQ ID NO: 2180977 - RNA, 19 nt, Artificial Sequence
  Description of Artificial Sequence: Synthetic oligonucleotide
aagcuacccgaaagcccgg

SEQ ID NO: 2180978 - RNA, 19 nt, Artificial Sequence
  Description of Artificial Sequence: Synthetic oligonucleotide
cugaauaacccggugggcu

SEQ ID NO: 2180979 - RNA, 19 nt, Artificial Sequence
  Description of Artificial Sequence: Synthetic oligonucleotide
acgcaucaguucaauccuc

SEQ ID NO: 2180980 - RNA, 19 nt, Artificial Sequence
  Description of Artificial Sequence: Synthetic oligonucleotide
acguccacaugaacaacca

SEQ ID NO: 2180981 - RNA, 19 nt, Artificial Sequence
  Description of Artificial Sequence: Synthetic oligonucleotide
gaauugucagcgccuuccu

SEQ ID NO: 2180982 - RNA, 19 nt, Artificial Sequence
  Description of Artificial Sequence: Synthetic oligonucleotide
cacgcaucaguucaauccu

SEQ ID NO: 2180983 - RNA, 19 nt, Artificial Sequence
  Description of Artificial Sequence: Synthetic oligonucleotide
cuccucugugcaguacggg

SEQ ID NO: 2180984 - RNA, 19 nt, Artificial Sequence
  Description of Artificial Sequence: Synthetic oligonucleotide
gcgcagcugugccagaugc

SEQ ID NO: 2180985 - RNA, 19 nt, Artificial Sequence
  Description of Artificial Sequence: Synthetic oligonucleotide
uccucuugcgcgccaccau

SEQ ID NO: 2180986 - RNA, 19 nt, Artificial Sequence
  Description of Artificial Sequence: Synthetic oligonucleotide
aaugggcccuucagauuca

SEQ ID NO: 2180987 - RNA, 19 nt, Artificial Sequence
  Description of Artificial Sequence: Synthetic oligonucleotide
ccuucagauucaaggcagc

SEQ ID NO: 2180988 - RNA, 19 nt, Artificial Sequence
  Description of Artificial Sequence: Synthetic oligonucleotide
uccuugcgugcacguuucc

SEQ ID NO: 2180989 - RNA, 19 nt, Artificial Sequence
  Description of Artificial Sequence: Synthetic oligonucleotide
cuacguccacaugaacaac

SEQ ID NO: 2180990 - RNA, 19 nt, Artificial Sequence
  Description of Artificial Sequence: Synthetic oligonucleotide
ugggcacgcaucaguucaa

SEQ ID NO: 2180991 - RNA, 19 nt, Artificial Sequence
  Description of Artificial Sequence: Synthetic oligonucleotide
ucucgagaacacgcaggcu

SEQ ID NO: 2180992 - RNA, 19 nt, Artificial Sequence
  Description of Artificial Sequence: Synthetic oligonucleotide
cuucacccagcccuccuca

SEQ ID NO: 2180993 - RNA, 19 nt, Artificial Sequence
  Description of Artificial Sequence: Synthetic oligonucleotide
ucaagucgacugucuugau

SEQ ID NO: 2180994 - RNA, 19 nt, Artificial Sequence
  Description of Artificial Sequence: Synthetic oligonucleotide
ccgaaagcccggaacgggc

SEQ ID NO: 2180995 - RNA, 19 nt, Artificial Sequence
  Description of Artificial Sequence: Synthetic oligonucleotide
cacuuggcuucuggaauac

SEQ ID NO: 2180996 - RNA, 19 nt, Artificial Sequence
  Description of Artificial Sequence: Synthetic oligonucleotide
caggccugcggccccugcg

SEQ ID NO: 2180997 - RNA, 19 nt, Artificial Sequence
  Description of Artificial Sequence: Synthetic oligonucleotide
cuuuccucuugcgcgccac

SEQ ID NO: 2180998 - RNA, 19 nt, Artificial Sequence
  Description of Artificial Sequence: Synthetic oligonucleotide
gcuccaucuuggucucucg

SEQ ID NO: 2180999 - RNA, 19 nt, Artificial Sequence
  Description of Artificial Sequence: Synthetic oligonucleotide
cagggugguucucuguaga

SEQ ID NO: 2181000 - RNA, 19 nt, Artificial Sequence
  Description of Artificial Sequence: Synthetic oligonucleotide
cuguucgagggagcacagg

SEQ ID NO: 2181001 - RNA, 19 nt, Artificial Sequence
  Description of Artificial Sequence: Synthetic oligonucleotide
ccacaugaacaaccaacac

SEQ ID NO: 2181002 - RNA, 19 nt, Artificial Sequence
  Description of Artificial Sequence: Synthetic oligonucleotide
gccacguggacugaguguc

SEQ ID NO: 2181003 - RNA, 19 nt, Artificial Sequence
  Description of Artificial Sequence: Synthetic oligonucleotide
cacgcaggcuggcugcuuc

SEQ ID NO: 2181004 - RNA, 19 nt, Artificial Sequence
  Description of Artificial Sequence: Synthetic oligonucleotide
agguaaugggaagccugcu

SEQ ID NO: 2181005 - RNA, 19 nt, Artificial Sequence
  Description of Artificial Sequence: Synthetic oligonucleotide
gucucucggugcugccagg

SEQ ID NO: 2181006 - RNA, 19 nt, Artificial Sequence
  Description of Artificial Sequence: Synthetic oligonucleotide
cuccagcgguuccaguaug

SEQ ID NO: 2181007 - RNA, 19 nt, Artificial Sequence
  Description of Artificial Sequence: Synthetic oligonucleotide
cuccccucauggccgcacg

SEQ ID NO: 2181008 - RNA, 19 nt, Artificial Sequence
  Description of Artificial Sequence: Synthetic oligonucleotide
gcaaucacuacguccacau

SEQ ID NO: 2181009 - RNA, 19 nt, Artificial Sequence
  Description of Artificial Sequence: Synthetic oligonucleotide
cuccucgaacucugugcug

SEQ ID NO: 2181010 - RNA, 19 nt, Artificial Sequence
  Description of Artificial Sequence: Synthetic oligonucleotide
cacagggugguucucugua

SEQ ID NO: 2181011 - RNA, 19 nt, Artificial Sequence
  Description of Artificial Sequence: Synthetic oligonucleotide
ggugggcugggugugcucc

SEQ ID NO: 2181012 - RNA, 19 nt, Artificial Sequence
  Description of Artificial Sequence: Synthetic oligonucleotide
caaccaacaccuuguggcu

SEQ ID NO: 2181013 - RNA, 19 nt, Artificial Sequence
  Description of Artificial Sequence: Synthetic oligonucleotide
ggugugcuccccucauggc

SEQ ID NO: 2181014 - RNA, 19 nt, Artificial Sequence
  Description of Artificial Sequence: Synthetic oligonucleotide
cauaagccuccaugaaugu

SEQ ID NO: 2181015 - RNA, 19 nt, Artificial Sequence
  Description of Artificial Sequence: Synthetic oligonucleotide
uuagggcucucagcauggu

SEQ ID NO: 2181016 - RNA, 19 nt, Artificial Sequence
  Description of Artificial Sequence: Synthetic oligonucleotide
ccaguauguggaaauccca

SEQ ID NO: 2181017 - RNA, 19 nt, Artificial Sequence
  Description of Artificial Sequence: Synthetic oligonucleotide
agagcccuucuuggccugg

SEQ ID NO: 2181018 - RNA, 19 nt, Artificial Sequence
  Description of Artificial Sequence: Synthetic oligonucleotide
uucacccagcccuccucau

SEQ ID NO: 2181019 - RNA, 19 nt, Artificial Sequence
  Description of Artificial Sequence: Synthetic oligonucleotide
ugcgugcacguuuccuuuu

SEQ ID NO: 2181020 - RNA, 19 nt, Artificial Sequence
  Description of Artificial Sequence: Synthetic oligonucleotide
gcugaauaacccggugggc

SEQ ID NO: 2181021 - RNA, 19 nt, Artificial Sequence
  Description of Artificial Sequence: Synthetic oligonucleotide
gggucggaauuugcguugg

SEQ ID NO: 2181022 - RNA, 19 nt, Artificial Sequence
  Description of Artificial Sequence: Synthetic oligonucleotide
ggucggaauuugcguuggg

SEQ ID NO: 2181023 - RNA, 19 nt, Artificial Sequence
  Description of Artificial Sequence: Synthetic oligonucleotide
guggacugagugucuccuc

SEQ ID NO: 2181024 - RNA, 19 nt, Artificial Sequence
  Description of Artificial Sequence: Synthetic oligonucleotide
cacguggacugagugucuc

SEQ ID NO: 2181025 - RNA, 19 nt, Artificial Sequence
  Description of Artificial Sequence: Synthetic oligonucleotide
accuuguggcuggaauugu

SEQ ID NO: 2181026 - RNA, 19 nt, Artificial Sequence
  Description of Artificial Sequence: Synthetic oligonucleotide
cuugcgugcacguuuccuu

SEQ ID NO: 2181027 - RNA, 19 nt, Artificial Sequence
  Description of Artificial Sequence: Synthetic oligonucleotide
gcccggaacgggcuugggg

SEQ ID NO: 2181028 - RNA, 19 nt, Artificial Sequence
  Description of Artificial Sequence: Synthetic oligonucleotide
cacgcuccagcuuuccucu

SEQ ID NO: 2181029 - RNA, 19 nt, Artificial Sequence
  Description of Artificial Sequence: Synthetic oligonucleotide
gccuccaugaaugugucua

SEQ ID NO: 2181030 - RNA, 19 nt, Artificial Sequence
  Description of Artificial Sequence: Synthetic oligonucleotide
ggcuucucuuucaagucga

SEQ ID NO: 2181031 - RNA, 19 nt, Artificial Sequence
  Description of Artificial Sequence: Synthetic oligonucleotide
gggucuuauuaggaggcca

SEQ ID NO: 2181032 - RNA, 19 nt, Artificial Sequence
  Description of Artificial Sequence: Synthetic oligonucleotide
ucgacccucagggccucug

SEQ ID NO: 2181033 - RNA, 19 nt, Artificial Sequence
  Description of Artificial Sequence: Synthetic oligonucleotide
aaccagcaaugggcccuuc

SEQ ID NO: 2181034 - RNA, 19 nt, Artificial Sequence
  Description of Artificial Sequence: Synthetic oligonucleotide
gagugucuccucgaacucu

SEQ ID NO: 2181035 - RNA, 19 nt, Artificial Sequence
  Description of Artificial Sequence: Synthetic oligonucleotide
ggcacgcaucaguucaauc

SEQ ID NO: 2181036 - RNA, 19 nt, Artificial Sequence
  Description of Artificial Sequence: Synthetic oligonucleotide
cccggucuucacagggugg

SEQ ID NO: 2181037 - RNA, 19 nt, Artificial Sequence
  Description of Artificial Sequence: Synthetic oligonucleotide
caggaacaccuuccuccuc

SEQ ID NO: 2181038 - RNA, 19 nt, Artificial Sequence
  Description of Artificial Sequence: Synthetic oligonucleotide
gcgggucaccuucacccag

SEQ ID NO: 2181039 - RNA, 19 nt, Artificial Sequence
  Description of Artificial Sequence: Synthetic oligonucleotide
ggacugagugucuccucga

SEQ ID NO: 2181040 - RNA, 19 nt, Artificial Sequence
  Description of Artificial Sequence: Synthetic oligonucleotide
cccgaaagcccggaacggg

SEQ ID NO: 2181041 - RNA, 19 nt, Artificial Sequence
  Description of Artificial Sequence: Synthetic oligonucleotide
aucccggucuucacagggu

SEQ ID NO: 2181042 - RNA, 19 nt, Artificial Sequence
  Description of Artificial Sequence: Synthetic oligonucleotide
ucauggccgcacgcuccag

SEQ ID NO: 2181043 - RNA, 19 nt, Artificial Sequence
  Description of Artificial Sequence: Synthetic oligonucleotide
cagaacagcucaguagggu

SEQ ID NO: 2181044 - RNA, 19 nt, Artificial Sequence
  Description of Artificial Sequence: Synthetic oligonucleotide
gcuguuuggugaacuugac

SEQ ID NO: 2181045 - RNA, 19 nt, Artificial Sequence
  Description of Artificial Sequence: Synthetic oligonucleotide
ggagucgggacaggcacuc

SEQ ID NO: 2181046 - RNA, 19 nt, Artificial Sequence
  Description of Artificial Sequence: Synthetic oligonucleotide
gucgggacaggcacuccuc

SEQ ID NO: 2181047 - RNA, 19 nt, Artificial Sequence
  Description of Artificial Sequence: Synthetic oligonucleotide
aggagucgggacaggcacu

SEQ ID NO: 2181048 - RNA, 19 nt, Artificial Sequence
  Description of Artificial Sequence: Synthetic oligonucleotide
cucggugcugccaggcaua

SEQ ID NO: 2181049 - RNA, 19 nt, Artificial Sequence
  Description of Artificial Sequence: Synthetic oligonucleotide
gagucgggacaggcacucc

SEQ ID NO: 2181050 - RNA, 19 nt, Artificial Sequence
  Description of Artificial Sequence: Synthetic oligonucleotide
ggucaccuucacccagccc

SEQ ID NO: 2181051 - RNA, 19 nt, Artificial Sequence
  Description of Artificial Sequence: Synthetic oligonucleotide
ccagcccuccucaucagga

SEQ ID NO: 2181052 - RNA, 19 nt, Artificial Sequence
  Description of Artificial Sequence: Synthetic oligonucleotide
cuucgacuuugccucuuua

SEQ ID NO: 2181053 - RNA, 19 nt, Artificial Sequence
  Description of Artificial Sequence: Synthetic oligonucleotide
aucucaccaccugacccuu

SEQ ID NO: 2181054 - RNA, 19 nt, Artificial Sequence
  Description of Artificial Sequence: Synthetic oligonucleotide
ggucaggcuucucuuucaa

SEQ ID NO: 2181055 - RNA, 19 nt, Artificial Sequence
  Description of Artificial Sequence: Synthetic oligonucleotide
gagaacacgcaggcuggcu

SEQ ID NO: 2181056 - RNA, 19 nt, Artificial Sequence
  Description of Artificial Sequence: Synthetic oligonucleotide
agcuacccgaaagcccgga

SEQ ID NO: 2181057 - RNA, 19 nt, Artificial Sequence
  Description of Artificial Sequence: Synthetic oligonucleotide
ccugcgggucaccuucacc

SEQ ID NO: 2181058 - RNA, 19 nt, Artificial Sequence
  Description of Artificial Sequence: Synthetic oligonucleotide
gccccugcgggucaccuuc

SEQ ID NO: 2181059 - RNA, 19 nt, Artificial Sequence
  Description of Artificial Sequence: Synthetic oligonucleotide
gugcuccccucauggccgc

SEQ ID NO: 2181060 - RNA, 19 nt, Artificial Sequence
  Description of Artificial Sequence: Synthetic oligonucleotide
ggcaaucacuacguccaca

SEQ ID NO: 2181061 - RNA, 19 nt, Artificial Sequence
  Description of Artificial Sequence: Synthetic oligonucleotide
cucuugcgcgccaccaucu

SEQ ID NO: 2181062 - RNA, 19 nt, Artificial Sequence
  Description of Artificial Sequence: Synthetic oligonucleotide
ccucuugcgcgccaccauc

SEQ ID NO: 2181063 - RNA, 19 nt, Artificial Sequence
  Description of Artificial Sequence: Synthetic oligonucleotide
cucucggugcugccaggca

SEQ ID NO: 2181064 - RNA, 19 nt, Artificial Sequence
  Description of Artificial Sequence: Synthetic oligonucleotide
gaaagcccggaacgggcuu

SEQ ID NO: 2181065 - RNA, 19 nt, Artificial Sequence
  Description of Artificial Sequence: Synthetic oligonucleotide
gggugguucucuguagaaa

SEQ ID NO: 2181066 - RNA, 19 nt, Artificial Sequence
  Description of Artificial Sequence: Synthetic oligonucleotide
cagcccuccucaucaggaa

SEQ ID NO: 2181067 - RNA, 19 nt, Artificial Sequence
  Description of Artificial Sequence: Synthetic oligonucleotide
gcgugcacguuuccuuuuc

SEQ ID NO: 2181068 - RNA, 19 nt, Artificial Sequence
  Description of Artificial Sequence: Synthetic oligonucleotide
acccggugggcugggugug

SEQ ID NO: 2181069 - RNA, 19 nt, Artificial Sequence
  Description of Artificial Sequence: Synthetic oligonucleotide
ggccugcggccccugcggg

SEQ ID NO: 2181070 - RNA, 19 nt, Artificial Sequence
  Description of Artificial Sequence: Synthetic oligonucleotide
gcauagaaguugagcagcu

SEQ ID NO: 2181071 - RNA, 19 nt, Artificial Sequence
  Description of Artificial Sequence: Synthetic oligonucleotide
auaacccggugggcugggu

SEQ ID NO: 2181072 - RNA, 19 nt, Artificial Sequence
  Description of Artificial Sequence: Synthetic oligonucleotide
ccggaacgggcuuggggug

SEQ ID NO: 2181073 - RNA, 19 nt, Artificial Sequence
  Description of Artificial Sequence: Synthetic oligonucleotide
cccggaacgggcuuggggu

SEQ ID NO: 2181074 - RNA, 19 nt, Artificial Sequence
  Description of Artificial Sequence: Synthetic oligonucleotide
ccagcgguuccaguaugug

SEQ ID NO: 2181075 - RNA, 19 nt, Artificial Sequence
  Description of Artificial Sequence: Synthetic oligonucleotide
acagcucaguagggucgga

SEQ ID NO: 2181076 - RNA, 19 nt, Artificial Sequence
  Description of Artificial Sequence: Synthetic oligonucleotide
cuucgacccucagggccuc

SEQ ID NO: 2181077 - RNA, 19 nt, Artificial Sequence
  Description of Artificial Sequence: Synthetic oligonucleotide
cagcucaguagggucggaa

SEQ ID NO: 2181078 - RNA, 19 nt, Artificial Sequence
  Description of Artificial Sequence: Synthetic oligonucleotide
agcccggaacgggcuuggg

SEQ ID NO: 2181079 - RNA, 19 nt, Artificial Sequence
  Description of Artificial Sequence: Synthetic oligonucleotide
cgagggagcacaggccugc

SEQ ID NO: 2181080 - RNA, 19 nt, Artificial Sequence
  Description of Artificial Sequence: Synthetic oligonucleotide
gaggccacguggacugagu

SEQ ID NO: 2181081 - RNA, 19 nt, Artificial Sequence
  Description of Artificial Sequence: Synthetic oligonucleotide
gcuccuugcgugcacguuu

SEQ ID NO: 2181082 - RNA, 19 nt, Artificial Sequence
  Description of Artificial Sequence: Synthetic oligonucleotide
ggccacguggacugagugu

SEQ ID NO: 2181083 - RNA, 19 nt, Artificial Sequence
  Description of Artificial Sequence: Synthetic oligonucleotide
ggcugggugugcuccccuc

SEQ ID NO: 2181084 - RNA, 19 nt, Artificial Sequence
  Description of Artificial Sequence: Synthetic oligonucleotide
gcuacccgaaagcccggaa

SEQ ID NO: 2181085 - RNA, 19 nt, Artificial Sequence
  Description of Artificial Sequence: Synthetic oligonucleotide
ggccuggugucugcuuccc

SEQ ID NO: 2181086 - RNA, 19 nt, Artificial Sequence
  Description of Artificial Sequence: Synthetic oligonucleotide
gcguugggcacgcaucagu

SEQ ID NO: 2181087 - RNA, 19 nt, Artificial Sequence
  Description of Artificial Sequence: Synthetic oligonucleotide
ccucugggucuaauacuga

SEQ ID NO: 2181088 - RNA, 19 nt, Artificial Sequence
  Description of Artificial Sequence: Synthetic oligonucleotide
cuggaauugucagcgccuu

SEQ ID NO: 2181089 - RNA, 19 nt, Artificial Sequence
  Description of Artificial Sequence: Synthetic oligonucleotide
uucgacccucagggccucu

SEQ ID NO: 2181090 - RNA, 19 nt, Artificial Sequence
  Description of Artificial Sequence: Synthetic oligonucleotide
ugcuccccucauggccgca

SEQ ID NO: 2181091 - RNA, 19 nt, Artificial Sequence
  Description of Artificial Sequence: Synthetic oligonucleotide
gcugcuguuuggugaacuu

SEQ ID NO: 2181092 - RNA, 19 nt, Artificial Sequence
  Description of Artificial Sequence: Synthetic oligonucleotide
gcgguuccaguauguggaa

SEQ ID NO: 2181093 - RNA, 19 nt, Artificial Sequence
  Description of Artificial Sequence: Synthetic oligonucleotide
cccaggcaaucacuacguc

SEQ ID NO: 2181094 - RNA, 19 nt, Artificial Sequence
  Description of Artificial Sequence: Synthetic oligonucleotide
uugccucuuuagggcucuc

SEQ ID NO: 2181095 - RNA, 19 nt, Artificial Sequence
  Description of Artificial Sequence: Synthetic oligonucleotide
ccagagcccuucuuggccu

SEQ ID NO: 2181096 - RNA, 19 nt, Artificial Sequence
  Description of Artificial Sequence: Synthetic oligonucleotide
aggaggccacguggacuga

SEQ ID NO: 2181097 - RNA, 19 nt, Artificial Sequence
  Description of Artificial Sequence: Synthetic oligonucleotide
ggcagcugacacuccacuu

SEQ ID NO: 2181098 - RNA, 19 nt, Artificial Sequence
  Description of Artificial Sequence: Synthetic oligonucleotide
cuuggccuggugucugcuu

SEQ ID NO: 2181099 - RNA, 19 nt, Artificial Sequence
  Description of Artificial Sequence: Synthetic oligonucleotide
cugggugugcuccccucau

SEQ ID NO: 2181100 - RNA, 19 nt, Artificial Sequence
  Description of Artificial Sequence: Synthetic oligonucleotide
gcaaugggcccuucagauu

SEQ ID NO: 2181101 - RNA, 19 nt, Artificial Sequence
  Description of Artificial Sequence: Synthetic oligonucleotide
caacaccuuguggcuggaa

SEQ ID NO: 2181102 - RNA, 19 nt, Artificial Sequence
  Description of Artificial Sequence: Synthetic oligonucleotide
acacgcaggcuggcugcuu

SEQ ID NO: 2181103 - RNA, 19 nt, Artificial Sequence
  Description of Artificial Sequence: Synthetic oligonucleotide
cagcuccuugcgugcacgu

SEQ ID NO: 2181104 - RNA, 19 nt, Artificial Sequence
  Description of Artificial Sequence: Synthetic oligonucleotide
gagcccuucuuggccuggu

SEQ ID NO: 2181105 - RNA, 19 nt, Artificial Sequence
  Description of Artificial Sequence: Synthetic oligonucleotide
gccuggugucugcuuccca

SEQ ID NO: 2181106 - RNA, 19 nt, Artificial Sequence
  Description of Artificial Sequence: Synthetic oligonucleotide
gaacgggcuuggggugaaa

SEQ ID NO: 2181107 - RNA, 19 nt, Artificial Sequence
  Description of Artificial Sequence: Synthetic oligonucleotide
gcuccccucauggccgcac

SEQ ID NO: 2181108 - RNA, 19 nt, Artificial Sequence
  Description of Artificial Sequence: Synthetic oligonucleotide
ggaacgggcuuggggugaa

SEQ ID NO: 2181109 - RNA, 19 nt, Artificial Sequence
  Description of Artificial Sequence: Synthetic oligonucleotide
cucgaacucugugcuguuu

SEQ ID NO: 2181110 - RNA, 19 nt, Artificial Sequence
  Description of Artificial Sequence: Synthetic oligonucleotide
cgaaagcccggaacgggcu

SEQ ID NO: 2181111 - RNA, 19 nt, Artificial Sequence
  Description of Artificial Sequence: Synthetic oligonucleotide
ccggucuucacaggguggu

SEQ ID NO: 2181112 - RNA, 19 nt, Artificial Sequence
  Description of Artificial Sequence: Synthetic oligonucleotide
ccgcacgcuccagcuuucc

SEQ ID NO: 2181113 - RNA, 19 nt, Artificial Sequence
  Description of Artificial Sequence: Synthetic oligonucleotide
ccuugcgugcacguuuccu

SEQ ID NO: 2181114 - RNA, 19 nt, Artificial Sequence
  Description of Artificial Sequence: Synthetic oligonucleotide
cguggacugagugucuccu

SEQ ID NO: 2181115 - RNA, 19 nt, Artificial Sequence
  Description of Artificial Sequence: Synthetic oligonucleotide
cccggugggcugggugugc

SEQ ID NO: 2181116 - RNA, 19 nt, Artificial Sequence
  Description of Artificial Sequence: Synthetic oligonucleotide
gccgcacgcuccagcuuuc

SEQ ID NO: 2181117 - RNA, 19 nt, Artificial Sequence
  Description of Artificial Sequence: Synthetic oligonucleotide
ccacguggacugagugucu

SEQ ID NO: 2181118 - RNA, 19 nt, Artificial Sequence
  Description of Artificial Sequence: Synthetic oligonucleotide
cggaacgggcuugggguga

SEQ ID NO: 2181119 - RNA, 19 nt, Artificial Sequence
  Description of Artificial Sequence: Synthetic oligonucleotide
ccccugcgggucaccuuca

SEQ ID NO: 2181120 - RNA, 19 nt, Artificial Sequence
  Description of Artificial Sequence: Synthetic oligonucleotide
gggaagccugcugcuguuu

SEQ ID NO: 2181121 - RNA, 19 nt, Artificial Sequence
  Description of Artificial Sequence: Synthetic oligonucleotide
cgguuccaguauguggaaa

SEQ ID NO: 2181122 - RNA, 19 nt, Artificial Sequence
  Description of Artificial Sequence: Synthetic oligonucleotide
ccucgaacucugugcuguu

SEQ ID NO: 2181123 - RNA, 19 nt, Artificial Sequence
  Description of Artificial Sequence: Synthetic oligonucleotide
ggccccugcgggucaccuu

SEQ ID NO: 2181124 - RNA, 19 nt, Artificial Sequence
  Description of Artificial Sequence: Synthetic oligonucleotide
ccggugggcugggugugcu

SEQ ID NO: 2181125 - RNA, 19 nt, Artificial Sequence
  Description of Artificial Sequence: Synthetic oligonucleotide
cggugcugccaggcauaga

SEQ ID NO: 2181126 - RNA, 19 nt, Artificial Sequence
  Description of Artificial Sequence: Synthetic oligonucleotide
aauagaugcuccucagagc

SEQ ID NO: 2181127 - RNA, 19 nt, Artificial Sequence
  Description of Artificial Sequence: Synthetic oligonucleotide
uuaaccaggggcaucagag

SEQ ID NO: 2181128 - RNA, 19 nt, Artificial Sequence
  Description of Artificial Sequence: Synthetic oligonucleotide
ugcauagacgcucucauag

SEQ ID NO: 2181129 - RNA, 19 nt, Artificial Sequence
  Description of Artificial Sequence: Synthetic oligonucleotide
ugcauaugagucuugauca

SEQ ID NO: 2181130 - RNA, 19 nt, Artificial Sequence
  Description of Artificial Sequence: Synthetic oligonucleotide
uggaccguaggucugaggg

SEQ ID NO: 2181131 - RNA, 19 nt, Artificial Sequence
  Description of Artificial Sequence: Synthetic oligonucleotide
ucaaagaauacagagugcc

SEQ ID NO: 2181132 - RNA, 19 nt, Artificial Sequence
  Description of Artificial Sequence: Synthetic oligonucleotide
auagcuguaagucccacuc

SEQ ID NO: 2181133 - RNA, 19 nt, Artificial Sequence
  Description of Artificial Sequence: Synthetic oligonucleotide
agagugccaaaguagauuc

SEQ ID NO: 2181134 - RNA, 19 nt, Artificial Sequence
  Description of Artificial Sequence: Synthetic oligonucleotide
acaauggaaggagacaucc

SEQ ID NO: 2181135 - RNA, 19 nt, Artificial Sequence
  Description of Artificial Sequence: Synthetic oligonucleotide
aguagauucccacaccagg

SEQ ID NO: 2181136 - RNA, 19 nt, Artificial Sequence
  Description of Artificial Sequence: Synthetic oligonucleotide
aagacuuucugugcggacc

SEQ ID NO: 2181137 - RNA, 19 nt, Artificial Sequence
  Description of Artificial Sequence: Synthetic oligonucleotide
augggugacaugcagacuc

SEQ ID NO: 2181138 - RNA, 19 nt, Artificial Sequence
  Description of Artificial Sequence: Synthetic oligonucleotide
aauacagagugccaaagua

SEQ ID NO: 2181139 - RNA, 19 nt, Artificial Sequence
  Description of Artificial Sequence: Synthetic oligonucleotide
auagaugcuccucagagcu

SEQ ID NO: 2181140 - RNA, 19 nt, Artificial Sequence
  Description of Artificial Sequence: Synthetic oligonucleotide
caugaaagaagccacgcag

SEQ ID NO: 2181141 - RNA, 19 nt, Artificial Sequence
  Description of Artificial Sequence: Synthetic oligonucleotide
ucauagacaguccaugcca

SEQ ID NO: 2181142 - RNA, 19 nt, Artificial Sequence
  Description of Artificial Sequence: Synthetic oligonucleotide
gcugaaauuaaccaggggc

SEQ ID NO: 2181143 - RNA, 19 nt, Artificial Sequence
  Description of Artificial Sequence: Synthetic oligonucleotide
caauagaugcuccucagag

SEQ ID NO: 2181144 - RNA, 19 nt, Artificial Sequence
  Description of Artificial Sequence: Synthetic oligonucleotide
agaacgccagccaauaucc

SEQ ID NO: 2181145 - RNA, 19 nt, Artificial Sequence
  Description of Artificial Sequence: Synthetic oligonucleotide
ugagucuugaucacgucug

SEQ ID NO: 2181146 - RNA, 19 nt, Artificial Sequence
  Description of Artificial Sequence: Synthetic oligonucleotide
uguaaaacaucagguagag

SEQ ID NO: 2181147 - RNA, 19 nt, Artificial Sequence
  Description of Artificial Sequence: Synthetic oligonucleotide
cuggcuguaaaacaucagg

SEQ ID NO: 2181148 - RNA, 19 nt, Artificial Sequence
  Description of Artificial Sequence: Synthetic oligonucleotide
ugaaaagggugcaucacga

SEQ ID NO: 2181149 - RNA, 19 nt, Artificial Sequence
  Description of Artificial Sequence: Synthetic oligonucleotide
uguaacaugagcgucucca

SEQ ID NO: 2181150 - RNA, 19 nt, Artificial Sequence
  Description of Artificial Sequence: Synthetic oligonucleotide
agugccaaaguagauuccc

SEQ ID NO: 2181151 - RNA, 19 nt, Artificial Sequence
  Description of Artificial Sequence: Synthetic oligonucleotide
aggagagucgcugucaggc

SEQ ID NO: 2181152 - RNA, 19 nt, Artificial Sequence
  Description of Artificial Sequence: Synthetic oligonucleotide
aaauuaaccaggggcauca

SEQ ID NO: 2181153 - RNA, 19 nt, Artificial Sequence
  Description of Artificial Sequence: Synthetic oligonucleotide
ucauagcgagucuugauca

SEQ ID NO: 2181154 - RNA, 19 nt, Artificial Sequence
  Description of Artificial Sequence: Synthetic oligonucleotide
uugaucacugugaugggug

SEQ ID NO: 2181155 - RNA, 19 nt, Artificial Sequence
  Description of Artificial Sequence: Synthetic oligonucleotide
ugugaugggugacaugcag

SEQ ID NO: 2181156 - RNA, 19 nt, Artificial Sequence
  Description of Artificial Sequence: Synthetic oligonucleotide
cagaggaaagccuugauca

SEQ ID NO: 2181157 - RNA, 19 nt, Artificial Sequence
  Description of Artificial Sequence: Synthetic oligonucleotide
gcuguaaaacaucagguag

SEQ ID NO: 2181158 - RNA, 19 nt, Artificial Sequence
  Description of Artificial Sequence: Synthetic oligonucleotide
uucaaagaauacagagugc

SEQ ID NO: 2181159 - RNA, 19 nt, Artificial Sequence
  Description of Artificial Sequence: Synthetic oligonucleotide
uggcuguaaaacaucaggu

SEQ ID NO: 2181160 - RNA, 19 nt, Artificial Sequence
  Description of Artificial Sequence: Synthetic oligonucleotide
accggauguaacaugagcg

SEQ ID NO: 2181161 - RNA, 19 nt, Artificial Sequence
  Description of Artificial Sequence: Synthetic oligonucleotide
ugcaucacgaaggagaguc

SEQ ID NO: 2181162 - RNA, 19 nt, Artificial Sequence
  Description of Artificial Sequence: Synthetic oligonucleotide
uugaucaccggauguaaca

SEQ ID NO: 2181163 - RNA, 19 nt, Artificial Sequence
  Description of Artificial Sequence: Synthetic oligonucleotide
cugaaauuaaccaggggca

SEQ ID NO: 2181164 - RNA, 19 nt, Artificial Sequence
  Description of Artificial Sequence: Synthetic oligonucleotide
agcuguaagucccacucuc

SEQ ID NO: 2181165 - RNA, 19 nt, Artificial Sequence
  Description of Artificial Sequence: Synthetic oligonucleotide
ugacaugcagacuccugcg

SEQ ID NO: 2181166 - RNA, 19 nt, Artificial Sequence
  Description of Artificial Sequence: Synthetic oligonucleotide
gaugaccgacuccagggcg

SEQ ID NO: 2181167 - RNA, 19 nt, Artificial Sequence
  Description of Artificial Sequence: Synthetic oligonucleotide
acaugcagacuccugcgac

SEQ ID NO: 2181168 - RNA, 19 nt, Artificial Sequence
  Description of Artificial Sequence: Synthetic oligonucleotide
cugcauaugagucuugauc

SEQ ID NO: 2181169 - RNA, 19 nt, Artificial Sequence
  Description of Artificial Sequence: Synthetic oligonucleotide
ugagucaccagcgaagcca

SEQ ID NO: 2181170 - RNA, 19 nt, Artificial Sequence
  Description of Artificial Sequence: Synthetic oligonucleotide
guagauucccacaccaggg

SEQ ID NO: 2181171 - RNA, 19 nt, Artificial Sequence
  Description of Artificial Sequence: Synthetic oligonucleotide
agauucccacaccagggac

SEQ ID NO: 2181172 - RNA, 19 nt, Artificial Sequence
  Description of Artificial Sequence: Synthetic oligonucleotide
uaacaugagcgucuccacc

SEQ ID NO: 2181173 - RNA, 19 nt, Artificial Sequence
  Description of Artificial Sequence: Synthetic oligonucleotide
aagaauacagagugccaaa

SEQ ID NO: 2181174 - RNA, 19 nt, Artificial Sequence
  Description of Artificial Sequence: Synthetic oligonucleotide
cacaccucacaauggaagg

SEQ ID NO: 2181175 - RNA, 19 nt, Artificial Sequence
  Description of Artificial Sequence: Synthetic oligonucleotide
aacgccagccaauauccca

SEQ ID NO: 2181176 - RNA, 19 nt, Artificial Sequence
  Description of Artificial Sequence: Synthetic oligonucleotide
uaucccacagcugaaauua

SEQ ID NO: 2181177 - RNA, 19 nt, Artificial Sequence
  Description of Artificial Sequence: Synthetic oligonucleotide
ucgcaagaaauacugcuuc

SEQ ID NO: 2181178 - RNA, 19 nt, Artificial Sequence
  Description of Artificial Sequence: Synthetic oligonucleotide
ugagacuucacuggggaga

SEQ ID NO: 2181179 - RNA, 19 nt, Artificial Sequence
  Description of Artificial Sequence: Synthetic oligonucleotide
agguagagcccugaaaagg

SEQ ID NO: 2181180 - RNA, 19 nt, Artificial Sequence
  Description of Artificial Sequence: Synthetic oligonucleotide
agacaguccaugccauggc

SEQ ID NO: 2181181 - RNA, 19 nt, Artificial Sequence
  Description of Artificial Sequence: Synthetic oligonucleotide
cauaugagucuugaucacg

SEQ ID NO: 2181182 - RNA, 19 nt, Artificial Sequence
  Description of Artificial Sequence: Synthetic oligonucleotide
ucacaauggaaggagacau

SEQ ID NO: 2181183 - RNA, 19 nt, Artificial Sequence
  Description of Artificial Sequence: Synthetic oligonucleotide
gaaggagagucgcugucag

SEQ ID NO: 2181184 - RNA, 19 nt, Artificial Sequence
  Description of Artificial Sequence: Synthetic oligonucleotide
cagaguucuacggagggcc

SEQ ID NO: 2181185 - RNA, 19 nt, Artificial Sequence
  Description of Artificial Sequence: Synthetic oligonucleotide
auggccucgcaagaaauac

SEQ ID NO: 2181186 - RNA, 19 nt, Artificial Sequence
  Description of Artificial Sequence: Synthetic oligonucleotide
caucagaguucuacggagg

SEQ ID NO: 2181187 - RNA, 19 nt, Artificial Sequence
  Description of Artificial Sequence: Synthetic oligonucleotide
uagacgcucucauagcugu

SEQ ID NO: 2181188 - RNA, 19 nt, Artificial Sequence
  Description of Artificial Sequence: Synthetic oligonucleotide
agaauacagagugccaaag

SEQ ID NO: 2181189 - RNA, 19 nt, Artificial Sequence
  Description of Artificial Sequence: Synthetic oligonucleotide
ugugcggaccaccuucaag

SEQ ID NO: 2181190 - RNA, 19 nt, Artificial Sequence
  Description of Artificial Sequence: Synthetic oligonucleotide
caccagcgaagccagaacg

SEQ ID NO: 2181191 - RNA, 19 nt, Artificial Sequence
  Description of Artificial Sequence: Synthetic oligonucleotide
gggaacacugccaugaaag

SEQ ID NO: 2181192 - RNA, 19 nt, Artificial Sequence
  Description of Artificial Sequence: Synthetic oligonucleotide
uagauucccacaccaggga

SEQ ID NO: 2181193 - RNA, 19 nt, Artificial Sequence
  Description of Artificial Sequence: Synthetic oligonucleotide
aggaaagccuugaucaccg

SEQ ID NO: 2181194 - RNA, 19 nt, Artificial Sequence
  Description of Artificial Sequence: Synthetic oligonucleotide
cacgucugcagguugaguc

SEQ ID NO: 2181195 - RNA, 19 nt, Artificial Sequence
  Description of Artificial Sequence: Synthetic oligonucleotide
uggggagagcugcauauga

SEQ ID NO: 2181196 - RNA, 19 nt, Artificial Sequence
  Description of Artificial Sequence: Synthetic oligonucleotide
uagcgagucuugaucacug

SEQ ID NO: 2181197 - RNA, 19 nt, Artificial Sequence
  Description of Artificial Sequence: Synthetic oligonucleotide
cuggccaauccacugagac

SEQ ID NO: 2181198 - RNA, 19 nt, Artificial Sequence
  Description of Artificial Sequence: Synthetic oligonucleotide
aaagccuugaucaccggau

SEQ ID NO: 2181199 - RNA, 19 nt, Artificial Sequence
  Description of Artificial Sequence: Synthetic oligonucleotide
agcugaaauuaaccagggg

SEQ ID NO: 2181200 - RNA, 19 nt, Artificial Sequence
  Description of Artificial Sequence: Synthetic oligonucleotide
aagccuugaucaccggaug

SEQ ID NO: 2181201 - RNA, 19 nt, Artificial Sequence
  Description of Artificial Sequence: Synthetic oligonucleotide
ucuacggagggcccgggga

SEQ ID NO: 2181202 - RNA, 19 nt, Artificial Sequence
  Description of Artificial Sequence: Synthetic oligonucleotide
cagcugaaauuaaccaggg

SEQ ID NO: 2181203 - RNA, 19 nt, Artificial Sequence
  Description of Artificial Sequence: Synthetic oligonucleotide
acaccagggacacaccuca

SEQ ID NO: 2181204 - RNA, 19 nt, Artificial Sequence
  Description of Artificial Sequence: Synthetic oligonucleotide
uuuuggucuggcuguaaaa

SEQ ID NO: 2181205 - RNA, 19 nt, Artificial Sequence
  Description of Artificial Sequence: Synthetic oligonucleotide
ucgaucacggggacgcgag

SEQ ID NO: 2181206 - RNA, 19 nt, Artificial Sequence
  Description of Artificial Sequence: Synthetic oligonucleotide
gacugcgaggcucugcggc

SEQ ID NO: 2181207 - RNA, 19 nt, Artificial Sequence
  Description of Artificial Sequence: Synthetic oligonucleotide
aucacggggacgcgagccc

SEQ ID NO: 2181208 - RNA, 19 nt, Artificial Sequence
  Description of Artificial Sequence: Synthetic oligonucleotide
gccaauaucccacagcuga

SEQ ID NO: 2181209 - RNA, 19 nt, Artificial Sequence
  Description of Artificial Sequence: Synthetic oligonucleotide
aggucccacugauggagcc

SEQ ID NO: 2181210 - RNA, 19 nt, Artificial Sequence
  Description of Artificial Sequence: Synthetic oligonucleotide
ugaucacgucugcagguug

SEQ ID NO: 2181211 - RNA, 19 nt, Artificial Sequence
  Description of Artificial Sequence: Synthetic oligonucleotide
ugcagggucugcaggcggg

SEQ ID NO: 2181212 - RNA, 19 nt, Artificial Sequence
  Description of Artificial Sequence: Synthetic oligonucleotide
gaucaccggauguaacaug

SEQ ID NO: 2181213 - RNA, 19 nt, Artificial Sequence
  Description of Artificial Sequence: Synthetic oligonucleotide
ugaucacugugauggguga

SEQ ID NO: 2181214 - RNA, 19 nt, Artificial Sequence
  Description of Artificial Sequence: Synthetic oligonucleotide
gaaagccuugaucaccgga

SEQ ID NO: 2181215 - RNA, 19 nt, Artificial Sequence
  Description of Artificial Sequence: Synthetic oligonucleotide
uaaccaggggcaucagagc

SEQ ID NO: 2181216 - RNA, 19 nt, Artificial Sequence
  Description of Artificial Sequence: Synthetic oligonucleotide
acgaaggagagucgcuguc

SEQ ID NO: 2181217 - RNA, 19 nt, Artificial Sequence
  Description of Artificial Sequence: Synthetic oligonucleotide
cagaacgccagccaauauc

SEQ ID NO: 2181218 - RNA, 19 nt, Artificial Sequence
  Description of Artificial Sequence: Synthetic oligonucleotide
caauggaaggagacauccc

SEQ ID NO: 2181219 - RNA, 19 nt, Artificial Sequence
  Description of Artificial Sequence: Synthetic oligonucleotide
cuugaucaccggauguaac

SEQ ID NO: 2181220 - RNA, 19 nt, Artificial Sequence
  Description of Artificial Sequence: Synthetic oligonucleotide
ccaucauuucuucauagac

SEQ ID NO: 2181221 - RNA, 19 nt, Artificial Sequence
  Description of Artificial Sequence: Synthetic oligonucleotide
guugagucaccagcgaagc

SEQ ID NO: 2181222 - RNA, 19 nt, Artificial Sequence
  Description of Artificial Sequence: Synthetic oligonucleotide
acagagcgugagcccaugc

SEQ ID NO: 2181223 - RNA, 19 nt, Artificial Sequence
  Description of Artificial Sequence: Synthetic oligonucleotide
agacuuucugugcggacca

SEQ ID NO: 2181224 - RNA, 19 nt, Artificial Sequence
  Description of Artificial Sequence: Synthetic oligonucleotide
caccggauguaacaugagc

SEQ ID NO: 2181225 - RNA, 19 nt, Artificial Sequence
  Description of Artificial Sequence: Synthetic oligonucleotide
acuggggagagcugcauau

SEQ ID NO: 2181226 - RNA, 19 nt, Artificial Sequence
  Description of Artificial Sequence: Synthetic oligonucleotide
accagcgaagccagaacgc

SEQ ID NO: 2181227 - RNA, 19 nt, Artificial Sequence
  Description of Artificial Sequence: Synthetic oligonucleotide
auguaacaugagcgucucc

SEQ ID NO: 2181228 - RNA, 19 nt, Artificial Sequence
  Description of Artificial Sequence: Synthetic oligonucleotide
gucccacucucauagcgag

SEQ ID NO: 2181229 - RNA, 19 nt, Artificial Sequence
  Description of Artificial Sequence: Synthetic oligonucleotide
gaagccagaacgccagcca

SEQ ID NO: 2181230 - RNA, 19 nt, Artificial Sequence
  Description of Artificial Sequence: Synthetic oligonucleotide
cagguagagcccugaaaag

SEQ ID NO: 2181231 - RNA, 19 nt, Artificial Sequence
  Description of Artificial Sequence: Synthetic oligonucleotide
ucccacagcugaaauuaac

SEQ ID NO: 2181232 - RNA, 19 nt, Artificial Sequence
  Description of Artificial Sequence: Synthetic oligonucleotide
aucaccggauguaacauga

SEQ ID NO: 2181233 - RNA, 19 nt, Artificial Sequence
  Description of Artificial Sequence: Synthetic oligonucleotide
caucacgaaggagagucgc

SEQ ID NO: 2181234 - RNA, 19 nt, Artificial Sequence
  Description of Artificial Sequence: Synthetic oligonucleotide
guaacaugagcgucuccac

SEQ ID NO: 2181235 - RNA, 19 nt, Artificial Sequence
  Description of Artificial Sequence: Synthetic oligonucleotide
gcggcagcagcgcagagcg

SEQ ID NO: 2181236 - RNA, 19 nt, Artificial Sequence
  Description of Artificial Sequence: Synthetic oligonucleotide
caggccgugguucuugaag

SEQ ID NO: 2181237 - RNA, 19 nt, Artificial Sequence
  Description of Artificial Sequence: Synthetic oligonucleotide
uugagucaccagcgaagcc

SEQ ID NO: 2181238 - RNA, 19 nt, Artificial Sequence
  Description of Artificial Sequence: Synthetic oligonucleotide
agccacguccaacuggucu

SEQ ID NO: 2181239 - RNA, 19 nt, Artificial Sequence
  Description of Artificial Sequence: Synthetic oligonucleotide
caggaugaccgacuccagg

SEQ ID NO: 2181240 - RNA, 19 nt, Artificial Sequence
  Description of Artificial Sequence: Synthetic oligonucleotide
cacugagacuucacugggg

SEQ ID NO: 2181241 - RNA, 19 nt, Artificial Sequence
  Description of Artificial Sequence: Synthetic oligonucleotide
gaucacggggacgcgagcc

SEQ ID NO: 2181242 - RNA, 19 nt, Artificial Sequence
  Description of Artificial Sequence: Synthetic oligonucleotide
gaaauuaaccaggggcauc

SEQ ID NO: 2181243 - RNA, 19 nt, Artificial Sequence
  Description of Artificial Sequence: Synthetic oligonucleotide
cagagccacguccaacugg

SEQ ID NO: 2181244 - RNA, 19 nt, Artificial Sequence
  Description of Artificial Sequence: Synthetic oligonucleotide
caaagaauacagagugcca

SEQ ID NO: 2181245 - RNA, 19 nt, Artificial Sequence
  Description of Artificial Sequence: Synthetic oligonucleotide
aggccgugguucuugaaga

SEQ ID NO: 2181246 - RNA, 19 nt, Artificial Sequence
  Description of Artificial Sequence: Synthetic oligonucleotide
ucaccggauguaacaugag

SEQ ID NO: 2181247 - RNA, 19 nt, Artificial Sequence
  Description of Artificial Sequence: Synthetic oligonucleotide
aagaugagggcagcugccu

SEQ ID NO: 2181248 - RNA, 19 nt, Artificial Sequence
  Description of Artificial Sequence: Synthetic oligonucleotide
cucgcugcaauagaugcuc

SEQ ID NO: 2181249 - RNA, 19 nt, Artificial Sequence
  Description of Artificial Sequence: Synthetic oligonucleotide
uucuacggagggcccgggg

SEQ ID NO: 2181250 - RNA, 19 nt, Artificial Sequence
  Description of Artificial Sequence: Synthetic oligonucleotide
gauguaacaugagcgucuc

SEQ ID NO: 2181251 - RNA, 19 nt, Artificial Sequence
  Description of Artificial Sequence: Synthetic oligonucleotide
ugucaggacuucaggccca

SEQ ID NO: 2181252 - RNA, 19 nt, Artificial Sequence
  Description of Artificial Sequence: Synthetic oligonucleotide
agucuugaucacugugaug

SEQ ID NO: 2181253 - RNA, 19 nt, Artificial Sequence
  Description of Artificial Sequence: Synthetic oligonucleotide
cuggucugugccucggagc

SEQ ID NO: 2181254 - RNA, 19 nt, Artificial Sequence
  Description of Artificial Sequence: Synthetic oligonucleotide
aucagguagagcccugaaa

SEQ ID NO: 2181255 - RNA, 19 nt, Artificial Sequence
  Description of Artificial Sequence: Synthetic oligonucleotide
cagggcgguaggaggaugg

SEQ ID NO: 2181256 - RNA, 19 nt, Artificial Sequence
  Description of Artificial Sequence: Synthetic oligonucleotide
cugucaggccucugaagag

SEQ ID NO: 2181257 - RNA, 19 nt, Artificial Sequence
  Description of Artificial Sequence: Synthetic oligonucleotide
ugaucaccggauguaacau

SEQ ID NO: 2181258 - RNA, 19 nt, Artificial Sequence
  Description of Artificial Sequence: Synthetic oligonucleotide
cuccugucaggacuucagg

SEQ ID NO: 2181259 - RNA, 19 nt, Artificial Sequence
  Description of Artificial Sequence: Synthetic oligonucleotide
cauagcgagucuugaucac

SEQ ID NO: 2181260 - RNA, 19 nt, Artificial Sequence
  Description of Artificial Sequence: Synthetic oligonucleotide
caccucacaauggaaggag

SEQ ID NO: 2181261 - RNA, 19 nt, Artificial Sequence
  Description of Artificial Sequence: Synthetic oligonucleotide
caugccauggcagccauca

SEQ ID NO: 2181262 - RNA, 19 nt, Artificial Sequence
  Description of Artificial Sequence: Synthetic oligonucleotide
uaugagucuugaucacguc

SEQ ID NO: 2181263 - RNA, 19 nt, Artificial Sequence
  Description of Artificial Sequence: Synthetic oligonucleotide
gagucaccagcgaagccag

SEQ ID NO: 2181264 - RNA, 19 nt, Artificial Sequence
  Description of Artificial Sequence: Synthetic oligonucleotide
agaguucuacggagggccc

SEQ ID NO: 2181265 - RNA, 19 nt, Artificial Sequence
  Description of Artificial Sequence: Synthetic oligonucleotide
acgucugcagguugaguca

SEQ ID NO: 2181266 - RNA, 19 nt, Artificial Sequence
  Description of Artificial Sequence: Synthetic oligonucleotide
gguugagucaccagcgaag

SEQ ID NO: 2181267 - RNA, 19 nt, Artificial Sequence
  Description of Artificial Sequence: Synthetic oligonucleotide
aguucuacggagggcccgg

SEQ ID NO: 2181268 - RNA, 19 nt, Artificial Sequence
  Description of Artificial Sequence: Synthetic oligonucleotide
uagcuguaagucccacucu

SEQ ID NO: 2181269 - RNA, 19 nt, Artificial Sequence
  Description of Artificial Sequence: Synthetic oligonucleotide
cugcgacagagcgugagcc

SEQ ID NO: 2181270 - RNA, 19 nt, Artificial Sequence
  Description of Artificial Sequence: Synthetic oligonucleotide
agccuugaucaccggaugu

SEQ ID NO: 2181271 - RNA, 19 nt, Artificial Sequence
  Description of Artificial Sequence: Synthetic oligonucleotide
caauccacugagacuucac

SEQ ID NO: 2181272 - RNA, 19 nt, Artificial Sequence
  Description of Artificial Sequence: Synthetic oligonucleotide
agagccacguccaacuggu

SEQ ID NO: 2181273 - RNA, 19 nt, Artificial Sequence
  Description of Artificial Sequence: Synthetic oligonucleotide
gaguucuacggagggcccg

SEQ ID NO: 2181274 - RNA, 19 nt, Artificial Sequence
  Description of Artificial Sequence: Synthetic oligonucleotide
agcgaagccagaacgccag

SEQ ID NO: 2181275 - RNA, 19 nt, Artificial Sequence
  Description of Artificial Sequence: Synthetic oligonucleotide
aucacugugaugggugaca

SEQ ID NO: 2181276 - RNA, 19 nt, Artificial Sequence
  Description of Artificial Sequence: Synthetic oligonucleotide
uggccucgcaagaaauacu

SEQ ID NO: 2181277 - RNA, 19 nt, Artificial Sequence
  Description of Artificial Sequence: Synthetic oligonucleotide
agaagacuuucugugcgga

SEQ ID NO: 2181278 - RNA, 19 nt, Artificial Sequence
  Description of Artificial Sequence: Synthetic oligonucleotide
acgccuggaccguaggucu

SEQ ID NO: 2181279 - RNA, 19 nt, Artificial Sequence
  Description of Artificial Sequence: Synthetic oligonucleotide
auagcgagucuugaucacu

SEQ ID NO: 2181280 - RNA, 19 nt, Artificial Sequence
  Description of Artificial Sequence: Synthetic oligonucleotide
caucccucuccagaggccc

SEQ ID NO: 2181281 - RNA, 19 nt, Artificial Sequence
  Description of Artificial Sequence: Synthetic oligonucleotide
agcgcucuccugucaggac

SEQ ID NO: 2181282 - RNA, 19 nt, Artificial Sequence
  Description of Artificial Sequence: Synthetic oligonucleotide
agguugagucaccagcgaa

SEQ ID NO: 2181283 - RNA, 19 nt, Artificial Sequence
  Description of Artificial Sequence: Synthetic oligonucleotide
ggugcaucacgaaggagag

SEQ ID NO: 2181284 - RNA, 19 nt, Artificial Sequence
  Description of Artificial Sequence: Synthetic oligonucleotide
accagggacacaccucaca

SEQ ID NO: 2181285 - RNA, 19 nt, Artificial Sequence
  Description of Artificial Sequence: Synthetic oligonucleotide
ugccucggagcacuguggu

SEQ ID NO: 2181286 - RNA, 19 nt, Artificial Sequence
  Description of Artificial Sequence: Synthetic oligonucleotide
agagcgcgccuucucgauc

SEQ ID NO: 2181287 - RNA, 19 nt, Artificial Sequence
  Description of Artificial Sequence: Synthetic oligonucleotide
acacagccagcaucccgac

SEQ ID NO: 2181288 - RNA, 19 nt, Artificial Sequence
  Description of Artificial Sequence: Synthetic oligonucleotide
cacaauggaaggagacauc

SEQ ID NO: 2181289 - RNA, 19 nt, Artificial Sequence
  Description of Artificial Sequence: Synthetic oligonucleotide
acgcucucauagcuguaag

SEQ ID NO: 2181290 - RNA, 19 nt, Artificial Sequence
  Description of Artificial Sequence: Synthetic oligonucleotide
auagacgcucucauagcug

SEQ ID NO: 2181291 - RNA, 19 nt, Artificial Sequence
  Description of Artificial Sequence: Synthetic oligonucleotide
augaccgacuccagggcgg

SEQ ID NO: 2181292 - RNA, 19 nt, Artificial Sequence
  Description of Artificial Sequence: Synthetic oligonucleotide
cccucgcugcaauagaugc

SEQ ID NO: 2181293 - RNA, 19 nt, Artificial Sequence
  Description of Artificial Sequence: Synthetic oligonucleotide
gcgacugcgaggcucugcg

SEQ ID NO: 2181294 - RNA, 19 nt, Artificial Sequence
  Description of Artificial Sequence: Synthetic oligonucleotide
cagccaauaucccacagcu

SEQ ID NO: 2181295 - RNA, 19 nt, Artificial Sequence
  Description of Artificial Sequence: Synthetic oligonucleotide
guuuuggucuggcuguaaa

SEQ ID NO: 2181296 - RNA, 19 nt, Artificial Sequence
  Description of Artificial Sequence: Synthetic oligonucleotide
uccugcgacagagcgugag

SEQ ID NO: 2181297 - RNA, 19 nt, Artificial Sequence
  Description of Artificial Sequence: Synthetic oligonucleotide
ucgcugcaauagaugcucc

SEQ ID NO: 2181298 - RNA, 19 nt, Artificial Sequence
  Description of Artificial Sequence: Synthetic oligonucleotide
acaucccucuccagaggcc

SEQ ID NO: 2181299 - RNA, 19 nt, Artificial Sequence
  Description of Artificial Sequence: Synthetic oligonucleotide
gagagcugcauaugagucu

SEQ ID NO: 2181300 - RNA, 19 nt, Artificial Sequence
  Description of Artificial Sequence: Synthetic oligonucleotide
guaaaacaucagguagagc

SEQ ID NO: 2181301 - RNA, 19 nt, Artificial Sequence
  Description of Artificial Sequence: Synthetic oligonucleotide
gggugcaucacgaaggaga

SEQ ID NO: 2181302 - RNA, 19 nt, Artificial Sequence
  Description of Artificial Sequence: Synthetic oligonucleotide
gggcaucagagccacgucc

SEQ ID NO: 2181303 - RNA, 19 nt, Artificial Sequence
  Description of Artificial Sequence: Synthetic oligonucleotide
gacuucacuggggagagcu

SEQ ID NO: 2181304 - RNA, 19 nt, Artificial Sequence
  Description of Artificial Sequence: Synthetic oligonucleotide
aacuggucugugccucgga

SEQ ID NO: 2181305 - RNA, 19 nt, Artificial Sequence
  Description of Artificial Sequence: Synthetic oligonucleotide
gcagccaucagaguucuac

SEQ ID NO: 2181306 - RNA, 19 nt, Artificial Sequence
  Description of Artificial Sequence: Synthetic oligonucleotide
ucacggggacgcgagcccg

SEQ ID NO: 2181307 - RNA, 19 nt, Artificial Sequence
  Description of Artificial Sequence: Synthetic oligonucleotide
acugcgaggcucugcggcu

SEQ ID NO: 2181308 - RNA, 19 nt, Artificial Sequence
  Description of Artificial Sequence: Synthetic oligonucleotide
accgacuccagggcgguag

SEQ ID NO: 2181309 - RNA, 19 nt, Artificial Sequence
  Description of Artificial Sequence: Synthetic oligonucleotide
gaagcaggucccacugaug

SEQ ID NO: 2181310 - RNA, 19 nt, Artificial Sequence
  Description of Artificial Sequence: Synthetic oligonucleotide
cucacaauggaaggagaca

SEQ ID NO: 2181311 - RNA, 19 nt, Artificial Sequence
  Description of Artificial Sequence: Synthetic oligonucleotide
agcugcauaugagucuuga

SEQ ID NO: 2181312 - RNA, 19 nt, Artificial Sequence
  Description of Artificial Sequence: Synthetic oligonucleotide
ccucacaauggaaggagac

SEQ ID NO: 2181313 - RNA, 19 nt, Artificial Sequence
  Description of Artificial Sequence: Synthetic oligonucleotide
caugcagacuccugcgaca

SEQ ID NO: 2181314 - RNA, 19 nt, Artificial Sequence
  Description of Artificial Sequence: Synthetic oligonucleotide
gaucacgucugcagguuga

SEQ ID NO: 2181315 - RNA, 19 nt, Artificial Sequence
  Description of Artificial Sequence: Synthetic oligonucleotide
ggccucgcaagaaauacug

SEQ ID NO: 2181316 - RNA, 19 nt, Artificial Sequence
  Description of Artificial Sequence: Synthetic oligonucleotide
acaccucacaauggaagga

SEQ ID NO: 2181317 - RNA, 19 nt, Artificial Sequence
  Description of Artificial Sequence: Synthetic oligonucleotide
ggagccgcagaggaaagcc

SEQ ID NO: 2181318 - RNA, 19 nt, Artificial Sequence
  Description of Artificial Sequence: Synthetic oligonucleotide
ucgcugucaggccucugaa

SEQ ID NO: 2181319 - RNA, 19 nt, Artificial Sequence
  Description of Artificial Sequence: Synthetic oligonucleotide
gagugccaaaguagauucc

SEQ ID NO: 2181320 - RNA, 19 nt, Artificial Sequence
  Description of Artificial Sequence: Synthetic oligonucleotide
ucauagcuguaagucccac

SEQ ID NO: 2181321 - RNA, 19 nt, Artificial Sequence
  Description of Artificial Sequence: Synthetic oligonucleotide
gucgcugucaggccucuga

SEQ ID NO: 2181322 - RNA, 19 nt, Artificial Sequence
  Description of Artificial Sequence: Synthetic oligonucleotide
agcgugagcccaugcccag

SEQ ID NO: 2181323 - RNA, 19 nt, Artificial Sequence
  Description of Artificial Sequence: Synthetic oligonucleotide
ggcuguaaaacaucaggua

SEQ ID NO: 2181324 - RNA, 19 nt, Artificial Sequence
  Description of Artificial Sequence: Synthetic oligonucleotide
caucccgacacgccuggac

SEQ ID NO: 2181325 - RNA, 19 nt, Artificial Sequence
  Description of Artificial Sequence: Synthetic oligonucleotide
ugcggaccaccuucaagaa

SEQ ID NO: 2181326 - RNA, 19 nt, Artificial Sequence
  Description of Artificial Sequence: Synthetic oligonucleotide
ggacacaccucacaaugga

SEQ ID NO: 2181327 - RNA, 19 nt, Artificial Sequence
  Description of Artificial Sequence: Synthetic oligonucleotide
ccaccuucaagaacacagc

SEQ ID NO: 2181328 - RNA, 19 nt, Artificial Sequence
  Description of Artificial Sequence: Synthetic oligonucleotide
agcugcauagacgcucuca

SEQ ID NO: 2181329 - RNA, 19 nt, Artificial Sequence
  Description of Artificial Sequence: Synthetic oligonucleotide
ggaugaccgacuccagggc

SEQ ID NO: 2181330 - RNA, 19 nt, Artificial Sequence
  Description of Artificial Sequence: Synthetic oligonucleotide
agagucgcugucaggccuc

SEQ ID NO: 2181331 - RNA, 19 nt, Artificial Sequence
  Description of Artificial Sequence: Synthetic oligonucleotide
agcgagucuugaucacugu

SEQ ID NO: 2181332 - RNA, 19 nt, Artificial Sequence
  Description of Artificial Sequence: Synthetic oligonucleotide
agagcugcauagacgcucu

SEQ ID NO: 2181333 - RNA, 19 nt, Artificial Sequence
  Description of Artificial Sequence: Synthetic oligonucleotide
guggcccucgcugcaauag

SEQ ID NO: 2181334 - RNA, 19 nt, Artificial Sequence
  Description of Artificial Sequence: Synthetic oligonucleotide
uggcccucgcugcaauaga

SEQ ID NO: 2181335 - RNA, 19 nt, Artificial Sequence
  Description of Artificial Sequence: Synthetic oligonucleotide
gcauaugagucuugaucac

SEQ ID NO: 2181336 - RNA, 19 nt, Artificial Sequence
  Description of Artificial Sequence: Synthetic oligonucleotide
agggcgguaggaggauggc

SEQ ID NO: 2181337 - RNA, 19 nt, Artificial Sequence
  Description of Artificial Sequence: Synthetic oligonucleotide
uugaucacgucugcagguu

SEQ ID NO: 2181338 - RNA, 19 nt, Artificial Sequence
  Description of Artificial Sequence: Synthetic oligonucleotide
aucacgucugcagguugag

SEQ ID NO: 2181339 - RNA, 19 nt, Artificial Sequence
  Description of Artificial Sequence: Synthetic oligonucleotide
aagccacgcaggccguggu

SEQ ID NO: 2181340 - RNA, 19 nt, Artificial Sequence
  Description of Artificial Sequence: Synthetic oligonucleotide
gagagucgcugucaggccu

SEQ ID NO: 2181341 - RNA, 19 nt, Artificial Sequence
  Description of Artificial Sequence: Synthetic oligonucleotide
cuggaccguaggucugagg

SEQ ID NO: 2181342 - RNA, 19 nt, Artificial Sequence
  Description of Artificial Sequence: Synthetic oligonucleotide
cucauagcuguaaguccca

SEQ ID NO: 2181343 - RNA, 19 nt, Artificial Sequence
  Description of Artificial Sequence: Synthetic oligonucleotide
agucccacucucauagcga

SEQ ID NO: 2181344 - RNA, 19 nt, Artificial Sequence
  Description of Artificial Sequence: Synthetic oligonucleotide
gcgagucuugaucacugug

SEQ ID NO: 2181345 - RNA, 19 nt, Artificial Sequence
  Description of Artificial Sequence: Synthetic oligonucleotide
ugcgaggcucugcggcucc

SEQ ID NO: 2181346 - RNA, 19 nt, Artificial Sequence
  Description of Artificial Sequence: Synthetic oligonucleotide
uuucugugcggaccaccuu

SEQ ID NO: 2181347 - RNA, 19 nt, Artificial Sequence
  Description of Artificial Sequence: Synthetic oligonucleotide
cguccaacuggucugugcc

SEQ ID NO: 2181348 - RNA, 19 nt, Artificial Sequence
  Description of Artificial Sequence: Synthetic oligonucleotide
gacgcucucauagcuguaa

SEQ ID NO: 2181349 - RNA, 19 nt, Artificial Sequence
  Description of Artificial Sequence: Synthetic oligonucleotide
gcagcugccuggccaaucc

SEQ ID NO: 2181350 - RNA, 19 nt, Artificial Sequence
  Description of Artificial Sequence: Synthetic oligonucleotide
gugaugggugacaugcaga

SEQ ID NO: 2181351 - RNA, 19 nt, Artificial Sequence
  Description of Artificial Sequence: Synthetic oligonucleotide
cacgccuggaccguagguc

SEQ ID NO: 2181352 - RNA, 19 nt, Artificial Sequence
  Description of Artificial Sequence: Synthetic oligonucleotide
acacgccuggaccguaggu

SEQ ID NO: 2181353 - RNA, 19 nt, Artificial Sequence
  Description of Artificial Sequence: Synthetic oligonucleotide
caugagcgucuccaccgug

SEQ ID NO: 2181354 - RNA, 19 nt, Artificial Sequence
  Description of Artificial Sequence: Synthetic oligonucleotide
ucccacucucauagcgagu

SEQ ID NO: 2181355 - RNA, 19 nt, Artificial Sequence
  Description of Artificial Sequence: Synthetic oligonucleotide
uggagccgcagaggaaagc

SEQ ID NO: 2181356 - RNA, 19 nt, Artificial Sequence
  Description of Artificial Sequence: Synthetic oligonucleotide
ggagagucgcugucaggcc

SEQ ID NO: 2181357 - RNA, 19 nt, Artificial Sequence
  Description of Artificial Sequence: Synthetic oligonucleotide
gccaucagaguucuacgga

SEQ ID NO: 2181358 - RNA, 19 nt, Artificial Sequence
  Description of Artificial Sequence: Synthetic oligonucleotide
gagcgugagcccaugccca

SEQ ID NO: 2181359 - RNA, 19 nt, Artificial Sequence
  Description of Artificial Sequence: Synthetic oligonucleotide
ggaccguaggucugagggc

SEQ ID NO: 2181360 - RNA, 19 nt, Artificial Sequence
  Description of Artificial Sequence: Synthetic oligonucleotide
ucucgaucacggggacgcg

SEQ ID NO: 2181361 - RNA, 19 nt, Artificial Sequence
  Description of Artificial Sequence: Synthetic oligonucleotide
gugccucggagcacugugg

SEQ ID NO: 2181362 - RNA, 19 nt, Artificial Sequence
  Description of Artificial Sequence: Synthetic oligonucleotide
caacuggucugugccucgg

SEQ ID NO: 2181363 - RNA, 19 nt, Artificial Sequence
  Description of Artificial Sequence: Synthetic oligonucleotide
gcaauagaugcuccucaga

SEQ ID NO: 2181364 - RNA, 19 nt, Artificial Sequence
  Description of Artificial Sequence: Synthetic oligonucleotide
cagcaucccgacacgccug

SEQ ID NO: 2181365 - RNA, 19 nt, Artificial Sequence
  Description of Artificial Sequence: Synthetic oligonucleotide
uggcagccaucagaguucu

SEQ ID NO: 2181366 - RNA, 19 nt, Artificial Sequence
  Description of Artificial Sequence: Synthetic oligonucleotide
ugcagacuccugcgacaga

SEQ ID NO: 2181367 - RNA, 19 nt, Artificial Sequence
  Description of Artificial Sequence: Synthetic oligonucleotide
aagaggccccgguggcccu

SEQ ID NO: 2181368 - RNA, 19 nt, Artificial Sequence
  Description of Artificial Sequence: Synthetic oligonucleotide
ggggacgcgagcccggccc

SEQ ID NO: 2181369 - RNA, 19 nt, Artificial Sequence
  Description of Artificial Sequence: Synthetic oligonucleotide
cagcgaagccagaacgcca

SEQ ID NO: 2181370 - RNA, 19 nt, Artificial Sequence
  Description of Artificial Sequence: Synthetic oligonucleotide
accucacaauggaaggaga

SEQ ID NO: 2181371 - RNA, 19 nt, Artificial Sequence
  Description of Artificial Sequence: Synthetic oligonucleotide
gacagagcgugagcccaug

SEQ ID NO: 2181372 - RNA, 19 nt, Artificial Sequence
  Description of Artificial Sequence: Synthetic oligonucleotide
cucgcaagaaauacugcuu

SEQ ID NO: 2181373 - RNA, 19 nt, Artificial Sequence
  Description of Artificial Sequence: Synthetic oligonucleotide
ggugacaugcagacuccug

SEQ ID NO: 2181374 - RNA, 19 nt, Artificial Sequence
  Description of Artificial Sequence: Synthetic oligonucleotide
ucacgucugcagguugagu

SEQ ID NO: 2181375 - RNA, 19 nt, Artificial Sequence
  Description of Artificial Sequence: Synthetic oligonucleotide
cacugugguuuuggucugg

SEQ ID NO: 2181376 - RNA, 19 nt, Artificial Sequence
  Description of Artificial Sequence: Synthetic oligonucleotide
ccagcgaagccagaacgcc

SEQ ID NO: 2181377 - RNA, 19 nt, Artificial Sequence
  Description of Artificial Sequence: Synthetic oligonucleotide
gguaggaggauggccucgc

SEQ ID NO: 2181378 - RNA, 19 nt, Artificial Sequence
  Description of Artificial Sequence: Synthetic oligonucleotide
agggugcaucacgaaggag

SEQ ID NO: 2181379 - RNA, 19 nt, Artificial Sequence
  Description of Artificial Sequence: Synthetic oligonucleotide
cauagcuguaagucccacu

SEQ ID NO: 2181380 - RNA, 19 nt, Artificial Sequence
  Description of Artificial Sequence: Synthetic oligonucleotide
ggauguaacaugagcgucu

SEQ ID NO: 2181381 - RNA, 19 nt, Artificial Sequence
  Description of Artificial Sequence: Synthetic oligonucleotide
agcgcgccuucucgaucac

SEQ ID NO: 2181382 - RNA, 19 nt, Artificial Sequence
  Description of Artificial Sequence: Synthetic oligonucleotide
gagcccugaaaagggugca

SEQ ID NO: 2181383 - RNA, 19 nt, Artificial Sequence
  Description of Artificial Sequence: Synthetic oligonucleotide
ccaacuggucugugccucg

SEQ ID NO: 2181384 - RNA, 19 nt, Artificial Sequence
  Description of Artificial Sequence: Synthetic oligonucleotide
uccacguccugcggcggca

SEQ ID NO: 2181385 - RNA, 19 nt, Artificial Sequence
  Description of Artificial Sequence: Synthetic oligonucleotide
cagguugagucaccagcga

SEQ ID NO: 2181386 - RNA, 19 nt, Artificial Sequence
  Description of Artificial Sequence: Synthetic oligonucleotide
cuugaucacugugaugggu

SEQ ID NO: 2181387 - RNA, 19 nt, Artificial Sequence
  Description of Artificial Sequence: Synthetic oligonucleotide
gcaucacgaaggagagucg

SEQ ID NO: 2181388 - RNA, 19 nt, Artificial Sequence
  Description of Artificial Sequence: Synthetic oligonucleotide
auggagccgcagaggaaag

SEQ ID NO: 2181389 - RNA, 19 nt, Artificial Sequence
  Description of Artificial Sequence: Synthetic oligonucleotide
ugaccgacuccagggcggu

SEQ ID NO: 2181390 - RNA, 19 nt, Artificial Sequence
  Description of Artificial Sequence: Synthetic oligonucleotide
acggggacgcgagcccggc

SEQ ID NO: 2181391 - RNA, 19 nt, Artificial Sequence
  Description of Artificial Sequence: Synthetic oligonucleotide
ucugcggcuccgcgcucac

SEQ ID NO: 2181392 - RNA, 19 nt, Artificial Sequence
  Description of Artificial Sequence: Synthetic oligonucleotide
guucuacggagggcccggg

SEQ ID NO: 2181393 - RNA, 19 nt, Artificial Sequence
  Description of Artificial Sequence: Synthetic oligonucleotide
ccucgcaagaaauacugcu

SEQ ID NO: 2181394 - RNA, 19 nt, Artificial Sequence
  Description of Artificial Sequence: Synthetic oligonucleotide
ucccacugauggagccgca

SEQ ID NO: 2181395 - RNA, 19 nt, Artificial Sequence
  Description of Artificial Sequence: Synthetic oligonucleotide
ccugcgacagagcgugagc

SEQ ID NO: 2181396 - RNA, 19 nt, Artificial Sequence
  Description of Artificial Sequence: Synthetic oligonucleotide
uacggagggcccggggaac

SEQ ID NO: 2181397 - RNA, 19 nt, Artificial Sequence
  Description of Artificial Sequence: Synthetic oligonucleotide
ccaugaaagaagccacgca

SEQ ID NO: 2181398 - RNA, 19 nt, Artificial Sequence
  Description of Artificial Sequence: Synthetic oligonucleotide
ggucuugaggagauccaga

SEQ ID NO: 2181399 - RNA, 19 nt, Artificial Sequence
  Description of Artificial Sequence: Synthetic oligonucleotide
cccugaaaagggugcauca

SEQ ID NO: 2181400 - RNA, 19 nt, Artificial Sequence
  Description of Artificial Sequence: Synthetic oligonucleotide
gacgcgagcccggccccgg

SEQ ID NO: 2181401 - RNA, 19 nt, Artificial Sequence
  Description of Artificial Sequence: Synthetic oligonucleotide
acgcgagcccggccccggc

SEQ ID NO: 2181402 - RNA, 19 nt, Artificial Sequence
  Description of Artificial Sequence: Synthetic oligonucleotide
cuacggagggcccggggaa

SEQ ID NO: 2181403 - RNA, 19 nt, Artificial Sequence
  Description of Artificial Sequence: Synthetic oligonucleotide
cuguaagucccacucucau

SEQ ID NO: 2181404 - RNA, 19 nt, Artificial Sequence
  Description of Artificial Sequence: Synthetic oligonucleotide
agccgcagaggaaagccuu

SEQ ID NO: 2181405 - RNA, 19 nt, Artificial Sequence
  Description of Artificial Sequence: Synthetic oligonucleotide
guaggaggauggccucgca

SEQ ID NO: 2181406 - RNA, 19 nt, Artificial Sequence
  Description of Artificial Sequence: Synthetic oligonucleotide
caccagggacacaccucac

SEQ ID NO: 2181407 - RNA, 19 nt, Artificial Sequence
  Description of Artificial Sequence: Synthetic oligonucleotide
cugagggcugcagggucug

SEQ ID NO: 2181408 - RNA, 19 nt, Artificial Sequence
  Description of Artificial Sequence: Synthetic oligonucleotide
cacgaaggagagucgcugu

SEQ ID NO: 2181409 - RNA, 19 nt, Artificial Sequence
  Description of Artificial Sequence: Synthetic oligonucleotide
guagagcccugaaaagggu

SEQ ID NO: 2181410 - RNA, 19 nt, Artificial Sequence
  Description of Artificial Sequence: Synthetic oligonucleotide
gcuguaagucccacucuca

SEQ ID NO: 2181411 - RNA, 19 nt, Artificial Sequence
  Description of Artificial Sequence: Synthetic oligonucleotide
gaugggugacaugcagacu

SEQ ID NO: 2181412 - RNA, 19 nt, Artificial Sequence
  Description of Artificial Sequence: Synthetic oligonucleotide
cucgaucacggggacgcga

SEQ ID NO: 2181413 - RNA, 19 nt, Artificial Sequence
  Description of Artificial Sequence: Synthetic oligonucleotide
ggcccagaagacuuucugu

SEQ ID NO: 2181414 - RNA, 19 nt, Artificial Sequence
  Description of Artificial Sequence: Synthetic oligonucleotide
ucggagcacugugguuuug

SEQ ID NO: 2181415 - RNA, 19 nt, Artificial Sequence
  Description of Artificial Sequence: Synthetic oligonucleotide
ggcgguaggaggauggccu

SEQ ID NO: 2181416 - RNA, 19 nt, Artificial Sequence
  Description of Artificial Sequence: Synthetic oligonucleotide
uccagggcgguaggaggau

SEQ ID NO: 2181417 - RNA, 19 nt, Artificial Sequence
  Description of Artificial Sequence: Synthetic oligonucleotide
gcgccuucucgaucacggg

SEQ ID NO: 2181418 - RNA, 19 nt, Artificial Sequence
  Description of Artificial Sequence: Synthetic oligonucleotide
gcggaccaccuucaagaac

SEQ ID NO: 2181419 - RNA, 19 nt, Artificial Sequence
  Description of Artificial Sequence: Synthetic oligonucleotide
cagagugccaaaguagauu

SEQ ID NO: 2181420 - RNA, 19 nt, Artificial Sequence
  Description of Artificial Sequence: Synthetic oligonucleotide
ggggaacacugccaugaaa

SEQ ID NO: 2181421 - RNA, 19 nt, Artificial Sequence
  Description of Artificial Sequence: Synthetic oligonucleotide
gaugcuccucagagcugca

SEQ ID NO: 2181422 - RNA, 19 nt, Artificial Sequence
  Description of Artificial Sequence: Synthetic oligonucleotide
agcccugaaaagggugcau

SEQ ID NO: 2181423 - RNA, 19 nt, Artificial Sequence
  Description of Artificial Sequence: Synthetic oligonucleotide
gccucgcaagaaauacugc

SEQ ID NO: 2181424 - RNA, 19 nt, Artificial Sequence
  Description of Artificial Sequence: Synthetic oligonucleotide
gaggccccgguggcccucg

SEQ ID NO: 2181425 - RNA, 19 nt, Artificial Sequence
  Description of Artificial Sequence: Synthetic oligonucleotide
ggcggcagcagcgcagagc

SEQ ID NO: 2181426 - RNA, 19 nt, Artificial Sequence
  Description of Artificial Sequence: Synthetic oligonucleotide
gagcugcauagacgcucuc

SEQ ID NO: 2181427 - RNA, 19 nt, Artificial Sequence
  Description of Artificial Sequence: Synthetic oligonucleotide
gcgacagagcgugagccca

SEQ ID NO: 2181428 - RNA, 19 nt, Artificial Sequence
  Description of Artificial Sequence: Synthetic oligonucleotide
gucugugccucggagcacu

SEQ ID NO: 2181429 - RNA, 19 nt, Artificial Sequence
  Description of Artificial Sequence: Synthetic oligonucleotide
gccccgguggcccucgcug

SEQ ID NO: 2181430 - RNA, 19 nt, Artificial Sequence
  Description of Artificial Sequence: Synthetic oligonucleotide
ggccccggcgacugcgagg

SEQ ID NO: 2181431 - RNA, 19 nt, Artificial Sequence
  Description of Artificial Sequence: Synthetic oligonucleotide
cgcgcucacgcccaauccc

SEQ ID NO: 2181432 - RNA, 19 nt, Artificial Sequence
  Description of Artificial Sequence: Synthetic oligonucleotide
gcccugaaaagggugcauc

SEQ ID NO: 2181433 - RNA, 19 nt, Artificial Sequence
  Description of Artificial Sequence: Synthetic oligonucleotide
acggagggcccggggaaca

SEQ ID NO: 2181434 - RNA, 19 nt, Artificial Sequence
  Description of Artificial Sequence: Synthetic oligonucleotide
cuccucagagcugcauaga

SEQ ID NO: 2181435 - RNA, 19 nt, Artificial Sequence
  Description of Artificial Sequence: Synthetic oligonucleotide
cacguccugcggcggcagc

SEQ ID NO: 2181436 - RNA, 19 nt, Artificial Sequence
  Description of Artificial Sequence: Synthetic oligonucleotide
ccuucucgaucacggggac

SEQ ID NO: 2181437 - RNA, 19 nt, Artificial Sequence
  Description of Artificial Sequence: Synthetic oligonucleotide
ccggggaacacugccauga

SEQ ID NO: 2181438 - RNA, 19 nt, Artificial Sequence
  Description of Artificial Sequence: Synthetic oligonucleotide
gacuccugcgacagagcgu

SEQ ID NO: 2181439 - RNA, 19 nt, Artificial Sequence
  Description of Artificial Sequence: Synthetic oligonucleotide
accguaggucugagggcug

SEQ ID NO: 2181440 - RNA, 19 nt, Artificial Sequence
  Description of Artificial Sequence: Synthetic oligonucleotide
ccggauguaacaugagcgu

SEQ ID NO: 2181441 - RNA, 19 nt, Artificial Sequence
  Description of Artificial Sequence: Synthetic oligonucleotide
caggggcaucagagccacg

SEQ ID NO: 2181442 - RNA, 19 nt, Artificial Sequence
  Description of Artificial Sequence: Synthetic oligonucleotide
ggccucugaagaggccccg

SEQ ID NO: 2181443 - RNA, 19 nt, Artificial Sequence
  Description of Artificial Sequence: Synthetic oligonucleotide
agcccggccccggcgacug

SEQ ID NO: 2181444 - RNA, 19 nt, Artificial Sequence
  Description of Artificial Sequence: Synthetic oligonucleotide
gcccucgcugcaauagaug

SEQ ID NO: 2181445 - RNA, 19 nt, Artificial Sequence
  Description of Artificial Sequence: Synthetic oligonucleotide
gccgcagaggaaagccuug

SEQ ID NO: 2181446 - RNA, 19 nt, Artificial Sequence
  Description of Artificial Sequence: Synthetic oligonucleotide
cagcgcagagcgcgccuuc

SEQ ID NO: 2181447 - RNA, 19 nt, Artificial Sequence
  Description of Artificial Sequence: Synthetic oligonucleotide
ccgacuccagggcgguagg

SEQ ID NO: 2181448 - RNA, 19 nt, Artificial Sequence
  Description of Artificial Sequence: Synthetic oligonucleotide
gcgguaggaggauggccuc

SEQ ID NO: 2181449 - RNA, 19 nt, Artificial Sequence
  Description of Artificial Sequence: Synthetic oligonucleotide
ccgcgcucacgcccaaucc

SEQ ID NO: 2181450 - RNA, 19 nt, Artificial Sequence
  Description of Artificial Sequence: Synthetic oligonucleotide
cccacaccagggacacacc

SEQ ID NO: 2181451 - RNA, 19 nt, Artificial Sequence
  Description of Artificial Sequence: Synthetic oligonucleotide
gccacgcaggccgugguuc

SEQ ID NO: 2181452 - RNA, 19 nt, Artificial Sequence
  Description of Artificial Sequence: Synthetic oligonucleotide
cugugguuuuggucuggcu

SEQ ID NO: 2181453 - RNA, 19 nt, Artificial Sequence
  Description of Artificial Sequence: Synthetic oligonucleotide
ggaccaccuucaagaacac

SEQ ID NO: 2181454 - RNA, 19 nt, Artificial Sequence
  Description of Artificial Sequence: Synthetic oligonucleotide
gggacgcgagcccggcccc

SEQ ID NO: 2181455 - RNA, 19 nt, Artificial Sequence
  Description of Artificial Sequence: Synthetic oligonucleotide
aggccccgguggcccucgc

SEQ ID NO: 2181456 - RNA, 19 nt, Artificial Sequence
  Description of Artificial Sequence: Synthetic oligonucleotide
ggcgacugcgaggcucugc

SEQ ID NO: 2181457 - RNA, 19 nt, Artificial Sequence
  Description of Artificial Sequence: Synthetic oligonucleotide
gcugcauaugagucuugau

SEQ ID NO: 2181458 - RNA, 19 nt, Artificial Sequence
  Description of Artificial Sequence: Synthetic oligonucleotide
cucugcggcuccgcgcuca

SEQ ID NO: 2181459 - RNA, 19 nt, Artificial Sequence
  Description of Artificial Sequence: Synthetic oligonucleotide
gcgugagcccaugcccagg

SEQ ID NO: 2181460 - RNA, 19 nt, Artificial Sequence
  Description of Artificial Sequence: Synthetic oligonucleotide
ccguaggucugagggcugc

SEQ ID NO: 2181461 - RNA, 19 nt, Artificial Sequence
  Description of Artificial Sequence: Synthetic oligonucleotide
ggguggaagcaggucccac

SEQ ID NO: 2181462 - RNA, 19 nt, Artificial Sequence
  Description of Artificial Sequence: Synthetic oligonucleotide
agucaccagcgaagccaga

SEQ ID NO: 2181463 - RNA, 19 nt, Artificial Sequence
  Description of Artificial Sequence: Synthetic oligonucleotide
ggauggccucgcaagaaau

SEQ ID NO: 2181464 - RNA, 19 nt, Artificial Sequence
  Description of Artificial Sequence: Synthetic oligonucleotide
ccccgguggcccucgcugc

SEQ ID NO: 2181465 - RNA, 19 nt, Artificial Sequence
  Description of Artificial Sequence: Synthetic oligonucleotide
cugcggcuccgcgcucacg

SEQ ID NO: 2181466 - RNA, 19 nt, Artificial Sequence
  Description of Artificial Sequence: Synthetic oligonucleotide
cgucugcagguugagucac

SEQ ID NO: 2181467 - RNA, 19 nt, Artificial Sequence
  Description of Artificial Sequence: Synthetic oligonucleotide
gguuuuggucuggcuguaa

SEQ ID NO: 2181468 - RNA, 19 nt, Artificial Sequence
  Description of Artificial Sequence: Synthetic oligonucleotide
cugugcggaccaccuucaa

SEQ ID NO: 2181469 - RNA, 19 nt, Artificial Sequence
  Description of Artificial Sequence: Synthetic oligonucleotide
cgaaggagagucgcuguca

SEQ ID NO: 2181470 - RNA, 19 nt, Artificial Sequence
  Description of Artificial Sequence: Synthetic oligonucleotide
cagagcgcgccuucucgau

SEQ ID NO: 2181471 - RNA, 19 nt, Artificial Sequence
  Description of Artificial Sequence: Synthetic oligonucleotide
ggacgcgagcccggccccg

SEQ ID NO: 2181472 - RNA, 19 nt, Artificial Sequence
  Description of Artificial Sequence: Synthetic oligonucleotide
cgacugcgaggcucugcgg

SEQ ID NO: 2181473 - RNA, 19 nt, Artificial Sequence
  Description of Artificial Sequence: Synthetic oligonucleotide
gcgcgccuucucgaucacg

SEQ ID NO: 2181474 - RNA, 19 nt, Artificial Sequence
  Description of Artificial Sequence: Synthetic oligonucleotide
ccuggaccguaggucugag

SEQ ID NO: 2181475 - RNA, 19 nt, Artificial Sequence
  Description of Artificial Sequence: Synthetic oligonucleotide
cucggagcacugugguuuu

SEQ ID NO: 2181476 - RNA, 19 nt, Artificial Sequence
  Description of Artificial Sequence: Synthetic oligonucleotide
cgugagcccaugcccagga

SEQ ID NO: 2181477 - RNA, 19 nt, Artificial Sequence
  Description of Artificial Sequence: Synthetic oligonucleotide
ccacaccagggacacaccu

SEQ ID NO: 2181478 - RNA, 19 nt, Artificial Sequence
  Description of Artificial Sequence: Synthetic oligonucleotide
cccggcgacugcgaggcuc

SEQ ID NO: 2181479 - RNA, 19 nt, Artificial Sequence
  Description of Artificial Sequence: Synthetic oligonucleotide
ccuggccaauccacugaga

SEQ ID NO: 2181480 - RNA, 19 nt, Artificial Sequence
  Description of Artificial Sequence: Synthetic oligonucleotide
cccggggaacacugccaug

SEQ ID NO: 2181481 - RNA, 19 nt, Artificial Sequence
  Description of Artificial Sequence: Synthetic oligonucleotide
gccuggaccguaggucuga

SEQ ID NO: 2181482 - RNA, 19 nt, Artificial Sequence
  Description of Artificial Sequence: Synthetic oligonucleotide
cugcggcggcagcagcgca

SEQ ID NO: 2181483 - RNA, 19 nt, Artificial Sequence
  Description of Artificial Sequence: Synthetic oligonucleotide
ccucggagcacugugguuu

SEQ ID NO: 2181484 - RNA, 19 nt, Artificial Sequence
  Description of Artificial Sequence: Synthetic oligonucleotide
cgaucacggggacgcgagc

SEQ ID NO: 2181485 - RNA, 19 nt, Artificial Sequence
  Description of Artificial Sequence: Synthetic oligonucleotide
ggcuccgcgcucacgccca

SEQ ID NO: 2181486 - RNA, 19 nt, Artificial Sequence
  Description of Artificial Sequence: Synthetic oligonucleotide
gguggcccucgcugcaaua

SEQ ID NO: 2181487 - RNA, 19 nt, Artificial Sequence
  Description of Artificial Sequence: Synthetic oligonucleotide
gcgcagagcgcgccuucuc

SEQ ID NO: 2181488 - RNA, 19 nt, Artificial Sequence
  Description of Artificial Sequence: Synthetic oligonucleotide
cuccugcgacagagcguga

SEQ ID NO: 2181489 - RNA, 19 nt, Artificial Sequence
  Description of Artificial Sequence: Synthetic oligonucleotide
ccagggcgguaggaggaug

SEQ ID NO: 2181490 - RNA, 19 nt, Artificial Sequence
  Description of Artificial Sequence: Synthetic oligonucleotide
gcgagcccggccccggcga

SEQ ID NO: 2181491 - RNA, 19 nt, Artificial Sequence
  Description of Artificial Sequence: Synthetic oligonucleotide
gcgaggcucugcggcuccg

SEQ ID NO: 2181492 - RNA, 19 nt, Artificial Sequence
  Description of Artificial Sequence: Synthetic oligonucleotide
cggcuccgcgcucacgccc

SEQ ID NO: 2181493 - RNA, 19 nt, Artificial Sequence
  Description of Artificial Sequence: Synthetic oligonucleotide
ccgcagaggaaagccuuga

SEQ ID NO: 2181494 - RNA, 19 nt, Artificial Sequence
  Description of Artificial Sequence: Synthetic oligonucleotide
gcccggggaacacugccau

SEQ ID NO: 2181495 - RNA, 19 nt, Artificial Sequence
  Description of Artificial Sequence: Synthetic oligonucleotide
ggcccucgcugcaauagau

SEQ ID NO: 2181496 - RNA, 19 nt, Artificial Sequence
  Description of Artificial Sequence: Synthetic oligonucleotide
gcaggccgugguucuugaa

SEQ ID NO: 2181497 - RNA, 19 nt, Artificial Sequence
  Description of Artificial Sequence: Synthetic oligonucleotide
cgcucucauagcuguaagu

SEQ ID NO: 2181498 - RNA, 19 nt, Artificial Sequence
  Description of Artificial Sequence: Synthetic oligonucleotide
cgcgagcccggccccggcg

SEQ ID NO: 2181499 - RNA, 19 nt, Artificial Sequence
  Description of Artificial Sequence: Synthetic oligonucleotide
gcggcggcagcagcgcaga

SEQ ID NO: 2181500 - RNA, 19 nt, Artificial Sequence
  Description of Artificial Sequence: Synthetic oligonucleotide
ggcgggucuugaggagauc

SEQ ID NO: 2181501 - RNA, 19 nt, Artificial Sequence
  Description of Artificial Sequence: Synthetic oligonucleotide
cugugccucggagcacugu

SEQ ID NO: 2181502 - RNA, 19 nt, Artificial Sequence
  Description of Artificial Sequence: Synthetic oligonucleotide
gaccgacuccagggcggua

SEQ ID NO: 2181503 - RNA, 19 nt, Artificial Sequence
  Description of Artificial Sequence: Synthetic oligonucleotide
cccgguggcccucgcugca

SEQ ID NO: 2181504 - RNA, 19 nt, Artificial Sequence
  Description of Artificial Sequence: Synthetic oligonucleotide
gcccauccuggccaucauu

SEQ ID NO: 2181505 - RNA, 19 nt, Artificial Sequence
  Description of Artificial Sequence: Synthetic oligonucleotide
ccacucucauagcgagucu

SEQ ID NO: 2181506 - RNA, 19 nt, Artificial Sequence
  Description of Artificial Sequence: Synthetic oligonucleotide
ccagaacgccagccaauau

SEQ ID NO: 2181507 - RNA, 19 nt, Artificial Sequence
  Description of Artificial Sequence: Synthetic oligonucleotide
cgcaggccgugguucuuga

SEQ ID NO: 2181508 - RNA, 19 nt, Artificial Sequence
  Description of Artificial Sequence: Synthetic oligonucleotide
gcaucccgacacgccugga

SEQ ID NO: 2181509 - RNA, 19 nt, Artificial Sequence
  Description of Artificial Sequence: Synthetic oligonucleotide
gccucggagcacugugguu

SEQ ID NO: 2181510 - RNA, 19 nt, Artificial Sequence
  Description of Artificial Sequence: Synthetic oligonucleotide
cguaggucugagggcugca

SEQ ID NO: 2181511 - RNA, 19 nt, Artificial Sequence
  Description of Artificial Sequence: Synthetic oligonucleotide
cggggacgcgagcccggcc

SEQ ID NO: 2181512 - RNA, 19 nt, Artificial Sequence
  Description of Artificial Sequence: Synthetic oligonucleotide
cggggaacacugccaugaa

SEQ ID NO: 2181513 - RNA, 19 nt, Artificial Sequence
  Description of Artificial Sequence: Synthetic oligonucleotide
cggccccggcgacugcgag

SEQ ID NO: 2181514 - RNA, 19 nt, Artificial Sequence
  Description of Artificial Sequence: Synthetic oligonucleotide
cgcagaggaaagccuugau

SEQ ID NO: 2181515 - RNA, 19 nt, Artificial Sequence
  Description of Artificial Sequence: Synthetic oligonucleotide
cgacuccagggcgguagga

SEQ ID NO: 2181516 - RNA, 19 nt, Artificial Sequence
  Description of Artificial Sequence: Synthetic oligonucleotide
cacgcaggccgugguucuu

SEQ ID NO: 2181517 - RNA, 19 nt, Artificial Sequence
  Description of Artificial Sequence: Synthetic oligonucleotide
cggcggcagcagcgcagag

SEQ ID NO: 2181518 - RNA, 19 nt, Artificial Sequence
  Description of Artificial Sequence: Synthetic oligonucleotide
cgacagagcgugagcccau

SEQ ID NO: 2181519 - RNA, 19 nt, Artificial Sequence
  Description of Artificial Sequence: Synthetic oligonucleotide
cccgacacgccuggaccgu

SEQ ID NO: 2181520 - RNA, 19 nt, Artificial Sequence
  Description of Artificial Sequence: Synthetic oligonucleotide
ccgacacgccuggaccgua

SEQ ID NO: 2181521 - RNA, 19 nt, Artificial Sequence
  Description of Artificial Sequence: Synthetic oligonucleotide
ccgguggcccucgcugcaa

SEQ ID NO: 2181522 - RNA, 19 nt, Artificial Sequence
  Description of Artificial Sequence: Synthetic oligonucleotide
cuccgcgcucacgcccaau

SEQ ID NO: 2181523 - RNA, 19 nt, Artificial Sequence
  Description of Artificial Sequence: Synthetic oligonucleotide
gggcagcugccuggccaau

SEQ ID NO: 2181524 - RNA, 19 nt, Artificial Sequence
  Description of Artificial Sequence: Synthetic oligonucleotide
cgguggcccucgcugcaau

SEQ ID NO: 2181525 - RNA, 19 nt, Artificial Sequence
  Description of Artificial Sequence: Synthetic oligonucleotide
uuuuaauuguucuuggagg

SEQ ID NO: 2181526 - RNA, 19 nt, Artificial Sequence
  Description of Artificial Sequence: Synthetic oligonucleotide
ucauaguaaaguaugaggc

SEQ ID NO: 2181527 - RNA, 19 nt, Artificial Sequence
  Description of Artificial Sequence: Synthetic oligonucleotide
ucuauauuggcuccgaaag

SEQ ID NO: 2181528 - RNA, 19 nt, Artificial Sequence
  Description of Artificial Sequence: Synthetic oligonucleotide
agaaacguugauaugaucc

SEQ ID NO: 2181529 - RNA, 19 nt, Artificial Sequence
  Description of Artificial Sequence: Synthetic oligonucleotide
aauucaucgacucucauuu

SEQ ID NO: 2181530 - RNA, 19 nt, Artificial Sequence
  Description of Artificial Sequence: Synthetic oligonucleotide
ucugucauaguaaaguaug

SEQ ID NO: 2181531 - RNA, 19 nt, Artificial Sequence
  Description of Artificial Sequence: Synthetic oligonucleotide
ucuaguuuaaagaacuggu

SEQ ID NO: 2181532 - RNA, 19 nt, Artificial Sequence
  Description of Artificial Sequence: Synthetic oligonucleotide
uaucuuagaguccagcugc

SEQ ID NO: 2181533 - RNA, 19 nt, Artificial Sequence
  Description of Artificial Sequence: Synthetic oligonucleotide
ugaagaaacguugauauga

SEQ ID NO: 2181534 - RNA, 19 nt, Artificial Sequence
  Description of Artificial Sequence: Synthetic oligonucleotide
ucuuggaggacuuuuagca

SEQ ID NO: 2181535 - RNA, 19 nt, Artificial Sequence
  Description of Artificial Sequence: Synthetic oligonucleotide
uauauuggcuccgaaaggg

SEQ ID NO: 2181536 - RNA, 19 nt, Artificial Sequence
  Description of Artificial Sequence: Synthetic oligonucleotide
uaguuuaaagaacugguac

SEQ ID NO: 2181537 - RNA, 19 nt, Artificial Sequence
  Description of Artificial Sequence: Synthetic oligonucleotide
uaugaucccuauuagcagg

SEQ ID NO: 2181538 - RNA, 19 nt, Artificial Sequence
  Description of Artificial Sequence: Synthetic oligonucleotide
uuuaauuguucuuggagga

SEQ ID NO: 2181539 - RNA, 19 nt, Artificial Sequence
  Description of Artificial Sequence: Synthetic oligonucleotide
aaaguaugaggcuucgucu

SEQ ID NO: 2181540 - RNA, 19 nt, Artificial Sequence
  Description of Artificial Sequence: Synthetic oligonucleotide
agugaauuccuguuugaac

SEQ ID NO: 2181541 - RNA, 19 nt, Artificial Sequence
  Description of Artificial Sequence: Synthetic oligonucleotide
uaaaguaugaggcuucguc

SEQ ID NO: 2181542 - RNA, 19 nt, Artificial Sequence
  Description of Artificial Sequence: Synthetic oligonucleotide
uuaaagaacugguacacaa

SEQ ID NO: 2181543 - RNA, 19 nt, Artificial Sequence
  Description of Artificial Sequence: Synthetic oligonucleotide
ucuugguuaaccaaugcaa

SEQ ID NO: 2181544 - RNA, 19 nt, Artificial Sequence
  Description of Artificial Sequence: Synthetic oligonucleotide
uauucguagggacaggucu

SEQ ID NO: 2181545 - RNA, 19 nt, Artificial Sequence
  Description of Artificial Sequence: Synthetic oligonucleotide
gauaugaucccuauuagca

SEQ ID NO: 2181546 - RNA, 19 nt, Artificial Sequence
  Description of Artificial Sequence: Synthetic oligonucleotide
agcaauugcugcugcaugc

SEQ ID NO: 2181547 - RNA, 19 nt, Artificial Sequence
  Description of Artificial Sequence: Synthetic oligonucleotide
aguuuaaagaacugguaca

SEQ ID NO: 2181548 - RNA, 19 nt, Artificial Sequence
  Description of Artificial Sequence: Synthetic oligonucleotide
uccacucacaagaaaacgc

SEQ ID NO: 2181549 - RNA, 19 nt, Artificial Sequence
  Description of Artificial Sequence: Synthetic oligonucleotide
ucuucuguucggaagagcu

SEQ ID NO: 2181550 - RNA, 19 nt, Artificial Sequence
  Description of Artificial Sequence: Synthetic oligonucleotide
auuggcagauaucuuagag

SEQ ID NO: 2181551 - RNA, 19 nt, Artificial Sequence
  Description of Artificial Sequence: Synthetic oligonucleotide
ucgucuaguuuaaagaacu

SEQ ID NO: 2181552 - RNA, 19 nt, Artificial Sequence
  Description of Artificial Sequence: Synthetic oligonucleotide
gaaacguugauaugauccc

SEQ ID NO: 2181553 - RNA, 19 nt, Artificial Sequence
  Description of Artificial Sequence: Synthetic oligonucleotide
ucuuugagggcauaggccu

SEQ ID NO: 2181554 - RNA, 19 nt, Artificial Sequence
  Description of Artificial Sequence: Synthetic oligonucleotide
cacaauuacauuuccacuc

SEQ ID NO: 2181555 - RNA, 19 nt, Artificial Sequence
  Description of Artificial Sequence: Synthetic oligonucleotide
uugauaugaucccuauuag

SEQ ID NO: 2181556 - RNA, 19 nt, Artificial Sequence
  Description of Artificial Sequence: Synthetic oligonucleotide
auucgucuccaccaagucc

SEQ ID NO: 2181557 - RNA, 19 nt, Artificial Sequence
  Description of Artificial Sequence: Synthetic oligonucleotide
uccuucucagauuuuaagc

SEQ ID NO: 2181558 - RNA, 19 nt, Artificial Sequence
  Description of Artificial Sequence: Synthetic oligonucleotide
uucgucuccaccaaguccu

SEQ ID NO: 2181559 - RNA, 19 nt, Artificial Sequence
  Description of Artificial Sequence: Synthetic oligonucleotide
uccaccaaguccuuggugc

SEQ ID NO: 2181560 - RNA, 19 nt, Artificial Sequence
  Description of Artificial Sequence: Synthetic oligonucleotide
agguacucuauauuggcuc

SEQ ID NO: 2181561 - RNA, 19 nt, Artificial Sequence
  Description of Artificial Sequence: Synthetic oligonucleotide
uggcagauaucuuagaguc

SEQ ID NO: 2181562 - RNA, 19 nt, Artificial Sequence
  Description of Artificial Sequence: Synthetic oligonucleotide
aaggcacacaacuuccauc

SEQ ID NO: 2181563 - RNA, 19 nt, Artificial Sequence
  Description of Artificial Sequence: Synthetic oligonucleotide
uguuugaacauucgaggca

SEQ ID NO: 2181564 - RNA, 19 nt, Artificial Sequence
  Description of Artificial Sequence: Synthetic oligonucleotide
ugauaugaucccuauuagc

SEQ ID NO: 2181565 - RNA, 19 nt, Artificial Sequence
  Description of Artificial Sequence: Synthetic oligonucleotide
agcacauugauuucauuug

SEQ ID NO: 2181566 - RNA, 19 nt, Artificial Sequence
  Description of Artificial Sequence: Synthetic oligonucleotide
aauuccuguuugaacauuc

SEQ ID NO: 2181567 - RNA, 19 nt, Artificial Sequence
  Description of Artificial Sequence: Synthetic oligonucleotide
uccaauucagacuucuugu

SEQ ID NO: 2181568 - RNA, 19 nt, Artificial Sequence
  Description of Artificial Sequence: Synthetic oligonucleotide
cauugcuugguauucguag

SEQ ID NO: 2181569 - RNA, 19 nt, Artificial Sequence
  Description of Artificial Sequence: Synthetic oligonucleotide
aacaaugccuguuuuggau

SEQ ID NO: 2181570 - RNA, 19 nt, Artificial Sequence
  Description of Artificial Sequence: Synthetic oligonucleotide
ugcauguaugaccacaggu

SEQ ID NO: 2181571 - RNA, 19 nt, Artificial Sequence
  Description of Artificial Sequence: Synthetic oligonucleotide
aagaaacguugauaugauc

SEQ ID NO: 2181572 - RNA, 19 nt, Artificial Sequence
  Description of Artificial Sequence: Synthetic oligonucleotide
agauuuuaagccuuggauu

SEQ ID NO: 2181573 - RNA, 19 nt, Artificial Sequence
  Description of Artificial Sequence: Synthetic oligonucleotide
auaugaucccuauuagcag

SEQ ID NO: 2181574 - RNA, 19 nt, Artificial Sequence
  Description of Artificial Sequence: Synthetic oligonucleotide
cacuguacagcccuggccg

SEQ ID NO: 2181575 - RNA, 19 nt, Artificial Sequence
  Description of Artificial Sequence: Synthetic oligonucleotide
caugguuugcuguaggaac

SEQ ID NO: 2181576 - RNA, 19 nt, Artificial Sequence
  Description of Artificial Sequence: Synthetic oligonucleotide
uuuauuccuucgaaggcac

SEQ ID NO: 2181577 - RNA, 19 nt, Artificial Sequence
  Description of Artificial Sequence: Synthetic oligonucleotide
uccaauguugcucccacac

SEQ ID NO: 2181578 - RNA, 19 nt, Artificial Sequence
  Description of Artificial Sequence: Synthetic oligonucleotide
aaucauugcuugguauucg

SEQ ID NO: 2181579 - RNA, 19 nt, Artificial Sequence
  Description of Artificial Sequence: Synthetic oligonucleotide
cuguuugaacauucgaggc

SEQ ID NO: 2181580 - RNA, 19 nt, Artificial Sequence
  Description of Artificial Sequence: Synthetic oligonucleotide
aaaggguggacaugaagaa

SEQ ID NO: 2181581 - RNA, 19 nt, Artificial Sequence
  Description of Artificial Sequence: Synthetic oligonucleotide
cuugguuaaccaaugcaac

SEQ ID NO: 2181582 - RNA, 19 nt, Artificial Sequence
  Description of Artificial Sequence: Synthetic oligonucleotide
gaaaacgccacagauguca

SEQ ID NO: 2181583 - RNA, 19 nt, Artificial Sequence
  Description of Artificial Sequence: Synthetic oligonucleotide
ugaggcuucgucuaguuua

SEQ ID NO: 2181584 - RNA, 19 nt, Artificial Sequence
  Description of Artificial Sequence: Synthetic oligonucleotide
ugaacaaggcuuugguggc

SEQ ID NO: 2181585 - RNA, 19 nt, Artificial Sequence
  Description of Artificial Sequence: Synthetic oligonucleotide
aggguggacaugaagaaac

SEQ ID NO: 2181586 - RNA, 19 nt, Artificial Sequence
  Description of Artificial Sequence: Synthetic oligonucleotide
cuuagaguccagcugcugc

SEQ ID NO: 2181587 - RNA, 19 nt, Artificial Sequence
  Description of Artificial Sequence: Synthetic oligonucleotide
auucgaggcagccucauca

SEQ ID NO: 2181588 - RNA, 19 nt, Artificial Sequence
  Description of Artificial Sequence: Synthetic oligonucleotide
aacgccacagaugucacug

SEQ ID NO: 2181589 - RNA, 19 nt, Artificial Sequence
  Description of Artificial Sequence: Synthetic oligonucleotide
acaauuacauuuccacuca

SEQ ID NO: 2181590 - RNA, 19 nt, Artificial Sequence
  Description of Artificial Sequence: Synthetic oligonucleotide
guuugaacauucgaggcag

SEQ ID NO: 2181591 - RNA, 19 nt, Artificial Sequence
  Description of Artificial Sequence: Synthetic oligonucleotide
uucgucuaguuuaaagaac

SEQ ID NO: 2181592 - RNA, 19 nt, Artificial Sequence
  Description of Artificial Sequence: Synthetic oligonucleotide
ugacuguggaaucauugcu

SEQ ID NO: 2181593 - RNA, 19 nt, Artificial Sequence
  Description of Artificial Sequence: Synthetic oligonucleotide
cuauauuggcuccgaaagg

SEQ ID NO: 2181594 - RNA, 19 nt, Artificial Sequence
  Description of Artificial Sequence: Synthetic oligonucleotide
ugguuaaccaaugcaacug

SEQ ID NO: 2181595 - RNA, 19 nt, Artificial Sequence
  Description of Artificial Sequence: Synthetic oligonucleotide
uugguuaaccaaugcaacu

SEQ ID NO: 2181596 - RNA, 19 nt, Artificial Sequence
  Description of Artificial Sequence: Synthetic oligonucleotide
uuggcagauaucuuagagu

SEQ ID NO: 2181597 - RNA, 19 nt, Artificial Sequence
  Description of Artificial Sequence: Synthetic oligonucleotide
gaacauucgaggcagccuc

SEQ ID NO: 2181598 - RNA, 19 nt, Artificial Sequence
  Description of Artificial Sequence: Synthetic oligonucleotide
uauuggcuccgaaagggug

SEQ ID NO: 2181599 - RNA, 19 nt, Artificial Sequence
  Description of Artificial Sequence: Synthetic oligonucleotide
acuauuguucucccggucu

SEQ ID NO: 2181600 - RNA, 19 nt, Artificial Sequence
  Description of Artificial Sequence: Synthetic oligonucleotide
cucuuugagggcauaggcc

SEQ ID NO: 2181601 - RNA, 19 nt, Artificial Sequence
  Description of Artificial Sequence: Synthetic oligonucleotide
cuucggacagcuuuguuuc

SEQ ID NO: 2181602 - RNA, 19 nt, Artificial Sequence
  Description of Artificial Sequence: Synthetic oligonucleotide
gguggcuccacacaggucc

SEQ ID NO: 2181603 - RNA, 19 nt, Artificial Sequence
  Description of Artificial Sequence: Synthetic oligonucleotide
ucacaagaaaacgccacag

SEQ ID NO: 2181604 - RNA, 19 nt, Artificial Sequence
  Description of Artificial Sequence: Synthetic oligonucleotide
acacaauuacauuuccacu

SEQ ID NO: 2181605 - RNA, 19 nt, Artificial Sequence
  Description of Artificial Sequence: Synthetic oligonucleotide
uuuucacuauuguucuccc

SEQ ID NO: 2181606 - RNA, 19 nt, Artificial Sequence
  Description of Artificial Sequence: Synthetic oligonucleotide
ugguacacaauuacauuuc

SEQ ID NO: 2181607 - RNA, 19 nt, Artificial Sequence
  Description of Artificial Sequence: Synthetic oligonucleotide
accccaacccuccuacucc

SEQ ID NO: 2181608 - RNA, 19 nt, Artificial Sequence
  Description of Artificial Sequence: Synthetic oligonucleotide
uguaugaccacagguacuc

SEQ ID NO: 2181609 - RNA, 19 nt, Artificial Sequence
  Description of Artificial Sequence: Synthetic oligonucleotide
uuucacuauuguucucccg

SEQ ID NO: 2181610 - RNA, 19 nt, Artificial Sequence
  Description of Artificial Sequence: Synthetic oligonucleotide
aaugcuugugugugagacu

SEQ ID NO: 2181611 - RNA, 19 nt, Artificial Sequence
  Description of Artificial Sequence: Synthetic oligonucleotide
uguuagcacauugauuuca

SEQ ID NO: 2181612 - RNA, 19 nt, Artificial Sequence
  Description of Artificial Sequence: Synthetic oligonucleotide
ccuucucagauuuuaagcc

SEQ ID NO: 2181613 - RNA, 19 nt, Artificial Sequence
  Description of Artificial Sequence: Synthetic oligonucleotide
aaguaugaggcuucgucua

SEQ ID NO: 2181614 - RNA, 19 nt, Artificial Sequence
  Description of Artificial Sequence: Synthetic oligonucleotide
acucacaagaaaacgccac

SEQ ID NO: 2181615 - RNA, 19 nt, Artificial Sequence
  Description of Artificial Sequence: Synthetic oligonucleotide
caugaagaaacguugauau

SEQ ID NO: 2181616 - RNA, 19 nt, Artificial Sequence
  Description of Artificial Sequence: Synthetic oligonucleotide
gagacugcuccucuuuugc

SEQ ID NO: 2181617 - RNA, 19 nt, Artificial Sequence
  Description of Artificial Sequence: Synthetic oligonucleotide
acuuccaucucuuuuccaa

SEQ ID NO: 2181618 - RNA, 19 nt, Artificial Sequence
  Description of Artificial Sequence: Synthetic oligonucleotide
gaucccuauuagcagggcc

SEQ ID NO: 2181619 - RNA, 19 nt, Artificial Sequence
  Description of Artificial Sequence: Synthetic oligonucleotide
gauaucuuagaguccagcu

SEQ ID NO: 2181620 - RNA, 19 nt, Artificial Sequence
  Description of Artificial Sequence: Synthetic oligonucleotide
acugaacaaggcuuuggug

SEQ ID NO: 2181621 - RNA, 19 nt, Artificial Sequence
  Description of Artificial Sequence: Synthetic oligonucleotide
aggucugucauaguaaagu

SEQ ID NO: 2181622 - RNA, 19 nt, Artificial Sequence
  Description of Artificial Sequence: Synthetic oligonucleotide
gugacuguggaaucauugc

SEQ ID NO: 2181623 - RNA, 19 nt, Artificial Sequence
  Description of Artificial Sequence: Synthetic oligonucleotide
caauucagacuucuuguug

SEQ ID NO: 2181624 - RNA, 19 nt, Artificial Sequence
  Description of Artificial Sequence: Synthetic oligonucleotide
uccgaaaggguggacauga

SEQ ID NO: 2181625 - RNA, 19 nt, Artificial Sequence
  Description of Artificial Sequence: Synthetic oligonucleotide
aaaacgccacagaugucac

SEQ ID NO: 2181626 - RNA, 19 nt, Artificial Sequence
  Description of Artificial Sequence: Synthetic oligonucleotide
uuuaaagaacugguacaca

SEQ ID NO: 2181627 - RNA, 19 nt, Artificial Sequence
  Description of Artificial Sequence: Synthetic oligonucleotide
uucuguucggaagagcugu

SEQ ID NO: 2181628 - RNA, 19 nt, Artificial Sequence
  Description of Artificial Sequence: Synthetic oligonucleotide
acuuuuagcaaugcuugug

SEQ ID NO: 2181629 - RNA, 19 nt, Artificial Sequence
  Description of Artificial Sequence: Synthetic oligonucleotide
aguaugaggcuucgucuag

SEQ ID NO: 2181630 - RNA, 19 nt, Artificial Sequence
  Description of Artificial Sequence: Synthetic oligonucleotide
uccaucucuuuuccaaugu

SEQ ID NO: 2181631 - RNA, 19 nt, Artificial Sequence
  Description of Artificial Sequence: Synthetic oligonucleotide
uaggcauccaguugccacc

SEQ ID NO: 2181632 - RNA, 19 nt, Artificial Sequence
  Description of Artificial Sequence: Synthetic oligonucleotide
auaguaaaguaugaggcuu

SEQ ID NO: 2181633 - RNA, 19 nt, Artificial Sequence
  Description of Artificial Sequence: Synthetic oligonucleotide
cuccuucucagauuuuaag

SEQ ID NO: 2181634 - RNA, 19 nt, Artificial Sequence
  Description of Artificial Sequence: Synthetic oligonucleotide
aacaaggcuuugguggcuc

SEQ ID NO: 2181635 - RNA, 19 nt, Artificial Sequence
  Description of Artificial Sequence: Synthetic oligonucleotide
aaacguugauaugaucccu

SEQ ID NO: 2181636 - RNA, 19 nt, Artificial Sequence
  Description of Artificial Sequence: Synthetic oligonucleotide
cauuucuguaggcauccag

SEQ ID NO: 2181637 - RNA, 19 nt, Artificial Sequence
  Description of Artificial Sequence: Synthetic oligonucleotide
cuucgucuaguuuaaagaa

SEQ ID NO: 2181638 - RNA, 19 nt, Artificial Sequence
  Description of Artificial Sequence: Synthetic oligonucleotide
caauguugcucccacacca

SEQ ID NO: 2181639 - RNA, 19 nt, Artificial Sequence
  Description of Artificial Sequence: Synthetic oligonucleotide
gaaucauugcuugguauuc

SEQ ID NO: 2181640 - RNA, 19 nt, Artificial Sequence
  Description of Artificial Sequence: Synthetic oligonucleotide
uucucagauuuuaagccuu

SEQ ID NO: 2181641 - RNA, 19 nt, Artificial Sequence
  Description of Artificial Sequence: Synthetic oligonucleotide
uugaacauucgaggcagcc

SEQ ID NO: 2181642 - RNA, 19 nt, Artificial Sequence
  Description of Artificial Sequence: Synthetic oligonucleotide
uugguggcuccacacaggu

SEQ ID NO: 2181643 - RNA, 19 nt, Artificial Sequence
  Description of Artificial Sequence: Synthetic oligonucleotide
auuggcuccgaaagggugg

SEQ ID NO: 2181644 - RNA, 19 nt, Artificial Sequence
  Description of Artificial Sequence: Synthetic oligonucleotide
ugagacugcuccucuuuug

SEQ ID NO: 2181645 - RNA, 19 nt, Artificial Sequence
  Description of Artificial Sequence: Synthetic oligonucleotide
agacuucuuguuguucagc

SEQ ID NO: 2181646 - RNA, 19 nt, Artificial Sequence
  Description of Artificial Sequence: Synthetic oligonucleotide
uguaggaacugcagcugcu

SEQ ID NO: 2181647 - RNA, 19 nt, Artificial Sequence
  Description of Artificial Sequence: Synthetic oligonucleotide
ugugugagacugcuccucu

SEQ ID NO: 2181648 - RNA, 19 nt, Artificial Sequence
  Description of Artificial Sequence: Synthetic oligonucleotide
gucuugguuaaccaaugca

SEQ ID NO: 2181649 - RNA, 19 nt, Artificial Sequence
  Description of Artificial Sequence: Synthetic oligonucleotide
uguucuuggaggacuuuua

SEQ ID NO: 2181650 - RNA, 19 nt, Artificial Sequence
  Description of Artificial Sequence: Synthetic oligonucleotide
acaggucugucauaguaaa

SEQ ID NO: 2181651 - RNA, 19 nt, Artificial Sequence
  Description of Artificial Sequence: Synthetic oligonucleotide
uggaaucauugcuugguau

SEQ ID NO: 2181652 - RNA, 19 nt, Artificial Sequence
  Description of Artificial Sequence: Synthetic oligonucleotide
uccuuggugccuuuuaauu

SEQ ID NO: 2181653 - RNA, 19 nt, Artificial Sequence
  Description of Artificial Sequence: Synthetic oligonucleotide
acugguacacaauuacauu

SEQ ID NO: 2181654 - RNA, 19 nt, Artificial Sequence
  Description of Artificial Sequence: Synthetic oligonucleotide
gguacacaauuacauuucc

SEQ ID NO: 2181655 - RNA, 19 nt, Artificial Sequence
  Description of Artificial Sequence: Synthetic oligonucleotide
uucgaggcagccucaucag

SEQ ID NO: 2181656 - RNA, 19 nt, Artificial Sequence
  Description of Artificial Sequence: Synthetic oligonucleotide
aucauugcuugguauucgu

SEQ ID NO: 2181657 - RNA, 19 nt, Artificial Sequence
  Description of Artificial Sequence: Synthetic oligonucleotide
gguacucuauauuggcucc

SEQ ID NO: 2181658 - RNA, 19 nt, Artificial Sequence
  Description of Artificial Sequence: Synthetic oligonucleotide
ugcaugguuugcuguagga

SEQ ID NO: 2181659 - RNA, 19 nt, Artificial Sequence
  Description of Artificial Sequence: Synthetic oligonucleotide
uauuagcagggccuccuuc

SEQ ID NO: 2181660 - RNA, 19 nt, Artificial Sequence
  Description of Artificial Sequence: Synthetic oligonucleotide
uuccuucgaaggcacacaa

SEQ ID NO: 2181661 - RNA, 19 nt, Artificial Sequence
  Description of Artificial Sequence: Synthetic oligonucleotide
gcuucgucuaguuuaaaga

SEQ ID NO: 2181662 - RNA, 19 nt, Artificial Sequence
  Description of Artificial Sequence: Synthetic oligonucleotide
aggacuuuuagcaaugcuu

SEQ ID NO: 2181663 - RNA, 19 nt, Artificial Sequence
  Description of Artificial Sequence: Synthetic oligonucleotide
uaugaccacagguacucua

SEQ ID NO: 2181664 - RNA, 19 nt, Artificial Sequence
  Description of Artificial Sequence: Synthetic oligonucleotide
ugaacauucgaggcagccu

SEQ ID NO: 2181665 - RNA, 19 nt, Artificial Sequence
  Description of Artificial Sequence: Synthetic oligonucleotide
uuuuccaauguugcuccca

SEQ ID NO: 2181666 - RNA, 19 nt, Artificial Sequence
  Description of Artificial Sequence: Synthetic oligonucleotide
ugugagacugcuccucuuu

SEQ ID NO: 2181667 - RNA, 19 nt, Artificial Sequence
  Description of Artificial Sequence: Synthetic oligonucleotide
ucacuauuguucucccggu

SEQ ID NO: 2181668 - RNA, 19 nt, Artificial Sequence
  Description of Artificial Sequence: Synthetic oligonucleotide
cuaguuuaaagaacuggua

SEQ ID NO: 2181669 - RNA, 19 nt, Artificial Sequence
  Description of Artificial Sequence: Synthetic oligonucleotide
ucaucagaagcaucucaau

SEQ ID NO: 2181670 - RNA, 19 nt, Artificial Sequence
  Description of Artificial Sequence: Synthetic oligonucleotide
uccuacuccuccacuguac

SEQ ID NO: 2181671 - RNA, 19 nt, Artificial Sequence
  Description of Artificial Sequence: Synthetic oligonucleotide
ccacucacaagaaaacgcc

SEQ ID NO: 2181672 - RNA, 19 nt, Artificial Sequence
  Description of Artificial Sequence: Synthetic oligonucleotide
acuguacagcccuggccgg

SEQ ID NO: 2181673 - RNA, 19 nt, Artificial Sequence
  Description of Artificial Sequence: Synthetic oligonucleotide
ggcuucgucuaguuuaaag

SEQ ID NO: 2181674 - RNA, 19 nt, Artificial Sequence
  Description of Artificial Sequence: Synthetic oligonucleotide
augaucccuauuagcaggg

SEQ ID NO: 2181675 - RNA, 19 nt, Artificial Sequence
  Description of Artificial Sequence: Synthetic oligonucleotide
uuaagccuuggauucuuuu

SEQ ID NO: 2181676 - RNA, 19 nt, Artificial Sequence
  Description of Artificial Sequence: Synthetic oligonucleotide
cucaucagaagcaucucaa

SEQ ID NO: 2181677 - RNA, 19 nt, Artificial Sequence
  Description of Artificial Sequence: Synthetic oligonucleotide
uugcuugcuccaauucaga

SEQ ID NO: 2181678 - RNA, 19 nt, Artificial Sequence
  Description of Artificial Sequence: Synthetic oligonucleotide
acaugaagaaacguugaua

SEQ ID NO: 2181679 - RNA, 19 nt, Artificial Sequence
  Description of Artificial Sequence: Synthetic oligonucleotide
cauaguaaaguaugaggcu

SEQ ID NO: 2181680 - RNA, 19 nt, Artificial Sequence
  Description of Artificial Sequence: Synthetic oligonucleotide
agaagcaucucaauuucau

SEQ ID NO: 2181681 - RNA, 19 nt, Artificial Sequence
  Description of Artificial Sequence: Synthetic oligonucleotide
uguucucccggucuugguu

SEQ ID NO: 2181682 - RNA, 19 nt, Artificial Sequence
  Description of Artificial Sequence: Synthetic oligonucleotide
acaaugccuguuuuggauu

SEQ ID NO: 2181683 - RNA, 19 nt, Artificial Sequence
  Description of Artificial Sequence: Synthetic oligonucleotide
ccacagguacucuauauug

SEQ ID NO: 2181684 - RNA, 19 nt, Artificial Sequence
  Description of Artificial Sequence: Synthetic oligonucleotide
uuguucagcuccuccugga

SEQ ID NO: 2181685 - RNA, 19 nt, Artificial Sequence
  Description of Artificial Sequence: Synthetic oligonucleotide
aacuguuagcacauugauu

SEQ ID NO: 2181686 - RNA, 19 nt, Artificial Sequence
  Description of Artificial Sequence: Synthetic oligonucleotide
ugcuccaauucagacuucu

SEQ ID NO: 2181687 - RNA, 19 nt, Artificial Sequence
  Description of Artificial Sequence: Synthetic oligonucleotide
cucuauauuggcuccgaaa

SEQ ID NO: 2181688 - RNA, 19 nt, Artificial Sequence
  Description of Artificial Sequence: Synthetic oligonucleotide
acaccagugaauuccuguu

SEQ ID NO: 2181689 - RNA, 19 nt, Artificial Sequence
  Description of Artificial Sequence: Synthetic oligonucleotide
aucccuauuagcagggccu

SEQ ID NO: 2181690 - RNA, 19 nt, Artificial Sequence
  Description of Artificial Sequence: Synthetic oligonucleotide
auuuugugugacuguggaa

SEQ ID NO: 2181691 - RNA, 19 nt, Artificial Sequence
  Description of Artificial Sequence: Synthetic oligonucleotide
cuugcuccaauucagacuu

SEQ ID NO: 2181692 - RNA, 19 nt, Artificial Sequence
  Description of Artificial Sequence: Synthetic oligonucleotide
ucauugcuugguauucgua

SEQ ID NO: 2181693 - RNA, 19 nt, Artificial Sequence
  Description of Artificial Sequence: Synthetic oligonucleotide
gcagauaucuuagagucca

SEQ ID NO: 2181694 - RNA, 19 nt, Artificial Sequence
  Description of Artificial Sequence: Synthetic oligonucleotide
uuugagggcauaggccuga

SEQ ID NO: 2181695 - RNA, 19 nt, Artificial Sequence
  Description of Artificial Sequence: Synthetic oligonucleotide
cagauuuuaagccuuggau

SEQ ID NO: 2181696 - RNA, 19 nt, Artificial Sequence
  Description of Artificial Sequence: Synthetic oligonucleotide
guugcucccacaccaguga

SEQ ID NO: 2181697 - RNA, 19 nt, Artificial Sequence
  Description of Artificial Sequence: Synthetic oligonucleotide
guacucuauauuggcuccg

SEQ ID NO: 2181698 - RNA, 19 nt, Artificial Sequence
  Description of Artificial Sequence: Synthetic oligonucleotide
cuuggugccuuuuaauugu

SEQ ID NO: 2181699 - RNA, 19 nt, Artificial Sequence
  Description of Artificial Sequence: Synthetic oligonucleotide
uggccaucaguuaggucgu

SEQ ID NO: 2181700 - RNA, 19 nt, Artificial Sequence
  Description of Artificial Sequence: Synthetic oligonucleotide
uauuguucucccggucuug

SEQ ID NO: 2181701 - RNA, 19 nt, Artificial Sequence
  Description of Artificial Sequence: Synthetic oligonucleotide
ugccuugcaugguuugcug

SEQ ID NO: 2181702 - RNA, 19 nt, Artificial Sequence
  Description of Artificial Sequence: Synthetic oligonucleotide
cucacaagaaaacgccaca

SEQ ID NO: 2181703 - RNA, 19 nt, Artificial Sequence
  Description of Artificial Sequence: Synthetic oligonucleotide
aguccuuggugccuuuuaa

SEQ ID NO: 2181704 - RNA, 19 nt, Artificial Sequence
  Description of Artificial Sequence: Synthetic oligonucleotide
aacguugauaugaucccua

SEQ ID NO: 2181705 - RNA, 19 nt, Artificial Sequence
  Description of Artificial Sequence: Synthetic oligonucleotide
cuuugagggcauaggccug

SEQ ID NO: 2181706 - RNA, 19 nt, Artificial Sequence
  Description of Artificial Sequence: Synthetic oligonucleotide
uaugaggcuucgucuaguu

SEQ ID NO: 2181707 - RNA, 19 nt, Artificial Sequence
  Description of Artificial Sequence: Synthetic oligonucleotide
ucggaagagcuguucuuuc

SEQ ID NO: 2181708 - RNA, 19 nt, Artificial Sequence
  Description of Artificial Sequence: Synthetic oligonucleotide
ccucuuugagggcauaggc

SEQ ID NO: 2181709 - RNA, 19 nt, Artificial Sequence
  Description of Artificial Sequence: Synthetic oligonucleotide
cuuuuccaauguugcuccc

SEQ ID NO: 2181710 - RNA, 19 nt, Artificial Sequence
  Description of Artificial Sequence: Synthetic oligonucleotide
caggucugucauaguaaag

SEQ ID NO: 2181711 - RNA, 19 nt, Artificial Sequence
  Description of Artificial Sequence: Synthetic oligonucleotide
auucguagggacaggucug

SEQ ID NO: 2181712 - RNA, 19 nt, Artificial Sequence
  Description of Artificial Sequence: Synthetic oligonucleotide
ugcgcuguucugcaacaau

SEQ ID NO: 2181713 - RNA, 19 nt, Artificial Sequence
  Description of Artificial Sequence: Synthetic oligonucleotide
uacucuauauuggcuccga

SEQ ID NO: 2181714 - RNA, 19 nt, Artificial Sequence
  Description of Artificial Sequence: Synthetic oligonucleotide
cagcaauugcugcugcaug

SEQ ID NO: 2181715 - RNA, 19 nt, Artificial Sequence
  Description of Artificial Sequence: Synthetic oligonucleotide
uuuaagccuuggauucuuu

SEQ ID NO: 2181716 - RNA, 19 nt, Artificial Sequence
  Description of Artificial Sequence: Synthetic oligonucleotide
cacaagaaaacgccacaga

SEQ ID NO: 2181717 - RNA, 19 nt, Artificial Sequence
  Description of Artificial Sequence: Synthetic oligonucleotide
gaccccaacccuccuacuc

SEQ ID NO: 2181718 - RNA, 19 nt, Artificial Sequence
  Description of Artificial Sequence: Synthetic oligonucleotide
cuucucagauuuuaagccu

SEQ ID NO: 2181719 - RNA, 19 nt, Artificial Sequence
  Description of Artificial Sequence: Synthetic oligonucleotide
cugguacacaauuacauuu

SEQ ID NO: 2181720 - RNA, 19 nt, Artificial Sequence
  Description of Artificial Sequence: Synthetic oligonucleotide
ucgaggcagccucaucaga

SEQ ID NO: 2181721 - RNA, 19 nt, Artificial Sequence
  Description of Artificial Sequence: Synthetic oligonucleotide
gacaggucugucauaguaa

SEQ ID NO: 2181722 - RNA, 19 nt, Artificial Sequence
  Description of Artificial Sequence: Synthetic oligonucleotide
acguugauaugaucccuau

SEQ ID NO: 2181723 - RNA, 19 nt, Artificial Sequence
  Description of Artificial Sequence: Synthetic oligonucleotide
gccuguuuuggauuuugug

SEQ ID NO: 2181724 - RNA, 19 nt, Artificial Sequence
  Description of Artificial Sequence: Synthetic oligonucleotide
uggcuguggccauucgucu

SEQ ID NO: 2181725 - RNA, 19 nt, Artificial Sequence
  Description of Artificial Sequence: Synthetic oligonucleotide
cuuggaggacuuuuagcaa

SEQ ID NO: 2181726 - RNA, 19 nt, Artificial Sequence
  Description of Artificial Sequence: Synthetic oligonucleotide
cuguuagcacauugauuuc

SEQ ID NO: 2181727 - RNA, 19 nt, Artificial Sequence
  Description of Artificial Sequence: Synthetic oligonucleotide
guacacaauuacauuucca

SEQ ID NO: 2181728 - RNA, 19 nt, Artificial Sequence
  Description of Artificial Sequence: Synthetic oligonucleotide
agcuuuccuggccaucagu

SEQ ID NO: 2181729 - RNA, 19 nt, Artificial Sequence
  Description of Artificial Sequence: Synthetic oligonucleotide
ggucuugguuaaccaaugc

SEQ ID NO: 2181730 - RNA, 19 nt, Artificial Sequence
  Description of Artificial Sequence: Synthetic oligonucleotide
cagauaucuuagaguccag

SEQ ID NO: 2181731 - RNA, 19 nt, Artificial Sequence
  Description of Artificial Sequence: Synthetic oligonucleotide
ugcuugugugugagacugc

SEQ ID NO: 2181732 - RNA, 19 nt, Artificial Sequence
  Description of Artificial Sequence: Synthetic oligonucleotide
ucccggucuugguuaacca

SEQ ID NO: 2181733 - RNA, 19 nt, Artificial Sequence
  Description of Artificial Sequence: Synthetic oligonucleotide
uggugccuuuuaauuguuc

SEQ ID NO: 2181734 - RNA, 19 nt, Artificial Sequence
  Description of Artificial Sequence: Synthetic oligonucleotide
uuccaauguugcucccaca

SEQ ID NO: 2181735 - RNA, 19 nt, Artificial Sequence
  Description of Artificial Sequence: Synthetic oligonucleotide
agaguccagcugcugcaug

SEQ ID NO: 2181736 - RNA, 19 nt, Artificial Sequence
  Description of Artificial Sequence: Synthetic oligonucleotide
uucguagggacaggucugu

SEQ ID NO: 2181737 - RNA, 19 nt, Artificial Sequence
  Description of Artificial Sequence: Synthetic oligonucleotide
cuugugugugagacugcuc

SEQ ID NO: 2181738 - RNA, 19 nt, Artificial Sequence
  Description of Artificial Sequence: Synthetic oligonucleotide
aacauucgaggcagccuca

SEQ ID NO: 2181739 - RNA, 19 nt, Artificial Sequence
  Description of Artificial Sequence: Synthetic oligonucleotide
auauuggcuccgaaagggu

SEQ ID NO: 2181740 - RNA, 19 nt, Artificial Sequence
  Description of Artificial Sequence: Synthetic oligonucleotide
agggcugaauucaucgacu

SEQ ID NO: 2181741 - RNA, 19 nt, Artificial Sequence
  Description of Artificial Sequence: Synthetic oligonucleotide
gacuuuuagcaaugcuugu

SEQ ID NO: 2181742 - RNA, 19 nt, Artificial Sequence
  Description of Artificial Sequence: Synthetic oligonucleotide
uugcucccacaccagugaa

SEQ ID NO: 2181743 - RNA, 19 nt, Artificial Sequence
  Description of Artificial Sequence: Synthetic oligonucleotide
cucccggucuugguuaacc

SEQ ID NO: 2181744 - RNA, 19 nt, Artificial Sequence
  Description of Artificial Sequence: Synthetic oligonucleotide
cacuauuguucucccgguc

SEQ ID NO: 2181745 - RNA, 19 nt, Artificial Sequence
  Description of Artificial Sequence: Synthetic oligonucleotide
gaagaaacguugauaugau

SEQ ID NO: 2181746 - RNA, 19 nt, Artificial Sequence
  Description of Artificial Sequence: Synthetic oligonucleotide
auguaugaccacagguacu

SEQ ID NO: 2181747 - RNA, 19 nt, Artificial Sequence
  Description of Artificial Sequence: Synthetic oligonucleotide
augccuguuuuggauuuug

SEQ ID NO: 2181748 - RNA, 19 nt, Artificial Sequence
  Description of Artificial Sequence: Synthetic oligonucleotide
agaaaacgccacagauguc

SEQ ID NO: 2181749 - RNA, 19 nt, Artificial Sequence
  Description of Artificial Sequence: Synthetic oligonucleotide
acucuauauuggcuccgaa

SEQ ID NO: 2181750 - RNA, 19 nt, Artificial Sequence
  Description of Artificial Sequence: Synthetic oligonucleotide
ugaucccuauuagcagggc

SEQ ID NO: 2181751 - RNA, 19 nt, Artificial Sequence
  Description of Artificial Sequence: Synthetic oligonucleotide
augccuugcaugguuugcu

SEQ ID NO: 2181752 - RNA, 19 nt, Artificial Sequence
  Description of Artificial Sequence: Synthetic oligonucleotide
uuggcuccgaaagggugga

SEQ ID NO: 2181753 - RNA, 19 nt, Artificial Sequence
  Description of Artificial Sequence: Synthetic oligonucleotide
ugcucccacaccagugaau

SEQ ID NO: 2181754 - RNA, 19 nt, Artificial Sequence
  Description of Artificial Sequence: Synthetic oligonucleotide
gcaacuguuagcacauuga

SEQ ID NO: 2181755 - RNA, 19 nt, Artificial Sequence
  Description of Artificial Sequence: Synthetic oligonucleotide
augaccacagguacucuau

SEQ ID NO: 2181756 - RNA, 19 nt, Artificial Sequence
  Description of Artificial Sequence: Synthetic oligonucleotide
cuggccgaccccaacccuc

SEQ ID NO: 2181757 - RNA, 19 nt, Artificial Sequence
  Description of Artificial Sequence: Synthetic oligonucleotide
ggacaggucugucauagua

SEQ ID NO: 2181758 - RNA, 19 nt, Artificial Sequence
  Description of Artificial Sequence: Synthetic oligonucleotide
ucuguucggaagagcuguu

SEQ ID NO: 2181759 - RNA, 19 nt, Artificial Sequence
  Description of Artificial Sequence: Synthetic oligonucleotide
uguacagcccuggccggcu

SEQ ID NO: 2181760 - RNA, 19 nt, Artificial Sequence
  Description of Artificial Sequence: Synthetic oligonucleotide
ggguggacaugaagaaacg

SEQ ID NO: 2181761 - RNA, 19 nt, Artificial Sequence
  Description of Artificial Sequence: Synthetic oligonucleotide
cuccaccaaguccuuggug

SEQ ID NO: 2181762 - RNA, 19 nt, Artificial Sequence
  Description of Artificial Sequence: Synthetic oligonucleotide
cauccucguggcuguggcc

SEQ ID NO: 2181763 - RNA, 19 nt, Artificial Sequence
  Description of Artificial Sequence: Synthetic oligonucleotide
caauuucauuggcagauau

SEQ ID NO: 2181764 - RNA, 19 nt, Artificial Sequence
  Description of Artificial Sequence: Synthetic oligonucleotide
ucccuauuagcagggccuc

SEQ ID NO: 2181765 - RNA, 19 nt, Artificial Sequence
  Description of Artificial Sequence: Synthetic oligonucleotide
gggcauaggccugagcagc

SEQ ID NO: 2181766 - RNA, 19 nt, Artificial Sequence
  Description of Artificial Sequence: Synthetic oligonucleotide
guauucguagggacagguc

SEQ ID NO: 2181767 - RNA, 19 nt, Artificial Sequence
  Description of Artificial Sequence: Synthetic oligonucleotide
auucaucgacucucauuuu

SEQ ID NO: 2181768 - RNA, 19 nt, Artificial Sequence
  Description of Artificial Sequence: Synthetic oligonucleotide
ggacaugaagaaacguuga

SEQ ID NO: 2181769 - RNA, 19 nt, Artificial Sequence
  Description of Artificial Sequence: Synthetic oligonucleotide
gcauguaugaccacaggua

SEQ ID NO: 2181770 - RNA, 19 nt, Artificial Sequence
  Description of Artificial Sequence: Synthetic oligonucleotide
aaugccuguuuuggauuuu

SEQ ID NO: 2181771 - RNA, 19 nt, Artificial Sequence
  Description of Artificial Sequence: Synthetic oligonucleotide
gguuaaccaaugcaacugu

SEQ ID NO: 2181772 - RNA, 19 nt, Artificial Sequence
  Description of Artificial Sequence: Synthetic oligonucleotide
ggcuuugguggcuccacac

SEQ ID NO: 2181773 - RNA, 19 nt, Artificial Sequence
  Description of Artificial Sequence: Synthetic oligonucleotide
ccucauuucuguaggcauc

SEQ ID NO: 2181774 - RNA, 19 nt, Artificial Sequence
  Description of Artificial Sequence: Synthetic oligonucleotide
caacuguuagcacauugau

SEQ ID NO: 2181775 - RNA, 19 nt, Artificial Sequence
  Description of Artificial Sequence: Synthetic oligonucleotide
cacagaugucacugaacaa

SEQ ID NO: 2181776 - RNA, 19 nt, Artificial Sequence
  Description of Artificial Sequence: Synthetic oligonucleotide
ggcagauaucuuagagucc

SEQ ID NO: 2181777 - RNA, 19 nt, Artificial Sequence
  Description of Artificial Sequence: Synthetic oligonucleotide
gggcugaauucaucgacuc

SEQ ID NO: 2181778 - RNA, 19 nt, Artificial Sequence
  Description of Artificial Sequence: Synthetic oligonucleotide
uccuggccaucaguuaggu

SEQ ID NO: 2181779 - RNA, 19 nt, Artificial Sequence
  Description of Artificial Sequence: Synthetic oligonucleotide
gaggcuucgucuaguuuaa

SEQ ID NO: 2181780 - RNA, 19 nt, Artificial Sequence
  Description of Artificial Sequence: Synthetic oligonucleotide
ccuucgaaggcacacaacu

SEQ ID NO: 2181781 - RNA, 19 nt, Artificial Sequence
  Description of Artificial Sequence: Synthetic oligonucleotide
aggcuuugguggcuccaca

SEQ ID NO: 2181782 - RNA, 19 nt, Artificial Sequence
  Description of Artificial Sequence: Synthetic oligonucleotide
ccaacccuccuacuccucc

SEQ ID NO: 2181783 - RNA, 19 nt, Artificial Sequence
  Description of Artificial Sequence: Synthetic oligonucleotide
cauucgaggcagccucauc

SEQ ID NO: 2181784 - RNA, 19 nt, Artificial Sequence
  Description of Artificial Sequence: Synthetic oligonucleotide
cuguucggaagagcuguuc

SEQ ID NO: 2181785 - RNA, 19 nt, Artificial Sequence
  Description of Artificial Sequence: Synthetic oligonucleotide
cagguacucuauauuggcu

SEQ ID NO: 2181786 - RNA, 19 nt, Artificial Sequence
  Description of Artificial Sequence: Synthetic oligonucleotide
cagccucaucagaagcauc

SEQ ID NO: 2181787 - RNA, 19 nt, Artificial Sequence
  Description of Artificial Sequence: Synthetic oligonucleotide
gcuugcuccaauucagacu

SEQ ID NO: 2181788 - RNA, 19 nt, Artificial Sequence
  Description of Artificial Sequence: Synthetic oligonucleotide
cuguacagcccuggccggc

SEQ ID NO: 2181789 - RNA, 19 nt, Artificial Sequence
  Description of Artificial Sequence: Synthetic oligonucleotide
ugguggcuccacacagguc

SEQ ID NO: 2181790 - RNA, 19 nt, Artificial Sequence
  Description of Artificial Sequence: Synthetic oligonucleotide
gcacacaacuuccaucucu

SEQ ID NO: 2181791 - RNA, 19 nt, Artificial Sequence
  Description of Artificial Sequence: Synthetic oligonucleotide
guuagcacauugauuucau

SEQ ID NO: 2181792 - RNA, 19 nt, Artificial Sequence
  Description of Artificial Sequence: Synthetic oligonucleotide
gccauucgucuccaccaag

SEQ ID NO: 2181793 - RNA, 19 nt, Artificial Sequence
  Description of Artificial Sequence: Synthetic oligonucleotide
acccuccuacuccuccacu

SEQ ID NO: 2181794 - RNA, 19 nt, Artificial Sequence
  Description of Artificial Sequence: Synthetic oligonucleotide
cacacaacuuccaucucuu

SEQ ID NO: 2181795 - RNA, 19 nt, Artificial Sequence
  Description of Artificial Sequence: Synthetic oligonucleotide
cuccgaaaggguggacaug

SEQ ID NO: 2181796 - RNA, 19 nt, Artificial Sequence
  Description of Artificial Sequence: Synthetic oligonucleotide
guugccaccggaggcuguc

SEQ ID NO: 2181797 - RNA, 19 nt, Artificial Sequence
  Description of Artificial Sequence: Synthetic oligonucleotide
cgucuaguuuaaagaacug

SEQ ID NO: 2181798 - RNA, 19 nt, Artificial Sequence
  Description of Artificial Sequence: Synthetic oligonucleotide
gguauucguagggacaggu

SEQ ID NO: 2181799 - RNA, 19 nt, Artificial Sequence
  Description of Artificial Sequence: Synthetic oligonucleotide
ccucaucagaagcaucuca

SEQ ID NO: 2181800 - RNA, 19 nt, Artificial Sequence
  Description of Artificial Sequence: Synthetic oligonucleotide
gcuucggacagcuuuguuu

SEQ ID NO: 2181801 - RNA, 19 nt, Artificial Sequence
  Description of Artificial Sequence: Synthetic oligonucleotide
gcauccaguugccaccgga

SEQ ID NO: 2181802 - RNA, 19 nt, Artificial Sequence
  Description of Artificial Sequence: Synthetic oligonucleotide
ccaccucauuucuguaggc

SEQ ID NO: 2181803 - RNA, 19 nt, Artificial Sequence
  Description of Artificial Sequence: Synthetic oligonucleotide
acauucgaggcagccucau

SEQ ID NO: 2181804 - RNA, 19 nt, Artificial Sequence
  Description of Artificial Sequence: Synthetic oligonucleotide
caaugccuguuuuggauuu

SEQ ID NO: 2181805 - RNA, 19 nt, Artificial Sequence
  Description of Artificial Sequence: Synthetic oligonucleotide
guggcuccacacagguccc

SEQ ID NO: 2181806 - RNA, 19 nt, Artificial Sequence
  Description of Artificial Sequence: Synthetic oligonucleotide
cucguggcuguggccauuc

SEQ ID NO: 2181807 - RNA, 19 nt, Artificial Sequence
  Description of Artificial Sequence: Synthetic oligonucleotide
ggcuccgaaaggguggaca

SEQ ID NO: 2181808 - RNA, 19 nt, Artificial Sequence
  Description of Artificial Sequence: Synthetic oligonucleotide
agcccuggccggcuucgga

SEQ ID NO: 2181809 - RNA, 19 nt, Artificial Sequence
  Description of Artificial Sequence: Synthetic oligonucleotide
gcaugguuugcuguaggaa

SEQ ID NO: 2181810 - RNA, 19 nt, Artificial Sequence
  Description of Artificial Sequence: Synthetic oligonucleotide
ggcuguggccauucgucuc

SEQ ID NO: 2181811 - RNA, 19 nt, Artificial Sequence
  Description of Artificial Sequence: Synthetic oligonucleotide
ccgaccccaacccuccuac

SEQ ID NO: 2181812 - RNA, 19 nt, Artificial Sequence
  Description of Artificial Sequence: Synthetic oligonucleotide
ccggcuucggacagcuuug

SEQ ID NO: 2181813 - RNA, 19 nt, Artificial Sequence
  Description of Artificial Sequence: Synthetic oligonucleotide
guuaaccaaugcaacuguu

SEQ ID NO: 2181814 - RNA, 19 nt, Artificial Sequence
  Description of Artificial Sequence: Synthetic oligonucleotide
ccaccggaggcugucauuc

SEQ ID NO: 2181815 - RNA, 19 nt, Artificial Sequence
  Description of Artificial Sequence: Synthetic oligonucleotide
cuauuguucucccggucuu

SEQ ID NO: 2181816 - RNA, 19 nt, Artificial Sequence
  Description of Artificial Sequence: Synthetic oligonucleotide
ccuacuccuccacuguaca

SEQ ID NO: 2181817 - RNA, 19 nt, Artificial Sequence
  Description of Artificial Sequence: Synthetic oligonucleotide
guaaaguaugaggcuucgu

SEQ ID NO: 2181818 - RNA, 19 nt, Artificial Sequence
  Description of Artificial Sequence: Synthetic oligonucleotide
cggucuugguuaaccaaug

SEQ ID NO: 2181819 - RNA, 19 nt, Artificial Sequence
  Description of Artificial Sequence: Synthetic oligonucleotide
ucguagggacaggucuguc

SEQ ID NO: 2181820 - RNA, 19 nt, Artificial Sequence
  Description of Artificial Sequence: Synthetic oligonucleotide
caaggcuuugguggcucca

SEQ ID NO: 2181821 - RNA, 19 nt, Artificial Sequence
  Description of Artificial Sequence: Synthetic oligonucleotide
guaugaggcuucgucuagu

SEQ ID NO: 2181822 - RNA, 19 nt, Artificial Sequence
  Description of Artificial Sequence: Synthetic oligonucleotide
cugcugcauguaugaccac

SEQ ID NO: 2181823 - RNA, 19 nt, Artificial Sequence
  Description of Artificial Sequence: Synthetic oligonucleotide
ggugagguuuucuucuguu

SEQ ID NO: 2181824 - RNA, 19 nt, Artificial Sequence
  Description of Artificial Sequence: Synthetic oligonucleotide
ucuccucuuugagggcaua

SEQ ID NO: 2181825 - RNA, 19 nt, Artificial Sequence
  Description of Artificial Sequence: Synthetic oligonucleotide
ggcugaauucaucgacucu

SEQ ID NO: 2181826 - RNA, 19 nt, Artificial Sequence
  Description of Artificial Sequence: Synthetic oligonucleotide
gcccuggccggcuucggac

SEQ ID NO: 2181827 - RNA, 19 nt, Artificial Sequence
  Description of Artificial Sequence: Synthetic oligonucleotide
gcuugugugugagacugcu

SEQ ID NO: 2181828 - RNA, 19 nt, Artificial Sequence
  Description of Artificial Sequence: Synthetic oligonucleotide
ccgcuggccgaccccaacc

SEQ ID NO: 2181829 - RNA, 19 nt, Artificial Sequence
  Description of Artificial Sequence: Synthetic oligonucleotide
gcuccgaaaggguggacau

SEQ ID NO: 2181830 - RNA, 19 nt, Artificial Sequence
  Description of Artificial Sequence: Synthetic oligonucleotide
ggccauucgucuccaccaa

SEQ ID NO: 2181831 - RNA, 19 nt, Artificial Sequence
  Description of Artificial Sequence: Synthetic oligonucleotide
cuggccggcuucggacagc

SEQ ID NO: 2181832 - RNA, 19 nt, Artificial Sequence
  Description of Artificial Sequence: Synthetic oligonucleotide
aguugccaccggaggcugu

SEQ ID NO: 2181833 - RNA, 19 nt, Artificial Sequence
  Description of Artificial Sequence: Synthetic oligonucleotide
gccggcuucggacagcuuu

SEQ ID NO: 2181834 - RNA, 19 nt, Artificial Sequence
  Description of Artificial Sequence: Synthetic oligonucleotide
cccuauuagcagggccucc

SEQ ID NO: 2181835 - RNA, 19 nt, Artificial Sequence
  Description of Artificial Sequence: Synthetic oligonucleotide
gcuuuccuggccaucaguu

SEQ ID NO: 2181836 - RNA, 19 nt, Artificial Sequence
  Description of Artificial Sequence: Synthetic oligonucleotide
gccuugcaugguuugcugu

SEQ ID NO: 2181837 - RNA, 19 nt, Artificial Sequence
  Description of Artificial Sequence: Synthetic oligonucleotide
cgcuggccgaccccaaccc

SEQ ID NO: 2181838 - RNA, 19 nt, Artificial Sequence
  Description of Artificial Sequence: Synthetic oligonucleotide
uggcuccgaaaggguggac

SEQ ID NO: 2181839 - RNA, 19 nt, Artificial Sequence
  Description of Artificial Sequence: Synthetic oligonucleotide
cuauuagcagggccuccuu

SEQ ID NO: 2181840 - RNA, 19 nt, Artificial Sequence
  Description of Artificial Sequence: Synthetic oligonucleotide
cccggucuugguuaaccaa

SEQ ID NO: 2181841 - RNA, 19 nt, Artificial Sequence
  Description of Artificial Sequence: Synthetic oligonucleotide
ccggucuugguuaaccaau

SEQ ID NO: 2181842 - RNA, 19 nt, Artificial Sequence
  Description of Artificial Sequence: Synthetic oligonucleotide
ccaucaguuaggucguuuu

SEQ ID NO: 2181843 - RNA, 19 nt, Artificial Sequence
  Description of Artificial Sequence: Synthetic oligonucleotide
cugcaacaaugccuguuuu

SEQ ID NO: 2181844 - RNA, 19 nt, Artificial Sequence
  Description of Artificial Sequence: Synthetic oligonucleotide
augcaacuguuagcacauu

SEQ ID NO: 2181845 - RNA, 19 nt, Artificial Sequence
  Description of Artificial Sequence: Synthetic oligonucleotide
aggcuucgucuaguuuaaa

SEQ ID NO: 2181846 - RNA, 19 nt, Artificial Sequence
  Description of Artificial Sequence: Synthetic oligonucleotide
ccuauuagcagggccuccu

SEQ ID NO: 2181847 - RNA, 19 nt, Artificial Sequence
  Description of Artificial Sequence: Synthetic oligonucleotide
cccacaccagugaauuccu

SEQ ID NO: 2181848 - RNA, 19 nt, Artificial Sequence
  Description of Artificial Sequence: Synthetic oligonucleotide
caccggaggcugucauucu

SEQ ID NO: 2181849 - RNA, 19 nt, Artificial Sequence
  Description of Artificial Sequence: Synthetic oligonucleotide
cccaacccuccuacuccuc

SEQ ID NO: 2181850 - RNA, 19 nt, Artificial Sequence
  Description of Artificial Sequence: Synthetic oligonucleotide
ccaguugccaccggaggcu

SEQ ID NO: 2181851 - RNA, 19 nt, Artificial Sequence
  Description of Artificial Sequence: Synthetic oligonucleotide
gugugacuguggaaucauu

SEQ ID NO: 2181852 - RNA, 19 nt, Artificial Sequence
  Description of Artificial Sequence: Synthetic oligonucleotide
cccuggccggcuucggaca

SEQ ID NO: 2181853 - RNA, 19 nt, Artificial Sequence
  Description of Artificial Sequence: Synthetic oligonucleotide
gcugcaugccuugcauggu

SEQ ID NO: 2181854 - RNA, 19 nt, Artificial Sequence
  Description of Artificial Sequence: Synthetic oligonucleotide
ccgaaaggguggacaugaa

SEQ ID NO: 2181855 - RNA, 19 nt, Artificial Sequence
  Description of Artificial Sequence: Synthetic oligonucleotide
gccgaccccaacccuccua

SEQ ID NO: 2181856 - RNA, 19 nt, Artificial Sequence
  Description of Artificial Sequence: Synthetic oligonucleotide
gccaucaguuaggucguuu

SEQ ID NO: 2181857 - RNA, 19 nt, Artificial Sequence
  Description of Artificial Sequence: Synthetic oligonucleotide
ggcuucggacagcuuuguu

SEQ ID NO: 2181858 - RNA, 19 nt, Artificial Sequence
  Description of Artificial Sequence: Synthetic oligonucleotide
cguggcuguggccauucgu

SEQ ID NO: 2181859 - RNA, 19 nt, Artificial Sequence
  Description of Artificial Sequence: Synthetic oligonucleotide
ggccgaccccaacccuccu

SEQ ID NO: 2181860 - RNA, 19 nt, Artificial Sequence
  Description of Artificial Sequence: Synthetic oligonucleotide
cgaccccaacccuccuacu

SEQ ID NO: 2181861 - RNA, 19 nt, Artificial Sequence
  Description of Artificial Sequence: Synthetic oligonucleotide
cggcuucggacagcuuugu

SEQ ID NO: 2181862 - RNA, 19 nt, Artificial Sequence
  Description of Artificial Sequence: Synthetic oligonucleotide
ccucguggcuguggccauu

SEQ ID NO: 2181863 - RNA, 19 nt, Artificial Sequence
  Description of Artificial Sequence: Synthetic oligonucleotide
aaacuggagcuuuacaugc

SEQ ID NO: 2181864 - RNA, 19 nt, Artificial Sequence
  Description of Artificial Sequence: Synthetic oligonucleotide
aauuuugcugcauauuuuc

SEQ ID NO: 2181865 - RNA, 19 nt, Artificial Sequence
  Description of Artificial Sequence: Synthetic oligonucleotide
ucuuugacgaaucacagga

SEQ ID NO: 2181866 - RNA, 19 nt, Artificial Sequence
  Description of Artificial Sequence: Synthetic oligonucleotide
acuuaggagauucaucucc

SEQ ID NO: 2181867 - RNA, 19 nt, Artificial Sequence
  Description of Artificial Sequence: Synthetic oligonucleotide
uccauuacaagucaguucu

SEQ ID NO: 2181868 - RNA, 19 nt, Artificial Sequence
  Description of Artificial Sequence: Synthetic oligonucleotide
aaaaccgauagucacuuag

SEQ ID NO: 2181869 - RNA, 19 nt, Artificial Sequence
  Description of Artificial Sequence: Synthetic oligonucleotide
aaauaccuugcuuucgggc

SEQ ID NO: 2181870 - RNA, 19 nt, Artificial Sequence
  Description of Artificial Sequence: Synthetic oligonucleotide
gaaaguaucucuugaaacc

SEQ ID NO: 2181871 - RNA, 19 nt, Artificial Sequence
  Description of Artificial Sequence: Synthetic oligonucleotide
uguagugagauguaagcgg

SEQ ID NO: 2181872 - RNA, 19 nt, Artificial Sequence
  Description of Artificial Sequence: Synthetic oligonucleotide
uauucaaugaucacuuugc

SEQ ID NO: 2181873 - RNA, 19 nt, Artificial Sequence
  Description of Artificial Sequence: Synthetic oligonucleotide
uuuguuaggguccaguuca

SEQ ID NO: 2181874 - RNA, 19 nt, Artificial Sequence
  Description of Artificial Sequence: Synthetic oligonucleotide
uucauaauaccuuacaaaa

SEQ ID NO: 2181875 - RNA, 19 nt, Artificial Sequence
  Description of Artificial Sequence: Synthetic oligonucleotide
uuucacuuggugaagaagc

SEQ ID NO: 2181876 - RNA, 19 nt, Artificial Sequence
  Description of Artificial Sequence: Synthetic oligonucleotide
gaauccauuggguagaagc

SEQ ID NO: 2181877 - RNA, 19 nt, Artificial Sequence
  Description of Artificial Sequence: Synthetic oligonucleotide
aagaaaauaccuugcuuuc

SEQ ID NO: 2181878 - RNA, 19 nt, Artificial Sequence
  Description of Artificial Sequence: Synthetic oligonucleotide
cucaaauuaucuaaaagac

SEQ ID NO: 2181879 - RNA, 19 nt, Artificial Sequence
  Description of Artificial Sequence: Synthetic oligonucleotide
aagacuuuuguuagggucc

SEQ ID NO: 2181880 - RNA, 19 nt, Artificial Sequence
  Description of Artificial Sequence: Synthetic oligonucleotide
acuagauccuuucaacacc

SEQ ID NO: 2181881 - RNA, 19 nt, Artificial Sequence
  Description of Artificial Sequence: Synthetic oligonucleotide
aggaauaucucaugcagcg

SEQ ID NO: 2181882 - RNA, 19 nt, Artificial Sequence
  Description of Artificial Sequence: Synthetic oligonucleotide
gaaaauaccuugcuuucgg

SEQ ID NO: 2181883 - RNA, 19 nt, Artificial Sequence
  Description of Artificial Sequence: Synthetic oligonucleotide
uguacauaggcuuucaauc

SEQ ID NO: 2181884 - RNA, 19 nt, Artificial Sequence
  Description of Artificial Sequence: Synthetic oligonucleotide
gaagcuuuaagaaaauacc

SEQ ID NO: 2181885 - RNA, 19 nt, Artificial Sequence
  Description of Artificial Sequence: Synthetic oligonucleotide
aguuuuaucaucugguacu

SEQ ID NO: 2181886 - RNA, 19 nt, Artificial Sequence
  Description of Artificial Sequence: Synthetic oligonucleotide
ucuugcugaauccauuggg

SEQ ID NO: 2181887 - RNA, 19 nt, Artificial Sequence
  Description of Artificial Sequence: Synthetic oligonucleotide
aauaccuugcuuucgggca

SEQ ID NO: 2181888 - RNA, 19 nt, Artificial Sequence
  Description of Artificial Sequence: Synthetic oligonucleotide
auaccuuacaaaauuuugc

SEQ ID NO: 2181889 - RNA, 19 nt, Artificial Sequence
  Description of Artificial Sequence: Synthetic oligonucleotide
uuggguagaagcuuuaaga

SEQ ID NO: 2181890 - RNA, 19 nt, Artificial Sequence
  Description of Artificial Sequence: Synthetic oligonucleotide
aagugcucaauuuccauug

SEQ ID NO: 2181891 - RNA, 19 nt, Artificial Sequence
  Description of Artificial Sequence: Synthetic oligonucleotide
aaaguuggauauucaauga

SEQ ID NO: 2181892 - RNA, 19 nt, Artificial Sequence
  Description of Artificial Sequence: Synthetic oligonucleotide
uuagaauuucauuaauagu

SEQ ID NO: 2181893 - RNA, 19 nt, Artificial Sequence
  Description of Artificial Sequence: Synthetic oligonucleotide
gaauaucucaugcagcgug

SEQ ID NO: 2181894 - RNA, 19 nt, Artificial Sequence
  Description of Artificial Sequence: Synthetic oligonucleotide
ucaauuuccauugccaagc

SEQ ID NO: 2181895 - RNA, 19 nt, Artificial Sequence
  Description of Artificial Sequence: Synthetic oligonucleotide
ugaauuuucuuuccucuug

SEQ ID NO: 2181896 - RNA, 19 nt, Artificial Sequence
  Description of Artificial Sequence: Synthetic oligonucleotide
uaggcuuucaaucuuugac

SEQ ID NO: 2181897 - RNA, 19 nt, Artificial Sequence
  Description of Artificial Sequence: Synthetic oligonucleotide
aggcuuucaaucuuugacg

SEQ ID NO: 2181898 - RNA, 19 nt, Artificial Sequence
  Description of Artificial Sequence: Synthetic oligonucleotide
aaaacuguugaauuuucuu

SEQ ID NO: 2181899 - RNA, 19 nt, Artificial Sequence
  Description of Artificial Sequence: Synthetic oligonucleotide
agauucacuuuucacuugg

SEQ ID NO: 2181900 - RNA, 19 nt, Artificial Sequence
  Description of Artificial Sequence: Synthetic oligonucleotide
ugucccacaaguuucacac

SEQ ID NO: 2181901 - RNA, 19 nt, Artificial Sequence
  Description of Artificial Sequence: Synthetic oligonucleotide
ucauuaauaguuuuaucau

SEQ ID NO: 2181902 - RNA, 19 nt, Artificial Sequence
  Description of Artificial Sequence: Synthetic oligonucleotide
gaaacuggagcuuuacaug

SEQ ID NO: 2181903 - RNA, 19 nt, Artificial Sequence
  Description of Artificial Sequence: Synthetic oligonucleotide
gauucaucuccguaaacug

SEQ ID NO: 2181904 - RNA, 19 nt, Artificial Sequence
  Description of Artificial Sequence: Synthetic oligonucleotide
aucucuugaaaccuggucu

SEQ ID NO: 2181905 - RNA, 19 nt, Artificial Sequence
  Description of Artificial Sequence: Synthetic oligonucleotide
aagaaaguaucucuugaaa

SEQ ID NO: 2181906 - RNA, 19 nt, Artificial Sequence
  Description of Artificial Sequence: Synthetic oligonucleotide
agguuuuagaauuucauua

SEQ ID NO: 2181907 - RNA, 19 nt, Artificial Sequence
  Description of Artificial Sequence: Synthetic oligonucleotide
auauuuucagcccucauua

SEQ ID NO: 2181908 - RNA, 19 nt, Artificial Sequence
  Description of Artificial Sequence: Synthetic oligonucleotide
uuacaugccagcagaacug

SEQ ID NO: 2181909 - RNA, 19 nt, Artificial Sequence
  Description of Artificial Sequence: Synthetic oligonucleotide
uguaagcgguuuuaucucg

SEQ ID NO: 2181910 - RNA, 19 nt, Artificial Sequence
  Description of Artificial Sequence: Synthetic oligonucleotide
aaaguaucucuugaaaccu

SEQ ID NO: 2181911 - RNA, 19 nt, Artificial Sequence
  Description of Artificial Sequence: Synthetic oligonucleotide
gauguaagcgguuuuaucu

SEQ ID NO: 2181912 - RNA, 19 nt, Artificial Sequence
  Description of Artificial Sequence: Synthetic oligonucleotide
uuuucagcccucauuaaaa

SEQ ID NO: 2181913 - RNA, 19 nt, Artificial Sequence
  Description of Artificial Sequence: Synthetic oligonucleotide
uaagguuuuagaauuucau

SEQ ID NO: 2181914 - RNA, 19 nt, Artificial Sequence
  Description of Artificial Sequence: Synthetic oligonucleotide
uuugacgaaucacaggauc

SEQ ID NO: 2181915 - RNA, 19 nt, Artificial Sequence
  Description of Artificial Sequence: Synthetic oligonucleotide
auagucacuuaggagauuc

SEQ ID NO: 2181916 - RNA, 19 nt, Artificial Sequence
  Description of Artificial Sequence: Synthetic oligonucleotide
uggauauucaaugaucacu

SEQ ID NO: 2181917 - RNA, 19 nt, Artificial Sequence
  Description of Artificial Sequence: Synthetic oligonucleotide
agucugugaguguacauag

SEQ ID NO: 2181918 - RNA, 19 nt, Artificial Sequence
  Description of Artificial Sequence: Synthetic oligonucleotide
aagcuuuaagaaaauaccu

SEQ ID NO: 2181919 - RNA, 19 nt, Artificial Sequence
  Description of Artificial Sequence: Synthetic oligonucleotide
uuuucauaaauaacaggua

SEQ ID NO: 2181920 - RNA, 19 nt, Artificial Sequence
  Description of Artificial Sequence: Synthetic oligonucleotide
uucaagaaaguaucucuug

SEQ ID NO: 2181921 - RNA, 19 nt, Artificial Sequence
  Description of Artificial Sequence: Synthetic oligonucleotide
ucagcccucauuaaaauuu

SEQ ID NO: 2181922 - RNA, 19 nt, Artificial Sequence
  Description of Artificial Sequence: Synthetic oligonucleotide
aacugcuguagugagaugu

SEQ ID NO: 2181923 - RNA, 19 nt, Artificial Sequence
  Description of Artificial Sequence: Synthetic oligonucleotide
uucucaaccaucugggaac

SEQ ID NO: 2181924 - RNA, 19 nt, Artificial Sequence
  Description of Artificial Sequence: Synthetic oligonucleotide
aaucuuugacgaaucacag

SEQ ID NO: 2181925 - RNA, 19 nt, Artificial Sequence
  Description of Artificial Sequence: Synthetic oligonucleotide
ugcugaauccauuggguag

SEQ ID NO: 2181926 - RNA, 19 nt, Artificial Sequence
  Description of Artificial Sequence: Synthetic oligonucleotide
uuuaucucggacuccauua

SEQ ID NO: 2181927 - RNA, 19 nt, Artificial Sequence
  Description of Artificial Sequence: Synthetic oligonucleotide
uuaaaauuuggaccccagu

SEQ ID NO: 2181928 - RNA, 19 nt, Artificial Sequence
  Description of Artificial Sequence: Synthetic oligonucleotide
cuugacauggccagcuucc

SEQ ID NO: 2181929 - RNA, 19 nt, Artificial Sequence
  Description of Artificial Sequence: Synthetic oligonucleotide
agauccuuucaacaccacg

SEQ ID NO: 2181930 - RNA, 19 nt, Artificial Sequence
  Description of Artificial Sequence: Synthetic oligonucleotide
ugcucaauuuccauugcca

SEQ ID NO: 2181931 - RNA, 19 nt, Artificial Sequence
  Description of Artificial Sequence: Synthetic oligonucleotide
auguaagcgguuuuaucuc

SEQ ID NO: 2181932 - RNA, 19 nt, Artificial Sequence
  Description of Artificial Sequence: Synthetic oligonucleotide
ucgauguaagguuuuagaa

SEQ ID NO: 2181933 - RNA, 19 nt, Artificial Sequence
  Description of Artificial Sequence: Synthetic oligonucleotide
uuugcuccucaaauuaucu

SEQ ID NO: 2181934 - RNA, 19 nt, Artificial Sequence
  Description of Artificial Sequence: Synthetic oligonucleotide
uguguacucggccugacuc

SEQ ID NO: 2181935 - RNA, 19 nt, Artificial Sequence
  Description of Artificial Sequence: Synthetic oligonucleotide
uacuagauccuuucaacac

SEQ ID NO: 2181936 - RNA, 19 nt, Artificial Sequence
  Description of Artificial Sequence: Synthetic oligonucleotide
aagcgguuuuaucucggac

SEQ ID NO: 2181937 - RNA, 19 nt, Artificial Sequence
  Description of Artificial Sequence: Synthetic oligonucleotide
auuggguagaagcuuuaag

SEQ ID NO: 2181938 - RNA, 19 nt, Artificial Sequence
  Description of Artificial Sequence: Synthetic oligonucleotide
ucauaauaccuuacaaaau

SEQ ID NO: 2181939 - RNA, 19 nt, Artificial Sequence
  Description of Artificial Sequence: Synthetic oligonucleotide
aguucauaauaccuuacaa

SEQ ID NO: 2181940 - RNA, 19 nt, Artificial Sequence
  Description of Artificial Sequence: Synthetic oligonucleotide
aaccgauagucacuuagga

SEQ ID NO: 2181941 - RNA, 19 nt, Artificial Sequence
  Description of Artificial Sequence: Synthetic oligonucleotide
ucucuugaaaccuggucug

SEQ ID NO: 2181942 - RNA, 19 nt, Artificial Sequence
  Description of Artificial Sequence: Synthetic oligonucleotide
uggguagaagcuuuaagaa

SEQ ID NO: 2181943 - RNA, 19 nt, Artificial Sequence
  Description of Artificial Sequence: Synthetic oligonucleotide
aaaccgauagucacuuagg

SEQ ID NO: 2181944 - RNA, 19 nt, Artificial Sequence
  Description of Artificial Sequence: Synthetic oligonucleotide
aaaagacuuuuguuagggu

SEQ ID NO: 2181945 - RNA, 19 nt, Artificial Sequence
  Description of Artificial Sequence: Synthetic oligonucleotide
ugcuccucaaauuaucuaa

SEQ ID NO: 2181946 - RNA, 19 nt, Artificial Sequence
  Description of Artificial Sequence: Synthetic oligonucleotide
ugcuguagugagauguaag

SEQ ID NO: 2181947 - RNA, 19 nt, Artificial Sequence
  Description of Artificial Sequence: Synthetic oligonucleotide
gauguaagguuuuagaauu

SEQ ID NO: 2181948 - RNA, 19 nt, Artificial Sequence
  Description of Artificial Sequence: Synthetic oligonucleotide
uucuuugacgcgcaccgcc

SEQ ID NO: 2181949 - RNA, 19 nt, Artificial Sequence
  Description of Artificial Sequence: Synthetic oligonucleotide
aucgauguaagguuuuaga

SEQ ID NO: 2181950 - RNA, 19 nt, Artificial Sequence
  Description of Artificial Sequence: Synthetic oligonucleotide
aacaccacgugcaaaguug

SEQ ID NO: 2181951 - RNA, 19 nt, Artificial Sequence
  Description of Artificial Sequence: Synthetic oligonucleotide
uuuuguuaggguccaguuc

SEQ ID NO: 2181952 - RNA, 19 nt, Artificial Sequence
  Description of Artificial Sequence: Synthetic oligonucleotide
uuucaagaaaguaucucuu

SEQ ID NO: 2181953 - RNA, 19 nt, Artificial Sequence
  Description of Artificial Sequence: Synthetic oligonucleotide
uuuaucaucugguacucuu

SEQ ID NO: 2181954 - RNA, 19 nt, Artificial Sequence
  Description of Artificial Sequence: Synthetic oligonucleotide
uacaaaauuuugcugcaua

SEQ ID NO: 2181955 - RNA, 19 nt, Artificial Sequence
  Description of Artificial Sequence: Synthetic oligonucleotide
aucuuugacgaaucacagg

SEQ ID NO: 2181956 - RNA, 19 nt, Artificial Sequence
  Description of Artificial Sequence: Synthetic oligonucleotide
guucauaauaccuuacaaa

SEQ ID NO: 2181957 - RNA, 19 nt, Artificial Sequence
  Description of Artificial Sequence: Synthetic oligonucleotide
ucuggguagauucacuuuu

SEQ ID NO: 2181958 - RNA, 19 nt, Artificial Sequence
  Description of Artificial Sequence: Synthetic oligonucleotide
agaaaauaccuugcuuucg

SEQ ID NO: 2181959 - RNA, 19 nt, Artificial Sequence
  Description of Artificial Sequence: Synthetic oligonucleotide
uuacgcagggcaaacugca

SEQ ID NO: 2181960 - RNA, 19 nt, Artificial Sequence
  Description of Artificial Sequence: Synthetic oligonucleotide
agugcucaauuuccauugc

SEQ ID NO: 2181961 - RNA, 19 nt, Artificial Sequence
  Description of Artificial Sequence: Synthetic oligonucleotide
agcgguuuuaucucggacu

SEQ ID NO: 2181962 - RNA, 19 nt, Artificial Sequence
  Description of Artificial Sequence: Synthetic oligonucleotide
agcuuuacaugccagcaga

SEQ ID NO: 2181963 - RNA, 19 nt, Artificial Sequence
  Description of Artificial Sequence: Synthetic oligonucleotide
uacuuugccucuucugucc

SEQ ID NO: 2181964 - RNA, 19 nt, Artificial Sequence
  Description of Artificial Sequence: Synthetic oligonucleotide
uuggaccccagucugugag

SEQ ID NO: 2181965 - RNA, 19 nt, Artificial Sequence
  Description of Artificial Sequence: Synthetic oligonucleotide
accgauagucacuuaggag

SEQ ID NO: 2181966 - RNA, 19 nt, Artificial Sequence
  Description of Artificial Sequence: Synthetic oligonucleotide
guuggauauucaaugauca

SEQ ID NO: 2181967 - RNA, 19 nt, Artificial Sequence
  Description of Artificial Sequence: Synthetic oligonucleotide
uucaaugaucacuuugcuc

SEQ ID NO: 2181968 - RNA, 19 nt, Artificial Sequence
  Description of Artificial Sequence: Synthetic oligonucleotide
uucaaucuuugacgaauca

SEQ ID NO: 2181969 - RNA, 19 nt, Artificial Sequence
  Description of Artificial Sequence: Synthetic oligonucleotide
accuuacaaaauuuugcug

SEQ ID NO: 2181970 - RNA, 19 nt, Artificial Sequence
  Description of Artificial Sequence: Synthetic oligonucleotide
uaucucuugaaaccugguc

SEQ ID NO: 2181971 - RNA, 19 nt, Artificial Sequence
  Description of Artificial Sequence: Synthetic oligonucleotide
uccguaaacugcuguagug

SEQ ID NO: 2181972 - RNA, 19 nt, Artificial Sequence
  Description of Artificial Sequence: Synthetic oligonucleotide
ucggacuccauuacaaguc

SEQ ID NO: 2181973 - RNA, 19 nt, Artificial Sequence
  Description of Artificial Sequence: Synthetic oligonucleotide
gagcccucuucuuugacgc

SEQ ID NO: 2181974 - RNA, 19 nt, Artificial Sequence
  Description of Artificial Sequence: Synthetic oligonucleotide
uuucaaucuuugacgaauc

SEQ ID NO: 2181975 - RNA, 19 nt, Artificial Sequence
  Description of Artificial Sequence: Synthetic oligonucleotide
acgaaucacaggaucagac

SEQ ID NO: 2181976 - RNA, 19 nt, Artificial Sequence
  Description of Artificial Sequence: Synthetic oligonucleotide
aguaucucuugaaaccugg

SEQ ID NO: 2181977 - RNA, 19 nt, Artificial Sequence
  Description of Artificial Sequence: Synthetic oligonucleotide
cugcaagugcucaauuucc

SEQ ID NO: 2181978 - RNA, 19 nt, Artificial Sequence
  Description of Artificial Sequence: Synthetic oligonucleotide
aggagauucaucuccguaa

SEQ ID NO: 2181979 - RNA, 19 nt, Artificial Sequence
  Description of Artificial Sequence: Synthetic oligonucleotide
uggucugcaguucuugcca

SEQ ID NO: 2181980 - RNA, 19 nt, Artificial Sequence
  Description of Artificial Sequence: Synthetic oligonucleotide
aggaucagacuucucagga

SEQ ID NO: 2181981 - RNA, 19 nt, Artificial Sequence
  Description of Artificial Sequence: Synthetic oligonucleotide
ucccguuugacguccacgc

SEQ ID NO: 2181982 - RNA, 19 nt, Artificial Sequence
  Description of Artificial Sequence: Synthetic oligonucleotide
ccucaaauuaucuaaaaga

SEQ ID NO: 2181983 - RNA, 19 nt, Artificial Sequence
  Description of Artificial Sequence: Synthetic oligonucleotide
ucaggaucgauguaagguu

SEQ ID NO: 2181984 - RNA, 19 nt, Artificial Sequence
  Description of Artificial Sequence: Synthetic oligonucleotide
uuaucucggacuccauuac

SEQ ID NO: 2181985 - RNA, 19 nt, Artificial Sequence
  Description of Artificial Sequence: Synthetic oligonucleotide
agaacugcugcuuccuaug

SEQ ID NO: 2181986 - RNA, 19 nt, Artificial Sequence
  Description of Artificial Sequence: Synthetic oligonucleotide
auuuucagcccucauuaaa

SEQ ID NO: 2181987 - RNA, 19 nt, Artificial Sequence
  Description of Artificial Sequence: Synthetic oligonucleotide
aacuggagcuuuacaugcc

SEQ ID NO: 2181988 - RNA, 19 nt, Artificial Sequence
  Description of Artificial Sequence: Synthetic oligonucleotide
cauuacaagucaguucugc

SEQ ID NO: 2181989 - RNA, 19 nt, Artificial Sequence
  Description of Artificial Sequence: Synthetic oligonucleotide
ugcugcauauuuucagccc

SEQ ID NO: 2181990 - RNA, 19 nt, Artificial Sequence
  Description of Artificial Sequence: Synthetic oligonucleotide
ugcaagugcucaauuucca

SEQ ID NO: 2181991 - RNA, 19 nt, Artificial Sequence
  Description of Artificial Sequence: Synthetic oligonucleotide
auaguuuuaucaucuggua

SEQ ID NO: 2181992 - RNA, 19 nt, Artificial Sequence
  Description of Artificial Sequence: Synthetic oligonucleotide
uccaguucauaauaccuua

SEQ ID NO: 2181993 - RNA, 19 nt, Artificial Sequence
  Description of Artificial Sequence: Synthetic oligonucleotide
aagucaguucugcuuugug

SEQ ID NO: 2181994 - RNA, 19 nt, Artificial Sequence
  Description of Artificial Sequence: Synthetic oligonucleotide
agcugcaugccacuacuag

SEQ ID NO: 2181995 - RNA, 19 nt, Artificial Sequence
  Description of Artificial Sequence: Synthetic oligonucleotide
auugccaagcuucugggua

SEQ ID NO: 2181996 - RNA, 19 nt, Artificial Sequence
  Description of Artificial Sequence: Synthetic oligonucleotide
uucacaccuugacauggcc

SEQ ID NO: 2181997 - RNA, 19 nt, Artificial Sequence
  Description of Artificial Sequence: Synthetic oligonucleotide
uuuccauugccaagcuucu

SEQ ID NO: 2181998 - RNA, 19 nt, Artificial Sequence
  Description of Artificial Sequence: Synthetic oligonucleotide
ucuccguaaacugcuguag

SEQ ID NO: 2181999 - RNA, 19 nt, Artificial Sequence
  Description of Artificial Sequence: Synthetic oligonucleotide
uuuuaucucggacuccauu

SEQ ID NO: 2182000 - RNA, 19 nt, Artificial Sequence
  Description of Artificial Sequence: Synthetic oligonucleotide
ucaugcagcguggacaucu

SEQ ID NO: 2182001 - RNA, 19 nt, Artificial Sequence
  Description of Artificial Sequence: Synthetic oligonucleotide
ucucaggaucgauguaagg

SEQ ID NO: 2182002 - RNA, 19 nt, Artificial Sequence
  Description of Artificial Sequence: Synthetic oligonucleotide
ugacgaaucacaggaucag

SEQ ID NO: 2182003 - RNA, 19 nt, Artificial Sequence
  Description of Artificial Sequence: Synthetic oligonucleotide
caaccaucugggaacuucc

SEQ ID NO: 2182004 - RNA, 19 nt, Artificial Sequence
  Description of Artificial Sequence: Synthetic oligonucleotide
uuggauauucaaugaucac

SEQ ID NO: 2182005 - RNA, 19 nt, Artificial Sequence
  Description of Artificial Sequence: Synthetic oligonucleotide
uguaagguuuuagaauuuc

SEQ ID NO: 2182006 - RNA, 19 nt, Artificial Sequence
  Description of Artificial Sequence: Synthetic oligonucleotide
cuuugcuccucaaauuauc

SEQ ID NO: 2182007 - RNA, 19 nt, Artificial Sequence
  Description of Artificial Sequence: Synthetic oligonucleotide
uggagcuuuacaugccagc

SEQ ID NO: 2182008 - RNA, 19 nt, Artificial Sequence
  Description of Artificial Sequence: Synthetic oligonucleotide
uuggucuuuucaagaaagu

SEQ ID NO: 2182009 - RNA, 19 nt, Artificial Sequence
  Description of Artificial Sequence: Synthetic oligonucleotide
caggaucagacuucucagg

SEQ ID NO: 2182010 - RNA, 19 nt, Artificial Sequence
  Description of Artificial Sequence: Synthetic oligonucleotide
ucucggacuccauuacaag

SEQ ID NO: 2182011 - RNA, 19 nt, Artificial Sequence
  Description of Artificial Sequence: Synthetic oligonucleotide
uuucacaccuugacauggc

SEQ ID NO: 2182012 - RNA, 19 nt, Artificial Sequence
  Description of Artificial Sequence: Synthetic oligonucleotide
gguagauucacuuuucacu

SEQ ID NO: 2182013 - RNA, 19 nt, Artificial Sequence
  Description of Artificial Sequence: Synthetic oligonucleotide
gagcuuuacaugccagcag

SEQ ID NO: 2182014 - RNA, 19 nt, Artificial Sequence
  Description of Artificial Sequence: Synthetic oligonucleotide
uggguagauucacuuuuca

SEQ ID NO: 2182015 - RNA, 19 nt, Artificial Sequence
  Description of Artificial Sequence: Synthetic oligonucleotide
uugcuuucgggcacgauuu

SEQ ID NO: 2182016 - RNA, 19 nt, Artificial Sequence
  Description of Artificial Sequence: Synthetic oligonucleotide
uaggguccaguucauaaua

SEQ ID NO: 2182017 - RNA, 19 nt, Artificial Sequence
  Description of Artificial Sequence: Synthetic oligonucleotide
cacaggaucagacuucuca

SEQ ID NO: 2182018 - RNA, 19 nt, Artificial Sequence
  Description of Artificial Sequence: Synthetic oligonucleotide
acgcagggcaaacugcagg

SEQ ID NO: 2182019 - RNA, 19 nt, Artificial Sequence
  Description of Artificial Sequence: Synthetic oligonucleotide
guuaggguccaguucauaa

SEQ ID NO: 2182020 - RNA, 19 nt, Artificial Sequence
  Description of Artificial Sequence: Synthetic oligonucleotide
caugccagcagaacugcug

SEQ ID NO: 2182021 - RNA, 19 nt, Artificial Sequence
  Description of Artificial Sequence: Synthetic oligonucleotide
uacucggccugacucuggg

SEQ ID NO: 2182022 - RNA, 19 nt, Artificial Sequence
  Description of Artificial Sequence: Synthetic oligonucleotide
ugacucuggggaaacugga

SEQ ID NO: 2182023 - RNA, 19 nt, Artificial Sequence
  Description of Artificial Sequence: Synthetic oligonucleotide
uaucucggacuccauuaca

SEQ ID NO: 2182024 - RNA, 19 nt, Artificial Sequence
  Description of Artificial Sequence: Synthetic oligonucleotide
cuagauccuuucaacacca

SEQ ID NO: 2182025 - RNA, 19 nt, Artificial Sequence
  Description of Artificial Sequence: Synthetic oligonucleotide
uagauucacuuuucacuug

SEQ ID NO: 2182026 - RNA, 19 nt, Artificial Sequence
  Description of Artificial Sequence: Synthetic oligonucleotide
ucucaugcagcguggacau

SEQ ID NO: 2182027 - RNA, 19 nt, Artificial Sequence
  Description of Artificial Sequence: Synthetic oligonucleotide
cuccauuacaagucaguuc

SEQ ID NO: 2182028 - RNA, 19 nt, Artificial Sequence
  Description of Artificial Sequence: Synthetic oligonucleotide
gauccuuucaacaccacgu

SEQ ID NO: 2182029 - RNA, 19 nt, Artificial Sequence
  Description of Artificial Sequence: Synthetic oligonucleotide
uacauaggcuuucaaucuu

SEQ ID NO: 2182030 - RNA, 19 nt, Artificial Sequence
  Description of Artificial Sequence: Synthetic oligonucleotide
ucaaccaucugggaacuuc

SEQ ID NO: 2182031 - RNA, 19 nt, Artificial Sequence
  Description of Artificial Sequence: Synthetic oligonucleotide
aucucaugcagcguggaca

SEQ ID NO: 2182032 - RNA, 19 nt, Artificial Sequence
  Description of Artificial Sequence: Synthetic oligonucleotide
gguuuuagaauuucauuaa

SEQ ID NO: 2182033 - RNA, 19 nt, Artificial Sequence
  Description of Artificial Sequence: Synthetic oligonucleotide
uuucagcccucauuaaaau

SEQ ID NO: 2182034 - RNA, 19 nt, Artificial Sequence
  Description of Artificial Sequence: Synthetic oligonucleotide
uccauuggguagaagcuuu

SEQ ID NO: 2182035 - RNA, 19 nt, Artificial Sequence
  Description of Artificial Sequence: Synthetic oligonucleotide
ccgauagucacuuaggaga

SEQ ID NO: 2182036 - RNA, 19 nt, Artificial Sequence
  Description of Artificial Sequence: Synthetic oligonucleotide
uuugacgcgcaccgccucc

SEQ ID NO: 2182037 - RNA, 19 nt, Artificial Sequence
  Description of Artificial Sequence: Synthetic oligonucleotide
uaggagauucaucuccgua

SEQ ID NO: 2182038 - RNA, 19 nt, Artificial Sequence
  Description of Artificial Sequence: Synthetic oligonucleotide
aaguaucucuugaaaccug

SEQ ID NO: 2182039 - RNA, 19 nt, Artificial Sequence
  Description of Artificial Sequence: Synthetic oligonucleotide
gcuuugugcuucuuuacgc

SEQ ID NO: 2182040 - RNA, 19 nt, Artificial Sequence
  Description of Artificial Sequence: Synthetic oligonucleotide
ucuuugacgcgcaccgccu

SEQ ID NO: 2182041 - RNA, 19 nt, Artificial Sequence
  Description of Artificial Sequence: Synthetic oligonucleotide
caaguuucacaccuugaca

SEQ ID NO: 2182042 - RNA, 19 nt, Artificial Sequence
  Description of Artificial Sequence: Synthetic oligonucleotide
auaggcuuucaaucuuuga

SEQ ID NO: 2182043 - RNA, 19 nt, Artificial Sequence
  Description of Artificial Sequence: Synthetic oligonucleotide
ucuugagggagcccucuuc

SEQ ID NO: 2182044 - RNA, 19 nt, Artificial Sequence
  Description of Artificial Sequence: Synthetic oligonucleotide
ucuugaaaccuggucugca

SEQ ID NO: 2182045 - RNA, 19 nt, Artificial Sequence
  Description of Artificial Sequence: Synthetic oligonucleotide
gacuucucaggaucgaugu

SEQ ID NO: 2182046 - RNA, 19 nt, Artificial Sequence
  Description of Artificial Sequence: Synthetic oligonucleotide
uugacguccacgcccuccu

SEQ ID NO: 2182047 - RNA, 19 nt, Artificial Sequence
  Description of Artificial Sequence: Synthetic oligonucleotide
ugagauguaagcgguuuua

SEQ ID NO: 2182048 - RNA, 19 nt, Artificial Sequence
  Description of Artificial Sequence: Synthetic oligonucleotide
uaagcgguuuuaucucgga

SEQ ID NO: 2182049 - RNA, 19 nt, Artificial Sequence
  Description of Artificial Sequence: Synthetic oligonucleotide
guagauucacuuuucacuu

SEQ ID NO: 2182050 - RNA, 19 nt, Artificial Sequence
  Description of Artificial Sequence: Synthetic oligonucleotide
ucacuuugcuccucaaauu

SEQ ID NO: 2182051 - RNA, 19 nt, Artificial Sequence
  Description of Artificial Sequence: Synthetic oligonucleotide
uuugacguccacgcccucc

SEQ ID NO: 2182052 - RNA, 19 nt, Artificial Sequence
  Description of Artificial Sequence: Synthetic oligonucleotide
uugcugaauccauugggua

SEQ ID NO: 2182053 - RNA, 19 nt, Artificial Sequence
  Description of Artificial Sequence: Synthetic oligonucleotide
gacauggccagcuuccucu

SEQ ID NO: 2182054 - RNA, 19 nt, Artificial Sequence
  Description of Artificial Sequence: Synthetic oligonucleotide
uccgucuugagggagcccu

SEQ ID NO: 2182055 - RNA, 19 nt, Artificial Sequence
  Description of Artificial Sequence: Synthetic oligonucleotide
guacauaggcuuucaaucu

SEQ ID NO: 2182056 - RNA, 19 nt, Artificial Sequence
  Description of Artificial Sequence: Synthetic oligonucleotide
cuuuacaugccagcagaac

SEQ ID NO: 2182057 - RNA, 19 nt, Artificial Sequence
  Description of Artificial Sequence: Synthetic oligonucleotide
agcuuuaagaaaauaccuu

SEQ ID NO: 2182058 - RNA, 19 nt, Artificial Sequence
  Description of Artificial Sequence: Synthetic oligonucleotide
gugcucaauuuccauugcc

SEQ ID NO: 2182059 - RNA, 19 nt, Artificial Sequence
  Description of Artificial Sequence: Synthetic oligonucleotide
guaagcgguuuuaucucgg

SEQ ID NO: 2182060 - RNA, 19 nt, Artificial Sequence
  Description of Artificial Sequence: Synthetic oligonucleotide
ccaucugggaacuuccacc

SEQ ID NO: 2182061 - RNA, 19 nt, Artificial Sequence
  Description of Artificial Sequence: Synthetic oligonucleotide
cuugccacgucuuccaaaa

SEQ ID NO: 2182062 - RNA, 19 nt, Artificial Sequence
  Description of Artificial Sequence: Synthetic oligonucleotide
aggguccaguucauaauac

SEQ ID NO: 2182063 - RNA, 19 nt, Artificial Sequence
  Description of Artificial Sequence: Synthetic oligonucleotide
ggagcccucuucuuugacg

SEQ ID NO: 2182064 - RNA, 19 nt, Artificial Sequence
  Description of Artificial Sequence: Synthetic oligonucleotide
auuuggaccccagucugug

SEQ ID NO: 2182065 - RNA, 19 nt, Artificial Sequence
  Description of Artificial Sequence: Synthetic oligonucleotide
uguacucggccugacucug

SEQ ID NO: 2182066 - RNA, 19 nt, Artificial Sequence
  Description of Artificial Sequence: Synthetic oligonucleotide
caguucauaauaccuuaca

SEQ ID NO: 2182067 - RNA, 19 nt, Artificial Sequence
  Description of Artificial Sequence: Synthetic oligonucleotide
guacuuugccucuucuguc

SEQ ID NO: 2182068 - RNA, 19 nt, Artificial Sequence
  Description of Artificial Sequence: Synthetic oligonucleotide
uucagcccucauuaaaauu

SEQ ID NO: 2182069 - RNA, 19 nt, Artificial Sequence
  Description of Artificial Sequence: Synthetic oligonucleotide
uccuucacguccugacccc

SEQ ID NO: 2182070 - RNA, 19 nt, Artificial Sequence
  Description of Artificial Sequence: Synthetic oligonucleotide
aaacugcuguagugagaug

SEQ ID NO: 2182071 - RNA, 19 nt, Artificial Sequence
  Description of Artificial Sequence: Synthetic oligonucleotide
acaccacgugcaaaguugg

SEQ ID NO: 2182072 - RNA, 19 nt, Artificial Sequence
  Description of Artificial Sequence: Synthetic oligonucleotide
cuucucaaccaucugggaa

SEQ ID NO: 2182073 - RNA, 19 nt, Artificial Sequence
  Description of Artificial Sequence: Synthetic oligonucleotide
gagauucaucuccguaaac

SEQ ID NO: 2182074 - RNA, 19 nt, Artificial Sequence
  Description of Artificial Sequence: Synthetic oligonucleotide
uagucacuuaggagauuca

SEQ ID NO: 2182075 - RNA, 19 nt, Artificial Sequence
  Description of Artificial Sequence: Synthetic oligonucleotide
aauuuggaccccagucugu

SEQ ID NO: 2182076 - RNA, 19 nt, Artificial Sequence
  Description of Artificial Sequence: Synthetic oligonucleotide
cuggagcuuuacaugccag

SEQ ID NO: 2182077 - RNA, 19 nt, Artificial Sequence
  Description of Artificial Sequence: Synthetic oligonucleotide
ggcuuucaaucuuugacga

SEQ ID NO: 2182078 - RNA, 19 nt, Artificial Sequence
  Description of Artificial Sequence: Synthetic oligonucleotide
gacucuggggaaacuggag

SEQ ID NO: 2182079 - RNA, 19 nt, Artificial Sequence
  Description of Artificial Sequence: Synthetic oligonucleotide
gaagcugcaugccacuacu

SEQ ID NO: 2182080 - RNA, 19 nt, Artificial Sequence
  Description of Artificial Sequence: Synthetic oligonucleotide
ucacccgcgggccauccga

SEQ ID NO: 2182081 - RNA, 19 nt, Artificial Sequence
  Description of Artificial Sequence: Synthetic oligonucleotide
uuugccucuucugucccac

SEQ ID NO: 2182082 - RNA, 19 nt, Artificial Sequence
  Description of Artificial Sequence: Synthetic oligonucleotide
uucuuuacgcagggcaaac

SEQ ID NO: 2182083 - RNA, 19 nt, Artificial Sequence
  Description of Artificial Sequence: Synthetic oligonucleotide
uagaagcuuuaagaaaaua

SEQ ID NO: 2182084 - RNA, 19 nt, Artificial Sequence
  Description of Artificial Sequence: Synthetic oligonucleotide
gaucacuuugcuccucaaa

SEQ ID NO: 2182085 - RNA, 19 nt, Artificial Sequence
  Description of Artificial Sequence: Synthetic oligonucleotide
ucuugccacgucuuccaaa

SEQ ID NO: 2182086 - RNA, 19 nt, Artificial Sequence
  Description of Artificial Sequence: Synthetic oligonucleotide
uuacaaaauuuugcugcau

SEQ ID NO: 2182087 - RNA, 19 nt, Artificial Sequence
  Description of Artificial Sequence: Synthetic oligonucleotide
agugagauguaagcgguuu

SEQ ID NO: 2182088 - RNA, 19 nt, Artificial Sequence
  Description of Artificial Sequence: Synthetic oligonucleotide
agacuucucaggaucgaug

SEQ ID NO: 2182089 - RNA, 19 nt, Artificial Sequence
  Description of Artificial Sequence: Synthetic oligonucleotide
cuggguagauucacuuuuc

SEQ ID NO: 2182090 - RNA, 19 nt, Artificial Sequence
  Description of Artificial Sequence: Synthetic oligonucleotide
uugcuccucaaauuaucua

SEQ ID NO: 2182091 - RNA, 19 nt, Artificial Sequence
  Description of Artificial Sequence: Synthetic oligonucleotide
cuugcugaauccauugggu

SEQ ID NO: 2182092 - RNA, 19 nt, Artificial Sequence
  Description of Artificial Sequence: Synthetic oligonucleotide
gaacugcugcuuccuauga

SEQ ID NO: 2182093 - RNA, 19 nt, Artificial Sequence
  Description of Artificial Sequence: Synthetic oligonucleotide
cucuucuuugacgcgcacc

SEQ ID NO: 2182094 - RNA, 19 nt, Artificial Sequence
  Description of Artificial Sequence: Synthetic oligonucleotide
aguguacauaggcuuucaa

SEQ ID NO: 2182095 - RNA, 19 nt, Artificial Sequence
  Description of Artificial Sequence: Synthetic oligonucleotide
agucacuuaggagauucau

SEQ ID NO: 2182096 - RNA, 19 nt, Artificial Sequence
  Description of Artificial Sequence: Synthetic oligonucleotide
aucuccguaaacugcugua

SEQ ID NO: 2182097 - RNA, 19 nt, Artificial Sequence
  Description of Artificial Sequence: Synthetic oligonucleotide
cagcagaacugcugcuucc

SEQ ID NO: 2182098 - RNA, 19 nt, Artificial Sequence
  Description of Artificial Sequence: Synthetic oligonucleotide
ucucaaccaucugggaacu

SEQ ID NO: 2182099 - RNA, 19 nt, Artificial Sequence
  Description of Artificial Sequence: Synthetic oligonucleotide
ggguagauucacuuuucac

SEQ ID NO: 2182100 - RNA, 19 nt, Artificial Sequence
  Description of Artificial Sequence: Synthetic oligonucleotide
gguuuuaucucggacucca

SEQ ID NO: 2182101 - RNA, 19 nt, Artificial Sequence
  Description of Artificial Sequence: Synthetic oligonucleotide
ggguccaguucauaauacc

SEQ ID NO: 2182102 - RNA, 19 nt, Artificial Sequence
  Description of Artificial Sequence: Synthetic oligonucleotide
cucaggaucgauguaaggu

SEQ ID NO: 2182103 - RNA, 19 nt, Artificial Sequence
  Description of Artificial Sequence: Synthetic oligonucleotide
ccuuucaacaccacgugca

SEQ ID NO: 2182104 - RNA, 19 nt, Artificial Sequence
  Description of Artificial Sequence: Synthetic oligonucleotide
ugcaugccacuacuagauc

SEQ ID NO: 2182105 - RNA, 19 nt, Artificial Sequence
  Description of Artificial Sequence: Synthetic oligonucleotide
uagauccuuucaacaccac

SEQ ID NO: 2182106 - RNA, 19 nt, Artificial Sequence
  Description of Artificial Sequence: Synthetic oligonucleotide
guguacauaggcuuucaau

SEQ ID NO: 2182107 - RNA, 19 nt, Artificial Sequence
  Description of Artificial Sequence: Synthetic oligonucleotide
ccauugccaagcuucuggg

SEQ ID NO: 2182108 - RNA, 19 nt, Artificial Sequence
  Description of Artificial Sequence: Synthetic oligonucleotide
cguaaacugcuguagugag

SEQ ID NO: 2182109 - RNA, 19 nt, Artificial Sequence
  Description of Artificial Sequence: Synthetic oligonucleotide
cucccguuugacguccacg

SEQ ID NO: 2182110 - RNA, 19 nt, Artificial Sequence
  Description of Artificial Sequence: Synthetic oligonucleotide
uaccuugcuuucgggcacg

SEQ ID NO: 2182111 - RNA, 19 nt, Artificial Sequence
  Description of Artificial Sequence: Synthetic oligonucleotide
agcccucauuaaaauuugg

SEQ ID NO: 2182112 - RNA, 19 nt, Artificial Sequence
  Description of Artificial Sequence: Synthetic oligonucleotide
cucuugaaaccuggucugc

SEQ ID NO: 2182113 - RNA, 19 nt, Artificial Sequence
  Description of Artificial Sequence: Synthetic oligonucleotide
ggguagaagcuuuaagaaa

SEQ ID NO: 2182114 - RNA, 19 nt, Artificial Sequence
  Description of Artificial Sequence: Synthetic oligonucleotide
cucggccugacucugggga

SEQ ID NO: 2182115 - RNA, 19 nt, Artificial Sequence
  Description of Artificial Sequence: Synthetic oligonucleotide
accacgugcaaaguuggau

SEQ ID NO: 2182116 - RNA, 19 nt, Artificial Sequence
  Description of Artificial Sequence: Synthetic oligonucleotide
cuuccgucuugagggagcc

SEQ ID NO: 2182117 - RNA, 19 nt, Artificial Sequence
  Description of Artificial Sequence: Synthetic oligonucleotide
aucucggacuccauuacaa

SEQ ID NO: 2182118 - RNA, 19 nt, Artificial Sequence
  Description of Artificial Sequence: Synthetic oligonucleotide
gacgaaucacaggaucaga

SEQ ID NO: 2182119 - RNA, 19 nt, Artificial Sequence
  Description of Artificial Sequence: Synthetic oligonucleotide
guagugagauguaagcggu

SEQ ID NO: 2182120 - RNA, 19 nt, Artificial Sequence
  Description of Artificial Sequence: Synthetic oligonucleotide
gaagaagcugcaugccacu

SEQ ID NO: 2182121 - RNA, 19 nt, Artificial Sequence
  Description of Artificial Sequence: Synthetic oligonucleotide
gcgguuuuaucucggacuc

SEQ ID NO: 2182122 - RNA, 19 nt, Artificial Sequence
  Description of Artificial Sequence: Synthetic oligonucleotide
ccguuugacguccacgccc

SEQ ID NO: 2182123 - RNA, 19 nt, Artificial Sequence
  Description of Artificial Sequence: Synthetic oligonucleotide
gcagcguggacaucuguac

SEQ ID NO: 2182124 - RNA, 19 nt, Artificial Sequence
  Description of Artificial Sequence: Synthetic oligonucleotide
ggagauucaucuccguaaa

SEQ ID NO: 2182125 - RNA, 19 nt, Artificial Sequence
  Description of Artificial Sequence: Synthetic oligonucleotide
acucggccugacucugggg

SEQ ID NO: 2182126 - RNA, 19 nt, Artificial Sequence
  Description of Artificial Sequence: Synthetic oligonucleotide
ggagcuuuacaugccagca

SEQ ID NO: 2182127 - RNA, 19 nt, Artificial Sequence
  Description of Artificial Sequence: Synthetic oligonucleotide
auaucucaugcagcgugga

SEQ ID NO: 2182128 - RNA, 19 nt, Artificial Sequence
  Description of Artificial Sequence: Synthetic oligonucleotide
aagaagcugcaugccacua

SEQ ID NO: 2182129 - RNA, 19 nt, Artificial Sequence
  Description of Artificial Sequence: Synthetic oligonucleotide
caucugggaacuuccaccu

SEQ ID NO: 2182130 - RNA, 19 nt, Artificial Sequence
  Description of Artificial Sequence: Synthetic oligonucleotide
ggucuuuucaagaaaguau

SEQ ID NO: 2182131 - RNA, 19 nt, Artificial Sequence
  Description of Artificial Sequence: Synthetic oligonucleotide
uagugagauguaagcgguu

SEQ ID NO: 2182132 - RNA, 19 nt, Artificial Sequence
  Description of Artificial Sequence: Synthetic oligonucleotide
cucggacuccauuacaagu

SEQ ID NO: 2182133 - RNA, 19 nt, Artificial Sequence
  Description of Artificial Sequence: Synthetic oligonucleotide
guaaacugcuguagugaga

SEQ ID NO: 2182134 - RNA, 19 nt, Artificial Sequence
  Description of Artificial Sequence: Synthetic oligonucleotide
caugcagcguggacaucug

SEQ ID NO: 2182135 - RNA, 19 nt, Artificial Sequence
  Description of Artificial Sequence: Synthetic oligonucleotide
uucuugccacgucuuccaa

SEQ ID NO: 2182136 - RNA, 19 nt, Artificial Sequence
  Description of Artificial Sequence: Synthetic oligonucleotide
gcucaauuuccauugccaa

SEQ ID NO: 2182137 - RNA, 19 nt, Artificial Sequence
  Description of Artificial Sequence: Synthetic oligonucleotide
gucccacaaguuucacacc

SEQ ID NO: 2182138 - RNA, 19 nt, Artificial Sequence
  Description of Artificial Sequence: Synthetic oligonucleotide
ccaguucauaauaccuuac

SEQ ID NO: 2182139 - RNA, 19 nt, Artificial Sequence
  Description of Artificial Sequence: Synthetic oligonucleotide
uuugcgcuuuggucuuuuc

SEQ ID NO: 2182140 - RNA, 19 nt, Artificial Sequence
  Description of Artificial Sequence: Synthetic oligonucleotide
agggcaaacugcaggaaua

SEQ ID NO: 2182141 - RNA, 19 nt, Artificial Sequence
  Description of Artificial Sequence: Synthetic oligonucleotide
cuugcuuucgggcacgauu

SEQ ID NO: 2182142 - RNA, 19 nt, Artificial Sequence
  Description of Artificial Sequence: Synthetic oligonucleotide
cugucccacaaguuucaca

SEQ ID NO: 2182143 - RNA, 19 nt, Artificial Sequence
  Description of Artificial Sequence: Synthetic oligonucleotide
ucuggggaaacuggagcuu

SEQ ID NO: 2182144 - RNA, 19 nt, Artificial Sequence
  Description of Artificial Sequence: Synthetic oligonucleotide
cuugagggagcccucuucu

SEQ ID NO: 2182145 - RNA, 19 nt, Artificial Sequence
  Description of Artificial Sequence: Synthetic oligonucleotide
cuuuuguuaggguccaguu

SEQ ID NO: 2182146 - RNA, 19 nt, Artificial Sequence
  Description of Artificial Sequence: Synthetic oligonucleotide
acccgcgggccauccgagc

SEQ ID NO: 2182147 - RNA, 19 nt, Artificial Sequence
  Description of Artificial Sequence: Synthetic oligonucleotide
cuucuuugacgcgcaccgc

SEQ ID NO: 2182148 - RNA, 19 nt, Artificial Sequence
  Description of Artificial Sequence: Synthetic oligonucleotide
ucggccugacucuggggaa

SEQ ID NO: 2182149 - RNA, 19 nt, Artificial Sequence
  Description of Artificial Sequence: Synthetic oligonucleotide
cuuugacgcgcaccgccuc

SEQ ID NO: 2182150 - RNA, 19 nt, Artificial Sequence
  Description of Artificial Sequence: Synthetic oligonucleotide
ucuguguacucggccugac

SEQ ID NO: 2182151 - RNA, 19 nt, Artificial Sequence
  Description of Artificial Sequence: Synthetic oligonucleotide
gacgcgcaccgccuccacc

SEQ ID NO: 2182152 - RNA, 19 nt, Artificial Sequence
  Description of Artificial Sequence: Synthetic oligonucleotide
auccgagccuuccgucuug

SEQ ID NO: 2182153 - RNA, 19 nt, Artificial Sequence
  Description of Artificial Sequence: Synthetic oligonucleotide
gacuuuuguuaggguccag

SEQ ID NO: 2182154 - RNA, 19 nt, Artificial Sequence
  Description of Artificial Sequence: Synthetic oligonucleotide
uguuaggguccaguucaua

SEQ ID NO: 2182155 - RNA, 19 nt, Artificial Sequence
  Description of Artificial Sequence: Synthetic oligonucleotide
gguccaguucauaauaccu

SEQ ID NO: 2182156 - RNA, 19 nt, Artificial Sequence
  Description of Artificial Sequence: Synthetic oligonucleotide
cagucugugaguguacaua

SEQ ID NO: 2182157 - RNA, 19 nt, Artificial Sequence
  Description of Artificial Sequence: Synthetic oligonucleotide
auguaagguuuuagaauuu

SEQ ID NO: 2182158 - RNA, 19 nt, Artificial Sequence
  Description of Artificial Sequence: Synthetic oligonucleotide
ccuuccgucuugagggagc

SEQ ID NO: 2182159 - RNA, 19 nt, Artificial Sequence
  Description of Artificial Sequence: Synthetic oligonucleotide
uuuugcgcuuuggucuuuu

SEQ ID NO: 2182160 - RNA, 19 nt, Artificial Sequence
  Description of Artificial Sequence: Synthetic oligonucleotide
ggucugcaguucuugccac

SEQ ID NO: 2182161 - RNA, 19 nt, Artificial Sequence
  Description of Artificial Sequence: Synthetic oligonucleotide
ugccaagcuucuggguaga

SEQ ID NO: 2182162 - RNA, 19 nt, Artificial Sequence
  Description of Artificial Sequence: Synthetic oligonucleotide
gugcaaaguuggauauuca

SEQ ID NO: 2182163 - RNA, 19 nt, Artificial Sequence
  Description of Artificial Sequence: Synthetic oligonucleotide
cacgugcaaaguuggauau

SEQ ID NO: 2182164 - RNA, 19 nt, Artificial Sequence
  Description of Artificial Sequence: Synthetic oligonucleotide
gcccucauuaaaauuugga

SEQ ID NO: 2182165 - RNA, 19 nt, Artificial Sequence
  Description of Artificial Sequence: Synthetic oligonucleotide
agccuuccgucuugaggga

SEQ ID NO: 2182166 - RNA, 19 nt, Artificial Sequence
  Description of Artificial Sequence: Synthetic oligonucleotide
guacucggccugacucugg

SEQ ID NO: 2182167 - RNA, 19 nt, Artificial Sequence
  Description of Artificial Sequence: Synthetic oligonucleotide
accccagucugugagugua

SEQ ID NO: 2182168 - RNA, 19 nt, Artificial Sequence
  Description of Artificial Sequence: Synthetic oligonucleotide
uugccucuucugucccaca

SEQ ID NO: 2182169 - RNA, 19 nt, Artificial Sequence
  Description of Artificial Sequence: Synthetic oligonucleotide
ggaccccagucugugagug

SEQ ID NO: 2182170 - RNA, 19 nt, Artificial Sequence
  Description of Artificial Sequence: Synthetic oligonucleotide
guguacucggccugacucu

SEQ ID NO: 2182171 - RNA, 19 nt, Artificial Sequence
  Description of Artificial Sequence: Synthetic oligonucleotide
acugcuguagugagaugua

SEQ ID NO: 2182172 - RNA, 19 nt, Artificial Sequence
  Description of Artificial Sequence: Synthetic oligonucleotide
cauuggguagaagcuuuaa

SEQ ID NO: 2182173 - RNA, 19 nt, Artificial Sequence
  Description of Artificial Sequence: Synthetic oligonucleotide
cuuugacgaaucacaggau

SEQ ID NO: 2182174 - RNA, 19 nt, Artificial Sequence
  Description of Artificial Sequence: Synthetic oligonucleotide
gggccauccgagccuuccg

SEQ ID NO: 2182175 - RNA, 19 nt, Artificial Sequence
  Description of Artificial Sequence: Synthetic oligonucleotide
guagaagcuuuaagaaaau

SEQ ID NO: 2182176 - RNA, 19 nt, Artificial Sequence
  Description of Artificial Sequence: Synthetic oligonucleotide
cuccguaaacugcuguagu

SEQ ID NO: 2182177 - RNA, 19 nt, Artificial Sequence
  Description of Artificial Sequence: Synthetic oligonucleotide
cacccgcgggccauccgag

SEQ ID NO: 2182178 - RNA, 19 nt, Artificial Sequence
  Description of Artificial Sequence: Synthetic oligonucleotide
ugacgcgcaccgccuccac

SEQ ID NO: 2182179 - RNA, 19 nt, Artificial Sequence
  Description of Artificial Sequence: Synthetic oligonucleotide
gcccucuucuuugacgcgc

SEQ ID NO: 2182180 - RNA, 19 nt, Artificial Sequence
  Description of Artificial Sequence: Synthetic oligonucleotide
aagcugcaugccacuacua

SEQ ID NO: 2182181 - RNA, 19 nt, Artificial Sequence
  Description of Artificial Sequence: Synthetic oligonucleotide
cugggaacuuccaccuucu

SEQ ID NO: 2182182 - RNA, 19 nt, Artificial Sequence
  Description of Artificial Sequence: Synthetic oligonucleotide
gcuuucaaucuuugacgaa

SEQ ID NO: 2182183 - RNA, 19 nt, Artificial Sequence
  Description of Artificial Sequence: Synthetic oligonucleotide
caggaucgauguaagguuu

SEQ ID NO: 2182184 - RNA, 19 nt, Artificial Sequence
  Description of Artificial Sequence: Synthetic oligonucleotide
acaugccagcagaacugcu

SEQ ID NO: 2182185 - RNA, 19 nt, Artificial Sequence
  Description of Artificial Sequence: Synthetic oligonucleotide
ugacguccacgcccuccuc

SEQ ID NO: 2182186 - RNA, 19 nt, Artificial Sequence
  Description of Artificial Sequence: Synthetic oligonucleotide
ccacgugcaaaguuggaua

SEQ ID NO: 2182187 - RNA, 19 nt, Artificial Sequence
  Description of Artificial Sequence: Synthetic oligonucleotide
ggggaaacuggagcuuuac

SEQ ID NO: 2182188 - RNA, 19 nt, Artificial Sequence
  Description of Artificial Sequence: Synthetic oligonucleotide
ccguaaacugcuguaguga

SEQ ID NO: 2182189 - RNA, 19 nt, Artificial Sequence
  Description of Artificial Sequence: Synthetic oligonucleotide
cauugccaagcuucugggu

SEQ ID NO: 2182190 - RNA, 19 nt, Artificial Sequence
  Description of Artificial Sequence: Synthetic oligonucleotide
uuccgucuugagggagccc

SEQ ID NO: 2182191 - RNA, 19 nt, Artificial Sequence
  Description of Artificial Sequence: Synthetic oligonucleotide
ccaacagcucccguuugac

SEQ ID NO: 2182192 - RNA, 19 nt, Artificial Sequence
  Description of Artificial Sequence: Synthetic oligonucleotide
cugcuguagugagauguaa

SEQ ID NO: 2182193 - RNA, 19 nt, Artificial Sequence
  Description of Artificial Sequence: Synthetic oligonucleotide
gugagauguaagcgguuuu

SEQ ID NO: 2182194 - RNA, 19 nt, Artificial Sequence
  Description of Artificial Sequence: Synthetic oligonucleotide
gugcuucuuuacgcagggc

SEQ ID NO: 2182195 - RNA, 19 nt, Artificial Sequence
  Description of Artificial Sequence: Synthetic oligonucleotide
caccacgugcaaaguugga

SEQ ID NO: 2182196 - RNA, 19 nt, Artificial Sequence
  Description of Artificial Sequence: Synthetic oligonucleotide
gugaguguacauaggcuuu

SEQ ID NO: 2182197 - RNA, 19 nt, Artificial Sequence
  Description of Artificial Sequence: Synthetic oligonucleotide
acgugcaaaguuggauauu

SEQ ID NO: 2182198 - RNA, 19 nt, Artificial Sequence
  Description of Artificial Sequence: Synthetic oligonucleotide
cccgcgggccauccgagcc

SEQ ID NO: 2182199 - RNA, 19 nt, Artificial Sequence
  Description of Artificial Sequence: Synthetic oligonucleotide
cccguuugacguccacgcc

SEQ ID NO: 2182200 - RNA, 19 nt, Artificial Sequence
  Description of Artificial Sequence: Synthetic oligonucleotide
gcaagugcucaauuuccau

SEQ ID NO: 2182201 - RNA, 19 nt, Artificial Sequence
  Description of Artificial Sequence: Synthetic oligonucleotide
gccauccgagccuuccguc

SEQ ID NO: 2182202 - RNA, 19 nt, Artificial Sequence
  Description of Artificial Sequence: Synthetic oligonucleotide
cugaauccauuggguagaa

SEQ ID NO: 2182203 - RNA, 19 nt, Artificial Sequence
  Description of Artificial Sequence: Synthetic oligonucleotide
cagcguggacaucuguacu

SEQ ID NO: 2182204 - RNA, 19 nt, Artificial Sequence
  Description of Artificial Sequence: Synthetic oligonucleotide
guuugacguccacgcccuc

SEQ ID NO: 2182205 - RNA, 19 nt, Artificial Sequence
  Description of Artificial Sequence: Synthetic oligonucleotide
gcuuuacaugccagcagaa

SEQ ID NO: 2182206 - RNA, 19 nt, Artificial Sequence
  Description of Artificial Sequence: Synthetic oligonucleotide
ccucuucugucccacaagu

SEQ ID NO: 2182207 - RNA, 19 nt, Artificial Sequence
  Description of Artificial Sequence: Synthetic oligonucleotide
cguggacaucuguacuuug

SEQ ID NO: 2182208 - RNA, 19 nt, Artificial Sequence
  Description of Artificial Sequence: Synthetic oligonucleotide
ggaauaucucaugcagcgu

SEQ ID NO: 2182209 - RNA, 19 nt, Artificial Sequence
  Description of Artificial Sequence: Synthetic oligonucleotide
gauagucacuuaggagauu

SEQ ID NO: 2182210 - RNA, 19 nt, Artificial Sequence
  Description of Artificial Sequence: Synthetic oligonucleotide
cucuucugucccacaaguu

SEQ ID NO: 2182211 - RNA, 19 nt, Artificial Sequence
  Description of Artificial Sequence: Synthetic oligonucleotide
gccuuccgucuugagggag

SEQ ID NO: 2182212 - RNA, 19 nt, Artificial Sequence
  Description of Artificial Sequence: Synthetic oligonucleotide
gaccccagucugugagugu

SEQ ID NO: 2182213 - RNA, 19 nt, Artificial Sequence
  Description of Artificial Sequence: Synthetic oligonucleotide
ggcucaugcgaggcucccc

SEQ ID NO: 2182214 - RNA, 19 nt, Artificial Sequence
  Description of Artificial Sequence: Synthetic oligonucleotide
accuugcuuucgggcacga

SEQ ID NO: 2182215 - RNA, 19 nt, Artificial Sequence
  Description of Artificial Sequence: Synthetic oligonucleotide
cggacuccauuacaaguca

SEQ ID NO: 2182216 - RNA, 19 nt, Artificial Sequence
  Description of Artificial Sequence: Synthetic oligonucleotide
ggggcucaugcgaggcucc

SEQ ID NO: 2182217 - RNA, 19 nt, Artificial Sequence
  Description of Artificial Sequence: Synthetic oligonucleotide
cuguguacucggccugacu

SEQ ID NO: 2182218 - RNA, 19 nt, Artificial Sequence
  Description of Artificial Sequence: Synthetic oligonucleotide
cccaacagcucccguuuga

SEQ ID NO: 2182219 - RNA, 19 nt, Artificial Sequence
  Description of Artificial Sequence: Synthetic oligonucleotide
cucaugcagcguggacauc

SEQ ID NO: 2182220 - RNA, 19 nt, Artificial Sequence
  Description of Artificial Sequence: Synthetic oligonucleotide
guuuuaucucggacuccau

SEQ ID NO: 2182221 - RNA, 19 nt, Artificial Sequence
  Description of Artificial Sequence: Synthetic oligonucleotide
cagacuucucaggaucgau

SEQ ID NO: 2182222 - RNA, 19 nt, Artificial Sequence
  Description of Artificial Sequence: Synthetic oligonucleotide
ggccugacucuggggaaac

SEQ ID NO: 2182223 - RNA, 19 nt, Artificial Sequence
  Description of Artificial Sequence: Synthetic oligonucleotide
cccucuucuuugacgcgca

SEQ ID NO: 2182224 - RNA, 19 nt, Artificial Sequence
  Description of Artificial Sequence: Synthetic oligonucleotide
ggccauccgagccuuccgu

SEQ ID NO: 2182225 - RNA, 19 nt, Artificial Sequence
  Description of Artificial Sequence: Synthetic oligonucleotide
ccucuucuuugacgcgcac

SEQ ID NO: 2182226 - RNA, 19 nt, Artificial Sequence
  Description of Artificial Sequence: Synthetic oligonucleotide
cgauagucacuuaggagau

SEQ ID NO: 2182227 - RNA, 19 nt, Artificial Sequence
  Description of Artificial Sequence: Synthetic oligonucleotide
gcucccguuugacguccac

SEQ ID NO: 2182228 - RNA, 19 nt, Artificial Sequence
  Description of Artificial Sequence: Synthetic oligonucleotide
cauccgagccuuccgucuu

SEQ ID NO: 2182229 - RNA, 19 nt, Artificial Sequence
  Description of Artificial Sequence: Synthetic oligonucleotide
cgguuuuaucucggacucc

SEQ ID NO: 2182230 - RNA, 19 nt, Artificial Sequence
  Description of Artificial Sequence: Synthetic oligonucleotide
cccagucugugaguguaca

SEQ ID NO: 2182231 - RNA, 19 nt, Artificial Sequence
  Description of Artificial Sequence: Synthetic oligonucleotide
ccccaacagcucccguuug

SEQ ID NO: 2182232 - RNA, 19 nt, Artificial Sequence
  Description of Artificial Sequence: Synthetic oligonucleotide
ccauuggguagaagcuuua

SEQ ID NO: 2182233 - RNA, 19 nt, Artificial Sequence
  Description of Artificial Sequence: Synthetic oligonucleotide
gcgcaccgccuccaccagc

SEQ ID NO: 2182234 - RNA, 19 nt, Artificial Sequence
  Description of Artificial Sequence: Synthetic oligonucleotide
ccgucuugagggagcccuc

SEQ ID NO: 2182235 - RNA, 19 nt, Artificial Sequence
  Description of Artificial Sequence: Synthetic oligonucleotide
ccauccgagccuuccgucu

SEQ ID NO: 2182236 - RNA, 19 nt, Artificial Sequence
  Description of Artificial Sequence: Synthetic oligonucleotide
cguuugacguccacgcccu

SEQ ID NO: 2182237 - RNA, 19 nt, Artificial Sequence
  Description of Artificial Sequence: Synthetic oligonucleotide
ccgagccuuccgucuugag

SEQ ID NO: 2182238 - RNA, 19 nt, Artificial Sequence
  Description of Artificial Sequence: Synthetic oligonucleotide
ccagucugugaguguacau

SEQ ID NO: 2182239 - RNA, 19 nt, Artificial Sequence
  Description of Artificial Sequence: Synthetic oligonucleotide
gcguggacaucuguacuuu

SEQ ID NO: 2182240 - RNA, 19 nt, Artificial Sequence
  Description of Artificial Sequence: Synthetic oligonucleotide
cucaaccaucugggaacuu

SEQ ID NO: 2182241 - RNA, 19 nt, Artificial Sequence
  Description of Artificial Sequence: Synthetic oligonucleotide
gccugacucuggggaaacu

SEQ ID NO: 2182242 - RNA, 19 nt, Artificial Sequence
  Description of Artificial Sequence: Synthetic oligonucleotide
ccccuucacccgcgggcca

SEQ ID NO: 2182243 - RNA, 19 nt, Artificial Sequence
  Description of Artificial Sequence: Synthetic oligonucleotide
cgucuugagggagcccucu

SEQ ID NO: 2182244 - RNA, 19 nt, Artificial Sequence
  Description of Artificial Sequence: Synthetic oligonucleotide
cggccugacucuggggaaa

SEQ ID NO: 2182245 - RNA, 19 nt, Artificial Sequence
  Description of Artificial Sequence: Synthetic oligonucleotide
ccgcgggccauccgagccu

SEQ ID NO: 2182246 - RNA, 19 nt, Artificial Sequence
  Description of Artificial Sequence: Synthetic oligonucleotide
gcgggccauccgagccuuc

SEQ ID NO: 2182247 - RNA, 19 nt, Artificial Sequence
  Description of Artificial Sequence: Synthetic oligonucleotide
ccuugcuuucgggcacgau

SEQ ID NO: 2182248 - RNA, 19 nt, Artificial Sequence
  Description of Artificial Sequence: Synthetic oligonucleotide
cgcgggccauccgagccuu

SEQ ID NO: 2182249 - RNA, 19 nt, Artificial Sequence
  Description of Artificial Sequence: Synthetic oligonucleotide
agaaacuuuaaucaccacc

SEQ ID NO: 2182250 - RNA, 19 nt, Artificial Sequence
  Description of Artificial Sequence: Synthetic oligonucleotide
aaucaaaguucucuguggc

SEQ ID NO: 2182251 - RNA, 19 nt, Artificial Sequence
  Description of Artificial Sequence: Synthetic oligonucleotide
agguaaagaaacuuuaauc

SEQ ID NO: 2182252 - RNA, 19 nt, Artificial Sequence
  Description of Artificial Sequence: Synthetic oligonucleotide
gaaacuuuaaucaccaccc

SEQ ID NO: 2182253 - RNA, 19 nt, Artificial Sequence
  Description of Artificial Sequence: Synthetic oligonucleotide
aacaauaugaggagggugg

SEQ ID NO: 2182254 - RNA, 19 nt, Artificial Sequence
  Description of Artificial Sequence: Synthetic oligonucleotide
uuaaucaccacccaucagu

SEQ ID NO: 2182255 - RNA, 19 nt, Artificial Sequence
  Description of Artificial Sequence: Synthetic oligonucleotide
aagaguccccagcagaagc

SEQ ID NO: 2182256 - RNA, 19 nt, Artificial Sequence
  Description of Artificial Sequence: Synthetic oligonucleotide
acacauaucacccaccaug

SEQ ID NO: 2182257 - RNA, 19 nt, Artificial Sequence
  Description of Artificial Sequence: Synthetic oligonucleotide
ugggauacacauaucaccc

SEQ ID NO: 2182258 - RNA, 19 nt, Artificial Sequence
  Description of Artificial Sequence: Synthetic oligonucleotide
uuuccuuucugacagcagc

SEQ ID NO: 2182259 - RNA, 19 nt, Artificial Sequence
  Description of Artificial Sequence: Synthetic oligonucleotide
uguugcauuccugagaaag

SEQ ID NO: 2182260 - RNA, 19 nt, Artificial Sequence
  Description of Artificial Sequence: Synthetic oligonucleotide
ugcaauaaccccauaggca

SEQ ID NO: 2182261 - RNA, 19 nt, Artificial Sequence
  Description of Artificial Sequence: Synthetic oligonucleotide
ucuaggaccacaucuggag

SEQ ID NO: 2182262 - RNA, 19 nt, Artificial Sequence
  Description of Artificial Sequence: Synthetic oligonucleotide
gagugucuaagccagagug

SEQ ID NO: 2182263 - RNA, 19 nt, Artificial Sequence
  Description of Artificial Sequence: Synthetic oligonucleotide
aaggggaauaucugaggac

SEQ ID NO: 2182264 - RNA, 19 nt, Artificial Sequence
  Description of Artificial Sequence: Synthetic oligonucleotide
agucguaacaauaugagga

SEQ ID NO: 2182265 - RNA, 19 nt, Artificial Sequence
  Description of Artificial Sequence: Synthetic oligonucleotide
uguaguuguggcauucucc

SEQ ID NO: 2182266 - RNA, 19 nt, Artificial Sequence
  Description of Artificial Sequence: Synthetic oligonucleotide
aggggaauaucugaggacc

SEQ ID NO: 2182267 - RNA, 19 nt, Artificial Sequence
  Description of Artificial Sequence: Synthetic oligonucleotide
uuggguuucgggaagaguc

SEQ ID NO: 2182268 - RNA, 19 nt, Artificial Sequence
  Description of Artificial Sequence: Synthetic oligonucleotide
guaaagaaacuuuaaucac

SEQ ID NO: 2182269 - RNA, 19 nt, Artificial Sequence
  Description of Artificial Sequence: Synthetic oligonucleotide
caggauagcacucaacacc

SEQ ID NO: 2182270 - RNA, 19 nt, Artificial Sequence
  Description of Artificial Sequence: Synthetic oligonucleotide
ugucuguccgacaagaguc

SEQ ID NO: 2182271 - RNA, 19 nt, Artificial Sequence
  Description of Artificial Sequence: Synthetic oligonucleotide
cuuucugacagcagcagag

SEQ ID NO: 2182272 - RNA, 19 nt, Artificial Sequence
  Description of Artificial Sequence: Synthetic oligonucleotide
caucgcagcgccaagagag

SEQ ID NO: 2182273 - RNA, 19 nt, Artificial Sequence
  Description of Artificial Sequence: Synthetic oligonucleotide
agcaguucuccauccaagc

SEQ ID NO: 2182274 - RNA, 19 nt, Artificial Sequence
  Description of Artificial Sequence: Synthetic oligonucleotide
gagucguaacaauaugagg

SEQ ID NO: 2182275 - RNA, 19 nt, Artificial Sequence
  Description of Artificial Sequence: Synthetic oligonucleotide
ucugacugcacuuggggcc

SEQ ID NO: 2182276 - RNA, 19 nt, Artificial Sequence
  Description of Artificial Sequence: Synthetic oligonucleotide
guugcgaagguugucagcg

SEQ ID NO: 2182277 - RNA, 19 nt, Artificial Sequence
  Description of Artificial Sequence: Synthetic oligonucleotide
aggauagcacucaacaccc

SEQ ID NO: 2182278 - RNA, 19 nt, Artificial Sequence
  Description of Artificial Sequence: Synthetic oligonucleotide
aggacaaccacugauguug

SEQ ID NO: 2182279 - RNA, 19 nt, Artificial Sequence
  Description of Artificial Sequence: Synthetic oligonucleotide
aagaaacuuuaaucaccac

SEQ ID NO: 2182280 - RNA, 19 nt, Artificial Sequence
  Description of Artificial Sequence: Synthetic oligonucleotide
accaggauagcacucaaca

SEQ ID NO: 2182281 - RNA, 19 nt, Artificial Sequence
  Description of Artificial Sequence: Synthetic oligonucleotide
gugggauacacauaucacc

SEQ ID NO: 2182282 - RNA, 19 nt, Artificial Sequence
  Description of Artificial Sequence: Synthetic oligonucleotide
ucucuaggaccacaucugg

SEQ ID NO: 2182283 - RNA, 19 nt, Artificial Sequence
  Description of Artificial Sequence: Synthetic oligonucleotide
aauacacuggaaguugucu

SEQ ID NO: 2182284 - RNA, 19 nt, Artificial Sequence
  Description of Artificial Sequence: Synthetic oligonucleotide
uguugucacaggagcaagg

SEQ ID NO: 2182285 - RNA, 19 nt, Artificial Sequence
  Description of Artificial Sequence: Synthetic oligonucleotide
uaaucaccacccaucagug

SEQ ID NO: 2182286 - RNA, 19 nt, Artificial Sequence
  Description of Artificial Sequence: Synthetic oligonucleotide
gagcuuaaaaucaaaguuc

SEQ ID NO: 2182287 - RNA, 19 nt, Artificial Sequence
  Description of Artificial Sequence: Synthetic oligonucleotide
aacuguugcauuccugaga

SEQ ID NO: 2182288 - RNA, 19 nt, Artificial Sequence
  Description of Artificial Sequence: Synthetic oligonucleotide
agcugcaauaaccccauag

SEQ ID NO: 2182289 - RNA, 19 nt, Artificial Sequence
  Description of Artificial Sequence: Synthetic oligonucleotide
acaaggggaauaucugagg

SEQ ID NO: 2182290 - RNA, 19 nt, Artificial Sequence
  Description of Artificial Sequence: Synthetic oligonucleotide
auccaagcuccccacagac

SEQ ID NO: 2182291 - RNA, 19 nt, Artificial Sequence
  Description of Artificial Sequence: Synthetic oligonucleotide
cacauaucacccaccaugc

SEQ ID NO: 2182292 - RNA, 19 nt, Artificial Sequence
  Description of Artificial Sequence: Synthetic oligonucleotide
ugugggauacacauaucac

SEQ ID NO: 2182293 - RNA, 19 nt, Artificial Sequence
  Description of Artificial Sequence: Synthetic oligonucleotide
gucguaacaauaugaggag

SEQ ID NO: 2182294 - RNA, 19 nt, Artificial Sequence
  Description of Artificial Sequence: Synthetic oligonucleotide
uaggcauuuggguuucggg

SEQ ID NO: 2182295 - RNA, 19 nt, Artificial Sequence
  Description of Artificial Sequence: Synthetic oligonucleotide
uccugggagaucuugucag

SEQ ID NO: 2182296 - RNA, 19 nt, Artificial Sequence
  Description of Artificial Sequence: Synthetic oligonucleotide
ugagguuuuccuuucugac

SEQ ID NO: 2182297 - RNA, 19 nt, Artificial Sequence
  Description of Artificial Sequence: Synthetic oligonucleotide
uuuaaucaccacccaucag

SEQ ID NO: 2182298 - RNA, 19 nt, Artificial Sequence
  Description of Artificial Sequence: Synthetic oligonucleotide
agaaaggucucauucucca

SEQ ID NO: 2182299 - RNA, 19 nt, Artificial Sequence
  Description of Artificial Sequence: Synthetic oligonucleotide
gaagccacuggcaauacac

SEQ ID NO: 2182300 - RNA, 19 nt, Artificial Sequence
  Description of Artificial Sequence: Synthetic oligonucleotide
cuacaugucccacuguggc

SEQ ID NO: 2182301 - RNA, 19 nt, Artificial Sequence
  Description of Artificial Sequence: Synthetic oligonucleotide
caagagucagcucugggac

SEQ ID NO: 2182302 - RNA, 19 nt, Artificial Sequence
  Description of Artificial Sequence: Synthetic oligonucleotide
caugcaacgcagcucaccc

SEQ ID NO: 2182303 - RNA, 19 nt, Artificial Sequence
  Description of Artificial Sequence: Synthetic oligonucleotide
auacacuggaaguugucug

SEQ ID NO: 2182304 - RNA, 19 nt, Artificial Sequence
  Description of Artificial Sequence: Synthetic oligonucleotide
aaccccauaggcauuuggg

SEQ ID NO: 2182305 - RNA, 19 nt, Artificial Sequence
  Description of Artificial Sequence: Synthetic oligonucleotide
ucgagaagccagcagcugc

SEQ ID NO: 2182306 - RNA, 19 nt, Artificial Sequence
  Description of Artificial Sequence: Synthetic oligonucleotide
cugaguggccgucacagcg

SEQ ID NO: 2182307 - RNA, 19 nt, Artificial Sequence
  Description of Artificial Sequence: Synthetic oligonucleotide
agagucagcucugggaccc

SEQ ID NO: 2182308 - RNA, 19 nt, Artificial Sequence
  Description of Artificial Sequence: Synthetic oligonucleotide
auacacauaucacccacca

SEQ ID NO: 2182309 - RNA, 19 nt, Artificial Sequence
  Description of Artificial Sequence: Synthetic oligonucleotide
aaacuuuaaucaccaccca

SEQ ID NO: 2182310 - RNA, 19 nt, Artificial Sequence
  Description of Artificial Sequence: Synthetic oligonucleotide
cagucuuuguaguuguggc

SEQ ID NO: 2182311 - RNA, 19 nt, Artificial Sequence
  Description of Artificial Sequence: Synthetic oligonucleotide
ucacccaccaugcaacgca

SEQ ID NO: 2182312 - RNA, 19 nt, Artificial Sequence
  Description of Artificial Sequence: Synthetic oligonucleotide
aucuggaggagcuuaaaau

SEQ ID NO: 2182313 - RNA, 19 nt, Artificial Sequence
  Description of Artificial Sequence: Synthetic oligonucleotide
gucucgagaagccagcagc

SEQ ID NO: 2182314 - RNA, 19 nt, Artificial Sequence
  Description of Artificial Sequence: Synthetic oligonucleotide
uaacaauaugaggagggug

SEQ ID NO: 2182315 - RNA, 19 nt, Artificial Sequence
  Description of Artificial Sequence: Synthetic oligonucleotide
gacaaggggaauaucugag

SEQ ID NO: 2182316 - RNA, 19 nt, Artificial Sequence
  Description of Artificial Sequence: Synthetic oligonucleotide
gcugcaauaaccccauagg

SEQ ID NO: 2182317 - RNA, 19 nt, Artificial Sequence
  Description of Artificial Sequence: Synthetic oligonucleotide
acagucuuuguaguugugg

SEQ ID NO: 2182318 - RNA, 19 nt, Artificial Sequence
  Description of Artificial Sequence: Synthetic oligonucleotide
aguugcgaagguugucagc

SEQ ID NO: 2182319 - RNA, 19 nt, Artificial Sequence
  Description of Artificial Sequence: Synthetic oligonucleotide
cacucaacaccccagcagc

SEQ ID NO: 2182320 - RNA, 19 nt, Artificial Sequence
  Description of Artificial Sequence: Synthetic oligonucleotide
uaaccccauaggcauuugg

SEQ ID NO: 2182321 - RNA, 19 nt, Artificial Sequence
  Description of Artificial Sequence: Synthetic oligonucleotide
agcuuaaaaucaaaguucu

SEQ ID NO: 2182322 - RNA, 19 nt, Artificial Sequence
  Description of Artificial Sequence: Synthetic oligonucleotide
uguccgacaagagucagcu

SEQ ID NO: 2182323 - RNA, 19 nt, Artificial Sequence
  Description of Artificial Sequence: Synthetic oligonucleotide
acagacaaggggaauaucu

SEQ ID NO: 2182324 - RNA, 19 nt, Artificial Sequence
  Description of Artificial Sequence: Synthetic oligonucleotide
caucagagcagucuggguc

SEQ ID NO: 2182325 - RNA, 19 nt, Artificial Sequence
  Description of Artificial Sequence: Synthetic oligonucleotide
uucggagucguaacaauau

SEQ ID NO: 2182326 - RNA, 19 nt, Artificial Sequence
  Description of Artificial Sequence: Synthetic oligonucleotide
ucguaacaauaugaggagg

SEQ ID NO: 2182327 - RNA, 19 nt, Artificial Sequence
  Description of Artificial Sequence: Synthetic oligonucleotide
acaauaugaggaggguggc

SEQ ID NO: 2182328 - RNA, 19 nt, Artificial Sequence
  Description of Artificial Sequence: Synthetic oligonucleotide
cuauagcaguucuccaucc

SEQ ID NO: 2182329 - RNA, 19 nt, Artificial Sequence
  Description of Artificial Sequence: Synthetic oligonucleotide
gugugggauacacauauca

SEQ ID NO: 2182330 - RNA, 19 nt, Artificial Sequence
  Description of Artificial Sequence: Synthetic oligonucleotide
uauagcaguucuccaucca

SEQ ID NO: 2182331 - RNA, 19 nt, Artificial Sequence
  Description of Artificial Sequence: Synthetic oligonucleotide
gucacaggagcaaggaagg

SEQ ID NO: 2182332 - RNA, 19 nt, Artificial Sequence
  Description of Artificial Sequence: Synthetic oligonucleotide
uucgggaagaguccccagc

SEQ ID NO: 2182333 - RNA, 19 nt, Artificial Sequence
  Description of Artificial Sequence: Synthetic oligonucleotide
uggguuucgggaagagucc

SEQ ID NO: 2182334 - RNA, 19 nt, Artificial Sequence
  Description of Artificial Sequence: Synthetic oligonucleotide
cguaacaauaugaggaggg

SEQ ID NO: 2182335 - RNA, 19 nt, Artificial Sequence
  Description of Artificial Sequence: Synthetic oligonucleotide
cuaggaccacaucuggagg

SEQ ID NO: 2182336 - RNA, 19 nt, Artificial Sequence
  Description of Artificial Sequence: Synthetic oligonucleotide
cuuuaaucaccacccauca

SEQ ID NO: 2182337 - RNA, 19 nt, Artificial Sequence
  Description of Artificial Sequence: Synthetic oligonucleotide
uaucacccaccaugcaacg

SEQ ID NO: 2182338 - RNA, 19 nt, Artificial Sequence
  Description of Artificial Sequence: Synthetic oligonucleotide
cuuugccccgaucugacug

SEQ ID NO: 2182339 - RNA, 19 nt, Artificial Sequence
  Description of Artificial Sequence: Synthetic oligonucleotide
ucggagucguaacaauaug

SEQ ID NO: 2182340 - RNA, 19 nt, Artificial Sequence
  Description of Artificial Sequence: Synthetic oligonucleotide
ucgggaagaguccccagca

SEQ ID NO: 2182341 - RNA, 19 nt, Artificial Sequence
  Description of Artificial Sequence: Synthetic oligonucleotide
gauacacauaucacccacc

SEQ ID NO: 2182342 - RNA, 19 nt, Artificial Sequence
  Description of Artificial Sequence: Synthetic oligonucleotide
ugcaacgcagcucacccuc

SEQ ID NO: 2182343 - RNA, 19 nt, Artificial Sequence
  Description of Artificial Sequence: Synthetic oligonucleotide
agugucuaagccagagugg

SEQ ID NO: 2182344 - RNA, 19 nt, Artificial Sequence
  Description of Artificial Sequence: Synthetic oligonucleotide
gucuaagccagaguggccc

SEQ ID NO: 2182345 - RNA, 19 nt, Artificial Sequence
  Description of Artificial Sequence: Synthetic oligonucleotide
aaguugucuguccgacaag

SEQ ID NO: 2182346 - RNA, 19 nt, Artificial Sequence
  Description of Artificial Sequence: Synthetic oligonucleotide
agaguggccccauuucuug

SEQ ID NO: 2182347 - RNA, 19 nt, Artificial Sequence
  Description of Artificial Sequence: Synthetic oligonucleotide
caaccacugauguugucac

SEQ ID NO: 2182348 - RNA, 19 nt, Artificial Sequence
  Description of Artificial Sequence: Synthetic oligonucleotide
ugacuucggagucguaaca

SEQ ID NO: 2182349 - RNA, 19 nt, Artificial Sequence
  Description of Artificial Sequence: Synthetic oligonucleotide
caucacugccaucagagca

SEQ ID NO: 2182350 - RNA, 19 nt, Artificial Sequence
  Description of Artificial Sequence: Synthetic oligonucleotide
gugucuaagccagaguggc

SEQ ID NO: 2182351 - RNA, 19 nt, Artificial Sequence
  Description of Artificial Sequence: Synthetic oligonucleotide
aauaaccccauaggcauuu

SEQ ID NO: 2182352 - RNA, 19 nt, Artificial Sequence
  Description of Artificial Sequence: Synthetic oligonucleotide
ugaguggccgucacagcgc

SEQ ID NO: 2182353 - RNA, 19 nt, Artificial Sequence
  Description of Artificial Sequence: Synthetic oligonucleotide
uggaggagcuuaaaaucaa

SEQ ID NO: 2182354 - RNA, 19 nt, Artificial Sequence
  Description of Artificial Sequence: Synthetic oligonucleotide
agccacuggcaauacacug

SEQ ID NO: 2182355 - RNA, 19 nt, Artificial Sequence
  Description of Artificial Sequence: Synthetic oligonucleotide
uuugccccgaucugacugc

SEQ ID NO: 2182356 - RNA, 19 nt, Artificial Sequence
  Description of Artificial Sequence: Synthetic oligonucleotide
ggagucguaacaauaugag

SEQ ID NO: 2182357 - RNA, 19 nt, Artificial Sequence
  Description of Artificial Sequence: Synthetic oligonucleotide
auagcaguucuccauccaa

SEQ ID NO: 2182358 - RNA, 19 nt, Artificial Sequence
  Description of Artificial Sequence: Synthetic oligonucleotide
gagaaaggucucauucucc

SEQ ID NO: 2182359 - RNA, 19 nt, Artificial Sequence
  Description of Artificial Sequence: Synthetic oligonucleotide
cugacuucggagucguaac

SEQ ID NO: 2182360 - RNA, 19 nt, Artificial Sequence
  Description of Artificial Sequence: Synthetic oligonucleotide
acaccgcucaauccugcac

SEQ ID NO: 2182361 - RNA, 19 nt, Artificial Sequence
  Description of Artificial Sequence: Synthetic oligonucleotide
agcccaggucucgagaagc

SEQ ID NO: 2182362 - RNA, 19 nt, Artificial Sequence
  Description of Artificial Sequence: Synthetic oligonucleotide
uagcacucaacaccccagc

SEQ ID NO: 2182363 - RNA, 19 nt, Artificial Sequence
  Description of Artificial Sequence: Synthetic oligonucleotide
ugucuaagccagaguggcc

SEQ ID NO: 2182364 - RNA, 19 nt, Artificial Sequence
  Description of Artificial Sequence: Synthetic oligonucleotide
aguugucuguccgacaaga

SEQ ID NO: 2182365 - RNA, 19 nt, Artificial Sequence
  Description of Artificial Sequence: Synthetic oligonucleotide
aaccaggauagcacucaac

SEQ ID NO: 2182366 - RNA, 19 nt, Artificial Sequence
  Description of Artificial Sequence: Synthetic oligonucleotide
aagagcccaggucucgaga

SEQ ID NO: 2182367 - RNA, 19 nt, Artificial Sequence
  Description of Artificial Sequence: Synthetic oligonucleotide
gagguaaagaaacuuuaau

SEQ ID NO: 2182368 - RNA, 19 nt, Artificial Sequence
  Description of Artificial Sequence: Synthetic oligonucleotide
cauaucacccaccaugcaa

SEQ ID NO: 2182369 - RNA, 19 nt, Artificial Sequence
  Description of Artificial Sequence: Synthetic oligonucleotide
ccugagaaaggucucauuc

SEQ ID NO: 2182370 - RNA, 19 nt, Artificial Sequence
  Description of Artificial Sequence: Synthetic oligonucleotide
agaaaccaggauagcacuc

SEQ ID NO: 2182371 - RNA, 19 nt, Artificial Sequence
  Description of Artificial Sequence: Synthetic oligonucleotide
gagacuccuucacagccac

SEQ ID NO: 2182372 - RNA, 19 nt, Artificial Sequence
  Description of Artificial Sequence: Synthetic oligonucleotide
accccauaggcauuugggu

SEQ ID NO: 2182373 - RNA, 19 nt, Artificial Sequence
  Description of Artificial Sequence: Synthetic oligonucleotide
aagcaacuguugcauuccu

SEQ ID NO: 2182374 - RNA, 19 nt, Artificial Sequence
  Description of Artificial Sequence: Synthetic oligonucleotide
uaacccugacuucggaguc

SEQ ID NO: 2182375 - RNA, 19 nt, Artificial Sequence
  Description of Artificial Sequence: Synthetic oligonucleotide
cucaguccuggcuauagca

SEQ ID NO: 2182376 - RNA, 19 nt, Artificial Sequence
  Description of Artificial Sequence: Synthetic oligonucleotide
ucaggacagucugaguggc

SEQ ID NO: 2182377 - RNA, 19 nt, Artificial Sequence
  Description of Artificial Sequence: Synthetic oligonucleotide
aggaggguggcagaaacca

SEQ ID NO: 2182378 - RNA, 19 nt, Artificial Sequence
  Description of Artificial Sequence: Synthetic oligonucleotide
ucuaagccagaguggcccc

SEQ ID NO: 2182379 - RNA, 19 nt, Artificial Sequence
  Description of Artificial Sequence: Synthetic oligonucleotide
ugcgaagguugucagcguc

SEQ ID NO: 2182380 - RNA, 19 nt, Artificial Sequence
  Description of Artificial Sequence: Synthetic oligonucleotide
caacuguugcauuccugag

SEQ ID NO: 2182381 - RNA, 19 nt, Artificial Sequence
  Description of Artificial Sequence: Synthetic oligonucleotide
ugcacuccuccucaucacu

SEQ ID NO: 2182382 - RNA, 19 nt, Artificial Sequence
  Description of Artificial Sequence: Synthetic oligonucleotide
uggaaguugucuguccgac

SEQ ID NO: 2182383 - RNA, 19 nt, Artificial Sequence
  Description of Artificial Sequence: Synthetic oligonucleotide
cagcaggagugucuaagcc

SEQ ID NO: 2182384 - RNA, 19 nt, Artificial Sequence
  Description of Artificial Sequence: Synthetic oligonucleotide
agcgccaagagaggggcac

SEQ ID NO: 2182385 - RNA, 19 nt, Artificial Sequence
  Description of Artificial Sequence: Synthetic oligonucleotide
auagcacucaacaccccag

SEQ ID NO: 2182386 - RNA, 19 nt, Artificial Sequence
  Description of Artificial Sequence: Synthetic oligonucleotide
cugagcacaccgcucaauc

SEQ ID NO: 2182387 - RNA, 19 nt, Artificial Sequence
  Description of Artificial Sequence: Synthetic oligonucleotide
gguaacccugacuucggag

SEQ ID NO: 2182388 - RNA, 19 nt, Artificial Sequence
  Description of Artificial Sequence: Synthetic oligonucleotide
uugucagcgucaucaggac

SEQ ID NO: 2182389 - RNA, 19 nt, Artificial Sequence
  Description of Artificial Sequence: Synthetic oligonucleotide
agcgucaucaggacaacca

SEQ ID NO: 2182390 - RNA, 19 nt, Artificial Sequence
  Description of Artificial Sequence: Synthetic oligonucleotide
aucacccaccaugcaacgc

SEQ ID NO: 2182391 - RNA, 19 nt, Artificial Sequence
  Description of Artificial Sequence: Synthetic oligonucleotide
caauacacuggaaguuguc

SEQ ID NO: 2182392 - RNA, 19 nt, Artificial Sequence
  Description of Artificial Sequence: Synthetic oligonucleotide
cagguaacccugacuucgg

SEQ ID NO: 2182393 - RNA, 19 nt, Artificial Sequence
  Description of Artificial Sequence: Synthetic oligonucleotide
cugccaucagagcagucug

SEQ ID NO: 2182394 - RNA, 19 nt, Artificial Sequence
  Description of Artificial Sequence: Synthetic oligonucleotide
uuucgggaagaguccccag

SEQ ID NO: 2182395 - RNA, 19 nt, Artificial Sequence
  Description of Artificial Sequence: Synthetic oligonucleotide
agcagucuggguccccauc

SEQ ID NO: 2182396 - RNA, 19 nt, Artificial Sequence
  Description of Artificial Sequence: Synthetic oligonucleotide
ugugugugggauacacaua

SEQ ID NO: 2182397 - RNA, 19 nt, Artificial Sequence
  Description of Artificial Sequence: Synthetic oligonucleotide
gcccuuucugagcacaccg

SEQ ID NO: 2182398 - RNA, 19 nt, Artificial Sequence
  Description of Artificial Sequence: Synthetic oligonucleotide
uccaagcuccccacagaca

SEQ ID NO: 2182399 - RNA, 19 nt, Artificial Sequence
  Description of Artificial Sequence: Synthetic oligonucleotide
aaccacugauguugucaca

SEQ ID NO: 2182400 - RNA, 19 nt, Artificial Sequence
  Description of Artificial Sequence: Synthetic oligonucleotide
aacgcagcucacccuccug

SEQ ID NO: 2182401 - RNA, 19 nt, Artificial Sequence
  Description of Artificial Sequence: Synthetic oligonucleotide
uuuggguuucgggaagagu

SEQ ID NO: 2182402 - RNA, 19 nt, Artificial Sequence
  Description of Artificial Sequence: Synthetic oligonucleotide
ggcaauacacuggaaguug

SEQ ID NO: 2182403 - RNA, 19 nt, Artificial Sequence
  Description of Artificial Sequence: Synthetic oligonucleotide
acuucggagucguaacaau

SEQ ID NO: 2182404 - RNA, 19 nt, Artificial Sequence
  Description of Artificial Sequence: Synthetic oligonucleotide
ucuguccgacaagagucag

SEQ ID NO: 2182405 - RNA, 19 nt, Artificial Sequence
  Description of Artificial Sequence: Synthetic oligonucleotide
gugugugggauacacauau

SEQ ID NO: 2182406 - RNA, 19 nt, Artificial Sequence
  Description of Artificial Sequence: Synthetic oligonucleotide
uacacauaucacccaccau

SEQ ID NO: 2182407 - RNA, 19 nt, Artificial Sequence
  Description of Artificial Sequence: Synthetic oligonucleotide
ucaauccugcacuccuccu

SEQ ID NO: 2182408 - RNA, 19 nt, Artificial Sequence
  Description of Artificial Sequence: Synthetic oligonucleotide
ccauuucuuggaaccaucc

SEQ ID NO: 2182409 - RNA, 19 nt, Artificial Sequence
  Description of Artificial Sequence: Synthetic oligonucleotide
caauccugcacuccuccuc

SEQ ID NO: 2182410 - RNA, 19 nt, Artificial Sequence
  Description of Artificial Sequence: Synthetic oligonucleotide
uggcuauagcaguucucca

SEQ ID NO: 2182411 - RNA, 19 nt, Artificial Sequence
  Description of Artificial Sequence: Synthetic oligonucleotide
auaugaggaggguggcaga

SEQ ID NO: 2182412 - RNA, 19 nt, Artificial Sequence
  Description of Artificial Sequence: Synthetic oligonucleotide
caguugcgaagguugucag

SEQ ID NO: 2182413 - RNA, 19 nt, Artificial Sequence
  Description of Artificial Sequence: Synthetic oligonucleotide
caggucucgagaagccagc

SEQ ID NO: 2182414 - RNA, 19 nt, Artificial Sequence
  Description of Artificial Sequence: Synthetic oligonucleotide
cagcugagcucaucacugg

SEQ ID NO: 2182415 - RNA, 19 nt, Artificial Sequence
  Description of Artificial Sequence: Synthetic oligonucleotide
cuggcaauacacuggaagu

SEQ ID NO: 2182416 - RNA, 19 nt, Artificial Sequence
  Description of Artificial Sequence: Synthetic oligonucleotide
ucgcagcgccaagagaggg

SEQ ID NO: 2182417 - RNA, 19 nt, Artificial Sequence
  Description of Artificial Sequence: Synthetic oligonucleotide
gcgacugcaguugcgaagg

SEQ ID NO: 2182418 - RNA, 19 nt, Artificial Sequence
  Description of Artificial Sequence: Synthetic oligonucleotide
gucagcgucaucaggacaa

SEQ ID NO: 2182419 - RNA, 19 nt, Artificial Sequence
  Description of Artificial Sequence: Synthetic oligonucleotide
agcugagcucaucacugga

SEQ ID NO: 2182420 - RNA, 19 nt, Artificial Sequence
  Description of Artificial Sequence: Synthetic oligonucleotide
gcuauagcaguucuccauc

SEQ ID NO: 2182421 - RNA, 19 nt, Artificial Sequence
  Description of Artificial Sequence: Synthetic oligonucleotide
gaguggccgucacagcgcc

SEQ ID NO: 2182422 - RNA, 19 nt, Artificial Sequence
  Description of Artificial Sequence: Synthetic oligonucleotide
aggagguaaagaaacuuua

SEQ ID NO: 2182423 - RNA, 19 nt, Artificial Sequence
  Description of Artificial Sequence: Synthetic oligonucleotide
gccuacaugucccacugug

SEQ ID NO: 2182424 - RNA, 19 nt, Artificial Sequence
  Description of Artificial Sequence: Synthetic oligonucleotide
ugugugggauacacauauc

SEQ ID NO: 2182425 - RNA, 19 nt, Artificial Sequence
  Description of Artificial Sequence: Synthetic oligonucleotide
cuguccgacaagagucagc

SEQ ID NO: 2182426 - RNA, 19 nt, Artificial Sequence
  Description of Artificial Sequence: Synthetic oligonucleotide
uggcaauacacuggaaguu

SEQ ID NO: 2182427 - RNA, 19 nt, Artificial Sequence
  Description of Artificial Sequence: Synthetic oligonucleotide
uccauccaagcuccccaca

SEQ ID NO: 2182428 - RNA, 19 nt, Artificial Sequence
  Description of Artificial Sequence: Synthetic oligonucleotide
acauaucacccaccaugca

SEQ ID NO: 2182429 - RNA, 19 nt, Artificial Sequence
  Description of Artificial Sequence: Synthetic oligonucleotide
auuuggguuucgggaagag

SEQ ID NO: 2182430 - RNA, 19 nt, Artificial Sequence
  Description of Artificial Sequence: Synthetic oligonucleotide
gagcacaccgcucaauccu

SEQ ID NO: 2182431 - RNA, 19 nt, Artificial Sequence
  Description of Artificial Sequence: Synthetic oligonucleotide
ugggagaucuugucaguuu

SEQ ID NO: 2182432 - RNA, 19 nt, Artificial Sequence
  Description of Artificial Sequence: Synthetic oligonucleotide
gcaauaaccccauaggcau

SEQ ID NO: 2182433 - RNA, 19 nt, Artificial Sequence
  Description of Artificial Sequence: Synthetic oligonucleotide
guugucuguccgacaagag

SEQ ID NO: 2182434 - RNA, 19 nt, Artificial Sequence
  Description of Artificial Sequence: Synthetic oligonucleotide
aagccacuggcaauacacu

SEQ ID NO: 2182435 - RNA, 19 nt, Artificial Sequence
  Description of Artificial Sequence: Synthetic oligonucleotide
acgcagcucacccuccuga

SEQ ID NO: 2182436 - RNA, 19 nt, Artificial Sequence
  Description of Artificial Sequence: Synthetic oligonucleotide
acaugucccacuguggcuu

SEQ ID NO: 2182437 - RNA, 19 nt, Artificial Sequence
  Description of Artificial Sequence: Synthetic oligonucleotide
ugucaguuucuguguuggu

SEQ ID NO: 2182438 - RNA, 19 nt, Artificial Sequence
  Description of Artificial Sequence: Synthetic oligonucleotide
cuucggagucguaacaaua

SEQ ID NO: 2182439 - RNA, 19 nt, Artificial Sequence
  Description of Artificial Sequence: Synthetic oligonucleotide
uccccacagacaaggggaa

SEQ ID NO: 2182440 - RNA, 19 nt, Artificial Sequence
  Description of Artificial Sequence: Synthetic oligonucleotide
gagcccaggucucgagaag

SEQ ID NO: 2182441 - RNA, 19 nt, Artificial Sequence
  Description of Artificial Sequence: Synthetic oligonucleotide
gaccacguguccucagauc

SEQ ID NO: 2182442 - RNA, 19 nt, Artificial Sequence
  Description of Artificial Sequence: Synthetic oligonucleotide
agcgccaugugugugggau

SEQ ID NO: 2182443 - RNA, 19 nt, Artificial Sequence
  Description of Artificial Sequence: Synthetic oligonucleotide
ggcgacugcaguugcgaag

SEQ ID NO: 2182444 - RNA, 19 nt, Artificial Sequence
  Description of Artificial Sequence: Synthetic oligonucleotide
gcauuuggguuucgggaag

SEQ ID NO: 2182445 - RNA, 19 nt, Artificial Sequence
  Description of Artificial Sequence: Synthetic oligonucleotide
ggcagaaaccaggauagca

SEQ ID NO: 2182446 - RNA, 19 nt, Artificial Sequence
  Description of Artificial Sequence: Synthetic oligonucleotide
gacuucggagucguaacaa

SEQ ID NO: 2182447 - RNA, 19 nt, Artificial Sequence
  Description of Artificial Sequence: Synthetic oligonucleotide
uggaaccauccuggggccg

SEQ ID NO: 2182448 - RNA, 19 nt, Artificial Sequence
  Description of Artificial Sequence: Synthetic oligonucleotide
ccacccaucagugugagca

SEQ ID NO: 2182449 - RNA, 19 nt, Artificial Sequence
  Description of Artificial Sequence: Synthetic oligonucleotide
gagcaaggaaggguggcca

SEQ ID NO: 2182450 - RNA, 19 nt, Artificial Sequence
  Description of Artificial Sequence: Synthetic oligonucleotide
cacccaucagugugagcag

SEQ ID NO: 2182451 - RNA, 19 nt, Artificial Sequence
  Description of Artificial Sequence: Synthetic oligonucleotide
cucaacaccccagcagcug

SEQ ID NO: 2182452 - RNA, 19 nt, Artificial Sequence
  Description of Artificial Sequence: Synthetic oligonucleotide
uuccugagaaaggucucau

SEQ ID NO: 2182453 - RNA, 19 nt, Artificial Sequence
  Description of Artificial Sequence: Synthetic oligonucleotide
agguaacccugacuucgga

SEQ ID NO: 2182454 - RNA, 19 nt, Artificial Sequence
  Description of Artificial Sequence: Synthetic oligonucleotide
uccugagaaaggucucauu

SEQ ID NO: 2182455 - RNA, 19 nt, Artificial Sequence
  Description of Artificial Sequence: Synthetic oligonucleotide
guuucgggaagagucccca

SEQ ID NO: 2182456 - RNA, 19 nt, Artificial Sequence
  Description of Artificial Sequence: Synthetic oligonucleotide
ugcccuuucugagcacacc

SEQ ID NO: 2182457 - RNA, 19 nt, Artificial Sequence
  Description of Artificial Sequence: Synthetic oligonucleotide
aucgcagcgccaagagagg

SEQ ID NO: 2182458 - RNA, 19 nt, Artificial Sequence
  Description of Artificial Sequence: Synthetic oligonucleotide
uugcgaagguugucagcgu

SEQ ID NO: 2182459 - RNA, 19 nt, Artificial Sequence
  Description of Artificial Sequence: Synthetic oligonucleotide
cuggaaguugucuguccga

SEQ ID NO: 2182460 - RNA, 19 nt, Artificial Sequence
  Description of Artificial Sequence: Synthetic oligonucleotide
caggacagucugaguggcc

SEQ ID NO: 2182461 - RNA, 19 nt, Artificial Sequence
  Description of Artificial Sequence: Synthetic oligonucleotide
ggaaccauccuggggccgg

SEQ ID NO: 2182462 - RNA, 19 nt, Artificial Sequence
  Description of Artificial Sequence: Synthetic oligonucleotide
uggccccauuucuuggaac

SEQ ID NO: 2182463 - RNA, 19 nt, Artificial Sequence
  Description of Artificial Sequence: Synthetic oligonucleotide
guaacaauaugaggagggu

SEQ ID NO: 2182464 - RNA, 19 nt, Artificial Sequence
  Description of Artificial Sequence: Synthetic oligonucleotide
gggaauaucugaggacccc

SEQ ID NO: 2182465 - RNA, 19 nt, Artificial Sequence
  Description of Artificial Sequence: Synthetic oligonucleotide
ggucucgagaagccagcag

SEQ ID NO: 2182466 - RNA, 19 nt, Artificial Sequence
  Description of Artificial Sequence: Synthetic oligonucleotide
augcaacgcagcucacccu

SEQ ID NO: 2182467 - RNA, 19 nt, Artificial Sequence
  Description of Artificial Sequence: Synthetic oligonucleotide
gcugagcucaucacuggag

SEQ ID NO: 2182468 - RNA, 19 nt, Artificial Sequence
  Description of Artificial Sequence: Synthetic oligonucleotide
agagcagucugggucccca

SEQ ID NO: 2182469 - RNA, 19 nt, Artificial Sequence
  Description of Artificial Sequence: Synthetic oligonucleotide
gacaaccacugauguuguc

SEQ ID NO: 2182470 - RNA, 19 nt, Artificial Sequence
  Description of Artificial Sequence: Synthetic oligonucleotide
ucacagcgccaugugugug

SEQ ID NO: 2182471 - RNA, 19 nt, Artificial Sequence
  Description of Artificial Sequence: Synthetic oligonucleotide
caccaacagcccugauggg

SEQ ID NO: 2182472 - RNA, 19 nt, Artificial Sequence
  Description of Artificial Sequence: Synthetic oligonucleotide
ucugagcacaccgcucaau

SEQ ID NO: 2182473 - RNA, 19 nt, Artificial Sequence
  Description of Artificial Sequence: Synthetic oligonucleotide
ggagguaaagaaacuuuaa

SEQ ID NO: 2182474 - RNA, 19 nt, Artificial Sequence
  Description of Artificial Sequence: Synthetic oligonucleotide
gugaccacguguccucaga

SEQ ID NO: 2182475 - RNA, 19 nt, Artificial Sequence
  Description of Artificial Sequence: Synthetic oligonucleotide
ugcaguugcgaagguuguc

SEQ ID NO: 2182476 - RNA, 19 nt, Artificial Sequence
  Description of Artificial Sequence: Synthetic oligonucleotide
gcgucaucaggacaaccac

SEQ ID NO: 2182477 - RNA, 19 nt, Artificial Sequence
  Description of Artificial Sequence: Synthetic oligonucleotide
gcaguugcgaagguuguca

SEQ ID NO: 2182478 - RNA, 19 nt, Artificial Sequence
  Description of Artificial Sequence: Synthetic oligonucleotide
gggacccgagaccuggacc

SEQ ID NO: 2182479 - RNA, 19 nt, Artificial Sequence
  Description of Artificial Sequence: Synthetic oligonucleotide
gaagguugucagcgucauc

SEQ ID NO: 2182480 - RNA, 19 nt, Artificial Sequence
  Description of Artificial Sequence: Synthetic oligonucleotide
cuccugacagggcuggcga

SEQ ID NO: 2182481 - RNA, 19 nt, Artificial Sequence
  Description of Artificial Sequence: Synthetic oligonucleotide
ccaagcuccccacagacaa

SEQ ID NO: 2182482 - RNA, 19 nt, Artificial Sequence
  Description of Artificial Sequence: Synthetic oligonucleotide
ugccuacaugucccacugu

SEQ ID NO: 2182483 - RNA, 19 nt, Artificial Sequence
  Description of Artificial Sequence: Synthetic oligonucleotide
gggauacacauaucaccca

SEQ ID NO: 2182484 - RNA, 19 nt, Artificial Sequence
  Description of Artificial Sequence: Synthetic oligonucleotide
ucagcgucaucaggacaac

SEQ ID NO: 2182485 - RNA, 19 nt, Artificial Sequence
  Description of Artificial Sequence: Synthetic oligonucleotide
uggcagaaaccaggauagc

SEQ ID NO: 2182486 - RNA, 19 nt, Artificial Sequence
  Description of Artificial Sequence: Synthetic oligonucleotide
agugguuggcacugcccuu

SEQ ID NO: 2182487 - RNA, 19 nt, Artificial Sequence
  Description of Artificial Sequence: Synthetic oligonucleotide
ccacugauguugucacagg

SEQ ID NO: 2182488 - RNA, 19 nt, Artificial Sequence
  Description of Artificial Sequence: Synthetic oligonucleotide
ggggaauaucugaggaccc

SEQ ID NO: 2182489 - RNA, 19 nt, Artificial Sequence
  Description of Artificial Sequence: Synthetic oligonucleotide
gguuuuccuuucugacagc

SEQ ID NO: 2182490 - RNA, 19 nt, Artificial Sequence
  Description of Artificial Sequence: Synthetic oligonucleotide
cauccaagcuccccacaga

SEQ ID NO: 2182491 - RNA, 19 nt, Artificial Sequence
  Description of Artificial Sequence: Synthetic oligonucleotide
ccgaucugacugcacuugg

SEQ ID NO: 2182492 - RNA, 19 nt, Artificial Sequence
  Description of Artificial Sequence: Synthetic oligonucleotide
cugcacuuggggccaggug

SEQ ID NO: 2182493 - RNA, 19 nt, Artificial Sequence
  Description of Artificial Sequence: Synthetic oligonucleotide
gaccacaucuggaggagcu

SEQ ID NO: 2182494 - RNA, 19 nt, Artificial Sequence
  Description of Artificial Sequence: Synthetic oligonucleotide
acccaccaugcaacgcagc

SEQ ID NO: 2182495 - RNA, 19 nt, Artificial Sequence
  Description of Artificial Sequence: Synthetic oligonucleotide
uggcgacugcaguugcgaa

SEQ ID NO: 2182496 - RNA, 19 nt, Artificial Sequence
  Description of Artificial Sequence: Synthetic oligonucleotide
acucaacaccccagcagcu

SEQ ID NO: 2182497 - RNA, 19 nt, Artificial Sequence
  Description of Artificial Sequence: Synthetic oligonucleotide
gucuguccgacaagaguca

SEQ ID NO: 2182498 - RNA, 19 nt, Artificial Sequence
  Description of Artificial Sequence: Synthetic oligonucleotide
ucagaucagugagguuuuc

SEQ ID NO: 2182499 - RNA, 19 nt, Artificial Sequence
  Description of Artificial Sequence: Synthetic oligonucleotide
ggaagaguccccagcagaa

SEQ ID NO: 2182500 - RNA, 19 nt, Artificial Sequence
  Description of Artificial Sequence: Synthetic oligonucleotide
auaaccccauaggcauuug

SEQ ID NO: 2182501 - RNA, 19 nt, Artificial Sequence
  Description of Artificial Sequence: Synthetic oligonucleotide
ggaaguugucuguccgaca

SEQ ID NO: 2182502 - RNA, 19 nt, Artificial Sequence
  Description of Artificial Sequence: Synthetic oligonucleotide
gcucacccuccugacaggg

SEQ ID NO: 2182503 - RNA, 19 nt, Artificial Sequence
  Description of Artificial Sequence: Synthetic oligonucleotide
cagcgucaucaggacaacc

SEQ ID NO: 2182504 - RNA, 19 nt, Artificial Sequence
  Description of Artificial Sequence: Synthetic oligonucleotide
ccugcacuccuccucauca

SEQ ID NO: 2182505 - RNA, 19 nt, Artificial Sequence
  Description of Artificial Sequence: Synthetic oligonucleotide
acugcacuuggggccaggu

SEQ ID NO: 2182506 - RNA, 19 nt, Artificial Sequence
  Description of Artificial Sequence: Synthetic oligonucleotide
guccucagaucagugaggu

SEQ ID NO: 2182507 - RNA, 19 nt, Artificial Sequence
  Description of Artificial Sequence: Synthetic oligonucleotide
cauuuggguuucgggaaga

SEQ ID NO: 2182508 - RNA, 19 nt, Artificial Sequence
  Description of Artificial Sequence: Synthetic oligonucleotide
ggguuucgggaagaguccc

SEQ ID NO: 2182509 - RNA, 19 nt, Artificial Sequence
  Description of Artificial Sequence: Synthetic oligonucleotide
ggugaccacguguccucag

SEQ ID NO: 2182510 - RNA, 19 nt, Artificial Sequence
  Description of Artificial Sequence: Synthetic oligonucleotide
cagcagagacuccuucaca

SEQ ID NO: 2182511 - RNA, 19 nt, Artificial Sequence
  Description of Artificial Sequence: Synthetic oligonucleotide
cggagucguaacaauauga

SEQ ID NO: 2182512 - RNA, 19 nt, Artificial Sequence
  Description of Artificial Sequence: Synthetic oligonucleotide
cacagacaaggggaauauc

SEQ ID NO: 2182513 - RNA, 19 nt, Artificial Sequence
  Description of Artificial Sequence: Synthetic oligonucleotide
guuguggcauucuccuccu

SEQ ID NO: 2182514 - RNA, 19 nt, Artificial Sequence
  Description of Artificial Sequence: Synthetic oligonucleotide
acccugacuucggagucgu

SEQ ID NO: 2182515 - RNA, 19 nt, Artificial Sequence
  Description of Artificial Sequence: Synthetic oligonucleotide
cuggcgacugcaguugcga

SEQ ID NO: 2182516 - RNA, 19 nt, Artificial Sequence
  Description of Artificial Sequence: Synthetic oligonucleotide
aguccuggcuauagcaguu

SEQ ID NO: 2182517 - RNA, 19 nt, Artificial Sequence
  Description of Artificial Sequence: Synthetic oligonucleotide
ccgacaagagucagcucug

SEQ ID NO: 2182518 - RNA, 19 nt, Artificial Sequence
  Description of Artificial Sequence: Synthetic oligonucleotide
caccgcucaauccugcacu

SEQ ID NO: 2182519 - RNA, 19 nt, Artificial Sequence
  Description of Artificial Sequence: Synthetic oligonucleotide
caccacccaucagugugag

SEQ ID NO: 2182520 - RNA, 19 nt, Artificial Sequence
  Description of Artificial Sequence: Synthetic oligonucleotide
cccaucgcagcgccaagag

SEQ ID NO: 2182521 - RNA, 19 nt, Artificial Sequence
  Description of Artificial Sequence: Synthetic oligonucleotide
gguuucgggaagagucccc

SEQ ID NO: 2182522 - RNA, 19 nt, Artificial Sequence
  Description of Artificial Sequence: Synthetic oligonucleotide
uccucagaucagugagguu

SEQ ID NO: 2182523 - RNA, 19 nt, Artificial Sequence
  Description of Artificial Sequence: Synthetic oligonucleotide
uugccccgaucugacugca

SEQ ID NO: 2182524 - RNA, 19 nt, Artificial Sequence
  Description of Artificial Sequence: Synthetic oligonucleotide
cagugugagcagcaggagu

SEQ ID NO: 2182525 - RNA, 19 nt, Artificial Sequence
  Description of Artificial Sequence: Synthetic oligonucleotide
cacaccgcucaauccugca

SEQ ID NO: 2182526 - RNA, 19 nt, Artificial Sequence
  Description of Artificial Sequence: Synthetic oligonucleotide
ggcagguaacccugacuuc

SEQ ID NO: 2182527 - RNA, 19 nt, Artificial Sequence
  Description of Artificial Sequence: Synthetic oligonucleotide
ucacuggagucaggacagu

SEQ ID NO: 2182528 - RNA, 19 nt, Artificial Sequence
  Description of Artificial Sequence: Synthetic oligonucleotide
ccaugcaacgcagcucacc

SEQ ID NO: 2182529 - RNA, 19 nt, Artificial Sequence
  Description of Artificial Sequence: Synthetic oligonucleotide
ccuccugggagaucuuguc

SEQ ID NO: 2182530 - RNA, 19 nt, Artificial Sequence
  Description of Artificial Sequence: Synthetic oligonucleotide
gagucaggacagucugagu

SEQ ID NO: 2182531 - RNA, 19 nt, Artificial Sequence
  Description of Artificial Sequence: Synthetic oligonucleotide
cucugggacccgagaccug

SEQ ID NO: 2182532 - RNA, 19 nt, Artificial Sequence
  Description of Artificial Sequence: Synthetic oligonucleotide
ccuccugacagggcuggcg

SEQ ID NO: 2182533 - RNA, 19 nt, Artificial Sequence
  Description of Artificial Sequence: Synthetic oligonucleotide
gggccagguggugaccacg

SEQ ID NO: 2182534 - RNA, 19 nt, Artificial Sequence
  Description of Artificial Sequence: Synthetic oligonucleotide
guggccccauuucuuggaa

SEQ ID NO: 2182535 - RNA, 19 nt, Artificial Sequence
  Description of Artificial Sequence: Synthetic oligonucleotide
gacccgagaccuggaccug

SEQ ID NO: 2182536 - RNA, 19 nt, Artificial Sequence
  Description of Artificial Sequence: Synthetic oligonucleotide
ggauagcacucaacacccc

SEQ ID NO: 2182537 - RNA, 19 nt, Artificial Sequence
  Description of Artificial Sequence: Synthetic oligonucleotide
ugacugcacuuggggccag

SEQ ID NO: 2182538 - RNA, 19 nt, Artificial Sequence
  Description of Artificial Sequence: Synthetic oligonucleotide
ccuuucugacagcagcaga

SEQ ID NO: 2182539 - RNA, 19 nt, Artificial Sequence
  Description of Artificial Sequence: Synthetic oligonucleotide
gccgucacagcgccaugug

SEQ ID NO: 2182540 - RNA, 19 nt, Artificial Sequence
  Description of Artificial Sequence: Synthetic oligonucleotide
gcuggcgacugcaguugcg

SEQ ID NO: 2182541 - RNA, 19 nt, Artificial Sequence
  Description of Artificial Sequence: Synthetic oligonucleotide
cuaagccagaguggcccca

SEQ ID NO: 2182542 - RNA, 19 nt, Artificial Sequence
  Description of Artificial Sequence: Synthetic oligonucleotide
ggaccacaucuggaggagc

SEQ ID NO: 2182543 - RNA, 19 nt, Artificial Sequence
  Description of Artificial Sequence: Synthetic oligonucleotide
cccgagaccuggaccuggg

SEQ ID NO: 2182544 - RNA, 19 nt, Artificial Sequence
  Description of Artificial Sequence: Synthetic oligonucleotide
ccugacuucggagucguaa

SEQ ID NO: 2182545 - RNA, 19 nt, Artificial Sequence
  Description of Artificial Sequence: Synthetic oligonucleotide
accacaucuggaggagcuu

SEQ ID NO: 2182546 - RNA, 19 nt, Artificial Sequence
  Description of Artificial Sequence: Synthetic oligonucleotide
ggagugucuaagccagagu

SEQ ID NO: 2182547 - RNA, 19 nt, Artificial Sequence
  Description of Artificial Sequence: Synthetic oligonucleotide
cccgaucugacugcacuug

SEQ ID NO: 2182548 - RNA, 19 nt, Artificial Sequence
  Description of Artificial Sequence: Synthetic oligonucleotide
cccucaguccuggcuauag

SEQ ID NO: 2182549 - RNA, 19 nt, Artificial Sequence
  Description of Artificial Sequence: Synthetic oligonucleotide
cgcagcgccaagagagggg

SEQ ID NO: 2182550 - RNA, 19 nt, Artificial Sequence
  Description of Artificial Sequence: Synthetic oligonucleotide
caggagugucuaagccaga

SEQ ID NO: 2182551 - RNA, 19 nt, Artificial Sequence
  Description of Artificial Sequence: Synthetic oligonucleotide
cauucuccagggucacagu

SEQ ID NO: 2182552 - RNA, 19 nt, Artificial Sequence
  Description of Artificial Sequence: Synthetic oligonucleotide
cagagcagucugggucccc

SEQ ID NO: 2182553 - RNA, 19 nt, Artificial Sequence
  Description of Artificial Sequence: Synthetic oligonucleotide
caauaaccccauaggcauu

SEQ ID NO: 2182554 - RNA, 19 nt, Artificial Sequence
  Description of Artificial Sequence: Synthetic oligonucleotide
gcccaggucucgagaagcc

SEQ ID NO: 2182555 - RNA, 19 nt, Artificial Sequence
  Description of Artificial Sequence: Synthetic oligonucleotide
ggagaucuugucaguuucu

SEQ ID NO: 2182556 - RNA, 19 nt, Artificial Sequence
  Description of Artificial Sequence: Synthetic oligonucleotide
cacguguccucagaucagu

SEQ ID NO: 2182557 - RNA, 19 nt, Artificial Sequence
  Description of Artificial Sequence: Synthetic oligonucleotide
cgccaugugugugggauac

SEQ ID NO: 2182558 - RNA, 19 nt, Artificial Sequence
  Description of Artificial Sequence: Synthetic oligonucleotide
gcacaccgcucaauccugc

SEQ ID NO: 2182559 - RNA, 19 nt, Artificial Sequence
  Description of Artificial Sequence: Synthetic oligonucleotide
ccaccaugcaacgcagcuc

SEQ ID NO: 2182560 - RNA, 19 nt, Artificial Sequence
  Description of Artificial Sequence: Synthetic oligonucleotide
cugggacccgagaccugga

SEQ ID NO: 2182561 - RNA, 19 nt, Artificial Sequence
  Description of Artificial Sequence: Synthetic oligonucleotide
gccccgaucugacugcacu

SEQ ID NO: 2182562 - RNA, 19 nt, Artificial Sequence
  Description of Artificial Sequence: Synthetic oligonucleotide
gcucugggacccgagaccu

SEQ ID NO: 2182563 - RNA, 19 nt, Artificial Sequence
  Description of Artificial Sequence: Synthetic oligonucleotide
ggggcagguaacccugacu

SEQ ID NO: 2182564 - RNA, 19 nt, Artificial Sequence
  Description of Artificial Sequence: Synthetic oligonucleotide
gugguuggcacugcccuuu

SEQ ID NO: 2182565 - RNA, 19 nt, Artificial Sequence
  Description of Artificial Sequence: Synthetic oligonucleotide
cagugagguuuuccuuucu

SEQ ID NO: 2182566 - RNA, 19 nt, Artificial Sequence
  Description of Artificial Sequence: Synthetic oligonucleotide
caacgcagcucacccuccu

SEQ ID NO: 2182567 - RNA, 19 nt, Artificial Sequence
  Description of Artificial Sequence: Synthetic oligonucleotide
ggacagucugaguggccgu

SEQ ID NO: 2182568 - RNA, 19 nt, Artificial Sequence
  Description of Artificial Sequence: Synthetic oligonucleotide
ccaucgcagcgccaagaga

SEQ ID NO: 2182569 - RNA, 19 nt, Artificial Sequence
  Description of Artificial Sequence: Synthetic oligonucleotide
gagcagucuggguccccau

SEQ ID NO: 2182570 - RNA, 19 nt, Artificial Sequence
  Description of Artificial Sequence: Synthetic oligonucleotide
ggggccagguggugaccac

SEQ ID NO: 2182571 - RNA, 19 nt, Artificial Sequence
  Description of Artificial Sequence: Synthetic oligonucleotide
ccgcucaauccugcacucc

SEQ ID NO: 2182572 - RNA, 19 nt, Artificial Sequence
  Description of Artificial Sequence: Synthetic oligonucleotide
aguggccgucacagcgcca

SEQ ID NO: 2182573 - RNA, 19 nt, Artificial Sequence
  Description of Artificial Sequence: Synthetic oligonucleotide
gccggccccucaguccugg

SEQ ID NO: 2182574 - RNA, 19 nt, Artificial Sequence
  Description of Artificial Sequence: Synthetic oligonucleotide
ccagucucuaggaccacau

SEQ ID NO: 2182575 - RNA, 19 nt, Artificial Sequence
  Description of Artificial Sequence: Synthetic oligonucleotide
gguuggcacugcccuuucu

SEQ ID NO: 2182576 - RNA, 19 nt, Artificial Sequence
  Description of Artificial Sequence: Synthetic oligonucleotide
caugucccacuguggcuuu

SEQ ID NO: 2182577 - RNA, 19 nt, Artificial Sequence
  Description of Artificial Sequence: Synthetic oligonucleotide
gcuuugccccgaucugacu

SEQ ID NO: 2182578 - RNA, 19 nt, Artificial Sequence
  Description of Artificial Sequence: Synthetic oligonucleotide
cccagucucuaggaccaca

SEQ ID NO: 2182579 - RNA, 19 nt, Artificial Sequence
  Description of Artificial Sequence: Synthetic oligonucleotide
gcacuuggggccagguggu

SEQ ID NO: 2182580 - RNA, 19 nt, Artificial Sequence
  Description of Artificial Sequence: Synthetic oligonucleotide
cgccaagagaggggcacac

SEQ ID NO: 2182581 - RNA, 19 nt, Artificial Sequence
  Description of Artificial Sequence: Synthetic oligonucleotide
ggccgucacagcgccaugu

SEQ ID NO: 2182582 - RNA, 19 nt, Artificial Sequence
  Description of Artificial Sequence: Synthetic oligonucleotide
gcgccaugugugugggaua

SEQ ID NO: 2182583 - RNA, 19 nt, Artificial Sequence
  Description of Artificial Sequence: Synthetic oligonucleotide
ccacagacaaggggaauau

SEQ ID NO: 2182584 - RNA, 19 nt, Artificial Sequence
  Description of Artificial Sequence: Synthetic oligonucleotide
gcgccaagagaggggcaca

SEQ ID NO: 2182585 - RNA, 19 nt, Artificial Sequence
  Description of Artificial Sequence: Synthetic oligonucleotide
cagcugcaauaaccccaua

SEQ ID NO: 2182586 - RNA, 19 nt, Artificial Sequence
  Description of Artificial Sequence: Synthetic oligonucleotide
ccgucacagcgccaugugu

SEQ ID NO: 2182587 - RNA, 19 nt, Artificial Sequence
  Description of Artificial Sequence: Synthetic oligonucleotide
cuggggccggccccucagu

SEQ ID NO: 2182588 - RNA, 19 nt, Artificial Sequence
  Description of Artificial Sequence: Synthetic oligonucleotide
ccggccccucaguccuggc

SEQ ID NO: 2182589 - RNA, 19 nt, Artificial Sequence
  Description of Artificial Sequence: Synthetic oligonucleotide
ccccgaucugacugcacuu

SEQ ID NO: 2182590 - RNA, 19 nt, Artificial Sequence
  Description of Artificial Sequence: Synthetic oligonucleotide
cgaagguugucagcgucau

SEQ ID NO: 2182591 - RNA, 19 nt, Artificial Sequence
  Description of Artificial Sequence: Synthetic oligonucleotide
ggccggccccucaguccug

SEQ ID NO: 2182592 - RNA, 19 nt, Artificial Sequence
  Description of Artificial Sequence: Synthetic oligonucleotide
ccgagaccuggaccugggu

SEQ ID NO: 2182593 - RNA, 19 nt, Artificial Sequence
  Description of Artificial Sequence: Synthetic oligonucleotide
cccugacuucggagucgua

SEQ ID NO: 2182594 - RNA, 19 nt, Artificial Sequence
  Description of Artificial Sequence: Synthetic oligonucleotide
cgacugcaguugcgaaggu

SEQ ID NO: 2182595 - RNA, 19 nt, Artificial Sequence
  Description of Artificial Sequence: Synthetic oligonucleotide
aaaugagugagacugcagg

SEQ ID NO: 2182596 - RNA, 19 nt, Artificial Sequence
  Description of Artificial Sequence: Synthetic oligonucleotide
agugagacccuucagaccc

SEQ ID NO: 2182597 - RNA, 19 nt, Artificial Sequence
  Description of Artificial Sequence: Synthetic oligonucleotide
uccauuaccagauacagca

SEQ ID NO: 2182598 - RNA, 19 nt, Artificial Sequence
  Description of Artificial Sequence: Synthetic oligonucleotide
guuuacaacaccuagcugc

SEQ ID NO: 2182599 - RNA, 19 nt, Artificial Sequence
  Description of Artificial Sequence: Synthetic oligonucleotide
ucucaaaugagugagacug

SEQ ID NO: 2182600 - RNA, 19 nt, Artificial Sequence
  Description of Artificial Sequence: Synthetic oligonucleotide
aagucuuugaguccauuac

SEQ ID NO: 2182601 - RNA, 19 nt, Artificial Sequence
  Description of Artificial Sequence: Synthetic oligonucleotide
acagaaagggaauugcugg

SEQ ID NO: 2182602 - RNA, 19 nt, Artificial Sequence
  Description of Artificial Sequence: Synthetic oligonucleotide
ucuucgaauaguuggcugg

SEQ ID NO: 2182603 - RNA, 19 nt, Artificial Sequence
  Description of Artificial Sequence: Synthetic oligonucleotide
aaggaaagcggcugcauag

SEQ ID NO: 2182604 - RNA, 19 nt, Artificial Sequence
  Description of Artificial Sequence: Synthetic oligonucleotide
cuggauauggugaugagac

SEQ ID NO: 2182605 - RNA, 19 nt, Artificial Sequence
  Description of Artificial Sequence: Synthetic oligonucleotide
aaggagaugagcuggccag

SEQ ID NO: 2182606 - RNA, 19 nt, Artificial Sequence
  Description of Artificial Sequence: Synthetic oligonucleotide
ucuuugaggacgaagccug

SEQ ID NO: 2182607 - RNA, 19 nt, Artificial Sequence
  Description of Artificial Sequence: Synthetic oligonucleotide
ucugagauagucuucugcu

SEQ ID NO: 2182608 - RNA, 19 nt, Artificial Sequence
  Description of Artificial Sequence: Synthetic oligonucleotide
uuuacaacaccuagcugcc

SEQ ID NO: 2182609 - RNA, 19 nt, Artificial Sequence
  Description of Artificial Sequence: Synthetic oligonucleotide
gacuaagucucuuucuucc

SEQ ID NO: 2182610 - RNA, 19 nt, Artificial Sequence
  Description of Artificial Sequence: Synthetic oligonucleotide
ugacacucgggcuagguag

SEQ ID NO: 2182611 - RNA, 19 nt, Artificial Sequence
  Description of Artificial Sequence: Synthetic oligonucleotide
uuugaguccauuaccagau

SEQ ID NO: 2182612 - RNA, 19 nt, Artificial Sequence
  Description of Artificial Sequence: Synthetic oligonucleotide
uggauuugcucccuggaag

SEQ ID NO: 2182613 - RNA, 19 nt, Artificial Sequence
  Description of Artificial Sequence: Synthetic oligonucleotide
aaugagugagacugcaggu

SEQ ID NO: 2182614 - RNA, 19 nt, Artificial Sequence
  Description of Artificial Sequence: Synthetic oligonucleotide
gaagcuguucaccaccggg

SEQ ID NO: 2182615 - RNA, 19 nt, Artificial Sequence
  Description of Artificial Sequence: Synthetic oligonucleotide
agucuuugaggacgaagcc

SEQ ID NO: 2182616 - RNA, 19 nt, Artificial Sequence
  Description of Artificial Sequence: Synthetic oligonucleotide
gucucuuucuucccgaagg

SEQ ID NO: 2182617 - RNA, 19 nt, Artificial Sequence
  Description of Artificial Sequence: Synthetic oligonucleotide
ucugccuccgguuacauuc

SEQ ID NO: 2182618 - RNA, 19 nt, Artificial Sequence
  Description of Artificial Sequence: Synthetic oligonucleotide
ucacacacgccugugaagg

SEQ ID NO: 2182619 - RNA, 19 nt, Artificial Sequence
  Description of Artificial Sequence: Synthetic oligonucleotide
acuaagucucuuucuuccc

SEQ ID NO: 2182620 - RNA, 19 nt, Artificial Sequence
  Description of Artificial Sequence: Synthetic oligonucleotide
guucacagacaucaaacag

SEQ ID NO: 2182621 - RNA, 19 nt, Artificial Sequence
  Description of Artificial Sequence: Synthetic oligonucleotide
uaccagauacagcaggugc

SEQ ID NO: 2182622 - RNA, 19 nt, Artificial Sequence
  Description of Artificial Sequence: Synthetic oligonucleotide
uagguagacuuccagaguc

SEQ ID NO: 2182623 - RNA, 19 nt, Artificial Sequence
  Description of Artificial Sequence: Synthetic oligonucleotide
aaagggaauugcuggauau

SEQ ID NO: 2182624 - RNA, 19 nt, Artificial Sequence
  Description of Artificial Sequence: Synthetic oligonucleotide
ugagcagccguuuugggcu

SEQ ID NO: 2182625 - RNA, 19 nt, Artificial Sequence
  Description of Artificial Sequence: Synthetic oligonucleotide
uguucacagacaucaaaca

SEQ ID NO: 2182626 - RNA, 19 nt, Artificial Sequence
  Description of Artificial Sequence: Synthetic oligonucleotide
auauggugaugagacaggc

SEQ ID NO: 2182627 - RNA, 19 nt, Artificial Sequence
  Description of Artificial Sequence: Synthetic oligonucleotide
uuggccaauacuuccaagu

SEQ ID NO: 2182628 - RNA, 19 nt, Artificial Sequence
  Description of Artificial Sequence: Synthetic oligonucleotide
agacacucuucccucaagg

SEQ ID NO: 2182629 - RNA, 19 nt, Artificial Sequence
  Description of Artificial Sequence: Synthetic oligonucleotide
ugaguccauuaccagauac

SEQ ID NO: 2182630 - RNA, 19 nt, Artificial Sequence
  Description of Artificial Sequence: Synthetic oligonucleotide
ugaugagacaggcggaaga

SEQ ID NO: 2182631 - RNA, 19 nt, Artificial Sequence
  Description of Artificial Sequence: Synthetic oligonucleotide
ugccaggugaaggaaagcg

SEQ ID NO: 2182632 - RNA, 19 nt, Artificial Sequence
  Description of Artificial Sequence: Synthetic oligonucleotide
uggagagacacucuucccu

SEQ ID NO: 2182633 - RNA, 19 nt, Artificial Sequence
  Description of Artificial Sequence: Synthetic oligonucleotide
aauugcuggauauggugau

SEQ ID NO: 2182634 - RNA, 19 nt, Artificial Sequence
  Description of Artificial Sequence: Synthetic oligonucleotide
cuaagucucuuucuucccg

SEQ ID NO: 2182635 - RNA, 19 nt, Artificial Sequence
  Description of Artificial Sequence: Synthetic oligonucleotide
aguccauuaccagauacag

SEQ ID NO: 2182636 - RNA, 19 nt, Artificial Sequence
  Description of Artificial Sequence: Synthetic oligonucleotide
agacccuucagacccagag

SEQ ID NO: 2182637 - RNA, 19 nt, Artificial Sequence
  Description of Artificial Sequence: Synthetic oligonucleotide
cacagucgaacuuggagcc

SEQ ID NO: 2182638 - RNA, 19 nt, Artificial Sequence
  Description of Artificial Sequence: Synthetic oligonucleotide
agggaauugcuggauaugg

SEQ ID NO: 2182639 - RNA, 19 nt, Artificial Sequence
  Description of Artificial Sequence: Synthetic oligonucleotide
ucuuugaguccauuaccag

SEQ ID NO: 2182640 - RNA, 19 nt, Artificial Sequence
  Description of Artificial Sequence: Synthetic oligonucleotide
agggcaagaaagccugccc

SEQ ID NO: 2182641 - RNA, 19 nt, Artificial Sequence
  Description of Artificial Sequence: Synthetic oligonucleotide
auacuuccaagucuuugag

SEQ ID NO: 2182642 - RNA, 19 nt, Artificial Sequence
  Description of Artificial Sequence: Synthetic oligonucleotide
ugaggacgaagccugaguc

SEQ ID NO: 2182643 - RNA, 19 nt, Artificial Sequence
  Description of Artificial Sequence: Synthetic oligonucleotide
uguagcuggauuugcuccc

SEQ ID NO: 2182644 - RNA, 19 nt, Artificial Sequence
  Description of Artificial Sequence: Synthetic oligonucleotide
uagacuuccagagucuuga

SEQ ID NO: 2182645 - RNA, 19 nt, Artificial Sequence
  Description of Artificial Sequence: Synthetic oligonucleotide
uuuugggcucuucuuggcc

SEQ ID NO: 2182646 - RNA, 19 nt, Artificial Sequence
  Description of Artificial Sequence: Synthetic oligonucleotide
gucccuuugacacucgggc

SEQ ID NO: 2182647 - RNA, 19 nt, Artificial Sequence
  Description of Artificial Sequence: Synthetic oligonucleotide
ugaggacuaagucucuuuc

SEQ ID NO: 2182648 - RNA, 19 nt, Artificial Sequence
  Description of Artificial Sequence: Synthetic oligonucleotide
uggugggucagaucaaccc

SEQ ID NO: 2182649 - RNA, 19 nt, Artificial Sequence
  Description of Artificial Sequence: Synthetic oligonucleotide
gcuagguagacuuccagag

SEQ ID NO: 2182650 - RNA, 19 nt, Artificial Sequence
  Description of Artificial Sequence: Synthetic oligonucleotide
ugcuggguccuccacacgc

SEQ ID NO: 2182651 - RNA, 19 nt, Artificial Sequence
  Description of Artificial Sequence: Synthetic oligonucleotide
uugagcagccguuuugggc

SEQ ID NO: 2182652 - RNA, 19 nt, Artificial Sequence
  Description of Artificial Sequence: Synthetic oligonucleotide
gaguuuacaacaccuagcu

SEQ ID NO: 2182653 - RNA, 19 nt, Artificial Sequence
  Description of Artificial Sequence: Synthetic oligonucleotide
ucaaaugagugagacugca

SEQ ID NO: 2182654 - RNA, 19 nt, Artificial Sequence
  Description of Artificial Sequence: Synthetic oligonucleotide
uucccaguggucuccauga

SEQ ID NO: 2182655 - RNA, 19 nt, Artificial Sequence
  Description of Artificial Sequence: Synthetic oligonucleotide
ggaauugcuggauauggug

SEQ ID NO: 2182656 - RNA, 19 nt, Artificial Sequence
  Description of Artificial Sequence: Synthetic oligonucleotide
uucuucgaauaguuggcug

SEQ ID NO: 2182657 - RNA, 19 nt, Artificial Sequence
  Description of Artificial Sequence: Synthetic oligonucleotide
ugcauagaagcuguucacc

SEQ ID NO: 2182658 - RNA, 19 nt, Artificial Sequence
  Description of Artificial Sequence: Synthetic oligonucleotide
agacaggcggaagaucucc

SEQ ID NO: 2182659 - RNA, 19 nt, Artificial Sequence
  Description of Artificial Sequence: Synthetic oligonucleotide
uucuuggccaauacuucca

SEQ ID NO: 2182660 - RNA, 19 nt, Artificial Sequence
  Description of Artificial Sequence: Synthetic oligonucleotide
auuugcucccuggaagccc

SEQ ID NO: 2182661 - RNA, 19 nt, Artificial Sequence
  Description of Artificial Sequence: Synthetic oligonucleotide
agguccuuggagugagacc

SEQ ID NO: 2182662 - RNA, 19 nt, Artificial Sequence
  Description of Artificial Sequence: Synthetic oligonucleotide
uuugcucccuggaagccca

SEQ ID NO: 2182663 - RNA, 19 nt, Artificial Sequence
  Description of Artificial Sequence: Synthetic oligonucleotide
ucgaacuuggagccaguca

SEQ ID NO: 2182664 - RNA, 19 nt, Artificial Sequence
  Description of Artificial Sequence: Synthetic oligonucleotide
ugggagcugaccccaaucu

SEQ ID NO: 2182665 - RNA, 19 nt, Artificial Sequence
  Description of Artificial Sequence: Synthetic oligonucleotide
gaauugcuggauaugguga

SEQ ID NO: 2182666 - RNA, 19 nt, Artificial Sequence
  Description of Artificial Sequence: Synthetic oligonucleotide
uacaacaccuagcugccau

SEQ ID NO: 2182667 - RNA, 19 nt, Artificial Sequence
  Description of Artificial Sequence: Synthetic oligonucleotide
ggucagaucaacccugugc

SEQ ID NO: 2182668 - RNA, 19 nt, Artificial Sequence
  Description of Artificial Sequence: Synthetic oligonucleotide
acauucccuggagagacac

SEQ ID NO: 2182669 - RNA, 19 nt, Artificial Sequence
  Description of Artificial Sequence: Synthetic oligonucleotide
cauagaagcuguucaccac

SEQ ID NO: 2182670 - RNA, 19 nt, Artificial Sequence
  Description of Artificial Sequence: Synthetic oligonucleotide
uugaggacgaagccugagu

SEQ ID NO: 2182671 - RNA, 19 nt, Artificial Sequence
  Description of Artificial Sequence: Synthetic oligonucleotide
caacaaggaggccuguccc

SEQ ID NO: 2182672 - RNA, 19 nt, Artificial Sequence
  Description of Artificial Sequence: Synthetic oligonucleotide
aguuuacaacaccuagcug

SEQ ID NO: 2182673 - RNA, 19 nt, Artificial Sequence
  Description of Artificial Sequence: Synthetic oligonucleotide
caggcaaugccggagggcg

SEQ ID NO: 2182674 - RNA, 19 nt, Artificial Sequence
  Description of Artificial Sequence: Synthetic oligonucleotide
uggccaauacuuccaaguc

SEQ ID NO: 2182675 - RNA, 19 nt, Artificial Sequence
  Description of Artificial Sequence: Synthetic oligonucleotide
cucaaaugagugagacugc

SEQ ID NO: 2182676 - RNA, 19 nt, Artificial Sequence
  Description of Artificial Sequence: Synthetic oligonucleotide
gcacagucgaacuuggagc

SEQ ID NO: 2182677 - RNA, 19 nt, Artificial Sequence
  Description of Artificial Sequence: Synthetic oligonucleotide
gaaggagaugagcuggcca

SEQ ID NO: 2182678 - RNA, 19 nt, Artificial Sequence
  Description of Artificial Sequence: Synthetic oligonucleotide
agaucaacccugugcucuc

SEQ ID NO: 2182679 - RNA, 19 nt, Artificial Sequence
  Description of Artificial Sequence: Synthetic oligonucleotide
caauggugaggacuaaguc

SEQ ID NO: 2182680 - RNA, 19 nt, Artificial Sequence
  Description of Artificial Sequence: Synthetic oligonucleotide
ggcacagucgaacuuggag

SEQ ID NO: 2182681 - RNA, 19 nt, Artificial Sequence
  Description of Artificial Sequence: Synthetic oligonucleotide
uuggagugagacccuucag

SEQ ID NO: 2182682 - RNA, 19 nt, Artificial Sequence
  Description of Artificial Sequence: Synthetic oligonucleotide
acaacaccuagcugccauc

SEQ ID NO: 2182683 - RNA, 19 nt, Artificial Sequence
  Description of Artificial Sequence: Synthetic oligonucleotide
aggacuaagucucuuucuu

SEQ ID NO: 2182684 - RNA, 19 nt, Artificial Sequence
  Description of Artificial Sequence: Synthetic oligonucleotide
gagugagacccuucagacc

SEQ ID NO: 2182685 - RNA, 19 nt, Artificial Sequence
  Description of Artificial Sequence: Synthetic oligonucleotide
gcugaaggagaugagcugg

SEQ ID NO: 2182686 - RNA, 19 nt, Artificial Sequence
  Description of Artificial Sequence: Synthetic oligonucleotide
ucggccaugcaucgggucu

SEQ ID NO: 2182687 - RNA, 19 nt, Artificial Sequence
  Description of Artificial Sequence: Synthetic oligonucleotide
agagcacuucugugucucc

SEQ ID NO: 2182688 - RNA, 19 nt, Artificial Sequence
  Description of Artificial Sequence: Synthetic oligonucleotide
aaugccggagggcggcgag

SEQ ID NO: 2182689 - RNA, 19 nt, Artificial Sequence
  Description of Artificial Sequence: Synthetic oligonucleotide
ucgaauaguuggcuggauu

SEQ ID NO: 2182690 - RNA, 19 nt, Artificial Sequence
  Description of Artificial Sequence: Synthetic oligonucleotide
cacacugagcaauggugag

SEQ ID NO: 2182691 - RNA, 19 nt, Artificial Sequence
  Description of Artificial Sequence: Synthetic oligonucleotide
uuugaggacgaagccugag

SEQ ID NO: 2182692 - RNA, 19 nt, Artificial Sequence
  Description of Artificial Sequence: Synthetic oligonucleotide
uugggcggcccgaacaggc

SEQ ID NO: 2182693 - RNA, 19 nt, Artificial Sequence
  Description of Artificial Sequence: Synthetic oligonucleotide
auuaccagauacagcaggu

SEQ ID NO: 2182694 - RNA, 19 nt, Artificial Sequence
  Description of Artificial Sequence: Synthetic oligonucleotide
ggauuugcucccuggaagc

SEQ ID NO: 2182695 - RNA, 19 nt, Artificial Sequence
  Description of Artificial Sequence: Synthetic oligonucleotide
cugcauagaagcuguucac

SEQ ID NO: 2182696 - RNA, 19 nt, Artificial Sequence
  Description of Artificial Sequence: Synthetic oligonucleotide
cuugagcagccguuuuggg

SEQ ID NO: 2182697 - RNA, 19 nt, Artificial Sequence
  Description of Artificial Sequence: Synthetic oligonucleotide
uuaccagauacagcaggug

SEQ ID NO: 2182698 - RNA, 19 nt, Artificial Sequence
  Description of Artificial Sequence: Synthetic oligonucleotide
agucucuuucuucccgaag

SEQ ID NO: 2182699 - RNA, 19 nt, Artificial Sequence
  Description of Artificial Sequence: Synthetic oligonucleotide
cucgcugaaggagaugagc

SEQ ID NO: 2182700 - RNA, 19 nt, Artificial Sequence
  Description of Artificial Sequence: Synthetic oligonucleotide
aaggaggccugucccuuug

SEQ ID NO: 2182701 - RNA, 19 nt, Artificial Sequence
  Description of Artificial Sequence: Synthetic oligonucleotide
aaugcgggugauguucaca

SEQ ID NO: 2182702 - RNA, 19 nt, Artificial Sequence
  Description of Artificial Sequence: Synthetic oligonucleotide
agaagcuguucaccaccgg

SEQ ID NO: 2182703 - RNA, 19 nt, Artificial Sequence
  Description of Artificial Sequence: Synthetic oligonucleotide
acucgggcuagguagacuu

SEQ ID NO: 2182704 - RNA, 19 nt, Artificial Sequence
  Description of Artificial Sequence: Synthetic oligonucleotide
agggcggcgagcccgguuc

SEQ ID NO: 2182705 - RNA, 19 nt, Artificial Sequence
  Description of Artificial Sequence: Synthetic oligonucleotide
cugugucuccaacaaggag

SEQ ID NO: 2182706 - RNA, 19 nt, Artificial Sequence
  Description of Artificial Sequence: Synthetic oligonucleotide
cgguucuucgaauaguugg

SEQ ID NO: 2182707 - RNA, 19 nt, Artificial Sequence
  Description of Artificial Sequence: Synthetic oligonucleotide
augcaucgggucuuggcug

SEQ ID NO: 2182708 - RNA, 19 nt, Artificial Sequence
  Description of Artificial Sequence: Synthetic oligonucleotide
ugcaggucacacacgccug

SEQ ID NO: 2182709 - RNA, 19 nt, Artificial Sequence
  Description of Artificial Sequence: Synthetic oligonucleotide
uccgaguuuacaacaccua

SEQ ID NO: 2182710 - RNA, 19 nt, Artificial Sequence
  Description of Artificial Sequence: Synthetic oligonucleotide
uggugaugagacaggcgga

SEQ ID NO: 2182711 - RNA, 19 nt, Artificial Sequence
  Description of Artificial Sequence: Synthetic oligonucleotide
aggagggcaagaaagccug

SEQ ID NO: 2182712 - RNA, 19 nt, Artificial Sequence
  Description of Artificial Sequence: Synthetic oligonucleotide
guuuugggcucuucuuggc

SEQ ID NO: 2182713 - RNA, 19 nt, Artificial Sequence
  Description of Artificial Sequence: Synthetic oligonucleotide
cuuggccaauacuuccaag

SEQ ID NO: 2182714 - RNA, 19 nt, Artificial Sequence
  Description of Artificial Sequence: Synthetic oligonucleotide
gacccagagcacuucugug

SEQ ID NO: 2182715 - RNA, 19 nt, Artificial Sequence
  Description of Artificial Sequence: Synthetic oligonucleotide
gauuugcucccuggaagcc

SEQ ID NO: 2182716 - RNA, 19 nt, Artificial Sequence
  Description of Artificial Sequence: Synthetic oligonucleotide
gagacacucuucccucaag

SEQ ID NO: 2182717 - RNA, 19 nt, Artificial Sequence
  Description of Artificial Sequence: Synthetic oligonucleotide
accuucugccuccgguuac

SEQ ID NO: 2182718 - RNA, 19 nt, Artificial Sequence
  Description of Artificial Sequence: Synthetic oligonucleotide
cagcaaagucuuugagucc

SEQ ID NO: 2182719 - RNA, 19 nt, Artificial Sequence
  Description of Artificial Sequence: Synthetic oligonucleotide
ucgggcuagguagacuucc

SEQ ID NO: 2182720 - RNA, 19 nt, Artificial Sequence
  Description of Artificial Sequence: Synthetic oligonucleotide
cuuccaagucuuugaggac

SEQ ID NO: 2182721 - RNA, 19 nt, Artificial Sequence
  Description of Artificial Sequence: Synthetic oligonucleotide
gguucuucgaauaguuggc

SEQ ID NO: 2182722 - RNA, 19 nt, Artificial Sequence
  Description of Artificial Sequence: Synthetic oligonucleotide
caguggucuccaugaaggg

SEQ ID NO: 2182723 - RNA, 19 nt, Artificial Sequence
  Description of Artificial Sequence: Synthetic oligonucleotide
gaaagggaauugcuggaua

SEQ ID NO: 2182724 - RNA, 19 nt, Artificial Sequence
  Description of Artificial Sequence: Synthetic oligonucleotide
cuccgguuacauucccugg

SEQ ID NO: 2182725 - RNA, 19 nt, Artificial Sequence
  Description of Artificial Sequence: Synthetic oligonucleotide
gucacacacgccugugaag

SEQ ID NO: 2182726 - RNA, 19 nt, Artificial Sequence
  Description of Artificial Sequence: Synthetic oligonucleotide
ugauguucacagacaucaa

SEQ ID NO: 2182727 - RNA, 19 nt, Artificial Sequence
  Description of Artificial Sequence: Synthetic oligonucleotide
gaguccauuaccagauaca

SEQ ID NO: 2182728 - RNA, 19 nt, Artificial Sequence
  Description of Artificial Sequence: Synthetic oligonucleotide
gcugaccccaaucucuggg

SEQ ID NO: 2182729 - RNA, 19 nt, Artificial Sequence
  Description of Artificial Sequence: Synthetic oligonucleotide
acaccuagcugccauccau

SEQ ID NO: 2182730 - RNA, 19 nt, Artificial Sequence
  Description of Artificial Sequence: Synthetic oligonucleotide
uugacacucgggcuaggua

SEQ ID NO: 2182731 - RNA, 19 nt, Artificial Sequence
  Description of Artificial Sequence: Synthetic oligonucleotide
cuagcugccauccauuggu

SEQ ID NO: 2182732 - RNA, 19 nt, Artificial Sequence
  Description of Artificial Sequence: Synthetic oligonucleotide
caacaccuagcugccaucc

SEQ ID NO: 2182733 - RNA, 19 nt, Artificial Sequence
  Description of Artificial Sequence: Synthetic oligonucleotide
uccuccacacgcgugccag

SEQ ID NO: 2182734 - RNA, 19 nt, Artificial Sequence
  Description of Artificial Sequence: Synthetic oligonucleotide
uuugacacucgggcuaggu

SEQ ID NO: 2182735 - RNA, 19 nt, Artificial Sequence
  Description of Artificial Sequence: Synthetic oligonucleotide
gacgaagccugagucugag

SEQ ID NO: 2182736 - RNA, 19 nt, Artificial Sequence
  Description of Artificial Sequence: Synthetic oligonucleotide
ugaccccaaucucuggguc

SEQ ID NO: 2182737 - RNA, 19 nt, Artificial Sequence
  Description of Artificial Sequence: Synthetic oligonucleotide
gggcaagaaagccugcccc

SEQ ID NO: 2182738 - RNA, 19 nt, Artificial Sequence
  Description of Artificial Sequence: Synthetic oligonucleotide
ugcaucgggucuuggcugu

SEQ ID NO: 2182739 - RNA, 19 nt, Artificial Sequence
  Description of Artificial Sequence: Synthetic oligonucleotide
aggccuggauggcaaugcg

SEQ ID NO: 2182740 - RNA, 19 nt, Artificial Sequence
  Description of Artificial Sequence: Synthetic oligonucleotide
agcuugggcggcccgaaca

SEQ ID NO: 2182741 - RNA, 19 nt, Artificial Sequence
  Description of Artificial Sequence: Synthetic oligonucleotide
accuccgaguuuacaacac

SEQ ID NO: 2182742 - RNA, 19 nt, Artificial Sequence
  Description of Artificial Sequence: Synthetic oligonucleotide
guuacauucccuggagaga

SEQ ID NO: 2182743 - RNA, 19 nt, Artificial Sequence
  Description of Artificial Sequence: Synthetic oligonucleotide
ccgaguuuacaacaccuag

SEQ ID NO: 2182744 - RNA, 19 nt, Artificial Sequence
  Description of Artificial Sequence: Synthetic oligonucleotide
gaacuuggagccagucagc

SEQ ID NO: 2182745 - RNA, 19 nt, Artificial Sequence
  Description of Artificial Sequence: Synthetic oligonucleotide
gagguccuuggagugagac

SEQ ID NO: 2182746 - RNA, 19 nt, Artificial Sequence
  Description of Artificial Sequence: Synthetic oligonucleotide
ccaacaaggaggccugucc

SEQ ID NO: 2182747 - RNA, 19 nt, Artificial Sequence
  Description of Artificial Sequence: Synthetic oligonucleotide
agcccgguucuucgaauag

SEQ ID NO: 2182748 - RNA, 19 nt, Artificial Sequence
  Description of Artificial Sequence: Synthetic oligonucleotide
gaugaccuucugccuccgg

SEQ ID NO: 2182749 - RNA, 19 nt, Artificial Sequence
  Description of Artificial Sequence: Synthetic oligonucleotide
agacuuccagagucuugag

SEQ ID NO: 2182750 - RNA, 19 nt, Artificial Sequence
  Description of Artificial Sequence: Synthetic oligonucleotide
agaaagggaauugcuggau

SEQ ID NO: 2182751 - RNA, 19 nt, Artificial Sequence
  Description of Artificial Sequence: Synthetic oligonucleotide
gucuggauggauggugucc

SEQ ID NO: 2182752 - RNA, 19 nt, Artificial Sequence
  Description of Artificial Sequence: Synthetic oligonucleotide
cgaguuuacaacaccuagc

SEQ ID NO: 2182753 - RNA, 19 nt, Artificial Sequence
  Description of Artificial Sequence: Synthetic oligonucleotide
agucugagauagucuucug

SEQ ID NO: 2182754 - RNA, 19 nt, Artificial Sequence
  Description of Artificial Sequence: Synthetic oligonucleotide
cgaauaguuggcuggauuc

SEQ ID NO: 2182755 - RNA, 19 nt, Artificial Sequence
  Description of Artificial Sequence: Synthetic oligonucleotide
cacgcgugccaggugaagg

SEQ ID NO: 2182756 - RNA, 19 nt, Artificial Sequence
  Description of Artificial Sequence: Synthetic oligonucleotide
cagucgaacuuggagccag

SEQ ID NO: 2182757 - RNA, 19 nt, Artificial Sequence
  Description of Artificial Sequence: Synthetic oligonucleotide
uacauucccuggagagaca

SEQ ID NO: 2182758 - RNA, 19 nt, Artificial Sequence
  Description of Artificial Sequence: Synthetic oligonucleotide
agcugaccccaaucucugg

SEQ ID NO: 2182759 - RNA, 19 nt, Artificial Sequence
  Description of Artificial Sequence: Synthetic oligonucleotide
gaggccugucccuuugaca

SEQ ID NO: 2182760 - RNA, 19 nt, Artificial Sequence
  Description of Artificial Sequence: Synthetic oligonucleotide
gugagguccuuggagugag

SEQ ID NO: 2182761 - RNA, 19 nt, Artificial Sequence
  Description of Artificial Sequence: Synthetic oligonucleotide
gaggacuaagucucuuucu

SEQ ID NO: 2182762 - RNA, 19 nt, Artificial Sequence
  Description of Artificial Sequence: Synthetic oligonucleotide
uucccuggagagacacucu

SEQ ID NO: 2182763 - RNA, 19 nt, Artificial Sequence
  Description of Artificial Sequence: Synthetic oligonucleotide
ggagagacacucuucccuc

SEQ ID NO: 2182764 - RNA, 19 nt, Artificial Sequence
  Description of Artificial Sequence: Synthetic oligonucleotide
cugucccuuugacacucgg

SEQ ID NO: 2182765 - RNA, 19 nt, Artificial Sequence
  Description of Artificial Sequence: Synthetic oligonucleotide
gagcacucggccaugcauc

SEQ ID NO: 2182766 - RNA, 19 nt, Artificial Sequence
  Description of Artificial Sequence: Synthetic oligonucleotide
aggagaugagcuggccagg

SEQ ID NO: 2182767 - RNA, 19 nt, Artificial Sequence
  Description of Artificial Sequence: Synthetic oligonucleotide
gagcugaccccaaucucug

SEQ ID NO: 2182768 - RNA, 19 nt, Artificial Sequence
  Description of Artificial Sequence: Synthetic oligonucleotide
guccauuaccagauacagc

SEQ ID NO: 2182769 - RNA, 19 nt, Artificial Sequence
  Description of Artificial Sequence: Synthetic oligonucleotide
ugaaggaaagcggcugcau

SEQ ID NO: 2182770 - RNA, 19 nt, Artificial Sequence
  Description of Artificial Sequence: Synthetic oligonucleotide
gauggcaaugcgggugaug

SEQ ID NO: 2182771 - RNA, 19 nt, Artificial Sequence
  Description of Artificial Sequence: Synthetic oligonucleotide
guagacuuccagagucuug

SEQ ID NO: 2182772 - RNA, 19 nt, Artificial Sequence
  Description of Artificial Sequence: Synthetic oligonucleotide
cugccuccgguuacauucc

SEQ ID NO: 2182773 - RNA, 19 nt, Artificial Sequence
  Description of Artificial Sequence: Synthetic oligonucleotide
acacacgccugugaaggug

SEQ ID NO: 2182774 - RNA, 19 nt, Artificial Sequence
  Description of Artificial Sequence: Synthetic oligonucleotide
ggacuaagucucuuucuuc

SEQ ID NO: 2182775 - RNA, 19 nt, Artificial Sequence
  Description of Artificial Sequence: Synthetic oligonucleotide
acgcgugccaggugaagga

SEQ ID NO: 2182776 - RNA, 19 nt, Artificial Sequence
  Description of Artificial Sequence: Synthetic oligonucleotide
aggucacacacgccuguga

SEQ ID NO: 2182777 - RNA, 19 nt, Artificial Sequence
  Description of Artificial Sequence: Synthetic oligonucleotide
uggguccuccacacgcgug

SEQ ID NO: 2182778 - RNA, 19 nt, Artificial Sequence
  Description of Artificial Sequence: Synthetic oligonucleotide
caugcaucgggucuuggcu

SEQ ID NO: 2182779 - RNA, 19 nt, Artificial Sequence
  Description of Artificial Sequence: Synthetic oligonucleotide
gggaugaccuucugccucc

SEQ ID NO: 2182780 - RNA, 19 nt, Artificial Sequence
  Description of Artificial Sequence: Synthetic oligonucleotide
gucuccaacaaggaggccu

SEQ ID NO: 2182781 - RNA, 19 nt, Artificial Sequence
  Description of Artificial Sequence: Synthetic oligonucleotide
cagagcacuucugugucuc

SEQ ID NO: 2182782 - RNA, 19 nt, Artificial Sequence
  Description of Artificial Sequence: Synthetic oligonucleotide
gcccgaacaggcaaugccg

SEQ ID NO: 2182783 - RNA, 19 nt, Artificial Sequence
  Description of Artificial Sequence: Synthetic oligonucleotide
ggcuagguagacuuccaga

SEQ ID NO: 2182784 - RNA, 19 nt, Artificial Sequence
  Description of Artificial Sequence: Synthetic oligonucleotide
caccuccgaguuuacaaca

SEQ ID NO: 2182785 - RNA, 19 nt, Artificial Sequence
  Description of Artificial Sequence: Synthetic oligonucleotide
uggugaggacuaagucucu

SEQ ID NO: 2182786 - RNA, 19 nt, Artificial Sequence
  Description of Artificial Sequence: Synthetic oligonucleotide
caccgggaugaccuucugc

SEQ ID NO: 2182787 - RNA, 19 nt, Artificial Sequence
  Description of Artificial Sequence: Synthetic oligonucleotide
cugagucugagauagucuu

SEQ ID NO: 2182788 - RNA, 19 nt, Artificial Sequence
  Description of Artificial Sequence: Synthetic oligonucleotide
cacacgccugugaagguga

SEQ ID NO: 2182789 - RNA, 19 nt, Artificial Sequence
  Description of Artificial Sequence: Synthetic oligonucleotide
aggaaagcggcugcauaga

SEQ ID NO: 2182790 - RNA, 19 nt, Artificial Sequence
  Description of Artificial Sequence: Synthetic oligonucleotide
ugccuccgguuacauuccc

SEQ ID NO: 2182791 - RNA, 19 nt, Artificial Sequence
  Description of Artificial Sequence: Synthetic oligonucleotide
gaggacgaagccugagucu

SEQ ID NO: 2182792 - RNA, 19 nt, Artificial Sequence
  Description of Artificial Sequence: Synthetic oligonucleotide
cuccgaguuuacaacaccu

SEQ ID NO: 2182793 - RNA, 19 nt, Artificial Sequence
  Description of Artificial Sequence: Synthetic oligonucleotide
cccgaacaggcaaugccgg

SEQ ID NO: 2182794 - RNA, 19 nt, Artificial Sequence
  Description of Artificial Sequence: Synthetic oligonucleotide
agucuugagcagccguuuu

SEQ ID NO: 2182795 - RNA, 19 nt, Artificial Sequence
  Description of Artificial Sequence: Synthetic oligonucleotide
accccaaucucugggucug

SEQ ID NO: 2182796 - RNA, 19 nt, Artificial Sequence
  Description of Artificial Sequence: Synthetic oligonucleotide
cuucgaauaguuggcugga

SEQ ID NO: 2182797 - RNA, 19 nt, Artificial Sequence
  Description of Artificial Sequence: Synthetic oligonucleotide
uggcuguccaggccacacu

SEQ ID NO: 2182798 - RNA, 19 nt, Artificial Sequence
  Description of Artificial Sequence: Synthetic oligonucleotide
uuacaacaccuagcugcca

SEQ ID NO: 2182799 - RNA, 19 nt, Artificial Sequence
  Description of Artificial Sequence: Synthetic oligonucleotide
acacucgggcuagguagac

SEQ ID NO: 2182800 - RNA, 19 nt, Artificial Sequence
  Description of Artificial Sequence: Synthetic oligonucleotide
ccuccgguuacauucccug

SEQ ID NO: 2182801 - RNA, 19 nt, Artificial Sequence
  Description of Artificial Sequence: Synthetic oligonucleotide
cuggauuugcucccuggaa

SEQ ID NO: 2182802 - RNA, 19 nt, Artificial Sequence
  Description of Artificial Sequence: Synthetic oligonucleotide
ccaugaagggcacagucga

SEQ ID NO: 2182803 - RNA, 19 nt, Artificial Sequence
  Description of Artificial Sequence: Synthetic oligonucleotide
guggugggucagaucaacc

SEQ ID NO: 2182804 - RNA, 19 nt, Artificial Sequence
  Description of Artificial Sequence: Synthetic oligonucleotide
gagugagacugcaggucac

SEQ ID NO: 2182805 - RNA, 19 nt, Artificial Sequence
  Description of Artificial Sequence: Synthetic oligonucleotide
ccaugcaucgggucuuggc

SEQ ID NO: 2182806 - RNA, 19 nt, Artificial Sequence
  Description of Artificial Sequence: Synthetic oligonucleotide
gcaccuccgaguuuacaac

SEQ ID NO: 2182807 - RNA, 19 nt, Artificial Sequence
  Description of Artificial Sequence: Synthetic oligonucleotide
uucgaauaguuggcuggau

SEQ ID NO: 2182808 - RNA, 19 nt, Artificial Sequence
  Description of Artificial Sequence: Synthetic oligonucleotide
gaagugcugcagggccucg

SEQ ID NO: 2182809 - RNA, 19 nt, Artificial Sequence
  Description of Artificial Sequence: Synthetic oligonucleotide
gacacucgggcuagguaga

SEQ ID NO: 2182810 - RNA, 19 nt, Artificial Sequence
  Description of Artificial Sequence: Synthetic oligonucleotide
cugagcaccuccgaguuua

SEQ ID NO: 2182811 - RNA, 19 nt, Artificial Sequence
  Description of Artificial Sequence: Synthetic oligonucleotide
gggucuuggcuguccaggc

SEQ ID NO: 2182812 - RNA, 19 nt, Artificial Sequence
  Description of Artificial Sequence: Synthetic oligonucleotide
agguagacuuccagagucu

SEQ ID NO: 2182813 - RNA, 19 nt, Artificial Sequence
  Description of Artificial Sequence: Synthetic oligonucleotide
gcuugggcggcccgaacag

SEQ ID NO: 2182814 - RNA, 19 nt, Artificial Sequence
  Description of Artificial Sequence: Synthetic oligonucleotide
ugggcggcccgaacaggca

SEQ ID NO: 2182815 - RNA, 19 nt, Artificial Sequence
  Description of Artificial Sequence: Synthetic oligonucleotide
gugagacugcaggucacac

SEQ ID NO: 2182816 - RNA, 19 nt, Artificial Sequence
  Description of Artificial Sequence: Synthetic oligonucleotide
cuuucuucccgaaggcccu

SEQ ID NO: 2182817 - RNA, 19 nt, Artificial Sequence
  Description of Artificial Sequence: Synthetic oligonucleotide
aucaacccugugcucucaa

SEQ ID NO: 2182818 - RNA, 19 nt, Artificial Sequence
  Description of Artificial Sequence: Synthetic oligonucleotide
cuugggcggcccgaacagg

SEQ ID NO: 2182819 - RNA, 19 nt, Artificial Sequence
  Description of Artificial Sequence: Synthetic oligonucleotide
cuuugaggacgaagccuga

SEQ ID NO: 2182820 - RNA, 19 nt, Artificial Sequence
  Description of Artificial Sequence: Synthetic oligonucleotide
cagaucaacccugugcucu

SEQ ID NO: 2182821 - RNA, 19 nt, Artificial Sequence
  Description of Artificial Sequence: Synthetic oligonucleotide
agggccucgcugaaggaga

SEQ ID NO: 2182822 - RNA, 19 nt, Artificial Sequence
  Description of Artificial Sequence: Synthetic oligonucleotide
gaccccaaucucugggucu

SEQ ID NO: 2182823 - RNA, 19 nt, Artificial Sequence
  Description of Artificial Sequence: Synthetic oligonucleotide
ccacaucccauucuuccug

SEQ ID NO: 2182824 - RNA, 19 nt, Artificial Sequence
  Description of Artificial Sequence: Synthetic oligonucleotide
cuggauggaugguguccac

SEQ ID NO: 2182825 - RNA, 19 nt, Artificial Sequence
  Description of Artificial Sequence: Synthetic oligonucleotide
gaccuucugccuccgguua

SEQ ID NO: 2182826 - RNA, 19 nt, Artificial Sequence
  Description of Artificial Sequence: Synthetic oligonucleotide
gcuggauauggugaugaga

SEQ ID NO: 2182827 - RNA, 19 nt, Artificial Sequence
  Description of Artificial Sequence: Synthetic oligonucleotide
ccuccgaguuuacaacacc

SEQ ID NO: 2182828 - RNA, 19 nt, Artificial Sequence
  Description of Artificial Sequence: Synthetic oligonucleotide
cuagguagacuuccagagu

SEQ ID NO: 2182829 - RNA, 19 nt, Artificial Sequence
  Description of Artificial Sequence: Synthetic oligonucleotide
cccugugcucucaaaugag

SEQ ID NO: 2182830 - RNA, 19 nt, Artificial Sequence
  Description of Artificial Sequence: Synthetic oligonucleotide
ggccuggauggcaaugcgg

SEQ ID NO: 2182831 - RNA, 19 nt, Artificial Sequence
  Description of Artificial Sequence: Synthetic oligonucleotide
gagacaggcggaagaucuc

SEQ ID NO: 2182832 - RNA, 19 nt, Artificial Sequence
  Description of Artificial Sequence: Synthetic oligonucleotide
ucuccguggugggucagau

SEQ ID NO: 2182833 - RNA, 19 nt, Artificial Sequence
  Description of Artificial Sequence: Synthetic oligonucleotide
caucgggucuuggcugucc

SEQ ID NO: 2182834 - RNA, 19 nt, Artificial Sequence
  Description of Artificial Sequence: Synthetic oligonucleotide
uagcugccauccauugguu

SEQ ID NO: 2182835 - RNA, 19 nt, Artificial Sequence
  Description of Artificial Sequence: Synthetic oligonucleotide
ggugggucagaucaacccu

SEQ ID NO: 2182836 - RNA, 19 nt, Artificial Sequence
  Description of Artificial Sequence: Synthetic oligonucleotide
acaaggaggccugucccuu

SEQ ID NO: 2182837 - RNA, 19 nt, Artificial Sequence
  Description of Artificial Sequence: Synthetic oligonucleotide
gagcccgguucuucgaaua

SEQ ID NO: 2182838 - RNA, 19 nt, Artificial Sequence
  Description of Artificial Sequence: Synthetic oligonucleotide
ccgguuacauucccuggag

SEQ ID NO: 2182839 - RNA, 19 nt, Artificial Sequence
  Description of Artificial Sequence: Synthetic oligonucleotide
cucggccaugcaucggguc

SEQ ID NO: 2182840 - RNA, 19 nt, Artificial Sequence
  Description of Artificial Sequence: Synthetic oligonucleotide
augccggagggcggcgagc

SEQ ID NO: 2182841 - RNA, 19 nt, Artificial Sequence
  Description of Artificial Sequence: Synthetic oligonucleotide
cucucaaaugagugagacu

SEQ ID NO: 2182842 - RNA, 19 nt, Artificial Sequence
  Description of Artificial Sequence: Synthetic oligonucleotide
acagucgaacuuggagcca

SEQ ID NO: 2182843 - RNA, 19 nt, Artificial Sequence
  Description of Artificial Sequence: Synthetic oligonucleotide
guucuucgaauaguuggcu

SEQ ID NO: 2182844 - RNA, 19 nt, Artificial Sequence
  Description of Artificial Sequence: Synthetic oligonucleotide
cuuugacacucgggcuagg

SEQ ID NO: 2182845 - RNA, 19 nt, Artificial Sequence
  Description of Artificial Sequence: Synthetic oligonucleotide
caugaagggcacagucgaa

SEQ ID NO: 2182846 - RNA, 19 nt, Artificial Sequence
  Description of Artificial Sequence: Synthetic oligonucleotide
cucgggcuagguagacuuc

SEQ ID NO: 2182847 - RNA, 19 nt, Artificial Sequence
  Description of Artificial Sequence: Synthetic oligonucleotide
ggaaagcggcugcauagaa

SEQ ID NO: 2182848 - RNA, 19 nt, Artificial Sequence
  Description of Artificial Sequence: Synthetic oligonucleotide
cacgccugugaaggugagg

SEQ ID NO: 2182849 - RNA, 19 nt, Artificial Sequence
  Description of Artificial Sequence: Synthetic oligonucleotide
gaucaacccugugcucuca

SEQ ID NO: 2182850 - RNA, 19 nt, Artificial Sequence
  Description of Artificial Sequence: Synthetic oligonucleotide
ggugaugagacaggcggaa

SEQ ID NO: 2182851 - RNA, 19 nt, Artificial Sequence
  Description of Artificial Sequence: Synthetic oligonucleotide
gaagggcacagucgaacuu

SEQ ID NO: 2182852 - RNA, 19 nt, Artificial Sequence
  Description of Artificial Sequence: Synthetic oligonucleotide
accaccgggaugaccuucu

SEQ ID NO: 2182853 - RNA, 19 nt, Artificial Sequence
  Description of Artificial Sequence: Synthetic oligonucleotide
ggagcugaccccaaucucu

SEQ ID NO: 2182854 - RNA, 19 nt, Artificial Sequence
  Description of Artificial Sequence: Synthetic oligonucleotide
gagaugagcuggccaggcu

SEQ ID NO: 2182855 - RNA, 19 nt, Artificial Sequence
  Description of Artificial Sequence: Synthetic oligonucleotide
gggagcugaccccaaucuc

SEQ ID NO: 2182856 - RNA, 19 nt, Artificial Sequence
  Description of Artificial Sequence: Synthetic oligonucleotide
guagauggucuggagcacu

SEQ ID NO: 2182857 - RNA, 19 nt, Artificial Sequence
  Description of Artificial Sequence: Synthetic oligonucleotide
gugccaggugaaggaaagc

SEQ ID NO: 2182858 - RNA, 19 nt, Artificial Sequence
  Description of Artificial Sequence: Synthetic oligonucleotide
aggcaaugccggagggcgg

SEQ ID NO: 2182859 - RNA, 19 nt, Artificial Sequence
  Description of Artificial Sequence: Synthetic oligonucleotide
uucugccuccgguuacauu

SEQ ID NO: 2182860 - RNA, 19 nt, Artificial Sequence
  Description of Artificial Sequence: Synthetic oligonucleotide
acacgcgugccaggugaag

SEQ ID NO: 2182861 - RNA, 19 nt, Artificial Sequence
  Description of Artificial Sequence: Synthetic oligonucleotide
ccuuugacacucgggcuag

SEQ ID NO: 2182862 - RNA, 19 nt, Artificial Sequence
  Description of Artificial Sequence: Synthetic oligonucleotide
caggucacacacgccugug

SEQ ID NO: 2182863 - RNA, 19 nt, Artificial Sequence
  Description of Artificial Sequence: Synthetic oligonucleotide
uccuuggagugagacccuu

SEQ ID NO: 2182864 - RNA, 19 nt, Artificial Sequence
  Description of Artificial Sequence: Synthetic oligonucleotide
ccgguucuucgaauaguug

SEQ ID NO: 2182865 - RNA, 19 nt, Artificial Sequence
  Description of Artificial Sequence: Synthetic oligonucleotide
ccauugguuucugugguca

SEQ ID NO: 2182866 - RNA, 19 nt, Artificial Sequence
  Description of Artificial Sequence: Synthetic oligonucleotide
ggucuggauggaugguguc

SEQ ID NO: 2182867 - RNA, 19 nt, Artificial Sequence
  Description of Artificial Sequence: Synthetic oligonucleotide
uggugcagcuugggcggcc

SEQ ID NO: 2182868 - RNA, 19 nt, Artificial Sequence
  Description of Artificial Sequence: Synthetic oligonucleotide
cugaccccaaucucugggu

SEQ ID NO: 2182869 - RNA, 19 nt, Artificial Sequence
  Description of Artificial Sequence: Synthetic oligonucleotide
ugcugggagcugaccccaa

SEQ ID NO: 2182870 - RNA, 19 nt, Artificial Sequence
  Description of Artificial Sequence: Synthetic oligonucleotide
cuccguggugggucagauc

SEQ ID NO: 2182871 - RNA, 19 nt, Artificial Sequence
  Description of Artificial Sequence: Synthetic oligonucleotide
gggucagaucaacccugug

SEQ ID NO: 2182872 - RNA, 19 nt, Artificial Sequence
  Description of Artificial Sequence: Synthetic oligonucleotide
acacgccugugaaggugag

SEQ ID NO: 2182873 - RNA, 19 nt, Artificial Sequence
  Description of Artificial Sequence: Synthetic oligonucleotide
gcaaugcgggugauguuca

SEQ ID NO: 2182874 - RNA, 19 nt, Artificial Sequence
  Description of Artificial Sequence: Synthetic oligonucleotide
ggaugaccuucugccuccg

SEQ ID NO: 2182875 - RNA, 19 nt, Artificial Sequence
  Description of Artificial Sequence: Synthetic oligonucleotide
cucugagcaccuccgaguu

SEQ ID NO: 2182876 - RNA, 19 nt, Artificial Sequence
  Description of Artificial Sequence: Synthetic oligonucleotide
aggcccuggugcagcuugg

SEQ ID NO: 2182877 - RNA, 19 nt, Artificial Sequence
  Description of Artificial Sequence: Synthetic oligonucleotide
gacaggcggaagaucuccu

SEQ ID NO: 2182878 - RNA, 19 nt, Artificial Sequence
  Description of Artificial Sequence: Synthetic oligonucleotide
caccaccgggaugaccuuc

SEQ ID NO: 2182879 - RNA, 19 nt, Artificial Sequence
  Description of Artificial Sequence: Synthetic oligonucleotide
gcucuucuuggccaauacu

SEQ ID NO: 2182880 - RNA, 19 nt, Artificial Sequence
  Description of Artificial Sequence: Synthetic oligonucleotide
cuucagacccagagcacuu

SEQ ID NO: 2182881 - RNA, 19 nt, Artificial Sequence
  Description of Artificial Sequence: Synthetic oligonucleotide
gagucuugagcagccguuu

SEQ ID NO: 2182882 - RNA, 19 nt, Artificial Sequence
  Description of Artificial Sequence: Synthetic oligonucleotide
ccuuggagugagacccuuc

SEQ ID NO: 2182883 - RNA, 19 nt, Artificial Sequence
  Description of Artificial Sequence: Synthetic oligonucleotide
cgggaugaccuucugccuc

SEQ ID NO: 2182884 - RNA, 19 nt, Artificial Sequence
  Description of Artificial Sequence: Synthetic oligonucleotide
ccugagucugagauagucu

SEQ ID NO: 2182885 - RNA, 19 nt, Artificial Sequence
  Description of Artificial Sequence: Synthetic oligonucleotide
ccggagggcggcgagcccg

SEQ ID NO: 2182886 - RNA, 19 nt, Artificial Sequence
  Description of Artificial Sequence: Synthetic oligonucleotide
ggaugguguccaccacauc

SEQ ID NO: 2182887 - RNA, 19 nt, Artificial Sequence
  Description of Artificial Sequence: Synthetic oligonucleotide
cagcuugggcggcccgaac

SEQ ID NO: 2182888 - RNA, 19 nt, Artificial Sequence
  Description of Artificial Sequence: Synthetic oligonucleotide
ccuccacacgcgugccagg

SEQ ID NO: 2182889 - RNA, 19 nt, Artificial Sequence
  Description of Artificial Sequence: Synthetic oligonucleotide
cacacgcgugccaggugaa

SEQ ID NO: 2182890 - RNA, 19 nt, Artificial Sequence
  Description of Artificial Sequence: Synthetic oligonucleotide
cauucccuggagagacacu

SEQ ID NO: 2182891 - RNA, 19 nt, Artificial Sequence
  Description of Artificial Sequence: Synthetic oligonucleotide
ugggcucuucuuggccaau

SEQ ID NO: 2182892 - RNA, 19 nt, Artificial Sequence
  Description of Artificial Sequence: Synthetic oligonucleotide
agcagccguuuugggcucu

SEQ ID NO: 2182893 - RNA, 19 nt, Artificial Sequence
  Description of Artificial Sequence: Synthetic oligonucleotide
cguggugggucagaucaac

SEQ ID NO: 2182894 - RNA, 19 nt, Artificial Sequence
  Description of Artificial Sequence: Synthetic oligonucleotide
cacacacgccugugaaggu

SEQ ID NO: 2182895 - RNA, 19 nt, Artificial Sequence
  Description of Artificial Sequence: Synthetic oligonucleotide
caccuagcugccauccauu

SEQ ID NO: 2182896 - RNA, 19 nt, Artificial Sequence
  Description of Artificial Sequence: Synthetic oligonucleotide
gccaugcaucgggucuugg

SEQ ID NO: 2182897 - RNA, 19 nt, Artificial Sequence
  Description of Artificial Sequence: Synthetic oligonucleotide
gcaggucacacacgccugu

SEQ ID NO: 2182898 - RNA, 19 nt, Artificial Sequence
  Description of Artificial Sequence: Synthetic oligonucleotide
gggucuggauggauggugu

SEQ ID NO: 2182899 - RNA, 19 nt, Artificial Sequence
  Description of Artificial Sequence: Synthetic oligonucleotide
gguagacuuccagagucuu

SEQ ID NO: 2182900 - RNA, 19 nt, Artificial Sequence
  Description of Artificial Sequence: Synthetic oligonucleotide
cuggguccuccacacgcgu

SEQ ID NO: 2182901 - RNA, 19 nt, Artificial Sequence
  Description of Artificial Sequence: Synthetic oligonucleotide
ggcgagcccgguucuucga

SEQ ID NO: 2182902 - RNA, 19 nt, Artificial Sequence
  Description of Artificial Sequence: Synthetic oligonucleotide
caaugccggagggcggcga

SEQ ID NO: 2182903 - RNA, 19 nt, Artificial Sequence
  Description of Artificial Sequence: Synthetic oligonucleotide
cuccacacgcgugccaggu

SEQ ID NO: 2182904 - RNA, 19 nt, Artificial Sequence
  Description of Artificial Sequence: Synthetic oligonucleotide
ccgaacaggcaaugccgga

SEQ ID NO: 2182905 - RNA, 19 nt, Artificial Sequence
  Description of Artificial Sequence: Synthetic oligonucleotide
caaagucuuugaguccauu

SEQ ID NO: 2182906 - RNA, 19 nt, Artificial Sequence
  Description of Artificial Sequence: Synthetic oligonucleotide
cagccguuuugggcucuuc

SEQ ID NO: 2182907 - RNA, 19 nt, Artificial Sequence
  Description of Artificial Sequence: Synthetic oligonucleotide
gggcggcccgaacaggcaa

SEQ ID NO: 2182908 - RNA, 19 nt, Artificial Sequence
  Description of Artificial Sequence: Synthetic oligonucleotide
gcggcccgaacaggcaaug

SEQ ID NO: 2182909 - RNA, 19 nt, Artificial Sequence
  Description of Artificial Sequence: Synthetic oligonucleotide
cccgguucuucgaauaguu

SEQ ID NO: 2182910 - RNA, 19 nt, Artificial Sequence
  Description of Artificial Sequence: Synthetic oligonucleotide
caggugcaggagggcaaga

SEQ ID NO: 2182911 - RNA, 19 nt, Artificial Sequence
  Description of Artificial Sequence: Synthetic oligonucleotide
cucaggucuguagcuggau

SEQ ID NO: 2182912 - RNA, 19 nt, Artificial Sequence
  Description of Artificial Sequence: Synthetic oligonucleotide
caaggaggccugucccuuu

SEQ ID NO: 2182913 - RNA, 19 nt, Artificial Sequence
  Description of Artificial Sequence: Synthetic oligonucleotide
ggccucgcugaaggagaug

SEQ ID NO: 2182914 - RNA, 19 nt, Artificial Sequence
  Description of Artificial Sequence: Synthetic oligonucleotide
gcgugccaggugaaggaaa

SEQ ID NO: 2182915 - RNA, 19 nt, Artificial Sequence
  Description of Artificial Sequence: Synthetic oligonucleotide
ggucuccaugaagggcaca

SEQ ID NO: 2182916 - RNA, 19 nt, Artificial Sequence
  Description of Artificial Sequence: Synthetic oligonucleotide
ccccaaucucugggucugg

SEQ ID NO: 2182917 - RNA, 19 nt, Artificial Sequence
  Description of Artificial Sequence: Synthetic oligonucleotide
cccaaucucugggucugga

SEQ ID NO: 2182918 - RNA, 19 nt, Artificial Sequence
  Description of Artificial Sequence: Synthetic oligonucleotide
ccaccgggaugaccuucug

SEQ ID NO: 2182919 - RNA, 19 nt, Artificial Sequence
  Description of Artificial Sequence: Synthetic oligonucleotide
cacucgggcuagguagacu

SEQ ID NO: 2182920 - RNA, 19 nt, Artificial Sequence
  Description of Artificial Sequence: Synthetic oligonucleotide
gcggcgagcccgguucuuc

SEQ ID NO: 2182921 - RNA, 19 nt, Artificial Sequence
  Description of Artificial Sequence: Synthetic oligonucleotide
cggagggcggcgagcccgg

SEQ ID NO: 2182922 - RNA, 19 nt, Artificial Sequence
  Description of Artificial Sequence: Synthetic oligonucleotide
gcagcuugggcggcccgaa

SEQ ID NO: 2182923 - RNA, 19 nt, Artificial Sequence
  Description of Artificial Sequence: Synthetic oligonucleotide
gggcucuucuuggccaaua

SEQ ID NO: 2182924 - RNA, 19 nt, Artificial Sequence
  Description of Artificial Sequence: Synthetic oligonucleotide
gagggcggcgagcccgguu

SEQ ID NO: 2182925 - RNA, 19 nt, Artificial Sequence
  Description of Artificial Sequence: Synthetic oligonucleotide
cuucugccuccgguuacau

SEQ ID NO: 2182926 - RNA, 19 nt, Artificial Sequence
  Description of Artificial Sequence: Synthetic oligonucleotide
cgggcuagguagacuucca

SEQ ID NO: 2182927 - RNA, 19 nt, Artificial Sequence
  Description of Artificial Sequence: Synthetic oligonucleotide
gguguccaccacaucccau

SEQ ID NO: 2182928 - RNA, 19 nt, Artificial Sequence
  Description of Artificial Sequence: Synthetic oligonucleotide
ccgggaugaccuucugccu

SEQ ID NO: 2182929 - RNA, 19 nt, Artificial Sequence
  Description of Artificial Sequence: Synthetic oligonucleotide
gcaaagucuuugaguccau

SEQ ID NO: 2182930 - RNA, 19 nt, Artificial Sequence
  Description of Artificial Sequence: Synthetic oligonucleotide
cggcccgaacaggcaaugc

SEQ ID NO: 2182931 - RNA, 19 nt, Artificial Sequence
  Description of Artificial Sequence: Synthetic oligonucleotide
ccguggugggucagaucaa

SEQ ID NO: 2182932 - RNA, 19 nt, Artificial Sequence
  Description of Artificial Sequence: Synthetic oligonucleotide
gccuccgguuacauucccu

SEQ ID NO: 2182933 - RNA, 19 nt, Artificial Sequence
  Description of Artificial Sequence: Synthetic oligonucleotide
cugugaaggugagguccuu

SEQ ID NO: 2182934 - RNA, 19 nt, Artificial Sequence
  Description of Artificial Sequence: Synthetic oligonucleotide
ccaagucuuugaggacgaa

SEQ ID NO: 2182935 - RNA, 19 nt, Artificial Sequence
  Description of Artificial Sequence: Synthetic oligonucleotide
gggccucgcugaaggagau

SEQ ID NO: 2182936 - RNA, 19 nt, Artificial Sequence
  Description of Artificial Sequence: Synthetic oligonucleotide
ggauggcaaugcgggugau

SEQ ID NO: 2182937 - RNA, 19 nt, Artificial Sequence
  Description of Artificial Sequence: Synthetic oligonucleotide
cgcgugccaggugaaggaa

SEQ ID NO: 2182938 - RNA, 19 nt, Artificial Sequence
  Description of Artificial Sequence: Synthetic oligonucleotide
cgagcccgguucuucgaau

SEQ ID NO: 2182939 - RNA, 19 nt, Artificial Sequence
  Description of Artificial Sequence: Synthetic oligonucleotide
ggccaucagcaaagucuuu

SEQ ID NO: 2182940 - RNA, 19 nt, Artificial Sequence
  Description of Artificial Sequence: Synthetic oligonucleotide
gcagccguuuugggcucuu

SEQ ID NO: 2182941 - RNA, 19 nt, Artificial Sequence
  Description of Artificial Sequence: Synthetic oligonucleotide
ggagggcggcgagcccggu

SEQ ID NO: 2182942 - RNA, 19 nt, Artificial Sequence
  Description of Artificial Sequence: Synthetic oligonucleotide
aacuauuucauccagaucu

SEQ ID NO: 2182943 - RNA, 19 nt, Artificial Sequence
  Description of Artificial Sequence: Synthetic oligonucleotide
ugaacuaaugcacaaaucu

SEQ ID NO: 2182944 - RNA, 19 nt, Artificial Sequence
  Description of Artificial Sequence: Synthetic oligonucleotide
auggagaacuauuucaucc

SEQ ID NO: 2182945 - RNA, 19 nt, Artificial Sequence
  Description of Artificial Sequence: Synthetic oligonucleotide
gggaauauaagguugaugg

SEQ ID NO: 2182946 - RNA, 19 nt, Artificial Sequence
  Description of Artificial Sequence: Synthetic oligonucleotide
ucaauuuugacuagaacca

SEQ ID NO: 2182947 - RNA, 19 nt, Artificial Sequence
  Description of Artificial Sequence: Synthetic oligonucleotide
uucacaauaagcaggagca

SEQ ID NO: 2182948 - RNA, 19 nt, Artificial Sequence
  Description of Artificial Sequence: Synthetic oligonucleotide
aacgagauaaucuugucca

SEQ ID NO: 2182949 - RNA, 19 nt, Artificial Sequence
  Description of Artificial Sequence: Synthetic oligonucleotide
uugacuagaaccaaauagc

SEQ ID NO: 2182950 - RNA, 19 nt, Artificial Sequence
  Description of Artificial Sequence: Synthetic oligonucleotide
aacugaaaaucuucauugc

SEQ ID NO: 2182951 - RNA, 19 nt, Artificial Sequence
  Description of Artificial Sequence: Synthetic oligonucleotide
agagguuguauuuggaggc

SEQ ID NO: 2182952 - RNA, 19 nt, Artificial Sequence
  Description of Artificial Sequence: Synthetic oligonucleotide
aaaguagugaaggacuggc

SEQ ID NO: 2182953 - RNA, 19 nt, Artificial Sequence
  Description of Artificial Sequence: Synthetic oligonucleotide
aaucaaaacacuucauugu

SEQ ID NO: 2182954 - RNA, 19 nt, Artificial Sequence
  Description of Artificial Sequence: Synthetic oligonucleotide
aaccagguaaacaucagcc

SEQ ID NO: 2182955 - RNA, 19 nt, Artificial Sequence
  Description of Artificial Sequence: Synthetic oligonucleotide
ucauaagaauauuugaaca

SEQ ID NO: 2182956 - RNA, 19 nt, Artificial Sequence
  Description of Artificial Sequence: Synthetic oligonucleotide
ugaagaaacuucuucacug

SEQ ID NO: 2182957 - RNA, 19 nt, Artificial Sequence
  Description of Artificial Sequence: Synthetic oligonucleotide
uaaacaucagcccugcuca

SEQ ID NO: 2182958 - RNA, 19 nt, Artificial Sequence
  Description of Artificial Sequence: Synthetic oligonucleotide
uuucauaagaauauuugaa

SEQ ID NO: 2182959 - RNA, 19 nt, Artificial Sequence
  Description of Artificial Sequence: Synthetic oligonucleotide
aagaauauuugaacagucc

SEQ ID NO: 2182960 - RNA, 19 nt, Artificial Sequence
  Description of Artificial Sequence: Synthetic oligonucleotide
gagauaaucuuguccaugg

SEQ ID NO: 2182961 - RNA, 19 nt, Artificial Sequence
  Description of Artificial Sequence: Synthetic oligonucleotide
agaagguugcucuuguggc

SEQ ID NO: 2182962 - RNA, 19 nt, Artificial Sequence
  Description of Artificial Sequence: Synthetic oligonucleotide
aauacaaggaaacauccua

SEQ ID NO: 2182963 - RNA, 19 nt, Artificial Sequence
  Description of Artificial Sequence: Synthetic oligonucleotide
uucuacacauuucucaucc

SEQ ID NO: 2182964 - RNA, 19 nt, Artificial Sequence
  Description of Artificial Sequence: Synthetic oligonucleotide
acuacuugaacuaaugcac

SEQ ID NO: 2182965 - RNA, 19 nt, Artificial Sequence
  Description of Artificial Sequence: Synthetic oligonucleotide
gaauauaagguugauggag

SEQ ID NO: 2182966 - RNA, 19 nt, Artificial Sequence
  Description of Artificial Sequence: Synthetic oligonucleotide
uucauaagaauauuugaac

SEQ ID NO: 2182967 - RNA, 19 nt, Artificial Sequence
  Description of Artificial Sequence: Synthetic oligonucleotide
auaaucuuguccauggccc

SEQ ID NO: 2182968 - RNA, 19 nt, Artificial Sequence
  Description of Artificial Sequence: Synthetic oligonucleotide
uagaagguugcucuugugg

SEQ ID NO: 2182969 - RNA, 19 nt, Artificial Sequence
  Description of Artificial Sequence: Synthetic oligonucleotide
uagagguuguauuuggagg

SEQ ID NO: 2182970 - RNA, 19 nt, Artificial Sequence
  Description of Artificial Sequence: Synthetic oligonucleotide
uguugcaaagcuuuagaag

SEQ ID NO: 2182971 - RNA, 19 nt, Artificial Sequence
  Description of Artificial Sequence: Synthetic oligonucleotide
aauagcauccuagcaauuc

SEQ ID NO: 2182972 - RNA, 19 nt, Artificial Sequence
  Description of Artificial Sequence: Synthetic oligonucleotide
aaacguguuagcuucacaa

SEQ ID NO: 2182973 - RNA, 19 nt, Artificial Sequence
  Description of Artificial Sequence: Synthetic oligonucleotide
caaaacacuucauuguugc

SEQ ID NO: 2182974 - RNA, 19 nt, Artificial Sequence
  Description of Artificial Sequence: Synthetic oligonucleotide
aaugcacaaaucuuggaaa

SEQ ID NO: 2182975 - RNA, 19 nt, Artificial Sequence
  Description of Artificial Sequence: Synthetic oligonucleotide
agcaauucugcauagguca

SEQ ID NO: 2182976 - RNA, 19 nt, Artificial Sequence
  Description of Artificial Sequence: Synthetic oligonucleotide
uucagcagagggaaguugg

SEQ ID NO: 2182977 - RNA, 19 nt, Artificial Sequence
  Description of Artificial Sequence: Synthetic oligonucleotide
ugauucuacacauuucuca

SEQ ID NO: 2182978 - RNA, 19 nt, Artificial Sequence
  Description of Artificial Sequence: Synthetic oligonucleotide
uuaacaccuucucauaggc

SEQ ID NO: 2182979 - RNA, 19 nt, Artificial Sequence
  Description of Artificial Sequence: Synthetic oligonucleotide
aauauuugaacaguccaga

SEQ ID NO: 2182980 - RNA, 19 nt, Artificial Sequence
  Description of Artificial Sequence: Synthetic oligonucleotide
uaugacagcuauuucauaa

SEQ ID NO: 2182981 - RNA, 19 nt, Artificial Sequence
  Description of Artificial Sequence: Synthetic oligonucleotide
agggaaguuggccaaaacg

SEQ ID NO: 2182982 - RNA, 19 nt, Artificial Sequence
  Description of Artificial Sequence: Synthetic oligonucleotide
uuaaucaaaacacuucauu

SEQ ID NO: 2182983 - RNA, 19 nt, Artificial Sequence
  Description of Artificial Sequence: Synthetic oligonucleotide
ucugcauaggucaugacua

SEQ ID NO: 2182984 - RNA, 19 nt, Artificial Sequence
  Description of Artificial Sequence: Synthetic oligonucleotide
auaagguugauggagaacu

SEQ ID NO: 2182985 - RNA, 19 nt, Artificial Sequence
  Description of Artificial Sequence: Synthetic oligonucleotide
aaugagggcucucuccuuc

SEQ ID NO: 2182986 - RNA, 19 nt, Artificial Sequence
  Description of Artificial Sequence: Synthetic oligonucleotide
aaccuugccaagucauccc

SEQ ID NO: 2182987 - RNA, 19 nt, Artificial Sequence
  Description of Artificial Sequence: Synthetic oligonucleotide
ugacuagaaccaaauagca

SEQ ID NO: 2182988 - RNA, 19 nt, Artificial Sequence
  Description of Artificial Sequence: Synthetic oligonucleotide
uaagaauauuugaacaguc

SEQ ID NO: 2182989 - RNA, 19 nt, Artificial Sequence
  Description of Artificial Sequence: Synthetic oligonucleotide
gacuacuugaacuaaugca

SEQ ID NO: 2182990 - RNA, 19 nt, Artificial Sequence
  Description of Artificial Sequence: Synthetic oligonucleotide
accagguaaacaucagccc

SEQ ID NO: 2182991 - RNA, 19 nt, Artificial Sequence
  Description of Artificial Sequence: Synthetic oligonucleotide
uauuugaacaguccagagu

SEQ ID NO: 2182992 - RNA, 19 nt, Artificial Sequence
  Description of Artificial Sequence: Synthetic oligonucleotide
uguuagcuucacaauaagc

SEQ ID NO: 2182993 - RNA, 19 nt, Artificial Sequence
  Description of Artificial Sequence: Synthetic oligonucleotide
cuagaaccaaauagcaucc

SEQ ID NO: 2182994 - RNA, 19 nt, Artificial Sequence
  Description of Artificial Sequence: Synthetic oligonucleotide
ucauuucuuaaccuugcca

SEQ ID NO: 2182995 - RNA, 19 nt, Artificial Sequence
  Description of Artificial Sequence: Synthetic oligonucleotide
aauauaagguugauggaga

SEQ ID NO: 2182996 - RNA, 19 nt, Artificial Sequence
  Description of Artificial Sequence: Synthetic oligonucleotide
acaucagcccugcucagcc

SEQ ID NO: 2182997 - RNA, 19 nt, Artificial Sequence
  Description of Artificial Sequence: Synthetic oligonucleotide
uauuuggaggcaauguagu

SEQ ID NO: 2182998 - RNA, 19 nt, Artificial Sequence
  Description of Artificial Sequence: Synthetic oligonucleotide
aaggauaugacagcuauuu

SEQ ID NO: 2182999 - RNA, 19 nt, Artificial Sequence
  Description of Artificial Sequence: Synthetic oligonucleotide
ugacuacuugaacuaaugc

SEQ ID NO: 2183000 - RNA, 19 nt, Artificial Sequence
  Description of Artificial Sequence: Synthetic oligonucleotide
aacauuuaaucaaaacacu

SEQ ID NO: 2183001 - RNA, 19 nt, Artificial Sequence
  Description of Artificial Sequence: Synthetic oligonucleotide
caaagcuuuagaagguugc

SEQ ID NO: 2183002 - RNA, 19 nt, Artificial Sequence
  Description of Artificial Sequence: Synthetic oligonucleotide
agcuuuagaagguugcucu

SEQ ID NO: 2183003 - RNA, 19 nt, Artificial Sequence
  Description of Artificial Sequence: Synthetic oligonucleotide
uggaacaucaaacucccau

SEQ ID NO: 2183004 - RNA, 19 nt, Artificial Sequence
  Description of Artificial Sequence: Synthetic oligonucleotide
acuugcuggaacaucaaac

SEQ ID NO: 2183005 - RNA, 19 nt, Artificial Sequence
  Description of Artificial Sequence: Synthetic oligonucleotide
aaucgcuugguuucucuug

SEQ ID NO: 2183006 - RNA, 19 nt, Artificial Sequence
  Description of Artificial Sequence: Synthetic oligonucleotide
uuucaauuuugacuagaac

SEQ ID NO: 2183007 - RNA, 19 nt, Artificial Sequence
  Description of Artificial Sequence: Synthetic oligonucleotide
aauguaguugagaauggcu

SEQ ID NO: 2183008 - RNA, 19 nt, Artificial Sequence
  Description of Artificial Sequence: Synthetic oligonucleotide
uuggccaaaacgcuggggu

SEQ ID NO: 2183009 - RNA, 19 nt, Artificial Sequence
  Description of Artificial Sequence: Synthetic oligonucleotide
ugguagagaaguucaacca

SEQ ID NO: 2183010 - RNA, 19 nt, Artificial Sequence
  Description of Artificial Sequence: Synthetic oligonucleotide
uucauugcugauucuacac

SEQ ID NO: 2183011 - RNA, 19 nt, Artificial Sequence
  Description of Artificial Sequence: Synthetic oligonucleotide
agauaaucuuguccauggc

SEQ ID NO: 2183012 - RNA, 19 nt, Artificial Sequence
  Description of Artificial Sequence: Synthetic oligonucleotide
agucuaggaagcuuguucu

SEQ ID NO: 2183013 - RNA, 19 nt, Artificial Sequence
  Description of Artificial Sequence: Synthetic oligonucleotide
auaagaauauuugaacagu

SEQ ID NO: 2183014 - RNA, 19 nt, Artificial Sequence
  Description of Artificial Sequence: Synthetic oligonucleotide
uguucaucaauaugugccu

SEQ ID NO: 2183015 - RNA, 19 nt, Artificial Sequence
  Description of Artificial Sequence: Synthetic oligonucleotide
auuguugcaaagcuuuaga

SEQ ID NO: 2183016 - RNA, 19 nt, Artificial Sequence
  Description of Artificial Sequence: Synthetic oligonucleotide
aauaugugccugaucuaac

SEQ ID NO: 2183017 - RNA, 19 nt, Artificial Sequence
  Description of Artificial Sequence: Synthetic oligonucleotide
aaggacuggcuuucccgcc

SEQ ID NO: 2183018 - RNA, 19 nt, Artificial Sequence
  Description of Artificial Sequence: Synthetic oligonucleotide
agaucugcuauaccuuccg

SEQ ID NO: 2183019 - RNA, 19 nt, Artificial Sequence
  Description of Artificial Sequence: Synthetic oligonucleotide
ucuucauugcugauucuac

SEQ ID NO: 2183020 - RNA, 19 nt, Artificial Sequence
  Description of Artificial Sequence: Synthetic oligonucleotide
aacgguuccuugcuuuguc

SEQ ID NO: 2183021 - RNA, 19 nt, Artificial Sequence
  Description of Artificial Sequence: Synthetic oligonucleotide
uccgcauacaugucaauga

SEQ ID NO: 2183022 - RNA, 19 nt, Artificial Sequence
  Description of Artificial Sequence: Synthetic oligonucleotide
caacgagauaaucuugucc

SEQ ID NO: 2183023 - RNA, 19 nt, Artificial Sequence
  Description of Artificial Sequence: Synthetic oligonucleotide
ucauugcugauucuacaca

SEQ ID NO: 2183024 - RNA, 19 nt, Artificial Sequence
  Description of Artificial Sequence: Synthetic oligonucleotide
ugcuauaccuuccgcauac

SEQ ID NO: 2183025 - RNA, 19 nt, Artificial Sequence
  Description of Artificial Sequence: Synthetic oligonucleotide
uaugugccugaucuaacug

SEQ ID NO: 2183026 - RNA, 19 nt, Artificial Sequence
  Description of Artificial Sequence: Synthetic oligonucleotide
gaggcaauguaguugagaa

SEQ ID NO: 2183027 - RNA, 19 nt, Artificial Sequence
  Description of Artificial Sequence: Synthetic oligonucleotide
ugacagcuauuucauaaga

SEQ ID NO: 2183028 - RNA, 19 nt, Artificial Sequence
  Description of Artificial Sequence: Synthetic oligonucleotide
aagcuuuagaagguugcuc

SEQ ID NO: 2183029 - RNA, 19 nt, Artificial Sequence
  Description of Artificial Sequence: Synthetic oligonucleotide
aggcugaagaaacuucuuc

SEQ ID NO: 2183030 - RNA, 19 nt, Artificial Sequence
  Description of Artificial Sequence: Synthetic oligonucleotide
aaguuggccaaaacgcugg

SEQ ID NO: 2183031 - RNA, 19 nt, Artificial Sequence
  Description of Artificial Sequence: Synthetic oligonucleotide
ggcaauguaguugagaaug

SEQ ID NO: 2183032 - RNA, 19 nt, Artificial Sequence
  Description of Artificial Sequence: Synthetic oligonucleotide
uccuaggaagugaucauga

SEQ ID NO: 2183033 - RNA, 19 nt, Artificial Sequence
  Description of Artificial Sequence: Synthetic oligonucleotide
ugaucuaacugaaaaucuu

SEQ ID NO: 2183034 - RNA, 19 nt, Artificial Sequence
  Description of Artificial Sequence: Synthetic oligonucleotide
auaggcagggaaguaacgg

SEQ ID NO: 2183035 - RNA, 19 nt, Artificial Sequence
  Description of Artificial Sequence: Synthetic oligonucleotide
guaaacaucagcccugcuc

SEQ ID NO: 2183036 - RNA, 19 nt, Artificial Sequence
  Description of Artificial Sequence: Synthetic oligonucleotide
cuucaucccgucaaucucc

SEQ ID NO: 2183037 - RNA, 19 nt, Artificial Sequence
  Description of Artificial Sequence: Synthetic oligonucleotide
uggagaacuauuucaucca

SEQ ID NO: 2183038 - RNA, 19 nt, Artificial Sequence
  Description of Artificial Sequence: Synthetic oligonucleotide
ucugccccggccaucaaag

SEQ ID NO: 2183039 - RNA, 19 nt, Artificial Sequence
  Description of Artificial Sequence: Synthetic oligonucleotide
ucuuggaaaacguguuagc

SEQ ID NO: 2183040 - RNA, 19 nt, Artificial Sequence
  Description of Artificial Sequence: Synthetic oligonucleotide
auaagcaggagcaacauuu

SEQ ID NO: 2183041 - RNA, 19 nt, Artificial Sequence
  Description of Artificial Sequence: Synthetic oligonucleotide
auccucauaaggcuuccuc

SEQ ID NO: 2183042 - RNA, 19 nt, Artificial Sequence
  Description of Artificial Sequence: Synthetic oligonucleotide
gagucuaggaagcuuguuc

SEQ ID NO: 2183043 - RNA, 19 nt, Artificial Sequence
  Description of Artificial Sequence: Synthetic oligonucleotide
uuggggaauauaagguuga

SEQ ID NO: 2183044 - RNA, 19 nt, Artificial Sequence
  Description of Artificial Sequence: Synthetic oligonucleotide
uaaccuugccaagucaucc

SEQ ID NO: 2183045 - RNA, 19 nt, Artificial Sequence
  Description of Artificial Sequence: Synthetic oligonucleotide
ucuuaaccuugccaaguca

SEQ ID NO: 2183046 - RNA, 19 nt, Artificial Sequence
  Description of Artificial Sequence: Synthetic oligonucleotide
auagcauccuagcaauucu

SEQ ID NO: 2183047 - RNA, 19 nt, Artificial Sequence
  Description of Artificial Sequence: Synthetic oligonucleotide
acauccuaggaagugauca

SEQ ID NO: 2183048 - RNA, 19 nt, Artificial Sequence
  Description of Artificial Sequence: Synthetic oligonucleotide
ucuaacugaaaaucuucau

SEQ ID NO: 2183049 - RNA, 19 nt, Artificial Sequence
  Description of Artificial Sequence: Synthetic oligonucleotide
gaacaguccagagucuagg

SEQ ID NO: 2183050 - RNA, 19 nt, Artificial Sequence
  Description of Artificial Sequence: Synthetic oligonucleotide
caucccgucaaucuccacc

SEQ ID NO: 2183051 - RNA, 19 nt, Artificial Sequence
  Description of Artificial Sequence: Synthetic oligonucleotide
uuguugcaaagcuuuagaa

SEQ ID NO: 2183052 - RNA, 19 nt, Artificial Sequence
  Description of Artificial Sequence: Synthetic oligonucleotide
aaagcuuuagaagguugcu

SEQ ID NO: 2183053 - RNA, 19 nt, Artificial Sequence
  Description of Artificial Sequence: Synthetic oligonucleotide
auacaaggaaacauccuag

SEQ ID NO: 2183054 - RNA, 19 nt, Artificial Sequence
  Description of Artificial Sequence: Synthetic oligonucleotide
uccucauaaggcuuccucu

SEQ ID NO: 2183055 - RNA, 19 nt, Artificial Sequence
  Description of Artificial Sequence: Synthetic oligonucleotide
auaugugccugaucuaacu

SEQ ID NO: 2183056 - RNA, 19 nt, Artificial Sequence
  Description of Artificial Sequence: Synthetic oligonucleotide
uagagaaguucaaccaggu

SEQ ID NO: 2183057 - RNA, 19 nt, Artificial Sequence
  Description of Artificial Sequence: Synthetic oligonucleotide
ugaucaugauuucaauuuu

SEQ ID NO: 2183058 - RNA, 19 nt, Artificial Sequence
  Description of Artificial Sequence: Synthetic oligonucleotide
aacguguuagcuucacaau

SEQ ID NO: 2183059 - RNA, 19 nt, Artificial Sequence
  Description of Artificial Sequence: Synthetic oligonucleotide
caucaaaguagugaaggac

SEQ ID NO: 2183060 - RNA, 19 nt, Artificial Sequence
  Description of Artificial Sequence: Synthetic oligonucleotide
auaggucaugacuacuuga

SEQ ID NO: 2183061 - RNA, 19 nt, Artificial Sequence
  Description of Artificial Sequence: Synthetic oligonucleotide
uuucuuaaccuugccaagu

SEQ ID NO: 2183062 - RNA, 19 nt, Artificial Sequence
  Description of Artificial Sequence: Synthetic oligonucleotide
ugccaagucaucccgaguu

SEQ ID NO: 2183063 - RNA, 19 nt, Artificial Sequence
  Description of Artificial Sequence: Synthetic oligonucleotide
uugcugauucuacacauuu

SEQ ID NO: 2183064 - RNA, 19 nt, Artificial Sequence
  Description of Artificial Sequence: Synthetic oligonucleotide
acgguuccuugcuuugucc

SEQ ID NO: 2183065 - RNA, 19 nt, Artificial Sequence
  Description of Artificial Sequence: Synthetic oligonucleotide
ugauuucaauuuugacuag

SEQ ID NO: 2183066 - RNA, 19 nt, Artificial Sequence
  Description of Artificial Sequence: Synthetic oligonucleotide
aggauaugacagcuauuuc

SEQ ID NO: 2183067 - RNA, 19 nt, Artificial Sequence
  Description of Artificial Sequence: Synthetic oligonucleotide
agcucuuccacaugguaga

SEQ ID NO: 2183068 - RNA, 19 nt, Artificial Sequence
  Description of Artificial Sequence: Synthetic oligonucleotide
acucuacucccgcugcagc

SEQ ID NO: 2183069 - RNA, 19 nt, Artificial Sequence
  Description of Artificial Sequence: Synthetic oligonucleotide
ucuuggggaauauaagguu

SEQ ID NO: 2183070 - RNA, 19 nt, Artificial Sequence
  Description of Artificial Sequence: Synthetic oligonucleotide
guugauggagaacuauuuc

SEQ ID NO: 2183071 - RNA, 19 nt, Artificial Sequence
  Description of Artificial Sequence: Synthetic oligonucleotide
cucauaaggcuuccucugg

SEQ ID NO: 2183072 - RNA, 19 nt, Artificial Sequence
  Description of Artificial Sequence: Synthetic oligonucleotide
aauaagcaggagcaacauu

SEQ ID NO: 2183073 - RNA, 19 nt, Artificial Sequence
  Description of Artificial Sequence: Synthetic oligonucleotide
agcuauuucauaagaauau

SEQ ID NO: 2183074 - RNA, 19 nt, Artificial Sequence
  Description of Artificial Sequence: Synthetic oligonucleotide
uucuuaaccuugccaaguc

SEQ ID NO: 2183075 - RNA, 19 nt, Artificial Sequence
  Description of Artificial Sequence: Synthetic oligonucleotide
uagcaauucugcauagguc

SEQ ID NO: 2183076 - RNA, 19 nt, Artificial Sequence
  Description of Artificial Sequence: Synthetic oligonucleotide
aauuuugacuagaaccaaa

SEQ ID NO: 2183077 - RNA, 19 nt, Artificial Sequence
  Description of Artificial Sequence: Synthetic oligonucleotide
uuggaaaacguguuagcuu

SEQ ID NO: 2183078 - RNA, 19 nt, Artificial Sequence
  Description of Artificial Sequence: Synthetic oligonucleotide
agcuucaucccgucaaucu

SEQ ID NO: 2183079 - RNA, 19 nt, Artificial Sequence
  Description of Artificial Sequence: Synthetic oligonucleotide
uacaugucaaugagggcuc

SEQ ID NO: 2183080 - RNA, 19 nt, Artificial Sequence
  Description of Artificial Sequence: Synthetic oligonucleotide
gggaaguuggccaaaacgc

SEQ ID NO: 2183081 - RNA, 19 nt, Artificial Sequence
  Description of Artificial Sequence: Synthetic oligonucleotide
cagcucuuccacaugguag

SEQ ID NO: 2183082 - RNA, 19 nt, Artificial Sequence
  Description of Artificial Sequence: Synthetic oligonucleotide
acaucaaacucccaucauu

SEQ ID NO: 2183083 - RNA, 19 nt, Artificial Sequence
  Description of Artificial Sequence: Synthetic oligonucleotide
uagcauccuagcaauucug

SEQ ID NO: 2183084 - RNA, 19 nt, Artificial Sequence
  Description of Artificial Sequence: Synthetic oligonucleotide
cauaggcagggaaguaacg

SEQ ID NO: 2183085 - RNA, 19 nt, Artificial Sequence
  Description of Artificial Sequence: Synthetic oligonucleotide
caaaucuuggaaaacgugu

SEQ ID NO: 2183086 - RNA, 19 nt, Artificial Sequence
  Description of Artificial Sequence: Synthetic oligonucleotide
aaacgcugggguccagcuc

SEQ ID NO: 2183087 - RNA, 19 nt, Artificial Sequence
  Description of Artificial Sequence: Synthetic oligonucleotide
agggcucucuccuucaugu

SEQ ID NO: 2183088 - RNA, 19 nt, Artificial Sequence
  Description of Artificial Sequence: Synthetic oligonucleotide
ccucuuggggaauauaagg

SEQ ID NO: 2183089 - RNA, 19 nt, Artificial Sequence
  Description of Artificial Sequence: Synthetic oligonucleotide
gcacaaaucuuggaaaacg

SEQ ID NO: 2183090 - RNA, 19 nt, Artificial Sequence
  Description of Artificial Sequence: Synthetic oligonucleotide
cauacaugucaaugagggc

SEQ ID NO: 2183091 - RNA, 19 nt, Artificial Sequence
  Description of Artificial Sequence: Synthetic oligonucleotide
uuaaccuugccaagucauc

SEQ ID NO: 2183092 - RNA, 19 nt, Artificial Sequence
  Description of Artificial Sequence: Synthetic oligonucleotide
uccaccaugggcacuugcu

SEQ ID NO: 2183093 - RNA, 19 nt, Artificial Sequence
  Description of Artificial Sequence: Synthetic oligonucleotide
uuccgcauacaugucaaug

SEQ ID NO: 2183094 - RNA, 19 nt, Artificial Sequence
  Description of Artificial Sequence: Synthetic oligonucleotide
cauuucucauccucauaag

SEQ ID NO: 2183095 - RNA, 19 nt, Artificial Sequence
  Description of Artificial Sequence: Synthetic oligonucleotide
acaauaagcaggagcaaca

SEQ ID NO: 2183096 - RNA, 19 nt, Artificial Sequence
  Description of Artificial Sequence: Synthetic oligonucleotide
cuugccaagucaucccgag

SEQ ID NO: 2183097 - RNA, 19 nt, Artificial Sequence
  Description of Artificial Sequence: Synthetic oligonucleotide
cacaauaagcaggagcaac

SEQ ID NO: 2183098 - RNA, 19 nt, Artificial Sequence
  Description of Artificial Sequence: Synthetic oligonucleotide
gauuucaauuuugacuaga

SEQ ID NO: 2183099 - RNA, 19 nt, Artificial Sequence
  Description of Artificial Sequence: Synthetic oligonucleotide
augcacaaaucuuggaaaa

SEQ ID NO: 2183100 - RNA, 19 nt, Artificial Sequence
  Description of Artificial Sequence: Synthetic oligonucleotide
ucaucccgaguuuucagaa

SEQ ID NO: 2183101 - RNA, 19 nt, Artificial Sequence
  Description of Artificial Sequence: Synthetic oligonucleotide
aggaagugaucaugauuuc

SEQ ID NO: 2183102 - RNA, 19 nt, Artificial Sequence
  Description of Artificial Sequence: Synthetic oligonucleotide
gauucuacacauuucucau

SEQ ID NO: 2183103 - RNA, 19 nt, Artificial Sequence
  Description of Artificial Sequence: Synthetic oligonucleotide
cauaggucaugacuacuug

SEQ ID NO: 2183104 - RNA, 19 nt, Artificial Sequence
  Description of Artificial Sequence: Synthetic oligonucleotide
aucccgucaaucuccacca

SEQ ID NO: 2183105 - RNA, 19 nt, Artificial Sequence
  Description of Artificial Sequence: Synthetic oligonucleotide
ugccaacgagauaaucuug

SEQ ID NO: 2183106 - RNA, 19 nt, Artificial Sequence
  Description of Artificial Sequence: Synthetic oligonucleotide
cauuguugcaaagcuuuag

SEQ ID NO: 2183107 - RNA, 19 nt, Artificial Sequence
  Description of Artificial Sequence: Synthetic oligonucleotide
uauaagguugauggagaac

SEQ ID NO: 2183108 - RNA, 19 nt, Artificial Sequence
  Description of Artificial Sequence: Synthetic oligonucleotide
aucaugauuucaauuuuga

SEQ ID NO: 2183109 - RNA, 19 nt, Artificial Sequence
  Description of Artificial Sequence: Synthetic oligonucleotide
ucauccagaucugcuauac

SEQ ID NO: 2183110 - RNA, 19 nt, Artificial Sequence
  Description of Artificial Sequence: Synthetic oligonucleotide
aguaacgguuccuugcuuu

SEQ ID NO: 2183111 - RNA, 19 nt, Artificial Sequence
  Description of Artificial Sequence: Synthetic oligonucleotide
uaaucuuguccauggcccu

SEQ ID NO: 2183112 - RNA, 19 nt, Artificial Sequence
  Description of Artificial Sequence: Synthetic oligonucleotide
auuuugacuagaaccaaau

SEQ ID NO: 2183113 - RNA, 19 nt, Artificial Sequence
  Description of Artificial Sequence: Synthetic oligonucleotide
aucccgaguuuucagaaau

SEQ ID NO: 2183114 - RNA, 19 nt, Artificial Sequence
  Description of Artificial Sequence: Synthetic oligonucleotide
guguuagcuucacaauaag

SEQ ID NO: 2183115 - RNA, 19 nt, Artificial Sequence
  Description of Artificial Sequence: Synthetic oligonucleotide
agucaucccgaguuuucag

SEQ ID NO: 2183116 - RNA, 19 nt, Artificial Sequence
  Description of Artificial Sequence: Synthetic oligonucleotide
aacucuacucccgcugcag

SEQ ID NO: 2183117 - RNA, 19 nt, Artificial Sequence
  Description of Artificial Sequence: Synthetic oligonucleotide
acguguuagcuucacaaua

SEQ ID NO: 2183118 - RNA, 19 nt, Artificial Sequence
  Description of Artificial Sequence: Synthetic oligonucleotide
cuuguucuauuuuauugaa

SEQ ID NO: 2183119 - RNA, 19 nt, Artificial Sequence
  Description of Artificial Sequence: Synthetic oligonucleotide
guccauggcccuuuaacac

SEQ ID NO: 2183120 - RNA, 19 nt, Artificial Sequence
  Description of Artificial Sequence: Synthetic oligonucleotide
uccuagcaauucugcauag

SEQ ID NO: 2183121 - RNA, 19 nt, Artificial Sequence
  Description of Artificial Sequence: Synthetic oligonucleotide
augacuacuugaacuaaug

SEQ ID NO: 2183122 - RNA, 19 nt, Artificial Sequence
  Description of Artificial Sequence: Synthetic oligonucleotide
gucaugacuacuugaacua

SEQ ID NO: 2183123 - RNA, 19 nt, Artificial Sequence
  Description of Artificial Sequence: Synthetic oligonucleotide
uucccauagagguuguauu

SEQ ID NO: 2183124 - RNA, 19 nt, Artificial Sequence
  Description of Artificial Sequence: Synthetic oligonucleotide
ugcugauucuacacauuuc

SEQ ID NO: 2183125 - RNA, 19 nt, Artificial Sequence
  Description of Artificial Sequence: Synthetic oligonucleotide
aaacauccuaggaagugau

SEQ ID NO: 2183126 - RNA, 19 nt, Artificial Sequence
  Description of Artificial Sequence: Synthetic oligonucleotide
uucaaacucuacucccgcu

SEQ ID NO: 2183127 - RNA, 19 nt, Artificial Sequence
  Description of Artificial Sequence: Synthetic oligonucleotide
auccuagcaauucugcaua

SEQ ID NO: 2183128 - RNA, 19 nt, Artificial Sequence
  Description of Artificial Sequence: Synthetic oligonucleotide
guaacgguuccuugcuuug

SEQ ID NO: 2183129 - RNA, 19 nt, Artificial Sequence
  Description of Artificial Sequence: Synthetic oligonucleotide
gaacuauuucauccagauc

SEQ ID NO: 2183130 - RNA, 19 nt, Artificial Sequence
  Description of Artificial Sequence: Synthetic oligonucleotide
cucuacucccgcugcagcc

SEQ ID NO: 2183131 - RNA, 19 nt, Artificial Sequence
  Description of Artificial Sequence: Synthetic oligonucleotide
ucuaggaagcuuguucuau

SEQ ID NO: 2183132 - RNA, 19 nt, Artificial Sequence
  Description of Artificial Sequence: Synthetic oligonucleotide
cuugcuggaacaucaaacu

SEQ ID NO: 2183133 - RNA, 19 nt, Artificial Sequence
  Description of Artificial Sequence: Synthetic oligonucleotide
aacauccuaggaagugauc

SEQ ID NO: 2183134 - RNA, 19 nt, Artificial Sequence
  Description of Artificial Sequence: Synthetic oligonucleotide
cugauucuacacauuucuc

SEQ ID NO: 2183135 - RNA, 19 nt, Artificial Sequence
  Description of Artificial Sequence: Synthetic oligonucleotide
ggcugaagaaacuucuuca

SEQ ID NO: 2183136 - RNA, 19 nt, Artificial Sequence
  Description of Artificial Sequence: Synthetic oligonucleotide
ggaacaucaaacucccauc

SEQ ID NO: 2183137 - RNA, 19 nt, Artificial Sequence
  Description of Artificial Sequence: Synthetic oligonucleotide
uggcccuuuaacaccuucu

SEQ ID NO: 2183138 - RNA, 19 nt, Artificial Sequence
  Description of Artificial Sequence: Synthetic oligonucleotide
cagcuauuucauaagaaua

SEQ ID NO: 2183139 - RNA, 19 nt, Artificial Sequence
  Description of Artificial Sequence: Synthetic oligonucleotide
uucaucccgucaaucucca

SEQ ID NO: 2183140 - RNA, 19 nt, Artificial Sequence
  Description of Artificial Sequence: Synthetic oligonucleotide
auucugcauaggucaugac

SEQ ID NO: 2183141 - RNA, 19 nt, Artificial Sequence
  Description of Artificial Sequence: Synthetic oligonucleotide
accuuccgcauacauguca

SEQ ID NO: 2183142 - RNA, 19 nt, Artificial Sequence
  Description of Artificial Sequence: Synthetic oligonucleotide
agcuucacaauaagcagga

SEQ ID NO: 2183143 - RNA, 19 nt, Artificial Sequence
  Description of Artificial Sequence: Synthetic oligonucleotide
cuucauugcugauucuaca

SEQ ID NO: 2183144 - RNA, 19 nt, Artificial Sequence
  Description of Artificial Sequence: Synthetic oligonucleotide
acacauuucucauccucau

SEQ ID NO: 2183145 - RNA, 19 nt, Artificial Sequence
  Description of Artificial Sequence: Synthetic oligonucleotide
cuagcaauucugcauaggu

SEQ ID NO: 2183146 - RNA, 19 nt, Artificial Sequence
  Description of Artificial Sequence: Synthetic oligonucleotide
agugaaggacuggcuuucc

SEQ ID NO: 2183147 - RNA, 19 nt, Artificial Sequence
  Description of Artificial Sequence: Synthetic oligonucleotide
acacuucauuguugcaaag

SEQ ID NO: 2183148 - RNA, 19 nt, Artificial Sequence
  Description of Artificial Sequence: Synthetic oligonucleotide
ucauuguugcaaagcuuua

SEQ ID NO: 2183149 - RNA, 19 nt, Artificial Sequence
  Description of Artificial Sequence: Synthetic oligonucleotide
ccaucauuucuuaaccuug

SEQ ID NO: 2183150 - RNA, 19 nt, Artificial Sequence
  Description of Artificial Sequence: Synthetic oligonucleotide
auuuggaggcaauguaguu

SEQ ID NO: 2183151 - RNA, 19 nt, Artificial Sequence
  Description of Artificial Sequence: Synthetic oligonucleotide
uaggaagcuuguucuauuu

SEQ ID NO: 2183152 - RNA, 19 nt, Artificial Sequence
  Description of Artificial Sequence: Synthetic oligonucleotide
aaacucccaucauuucuua

SEQ ID NO: 2183153 - RNA, 19 nt, Artificial Sequence
  Description of Artificial Sequence: Synthetic oligonucleotide
ucuacacauuucucauccu

SEQ ID NO: 2183154 - RNA, 19 nt, Artificial Sequence
  Description of Artificial Sequence: Synthetic oligonucleotide
cuugaacuaaugcacaaau

SEQ ID NO: 2183155 - RNA, 19 nt, Artificial Sequence
  Description of Artificial Sequence: Synthetic oligonucleotide
guaguugagaauggcucug

SEQ ID NO: 2183156 - RNA, 19 nt, Artificial Sequence
  Description of Artificial Sequence: Synthetic oligonucleotide
cugaucuaacugaaaaucu

SEQ ID NO: 2183157 - RNA, 19 nt, Artificial Sequence
  Description of Artificial Sequence: Synthetic oligonucleotide
ggucaugacuacuugaacu

SEQ ID NO: 2183158 - RNA, 19 nt, Artificial Sequence
  Description of Artificial Sequence: Synthetic oligonucleotide
caaauagcauccuagcaau

SEQ ID NO: 2183159 - RNA, 19 nt, Artificial Sequence
  Description of Artificial Sequence: Synthetic oligonucleotide
ggaaacauccuaggaagug

SEQ ID NO: 2183160 - RNA, 19 nt, Artificial Sequence
  Description of Artificial Sequence: Synthetic oligonucleotide
uugaacaguccagagucua

SEQ ID NO: 2183161 - RNA, 19 nt, Artificial Sequence
  Description of Artificial Sequence: Synthetic oligonucleotide
auccuaggaagugaucaug

SEQ ID NO: 2183162 - RNA, 19 nt, Artificial Sequence
  Description of Artificial Sequence: Synthetic oligonucleotide
ccagagucuaggaagcuug

SEQ ID NO: 2183163 - RNA, 19 nt, Artificial Sequence
  Description of Artificial Sequence: Synthetic oligonucleotide
ggaauauaagguugaugga

SEQ ID NO: 2183164 - RNA, 19 nt, Artificial Sequence
  Description of Artificial Sequence: Synthetic oligonucleotide
ucaugacuacuugaacuaa

SEQ ID NO: 2183165 - RNA, 19 nt, Artificial Sequence
  Description of Artificial Sequence: Synthetic oligonucleotide
caauaugugccugaucuaa

SEQ ID NO: 2183166 - RNA, 19 nt, Artificial Sequence
  Description of Artificial Sequence: Synthetic oligonucleotide
accaugggcacuugcugga

SEQ ID NO: 2183167 - RNA, 19 nt, Artificial Sequence
  Description of Artificial Sequence: Synthetic oligonucleotide
gcuggaacaucaaacuccc

SEQ ID NO: 2183168 - RNA, 19 nt, Artificial Sequence
  Description of Artificial Sequence: Synthetic oligonucleotide
gucaucccgaguuuucaga

SEQ ID NO: 2183169 - RNA, 19 nt, Artificial Sequence
  Description of Artificial Sequence: Synthetic oligonucleotide
cauccagaucugcuauacc

SEQ ID NO: 2183170 - RNA, 19 nt, Artificial Sequence
  Description of Artificial Sequence: Synthetic oligonucleotide
guucaucaauaugugccug

SEQ ID NO: 2183171 - RNA, 19 nt, Artificial Sequence
  Description of Artificial Sequence: Synthetic oligonucleotide
ugcauaggucaugacuacu

SEQ ID NO: 2183172 - RNA, 19 nt, Artificial Sequence
  Description of Artificial Sequence: Synthetic oligonucleotide
ggaagcuuguucuauuuua

SEQ ID NO: 2183173 - RNA, 19 nt, Artificial Sequence
  Description of Artificial Sequence: Synthetic oligonucleotide
gcaauguaguugagaaugg

SEQ ID NO: 2183174 - RNA, 19 nt, Artificial Sequence
  Description of Artificial Sequence: Synthetic oligonucleotide
gagaauggcucuggucugc

SEQ ID NO: 2183175 - RNA, 19 nt, Artificial Sequence
  Description of Artificial Sequence: Synthetic oligonucleotide
aaguaacgguuccuugcuu

SEQ ID NO: 2183176 - RNA, 19 nt, Artificial Sequence
  Description of Artificial Sequence: Synthetic oligonucleotide
agcaggagcaacauuuaau

SEQ ID NO: 2183177 - RNA, 19 nt, Artificial Sequence
  Description of Artificial Sequence: Synthetic oligonucleotide
cagccuguugccaacgaga

SEQ ID NO: 2183178 - RNA, 19 nt, Artificial Sequence
  Description of Artificial Sequence: Synthetic oligonucleotide
cacaaaucuuggaaaacgu

SEQ ID NO: 2183179 - RNA, 19 nt, Artificial Sequence
  Description of Artificial Sequence: Synthetic oligonucleotide
caccggacaggcuccauuc

SEQ ID NO: 2183180 - RNA, 19 nt, Artificial Sequence
  Description of Artificial Sequence: Synthetic oligonucleotide
gagggaaguuggccaaaac

SEQ ID NO: 2183181 - RNA, 19 nt, Artificial Sequence
  Description of Artificial Sequence: Synthetic oligonucleotide
cuuggaaaacguguuagcu

SEQ ID NO: 2183182 - RNA, 19 nt, Artificial Sequence
  Description of Artificial Sequence: Synthetic oligonucleotide
cuggcuuucccgccauggc

SEQ ID NO: 2183183 - RNA, 19 nt, Artificial Sequence
  Description of Artificial Sequence: Synthetic oligonucleotide
cuuccacaugguagagaag

SEQ ID NO: 2183184 - RNA, 19 nt, Artificial Sequence
  Description of Artificial Sequence: Synthetic oligonucleotide
gagggcucucuccuucaug

SEQ ID NO: 2183185 - RNA, 19 nt, Artificial Sequence
  Description of Artificial Sequence: Synthetic oligonucleotide
uggccaaaacgcugggguc

SEQ ID NO: 2183186 - RNA, 19 nt, Artificial Sequence
  Description of Artificial Sequence: Synthetic oligonucleotide
aggacuggcuuucccgcca

SEQ ID NO: 2183187 - RNA, 19 nt, Artificial Sequence
  Description of Artificial Sequence: Synthetic oligonucleotide
ccucauaaggcuuccucug

SEQ ID NO: 2183188 - RNA, 19 nt, Artificial Sequence
  Description of Artificial Sequence: Synthetic oligonucleotide
aggcaauguaguugagaau

SEQ ID NO: 2183189 - RNA, 19 nt, Artificial Sequence
  Description of Artificial Sequence: Synthetic oligonucleotide
gaacuaaugcacaaaucuu

SEQ ID NO: 2183190 - RNA, 19 nt, Artificial Sequence
  Description of Artificial Sequence: Synthetic oligonucleotide
cauugcugauucuacacau

SEQ ID NO: 2183191 - RNA, 19 nt, Artificial Sequence
  Description of Artificial Sequence: Synthetic oligonucleotide
uucugccccggccaucaaa

SEQ ID NO: 2183192 - RNA, 19 nt, Artificial Sequence
  Description of Artificial Sequence: Synthetic oligonucleotide
cuuguggcugcuguucauc

SEQ ID NO: 2183193 - RNA, 19 nt, Artificial Sequence
  Description of Artificial Sequence: Synthetic oligonucleotide
uccauucugccccggccau

SEQ ID NO: 2183194 - RNA, 19 nt, Artificial Sequence
  Description of Artificial Sequence: Synthetic oligonucleotide
gcugccaggcugaagaaac

SEQ ID NO: 2183195 - RNA, 19 nt, Artificial Sequence
  Description of Artificial Sequence: Synthetic oligonucleotide
uaacgguuccuugcuuugu

SEQ ID NO: 2183196 - RNA, 19 nt, Artificial Sequence
  Description of Artificial Sequence: Synthetic oligonucleotide
cugaagaaacuucuucacu

SEQ ID NO: 2183197 - RNA, 19 nt, Artificial Sequence
  Description of Artificial Sequence: Synthetic oligonucleotide
ggaagugaucaugauuuca

SEQ ID NO: 2183198 - RNA, 19 nt, Artificial Sequence
  Description of Artificial Sequence: Synthetic oligonucleotide
ggcacuugcuggaacauca

SEQ ID NO: 2183199 - RNA, 19 nt, Artificial Sequence
  Description of Artificial Sequence: Synthetic oligonucleotide
ggagcaacauuuaaucaaa

SEQ ID NO: 2183200 - RNA, 19 nt, Artificial Sequence
  Description of Artificial Sequence: Synthetic oligonucleotide
uguggggagguugcugacu

SEQ ID NO: 2183201 - RNA, 19 nt, Artificial Sequence
  Description of Artificial Sequence: Synthetic oligonucleotide
cauccuagcaauucugcau

SEQ ID NO: 2183202 - RNA, 19 nt, Artificial Sequence
  Description of Artificial Sequence: Synthetic oligonucleotide
gagguuguauuuggaggca

SEQ ID NO: 2183203 - RNA, 19 nt, Artificial Sequence
  Description of Artificial Sequence: Synthetic oligonucleotide
ucuuguggcugcuguucau

SEQ ID NO: 2183204 - RNA, 19 nt, Artificial Sequence
  Description of Artificial Sequence: Synthetic oligonucleotide
aaauagcauccuagcaauu

SEQ ID NO: 2183205 - RNA, 19 nt, Artificial Sequence
  Description of Artificial Sequence: Synthetic oligonucleotide
gcagggaaguaacgguucc

SEQ ID NO: 2183206 - RNA, 19 nt, Artificial Sequence
  Description of Artificial Sequence: Synthetic oligonucleotide
ccgcauacaugucaaugag

SEQ ID NO: 2183207 - RNA, 19 nt, Artificial Sequence
  Description of Artificial Sequence: Synthetic oligonucleotide
ggccaaaacgcuggggucc

SEQ ID NO: 2183208 - RNA, 19 nt, Artificial Sequence
  Description of Artificial Sequence: Synthetic oligonucleotide
cgcauacaugucaaugagg

SEQ ID NO: 2183209 - RNA, 19 nt, Artificial Sequence
  Description of Artificial Sequence: Synthetic oligonucleotide
agguugauggagaacuauu

SEQ ID NO: 2183210 - RNA, 19 nt, Artificial Sequence
  Description of Artificial Sequence: Synthetic oligonucleotide
ggcuuucccgccauggcag

SEQ ID NO: 2183211 - RNA, 19 nt, Artificial Sequence
  Description of Artificial Sequence: Synthetic oligonucleotide
auggcagcaaucgcuuggu

SEQ ID NO: 2183212 - RNA, 19 nt, Artificial Sequence
  Description of Artificial Sequence: Synthetic oligonucleotide
agggaaguaacgguuccuu

SEQ ID NO: 2183213 - RNA, 19 nt, Artificial Sequence
  Description of Artificial Sequence: Synthetic oligonucleotide
caauuuugacuagaaccaa

SEQ ID NO: 2183214 - RNA, 19 nt, Artificial Sequence
  Description of Artificial Sequence: Synthetic oligonucleotide
cuccauucugccccggcca

SEQ ID NO: 2183215 - RNA, 19 nt, Artificial Sequence
  Description of Artificial Sequence: Synthetic oligonucleotide
gcaaggauaugacagcuau

SEQ ID NO: 2183216 - RNA, 19 nt, Artificial Sequence
  Description of Artificial Sequence: Synthetic oligonucleotide
cuaggaagugaucaugauu

SEQ ID NO: 2183217 - RNA, 19 nt, Artificial Sequence
  Description of Artificial Sequence: Synthetic oligonucleotide
caggcuccauucugccccg

SEQ ID NO: 2183218 - RNA, 19 nt, Artificial Sequence
  Description of Artificial Sequence: Synthetic oligonucleotide
ggcccuuuaacaccuucuc

SEQ ID NO: 2183219 - RNA, 19 nt, Artificial Sequence
  Description of Artificial Sequence: Synthetic oligonucleotide
ugagggcucucuccuucau

SEQ ID NO: 2183220 - RNA, 19 nt, Artificial Sequence
  Description of Artificial Sequence: Synthetic oligonucleotide
uggggaauauaagguugau

SEQ ID NO: 2183221 - RNA, 19 nt, Artificial Sequence
  Description of Artificial Sequence: Synthetic oligonucleotide
accggacaggcuccauucu

SEQ ID NO: 2183222 - RNA, 19 nt, Artificial Sequence
  Description of Artificial Sequence: Synthetic oligonucleotide
ggcaagguuugccucuuuc

SEQ ID NO: 2183223 - RNA, 19 nt, Artificial Sequence
  Description of Artificial Sequence: Synthetic oligonucleotide
caugacuacuugaacuaau

SEQ ID NO: 2183224 - RNA, 19 nt, Artificial Sequence
  Description of Artificial Sequence: Synthetic oligonucleotide
cauucugccccggccauca

SEQ ID NO: 2183225 - RNA, 19 nt, Artificial Sequence
  Description of Artificial Sequence: Synthetic oligonucleotide
auugcugauucuacacauu

SEQ ID NO: 2183226 - RNA, 19 nt, Artificial Sequence
  Description of Artificial Sequence: Synthetic oligonucleotide
gcuccauucugccccggcc

SEQ ID NO: 2183227 - RNA, 19 nt, Artificial Sequence
  Description of Artificial Sequence: Synthetic oligonucleotide
uccuucccauagagguugu

SEQ ID NO: 2183228 - RNA, 19 nt, Artificial Sequence
  Description of Artificial Sequence: Synthetic oligonucleotide
agguuguauuuggaggcaa

SEQ ID NO: 2183229 - RNA, 19 nt, Artificial Sequence
  Description of Artificial Sequence: Synthetic oligonucleotide
ucuuguccauggcccuuua

SEQ ID NO: 2183230 - RNA, 19 nt, Artificial Sequence
  Description of Artificial Sequence: Synthetic oligonucleotide
cccauagagguuguauuug

SEQ ID NO: 2183231 - RNA, 19 nt, Artificial Sequence
  Description of Artificial Sequence: Synthetic oligonucleotide
ggaggcaauguaguugaga

SEQ ID NO: 2183232 - RNA, 19 nt, Artificial Sequence
  Description of Artificial Sequence: Synthetic oligonucleotide
gucuaggaagcuuguucua

SEQ ID NO: 2183233 - RNA, 19 nt, Artificial Sequence
  Description of Artificial Sequence: Synthetic oligonucleotide
ucuccucuuggggaauaua

SEQ ID NO: 2183234 - RNA, 19 nt, Artificial Sequence
  Description of Artificial Sequence: Synthetic oligonucleotide
ggggagguugcugacucug

SEQ ID NO: 2183235 - RNA, 19 nt, Artificial Sequence
  Description of Artificial Sequence: Synthetic oligonucleotide
ugggcacuugcuggaacau

SEQ ID NO: 2183236 - RNA, 19 nt, Artificial Sequence
  Description of Artificial Sequence: Synthetic oligonucleotide
agagucuaggaagcuuguu

SEQ ID NO: 2183237 - RNA, 19 nt, Artificial Sequence
  Description of Artificial Sequence: Synthetic oligonucleotide
gcccuuuaacaccuucuca

SEQ ID NO: 2183238 - RNA, 19 nt, Artificial Sequence
  Description of Artificial Sequence: Synthetic oligonucleotide
ucaucccgucaaucuccac

SEQ ID NO: 2183239 - RNA, 19 nt, Artificial Sequence
  Description of Artificial Sequence: Synthetic oligonucleotide
caugucaaugagggcucuc

SEQ ID NO: 2183240 - RNA, 19 nt, Artificial Sequence
  Description of Artificial Sequence: Synthetic oligonucleotide
cguguuagcuucacaauaa

SEQ ID NO: 2183241 - RNA, 19 nt, Artificial Sequence
  Description of Artificial Sequence: Synthetic oligonucleotide
ccaccaugggcacuugcug

SEQ ID NO: 2183242 - RNA, 19 nt, Artificial Sequence
  Description of Artificial Sequence: Synthetic oligonucleotide
gcaagguuugccucuuucu

SEQ ID NO: 2183243 - RNA, 19 nt, Artificial Sequence
  Description of Artificial Sequence: Synthetic oligonucleotide
gggagguugcugacucugg

SEQ ID NO: 2183244 - RNA, 19 nt, Artificial Sequence
  Description of Artificial Sequence: Synthetic oligonucleotide
ggaaguuggccaaaacgcu

SEQ ID NO: 2183245 - RNA, 19 nt, Artificial Sequence
  Description of Artificial Sequence: Synthetic oligonucleotide
cuauaccuuccgcauacau

SEQ ID NO: 2183246 - RNA, 19 nt, Artificial Sequence
  Description of Artificial Sequence: Synthetic oligonucleotide
cacauuucucauccucaua

SEQ ID NO: 2183247 - RNA, 19 nt, Artificial Sequence
  Description of Artificial Sequence: Synthetic oligonucleotide
gagguugcugacucugguu

SEQ ID NO: 2183248 - RNA, 19 nt, Artificial Sequence
  Description of Artificial Sequence: Synthetic oligonucleotide
cccuuuaacaccuucucau

SEQ ID NO: 2183249 - RNA, 19 nt, Artificial Sequence
  Description of Artificial Sequence: Synthetic oligonucleotide
ggcagggaaguaacgguuc

SEQ ID NO: 2183250 - RNA, 19 nt, Artificial Sequence
  Description of Artificial Sequence: Synthetic oligonucleotide
cagcuucaucccgucaauc

SEQ ID NO: 2183251 - RNA, 19 nt, Artificial Sequence
  Description of Artificial Sequence: Synthetic oligonucleotide
cauccuaggaagugaucau

SEQ ID NO: 2183252 - RNA, 19 nt, Artificial Sequence
  Description of Artificial Sequence: Synthetic oligonucleotide
ccggccaucaaaguaguga

SEQ ID NO: 2183253 - RNA, 19 nt, Artificial Sequence
  Description of Artificial Sequence: Synthetic oligonucleotide
gguugauggagaacuauuu

SEQ ID NO: 2183254 - RNA, 19 nt, Artificial Sequence
  Description of Artificial Sequence: Synthetic oligonucleotide
gccaacgagauaaucuugu

SEQ ID NO: 2183255 - RNA, 19 nt, Artificial Sequence
  Description of Artificial Sequence: Synthetic oligonucleotide
uggcagcaaucgcuugguu

SEQ ID NO: 2183256 - RNA, 19 nt, Artificial Sequence
  Description of Artificial Sequence: Synthetic oligonucleotide
ccuuuaacaccuucucaua

SEQ ID NO: 2183257 - RNA, 19 nt, Artificial Sequence
  Description of Artificial Sequence: Synthetic oligonucleotide
ccggacaggcuccauucug

SEQ ID NO: 2183258 - RNA, 19 nt, Artificial Sequence
  Description of Artificial Sequence: Synthetic oligonucleotide
cuggaacaucaaacuccca

SEQ ID NO: 2183259 - RNA, 19 nt, Artificial Sequence
  Description of Artificial Sequence: Synthetic oligonucleotide
ccaggcugaagaaacuucu

SEQ ID NO: 2183260 - RNA, 19 nt, Artificial Sequence
  Description of Artificial Sequence: Synthetic oligonucleotide
ggcuccauucugccccggc

SEQ ID NO: 2183261 - RNA, 19 nt, Artificial Sequence
  Description of Artificial Sequence: Synthetic oligonucleotide
gcuuucccgccauggcagc

SEQ ID NO: 2183262 - RNA, 19 nt, Artificial Sequence
  Description of Artificial Sequence: Synthetic oligonucleotide
gccugaucuaacugaaaau

SEQ ID NO: 2183263 - RNA, 19 nt, Artificial Sequence
  Description of Artificial Sequence: Synthetic oligonucleotide
gcuauuucauaagaauauu

SEQ ID NO: 2183264 - RNA, 19 nt, Artificial Sequence
  Description of Artificial Sequence: Synthetic oligonucleotide
cagagucuaggaagcuugu

SEQ ID NO: 2183265 - RNA, 19 nt, Artificial Sequence
  Description of Artificial Sequence: Synthetic oligonucleotide
gcaaucgcuugguuucucu

SEQ ID NO: 2183266 - RNA, 19 nt, Artificial Sequence
  Description of Artificial Sequence: Synthetic oligonucleotide
caaucgcuugguuucucuu

SEQ ID NO: 2183267 - RNA, 19 nt, Artificial Sequence
  Description of Artificial Sequence: Synthetic oligonucleotide
cuuucccgccauggcagca

SEQ ID NO: 2183268 - RNA, 19 nt, Artificial Sequence
  Description of Artificial Sequence: Synthetic oligonucleotide
caggcugaagaaacuucuu

SEQ ID NO: 2183269 - RNA, 19 nt, Artificial Sequence
  Description of Artificial Sequence: Synthetic oligonucleotide
ccuugccaagucaucccga

SEQ ID NO: 2183270 - RNA, 19 nt, Artificial Sequence
  Description of Artificial Sequence: Synthetic oligonucleotide
auucugccccggccaucaa

SEQ ID NO: 2183271 - RNA, 19 nt, Artificial Sequence
  Description of Artificial Sequence: Synthetic oligonucleotide
gugccugaucuaacugaaa

SEQ ID NO: 2183272 - RNA, 19 nt, Artificial Sequence
  Description of Artificial Sequence: Synthetic oligonucleotide
aggcuccauucugccccgg

SEQ ID NO: 2183273 - RNA, 19 nt, Artificial Sequence
  Description of Artificial Sequence: Synthetic oligonucleotide
gccaaaacgcuggggucca

SEQ ID NO: 2183274 - RNA, 19 nt, Artificial Sequence
  Description of Artificial Sequence: Synthetic oligonucleotide
ggcaaggauaugacagcua

SEQ ID NO: 2183275 - RNA, 19 nt, Artificial Sequence
  Description of Artificial Sequence: Synthetic oligonucleotide
gggcucucuccuucauguc

SEQ ID NO: 2183276 - RNA, 19 nt, Artificial Sequence
  Description of Artificial Sequence: Synthetic oligonucleotide
gguuccuugcuuuguccuu

SEQ ID NO: 2183277 - RNA, 19 nt, Artificial Sequence
  Description of Artificial Sequence: Synthetic oligonucleotide
cuuccgcauacaugucaau

SEQ ID NO: 2183278 - RNA, 19 nt, Artificial Sequence
  Description of Artificial Sequence: Synthetic oligonucleotide
gggcacuugcuggaacauc

SEQ ID NO: 2183279 - RNA, 19 nt, Artificial Sequence
  Description of Artificial Sequence: Synthetic oligonucleotide
gguaaacaucagcccugcu

SEQ ID NO: 2183280 - RNA, 19 nt, Artificial Sequence
  Description of Artificial Sequence: Synthetic oligonucleotide
gcuauaccuuccgcauaca

SEQ ID NO: 2183281 - RNA, 19 nt, Artificial Sequence
  Description of Artificial Sequence: Synthetic oligonucleotide
caucagcccugcucagccu

SEQ ID NO: 2183282 - RNA, 19 nt, Artificial Sequence
  Description of Artificial Sequence: Synthetic oligonucleotide
caaugagggcucucuccuu

SEQ ID NO: 2183283 - RNA, 19 nt, Artificial Sequence
  Description of Artificial Sequence: Synthetic oligonucleotide
ccgaguuuucagaaauuuu

SEQ ID NO: 2183284 - RNA, 19 nt, Artificial Sequence
  Description of Artificial Sequence: Synthetic oligonucleotide
ccuaggaagugaucaugau

SEQ ID NO: 2183285 - RNA, 19 nt, Artificial Sequence
  Description of Artificial Sequence: Synthetic oligonucleotide
cuguugccaacgagauaau

SEQ ID NO: 2183286 - RNA, 19 nt, Artificial Sequence
  Description of Artificial Sequence: Synthetic oligonucleotide
cccgaguuuucagaaauuu

SEQ ID NO: 2183287 - RNA, 19 nt, Artificial Sequence
  Description of Artificial Sequence: Synthetic oligonucleotide
gccaagucaucccgaguuu

SEQ ID NO: 2183288 - RNA, 19 nt, Artificial Sequence
  Description of Artificial Sequence: Synthetic oligonucleotide
cugccccggccaucaaagu

SEQ ID NO: 2183289 - RNA, 19 nt, Artificial Sequence
  Description of Artificial Sequence: Synthetic oligonucleotide
cgguuccuugcuuuguccu

SEQ ID NO: 2183290 - RNA, 19 nt, Artificial Sequence
  Description of Artificial Sequence: Synthetic oligonucleotide
ggacuggcuuucccgccau

SEQ ID NO: 2183291 - RNA, 19 nt, Artificial Sequence
  Description of Artificial Sequence: Synthetic oligonucleotide
cauggcccuuuaacaccuu

SEQ ID NO: 2183292 - RNA, 19 nt, Artificial Sequence
  Description of Artificial Sequence: Synthetic oligonucleotide
ccaugggcacuugcuggaa

SEQ ID NO: 2183293 - RNA, 19 nt, Artificial Sequence
  Description of Artificial Sequence: Synthetic oligonucleotide
ccccggccaucaaaguagu

SEQ ID NO: 2183294 - RNA, 19 nt, Artificial Sequence
  Description of Artificial Sequence: Synthetic oligonucleotide
ccaccggacaggcuccauu

SEQ ID NO: 2183295 - RNA, 19 nt, Artificial Sequence
  Description of Artificial Sequence: Synthetic oligonucleotide
gccaccggacaggcuccau

SEQ ID NO: 2183296 - RNA, 19 nt, Artificial Sequence
  Description of Artificial Sequence: Synthetic oligonucleotide
uuuguuaaaacauugagag

SEQ ID NO: 2183297 - RNA, 19 nt, Artificial Sequence
  Description of Artificial Sequence: Synthetic oligonucleotide
uauuuaaacaacaagacgc

SEQ ID NO: 2183298 - RNA, 19 nt, Artificial Sequence
  Description of Artificial Sequence: Synthetic oligonucleotide
cuucaaauuaauaugaucg

SEQ ID NO: 2183299 - RNA, 19 nt, Artificial Sequence
  Description of Artificial Sequence: Synthetic oligonucleotide
aaaaguuauaaaauugucc

SEQ ID NO: 2183300 - RNA, 19 nt, Artificial Sequence
  Description of Artificial Sequence: Synthetic oligonucleotide
ucugaugucaaucaaaaca

SEQ ID NO: 2183301 - RNA, 19 nt, Artificial Sequence
  Description of Artificial Sequence: Synthetic oligonucleotide
uguuaaaacauugagagca

SEQ ID NO: 2183302 - RNA, 19 nt, Artificial Sequence
  Description of Artificial Sequence: Synthetic oligonucleotide
aaagauaagagcugaauga

SEQ ID NO: 2183303 - RNA, 19 nt, Artificial Sequence
  Description of Artificial Sequence: Synthetic oligonucleotide
acauguaacagcuacguac

SEQ ID NO: 2183304 - RNA, 19 nt, Artificial Sequence
  Description of Artificial Sequence: Synthetic oligonucleotide
aaaacuauacuguaguagu

SEQ ID NO: 2183305 - RNA, 19 nt, Artificial Sequence
  Description of Artificial Sequence: Synthetic oligonucleotide
aucaaaacagaacauuggc

SEQ ID NO: 2183306 - RNA, 19 nt, Artificial Sequence
  Description of Artificial Sequence: Synthetic oligonucleotide
uaaacugcaccacagaacc

SEQ ID NO: 2183307 - RNA, 19 nt, Artificial Sequence
  Description of Artificial Sequence: Synthetic oligonucleotide
aauaugcuugugcacauac

SEQ ID NO: 2183308 - RNA, 19 nt, Artificial Sequence
  Description of Artificial Sequence: Synthetic oligonucleotide
uacaauaaagaaaugggga

SEQ ID NO: 2183309 - RNA, 19 nt, Artificial Sequence
  Description of Artificial Sequence: Synthetic oligonucleotide
uaacuuacuggaaauaaag

SEQ ID NO: 2183310 - RNA, 19 nt, Artificial Sequence
  Description of Artificial Sequence: Synthetic oligonucleotide
uuuuguuaaaacauugaga

SEQ ID NO: 2183311 - RNA, 19 nt, Artificial Sequence
  Description of Artificial Sequence: Synthetic oligonucleotide
ucuggaguaaaguagcagg

SEQ ID NO: 2183312 - RNA, 19 nt, Artificial Sequence
  Description of Artificial Sequence: Synthetic oligonucleotide
agcaaaauaacuuacugga

SEQ ID NO: 2183313 - RNA, 19 nt, Artificial Sequence
  Description of Artificial Sequence: Synthetic oligonucleotide
uggucuauaacaaaauucu

SEQ ID NO: 2183314 - RNA, 19 nt, Artificial Sequence
  Description of Artificial Sequence: Synthetic oligonucleotide
aagacgcuugacuugaagg

SEQ ID NO: 2183315 - RNA, 19 nt, Artificial Sequence
  Description of Artificial Sequence: Synthetic oligonucleotide
uuaaucuuaaacugcacca

SEQ ID NO: 2183316 - RNA, 19 nt, Artificial Sequence
  Description of Artificial Sequence: Synthetic oligonucleotide
uaugcaaggauuuuguugu

SEQ ID NO: 2183317 - RNA, 19 nt, Artificial Sequence
  Description of Artificial Sequence: Synthetic oligonucleotide
ucauuaguuuacuaagugg

SEQ ID NO: 2183318 - RNA, 19 nt, Artificial Sequence
  Description of Artificial Sequence: Synthetic oligonucleotide
aaucguaucuucauccucc

SEQ ID NO: 2183319 - RNA, 19 nt, Artificial Sequence
  Description of Artificial Sequence: Synthetic oligonucleotide
aaucugaucugccucauug

SEQ ID NO: 2183320 - RNA, 19 nt, Artificial Sequence
  Description of Artificial Sequence: Synthetic oligonucleotide
uuaaacaacaagacgcuug

SEQ ID NO: 2183321 - RNA, 19 nt, Artificial Sequence
  Description of Artificial Sequence: Synthetic oligonucleotide
aaauuaauaugaucguugu

SEQ ID NO: 2183322 - RNA, 19 nt, Artificial Sequence
  Description of Artificial Sequence: Synthetic oligonucleotide
aauaaagaaauggggacag

SEQ ID NO: 2183323 - RNA, 19 nt, Artificial Sequence
  Description of Artificial Sequence: Synthetic oligonucleotide
ucauugacaaucccugucg

SEQ ID NO: 2183324 - RNA, 19 nt, Artificial Sequence
  Description of Artificial Sequence: Synthetic oligonucleotide
ucaagaguaauuuaccccu

SEQ ID NO: 2183325 - RNA, 19 nt, Artificial Sequence
  Description of Artificial Sequence: Synthetic oligonucleotide
ugcuggaacacaucaaucg

SEQ ID NO: 2183326 - RNA, 19 nt, Artificial Sequence
  Description of Artificial Sequence: Synthetic oligonucleotide
caaauuaauaugaucguug

SEQ ID NO: 2183327 - RNA, 19 nt, Artificial Sequence
  Description of Artificial Sequence: Synthetic oligonucleotide
aacaacaagacgcuugacu

SEQ ID NO: 2183328 - RNA, 19 nt, Artificial Sequence
  Description of Artificial Sequence: Synthetic oligonucleotide
aaauucuggaguaaaguag

SEQ ID NO: 2183329 - RNA, 19 nt, Artificial Sequence
  Description of Artificial Sequence: Synthetic oligonucleotide
cuuuuguuaaaacauugag

SEQ ID NO: 2183330 - RNA, 19 nt, Artificial Sequence
  Description of Artificial Sequence: Synthetic oligonucleotide
uucauuaguuuacuaagug

SEQ ID NO: 2183331 - RNA, 19 nt, Artificial Sequence
  Description of Artificial Sequence: Synthetic oligonucleotide
uucuucaagaguaauuuac

SEQ ID NO: 2183332 - RNA, 19 nt, Artificial Sequence
  Description of Artificial Sequence: Synthetic oligonucleotide
ugaaagaauagagaaaacu

SEQ ID NO: 2183333 - RNA, 19 nt, Artificial Sequence
  Description of Artificial Sequence: Synthetic oligonucleotide
uuuaccccuacuuaaagac

SEQ ID NO: 2183334 - RNA, 19 nt, Artificial Sequence
  Description of Artificial Sequence: Synthetic oligonucleotide
ucaaaccggaaucugaucu

SEQ ID NO: 2183335 - RNA, 19 nt, Artificial Sequence
  Description of Artificial Sequence: Synthetic oligonucleotide
gaaaacuauacuguaguag

SEQ ID NO: 2183336 - RNA, 19 nt, Artificial Sequence
  Description of Artificial Sequence: Synthetic oligonucleotide
uauaaaauuguccuugguu

SEQ ID NO: 2183337 - RNA, 19 nt, Artificial Sequence
  Description of Artificial Sequence: Synthetic oligonucleotide
aagcgcaauaugcuugugc

SEQ ID NO: 2183338 - RNA, 19 nt, Artificial Sequence
  Description of Artificial Sequence: Synthetic oligonucleotide
auugcgaauguauucuugg

SEQ ID NO: 2183339 - RNA, 19 nt, Artificial Sequence
  Description of Artificial Sequence: Synthetic oligonucleotide
agaauagagaaaacuauac

SEQ ID NO: 2183340 - RNA, 19 nt, Artificial Sequence
  Description of Artificial Sequence: Synthetic oligonucleotide
aauuuaccccuacuuaaag

SEQ ID NO: 2183341 - RNA, 19 nt, Artificial Sequence
  Description of Artificial Sequence: Synthetic oligonucleotide
auuaaaauucuccaaucga

SEQ ID NO: 2183342 - RNA, 19 nt, Artificial Sequence
  Description of Artificial Sequence: Synthetic oligonucleotide
uaugcuugugcacauacac

SEQ ID NO: 2183343 - RNA, 19 nt, Artificial Sequence
  Description of Artificial Sequence: Synthetic oligonucleotide
gucuauaacaaaauucugg

SEQ ID NO: 2183344 - RNA, 19 nt, Artificial Sequence
  Description of Artificial Sequence: Synthetic oligonucleotide
gaagggaaaacuaucuagg

SEQ ID NO: 2183345 - RNA, 19 nt, Artificial Sequence
  Description of Artificial Sequence: Synthetic oligonucleotide
uuggucuauaacaaaauuc

SEQ ID NO: 2183346 - RNA, 19 nt, Artificial Sequence
  Description of Artificial Sequence: Synthetic oligonucleotide
ucuucaagaguaauuuacc

SEQ ID NO: 2183347 - RNA, 19 nt, Artificial Sequence
  Description of Artificial Sequence: Synthetic oligonucleotide
uauacuguaguagucagga

SEQ ID NO: 2183348 - RNA, 19 nt, Artificial Sequence
  Description of Artificial Sequence: Synthetic oligonucleotide
accaguacuccccacagac

SEQ ID NO: 2183349 - RNA, 19 nt, Artificial Sequence
  Description of Artificial Sequence: Synthetic oligonucleotide
aauugcggcuuucuaauug

SEQ ID NO: 2183350 - RNA, 19 nt, Artificial Sequence
  Description of Artificial Sequence: Synthetic oligonucleotide
uuuucacagaaccaguacu

SEQ ID NO: 2183351 - RNA, 19 nt, Artificial Sequence
  Description of Artificial Sequence: Synthetic oligonucleotide
aagaguaauuuaccccuac

SEQ ID NO: 2183352 - RNA, 19 nt, Artificial Sequence
  Description of Artificial Sequence: Synthetic oligonucleotide
agaaguuuauuuaaacaac

SEQ ID NO: 2183353 - RNA, 19 nt, Artificial Sequence
  Description of Artificial Sequence: Synthetic oligonucleotide
uaaacaacaagacgcuuga

SEQ ID NO: 2183354 - RNA, 19 nt, Artificial Sequence
  Description of Artificial Sequence: Synthetic oligonucleotide
aaucgaacaagguaugcaa

SEQ ID NO: 2183355 - RNA, 19 nt, Artificial Sequence
  Description of Artificial Sequence: Synthetic oligonucleotide
auugcggcuuucuaauugc

SEQ ID NO: 2183356 - RNA, 19 nt, Artificial Sequence
  Description of Artificial Sequence: Synthetic oligonucleotide
guacaauaaagaaaugggg

SEQ ID NO: 2183357 - RNA, 19 nt, Artificial Sequence
  Description of Artificial Sequence: Synthetic oligonucleotide
ugccgcuucacaaaagagg

SEQ ID NO: 2183358 - RNA, 19 nt, Artificial Sequence
  Description of Artificial Sequence: Synthetic oligonucleotide
aauaacuuacuggaaauaa

SEQ ID NO: 2183359 - RNA, 19 nt, Artificial Sequence
  Description of Artificial Sequence: Synthetic oligonucleotide
acuuacuggaaauaaagau

SEQ ID NO: 2183360 - RNA, 19 nt, Artificial Sequence
  Description of Artificial Sequence: Synthetic oligonucleotide
augaucguuguucucaguc

SEQ ID NO: 2183361 - RNA, 19 nt, Artificial Sequence
  Description of Artificial Sequence: Synthetic oligonucleotide
ucuuuuguuaaaacauuga

SEQ ID NO: 2183362 - RNA, 19 nt, Artificial Sequence
  Description of Artificial Sequence: Synthetic oligonucleotide
ccuacuuaaagacagauug

SEQ ID NO: 2183363 - RNA, 19 nt, Artificial Sequence
  Description of Artificial Sequence: Synthetic oligonucleotide
aaagaauagagaaaacuau

SEQ ID NO: 2183364 - RNA, 19 nt, Artificial Sequence
  Description of Artificial Sequence: Synthetic oligonucleotide
guuauaaaauuguccuugg

SEQ ID NO: 2183365 - RNA, 19 nt, Artificial Sequence
  Description of Artificial Sequence: Synthetic oligonucleotide
cuucaagaguaauuuaccc

SEQ ID NO: 2183366 - RNA, 19 nt, Artificial Sequence
  Description of Artificial Sequence: Synthetic oligonucleotide
ucuaauugcgaauguauuc

SEQ ID NO: 2183367 - RNA, 19 nt, Artificial Sequence
  Description of Artificial Sequence: Synthetic oligonucleotide
agacgcuugacuugaaggg

SEQ ID NO: 2183368 - RNA, 19 nt, Artificial Sequence
  Description of Artificial Sequence: Synthetic oligonucleotide
uuaaacugcaccacagaac

SEQ ID NO: 2183369 - RNA, 19 nt, Artificial Sequence
  Description of Artificial Sequence: Synthetic oligonucleotide
uaccccuacuuaaagacag

SEQ ID NO: 2183370 - RNA, 19 nt, Artificial Sequence
  Description of Artificial Sequence: Synthetic oligonucleotide
uucaaauuaauaugaucgu

SEQ ID NO: 2183371 - RNA, 19 nt, Artificial Sequence
  Description of Artificial Sequence: Synthetic oligonucleotide
aaacauugagagcaaaaua

SEQ ID NO: 2183372 - RNA, 19 nt, Artificial Sequence
  Description of Artificial Sequence: Synthetic oligonucleotide
ucacaauaggcuuucauua

SEQ ID NO: 2183373 - RNA, 19 nt, Artificial Sequence
  Description of Artificial Sequence: Synthetic oligonucleotide
gauaagagcugaaugagca

SEQ ID NO: 2183374 - RNA, 19 nt, Artificial Sequence
  Description of Artificial Sequence: Synthetic oligonucleotide
uccauuuccaacugugcag

SEQ ID NO: 2183375 - RNA, 19 nt, Artificial Sequence
  Description of Artificial Sequence: Synthetic oligonucleotide
aaaccggaaucugaucugc

SEQ ID NO: 2183376 - RNA, 19 nt, Artificial Sequence
  Description of Artificial Sequence: Synthetic oligonucleotide
auaacaaaauucuggagua

SEQ ID NO: 2183377 - RNA, 19 nt, Artificial Sequence
  Description of Artificial Sequence: Synthetic oligonucleotide
augugguggaaccaaauug

SEQ ID NO: 2183378 - RNA, 19 nt, Artificial Sequence
  Description of Artificial Sequence: Synthetic oligonucleotide
aagagcugaaugagcaugc

SEQ ID NO: 2183379 - RNA, 19 nt, Artificial Sequence
  Description of Artificial Sequence: Synthetic oligonucleotide
aaaagcgcaauaugcuugu

SEQ ID NO: 2183380 - RNA, 19 nt, Artificial Sequence
  Description of Artificial Sequence: Synthetic oligonucleotide
uguaguagucaggaugugg

SEQ ID NO: 2183381 - RNA, 19 nt, Artificial Sequence
  Description of Artificial Sequence: Synthetic oligonucleotide
aacuauacuguaguaguca

SEQ ID NO: 2183382 - RNA, 19 nt, Artificial Sequence
  Description of Artificial Sequence: Synthetic oligonucleotide
acauacaccaguuacuuua

SEQ ID NO: 2183383 - RNA, 19 nt, Artificial Sequence
  Description of Artificial Sequence: Synthetic oligonucleotide
ugguuuuacaaugauaaau

SEQ ID NO: 2183384 - RNA, 19 nt, Artificial Sequence
  Description of Artificial Sequence: Synthetic oligonucleotide
ugcccuacauguaacagcu

SEQ ID NO: 2183385 - RNA, 19 nt, Artificial Sequence
  Description of Artificial Sequence: Synthetic oligonucleotide
uuaguuuacuaaguggugu

SEQ ID NO: 2183386 - RNA, 19 nt, Artificial Sequence
  Description of Artificial Sequence: Synthetic oligonucleotide
ucuccaaucgaacaaggua

SEQ ID NO: 2183387 - RNA, 19 nt, Artificial Sequence
  Description of Artificial Sequence: Synthetic oligonucleotide
aguaaaguagcagguuccc

SEQ ID NO: 2183388 - RNA, 19 nt, Artificial Sequence
  Description of Artificial Sequence: Synthetic oligonucleotide
gguggaaccaaauugcggc

SEQ ID NO: 2183389 - RNA, 19 nt, Artificial Sequence
  Description of Artificial Sequence: Synthetic oligonucleotide
uguccaucaaaccggaauc

SEQ ID NO: 2183390 - RNA, 19 nt, Artificial Sequence
  Description of Artificial Sequence: Synthetic oligonucleotide
aguaauuuaccccuacuua

SEQ ID NO: 2183391 - RNA, 19 nt, Artificial Sequence
  Description of Artificial Sequence: Synthetic oligonucleotide
uugacuugaagggaaaacu

SEQ ID NO: 2183392 - RNA, 19 nt, Artificial Sequence
  Description of Artificial Sequence: Synthetic oligonucleotide
acaacaagacgcuugacuu

SEQ ID NO: 2183393 - RNA, 19 nt, Artificial Sequence
  Description of Artificial Sequence: Synthetic oligonucleotide
acuuaaagacagauugccc

SEQ ID NO: 2183394 - RNA, 19 nt, Artificial Sequence
  Description of Artificial Sequence: Synthetic oligonucleotide
aaacuauacuguaguaguc

SEQ ID NO: 2183395 - RNA, 19 nt, Artificial Sequence
  Description of Artificial Sequence: Synthetic oligonucleotide
uucacaauaggcuuucauu

SEQ ID NO: 2183396 - RNA, 19 nt, Artificial Sequence
  Description of Artificial Sequence: Synthetic oligonucleotide
aacauuggccauuuaguuu

SEQ ID NO: 2183397 - RNA, 19 nt, Artificial Sequence
  Description of Artificial Sequence: Synthetic oligonucleotide
ugguggaaccaaauugcgg

SEQ ID NO: 2183398 - RNA, 19 nt, Artificial Sequence
  Description of Artificial Sequence: Synthetic oligonucleotide
uuauaaaauuguccuuggu

SEQ ID NO: 2183399 - RNA, 19 nt, Artificial Sequence
  Description of Artificial Sequence: Synthetic oligonucleotide
agauaagagcugaaugagc

SEQ ID NO: 2183400 - RNA, 19 nt, Artificial Sequence
  Description of Artificial Sequence: Synthetic oligonucleotide
uuguuaaaacauugagagc

SEQ ID NO: 2183401 - RNA, 19 nt, Artificial Sequence
  Description of Artificial Sequence: Synthetic oligonucleotide
agaaccauccugccccgcc

SEQ ID NO: 2183402 - RNA, 19 nt, Artificial Sequence
  Description of Artificial Sequence: Synthetic oligonucleotide
agcgcaauaugcuugugca

SEQ ID NO: 2183403 - RNA, 19 nt, Artificial Sequence
  Description of Artificial Sequence: Synthetic oligonucleotide
uaauuuaccccuacuuaaa

SEQ ID NO: 2183404 - RNA, 19 nt, Artificial Sequence
  Description of Artificial Sequence: Synthetic oligonucleotide
caaaauaacuuacuggaaa

SEQ ID NO: 2183405 - RNA, 19 nt, Artificial Sequence
  Description of Artificial Sequence: Synthetic oligonucleotide
cuuacuggaaauaaagaua

SEQ ID NO: 2183406 - RNA, 19 nt, Artificial Sequence
  Description of Artificial Sequence: Synthetic oligonucleotide
aagguaugcaaggauuuug

SEQ ID NO: 2183407 - RNA, 19 nt, Artificial Sequence
  Description of Artificial Sequence: Synthetic oligonucleotide
gagaaaacuauacuguagu

SEQ ID NO: 2183408 - RNA, 19 nt, Artificial Sequence
  Description of Artificial Sequence: Synthetic oligonucleotide
ugcacauacaccaguuacu

SEQ ID NO: 2183409 - RNA, 19 nt, Artificial Sequence
  Description of Artificial Sequence: Synthetic oligonucleotide
uuaguagacaccuccuguc

SEQ ID NO: 2183410 - RNA, 19 nt, Artificial Sequence
  Description of Artificial Sequence: Synthetic oligonucleotide
aacaagacgcuugacuuga

SEQ ID NO: 2183411 - RNA, 19 nt, Artificial Sequence
  Description of Artificial Sequence: Synthetic oligonucleotide
uuguuguuggauucuuuug

SEQ ID NO: 2183412 - RNA, 19 nt, Artificial Sequence
  Description of Artificial Sequence: Synthetic oligonucleotide
cauuaguuuacuaaguggu

SEQ ID NO: 2183413 - RNA, 19 nt, Artificial Sequence
  Description of Artificial Sequence: Synthetic oligonucleotide
ugagcaugccacuaaugga

SEQ ID NO: 2183414 - RNA, 19 nt, Artificial Sequence
  Description of Artificial Sequence: Synthetic oligonucleotide
ugcgaauguauucuugguc

SEQ ID NO: 2183415 - RNA, 19 nt, Artificial Sequence
  Description of Artificial Sequence: Synthetic oligonucleotide
aucugaugucaaucaaaac

SEQ ID NO: 2183416 - RNA, 19 nt, Artificial Sequence
  Description of Artificial Sequence: Synthetic oligonucleotide
aacuuacuggaaauaaaga

SEQ ID NO: 2183417 - RNA, 19 nt, Artificial Sequence
  Description of Artificial Sequence: Synthetic oligonucleotide
gacaccuccugucugcugc

SEQ ID NO: 2183418 - RNA, 19 nt, Artificial Sequence
  Description of Artificial Sequence: Synthetic oligonucleotide
auuuaccccuacuuaaaga

SEQ ID NO: 2183419 - RNA, 19 nt, Artificial Sequence
  Description of Artificial Sequence: Synthetic oligonucleotide
cacaauaggcuuucauuag

SEQ ID NO: 2183420 - RNA, 19 nt, Artificial Sequence
  Description of Artificial Sequence: Synthetic oligonucleotide
auaugaucguuguucucag

SEQ ID NO: 2183421 - RNA, 19 nt, Artificial Sequence
  Description of Artificial Sequence: Synthetic oligonucleotide
cuauacuguaguagucagg

SEQ ID NO: 2183422 - RNA, 19 nt, Artificial Sequence
  Description of Artificial Sequence: Synthetic oligonucleotide
ugacuugaagggaaaacua

SEQ ID NO: 2183423 - RNA, 19 nt, Artificial Sequence
  Description of Artificial Sequence: Synthetic oligonucleotide
agagaaaacuauacuguag

SEQ ID NO: 2183424 - RNA, 19 nt, Artificial Sequence
  Description of Artificial Sequence: Synthetic oligonucleotide
cuuaaagacagauugcccu

SEQ ID NO: 2183425 - RNA, 19 nt, Artificial Sequence
  Description of Artificial Sequence: Synthetic oligonucleotide
acuugaagggaaaacuauc

SEQ ID NO: 2183426 - RNA, 19 nt, Artificial Sequence
  Description of Artificial Sequence: Synthetic oligonucleotide
agucuugacuccuuccuug

SEQ ID NO: 2183427 - RNA, 19 nt, Artificial Sequence
  Description of Artificial Sequence: Synthetic oligonucleotide
auuuaaacaacaagacgcu

SEQ ID NO: 2183428 - RNA, 19 nt, Artificial Sequence
  Description of Artificial Sequence: Synthetic oligonucleotide
uucauugauuggcugucca

SEQ ID NO: 2183429 - RNA, 19 nt, Artificial Sequence
  Description of Artificial Sequence: Synthetic oligonucleotide
auaggcuuucauuaguuua

SEQ ID NO: 2183430 - RNA, 19 nt, Artificial Sequence
  Description of Artificial Sequence: Synthetic oligonucleotide
auugagagcaaaauaacuu

SEQ ID NO: 2183431 - RNA, 19 nt, Artificial Sequence
  Description of Artificial Sequence: Synthetic oligonucleotide
gaguaaaguagcagguucc

SEQ ID NO: 2183432 - RNA, 19 nt, Artificial Sequence
  Description of Artificial Sequence: Synthetic oligonucleotide
cucuuaaucuuaaacugca

SEQ ID NO: 2183433 - RNA, 19 nt, Artificial Sequence
  Description of Artificial Sequence: Synthetic oligonucleotide
gaauagagaaaacuauacu

SEQ ID NO: 2183434 - RNA, 19 nt, Artificial Sequence
  Description of Artificial Sequence: Synthetic oligonucleotide
ucuuaaucuuaaacugcac

SEQ ID NO: 2183435 - RNA, 19 nt, Artificial Sequence
  Description of Artificial Sequence: Synthetic oligonucleotide
gcaaggauuuuguuguugg

SEQ ID NO: 2183436 - RNA, 19 nt, Artificial Sequence
  Description of Artificial Sequence: Synthetic oligonucleotide
agaacauuggccauuuagu

SEQ ID NO: 2183437 - RNA, 19 nt, Artificial Sequence
  Description of Artificial Sequence: Synthetic oligonucleotide
uugcccuacauguaacagc

SEQ ID NO: 2183438 - RNA, 19 nt, Artificial Sequence
  Description of Artificial Sequence: Synthetic oligonucleotide
uuaaagacagauugcccua

SEQ ID NO: 2183439 - RNA, 19 nt, Artificial Sequence
  Description of Artificial Sequence: Synthetic oligonucleotide
uccaaucgaacaagguaug

SEQ ID NO: 2183440 - RNA, 19 nt, Artificial Sequence
  Description of Artificial Sequence: Synthetic oligonucleotide
aaacuaucuaggaucauuu

SEQ ID NO: 2183441 - RNA, 19 nt, Artificial Sequence
  Description of Artificial Sequence: Synthetic oligonucleotide
cauguaacagcuacguaca

SEQ ID NO: 2183442 - RNA, 19 nt, Artificial Sequence
  Description of Artificial Sequence: Synthetic oligonucleotide
ugaaugagcaugccacuaa

SEQ ID NO: 2183443 - RNA, 19 nt, Artificial Sequence
  Description of Artificial Sequence: Synthetic oligonucleotide
ucaaucguaucuucauccu

SEQ ID NO: 2183444 - RNA, 19 nt, Artificial Sequence
  Description of Artificial Sequence: Synthetic oligonucleotide
aauugcgaauguauucuug

SEQ ID NO: 2183445 - RNA, 19 nt, Artificial Sequence
  Description of Artificial Sequence: Synthetic oligonucleotide
caccaguuacuuuauguac

SEQ ID NO: 2183446 - RNA, 19 nt, Artificial Sequence
  Description of Artificial Sequence: Synthetic oligonucleotide
ugaucguuguucucagucu

SEQ ID NO: 2183447 - RNA, 19 nt, Artificial Sequence
  Description of Artificial Sequence: Synthetic oligonucleotide
aacaagaaguuuauuuaaa

SEQ ID NO: 2183448 - RNA, 19 nt, Artificial Sequence
  Description of Artificial Sequence: Synthetic oligonucleotide
uuaccccuacuuaaagaca

SEQ ID NO: 2183449 - RNA, 19 nt, Artificial Sequence
  Description of Artificial Sequence: Synthetic oligonucleotide
acacaucaaucguaucuuc

SEQ ID NO: 2183450 - RNA, 19 nt, Artificial Sequence
  Description of Artificial Sequence: Synthetic oligonucleotide
acuguaguagucaggaugu

SEQ ID NO: 2183451 - RNA, 19 nt, Artificial Sequence
  Description of Artificial Sequence: Synthetic oligonucleotide
acaaaauucuggaguaaag

SEQ ID NO: 2183452 - RNA, 19 nt, Artificial Sequence
  Description of Artificial Sequence: Synthetic oligonucleotide
aucaaaccggaaucugauc

SEQ ID NO: 2183453 - RNA, 19 nt, Artificial Sequence
  Description of Artificial Sequence: Synthetic oligonucleotide
gaagaaggaggcggcagcg

SEQ ID NO: 2183454 - RNA, 19 nt, Artificial Sequence
  Description of Artificial Sequence: Synthetic oligonucleotide
uuacuaagugguguaugcc

SEQ ID NO: 2183455 - RNA, 19 nt, Artificial Sequence
  Description of Artificial Sequence: Synthetic oligonucleotide
gccucuuaaucuuaaacug

SEQ ID NO: 2183456 - RNA, 19 nt, Artificial Sequence
  Description of Artificial Sequence: Synthetic oligonucleotide
aacugugcaggugugucug

SEQ ID NO: 2183457 - RNA, 19 nt, Artificial Sequence
  Description of Artificial Sequence: Synthetic oligonucleotide
aaauaacuuacuggaaaua

SEQ ID NO: 2183458 - RNA, 19 nt, Artificial Sequence
  Description of Artificial Sequence: Synthetic oligonucleotide
gucaggaugugguggaacc

SEQ ID NO: 2183459 - RNA, 19 nt, Artificial Sequence
  Description of Artificial Sequence: Synthetic oligonucleotide
aggauuuuguuguuggauu

SEQ ID NO: 2183460 - RNA, 19 nt, Artificial Sequence
  Description of Artificial Sequence: Synthetic oligonucleotide
agaaccaguacuccccaca

SEQ ID NO: 2183461 - RNA, 19 nt, Artificial Sequence
  Description of Artificial Sequence: Synthetic oligonucleotide
uugaagggaaaacuaucua

SEQ ID NO: 2183462 - RNA, 19 nt, Artificial Sequence
  Description of Artificial Sequence: Synthetic oligonucleotide
acuaagugguguaugccuc

SEQ ID NO: 2183463 - RNA, 19 nt, Artificial Sequence
  Description of Artificial Sequence: Synthetic oligonucleotide
uaguagacaccuccugucu

SEQ ID NO: 2183464 - RNA, 19 nt, Artificial Sequence
  Description of Artificial Sequence: Synthetic oligonucleotide
ugucguucacaauaggcuu

SEQ ID NO: 2183465 - RNA, 19 nt, Artificial Sequence
  Description of Artificial Sequence: Synthetic oligonucleotide
agaguaauuuaccccuacu

SEQ ID NO: 2183466 - RNA, 19 nt, Artificial Sequence
  Description of Artificial Sequence: Synthetic oligonucleotide
augccacuaauggagaaag

SEQ ID NO: 2183467 - RNA, 19 nt, Artificial Sequence
  Description of Artificial Sequence: Synthetic oligonucleotide
cuuaaacugcaccacagaa

SEQ ID NO: 2183468 - RNA, 19 nt, Artificial Sequence
  Description of Artificial Sequence: Synthetic oligonucleotide
gccacuaauggagaaaggg

SEQ ID NO: 2183469 - RNA, 19 nt, Artificial Sequence
  Description of Artificial Sequence: Synthetic oligonucleotide
uacuggaaauaaagauaag

SEQ ID NO: 2183470 - RNA, 19 nt, Artificial Sequence
  Description of Artificial Sequence: Synthetic oligonucleotide
aacugcaccacagaaccau

SEQ ID NO: 2183471 - RNA, 19 nt, Artificial Sequence
  Description of Artificial Sequence: Synthetic oligonucleotide
aagacagauugcccuacau

SEQ ID NO: 2183472 - RNA, 19 nt, Artificial Sequence
  Description of Artificial Sequence: Synthetic oligonucleotide
auuaguuuacuaaguggug

SEQ ID NO: 2183473 - RNA, 19 nt, Artificial Sequence
  Description of Artificial Sequence: Synthetic oligonucleotide
aaacaacaagacgcuugac

SEQ ID NO: 2183474 - RNA, 19 nt, Artificial Sequence
  Description of Artificial Sequence: Synthetic oligonucleotide
aauuguccuugguuuuaca

SEQ ID NO: 2183475 - RNA, 19 nt, Artificial Sequence
  Description of Artificial Sequence: Synthetic oligonucleotide
ccacuaauggagaaagggg

SEQ ID NO: 2183476 - RNA, 19 nt, Artificial Sequence
  Description of Artificial Sequence: Synthetic oligonucleotide
aaccauccugccccgccac

SEQ ID NO: 2183477 - RNA, 19 nt, Artificial Sequence
  Description of Artificial Sequence: Synthetic oligonucleotide
uucuccaaucgaacaaggu

SEQ ID NO: 2183478 - RNA, 19 nt, Artificial Sequence
  Description of Artificial Sequence: Synthetic oligonucleotide
ucccugucguucacaauag

SEQ ID NO: 2183479 - RNA, 19 nt, Artificial Sequence
  Description of Artificial Sequence: Synthetic oligonucleotide
aaugagcaugccacuaaug

SEQ ID NO: 2183480 - RNA, 19 nt, Artificial Sequence
  Description of Artificial Sequence: Synthetic oligonucleotide
acaccaguuacuuuaugua

SEQ ID NO: 2183481 - RNA, 19 nt, Artificial Sequence
  Description of Artificial Sequence: Synthetic oligonucleotide
guagacaccuccugucugc

SEQ ID NO: 2183482 - RNA, 19 nt, Artificial Sequence
  Description of Artificial Sequence: Synthetic oligonucleotide
aucuuaaacugcaccacag

SEQ ID NO: 2183483 - RNA, 19 nt, Artificial Sequence
  Description of Artificial Sequence: Synthetic oligonucleotide
uaguuuacuaaguggugua

SEQ ID NO: 2183484 - RNA, 19 nt, Artificial Sequence
  Description of Artificial Sequence: Synthetic oligonucleotide
uugcggcuuucuaauugcg

SEQ ID NO: 2183485 - RNA, 19 nt, Artificial Sequence
  Description of Artificial Sequence: Synthetic oligonucleotide
cacggaaggagcacacagg

SEQ ID NO: 2183486 - RNA, 19 nt, Artificial Sequence
  Description of Artificial Sequence: Synthetic oligonucleotide
aacuaucuaggaucauuuu

SEQ ID NO: 2183487 - RNA, 19 nt, Artificial Sequence
  Description of Artificial Sequence: Synthetic oligonucleotide
ggaguaaaguagcagguuc

SEQ ID NO: 2183488 - RNA, 19 nt, Artificial Sequence
  Description of Artificial Sequence: Synthetic oligonucleotide
agugguguaugccucuuaa

SEQ ID NO: 2183489 - RNA, 19 nt, Artificial Sequence
  Description of Artificial Sequence: Synthetic oligonucleotide
cuucacaaaagaggcgccg

SEQ ID NO: 2183490 - RNA, 19 nt, Artificial Sequence
  Description of Artificial Sequence: Synthetic oligonucleotide
auugcccuacauguaacag

SEQ ID NO: 2183491 - RNA, 19 nt, Artificial Sequence
  Description of Artificial Sequence: Synthetic oligonucleotide
ugccacuaauggagaaagg

SEQ ID NO: 2183492 - RNA, 19 nt, Artificial Sequence
  Description of Artificial Sequence: Synthetic oligonucleotide
ugacaaucccugucguuca

SEQ ID NO: 2183493 - RNA, 19 nt, Artificial Sequence
  Description of Artificial Sequence: Synthetic oligonucleotide
guuuacuaagugguguaug

SEQ ID NO: 2183494 - RNA, 19 nt, Artificial Sequence
  Description of Artificial Sequence: Synthetic oligonucleotide
aaaauuguccuugguuuua

SEQ ID NO: 2183495 - RNA, 19 nt, Artificial Sequence
  Description of Artificial Sequence: Synthetic oligonucleotide
aaccggaaucugaucugcc

SEQ ID NO: 2183496 - RNA, 19 nt, Artificial Sequence
  Description of Artificial Sequence: Synthetic oligonucleotide
caauaaagaaauggggaca

SEQ ID NO: 2183497 - RNA, 19 nt, Artificial Sequence
  Description of Artificial Sequence: Synthetic oligonucleotide
uguaacagcuacguacaaa

SEQ ID NO: 2183498 - RNA, 19 nt, Artificial Sequence
  Description of Artificial Sequence: Synthetic oligonucleotide
aauguauucuuggucuaua

SEQ ID NO: 2183499 - RNA, 19 nt, Artificial Sequence
  Description of Artificial Sequence: Synthetic oligonucleotide
uccaucugaugucaaucaa

SEQ ID NO: 2183500 - RNA, 19 nt, Artificial Sequence
  Description of Artificial Sequence: Synthetic oligonucleotide
ccucuuaaucuuaaacugc

SEQ ID NO: 2183501 - RNA, 19 nt, Artificial Sequence
  Description of Artificial Sequence: Synthetic oligonucleotide
caaaccggaaucugaucug

SEQ ID NO: 2183502 - RNA, 19 nt, Artificial Sequence
  Description of Artificial Sequence: Synthetic oligonucleotide
gauugcccuacauguaaca

SEQ ID NO: 2183503 - RNA, 19 nt, Artificial Sequence
  Description of Artificial Sequence: Synthetic oligonucleotide
uaguagucaggauguggug

SEQ ID NO: 2183504 - RNA, 19 nt, Artificial Sequence
  Description of Artificial Sequence: Synthetic oligonucleotide
agagcugaaugagcaugcc

SEQ ID NO: 2183505 - RNA, 19 nt, Artificial Sequence
  Description of Artificial Sequence: Synthetic oligonucleotide
accaguuacuuuauguaca

SEQ ID NO: 2183506 - RNA, 19 nt, Artificial Sequence
  Description of Artificial Sequence: Synthetic oligonucleotide
auucuccaaucgaacaagg

SEQ ID NO: 2183507 - RNA, 19 nt, Artificial Sequence
  Description of Artificial Sequence: Synthetic oligonucleotide
ccugucguucacaauaggc

SEQ ID NO: 2183508 - RNA, 19 nt, Artificial Sequence
  Description of Artificial Sequence: Synthetic oligonucleotide
uugcgaauguauucuuggu

SEQ ID NO: 2183509 - RNA, 19 nt, Artificial Sequence
  Description of Artificial Sequence: Synthetic oligonucleotide
aagaaggaggcggcagcgg

SEQ ID NO: 2183510 - RNA, 19 nt, Artificial Sequence
  Description of Artificial Sequence: Synthetic oligonucleotide
gcuuucauuaguuuacuaa

SEQ ID NO: 2183511 - RNA, 19 nt, Artificial Sequence
  Description of Artificial Sequence: Synthetic oligonucleotide
ugcggcuuucuaauugcga

SEQ ID NO: 2183512 - RNA, 19 nt, Artificial Sequence
  Description of Artificial Sequence: Synthetic oligonucleotide
cauugauuggcuguccauc

SEQ ID NO: 2183513 - RNA, 19 nt, Artificial Sequence
  Description of Artificial Sequence: Synthetic oligonucleotide
uguaugccucuuaaucuua

SEQ ID NO: 2183514 - RNA, 19 nt, Artificial Sequence
  Description of Artificial Sequence: Synthetic oligonucleotide
caguacuccccacagacca

SEQ ID NO: 2183515 - RNA, 19 nt, Artificial Sequence
  Description of Artificial Sequence: Synthetic oligonucleotide
auauuuucacagaaccagu

SEQ ID NO: 2183516 - RNA, 19 nt, Artificial Sequence
  Description of Artificial Sequence: Synthetic oligonucleotide
uuguuggauucuuuuguua

SEQ ID NO: 2183517 - RNA, 19 nt, Artificial Sequence
  Description of Artificial Sequence: Synthetic oligonucleotide
uaauaugaucguuguucuc

SEQ ID NO: 2183518 - RNA, 19 nt, Artificial Sequence
  Description of Artificial Sequence: Synthetic oligonucleotide
auaacuuacuggaaauaaa

SEQ ID NO: 2183519 - RNA, 19 nt, Artificial Sequence
  Description of Artificial Sequence: Synthetic oligonucleotide
agaaggaggcggcagcggu

SEQ ID NO: 2183520 - RNA, 19 nt, Artificial Sequence
  Description of Artificial Sequence: Synthetic oligonucleotide
cauugagagcaaaauaacu

SEQ ID NO: 2183521 - RNA, 19 nt, Artificial Sequence
  Description of Artificial Sequence: Synthetic oligonucleotide
aucugaucugccucauuga

SEQ ID NO: 2183522 - RNA, 19 nt, Artificial Sequence
  Description of Artificial Sequence: Synthetic oligonucleotide
ucauugauuggcuguccau

SEQ ID NO: 2183523 - RNA, 19 nt, Artificial Sequence
  Description of Artificial Sequence: Synthetic oligonucleotide
auaagagcugaaugagcau

SEQ ID NO: 2183524 - RNA, 19 nt, Artificial Sequence
  Description of Artificial Sequence: Synthetic oligonucleotide
ugugcacauacaccaguua

SEQ ID NO: 2183525 - RNA, 19 nt, Artificial Sequence
  Description of Artificial Sequence: Synthetic oligonucleotide
agauugcccuacauguaac

SEQ ID NO: 2183526 - RNA, 19 nt, Artificial Sequence
  Description of Artificial Sequence: Synthetic oligonucleotide
aaauugcggcuuucuaauu

SEQ ID NO: 2183527 - RNA, 19 nt, Artificial Sequence
  Description of Artificial Sequence: Synthetic oligonucleotide
uugugcacauacaccaguu

SEQ ID NO: 2183528 - RNA, 19 nt, Artificial Sequence
  Description of Artificial Sequence: Synthetic oligonucleotide
ggauuuuguuguuggauuc

SEQ ID NO: 2183529 - RNA, 19 nt, Artificial Sequence
  Description of Artificial Sequence: Synthetic oligonucleotide
ccuucaaauuaauaugauc

SEQ ID NO: 2183530 - RNA, 19 nt, Artificial Sequence
  Description of Artificial Sequence: Synthetic oligonucleotide
cuguuucauugauuggcug

SEQ ID NO: 2183531 - RNA, 19 nt, Artificial Sequence
  Description of Artificial Sequence: Synthetic oligonucleotide
ccuacauguaacagcuacg

SEQ ID NO: 2183532 - RNA, 19 nt, Artificial Sequence
  Description of Artificial Sequence: Synthetic oligonucleotide
accggaaucugaucugccu

SEQ ID NO: 2183533 - RNA, 19 nt, Artificial Sequence
  Description of Artificial Sequence: Synthetic oligonucleotide
cuaauugcgaauguauucu

SEQ ID NO: 2183534 - RNA, 19 nt, Artificial Sequence
  Description of Artificial Sequence: Synthetic oligonucleotide
caaucguaucuucauccuc

SEQ ID NO: 2183535 - RNA, 19 nt, Artificial Sequence
  Description of Artificial Sequence: Synthetic oligonucleotide
cuccaaucgaacaagguau

SEQ ID NO: 2183536 - RNA, 19 nt, Artificial Sequence
  Description of Artificial Sequence: Synthetic oligonucleotide
uaauugcgaauguauucuu

SEQ ID NO: 2183537 - RNA, 19 nt, Artificial Sequence
  Description of Artificial Sequence: Synthetic oligonucleotide
cuuggguuucucgucggcc

SEQ ID NO: 2183538 - RNA, 19 nt, Artificial Sequence
  Description of Artificial Sequence: Synthetic oligonucleotide
uugacuccuuccuuggguu

SEQ ID NO: 2183539 - RNA, 19 nt, Artificial Sequence
  Description of Artificial Sequence: Synthetic oligonucleotide
uaucuaggaucauuuucuu

SEQ ID NO: 2183540 - RNA, 19 nt, Artificial Sequence
  Description of Artificial Sequence: Synthetic oligonucleotide
uacauguaacagcuacgua

SEQ ID NO: 2183541 - RNA, 19 nt, Artificial Sequence
  Description of Artificial Sequence: Synthetic oligonucleotide
gaacauuggccauuuaguu

SEQ ID NO: 2183542 - RNA, 19 nt, Artificial Sequence
  Description of Artificial Sequence: Synthetic oligonucleotide
gccgcuucacaaaagaggc

SEQ ID NO: 2183543 - RNA, 19 nt, Artificial Sequence
  Description of Artificial Sequence: Synthetic oligonucleotide
cacacaggcagcaccagga

SEQ ID NO: 2183544 - RNA, 19 nt, Artificial Sequence
  Description of Artificial Sequence: Synthetic oligonucleotide
agaccaucuccaucugaug

SEQ ID NO: 2183545 - RNA, 19 nt, Artificial Sequence
  Description of Artificial Sequence: Synthetic oligonucleotide
uaugccucuuaaucuuaaa

SEQ ID NO: 2183546 - RNA, 19 nt, Artificial Sequence
  Description of Artificial Sequence: Synthetic oligonucleotide
cugccgcuucacaaaagag

SEQ ID NO: 2183547 - RNA, 19 nt, Artificial Sequence
  Description of Artificial Sequence: Synthetic oligonucleotide
agguaugcaaggauuuugu

SEQ ID NO: 2183548 - RNA, 19 nt, Artificial Sequence
  Description of Artificial Sequence: Synthetic oligonucleotide
cugucguucacaauaggcu

SEQ ID NO: 2183549 - RNA, 19 nt, Artificial Sequence
  Description of Artificial Sequence: Synthetic oligonucleotide
aucguaucuucauccucca

SEQ ID NO: 2183550 - RNA, 19 nt, Artificial Sequence
  Description of Artificial Sequence: Synthetic oligonucleotide
ggcuuucuaauugcgaaug

SEQ ID NO: 2183551 - RNA, 19 nt, Artificial Sequence
  Description of Artificial Sequence: Synthetic oligonucleotide
cccuacauguaacagcuac

SEQ ID NO: 2183552 - RNA, 19 nt, Artificial Sequence
  Description of Artificial Sequence: Synthetic oligonucleotide
caaucgaacaagguaugca

SEQ ID NO: 2183553 - RNA, 19 nt, Artificial Sequence
  Description of Artificial Sequence: Synthetic oligonucleotide
auugacaaucccugucguu

SEQ ID NO: 2183554 - RNA, 19 nt, Artificial Sequence
  Description of Artificial Sequence: Synthetic oligonucleotide
guaguagucaggauguggu

SEQ ID NO: 2183555 - RNA, 19 nt, Artificial Sequence
  Description of Artificial Sequence: Synthetic oligonucleotide
uaugaucguuguucucagu

SEQ ID NO: 2183556 - RNA, 19 nt, Artificial Sequence
  Description of Artificial Sequence: Synthetic oligonucleotide
caaauugcggcuuucuaau

SEQ ID NO: 2183557 - RNA, 19 nt, Artificial Sequence
  Description of Artificial Sequence: Synthetic oligonucleotide
gacgcuugacuugaaggga

SEQ ID NO: 2183558 - RNA, 19 nt, Artificial Sequence
  Description of Artificial Sequence: Synthetic oligonucleotide
agaggcgccggguccgcac

SEQ ID NO: 2183559 - RNA, 19 nt, Artificial Sequence
  Description of Artificial Sequence: Synthetic oligonucleotide
ccauuuccaacugugcagg

SEQ ID NO: 2183560 - RNA, 19 nt, Artificial Sequence
  Description of Artificial Sequence: Synthetic oligonucleotide
ggucuauaacaaaauucug

SEQ ID NO: 2183561 - RNA, 19 nt, Artificial Sequence
  Description of Artificial Sequence: Synthetic oligonucleotide
gcgaauguauucuuggucu

SEQ ID NO: 2183562 - RNA, 19 nt, Artificial Sequence
  Description of Artificial Sequence: Synthetic oligonucleotide
aguuuacuaagugguguau

SEQ ID NO: 2183563 - RNA, 19 nt, Artificial Sequence
  Description of Artificial Sequence: Synthetic oligonucleotide
accaaauugcggcuuucua

SEQ ID NO: 2183564 - RNA, 19 nt, Artificial Sequence
  Description of Artificial Sequence: Synthetic oligonucleotide
aaucccugucguucacaau

SEQ ID NO: 2183565 - RNA, 19 nt, Artificial Sequence
  Description of Artificial Sequence: Synthetic oligonucleotide
aaauggggacagggaaaug

SEQ ID NO: 2183566 - RNA, 19 nt, Artificial Sequence
  Description of Artificial Sequence: Synthetic oligonucleotide
uggaguaaaguagcagguu

SEQ ID NO: 2183567 - RNA, 19 nt, Artificial Sequence
  Description of Artificial Sequence: Synthetic oligonucleotide
gccucauugacaaucccug

SEQ ID NO: 2183568 - RNA, 19 nt, Artificial Sequence
  Description of Artificial Sequence: Synthetic oligonucleotide
aaagcgcaauaugcuugug

SEQ ID NO: 2183569 - RNA, 19 nt, Artificial Sequence
  Description of Artificial Sequence: Synthetic oligonucleotide
ucguucacaauaggcuuuc

SEQ ID NO: 2183570 - RNA, 19 nt, Artificial Sequence
  Description of Artificial Sequence: Synthetic oligonucleotide
gugcaggugugucuguuuc

SEQ ID NO: 2183571 - RNA, 19 nt, Artificial Sequence
  Description of Artificial Sequence: Synthetic oligonucleotide
aagugguguaugccucuua

SEQ ID NO: 2183572 - RNA, 19 nt, Artificial Sequence
  Description of Artificial Sequence: Synthetic oligonucleotide
gaaccauccugccccgcca

SEQ ID NO: 2183573 - RNA, 19 nt, Artificial Sequence
  Description of Artificial Sequence: Synthetic oligonucleotide
auacuguaguagucaggau

SEQ ID NO: 2183574 - RNA, 19 nt, Artificial Sequence
  Description of Artificial Sequence: Synthetic oligonucleotide
gguuucucgucggccaugg

SEQ ID NO: 2183575 - RNA, 19 nt, Artificial Sequence
  Description of Artificial Sequence: Synthetic oligonucleotide
gaaugagcaugccacuaau

SEQ ID NO: 2183576 - RNA, 19 nt, Artificial Sequence
  Description of Artificial Sequence: Synthetic oligonucleotide
ugugcaggugugucuguuu

SEQ ID NO: 2183577 - RNA, 19 nt, Artificial Sequence
  Description of Artificial Sequence: Synthetic oligonucleotide
aaacugcaccacagaacca

SEQ ID NO: 2183578 - RNA, 19 nt, Artificial Sequence
  Description of Artificial Sequence: Synthetic oligonucleotide
auaugcuugugcacauaca

SEQ ID NO: 2183579 - RNA, 19 nt, Artificial Sequence
  Description of Artificial Sequence: Synthetic oligonucleotide
uccgcacggaaggagcaca

SEQ ID NO: 2183580 - RNA, 19 nt, Artificial Sequence
  Description of Artificial Sequence: Synthetic oligonucleotide
ggagcggcagaagaaggag

SEQ ID NO: 2183581 - RNA, 19 nt, Artificial Sequence
  Description of Artificial Sequence: Synthetic oligonucleotide
cauggcgagcgccggaguc

SEQ ID NO: 2183582 - RNA, 19 nt, Artificial Sequence
  Description of Artificial Sequence: Synthetic oligonucleotide
gaucguuguucucagucuu

SEQ ID NO: 2183583 - RNA, 19 nt, Artificial Sequence
  Description of Artificial Sequence: Synthetic oligonucleotide
ccaaauugcggcuuucuaa

SEQ ID NO: 2183584 - RNA, 19 nt, Artificial Sequence
  Description of Artificial Sequence: Synthetic oligonucleotide
caucaaaccggaaucugau

SEQ ID NO: 2183585 - RNA, 19 nt, Artificial Sequence
  Description of Artificial Sequence: Synthetic oligonucleotide
caaucccugucguucacaa

SEQ ID NO: 2183586 - RNA, 19 nt, Artificial Sequence
  Description of Artificial Sequence: Synthetic oligonucleotide
auguaacagcuacguacaa

SEQ ID NO: 2183587 - RNA, 19 nt, Artificial Sequence
  Description of Artificial Sequence: Synthetic oligonucleotide
ggugugucuguuucauuga

SEQ ID NO: 2183588 - RNA, 19 nt, Artificial Sequence
  Description of Artificial Sequence: Synthetic oligonucleotide
uggguuucucgucggccau

SEQ ID NO: 2183589 - RNA, 19 nt, Artificial Sequence
  Description of Artificial Sequence: Synthetic oligonucleotide
cugccucauugacaauccc

SEQ ID NO: 2183590 - RNA, 19 nt, Artificial Sequence
  Description of Artificial Sequence: Synthetic oligonucleotide
uccaacugugcaggugugu

SEQ ID NO: 2183591 - RNA, 19 nt, Artificial Sequence
  Description of Artificial Sequence: Synthetic oligonucleotide
cuuggucuauaacaaaauu

SEQ ID NO: 2183592 - RNA, 19 nt, Artificial Sequence
  Description of Artificial Sequence: Synthetic oligonucleotide
cuugacuccuuccuugggu

SEQ ID NO: 2183593 - RNA, 19 nt, Artificial Sequence
  Description of Artificial Sequence: Synthetic oligonucleotide
gccggguccgcacggaagg

SEQ ID NO: 2183594 - RNA, 19 nt, Artificial Sequence
  Description of Artificial Sequence: Synthetic oligonucleotide
aggcuuucauuaguuuacu

SEQ ID NO: 2183595 - RNA, 19 nt, Artificial Sequence
  Description of Artificial Sequence: Synthetic oligonucleotide
gcacacaggcagcaccagg

SEQ ID NO: 2183596 - RNA, 19 nt, Artificial Sequence
  Description of Artificial Sequence: Synthetic oligonucleotide
ucguaucuucauccuccau

SEQ ID NO: 2183597 - RNA, 19 nt, Artificial Sequence
  Description of Artificial Sequence: Synthetic oligonucleotide
ggggauauuuucacagaac

SEQ ID NO: 2183598 - RNA, 19 nt, Artificial Sequence
  Description of Artificial Sequence: Synthetic oligonucleotide
gcggcuuucuaauugcgaa

SEQ ID NO: 2183599 - RNA, 19 nt, Artificial Sequence
  Description of Artificial Sequence: Synthetic oligonucleotide
guuguuggauucuuuuguu

SEQ ID NO: 2183600 - RNA, 19 nt, Artificial Sequence
  Description of Artificial Sequence: Synthetic oligonucleotide
cuugugcacauacaccagu

SEQ ID NO: 2183601 - RNA, 19 nt, Artificial Sequence
  Description of Artificial Sequence: Synthetic oligonucleotide
guucacaauaggcuuucau

SEQ ID NO: 2183602 - RNA, 19 nt, Artificial Sequence
  Description of Artificial Sequence: Synthetic oligonucleotide
uagacaccuccugucugcu

SEQ ID NO: 2183603 - RNA, 19 nt, Artificial Sequence
  Description of Artificial Sequence: Synthetic oligonucleotide
guguaugccucuuaaucuu

SEQ ID NO: 2183604 - RNA, 19 nt, Artificial Sequence
  Description of Artificial Sequence: Synthetic oligonucleotide
agcaugccacuaauggaga

SEQ ID NO: 2183605 - RNA, 19 nt, Artificial Sequence
  Description of Artificial Sequence: Synthetic oligonucleotide
caauaggcuuucauuaguu

SEQ ID NO: 2183606 - RNA, 19 nt, Artificial Sequence
  Description of Artificial Sequence: Synthetic oligonucleotide
gucaaucaaaacagaacau

SEQ ID NO: 2183607 - RNA, 19 nt, Artificial Sequence
  Description of Artificial Sequence: Synthetic oligonucleotide
acugugcaggugugucugu

SEQ ID NO: 2183608 - RNA, 19 nt, Artificial Sequence
  Description of Artificial Sequence: Synthetic oligonucleotide
caagaguaauuuaccccua

SEQ ID NO: 2183609 - RNA, 19 nt, Artificial Sequence
  Description of Artificial Sequence: Synthetic oligonucleotide
uaagugguguaugccucuu

SEQ ID NO: 2183610 - RNA, 19 nt, Artificial Sequence
  Description of Artificial Sequence: Synthetic oligonucleotide
caugccacuaauggagaaa

SEQ ID NO: 2183611 - RNA, 19 nt, Artificial Sequence
  Description of Artificial Sequence: Synthetic oligonucleotide
ccaaucgaacaagguaugc

SEQ ID NO: 2183612 - RNA, 19 nt, Artificial Sequence
  Description of Artificial Sequence: Synthetic oligonucleotide
acgcuugacuugaagggaa

SEQ ID NO: 2183613 - RNA, 19 nt, Artificial Sequence
  Description of Artificial Sequence: Synthetic oligonucleotide
guccuugguuuuacaauga

SEQ ID NO: 2183614 - RNA, 19 nt, Artificial Sequence
  Description of Artificial Sequence: Synthetic oligonucleotide
cacagaccaucuccaucug

SEQ ID NO: 2183615 - RNA, 19 nt, Artificial Sequence
  Description of Artificial Sequence: Synthetic oligonucleotide
ccaguacuccccacagacc

SEQ ID NO: 2183616 - RNA, 19 nt, Artificial Sequence
  Description of Artificial Sequence: Synthetic oligonucleotide
guacuccccacagaccauc

SEQ ID NO: 2183617 - RNA, 19 nt, Artificial Sequence
  Description of Artificial Sequence: Synthetic oligonucleotide
gcuggaacacaucaaucgu

SEQ ID NO: 2183618 - RNA, 19 nt, Artificial Sequence
  Description of Artificial Sequence: Synthetic oligonucleotide
guggaaccaaauugcggcu

SEQ ID NO: 2183619 - RNA, 19 nt, Artificial Sequence
  Description of Artificial Sequence: Synthetic oligonucleotide
auggcgagcgccggagucu

SEQ ID NO: 2183620 - RNA, 19 nt, Artificial Sequence
  Description of Artificial Sequence: Synthetic oligonucleotide
ccaucugaugucaaucaaa

SEQ ID NO: 2183621 - RNA, 19 nt, Artificial Sequence
  Description of Artificial Sequence: Synthetic oligonucleotide
guaugccucuuaaucuuaa

SEQ ID NO: 2183622 - RNA, 19 nt, Artificial Sequence
  Description of Artificial Sequence: Synthetic oligonucleotide
ccggaaucugaucugccuc

SEQ ID NO: 2183623 - RNA, 19 nt, Artificial Sequence
  Description of Artificial Sequence: Synthetic oligonucleotide
gcuucacaaaagaggcgcc

SEQ ID NO: 2183624 - RNA, 19 nt, Artificial Sequence
  Description of Artificial Sequence: Synthetic oligonucleotide
cugaaugagcaugccacua

SEQ ID NO: 2183625 - RNA, 19 nt, Artificial Sequence
  Description of Artificial Sequence: Synthetic oligonucleotide
cuguaguagucaggaugug

SEQ ID NO: 2183626 - RNA, 19 nt, Artificial Sequence
  Description of Artificial Sequence: Synthetic oligonucleotide
guaaaguagcagguucccu

SEQ ID NO: 2183627 - RNA, 19 nt, Artificial Sequence
  Description of Artificial Sequence: Synthetic oligonucleotide
guuucucgucggccauggc

SEQ ID NO: 2183628 - RNA, 19 nt, Artificial Sequence
  Description of Artificial Sequence: Synthetic oligonucleotide
gcgcaauaugcuugugcac

SEQ ID NO: 2183629 - RNA, 19 nt, Artificial Sequence
  Description of Artificial Sequence: Synthetic oligonucleotide
caacugugcaggugugucu

SEQ ID NO: 2183630 - RNA, 19 nt, Artificial Sequence
  Description of Artificial Sequence: Synthetic oligonucleotide
ggguccgcacggaaggagc

SEQ ID NO: 2183631 - RNA, 19 nt, Artificial Sequence
  Description of Artificial Sequence: Synthetic oligonucleotide
ggcuuucauuaguuuacua

SEQ ID NO: 2183632 - RNA, 19 nt, Artificial Sequence
  Description of Artificial Sequence: Synthetic oligonucleotide
cauuggccauuuaguuuaa

SEQ ID NO: 2183633 - RNA, 19 nt, Artificial Sequence
  Description of Artificial Sequence: Synthetic oligonucleotide
gaaaacuaucuaggaucau

SEQ ID NO: 2183634 - RNA, 19 nt, Artificial Sequence
  Description of Artificial Sequence: Synthetic oligonucleotide
gcugaaugagcaugccacu

SEQ ID NO: 2183635 - RNA, 19 nt, Artificial Sequence
  Description of Artificial Sequence: Synthetic oligonucleotide
cccugucguucacaauagg

SEQ ID NO: 2183636 - RNA, 19 nt, Artificial Sequence
  Description of Artificial Sequence: Synthetic oligonucleotide
uggcgagcgccggagucuc

SEQ ID NO: 2183637 - RNA, 19 nt, Artificial Sequence
  Description of Artificial Sequence: Synthetic oligonucleotide
ccuuggguuucucgucggc

SEQ ID NO: 2183638 - RNA, 19 nt, Artificial Sequence
  Description of Artificial Sequence: Synthetic oligonucleotide
gugguguaugccucuuaau

SEQ ID NO: 2183639 - RNA, 19 nt, Artificial Sequence
  Description of Artificial Sequence: Synthetic oligonucleotide
cacaaaagaggcgccgggu

SEQ ID NO: 2183640 - RNA, 19 nt, Artificial Sequence
  Description of Artificial Sequence: Synthetic oligonucleotide
cccgccaccuucaaauuaa

SEQ ID NO: 2183641 - RNA, 19 nt, Artificial Sequence
  Description of Artificial Sequence: Synthetic oligonucleotide
cagcugccgcuucacaaaa

SEQ ID NO: 2183642 - RNA, 19 nt, Artificial Sequence
  Description of Artificial Sequence: Synthetic oligonucleotide
aagaggcgccggguccgca

SEQ ID NO: 2183643 - RNA, 19 nt, Artificial Sequence
  Description of Artificial Sequence: Synthetic oligonucleotide
cagaaccauccugccccgc

SEQ ID NO: 2183644 - RNA, 19 nt, Artificial Sequence
  Description of Artificial Sequence: Synthetic oligonucleotide
gguaugcaaggauuuuguu

SEQ ID NO: 2183645 - RNA, 19 nt, Artificial Sequence
  Description of Artificial Sequence: Synthetic oligonucleotide
gucguucacaauaggcuuu

SEQ ID NO: 2183646 - RNA, 19 nt, Artificial Sequence
  Description of Artificial Sequence: Synthetic oligonucleotide
cggaaucugaucugccuca

SEQ ID NO: 2183647 - RNA, 19 nt, Artificial Sequence
  Description of Artificial Sequence: Synthetic oligonucleotide
caauaugcuugugcacaua

SEQ ID NO: 2183648 - RNA, 19 nt, Artificial Sequence
  Description of Artificial Sequence: Synthetic oligonucleotide
guccgcacggaaggagcac

SEQ ID NO: 2183649 - RNA, 19 nt, Artificial Sequence
  Description of Artificial Sequence: Synthetic oligonucleotide
gcuugacuugaagggaaaa

SEQ ID NO: 2183650 - RNA, 19 nt, Artificial Sequence
  Description of Artificial Sequence: Synthetic oligonucleotide
gcacauacaccaguuacuu

SEQ ID NO: 2183651 - RNA, 19 nt, Artificial Sequence
  Description of Artificial Sequence: Synthetic oligonucleotide
gcagaagaaggaggcggca

SEQ ID NO: 2183652 - RNA, 19 nt, Artificial Sequence
  Description of Artificial Sequence: Synthetic oligonucleotide
cacauacaccaguuacuuu

SEQ ID NO: 2183653 - RNA, 19 nt, Artificial Sequence
  Description of Artificial Sequence: Synthetic oligonucleotide
gguccgcacggaaggagca

SEQ ID NO: 2183654 - RNA, 19 nt, Artificial Sequence
  Description of Artificial Sequence: Synthetic oligonucleotide
caagguaugcaaggauuuu

SEQ ID NO: 2183655 - RNA, 19 nt, Artificial Sequence
  Description of Artificial Sequence: Synthetic oligonucleotide
acaagacgcuugacuugaa

SEQ ID NO: 2183656 - RNA, 19 nt, Artificial Sequence
  Description of Artificial Sequence: Synthetic oligonucleotide
ccgcacggaaggagcacac

SEQ ID NO: 2183657 - RNA, 19 nt, Artificial Sequence
  Description of Artificial Sequence: Synthetic oligonucleotide
cggagucuccucagcugcc

SEQ ID NO: 2183658 - RNA, 19 nt, Artificial Sequence
  Description of Artificial Sequence: Synthetic oligonucleotide
gaucugccucauugacaau

SEQ ID NO: 2183659 - RNA, 19 nt, Artificial Sequence
  Description of Artificial Sequence: Synthetic oligonucleotide
ggaugugguggaaccaaau

SEQ ID NO: 2183660 - RNA, 19 nt, Artificial Sequence
  Description of Artificial Sequence: Synthetic oligonucleotide
cgaauguauucuuggucua

SEQ ID NO: 2183661 - RNA, 19 nt, Artificial Sequence
  Description of Artificial Sequence: Synthetic oligonucleotide
gcgccggagucuccucagc

SEQ ID NO: 2183662 - RNA, 19 nt, Artificial Sequence
  Description of Artificial Sequence: Synthetic oligonucleotide
caguuacuuuauguacaau

SEQ ID NO: 2183663 - RNA, 19 nt, Artificial Sequence
  Description of Artificial Sequence: Synthetic oligonucleotide
cccuacuuaaagacagauu

SEQ ID NO: 2183664 - RNA, 19 nt, Artificial Sequence
  Description of Artificial Sequence: Synthetic oligonucleotide
cgccggguccgcacggaag

SEQ ID NO: 2183665 - RNA, 19 nt, Artificial Sequence
  Description of Artificial Sequence: Synthetic oligonucleotide
cggguccgcacggaaggag

SEQ ID NO: 2183666 - RNA, 19 nt, Artificial Sequence
  Description of Artificial Sequence: Synthetic oligonucleotide
ccccuacuuaaagacagau

SEQ ID NO: 2183667 - RNA, 19 nt, Artificial Sequence
  Description of Artificial Sequence: Synthetic oligonucleotide
cgcuugacuugaagggaaa

SEQ ID NO: 2183668 - RNA, 19 nt, Artificial Sequence
  Description of Artificial Sequence: Synthetic oligonucleotide
ggcgagcgccggagucucc

SEQ ID NO: 2183669 - RNA, 19 nt, Artificial Sequence
  Description of Artificial Sequence: Synthetic oligonucleotide
gcgagcgccggagucuccu

SEQ ID NO: 2183670 - RNA, 19 nt, Artificial Sequence
  Description of Artificial Sequence: Synthetic oligonucleotide
cgagcgccggagucuccuc

SEQ ID NO: 2183671 - RNA, 19 nt, Artificial Sequence
  Description of Artificial Sequence: Synthetic oligonucleotide
gcgccggguccgcacggaa

SEQ ID NO: 2183672 - RNA, 19 nt, Artificial Sequence
  Description of Artificial Sequence: Synthetic oligonucleotide
ggcgccggguccgcacgga

SEQ ID NO: 2183673 - RNA, 19 nt, Artificial Sequence
  Description of Artificial Sequence: Synthetic oligonucleotide
cguucacaauaggcuuuca

SEQ ID NO: 2183674 - RNA, 19 nt, Artificial Sequence
  Description of Artificial Sequence: Synthetic oligonucleotide
gcccuacauguaacagcua

SEQ ID NO: 2183675 - RNA, 19 nt, Artificial Sequence
  Description of Artificial Sequence: Synthetic oligonucleotide
cgcacggaaggagcacaca

SEQ ID NO: 2183676 - RNA, 19 nt, Artificial Sequence
  Description of Artificial Sequence: Synthetic oligonucleotide
ccgccaccuucaaauuaau

SEQ ID NO: 2183677 - RNA, 19 nt, Artificial Sequence
  Description of Artificial Sequence: Synthetic oligonucleotide
ccggguccgcacggaagga

SEQ ID NO: 2183678 - RNA, 19 nt, Artificial Sequence
  Description of Artificial Sequence: Synthetic oligonucleotide
ccauggcgagcgccggagu

SEQ ID NO: 2183679 - RNA, 19 nt, Artificial Sequence
  Description of Artificial Sequence: Synthetic oligonucleotide
auuuagaacauccugaagc

SEQ ID NO: 2183680 - RNA, 19 nt, Artificial Sequence
  Description of Artificial Sequence: Synthetic oligonucleotide
aacagcaugacugugggcc

SEQ ID NO: 2183681 - RNA, 19 nt, Artificial Sequence
  Description of Artificial Sequence: Synthetic oligonucleotide
aauccaauuuagaacaucc

SEQ ID NO: 2183682 - RNA, 19 nt, Artificial Sequence
  Description of Artificial Sequence: Synthetic oligonucleotide
ucaaguuuagcauuaagca

SEQ ID NO: 2183683 - RNA, 19 nt, Artificial Sequence
  Description of Artificial Sequence: Synthetic oligonucleotide
auuuugggcagguaggucc

SEQ ID NO: 2183684 - RNA, 19 nt, Artificial Sequence
  Description of Artificial Sequence: Synthetic oligonucleotide
ucuuagaggauccauguag

SEQ ID NO: 2183685 - RNA, 19 nt, Artificial Sequence
  Description of Artificial Sequence: Synthetic oligonucleotide
uuuucgcuguccuagaggg

SEQ ID NO: 2183686 - RNA, 19 nt, Artificial Sequence
  Description of Artificial Sequence: Synthetic oligonucleotide
caaguauucaaacagcagc

SEQ ID NO: 2183687 - RNA, 19 nt, Artificial Sequence
  Description of Artificial Sequence: Synthetic oligonucleotide
aauuggugacaagugagcc

SEQ ID NO: 2183688 - RNA, 19 nt, Artificial Sequence
  Description of Artificial Sequence: Synthetic oligonucleotide
aaagggaacagcaugacug

SEQ ID NO: 2183689 - RNA, 19 nt, Artificial Sequence
  Description of Artificial Sequence: Synthetic oligonucleotide
guagucacaaaacaugggg

SEQ ID NO: 2183690 - RNA, 19 nt, Artificial Sequence
  Description of Artificial Sequence: Synthetic oligonucleotide
augguaaugacagagcuac

SEQ ID NO: 2183691 - RNA, 19 nt, Artificial Sequence
  Description of Artificial Sequence: Synthetic oligonucleotide
agaggggccagauuaaagc

SEQ ID NO: 2183692 - RNA, 19 nt, Artificial Sequence
  Description of Artificial Sequence: Synthetic oligonucleotide
cauguagcaauucacagag

SEQ ID NO: 2183693 - RNA, 19 nt, Artificial Sequence
  Description of Artificial Sequence: Synthetic oligonucleotide
uuagauuuauuuugggcag

SEQ ID NO: 2183694 - RNA, 19 nt, Artificial Sequence
  Description of Artificial Sequence: Synthetic oligonucleotide
aaucagagcucucuggaag

SEQ ID NO: 2183695 - RNA, 19 nt, Artificial Sequence
  Description of Artificial Sequence: Synthetic oligonucleotide
uuuucuagcugacacaagu

SEQ ID NO: 2183696 - RNA, 19 nt, Artificial Sequence
  Description of Artificial Sequence: Synthetic oligonucleotide
auguccauaccauacuggc

SEQ ID NO: 2183697 - RNA, 19 nt, Artificial Sequence
  Description of Artificial Sequence: Synthetic oligonucleotide
aaguuuagcauuaagcaga

SEQ ID NO: 2183698 - RNA, 19 nt, Artificial Sequence
  Description of Artificial Sequence: Synthetic oligonucleotide
aacagaauuggugacaagu

SEQ ID NO: 2183699 - RNA, 19 nt, Artificial Sequence
  Description of Artificial Sequence: Synthetic oligonucleotide
auuccuaaaagggaacagc

SEQ ID NO: 2183700 - RNA, 19 nt, Artificial Sequence
  Description of Artificial Sequence: Synthetic oligonucleotide
gaaaggauucuccauaguc

SEQ ID NO: 2183701 - RNA, 19 nt, Artificial Sequence
  Description of Artificial Sequence: Synthetic oligonucleotide
gauuaaagcaguugccagc

SEQ ID NO: 2183702 - RNA, 19 nt, Artificial Sequence
  Description of Artificial Sequence: Synthetic oligonucleotide
cugaauccaauuuagaaca

SEQ ID NO: 2183703 - RNA, 19 nt, Artificial Sequence
  Description of Artificial Sequence: Synthetic oligonucleotide
cagacguccacugugaucg

SEQ ID NO: 2183704 - RNA, 19 nt, Artificial Sequence
  Description of Artificial Sequence: Synthetic oligonucleotide
caaguuuagcauuaagcag

SEQ ID NO: 2183705 - RNA, 19 nt, Artificial Sequence
  Description of Artificial Sequence: Synthetic oligonucleotide
uuccuaaaagggaacagca

SEQ ID NO: 2183706 - RNA, 19 nt, Artificial Sequence
  Description of Artificial Sequence: Synthetic oligonucleotide
uuugcagacguccacugug

SEQ ID NO: 2183707 - RNA, 19 nt, Artificial Sequence
  Description of Artificial Sequence: Synthetic oligonucleotide
uuuuguacccauagaaccu

SEQ ID NO: 2183708 - RNA, 19 nt, Artificial Sequence
  Description of Artificial Sequence: Synthetic oligonucleotide
uuaagcagaggacugugga

SEQ ID NO: 2183709 - RNA, 19 nt, Artificial Sequence
  Description of Artificial Sequence: Synthetic oligonucleotide
agauuaaagcaguugccag

SEQ ID NO: 2183710 - RNA, 19 nt, Artificial Sequence
  Description of Artificial Sequence: Synthetic oligonucleotide
cauacuggcgcaaagcaac

SEQ ID NO: 2183711 - RNA, 19 nt, Artificial Sequence
  Description of Artificial Sequence: Synthetic oligonucleotide
uccauguagcaauucacag

SEQ ID NO: 2183712 - RNA, 19 nt, Artificial Sequence
  Description of Artificial Sequence: Synthetic oligonucleotide
gucaaguuuagcauuaagc

SEQ ID NO: 2183713 - RNA, 19 nt, Artificial Sequence
  Description of Artificial Sequence: Synthetic oligonucleotide
aaguggccaucccaugucc

SEQ ID NO: 2183714 - RNA, 19 nt, Artificial Sequence
  Description of Artificial Sequence: Synthetic oligonucleotide
agguccauauuccuaaaag

SEQ ID NO: 2183715 - RNA, 19 nt, Artificial Sequence
  Description of Artificial Sequence: Synthetic oligonucleotide
guuucauuugccgaugagg

SEQ ID NO: 2183716 - RNA, 19 nt, Artificial Sequence
  Description of Artificial Sequence: Synthetic oligonucleotide
cuuagaggauccauguagc

SEQ ID NO: 2183717 - RNA, 19 nt, Artificial Sequence
  Description of Artificial Sequence: Synthetic oligonucleotide
guccauaccauacuggcgc

SEQ ID NO: 2183718 - RNA, 19 nt, Artificial Sequence
  Description of Artificial Sequence: Synthetic oligonucleotide
aguucuugcaggcuugaag

SEQ ID NO: 2183719 - RNA, 19 nt, Artificial Sequence
  Description of Artificial Sequence: Synthetic oligonucleotide
ucuuagacuucccugugga

SEQ ID NO: 2183720 - RNA, 19 nt, Artificial Sequence
  Description of Artificial Sequence: Synthetic oligonucleotide
aaguauucaaacagcagcu

SEQ ID NO: 2183721 - RNA, 19 nt, Artificial Sequence
  Description of Artificial Sequence: Synthetic oligonucleotide
uagucacaaaacaugggga

SEQ ID NO: 2183722 - RNA, 19 nt, Artificial Sequence
  Description of Artificial Sequence: Synthetic oligonucleotide
uacccauagaaccugcugu

SEQ ID NO: 2183723 - RNA, 19 nt, Artificial Sequence
  Description of Artificial Sequence: Synthetic oligonucleotide
ugagauggagucuuagacu

SEQ ID NO: 2183724 - RNA, 19 nt, Artificial Sequence
  Description of Artificial Sequence: Synthetic oligonucleotide
uguccauaccauacuggcg

SEQ ID NO: 2183725 - RNA, 19 nt, Artificial Sequence
  Description of Artificial Sequence: Synthetic oligonucleotide
ucuuguucgaguucuugca

SEQ ID NO: 2183726 - RNA, 19 nt, Artificial Sequence
  Description of Artificial Sequence: Synthetic oligonucleotide
auguagucacaaaacaugg

SEQ ID NO: 2183727 - RNA, 19 nt, Artificial Sequence
  Description of Artificial Sequence: Synthetic oligonucleotide
cauagaaccugcugugucc

SEQ ID NO: 2183728 - RNA, 19 nt, Artificial Sequence
  Description of Artificial Sequence: Synthetic oligonucleotide
ucauuugccgaugaggacu

SEQ ID NO: 2183729 - RNA, 19 nt, Artificial Sequence
  Description of Artificial Sequence: Synthetic oligonucleotide
aaccagaaaggauucucca

SEQ ID NO: 2183730 - RNA, 19 nt, Artificial Sequence
  Description of Artificial Sequence: Synthetic oligonucleotide
agaauuggugacaagugag

SEQ ID NO: 2183731 - RNA, 19 nt, Artificial Sequence
  Description of Artificial Sequence: Synthetic oligonucleotide
ugccuuuucuagcugacac

SEQ ID NO: 2183732 - RNA, 19 nt, Artificial Sequence
  Description of Artificial Sequence: Synthetic oligonucleotide
uuagacuucccuguggaga

SEQ ID NO: 2183733 - RNA, 19 nt, Artificial Sequence
  Description of Artificial Sequence: Synthetic oligonucleotide
agucuuagaggauccaugu

SEQ ID NO: 2183734 - RNA, 19 nt, Artificial Sequence
  Description of Artificial Sequence: Synthetic oligonucleotide
cauccugaagcucuugugc

SEQ ID NO: 2183735 - RNA, 19 nt, Artificial Sequence
  Description of Artificial Sequence: Synthetic oligonucleotide
cuaaaagggaacagcauga

SEQ ID NO: 2183736 - RNA, 19 nt, Artificial Sequence
  Description of Artificial Sequence: Synthetic oligonucleotide
agaggauccauguagcaau

SEQ ID NO: 2183737 - RNA, 19 nt, Artificial Sequence
  Description of Artificial Sequence: Synthetic oligonucleotide
agcuguuucacgagcaggc

SEQ ID NO: 2183738 - RNA, 19 nt, Artificial Sequence
  Description of Artificial Sequence: Synthetic oligonucleotide
agagauggggacugcauug

SEQ ID NO: 2183739 - RNA, 19 nt, Artificial Sequence
  Description of Artificial Sequence: Synthetic oligonucleotide
ugugggccgcucuuuaugg

SEQ ID NO: 2183740 - RNA, 19 nt, Artificial Sequence
  Description of Artificial Sequence: Synthetic oligonucleotide
aaauccucugccuccgaca

SEQ ID NO: 2183741 - RNA, 19 nt, Artificial Sequence
  Description of Artificial Sequence: Synthetic oligonucleotide
aggugggcccucuagaguc

SEQ ID NO: 2183742 - RNA, 19 nt, Artificial Sequence
  Description of Artificial Sequence: Synthetic oligonucleotide
uuucccgagggucugagau

SEQ ID NO: 2183743 - RNA, 19 nt, Artificial Sequence
  Description of Artificial Sequence: Synthetic oligonucleotide
uuuauggcaucgcuuugca

SEQ ID NO: 2183744 - RNA, 19 nt, Artificial Sequence
  Description of Artificial Sequence: Synthetic oligonucleotide
auaaaggugucaaacuuug

SEQ ID NO: 2183745 - RNA, 19 nt, Artificial Sequence
  Description of Artificial Sequence: Synthetic oligonucleotide
uauuccuaaaagggaacag

SEQ ID NO: 2183746 - RNA, 19 nt, Artificial Sequence
  Description of Artificial Sequence: Synthetic oligonucleotide
gaaggaauaggcaggacuc

SEQ ID NO: 2183747 - RNA, 19 nt, Artificial Sequence
  Description of Artificial Sequence: Synthetic oligonucleotide
auggcaucgcuuugcagac

SEQ ID NO: 2183748 - RNA, 19 nt, Artificial Sequence
  Description of Artificial Sequence: Synthetic oligonucleotide
gauggagucuuagacuucc

SEQ ID NO: 2183749 - RNA, 19 nt, Artificial Sequence
  Description of Artificial Sequence: Synthetic oligonucleotide
uguuucacgagcaggcaaa

SEQ ID NO: 2183750 - RNA, 19 nt, Artificial Sequence
  Description of Artificial Sequence: Synthetic oligonucleotide
acugugaucgggauuuucg

SEQ ID NO: 2183751 - RNA, 19 nt, Artificial Sequence
  Description of Artificial Sequence: Synthetic oligonucleotide
caaccagaaaggauucucc

SEQ ID NO: 2183752 - RNA, 19 nt, Artificial Sequence
  Description of Artificial Sequence: Synthetic oligonucleotide
uguucgaguucuugcaggc

SEQ ID NO: 2183753 - RNA, 19 nt, Artificial Sequence
  Description of Artificial Sequence: Synthetic oligonucleotide
aagggaacagcaugacugu

SEQ ID NO: 2183754 - RNA, 19 nt, Artificial Sequence
  Description of Artificial Sequence: Synthetic oligonucleotide
cuggcagauucacugagcc

SEQ ID NO: 2183755 - RNA, 19 nt, Artificial Sequence
  Description of Artificial Sequence: Synthetic oligonucleotide
cauggguucuggcagauuc

SEQ ID NO: 2183756 - RNA, 19 nt, Artificial Sequence
  Description of Artificial Sequence: Synthetic oligonucleotide
uccgacagcuguuucacga

SEQ ID NO: 2183757 - RNA, 19 nt, Artificial Sequence
  Description of Artificial Sequence: Synthetic oligonucleotide
aguccuuuucccgaggguc

SEQ ID NO: 2183758 - RNA, 19 nt, Artificial Sequence
  Description of Artificial Sequence: Synthetic oligonucleotide
ucacaaaacauggggauaa

SEQ ID NO: 2183759 - RNA, 19 nt, Artificial Sequence
  Description of Artificial Sequence: Synthetic oligonucleotide
gccagauuaaagcaguugc

SEQ ID NO: 2183760 - RNA, 19 nt, Artificial Sequence
  Description of Artificial Sequence: Synthetic oligonucleotide
uagcauuaagcagaggacu

SEQ ID NO: 2183761 - RNA, 19 nt, Artificial Sequence
  Description of Artificial Sequence: Synthetic oligonucleotide
gaauuggugacaagugagc

SEQ ID NO: 2183762 - RNA, 19 nt, Artificial Sequence
  Description of Artificial Sequence: Synthetic oligonucleotide
aauaggcaggacucaggca

SEQ ID NO: 2183763 - RNA, 19 nt, Artificial Sequence
  Description of Artificial Sequence: Synthetic oligonucleotide
auagucuuguucgaguucu

SEQ ID NO: 2183764 - RNA, 19 nt, Artificial Sequence
  Description of Artificial Sequence: Synthetic oligonucleotide
gauuuucgcuguccuagag

SEQ ID NO: 2183765 - RNA, 19 nt, Artificial Sequence
  Description of Artificial Sequence: Synthetic oligonucleotide
cucuagaguccuuuucccg

SEQ ID NO: 2183766 - RNA, 19 nt, Artificial Sequence
  Description of Artificial Sequence: Synthetic oligonucleotide
uuagaggauccauguagca

SEQ ID NO: 2183767 - RNA, 19 nt, Artificial Sequence
  Description of Artificial Sequence: Synthetic oligonucleotide
ucccauguccauaccauac

SEQ ID NO: 2183768 - RNA, 19 nt, Artificial Sequence
  Description of Artificial Sequence: Synthetic oligonucleotide
uagacuucccuguggagac

SEQ ID NO: 2183769 - RNA, 19 nt, Artificial Sequence
  Description of Artificial Sequence: Synthetic oligonucleotide
aggguuagauuuauuuugg

SEQ ID NO: 2183770 - RNA, 19 nt, Artificial Sequence
  Description of Artificial Sequence: Synthetic oligonucleotide
cacaaguauucaaacagca

SEQ ID NO: 2183771 - RNA, 19 nt, Artificial Sequence
  Description of Artificial Sequence: Synthetic oligonucleotide
agaguccuuuucccgaggg

SEQ ID NO: 2183772 - RNA, 19 nt, Artificial Sequence
  Description of Artificial Sequence: Synthetic oligonucleotide
accauacuggcgcaaagca

SEQ ID NO: 2183773 - RNA, 19 nt, Artificial Sequence
  Description of Artificial Sequence: Synthetic oligonucleotide
uagauuuauuuugggcagg

SEQ ID NO: 2183774 - RNA, 19 nt, Artificial Sequence
  Description of Artificial Sequence: Synthetic oligonucleotide
aaccugcuguguccagucc

SEQ ID NO: 2183775 - RNA, 19 nt, Artificial Sequence
  Description of Artificial Sequence: Synthetic oligonucleotide
uucacugagccagaaucag

SEQ ID NO: 2183776 - RNA, 19 nt, Artificial Sequence
  Description of Artificial Sequence: Synthetic oligonucleotide
ucuagcugacacaaguauu

SEQ ID NO: 2183777 - RNA, 19 nt, Artificial Sequence
  Description of Artificial Sequence: Synthetic oligonucleotide
aggacucaggcauguaguc

SEQ ID NO: 2183778 - RNA, 19 nt, Artificial Sequence
  Description of Artificial Sequence: Synthetic oligonucleotide
gugaucgggauuuucgcug

SEQ ID NO: 2183779 - RNA, 19 nt, Artificial Sequence
  Description of Artificial Sequence: Synthetic oligonucleotide
uccauagucuuguucgagu

SEQ ID NO: 2183780 - RNA, 19 nt, Artificial Sequence
  Description of Artificial Sequence: Synthetic oligonucleotide
ugugaucgggauuuucgcu

SEQ ID NO: 2183781 - RNA, 19 nt, Artificial Sequence
  Description of Artificial Sequence: Synthetic oligonucleotide
uggagugcugguuucauuu

SEQ ID NO: 2183782 - RNA, 19 nt, Artificial Sequence
  Description of Artificial Sequence: Synthetic oligonucleotide
ucuuuauggcaucgcuuug

SEQ ID NO: 2183783 - RNA, 19 nt, Artificial Sequence
  Description of Artificial Sequence: Synthetic oligonucleotide
cuuguucgaguucuugcag

SEQ ID NO: 2183784 - RNA, 19 nt, Artificial Sequence
  Description of Artificial Sequence: Synthetic oligonucleotide
aggcagugccuuuucuagc

SEQ ID NO: 2183785 - RNA, 19 nt, Artificial Sequence
  Description of Artificial Sequence: Synthetic oligonucleotide
uuucuagcugacacaagua

SEQ ID NO: 2183786 - RNA, 19 nt, Artificial Sequence
  Description of Artificial Sequence: Synthetic oligonucleotide
gaggacuccguuccauggg

SEQ ID NO: 2183787 - RNA, 19 nt, Artificial Sequence
  Description of Artificial Sequence: Synthetic oligonucleotide
aguugccagcuacauguuc

SEQ ID NO: 2183788 - RNA, 19 nt, Artificial Sequence
  Description of Artificial Sequence: Synthetic oligonucleotide
ugagccagaaucagagcuc

SEQ ID NO: 2183789 - RNA, 19 nt, Artificial Sequence
  Description of Artificial Sequence: Synthetic oligonucleotide
acaaguauucaaacagcag

SEQ ID NO: 2183790 - RNA, 19 nt, Artificial Sequence
  Description of Artificial Sequence: Synthetic oligonucleotide
ccuaaaagggaacagcaug

SEQ ID NO: 2183791 - RNA, 19 nt, Artificial Sequence
  Description of Artificial Sequence: Synthetic oligonucleotide
cugugaucgggauuuucgc

SEQ ID NO: 2183792 - RNA, 19 nt, Artificial Sequence
  Description of Artificial Sequence: Synthetic oligonucleotide
uugugcucugacuguaggc

SEQ ID NO: 2183793 - RNA, 19 nt, Artificial Sequence
  Description of Artificial Sequence: Synthetic oligonucleotide
aagccggucggugaagguc

SEQ ID NO: 2183794 - RNA, 19 nt, Artificial Sequence
  Description of Artificial Sequence: Synthetic oligonucleotide
uggagucuuagacuucccu

SEQ ID NO: 2183795 - RNA, 19 nt, Artificial Sequence
  Description of Artificial Sequence: Synthetic oligonucleotide
gagugcugguuucauuugc

SEQ ID NO: 2183796 - RNA, 19 nt, Artificial Sequence
  Description of Artificial Sequence: Synthetic oligonucleotide
uucuugcaggcuugaagcc

SEQ ID NO: 2183797 - RNA, 19 nt, Artificial Sequence
  Description of Artificial Sequence: Synthetic oligonucleotide
caaaaucuuccugucuugc

SEQ ID NO: 2183798 - RNA, 19 nt, Artificial Sequence
  Description of Artificial Sequence: Synthetic oligonucleotide
uucgaguucuugcaggcuu

SEQ ID NO: 2183799 - RNA, 19 nt, Artificial Sequence
  Description of Artificial Sequence: Synthetic oligonucleotide
ugcugguuucauuugccga

SEQ ID NO: 2183800 - RNA, 19 nt, Artificial Sequence
  Description of Artificial Sequence: Synthetic oligonucleotide
auauuccuaaaagggaaca

SEQ ID NO: 2183801 - RNA, 19 nt, Artificial Sequence
  Description of Artificial Sequence: Synthetic oligonucleotide
gagucuuagaggauccaug

SEQ ID NO: 2183802 - RNA, 19 nt, Artificial Sequence
  Description of Artificial Sequence: Synthetic oligonucleotide
acagcaugacugugggccg

SEQ ID NO: 2183803 - RNA, 19 nt, Artificial Sequence
  Description of Artificial Sequence: Synthetic oligonucleotide
gucuuagacuucccugugg

SEQ ID NO: 2183804 - RNA, 19 nt, Artificial Sequence
  Description of Artificial Sequence: Synthetic oligonucleotide
auuaagcagaggacugugg

SEQ ID NO: 2183805 - RNA, 19 nt, Artificial Sequence
  Description of Artificial Sequence: Synthetic oligonucleotide
uucccgugaagccggucgg

SEQ ID NO: 2183806 - RNA, 19 nt, Artificial Sequence
  Description of Artificial Sequence: Synthetic oligonucleotide
agcuacauguuccgggugu

SEQ ID NO: 2183807 - RNA, 19 nt, Artificial Sequence
  Description of Artificial Sequence: Synthetic oligonucleotide
gagauggggacugcauugg

SEQ ID NO: 2183808 - RNA, 19 nt, Artificial Sequence
  Description of Artificial Sequence: Synthetic oligonucleotide
auggcaaccagaaaggauu

SEQ ID NO: 2183809 - RNA, 19 nt, Artificial Sequence
  Description of Artificial Sequence: Synthetic oligonucleotide
uaaaagggaacagcaugac

SEQ ID NO: 2183810 - RNA, 19 nt, Artificial Sequence
  Description of Artificial Sequence: Synthetic oligonucleotide
aucgggauuuucgcugucc

SEQ ID NO: 2183811 - RNA, 19 nt, Artificial Sequence
  Description of Artificial Sequence: Synthetic oligonucleotide
ucgaguucuugcaggcuug

SEQ ID NO: 2183812 - RNA, 19 nt, Artificial Sequence
  Description of Artificial Sequence: Synthetic oligonucleotide
auaccauacuggcgcaaag

SEQ ID NO: 2183813 - RNA, 19 nt, Artificial Sequence
  Description of Artificial Sequence: Synthetic oligonucleotide
aguuuagcauuaagcagag

SEQ ID NO: 2183814 - RNA, 19 nt, Artificial Sequence
  Description of Artificial Sequence: Synthetic oligonucleotide
ggagucuuagacuucccug

SEQ ID NO: 2183815 - RNA, 19 nt, Artificial Sequence
  Description of Artificial Sequence: Synthetic oligonucleotide
cucuucccuguguuuaggg

SEQ ID NO: 2183816 - RNA, 19 nt, Artificial Sequence
  Description of Artificial Sequence: Synthetic oligonucleotide
caucgcuuugcagacgucc

SEQ ID NO: 2183817 - RNA, 19 nt, Artificial Sequence
  Description of Artificial Sequence: Synthetic oligonucleotide
uaccauacuggcgcaaagc

SEQ ID NO: 2183818 - RNA, 19 nt, Artificial Sequence
  Description of Artificial Sequence: Synthetic oligonucleotide
uucauuugccgaugaggac

SEQ ID NO: 2183819 - RNA, 19 nt, Artificial Sequence
  Description of Artificial Sequence: Synthetic oligonucleotide
gagcuacacagagaugggg

SEQ ID NO: 2183820 - RNA, 19 nt, Artificial Sequence
  Description of Artificial Sequence: Synthetic oligonucleotide
aguccccuaugguaaugac

SEQ ID NO: 2183821 - RNA, 19 nt, Artificial Sequence
  Description of Artificial Sequence: Synthetic oligonucleotide
gaggggccagauuaaagca

SEQ ID NO: 2183822 - RNA, 19 nt, Artificial Sequence
  Description of Artificial Sequence: Synthetic oligonucleotide
uagaguccuuuucccgagg

SEQ ID NO: 2183823 - RNA, 19 nt, Artificial Sequence
  Description of Artificial Sequence: Synthetic oligonucleotide
ucuucccuguguuuagggu

SEQ ID NO: 2183824 - RNA, 19 nt, Artificial Sequence
  Description of Artificial Sequence: Synthetic oligonucleotide
acuggcgcaaagcaacaga

SEQ ID NO: 2183825 - RNA, 19 nt, Artificial Sequence
  Description of Artificial Sequence: Synthetic oligonucleotide
uuauggcaucgcuuugcag

SEQ ID NO: 2183826 - RNA, 19 nt, Artificial Sequence
  Description of Artificial Sequence: Synthetic oligonucleotide
agcauuaagcagaggacug

SEQ ID NO: 2183827 - RNA, 19 nt, Artificial Sequence
  Description of Artificial Sequence: Synthetic oligonucleotide
guacccauagaaccugcug

SEQ ID NO: 2183828 - RNA, 19 nt, Artificial Sequence
  Description of Artificial Sequence: Synthetic oligonucleotide
aaagcaguugccagcuaca

SEQ ID NO: 2183829 - RNA, 19 nt, Artificial Sequence
  Description of Artificial Sequence: Synthetic oligonucleotide
gggauuuucgcuguccuag

SEQ ID NO: 2183830 - RNA, 19 nt, Artificial Sequence
  Description of Artificial Sequence: Synthetic oligonucleotide
agucuuagacuucccugug

SEQ ID NO: 2183831 - RNA, 19 nt, Artificial Sequence
  Description of Artificial Sequence: Synthetic oligonucleotide
uugcagacguccacuguga

SEQ ID NO: 2183832 - RNA, 19 nt, Artificial Sequence
  Description of Artificial Sequence: Synthetic oligonucleotide
aaauuuucccgcgcuucca

SEQ ID NO: 2183833 - RNA, 19 nt, Artificial Sequence
  Description of Artificial Sequence: Synthetic oligonucleotide
ugguuucuuggcuccagga

SEQ ID NO: 2183834 - RNA, 19 nt, Artificial Sequence
  Description of Artificial Sequence: Synthetic oligonucleotide
ucgggauuuucgcuguccu

SEQ ID NO: 2183835 - RNA, 19 nt, Artificial Sequence
  Description of Artificial Sequence: Synthetic oligonucleotide
uguacccauagaaccugcu

SEQ ID NO: 2183836 - RNA, 19 nt, Artificial Sequence
  Description of Artificial Sequence: Synthetic oligonucleotide
uuuucccgcgcuuccaaaa

SEQ ID NO: 2183837 - RNA, 19 nt, Artificial Sequence
  Description of Artificial Sequence: Synthetic oligonucleotide
ugcugcaucugagucaggu

SEQ ID NO: 2183838 - RNA, 19 nt, Artificial Sequence
  Description of Artificial Sequence: Synthetic oligonucleotide
ugaucgggauuuucgcugu

SEQ ID NO: 2183839 - RNA, 19 nt, Artificial Sequence
  Description of Artificial Sequence: Synthetic oligonucleotide
aggugucaaacuuugucuu

SEQ ID NO: 2183840 - RNA, 19 nt, Artificial Sequence
  Description of Artificial Sequence: Synthetic oligonucleotide
gaauccaauuuagaacauc

SEQ ID NO: 2183841 - RNA, 19 nt, Artificial Sequence
  Description of Artificial Sequence: Synthetic oligonucleotide
gaagcucuugugcucugac

SEQ ID NO: 2183842 - RNA, 19 nt, Artificial Sequence
  Description of Artificial Sequence: Synthetic oligonucleotide
ccagauuaaagcaguugcc

SEQ ID NO: 2183843 - RNA, 19 nt, Artificial Sequence
  Description of Artificial Sequence: Synthetic oligonucleotide
gaaguggccaucccauguc

SEQ ID NO: 2183844 - RNA, 19 nt, Artificial Sequence
  Description of Artificial Sequence: Synthetic oligonucleotide
caguccaugcucuucccug

SEQ ID NO: 2183845 - RNA, 19 nt, Artificial Sequence
  Description of Artificial Sequence: Synthetic oligonucleotide
uagaggauccauguagcaa

SEQ ID NO: 2183846 - RNA, 19 nt, Artificial Sequence
  Description of Artificial Sequence: Synthetic oligonucleotide
cagaauuggugacaaguga

SEQ ID NO: 2183847 - RNA, 19 nt, Artificial Sequence
  Description of Artificial Sequence: Synthetic oligonucleotide
gcgacaaugagagucuuag

SEQ ID NO: 2183848 - RNA, 19 nt, Artificial Sequence
  Description of Artificial Sequence: Synthetic oligonucleotide
cauuaagcagaggacugug

SEQ ID NO: 2183849 - RNA, 19 nt, Artificial Sequence
  Description of Artificial Sequence: Synthetic oligonucleotide
ggcagguagguccauauuc

SEQ ID NO: 2183850 - RNA, 19 nt, Artificial Sequence
  Description of Artificial Sequence: Synthetic oligonucleotide
ugguuucauuugccgauga

SEQ ID NO: 2183851 - RNA, 19 nt, Artificial Sequence
  Description of Artificial Sequence: Synthetic oligonucleotide
agauuuauuuugggcaggu

SEQ ID NO: 2183852 - RNA, 19 nt, Artificial Sequence
  Description of Artificial Sequence: Synthetic oligonucleotide
agaaaggauucuccauagu

SEQ ID NO: 2183853 - RNA, 19 nt, Artificial Sequence
  Description of Artificial Sequence: Synthetic oligonucleotide
cuaugguaaugacagagcu

SEQ ID NO: 2183854 - RNA, 19 nt, Artificial Sequence
  Description of Artificial Sequence: Synthetic oligonucleotide
cuuuucuagcugacacaag

SEQ ID NO: 2183855 - RNA, 19 nt, Artificial Sequence
  Description of Artificial Sequence: Synthetic oligonucleotide
ggaggcgacaaugagaguc

SEQ ID NO: 2183856 - RNA, 19 nt, Artificial Sequence
  Description of Artificial Sequence: Synthetic oligonucleotide
ggguuagauuuauuuuggg

SEQ ID NO: 2183857 - RNA, 19 nt, Artificial Sequence
  Description of Artificial Sequence: Synthetic oligonucleotide
gguagguccauauuccuaa

SEQ ID NO: 2183858 - RNA, 19 nt, Artificial Sequence
  Description of Artificial Sequence: Synthetic oligonucleotide
augaggacuccguuccaug

SEQ ID NO: 2183859 - RNA, 19 nt, Artificial Sequence
  Description of Artificial Sequence: Synthetic oligonucleotide
agcagaggacuguggagug

SEQ ID NO: 2183860 - RNA, 19 nt, Artificial Sequence
  Description of Artificial Sequence: Synthetic oligonucleotide
cauuugccgaugaggacuc

SEQ ID NO: 2183861 - RNA, 19 nt, Artificial Sequence
  Description of Artificial Sequence: Synthetic oligonucleotide
gaaccugcuguguccaguc

SEQ ID NO: 2183862 - RNA, 19 nt, Artificial Sequence
  Description of Artificial Sequence: Synthetic oligonucleotide
uguuuaggguuagauuuau

SEQ ID NO: 2183863 - RNA, 19 nt, Artificial Sequence
  Description of Artificial Sequence: Synthetic oligonucleotide
ugggccgcucuuuauggca

SEQ ID NO: 2183864 - RNA, 19 nt, Artificial Sequence
  Description of Artificial Sequence: Synthetic oligonucleotide
ccuaugguaaugacagagc

SEQ ID NO: 2183865 - RNA, 19 nt, Artificial Sequence
  Description of Artificial Sequence: Synthetic oligonucleotide
cauagucuuguucgaguuc

SEQ ID NO: 2183866 - RNA, 19 nt, Artificial Sequence
  Description of Artificial Sequence: Synthetic oligonucleotide
cuuggcuccaggaggcgac

SEQ ID NO: 2183867 - RNA, 19 nt, Artificial Sequence
  Description of Artificial Sequence: Synthetic oligonucleotide
ugcucugacuguaggcagu

SEQ ID NO: 2183868 - RNA, 19 nt, Artificial Sequence
  Description of Artificial Sequence: Synthetic oligonucleotide
gccagcuacauguuccggg

SEQ ID NO: 2183869 - RNA, 19 nt, Artificial Sequence
  Description of Artificial Sequence: Synthetic oligonucleotide
agugccuuuucuagcugac

SEQ ID NO: 2183870 - RNA, 19 nt, Artificial Sequence
  Description of Artificial Sequence: Synthetic oligonucleotide
aaggucaaguuuagcauua

SEQ ID NO: 2183871 - RNA, 19 nt, Artificial Sequence
  Description of Artificial Sequence: Synthetic oligonucleotide
agcaacagaauuggugaca

SEQ ID NO: 2183872 - RNA, 19 nt, Artificial Sequence
  Description of Artificial Sequence: Synthetic oligonucleotide
ggucaaguuuagcauuaag

SEQ ID NO: 2183873 - RNA, 19 nt, Artificial Sequence
  Description of Artificial Sequence: Synthetic oligonucleotide
gaaucagagcucucuggaa

SEQ ID NO: 2183874 - RNA, 19 nt, Artificial Sequence
  Description of Artificial Sequence: Synthetic oligonucleotide
auagaaccugcugugucca

SEQ ID NO: 2183875 - RNA, 19 nt, Artificial Sequence
  Description of Artificial Sequence: Synthetic oligonucleotide
agagcuacacagagauggg

SEQ ID NO: 2183876 - RNA, 19 nt, Artificial Sequence
  Description of Artificial Sequence: Synthetic oligonucleotide
aggacuccguuccaugggu

SEQ ID NO: 2183877 - RNA, 19 nt, Artificial Sequence
  Description of Artificial Sequence: Synthetic oligonucleotide
uuucccgcgcuuccaaaau

SEQ ID NO: 2183878 - RNA, 19 nt, Artificial Sequence
  Description of Artificial Sequence: Synthetic oligonucleotide
ucucuggaaguggccaucc

SEQ ID NO: 2183879 - RNA, 19 nt, Artificial Sequence
  Description of Artificial Sequence: Synthetic oligonucleotide
ucccuguggagacuguuuu

SEQ ID NO: 2183880 - RNA, 19 nt, Artificial Sequence
  Description of Artificial Sequence: Synthetic oligonucleotide
accaaguccccuaugguaa

SEQ ID NO: 2183881 - RNA, 19 nt, Artificial Sequence
  Description of Artificial Sequence: Synthetic oligonucleotide
cagagacuccucuccuucc

SEQ ID NO: 2183882 - RNA, 19 nt, Artificial Sequence
  Description of Artificial Sequence: Synthetic oligonucleotide
agcugacacaaguauucaa

SEQ ID NO: 2183883 - RNA, 19 nt, Artificial Sequence
  Description of Artificial Sequence: Synthetic oligonucleotide
gacuccguuccauggguuc

SEQ ID NO: 2183884 - RNA, 19 nt, Artificial Sequence
  Description of Artificial Sequence: Synthetic oligonucleotide
gauaaaggugucaaacuuu

SEQ ID NO: 2183885 - RNA, 19 nt, Artificial Sequence
  Description of Artificial Sequence: Synthetic oligonucleotide
ggaaggaauaggcaggacu

SEQ ID NO: 2183886 - RNA, 19 nt, Artificial Sequence
  Description of Artificial Sequence: Synthetic oligonucleotide
cccuaugguaaugacagag

SEQ ID NO: 2183887 - RNA, 19 nt, Artificial Sequence
  Description of Artificial Sequence: Synthetic oligonucleotide
uggcagauucacugagcca

SEQ ID NO: 2183888 - RNA, 19 nt, Artificial Sequence
  Description of Artificial Sequence: Synthetic oligonucleotide
uagcugacacaaguauuca

SEQ ID NO: 2183889 - RNA, 19 nt, Artificial Sequence
  Description of Artificial Sequence: Synthetic oligonucleotide
gguguucccgugaagccgg

SEQ ID NO: 2183890 - RNA, 19 nt, Artificial Sequence
  Description of Artificial Sequence: Synthetic oligonucleotide
ugggcagguagguccauau

SEQ ID NO: 2183891 - RNA, 19 nt, Artificial Sequence
  Description of Artificial Sequence: Synthetic oligonucleotide
uccugaagcucuugugcuc

SEQ ID NO: 2183892 - RNA, 19 nt, Artificial Sequence
  Description of Artificial Sequence: Synthetic oligonucleotide
ccgaugaggacuccguucc

SEQ ID NO: 2183893 - RNA, 19 nt, Artificial Sequence
  Description of Artificial Sequence: Synthetic oligonucleotide
cccucuagaguccuuuucc

SEQ ID NO: 2183894 - RNA, 19 nt, Artificial Sequence
  Description of Artificial Sequence: Synthetic oligonucleotide
cgcgcuuccaaaaucuucc

SEQ ID NO: 2183895 - RNA, 19 nt, Artificial Sequence
  Description of Artificial Sequence: Synthetic oligonucleotide
uggguucuggcagauucac

SEQ ID NO: 2183896 - RNA, 19 nt, Artificial Sequence
  Description of Artificial Sequence: Synthetic oligonucleotide
agauucacugagccagaau

SEQ ID NO: 2183897 - RNA, 19 nt, Artificial Sequence
  Description of Artificial Sequence: Synthetic oligonucleotide
uguuccggguguucccgug

SEQ ID NO: 2183898 - RNA, 19 nt, Artificial Sequence
  Description of Artificial Sequence: Synthetic oligonucleotide
cuggcgcaaagcaacagaa

SEQ ID NO: 2183899 - RNA, 19 nt, Artificial Sequence
  Description of Artificial Sequence: Synthetic oligonucleotide
gguuucauuugccgaugag

SEQ ID NO: 2183900 - RNA, 19 nt, Artificial Sequence
  Description of Artificial Sequence: Synthetic oligonucleotide
ugguaaugacagagcuaca

SEQ ID NO: 2183901 - RNA, 19 nt, Artificial Sequence
  Description of Artificial Sequence: Synthetic oligonucleotide
ucgcuuugcagacguccac

SEQ ID NO: 2183902 - RNA, 19 nt, Artificial Sequence
  Description of Artificial Sequence: Synthetic oligonucleotide
aggauccauguagcaauuc

SEQ ID NO: 2183903 - RNA, 19 nt, Artificial Sequence
  Description of Artificial Sequence: Synthetic oligonucleotide
gacguccacugugaucggg

SEQ ID NO: 2183904 - RNA, 19 nt, Artificial Sequence
  Description of Artificial Sequence: Synthetic oligonucleotide
cugugggccgcucuuuaug

SEQ ID NO: 2183905 - RNA, 19 nt, Artificial Sequence
  Description of Artificial Sequence: Synthetic oligonucleotide
aggcuugaagccaaauccu

SEQ ID NO: 2183906 - RNA, 19 nt, Artificial Sequence
  Description of Artificial Sequence: Synthetic oligonucleotide
uacuggcgcaaagcaacag

SEQ ID NO: 2183907 - RNA, 19 nt, Artificial Sequence
  Description of Artificial Sequence: Synthetic oligonucleotide
guucuggcagauucacuga

SEQ ID NO: 2183908 - RNA, 19 nt, Artificial Sequence
  Description of Artificial Sequence: Synthetic oligonucleotide
uggugacaagugagccagg

SEQ ID NO: 2183909 - RNA, 19 nt, Artificial Sequence
  Description of Artificial Sequence: Synthetic oligonucleotide
aagcaguugccagcuacau

SEQ ID NO: 2183910 - RNA, 19 nt, Artificial Sequence
  Description of Artificial Sequence: Synthetic oligonucleotide
uucccgcgcuuccaaaauc

SEQ ID NO: 2183911 - RNA, 19 nt, Artificial Sequence
  Description of Artificial Sequence: Synthetic oligonucleotide
cagaguccagcaccaaguc

SEQ ID NO: 2183912 - RNA, 19 nt, Artificial Sequence
  Description of Artificial Sequence: Synthetic oligonucleotide
uggcgcaaagcaacagaau

SEQ ID NO: 2183913 - RNA, 19 nt, Artificial Sequence
  Description of Artificial Sequence: Synthetic oligonucleotide
uagaaccugcuguguccag

SEQ ID NO: 2183914 - RNA, 19 nt, Artificial Sequence
  Description of Artificial Sequence: Synthetic oligonucleotide
cucuuuauggcaucgcuuu

SEQ ID NO: 2183915 - RNA, 19 nt, Artificial Sequence
  Description of Artificial Sequence: Synthetic oligonucleotide
ccucuagaguccuuuuccc

SEQ ID NO: 2183916 - RNA, 19 nt, Artificial Sequence
  Description of Artificial Sequence: Synthetic oligonucleotide
ugaagcucuugugcucuga

SEQ ID NO: 2183917 - RNA, 19 nt, Artificial Sequence
  Description of Artificial Sequence: Synthetic oligonucleotide
uuuucccgagggucugaga

SEQ ID NO: 2183918 - RNA, 19 nt, Artificial Sequence
  Description of Artificial Sequence: Synthetic oligonucleotide
ggugucaaacuuugucuuc

SEQ ID NO: 2183919 - RNA, 19 nt, Artificial Sequence
  Description of Artificial Sequence: Synthetic oligonucleotide
ucgcuguccuagaggggcc

SEQ ID NO: 2183920 - RNA, 19 nt, Artificial Sequence
  Description of Artificial Sequence: Synthetic oligonucleotide
agaaccugcuguguccagu

SEQ ID NO: 2183921 - RNA, 19 nt, Artificial Sequence
  Description of Artificial Sequence: Synthetic oligonucleotide
ggugacaagugagccaggc

SEQ ID NO: 2183922 - RNA, 19 nt, Artificial Sequence
  Description of Artificial Sequence: Synthetic oligonucleotide
cuuuucccgagggucugag

SEQ ID NO: 2183923 - RNA, 19 nt, Artificial Sequence
  Description of Artificial Sequence: Synthetic oligonucleotide
ugacuguaggcagugccuu

SEQ ID NO: 2183924 - RNA, 19 nt, Artificial Sequence
  Description of Artificial Sequence: Synthetic oligonucleotide
ggauaaaggugucaaacuu

SEQ ID NO: 2183925 - RNA, 19 nt, Artificial Sequence
  Description of Artificial Sequence: Synthetic oligonucleotide
guuuagcauuaagcagagg

SEQ ID NO: 2183926 - RNA, 19 nt, Artificial Sequence
  Description of Artificial Sequence: Synthetic oligonucleotide
gcgcaaagcaacagaauug

SEQ ID NO: 2183927 - RNA, 19 nt, Artificial Sequence
  Description of Artificial Sequence: Synthetic oligonucleotide
ugccagcuacauguuccgg

SEQ ID NO: 2183928 - RNA, 19 nt, Artificial Sequence
  Description of Artificial Sequence: Synthetic oligonucleotide
ugcagacguccacugugau

SEQ ID NO: 2183929 - RNA, 19 nt, Artificial Sequence
  Description of Artificial Sequence: Synthetic oligonucleotide
caccaaguccccuauggua

SEQ ID NO: 2183930 - RNA, 19 nt, Artificial Sequence
  Description of Artificial Sequence: Synthetic oligonucleotide
gcaggcuugaagccaaauc

SEQ ID NO: 2183931 - RNA, 19 nt, Artificial Sequence
  Description of Artificial Sequence: Synthetic oligonucleotide
gggauaaaggugucaaacu

SEQ ID NO: 2183932 - RNA, 19 nt, Artificial Sequence
  Description of Artificial Sequence: Synthetic oligonucleotide
uccggguguucccgugaag

SEQ ID NO: 2183933 - RNA, 19 nt, Artificial Sequence
  Description of Artificial Sequence: Synthetic oligonucleotide
augacugugggccgcucuu

SEQ ID NO: 2183934 - RNA, 19 nt, Artificial Sequence
  Description of Artificial Sequence: Synthetic oligonucleotide
cugguuucauuugccgaug

SEQ ID NO: 2183935 - RNA, 19 nt, Artificial Sequence
  Description of Artificial Sequence: Synthetic oligonucleotide
cuccgacagcuguuucacg

SEQ ID NO: 2183936 - RNA, 19 nt, Artificial Sequence
  Description of Artificial Sequence: Synthetic oligonucleotide
aucccauguccauaccaua

SEQ ID NO: 2183937 - RNA, 19 nt, Artificial Sequence
  Description of Artificial Sequence: Synthetic oligonucleotide
uguggagugcugguuucau

SEQ ID NO: 2183938 - RNA, 19 nt, Artificial Sequence
  Description of Artificial Sequence: Synthetic oligonucleotide
auuugccgaugaggacucc

SEQ ID NO: 2183939 - RNA, 19 nt, Artificial Sequence
  Description of Artificial Sequence: Synthetic oligonucleotide
cuguuucacgagcaggcaa

SEQ ID NO: 2183940 - RNA, 19 nt, Artificial Sequence
  Description of Artificial Sequence: Synthetic oligonucleotide
aggauucuccauagucuug

SEQ ID NO: 2183941 - RNA, 19 nt, Artificial Sequence
  Description of Artificial Sequence: Synthetic oligonucleotide
agacguccacugugaucgg

SEQ ID NO: 2183942 - RNA, 19 nt, Artificial Sequence
  Description of Artificial Sequence: Synthetic oligonucleotide
cuccaggaggcgacaauga

SEQ ID NO: 2183943 - RNA, 19 nt, Artificial Sequence
  Description of Artificial Sequence: Synthetic oligonucleotide
agccggucggugaagguca

SEQ ID NO: 2183944 - RNA, 19 nt, Artificial Sequence
  Description of Artificial Sequence: Synthetic oligonucleotide
ggccagauuaaagcaguug

SEQ ID NO: 2183945 - RNA, 19 nt, Artificial Sequence
  Description of Artificial Sequence: Synthetic oligonucleotide
ggccaucccauguccauac

SEQ ID NO: 2183946 - RNA, 19 nt, Artificial Sequence
  Description of Artificial Sequence: Synthetic oligonucleotide
ccauagaaccugcuguguc

SEQ ID NO: 2183947 - RNA, 19 nt, Artificial Sequence
  Description of Artificial Sequence: Synthetic oligonucleotide
ugccgaugaggacuccguu

SEQ ID NO: 2183948 - RNA, 19 nt, Artificial Sequence
  Description of Artificial Sequence: Synthetic oligonucleotide
ggcgcaaagcaacagaauu

SEQ ID NO: 2183949 - RNA, 19 nt, Artificial Sequence
  Description of Artificial Sequence: Synthetic oligonucleotide
uggcaucgcuuugcagacg

SEQ ID NO: 2183950 - RNA, 19 nt, Artificial Sequence
  Description of Artificial Sequence: Synthetic oligonucleotide
gucacaaaacauggggaua

SEQ ID NO: 2183951 - RNA, 19 nt, Artificial Sequence
  Description of Artificial Sequence: Synthetic oligonucleotide
auacuggcgcaaagcaaca

SEQ ID NO: 2183952 - RNA, 19 nt, Artificial Sequence
  Description of Artificial Sequence: Synthetic oligonucleotide
gcuccaggaggcgacaaug

SEQ ID NO: 2183953 - RNA, 19 nt, Artificial Sequence
  Description of Artificial Sequence: Synthetic oligonucleotide
gugggccgcucuuuauggc

SEQ ID NO: 2183954 - RNA, 19 nt, Artificial Sequence
  Description of Artificial Sequence: Synthetic oligonucleotide
ggugaaggucaaguuuagc

SEQ ID NO: 2183955 - RNA, 19 nt, Artificial Sequence
  Description of Artificial Sequence: Synthetic oligonucleotide
cugaagcucuugugcucug

SEQ ID NO: 2183956 - RNA, 19 nt, Artificial Sequence
  Description of Artificial Sequence: Synthetic oligonucleotide
cauaccauacuggcgcaaa

SEQ ID NO: 2183957 - RNA, 19 nt, Artificial Sequence
  Description of Artificial Sequence: Synthetic oligonucleotide
cagcuacauguuccgggug

SEQ ID NO: 2183958 - RNA, 19 nt, Artificial Sequence
  Description of Artificial Sequence: Synthetic oligonucleotide
acguccacugugaucggga

SEQ ID NO: 2183959 - RNA, 19 nt, Artificial Sequence
  Description of Artificial Sequence: Synthetic oligonucleotide
caucccauguccauaccau

SEQ ID NO: 2183960 - RNA, 19 nt, Artificial Sequence
  Description of Artificial Sequence: Synthetic oligonucleotide
gaggcgacaaugagagucu

SEQ ID NO: 2183961 - RNA, 19 nt, Artificial Sequence
  Description of Artificial Sequence: Synthetic oligonucleotide
ccagaaaggauucuccaua

SEQ ID NO: 2183962 - RNA, 19 nt, Artificial Sequence
  Description of Artificial Sequence: Synthetic oligonucleotide
ggauuuucgcuguccuaga

SEQ ID NO: 2183963 - RNA, 19 nt, Artificial Sequence
  Description of Artificial Sequence: Synthetic oligonucleotide
gaucgggauuuucgcuguc

SEQ ID NO: 2183964 - RNA, 19 nt, Artificial Sequence
  Description of Artificial Sequence: Synthetic oligonucleotide
auguuccggguguucccgu

SEQ ID NO: 2183965 - RNA, 19 nt, Artificial Sequence
  Description of Artificial Sequence: Synthetic oligonucleotide
guguuuaggguuagauuua

SEQ ID NO: 2183966 - RNA, 19 nt, Artificial Sequence
  Description of Artificial Sequence: Synthetic oligonucleotide
aggcugaauccaauuuaga

SEQ ID NO: 2183967 - RNA, 19 nt, Artificial Sequence
  Description of Artificial Sequence: Synthetic oligonucleotide
gccgaugaggacuccguuc

SEQ ID NO: 2183968 - RNA, 19 nt, Artificial Sequence
  Description of Artificial Sequence: Synthetic oligonucleotide
ccggguguucccgugaagc

SEQ ID NO: 2183969 - RNA, 19 nt, Artificial Sequence
  Description of Artificial Sequence: Synthetic oligonucleotide
ugagucaggugggcccucu

SEQ ID NO: 2183970 - RNA, 19 nt, Artificial Sequence
  Description of Artificial Sequence: Synthetic oligonucleotide
gccuuuucuagcugacaca

SEQ ID NO: 2183971 - RNA, 19 nt, Artificial Sequence
  Description of Artificial Sequence: Synthetic oligonucleotide
ggcagugccuuuucuagcu

SEQ ID NO: 2183972 - RNA, 19 nt, Artificial Sequence
  Description of Artificial Sequence: Synthetic oligonucleotide
cuguguuuaggguuagauu

SEQ ID NO: 2183973 - RNA, 19 nt, Artificial Sequence
  Description of Artificial Sequence: Synthetic oligonucleotide
ggcuugaagccaaauccuc

SEQ ID NO: 2183974 - RNA, 19 nt, Artificial Sequence
  Description of Artificial Sequence: Synthetic oligonucleotide
ugcaggcuugaagccaaau

SEQ ID NO: 2183975 - RNA, 19 nt, Artificial Sequence
  Description of Artificial Sequence: Synthetic oligonucleotide
uccauggguucuggcagau

SEQ ID NO: 2183976 - RNA, 19 nt, Artificial Sequence
  Description of Artificial Sequence: Synthetic oligonucleotide
ggauucuccauagucuugu

SEQ ID NO: 2183977 - RNA, 19 nt, Artificial Sequence
  Description of Artificial Sequence: Synthetic oligonucleotide
cagcaugacugugggccgc

SEQ ID NO: 2183978 - RNA, 19 nt, Artificial Sequence
  Description of Artificial Sequence: Synthetic oligonucleotide
cugcauugguuucuuggcu

SEQ ID NO: 2183979 - RNA, 19 nt, Artificial Sequence
  Description of Artificial Sequence: Synthetic oligonucleotide
gaugaggacuccguuccau

SEQ ID NO: 2183980 - RNA, 19 nt, Artificial Sequence
  Description of Artificial Sequence: Synthetic oligonucleotide
uuggcuccaggaggcgaca

SEQ ID NO: 2183981 - RNA, 19 nt, Artificial Sequence
  Description of Artificial Sequence: Synthetic oligonucleotide
gaguccuuuucccgagggu

SEQ ID NO: 2183982 - RNA, 19 nt, Artificial Sequence
  Description of Artificial Sequence: Synthetic oligonucleotide
cucugacuguaggcagugc

SEQ ID NO: 2183983 - RNA, 19 nt, Artificial Sequence
  Description of Artificial Sequence: Synthetic oligonucleotide
gcagacguccacugugauc

SEQ ID NO: 2183984 - RNA, 19 nt, Artificial Sequence
  Description of Artificial Sequence: Synthetic oligonucleotide
gccgcucuuuauggcaucg

SEQ ID NO: 2183985 - RNA, 19 nt, Artificial Sequence
  Description of Artificial Sequence: Synthetic oligonucleotide
ggcaucgcuuugcagacgu

SEQ ID NO: 2183986 - RNA, 19 nt, Artificial Sequence
  Description of Artificial Sequence: Synthetic oligonucleotide
ugccuccgacagcuguuuc

SEQ ID NO: 2183987 - RNA, 19 nt, Artificial Sequence
  Description of Artificial Sequence: Synthetic oligonucleotide
cuagaggggccagauuaaa

SEQ ID NO: 2183988 - RNA, 19 nt, Artificial Sequence
  Description of Artificial Sequence: Synthetic oligonucleotide
uggccaucccauguccaua

SEQ ID NO: 2183989 - RNA, 19 nt, Artificial Sequence
  Description of Artificial Sequence: Synthetic oligonucleotide
uugcaggcuugaagccaaa

SEQ ID NO: 2183990 - RNA, 19 nt, Artificial Sequence
  Description of Artificial Sequence: Synthetic oligonucleotide
guuucacgagcaggcaaaa

SEQ ID NO: 2183991 - RNA, 19 nt, Artificial Sequence
  Description of Artificial Sequence: Synthetic oligonucleotide
aggucaaguuuagcauuaa

SEQ ID NO: 2183992 - RNA, 19 nt, Artificial Sequence
  Description of Artificial Sequence: Synthetic oligonucleotide
gcauguagucacaaaacau

SEQ ID NO: 2183993 - RNA, 19 nt, Artificial Sequence
  Description of Artificial Sequence: Synthetic oligonucleotide
ccaucccauguccauacca

SEQ ID NO: 2183994 - RNA, 19 nt, Artificial Sequence
  Description of Artificial Sequence: Synthetic oligonucleotide
aggaggcgacaaugagagu

SEQ ID NO: 2183995 - RNA, 19 nt, Artificial Sequence
  Description of Artificial Sequence: Synthetic oligonucleotide
ccuccgacagcuguuucac

SEQ ID NO: 2183996 - RNA, 19 nt, Artificial Sequence
  Description of Artificial Sequence: Synthetic oligonucleotide
acucaggcauguagucaca

SEQ ID NO: 2183997 - RNA, 19 nt, Artificial Sequence
  Description of Artificial Sequence: Synthetic oligonucleotide
gaagccggucggugaaggu

SEQ ID NO: 2183998 - RNA, 19 nt, Artificial Sequence
  Description of Artificial Sequence: Synthetic oligonucleotide
gugccuuuucuagcugaca

SEQ ID NO: 2183999 - RNA, 19 nt, Artificial Sequence
  Description of Artificial Sequence: Synthetic oligonucleotide
ccgcgcuuccaaaaucuuc

SEQ ID NO: 2184000 - RNA, 19 nt, Artificial Sequence
  Description of Artificial Sequence: Synthetic oligonucleotide
ggacugcauugguuucuug

SEQ ID NO: 2184001 - RNA, 19 nt, Artificial Sequence
  Description of Artificial Sequence: Synthetic oligonucleotide
gcccucuagaguccuuuuc

SEQ ID NO: 2184002 - RNA, 19 nt, Artificial Sequence
  Description of Artificial Sequence: Synthetic oligonucleotide
agacuucccuguggagacu

SEQ ID NO: 2184003 - RNA, 19 nt, Artificial Sequence
  Description of Artificial Sequence: Synthetic oligonucleotide
cggguguucccgugaagcc

SEQ ID NO: 2184004 - RNA, 19 nt, Artificial Sequence
  Description of Artificial Sequence: Synthetic oligonucleotide
gaguucuugcaggcuugaa

SEQ ID NO: 2184005 - RNA, 19 nt, Artificial Sequence
  Description of Artificial Sequence: Synthetic oligonucleotide
gcagaggacuguggagugc

SEQ ID NO: 2184006 - RNA, 19 nt, Artificial Sequence
  Description of Artificial Sequence: Synthetic oligonucleotide
uguucccgugaagccgguc

SEQ ID NO: 2184007 - RNA, 19 nt, Artificial Sequence
  Description of Artificial Sequence: Synthetic oligonucleotide
cuguggagugcugguuuca

SEQ ID NO: 2184008 - RNA, 19 nt, Artificial Sequence
  Description of Artificial Sequence: Synthetic oligonucleotide
cggugaaggucaaguuuag

SEQ ID NO: 2184009 - RNA, 19 nt, Artificial Sequence
  Description of Artificial Sequence: Synthetic oligonucleotide
ggugggcccucuagagucc

SEQ ID NO: 2184010 - RNA, 19 nt, Artificial Sequence
  Description of Artificial Sequence: Synthetic oligonucleotide
ccuagaggggccagauuaa

SEQ ID NO: 2184011 - RNA, 19 nt, Artificial Sequence
  Description of Artificial Sequence: Synthetic oligonucleotide
gcauuaagcagaggacugu

SEQ ID NO: 2184012 - RNA, 19 nt, Artificial Sequence
  Description of Artificial Sequence: Synthetic oligonucleotide
ggggccagauuaaagcagu

SEQ ID NO: 2184013 - RNA, 19 nt, Artificial Sequence
  Description of Artificial Sequence: Synthetic oligonucleotide
guucgaguucuugcaggcu

SEQ ID NO: 2184014 - RNA, 19 nt, Artificial Sequence
  Description of Artificial Sequence: Synthetic oligonucleotide
ccagcuacauguuccgggu

SEQ ID NO: 2184015 - RNA, 19 nt, Artificial Sequence
  Description of Artificial Sequence: Synthetic oligonucleotide
gaggauccauguagcaauu

SEQ ID NO: 2184016 - RNA, 19 nt, Artificial Sequence
  Description of Artificial Sequence: Synthetic oligonucleotide
gagucaggugggcccucua

SEQ ID NO: 2184017 - RNA, 19 nt, Artificial Sequence
  Description of Artificial Sequence: Synthetic oligonucleotide
caggugggcccucuagagu

SEQ ID NO: 2184018 - RNA, 19 nt, Artificial Sequence
  Description of Artificial Sequence: Synthetic oligonucleotide
aggcgacaaugagagucuu

SEQ ID NO: 2184019 - RNA, 19 nt, Artificial Sequence
  Description of Artificial Sequence: Synthetic oligonucleotide
gcagauucacugagccaga

SEQ ID NO: 2184020 - RNA, 19 nt, Artificial Sequence
  Description of Artificial Sequence: Synthetic oligonucleotide
cuguccuagaggggccaga

SEQ ID NO: 2184021 - RNA, 19 nt, Artificial Sequence
  Description of Artificial Sequence: Synthetic oligonucleotide
ccguuccauggguucuggc

SEQ ID NO: 2184022 - RNA, 19 nt, Artificial Sequence
  Description of Artificial Sequence: Synthetic oligonucleotide
ggucggugaaggucaaguu

SEQ ID NO: 2184023 - RNA, 19 nt, Artificial Sequence
  Description of Artificial Sequence: Synthetic oligonucleotide
ccauagucuuguucgaguu

SEQ ID NO: 2184024 - RNA, 19 nt, Artificial Sequence
  Description of Artificial Sequence: Synthetic oligonucleotide
caucagaguccagcaccaa

SEQ ID NO: 2184025 - RNA, 19 nt, Artificial Sequence
  Description of Artificial Sequence: Synthetic oligonucleotide
ggccgcucuuuauggcauc

SEQ ID NO: 2184026 - RNA, 19 nt, Artificial Sequence
  Description of Artificial Sequence: Synthetic oligonucleotide
gagccaggcugaauccaau

SEQ ID NO: 2184027 - RNA, 19 nt, Artificial Sequence
  Description of Artificial Sequence: Synthetic oligonucleotide
gcaaagcaacagaauuggu

SEQ ID NO: 2184028 - RNA, 19 nt, Artificial Sequence
  Description of Artificial Sequence: Synthetic oligonucleotide
cgacaaugagagucuuaga

SEQ ID NO: 2184029 - RNA, 19 nt, Artificial Sequence
  Description of Artificial Sequence: Synthetic oligonucleotide
ccgcucuuuauggcaucgc

SEQ ID NO: 2184030 - RNA, 19 nt, Artificial Sequence
  Description of Artificial Sequence: Synthetic oligonucleotide
cgugaagccggucggugaa

SEQ ID NO: 2184031 - RNA, 19 nt, Artificial Sequence
  Description of Artificial Sequence: Synthetic oligonucleotide
ggcgacaaugagagucuua

SEQ ID NO: 2184032 - RNA, 19 nt, Artificial Sequence
  Description of Artificial Sequence: Synthetic oligonucleotide
gcgcuuccaaaaucuuccu

SEQ ID NO: 2184033 - RNA, 19 nt, Artificial Sequence
  Description of Artificial Sequence: Synthetic oligonucleotide
gcucucuggaaguggccau

SEQ ID NO: 2184034 - RNA, 19 nt, Artificial Sequence
  Description of Artificial Sequence: Synthetic oligonucleotide
cgcucuuuauggcaucgcu

SEQ ID NO: 2184035 - RNA, 19 nt, Artificial Sequence
  Description of Artificial Sequence: Synthetic oligonucleotide
ccccuaugguaaugacaga

SEQ ID NO: 2184036 - RNA, 19 nt, Artificial Sequence
  Description of Artificial Sequence: Synthetic oligonucleotide
gugggcccucuagaguccu

SEQ ID NO: 2184037 - RNA, 19 nt, Artificial Sequence
  Description of Artificial Sequence: Synthetic oligonucleotide
ccaaauccucugccuccga

SEQ ID NO: 2184038 - RNA, 19 nt, Artificial Sequence
  Description of Artificial Sequence: Synthetic oligonucleotide
gcaucgcuuugcagacguc

SEQ ID NO: 2184039 - RNA, 19 nt, Artificial Sequence
  Description of Artificial Sequence: Synthetic oligonucleotide
gcuacauguuccggguguu

SEQ ID NO: 2184040 - RNA, 19 nt, Artificial Sequence
  Description of Artificial Sequence: Synthetic oligonucleotide
ccauaccauacuggcgcaa

SEQ ID NO: 2184041 - RNA, 19 nt, Artificial Sequence
  Description of Artificial Sequence: Synthetic oligonucleotide
gggcagguagguccauauu

SEQ ID NO: 2184042 - RNA, 19 nt, Artificial Sequence
  Description of Artificial Sequence: Synthetic oligonucleotide
gcaugacugugggccgcuc

SEQ ID NO: 2184043 - RNA, 19 nt, Artificial Sequence
  Description of Artificial Sequence: Synthetic oligonucleotide
cugccuccgacagcuguuu

SEQ ID NO: 2184044 - RNA, 19 nt, Artificial Sequence
  Description of Artificial Sequence: Synthetic oligonucleotide
cggucggugaaggucaagu

SEQ ID NO: 2184045 - RNA, 19 nt, Artificial Sequence
  Description of Artificial Sequence: Synthetic oligonucleotide
gggccgcucuuuauggcau

SEQ ID NO: 2184046 - RNA, 19 nt, Artificial Sequence
  Description of Artificial Sequence: Synthetic oligonucleotide
ccggucggugaaggucaag

SEQ ID NO: 2184047 - RNA, 19 nt, Artificial Sequence
  Description of Artificial Sequence: Synthetic oligonucleotide
ggcccucuagaguccuuuu

SEQ ID NO: 2184048 - RNA, 19 nt, Artificial Sequence
  Description of Artificial Sequence: Synthetic oligonucleotide
cgggauuuucgcuguccua

SEQ ID NO: 2184049 - RNA, 19 nt, Artificial Sequence
  Description of Artificial Sequence: Synthetic oligonucleotide
ggacuccguuccauggguu

SEQ ID NO: 2184050 - RNA, 19 nt, Artificial Sequence
  Description of Artificial Sequence: Synthetic oligonucleotide
guguucccgugaagccggu

SEQ ID NO: 2184051 - RNA, 19 nt, Artificial Sequence
  Description of Artificial Sequence: Synthetic oligonucleotide
gggccagauuaaagcaguu

SEQ ID NO: 2184052 - RNA, 19 nt, Artificial Sequence
  Description of Artificial Sequence: Synthetic oligonucleotide
cgcuguccuagaggggcca

SEQ ID NO: 2184053 - RNA, 19 nt, Artificial Sequence
  Description of Artificial Sequence: Synthetic oligonucleotide
gccggucggugaaggucaa

SEQ ID NO: 2184054 - RNA, 19 nt, Artificial Sequence
  Description of Artificial Sequence: Synthetic oligonucleotide
cccgcgcuuccaaaaucuu

SEQ ID NO: 2184055 - RNA, 19 nt, Artificial Sequence
  Description of Artificial Sequence: Synthetic oligonucleotide
uuugauuagaaccugaugg

SEQ ID NO: 2184056 - RNA, 19 nt, Artificial Sequence
  Description of Artificial Sequence: Synthetic oligonucleotide
aauucaaacacucgaaccg

SEQ ID NO: 2184057 - RNA, 19 nt, Artificial Sequence
  Description of Artificial Sequence: Synthetic oligonucleotide
aaauucaaacacucgaacc

SEQ ID NO: 2184058 - RNA, 19 nt, Artificial Sequence
  Description of Artificial Sequence: Synthetic oligonucleotide
gauuuuaucaauguaauug

SEQ ID NO: 2184059 - RNA, 19 nt, Artificial Sequence
  Description of Artificial Sequence: Synthetic oligonucleotide
aauauaagucucuacuggg

SEQ ID NO: 2184060 - RNA, 19 nt, Artificial Sequence
  Description of Artificial Sequence: Synthetic oligonucleotide
auuuuaucaauguaauugg

SEQ ID NO: 2184061 - RNA, 19 nt, Artificial Sequence
  Description of Artificial Sequence: Synthetic oligonucleotide
gaauauaagucucuacugg

SEQ ID NO: 2184062 - RNA, 19 nt, Artificial Sequence
  Description of Artificial Sequence: Synthetic oligonucleotide
caucucaacaaccacaucg

SEQ ID NO: 2184063 - RNA, 19 nt, Artificial Sequence
  Description of Artificial Sequence: Synthetic oligonucleotide
ucuacagccaacaacaauc

SEQ ID NO: 2184064 - RNA, 19 nt, Artificial Sequence
  Description of Artificial Sequence: Synthetic oligonucleotide
auuucaauagaaccucuac

SEQ ID NO: 2184065 - RNA, 19 nt, Artificial Sequence
  Description of Artificial Sequence: Synthetic oligonucleotide
caauagaaccucuacagcc

SEQ ID NO: 2184066 - RNA, 19 nt, Artificial Sequence
  Description of Artificial Sequence: Synthetic oligonucleotide
guggacuuugauuagaacc

SEQ ID NO: 2184067 - RNA, 19 nt, Artificial Sequence
  Description of Artificial Sequence: Synthetic oligonucleotide
aaccucuacagccaacaac

SEQ ID NO: 2184068 - RNA, 19 nt, Artificial Sequence
  Description of Artificial Sequence: Synthetic oligonucleotide
gauacuaugaccccagcca

SEQ ID NO: 2184069 - RNA, 19 nt, Artificial Sequence
  Description of Artificial Sequence: Synthetic oligonucleotide
aaaaccuuuaagccaugag

SEQ ID NO: 2184070 - RNA, 19 nt, Artificial Sequence
  Description of Artificial Sequence: Synthetic oligonucleotide
uccucauaagacaagaauc

SEQ ID NO: 2184071 - RNA, 19 nt, Artificial Sequence
  Description of Artificial Sequence: Synthetic oligonucleotide
agauacuaugaccccagcc

SEQ ID NO: 2184072 - RNA, 19 nt, Artificial Sequence
  Description of Artificial Sequence: Synthetic oligonucleotide
uggacuuugauuagaaccu

SEQ ID NO: 2184073 - RNA, 19 nt, Artificial Sequence
  Description of Artificial Sequence: Synthetic oligonucleotide
aguacgggaucccaagugc

SEQ ID NO: 2184074 - RNA, 19 nt, Artificial Sequence
  Description of Artificial Sequence: Synthetic oligonucleotide
acagccaacaacaaucacc

SEQ ID NO: 2184075 - RNA, 19 nt, Artificial Sequence
  Description of Artificial Sequence: Synthetic oligonucleotide
uuuacguuugccagcaucu

SEQ ID NO: 2184076 - RNA, 19 nt, Artificial Sequence
  Description of Artificial Sequence: Synthetic oligonucleotide
aaaagagagaaacuccaau

SEQ ID NO: 2184077 - RNA, 19 nt, Artificial Sequence
  Description of Artificial Sequence: Synthetic oligonucleotide
agagaaacuccaauuauac

SEQ ID NO: 2184078 - RNA, 19 nt, Artificial Sequence
  Description of Artificial Sequence: Synthetic oligonucleotide
uuccauuccuguuuggagg

SEQ ID NO: 2184079 - RNA, 19 nt, Artificial Sequence
  Description of Artificial Sequence: Synthetic oligonucleotide
ucagguuuacguuugccag

SEQ ID NO: 2184080 - RNA, 19 nt, Artificial Sequence
  Description of Artificial Sequence: Synthetic oligonucleotide
uuuuaucaauguaauuggc

SEQ ID NO: 2184081 - RNA, 19 nt, Artificial Sequence
  Description of Artificial Sequence: Synthetic oligonucleotide
uuucuugaaagcagacacg

SEQ ID NO: 2184082 - RNA, 19 nt, Artificial Sequence
  Description of Artificial Sequence: Synthetic oligonucleotide
acaacaaucacccgcccuc

SEQ ID NO: 2184083 - RNA, 19 nt, Artificial Sequence
  Description of Artificial Sequence: Synthetic oligonucleotide
uguaauuggcuucuuugug

SEQ ID NO: 2184084 - RNA, 19 nt, Artificial Sequence
  Description of Artificial Sequence: Synthetic oligonucleotide
uccaauuauacuugucucc

SEQ ID NO: 2184085 - RNA, 19 nt, Artificial Sequence
  Description of Artificial Sequence: Synthetic oligonucleotide
accaaauucaaacacucga

SEQ ID NO: 2184086 - RNA, 19 nt, Artificial Sequence
  Description of Artificial Sequence: Synthetic oligonucleotide
uugauuagaaccugauggc

SEQ ID NO: 2184087 - RNA, 19 nt, Artificial Sequence
  Description of Artificial Sequence: Synthetic oligonucleotide
uuaucaauguaauuggcuu

SEQ ID NO: 2184088 - RNA, 19 nt, Artificial Sequence
  Description of Artificial Sequence: Synthetic oligonucleotide
acuccaauuauacuugucu

SEQ ID NO: 2184089 - RNA, 19 nt, Artificial Sequence
  Description of Artificial Sequence: Synthetic oligonucleotide
uccagagcgaauauaaguc

SEQ ID NO: 2184090 - RNA, 19 nt, Artificial Sequence
  Description of Artificial Sequence: Synthetic oligonucleotide
aauuauacuugucuccuuu

SEQ ID NO: 2184091 - RNA, 19 nt, Artificial Sequence
  Description of Artificial Sequence: Synthetic oligonucleotide
ugcccaaaaccuuuaagcc

SEQ ID NO: 2184092 - RNA, 19 nt, Artificial Sequence
  Description of Artificial Sequence: Synthetic oligonucleotide
ugaaccaggacgcuuuccc

SEQ ID NO: 2184093 - RNA, 19 nt, Artificial Sequence
  Description of Artificial Sequence: Synthetic oligonucleotide
uggguugacaccacaggcg

SEQ ID NO: 2184094 - RNA, 19 nt, Artificial Sequence
  Description of Artificial Sequence: Synthetic oligonucleotide
uaagccaugagcucuggca

SEQ ID NO: 2184095 - RNA, 19 nt, Artificial Sequence
  Description of Artificial Sequence: Synthetic oligonucleotide
uuauacuugucuccuuugc

SEQ ID NO: 2184096 - RNA, 19 nt, Artificial Sequence
  Description of Artificial Sequence: Synthetic oligonucleotide
auacuaugaccccagccac

SEQ ID NO: 2184097 - RNA, 19 nt, Artificial Sequence
  Description of Artificial Sequence: Synthetic oligonucleotide
acguagcuaauccaacacc

SEQ ID NO: 2184098 - RNA, 19 nt, Artificial Sequence
  Description of Artificial Sequence: Synthetic oligonucleotide
uacucagaaccuaucacug

SEQ ID NO: 2184099 - RNA, 19 nt, Artificial Sequence
  Description of Artificial Sequence: Synthetic oligonucleotide
uucuugaaagcagacacgc

SEQ ID NO: 2184100 - RNA, 19 nt, Artificial Sequence
  Description of Artificial Sequence: Synthetic oligonucleotide
uuggacuggagcuucagca

SEQ ID NO: 2184101 - RNA, 19 nt, Artificial Sequence
  Description of Artificial Sequence: Synthetic oligonucleotide
ucgacuguaggcuccagag

SEQ ID NO: 2184102 - RNA, 19 nt, Artificial Sequence
  Description of Artificial Sequence: Synthetic oligonucleotide
gugcccaaaaccuuuaagc

SEQ ID NO: 2184103 - RNA, 19 nt, Artificial Sequence
  Description of Artificial Sequence: Synthetic oligonucleotide
ucaccaacagauuucuuga

SEQ ID NO: 2184104 - RNA, 19 nt, Artificial Sequence
  Description of Artificial Sequence: Synthetic oligonucleotide
gaaacuccaauuauacuug

SEQ ID NO: 2184105 - RNA, 19 nt, Artificial Sequence
  Description of Artificial Sequence: Synthetic oligonucleotide
cucaacaaccacaucgacc

SEQ ID NO: 2184106 - RNA, 19 nt, Artificial Sequence
  Description of Artificial Sequence: Synthetic oligonucleotide
uucagguuuacguuugcca

SEQ ID NO: 2184107 - RNA, 19 nt, Artificial Sequence
  Description of Artificial Sequence: Synthetic oligonucleotide
uggacgaccuucuccaagg

SEQ ID NO: 2184108 - RNA, 19 nt, Artificial Sequence
  Description of Artificial Sequence: Synthetic oligonucleotide
guagguuuucgacuguagg

SEQ ID NO: 2184109 - RNA, 19 nt, Artificial Sequence
  Description of Artificial Sequence: Synthetic oligonucleotide
ucaacuucugucccauugc

SEQ ID NO: 2184110 - RNA, 19 nt, Artificial Sequence
  Description of Artificial Sequence: Synthetic oligonucleotide
aaguacgggaucccaagug

SEQ ID NO: 2184111 - RNA, 19 nt, Artificial Sequence
  Description of Artificial Sequence: Synthetic oligonucleotide
acucgaaccgcccucauca

SEQ ID NO: 2184112 - RNA, 19 nt, Artificial Sequence
  Description of Artificial Sequence: Synthetic oligonucleotide
uguuggagcagaagacccg

SEQ ID NO: 2184113 - RNA, 19 nt, Artificial Sequence
  Description of Artificial Sequence: Synthetic oligonucleotide
aaacacucgaaccgcccuc

SEQ ID NO: 2184114 - RNA, 19 nt, Artificial Sequence
  Description of Artificial Sequence: Synthetic oligonucleotide
agcgaauauaagucucuac

SEQ ID NO: 2184115 - RNA, 19 nt, Artificial Sequence
  Description of Artificial Sequence: Synthetic oligonucleotide
caagguagguuuucgacug

SEQ ID NO: 2184116 - RNA, 19 nt, Artificial Sequence
  Description of Artificial Sequence: Synthetic oligonucleotide
ucgggcaggguguagacag

SEQ ID NO: 2184117 - RNA, 19 nt, Artificial Sequence
  Description of Artificial Sequence: Synthetic oligonucleotide
aagcuucaagucauuauuc

SEQ ID NO: 2184118 - RNA, 19 nt, Artificial Sequence
  Description of Artificial Sequence: Synthetic oligonucleotide
aauagaaccucuacagcca

SEQ ID NO: 2184119 - RNA, 19 nt, Artificial Sequence
  Description of Artificial Sequence: Synthetic oligonucleotide
auacuugucuccuuugcca

SEQ ID NO: 2184120 - RNA, 19 nt, Artificial Sequence
  Description of Artificial Sequence: Synthetic oligonucleotide
ugauuagaaccugauggcc

SEQ ID NO: 2184121 - RNA, 19 nt, Artificial Sequence
  Description of Artificial Sequence: Synthetic oligonucleotide
cucagaaccagcugugccc

SEQ ID NO: 2184122 - RNA, 19 nt, Artificial Sequence
  Description of Artificial Sequence: Synthetic oligonucleotide
auaagucucuacuggguug

SEQ ID NO: 2184123 - RNA, 19 nt, Artificial Sequence
  Description of Artificial Sequence: Synthetic oligonucleotide
ucaaacacuucaugagccc

SEQ ID NO: 2184124 - RNA, 19 nt, Artificial Sequence
  Description of Artificial Sequence: Synthetic oligonucleotide
ucucagaaccagcugugcc

SEQ ID NO: 2184125 - RNA, 19 nt, Artificial Sequence
  Description of Artificial Sequence: Synthetic oligonucleotide
uuugggaugggaaccgcca

SEQ ID NO: 2184126 - RNA, 19 nt, Artificial Sequence
  Description of Artificial Sequence: Synthetic oligonucleotide
agaaccuaucacugguuuc

SEQ ID NO: 2184127 - RNA, 19 nt, Artificial Sequence
  Description of Artificial Sequence: Synthetic oligonucleotide
aacaacaaucacccgcccu

SEQ ID NO: 2184128 - RNA, 19 nt, Artificial Sequence
  Description of Artificial Sequence: Synthetic oligonucleotide
ucuuugugaucaaacacuu

SEQ ID NO: 2184129 - RNA, 19 nt, Artificial Sequence
  Description of Artificial Sequence: Synthetic oligonucleotide
auuauacuugucuccuuug

SEQ ID NO: 2184130 - RNA, 19 nt, Artificial Sequence
  Description of Artificial Sequence: Synthetic oligonucleotide
uauaagucucuacuggguu

SEQ ID NO: 2184131 - RNA, 19 nt, Artificial Sequence
  Description of Artificial Sequence: Synthetic oligonucleotide
agacagugugauccgcugc

SEQ ID NO: 2184132 - RNA, 19 nt, Artificial Sequence
  Description of Artificial Sequence: Synthetic oligonucleotide
aaucacccgcccuccacgg

SEQ ID NO: 2184133 - RNA, 19 nt, Artificial Sequence
  Description of Artificial Sequence: Synthetic oligonucleotide
ccgacagauacuaugaccc

SEQ ID NO: 2184134 - RNA, 19 nt, Artificial Sequence
  Description of Artificial Sequence: Synthetic oligonucleotide
uacuaugaccccagccacg

SEQ ID NO: 2184135 - RNA, 19 nt, Artificial Sequence
  Description of Artificial Sequence: Synthetic oligonucleotide
ucaaacacucgaaccgccc

SEQ ID NO: 2184136 - RNA, 19 nt, Artificial Sequence
  Description of Artificial Sequence: Synthetic oligonucleotide
gacccggucaccuuucuug

SEQ ID NO: 2184137 - RNA, 19 nt, Artificial Sequence
  Description of Artificial Sequence: Synthetic oligonucleotide
agagcaaacucugcauagc

SEQ ID NO: 2184138 - RNA, 19 nt, Artificial Sequence
  Description of Artificial Sequence: Synthetic oligonucleotide
acucagaaccuaucacugg

SEQ ID NO: 2184139 - RNA, 19 nt, Artificial Sequence
  Description of Artificial Sequence: Synthetic oligonucleotide
ccuaucacugguuucaccc

SEQ ID NO: 2184140 - RNA, 19 nt, Artificial Sequence
  Description of Artificial Sequence: Synthetic oligonucleotide
ggagcuucagcacuucugg

SEQ ID NO: 2184141 - RNA, 19 nt, Artificial Sequence
  Description of Artificial Sequence: Synthetic oligonucleotide
auuccuguuuggaggaugc

SEQ ID NO: 2184142 - RNA, 19 nt, Artificial Sequence
  Description of Artificial Sequence: Synthetic oligonucleotide
uuuugggaugggaaccgcc

SEQ ID NO: 2184143 - RNA, 19 nt, Artificial Sequence
  Description of Artificial Sequence: Synthetic oligonucleotide
cuucugguccaccaaauuc

SEQ ID NO: 2184144 - RNA, 19 nt, Artificial Sequence
  Description of Artificial Sequence: Synthetic oligonucleotide
agugugauccgcugcaaga

SEQ ID NO: 2184145 - RNA, 19 nt, Artificial Sequence
  Description of Artificial Sequence: Synthetic oligonucleotide
ucauuucaauagaaccucu

SEQ ID NO: 2184146 - RNA, 19 nt, Artificial Sequence
  Description of Artificial Sequence: Synthetic oligonucleotide
gaugccugcgaacuguuga

SEQ ID NO: 2184147 - RNA, 19 nt, Artificial Sequence
  Description of Artificial Sequence: Synthetic oligonucleotide
agcuucaagucauuauuca

SEQ ID NO: 2184148 - RNA, 19 nt, Artificial Sequence
  Description of Artificial Sequence: Synthetic oligonucleotide
cuaaaguccagggucucgg

SEQ ID NO: 2184149 - RNA, 19 nt, Artificial Sequence
  Description of Artificial Sequence: Synthetic oligonucleotide
uacgggaucccaagugcgg

SEQ ID NO: 2184150 - RNA, 19 nt, Artificial Sequence
  Description of Artificial Sequence: Synthetic oligonucleotide
gucauuauucagguuuacg

SEQ ID NO: 2184151 - RNA, 19 nt, Artificial Sequence
  Description of Artificial Sequence: Synthetic oligonucleotide
aaccaggacgcuuucccca

SEQ ID NO: 2184152 - RNA, 19 nt, Artificial Sequence
  Description of Artificial Sequence: Synthetic oligonucleotide
uccccgacagauacuauga

SEQ ID NO: 2184153 - RNA, 19 nt, Artificial Sequence
  Description of Artificial Sequence: Synthetic oligonucleotide
cugccuaaaguccaggguc

SEQ ID NO: 2184154 - RNA, 19 nt, Artificial Sequence
  Description of Artificial Sequence: Synthetic oligonucleotide
cuggcaaucuggcacguag

SEQ ID NO: 2184155 - RNA, 19 nt, Artificial Sequence
  Description of Artificial Sequence: Synthetic oligonucleotide
ugcgaacuguugaaauucc

SEQ ID NO: 2184156 - RNA, 19 nt, Artificial Sequence
  Description of Artificial Sequence: Synthetic oligonucleotide
accuuuaagccaugagcuc

SEQ ID NO: 2184157 - RNA, 19 nt, Artificial Sequence
  Description of Artificial Sequence: Synthetic oligonucleotide
uacguuugccagcaucuca

SEQ ID NO: 2184158 - RNA, 19 nt, Artificial Sequence
  Description of Artificial Sequence: Synthetic oligonucleotide
ccaagggguacucagaacc

SEQ ID NO: 2184159 - RNA, 19 nt, Artificial Sequence
  Description of Artificial Sequence: Synthetic oligonucleotide
uaauuggcuucuuugugau

SEQ ID NO: 2184160 - RNA, 19 nt, Artificial Sequence
  Description of Artificial Sequence: Synthetic oligonucleotide
caccaaauucaaacacucg

SEQ ID NO: 2184161 - RNA, 19 nt, Artificial Sequence
  Description of Artificial Sequence: Synthetic oligonucleotide
uuuugcagaacaagcuuuu

SEQ ID NO: 2184162 - RNA, 19 nt, Artificial Sequence
  Description of Artificial Sequence: Synthetic oligonucleotide
aucaauguaauuggcuucu

SEQ ID NO: 2184163 - RNA, 19 nt, Artificial Sequence
  Description of Artificial Sequence: Synthetic oligonucleotide
accuaucacugguuucacc

SEQ ID NO: 2184164 - RNA, 19 nt, Artificial Sequence
  Description of Artificial Sequence: Synthetic oligonucleotide
gccaacaacaaucacccgc

SEQ ID NO: 2184165 - RNA, 19 nt, Artificial Sequence
  Description of Artificial Sequence: Synthetic oligonucleotide
gcaaacucugcauagccgc

SEQ ID NO: 2184166 - RNA, 19 nt, Artificial Sequence
  Description of Artificial Sequence: Synthetic oligonucleotide
caaucuggcacguagcuaa

SEQ ID NO: 2184167 - RNA, 19 nt, Artificial Sequence
  Description of Artificial Sequence: Synthetic oligonucleotide
ucacugguuucacccaacc

SEQ ID NO: 2184168 - RNA, 19 nt, Artificial Sequence
  Description of Artificial Sequence: Synthetic oligonucleotide
gaaacuguguuggagcaga

SEQ ID NO: 2184169 - RNA, 19 nt, Artificial Sequence
  Description of Artificial Sequence: Synthetic oligonucleotide
cuguguuggagcagaagac

SEQ ID NO: 2184170 - RNA, 19 nt, Artificial Sequence
  Description of Artificial Sequence: Synthetic oligonucleotide
uaagucucuacuggguuga

SEQ ID NO: 2184171 - RNA, 19 nt, Artificial Sequence
  Description of Artificial Sequence: Synthetic oligonucleotide
agguuuucgacuguaggcu

SEQ ID NO: 2184172 - RNA, 19 nt, Artificial Sequence
  Description of Artificial Sequence: Synthetic oligonucleotide
uucaugagccccguuuugc

SEQ ID NO: 2184173 - RNA, 19 nt, Artificial Sequence
  Description of Artificial Sequence: Synthetic oligonucleotide
gacacgcuguccccgacag

SEQ ID NO: 2184174 - RNA, 19 nt, Artificial Sequence
  Description of Artificial Sequence: Synthetic oligonucleotide
aacuccaauuauacuuguc

SEQ ID NO: 2184175 - RNA, 19 nt, Artificial Sequence
  Description of Artificial Sequence: Synthetic oligonucleotide
guuuacguuugccagcauc

SEQ ID NO: 2184176 - RNA, 19 nt, Artificial Sequence
  Description of Artificial Sequence: Synthetic oligonucleotide
ccaacaacaaucacccgcc

SEQ ID NO: 2184177 - RNA, 19 nt, Artificial Sequence
  Description of Artificial Sequence: Synthetic oligonucleotide
caaacacuucaugagcccc

SEQ ID NO: 2184178 - RNA, 19 nt, Artificial Sequence
  Description of Artificial Sequence: Synthetic oligonucleotide
ggaguguagggcaagguag

SEQ ID NO: 2184179 - RNA, 19 nt, Artificial Sequence
  Description of Artificial Sequence: Synthetic oligonucleotide
uggaguguagggcaaggua

SEQ ID NO: 2184180 - RNA, 19 nt, Artificial Sequence
  Description of Artificial Sequence: Synthetic oligonucleotide
cacguagcuaauccaacac

SEQ ID NO: 2184181 - RNA, 19 nt, Artificial Sequence
  Description of Artificial Sequence: Synthetic oligonucleotide
augagcucuggcaaucugg

SEQ ID NO: 2184182 - RNA, 19 nt, Artificial Sequence
  Description of Artificial Sequence: Synthetic oligonucleotide
ggccccgugaaccaggacg

SEQ ID NO: 2184183 - RNA, 19 nt, Artificial Sequence
  Description of Artificial Sequence: Synthetic oligonucleotide
ucuugaaagcagacacgcu

SEQ ID NO: 2184184 - RNA, 19 nt, Artificial Sequence
  Description of Artificial Sequence: Synthetic oligonucleotide
ccagaaacuguguuggagc

SEQ ID NO: 2184185 - RNA, 19 nt, Artificial Sequence
  Description of Artificial Sequence: Synthetic oligonucleotide
uuaagccaugagcucuggc

SEQ ID NO: 2184186 - RNA, 19 nt, Artificial Sequence
  Description of Artificial Sequence: Synthetic oligonucleotide
cagagcgaauauaagucuc

SEQ ID NO: 2184187 - RNA, 19 nt, Artificial Sequence
  Description of Artificial Sequence: Synthetic oligonucleotide
aaccuaucacugguuucac

SEQ ID NO: 2184188 - RNA, 19 nt, Artificial Sequence
  Description of Artificial Sequence: Synthetic oligonucleotide
ucucaacaaccacaucgac

SEQ ID NO: 2184189 - RNA, 19 nt, Artificial Sequence
  Description of Artificial Sequence: Synthetic oligonucleotide
uggcacguagcuaauccaa

SEQ ID NO: 2184190 - RNA, 19 nt, Artificial Sequence
  Description of Artificial Sequence: Synthetic oligonucleotide
auuagaaccugauggccuu

SEQ ID NO: 2184191 - RNA, 19 nt, Artificial Sequence
  Description of Artificial Sequence: Synthetic oligonucleotide
auagccgccagaaacugug

SEQ ID NO: 2184192 - RNA, 19 nt, Artificial Sequence
  Description of Artificial Sequence: Synthetic oligonucleotide
ucaugagccccguuuugca

SEQ ID NO: 2184193 - RNA, 19 nt, Artificial Sequence
  Description of Artificial Sequence: Synthetic oligonucleotide
caaucacccgcccuccacg

SEQ ID NO: 2184194 - RNA, 19 nt, Artificial Sequence
  Description of Artificial Sequence: Synthetic oligonucleotide
gaaccaggacgcuuucccc

SEQ ID NO: 2184195 - RNA, 19 nt, Artificial Sequence
  Description of Artificial Sequence: Synthetic oligonucleotide
auauaagucucuacugggu

SEQ ID NO: 2184196 - RNA, 19 nt, Artificial Sequence
  Description of Artificial Sequence: Synthetic oligonucleotide
uucgacuguaggcuccaga

SEQ ID NO: 2184197 - RNA, 19 nt, Artificial Sequence
  Description of Artificial Sequence: Synthetic oligonucleotide
ugcacacgggcacugugga

SEQ ID NO: 2184198 - RNA, 19 nt, Artificial Sequence
  Description of Artificial Sequence: Synthetic oligonucleotide
cguggguucauuucaauag

SEQ ID NO: 2184199 - RNA, 19 nt, Artificial Sequence
  Description of Artificial Sequence: Synthetic oligonucleotide
augggaaccgccacauugg

SEQ ID NO: 2184200 - RNA, 19 nt, Artificial Sequence
  Description of Artificial Sequence: Synthetic oligonucleotide
gguacucagaaccuaucac

SEQ ID NO: 2184201 - RNA, 19 nt, Artificial Sequence
  Description of Artificial Sequence: Synthetic oligonucleotide
agucauuauucagguuuac

SEQ ID NO: 2184202 - RNA, 19 nt, Artificial Sequence
  Description of Artificial Sequence: Synthetic oligonucleotide
acgaccuucuccaaggggu

SEQ ID NO: 2184203 - RNA, 19 nt, Artificial Sequence
  Description of Artificial Sequence: Synthetic oligonucleotide
uacuugucuccuuugccau

SEQ ID NO: 2184204 - RNA, 19 nt, Artificial Sequence
  Description of Artificial Sequence: Synthetic oligonucleotide
guguuggagcagaagaccc

SEQ ID NO: 2184205 - RNA, 19 nt, Artificial Sequence
  Description of Artificial Sequence: Synthetic oligonucleotide
cugcgaacuguugaaauuc

SEQ ID NO: 2184206 - RNA, 19 nt, Artificial Sequence
  Description of Artificial Sequence: Synthetic oligonucleotide
ggcacuguggaacagagcu

SEQ ID NO: 2184207 - RNA, 19 nt, Artificial Sequence
  Description of Artificial Sequence: Synthetic oligonucleotide
guccccgacagauacuaug

SEQ ID NO: 2184208 - RNA, 19 nt, Artificial Sequence
  Description of Artificial Sequence: Synthetic oligonucleotide
ccucauaagacaagaauca

SEQ ID NO: 2184209 - RNA, 19 nt, Artificial Sequence
  Description of Artificial Sequence: Synthetic oligonucleotide
cccguuuugcagaacaagc

SEQ ID NO: 2184210 - RNA, 19 nt, Artificial Sequence
  Description of Artificial Sequence: Synthetic oligonucleotide
gacagauacuaugacccca

SEQ ID NO: 2184211 - RNA, 19 nt, Artificial Sequence
  Description of Artificial Sequence: Synthetic oligonucleotide
acgggaucccaagugcggc

SEQ ID NO: 2184212 - RNA, 19 nt, Artificial Sequence
  Description of Artificial Sequence: Synthetic oligonucleotide
aucucaacaaccacaucga

SEQ ID NO: 2184213 - RNA, 19 nt, Artificial Sequence
  Description of Artificial Sequence: Synthetic oligonucleotide
guacgggaucccaagugcg

SEQ ID NO: 2184214 - RNA, 19 nt, Artificial Sequence
  Description of Artificial Sequence: Synthetic oligonucleotide
caugagccccguuuugcag

SEQ ID NO: 2184215 - RNA, 19 nt, Artificial Sequence
  Description of Artificial Sequence: Synthetic oligonucleotide
uggagcagaagacccgguc

SEQ ID NO: 2184216 - RNA, 19 nt, Artificial Sequence
  Description of Artificial Sequence: Synthetic oligonucleotide
uccgcugcaagagcaaacu

SEQ ID NO: 2184217 - RNA, 19 nt, Artificial Sequence
  Description of Artificial Sequence: Synthetic oligonucleotide
cacacgggcacuguggaac

SEQ ID NO: 2184218 - RNA, 19 nt, Artificial Sequence
  Description of Artificial Sequence: Synthetic oligonucleotide
ucuacuggguugacaccac

SEQ ID NO: 2184219 - RNA, 19 nt, Artificial Sequence
  Description of Artificial Sequence: Synthetic oligonucleotide
acaggcguggacuuugauu

SEQ ID NO: 2184220 - RNA, 19 nt, Artificial Sequence
  Description of Artificial Sequence: Synthetic oligonucleotide
uccacgggacagaagcuuc

SEQ ID NO: 2184221 - RNA, 19 nt, Artificial Sequence
  Description of Artificial Sequence: Synthetic oligonucleotide
gauuagaaccugauggccu

SEQ ID NO: 2184222 - RNA, 19 nt, Artificial Sequence
  Description of Artificial Sequence: Synthetic oligonucleotide
gacgcuuuccccagcuugc

SEQ ID NO: 2184223 - RNA, 19 nt, Artificial Sequence
  Description of Artificial Sequence: Synthetic oligonucleotide
cagaaacuguguuggagca

SEQ ID NO: 2184224 - RNA, 19 nt, Artificial Sequence
  Description of Artificial Sequence: Synthetic oligonucleotide
auaagacaagaaucauuuu

SEQ ID NO: 2184225 - RNA, 19 nt, Artificial Sequence
  Description of Artificial Sequence: Synthetic oligonucleotide
aacacucgaaccgcccuca

SEQ ID NO: 2184226 - RNA, 19 nt, Artificial Sequence
  Description of Artificial Sequence: Synthetic oligonucleotide
cgaauauaagucucuacug

SEQ ID NO: 2184227 - RNA, 19 nt, Artificial Sequence
  Description of Artificial Sequence: Synthetic oligonucleotide
acuaugaccccagccacgu

SEQ ID NO: 2184228 - RNA, 19 nt, Artificial Sequence
  Description of Artificial Sequence: Synthetic oligonucleotide
gaaccgccacauuggacug

SEQ ID NO: 2184229 - RNA, 19 nt, Artificial Sequence
  Description of Artificial Sequence: Synthetic oligonucleotide
ggcaagguagguuuucgac

SEQ ID NO: 2184230 - RNA, 19 nt, Artificial Sequence
  Description of Artificial Sequence: Synthetic oligonucleotide
aacaaucacccgcccucca

SEQ ID NO: 2184231 - RNA, 19 nt, Artificial Sequence
  Description of Artificial Sequence: Synthetic oligonucleotide
agguuuacguuugccagca

SEQ ID NO: 2184232 - RNA, 19 nt, Artificial Sequence
  Description of Artificial Sequence: Synthetic oligonucleotide
ucagaaccuaucacugguu

SEQ ID NO: 2184233 - RNA, 19 nt, Artificial Sequence
  Description of Artificial Sequence: Synthetic oligonucleotide
ucacccgcccuccacggga

SEQ ID NO: 2184234 - RNA, 19 nt, Artificial Sequence
  Description of Artificial Sequence: Synthetic oligonucleotide
gcgaauauaagucucuacu

SEQ ID NO: 2184235 - RNA, 19 nt, Artificial Sequence
  Description of Artificial Sequence: Synthetic oligonucleotide
aagguagguuuucgacugu

SEQ ID NO: 2184236 - RNA, 19 nt, Artificial Sequence
  Description of Artificial Sequence: Synthetic oligonucleotide
guuuucgacuguaggcucc

SEQ ID NO: 2184237 - RNA, 19 nt, Artificial Sequence
  Description of Artificial Sequence: Synthetic oligonucleotide
cccuccacgggacagaagc

SEQ ID NO: 2184238 - RNA, 19 nt, Artificial Sequence
  Description of Artificial Sequence: Synthetic oligonucleotide
agagcgaauauaagucucu

SEQ ID NO: 2184239 - RNA, 19 nt, Artificial Sequence
  Description of Artificial Sequence: Synthetic oligonucleotide
accaggacgcuuuccccag

SEQ ID NO: 2184240 - RNA, 19 nt, Artificial Sequence
  Description of Artificial Sequence: Synthetic oligonucleotide
agggcaagguagguuuucg

SEQ ID NO: 2184241 - RNA, 19 nt, Artificial Sequence
  Description of Artificial Sequence: Synthetic oligonucleotide
ugggaaccgccacauugga

SEQ ID NO: 2184242 - RNA, 19 nt, Artificial Sequence
  Description of Artificial Sequence: Synthetic oligonucleotide
ggaaccgccacauuggacu

SEQ ID NO: 2184243 - RNA, 19 nt, Artificial Sequence
  Description of Artificial Sequence: Synthetic oligonucleotide
uuuucgacuguaggcucca

SEQ ID NO: 2184244 - RNA, 19 nt, Artificial Sequence
  Description of Artificial Sequence: Synthetic oligonucleotide
aacacuucaugagccccgu

SEQ ID NO: 2184245 - RNA, 19 nt, Artificial Sequence
  Description of Artificial Sequence: Synthetic oligonucleotide
acuuugauuagaaccugau

SEQ ID NO: 2184246 - RNA, 19 nt, Artificial Sequence
  Description of Artificial Sequence: Synthetic oligonucleotide
agcuaauccaacaccucca

SEQ ID NO: 2184247 - RNA, 19 nt, Artificial Sequence
  Description of Artificial Sequence: Synthetic oligonucleotide
cuggacgaccuucuccaag

SEQ ID NO: 2184248 - RNA, 19 nt, Artificial Sequence
  Description of Artificial Sequence: Synthetic oligonucleotide
uuccggucuucccacugcu

SEQ ID NO: 2184249 - RNA, 19 nt, Artificial Sequence
  Description of Artificial Sequence: Synthetic oligonucleotide
ucgaaccgcccucaucaac

SEQ ID NO: 2184250 - RNA, 19 nt, Artificial Sequence
  Description of Artificial Sequence: Synthetic oligonucleotide
gcugcaagagcaaacucug

SEQ ID NO: 2184251 - RNA, 19 nt, Artificial Sequence
  Description of Artificial Sequence: Synthetic oligonucleotide
cccgacagauacuaugacc

SEQ ID NO: 2184252 - RNA, 19 nt, Artificial Sequence
  Description of Artificial Sequence: Synthetic oligonucleotide
cugcaagagcaaacucugc

SEQ ID NO: 2184253 - RNA, 19 nt, Artificial Sequence
  Description of Artificial Sequence: Synthetic oligonucleotide
uucaugggccuggacgacc

SEQ ID NO: 2184254 - RNA, 19 nt, Artificial Sequence
  Description of Artificial Sequence: Synthetic oligonucleotide
cacgucggugccuggagug

SEQ ID NO: 2184255 - RNA, 19 nt, Artificial Sequence
  Description of Artificial Sequence: Synthetic oligonucleotide
ugauccgcugcaagagcaa

SEQ ID NO: 2184256 - RNA, 19 nt, Artificial Sequence
  Description of Artificial Sequence: Synthetic oligonucleotide
gugccuggaguguagggca

SEQ ID NO: 2184257 - RNA, 19 nt, Artificial Sequence
  Description of Artificial Sequence: Synthetic oligonucleotide
ggacgcuuuccccagcuug

SEQ ID NO: 2184258 - RNA, 19 nt, Artificial Sequence
  Description of Artificial Sequence: Synthetic oligonucleotide
guccucauaagacaagaau

SEQ ID NO: 2184259 - RNA, 19 nt, Artificial Sequence
  Description of Artificial Sequence: Synthetic oligonucleotide
aagucucuacuggguugac

SEQ ID NO: 2184260 - RNA, 19 nt, Artificial Sequence
  Description of Artificial Sequence: Synthetic oligonucleotide
gcugugaaguacgggaucc

SEQ ID NO: 2184261 - RNA, 19 nt, Artificial Sequence
  Description of Artificial Sequence: Synthetic oligonucleotide
cuaucacugguuucaccca

SEQ ID NO: 2184262 - RNA, 19 nt, Artificial Sequence
  Description of Artificial Sequence: Synthetic oligonucleotide
aucacugguuucacccaac

SEQ ID NO: 2184263 - RNA, 19 nt, Artificial Sequence
  Description of Artificial Sequence: Synthetic oligonucleotide
caccuuucuugaaagcaga

SEQ ID NO: 2184264 - RNA, 19 nt, Artificial Sequence
  Description of Artificial Sequence: Synthetic oligonucleotide
cauuucaauagaaccucua

SEQ ID NO: 2184265 - RNA, 19 nt, Artificial Sequence
  Description of Artificial Sequence: Synthetic oligonucleotide
cagugugauccgcugcaag

SEQ ID NO: 2184266 - RNA, 19 nt, Artificial Sequence
  Description of Artificial Sequence: Synthetic oligonucleotide
agccaacaacaaucacccg

SEQ ID NO: 2184267 - RNA, 19 nt, Artificial Sequence
  Description of Artificial Sequence: Synthetic oligonucleotide
aagacccggucaccuuucu

SEQ ID NO: 2184268 - RNA, 19 nt, Artificial Sequence
  Description of Artificial Sequence: Synthetic oligonucleotide
auccgcugcaagagcaaac

SEQ ID NO: 2184269 - RNA, 19 nt, Artificial Sequence
  Description of Artificial Sequence: Synthetic oligonucleotide
cuguggaacagagcucggc

SEQ ID NO: 2184270 - RNA, 19 nt, Artificial Sequence
  Description of Artificial Sequence: Synthetic oligonucleotide
caacaacaaucacccgccc

SEQ ID NO: 2184271 - RNA, 19 nt, Artificial Sequence
  Description of Artificial Sequence: Synthetic oligonucleotide
ucggcaggcugugaaguac

SEQ ID NO: 2184272 - RNA, 19 nt, Artificial Sequence
  Description of Artificial Sequence: Synthetic oligonucleotide
cacauuggacuggagcuuc

SEQ ID NO: 2184273 - RNA, 19 nt, Artificial Sequence
  Description of Artificial Sequence: Synthetic oligonucleotide
cucagaaccuaucacuggu

SEQ ID NO: 2184274 - RNA, 19 nt, Artificial Sequence
  Description of Artificial Sequence: Synthetic oligonucleotide
accgcccucaucaacuucu

SEQ ID NO: 2184275 - RNA, 19 nt, Artificial Sequence
  Description of Artificial Sequence: Synthetic oligonucleotide
ucucgggcaggguguagac

SEQ ID NO: 2184276 - RNA, 19 nt, Artificial Sequence
  Description of Artificial Sequence: Synthetic oligonucleotide
augccugcgaacuguugaa

SEQ ID NO: 2184277 - RNA, 19 nt, Artificial Sequence
  Description of Artificial Sequence: Synthetic oligonucleotide
caggguguagacaguguga

SEQ ID NO: 2184278 - RNA, 19 nt, Artificial Sequence
  Description of Artificial Sequence: Synthetic oligonucleotide
gcuaauccaacaccuccac

SEQ ID NO: 2184279 - RNA, 19 nt, Artificial Sequence
  Description of Artificial Sequence: Synthetic oligonucleotide
cagauacuaugaccccagc

SEQ ID NO: 2184280 - RNA, 19 nt, Artificial Sequence
  Description of Artificial Sequence: Synthetic oligonucleotide
ggugccuggaguguagggc

SEQ ID NO: 2184281 - RNA, 19 nt, Artificial Sequence
  Description of Artificial Sequence: Synthetic oligonucleotide
ugagccccguuuugcagaa

SEQ ID NO: 2184282 - RNA, 19 nt, Artificial Sequence
  Description of Artificial Sequence: Synthetic oligonucleotide
gucccguggguucauuuca

SEQ ID NO: 2184283 - RNA, 19 nt, Artificial Sequence
  Description of Artificial Sequence: Synthetic oligonucleotide
gugauccgcugcaagagca

SEQ ID NO: 2184284 - RNA, 19 nt, Artificial Sequence
  Description of Artificial Sequence: Synthetic oligonucleotide
cuuuugggaugggaaccgc

SEQ ID NO: 2184285 - RNA, 19 nt, Artificial Sequence
  Description of Artificial Sequence: Synthetic oligonucleotide
guagcuaauccaacaccuc

SEQ ID NO: 2184286 - RNA, 19 nt, Artificial Sequence
  Description of Artificial Sequence: Synthetic oligonucleotide
uccggucuucccacugcug

SEQ ID NO: 2184287 - RNA, 19 nt, Artificial Sequence
  Description of Artificial Sequence: Synthetic oligonucleotide
ccaaauucaaacacucgaa

SEQ ID NO: 2184288 - RNA, 19 nt, Artificial Sequence
  Description of Artificial Sequence: Synthetic oligonucleotide
aggcguggacuuugauuag

SEQ ID NO: 2184289 - RNA, 19 nt, Artificial Sequence
  Description of Artificial Sequence: Synthetic oligonucleotide
acguuugccagcaucucaa

SEQ ID NO: 2184290 - RNA, 19 nt, Artificial Sequence
  Description of Artificial Sequence: Synthetic oligonucleotide
acacgggcacuguggaaca

SEQ ID NO: 2184291 - RNA, 19 nt, Artificial Sequence
  Description of Artificial Sequence: Synthetic oligonucleotide
aagggguacucagaaccua

SEQ ID NO: 2184292 - RNA, 19 nt, Artificial Sequence
  Description of Artificial Sequence: Synthetic oligonucleotide
gguuuucgacuguaggcuc

SEQ ID NO: 2184293 - RNA, 19 nt, Artificial Sequence
  Description of Artificial Sequence: Synthetic oligonucleotide
gaaccagcugugcccaaaa

SEQ ID NO: 2184294 - RNA, 19 nt, Artificial Sequence
  Description of Artificial Sequence: Synthetic oligonucleotide
ucggugccuggaguguagg

SEQ ID NO: 2184295 - RNA, 19 nt, Artificial Sequence
  Description of Artificial Sequence: Synthetic oligonucleotide
agacacgcuguccccgaca

SEQ ID NO: 2184296 - RNA, 19 nt, Artificial Sequence
  Description of Artificial Sequence: Synthetic oligonucleotide
cauuggacuggagcuucag

SEQ ID NO: 2184297 - RNA, 19 nt, Artificial Sequence
  Description of Artificial Sequence: Synthetic oligonucleotide
cuggcacguagcuaaucca

SEQ ID NO: 2184298 - RNA, 19 nt, Artificial Sequence
  Description of Artificial Sequence: Synthetic oligonucleotide
guaggcuccagagcgaaua

SEQ ID NO: 2184299 - RNA, 19 nt, Artificial Sequence
  Description of Artificial Sequence: Synthetic oligonucleotide
aucacccgcccuccacggg

SEQ ID NO: 2184300 - RNA, 19 nt, Artificial Sequence
  Description of Artificial Sequence: Synthetic oligonucleotide
gccgccagaaacuguguug

SEQ ID NO: 2184301 - RNA, 19 nt, Artificial Sequence
  Description of Artificial Sequence: Synthetic oligonucleotide
aguguagggcaagguaggu

SEQ ID NO: 2184302 - RNA, 19 nt, Artificial Sequence
  Description of Artificial Sequence: Synthetic oligonucleotide
gaaccucuacagccaacaa

SEQ ID NO: 2184303 - RNA, 19 nt, Artificial Sequence
  Description of Artificial Sequence: Synthetic oligonucleotide
ccucaucaacuucuguccc

SEQ ID NO: 2184304 - RNA, 19 nt, Artificial Sequence
  Description of Artificial Sequence: Synthetic oligonucleotide
uucagcacuucugguccac

SEQ ID NO: 2184305 - RNA, 19 nt, Artificial Sequence
  Description of Artificial Sequence: Synthetic oligonucleotide
gcacguagcuaauccaaca

SEQ ID NO: 2184306 - RNA, 19 nt, Artificial Sequence
  Description of Artificial Sequence: Synthetic oligonucleotide
gcaagguagguuuucgacu

SEQ ID NO: 2184307 - RNA, 19 nt, Artificial Sequence
  Description of Artificial Sequence: Synthetic oligonucleotide
uguaggcuccagagcgaau

SEQ ID NO: 2184308 - RNA, 19 nt, Artificial Sequence
  Description of Artificial Sequence: Synthetic oligonucleotide
caacaaccacaucgacccc

SEQ ID NO: 2184309 - RNA, 19 nt, Artificial Sequence
  Description of Artificial Sequence: Synthetic oligonucleotide
uagccgccagaaacugugu

SEQ ID NO: 2184310 - RNA, 19 nt, Artificial Sequence
  Description of Artificial Sequence: Synthetic oligonucleotide
auggccuuuugggauggga

SEQ ID NO: 2184311 - RNA, 19 nt, Artificial Sequence
  Description of Artificial Sequence: Synthetic oligonucleotide
ggcuccagagcgaauauaa

SEQ ID NO: 2184312 - RNA, 19 nt, Artificial Sequence
  Description of Artificial Sequence: Synthetic oligonucleotide
ugccuggaguguagggcaa

SEQ ID NO: 2184313 - RNA, 19 nt, Artificial Sequence
  Description of Artificial Sequence: Synthetic oligonucleotide
gaagacccggucaccuuuc

SEQ ID NO: 2184314 - RNA, 19 nt, Artificial Sequence
  Description of Artificial Sequence: Synthetic oligonucleotide
uagggcaagguagguuuuc

SEQ ID NO: 2184315 - RNA, 19 nt, Artificial Sequence
  Description of Artificial Sequence: Synthetic oligonucleotide
ugguuucacccaaccuuuu

SEQ ID NO: 2184316 - RNA, 19 nt, Artificial Sequence
  Description of Artificial Sequence: Synthetic oligonucleotide
gagcucggcaggcugugaa

SEQ ID NO: 2184317 - RNA, 19 nt, Artificial Sequence
  Description of Artificial Sequence: Synthetic oligonucleotide
cccugccuaaaguccaggg

SEQ ID NO: 2184318 - RNA, 19 nt, Artificial Sequence
  Description of Artificial Sequence: Synthetic oligonucleotide
acuguggaacagagcucgg

SEQ ID NO: 2184319 - RNA, 19 nt, Artificial Sequence
  Description of Artificial Sequence: Synthetic oligonucleotide
uuucgacuguaggcuccag

SEQ ID NO: 2184320 - RNA, 19 nt, Artificial Sequence
  Description of Artificial Sequence: Synthetic oligonucleotide
gagcgaauauaagucucua

SEQ ID NO: 2184321 - RNA, 19 nt, Artificial Sequence
  Description of Artificial Sequence: Synthetic oligonucleotide
agggguacucagaaccuau

SEQ ID NO: 2184322 - RNA, 19 nt, Artificial Sequence
  Description of Artificial Sequence: Synthetic oligonucleotide
ucaauguaauuggcuucuu

SEQ ID NO: 2184323 - RNA, 19 nt, Artificial Sequence
  Description of Artificial Sequence: Synthetic oligonucleotide
ccuaaaguccagggucucg

SEQ ID NO: 2184324 - RNA, 19 nt, Artificial Sequence
  Description of Artificial Sequence: Synthetic oligonucleotide
caaacacucgaaccgcccu

SEQ ID NO: 2184325 - RNA, 19 nt, Artificial Sequence
  Description of Artificial Sequence: Synthetic oligonucleotide
aaucuggcacguagcuaau

SEQ ID NO: 2184326 - RNA, 19 nt, Artificial Sequence
  Description of Artificial Sequence: Synthetic oligonucleotide
acuguaggcuccagagcga

SEQ ID NO: 2184327 - RNA, 19 nt, Artificial Sequence
  Description of Artificial Sequence: Synthetic oligonucleotide
accgccacauuggacugga

SEQ ID NO: 2184328 - RNA, 19 nt, Artificial Sequence
  Description of Artificial Sequence: Synthetic oligonucleotide
gauccgcugcaagagcaaa

SEQ ID NO: 2184329 - RNA, 19 nt, Artificial Sequence
  Description of Artificial Sequence: Synthetic oligonucleotide
agccgccagaaacuguguu

SEQ ID NO: 2184330 - RNA, 19 nt, Artificial Sequence
  Description of Artificial Sequence: Synthetic oligonucleotide
cacucgaaccgcccucauc

SEQ ID NO: 2184331 - RNA, 19 nt, Artificial Sequence
  Description of Artificial Sequence: Synthetic oligonucleotide
caagggguacucagaaccu

SEQ ID NO: 2184332 - RNA, 19 nt, Artificial Sequence
  Description of Artificial Sequence: Synthetic oligonucleotide
ugccugcgaacuguugaaa

SEQ ID NO: 2184333 - RNA, 19 nt, Artificial Sequence
  Description of Artificial Sequence: Synthetic oligonucleotide
uagaaccugauggccuuuu

SEQ ID NO: 2184334 - RNA, 19 nt, Artificial Sequence
  Description of Artificial Sequence: Synthetic oligonucleotide
ggcugugaaguacgggauc

SEQ ID NO: 2184335 - RNA, 19 nt, Artificial Sequence
  Description of Artificial Sequence: Synthetic oligonucleotide
uguccccgacagauacuau

SEQ ID NO: 2184336 - RNA, 19 nt, Artificial Sequence
  Description of Artificial Sequence: Synthetic oligonucleotide
agggucucgggcagggugu

SEQ ID NO: 2184337 - RNA, 19 nt, Artificial Sequence
  Description of Artificial Sequence: Synthetic oligonucleotide
uggcuucuuugugaucaaa

SEQ ID NO: 2184338 - RNA, 19 nt, Artificial Sequence
  Description of Artificial Sequence: Synthetic oligonucleotide
ggguugacaccacaggcgu

SEQ ID NO: 2184339 - RNA, 19 nt, Artificial Sequence
  Description of Artificial Sequence: Synthetic oligonucleotide
cuacuggguugacaccaca

SEQ ID NO: 2184340 - RNA, 19 nt, Artificial Sequence
  Description of Artificial Sequence: Synthetic oligonucleotide
agguagguuuucgacugua

SEQ ID NO: 2184341 - RNA, 19 nt, Artificial Sequence
  Description of Artificial Sequence: Synthetic oligonucleotide
cggucaccuuucuugaaag

SEQ ID NO: 2184342 - RNA, 19 nt, Artificial Sequence
  Description of Artificial Sequence: Synthetic oligonucleotide
gucggugccuggaguguag

SEQ ID NO: 2184343 - RNA, 19 nt, Artificial Sequence
  Description of Artificial Sequence: Synthetic oligonucleotide
ccccuugucaccaacagau

SEQ ID NO: 2184344 - RNA, 19 nt, Artificial Sequence
  Description of Artificial Sequence: Synthetic oligonucleotide
acgggcacuguggaacaga

SEQ ID NO: 2184345 - RNA, 19 nt, Artificial Sequence
  Description of Artificial Sequence: Synthetic oligonucleotide
ggcaaucuggcacguagcu

SEQ ID NO: 2184346 - RNA, 19 nt, Artificial Sequence
  Description of Artificial Sequence: Synthetic oligonucleotide
cgacagauacuaugacccc

SEQ ID NO: 2184347 - RNA, 19 nt, Artificial Sequence
  Description of Artificial Sequence: Synthetic oligonucleotide
cguagcuaauccaacaccu

SEQ ID NO: 2184348 - RNA, 19 nt, Artificial Sequence
  Description of Artificial Sequence: Synthetic oligonucleotide
gagcuucagcacuucuggu

SEQ ID NO: 2184349 - RNA, 19 nt, Artificial Sequence
  Description of Artificial Sequence: Synthetic oligonucleotide
cucauaagacaagaaucau

SEQ ID NO: 2184350 - RNA, 19 nt, Artificial Sequence
  Description of Artificial Sequence: Synthetic oligonucleotide
cuguccccgacagauacua

SEQ ID NO: 2184351 - RNA, 19 nt, Artificial Sequence
  Description of Artificial Sequence: Synthetic oligonucleotide
gccccgugaaccaggacgc

SEQ ID NO: 2184352 - RNA, 19 nt, Artificial Sequence
  Description of Artificial Sequence: Synthetic oligonucleotide
gggaucccaagugcggccc

SEQ ID NO: 2184353 - RNA, 19 nt, Artificial Sequence
  Description of Artificial Sequence: Synthetic oligonucleotide
cacgcuguccccgacagau

SEQ ID NO: 2184354 - RNA, 19 nt, Artificial Sequence
  Description of Artificial Sequence: Synthetic oligonucleotide
ccaauuauacuugucuccu

SEQ ID NO: 2184355 - RNA, 19 nt, Artificial Sequence
  Description of Artificial Sequence: Synthetic oligonucleotide
acauuggacuggagcuuca

SEQ ID NO: 2184356 - RNA, 19 nt, Artificial Sequence
  Description of Artificial Sequence: Synthetic oligonucleotide
caacagauuucuugauuuu

SEQ ID NO: 2184357 - RNA, 19 nt, Artificial Sequence
  Description of Artificial Sequence: Synthetic oligonucleotide
gccacgucggugccuggag

SEQ ID NO: 2184358 - RNA, 19 nt, Artificial Sequence
  Description of Artificial Sequence: Synthetic oligonucleotide
cagaaccuaucacugguuu

SEQ ID NO: 2184359 - RNA, 19 nt, Artificial Sequence
  Description of Artificial Sequence: Synthetic oligonucleotide
ccccguuuugcagaacaag

SEQ ID NO: 2184360 - RNA, 19 nt, Artificial Sequence
  Description of Artificial Sequence: Synthetic oligonucleotide
agacccggucaccuuucuu

SEQ ID NO: 2184361 - RNA, 19 nt, Artificial Sequence
  Description of Artificial Sequence: Synthetic oligonucleotide
gggcaagguagguuuucga

SEQ ID NO: 2184362 - RNA, 19 nt, Artificial Sequence
  Description of Artificial Sequence: Synthetic oligonucleotide
cagacacgcuguccccgac

SEQ ID NO: 2184363 - RNA, 19 nt, Artificial Sequence
  Description of Artificial Sequence: Synthetic oligonucleotide
ugaccccagccacgucggu

SEQ ID NO: 2184364 - RNA, 19 nt, Artificial Sequence
  Description of Artificial Sequence: Synthetic oligonucleotide
cguggacuuugauuagaac

SEQ ID NO: 2184365 - RNA, 19 nt, Artificial Sequence
  Description of Artificial Sequence: Synthetic oligonucleotide
ccagagcgaauauaagucu

SEQ ID NO: 2184366 - RNA, 19 nt, Artificial Sequence
  Description of Artificial Sequence: Synthetic oligonucleotide
acgucggugccuggagugu

SEQ ID NO: 2184367 - RNA, 19 nt, Artificial Sequence
  Description of Artificial Sequence: Synthetic oligonucleotide
ucuggcaaucuggcacgua

SEQ ID NO: 2184368 - RNA, 19 nt, Artificial Sequence
  Description of Artificial Sequence: Synthetic oligonucleotide
cggcaggcugugaaguacg

SEQ ID NO: 2184369 - RNA, 19 nt, Artificial Sequence
  Description of Artificial Sequence: Synthetic oligonucleotide
cuguaggcuccagagcgaa

SEQ ID NO: 2184370 - RNA, 19 nt, Artificial Sequence
  Description of Artificial Sequence: Synthetic oligonucleotide
acgcuuuccccagcuugca

SEQ ID NO: 2184371 - RNA, 19 nt, Artificial Sequence
  Description of Artificial Sequence: Synthetic oligonucleotide
cgggcacuguggaacagag

SEQ ID NO: 2184372 - RNA, 19 nt, Artificial Sequence
  Description of Artificial Sequence: Synthetic oligonucleotide
cacccgcccuccacgggac

SEQ ID NO: 2184373 - RNA, 19 nt, Artificial Sequence
  Description of Artificial Sequence: Synthetic oligonucleotide
cauagccgccagaaacugu

SEQ ID NO: 2184374 - RNA, 19 nt, Artificial Sequence
  Description of Artificial Sequence: Synthetic oligonucleotide
aggacgcuuuccccagcuu

SEQ ID NO: 2184375 - RNA, 19 nt, Artificial Sequence
  Description of Artificial Sequence: Synthetic oligonucleotide
acacucgaaccgcccucau

SEQ ID NO: 2184376 - RNA, 19 nt, Artificial Sequence
  Description of Artificial Sequence: Synthetic oligonucleotide
agccacgucggugccugga

SEQ ID NO: 2184377 - RNA, 19 nt, Artificial Sequence
  Description of Artificial Sequence: Synthetic oligonucleotide
caauuauacuugucuccuu

SEQ ID NO: 2184378 - RNA, 19 nt, Artificial Sequence
  Description of Artificial Sequence: Synthetic oligonucleotide
ggcguggacuuugauuaga

SEQ ID NO: 2184379 - RNA, 19 nt, Artificial Sequence
  Description of Artificial Sequence: Synthetic oligonucleotide
cacgggcacuguggaacag

SEQ ID NO: 2184380 - RNA, 19 nt, Artificial Sequence
  Description of Artificial Sequence: Synthetic oligonucleotide
cuucuccaagggguacuca

SEQ ID NO: 2184381 - RNA, 19 nt, Artificial Sequence
  Description of Artificial Sequence: Synthetic oligonucleotide
uggccccgugaaccaggac

SEQ ID NO: 2184382 - RNA, 19 nt, Artificial Sequence
  Description of Artificial Sequence: Synthetic oligonucleotide
cucgaaccgcccucaucaa

SEQ ID NO: 2184383 - RNA, 19 nt, Artificial Sequence
  Description of Artificial Sequence: Synthetic oligonucleotide
gggguacucagaaccuauc

SEQ ID NO: 2184384 - RNA, 19 nt, Artificial Sequence
  Description of Artificial Sequence: Synthetic oligonucleotide
gcaucucaacaaccacauc

SEQ ID NO: 2184385 - RNA, 19 nt, Artificial Sequence
  Description of Artificial Sequence: Synthetic oligonucleotide
ccccgacagauacuaugac

SEQ ID NO: 2184386 - RNA, 19 nt, Artificial Sequence
  Description of Artificial Sequence: Synthetic oligonucleotide
caccaacagauuucuugau

SEQ ID NO: 2184387 - RNA, 19 nt, Artificial Sequence
  Description of Artificial Sequence: Synthetic oligonucleotide
gggaaccgccacauuggac

SEQ ID NO: 2184388 - RNA, 19 nt, Artificial Sequence
  Description of Artificial Sequence: Synthetic oligonucleotide
ccuugucaccaacagauuu

SEQ ID NO: 2184389 - RNA, 19 nt, Artificial Sequence
  Description of Artificial Sequence: Synthetic oligonucleotide
gcacuguggaacagagcuc

SEQ ID NO: 2184390 - RNA, 19 nt, Artificial Sequence
  Description of Artificial Sequence: Synthetic oligonucleotide
caggacgcuuuccccagcu

SEQ ID NO: 2184391 - RNA, 19 nt, Artificial Sequence
  Description of Artificial Sequence: Synthetic oligonucleotide
cgggaucccaagugcggcc

SEQ ID NO: 2184392 - RNA, 19 nt, Artificial Sequence
  Description of Artificial Sequence: Synthetic oligonucleotide
ccguggguucauuucaaua

SEQ ID NO: 2184393 - RNA, 19 nt, Artificial Sequence
  Description of Artificial Sequence: Synthetic oligonucleotide
gcguggacuuugauuagaa

SEQ ID NO: 2184394 - RNA, 19 nt, Artificial Sequence
  Description of Artificial Sequence: Synthetic oligonucleotide
ccggucaccuuucuugaaa

SEQ ID NO: 2184395 - RNA, 19 nt, Artificial Sequence
  Description of Artificial Sequence: Synthetic oligonucleotide
gccugcgaacuguugaaau

SEQ ID NO: 2184396 - RNA, 19 nt, Artificial Sequence
  Description of Artificial Sequence: Synthetic oligonucleotide
cgaaccgcccucaucaacu

SEQ ID NO: 2184397 - RNA, 19 nt, Artificial Sequence
  Description of Artificial Sequence: Synthetic oligonucleotide
ccugccuaaaguccagggu

SEQ ID NO: 2184398 - RNA, 19 nt, Artificial Sequence
  Description of Artificial Sequence: Synthetic oligonucleotide
gcaaucuggcacguagcua

SEQ ID NO: 2184399 - RNA, 19 nt, Artificial Sequence
  Description of Artificial Sequence: Synthetic oligonucleotide
ccacgggacagaagcuuca

SEQ ID NO: 2184400 - RNA, 19 nt, Artificial Sequence
  Description of Artificial Sequence: Synthetic oligonucleotide
ccgcugcaagagcaaacuc

SEQ ID NO: 2184401 - RNA, 19 nt, Artificial Sequence
  Description of Artificial Sequence: Synthetic oligonucleotide
ccaggacgcuuuccccagc

SEQ ID NO: 2184402 - RNA, 19 nt, Artificial Sequence
  Description of Artificial Sequence: Synthetic oligonucleotide
gccuaaaguccagggucuc

SEQ ID NO: 2184403 - RNA, 19 nt, Artificial Sequence
  Description of Artificial Sequence: Synthetic oligonucleotide
acccgcccuccacgggaca

SEQ ID NO: 2184404 - RNA, 19 nt, Artificial Sequence
  Description of Artificial Sequence: Synthetic oligonucleotide
ccugcgaacuguugaaauu

SEQ ID NO: 2184405 - RNA, 19 nt, Artificial Sequence
  Description of Artificial Sequence: Synthetic oligonucleotide
ccucuacagccaacaacaa

SEQ ID NO: 2184406 - RNA, 19 nt, Artificial Sequence
  Description of Artificial Sequence: Synthetic oligonucleotide
gcgaacuguugaaauuccu

SEQ ID NO: 2184407 - RNA, 19 nt, Artificial Sequence
  Description of Artificial Sequence: Synthetic oligonucleotide
cguuuugcagaacaagcuu

SEQ ID NO: 2184408 - RNA, 19 nt, Artificial Sequence
  Description of Artificial Sequence: Synthetic oligonucleotide
cuccacgggacagaagcuu

SEQ ID NO: 2184409 - RNA, 19 nt, Artificial Sequence
  Description of Artificial Sequence: Synthetic oligonucleotide
cagaagacccggucaccuu

SEQ ID NO: 2184410 - RNA, 19 nt, Artificial Sequence
  Description of Artificial Sequence: Synthetic oligonucleotide
ggucucgggcaggguguag

SEQ ID NO: 2184411 - RNA, 19 nt, Artificial Sequence
  Description of Artificial Sequence: Synthetic oligonucleotide
cuuugccauggugucccgu

SEQ ID NO: 2184412 - RNA, 19 nt, Artificial Sequence
  Description of Artificial Sequence: Synthetic oligonucleotide
gagccccguuuugcagaac

SEQ ID NO: 2184413 - RNA, 19 nt, Artificial Sequence
  Description of Artificial Sequence: Synthetic oligonucleotide
gccauggugucccgugggu

SEQ ID NO: 2184414 - RNA, 19 nt, Artificial Sequence
  Description of Artificial Sequence: Synthetic oligonucleotide
gcacacgggcacuguggaa

SEQ ID NO: 2184415 - RNA, 19 nt, Artificial Sequence
  Description of Artificial Sequence: Synthetic oligonucleotide
cccgcccuccacgggacag

SEQ ID NO: 2184416 - RNA, 19 nt, Artificial Sequence
  Description of Artificial Sequence: Synthetic oligonucleotide
acgcuguccccgacagaua

SEQ ID NO: 2184417 - RNA, 19 nt, Artificial Sequence
  Description of Artificial Sequence: Synthetic oligonucleotide
ccgugaaccaggacgcuuu

SEQ ID NO: 2184418 - RNA, 19 nt, Artificial Sequence
  Description of Artificial Sequence: Synthetic oligonucleotide
gccccguuuugcagaacaa

SEQ ID NO: 2184419 - RNA, 19 nt, Artificial Sequence
  Description of Artificial Sequence: Synthetic oligonucleotide
ccacaggcguggacuuuga

SEQ ID NO: 2184420 - RNA, 19 nt, Artificial Sequence
  Description of Artificial Sequence: Synthetic oligonucleotide
cucuggcaaucuggcacgu

SEQ ID NO: 2184421 - RNA, 19 nt, Artificial Sequence
  Description of Artificial Sequence: Synthetic oligonucleotide
cagcuugcacacgggcacu

SEQ ID NO: 2184422 - RNA, 19 nt, Artificial Sequence
  Description of Artificial Sequence: Synthetic oligonucleotide
ccuggacgaccuucuccaa

SEQ ID NO: 2184423 - RNA, 19 nt, Artificial Sequence
  Description of Artificial Sequence: Synthetic oligonucleotide
ccgccacauuggacuggag

SEQ ID NO: 2184424 - RNA, 19 nt, Artificial Sequence
  Description of Artificial Sequence: Synthetic oligonucleotide
gguuuacguuugccagcau

SEQ ID NO: 2184425 - RNA, 19 nt, Artificial Sequence
  Description of Artificial Sequence: Synthetic oligonucleotide
ccacauuggacuggagcuu

SEQ ID NO: 2184426 - RNA, 19 nt, Artificial Sequence
  Description of Artificial Sequence: Synthetic oligonucleotide
ccacgucggugccuggagu

SEQ ID NO: 2184427 - RNA, 19 nt, Artificial Sequence
  Description of Artificial Sequence: Synthetic oligonucleotide
cccguggguucauuucaau

SEQ ID NO: 2184428 - RNA, 19 nt, Artificial Sequence
  Description of Artificial Sequence: Synthetic oligonucleotide
cccuugucaccaacagauu

SEQ ID NO: 2184429 - RNA, 19 nt, Artificial Sequence
  Description of Artificial Sequence: Synthetic oligonucleotide
ccauggugucccguggguu

SEQ ID NO: 2184430 - RNA, 19 nt, Artificial Sequence
  Description of Artificial Sequence: Synthetic oligonucleotide
cccgugaaccaggacgcuu

SEQ ID NO: 2184431 - RNA, 19 nt, Artificial Sequence
  Description of Artificial Sequence: Synthetic oligonucleotide
ggugucccguggguucauu

SEQ ID NO: 2184432 - RNA, 19 nt, Artificial Sequence
  Description of Artificial Sequence: Synthetic oligonucleotide
cgucggugccuggagugua

SEQ ID NO: 2184433 - RNA, 19 nt, Artificial Sequence
  Description of Artificial Sequence: Synthetic oligonucleotide
aaggaauauguauauaggc

SEQ ID NO: 2184434 - RNA, 19 nt, Artificial Sequence
  Description of Artificial Sequence: Synthetic oligonucleotide
aaacgauauacacaagacc

SEQ ID NO: 2184435 - RNA, 19 nt, Artificial Sequence
  Description of Artificial Sequence: Synthetic oligonucleotide
ugaguuuugaagaauuugg

SEQ ID NO: 2184436 - RNA, 19 nt, Artificial Sequence
  Description of Artificial Sequence: Synthetic oligonucleotide
uuugaaaucaugcuuuucc

SEQ ID NO: 2184437 - RNA, 19 nt, Artificial Sequence
  Description of Artificial Sequence: Synthetic oligonucleotide
uuguacaugauauugaaug

SEQ ID NO: 2184438 - RNA, 19 nt, Artificial Sequence
  Description of Artificial Sequence: Synthetic oligonucleotide
uauugaaugaaugugcugg

SEQ ID NO: 2184439 - RNA, 19 nt, Artificial Sequence
  Description of Artificial Sequence: Synthetic oligonucleotide
agaaggaauauguauauag

SEQ ID NO: 2184440 - RNA, 19 nt, Artificial Sequence
  Description of Artificial Sequence: Synthetic oligonucleotide
caugauauaaacgauauac

SEQ ID NO: 2184441 - RNA, 19 nt, Artificial Sequence
  Description of Artificial Sequence: Synthetic oligonucleotide
auaacugagacguagcauc

SEQ ID NO: 2184442 - RNA, 19 nt, Artificial Sequence
  Description of Artificial Sequence: Synthetic oligonucleotide
ugauauugaaugaaugugc

SEQ ID NO: 2184443 - RNA, 19 nt, Artificial Sequence
  Description of Artificial Sequence: Synthetic oligonucleotide
uguucuagaaauccauugg

SEQ ID NO: 2184444 - RNA, 19 nt, Artificial Sequence
  Description of Artificial Sequence: Synthetic oligonucleotide
uuuacugaaccaauuacca

SEQ ID NO: 2184445 - RNA, 19 nt, Artificial Sequence
  Description of Artificial Sequence: Synthetic oligonucleotide
ugauauaaacgauauacac

SEQ ID NO: 2184446 - RNA, 19 nt, Artificial Sequence
  Description of Artificial Sequence: Synthetic oligonucleotide
uggacaauaacugagacgu

SEQ ID NO: 2184447 - RNA, 19 nt, Artificial Sequence
  Description of Artificial Sequence: Synthetic oligonucleotide
aacgauauacacaagacca

SEQ ID NO: 2184448 - RNA, 19 nt, Artificial Sequence
  Description of Artificial Sequence: Synthetic oligonucleotide
uuuccuuuaacaacccagg

SEQ ID NO: 2184449 - RNA, 19 nt, Artificial Sequence
  Description of Artificial Sequence: Synthetic oligonucleotide
uguuaaaaugccuacugug

SEQ ID NO: 2184450 - RNA, 19 nt, Artificial Sequence
  Description of Artificial Sequence: Synthetic oligonucleotide
uguuaaacaugacagcuga

SEQ ID NO: 2184451 - RNA, 19 nt, Artificial Sequence
  Description of Artificial Sequence: Synthetic oligonucleotide
aaauuauuacauccagaag

SEQ ID NO: 2184452 - RNA, 19 nt, Artificial Sequence
  Description of Artificial Sequence: Synthetic oligonucleotide
ugugaauuaaugcugacuu

SEQ ID NO: 2184453 - RNA, 19 nt, Artificial Sequence
  Description of Artificial Sequence: Synthetic oligonucleotide
auaaacgauauacacaaga

SEQ ID NO: 2184454 - RNA, 19 nt, Artificial Sequence
  Description of Artificial Sequence: Synthetic oligonucleotide
aguacuacuguaaucaaac

SEQ ID NO: 2184455 - RNA, 19 nt, Artificial Sequence
  Description of Artificial Sequence: Synthetic oligonucleotide
uagggcaugauauaaacga

SEQ ID NO: 2184456 - RNA, 19 nt, Artificial Sequence
  Description of Artificial Sequence: Synthetic oligonucleotide
ugcuuuuccuuuaacaacc

SEQ ID NO: 2184457 - RNA, 19 nt, Artificial Sequence
  Description of Artificial Sequence: Synthetic oligonucleotide
uauccaguggcuauuaucu

SEQ ID NO: 2184458 - RNA, 19 nt, Artificial Sequence
  Description of Artificial Sequence: Synthetic oligonucleotide
uuuugaagaauuuggguga

SEQ ID NO: 2184459 - RNA, 19 nt, Artificial Sequence
  Description of Artificial Sequence: Synthetic oligonucleotide
acuacuguaaucaaacuuc

SEQ ID NO: 2184460 - RNA, 19 nt, Artificial Sequence
  Description of Artificial Sequence: Synthetic oligonucleotide
uguagacugacagagauga

SEQ ID NO: 2184461 - RNA, 19 nt, Artificial Sequence
  Description of Artificial Sequence: Synthetic oligonucleotide
ucuguuucaaccuuagccu

SEQ ID NO: 2184462 - RNA, 19 nt, Artificial Sequence
  Description of Artificial Sequence: Synthetic oligonucleotide
aaacaugacagcugacagg

SEQ ID NO: 2184463 - RNA, 19 nt, Artificial Sequence
  Description of Artificial Sequence: Synthetic oligonucleotide
uaaacgauauacacaagac

SEQ ID NO: 2184464 - RNA, 19 nt, Artificial Sequence
  Description of Artificial Sequence: Synthetic oligonucleotide
uuagccugaguuuugaaga

SEQ ID NO: 2184465 - RNA, 19 nt, Artificial Sequence
  Description of Artificial Sequence: Synthetic oligonucleotide
uccauauuguucuagaaau

SEQ ID NO: 2184466 - RNA, 19 nt, Artificial Sequence
  Description of Artificial Sequence: Synthetic oligonucleotide
ugggagucgauccauauug

SEQ ID NO: 2184467 - RNA, 19 nt, Artificial Sequence
  Description of Artificial Sequence: Synthetic oligonucleotide
uaauauagguuacuggcac

SEQ ID NO: 2184468 - RNA, 19 nt, Artificial Sequence
  Description of Artificial Sequence: Synthetic oligonucleotide
cuguaaucaaacuucauuc

SEQ ID NO: 2184469 - RNA, 19 nt, Artificial Sequence
  Description of Artificial Sequence: Synthetic oligonucleotide
acuuguguaauauagguua

SEQ ID NO: 2184470 - RNA, 19 nt, Artificial Sequence
  Description of Artificial Sequence: Synthetic oligonucleotide
uaggcuauuuugcagagcu

SEQ ID NO: 2184471 - RNA, 19 nt, Artificial Sequence
  Description of Artificial Sequence: Synthetic oligonucleotide
auugaaugaaugugcuggc

SEQ ID NO: 2184472 - RNA, 19 nt, Artificial Sequence
  Description of Artificial Sequence: Synthetic oligonucleotide
cauauuguucuagaaaucc

SEQ ID NO: 2184473 - RNA, 19 nt, Artificial Sequence
  Description of Artificial Sequence: Synthetic oligonucleotide
guucuagaaauccauuggg

SEQ ID NO: 2184474 - RNA, 19 nt, Artificial Sequence
  Description of Artificial Sequence: Synthetic oligonucleotide
uuagggcaugauauaaacg

SEQ ID NO: 2184475 - RNA, 19 nt, Artificial Sequence
  Description of Artificial Sequence: Synthetic oligonucleotide
aaugugcuggcuuccauug

SEQ ID NO: 2184476 - RNA, 19 nt, Artificial Sequence
  Description of Artificial Sequence: Synthetic oligonucleotide
aagaaucaggaagccaucc

SEQ ID NO: 2184477 - RNA, 19 nt, Artificial Sequence
  Description of Artificial Sequence: Synthetic oligonucleotide
aacaugacagcugacaggu

SEQ ID NO: 2184478 - RNA, 19 nt, Artificial Sequence
  Description of Artificial Sequence: Synthetic oligonucleotide
gaaggaauauguauauagg

SEQ ID NO: 2184479 - RNA, 19 nt, Artificial Sequence
  Description of Artificial Sequence: Synthetic oligonucleotide
ucucaguuaaguauucucu

SEQ ID NO: 2184480 - RNA, 19 nt, Artificial Sequence
  Description of Artificial Sequence: Synthetic oligonucleotide
uuaaugcugacuuucugca

SEQ ID NO: 2184481 - RNA, 19 nt, Artificial Sequence
  Description of Artificial Sequence: Synthetic oligonucleotide
uguaaucaaacuucauuca

SEQ ID NO: 2184482 - RNA, 19 nt, Artificial Sequence
  Description of Artificial Sequence: Synthetic oligonucleotide
aagaauuugggugauucug

SEQ ID NO: 2184483 - RNA, 19 nt, Artificial Sequence
  Description of Artificial Sequence: Synthetic oligonucleotide
aauuaaugcugacuuucug

SEQ ID NO: 2184484 - RNA, 19 nt, Artificial Sequence
  Description of Artificial Sequence: Synthetic oligonucleotide
acaacccaggaucugaagg

SEQ ID NO: 2184485 - RNA, 19 nt, Artificial Sequence
  Description of Artificial Sequence: Synthetic oligonucleotide
uaggucuguagacugacag

SEQ ID NO: 2184486 - RNA, 19 nt, Artificial Sequence
  Description of Artificial Sequence: Synthetic oligonucleotide
ucugcaaacgcuugcagca

SEQ ID NO: 2184487 - RNA, 19 nt, Artificial Sequence
  Description of Artificial Sequence: Synthetic oligonucleotide
ucacuuguguaauauaggu

SEQ ID NO: 2184488 - RNA, 19 nt, Artificial Sequence
  Description of Artificial Sequence: Synthetic oligonucleotide
uuguucuagaaauccauug

SEQ ID NO: 2184489 - RNA, 19 nt, Artificial Sequence
  Description of Artificial Sequence: Synthetic oligonucleotide
aacucaccaaauuauuaca

SEQ ID NO: 2184490 - RNA, 19 nt, Artificial Sequence
  Description of Artificial Sequence: Synthetic oligonucleotide
augcuuuuccuuuaacaac

SEQ ID NO: 2184491 - RNA, 19 nt, Artificial Sequence
  Description of Artificial Sequence: Synthetic oligonucleotide
aguggacaauaacugagac

SEQ ID NO: 2184492 - RNA, 19 nt, Artificial Sequence
  Description of Artificial Sequence: Synthetic oligonucleotide
uuaaacaugacagcugaca

SEQ ID NO: 2184493 - RNA, 19 nt, Artificial Sequence
  Description of Artificial Sequence: Synthetic oligonucleotide
aaugaaugugcuggcuucc

SEQ ID NO: 2184494 - RNA, 19 nt, Artificial Sequence
  Description of Artificial Sequence: Synthetic oligonucleotide
aaggacacaagcugacauc

SEQ ID NO: 2184495 - RNA, 19 nt, Artificial Sequence
  Description of Artificial Sequence: Synthetic oligonucleotide
uuuugcagagcuuguggcg

SEQ ID NO: 2184496 - RNA, 19 nt, Artificial Sequence
  Description of Artificial Sequence: Synthetic oligonucleotide
acuucaacacaguaggucu

SEQ ID NO: 2184497 - RNA, 19 nt, Artificial Sequence
  Description of Artificial Sequence: Synthetic oligonucleotide
gacaauaacugagacguag

SEQ ID NO: 2184498 - RNA, 19 nt, Artificial Sequence
  Description of Artificial Sequence: Synthetic oligonucleotide
uguacaugauauugaauga

SEQ ID NO: 2184499 - RNA, 19 nt, Artificial Sequence
  Description of Artificial Sequence: Synthetic oligonucleotide
agcugacagguauucaugc

SEQ ID NO: 2184500 - RNA, 19 nt, Artificial Sequence
  Description of Artificial Sequence: Synthetic oligonucleotide
accaaauuauuacauccag

SEQ ID NO: 2184501 - RNA, 19 nt, Artificial Sequence
  Description of Artificial Sequence: Synthetic oligonucleotide
uugauacaaagcaacuucu

SEQ ID NO: 2184502 - RNA, 19 nt, Artificial Sequence
  Description of Artificial Sequence: Synthetic oligonucleotide
ucaguuaaguauucucugc

SEQ ID NO: 2184503 - RNA, 19 nt, Artificial Sequence
  Description of Artificial Sequence: Synthetic oligonucleotide
agacugacagagaugaggc

SEQ ID NO: 2184504 - RNA, 19 nt, Artificial Sequence
  Description of Artificial Sequence: Synthetic oligonucleotide
augauauugaaugaaugug

SEQ ID NO: 2184505 - RNA, 19 nt, Artificial Sequence
  Description of Artificial Sequence: Synthetic oligonucleotide
uguguaauauagguuacug

SEQ ID NO: 2184506 - RNA, 19 nt, Artificial Sequence
  Description of Artificial Sequence: Synthetic oligonucleotide
gaucugaagggacuuguag

SEQ ID NO: 2184507 - RNA, 19 nt, Artificial Sequence
  Description of Artificial Sequence: Synthetic oligonucleotide
guguaauauagguuacugg

SEQ ID NO: 2184508 - RNA, 19 nt, Artificial Sequence
  Description of Artificial Sequence: Synthetic oligonucleotide
aagaauuugaagauggcua

SEQ ID NO: 2184509 - RNA, 19 nt, Artificial Sequence
  Description of Artificial Sequence: Synthetic oligonucleotide
gaguuuugaagaauuuggg

SEQ ID NO: 2184510 - RNA, 19 nt, Artificial Sequence
  Description of Artificial Sequence: Synthetic oligonucleotide
caucugagcacucacuggg

SEQ ID NO: 2184511 - RNA, 19 nt, Artificial Sequence
  Description of Artificial Sequence: Synthetic oligonucleotide
cuuagccugaguuuugaag

SEQ ID NO: 2184512 - RNA, 19 nt, Artificial Sequence
  Description of Artificial Sequence: Synthetic oligonucleotide
aaacgcuugcagcacacug

SEQ ID NO: 2184513 - RNA, 19 nt, Artificial Sequence
  Description of Artificial Sequence: Synthetic oligonucleotide
cugcaugucucccagaaag

SEQ ID NO: 2184514 - RNA, 19 nt, Artificial Sequence
  Description of Artificial Sequence: Synthetic oligonucleotide
agugaguacuacuguaauc

SEQ ID NO: 2184515 - RNA, 19 nt, Artificial Sequence
  Description of Artificial Sequence: Synthetic oligonucleotide
gaagccauccugaacaagc

SEQ ID NO: 2184516 - RNA, 19 nt, Artificial Sequence
  Description of Artificial Sequence: Synthetic oligonucleotide
aacgcuugcagcacacugc

SEQ ID NO: 2184517 - RNA, 19 nt, Artificial Sequence
  Description of Artificial Sequence: Synthetic oligonucleotide
gaaucaggaagccauccug

SEQ ID NO: 2184518 - RNA, 19 nt, Artificial Sequence
  Description of Artificial Sequence: Synthetic oligonucleotide
acuguaaucaaacuucauu

SEQ ID NO: 2184519 - RNA, 19 nt, Artificial Sequence
  Description of Artificial Sequence: Synthetic oligonucleotide
uucuagaaauccauugggu

SEQ ID NO: 2184520 - RNA, 19 nt, Artificial Sequence
  Description of Artificial Sequence: Synthetic oligonucleotide
aauauagguuacuggcacu

SEQ ID NO: 2184521 - RNA, 19 nt, Artificial Sequence
  Description of Artificial Sequence: Synthetic oligonucleotide
ugaagggacuuguagaaaa

SEQ ID NO: 2184522 - RNA, 19 nt, Artificial Sequence
  Description of Artificial Sequence: Synthetic oligonucleotide
uuacugaaccaauuaccag

SEQ ID NO: 2184523 - RNA, 19 nt, Artificial Sequence
  Description of Artificial Sequence: Synthetic oligonucleotide
acagguauucaugccaccc

SEQ ID NO: 2184524 - RNA, 19 nt, Artificial Sequence
  Description of Artificial Sequence: Synthetic oligonucleotide
uuaccagccgcuuacugug

SEQ ID NO: 2184525 - RNA, 19 nt, Artificial Sequence
  Description of Artificial Sequence: Synthetic oligonucleotide
guaaucaaacuucauucac

SEQ ID NO: 2184526 - RNA, 19 nt, Artificial Sequence
  Description of Artificial Sequence: Synthetic oligonucleotide
aagggacuuguagaaaagg

SEQ ID NO: 2184527 - RNA, 19 nt, Artificial Sequence
  Description of Artificial Sequence: Synthetic oligonucleotide
aagccaacugcuaacucac

SEQ ID NO: 2184528 - RNA, 19 nt, Artificial Sequence
  Description of Artificial Sequence: Synthetic oligonucleotide
uacuacuguaaucaaacuu

SEQ ID NO: 2184529 - RNA, 19 nt, Artificial Sequence
  Description of Artificial Sequence: Synthetic oligonucleotide
aaagauuucucagcaagaa

SEQ ID NO: 2184530 - RNA, 19 nt, Artificial Sequence
  Description of Artificial Sequence: Synthetic oligonucleotide
cuacugugaauuaaugcug

SEQ ID NO: 2184531 - RNA, 19 nt, Artificial Sequence
  Description of Artificial Sequence: Synthetic oligonucleotide
agaccaaaaccugucuucc

SEQ ID NO: 2184532 - RNA, 19 nt, Artificial Sequence
  Description of Artificial Sequence: Synthetic oligonucleotide
acuggcacugcucuuguag

SEQ ID NO: 2184533 - RNA, 19 nt, Artificial Sequence
  Description of Artificial Sequence: Synthetic oligonucleotide
uacugugaauuaaugcuga

SEQ ID NO: 2184534 - RNA, 19 nt, Artificial Sequence
  Description of Artificial Sequence: Synthetic oligonucleotide
uauaggcuauuuugcagag

SEQ ID NO: 2184535 - RNA, 19 nt, Artificial Sequence
  Description of Artificial Sequence: Synthetic oligonucleotide
agaauuugaagauggcuaa

SEQ ID NO: 2184536 - RNA, 19 nt, Artificial Sequence
  Description of Artificial Sequence: Synthetic oligonucleotide
aauuaccagccgcuuacug

SEQ ID NO: 2184537 - RNA, 19 nt, Artificial Sequence
  Description of Artificial Sequence: Synthetic oligonucleotide
ugcuaacucaccaaauuau

SEQ ID NO: 2184538 - RNA, 19 nt, Artificial Sequence
  Description of Artificial Sequence: Synthetic oligonucleotide
aacuucauucacuugugua

SEQ ID NO: 2184539 - RNA, 19 nt, Artificial Sequence
  Description of Artificial Sequence: Synthetic oligonucleotide
agguauucaugccacccac

SEQ ID NO: 2184540 - RNA, 19 nt, Artificial Sequence
  Description of Artificial Sequence: Synthetic oligonucleotide
cauggcucaagccaacugc

SEQ ID NO: 2184541 - RNA, 19 nt, Artificial Sequence
  Description of Artificial Sequence: Synthetic oligonucleotide
uguccuguuaaaaugccua

SEQ ID NO: 2184542 - RNA, 19 nt, Artificial Sequence
  Description of Artificial Sequence: Synthetic oligonucleotide
uucaaccuuagccugaguu

SEQ ID NO: 2184543 - RNA, 19 nt, Artificial Sequence
  Description of Artificial Sequence: Synthetic oligonucleotide
ugaguggcaguguuaaaca

SEQ ID NO: 2184544 - RNA, 19 nt, Artificial Sequence
  Description of Artificial Sequence: Synthetic oligonucleotide
uuaaguauucucugccacu

SEQ ID NO: 2184545 - RNA, 19 nt, Artificial Sequence
  Description of Artificial Sequence: Synthetic oligonucleotide
guggacaauaacugagacg

SEQ ID NO: 2184546 - RNA, 19 nt, Artificial Sequence
  Description of Artificial Sequence: Synthetic oligonucleotide
caguuaaguauucucugcc

SEQ ID NO: 2184547 - RNA, 19 nt, Artificial Sequence
  Description of Artificial Sequence: Synthetic oligonucleotide
accguaaguggacaauaac

SEQ ID NO: 2184548 - RNA, 19 nt, Artificial Sequence
  Description of Artificial Sequence: Synthetic oligonucleotide
gugaguacuacuguaauca

SEQ ID NO: 2184549 - RNA, 19 nt, Artificial Sequence
  Description of Artificial Sequence: Synthetic oligonucleotide
cucaguuaaguauucucug

SEQ ID NO: 2184550 - RNA, 19 nt, Artificial Sequence
  Description of Artificial Sequence: Synthetic oligonucleotide
guuaaguauucucugccac

SEQ ID NO: 2184551 - RNA, 19 nt, Artificial Sequence
  Description of Artificial Sequence: Synthetic oligonucleotide
uauaaacgauauacacaag

SEQ ID NO: 2184552 - RNA, 19 nt, Artificial Sequence
  Description of Artificial Sequence: Synthetic oligonucleotide
acgcuugcagcacacugcc

SEQ ID NO: 2184553 - RNA, 19 nt, Artificial Sequence
  Description of Artificial Sequence: Synthetic oligonucleotide
uuaacaacccaggaucuga

SEQ ID NO: 2184554 - RNA, 19 nt, Artificial Sequence
  Description of Artificial Sequence: Synthetic oligonucleotide
acaguaggucuguagacug

SEQ ID NO: 2184555 - RNA, 19 nt, Artificial Sequence
  Description of Artificial Sequence: Synthetic oligonucleotide
auuaccagccgcuuacugu

SEQ ID NO: 2184556 - RNA, 19 nt, Artificial Sequence
  Description of Artificial Sequence: Synthetic oligonucleotide
uccuuuaacaacccaggau

SEQ ID NO: 2184557 - RNA, 19 nt, Artificial Sequence
  Description of Artificial Sequence: Synthetic oligonucleotide
aggaauauguauauaggcu

SEQ ID NO: 2184558 - RNA, 19 nt, Artificial Sequence
  Description of Artificial Sequence: Synthetic oligonucleotide
agacguagcaucuuugaaa

SEQ ID NO: 2184559 - RNA, 19 nt, Artificial Sequence
  Description of Artificial Sequence: Synthetic oligonucleotide
uguguaugcaucucucagu

SEQ ID NO: 2184560 - RNA, 19 nt, Artificial Sequence
  Description of Artificial Sequence: Synthetic oligonucleotide
aauaacugagacguagcau

SEQ ID NO: 2184561 - RNA, 19 nt, Artificial Sequence
  Description of Artificial Sequence: Synthetic oligonucleotide
aguuaaguauucucugcca

SEQ ID NO: 2184562 - RNA, 19 nt, Artificial Sequence
  Description of Artificial Sequence: Synthetic oligonucleotide
uuuaaagauuucucagcaa

SEQ ID NO: 2184563 - RNA, 19 nt, Artificial Sequence
  Description of Artificial Sequence: Synthetic oligonucleotide
auauugaaugaaugugcug

SEQ ID NO: 2184564 - RNA, 19 nt, Artificial Sequence
  Description of Artificial Sequence: Synthetic oligonucleotide
uuacuguguaugcaucucu

SEQ ID NO: 2184565 - RNA, 19 nt, Artificial Sequence
  Description of Artificial Sequence: Synthetic oligonucleotide
guaugcaucucucaguuaa

SEQ ID NO: 2184566 - RNA, 19 nt, Artificial Sequence
  Description of Artificial Sequence: Synthetic oligonucleotide
ugagacguagcaucuuuga

SEQ ID NO: 2184567 - RNA, 19 nt, Artificial Sequence
  Description of Artificial Sequence: Synthetic oligonucleotide
guauauaggcuauuuugca

SEQ ID NO: 2184568 - RNA, 19 nt, Artificial Sequence
  Description of Artificial Sequence: Synthetic oligonucleotide
aaaccugucuuccuugguu

SEQ ID NO: 2184569 - RNA, 19 nt, Artificial Sequence
  Description of Artificial Sequence: Synthetic oligonucleotide
agaaagaccguaaguggac

SEQ ID NO: 2184570 - RNA, 19 nt, Artificial Sequence
  Description of Artificial Sequence: Synthetic oligonucleotide
ucucuuuuagggcaugaua

SEQ ID NO: 2184571 - RNA, 19 nt, Artificial Sequence
  Description of Artificial Sequence: Synthetic oligonucleotide
agauggcuaagacauaaaa

SEQ ID NO: 2184572 - RNA, 19 nt, Artificial Sequence
  Description of Artificial Sequence: Synthetic oligonucleotide
caugcuuuuccuuuaacaa

SEQ ID NO: 2184573 - RNA, 19 nt, Artificial Sequence
  Description of Artificial Sequence: Synthetic oligonucleotide
caugucucccagaaagacc

SEQ ID NO: 2184574 - RNA, 19 nt, Artificial Sequence
  Description of Artificial Sequence: Synthetic oligonucleotide
acugugaauuaaugcugac

SEQ ID NO: 2184575 - RNA, 19 nt, Artificial Sequence
  Description of Artificial Sequence: Synthetic oligonucleotide
ugacagguauucaugccac

SEQ ID NO: 2184576 - RNA, 19 nt, Artificial Sequence
  Description of Artificial Sequence: Synthetic oligonucleotide
ccuuuaacaacccaggauc

SEQ ID NO: 2184577 - RNA, 19 nt, Artificial Sequence
  Description of Artificial Sequence: Synthetic oligonucleotide
aacaacccaggaucugaag

SEQ ID NO: 2184578 - RNA, 19 nt, Artificial Sequence
  Description of Artificial Sequence: Synthetic oligonucleotide
uguuucaaccuuagccuga

SEQ ID NO: 2184579 - RNA, 19 nt, Artificial Sequence
  Description of Artificial Sequence: Synthetic oligonucleotide
gacuuguagaaaaggacac

SEQ ID NO: 2184580 - RNA, 19 nt, Artificial Sequence
  Description of Artificial Sequence: Synthetic oligonucleotide
cuuguguaauauagguuac

SEQ ID NO: 2184581 - RNA, 19 nt, Artificial Sequence
  Description of Artificial Sequence: Synthetic oligonucleotide
ggucuguuuauccaguggc

SEQ ID NO: 2184582 - RNA, 19 nt, Artificial Sequence
  Description of Artificial Sequence: Synthetic oligonucleotide
aguaggucuguagacugac

SEQ ID NO: 2184583 - RNA, 19 nt, Artificial Sequence
  Description of Artificial Sequence: Synthetic oligonucleotide
cuuccauugccgaugggug

SEQ ID NO: 2184584 - RNA, 19 nt, Artificial Sequence
  Description of Artificial Sequence: Synthetic oligonucleotide
uaugcaucucucaguuaag

SEQ ID NO: 2184585 - RNA, 19 nt, Artificial Sequence
  Description of Artificial Sequence: Synthetic oligonucleotide
uauucaugccacccacuug

SEQ ID NO: 2184586 - RNA, 19 nt, Artificial Sequence
  Description of Artificial Sequence: Synthetic oligonucleotide
cuguguaugcaucucucag

SEQ ID NO: 2184587 - RNA, 19 nt, Artificial Sequence
  Description of Artificial Sequence: Synthetic oligonucleotide
acaugauauugaaugaaug

SEQ ID NO: 2184588 - RNA, 19 nt, Artificial Sequence
  Description of Artificial Sequence: Synthetic oligonucleotide
auauagguuacuggcacug

SEQ ID NO: 2184589 - RNA, 19 nt, Artificial Sequence
  Description of Artificial Sequence: Synthetic oligonucleotide
cuuguagccucugcaaacg

SEQ ID NO: 2184590 - RNA, 19 nt, Artificial Sequence
  Description of Artificial Sequence: Synthetic oligonucleotide
uaacugagacguagcaucu

SEQ ID NO: 2184591 - RNA, 19 nt, Artificial Sequence
  Description of Artificial Sequence: Synthetic oligonucleotide
guaaguggacaauaacuga

SEQ ID NO: 2184592 - RNA, 19 nt, Artificial Sequence
  Description of Artificial Sequence: Synthetic oligonucleotide
cuugccagguacuucaaca

SEQ ID NO: 2184593 - RNA, 19 nt, Artificial Sequence
  Description of Artificial Sequence: Synthetic oligonucleotide
caugauauugaaugaaugu

SEQ ID NO: 2184594 - RNA, 19 nt, Artificial Sequence
  Description of Artificial Sequence: Synthetic oligonucleotide
uacuucaacacaguagguc

SEQ ID NO: 2184595 - RNA, 19 nt, Artificial Sequence
  Description of Artificial Sequence: Synthetic oligonucleotide
acagcugacagguauucau

SEQ ID NO: 2184596 - RNA, 19 nt, Artificial Sequence
  Description of Artificial Sequence: Synthetic oligonucleotide
uccaaggaagaccuucuuc

SEQ ID NO: 2184597 - RNA, 19 nt, Artificial Sequence
  Description of Artificial Sequence: Synthetic oligonucleotide
guggcuauuaucuguccug

SEQ ID NO: 2184598 - RNA, 19 nt, Artificial Sequence
  Description of Artificial Sequence: Synthetic oligonucleotide
uuugggugauucugcaugu

SEQ ID NO: 2184599 - RNA, 19 nt, Artificial Sequence
  Description of Artificial Sequence: Synthetic oligonucleotide
aaugccuacugugaauuaa

SEQ ID NO: 2184600 - RNA, 19 nt, Artificial Sequence
  Description of Artificial Sequence: Synthetic oligonucleotide
aaagaccguaaguggacaa

SEQ ID NO: 2184601 - RNA, 19 nt, Artificial Sequence
  Description of Artificial Sequence: Synthetic oligonucleotide
agaugaggccauccaagag

SEQ ID NO: 2184602 - RNA, 19 nt, Artificial Sequence
  Description of Artificial Sequence: Synthetic oligonucleotide
agagaugaggccauccaag

SEQ ID NO: 2184603 - RNA, 19 nt, Artificial Sequence
  Description of Artificial Sequence: Synthetic oligonucleotide
auagguuacuggcacugcu

SEQ ID NO: 2184604 - RNA, 19 nt, Artificial Sequence
  Description of Artificial Sequence: Synthetic oligonucleotide
aaaaccugucuuccuuggu

SEQ ID NO: 2184605 - RNA, 19 nt, Artificial Sequence
  Description of Artificial Sequence: Synthetic oligonucleotide
uguagccucugcaaacgcu

SEQ ID NO: 2184606 - RNA, 19 nt, Artificial Sequence
  Description of Artificial Sequence: Synthetic oligonucleotide
gaauuugggugauucugca

SEQ ID NO: 2184607 - RNA, 19 nt, Artificial Sequence
  Description of Artificial Sequence: Synthetic oligonucleotide
gaagauggcuaagacauaa

SEQ ID NO: 2184608 - RNA, 19 nt, Artificial Sequence
  Description of Artificial Sequence: Synthetic oligonucleotide
acugcuaacucaccaaauu

SEQ ID NO: 2184609 - RNA, 19 nt, Artificial Sequence
  Description of Artificial Sequence: Synthetic oligonucleotide
ggaauauguauauaggcua

SEQ ID NO: 2184610 - RNA, 19 nt, Artificial Sequence
  Description of Artificial Sequence: Synthetic oligonucleotide
ugagcacucacugggcuag

SEQ ID NO: 2184611 - RNA, 19 nt, Artificial Sequence
  Description of Artificial Sequence: Synthetic oligonucleotide
cacaagaccaaaaccuguc

SEQ ID NO: 2184612 - RNA, 19 nt, Artificial Sequence
  Description of Artificial Sequence: Synthetic oligonucleotide
agccgcuuacuguguaugc

SEQ ID NO: 2184613 - RNA, 19 nt, Artificial Sequence
  Description of Artificial Sequence: Synthetic oligonucleotide
auuauuacauccagaaguu

SEQ ID NO: 2184614 - RNA, 19 nt, Artificial Sequence
  Description of Artificial Sequence: Synthetic oligonucleotide
ugaaaucaugcuuuuccuu

SEQ ID NO: 2184615 - RNA, 19 nt, Artificial Sequence
  Description of Artificial Sequence: Synthetic oligonucleotide
gaauuugaagauggcuaag

SEQ ID NO: 2184616 - RNA, 19 nt, Artificial Sequence
  Description of Artificial Sequence: Synthetic oligonucleotide
ucauucacuuguguaauau

SEQ ID NO: 2184617 - RNA, 19 nt, Artificial Sequence
  Description of Artificial Sequence: Synthetic oligonucleotide
ugauacaaagcaacuucuu

SEQ ID NO: 2184618 - RNA, 19 nt, Artificial Sequence
  Description of Artificial Sequence: Synthetic oligonucleotide
uuuaacaacccaggaucug

SEQ ID NO: 2184619 - RNA, 19 nt, Artificial Sequence
  Description of Artificial Sequence: Synthetic oligonucleotide
ugccuacugugaauuaaug

SEQ ID NO: 2184620 - RNA, 19 nt, Artificial Sequence
  Description of Artificial Sequence: Synthetic oligonucleotide
cuguuucaaccuuagccug

SEQ ID NO: 2184621 - RNA, 19 nt, Artificial Sequence
  Description of Artificial Sequence: Synthetic oligonucleotide
ccagaaagaccguaagugg

SEQ ID NO: 2184622 - RNA, 19 nt, Artificial Sequence
  Description of Artificial Sequence: Synthetic oligonucleotide
uagugaguacuacuguaau

SEQ ID NO: 2184623 - RNA, 19 nt, Artificial Sequence
  Description of Artificial Sequence: Synthetic oligonucleotide
uugccagguacuucaacac

SEQ ID NO: 2184624 - RNA, 19 nt, Artificial Sequence
  Description of Artificial Sequence: Synthetic oligonucleotide
caagccaacugcuaacuca

SEQ ID NO: 2184625 - RNA, 19 nt, Artificial Sequence
  Description of Artificial Sequence: Synthetic oligonucleotide
ugggcuagugaguacuacu

SEQ ID NO: 2184626 - RNA, 19 nt, Artificial Sequence
  Description of Artificial Sequence: Synthetic oligonucleotide
gaagggacuuguagaaaag

SEQ ID NO: 2184627 - RNA, 19 nt, Artificial Sequence
  Description of Artificial Sequence: Synthetic oligonucleotide
guuacuggcacugcucuug

SEQ ID NO: 2184628 - RNA, 19 nt, Artificial Sequence
  Description of Artificial Sequence: Synthetic oligonucleotide
ugauucugcaugucuccca

SEQ ID NO: 2184629 - RNA, 19 nt, Artificial Sequence
  Description of Artificial Sequence: Synthetic oligonucleotide
aaguggacaauaacugaga

SEQ ID NO: 2184630 - RNA, 19 nt, Artificial Sequence
  Description of Artificial Sequence: Synthetic oligonucleotide
guaauauagguuacuggca

SEQ ID NO: 2184631 - RNA, 19 nt, Artificial Sequence
  Description of Artificial Sequence: Synthetic oligonucleotide
gagucgauccauauuguuc

SEQ ID NO: 2184632 - RNA, 19 nt, Artificial Sequence
  Description of Artificial Sequence: Synthetic oligonucleotide
cagaaagaccguaagugga

SEQ ID NO: 2184633 - RNA, 19 nt, Artificial Sequence
  Description of Artificial Sequence: Synthetic oligonucleotide
gugaguggcaguguuaaac

SEQ ID NO: 2184634 - RNA, 19 nt, Artificial Sequence
  Description of Artificial Sequence: Synthetic oligonucleotide
ugcaugucucccagaaaga

SEQ ID NO: 2184635 - RNA, 19 nt, Artificial Sequence
  Description of Artificial Sequence: Synthetic oligonucleotide
aggacacaagcugacauca

SEQ ID NO: 2184636 - RNA, 19 nt, Artificial Sequence
  Description of Artificial Sequence: Synthetic oligonucleotide
agguuacuggcacugcucu

SEQ ID NO: 2184637 - RNA, 19 nt, Artificial Sequence
  Description of Artificial Sequence: Synthetic oligonucleotide
gacguagcaucuuugaaau

SEQ ID NO: 2184638 - RNA, 19 nt, Artificial Sequence
  Description of Artificial Sequence: Synthetic oligonucleotide
cguaaguggacaauaacug

SEQ ID NO: 2184639 - RNA, 19 nt, Artificial Sequence
  Description of Artificial Sequence: Synthetic oligonucleotide
accuccaaggaagaccuuc

SEQ ID NO: 2184640 - RNA, 19 nt, Artificial Sequence
  Description of Artificial Sequence: Synthetic oligonucleotide
gauccauauuguucuagaa

SEQ ID NO: 2184641 - RNA, 19 nt, Artificial Sequence
  Description of Artificial Sequence: Synthetic oligonucleotide
cuacuguaaucaaacuuca

SEQ ID NO: 2184642 - RNA, 19 nt, Artificial Sequence
  Description of Artificial Sequence: Synthetic oligonucleotide
cucuuuuagggcaugauau

SEQ ID NO: 2184643 - RNA, 19 nt, Artificial Sequence
  Description of Artificial Sequence: Synthetic oligonucleotide
ucucccagaaagaccguaa

SEQ ID NO: 2184644 - RNA, 19 nt, Artificial Sequence
  Description of Artificial Sequence: Synthetic oligonucleotide
ugcaaacgcuugcagcaca

SEQ ID NO: 2184645 - RNA, 19 nt, Artificial Sequence
  Description of Artificial Sequence: Synthetic oligonucleotide
cugacagguauucaugcca

SEQ ID NO: 2184646 - RNA, 19 nt, Artificial Sequence
  Description of Artificial Sequence: Synthetic oligonucleotide
uccauugccgaugggugag

SEQ ID NO: 2184647 - RNA, 19 nt, Artificial Sequence
  Description of Artificial Sequence: Synthetic oligonucleotide
ucgauccauauuguucuag

SEQ ID NO: 2184648 - RNA, 19 nt, Artificial Sequence
  Description of Artificial Sequence: Synthetic oligonucleotide
cuggcacugcucuuguagc

SEQ ID NO: 2184649 - RNA, 19 nt, Artificial Sequence
  Description of Artificial Sequence: Synthetic oligonucleotide
ugccauuuacugaaccaau

SEQ ID NO: 2184650 - RNA, 19 nt, Artificial Sequence
  Description of Artificial Sequence: Synthetic oligonucleotide
uuguagccucugcaaacgc

SEQ ID NO: 2184651 - RNA, 19 nt, Artificial Sequence
  Description of Artificial Sequence: Synthetic oligonucleotide
ccuguuaaaaugccuacug

SEQ ID NO: 2184652 - RNA, 19 nt, Artificial Sequence
  Description of Artificial Sequence: Synthetic oligonucleotide
ugaguacuacuguaaucaa

SEQ ID NO: 2184653 - RNA, 19 nt, Artificial Sequence
  Description of Artificial Sequence: Synthetic oligonucleotide
ggugauucugcaugucucc

SEQ ID NO: 2184654 - RNA, 19 nt, Artificial Sequence
  Description of Artificial Sequence: Synthetic oligonucleotide
caauaacugagacguagca

SEQ ID NO: 2184655 - RNA, 19 nt, Artificial Sequence
  Description of Artificial Sequence: Synthetic oligonucleotide
ucuguuuauccaguggcua

SEQ ID NO: 2184656 - RNA, 19 nt, Artificial Sequence
  Description of Artificial Sequence: Synthetic oligonucleotide
cuagugaguacuacuguaa

SEQ ID NO: 2184657 - RNA, 19 nt, Artificial Sequence
  Description of Artificial Sequence: Synthetic oligonucleotide
uuccauugccgauggguga

SEQ ID NO: 2184658 - RNA, 19 nt, Artificial Sequence
  Description of Artificial Sequence: Synthetic oligonucleotide
gacugacagagaugaggcc

SEQ ID NO: 2184659 - RNA, 19 nt, Artificial Sequence
  Description of Artificial Sequence: Synthetic oligonucleotide
uugggucuguuuauccagu

SEQ ID NO: 2184660 - RNA, 19 nt, Artificial Sequence
  Description of Artificial Sequence: Synthetic oligonucleotide
uauagguuacuggcacugc

SEQ ID NO: 2184661 - RNA, 19 nt, Artificial Sequence
  Description of Artificial Sequence: Synthetic oligonucleotide
guagaaaaggacacaagcu

SEQ ID NO: 2184662 - RNA, 19 nt, Artificial Sequence
  Description of Artificial Sequence: Synthetic oligonucleotide
gccuacugugaauuaaugc

SEQ ID NO: 2184663 - RNA, 19 nt, Artificial Sequence
  Description of Artificial Sequence: Synthetic oligonucleotide
acacaagcugacaucaacu

SEQ ID NO: 2184664 - RNA, 19 nt, Artificial Sequence
  Description of Artificial Sequence: Synthetic oligonucleotide
uccuguuaaaaugccuacu

SEQ ID NO: 2184665 - RNA, 19 nt, Artificial Sequence
  Description of Artificial Sequence: Synthetic oligonucleotide
acugagacguagcaucuuu

SEQ ID NO: 2184666 - RNA, 19 nt, Artificial Sequence
  Description of Artificial Sequence: Synthetic oligonucleotide
uugaaugaaugugcuggcu

SEQ ID NO: 2184667 - RNA, 19 nt, Artificial Sequence
  Description of Artificial Sequence: Synthetic oligonucleotide
aaaugccuacugugaauua

SEQ ID NO: 2184668 - RNA, 19 nt, Artificial Sequence
  Description of Artificial Sequence: Synthetic oligonucleotide
ucaagccaacugcuaacuc

SEQ ID NO: 2184669 - RNA, 19 nt, Artificial Sequence
  Description of Artificial Sequence: Synthetic oligonucleotide
ggacuuguagaaaaggaca

SEQ ID NO: 2184670 - RNA, 19 nt, Artificial Sequence
  Description of Artificial Sequence: Synthetic oligonucleotide
auccaagaggaagaaucag

SEQ ID NO: 2184671 - RNA, 19 nt, Artificial Sequence
  Description of Artificial Sequence: Synthetic oligonucleotide
uuuauccaguggcuauuau

SEQ ID NO: 2184672 - RNA, 19 nt, Artificial Sequence
  Description of Artificial Sequence: Synthetic oligonucleotide
gacagguauucaugccacc

SEQ ID NO: 2184673 - RNA, 19 nt, Artificial Sequence
  Description of Artificial Sequence: Synthetic oligonucleotide
acuuguagaaaaggacaca

SEQ ID NO: 2184674 - RNA, 19 nt, Artificial Sequence
  Description of Artificial Sequence: Synthetic oligonucleotide
auccagaaguucugggagu

SEQ ID NO: 2184675 - RNA, 19 nt, Artificial Sequence
  Description of Artificial Sequence: Synthetic oligonucleotide
cacugccauuuacugaacc

SEQ ID NO: 2184676 - RNA, 19 nt, Artificial Sequence
  Description of Artificial Sequence: Synthetic oligonucleotide
uacuguaaucaaacuucau

SEQ ID NO: 2184677 - RNA, 19 nt, Artificial Sequence
  Description of Artificial Sequence: Synthetic oligonucleotide
aggucuguagacugacaga

SEQ ID NO: 2184678 - RNA, 19 nt, Artificial Sequence
  Description of Artificial Sequence: Synthetic oligonucleotide
uuugaagaauuugggugau

SEQ ID NO: 2184679 - RNA, 19 nt, Artificial Sequence
  Description of Artificial Sequence: Synthetic oligonucleotide
cuguagacugacagagaug

SEQ ID NO: 2184680 - RNA, 19 nt, Artificial Sequence
  Description of Artificial Sequence: Synthetic oligonucleotide
cuuuuagggcaugauauaa

SEQ ID NO: 2184681 - RNA, 19 nt, Artificial Sequence
  Description of Artificial Sequence: Synthetic oligonucleotide
caaggaagaccuucuucuc

SEQ ID NO: 2184682 - RNA, 19 nt, Artificial Sequence
  Description of Artificial Sequence: Synthetic oligonucleotide
uagccugaguuuugaagaa

SEQ ID NO: 2184683 - RNA, 19 nt, Artificial Sequence
  Description of Artificial Sequence: Synthetic oligonucleotide
uuacuggcacugcucuugu

SEQ ID NO: 2184684 - RNA, 19 nt, Artificial Sequence
  Description of Artificial Sequence: Synthetic oligonucleotide
gccucugccaaugucaugc

SEQ ID NO: 2184685 - RNA, 19 nt, Artificial Sequence
  Description of Artificial Sequence: Synthetic oligonucleotide
guauucucugccacugcag

SEQ ID NO: 2184686 - RNA, 19 nt, Artificial Sequence
  Description of Artificial Sequence: Synthetic oligonucleotide
ccaauuaccagccgcuuac

SEQ ID NO: 2184687 - RNA, 19 nt, Artificial Sequence
  Description of Artificial Sequence: Synthetic oligonucleotide
cuuacuguguaugcaucuc

SEQ ID NO: 2184688 - RNA, 19 nt, Artificial Sequence
  Description of Artificial Sequence: Synthetic oligonucleotide
gaaagaccguaaguggaca

SEQ ID NO: 2184689 - RNA, 19 nt, Artificial Sequence
  Description of Artificial Sequence: Synthetic oligonucleotide
uggcuauuaucuguccugu

SEQ ID NO: 2184690 - RNA, 19 nt, Artificial Sequence
  Description of Artificial Sequence: Synthetic oligonucleotide
ccuacugugaauuaaugcu

SEQ ID NO: 2184691 - RNA, 19 nt, Artificial Sequence
  Description of Artificial Sequence: Synthetic oligonucleotide
aagaccguaaguggacaau

SEQ ID NO: 2184692 - RNA, 19 nt, Artificial Sequence
  Description of Artificial Sequence: Synthetic oligonucleotide
gagacguagcaucuuugaa

SEQ ID NO: 2184693 - RNA, 19 nt, Artificial Sequence
  Description of Artificial Sequence: Synthetic oligonucleotide
gggucuguuuauccagugg

SEQ ID NO: 2184694 - RNA, 19 nt, Artificial Sequence
  Description of Artificial Sequence: Synthetic oligonucleotide
gggacuuguagaaaaggac

SEQ ID NO: 2184695 - RNA, 19 nt, Artificial Sequence
  Description of Artificial Sequence: Synthetic oligonucleotide
ccaagaggaagaaucagga

SEQ ID NO: 2184696 - RNA, 19 nt, Artificial Sequence
  Description of Artificial Sequence: Synthetic oligonucleotide
cugaaccaauuaccagccg

SEQ ID NO: 2184697 - RNA, 19 nt, Artificial Sequence
  Description of Artificial Sequence: Synthetic oligonucleotide
acacaagaccaaaaccugu

SEQ ID NO: 2184698 - RNA, 19 nt, Artificial Sequence
  Description of Artificial Sequence: Synthetic oligonucleotide
acuuucugcagaaggaaua

SEQ ID NO: 2184699 - RNA, 19 nt, Artificial Sequence
  Description of Artificial Sequence: Synthetic oligonucleotide
cuuuaacaacccaggaucu

SEQ ID NO: 2184700 - RNA, 19 nt, Artificial Sequence
  Description of Artificial Sequence: Synthetic oligonucleotide
aacugcuaacucaccaaau

SEQ ID NO: 2184701 - RNA, 19 nt, Artificial Sequence
  Description of Artificial Sequence: Synthetic oligonucleotide
uguuuauccaguggcuauu

SEQ ID NO: 2184702 - RNA, 19 nt, Artificial Sequence
  Description of Artificial Sequence: Synthetic oligonucleotide
gaguacuacuguaaucaaa

SEQ ID NO: 2184703 - RNA, 19 nt, Artificial Sequence
  Description of Artificial Sequence: Synthetic oligonucleotide
gaauuaaugcugacuuucu

SEQ ID NO: 2184704 - RNA, 19 nt, Artificial Sequence
  Description of Artificial Sequence: Synthetic oligonucleotide
accaauuaccagccgcuua

SEQ ID NO: 2184705 - RNA, 19 nt, Artificial Sequence
  Description of Artificial Sequence: Synthetic oligonucleotide
augcaucucucaguuaagu

SEQ ID NO: 2184706 - RNA, 19 nt, Artificial Sequence
  Description of Artificial Sequence: Synthetic oligonucleotide
uccauugggucuguuuauc

SEQ ID NO: 2184707 - RNA, 19 nt, Artificial Sequence
  Description of Artificial Sequence: Synthetic oligonucleotide
gcuauuaucuguccuguua

SEQ ID NO: 2184708 - RNA, 19 nt, Artificial Sequence
  Description of Artificial Sequence: Synthetic oligonucleotide
gugauucugcaugucuccc

SEQ ID NO: 2184709 - RNA, 19 nt, Artificial Sequence
  Description of Artificial Sequence: Synthetic oligonucleotide
auccauugggucuguuuau

SEQ ID NO: 2184710 - RNA, 19 nt, Artificial Sequence
  Description of Artificial Sequence: Synthetic oligonucleotide
caguggcuauuaucugucc

SEQ ID NO: 2184711 - RNA, 19 nt, Artificial Sequence
  Description of Artificial Sequence: Synthetic oligonucleotide
gaaccaauuaccagccgcu

SEQ ID NO: 2184712 - RNA, 19 nt, Artificial Sequence
  Description of Artificial Sequence: Synthetic oligonucleotide
uguaugcaucucucaguua

SEQ ID NO: 2184713 - RNA, 19 nt, Artificial Sequence
  Description of Artificial Sequence: Synthetic oligonucleotide
aaccuuagccugaguuuug

SEQ ID NO: 2184714 - RNA, 19 nt, Artificial Sequence
  Description of Artificial Sequence: Synthetic oligonucleotide
caucuuugaaaucaugcuu

SEQ ID NO: 2184715 - RNA, 19 nt, Artificial Sequence
  Description of Artificial Sequence: Synthetic oligonucleotide
ccauugggucuguuuaucc

SEQ ID NO: 2184716 - RNA, 19 nt, Artificial Sequence
  Description of Artificial Sequence: Synthetic oligonucleotide
caacugcuaacucaccaaa

SEQ ID NO: 2184717 - RNA, 19 nt, Artificial Sequence
  Description of Artificial Sequence: Synthetic oligonucleotide
aagauggcuaagacauaaa

SEQ ID NO: 2184718 - RNA, 19 nt, Artificial Sequence
  Description of Artificial Sequence: Synthetic oligonucleotide
augggugaguggcaguguu

SEQ ID NO: 2184719 - RNA, 19 nt, Artificial Sequence
  Description of Artificial Sequence: Synthetic oligonucleotide
uuucaaccuuagccugagu

SEQ ID NO: 2184720 - RNA, 19 nt, Artificial Sequence
  Description of Artificial Sequence: Synthetic oligonucleotide
cagguauucaugccaccca

SEQ ID NO: 2184721 - RNA, 19 nt, Artificial Sequence
  Description of Artificial Sequence: Synthetic oligonucleotide
agaccguaaguggacaaua

SEQ ID NO: 2184722 - RNA, 19 nt, Artificial Sequence
  Description of Artificial Sequence: Synthetic oligonucleotide
cauucacuuguguaauaua

SEQ ID NO: 2184723 - RNA, 19 nt, Artificial Sequence
  Description of Artificial Sequence: Synthetic oligonucleotide
cuguuaaaaugccuacugu

SEQ ID NO: 2184724 - RNA, 19 nt, Artificial Sequence
  Description of Artificial Sequence: Synthetic oligonucleotide
aaccaauuaccagccgcuu

SEQ ID NO: 2184725 - RNA, 19 nt, Artificial Sequence
  Description of Artificial Sequence: Synthetic oligonucleotide
gcuagugaguacuacugua

SEQ ID NO: 2184726 - RNA, 19 nt, Artificial Sequence
  Description of Artificial Sequence: Synthetic oligonucleotide
agccauccugaacaagcau

SEQ ID NO: 2184727 - RNA, 19 nt, Artificial Sequence
  Description of Artificial Sequence: Synthetic oligonucleotide
uucugggagucgauccaua

SEQ ID NO: 2184728 - RNA, 19 nt, Artificial Sequence
  Description of Artificial Sequence: Synthetic oligonucleotide
gugcuggcuuccauugccg

SEQ ID NO: 2184729 - RNA, 19 nt, Artificial Sequence
  Description of Artificial Sequence: Synthetic oligonucleotide
caucucucaguuaaguauu

SEQ ID NO: 2184730 - RNA, 19 nt, Artificial Sequence
  Description of Artificial Sequence: Synthetic oligonucleotide
ccaaggaagaccuucuucu

SEQ ID NO: 2184731 - RNA, 19 nt, Artificial Sequence
  Description of Artificial Sequence: Synthetic oligonucleotide
guauucaugccacccacuu

SEQ ID NO: 2184732 - RNA, 19 nt, Artificial Sequence
  Description of Artificial Sequence: Synthetic oligonucleotide
gcaagaauuugaagauggc

SEQ ID NO: 2184733 - RNA, 19 nt, Artificial Sequence
  Description of Artificial Sequence: Synthetic oligonucleotide
gcucaagccaacugcuaac

SEQ ID NO: 2184734 - RNA, 19 nt, Artificial Sequence
  Description of Artificial Sequence: Synthetic oligonucleotide
agggcaugauauaaacgau

SEQ ID NO: 2184735 - RNA, 19 nt, Artificial Sequence
  Description of Artificial Sequence: Synthetic oligonucleotide
augccuacugugaauuaau

SEQ ID NO: 2184736 - RNA, 19 nt, Artificial Sequence
  Description of Artificial Sequence: Synthetic oligonucleotide
gaccguaaguggacaauaa

SEQ ID NO: 2184737 - RNA, 19 nt, Artificial Sequence
  Description of Artificial Sequence: Synthetic oligonucleotide
ugcugacuuucugcagaag

SEQ ID NO: 2184738 - RNA, 19 nt, Artificial Sequence
  Description of Artificial Sequence: Synthetic oligonucleotide
accuuagccugaguuuuga

SEQ ID NO: 2184739 - RNA, 19 nt, Artificial Sequence
  Description of Artificial Sequence: Synthetic oligonucleotide
gaacaagcaugauuuucuu

SEQ ID NO: 2184740 - RNA, 19 nt, Artificial Sequence
  Description of Artificial Sequence: Synthetic oligonucleotide
uggcucaagccaacugcua

SEQ ID NO: 2184741 - RNA, 19 nt, Artificial Sequence
  Description of Artificial Sequence: Synthetic oligonucleotide
guagacugacagagaugag

SEQ ID NO: 2184742 - RNA, 19 nt, Artificial Sequence
  Description of Artificial Sequence: Synthetic oligonucleotide
aacugagacguagcaucuu

SEQ ID NO: 2184743 - RNA, 19 nt, Artificial Sequence
  Description of Artificial Sequence: Synthetic oligonucleotide
cucacugggcuagugagua

SEQ ID NO: 2184744 - RNA, 19 nt, Artificial Sequence
  Description of Artificial Sequence: Synthetic oligonucleotide
ccguaaguggacaauaacu

SEQ ID NO: 2184745 - RNA, 19 nt, Artificial Sequence
  Description of Artificial Sequence: Synthetic oligonucleotide
ccacccacuugccagguac

SEQ ID NO: 2184746 - RNA, 19 nt, Artificial Sequence
  Description of Artificial Sequence: Synthetic oligonucleotide
ggcucaagccaacugcuaa

SEQ ID NO: 2184747 - RNA, 19 nt, Artificial Sequence
  Description of Artificial Sequence: Synthetic oligonucleotide
uaccagccgcuuacugugu

SEQ ID NO: 2184748 - RNA, 19 nt, Artificial Sequence
  Description of Artificial Sequence: Synthetic oligonucleotide
gcagaaggaauauguauau

SEQ ID NO: 2184749 - RNA, 19 nt, Artificial Sequence
  Description of Artificial Sequence: Synthetic oligonucleotide
gaguggcaguguuaaacau

SEQ ID NO: 2184750 - RNA, 19 nt, Artificial Sequence
  Description of Artificial Sequence: Synthetic oligonucleotide
cagccgcuuacuguguaug

SEQ ID NO: 2184751 - RNA, 19 nt, Artificial Sequence
  Description of Artificial Sequence: Synthetic oligonucleotide
ugccucugccaaugucaug

SEQ ID NO: 2184752 - RNA, 19 nt, Artificial Sequence
  Description of Artificial Sequence: Synthetic oligonucleotide
ggcaugauauaaacgauau

SEQ ID NO: 2184753 - RNA, 19 nt, Artificial Sequence
  Description of Artificial Sequence: Synthetic oligonucleotide
caguaggucuguagacuga

SEQ ID NO: 2184754 - RNA, 19 nt, Artificial Sequence
  Description of Artificial Sequence: Synthetic oligonucleotide
cugugaauuaaugcugacu

SEQ ID NO: 2184755 - RNA, 19 nt, Artificial Sequence
  Description of Artificial Sequence: Synthetic oligonucleotide
cugcaaacgcuugcagcac

SEQ ID NO: 2184756 - RNA, 19 nt, Artificial Sequence
  Description of Artificial Sequence: Synthetic oligonucleotide
gaccaaaaccugucuuccu

SEQ ID NO: 2184757 - RNA, 19 nt, Artificial Sequence
  Description of Artificial Sequence: Synthetic oligonucleotide
ucaacacaguaggucugua

SEQ ID NO: 2184758 - RNA, 19 nt, Artificial Sequence
  Description of Artificial Sequence: Synthetic oligonucleotide
cugggcuagugaguacuac

SEQ ID NO: 2184759 - RNA, 19 nt, Artificial Sequence
  Description of Artificial Sequence: Synthetic oligonucleotide
cagguacuucaacacagua

SEQ ID NO: 2184760 - RNA, 19 nt, Artificial Sequence
  Description of Artificial Sequence: Synthetic oligonucleotide
guuuauccaguggcuauua

SEQ ID NO: 2184761 - RNA, 19 nt, Artificial Sequence
  Description of Artificial Sequence: Synthetic oligonucleotide
cuguuuauccaguggcuau

SEQ ID NO: 2184762 - RNA, 19 nt, Artificial Sequence
  Description of Artificial Sequence: Synthetic oligonucleotide
acucacugggcuagugagu

SEQ ID NO: 2184763 - RNA, 19 nt, Artificial Sequence
  Description of Artificial Sequence: Synthetic oligonucleotide
agaaauccauugggucugu

SEQ ID NO: 2184764 - RNA, 19 nt, Artificial Sequence
  Description of Artificial Sequence: Synthetic oligonucleotide
cacuuguguaauauagguu

SEQ ID NO: 2184765 - RNA, 19 nt, Artificial Sequence
  Description of Artificial Sequence: Synthetic oligonucleotide
agccugaguuuugaagaau

SEQ ID NO: 2184766 - RNA, 19 nt, Artificial Sequence
  Description of Artificial Sequence: Synthetic oligonucleotide
cacaguaggucuguagacu

SEQ ID NO: 2184767 - RNA, 19 nt, Artificial Sequence
  Description of Artificial Sequence: Synthetic oligonucleotide
uugcagagcuuguggcguu

SEQ ID NO: 2184768 - RNA, 19 nt, Artificial Sequence
  Description of Artificial Sequence: Synthetic oligonucleotide
gcuuacuguguaugcaucu

SEQ ID NO: 2184769 - RNA, 19 nt, Artificial Sequence
  Description of Artificial Sequence: Synthetic oligonucleotide
cuguccuguuaaaaugccu

SEQ ID NO: 2184770 - RNA, 19 nt, Artificial Sequence
  Description of Artificial Sequence: Synthetic oligonucleotide
cugagcacucacugggcua

SEQ ID NO: 2184771 - RNA, 19 nt, Artificial Sequence
  Description of Artificial Sequence: Synthetic oligonucleotide
gucuguagacugacagaga

SEQ ID NO: 2184772 - RNA, 19 nt, Artificial Sequence
  Description of Artificial Sequence: Synthetic oligonucleotide
guaggucuguagacugaca

SEQ ID NO: 2184773 - RNA, 19 nt, Artificial Sequence
  Description of Artificial Sequence: Synthetic oligonucleotide
cucaagccaacugcuaacu

SEQ ID NO: 2184774 - RNA, 19 nt, Artificial Sequence
  Description of Artificial Sequence: Synthetic oligonucleotide
gcuuccauugccgaugggu

SEQ ID NO: 2184775 - RNA, 19 nt, Artificial Sequence
  Description of Artificial Sequence: Synthetic oligonucleotide
ccauggcucaagccaacug

SEQ ID NO: 2184776 - RNA, 19 nt, Artificial Sequence
  Description of Artificial Sequence: Synthetic oligonucleotide
gcacucacugggcuaguga

SEQ ID NO: 2184777 - RNA, 19 nt, Artificial Sequence
  Description of Artificial Sequence: Synthetic oligonucleotide
gggugaguggcaguguuaa

SEQ ID NO: 2184778 - RNA, 19 nt, Artificial Sequence
  Description of Artificial Sequence: Synthetic oligonucleotide
accagccgcuuacugugua

SEQ ID NO: 2184779 - RNA, 19 nt, Artificial Sequence
  Description of Artificial Sequence: Synthetic oligonucleotide
gcaugauauaaacgauaua

SEQ ID NO: 2184780 - RNA, 19 nt, Artificial Sequence
  Description of Artificial Sequence: Synthetic oligonucleotide
gcaaacgcuugcagcacac

SEQ ID NO: 2184781 - RNA, 19 nt, Artificial Sequence
  Description of Artificial Sequence: Synthetic oligonucleotide
cgauccauauuguucuaga

SEQ ID NO: 2184782 - RNA, 19 nt, Artificial Sequence
  Description of Artificial Sequence: Synthetic oligonucleotide
cacugggcuagugaguacu

SEQ ID NO: 2184783 - RNA, 19 nt, Artificial Sequence
  Description of Artificial Sequence: Synthetic oligonucleotide
gucgauccauauuguucua

SEQ ID NO: 2184784 - RNA, 19 nt, Artificial Sequence
  Description of Artificial Sequence: Synthetic oligonucleotide
gaugggugaguggcagugu

SEQ ID NO: 2184785 - RNA, 19 nt, Artificial Sequence
  Description of Artificial Sequence: Synthetic oligonucleotide
gccgcuuacuguguaugca

SEQ ID NO: 2184786 - RNA, 19 nt, Artificial Sequence
  Description of Artificial Sequence: Synthetic oligonucleotide
acccacuugccagguacuu

SEQ ID NO: 2184787 - RNA, 19 nt, Artificial Sequence
  Description of Artificial Sequence: Synthetic oligonucleotide
ggagucgauccauauuguu

SEQ ID NO: 2184788 - RNA, 19 nt, Artificial Sequence
  Description of Artificial Sequence: Synthetic oligonucleotide
gcuauuuugcagagcuugu

SEQ ID NO: 2184789 - RNA, 19 nt, Artificial Sequence
  Description of Artificial Sequence: Synthetic oligonucleotide
cgauauacacaagaccaaa

SEQ ID NO: 2184790 - RNA, 19 nt, Artificial Sequence
  Description of Artificial Sequence: Synthetic oligonucleotide
gguauucaugccacccacu

SEQ ID NO: 2184791 - RNA, 19 nt, Artificial Sequence
  Description of Artificial Sequence: Synthetic oligonucleotide
cugggagucgauccauauu

SEQ ID NO: 2184792 - RNA, 19 nt, Artificial Sequence
  Description of Artificial Sequence: Synthetic oligonucleotide
caauuaccagccgcuuacu

SEQ ID NO: 2184793 - RNA, 19 nt, Artificial Sequence
  Description of Artificial Sequence: Synthetic oligonucleotide
ccuccaaggaagaccuucu

SEQ ID NO: 2184794 - RNA, 19 nt, Artificial Sequence
  Description of Artificial Sequence: Synthetic oligonucleotide
cccacuugccagguacuuc

SEQ ID NO: 2184795 - RNA, 19 nt, Artificial Sequence
  Description of Artificial Sequence: Synthetic oligonucleotide
cacccacuugccagguacu

SEQ ID NO: 2184796 - RNA, 19 nt, Artificial Sequence
  Description of Artificial Sequence: Synthetic oligonucleotide
ccugaguuuugaagaauuu

SEQ ID NO: 2184797 - RNA, 19 nt, Artificial Sequence
  Description of Artificial Sequence: Synthetic oligonucleotide
caaacgcuugcagcacacu

SEQ ID NO: 2184798 - RNA, 19 nt, Artificial Sequence
  Description of Artificial Sequence: Synthetic oligonucleotide
ccagguacuucaacacagu

SEQ ID NO: 2184799 - RNA, 19 nt, Artificial Sequence
  Description of Artificial Sequence: Synthetic oligonucleotide
cuccaaggaagaccuucuu

SEQ ID NO: 2184800 - RNA, 19 nt, Artificial Sequence
  Description of Artificial Sequence: Synthetic oligonucleotide
gggagucgauccauauugu

SEQ ID NO: 2184801 - RNA, 19 nt, Artificial Sequence
  Description of Artificial Sequence: Synthetic oligonucleotide
ggacaauaacugagacgua

SEQ ID NO: 2184802 - RNA, 19 nt, Artificial Sequence
  Description of Artificial Sequence: Synthetic oligonucleotide
ccgcuuacuguguaugcau

SEQ ID NO: 2184803 - RNA, 19 nt, Artificial Sequence
  Description of Artificial Sequence: Synthetic oligonucleotide
ggcuauuaucuguccuguu

SEQ ID NO: 2184804 - RNA, 19 nt, Artificial Sequence
  Description of Artificial Sequence: Synthetic oligonucleotide
gagcacucacugggcuagu

SEQ ID NO: 2184805 - RNA, 19 nt, Artificial Sequence
  Description of Artificial Sequence: Synthetic oligonucleotide
ccaggaucugaagggacuu

SEQ ID NO: 2184806 - RNA, 19 nt, Artificial Sequence
  Description of Artificial Sequence: Synthetic oligonucleotide
ccagccgcuuacuguguau

SEQ ID NO: 2184807 - RNA, 19 nt, Artificial Sequence
  Description of Artificial Sequence: Synthetic oligonucleotide
ccgaugggugaguggcagu

SEQ ID NO: 2184808 - RNA, 19 nt, Artificial Sequence
  Description of Artificial Sequence: Synthetic oligonucleotide
caccuccaaggaagaccuu

SEQ ID NO: 2184809 - RNA, 19 nt, Artificial Sequence
  Description of Artificial Sequence: Synthetic oligonucleotide
uuuucaaggccacaguucg

SEQ ID NO: 2184810 - RNA, 19 nt, Artificial Sequence
  Description of Artificial Sequence: Synthetic oligonucleotide
aggaauuucccauaacagc

SEQ ID NO: 2184811 - RNA, 19 nt, Artificial Sequence
  Description of Artificial Sequence: Synthetic oligonucleotide
agcgucugcacccugaacc

SEQ ID NO: 2184812 - RNA, 19 nt, Artificial Sequence
  Description of Artificial Sequence: Synthetic oligonucleotide
uuuuccaaggauccaaucu

SEQ ID NO: 2184813 - RNA, 19 nt, Artificial Sequence
  Description of Artificial Sequence: Synthetic oligonucleotide
uaagguggggaaaaggacc

SEQ ID NO: 2184814 - RNA, 19 nt, Artificial Sequence
  Description of Artificial Sequence: Synthetic oligonucleotide
augaagucgguucaccagc

SEQ ID NO: 2184815 - RNA, 19 nt, Artificial Sequence
  Description of Artificial Sequence: Synthetic oligonucleotide
uugggaaucaagaggcggg

SEQ ID NO: 2184816 - RNA, 19 nt, Artificial Sequence
  Description of Artificial Sequence: Synthetic oligonucleotide
uauuuccgcacccaguuca

SEQ ID NO: 2184817 - RNA, 19 nt, Artificial Sequence
  Description of Artificial Sequence: Synthetic oligonucleotide
ugaggugcacugcagaggc

SEQ ID NO: 2184818 - RNA, 19 nt, Artificial Sequence
  Description of Artificial Sequence: Synthetic oligonucleotide
ugagauguuagcaggaauu

SEQ ID NO: 2184819 - RNA, 19 nt, Artificial Sequence
  Description of Artificial Sequence: Synthetic oligonucleotide
aacuugacacagugugugg

SEQ ID NO: 2184820 - RNA, 19 nt, Artificial Sequence
  Description of Artificial Sequence: Synthetic oligonucleotide
cauaacagcaccuguccag

SEQ ID NO: 2184821 - RNA, 19 nt, Artificial Sequence
  Description of Artificial Sequence: Synthetic oligonucleotide
uaggaguccuggaaggcgg

SEQ ID NO: 2184822 - RNA, 19 nt, Artificial Sequence
  Description of Artificial Sequence: Synthetic oligonucleotide
ugaaccggcaccucaagac

SEQ ID NO: 2184823 - RNA, 19 nt, Artificial Sequence
  Description of Artificial Sequence: Synthetic oligonucleotide
ucgucguccgucuugagga

SEQ ID NO: 2184824 - RNA, 19 nt, Artificial Sequence
  Description of Artificial Sequence: Synthetic oligonucleotide
ugagccaggcuaugaaccg

SEQ ID NO: 2184825 - RNA, 19 nt, Artificial Sequence
  Description of Artificial Sequence: Synthetic oligonucleotide
ggcacuuacucccacaaag

SEQ ID NO: 2184826 - RNA, 19 nt, Artificial Sequence
  Description of Artificial Sequence: Synthetic oligonucleotide
cucaagacacccaggaaug

SEQ ID NO: 2184827 - RNA, 19 nt, Artificial Sequence
  Description of Artificial Sequence: Synthetic oligonucleotide
caggcuaugaaccggcacc

SEQ ID NO: 2184828 - RNA, 19 nt, Artificial Sequence
  Description of Artificial Sequence: Synthetic oligonucleotide
aguggcaccggccaacuug

SEQ ID NO: 2184829 - RNA, 19 nt, Artificial Sequence
  Description of Artificial Sequence: Synthetic oligonucleotide
ugagguugcgguaggaguc

SEQ ID NO: 2184830 - RNA, 19 nt, Artificial Sequence
  Description of Artificial Sequence: Synthetic oligonucleotide
caugaagucgguucaccag

SEQ ID NO: 2184831 - RNA, 19 nt, Artificial Sequence
  Description of Artificial Sequence: Synthetic oligonucleotide
uccgaagaggguccagacg

SEQ ID NO: 2184832 - RNA, 19 nt, Artificial Sequence
  Description of Artificial Sequence: Synthetic oligonucleotide
gauccaaucugugagaugu

SEQ ID NO: 2184833 - RNA, 19 nt, Artificial Sequence
  Description of Artificial Sequence: Synthetic oligonucleotide
aaggauccaaucugugaga

SEQ ID NO: 2184834 - RNA, 19 nt, Artificial Sequence
  Description of Artificial Sequence: Synthetic oligonucleotide
auaacagcaccuguccagg

SEQ ID NO: 2184835 - RNA, 19 nt, Artificial Sequence
  Description of Artificial Sequence: Synthetic oligonucleotide
acaguauuuccgcacccag

SEQ ID NO: 2184836 - RNA, 19 nt, Artificial Sequence
  Description of Artificial Sequence: Synthetic oligonucleotide
guugacguacacgucgucg

SEQ ID NO: 2184837 - RNA, 19 nt, Artificial Sequence
  Description of Artificial Sequence: Synthetic oligonucleotide
auguuagcaggaauuuccc

SEQ ID NO: 2184838 - RNA, 19 nt, Artificial Sequence
  Description of Artificial Sequence: Synthetic oligonucleotide
cuuacucccacaaagacau

SEQ ID NO: 2184839 - RNA, 19 nt, Artificial Sequence
  Description of Artificial Sequence: Synthetic oligonucleotide
cagacgaucaccagcagca

SEQ ID NO: 2184840 - RNA, 19 nt, Artificial Sequence
  Description of Artificial Sequence: Synthetic oligonucleotide
agucgguucaccagcuucc

SEQ ID NO: 2184841 - RNA, 19 nt, Artificial Sequence
  Description of Artificial Sequence: Synthetic oligonucleotide
ugugccgccgacuccgagg

SEQ ID NO: 2184842 - RNA, 19 nt, Artificial Sequence
  Description of Artificial Sequence: Synthetic oligonucleotide
uugacguacacgucgucgu

SEQ ID NO: 2184843 - RNA, 19 nt, Artificial Sequence
  Description of Artificial Sequence: Synthetic oligonucleotide
acgaucaccagcagcaggg

SEQ ID NO: 2184844 - RNA, 19 nt, Artificial Sequence
  Description of Artificial Sequence: Synthetic oligonucleotide
aggcggacagcacguagcc

SEQ ID NO: 2184845 - RNA, 19 nt, Artificial Sequence
  Description of Artificial Sequence: Synthetic oligonucleotide
uaugaaccggcaccucaag

SEQ ID NO: 2184846 - RNA, 19 nt, Artificial Sequence
  Description of Artificial Sequence: Synthetic oligonucleotide
uuccccaugaagucgguuc

SEQ ID NO: 2184847 - RNA, 19 nt, Artificial Sequence
  Description of Artificial Sequence: Synthetic oligonucleotide
uuccaaggauccaaucugu

SEQ ID NO: 2184848 - RNA, 19 nt, Artificial Sequence
  Description of Artificial Sequence: Synthetic oligonucleotide
ucugaagggccccucucug

SEQ ID NO: 2184849 - RNA, 19 nt, Artificial Sequence
  Description of Artificial Sequence: Synthetic oligonucleotide
uguuagcaggaauuuccca

SEQ ID NO: 2184850 - RNA, 19 nt, Artificial Sequence
  Description of Artificial Sequence: Synthetic oligonucleotide
aaucaagaggcggggcagg

SEQ ID NO: 2184851 - RNA, 19 nt, Artificial Sequence
  Description of Artificial Sequence: Synthetic oligonucleotide
aaccggcaccucaagacac

SEQ ID NO: 2184852 - RNA, 19 nt, Artificial Sequence
  Description of Artificial Sequence: Synthetic oligonucleotide
uccaaggauccaaucugug

SEQ ID NO: 2184853 - RNA, 19 nt, Artificial Sequence
  Description of Artificial Sequence: Synthetic oligonucleotide
cuccgggacaguauuuccg

SEQ ID NO: 2184854 - RNA, 19 nt, Artificial Sequence
  Description of Artificial Sequence: Synthetic oligonucleotide
aagcccgaggguccgaaga

SEQ ID NO: 2184855 - RNA, 19 nt, Artificial Sequence
  Description of Artificial Sequence: Synthetic oligonucleotide
ugaagucgguucaccagcu

SEQ ID NO: 2184856 - RNA, 19 nt, Artificial Sequence
  Description of Artificial Sequence: Synthetic oligonucleotide
ugggaaucaagaggcgggg

SEQ ID NO: 2184857 - RNA, 19 nt, Artificial Sequence
  Description of Artificial Sequence: Synthetic oligonucleotide
acguacacgucgucguccg

SEQ ID NO: 2184858 - RNA, 19 nt, Artificial Sequence
  Description of Artificial Sequence: Synthetic oligonucleotide
guaggaguccuggaaggcg

SEQ ID NO: 2184859 - RNA, 19 nt, Artificial Sequence
  Description of Artificial Sequence: Synthetic oligonucleotide
aagaggccgagcggcaugg

SEQ ID NO: 2184860 - RNA, 19 nt, Artificial Sequence
  Description of Artificial Sequence: Synthetic oligonucleotide
uccccaugaagucgguuca

SEQ ID NO: 2184861 - RNA, 19 nt, Artificial Sequence
  Description of Artificial Sequence: Synthetic oligonucleotide
aggugcacugcagaggcgg

SEQ ID NO: 2184862 - RNA, 19 nt, Artificial Sequence
  Description of Artificial Sequence: Synthetic oligonucleotide
caggauguccuugugugcc

SEQ ID NO: 2184863 - RNA, 19 nt, Artificial Sequence
  Description of Artificial Sequence: Synthetic oligonucleotide
ggccguacacaccaggacg

SEQ ID NO: 2184864 - RNA, 19 nt, Artificial Sequence
  Description of Artificial Sequence: Synthetic oligonucleotide
guugagccaggcuaugaac

SEQ ID NO: 2184865 - RNA, 19 nt, Artificial Sequence
  Description of Artificial Sequence: Synthetic oligonucleotide
ugugccugaggcguaaggu

SEQ ID NO: 2184866 - RNA, 19 nt, Artificial Sequence
  Description of Artificial Sequence: Synthetic oligonucleotide
ggguugggaaucaagaggc

SEQ ID NO: 2184867 - RNA, 19 nt, Artificial Sequence
  Description of Artificial Sequence: Synthetic oligonucleotide
guagccugugccugaggcg

SEQ ID NO: 2184868 - RNA, 19 nt, Artificial Sequence
  Description of Artificial Sequence: Synthetic oligonucleotide
gaauuucccauaacagcac

SEQ ID NO: 2184869 - RNA, 19 nt, Artificial Sequence
  Description of Artificial Sequence: Synthetic oligonucleotide
ucagaaugaggugcacugc

SEQ ID NO: 2184870 - RNA, 19 nt, Artificial Sequence
  Description of Artificial Sequence: Synthetic oligonucleotide
gacgccaggggacaggcuc

SEQ ID NO: 2184871 - RNA, 19 nt, Artificial Sequence
  Description of Artificial Sequence: Synthetic oligonucleotide
acuuacucccacaaagaca

SEQ ID NO: 2184872 - RNA, 19 nt, Artificial Sequence
  Description of Artificial Sequence: Synthetic oligonucleotide
aggagcaaaagggcucagc

SEQ ID NO: 2184873 - RNA, 19 nt, Artificial Sequence
  Description of Artificial Sequence: Synthetic oligonucleotide
ugaggcguaagguggggaa

SEQ ID NO: 2184874 - RNA, 19 nt, Artificial Sequence
  Description of Artificial Sequence: Synthetic oligonucleotide
ggauguaccgggcuccggg

SEQ ID NO: 2184875 - RNA, 19 nt, Artificial Sequence
  Description of Artificial Sequence: Synthetic oligonucleotide
ggagcaaaagggcucagca

SEQ ID NO: 2184876 - RNA, 19 nt, Artificial Sequence
  Description of Artificial Sequence: Synthetic oligonucleotide
guaagguggggaaaaggac

SEQ ID NO: 2184877 - RNA, 19 nt, Artificial Sequence
  Description of Artificial Sequence: Synthetic oligonucleotide
caagacacccaggaaugcc

SEQ ID NO: 2184878 - RNA, 19 nt, Artificial Sequence
  Description of Artificial Sequence: Synthetic oligonucleotide
ggcaccucaagacacccag

SEQ ID NO: 2184879 - RNA, 19 nt, Artificial Sequence
  Description of Artificial Sequence: Synthetic oligonucleotide
aggauguccuugugugccg

SEQ ID NO: 2184880 - RNA, 19 nt, Artificial Sequence
  Description of Artificial Sequence: Synthetic oligonucleotide
guacacaccaggacgagca

SEQ ID NO: 2184881 - RNA, 19 nt, Artificial Sequence
  Description of Artificial Sequence: Synthetic oligonucleotide
ccugcauuuuccaaggauc

SEQ ID NO: 2184882 - RNA, 19 nt, Artificial Sequence
  Description of Artificial Sequence: Synthetic oligonucleotide
cucgccuggcacuuacucc

SEQ ID NO: 2184883 - RNA, 19 nt, Artificial Sequence
  Description of Artificial Sequence: Synthetic oligonucleotide
gacagcacguagccugugc

SEQ ID NO: 2184884 - RNA, 19 nt, Artificial Sequence
  Description of Artificial Sequence: Synthetic oligonucleotide
agaggcggacagcacguag

SEQ ID NO: 2184885 - RNA, 19 nt, Artificial Sequence
  Description of Artificial Sequence: Synthetic oligonucleotide
gaaccggcaccucaagaca

SEQ ID NO: 2184886 - RNA, 19 nt, Artificial Sequence
  Description of Artificial Sequence: Synthetic oligonucleotide
uagcaggaauuucccauaa

SEQ ID NO: 2184887 - RNA, 19 nt, Artificial Sequence
  Description of Artificial Sequence: Synthetic oligonucleotide
gaggccgagcggcauggcg

SEQ ID NO: 2184888 - RNA, 19 nt, Artificial Sequence
  Description of Artificial Sequence: Synthetic oligonucleotide
cagcacuuuccccaugaag

SEQ ID NO: 2184889 - RNA, 19 nt, Artificial Sequence
  Description of Artificial Sequence: Synthetic oligonucleotide
agauggggugcccggcugg

SEQ ID NO: 2184890 - RNA, 19 nt, Artificial Sequence
  Description of Artificial Sequence: Synthetic oligonucleotide
aaagcccgaggguccgaag

SEQ ID NO: 2184891 - RNA, 19 nt, Artificial Sequence
  Description of Artificial Sequence: Synthetic oligonucleotide
gugccugaggcguaaggug

SEQ ID NO: 2184892 - RNA, 19 nt, Artificial Sequence
  Description of Artificial Sequence: Synthetic oligonucleotide
uagccugugccugaggcgu

SEQ ID NO: 2184893 - RNA, 19 nt, Artificial Sequence
  Description of Artificial Sequence: Synthetic oligonucleotide
caaagacauccuccagggg

SEQ ID NO: 2184894 - RNA, 19 nt, Artificial Sequence
  Description of Artificial Sequence: Synthetic oligonucleotide
gguccagacgaucaccagc

SEQ ID NO: 2184895 - RNA, 19 nt, Artificial Sequence
  Description of Artificial Sequence: Synthetic oligonucleotide
gacguacacgucgucgucc

SEQ ID NO: 2184896 - RNA, 19 nt, Artificial Sequence
  Description of Artificial Sequence: Synthetic oligonucleotide
uacacgucgucguccgucu

SEQ ID NO: 2184897 - RNA, 19 nt, Artificial Sequence
  Description of Artificial Sequence: Synthetic oligonucleotide
agguuuucaaggccacagu

SEQ ID NO: 2184898 - RNA, 19 nt, Artificial Sequence
  Description of Artificial Sequence: Synthetic oligonucleotide
ugucccguggguucuccca

SEQ ID NO: 2184899 - RNA, 19 nt, Artificial Sequence
  Description of Artificial Sequence: Synthetic oligonucleotide
augaaccggcaccucaaga

SEQ ID NO: 2184900 - RNA, 19 nt, Artificial Sequence
  Description of Artificial Sequence: Synthetic oligonucleotide
agaaugaggugcacugcag

SEQ ID NO: 2184901 - RNA, 19 nt, Artificial Sequence
  Description of Artificial Sequence: Synthetic oligonucleotide
cagaaugaggugcacugca

SEQ ID NO: 2184902 - RNA, 19 nt, Artificial Sequence
  Description of Artificial Sequence: Synthetic oligonucleotide
accagcucgggacguugac

SEQ ID NO: 2184903 - RNA, 19 nt, Artificial Sequence
  Description of Artificial Sequence: Synthetic oligonucleotide
ucgcccuucugccaucgcu

SEQ ID NO: 2184904 - RNA, 19 nt, Artificial Sequence
  Description of Artificial Sequence: Synthetic oligonucleotide
ccgcugagggucuugaggg

SEQ ID NO: 2184905 - RNA, 19 nt, Artificial Sequence
  Description of Artificial Sequence: Synthetic oligonucleotide
gacuccgaggccaggucgg

SEQ ID NO: 2184906 - RNA, 19 nt, Artificial Sequence
  Description of Artificial Sequence: Synthetic oligonucleotide
ccaaucugugagauguuag

SEQ ID NO: 2184907 - RNA, 19 nt, Artificial Sequence
  Description of Artificial Sequence: Synthetic oligonucleotide
acacccaggaaugccuggg

SEQ ID NO: 2184908 - RNA, 19 nt, Artificial Sequence
  Description of Artificial Sequence: Synthetic oligonucleotide
uccaaucugugagauguua

SEQ ID NO: 2184909 - RNA, 19 nt, Artificial Sequence
  Description of Artificial Sequence: Synthetic oligonucleotide
gaggcgccggaagaggccg

SEQ ID NO: 2184910 - RNA, 19 nt, Artificial Sequence
  Description of Artificial Sequence: Synthetic oligonucleotide
gcggacagcacguagccug

SEQ ID NO: 2184911 - RNA, 19 nt, Artificial Sequence
  Description of Artificial Sequence: Synthetic oligonucleotide
agcccgaggguccgaagag

SEQ ID NO: 2184912 - RNA, 19 nt, Artificial Sequence
  Description of Artificial Sequence: Synthetic oligonucleotide
ggaaucaagaggcggggca

SEQ ID NO: 2184913 - RNA, 19 nt, Artificial Sequence
  Description of Artificial Sequence: Synthetic oligonucleotide
aagacauccuccaggggua

SEQ ID NO: 2184914 - RNA, 19 nt, Artificial Sequence
  Description of Artificial Sequence: Synthetic oligonucleotide
cccauaacagcaccugucc

SEQ ID NO: 2184915 - RNA, 19 nt, Artificial Sequence
  Description of Artificial Sequence: Synthetic oligonucleotide
gguagugaguggcaccggc

SEQ ID NO: 2184916 - RNA, 19 nt, Artificial Sequence
  Description of Artificial Sequence: Synthetic oligonucleotide
gggacguugacguacacgu

SEQ ID NO: 2184917 - RNA, 19 nt, Artificial Sequence
  Description of Artificial Sequence: Synthetic oligonucleotide
uccccaaagcccgaggguc

SEQ ID NO: 2184918 - RNA, 19 nt, Artificial Sequence
  Description of Artificial Sequence: Synthetic oligonucleotide
gggacaguauuuccgcacc

SEQ ID NO: 2184919 - RNA, 19 nt, Artificial Sequence
  Description of Artificial Sequence: Synthetic oligonucleotide
gagccaggcuaugaaccgg

SEQ ID NO: 2184920 - RNA, 19 nt, Artificial Sequence
  Description of Artificial Sequence: Synthetic oligonucleotide
gggguagugaguggcaccg

SEQ ID NO: 2184921 - RNA, 19 nt, Artificial Sequence
  Description of Artificial Sequence: Synthetic oligonucleotide
caccucaagacacccagga

SEQ ID NO: 2184922 - RNA, 19 nt, Artificial Sequence
  Description of Artificial Sequence: Synthetic oligonucleotide
agcacguagccugugccug

SEQ ID NO: 2184923 - RNA, 19 nt, Artificial Sequence
  Description of Artificial Sequence: Synthetic oligonucleotide
gacaguauuuccgcaccca

SEQ ID NO: 2184924 - RNA, 19 nt, Artificial Sequence
  Description of Artificial Sequence: Synthetic oligonucleotide
aucaagaggcggggcaggg

SEQ ID NO: 2184925 - RNA, 19 nt, Artificial Sequence
  Description of Artificial Sequence: Synthetic oligonucleotide
uccagacgaucaccagcag

SEQ ID NO: 2184926 - RNA, 19 nt, Artificial Sequence
  Description of Artificial Sequence: Synthetic oligonucleotide
gauguaccgggcuccggga

SEQ ID NO: 2184927 - RNA, 19 nt, Artificial Sequence
  Description of Artificial Sequence: Synthetic oligonucleotide
ugacguacacgucgucguc

SEQ ID NO: 2184928 - RNA, 19 nt, Artificial Sequence
  Description of Artificial Sequence: Synthetic oligonucleotide
gaggguccagacgaucacc

SEQ ID NO: 2184929 - RNA, 19 nt, Artificial Sequence
  Description of Artificial Sequence: Synthetic oligonucleotide
gaggauguaccgggcuccg

SEQ ID NO: 2184930 - RNA, 19 nt, Artificial Sequence
  Description of Artificial Sequence: Synthetic oligonucleotide
gaggguccgaagagggucc

SEQ ID NO: 2184931 - RNA, 19 nt, Artificial Sequence
  Description of Artificial Sequence: Synthetic oligonucleotide
cugugagauguuagcagga

SEQ ID NO: 2184932 - RNA, 19 nt, Artificial Sequence
  Description of Artificial Sequence: Synthetic oligonucleotide
aggauccaaucugugagau

SEQ ID NO: 2184933 - RNA, 19 nt, Artificial Sequence
  Description of Artificial Sequence: Synthetic oligonucleotide
aguucgcccuucugccauc

SEQ ID NO: 2184934 - RNA, 19 nt, Artificial Sequence
  Description of Artificial Sequence: Synthetic oligonucleotide
gcgguaggaguccuggaag

SEQ ID NO: 2184935 - RNA, 19 nt, Artificial Sequence
  Description of Artificial Sequence: Synthetic oligonucleotide
caggacgagcaagaagggc

SEQ ID NO: 2184936 - RNA, 19 nt, Artificial Sequence
  Description of Artificial Sequence: Synthetic oligonucleotide
ucgcggauggcgccccaag

SEQ ID NO: 2184937 - RNA, 19 nt, Artificial Sequence
  Description of Artificial Sequence: Synthetic oligonucleotide
guccgaagaggguccagac

SEQ ID NO: 2184938 - RNA, 19 nt, Artificial Sequence
  Description of Artificial Sequence: Synthetic oligonucleotide
ccgucuugaggauguaccg

SEQ ID NO: 2184939 - RNA, 19 nt, Artificial Sequence
  Description of Artificial Sequence: Synthetic oligonucleotide
ucccguggguucucccagg

SEQ ID NO: 2184940 - RNA, 19 nt, Artificial Sequence
  Description of Artificial Sequence: Synthetic oligonucleotide
gugccgccgacuccgaggc

SEQ ID NO: 2184941 - RNA, 19 nt, Artificial Sequence
  Description of Artificial Sequence: Synthetic oligonucleotide
cuggcucaggugcuccggg

SEQ ID NO: 2184942 - RNA, 19 nt, Artificial Sequence
  Description of Artificial Sequence: Synthetic oligonucleotide
cucccacaaagacauccuc

SEQ ID NO: 2184943 - RNA, 19 nt, Artificial Sequence
  Description of Artificial Sequence: Synthetic oligonucleotide
gaagaggguccagacgauc

SEQ ID NO: 2184944 - RNA, 19 nt, Artificial Sequence
  Description of Artificial Sequence: Synthetic oligonucleotide
ccgaagaggguccagacga

SEQ ID NO: 2184945 - RNA, 19 nt, Artificial Sequence
  Description of Artificial Sequence: Synthetic oligonucleotide
gucccguggguucucccag

SEQ ID NO: 2184946 - RNA, 19 nt, Artificial Sequence
  Description of Artificial Sequence: Synthetic oligonucleotide
guauuuccgcacccaguuc

SEQ ID NO: 2184947 - RNA, 19 nt, Artificial Sequence
  Description of Artificial Sequence: Synthetic oligonucleotide
aggcuaugaaccggcaccu

SEQ ID NO: 2184948 - RNA, 19 nt, Artificial Sequence
  Description of Artificial Sequence: Synthetic oligonucleotide
gcgccucuggcucaggugc

SEQ ID NO: 2184949 - RNA, 19 nt, Artificial Sequence
  Description of Artificial Sequence: Synthetic oligonucleotide
gacgagcaagaagggcggg

SEQ ID NO: 2184950 - RNA, 19 nt, Artificial Sequence
  Description of Artificial Sequence: Synthetic oligonucleotide
accucaagacacccaggaa

SEQ ID NO: 2184951 - RNA, 19 nt, Artificial Sequence
  Description of Artificial Sequence: Synthetic oligonucleotide
gaagagcgucugcacccug

SEQ ID NO: 2184952 - RNA, 19 nt, Artificial Sequence
  Description of Artificial Sequence: Synthetic oligonucleotide
auuuccgcacccaguucag

SEQ ID NO: 2184953 - RNA, 19 nt, Artificial Sequence
  Description of Artificial Sequence: Synthetic oligonucleotide
ggacaguauuuccgcaccc

SEQ ID NO: 2184954 - RNA, 19 nt, Artificial Sequence
  Description of Artificial Sequence: Synthetic oligonucleotide
uggcacuuacucccacaaa

SEQ ID NO: 2184955 - RNA, 19 nt, Artificial Sequence
  Description of Artificial Sequence: Synthetic oligonucleotide
gucggggcggugcuguccc

SEQ ID NO: 2184956 - RNA, 19 nt, Artificial Sequence
  Description of Artificial Sequence: Synthetic oligonucleotide
cacgucgucguccgucuug

SEQ ID NO: 2184957 - RNA, 19 nt, Artificial Sequence
  Description of Artificial Sequence: Synthetic oligonucleotide
agggguagauggggugccc

SEQ ID NO: 2184958 - RNA, 19 nt, Artificial Sequence
  Description of Artificial Sequence: Synthetic oligonucleotide
acucccacaaagacauccu

SEQ ID NO: 2184959 - RNA, 19 nt, Artificial Sequence
  Description of Artificial Sequence: Synthetic oligonucleotide
agagcgucugcacccugaa

SEQ ID NO: 2184960 - RNA, 19 nt, Artificial Sequence
  Description of Artificial Sequence: Synthetic oligonucleotide
accggccaacuugacacag

SEQ ID NO: 2184961 - RNA, 19 nt, Artificial Sequence
  Description of Artificial Sequence: Synthetic oligonucleotide
cccgaggguccgaagaggg

SEQ ID NO: 2184962 - RNA, 19 nt, Artificial Sequence
  Description of Artificial Sequence: Synthetic oligonucleotide
aggguccagacgaucacca

SEQ ID NO: 2184963 - RNA, 19 nt, Artificial Sequence
  Description of Artificial Sequence: Synthetic oligonucleotide
agugaguggcaccggccaa

SEQ ID NO: 2184964 - RNA, 19 nt, Artificial Sequence
  Description of Artificial Sequence: Synthetic oligonucleotide
uuuccgcacccaguucagc

SEQ ID NO: 2184965 - RNA, 19 nt, Artificial Sequence
  Description of Artificial Sequence: Synthetic oligonucleotide
agacgaucaccagcagcag

SEQ ID NO: 2184966 - RNA, 19 nt, Artificial Sequence
  Description of Artificial Sequence: Synthetic oligonucleotide
ugaguggcaccggccaacu

SEQ ID NO: 2184967 - RNA, 19 nt, Artificial Sequence
  Description of Artificial Sequence: Synthetic oligonucleotide
ggauggcgccccaagaccc

SEQ ID NO: 2184968 - RNA, 19 nt, Artificial Sequence
  Description of Artificial Sequence: Synthetic oligonucleotide
uucagcccgcugagggucu

SEQ ID NO: 2184969 - RNA, 19 nt, Artificial Sequence
  Description of Artificial Sequence: Synthetic oligonucleotide
gguugggaaucaagaggcg

SEQ ID NO: 2184970 - RNA, 19 nt, Artificial Sequence
  Description of Artificial Sequence: Synthetic oligonucleotide
acauccuccagggguagau

SEQ ID NO: 2184971 - RNA, 19 nt, Artificial Sequence
  Description of Artificial Sequence: Synthetic oligonucleotide
cuggcacuuacucccacaa

SEQ ID NO: 2184972 - RNA, 19 nt, Artificial Sequence
  Description of Artificial Sequence: Synthetic oligonucleotide
guacacgucgucguccguc

SEQ ID NO: 2184973 - RNA, 19 nt, Artificial Sequence
  Description of Artificial Sequence: Synthetic oligonucleotide
gcguaagguggggaaaagg

SEQ ID NO: 2184974 - RNA, 19 nt, Artificial Sequence
  Description of Artificial Sequence: Synthetic oligonucleotide
gauggcgccccaagacccc

SEQ ID NO: 2184975 - RNA, 19 nt, Artificial Sequence
  Description of Artificial Sequence: Synthetic oligonucleotide
ugcccggcuggccaccuuc

SEQ ID NO: 2184976 - RNA, 19 nt, Artificial Sequence
  Description of Artificial Sequence: Synthetic oligonucleotide
cucagcuguugagccaggc

SEQ ID NO: 2184977 - RNA, 19 nt, Artificial Sequence
  Description of Artificial Sequence: Synthetic oligonucleotide
guucgcccuucugccaucg

SEQ ID NO: 2184978 - RNA, 19 nt, Artificial Sequence
  Description of Artificial Sequence: Synthetic oligonucleotide
agggccccucucuggauca

SEQ ID NO: 2184979 - RNA, 19 nt, Artificial Sequence
  Description of Artificial Sequence: Synthetic oligonucleotide
ggauccaaucugugagaug

SEQ ID NO: 2184980 - RNA, 19 nt, Artificial Sequence
  Description of Artificial Sequence: Synthetic oligonucleotide
gcgucugcacccugaaccc

SEQ ID NO: 2184981 - RNA, 19 nt, Artificial Sequence
  Description of Artificial Sequence: Synthetic oligonucleotide
agacacccaggaaugccug

SEQ ID NO: 2184982 - RNA, 19 nt, Artificial Sequence
  Description of Artificial Sequence: Synthetic oligonucleotide
gcaggauguccuugugugc

SEQ ID NO: 2184983 - RNA, 19 nt, Artificial Sequence
  Description of Artificial Sequence: Synthetic oligonucleotide
acguagccugugccugagg

SEQ ID NO: 2184984 - RNA, 19 nt, Artificial Sequence
  Description of Artificial Sequence: Synthetic oligonucleotide
guaccgggcuccgggacag

SEQ ID NO: 2184985 - RNA, 19 nt, Artificial Sequence
  Description of Artificial Sequence: Synthetic oligonucleotide
cuugaggauguaccgggcu

SEQ ID NO: 2184986 - RNA, 19 nt, Artificial Sequence
  Description of Artificial Sequence: Synthetic oligonucleotide
agcuguugagccaggcuau

SEQ ID NO: 2184987 - RNA, 19 nt, Artificial Sequence
  Description of Artificial Sequence: Synthetic oligonucleotide
aggcguaagguggggaaaa

SEQ ID NO: 2184988 - RNA, 19 nt, Artificial Sequence
  Description of Artificial Sequence: Synthetic oligonucleotide
gcuccgggacaguauuucc

SEQ ID NO: 2184989 - RNA, 19 nt, Artificial Sequence
  Description of Artificial Sequence: Synthetic oligonucleotide
acaccagcucgggacguug

SEQ ID NO: 2184990 - RNA, 19 nt, Artificial Sequence
  Description of Artificial Sequence: Synthetic oligonucleotide
ggguucucccaggaggaag

SEQ ID NO: 2184991 - RNA, 19 nt, Artificial Sequence
  Description of Artificial Sequence: Synthetic oligonucleotide
gguucucccaggaggaaga

SEQ ID NO: 2184992 - RNA, 19 nt, Artificial Sequence
  Description of Artificial Sequence: Synthetic oligonucleotide
aggccgagcggcauggcga

SEQ ID NO: 2184993 - RNA, 19 nt, Artificial Sequence
  Description of Artificial Sequence: Synthetic oligonucleotide
gugaguggcaccggccaac

SEQ ID NO: 2184994 - RNA, 19 nt, Artificial Sequence
  Description of Artificial Sequence: Synthetic oligonucleotide
caucgcucugaagggcccc

SEQ ID NO: 2184995 - RNA, 19 nt, Artificial Sequence
  Description of Artificial Sequence: Synthetic oligonucleotide
ugugugccgccgacuccga

SEQ ID NO: 2184996 - RNA, 19 nt, Artificial Sequence
  Description of Artificial Sequence: Synthetic oligonucleotide
guggcaccggccaacuuga

SEQ ID NO: 2184997 - RNA, 19 nt, Artificial Sequence
  Description of Artificial Sequence: Synthetic oligonucleotide
gagcgucugcacccugaac

SEQ ID NO: 2184998 - RNA, 19 nt, Artificial Sequence
  Description of Artificial Sequence: Synthetic oligonucleotide
acgucgucguccgucuuga

SEQ ID NO: 2184999 - RNA, 19 nt, Artificial Sequence
  Description of Artificial Sequence: Synthetic oligonucleotide
ugacaccagcucgggacgu

SEQ ID NO: 2185000 - RNA, 19 nt, Artificial Sequence
  Description of Artificial Sequence: Synthetic oligonucleotide
cucgggacguugacguaca

SEQ ID NO: 2185001 - RNA, 19 nt, Artificial Sequence
  Description of Artificial Sequence: Synthetic oligonucleotide
uucgcccuucugccaucgc

SEQ ID NO: 2185002 - RNA, 19 nt, Artificial Sequence
  Description of Artificial Sequence: Synthetic oligonucleotide
uccuugugugccgccgacu

SEQ ID NO: 2185003 - RNA, 19 nt, Artificial Sequence
  Description of Artificial Sequence: Synthetic oligonucleotide
gguagauggggugcccggc

SEQ ID NO: 2185004 - RNA, 19 nt, Artificial Sequence
  Description of Artificial Sequence: Synthetic oligonucleotide
acuccgaggccaggucggg

SEQ ID NO: 2185005 - RNA, 19 nt, Artificial Sequence
  Description of Artificial Sequence: Synthetic oligonucleotide
ccggaagaggccgagcggc

SEQ ID NO: 2185006 - RNA, 19 nt, Artificial Sequence
  Description of Artificial Sequence: Synthetic oligonucleotide
cauccuccagggguagaug

SEQ ID NO: 2185007 - RNA, 19 nt, Artificial Sequence
  Description of Artificial Sequence: Synthetic oligonucleotide
ccaugaagucgguucacca

SEQ ID NO: 2185008 - RNA, 19 nt, Artificial Sequence
  Description of Artificial Sequence: Synthetic oligonucleotide
ccacaaagacauccuccag

SEQ ID NO: 2185009 - RNA, 19 nt, Artificial Sequence
  Description of Artificial Sequence: Synthetic oligonucleotide
gccccggugaggcuggggc

SEQ ID NO: 2185010 - RNA, 19 nt, Artificial Sequence
  Description of Artificial Sequence: Synthetic oligonucleotide
guccgucuugaggauguac

SEQ ID NO: 2185011 - RNA, 19 nt, Artificial Sequence
  Description of Artificial Sequence: Synthetic oligonucleotide
gaggcguaagguggggaaa

SEQ ID NO: 2185012 - RNA, 19 nt, Artificial Sequence
  Description of Artificial Sequence: Synthetic oligonucleotide
aagaggcggggcagggcca

SEQ ID NO: 2185013 - RNA, 19 nt, Artificial Sequence
  Description of Artificial Sequence: Synthetic oligonucleotide
ucgggacguugacguacac

SEQ ID NO: 2185014 - RNA, 19 nt, Artificial Sequence
  Description of Artificial Sequence: Synthetic oligonucleotide
gccaucgcucugaagggcc

SEQ ID NO: 2185015 - RNA, 19 nt, Artificial Sequence
  Description of Artificial Sequence: Synthetic oligonucleotide
gcacugcagaggcggacag

SEQ ID NO: 2185016 - RNA, 19 nt, Artificial Sequence
  Description of Artificial Sequence: Synthetic oligonucleotide
caguauuuccgcacccagu

SEQ ID NO: 2185017 - RNA, 19 nt, Artificial Sequence
  Description of Artificial Sequence: Synthetic oligonucleotide
guagauggggugcccggcu

SEQ ID NO: 2185018 - RNA, 19 nt, Artificial Sequence
  Description of Artificial Sequence: Synthetic oligonucleotide
uuuccccaugaagucgguu

SEQ ID NO: 2185019 - RNA, 19 nt, Artificial Sequence
  Description of Artificial Sequence: Synthetic oligonucleotide
gggccguacacaccaggac

SEQ ID NO: 2185020 - RNA, 19 nt, Artificial Sequence
  Description of Artificial Sequence: Synthetic oligonucleotide
cacugcagaggcggacagc

SEQ ID NO: 2185021 - RNA, 19 nt, Artificial Sequence
  Description of Artificial Sequence: Synthetic oligonucleotide
gggaaucaagaggcggggc

SEQ ID NO: 2185022 - RNA, 19 nt, Artificial Sequence
  Description of Artificial Sequence: Synthetic oligonucleotide
ggccgagcggcauggcgag

SEQ ID NO: 2185023 - RNA, 19 nt, Artificial Sequence
  Description of Artificial Sequence: Synthetic oligonucleotide
gcucgggacguugacguac

SEQ ID NO: 2185024 - RNA, 19 nt, Artificial Sequence
  Description of Artificial Sequence: Synthetic oligonucleotide
ccaggcuaugaaccggcac

SEQ ID NO: 2185025 - RNA, 19 nt, Artificial Sequence
  Description of Artificial Sequence: Synthetic oligonucleotide
ccccaaagcccgagggucc

SEQ ID NO: 2185026 - RNA, 19 nt, Artificial Sequence
  Description of Artificial Sequence: Synthetic oligonucleotide
cgccggaagaggccgagcg

SEQ ID NO: 2185027 - RNA, 19 nt, Artificial Sequence
  Description of Artificial Sequence: Synthetic oligonucleotide
aucgcucugaagggccccu

SEQ ID NO: 2185028 - RNA, 19 nt, Artificial Sequence
  Description of Artificial Sequence: Synthetic oligonucleotide
ggcaccggccaacuugaca

SEQ ID NO: 2185029 - RNA, 19 nt, Artificial Sequence
  Description of Artificial Sequence: Synthetic oligonucleotide
cccaugaagucgguucacc

SEQ ID NO: 2185030 - RNA, 19 nt, Artificial Sequence
  Description of Artificial Sequence: Synthetic oligonucleotide
gagcggcauggcgagccgc

SEQ ID NO: 2185031 - RNA, 19 nt, Artificial Sequence
  Description of Artificial Sequence: Synthetic oligonucleotide
ggcguaagguggggaaaag

SEQ ID NO: 2185032 - RNA, 19 nt, Artificial Sequence
  Description of Artificial Sequence: Synthetic oligonucleotide
ccagcucgggacguugacg

SEQ ID NO: 2185033 - RNA, 19 nt, Artificial Sequence
  Description of Artificial Sequence: Synthetic oligonucleotide
cgacuccgaggccaggucg

SEQ ID NO: 2185034 - RNA, 19 nt, Artificial Sequence
  Description of Artificial Sequence: Synthetic oligonucleotide
ccgcacccaguucagcccg

SEQ ID NO: 2185035 - RNA, 19 nt, Artificial Sequence
  Description of Artificial Sequence: Synthetic oligonucleotide
ccaucgcucugaagggccc

SEQ ID NO: 2185036 - RNA, 19 nt, Artificial Sequence
  Description of Artificial Sequence: Synthetic oligonucleotide
cuggggccaggagcaaaag

SEQ ID NO: 2185037 - RNA, 19 nt, Artificial Sequence
  Description of Artificial Sequence: Synthetic oligonucleotide
agcagggcgccaggaggag

SEQ ID NO: 2185038 - RNA, 19 nt, Artificial Sequence
  Description of Artificial Sequence: Synthetic oligonucleotide
aggucggggcggugcuguc

SEQ ID NO: 2185039 - RNA, 19 nt, Artificial Sequence
  Description of Artificial Sequence: Synthetic oligonucleotide
gccguacacaccaggacga

SEQ ID NO: 2185040 - RNA, 19 nt, Artificial Sequence
  Description of Artificial Sequence: Synthetic oligonucleotide
caggaaugccuggggccag

SEQ ID NO: 2185041 - RNA, 19 nt, Artificial Sequence
  Description of Artificial Sequence: Synthetic oligonucleotide
gguccgaagaggguccaga

SEQ ID NO: 2185042 - RNA, 19 nt, Artificial Sequence
  Description of Artificial Sequence: Synthetic oligonucleotide
cggauggcgccccaagacc

SEQ ID NO: 2185043 - RNA, 19 nt, Artificial Sequence
  Description of Artificial Sequence: Synthetic oligonucleotide
gugugccgccgacuccgag

SEQ ID NO: 2185044 - RNA, 19 nt, Artificial Sequence
  Description of Artificial Sequence: Synthetic oligonucleotide
ccucgccuggcacuuacuc

SEQ ID NO: 2185045 - RNA, 19 nt, Artificial Sequence
  Description of Artificial Sequence: Synthetic oligonucleotide
gucgguucaccagcuucca

SEQ ID NO: 2185046 - RNA, 19 nt, Artificial Sequence
  Description of Artificial Sequence: Synthetic oligonucleotide
ggcuccgggacaguauuuc

SEQ ID NO: 2185047 - RNA, 19 nt, Artificial Sequence
  Description of Artificial Sequence: Synthetic oligonucleotide
ccauaacagcaccugucca

SEQ ID NO: 2185048 - RNA, 19 nt, Artificial Sequence
  Description of Artificial Sequence: Synthetic oligonucleotide
cucugacaccagcucggga

SEQ ID NO: 2185049 - RNA, 19 nt, Artificial Sequence
  Description of Artificial Sequence: Synthetic oligonucleotide
ggcagggacgccaggggac

SEQ ID NO: 2185050 - RNA, 19 nt, Artificial Sequence
  Description of Artificial Sequence: Synthetic oligonucleotide
ggcgccaggaggaggcgcc

SEQ ID NO: 2185051 - RNA, 19 nt, Artificial Sequence
  Description of Artificial Sequence: Synthetic oligonucleotide
uggcaccggccaacuugac

SEQ ID NO: 2185052 - RNA, 19 nt, Artificial Sequence
  Description of Artificial Sequence: Synthetic oligonucleotide
cugaggcguaaggugggga

SEQ ID NO: 2185053 - RNA, 19 nt, Artificial Sequence
  Description of Artificial Sequence: Synthetic oligonucleotide
agcccgcugagggucuuga

SEQ ID NO: 2185054 - RNA, 19 nt, Artificial Sequence
  Description of Artificial Sequence: Synthetic oligonucleotide
ggaggcgccggaagaggcc

SEQ ID NO: 2185055 - RNA, 19 nt, Artificial Sequence
  Description of Artificial Sequence: Synthetic oligonucleotide
caccagcucgggacguuga

SEQ ID NO: 2185056 - RNA, 19 nt, Artificial Sequence
  Description of Artificial Sequence: Synthetic oligonucleotide
acgccaggggacaggcuca

SEQ ID NO: 2185057 - RNA, 19 nt, Artificial Sequence
  Description of Artificial Sequence: Synthetic oligonucleotide
ccggauggcgcgccucugg

SEQ ID NO: 2185058 - RNA, 19 nt, Artificial Sequence
  Description of Artificial Sequence: Synthetic oligonucleotide
gcccgaggguccgaagagg

SEQ ID NO: 2185059 - RNA, 19 nt, Artificial Sequence
  Description of Artificial Sequence: Synthetic oligonucleotide
caccggccaacuugacaca

SEQ ID NO: 2185060 - RNA, 19 nt, Artificial Sequence
  Description of Artificial Sequence: Synthetic oligonucleotide
cagcacguagccugugccu

SEQ ID NO: 2185061 - RNA, 19 nt, Artificial Sequence
  Description of Artificial Sequence: Synthetic oligonucleotide
ggguagugaguggcaccgg

SEQ ID NO: 2185062 - RNA, 19 nt, Artificial Sequence
  Description of Artificial Sequence: Synthetic oligonucleotide
cgaggguccgaagaggguc

SEQ ID NO: 2185063 - RNA, 19 nt, Artificial Sequence
  Description of Artificial Sequence: Synthetic oligonucleotide
agcucgggacguugacgua

SEQ ID NO: 2185064 - RNA, 19 nt, Artificial Sequence
  Description of Artificial Sequence: Synthetic oligonucleotide
ugccgccgacuccgaggcc

SEQ ID NO: 2185065 - RNA, 19 nt, Artificial Sequence
  Description of Artificial Sequence: Synthetic oligonucleotide
cccaaagcccgaggguccg

SEQ ID NO: 2185066 - RNA, 19 nt, Artificial Sequence
  Description of Artificial Sequence: Synthetic oligonucleotide
gaagucgguucaccagcuu

SEQ ID NO: 2185067 - RNA, 19 nt, Artificial Sequence
  Description of Artificial Sequence: Synthetic oligonucleotide
aggguccgaagagggucca

SEQ ID NO: 2185068 - RNA, 19 nt, Artificial Sequence
  Description of Artificial Sequence: Synthetic oligonucleotide
ggggccguacacaccagga

SEQ ID NO: 2185069 - RNA, 19 nt, Artificial Sequence
  Description of Artificial Sequence: Synthetic oligonucleotide
cccggugaggcuggggcgg

SEQ ID NO: 2185070 - RNA, 19 nt, Artificial Sequence
  Description of Artificial Sequence: Synthetic oligonucleotide
ccugaggcguaaggugggg

SEQ ID NO: 2185071 - RNA, 19 nt, Artificial Sequence
  Description of Artificial Sequence: Synthetic oligonucleotide
cgggacguugacguacacg

SEQ ID NO: 2185072 - RNA, 19 nt, Artificial Sequence
  Description of Artificial Sequence: Synthetic oligonucleotide
cguacacaccaggacgagc

SEQ ID NO: 2185073 - RNA, 19 nt, Artificial Sequence
  Description of Artificial Sequence: Synthetic oligonucleotide
ccaguucagcccgcugagg

SEQ ID NO: 2185074 - RNA, 19 nt, Artificial Sequence
  Description of Artificial Sequence: Synthetic oligonucleotide
caaagcccgaggguccgaa

SEQ ID NO: 2185075 - RNA, 19 nt, Artificial Sequence
  Description of Artificial Sequence: Synthetic oligonucleotide
cuucugccaucgcucugaa

SEQ ID NO: 2185076 - RNA, 19 nt, Artificial Sequence
  Description of Artificial Sequence: Synthetic oligonucleotide
ccaacuugacacagugugu

SEQ ID NO: 2185077 - RNA, 19 nt, Artificial Sequence
  Description of Artificial Sequence: Synthetic oligonucleotide
cagggacgccaggggacag

SEQ ID NO: 2185078 - RNA, 19 nt, Artificial Sequence
  Description of Artificial Sequence: Synthetic oligonucleotide
cuccccaaagcccgagggu

SEQ ID NO: 2185079 - RNA, 19 nt, Artificial Sequence
  Description of Artificial Sequence: Synthetic oligonucleotide
ccggcaccucaagacaccc

SEQ ID NO: 2185080 - RNA, 19 nt, Artificial Sequence
  Description of Artificial Sequence: Synthetic oligonucleotide
caguucgcccuucugccau

SEQ ID NO: 2185081 - RNA, 19 nt, Artificial Sequence
  Description of Artificial Sequence: Synthetic oligonucleotide
ggucggggcggugcugucc

SEQ ID NO: 2185082 - RNA, 19 nt, Artificial Sequence
  Description of Artificial Sequence: Synthetic oligonucleotide
gguugcgguaggaguccug

SEQ ID NO: 2185083 - RNA, 19 nt, Artificial Sequence
  Description of Artificial Sequence: Synthetic oligonucleotide
ucgcucugaagggccccuc

SEQ ID NO: 2185084 - RNA, 19 nt, Artificial Sequence
  Description of Artificial Sequence: Synthetic oligonucleotide
gcacguagccugugccuga

SEQ ID NO: 2185085 - RNA, 19 nt, Artificial Sequence
  Description of Artificial Sequence: Synthetic oligonucleotide
gccgccgacuccgaggcca

SEQ ID NO: 2185086 - RNA, 19 nt, Artificial Sequence
  Description of Artificial Sequence: Synthetic oligonucleotide
acacgucgucguccgucuu

SEQ ID NO: 2185087 - RNA, 19 nt, Artificial Sequence
  Description of Artificial Sequence: Synthetic oligonucleotide
ggacguugacguacacguc

SEQ ID NO: 2185088 - RNA, 19 nt, Artificial Sequence
  Description of Artificial Sequence: Synthetic oligonucleotide
accgggcuccgggacagua

SEQ ID NO: 2185089 - RNA, 19 nt, Artificial Sequence
  Description of Artificial Sequence: Synthetic oligonucleotide
gcagggacgccaggggaca

SEQ ID NO: 2185090 - RNA, 19 nt, Artificial Sequence
  Description of Artificial Sequence: Synthetic oligonucleotide
ggcgccggaagaggccgag

SEQ ID NO: 2185091 - RNA, 19 nt, Artificial Sequence
  Description of Artificial Sequence: Synthetic oligonucleotide
ccaggggcggccccgguga

SEQ ID NO: 2185092 - RNA, 19 nt, Artificial Sequence
  Description of Artificial Sequence: Synthetic oligonucleotide
gcccgcugagggucuugag

SEQ ID NO: 2185093 - RNA, 19 nt, Artificial Sequence
  Description of Artificial Sequence: Synthetic oligonucleotide
cggggccguacacaccagg

SEQ ID NO: 2185094 - RNA, 19 nt, Artificial Sequence
  Description of Artificial Sequence: Synthetic oligonucleotide
ggugcacugcagaggcgga

SEQ ID NO: 2185095 - RNA, 19 nt, Artificial Sequence
  Description of Artificial Sequence: Synthetic oligonucleotide
ccguacacaccaggacgag

SEQ ID NO: 2185096 - RNA, 19 nt, Artificial Sequence
  Description of Artificial Sequence: Synthetic oligonucleotide
gccuggcacuuacucccac

SEQ ID NO: 2185097 - RNA, 19 nt, Artificial Sequence
  Description of Artificial Sequence: Synthetic oligonucleotide
ggggugcccggcuggccac

SEQ ID NO: 2185098 - RNA, 19 nt, Artificial Sequence
  Description of Artificial Sequence: Synthetic oligonucleotide
ggaagagcgucugcacccu

SEQ ID NO: 2185099 - RNA, 19 nt, Artificial Sequence
  Description of Artificial Sequence: Synthetic oligonucleotide
ggcuaugaaccggcaccuc

SEQ ID NO: 2185100 - RNA, 19 nt, Artificial Sequence
  Description of Artificial Sequence: Synthetic oligonucleotide
ccgggacaguauuuccgca

SEQ ID NO: 2185101 - RNA, 19 nt, Artificial Sequence
  Description of Artificial Sequence: Synthetic oligonucleotide
ggguccgaagaggguccag

SEQ ID NO: 2185102 - RNA, 19 nt, Artificial Sequence
  Description of Artificial Sequence: Synthetic oligonucleotide
cgaucaccagcagcagggc

SEQ ID NO: 2185103 - RNA, 19 nt, Artificial Sequence
  Description of Artificial Sequence: Synthetic oligonucleotide
ccccucgccuggcacuuac

SEQ ID NO: 2185104 - RNA, 19 nt, Artificial Sequence
  Description of Artificial Sequence: Synthetic oligonucleotide
cgcgccucuggcucaggug

SEQ ID NO: 2185105 - RNA, 19 nt, Artificial Sequence
  Description of Artificial Sequence: Synthetic oligonucleotide
ccccaugaagucgguucac

SEQ ID NO: 2185106 - RNA, 19 nt, Artificial Sequence
  Description of Artificial Sequence: Synthetic oligonucleotide
cgucugcacccugaacccc

SEQ ID NO: 2185107 - RNA, 19 nt, Artificial Sequence
  Description of Artificial Sequence: Synthetic oligonucleotide
caggucggggcggugcugu

SEQ ID NO: 2185108 - RNA, 19 nt, Artificial Sequence
  Description of Artificial Sequence: Synthetic oligonucleotide
cgagcggcauggcgagccg

SEQ ID NO: 2185109 - RNA, 19 nt, Artificial Sequence
  Description of Artificial Sequence: Synthetic oligonucleotide
ccggcuggccaccuucaga

SEQ ID NO: 2185110 - RNA, 19 nt, Artificial Sequence
  Description of Artificial Sequence: Synthetic oligonucleotide
cagcccgcugagggucuug

SEQ ID NO: 2185111 - RNA, 19 nt, Artificial Sequence
  Description of Artificial Sequence: Synthetic oligonucleotide
gggugagguugcgguagga

SEQ ID NO: 2185112 - RNA, 19 nt, Artificial Sequence
  Description of Artificial Sequence: Synthetic oligonucleotide
cguugacguacacgucguc

SEQ ID NO: 2185113 - RNA, 19 nt, Artificial Sequence
  Description of Artificial Sequence: Synthetic oligonucleotide
gugcugucccguggguucu

SEQ ID NO: 2185114 - RNA, 19 nt, Artificial Sequence
  Description of Artificial Sequence: Synthetic oligonucleotide
ccugugccugaggcguaag

SEQ ID NO: 2185115 - RNA, 19 nt, Artificial Sequence
  Description of Artificial Sequence: Synthetic oligonucleotide
gacaccagcucgggacguu

SEQ ID NO: 2185116 - RNA, 19 nt, Artificial Sequence
  Description of Artificial Sequence: Synthetic oligonucleotide
cccguggguucucccagga

SEQ ID NO: 2185117 - RNA, 19 nt, Artificial Sequence
  Description of Artificial Sequence: Synthetic oligonucleotide
ggccaacuugacacagugu

SEQ ID NO: 2185118 - RNA, 19 nt, Artificial Sequence
  Description of Artificial Sequence: Synthetic oligonucleotide
gccaggcuaugaaccggca

SEQ ID NO: 2185119 - RNA, 19 nt, Artificial Sequence
  Description of Artificial Sequence: Synthetic oligonucleotide
gaguggcaccggccaacuu

SEQ ID NO: 2185120 - RNA, 19 nt, Artificial Sequence
  Description of Artificial Sequence: Synthetic oligonucleotide
ggccccggugaggcugggg

SEQ ID NO: 2185121 - RNA, 19 nt, Artificial Sequence
  Description of Artificial Sequence: Synthetic oligonucleotide
aggcgccggaagaggccga

SEQ ID NO: 2185122 - RNA, 19 nt, Artificial Sequence
  Description of Artificial Sequence: Synthetic oligonucleotide
cucgcggauggcgccccaa

SEQ ID NO: 2185123 - RNA, 19 nt, Artificial Sequence
  Description of Artificial Sequence: Synthetic oligonucleotide
cgcacccaguucagcccgc

SEQ ID NO: 2185124 - RNA, 19 nt, Artificial Sequence
  Description of Artificial Sequence: Synthetic oligonucleotide
gggccccucucuggaucag

SEQ ID NO: 2185125 - RNA, 19 nt, Artificial Sequence
  Description of Artificial Sequence: Synthetic oligonucleotide
gccucgcggauggcgcccc

SEQ ID NO: 2185126 - RNA, 19 nt, Artificial Sequence
  Description of Artificial Sequence: Synthetic oligonucleotide
gcgccggaagaggccgagc

SEQ ID NO: 2185127 - RNA, 19 nt, Artificial Sequence
  Description of Artificial Sequence: Synthetic oligonucleotide
gccugugccugaggcguaa

SEQ ID NO: 2185128 - RNA, 19 nt, Artificial Sequence
  Description of Artificial Sequence: Synthetic oligonucleotide
ggcgcgccucuggcucagg

SEQ ID NO: 2185129 - RNA, 19 nt, Artificial Sequence
  Description of Artificial Sequence: Synthetic oligonucleotide
gccgagcggcauggcgagc

SEQ ID NO: 2185130 - RNA, 19 nt, Artificial Sequence
  Description of Artificial Sequence: Synthetic oligonucleotide
ccgaggguccgaagagggu

SEQ ID NO: 2185131 - RNA, 19 nt, Artificial Sequence
  Description of Artificial Sequence: Synthetic oligonucleotide
ccggccaacuugacacagu

SEQ ID NO: 2185132 - RNA, 19 nt, Artificial Sequence
  Description of Artificial Sequence: Synthetic oligonucleotide
cccggauggcgcgccucug

SEQ ID NO: 2185133 - RNA, 19 nt, Artificial Sequence
  Description of Artificial Sequence: Synthetic oligonucleotide
ccaaagcccgaggguccga

SEQ ID NO: 2185134 - RNA, 19 nt, Artificial Sequence
  Description of Artificial Sequence: Synthetic oligonucleotide
cggacagcacguagccugu

SEQ ID NO: 2185135 - RNA, 19 nt, Artificial Sequence
  Description of Artificial Sequence: Synthetic oligonucleotide
cgcucugaagggccccucu

SEQ ID NO: 2185136 - RNA, 19 nt, Artificial Sequence
  Description of Artificial Sequence: Synthetic oligonucleotide
ggacgccaggggacaggcu

SEQ ID NO: 2185137 - RNA, 19 nt, Artificial Sequence
  Description of Artificial Sequence: Synthetic oligonucleotide
ccccggauggcgcgccucu

SEQ ID NO: 2185138 - RNA, 19 nt, Artificial Sequence
  Description of Artificial Sequence: Synthetic oligonucleotide
gggcuccgggacaguauuu

SEQ ID NO: 2185139 - RNA, 19 nt, Artificial Sequence
  Description of Artificial Sequence: Synthetic oligonucleotide
cgggcuccgggacaguauu

SEQ ID NO: 2185140 - RNA, 19 nt, Artificial Sequence
  Description of Artificial Sequence: Synthetic oligonucleotide
cccucgccuggcacuuacu

SEQ ID NO: 2185141 - RNA, 19 nt, Artificial Sequence
  Description of Artificial Sequence: Synthetic oligonucleotide
ccucgcggauggcgcccca

SEQ ID NO: 2185142 - RNA, 19 nt, Artificial Sequence
  Description of Artificial Sequence: Synthetic oligonucleotide
cguacacgucgucguccgu

SEQ ID NO: 2185143 - RNA, 19 nt, Artificial Sequence
  Description of Artificial Sequence: Synthetic oligonucleotide
cggcgccgccgcaggccug

SEQ ID NO: 2185144 - RNA, 19 nt, Artificial Sequence
  Description of Artificial Sequence: Synthetic oligonucleotide
cguccgucuugaggaugua

SEQ ID NO: 2185145 - RNA, 19 nt, Artificial Sequence
  Description of Artificial Sequence: Synthetic oligonucleotide
aauuuuauaauaaauacug

SEQ ID NO: 2185146 - RNA, 19 nt, Artificial Sequence
  Description of Artificial Sequence: Synthetic oligonucleotide
aguacuuggacauuuaggc

SEQ ID NO: 2185147 - RNA, 19 nt, Artificial Sequence
  Description of Artificial Sequence: Synthetic oligonucleotide
aaauuucuaaacuaggacu

SEQ ID NO: 2185148 - RNA, 19 nt, Artificial Sequence
  Description of Artificial Sequence: Synthetic oligonucleotide
aaauaauauauauacucug

SEQ ID NO: 2185149 - RNA, 19 nt, Artificial Sequence
  Description of Artificial Sequence: Synthetic oligonucleotide
uggacauuuaggcugaugg

SEQ ID NO: 2185150 - RNA, 19 nt, Artificial Sequence
  Description of Artificial Sequence: Synthetic oligonucleotide
aagacuguggcguggaccc

SEQ ID NO: 2185151 - RNA, 19 nt, Artificial Sequence
  Description of Artificial Sequence: Synthetic oligonucleotide
uguaaugauaucuggaucu

SEQ ID NO: 2185152 - RNA, 19 nt, Artificial Sequence
  Description of Artificial Sequence: Synthetic oligonucleotide
aauuucuaaacuaggacuc

SEQ ID NO: 2185153 - RNA, 19 nt, Artificial Sequence
  Description of Artificial Sequence: Synthetic oligonucleotide
aauugaguugaaaucauuc

SEQ ID NO: 2185154 - RNA, 19 nt, Artificial Sequence
  Description of Artificial Sequence: Synthetic oligonucleotide
aaaguaaggaacaacucuc

SEQ ID NO: 2185155 - RNA, 19 nt, Artificial Sequence
  Description of Artificial Sequence: Synthetic oligonucleotide
ugauuuucuuucuugauca

SEQ ID NO: 2185156 - RNA, 19 nt, Artificial Sequence
  Description of Artificial Sequence: Synthetic oligonucleotide
aaaauaauauauauacucu

SEQ ID NO: 2185157 - RNA, 19 nt, Artificial Sequence
  Description of Artificial Sequence: Synthetic oligonucleotide
uucaaauuuggucagugcu

SEQ ID NO: 2185158 - RNA, 19 nt, Artificial Sequence
  Description of Artificial Sequence: Synthetic oligonucleotide
uuguauuaaauuucuaaac

SEQ ID NO: 2185159 - RNA, 19 nt, Artificial Sequence
  Description of Artificial Sequence: Synthetic oligonucleotide
uuuccuaacggcuugguga

SEQ ID NO: 2185160 - RNA, 19 nt, Artificial Sequence
  Description of Artificial Sequence: Synthetic oligonucleotide
aaugauaucuggaucuuuc

SEQ ID NO: 2185161 - RNA, 19 nt, Artificial Sequence
  Description of Artificial Sequence: Synthetic oligonucleotide
uguauugaaacuuuguauu

SEQ ID NO: 2185162 - RNA, 19 nt, Artificial Sequence
  Description of Artificial Sequence: Synthetic oligonucleotide
aucuggaucuuuccgaagc

SEQ ID NO: 2185163 - RNA, 19 nt, Artificial Sequence
  Description of Artificial Sequence: Synthetic oligonucleotide
uaauauauauacucugugu

SEQ ID NO: 2185164 - RNA, 19 nt, Artificial Sequence
  Description of Artificial Sequence: Synthetic oligonucleotide
aguugaaaucauucugugc

SEQ ID NO: 2185165 - RNA, 19 nt, Artificial Sequence
  Description of Artificial Sequence: Synthetic oligonucleotide
cucauugauuuucagaagc

SEQ ID NO: 2185166 - RNA, 19 nt, Artificial Sequence
  Description of Artificial Sequence: Synthetic oligonucleotide
ugugguaugucacuauuug

SEQ ID NO: 2185167 - RNA, 19 nt, Artificial Sequence
  Description of Artificial Sequence: Synthetic oligonucleotide
ugaguugaaaucauucugu

SEQ ID NO: 2185168 - RNA, 19 nt, Artificial Sequence
  Description of Artificial Sequence: Synthetic oligonucleotide
auuaaagcuuucuuccuuc

SEQ ID NO: 2185169 - RNA, 19 nt, Artificial Sequence
  Description of Artificial Sequence: Synthetic oligonucleotide
uacuuggacauuuaggcug

SEQ ID NO: 2185170 - RNA, 19 nt, Artificial Sequence
  Description of Artificial Sequence: Synthetic oligonucleotide
uguaaccucuucaaugucc

SEQ ID NO: 2185171 - RNA, 19 nt, Artificial Sequence
  Description of Artificial Sequence: Synthetic oligonucleotide
agagucaacagcugucacc

SEQ ID NO: 2185172 - RNA, 19 nt, Artificial Sequence
  Description of Artificial Sequence: Synthetic oligonucleotide
ucuugguucauuucaaaac

SEQ ID NO: 2185173 - RNA, 19 nt, Artificial Sequence
  Description of Artificial Sequence: Synthetic oligonucleotide
aaaucauucugugcugggc

SEQ ID NO: 2185174 - RNA, 19 nt, Artificial Sequence
  Description of Artificial Sequence: Synthetic oligonucleotide
uaauaaggccauuuuacca

SEQ ID NO: 2185175 - RNA, 19 nt, Artificial Sequence
  Description of Artificial Sequence: Synthetic oligonucleotide
cuaauaaggccauuuuacc

SEQ ID NO: 2185176 - RNA, 19 nt, Artificial Sequence
  Description of Artificial Sequence: Synthetic oligonucleotide
uugauuuucagaagccuug

SEQ ID NO: 2185177 - RNA, 19 nt, Artificial Sequence
  Description of Artificial Sequence: Synthetic oligonucleotide
cuccugacgaaacugaagg

SEQ ID NO: 2185178 - RNA, 19 nt, Artificial Sequence
  Description of Artificial Sequence: Synthetic oligonucleotide
uucuaaacuaggacucugg

SEQ ID NO: 2185179 - RNA, 19 nt, Artificial Sequence
  Description of Artificial Sequence: Synthetic oligonucleotide
agcucauugauuuucagaa

SEQ ID NO: 2185180 - RNA, 19 nt, Artificial Sequence
  Description of Artificial Sequence: Synthetic oligonucleotide
augacucccuaauaaggcc

SEQ ID NO: 2185181 - RNA, 19 nt, Artificial Sequence
  Description of Artificial Sequence: Synthetic oligonucleotide
gaguguaaccucuucaaug

SEQ ID NO: 2185182 - RNA, 19 nt, Artificial Sequence
  Description of Artificial Sequence: Synthetic oligonucleotide
gagucaacagcugucaccg

SEQ ID NO: 2185183 - RNA, 19 nt, Artificial Sequence
  Description of Artificial Sequence: Synthetic oligonucleotide
ucauugauuuucagaagcc

SEQ ID NO: 2185184 - RNA, 19 nt, Artificial Sequence
  Description of Artificial Sequence: Synthetic oligonucleotide
uguguauugaaacuuugua

SEQ ID NO: 2185185 - RNA, 19 nt, Artificial Sequence
  Description of Artificial Sequence: Synthetic oligonucleotide
ucacuauuuguuuaauugu

SEQ ID NO: 2185186 - RNA, 19 nt, Artificial Sequence
  Description of Artificial Sequence: Synthetic oligonucleotide
guugaaaucauucugugcu

SEQ ID NO: 2185187 - RNA, 19 nt, Artificial Sequence
  Description of Artificial Sequence: Synthetic oligonucleotide
acgggugaugaauagacag

SEQ ID NO: 2185188 - RNA, 19 nt, Artificial Sequence
  Description of Artificial Sequence: Synthetic oligonucleotide
uauauauacucugugugcu

SEQ ID NO: 2185189 - RNA, 19 nt, Artificial Sequence
  Description of Artificial Sequence: Synthetic oligonucleotide
ucggcuucccuuuugcugg

SEQ ID NO: 2185190 - RNA, 19 nt, Artificial Sequence
  Description of Artificial Sequence: Synthetic oligonucleotide
uggacccaaagucagacga

SEQ ID NO: 2185191 - RNA, 19 nt, Artificial Sequence
  Description of Artificial Sequence: Synthetic oligonucleotide
agggcuaacuuuccuaacg

SEQ ID NO: 2185192 - RNA, 19 nt, Artificial Sequence
  Description of Artificial Sequence: Synthetic oligonucleotide
uuugggaucgaaauccuau

SEQ ID NO: 2185193 - RNA, 19 nt, Artificial Sequence
  Description of Artificial Sequence: Synthetic oligonucleotide
ucugaguguaaccucuuca

SEQ ID NO: 2185194 - RNA, 19 nt, Artificial Sequence
  Description of Artificial Sequence: Synthetic oligonucleotide
cauaauugaguugaaauca

SEQ ID NO: 2185195 - RNA, 19 nt, Artificial Sequence
  Description of Artificial Sequence: Synthetic oligonucleotide
auuguugaaaaugaccucu

SEQ ID NO: 2185196 - RNA, 19 nt, Artificial Sequence
  Description of Artificial Sequence: Synthetic oligonucleotide
ugaaaucauucugugcugg

SEQ ID NO: 2185197 - RNA, 19 nt, Artificial Sequence
  Description of Artificial Sequence: Synthetic oligonucleotide
aucgaaauccuauucggcu

SEQ ID NO: 2185198 - RNA, 19 nt, Artificial Sequence
  Description of Artificial Sequence: Synthetic oligonucleotide
ucaccgauggcuuauugcu

SEQ ID NO: 2185199 - RNA, 19 nt, Artificial Sequence
  Description of Artificial Sequence: Synthetic oligonucleotide
aauagacagaagacugugg

SEQ ID NO: 2185200 - RNA, 19 nt, Artificial Sequence
  Description of Artificial Sequence: Synthetic oligonucleotide
agccuuguuuucuuugagc

SEQ ID NO: 2185201 - RNA, 19 nt, Artificial Sequence
  Description of Artificial Sequence: Synthetic oligonucleotide
gggauuaaagcuuucuucc

SEQ ID NO: 2185202 - RNA, 19 nt, Artificial Sequence
  Description of Artificial Sequence: Synthetic oligonucleotide
ucaucugaguguaaccucu

SEQ ID NO: 2185203 - RNA, 19 nt, Artificial Sequence
  Description of Artificial Sequence: Synthetic oligonucleotide
augaauagacagaagacug

SEQ ID NO: 2185204 - RNA, 19 nt, Artificial Sequence
  Description of Artificial Sequence: Synthetic oligonucleotide
ucuaaacuaggacucugga

SEQ ID NO: 2185205 - RNA, 19 nt, Artificial Sequence
  Description of Artificial Sequence: Synthetic oligonucleotide
aacuuuguauuaaauuucu

SEQ ID NO: 2185206 - RNA, 19 nt, Artificial Sequence
  Description of Artificial Sequence: Synthetic oligonucleotide
accgauggcuuauugcucg

SEQ ID NO: 2185207 - RNA, 19 nt, Artificial Sequence
  Description of Artificial Sequence: Synthetic oligonucleotide
uauauacucugugugcucc

SEQ ID NO: 2185208 - RNA, 19 nt, Artificial Sequence
  Description of Artificial Sequence: Synthetic oligonucleotide
acagaauccgcuuuguaau

SEQ ID NO: 2185209 - RNA, 19 nt, Artificial Sequence
  Description of Artificial Sequence: Synthetic oligonucleotide
auuuguuuaauugugccau

SEQ ID NO: 2185210 - RNA, 19 nt, Artificial Sequence
  Description of Artificial Sequence: Synthetic oligonucleotide
ugacaagugucuuuuggga

SEQ ID NO: 2185211 - RNA, 19 nt, Artificial Sequence
  Description of Artificial Sequence: Synthetic oligonucleotide
ugguaugucacuauuuguu

SEQ ID NO: 2185212 - RNA, 19 nt, Artificial Sequence
  Description of Artificial Sequence: Synthetic oligonucleotide
aguuccgacacuucguucu

SEQ ID NO: 2185213 - RNA, 19 nt, Artificial Sequence
  Description of Artificial Sequence: Synthetic oligonucleotide
uuugguagugagaccagcu

SEQ ID NO: 2185214 - RNA, 19 nt, Artificial Sequence
  Description of Artificial Sequence: Synthetic oligonucleotide
agcauucuuagcaacgugg

SEQ ID NO: 2185215 - RNA, 19 nt, Artificial Sequence
  Description of Artificial Sequence: Synthetic oligonucleotide
uucuccuuaguacuuggac

SEQ ID NO: 2185216 - RNA, 19 nt, Artificial Sequence
  Description of Artificial Sequence: Synthetic oligonucleotide
cauuuaggcugauggacgg

SEQ ID NO: 2185217 - RNA, 19 nt, Artificial Sequence
  Description of Artificial Sequence: Synthetic oligonucleotide
uuguaaugauaucuggauc

SEQ ID NO: 2185218 - RNA, 19 nt, Artificial Sequence
  Description of Artificial Sequence: Synthetic oligonucleotide
agcaacguggcuuuguggu

SEQ ID NO: 2185219 - RNA, 19 nt, Artificial Sequence
  Description of Artificial Sequence: Synthetic oligonucleotide
gaauagacagaagacugug

SEQ ID NO: 2185220 - RNA, 19 nt, Artificial Sequence
  Description of Artificial Sequence: Synthetic oligonucleotide
aacggcuuggugauacacc

SEQ ID NO: 2185221 - RNA, 19 nt, Artificial Sequence
  Description of Artificial Sequence: Synthetic oligonucleotide
aauccuauucggcuucccu

SEQ ID NO: 2185222 - RNA, 19 nt, Artificial Sequence
  Description of Artificial Sequence: Synthetic oligonucleotide
agcggcucucuguugaggc

SEQ ID NO: 2185223 - RNA, 19 nt, Artificial Sequence
  Description of Artificial Sequence: Synthetic oligonucleotide
uuagcaacguggcuuugug

SEQ ID NO: 2185224 - RNA, 19 nt, Artificial Sequence
  Description of Artificial Sequence: Synthetic oligonucleotide
uggaucuuuccgaagcggc

SEQ ID NO: 2185225 - RNA, 19 nt, Artificial Sequence
  Description of Artificial Sequence: Synthetic oligonucleotide
auauauacucugugugcuc

SEQ ID NO: 2185226 - RNA, 19 nt, Artificial Sequence
  Description of Artificial Sequence: Synthetic oligonucleotide
aaagcauucuuagcaacgu

SEQ ID NO: 2185227 - RNA, 19 nt, Artificial Sequence
  Description of Artificial Sequence: Synthetic oligonucleotide
ggaucgaaauccuauucgg

SEQ ID NO: 2185228 - RNA, 19 nt, Artificial Sequence
  Description of Artificial Sequence: Synthetic oligonucleotide
ucuucuccuuaguacuugg

SEQ ID NO: 2185229 - RNA, 19 nt, Artificial Sequence
  Description of Artificial Sequence: Synthetic oligonucleotide
ucaaauuuggucagugcuu

SEQ ID NO: 2185230 - RNA, 19 nt, Artificial Sequence
  Description of Artificial Sequence: Synthetic oligonucleotide
guauuugguagugagacca

SEQ ID NO: 2185231 - RNA, 19 nt, Artificial Sequence
  Description of Artificial Sequence: Synthetic oligonucleotide
uguugaggcuuugggaucg

SEQ ID NO: 2185232 - RNA, 19 nt, Artificial Sequence
  Description of Artificial Sequence: Synthetic oligonucleotide
uuuuguguauugaaacuuu

SEQ ID NO: 2185233 - RNA, 19 nt, Artificial Sequence
  Description of Artificial Sequence: Synthetic oligonucleotide
aaauuuggucagugcuuuc

SEQ ID NO: 2185234 - RNA, 19 nt, Artificial Sequence
  Description of Artificial Sequence: Synthetic oligonucleotide
uguaguuccgacacuucgu

SEQ ID NO: 2185235 - RNA, 19 nt, Artificial Sequence
  Description of Artificial Sequence: Synthetic oligonucleotide
ugacucccuaauaaggcca

SEQ ID NO: 2185236 - RNA, 19 nt, Artificial Sequence
  Description of Artificial Sequence: Synthetic oligonucleotide
uuagggcuaacuuuccuaa

SEQ ID NO: 2185237 - RNA, 19 nt, Artificial Sequence
  Description of Artificial Sequence: Synthetic oligonucleotide
uccuuccuguauuugguag

SEQ ID NO: 2185238 - RNA, 19 nt, Artificial Sequence
  Description of Artificial Sequence: Synthetic oligonucleotide
uggugauacaccugguggc

SEQ ID NO: 2185239 - RNA, 19 nt, Artificial Sequence
  Description of Artificial Sequence: Synthetic oligonucleotide
uucaccgaggaaaaucuuc

SEQ ID NO: 2185240 - RNA, 19 nt, Artificial Sequence
  Description of Artificial Sequence: Synthetic oligonucleotide
acauuuaggcugauggacg

SEQ ID NO: 2185241 - RNA, 19 nt, Artificial Sequence
  Description of Artificial Sequence: Synthetic oligonucleotide
cuuuguaaugauaucugga

SEQ ID NO: 2185242 - RNA, 19 nt, Artificial Sequence
  Description of Artificial Sequence: Synthetic oligonucleotide
cuguaguuccgacacuucg

SEQ ID NO: 2185243 - RNA, 19 nt, Artificial Sequence
  Description of Artificial Sequence: Synthetic oligonucleotide
ucuccugacgaaacugaag

SEQ ID NO: 2185244 - RNA, 19 nt, Artificial Sequence
  Description of Artificial Sequence: Synthetic oligonucleotide
gauucuucuccuuaguacu

SEQ ID NO: 2185245 - RNA, 19 nt, Artificial Sequence
  Description of Artificial Sequence: Synthetic oligonucleotide
uugguagugagaccagcug

SEQ ID NO: 2185246 - RNA, 19 nt, Artificial Sequence
  Description of Artificial Sequence: Synthetic oligonucleotide
uguauuugguagugagacc

SEQ ID NO: 2185247 - RNA, 19 nt, Artificial Sequence
  Description of Artificial Sequence: Synthetic oligonucleotide
uuuggucagugcuuucucc

SEQ ID NO: 2185248 - RNA, 19 nt, Artificial Sequence
  Description of Artificial Sequence: Synthetic oligonucleotide
uucguucugcagcucauug

SEQ ID NO: 2185249 - RNA, 19 nt, Artificial Sequence
  Description of Artificial Sequence: Synthetic oligonucleotide
uugaaaucauucugugcug

SEQ ID NO: 2185250 - RNA, 19 nt, Artificial Sequence
  Description of Artificial Sequence: Synthetic oligonucleotide
cuucaaauuuggucagugc

SEQ ID NO: 2185251 - RNA, 19 nt, Artificial Sequence
  Description of Artificial Sequence: Synthetic oligonucleotide
uaacuuuccuaacggcuug

SEQ ID NO: 2185252 - RNA, 19 nt, Artificial Sequence
  Description of Artificial Sequence: Synthetic oligonucleotide
uugggauucuucuccuuag

SEQ ID NO: 2185253 - RNA, 19 nt, Artificial Sequence
  Description of Artificial Sequence: Synthetic oligonucleotide
auuugguagugagaccagc

SEQ ID NO: 2185254 - RNA, 19 nt, Artificial Sequence
  Description of Artificial Sequence: Synthetic oligonucleotide
ucaacagcugucaccgaug

SEQ ID NO: 2185255 - RNA, 19 nt, Artificial Sequence
  Description of Artificial Sequence: Synthetic oligonucleotide
auugcucgcgugcuucagc

SEQ ID NO: 2185256 - RNA, 19 nt, Artificial Sequence
  Description of Artificial Sequence: Synthetic oligonucleotide
gaugaauagacagaagacu

SEQ ID NO: 2185257 - RNA, 19 nt, Artificial Sequence
  Description of Artificial Sequence: Synthetic oligonucleotide
uauuugguagugagaccag

SEQ ID NO: 2185258 - RNA, 19 nt, Artificial Sequence
  Description of Artificial Sequence: Synthetic oligonucleotide
gggaucgaaauccuauucg

SEQ ID NO: 2185259 - RNA, 19 nt, Artificial Sequence
  Description of Artificial Sequence: Synthetic oligonucleotide
aagcauucuuagcaacgug

SEQ ID NO: 2185260 - RNA, 19 nt, Artificial Sequence
  Description of Artificial Sequence: Synthetic oligonucleotide
agcugggcuagcuugaccu

SEQ ID NO: 2185261 - RNA, 19 nt, Artificial Sequence
  Description of Artificial Sequence: Synthetic oligonucleotide
uggcuuauugcucgcgugc

SEQ ID NO: 2185262 - RNA, 19 nt, Artificial Sequence
  Description of Artificial Sequence: Synthetic oligonucleotide
uguggcguggacccaaagu

SEQ ID NO: 2185263 - RNA, 19 nt, Artificial Sequence
  Description of Artificial Sequence: Synthetic oligonucleotide
uuugugguaugucacuauu

SEQ ID NO: 2185264 - RNA, 19 nt, Artificial Sequence
  Description of Artificial Sequence: Synthetic oligonucleotide
uugugccauguuuagcugc

SEQ ID NO: 2185265 - RNA, 19 nt, Artificial Sequence
  Description of Artificial Sequence: Synthetic oligonucleotide
aaauccuauucggcuuccc

SEQ ID NO: 2185266 - RNA, 19 nt, Artificial Sequence
  Description of Artificial Sequence: Synthetic oligonucleotide
aguaaggaacaacucuccu

SEQ ID NO: 2185267 - RNA, 19 nt, Artificial Sequence
  Description of Artificial Sequence: Synthetic oligonucleotide
cagacgaauagugagagga

SEQ ID NO: 2185268 - RNA, 19 nt, Artificial Sequence
  Description of Artificial Sequence: Synthetic oligonucleotide
ggcuuggugauacaccugg

SEQ ID NO: 2185269 - RNA, 19 nt, Artificial Sequence
  Description of Artificial Sequence: Synthetic oligonucleotide
cucugugugcuccagucag

SEQ ID NO: 2185270 - RNA, 19 nt, Artificial Sequence
  Description of Artificial Sequence: Synthetic oligonucleotide
uuucuaaacuaggacucug

SEQ ID NO: 2185271 - RNA, 19 nt, Artificial Sequence
  Description of Artificial Sequence: Synthetic oligonucleotide
auagugagaggaauggugu

SEQ ID NO: 2185272 - RNA, 19 nt, Artificial Sequence
  Description of Artificial Sequence: Synthetic oligonucleotide
gaucgaaauccuauucggc

SEQ ID NO: 2185273 - RNA, 19 nt, Artificial Sequence
  Description of Artificial Sequence: Synthetic oligonucleotide
agucaucugaguguaaccu

SEQ ID NO: 2185274 - RNA, 19 nt, Artificial Sequence
  Description of Artificial Sequence: Synthetic oligonucleotide
ucagucaucugaguguaac

SEQ ID NO: 2185275 - RNA, 19 nt, Artificial Sequence
  Description of Artificial Sequence: Synthetic oligonucleotide
gucagacgaauagugagag

SEQ ID NO: 2185276 - RNA, 19 nt, Artificial Sequence
  Description of Artificial Sequence: Synthetic oligonucleotide
ucuuugagcagcugggcua

SEQ ID NO: 2185277 - RNA, 19 nt, Artificial Sequence
  Description of Artificial Sequence: Synthetic oligonucleotide
uuuugcuggguccagccuu

SEQ ID NO: 2185278 - RNA, 19 nt, Artificial Sequence
  Description of Artificial Sequence: Synthetic oligonucleotide
uugaccuguaguuccgaca

SEQ ID NO: 2185279 - RNA, 19 nt, Artificial Sequence
  Description of Artificial Sequence: Synthetic oligonucleotide
ugggaucgaaauccuauuc

SEQ ID NO: 2185280 - RNA, 19 nt, Artificial Sequence
  Description of Artificial Sequence: Synthetic oligonucleotide
acggcuuggugauacaccu

SEQ ID NO: 2185281 - RNA, 19 nt, Artificial Sequence
  Description of Artificial Sequence: Synthetic oligonucleotide
agccuuagggcuaacuuuc

SEQ ID NO: 2185282 - RNA, 19 nt, Artificial Sequence
  Description of Artificial Sequence: Synthetic oligonucleotide
ucagugcuuucuccugacg

SEQ ID NO: 2185283 - RNA, 19 nt, Artificial Sequence
  Description of Artificial Sequence: Synthetic oligonucleotide
cuuggugauacaccuggug

SEQ ID NO: 2185284 - RNA, 19 nt, Artificial Sequence
  Description of Artificial Sequence: Synthetic oligonucleotide
gaagacuguggcguggacc

SEQ ID NO: 2185285 - RNA, 19 nt, Artificial Sequence
  Description of Artificial Sequence: Synthetic oligonucleotide
ugaguguaaccucuucaau

SEQ ID NO: 2185286 - RNA, 19 nt, Artificial Sequence
  Description of Artificial Sequence: Synthetic oligonucleotide
cauuguugaaaaugaccuc

SEQ ID NO: 2185287 - RNA, 19 nt, Artificial Sequence
  Description of Artificial Sequence: Synthetic oligonucleotide
uaauugaguugaaaucauu

SEQ ID NO: 2185288 - RNA, 19 nt, Artificial Sequence
  Description of Artificial Sequence: Synthetic oligonucleotide
guggcguggacccaaaguc

SEQ ID NO: 2185289 - RNA, 19 nt, Artificial Sequence
  Description of Artificial Sequence: Synthetic oligonucleotide
aacuuuccuaacggcuugg

SEQ ID NO: 2185290 - RNA, 19 nt, Artificial Sequence
  Description of Artificial Sequence: Synthetic oligonucleotide
ggcuuugggaucgaaaucc

SEQ ID NO: 2185291 - RNA, 19 nt, Artificial Sequence
  Description of Artificial Sequence: Synthetic oligonucleotide
uuuaggcugauggacgggu

SEQ ID NO: 2185292 - RNA, 19 nt, Artificial Sequence
  Description of Artificial Sequence: Synthetic oligonucleotide
uagcaacguggcuuugugg

SEQ ID NO: 2185293 - RNA, 19 nt, Artificial Sequence
  Description of Artificial Sequence: Synthetic oligonucleotide
uugcucgcgugcuucagcc

SEQ ID NO: 2185294 - RNA, 19 nt, Artificial Sequence
  Description of Artificial Sequence: Synthetic oligonucleotide
gucaccgauggcuuauugc

SEQ ID NO: 2185295 - RNA, 19 nt, Artificial Sequence
  Description of Artificial Sequence: Synthetic oligonucleotide
uggcuuugugguaugucac

SEQ ID NO: 2185296 - RNA, 19 nt, Artificial Sequence
  Description of Artificial Sequence: Synthetic oligonucleotide
uccugacgaaacugaaggc

SEQ ID NO: 2185297 - RNA, 19 nt, Artificial Sequence
  Description of Artificial Sequence: Synthetic oligonucleotide
guauugaaacuuuguauua

SEQ ID NO: 2185298 - RNA, 19 nt, Artificial Sequence
  Description of Artificial Sequence: Synthetic oligonucleotide
ugauacaccugguggccug

SEQ ID NO: 2185299 - RNA, 19 nt, Artificial Sequence
  Description of Artificial Sequence: Synthetic oligonucleotide
aaggccauuuuaccauuaa

SEQ ID NO: 2185300 - RNA, 19 nt, Artificial Sequence
  Description of Artificial Sequence: Synthetic oligonucleotide
uuuccgaagcggcucucug

SEQ ID NO: 2185301 - RNA, 19 nt, Artificial Sequence
  Description of Artificial Sequence: Synthetic oligonucleotide
agugcuuucuccugacgaa

SEQ ID NO: 2185302 - RNA, 19 nt, Artificial Sequence
  Description of Artificial Sequence: Synthetic oligonucleotide
uccuucaccgaggaaaauc

SEQ ID NO: 2185303 - RNA, 19 nt, Artificial Sequence
  Description of Artificial Sequence: Synthetic oligonucleotide
gggcuaacuuuccuaacgg

SEQ ID NO: 2185304 - RNA, 19 nt, Artificial Sequence
  Description of Artificial Sequence: Synthetic oligonucleotide
uggcguggacccaaaguca

SEQ ID NO: 2185305 - RNA, 19 nt, Artificial Sequence
  Description of Artificial Sequence: Synthetic oligonucleotide
uuccuaacggcuuggugau

SEQ ID NO: 2185306 - RNA, 19 nt, Artificial Sequence
  Description of Artificial Sequence: Synthetic oligonucleotide
ugucacuauuuguuuaauu

SEQ ID NO: 2185307 - RNA, 19 nt, Artificial Sequence
  Description of Artificial Sequence: Synthetic oligonucleotide
guguauugaaacuuuguau

SEQ ID NO: 2185308 - RNA, 19 nt, Artificial Sequence
  Description of Artificial Sequence: Synthetic oligonucleotide
acgaauagugagaggaaug

SEQ ID NO: 2185309 - RNA, 19 nt, Artificial Sequence
  Description of Artificial Sequence: Synthetic oligonucleotide
gauuuucagaagccuugca

SEQ ID NO: 2185310 - RNA, 19 nt, Artificial Sequence
  Description of Artificial Sequence: Synthetic oligonucleotide
auggacgggugaugaauag

SEQ ID NO: 2185311 - RNA, 19 nt, Artificial Sequence
  Description of Artificial Sequence: Synthetic oligonucleotide
auggcuuauugcucgcgug

SEQ ID NO: 2185312 - RNA, 19 nt, Artificial Sequence
  Description of Artificial Sequence: Synthetic oligonucleotide
cuaaacuaggacucuggaa

SEQ ID NO: 2185313 - RNA, 19 nt, Artificial Sequence
  Description of Artificial Sequence: Synthetic oligonucleotide
uugugguaugucacuauuu

SEQ ID NO: 2185314 - RNA, 19 nt, Artificial Sequence
  Description of Artificial Sequence: Synthetic oligonucleotide
cuuauugcucgcgugcuuc

SEQ ID NO: 2185315 - RNA, 19 nt, Artificial Sequence
  Description of Artificial Sequence: Synthetic oligonucleotide
ugauggacgggugaugaau

SEQ ID NO: 2185316 - RNA, 19 nt, Artificial Sequence
  Description of Artificial Sequence: Synthetic oligonucleotide
gugagaggaaugguguugc

SEQ ID NO: 2185317 - RNA, 19 nt, Artificial Sequence
  Description of Artificial Sequence: Synthetic oligonucleotide
cuggguccagccuuagggc

SEQ ID NO: 2185318 - RNA, 19 nt, Artificial Sequence
  Description of Artificial Sequence: Synthetic oligonucleotide
ugucaccgauggcuuauug

SEQ ID NO: 2185319 - RNA, 19 nt, Artificial Sequence
  Description of Artificial Sequence: Synthetic oligonucleotide
uccgacacuucguucugca

SEQ ID NO: 2185320 - RNA, 19 nt, Artificial Sequence
  Description of Artificial Sequence: Synthetic oligonucleotide
uucuucuccuuaguacuug

SEQ ID NO: 2185321 - RNA, 19 nt, Artificial Sequence
  Description of Artificial Sequence: Synthetic oligonucleotide
uuauugcucgcgugcuuca

SEQ ID NO: 2185322 - RNA, 19 nt, Artificial Sequence
  Description of Artificial Sequence: Synthetic oligonucleotide
cuuuccuaacggcuuggug

SEQ ID NO: 2185323 - RNA, 19 nt, Artificial Sequence
  Description of Artificial Sequence: Synthetic oligonucleotide
uccuauucggcuucccuuu

SEQ ID NO: 2185324 - RNA, 19 nt, Artificial Sequence
  Description of Artificial Sequence: Synthetic oligonucleotide
gccuuguuuucuuugagca

SEQ ID NO: 2185325 - RNA, 19 nt, Artificial Sequence
  Description of Artificial Sequence: Synthetic oligonucleotide
uggucagugcuuucuccug

SEQ ID NO: 2185326 - RNA, 19 nt, Artificial Sequence
  Description of Artificial Sequence: Synthetic oligonucleotide
gacacuucguucugcagcu

SEQ ID NO: 2185327 - RNA, 19 nt, Artificial Sequence
  Description of Artificial Sequence: Synthetic oligonucleotide
cugaguguaaccucuucaa

SEQ ID NO: 2185328 - RNA, 19 nt, Artificial Sequence
  Description of Artificial Sequence: Synthetic oligonucleotide
ucccuaauaaggccauuuu

SEQ ID NO: 2185329 - RNA, 19 nt, Artificial Sequence
  Description of Artificial Sequence: Synthetic oligonucleotide
cuuccuguauuugguagug

SEQ ID NO: 2185330 - RNA, 19 nt, Artificial Sequence
  Description of Artificial Sequence: Synthetic oligonucleotide
cuggaucuuuccgaagcgg

SEQ ID NO: 2185331 - RNA, 19 nt, Artificial Sequence
  Description of Artificial Sequence: Synthetic oligonucleotide
uucagaagccuugcagaca

SEQ ID NO: 2185332 - RNA, 19 nt, Artificial Sequence
  Description of Artificial Sequence: Synthetic oligonucleotide
auuuaggcugauggacggg

SEQ ID NO: 2185333 - RNA, 19 nt, Artificial Sequence
  Description of Artificial Sequence: Synthetic oligonucleotide
gucaucugaguguaaccuc

SEQ ID NO: 2185334 - RNA, 19 nt, Artificial Sequence
  Description of Artificial Sequence: Synthetic oligonucleotide
aacguggcuuugugguaug

SEQ ID NO: 2185335 - RNA, 19 nt, Artificial Sequence
  Description of Artificial Sequence: Synthetic oligonucleotide
cuugaccuguaguuccgac

SEQ ID NO: 2185336 - RNA, 19 nt, Artificial Sequence
  Description of Artificial Sequence: Synthetic oligonucleotide
uugggaucgaaauccuauu

SEQ ID NO: 2185337 - RNA, 19 nt, Artificial Sequence
  Description of Artificial Sequence: Synthetic oligonucleotide
agucagacgaauagugaga

SEQ ID NO: 2185338 - RNA, 19 nt, Artificial Sequence
  Description of Artificial Sequence: Synthetic oligonucleotide
gaucuuuccgaagcggcuc

SEQ ID NO: 2185339 - RNA, 19 nt, Artificial Sequence
  Description of Artificial Sequence: Synthetic oligonucleotide
guggacccaaagucagacg

SEQ ID NO: 2185340 - RNA, 19 nt, Artificial Sequence
  Description of Artificial Sequence: Synthetic oligonucleotide
auccuauucggcuucccuu

SEQ ID NO: 2185341 - RNA, 19 nt, Artificial Sequence
  Description of Artificial Sequence: Synthetic oligonucleotide
uccgaagcggcucucuguu

SEQ ID NO: 2185342 - RNA, 19 nt, Artificial Sequence
  Description of Artificial Sequence: Synthetic oligonucleotide
uccgcuuuguaaugauauc

SEQ ID NO: 2185343 - RNA, 19 nt, Artificial Sequence
  Description of Artificial Sequence: Synthetic oligonucleotide
uaacggcuuggugauacac

SEQ ID NO: 2185344 - RNA, 19 nt, Artificial Sequence
  Description of Artificial Sequence: Synthetic oligonucleotide
ucugugugcuccagucagu

SEQ ID NO: 2185345 - RNA, 19 nt, Artificial Sequence
  Description of Artificial Sequence: Synthetic oligonucleotide
aagcggcucucuguugagg

SEQ ID NO: 2185346 - RNA, 19 nt, Artificial Sequence
  Description of Artificial Sequence: Synthetic oligonucleotide
cucuggaacauaauugagu

SEQ ID NO: 2185347 - RNA, 19 nt, Artificial Sequence
  Description of Artificial Sequence: Synthetic oligonucleotide
aucuuuccgaagcggcucu

SEQ ID NO: 2185348 - RNA, 19 nt, Artificial Sequence
  Description of Artificial Sequence: Synthetic oligonucleotide
ugugugcuccagucaguca

SEQ ID NO: 2185349 - RNA, 19 nt, Artificial Sequence
  Description of Artificial Sequence: Synthetic oligonucleotide
uucccuuuugcugggucca

SEQ ID NO: 2185350 - RNA, 19 nt, Artificial Sequence
  Description of Artificial Sequence: Synthetic oligonucleotide
ucaaagccuuguuuucuuu

SEQ ID NO: 2185351 - RNA, 19 nt, Artificial Sequence
  Description of Artificial Sequence: Synthetic oligonucleotide
aacuaggacucuggaacau

SEQ ID NO: 2185352 - RNA, 19 nt, Artificial Sequence
  Description of Artificial Sequence: Synthetic oligonucleotide
cagugcuuucuccugacga

SEQ ID NO: 2185353 - RNA, 19 nt, Artificial Sequence
  Description of Artificial Sequence: Synthetic oligonucleotide
ccagucagucaucugagug

SEQ ID NO: 2185354 - RNA, 19 nt, Artificial Sequence
  Description of Artificial Sequence: Synthetic oligonucleotide
ggacgggugaugaauagac

SEQ ID NO: 2185355 - RNA, 19 nt, Artificial Sequence
  Description of Artificial Sequence: Synthetic oligonucleotide
cuguugaggcuuugggauc

SEQ ID NO: 2185356 - RNA, 19 nt, Artificial Sequence
  Description of Artificial Sequence: Synthetic oligonucleotide
ggcuaacuuuccuaacggc

SEQ ID NO: 2185357 - RNA, 19 nt, Artificial Sequence
  Description of Artificial Sequence: Synthetic oligonucleotide
uagggcuaacuuuccuaac

SEQ ID NO: 2185358 - RNA, 19 nt, Artificial Sequence
  Description of Artificial Sequence: Synthetic oligonucleotide
ugugcuccagucagucauc

SEQ ID NO: 2185359 - RNA, 19 nt, Artificial Sequence
  Description of Artificial Sequence: Synthetic oligonucleotide
uauugcucgcgugcuucag

SEQ ID NO: 2185360 - RNA, 19 nt, Artificial Sequence
  Description of Artificial Sequence: Synthetic oligonucleotide
uguugggauuaaagcuuuc

SEQ ID NO: 2185361 - RNA, 19 nt, Artificial Sequence
  Description of Artificial Sequence: Synthetic oligonucleotide
cucucuguugaggcuuugg

SEQ ID NO: 2185362 - RNA, 19 nt, Artificial Sequence
  Description of Artificial Sequence: Synthetic oligonucleotide
uaaugauaucuggaucuuu

SEQ ID NO: 2185363 - RNA, 19 nt, Artificial Sequence
  Description of Artificial Sequence: Synthetic oligonucleotide
ugcucgcgugcuucagccg

SEQ ID NO: 2185364 - RNA, 19 nt, Artificial Sequence
  Description of Artificial Sequence: Synthetic oligonucleotide
cuauucggcuucccuuuug

SEQ ID NO: 2185365 - RNA, 19 nt, Artificial Sequence
  Description of Artificial Sequence: Synthetic oligonucleotide
gcauucuuagcaacguggc

SEQ ID NO: 2185366 - RNA, 19 nt, Artificial Sequence
  Description of Artificial Sequence: Synthetic oligonucleotide
gauggcuuauugcucgcgu

SEQ ID NO: 2185367 - RNA, 19 nt, Artificial Sequence
  Description of Artificial Sequence: Synthetic oligonucleotide
ugguggccugacaaguguc

SEQ ID NO: 2185368 - RNA, 19 nt, Artificial Sequence
  Description of Artificial Sequence: Synthetic oligonucleotide
ggugauacaccugguggcc

SEQ ID NO: 2185369 - RNA, 19 nt, Artificial Sequence
  Description of Artificial Sequence: Synthetic oligonucleotide
uacaccugguggccugaca

SEQ ID NO: 2185370 - RNA, 19 nt, Artificial Sequence
  Description of Artificial Sequence: Synthetic oligonucleotide
agcuugaccuguaguuccg

SEQ ID NO: 2185371 - RNA, 19 nt, Artificial Sequence
  Description of Artificial Sequence: Synthetic oligonucleotide
cuaacuuuccuaacggcuu

SEQ ID NO: 2185372 - RNA, 19 nt, Artificial Sequence
  Description of Artificial Sequence: Synthetic oligonucleotide
ccuuuugcuggguccagcc

SEQ ID NO: 2185373 - RNA, 19 nt, Artificial Sequence
  Description of Artificial Sequence: Synthetic oligonucleotide
cuccuuaguacuuggacau

SEQ ID NO: 2185374 - RNA, 19 nt, Artificial Sequence
  Description of Artificial Sequence: Synthetic oligonucleotide
guacuuggacauuuaggcu

SEQ ID NO: 2185375 - RNA, 19 nt, Artificial Sequence
  Description of Artificial Sequence: Synthetic oligonucleotide
guuccgacacuucguucug

SEQ ID NO: 2185376 - RNA, 19 nt, Artificial Sequence
  Description of Artificial Sequence: Synthetic oligonucleotide
uggcucuuuccccauuguu

SEQ ID NO: 2185377 - RNA, 19 nt, Artificial Sequence
  Description of Artificial Sequence: Synthetic oligonucleotide
uaguuccgacacuucguuc

SEQ ID NO: 2185378 - RNA, 19 nt, Artificial Sequence
  Description of Artificial Sequence: Synthetic oligonucleotide
ggacauuuaggcugaugga

SEQ ID NO: 2185379 - RNA, 19 nt, Artificial Sequence
  Description of Artificial Sequence: Synthetic oligonucleotide
gauggacgggugaugaaua

SEQ ID NO: 2185380 - RNA, 19 nt, Artificial Sequence
  Description of Artificial Sequence: Synthetic oligonucleotide
cagagucaacagcugucac

SEQ ID NO: 2185381 - RNA, 19 nt, Artificial Sequence
  Description of Artificial Sequence: Synthetic oligonucleotide
ggugaugaauagacagaag

SEQ ID NO: 2185382 - RNA, 19 nt, Artificial Sequence
  Description of Artificial Sequence: Synthetic oligonucleotide
cuuaguacuuggacauuua

SEQ ID NO: 2185383 - RNA, 19 nt, Artificial Sequence
  Description of Artificial Sequence: Synthetic oligonucleotide
aauccgcuuuguaaugaua

SEQ ID NO: 2185384 - RNA, 19 nt, Artificial Sequence
  Description of Artificial Sequence: Synthetic oligonucleotide
cgacacuucguucugcagc

SEQ ID NO: 2185385 - RNA, 19 nt, Artificial Sequence
  Description of Artificial Sequence: Synthetic oligonucleotide
cuugaucagcaucuguacu

SEQ ID NO: 2185386 - RNA, 19 nt, Artificial Sequence
  Description of Artificial Sequence: Synthetic oligonucleotide
caccgauggcuuauugcuc

SEQ ID NO: 2185387 - RNA, 19 nt, Artificial Sequence
  Description of Artificial Sequence: Synthetic oligonucleotide
cacuucguucugcagcuca

SEQ ID NO: 2185388 - RNA, 19 nt, Artificial Sequence
  Description of Artificial Sequence: Synthetic oligonucleotide
gacgaauagugagaggaau

SEQ ID NO: 2185389 - RNA, 19 nt, Artificial Sequence
  Description of Artificial Sequence: Synthetic oligonucleotide
cagucagucaucugagugu

SEQ ID NO: 2185390 - RNA, 19 nt, Artificial Sequence
  Description of Artificial Sequence: Synthetic oligonucleotide
gaauagugagaggaauggu

SEQ ID NO: 2185391 - RNA, 19 nt, Artificial Sequence
  Description of Artificial Sequence: Synthetic oligonucleotide
gugguaugucacuauuugu

SEQ ID NO: 2185392 - RNA, 19 nt, Artificial Sequence
  Description of Artificial Sequence: Synthetic oligonucleotide
guguaaccucuucaauguc

SEQ ID NO: 2185393 - RNA, 19 nt, Artificial Sequence
  Description of Artificial Sequence: Synthetic oligonucleotide
cugugugcuccagucaguc

SEQ ID NO: 2185394 - RNA, 19 nt, Artificial Sequence
  Description of Artificial Sequence: Synthetic oligonucleotide
cuucuccuuaguacuugga

SEQ ID NO: 2185395 - RNA, 19 nt, Artificial Sequence
  Description of Artificial Sequence: Synthetic oligonucleotide
ccuugcagacagaauccgc

SEQ ID NO: 2185396 - RNA, 19 nt, Artificial Sequence
  Description of Artificial Sequence: Synthetic oligonucleotide
ccuaacggcuuggugauac

SEQ ID NO: 2185397 - RNA, 19 nt, Artificial Sequence
  Description of Artificial Sequence: Synthetic oligonucleotide
gacgggugaugaauagaca

SEQ ID NO: 2185398 - RNA, 19 nt, Artificial Sequence
  Description of Artificial Sequence: Synthetic oligonucleotide
gaaggcuuuucaaagccuu

SEQ ID NO: 2185399 - RNA, 19 nt, Artificial Sequence
  Description of Artificial Sequence: Synthetic oligonucleotide
ugggcuagcuugaccugua

SEQ ID NO: 2185400 - RNA, 19 nt, Artificial Sequence
  Description of Artificial Sequence: Synthetic oligonucleotide
gcucgcgugcuucagccgc

SEQ ID NO: 2185401 - RNA, 19 nt, Artificial Sequence
  Description of Artificial Sequence: Synthetic oligonucleotide
ggcguggacccaaagucag

SEQ ID NO: 2185402 - RNA, 19 nt, Artificial Sequence
  Description of Artificial Sequence: Synthetic oligonucleotide
uuccgacacuucguucugc

SEQ ID NO: 2185403 - RNA, 19 nt, Artificial Sequence
  Description of Artificial Sequence: Synthetic oligonucleotide
uggccugacaagugucuuu

SEQ ID NO: 2185404 - RNA, 19 nt, Artificial Sequence
  Description of Artificial Sequence: Synthetic oligonucleotide
gaauccgcuuuguaaugau

SEQ ID NO: 2185405 - RNA, 19 nt, Artificial Sequence
  Description of Artificial Sequence: Synthetic oligonucleotide
agacgaauagugagaggaa

SEQ ID NO: 2185406 - RNA, 19 nt, Artificial Sequence
  Description of Artificial Sequence: Synthetic oligonucleotide
ucuuagcaacguggcuuug

SEQ ID NO: 2185407 - RNA, 19 nt, Artificial Sequence
  Description of Artificial Sequence: Synthetic oligonucleotide
gcuaacuuuccuaacggcu

SEQ ID NO: 2185408 - RNA, 19 nt, Artificial Sequence
  Description of Artificial Sequence: Synthetic oligonucleotide
acuuuccuaacggcuuggu

SEQ ID NO: 2185409 - RNA, 19 nt, Artificial Sequence
  Description of Artificial Sequence: Synthetic oligonucleotide
uucuuccuucaccgaggaa

SEQ ID NO: 2185410 - RNA, 19 nt, Artificial Sequence
  Description of Artificial Sequence: Synthetic oligonucleotide
gcuagcuugaccuguaguu

SEQ ID NO: 2185411 - RNA, 19 nt, Artificial Sequence
  Description of Artificial Sequence: Synthetic oligonucleotide
gguaugucacuauuuguuu

SEQ ID NO: 2185412 - RNA, 19 nt, Artificial Sequence
  Description of Artificial Sequence: Synthetic oligonucleotide
cuuugggaucgaaauccua

SEQ ID NO: 2185413 - RNA, 19 nt, Artificial Sequence
  Description of Artificial Sequence: Synthetic oligonucleotide
ggucagugcuuucuccuga

SEQ ID NO: 2185414 - RNA, 19 nt, Artificial Sequence
  Description of Artificial Sequence: Synthetic oligonucleotide
guaguuccgacacuucguu

SEQ ID NO: 2185415 - RNA, 19 nt, Artificial Sequence
  Description of Artificial Sequence: Synthetic oligonucleotide
agugucuuuugggauucuu

SEQ ID NO: 2185416 - RNA, 19 nt, Artificial Sequence
  Description of Artificial Sequence: Synthetic oligonucleotide
gaucagcaucuguacuucu

SEQ ID NO: 2185417 - RNA, 19 nt, Artificial Sequence
  Description of Artificial Sequence: Synthetic oligonucleotide
acuaggacucuggaacaua

SEQ ID NO: 2185418 - RNA, 19 nt, Artificial Sequence
  Description of Artificial Sequence: Synthetic oligonucleotide
gauacaccugguggccuga

SEQ ID NO: 2185419 - RNA, 19 nt, Artificial Sequence
  Description of Artificial Sequence: Synthetic oligonucleotide
gcugauggacgggugauga

SEQ ID NO: 2185420 - RNA, 19 nt, Artificial Sequence
  Description of Artificial Sequence: Synthetic oligonucleotide
cuucagccgcugucuguug

SEQ ID NO: 2185421 - RNA, 19 nt, Artificial Sequence
  Description of Artificial Sequence: Synthetic oligonucleotide
cauucuuagcaacguggcu

SEQ ID NO: 2185422 - RNA, 19 nt, Artificial Sequence
  Description of Artificial Sequence: Synthetic oligonucleotide
ccgaggaaaaucuucaaau

SEQ ID NO: 2185423 - RNA, 19 nt, Artificial Sequence
  Description of Artificial Sequence: Synthetic oligonucleotide
caaauuuggucagugcuuu

SEQ ID NO: 2185424 - RNA, 19 nt, Artificial Sequence
  Description of Artificial Sequence: Synthetic oligonucleotide
caucuguacuucuggcucu

SEQ ID NO: 2185425 - RNA, 19 nt, Artificial Sequence
  Description of Artificial Sequence: Synthetic oligonucleotide
guagugagaccagcuguaa

SEQ ID NO: 2185426 - RNA, 19 nt, Artificial Sequence
  Description of Artificial Sequence: Synthetic oligonucleotide
gacccaaagucagacgaau

SEQ ID NO: 2185427 - RNA, 19 nt, Artificial Sequence
  Description of Artificial Sequence: Synthetic oligonucleotide
cuaacggcuuggugauaca

SEQ ID NO: 2185428 - RNA, 19 nt, Artificial Sequence
  Description of Artificial Sequence: Synthetic oligonucleotide
ccuucaccgaggaaaaucu

SEQ ID NO: 2185429 - RNA, 19 nt, Artificial Sequence
  Description of Artificial Sequence: Synthetic oligonucleotide
gguagugagaccagcugua

SEQ ID NO: 2185430 - RNA, 19 nt, Artificial Sequence
  Description of Artificial Sequence: Synthetic oligonucleotide
ccccauuguugaaaaugac

SEQ ID NO: 2185431 - RNA, 19 nt, Artificial Sequence
  Description of Artificial Sequence: Synthetic oligonucleotide
gugcuuucuccugacgaaa

SEQ ID NO: 2185432 - RNA, 19 nt, Artificial Sequence
  Description of Artificial Sequence: Synthetic oligonucleotide
cuguggcguggacccaaag

SEQ ID NO: 2185433 - RNA, 19 nt, Artificial Sequence
  Description of Artificial Sequence: Synthetic oligonucleotide
agccgcugucuguugggau

SEQ ID NO: 2185434 - RNA, 19 nt, Artificial Sequence
  Description of Artificial Sequence: Synthetic oligonucleotide
uccuuaguacuuggacauu

SEQ ID NO: 2185435 - RNA, 19 nt, Artificial Sequence
  Description of Artificial Sequence: Synthetic oligonucleotide
caccgaggaaaaucuucaa

SEQ ID NO: 2185436 - RNA, 19 nt, Artificial Sequence
  Description of Artificial Sequence: Synthetic oligonucleotide
cagccuuagggcuaacuuu

SEQ ID NO: 2185437 - RNA, 19 nt, Artificial Sequence
  Description of Artificial Sequence: Synthetic oligonucleotide
ucuuuccgaagcggcucuc

SEQ ID NO: 2185438 - RNA, 19 nt, Artificial Sequence
  Description of Artificial Sequence: Synthetic oligonucleotide
cccuaauaaggccauuuua

SEQ ID NO: 2185439 - RNA, 19 nt, Artificial Sequence
  Description of Artificial Sequence: Synthetic oligonucleotide
uugcuggguccagccuuag

SEQ ID NO: 2185440 - RNA, 19 nt, Artificial Sequence
  Description of Artificial Sequence: Synthetic oligonucleotide
cugguggccugacaagugu

SEQ ID NO: 2185441 - RNA, 19 nt, Artificial Sequence
  Description of Artificial Sequence: Synthetic oligonucleotide
ccuguaguuccgacacuuc

SEQ ID NO: 2185442 - RNA, 19 nt, Artificial Sequence
  Description of Artificial Sequence: Synthetic oligonucleotide
cugauggacgggugaugaa

SEQ ID NO: 2185443 - RNA, 19 nt, Artificial Sequence
  Description of Artificial Sequence: Synthetic oligonucleotide
ggcuuugugguaugucacu

SEQ ID NO: 2185444 - RNA, 19 nt, Artificial Sequence
  Description of Artificial Sequence: Synthetic oligonucleotide
ccugacgaaacugaaggcu

SEQ ID NO: 2185445 - RNA, 19 nt, Artificial Sequence
  Description of Artificial Sequence: Synthetic oligonucleotide
ucgcgugcuucagccgcug

SEQ ID NO: 2185446 - RNA, 19 nt, Artificial Sequence
  Description of Artificial Sequence: Synthetic oligonucleotide
ccgacacuucguucugcag

SEQ ID NO: 2185447 - RNA, 19 nt, Artificial Sequence
  Description of Artificial Sequence: Synthetic oligonucleotide
ucuguacuucuggcucuuu

SEQ ID NO: 2185448 - RNA, 19 nt, Artificial Sequence
  Description of Artificial Sequence: Synthetic oligonucleotide
gacucccuaauaaggccau

SEQ ID NO: 2185449 - RNA, 19 nt, Artificial Sequence
  Description of Artificial Sequence: Synthetic oligonucleotide
gcuuucuccugacgaaacu

SEQ ID NO: 2185450 - RNA, 19 nt, Artificial Sequence
  Description of Artificial Sequence: Synthetic oligonucleotide
ccgauggcuuauugcucgc

SEQ ID NO: 2185451 - RNA, 19 nt, Artificial Sequence
  Description of Artificial Sequence: Synthetic oligonucleotide
gaccuguaguuccgacacu

SEQ ID NO: 2185452 - RNA, 19 nt, Artificial Sequence
  Description of Artificial Sequence: Synthetic oligonucleotide
acguggcuuugugguaugu

SEQ ID NO: 2185453 - RNA, 19 nt, Artificial Sequence
  Description of Artificial Sequence: Synthetic oligonucleotide
ggcugauggacgggugaug

SEQ ID NO: 2185454 - RNA, 19 nt, Artificial Sequence
  Description of Artificial Sequence: Synthetic oligonucleotide
gccuuagggcuaacuuucc

SEQ ID NO: 2185455 - RNA, 19 nt, Artificial Sequence
  Description of Artificial Sequence: Synthetic oligonucleotide
gcgugcuucagccgcuguc

SEQ ID NO: 2185456 - RNA, 19 nt, Artificial Sequence
  Description of Artificial Sequence: Synthetic oligonucleotide
ccgcuuuguaaugauaucu

SEQ ID NO: 2185457 - RNA, 19 nt, Artificial Sequence
  Description of Artificial Sequence: Synthetic oligonucleotide
caacguggcuuugugguau

SEQ ID NO: 2185458 - RNA, 19 nt, Artificial Sequence
  Description of Artificial Sequence: Synthetic oligonucleotide
cucccuaauaaggccauuu

SEQ ID NO: 2185459 - RNA, 19 nt, Artificial Sequence
  Description of Artificial Sequence: Synthetic oligonucleotide
ggaucuuuccgaagcggcu

SEQ ID NO: 2185460 - RNA, 19 nt, Artificial Sequence
  Description of Artificial Sequence: Synthetic oligonucleotide
gugauacaccugguggccu

SEQ ID NO: 2185461 - RNA, 19 nt, Artificial Sequence
  Description of Artificial Sequence: Synthetic oligonucleotide
cgaagcggcucucuguuga

SEQ ID NO: 2185462 - RNA, 19 nt, Artificial Sequence
  Description of Artificial Sequence: Synthetic oligonucleotide
gcaacguggcuuuguggua

SEQ ID NO: 2185463 - RNA, 19 nt, Artificial Sequence
  Description of Artificial Sequence: Synthetic oligonucleotide
ccuuccuguauuugguagu

SEQ ID NO: 2185464 - RNA, 19 nt, Artificial Sequence
  Description of Artificial Sequence: Synthetic oligonucleotide
agacuguggcguggaccca

SEQ ID NO: 2185465 - RNA, 19 nt, Artificial Sequence
  Description of Artificial Sequence: Synthetic oligonucleotide
uccuaacggcuuggugaua

SEQ ID NO: 2185466 - RNA, 19 nt, Artificial Sequence
  Description of Artificial Sequence: Synthetic oligonucleotide
cugggcuagcuugaccugu

SEQ ID NO: 2185467 - RNA, 19 nt, Artificial Sequence
  Description of Artificial Sequence: Synthetic oligonucleotide
acucccuaauaaggccauu

SEQ ID NO: 2185468 - RNA, 19 nt, Artificial Sequence
  Description of Artificial Sequence: Synthetic oligonucleotide
guugaggcuuugggaucga

SEQ ID NO: 2185469 - RNA, 19 nt, Artificial Sequence
  Description of Artificial Sequence: Synthetic oligonucleotide
cuuuccgaagcggcucucu

SEQ ID NO: 2185470 - RNA, 19 nt, Artificial Sequence
  Description of Artificial Sequence: Synthetic oligonucleotide
gguggccugacaagugucu

SEQ ID NO: 2185471 - RNA, 19 nt, Artificial Sequence
  Description of Artificial Sequence: Synthetic oligonucleotide
caucugaguguaaccucuu

SEQ ID NO: 2185472 - RNA, 19 nt, Artificial Sequence
  Description of Artificial Sequence: Synthetic oligonucleotide
acuguggcguggacccaaa

SEQ ID NO: 2185473 - RNA, 19 nt, Artificial Sequence
  Description of Artificial Sequence: Synthetic oligonucleotide
ggcuuauugcucgcgugcu

SEQ ID NO: 2185474 - RNA, 19 nt, Artificial Sequence
  Description of Artificial Sequence: Synthetic oligonucleotide
gucagucaucugaguguaa

SEQ ID NO: 2185475 - RNA, 19 nt, Artificial Sequence
  Description of Artificial Sequence: Synthetic oligonucleotide
ccgaagcggcucucuguug

SEQ ID NO: 2185476 - RNA, 19 nt, Artificial Sequence
  Description of Artificial Sequence: Synthetic oligonucleotide
gcuugaccuguaguuccga

SEQ ID NO: 2185477 - RNA, 19 nt, Artificial Sequence
  Description of Artificial Sequence: Synthetic oligonucleotide
cagccgcugucuguuggga

SEQ ID NO: 2185478 - RNA, 19 nt, Artificial Sequence
  Description of Artificial Sequence: Synthetic oligonucleotide
ggcugacauuucuucuccu

SEQ ID NO: 2185479 - RNA, 19 nt, Artificial Sequence
  Description of Artificial Sequence: Synthetic oligonucleotide
gcuuugggaucgaaauccu

SEQ ID NO: 2185480 - RNA, 19 nt, Artificial Sequence
  Description of Artificial Sequence: Synthetic oligonucleotide
cucgcgugcuucagccgcu

SEQ ID NO: 2185481 - RNA, 19 nt, Artificial Sequence
  Description of Artificial Sequence: Synthetic oligonucleotide
gguccagccuuagggcuaa

SEQ ID NO: 2185482 - RNA, 19 nt, Artificial Sequence
  Description of Artificial Sequence: Synthetic oligonucleotide
ccuuaguacuuggacauuu

SEQ ID NO: 2185483 - RNA, 19 nt, Artificial Sequence
  Description of Artificial Sequence: Synthetic oligonucleotide
ggccugacaagugucuuuu

SEQ ID NO: 2185484 - RNA, 19 nt, Artificial Sequence
  Description of Artificial Sequence: Synthetic oligonucleotide
cguggcuuugugguauguc

SEQ ID NO: 2185485 - RNA, 19 nt, Artificial Sequence
  Description of Artificial Sequence: Synthetic oligonucleotide
gcugucuguugggauuaaa

SEQ ID NO: 2185486 - RNA, 19 nt, Artificial Sequence
  Description of Artificial Sequence: Synthetic oligonucleotide
guggccugacaagugucuu

SEQ ID NO: 2185487 - RNA, 19 nt, Artificial Sequence
  Description of Artificial Sequence: Synthetic oligonucleotide
gcugucaccgauggcuuau

SEQ ID NO: 2185488 - RNA, 19 nt, Artificial Sequence
  Description of Artificial Sequence: Synthetic oligonucleotide
ggguccagccuuagggcua

SEQ ID NO: 2185489 - RNA, 19 nt, Artificial Sequence
  Description of Artificial Sequence: Synthetic oligonucleotide
gcuuauugcucgcgugcuu

SEQ ID NO: 2185490 - RNA, 19 nt, Artificial Sequence
  Description of Artificial Sequence: Synthetic oligonucleotide
cuucguucugcagcucauu

SEQ ID NO: 2185491 - RNA, 19 nt, Artificial Sequence
  Description of Artificial Sequence: Synthetic oligonucleotide
gcggcucucuguugaggcu

SEQ ID NO: 2185492 - RNA, 19 nt, Artificial Sequence
  Description of Artificial Sequence: Synthetic oligonucleotide
gcuuggugauacaccuggu

SEQ ID NO: 2185493 - RNA, 19 nt, Artificial Sequence
  Description of Artificial Sequence: Synthetic oligonucleotide
cuuggacauuuaggcugau

SEQ ID NO: 2185494 - RNA, 19 nt, Artificial Sequence
  Description of Artificial Sequence: Synthetic oligonucleotide
ccgcugucuguugggauua

SEQ ID NO: 2185495 - RNA, 19 nt, Artificial Sequence
  Description of Artificial Sequence: Synthetic oligonucleotide
cugucaccgauggcuuauu

SEQ ID NO: 2185496 - RNA, 19 nt, Artificial Sequence
  Description of Artificial Sequence: Synthetic oligonucleotide
ccuauucggcuucccuuuu

SEQ ID NO: 2185497 - RNA, 19 nt, Artificial Sequence
  Description of Artificial Sequence: Synthetic oligonucleotide
cgcgugcuucagccgcugu

SEQ ID NO: 2185498 - RNA, 19 nt, Artificial Sequence
  Description of Artificial Sequence: Synthetic oligonucleotide
aaagacuucauccuugucg

SEQ ID NO: 2185499 - RNA, 19 nt, Artificial Sequence
  Description of Artificial Sequence: Synthetic oligonucleotide
aucguaaucauccugcagc

SEQ ID NO: 2185500 - RNA, 19 nt, Artificial Sequence
  Description of Artificial Sequence: Synthetic oligonucleotide
caauucaucacaaacauug

SEQ ID NO: 2185501 - RNA, 19 nt, Artificial Sequence
  Description of Artificial Sequence: Synthetic oligonucleotide
uucagaacugcucagagcc

SEQ ID NO: 2185502 - RNA, 19 nt, Artificial Sequence
  Description of Artificial Sequence: Synthetic oligonucleotide
agucuuguaggauucaugc

SEQ ID NO: 2185503 - RNA, 19 nt, Artificial Sequence
  Description of Artificial Sequence: Synthetic oligonucleotide
aguacuuugcuguaacucc

SEQ ID NO: 2185504 - RNA, 19 nt, Artificial Sequence
  Description of Artificial Sequence: Synthetic oligonucleotide
aguguagucaugcaggccg

SEQ ID NO: 2185505 - RNA, 19 nt, Artificial Sequence
  Description of Artificial Sequence: Synthetic oligonucleotide
uaaaguacaacuauuguuu

SEQ ID NO: 2185506 - RNA, 19 nt, Artificial Sequence
  Description of Artificial Sequence: Synthetic oligonucleotide
uccuccauugucuuuaugg

SEQ ID NO: 2185507 - RNA, 19 nt, Artificial Sequence
  Description of Artificial Sequence: Synthetic oligonucleotide
uccaguaagacauucccgg

SEQ ID NO: 2185508 - RNA, 19 nt, Artificial Sequence
  Description of Artificial Sequence: Synthetic oligonucleotide
ucggaaucaaaauaaaugu

SEQ ID NO: 2185509 - RNA, 19 nt, Artificial Sequence
  Description of Artificial Sequence: Synthetic oligonucleotide
aaaugaaagacuucauccu

SEQ ID NO: 2185510 - RNA, 19 nt, Artificial Sequence
  Description of Artificial Sequence: Synthetic oligonucleotide
aacaauucaucacaaacau

SEQ ID NO: 2185511 - RNA, 19 nt, Artificial Sequence
  Description of Artificial Sequence: Synthetic oligonucleotide
ucugcaauccaaaagcaug

SEQ ID NO: 2185512 - RNA, 19 nt, Artificial Sequence
  Description of Artificial Sequence: Synthetic oligonucleotide
cuugcuaaaacauugaaaa

SEQ ID NO: 2185513 - RNA, 19 nt, Artificial Sequence
  Description of Artificial Sequence: Synthetic oligonucleotide
aauaaaugucaucauagua

SEQ ID NO: 2185514 - RNA, 19 nt, Artificial Sequence
  Description of Artificial Sequence: Synthetic oligonucleotide
uaugguagaguucaauuca

SEQ ID NO: 2185515 - RNA, 19 nt, Artificial Sequence
  Description of Artificial Sequence: Synthetic oligonucleotide
uguaacuccuccaacauuc

SEQ ID NO: 2185516 - RNA, 19 nt, Artificial Sequence
  Description of Artificial Sequence: Synthetic oligonucleotide
aaauaaaugucaucauagu

SEQ ID NO: 2185517 - RNA, 19 nt, Artificial Sequence
  Description of Artificial Sequence: Synthetic oligonucleotide
cucaggaucauauagcaac

SEQ ID NO: 2185518 - RNA, 19 nt, Artificial Sequence
  Description of Artificial Sequence: Synthetic oligonucleotide
ucuguacugagucuuguag

SEQ ID NO: 2185519 - RNA, 19 nt, Artificial Sequence
  Description of Artificial Sequence: Synthetic oligonucleotide
uaaaugucaucauaguacu

SEQ ID NO: 2185520 - RNA, 19 nt, Artificial Sequence
  Description of Artificial Sequence: Synthetic oligonucleotide
ucauccuugucguagacug

SEQ ID NO: 2185521 - RNA, 19 nt, Artificial Sequence
  Description of Artificial Sequence: Synthetic oligonucleotide
gauucuuguaucuuagaac

SEQ ID NO: 2185522 - RNA, 19 nt, Artificial Sequence
  Description of Artificial Sequence: Synthetic oligonucleotide
ucagcguuagaccucaucu

SEQ ID NO: 2185523 - RNA, 19 nt, Artificial Sequence
  Description of Artificial Sequence: Synthetic oligonucleotide
acaaacauugcucuguacu

SEQ ID NO: 2185524 - RNA, 19 nt, Artificial Sequence
  Description of Artificial Sequence: Synthetic oligonucleotide
agaugauucacuuucucca

SEQ ID NO: 2185525 - RNA, 19 nt, Artificial Sequence
  Description of Artificial Sequence: Synthetic oligonucleotide
guaaucauccugcagccgg

SEQ ID NO: 2185526 - RNA, 19 nt, Artificial Sequence
  Description of Artificial Sequence: Synthetic oligonucleotide
aauucaucacaaacauugc

SEQ ID NO: 2185527 - RNA, 19 nt, Artificial Sequence
  Description of Artificial Sequence: Synthetic oligonucleotide
ucuguugacagaacaauuc

SEQ ID NO: 2185528 - RNA, 19 nt, Artificial Sequence
  Description of Artificial Sequence: Synthetic oligonucleotide
cacaguguagucaugcagg

SEQ ID NO: 2185529 - RNA, 19 nt, Artificial Sequence
  Description of Artificial Sequence: Synthetic oligonucleotide
uauagcaacucaucguuug

SEQ ID NO: 2185530 - RNA, 19 nt, Artificial Sequence
  Description of Artificial Sequence: Synthetic oligonucleotide
uccaacauucccaacugcc

SEQ ID NO: 2185531 - RNA, 19 nt, Artificial Sequence
  Description of Artificial Sequence: Synthetic oligonucleotide
ugugcaucaacccaggcuu

SEQ ID NO: 2185532 - RNA, 19 nt, Artificial Sequence
  Description of Artificial Sequence: Synthetic oligonucleotide
aucggaaucaaaauaaaug

SEQ ID NO: 2185533 - RNA, 19 nt, Artificial Sequence
  Description of Artificial Sequence: Synthetic oligonucleotide
uccauguaacagcacaucc

SEQ ID NO: 2185534 - RNA, 19 nt, Artificial Sequence
  Description of Artificial Sequence: Synthetic oligonucleotide
ugugcacaugacaggaugg

SEQ ID NO: 2185535 - RNA, 19 nt, Artificial Sequence
  Description of Artificial Sequence: Synthetic oligonucleotide
uagaugauucacuuucucc

SEQ ID NO: 2185536 - RNA, 19 nt, Artificial Sequence
  Description of Artificial Sequence: Synthetic oligonucleotide
aacauugcucuguacugag

SEQ ID NO: 2185537 - RNA, 19 nt, Artificial Sequence
  Description of Artificial Sequence: Synthetic oligonucleotide
uuaugguagaguucaauuc

SEQ ID NO: 2185538 - RNA, 19 nt, Artificial Sequence
  Description of Artificial Sequence: Synthetic oligonucleotide
uagacugccacuucaguug

SEQ ID NO: 2185539 - RNA, 19 nt, Artificial Sequence
  Description of Artificial Sequence: Synthetic oligonucleotide
guagggaucguaaucaucc

SEQ ID NO: 2185540 - RNA, 19 nt, Artificial Sequence
  Description of Artificial Sequence: Synthetic oligonucleotide
aacagcaucacuguuugga

SEQ ID NO: 2185541 - RNA, 19 nt, Artificial Sequence
  Description of Artificial Sequence: Synthetic oligonucleotide
ucauauagcaacucaucgu

SEQ ID NO: 2185542 - RNA, 19 nt, Artificial Sequence
  Description of Artificial Sequence: Synthetic oligonucleotide
uguacugagucuuguagga

SEQ ID NO: 2185543 - RNA, 19 nt, Artificial Sequence
  Description of Artificial Sequence: Synthetic oligonucleotide
uuuaugguagaguucaauu

SEQ ID NO: 2185544 - RNA, 19 nt, Artificial Sequence
  Description of Artificial Sequence: Synthetic oligonucleotide
uucaagaauggcuugcuaa

SEQ ID NO: 2185545 - RNA, 19 nt, Artificial Sequence
  Description of Artificial Sequence: Synthetic oligonucleotide
uuaauucaagaauggcuug

SEQ ID NO: 2185546 - RNA, 19 nt, Artificial Sequence
  Description of Artificial Sequence: Synthetic oligonucleotide
uguuaucuuucucaggauc

SEQ ID NO: 2185547 - RNA, 19 nt, Artificial Sequence
  Description of Artificial Sequence: Synthetic oligonucleotide
uuuguuggaauccugcguu

SEQ ID NO: 2185548 - RNA, 19 nt, Artificial Sequence
  Description of Artificial Sequence: Synthetic oligonucleotide
agcguuagaccucaucuuc

SEQ ID NO: 2185549 - RNA, 19 nt, Artificial Sequence
  Description of Artificial Sequence: Synthetic oligonucleotide
cacuagaugauucacuuuc

SEQ ID NO: 2185550 - RNA, 19 nt, Artificial Sequence
  Description of Artificial Sequence: Synthetic oligonucleotide
uugucuuuaugguagaguu

SEQ ID NO: 2185551 - RNA, 19 nt, Artificial Sequence
  Description of Artificial Sequence: Synthetic oligonucleotide
gaacaauucaucacaaaca

SEQ ID NO: 2185552 - RNA, 19 nt, Artificial Sequence
  Description of Artificial Sequence: Synthetic oligonucleotide
gacagcuuauccuccauug

SEQ ID NO: 2185553 - RNA, 19 nt, Artificial Sequence
  Description of Artificial Sequence: Synthetic oligonucleotide
agaauggcuugcuaaaaca

SEQ ID NO: 2185554 - RNA, 19 nt, Artificial Sequence
  Description of Artificial Sequence: Synthetic oligonucleotide
guaggauucaugccuuugg

SEQ ID NO: 2185555 - RNA, 19 nt, Artificial Sequence
  Description of Artificial Sequence: Synthetic oligonucleotide
aguaagacauucccggaug

SEQ ID NO: 2185556 - RNA, 19 nt, Artificial Sequence
  Description of Artificial Sequence: Synthetic oligonucleotide
cuuguaucuuagaaccucc

SEQ ID NO: 2185557 - RNA, 19 nt, Artificial Sequence
  Description of Artificial Sequence: Synthetic oligonucleotide
agcaugguaaccucuucuc

SEQ ID NO: 2185558 - RNA, 19 nt, Artificial Sequence
  Description of Artificial Sequence: Synthetic oligonucleotide
aaucaaggcacaguguagu

SEQ ID NO: 2185559 - RNA, 19 nt, Artificial Sequence
  Description of Artificial Sequence: Synthetic oligonucleotide
aagcaugguaaccucuucu

SEQ ID NO: 2185560 - RNA, 19 nt, Artificial Sequence
  Description of Artificial Sequence: Synthetic oligonucleotide
caauccaaaagcaugguaa

SEQ ID NO: 2185561 - RNA, 19 nt, Artificial Sequence
  Description of Artificial Sequence: Synthetic oligonucleotide
ucaagaauggcuugcuaaa

SEQ ID NO: 2185562 - RNA, 19 nt, Artificial Sequence
  Description of Artificial Sequence: Synthetic oligonucleotide
uucacuagaugauucacuu

SEQ ID NO: 2185563 - RNA, 19 nt, Artificial Sequence
  Description of Artificial Sequence: Synthetic oligonucleotide
agcaucacuguuuggaaca

SEQ ID NO: 2185564 - RNA, 19 nt, Artificial Sequence
  Description of Artificial Sequence: Synthetic oligonucleotide
ucguuuguuggaauccugc

SEQ ID NO: 2185565 - RNA, 19 nt, Artificial Sequence
  Description of Artificial Sequence: Synthetic oligonucleotide
aaauucaucuucacuagau

SEQ ID NO: 2185566 - RNA, 19 nt, Artificial Sequence
  Description of Artificial Sequence: Synthetic oligonucleotide
uaauucaagaauggcuugc

SEQ ID NO: 2185567 - RNA, 19 nt, Artificial Sequence
  Description of Artificial Sequence: Synthetic oligonucleotide
ucagaaucggaaucaaaau

SEQ ID NO: 2185568 - RNA, 19 nt, Artificial Sequence
  Description of Artificial Sequence: Synthetic oligonucleotide
agaaucggaaucaaaauaa

SEQ ID NO: 2185569 - RNA, 19 nt, Artificial Sequence
  Description of Artificial Sequence: Synthetic oligonucleotide
auucccaacugccgaagac

SEQ ID NO: 2185570 - RNA, 19 nt, Artificial Sequence
  Description of Artificial Sequence: Synthetic oligonucleotide
cacuguuuggaacaggcug

SEQ ID NO: 2185571 - RNA, 19 nt, Artificial Sequence
  Description of Artificial Sequence: Synthetic oligonucleotide
uaggauucaugccuuuggc

SEQ ID NO: 2185572 - RNA, 19 nt, Artificial Sequence
  Description of Artificial Sequence: Synthetic oligonucleotide
ugacagaacaauucaucac

SEQ ID NO: 2185573 - RNA, 19 nt, Artificial Sequence
  Description of Artificial Sequence: Synthetic oligonucleotide
ucuuccacggcguagggau

SEQ ID NO: 2185574 - RNA, 19 nt, Artificial Sequence
  Description of Artificial Sequence: Synthetic oligonucleotide
ucaguugaacacucugugc

SEQ ID NO: 2185575 - RNA, 19 nt, Artificial Sequence
  Description of Artificial Sequence: Synthetic oligonucleotide
auccuugucguagacugcc

SEQ ID NO: 2185576 - RNA, 19 nt, Artificial Sequence
  Description of Artificial Sequence: Synthetic oligonucleotide
aguacaacuauuguuuuaa

SEQ ID NO: 2185577 - RNA, 19 nt, Artificial Sequence
  Description of Artificial Sequence: Synthetic oligonucleotide
caugguaaccucuucucug

SEQ ID NO: 2185578 - RNA, 19 nt, Artificial Sequence
  Description of Artificial Sequence: Synthetic oligonucleotide
ucguaaucauccugcagcc

SEQ ID NO: 2185579 - RNA, 19 nt, Artificial Sequence
  Description of Artificial Sequence: Synthetic oligonucleotide
ucaggaucauauagcaacu

SEQ ID NO: 2185580 - RNA, 19 nt, Artificial Sequence
  Description of Artificial Sequence: Synthetic oligonucleotide
cuauuguuuuaauucaaga

SEQ ID NO: 2185581 - RNA, 19 nt, Artificial Sequence
  Description of Artificial Sequence: Synthetic oligonucleotide
cauaguacuuugcuguaac

SEQ ID NO: 2185582 - RNA, 19 nt, Artificial Sequence
  Description of Artificial Sequence: Synthetic oligonucleotide
ucucugcaauccaaaagca

SEQ ID NO: 2185583 - RNA, 19 nt, Artificial Sequence
  Description of Artificial Sequence: Synthetic oligonucleotide
aggaucauauagcaacuca

SEQ ID NO: 2185584 - RNA, 19 nt, Artificial Sequence
  Description of Artificial Sequence: Synthetic oligonucleotide
uguugacagaacaauucau

SEQ ID NO: 2185585 - RNA, 19 nt, Artificial Sequence
  Description of Artificial Sequence: Synthetic oligonucleotide
aaccucuucucugugcauc

SEQ ID NO: 2185586 - RNA, 19 nt, Artificial Sequence
  Description of Artificial Sequence: Synthetic oligonucleotide
uguaucuuagaaccuccuc

SEQ ID NO: 2185587 - RNA, 19 nt, Artificial Sequence
  Description of Artificial Sequence: Synthetic oligonucleotide
acuauuguuuuaauucaag

SEQ ID NO: 2185588 - RNA, 19 nt, Artificial Sequence
  Description of Artificial Sequence: Synthetic oligonucleotide
ucaucguuuguuggaaucc

SEQ ID NO: 2185589 - RNA, 19 nt, Artificial Sequence
  Description of Artificial Sequence: Synthetic oligonucleotide
ucccaacugccgaagaccc

SEQ ID NO: 2185590 - RNA, 19 nt, Artificial Sequence
  Description of Artificial Sequence: Synthetic oligonucleotide
aaacauugcucuguacuga

SEQ ID NO: 2185591 - RNA, 19 nt, Artificial Sequence
  Description of Artificial Sequence: Synthetic oligonucleotide
agcaacucaucguuuguug

SEQ ID NO: 2185592 - RNA, 19 nt, Artificial Sequence
  Description of Artificial Sequence: Synthetic oligonucleotide
cuggauucuuguaucuuag

SEQ ID NO: 2185593 - RNA, 19 nt, Artificial Sequence
  Description of Artificial Sequence: Synthetic oligonucleotide
ugccacuucaguugaacac

SEQ ID NO: 2185594 - RNA, 19 nt, Artificial Sequence
  Description of Artificial Sequence: Synthetic oligonucleotide
gaucguaaucauccugcag

SEQ ID NO: 2185595 - RNA, 19 nt, Artificial Sequence
  Description of Artificial Sequence: Synthetic oligonucleotide
uucuccaguaagacauucc

SEQ ID NO: 2185596 - RNA, 19 nt, Artificial Sequence
  Description of Artificial Sequence: Synthetic oligonucleotide
uguuguuucugaugggguc

SEQ ID NO: 2185597 - RNA, 19 nt, Artificial Sequence
  Description of Artificial Sequence: Synthetic oligonucleotide
aaucggaaucaaaauaaau

SEQ ID NO: 2185598 - RNA, 19 nt, Artificial Sequence
  Description of Artificial Sequence: Synthetic oligonucleotide
gaucauauagcaacucauc

SEQ ID NO: 2185599 - RNA, 19 nt, Artificial Sequence
  Description of Artificial Sequence: Synthetic oligonucleotide
auggcuugcuaaaacauug

SEQ ID NO: 2185600 - RNA, 19 nt, Artificial Sequence
  Description of Artificial Sequence: Synthetic oligonucleotide
aggccgggcaauucaaaac

SEQ ID NO: 2185601 - RNA, 19 nt, Artificial Sequence
  Description of Artificial Sequence: Synthetic oligonucleotide
caucauaguacuuugcugu

SEQ ID NO: 2185602 - RNA, 19 nt, Artificial Sequence
  Description of Artificial Sequence: Synthetic oligonucleotide
ugguagaguucaauucagc

SEQ ID NO: 2185603 - RNA, 19 nt, Artificial Sequence
  Description of Artificial Sequence: Synthetic oligonucleotide
uaguacuuugcuguaacuc

SEQ ID NO: 2185604 - RNA, 19 nt, Artificial Sequence
  Description of Artificial Sequence: Synthetic oligonucleotide
acucugugcacaugacagg

SEQ ID NO: 2185605 - RNA, 19 nt, Artificial Sequence
  Description of Artificial Sequence: Synthetic oligonucleotide
caaucaaggcacaguguag

SEQ ID NO: 2185606 - RNA, 19 nt, Artificial Sequence
  Description of Artificial Sequence: Synthetic oligonucleotide
guugacagaacaauucauc

SEQ ID NO: 2185607 - RNA, 19 nt, Artificial Sequence
  Description of Artificial Sequence: Synthetic oligonucleotide
guaucuuagaaccuccucu

SEQ ID NO: 2185608 - RNA, 19 nt, Artificial Sequence
  Description of Artificial Sequence: Synthetic oligonucleotide
aacauucccaacugccgaa

SEQ ID NO: 2185609 - RNA, 19 nt, Artificial Sequence
  Description of Artificial Sequence: Synthetic oligonucleotide
agagccggcuccucgucgc

SEQ ID NO: 2185610 - RNA, 19 nt, Artificial Sequence
  Description of Artificial Sequence: Synthetic oligonucleotide
uuauccuccauugucuuua

SEQ ID NO: 2185611 - RNA, 19 nt, Artificial Sequence
  Description of Artificial Sequence: Synthetic oligonucleotide
accuccucucuguugacag

SEQ ID NO: 2185612 - RNA, 19 nt, Artificial Sequence
  Description of Artificial Sequence: Synthetic oligonucleotide
ucguagacugccacuucag

SEQ ID NO: 2185613 - RNA, 19 nt, Artificial Sequence
  Description of Artificial Sequence: Synthetic oligonucleotide
uagaccucaucuucuuagc

SEQ ID NO: 2185614 - RNA, 19 nt, Artificial Sequence
  Description of Artificial Sequence: Synthetic oligonucleotide
uucccaacugccgaagacc

SEQ ID NO: 2185615 - RNA, 19 nt, Artificial Sequence
  Description of Artificial Sequence: Synthetic oligonucleotide
acugagucuuguaggauuc

SEQ ID NO: 2185616 - RNA, 19 nt, Artificial Sequence
  Description of Artificial Sequence: Synthetic oligonucleotide
uagucaugcaggccgggca

SEQ ID NO: 2185617 - RNA, 19 nt, Artificial Sequence
  Description of Artificial Sequence: Synthetic oligonucleotide
auugucuuuaugguagagu

SEQ ID NO: 2185618 - RNA, 19 nt, Artificial Sequence
  Description of Artificial Sequence: Synthetic oligonucleotide
guaaccucuucucugugca

SEQ ID NO: 2185619 - RNA, 19 nt, Artificial Sequence
  Description of Artificial Sequence: Synthetic oligonucleotide
ugauucacuuucuccagua

SEQ ID NO: 2185620 - RNA, 19 nt, Artificial Sequence
  Description of Artificial Sequence: Synthetic oligonucleotide
acugccacuucaguugaac

SEQ ID NO: 2185621 - RNA, 19 nt, Artificial Sequence
  Description of Artificial Sequence: Synthetic oligonucleotide
aggauucaugccuuuggca

SEQ ID NO: 2185622 - RNA, 19 nt, Artificial Sequence
  Description of Artificial Sequence: Synthetic oligonucleotide
uuguaucuuagaaccuccu

SEQ ID NO: 2185623 - RNA, 19 nt, Artificial Sequence
  Description of Artificial Sequence: Synthetic oligonucleotide
cucaucguuuguuggaauc

SEQ ID NO: 2185624 - RNA, 19 nt, Artificial Sequence
  Description of Artificial Sequence: Synthetic oligonucleotide
ucucuguugacagaacaau

SEQ ID NO: 2185625 - RNA, 19 nt, Artificial Sequence
  Description of Artificial Sequence: Synthetic oligonucleotide
uacugagucuuguaggauu

SEQ ID NO: 2185626 - RNA, 19 nt, Artificial Sequence
  Description of Artificial Sequence: Synthetic oligonucleotide
guagauuucuuccucuucu

SEQ ID NO: 2185627 - RNA, 19 nt, Artificial Sequence
  Description of Artificial Sequence: Synthetic oligonucleotide
ugcagccgguucauggcgg

SEQ ID NO: 2185628 - RNA, 19 nt, Artificial Sequence
  Description of Artificial Sequence: Synthetic oligonucleotide
gcaacucaucguuuguugg

SEQ ID NO: 2185629 - RNA, 19 nt, Artificial Sequence
  Description of Artificial Sequence: Synthetic oligonucleotide
augaaagacuucauccuug

SEQ ID NO: 2185630 - RNA, 19 nt, Artificial Sequence
  Description of Artificial Sequence: Synthetic oligonucleotide
agggaucguaaucauccug

SEQ ID NO: 2185631 - RNA, 19 nt, Artificial Sequence
  Description of Artificial Sequence: Synthetic oligonucleotide
ggucucugcaauccaaaag

SEQ ID NO: 2185632 - RNA, 19 nt, Artificial Sequence
  Description of Artificial Sequence: Synthetic oligonucleotide
aaaagcaugguaaccucuu

SEQ ID NO: 2185633 - RNA, 19 nt, Artificial Sequence
  Description of Artificial Sequence: Synthetic oligonucleotide
uuccacggcguagggaucg

SEQ ID NO: 2185634 - RNA, 19 nt, Artificial Sequence
  Description of Artificial Sequence: Synthetic oligonucleotide
cuguugacagaacaauuca

SEQ ID NO: 2185635 - RNA, 19 nt, Artificial Sequence
  Description of Artificial Sequence: Synthetic oligonucleotide
uaaucauccugcagccggu

SEQ ID NO: 2185636 - RNA, 19 nt, Artificial Sequence
  Description of Artificial Sequence: Synthetic oligonucleotide
uagaaccuccucucuguug

SEQ ID NO: 2185637 - RNA, 19 nt, Artificial Sequence
  Description of Artificial Sequence: Synthetic oligonucleotide
ucacuguuuggaacaggcu

SEQ ID NO: 2185638 - RNA, 19 nt, Artificial Sequence
  Description of Artificial Sequence: Synthetic oligonucleotide
aauggcuugcuaaaacauu

SEQ ID NO: 2185639 - RNA, 19 nt, Artificial Sequence
  Description of Artificial Sequence: Synthetic oligonucleotide
cagcuuauccuccauuguc

SEQ ID NO: 2185640 - RNA, 19 nt, Artificial Sequence
  Description of Artificial Sequence: Synthetic oligonucleotide
aacucaucguuuguuggaa

SEQ ID NO: 2185641 - RNA, 19 nt, Artificial Sequence
  Description of Artificial Sequence: Synthetic oligonucleotide
ugcaucaacccaggcuugg

SEQ ID NO: 2185642 - RNA, 19 nt, Artificial Sequence
  Description of Artificial Sequence: Synthetic oligonucleotide
guuuggaacaggcuguugu

SEQ ID NO: 2185643 - RNA, 19 nt, Artificial Sequence
  Description of Artificial Sequence: Synthetic oligonucleotide
acacucugugcacaugaca

SEQ ID NO: 2185644 - RNA, 19 nt, Artificial Sequence
  Description of Artificial Sequence: Synthetic oligonucleotide
agaguucaauucagcuucc

SEQ ID NO: 2185645 - RNA, 19 nt, Artificial Sequence
  Description of Artificial Sequence: Synthetic oligonucleotide
uggauucuuguaucuuaga

SEQ ID NO: 2185646 - RNA, 19 nt, Artificial Sequence
  Description of Artificial Sequence: Synthetic oligonucleotide
caucuucuuagcaccccgc

SEQ ID NO: 2185647 - RNA, 19 nt, Artificial Sequence
  Description of Artificial Sequence: Synthetic oligonucleotide
gacccuccuguccccaugg

SEQ ID NO: 2185648 - RNA, 19 nt, Artificial Sequence
  Description of Artificial Sequence: Synthetic oligonucleotide
gucaucauaguacuuugcu

SEQ ID NO: 2185649 - RNA, 19 nt, Artificial Sequence
  Description of Artificial Sequence: Synthetic oligonucleotide
cagaaucggaaucaaaaua

SEQ ID NO: 2185650 - RNA, 19 nt, Artificial Sequence
  Description of Artificial Sequence: Synthetic oligonucleotide
ucacuugugcugcuuuguc

SEQ ID NO: 2185651 - RNA, 19 nt, Artificial Sequence
  Description of Artificial Sequence: Synthetic oligonucleotide
aucuuagaaccuccucucu

SEQ ID NO: 2185652 - RNA, 19 nt, Artificial Sequence
  Description of Artificial Sequence: Synthetic oligonucleotide
gggaucguaaucauccugc

SEQ ID NO: 2185653 - RNA, 19 nt, Artificial Sequence
  Description of Artificial Sequence: Synthetic oligonucleotide
aucauccugcagccgguuc

SEQ ID NO: 2185654 - RNA, 19 nt, Artificial Sequence
  Description of Artificial Sequence: Synthetic oligonucleotide
ugcucuguacugagucuug

SEQ ID NO: 2185655 - RNA, 19 nt, Artificial Sequence
  Description of Artificial Sequence: Synthetic oligonucleotide
ucgcucggcucuuccacgg

SEQ ID NO: 2185656 - RNA, 19 nt, Artificial Sequence
  Description of Artificial Sequence: Synthetic oligonucleotide
guaagacauucccggauga

SEQ ID NO: 2185657 - RNA, 19 nt, Artificial Sequence
  Description of Artificial Sequence: Synthetic oligonucleotide
guaacagcacauccacuuc

SEQ ID NO: 2185658 - RNA, 19 nt, Artificial Sequence
  Description of Artificial Sequence: Synthetic oligonucleotide
ucauggcggccuagggagg

SEQ ID NO: 2185659 - RNA, 19 nt, Artificial Sequence
  Description of Artificial Sequence: Synthetic oligonucleotide
uugcuguaacuccuccaac

SEQ ID NO: 2185660 - RNA, 19 nt, Artificial Sequence
  Description of Artificial Sequence: Synthetic oligonucleotide
uacuuugcuguaacuccuc

SEQ ID NO: 2185661 - RNA, 19 nt, Artificial Sequence
  Description of Artificial Sequence: Synthetic oligonucleotide
cauauagcaacucaucguu

SEQ ID NO: 2185662 - RNA, 19 nt, Artificial Sequence
  Description of Artificial Sequence: Synthetic oligonucleotide
uguuggaauccugcguugu

SEQ ID NO: 2185663 - RNA, 19 nt, Artificial Sequence
  Description of Artificial Sequence: Synthetic oligonucleotide
gguaaccucuucucugugc

SEQ ID NO: 2185664 - RNA, 19 nt, Artificial Sequence
  Description of Artificial Sequence: Synthetic oligonucleotide
gaaucggaaucaaaauaaa

SEQ ID NO: 2185665 - RNA, 19 nt, Artificial Sequence
  Description of Artificial Sequence: Synthetic oligonucleotide
ucauaguacuuugcuguaa

SEQ ID NO: 2185666 - RNA, 19 nt, Artificial Sequence
  Description of Artificial Sequence: Synthetic oligonucleotide
agacugccacuucaguuga

SEQ ID NO: 2185667 - RNA, 19 nt, Artificial Sequence
  Description of Artificial Sequence: Synthetic oligonucleotide
gcacaguguagucaugcag

SEQ ID NO: 2185668 - RNA, 19 nt, Artificial Sequence
  Description of Artificial Sequence: Synthetic oligonucleotide
guucauggcggccuaggga

SEQ ID NO: 2185669 - RNA, 19 nt, Artificial Sequence
  Description of Artificial Sequence: Synthetic oligonucleotide
ugguaaccucuucucugug

SEQ ID NO: 2185670 - RNA, 19 nt, Artificial Sequence
  Description of Artificial Sequence: Synthetic oligonucleotide
gucguagacugccacuuca

SEQ ID NO: 2185671 - RNA, 19 nt, Artificial Sequence
  Description of Artificial Sequence: Synthetic oligonucleotide
uguagucaugcaggccggg

SEQ ID NO: 2185672 - RNA, 19 nt, Artificial Sequence
  Description of Artificial Sequence: Synthetic oligonucleotide
caacauucccaacugccga

SEQ ID NO: 2185673 - RNA, 19 nt, Artificial Sequence
  Description of Artificial Sequence: Synthetic oligonucleotide
uuagaaccuccucucuguu

SEQ ID NO: 2185674 - RNA, 19 nt, Artificial Sequence
  Description of Artificial Sequence: Synthetic oligonucleotide
caacucaucguuuguugga

SEQ ID NO: 2185675 - RNA, 19 nt, Artificial Sequence
  Description of Artificial Sequence: Synthetic oligonucleotide
ucaacccaggcuuggucuc

SEQ ID NO: 2185676 - RNA, 19 nt, Artificial Sequence
  Description of Artificial Sequence: Synthetic oligonucleotide
uagggaucguaaucauccu

SEQ ID NO: 2185677 - RNA, 19 nt, Artificial Sequence
  Description of Artificial Sequence: Synthetic oligonucleotide
ucuuuaugguagaguucaa

SEQ ID NO: 2185678 - RNA, 19 nt, Artificial Sequence
  Description of Artificial Sequence: Synthetic oligonucleotide
cauugucuuuaugguagag

SEQ ID NO: 2185679 - RNA, 19 nt, Artificial Sequence
  Description of Artificial Sequence: Synthetic oligonucleotide
uugucguagacugccacuu

SEQ ID NO: 2185680 - RNA, 19 nt, Artificial Sequence
  Description of Artificial Sequence: Synthetic oligonucleotide
guagaguucaauucagcuu

SEQ ID NO: 2185681 - RNA, 19 nt, Artificial Sequence
  Description of Artificial Sequence: Synthetic oligonucleotide
cuuagaaccuccucucugu

SEQ ID NO: 2185682 - RNA, 19 nt, Artificial Sequence
  Description of Artificial Sequence: Synthetic oligonucleotide
ucacuagaugauucacuuu

SEQ ID NO: 2185683 - RNA, 19 nt, Artificial Sequence
  Description of Artificial Sequence: Synthetic oligonucleotide
guuuguuggaauccugcgu

SEQ ID NO: 2185684 - RNA, 19 nt, Artificial Sequence
  Description of Artificial Sequence: Synthetic oligonucleotide
acuagaugauucacuuucu

SEQ ID NO: 2185685 - RNA, 19 nt, Artificial Sequence
  Description of Artificial Sequence: Synthetic oligonucleotide
ugcaauccaaaagcauggu

SEQ ID NO: 2185686 - RNA, 19 nt, Artificial Sequence
  Description of Artificial Sequence: Synthetic oligonucleotide
ucugugcacaugacaggau

SEQ ID NO: 2185687 - RNA, 19 nt, Artificial Sequence
  Description of Artificial Sequence: Synthetic oligonucleotide
ugagucuuguaggauucau

SEQ ID NO: 2185688 - RNA, 19 nt, Artificial Sequence
  Description of Artificial Sequence: Synthetic oligonucleotide
auucaagaauggcuugcua

SEQ ID NO: 2185689 - RNA, 19 nt, Artificial Sequence
  Description of Artificial Sequence: Synthetic oligonucleotide
agucaugcaggccgggcaa

SEQ ID NO: 2185690 - RNA, 19 nt, Artificial Sequence
  Description of Artificial Sequence: Synthetic oligonucleotide
gucaggaguuccauguaac

SEQ ID NO: 2185691 - RNA, 19 nt, Artificial Sequence
  Description of Artificial Sequence: Synthetic oligonucleotide
gucgcucggcucuuccacg

SEQ ID NO: 2185692 - RNA, 19 nt, Artificial Sequence
  Description of Artificial Sequence: Synthetic oligonucleotide
uccacaggacccucagcgu

SEQ ID NO: 2185693 - RNA, 19 nt, Artificial Sequence
  Description of Artificial Sequence: Synthetic oligonucleotide
cucucuguugacagaacaa

SEQ ID NO: 2185694 - RNA, 19 nt, Artificial Sequence
  Description of Artificial Sequence: Synthetic oligonucleotide
cuucaguugaacacucugu

SEQ ID NO: 2185695 - RNA, 19 nt, Artificial Sequence
  Description of Artificial Sequence: Synthetic oligonucleotide
agacauucccggaugaguu

SEQ ID NO: 2185696 - RNA, 19 nt, Artificial Sequence
  Description of Artificial Sequence: Synthetic oligonucleotide
ugucguagacugccacuuc

SEQ ID NO: 2185697 - RNA, 19 nt, Artificial Sequence
  Description of Artificial Sequence: Synthetic oligonucleotide
acauucccaacugccgaag

SEQ ID NO: 2185698 - RNA, 19 nt, Artificial Sequence
  Description of Artificial Sequence: Synthetic oligonucleotide
cuucauccuugucguagac

SEQ ID NO: 2185699 - RNA, 19 nt, Artificial Sequence
  Description of Artificial Sequence: Synthetic oligonucleotide
gguagauuucuuccucuuc

SEQ ID NO: 2185700 - RNA, 19 nt, Artificial Sequence
  Description of Artificial Sequence: Synthetic oligonucleotide
augcaggccgggcaauuca

SEQ ID NO: 2185701 - RNA, 19 nt, Artificial Sequence
  Description of Artificial Sequence: Synthetic oligonucleotide
guaacuccuccaacauucc

SEQ ID NO: 2185702 - RNA, 19 nt, Artificial Sequence
  Description of Artificial Sequence: Synthetic oligonucleotide
uguuuggaacaggcuguug

SEQ ID NO: 2185703 - RNA, 19 nt, Artificial Sequence
  Description of Artificial Sequence: Synthetic oligonucleotide
ugcguuguuucuucuucuu

SEQ ID NO: 2185704 - RNA, 19 nt, Artificial Sequence
  Description of Artificial Sequence: Synthetic oligonucleotide
ugcaggccgggcaauucaa

SEQ ID NO: 2185705 - RNA, 19 nt, Artificial Sequence
  Description of Artificial Sequence: Synthetic oligonucleotide
ggccgggcaauucaaaaca

SEQ ID NO: 2185706 - RNA, 19 nt, Artificial Sequence
  Description of Artificial Sequence: Synthetic oligonucleotide
aacugccgaagacccuccu

SEQ ID NO: 2185707 - RNA, 19 nt, Artificial Sequence
  Description of Artificial Sequence: Synthetic oligonucleotide
cucagcguuagaccucauc

SEQ ID NO: 2185708 - RNA, 19 nt, Artificial Sequence
  Description of Artificial Sequence: Synthetic oligonucleotide
cguuuguuggaauccugcg

SEQ ID NO: 2185709 - RNA, 19 nt, Artificial Sequence
  Description of Artificial Sequence: Synthetic oligonucleotide
guguagucaugcaggccgg

SEQ ID NO: 2185710 - RNA, 19 nt, Artificial Sequence
  Description of Artificial Sequence: Synthetic oligonucleotide
ugauggggucucugcaauc

SEQ ID NO: 2185711 - RNA, 19 nt, Artificial Sequence
  Description of Artificial Sequence: Synthetic oligonucleotide
uucccggaugaguuuucgu

SEQ ID NO: 2185712 - RNA, 19 nt, Artificial Sequence
  Description of Artificial Sequence: Synthetic oligonucleotide
caacugccgaagacccucc

SEQ ID NO: 2185713 - RNA, 19 nt, Artificial Sequence
  Description of Artificial Sequence: Synthetic oligonucleotide
gauucaugccuuuggcaau

SEQ ID NO: 2185714 - RNA, 19 nt, Artificial Sequence
  Description of Artificial Sequence: Synthetic oligonucleotide
ccgaagacccuccuguccc

SEQ ID NO: 2185715 - RNA, 19 nt, Artificial Sequence
  Description of Artificial Sequence: Synthetic oligonucleotide
caaaagcaugguaaccucu

SEQ ID NO: 2185716 - RNA, 19 nt, Artificial Sequence
  Description of Artificial Sequence: Synthetic oligonucleotide
ggcguagggaucguaauca

SEQ ID NO: 2185717 - RNA, 19 nt, Artificial Sequence
  Description of Artificial Sequence: Synthetic oligonucleotide
guagacugccacuucaguu

SEQ ID NO: 2185718 - RNA, 19 nt, Artificial Sequence
  Description of Artificial Sequence: Synthetic oligonucleotide
ugcacaugacaggauggua

SEQ ID NO: 2185719 - RNA, 19 nt, Artificial Sequence
  Description of Artificial Sequence: Synthetic oligonucleotide
aucguuuguuggaauccug

SEQ ID NO: 2185720 - RNA, 19 nt, Artificial Sequence
  Description of Artificial Sequence: Synthetic oligonucleotide
cugccacuucaguugaaca

SEQ ID NO: 2185721 - RNA, 19 nt, Artificial Sequence
  Description of Artificial Sequence: Synthetic oligonucleotide
cagagccggcuccucgucg

SEQ ID NO: 2185722 - RNA, 19 nt, Artificial Sequence
  Description of Artificial Sequence: Synthetic oligonucleotide
cuccauugucuuuauggua

SEQ ID NO: 2185723 - RNA, 19 nt, Artificial Sequence
  Description of Artificial Sequence: Synthetic oligonucleotide
uagcaacucaucguuuguu

SEQ ID NO: 2185724 - RNA, 19 nt, Artificial Sequence
  Description of Artificial Sequence: Synthetic oligonucleotide
caggaucauauagcaacuc

SEQ ID NO: 2185725 - RNA, 19 nt, Artificial Sequence
  Description of Artificial Sequence: Synthetic oligonucleotide
ucagagccggcuccucguc

SEQ ID NO: 2185726 - RNA, 19 nt, Artificial Sequence
  Description of Artificial Sequence: Synthetic oligonucleotide
ccauguaacagcacaucca

SEQ ID NO: 2185727 - RNA, 19 nt, Artificial Sequence
  Description of Artificial Sequence: Synthetic oligonucleotide
ggucacuugugcugcuuug

SEQ ID NO: 2185728 - RNA, 19 nt, Artificial Sequence
  Description of Artificial Sequence: Synthetic oligonucleotide
caguguagucaugcaggcc

SEQ ID NO: 2185729 - RNA, 19 nt, Artificial Sequence
  Description of Artificial Sequence: Synthetic oligonucleotide
acggcguagggaucguaau

SEQ ID NO: 2185730 - RNA, 19 nt, Artificial Sequence
  Description of Artificial Sequence: Synthetic oligonucleotide
agacccuccuguccccaug

SEQ ID NO: 2185731 - RNA, 19 nt, Artificial Sequence
  Description of Artificial Sequence: Synthetic oligonucleotide
cauggcggccuagggaggc

SEQ ID NO: 2185732 - RNA, 19 nt, Artificial Sequence
  Description of Artificial Sequence: Synthetic oligonucleotide
acauucccggaugaguuuu

SEQ ID NO: 2185733 - RNA, 19 nt, Artificial Sequence
  Description of Artificial Sequence: Synthetic oligonucleotide
gcuugcuaaaacauugaaa

SEQ ID NO: 2185734 - RNA, 19 nt, Artificial Sequence
  Description of Artificial Sequence: Synthetic oligonucleotide
acaauucaucacaaacauu

SEQ ID NO: 2185735 - RNA, 19 nt, Artificial Sequence
  Description of Artificial Sequence: Synthetic oligonucleotide
uauccuccauugucuuuau

SEQ ID NO: 2185736 - RNA, 19 nt, Artificial Sequence
  Description of Artificial Sequence: Synthetic oligonucleotide
cugugcaucaacccaggcu

SEQ ID NO: 2185737 - RNA, 19 nt, Artificial Sequence
  Description of Artificial Sequence: Synthetic oligonucleotide
auauagcaacucaucguuu

SEQ ID NO: 2185738 - RNA, 19 nt, Artificial Sequence
  Description of Artificial Sequence: Synthetic oligonucleotide
ccugcguuguuucuucuuc

SEQ ID NO: 2185739 - RNA, 19 nt, Artificial Sequence
  Description of Artificial Sequence: Synthetic oligonucleotide
acaggacccucagcguuag

SEQ ID NO: 2185740 - RNA, 19 nt, Artificial Sequence
  Description of Artificial Sequence: Synthetic oligonucleotide
cauucccggaugaguuuuc

SEQ ID NO: 2185741 - RNA, 19 nt, Artificial Sequence
  Description of Artificial Sequence: Synthetic oligonucleotide
gcucggcucuuccacggcg

SEQ ID NO: 2185742 - RNA, 19 nt, Artificial Sequence
  Description of Artificial Sequence: Synthetic oligonucleotide
ccgggcaauucaaaacagc

SEQ ID NO: 2185743 - RNA, 19 nt, Artificial Sequence
  Description of Artificial Sequence: Synthetic oligonucleotide
ggaucguaaucauccugca

SEQ ID NO: 2185744 - RNA, 19 nt, Artificial Sequence
  Description of Artificial Sequence: Synthetic oligonucleotide
caagaauggcuugcuaaaa

SEQ ID NO: 2185745 - RNA, 19 nt, Artificial Sequence
  Description of Artificial Sequence: Synthetic oligonucleotide
ggucaggaguuccauguaa

SEQ ID NO: 2185746 - RNA, 19 nt, Artificial Sequence
  Description of Artificial Sequence: Synthetic oligonucleotide
cgggcaauucaaaacagca

SEQ ID NO: 2185747 - RNA, 19 nt, Artificial Sequence
  Description of Artificial Sequence: Synthetic oligonucleotide
gccgaagacccuccugucc

SEQ ID NO: 2185748 - RNA, 19 nt, Artificial Sequence
  Description of Artificial Sequence: Synthetic oligonucleotide
cuuguaggauucaugccuu

SEQ ID NO: 2185749 - RNA, 19 nt, Artificial Sequence
  Description of Artificial Sequence: Synthetic oligonucleotide
aaggcacaguguagucaug

SEQ ID NO: 2185750 - RNA, 19 nt, Artificial Sequence
  Description of Artificial Sequence: Synthetic oligonucleotide
cuuuggcaaucaaggcaca

SEQ ID NO: 2185751 - RNA, 19 nt, Artificial Sequence
  Description of Artificial Sequence: Synthetic oligonucleotide
acaugacaggaugguagau

SEQ ID NO: 2185752 - RNA, 19 nt, Artificial Sequence
  Description of Artificial Sequence: Synthetic oligonucleotide
cauucccaacugccgaaga

SEQ ID NO: 2185753 - RNA, 19 nt, Artificial Sequence
  Description of Artificial Sequence: Synthetic oligonucleotide
uccccauggaggacagcuu

SEQ ID NO: 2185754 - RNA, 19 nt, Artificial Sequence
  Description of Artificial Sequence: Synthetic oligonucleotide
caggccgggcaauucaaaa

SEQ ID NO: 2185755 - RNA, 19 nt, Artificial Sequence
  Description of Artificial Sequence: Synthetic oligonucleotide
cacggcguagggaucguaa

SEQ ID NO: 2185756 - RNA, 19 nt, Artificial Sequence
  Description of Artificial Sequence: Synthetic oligonucleotide
gcaauccaaaagcauggua

SEQ ID NO: 2185757 - RNA, 19 nt, Artificial Sequence
  Description of Artificial Sequence: Synthetic oligonucleotide
cacuugugcugcuuugucu

SEQ ID NO: 2185758 - RNA, 19 nt, Artificial Sequence
  Description of Artificial Sequence: Synthetic oligonucleotide
cucuguugacagaacaauu

SEQ ID NO: 2185759 - RNA, 19 nt, Artificial Sequence
  Description of Artificial Sequence: Synthetic oligonucleotide
ggaucauauagcaacucau

SEQ ID NO: 2185760 - RNA, 19 nt, Artificial Sequence
  Description of Artificial Sequence: Synthetic oligonucleotide
caugcaggccgggcaauuc

SEQ ID NO: 2185761 - RNA, 19 nt, Artificial Sequence
  Description of Artificial Sequence: Synthetic oligonucleotide
cuuccacggcguagggauc

SEQ ID NO: 2185762 - RNA, 19 nt, Artificial Sequence
  Description of Artificial Sequence: Synthetic oligonucleotide
cucugcaauccaaaagcau

SEQ ID NO: 2185763 - RNA, 19 nt, Artificial Sequence
  Description of Artificial Sequence: Synthetic oligonucleotide
acauugcucuguacugagu

SEQ ID NO: 2185764 - RNA, 19 nt, Artificial Sequence
  Description of Artificial Sequence: Synthetic oligonucleotide
cucuguacugagucuugua

SEQ ID NO: 2185765 - RNA, 19 nt, Artificial Sequence
  Description of Artificial Sequence: Synthetic oligonucleotide
ccacuucaguugaacacuc

SEQ ID NO: 2185766 - RNA, 19 nt, Artificial Sequence
  Description of Artificial Sequence: Synthetic oligonucleotide
gaguuccauguaacagcac

SEQ ID NO: 2185767 - RNA, 19 nt, Artificial Sequence
  Description of Artificial Sequence: Synthetic oligonucleotide
ccucucuguugacagaaca

SEQ ID NO: 2185768 - RNA, 19 nt, Artificial Sequence
  Description of Artificial Sequence: Synthetic oligonucleotide
caguaagacauucccggau

SEQ ID NO: 2185769 - RNA, 19 nt, Artificial Sequence
  Description of Artificial Sequence: Synthetic oligonucleotide
ucggcucuuccacggcgua

SEQ ID NO: 2185770 - RNA, 19 nt, Artificial Sequence
  Description of Artificial Sequence: Synthetic oligonucleotide
caggcuuggucucuguuau

SEQ ID NO: 2185771 - RNA, 19 nt, Artificial Sequence
  Description of Artificial Sequence: Synthetic oligonucleotide
gacauucccggaugaguuu

SEQ ID NO: 2185772 - RNA, 19 nt, Artificial Sequence
  Description of Artificial Sequence: Synthetic oligonucleotide
agacuucauccuugucgua

SEQ ID NO: 2185773 - RNA, 19 nt, Artificial Sequence
  Description of Artificial Sequence: Synthetic oligonucleotide
gaauccugcguuguuucuu

SEQ ID NO: 2185774 - RNA, 19 nt, Artificial Sequence
  Description of Artificial Sequence: Synthetic oligonucleotide
cacaggacccucagcguua

SEQ ID NO: 2185775 - RNA, 19 nt, Artificial Sequence
  Description of Artificial Sequence: Synthetic oligonucleotide
ccaguaagacauucccgga

SEQ ID NO: 2185776 - RNA, 19 nt, Artificial Sequence
  Description of Artificial Sequence: Synthetic oligonucleotide
cugcguuguuucuucuucu

SEQ ID NO: 2185777 - RNA, 19 nt, Artificial Sequence
  Description of Artificial Sequence: Synthetic oligonucleotide
gcaugguaaccucuucucu

SEQ ID NO: 2185778 - RNA, 19 nt, Artificial Sequence
  Description of Artificial Sequence: Synthetic oligonucleotide
cguagggaucguaaucauc

SEQ ID NO: 2185779 - RNA, 19 nt, Artificial Sequence
  Description of Artificial Sequence: Synthetic oligonucleotide
caucguuuguuggaauccu

SEQ ID NO: 2185780 - RNA, 19 nt, Artificial Sequence
  Description of Artificial Sequence: Synthetic oligonucleotide
gccacuucaguugaacacu

SEQ ID NO: 2185781 - RNA, 19 nt, Artificial Sequence
  Description of Artificial Sequence: Synthetic oligonucleotide
cugagucuuguaggauuca

SEQ ID NO: 2185782 - RNA, 19 nt, Artificial Sequence
  Description of Artificial Sequence: Synthetic oligonucleotide
guuggaauccugcguuguu

SEQ ID NO: 2185783 - RNA, 19 nt, Artificial Sequence
  Description of Artificial Sequence: Synthetic oligonucleotide
uggcggccuagggaggccu

SEQ ID NO: 2185784 - RNA, 19 nt, Artificial Sequence
  Description of Artificial Sequence: Synthetic oligonucleotide
gcagccgguucauggcggc

SEQ ID NO: 2185785 - RNA, 19 nt, Artificial Sequence
  Description of Artificial Sequence: Synthetic oligonucleotide
cuuauccuccauugucuuu

SEQ ID NO: 2185786 - RNA, 19 nt, Artificial Sequence
  Description of Artificial Sequence: Synthetic oligonucleotide
cucagagccggcuccucgu

SEQ ID NO: 2185787 - RNA, 19 nt, Artificial Sequence
  Description of Artificial Sequence: Synthetic oligonucleotide
cguaaucauccugcagccg

SEQ ID NO: 2185788 - RNA, 19 nt, Artificial Sequence
  Description of Artificial Sequence: Synthetic oligonucleotide
cugucuccacaggacccuc

SEQ ID NO: 2185789 - RNA, 19 nt, Artificial Sequence
  Description of Artificial Sequence: Synthetic oligonucleotide
cucuuccacggcguaggga

SEQ ID NO: 2185790 - RNA, 19 nt, Artificial Sequence
  Description of Artificial Sequence: Synthetic oligonucleotide
cacuucaguugaacacucu

SEQ ID NO: 2185791 - RNA, 19 nt, Artificial Sequence
  Description of Artificial Sequence: Synthetic oligonucleotide
cagcguuagaccucaucuu

SEQ ID NO: 2185792 - RNA, 19 nt, Artificial Sequence
  Description of Artificial Sequence: Synthetic oligonucleotide
cagccgguucauggcggcc

SEQ ID NO: 2185793 - RNA, 19 nt, Artificial Sequence
  Description of Artificial Sequence: Synthetic oligonucleotide
ccaggcuuggucucuguua

SEQ ID NO: 2185794 - RNA, 19 nt, Artificial Sequence
  Description of Artificial Sequence: Synthetic oligonucleotide
uccacggcguagggaucgu

SEQ ID NO: 2185795 - RNA, 19 nt, Artificial Sequence
  Description of Artificial Sequence: Synthetic oligonucleotide
cucggcucuuccacggcgu

SEQ ID NO: 2185796 - RNA, 19 nt, Artificial Sequence
  Description of Artificial Sequence: Synthetic oligonucleotide
cuuucuccaguaagacauu

SEQ ID NO: 2185797 - RNA, 19 nt, Artificial Sequence
  Description of Artificial Sequence: Synthetic oligonucleotide
cgaagacccuccugucccc

SEQ ID NO: 2185798 - RNA, 19 nt, Artificial Sequence
  Description of Artificial Sequence: Synthetic oligonucleotide
cgucgcucggcucuuccac

SEQ ID NO: 2185799 - RNA, 19 nt, Artificial Sequence
  Description of Artificial Sequence: Synthetic oligonucleotide
ggcaaucaaggcacagugu

SEQ ID NO: 2185800 - RNA, 19 nt, Artificial Sequence
  Description of Artificial Sequence: Synthetic oligonucleotide
cggcguagggaucguaauc

SEQ ID NO: 2185801 - RNA, 19 nt, Artificial Sequence
  Description of Artificial Sequence: Synthetic oligonucleotide
gcguuagaccucaucuucu

SEQ ID NO: 2185802 - RNA, 19 nt, Artificial Sequence
  Description of Artificial Sequence: Synthetic oligonucleotide
ccccauggaggacagcuua

SEQ ID NO: 2185803 - RNA, 19 nt, Artificial Sequence
  Description of Artificial Sequence: Synthetic oligonucleotide
ggacagcuuauccuccauu

SEQ ID NO: 2185804 - RNA, 19 nt, Artificial Sequence
  Description of Artificial Sequence: Synthetic oligonucleotide
cgguucauggcggccuagg

SEQ ID NO: 2185805 - RNA, 19 nt, Artificial Sequence
  Description of Artificial Sequence: Synthetic oligonucleotide
uccucgucgcucggcucuu

SEQ ID NO: 2185806 - RNA, 19 nt, Artificial Sequence
  Description of Artificial Sequence: Synthetic oligonucleotide
cccucagcguuagaccuca

SEQ ID NO: 2185807 - RNA, 19 nt, Artificial Sequence
  Description of Artificial Sequence: Synthetic oligonucleotide
gcucuguacugagucuugu

SEQ ID NO: 2185808 - RNA, 19 nt, Artificial Sequence
  Description of Artificial Sequence: Synthetic oligonucleotide
caacccaggcuuggucucu

SEQ ID NO: 2185809 - RNA, 19 nt, Artificial Sequence
  Description of Artificial Sequence: Synthetic oligonucleotide
gcguagggaucguaaucau

SEQ ID NO: 2185810 - RNA, 19 nt, Artificial Sequence
  Description of Artificial Sequence: Synthetic oligonucleotide
ccggaugaguuuucguuuu

SEQ ID NO: 2185811 - RNA, 19 nt, Artificial Sequence
  Description of Artificial Sequence: Synthetic oligonucleotide
gcaucaacccaggcuuggu

SEQ ID NO: 2185812 - RNA, 19 nt, Artificial Sequence
  Description of Artificial Sequence: Synthetic oligonucleotide
gcggccuagggaggccuac

SEQ ID NO: 2185813 - RNA, 19 nt, Artificial Sequence
  Description of Artificial Sequence: Synthetic oligonucleotide
gcaggccgggcaauucaaa

SEQ ID NO: 2185814 - RNA, 19 nt, Artificial Sequence
  Description of Artificial Sequence: Synthetic oligonucleotide
cguagacugccacuucagu

SEQ ID NO: 2185815 - RNA, 19 nt, Artificial Sequence
  Description of Artificial Sequence: Synthetic oligonucleotide
caggacccucagcguuaga

SEQ ID NO: 2185816 - RNA, 19 nt, Artificial Sequence
  Description of Artificial Sequence: Synthetic oligonucleotide
ccgguucauggcggccuag

SEQ ID NO: 2185817 - RNA, 19 nt, Artificial Sequence
  Description of Artificial Sequence: Synthetic oligonucleotide
gccgguucauggcggccua

SEQ ID NO: 2185818 - RNA, 19 nt, Artificial Sequence
  Description of Artificial Sequence: Synthetic oligonucleotide
cguuagaccucaucuucuu

SEQ ID NO: 2185819 - RNA, 19 nt, Artificial Sequence
  Description of Artificial Sequence: Synthetic oligonucleotide
ccucgucgcucggcucuuc

SEQ ID NO: 2185820 - RNA, 19 nt, Artificial Sequence
  Description of Artificial Sequence: Synthetic oligonucleotide
ccacggcguagggaucgua

SEQ ID NO: 2185821 - RNA, 19 nt, Artificial Sequence
  Description of Artificial Sequence: Synthetic oligonucleotide
ccucagcguuagaccucau

SEQ ID NO: 2185822 - RNA, 19 nt, Artificial Sequence
  Description of Artificial Sequence: Synthetic oligonucleotide
ucaagaauaaauuaaacac

SEQ ID NO: 2185823 - RNA, 19 nt, Artificial Sequence
  Description of Artificial Sequence: Synthetic oligonucleotide
aucauucagaaccaaagcc

SEQ ID NO: 2185824 - RNA, 19 nt, Artificial Sequence
  Description of Artificial Sequence: Synthetic oligonucleotide
aaugguuugcaguaaacag

SEQ ID NO: 2185825 - RNA, 19 nt, Artificial Sequence
  Description of Artificial Sequence: Synthetic oligonucleotide
caaugcucaauaaauaugg

SEQ ID NO: 2185826 - RNA, 19 nt, Artificial Sequence
  Description of Artificial Sequence: Synthetic oligonucleotide
uggauauucccacugauag

SEQ ID NO: 2185827 - RNA, 19 nt, Artificial Sequence
  Description of Artificial Sequence: Synthetic oligonucleotide
gauagugugcacuaggugc

SEQ ID NO: 2185828 - RNA, 19 nt, Artificial Sequence
  Description of Artificial Sequence: Synthetic oligonucleotide
aaggauaaggcucagucug

SEQ ID NO: 2185829 - RNA, 19 nt, Artificial Sequence
  Description of Artificial Sequence: Synthetic oligonucleotide
acugauagggcauagccac

SEQ ID NO: 2185830 - RNA, 19 nt, Artificial Sequence
  Description of Artificial Sequence: Synthetic oligonucleotide
aaaaucugaggauagugug

SEQ ID NO: 2185831 - RNA, 19 nt, Artificial Sequence
  Description of Artificial Sequence: Synthetic oligonucleotide
uuuaguaucggugaugaag

SEQ ID NO: 2185832 - RNA, 19 nt, Artificial Sequence
  Description of Artificial Sequence: Synthetic oligonucleotide
aacacuagguacaugacgg

SEQ ID NO: 2185833 - RNA, 19 nt, Artificial Sequence
  Description of Artificial Sequence: Synthetic oligonucleotide
aauuugaccaagagaaggc

SEQ ID NO: 2185834 - RNA, 19 nt, Artificial Sequence
  Description of Artificial Sequence: Synthetic oligonucleotide
aauauggauauucccacug

SEQ ID NO: 2185835 - RNA, 19 nt, Artificial Sequence
  Description of Artificial Sequence: Synthetic oligonucleotide
aaacacuacagauuuguca

SEQ ID NO: 2185836 - RNA, 19 nt, Artificial Sequence
  Description of Artificial Sequence: Synthetic oligonucleotide
gaauuugaccaagagaagg

SEQ ID NO: 2185837 - RNA, 19 nt, Artificial Sequence
  Description of Artificial Sequence: Synthetic oligonucleotide
uuaguaucggugaugaaga

SEQ ID NO: 2185838 - RNA, 19 nt, Artificial Sequence
  Description of Artificial Sequence: Synthetic oligonucleotide
ugugacaagagccucaggu

SEQ ID NO: 2185839 - RNA, 19 nt, Artificial Sequence
  Description of Artificial Sequence: Synthetic oligonucleotide
gacagucuuaacuuuauug

SEQ ID NO: 2185840 - RNA, 19 nt, Artificial Sequence
  Description of Artificial Sequence: Synthetic oligonucleotide
uacagauugaaguagaauu

SEQ ID NO: 2185841 - RNA, 19 nt, Artificial Sequence
  Description of Artificial Sequence: Synthetic oligonucleotide
ucauuuacguuucuucucc

SEQ ID NO: 2185842 - RNA, 19 nt, Artificial Sequence
  Description of Artificial Sequence: Synthetic oligonucleotide
uugagcgucacacucaucu

SEQ ID NO: 2185843 - RNA, 19 nt, Artificial Sequence
  Description of Artificial Sequence: Synthetic oligonucleotide
aucaacacuagguacauga

SEQ ID NO: 2185844 - RNA, 19 nt, Artificial Sequence
  Description of Artificial Sequence: Synthetic oligonucleotide
augaccuacagauugaagu

SEQ ID NO: 2185845 - RNA, 19 nt, Artificial Sequence
  Description of Artificial Sequence: Synthetic oligonucleotide
agaacucaaggccaaaauc

SEQ ID NO: 2185846 - RNA, 19 nt, Artificial Sequence
  Description of Artificial Sequence: Synthetic oligonucleotide
uaaauauggauauucccac

SEQ ID NO: 2185847 - RNA, 19 nt, Artificial Sequence
  Description of Artificial Sequence: Synthetic oligonucleotide
acagacaucggucauccgg

SEQ ID NO: 2185848 - RNA, 19 nt, Artificial Sequence
  Description of Artificial Sequence: Synthetic oligonucleotide
aaggaauuugaccaagaga

SEQ ID NO: 2185849 - RNA, 19 nt, Artificial Sequence
  Description of Artificial Sequence: Synthetic oligonucleotide
aagaguuucuuacuguagu

SEQ ID NO: 2185850 - RNA, 19 nt, Artificial Sequence
  Description of Artificial Sequence: Synthetic oligonucleotide
aggaauuugaccaagagaa

SEQ ID NO: 2185851 - RNA, 19 nt, Artificial Sequence
  Description of Artificial Sequence: Synthetic oligonucleotide
auguacguagaucagcuuc

SEQ ID NO: 2185852 - RNA, 19 nt, Artificial Sequence
  Description of Artificial Sequence: Synthetic oligonucleotide
gagucuaagaguuucuuac

SEQ ID NO: 2185853 - RNA, 19 nt, Artificial Sequence
  Description of Artificial Sequence: Synthetic oligonucleotide
caauaaauauggauauucc

SEQ ID NO: 2185854 - RNA, 19 nt, Artificial Sequence
  Description of Artificial Sequence: Synthetic oligonucleotide
uaaaugaggggagcgaugg

SEQ ID NO: 2185855 - RNA, 19 nt, Artificial Sequence
  Description of Artificial Sequence: Synthetic oligonucleotide
uuaaacacuacagauuugu

SEQ ID NO: 2185856 - RNA, 19 nt, Artificial Sequence
  Description of Artificial Sequence: Synthetic oligonucleotide
uaaggaauuugaccaagag

SEQ ID NO: 2185857 - RNA, 19 nt, Artificial Sequence
  Description of Artificial Sequence: Synthetic oligonucleotide
accagauguacguagauca

SEQ ID NO: 2185858 - RNA, 19 nt, Artificial Sequence
  Description of Artificial Sequence: Synthetic oligonucleotide
gcuaauguuguuucgaggg

SEQ ID NO: 2185859 - RNA, 19 nt, Artificial Sequence
  Description of Artificial Sequence: Synthetic oligonucleotide
auaaauauggauauuccca

SEQ ID NO: 2185860 - RNA, 19 nt, Artificial Sequence
  Description of Artificial Sequence: Synthetic oligonucleotide
acaguugccaggcaugaac

SEQ ID NO: 2185861 - RNA, 19 nt, Artificial Sequence
  Description of Artificial Sequence: Synthetic oligonucleotide
aagagagagggcacaaugc

SEQ ID NO: 2185862 - RNA, 19 nt, Artificial Sequence
  Description of Artificial Sequence: Synthetic oligonucleotide
uaugaccagauguacguag

SEQ ID NO: 2185863 - RNA, 19 nt, Artificial Sequence
  Description of Artificial Sequence: Synthetic oligonucleotide
aacuuggacugccaguauc

SEQ ID NO: 2185864 - RNA, 19 nt, Artificial Sequence
  Description of Artificial Sequence: Synthetic oligonucleotide
ucucuuuuaguaucgguga

SEQ ID NO: 2185865 - RNA, 19 nt, Artificial Sequence
  Description of Artificial Sequence: Synthetic oligonucleotide
ucugcacugauuuauucca

SEQ ID NO: 2185866 - RNA, 19 nt, Artificial Sequence
  Description of Artificial Sequence: Synthetic oligonucleotide
agguacaugacggagacag

SEQ ID NO: 2185867 - RNA, 19 nt, Artificial Sequence
  Description of Artificial Sequence: Synthetic oligonucleotide
uaaggcucagucuggaaag

SEQ ID NO: 2185868 - RNA, 19 nt, Artificial Sequence
  Description of Artificial Sequence: Synthetic oligonucleotide
ugcuggugaaccaagaguc

SEQ ID NO: 2185869 - RNA, 19 nt, Artificial Sequence
  Description of Artificial Sequence: Synthetic oligonucleotide
aaaaugguuugcaguaaac

SEQ ID NO: 2185870 - RNA, 19 nt, Artificial Sequence
  Description of Artificial Sequence: Synthetic oligonucleotide
uguaguacaguugccaggc

SEQ ID NO: 2185871 - RNA, 19 nt, Artificial Sequence
  Description of Artificial Sequence: Synthetic oligonucleotide
uaagaguuucuuacuguag

SEQ ID NO: 2185872 - RNA, 19 nt, Artificial Sequence
  Description of Artificial Sequence: Synthetic oligonucleotide
uguuucgagggaaggagag

SEQ ID NO: 2185873 - RNA, 19 nt, Artificial Sequence
  Description of Artificial Sequence: Synthetic oligonucleotide
aacagcucccuucaaucag

SEQ ID NO: 2185874 - RNA, 19 nt, Artificial Sequence
  Description of Artificial Sequence: Synthetic oligonucleotide
aaaugguuugcaguaaaca

SEQ ID NO: 2185875 - RNA, 19 nt, Artificial Sequence
  Description of Artificial Sequence: Synthetic oligonucleotide
auaaauggaaguaaggaau

SEQ ID NO: 2185876 - RNA, 19 nt, Artificial Sequence
  Description of Artificial Sequence: Synthetic oligonucleotide
aaaccaaacaggaagcggu

SEQ ID NO: 2185877 - RNA, 19 nt, Artificial Sequence
  Description of Artificial Sequence: Synthetic oligonucleotide
uuggucaugugacaagagc

SEQ ID NO: 2185878 - RNA, 19 nt, Artificial Sequence
  Description of Artificial Sequence: Synthetic oligonucleotide
acucuugagcgucacacuc

SEQ ID NO: 2185879 - RNA, 19 nt, Artificial Sequence
  Description of Artificial Sequence: Synthetic oligonucleotide
aauguugcuugccccauga

SEQ ID NO: 2185880 - RNA, 19 nt, Artificial Sequence
  Description of Artificial Sequence: Synthetic oligonucleotide
gaugaagaggugauaaaug

SEQ ID NO: 2185881 - RNA, 19 nt, Artificial Sequence
  Description of Artificial Sequence: Synthetic oligonucleotide
ugacaagagccucaggugu

SEQ ID NO: 2185882 - RNA, 19 nt, Artificial Sequence
  Description of Artificial Sequence: Synthetic oligonucleotide
ugccccaugaccuacagau

SEQ ID NO: 2185883 - RNA, 19 nt, Artificial Sequence
  Description of Artificial Sequence: Synthetic oligonucleotide
agaggugauaaauggaagu

SEQ ID NO: 2185884 - RNA, 19 nt, Artificial Sequence
  Description of Artificial Sequence: Synthetic oligonucleotide
ucuuacuguaguacaguug

SEQ ID NO: 2185885 - RNA, 19 nt, Artificial Sequence
  Description of Artificial Sequence: Synthetic oligonucleotide
aaauauggauauucccacu

SEQ ID NO: 2185886 - RNA, 19 nt, Artificial Sequence
  Description of Artificial Sequence: Synthetic oligonucleotide
gaggauagugugcacuagg

SEQ ID NO: 2185887 - RNA, 19 nt, Artificial Sequence
  Description of Artificial Sequence: Synthetic oligonucleotide
gaaggcccaagagagaggg

SEQ ID NO: 2185888 - RNA, 19 nt, Artificial Sequence
  Description of Artificial Sequence: Synthetic oligonucleotide
uguacguagaucagcuucu

SEQ ID NO: 2185889 - RNA, 19 nt, Artificial Sequence
  Description of Artificial Sequence: Synthetic oligonucleotide
gaaaccaaacaggaagcgg

SEQ ID NO: 2185890 - RNA, 19 nt, Artificial Sequence
  Description of Artificial Sequence: Synthetic oligonucleotide
aguuucuuacuguaguaca

SEQ ID NO: 2185891 - RNA, 19 nt, Artificial Sequence
  Description of Artificial Sequence: Synthetic oligonucleotide
ucuaagaguuucuuacugu

SEQ ID NO: 2185892 - RNA, 19 nt, Artificial Sequence
  Description of Artificial Sequence: Synthetic oligonucleotide
cuagucaagaauaaauuaa

SEQ ID NO: 2185893 - RNA, 19 nt, Artificial Sequence
  Description of Artificial Sequence: Synthetic oligonucleotide
auagugugcacuaggugcc

SEQ ID NO: 2185894 - RNA, 19 nt, Artificial Sequence
  Description of Artificial Sequence: Synthetic oligonucleotide
ugcaguaaacagaguagcc

SEQ ID NO: 2185895 - RNA, 19 nt, Artificial Sequence
  Description of Artificial Sequence: Synthetic oligonucleotide
caacacuagguacaugacg

SEQ ID NO: 2185896 - RNA, 19 nt, Artificial Sequence
  Description of Artificial Sequence: Synthetic oligonucleotide
acuguaguacaguugccag

SEQ ID NO: 2185897 - RNA, 19 nt, Artificial Sequence
  Description of Artificial Sequence: Synthetic oligonucleotide
ugugcuggugaaccaagag

SEQ ID NO: 2185898 - RNA, 19 nt, Artificial Sequence
  Description of Artificial Sequence: Synthetic oligonucleotide
ucaggugucccacacacau

SEQ ID NO: 2185899 - RNA, 19 nt, Artificial Sequence
  Description of Artificial Sequence: Synthetic oligonucleotide
uguuccacagacaucgguc

SEQ ID NO: 2185900 - RNA, 19 nt, Artificial Sequence
  Description of Artificial Sequence: Synthetic oligonucleotide
uaaaaugguuugcaguaaa

SEQ ID NO: 2185901 - RNA, 19 nt, Artificial Sequence
  Description of Artificial Sequence: Synthetic oligonucleotide
gauugaaguagaauuucug

SEQ ID NO: 2185902 - RNA, 19 nt, Artificial Sequence
  Description of Artificial Sequence: Synthetic oligonucleotide
uggcuagucaagaauaaau

SEQ ID NO: 2185903 - RNA, 19 nt, Artificial Sequence
  Description of Artificial Sequence: Synthetic oligonucleotide
ugaacagcucccuucaauc

SEQ ID NO: 2185904 - RNA, 19 nt, Artificial Sequence
  Description of Artificial Sequence: Synthetic oligonucleotide
uaaauggaaguaaggaauu

SEQ ID NO: 2185905 - RNA, 19 nt, Artificial Sequence
  Description of Artificial Sequence: Synthetic oligonucleotide
ucggucauccgguuugugg

SEQ ID NO: 2185906 - RNA, 19 nt, Artificial Sequence
  Description of Artificial Sequence: Synthetic oligonucleotide
ggagauucugaacagcucc

SEQ ID NO: 2185907 - RNA, 19 nt, Artificial Sequence
  Description of Artificial Sequence: Synthetic oligonucleotide
agaauaaauuaaacacuac

SEQ ID NO: 2185908 - RNA, 19 nt, Artificial Sequence
  Description of Artificial Sequence: Synthetic oligonucleotide
gagcgucacacucaucugg

SEQ ID NO: 2185909 - RNA, 19 nt, Artificial Sequence
  Description of Artificial Sequence: Synthetic oligonucleotide
uugcaguaaacagaguagc

SEQ ID NO: 2185910 - RNA, 19 nt, Artificial Sequence
  Description of Artificial Sequence: Synthetic oligonucleotide
auagggcauagccacuugg

SEQ ID NO: 2185911 - RNA, 19 nt, Artificial Sequence
  Description of Artificial Sequence: Synthetic oligonucleotide
cagaucucuuuuaguaucg

SEQ ID NO: 2185912 - RNA, 19 nt, Artificial Sequence
  Description of Artificial Sequence: Synthetic oligonucleotide
agucuuaacuuuauugaag

SEQ ID NO: 2185913 - RNA, 19 nt, Artificial Sequence
  Description of Artificial Sequence: Synthetic oligonucleotide
aguaucaacacuagguaca

SEQ ID NO: 2185914 - RNA, 19 nt, Artificial Sequence
  Description of Artificial Sequence: Synthetic oligonucleotide
guuguuucgagggaaggag

SEQ ID NO: 2185915 - RNA, 19 nt, Artificial Sequence
  Description of Artificial Sequence: Synthetic oligonucleotide
uagcuaauguuguuucgag

SEQ ID NO: 2185916 - RNA, 19 nt, Artificial Sequence
  Description of Artificial Sequence: Synthetic oligonucleotide
ugaaagucgcugccgucgg

SEQ ID NO: 2185917 - RNA, 19 nt, Artificial Sequence
  Description of Artificial Sequence: Synthetic oligonucleotide
agcgauggagaagagcccc

SEQ ID NO: 2185918 - RNA, 19 nt, Artificial Sequence
  Description of Artificial Sequence: Synthetic oligonucleotide
uucauuuacguuucuucuc

SEQ ID NO: 2185919 - RNA, 19 nt, Artificial Sequence
  Description of Artificial Sequence: Synthetic oligonucleotide
aagucgcugccgucggugc

SEQ ID NO: 2185920 - RNA, 19 nt, Artificial Sequence
  Description of Artificial Sequence: Synthetic oligonucleotide
aucucuuuuaguaucggug

SEQ ID NO: 2185921 - RNA, 19 nt, Artificial Sequence
  Description of Artificial Sequence: Synthetic oligonucleotide
agcagaugguaacagagaa

SEQ ID NO: 2185922 - RNA, 19 nt, Artificial Sequence
  Description of Artificial Sequence: Synthetic oligonucleotide
gagagcaccagguagcuaa

SEQ ID NO: 2185923 - RNA, 19 nt, Artificial Sequence
  Description of Artificial Sequence: Synthetic oligonucleotide
aguaucggugaugaagagg

SEQ ID NO: 2185924 - RNA, 19 nt, Artificial Sequence
  Description of Artificial Sequence: Synthetic oligonucleotide
ggagcgauggagaagagcc

SEQ ID NO: 2185925 - RNA, 19 nt, Artificial Sequence
  Description of Artificial Sequence: Synthetic oligonucleotide
uuguggcuagucaagaaua

SEQ ID NO: 2185926 - RNA, 19 nt, Artificial Sequence
  Description of Artificial Sequence: Synthetic oligonucleotide
acuucccaaauguugcuug

SEQ ID NO: 2185927 - RNA, 19 nt, Artificial Sequence
  Description of Artificial Sequence: Synthetic oligonucleotide
caguaucaacacuagguac

SEQ ID NO: 2185928 - RNA, 19 nt, Artificial Sequence
  Description of Artificial Sequence: Synthetic oligonucleotide
caucugguagugcauggcg

SEQ ID NO: 2185929 - RNA, 19 nt, Artificial Sequence
  Description of Artificial Sequence: Synthetic oligonucleotide
acaucggucauccgguuug

SEQ ID NO: 2185930 - RNA, 19 nt, Artificial Sequence
  Description of Artificial Sequence: Synthetic oligonucleotide
ugaccuacagauugaagua

SEQ ID NO: 2185931 - RNA, 19 nt, Artificial Sequence
  Description of Artificial Sequence: Synthetic oligonucleotide
ucaggcaggcuucauuuac

SEQ ID NO: 2185932 - RNA, 19 nt, Artificial Sequence
  Description of Artificial Sequence: Synthetic oligonucleotide
cagcggagaaaccaaacag

SEQ ID NO: 2185933 - RNA, 19 nt, Artificial Sequence
  Description of Artificial Sequence: Synthetic oligonucleotide
ugugugcuggugaaccaag

SEQ ID NO: 2185934 - RNA, 19 nt, Artificial Sequence
  Description of Artificial Sequence: Synthetic oligonucleotide
ucuuuuaguaucggugaug

SEQ ID NO: 2185935 - RNA, 19 nt, Artificial Sequence
  Description of Artificial Sequence: Synthetic oligonucleotide
uuucgagggaaggagagaa

SEQ ID NO: 2185936 - RNA, 19 nt, Artificial Sequence
  Description of Artificial Sequence: Synthetic oligonucleotide
ugaacuuggacugccagua

SEQ ID NO: 2185937 - RNA, 19 nt, Artificial Sequence
  Description of Artificial Sequence: Synthetic oligonucleotide
ugcacuaggugccaacauc

SEQ ID NO: 2185938 - RNA, 19 nt, Artificial Sequence
  Description of Artificial Sequence: Synthetic oligonucleotide
agucuaagaguuucuuacu

SEQ ID NO: 2185939 - RNA, 19 nt, Artificial Sequence
  Description of Artificial Sequence: Synthetic oligonucleotide
auauggauauucccacuga

SEQ ID NO: 2185940 - RNA, 19 nt, Artificial Sequence
  Description of Artificial Sequence: Synthetic oligonucleotide
cuuuuaguaucggugauga

SEQ ID NO: 2185941 - RNA, 19 nt, Artificial Sequence
  Description of Artificial Sequence: Synthetic oligonucleotide
uguggcuagucaagaauaa

SEQ ID NO: 2185942 - RNA, 19 nt, Artificial Sequence
  Description of Artificial Sequence: Synthetic oligonucleotide
ugcacugauuuauuccaga

SEQ ID NO: 2185943 - RNA, 19 nt, Artificial Sequence
  Description of Artificial Sequence: Synthetic oligonucleotide
uaaacacuacagauuuguc

SEQ ID NO: 2185944 - RNA, 19 nt, Artificial Sequence
  Description of Artificial Sequence: Synthetic oligonucleotide
uuguuucgagggaaggaga

SEQ ID NO: 2185945 - RNA, 19 nt, Artificial Sequence
  Description of Artificial Sequence: Synthetic oligonucleotide
caugaacuuggacugccag

SEQ ID NO: 2185946 - RNA, 19 nt, Artificial Sequence
  Description of Artificial Sequence: Synthetic oligonucleotide
agaaggcaaggauaaggcu

SEQ ID NO: 2185947 - RNA, 19 nt, Artificial Sequence
  Description of Artificial Sequence: Synthetic oligonucleotide
caaacaggaagcgguaggc

SEQ ID NO: 2185948 - RNA, 19 nt, Artificial Sequence
  Description of Artificial Sequence: Synthetic oligonucleotide
accaagagaaggcaaggau

SEQ ID NO: 2185949 - RNA, 19 nt, Artificial Sequence
  Description of Artificial Sequence: Synthetic oligonucleotide
gaaccaagagucuaagagu

SEQ ID NO: 2185950 - RNA, 19 nt, Artificial Sequence
  Description of Artificial Sequence: Synthetic oligonucleotide
gaguuucuuacuguaguac

SEQ ID NO: 2185951 - RNA, 19 nt, Artificial Sequence
  Description of Artificial Sequence: Synthetic oligonucleotide
gaccuacagauugaaguag

SEQ ID NO: 2185952 - RNA, 19 nt, Artificial Sequence
  Description of Artificial Sequence: Synthetic oligonucleotide
agauguacguagaucagcu

SEQ ID NO: 2185953 - RNA, 19 nt, Artificial Sequence
  Description of Artificial Sequence: Synthetic oligonucleotide
uaauguuguuucgagggaa

SEQ ID NO: 2185954 - RNA, 19 nt, Artificial Sequence
  Description of Artificial Sequence: Synthetic oligonucleotide
gauuucacucuugagcguc

SEQ ID NO: 2185955 - RNA, 19 nt, Artificial Sequence
  Description of Artificial Sequence: Synthetic oligonucleotide
agccacuuggucaugugac

SEQ ID NO: 2185956 - RNA, 19 nt, Artificial Sequence
  Description of Artificial Sequence: Synthetic oligonucleotide
ucccacacacaucuuggca

SEQ ID NO: 2185957 - RNA, 19 nt, Artificial Sequence
  Description of Artificial Sequence: Synthetic oligonucleotide
gaagcgguaggccuugcca

SEQ ID NO: 2185958 - RNA, 19 nt, Artificial Sequence
  Description of Artificial Sequence: Synthetic oligonucleotide
uuaaaaugguuugcaguaa

SEQ ID NO: 2185959 - RNA, 19 nt, Artificial Sequence
  Description of Artificial Sequence: Synthetic oligonucleotide
aaugcucaauaaauaugga

SEQ ID NO: 2185960 - RNA, 19 nt, Artificial Sequence
  Description of Artificial Sequence: Synthetic oligonucleotide
ucaucucagcagaugguaa

SEQ ID NO: 2185961 - RNA, 19 nt, Artificial Sequence
  Description of Artificial Sequence: Synthetic oligonucleotide
acaagagccucaggugucc

SEQ ID NO: 2185962 - RNA, 19 nt, Artificial Sequence
  Description of Artificial Sequence: Synthetic oligonucleotide
ugcugaaagucgcugccgu

SEQ ID NO: 2185963 - RNA, 19 nt, Artificial Sequence
  Description of Artificial Sequence: Synthetic oligonucleotide
gcaaggauaaggcucaguc

SEQ ID NO: 2185964 - RNA, 19 nt, Artificial Sequence
  Description of Artificial Sequence: Synthetic oligonucleotide
gaaguagaauuucugcacu

SEQ ID NO: 2185965 - RNA, 19 nt, Artificial Sequence
  Description of Artificial Sequence: Synthetic oligonucleotide
ugucaucucagcagauggu

SEQ ID NO: 2185966 - RNA, 19 nt, Artificial Sequence
  Description of Artificial Sequence: Synthetic oligonucleotide
aguccauggagauucugaa

SEQ ID NO: 2185967 - RNA, 19 nt, Artificial Sequence
  Description of Artificial Sequence: Synthetic oligonucleotide
acuaggugccaacaucaca

SEQ ID NO: 2185968 - RNA, 19 nt, Artificial Sequence
  Description of Artificial Sequence: Synthetic oligonucleotide
ucuugagcgucacacucau

SEQ ID NO: 2185969 - RNA, 19 nt, Artificial Sequence
  Description of Artificial Sequence: Synthetic oligonucleotide
aagcgguaggccuugccau

SEQ ID NO: 2185970 - RNA, 19 nt, Artificial Sequence
  Description of Artificial Sequence: Synthetic oligonucleotide
augaacuuggacugccagu

SEQ ID NO: 2185971 - RNA, 19 nt, Artificial Sequence
  Description of Artificial Sequence: Synthetic oligonucleotide
guaucggugaugaagaggu

SEQ ID NO: 2185972 - RNA, 19 nt, Artificial Sequence
  Description of Artificial Sequence: Synthetic oligonucleotide
uagccacuuggucauguga

SEQ ID NO: 2185973 - RNA, 19 nt, Artificial Sequence
  Description of Artificial Sequence: Synthetic oligonucleotide
ggauauucccacugauagg

SEQ ID NO: 2185974 - RNA, 19 nt, Artificial Sequence
  Description of Artificial Sequence: Synthetic oligonucleotide
uacguagaucagcuucuug

SEQ ID NO: 2185975 - RNA, 19 nt, Artificial Sequence
  Description of Artificial Sequence: Synthetic oligonucleotide
cauaugaccagauguacgu

SEQ ID NO: 2185976 - RNA, 19 nt, Artificial Sequence
  Description of Artificial Sequence: Synthetic oligonucleotide
cuacagauuugucaucuca

SEQ ID NO: 2185977 - RNA, 19 nt, Artificial Sequence
  Description of Artificial Sequence: Synthetic oligonucleotide
acaugacggagacagcgga

SEQ ID NO: 2185978 - RNA, 19 nt, Artificial Sequence
  Description of Artificial Sequence: Synthetic oligonucleotide
gagauucugaacagcuccc

SEQ ID NO: 2185979 - RNA, 19 nt, Artificial Sequence
  Description of Artificial Sequence: Synthetic oligonucleotide
uagugcauggcgacgcgcu

SEQ ID NO: 2185980 - RNA, 19 nt, Artificial Sequence
  Description of Artificial Sequence: Synthetic oligonucleotide
auuugaccaagagaaggca

SEQ ID NO: 2185981 - RNA, 19 nt, Artificial Sequence
  Description of Artificial Sequence: Synthetic oligonucleotide
uucgagggaaggagagaag

SEQ ID NO: 2185982 - RNA, 19 nt, Artificial Sequence
  Description of Artificial Sequence: Synthetic oligonucleotide
caugaccuacagauugaag

SEQ ID NO: 2185983 - RNA, 19 nt, Artificial Sequence
  Description of Artificial Sequence: Synthetic oligonucleotide
acugccaguaucaacacua

SEQ ID NO: 2185984 - RNA, 19 nt, Artificial Sequence
  Description of Artificial Sequence: Synthetic oligonucleotide
cagauguacguagaucagc

SEQ ID NO: 2185985 - RNA, 19 nt, Artificial Sequence
  Description of Artificial Sequence: Synthetic oligonucleotide
agaguuucuuacuguagua

SEQ ID NO: 2185986 - RNA, 19 nt, Artificial Sequence
  Description of Artificial Sequence: Synthetic oligonucleotide
uaguaucggugaugaagag

SEQ ID NO: 2185987 - RNA, 19 nt, Artificial Sequence
  Description of Artificial Sequence: Synthetic oligonucleotide
gcuucauuuacguuucuuc

SEQ ID NO: 2185988 - RNA, 19 nt, Artificial Sequence
  Description of Artificial Sequence: Synthetic oligonucleotide
gcugccauaaaugagggga

SEQ ID NO: 2185989 - RNA, 19 nt, Artificial Sequence
  Description of Artificial Sequence: Synthetic oligonucleotide
ucuuaacuuuauugaaguu

SEQ ID NO: 2185990 - RNA, 19 nt, Artificial Sequence
  Description of Artificial Sequence: Synthetic oligonucleotide
acagauugaaguagaauuu

SEQ ID NO: 2185991 - RNA, 19 nt, Artificial Sequence
  Description of Artificial Sequence: Synthetic oligonucleotide
ccauaugaccagauguacg

SEQ ID NO: 2185992 - RNA, 19 nt, Artificial Sequence
  Description of Artificial Sequence: Synthetic oligonucleotide
cacugauuuauuccagauc

SEQ ID NO: 2185993 - RNA, 19 nt, Artificial Sequence
  Description of Artificial Sequence: Synthetic oligonucleotide
aguacaguugccaggcaug

SEQ ID NO: 2185994 - RNA, 19 nt, Artificial Sequence
  Description of Artificial Sequence: Synthetic oligonucleotide
uggugaaccaagagucuaa

SEQ ID NO: 2185995 - RNA, 19 nt, Artificial Sequence
  Description of Artificial Sequence: Synthetic oligonucleotide
agagucuaagaguuucuua

SEQ ID NO: 2185996 - RNA, 19 nt, Artificial Sequence
  Description of Artificial Sequence: Synthetic oligonucleotide
acuuggucaugugacaaga

SEQ ID NO: 2185997 - RNA, 19 nt, Artificial Sequence
  Description of Artificial Sequence: Synthetic oligonucleotide
agccccaugcugaucaugg

SEQ ID NO: 2185998 - RNA, 19 nt, Artificial Sequence
  Description of Artificial Sequence: Synthetic oligonucleotide
agaguugcugggcggcagg

SEQ ID NO: 2185999 - RNA, 19 nt, Artificial Sequence
  Description of Artificial Sequence: Synthetic oligonucleotide
guuccacagacaucgguca

SEQ ID NO: 2186000 - RNA, 19 nt, Artificial Sequence
  Description of Artificial Sequence: Synthetic oligonucleotide
gagggcacaaugcucaaua

SEQ ID NO: 2186001 - RNA, 19 nt, Artificial Sequence
  Description of Artificial Sequence: Synthetic oligonucleotide
caaaaucugaggauagugu

SEQ ID NO: 2186002 - RNA, 19 nt, Artificial Sequence
  Description of Artificial Sequence: Synthetic oligonucleotide
cagaugguaacagagaacu

SEQ ID NO: 2186003 - RNA, 19 nt, Artificial Sequence
  Description of Artificial Sequence: Synthetic oligonucleotide
ugugcacuaggugccaaca

SEQ ID NO: 2186004 - RNA, 19 nt, Artificial Sequence
  Description of Artificial Sequence: Synthetic oligonucleotide
guagcuaauguuguuucga

SEQ ID NO: 2186005 - RNA, 19 nt, Artificial Sequence
  Description of Artificial Sequence: Synthetic oligonucleotide
agaucucuuuuaguaucgg

SEQ ID NO: 2186006 - RNA, 19 nt, Artificial Sequence
  Description of Artificial Sequence: Synthetic oligonucleotide
gugucccacacacaucuug

SEQ ID NO: 2186007 - RNA, 19 nt, Artificial Sequence
  Description of Artificial Sequence: Synthetic oligonucleotide
caggcuucauuuacguuuc

SEQ ID NO: 2186008 - RNA, 19 nt, Artificial Sequence
  Description of Artificial Sequence: Synthetic oligonucleotide
uuggacugccaguaucaac

SEQ ID NO: 2186009 - RNA, 19 nt, Artificial Sequence
  Description of Artificial Sequence: Synthetic oligonucleotide
ugcugccauaaaugagggg

SEQ ID NO: 2186010 - RNA, 19 nt, Artificial Sequence
  Description of Artificial Sequence: Synthetic oligonucleotide
ugaggauagugugcacuag

SEQ ID NO: 2186011 - RNA, 19 nt, Artificial Sequence
  Description of Artificial Sequence: Synthetic oligonucleotide
aagagucuaagaguuucuu

SEQ ID NO: 2186012 - RNA, 19 nt, Artificial Sequence
  Description of Artificial Sequence: Synthetic oligonucleotide
caugugacaagagccucag

SEQ ID NO: 2186013 - RNA, 19 nt, Artificial Sequence
  Description of Artificial Sequence: Synthetic oligonucleotide
caugacggagacagcggag

SEQ ID NO: 2186014 - RNA, 19 nt, Artificial Sequence
  Description of Artificial Sequence: Synthetic oligonucleotide
agucgcugccgucggugcc

SEQ ID NO: 2186015 - RNA, 19 nt, Artificial Sequence
  Description of Artificial Sequence: Synthetic oligonucleotide
gauagggcauagccacuug

SEQ ID NO: 2186016 - RNA, 19 nt, Artificial Sequence
  Description of Artificial Sequence: Synthetic oligonucleotide
ugaccagauguacguagau

SEQ ID NO: 2186017 - RNA, 19 nt, Artificial Sequence
  Description of Artificial Sequence: Synthetic oligonucleotide
cacuagguacaugacggag

SEQ ID NO: 2186018 - RNA, 19 nt, Artificial Sequence
  Description of Artificial Sequence: Synthetic oligonucleotide
gaggugauaaauggaagua

SEQ ID NO: 2186019 - RNA, 19 nt, Artificial Sequence
  Description of Artificial Sequence: Synthetic oligonucleotide
gcuagucaagaauaaauua

SEQ ID NO: 2186020 - RNA, 19 nt, Artificial Sequence
  Description of Artificial Sequence: Synthetic oligonucleotide
auaaaugaggggagcgaug

SEQ ID NO: 2186021 - RNA, 19 nt, Artificial Sequence
  Description of Artificial Sequence: Synthetic oligonucleotide
ucacacucaucugguagug

SEQ ID NO: 2186022 - RNA, 19 nt, Artificial Sequence
  Description of Artificial Sequence: Synthetic oligonucleotide
ucccggugcugaaagucgc

SEQ ID NO: 2186023 - RNA, 19 nt, Artificial Sequence
  Description of Artificial Sequence: Synthetic oligonucleotide
aggugauaaauggaaguaa

SEQ ID NO: 2186024 - RNA, 19 nt, Artificial Sequence
  Description of Artificial Sequence: Synthetic oligonucleotide
ucauggagagcaccaggua

SEQ ID NO: 2186025 - RNA, 19 nt, Artificial Sequence
  Description of Artificial Sequence: Synthetic oligonucleotide
aucugaggauagugugcac

SEQ ID NO: 2186026 - RNA, 19 nt, Artificial Sequence
  Description of Artificial Sequence: Synthetic oligonucleotide
auguugcuugccccaugac

SEQ ID NO: 2186027 - RNA, 19 nt, Artificial Sequence
  Description of Artificial Sequence: Synthetic oligonucleotide
cuaauguuguuucgaggga

SEQ ID NO: 2186028 - RNA, 19 nt, Artificial Sequence
  Description of Artificial Sequence: Synthetic oligonucleotide
cugcacugauuuauuccag

SEQ ID NO: 2186029 - RNA, 19 nt, Artificial Sequence
  Description of Artificial Sequence: Synthetic oligonucleotide
auuaaacacuacagauuug

SEQ ID NO: 2186030 - RNA, 19 nt, Artificial Sequence
  Description of Artificial Sequence: Synthetic oligonucleotide
ugccauaaaugaggggagc

SEQ ID NO: 2186031 - RNA, 19 nt, Artificial Sequence
  Description of Artificial Sequence: Synthetic oligonucleotide
aggauaaggcucagucugg

SEQ ID NO: 2186032 - RNA, 19 nt, Artificial Sequence
  Description of Artificial Sequence: Synthetic oligonucleotide
augcugccauaaaugaggg

SEQ ID NO: 2186033 - RNA, 19 nt, Artificial Sequence
  Description of Artificial Sequence: Synthetic oligonucleotide
ggagcaacuucccaaaugu

SEQ ID NO: 2186034 - RNA, 19 nt, Artificial Sequence
  Description of Artificial Sequence: Synthetic oligonucleotide
auagccacuuggucaugug

SEQ ID NO: 2186035 - RNA, 19 nt, Artificial Sequence
  Description of Artificial Sequence: Synthetic oligonucleotide
cauggcgacgcgcucccgg

SEQ ID NO: 2186036 - RNA, 19 nt, Artificial Sequence
  Description of Artificial Sequence: Synthetic oligonucleotide
cugccaguaucaacacuag

SEQ ID NO: 2186037 - RNA, 19 nt, Artificial Sequence
  Description of Artificial Sequence: Synthetic oligonucleotide
ggauagugugcacuaggug

SEQ ID NO: 2186038 - RNA, 19 nt, Artificial Sequence
  Description of Artificial Sequence: Synthetic oligonucleotide
cacugauagggcauagcca

SEQ ID NO: 2186039 - RNA, 19 nt, Artificial Sequence
  Description of Artificial Sequence: Synthetic oligonucleotide
aggcaggcuucauuuacgu

SEQ ID NO: 2186040 - RNA, 19 nt, Artificial Sequence
  Description of Artificial Sequence: Synthetic oligonucleotide
ggugccaacaucacagaug

SEQ ID NO: 2186041 - RNA, 19 nt, Artificial Sequence
  Description of Artificial Sequence: Synthetic oligonucleotide
gccauaaaugaggggagcg

SEQ ID NO: 2186042 - RNA, 19 nt, Artificial Sequence
  Description of Artificial Sequence: Synthetic oligonucleotide
aggauagugugcacuaggu

SEQ ID NO: 2186043 - RNA, 19 nt, Artificial Sequence
  Description of Artificial Sequence: Synthetic oligonucleotide
uaggccuugccauggcggu

SEQ ID NO: 2186044 - RNA, 19 nt, Artificial Sequence
  Description of Artificial Sequence: Synthetic oligonucleotide
acacuagguacaugacgga

SEQ ID NO: 2186045 - RNA, 19 nt, Artificial Sequence
  Description of Artificial Sequence: Synthetic oligonucleotide
gaucucuuuuaguaucggu

SEQ ID NO: 2186046 - RNA, 19 nt, Artificial Sequence
  Description of Artificial Sequence: Synthetic oligonucleotide
agaugguaacagagaacuc

SEQ ID NO: 2186047 - RNA, 19 nt, Artificial Sequence
  Description of Artificial Sequence: Synthetic oligonucleotide
augacggagacagcggaga

SEQ ID NO: 2186048 - RNA, 19 nt, Artificial Sequence
  Description of Artificial Sequence: Synthetic oligonucleotide
gaccagauguacguagauc

SEQ ID NO: 2186049 - RNA, 19 nt, Artificial Sequence
  Description of Artificial Sequence: Synthetic oligonucleotide
gggcauagccacuugguca

SEQ ID NO: 2186050 - RNA, 19 nt, Artificial Sequence
  Description of Artificial Sequence: Synthetic oligonucleotide
ugauagggcauagccacuu

SEQ ID NO: 2186051 - RNA, 19 nt, Artificial Sequence
  Description of Artificial Sequence: Synthetic oligonucleotide
agagaacucaaggccaaaa

SEQ ID NO: 2186052 - RNA, 19 nt, Artificial Sequence
  Description of Artificial Sequence: Synthetic oligonucleotide
cagccauaugaccagaugu

SEQ ID NO: 2186053 - RNA, 19 nt, Artificial Sequence
  Description of Artificial Sequence: Synthetic oligonucleotide
ccccaugaccuacagauug

SEQ ID NO: 2186054 - RNA, 19 nt, Artificial Sequence
  Description of Artificial Sequence: Synthetic oligonucleotide
gagaacucaaggccaaaau

SEQ ID NO: 2186055 - RNA, 19 nt, Artificial Sequence
  Description of Artificial Sequence: Synthetic oligonucleotide
ggagacagcggagaaacca

SEQ ID NO: 2186056 - RNA, 19 nt, Artificial Sequence
  Description of Artificial Sequence: Synthetic oligonucleotide
ugccacaguccauggagau

SEQ ID NO: 2186057 - RNA, 19 nt, Artificial Sequence
  Description of Artificial Sequence: Synthetic oligonucleotide
guuuguggcuagucaagaa

SEQ ID NO: 2186058 - RNA, 19 nt, Artificial Sequence
  Description of Artificial Sequence: Synthetic oligonucleotide
cccaaauguugcuugcccc

SEQ ID NO: 2186059 - RNA, 19 nt, Artificial Sequence
  Description of Artificial Sequence: Synthetic oligonucleotide
agcgguaggccuugccaug

SEQ ID NO: 2186060 - RNA, 19 nt, Artificial Sequence
  Description of Artificial Sequence: Synthetic oligonucleotide
augugacaagagccucagg

SEQ ID NO: 2186061 - RNA, 19 nt, Artificial Sequence
  Description of Artificial Sequence: Synthetic oligonucleotide
aggccaaaaucugaggaua

SEQ ID NO: 2186062 - RNA, 19 nt, Artificial Sequence
  Description of Artificial Sequence: Synthetic oligonucleotide
gucccacacacaucuuggc

SEQ ID NO: 2186063 - RNA, 19 nt, Artificial Sequence
  Description of Artificial Sequence: Synthetic oligonucleotide
ggugaaccaagagucuaag

SEQ ID NO: 2186064 - RNA, 19 nt, Artificial Sequence
  Description of Artificial Sequence: Synthetic oligonucleotide
aggugccaacaucacagau

SEQ ID NO: 2186065 - RNA, 19 nt, Artificial Sequence
  Description of Artificial Sequence: Synthetic oligonucleotide
gugaugaagaggugauaaa

SEQ ID NO: 2186066 - RNA, 19 nt, Artificial Sequence
  Description of Artificial Sequence: Synthetic oligonucleotide
gugcugaaagucgcugccg

SEQ ID NO: 2186067 - RNA, 19 nt, Artificial Sequence
  Description of Artificial Sequence: Synthetic oligonucleotide
cugguagugcauggcgacg

SEQ ID NO: 2186068 - RNA, 19 nt, Artificial Sequence
  Description of Artificial Sequence: Synthetic oligonucleotide
uccacagacaucggucauc

SEQ ID NO: 2186069 - RNA, 19 nt, Artificial Sequence
  Description of Artificial Sequence: Synthetic oligonucleotide
gcgguagaguugcugggcg

SEQ ID NO: 2186070 - RNA, 19 nt, Artificial Sequence
  Description of Artificial Sequence: Synthetic oligonucleotide
aucugguagugcauggcga

SEQ ID NO: 2186071 - RNA, 19 nt, Artificial Sequence
  Description of Artificial Sequence: Synthetic oligonucleotide
ccacaguccauggagauuc

SEQ ID NO: 2186072 - RNA, 19 nt, Artificial Sequence
  Description of Artificial Sequence: Synthetic oligonucleotide
cugaggauagugugcacua

SEQ ID NO: 2186073 - RNA, 19 nt, Artificial Sequence
  Description of Artificial Sequence: Synthetic oligonucleotide
caaggauaaggcucagucu

SEQ ID NO: 2186074 - RNA, 19 nt, Artificial Sequence
  Description of Artificial Sequence: Synthetic oligonucleotide
gagcgauggagaagagccc

SEQ ID NO: 2186075 - RNA, 19 nt, Artificial Sequence
  Description of Artificial Sequence: Synthetic oligonucleotide
agggcacaaugcucaauaa

SEQ ID NO: 2186076 - RNA, 19 nt, Artificial Sequence
  Description of Artificial Sequence: Synthetic oligonucleotide
gucacacucaucugguagu

SEQ ID NO: 2186077 - RNA, 19 nt, Artificial Sequence
  Description of Artificial Sequence: Synthetic oligonucleotide
aaccaaacaggaagcggua

SEQ ID NO: 2186078 - RNA, 19 nt, Artificial Sequence
  Description of Artificial Sequence: Synthetic oligonucleotide
agccauaugaccagaugua

SEQ ID NO: 2186079 - RNA, 19 nt, Artificial Sequence
  Description of Artificial Sequence: Synthetic oligonucleotide
ccaugcugccauaaaugag

SEQ ID NO: 2186080 - RNA, 19 nt, Artificial Sequence
  Description of Artificial Sequence: Synthetic oligonucleotide
aguaaacagaguagccuuu

SEQ ID NO: 2186081 - RNA, 19 nt, Artificial Sequence
  Description of Artificial Sequence: Synthetic oligonucleotide
gugcuggugaaccaagagu

SEQ ID NO: 2186082 - RNA, 19 nt, Artificial Sequence
  Description of Artificial Sequence: Synthetic oligonucleotide
ugcugggcggcagggaaca

SEQ ID NO: 2186083 - RNA, 19 nt, Artificial Sequence
  Description of Artificial Sequence: Synthetic oligonucleotide
gguagugcauggcgacgcg

SEQ ID NO: 2186084 - RNA, 19 nt, Artificial Sequence
  Description of Artificial Sequence: Synthetic oligonucleotide
uuucacucuugagcgucac

SEQ ID NO: 2186085 - RNA, 19 nt, Artificial Sequence
  Description of Artificial Sequence: Synthetic oligonucleotide
ccauggagauucugaacag

SEQ ID NO: 2186086 - RNA, 19 nt, Artificial Sequence
  Description of Artificial Sequence: Synthetic oligonucleotide
aguugccaggcaugaacuu

SEQ ID NO: 2186087 - RNA, 19 nt, Artificial Sequence
  Description of Artificial Sequence: Synthetic oligonucleotide
auggauauucccacugaua

SEQ ID NO: 2186088 - RNA, 19 nt, Artificial Sequence
  Description of Artificial Sequence: Synthetic oligonucleotide
caguaaacagaguagccuu

SEQ ID NO: 2186089 - RNA, 19 nt, Artificial Sequence
  Description of Artificial Sequence: Synthetic oligonucleotide
augaggggagcgauggaga

SEQ ID NO: 2186090 - RNA, 19 nt, Artificial Sequence
  Description of Artificial Sequence: Synthetic oligonucleotide
uugccccaugaccuacaga

SEQ ID NO: 2186091 - RNA, 19 nt, Artificial Sequence
  Description of Artificial Sequence: Synthetic oligonucleotide
gucaucucagcagauggua

SEQ ID NO: 2186092 - RNA, 19 nt, Artificial Sequence
  Description of Artificial Sequence: Synthetic oligonucleotide
gcagccauaugaccagaug

SEQ ID NO: 2186093 - RNA, 19 nt, Artificial Sequence
  Description of Artificial Sequence: Synthetic oligonucleotide
ccagauguacguagaucag

SEQ ID NO: 2186094 - RNA, 19 nt, Artificial Sequence
  Description of Artificial Sequence: Synthetic oligonucleotide
agcgucacacucaucuggu

SEQ ID NO: 2186095 - RNA, 19 nt, Artificial Sequence
  Description of Artificial Sequence: Synthetic oligonucleotide
cggucauccgguuuguggc

SEQ ID NO: 2186096 - RNA, 19 nt, Artificial Sequence
  Description of Artificial Sequence: Synthetic oligonucleotide
guagugcauggcgacgcgc

SEQ ID NO: 2186097 - RNA, 19 nt, Artificial Sequence
  Description of Artificial Sequence: Synthetic oligonucleotide
gcggagaaaccaaacagga

SEQ ID NO: 2186098 - RNA, 19 nt, Artificial Sequence
  Description of Artificial Sequence: Synthetic oligonucleotide
cgucacacucaucugguag

SEQ ID NO: 2186099 - RNA, 19 nt, Artificial Sequence
  Description of Artificial Sequence: Synthetic oligonucleotide
cacacucaucugguagugc

SEQ ID NO: 2186100 - RNA, 19 nt, Artificial Sequence
  Description of Artificial Sequence: Synthetic oligonucleotide
aguguuccacagacaucgg

SEQ ID NO: 2186101 - RNA, 19 nt, Artificial Sequence
  Description of Artificial Sequence: Synthetic oligonucleotide
guaaacagaguagccuuua

SEQ ID NO: 2186102 - RNA, 19 nt, Artificial Sequence
  Description of Artificial Sequence: Synthetic oligonucleotide
cagacaucggucauccggu

SEQ ID NO: 2186103 - RNA, 19 nt, Artificial Sequence
  Description of Artificial Sequence: Synthetic oligonucleotide
ccaagagaaggcaaggaua

SEQ ID NO: 2186104 - RNA, 19 nt, Artificial Sequence
  Description of Artificial Sequence: Synthetic oligonucleotide
ugccaggcaugaacuugga

SEQ ID NO: 2186105 - RNA, 19 nt, Artificial Sequence
  Description of Artificial Sequence: Synthetic oligonucleotide
auuucacucuugagcguca

SEQ ID NO: 2186106 - RNA, 19 nt, Artificial Sequence
  Description of Artificial Sequence: Synthetic oligonucleotide
ucgcgggccugcccgagac

SEQ ID NO: 2186107 - RNA, 19 nt, Artificial Sequence
  Description of Artificial Sequence: Synthetic oligonucleotide
gugugcacuaggugccaac

SEQ ID NO: 2186108 - RNA, 19 nt, Artificial Sequence
  Description of Artificial Sequence: Synthetic oligonucleotide
gccauaugaccagauguac

SEQ ID NO: 2186109 - RNA, 19 nt, Artificial Sequence
  Description of Artificial Sequence: Synthetic oligonucleotide
ccaaauguugcuugcccca

SEQ ID NO: 2186110 - RNA, 19 nt, Artificial Sequence
  Description of Artificial Sequence: Synthetic oligonucleotide
auaugaccagauguacgua

SEQ ID NO: 2186111 - RNA, 19 nt, Artificial Sequence
  Description of Artificial Sequence: Synthetic oligonucleotide
ucccuucaaucaggcaggc

SEQ ID NO: 2186112 - RNA, 19 nt, Artificial Sequence
  Description of Artificial Sequence: Synthetic oligonucleotide
uagugugcacuaggugcca

SEQ ID NO: 2186113 - RNA, 19 nt, Artificial Sequence
  Description of Artificial Sequence: Synthetic oligonucleotide
cauaaaugaggggagcgau

SEQ ID NO: 2186114 - RNA, 19 nt, Artificial Sequence
  Description of Artificial Sequence: Synthetic oligonucleotide
guuucgagggaaggagaga

SEQ ID NO: 2186115 - RNA, 19 nt, Artificial Sequence
  Description of Artificial Sequence: Synthetic oligonucleotide
caguugccaggcaugaacu

SEQ ID NO: 2186116 - RNA, 19 nt, Artificial Sequence
  Description of Artificial Sequence: Synthetic oligonucleotide
ugcuugccccaugaccuac

SEQ ID NO: 2186117 - RNA, 19 nt, Artificial Sequence
  Description of Artificial Sequence: Synthetic oligonucleotide
gguuuguggcuagucaaga

SEQ ID NO: 2186118 - RNA, 19 nt, Artificial Sequence
  Description of Artificial Sequence: Synthetic oligonucleotide
agcucccuucaaucaggca

SEQ ID NO: 2186119 - RNA, 19 nt, Artificial Sequence
  Description of Artificial Sequence: Synthetic oligonucleotide
caggugucccacacacauc

SEQ ID NO: 2186120 - RNA, 19 nt, Artificial Sequence
  Description of Artificial Sequence: Synthetic oligonucleotide
ggaagcgguaggccuugcc

SEQ ID NO: 2186121 - RNA, 19 nt, Artificial Sequence
  Description of Artificial Sequence: Synthetic oligonucleotide
gucggugccggccgcucgc

SEQ ID NO: 2186122 - RNA, 19 nt, Artificial Sequence
  Description of Artificial Sequence: Synthetic oligonucleotide
cacacaucuuggcaaccaa

SEQ ID NO: 2186123 - RNA, 19 nt, Artificial Sequence
  Description of Artificial Sequence: Synthetic oligonucleotide
acgccaucauucagaacca

SEQ ID NO: 2186124 - RNA, 19 nt, Artificial Sequence
  Description of Artificial Sequence: Synthetic oligonucleotide
guggcuagucaagaauaaa

SEQ ID NO: 2186125 - RNA, 19 nt, Artificial Sequence
  Description of Artificial Sequence: Synthetic oligonucleotide
gauguacguagaucagcuu

SEQ ID NO: 2186126 - RNA, 19 nt, Artificial Sequence
  Description of Artificial Sequence: Synthetic oligonucleotide
gacggagacagcggagaaa

SEQ ID NO: 2186127 - RNA, 19 nt, Artificial Sequence
  Description of Artificial Sequence: Synthetic oligonucleotide
cuggugaaccaagagucua

SEQ ID NO: 2186128 - RNA, 19 nt, Artificial Sequence
  Description of Artificial Sequence: Synthetic oligonucleotide
ccuucaaucaggcaggcuu

SEQ ID NO: 2186129 - RNA, 19 nt, Artificial Sequence
  Description of Artificial Sequence: Synthetic oligonucleotide
ggcgguagaguugcugggc

SEQ ID NO: 2186130 - RNA, 19 nt, Artificial Sequence
  Description of Artificial Sequence: Synthetic oligonucleotide
cuugagcgucacacucauc

SEQ ID NO: 2186131 - RNA, 19 nt, Artificial Sequence
  Description of Artificial Sequence: Synthetic oligonucleotide
gggagcgauggagaagagc

SEQ ID NO: 2186132 - RNA, 19 nt, Artificial Sequence
  Description of Artificial Sequence: Synthetic oligonucleotide
aggaagcgguaggccuugc

SEQ ID NO: 2186133 - RNA, 19 nt, Artificial Sequence
  Description of Artificial Sequence: Synthetic oligonucleotide
ggcauagccacuuggucau

SEQ ID NO: 2186134 - RNA, 19 nt, Artificial Sequence
  Description of Artificial Sequence: Synthetic oligonucleotide
uggcgacgcgcucccggug

SEQ ID NO: 2186135 - RNA, 19 nt, Artificial Sequence
  Description of Artificial Sequence: Synthetic oligonucleotide
cugaacagcucccuucaau

SEQ ID NO: 2186136 - RNA, 19 nt, Artificial Sequence
  Description of Artificial Sequence: Synthetic oligonucleotide
acaucuccaugcugccaua

SEQ ID NO: 2186137 - RNA, 19 nt, Artificial Sequence
  Description of Artificial Sequence: Synthetic oligonucleotide
cauuuacguuucuucuccu

SEQ ID NO: 2186138 - RNA, 19 nt, Artificial Sequence
  Description of Artificial Sequence: Synthetic oligonucleotide
ggucaugugacaagagccu

SEQ ID NO: 2186139 - RNA, 19 nt, Artificial Sequence
  Description of Artificial Sequence: Synthetic oligonucleotide
gcgguaggccuugccaugg

SEQ ID NO: 2186140 - RNA, 19 nt, Artificial Sequence
  Description of Artificial Sequence: Synthetic oligonucleotide
gguacaugacggagacagc

SEQ ID NO: 2186141 - RNA, 19 nt, Artificial Sequence
  Description of Artificial Sequence: Synthetic oligonucleotide
aggcuucauuuacguuucu

SEQ ID NO: 2186142 - RNA, 19 nt, Artificial Sequence
  Description of Artificial Sequence: Synthetic oligonucleotide
ucggugccggccgcucgcg

SEQ ID NO: 2186143 - RNA, 19 nt, Artificial Sequence
  Description of Artificial Sequence: Synthetic oligonucleotide
cgguuuguggcuagucaag

SEQ ID NO: 2186144 - RNA, 19 nt, Artificial Sequence
  Description of Artificial Sequence: Synthetic oligonucleotide
guagaguugcugggcggca

SEQ ID NO: 2186145 - RNA, 19 nt, Artificial Sequence
  Description of Artificial Sequence: Synthetic oligonucleotide
ggcuagucaagaauaaauu

SEQ ID NO: 2186146 - RNA, 19 nt, Artificial Sequence
  Description of Artificial Sequence: Synthetic oligonucleotide
cucuuuuaguaucggugau

SEQ ID NO: 2186147 - RNA, 19 nt, Artificial Sequence
  Description of Artificial Sequence: Synthetic oligonucleotide
gcccgagacgccaucauuc

SEQ ID NO: 2186148 - RNA, 19 nt, Artificial Sequence
  Description of Artificial Sequence: Synthetic oligonucleotide
cgagacgccaucauucaga

SEQ ID NO: 2186149 - RNA, 19 nt, Artificial Sequence
  Description of Artificial Sequence: Synthetic oligonucleotide
agcagccauaugaccagau

SEQ ID NO: 2186150 - RNA, 19 nt, Artificial Sequence
  Description of Artificial Sequence: Synthetic oligonucleotide
cugggcggcagggaacauc

SEQ ID NO: 2186151 - RNA, 19 nt, Artificial Sequence
  Description of Artificial Sequence: Synthetic oligonucleotide
aucggucauccgguuugug

SEQ ID NO: 2186152 - RNA, 19 nt, Artificial Sequence
  Description of Artificial Sequence: Synthetic oligonucleotide
accaagagucuaagaguuu

SEQ ID NO: 2186153 - RNA, 19 nt, Artificial Sequence
  Description of Artificial Sequence: Synthetic oligonucleotide
gaacuuggacugccaguau

SEQ ID NO: 2186154 - RNA, 19 nt, Artificial Sequence
  Description of Artificial Sequence: Synthetic oligonucleotide
gcgcucccggugcugaaag

SEQ ID NO: 2186155 - RNA, 19 nt, Artificial Sequence
  Description of Artificial Sequence: Synthetic oligonucleotide
cuuggacugccaguaucaa

SEQ ID NO: 2186156 - RNA, 19 nt, Artificial Sequence
  Description of Artificial Sequence: Synthetic oligonucleotide
ccauaaaugaggggagcga

SEQ ID NO: 2186157 - RNA, 19 nt, Artificial Sequence
  Description of Artificial Sequence: Synthetic oligonucleotide
ccgguuuguggcuagucaa

SEQ ID NO: 2186158 - RNA, 19 nt, Artificial Sequence
  Description of Artificial Sequence: Synthetic oligonucleotide
cacucuugagcgucacacu

SEQ ID NO: 2186159 - RNA, 19 nt, Artificial Sequence
  Description of Artificial Sequence: Synthetic oligonucleotide
gaaagucgcugccgucggu

SEQ ID NO: 2186160 - RNA, 19 nt, Artificial Sequence
  Description of Artificial Sequence: Synthetic oligonucleotide
gcugccgucggugccggcc

SEQ ID NO: 2186161 - RNA, 19 nt, Artificial Sequence
  Description of Artificial Sequence: Synthetic oligonucleotide
gccaggcaugaacuuggac

SEQ ID NO: 2186162 - RNA, 19 nt, Artificial Sequence
  Description of Artificial Sequence: Synthetic oligonucleotide
cauagccacuuggucaugu

SEQ ID NO: 2186163 - RNA, 19 nt, Artificial Sequence
  Description of Artificial Sequence: Synthetic oligonucleotide
cgguagaguugcugggcgg

SEQ ID NO: 2186164 - RNA, 19 nt, Artificial Sequence
  Description of Artificial Sequence: Synthetic oligonucleotide
ccgagacgccaucauucag

SEQ ID NO: 2186165 - RNA, 19 nt, Artificial Sequence
  Description of Artificial Sequence: Synthetic oligonucleotide
cagguagcuaauguuguuu

SEQ ID NO: 2186166 - RNA, 19 nt, Artificial Sequence
  Description of Artificial Sequence: Synthetic oligonucleotide
cugauagggcauagccacu

SEQ ID NO: 2186167 - RNA, 19 nt, Artificial Sequence
  Description of Artificial Sequence: Synthetic oligonucleotide
cccaugaccuacagauuga

SEQ ID NO: 2186168 - RNA, 19 nt, Artificial Sequence
  Description of Artificial Sequence: Synthetic oligonucleotide
gcgggccugcccgagacgc

SEQ ID NO: 2186169 - RNA, 19 nt, Artificial Sequence
  Description of Artificial Sequence: Synthetic oligonucleotide
gugcacuaggugccaacau

SEQ ID NO: 2186170 - RNA, 19 nt, Artificial Sequence
  Description of Artificial Sequence: Synthetic oligonucleotide
gucauccgguuuguggcua

SEQ ID NO: 2186171 - RNA, 19 nt, Artificial Sequence
  Description of Artificial Sequence: Synthetic oligonucleotide
ggucauccgguuuguggcu

SEQ ID NO: 2186172 - RNA, 19 nt, Artificial Sequence
  Description of Artificial Sequence: Synthetic oligonucleotide
cccgagacgccaucauuca

SEQ ID NO: 2186173 - RNA, 19 nt, Artificial Sequence
  Description of Artificial Sequence: Synthetic oligonucleotide
gagcaacuucccaaauguu

SEQ ID NO: 2186174 - RNA, 19 nt, Artificial Sequence
  Description of Artificial Sequence: Synthetic oligonucleotide
ccggugcugaaagucgcug

SEQ ID NO: 2186175 - RNA, 19 nt, Artificial Sequence
  Description of Artificial Sequence: Synthetic oligonucleotide
cagagaacucaaggccaaa

SEQ ID NO: 2186176 - RNA, 19 nt, Artificial Sequence
  Description of Artificial Sequence: Synthetic oligonucleotide
ggaaggagagaaggcccaa

SEQ ID NO: 2186177 - RNA, 19 nt, Artificial Sequence
  Description of Artificial Sequence: Synthetic oligonucleotide
gccaaaaucugaggauagu

SEQ ID NO: 2186178 - RNA, 19 nt, Artificial Sequence
  Description of Artificial Sequence: Synthetic oligonucleotide
gcuggugaaccaagagucu

SEQ ID NO: 2186179 - RNA, 19 nt, Artificial Sequence
  Description of Artificial Sequence: Synthetic oligonucleotide
cggagaaaccaaacaggaa

SEQ ID NO: 2186180 - RNA, 19 nt, Artificial Sequence
  Description of Artificial Sequence: Synthetic oligonucleotide
ccaugaccuacagauugaa

SEQ ID NO: 2186181 - RNA, 19 nt, Artificial Sequence
  Description of Artificial Sequence: Synthetic oligonucleotide
guacguagaucagcuucuu

SEQ ID NO: 2186182 - RNA, 19 nt, Artificial Sequence
  Description of Artificial Sequence: Synthetic oligonucleotide
acgcgcucccggugcugaa

SEQ ID NO: 2186183 - RNA, 19 nt, Artificial Sequence
  Description of Artificial Sequence: Synthetic oligonucleotide
gcauagccacuuggucaug

SEQ ID NO: 2186184 - RNA, 19 nt, Artificial Sequence
  Description of Artificial Sequence: Synthetic oligonucleotide
cucgcgggccugcccgaga

SEQ ID NO: 2186185 - RNA, 19 nt, Artificial Sequence
  Description of Artificial Sequence: Synthetic oligonucleotide
ggcaaggauaaggcucagu

SEQ ID NO: 2186186 - RNA, 19 nt, Artificial Sequence
  Description of Artificial Sequence: Synthetic oligonucleotide
caucggucauccgguuugu

SEQ ID NO: 2186187 - RNA, 19 nt, Artificial Sequence
  Description of Artificial Sequence: Synthetic oligonucleotide
cgucggugccggccgcucg

SEQ ID NO: 2186188 - RNA, 19 nt, Artificial Sequence
  Description of Artificial Sequence: Synthetic oligonucleotide
cgguaggccuugccauggc

SEQ ID NO: 2186189 - RNA, 19 nt, Artificial Sequence
  Description of Artificial Sequence: Synthetic oligonucleotide
ggagagcaccagguagcua

SEQ ID NO: 2186190 - RNA, 19 nt, Artificial Sequence
  Description of Artificial Sequence: Synthetic oligonucleotide
cugcccgagacgccaucau

SEQ ID NO: 2186191 - RNA, 19 nt, Artificial Sequence
  Description of Artificial Sequence: Synthetic oligonucleotide
cauccgguuuguggcuagu

SEQ ID NO: 2186192 - RNA, 19 nt, Artificial Sequence
  Description of Artificial Sequence: Synthetic oligonucleotide
gcucgcgggccugcccgag

SEQ ID NO: 2186193 - RNA, 19 nt, Artificial Sequence
  Description of Artificial Sequence: Synthetic oligonucleotide
gccugcccgagacgccauc

SEQ ID NO: 2186194 - RNA, 19 nt, Artificial Sequence
  Description of Artificial Sequence: Synthetic oligonucleotide
cgggccugcccgagacgcc

SEQ ID NO: 2186195 - RNA, 19 nt, Artificial Sequence
  Description of Artificial Sequence: Synthetic oligonucleotide
cgcgggccugcccgagacg

SEQ ID NO: 2186196 - RNA, 19 nt, Artificial Sequence
  Description of Artificial Sequence: Synthetic oligonucleotide
gccacaguccauggagauu

SEQ ID NO: 2186197 - RNA, 19 nt, Artificial Sequence
  Description of Artificial Sequence: Synthetic oligonucleotide
cccggugcugaaagucgcu

SEQ ID NO: 2186198 - RNA, 19 nt, Artificial Sequence
  Description of Artificial Sequence: Synthetic oligonucleotide
ggugucccacacacaucuu

SEQ ID NO: 2186199 - RNA, 19 nt, Artificial Sequence
  Description of Artificial Sequence: Synthetic oligonucleotide
ccgucggugccggccgcuc

SEQ ID NO: 2186200 - RNA, 19 nt, Artificial Sequence
  Description of Artificial Sequence: Synthetic oligonucleotide
gccccaugaccuacagauu

SEQ ID NO: 2186201 - RNA, 19 nt, Artificial Sequence
  Description of Artificial Sequence: Synthetic oligonucleotide
ccggccgcucgcgggccug

SEQ ID NO: 2186202 - RNA, 19 nt, Artificial Sequence
  Description of Artificial Sequence: Synthetic oligonucleotide
ccauggcgguagaguugcu

SEQ ID NO: 2186203 - RNA, 19 nt, Artificial Sequence
  Description of Artificial Sequence: Synthetic oligonucleotide
cgcgcucccggugcugaaa

SEQ ID NO: 2186204 - RNA, 19 nt, Artificial Sequence
  Description of Artificial Sequence: Synthetic oligonucleotide
gccgucggugccggccgcu

SEQ ID NO: 2186205 - RNA, 19 nt, Artificial Sequence
  Description of Artificial Sequence: Synthetic oligonucleotide
cggccgcucgcgggccugc

SEQ ID NO: 2186206 - RNA, 19 nt, Artificial Sequence
  Description of Artificial Sequence: Synthetic oligonucleotide
ggccugcccgagacgccau

SEQ ID NO: 2186207 - RNA, 19 nt, Artificial Sequence
  Description of Artificial Sequence: Synthetic oligonucleotide
acagucuucaaucaggccc

SEQ ID NO: 2186208 - RNA, 19 nt, Artificial Sequence
  Description of Artificial Sequence: Synthetic oligonucleotide
aaucaagauguucaguguc

SEQ ID NO: 2186209 - RNA, 19 nt, Artificial Sequence
  Description of Artificial Sequence: Synthetic oligonucleotide
uucucuaguacucucaggc

SEQ ID NO: 2186210 - RNA, 19 nt, Artificial Sequence
  Description of Artificial Sequence: Synthetic oligonucleotide
uaaggauuguaccaaagug

SEQ ID NO: 2186211 - RNA, 19 nt, Artificial Sequence
  Description of Artificial Sequence: Synthetic oligonucleotide
gauuguaccaaagugucgg

SEQ ID NO: 2186212 - RNA, 19 nt, Artificial Sequence
  Description of Artificial Sequence: Synthetic oligonucleotide
auaugaauccuccggacac

SEQ ID NO: 2186213 - RNA, 19 nt, Artificial Sequence
  Description of Artificial Sequence: Synthetic oligonucleotide
aguacucucaggcaguggg

SEQ ID NO: 2186214 - RNA, 19 nt, Artificial Sequence
  Description of Artificial Sequence: Synthetic oligonucleotide
aguacuuguuguuacugcg

SEQ ID NO: 2186215 - RNA, 19 nt, Artificial Sequence
  Description of Artificial Sequence: Synthetic oligonucleotide
aagagagagggacuggguc

SEQ ID NO: 2186216 - RNA, 19 nt, Artificial Sequence
  Description of Artificial Sequence: Synthetic oligonucleotide
aaugacgggacacaggaaa

SEQ ID NO: 2186217 - RNA, 19 nt, Artificial Sequence
  Description of Artificial Sequence: Synthetic oligonucleotide
cucaucaugggugauaugg

SEQ ID NO: 2186218 - RNA, 19 nt, Artificial Sequence
  Description of Artificial Sequence: Synthetic oligonucleotide
agauaggagagaucaaagg

SEQ ID NO: 2186219 - RNA, 19 nt, Artificial Sequence
  Description of Artificial Sequence: Synthetic oligonucleotide
aaaggucaguccuugaaga

SEQ ID NO: 2186220 - RNA, 19 nt, Artificial Sequence
  Description of Artificial Sequence: Synthetic oligonucleotide
gaagacaaucuguuggccg

SEQ ID NO: 2186221 - RNA, 19 nt, Artificial Sequence
  Description of Artificial Sequence: Synthetic oligonucleotide
aauaugaauccuccggaca

SEQ ID NO: 2186222 - RNA, 19 nt, Artificial Sequence
  Description of Artificial Sequence: Synthetic oligonucleotide
aaguugucaucugaagugc

SEQ ID NO: 2186223 - RNA, 19 nt, Artificial Sequence
  Description of Artificial Sequence: Synthetic oligonucleotide
uguuacugcgguuaugcag

SEQ ID NO: 2186224 - RNA, 19 nt, Artificial Sequence
  Description of Artificial Sequence: Synthetic oligonucleotide
uuaaggauuguaccaaagu

SEQ ID NO: 2186225 - RNA, 19 nt, Artificial Sequence
  Description of Artificial Sequence: Synthetic oligonucleotide
aaagccggggcaaagagag

SEQ ID NO: 2186226 - RNA, 19 nt, Artificial Sequence
  Description of Artificial Sequence: Synthetic oligonucleotide
agaacaaggacguggaaga

SEQ ID NO: 2186227 - RNA, 19 nt, Artificial Sequence
  Description of Artificial Sequence: Synthetic oligonucleotide
aacauagcaugcaaugacg

SEQ ID NO: 2186228 - RNA, 19 nt, Artificial Sequence
  Description of Artificial Sequence: Synthetic oligonucleotide
aaaucaagauguucagugu

SEQ ID NO: 2186229 - RNA, 19 nt, Artificial Sequence
  Description of Artificial Sequence: Synthetic oligonucleotide
uucaaucaggcccuggacc

SEQ ID NO: 2186230 - RNA, 19 nt, Artificial Sequence
  Description of Artificial Sequence: Synthetic oligonucleotide
agagaucaaaggucagucc

SEQ ID NO: 2186231 - RNA, 19 nt, Artificial Sequence
  Description of Artificial Sequence: Synthetic oligonucleotide
aaagacccacgacuuggcc

SEQ ID NO: 2186232 - RNA, 19 nt, Artificial Sequence
  Description of Artificial Sequence: Synthetic oligonucleotide
guuguuagcagugaguggc

SEQ ID NO: 2186233 - RNA, 19 nt, Artificial Sequence
  Description of Artificial Sequence: Synthetic oligonucleotide
aaucuguuggccgugagga

SEQ ID NO: 2186234 - RNA, 19 nt, Artificial Sequence
  Description of Artificial Sequence: Synthetic oligonucleotide
aauguaccauguuguuagc

SEQ ID NO: 2186235 - RNA, 19 nt, Artificial Sequence
  Description of Artificial Sequence: Synthetic oligonucleotide
caaagugucggccacuccg

SEQ ID NO: 2186236 - RNA, 19 nt, Artificial Sequence
  Description of Artificial Sequence: Synthetic oligonucleotide
ugacccaucccgcagguag

SEQ ID NO: 2186237 - RNA, 19 nt, Artificial Sequence
  Description of Artificial Sequence: Synthetic oligonucleotide
gaacauagcaugcaaugac

SEQ ID NO: 2186238 - RNA, 19 nt, Artificial Sequence
  Description of Artificial Sequence: Synthetic oligonucleotide
aagacaaucuguuggccgu

SEQ ID NO: 2186239 - RNA, 19 nt, Artificial Sequence
  Description of Artificial Sequence: Synthetic oligonucleotide
aguaaguugucaucugaag

SEQ ID NO: 2186240 - RNA, 19 nt, Artificial Sequence
  Description of Artificial Sequence: Synthetic oligonucleotide
aguggcaaugacuggaaag

SEQ ID NO: 2186241 - RNA, 19 nt, Artificial Sequence
  Description of Artificial Sequence: Synthetic oligonucleotide
aaggauuguaccaaagugu

SEQ ID NO: 2186242 - RNA, 19 nt, Artificial Sequence
  Description of Artificial Sequence: Synthetic oligonucleotide
acuggaaagggccucacug

SEQ ID NO: 2186243 - RNA, 19 nt, Artificial Sequence
  Description of Artificial Sequence: Synthetic oligonucleotide
gaagcuggaauguaccaug

SEQ ID NO: 2186244 - RNA, 19 nt, Artificial Sequence
  Description of Artificial Sequence: Synthetic oligonucleotide
cugacagucuucaaucagg

SEQ ID NO: 2186245 - RNA, 19 nt, Artificial Sequence
  Description of Artificial Sequence: Synthetic oligonucleotide
cugaacauagcaugcaaug

SEQ ID NO: 2186246 - RNA, 19 nt, Artificial Sequence
  Description of Artificial Sequence: Synthetic oligonucleotide
ugguaagagaaagacagca

SEQ ID NO: 2186247 - RNA, 19 nt, Artificial Sequence
  Description of Artificial Sequence: Synthetic oligonucleotide
ucaguaaguugucaucuga

SEQ ID NO: 2186248 - RNA, 19 nt, Artificial Sequence
  Description of Artificial Sequence: Synthetic oligonucleotide
aagauaggagagaucaaag

SEQ ID NO: 2186249 - RNA, 19 nt, Artificial Sequence
  Description of Artificial Sequence: Synthetic oligonucleotide
guaguaccgagcuucaccc

SEQ ID NO: 2186250 - RNA, 19 nt, Artificial Sequence
  Description of Artificial Sequence: Synthetic oligonucleotide
guaguuaaggauuguacca

SEQ ID NO: 2186251 - RNA, 19 nt, Artificial Sequence
  Description of Artificial Sequence: Synthetic oligonucleotide
uucuccguggcauagacua

SEQ ID NO: 2186252 - RNA, 19 nt, Artificial Sequence
  Description of Artificial Sequence: Synthetic oligonucleotide
ugacagucuucaaucaggc

SEQ ID NO: 2186253 - RNA, 19 nt, Artificial Sequence
  Description of Artificial Sequence: Synthetic oligonucleotide
acaaggacguggaagaggg

SEQ ID NO: 2186254 - RNA, 19 nt, Artificial Sequence
  Description of Artificial Sequence: Synthetic oligonucleotide
guuguuacugcgguuaugc

SEQ ID NO: 2186255 - RNA, 19 nt, Artificial Sequence
  Description of Artificial Sequence: Synthetic oligonucleotide
gaaagggccucacugaaca

SEQ ID NO: 2186256 - RNA, 19 nt, Artificial Sequence
  Description of Artificial Sequence: Synthetic oligonucleotide
gaaagacagcagaacaagg

SEQ ID NO: 2186257 - RNA, 19 nt, Artificial Sequence
  Description of Artificial Sequence: Synthetic oligonucleotide
aggagagcuagaucugggc

SEQ ID NO: 2186258 - RNA, 19 nt, Artificial Sequence
  Description of Artificial Sequence: Synthetic oligonucleotide
caucaugggugauauggcg

SEQ ID NO: 2186259 - RNA, 19 nt, Artificial Sequence
  Description of Artificial Sequence: Synthetic oligonucleotide
aaaucucaucucccaggac

SEQ ID NO: 2186260 - RNA, 19 nt, Artificial Sequence
  Description of Artificial Sequence: Synthetic oligonucleotide
auuguaccaaagugucggc

SEQ ID NO: 2186261 - RNA, 19 nt, Artificial Sequence
  Description of Artificial Sequence: Synthetic oligonucleotide
gaagagccccgccugaggg

SEQ ID NO: 2186262 - RNA, 19 nt, Artificial Sequence
  Description of Artificial Sequence: Synthetic oligonucleotide
aaugacuggaaagggccuc

SEQ ID NO: 2186263 - RNA, 19 nt, Artificial Sequence
  Description of Artificial Sequence: Synthetic oligonucleotide
uguuguuagcagugagugg

SEQ ID NO: 2186264 - RNA, 19 nt, Artificial Sequence
  Description of Artificial Sequence: Synthetic oligonucleotide
aggauuguaccaaaguguc

SEQ ID NO: 2186265 - RNA, 19 nt, Artificial Sequence
  Description of Artificial Sequence: Synthetic oligonucleotide
uuagcagugaguggcaaug

SEQ ID NO: 2186266 - RNA, 19 nt, Artificial Sequence
  Description of Artificial Sequence: Synthetic oligonucleotide
auggcggcgaauaugaauc

SEQ ID NO: 2186267 - RNA, 19 nt, Artificial Sequence
  Description of Artificial Sequence: Synthetic oligonucleotide
aauccuccggacacggugc

SEQ ID NO: 2186268 - RNA, 19 nt, Artificial Sequence
  Description of Artificial Sequence: Synthetic oligonucleotide
augcagaaguuucaccacg

SEQ ID NO: 2186269 - RNA, 19 nt, Artificial Sequence
  Description of Artificial Sequence: Synthetic oligonucleotide
gauauggcggcgaauauga

SEQ ID NO: 2186270 - RNA, 19 nt, Artificial Sequence
  Description of Artificial Sequence: Synthetic oligonucleotide
ucaaaggucaguccuugaa

SEQ ID NO: 2186271 - RNA, 19 nt, Artificial Sequence
  Description of Artificial Sequence: Synthetic oligonucleotide
gaauaugaauccuccggac

SEQ ID NO: 2186272 - RNA, 19 nt, Artificial Sequence
  Description of Artificial Sequence: Synthetic oligonucleotide
auguuguuagcagugagug

SEQ ID NO: 2186273 - RNA, 19 nt, Artificial Sequence
  Description of Artificial Sequence: Synthetic oligonucleotide
cucuaguacucucaggcag

SEQ ID NO: 2186274 - RNA, 19 nt, Artificial Sequence
  Description of Artificial Sequence: Synthetic oligonucleotide
cucgauguucuucaguaag

SEQ ID NO: 2186275 - RNA, 19 nt, Artificial Sequence
  Description of Artificial Sequence: Synthetic oligonucleotide
gaauccuccggacacggug

SEQ ID NO: 2186276 - RNA, 19 nt, Artificial Sequence
  Description of Artificial Sequence: Synthetic oligonucleotide
ucagggaauuccaccuugg

SEQ ID NO: 2186277 - RNA, 19 nt, Artificial Sequence
  Description of Artificial Sequence: Synthetic oligonucleotide
ucaucaugggugauauggc

SEQ ID NO: 2186278 - RNA, 19 nt, Artificial Sequence
  Description of Artificial Sequence: Synthetic oligonucleotide
uaccauguuguuagcagug

SEQ ID NO: 2186279 - RNA, 19 nt, Artificial Sequence
  Description of Artificial Sequence: Synthetic oligonucleotide
cauagcaugcaaugacggg

SEQ ID NO: 2186280 - RNA, 19 nt, Artificial Sequence
  Description of Artificial Sequence: Synthetic oligonucleotide
ugcaaugacgggacacagg

SEQ ID NO: 2186281 - RNA, 19 nt, Artificial Sequence
  Description of Artificial Sequence: Synthetic oligonucleotide
gcgaauaugaauccuccgg

SEQ ID NO: 2186282 - RNA, 19 nt, Artificial Sequence
  Description of Artificial Sequence: Synthetic oligonucleotide
cuugaggaagagcagccgc

SEQ ID NO: 2186283 - RNA, 19 nt, Artificial Sequence
  Description of Artificial Sequence: Synthetic oligonucleotide
aguaccgagcuucacccag

SEQ ID NO: 2186284 - RNA, 19 nt, Artificial Sequence
  Description of Artificial Sequence: Synthetic oligonucleotide
uacuuguuguuacugcggu

SEQ ID NO: 2186285 - RNA, 19 nt, Artificial Sequence
  Description of Artificial Sequence: Synthetic oligonucleotide
uuucugaagagccccgccu

SEQ ID NO: 2186286 - RNA, 19 nt, Artificial Sequence
  Description of Artificial Sequence: Synthetic oligonucleotide
ucuaguacucucaggcagu

SEQ ID NO: 2186287 - RNA, 19 nt, Artificial Sequence
  Description of Artificial Sequence: Synthetic oligonucleotide
auagcaugcaaugacggga

SEQ ID NO: 2186288 - RNA, 19 nt, Artificial Sequence
  Description of Artificial Sequence: Synthetic oligonucleotide
agacccacgacuuggccag

SEQ ID NO: 2186289 - RNA, 19 nt, Artificial Sequence
  Description of Artificial Sequence: Synthetic oligonucleotide
uaugcagaaguuucaccac

SEQ ID NO: 2186290 - RNA, 19 nt, Artificial Sequence
  Description of Artificial Sequence: Synthetic oligonucleotide
acauagcaugcaaugacgg

SEQ ID NO: 2186291 - RNA, 19 nt, Artificial Sequence
  Description of Artificial Sequence: Synthetic oligonucleotide
ucgauguucuucaguaagu

SEQ ID NO: 2186292 - RNA, 19 nt, Artificial Sequence
  Description of Artificial Sequence: Synthetic oligonucleotide
agcagugaguggcaaugac

SEQ ID NO: 2186293 - RNA, 19 nt, Artificial Sequence
  Description of Artificial Sequence: Synthetic oligonucleotide
cucccgguucucuucaucg

SEQ ID NO: 2186294 - RNA, 19 nt, Artificial Sequence
  Description of Artificial Sequence: Synthetic oligonucleotide
cagaacaaggacguggaag

SEQ ID NO: 2186295 - RNA, 19 nt, Artificial Sequence
  Description of Artificial Sequence: Synthetic oligonucleotide
caagcaagaggaagauagg

SEQ ID NO: 2186296 - RNA, 19 nt, Artificial Sequence
  Description of Artificial Sequence: Synthetic oligonucleotide
gaagauaggagagaucaaa

SEQ ID NO: 2186297 - RNA, 19 nt, Artificial Sequence
  Description of Artificial Sequence: Synthetic oligonucleotide
uccuugaagacaaucuguu

SEQ ID NO: 2186298 - RNA, 19 nt, Artificial Sequence
  Description of Artificial Sequence: Synthetic oligonucleotide
aagagggguggaugcuggc

SEQ ID NO: 2186299 - RNA, 19 nt, Artificial Sequence
  Description of Artificial Sequence: Synthetic oligonucleotide
agcggggacagguucuccc

SEQ ID NO: 2186300 - RNA, 19 nt, Artificial Sequence
  Description of Artificial Sequence: Synthetic oligonucleotide
uaugaauccuccggacacg

SEQ ID NO: 2186301 - RNA, 19 nt, Artificial Sequence
  Description of Artificial Sequence: Synthetic oligonucleotide
gugggacugacccaucccg

SEQ ID NO: 2186302 - RNA, 19 nt, Artificial Sequence
  Description of Artificial Sequence: Synthetic oligonucleotide
uccguggcauagacuaugg

SEQ ID NO: 2186303 - RNA, 19 nt, Artificial Sequence
  Description of Artificial Sequence: Synthetic oligonucleotide
cacgacuuggccagcaaag

SEQ ID NO: 2186304 - RNA, 19 nt, Artificial Sequence
  Description of Artificial Sequence: Synthetic oligonucleotide
ugaagagccccgccugagg

SEQ ID NO: 2186305 - RNA, 19 nt, Artificial Sequence
  Description of Artificial Sequence: Synthetic oligonucleotide
ugauauggcggcgaauaug

SEQ ID NO: 2186306 - RNA, 19 nt, Artificial Sequence
  Description of Artificial Sequence: Synthetic oligonucleotide
uccucgaagauccgggccu

SEQ ID NO: 2186307 - RNA, 19 nt, Artificial Sequence
  Description of Artificial Sequence: Synthetic oligonucleotide
gagagaucaaaggucaguc

SEQ ID NO: 2186308 - RNA, 19 nt, Artificial Sequence
  Description of Artificial Sequence: Synthetic oligonucleotide
gguauaggaguacuuguug

SEQ ID NO: 2186309 - RNA, 19 nt, Artificial Sequence
  Description of Artificial Sequence: Synthetic oligonucleotide
guuacugcgguuaugcaga

SEQ ID NO: 2186310 - RNA, 19 nt, Artificial Sequence
  Description of Artificial Sequence: Synthetic oligonucleotide
uagcaugcaaugacgggac

SEQ ID NO: 2186311 - RNA, 19 nt, Artificial Sequence
  Description of Artificial Sequence: Synthetic oligonucleotide
gagagcuagaucugggcca

SEQ ID NO: 2186312 - RNA, 19 nt, Artificial Sequence
  Description of Artificial Sequence: Synthetic oligonucleotide
gguaguaccgagcuucacc

SEQ ID NO: 2186313 - RNA, 19 nt, Artificial Sequence
  Description of Artificial Sequence: Synthetic oligonucleotide
guuaaggauuguaccaaag

SEQ ID NO: 2186314 - RNA, 19 nt, Artificial Sequence
  Description of Artificial Sequence: Synthetic oligonucleotide
uauggcggcgaauaugaau

SEQ ID NO: 2186315 - RNA, 19 nt, Artificial Sequence
  Description of Artificial Sequence: Synthetic oligonucleotide
ucucuaguacucucaggca

SEQ ID NO: 2186316 - RNA, 19 nt, Artificial Sequence
  Description of Artificial Sequence: Synthetic oligonucleotide
caaucuguuggccgugagg

SEQ ID NO: 2186317 - RNA, 19 nt, Artificial Sequence
  Description of Artificial Sequence: Synthetic oligonucleotide
guggaugucacugugggga

SEQ ID NO: 2186318 - RNA, 19 nt, Artificial Sequence
  Description of Artificial Sequence: Synthetic oligonucleotide
ggaaagacccacgacuugg

SEQ ID NO: 2186319 - RNA, 19 nt, Artificial Sequence
  Description of Artificial Sequence: Synthetic oligonucleotide
gaucaaaggucaguccuug

SEQ ID NO: 2186320 - RNA, 19 nt, Artificial Sequence
  Description of Artificial Sequence: Synthetic oligonucleotide
guaaguugucaucugaagu

SEQ ID NO: 2186321 - RNA, 19 nt, Artificial Sequence
  Description of Artificial Sequence: Synthetic oligonucleotide
cucauaaaucaagauguuc

SEQ ID NO: 2186322 - RNA, 19 nt, Artificial Sequence
  Description of Artificial Sequence: Synthetic oligonucleotide
auaaaucaagauguucagu

SEQ ID NO: 2186323 - RNA, 19 nt, Artificial Sequence
  Description of Artificial Sequence: Synthetic oligonucleotide
ugaagacaaucuguuggcc

SEQ ID NO: 2186324 - RNA, 19 nt, Artificial Sequence
  Description of Artificial Sequence: Synthetic oligonucleotide
uaguuaaggauuguaccaa

SEQ ID NO: 2186325 - RNA, 19 nt, Artificial Sequence
  Description of Artificial Sequence: Synthetic oligonucleotide
aagagccccgccugagggg

SEQ ID NO: 2186326 - RNA, 19 nt, Artificial Sequence
  Description of Artificial Sequence: Synthetic oligonucleotide
cagcugacagucuucaauc

SEQ ID NO: 2186327 - RNA, 19 nt, Artificial Sequence
  Description of Artificial Sequence: Synthetic oligonucleotide
guggaagagggguggaugc

SEQ ID NO: 2186328 - RNA, 19 nt, Artificial Sequence
  Description of Artificial Sequence: Synthetic oligonucleotide
gaagagggguggaugcugg

SEQ ID NO: 2186329 - RNA, 19 nt, Artificial Sequence
  Description of Artificial Sequence: Synthetic oligonucleotide
ugguauaggaguacuuguu

SEQ ID NO: 2186330 - RNA, 19 nt, Artificial Sequence
  Description of Artificial Sequence: Synthetic oligonucleotide
aguuucaccacgggcuugg

SEQ ID NO: 2186331 - RNA, 19 nt, Artificial Sequence
  Description of Artificial Sequence: Synthetic oligonucleotide
caagauguucagugucucc

SEQ ID NO: 2186332 - RNA, 19 nt, Artificial Sequence
  Description of Artificial Sequence: Synthetic oligonucleotide
acgacuuggccagcaaagc

SEQ ID NO: 2186333 - RNA, 19 nt, Artificial Sequence
  Description of Artificial Sequence: Synthetic oligonucleotide
gacacaggaaagacccacg

SEQ ID NO: 2186334 - RNA, 19 nt, Artificial Sequence
  Description of Artificial Sequence: Synthetic oligonucleotide
augguaagagaaagacagc

SEQ ID NO: 2186335 - RNA, 19 nt, Artificial Sequence
  Description of Artificial Sequence: Synthetic oligonucleotide
uggaaagggccucacugaa

SEQ ID NO: 2186336 - RNA, 19 nt, Artificial Sequence
  Description of Artificial Sequence: Synthetic oligonucleotide
agagcuagaucugggccac

SEQ ID NO: 2186337 - RNA, 19 nt, Artificial Sequence
  Description of Artificial Sequence: Synthetic oligonucleotide
guucucuaguacucucagg

SEQ ID NO: 2186338 - RNA, 19 nt, Artificial Sequence
  Description of Artificial Sequence: Synthetic oligonucleotide
agacuauggaggugcagca

SEQ ID NO: 2186339 - RNA, 19 nt, Artificial Sequence
  Description of Artificial Sequence: Synthetic oligonucleotide
ggucccacaagcaagagga

SEQ ID NO: 2186340 - RNA, 19 nt, Artificial Sequence
  Description of Artificial Sequence: Synthetic oligonucleotide
agaggaagauaggagagau

SEQ ID NO: 2186341 - RNA, 19 nt, Artificial Sequence
  Description of Artificial Sequence: Synthetic oligonucleotide
aguuaaggauuguaccaaa

SEQ ID NO: 2186342 - RNA, 19 nt, Artificial Sequence
  Description of Artificial Sequence: Synthetic oligonucleotide
cuuucugaagagccccgcc

SEQ ID NO: 2186343 - RNA, 19 nt, Artificial Sequence
  Description of Artificial Sequence: Synthetic oligonucleotide
ggagagcuagaucugggcc

SEQ ID NO: 2186344 - RNA, 19 nt, Artificial Sequence
  Description of Artificial Sequence: Synthetic oligonucleotide
augaauccuccggacacgg

SEQ ID NO: 2186345 - RNA, 19 nt, Artificial Sequence
  Description of Artificial Sequence: Synthetic oligonucleotide
gcauagacuauggaggugc

SEQ ID NO: 2186346 - RNA, 19 nt, Artificial Sequence
  Description of Artificial Sequence: Synthetic oligonucleotide
uggcuuucugaagagcccc

SEQ ID NO: 2186347 - RNA, 19 nt, Artificial Sequence
  Description of Artificial Sequence: Synthetic oligonucleotide
caggagagcuagaucuggg

SEQ ID NO: 2186348 - RNA, 19 nt, Artificial Sequence
  Description of Artificial Sequence: Synthetic oligonucleotide
agaucugggccacggggag

SEQ ID NO: 2186349 - RNA, 19 nt, Artificial Sequence
  Description of Artificial Sequence: Synthetic oligonucleotide
cuucaaucaggcccuggac

SEQ ID NO: 2186350 - RNA, 19 nt, Artificial Sequence
  Description of Artificial Sequence: Synthetic oligonucleotide
agccggggcaaagagagag

SEQ ID NO: 2186351 - RNA, 19 nt, Artificial Sequence
  Description of Artificial Sequence: Synthetic oligonucleotide
aggacgcucaucaugggug

SEQ ID NO: 2186352 - RNA, 19 nt, Artificial Sequence
  Description of Artificial Sequence: Synthetic oligonucleotide
acgggacacaggaaagacc

SEQ ID NO: 2186353 - RNA, 19 nt, Artificial Sequence
  Description of Artificial Sequence: Synthetic oligonucleotide
ugggacugacccaucccgc

SEQ ID NO: 2186354 - RNA, 19 nt, Artificial Sequence
  Description of Artificial Sequence: Synthetic oligonucleotide
aaagagagagggacugggu

SEQ ID NO: 2186355 - RNA, 19 nt, Artificial Sequence
  Description of Artificial Sequence: Synthetic oligonucleotide
gggacugggucccacaagc

SEQ ID NO: 2186356 - RNA, 19 nt, Artificial Sequence
  Description of Artificial Sequence: Synthetic oligonucleotide
ccgagcuucacccagcagc

SEQ ID NO: 2186357 - RNA, 19 nt, Artificial Sequence
  Description of Artificial Sequence: Synthetic oligonucleotide
ccucacugaacauagcaug

SEQ ID NO: 2186358 - RNA, 19 nt, Artificial Sequence
  Description of Artificial Sequence: Synthetic oligonucleotide
uucacccagcagcuccccg

SEQ ID NO: 2186359 - RNA, 19 nt, Artificial Sequence
  Description of Artificial Sequence: Synthetic oligonucleotide
gaaagacccacgacuuggc

SEQ ID NO: 2186360 - RNA, 19 nt, Artificial Sequence
  Description of Artificial Sequence: Synthetic oligonucleotide
agaugguaagagaaagaca

SEQ ID NO: 2186361 - RNA, 19 nt, Artificial Sequence
  Description of Artificial Sequence: Synthetic oligonucleotide
cuguuggccgugaggacgc

SEQ ID NO: 2186362 - RNA, 19 nt, Artificial Sequence
  Description of Artificial Sequence: Synthetic oligonucleotide
guauaggaguacuuguugu

SEQ ID NO: 2186363 - RNA, 19 nt, Artificial Sequence
  Description of Artificial Sequence: Synthetic oligonucleotide
ugaggacgcucaucauggg

SEQ ID NO: 2186364 - RNA, 19 nt, Artificial Sequence
  Description of Artificial Sequence: Synthetic oligonucleotide
agggcuaguuugucaaaca

SEQ ID NO: 2186365 - RNA, 19 nt, Artificial Sequence
  Description of Artificial Sequence: Synthetic oligonucleotide
aggaguacuuguuguuacu

SEQ ID NO: 2186366 - RNA, 19 nt, Artificial Sequence
  Description of Artificial Sequence: Synthetic oligonucleotide
agcugacagucuucaauca

SEQ ID NO: 2186367 - RNA, 19 nt, Artificial Sequence
  Description of Artificial Sequence: Synthetic oligonucleotide
gggcuaguuugucaaacag

SEQ ID NO: 2186368 - RNA, 19 nt, Artificial Sequence
  Description of Artificial Sequence: Synthetic oligonucleotide
gggagucucauaaaucaag

SEQ ID NO: 2186369 - RNA, 19 nt, Artificial Sequence
  Description of Artificial Sequence: Synthetic oligonucleotide
agcuagaucugggccacgg

SEQ ID NO: 2186370 - RNA, 19 nt, Artificial Sequence
  Description of Artificial Sequence: Synthetic oligonucleotide
aggaaagacccacgacuug

SEQ ID NO: 2186371 - RNA, 19 nt, Artificial Sequence
  Description of Artificial Sequence: Synthetic oligonucleotide
cuggaauguaccauguugu

SEQ ID NO: 2186372 - RNA, 19 nt, Artificial Sequence
  Description of Artificial Sequence: Synthetic oligonucleotide
gagagagggacuggguccc

SEQ ID NO: 2186373 - RNA, 19 nt, Artificial Sequence
  Description of Artificial Sequence: Synthetic oligonucleotide
ggcgaauaugaauccuccg

SEQ ID NO: 2186374 - RNA, 19 nt, Artificial Sequence
  Description of Artificial Sequence: Synthetic oligonucleotide
uccccgaguucucuaguac

SEQ ID NO: 2186375 - RNA, 19 nt, Artificial Sequence
  Description of Artificial Sequence: Synthetic oligonucleotide
cuaguuugucaaacagcuc

SEQ ID NO: 2186376 - RNA, 19 nt, Artificial Sequence
  Description of Artificial Sequence: Synthetic oligonucleotide
uuguuacugcgguuaugca

SEQ ID NO: 2186377 - RNA, 19 nt, Artificial Sequence
  Description of Artificial Sequence: Synthetic oligonucleotide
agggccucacugaacauag

SEQ ID NO: 2186378 - RNA, 19 nt, Artificial Sequence
  Description of Artificial Sequence: Synthetic oligonucleotide
gacacggugcucccgguuc

SEQ ID NO: 2186379 - RNA, 19 nt, Artificial Sequence
  Description of Artificial Sequence: Synthetic oligonucleotide
acaaucuguuggccgugag

SEQ ID NO: 2186380 - RNA, 19 nt, Artificial Sequence
  Description of Artificial Sequence: Synthetic oligonucleotide
gacgggacacaggaaagac

SEQ ID NO: 2186381 - RNA, 19 nt, Artificial Sequence
  Description of Artificial Sequence: Synthetic oligonucleotide
gacagcagaacaaggacgu

SEQ ID NO: 2186382 - RNA, 19 nt, Artificial Sequence
  Description of Artificial Sequence: Synthetic oligonucleotide
cuuguuguuacugcgguua

SEQ ID NO: 2186383 - RNA, 19 nt, Artificial Sequence
  Description of Artificial Sequence: Synthetic oligonucleotide
guggaugcuggcuuucuga

SEQ ID NO: 2186384 - RNA, 19 nt, Artificial Sequence
  Description of Artificial Sequence: Synthetic oligonucleotide
aucgucuccucugccugcc

SEQ ID NO: 2186385 - RNA, 19 nt, Artificial Sequence
  Description of Artificial Sequence: Synthetic oligonucleotide
cugcagugccagcugacag

SEQ ID NO: 2186386 - RNA, 19 nt, Artificial Sequence
  Description of Artificial Sequence: Synthetic oligonucleotide
gcugacagucuucaaucag

SEQ ID NO: 2186387 - RNA, 19 nt, Artificial Sequence
  Description of Artificial Sequence: Synthetic oligonucleotide
cacaggaaagacccacgac

SEQ ID NO: 2186388 - RNA, 19 nt, Artificial Sequence
  Description of Artificial Sequence: Synthetic oligonucleotide
acgggcuuggaggugcugg

SEQ ID NO: 2186389 - RNA, 19 nt, Artificial Sequence
  Description of Artificial Sequence: Synthetic oligonucleotide
uguuguuacugcgguuaug

SEQ ID NO: 2186390 - RNA, 19 nt, Artificial Sequence
  Description of Artificial Sequence: Synthetic oligonucleotide
auaggaguacuuguuguua

SEQ ID NO: 2186391 - RNA, 19 nt, Artificial Sequence
  Description of Artificial Sequence: Synthetic oligonucleotide
gugaguggcaaugacugga

SEQ ID NO: 2186392 - RNA, 19 nt, Artificial Sequence
  Description of Artificial Sequence: Synthetic oligonucleotide
ugacgggacacaggaaaga

SEQ ID NO: 2186393 - RNA, 19 nt, Artificial Sequence
  Description of Artificial Sequence: Synthetic oligonucleotide
uaccgagcuucacccagca

SEQ ID NO: 2186394 - RNA, 19 nt, Artificial Sequence
  Description of Artificial Sequence: Synthetic oligonucleotide
guaccaaagugucggccac

SEQ ID NO: 2186395 - RNA, 19 nt, Artificial Sequence
  Description of Artificial Sequence: Synthetic oligonucleotide
gcuaguuugucaaacagcu

SEQ ID NO: 2186396 - RNA, 19 nt, Artificial Sequence
  Description of Artificial Sequence: Synthetic oligonucleotide
ggcaaagagagagggacug

SEQ ID NO: 2186397 - RNA, 19 nt, Artificial Sequence
  Description of Artificial Sequence: Synthetic oligonucleotide
ugcgguuaugcagaaguuu

SEQ ID NO: 2186398 - RNA, 19 nt, Artificial Sequence
  Description of Artificial Sequence: Synthetic oligonucleotide
aguuugucaaacagcucga

SEQ ID NO: 2186399 - RNA, 19 nt, Artificial Sequence
  Description of Artificial Sequence: Synthetic oligonucleotide
acggggagucucauaaauc

SEQ ID NO: 2186400 - RNA, 19 nt, Artificial Sequence
  Description of Artificial Sequence: Synthetic oligonucleotide
aagcuggaauguaccaugu

SEQ ID NO: 2186401 - RNA, 19 nt, Artificial Sequence
  Description of Artificial Sequence: Synthetic oligonucleotide
cuggaaagggccucacuga

SEQ ID NO: 2186402 - RNA, 19 nt, Artificial Sequence
  Description of Artificial Sequence: Synthetic oligonucleotide
gcaaagccggggcaaagag

SEQ ID NO: 2186403 - RNA, 19 nt, Artificial Sequence
  Description of Artificial Sequence: Synthetic oligonucleotide
uggcggcgaauaugaaucc

SEQ ID NO: 2186404 - RNA, 19 nt, Artificial Sequence
  Description of Artificial Sequence: Synthetic oligonucleotide
aaagggccucacugaacau

SEQ ID NO: 2186405 - RNA, 19 nt, Artificial Sequence
  Description of Artificial Sequence: Synthetic oligonucleotide
ugcagcacacuucggcgau

SEQ ID NO: 2186406 - RNA, 19 nt, Artificial Sequence
  Description of Artificial Sequence: Synthetic oligonucleotide
augacgggacacaggaaag

SEQ ID NO: 2186407 - RNA, 19 nt, Artificial Sequence
  Description of Artificial Sequence: Synthetic oligonucleotide
ggcuaguuugucaaacagc

SEQ ID NO: 2186408 - RNA, 19 nt, Artificial Sequence
  Description of Artificial Sequence: Synthetic oligonucleotide
ucacuguggggaugaggca

SEQ ID NO: 2186409 - RNA, 19 nt, Artificial Sequence
  Description of Artificial Sequence: Synthetic oligonucleotide
ggauuguaccaaagugucg

SEQ ID NO: 2186410 - RNA, 19 nt, Artificial Sequence
  Description of Artificial Sequence: Synthetic oligonucleotide
aagugucggccacuccggu

SEQ ID NO: 2186411 - RNA, 19 nt, Artificial Sequence
  Description of Artificial Sequence: Synthetic oligonucleotide
cuucaucgucuccucugcc

SEQ ID NO: 2186412 - RNA, 19 nt, Artificial Sequence
  Description of Artificial Sequence: Synthetic oligonucleotide
gacugggucccacaagcaa

SEQ ID NO: 2186413 - RNA, 19 nt, Artificial Sequence
  Description of Artificial Sequence: Synthetic oligonucleotide
aagggccucacugaacaua

SEQ ID NO: 2186414 - RNA, 19 nt, Artificial Sequence
  Description of Artificial Sequence: Synthetic oligonucleotide
gcagaaguuucaccacggg

SEQ ID NO: 2186415 - RNA, 19 nt, Artificial Sequence
  Description of Artificial Sequence: Synthetic oligonucleotide
uaguacucucaggcagugg

SEQ ID NO: 2186416 - RNA, 19 nt, Artificial Sequence
  Description of Artificial Sequence: Synthetic oligonucleotide
cuucaguaaguugucaucu

SEQ ID NO: 2186417 - RNA, 19 nt, Artificial Sequence
  Description of Artificial Sequence: Synthetic oligonucleotide
cauguuguuagcagugagu

SEQ ID NO: 2186418 - RNA, 19 nt, Artificial Sequence
  Description of Artificial Sequence: Synthetic oligonucleotide
gguuaugcagaaguuucac

SEQ ID NO: 2186419 - RNA, 19 nt, Artificial Sequence
  Description of Artificial Sequence: Synthetic oligonucleotide
ggcaaugacuggaaagggc

SEQ ID NO: 2186420 - RNA, 19 nt, Artificial Sequence
  Description of Artificial Sequence: Synthetic oligonucleotide
cagggcuaguuugucaaac

SEQ ID NO: 2186421 - RNA, 19 nt, Artificial Sequence
  Description of Artificial Sequence: Synthetic oligonucleotide
ugccagcugacagucuuca

SEQ ID NO: 2186422 - RNA, 19 nt, Artificial Sequence
  Description of Artificial Sequence: Synthetic oligonucleotide
caucccgcagguaguuaag

SEQ ID NO: 2186423 - RNA, 19 nt, Artificial Sequence
  Description of Artificial Sequence: Synthetic oligonucleotide
ggccucacugaacauagca

SEQ ID NO: 2186424 - RNA, 19 nt, Artificial Sequence
  Description of Artificial Sequence: Synthetic oligonucleotide
cuaguacucucaggcagug

SEQ ID NO: 2186425 - RNA, 19 nt, Artificial Sequence
  Description of Artificial Sequence: Synthetic oligonucleotide
gggucccacaagcaagagg

SEQ ID NO: 2186426 - RNA, 19 nt, Artificial Sequence
  Description of Artificial Sequence: Synthetic oligonucleotide
cagcaaaucucaucuccca

SEQ ID NO: 2186427 - RNA, 19 nt, Artificial Sequence
  Description of Artificial Sequence: Synthetic oligonucleotide
caugcaaugacgggacaca

SEQ ID NO: 2186428 - RNA, 19 nt, Artificial Sequence
  Description of Artificial Sequence: Synthetic oligonucleotide
ggagucucauaaaucaaga

SEQ ID NO: 2186429 - RNA, 19 nt, Artificial Sequence
  Description of Artificial Sequence: Synthetic oligonucleotide
ugggugauauggcggcgaa

SEQ ID NO: 2186430 - RNA, 19 nt, Artificial Sequence
  Description of Artificial Sequence: Synthetic oligonucleotide
guaccauguuguuagcagu

SEQ ID NO: 2186431 - RNA, 19 nt, Artificial Sequence
  Description of Artificial Sequence: Synthetic oligonucleotide
uaguaccgagcuucaccca

SEQ ID NO: 2186432 - RNA, 19 nt, Artificial Sequence
  Description of Artificial Sequence: Synthetic oligonucleotide
cuccguggcauagacuaug

SEQ ID NO: 2186433 - RNA, 19 nt, Artificial Sequence
  Description of Artificial Sequence: Synthetic oligonucleotide
ugaauccuccggacacggu

SEQ ID NO: 2186434 - RNA, 19 nt, Artificial Sequence
  Description of Artificial Sequence: Synthetic oligonucleotide
gccgugaggacgcucauca

SEQ ID NO: 2186435 - RNA, 19 nt, Artificial Sequence
  Description of Artificial Sequence: Synthetic oligonucleotide
caaggacguggaagagggg

SEQ ID NO: 2186436 - RNA, 19 nt, Artificial Sequence
  Description of Artificial Sequence: Synthetic oligonucleotide
agcaaagccggggcaaaga

SEQ ID NO: 2186437 - RNA, 19 nt, Artificial Sequence
  Description of Artificial Sequence: Synthetic oligonucleotide
caugggugauauggcggcg

SEQ ID NO: 2186438 - RNA, 19 nt, Artificial Sequence
  Description of Artificial Sequence: Synthetic oligonucleotide
ucccgguucucuucaucgu

SEQ ID NO: 2186439 - RNA, 19 nt, Artificial Sequence
  Description of Artificial Sequence: Synthetic oligonucleotide
agagcggggacagguucuc

SEQ ID NO: 2186440 - RNA, 19 nt, Artificial Sequence
  Description of Artificial Sequence: Synthetic oligonucleotide
ggacacaggaaagacccac

SEQ ID NO: 2186441 - RNA, 19 nt, Artificial Sequence
  Description of Artificial Sequence: Synthetic oligonucleotide
uggaagagggguggaugcu

SEQ ID NO: 2186442 - RNA, 19 nt, Artificial Sequence
  Description of Artificial Sequence: Synthetic oligonucleotide
gcgguuaugcagaaguuuc

SEQ ID NO: 2186443 - RNA, 19 nt, Artificial Sequence
  Description of Artificial Sequence: Synthetic oligonucleotide
ggacguggaagaggggugg

SEQ ID NO: 2186444 - RNA, 19 nt, Artificial Sequence
  Description of Artificial Sequence: Synthetic oligonucleotide
aggacguggaagaggggug

SEQ ID NO: 2186445 - RNA, 19 nt, Artificial Sequence
  Description of Artificial Sequence: Synthetic oligonucleotide
agguaguaccgagcuucac

SEQ ID NO: 2186446 - RNA, 19 nt, Artificial Sequence
  Description of Artificial Sequence: Synthetic oligonucleotide
uuacugcgguuaugcagaa

SEQ ID NO: 2186447 - RNA, 19 nt, Artificial Sequence
  Description of Artificial Sequence: Synthetic oligonucleotide
agagggguggaugcuggcu

SEQ ID NO: 2186448 - RNA, 19 nt, Artificial Sequence
  Description of Artificial Sequence: Synthetic oligonucleotide
aagcgcagggcuaguuugu

SEQ ID NO: 2186449 - RNA, 19 nt, Artificial Sequence
  Description of Artificial Sequence: Synthetic oligonucleotide
agacaaucuguuggccgug

SEQ ID NO: 2186450 - RNA, 19 nt, Artificial Sequence
  Description of Artificial Sequence: Synthetic oligonucleotide
uucccgggguggaugucac

SEQ ID NO: 2186451 - RNA, 19 nt, Artificial Sequence
  Description of Artificial Sequence: Synthetic oligonucleotide
ggacugacccaucccgcag

SEQ ID NO: 2186452 - RNA, 19 nt, Artificial Sequence
  Description of Artificial Sequence: Synthetic oligonucleotide
gccacggggagucucauaa

SEQ ID NO: 2186453 - RNA, 19 nt, Artificial Sequence
  Description of Artificial Sequence: Synthetic oligonucleotide
guccuugaagacaaucugu

SEQ ID NO: 2186454 - RNA, 19 nt, Artificial Sequence
  Description of Artificial Sequence: Synthetic oligonucleotide
gguggaugcuggcuuucug

SEQ ID NO: 2186455 - RNA, 19 nt, Artificial Sequence
  Description of Artificial Sequence: Synthetic oligonucleotide
uaccaaagugucggccacu

SEQ ID NO: 2186456 - RNA, 19 nt, Artificial Sequence
  Description of Artificial Sequence: Synthetic oligonucleotide
cgaauaugaauccuccgga

SEQ ID NO: 2186457 - RNA, 19 nt, Artificial Sequence
  Description of Artificial Sequence: Synthetic oligonucleotide
guaccgagcuucacccagc

SEQ ID NO: 2186458 - RNA, 19 nt, Artificial Sequence
  Description of Artificial Sequence: Synthetic oligonucleotide
acagcagaacaaggacgug

SEQ ID NO: 2186459 - RNA, 19 nt, Artificial Sequence
  Description of Artificial Sequence: Synthetic oligonucleotide
cagugucuccucgaagauc

SEQ ID NO: 2186460 - RNA, 19 nt, Artificial Sequence
  Description of Artificial Sequence: Synthetic oligonucleotide
ccggggcaaagagagaggg

SEQ ID NO: 2186461 - RNA, 19 nt, Artificial Sequence
  Description of Artificial Sequence: Synthetic oligonucleotide
cucccaggacauccuugag

SEQ ID NO: 2186462 - RNA, 19 nt, Artificial Sequence
  Description of Artificial Sequence: Synthetic oligonucleotide
gcaugcaaugacgggacac

SEQ ID NO: 2186463 - RNA, 19 nt, Artificial Sequence
  Description of Artificial Sequence: Synthetic oligonucleotide
cggggagucucauaaauca

SEQ ID NO: 2186464 - RNA, 19 nt, Artificial Sequence
  Description of Artificial Sequence: Synthetic oligonucleotide
ugacuggaaagggccucac

SEQ ID NO: 2186465 - RNA, 19 nt, Artificial Sequence
  Description of Artificial Sequence: Synthetic oligonucleotide
acuguggggaugaggcaga

SEQ ID NO: 2186466 - RNA, 19 nt, Artificial Sequence
  Description of Artificial Sequence: Synthetic oligonucleotide
caucugaagugcugguaua

SEQ ID NO: 2186467 - RNA, 19 nt, Artificial Sequence
  Description of Artificial Sequence: Synthetic oligonucleotide
ggaauguaccauguuguua

SEQ ID NO: 2186468 - RNA, 19 nt, Artificial Sequence
  Description of Artificial Sequence: Synthetic oligonucleotide
cccgaguucucuaguacuc

SEQ ID NO: 2186469 - RNA, 19 nt, Artificial Sequence
  Description of Artificial Sequence: Synthetic oligonucleotide
ucgucuccucugccugccc

SEQ ID NO: 2186470 - RNA, 19 nt, Artificial Sequence
  Description of Artificial Sequence: Synthetic oligonucleotide
auccuccggacacggugcu

SEQ ID NO: 2186471 - RNA, 19 nt, Artificial Sequence
  Description of Artificial Sequence: Synthetic oligonucleotide
cggcgaauaugaauccucc

SEQ ID NO: 2186472 - RNA, 19 nt, Artificial Sequence
  Description of Artificial Sequence: Synthetic oligonucleotide
cgacuuggccagcaaagcc

SEQ ID NO: 2186473 - RNA, 19 nt, Artificial Sequence
  Description of Artificial Sequence: Synthetic oligonucleotide
ucucaggcagugggacuga

SEQ ID NO: 2186474 - RNA, 19 nt, Artificial Sequence
  Description of Artificial Sequence: Synthetic oligonucleotide
cagguaguuaaggauugua

SEQ ID NO: 2186475 - RNA, 19 nt, Artificial Sequence
  Description of Artificial Sequence: Synthetic oligonucleotide
ggugcucccgguucucuuc

SEQ ID NO: 2186476 - RNA, 19 nt, Artificial Sequence
  Description of Artificial Sequence: Synthetic oligonucleotide
ggacgcucaucauggguga

SEQ ID NO: 2186477 - RNA, 19 nt, Artificial Sequence
  Description of Artificial Sequence: Synthetic oligonucleotide
guacucucaggcaguggga

SEQ ID NO: 2186478 - RNA, 19 nt, Artificial Sequence
  Description of Artificial Sequence: Synthetic oligonucleotide
ccuccggacacggugcucc

SEQ ID NO: 2186479 - RNA, 19 nt, Artificial Sequence
  Description of Artificial Sequence: Synthetic oligonucleotide
gcagccgcccauggaagcg

SEQ ID NO: 2186480 - RNA, 19 nt, Artificial Sequence
  Description of Artificial Sequence: Synthetic oligonucleotide
gggacugacccaucccgca

SEQ ID NO: 2186481 - RNA, 19 nt, Artificial Sequence
  Description of Artificial Sequence: Synthetic oligonucleotide
cuccggacacggugcuccc

SEQ ID NO: 2186482 - RNA, 19 nt, Artificial Sequence
  Description of Artificial Sequence: Synthetic oligonucleotide
cuucccgggguggauguca

SEQ ID NO: 2186483 - RNA, 19 nt, Artificial Sequence
  Description of Artificial Sequence: Synthetic oligonucleotide
ggaaagggccucacugaac

SEQ ID NO: 2186484 - RNA, 19 nt, Artificial Sequence
  Description of Artificial Sequence: Synthetic oligonucleotide
ccggacacggugcucccgg

SEQ ID NO: 2186485 - RNA, 19 nt, Artificial Sequence
  Description of Artificial Sequence: Synthetic oligonucleotide
caaugacgggacacaggaa

SEQ ID NO: 2186486 - RNA, 19 nt, Artificial Sequence
  Description of Artificial Sequence: Synthetic oligonucleotide
gcuuucugaagagccccgc

SEQ ID NO: 2186487 - RNA, 19 nt, Artificial Sequence
  Description of Artificial Sequence: Synthetic oligonucleotide
gagcuagaucugggccacg

SEQ ID NO: 2186488 - RNA, 19 nt, Artificial Sequence
  Description of Artificial Sequence: Synthetic oligonucleotide
cugccccaccaccuccagc

SEQ ID NO: 2186489 - RNA, 19 nt, Artificial Sequence
  Description of Artificial Sequence: Synthetic oligonucleotide
gacguggaagaggggugga

SEQ ID NO: 2186490 - RNA, 19 nt, Artificial Sequence
  Description of Artificial Sequence: Synthetic oligonucleotide
agucuucaaucaggcccug

SEQ ID NO: 2186491 - RNA, 19 nt, Artificial Sequence
  Description of Artificial Sequence: Synthetic oligonucleotide
gugucuccucgaagauccg

SEQ ID NO: 2186492 - RNA, 19 nt, Artificial Sequence
  Description of Artificial Sequence: Synthetic oligonucleotide
gcggcgaauaugaauccuc

SEQ ID NO: 2186493 - RNA, 19 nt, Artificial Sequence
  Description of Artificial Sequence: Synthetic oligonucleotide
ugucggccacuccggucaa

SEQ ID NO: 2186494 - RNA, 19 nt, Artificial Sequence
  Description of Artificial Sequence: Synthetic oligonucleotide
uggaagcgcagggcuaguu

SEQ ID NO: 2186495 - RNA, 19 nt, Artificial Sequence
  Description of Artificial Sequence: Synthetic oligonucleotide
cgaagauccgggccucagg

SEQ ID NO: 2186496 - RNA, 19 nt, Artificial Sequence
  Description of Artificial Sequence: Synthetic oligonucleotide
gaggugcuggccagaagcu

SEQ ID NO: 2186497 - RNA, 19 nt, Artificial Sequence
  Description of Artificial Sequence: Synthetic oligonucleotide
cgaguucucuaguacucuc

SEQ ID NO: 2186498 - RNA, 19 nt, Artificial Sequence
  Description of Artificial Sequence: Synthetic oligonucleotide
gugauauggcggcgaauau

SEQ ID NO: 2186499 - RNA, 19 nt, Artificial Sequence
  Description of Artificial Sequence: Synthetic oligonucleotide
cuccccgaguucucuagua

SEQ ID NO: 2186500 - RNA, 19 nt, Artificial Sequence
  Description of Artificial Sequence: Synthetic oligonucleotide
gagcggggacagguucucc

SEQ ID NO: 2186501 - RNA, 19 nt, Artificial Sequence
  Description of Artificial Sequence: Synthetic oligonucleotide
cccgguucucuucaucguc

SEQ ID NO: 2186502 - RNA, 19 nt, Artificial Sequence
  Description of Artificial Sequence: Synthetic oligonucleotide
acgcucaucaugggugaua

SEQ ID NO: 2186503 - RNA, 19 nt, Artificial Sequence
  Description of Artificial Sequence: Synthetic oligonucleotide
acguggaagagggguggau

SEQ ID NO: 2186504 - RNA, 19 nt, Artificial Sequence
  Description of Artificial Sequence: Synthetic oligonucleotide
cccgggguggaugucacug

SEQ ID NO: 2186505 - RNA, 19 nt, Artificial Sequence
  Description of Artificial Sequence: Synthetic oligonucleotide
aagccggggcaaagagaga

SEQ ID NO: 2186506 - RNA, 19 nt, Artificial Sequence
  Description of Artificial Sequence: Synthetic oligonucleotide
uggccgugaggacgcucau

SEQ ID NO: 2186507 - RNA, 19 nt, Artificial Sequence
  Description of Artificial Sequence: Synthetic oligonucleotide
gcucgauguucuucaguaa

SEQ ID NO: 2186508 - RNA, 19 nt, Artificial Sequence
  Description of Artificial Sequence: Synthetic oligonucleotide
ccuccaggagagcuagauc

SEQ ID NO: 2186509 - RNA, 19 nt, Artificial Sequence
  Description of Artificial Sequence: Synthetic oligonucleotide
ucccgggguggaugucacu

SEQ ID NO: 2186510 - RNA, 19 nt, Artificial Sequence
  Description of Artificial Sequence: Synthetic oligonucleotide
auauggcggcgaauaugaa

SEQ ID NO: 2186511 - RNA, 19 nt, Artificial Sequence
  Description of Artificial Sequence: Synthetic oligonucleotide
gccggggcaaagagagagg

SEQ ID NO: 2186512 - RNA, 19 nt, Artificial Sequence
  Description of Artificial Sequence: Synthetic oligonucleotide
ggggagucucauaaaucaa

SEQ ID NO: 2186513 - RNA, 19 nt, Artificial Sequence
  Description of Artificial Sequence: Synthetic oligonucleotide
gcucaucaugggugauaug

SEQ ID NO: 2186514 - RNA, 19 nt, Artificial Sequence
  Description of Artificial Sequence: Synthetic oligonucleotide
acggugcucccgguucucu

SEQ ID NO: 2186515 - RNA, 19 nt, Artificial Sequence
  Description of Artificial Sequence: Synthetic oligonucleotide
cgcccauggaagcgcaggg

SEQ ID NO: 2186516 - RNA, 19 nt, Artificial Sequence
  Description of Artificial Sequence: Synthetic oligonucleotide
gugcugguauaggaguacu

SEQ ID NO: 2186517 - RNA, 19 nt, Artificial Sequence
  Description of Artificial Sequence: Synthetic oligonucleotide
auggaagcgcagggcuagu

SEQ ID NO: 2186518 - RNA, 19 nt, Artificial Sequence
  Description of Artificial Sequence: Synthetic oligonucleotide
ucuucccgggguggauguc

SEQ ID NO: 2186519 - RNA, 19 nt, Artificial Sequence
  Description of Artificial Sequence: Synthetic oligonucleotide
ccgcccauggaagcgcagg

SEQ ID NO: 2186520 - RNA, 19 nt, Artificial Sequence
  Description of Artificial Sequence: Synthetic oligonucleotide
ccagcugacagucuucaau

SEQ ID NO: 2186521 - RNA, 19 nt, Artificial Sequence
  Description of Artificial Sequence: Synthetic oligonucleotide
guuggccgugaggacgcuc

SEQ ID NO: 2186522 - RNA, 19 nt, Artificial Sequence
  Description of Artificial Sequence: Synthetic oligonucleotide
cugggccacggggagucuc

SEQ ID NO: 2186523 - RNA, 19 nt, Artificial Sequence
  Description of Artificial Sequence: Synthetic oligonucleotide
cuggaccagguaguaccga

SEQ ID NO: 2186524 - RNA, 19 nt, Artificial Sequence
  Description of Artificial Sequence: Synthetic oligonucleotide
uguuggccgugaggacgcu

SEQ ID NO: 2186525 - RNA, 19 nt, Artificial Sequence
  Description of Artificial Sequence: Synthetic oligonucleotide
auccgggccucagggaauu

SEQ ID NO: 2186526 - RNA, 19 nt, Artificial Sequence
  Description of Artificial Sequence: Synthetic oligonucleotide
acccaucccgcagguaguu

SEQ ID NO: 2186527 - RNA, 19 nt, Artificial Sequence
  Description of Artificial Sequence: Synthetic oligonucleotide
gacccaucccgcagguagu

SEQ ID NO: 2186528 - RNA, 19 nt, Artificial Sequence
  Description of Artificial Sequence: Synthetic oligonucleotide
cgguuaugcagaaguuuca

SEQ ID NO: 2186529 - RNA, 19 nt, Artificial Sequence
  Description of Artificial Sequence: Synthetic oligonucleotide
ggaagcgcagggcuaguuu

SEQ ID NO: 2186530 - RNA, 19 nt, Artificial Sequence
  Description of Artificial Sequence: Synthetic oligonucleotide
uccuccggacacggugcuc

SEQ ID NO: 2186531 - RNA, 19 nt, Artificial Sequence
  Description of Artificial Sequence: Synthetic oligonucleotide
ggacugggucccacaagca

SEQ ID NO: 2186532 - RNA, 19 nt, Artificial Sequence
  Description of Artificial Sequence: Synthetic oligonucleotide
cgggcuuggaggugcuggc

SEQ ID NO: 2186533 - RNA, 19 nt, Artificial Sequence
  Description of Artificial Sequence: Synthetic oligonucleotide
gaucugggccacggggagu

SEQ ID NO: 2186534 - RNA, 19 nt, Artificial Sequence
  Description of Artificial Sequence: Synthetic oligonucleotide
cugcgguuaugcagaaguu

SEQ ID NO: 2186535 - RNA, 19 nt, Artificial Sequence
  Description of Artificial Sequence: Synthetic oligonucleotide
gauccgggccucagggaau

SEQ ID NO: 2186536 - RNA, 19 nt, Artificial Sequence
  Description of Artificial Sequence: Synthetic oligonucleotide
cacggugcucccgguucuc

SEQ ID NO: 2186537 - RNA, 19 nt, Artificial Sequence
  Description of Artificial Sequence: Synthetic oligonucleotide
ccgguucucuucaucgucu

SEQ ID NO: 2186538 - RNA, 19 nt, Artificial Sequence
  Description of Artificial Sequence: Synthetic oligonucleotide
ccacgacuuggccagcaaa

SEQ ID NO: 2186539 - RNA, 19 nt, Artificial Sequence
  Description of Artificial Sequence: Synthetic oligonucleotide
cacgggcuuggaggugcug

SEQ ID NO: 2186540 - RNA, 19 nt, Artificial Sequence
  Description of Artificial Sequence: Synthetic oligonucleotide
uccgggccucagggaauuc

SEQ ID NO: 2186541 - RNA, 19 nt, Artificial Sequence
  Description of Artificial Sequence: Synthetic oligonucleotide
ccccuguggccuccaggag

SEQ ID NO: 2186542 - RNA, 19 nt, Artificial Sequence
  Description of Artificial Sequence: Synthetic oligonucleotide
ccucgaagauccgggccuc

SEQ ID NO: 2186543 - RNA, 19 nt, Artificial Sequence
  Description of Artificial Sequence: Synthetic oligonucleotide
ggcggcgaauaugaauccu

SEQ ID NO: 2186544 - RNA, 19 nt, Artificial Sequence
  Description of Artificial Sequence: Synthetic oligonucleotide
cagcuccccgaguucucua

SEQ ID NO: 2186545 - RNA, 19 nt, Artificial Sequence
  Description of Artificial Sequence: Synthetic oligonucleotide
gcccuggaccagguaguac

SEQ ID NO: 2186546 - RNA, 19 nt, Artificial Sequence
  Description of Artificial Sequence: Synthetic oligonucleotide
gccuccaggagagcuagau

SEQ ID NO: 2186547 - RNA, 19 nt, Artificial Sequence
  Description of Artificial Sequence: Synthetic oligonucleotide
ggccgugaggacgcucauc

SEQ ID NO: 2186548 - RNA, 19 nt, Artificial Sequence
  Description of Artificial Sequence: Synthetic oligonucleotide
ccguggcauagacuaugga

SEQ ID NO: 2186549 - RNA, 19 nt, Artificial Sequence
  Description of Artificial Sequence: Synthetic oligonucleotide
gcagguaguuaaggauugu

SEQ ID NO: 2186550 - RNA, 19 nt, Artificial Sequence
  Description of Artificial Sequence: Synthetic oligonucleotide
cagcacacuucggcgauuu

SEQ ID NO: 2186551 - RNA, 19 nt, Artificial Sequence
  Description of Artificial Sequence: Synthetic oligonucleotide
gcuccccgaguucucuagu

SEQ ID NO: 2186552 - RNA, 19 nt, Artificial Sequence
  Description of Artificial Sequence: Synthetic oligonucleotide
gcagugggacugacccauc

SEQ ID NO: 2186553 - RNA, 19 nt, Artificial Sequence
  Description of Artificial Sequence: Synthetic oligonucleotide
gccagaagcugcugcucuu

SEQ ID NO: 2186554 - RNA, 19 nt, Artificial Sequence
  Description of Artificial Sequence: Synthetic oligonucleotide
gccgcccauggaagcgcag

SEQ ID NO: 2186555 - RNA, 19 nt, Artificial Sequence
  Description of Artificial Sequence: Synthetic oligonucleotide
ccgaguucucuaguacucu

SEQ ID NO: 2186556 - RNA, 19 nt, Artificial Sequence
  Description of Artificial Sequence: Synthetic oligonucleotide
ggacacggugcucccgguu

SEQ ID NO: 2186557 - RNA, 19 nt, Artificial Sequence
  Description of Artificial Sequence: Synthetic oligonucleotide
ggccacggggagucucaua

SEQ ID NO: 2186558 - RNA, 19 nt, Artificial Sequence
  Description of Artificial Sequence: Synthetic oligonucleotide
cccacgacuuggccagcaa

SEQ ID NO: 2186559 - RNA, 19 nt, Artificial Sequence
  Description of Artificial Sequence: Synthetic oligonucleotide
ccgggguggaugucacugu

SEQ ID NO: 2186560 - RNA, 19 nt, Artificial Sequence
  Description of Artificial Sequence: Synthetic oligonucleotide
gggugauauggcggcgaau

SEQ ID NO: 2186561 - RNA, 19 nt, Artificial Sequence
  Description of Artificial Sequence: Synthetic oligonucleotide
ggcagagcggggacagguu

SEQ ID NO: 2186562 - RNA, 19 nt, Artificial Sequence
  Description of Artificial Sequence: Synthetic oligonucleotide
gucggccacuccggucaau

SEQ ID NO: 2186563 - RNA, 19 nt, Artificial Sequence
  Description of Artificial Sequence: Synthetic oligonucleotide
ccgugaggacgcucaucau

SEQ ID NO: 2186564 - RNA, 19 nt, Artificial Sequence
  Description of Artificial Sequence: Synthetic oligonucleotide
gcagcacacuucggcgauu

SEQ ID NO: 2186565 - RNA, 19 nt, Artificial Sequence
  Description of Artificial Sequence: Synthetic oligonucleotide
ccacgggcuuggaggugcu

SEQ ID NO: 2186566 - RNA, 19 nt, Artificial Sequence
  Description of Artificial Sequence: Synthetic oligonucleotide
agaucuagcacauucaggc

SEQ ID NO: 2186567 - RNA, 19 nt, Artificial Sequence
  Description of Artificial Sequence: Synthetic oligonucleotide
cuaacuuugaagaaggggc

SEQ ID NO: 2186568 - RNA, 19 nt, Artificial Sequence
  Description of Artificial Sequence: Synthetic oligonucleotide
uguaagaccacccacuaag

SEQ ID NO: 2186569 - RNA, 19 nt, Artificial Sequence
  Description of Artificial Sequence: Synthetic oligonucleotide
aauccaugaguccuggggc

SEQ ID NO: 2186570 - RNA, 19 nt, Artificial Sequence
  Description of Artificial Sequence: Synthetic oligonucleotide
acuaagauggguuccuugc

SEQ ID NO: 2186571 - RNA, 19 nt, Artificial Sequence
  Description of Artificial Sequence: Synthetic oligonucleotide
aacaugagcacuccugagg

SEQ ID NO: 2186572 - RNA, 19 nt, Artificial Sequence
  Description of Artificial Sequence: Synthetic oligonucleotide
uugccuaggaugaagauga

SEQ ID NO: 2186573 - RNA, 19 nt, Artificial Sequence
  Description of Artificial Sequence: Synthetic oligonucleotide
acagagaucuagcacauuc

SEQ ID NO: 2186574 - RNA, 19 nt, Artificial Sequence
  Description of Artificial Sequence: Synthetic oligonucleotide
ugagacauauucaaagucu

SEQ ID NO: 2186575 - RNA, 19 nt, Artificial Sequence
  Description of Artificial Sequence: Synthetic oligonucleotide
ugaaucuucucugagaaug

SEQ ID NO: 2186576 - RNA, 19 nt, Artificial Sequence
  Description of Artificial Sequence: Synthetic oligonucleotide
aaguggucggcacuguacc

SEQ ID NO: 2186577 - RNA, 19 nt, Artificial Sequence
  Description of Artificial Sequence: Synthetic oligonucleotide
aagucuggcccuuuauagc

SEQ ID NO: 2186578 - RNA, 19 nt, Artificial Sequence
  Description of Artificial Sequence: Synthetic oligonucleotide
ucuuggcuaacuuugaaga

SEQ ID NO: 2186579 - RNA, 19 nt, Artificial Sequence
  Description of Artificial Sequence: Synthetic oligonucleotide
gagucgaucaagucgaugc

SEQ ID NO: 2186580 - RNA, 19 nt, Artificial Sequence
  Description of Artificial Sequence: Synthetic oligonucleotide
aauguggccacccuggccu

SEQ ID NO: 2186581 - RNA, 19 nt, Artificial Sequence
  Description of Artificial Sequence: Synthetic oligonucleotide
aucaagucgaugcaguggg

SEQ ID NO: 2186582 - RNA, 19 nt, Artificial Sequence
  Description of Artificial Sequence: Synthetic oligonucleotide
auaacuucugcuuuagcug

SEQ ID NO: 2186583 - RNA, 19 nt, Artificial Sequence
  Description of Artificial Sequence: Synthetic oligonucleotide
cauauucaaagucuggccc

SEQ ID NO: 2186584 - RNA, 19 nt, Artificial Sequence
  Description of Artificial Sequence: Synthetic oligonucleotide
aagaccacccacuaagaug

SEQ ID NO: 2186585 - RNA, 19 nt, Artificial Sequence
  Description of Artificial Sequence: Synthetic oligonucleotide
aggugagucgaucaagucg

SEQ ID NO: 2186586 - RNA, 19 nt, Artificial Sequence
  Description of Artificial Sequence: Synthetic oligonucleotide
caucacaagauccuggggc

SEQ ID NO: 2186587 - RNA, 19 nt, Artificial Sequence
  Description of Artificial Sequence: Synthetic oligonucleotide
caaaucaccuccuugucag

SEQ ID NO: 2186588 - RNA, 19 nt, Artificial Sequence
  Description of Artificial Sequence: Synthetic oligonucleotide
agucuggcccuuuauagcg

SEQ ID NO: 2186589 - RNA, 19 nt, Artificial Sequence
  Description of Artificial Sequence: Synthetic oligonucleotide
uguugugucggaaucugcc

SEQ ID NO: 2186590 - RNA, 19 nt, Artificial Sequence
  Description of Artificial Sequence: Synthetic oligonucleotide
uguagaauccaugaguccu

SEQ ID NO: 2186591 - RNA, 19 nt, Artificial Sequence
  Description of Artificial Sequence: Synthetic oligonucleotide
gaagccaacucuuccaggc

SEQ ID NO: 2186592 - RNA, 19 nt, Artificial Sequence
  Description of Artificial Sequence: Synthetic oligonucleotide
uucuuggcuaacuuugaag

SEQ ID NO: 2186593 - RNA, 19 nt, Artificial Sequence
  Description of Artificial Sequence: Synthetic oligonucleotide
auugagaaugggguggccc

SEQ ID NO: 2186594 - RNA, 19 nt, Artificial Sequence
  Description of Artificial Sequence: Synthetic oligonucleotide
uucaacccggcauacauac

SEQ ID NO: 2186595 - RNA, 19 nt, Artificial Sequence
  Description of Artificial Sequence: Synthetic oligonucleotide
ugaauuguagaugggguca

SEQ ID NO: 2186596 - RNA, 19 nt, Artificial Sequence
  Description of Artificial Sequence: Synthetic oligonucleotide
aaacaugagcacuccugag

SEQ ID NO: 2186597 - RNA, 19 nt, Artificial Sequence
  Description of Artificial Sequence: Synthetic oligonucleotide
uuggcuaacuuugaagaag

SEQ ID NO: 2186598 - RNA, 19 nt, Artificial Sequence
  Description of Artificial Sequence: Synthetic oligonucleotide
agucucacagggcuugccc

SEQ ID NO: 2186599 - RNA, 19 nt, Artificial Sequence
  Description of Artificial Sequence: Synthetic oligonucleotide
ugauucauaacuucugcuu

SEQ ID NO: 2186600 - RNA, 19 nt, Artificial Sequence
  Description of Artificial Sequence: Synthetic oligonucleotide
aaucaccuccuugucaggg

SEQ ID NO: 2186601 - RNA, 19 nt, Artificial Sequence
  Description of Artificial Sequence: Synthetic oligonucleotide
caggaacaucacaagaucc

SEQ ID NO: 2186602 - RNA, 19 nt, Artificial Sequence
  Description of Artificial Sequence: Synthetic oligonucleotide
ugcagguggacucggaucu

SEQ ID NO: 2186603 - RNA, 19 nt, Artificial Sequence
  Description of Artificial Sequence: Synthetic oligonucleotide
gucggaaucugccacgagg

SEQ ID NO: 2186604 - RNA, 19 nt, Artificial Sequence
  Description of Artificial Sequence: Synthetic oligonucleotide
ccuaggaugaagaugacug

SEQ ID NO: 2186605 - RNA, 19 nt, Artificial Sequence
  Description of Artificial Sequence: Synthetic oligonucleotide
auccaugaguccuggggcc

SEQ ID NO: 2186606 - RNA, 19 nt, Artificial Sequence
  Description of Artificial Sequence: Synthetic oligonucleotide
uauagcggagggcaugcag

SEQ ID NO: 2186607 - RNA, 19 nt, Artificial Sequence
  Description of Artificial Sequence: Synthetic oligonucleotide
ucgagaaggaccccaggcc

SEQ ID NO: 2186608 - RNA, 19 nt, Artificial Sequence
  Description of Artificial Sequence: Synthetic oligonucleotide
gaugacuguguugugucgg

SEQ ID NO: 2186609 - RNA, 19 nt, Artificial Sequence
  Description of Artificial Sequence: Synthetic oligonucleotide
uugaauuguagaugggguc

SEQ ID NO: 2186610 - RNA, 19 nt, Artificial Sequence
  Description of Artificial Sequence: Synthetic oligonucleotide
cacacuccuaccuuguaag

SEQ ID NO: 2186611 - RNA, 19 nt, Artificial Sequence
  Description of Artificial Sequence: Synthetic oligonucleotide
ugugucggaaucugccacg

SEQ ID NO: 2186612 - RNA, 19 nt, Artificial Sequence
  Description of Artificial Sequence: Synthetic oligonucleotide
gaacaucacaagauccugg

SEQ ID NO: 2186613 - RNA, 19 nt, Artificial Sequence
  Description of Artificial Sequence: Synthetic oligonucleotide
ugcuccuugccuaggauga

SEQ ID NO: 2186614 - RNA, 19 nt, Artificial Sequence
  Description of Artificial Sequence: Synthetic oligonucleotide
gagacauauucaaagucug

SEQ ID NO: 2186615 - RNA, 19 nt, Artificial Sequence
  Description of Artificial Sequence: Synthetic oligonucleotide
gccguugaauuguagaugg

SEQ ID NO: 2186616 - RNA, 19 nt, Artificial Sequence
  Description of Artificial Sequence: Synthetic oligonucleotide
acaugagcacuccugaggu

SEQ ID NO: 2186617 - RNA, 19 nt, Artificial Sequence
  Description of Artificial Sequence: Synthetic oligonucleotide
auacauacuccuucuccag

SEQ ID NO: 2186618 - RNA, 19 nt, Artificial Sequence
  Description of Artificial Sequence: Synthetic oligonucleotide
cuaccuuguaagaccaccc

SEQ ID NO: 2186619 - RNA, 19 nt, Artificial Sequence
  Description of Artificial Sequence: Synthetic oligonucleotide
cugccagucauccugugcc

SEQ ID NO: 2186620 - RNA, 19 nt, Artificial Sequence
  Description of Artificial Sequence: Synthetic oligonucleotide
aaaucaccuccuugucagg

SEQ ID NO: 2186621 - RNA, 19 nt, Artificial Sequence
  Description of Artificial Sequence: Synthetic oligonucleotide
uuuauagcggagggcaugc

SEQ ID NO: 2186622 - RNA, 19 nt, Artificial Sequence
  Description of Artificial Sequence: Synthetic oligonucleotide
uaaguggucggcacuguac

SEQ ID NO: 2186623 - RNA, 19 nt, Artificial Sequence
  Description of Artificial Sequence: Synthetic oligonucleotide
gaguacggccuguaagugg

SEQ ID NO: 2186624 - RNA, 19 nt, Artificial Sequence
  Description of Artificial Sequence: Synthetic oligonucleotide
uggccauuguagcucagcc

SEQ ID NO: 2186625 - RNA, 19 nt, Artificial Sequence
  Description of Artificial Sequence: Synthetic oligonucleotide
uguguguguguguaugugu

SEQ ID NO: 2186626 - RNA, 19 nt, Artificial Sequence
  Description of Artificial Sequence: Synthetic oligonucleotide
ugugcaacccaagaagcca

SEQ ID NO: 2186627 - RNA, 19 nt, Artificial Sequence
  Description of Artificial Sequence: Synthetic oligonucleotide
aacccaagaagccacucuu

SEQ ID NO: 2186628 - RNA, 19 nt, Artificial Sequence
  Description of Artificial Sequence: Synthetic oligonucleotide
gagaucuagcacauucagg

SEQ ID NO: 2186629 - RNA, 19 nt, Artificial Sequence
  Description of Artificial Sequence: Synthetic oligonucleotide
ugcucgugaaucuucucug

SEQ ID NO: 2186630 - RNA, 19 nt, Artificial Sequence
  Description of Artificial Sequence: Synthetic oligonucleotide
augggugagacauauucaa

SEQ ID NO: 2186631 - RNA, 19 nt, Artificial Sequence
  Description of Artificial Sequence: Synthetic oligonucleotide
ucgaucaagucgaugcagu

SEQ ID NO: 2186632 - RNA, 19 nt, Artificial Sequence
  Description of Artificial Sequence: Synthetic oligonucleotide
aucacaagauccuggggca

SEQ ID NO: 2186633 - RNA, 19 nt, Artificial Sequence
  Description of Artificial Sequence: Synthetic oligonucleotide
ucucucuaucuucugggcu

SEQ ID NO: 2186634 - RNA, 19 nt, Artificial Sequence
  Description of Artificial Sequence: Synthetic oligonucleotide
cauacauacuccuucucca

SEQ ID NO: 2186635 - RNA, 19 nt, Artificial Sequence
  Description of Artificial Sequence: Synthetic oligonucleotide
ugcuauucucucuaucuuc

SEQ ID NO: 2186636 - RNA, 19 nt, Artificial Sequence
  Description of Artificial Sequence: Synthetic oligonucleotide
uuggaauguggccacccug

SEQ ID NO: 2186637 - RNA, 19 nt, Artificial Sequence
  Description of Artificial Sequence: Synthetic oligonucleotide
uucauaacuucugcuuuag

SEQ ID NO: 2186638 - RNA, 19 nt, Artificial Sequence
  Description of Artificial Sequence: Synthetic oligonucleotide
cauaacuucugcuuuagcu

SEQ ID NO: 2186639 - RNA, 19 nt, Artificial Sequence
  Description of Artificial Sequence: Synthetic oligonucleotide
uugagaaugggguggccca

SEQ ID NO: 2186640 - RNA, 19 nt, Artificial Sequence
  Description of Artificial Sequence: Synthetic oligonucleotide
ucggaucuggugaguacgg

SEQ ID NO: 2186641 - RNA, 19 nt, Artificial Sequence
  Description of Artificial Sequence: Synthetic oligonucleotide
ucucacagggcuugccccg

SEQ ID NO: 2186642 - RNA, 19 nt, Artificial Sequence
  Description of Artificial Sequence: Synthetic oligonucleotide
ucggcacuguaccacacug

SEQ ID NO: 2186643 - RNA, 19 nt, Artificial Sequence
  Description of Artificial Sequence: Synthetic oligonucleotide
uguucuuggcuaacuuuga

SEQ ID NO: 2186644 - RNA, 19 nt, Artificial Sequence
  Description of Artificial Sequence: Synthetic oligonucleotide
aacccggcauacauacucc

SEQ ID NO: 2186645 - RNA, 19 nt, Artificial Sequence
  Description of Artificial Sequence: Synthetic oligonucleotide
acaucacaagauccugggg

SEQ ID NO: 2186646 - RNA, 19 nt, Artificial Sequence
  Description of Artificial Sequence: Synthetic oligonucleotide
uguaugugugugugugugc

SEQ ID NO: 2186647 - RNA, 19 nt, Artificial Sequence
  Description of Artificial Sequence: Synthetic oligonucleotide
gcuaacuuugaagaagggg

SEQ ID NO: 2186648 - RNA, 19 nt, Artificial Sequence
  Description of Artificial Sequence: Synthetic oligonucleotide
uugugucggaaucugccac

SEQ ID NO: 2186649 - RNA, 19 nt, Artificial Sequence
  Description of Artificial Sequence: Synthetic oligonucleotide
ucgugaaucuucucugaga

SEQ ID NO: 2186650 - RNA, 19 nt, Artificial Sequence
  Description of Artificial Sequence: Synthetic oligonucleotide
agaaggggcuguagaaucc

SEQ ID NO: 2186651 - RNA, 19 nt, Artificial Sequence
  Description of Artificial Sequence: Synthetic oligonucleotide
cauccugugcccaggcugg

SEQ ID NO: 2186652 - RNA, 19 nt, Artificial Sequence
  Description of Artificial Sequence: Synthetic oligonucleotide
uaccuuguaagaccaccca

SEQ ID NO: 2186653 - RNA, 19 nt, Artificial Sequence
  Description of Artificial Sequence: Synthetic oligonucleotide
cacagagugggucuguuuc

SEQ ID NO: 2186654 - RNA, 19 nt, Artificial Sequence
  Description of Artificial Sequence: Synthetic oligonucleotide
agaagccacucuuccauug

SEQ ID NO: 2186655 - RNA, 19 nt, Artificial Sequence
  Description of Artificial Sequence: Synthetic oligonucleotide
augugugugugugugcaac

SEQ ID NO: 2186656 - RNA, 19 nt, Artificial Sequence
  Description of Artificial Sequence: Synthetic oligonucleotide
uucucucuaucuucugggc

SEQ ID NO: 2186657 - RNA, 19 nt, Artificial Sequence
  Description of Artificial Sequence: Synthetic oligonucleotide
uguagcucagccucuggaa

SEQ ID NO: 2186658 - RNA, 19 nt, Artificial Sequence
  Description of Artificial Sequence: Synthetic oligonucleotide
uccuugccuaggaugaaga

SEQ ID NO: 2186659 - RNA, 19 nt, Artificial Sequence
  Description of Artificial Sequence: Synthetic oligonucleotide
ugugugugugugugcaacc

SEQ ID NO: 2186660 - RNA, 19 nt, Artificial Sequence
  Description of Artificial Sequence: Synthetic oligonucleotide
ucauaacuucugcuuuagc

SEQ ID NO: 2186661 - RNA, 19 nt, Artificial Sequence
  Description of Artificial Sequence: Synthetic oligonucleotide
ugugugugugcaacccaag

SEQ ID NO: 2186662 - RNA, 19 nt, Artificial Sequence
  Description of Artificial Sequence: Synthetic oligonucleotide
uucaggcuuucuuuggccu

SEQ ID NO: 2186663 - RNA, 19 nt, Artificial Sequence
  Description of Artificial Sequence: Synthetic oligonucleotide
uuuggaauguggccacccu

SEQ ID NO: 2186664 - RNA, 19 nt, Artificial Sequence
  Description of Artificial Sequence: Synthetic oligonucleotide
auagcggagggcaugcagg

SEQ ID NO: 2186665 - RNA, 19 nt, Artificial Sequence
  Description of Artificial Sequence: Synthetic oligonucleotide
ugugugugugugcaaccca

SEQ ID NO: 2186666 - RNA, 19 nt, Artificial Sequence
  Description of Artificial Sequence: Synthetic oligonucleotide
ggugaguacggccuguaag

SEQ ID NO: 2186667 - RNA, 19 nt, Artificial Sequence
  Description of Artificial Sequence: Synthetic oligonucleotide
uggacucggaucuggugag

SEQ ID NO: 2186668 - RNA, 19 nt, Artificial Sequence
  Description of Artificial Sequence: Synthetic oligonucleotide
acaucccucagucuuccug

SEQ ID NO: 2186669 - RNA, 19 nt, Artificial Sequence
  Description of Artificial Sequence: Synthetic oligonucleotide
cuguagaauccaugagucc

SEQ ID NO: 2186670 - RNA, 19 nt, Artificial Sequence
  Description of Artificial Sequence: Synthetic oligonucleotide
caacccggcauacauacuc

SEQ ID NO: 2186671 - RNA, 19 nt, Artificial Sequence
  Description of Artificial Sequence: Synthetic oligonucleotide
aaccaggucccggagaagu

SEQ ID NO: 2186672 - RNA, 19 nt, Artificial Sequence
  Description of Artificial Sequence: Synthetic oligonucleotide
aaucuucucugagaaugca

SEQ ID NO: 2186673 - RNA, 19 nt, Artificial Sequence
  Description of Artificial Sequence: Synthetic oligonucleotide
acucggaucuggugaguac

SEQ ID NO: 2186674 - RNA, 19 nt, Artificial Sequence
  Description of Artificial Sequence: Synthetic oligonucleotide
cucggaucuggugaguacg

SEQ ID NO: 2186675 - RNA, 19 nt, Artificial Sequence
  Description of Artificial Sequence: Synthetic oligonucleotide
uucagauggugcuccuugc

SEQ ID NO: 2186676 - RNA, 19 nt, Artificial Sequence
  Description of Artificial Sequence: Synthetic oligonucleotide
cuggaguggccauuguagc

SEQ ID NO: 2186677 - RNA, 19 nt, Artificial Sequence
  Description of Artificial Sequence: Synthetic oligonucleotide
ucuagcacauucaggcuuu

SEQ ID NO: 2186678 - RNA, 19 nt, Artificial Sequence
  Description of Artificial Sequence: Synthetic oligonucleotide
auuguagcucagccucugg

SEQ ID NO: 2186679 - RNA, 19 nt, Artificial Sequence
  Description of Artificial Sequence: Synthetic oligonucleotide
caaacaugagcacuccuga

SEQ ID NO: 2186680 - RNA, 19 nt, Artificial Sequence
  Description of Artificial Sequence: Synthetic oligonucleotide
uguguguguguguguaugu

SEQ ID NO: 2186681 - RNA, 19 nt, Artificial Sequence
  Description of Artificial Sequence: Synthetic oligonucleotide
gcaugggugagacauauuc

SEQ ID NO: 2186682 - RNA, 19 nt, Artificial Sequence
  Description of Artificial Sequence: Synthetic oligonucleotide
agcacauucaggcuuucuu

SEQ ID NO: 2186683 - RNA, 19 nt, Artificial Sequence
  Description of Artificial Sequence: Synthetic oligonucleotide
ugcaaaucaccuccuuguc

SEQ ID NO: 2186684 - RNA, 19 nt, Artificial Sequence
  Description of Artificial Sequence: Synthetic oligonucleotide
uguguguguaugugugugu

SEQ ID NO: 2186685 - RNA, 19 nt, Artificial Sequence
  Description of Artificial Sequence: Synthetic oligonucleotide
ucugagaaugcagcugucu

SEQ ID NO: 2186686 - RNA, 19 nt, Artificial Sequence
  Description of Artificial Sequence: Synthetic oligonucleotide
uggccugaugcucugcaac

SEQ ID NO: 2186687 - RNA, 19 nt, Artificial Sequence
  Description of Artificial Sequence: Synthetic oligonucleotide
guguguaugugugugugug

SEQ ID NO: 2186688 - RNA, 19 nt, Artificial Sequence
  Description of Artificial Sequence: Synthetic oligonucleotide
aagccaacucuuccaggcu

SEQ ID NO: 2186689 - RNA, 19 nt, Artificial Sequence
  Description of Artificial Sequence: Synthetic oligonucleotide
uguagcuccuucagauggu

SEQ ID NO: 2186690 - RNA, 19 nt, Artificial Sequence
  Description of Artificial Sequence: Synthetic oligonucleotide
augagcacuccugagguga

SEQ ID NO: 2186691 - RNA, 19 nt, Artificial Sequence
  Description of Artificial Sequence: Synthetic oligonucleotide
uguguaugugugugugugu

SEQ ID NO: 2186692 - RNA, 19 nt, Artificial Sequence
  Description of Artificial Sequence: Synthetic oligonucleotide
ggaacuccccuucaacccg

SEQ ID NO: 2186693 - RNA, 19 nt, Artificial Sequence
  Description of Artificial Sequence: Synthetic oligonucleotide
guagcucagccucuggaac

SEQ ID NO: 2186694 - RNA, 19 nt, Artificial Sequence
  Description of Artificial Sequence: Synthetic oligonucleotide
uggcccuuuauagcggagg

SEQ ID NO: 2186695 - RNA, 19 nt, Artificial Sequence
  Description of Artificial Sequence: Synthetic oligonucleotide
uguguguguguaugugugu

SEQ ID NO: 2186696 - RNA, 19 nt, Artificial Sequence
  Description of Artificial Sequence: Synthetic oligonucleotide
cucgugaaucuucucugag

SEQ ID NO: 2186697 - RNA, 19 nt, Artificial Sequence
  Description of Artificial Sequence: Synthetic oligonucleotide
aggaacaucacaagauccu

SEQ ID NO: 2186698 - RNA, 19 nt, Artificial Sequence
  Description of Artificial Sequence: Synthetic oligonucleotide
gauucauaacuucugcuuu

SEQ ID NO: 2186699 - RNA, 19 nt, Artificial Sequence
  Description of Artificial Sequence: Synthetic oligonucleotide
uguguguaugugugugugu

SEQ ID NO: 2186700 - RNA, 19 nt, Artificial Sequence
  Description of Artificial Sequence: Synthetic oligonucleotide
aggccguugaauuguagau

SEQ ID NO: 2186701 - RNA, 19 nt, Artificial Sequence
  Description of Artificial Sequence: Synthetic oligonucleotide
agucgaucaagucgaugca

SEQ ID NO: 2186702 - RNA, 19 nt, Artificial Sequence
  Description of Artificial Sequence: Synthetic oligonucleotide
acccacuaagauggguucc

SEQ ID NO: 2186703 - RNA, 19 nt, Artificial Sequence
  Description of Artificial Sequence: Synthetic oligonucleotide
aguacggccuguaaguggu

SEQ ID NO: 2186704 - RNA, 19 nt, Artificial Sequence
  Description of Artificial Sequence: Synthetic oligonucleotide
uacuccuucuccagcccgc

SEQ ID NO: 2186705 - RNA, 19 nt, Artificial Sequence
  Description of Artificial Sequence: Synthetic oligonucleotide
guguaugugugugugugug

SEQ ID NO: 2186706 - RNA, 19 nt, Artificial Sequence
  Description of Artificial Sequence: Synthetic oligonucleotide
ugggugagacauauucaaa

SEQ ID NO: 2186707 - RNA, 19 nt, Artificial Sequence
  Description of Artificial Sequence: Synthetic oligonucleotide
ugaguacggccuguaagug

SEQ ID NO: 2186708 - RNA, 19 nt, Artificial Sequence
  Description of Artificial Sequence: Synthetic oligonucleotide
cacuaagauggguuccuug

SEQ ID NO: 2186709 - RNA, 19 nt, Artificial Sequence
  Description of Artificial Sequence: Synthetic oligonucleotide
ugagcacuccugaggugag

SEQ ID NO: 2186710 - RNA, 19 nt, Artificial Sequence
  Description of Artificial Sequence: Synthetic oligonucleotide
aagggauccugucgcgaca

SEQ ID NO: 2186711 - RNA, 19 nt, Artificial Sequence
  Description of Artificial Sequence: Synthetic oligonucleotide
gccauuguagcucagccuc

SEQ ID NO: 2186712 - RNA, 19 nt, Artificial Sequence
  Description of Artificial Sequence: Synthetic oligonucleotide
guggguguagcuccuucag

SEQ ID NO: 2186713 - RNA, 19 nt, Artificial Sequence
  Description of Artificial Sequence: Synthetic oligonucleotide
uuguaagaccacccacuaa

SEQ ID NO: 2186714 - RNA, 19 nt, Artificial Sequence
  Description of Artificial Sequence: Synthetic oligonucleotide
cuuuggaauguggccaccc

SEQ ID NO: 2186715 - RNA, 19 nt, Artificial Sequence
  Description of Artificial Sequence: Synthetic oligonucleotide
guguguguguguaugugug

SEQ ID NO: 2186716 - RNA, 19 nt, Artificial Sequence
  Description of Artificial Sequence: Synthetic oligonucleotide
ggaucuggugaguacggcc

SEQ ID NO: 2186717 - RNA, 19 nt, Artificial Sequence
  Description of Artificial Sequence: Synthetic oligonucleotide
gguguguccagauccugag

SEQ ID NO: 2186718 - RNA, 19 nt, Artificial Sequence
  Description of Artificial Sequence: Synthetic oligonucleotide
caagggauccugucgcgac

SEQ ID NO: 2186719 - RNA, 19 nt, Artificial Sequence
  Description of Artificial Sequence: Synthetic oligonucleotide
ggugagucgaucaagucga

SEQ ID NO: 2186720 - RNA, 19 nt, Artificial Sequence
  Description of Artificial Sequence: Synthetic oligonucleotide
uggguguagcuccuucaga

SEQ ID NO: 2186721 - RNA, 19 nt, Artificial Sequence
  Description of Artificial Sequence: Synthetic oligonucleotide
acaagauccuggggcaagg

SEQ ID NO: 2186722 - RNA, 19 nt, Artificial Sequence
  Description of Artificial Sequence: Synthetic oligonucleotide
gauggguuccuugcaaauc

SEQ ID NO: 2186723 - RNA, 19 nt, Artificial Sequence
  Description of Artificial Sequence: Synthetic oligonucleotide
ugggcuacugaagccaacu

SEQ ID NO: 2186724 - RNA, 19 nt, Artificial Sequence
  Description of Artificial Sequence: Synthetic oligonucleotide
guugugucggaaucugcca

SEQ ID NO: 2186725 - RNA, 19 nt, Artificial Sequence
  Description of Artificial Sequence: Synthetic oligonucleotide
guaugugugugugugugca

SEQ ID NO: 2186726 - RNA, 19 nt, Artificial Sequence
  Description of Artificial Sequence: Synthetic oligonucleotide
aaggaccccaggccguuga

SEQ ID NO: 2186727 - RNA, 19 nt, Artificial Sequence
  Description of Artificial Sequence: Synthetic oligonucleotide
guguguguguaugugugug

SEQ ID NO: 2186728 - RNA, 19 nt, Artificial Sequence
  Description of Artificial Sequence: Synthetic oligonucleotide
gugcuccuugccuaggaug

SEQ ID NO: 2186729 - RNA, 19 nt, Artificial Sequence
  Description of Artificial Sequence: Synthetic oligonucleotide
aucugucuuuggaaugugg

SEQ ID NO: 2186730 - RNA, 19 nt, Artificial Sequence
  Description of Artificial Sequence: Synthetic oligonucleotide
acggcacacuccuaccuug

SEQ ID NO: 2186731 - RNA, 19 nt, Artificial Sequence
  Description of Artificial Sequence: Synthetic oligonucleotide
ugucgcgacagccggcacu

SEQ ID NO: 2186732 - RNA, 19 nt, Artificial Sequence
  Description of Artificial Sequence: Synthetic oligonucleotide
acggccuguaaguggucgg

SEQ ID NO: 2186733 - RNA, 19 nt, Artificial Sequence
  Description of Artificial Sequence: Synthetic oligonucleotide
gugaguacggccuguaagu

SEQ ID NO: 2186734 - RNA, 19 nt, Artificial Sequence
  Description of Artificial Sequence: Synthetic oligonucleotide
guguguguaugugugugug

SEQ ID NO: 2186735 - RNA, 19 nt, Artificial Sequence
  Description of Artificial Sequence: Synthetic oligonucleotide
cacuccuaccuuguaagac

SEQ ID NO: 2186736 - RNA, 19 nt, Artificial Sequence
  Description of Artificial Sequence: Synthetic oligonucleotide
gcuguagaauccaugaguc

SEQ ID NO: 2186737 - RNA, 19 nt, Artificial Sequence
  Description of Artificial Sequence: Synthetic oligonucleotide
guugaauuguagauggggu

SEQ ID NO: 2186738 - RNA, 19 nt, Artificial Sequence
  Description of Artificial Sequence: Synthetic oligonucleotide
cuacugaagccaacucuuc

SEQ ID NO: 2186739 - RNA, 19 nt, Artificial Sequence
  Description of Artificial Sequence: Synthetic oligonucleotide
ugugugugugugugugugu

SEQ ID NO: 2186740 - RNA, 19 nt, Artificial Sequence
  Description of Artificial Sequence: Synthetic oligonucleotide
ggcccuuuauagcggaggg

SEQ ID NO: 2186741 - RNA, 19 nt, Artificial Sequence
  Description of Artificial Sequence: Synthetic oligonucleotide
gaacuccccuucaacccgg

SEQ ID NO: 2186742 - RNA, 19 nt, Artificial Sequence
  Description of Artificial Sequence: Synthetic oligonucleotide
uccccuucaacccggcaua

SEQ ID NO: 2186743 - RNA, 19 nt, Artificial Sequence
  Description of Artificial Sequence: Synthetic oligonucleotide
cuaagauggguuccuugca

SEQ ID NO: 2186744 - RNA, 19 nt, Artificial Sequence
  Description of Artificial Sequence: Synthetic oligonucleotide
agagugggucuguuucuug

SEQ ID NO: 2186745 - RNA, 19 nt, Artificial Sequence
  Description of Artificial Sequence: Synthetic oligonucleotide
ugagaaugggguggcccag

SEQ ID NO: 2186746 - RNA, 19 nt, Artificial Sequence
  Description of Artificial Sequence: Synthetic oligonucleotide
gcacucugcacagaguggg

SEQ ID NO: 2186747 - RNA, 19 nt, Artificial Sequence
  Description of Artificial Sequence: Synthetic oligonucleotide
uggguuccuugcaaaucac

SEQ ID NO: 2186748 - RNA, 19 nt, Artificial Sequence
  Description of Artificial Sequence: Synthetic oligonucleotide
guguguguguguguguaug

SEQ ID NO: 2186749 - RNA, 19 nt, Artificial Sequence
  Description of Artificial Sequence: Synthetic oligonucleotide
aaucugccacgaggggugg

SEQ ID NO: 2186750 - RNA, 19 nt, Artificial Sequence
  Description of Artificial Sequence: Synthetic oligonucleotide
agauccuggggcaagggau

SEQ ID NO: 2186751 - RNA, 19 nt, Artificial Sequence
  Description of Artificial Sequence: Synthetic oligonucleotide
gugugugugugugugugug

SEQ ID NO: 2186752 - RNA, 19 nt, Artificial Sequence
  Description of Artificial Sequence: Synthetic oligonucleotide
cuguaaguggucggcacug

SEQ ID NO: 2186753 - RNA, 19 nt, Artificial Sequence
  Description of Artificial Sequence: Synthetic oligonucleotide
cguugaauuguagaugggg

SEQ ID NO: 2186754 - RNA, 19 nt, Artificial Sequence
  Description of Artificial Sequence: Synthetic oligonucleotide
ggaacaucacaagauccug

SEQ ID NO: 2186755 - RNA, 19 nt, Artificial Sequence
  Description of Artificial Sequence: Synthetic oligonucleotide
ugucggaaucugccacgag

SEQ ID NO: 2186756 - RNA, 19 nt, Artificial Sequence
  Description of Artificial Sequence: Synthetic oligonucleotide
cucucuaucuucugggcua

SEQ ID NO: 2186757 - RNA, 19 nt, Artificial Sequence
  Description of Artificial Sequence: Synthetic oligonucleotide
acacuccuaccuuguaaga

SEQ ID NO: 2186758 - RNA, 19 nt, Artificial Sequence
  Description of Artificial Sequence: Synthetic oligonucleotide
uggugcuccuugccuagga

SEQ ID NO: 2186759 - RNA, 19 nt, Artificial Sequence
  Description of Artificial Sequence: Synthetic oligonucleotide
cacacggcacacuccuacc

SEQ ID NO: 2186760 - RNA, 19 nt, Artificial Sequence
  Description of Artificial Sequence: Synthetic oligonucleotide
cuccuaccuuguaagacca

SEQ ID NO: 2186761 - RNA, 19 nt, Artificial Sequence
  Description of Artificial Sequence: Synthetic oligonucleotide
cacccacuaagauggguuc

SEQ ID NO: 2186762 - RNA, 19 nt, Artificial Sequence
  Description of Artificial Sequence: Synthetic oligonucleotide
agugggucuguuucuugau

SEQ ID NO: 2186763 - RNA, 19 nt, Artificial Sequence
  Description of Artificial Sequence: Synthetic oligonucleotide
uaugugugugugugugcaa

SEQ ID NO: 2186764 - RNA, 19 nt, Artificial Sequence
  Description of Artificial Sequence: Synthetic oligonucleotide
caggccguugaauuguaga

SEQ ID NO: 2186765 - RNA, 19 nt, Artificial Sequence
  Description of Artificial Sequence: Synthetic oligonucleotide
gugugugugugugcaaccc

SEQ ID NO: 2186766 - RNA, 19 nt, Artificial Sequence
  Description of Artificial Sequence: Synthetic oligonucleotide
cugcagguggacucggauc

SEQ ID NO: 2186767 - RNA, 19 nt, Artificial Sequence
  Description of Artificial Sequence: Synthetic oligonucleotide
uggucggcacuguaccaca

SEQ ID NO: 2186768 - RNA, 19 nt, Artificial Sequence
  Description of Artificial Sequence: Synthetic oligonucleotide
cuguaccacacuggagugg

SEQ ID NO: 2186769 - RNA, 19 nt, Artificial Sequence
  Description of Artificial Sequence: Synthetic oligonucleotide
agaaugggguggcccagga

SEQ ID NO: 2186770 - RNA, 19 nt, Artificial Sequence
  Description of Artificial Sequence: Synthetic oligonucleotide
aguggucggcacuguacca

SEQ ID NO: 2186771 - RNA, 19 nt, Artificial Sequence
  Description of Artificial Sequence: Synthetic oligonucleotide
cuuguaagaccacccacua

SEQ ID NO: 2186772 - RNA, 19 nt, Artificial Sequence
  Description of Artificial Sequence: Synthetic oligonucleotide
gugugugugcaacccaaga

SEQ ID NO: 2186773 - RNA, 19 nt, Artificial Sequence
  Description of Artificial Sequence: Synthetic oligonucleotide
guuccucaucugucuuugg

SEQ ID NO: 2186774 - RNA, 19 nt, Artificial Sequence
  Description of Artificial Sequence: Synthetic oligonucleotide
cccaagaagccacucuucc

SEQ ID NO: 2186775 - RNA, 19 nt, Artificial Sequence
  Description of Artificial Sequence: Synthetic oligonucleotide
ggcacuguaccacacugga

SEQ ID NO: 2186776 - RNA, 19 nt, Artificial Sequence
  Description of Artificial Sequence: Synthetic oligonucleotide
uguguguguguguguguau

SEQ ID NO: 2186777 - RNA, 19 nt, Artificial Sequence
  Description of Artificial Sequence: Synthetic oligonucleotide
aucuggugaguacggccug

SEQ ID NO: 2186778 - RNA, 19 nt, Artificial Sequence
  Description of Artificial Sequence: Synthetic oligonucleotide
gaucuggugaguacggccu

SEQ ID NO: 2186779 - RNA, 19 nt, Artificial Sequence
  Description of Artificial Sequence: Synthetic oligonucleotide
ugccccggggauccacacg

SEQ ID NO: 2186780 - RNA, 19 nt, Artificial Sequence
  Description of Artificial Sequence: Synthetic oligonucleotide
uggcaugggugagacauau

SEQ ID NO: 2186781 - RNA, 19 nt, Artificial Sequence
  Description of Artificial Sequence: Synthetic oligonucleotide
gaucuagcacauucaggcu

SEQ ID NO: 2186782 - RNA, 19 nt, Artificial Sequence
  Description of Artificial Sequence: Synthetic oligonucleotide
caagauccuggggcaaggg

SEQ ID NO: 2186783 - RNA, 19 nt, Artificial Sequence
  Description of Artificial Sequence: Synthetic oligonucleotide
ucaacccggcauacauacu

SEQ ID NO: 2186784 - RNA, 19 nt, Artificial Sequence
  Description of Artificial Sequence: Synthetic oligonucleotide
ugcaguggguguagcuccu

SEQ ID NO: 2186785 - RNA, 19 nt, Artificial Sequence
  Description of Artificial Sequence: Synthetic oligonucleotide
gaguggccauuguagcuca

SEQ ID NO: 2186786 - RNA, 19 nt, Artificial Sequence
  Description of Artificial Sequence: Synthetic oligonucleotide
acgagggguggacaggaau

SEQ ID NO: 2186787 - RNA, 19 nt, Artificial Sequence
  Description of Artificial Sequence: Synthetic oligonucleotide
ggcuguagaauccaugagu

SEQ ID NO: 2186788 - RNA, 19 nt, Artificial Sequence
  Description of Artificial Sequence: Synthetic oligonucleotide
guagcuccuucagauggug

SEQ ID NO: 2186789 - RNA, 19 nt, Artificial Sequence
  Description of Artificial Sequence: Synthetic oligonucleotide
guguguguguguguaugug

SEQ ID NO: 2186790 - RNA, 19 nt, Artificial Sequence
  Description of Artificial Sequence: Synthetic oligonucleotide
ucugccacgagggguggac

SEQ ID NO: 2186791 - RNA, 19 nt, Artificial Sequence
  Description of Artificial Sequence: Synthetic oligonucleotide
acuugcucgugaaucuucu

SEQ ID NO: 2186792 - RNA, 19 nt, Artificial Sequence
  Description of Artificial Sequence: Synthetic oligonucleotide
gcaaaucaccuccuuguca

SEQ ID NO: 2186793 - RNA, 19 nt, Artificial Sequence
  Description of Artificial Sequence: Synthetic oligonucleotide
cacaagauccuggggcaag

SEQ ID NO: 2186794 - RNA, 19 nt, Artificial Sequence
  Description of Artificial Sequence: Synthetic oligonucleotide
gauccuggggcaagggauc

SEQ ID NO: 2186795 - RNA, 19 nt, Artificial Sequence
  Description of Artificial Sequence: Synthetic oligonucleotide
gagggugccucugcuauuc

SEQ ID NO: 2186796 - RNA, 19 nt, Artificial Sequence
  Description of Artificial Sequence: Synthetic oligonucleotide
ccuaccuuguaagaccacc

SEQ ID NO: 2186797 - RNA, 19 nt, Artificial Sequence
  Description of Artificial Sequence: Synthetic oligonucleotide
acccaagaagccacucuuc

SEQ ID NO: 2186798 - RNA, 19 nt, Artificial Sequence
  Description of Artificial Sequence: Synthetic oligonucleotide
cacacuggaguggccauug

SEQ ID NO: 2186799 - RNA, 19 nt, Artificial Sequence
  Description of Artificial Sequence: Synthetic oligonucleotide
ugagagggugccucugcua

SEQ ID NO: 2186800 - RNA, 19 nt, Artificial Sequence
  Description of Artificial Sequence: Synthetic oligonucleotide
ggccugaugcucugcaacc

SEQ ID NO: 2186801 - RNA, 19 nt, Artificial Sequence
  Description of Artificial Sequence: Synthetic oligonucleotide
cauuguagcucagccucug

SEQ ID NO: 2186802 - RNA, 19 nt, Artificial Sequence
  Description of Artificial Sequence: Synthetic oligonucleotide
caaagucuggcccuuuaua

SEQ ID NO: 2186803 - RNA, 19 nt, Artificial Sequence
  Description of Artificial Sequence: Synthetic oligonucleotide
uguaaguggucggcacugu

SEQ ID NO: 2186804 - RNA, 19 nt, Artificial Sequence
  Description of Artificial Sequence: Synthetic oligonucleotide
uccaugaguccuggggcca

SEQ ID NO: 2186805 - RNA, 19 nt, Artificial Sequence
  Description of Artificial Sequence: Synthetic oligonucleotide
cuugcucgugaaucuucuc

SEQ ID NO: 2186806 - RNA, 19 nt, Artificial Sequence
  Description of Artificial Sequence: Synthetic oligonucleotide
uggugaguacggccuguaa

SEQ ID NO: 2186807 - RNA, 19 nt, Artificial Sequence
  Description of Artificial Sequence: Synthetic oligonucleotide
cagauccugagagggugcc

SEQ ID NO: 2186808 - RNA, 19 nt, Artificial Sequence
  Description of Artificial Sequence: Synthetic oligonucleotide
guaagaccacccacuaaga

SEQ ID NO: 2186809 - RNA, 19 nt, Artificial Sequence
  Description of Artificial Sequence: Synthetic oligonucleotide
acccggcauacauacuccu

SEQ ID NO: 2186810 - RNA, 19 nt, Artificial Sequence
  Description of Artificial Sequence: Synthetic oligonucleotide
ggagaaguuccucaucugu

SEQ ID NO: 2186811 - RNA, 19 nt, Artificial Sequence
  Description of Artificial Sequence: Synthetic oligonucleotide
cucugcaaccaggucccgg

SEQ ID NO: 2186812 - RNA, 19 nt, Artificial Sequence
  Description of Artificial Sequence: Synthetic oligonucleotide
uccuaccuuguaagaccac

SEQ ID NO: 2186813 - RNA, 19 nt, Artificial Sequence
  Description of Artificial Sequence: Synthetic oligonucleotide
ucccggagaaguuccucau

SEQ ID NO: 2186814 - RNA, 19 nt, Artificial Sequence
  Description of Artificial Sequence: Synthetic oligonucleotide
cuaggaugaagaugacugu

SEQ ID NO: 2186815 - RNA, 19 nt, Artificial Sequence
  Description of Artificial Sequence: Synthetic oligonucleotide
cuuggcaaacaugagcacu

SEQ ID NO: 2186816 - RNA, 19 nt, Artificial Sequence
  Description of Artificial Sequence: Synthetic oligonucleotide
ggcaagggauccugucgcg

SEQ ID NO: 2186817 - RNA, 19 nt, Artificial Sequence
  Description of Artificial Sequence: Synthetic oligonucleotide
gggcuguagaauccaugag

SEQ ID NO: 2186818 - RNA, 19 nt, Artificial Sequence
  Description of Artificial Sequence: Synthetic oligonucleotide
gguggacucggaucuggug

SEQ ID NO: 2186819 - RNA, 19 nt, Artificial Sequence
  Description of Artificial Sequence: Synthetic oligonucleotide
cuugucagggaacuccccu

SEQ ID NO: 2186820 - RNA, 19 nt, Artificial Sequence
  Description of Artificial Sequence: Synthetic oligonucleotide
uccugucgcgacagccggc

SEQ ID NO: 2186821 - RNA, 19 nt, Artificial Sequence
  Description of Artificial Sequence: Synthetic oligonucleotide
ggccguugaauuguagaug

SEQ ID NO: 2186822 - RNA, 19 nt, Artificial Sequence
  Description of Artificial Sequence: Synthetic oligonucleotide
ucacaagauccuggggcaa

SEQ ID NO: 2186823 - RNA, 19 nt, Artificial Sequence
  Description of Artificial Sequence: Synthetic oligonucleotide
guggucggcacuguaccac

SEQ ID NO: 2186824 - RNA, 19 nt, Artificial Sequence
  Description of Artificial Sequence: Synthetic oligonucleotide
cagucauccugugcccagg

SEQ ID NO: 2186825 - RNA, 19 nt, Artificial Sequence
  Description of Artificial Sequence: Synthetic oligonucleotide
gacuguguugugucggaau

SEQ ID NO: 2186826 - RNA, 19 nt, Artificial Sequence
  Description of Artificial Sequence: Synthetic oligonucleotide
ccggcauacauacuccuuc

SEQ ID NO: 2186827 - RNA, 19 nt, Artificial Sequence
  Description of Artificial Sequence: Synthetic oligonucleotide
uuauagcggagggcaugca

SEQ ID NO: 2186828 - RNA, 19 nt, Artificial Sequence
  Description of Artificial Sequence: Synthetic oligonucleotide
ugaguccuggggccagguc

SEQ ID NO: 2186829 - RNA, 19 nt, Artificial Sequence
  Description of Artificial Sequence: Synthetic oligonucleotide
uguggccacccuggccucg

SEQ ID NO: 2186830 - RNA, 19 nt, Artificial Sequence
  Description of Artificial Sequence: Synthetic oligonucleotide
ggaguggccauuguagcuc

SEQ ID NO: 2186831 - RNA, 19 nt, Artificial Sequence
  Description of Artificial Sequence: Synthetic oligonucleotide
cccucagucuuccugccag

SEQ ID NO: 2186832 - RNA, 19 nt, Artificial Sequence
  Description of Artificial Sequence: Synthetic oligonucleotide
ggaauguggccacccuggc

SEQ ID NO: 2186833 - RNA, 19 nt, Artificial Sequence
  Description of Artificial Sequence: Synthetic oligonucleotide
cucugagaaugcagcuguc

SEQ ID NO: 2186834 - RNA, 19 nt, Artificial Sequence
  Description of Artificial Sequence: Synthetic oligonucleotide
ugccuaggaugaagaugac

SEQ ID NO: 2186835 - RNA, 19 nt, Artificial Sequence
  Description of Artificial Sequence: Synthetic oligonucleotide
gcggagggcaugcaggaac

SEQ ID NO: 2186836 - RNA, 19 nt, Artificial Sequence
  Description of Artificial Sequence: Synthetic oligonucleotide
gcacuccugaggugagucg

SEQ ID NO: 2186837 - RNA, 19 nt, Artificial Sequence
  Description of Artificial Sequence: Synthetic oligonucleotide
ggcuacugaagccaacucu

SEQ ID NO: 2186838 - RNA, 19 nt, Artificial Sequence
  Description of Artificial Sequence: Synthetic oligonucleotide
uccugagagggugccucug

SEQ ID NO: 2186839 - RNA, 19 nt, Artificial Sequence
  Description of Artificial Sequence: Synthetic oligonucleotide
cucacagggcuugccccgg

SEQ ID NO: 2186840 - RNA, 19 nt, Artificial Sequence
  Description of Artificial Sequence: Synthetic oligonucleotide
cgugaaucuucucugagaa

SEQ ID NO: 2186841 - RNA, 19 nt, Artificial Sequence
  Description of Artificial Sequence: Synthetic oligonucleotide
ucccgcacuugcucgugaa

SEQ ID NO: 2186842 - RNA, 19 nt, Artificial Sequence
  Description of Artificial Sequence: Synthetic oligonucleotide
agauggggucauugagaau

SEQ ID NO: 2186843 - RNA, 19 nt, Artificial Sequence
  Description of Artificial Sequence: Synthetic oligonucleotide
guaaguggucggcacugua

SEQ ID NO: 2186844 - RNA, 19 nt, Artificial Sequence
  Description of Artificial Sequence: Synthetic oligonucleotide
gggucuguuucuugauuca

SEQ ID NO: 2186845 - RNA, 19 nt, Artificial Sequence
  Description of Artificial Sequence: Synthetic oligonucleotide
caccuccuugucagggaac

SEQ ID NO: 2186846 - RNA, 19 nt, Artificial Sequence
  Description of Artificial Sequence: Synthetic oligonucleotide
cugggcuacugaagccaac

SEQ ID NO: 2186847 - RNA, 19 nt, Artificial Sequence
  Description of Artificial Sequence: Synthetic oligonucleotide
caugaguccuggggccagg

SEQ ID NO: 2186848 - RNA, 19 nt, Artificial Sequence
  Description of Artificial Sequence: Synthetic oligonucleotide
cuucaacccggcauacaua

SEQ ID NO: 2186849 - RNA, 19 nt, Artificial Sequence
  Description of Artificial Sequence: Synthetic oligonucleotide
ggguguagcuccuucagau

SEQ ID NO: 2186850 - RNA, 19 nt, Artificial Sequence
  Description of Artificial Sequence: Synthetic oligonucleotide
ccacacggcacacuccuac

SEQ ID NO: 2186851 - RNA, 19 nt, Artificial Sequence
  Description of Artificial Sequence: Synthetic oligonucleotide
gaaugggguggcccaggaa

SEQ ID NO: 2186852 - RNA, 19 nt, Artificial Sequence
  Description of Artificial Sequence: Synthetic oligonucleotide
gcuggcaugggugagacau

SEQ ID NO: 2186853 - RNA, 19 nt, Artificial Sequence
  Description of Artificial Sequence: Synthetic oligonucleotide
ggguuccuugcaaaucacc

SEQ ID NO: 2186854 - RNA, 19 nt, Artificial Sequence
  Description of Artificial Sequence: Synthetic oligonucleotide
gucuguuucuugauucaua

SEQ ID NO: 2186855 - RNA, 19 nt, Artificial Sequence
  Description of Artificial Sequence: Synthetic oligonucleotide
agucgaugcagugggugua

SEQ ID NO: 2186856 - RNA, 19 nt, Artificial Sequence
  Description of Artificial Sequence: Synthetic oligonucleotide
gacagccggcacucugcac

SEQ ID NO: 2186857 - RNA, 19 nt, Artificial Sequence
  Description of Artificial Sequence: Synthetic oligonucleotide
gucgcgacagccggcacuc

SEQ ID NO: 2186858 - RNA, 19 nt, Artificial Sequence
  Description of Artificial Sequence: Synthetic oligonucleotide
gccuguaaguggucggcac

SEQ ID NO: 2186859 - RNA, 19 nt, Artificial Sequence
  Description of Artificial Sequence: Synthetic oligonucleotide
gaauuguagauggggucau

SEQ ID NO: 2186860 - RNA, 19 nt, Artificial Sequence
  Description of Artificial Sequence: Synthetic oligonucleotide
gacucggaucuggugagua

SEQ ID NO: 2186861 - RNA, 19 nt, Artificial Sequence
  Description of Artificial Sequence: Synthetic oligonucleotide
cagucucacagggcuugcc

SEQ ID NO: 2186862 - RNA, 19 nt, Artificial Sequence
  Description of Artificial Sequence: Synthetic oligonucleotide
gugugugugugugugugua

SEQ ID NO: 2186863 - RNA, 19 nt, Artificial Sequence
  Description of Artificial Sequence: Synthetic oligonucleotide
ccugccagucauccugugc

SEQ ID NO: 2186864 - RNA, 19 nt, Artificial Sequence
  Description of Artificial Sequence: Synthetic oligonucleotide
gcucgugaaucuucucuga

SEQ ID NO: 2186865 - RNA, 19 nt, Artificial Sequence
  Description of Artificial Sequence: Synthetic oligonucleotide
cugagaaugcagcugucuu

SEQ ID NO: 2186866 - RNA, 19 nt, Artificial Sequence
  Description of Artificial Sequence: Synthetic oligonucleotide
ccuuguaagaccacccacu

SEQ ID NO: 2186867 - RNA, 19 nt, Artificial Sequence
  Description of Artificial Sequence: Synthetic oligonucleotide
gugucggaaucugccacga

SEQ ID NO: 2186868 - RNA, 19 nt, Artificial Sequence
  Description of Artificial Sequence: Synthetic oligonucleotide
uccacacggcacacuccua

SEQ ID NO: 2186869 - RNA, 19 nt, Artificial Sequence
  Description of Artificial Sequence: Synthetic oligonucleotide
cacuggaguggccauugua

SEQ ID NO: 2186870 - RNA, 19 nt, Artificial Sequence
  Description of Artificial Sequence: Synthetic oligonucleotide
ccggucccgcacuugcucg

SEQ ID NO: 2186871 - RNA, 19 nt, Artificial Sequence
  Description of Artificial Sequence: Synthetic oligonucleotide
ggaaucugccacgaggggu

SEQ ID NO: 2186872 - RNA, 19 nt, Artificial Sequence
  Description of Artificial Sequence: Synthetic oligonucleotide
ccggggauccacacggcac

SEQ ID NO: 2186873 - RNA, 19 nt, Artificial Sequence
  Description of Artificial Sequence: Synthetic oligonucleotide
gggcuacugaagccaacuc

SEQ ID NO: 2186874 - RNA, 19 nt, Artificial Sequence
  Description of Artificial Sequence: Synthetic oligonucleotide
gcacuguaccacacuggag

SEQ ID NO: 2186875 - RNA, 19 nt, Artificial Sequence
  Description of Artificial Sequence: Synthetic oligonucleotide
cuuugaagaaggggcugua

SEQ ID NO: 2186876 - RNA, 19 nt, Artificial Sequence
  Description of Artificial Sequence: Synthetic oligonucleotide
ccucgagaaggaccccagg

SEQ ID NO: 2186877 - RNA, 19 nt, Artificial Sequence
  Description of Artificial Sequence: Synthetic oligonucleotide
gcuacugaagccaacucuu

SEQ ID NO: 2186878 - RNA, 19 nt, Artificial Sequence
  Description of Artificial Sequence: Synthetic oligonucleotide
cuccccuucaacccggcau

SEQ ID NO: 2186879 - RNA, 19 nt, Artificial Sequence
  Description of Artificial Sequence: Synthetic oligonucleotide
cuagcacauucaggcuuuc

SEQ ID NO: 2186880 - RNA, 19 nt, Artificial Sequence
  Description of Artificial Sequence: Synthetic oligonucleotide
gcgacagccggcacucugc

SEQ ID NO: 2186881 - RNA, 19 nt, Artificial Sequence
  Description of Artificial Sequence: Synthetic oligonucleotide
cugcuauucucucuaucuu

SEQ ID NO: 2186882 - RNA, 19 nt, Artificial Sequence
  Description of Artificial Sequence: Synthetic oligonucleotide
agguggacucggaucuggu

SEQ ID NO: 2186883 - RNA, 19 nt, Artificial Sequence
  Description of Artificial Sequence: Synthetic oligonucleotide
aguggccauuguagcucag

SEQ ID NO: 2186884 - RNA, 19 nt, Artificial Sequence
  Description of Artificial Sequence: Synthetic oligonucleotide
ccacaucccucagucuucc

SEQ ID NO: 2186885 - RNA, 19 nt, Artificial Sequence
  Description of Artificial Sequence: Synthetic oligonucleotide
aggaccccaggccguugaa

SEQ ID NO: 2186886 - RNA, 19 nt, Artificial Sequence
  Description of Artificial Sequence: Synthetic oligonucleotide
ccggagaaguuccucaucu

SEQ ID NO: 2186887 - RNA, 19 nt, Artificial Sequence
  Description of Artificial Sequence: Synthetic oligonucleotide
ggccauuguagcucagccu

SEQ ID NO: 2186888 - RNA, 19 nt, Artificial Sequence
  Description of Artificial Sequence: Synthetic oligonucleotide
gucggcacuguaccacacu

SEQ ID NO: 2186889 - RNA, 19 nt, Artificial Sequence
  Description of Artificial Sequence: Synthetic oligonucleotide
ggcuuucuuuggccugaug

SEQ ID NO: 2186890 - RNA, 19 nt, Artificial Sequence
  Description of Artificial Sequence: Synthetic oligonucleotide
cagcccgccggucccgcac

SEQ ID NO: 2186891 - RNA, 19 nt, Artificial Sequence
  Description of Artificial Sequence: Synthetic oligonucleotide
acacagucucacagggcuu

SEQ ID NO: 2186892 - RNA, 19 nt, Artificial Sequence
  Description of Artificial Sequence: Synthetic oligonucleotide
ggcaaacaugagcacuccu

SEQ ID NO: 2186893 - RNA, 19 nt, Artificial Sequence
  Description of Artificial Sequence: Synthetic oligonucleotide
ccuucaacccggcauacau

SEQ ID NO: 2186894 - RNA, 19 nt, Artificial Sequence
  Description of Artificial Sequence: Synthetic oligonucleotide
gcaacccaagaagccacuc

SEQ ID NO: 2186895 - RNA, 19 nt, Artificial Sequence
  Description of Artificial Sequence: Synthetic oligonucleotide
gucccgcacuugcucguga

SEQ ID NO: 2186896 - RNA, 19 nt, Artificial Sequence
  Description of Artificial Sequence: Synthetic oligonucleotide
gcaagggauccugucgcga

SEQ ID NO: 2186897 - RNA, 19 nt, Artificial Sequence
  Description of Artificial Sequence: Synthetic oligonucleotide
gggguggcccaggaacugc

SEQ ID NO: 2186898 - RNA, 19 nt, Artificial Sequence
  Description of Artificial Sequence: Synthetic oligonucleotide
cugucgcgacagccggcac

SEQ ID NO: 2186899 - RNA, 19 nt, Artificial Sequence
  Description of Artificial Sequence: Synthetic oligonucleotide
cccaggaacugcaggugga

SEQ ID NO: 2186900 - RNA, 19 nt, Artificial Sequence
  Description of Artificial Sequence: Synthetic oligonucleotide
acccuggccucgagaagga

SEQ ID NO: 2186901 - RNA, 19 nt, Artificial Sequence
  Description of Artificial Sequence: Synthetic oligonucleotide
cuccagcccgccggucccg

SEQ ID NO: 2186902 - RNA, 19 nt, Artificial Sequence
  Description of Artificial Sequence: Synthetic oligonucleotide
cacucugcacagagugggu

SEQ ID NO: 2186903 - RNA, 19 nt, Artificial Sequence
  Description of Artificial Sequence: Synthetic oligonucleotide
ggccucgagaaggacccca

SEQ ID NO: 2186904 - RNA, 19 nt, Artificial Sequence
  Description of Artificial Sequence: Synthetic oligonucleotide
ggucccggagaaguuccuc

SEQ ID NO: 2186905 - RNA, 19 nt, Artificial Sequence
  Description of Artificial Sequence: Synthetic oligonucleotide
ggccuguaaguggucggca

SEQ ID NO: 2186906 - RNA, 19 nt, Artificial Sequence
  Description of Artificial Sequence: Synthetic oligonucleotide
ggucggcacuguaccacac

SEQ ID NO: 2186907 - RNA, 19 nt, Artificial Sequence
  Description of Artificial Sequence: Synthetic oligonucleotide
ccaugaguccuggggccag

SEQ ID NO: 2186908 - RNA, 19 nt, Artificial Sequence
  Description of Artificial Sequence: Synthetic oligonucleotide
ggggauccacacggcacac

SEQ ID NO: 2186909 - RNA, 19 nt, Artificial Sequence
  Description of Artificial Sequence: Synthetic oligonucleotide
gccuaggaugaagaugacu

SEQ ID NO: 2186910 - RNA, 19 nt, Artificial Sequence
  Description of Artificial Sequence: Synthetic oligonucleotide
ccacccacuaagauggguu

SEQ ID NO: 2186911 - RNA, 19 nt, Artificial Sequence
  Description of Artificial Sequence: Synthetic oligonucleotide
ggucccgcacuugcucgug

SEQ ID NO: 2186912 - RNA, 19 nt, Artificial Sequence
  Description of Artificial Sequence: Synthetic oligonucleotide
guacggccuguaagugguc

SEQ ID NO: 2186913 - RNA, 19 nt, Artificial Sequence
  Description of Artificial Sequence: Synthetic oligonucleotide
ccuguaaguggucggcacu

SEQ ID NO: 2186914 - RNA, 19 nt, Artificial Sequence
  Description of Artificial Sequence: Synthetic oligonucleotide
ggugcuccuugccuaggau

SEQ ID NO: 2186915 - RNA, 19 nt, Artificial Sequence
  Description of Artificial Sequence: Synthetic oligonucleotide
cugccacgagggguggaca

SEQ ID NO: 2186916 - RNA, 19 nt, Artificial Sequence
  Description of Artificial Sequence: Synthetic oligonucleotide
cuggugaguacggccugua

SEQ ID NO: 2186917 - RNA, 19 nt, Artificial Sequence
  Description of Artificial Sequence: Synthetic oligonucleotide
cacggcacacuccuaccuu

SEQ ID NO: 2186918 - RNA, 19 nt, Artificial Sequence
  Description of Artificial Sequence: Synthetic oligonucleotide
ccugucgcgacagccggca

SEQ ID NO: 2186919 - RNA, 19 nt, Artificial Sequence
  Description of Artificial Sequence: Synthetic oligonucleotide
cggccuguaaguggucggc

SEQ ID NO: 2186920 - RNA, 19 nt, Artificial Sequence
  Description of Artificial Sequence: Synthetic oligonucleotide
gagcacuccugaggugagu

SEQ ID NO: 2186921 - RNA, 19 nt, Artificial Sequence
  Description of Artificial Sequence: Synthetic oligonucleotide
cagagugggucuguuucuu

SEQ ID NO: 2186922 - RNA, 19 nt, Artificial Sequence
  Description of Artificial Sequence: Synthetic oligonucleotide
ucgcgacagccggcacucu

SEQ ID NO: 2186923 - RNA, 19 nt, Artificial Sequence
  Description of Artificial Sequence: Synthetic oligonucleotide
ccauuguagcucagccucu

SEQ ID NO: 2186924 - RNA, 19 nt, Artificial Sequence
  Description of Artificial Sequence: Synthetic oligonucleotide
cccggggauccacacggca

SEQ ID NO: 2186925 - RNA, 19 nt, Artificial Sequence
  Description of Artificial Sequence: Synthetic oligonucleotide
ccccuucaacccggcauac

SEQ ID NO: 2186926 - RNA, 19 nt, Artificial Sequence
  Description of Artificial Sequence: Synthetic oligonucleotide
cccacuaagauggguuccu

SEQ ID NO: 2186927 - RNA, 19 nt, Artificial Sequence
  Description of Artificial Sequence: Synthetic oligonucleotide
ggcuggcaugggugagaca

SEQ ID NO: 2186928 - RNA, 19 nt, Artificial Sequence
  Description of Artificial Sequence: Synthetic oligonucleotide
gugagucgaucaagucgau

SEQ ID NO: 2186929 - RNA, 19 nt, Artificial Sequence
  Description of Artificial Sequence: Synthetic oligonucleotide
cucuaucuucugggcuacu

SEQ ID NO: 2186930 - RNA, 19 nt, Artificial Sequence
  Description of Artificial Sequence: Synthetic oligonucleotide
gggauccacacggcacacu

SEQ ID NO: 2186931 - RNA, 19 nt, Artificial Sequence
  Description of Artificial Sequence: Synthetic oligonucleotide
cacagagaucuagcacauu

SEQ ID NO: 2186932 - RNA, 19 nt, Artificial Sequence
  Description of Artificial Sequence: Synthetic oligonucleotide
cccuggccucgagaaggac

SEQ ID NO: 2186933 - RNA, 19 nt, Artificial Sequence
  Description of Artificial Sequence: Synthetic oligonucleotide
cccaggccguugaauugua

SEQ ID NO: 2186934 - RNA, 19 nt, Artificial Sequence
  Description of Artificial Sequence: Synthetic oligonucleotide
ggaccccaggccguugaau

SEQ ID NO: 2186935 - RNA, 19 nt, Artificial Sequence
  Description of Artificial Sequence: Synthetic oligonucleotide
ggacucggaucuggugagu

SEQ ID NO: 2186936 - RNA, 19 nt, Artificial Sequence
  Description of Artificial Sequence: Synthetic oligonucleotide
cgugugugugugugugugu

SEQ ID NO: 2186937 - RNA, 19 nt, Artificial Sequence
  Description of Artificial Sequence: Synthetic oligonucleotide
cccggcauacauacuccuu

SEQ ID NO: 2186938 - RNA, 19 nt, Artificial Sequence
  Description of Artificial Sequence: Synthetic oligonucleotide
ggcaugggugagacauauu

SEQ ID NO: 2186939 - RNA, 19 nt, Artificial Sequence
  Description of Artificial Sequence: Synthetic oligonucleotide
cggcacacuccuaccuugu

SEQ ID NO: 2186940 - RNA, 19 nt, Artificial Sequence
  Description of Artificial Sequence: Synthetic oligonucleotide
cccgcacuugcucgugaau

SEQ ID NO: 2186941 - RNA, 19 nt, Artificial Sequence
  Description of Artificial Sequence: Synthetic oligonucleotide
ccacuaagauggguuccuu

SEQ ID NO: 2186942 - RNA, 19 nt, Artificial Sequence
  Description of Artificial Sequence: Synthetic oligonucleotide
aaaauuaaaugcuucuugg

SEQ ID NO: 2186943 - RNA, 19 nt, Artificial Sequence
  Description of Artificial Sequence: Synthetic oligonucleotide
aaaaccuugcacaacaucc

SEQ ID NO: 2186944 - RNA, 19 nt, Artificial Sequence
  Description of Artificial Sequence: Synthetic oligonucleotide
aauuaaaugcuucuuggug

SEQ ID NO: 2186945 - RNA, 19 nt, Artificial Sequence
  Description of Artificial Sequence: Synthetic oligonucleotide
auuuacaccuagcagaauc

SEQ ID NO: 2186946 - RNA, 19 nt, Artificial Sequence
  Description of Artificial Sequence: Synthetic oligonucleotide
aaucaagcuuccuccaacc

SEQ ID NO: 2186947 - RNA, 19 nt, Artificial Sequence
  Description of Artificial Sequence: Synthetic oligonucleotide
aagauauuuacaccuagca

SEQ ID NO: 2186948 - RNA, 19 nt, Artificial Sequence
  Description of Artificial Sequence: Synthetic oligonucleotide
aagaauguagguguggcuc

SEQ ID NO: 2186949 - RNA, 19 nt, Artificial Sequence
  Description of Artificial Sequence: Synthetic oligonucleotide
ugcuacaagauauuuacac

SEQ ID NO: 2186950 - RNA, 19 nt, Artificial Sequence
  Description of Artificial Sequence: Synthetic oligonucleotide
uuaaaugcuucuugguggg

SEQ ID NO: 2186951 - RNA, 19 nt, Artificial Sequence
  Description of Artificial Sequence: Synthetic oligonucleotide
auaagaauguagguguggc

SEQ ID NO: 2186952 - RNA, 19 nt, Artificial Sequence
  Description of Artificial Sequence: Synthetic oligonucleotide
cugguuauggacuuuggcc

SEQ ID NO: 2186953 - RNA, 19 nt, Artificial Sequence
  Description of Artificial Sequence: Synthetic oligonucleotide
acaccuagcagaaucaagc

SEQ ID NO: 2186954 - RNA, 19 nt, Artificial Sequence
  Description of Artificial Sequence: Synthetic oligonucleotide
uuggccacgaacuugagaa

SEQ ID NO: 2186955 - RNA, 19 nt, Artificial Sequence
  Description of Artificial Sequence: Synthetic oligonucleotide
agcagaaucaagcuuccuc

SEQ ID NO: 2186956 - RNA, 19 nt, Artificial Sequence
  Description of Artificial Sequence: Synthetic oligonucleotide
guugauaagaauguaggug

SEQ ID NO: 2186957 - RNA, 19 nt, Artificial Sequence
  Description of Artificial Sequence: Synthetic oligonucleotide
aggacuaucaugagcaggc

SEQ ID NO: 2186958 - RNA, 19 nt, Artificial Sequence
  Description of Artificial Sequence: Synthetic oligonucleotide
augucggugcgcuugaugg

SEQ ID NO: 2186959 - RNA, 19 nt, Artificial Sequence
  Description of Artificial Sequence: Synthetic oligonucleotide
aaccccuuuucccuguucg

SEQ ID NO: 2186960 - RNA, 19 nt, Artificial Sequence
  Description of Artificial Sequence: Synthetic oligonucleotide
ugguuauggacuuuggcca

SEQ ID NO: 2186961 - RNA, 19 nt, Artificial Sequence
  Description of Artificial Sequence: Synthetic oligonucleotide
aggaggaugugguuggggc

SEQ ID NO: 2186962 - RNA, 19 nt, Artificial Sequence
  Description of Artificial Sequence: Synthetic oligonucleotide
uguaacucguaguccacgg

SEQ ID NO: 2186963 - RNA, 19 nt, Artificial Sequence
  Description of Artificial Sequence: Synthetic oligonucleotide
uuuacaccuagcagaauca

SEQ ID NO: 2186964 - RNA, 19 nt, Artificial Sequence
  Description of Artificial Sequence: Synthetic oligonucleotide
cagcauguugauaagaaug

SEQ ID NO: 2186965 - RNA, 19 nt, Artificial Sequence
  Description of Artificial Sequence: Synthetic oligonucleotide
uuuauccuggauuucggga

SEQ ID NO: 2186966 - RNA, 19 nt, Artificial Sequence
  Description of Artificial Sequence: Synthetic oligonucleotide
uugaucagcaggaacugca

SEQ ID NO: 2186967 - RNA, 19 nt, Artificial Sequence
  Description of Artificial Sequence: Synthetic oligonucleotide
uguucguuuauccuggauu

SEQ ID NO: 2186968 - RNA, 19 nt, Artificial Sequence
  Description of Artificial Sequence: Synthetic oligonucleotide
aacauccugaugcuacaag

SEQ ID NO: 2186969 - RNA, 19 nt, Artificial Sequence
  Description of Artificial Sequence: Synthetic oligonucleotide
gauaagaauguaggugugg

SEQ ID NO: 2186970 - RNA, 19 nt, Artificial Sequence
  Description of Artificial Sequence: Synthetic oligonucleotide
ucgggaguuccucagacug

SEQ ID NO: 2186971 - RNA, 19 nt, Artificial Sequence
  Description of Artificial Sequence: Synthetic oligonucleotide
acuaucaugagcaggcccg

SEQ ID NO: 2186972 - RNA, 19 nt, Artificial Sequence
  Description of Artificial Sequence: Synthetic oligonucleotide
uguugauaagaauguaggu

SEQ ID NO: 2186973 - RNA, 19 nt, Artificial Sequence
  Description of Artificial Sequence: Synthetic oligonucleotide
gguagguguacccuggucg

SEQ ID NO: 2186974 - RNA, 19 nt, Artificial Sequence
  Description of Artificial Sequence: Synthetic oligonucleotide
ucguuuauccuggauuucg

SEQ ID NO: 2186975 - RNA, 19 nt, Artificial Sequence
  Description of Artificial Sequence: Synthetic oligonucleotide
uccugaugcuacaagauau

SEQ ID NO: 2186976 - RNA, 19 nt, Artificial Sequence
  Description of Artificial Sequence: Synthetic oligonucleotide
caagauauuuacaccuagc

SEQ ID NO: 2186977 - RNA, 19 nt, Artificial Sequence
  Description of Artificial Sequence: Synthetic oligonucleotide
cuuucaugaagaugagccc

SEQ ID NO: 2186978 - RNA, 19 nt, Artificial Sequence
  Description of Artificial Sequence: Synthetic oligonucleotide
gaacacguacuguaggcgc

SEQ ID NO: 2186979 - RNA, 19 nt, Artificial Sequence
  Description of Artificial Sequence: Synthetic oligonucleotide
aaaguccucaguaaugagu

SEQ ID NO: 2186980 - RNA, 19 nt, Artificial Sequence
  Description of Artificial Sequence: Synthetic oligonucleotide
uucuagguugguucgcggg

SEQ ID NO: 2186981 - RNA, 19 nt, Artificial Sequence
  Description of Artificial Sequence: Synthetic oligonucleotide
guagguguggcucuugggc

SEQ ID NO: 2186982 - RNA, 19 nt, Artificial Sequence
  Description of Artificial Sequence: Synthetic oligonucleotide
uuugggguccugguuaugg

SEQ ID NO: 2186983 - RNA, 19 nt, Artificial Sequence
  Description of Artificial Sequence: Synthetic oligonucleotide
uuucccuguucguuuaucc

SEQ ID NO: 2186984 - RNA, 19 nt, Artificial Sequence
  Description of Artificial Sequence: Synthetic oligonucleotide
ugguuucuagguugguucg

SEQ ID NO: 2186985 - RNA, 19 nt, Artificial Sequence
  Description of Artificial Sequence: Synthetic oligonucleotide
ugauaagaauguaggugug

SEQ ID NO: 2186986 - RNA, 19 nt, Artificial Sequence
  Description of Artificial Sequence: Synthetic oligonucleotide
cacaacauccugaugcuac

SEQ ID NO: 2186987 - RNA, 19 nt, Artificial Sequence
  Description of Artificial Sequence: Synthetic oligonucleotide
ucuagguugguucgcgggc

SEQ ID NO: 2186988 - RNA, 19 nt, Artificial Sequence
  Description of Artificial Sequence: Synthetic oligonucleotide
guagucacccaccacgugc

SEQ ID NO: 2186989 - RNA, 19 nt, Artificial Sequence
  Description of Artificial Sequence: Synthetic oligonucleotide
acuguaggcgcucggcggc

SEQ ID NO: 2186990 - RNA, 19 nt, Artificial Sequence
  Description of Artificial Sequence: Synthetic oligonucleotide
caguaaugaguuucuuugg

SEQ ID NO: 2186991 - RNA, 19 nt, Artificial Sequence
  Description of Artificial Sequence: Synthetic oligonucleotide
gaaucaagcuuccuccaac

SEQ ID NO: 2186992 - RNA, 19 nt, Artificial Sequence
  Description of Artificial Sequence: Synthetic oligonucleotide
gauuucgggaguuccucag

SEQ ID NO: 2186993 - RNA, 19 nt, Artificial Sequence
  Description of Artificial Sequence: Synthetic oligonucleotide
cugguuucuagguugguuc

SEQ ID NO: 2186994 - RNA, 19 nt, Artificial Sequence
  Description of Artificial Sequence: Synthetic oligonucleotide
ugaugcuacaagauauuua

SEQ ID NO: 2186995 - RNA, 19 nt, Artificial Sequence
  Description of Artificial Sequence: Synthetic oligonucleotide
cuuggugggguacaccccg

SEQ ID NO: 2186996 - RNA, 19 nt, Artificial Sequence
  Description of Artificial Sequence: Synthetic oligonucleotide
agcagguugggguacacgu

SEQ ID NO: 2186997 - RNA, 19 nt, Artificial Sequence
  Description of Artificial Sequence: Synthetic oligonucleotide
ucggucucgguaauggugu

SEQ ID NO: 2186998 - RNA, 19 nt, Artificial Sequence
  Description of Artificial Sequence: Synthetic oligonucleotide
uguacccgaacacguacug

SEQ ID NO: 2186999 - RNA, 19 nt, Artificial Sequence
  Description of Artificial Sequence: Synthetic oligonucleotide
gacuaucaugagcaggccc

SEQ ID NO: 2187000 - RNA, 19 nt, Artificial Sequence
  Description of Artificial Sequence: Synthetic oligonucleotide
ugugggccagucuuugggg

SEQ ID NO: 2187001 - RNA, 19 nt, Artificial Sequence
  Description of Artificial Sequence: Synthetic oligonucleotide
ucccuguucguuuauccug

SEQ ID NO: 2187002 - RNA, 19 nt, Artificial Sequence
  Description of Artificial Sequence: Synthetic oligonucleotide
uguagguguggcucuuggg

SEQ ID NO: 2187003 - RNA, 19 nt, Artificial Sequence
  Description of Artificial Sequence: Synthetic oligonucleotide
cuacaagauauuuacaccu

SEQ ID NO: 2187004 - RNA, 19 nt, Artificial Sequence
  Description of Artificial Sequence: Synthetic oligonucleotide
cacaaaguccucaguaaug

SEQ ID NO: 2187005 - RNA, 19 nt, Artificial Sequence
  Description of Artificial Sequence: Synthetic oligonucleotide
uuucgggaguuccucagac

SEQ ID NO: 2187006 - RNA, 19 nt, Artificial Sequence
  Description of Artificial Sequence: Synthetic oligonucleotide
gcuacaagauauuuacacc

SEQ ID NO: 2187007 - RNA, 19 nt, Artificial Sequence
  Description of Artificial Sequence: Synthetic oligonucleotide
aaaugcuucuugguggggu

SEQ ID NO: 2187008 - RNA, 19 nt, Artificial Sequence
  Description of Artificial Sequence: Synthetic oligonucleotide
uuucuagguugguucgcgg

SEQ ID NO: 2187009 - RNA, 19 nt, Artificial Sequence
  Description of Artificial Sequence: Synthetic oligonucleotide
gaagaugagccccaggacu

SEQ ID NO: 2187010 - RNA, 19 nt, Artificial Sequence
  Description of Artificial Sequence: Synthetic oligonucleotide
uaagaauguagguguggcu

SEQ ID NO: 2187011 - RNA, 19 nt, Artificial Sequence
  Description of Artificial Sequence: Synthetic oligonucleotide
cuuguacccgaacacguac

SEQ ID NO: 2187012 - RNA, 19 nt, Artificial Sequence
  Description of Artificial Sequence: Synthetic oligonucleotide
uacaagauauuuacaccua

SEQ ID NO: 2187013 - RNA, 19 nt, Artificial Sequence
  Description of Artificial Sequence: Synthetic oligonucleotide
gguguugccuuucaugaag

SEQ ID NO: 2187014 - RNA, 19 nt, Artificial Sequence
  Description of Artificial Sequence: Synthetic oligonucleotide
ccuagcagaaucaagcuuc

SEQ ID NO: 2187015 - RNA, 19 nt, Artificial Sequence
  Description of Artificial Sequence: Synthetic oligonucleotide
cagcaugucaccaggcggc

SEQ ID NO: 2187016 - RNA, 19 nt, Artificial Sequence
  Description of Artificial Sequence: Synthetic oligonucleotide
cuagcagaaucaagcuucc

SEQ ID NO: 2187017 - RNA, 19 nt, Artificial Sequence
  Description of Artificial Sequence: Synthetic oligonucleotide
uccucaguaaugaguuucu

SEQ ID NO: 2187018 - RNA, 19 nt, Artificial Sequence
  Description of Artificial Sequence: Synthetic oligonucleotide
uuuggccacgaacuugaga

SEQ ID NO: 2187019 - RNA, 19 nt, Artificial Sequence
  Description of Artificial Sequence: Synthetic oligonucleotide
ugggguacaccccgagccg

SEQ ID NO: 2187020 - RNA, 19 nt, Artificial Sequence
  Description of Artificial Sequence: Synthetic oligonucleotide
guacuguaggcgcucggcg

SEQ ID NO: 2187021 - RNA, 19 nt, Artificial Sequence
  Description of Artificial Sequence: Synthetic oligonucleotide
aaaccuugcacaacauccu

SEQ ID NO: 2187022 - RNA, 19 nt, Artificial Sequence
  Description of Artificial Sequence: Synthetic oligonucleotide
cucccuaucggccugcgug

SEQ ID NO: 2187023 - RNA, 19 nt, Artificial Sequence
  Description of Artificial Sequence: Synthetic oligonucleotide
uccaaccaaccccuuuucc

SEQ ID NO: 2187024 - RNA, 19 nt, Artificial Sequence
  Description of Artificial Sequence: Synthetic oligonucleotide
guuucuagguugguucgcg

SEQ ID NO: 2187025 - RNA, 19 nt, Artificial Sequence
  Description of Artificial Sequence: Synthetic oligonucleotide
guaacucguaguccacggg

SEQ ID NO: 2187026 - RNA, 19 nt, Artificial Sequence
  Description of Artificial Sequence: Synthetic oligonucleotide
uaguccacgggaucggugu

SEQ ID NO: 2187027 - RNA, 19 nt, Artificial Sequence
  Description of Artificial Sequence: Synthetic oligonucleotide
ucacaguacugugugggcc

SEQ ID NO: 2187028 - RNA, 19 nt, Artificial Sequence
  Description of Artificial Sequence: Synthetic oligonucleotide
guagguguacccuggucgc

SEQ ID NO: 2187029 - RNA, 19 nt, Artificial Sequence
  Description of Artificial Sequence: Synthetic oligonucleotide
ucgguaaugguguugccuu

SEQ ID NO: 2187030 - RNA, 19 nt, Artificial Sequence
  Description of Artificial Sequence: Synthetic oligonucleotide
aguacugugugggccaguc

SEQ ID NO: 2187031 - RNA, 19 nt, Artificial Sequence
  Description of Artificial Sequence: Synthetic oligonucleotide
cagacugcaccucaaguuc

SEQ ID NO: 2187032 - RNA, 19 nt, Artificial Sequence
  Description of Artificial Sequence: Synthetic oligonucleotide
uacacgucccgguagucac

SEQ ID NO: 2187033 - RNA, 19 nt, Artificial Sequence
  Description of Artificial Sequence: Synthetic oligonucleotide
uccugguuauggacuuugg

SEQ ID NO: 2187034 - RNA, 19 nt, Artificial Sequence
  Description of Artificial Sequence: Synthetic oligonucleotide
cucggucucgguaauggug

SEQ ID NO: 2187035 - RNA, 19 nt, Artificial Sequence
  Description of Artificial Sequence: Synthetic oligonucleotide
uagguguggcucuugggcu

SEQ ID NO: 2187036 - RNA, 19 nt, Artificial Sequence
  Description of Artificial Sequence: Synthetic oligonucleotide
cacuguaacucguagucca

SEQ ID NO: 2187037 - RNA, 19 nt, Artificial Sequence
  Description of Artificial Sequence: Synthetic oligonucleotide
ugggguauccuccgguacu

SEQ ID NO: 2187038 - RNA, 19 nt, Artificial Sequence
  Description of Artificial Sequence: Synthetic oligonucleotide
ggcccuauucuccucaucc

SEQ ID NO: 2187039 - RNA, 19 nt, Artificial Sequence
  Description of Artificial Sequence: Synthetic oligonucleotide
uacccgaacacguacugua

SEQ ID NO: 2187040 - RNA, 19 nt, Artificial Sequence
  Description of Artificial Sequence: Synthetic oligonucleotide
uagucacccaccacgugcu

SEQ ID NO: 2187041 - RNA, 19 nt, Artificial Sequence
  Description of Artificial Sequence: Synthetic oligonucleotide
aaccaaccccuuuucccug

SEQ ID NO: 2187042 - RNA, 19 nt, Artificial Sequence
  Description of Artificial Sequence: Synthetic oligonucleotide
cuggucgccccucacuucg

SEQ ID NO: 2187043 - RNA, 19 nt, Artificial Sequence
  Description of Artificial Sequence: Synthetic oligonucleotide
uauccuggauuucgggagu

SEQ ID NO: 2187044 - RNA, 19 nt, Artificial Sequence
  Description of Artificial Sequence: Synthetic oligonucleotide
ucacccaccacgugcuuca

SEQ ID NO: 2187045 - RNA, 19 nt, Artificial Sequence
  Description of Artificial Sequence: Synthetic oligonucleotide
uuguacccgaacacguacu

SEQ ID NO: 2187046 - RNA, 19 nt, Artificial Sequence
  Description of Artificial Sequence: Synthetic oligonucleotide
acgugcuucaggaugucgg

SEQ ID NO: 2187047 - RNA, 19 nt, Artificial Sequence
  Description of Artificial Sequence: Synthetic oligonucleotide
guagcgcugccgcacaaag

SEQ ID NO: 2187048 - RNA, 19 nt, Artificial Sequence
  Description of Artificial Sequence: Synthetic oligonucleotide
ucuuggugggguacacccc

SEQ ID NO: 2187049 - RNA, 19 nt, Artificial Sequence
  Description of Artificial Sequence: Synthetic oligonucleotide
uucggcguccuccuccacc

SEQ ID NO: 2187050 - RNA, 19 nt, Artificial Sequence
  Description of Artificial Sequence: Synthetic oligonucleotide
uccaccagcuuguacccga

SEQ ID NO: 2187051 - RNA, 19 nt, Artificial Sequence
  Description of Artificial Sequence: Synthetic oligonucleotide
acucguaguccacgggauc

SEQ ID NO: 2187052 - RNA, 19 nt, Artificial Sequence
  Description of Artificial Sequence: Synthetic oligonucleotide
uucccuguucguuuauccu

SEQ ID NO: 2187053 - RNA, 19 nt, Artificial Sequence
  Description of Artificial Sequence: Synthetic oligonucleotide
gucucgguaaugguguugc

SEQ ID NO: 2187054 - RNA, 19 nt, Artificial Sequence
  Description of Artificial Sequence: Synthetic oligonucleotide
accucggucucgguaaugg

SEQ ID NO: 2187055 - RNA, 19 nt, Artificial Sequence
  Description of Artificial Sequence: Synthetic oligonucleotide
ucggccugcgugcugggcc

SEQ ID NO: 2187056 - RNA, 19 nt, Artificial Sequence
  Description of Artificial Sequence: Synthetic oligonucleotide
ugcaggucuggcccuauuc

SEQ ID NO: 2187057 - RNA, 19 nt, Artificial Sequence
  Description of Artificial Sequence: Synthetic oligonucleotide
cuaucggccugcgugcugg

SEQ ID NO: 2187058 - RNA, 19 nt, Artificial Sequence
  Description of Artificial Sequence: Synthetic oligonucleotide
uaaaugcuucuuggugggg

SEQ ID NO: 2187059 - RNA, 19 nt, Artificial Sequence
  Description of Artificial Sequence: Synthetic oligonucleotide
ugccuuucaugaagaugag

SEQ ID NO: 2187060 - RNA, 19 nt, Artificial Sequence
  Description of Artificial Sequence: Synthetic oligonucleotide
ucccuaucggccugcgugc

SEQ ID NO: 2187061 - RNA, 19 nt, Artificial Sequence
  Description of Artificial Sequence: Synthetic oligonucleotide
caccacgugcuucaggaug

SEQ ID NO: 2187062 - RNA, 19 nt, Artificial Sequence
  Description of Artificial Sequence: Synthetic oligonucleotide
aucaagcuuccuccaacca

SEQ ID NO: 2187063 - RNA, 19 nt, Artificial Sequence
  Description of Artificial Sequence: Synthetic oligonucleotide
acgaacuugagaacuuuca

SEQ ID NO: 2187064 - RNA, 19 nt, Artificial Sequence
  Description of Artificial Sequence: Synthetic oligonucleotide
cuguaacucguaguccacg

SEQ ID NO: 2187065 - RNA, 19 nt, Artificial Sequence
  Description of Artificial Sequence: Synthetic oligonucleotide
guaaugaguuucuuugggu

SEQ ID NO: 2187066 - RNA, 19 nt, Artificial Sequence
  Description of Artificial Sequence: Synthetic oligonucleotide
aacacguacuguaggcgcu

SEQ ID NO: 2187067 - RNA, 19 nt, Artificial Sequence
  Description of Artificial Sequence: Synthetic oligonucleotide
agcccugggacgugccgcc

SEQ ID NO: 2187068 - RNA, 19 nt, Artificial Sequence
  Description of Artificial Sequence: Synthetic oligonucleotide
acuguaacucguaguccac

SEQ ID NO: 2187069 - RNA, 19 nt, Artificial Sequence
  Description of Artificial Sequence: Synthetic oligonucleotide
aagaugagccccaggacua

SEQ ID NO: 2187070 - RNA, 19 nt, Artificial Sequence
  Description of Artificial Sequence: Synthetic oligonucleotide
guuauggacuuuggccacg

SEQ ID NO: 2187071 - RNA, 19 nt, Artificial Sequence
  Description of Artificial Sequence: Synthetic oligonucleotide
auccugaugcuacaagaua

SEQ ID NO: 2187072 - RNA, 19 nt, Artificial Sequence
  Description of Artificial Sequence: Synthetic oligonucleotide
cuugaucagcaggaacugc

SEQ ID NO: 2187073 - RNA, 19 nt, Artificial Sequence
  Description of Artificial Sequence: Synthetic oligonucleotide
gaggaugugguuggggcac

SEQ ID NO: 2187074 - RNA, 19 nt, Artificial Sequence
  Description of Artificial Sequence: Synthetic oligonucleotide
cccaggacuaucaugagca

SEQ ID NO: 2187075 - RNA, 19 nt, Artificial Sequence
  Description of Artificial Sequence: Synthetic oligonucleotide
ugguucgcgggccccacug

SEQ ID NO: 2187076 - RNA, 19 nt, Artificial Sequence
  Description of Artificial Sequence: Synthetic oligonucleotide
auuucgggaguuccucaga

SEQ ID NO: 2187077 - RNA, 19 nt, Artificial Sequence
  Description of Artificial Sequence: Synthetic oligonucleotide
cacgaacuugagaacuuuc

SEQ ID NO: 2187078 - RNA, 19 nt, Artificial Sequence
  Description of Artificial Sequence: Synthetic oligonucleotide
cacuucggcguccuccucc

SEQ ID NO: 2187079 - RNA, 19 nt, Artificial Sequence
  Description of Artificial Sequence: Synthetic oligonucleotide
cuagguugguucgcgggcc

SEQ ID NO: 2187080 - RNA, 19 nt, Artificial Sequence
  Description of Artificial Sequence: Synthetic oligonucleotide
uaaugguguugccuuucau

SEQ ID NO: 2187081 - RNA, 19 nt, Artificial Sequence
  Description of Artificial Sequence: Synthetic oligonucleotide
ccuauucuccucauccgcc

SEQ ID NO: 2187082 - RNA, 19 nt, Artificial Sequence
  Description of Artificial Sequence: Synthetic oligonucleotide
uggauuucgggaguuccuc

SEQ ID NO: 2187083 - RNA, 19 nt, Artificial Sequence
  Description of Artificial Sequence: Synthetic oligonucleotide
uccacgggaucgguguggg

SEQ ID NO: 2187084 - RNA, 19 nt, Artificial Sequence
  Description of Artificial Sequence: Synthetic oligonucleotide
uuauggacuuuggccacga

SEQ ID NO: 2187085 - RNA, 19 nt, Artificial Sequence
  Description of Artificial Sequence: Synthetic oligonucleotide
accuagcagaaucaagcuu

SEQ ID NO: 2187086 - RNA, 19 nt, Artificial Sequence
  Description of Artificial Sequence: Synthetic oligonucleotide
auccgccaaggccucacag

SEQ ID NO: 2187087 - RNA, 19 nt, Artificial Sequence
  Description of Artificial Sequence: Synthetic oligonucleotide
guucguuuauccuggauuu

SEQ ID NO: 2187088 - RNA, 19 nt, Artificial Sequence
  Description of Artificial Sequence: Synthetic oligonucleotide
ucguaguccacgggaucgg

SEQ ID NO: 2187089 - RNA, 19 nt, Artificial Sequence
  Description of Artificial Sequence: Synthetic oligonucleotide
uucgggaguuccucagacu

SEQ ID NO: 2187090 - RNA, 19 nt, Artificial Sequence
  Description of Artificial Sequence: Synthetic oligonucleotide
cccacuguaacucguaguc

SEQ ID NO: 2187091 - RNA, 19 nt, Artificial Sequence
  Description of Artificial Sequence: Synthetic oligonucleotide
uagguugguucgcgggccc

SEQ ID NO: 2187092 - RNA, 19 nt, Artificial Sequence
  Description of Artificial Sequence: Synthetic oligonucleotide
guaaugguguugccuuuca

SEQ ID NO: 2187093 - RNA, 19 nt, Artificial Sequence
  Description of Artificial Sequence: Synthetic oligonucleotide
cuauucuccucauccgcca

SEQ ID NO: 2187094 - RNA, 19 nt, Artificial Sequence
  Description of Artificial Sequence: Synthetic oligonucleotide
ugugggguauccuccggua

SEQ ID NO: 2187095 - RNA, 19 nt, Artificial Sequence
  Description of Artificial Sequence: Synthetic oligonucleotide
aacucguaguccacgggau

SEQ ID NO: 2187096 - RNA, 19 nt, Artificial Sequence
  Description of Artificial Sequence: Synthetic oligonucleotide
uggugggguacaccccgag

SEQ ID NO: 2187097 - RNA, 19 nt, Artificial Sequence
  Description of Artificial Sequence: Synthetic oligonucleotide
agcuuguacccgaacacgu

SEQ ID NO: 2187098 - RNA, 19 nt, Artificial Sequence
  Description of Artificial Sequence: Synthetic oligonucleotide
ugguagguguacccugguc

SEQ ID NO: 2187099 - RNA, 19 nt, Artificial Sequence
  Description of Artificial Sequence: Synthetic oligonucleotide
ccucacaguacuguguggg

SEQ ID NO: 2187100 - RNA, 19 nt, Artificial Sequence
  Description of Artificial Sequence: Synthetic oligonucleotide
caggaugucggugcgcuug

SEQ ID NO: 2187101 - RNA, 19 nt, Artificial Sequence
  Description of Artificial Sequence: Synthetic oligonucleotide
cuugcacaacauccugaug

SEQ ID NO: 2187102 - RNA, 19 nt, Artificial Sequence
  Description of Artificial Sequence: Synthetic oligonucleotide
ccgaacacguacuguaggc

SEQ ID NO: 2187103 - RNA, 19 nt, Artificial Sequence
  Description of Artificial Sequence: Synthetic oligonucleotide
ggggacgacagggagggcg

SEQ ID NO: 2187104 - RNA, 19 nt, Artificial Sequence
  Description of Artificial Sequence: Synthetic oligonucleotide
ucgccccucacuucggcgu

SEQ ID NO: 2187105 - RNA, 19 nt, Artificial Sequence
  Description of Artificial Sequence: Synthetic oligonucleotide
ugggugcgcggccccacgg

SEQ ID NO: 2187106 - RNA, 19 nt, Artificial Sequence
  Description of Artificial Sequence: Synthetic oligonucleotide
gguuauggacuuuggccac

SEQ ID NO: 2187107 - RNA, 19 nt, Artificial Sequence
  Description of Artificial Sequence: Synthetic oligonucleotide
gacugcaccucaaguucag

SEQ ID NO: 2187108 - RNA, 19 nt, Artificial Sequence
  Description of Artificial Sequence: Synthetic oligonucleotide
ugggacgugccgcccgugc

SEQ ID NO: 2187109 - RNA, 19 nt, Artificial Sequence
  Description of Artificial Sequence: Synthetic oligonucleotide
uggggaucuucuucugguc

SEQ ID NO: 2187110 - RNA, 19 nt, Artificial Sequence
  Description of Artificial Sequence: Synthetic oligonucleotide
caccucaaguucaggagga

SEQ ID NO: 2187111 - RNA, 19 nt, Artificial Sequence
  Description of Artificial Sequence: Synthetic oligonucleotide
uuuucccuguucguuuauc

SEQ ID NO: 2187112 - RNA, 19 nt, Artificial Sequence
  Description of Artificial Sequence: Synthetic oligonucleotide
ugguguugccuuucaugaa

SEQ ID NO: 2187113 - RNA, 19 nt, Artificial Sequence
  Description of Artificial Sequence: Synthetic oligonucleotide
gaacugcaccagcucggcc

SEQ ID NO: 2187114 - RNA, 19 nt, Artificial Sequence
  Description of Artificial Sequence: Synthetic oligonucleotide
ucucgguaaugguguugcc

SEQ ID NO: 2187115 - RNA, 19 nt, Artificial Sequence
  Description of Artificial Sequence: Synthetic oligonucleotide
agcaugucaccaggcggcg

SEQ ID NO: 2187116 - RNA, 19 nt, Artificial Sequence
  Description of Artificial Sequence: Synthetic oligonucleotide
ccuccgguacuccagguag

SEQ ID NO: 2187117 - RNA, 19 nt, Artificial Sequence
  Description of Artificial Sequence: Synthetic oligonucleotide
agucuuugggguccugguu

SEQ ID NO: 2187118 - RNA, 19 nt, Artificial Sequence
  Description of Artificial Sequence: Synthetic oligonucleotide
acacguacuguaggcgcuc

SEQ ID NO: 2187119 - RNA, 19 nt, Artificial Sequence
  Description of Artificial Sequence: Synthetic oligonucleotide
gucgccccucacuucggcg

SEQ ID NO: 2187120 - RNA, 19 nt, Artificial Sequence
  Description of Artificial Sequence: Synthetic oligonucleotide
cagaccucggucucgguaa

SEQ ID NO: 2187121 - RNA, 19 nt, Artificial Sequence
  Description of Artificial Sequence: Synthetic oligonucleotide
cuccgguacuccagguagc

SEQ ID NO: 2187122 - RNA, 19 nt, Artificial Sequence
  Description of Artificial Sequence: Synthetic oligonucleotide
ugagccccaggacuaucau

SEQ ID NO: 2187123 - RNA, 19 nt, Artificial Sequence
  Description of Artificial Sequence: Synthetic oligonucleotide
gcccuauucuccucauccg

SEQ ID NO: 2187124 - RNA, 19 nt, Artificial Sequence
  Description of Artificial Sequence: Synthetic oligonucleotide
uucguuuauccuggauuuc

SEQ ID NO: 2187125 - RNA, 19 nt, Artificial Sequence
  Description of Artificial Sequence: Synthetic oligonucleotide
acgacagggagggcgcggg

SEQ ID NO: 2187126 - RNA, 19 nt, Artificial Sequence
  Description of Artificial Sequence: Synthetic oligonucleotide
uggccacgaacuugagaac

SEQ ID NO: 2187127 - RNA, 19 nt, Artificial Sequence
  Description of Artificial Sequence: Synthetic oligonucleotide
cccuauucuccucauccgc

SEQ ID NO: 2187128 - RNA, 19 nt, Artificial Sequence
  Description of Artificial Sequence: Synthetic oligonucleotide
gacgacagggagggcgcgg

SEQ ID NO: 2187129 - RNA, 19 nt, Artificial Sequence
  Description of Artificial Sequence: Synthetic oligonucleotide
uucgcgggccccacuguaa

SEQ ID NO: 2187130 - RNA, 19 nt, Artificial Sequence
  Description of Artificial Sequence: Synthetic oligonucleotide
gugggguauccuccgguac

SEQ ID NO: 2187131 - RNA, 19 nt, Artificial Sequence
  Description of Artificial Sequence: Synthetic oligonucleotide
agacugcaccucaaguuca

SEQ ID NO: 2187132 - RNA, 19 nt, Artificial Sequence
  Description of Artificial Sequence: Synthetic oligonucleotide
uaucaugagcaggcccgug

SEQ ID NO: 2187133 - RNA, 19 nt, Artificial Sequence
  Description of Artificial Sequence: Synthetic oligonucleotide
uggucgccccucacuucgg

SEQ ID NO: 2187134 - RNA, 19 nt, Artificial Sequence
  Description of Artificial Sequence: Synthetic oligonucleotide
cguuuauccuggauuucgg

SEQ ID NO: 2187135 - RNA, 19 nt, Artificial Sequence
  Description of Artificial Sequence: Synthetic oligonucleotide
ucggugcgcuugaugggga

SEQ ID NO: 2187136 - RNA, 19 nt, Artificial Sequence
  Description of Artificial Sequence: Synthetic oligonucleotide
aggaugucggugcgcuuga

SEQ ID NO: 2187137 - RNA, 19 nt, Artificial Sequence
  Description of Artificial Sequence: Synthetic oligonucleotide
cacgucccgguagucaccc

SEQ ID NO: 2187138 - RNA, 19 nt, Artificial Sequence
  Description of Artificial Sequence: Synthetic oligonucleotide
uuggugggguacaccccga

SEQ ID NO: 2187139 - RNA, 19 nt, Artificial Sequence
  Description of Artificial Sequence: Synthetic oligonucleotide
accuugcacaacauccuga

SEQ ID NO: 2187140 - RNA, 19 nt, Artificial Sequence
  Description of Artificial Sequence: Synthetic oligonucleotide
accaaccccuuuucccugu

SEQ ID NO: 2187141 - RNA, 19 nt, Artificial Sequence
  Description of Artificial Sequence: Synthetic oligonucleotide
agguugguucgcgggcccc

SEQ ID NO: 2187142 - RNA, 19 nt, Artificial Sequence
  Description of Artificial Sequence: Synthetic oligonucleotide
uagguguacccuggucgcc

SEQ ID NO: 2187143 - RNA, 19 nt, Artificial Sequence
  Description of Artificial Sequence: Synthetic oligonucleotide
accccuuuucccuguucgu

SEQ ID NO: 2187144 - RNA, 19 nt, Artificial Sequence
  Description of Artificial Sequence: Synthetic oligonucleotide
acacgucccgguagucacc

SEQ ID NO: 2187145 - RNA, 19 nt, Artificial Sequence
  Description of Artificial Sequence: Synthetic oligonucleotide
augcuacaagauauuuaca

SEQ ID NO: 2187146 - RNA, 19 nt, Artificial Sequence
  Description of Artificial Sequence: Synthetic oligonucleotide
acccgaacacguacuguag

SEQ ID NO: 2187147 - RNA, 19 nt, Artificial Sequence
  Description of Artificial Sequence: Synthetic oligonucleotide
cccgaacacguacuguagg

SEQ ID NO: 2187148 - RNA, 19 nt, Artificial Sequence
  Description of Artificial Sequence: Synthetic oligonucleotide
ugcgugcugggccggccgc

SEQ ID NO: 2187149 - RNA, 19 nt, Artificial Sequence
  Description of Artificial Sequence: Synthetic oligonucleotide
uauuuacaccuagcagaau

SEQ ID NO: 2187150 - RNA, 19 nt, Artificial Sequence
  Description of Artificial Sequence: Synthetic oligonucleotide
gagcccugggacgugccgc

SEQ ID NO: 2187151 - RNA, 19 nt, Artificial Sequence
  Description of Artificial Sequence: Synthetic oligonucleotide
ugcugggccggccgcggcc

SEQ ID NO: 2187152 - RNA, 19 nt, Artificial Sequence
  Description of Artificial Sequence: Synthetic oligonucleotide
cugcgucuccccacucccg

SEQ ID NO: 2187153 - RNA, 19 nt, Artificial Sequence
  Description of Artificial Sequence: Synthetic oligonucleotide
cucgccugcgucuccccac

SEQ ID NO: 2187154 - RNA, 19 nt, Artificial Sequence
  Description of Artificial Sequence: Synthetic oligonucleotide
ggacgugccgcccgugccg

SEQ ID NO: 2187155 - RNA, 19 nt, Artificial Sequence
  Description of Artificial Sequence: Synthetic oligonucleotide
uauggacuuuggccacgaa

SEQ ID NO: 2187156 - RNA, 19 nt, Artificial Sequence
  Description of Artificial Sequence: Synthetic oligonucleotide
ccuggauuucgggaguucc

SEQ ID NO: 2187157 - RNA, 19 nt, Artificial Sequence
  Description of Artificial Sequence: Synthetic oligonucleotide
ucccgcucccuaucggccu

SEQ ID NO: 2187158 - RNA, 19 nt, Artificial Sequence
  Description of Artificial Sequence: Synthetic oligonucleotide
guaguccacgggaucggug

SEQ ID NO: 2187159 - RNA, 19 nt, Artificial Sequence
  Description of Artificial Sequence: Synthetic oligonucleotide
ggugugggguauccuccgg

SEQ ID NO: 2187160 - RNA, 19 nt, Artificial Sequence
  Description of Artificial Sequence: Synthetic oligonucleotide
cauccugaugcuacaagau

SEQ ID NO: 2187161 - RNA, 19 nt, Artificial Sequence
  Description of Artificial Sequence: Synthetic oligonucleotide
ucgccugcgucuccccacu

SEQ ID NO: 2187162 - RNA, 19 nt, Artificial Sequence
  Description of Artificial Sequence: Synthetic oligonucleotide
aggcccgugguagguguac

SEQ ID NO: 2187163 - RNA, 19 nt, Artificial Sequence
  Description of Artificial Sequence: Synthetic oligonucleotide
cacucccgcucccuaucgg

SEQ ID NO: 2187164 - RNA, 19 nt, Artificial Sequence
  Description of Artificial Sequence: Synthetic oligonucleotide
cacguacuguaggcgcucg

SEQ ID NO: 2187165 - RNA, 19 nt, Artificial Sequence
  Description of Artificial Sequence: Synthetic oligonucleotide
ggauuucgggaguuccuca

SEQ ID NO: 2187166 - RNA, 19 nt, Artificial Sequence
  Description of Artificial Sequence: Synthetic oligonucleotide
gguauccuccgguacucca

SEQ ID NO: 2187167 - RNA, 19 nt, Artificial Sequence
  Description of Artificial Sequence: Synthetic oligonucleotide
gccgcaggaagucccagac

SEQ ID NO: 2187168 - RNA, 19 nt, Artificial Sequence
  Description of Artificial Sequence: Synthetic oligonucleotide
cugugugggccagucuuug

SEQ ID NO: 2187169 - RNA, 19 nt, Artificial Sequence
  Description of Artificial Sequence: Synthetic oligonucleotide
cugcgugcugggccggccg

SEQ ID NO: 2187170 - RNA, 19 nt, Artificial Sequence
  Description of Artificial Sequence: Synthetic oligonucleotide
gguuggggcacuugcugca

SEQ ID NO: 2187171 - RNA, 19 nt, Artificial Sequence
  Description of Artificial Sequence: Synthetic oligonucleotide
gguuucuagguugguucgc

SEQ ID NO: 2187172 - RNA, 19 nt, Artificial Sequence
  Description of Artificial Sequence: Synthetic oligonucleotide
gguagucacccaccacgug

SEQ ID NO: 2187173 - RNA, 19 nt, Artificial Sequence
  Description of Artificial Sequence: Synthetic oligonucleotide
ccucacuucggcguccucc

SEQ ID NO: 2187174 - RNA, 19 nt, Artificial Sequence
  Description of Artificial Sequence: Synthetic oligonucleotide
caccuagcagaaucaagcu

SEQ ID NO: 2187175 - RNA, 19 nt, Artificial Sequence
  Description of Artificial Sequence: Synthetic oligonucleotide
ccugcgucuccccacuccc

SEQ ID NO: 2187176 - RNA, 19 nt, Artificial Sequence
  Description of Artificial Sequence: Synthetic oligonucleotide
cgaacacguacuguaggcg

SEQ ID NO: 2187177 - RNA, 19 nt, Artificial Sequence
  Description of Artificial Sequence: Synthetic oligonucleotide
uguacccuggucgccccuc

SEQ ID NO: 2187178 - RNA, 19 nt, Artificial Sequence
  Description of Artificial Sequence: Synthetic oligonucleotide
uagcagaaucaagcuuccu

SEQ ID NO: 2187179 - RNA, 19 nt, Artificial Sequence
  Description of Artificial Sequence: Synthetic oligonucleotide
acgggaucgguguggggua

SEQ ID NO: 2187180 - RNA, 19 nt, Artificial Sequence
  Description of Artificial Sequence: Synthetic oligonucleotide
ggagcccugggacgugccg

SEQ ID NO: 2187181 - RNA, 19 nt, Artificial Sequence
  Description of Artificial Sequence: Synthetic oligonucleotide
uugguucgcgggccccacu

SEQ ID NO: 2187182 - RNA, 19 nt, Artificial Sequence
  Description of Artificial Sequence: Synthetic oligonucleotide
cugcuucugggugcgcggc

SEQ ID NO: 2187183 - RNA, 19 nt, Artificial Sequence
  Description of Artificial Sequence: Synthetic oligonucleotide
gguacuccagguagcgcug

SEQ ID NO: 2187184 - RNA, 19 nt, Artificial Sequence
  Description of Artificial Sequence: Synthetic oligonucleotide
gucccgguagucacccacc

SEQ ID NO: 2187185 - RNA, 19 nt, Artificial Sequence
  Description of Artificial Sequence: Synthetic oligonucleotide
ugggagccuccucgccugc

SEQ ID NO: 2187186 - RNA, 19 nt, Artificial Sequence
  Description of Artificial Sequence: Synthetic oligonucleotide
ccagucuuugggguccugg

SEQ ID NO: 2187187 - RNA, 19 nt, Artificial Sequence
  Description of Artificial Sequence: Synthetic oligonucleotide
ccacuguaacucguagucc

SEQ ID NO: 2187188 - RNA, 19 nt, Artificial Sequence
  Description of Artificial Sequence: Synthetic oligonucleotide
ggaucggugugggguaucc

SEQ ID NO: 2187189 - RNA, 19 nt, Artificial Sequence
  Description of Artificial Sequence: Synthetic oligonucleotide
guacaccccgagccgccgc

SEQ ID NO: 2187190 - RNA, 19 nt, Artificial Sequence
  Description of Artificial Sequence: Synthetic oligonucleotide
cuccaccagcuuguacccg

SEQ ID NO: 2187191 - RNA, 19 nt, Artificial Sequence
  Description of Artificial Sequence: Synthetic oligonucleotide
gacgugccgcccgugccgc

SEQ ID NO: 2187192 - RNA, 19 nt, Artificial Sequence
  Description of Artificial Sequence: Synthetic oligonucleotide
uccuggauuucgggaguuc

SEQ ID NO: 2187193 - RNA, 19 nt, Artificial Sequence
  Description of Artificial Sequence: Synthetic oligonucleotide
cucgguaaugguguugccu

SEQ ID NO: 2187194 - RNA, 19 nt, Artificial Sequence
  Description of Artificial Sequence: Synthetic oligonucleotide
uacccuggucgccccucac

SEQ ID NO: 2187195 - RNA, 19 nt, Artificial Sequence
  Description of Artificial Sequence: Synthetic oligonucleotide
cugggugcgcggccccacg

SEQ ID NO: 2187196 - RNA, 19 nt, Artificial Sequence
  Description of Artificial Sequence: Synthetic oligonucleotide
agaccucggucucgguaau

SEQ ID NO: 2187197 - RNA, 19 nt, Artificial Sequence
  Description of Artificial Sequence: Synthetic oligonucleotide
ggacuaucaugagcaggcc

SEQ ID NO: 2187198 - RNA, 19 nt, Artificial Sequence
  Description of Artificial Sequence: Synthetic oligonucleotide
cuggauuucgggaguuccu

SEQ ID NO: 2187199 - RNA, 19 nt, Artificial Sequence
  Description of Artificial Sequence: Synthetic oligonucleotide
caccggcuccagcauguug

SEQ ID NO: 2187200 - RNA, 19 nt, Artificial Sequence
  Description of Artificial Sequence: Synthetic oligonucleotide
gucacccaccacgugcuuc

SEQ ID NO: 2187201 - RNA, 19 nt, Artificial Sequence
  Description of Artificial Sequence: Synthetic oligonucleotide
ucacuucggcguccuccuc

SEQ ID NO: 2187202 - RNA, 19 nt, Artificial Sequence
  Description of Artificial Sequence: Synthetic oligonucleotide
uccucgccugcgucucccc

SEQ ID NO: 2187203 - RNA, 19 nt, Artificial Sequence
  Description of Artificial Sequence: Synthetic oligonucleotide
caaccccuuuucccuguuc

SEQ ID NO: 2187204 - RNA, 19 nt, Artificial Sequence
  Description of Artificial Sequence: Synthetic oligonucleotide
ccaggacuaucaugagcag

SEQ ID NO: 2187205 - RNA, 19 nt, Artificial Sequence
  Description of Artificial Sequence: Synthetic oligonucleotide
uguaggcgcucggcggcca

SEQ ID NO: 2187206 - RNA, 19 nt, Artificial Sequence
  Description of Artificial Sequence: Synthetic oligonucleotide
cacgggaucgguguggggu

SEQ ID NO: 2187207 - RNA, 19 nt, Artificial Sequence
  Description of Artificial Sequence: Synthetic oligonucleotide
gugccgcgggacgugcugg

SEQ ID NO: 2187208 - RNA, 19 nt, Artificial Sequence
  Description of Artificial Sequence: Synthetic oligonucleotide
cuccucgccugcgucuccc

SEQ ID NO: 2187209 - RNA, 19 nt, Artificial Sequence
  Description of Artificial Sequence: Synthetic oligonucleotide
guaggcgcucggcggccag

SEQ ID NO: 2187210 - RNA, 19 nt, Artificial Sequence
  Description of Artificial Sequence: Synthetic oligonucleotide
gggacgacagggagggcgc

SEQ ID NO: 2187211 - RNA, 19 nt, Artificial Sequence
  Description of Artificial Sequence: Synthetic oligonucleotide
ggucucgguaaugguguug

SEQ ID NO: 2187212 - RNA, 19 nt, Artificial Sequence
  Description of Artificial Sequence: Synthetic oligonucleotide
agaugagccccaggacuau

SEQ ID NO: 2187213 - RNA, 19 nt, Artificial Sequence
  Description of Artificial Sequence: Synthetic oligonucleotide
gguacaccccgagccgccg

SEQ ID NO: 2187214 - RNA, 19 nt, Artificial Sequence
  Description of Artificial Sequence: Synthetic oligonucleotide
gggacgugccgcccgugcc

SEQ ID NO: 2187215 - RNA, 19 nt, Artificial Sequence
  Description of Artificial Sequence: Synthetic oligonucleotide
gaccucggucucgguaaug

SEQ ID NO: 2187216 - RNA, 19 nt, Artificial Sequence
  Description of Artificial Sequence: Synthetic oligonucleotide
cuguaggcgcucggcggcc

SEQ ID NO: 2187217 - RNA, 19 nt, Artificial Sequence
  Description of Artificial Sequence: Synthetic oligonucleotide
cguacuguaggcgcucggc

SEQ ID NO: 2187218 - RNA, 19 nt, Artificial Sequence
  Description of Artificial Sequence: Synthetic oligonucleotide
gugggccagucuuuggggu

SEQ ID NO: 2187219 - RNA, 19 nt, Artificial Sequence
  Description of Artificial Sequence: Synthetic oligonucleotide
cagucuuugggguccuggu

SEQ ID NO: 2187220 - RNA, 19 nt, Artificial Sequence
  Description of Artificial Sequence: Synthetic oligonucleotide
ccgugguagguguacccug

SEQ ID NO: 2187221 - RNA, 19 nt, Artificial Sequence
  Description of Artificial Sequence: Synthetic oligonucleotide
ggcggcggagagccggccg

SEQ ID NO: 2187222 - RNA, 19 nt, Artificial Sequence
  Description of Artificial Sequence: Synthetic oligonucleotide
cuuugggguccugguuaug

SEQ ID NO: 2187223 - RNA, 19 nt, Artificial Sequence
  Description of Artificial Sequence: Synthetic oligonucleotide
gcaggucuggcccuauucu

SEQ ID NO: 2187224 - RNA, 19 nt, Artificial Sequence
  Description of Artificial Sequence: Synthetic oligonucleotide
gugugggguauccuccggu

SEQ ID NO: 2187225 - RNA, 19 nt, Artificial Sequence
  Description of Artificial Sequence: Synthetic oligonucleotide
gccugcgucuccccacucc

SEQ ID NO: 2187226 - RNA, 19 nt, Artificial Sequence
  Description of Artificial Sequence: Synthetic oligonucleotide
uucugggugcgcggcccca

SEQ ID NO: 2187227 - RNA, 19 nt, Artificial Sequence
  Description of Artificial Sequence: Synthetic oligonucleotide
gggguacaccccgagccgc

SEQ ID NO: 2187228 - RNA, 19 nt, Artificial Sequence
  Description of Artificial Sequence: Synthetic oligonucleotide
ccacucccgcucccuaucg

SEQ ID NO: 2187229 - RNA, 19 nt, Artificial Sequence
  Description of Artificial Sequence: Synthetic oligonucleotide
guacccuggucgccccuca

SEQ ID NO: 2187230 - RNA, 19 nt, Artificial Sequence
  Description of Artificial Sequence: Synthetic oligonucleotide
guucgcgggccccacugua

SEQ ID NO: 2187231 - RNA, 19 nt, Artificial Sequence
  Description of Artificial Sequence: Synthetic oligonucleotide
cugaugcuacaagauauuu

SEQ ID NO: 2187232 - RNA, 19 nt, Artificial Sequence
  Description of Artificial Sequence: Synthetic oligonucleotide
guugguucgcgggccccac

SEQ ID NO: 2187233 - RNA, 19 nt, Artificial Sequence
  Description of Artificial Sequence: Synthetic oligonucleotide
ccagguagcgcugccgcac

SEQ ID NO: 2187234 - RNA, 19 nt, Artificial Sequence
  Description of Artificial Sequence: Synthetic oligonucleotide
ggccacgaacuugagaacu

SEQ ID NO: 2187235 - RNA, 19 nt, Artificial Sequence
  Description of Artificial Sequence: Synthetic oligonucleotide
agguagcgcugccgcacaa

SEQ ID NO: 2187236 - RNA, 19 nt, Artificial Sequence
  Description of Artificial Sequence: Synthetic oligonucleotide
uaggcgcucggcggccagc

SEQ ID NO: 2187237 - RNA, 19 nt, Artificial Sequence
  Description of Artificial Sequence: Synthetic oligonucleotide
ggucgccccucacuucggc

SEQ ID NO: 2187238 - RNA, 19 nt, Artificial Sequence
  Description of Artificial Sequence: Synthetic oligonucleotide
cagguagcgcugccgcaca

SEQ ID NO: 2187239 - RNA, 19 nt, Artificial Sequence
  Description of Artificial Sequence: Synthetic oligonucleotide
gcauguugauaagaaugua

SEQ ID NO: 2187240 - RNA, 19 nt, Artificial Sequence
  Description of Artificial Sequence: Synthetic oligonucleotide
gugccgcccgugccgcggg

SEQ ID NO: 2187241 - RNA, 19 nt, Artificial Sequence
  Description of Artificial Sequence: Synthetic oligonucleotide
cugccgcacaaaguccuca

SEQ ID NO: 2187242 - RNA, 19 nt, Artificial Sequence
  Description of Artificial Sequence: Synthetic oligonucleotide
uuccuccaaccaaccccuu

SEQ ID NO: 2187243 - RNA, 19 nt, Artificial Sequence
  Description of Artificial Sequence: Synthetic oligonucleotide
gggguauccuccgguacuc

SEQ ID NO: 2187244 - RNA, 19 nt, Artificial Sequence
  Description of Artificial Sequence: Synthetic oligonucleotide
gcgcgggagcccugggacg

SEQ ID NO: 2187245 - RNA, 19 nt, Artificial Sequence
  Description of Artificial Sequence: Synthetic oligonucleotide
gcggcggagagccggccgc

SEQ ID NO: 2187246 - RNA, 19 nt, Artificial Sequence
  Description of Artificial Sequence: Synthetic oligonucleotide
ccaaggccucacaguacug

SEQ ID NO: 2187247 - RNA, 19 nt, Artificial Sequence
  Description of Artificial Sequence: Synthetic oligonucleotide
agucacccaccacgugcuu

SEQ ID NO: 2187248 - RNA, 19 nt, Artificial Sequence
  Description of Artificial Sequence: Synthetic oligonucleotide
gcaugucaccaggcggcgg

SEQ ID NO: 2187249 - RNA, 19 nt, Artificial Sequence
  Description of Artificial Sequence: Synthetic oligonucleotide
guacccgaacacguacugu

SEQ ID NO: 2187250 - RNA, 19 nt, Artificial Sequence
  Description of Artificial Sequence: Synthetic oligonucleotide
guacugugugggccagucu

SEQ ID NO: 2187251 - RNA, 19 nt, Artificial Sequence
  Description of Artificial Sequence: Synthetic oligonucleotide
acgugccgcccgugccgcg

SEQ ID NO: 2187252 - RNA, 19 nt, Artificial Sequence
  Description of Artificial Sequence: Synthetic oligonucleotide
ccgcaggaagucccagacc

SEQ ID NO: 2187253 - RNA, 19 nt, Artificial Sequence
  Description of Artificial Sequence: Synthetic oligonucleotide
ggacgacagggagggcgcg

SEQ ID NO: 2187254 - RNA, 19 nt, Artificial Sequence
  Description of Artificial Sequence: Synthetic oligonucleotide
ggguauccuccgguacucc

SEQ ID NO: 2187255 - RNA, 19 nt, Artificial Sequence
  Description of Artificial Sequence: Synthetic oligonucleotide
cauccgccaaggccucaca

SEQ ID NO: 2187256 - RNA, 19 nt, Artificial Sequence
  Description of Artificial Sequence: Synthetic oligonucleotide
cgucccgguagucacccac

SEQ ID NO: 2187257 - RNA, 19 nt, Artificial Sequence
  Description of Artificial Sequence: Synthetic oligonucleotide
gugguagguguacccuggu

SEQ ID NO: 2187258 - RNA, 19 nt, Artificial Sequence
  Description of Artificial Sequence: Synthetic oligonucleotide
gggugcgcggccccacggc

SEQ ID NO: 2187259 - RNA, 19 nt, Artificial Sequence
  Description of Artificial Sequence: Synthetic oligonucleotide
ggguacaccccgagccgcc

SEQ ID NO: 2187260 - RNA, 19 nt, Artificial Sequence
  Description of Artificial Sequence: Synthetic oligonucleotide
cuucggcguccuccuccac

SEQ ID NO: 2187261 - RNA, 19 nt, Artificial Sequence
  Description of Artificial Sequence: Synthetic oligonucleotide
ggugcgcuugauggggauc

SEQ ID NO: 2187262 - RNA, 19 nt, Artificial Sequence
  Description of Artificial Sequence: Synthetic oligonucleotide
cuguucguuuauccuggau

SEQ ID NO: 2187263 - RNA, 19 nt, Artificial Sequence
  Description of Artificial Sequence: Synthetic oligonucleotide
gaucggugugggguauccu

SEQ ID NO: 2187264 - RNA, 19 nt, Artificial Sequence
  Description of Artificial Sequence: Synthetic oligonucleotide
cccugggacgugccgcccg

SEQ ID NO: 2187265 - RNA, 19 nt, Artificial Sequence
  Description of Artificial Sequence: Synthetic oligonucleotide
ccgcgggacgugcugggag

SEQ ID NO: 2187266 - RNA, 19 nt, Artificial Sequence
  Description of Artificial Sequence: Synthetic oligonucleotide
acgucccgguagucaccca

SEQ ID NO: 2187267 - RNA, 19 nt, Artificial Sequence
  Description of Artificial Sequence: Synthetic oligonucleotide
ccgccaaggccucacagua

SEQ ID NO: 2187268 - RNA, 19 nt, Artificial Sequence
  Description of Artificial Sequence: Synthetic oligonucleotide
gggacgugcugggagccuc

SEQ ID NO: 2187269 - RNA, 19 nt, Artificial Sequence
  Description of Artificial Sequence: Synthetic oligonucleotide
gggagccuccucgccugcg

SEQ ID NO: 2187270 - RNA, 19 nt, Artificial Sequence
  Description of Artificial Sequence: Synthetic oligonucleotide
gcuuguacccgaacacgua

SEQ ID NO: 2187271 - RNA, 19 nt, Artificial Sequence
  Description of Artificial Sequence: Synthetic oligonucleotide
ccagcauguugauaagaau

SEQ ID NO: 2187272 - RNA, 19 nt, Artificial Sequence
  Description of Artificial Sequence: Synthetic oligonucleotide
gguugguucgcgggcccca

SEQ ID NO: 2187273 - RNA, 19 nt, Artificial Sequence
  Description of Artificial Sequence: Synthetic oligonucleotide
ccuggucgccccucacuuc

SEQ ID NO: 2187274 - RNA, 19 nt, Artificial Sequence
  Description of Artificial Sequence: Synthetic oligonucleotide
cgguacuccagguagcgcu

SEQ ID NO: 2187275 - RNA, 19 nt, Artificial Sequence
  Description of Artificial Sequence: Synthetic oligonucleotide
ccuaucggccugcgugcug

SEQ ID NO: 2187276 - RNA, 19 nt, Artificial Sequence
  Description of Artificial Sequence: Synthetic oligonucleotide
ccucauccgccaaggccuc

SEQ ID NO: 2187277 - RNA, 19 nt, Artificial Sequence
  Description of Artificial Sequence: Synthetic oligonucleotide
cacccaccacgugcuucag

SEQ ID NO: 2187278 - RNA, 19 nt, Artificial Sequence
  Description of Artificial Sequence: Synthetic oligonucleotide
gagcaggcccgugguaggu

SEQ ID NO: 2187279 - RNA, 19 nt, Artificial Sequence
  Description of Artificial Sequence: Synthetic oligonucleotide
gcgggacgugcugggagcc

SEQ ID NO: 2187280 - RNA, 19 nt, Artificial Sequence
  Description of Artificial Sequence: Synthetic oligonucleotide
ccagaccucggucucggua

SEQ ID NO: 2187281 - RNA, 19 nt, Artificial Sequence
  Description of Artificial Sequence: Synthetic oligonucleotide
gguagcgcugccgcacaaa

SEQ ID NO: 2187282 - RNA, 19 nt, Artificial Sequence
  Description of Artificial Sequence: Synthetic oligonucleotide
gcaggcccgugguaggugu

SEQ ID NO: 2187283 - RNA, 19 nt, Artificial Sequence
  Description of Artificial Sequence: Synthetic oligonucleotide
ccacgggaucggugugggg

SEQ ID NO: 2187284 - RNA, 19 nt, Artificial Sequence
  Description of Artificial Sequence: Synthetic oligonucleotide
ccgguacuccagguagcgc

SEQ ID NO: 2187285 - RNA, 19 nt, Artificial Sequence
  Description of Artificial Sequence: Synthetic oligonucleotide
gcugguuucuagguugguu

SEQ ID NO: 2187286 - RNA, 19 nt, Artificial Sequence
  Description of Artificial Sequence: Synthetic oligonucleotide
cugggacgugccgcccgug

SEQ ID NO: 2187287 - RNA, 19 nt, Artificial Sequence
  Description of Artificial Sequence: Synthetic oligonucleotide
ccuguucguuuauccugga

SEQ ID NO: 2187288 - RNA, 19 nt, Artificial Sequence
  Description of Artificial Sequence: Synthetic oligonucleotide
ggagccuccucgccugcgu

SEQ ID NO: 2187289 - RNA, 19 nt, Artificial Sequence
  Description of Artificial Sequence: Synthetic oligonucleotide
gccgcggccccucggcuuc

SEQ ID NO: 2187290 - RNA, 19 nt, Artificial Sequence
  Description of Artificial Sequence: Synthetic oligonucleotide
gcgugcugggccggccgcg

SEQ ID NO: 2187291 - RNA, 19 nt, Artificial Sequence
  Description of Artificial Sequence: Synthetic oligonucleotide
gcacaacauccugaugcua

SEQ ID NO: 2187292 - RNA, 19 nt, Artificial Sequence
  Description of Artificial Sequence: Synthetic oligonucleotide
cucauccgccaaggccuca

SEQ ID NO: 2187293 - RNA, 19 nt, Artificial Sequence
  Description of Artificial Sequence: Synthetic oligonucleotide
gcugccgcacaaaguccuc

SEQ ID NO: 2187294 - RNA, 19 nt, Artificial Sequence
  Description of Artificial Sequence: Synthetic oligonucleotide
gggcgcgggagcccuggga

SEQ ID NO: 2187295 - RNA, 19 nt, Artificial Sequence
  Description of Artificial Sequence: Synthetic oligonucleotide
cuggcccuauucuccucau

SEQ ID NO: 2187296 - RNA, 19 nt, Artificial Sequence
  Description of Artificial Sequence: Synthetic oligonucleotide
cgugccgcgggacgugcug

SEQ ID NO: 2187297 - RNA, 19 nt, Artificial Sequence
  Description of Artificial Sequence: Synthetic oligonucleotide
cgagccgccgcaggaaguc

SEQ ID NO: 2187298 - RNA, 19 nt, Artificial Sequence
  Description of Artificial Sequence: Synthetic oligonucleotide
cgucuccccacucccgcuc

SEQ ID NO: 2187299 - RNA, 19 nt, Artificial Sequence
  Description of Artificial Sequence: Synthetic oligonucleotide
ccccacuguaacucguagu

SEQ ID NO: 2187300 - RNA, 19 nt, Artificial Sequence
  Description of Artificial Sequence: Synthetic oligonucleotide
caggcccgugguaggugua

SEQ ID NO: 2187301 - RNA, 19 nt, Artificial Sequence
  Description of Artificial Sequence: Synthetic oligonucleotide
gguucgcgggccccacugu

SEQ ID NO: 2187302 - RNA, 19 nt, Artificial Sequence
  Description of Artificial Sequence: Synthetic oligonucleotide
gggaucggugugggguauc

SEQ ID NO: 2187303 - RNA, 19 nt, Artificial Sequence
  Description of Artificial Sequence: Synthetic oligonucleotide
gccccucacuucggcgucc

SEQ ID NO: 2187304 - RNA, 19 nt, Artificial Sequence
  Description of Artificial Sequence: Synthetic oligonucleotide
cgugccgcccgugccgcgg

SEQ ID NO: 2187305 - RNA, 19 nt, Artificial Sequence
  Description of Artificial Sequence: Synthetic oligonucleotide
ccaccagcuuguacccgaa

SEQ ID NO: 2187306 - RNA, 19 nt, Artificial Sequence
  Description of Artificial Sequence: Synthetic oligonucleotide
ggccccacuguaacucgua

SEQ ID NO: 2187307 - RNA, 19 nt, Artificial Sequence
  Description of Artificial Sequence: Synthetic oligonucleotide
gccgccgcaggaaguccca

SEQ ID NO: 2187308 - RNA, 19 nt, Artificial Sequence
  Description of Artificial Sequence: Synthetic oligonucleotide
ccucggucucgguaauggu

SEQ ID NO: 2187309 - RNA, 19 nt, Artificial Sequence
  Description of Artificial Sequence: Synthetic oligonucleotide
gcgucuccccacucccgcu

SEQ ID NO: 2187310 - RNA, 19 nt, Artificial Sequence
  Description of Artificial Sequence: Synthetic oligonucleotide
cccgugguagguguacccu

SEQ ID NO: 2187311 - RNA, 19 nt, Artificial Sequence
  Description of Artificial Sequence: Synthetic oligonucleotide
gggagggcgcgggagcccu

SEQ ID NO: 2187312 - RNA, 19 nt, Artificial Sequence
  Description of Artificial Sequence: Synthetic oligonucleotide
ccgccgcaggaagucccag

SEQ ID NO: 2187313 - RNA, 19 nt, Artificial Sequence
  Description of Artificial Sequence: Synthetic oligonucleotide
gcccugggacgugccgccc

SEQ ID NO: 2187314 - RNA, 19 nt, Artificial Sequence
  Description of Artificial Sequence: Synthetic oligonucleotide
cgccccucacuucggcguc

SEQ ID NO: 2187315 - RNA, 19 nt, Artificial Sequence
  Description of Artificial Sequence: Synthetic oligonucleotide
ccgcucccuaucggccugc

SEQ ID NO: 2187316 - RNA, 19 nt, Artificial Sequence
  Description of Artificial Sequence: Synthetic oligonucleotide
cccuggucgccccucacuu

SEQ ID NO: 2187317 - RNA, 19 nt, Artificial Sequence
  Description of Artificial Sequence: Synthetic oligonucleotide
gcucccuaucggccugcgu

SEQ ID NO: 2187318 - RNA, 19 nt, Artificial Sequence
  Description of Artificial Sequence: Synthetic oligonucleotide
cugcaggucuggcccuauu

SEQ ID NO: 2187319 - RNA, 19 nt, Artificial Sequence
  Description of Artificial Sequence: Synthetic oligonucleotide
ccacgaacuugagaacuuu

SEQ ID NO: 2187320 - RNA, 19 nt, Artificial Sequence
  Description of Artificial Sequence: Synthetic oligonucleotide
cgcucccuaucggccugcg

SEQ ID NO: 2187321 - RNA, 19 nt, Artificial Sequence
  Description of Artificial Sequence: Synthetic oligonucleotide
gggccccacuguaacucgu

SEQ ID NO: 2187322 - RNA, 19 nt, Artificial Sequence
  Description of Artificial Sequence: Synthetic oligonucleotide
gccgcgggacgugcuggga

SEQ ID NO: 2187323 - RNA, 19 nt, Artificial Sequence
  Description of Artificial Sequence: Synthetic oligonucleotide
ccccuuuucccuguucguu

SEQ ID NO: 2187324 - RNA, 19 nt, Artificial Sequence
  Description of Artificial Sequence: Synthetic oligonucleotide
ccaccacgugcuucaggau

SEQ ID NO: 2187325 - RNA, 19 nt, Artificial Sequence
  Description of Artificial Sequence: Synthetic oligonucleotide
ccgagccgccgcaggaagu

SEQ ID NO: 2187326 - RNA, 19 nt, Artificial Sequence
  Description of Artificial Sequence: Synthetic oligonucleotide
ggccgcggccccucggcuu

SEQ ID NO: 2187327 - RNA, 19 nt, Artificial Sequence
  Description of Artificial Sequence: Synthetic oligonucleotide
cgguaaugguguugccuuu

SEQ ID NO: 2187328 - RNA, 19 nt, Artificial Sequence
  Description of Artificial Sequence: Synthetic oligonucleotide
cguaguccacgggaucggu

SEQ ID NO: 2187329 - RNA, 19 nt, Artificial Sequence
  Description of Artificial Sequence: Synthetic oligonucleotide
gcugcaggucuggcccuau

SEQ ID NO: 2187330 - RNA, 19 nt, Artificial Sequence
  Description of Artificial Sequence: Synthetic oligonucleotide
cccuaucggccugcgugcu

SEQ ID NO: 2187331 - RNA, 19 nt, Artificial Sequence
  Description of Artificial Sequence: Synthetic oligonucleotide
cgccugcgucuccccacuc

SEQ ID NO: 2187332 - RNA, 19 nt, Artificial Sequence
  Description of Artificial Sequence: Synthetic oligonucleotide
ccaaccccuuuucccuguu

SEQ ID NO: 2187333 - RNA, 19 nt, Artificial Sequence
  Description of Artificial Sequence: Synthetic oligonucleotide
cgcgggagcccugggacgu

SEQ ID NO: 2187334 - RNA, 19 nt, Artificial Sequence
  Description of Artificial Sequence: Synthetic oligonucleotide
cggugcgcuugauggggau

SEQ ID NO: 2187335 - RNA, 19 nt, Artificial Sequence
  Description of Artificial Sequence: Synthetic oligonucleotide
cggucucgguaaugguguu

SEQ ID NO: 2187336 - RNA, 19 nt, Artificial Sequence
  Description of Artificial Sequence: Synthetic oligonucleotide
cgcggccccucggcuucug

SEQ ID NO: 2187337 - RNA, 19 nt, Artificial Sequence
  Description of Artificial Sequence: Synthetic oligonucleotide
cgggaucggugugggguau

SEQ ID NO: 2187338 - RNA, 19 nt, Artificial Sequence
  Description of Artificial Sequence: Synthetic oligonucleotide
cgggacgugcugggagccu

SEQ ID NO: 2187339 - RNA, 19 nt, Artificial Sequence
  Description of Artificial Sequence: Synthetic oligonucleotide
cgcccgugccgcgggacgu

SEQ ID NO: 2187340 - RNA, 19 nt, Artificial Sequence
  Description of Artificial Sequence: Synthetic oligonucleotide
cggccagccgcagcagguu

SEQ ID NO: 2187341 - RNA, 19 nt, Artificial Sequence
  Description of Artificial Sequence: Synthetic oligonucleotide
ccgcggccccucggcuucu

SEQ ID NO: 2187342 - RNA, 19 nt, Artificial Sequence
  Description of Artificial Sequence: Synthetic oligonucleotide
acaguauugaccuuuaggg

SEQ ID NO: 2187343 - RNA, 19 nt, Artificial Sequence
  Description of Artificial Sequence: Synthetic oligonucleotide
gaagugagaaccuugaggc

SEQ ID NO: 2187344 - RNA, 19 nt, Artificial Sequence
  Description of Artificial Sequence: Synthetic oligonucleotide
aaauauaggucuccggagg

SEQ ID NO: 2187345 - RNA, 19 nt, Artificial Sequence
  Description of Artificial Sequence: Synthetic oligonucleotide
aauucuagggaguggaguc

SEQ ID NO: 2187346 - RNA, 19 nt, Artificial Sequence
  Description of Artificial Sequence: Synthetic oligonucleotide
aguaucauaggcauggugc

SEQ ID NO: 2187347 - RNA, 19 nt, Artificial Sequence
  Description of Artificial Sequence: Synthetic oligonucleotide
aaaauauaggucuccggag

SEQ ID NO: 2187348 - RNA, 19 nt, Artificial Sequence
  Description of Artificial Sequence: Synthetic oligonucleotide
auaggcauggugcuggugc

SEQ ID NO: 2187349 - RNA, 19 nt, Artificial Sequence
  Description of Artificial Sequence: Synthetic oligonucleotide
agaagugagaaccuugagg

SEQ ID NO: 2187350 - RNA, 19 nt, Artificial Sequence
  Description of Artificial Sequence: Synthetic oligonucleotide
uuuaggguaauucuaggga

SEQ ID NO: 2187351 - RNA, 19 nt, Artificial Sequence
  Description of Artificial Sequence: Synthetic oligonucleotide
aguugaagacuacauggcc

SEQ ID NO: 2187352 - RNA, 19 nt, Artificial Sequence
  Description of Artificial Sequence: Synthetic oligonucleotide
gaugggguuugucagaccg

SEQ ID NO: 2187353 - RNA, 19 nt, Artificial Sequence
  Description of Artificial Sequence: Synthetic oligonucleotide
gacaguauugaccuuuagg

SEQ ID NO: 2187354 - RNA, 19 nt, Artificial Sequence
  Description of Artificial Sequence: Synthetic oligonucleotide
uaacagagcaugaugagcu

SEQ ID NO: 2187355 - RNA, 19 nt, Artificial Sequence
  Description of Artificial Sequence: Synthetic oligonucleotide
acugagacaguauugaccu

SEQ ID NO: 2187356 - RNA, 19 nt, Artificial Sequence
  Description of Artificial Sequence: Synthetic oligonucleotide
aaaucauagaaaaggacug

SEQ ID NO: 2187357 - RNA, 19 nt, Artificial Sequence
  Description of Artificial Sequence: Synthetic oligonucleotide
uuguaacagagcaugauga

SEQ ID NO: 2187358 - RNA, 19 nt, Artificial Sequence
  Description of Artificial Sequence: Synthetic oligonucleotide
cuuggugaaaggaaguggg

SEQ ID NO: 2187359 - RNA, 19 nt, Artificial Sequence
  Description of Artificial Sequence: Synthetic oligonucleotide
uuaggguaauucuagggag

SEQ ID NO: 2187360 - RNA, 19 nt, Artificial Sequence
  Description of Artificial Sequence: Synthetic oligonucleotide
uggguuagggcacaaauga

SEQ ID NO: 2187361 - RNA, 19 nt, Artificial Sequence
  Description of Artificial Sequence: Synthetic oligonucleotide
auuucuucuccucauagcu

SEQ ID NO: 2187362 - RNA, 19 nt, Artificial Sequence
  Description of Artificial Sequence: Synthetic oligonucleotide
ucaaaucauagaaaaggac

SEQ ID NO: 2187363 - RNA, 19 nt, Artificial Sequence
  Description of Artificial Sequence: Synthetic oligonucleotide
gaagaagggaccuugguga

SEQ ID NO: 2187364 - RNA, 19 nt, Artificial Sequence
  Description of Artificial Sequence: Synthetic oligonucleotide
ugaaaauauaggucuccgg

SEQ ID NO: 2187365 - RNA, 19 nt, Artificial Sequence
  Description of Artificial Sequence: Synthetic oligonucleotide
cuuuaggguaauucuaggg

SEQ ID NO: 2187366 - RNA, 19 nt, Artificial Sequence
  Description of Artificial Sequence: Synthetic oligonucleotide
ugaagaagggaccuuggug

SEQ ID NO: 2187367 - RNA, 19 nt, Artificial Sequence
  Description of Artificial Sequence: Synthetic oligonucleotide
auuccaguaucccaguauc

SEQ ID NO: 2187368 - RNA, 19 nt, Artificial Sequence
  Description of Artificial Sequence: Synthetic oligonucleotide
aaaaggacugugugcuugg

SEQ ID NO: 2187369 - RNA, 19 nt, Artificial Sequence
  Description of Artificial Sequence: Synthetic oligonucleotide
agguuaagagcugaggagc

SEQ ID NO: 2187370 - RNA, 19 nt, Artificial Sequence
  Description of Artificial Sequence: Synthetic oligonucleotide
auccagugugcacaggucc

SEQ ID NO: 2187371 - RNA, 19 nt, Artificial Sequence
  Description of Artificial Sequence: Synthetic oligonucleotide
ggagaaagaagugagaacc

SEQ ID NO: 2187372 - RNA, 19 nt, Artificial Sequence
  Description of Artificial Sequence: Synthetic oligonucleotide
aauauaggucuccggagga

SEQ ID NO: 2187373 - RNA, 19 nt, Artificial Sequence
  Description of Artificial Sequence: Synthetic oligonucleotide
uugaaaauauaggucuccg

SEQ ID NO: 2187374 - RNA, 19 nt, Artificial Sequence
  Description of Artificial Sequence: Synthetic oligonucleotide
uagguuaagagcugaggag

SEQ ID NO: 2187375 - RNA, 19 nt, Artificial Sequence
  Description of Artificial Sequence: Synthetic oligonucleotide
aaaugaagaagggaccuug

SEQ ID NO: 2187376 - RNA, 19 nt, Artificial Sequence
  Description of Artificial Sequence: Synthetic oligonucleotide
aagacuacauggccuugac

SEQ ID NO: 2187377 - RNA, 19 nt, Artificial Sequence
  Description of Artificial Sequence: Synthetic oligonucleotide
aguauugaccuuuagggua

SEQ ID NO: 2187378 - RNA, 19 nt, Artificial Sequence
  Description of Artificial Sequence: Synthetic oligonucleotide
caguaucccaguaucauag

SEQ ID NO: 2187379 - RNA, 19 nt, Artificial Sequence
  Description of Artificial Sequence: Synthetic oligonucleotide
uaucccaguaucauaggca

SEQ ID NO: 2187380 - RNA, 19 nt, Artificial Sequence
  Description of Artificial Sequence: Synthetic oligonucleotide
agaaccuugaggcagcagu

SEQ ID NO: 2187381 - RNA, 19 nt, Artificial Sequence
  Description of Artificial Sequence: Synthetic oligonucleotide
uuugaaaauauaggucucc

SEQ ID NO: 2187382 - RNA, 19 nt, Artificial Sequence
  Description of Artificial Sequence: Synthetic oligonucleotide
gacuacauggccuugacua

SEQ ID NO: 2187383 - RNA, 19 nt, Artificial Sequence
  Description of Artificial Sequence: Synthetic oligonucleotide
aggagaaagaagugagaac

SEQ ID NO: 2187384 - RNA, 19 nt, Artificial Sequence
  Description of Artificial Sequence: Synthetic oligonucleotide
guuguaacagagcaugaug

SEQ ID NO: 2187385 - RNA, 19 nt, Artificial Sequence
  Description of Artificial Sequence: Synthetic oligonucleotide
cacaaaugaagaagggacc

SEQ ID NO: 2187386 - RNA, 19 nt, Artificial Sequence
  Description of Artificial Sequence: Synthetic oligonucleotide
aaggagaaagaagugagaa

SEQ ID NO: 2187387 - RNA, 19 nt, Artificial Sequence
  Description of Artificial Sequence: Synthetic oligonucleotide
aaggggcugacaaagcugg

SEQ ID NO: 2187388 - RNA, 19 nt, Artificial Sequence
  Description of Artificial Sequence: Synthetic oligonucleotide
ugaccuuuaggguaauucu

SEQ ID NO: 2187389 - RNA, 19 nt, Artificial Sequence
  Description of Artificial Sequence: Synthetic oligonucleotide
uauuucuucuccucauagc

SEQ ID NO: 2187390 - RNA, 19 nt, Artificial Sequence
  Description of Artificial Sequence: Synthetic oligonucleotide
agggaaaggagaaagaagu

SEQ ID NO: 2187391 - RNA, 19 nt, Artificial Sequence
  Description of Artificial Sequence: Synthetic oligonucleotide
caaaucauagaaaaggacu

SEQ ID NO: 2187392 - RNA, 19 nt, Artificial Sequence
  Description of Artificial Sequence: Synthetic oligonucleotide
aagaagugagaaccuugag

SEQ ID NO: 2187393 - RNA, 19 nt, Artificial Sequence
  Description of Artificial Sequence: Synthetic oligonucleotide
gagcugaggagccaagggg

SEQ ID NO: 2187394 - RNA, 19 nt, Artificial Sequence
  Description of Artificial Sequence: Synthetic oligonucleotide
aaagaagugagaaccuuga

SEQ ID NO: 2187395 - RNA, 19 nt, Artificial Sequence
  Description of Artificial Sequence: Synthetic oligonucleotide
agugagaaccuugaggcag

SEQ ID NO: 2187396 - RNA, 19 nt, Artificial Sequence
  Description of Artificial Sequence: Synthetic oligonucleotide
uuggugaaaggaagugggg

SEQ ID NO: 2187397 - RNA, 19 nt, Artificial Sequence
  Description of Artificial Sequence: Synthetic oligonucleotide
uuggguuagggcacaaaug

SEQ ID NO: 2187398 - RNA, 19 nt, Artificial Sequence
  Description of Artificial Sequence: Synthetic oligonucleotide
aaugaagaagggaccuugg

SEQ ID NO: 2187399 - RNA, 19 nt, Artificial Sequence
  Description of Artificial Sequence: Synthetic oligonucleotide
cuugacuagguuaagagcu

SEQ ID NO: 2187400 - RNA, 19 nt, Artificial Sequence
  Description of Artificial Sequence: Synthetic oligonucleotide
agguccuccauaugagagc

SEQ ID NO: 2187401 - RNA, 19 nt, Artificial Sequence
  Description of Artificial Sequence: Synthetic oligonucleotide
gaaagaagugagaaccuug

SEQ ID NO: 2187402 - RNA, 19 nt, Artificial Sequence
  Description of Artificial Sequence: Synthetic oligonucleotide
auaugagagcccguguagc

SEQ ID NO: 2187403 - RNA, 19 nt, Artificial Sequence
  Description of Artificial Sequence: Synthetic oligonucleotide
agagcugaggagccaaggg

SEQ ID NO: 2187404 - RNA, 19 nt, Artificial Sequence
  Description of Artificial Sequence: Synthetic oligonucleotide
accagcuguccccagggcc

SEQ ID NO: 2187405 - RNA, 19 nt, Artificial Sequence
  Description of Artificial Sequence: Synthetic oligonucleotide
aaucauagaaaaggacugu

SEQ ID NO: 2187406 - RNA, 19 nt, Artificial Sequence
  Description of Artificial Sequence: Synthetic oligonucleotide
uccuccauaugagagcccg

SEQ ID NO: 2187407 - RNA, 19 nt, Artificial Sequence
  Description of Artificial Sequence: Synthetic oligonucleotide
ugagagcccguguagcagg

SEQ ID NO: 2187408 - RNA, 19 nt, Artificial Sequence
  Description of Artificial Sequence: Synthetic oligonucleotide
caugaugagcugcaugcgg

SEQ ID NO: 2187409 - RNA, 19 nt, Artificial Sequence
  Description of Artificial Sequence: Synthetic oligonucleotide
aucauaggcauggugcugg

SEQ ID NO: 2187410 - RNA, 19 nt, Artificial Sequence
  Description of Artificial Sequence: Synthetic oligonucleotide
aaccuugaggcagcagugc

SEQ ID NO: 2187411 - RNA, 19 nt, Artificial Sequence
  Description of Artificial Sequence: Synthetic oligonucleotide
aagaccagcuguccccagg

SEQ ID NO: 2187412 - RNA, 19 nt, Artificial Sequence
  Description of Artificial Sequence: Synthetic oligonucleotide
gaagggaccuuggugaaag

SEQ ID NO: 2187413 - RNA, 19 nt, Artificial Sequence
  Description of Artificial Sequence: Synthetic oligonucleotide
aggguuguaacagagcaug

SEQ ID NO: 2187414 - RNA, 19 nt, Artificial Sequence
  Description of Artificial Sequence: Synthetic oligonucleotide
gaaguggggaguugaagac

SEQ ID NO: 2187415 - RNA, 19 nt, Artificial Sequence
  Description of Artificial Sequence: Synthetic oligonucleotide
agggcacaaaugaagaagg

SEQ ID NO: 2187416 - RNA, 19 nt, Artificial Sequence
  Description of Artificial Sequence: Synthetic oligonucleotide
acuagguuaagagcugagg

SEQ ID NO: 2187417 - RNA, 19 nt, Artificial Sequence
  Description of Artificial Sequence: Synthetic oligonucleotide
gaaaaggacugugugcuug

SEQ ID NO: 2187418 - RNA, 19 nt, Artificial Sequence
  Description of Artificial Sequence: Synthetic oligonucleotide
cuagguuaagagcugagga

SEQ ID NO: 2187419 - RNA, 19 nt, Artificial Sequence
  Description of Artificial Sequence: Synthetic oligonucleotide
aaaggaaguggggaguuga

SEQ ID NO: 2187420 - RNA, 19 nt, Artificial Sequence
  Description of Artificial Sequence: Synthetic oligonucleotide
ugugcuuggguuagggcac

SEQ ID NO: 2187421 - RNA, 19 nt, Artificial Sequence
  Description of Artificial Sequence: Synthetic oligonucleotide
caucuuugaaaauauaggu

SEQ ID NO: 2187422 - RNA, 19 nt, Artificial Sequence
  Description of Artificial Sequence: Synthetic oligonucleotide
agcagugcagaagaccagc

SEQ ID NO: 2187423 - RNA, 19 nt, Artificial Sequence
  Description of Artificial Sequence: Synthetic oligonucleotide
cauaugagagcccguguag

SEQ ID NO: 2187424 - RNA, 19 nt, Artificial Sequence
  Description of Artificial Sequence: Synthetic oligonucleotide
aucaaaucauagaaaagga

SEQ ID NO: 2187425 - RNA, 19 nt, Artificial Sequence
  Description of Artificial Sequence: Synthetic oligonucleotide
uugacuagguuaagagcug

SEQ ID NO: 2187426 - RNA, 19 nt, Artificial Sequence
  Description of Artificial Sequence: Synthetic oligonucleotide
acaaaugaagaagggaccu

SEQ ID NO: 2187427 - RNA, 19 nt, Artificial Sequence
  Description of Artificial Sequence: Synthetic oligonucleotide
acuacauggccuugacuag

SEQ ID NO: 2187428 - RNA, 19 nt, Artificial Sequence
  Description of Artificial Sequence: Synthetic oligonucleotide
uaugagagcccguguagca

SEQ ID NO: 2187429 - RNA, 19 nt, Artificial Sequence
  Description of Artificial Sequence: Synthetic oligonucleotide
agggaguggaguccagggc

SEQ ID NO: 2187430 - RNA, 19 nt, Artificial Sequence
  Description of Artificial Sequence: Synthetic oligonucleotide
uugaccuuuaggguaauuc

SEQ ID NO: 2187431 - RNA, 19 nt, Artificial Sequence
  Description of Artificial Sequence: Synthetic oligonucleotide
uauaggucuccggaggaag

SEQ ID NO: 2187432 - RNA, 19 nt, Artificial Sequence
  Description of Artificial Sequence: Synthetic oligonucleotide
guaucccaguaucauaggc

SEQ ID NO: 2187433 - RNA, 19 nt, Artificial Sequence
  Description of Artificial Sequence: Synthetic oligonucleotide
auucuagggaguggagucc

SEQ ID NO: 2187434 - RNA, 19 nt, Artificial Sequence
  Description of Artificial Sequence: Synthetic oligonucleotide
gaggcagcagugcagaaga

SEQ ID NO: 2187435 - RNA, 19 nt, Artificial Sequence
  Description of Artificial Sequence: Synthetic oligonucleotide
uaauucuagggaguggagu

SEQ ID NO: 2187436 - RNA, 19 nt, Artificial Sequence
  Description of Artificial Sequence: Synthetic oligonucleotide
aguaucccaguaucauagg

SEQ ID NO: 2187437 - RNA, 19 nt, Artificial Sequence
  Description of Artificial Sequence: Synthetic oligonucleotide
ggugaaaggaaguggggag

SEQ ID NO: 2187438 - RNA, 19 nt, Artificial Sequence
  Description of Artificial Sequence: Synthetic oligonucleotide
cagaagaccagcugucccc

SEQ ID NO: 2187439 - RNA, 19 nt, Artificial Sequence
  Description of Artificial Sequence: Synthetic oligonucleotide
ugggguuugucagaccgcg

SEQ ID NO: 2187440 - RNA, 19 nt, Artificial Sequence
  Description of Artificial Sequence: Synthetic oligonucleotide
aagagcugaggagccaagg

SEQ ID NO: 2187441 - RNA, 19 nt, Artificial Sequence
  Description of Artificial Sequence: Synthetic oligonucleotide
guaacagagcaugaugagc

SEQ ID NO: 2187442 - RNA, 19 nt, Artificial Sequence
  Description of Artificial Sequence: Synthetic oligonucleotide
aucauagaaaaggacugug

SEQ ID NO: 2187443 - RNA, 19 nt, Artificial Sequence
  Description of Artificial Sequence: Synthetic oligonucleotide
aacagagcaugaugagcug

SEQ ID NO: 2187444 - RNA, 19 nt, Artificial Sequence
  Description of Artificial Sequence: Synthetic oligonucleotide
uaggguaauucuagggagu

SEQ ID NO: 2187445 - RNA, 19 nt, Artificial Sequence
  Description of Artificial Sequence: Synthetic oligonucleotide
cagguccuccauaugagag

SEQ ID NO: 2187446 - RNA, 19 nt, Artificial Sequence
  Description of Artificial Sequence: Synthetic oligonucleotide
gugugcuuggguuagggca

SEQ ID NO: 2187447 - RNA, 19 nt, Artificial Sequence
  Description of Artificial Sequence: Synthetic oligonucleotide
agaccagcuguccccaggg

SEQ ID NO: 2187448 - RNA, 19 nt, Artificial Sequence
  Description of Artificial Sequence: Synthetic oligonucleotide
aaaggagaaagaagugaga

SEQ ID NO: 2187449 - RNA, 19 nt, Artificial Sequence
  Description of Artificial Sequence: Synthetic oligonucleotide
uggugaaaggaagugggga

SEQ ID NO: 2187450 - RNA, 19 nt, Artificial Sequence
  Description of Artificial Sequence: Synthetic oligonucleotide
aagugagaaccuugaggca

SEQ ID NO: 2187451 - RNA, 19 nt, Artificial Sequence
  Description of Artificial Sequence: Synthetic oligonucleotide
ugucagaccgcggacauuc

SEQ ID NO: 2187452 - RNA, 19 nt, Artificial Sequence
  Description of Artificial Sequence: Synthetic oligonucleotide
aucccaguaucauaggcau

SEQ ID NO: 2187453 - RNA, 19 nt, Artificial Sequence
  Description of Artificial Sequence: Synthetic oligonucleotide
augaugagcugcaugcggg

SEQ ID NO: 2187454 - RNA, 19 nt, Artificial Sequence
  Description of Artificial Sequence: Synthetic oligonucleotide
uugaagacuacauggccuu

SEQ ID NO: 2187455 - RNA, 19 nt, Artificial Sequence
  Description of Artificial Sequence: Synthetic oligonucleotide
uguauuucuucuccucaua

SEQ ID NO: 2187456 - RNA, 19 nt, Artificial Sequence
  Description of Artificial Sequence: Synthetic oligonucleotide
uccagggccgacaucaaau

SEQ ID NO: 2187457 - RNA, 19 nt, Artificial Sequence
  Description of Artificial Sequence: Synthetic oligonucleotide
accuuuaggguaauucuag

SEQ ID NO: 2187458 - RNA, 19 nt, Artificial Sequence
  Description of Artificial Sequence: Synthetic oligonucleotide
uuugucagaccgcggacau

SEQ ID NO: 2187459 - RNA, 19 nt, Artificial Sequence
  Description of Artificial Sequence: Synthetic oligonucleotide
gcacaaaugaagaagggac

SEQ ID NO: 2187460 - RNA, 19 nt, Artificial Sequence
  Description of Artificial Sequence: Synthetic oligonucleotide
uuagggcacaaaugaagaa

SEQ ID NO: 2187461 - RNA, 19 nt, Artificial Sequence
  Description of Artificial Sequence: Synthetic oligonucleotide
gguuagggcacaaaugaag

SEQ ID NO: 2187462 - RNA, 19 nt, Artificial Sequence
  Description of Artificial Sequence: Synthetic oligonucleotide
uuccaguaucccaguauca

SEQ ID NO: 2187463 - RNA, 19 nt, Artificial Sequence
  Description of Artificial Sequence: Synthetic oligonucleotide
aggaggauccagugugcac

SEQ ID NO: 2187464 - RNA, 19 nt, Artificial Sequence
  Description of Artificial Sequence: Synthetic oligonucleotide
guuagggcacaaaugaaga

SEQ ID NO: 2187465 - RNA, 19 nt, Artificial Sequence
  Description of Artificial Sequence: Synthetic oligonucleotide
aaggacugugugcuugggu

SEQ ID NO: 2187466 - RNA, 19 nt, Artificial Sequence
  Description of Artificial Sequence: Synthetic oligonucleotide
uaagagcugaggagccaag

SEQ ID NO: 2187467 - RNA, 19 nt, Artificial Sequence
  Description of Artificial Sequence: Synthetic oligonucleotide
cugacaaagcuggggaagg

SEQ ID NO: 2187468 - RNA, 19 nt, Artificial Sequence
  Description of Artificial Sequence: Synthetic oligonucleotide
acaaagcuggggaagggag

SEQ ID NO: 2187469 - RNA, 19 nt, Artificial Sequence
  Description of Artificial Sequence: Synthetic oligonucleotide
cacagguccuccauaugag

SEQ ID NO: 2187470 - RNA, 19 nt, Artificial Sequence
  Description of Artificial Sequence: Synthetic oligonucleotide
auaggucuccggaggaagc

SEQ ID NO: 2187471 - RNA, 19 nt, Artificial Sequence
  Description of Artificial Sequence: Synthetic oligonucleotide
gaguccagggccgacauca

SEQ ID NO: 2187472 - RNA, 19 nt, Artificial Sequence
  Description of Artificial Sequence: Synthetic oligonucleotide
ggaaguggggaguugaaga

SEQ ID NO: 2187473 - RNA, 19 nt, Artificial Sequence
  Description of Artificial Sequence: Synthetic oligonucleotide
gccuugacuagguuaagag

SEQ ID NO: 2187474 - RNA, 19 nt, Artificial Sequence
  Description of Artificial Sequence: Synthetic oligonucleotide
aagaagggaccuuggugaa

SEQ ID NO: 2187475 - RNA, 19 nt, Artificial Sequence
  Description of Artificial Sequence: Synthetic oligonucleotide
ugugugcuuggguuagggc

SEQ ID NO: 2187476 - RNA, 19 nt, Artificial Sequence
  Description of Artificial Sequence: Synthetic oligonucleotide
uuaagagcugaggagccaa

SEQ ID NO: 2187477 - RNA, 19 nt, Artificial Sequence
  Description of Artificial Sequence: Synthetic oligonucleotide
augaagaagggaccuuggu

SEQ ID NO: 2187478 - RNA, 19 nt, Artificial Sequence
  Description of Artificial Sequence: Synthetic oligonucleotide
uccagugugcacagguccu

SEQ ID NO: 2187479 - RNA, 19 nt, Artificial Sequence
  Description of Artificial Sequence: Synthetic oligonucleotide
caaggggcugacaaagcug

SEQ ID NO: 2187480 - RNA, 19 nt, Artificial Sequence
  Description of Artificial Sequence: Synthetic oligonucleotide
uacauggccuugacuaggu

SEQ ID NO: 2187481 - RNA, 19 nt, Artificial Sequence
  Description of Artificial Sequence: Synthetic oligonucleotide
aaaggacugugugcuuggg

SEQ ID NO: 2187482 - RNA, 19 nt, Artificial Sequence
  Description of Artificial Sequence: Synthetic oligonucleotide
uccauaugagagcccgugu

SEQ ID NO: 2187483 - RNA, 19 nt, Artificial Sequence
  Description of Artificial Sequence: Synthetic oligonucleotide
ugacaaagcuggggaaggg

SEQ ID NO: 2187484 - RNA, 19 nt, Artificial Sequence
  Description of Artificial Sequence: Synthetic oligonucleotide
cccaguaucauaggcaugg

SEQ ID NO: 2187485 - RNA, 19 nt, Artificial Sequence
  Description of Artificial Sequence: Synthetic oligonucleotide
uaggucuccggaggaagcg

SEQ ID NO: 2187486 - RNA, 19 nt, Artificial Sequence
  Description of Artificial Sequence: Synthetic oligonucleotide
cuacauggccuugacuagg

SEQ ID NO: 2187487 - RNA, 19 nt, Artificial Sequence
  Description of Artificial Sequence: Synthetic oligonucleotide
agccaaggggcugacaaag

SEQ ID NO: 2187488 - RNA, 19 nt, Artificial Sequence
  Description of Artificial Sequence: Synthetic oligonucleotide
gaggauccagugugcacag

SEQ ID NO: 2187489 - RNA, 19 nt, Artificial Sequence
  Description of Artificial Sequence: Synthetic oligonucleotide
aagggaccuuggugaaagg

SEQ ID NO: 2187490 - RNA, 19 nt, Artificial Sequence
  Description of Artificial Sequence: Synthetic oligonucleotide
gaaccuugaggcagcagug

SEQ ID NO: 2187491 - RNA, 19 nt, Artificial Sequence
  Description of Artificial Sequence: Synthetic oligonucleotide
uuucuucuccucauagcuu

SEQ ID NO: 2187492 - RNA, 19 nt, Artificial Sequence
  Description of Artificial Sequence: Synthetic oligonucleotide
ggacauuccaguaucccag

SEQ ID NO: 2187493 - RNA, 19 nt, Artificial Sequence
  Description of Artificial Sequence: Synthetic oligonucleotide
ugguguauuucuucuccuc

SEQ ID NO: 2187494 - RNA, 19 nt, Artificial Sequence
  Description of Artificial Sequence: Synthetic oligonucleotide
aaguggggaguugaagacu

SEQ ID NO: 2187495 - RNA, 19 nt, Artificial Sequence
  Description of Artificial Sequence: Synthetic oligonucleotide
ucagaccgcggacauucca

SEQ ID NO: 2187496 - RNA, 19 nt, Artificial Sequence
  Description of Artificial Sequence: Synthetic oligonucleotide
cagaccgcggacauuccag

SEQ ID NO: 2187497 - RNA, 19 nt, Artificial Sequence
  Description of Artificial Sequence: Synthetic oligonucleotide
gguaauucuagggagugga

SEQ ID NO: 2187498 - RNA, 19 nt, Artificial Sequence
  Description of Artificial Sequence: Synthetic oligonucleotide
uccaguaucccaguaucau

SEQ ID NO: 2187499 - RNA, 19 nt, Artificial Sequence
  Description of Artificial Sequence: Synthetic oligonucleotide
ggaaaggagaaagaaguga

SEQ ID NO: 2187500 - RNA, 19 nt, Artificial Sequence
  Description of Artificial Sequence: Synthetic oligonucleotide
aggguaauucuagggagug

SEQ ID NO: 2187501 - RNA, 19 nt, Artificial Sequence
  Description of Artificial Sequence: Synthetic oligonucleotide
uaucauaggcauggugcug

SEQ ID NO: 2187502 - RNA, 19 nt, Artificial Sequence
  Description of Artificial Sequence: Synthetic oligonucleotide
gccaggaggauccagugug

SEQ ID NO: 2187503 - RNA, 19 nt, Artificial Sequence
  Description of Artificial Sequence: Synthetic oligonucleotide
ugacuagguuaagagcuga

SEQ ID NO: 2187504 - RNA, 19 nt, Artificial Sequence
  Description of Artificial Sequence: Synthetic oligonucleotide
ccuugacuagguuaagagc

SEQ ID NO: 2187505 - RNA, 19 nt, Artificial Sequence
  Description of Artificial Sequence: Synthetic oligonucleotide
ugcagaagaccagcugucc

SEQ ID NO: 2187506 - RNA, 19 nt, Artificial Sequence
  Description of Artificial Sequence: Synthetic oligonucleotide
augagcugcaugcgggugu

SEQ ID NO: 2187507 - RNA, 19 nt, Artificial Sequence
  Description of Artificial Sequence: Synthetic oligonucleotide
gacugugugcuuggguuag

SEQ ID NO: 2187508 - RNA, 19 nt, Artificial Sequence
  Description of Artificial Sequence: Synthetic oligonucleotide
agacaguauugaccuuuag

SEQ ID NO: 2187509 - RNA, 19 nt, Artificial Sequence
  Description of Artificial Sequence: Synthetic oligonucleotide
ugaugagcugcaugcgggu

SEQ ID NO: 2187510 - RNA, 19 nt, Artificial Sequence
  Description of Artificial Sequence: Synthetic oligonucleotide
acagguccuccauaugaga

SEQ ID NO: 2187511 - RNA, 19 nt, Artificial Sequence
  Description of Artificial Sequence: Synthetic oligonucleotide
aggcggaugggguuuguca

SEQ ID NO: 2187512 - RNA, 19 nt, Artificial Sequence
  Description of Artificial Sequence: Synthetic oligonucleotide
guaauucuagggaguggag

SEQ ID NO: 2187513 - RNA, 19 nt, Artificial Sequence
  Description of Artificial Sequence: Synthetic oligonucleotide
accuugaggcagcagugca

SEQ ID NO: 2187514 - RNA, 19 nt, Artificial Sequence
  Description of Artificial Sequence: Synthetic oligonucleotide
gacuagguuaagagcugag

SEQ ID NO: 2187515 - RNA, 19 nt, Artificial Sequence
  Description of Artificial Sequence: Synthetic oligonucleotide
uucuagggaguggagucca

SEQ ID NO: 2187516 - RNA, 19 nt, Artificial Sequence
  Description of Artificial Sequence: Synthetic oligonucleotide
gaagggagggaaaggagaa

SEQ ID NO: 2187517 - RNA, 19 nt, Artificial Sequence
  Description of Artificial Sequence: Synthetic oligonucleotide
uggggaguugaagacuaca

SEQ ID NO: 2187518 - RNA, 19 nt, Artificial Sequence
  Description of Artificial Sequence: Synthetic oligonucleotide
accuuggugaaaggaagug

SEQ ID NO: 2187519 - RNA, 19 nt, Artificial Sequence
  Description of Artificial Sequence: Synthetic oligonucleotide
ucuagggaguggaguccag

SEQ ID NO: 2187520 - RNA, 19 nt, Artificial Sequence
  Description of Artificial Sequence: Synthetic oligonucleotide
aggaaguggggaguugaag

SEQ ID NO: 2187521 - RNA, 19 nt, Artificial Sequence
  Description of Artificial Sequence: Synthetic oligonucleotide
cauggugcuggugcugugg

SEQ ID NO: 2187522 - RNA, 19 nt, Artificial Sequence
  Description of Artificial Sequence: Synthetic oligonucleotide
ugugcacagguccuccaua

SEQ ID NO: 2187523 - RNA, 19 nt, Artificial Sequence
  Description of Artificial Sequence: Synthetic oligonucleotide
agaaagaagugagaaccuu

SEQ ID NO: 2187524 - RNA, 19 nt, Artificial Sequence
  Description of Artificial Sequence: Synthetic oligonucleotide
gaagacuacauggccuuga

SEQ ID NO: 2187525 - RNA, 19 nt, Artificial Sequence
  Description of Artificial Sequence: Synthetic oligonucleotide
ugcacagguccuccauaug

SEQ ID NO: 2187526 - RNA, 19 nt, Artificial Sequence
  Description of Artificial Sequence: Synthetic oligonucleotide
ccuuuaggguaauucuagg

SEQ ID NO: 2187527 - RNA, 19 nt, Artificial Sequence
  Description of Artificial Sequence: Synthetic oligonucleotide
cuccauaugagagcccgug

SEQ ID NO: 2187528 - RNA, 19 nt, Artificial Sequence
  Description of Artificial Sequence: Synthetic oligonucleotide
guaucauaggcauggugcu

SEQ ID NO: 2187529 - RNA, 19 nt, Artificial Sequence
  Description of Artificial Sequence: Synthetic oligonucleotide
ggcggaugggguuugucag

SEQ ID NO: 2187530 - RNA, 19 nt, Artificial Sequence
  Description of Artificial Sequence: Synthetic oligonucleotide
guugaagacuacauggccu

SEQ ID NO: 2187531 - RNA, 19 nt, Artificial Sequence
  Description of Artificial Sequence: Synthetic oligonucleotide
agacuacauggccuugacu

SEQ ID NO: 2187532 - RNA, 19 nt, Artificial Sequence
  Description of Artificial Sequence: Synthetic oligonucleotide
ggaccuuggugaaaggaag

SEQ ID NO: 2187533 - RNA, 19 nt, Artificial Sequence
  Description of Artificial Sequence: Synthetic oligonucleotide
gguccuccauaugagagcc

SEQ ID NO: 2187534 - RNA, 19 nt, Artificial Sequence
  Description of Artificial Sequence: Synthetic oligonucleotide
augagagcccguguagcag

SEQ ID NO: 2187535 - RNA, 19 nt, Artificial Sequence
  Description of Artificial Sequence: Synthetic oligonucleotide
guagcaggggccuacuugu

SEQ ID NO: 2187536 - RNA, 19 nt, Artificial Sequence
  Description of Artificial Sequence: Synthetic oligonucleotide
ccgacaucaaaucauagaa

SEQ ID NO: 2187537 - RNA, 19 nt, Artificial Sequence
  Description of Artificial Sequence: Synthetic oligonucleotide
gaaaggaaguggggaguug

SEQ ID NO: 2187538 - RNA, 19 nt, Artificial Sequence
  Description of Artificial Sequence: Synthetic oligonucleotide
ugaggagccaaggggcuga

SEQ ID NO: 2187539 - RNA, 19 nt, Artificial Sequence
  Description of Artificial Sequence: Synthetic oligonucleotide
ucccaguaucauaggcaug

SEQ ID NO: 2187540 - RNA, 19 nt, Artificial Sequence
  Description of Artificial Sequence: Synthetic oligonucleotide
uaggcauggugcuggugcu

SEQ ID NO: 2187541 - RNA, 19 nt, Artificial Sequence
  Description of Artificial Sequence: Synthetic oligonucleotide
auggccuugacuagguuaa

SEQ ID NO: 2187542 - RNA, 19 nt, Artificial Sequence
  Description of Artificial Sequence: Synthetic oligonucleotide
cugugugcuuggguuaggg

SEQ ID NO: 2187543 - RNA, 19 nt, Artificial Sequence
  Description of Artificial Sequence: Synthetic oligonucleotide
gaugagcugcaugcgggug

SEQ ID NO: 2187544 - RNA, 19 nt, Artificial Sequence
  Description of Artificial Sequence: Synthetic oligonucleotide
gguuaagagcugaggagcc

SEQ ID NO: 2187545 - RNA, 19 nt, Artificial Sequence
  Description of Artificial Sequence: Synthetic oligonucleotide
gacaaagcuggggaaggga

SEQ ID NO: 2187546 - RNA, 19 nt, Artificial Sequence
  Description of Artificial Sequence: Synthetic oligonucleotide
augggguuugucagaccgc

SEQ ID NO: 2187547 - RNA, 19 nt, Artificial Sequence
  Description of Artificial Sequence: Synthetic oligonucleotide
cauggccuugacuagguua

SEQ ID NO: 2187548 - RNA, 19 nt, Artificial Sequence
  Description of Artificial Sequence: Synthetic oligonucleotide
cuggggaagggagggaaag

SEQ ID NO: 2187549 - RNA, 19 nt, Artificial Sequence
  Description of Artificial Sequence: Synthetic oligonucleotide
guauugaccuuuaggguaa

SEQ ID NO: 2187550 - RNA, 19 nt, Artificial Sequence
  Description of Artificial Sequence: Synthetic oligonucleotide
ugaagacuacauggccuug

SEQ ID NO: 2187551 - RNA, 19 nt, Artificial Sequence
  Description of Artificial Sequence: Synthetic oligonucleotide
gcacagguccuccauauga

SEQ ID NO: 2187552 - RNA, 19 nt, Artificial Sequence
  Description of Artificial Sequence: Synthetic oligonucleotide
accgcggacauuccaguau

SEQ ID NO: 2187553 - RNA, 19 nt, Artificial Sequence
  Description of Artificial Sequence: Synthetic oligonucleotide
gcugacaaagcuggggaag

SEQ ID NO: 2187554 - RNA, 19 nt, Artificial Sequence
  Description of Artificial Sequence: Synthetic oligonucleotide
gcagaagaccagcuguccc

SEQ ID NO: 2187555 - RNA, 19 nt, Artificial Sequence
  Description of Artificial Sequence: Synthetic oligonucleotide
ugccaucuuugaaaauaua

SEQ ID NO: 2187556 - RNA, 19 nt, Artificial Sequence
  Description of Artificial Sequence: Synthetic oligonucleotide
ggagccaaggggcugacaa

SEQ ID NO: 2187557 - RNA, 19 nt, Artificial Sequence
  Description of Artificial Sequence: Synthetic oligonucleotide
guuugucagaccgcggaca

SEQ ID NO: 2187558 - RNA, 19 nt, Artificial Sequence
  Description of Artificial Sequence: Synthetic oligonucleotide
gaccuuuaggguaauucua

SEQ ID NO: 2187559 - RNA, 19 nt, Artificial Sequence
  Description of Artificial Sequence: Synthetic oligonucleotide
uggaguccagggccgacau

SEQ ID NO: 2187560 - RNA, 19 nt, Artificial Sequence
  Description of Artificial Sequence: Synthetic oligonucleotide
agcccguguagcaggggcc

SEQ ID NO: 2187561 - RNA, 19 nt, Artificial Sequence
  Description of Artificial Sequence: Synthetic oligonucleotide
ccuuggugaaaggaagugg

SEQ ID NO: 2187562 - RNA, 19 nt, Artificial Sequence
  Description of Artificial Sequence: Synthetic oligonucleotide
agaccgcggacauuccagu

SEQ ID NO: 2187563 - RNA, 19 nt, Artificial Sequence
  Description of Artificial Sequence: Synthetic oligonucleotide
agaagaccagcugucccca

SEQ ID NO: 2187564 - RNA, 19 nt, Artificial Sequence
  Description of Artificial Sequence: Synthetic oligonucleotide
cuugaggcagcagugcaga

SEQ ID NO: 2187565 - RNA, 19 nt, Artificial Sequence
  Description of Artificial Sequence: Synthetic oligonucleotide
ggaggauccagugugcaca

SEQ ID NO: 2187566 - RNA, 19 nt, Artificial Sequence
  Description of Artificial Sequence: Synthetic oligonucleotide
agggaccuuggugaaagga

SEQ ID NO: 2187567 - RNA, 19 nt, Artificial Sequence
  Description of Artificial Sequence: Synthetic oligonucleotide
ggcacaaaugaagaaggga

SEQ ID NO: 2187568 - RNA, 19 nt, Artificial Sequence
  Description of Artificial Sequence: Synthetic oligonucleotide
aguggggaguugaagacua

SEQ ID NO: 2187569 - RNA, 19 nt, Artificial Sequence
  Description of Artificial Sequence: Synthetic oligonucleotide
gaagaccagcuguccccag

SEQ ID NO: 2187570 - RNA, 19 nt, Artificial Sequence
  Description of Artificial Sequence: Synthetic oligonucleotide
gcagcagugcagaagacca

SEQ ID NO: 2187571 - RNA, 19 nt, Artificial Sequence
  Description of Artificial Sequence: Synthetic oligonucleotide
gugagaaccuugaggcagc

SEQ ID NO: 2187572 - RNA, 19 nt, Artificial Sequence
  Description of Artificial Sequence: Synthetic oligonucleotide
ggaagggagggaaaggaga

SEQ ID NO: 2187573 - RNA, 19 nt, Artificial Sequence
  Description of Artificial Sequence: Synthetic oligonucleotide
gagagcccguguagcaggg

SEQ ID NO: 2187574 - RNA, 19 nt, Artificial Sequence
  Description of Artificial Sequence: Synthetic oligonucleotide
gauccagugugcacagguc

SEQ ID NO: 2187575 - RNA, 19 nt, Artificial Sequence
  Description of Artificial Sequence: Synthetic oligonucleotide
cuuggguuagggcacaaau

SEQ ID NO: 2187576 - RNA, 19 nt, Artificial Sequence
  Description of Artificial Sequence: Synthetic oligonucleotide
caguauugaccuuuagggu

SEQ ID NO: 2187577 - RNA, 19 nt, Artificial Sequence
  Description of Artificial Sequence: Synthetic oligonucleotide
gagaaagaagugagaaccu

SEQ ID NO: 2187578 - RNA, 19 nt, Artificial Sequence
  Description of Artificial Sequence: Synthetic oligonucleotide
aggucuccggaggaagcgg

SEQ ID NO: 2187579 - RNA, 19 nt, Artificial Sequence
  Description of Artificial Sequence: Synthetic oligonucleotide
ucuccggaggaagcggcug

SEQ ID NO: 2187580 - RNA, 19 nt, Artificial Sequence
  Description of Artificial Sequence: Synthetic oligonucleotide
gggaaaggagaaagaagug

SEQ ID NO: 2187581 - RNA, 19 nt, Artificial Sequence
  Description of Artificial Sequence: Synthetic oligonucleotide
cagcagugcagaagaccag

SEQ ID NO: 2187582 - RNA, 19 nt, Artificial Sequence
  Description of Artificial Sequence: Synthetic oligonucleotide
ucauaggcauggugcuggu

SEQ ID NO: 2187583 - RNA, 19 nt, Artificial Sequence
  Description of Artificial Sequence: Synthetic oligonucleotide
ggguuugucagaccgcgga

SEQ ID NO: 2187584 - RNA, 19 nt, Artificial Sequence
  Description of Artificial Sequence: Synthetic oligonucleotide
agggccgacaucaaaucau

SEQ ID NO: 2187585 - RNA, 19 nt, Artificial Sequence
  Description of Artificial Sequence: Synthetic oligonucleotide
ggggcugacaaagcugggg

SEQ ID NO: 2187586 - RNA, 19 nt, Artificial Sequence
  Description of Artificial Sequence: Synthetic oligonucleotide
cccagggccaggaggaucc

SEQ ID NO: 2187587 - RNA, 19 nt, Artificial Sequence
  Description of Artificial Sequence: Synthetic oligonucleotide
ugagaaccuugaggcagca

SEQ ID NO: 2187588 - RNA, 19 nt, Artificial Sequence
  Description of Artificial Sequence: Synthetic oligonucleotide
ggcagcagugcagaagacc

SEQ ID NO: 2187589 - RNA, 19 nt, Artificial Sequence
  Description of Artificial Sequence: Synthetic oligonucleotide
acauuccaguaucccagua

SEQ ID NO: 2187590 - RNA, 19 nt, Artificial Sequence
  Description of Artificial Sequence: Synthetic oligonucleotide
gggcacaaaugaagaaggg

SEQ ID NO: 2187591 - RNA, 19 nt, Artificial Sequence
  Description of Artificial Sequence: Synthetic oligonucleotide
aaggaaguggggaguugaa

SEQ ID NO: 2187592 - RNA, 19 nt, Artificial Sequence
  Description of Artificial Sequence: Synthetic oligonucleotide
auauaggucuccggaggaa

SEQ ID NO: 2187593 - RNA, 19 nt, Artificial Sequence
  Description of Artificial Sequence: Synthetic oligonucleotide
gggcugacaaagcugggga

SEQ ID NO: 2187594 - RNA, 19 nt, Artificial Sequence
  Description of Artificial Sequence: Synthetic oligonucleotide
guuaagagcugaggagcca

SEQ ID NO: 2187595 - RNA, 19 nt, Artificial Sequence
  Description of Artificial Sequence: Synthetic oligonucleotide
gguuugucagaccgcggac

SEQ ID NO: 2187596 - RNA, 19 nt, Artificial Sequence
  Description of Artificial Sequence: Synthetic oligonucleotide
ggguaauucuagggagugg

SEQ ID NO: 2187597 - RNA, 19 nt, Artificial Sequence
  Description of Artificial Sequence: Synthetic oligonucleotide
ugagcugcaugcggguguc

SEQ ID NO: 2187598 - RNA, 19 nt, Artificial Sequence
  Description of Artificial Sequence: Synthetic oligonucleotide
gagaaccuugaggcagcag

SEQ ID NO: 2187599 - RNA, 19 nt, Artificial Sequence
  Description of Artificial Sequence: Synthetic oligonucleotide
gacauuccaguaucccagu

SEQ ID NO: 2187600 - RNA, 19 nt, Artificial Sequence
  Description of Artificial Sequence: Synthetic oligonucleotide
gaccagcuguccccagggc

SEQ ID NO: 2187601 - RNA, 19 nt, Artificial Sequence
  Description of Artificial Sequence: Synthetic oligonucleotide
cagugugcacagguccucc

SEQ ID NO: 2187602 - RNA, 19 nt, Artificial Sequence
  Description of Artificial Sequence: Synthetic oligonucleotide
ccuugaggcagcagugcag

SEQ ID NO: 2187603 - RNA, 19 nt, Artificial Sequence
  Description of Artificial Sequence: Synthetic oligonucleotide
acugugugcuuggguuagg

SEQ ID NO: 2187604 - RNA, 19 nt, Artificial Sequence
  Description of Artificial Sequence: Synthetic oligonucleotide
ggauccagugugcacaggu

SEQ ID NO: 2187605 - RNA, 19 nt, Artificial Sequence
  Description of Artificial Sequence: Synthetic oligonucleotide
gugcagaagaccagcuguc

SEQ ID NO: 2187606 - RNA, 19 nt, Artificial Sequence
  Description of Artificial Sequence: Synthetic oligonucleotide
cauuccaguaucccaguau

SEQ ID NO: 2187607 - RNA, 19 nt, Artificial Sequence
  Description of Artificial Sequence: Synthetic oligonucleotide
agggccaggaggauccagu

SEQ ID NO: 2187608 - RNA, 19 nt, Artificial Sequence
  Description of Artificial Sequence: Synthetic oligonucleotide
gagacaguauugaccuuua

SEQ ID NO: 2187609 - RNA, 19 nt, Artificial Sequence
  Description of Artificial Sequence: Synthetic oligonucleotide
gagccaaggggcugacaaa

SEQ ID NO: 2187610 - RNA, 19 nt, Artificial Sequence
  Description of Artificial Sequence: Synthetic oligonucleotide
gugaaaggaaguggggagu

SEQ ID NO: 2187611 - RNA, 19 nt, Artificial Sequence
  Description of Artificial Sequence: Synthetic oligonucleotide
uggccuugacuagguuaag

SEQ ID NO: 2187612 - RNA, 19 nt, Artificial Sequence
  Description of Artificial Sequence: Synthetic oligonucleotide
gaccuuggugaaaggaagu

SEQ ID NO: 2187613 - RNA, 19 nt, Artificial Sequence
  Description of Artificial Sequence: Synthetic oligonucleotide
ccaggaggauccagugugc

SEQ ID NO: 2187614 - RNA, 19 nt, Artificial Sequence
  Description of Artificial Sequence: Synthetic oligonucleotide
gggccaggaggauccagug

SEQ ID NO: 2187615 - RNA, 19 nt, Artificial Sequence
  Description of Artificial Sequence: Synthetic oligonucleotide
cauaggcauggugcuggug

SEQ ID NO: 2187616 - RNA, 19 nt, Artificial Sequence
  Description of Artificial Sequence: Synthetic oligonucleotide
aggauccagugugcacagg

SEQ ID NO: 2187617 - RNA, 19 nt, Artificial Sequence
  Description of Artificial Sequence: Synthetic oligonucleotide
gggaccuuggugaaaggaa

SEQ ID NO: 2187618 - RNA, 19 nt, Artificial Sequence
  Description of Artificial Sequence: Synthetic oligonucleotide
agagcccguguagcagggg

SEQ ID NO: 2187619 - RNA, 19 nt, Artificial Sequence
  Description of Artificial Sequence: Synthetic oligonucleotide
uauugaccuuuaggguaau

SEQ ID NO: 2187620 - RNA, 19 nt, Artificial Sequence
  Description of Artificial Sequence: Synthetic oligonucleotide
aggcagcagugcagaagac

SEQ ID NO: 2187621 - RNA, 19 nt, Artificial Sequence
  Description of Artificial Sequence: Synthetic oligonucleotide
agaagggaccuuggugaaa

SEQ ID NO: 2187622 - RNA, 19 nt, Artificial Sequence
  Description of Artificial Sequence: Synthetic oligonucleotide
gcggacauuccaguauccc

SEQ ID NO: 2187623 - RNA, 19 nt, Artificial Sequence
  Description of Artificial Sequence: Synthetic oligonucleotide
ggccgacaucaaaucauag

SEQ ID NO: 2187624 - RNA, 19 nt, Artificial Sequence
  Description of Artificial Sequence: Synthetic oligonucleotide
uccggaggaagcggcuggu

SEQ ID NO: 2187625 - RNA, 19 nt, Artificial Sequence
  Description of Artificial Sequence: Synthetic oligonucleotide
ccagggccgacaucaaauc

SEQ ID NO: 2187626 - RNA, 19 nt, Artificial Sequence
  Description of Artificial Sequence: Synthetic oligonucleotide
gugcacagguccuccauau

SEQ ID NO: 2187627 - RNA, 19 nt, Artificial Sequence
  Description of Artificial Sequence: Synthetic oligonucleotide
ggucuccggaggaagcggc

SEQ ID NO: 2187628 - RNA, 19 nt, Artificial Sequence
  Description of Artificial Sequence: Synthetic oligonucleotide
gaccgcggacauuccagua

SEQ ID NO: 2187629 - RNA, 19 nt, Artificial Sequence
  Description of Artificial Sequence: Synthetic oligonucleotide
acauggccuugacuagguu

SEQ ID NO: 2187630 - RNA, 19 nt, Artificial Sequence
  Description of Artificial Sequence: Synthetic oligonucleotide
aggggcugacaaagcuggg

SEQ ID NO: 2187631 - RNA, 19 nt, Artificial Sequence
  Description of Artificial Sequence: Synthetic oligonucleotide
caggaggauccagugugca

SEQ ID NO: 2187632 - RNA, 19 nt, Artificial Sequence
  Description of Artificial Sequence: Synthetic oligonucleotide
ccauaugagagcccgugua

SEQ ID NO: 2187633 - RNA, 19 nt, Artificial Sequence
  Description of Artificial Sequence: Synthetic oligonucleotide
auugaccuuuaggguaauu

SEQ ID NO: 2187634 - RNA, 19 nt, Artificial Sequence
  Description of Artificial Sequence: Synthetic oligonucleotide
ccagcuguccccagggcca

SEQ ID NO: 2187635 - RNA, 19 nt, Artificial Sequence
  Description of Artificial Sequence: Synthetic oligonucleotide
ggcugacaaagcuggggaa

SEQ ID NO: 2187636 - RNA, 19 nt, Artificial Sequence
  Description of Artificial Sequence: Synthetic oligonucleotide
guggaguccagggccgaca

SEQ ID NO: 2187637 - RNA, 19 nt, Artificial Sequence
  Description of Artificial Sequence: Synthetic oligonucleotide
ggacugugugcuuggguua

SEQ ID NO: 2187638 - RNA, 19 nt, Artificial Sequence
  Description of Artificial Sequence: Synthetic oligonucleotide
gguuguaacagagcaugau

SEQ ID NO: 2187639 - RNA, 19 nt, Artificial Sequence
  Description of Artificial Sequence: Synthetic oligonucleotide
agcaggcggaugggguuug

SEQ ID NO: 2187640 - RNA, 19 nt, Artificial Sequence
  Description of Artificial Sequence: Synthetic oligonucleotide
cuguccccagggccaggag

SEQ ID NO: 2187641 - RNA, 19 nt, Artificial Sequence
  Description of Artificial Sequence: Synthetic oligonucleotide
ggccuugacuagguuaaga

SEQ ID NO: 2187642 - RNA, 19 nt, Artificial Sequence
  Description of Artificial Sequence: Synthetic oligonucleotide
gucagaccgcggacauucc

SEQ ID NO: 2187643 - RNA, 19 nt, Artificial Sequence
  Description of Artificial Sequence: Synthetic oligonucleotide
cggacauuccaguauccca

SEQ ID NO: 2187644 - RNA, 19 nt, Artificial Sequence
  Description of Artificial Sequence: Synthetic oligonucleotide
cgacaucaaaucauagaaa

SEQ ID NO: 2187645 - RNA, 19 nt, Artificial Sequence
  Description of Artificial Sequence: Synthetic oligonucleotide
gggguuugucagaccgcgg

SEQ ID NO: 2187646 - RNA, 19 nt, Artificial Sequence
  Description of Artificial Sequence: Synthetic oligonucleotide
guccagggccgacaucaaa

SEQ ID NO: 2187647 - RNA, 19 nt, Artificial Sequence
  Description of Artificial Sequence: Synthetic oligonucleotide
ccgcggacauuccaguauc

SEQ ID NO: 2187648 - RNA, 19 nt, Artificial Sequence
  Description of Artificial Sequence: Synthetic oligonucleotide
ccaguaucccaguaucaua

SEQ ID NO: 2187649 - RNA, 19 nt, Artificial Sequence
  Description of Artificial Sequence: Synthetic oligonucleotide
cagggccaggaggauccag

SEQ ID NO: 2187650 - RNA, 19 nt, Artificial Sequence
  Description of Artificial Sequence: Synthetic oligonucleotide
caggguuguaacagagcau

SEQ ID NO: 2187651 - RNA, 19 nt, Artificial Sequence
  Description of Artificial Sequence: Synthetic oligonucleotide
guccuccauaugagagccc

SEQ ID NO: 2187652 - RNA, 19 nt, Artificial Sequence
  Description of Artificial Sequence: Synthetic oligonucleotide
guggggaguugaagacuac

SEQ ID NO: 2187653 - RNA, 19 nt, Artificial Sequence
  Description of Artificial Sequence: Synthetic oligonucleotide
ggguuguaacagagcauga

SEQ ID NO: 2187654 - RNA, 19 nt, Artificial Sequence
  Description of Artificial Sequence: Synthetic oligonucleotide
gcggaugggguuugucaga

SEQ ID NO: 2187655 - RNA, 19 nt, Artificial Sequence
  Description of Artificial Sequence: Synthetic oligonucleotide
uugucagaccgcggacauu

SEQ ID NO: 2187656 - RNA, 19 nt, Artificial Sequence
  Description of Artificial Sequence: Synthetic oligonucleotide
gaguggaguccagggccga

SEQ ID NO: 2187657 - RNA, 19 nt, Artificial Sequence
  Description of Artificial Sequence: Synthetic oligonucleotide
gccaaggggcugacaaagc

SEQ ID NO: 2187658 - RNA, 19 nt, Artificial Sequence
  Description of Artificial Sequence: Synthetic oligonucleotide
cagcuguccccagggccag

SEQ ID NO: 2187659 - RNA, 19 nt, Artificial Sequence
  Description of Artificial Sequence: Synthetic oligonucleotide
ggguuagggcacaaaugaa

SEQ ID NO: 2187660 - RNA, 19 nt, Artificial Sequence
  Description of Artificial Sequence: Synthetic oligonucleotide
gaggagccaaggggcugac

SEQ ID NO: 2187661 - RNA, 19 nt, Artificial Sequence
  Description of Artificial Sequence: Synthetic oligonucleotide
ggggaguugaagacuacau

SEQ ID NO: 2187662 - RNA, 19 nt, Artificial Sequence
  Description of Artificial Sequence: Synthetic oligonucleotide
caggcggaugggguuuguc

SEQ ID NO: 2187663 - RNA, 19 nt, Artificial Sequence
  Description of Artificial Sequence: Synthetic oligonucleotide
caaaugaagaagggaccuu

SEQ ID NO: 2187664 - RNA, 19 nt, Artificial Sequence
  Description of Artificial Sequence: Synthetic oligonucleotide
gugugcacagguccuccau

SEQ ID NO: 2187665 - RNA, 19 nt, Artificial Sequence
  Description of Artificial Sequence: Synthetic oligonucleotide
cgcggacauuccaguaucc

SEQ ID NO: 2187666 - RNA, 19 nt, Artificial Sequence
  Description of Artificial Sequence: Synthetic oligonucleotide
ccaaggggcugacaaagcu

SEQ ID NO: 2187667 - RNA, 19 nt, Artificial Sequence
  Description of Artificial Sequence: Synthetic oligonucleotide
gcauggugcuggugcugug

SEQ ID NO: 2187668 - RNA, 19 nt, Artificial Sequence
  Description of Artificial Sequence: Synthetic oligonucleotide
agcuguccccagggccagg

SEQ ID NO: 2187669 - RNA, 19 nt, Artificial Sequence
  Description of Artificial Sequence: Synthetic oligonucleotide
cggaugggguuugucagac

SEQ ID NO: 2187670 - RNA, 19 nt, Artificial Sequence
  Description of Artificial Sequence: Synthetic oligonucleotide
aggagccaaggggcugaca

SEQ ID NO: 2187671 - RNA, 19 nt, Artificial Sequence
  Description of Artificial Sequence: Synthetic oligonucleotide
gggccgacaucaaaucaua

SEQ ID NO: 2187672 - RNA, 19 nt, Artificial Sequence
  Description of Artificial Sequence: Synthetic oligonucleotide
aguccagggccgacaucaa

SEQ ID NO: 2187673 - RNA, 19 nt, Artificial Sequence
  Description of Artificial Sequence: Synthetic oligonucleotide
ggaguccagggccgacauc

SEQ ID NO: 2187674 - RNA, 19 nt, Artificial Sequence
  Description of Artificial Sequence: Synthetic oligonucleotide
ccagugugcacagguccuc

SEQ ID NO: 2187675 - RNA, 19 nt, Artificial Sequence
  Description of Artificial Sequence: Synthetic oligonucleotide
ggcauggugcuggugcugu

SEQ ID NO: 2187676 - RNA, 19 nt, Artificial Sequence
  Description of Artificial Sequence: Synthetic oligonucleotide
ggccaggaggauccagugu

SEQ ID NO: 2187677 - RNA, 19 nt, Artificial Sequence
  Description of Artificial Sequence: Synthetic oligonucleotide
ccguguagcaggggccuac

SEQ ID NO: 2187678 - RNA, 19 nt, Artificial Sequence
  Description of Artificial Sequence: Synthetic oligonucleotide
gcuguccccagggccagga

SEQ ID NO: 2187679 - RNA, 19 nt, Artificial Sequence
  Description of Artificial Sequence: Synthetic oligonucleotide
gagcaggcggaugggguuu

SEQ ID NO: 2187680 - RNA, 19 nt, Artificial Sequence
  Description of Artificial Sequence: Synthetic oligonucleotide
gucuccggaggaagcggcu

SEQ ID NO: 2187681 - RNA, 19 nt, Artificial Sequence
  Description of Artificial Sequence: Synthetic oligonucleotide
cugagacaguauugaccuu

SEQ ID NO: 2187682 - RNA, 19 nt, Artificial Sequence
  Description of Artificial Sequence: Synthetic oligonucleotide
guguagcaggggccuacuu

SEQ ID NO: 2187683 - RNA, 19 nt, Artificial Sequence
  Description of Artificial Sequence: Synthetic oligonucleotide
gcuuggguuagggcacaaa

SEQ ID NO: 2187684 - RNA, 19 nt, Artificial Sequence
  Description of Artificial Sequence: Synthetic oligonucleotide
gcuggggaagggagggaaa

SEQ ID NO: 2187685 - RNA, 19 nt, Artificial Sequence
  Description of Artificial Sequence: Synthetic oligonucleotide
ccccagggccaggaggauc

SEQ ID NO: 2187686 - RNA, 19 nt, Artificial Sequence
  Description of Artificial Sequence: Synthetic oligonucleotide
ccggaggaagcggcugguc

SEQ ID NO: 2187687 - RNA, 19 nt, Artificial Sequence
  Description of Artificial Sequence: Synthetic oligonucleotide
gcccguguagcaggggccu

SEQ ID NO: 2187688 - RNA, 19 nt, Artificial Sequence
  Description of Artificial Sequence: Synthetic oligonucleotide
ccuccauaugagagcccgu

SEQ ID NO: 2187689 - RNA, 19 nt, Artificial Sequence
  Description of Artificial Sequence: Synthetic oligonucleotide
ccaguaucauaggcauggu

SEQ ID NO: 2187690 - RNA, 19 nt, Artificial Sequence
  Description of Artificial Sequence: Synthetic oligonucleotide
ccagggccaggaggaucca

SEQ ID NO: 2187691 - RNA, 19 nt, Artificial Sequence
  Description of Artificial Sequence: Synthetic oligonucleotide
cguguagcaggggccuacu

SEQ ID NO: 2187692 - RNA, 19 nt, Artificial Sequence
  Description of Artificial Sequence: Synthetic oligonucleotide
gcaggcggaugggguuugu

SEQ ID NO: 2187693 - RNA, 19 nt, Artificial Sequence
  Description of Artificial Sequence: Synthetic oligonucleotide
cccguguagcaggggccua

SEQ ID NO: 2187694 - RNA, 19 nt, Artificial Sequence
  Description of Artificial Sequence: Synthetic oligonucleotide
cauaaaaucagccacaagc

SEQ ID NO: 2187695 - RNA, 19 nt, Artificial Sequence
  Description of Artificial Sequence: Synthetic oligonucleotide
aaacauggguaauuaaugg

SEQ ID NO: 2187696 - RNA, 19 nt, Artificial Sequence
  Description of Artificial Sequence: Synthetic oligonucleotide
uaauuaaugguuccagugg

SEQ ID NO: 2187697 - RNA, 19 nt, Artificial Sequence
  Description of Artificial Sequence: Synthetic oligonucleotide
aauauugcuccuuuccagg

SEQ ID NO: 2187698 - RNA, 19 nt, Artificial Sequence
  Description of Artificial Sequence: Synthetic oligonucleotide
aauaccggcucccucaugg

SEQ ID NO: 2187699 - RNA, 19 nt, Artificial Sequence
  Description of Artificial Sequence: Synthetic oligonucleotide
uaaaacugcaggaagaggu

SEQ ID NO: 2187700 - RNA, 19 nt, Artificial Sequence
  Description of Artificial Sequence: Synthetic oligonucleotide
uccacuaaccacaugauca

SEQ ID NO: 2187701 - RNA, 19 nt, Artificial Sequence
  Description of Artificial Sequence: Synthetic oligonucleotide
ucaguguggucucagaacg

SEQ ID NO: 2187702 - RNA, 19 nt, Artificial Sequence
  Description of Artificial Sequence: Synthetic oligonucleotide
aaagguaaaacauggguaa

SEQ ID NO: 2187703 - RNA, 19 nt, Artificial Sequence
  Description of Artificial Sequence: Synthetic oligonucleotide
aaauauugcuccuuuccag

SEQ ID NO: 2187704 - RNA, 19 nt, Artificial Sequence
  Description of Artificial Sequence: Synthetic oligonucleotide
aacgcuuuccacaauaccg

SEQ ID NO: 2187705 - RNA, 19 nt, Artificial Sequence
  Description of Artificial Sequence: Synthetic oligonucleotide
agcuccgucgauuuuagcc

SEQ ID NO: 2187706 - RNA, 19 nt, Artificial Sequence
  Description of Artificial Sequence: Synthetic oligonucleotide
caucuuuacucuuaaaccc

SEQ ID NO: 2187707 - RNA, 19 nt, Artificial Sequence
  Description of Artificial Sequence: Synthetic oligonucleotide
uccagcacgaagcagauca

SEQ ID NO: 2187708 - RNA, 19 nt, Artificial Sequence
  Description of Artificial Sequence: Synthetic oligonucleotide
aauuaaugguuccagugga

SEQ ID NO: 2187709 - RNA, 19 nt, Artificial Sequence
  Description of Artificial Sequence: Synthetic oligonucleotide
ucuuaaacccaccaaauau

SEQ ID NO: 2187710 - RNA, 19 nt, Artificial Sequence
  Description of Artificial Sequence: Synthetic oligonucleotide
agcgggaugacuuuaucgc

SEQ ID NO: 2187711 - RNA, 19 nt, Artificial Sequence
  Description of Artificial Sequence: Synthetic oligonucleotide
uguacugggagaaagugcu

SEQ ID NO: 2187712 - RNA, 19 nt, Artificial Sequence
  Description of Artificial Sequence: Synthetic oligonucleotide
uuuuacagaagucaccccu

SEQ ID NO: 2187713 - RNA, 19 nt, Artificial Sequence
  Description of Artificial Sequence: Synthetic oligonucleotide
aaaguccaccccuccaucc

SEQ ID NO: 2187714 - RNA, 19 nt, Artificial Sequence
  Description of Artificial Sequence: Synthetic oligonucleotide
agcaacaugggguucacgg

SEQ ID NO: 2187715 - RNA, 19 nt, Artificial Sequence
  Description of Artificial Sequence: Synthetic oligonucleotide
ugacacuuacuccacaugc

SEQ ID NO: 2187716 - RNA, 19 nt, Artificial Sequence
  Description of Artificial Sequence: Synthetic oligonucleotide
uuauuuucucaaaagguaa

SEQ ID NO: 2187717 - RNA, 19 nt, Artificial Sequence
  Description of Artificial Sequence: Synthetic oligonucleotide
agaacgucaggacaguacg

SEQ ID NO: 2187718 - RNA, 19 nt, Artificial Sequence
  Description of Artificial Sequence: Synthetic oligonucleotide
aauucaugguguccagucg

SEQ ID NO: 2187719 - RNA, 19 nt, Artificial Sequence
  Description of Artificial Sequence: Synthetic oligonucleotide
gacaaugacacuuacucca

SEQ ID NO: 2187720 - RNA, 19 nt, Artificial Sequence
  Description of Artificial Sequence: Synthetic oligonucleotide
uuuacucuuaaacccacca

SEQ ID NO: 2187721 - RNA, 19 nt, Artificial Sequence
  Description of Artificial Sequence: Synthetic oligonucleotide
ucaaaagguaaaacauggg

SEQ ID NO: 2187722 - RNA, 19 nt, Artificial Sequence
  Description of Artificial Sequence: Synthetic oligonucleotide
agagguguaaccaagcuuc

SEQ ID NO: 2187723 - RNA, 19 nt, Artificial Sequence
  Description of Artificial Sequence: Synthetic oligonucleotide
auugcuccuuuccaggugc

SEQ ID NO: 2187724 - RNA, 19 nt, Artificial Sequence
  Description of Artificial Sequence: Synthetic oligonucleotide
caaaaggcagacuuucucg

SEQ ID NO: 2187725 - RNA, 19 nt, Artificial Sequence
  Description of Artificial Sequence: Synthetic oligonucleotide
uacacaaguuguuuucugg

SEQ ID NO: 2187726 - RNA, 19 nt, Artificial Sequence
  Description of Artificial Sequence: Synthetic oligonucleotide
ucaaaggaaaaguccaccc

SEQ ID NO: 2187727 - RNA, 19 nt, Artificial Sequence
  Description of Artificial Sequence: Synthetic oligonucleotide
aacauggguaauuaauggu

SEQ ID NO: 2187728 - RNA, 19 nt, Artificial Sequence
  Description of Artificial Sequence: Synthetic oligonucleotide
ucucagaacgucaggacag

SEQ ID NO: 2187729 - RNA, 19 nt, Artificial Sequence
  Description of Artificial Sequence: Synthetic oligonucleotide
ucaucugaacggcagacgc

SEQ ID NO: 2187730 - RNA, 19 nt, Artificial Sequence
  Description of Artificial Sequence: Synthetic oligonucleotide
ugcauuuuccacacugggg

SEQ ID NO: 2187731 - RNA, 19 nt, Artificial Sequence
  Description of Artificial Sequence: Synthetic oligonucleotide
gauuacuucaaaggaaaag

SEQ ID NO: 2187732 - RNA, 19 nt, Artificial Sequence
  Description of Artificial Sequence: Synthetic oligonucleotide
cacgaagcagaucaaaucc

SEQ ID NO: 2187733 - RNA, 19 nt, Artificial Sequence
  Description of Artificial Sequence: Synthetic oligonucleotide
auggguaauuaaugguucc

SEQ ID NO: 2187734 - RNA, 19 nt, Artificial Sequence
  Description of Artificial Sequence: Synthetic oligonucleotide
aaaaggcagacuuucucga

SEQ ID NO: 2187735 - RNA, 19 nt, Artificial Sequence
  Description of Artificial Sequence: Synthetic oligonucleotide
aaacccugcauuuuccaca

SEQ ID NO: 2187736 - RNA, 19 nt, Artificial Sequence
  Description of Artificial Sequence: Synthetic oligonucleotide
aucaguguggucucagaac

SEQ ID NO: 2187737 - RNA, 19 nt, Artificial Sequence
  Description of Artificial Sequence: Synthetic oligonucleotide
aaaucagccacaagcuugg

SEQ ID NO: 2187738 - RNA, 19 nt, Artificial Sequence
  Description of Artificial Sequence: Synthetic oligonucleotide
ucccucauggccuaaaacu

SEQ ID NO: 2187739 - RNA, 19 nt, Artificial Sequence
  Description of Artificial Sequence: Synthetic oligonucleotide
aaaaguccaccccuccauc

SEQ ID NO: 2187740 - RNA, 19 nt, Artificial Sequence
  Description of Artificial Sequence: Synthetic oligonucleotide
uuaaugcgaacuucauggg

SEQ ID NO: 2187741 - RNA, 19 nt, Artificial Sequence
  Description of Artificial Sequence: Synthetic oligonucleotide
ucucgaguggugaagcucc

SEQ ID NO: 2187742 - RNA, 19 nt, Artificial Sequence
  Description of Artificial Sequence: Synthetic oligonucleotide
agagguuuugggcauuagg

SEQ ID NO: 2187743 - RNA, 19 nt, Artificial Sequence
  Description of Artificial Sequence: Synthetic oligonucleotide
ugcuaucucaucuaccaca

SEQ ID NO: 2187744 - RNA, 19 nt, Artificial Sequence
  Description of Artificial Sequence: Synthetic oligonucleotide
ucuauguccucgauggaga

SEQ ID NO: 2187745 - RNA, 19 nt, Artificial Sequence
  Description of Artificial Sequence: Synthetic oligonucleotide
uggccauaaaaucagccac

SEQ ID NO: 2187746 - RNA, 19 nt, Artificial Sequence
  Description of Artificial Sequence: Synthetic oligonucleotide
uaaugcgaacuucaugggc

SEQ ID NO: 2187747 - RNA, 19 nt, Artificial Sequence
  Description of Artificial Sequence: Synthetic oligonucleotide
caugguguccagucgaccg

SEQ ID NO: 2187748 - RNA, 19 nt, Artificial Sequence
  Description of Artificial Sequence: Synthetic oligonucleotide
ugaggguugaugcacucug

SEQ ID NO: 2187749 - RNA, 19 nt, Artificial Sequence
  Description of Artificial Sequence: Synthetic oligonucleotide
auguccucgauggagaagg

SEQ ID NO: 2187750 - RNA, 19 nt, Artificial Sequence
  Description of Artificial Sequence: Synthetic oligonucleotide
uauuuucucaaaagguaaa

SEQ ID NO: 2187751 - RNA, 19 nt, Artificial Sequence
  Description of Artificial Sequence: Synthetic oligonucleotide
aucugaacggcagacgccc

SEQ ID NO: 2187752 - RNA, 19 nt, Artificial Sequence
  Description of Artificial Sequence: Synthetic oligonucleotide
gguuuugggcauuaggagg

SEQ ID NO: 2187753 - RNA, 19 nt, Artificial Sequence
  Description of Artificial Sequence: Synthetic oligonucleotide
uguggucucagaacgucag

SEQ ID NO: 2187754 - RNA, 19 nt, Artificial Sequence
  Description of Artificial Sequence: Synthetic oligonucleotide
aaaggcagacuuucucgag

SEQ ID NO: 2187755 - RNA, 19 nt, Artificial Sequence
  Description of Artificial Sequence: Synthetic oligonucleotide
uuaucgccugguuuuacag

SEQ ID NO: 2187756 - RNA, 19 nt, Artificial Sequence
  Description of Artificial Sequence: Synthetic oligonucleotide
gaaguuguggauuggcuuc

SEQ ID NO: 2187757 - RNA, 19 nt, Artificial Sequence
  Description of Artificial Sequence: Synthetic oligonucleotide
caagcuuccacuaaccaca

SEQ ID NO: 2187758 - RNA, 19 nt, Artificial Sequence
  Description of Artificial Sequence: Synthetic oligonucleotide
gcaucuuuacucuuaaacc

SEQ ID NO: 2187759 - RNA, 19 nt, Artificial Sequence
  Description of Artificial Sequence: Synthetic oligonucleotide
cccagcaacagcaacaugg

SEQ ID NO: 2187760 - RNA, 19 nt, Artificial Sequence
  Description of Artificial Sequence: Synthetic oligonucleotide
gaagaauucauggugucca

SEQ ID NO: 2187761 - RNA, 19 nt, Artificial Sequence
  Description of Artificial Sequence: Synthetic oligonucleotide
aguacggauacucuuucca

SEQ ID NO: 2187762 - RNA, 19 nt, Artificial Sequence
  Description of Artificial Sequence: Synthetic oligonucleotide
uucuauguccucgauggag

SEQ ID NO: 2187763 - RNA, 19 nt, Artificial Sequence
  Description of Artificial Sequence: Synthetic oligonucleotide
ugauuacuuuuccagcugu

SEQ ID NO: 2187764 - RNA, 19 nt, Artificial Sequence
  Description of Artificial Sequence: Synthetic oligonucleotide
ucgaccgauuacuucaaag

SEQ ID NO: 2187765 - RNA, 19 nt, Artificial Sequence
  Description of Artificial Sequence: Synthetic oligonucleotide
gguugaugcacucuguugc

SEQ ID NO: 2187766 - RNA, 19 nt, Artificial Sequence
  Description of Artificial Sequence: Synthetic oligonucleotide
guugcacccaauucuuugg

SEQ ID NO: 2187767 - RNA, 19 nt, Artificial Sequence
  Description of Artificial Sequence: Synthetic oligonucleotide
uucaaaggaaaaguccacc

SEQ ID NO: 2187768 - RNA, 19 nt, Artificial Sequence
  Description of Artificial Sequence: Synthetic oligonucleotide
aggaaaaguccaccccucc

SEQ ID NO: 2187769 - RNA, 19 nt, Artificial Sequence
  Description of Artificial Sequence: Synthetic oligonucleotide
ugguuuuacagaagucacc

SEQ ID NO: 2187770 - RNA, 19 nt, Artificial Sequence
  Description of Artificial Sequence: Synthetic oligonucleotide
aaccaagcuuccacuaacc

SEQ ID NO: 2187771 - RNA, 19 nt, Artificial Sequence
  Description of Artificial Sequence: Synthetic oligonucleotide
cauggccuaaaacugcagg

SEQ ID NO: 2187772 - RNA, 19 nt, Artificial Sequence
  Description of Artificial Sequence: Synthetic oligonucleotide
ucugggugcuugcaaaccc

SEQ ID NO: 2187773 - RNA, 19 nt, Artificial Sequence
  Description of Artificial Sequence: Synthetic oligonucleotide
aacggcagacgcccguggc

SEQ ID NO: 2187774 - RNA, 19 nt, Artificial Sequence
  Description of Artificial Sequence: Synthetic oligonucleotide
uaaccaagcuuccacuaac

SEQ ID NO: 2187775 - RNA, 19 nt, Artificial Sequence
  Description of Artificial Sequence: Synthetic oligonucleotide
ucuuuacucuuaaacccac

SEQ ID NO: 2187776 - RNA, 19 nt, Artificial Sequence
  Description of Artificial Sequence: Synthetic oligonucleotide
cugguuuuacagaagucac

SEQ ID NO: 2187777 - RNA, 19 nt, Artificial Sequence
  Description of Artificial Sequence: Synthetic oligonucleotide
acucuguugcacccaauuc

SEQ ID NO: 2187778 - RNA, 19 nt, Artificial Sequence
  Description of Artificial Sequence: Synthetic oligonucleotide
uacggauacucuuuccagc

SEQ ID NO: 2187779 - RNA, 19 nt, Artificial Sequence
  Description of Artificial Sequence: Synthetic oligonucleotide
gaguggugaagcuccgucg

SEQ ID NO: 2187780 - RNA, 19 nt, Artificial Sequence
  Description of Artificial Sequence: Synthetic oligonucleotide
acaguacggauacucuuuc

SEQ ID NO: 2187781 - RNA, 19 nt, Artificial Sequence
  Description of Artificial Sequence: Synthetic oligonucleotide
gguuuuacagaagucaccc

SEQ ID NO: 2187782 - RNA, 19 nt, Artificial Sequence
  Description of Artificial Sequence: Synthetic oligonucleotide
aaggcagacuuucucgagu

SEQ ID NO: 2187783 - RNA, 19 nt, Artificial Sequence
  Description of Artificial Sequence: Synthetic oligonucleotide
uuuagccacugcuaucuca

SEQ ID NO: 2187784 - RNA, 19 nt, Artificial Sequence
  Description of Artificial Sequence: Synthetic oligonucleotide
uuuuauacacaaguuguuu

SEQ ID NO: 2187785 - RNA, 19 nt, Artificial Sequence
  Description of Artificial Sequence: Synthetic oligonucleotide
gagguuuugggcauuagga

SEQ ID NO: 2187786 - RNA, 19 nt, Artificial Sequence
  Description of Artificial Sequence: Synthetic oligonucleotide
uuagccacugcuaucucau

SEQ ID NO: 2187787 - RNA, 19 nt, Artificial Sequence
  Description of Artificial Sequence: Synthetic oligonucleotide
uaaugguuccaguggaaac

SEQ ID NO: 2187788 - RNA, 19 nt, Artificial Sequence
  Description of Artificial Sequence: Synthetic oligonucleotide
aagagguguaaccaagcuu

SEQ ID NO: 2187789 - RNA, 19 nt, Artificial Sequence
  Description of Artificial Sequence: Synthetic oligonucleotide
gaccgauuacuucaaagga

SEQ ID NO: 2187790 - RNA, 19 nt, Artificial Sequence
  Description of Artificial Sequence: Synthetic oligonucleotide
cauggguaauuaaugguuc

SEQ ID NO: 2187791 - RNA, 19 nt, Artificial Sequence
  Description of Artificial Sequence: Synthetic oligonucleotide
accacaugaucaucugaac

SEQ ID NO: 2187792 - RNA, 19 nt, Artificial Sequence
  Description of Artificial Sequence: Synthetic oligonucleotide
uuuaucgccugguuuuaca

SEQ ID NO: 2187793 - RNA, 19 nt, Artificial Sequence
  Description of Artificial Sequence: Synthetic oligonucleotide
acacuuacuccacaugcug

SEQ ID NO: 2187794 - RNA, 19 nt, Artificial Sequence
  Description of Artificial Sequence: Synthetic oligonucleotide
ugcgacuucuauguccucg

SEQ ID NO: 2187795 - RNA, 19 nt, Artificial Sequence
  Description of Artificial Sequence: Synthetic oligonucleotide
guuuugggcauuaggaggc

SEQ ID NO: 2187796 - RNA, 19 nt, Artificial Sequence
  Description of Artificial Sequence: Synthetic oligonucleotide
aaaacugcaggaagaggug

SEQ ID NO: 2187797 - RNA, 19 nt, Artificial Sequence
  Description of Artificial Sequence: Synthetic oligonucleotide
ugaugcacucuguugcacc

SEQ ID NO: 2187798 - RNA, 19 nt, Artificial Sequence
  Description of Artificial Sequence: Synthetic oligonucleotide
uuacucuuaaacccaccaa

SEQ ID NO: 2187799 - RNA, 19 nt, Artificial Sequence
  Description of Artificial Sequence: Synthetic oligonucleotide
ucacggagagguuuugggc

SEQ ID NO: 2187800 - RNA, 19 nt, Artificial Sequence
  Description of Artificial Sequence: Synthetic oligonucleotide
ugcaaacccugcauuuucc

SEQ ID NO: 2187801 - RNA, 19 nt, Artificial Sequence
  Description of Artificial Sequence: Synthetic oligonucleotide
ucgauuuuagccacugcua

SEQ ID NO: 2187802 - RNA, 19 nt, Artificial Sequence
  Description of Artificial Sequence: Synthetic oligonucleotide
caacaugggguucacggag

SEQ ID NO: 2187803 - RNA, 19 nt, Artificial Sequence
  Description of Artificial Sequence: Synthetic oligonucleotide
ggauacucuuuccagcacg

SEQ ID NO: 2187804 - RNA, 19 nt, Artificial Sequence
  Description of Artificial Sequence: Synthetic oligonucleotide
uugcacuugauuacuuuuc

SEQ ID NO: 2187805 - RNA, 19 nt, Artificial Sequence
  Description of Artificial Sequence: Synthetic oligonucleotide
uuugcaaaaggcagacuuu

SEQ ID NO: 2187806 - RNA, 19 nt, Artificial Sequence
  Description of Artificial Sequence: Synthetic oligonucleotide
aaccacaugaucaucugaa

SEQ ID NO: 2187807 - RNA, 19 nt, Artificial Sequence
  Description of Artificial Sequence: Synthetic oligonucleotide
guacggauacucuuuccag

SEQ ID NO: 2187808 - RNA, 19 nt, Artificial Sequence
  Description of Artificial Sequence: Synthetic oligonucleotide
cugacgaaguuguggauug

SEQ ID NO: 2187809 - RNA, 19 nt, Artificial Sequence
  Description of Artificial Sequence: Synthetic oligonucleotide
auacacaaguuguuuucug

SEQ ID NO: 2187810 - RNA, 19 nt, Artificial Sequence
  Description of Artificial Sequence: Synthetic oligonucleotide
uauugcuccuuuccaggug

SEQ ID NO: 2187811 - RNA, 19 nt, Artificial Sequence
  Description of Artificial Sequence: Synthetic oligonucleotide
gaaagugcuggugcugacg

SEQ ID NO: 2187812 - RNA, 19 nt, Artificial Sequence
  Description of Artificial Sequence: Synthetic oligonucleotide
uugggcauuaggaggcacc

SEQ ID NO: 2187813 - RNA, 19 nt, Artificial Sequence
  Description of Artificial Sequence: Synthetic oligonucleotide
gacuucuauguccucgaug

SEQ ID NO: 2187814 - RNA, 19 nt, Artificial Sequence
  Description of Artificial Sequence: Synthetic oligonucleotide
gcuuccacuaaccacauga

SEQ ID NO: 2187815 - RNA, 19 nt, Artificial Sequence
  Description of Artificial Sequence: Synthetic oligonucleotide
aguguacugggagaaagug

SEQ ID NO: 2187816 - RNA, 19 nt, Artificial Sequence
  Description of Artificial Sequence: Synthetic oligonucleotide
ugaucaucugaacggcaga

SEQ ID NO: 2187817 - RNA, 19 nt, Artificial Sequence
  Description of Artificial Sequence: Synthetic oligonucleotide
acggauacucuuuccagca

SEQ ID NO: 2187818 - RNA, 19 nt, Artificial Sequence
  Description of Artificial Sequence: Synthetic oligonucleotide
cacuuacuccacaugcugc

SEQ ID NO: 2187819 - RNA, 19 nt, Artificial Sequence
  Description of Artificial Sequence: Synthetic oligonucleotide
ucuguugcacccaauucuu

SEQ ID NO: 2187820 - RNA, 19 nt, Artificial Sequence
  Description of Artificial Sequence: Synthetic oligonucleotide
uuaaugguuccaguggaaa

SEQ ID NO: 2187821 - RNA, 19 nt, Artificial Sequence
  Description of Artificial Sequence: Synthetic oligonucleotide
aacgucaggacaguacgga

SEQ ID NO: 2187822 - RNA, 19 nt, Artificial Sequence
  Description of Artificial Sequence: Synthetic oligonucleotide
caaaagguaaaacaugggu

SEQ ID NO: 2187823 - RNA, 19 nt, Artificial Sequence
  Description of Artificial Sequence: Synthetic oligonucleotide
uuguggauuggcuuccccu

SEQ ID NO: 2187824 - RNA, 19 nt, Artificial Sequence
  Description of Artificial Sequence: Synthetic oligonucleotide
gauuuuagccacugcuauc

SEQ ID NO: 2187825 - RNA, 19 nt, Artificial Sequence
  Description of Artificial Sequence: Synthetic oligonucleotide
uguaaccaagcuuccacua

SEQ ID NO: 2187826 - RNA, 19 nt, Artificial Sequence
  Description of Artificial Sequence: Synthetic oligonucleotide
cuggaguacuuccucaaug

SEQ ID NO: 2187827 - RNA, 19 nt, Artificial Sequence
  Description of Artificial Sequence: Synthetic oligonucleotide
cuuuacucuuaaacccacc

SEQ ID NO: 2187828 - RNA, 19 nt, Artificial Sequence
  Description of Artificial Sequence: Synthetic oligonucleotide
ccgacaaugacacuuacuc

SEQ ID NO: 2187829 - RNA, 19 nt, Artificial Sequence
  Description of Artificial Sequence: Synthetic oligonucleotide
aucgccugguuuuacagaa

SEQ ID NO: 2187830 - RNA, 19 nt, Artificial Sequence
  Description of Artificial Sequence: Synthetic oligonucleotide
gauggagaagggcuuguga

SEQ ID NO: 2187831 - RNA, 19 nt, Artificial Sequence
  Description of Artificial Sequence: Synthetic oligonucleotide
ucuugaggguugaugcacu

SEQ ID NO: 2187832 - RNA, 19 nt, Artificial Sequence
  Description of Artificial Sequence: Synthetic oligonucleotide
uugcacccaauucuuuggc

SEQ ID NO: 2187833 - RNA, 19 nt, Artificial Sequence
  Description of Artificial Sequence: Synthetic oligonucleotide
auauugcuccuuuccaggu

SEQ ID NO: 2187834 - RNA, 19 nt, Artificial Sequence
  Description of Artificial Sequence: Synthetic oligonucleotide
cuuucucgaguggugaagc

SEQ ID NO: 2187835 - RNA, 19 nt, Artificial Sequence
  Description of Artificial Sequence: Synthetic oligonucleotide
uuccacuaaccacaugauc

SEQ ID NO: 2187836 - RNA, 19 nt, Artificial Sequence
  Description of Artificial Sequence: Synthetic oligonucleotide
cagaacgucaggacaguac

SEQ ID NO: 2187837 - RNA, 19 nt, Artificial Sequence
  Description of Artificial Sequence: Synthetic oligonucleotide
uugcaaaaggcagacuuuc

SEQ ID NO: 2187838 - RNA, 19 nt, Artificial Sequence
  Description of Artificial Sequence: Synthetic oligonucleotide
agaaagugcuggugcugac

SEQ ID NO: 2187839 - RNA, 19 nt, Artificial Sequence
  Description of Artificial Sequence: Synthetic oligonucleotide
cucaauggguuuguuguag

SEQ ID NO: 2187840 - RNA, 19 nt, Artificial Sequence
  Description of Artificial Sequence: Synthetic oligonucleotide
uguccagucgaccgauuac

SEQ ID NO: 2187841 - RNA, 19 nt, Artificial Sequence
  Description of Artificial Sequence: Synthetic oligonucleotide
uccgucauuuccuggagua

SEQ ID NO: 2187842 - RNA, 19 nt, Artificial Sequence
  Description of Artificial Sequence: Synthetic oligonucleotide
ucaauggguuuguuguagu

SEQ ID NO: 2187843 - RNA, 19 nt, Artificial Sequence
  Description of Artificial Sequence: Synthetic oligonucleotide
uggucucagaacgucagga

SEQ ID NO: 2187844 - RNA, 19 nt, Artificial Sequence
  Description of Artificial Sequence: Synthetic oligonucleotide
cuugauuacuuuuccagcu

SEQ ID NO: 2187845 - RNA, 19 nt, Artificial Sequence
  Description of Artificial Sequence: Synthetic oligonucleotide
gguguaaccaagcuuccac

SEQ ID NO: 2187846 - RNA, 19 nt, Artificial Sequence
  Description of Artificial Sequence: Synthetic oligonucleotide
guuuuacagaagucacccc

SEQ ID NO: 2187847 - RNA, 19 nt, Artificial Sequence
  Description of Artificial Sequence: Synthetic oligonucleotide
aggcagacuuucucgagug

SEQ ID NO: 2187848 - RNA, 19 nt, Artificial Sequence
  Description of Artificial Sequence: Synthetic oligonucleotide
acggcagacgcccguggcc

SEQ ID NO: 2187849 - RNA, 19 nt, Artificial Sequence
  Description of Artificial Sequence: Synthetic oligonucleotide
guagucuugaggguugaug

SEQ ID NO: 2187850 - RNA, 19 nt, Artificial Sequence
  Description of Artificial Sequence: Synthetic oligonucleotide
uuacagaagucaccccuuc

SEQ ID NO: 2187851 - RNA, 19 nt, Artificial Sequence
  Description of Artificial Sequence: Synthetic oligonucleotide
caacgcuuuccacaauacc

SEQ ID NO: 2187852 - RNA, 19 nt, Artificial Sequence
  Description of Artificial Sequence: Synthetic oligonucleotide
gcucccauagcacagcagc

SEQ ID NO: 2187853 - RNA, 19 nt, Artificial Sequence
  Description of Artificial Sequence: Synthetic oligonucleotide
uguuguagucuugaggguu

SEQ ID NO: 2187854 - RNA, 19 nt, Artificial Sequence
  Description of Artificial Sequence: Synthetic oligonucleotide
aagcuccgucgauuuuagc

SEQ ID NO: 2187855 - RNA, 19 nt, Artificial Sequence
  Description of Artificial Sequence: Synthetic oligonucleotide
gcuugugaggcucccauag

SEQ ID NO: 2187856 - RNA, 19 nt, Artificial Sequence
  Description of Artificial Sequence: Synthetic oligonucleotide
gucgauuuuagccacugcu

SEQ ID NO: 2187857 - RNA, 19 nt, Artificial Sequence
  Description of Artificial Sequence: Synthetic oligonucleotide
aucaucugaacggcagacg

SEQ ID NO: 2187858 - RNA, 19 nt, Artificial Sequence
  Description of Artificial Sequence: Synthetic oligonucleotide
auggguuuguuguagucuu

SEQ ID NO: 2187859 - RNA, 19 nt, Artificial Sequence
  Description of Artificial Sequence: Synthetic oligonucleotide
uacagaagucaccccuucu

SEQ ID NO: 2187860 - RNA, 19 nt, Artificial Sequence
  Description of Artificial Sequence: Synthetic oligonucleotide
uaucgccugguuuuacaga

SEQ ID NO: 2187861 - RNA, 19 nt, Artificial Sequence
  Description of Artificial Sequence: Synthetic oligonucleotide
cacaauaccggcucccuca

SEQ ID NO: 2187862 - RNA, 19 nt, Artificial Sequence
  Description of Artificial Sequence: Synthetic oligonucleotide
gaacgucaggacaguacgg

SEQ ID NO: 2187863 - RNA, 19 nt, Artificial Sequence
  Description of Artificial Sequence: Synthetic oligonucleotide
auaccggcucccucauggc

SEQ ID NO: 2187864 - RNA, 19 nt, Artificial Sequence
  Description of Artificial Sequence: Synthetic oligonucleotide
ggagaaaagagcgggauga

SEQ ID NO: 2187865 - RNA, 19 nt, Artificial Sequence
  Description of Artificial Sequence: Synthetic oligonucleotide
agagcgggaugacuuuauc

SEQ ID NO: 2187866 - RNA, 19 nt, Artificial Sequence
  Description of Artificial Sequence: Synthetic oligonucleotide
gucucagaacgucaggaca

SEQ ID NO: 2187867 - RNA, 19 nt, Artificial Sequence
  Description of Artificial Sequence: Synthetic oligonucleotide
caucugaacggcagacgcc

SEQ ID NO: 2187868 - RNA, 19 nt, Artificial Sequence
  Description of Artificial Sequence: Synthetic oligonucleotide
auuaggaggcaccccgaca

SEQ ID NO: 2187869 - RNA, 19 nt, Artificial Sequence
  Description of Artificial Sequence: Synthetic oligonucleotide
uguggauuggcuuccccuu

SEQ ID NO: 2187870 - RNA, 19 nt, Artificial Sequence
  Description of Artificial Sequence: Synthetic oligonucleotide
ucugaacggcagacgcccg

SEQ ID NO: 2187871 - RNA, 19 nt, Artificial Sequence
  Description of Artificial Sequence: Synthetic oligonucleotide
uuggggacggcaucuuuac

SEQ ID NO: 2187872 - RNA, 19 nt, Artificial Sequence
  Description of Artificial Sequence: Synthetic oligonucleotide
acauggguaauuaaugguu

SEQ ID NO: 2187873 - RNA, 19 nt, Artificial Sequence
  Description of Artificial Sequence: Synthetic oligonucleotide
aggaagagguguaaccaag

SEQ ID NO: 2187874 - RNA, 19 nt, Artificial Sequence
  Description of Artificial Sequence: Synthetic oligonucleotide
accaagcuuccacuaacca

SEQ ID NO: 2187875 - RNA, 19 nt, Artificial Sequence
  Description of Artificial Sequence: Synthetic oligonucleotide
agcucaacagggaagaauu

SEQ ID NO: 2187876 - RNA, 19 nt, Artificial Sequence
  Description of Artificial Sequence: Synthetic oligonucleotide
cacggagagguuuugggca

SEQ ID NO: 2187877 - RNA, 19 nt, Artificial Sequence
  Description of Artificial Sequence: Synthetic oligonucleotide
ugggcauuaggaggcaccc

SEQ ID NO: 2187878 - RNA, 19 nt, Artificial Sequence
  Description of Artificial Sequence: Synthetic oligonucleotide
uguccucgauggagaaggg

SEQ ID NO: 2187879 - RNA, 19 nt, Artificial Sequence
  Description of Artificial Sequence: Synthetic oligonucleotide
gacuuuaucgccugguuuu

SEQ ID NO: 2187880 - RNA, 19 nt, Artificial Sequence
  Description of Artificial Sequence: Synthetic oligonucleotide
cuuugcaaaaggcagacuu

SEQ ID NO: 2187881 - RNA, 19 nt, Artificial Sequence
  Description of Artificial Sequence: Synthetic oligonucleotide
cagacuuucucgaguggug

SEQ ID NO: 2187882 - RNA, 19 nt, Artificial Sequence
  Description of Artificial Sequence: Synthetic oligonucleotide
gaagcuccgucgauuuuag

SEQ ID NO: 2187883 - RNA, 19 nt, Artificial Sequence
  Description of Artificial Sequence: Synthetic oligonucleotide
agaaaagagcgggaugacu

SEQ ID NO: 2187884 - RNA, 19 nt, Artificial Sequence
  Description of Artificial Sequence: Synthetic oligonucleotide
agggaagaauucauggugu

SEQ ID NO: 2187885 - RNA, 19 nt, Artificial Sequence
  Description of Artificial Sequence: Synthetic oligonucleotide
gauacucuuuccagcacga

SEQ ID NO: 2187886 - RNA, 19 nt, Artificial Sequence
  Description of Artificial Sequence: Synthetic oligonucleotide
ugggugcuugcaaacccug

SEQ ID NO: 2187887 - RNA, 19 nt, Artificial Sequence
  Description of Artificial Sequence: Synthetic oligonucleotide
uuuccagcacgaagcagau

SEQ ID NO: 2187888 - RNA, 19 nt, Artificial Sequence
  Description of Artificial Sequence: Synthetic oligonucleotide
aagguaaaacauggguaau

SEQ ID NO: 2187889 - RNA, 19 nt, Artificial Sequence
  Description of Artificial Sequence: Synthetic oligonucleotide
cacugcuaucucaucuacc

SEQ ID NO: 2187890 - RNA, 19 nt, Artificial Sequence
  Description of Artificial Sequence: Synthetic oligonucleotide
ucuuuccagcacgaagcag

SEQ ID NO: 2187891 - RNA, 19 nt, Artificial Sequence
  Description of Artificial Sequence: Synthetic oligonucleotide
gaagagguguaaccaagcu

SEQ ID NO: 2187892 - RNA, 19 nt, Artificial Sequence
  Description of Artificial Sequence: Synthetic oligonucleotide
caauggguuuguuguaguc

SEQ ID NO: 2187893 - RNA, 19 nt, Artificial Sequence
  Description of Artificial Sequence: Synthetic oligonucleotide
cuugugaggcucccauagc

SEQ ID NO: 2187894 - RNA, 19 nt, Artificial Sequence
  Description of Artificial Sequence: Synthetic oligonucleotide
ggccuaaaacugcaggaag

SEQ ID NO: 2187895 - RNA, 19 nt, Artificial Sequence
  Description of Artificial Sequence: Synthetic oligonucleotide
guguacugggagaaagugc

SEQ ID NO: 2187896 - RNA, 19 nt, Artificial Sequence
  Description of Artificial Sequence: Synthetic oligonucleotide
uuucucgaguggugaagcu

SEQ ID NO: 2187897 - RNA, 19 nt, Artificial Sequence
  Description of Artificial Sequence: Synthetic oligonucleotide
ugcuugcaaacccugcauu

SEQ ID NO: 2187898 - RNA, 19 nt, Artificial Sequence
  Description of Artificial Sequence: Synthetic oligonucleotide
uccccuugcaggugaaccu

SEQ ID NO: 2187899 - RNA, 19 nt, Artificial Sequence
  Description of Artificial Sequence: Synthetic oligonucleotide
uaccggcucccucauggcc

SEQ ID NO: 2187900 - RNA, 19 nt, Artificial Sequence
  Description of Artificial Sequence: Synthetic oligonucleotide
ggagaagggcuugugaggc

SEQ ID NO: 2187901 - RNA, 19 nt, Artificial Sequence
  Description of Artificial Sequence: Synthetic oligonucleotide
uggccuaaaacugcaggaa

SEQ ID NO: 2187902 - RNA, 19 nt, Artificial Sequence
  Description of Artificial Sequence: Synthetic oligonucleotide
cucaacagggaagaauuca

SEQ ID NO: 2187903 - RNA, 19 nt, Artificial Sequence
  Description of Artificial Sequence: Synthetic oligonucleotide
guugaugcacucuguugca

SEQ ID NO: 2187904 - RNA, 19 nt, Artificial Sequence
  Description of Artificial Sequence: Synthetic oligonucleotide
gaacggcagacgcccgugg

SEQ ID NO: 2187905 - RNA, 19 nt, Artificial Sequence
  Description of Artificial Sequence: Synthetic oligonucleotide
accgauuacuucaaaggaa

SEQ ID NO: 2187906 - RNA, 19 nt, Artificial Sequence
  Description of Artificial Sequence: Synthetic oligonucleotide
gcuaucucaucuaccacag

SEQ ID NO: 2187907 - RNA, 19 nt, Artificial Sequence
  Description of Artificial Sequence: Synthetic oligonucleotide
caguacggauacucuuucc

SEQ ID NO: 2187908 - RNA, 19 nt, Artificial Sequence
  Description of Artificial Sequence: Synthetic oligonucleotide
agacuuucucgagugguga

SEQ ID NO: 2187909 - RNA, 19 nt, Artificial Sequence
  Description of Artificial Sequence: Synthetic oligonucleotide
guaaccaagcuuccacuaa

SEQ ID NO: 2187910 - RNA, 19 nt, Artificial Sequence
  Description of Artificial Sequence: Synthetic oligonucleotide
auuuuccacacuggggaga

SEQ ID NO: 2187911 - RNA, 19 nt, Artificial Sequence
  Description of Artificial Sequence: Synthetic oligonucleotide
cauuaggaggcaccccgac

SEQ ID NO: 2187912 - RNA, 19 nt, Artificial Sequence
  Description of Artificial Sequence: Synthetic oligonucleotide
ccaggugcgacccagcaac

SEQ ID NO: 2187913 - RNA, 19 nt, Artificial Sequence
  Description of Artificial Sequence: Synthetic oligonucleotide
aacaugggguucacggaga

SEQ ID NO: 2187914 - RNA, 19 nt, Artificial Sequence
  Description of Artificial Sequence: Synthetic oligonucleotide
ugacgaaguuguggauugg

SEQ ID NO: 2187915 - RNA, 19 nt, Artificial Sequence
  Description of Artificial Sequence: Synthetic oligonucleotide
uucucgaguggugaagcuc

SEQ ID NO: 2187916 - RNA, 19 nt, Artificial Sequence
  Description of Artificial Sequence: Synthetic oligonucleotide
ggggacggcaucuuuacuc

SEQ ID NO: 2187917 - RNA, 19 nt, Artificial Sequence
  Description of Artificial Sequence: Synthetic oligonucleotide
cagaucaaauccuucauuu

SEQ ID NO: 2187918 - RNA, 19 nt, Artificial Sequence
  Description of Artificial Sequence: Synthetic oligonucleotide
agcuuugcacuugauuacu

SEQ ID NO: 2187919 - RNA, 19 nt, Artificial Sequence
  Description of Artificial Sequence: Synthetic oligonucleotide
cauccgucauuuccuggag

SEQ ID NO: 2187920 - RNA, 19 nt, Artificial Sequence
  Description of Artificial Sequence: Synthetic oligonucleotide
gggugcgacuucuaugucc

SEQ ID NO: 2187921 - RNA, 19 nt, Artificial Sequence
  Description of Artificial Sequence: Synthetic oligonucleotide
augcgaacuucaugggccu

SEQ ID NO: 2187922 - RNA, 19 nt, Artificial Sequence
  Description of Artificial Sequence: Synthetic oligonucleotide
ucgccugguuuuacagaag

SEQ ID NO: 2187923 - RNA, 19 nt, Artificial Sequence
  Description of Artificial Sequence: Synthetic oligonucleotide
ucaugguguccagucgacc

SEQ ID NO: 2187924 - RNA, 19 nt, Artificial Sequence
  Description of Artificial Sequence: Synthetic oligonucleotide
guuguggauuggcuucccc

SEQ ID NO: 2187925 - RNA, 19 nt, Artificial Sequence
  Description of Artificial Sequence: Synthetic oligonucleotide
caugaucaucugaacggca

SEQ ID NO: 2187926 - RNA, 19 nt, Artificial Sequence
  Description of Artificial Sequence: Synthetic oligonucleotide
agguaaaacauggguaauu

SEQ ID NO: 2187927 - RNA, 19 nt, Artificial Sequence
  Description of Artificial Sequence: Synthetic oligonucleotide
cucccucauggccuaaaac

SEQ ID NO: 2187928 - RNA, 19 nt, Artificial Sequence
  Description of Artificial Sequence: Synthetic oligonucleotide
cuugaggguugaugcacuc

SEQ ID NO: 2187929 - RNA, 19 nt, Artificial Sequence
  Description of Artificial Sequence: Synthetic oligonucleotide
cuccgucgauuuuagccac

SEQ ID NO: 2187930 - RNA, 19 nt, Artificial Sequence
  Description of Artificial Sequence: Synthetic oligonucleotide
gagaaaagagcgggaugac

SEQ ID NO: 2187931 - RNA, 19 nt, Artificial Sequence
  Description of Artificial Sequence: Synthetic oligonucleotide
agcacgaagcagaucaaau

SEQ ID NO: 2187932 - RNA, 19 nt, Artificial Sequence
  Description of Artificial Sequence: Synthetic oligonucleotide
cccucauggccuaaaacug

SEQ ID NO: 2187933 - RNA, 19 nt, Artificial Sequence
  Description of Artificial Sequence: Synthetic oligonucleotide
ugaacggcagacgcccgug

SEQ ID NO: 2187934 - RNA, 19 nt, Artificial Sequence
  Description of Artificial Sequence: Synthetic oligonucleotide
uugaggguugaugcacucu

SEQ ID NO: 2187935 - RNA, 19 nt, Artificial Sequence
  Description of Artificial Sequence: Synthetic oligonucleotide
ggugcgacccagcaacagc

SEQ ID NO: 2187936 - RNA, 19 nt, Artificial Sequence
  Description of Artificial Sequence: Synthetic oligonucleotide
gggagaaaagagcgggaug

SEQ ID NO: 2187937 - RNA, 19 nt, Artificial Sequence
  Description of Artificial Sequence: Synthetic oligonucleotide
caagcuuggggacggcauc

SEQ ID NO: 2187938 - RNA, 19 nt, Artificial Sequence
  Description of Artificial Sequence: Synthetic oligonucleotide
gcuccgucgauuuuagcca

SEQ ID NO: 2187939 - RNA, 19 nt, Artificial Sequence
  Description of Artificial Sequence: Synthetic oligonucleotide
aggguugaugcacucuguu

SEQ ID NO: 2187940 - RNA, 19 nt, Artificial Sequence
  Description of Artificial Sequence: Synthetic oligonucleotide
cucuuaaacccaccaaaua

SEQ ID NO: 2187941 - RNA, 19 nt, Artificial Sequence
  Description of Artificial Sequence: Synthetic oligonucleotide
uccacaauaccggcucccu

SEQ ID NO: 2187942 - RNA, 19 nt, Artificial Sequence
  Description of Artificial Sequence: Synthetic oligonucleotide
cucgaguggugaagcuccg

SEQ ID NO: 2187943 - RNA, 19 nt, Artificial Sequence
  Description of Artificial Sequence: Synthetic oligonucleotide
caucaguguggucucagaa

SEQ ID NO: 2187944 - RNA, 19 nt, Artificial Sequence
  Description of Artificial Sequence: Synthetic oligonucleotide
auuaaugguuccaguggaa

SEQ ID NO: 2187945 - RNA, 19 nt, Artificial Sequence
  Description of Artificial Sequence: Synthetic oligonucleotide
uccaggugcgacccagcaa

SEQ ID NO: 2187946 - RNA, 19 nt, Artificial Sequence
  Description of Artificial Sequence: Synthetic oligonucleotide
cugcuaucucaucuaccac

SEQ ID NO: 2187947 - RNA, 19 nt, Artificial Sequence
  Description of Artificial Sequence: Synthetic oligonucleotide
acaugcugcauggcagcuc

SEQ ID NO: 2187948 - RNA, 19 nt, Artificial Sequence
  Description of Artificial Sequence: Synthetic oligonucleotide
acaauaccggcucccucau

SEQ ID NO: 2187949 - RNA, 19 nt, Artificial Sequence
  Description of Artificial Sequence: Synthetic oligonucleotide
ggcaccccgacaaugacac

SEQ ID NO: 2187950 - RNA, 19 nt, Artificial Sequence
  Description of Artificial Sequence: Synthetic oligonucleotide
uuuugggcauuaggaggca

SEQ ID NO: 2187951 - RNA, 19 nt, Artificial Sequence
  Description of Artificial Sequence: Synthetic oligonucleotide
agguuguaccaaaucauuu

SEQ ID NO: 2187952 - RNA, 19 nt, Artificial Sequence
  Description of Artificial Sequence: Synthetic oligonucleotide
gcugugcucaugcugucug

SEQ ID NO: 2187953 - RNA, 19 nt, Artificial Sequence
  Description of Artificial Sequence: Synthetic oligonucleotide
cuccauccgucauuuccug

SEQ ID NO: 2187954 - RNA, 19 nt, Artificial Sequence
  Description of Artificial Sequence: Synthetic oligonucleotide
aggacaguacggauacucu

SEQ ID NO: 2187955 - RNA, 19 nt, Artificial Sequence
  Description of Artificial Sequence: Synthetic oligonucleotide
gacuuucucgaguggugaa

SEQ ID NO: 2187956 - RNA, 19 nt, Artificial Sequence
  Description of Artificial Sequence: Synthetic oligonucleotide
acggagagguuuugggcau

SEQ ID NO: 2187957 - RNA, 19 nt, Artificial Sequence
  Description of Artificial Sequence: Synthetic oligonucleotide
gaggcaccccgacaaugac

SEQ ID NO: 2187958 - RNA, 19 nt, Artificial Sequence
  Description of Artificial Sequence: Synthetic oligonucleotide
ugcugcauggcagcucaac

SEQ ID NO: 2187959 - RNA, 19 nt, Artificial Sequence
  Description of Artificial Sequence: Synthetic oligonucleotide
gggaugacuuuaucgccug

SEQ ID NO: 2187960 - RNA, 19 nt, Artificial Sequence
  Description of Artificial Sequence: Synthetic oligonucleotide
aguccaccccuccauccgu

SEQ ID NO: 2187961 - RNA, 19 nt, Artificial Sequence
  Description of Artificial Sequence: Synthetic oligonucleotide
ccgauuacuucaaaggaaa

SEQ ID NO: 2187962 - RNA, 19 nt, Artificial Sequence
  Description of Artificial Sequence: Synthetic oligonucleotide
acgucaggacaguacggau

SEQ ID NO: 2187963 - RNA, 19 nt, Artificial Sequence
  Description of Artificial Sequence: Synthetic oligonucleotide
caucuaccacaguguacug

SEQ ID NO: 2187964 - RNA, 19 nt, Artificial Sequence
  Description of Artificial Sequence: Synthetic oligonucleotide
cauggcagcucaacaggga

SEQ ID NO: 2187965 - RNA, 19 nt, Artificial Sequence
  Description of Artificial Sequence: Synthetic oligonucleotide
cuuuaucgccugguuuuac

SEQ ID NO: 2187966 - RNA, 19 nt, Artificial Sequence
  Description of Artificial Sequence: Synthetic oligonucleotide
cucaugcugucuguccuug

SEQ ID NO: 2187967 - RNA, 19 nt, Artificial Sequence
  Description of Artificial Sequence: Synthetic oligonucleotide
cucgauggagaagggcuug

SEQ ID NO: 2187968 - RNA, 19 nt, Artificial Sequence
  Description of Artificial Sequence: Synthetic oligonucleotide
cuuggggacggcaucuuua

SEQ ID NO: 2187969 - RNA, 19 nt, Artificial Sequence
  Description of Artificial Sequence: Synthetic oligonucleotide
gagagguuuugggcauuag

SEQ ID NO: 2187970 - RNA, 19 nt, Artificial Sequence
  Description of Artificial Sequence: Synthetic oligonucleotide
gcauggcagcucaacaggg

SEQ ID NO: 2187971 - RNA, 19 nt, Artificial Sequence
  Description of Artificial Sequence: Synthetic oligonucleotide
aagugcuggugcugacgaa

SEQ ID NO: 2187972 - RNA, 19 nt, Artificial Sequence
  Description of Artificial Sequence: Synthetic oligonucleotide
uccgucgauuuuagccacu

SEQ ID NO: 2187973 - RNA, 19 nt, Artificial Sequence
  Description of Artificial Sequence: Synthetic oligonucleotide
ccgagguuguaccaaauca

SEQ ID NO: 2187974 - RNA, 19 nt, Artificial Sequence
  Description of Artificial Sequence: Synthetic oligonucleotide
gugcgacccagcaacagca

SEQ ID NO: 2187975 - RNA, 19 nt, Artificial Sequence
  Description of Artificial Sequence: Synthetic oligonucleotide
gacacuuacuccacaugcu

SEQ ID NO: 2187976 - RNA, 19 nt, Artificial Sequence
  Description of Artificial Sequence: Synthetic oligonucleotide
ugguuccaguggaaacuuc

SEQ ID NO: 2187977 - RNA, 19 nt, Artificial Sequence
  Description of Artificial Sequence: Synthetic oligonucleotide
ucccauagcacagcagcuu

SEQ ID NO: 2187978 - RNA, 19 nt, Artificial Sequence
  Description of Artificial Sequence: Synthetic oligonucleotide
gggaagaauucaugguguc

SEQ ID NO: 2187979 - RNA, 19 nt, Artificial Sequence
  Description of Artificial Sequence: Synthetic oligonucleotide
gguuguaccaaaucauuuu

SEQ ID NO: 2187980 - RNA, 19 nt, Artificial Sequence
  Description of Artificial Sequence: Synthetic oligonucleotide
uggggacggcaucuuuacu

SEQ ID NO: 2187981 - RNA, 19 nt, Artificial Sequence
  Description of Artificial Sequence: Synthetic oligonucleotide
ugaaccugcuggugccauc

SEQ ID NO: 2187982 - RNA, 19 nt, Artificial Sequence
  Description of Artificial Sequence: Synthetic oligonucleotide
ccaacgcuuuccacaauac

SEQ ID NO: 2187983 - RNA, 19 nt, Artificial Sequence
  Description of Artificial Sequence: Synthetic oligonucleotide
aggcucccauagcacagca

SEQ ID NO: 2187984 - RNA, 19 nt, Artificial Sequence
  Description of Artificial Sequence: Synthetic oligonucleotide
ugcgacccagcaacagcaa

SEQ ID NO: 2187985 - RNA, 19 nt, Artificial Sequence
  Description of Artificial Sequence: Synthetic oligonucleotide
ucagaacgucaggacagua

SEQ ID NO: 2187986 - RNA, 19 nt, Artificial Sequence
  Description of Artificial Sequence: Synthetic oligonucleotide
uggugaagcuccgucgauu

SEQ ID NO: 2187987 - RNA, 19 nt, Artificial Sequence
  Description of Artificial Sequence: Synthetic oligonucleotide
cuauguccucgauggagaa

SEQ ID NO: 2187988 - RNA, 19 nt, Artificial Sequence
  Description of Artificial Sequence: Synthetic oligonucleotide
gccacaagcuuggggacgg

SEQ ID NO: 2187989 - RNA, 19 nt, Artificial Sequence
  Description of Artificial Sequence: Synthetic oligonucleotide
agguguaaccaagcuucca

SEQ ID NO: 2187990 - RNA, 19 nt, Artificial Sequence
  Description of Artificial Sequence: Synthetic oligonucleotide
gacaguacggauacucuuu

SEQ ID NO: 2187991 - RNA, 19 nt, Artificial Sequence
  Description of Artificial Sequence: Synthetic oligonucleotide
guccucgauggagaagggc

SEQ ID NO: 2187992 - RNA, 19 nt, Artificial Sequence
  Description of Artificial Sequence: Synthetic oligonucleotide
gcaacaugggguucacgga

SEQ ID NO: 2187993 - RNA, 19 nt, Artificial Sequence
  Description of Artificial Sequence: Synthetic oligonucleotide
ccacaugcugcauggcagc

SEQ ID NO: 2187994 - RNA, 19 nt, Artificial Sequence
  Description of Artificial Sequence: Synthetic oligonucleotide
gacggcaucuuuacucuua

SEQ ID NO: 2187995 - RNA, 19 nt, Artificial Sequence
  Description of Artificial Sequence: Synthetic oligonucleotide
cugcaggaagagguguaac

SEQ ID NO: 2187996 - RNA, 19 nt, Artificial Sequence
  Description of Artificial Sequence: Synthetic oligonucleotide
aggugcgacccagcaacag

SEQ ID NO: 2187997 - RNA, 19 nt, Artificial Sequence
  Description of Artificial Sequence: Synthetic oligonucleotide
gagguuguaccaaaucauu

SEQ ID NO: 2187998 - RNA, 19 nt, Artificial Sequence
  Description of Artificial Sequence: Synthetic oligonucleotide
ccaucuuaaugcgaacuuc

SEQ ID NO: 2187999 - RNA, 19 nt, Artificial Sequence
  Description of Artificial Sequence: Synthetic oligonucleotide
guguccagucgaccgauua

SEQ ID NO: 2188000 - RNA, 19 nt, Artificial Sequence
  Description of Artificial Sequence: Synthetic oligonucleotide
acuuuaucgccugguuuua

SEQ ID NO: 2188001 - RNA, 19 nt, Artificial Sequence
  Description of Artificial Sequence: Synthetic oligonucleotide
ggccauaaaaucagccaca

SEQ ID NO: 2188002 - RNA, 19 nt, Artificial Sequence
  Description of Artificial Sequence: Synthetic oligonucleotide
uaggaggcaccccgacaau

SEQ ID NO: 2188003 - RNA, 19 nt, Artificial Sequence
  Description of Artificial Sequence: Synthetic oligonucleotide
gccuuugcaaaaggcagac

SEQ ID NO: 2188004 - RNA, 19 nt, Artificial Sequence
  Description of Artificial Sequence: Synthetic oligonucleotide
acgcccguggccaccaucu

SEQ ID NO: 2188005 - RNA, 19 nt, Artificial Sequence
  Description of Artificial Sequence: Synthetic oligonucleotide
uguagucuugaggguugau

SEQ ID NO: 2188006 - RNA, 19 nt, Artificial Sequence
  Description of Artificial Sequence: Synthetic oligonucleotide
ccauccgucauuuccugga

SEQ ID NO: 2188007 - RNA, 19 nt, Artificial Sequence
  Description of Artificial Sequence: Synthetic oligonucleotide
caugcugucuguccuugcu

SEQ ID NO: 2188008 - RNA, 19 nt, Artificial Sequence
  Description of Artificial Sequence: Synthetic oligonucleotide
ggguuuguuguagucuuga

SEQ ID NO: 2188009 - RNA, 19 nt, Artificial Sequence
  Description of Artificial Sequence: Synthetic oligonucleotide
gccaccaucuuaaugcgaa

SEQ ID NO: 2188010 - RNA, 19 nt, Artificial Sequence
  Description of Artificial Sequence: Synthetic oligonucleotide
guguggucucagaacguca

SEQ ID NO: 2188011 - RNA, 19 nt, Artificial Sequence
  Description of Artificial Sequence: Synthetic oligonucleotide
uagccacugcuaucucauc

SEQ ID NO: 2188012 - RNA, 19 nt, Artificial Sequence
  Description of Artificial Sequence: Synthetic oligonucleotide
ucgaguggugaagcuccgu

SEQ ID NO: 2188013 - RNA, 19 nt, Artificial Sequence
  Description of Artificial Sequence: Synthetic oligonucleotide
gcgacuucuauguccucga

SEQ ID NO: 2188014 - RNA, 19 nt, Artificial Sequence
  Description of Artificial Sequence: Synthetic oligonucleotide
cuuccacuaaccacaugau

SEQ ID NO: 2188015 - RNA, 19 nt, Artificial Sequence
  Description of Artificial Sequence: Synthetic oligonucleotide
aggcaccccgacaaugaca

SEQ ID NO: 2188016 - RNA, 19 nt, Artificial Sequence
  Description of Artificial Sequence: Synthetic oligonucleotide
ccacugcuaucucaucuac

SEQ ID NO: 2188017 - RNA, 19 nt, Artificial Sequence
  Description of Artificial Sequence: Synthetic oligonucleotide
caauaccggcucccucaug

SEQ ID NO: 2188018 - RNA, 19 nt, Artificial Sequence
  Description of Artificial Sequence: Synthetic oligonucleotide
auacucuuuccagcacgaa

SEQ ID NO: 2188019 - RNA, 19 nt, Artificial Sequence
  Description of Artificial Sequence: Synthetic oligonucleotide
gccauaaaaucagccacaa

SEQ ID NO: 2188020 - RNA, 19 nt, Artificial Sequence
  Description of Artificial Sequence: Synthetic oligonucleotide
gacgcccguggccaccauc

SEQ ID NO: 2188021 - RNA, 19 nt, Artificial Sequence
  Description of Artificial Sequence: Synthetic oligonucleotide
ggugcgacuucuauguccu

SEQ ID NO: 2188022 - RNA, 19 nt, Artificial Sequence
  Description of Artificial Sequence: Synthetic oligonucleotide
ggaggcaccccgacaauga

SEQ ID NO: 2188023 - RNA, 19 nt, Artificial Sequence
  Description of Artificial Sequence: Synthetic oligonucleotide
gggacggcaucuuuacucu

SEQ ID NO: 2188024 - RNA, 19 nt, Artificial Sequence
  Description of Artificial Sequence: Synthetic oligonucleotide
agucgaccgauuacuucaa

SEQ ID NO: 2188025 - RNA, 19 nt, Artificial Sequence
  Description of Artificial Sequence: Synthetic oligonucleotide
cccgagguuguaccaaauc

SEQ ID NO: 2188026 - RNA, 19 nt, Artificial Sequence
  Description of Artificial Sequence: Synthetic oligonucleotide
cacaagcuuggggacggca

SEQ ID NO: 2188027 - RNA, 19 nt, Artificial Sequence
  Description of Artificial Sequence: Synthetic oligonucleotide
cacucuguugcacccaauu

SEQ ID NO: 2188028 - RNA, 19 nt, Artificial Sequence
  Description of Artificial Sequence: Synthetic oligonucleotide
ggcuuccccuugcagguga

SEQ ID NO: 2188029 - RNA, 19 nt, Artificial Sequence
  Description of Artificial Sequence: Synthetic oligonucleotide
cgaguggugaagcuccguc

SEQ ID NO: 2188030 - RNA, 19 nt, Artificial Sequence
  Description of Artificial Sequence: Synthetic oligonucleotide
gguucacggagagguuuug

SEQ ID NO: 2188031 - RNA, 19 nt, Artificial Sequence
  Description of Artificial Sequence: Synthetic oligonucleotide
uggaaacuucuuggccaua

SEQ ID NO: 2188032 - RNA, 19 nt, Artificial Sequence
  Description of Artificial Sequence: Synthetic oligonucleotide
ggacaguacggauacucuu

SEQ ID NO: 2188033 - RNA, 19 nt, Artificial Sequence
  Description of Artificial Sequence: Synthetic oligonucleotide
gucgaccgauuacuucaaa

SEQ ID NO: 2188034 - RNA, 19 nt, Artificial Sequence
  Description of Artificial Sequence: Synthetic oligonucleotide
gaggguugaugcacucugu

SEQ ID NO: 2188035 - RNA, 19 nt, Artificial Sequence
  Description of Artificial Sequence: Synthetic oligonucleotide
cagcacgaagcagaucaaa

SEQ ID NO: 2188036 - RNA, 19 nt, Artificial Sequence
  Description of Artificial Sequence: Synthetic oligonucleotide
cccguggccaccaucuuaa

SEQ ID NO: 2188037 - RNA, 19 nt, Artificial Sequence
  Description of Artificial Sequence: Synthetic oligonucleotide
caggugcgacccagcaaca

SEQ ID NO: 2188038 - RNA, 19 nt, Artificial Sequence
  Description of Artificial Sequence: Synthetic oligonucleotide
ugcgaacuucaugggccuu

SEQ ID NO: 2188039 - RNA, 19 nt, Artificial Sequence
  Description of Artificial Sequence: Synthetic oligonucleotide
ggcucccauagcacagcag

SEQ ID NO: 2188040 - RNA, 19 nt, Artificial Sequence
  Description of Artificial Sequence: Synthetic oligonucleotide
caccccgacaaugacacuu

SEQ ID NO: 2188041 - RNA, 19 nt, Artificial Sequence
  Description of Artificial Sequence: Synthetic oligonucleotide
acccugcauuuuccacacu

SEQ ID NO: 2188042 - RNA, 19 nt, Artificial Sequence
  Description of Artificial Sequence: Synthetic oligonucleotide
ccgucgauuuuagccacug

SEQ ID NO: 2188043 - RNA, 19 nt, Artificial Sequence
  Description of Artificial Sequence: Synthetic oligonucleotide
accccuucuccaacgcuuu

SEQ ID NO: 2188044 - RNA, 19 nt, Artificial Sequence
  Description of Artificial Sequence: Synthetic oligonucleotide
caguguggucucagaacgu

SEQ ID NO: 2188045 - RNA, 19 nt, Artificial Sequence
  Description of Artificial Sequence: Synthetic oligonucleotide
cagcucaacagggaagaau

SEQ ID NO: 2188046 - RNA, 19 nt, Artificial Sequence
  Description of Artificial Sequence: Synthetic oligonucleotide
cgucgauuuuagccacugc

SEQ ID NO: 2188047 - RNA, 19 nt, Artificial Sequence
  Description of Artificial Sequence: Synthetic oligonucleotide
cugaacggcagacgcccgu

SEQ ID NO: 2188048 - RNA, 19 nt, Artificial Sequence
  Description of Artificial Sequence: Synthetic oligonucleotide
ccgucauuuccuggaguac

SEQ ID NO: 2188049 - RNA, 19 nt, Artificial Sequence
  Description of Artificial Sequence: Synthetic oligonucleotide
cgauuacuucaaaggaaaa

SEQ ID NO: 2188050 - RNA, 19 nt, Artificial Sequence
  Description of Artificial Sequence: Synthetic oligonucleotide
cgagguuguaccaaaucau

SEQ ID NO: 2188051 - RNA, 19 nt, Artificial Sequence
  Description of Artificial Sequence: Synthetic oligonucleotide
guccaccccuccauccguc

SEQ ID NO: 2188052 - RNA, 19 nt, Artificial Sequence
  Description of Artificial Sequence: Synthetic oligonucleotide
cucagaacgucaggacagu

SEQ ID NO: 2188053 - RNA, 19 nt, Artificial Sequence
  Description of Artificial Sequence: Synthetic oligonucleotide
gugcgacuucuauguccuc

SEQ ID NO: 2188054 - RNA, 19 nt, Artificial Sequence
  Description of Artificial Sequence: Synthetic oligonucleotide
cggauacucuuuccagcac

SEQ ID NO: 2188055 - RNA, 19 nt, Artificial Sequence
  Description of Artificial Sequence: Synthetic oligonucleotide
cgauuuuagccacugcuau

SEQ ID NO: 2188056 - RNA, 19 nt, Artificial Sequence
  Description of Artificial Sequence: Synthetic oligonucleotide
cgucaggacaguacggaua

SEQ ID NO: 2188057 - RNA, 19 nt, Artificial Sequence
  Description of Artificial Sequence: Synthetic oligonucleotide
ccccgacaaugacacuuac

SEQ ID NO: 2188058 - RNA, 19 nt, Artificial Sequence
  Description of Artificial Sequence: Synthetic oligonucleotide
ggcuugugaggcucccaua

SEQ ID NO: 2188059 - RNA, 19 nt, Artificial Sequence
  Description of Artificial Sequence: Synthetic oligonucleotide
ggggugcgacuucuauguc

SEQ ID NO: 2188060 - RNA, 19 nt, Artificial Sequence
  Description of Artificial Sequence: Synthetic oligonucleotide
cuguugcacccaauucuuu

SEQ ID NO: 2188061 - RNA, 19 nt, Artificial Sequence
  Description of Artificial Sequence: Synthetic oligonucleotide
cagacgcccguggccacca

SEQ ID NO: 2188062 - RNA, 19 nt, Artificial Sequence
  Description of Artificial Sequence: Synthetic oligonucleotide
ggccaccaucuuaaugcga

SEQ ID NO: 2188063 - RNA, 19 nt, Artificial Sequence
  Description of Artificial Sequence: Synthetic oligonucleotide
gugaagcuccgucgauuuu

SEQ ID NO: 2188064 - RNA, 19 nt, Artificial Sequence
  Description of Artificial Sequence: Synthetic oligonucleotide
cccgacaaugacacuuacu

SEQ ID NO: 2188065 - RNA, 19 nt, Artificial Sequence
  Description of Artificial Sequence: Synthetic oligonucleotide
gcccguggccaccaucuua

SEQ ID NO: 2188066 - RNA, 19 nt, Artificial Sequence
  Description of Artificial Sequence: Synthetic oligonucleotide
cgucauuuccuggaguacu

SEQ ID NO: 2188067 - RNA, 19 nt, Artificial Sequence
  Description of Artificial Sequence: Synthetic oligonucleotide
ccagcacgaagcagaucaa

SEQ ID NO: 2188068 - RNA, 19 nt, Artificial Sequence
  Description of Artificial Sequence: Synthetic oligonucleotide
agacgcccguggccaccau

SEQ ID NO: 2188069 - RNA, 19 nt, Artificial Sequence
  Description of Artificial Sequence: Synthetic oligonucleotide
cuuuuccagcugugcucau

SEQ ID NO: 2188070 - RNA, 19 nt, Artificial Sequence
  Description of Artificial Sequence: Synthetic oligonucleotide
gcuuugcacuugauuacuu

SEQ ID NO: 2188071 - RNA, 19 nt, Artificial Sequence
  Description of Artificial Sequence: Synthetic oligonucleotide
ccucgauggagaagggcuu

SEQ ID NO: 2188072 - RNA, 19 nt, Artificial Sequence
  Description of Artificial Sequence: Synthetic oligonucleotide
ggguucacggagagguuuu

SEQ ID NO: 2188073 - RNA, 19 nt, Artificial Sequence
  Description of Artificial Sequence: Synthetic oligonucleotide
ccuggaguacuuccucaau

SEQ ID NO: 2188074 - RNA, 19 nt, Artificial Sequence
  Description of Artificial Sequence: Synthetic oligonucleotide
ccacaagcuuggggacggc

SEQ ID NO: 2188075 - RNA, 19 nt, Artificial Sequence
  Description of Artificial Sequence: Synthetic oligonucleotide
ggcucccucauggccuaaa

SEQ ID NO: 2188076 - RNA, 19 nt, Artificial Sequence
  Description of Artificial Sequence: Synthetic oligonucleotide
ccuuuccaggugcgaccca

SEQ ID NO: 2188077 - RNA, 19 nt, Artificial Sequence
  Description of Artificial Sequence: Synthetic oligonucleotide
ccuuugcaaaaggcagacu

SEQ ID NO: 2188078 - RNA, 19 nt, Artificial Sequence
  Description of Artificial Sequence: Synthetic oligonucleotide
ccggcucccucauggccua

SEQ ID NO: 2188079 - RNA, 19 nt, Artificial Sequence
  Description of Artificial Sequence: Synthetic oligonucleotide
ccccgagguuguaccaaau

SEQ ID NO: 2188080 - RNA, 19 nt, Artificial Sequence
  Description of Artificial Sequence: Synthetic oligonucleotide
cgacuucuauguccucgau

SEQ ID NO: 2188081 - RNA, 19 nt, Artificial Sequence
  Description of Artificial Sequence: Synthetic oligonucleotide
ccguggccaccaucuuaau

SEQ ID NO: 2188082 - RNA, 19 nt, Artificial Sequence
  Description of Artificial Sequence: Synthetic oligonucleotide
cggcucccucauggccuaa

SEQ ID NO: 2188083 - RNA, 19 nt, Artificial Sequence
  Description of Artificial Sequence: Synthetic oligonucleotide
aaaugggucagccugaagc

SEQ ID NO: 2188084 - RNA, 19 nt, Artificial Sequence
  Description of Artificial Sequence: Synthetic oligonucleotide
auuaaaaggacuucucgcc

SEQ ID NO: 2188085 - RNA, 19 nt, Artificial Sequence
  Description of Artificial Sequence: Synthetic oligonucleotide
aauaguaacauccuauaga

SEQ ID NO: 2188086 - RNA, 19 nt, Artificial Sequence
  Description of Artificial Sequence: Synthetic oligonucleotide
uacauuuucgcucauuccg

SEQ ID NO: 2188087 - RNA, 19 nt, Artificial Sequence
  Description of Artificial Sequence: Synthetic oligonucleotide
aaaaguuugagcuuuucca

SEQ ID NO: 2188088 - RNA, 19 nt, Artificial Sequence
  Description of Artificial Sequence: Synthetic oligonucleotide
aaagcauggaugcuguggc

SEQ ID NO: 2188089 - RNA, 19 nt, Artificial Sequence
  Description of Artificial Sequence: Synthetic oligonucleotide
aguaacauccuauagaaca

SEQ ID NO: 2188090 - RNA, 19 nt, Artificial Sequence
  Description of Artificial Sequence: Synthetic oligonucleotide
aaagucgagcauuuuaaac

SEQ ID NO: 2188091 - RNA, 19 nt, Artificial Sequence
  Description of Artificial Sequence: Synthetic oligonucleotide
cuaugcuucacacugaggg

SEQ ID NO: 2188092 - RNA, 19 nt, Artificial Sequence
  Description of Artificial Sequence: Synthetic oligonucleotide
agaauuuuaaagucgagca

SEQ ID NO: 2188093 - RNA, 19 nt, Artificial Sequence
  Description of Artificial Sequence: Synthetic oligonucleotide
uugagcuuuuccaacaugg

SEQ ID NO: 2188094 - RNA, 19 nt, Artificial Sequence
  Description of Artificial Sequence: Synthetic oligonucleotide
aucaaauuuaaaauguccc

SEQ ID NO: 2188095 - RNA, 19 nt, Artificial Sequence
  Description of Artificial Sequence: Synthetic oligonucleotide
aagucgagcauuuuaaaca

SEQ ID NO: 2188096 - RNA, 19 nt, Artificial Sequence
  Description of Artificial Sequence: Synthetic oligonucleotide
auuugacacacacacacac

SEQ ID NO: 2188097 - RNA, 19 nt, Artificial Sequence
  Description of Artificial Sequence: Synthetic oligonucleotide
uugacugaaagcauggaug

SEQ ID NO: 2188098 - RNA, 19 nt, Artificial Sequence
  Description of Artificial Sequence: Synthetic oligonucleotide
aauagauuugccaugguca

SEQ ID NO: 2188099 - RNA, 19 nt, Artificial Sequence
  Description of Artificial Sequence: Synthetic oligonucleotide
ucuccaaggaagcagauac

SEQ ID NO: 2188100 - RNA, 19 nt, Artificial Sequence
  Description of Artificial Sequence: Synthetic oligonucleotide
uugggaagaaaacuuuugg

SEQ ID NO: 2188101 - RNA, 19 nt, Artificial Sequence
  Description of Artificial Sequence: Synthetic oligonucleotide
ugugcgaugcccuugagug

SEQ ID NO: 2188102 - RNA, 19 nt, Artificial Sequence
  Description of Artificial Sequence: Synthetic oligonucleotide
ucagccugaagcaagcagg

SEQ ID NO: 2188103 - RNA, 19 nt, Artificial Sequence
  Description of Artificial Sequence: Synthetic oligonucleotide
aaaguucucugugcgaugc

SEQ ID NO: 2188104 - RNA, 19 nt, Artificial Sequence
  Description of Artificial Sequence: Synthetic oligonucleotide
ccaaccuuaaauuaaaagg

SEQ ID NO: 2188105 - RNA, 19 nt, Artificial Sequence
  Description of Artificial Sequence: Synthetic oligonucleotide
aauguccccaaguucagag

SEQ ID NO: 2188106 - RNA, 19 nt, Artificial Sequence
  Description of Artificial Sequence: Synthetic oligonucleotide
guugcauaggauuugacac

SEQ ID NO: 2188107 - RNA, 19 nt, Artificial Sequence
  Description of Artificial Sequence: Synthetic oligonucleotide
auaguaacauccuauagaa

SEQ ID NO: 2188108 - RNA, 19 nt, Artificial Sequence
  Description of Artificial Sequence: Synthetic oligonucleotide
agcagauacauuuucgcuc

SEQ ID NO: 2188109 - RNA, 19 nt, Artificial Sequence
  Description of Artificial Sequence: Synthetic oligonucleotide
aaguuugagcuuuuccaac

SEQ ID NO: 2188110 - RNA, 19 nt, Artificial Sequence
  Description of Artificial Sequence: Synthetic oligonucleotide
uuuggaauagauuugccau

SEQ ID NO: 2188111 - RNA, 19 nt, Artificial Sequence
  Description of Artificial Sequence: Synthetic oligonucleotide
uuaaagucgagcauuuuaa

SEQ ID NO: 2188112 - RNA, 19 nt, Artificial Sequence
  Description of Artificial Sequence: Synthetic oligonucleotide
gaagaaaacuuuuggcucc

SEQ ID NO: 2188113 - RNA, 19 nt, Artificial Sequence
  Description of Artificial Sequence: Synthetic oligonucleotide
uuuuggaauagauuugcca

SEQ ID NO: 2188114 - RNA, 19 nt, Artificial Sequence
  Description of Artificial Sequence: Synthetic oligonucleotide
aauaaauaguaacauccua

SEQ ID NO: 2188115 - RNA, 19 nt, Artificial Sequence
  Description of Artificial Sequence: Synthetic oligonucleotide
aaccuuaaauuaaaaggac

SEQ ID NO: 2188116 - RNA, 19 nt, Artificial Sequence
  Description of Artificial Sequence: Synthetic oligonucleotide
uucucauugcccuuugggg

SEQ ID NO: 2188117 - RNA, 19 nt, Artificial Sequence
  Description of Artificial Sequence: Synthetic oligonucleotide
aacuuuuggcuccuacugg

SEQ ID NO: 2188118 - RNA, 19 nt, Artificial Sequence
  Description of Artificial Sequence: Synthetic oligonucleotide
gaaaaguuugagcuuuucc

SEQ ID NO: 2188119 - RNA, 19 nt, Artificial Sequence
  Description of Artificial Sequence: Synthetic oligonucleotide
gaagcagauacauuuucgc

SEQ ID NO: 2188120 - RNA, 19 nt, Artificial Sequence
  Description of Artificial Sequence: Synthetic oligonucleotide
uugacacacacacacacac

SEQ ID NO: 2188121 - RNA, 19 nt, Artificial Sequence
  Description of Artificial Sequence: Synthetic oligonucleotide
caaccuuaaauuaaaagga

SEQ ID NO: 2188122 - RNA, 19 nt, Artificial Sequence
  Description of Artificial Sequence: Synthetic oligonucleotide
ugacugaaagcauggaugc

SEQ ID NO: 2188123 - RNA, 19 nt, Artificial Sequence
  Description of Artificial Sequence: Synthetic oligonucleotide
uguugcauaggauuugaca

SEQ ID NO: 2188124 - RNA, 19 nt, Artificial Sequence
  Description of Artificial Sequence: Synthetic oligonucleotide
cacaguuggacuauuuugc

SEQ ID NO: 2188125 - RNA, 19 nt, Artificial Sequence
  Description of Artificial Sequence: Synthetic oligonucleotide
cuugagugcaaucuuuggg

SEQ ID NO: 2188126 - RNA, 19 nt, Artificial Sequence
  Description of Artificial Sequence: Synthetic oligonucleotide
ugucccuggauguugagcc

SEQ ID NO: 2188127 - RNA, 19 nt, Artificial Sequence
  Description of Artificial Sequence: Synthetic oligonucleotide
ucaaauuugggcacacaga

SEQ ID NO: 2188128 - RNA, 19 nt, Artificial Sequence
  Description of Artificial Sequence: Synthetic oligonucleotide
  modified_base (15)..(15): a, c, u, g, unknown or other
cacacacacacacanaccc

SEQ ID NO: 2188129 - RNA, 19 nt, Artificial Sequence
  Description of Artificial Sequence: Synthetic oligonucleotide
uggauguugagccuucacc

SEQ ID NO: 2188130 - RNA, 19 nt, Artificial Sequence
  Description of Artificial Sequence: Synthetic oligonucleotide
aaaccucgggcccaguggg

SEQ ID NO: 2188131 - RNA, 19 nt, Artificial Sequence
  Description of Artificial Sequence: Synthetic oligonucleotide
uccaaucgcucacagcucg

SEQ ID NO: 2188132 - RNA, 19 nt, Artificial Sequence
  Description of Artificial Sequence: Synthetic oligonucleotide
acaaucaaauuuaaaaugu

SEQ ID NO: 2188133 - RNA, 19 nt, Artificial Sequence
  Description of Artificial Sequence: Synthetic oligonucleotide
ugggaagaaaacuuuuggc

SEQ ID NO: 2188134 - RNA, 19 nt, Artificial Sequence
  Description of Artificial Sequence: Synthetic oligonucleotide
  modified_base (7)..(7): a, c, u, g, unknown or other
cacacanaccccuucuucc

SEQ ID NO: 2188135 - RNA, 19 nt, Artificial Sequence
  Description of Artificial Sequence: Synthetic oligonucleotide
aaugggucagccugaagca

SEQ ID NO: 2188136 - RNA, 19 nt, Artificial Sequence
  Description of Artificial Sequence: Synthetic oligonucleotide
gaaagcauggaugcugugg

SEQ ID NO: 2188137 - RNA, 19 nt, Artificial Sequence
  Description of Artificial Sequence: Synthetic oligonucleotide
gacacacacacacacacac

SEQ ID NO: 2188138 - RNA, 19 nt, Artificial Sequence
  Description of Artificial Sequence: Synthetic oligonucleotide
aucugggcaagucuugccc

SEQ ID NO: 2188139 - RNA, 19 nt, Artificial Sequence
  Description of Artificial Sequence: Synthetic oligonucleotide
cauccuauagaacauguuc

SEQ ID NO: 2188140 - RNA, 19 nt, Artificial Sequence
  Description of Artificial Sequence: Synthetic oligonucleotide
cuucucgccucauugacgg

SEQ ID NO: 2188141 - RNA, 19 nt, Artificial Sequence
  Description of Artificial Sequence: Synthetic oligonucleotide
cauaggauuugacacacac

SEQ ID NO: 2188142 - RNA, 19 nt, Artificial Sequence
  Description of Artificial Sequence: Synthetic oligonucleotide
uuaaaaggacuucucgccu

SEQ ID NO: 2188143 - RNA, 19 nt, Artificial Sequence
  Description of Artificial Sequence: Synthetic oligonucleotide
uguuccauaaaugggucag

SEQ ID NO: 2188144 - RNA, 19 nt, Artificial Sequence
  Description of Artificial Sequence: Synthetic oligonucleotide
guaagugcccugcugaaag

SEQ ID NO: 2188145 - RNA, 19 nt, Artificial Sequence
  Description of Artificial Sequence: Synthetic oligonucleotide
aagcagauacauuuucgcu

SEQ ID NO: 2188146 - RNA, 19 nt, Artificial Sequence
  Description of Artificial Sequence: Synthetic oligonucleotide
uuuuccaacauggauuucu

SEQ ID NO: 2188147 - RNA, 19 nt, Artificial Sequence
  Description of Artificial Sequence: Synthetic oligonucleotide
ucauugacggccucuuggg

SEQ ID NO: 2188148 - RNA, 19 nt, Artificial Sequence
  Description of Artificial Sequence: Synthetic oligonucleotide
ucgagcauuuuaaacaauc

SEQ ID NO: 2188149 - RNA, 19 nt, Artificial Sequence
  Description of Artificial Sequence: Synthetic oligonucleotide
ggauuugacacacacacac

SEQ ID NO: 2188150 - RNA, 19 nt, Artificial Sequence
  Description of Artificial Sequence: Synthetic oligonucleotide
cagaauuuuaaagucgagc

SEQ ID NO: 2188151 - RNA, 19 nt, Artificial Sequence
  Description of Artificial Sequence: Synthetic oligonucleotide
gaauagauuugccaugguc

SEQ ID NO: 2188152 - RNA, 19 nt, Artificial Sequence
  Description of Artificial Sequence: Synthetic oligonucleotide
ugguaccucagcaucagug

SEQ ID NO: 2188153 - RNA, 19 nt, Artificial Sequence
  Description of Artificial Sequence: Synthetic oligonucleotide
uuacuguugaaaaguuuga

SEQ ID NO: 2188154 - RNA, 19 nt, Artificial Sequence
  Description of Artificial Sequence: Synthetic oligonucleotide
auaaauaguaacauccuau

SEQ ID NO: 2188155 - RNA, 19 nt, Artificial Sequence
  Description of Artificial Sequence: Synthetic oligonucleotide
  modified_base (17)..(17): a, c, u, g, unknown or other
cacacacacacacacanac

SEQ ID NO: 2188156 - RNA, 19 nt, Artificial Sequence
  Description of Artificial Sequence: Synthetic oligonucleotide
  modified_base (8)..(8): a, c, u, g, unknown or other
acacacanaccccuucuuc

SEQ ID NO: 2188157 - RNA, 19 nt, Artificial Sequence
  Description of Artificial Sequence: Synthetic oligonucleotide
uuggaauagauuugccaug

SEQ ID NO: 2188158 - RNA, 19 nt, Artificial Sequence
  Description of Artificial Sequence: Synthetic oligonucleotide
uccuauagaacauguucca

SEQ ID NO: 2188159 - RNA, 19 nt, Artificial Sequence
  Description of Artificial Sequence: Synthetic oligonucleotide
ugggcaggaucuccaaucg

SEQ ID NO: 2188160 - RNA, 19 nt, Artificial Sequence
  Description of Artificial Sequence: Synthetic oligonucleotide
ucaggugugggccuggaaa

SEQ ID NO: 2188161 - RNA, 19 nt, Artificial Sequence
  Description of Artificial Sequence: Synthetic oligonucleotide
cacacacacacacacacac

SEQ ID NO: 2188162 - RNA, 19 nt, Artificial Sequence
  Description of Artificial Sequence: Synthetic oligonucleotide
ucgcucucuucaaagcugg

SEQ ID NO: 2188163 - RNA, 19 nt, Artificial Sequence
  Description of Artificial Sequence: Synthetic oligonucleotide
gucaagacagcaaaccucc

SEQ ID NO: 2188164 - RNA, 19 nt, Artificial Sequence
  Description of Artificial Sequence: Synthetic oligonucleotide
uuugacacacacacacaca

SEQ ID NO: 2188165 - RNA, 19 nt, Artificial Sequence
  Description of Artificial Sequence: Synthetic oligonucleotide
agugggcuugacugaaagc

SEQ ID NO: 2188166 - RNA, 19 nt, Artificial Sequence
  Description of Artificial Sequence: Synthetic oligonucleotide
aguuaacaggaauggcagg

SEQ ID NO: 2188167 - RNA, 19 nt, Artificial Sequence
  Description of Artificial Sequence: Synthetic oligonucleotide
caagucuugcccuugucac

SEQ ID NO: 2188168 - RNA, 19 nt, Artificial Sequence
  Description of Artificial Sequence: Synthetic oligonucleotide
aggacuucucgccucauug

SEQ ID NO: 2188169 - RNA, 19 nt, Artificial Sequence
  Description of Artificial Sequence: Synthetic oligonucleotide
cuguugaaaaguuugagcu

SEQ ID NO: 2188170 - RNA, 19 nt, Artificial Sequence
  Description of Artificial Sequence: Synthetic oligonucleotide
uucagaggaagaucugggc

SEQ ID NO: 2188171 - RNA, 19 nt, Artificial Sequence
  Description of Artificial Sequence: Synthetic oligonucleotide
  modified_base (14)..(14): a, c, u, g, unknown or other
acacacacacacanacccc

SEQ ID NO: 2188172 - RNA, 19 nt, Artificial Sequence
  Description of Artificial Sequence: Synthetic oligonucleotide
aaguucucugugcgaugcc

SEQ ID NO: 2188173 - RNA, 19 nt, Artificial Sequence
  Description of Artificial Sequence: Synthetic oligonucleotide
  modified_base (16)..(16): a, c, u, g, unknown or other
acacacacacacacanacc

SEQ ID NO: 2188174 - RNA, 19 nt, Artificial Sequence
  Description of Artificial Sequence: Synthetic oligonucleotide
acauguuccauaaaugggu

SEQ ID NO: 2188175 - RNA, 19 nt, Artificial Sequence
  Description of Artificial Sequence: Synthetic oligonucleotide
caaaccucccuucaacagc

SEQ ID NO: 2188176 - RNA, 19 nt, Artificial Sequence
  Description of Artificial Sequence: Synthetic oligonucleotide
ucuuugggcugcuggaugc

SEQ ID NO: 2188177 - RNA, 19 nt, Artificial Sequence
  Description of Artificial Sequence: Synthetic oligonucleotide
uucuuguugguaagugccc

SEQ ID NO: 2188178 - RNA, 19 nt, Artificial Sequence
  Description of Artificial Sequence: Synthetic oligonucleotide
  modified_base (4)..(4): a, c, u, g, unknown or other
acanaccccuucuuccuuc

SEQ ID NO: 2188179 - RNA, 19 nt, Artificial Sequence
  Description of Artificial Sequence: Synthetic oligonucleotide
ucaguguugcauaggauuu

SEQ ID NO: 2188180 - RNA, 19 nt, Artificial Sequence
  Description of Artificial Sequence: Synthetic oligonucleotide
aggaucuccaaucgcucac

SEQ ID NO: 2188181 - RNA, 19 nt, Artificial Sequence
  Description of Artificial Sequence: Synthetic oligonucleotide
uugcauaggauuugacaca

SEQ ID NO: 2188182 - RNA, 19 nt, Artificial Sequence
  Description of Artificial Sequence: Synthetic oligonucleotide
uccuacugguaccucagca

SEQ ID NO: 2188183 - RNA, 19 nt, Artificial Sequence
  Description of Artificial Sequence: Synthetic oligonucleotide
ugcugaaaguucucugugc

SEQ ID NO: 2188184 - RNA, 19 nt, Artificial Sequence
  Description of Artificial Sequence: Synthetic oligonucleotide
gaugggaggaagcugagcu

SEQ ID NO: 2188185 - RNA, 19 nt, Artificial Sequence
  Description of Artificial Sequence: Synthetic oligonucleotide
uuuucgcucauuccgggau

SEQ ID NO: 2188186 - RNA, 19 nt, Artificial Sequence
  Description of Artificial Sequence: Synthetic oligonucleotide
uuccauaaaugggucagcc

SEQ ID NO: 2188187 - RNA, 19 nt, Artificial Sequence
  Description of Artificial Sequence: Synthetic oligonucleotide
cacagaauuuuaaagucga

SEQ ID NO: 2188188 - RNA, 19 nt, Artificial Sequence
  Description of Artificial Sequence: Synthetic oligonucleotide
agucuugcccuugucacac

SEQ ID NO: 2188189 - RNA, 19 nt, Artificial Sequence
  Description of Artificial Sequence: Synthetic oligonucleotide
agucgagcauuuuaaacaa

SEQ ID NO: 2188190 - RNA, 19 nt, Artificial Sequence
  Description of Artificial Sequence: Synthetic oligonucleotide
auagauuugccauggucaa

SEQ ID NO: 2188191 - RNA, 19 nt, Artificial Sequence
  Description of Artificial Sequence: Synthetic oligonucleotide
agcaguuaacaggaauggc

SEQ ID NO: 2188192 - RNA, 19 nt, Artificial Sequence
  Description of Artificial Sequence: Synthetic oligonucleotide
aacauccuauagaacaugu

SEQ ID NO: 2188193 - RNA, 19 nt, Artificial Sequence
  Description of Artificial Sequence: Synthetic oligonucleotide
ugugggccuggaaaccucg

SEQ ID NO: 2188194 - RNA, 19 nt, Artificial Sequence
  Description of Artificial Sequence: Synthetic oligonucleotide
ggcgcuaugcuucacacug

SEQ ID NO: 2188195 - RNA, 19 nt, Artificial Sequence
  Description of Artificial Sequence: Synthetic oligonucleotide
ugggucagccugaagcaag

SEQ ID NO: 2188196 - RNA, 19 nt, Artificial Sequence
  Description of Artificial Sequence: Synthetic oligonucleotide
cauggucaaauuugggcac

SEQ ID NO: 2188197 - RNA, 19 nt, Artificial Sequence
  Description of Artificial Sequence: Synthetic oligonucleotide
aucgcucacagcucguguc

SEQ ID NO: 2188198 - RNA, 19 nt, Artificial Sequence
  Description of Artificial Sequence: Synthetic oligonucleotide
accucccuucaacagcugc

SEQ ID NO: 2188199 - RNA, 19 nt, Artificial Sequence
  Description of Artificial Sequence: Synthetic oligonucleotide
aucuccaaucgcucacagc

SEQ ID NO: 2188200 - RNA, 19 nt, Artificial Sequence
  Description of Artificial Sequence: Synthetic oligonucleotide
cauuuucgcucauuccggg

SEQ ID NO: 2188201 - RNA, 19 nt, Artificial Sequence
  Description of Artificial Sequence: Synthetic oligonucleotide
uaaagucgagcauuuuaaa

SEQ ID NO: 2188202 - RNA, 19 nt, Artificial Sequence
  Description of Artificial Sequence: Synthetic oligonucleotide
uaccucagcaucaguguug

SEQ ID NO: 2188203 - RNA, 19 nt, Artificial Sequence
  Description of Artificial Sequence: Synthetic oligonucleotide
cucauugcccuuuggggag

SEQ ID NO: 2188204 - RNA, 19 nt, Artificial Sequence
  Description of Artificial Sequence: Synthetic oligonucleotide
aaaccucccuucaacagcu

SEQ ID NO: 2188205 - RNA, 19 nt, Artificial Sequence
  Description of Artificial Sequence: Synthetic oligonucleotide
aggucaagacagcaaaccu

SEQ ID NO: 2188206 - RNA, 19 nt, Artificial Sequence
  Description of Artificial Sequence: Synthetic oligonucleotide
ugcauaggauuugacacac

SEQ ID NO: 2188207 - RNA, 19 nt, Artificial Sequence
  Description of Artificial Sequence: Synthetic oligonucleotide
agaucugggcaagucuugc

SEQ ID NO: 2188208 - RNA, 19 nt, Artificial Sequence
  Description of Artificial Sequence: Synthetic oligonucleotide
acauuuucgcucauuccgg

SEQ ID NO: 2188209 - RNA, 19 nt, Artificial Sequence
  Description of Artificial Sequence: Synthetic oligonucleotide
uugacggccucuugggaag

SEQ ID NO: 2188210 - RNA, 19 nt, Artificial Sequence
  Description of Artificial Sequence: Synthetic oligonucleotide
uguugaaaaguuugagcuu

SEQ ID NO: 2188211 - RNA, 19 nt, Artificial Sequence
  Description of Artificial Sequence: Synthetic oligonucleotide
ccauaaaugggucagccug

SEQ ID NO: 2188212 - RNA, 19 nt, Artificial Sequence
  Description of Artificial Sequence: Synthetic oligonucleotide
aaucgcucacagcucgugu

SEQ ID NO: 2188213 - RNA, 19 nt, Artificial Sequence
  Description of Artificial Sequence: Synthetic oligonucleotide
uguugagccuucaccugcc

SEQ ID NO: 2188214 - RNA, 19 nt, Artificial Sequence
  Description of Artificial Sequence: Synthetic oligonucleotide
uacugguaccucagcauca

SEQ ID NO: 2188215 - RNA, 19 nt, Artificial Sequence
  Description of Artificial Sequence: Synthetic oligonucleotide
caggucaagacagcaaacc

SEQ ID NO: 2188216 - RNA, 19 nt, Artificial Sequence
  Description of Artificial Sequence: Synthetic oligonucleotide
acaguuggacuauuuugcu

SEQ ID NO: 2188217 - RNA, 19 nt, Artificial Sequence
  Description of Artificial Sequence: Synthetic oligonucleotide
accuuaaauuaaaaggacu

SEQ ID NO: 2188218 - RNA, 19 nt, Artificial Sequence
  Description of Artificial Sequence: Synthetic oligonucleotide
aagucuugcccuugucaca

SEQ ID NO: 2188219 - RNA, 19 nt, Artificial Sequence
  Description of Artificial Sequence: Synthetic oligonucleotide
aaguagaaagggcccugcu

SEQ ID NO: 2188220 - RNA, 19 nt, Artificial Sequence
  Description of Artificial Sequence: Synthetic oligonucleotide
auugacggccucuugggaa

SEQ ID NO: 2188221 - RNA, 19 nt, Artificial Sequence
  Description of Artificial Sequence: Synthetic oligonucleotide
ugagcuugccaauggcucu

SEQ ID NO: 2188222 - RNA, 19 nt, Artificial Sequence
  Description of Artificial Sequence: Synthetic oligonucleotide
gaaagggcccugcuagcag

SEQ ID NO: 2188223 - RNA, 19 nt, Artificial Sequence
  Description of Artificial Sequence: Synthetic oligonucleotide
gauuucugguugguugggg

SEQ ID NO: 2188224 - RNA, 19 nt, Artificial Sequence
  Description of Artificial Sequence: Synthetic oligonucleotide
gaaaguucucugugcgaug

SEQ ID NO: 2188225 - RNA, 19 nt, Artificial Sequence
  Description of Artificial Sequence: Synthetic oligonucleotide
uguggcgcuaugcuucaca

SEQ ID NO: 2188226 - RNA, 19 nt, Artificial Sequence
  Description of Artificial Sequence: Synthetic oligonucleotide
gacuucucgccucauugac

SEQ ID NO: 2188227 - RNA, 19 nt, Artificial Sequence
  Description of Artificial Sequence: Synthetic oligonucleotide
uccauaaaugggucagccu

SEQ ID NO: 2188228 - RNA, 19 nt, Artificial Sequence
  Description of Artificial Sequence: Synthetic oligonucleotide
cucauuccgggaugggagg

SEQ ID NO: 2188229 - RNA, 19 nt, Artificial Sequence
  Description of Artificial Sequence: Synthetic oligonucleotide
  modified_base (6)..(6): a, c, u, g, unknown or other
acacanaccccuucuuccu

SEQ ID NO: 2188230 - RNA, 19 nt, Artificial Sequence
  Description of Artificial Sequence: Synthetic oligonucleotide
uuucgcucauuccgggaug

SEQ ID NO: 2188231 - RNA, 19 nt, Artificial Sequence
  Description of Artificial Sequence: Synthetic oligonucleotide
aggacuguucuccaaggaa

SEQ ID NO: 2188232 - RNA, 19 nt, Artificial Sequence
  Description of Artificial Sequence: Synthetic oligonucleotide
guugguaagugcccugcug

SEQ ID NO: 2188233 - RNA, 19 nt, Artificial Sequence
  Description of Artificial Sequence: Synthetic oligonucleotide
ggagcaguuaacaggaaug

SEQ ID NO: 2188234 - RNA, 19 nt, Artificial Sequence
  Description of Artificial Sequence: Synthetic oligonucleotide
ugacacacacacacacaca

SEQ ID NO: 2188235 - RNA, 19 nt, Artificial Sequence
  Description of Artificial Sequence: Synthetic oligonucleotide
uugaaguagaaagggcccu

SEQ ID NO: 2188236 - RNA, 19 nt, Artificial Sequence
  Description of Artificial Sequence: Synthetic oligonucleotide
cacugagggacuugcugcg

SEQ ID NO: 2188237 - RNA, 19 nt, Artificial Sequence
  Description of Artificial Sequence: Synthetic oligonucleotide
ugcgaugcccuugagugca

SEQ ID NO: 2188238 - RNA, 19 nt, Artificial Sequence
  Description of Artificial Sequence: Synthetic oligonucleotide
uuaacaggaauggcaggac

SEQ ID NO: 2188239 - RNA, 19 nt, Artificial Sequence
  Description of Artificial Sequence: Synthetic oligonucleotide
ucucgccucauugacggcc

SEQ ID NO: 2188240 - RNA, 19 nt, Artificial Sequence
  Description of Artificial Sequence: Synthetic oligonucleotide
uucgcucauuccgggaugg

SEQ ID NO: 2188241 - RNA, 19 nt, Artificial Sequence
  Description of Artificial Sequence: Synthetic oligonucleotide
ucgcucacagcucgugucc

SEQ ID NO: 2188242 - RNA, 19 nt, Artificial Sequence
  Description of Artificial Sequence: Synthetic oligonucleotide
ucuuguugguaagugcccu

SEQ ID NO: 2188243 - RNA, 19 nt, Artificial Sequence
  Description of Artificial Sequence: Synthetic oligonucleotide
ucugggcaagucuugcccu

SEQ ID NO: 2188244 - RNA, 19 nt, Artificial Sequence
  Description of Artificial Sequence: Synthetic oligonucleotide
aagaaaacuuuuggcuccu

SEQ ID NO: 2188245 - RNA, 19 nt, Artificial Sequence
  Description of Artificial Sequence: Synthetic oligonucleotide
  modified_base (19)..(19): a, c, u, g, unknown or other
cacacacacacacacacan

SEQ ID NO: 2188246 - RNA, 19 nt, Artificial Sequence
  Description of Artificial Sequence: Synthetic oligonucleotide
cccaaccuuaaauuaaaag

SEQ ID NO: 2188247 - RNA, 19 nt, Artificial Sequence
  Description of Artificial Sequence: Synthetic oligonucleotide
cuugucacacucccacccc

SEQ ID NO: 2188248 - RNA, 19 nt, Artificial Sequence
  Description of Artificial Sequence: Synthetic oligonucleotide
  modified_base (2)..(2): a, c, u, g, unknown or other
anaccccuucuuccuucuc

SEQ ID NO: 2188249 - RNA, 19 nt, Artificial Sequence
  Description of Artificial Sequence: Synthetic oligonucleotide
gaaguagaaagggcccugc

SEQ ID NO: 2188250 - RNA, 19 nt, Artificial Sequence
  Description of Artificial Sequence: Synthetic oligonucleotide
aggaauggcaggacuguuc

SEQ ID NO: 2188251 - RNA, 19 nt, Artificial Sequence
  Description of Artificial Sequence: Synthetic oligonucleotide
uugggcacacagaauuuua

SEQ ID NO: 2188252 - RNA, 19 nt, Artificial Sequence
  Description of Artificial Sequence: Synthetic oligonucleotide
gggcuugaaguagaaaggg

SEQ ID NO: 2188253 - RNA, 19 nt, Artificial Sequence
  Description of Artificial Sequence: Synthetic oligonucleotide
auuuucgcucauuccggga

SEQ ID NO: 2188254 - RNA, 19 nt, Artificial Sequence
  Description of Artificial Sequence: Synthetic oligonucleotide
cuuucucauugcccuuugg

SEQ ID NO: 2188255 - RNA, 19 nt, Artificial Sequence
  Description of Artificial Sequence: Synthetic oligonucleotide
uguugguaagugcccugcu

SEQ ID NO: 2188256 - RNA, 19 nt, Artificial Sequence
  Description of Artificial Sequence: Synthetic oligonucleotide
cagugggcuugacugaaag

SEQ ID NO: 2188257 - RNA, 19 nt, Artificial Sequence
  Description of Artificial Sequence: Synthetic oligonucleotide
aguguugcauaggauuuga

SEQ ID NO: 2188258 - RNA, 19 nt, Artificial Sequence
  Description of Artificial Sequence: Synthetic oligonucleotide
acagaauuuuaaagucgag

SEQ ID NO: 2188259 - RNA, 19 nt, Artificial Sequence
  Description of Artificial Sequence: Synthetic oligonucleotide
acuucucgccucauugacg

SEQ ID NO: 2188260 - RNA, 19 nt, Artificial Sequence
  Description of Artificial Sequence: Synthetic oligonucleotide
gcaaaccucccuucaacag

SEQ ID NO: 2188261 - RNA, 19 nt, Artificial Sequence
  Description of Artificial Sequence: Synthetic oligonucleotide
ugggcuugacugaaagcau

SEQ ID NO: 2188262 - RNA, 19 nt, Artificial Sequence
  Description of Artificial Sequence: Synthetic oligonucleotide
gauuugacacacacacaca

SEQ ID NO: 2188263 - RNA, 19 nt, Artificial Sequence
  Description of Artificial Sequence: Synthetic oligonucleotide
auaggauuugacacacaca

SEQ ID NO: 2188264 - RNA, 19 nt, Artificial Sequence
  Description of Artificial Sequence: Synthetic oligonucleotide
aggugugggccuggaaacc

SEQ ID NO: 2188265 - RNA, 19 nt, Artificial Sequence
  Description of Artificial Sequence: Synthetic oligonucleotide
uuugggcacacagaauuuu

SEQ ID NO: 2188266 - RNA, 19 nt, Artificial Sequence
  Description of Artificial Sequence: Synthetic oligonucleotide
acugagggacuugcugcgc

SEQ ID NO: 2188267 - RNA, 19 nt, Artificial Sequence
  Description of Artificial Sequence: Synthetic oligonucleotide
aaguucagaggaagaucug

SEQ ID NO: 2188268 - RNA, 19 nt, Artificial Sequence
  Description of Artificial Sequence: Synthetic oligonucleotide
ugagggacuugcugcgcca

SEQ ID NO: 2188269 - RNA, 19 nt, Artificial Sequence
  Description of Artificial Sequence: Synthetic oligonucleotide
uuugggcugcuggaugcag

SEQ ID NO: 2188270 - RNA, 19 nt, Artificial Sequence
  Description of Artificial Sequence: Synthetic oligonucleotide
ggcaggacuguucuccaag

SEQ ID NO: 2188271 - RNA, 19 nt, Artificial Sequence
  Description of Artificial Sequence: Synthetic oligonucleotide
guugaaaaguuugagcuuu

SEQ ID NO: 2188272 - RNA, 19 nt, Artificial Sequence
  Description of Artificial Sequence: Synthetic oligonucleotide
ucgugucccuggauguuga

SEQ ID NO: 2188273 - RNA, 19 nt, Artificial Sequence
  Description of Artificial Sequence: Synthetic oligonucleotide
ccuugucacacucccaccc

SEQ ID NO: 2188274 - RNA, 19 nt, Artificial Sequence
  Description of Artificial Sequence: Synthetic oligonucleotide
auagaacauguuccauaaa

SEQ ID NO: 2188275 - RNA, 19 nt, Artificial Sequence
  Description of Artificial Sequence: Synthetic oligonucleotide
uggcugaggagcaguuaac

SEQ ID NO: 2188276 - RNA, 19 nt, Artificial Sequence
  Description of Artificial Sequence: Synthetic oligonucleotide
guggcgcuaugcuucacac

SEQ ID NO: 2188277 - RNA, 19 nt, Artificial Sequence
  Description of Artificial Sequence: Synthetic oligonucleotide
ccuugagugcaaucuuugg

SEQ ID NO: 2188278 - RNA, 19 nt, Artificial Sequence
  Description of Artificial Sequence: Synthetic oligonucleotide
uuggacuauuuugcuuuug

SEQ ID NO: 2188279 - RNA, 19 nt, Artificial Sequence
  Description of Artificial Sequence: Synthetic oligonucleotide
aaggacuucucgccucauu

SEQ ID NO: 2188280 - RNA, 19 nt, Artificial Sequence
  Description of Artificial Sequence: Synthetic oligonucleotide
uuggcuccuacugguaccu

SEQ ID NO: 2188281 - RNA, 19 nt, Artificial Sequence
  Description of Artificial Sequence: Synthetic oligonucleotide
cugcgccagggcuuggagg

SEQ ID NO: 2188282 - RNA, 19 nt, Artificial Sequence
  Description of Artificial Sequence: Synthetic oligonucleotide
uugcccuuuggggagcucu

SEQ ID NO: 2188283 - RNA, 19 nt, Artificial Sequence
  Description of Artificial Sequence: Synthetic oligonucleotide
uccgggaugggaggaagcu

SEQ ID NO: 2188284 - RNA, 19 nt, Artificial Sequence
  Description of Artificial Sequence: Synthetic oligonucleotide
uccaacuccucgcucucuu

SEQ ID NO: 2188285 - RNA, 19 nt, Artificial Sequence
  Description of Artificial Sequence: Synthetic oligonucleotide
ggucaagacagcaaaccuc

SEQ ID NO: 2188286 - RNA, 19 nt, Artificial Sequence
  Description of Artificial Sequence: Synthetic oligonucleotide
guuccauaaaugggucagc

SEQ ID NO: 2188287 - RNA, 19 nt, Artificial Sequence
  Description of Artificial Sequence: Synthetic oligonucleotide
ucauuccgggaugggagga

SEQ ID NO: 2188288 - RNA, 19 nt, Artificial Sequence
  Description of Artificial Sequence: Synthetic oligonucleotide
auuccgggaugggaggaag

SEQ ID NO: 2188289 - RNA, 19 nt, Artificial Sequence
  Description of Artificial Sequence: Synthetic oligonucleotide
aaccucgggcccagugggc

SEQ ID NO: 2188290 - RNA, 19 nt, Artificial Sequence
  Description of Artificial Sequence: Synthetic oligonucleotide
cuggauguugagccuucac

SEQ ID NO: 2188291 - RNA, 19 nt, Artificial Sequence
  Description of Artificial Sequence: Synthetic oligonucleotide
  modified_base (13)..(13): a, c, u, g, unknown or other
cacacacacacanaccccu

SEQ ID NO: 2188292 - RNA, 19 nt, Artificial Sequence
  Description of Artificial Sequence: Synthetic oligonucleotide
cuugacugaaagcauggau

SEQ ID NO: 2188293 - RNA, 19 nt, Artificial Sequence
  Description of Artificial Sequence: Synthetic oligonucleotide
caagcaggucaagacagca

SEQ ID NO: 2188294 - RNA, 19 nt, Artificial Sequence
  Description of Artificial Sequence: Synthetic oligonucleotide
ggcuugaaguagaaagggc

SEQ ID NO: 2188295 - RNA, 19 nt, Artificial Sequence
  Description of Artificial Sequence: Synthetic oligonucleotide
auaaaugggucagccugaa

SEQ ID NO: 2188296 - RNA, 19 nt, Artificial Sequence
  Description of Artificial Sequence: Synthetic oligonucleotide
gucacacucccaccccacc

SEQ ID NO: 2188297 - RNA, 19 nt, Artificial Sequence
  Description of Artificial Sequence: Synthetic oligonucleotide
uggucaaauuugggcacac

SEQ ID NO: 2188298 - RNA, 19 nt, Artificial Sequence
  Description of Artificial Sequence: Synthetic oligonucleotide
gaggucaugcugggcuggg

SEQ ID NO: 2188299 - RNA, 19 nt, Artificial Sequence
  Description of Artificial Sequence: Synthetic oligonucleotide
gggccuggaaaccucgggc

SEQ ID NO: 2188300 - RNA, 19 nt, Artificial Sequence
  Description of Artificial Sequence: Synthetic oligonucleotide
caguguugcauaggauuug

SEQ ID NO: 2188301 - RNA, 19 nt, Artificial Sequence
  Description of Artificial Sequence: Synthetic oligonucleotide
cuugcugcgccagggcuug

SEQ ID NO: 2188302 - RNA, 19 nt, Artificial Sequence
  Description of Artificial Sequence: Synthetic oligonucleotide
gugcgaugcccuugagugc

SEQ ID NO: 2188303 - RNA, 19 nt, Artificial Sequence
  Description of Artificial Sequence: Synthetic oligonucleotide
cuccaaucgcucacagcuc

SEQ ID NO: 2188304 - RNA, 19 nt, Artificial Sequence
  Description of Artificial Sequence: Synthetic oligonucleotide
ccuuaaauuaaaaggacuu

SEQ ID NO: 2188305 - RNA, 19 nt, Artificial Sequence
  Description of Artificial Sequence: Synthetic oligonucleotide
uagauuugccauggucaaa

SEQ ID NO: 2188306 - RNA, 19 nt, Artificial Sequence
  Description of Artificial Sequence: Synthetic oligonucleotide
gaauggcaggacuguucuc

SEQ ID NO: 2188307 - RNA, 19 nt, Artificial Sequence
  Description of Artificial Sequence: Synthetic oligonucleotide
cuagcagcuuccaacuccu

SEQ ID NO: 2188308 - RNA, 19 nt, Artificial Sequence
  Description of Artificial Sequence: Synthetic oligonucleotide
ugcccuugucacacuccca

SEQ ID NO: 2188309 - RNA, 19 nt, Artificial Sequence
  Description of Artificial Sequence: Synthetic oligonucleotide
gcccuugucacacucccac

SEQ ID NO: 2188310 - RNA, 19 nt, Artificial Sequence
  Description of Artificial Sequence: Synthetic oligonucleotide
ggauuucugguugguuggg

SEQ ID NO: 2188311 - RNA, 19 nt, Artificial Sequence
  Description of Artificial Sequence: Synthetic oligonucleotide
cucgugucccuggauguug

SEQ ID NO: 2188312 - RNA, 19 nt, Artificial Sequence
  Description of Artificial Sequence: Synthetic oligonucleotide
uggcgcuaugcuucacacu

SEQ ID NO: 2188313 - RNA, 19 nt, Artificial Sequence
  Description of Artificial Sequence: Synthetic oligonucleotide
aggauuugacacacacaca

SEQ ID NO: 2188314 - RNA, 19 nt, Artificial Sequence
  Description of Artificial Sequence: Synthetic oligonucleotide
gugucccuggauguugagc

SEQ ID NO: 2188315 - RNA, 19 nt, Artificial Sequence
  Description of Artificial Sequence: Synthetic oligonucleotide
caaucgcucacagcucgug

SEQ ID NO: 2188316 - RNA, 19 nt, Artificial Sequence
  Description of Artificial Sequence: Synthetic oligonucleotide
ugggcaagucuugcccuug

SEQ ID NO: 2188317 - RNA, 19 nt, Artificial Sequence
  Description of Artificial Sequence: Synthetic oligonucleotide
ccccuuuacuguugaaaag

SEQ ID NO: 2188318 - RNA, 19 nt, Artificial Sequence
  Description of Artificial Sequence: Synthetic oligonucleotide
cuuuacuguugaaaaguuu

SEQ ID NO: 2188319 - RNA, 19 nt, Artificial Sequence
  Description of Artificial Sequence: Synthetic oligonucleotide
cuccaaggaagcagauaca

SEQ ID NO: 2188320 - RNA, 19 nt, Artificial Sequence
  Description of Artificial Sequence: Synthetic oligonucleotide
gcucucuucaaagcugggc

SEQ ID NO: 2188321 - RNA, 19 nt, Artificial Sequence
  Description of Artificial Sequence: Synthetic oligonucleotide
agccugaagcaagcagguc

SEQ ID NO: 2188322 - RNA, 19 nt, Artificial Sequence
  Description of Artificial Sequence: Synthetic oligonucleotide
acacacacacacacacaca

SEQ ID NO: 2188323 - RNA, 19 nt, Artificial Sequence
  Description of Artificial Sequence: Synthetic oligonucleotide
cucacagcucgugucccug

SEQ ID NO: 2188324 - RNA, 19 nt, Artificial Sequence
  Description of Artificial Sequence: Synthetic oligonucleotide
uucucgccucauugacggc

SEQ ID NO: 2188325 - RNA, 19 nt, Artificial Sequence
  Description of Artificial Sequence: Synthetic oligonucleotide
ugcaaucuuugggcugcug

SEQ ID NO: 2188326 - RNA, 19 nt, Artificial Sequence
  Description of Artificial Sequence: Synthetic oligonucleotide
aagggcccugcuagcagcu

SEQ ID NO: 2188327 - RNA, 19 nt, Artificial Sequence
  Description of Artificial Sequence: Synthetic oligonucleotide
gggcuugacugaaagcaug

SEQ ID NO: 2188328 - RNA, 19 nt, Artificial Sequence
  Description of Artificial Sequence: Synthetic oligonucleotide
cauugacggccucuuggga

SEQ ID NO: 2188329 - RNA, 19 nt, Artificial Sequence
  Description of Artificial Sequence: Synthetic oligonucleotide
cugcuagcagcuuccaacu

SEQ ID NO: 2188330 - RNA, 19 nt, Artificial Sequence
  Description of Artificial Sequence: Synthetic oligonucleotide
caggacuguucuccaagga

SEQ ID NO: 2188331 - RNA, 19 nt, Artificial Sequence
  Description of Artificial Sequence: Synthetic oligonucleotide
ggacuucucgccucauuga

SEQ ID NO: 2188332 - RNA, 19 nt, Artificial Sequence
  Description of Artificial Sequence: Synthetic oligonucleotide
acauccuauagaacauguu

SEQ ID NO: 2188333 - RNA, 19 nt, Artificial Sequence
  Description of Artificial Sequence: Synthetic oligonucleotide
ucgcucauuccgggauggg

SEQ ID NO: 2188334 - RNA, 19 nt, Artificial Sequence
  Description of Artificial Sequence: Synthetic oligonucleotide
gggcacacagaauuuuaaa

SEQ ID NO: 2188335 - RNA, 19 nt, Artificial Sequence
  Description of Artificial Sequence: Synthetic oligonucleotide
aaaggacuucucgccucau

SEQ ID NO: 2188336 - RNA, 19 nt, Artificial Sequence
  Description of Artificial Sequence: Synthetic oligonucleotide
uggaugcuguggcgcuaug

SEQ ID NO: 2188337 - RNA, 19 nt, Artificial Sequence
  Description of Artificial Sequence: Synthetic oligonucleotide
gcuaugcuucacacugagg

SEQ ID NO: 2188338 - RNA, 19 nt, Artificial Sequence
  Description of Artificial Sequence: Synthetic oligonucleotide
ggaugcuguggcgcuaugc

SEQ ID NO: 2188339 - RNA, 19 nt, Artificial Sequence
  Description of Artificial Sequence: Synthetic oligonucleotide
ggcuccuacugguaccuca

SEQ ID NO: 2188340 - RNA, 19 nt, Artificial Sequence
  Description of Artificial Sequence: Synthetic oligonucleotide
gcuccuacugguaccucag

SEQ ID NO: 2188341 - RNA, 19 nt, Artificial Sequence
  Description of Artificial Sequence: Synthetic oligonucleotide
uggcaggacuguucuccaa

SEQ ID NO: 2188342 - RNA, 19 nt, Artificial Sequence
  Description of Artificial Sequence: Synthetic oligonucleotide
ugcccuuuggggagcucuu

SEQ ID NO: 2188343 - RNA, 19 nt, Artificial Sequence
  Description of Artificial Sequence: Synthetic oligonucleotide
ggcugaggagcaguuaaca

SEQ ID NO: 2188344 - RNA, 19 nt, Artificial Sequence
  Description of Artificial Sequence: Synthetic oligonucleotide
guguugcauaggauuugac

SEQ ID NO: 2188345 - RNA, 19 nt, Artificial Sequence
  Description of Artificial Sequence: Synthetic oligonucleotide
  modified_base (18)..(18): a, c, u, g, unknown or other
acacacacacacacacana

SEQ ID NO: 2188346 - RNA, 19 nt, Artificial Sequence
  Description of Artificial Sequence: Synthetic oligonucleotide
agcugcacaguuggacuau

SEQ ID NO: 2188347 - RNA, 19 nt, Artificial Sequence
  Description of Artificial Sequence: Synthetic oligonucleotide
ggcaggaucuccaaucgcu

SEQ ID NO: 2188348 - RNA, 19 nt, Artificial Sequence
  Description of Artificial Sequence: Synthetic oligonucleotide
gggcaggaucuccaaucgc

SEQ ID NO: 2188349 - RNA, 19 nt, Artificial Sequence
  Description of Artificial Sequence: Synthetic oligonucleotide
cgcuaugcuucacacugag

SEQ ID NO: 2188350 - RNA, 19 nt, Artificial Sequence
  Description of Artificial Sequence: Synthetic oligonucleotide
ugacggccucuugggaaga

SEQ ID NO: 2188351 - RNA, 19 nt, Artificial Sequence
  Description of Artificial Sequence: Synthetic oligonucleotide
cagccugaagcaagcaggu

SEQ ID NO: 2188352 - RNA, 19 nt, Artificial Sequence
  Description of Artificial Sequence: Synthetic oligonucleotide
guaccucagcaucaguguu

SEQ ID NO: 2188353 - RNA, 19 nt, Artificial Sequence
  Description of Artificial Sequence: Synthetic oligonucleotide
auugcccuuuggggagcuc

SEQ ID NO: 2188354 - RNA, 19 nt, Artificial Sequence
  Description of Artificial Sequence: Synthetic oligonucleotide
ugcugcgccagggcuugga

SEQ ID NO: 2188355 - RNA, 19 nt, Artificial Sequence
  Description of Artificial Sequence: Synthetic oligonucleotide
gcaggucaagacagcaaac

SEQ ID NO: 2188356 - RNA, 19 nt, Artificial Sequence
  Description of Artificial Sequence: Synthetic oligonucleotide
gacugaaagcauggaugcu

SEQ ID NO: 2188357 - RNA, 19 nt, Artificial Sequence
  Description of Artificial Sequence: Synthetic oligonucleotide
aaccucccuucaacagcug

SEQ ID NO: 2188358 - RNA, 19 nt, Artificial Sequence
  Description of Artificial Sequence: Synthetic oligonucleotide
ccugcugaaaguucucugu

SEQ ID NO: 2188359 - RNA, 19 nt, Artificial Sequence
  Description of Artificial Sequence: Synthetic oligonucleotide
cacagcucgugucccugga

SEQ ID NO: 2188360 - RNA, 19 nt, Artificial Sequence
  Description of Artificial Sequence: Synthetic oligonucleotide
  modified_base (3)..(3): a, c, u, g, unknown or other
canaccccuucuuccuucu

SEQ ID NO: 2188361 - RNA, 19 nt, Artificial Sequence
  Description of Artificial Sequence: Synthetic oligonucleotide
ggaucuccaaucgcucaca

SEQ ID NO: 2188362 - RNA, 19 nt, Artificial Sequence
  Description of Artificial Sequence: Synthetic oligonucleotide
guuggacuauuuugcuuuu

SEQ ID NO: 2188363 - RNA, 19 nt, Artificial Sequence
  Description of Artificial Sequence: Synthetic oligonucleotide
agaaaacuuuuggcuccua

SEQ ID NO: 2188364 - RNA, 19 nt, Artificial Sequence
  Description of Artificial Sequence: Synthetic oligonucleotide
cugugcgaugcccuugagu

SEQ ID NO: 2188365 - RNA, 19 nt, Artificial Sequence
  Description of Artificial Sequence: Synthetic oligonucleotide
gguaagugcccugcugaaa

SEQ ID NO: 2188366 - RNA, 19 nt, Artificial Sequence
  Description of Artificial Sequence: Synthetic oligonucleotide
ucgccucauugacggccuc

SEQ ID NO: 2188367 - RNA, 19 nt, Artificial Sequence
  Description of Artificial Sequence: Synthetic oligonucleotide
gcuguggcgcuaugcuuca

SEQ ID NO: 2188368 - RNA, 19 nt, Artificial Sequence
  Description of Artificial Sequence: Synthetic oligonucleotide
gcuugacugaaagcaugga

SEQ ID NO: 2188369 - RNA, 19 nt, Artificial Sequence
  Description of Artificial Sequence: Synthetic oligonucleotide
gaggagcaguuaacaggaa

SEQ ID NO: 2188370 - RNA, 19 nt, Artificial Sequence
  Description of Artificial Sequence: Synthetic oligonucleotide
cucgccucauugacggccu

SEQ ID NO: 2188371 - RNA, 19 nt, Artificial Sequence
  Description of Artificial Sequence: Synthetic oligonucleotide
acggccucuugggaagaaa

SEQ ID NO: 2188372 - RNA, 19 nt, Artificial Sequence
  Description of Artificial Sequence: Synthetic oligonucleotide
ggaauagauuugccauggu

SEQ ID NO: 2188373 - RNA, 19 nt, Artificial Sequence
  Description of Artificial Sequence: Synthetic oligonucleotide
gcugagcuugccaauggcu

SEQ ID NO: 2188374 - RNA, 19 nt, Artificial Sequence
  Description of Artificial Sequence: Synthetic oligonucleotide
  modified_base (9)..(9): a, c, u, g, unknown or other
cacacacanaccccuucuu

SEQ ID NO: 2188375 - RNA, 19 nt, Artificial Sequence
  Description of Artificial Sequence: Synthetic oligonucleotide
cauuccgggaugggaggaa

SEQ ID NO: 2188376 - RNA, 19 nt, Artificial Sequence
  Description of Artificial Sequence: Synthetic oligonucleotide
ccuuuacuguugaaaaguu

SEQ ID NO: 2188377 - RNA, 19 nt, Artificial Sequence
  Description of Artificial Sequence: Synthetic oligonucleotide
ggcuucaggugugggccug

SEQ ID NO: 2188378 - RNA, 19 nt, Artificial Sequence
  Description of Artificial Sequence: Synthetic oligonucleotide
ggagcucuucuuguuggua

SEQ ID NO: 2188379 - RNA, 19 nt, Artificial Sequence
  Description of Artificial Sequence: Synthetic oligonucleotide
  modified_base (5)..(5): a, c, u, g, unknown or other
cacanaccccuucuuccuu

SEQ ID NO: 2188380 - RNA, 19 nt, Artificial Sequence
  Description of Artificial Sequence: Synthetic oligonucleotide
ggugugggccuggaaaccu

SEQ ID NO: 2188381 - RNA, 19 nt, Artificial Sequence
  Description of Artificial Sequence: Synthetic oligonucleotide
cauggauuucugguugguu

SEQ ID NO: 2188382 - RNA, 19 nt, Artificial Sequence
  Description of Artificial Sequence: Synthetic oligonucleotide
cuucaggugugggccugga

SEQ ID NO: 2188383 - RNA, 19 nt, Artificial Sequence
  Description of Artificial Sequence: Synthetic oligonucleotide
gacggccucuugggaagaa

SEQ ID NO: 2188384 - RNA, 19 nt, Artificial Sequence
  Description of Artificial Sequence: Synthetic oligonucleotide
uggcuccuacugguaccuc

SEQ ID NO: 2188385 - RNA, 19 nt, Artificial Sequence
  Description of Artificial Sequence: Synthetic oligonucleotide
gucgagcauuuuaaacaau

SEQ ID NO: 2188386 - RNA, 19 nt, Artificial Sequence
  Description of Artificial Sequence: Synthetic oligonucleotide
gcauaggauuugacacaca

SEQ ID NO: 2188387 - RNA, 19 nt, Artificial Sequence
  Description of Artificial Sequence: Synthetic oligonucleotide
cuguggcgcuaugcuucac

SEQ ID NO: 2188388 - RNA, 19 nt, Artificial Sequence
  Description of Artificial Sequence: Synthetic oligonucleotide
cugggcaagucuugcccuu

SEQ ID NO: 2188389 - RNA, 19 nt, Artificial Sequence
  Description of Artificial Sequence: Synthetic oligonucleotide
cgugucccuggauguugag

SEQ ID NO: 2188390 - RNA, 19 nt, Artificial Sequence
  Description of Artificial Sequence: Synthetic oligonucleotide
cuucaaagcugggcaggau

SEQ ID NO: 2188391 - RNA, 19 nt, Artificial Sequence
  Description of Artificial Sequence: Synthetic oligonucleotide
cccaaguucagaggaagau

SEQ ID NO: 2188392 - RNA, 19 nt, Artificial Sequence
  Description of Artificial Sequence: Synthetic oligonucleotide
ccuauagaacauguuccau

SEQ ID NO: 2188393 - RNA, 19 nt, Artificial Sequence
  Description of Artificial Sequence: Synthetic oligonucleotide
gcgcuaugcuucacacuga

SEQ ID NO: 2188394 - RNA, 19 nt, Artificial Sequence
  Description of Artificial Sequence: Synthetic oligonucleotide
gggcaagucuugcccuugu

SEQ ID NO: 2188395 - RNA, 19 nt, Artificial Sequence
  Description of Artificial Sequence: Synthetic oligonucleotide
gcccuuuggggagcucuuc

SEQ ID NO: 2188396 - RNA, 19 nt, Artificial Sequence
  Description of Artificial Sequence: Synthetic oligonucleotide
cauugcccuuuggggagcu

SEQ ID NO: 2188397 - RNA, 19 nt, Artificial Sequence
  Description of Artificial Sequence: Synthetic oligonucleotide
cccagugggcuugacugaa

SEQ ID NO: 2188398 - RNA, 19 nt, Artificial Sequence
  Description of Artificial Sequence: Synthetic oligonucleotide
cgcucauuccgggauggga

SEQ ID NO: 2188399 - RNA, 19 nt, Artificial Sequence
  Description of Artificial Sequence: Synthetic oligonucleotide
gcccugcugaaaguucucu

SEQ ID NO: 2188400 - RNA, 19 nt, Artificial Sequence
  Description of Artificial Sequence: Synthetic oligonucleotide
gcccuugagugcaaucuuu

SEQ ID NO: 2188401 - RNA, 19 nt, Artificial Sequence
  Description of Artificial Sequence: Synthetic oligonucleotide
ccaaucgcucacagcucgu

SEQ ID NO: 2188402 - RNA, 19 nt, Artificial Sequence
  Description of Artificial Sequence: Synthetic oligonucleotide
gcccugcuagcagcuucca

SEQ ID NO: 2188403 - RNA, 19 nt, Artificial Sequence
  Description of Artificial Sequence: Synthetic oligonucleotide
gcugcacaguuggacuauu

SEQ ID NO: 2188404 - RNA, 19 nt, Artificial Sequence
  Description of Artificial Sequence: Synthetic oligonucleotide
gcgaugcccuugagugcaa

SEQ ID NO: 2188405 - RNA, 19 nt, Artificial Sequence
  Description of Artificial Sequence: Synthetic oligonucleotide
cgaugcccuugagugcaau

SEQ ID NO: 2188406 - RNA, 19 nt, Artificial Sequence
  Description of Artificial Sequence: Synthetic oligonucleotide
aacaaggugauccagaagg

SEQ ID NO: 2188407 - RNA, 19 nt, Artificial Sequence
  Description of Artificial Sequence: Synthetic oligonucleotide
uaaaaguaggacaagaugc

SEQ ID NO: 2188408 - RNA, 19 nt, Artificial Sequence
  Description of Artificial Sequence: Synthetic oligonucleotide
uguuaauuuucuaagagcc

SEQ ID NO: 2188409 - RNA, 19 nt, Artificial Sequence
  Description of Artificial Sequence: Synthetic oligonucleotide
auggagaugguuucgaacc

SEQ ID NO: 2188410 - RNA, 19 nt, Artificial Sequence
  Description of Artificial Sequence: Synthetic oligonucleotide
augaccaacauguggaucc

SEQ ID NO: 2188411 - RNA, 19 nt, Artificial Sequence
  Description of Artificial Sequence: Synthetic oligonucleotide
uuucgaaccaauuucacca

SEQ ID NO: 2188412 - RNA, 19 nt, Artificial Sequence
  Description of Artificial Sequence: Synthetic oligonucleotide
auuagaagaaucauguugg

SEQ ID NO: 2188413 - RNA, 19 nt, Artificial Sequence
  Description of Artificial Sequence: Synthetic oligonucleotide
accugugucagucucaacc

SEQ ID NO: 2188414 - RNA, 19 nt, Artificial Sequence
  Description of Artificial Sequence: Synthetic oligonucleotide
uuuucuaagagccucggga

SEQ ID NO: 2188415 - RNA, 19 nt, Artificial Sequence
  Description of Artificial Sequence: Synthetic oligonucleotide
uuaaguauguuaauuuucu

SEQ ID NO: 2188416 - RNA, 19 nt, Artificial Sequence
  Description of Artificial Sequence: Synthetic oligonucleotide
auagauguuccugaaaacc

SEQ ID NO: 2188417 - RNA, 19 nt, Artificial Sequence
  Description of Artificial Sequence: Synthetic oligonucleotide
agaagaaucauguuggaga

SEQ ID NO: 2188418 - RNA, 19 nt, Artificial Sequence
  Description of Artificial Sequence: Synthetic oligonucleotide
aaagucacuggccaucacg

SEQ ID NO: 2188419 - RNA, 19 nt, Artificial Sequence
  Description of Artificial Sequence: Synthetic oligonucleotide
uacagcaaagacaaguugc

SEQ ID NO: 2188420 - RNA, 19 nt, Artificial Sequence
  Description of Artificial Sequence: Synthetic oligonucleotide
auaaaaguaggacaagaug

SEQ ID NO: 2188421 - RNA, 19 nt, Artificial Sequence
  Description of Artificial Sequence: Synthetic oligonucleotide
aacaccaguguccaugcac

SEQ ID NO: 2188422 - RNA, 19 nt, Artificial Sequence
  Description of Artificial Sequence: Synthetic oligonucleotide
aacauguggauccaaguca

SEQ ID NO: 2188423 - RNA, 19 nt, Artificial Sequence
  Description of Artificial Sequence: Synthetic oligonucleotide
aaguauguuaauuuucuaa

SEQ ID NO: 2188424 - RNA, 19 nt, Artificial Sequence
  Description of Artificial Sequence: Synthetic oligonucleotide
ucauagauguuccugaaaa

SEQ ID NO: 2188425 - RNA, 19 nt, Artificial Sequence
  Description of Artificial Sequence: Synthetic oligonucleotide
guaaaguucaggcagcugc

SEQ ID NO: 2188426 - RNA, 19 nt, Artificial Sequence
  Description of Artificial Sequence: Synthetic oligonucleotide
ucucauaaaaguaggacaa

SEQ ID NO: 2188427 - RNA, 19 nt, Artificial Sequence
  Description of Artificial Sequence: Synthetic oligonucleotide
gaacgaugaacucucagag

SEQ ID NO: 2188428 - RNA, 19 nt, Artificial Sequence
  Description of Artificial Sequence: Synthetic oligonucleotide
augguuucgaaccaauuuc

SEQ ID NO: 2188429 - RNA, 19 nt, Artificial Sequence
  Description of Artificial Sequence: Synthetic oligonucleotide
gaagaaucauguuggagag

SEQ ID NO: 2188430 - RNA, 19 nt, Artificial Sequence
  Description of Artificial Sequence: Synthetic oligonucleotide
aaccaugaccaacaugugg

SEQ ID NO: 2188431 - RNA, 19 nt, Artificial Sequence
  Description of Artificial Sequence: Synthetic oligonucleotide
auaacauggagaugguuuc

SEQ ID NO: 2188432 - RNA, 19 nt, Artificial Sequence
  Description of Artificial Sequence: Synthetic oligonucleotide
auccaagucagacucuugc

SEQ ID NO: 2188433 - RNA, 19 nt, Artificial Sequence
  Description of Artificial Sequence: Synthetic oligonucleotide
uccaacacgccauaaauga

SEQ ID NO: 2188434 - RNA, 19 nt, Artificial Sequence
  Description of Artificial Sequence: Synthetic oligonucleotide
agaaucauguuggagaguc

SEQ ID NO: 2188435 - RNA, 19 nt, Artificial Sequence
  Description of Artificial Sequence: Synthetic oligonucleotide
uccaugauuugucacagca

SEQ ID NO: 2188436 - RNA, 19 nt, Artificial Sequence
  Description of Artificial Sequence: Synthetic oligonucleotide
aguagucagucauagaugu

SEQ ID NO: 2188437 - RNA, 19 nt, Artificial Sequence
  Description of Artificial Sequence: Synthetic oligonucleotide
ggucauaacauggagaugg

SEQ ID NO: 2188438 - RNA, 19 nt, Artificial Sequence
  Description of Artificial Sequence: Synthetic oligonucleotide
acaagaaggagcuugcuga

SEQ ID NO: 2188439 - RNA, 19 nt, Artificial Sequence
  Description of Artificial Sequence: Synthetic oligonucleotide
acuuugauagaaggcaucc

SEQ ID NO: 2188440 - RNA, 19 nt, Artificial Sequence
  Description of Artificial Sequence: Synthetic oligonucleotide
aggagguucacauaggcca

SEQ ID NO: 2188441 - RNA, 19 nt, Artificial Sequence
  Description of Artificial Sequence: Synthetic oligonucleotide
ucagccacuuguaucaugc

SEQ ID NO: 2188442 - RNA, 19 nt, Artificial Sequence
  Description of Artificial Sequence: Synthetic oligonucleotide
cagaauacuugcuacagac

SEQ ID NO: 2188443 - RNA, 19 nt, Artificial Sequence
  Description of Artificial Sequence: Synthetic oligonucleotide
cuuaaguauguuaauuuuc

SEQ ID NO: 2188444 - RNA, 19 nt, Artificial Sequence
  Description of Artificial Sequence: Synthetic oligonucleotide
ugauagaaggcauccaaca

SEQ ID NO: 2188445 - RNA, 19 nt, Artificial Sequence
  Description of Artificial Sequence: Synthetic oligonucleotide
aauuucaccaccucacuuu

SEQ ID NO: 2188446 - RNA, 19 nt, Artificial Sequence
  Description of Artificial Sequence: Synthetic oligonucleotide
acuguuagaacgaugaacu

SEQ ID NO: 2188447 - RNA, 19 nt, Artificial Sequence
  Description of Artificial Sequence: Synthetic oligonucleotide
ugcaccaucaccgauggcc

SEQ ID NO: 2188448 - RNA, 19 nt, Artificial Sequence
  Description of Artificial Sequence: Synthetic oligonucleotide
uuaauuuucuaagagccuc

SEQ ID NO: 2188449 - RNA, 19 nt, Artificial Sequence
  Description of Artificial Sequence: Synthetic oligonucleotide
auucuguagaggcuacagc

SEQ ID NO: 2188450 - RNA, 19 nt, Artificial Sequence
  Description of Artificial Sequence: Synthetic oligonucleotide
agaugauugucucauaaaa

SEQ ID NO: 2188451 - RNA, 19 nt, Artificial Sequence
  Description of Artificial Sequence: Synthetic oligonucleotide
ugggagauggcaaagucac

SEQ ID NO: 2188452 - RNA, 19 nt, Artificial Sequence
  Description of Artificial Sequence: Synthetic oligonucleotide
ugagaugucugaauuggga

SEQ ID NO: 2188453 - RNA, 19 nt, Artificial Sequence
  Description of Artificial Sequence: Synthetic oligonucleotide
aaggugagaggugaguacg

SEQ ID NO: 2188454 - RNA, 19 nt, Artificial Sequence
  Description of Artificial Sequence: Synthetic oligonucleotide
guucacauaggccacauuc

SEQ ID NO: 2188455 - RNA, 19 nt, Artificial Sequence
  Description of Artificial Sequence: Synthetic oligonucleotide
gugaguacgccucugagug

SEQ ID NO: 2188456 - RNA, 19 nt, Artificial Sequence
  Description of Artificial Sequence: Synthetic oligonucleotide
aacacgccauaaaugaugg

SEQ ID NO: 2188457 - RNA, 19 nt, Artificial Sequence
  Description of Artificial Sequence: Synthetic oligonucleotide
ucaugcuaacaucauuugc

SEQ ID NO: 2188458 - RNA, 19 nt, Artificial Sequence
  Description of Artificial Sequence: Synthetic oligonucleotide
agauacgucuuucuccaac

SEQ ID NO: 2188459 - RNA, 19 nt, Artificial Sequence
  Description of Artificial Sequence: Synthetic oligonucleotide
caugcuaacaucauuugca

SEQ ID NO: 2188460 - RNA, 19 nt, Artificial Sequence
  Description of Artificial Sequence: Synthetic oligonucleotide
augcuaacaucauuugcac

SEQ ID NO: 2188461 - RNA, 19 nt, Artificial Sequence
  Description of Artificial Sequence: Synthetic oligonucleotide
auugggagauggcaaaguc

SEQ ID NO: 2188462 - RNA, 19 nt, Artificial Sequence
  Description of Artificial Sequence: Synthetic oligonucleotide
ucgggauucccacugagca

SEQ ID NO: 2188463 - RNA, 19 nt, Artificial Sequence
  Description of Artificial Sequence: Synthetic oligonucleotide
uacgucuuucuccaacacg

SEQ ID NO: 2188464 - RNA, 19 nt, Artificial Sequence
  Description of Artificial Sequence: Synthetic oligonucleotide
cuuucuaucaccaggugga

SEQ ID NO: 2188465 - RNA, 19 nt, Artificial Sequence
  Description of Artificial Sequence: Synthetic oligonucleotide
aauuuucuaagagccucgg

SEQ ID NO: 2188466 - RNA, 19 nt, Artificial Sequence
  Description of Artificial Sequence: Synthetic oligonucleotide
ugguagguaaaguaaggca

SEQ ID NO: 2188467 - RNA, 19 nt, Artificial Sequence
  Description of Artificial Sequence: Synthetic oligonucleotide
uuugaagggguguggcucg

SEQ ID NO: 2188468 - RNA, 19 nt, Artificial Sequence
  Description of Artificial Sequence: Synthetic oligonucleotide
cacgccauaaaugaugggg

SEQ ID NO: 2188469 - RNA, 19 nt, Artificial Sequence
  Description of Artificial Sequence: Synthetic oligonucleotide
aaaaguaggacaagaugcu

SEQ ID NO: 2188470 - RNA, 19 nt, Artificial Sequence
  Description of Artificial Sequence: Synthetic oligonucleotide
ucugaauugggagauggca

SEQ ID NO: 2188471 - RNA, 19 nt, Artificial Sequence
  Description of Artificial Sequence: Synthetic oligonucleotide
aaaguaggacaagaugcuc

SEQ ID NO: 2188472 - RNA, 19 nt, Artificial Sequence
  Description of Artificial Sequence: Synthetic oligonucleotide
gagaaugaugaacagagcu

SEQ ID NO: 2188473 - RNA, 19 nt, Artificial Sequence
  Description of Artificial Sequence: Synthetic oligonucleotide
uguagaggcuacagcaaag

SEQ ID NO: 2188474 - RNA, 19 nt, Artificial Sequence
  Description of Artificial Sequence: Synthetic oligonucleotide
gucucauaaaaguaggaca

SEQ ID NO: 2188475 - RNA, 19 nt, Artificial Sequence
  Description of Artificial Sequence: Synthetic oligonucleotide
aaucauguuggagagucgu

SEQ ID NO: 2188476 - RNA, 19 nt, Artificial Sequence
  Description of Artificial Sequence: Synthetic oligonucleotide
gucacagcagaauacuugc

SEQ ID NO: 2188477 - RNA, 19 nt, Artificial Sequence
  Description of Artificial Sequence: Synthetic oligonucleotide
agggucauaacauggagau

SEQ ID NO: 2188478 - RNA, 19 nt, Artificial Sequence
  Description of Artificial Sequence: Synthetic oligonucleotide
augucagccacuuguauca

SEQ ID NO: 2188479 - RNA, 19 nt, Artificial Sequence
  Description of Artificial Sequence: Synthetic oligonucleotide
agcauaaccugugucaguc

SEQ ID NO: 2188480 - RNA, 19 nt, Artificial Sequence
  Description of Artificial Sequence: Synthetic oligonucleotide
aucaccgauggccaggguc

SEQ ID NO: 2188481 - RNA, 19 nt, Artificial Sequence
  Description of Artificial Sequence: Synthetic oligonucleotide
gaggguaucuaggagacug

SEQ ID NO: 2188482 - RNA, 19 nt, Artificial Sequence
  Description of Artificial Sequence: Synthetic oligonucleotide
ugguuucgaaccaauuuca

SEQ ID NO: 2188483 - RNA, 19 nt, Artificial Sequence
  Description of Artificial Sequence: Synthetic oligonucleotide
uguuccugaaaacccgcag

SEQ ID NO: 2188484 - RNA, 19 nt, Artificial Sequence
  Description of Artificial Sequence: Synthetic oligonucleotide
guuucgaaccaauuucacc

SEQ ID NO: 2188485 - RNA, 19 nt, Artificial Sequence
  Description of Artificial Sequence: Synthetic oligonucleotide
ugucucauaaaaguaggac

SEQ ID NO: 2188486 - RNA, 19 nt, Artificial Sequence
  Description of Artificial Sequence: Synthetic oligonucleotide
gcuacagacauuucuaccc

SEQ ID NO: 2188487 - RNA, 19 nt, Artificial Sequence
  Description of Artificial Sequence: Synthetic oligonucleotide
acugagcauaaccuguguc

SEQ ID NO: 2188488 - RNA, 19 nt, Artificial Sequence
  Description of Artificial Sequence: Synthetic oligonucleotide
uucacauaggccacauucu

SEQ ID NO: 2188489 - RNA, 19 nt, Artificial Sequence
  Description of Artificial Sequence: Synthetic oligonucleotide
auuugucacagcagaauac

SEQ ID NO: 2188490 - RNA, 19 nt, Artificial Sequence
  Description of Artificial Sequence: Synthetic oligonucleotide
gaagaugauugucucauaa

SEQ ID NO: 2188491 - RNA, 19 nt, Artificial Sequence
  Description of Artificial Sequence: Synthetic oligonucleotide
aaacccgcagaagaacugg

SEQ ID NO: 2188492 - RNA, 19 nt, Artificial Sequence
  Description of Artificial Sequence: Synthetic oligonucleotide
ucaggggauucccaaaugu

SEQ ID NO: 2188493 - RNA, 19 nt, Artificial Sequence
  Description of Artificial Sequence: Synthetic oligonucleotide
uagaacgaugaacucucag

SEQ ID NO: 2188494 - RNA, 19 nt, Artificial Sequence
  Description of Artificial Sequence: Synthetic oligonucleotide
aaggagcuugcugagaugu

SEQ ID NO: 2188495 - RNA, 19 nt, Artificial Sequence
  Description of Artificial Sequence: Synthetic oligonucleotide
aaauuagaagaaucauguu

SEQ ID NO: 2188496 - RNA, 19 nt, Artificial Sequence
  Description of Artificial Sequence: Synthetic oligonucleotide
caacacgccauaaaugaug

SEQ ID NO: 2188497 - RNA, 19 nt, Artificial Sequence
  Description of Artificial Sequence: Synthetic oligonucleotide
cuaggagacuguuuugaag

SEQ ID NO: 2188498 - RNA, 19 nt, Artificial Sequence
  Description of Artificial Sequence: Synthetic oligonucleotide
agucucaaccccuaucuca

SEQ ID NO: 2188499 - RNA, 19 nt, Artificial Sequence
  Description of Artificial Sequence: Synthetic oligonucleotide
gcuaacaucauuugcacca

SEQ ID NO: 2188500 - RNA, 19 nt, Artificial Sequence
  Description of Artificial Sequence: Synthetic oligonucleotide
aagaggagguugaagaaga

SEQ ID NO: 2188501 - RNA, 19 nt, Artificial Sequence
  Description of Artificial Sequence: Synthetic oligonucleotide
gguaaaguaaggcacaaaa

SEQ ID NO: 2188502 - RNA, 19 nt, Artificial Sequence
  Description of Artificial Sequence: Synthetic oligonucleotide
auuuucuaagagccucggg

SEQ ID NO: 2188503 - RNA, 19 nt, Artificial Sequence
  Description of Artificial Sequence: Synthetic oligonucleotide
uuucuaagagccucgggau

SEQ ID NO: 2188504 - RNA, 19 nt, Artificial Sequence
  Description of Artificial Sequence: Synthetic oligonucleotide
ugcuacagacauuucuacc

SEQ ID NO: 2188505 - RNA, 19 nt, Artificial Sequence
  Description of Artificial Sequence: Synthetic oligonucleotide
guggauccaagucagacuc

SEQ ID NO: 2188506 - RNA, 19 nt, Artificial Sequence
  Description of Artificial Sequence: Synthetic oligonucleotide
gaauacuugcuacagacau

SEQ ID NO: 2188507 - RNA, 19 nt, Artificial Sequence
  Description of Artificial Sequence: Synthetic oligonucleotide
uagaagaaucauguuggag

SEQ ID NO: 2188508 - RNA, 19 nt, Artificial Sequence
  Description of Artificial Sequence: Synthetic oligonucleotide
guauguuaauuuucuaaga

SEQ ID NO: 2188509 - RNA, 19 nt, Artificial Sequence
  Description of Artificial Sequence: Synthetic oligonucleotide
ugaauugggagauggcaaa

SEQ ID NO: 2188510 - RNA, 19 nt, Artificial Sequence
  Description of Artificial Sequence: Synthetic oligonucleotide
agucagucauagauguucc

SEQ ID NO: 2188511 - RNA, 19 nt, Artificial Sequence
  Description of Artificial Sequence: Synthetic oligonucleotide
ugcacaagaaggagcuugc

SEQ ID NO: 2188512 - RNA, 19 nt, Artificial Sequence
  Description of Artificial Sequence: Synthetic oligonucleotide
gauacgucuuucuccaaca

SEQ ID NO: 2188513 - RNA, 19 nt, Artificial Sequence
  Description of Artificial Sequence: Synthetic oligonucleotide
ucuacccuuaaguauguua

SEQ ID NO: 2188514 - RNA, 19 nt, Artificial Sequence
  Description of Artificial Sequence: Synthetic oligonucleotide
gacaagaugcucccaacca

SEQ ID NO: 2188515 - RNA, 19 nt, Artificial Sequence
  Description of Artificial Sequence: Synthetic oligonucleotide
accugagacaccuauccca

SEQ ID NO: 2188516 - RNA, 19 nt, Artificial Sequence
  Description of Artificial Sequence: Synthetic oligonucleotide
gaagaacugguaccagaag

SEQ ID NO: 2188517 - RNA, 19 nt, Artificial Sequence
  Description of Artificial Sequence: Synthetic oligonucleotide
agacauuucuacccuuaag

SEQ ID NO: 2188518 - RNA, 19 nt, Artificial Sequence
  Description of Artificial Sequence: Synthetic oligonucleotide
guuagaacgaugaacucuc

SEQ ID NO: 2188519 - RNA, 19 nt, Artificial Sequence
  Description of Artificial Sequence: Synthetic oligonucleotide
agcacuguuagaacgauga

SEQ ID NO: 2188520 - RNA, 19 nt, Artificial Sequence
  Description of Artificial Sequence: Synthetic oligonucleotide
gcugagcacuguuagaacg

SEQ ID NO: 2188521 - RNA, 19 nt, Artificial Sequence
  Description of Artificial Sequence: Synthetic oligonucleotide
uugucucauaaaaguagga

SEQ ID NO: 2188522 - RNA, 19 nt, Artificial Sequence
  Description of Artificial Sequence: Synthetic oligonucleotide
uuccugaaaacccgcagaa

SEQ ID NO: 2188523 - RNA, 19 nt, Artificial Sequence
  Description of Artificial Sequence: Synthetic oligonucleotide
aguucaggcagcugcagga

SEQ ID NO: 2188524 - RNA, 19 nt, Artificial Sequence
  Description of Artificial Sequence: Synthetic oligonucleotide
aucaugcuaacaucauuug

SEQ ID NO: 2188525 - RNA, 19 nt, Artificial Sequence
  Description of Artificial Sequence: Synthetic oligonucleotide
auacgucuuucuccaacac

SEQ ID NO: 2188526 - RNA, 19 nt, Artificial Sequence
  Description of Artificial Sequence: Synthetic oligonucleotide
agauguuccugaaaacccg

SEQ ID NO: 2188527 - RNA, 19 nt, Artificial Sequence
  Description of Artificial Sequence: Synthetic oligonucleotide
cauagauguuccugaaaac

SEQ ID NO: 2188528 - RNA, 19 nt, Artificial Sequence
  Description of Artificial Sequence: Synthetic oligonucleotide
agggguguggcucggcagc

SEQ ID NO: 2188529 - RNA, 19 nt, Artificial Sequence
  Description of Artificial Sequence: Synthetic oligonucleotide
agaaggagcuugcugagau

SEQ ID NO: 2188530 - RNA, 19 nt, Artificial Sequence
  Description of Artificial Sequence: Synthetic oligonucleotide
gaacugguaccagaagagg

SEQ ID NO: 2188531 - RNA, 19 nt, Artificial Sequence
  Description of Artificial Sequence: Synthetic oligonucleotide
uuuugaagggguguggcuc

SEQ ID NO: 2188532 - RNA, 19 nt, Artificial Sequence
  Description of Artificial Sequence: Synthetic oligonucleotide
aacugguaccagaagagga

SEQ ID NO: 2188533 - RNA, 19 nt, Artificial Sequence
  Description of Artificial Sequence: Synthetic oligonucleotide
gguagguaaaguaaggcac

SEQ ID NO: 2188534 - RNA, 19 nt, Artificial Sequence
  Description of Artificial Sequence: Synthetic oligonucleotide
gcuuucuaucaccaggugg

SEQ ID NO: 2188535 - RNA, 19 nt, Artificial Sequence
  Description of Artificial Sequence: Synthetic oligonucleotide
cuacccuuaaguauguuaa

SEQ ID NO: 2188536 - RNA, 19 nt, Artificial Sequence
  Description of Artificial Sequence: Synthetic oligonucleotide
cauggagaugguuucgaac

SEQ ID NO: 2188537 - RNA, 19 nt, Artificial Sequence
  Description of Artificial Sequence: Synthetic oligonucleotide
agcagaauacuugcuacag

SEQ ID NO: 2188538 - RNA, 19 nt, Artificial Sequence
  Description of Artificial Sequence: Synthetic oligonucleotide
aggacaagaugcucccaac

SEQ ID NO: 2188539 - RNA, 19 nt, Artificial Sequence
  Description of Artificial Sequence: Synthetic oligonucleotide
ucuguagaggcuacagcaa

SEQ ID NO: 2188540 - RNA, 19 nt, Artificial Sequence
  Description of Artificial Sequence: Synthetic oligonucleotide
uggagagucguguguaaca

SEQ ID NO: 2188541 - RNA, 19 nt, Artificial Sequence
  Description of Artificial Sequence: Synthetic oligonucleotide
caacauguggauccaaguc

SEQ ID NO: 2188542 - RNA, 19 nt, Artificial Sequence
  Description of Artificial Sequence: Synthetic oligonucleotide
gaugaacagagcugcugug

SEQ ID NO: 2188543 - RNA, 19 nt, Artificial Sequence
  Description of Artificial Sequence: Synthetic oligonucleotide
gcauccaacaaggugaucc

SEQ ID NO: 2188544 - RNA, 19 nt, Artificial Sequence
  Description of Artificial Sequence: Synthetic oligonucleotide
cugagcauaaccuguguca

SEQ ID NO: 2188545 - RNA, 19 nt, Artificial Sequence
  Description of Artificial Sequence: Synthetic oligonucleotide
accaugaccaacaugugga

SEQ ID NO: 2188546 - RNA, 19 nt, Artificial Sequence
  Description of Artificial Sequence: Synthetic oligonucleotide
ugcuaacaucauuugcacc

SEQ ID NO: 2188547 - RNA, 19 nt, Artificial Sequence
  Description of Artificial Sequence: Synthetic oligonucleotide
uaccagaagaggagguuca

SEQ ID NO: 2188548 - RNA, 19 nt, Artificial Sequence
  Description of Artificial Sequence: Synthetic oligonucleotide
aauugggagauggcaaagu

SEQ ID NO: 2188549 - RNA, 19 nt, Artificial Sequence
  Description of Artificial Sequence: Synthetic oligonucleotide
uaacauggagaugguuucg

SEQ ID NO: 2188550 - RNA, 19 nt, Artificial Sequence
  Description of Artificial Sequence: Synthetic oligonucleotide
cacuguuagaacgaugaac

SEQ ID NO: 2188551 - RNA, 19 nt, Artificial Sequence
  Description of Artificial Sequence: Synthetic oligonucleotide
ugaaaacccgcagaagaac

SEQ ID NO: 2188552 - RNA, 19 nt, Artificial Sequence
  Description of Artificial Sequence: Synthetic oligonucleotide
ucgaaccaauuucaccacc

SEQ ID NO: 2188553 - RNA, 19 nt, Artificial Sequence
  Description of Artificial Sequence: Synthetic oligonucleotide
auacuugcuacagacauuu

SEQ ID NO: 2188554 - RNA, 19 nt, Artificial Sequence
  Description of Artificial Sequence: Synthetic oligonucleotide
cagacuuugauagaaggca

SEQ ID NO: 2188555 - RNA, 19 nt, Artificial Sequence
  Description of Artificial Sequence: Synthetic oligonucleotide
agaagaucagaacccagua

SEQ ID NO: 2188556 - RNA, 19 nt, Artificial Sequence
  Description of Artificial Sequence: Synthetic oligonucleotide
cugguagguaaaguaaggc

SEQ ID NO: 2188557 - RNA, 19 nt, Artificial Sequence
  Description of Artificial Sequence: Synthetic oligonucleotide
ugcagucagcuccaggaac

SEQ ID NO: 2188558 - RNA, 19 nt, Artificial Sequence
  Description of Artificial Sequence: Synthetic oligonucleotide
uaucuaggagacuguuuug

SEQ ID NO: 2188559 - RNA, 19 nt, Artificial Sequence
  Description of Artificial Sequence: Synthetic oligonucleotide
cugguaaaguucaggcagc

SEQ ID NO: 2188560 - RNA, 19 nt, Artificial Sequence
  Description of Artificial Sequence: Synthetic oligonucleotide
ucuaagagccucgggauuc

SEQ ID NO: 2188561 - RNA, 19 nt, Artificial Sequence
  Description of Artificial Sequence: Synthetic oligonucleotide
agacaccuaucccaauguc

SEQ ID NO: 2188562 - RNA, 19 nt, Artificial Sequence
  Description of Artificial Sequence: Synthetic oligonucleotide
cuacagcaaagacaaguug

SEQ ID NO: 2188563 - RNA, 19 nt, Artificial Sequence
  Description of Artificial Sequence: Synthetic oligonucleotide
gaagaagaucagaacccag

SEQ ID NO: 2188564 - RNA, 19 nt, Artificial Sequence
  Description of Artificial Sequence: Synthetic oligonucleotide
ggcagauacgucuuucucc

SEQ ID NO: 2188565 - RNA, 19 nt, Artificial Sequence
  Description of Artificial Sequence: Synthetic oligonucleotide
ucuugcuuucuaucaccag

SEQ ID NO: 2188566 - RNA, 19 nt, Artificial Sequence
  Description of Artificial Sequence: Synthetic oligonucleotide
uagaggcuacagcaaagac

SEQ ID NO: 2188567 - RNA, 19 nt, Artificial Sequence
  Description of Artificial Sequence: Synthetic oligonucleotide
cauaaccugugucagucuc

SEQ ID NO: 2188568 - RNA, 19 nt, Artificial Sequence
  Description of Artificial Sequence: Synthetic oligonucleotide
agaggcuacagcaaagaca

SEQ ID NO: 2188569 - RNA, 19 nt, Artificial Sequence
  Description of Artificial Sequence: Synthetic oligonucleotide
aaaacccgcagaagaacug

SEQ ID NO: 2188570 - RNA, 19 nt, Artificial Sequence
  Description of Artificial Sequence: Synthetic oligonucleotide
gauguuccugaaaacccgc

SEQ ID NO: 2188571 - RNA, 19 nt, Artificial Sequence
  Description of Artificial Sequence: Synthetic oligonucleotide
augcacaagaaggagcuug

SEQ ID NO: 2188572 - RNA, 19 nt, Artificial Sequence
  Description of Artificial Sequence: Synthetic oligonucleotide
cauucuguagaggcuacag

SEQ ID NO: 2188573 - RNA, 19 nt, Artificial Sequence
  Description of Artificial Sequence: Synthetic oligonucleotide
acauguggauccaagucag

SEQ ID NO: 2188574 - RNA, 19 nt, Artificial Sequence
  Description of Artificial Sequence: Synthetic oligonucleotide
cuccaacacgccauaaaug

SEQ ID NO: 2188575 - RNA, 19 nt, Artificial Sequence
  Description of Artificial Sequence: Synthetic oligonucleotide
aacauggagaugguuucga

SEQ ID NO: 2188576 - RNA, 19 nt, Artificial Sequence
  Description of Artificial Sequence: Synthetic oligonucleotide
uaaguauguuaauuuucua

SEQ ID NO: 2188577 - RNA, 19 nt, Artificial Sequence
  Description of Artificial Sequence: Synthetic oligonucleotide
uuucuacccuuaaguaugu

SEQ ID NO: 2188578 - RNA, 19 nt, Artificial Sequence
  Description of Artificial Sequence: Synthetic oligonucleotide
gacagacgugaagaggagg

SEQ ID NO: 2188579 - RNA, 19 nt, Artificial Sequence
  Description of Artificial Sequence: Synthetic oligonucleotide
ucacauaggccacauucuu

SEQ ID NO: 2188580 - RNA, 19 nt, Artificial Sequence
  Description of Artificial Sequence: Synthetic oligonucleotide
agucguguguaacaccagu

SEQ ID NO: 2188581 - RNA, 19 nt, Artificial Sequence
  Description of Artificial Sequence: Synthetic oligonucleotide
ucuaggagacuguuuugaa

SEQ ID NO: 2188582 - RNA, 19 nt, Artificial Sequence
  Description of Artificial Sequence: Synthetic oligonucleotide
gcaccaugcagucagcucc

SEQ ID NO: 2188583 - RNA, 19 nt, Artificial Sequence
  Description of Artificial Sequence: Synthetic oligonucleotide
gaauugggagauggcaaag

SEQ ID NO: 2188584 - RNA, 19 nt, Artificial Sequence
  Description of Artificial Sequence: Synthetic oligonucleotide
ucccacugagcauaaccug

SEQ ID NO: 2188585 - RNA, 19 nt, Artificial Sequence
  Description of Artificial Sequence: Synthetic oligonucleotide
cauccaugauuugucacag

SEQ ID NO: 2188586 - RNA, 19 nt, Artificial Sequence
  Description of Artificial Sequence: Synthetic oligonucleotide
ccaaccaugaccaacaugu

SEQ ID NO: 2188587 - RNA, 19 nt, Artificial Sequence
  Description of Artificial Sequence: Synthetic oligonucleotide
cacauaggccacauucuug

SEQ ID NO: 2188588 - RNA, 19 nt, Artificial Sequence
  Description of Artificial Sequence: Synthetic oligonucleotide
agaugcucccaaccaugac

SEQ ID NO: 2188589 - RNA, 19 nt, Artificial Sequence
  Description of Artificial Sequence: Synthetic oligonucleotide
gaugguuucgaaccaauuu

SEQ ID NO: 2188590 - RNA, 19 nt, Artificial Sequence
  Description of Artificial Sequence: Synthetic oligonucleotide
ucaaccccuaucucauucu

SEQ ID NO: 2188591 - RNA, 19 nt, Artificial Sequence
  Description of Artificial Sequence: Synthetic oligonucleotide
aucuaggagacuguuuuga

SEQ ID NO: 2188592 - RNA, 19 nt, Artificial Sequence
  Description of Artificial Sequence: Synthetic oligonucleotide
cauaacauggagaugguuu

SEQ ID NO: 2188593 - RNA, 19 nt, Artificial Sequence
  Description of Artificial Sequence: Synthetic oligonucleotide
gacaccuaucccaauguca

SEQ ID NO: 2188594 - RNA, 19 nt, Artificial Sequence
  Description of Artificial Sequence: Synthetic oligonucleotide
agacgugaagaggagguug

SEQ ID NO: 2188595 - RNA, 19 nt, Artificial Sequence
  Description of Artificial Sequence: Synthetic oligonucleotide
gauccagaaggugagaggu

SEQ ID NO: 2188596 - RNA, 19 nt, Artificial Sequence
  Description of Artificial Sequence: Synthetic oligonucleotide
caggggauucccaaaugug

SEQ ID NO: 2188597 - RNA, 19 nt, Artificial Sequence
  Description of Artificial Sequence: Synthetic oligonucleotide
uuagaacgaugaacucuca

SEQ ID NO: 2188598 - RNA, 19 nt, Artificial Sequence
  Description of Artificial Sequence: Synthetic oligonucleotide
acagacgugaagaggaggu

SEQ ID NO: 2188599 - RNA, 19 nt, Artificial Sequence
  Description of Artificial Sequence: Synthetic oligonucleotide
uaucccaaugucagccacu

SEQ ID NO: 2188600 - RNA, 19 nt, Artificial Sequence
  Description of Artificial Sequence: Synthetic oligonucleotide
cugagugcugaccacucug

SEQ ID NO: 2188601 - RNA, 19 nt, Artificial Sequence
  Description of Artificial Sequence: Synthetic oligonucleotide
cagacucuugcuuucuauc

SEQ ID NO: 2188602 - RNA, 19 nt, Artificial Sequence
  Description of Artificial Sequence: Synthetic oligonucleotide
aggugaguacgccucugag

SEQ ID NO: 2188603 - RNA, 19 nt, Artificial Sequence
  Description of Artificial Sequence: Synthetic oligonucleotide
ugcuuucuaucaccaggug

SEQ ID NO: 2188604 - RNA, 19 nt, Artificial Sequence
  Description of Artificial Sequence: Synthetic oligonucleotide
guaucuaggagacuguuuu

SEQ ID NO: 2188605 - RNA, 19 nt, Artificial Sequence
  Description of Artificial Sequence: Synthetic oligonucleotide
cucaaccccuaucucauuc

SEQ ID NO: 2188606 - RNA, 19 nt, Artificial Sequence
  Description of Artificial Sequence: Synthetic oligonucleotide
cagucauagauguuccuga

SEQ ID NO: 2188607 - RNA, 19 nt, Artificial Sequence
  Description of Artificial Sequence: Synthetic oligonucleotide
gaggagguucacauaggcc

SEQ ID NO: 2188608 - RNA, 19 nt, Artificial Sequence
  Description of Artificial Sequence: Synthetic oligonucleotide
cacucugguaaaguucagg

SEQ ID NO: 2188609 - RNA, 19 nt, Artificial Sequence
  Description of Artificial Sequence: Synthetic oligonucleotide
uuucuaucaccagguggag

SEQ ID NO: 2188610 - RNA, 19 nt, Artificial Sequence
  Description of Artificial Sequence: Synthetic oligonucleotide
ucagagcccugguagguaa

SEQ ID NO: 2188611 - RNA, 19 nt, Artificial Sequence
  Description of Artificial Sequence: Synthetic oligonucleotide
auguuggagagucgugugu

SEQ ID NO: 2188612 - RNA, 19 nt, Artificial Sequence
  Description of Artificial Sequence: Synthetic oligonucleotide
gaaccaauuucaccaccuc

SEQ ID NO: 2188613 - RNA, 19 nt, Artificial Sequence
  Description of Artificial Sequence: Synthetic oligonucleotide
ucugagugcugaccacucu

SEQ ID NO: 2188614 - RNA, 19 nt, Artificial Sequence
  Description of Artificial Sequence: Synthetic oligonucleotide
cuaucccaaugucagccac

SEQ ID NO: 2188615 - RNA, 19 nt, Artificial Sequence
  Description of Artificial Sequence: Synthetic oligonucleotide
cauaaaaguaggacaagau

SEQ ID NO: 2188616 - RNA, 19 nt, Artificial Sequence
  Description of Artificial Sequence: Synthetic oligonucleotide
ucggcagauacgucuuucu

SEQ ID NO: 2188617 - RNA, 19 nt, Artificial Sequence
  Description of Artificial Sequence: Synthetic oligonucleotide
cucgggauucccacugagc

SEQ ID NO: 2188618 - RNA, 19 nt, Artificial Sequence
  Description of Artificial Sequence: Synthetic oligonucleotide
ccugguagguaaaguaagg

SEQ ID NO: 2188619 - RNA, 19 nt, Artificial Sequence
  Description of Artificial Sequence: Synthetic oligonucleotide
acccaguagucagucauag

SEQ ID NO: 2188620 - RNA, 19 nt, Artificial Sequence
  Description of Artificial Sequence: Synthetic oligonucleotide
agaccagacuuugauagaa

SEQ ID NO: 2188621 - RNA, 19 nt, Artificial Sequence
  Description of Artificial Sequence: Synthetic oligonucleotide
ggacaagaugcucccaacc

SEQ ID NO: 2188622 - RNA, 19 nt, Artificial Sequence
  Description of Artificial Sequence: Synthetic oligonucleotide
aauacuugcuacagacauu

SEQ ID NO: 2188623 - RNA, 19 nt, Artificial Sequence
  Description of Artificial Sequence: Synthetic oligonucleotide
cugugucagucucaacccc

SEQ ID NO: 2188624 - RNA, 19 nt, Artificial Sequence
  Description of Artificial Sequence: Synthetic oligonucleotide
accccuaucucauucugua

SEQ ID NO: 2188625 - RNA, 19 nt, Artificial Sequence
  Description of Artificial Sequence: Synthetic oligonucleotide
ugaccacucugguaaaguu

SEQ ID NO: 2188626 - RNA, 19 nt, Artificial Sequence
  Description of Artificial Sequence: Synthetic oligonucleotide
ccugugucagucucaaccc

SEQ ID NO: 2188627 - RNA, 19 nt, Artificial Sequence
  Description of Artificial Sequence: Synthetic oligonucleotide
uggccagggucauaacaug

SEQ ID NO: 2188628 - RNA, 19 nt, Artificial Sequence
  Description of Artificial Sequence: Synthetic oligonucleotide
cuguuagaacgaugaacuc

SEQ ID NO: 2188629 - RNA, 19 nt, Artificial Sequence
  Description of Artificial Sequence: Synthetic oligonucleotide
aaagcagaccagacuuuga

SEQ ID NO: 2188630 - RNA, 19 nt, Artificial Sequence
  Description of Artificial Sequence: Synthetic oligonucleotide
cagaagaacugguaccaga

SEQ ID NO: 2188631 - RNA, 19 nt, Artificial Sequence
  Description of Artificial Sequence: Synthetic oligonucleotide
agggucucggcagauacgu

SEQ ID NO: 2188632 - RNA, 19 nt, Artificial Sequence
  Description of Artificial Sequence: Synthetic oligonucleotide
agcccugguagguaaagua

SEQ ID NO: 2188633 - RNA, 19 nt, Artificial Sequence
  Description of Artificial Sequence: Synthetic oligonucleotide
gaccagacuuugauagaag

SEQ ID NO: 2188634 - RNA, 19 nt, Artificial Sequence
  Description of Artificial Sequence: Synthetic oligonucleotide
ucccaaaugugaagauguc

SEQ ID NO: 2188635 - RNA, 19 nt, Artificial Sequence
  Description of Artificial Sequence: Synthetic oligonucleotide
gaccacucugguaaaguuc

SEQ ID NO: 2188636 - RNA, 19 nt, Artificial Sequence
  Description of Artificial Sequence: Synthetic oligonucleotide
ugaguacgccucugagugc

SEQ ID NO: 2188637 - RNA, 19 nt, Artificial Sequence
  Description of Artificial Sequence: Synthetic oligonucleotide
agaauacuugcuacagaca

SEQ ID NO: 2188638 - RNA, 19 nt, Artificial Sequence
  Description of Artificial Sequence: Synthetic oligonucleotide
cugagcacuguuagaacga

SEQ ID NO: 2188639 - RNA, 19 nt, Artificial Sequence
  Description of Artificial Sequence: Synthetic oligonucleotide
cuucuugaccugagacacc

SEQ ID NO: 2188640 - RNA, 19 nt, Artificial Sequence
  Description of Artificial Sequence: Synthetic oligonucleotide
ccuucuugaccugagacac

SEQ ID NO: 2188641 - RNA, 19 nt, Artificial Sequence
  Description of Artificial Sequence: Synthetic oligonucleotide
gaaaacccgcagaagaacu

SEQ ID NO: 2188642 - RNA, 19 nt, Artificial Sequence
  Description of Artificial Sequence: Synthetic oligonucleotide
caaggugauccagaaggug

SEQ ID NO: 2188643 - RNA, 19 nt, Artificial Sequence
  Description of Artificial Sequence: Synthetic oligonucleotide
cagggucauaacauggaga

SEQ ID NO: 2188644 - RNA, 19 nt, Artificial Sequence
  Description of Artificial Sequence: Synthetic oligonucleotide
uaaccugugucagucucaa

SEQ ID NO: 2188645 - RNA, 19 nt, Artificial Sequence
  Description of Artificial Sequence: Synthetic oligonucleotide
agccucgggauucccacug

SEQ ID NO: 2188646 - RNA, 19 nt, Artificial Sequence
  Description of Artificial Sequence: Synthetic oligonucleotide
caaagacaaguugcugagc

SEQ ID NO: 2188647 - RNA, 19 nt, Artificial Sequence
  Description of Artificial Sequence: Synthetic oligonucleotide
uuggagagucguguguaac

SEQ ID NO: 2188648 - RNA, 19 nt, Artificial Sequence
  Description of Artificial Sequence: Synthetic oligonucleotide
acacgccauaaaugauggg

SEQ ID NO: 2188649 - RNA, 19 nt, Artificial Sequence
  Description of Artificial Sequence: Synthetic oligonucleotide
agccacuuguaucaugcua

SEQ ID NO: 2188650 - RNA, 19 nt, Artificial Sequence
  Description of Artificial Sequence: Synthetic oligonucleotide
gggauucccaaaugugaag

SEQ ID NO: 2188651 - RNA, 19 nt, Artificial Sequence
  Description of Artificial Sequence: Synthetic oligonucleotide
ugguaaaguucaggcagcu

SEQ ID NO: 2188652 - RNA, 19 nt, Artificial Sequence
  Description of Artificial Sequence: Synthetic oligonucleotide
uguggcucggcagcagacc

SEQ ID NO: 2188653 - RNA, 19 nt, Artificial Sequence
  Description of Artificial Sequence: Synthetic oligonucleotide
gacgugaagaggagguuga

SEQ ID NO: 2188654 - RNA, 19 nt, Artificial Sequence
  Description of Artificial Sequence: Synthetic oligonucleotide
gaugucugaauugggagau

SEQ ID NO: 2188655 - RNA, 19 nt, Artificial Sequence
  Description of Artificial Sequence: Synthetic oligonucleotide
guagaggcuacagcaaaga

SEQ ID NO: 2188656 - RNA, 19 nt, Artificial Sequence
  Description of Artificial Sequence: Synthetic oligonucleotide
gggacagacgugaagagga

SEQ ID NO: 2188657 - RNA, 19 nt, Artificial Sequence
  Description of Artificial Sequence: Synthetic oligonucleotide
cucggcagcagaccacagc

SEQ ID NO: 2188658 - RNA, 19 nt, Artificial Sequence
  Description of Artificial Sequence: Synthetic oligonucleotide
acgccucugagugcugacc

SEQ ID NO: 2188659 - RNA, 19 nt, Artificial Sequence
  Description of Artificial Sequence: Synthetic oligonucleotide
gagacaccuaucccaaugu

SEQ ID NO: 2188660 - RNA, 19 nt, Artificial Sequence
  Description of Artificial Sequence: Synthetic oligonucleotide
gucagucucaaccccuauc

SEQ ID NO: 2188661 - RNA, 19 nt, Artificial Sequence
  Description of Artificial Sequence: Synthetic oligonucleotide
ggagggucucggcagauac

SEQ ID NO: 2188662 - RNA, 19 nt, Artificial Sequence
  Description of Artificial Sequence: Synthetic oligonucleotide
gaagggguguggcucggca

SEQ ID NO: 2188663 - RNA, 19 nt, Artificial Sequence
  Description of Artificial Sequence: Synthetic oligonucleotide
ggauucccaaaugugaaga

SEQ ID NO: 2188664 - RNA, 19 nt, Artificial Sequence
  Description of Artificial Sequence: Synthetic oligonucleotide
gcagaccacagcuuggcac

SEQ ID NO: 2188665 - RNA, 19 nt, Artificial Sequence
  Description of Artificial Sequence: Synthetic oligonucleotide
agacuuugauagaaggcau

SEQ ID NO: 2188666 - RNA, 19 nt, Artificial Sequence
  Description of Artificial Sequence: Synthetic oligonucleotide
caaccccuaucucauucug

SEQ ID NO: 2188667 - RNA, 19 nt, Artificial Sequence
  Description of Artificial Sequence: Synthetic oligonucleotide
guugcugagcacuguuaga

SEQ ID NO: 2188668 - RNA, 19 nt, Artificial Sequence
  Description of Artificial Sequence: Synthetic oligonucleotide
acauggagaugguuucgaa

SEQ ID NO: 2188669 - RNA, 19 nt, Artificial Sequence
  Description of Artificial Sequence: Synthetic oligonucleotide
aaccccuaucucauucugu

SEQ ID NO: 2188670 - RNA, 19 nt, Artificial Sequence
  Description of Artificial Sequence: Synthetic oligonucleotide
cccugguagguaaaguaag

SEQ ID NO: 2188671 - RNA, 19 nt, Artificial Sequence
  Description of Artificial Sequence: Synthetic oligonucleotide
auccaacaaggugauccag

SEQ ID NO: 2188672 - RNA, 19 nt, Artificial Sequence
  Description of Artificial Sequence: Synthetic oligonucleotide
guuaauuuucuaagagccu

SEQ ID NO: 2188673 - RNA, 19 nt, Artificial Sequence
  Description of Artificial Sequence: Synthetic oligonucleotide
ucauaacauggagaugguu

SEQ ID NO: 2188674 - RNA, 19 nt, Artificial Sequence
  Description of Artificial Sequence: Synthetic oligonucleotide
acaaggugauccagaaggu

SEQ ID NO: 2188675 - RNA, 19 nt, Artificial Sequence
  Description of Artificial Sequence: Synthetic oligonucleotide
agagcccugguagguaaag

SEQ ID NO: 2188676 - RNA, 19 nt, Artificial Sequence
  Description of Artificial Sequence: Synthetic oligonucleotide
auaaccugugucagucuca

SEQ ID NO: 2188677 - RNA, 19 nt, Artificial Sequence
  Description of Artificial Sequence: Synthetic oligonucleotide
uaacaccaguguccaugca

SEQ ID NO: 2188678 - RNA, 19 nt, Artificial Sequence
  Description of Artificial Sequence: Synthetic oligonucleotide
ugagcacuguuagaacgau

SEQ ID NO: 2188679 - RNA, 19 nt, Artificial Sequence
  Description of Artificial Sequence: Synthetic oligonucleotide
caccuaucccaaugucagc

SEQ ID NO: 2188680 - RNA, 19 nt, Artificial Sequence
  Description of Artificial Sequence: Synthetic oligonucleotide
cuaagagccucgggauucc

SEQ ID NO: 2188681 - RNA, 19 nt, Artificial Sequence
  Description of Artificial Sequence: Synthetic oligonucleotide
caugaccaacauguggauc

SEQ ID NO: 2188682 - RNA, 19 nt, Artificial Sequence
  Description of Artificial Sequence: Synthetic oligonucleotide
ugaccaacauguggaucca

SEQ ID NO: 2188683 - RNA, 19 nt, Artificial Sequence
  Description of Artificial Sequence: Synthetic oligonucleotide
ggccagggucauaacaugg

SEQ ID NO: 2188684 - RNA, 19 nt, Artificial Sequence
  Description of Artificial Sequence: Synthetic oligonucleotide
aucauguuggagagucgug

SEQ ID NO: 2188685 - RNA, 19 nt, Artificial Sequence
  Description of Artificial Sequence: Synthetic oligonucleotide
ggagagucguguguaacac

SEQ ID NO: 2188686 - RNA, 19 nt, Artificial Sequence
  Description of Artificial Sequence: Synthetic oligonucleotide
uugaagggguguggcucgg

SEQ ID NO: 2188687 - RNA, 19 nt, Artificial Sequence
  Description of Artificial Sequence: Synthetic oligonucleotide
cagaacccaguagucaguc

SEQ ID NO: 2188688 - RNA, 19 nt, Artificial Sequence
  Description of Artificial Sequence: Synthetic oligonucleotide
ccgcagaagaacugguacc

SEQ ID NO: 2188689 - RNA, 19 nt, Artificial Sequence
  Description of Artificial Sequence: Synthetic oligonucleotide
aacccgcagaagaacuggu

SEQ ID NO: 2188690 - RNA, 19 nt, Artificial Sequence
  Description of Artificial Sequence: Synthetic oligonucleotide
uuggcaccaugcagucagc

SEQ ID NO: 2188691 - RNA, 19 nt, Artificial Sequence
  Description of Artificial Sequence: Synthetic oligonucleotide
acaaguugcugagcacugu

SEQ ID NO: 2188692 - RNA, 19 nt, Artificial Sequence
  Description of Artificial Sequence: Synthetic oligonucleotide
gagucguguguaacaccag

SEQ ID NO: 2188693 - RNA, 19 nt, Artificial Sequence
  Description of Artificial Sequence: Synthetic oligonucleotide
ggagacuguuuugaagaug

SEQ ID NO: 2188694 - RNA, 19 nt, Artificial Sequence
  Description of Artificial Sequence: Synthetic oligonucleotide
guggcucggcagcagacca

SEQ ID NO: 2188695 - RNA, 19 nt, Artificial Sequence
  Description of Artificial Sequence: Synthetic oligonucleotide
ucccaaugucagccacuug

SEQ ID NO: 2188696 - RNA, 19 nt, Artificial Sequence
  Description of Artificial Sequence: Synthetic oligonucleotide
ggagaaugaugaacagagc

SEQ ID NO: 2188697 - RNA, 19 nt, Artificial Sequence
  Description of Artificial Sequence: Synthetic oligonucleotide
uuucuccaacacgccauaa

SEQ ID NO: 2188698 - RNA, 19 nt, Artificial Sequence
  Description of Artificial Sequence: Synthetic oligonucleotide
uacuugcuacagacauuuc

SEQ ID NO: 2188699 - RNA, 19 nt, Artificial Sequence
  Description of Artificial Sequence: Synthetic oligonucleotide
gccacuuguaucaugcuaa

SEQ ID NO: 2188700 - RNA, 19 nt, Artificial Sequence
  Description of Artificial Sequence: Synthetic oligonucleotide
uacgccucugagugcugac

SEQ ID NO: 2188701 - RNA, 19 nt, Artificial Sequence
  Description of Artificial Sequence: Synthetic oligonucleotide
ggcuacagcaaagacaagu

SEQ ID NO: 2188702 - RNA, 19 nt, Artificial Sequence
  Description of Artificial Sequence: Synthetic oligonucleotide
cuacagacauuucuacccu

SEQ ID NO: 2188703 - RNA, 19 nt, Artificial Sequence
  Description of Artificial Sequence: Synthetic oligonucleotide
ggugagaggugaguacgcc

SEQ ID NO: 2188704 - RNA, 19 nt, Artificial Sequence
  Description of Artificial Sequence: Synthetic oligonucleotide
gguuucgaaccaauuucac

SEQ ID NO: 2188705 - RNA, 19 nt, Artificial Sequence
  Description of Artificial Sequence: Synthetic oligonucleotide
caagucagacucuugcuuu

SEQ ID NO: 2188706 - RNA, 19 nt, Artificial Sequence
  Description of Artificial Sequence: Synthetic oligonucleotide
gaguacgccucugagugcu

SEQ ID NO: 2188707 - RNA, 19 nt, Artificial Sequence
  Description of Artificial Sequence: Synthetic oligonucleotide
aucccaaugucagccacuu

SEQ ID NO: 2188708 - RNA, 19 nt, Artificial Sequence
  Description of Artificial Sequence: Synthetic oligonucleotide
gcagaauacuugcuacaga

SEQ ID NO: 2188709 - RNA, 19 nt, Artificial Sequence
  Description of Artificial Sequence: Synthetic oligonucleotide
cagaccagacuuugauaga

SEQ ID NO: 2188710 - RNA, 19 nt, Artificial Sequence
  Description of Artificial Sequence: Synthetic oligonucleotide
cagucucaaccccuaucuc

SEQ ID NO: 2188711 - RNA, 19 nt, Artificial Sequence
  Description of Artificial Sequence: Synthetic oligonucleotide
ggucucggcagauacgucu

SEQ ID NO: 2188712 - RNA, 19 nt, Artificial Sequence
  Description of Artificial Sequence: Synthetic oligonucleotide
caaagucacuggccaucac

SEQ ID NO: 2188713 - RNA, 19 nt, Artificial Sequence
  Description of Artificial Sequence: Synthetic oligonucleotide
ucccaaccaugaccaacau

SEQ ID NO: 2188714 - RNA, 19 nt, Artificial Sequence
  Description of Artificial Sequence: Synthetic oligonucleotide
cucggcagauacgucuuuc

SEQ ID NO: 2188715 - RNA, 19 nt, Artificial Sequence
  Description of Artificial Sequence: Synthetic oligonucleotide
auguuccugaaaacccgca

SEQ ID NO: 2188716 - RNA, 19 nt, Artificial Sequence
  Description of Artificial Sequence: Synthetic oligonucleotide
aacccaguagucagucaua

SEQ ID NO: 2188717 - RNA, 19 nt, Artificial Sequence
  Description of Artificial Sequence: Synthetic oligonucleotide
gugagaggugaguacgccu

SEQ ID NO: 2188718 - RNA, 19 nt, Artificial Sequence
  Description of Artificial Sequence: Synthetic oligonucleotide
cagacauuucuacccuuaa

SEQ ID NO: 2188719 - RNA, 19 nt, Artificial Sequence
  Description of Artificial Sequence: Synthetic oligonucleotide
gguaaaguucaggcagcug

SEQ ID NO: 2188720 - RNA, 19 nt, Artificial Sequence
  Description of Artificial Sequence: Synthetic oligonucleotide
agaugguuucgaaccaauu

SEQ ID NO: 2188721 - RNA, 19 nt, Artificial Sequence
  Description of Artificial Sequence: Synthetic oligonucleotide
aggagcuugcugagauguc

SEQ ID NO: 2188722 - RNA, 19 nt, Artificial Sequence
  Description of Artificial Sequence: Synthetic oligonucleotide
ugcugaccacucugguaaa

SEQ ID NO: 2188723 - RNA, 19 nt, Artificial Sequence
  Description of Artificial Sequence: Synthetic oligonucleotide
ggugaguacgccucugagu

SEQ ID NO: 2188724 - RNA, 19 nt, Artificial Sequence
  Description of Artificial Sequence: Synthetic oligonucleotide
aggguaucuaggagacugu

SEQ ID NO: 2188725 - RNA, 19 nt, Artificial Sequence
  Description of Artificial Sequence: Synthetic oligonucleotide
cauguggauccaagucaga

SEQ ID NO: 2188726 - RNA, 19 nt, Artificial Sequence
  Description of Artificial Sequence: Synthetic oligonucleotide
ccaugcacaagaaggagcu

SEQ ID NO: 2188727 - RNA, 19 nt, Artificial Sequence
  Description of Artificial Sequence: Synthetic oligonucleotide
augaacucucagaggguau

SEQ ID NO: 2188728 - RNA, 19 nt, Artificial Sequence
  Description of Artificial Sequence: Synthetic oligonucleotide
gagcauaaccugugucagu

SEQ ID NO: 2188729 - RNA, 19 nt, Artificial Sequence
  Description of Artificial Sequence: Synthetic oligonucleotide
caccaugcagucagcucca

SEQ ID NO: 2188730 - RNA, 19 nt, Artificial Sequence
  Description of Artificial Sequence: Synthetic oligonucleotide
ggcaccaugcagucagcuc

SEQ ID NO: 2188731 - RNA, 19 nt, Artificial Sequence
  Description of Artificial Sequence: Synthetic oligonucleotide
gccugcaugccuucuugac

SEQ ID NO: 2188732 - RNA, 19 nt, Artificial Sequence
  Description of Artificial Sequence: Synthetic oligonucleotide
aucacggccugcaugccuu

SEQ ID NO: 2188733 - RNA, 19 nt, Artificial Sequence
  Description of Artificial Sequence: Synthetic oligonucleotide
ggacagacgugaagaggag

SEQ ID NO: 2188734 - RNA, 19 nt, Artificial Sequence
  Description of Artificial Sequence: Synthetic oligonucleotide
gggauucccacugagcaua

SEQ ID NO: 2188735 - RNA, 19 nt, Artificial Sequence
  Description of Artificial Sequence: Synthetic oligonucleotide
gagaggugaguacgccucu

SEQ ID NO: 2188736 - RNA, 19 nt, Artificial Sequence
  Description of Artificial Sequence: Synthetic oligonucleotide
caauuucaccaccucacuu

SEQ ID NO: 2188737 - RNA, 19 nt, Artificial Sequence
  Description of Artificial Sequence: Synthetic oligonucleotide
agaggguaucuaggagacu

SEQ ID NO: 2188738 - RNA, 19 nt, Artificial Sequence
  Description of Artificial Sequence: Synthetic oligonucleotide
gucagucauagauguuccu

SEQ ID NO: 2188739 - RNA, 19 nt, Artificial Sequence
  Description of Artificial Sequence: Synthetic oligonucleotide
ggccacauucuuguaagaa

SEQ ID NO: 2188740 - RNA, 19 nt, Artificial Sequence
  Description of Artificial Sequence: Synthetic oligonucleotide
gucucaaccccuaucucau

SEQ ID NO: 2188741 - RNA, 19 nt, Artificial Sequence
  Description of Artificial Sequence: Synthetic oligonucleotide
ccccuaucucauucuguag

SEQ ID NO: 2188742 - RNA, 19 nt, Artificial Sequence
  Description of Artificial Sequence: Synthetic oligonucleotide
ccaugcagucagcuccagg

SEQ ID NO: 2188743 - RNA, 19 nt, Artificial Sequence
  Description of Artificial Sequence: Synthetic oligonucleotide
ccaucaccgauggccaggg

SEQ ID NO: 2188744 - RNA, 19 nt, Artificial Sequence
  Description of Artificial Sequence: Synthetic oligonucleotide
caguguccaugcacaagaa

SEQ ID NO: 2188745 - RNA, 19 nt, Artificial Sequence
  Description of Artificial Sequence: Synthetic oligonucleotide
caaugucagccacuuguau

SEQ ID NO: 2188746 - RNA, 19 nt, Artificial Sequence
  Description of Artificial Sequence: Synthetic oligonucleotide
ugcucccaaccaugaccaa

SEQ ID NO: 2188747 - RNA, 19 nt, Artificial Sequence
  Description of Artificial Sequence: Synthetic oligonucleotide
guacgccucugagugcuga

SEQ ID NO: 2188748 - RNA, 19 nt, Artificial Sequence
  Description of Artificial Sequence: Synthetic oligonucleotide
cgucuuucuccaacacgcc

SEQ ID NO: 2188749 - RNA, 19 nt, Artificial Sequence
  Description of Artificial Sequence: Synthetic oligonucleotide
caaguugcugagcacuguu

SEQ ID NO: 2188750 - RNA, 19 nt, Artificial Sequence
  Description of Artificial Sequence: Synthetic oligonucleotide
gggucauaacauggagaug

SEQ ID NO: 2188751 - RNA, 19 nt, Artificial Sequence
  Description of Artificial Sequence: Synthetic oligonucleotide
ccucgggauucccacugag

SEQ ID NO: 2188752 - RNA, 19 nt, Artificial Sequence
  Description of Artificial Sequence: Synthetic oligonucleotide
accaugcagucagcuccag

SEQ ID NO: 2188753 - RNA, 19 nt, Artificial Sequence
  Description of Artificial Sequence: Synthetic oligonucleotide
uucuacccuuaaguauguu

SEQ ID NO: 2188754 - RNA, 19 nt, Artificial Sequence
  Description of Artificial Sequence: Synthetic oligonucleotide
ucacggccugcaugccuuc

SEQ ID NO: 2188755 - RNA, 19 nt, Artificial Sequence
  Description of Artificial Sequence: Synthetic oligonucleotide
agacuguuuugaagaugau

SEQ ID NO: 2188756 - RNA, 19 nt, Artificial Sequence
  Description of Artificial Sequence: Synthetic oligonucleotide
ggagaugguuucgaaccaa

SEQ ID NO: 2188757 - RNA, 19 nt, Artificial Sequence
  Description of Artificial Sequence: Synthetic oligonucleotide
acgugaagaggagguugaa

SEQ ID NO: 2188758 - RNA, 19 nt, Artificial Sequence
  Description of Artificial Sequence: Synthetic oligonucleotide
ccaacauguggauccaagu

SEQ ID NO: 2188759 - RNA, 19 nt, Artificial Sequence
  Description of Artificial Sequence: Synthetic oligonucleotide
ucaccagguggaggagaau

SEQ ID NO: 2188760 - RNA, 19 nt, Artificial Sequence
  Description of Artificial Sequence: Synthetic oligonucleotide
gcccugguagguaaaguaa

SEQ ID NO: 2188761 - RNA, 19 nt, Artificial Sequence
  Description of Artificial Sequence: Synthetic oligonucleotide
gaccaacauguggauccaa

SEQ ID NO: 2188762 - RNA, 19 nt, Artificial Sequence
  Description of Artificial Sequence: Synthetic oligonucleotide
gugucagucucaaccccua

SEQ ID NO: 2188763 - RNA, 19 nt, Artificial Sequence
  Description of Artificial Sequence: Synthetic oligonucleotide
aguacgccucugagugcug

SEQ ID NO: 2188764 - RNA, 19 nt, Artificial Sequence
  Description of Artificial Sequence: Synthetic oligonucleotide
ggugauccagaaggugaga

SEQ ID NO: 2188765 - RNA, 19 nt, Artificial Sequence
  Description of Artificial Sequence: Synthetic oligonucleotide
cacugagcauaaccugugu

SEQ ID NO: 2188766 - RNA, 19 nt, Artificial Sequence
  Description of Artificial Sequence: Synthetic oligonucleotide
acccgcagaagaacuggua

SEQ ID NO: 2188767 - RNA, 19 nt, Artificial Sequence
  Description of Artificial Sequence: Synthetic oligonucleotide
caucacggccugcaugccu

SEQ ID NO: 2188768 - RNA, 19 nt, Artificial Sequence
  Description of Artificial Sequence: Synthetic oligonucleotide
cagauacgucuuucuccaa

SEQ ID NO: 2188769 - RNA, 19 nt, Artificial Sequence
  Description of Artificial Sequence: Synthetic oligonucleotide
gagccucgggauucccacu

SEQ ID NO: 2188770 - RNA, 19 nt, Artificial Sequence
  Description of Artificial Sequence: Synthetic oligonucleotide
cagagcccugguagguaaa

SEQ ID NO: 2188771 - RNA, 19 nt, Artificial Sequence
  Description of Artificial Sequence: Synthetic oligonucleotide
cgaaccaauuucaccaccu

SEQ ID NO: 2188772 - RNA, 19 nt, Artificial Sequence
  Description of Artificial Sequence: Synthetic oligonucleotide
ccaauuucaccaccucacu

SEQ ID NO: 2188773 - RNA, 19 nt, Artificial Sequence
  Description of Artificial Sequence: Synthetic oligonucleotide
gguaucuaggagacuguuu

SEQ ID NO: 2188774 - RNA, 19 nt, Artificial Sequence
  Description of Artificial Sequence: Synthetic oligonucleotide
cggcagauacgucuuucuc

SEQ ID NO: 2188775 - RNA, 19 nt, Artificial Sequence
  Description of Artificial Sequence: Synthetic oligonucleotide
gcauaaccugugucagucu

SEQ ID NO: 2188776 - RNA, 19 nt, Artificial Sequence
  Description of Artificial Sequence: Synthetic oligonucleotide
guagucagucauagauguu

SEQ ID NO: 2188777 - RNA, 19 nt, Artificial Sequence
  Description of Artificial Sequence: Synthetic oligonucleotide
ccaacacgccauaaaugau

SEQ ID NO: 2188778 - RNA, 19 nt, Artificial Sequence
  Description of Artificial Sequence: Synthetic oligonucleotide
gccucgggauucccacuga

SEQ ID NO: 2188779 - RNA, 19 nt, Artificial Sequence
  Description of Artificial Sequence: Synthetic oligonucleotide
gcucggcagcagaccacag

SEQ ID NO: 2188780 - RNA, 19 nt, Artificial Sequence
  Description of Artificial Sequence: Synthetic oligonucleotide
gggguguggcucggcagca

SEQ ID NO: 2188781 - RNA, 19 nt, Artificial Sequence
  Description of Artificial Sequence: Synthetic oligonucleotide
ggguaucuaggagacuguu

SEQ ID NO: 2188782 - RNA, 19 nt, Artificial Sequence
  Description of Artificial Sequence: Synthetic oligonucleotide
accgauggccagggucaua

SEQ ID NO: 2188783 - RNA, 19 nt, Artificial Sequence
  Description of Artificial Sequence: Synthetic oligonucleotide
ccaugaccaacauguggau

SEQ ID NO: 2188784 - RNA, 19 nt, Artificial Sequence
  Description of Artificial Sequence: Synthetic oligonucleotide
cagacgugaagaggagguu

SEQ ID NO: 2188785 - RNA, 19 nt, Artificial Sequence
  Description of Artificial Sequence: Synthetic oligonucleotide
caugcacaagaaggagcuu

SEQ ID NO: 2188786 - RNA, 19 nt, Artificial Sequence
  Description of Artificial Sequence: Synthetic oligonucleotide
gaccacagcuuggcaccau

SEQ ID NO: 2188787 - RNA, 19 nt, Artificial Sequence
  Description of Artificial Sequence: Synthetic oligonucleotide
cagcuccaggaacugccuu

SEQ ID NO: 2188788 - RNA, 19 nt, Artificial Sequence
  Description of Artificial Sequence: Synthetic oligonucleotide
caucaccgauggccagggu

SEQ ID NO: 2188789 - RNA, 19 nt, Artificial Sequence
  Description of Artificial Sequence: Synthetic oligonucleotide
cacggccugcaugccuucu

SEQ ID NO: 2188790 - RNA, 19 nt, Artificial Sequence
  Description of Artificial Sequence: Synthetic oligonucleotide
cgggauucccacugagcau

SEQ ID NO: 2188791 - RNA, 19 nt, Artificial Sequence
  Description of Artificial Sequence: Synthetic oligonucleotide
cugcuguguucaggggauu

SEQ ID NO: 2188792 - RNA, 19 nt, Artificial Sequence
  Description of Artificial Sequence: Synthetic oligonucleotide
uuauuauuaacucugaaca

SEQ ID NO: 2188793 - RNA, 19 nt, Artificial Sequence
  Description of Artificial Sequence: Synthetic oligonucleotide
aguauaaucaggcuuggac

SEQ ID NO: 2188794 - RNA, 19 nt, Artificial Sequence
  Description of Artificial Sequence: Synthetic oligonucleotide
aaaacaagcugacugguag

SEQ ID NO: 2188795 - RNA, 19 nt, Artificial Sequence
  Description of Artificial Sequence: Synthetic oligonucleotide
agcaagaguucucagaugc

SEQ ID NO: 2188796 - RNA, 19 nt, Artificial Sequence
  Description of Artificial Sequence: Synthetic oligonucleotide
ucagagaaaauccucaggc

SEQ ID NO: 2188797 - RNA, 19 nt, Artificial Sequence
  Description of Artificial Sequence: Synthetic oligonucleotide
uggaacaggacuuagcacg

SEQ ID NO: 2188798 - RNA, 19 nt, Artificial Sequence
  Description of Artificial Sequence: Synthetic oligonucleotide
aaugauuauuauuaacucu

SEQ ID NO: 2188799 - RNA, 19 nt, Artificial Sequence
  Description of Artificial Sequence: Synthetic oligonucleotide
aagcaaaacaagcugacug

SEQ ID NO: 2188800 - RNA, 19 nt, Artificial Sequence
  Description of Artificial Sequence: Synthetic oligonucleotide
acgauauggaaauuugugc

SEQ ID NO: 2188801 - RNA, 19 nt, Artificial Sequence
  Description of Artificial Sequence: Synthetic oligonucleotide
gaagauacaaagaggaagg

SEQ ID NO: 2188802 - RNA, 19 nt, Artificial Sequence
  Description of Artificial Sequence: Synthetic oligonucleotide
ugaaggauagccaugugcc

SEQ ID NO: 2188803 - RNA, 19 nt, Artificial Sequence
  Description of Artificial Sequence: Synthetic oligonucleotide
ucuaaugcccucaagguug

SEQ ID NO: 2188804 - RNA, 19 nt, Artificial Sequence
  Description of Artificial Sequence: Synthetic oligonucleotide
gauacaaagaggaaggggc

SEQ ID NO: 2188805 - RNA, 19 nt, Artificial Sequence
  Description of Artificial Sequence: Synthetic oligonucleotide
acuaaugauuauuauuaac

SEQ ID NO: 2188806 - RNA, 19 nt, Artificial Sequence
  Description of Artificial Sequence: Synthetic oligonucleotide
gaccauuuggauuugauac

SEQ ID NO: 2188807 - RNA, 19 nt, Artificial Sequence
  Description of Artificial Sequence: Synthetic oligonucleotide
ugcugaaaagccuagguag

SEQ ID NO: 2188808 - RNA, 19 nt, Artificial Sequence
  Description of Artificial Sequence: Synthetic oligonucleotide
aagaggagcacacagccag

SEQ ID NO: 2188809 - RNA, 19 nt, Artificial Sequence
  Description of Artificial Sequence: Synthetic oligonucleotide
aaaauccucaggcaugguc

SEQ ID NO: 2188810 - RNA, 19 nt, Artificial Sequence
  Description of Artificial Sequence: Synthetic oligonucleotide
uuauuaacucugaacaggc

SEQ ID NO: 2188811 - RNA, 19 nt, Artificial Sequence
  Description of Artificial Sequence: Synthetic oligonucleotide
aggaagaauacccuggcac

SEQ ID NO: 2188812 - RNA, 19 nt, Artificial Sequence
  Description of Artificial Sequence: Synthetic oligonucleotide
acuauauucucuguguacc

SEQ ID NO: 2188813 - RNA, 19 nt, Artificial Sequence
  Description of Artificial Sequence: Synthetic oligonucleotide
uccaaagcccagaagaggg

SEQ ID NO: 2188814 - RNA, 19 nt, Artificial Sequence
  Description of Artificial Sequence: Synthetic oligonucleotide
auuauuaacucugaacagg

SEQ ID NO: 2188815 - RNA, 19 nt, Artificial Sequence
  Description of Artificial Sequence: Synthetic oligonucleotide
uugagucugaguauaauca

SEQ ID NO: 2188816 - RNA, 19 nt, Artificial Sequence
  Description of Artificial Sequence: Synthetic oligonucleotide
aauacccuggcacugaggu

SEQ ID NO: 2188817 - RNA, 19 nt, Artificial Sequence
  Description of Artificial Sequence: Synthetic oligonucleotide
cuagguaguauccagacac

SEQ ID NO: 2188818 - RNA, 19 nt, Artificial Sequence
  Description of Artificial Sequence: Synthetic oligonucleotide
ugcuauuacacuccaaagc

SEQ ID NO: 2188819 - RNA, 19 nt, Artificial Sequence
  Description of Artificial Sequence: Synthetic oligonucleotide
aaugggaccauuuggauuu

SEQ ID NO: 2188820 - RNA, 19 nt, Artificial Sequence
  Description of Artificial Sequence: Synthetic oligonucleotide
ucaagguugagucugagua

SEQ ID NO: 2188821 - RNA, 19 nt, Artificial Sequence
  Description of Artificial Sequence: Synthetic oligonucleotide
uggaaauuugugcaaauga

SEQ ID NO: 2188822 - RNA, 19 nt, Artificial Sequence
  Description of Artificial Sequence: Synthetic oligonucleotide
aauccagacucccucuccc

SEQ ID NO: 2188823 - RNA, 19 nt, Artificial Sequence
  Description of Artificial Sequence: Synthetic oligonucleotide
uuacucucagagaaaaucc

SEQ ID NO: 2188824 - RNA, 19 nt, Artificial Sequence
  Description of Artificial Sequence: Synthetic oligonucleotide
guauaaucaggcuuggacc

SEQ ID NO: 2188825 - RNA, 19 nt, Artificial Sequence
  Description of Artificial Sequence: Synthetic oligonucleotide
accacaaucaaauauggaa

SEQ ID NO: 2188826 - RNA, 19 nt, Artificial Sequence
  Description of Artificial Sequence: Synthetic oligonucleotide
uaaugauuauuauuaacuc

SEQ ID NO: 2188827 - RNA, 19 nt, Artificial Sequence
  Description of Artificial Sequence: Synthetic oligonucleotide
uauuacacuccaaagccca

SEQ ID NO: 2188828 - RNA, 19 nt, Artificial Sequence
  Description of Artificial Sequence: Synthetic oligonucleotide
auuaacucugaacaggccu

SEQ ID NO: 2188829 - RNA, 19 nt, Artificial Sequence
  Description of Artificial Sequence: Synthetic oligonucleotide
aaucaaauauggaacagga

SEQ ID NO: 2188830 - RNA, 19 nt, Artificial Sequence
  Description of Artificial Sequence: Synthetic oligonucleotide
aacaagacccacagcagcc

SEQ ID NO: 2188831 - RNA, 19 nt, Artificial Sequence
  Description of Artificial Sequence: Synthetic oligonucleotide
acugcuuacucucagagaa

SEQ ID NO: 2188832 - RNA, 19 nt, Artificial Sequence
  Description of Artificial Sequence: Synthetic oligonucleotide
augauuauuauuaacucug

SEQ ID NO: 2188833 - RNA, 19 nt, Artificial Sequence
  Description of Artificial Sequence: Synthetic oligonucleotide
cugaguauaaucaggcuug

SEQ ID NO: 2188834 - RNA, 19 nt, Artificial Sequence
  Description of Artificial Sequence: Synthetic oligonucleotide
uggcacagcagccagcugg

SEQ ID NO: 2188835 - RNA, 19 nt, Artificial Sequence
  Description of Artificial Sequence: Synthetic oligonucleotide
ucaacuaaugauuauuauu

SEQ ID NO: 2188836 - RNA, 19 nt, Artificial Sequence
  Description of Artificial Sequence: Synthetic oligonucleotide
aguauccagacacuggaag

SEQ ID NO: 2188837 - RNA, 19 nt, Artificial Sequence
  Description of Artificial Sequence: Synthetic oligonucleotide
aaaugguggggacaaugag

SEQ ID NO: 2188838 - RNA, 19 nt, Artificial Sequence
  Description of Artificial Sequence: Synthetic oligonucleotide
cuaaugauuauuauuaacu

SEQ ID NO: 2188839 - RNA, 19 nt, Artificial Sequence
  Description of Artificial Sequence: Synthetic oligonucleotide
ucugaguauaaucaggcuu

SEQ ID NO: 2188840 - RNA, 19 nt, Artificial Sequence
  Description of Artificial Sequence: Synthetic oligonucleotide
agugcuuagagaucuggag

SEQ ID NO: 2188841 - RNA, 19 nt, Artificial Sequence
  Description of Artificial Sequence: Synthetic oligonucleotide
auagcagccuaucuuggac

SEQ ID NO: 2188842 - RNA, 19 nt, Artificial Sequence
  Description of Artificial Sequence: Synthetic oligonucleotide
uuucuaaugcccucaaggu

SEQ ID NO: 2188843 - RNA, 19 nt, Artificial Sequence
  Description of Artificial Sequence: Synthetic oligonucleotide
gcuauuacacuccaaagcc

SEQ ID NO: 2188844 - RNA, 19 nt, Artificial Sequence
  Description of Artificial Sequence: Synthetic oligonucleotide
caacuaaugauuauuauua

SEQ ID NO: 2188845 - RNA, 19 nt, Artificial Sequence
  Description of Artificial Sequence: Synthetic oligonucleotide
aggacuuagcacgauaugg

SEQ ID NO: 2188846 - RNA, 19 nt, Artificial Sequence
  Description of Artificial Sequence: Synthetic oligonucleotide
uggucaggcagcaagaauc

SEQ ID NO: 2188847 - RNA, 19 nt, Artificial Sequence
  Description of Artificial Sequence: Synthetic oligonucleotide
uucauuuacugccacccca

SEQ ID NO: 2188848 - RNA, 19 nt, Artificial Sequence
  Description of Artificial Sequence: Synthetic oligonucleotide
ugagcauacuauauucucu

SEQ ID NO: 2188849 - RNA, 19 nt, Artificial Sequence
  Description of Artificial Sequence: Synthetic oligonucleotide
ucaggcuuggaccacaauc

SEQ ID NO: 2188850 - RNA, 19 nt, Artificial Sequence
  Description of Artificial Sequence: Synthetic oligonucleotide
cuggaagauacaaagagga

SEQ ID NO: 2188851 - RNA, 19 nt, Artificial Sequence
  Description of Artificial Sequence: Synthetic oligonucleotide
gggacaaugagagacaggg

SEQ ID NO: 2188852 - RNA, 19 nt, Artificial Sequence
  Description of Artificial Sequence: Synthetic oligonucleotide
cacgauauggaaauuugug

SEQ ID NO: 2188853 - RNA, 19 nt, Artificial Sequence
  Description of Artificial Sequence: Synthetic oligonucleotide
gagcauacuauauucucug

SEQ ID NO: 2188854 - RNA, 19 nt, Artificial Sequence
  Description of Artificial Sequence: Synthetic oligonucleotide
augcccucaagguugaguc

SEQ ID NO: 2188855 - RNA, 19 nt, Artificial Sequence
  Description of Artificial Sequence: Synthetic oligonucleotide
ugaugggcgacuuuuaaau

SEQ ID NO: 2188856 - RNA, 19 nt, Artificial Sequence
  Description of Artificial Sequence: Synthetic oligonucleotide
acaccggugaaggauagcc

SEQ ID NO: 2188857 - RNA, 19 nt, Artificial Sequence
  Description of Artificial Sequence: Synthetic oligonucleotide
agagaaaauccucaggcau

SEQ ID NO: 2188858 - RNA, 19 nt, Artificial Sequence
  Description of Artificial Sequence: Synthetic oligonucleotide
aaauccucaggcaugguca

SEQ ID NO: 2188859 - RNA, 19 nt, Artificial Sequence
  Description of Artificial Sequence: Synthetic oligonucleotide
uauucucuguguaccuugg

SEQ ID NO: 2188860 - RNA, 19 nt, Artificial Sequence
  Description of Artificial Sequence: Synthetic oligonucleotide
auucauuuacugccacccc

SEQ ID NO: 2188861 - RNA, 19 nt, Artificial Sequence
  Description of Artificial Sequence: Synthetic oligonucleotide
uuggaccacaaucaaauau

SEQ ID NO: 2188862 - RNA, 19 nt, Artificial Sequence
  Description of Artificial Sequence: Synthetic oligonucleotide
cuuacucucagagaaaauc

SEQ ID NO: 2188863 - RNA, 19 nt, Artificial Sequence
  Description of Artificial Sequence: Synthetic oligonucleotide
aauauggaacaggacuuag

SEQ ID NO: 2188864 - RNA, 19 nt, Artificial Sequence
  Description of Artificial Sequence: Synthetic oligonucleotide
aacuaaugauuauuauuaa

SEQ ID NO: 2188865 - RNA, 19 nt, Artificial Sequence
  Description of Artificial Sequence: Synthetic oligonucleotide
agaaaauccucaggcaugg

SEQ ID NO: 2188866 - RNA, 19 nt, Artificial Sequence
  Description of Artificial Sequence: Synthetic oligonucleotide
cuauuacacuccaaagccc

SEQ ID NO: 2188867 - RNA, 19 nt, Artificial Sequence
  Description of Artificial Sequence: Synthetic oligonucleotide
uagucaaggaacaccggug

SEQ ID NO: 2188868 - RNA, 19 nt, Artificial Sequence
  Description of Artificial Sequence: Synthetic oligonucleotide
aagccuagguaguauccag

SEQ ID NO: 2188869 - RNA, 19 nt, Artificial Sequence
  Description of Artificial Sequence: Synthetic oligonucleotide
agcugaaaggccccagcgc

SEQ ID NO: 2188870 - RNA, 19 nt, Artificial Sequence
  Description of Artificial Sequence: Synthetic oligonucleotide
auacaaaacucuuucuaau

SEQ ID NO: 2188871 - RNA, 19 nt, Artificial Sequence
  Description of Artificial Sequence: Synthetic oligonucleotide
uauuaacucugaacaggcc

SEQ ID NO: 2188872 - RNA, 19 nt, Artificial Sequence
  Description of Artificial Sequence: Synthetic oligonucleotide
acuggaagauacaaagagg

SEQ ID NO: 2188873 - RNA, 19 nt, Artificial Sequence
  Description of Artificial Sequence: Synthetic oligonucleotide
ugcaagugcuuagagaucu

SEQ ID NO: 2188874 - RNA, 19 nt, Artificial Sequence
  Description of Artificial Sequence: Synthetic oligonucleotide
aaugaugggcgacuuuuaa

SEQ ID NO: 2188875 - RNA, 19 nt, Artificial Sequence
  Description of Artificial Sequence: Synthetic oligonucleotide
augggcgacuuuuaaaucu

SEQ ID NO: 2188876 - RNA, 19 nt, Artificial Sequence
  Description of Artificial Sequence: Synthetic oligonucleotide
guugagucugaguauaauc

SEQ ID NO: 2188877 - RNA, 19 nt, Artificial Sequence
  Description of Artificial Sequence: Synthetic oligonucleotide
augcuauuacacuccaaag

SEQ ID NO: 2188878 - RNA, 19 nt, Artificial Sequence
  Description of Artificial Sequence: Synthetic oligonucleotide
uagcagccuaucuuggacg

SEQ ID NO: 2188879 - RNA, 19 nt, Artificial Sequence
  Description of Artificial Sequence: Synthetic oligonucleotide
auaugcagccggcagccac

SEQ ID NO: 2188880 - RNA, 19 nt, Artificial Sequence
  Description of Artificial Sequence: Synthetic oligonucleotide
gcagcaagaauccagacuc

SEQ ID NO: 2188881 - RNA, 19 nt, Artificial Sequence
  Description of Artificial Sequence: Synthetic oligonucleotide
agcaagaauccagacuccc

SEQ ID NO: 2188882 - RNA, 19 nt, Artificial Sequence
  Description of Artificial Sequence: Synthetic oligonucleotide
uacucucagagaaaauccu

SEQ ID NO: 2188883 - RNA, 19 nt, Artificial Sequence
  Description of Artificial Sequence: Synthetic oligonucleotide
guaguauccagacacugga

SEQ ID NO: 2188884 - RNA, 19 nt, Artificial Sequence
  Description of Artificial Sequence: Synthetic oligonucleotide
gaaagcaccggcugacgag

SEQ ID NO: 2188885 - RNA, 19 nt, Artificial Sequence
  Description of Artificial Sequence: Synthetic oligonucleotide
gugcuuagagaucuggagc

SEQ ID NO: 2188886 - RNA, 19 nt, Artificial Sequence
  Description of Artificial Sequence: Synthetic oligonucleotide
uugauacaaaacucuuucu

SEQ ID NO: 2188887 - RNA, 19 nt, Artificial Sequence
  Description of Artificial Sequence: Synthetic oligonucleotide
auauggaacaggacuuagc

SEQ ID NO: 2188888 - RNA, 19 nt, Artificial Sequence
  Description of Artificial Sequence: Synthetic oligonucleotide
agagaaggaagcaagaguu

SEQ ID NO: 2188889 - RNA, 19 nt, Artificial Sequence
  Description of Artificial Sequence: Synthetic oligonucleotide
ucauucauuuacugccacc

SEQ ID NO: 2188890 - RNA, 19 nt, Artificial Sequence
  Description of Artificial Sequence: Synthetic oligonucleotide
uucaacuaaugauuauuau

SEQ ID NO: 2188891 - RNA, 19 nt, Artificial Sequence
  Description of Artificial Sequence: Synthetic oligonucleotide
cacuccaaagcccagaaga

SEQ ID NO: 2188892 - RNA, 19 nt, Artificial Sequence
  Description of Artificial Sequence: Synthetic oligonucleotide
agacccacagcagccaugc

SEQ ID NO: 2188893 - RNA, 19 nt, Artificial Sequence
  Description of Artificial Sequence: Synthetic oligonucleotide
agcgccauucaacuaauga

SEQ ID NO: 2188894 - RNA, 19 nt, Artificial Sequence
  Description of Artificial Sequence: Synthetic oligonucleotide
augguggggacaaugagag

SEQ ID NO: 2188895 - RNA, 19 nt, Artificial Sequence
  Description of Artificial Sequence: Synthetic oligonucleotide
acaaucaaauauggaacag

SEQ ID NO: 2188896 - RNA, 19 nt, Artificial Sequence
  Description of Artificial Sequence: Synthetic oligonucleotide
uucccaugcuauuacacuc

SEQ ID NO: 2188897 - RNA, 19 nt, Artificial Sequence
  Description of Artificial Sequence: Synthetic oligonucleotide
agagaaagcaccggcugac

SEQ ID NO: 2188898 - RNA, 19 nt, Artificial Sequence
  Description of Artificial Sequence: Synthetic oligonucleotide
agcagccuaucuuggacgg

SEQ ID NO: 2188899 - RNA, 19 nt, Artificial Sequence
  Description of Artificial Sequence: Synthetic oligonucleotide
ucccaugcuauuacacucc

SEQ ID NO: 2188900 - RNA, 19 nt, Artificial Sequence
  Description of Artificial Sequence: Synthetic oligonucleotide
uccugagugucauuuuccc

SEQ ID NO: 2188901 - RNA, 19 nt, Artificial Sequence
  Description of Artificial Sequence: Synthetic oligonucleotide
cugagcauacuauauucuc

SEQ ID NO: 2188902 - RNA, 19 nt, Artificial Sequence
  Description of Artificial Sequence: Synthetic oligonucleotide
ucauuuacugccaccccaa

SEQ ID NO: 2188903 - RNA, 19 nt, Artificial Sequence
  Description of Artificial Sequence: Synthetic oligonucleotide
agaauccagacucccucuc

SEQ ID NO: 2188904 - RNA, 19 nt, Artificial Sequence
  Description of Artificial Sequence: Synthetic oligonucleotide
gaagcaagaguucucagau

SEQ ID NO: 2188905 - RNA, 19 nt, Artificial Sequence
  Description of Artificial Sequence: Synthetic oligonucleotide
cuuccccuagucaaggaac

SEQ ID NO: 2188906 - RNA, 19 nt, Artificial Sequence
  Description of Artificial Sequence: Synthetic oligonucleotide
acaaugagagacaggguag

SEQ ID NO: 2188907 - RNA, 19 nt, Artificial Sequence
  Description of Artificial Sequence: Synthetic oligonucleotide
ugaguauaaucaggcuugg

SEQ ID NO: 2188908 - RNA, 19 nt, Artificial Sequence
  Description of Artificial Sequence: Synthetic oligonucleotide
uucuaaugcccucaagguu

SEQ ID NO: 2188909 - RNA, 19 nt, Artificial Sequence
  Description of Artificial Sequence: Synthetic oligonucleotide
gaagaauacccuggcacug

SEQ ID NO: 2188910 - RNA, 19 nt, Artificial Sequence
  Description of Artificial Sequence: Synthetic oligonucleotide
agccaggaggcauaugcag

SEQ ID NO: 2188911 - RNA, 19 nt, Artificial Sequence
  Description of Artificial Sequence: Synthetic oligonucleotide
uggaagauacaaagaggaa

SEQ ID NO: 2188912 - RNA, 19 nt, Artificial Sequence
  Description of Artificial Sequence: Synthetic oligonucleotide
acggucccugccuugcugc

SEQ ID NO: 2188913 - RNA, 19 nt, Artificial Sequence
  Description of Artificial Sequence: Synthetic oligonucleotide
uccugucauucauuuacug

SEQ ID NO: 2188914 - RNA, 19 nt, Artificial Sequence
  Description of Artificial Sequence: Synthetic oligonucleotide
uauggaaauuugugcaaau

SEQ ID NO: 2188915 - RNA, 19 nt, Artificial Sequence
  Description of Artificial Sequence: Synthetic oligonucleotide
uuccccuagucaaggaaca

SEQ ID NO: 2188916 - RNA, 19 nt, Artificial Sequence
  Description of Artificial Sequence: Synthetic oligonucleotide
ucuggagcugaaaggcccc

SEQ ID NO: 2188917 - RNA, 19 nt, Artificial Sequence
  Description of Artificial Sequence: Synthetic oligonucleotide
gaaggugaaggcuggcuga

SEQ ID NO: 2188918 - RNA, 19 nt, Artificial Sequence
  Description of Artificial Sequence: Synthetic oligonucleotide
aaagcaccggcugacgagu

SEQ ID NO: 2188919 - RNA, 19 nt, Artificial Sequence
  Description of Artificial Sequence: Synthetic oligonucleotide
aaugcccucaagguugagu

SEQ ID NO: 2188920 - RNA, 19 nt, Artificial Sequence
  Description of Artificial Sequence: Synthetic oligonucleotide
caaugagagacaggguagg

SEQ ID NO: 2188921 - RNA, 19 nt, Artificial Sequence
  Description of Artificial Sequence: Synthetic oligonucleotide
gaaaugguggggacaauga

SEQ ID NO: 2188922 - RNA, 19 nt, Artificial Sequence
  Description of Artificial Sequence: Synthetic oligonucleotide
agugucauggaggaagggu

SEQ ID NO: 2188923 - RNA, 19 nt, Artificial Sequence
  Description of Artificial Sequence: Synthetic oligonucleotide
cccuagucaaggaacaccg

SEQ ID NO: 2188924 - RNA, 19 nt, Artificial Sequence
  Description of Artificial Sequence: Synthetic oligonucleotide
cugacugguagcagcuucc

SEQ ID NO: 2188925 - RNA, 19 nt, Artificial Sequence
  Description of Artificial Sequence: Synthetic oligonucleotide
auggaaauuugugcaaaug

SEQ ID NO: 2188926 - RNA, 19 nt, Artificial Sequence
  Description of Artificial Sequence: Synthetic oligonucleotide
guauccagacacuggaaga

SEQ ID NO: 2188927 - RNA, 19 nt, Artificial Sequence
  Description of Artificial Sequence: Synthetic oligonucleotide
agaauacccuggcacugag

SEQ ID NO: 2188928 - RNA, 19 nt, Artificial Sequence
  Description of Artificial Sequence: Synthetic oligonucleotide
aacaggacuuagcacgaua

SEQ ID NO: 2188929 - RNA, 19 nt, Artificial Sequence
  Description of Artificial Sequence: Synthetic oligonucleotide
gguggggacaaugagagac

SEQ ID NO: 2188930 - RNA, 19 nt, Artificial Sequence
  Description of Artificial Sequence: Synthetic oligonucleotide
caggcuuggaccacaauca

SEQ ID NO: 2188931 - RNA, 19 nt, Artificial Sequence
  Description of Artificial Sequence: Synthetic oligonucleotide
acucucagagaaaauccuc

SEQ ID NO: 2188932 - RNA, 19 nt, Artificial Sequence
  Description of Artificial Sequence: Synthetic oligonucleotide
aaauauggaacaggacuua

SEQ ID NO: 2188933 - RNA, 19 nt, Artificial Sequence
  Description of Artificial Sequence: Synthetic oligonucleotide
ggcauggucaggcagcaag

SEQ ID NO: 2188934 - RNA, 19 nt, Artificial Sequence
  Description of Artificial Sequence: Synthetic oligonucleotide
agaaagcaccggcugacga

SEQ ID NO: 2188935 - RNA, 19 nt, Artificial Sequence
  Description of Artificial Sequence: Synthetic oligonucleotide
ucuugagcauccugagugu

SEQ ID NO: 2188936 - RNA, 19 nt, Artificial Sequence
  Description of Artificial Sequence: Synthetic oligonucleotide
gcgacuuuuaaaucuugag

SEQ ID NO: 2188937 - RNA, 19 nt, Artificial Sequence
  Description of Artificial Sequence: Synthetic oligonucleotide
aagguugagucugaguaua

SEQ ID NO: 2188938 - RNA, 19 nt, Artificial Sequence
  Description of Artificial Sequence: Synthetic oligonucleotide
gugucauggaggaagggug

SEQ ID NO: 2188939 - RNA, 19 nt, Artificial Sequence
  Description of Artificial Sequence: Synthetic oligonucleotide
uuagagaucuggagcugaa

SEQ ID NO: 2188940 - RNA, 19 nt, Artificial Sequence
  Description of Artificial Sequence: Synthetic oligonucleotide
gcugaaaggccccagcgcc

SEQ ID NO: 2188941 - RNA, 19 nt, Artificial Sequence
  Description of Artificial Sequence: Synthetic oligonucleotide
uauccagacacuggaagau

SEQ ID NO: 2188942 - RNA, 19 nt, Artificial Sequence
  Description of Artificial Sequence: Synthetic oligonucleotide
ugugcaaaugaugggcgac

SEQ ID NO: 2188943 - RNA, 19 nt, Artificial Sequence
  Description of Artificial Sequence: Synthetic oligonucleotide
auucaacuaaugauuauua

SEQ ID NO: 2188944 - RNA, 19 nt, Artificial Sequence
  Description of Artificial Sequence: Synthetic oligonucleotide
ugaacaggccuuggcacag

SEQ ID NO: 2188945 - RNA, 19 nt, Artificial Sequence
  Description of Artificial Sequence: Synthetic oligonucleotide
gcauacuauauucucugug

SEQ ID NO: 2188946 - RNA, 19 nt, Artificial Sequence
  Description of Artificial Sequence: Synthetic oligonucleotide
gauagcagccuaucuugga

SEQ ID NO: 2188947 - RNA, 19 nt, Artificial Sequence
  Description of Artificial Sequence: Synthetic oligonucleotide
gguaguauccagacacugg

SEQ ID NO: 2188948 - RNA, 19 nt, Artificial Sequence
  Description of Artificial Sequence: Synthetic oligonucleotide
aacaccggugaaggauagc

SEQ ID NO: 2188949 - RNA, 19 nt, Artificial Sequence
  Description of Artificial Sequence: Synthetic oligonucleotide
aagaauacccuggcacuga

SEQ ID NO: 2188950 - RNA, 19 nt, Artificial Sequence
  Description of Artificial Sequence: Synthetic oligonucleotide
gaugggcgacuuuuaaauc

SEQ ID NO: 2188951 - RNA, 19 nt, Artificial Sequence
  Description of Artificial Sequence: Synthetic oligonucleotide
accccaaccccaaugggac

SEQ ID NO: 2188952 - RNA, 19 nt, Artificial Sequence
  Description of Artificial Sequence: Synthetic oligonucleotide
cgacuuuuaaaucuugagc

SEQ ID NO: 2188953 - RNA, 19 nt, Artificial Sequence
  Description of Artificial Sequence: Synthetic oligonucleotide
agcacgauauggaaauuug

SEQ ID NO: 2188954 - RNA, 19 nt, Artificial Sequence
  Description of Artificial Sequence: Synthetic oligonucleotide
cauccugagugucauuuuc

SEQ ID NO: 2188955 - RNA, 19 nt, Artificial Sequence
  Description of Artificial Sequence: Synthetic oligonucleotide
auaaucaggcuuggaccac

SEQ ID NO: 2188956 - RNA, 19 nt, Artificial Sequence
  Description of Artificial Sequence: Synthetic oligonucleotide
cuccaaagcccagaagagg

SEQ ID NO: 2188957 - RNA, 19 nt, Artificial Sequence
  Description of Artificial Sequence: Synthetic oligonucleotide
ggaccacaaucaaauaugg

SEQ ID NO: 2188958 - RNA, 19 nt, Artificial Sequence
  Description of Artificial Sequence: Synthetic oligonucleotide
aacggucccugccuugcug

SEQ ID NO: 2188959 - RNA, 19 nt, Artificial Sequence
  Description of Artificial Sequence: Synthetic oligonucleotide
accggugaaggauagccau

SEQ ID NO: 2188960 - RNA, 19 nt, Artificial Sequence
  Description of Artificial Sequence: Synthetic oligonucleotide
gguugacagccagagaagg

SEQ ID NO: 2188961 - RNA, 19 nt, Artificial Sequence
  Description of Artificial Sequence: Synthetic oligonucleotide
auauggaaauuugugcaaa

SEQ ID NO: 2188962 - RNA, 19 nt, Artificial Sequence
  Description of Artificial Sequence: Synthetic oligonucleotide
agcauacuauauucucugu

SEQ ID NO: 2188963 - RNA, 19 nt, Artificial Sequence
  Description of Artificial Sequence: Synthetic oligonucleotide
aagugcuuagagaucugga

SEQ ID NO: 2188964 - RNA, 19 nt, Artificial Sequence
  Description of Artificial Sequence: Synthetic oligonucleotide
gaucuggagcugaaaggcc

SEQ ID NO: 2188965 - RNA, 19 nt, Artificial Sequence
  Description of Artificial Sequence: Synthetic oligonucleotide
augaugggcgacuuuuaaa

SEQ ID NO: 2188966 - RNA, 19 nt, Artificial Sequence
  Description of Artificial Sequence: Synthetic oligonucleotide
cuugcugcugaaaagccua

SEQ ID NO: 2188967 - RNA, 19 nt, Artificial Sequence
  Description of Artificial Sequence: Synthetic oligonucleotide
cagccuaucuuggacgggg

SEQ ID NO: 2188968 - RNA, 19 nt, Artificial Sequence
  Description of Artificial Sequence: Synthetic oligonucleotide
agguaguauccagacacug

SEQ ID NO: 2188969 - RNA, 19 nt, Artificial Sequence
  Description of Artificial Sequence: Synthetic oligonucleotide
gccagugucauggaggaag

SEQ ID NO: 2188970 - RNA, 19 nt, Artificial Sequence
  Description of Artificial Sequence: Synthetic oligonucleotide
ggaggaagaauacccuggc

SEQ ID NO: 2188971 - RNA, 19 nt, Artificial Sequence
  Description of Artificial Sequence: Synthetic oligonucleotide
accccaaugggaccauuug

SEQ ID NO: 2188972 - RNA, 19 nt, Artificial Sequence
  Description of Artificial Sequence: Synthetic oligonucleotide
uuacacuccaaagcccaga

SEQ ID NO: 2188973 - RNA, 19 nt, Artificial Sequence
  Description of Artificial Sequence: Synthetic oligonucleotide
caaauauggaacaggacuu

SEQ ID NO: 2188974 - RNA, 19 nt, Artificial Sequence
  Description of Artificial Sequence: Synthetic oligonucleotide
gcugacgagugauagcagc

SEQ ID NO: 2188975 - RNA, 19 nt, Artificial Sequence
  Description of Artificial Sequence: Synthetic oligonucleotide
acgggguugacagccagag

SEQ ID NO: 2188976 - RNA, 19 nt, Artificial Sequence
  Description of Artificial Sequence: Synthetic oligonucleotide
aggaacaccggugaaggau

SEQ ID NO: 2188977 - RNA, 19 nt, Artificial Sequence
  Description of Artificial Sequence: Synthetic oligonucleotide
gucauucauuuacugccac

SEQ ID NO: 2188978 - RNA, 19 nt, Artificial Sequence
  Description of Artificial Sequence: Synthetic oligonucleotide
uaaucaggcuuggaccaca

SEQ ID NO: 2188979 - RNA, 19 nt, Artificial Sequence
  Description of Artificial Sequence: Synthetic oligonucleotide
gaauacccuggcacugagg

SEQ ID NO: 2188980 - RNA, 19 nt, Artificial Sequence
  Description of Artificial Sequence: Synthetic oligonucleotide
ggaaaugguggggacaaug

SEQ ID NO: 2188981 - RNA, 19 nt, Artificial Sequence
  Description of Artificial Sequence: Synthetic oligonucleotide
ugggcgacuuuuaaaucuu

SEQ ID NO: 2188982 - RNA, 19 nt, Artificial Sequence
  Description of Artificial Sequence: Synthetic oligonucleotide
cucuguguaccuuggccuc

SEQ ID NO: 2188983 - RNA, 19 nt, Artificial Sequence
  Description of Artificial Sequence: Synthetic oligonucleotide
ugagcauccugagugucau

SEQ ID NO: 2188984 - RNA, 19 nt, Artificial Sequence
  Description of Artificial Sequence: Synthetic oligonucleotide
acaggacuuagcacgauau

SEQ ID NO: 2188985 - RNA, 19 nt, Artificial Sequence
  Description of Artificial Sequence: Synthetic oligonucleotide
accggcugacgagugauag

SEQ ID NO: 2188986 - RNA, 19 nt, Artificial Sequence
  Description of Artificial Sequence: Synthetic oligonucleotide
guagcagcuuccccuaguc

SEQ ID NO: 2188987 - RNA, 19 nt, Artificial Sequence
  Description of Artificial Sequence: Synthetic oligonucleotide
agccugcaagugcuuagag

SEQ ID NO: 2188988 - RNA, 19 nt, Artificial Sequence
  Description of Artificial Sequence: Synthetic oligonucleotide
agcauccugagugucauuu

SEQ ID NO: 2188989 - RNA, 19 nt, Artificial Sequence
  Description of Artificial Sequence: Synthetic oligonucleotide
gagaaggaagcaagaguuc

SEQ ID NO: 2188990 - RNA, 19 nt, Artificial Sequence
  Description of Artificial Sequence: Synthetic oligonucleotide
ugagcuccugucauucauu

SEQ ID NO: 2188991 - RNA, 19 nt, Artificial Sequence
  Description of Artificial Sequence: Synthetic oligonucleotide
ugagguccauugguugucc

SEQ ID NO: 2188992 - RNA, 19 nt, Artificial Sequence
  Description of Artificial Sequence: Synthetic oligonucleotide
acuuagcacgauauggaaa

SEQ ID NO: 2188993 - RNA, 19 nt, Artificial Sequence
  Description of Artificial Sequence: Synthetic oligonucleotide
guaugccuggaucucccac

SEQ ID NO: 2188994 - RNA, 19 nt, Artificial Sequence
  Description of Artificial Sequence: Synthetic oligonucleotide
cgauauggaaauuugugca

SEQ ID NO: 2188995 - RNA, 19 nt, Artificial Sequence
  Description of Artificial Sequence: Synthetic oligonucleotide
gaacaccggugaaggauag

SEQ ID NO: 2188996 - RNA, 19 nt, Artificial Sequence
  Description of Artificial Sequence: Synthetic oligonucleotide
caggacuuagcacgauaug

SEQ ID NO: 2188997 - RNA, 19 nt, Artificial Sequence
  Description of Artificial Sequence: Synthetic oligonucleotide
auuacacuccaaagcccag

SEQ ID NO: 2188998 - RNA, 19 nt, Artificial Sequence
  Description of Artificial Sequence: Synthetic oligonucleotide
uggaggaaggguggucugc

SEQ ID NO: 2188999 - RNA, 19 nt, Artificial Sequence
  Description of Artificial Sequence: Synthetic oligonucleotide
cuuagagaucuggagcuga

SEQ ID NO: 2189000 - RNA, 19 nt, Artificial Sequence
  Description of Artificial Sequence: Synthetic oligonucleotide
aaaugaugggcgacuuuua

SEQ ID NO: 2189001 - RNA, 19 nt, Artificial Sequence
  Description of Artificial Sequence: Synthetic oligonucleotide
acaagcugacugguagcag

SEQ ID NO: 2189002 - RNA, 19 nt, Artificial Sequence
  Description of Artificial Sequence: Synthetic oligonucleotide
gguccauugguuguccagc

SEQ ID NO: 2189003 - RNA, 19 nt, Artificial Sequence
  Description of Artificial Sequence: Synthetic oligonucleotide
cauuuacugccaccccaac

SEQ ID NO: 2189004 - RNA, 19 nt, Artificial Sequence
  Description of Artificial Sequence: Synthetic oligonucleotide
cuuggacgggguugacagc

SEQ ID NO: 2189005 - RNA, 19 nt, Artificial Sequence
  Description of Artificial Sequence: Synthetic oligonucleotide
aagacccacagcagccaug

SEQ ID NO: 2189006 - RNA, 19 nt, Artificial Sequence
  Description of Artificial Sequence: Synthetic oligonucleotide
gccuagguaguauccagac

SEQ ID NO: 2189007 - RNA, 19 nt, Artificial Sequence
  Description of Artificial Sequence: Synthetic oligonucleotide
gaccacaaucaaauaugga

SEQ ID NO: 2189008 - RNA, 19 nt, Artificial Sequence
  Description of Artificial Sequence: Synthetic oligonucleotide
ggaagaauacccuggcacu

SEQ ID NO: 2189009 - RNA, 19 nt, Artificial Sequence
  Description of Artificial Sequence: Synthetic oligonucleotide
cuugagcauccugaguguc

SEQ ID NO: 2189010 - RNA, 19 nt, Artificial Sequence
  Description of Artificial Sequence: Synthetic oligonucleotide
cuaucuuggacgggguuga

SEQ ID NO: 2189011 - RNA, 19 nt, Artificial Sequence
  Description of Artificial Sequence: Synthetic oligonucleotide
cugcaagugcuuagagauc

SEQ ID NO: 2189012 - RNA, 19 nt, Artificial Sequence
  Description of Artificial Sequence: Synthetic oligonucleotide
ggagcugaaaggccccagc

SEQ ID NO: 2189013 - RNA, 19 nt, Artificial Sequence
  Description of Artificial Sequence: Synthetic oligonucleotide
ggacuuagcacgauaugga

SEQ ID NO: 2189014 - RNA, 19 nt, Artificial Sequence
  Description of Artificial Sequence: Synthetic oligonucleotide
acaagacccacagcagcca

SEQ ID NO: 2189015 - RNA, 19 nt, Artificial Sequence
  Description of Artificial Sequence: Synthetic oligonucleotide
cuauauucucuguguaccu

SEQ ID NO: 2189016 - RNA, 19 nt, Artificial Sequence
  Description of Artificial Sequence: Synthetic oligonucleotide
ccugagugucauuuucccc

SEQ ID NO: 2189017 - RNA, 19 nt, Artificial Sequence
  Description of Artificial Sequence: Synthetic oligonucleotide
ccuucccaugcuauuacac

SEQ ID NO: 2189018 - RNA, 19 nt, Artificial Sequence
  Description of Artificial Sequence: Synthetic oligonucleotide
ugcccucaagguugagucu

SEQ ID NO: 2189019 - RNA, 19 nt, Artificial Sequence
  Description of Artificial Sequence: Synthetic oligonucleotide
agacgguguggggaagagg

SEQ ID NO: 2189020 - RNA, 19 nt, Artificial Sequence
  Description of Artificial Sequence: Synthetic oligonucleotide
caaaacaagcugacuggua

SEQ ID NO: 2189021 - RNA, 19 nt, Artificial Sequence
  Description of Artificial Sequence: Synthetic oligonucleotide
ugcaaaugaugggcgacuu

SEQ ID NO: 2189022 - RNA, 19 nt, Artificial Sequence
  Description of Artificial Sequence: Synthetic oligonucleotide
gagacaggguaggccagug

SEQ ID NO: 2189023 - RNA, 19 nt, Artificial Sequence
  Description of Artificial Sequence: Synthetic oligonucleotide
cagacacuggaagauacaa

SEQ ID NO: 2189024 - RNA, 19 nt, Artificial Sequence
  Description of Artificial Sequence: Synthetic oligonucleotide
guugacagccagagaagga

SEQ ID NO: 2189025 - RNA, 19 nt, Artificial Sequence
  Description of Artificial Sequence: Synthetic oligonucleotide
gagugauagcagccuaucu

SEQ ID NO: 2189026 - RNA, 19 nt, Artificial Sequence
  Description of Artificial Sequence: Synthetic oligonucleotide
uggagcugaaaggccccag

SEQ ID NO: 2189027 - RNA, 19 nt, Artificial Sequence
  Description of Artificial Sequence: Synthetic oligonucleotide
agacaggguaggccagugu

SEQ ID NO: 2189028 - RNA, 19 nt, Artificial Sequence
  Description of Artificial Sequence: Synthetic oligonucleotide
uagagaucuggagcugaaa

SEQ ID NO: 2189029 - RNA, 19 nt, Artificial Sequence
  Description of Artificial Sequence: Synthetic oligonucleotide
guucucagaugcugagcuc

SEQ ID NO: 2189030 - RNA, 19 nt, Artificial Sequence
  Description of Artificial Sequence: Synthetic oligonucleotide
aggcuuggaccacaaucaa

SEQ ID NO: 2189031 - RNA, 19 nt, Artificial Sequence
  Description of Artificial Sequence: Synthetic oligonucleotide
guaccuuggccucacugcu

SEQ ID NO: 2189032 - RNA, 19 nt, Artificial Sequence
  Description of Artificial Sequence: Synthetic oligonucleotide
uggacgggguugacagcca

SEQ ID NO: 2189033 - RNA, 19 nt, Artificial Sequence
  Description of Artificial Sequence: Synthetic oligonucleotide
aaccccaaugggaccauuu

SEQ ID NO: 2189034 - RNA, 19 nt, Artificial Sequence
  Description of Artificial Sequence: Synthetic oligonucleotide
ccuaucuuggacgggguug

SEQ ID NO: 2189035 - RNA, 19 nt, Artificial Sequence
  Description of Artificial Sequence: Synthetic oligonucleotide
caaaugaugggcgacuuuu

SEQ ID NO: 2189036 - RNA, 19 nt, Artificial Sequence
  Description of Artificial Sequence: Synthetic oligonucleotide
uggggaagaggagcacaca

SEQ ID NO: 2189037 - RNA, 19 nt, Artificial Sequence
  Description of Artificial Sequence: Synthetic oligonucleotide
gcugacugguagcagcuuc

SEQ ID NO: 2189038 - RNA, 19 nt, Artificial Sequence
  Description of Artificial Sequence: Synthetic oligonucleotide
gaguauaaucaggcuugga

SEQ ID NO: 2189039 - RNA, 19 nt, Artificial Sequence
  Description of Artificial Sequence: Synthetic oligonucleotide
cagugucauggaggaaggg

SEQ ID NO: 2189040 - RNA, 19 nt, Artificial Sequence
  Description of Artificial Sequence: Synthetic oligonucleotide
agccuagguaguauccaga

SEQ ID NO: 2189041 - RNA, 19 nt, Artificial Sequence
  Description of Artificial Sequence: Synthetic oligonucleotide
uccccuagucaaggaacac

SEQ ID NO: 2189042 - RNA, 19 nt, Artificial Sequence
  Description of Artificial Sequence: Synthetic oligonucleotide
gcuuggaccacaaucaaau

SEQ ID NO: 2189043 - RNA, 19 nt, Artificial Sequence
  Description of Artificial Sequence: Synthetic oligonucleotide
cugaaaggccccagcgcca

SEQ ID NO: 2189044 - RNA, 19 nt, Artificial Sequence
  Description of Artificial Sequence: Synthetic oligonucleotide
gagguccauugguugucca

SEQ ID NO: 2189045 - RNA, 19 nt, Artificial Sequence
  Description of Artificial Sequence: Synthetic oligonucleotide
acagugccuucccaugcua

SEQ ID NO: 2189046 - RNA, 19 nt, Artificial Sequence
  Description of Artificial Sequence: Synthetic oligonucleotide
ggguugacagccagagaag

SEQ ID NO: 2189047 - RNA, 19 nt, Artificial Sequence
  Description of Artificial Sequence: Synthetic oligonucleotide
cuuggaccacaaucaaaua

SEQ ID NO: 2189048 - RNA, 19 nt, Artificial Sequence
  Description of Artificial Sequence: Synthetic oligonucleotide
uuagcacgauauggaaauu

SEQ ID NO: 2189049 - RNA, 19 nt, Artificial Sequence
  Description of Artificial Sequence: Synthetic oligonucleotide
agcaccggcugacgaguga

SEQ ID NO: 2189050 - RNA, 19 nt, Artificial Sequence
  Description of Artificial Sequence: Synthetic oligonucleotide
gguguggggaagaggagca

SEQ ID NO: 2189051 - RNA, 19 nt, Artificial Sequence
  Description of Artificial Sequence: Synthetic oligonucleotide
ggugaaggauagccaugug

SEQ ID NO: 2189052 - RNA, 19 nt, Artificial Sequence
  Description of Artificial Sequence: Synthetic oligonucleotide
ggcagcaagaauccagacu

SEQ ID NO: 2189053 - RNA, 19 nt, Artificial Sequence
  Description of Artificial Sequence: Synthetic oligonucleotide
caccggugaaggauagcca

SEQ ID NO: 2189054 - RNA, 19 nt, Artificial Sequence
  Description of Artificial Sequence: Synthetic oligonucleotide
cagccaggaggcauaugca

SEQ ID NO: 2189055 - RNA, 19 nt, Artificial Sequence
  Description of Artificial Sequence: Synthetic oligonucleotide
ccacagugccuucccaugc

SEQ ID NO: 2189056 - RNA, 19 nt, Artificial Sequence
  Description of Artificial Sequence: Synthetic oligonucleotide
ggaacaggacuuagcacga

SEQ ID NO: 2189057 - RNA, 19 nt, Artificial Sequence
  Description of Artificial Sequence: Synthetic oligonucleotide
acgagugauagcagccuau

SEQ ID NO: 2189058 - RNA, 19 nt, Artificial Sequence
  Description of Artificial Sequence: Synthetic oligonucleotide
caagguugagucugaguau

SEQ ID NO: 2189059 - RNA, 19 nt, Artificial Sequence
  Description of Artificial Sequence: Synthetic oligonucleotide
guggggacaaugagagaca

SEQ ID NO: 2189060 - RNA, 19 nt, Artificial Sequence
  Description of Artificial Sequence: Synthetic oligonucleotide
cacacagccaggaggcaua

SEQ ID NO: 2189061 - RNA, 19 nt, Artificial Sequence
  Description of Artificial Sequence: Synthetic oligonucleotide
aagcaccggcugacgagug

SEQ ID NO: 2189062 - RNA, 19 nt, Artificial Sequence
  Description of Artificial Sequence: Synthetic oligonucleotide
ggcgacuuuuaaaucuuga

SEQ ID NO: 2189063 - RNA, 19 nt, Artificial Sequence
  Description of Artificial Sequence: Synthetic oligonucleotide
gagcuccugucauucauuu

SEQ ID NO: 2189064 - RNA, 19 nt, Artificial Sequence
  Description of Artificial Sequence: Synthetic oligonucleotide
ugggaccauuuggauuuga

SEQ ID NO: 2189065 - RNA, 19 nt, Artificial Sequence
  Description of Artificial Sequence: Synthetic oligonucleotide
gccauucaacuaaugauua

SEQ ID NO: 2189066 - RNA, 19 nt, Artificial Sequence
  Description of Artificial Sequence: Synthetic oligonucleotide
ccccuagucaaggaacacc

SEQ ID NO: 2189067 - RNA, 19 nt, Artificial Sequence
  Description of Artificial Sequence: Synthetic oligonucleotide
gaacaggccuuggcacagc

SEQ ID NO: 2189068 - RNA, 19 nt, Artificial Sequence
  Description of Artificial Sequence: Synthetic oligonucleotide
gcugagucagccugcaagu

SEQ ID NO: 2189069 - RNA, 19 nt, Artificial Sequence
  Description of Artificial Sequence: Synthetic oligonucleotide
cucaagguugagucugagu

SEQ ID NO: 2189070 - RNA, 19 nt, Artificial Sequence
  Description of Artificial Sequence: Synthetic oligonucleotide
ggggacaaugagagacagg

SEQ ID NO: 2189071 - RNA, 19 nt, Artificial Sequence
  Description of Artificial Sequence: Synthetic oligonucleotide
uaaugcccucaagguugag

SEQ ID NO: 2189072 - RNA, 19 nt, Artificial Sequence
  Description of Artificial Sequence: Synthetic oligonucleotide
cugcuuacucucagagaaa

SEQ ID NO: 2189073 - RNA, 19 nt, Artificial Sequence
  Description of Artificial Sequence: Synthetic oligonucleotide
cccacagugccuucccaug

SEQ ID NO: 2189074 - RNA, 19 nt, Artificial Sequence
  Description of Artificial Sequence: Synthetic oligonucleotide
ggguaugccuggaucuccc

SEQ ID NO: 2189075 - RNA, 19 nt, Artificial Sequence
  Description of Artificial Sequence: Synthetic oligonucleotide
gguuguccagcugcugccc

SEQ ID NO: 2189076 - RNA, 19 nt, Artificial Sequence
  Description of Artificial Sequence: Synthetic oligonucleotide
gggguaugccuggaucucc

SEQ ID NO: 2189077 - RNA, 19 nt, Artificial Sequence
  Description of Artificial Sequence: Synthetic oligonucleotide
cagcgccauucaacuaaug

SEQ ID NO: 2189078 - RNA, 19 nt, Artificial Sequence
  Description of Artificial Sequence: Synthetic oligonucleotide
ggaacaccggugaaggaua

SEQ ID NO: 2189079 - RNA, 19 nt, Artificial Sequence
  Description of Artificial Sequence: Synthetic oligonucleotide
ccauuuggauuugauacaa

SEQ ID NO: 2189080 - RNA, 19 nt, Artificial Sequence
  Description of Artificial Sequence: Synthetic oligonucleotide
cuccugucauucauuuacu

SEQ ID NO: 2189081 - RNA, 19 nt, Artificial Sequence
  Description of Artificial Sequence: Synthetic oligonucleotide
ucccagcuggaggaagaau

SEQ ID NO: 2189082 - RNA, 19 nt, Artificial Sequence
  Description of Artificial Sequence: Synthetic oligonucleotide
gacgggguugacagccaga

SEQ ID NO: 2189083 - RNA, 19 nt, Artificial Sequence
  Description of Artificial Sequence: Synthetic oligonucleotide
ggggcagacggugugggga

SEQ ID NO: 2189084 - RNA, 19 nt, Artificial Sequence
  Description of Artificial Sequence: Synthetic oligonucleotide
uggcugagucagccugcaa

SEQ ID NO: 2189085 - RNA, 19 nt, Artificial Sequence
  Description of Artificial Sequence: Synthetic oligonucleotide
ccaacggucccugccuugc

SEQ ID NO: 2189086 - RNA, 19 nt, Artificial Sequence
  Description of Artificial Sequence: Synthetic oligonucleotide
ccggugaaggauagccaug

SEQ ID NO: 2189087 - RNA, 19 nt, Artificial Sequence
  Description of Artificial Sequence: Synthetic oligonucleotide
gguaugccuggaucuccca

SEQ ID NO: 2189088 - RNA, 19 nt, Artificial Sequence
  Description of Artificial Sequence: Synthetic oligonucleotide
gcaaaacaagcugacuggu

SEQ ID NO: 2189089 - RNA, 19 nt, Artificial Sequence
  Description of Artificial Sequence: Synthetic oligonucleotide
cugagcuccugucauucau

SEQ ID NO: 2189090 - RNA, 19 nt, Artificial Sequence
  Description of Artificial Sequence: Synthetic oligonucleotide
ccuagguaguauccagaca

SEQ ID NO: 2189091 - RNA, 19 nt, Artificial Sequence
  Description of Artificial Sequence: Synthetic oligonucleotide
uggaaaugguggggacaau

SEQ ID NO: 2189092 - RNA, 19 nt, Artificial Sequence
  Description of Artificial Sequence: Synthetic oligonucleotide
agccuaucuuggacggggu

SEQ ID NO: 2189093 - RNA, 19 nt, Artificial Sequence
  Description of Artificial Sequence: Synthetic oligonucleotide
ccggcugacgagugauagc

SEQ ID NO: 2189094 - RNA, 19 nt, Artificial Sequence
  Description of Artificial Sequence: Synthetic oligonucleotide
cagccugcaagugcuuaga

SEQ ID NO: 2189095 - RNA, 19 nt, Artificial Sequence
  Description of Artificial Sequence: Synthetic oligonucleotide
gggcgacuuuuaaaucuug

SEQ ID NO: 2189096 - RNA, 19 nt, Artificial Sequence
  Description of Artificial Sequence: Synthetic oligonucleotide
ccagacacuggaagauaca

SEQ ID NO: 2189097 - RNA, 19 nt, Artificial Sequence
  Description of Artificial Sequence: Synthetic oligonucleotide
gcagccuaucuuggacggg

SEQ ID NO: 2189098 - RNA, 19 nt, Artificial Sequence
  Description of Artificial Sequence: Synthetic oligonucleotide
gguaggccagugucaugga

SEQ ID NO: 2189099 - RNA, 19 nt, Artificial Sequence
  Description of Artificial Sequence: Synthetic oligonucleotide
gaaaauccucaggcauggu

SEQ ID NO: 2189100 - RNA, 19 nt, Artificial Sequence
  Description of Artificial Sequence: Synthetic oligonucleotide
gcuggaggaagaauacccu

SEQ ID NO: 2189101 - RNA, 19 nt, Artificial Sequence
  Description of Artificial Sequence: Synthetic oligonucleotide
ggcuuggaccacaaucaaa

SEQ ID NO: 2189102 - RNA, 19 nt, Artificial Sequence
  Description of Artificial Sequence: Synthetic oligonucleotide
gcacgauauggaaauuugu

SEQ ID NO: 2189103 - RNA, 19 nt, Artificial Sequence
  Description of Artificial Sequence: Synthetic oligonucleotide
aggccccagcgccauucaa

SEQ ID NO: 2189104 - RNA, 19 nt, Artificial Sequence
  Description of Artificial Sequence: Synthetic oligonucleotide
gggagagaaagcaccggcu

SEQ ID NO: 2189105 - RNA, 19 nt, Artificial Sequence
  Description of Artificial Sequence: Synthetic oligonucleotide
cggcugacgagugauagca

SEQ ID NO: 2189106 - RNA, 19 nt, Artificial Sequence
  Description of Artificial Sequence: Synthetic oligonucleotide
gccccagcgccauucaacu

SEQ ID NO: 2189107 - RNA, 19 nt, Artificial Sequence
  Description of Artificial Sequence: Synthetic oligonucleotide
cuggagcugaaaggcccca

SEQ ID NO: 2189108 - RNA, 19 nt, Artificial Sequence
  Description of Artificial Sequence: Synthetic oligonucleotide
cccaugcuauuacacucca

SEQ ID NO: 2189109 - RNA, 19 nt, Artificial Sequence
  Description of Artificial Sequence: Synthetic oligonucleotide
gggcagacgguguggggaa

SEQ ID NO: 2189110 - RNA, 19 nt, Artificial Sequence
  Description of Artificial Sequence: Synthetic oligonucleotide
ccagacucccucucccaca

SEQ ID NO: 2189111 - RNA, 19 nt, Artificial Sequence
  Description of Artificial Sequence: Synthetic oligonucleotide
ccccaaccccaaugggacc

SEQ ID NO: 2189112 - RNA, 19 nt, Artificial Sequence
  Description of Artificial Sequence: Synthetic oligonucleotide
gcaagaauccagacucccu

SEQ ID NO: 2189113 - RNA, 19 nt, Artificial Sequence
  Description of Artificial Sequence: Synthetic oligonucleotide
ccucaagguugagucugag

SEQ ID NO: 2189114 - RNA, 19 nt, Artificial Sequence
  Description of Artificial Sequence: Synthetic oligonucleotide
cgagugauagcagccuauc

SEQ ID NO: 2189115 - RNA, 19 nt, Artificial Sequence
  Description of Artificial Sequence: Synthetic oligonucleotide
cauaugcagccggcagcca

SEQ ID NO: 2189116 - RNA, 19 nt, Artificial Sequence
  Description of Artificial Sequence: Synthetic oligonucleotide
gguugagucugaguauaau

SEQ ID NO: 2189117 - RNA, 19 nt, Artificial Sequence
  Description of Artificial Sequence: Synthetic oligonucleotide
cacagccaggaggcauaug

SEQ ID NO: 2189118 - RNA, 19 nt, Artificial Sequence
  Description of Artificial Sequence: Synthetic oligonucleotide
cagugccuucccaugcuau

SEQ ID NO: 2189119 - RNA, 19 nt, Artificial Sequence
  Description of Artificial Sequence: Synthetic oligonucleotide
gaacaggacuuagcacgau

SEQ ID NO: 2189120 - RNA, 19 nt, Artificial Sequence
  Description of Artificial Sequence: Synthetic oligonucleotide
cccaacggucccugccuug

SEQ ID NO: 2189121 - RNA, 19 nt, Artificial Sequence
  Description of Artificial Sequence: Synthetic oligonucleotide
ggcagacgguguggggaag

SEQ ID NO: 2189122 - RNA, 19 nt, Artificial Sequence
  Description of Artificial Sequence: Synthetic oligonucleotide
caggguaggccagugucau

SEQ ID NO: 2189123 - RNA, 19 nt, Artificial Sequence
  Description of Artificial Sequence: Synthetic oligonucleotide
gggaaggugaaggcuggcu

SEQ ID NO: 2189124 - RNA, 19 nt, Artificial Sequence
  Description of Artificial Sequence: Synthetic oligonucleotide
gcagacgguguggggaaga

SEQ ID NO: 2189125 - RNA, 19 nt, Artificial Sequence
  Description of Artificial Sequence: Synthetic oligonucleotide
ccaaugggaccauuuggau

SEQ ID NO: 2189126 - RNA, 19 nt, Artificial Sequence
  Description of Artificial Sequence: Synthetic oligonucleotide
ggacaaugagagacagggu

SEQ ID NO: 2189127 - RNA, 19 nt, Artificial Sequence
  Description of Artificial Sequence: Synthetic oligonucleotide
gccucacugcuuacucuca

SEQ ID NO: 2189128 - RNA, 19 nt, Artificial Sequence
  Description of Artificial Sequence: Synthetic oligonucleotide
gcaaaugaugggcgacuuu

SEQ ID NO: 2189129 - RNA, 19 nt, Artificial Sequence
  Description of Artificial Sequence: Synthetic oligonucleotide
ccaugcuauuacacuccaa

SEQ ID NO: 2189130 - RNA, 19 nt, Artificial Sequence
  Description of Artificial Sequence: Synthetic oligonucleotide
caccggcugacgagugaua

SEQ ID NO: 2189131 - RNA, 19 nt, Artificial Sequence
  Description of Artificial Sequence: Synthetic oligonucleotide
gcauccugagugucauuuu

SEQ ID NO: 2189132 - RNA, 19 nt, Artificial Sequence
  Description of Artificial Sequence: Synthetic oligonucleotide
gcuuacucucagagaaaau

SEQ ID NO: 2189133 - RNA, 19 nt, Artificial Sequence
  Description of Artificial Sequence: Synthetic oligonucleotide
caacggucccugccuugcu

SEQ ID NO: 2189134 - RNA, 19 nt, Artificial Sequence
  Description of Artificial Sequence: Synthetic oligonucleotide
gaaaggccccagcgccauu

SEQ ID NO: 2189135 - RNA, 19 nt, Artificial Sequence
  Description of Artificial Sequence: Synthetic oligonucleotide
gcacugagguccauugguu

SEQ ID NO: 2189136 - RNA, 19 nt, Artificial Sequence
  Description of Artificial Sequence: Synthetic oligonucleotide
gcaccggcugacgagugau

SEQ ID NO: 2189137 - RNA, 19 nt, Artificial Sequence
  Description of Artificial Sequence: Synthetic oligonucleotide
gccuaucuuggacgggguu

SEQ ID NO: 2189138 - RNA, 19 nt, Artificial Sequence
  Description of Artificial Sequence: Synthetic oligonucleotide
ccagcgccauucaacuaau

SEQ ID NO: 2189139 - RNA, 19 nt, Artificial Sequence
  Description of Artificial Sequence: Synthetic oligonucleotide
ggccagugucauggaggaa

SEQ ID NO: 2189140 - RNA, 19 nt, Artificial Sequence
  Description of Artificial Sequence: Synthetic oligonucleotide
ccccagcgccauucaacua

SEQ ID NO: 2189141 - RNA, 19 nt, Artificial Sequence
  Description of Artificial Sequence: Synthetic oligonucleotide
cccucucccacagugccuu

SEQ ID NO: 2189142 - RNA, 19 nt, Artificial Sequence
  Description of Artificial Sequence: Synthetic oligonucleotide
cugccaccccaaccccaau

SEQ ID NO: 2189143 - RNA, 19 nt, Artificial Sequence
  Description of Artificial Sequence: Synthetic oligonucleotide
caaccccaaugggaccauu

SEQ ID NO: 2189144 - RNA, 19 nt, Artificial Sequence
  Description of Artificial Sequence: Synthetic oligonucleotide
ccaaccccaaugggaccau

SEQ ID NO: 2189145 - RNA, 19 nt, Artificial Sequence
  Description of Artificial Sequence: Synthetic oligonucleotide
agaaauguagggcaaaggc

SEQ ID NO: 2189146 - RNA, 19 nt, Artificial Sequence
  Description of Artificial Sequence: Synthetic oligonucleotide
auaagguccagguagccgc

SEQ ID NO: 2189147 - RNA, 19 nt, Artificial Sequence
  Description of Artificial Sequence: Synthetic oligonucleotide
uuggaagcuaaacuaaggg

SEQ ID NO: 2189148 - RNA, 19 nt, Artificial Sequence
  Description of Artificial Sequence: Synthetic oligonucleotide
ugugauguggcuauagaag

SEQ ID NO: 2189149 - RNA, 19 nt, Artificial Sequence
  Description of Artificial Sequence: Synthetic oligonucleotide
ugcacagcuacuaacacag

SEQ ID NO: 2189150 - RNA, 19 nt, Artificial Sequence
  Description of Artificial Sequence: Synthetic oligonucleotide
aauauggggcagcagacag

SEQ ID NO: 2189151 - RNA, 19 nt, Artificial Sequence
  Description of Artificial Sequence: Synthetic oligonucleotide
aggccauaaacacaagucc

SEQ ID NO: 2189152 - RNA, 19 nt, Artificial Sequence
  Description of Artificial Sequence: Synthetic oligonucleotide
gauggugugagguuggaag

SEQ ID NO: 2189153 - RNA, 19 nt, Artificial Sequence
  Description of Artificial Sequence: Synthetic oligonucleotide
uucaauauggggcagcaga

SEQ ID NO: 2189154 - RNA, 19 nt, Artificial Sequence
  Description of Artificial Sequence: Synthetic oligonucleotide
ugugcgccaccaaagaucg

SEQ ID NO: 2189155 - RNA, 19 nt, Artificial Sequence
  Description of Artificial Sequence: Synthetic oligonucleotide
cacagcuucaauauggggc

SEQ ID NO: 2189156 - RNA, 19 nt, Artificial Sequence
  Description of Artificial Sequence: Synthetic oligonucleotide
acacaagucccacagguac

SEQ ID NO: 2189157 - RNA, 19 nt, Artificial Sequence
  Description of Artificial Sequence: Synthetic oligonucleotide
aaggccauaaacacaaguc

SEQ ID NO: 2189158 - RNA, 19 nt, Artificial Sequence
  Description of Artificial Sequence: Synthetic oligonucleotide
aaauguagggcaaaggcca

SEQ ID NO: 2189159 - RNA, 19 nt, Artificial Sequence
  Description of Artificial Sequence: Synthetic oligonucleotide
gaucgguagaaauguaggg

SEQ ID NO: 2189160 - RNA, 19 nt, Artificial Sequence
  Description of Artificial Sequence: Synthetic oligonucleotide
uggcuauagaagcagagga

SEQ ID NO: 2189161 - RNA, 19 nt, Artificial Sequence
  Description of Artificial Sequence: Synthetic oligonucleotide
aucgguagaaauguagggc

SEQ ID NO: 2189162 - RNA, 19 nt, Artificial Sequence
  Description of Artificial Sequence: Synthetic oligonucleotide
aaaggccauaaacacaagu

SEQ ID NO: 2189163 - RNA, 19 nt, Artificial Sequence
  Description of Artificial Sequence: Synthetic oligonucleotide
cuauagaagcagaggaugg

SEQ ID NO: 2189164 - RNA, 19 nt, Artificial Sequence
  Description of Artificial Sequence: Synthetic oligonucleotide
acagaguugagauugugga

SEQ ID NO: 2189165 - RNA, 19 nt, Artificial Sequence
  Description of Artificial Sequence: Synthetic oligonucleotide
aacuaagggagacggucac

SEQ ID NO: 2189166 - RNA, 19 nt, Artificial Sequence
  Description of Artificial Sequence: Synthetic oligonucleotide
ugggacauagguaccacag

SEQ ID NO: 2189167 - RNA, 19 nt, Artificial Sequence
  Description of Artificial Sequence: Synthetic oligonucleotide
auggugugagguuggaagc

SEQ ID NO: 2189168 - RNA, 19 nt, Artificial Sequence
  Description of Artificial Sequence: Synthetic oligonucleotide
ucgguagaaauguagggca

SEQ ID NO: 2189169 - RNA, 19 nt, Artificial Sequence
  Description of Artificial Sequence: Synthetic oligonucleotide
uguggcuauagaagcagag

SEQ ID NO: 2189170 - RNA, 19 nt, Artificial Sequence
  Description of Artificial Sequence: Synthetic oligonucleotide
aagcuaaacuaagggagac

SEQ ID NO: 2189171 - RNA, 19 nt, Artificial Sequence
  Description of Artificial Sequence: Synthetic oligonucleotide
aagaucgguagaaauguag

SEQ ID NO: 2189172 - RNA, 19 nt, Artificial Sequence
  Description of Artificial Sequence: Synthetic oligonucleotide
ucaugggugccccaauggg

SEQ ID NO: 2189173 - RNA, 19 nt, Artificial Sequence
  Description of Artificial Sequence: Synthetic oligonucleotide
agggaaugcugacuggccc

SEQ ID NO: 2189174 - RNA, 19 nt, Artificial Sequence
  Description of Artificial Sequence: Synthetic oligonucleotide
ggaagcuaaacuaagggag

SEQ ID NO: 2189175 - RNA, 19 nt, Artificial Sequence
  Description of Artificial Sequence: Synthetic oligonucleotide
uaaacuaagggagacgguc

SEQ ID NO: 2189176 - RNA, 19 nt, Artificial Sequence
  Description of Artificial Sequence: Synthetic oligonucleotide
auaucgguggagucguugg

SEQ ID NO: 2189177 - RNA, 19 nt, Artificial Sequence
  Description of Artificial Sequence: Synthetic oligonucleotide
caccagaacaacuucggcc

SEQ ID NO: 2189178 - RNA, 19 nt, Artificial Sequence
  Description of Artificial Sequence: Synthetic oligonucleotide
gcuacuaacacaguggugc

SEQ ID NO: 2189179 - RNA, 19 nt, Artificial Sequence
  Description of Artificial Sequence: Synthetic oligonucleotide
ucaauauggggcagcagac

SEQ ID NO: 2189180 - RNA, 19 nt, Artificial Sequence
  Description of Artificial Sequence: Synthetic oligonucleotide
agauuguggauguugcuca

SEQ ID NO: 2189181 - RNA, 19 nt, Artificial Sequence
  Description of Artificial Sequence: Synthetic oligonucleotide
acuaacacaguggugcagg

SEQ ID NO: 2189182 - RNA, 19 nt, Artificial Sequence
  Description of Artificial Sequence: Synthetic oligonucleotide
uugcaaaucuaaagccagg

SEQ ID NO: 2189183 - RNA, 19 nt, Artificial Sequence
  Description of Artificial Sequence: Synthetic oligonucleotide
guauucaugaccacucucc

SEQ ID NO: 2189184 - RNA, 19 nt, Artificial Sequence
  Description of Artificial Sequence: Synthetic oligonucleotide
uauucaugaccacucucca

SEQ ID NO: 2189185 - RNA, 19 nt, Artificial Sequence
  Description of Artificial Sequence: Synthetic oligonucleotide
ugcaaaucuaaagccaggc

SEQ ID NO: 2189186 - RNA, 19 nt, Artificial Sequence
  Description of Artificial Sequence: Synthetic oligonucleotide
agaucgguagaaauguagg

SEQ ID NO: 2189187 - RNA, 19 nt, Artificial Sequence
  Description of Artificial Sequence: Synthetic oligonucleotide
ucggccaggaagagaaagg

SEQ ID NO: 2189188 - RNA, 19 nt, Artificial Sequence
  Description of Artificial Sequence: Synthetic oligonucleotide
gcuaaacuaagggagacgg

SEQ ID NO: 2189189 - RNA, 19 nt, Artificial Sequence
  Description of Artificial Sequence: Synthetic oligonucleotide
guuggaagcuaaacuaagg

SEQ ID NO: 2189190 - RNA, 19 nt, Artificial Sequence
  Description of Artificial Sequence: Synthetic oligonucleotide
gguaccaugauugcugugg

SEQ ID NO: 2189191 - RNA, 19 nt, Artificial Sequence
  Description of Artificial Sequence: Synthetic oligonucleotide
aagggagacggucacuggu

SEQ ID NO: 2189192 - RNA, 19 nt, Artificial Sequence
  Description of Artificial Sequence: Synthetic oligonucleotide
gagaaaggugcccagggca

SEQ ID NO: 2189193 - RNA, 19 nt, Artificial Sequence
  Description of Artificial Sequence: Synthetic oligonucleotide
cuucauccugagaagggcc

SEQ ID NO: 2189194 - RNA, 19 nt, Artificial Sequence
  Description of Artificial Sequence: Synthetic oligonucleotide
uugugcgccaccaaagauc

SEQ ID NO: 2189195 - RNA, 19 nt, Artificial Sequence
  Description of Artificial Sequence: Synthetic oligonucleotide
uugagcuuagcccggcuga

SEQ ID NO: 2189196 - RNA, 19 nt, Artificial Sequence
  Description of Artificial Sequence: Synthetic oligonucleotide
gaagccccaggccaguucc

SEQ ID NO: 2189197 - RNA, 19 nt, Artificial Sequence
  Description of Artificial Sequence: Synthetic oligonucleotide
ucuugugcgccaccaaaga

SEQ ID NO: 2189198 - RNA, 19 nt, Artificial Sequence
  Description of Artificial Sequence: Synthetic oligonucleotide
accaaagaucgguagaaau

SEQ ID NO: 2189199 - RNA, 19 nt, Artificial Sequence
  Description of Artificial Sequence: Synthetic oligonucleotide
cuguggaggccauagcugc

SEQ ID NO: 2189200 - RNA, 19 nt, Artificial Sequence
  Description of Artificial Sequence: Synthetic oligonucleotide
gagaccaugagugcaaaga

SEQ ID NO: 2189201 - RNA, 19 nt, Artificial Sequence
  Description of Artificial Sequence: Synthetic oligonucleotide
acagguaccaugauugcug

SEQ ID NO: 2189202 - RNA, 19 nt, Artificial Sequence
  Description of Artificial Sequence: Synthetic oligonucleotide
auucaugaccacucuccag

SEQ ID NO: 2189203 - RNA, 19 nt, Artificial Sequence
  Description of Artificial Sequence: Synthetic oligonucleotide
acaacuucggccaggaaga

SEQ ID NO: 2189204 - RNA, 19 nt, Artificial Sequence
  Description of Artificial Sequence: Synthetic oligonucleotide
uaccacaggagcugguuug

SEQ ID NO: 2189205 - RNA, 19 nt, Artificial Sequence
  Description of Artificial Sequence: Synthetic oligonucleotide
aacuugacccagcccacca

SEQ ID NO: 2189206 - RNA, 19 nt, Artificial Sequence
  Description of Artificial Sequence: Synthetic oligonucleotide
acagguggagaccaugagu

SEQ ID NO: 2189207 - RNA, 19 nt, Artificial Sequence
  Description of Artificial Sequence: Synthetic oligonucleotide
agagcagacgugcggcugg

SEQ ID NO: 2189208 - RNA, 19 nt, Artificial Sequence
  Description of Artificial Sequence: Synthetic oligonucleotide
agcgccgacggucacgggg

SEQ ID NO: 2189209 - RNA, 19 nt, Artificial Sequence
  Description of Artificial Sequence: Synthetic oligonucleotide
gcugaaggccacuagcagg

SEQ ID NO: 2189210 - RNA, 19 nt, Artificial Sequence
  Description of Artificial Sequence: Synthetic oligonucleotide
cauaagguccagguagccg

SEQ ID NO: 2189211 - RNA, 19 nt, Artificial Sequence
  Description of Artificial Sequence: Synthetic oligonucleotide
uucggccaggaagagaaag

SEQ ID NO: 2189212 - RNA, 19 nt, Artificial Sequence
  Description of Artificial Sequence: Synthetic oligonucleotide
guggcuauagaagcagagg

SEQ ID NO: 2189213 - RNA, 19 nt, Artificial Sequence
  Description of Artificial Sequence: Synthetic oligonucleotide
cuaagggagacggucacug

SEQ ID NO: 2189214 - RNA, 19 nt, Artificial Sequence
  Description of Artificial Sequence: Synthetic oligonucleotide
cuggcggguauucaugacc

SEQ ID NO: 2189215 - RNA, 19 nt, Artificial Sequence
  Description of Artificial Sequence: Synthetic oligonucleotide
cuuagcccggcugagguag

SEQ ID NO: 2189216 - RNA, 19 nt, Artificial Sequence
  Description of Artificial Sequence: Synthetic oligonucleotide
cagacgugcggcuggaggc

SEQ ID NO: 2189217 - RNA, 19 nt, Artificial Sequence
  Description of Artificial Sequence: Synthetic oligonucleotide
ccaaagaucgguagaaaug

SEQ ID NO: 2189218 - RNA, 19 nt, Artificial Sequence
  Description of Artificial Sequence: Synthetic oligonucleotide
gaagcuaaacuaagggaga

SEQ ID NO: 2189219 - RNA, 19 nt, Artificial Sequence
  Description of Artificial Sequence: Synthetic oligonucleotide
uguggcgacugguggacag

SEQ ID NO: 2189220 - RNA, 19 nt, Artificial Sequence
  Description of Artificial Sequence: Synthetic oligonucleotide
guggauguugcucacagcu

SEQ ID NO: 2189221 - RNA, 19 nt, Artificial Sequence
  Description of Artificial Sequence: Synthetic oligonucleotide
aguuccacauaucggugga

SEQ ID NO: 2189222 - RNA, 19 nt, Artificial Sequence
  Description of Artificial Sequence: Synthetic oligonucleotide
agcuaaacuaagggagacg

SEQ ID NO: 2189223 - RNA, 19 nt, Artificial Sequence
  Description of Artificial Sequence: Synthetic oligonucleotide
acuucggccaggaagagaa

SEQ ID NO: 2189224 - RNA, 19 nt, Artificial Sequence
  Description of Artificial Sequence: Synthetic oligonucleotide
cacaagucccacagguacc

SEQ ID NO: 2189225 - RNA, 19 nt, Artificial Sequence
  Description of Artificial Sequence: Synthetic oligonucleotide
ugcgccaccaaagaucggu

SEQ ID NO: 2189226 - RNA, 19 nt, Artificial Sequence
  Description of Artificial Sequence: Synthetic oligonucleotide
ggacauagguaccacagga

SEQ ID NO: 2189227 - RNA, 19 nt, Artificial Sequence
  Description of Artificial Sequence: Synthetic oligonucleotide
uguagggcaaaggccauaa

SEQ ID NO: 2189228 - RNA, 19 nt, Artificial Sequence
  Description of Artificial Sequence: Synthetic oligonucleotide
agcuuagcccggcugaggu

SEQ ID NO: 2189229 - RNA, 19 nt, Artificial Sequence
  Description of Artificial Sequence: Synthetic oligonucleotide
aggaagagaaaggugccca

SEQ ID NO: 2189230 - RNA, 19 nt, Artificial Sequence
  Description of Artificial Sequence: Synthetic oligonucleotide
gacugguggacagaguuga

SEQ ID NO: 2189231 - RNA, 19 nt, Artificial Sequence
  Description of Artificial Sequence: Synthetic oligonucleotide
ccccauaagguccagguag

SEQ ID NO: 2189232 - RNA, 19 nt, Artificial Sequence
  Description of Artificial Sequence: Synthetic oligonucleotide
ucugucuugugcgccacca

SEQ ID NO: 2189233 - RNA, 19 nt, Artificial Sequence
  Description of Artificial Sequence: Synthetic oligonucleotide
agaaaggugcccagggcag

SEQ ID NO: 2189234 - RNA, 19 nt, Artificial Sequence
  Description of Artificial Sequence: Synthetic oligonucleotide
uuccacauaucgguggagu

SEQ ID NO: 2189235 - RNA, 19 nt, Artificial Sequence
  Description of Artificial Sequence: Synthetic oligonucleotide
uguggauguugcucacagc

SEQ ID NO: 2189236 - RNA, 19 nt, Artificial Sequence
  Description of Artificial Sequence: Synthetic oligonucleotide
gauuguggauguugcucac

SEQ ID NO: 2189237 - RNA, 19 nt, Artificial Sequence
  Description of Artificial Sequence: Synthetic oligonucleotide
ucgguggagucguuggugu

SEQ ID NO: 2189238 - RNA, 19 nt, Artificial Sequence
  Description of Artificial Sequence: Synthetic oligonucleotide
cacaaacuugacccagccc

SEQ ID NO: 2189239 - RNA, 19 nt, Artificial Sequence
  Description of Artificial Sequence: Synthetic oligonucleotide
guuuguucaugggugcccc

SEQ ID NO: 2189240 - RNA, 19 nt, Artificial Sequence
  Description of Artificial Sequence: Synthetic oligonucleotide
caaagaucgguagaaaugu

SEQ ID NO: 2189241 - RNA, 19 nt, Artificial Sequence
  Description of Artificial Sequence: Synthetic oligonucleotide
aaaggugcccagggcagug

SEQ ID NO: 2189242 - RNA, 19 nt, Artificial Sequence
  Description of Artificial Sequence: Synthetic oligonucleotide
ugugagguuggaagcuaaa

SEQ ID NO: 2189243 - RNA, 19 nt, Artificial Sequence
  Description of Artificial Sequence: Synthetic oligonucleotide
cuuguggcggucugucuug

SEQ ID NO: 2189244 - RNA, 19 nt, Artificial Sequence
  Description of Artificial Sequence: Synthetic oligonucleotide
uacuaacacaguggugcag

SEQ ID NO: 2189245 - RNA, 19 nt, Artificial Sequence
  Description of Artificial Sequence: Synthetic oligonucleotide
gcugguuuguucaugggug

SEQ ID NO: 2189246 - RNA, 19 nt, Artificial Sequence
  Description of Artificial Sequence: Synthetic oligonucleotide
uaucgguggagucguuggu

SEQ ID NO: 2189247 - RNA, 19 nt, Artificial Sequence
  Description of Artificial Sequence: Synthetic oligonucleotide
agucccacagguaccauga

SEQ ID NO: 2189248 - RNA, 19 nt, Artificial Sequence
  Description of Artificial Sequence: Synthetic oligonucleotide
gguuggaagcuaaacuaag

SEQ ID NO: 2189249 - RNA, 19 nt, Artificial Sequence
  Description of Artificial Sequence: Synthetic oligonucleotide
gagucguugguguggcgac

SEQ ID NO: 2189250 - RNA, 19 nt, Artificial Sequence
  Description of Artificial Sequence: Synthetic oligonucleotide
gucuugugcgccaccaaag

SEQ ID NO: 2189251 - RNA, 19 nt, Artificial Sequence
  Description of Artificial Sequence: Synthetic oligonucleotide
uguugcucacagcuucaau

SEQ ID NO: 2189252 - RNA, 19 nt, Artificial Sequence
  Description of Artificial Sequence: Synthetic oligonucleotide
ugagcuuagcccggcugag

SEQ ID NO: 2189253 - RNA, 19 nt, Artificial Sequence
  Description of Artificial Sequence: Synthetic oligonucleotide
gccacuagcaggccuggcg

SEQ ID NO: 2189254 - RNA, 19 nt, Artificial Sequence
  Description of Artificial Sequence: Synthetic oligonucleotide
cauaucgguggagucguug

SEQ ID NO: 2189255 - RNA, 19 nt, Artificial Sequence
  Description of Artificial Sequence: Synthetic oligonucleotide
ccaugauugcuguggaggc

SEQ ID NO: 2189256 - RNA, 19 nt, Artificial Sequence
  Description of Artificial Sequence: Synthetic oligonucleotide
guagccgcggugcacgaac

SEQ ID NO: 2189257 - RNA, 19 nt, Artificial Sequence
  Description of Artificial Sequence: Synthetic oligonucleotide
aggugcacagcuacuaaca

SEQ ID NO: 2189258 - RNA, 19 nt, Artificial Sequence
  Description of Artificial Sequence: Synthetic oligonucleotide
gaacucccgguacguggcg

SEQ ID NO: 2189259 - RNA, 19 nt, Artificial Sequence
  Description of Artificial Sequence: Synthetic oligonucleotide
auauggggcagcagacagg

SEQ ID NO: 2189260 - RNA, 19 nt, Artificial Sequence
  Description of Artificial Sequence: Synthetic oligonucleotide
uggacagaguugagauugu

SEQ ID NO: 2189261 - RNA, 19 nt, Artificial Sequence
  Description of Artificial Sequence: Synthetic oligonucleotide
uggugugagguuggaagcu

SEQ ID NO: 2189262 - RNA, 19 nt, Artificial Sequence
  Description of Artificial Sequence: Synthetic oligonucleotide
gguggcaccugggacauag

SEQ ID NO: 2189263 - RNA, 19 nt, Artificial Sequence
  Description of Artificial Sequence: Synthetic oligonucleotide
uggauguugcucacagcuu

SEQ ID NO: 2189264 - RNA, 19 nt, Artificial Sequence
  Description of Artificial Sequence: Synthetic oligonucleotide
gguauucaugaccacucuc

SEQ ID NO: 2189265 - RNA, 19 nt, Artificial Sequence
  Description of Artificial Sequence: Synthetic oligonucleotide
gagacggucacugguggca

SEQ ID NO: 2189266 - RNA, 19 nt, Artificial Sequence
  Description of Artificial Sequence: Synthetic oligonucleotide
uugacccagcccaccagaa

SEQ ID NO: 2189267 - RNA, 19 nt, Artificial Sequence
  Description of Artificial Sequence: Synthetic oligonucleotide
cagguagccgcggugcacg

SEQ ID NO: 2189268 - RNA, 19 nt, Artificial Sequence
  Description of Artificial Sequence: Synthetic oligonucleotide
uuuguucaugggugcccca

SEQ ID NO: 2189269 - RNA, 19 nt, Artificial Sequence
  Description of Artificial Sequence: Synthetic oligonucleotide
agaagggccgcgccaccag

SEQ ID NO: 2189270 - RNA, 19 nt, Artificial Sequence
  Description of Artificial Sequence: Synthetic oligonucleotide
agcggggccuguucgcccg

SEQ ID NO: 2189271 - RNA, 19 nt, Artificial Sequence
  Description of Artificial Sequence: Synthetic oligonucleotide
gcagacgugcggcuggagg

SEQ ID NO: 2189272 - RNA, 19 nt, Artificial Sequence
  Description of Artificial Sequence: Synthetic oligonucleotide
cccaccagaacaacuucgg

SEQ ID NO: 2189273 - RNA, 19 nt, Artificial Sequence
  Description of Artificial Sequence: Synthetic oligonucleotide
aagcccgacagcagagcag

SEQ ID NO: 2189274 - RNA, 19 nt, Artificial Sequence
  Description of Artificial Sequence: Synthetic oligonucleotide
uacguggcggagcccgcag

SEQ ID NO: 2189275 - RNA, 19 nt, Artificial Sequence
  Description of Artificial Sequence: Synthetic oligonucleotide
gggaaugcugacuggcccc

SEQ ID NO: 2189276 - RNA, 19 nt, Artificial Sequence
  Description of Artificial Sequence: Synthetic oligonucleotide
uggcgacugguggacagag

SEQ ID NO: 2189277 - RNA, 19 nt, Artificial Sequence
  Description of Artificial Sequence: Synthetic oligonucleotide
agacggucacugguggcac

SEQ ID NO: 2189278 - RNA, 19 nt, Artificial Sequence
  Description of Artificial Sequence: Synthetic oligonucleotide
cagaacaacuucggccagg

SEQ ID NO: 2189279 - RNA, 19 nt, Artificial Sequence
  Description of Artificial Sequence: Synthetic oligonucleotide
cuacuaacacaguggugca

SEQ ID NO: 2189280 - RNA, 19 nt, Artificial Sequence
  Description of Artificial Sequence: Synthetic oligonucleotide
guaccaugauugcugugga

SEQ ID NO: 2189281 - RNA, 19 nt, Artificial Sequence
  Description of Artificial Sequence: Synthetic oligonucleotide
ugggcaccaccacacacuu

SEQ ID NO: 2189282 - RNA, 19 nt, Artificial Sequence
  Description of Artificial Sequence: Synthetic oligonucleotide
caaaggccauaaacacaag

SEQ ID NO: 2189283 - RNA, 19 nt, Artificial Sequence
  Description of Artificial Sequence: Synthetic oligonucleotide
aaagaucgguagaaaugua

SEQ ID NO: 2189284 - RNA, 19 nt, Artificial Sequence
  Description of Artificial Sequence: Synthetic oligonucleotide
aacacaagucccacaggua

SEQ ID NO: 2189285 - RNA, 19 nt, Artificial Sequence
  Description of Artificial Sequence: Synthetic oligonucleotide
gggagacggucacuggugg

SEQ ID NO: 2189286 - RNA, 19 nt, Artificial Sequence
  Description of Artificial Sequence: Synthetic oligonucleotide
aacuucggccaggaagaga

SEQ ID NO: 2189287 - RNA, 19 nt, Artificial Sequence
  Description of Artificial Sequence: Synthetic oligonucleotide
agguuggaagcuaaacuaa

SEQ ID NO: 2189288 - RNA, 19 nt, Artificial Sequence
  Description of Artificial Sequence: Synthetic oligonucleotide
ccacauaucgguggagucg

SEQ ID NO: 2189289 - RNA, 19 nt, Artificial Sequence
  Description of Artificial Sequence: Synthetic oligonucleotide
ggugcacagcuacuaacac

SEQ ID NO: 2189290 - RNA, 19 nt, Artificial Sequence
  Description of Artificial Sequence: Synthetic oligonucleotide
cauccugagaagggccgcg

SEQ ID NO: 2189291 - RNA, 19 nt, Artificial Sequence
  Description of Artificial Sequence: Synthetic oligonucleotide
uccagguagccgcggugca

SEQ ID NO: 2189292 - RNA, 19 nt, Artificial Sequence
  Description of Artificial Sequence: Synthetic oligonucleotide
ugagcgcccgcagggaaug

SEQ ID NO: 2189293 - RNA, 19 nt, Artificial Sequence
  Description of Artificial Sequence: Synthetic oligonucleotide
gaagggccgcgccaccagc

SEQ ID NO: 2189294 - RNA, 19 nt, Artificial Sequence
  Description of Artificial Sequence: Synthetic oligonucleotide
uuguucaugggugccccaa

SEQ ID NO: 2189295 - RNA, 19 nt, Artificial Sequence
  Description of Artificial Sequence: Synthetic oligonucleotide
gccaggcucacacagccug

SEQ ID NO: 2189296 - RNA, 19 nt, Artificial Sequence
  Description of Artificial Sequence: Synthetic oligonucleotide
agcccgacagcagagcaga

SEQ ID NO: 2189297 - RNA, 19 nt, Artificial Sequence
  Description of Artificial Sequence: Synthetic oligonucleotide
ugccugccaaccaggucca

SEQ ID NO: 2189298 - RNA, 19 nt, Artificial Sequence
  Description of Artificial Sequence: Synthetic oligonucleotide
ucagcggggccuguucgcc

SEQ ID NO: 2189299 - RNA, 19 nt, Artificial Sequence
  Description of Artificial Sequence: Synthetic oligonucleotide
cccaaugggcacaaacuug

SEQ ID NO: 2189300 - RNA, 19 nt, Artificial Sequence
  Description of Artificial Sequence: Synthetic oligonucleotide
guagaggcggcgccagcug

SEQ ID NO: 2189301 - RNA, 19 nt, Artificial Sequence
  Description of Artificial Sequence: Synthetic oligonucleotide
gagcuuagcccggcugagg

SEQ ID NO: 2189302 - RNA, 19 nt, Artificial Sequence
  Description of Artificial Sequence: Synthetic oligonucleotide
gguuuguucaugggugccc

SEQ ID NO: 2189303 - RNA, 19 nt, Artificial Sequence
  Description of Artificial Sequence: Synthetic oligonucleotide
auuguggauguugcucaca

SEQ ID NO: 2189304 - RNA, 19 nt, Artificial Sequence
  Description of Artificial Sequence: Synthetic oligonucleotide
gagguagaggcggcgccag

SEQ ID NO: 2189305 - RNA, 19 nt, Artificial Sequence
  Description of Artificial Sequence: Synthetic oligonucleotide
cccauaagguccagguagc

SEQ ID NO: 2189306 - RNA, 19 nt, Artificial Sequence
  Description of Artificial Sequence: Synthetic oligonucleotide
agggagacggucacuggug

SEQ ID NO: 2189307 - RNA, 19 nt, Artificial Sequence
  Description of Artificial Sequence: Synthetic oligonucleotide
uggagucguugguguggcg

SEQ ID NO: 2189308 - RNA, 19 nt, Artificial Sequence
  Description of Artificial Sequence: Synthetic oligonucleotide
ucccucgccgcccuucauc

SEQ ID NO: 2189309 - RNA, 19 nt, Artificial Sequence
  Description of Artificial Sequence: Synthetic oligonucleotide
ucucccucgccgcccuuca

SEQ ID NO: 2189310 - RNA, 19 nt, Artificial Sequence
  Description of Artificial Sequence: Synthetic oligonucleotide
gcgacugaguuccucuagc

SEQ ID NO: 2189311 - RNA, 19 nt, Artificial Sequence
  Description of Artificial Sequence: Synthetic oligonucleotide
gacggucacugguggcacc

SEQ ID NO: 2189312 - RNA, 19 nt, Artificial Sequence
  Description of Artificial Sequence: Synthetic oligonucleotide
cauagcugccugccaacca

SEQ ID NO: 2189313 - RNA, 19 nt, Artificial Sequence
  Description of Artificial Sequence: Synthetic oligonucleotide
ggcgacugaguuccucuag

SEQ ID NO: 2189314 - RNA, 19 nt, Artificial Sequence
  Description of Artificial Sequence: Synthetic oligonucleotide
ggagaccaugagugcaaag

SEQ ID NO: 2189315 - RNA, 19 nt, Artificial Sequence
  Description of Artificial Sequence: Synthetic oligonucleotide
agguaccaugauugcugug

SEQ ID NO: 2189316 - RNA, 19 nt, Artificial Sequence
  Description of Artificial Sequence: Synthetic oligonucleotide
guggagucguugguguggc

SEQ ID NO: 2189317 - RNA, 19 nt, Artificial Sequence
  Description of Artificial Sequence: Synthetic oligonucleotide
gguggagaccaugagugca

SEQ ID NO: 2189318 - RNA, 19 nt, Artificial Sequence
  Description of Artificial Sequence: Synthetic oligonucleotide
gcccgugucucccucgccg

SEQ ID NO: 2189319 - RNA, 19 nt, Artificial Sequence
  Description of Artificial Sequence: Synthetic oligonucleotide
acguggcggagcccgcagg

SEQ ID NO: 2189320 - RNA, 19 nt, Artificial Sequence
  Description of Artificial Sequence: Synthetic oligonucleotide
gucguugguguggcgacug

SEQ ID NO: 2189321 - RNA, 19 nt, Artificial Sequence
  Description of Artificial Sequence: Synthetic oligonucleotide
aggcucacacagccugcag

SEQ ID NO: 2189322 - RNA, 19 nt, Artificial Sequence
  Description of Artificial Sequence: Synthetic oligonucleotide
gcccuucauccugagaagg

SEQ ID NO: 2189323 - RNA, 19 nt, Artificial Sequence
  Description of Artificial Sequence: Synthetic oligonucleotide
agcuacuaacacaguggug

SEQ ID NO: 2189324 - RNA, 19 nt, Artificial Sequence
  Description of Artificial Sequence: Synthetic oligonucleotide
acucccgguacguggcgga

SEQ ID NO: 2189325 - RNA, 19 nt, Artificial Sequence
  Description of Artificial Sequence: Synthetic oligonucleotide
agccgcggugcacgaacuc

SEQ ID NO: 2189326 - RNA, 19 nt, Artificial Sequence
  Description of Artificial Sequence: Synthetic oligonucleotide
caccacacacuugccgggg

SEQ ID NO: 2189327 - RNA, 19 nt, Artificial Sequence
  Description of Artificial Sequence: Synthetic oligonucleotide
cugggacauagguaccaca

SEQ ID NO: 2189328 - RNA, 19 nt, Artificial Sequence
  Description of Artificial Sequence: Synthetic oligonucleotide
gccauaaacacaaguccca

SEQ ID NO: 2189329 - RNA, 19 nt, Artificial Sequence
  Description of Artificial Sequence: Synthetic oligonucleotide
aggcgcugaaggccacuag

SEQ ID NO: 2189330 - RNA, 19 nt, Artificial Sequence
  Description of Artificial Sequence: Synthetic oligonucleotide
uguucgcccgugucucccu

SEQ ID NO: 2189331 - RNA, 19 nt, Artificial Sequence
  Description of Artificial Sequence: Synthetic oligonucleotide
caauauggggcagcagaca

SEQ ID NO: 2189332 - RNA, 19 nt, Artificial Sequence
  Description of Artificial Sequence: Synthetic oligonucleotide
uguggcggucugucuugug

SEQ ID NO: 2189333 - RNA, 19 nt, Artificial Sequence
  Description of Artificial Sequence: Synthetic oligonucleotide
cccaagaagggccgggccc

SEQ ID NO: 2189334 - RNA, 19 nt, Artificial Sequence
  Description of Artificial Sequence: Synthetic oligonucleotide
ggggaccccaagaagggcc

SEQ ID NO: 2189335 - RNA, 19 nt, Artificial Sequence
  Description of Artificial Sequence: Synthetic oligonucleotide
uuagcccggcugagguaga

SEQ ID NO: 2189336 - RNA, 19 nt, Artificial Sequence
  Description of Artificial Sequence: Synthetic oligonucleotide
cagcagacagguggagacc

SEQ ID NO: 2189337 - RNA, 19 nt, Artificial Sequence
  Description of Artificial Sequence: Synthetic oligonucleotide
uagccgcggugcacgaacu

SEQ ID NO: 2189338 - RNA, 19 nt, Artificial Sequence
  Description of Artificial Sequence: Synthetic oligonucleotide
aggccuggcggguauucau

SEQ ID NO: 2189339 - RNA, 19 nt, Artificial Sequence
  Description of Artificial Sequence: Synthetic oligonucleotide
cuguucgcccgugucuccc

SEQ ID NO: 2189340 - RNA, 19 nt, Artificial Sequence
  Description of Artificial Sequence: Synthetic oligonucleotide
ugauugcuguggaggccau

SEQ ID NO: 2189341 - RNA, 19 nt, Artificial Sequence
  Description of Artificial Sequence: Synthetic oligonucleotide
cuugccggggugggcaggc

SEQ ID NO: 2189342 - RNA, 19 nt, Artificial Sequence
  Description of Artificial Sequence: Synthetic oligonucleotide
acuagcaggccuggcgggu

SEQ ID NO: 2189343 - RNA, 19 nt, Artificial Sequence
  Description of Artificial Sequence: Synthetic oligonucleotide
cuaaacuaagggagacggu

SEQ ID NO: 2189344 - RNA, 19 nt, Artificial Sequence
  Description of Artificial Sequence: Synthetic oligonucleotide
uggagaccaugagugcaaa

SEQ ID NO: 2189345 - RNA, 19 nt, Artificial Sequence
  Description of Artificial Sequence: Synthetic oligonucleotide
ggagucguugguguggcga

SEQ ID NO: 2189346 - RNA, 19 nt, Artificial Sequence
  Description of Artificial Sequence: Synthetic oligonucleotide
cagguccaugggcaccacc

SEQ ID NO: 2189347 - RNA, 19 nt, Artificial Sequence
  Description of Artificial Sequence: Synthetic oligonucleotide
ggagacggucacugguggc

SEQ ID NO: 2189348 - RNA, 19 nt, Artificial Sequence
  Description of Artificial Sequence: Synthetic oligonucleotide
cggguauucaugaccacuc

SEQ ID NO: 2189349 - RNA, 19 nt, Artificial Sequence
  Description of Artificial Sequence: Synthetic oligonucleotide
gcaaaucuaaagccaggcu

SEQ ID NO: 2189350 - RNA, 19 nt, Artificial Sequence
  Description of Artificial Sequence: Synthetic oligonucleotide
ccaccagaacaacuucggc

SEQ ID NO: 2189351 - RNA, 19 nt, Artificial Sequence
  Description of Artificial Sequence: Synthetic oligonucleotide
agacgugcggcuggaggcu

SEQ ID NO: 2189352 - RNA, 19 nt, Artificial Sequence
  Description of Artificial Sequence: Synthetic oligonucleotide
caacuucggccaggaagag

SEQ ID NO: 2189353 - RNA, 19 nt, Artificial Sequence
  Description of Artificial Sequence: Synthetic oligonucleotide
ggacagaguugagauugug

SEQ ID NO: 2189354 - RNA, 19 nt, Artificial Sequence
  Description of Artificial Sequence: Synthetic oligonucleotide
cacauaucgguggagucgu

SEQ ID NO: 2189355 - RNA, 19 nt, Artificial Sequence
  Description of Artificial Sequence: Synthetic oligonucleotide
ccgcccuucauccugagaa

SEQ ID NO: 2189356 - RNA, 19 nt, Artificial Sequence
  Description of Artificial Sequence: Synthetic oligonucleotide
agcccggcugagguagagg

SEQ ID NO: 2189357 - RNA, 19 nt, Artificial Sequence
  Description of Artificial Sequence: Synthetic oligonucleotide
gucugucuugugcgccacc

SEQ ID NO: 2189358 - RNA, 19 nt, Artificial Sequence
  Description of Artificial Sequence: Synthetic oligonucleotide
ccgcagggaaugcugacug

SEQ ID NO: 2189359 - RNA, 19 nt, Artificial Sequence
  Description of Artificial Sequence: Synthetic oligonucleotide
uagcccggcugagguagag

SEQ ID NO: 2189360 - RNA, 19 nt, Artificial Sequence
  Description of Artificial Sequence: Synthetic oligonucleotide
cccucgccgcccuucaucc

SEQ ID NO: 2189361 - RNA, 19 nt, Artificial Sequence
  Description of Artificial Sequence: Synthetic oligonucleotide
cacuugccggggugggcag

SEQ ID NO: 2189362 - RNA, 19 nt, Artificial Sequence
  Description of Artificial Sequence: Synthetic oligonucleotide
ucccgguacguggcggagc

SEQ ID NO: 2189363 - RNA, 19 nt, Artificial Sequence
  Description of Artificial Sequence: Synthetic oligonucleotide
gguguggcgacugguggac

SEQ ID NO: 2189364 - RNA, 19 nt, Artificial Sequence
  Description of Artificial Sequence: Synthetic oligonucleotide
acuugccggggugggcagg

SEQ ID NO: 2189365 - RNA, 19 nt, Artificial Sequence
  Description of Artificial Sequence: Synthetic oligonucleotide
cccgguacguggcggagcc

SEQ ID NO: 2189366 - RNA, 19 nt, Artificial Sequence
  Description of Artificial Sequence: Synthetic oligonucleotide
cagaguugagauuguggau

SEQ ID NO: 2189367 - RNA, 19 nt, Artificial Sequence
  Description of Artificial Sequence: Synthetic oligonucleotide
ggcggucugucuugugcgc

SEQ ID NO: 2189368 - RNA, 19 nt, Artificial Sequence
  Description of Artificial Sequence: Synthetic oligonucleotide
cagcggggccuguucgccc

SEQ ID NO: 2189369 - RNA, 19 nt, Artificial Sequence
  Description of Artificial Sequence: Synthetic oligonucleotide
uuguggcggucugucuugu

SEQ ID NO: 2189370 - RNA, 19 nt, Artificial Sequence
  Description of Artificial Sequence: Synthetic oligonucleotide
cacgaacucccgguacgug

SEQ ID NO: 2189371 - RNA, 19 nt, Artificial Sequence
  Description of Artificial Sequence: Synthetic oligonucleotide
gccauagcugccugccaac

SEQ ID NO: 2189372 - RNA, 19 nt, Artificial Sequence
  Description of Artificial Sequence: Synthetic oligonucleotide
cuugugcgccaccaaagau

SEQ ID NO: 2189373 - RNA, 19 nt, Artificial Sequence
  Description of Artificial Sequence: Synthetic oligonucleotide
cagguaccaugauugcugu

SEQ ID NO: 2189374 - RNA, 19 nt, Artificial Sequence
  Description of Artificial Sequence: Synthetic oligonucleotide
gcggugcacgaacucccgg

SEQ ID NO: 2189375 - RNA, 19 nt, Artificial Sequence
  Description of Artificial Sequence: Synthetic oligonucleotide
ccauaagguccagguagcc

SEQ ID NO: 2189376 - RNA, 19 nt, Artificial Sequence
  Description of Artificial Sequence: Synthetic oligonucleotide
gugugagguuggaagcuaa

SEQ ID NO: 2189377 - RNA, 19 nt, Artificial Sequence
  Description of Artificial Sequence: Synthetic oligonucleotide
ugccggggugggcaggcuu

SEQ ID NO: 2189378 - RNA, 19 nt, Artificial Sequence
  Description of Artificial Sequence: Synthetic oligonucleotide
ccaggcucacacagccugc

SEQ ID NO: 2189379 - RNA, 19 nt, Artificial Sequence
  Description of Artificial Sequence: Synthetic oligonucleotide
gaccacucuccagcugcac

SEQ ID NO: 2189380 - RNA, 19 nt, Artificial Sequence
  Description of Artificial Sequence: Synthetic oligonucleotide
ccagaacaacuucggccag

SEQ ID NO: 2189381 - RNA, 19 nt, Artificial Sequence
  Description of Artificial Sequence: Synthetic oligonucleotide
gcagaggauggugugaggu

SEQ ID NO: 2189382 - RNA, 19 nt, Artificial Sequence
  Description of Artificial Sequence: Synthetic oligonucleotide
agguagccgcggugcacga

SEQ ID NO: 2189383 - RNA, 19 nt, Artificial Sequence
  Description of Artificial Sequence: Synthetic oligonucleotide
gccaccagcgccgacgguc

SEQ ID NO: 2189384 - RNA, 19 nt, Artificial Sequence
  Description of Artificial Sequence: Synthetic oligonucleotide
gcgacugguggacagaguu

SEQ ID NO: 2189385 - RNA, 19 nt, Artificial Sequence
  Description of Artificial Sequence: Synthetic oligonucleotide
gccuggcggguauucauga

SEQ ID NO: 2189386 - RNA, 19 nt, Artificial Sequence
  Description of Artificial Sequence: Synthetic oligonucleotide
guaccacaggagcugguuu

SEQ ID NO: 2189387 - RNA, 19 nt, Artificial Sequence
  Description of Artificial Sequence: Synthetic oligonucleotide
gcgaagcccgacagcagag

SEQ ID NO: 2189388 - RNA, 19 nt, Artificial Sequence
  Description of Artificial Sequence: Synthetic oligonucleotide
caccaaagaucgguagaaa

SEQ ID NO: 2189389 - RNA, 19 nt, Artificial Sequence
  Description of Artificial Sequence: Synthetic oligonucleotide
cgcugaaggccacuagcag

SEQ ID NO: 2189390 - RNA, 19 nt, Artificial Sequence
  Description of Artificial Sequence: Synthetic oligonucleotide
cagcccaccagaacaacuu

SEQ ID NO: 2189391 - RNA, 19 nt, Artificial Sequence
  Description of Artificial Sequence: Synthetic oligonucleotide
aguugagauuguggauguu

SEQ ID NO: 2189392 - RNA, 19 nt, Artificial Sequence
  Description of Artificial Sequence: Synthetic oligonucleotide
auguagggcaaaggccaua

SEQ ID NO: 2189393 - RNA, 19 nt, Artificial Sequence
  Description of Artificial Sequence: Synthetic oligonucleotide
ggugcacgaacucccggua

SEQ ID NO: 2189394 - RNA, 19 nt, Artificial Sequence
  Description of Artificial Sequence: Synthetic oligonucleotide
ugcaggcgacugaguuccu

SEQ ID NO: 2189395 - RNA, 19 nt, Artificial Sequence
  Description of Artificial Sequence: Synthetic oligonucleotide
ccgacagcagagcagacgu

SEQ ID NO: 2189396 - RNA, 19 nt, Artificial Sequence
  Description of Artificial Sequence: Synthetic oligonucleotide
guucgcccgugucucccuc

SEQ ID NO: 2189397 - RNA, 19 nt, Artificial Sequence
  Description of Artificial Sequence: Synthetic oligonucleotide
agcugagcgcccgcaggga

SEQ ID NO: 2189398 - RNA, 19 nt, Artificial Sequence
  Description of Artificial Sequence: Synthetic oligonucleotide
agcagacgugcggcuggag

SEQ ID NO: 2189399 - RNA, 19 nt, Artificial Sequence
  Description of Artificial Sequence: Synthetic oligonucleotide
ccaccaaagaucgguagaa

SEQ ID NO: 2189400 - RNA, 19 nt, Artificial Sequence
  Description of Artificial Sequence: Synthetic oligonucleotide
cgguacguggcggagcccg

SEQ ID NO: 2189401 - RNA, 19 nt, Artificial Sequence
  Description of Artificial Sequence: Synthetic oligonucleotide
cguggcggagcccgcaggg

SEQ ID NO: 2189402 - RNA, 19 nt, Artificial Sequence
  Description of Artificial Sequence: Synthetic oligonucleotide
ggguauucaugaccacucu

SEQ ID NO: 2189403 - RNA, 19 nt, Artificial Sequence
  Description of Artificial Sequence: Synthetic oligonucleotide
cgccaccaaagaucgguag

SEQ ID NO: 2189404 - RNA, 19 nt, Artificial Sequence
  Description of Artificial Sequence: Synthetic oligonucleotide
ccacacacuugccggggug

SEQ ID NO: 2189405 - RNA, 19 nt, Artificial Sequence
  Description of Artificial Sequence: Synthetic oligonucleotide
ggcuauagaagcagaggau

SEQ ID NO: 2189406 - RNA, 19 nt, Artificial Sequence
  Description of Artificial Sequence: Synthetic oligonucleotide
ccccaagaagggccgggcc

SEQ ID NO: 2189407 - RNA, 19 nt, Artificial Sequence
  Description of Artificial Sequence: Synthetic oligonucleotide
cccgugucucccucgccgc

SEQ ID NO: 2189408 - RNA, 19 nt, Artificial Sequence
  Description of Artificial Sequence: Synthetic oligonucleotide
ggcgccuggggaccccaag

SEQ ID NO: 2189409 - RNA, 19 nt, Artificial Sequence
  Description of Artificial Sequence: Synthetic oligonucleotide
guggcggagcccgcagggc

SEQ ID NO: 2189410 - RNA, 19 nt, Artificial Sequence
  Description of Artificial Sequence: Synthetic oligonucleotide
ggcaccugggacauaggua

SEQ ID NO: 2189411 - RNA, 19 nt, Artificial Sequence
  Description of Artificial Sequence: Synthetic oligonucleotide
ccuggcggguauucaugac

SEQ ID NO: 2189412 - RNA, 19 nt, Artificial Sequence
  Description of Artificial Sequence: Synthetic oligonucleotide
cugucuugugcgccaccaa

SEQ ID NO: 2189413 - RNA, 19 nt, Artificial Sequence
  Description of Artificial Sequence: Synthetic oligonucleotide
ccuguucgcccgugucucc

SEQ ID NO: 2189414 - RNA, 19 nt, Artificial Sequence
  Description of Artificial Sequence: Synthetic oligonucleotide
ggcggguauucaugaccac

SEQ ID NO: 2189415 - RNA, 19 nt, Artificial Sequence
  Description of Artificial Sequence: Synthetic oligonucleotide
gcggucugucuugugcgcc

SEQ ID NO: 2189416 - RNA, 19 nt, Artificial Sequence
  Description of Artificial Sequence: Synthetic oligonucleotide
cgcagggaaugcugacugg

SEQ ID NO: 2189417 - RNA, 19 nt, Artificial Sequence
  Description of Artificial Sequence: Synthetic oligonucleotide
gagcagacgugcggcugga

SEQ ID NO: 2189418 - RNA, 19 nt, Artificial Sequence
  Description of Artificial Sequence: Synthetic oligonucleotide
ggugugagguuggaagcua

SEQ ID NO: 2189419 - RNA, 19 nt, Artificial Sequence
  Description of Artificial Sequence: Synthetic oligonucleotide
gccuguucgcccgugucuc

SEQ ID NO: 2189420 - RNA, 19 nt, Artificial Sequence
  Description of Artificial Sequence: Synthetic oligonucleotide
guggaggccauagcugccu

SEQ ID NO: 2189421 - RNA, 19 nt, Artificial Sequence
  Description of Artificial Sequence: Synthetic oligonucleotide
gauugcuguggaggccaua

SEQ ID NO: 2189422 - RNA, 19 nt, Artificial Sequence
  Description of Artificial Sequence: Synthetic oligonucleotide
ccugggacauagguaccac

SEQ ID NO: 2189423 - RNA, 19 nt, Artificial Sequence
  Description of Artificial Sequence: Synthetic oligonucleotide
gguagaggcggcgccagcu

SEQ ID NO: 2189424 - RNA, 19 nt, Artificial Sequence
  Description of Artificial Sequence: Synthetic oligonucleotide
guacguggcggagcccgca

SEQ ID NO: 2189425 - RNA, 19 nt, Artificial Sequence
  Description of Artificial Sequence: Synthetic oligonucleotide
guggcgacugguggacaga

SEQ ID NO: 2189426 - RNA, 19 nt, Artificial Sequence
  Description of Artificial Sequence: Synthetic oligonucleotide
cgcccuucauccugagaag

SEQ ID NO: 2189427 - RNA, 19 nt, Artificial Sequence
  Description of Artificial Sequence: Synthetic oligonucleotide
gccccaaugggcacaaacu

SEQ ID NO: 2189428 - RNA, 19 nt, Artificial Sequence
  Description of Artificial Sequence: Synthetic oligonucleotide
cuucggccaggaagagaaa

SEQ ID NO: 2189429 - RNA, 19 nt, Artificial Sequence
  Description of Artificial Sequence: Synthetic oligonucleotide
agccaggcucacacagccu

SEQ ID NO: 2189430 - RNA, 19 nt, Artificial Sequence
  Description of Artificial Sequence: Synthetic oligonucleotide
gcggguauucaugaccacu

SEQ ID NO: 2189431 - RNA, 19 nt, Artificial Sequence
  Description of Artificial Sequence: Synthetic oligonucleotide
gcgccuggggaccccaaga

SEQ ID NO: 2189432 - RNA, 19 nt, Artificial Sequence
  Description of Artificial Sequence: Synthetic oligonucleotide
gguacguggcggagcccgc

SEQ ID NO: 2189433 - RNA, 19 nt, Artificial Sequence
  Description of Artificial Sequence: Synthetic oligonucleotide
gagcgcccgcagggaaugc

SEQ ID NO: 2189434 - RNA, 19 nt, Artificial Sequence
  Description of Artificial Sequence: Synthetic oligonucleotide
ggccuguucgcccgugucu

SEQ ID NO: 2189435 - RNA, 19 nt, Artificial Sequence
  Description of Artificial Sequence: Synthetic oligonucleotide
cgcggugcacgaacucccg

SEQ ID NO: 2189436 - RNA, 19 nt, Artificial Sequence
  Description of Artificial Sequence: Synthetic oligonucleotide
ggcggagcccgcagggcug

SEQ ID NO: 2189437 - RNA, 19 nt, Artificial Sequence
  Description of Artificial Sequence: Synthetic oligonucleotide
gcccgcagggaaugcugac

SEQ ID NO: 2189438 - RNA, 19 nt, Artificial Sequence
  Description of Artificial Sequence: Synthetic oligonucleotide
gaggcgccuggggacccca

SEQ ID NO: 2189439 - RNA, 19 nt, Artificial Sequence
  Description of Artificial Sequence: Synthetic oligonucleotide
cuagcaggccuggcgggua

SEQ ID NO: 2189440 - RNA, 19 nt, Artificial Sequence
  Description of Artificial Sequence: Synthetic oligonucleotide
ccaccagcgccgacgguca

SEQ ID NO: 2189441 - RNA, 19 nt, Artificial Sequence
  Description of Artificial Sequence: Synthetic oligonucleotide
cgaagcccgacagcagagc

SEQ ID NO: 2189442 - RNA, 19 nt, Artificial Sequence
  Description of Artificial Sequence: Synthetic oligonucleotide
ccgugucucccucgccgcc

SEQ ID NO: 2189443 - RNA, 19 nt, Artificial Sequence
  Description of Artificial Sequence: Synthetic oligonucleotide
cagcgccgacggucacggg

SEQ ID NO: 2189444 - RNA, 19 nt, Artificial Sequence
  Description of Artificial Sequence: Synthetic oligonucleotide
caccagcgccgacggucac

SEQ ID NO: 2189445 - RNA, 19 nt, Artificial Sequence
  Description of Artificial Sequence: Synthetic oligonucleotide
gcgcccgcagggaaugcug

SEQ ID NO: 2189446 - RNA, 19 nt, Artificial Sequence
  Description of Artificial Sequence: Synthetic oligonucleotide
cgguagaaauguagggcaa

SEQ ID NO: 2189447 - RNA, 19 nt, Artificial Sequence
  Description of Artificial Sequence: Synthetic oligonucleotide
gcaggcgacugaguuccuc

SEQ ID NO: 2189448 - RNA, 19 nt, Artificial Sequence
  Description of Artificial Sequence: Synthetic oligonucleotide
uugccggggugggcaggcu

SEQ ID NO: 2189449 - RNA, 19 nt, Artificial Sequence
  Description of Artificial Sequence: Synthetic oligonucleotide
gugucucccucgccgcccu

SEQ ID NO: 2189450 - RNA, 19 nt, Artificial Sequence
  Description of Artificial Sequence: Synthetic oligonucleotide
gcuuagcccggcugaggua

SEQ ID NO: 2189451 - RNA, 19 nt, Artificial Sequence
  Description of Artificial Sequence: Synthetic oligonucleotide
ggugccccaaugggcacaa

SEQ ID NO: 2189452 - RNA, 19 nt, Artificial Sequence
  Description of Artificial Sequence: Synthetic oligonucleotide
caggcgcugaaggccacua

SEQ ID NO: 2189453 - RNA, 19 nt, Artificial Sequence
  Description of Artificial Sequence: Synthetic oligonucleotide
acauaucgguggagucguu

SEQ ID NO: 2189454 - RNA, 19 nt, Artificial Sequence
  Description of Artificial Sequence: Synthetic oligonucleotide
cgacagcagagcagacgug

SEQ ID NO: 2189455 - RNA, 19 nt, Artificial Sequence
  Description of Artificial Sequence: Synthetic oligonucleotide
ccgggccccgcgcugcggg

SEQ ID NO: 2189456 - RNA, 19 nt, Artificial Sequence
  Description of Artificial Sequence: Synthetic oligonucleotide
cgugucucccucgccgccc

SEQ ID NO: 2189457 - RNA, 19 nt, Artificial Sequence
  Description of Artificial Sequence: Synthetic oligonucleotide
ccccaaugggcacaaacuu

SEQ ID NO: 2189458 - RNA, 19 nt, Artificial Sequence
  Description of Artificial Sequence: Synthetic oligonucleotide
gggagccgaggcgccuggg

SEQ ID NO: 2189459 - RNA, 19 nt, Artificial Sequence
  Description of Artificial Sequence: Synthetic oligonucleotide
cccagcccaccagaacaac

SEQ ID NO: 2189460 - RNA, 19 nt, Artificial Sequence
  Description of Artificial Sequence: Synthetic oligonucleotide
ccaggccaguuccacauau

SEQ ID NO: 2189461 - RNA, 19 nt, Artificial Sequence
  Description of Artificial Sequence: Synthetic oligonucleotide
gucccacagguaccaugau

SEQ ID NO: 2189462 - RNA, 19 nt, Artificial Sequence
  Description of Artificial Sequence: Synthetic oligonucleotide
cgacugaguuccucuagcu

SEQ ID NO: 2189463 - RNA, 19 nt, Artificial Sequence
  Description of Artificial Sequence: Synthetic oligonucleotide
ccggguucagcggggccug

SEQ ID NO: 2189464 - RNA, 19 nt, Artificial Sequence
  Description of Artificial Sequence: Synthetic oligonucleotide
ccccggguucagcggggcc

SEQ ID NO: 2189465 - RNA, 19 nt, Artificial Sequence
  Description of Artificial Sequence: Synthetic oligonucleotide
gcgccagcugagcgcccgc

SEQ ID NO: 2189466 - RNA, 19 nt, Artificial Sequence
  Description of Artificial Sequence: Synthetic oligonucleotide
ggccccgcgcugcggggac

SEQ ID NO: 2189467 - RNA, 19 nt, Artificial Sequence
  Description of Artificial Sequence: Synthetic oligonucleotide
acgugcggcuggaggcuuu

SEQ ID NO: 2189468 - RNA, 19 nt, Artificial Sequence
  Description of Artificial Sequence: Synthetic oligonucleotide
gguagccgcggugcacgaa

SEQ ID NO: 2189469 - RNA, 19 nt, Artificial Sequence
  Description of Artificial Sequence: Synthetic oligonucleotide
gcgccaccaaagaucggua

SEQ ID NO: 2189470 - RNA, 19 nt, Artificial Sequence
  Description of Artificial Sequence: Synthetic oligonucleotide
cuccugcuuguggcggucu

SEQ ID NO: 2189471 - RNA, 19 nt, Artificial Sequence
  Description of Artificial Sequence: Synthetic oligonucleotide
cggugcacgaacucccggu

SEQ ID NO: 2189472 - RNA, 19 nt, Artificial Sequence
  Description of Artificial Sequence: Synthetic oligonucleotide
ugguggcaccugggacaua

SEQ ID NO: 2189473 - RNA, 19 nt, Artificial Sequence
  Description of Artificial Sequence: Synthetic oligonucleotide
cgcccgcagggaaugcuga

SEQ ID NO: 2189474 - RNA, 19 nt, Artificial Sequence
  Description of Artificial Sequence: Synthetic oligonucleotide
caagucccacagguaccau

SEQ ID NO: 2189475 - RNA, 19 nt, Artificial Sequence
  Description of Artificial Sequence: Synthetic oligonucleotide
ggggccuguucgcccgugu

SEQ ID NO: 2189476 - RNA, 19 nt, Artificial Sequence
  Description of Artificial Sequence: Synthetic oligonucleotide
cccgcagggaaugcugacu

SEQ ID NO: 2189477 - RNA, 19 nt, Artificial Sequence
  Description of Artificial Sequence: Synthetic oligonucleotide
ccgguacguggcggagccc

SEQ ID NO: 2189478 - RNA, 19 nt, Artificial Sequence
  Description of Artificial Sequence: Synthetic oligonucleotide
ggcgacugguggacagagu

SEQ ID NO: 2189479 - RNA, 19 nt, Artificial Sequence
  Description of Artificial Sequence: Synthetic oligonucleotide
cccggguucagcggggccu

SEQ ID NO: 2189480 - RNA, 19 nt, Artificial Sequence
  Description of Artificial Sequence: Synthetic oligonucleotide
aggcgccuggggaccccaa

SEQ ID NO: 2189481 - RNA, 19 nt, Artificial Sequence
  Description of Artificial Sequence: Synthetic oligonucleotide
cgccgcccuucauccugag

SEQ ID NO: 2189482 - RNA, 19 nt, Artificial Sequence
  Description of Artificial Sequence: Synthetic oligonucleotide
cucccucgccgcccuucau

SEQ ID NO: 2189483 - RNA, 19 nt, Artificial Sequence
  Description of Artificial Sequence: Synthetic oligonucleotide
gcgcugcggggaccccauc

SEQ ID NO: 2189484 - RNA, 19 nt, Artificial Sequence
  Description of Artificial Sequence: Synthetic oligonucleotide
gccccgcgcugcggggacc

SEQ ID NO: 2189485 - RNA, 19 nt, Artificial Sequence
  Description of Artificial Sequence: Synthetic oligonucleotide
gcggagcccgcagggcugu

SEQ ID NO: 2189486 - RNA, 19 nt, Artificial Sequence
  Description of Artificial Sequence: Synthetic oligonucleotide
ccucgccgcccuucauccu

SEQ ID NO: 2189487 - RNA, 19 nt, Artificial Sequence
  Description of Artificial Sequence: Synthetic oligonucleotide
cggcgccagcugagcgccc

SEQ ID NO: 2189488 - RNA, 19 nt, Artificial Sequence
  Description of Artificial Sequence: Synthetic oligonucleotide
cccgcgcugcggggacccc

SEQ ID NO: 2189489 - RNA, 19 nt, Artificial Sequence
  Description of Artificial Sequence: Synthetic oligonucleotide
gccugccaaccagguccau

SEQ ID NO: 2189490 - RNA, 19 nt, Artificial Sequence
  Description of Artificial Sequence: Synthetic oligonucleotide
cgccaccagcgccgacggu

SEQ ID NO: 2189491 - RNA, 19 nt, Artificial Sequence
  Description of Artificial Sequence: Synthetic oligonucleotide
uuuagcaacagaaaauggg

SEQ ID NO: 2189492 - RNA, 19 nt, Artificial Sequence
  Description of Artificial Sequence: Synthetic oligonucleotide
uuaacaucucacaaaaccg

SEQ ID NO: 2189493 - RNA, 19 nt, Artificial Sequence
  Description of Artificial Sequence: Synthetic oligonucleotide
uauauuauccaguguaugg

SEQ ID NO: 2189494 - RNA, 19 nt, Artificial Sequence
  Description of Artificial Sequence: Synthetic oligonucleotide
cuuguuauggaaaaugucc

SEQ ID NO: 2189495 - RNA, 19 nt, Artificial Sequence
  Description of Artificial Sequence: Synthetic oligonucleotide
aaagccuaaaccucuacuc

SEQ ID NO: 2189496 - RNA, 19 nt, Artificial Sequence
  Description of Artificial Sequence: Synthetic oligonucleotide
cuuaacaucucacaaaacc

SEQ ID NO: 2189497 - RNA, 19 nt, Artificial Sequence
  Description of Artificial Sequence: Synthetic oligonucleotide
uuauauauuauccagugua

SEQ ID NO: 2189498 - RNA, 19 nt, Artificial Sequence
  Description of Artificial Sequence: Synthetic oligonucleotide
uauuguuaaacucauacau

SEQ ID NO: 2189499 - RNA, 19 nt, Artificial Sequence
  Description of Artificial Sequence: Synthetic oligonucleotide
uaguucuuauuuuacaugg

SEQ ID NO: 2189500 - RNA, 19 nt, Artificial Sequence
  Description of Artificial Sequence: Synthetic oligonucleotide
uauaguuagguuauuacac

SEQ ID NO: 2189501 - RNA, 19 nt, Artificial Sequence
  Description of Artificial Sequence: Synthetic oligonucleotide
uacucuuuauauauuaucc

SEQ ID NO: 2189502 - RNA, 19 nt, Artificial Sequence
  Description of Artificial Sequence: Synthetic oligonucleotide
gaguuugucuaauauaagg

SEQ ID NO: 2189503 - RNA, 19 nt, Artificial Sequence
  Description of Artificial Sequence: Synthetic oligonucleotide
agaauaauuuauuuccaac

SEQ ID NO: 2189504 - RNA, 19 nt, Artificial Sequence
  Description of Artificial Sequence: Synthetic oligonucleotide
uuagcaacagaaaaugggc

SEQ ID NO: 2189505 - RNA, 19 nt, Artificial Sequence
  Description of Artificial Sequence: Synthetic oligonucleotide
aaauaaucgaguccccuuc

SEQ ID NO: 2189506 - RNA, 19 nt, Artificial Sequence
  Description of Artificial Sequence: Synthetic oligonucleotide
auauaagggucuucuaucc

SEQ ID NO: 2189507 - RNA, 19 nt, Artificial Sequence
  Description of Artificial Sequence: Synthetic oligonucleotide
uggucucuuaaaauaaucg

SEQ ID NO: 2189508 - RNA, 19 nt, Artificial Sequence
  Description of Artificial Sequence: Synthetic oligonucleotide
aauaguucuuauuuuacau

SEQ ID NO: 2189509 - RNA, 19 nt, Artificial Sequence
  Description of Artificial Sequence: Synthetic oligonucleotide
aauaaucgaguccccuucc

SEQ ID NO: 2189510 - RNA, 19 nt, Artificial Sequence
  Description of Artificial Sequence: Synthetic oligonucleotide
ucuuaaaauaaucgagucc

SEQ ID NO: 2189511 - RNA, 19 nt, Artificial Sequence
  Description of Artificial Sequence: Synthetic oligonucleotide
uguugaaccuaauuucucg

SEQ ID NO: 2189512 - RNA, 19 nt, Artificial Sequence
  Description of Artificial Sequence: Synthetic oligonucleotide
uuuauuuccaacagcacuc

SEQ ID NO: 2189513 - RNA, 19 nt, Artificial Sequence
  Description of Artificial Sequence: Synthetic oligonucleotide
uuaaacucauacauuauaa

SEQ ID NO: 2189514 - RNA, 19 nt, Artificial Sequence
  Description of Artificial Sequence: Synthetic oligonucleotide
aaaccgaaggaaguuauac

SEQ ID NO: 2189515 - RNA, 19 nt, Artificial Sequence
  Description of Artificial Sequence: Synthetic oligonucleotide
aaaagugucucguaacuga

SEQ ID NO: 2189516 - RNA, 19 nt, Artificial Sequence
  Description of Artificial Sequence: Synthetic oligonucleotide
gaaguuauacagcugauga

SEQ ID NO: 2189517 - RNA, 19 nt, Artificial Sequence
  Description of Artificial Sequence: Synthetic oligonucleotide
cuuuauauauuauccagug

SEQ ID NO: 2189518 - RNA, 19 nt, Artificial Sequence
  Description of Artificial Sequence: Synthetic oligonucleotide
agcagaaauguauaguuag

SEQ ID NO: 2189519 - RNA, 19 nt, Artificial Sequence
  Description of Artificial Sequence: Synthetic oligonucleotide
auaguuagguuauuacacg

SEQ ID NO: 2189520 - RNA, 19 nt, Artificial Sequence
  Description of Artificial Sequence: Synthetic oligonucleotide
ucuucuauccaaacuuccg

SEQ ID NO: 2189521 - RNA, 19 nt, Artificial Sequence
  Description of Artificial Sequence: Synthetic oligonucleotide
cauuuuaccauugggaugc

SEQ ID NO: 2189522 - RNA, 19 nt, Artificial Sequence
  Description of Artificial Sequence: Synthetic oligonucleotide
ucagaucuaaaucacaaua

SEQ ID NO: 2189523 - RNA, 19 nt, Artificial Sequence
  Description of Artificial Sequence: Synthetic oligonucleotide
ucuaaguauuucuuuaugu

SEQ ID NO: 2189524 - RNA, 19 nt, Artificial Sequence
  Description of Artificial Sequence: Synthetic oligonucleotide
aaaucacaauauccaaggg

SEQ ID NO: 2189525 - RNA, 19 nt, Artificial Sequence
  Description of Artificial Sequence: Synthetic oligonucleotide
gaucuaaaucacaauaucc

SEQ ID NO: 2189526 - RNA, 19 nt, Artificial Sequence
  Description of Artificial Sequence: Synthetic oligonucleotide
uuugagaaccugcaggagc

SEQ ID NO: 2189527 - RNA, 19 nt, Artificial Sequence
  Description of Artificial Sequence: Synthetic oligonucleotide
gagauuuucguucugagaa

SEQ ID NO: 2189528 - RNA, 19 nt, Artificial Sequence
  Description of Artificial Sequence: Synthetic oligonucleotide
uuaaaagugucucguaacu

SEQ ID NO: 2189529 - RNA, 19 nt, Artificial Sequence
  Description of Artificial Sequence: Synthetic oligonucleotide
ucuaauauaagggucuucu

SEQ ID NO: 2189530 - RNA, 19 nt, Artificial Sequence
  Description of Artificial Sequence: Synthetic oligonucleotide
cucuuuauauauuauccag

SEQ ID NO: 2189531 - RNA, 19 nt, Artificial Sequence
  Description of Artificial Sequence: Synthetic oligonucleotide
agaugccaaagccuaaacc

SEQ ID NO: 2189532 - RNA, 19 nt, Artificial Sequence
  Description of Artificial Sequence: Synthetic oligonucleotide
cuaaaucacaauauccaag

SEQ ID NO: 2189533 - RNA, 19 nt, Artificial Sequence
  Description of Artificial Sequence: Synthetic oligonucleotide
aguuugucuaauauaaggg

SEQ ID NO: 2189534 - RNA, 19 nt, Artificial Sequence
  Description of Artificial Sequence: Synthetic oligonucleotide
uaauauaagggucuucuau

SEQ ID NO: 2189535 - RNA, 19 nt, Artificial Sequence
  Description of Artificial Sequence: Synthetic oligonucleotide
uguauaguuagguuauuac

SEQ ID NO: 2189536 - RNA, 19 nt, Artificial Sequence
  Description of Artificial Sequence: Synthetic oligonucleotide
uuuaaaagugucucguaac

SEQ ID NO: 2189537 - RNA, 19 nt, Artificial Sequence
  Description of Artificial Sequence: Synthetic oligonucleotide
uuguuaaacucauacauua

SEQ ID NO: 2189538 - RNA, 19 nt, Artificial Sequence
  Description of Artificial Sequence: Synthetic oligonucleotide
cugguaacacaccagagcc

SEQ ID NO: 2189539 - RNA, 19 nt, Artificial Sequence
  Description of Artificial Sequence: Synthetic oligonucleotide
uuguuauggaaaaugucca

SEQ ID NO: 2189540 - RNA, 19 nt, Artificial Sequence
  Description of Artificial Sequence: Synthetic oligonucleotide
aaguuauacagcugaugag

SEQ ID NO: 2189541 - RNA, 19 nt, Artificial Sequence
  Description of Artificial Sequence: Synthetic oligonucleotide
uuauggaaaauguccacug

SEQ ID NO: 2189542 - RNA, 19 nt, Artificial Sequence
  Description of Artificial Sequence: Synthetic oligonucleotide
uggucucagaucuaaauca

SEQ ID NO: 2189543 - RNA, 19 nt, Artificial Sequence
  Description of Artificial Sequence: Synthetic oligonucleotide
uugucuaauauaagggucu

SEQ ID NO: 2189544 - RNA, 19 nt, Artificial Sequence
  Description of Artificial Sequence: Synthetic oligonucleotide
auccauccaguguugaacc

SEQ ID NO: 2189545 - RNA, 19 nt, Artificial Sequence
  Description of Artificial Sequence: Synthetic oligonucleotide
uauucuuuaaaagugucuc

SEQ ID NO: 2189546 - RNA, 19 nt, Artificial Sequence
  Description of Artificial Sequence: Synthetic oligonucleotide
aagaauaauuuauuuccaa

SEQ ID NO: 2189547 - RNA, 19 nt, Artificial Sequence
  Description of Artificial Sequence: Synthetic oligonucleotide
ugaauaguucuuauuuuac

SEQ ID NO: 2189548 - RNA, 19 nt, Artificial Sequence
  Description of Artificial Sequence: Synthetic oligonucleotide
uuacuagagucucuggacc

SEQ ID NO: 2189549 - RNA, 19 nt, Artificial Sequence
  Description of Artificial Sequence: Synthetic oligonucleotide
uaacaucucacaaaaccga

SEQ ID NO: 2189550 - RNA, 19 nt, Artificial Sequence
  Description of Artificial Sequence: Synthetic oligonucleotide
ucuuacuagagucucugga

SEQ ID NO: 2189551 - RNA, 19 nt, Artificial Sequence
  Description of Artificial Sequence: Synthetic oligonucleotide
cucacaaaaccgaaggaag

SEQ ID NO: 2189552 - RNA, 19 nt, Artificial Sequence
  Description of Artificial Sequence: Synthetic oligonucleotide
aaaugggcugaaaccaucc

SEQ ID NO: 2189553 - RNA, 19 nt, Artificial Sequence
  Description of Artificial Sequence: Synthetic oligonucleotide
uccccuuccaauuuuaaac

SEQ ID NO: 2189554 - RNA, 19 nt, Artificial Sequence
  Description of Artificial Sequence: Synthetic oligonucleotide
uuuauauauuauccagugu

SEQ ID NO: 2189555 - RNA, 19 nt, Artificial Sequence
  Description of Artificial Sequence: Synthetic oligonucleotide
aaaacgacccuguggucuc

SEQ ID NO: 2189556 - RNA, 19 nt, Artificial Sequence
  Description of Artificial Sequence: Synthetic oligonucleotide
auggucucagaucuaaauc

SEQ ID NO: 2189557 - RNA, 19 nt, Artificial Sequence
  Description of Artificial Sequence: Synthetic oligonucleotide
uaugguauucaguuuuagc

SEQ ID NO: 2189558 - RNA, 19 nt, Artificial Sequence
  Description of Artificial Sequence: Synthetic oligonucleotide
ugagaaggugaauaguucu

SEQ ID NO: 2189559 - RNA, 19 nt, Artificial Sequence
  Description of Artificial Sequence: Synthetic oligonucleotide
ucucagaucuaaaucacaa

SEQ ID NO: 2189560 - RNA, 19 nt, Artificial Sequence
  Description of Artificial Sequence: Synthetic oligonucleotide
uugucuugugauauuuucc

SEQ ID NO: 2189561 - RNA, 19 nt, Artificial Sequence
  Description of Artificial Sequence: Synthetic oligonucleotide
uuuccaacagcacuccaug

SEQ ID NO: 2189562 - RNA, 19 nt, Artificial Sequence
  Description of Artificial Sequence: Synthetic oligonucleotide
guuauuacacgucauaucu

SEQ ID NO: 2189563 - RNA, 19 nt, Artificial Sequence
  Description of Artificial Sequence: Synthetic oligonucleotide
cuggacuuagccaucacag

SEQ ID NO: 2189564 - RNA, 19 nt, Artificial Sequence
  Description of Artificial Sequence: Synthetic oligonucleotide
aaaccucuacucuuuauau

SEQ ID NO: 2189565 - RNA, 19 nt, Artificial Sequence
  Description of Artificial Sequence: Synthetic oligonucleotide
ugcauuuuaccauugggau

SEQ ID NO: 2189566 - RNA, 19 nt, Artificial Sequence
  Description of Artificial Sequence: Synthetic oligonucleotide
uuccguaacugucucauga

SEQ ID NO: 2189567 - RNA, 19 nt, Artificial Sequence
  Description of Artificial Sequence: Synthetic oligonucleotide
aaaauaaucgaguccccuu

SEQ ID NO: 2189568 - RNA, 19 nt, Artificial Sequence
  Description of Artificial Sequence: Synthetic oligonucleotide
acugaacccaguugcauuc

SEQ ID NO: 2189569 - RNA, 19 nt, Artificial Sequence
  Description of Artificial Sequence: Synthetic oligonucleotide
uugagaaccugcaggagca

SEQ ID NO: 2189570 - RNA, 19 nt, Artificial Sequence
  Description of Artificial Sequence: Synthetic oligonucleotide
uaauuucucggucauguau

SEQ ID NO: 2189571 - RNA, 19 nt, Artificial Sequence
  Description of Artificial Sequence: Synthetic oligonucleotide
gucucuuaaaauaaucgag

SEQ ID NO: 2189572 - RNA, 19 nt, Artificial Sequence
  Description of Artificial Sequence: Synthetic oligonucleotide
ucuuuauguuuucugcucu

SEQ ID NO: 2189573 - RNA, 19 nt, Artificial Sequence
  Description of Artificial Sequence: Synthetic oligonucleotide
uuugucuugugauauuuuc

SEQ ID NO: 2189574 - RNA, 19 nt, Artificial Sequence
  Description of Artificial Sequence: Synthetic oligonucleotide
uuaaaauaaucgagucccc

SEQ ID NO: 2189575 - RNA, 19 nt, Artificial Sequence
  Description of Artificial Sequence: Synthetic oligonucleotide
uucucggucauguauagau

SEQ ID NO: 2189576 - RNA, 19 nt, Artificial Sequence
  Description of Artificial Sequence: Synthetic oligonucleotide
aaacuuccguaacugucuc

SEQ ID NO: 2189577 - RNA, 19 nt, Artificial Sequence
  Description of Artificial Sequence: Synthetic oligonucleotide
agauuuucguucugagaac

SEQ ID NO: 2189578 - RNA, 19 nt, Artificial Sequence
  Description of Artificial Sequence: Synthetic oligonucleotide
cauguauagaugaagaaua

SEQ ID NO: 2189579 - RNA, 19 nt, Artificial Sequence
  Description of Artificial Sequence: Synthetic oligonucleotide
uuuauuucuuccaggccac

SEQ ID NO: 2189580 - RNA, 19 nt, Artificial Sequence
  Description of Artificial Sequence: Synthetic oligonucleotide
ugcaggagcaugucaaucc

SEQ ID NO: 2189581 - RNA, 19 nt, Artificial Sequence
  Description of Artificial Sequence: Synthetic oligonucleotide
gaacacaucucuuacuaga

SEQ ID NO: 2189582 - RNA, 19 nt, Artificial Sequence
  Description of Artificial Sequence: Synthetic oligonucleotide
aagccuaaaccucuacucu

SEQ ID NO: 2189583 - RNA, 19 nt, Artificial Sequence
  Description of Artificial Sequence: Synthetic oligonucleotide
guauaguuagguuauuaca

SEQ ID NO: 2189584 - RNA, 19 nt, Artificial Sequence
  Description of Artificial Sequence: Synthetic oligonucleotide
ugcuuguuauggaaaaugu

SEQ ID NO: 2189585 - RNA, 19 nt, Artificial Sequence
  Description of Artificial Sequence: Synthetic oligonucleotide
ugaguuugucuaauauaag

SEQ ID NO: 2189586 - RNA, 19 nt, Artificial Sequence
  Description of Artificial Sequence: Synthetic oligonucleotide
acucuuuauauauuaucca

SEQ ID NO: 2189587 - RNA, 19 nt, Artificial Sequence
  Description of Artificial Sequence: Synthetic oligonucleotide
gaauaguucuuauuuuaca

SEQ ID NO: 2189588 - RNA, 19 nt, Artificial Sequence
  Description of Artificial Sequence: Synthetic oligonucleotide
ucauguauagaugaagaau

SEQ ID NO: 2189589 - RNA, 19 nt, Artificial Sequence
  Description of Artificial Sequence: Synthetic oligonucleotide
gcugaaaccauccaaagca

SEQ ID NO: 2189590 - RNA, 19 nt, Artificial Sequence
  Description of Artificial Sequence: Synthetic oligonucleotide
ggacuuagccaucacagcg

SEQ ID NO: 2189591 - RNA, 19 nt, Artificial Sequence
  Description of Artificial Sequence: Synthetic oligonucleotide
aggugaauaguucuuauuu

SEQ ID NO: 2189592 - RNA, 19 nt, Artificial Sequence
  Description of Artificial Sequence: Synthetic oligonucleotide
cacaucucuuacuagaguc

SEQ ID NO: 2189593 - RNA, 19 nt, Artificial Sequence
  Description of Artificial Sequence: Synthetic oligonucleotide
uccuaucuucuuuucuugg

SEQ ID NO: 2189594 - RNA, 19 nt, Artificial Sequence
  Description of Artificial Sequence: Synthetic oligonucleotide
aaccgaaggaaguuauaca

SEQ ID NO: 2189595 - RNA, 19 nt, Artificial Sequence
  Description of Artificial Sequence: Synthetic oligonucleotide
ugugauauuuuccuaucuu

SEQ ID NO: 2189596 - RNA, 19 nt, Artificial Sequence
  Description of Artificial Sequence: Synthetic oligonucleotide
ugugcauucccaaagccuu

SEQ ID NO: 2189597 - RNA, 19 nt, Artificial Sequence
  Description of Artificial Sequence: Synthetic oligonucleotide
uuucguucugagaacacau

SEQ ID NO: 2189598 - RNA, 19 nt, Artificial Sequence
  Description of Artificial Sequence: Synthetic oligonucleotide
guuagguuauuacacguca

SEQ ID NO: 2189599 - RNA, 19 nt, Artificial Sequence
  Description of Artificial Sequence: Synthetic oligonucleotide
augaguuugucuaauauaa

SEQ ID NO: 2189600 - RNA, 19 nt, Artificial Sequence
  Description of Artificial Sequence: Synthetic oligonucleotide
ugguauucaguuuuagcaa

SEQ ID NO: 2189601 - RNA, 19 nt, Artificial Sequence
  Description of Artificial Sequence: Synthetic oligonucleotide
ugaaccuaauuucucgguc

SEQ ID NO: 2189602 - RNA, 19 nt, Artificial Sequence
  Description of Artificial Sequence: Synthetic oligonucleotide
cacuccaugacuccugagg

SEQ ID NO: 2189603 - RNA, 19 nt, Artificial Sequence
  Description of Artificial Sequence: Synthetic oligonucleotide
uaguuagguuauuacacgu

SEQ ID NO: 2189604 - RNA, 19 nt, Artificial Sequence
  Description of Artificial Sequence: Synthetic oligonucleotide
uugcugugcauucccaaag

SEQ ID NO: 2189605 - RNA, 19 nt, Artificial Sequence
  Description of Artificial Sequence: Synthetic oligonucleotide
uuuccuaucuucuuuucuu

SEQ ID NO: 2189606 - RNA, 19 nt, Artificial Sequence
  Description of Artificial Sequence: Synthetic oligonucleotide
uuacauggcuucuuaacau

SEQ ID NO: 2189607 - RNA, 19 nt, Artificial Sequence
  Description of Artificial Sequence: Synthetic oligonucleotide
uauggaaaauguccacugu

SEQ ID NO: 2189608 - RNA, 19 nt, Artificial Sequence
  Description of Artificial Sequence: Synthetic oligonucleotide
uguuauggaaaauguccac

SEQ ID NO: 2189609 - RNA, 19 nt, Artificial Sequence
  Description of Artificial Sequence: Synthetic oligonucleotide
uccaaagcagaaauguaua

SEQ ID NO: 2189610 - RNA, 19 nt, Artificial Sequence
  Description of Artificial Sequence: Synthetic oligonucleotide
uauaagggucuucuaucca

SEQ ID NO: 2189611 - RNA, 19 nt, Artificial Sequence
  Description of Artificial Sequence: Synthetic oligonucleotide
ugaaaccauccaaagcaga

SEQ ID NO: 2189612 - RNA, 19 nt, Artificial Sequence
  Description of Artificial Sequence: Synthetic oligonucleotide
auuuuccuaucuucuuuuc

SEQ ID NO: 2189613 - RNA, 19 nt, Artificial Sequence
  Description of Artificial Sequence: Synthetic oligonucleotide
ugcucuauccauguaguca

SEQ ID NO: 2189614 - RNA, 19 nt, Artificial Sequence
  Description of Artificial Sequence: Synthetic oligonucleotide
gaugaguuugucuaauaua

SEQ ID NO: 2189615 - RNA, 19 nt, Artificial Sequence
  Description of Artificial Sequence: Synthetic oligonucleotide
auauuauccaguguauggu

SEQ ID NO: 2189616 - RNA, 19 nt, Artificial Sequence
  Description of Artificial Sequence: Synthetic oligonucleotide
aguucuuauuuuacauggc

SEQ ID NO: 2189617 - RNA, 19 nt, Artificial Sequence
  Description of Artificial Sequence: Synthetic oligonucleotide
uguuaaacucauacauuau

SEQ ID NO: 2189618 - RNA, 19 nt, Artificial Sequence
  Description of Artificial Sequence: Synthetic oligonucleotide
aaucgaguccccuuccaau

SEQ ID NO: 2189619 - RNA, 19 nt, Artificial Sequence
  Description of Artificial Sequence: Synthetic oligonucleotide
ucuauccaaacuuccguaa

SEQ ID NO: 2189620 - RNA, 19 nt, Artificial Sequence
  Description of Artificial Sequence: Synthetic oligonucleotide
agaacacaucucuuacuag

SEQ ID NO: 2189621 - RNA, 19 nt, Artificial Sequence
  Description of Artificial Sequence: Synthetic oligonucleotide
ccaauuuuaaacauccauc

SEQ ID NO: 2189622 - RNA, 19 nt, Artificial Sequence
  Description of Artificial Sequence: Synthetic oligonucleotide
ugucucguaacugaaccca

SEQ ID NO: 2189623 - RNA, 19 nt, Artificial Sequence
  Description of Artificial Sequence: Synthetic oligonucleotide
ugugugcuuguuauggaaa

SEQ ID NO: 2189624 - RNA, 19 nt, Artificial Sequence
  Description of Artificial Sequence: Synthetic oligonucleotide
ucguaacugaacccaguug

SEQ ID NO: 2189625 - RNA, 19 nt, Artificial Sequence
  Description of Artificial Sequence: Synthetic oligonucleotide
auaagggucuucuauccaa

SEQ ID NO: 2189626 - RNA, 19 nt, Artificial Sequence
  Description of Artificial Sequence: Synthetic oligonucleotide
uuccuaucuucuuuucuug

SEQ ID NO: 2189627 - RNA, 19 nt, Artificial Sequence
  Description of Artificial Sequence: Synthetic oligonucleotide
ucuauccauguagucagag

SEQ ID NO: 2189628 - RNA, 19 nt, Artificial Sequence
  Description of Artificial Sequence: Synthetic oligonucleotide
acagcugaugaguuugucu

SEQ ID NO: 2189629 - RNA, 19 nt, Artificial Sequence
  Description of Artificial Sequence: Synthetic oligonucleotide
uuuucguucugagaacaca

SEQ ID NO: 2189630 - RNA, 19 nt, Artificial Sequence
  Description of Artificial Sequence: Synthetic oligonucleotide
uauuauccaguguauggua

SEQ ID NO: 2189631 - RNA, 19 nt, Artificial Sequence
  Description of Artificial Sequence: Synthetic oligonucleotide
caucacagcgagaacuccc

SEQ ID NO: 2189632 - RNA, 19 nt, Artificial Sequence
  Description of Artificial Sequence: Synthetic oligonucleotide
cugaaaccauccaaagcag

SEQ ID NO: 2189633 - RNA, 19 nt, Artificial Sequence
  Description of Artificial Sequence: Synthetic oligonucleotide
ucucaugaagguauucuuu

SEQ ID NO: 2189634 - RNA, 19 nt, Artificial Sequence
  Description of Artificial Sequence: Synthetic oligonucleotide
gucuaaguauuucuuuaug

SEQ ID NO: 2189635 - RNA, 19 nt, Artificial Sequence
  Description of Artificial Sequence: Synthetic oligonucleotide
uggucuaaguauuucuuua

SEQ ID NO: 2189636 - RNA, 19 nt, Artificial Sequence
  Description of Artificial Sequence: Synthetic oligonucleotide
uuauguuuucugcucuauc

SEQ ID NO: 2189637 - RNA, 19 nt, Artificial Sequence
  Description of Artificial Sequence: Synthetic oligonucleotide
cuugugauauuuuccuauc

SEQ ID NO: 2189638 - RNA, 19 nt, Artificial Sequence
  Description of Artificial Sequence: Synthetic oligonucleotide
acuuagccaucacagcgag

SEQ ID NO: 2189639 - RNA, 19 nt, Artificial Sequence
  Description of Artificial Sequence: Synthetic oligonucleotide
aauuucucggucauguaua

SEQ ID NO: 2189640 - RNA, 19 nt, Artificial Sequence
  Description of Artificial Sequence: Synthetic oligonucleotide
uagguuauuacacgucaua

SEQ ID NO: 2189641 - RNA, 19 nt, Artificial Sequence
  Description of Artificial Sequence: Synthetic oligonucleotide
aacugaacccaguugcauu

SEQ ID NO: 2189642 - RNA, 19 nt, Artificial Sequence
  Description of Artificial Sequence: Synthetic oligonucleotide
ggauuguuuuauuucuucc

SEQ ID NO: 2189643 - RNA, 19 nt, Artificial Sequence
  Description of Artificial Sequence: Synthetic oligonucleotide
ugccaaagccuaaaccucu

SEQ ID NO: 2189644 - RNA, 19 nt, Artificial Sequence
  Description of Artificial Sequence: Synthetic oligonucleotide
uuauuuccaacagcacucc

SEQ ID NO: 2189645 - RNA, 19 nt, Artificial Sequence
  Description of Artificial Sequence: Synthetic oligonucleotide
aaggugaauaguucuuauu

SEQ ID NO: 2189646 - RNA, 19 nt, Artificial Sequence
  Description of Artificial Sequence: Synthetic oligonucleotide
aguuagguuauuacacguc

SEQ ID NO: 2189647 - RNA, 19 nt, Artificial Sequence
  Description of Artificial Sequence: Synthetic oligonucleotide
uccugguaacacaccagag

SEQ ID NO: 2189648 - RNA, 19 nt, Artificial Sequence
  Description of Artificial Sequence: Synthetic oligonucleotide
uuucuuccaggccacuacu

SEQ ID NO: 2189649 - RNA, 19 nt, Artificial Sequence
  Description of Artificial Sequence: Synthetic oligonucleotide
gauuuucguucugagaaca

SEQ ID NO: 2189650 - RNA, 19 nt, Artificial Sequence
  Description of Artificial Sequence: Synthetic oligonucleotide
aguugcauucucuucuuau

SEQ ID NO: 2189651 - RNA, 19 nt, Artificial Sequence
  Description of Artificial Sequence: Synthetic oligonucleotide
uuugugugcuuguuaugga

SEQ ID NO: 2189652 - RNA, 19 nt, Artificial Sequence
  Description of Artificial Sequence: Synthetic oligonucleotide
ucucggucauguauagaug

SEQ ID NO: 2189653 - RNA, 19 nt, Artificial Sequence
  Description of Artificial Sequence: Synthetic oligonucleotide
guuugucuaauauaagggu

SEQ ID NO: 2189654 - RNA, 19 nt, Artificial Sequence
  Description of Artificial Sequence: Synthetic oligonucleotide
uuagguuauuacacgucau

SEQ ID NO: 2189655 - RNA, 19 nt, Artificial Sequence
  Description of Artificial Sequence: Synthetic oligonucleotide
uccauguagucagagauuu

SEQ ID NO: 2189656 - RNA, 19 nt, Artificial Sequence
  Description of Artificial Sequence: Synthetic oligonucleotide
uguauagaugaagaauaau

SEQ ID NO: 2189657 - RNA, 19 nt, Artificial Sequence
  Description of Artificial Sequence: Synthetic oligonucleotide
uacuagagucucuggaccu

SEQ ID NO: 2189658 - RNA, 19 nt, Artificial Sequence
  Description of Artificial Sequence: Synthetic oligonucleotide
auggcuucuuaacaucuca

SEQ ID NO: 2189659 - RNA, 19 nt, Artificial Sequence
  Description of Artificial Sequence: Synthetic oligonucleotide
gguauucaguuuuagcaac

SEQ ID NO: 2189660 - RNA, 19 nt, Artificial Sequence
  Description of Artificial Sequence: Synthetic oligonucleotide
uuugcugugcauucccaaa

SEQ ID NO: 2189661 - RNA, 19 nt, Artificial Sequence
  Description of Artificial Sequence: Synthetic oligonucleotide
cguaacugaacccaguugc

SEQ ID NO: 2189662 - RNA, 19 nt, Artificial Sequence
  Description of Artificial Sequence: Synthetic oligonucleotide
aagugucucguaacugaac

SEQ ID NO: 2189663 - RNA, 19 nt, Artificial Sequence
  Description of Artificial Sequence: Synthetic oligonucleotide
cagagauuuucguucugag

SEQ ID NO: 2189664 - RNA, 19 nt, Artificial Sequence
  Description of Artificial Sequence: Synthetic oligonucleotide
aaccuaauuucucggucau

SEQ ID NO: 2189665 - RNA, 19 nt, Artificial Sequence
  Description of Artificial Sequence: Synthetic oligonucleotide
uggacuuagccaucacagc

SEQ ID NO: 2189666 - RNA, 19 nt, Artificial Sequence
  Description of Artificial Sequence: Synthetic oligonucleotide
gugaauaguucuuauuuua

SEQ ID NO: 2189667 - RNA, 19 nt, Artificial Sequence
  Description of Artificial Sequence: Synthetic oligonucleotide
auggaaaauguccacuguu

SEQ ID NO: 2189668 - RNA, 19 nt, Artificial Sequence
  Description of Artificial Sequence: Synthetic oligonucleotide
cucggucauguauagauga

SEQ ID NO: 2189669 - RNA, 19 nt, Artificial Sequence
  Description of Artificial Sequence: Synthetic oligonucleotide
cauggcauggucucagauc

SEQ ID NO: 2189670 - RNA, 19 nt, Artificial Sequence
  Description of Artificial Sequence: Synthetic oligonucleotide
uacauggcuucuuaacauc

SEQ ID NO: 2189671 - RNA, 19 nt, Artificial Sequence
  Description of Artificial Sequence: Synthetic oligonucleotide
ggucucuuaaaauaaucga

SEQ ID NO: 2189672 - RNA, 19 nt, Artificial Sequence
  Description of Artificial Sequence: Synthetic oligonucleotide
guuguuucauggcaugguc

SEQ ID NO: 2189673 - RNA, 19 nt, Artificial Sequence
  Description of Artificial Sequence: Synthetic oligonucleotide
uucuuuucuuggucuaagu

SEQ ID NO: 2189674 - RNA, 19 nt, Artificial Sequence
  Description of Artificial Sequence: Synthetic oligonucleotide
uugugugcuuguuauggaa

SEQ ID NO: 2189675 - RNA, 19 nt, Artificial Sequence
  Description of Artificial Sequence: Synthetic oligonucleotide
uguaugguauucaguuuua

SEQ ID NO: 2189676 - RNA, 19 nt, Artificial Sequence
  Description of Artificial Sequence: Synthetic oligonucleotide
gagggauuguuuuauuucu

SEQ ID NO: 2189677 - RNA, 19 nt, Artificial Sequence
  Description of Artificial Sequence: Synthetic oligonucleotide
cacagcgagaacucccggg

SEQ ID NO: 2189678 - RNA, 19 nt, Artificial Sequence
  Description of Artificial Sequence: Synthetic oligonucleotide
agcgagaacucccgggcuc

SEQ ID NO: 2189679 - RNA, 19 nt, Artificial Sequence
  Description of Artificial Sequence: Synthetic oligonucleotide
gugcuuguuauggaaaaug

SEQ ID NO: 2189680 - RNA, 19 nt, Artificial Sequence
  Description of Artificial Sequence: Synthetic oligonucleotide
uccaguguugaaccuaauu

SEQ ID NO: 2189681 - RNA, 19 nt, Artificial Sequence
  Description of Artificial Sequence: Synthetic oligonucleotide
auuuuacauggcuucuuaa

SEQ ID NO: 2189682 - RNA, 19 nt, Artificial Sequence
  Description of Artificial Sequence: Synthetic oligonucleotide
aaagccugcuccaucuugu

SEQ ID NO: 2189683 - RNA, 19 nt, Artificial Sequence
  Description of Artificial Sequence: Synthetic oligonucleotide
aucucacaaaaccgaagga

SEQ ID NO: 2189684 - RNA, 19 nt, Artificial Sequence
  Description of Artificial Sequence: Synthetic oligonucleotide
agggucuucuauccaaacu

SEQ ID NO: 2189685 - RNA, 19 nt, Artificial Sequence
  Description of Artificial Sequence: Synthetic oligonucleotide
gucucuggaccuuugagaa

SEQ ID NO: 2189686 - RNA, 19 nt, Artificial Sequence
  Description of Artificial Sequence: Synthetic oligonucleotide
aaccucuacucuuuauaua

SEQ ID NO: 2189687 - RNA, 19 nt, Artificial Sequence
  Description of Artificial Sequence: Synthetic oligonucleotide
cauccauccaguguugaac

SEQ ID NO: 2189688 - RNA, 19 nt, Artificial Sequence
  Description of Artificial Sequence: Synthetic oligonucleotide
auccaaagcagaaauguau

SEQ ID NO: 2189689 - RNA, 19 nt, Artificial Sequence
  Description of Artificial Sequence: Synthetic oligonucleotide
uccccagaugccaaagccu

SEQ ID NO: 2189690 - RNA, 19 nt, Artificial Sequence
  Description of Artificial Sequence: Synthetic oligonucleotide
uaaucgaguccccuuccaa

SEQ ID NO: 2189691 - RNA, 19 nt, Artificial Sequence
  Description of Artificial Sequence: Synthetic oligonucleotide
uggcuucuuaacaucucac

SEQ ID NO: 2189692 - RNA, 19 nt, Artificial Sequence
  Description of Artificial Sequence: Synthetic oligonucleotide
aaaccauccaaagcagaaa

SEQ ID NO: 2189693 - RNA, 19 nt, Artificial Sequence
  Description of Artificial Sequence: Synthetic oligonucleotide
aacccaguugcauucucuu

SEQ ID NO: 2189694 - RNA, 19 nt, Artificial Sequence
  Description of Artificial Sequence: Synthetic oligonucleotide
cuuuucuuggucuaaguau

SEQ ID NO: 2189695 - RNA, 19 nt, Artificial Sequence
  Description of Artificial Sequence: Synthetic oligonucleotide
aucacagcgagaacucccg

SEQ ID NO: 2189696 - RNA, 19 nt, Artificial Sequence
  Description of Artificial Sequence: Synthetic oligonucleotide
aacaucucacaaaaccgaa

SEQ ID NO: 2189697 - RNA, 19 nt, Artificial Sequence
  Description of Artificial Sequence: Synthetic oligonucleotide
auuuucguucugagaacac

SEQ ID NO: 2189698 - RNA, 19 nt, Artificial Sequence
  Description of Artificial Sequence: Synthetic oligonucleotide
cucuuacuagagucucugg

SEQ ID NO: 2189699 - RNA, 19 nt, Artificial Sequence
  Description of Artificial Sequence: Synthetic oligonucleotide
agcaugucaauccccuccu

SEQ ID NO: 2189700 - RNA, 19 nt, Artificial Sequence
  Description of Artificial Sequence: Synthetic oligonucleotide
augccaaagccuaaaccuc

SEQ ID NO: 2189701 - RNA, 19 nt, Artificial Sequence
  Description of Artificial Sequence: Synthetic oligonucleotide
agcggugcugucggaaucc

SEQ ID NO: 2189702 - RNA, 19 nt, Artificial Sequence
  Description of Artificial Sequence: Synthetic oligonucleotide
ugcauucucuucuuauuuu

SEQ ID NO: 2189703 - RNA, 19 nt, Artificial Sequence
  Description of Artificial Sequence: Synthetic oligonucleotide
agguuauuacacgucauau

SEQ ID NO: 2189704 - RNA, 19 nt, Artificial Sequence
  Description of Artificial Sequence: Synthetic oligonucleotide
ucucguaacugaacccagu

SEQ ID NO: 2189705 - RNA, 19 nt, Artificial Sequence
  Description of Artificial Sequence: Synthetic oligonucleotide
auaaucgaguccccuucca

SEQ ID NO: 2189706 - RNA, 19 nt, Artificial Sequence
  Description of Artificial Sequence: Synthetic oligonucleotide
ucacagcgagaacucccgg

SEQ ID NO: 2189707 - RNA, 19 nt, Artificial Sequence
  Description of Artificial Sequence: Synthetic oligonucleotide
gguuauuacacgucauauc

SEQ ID NO: 2189708 - RNA, 19 nt, Artificial Sequence
  Description of Artificial Sequence: Synthetic oligonucleotide
uuuauguuuucugcucuau

SEQ ID NO: 2189709 - RNA, 19 nt, Artificial Sequence
  Description of Artificial Sequence: Synthetic oligonucleotide
ugguaacacaccagagccu

SEQ ID NO: 2189710 - RNA, 19 nt, Artificial Sequence
  Description of Artificial Sequence: Synthetic oligonucleotide
aacacaccagagccugcug

SEQ ID NO: 2189711 - RNA, 19 nt, Artificial Sequence
  Description of Artificial Sequence: Synthetic oligonucleotide
uuauacagcugaugaguuu

SEQ ID NO: 2189712 - RNA, 19 nt, Artificial Sequence
  Description of Artificial Sequence: Synthetic oligonucleotide
aaagugucucguaacugaa

SEQ ID NO: 2189713 - RNA, 19 nt, Artificial Sequence
  Description of Artificial Sequence: Synthetic oligonucleotide
agguauucuuuaaaagugu

SEQ ID NO: 2189714 - RNA, 19 nt, Artificial Sequence
  Description of Artificial Sequence: Synthetic oligonucleotide
gguaacacaccagagccug

SEQ ID NO: 2189715 - RNA, 19 nt, Artificial Sequence
  Description of Artificial Sequence: Synthetic oligonucleotide
acacaucucuuacuagagu

SEQ ID NO: 2189716 - RNA, 19 nt, Artificial Sequence
  Description of Artificial Sequence: Synthetic oligonucleotide
uccccuccugguaacacac

SEQ ID NO: 2189717 - RNA, 19 nt, Artificial Sequence
  Description of Artificial Sequence: Synthetic oligonucleotide
ugcugucggaauccuggcc

SEQ ID NO: 2189718 - RNA, 19 nt, Artificial Sequence
  Description of Artificial Sequence: Synthetic oligonucleotide
aacuuccguaacugucuca

SEQ ID NO: 2189719 - RNA, 19 nt, Artificial Sequence
  Description of Artificial Sequence: Synthetic oligonucleotide
cucuacucuuuauauauua

SEQ ID NO: 2189720 - RNA, 19 nt, Artificial Sequence
  Description of Artificial Sequence: Synthetic oligonucleotide
aguguaugguauucaguuu

SEQ ID NO: 2189721 - RNA, 19 nt, Artificial Sequence
  Description of Artificial Sequence: Synthetic oligonucleotide
uauccaguguaugguauuc

SEQ ID NO: 2189722 - RNA, 19 nt, Artificial Sequence
  Description of Artificial Sequence: Synthetic oligonucleotide
ccaaagcagaaauguauag

SEQ ID NO: 2189723 - RNA, 19 nt, Artificial Sequence
  Description of Artificial Sequence: Synthetic oligonucleotide
ccugguaacacaccagagc

SEQ ID NO: 2189724 - RNA, 19 nt, Artificial Sequence
  Description of Artificial Sequence: Synthetic oligonucleotide
gcugucggaauccuggccc

SEQ ID NO: 2189725 - RNA, 19 nt, Artificial Sequence
  Description of Artificial Sequence: Synthetic oligonucleotide
guuuucugcucuauccaug

SEQ ID NO: 2189726 - RNA, 19 nt, Artificial Sequence
  Description of Artificial Sequence: Synthetic oligonucleotide
uuauccaguguaugguauu

SEQ ID NO: 2189727 - RNA, 19 nt, Artificial Sequence
  Description of Artificial Sequence: Synthetic oligonucleotide
ucauggcauggucucagau

SEQ ID NO: 2189728 - RNA, 19 nt, Artificial Sequence
  Description of Artificial Sequence: Synthetic oligonucleotide
ugcuccaucuuguugcauu

SEQ ID NO: 2189729 - RNA, 19 nt, Artificial Sequence
  Description of Artificial Sequence: Synthetic oligonucleotide
uccguaacugucucaugaa

SEQ ID NO: 2189730 - RNA, 19 nt, Artificial Sequence
  Description of Artificial Sequence: Synthetic oligonucleotide
uuccaacagcacuccauga

SEQ ID NO: 2189731 - RNA, 19 nt, Artificial Sequence
  Description of Artificial Sequence: Synthetic oligonucleotide
acaucucacaaaaccgaag

SEQ ID NO: 2189732 - RNA, 19 nt, Artificial Sequence
  Description of Artificial Sequence: Synthetic oligonucleotide
guaugguauucaguuuuag

SEQ ID NO: 2189733 - RNA, 19 nt, Artificial Sequence
  Description of Artificial Sequence: Synthetic oligonucleotide
acuuccguaacugucucau

SEQ ID NO: 2189734 - RNA, 19 nt, Artificial Sequence
  Description of Artificial Sequence: Synthetic oligonucleotide
caugacuccugagggauug

SEQ ID NO: 2189735 - RNA, 19 nt, Artificial Sequence
  Description of Artificial Sequence: Synthetic oligonucleotide
uuauuuuacauggcuucuu

SEQ ID NO: 2189736 - RNA, 19 nt, Artificial Sequence
  Description of Artificial Sequence: Synthetic oligonucleotide
uaacacaccagagccugcu

SEQ ID NO: 2189737 - RNA, 19 nt, Artificial Sequence
  Description of Artificial Sequence: Synthetic oligonucleotide
gguaccgggacucugcauc

SEQ ID NO: 2189738 - RNA, 19 nt, Artificial Sequence
  Description of Artificial Sequence: Synthetic oligonucleotide
ucggucauguauagaugaa

SEQ ID NO: 2189739 - RNA, 19 nt, Artificial Sequence
  Description of Artificial Sequence: Synthetic oligonucleotide
aagcagaaauguauaguua

SEQ ID NO: 2189740 - RNA, 19 nt, Artificial Sequence
  Description of Artificial Sequence: Synthetic oligonucleotide
uuuuaccauugggaugcag

SEQ ID NO: 2189741 - RNA, 19 nt, Artificial Sequence
  Description of Artificial Sequence: Synthetic oligonucleotide
cacaauauccaagggaaaa

SEQ ID NO: 2189742 - RNA, 19 nt, Artificial Sequence
  Description of Artificial Sequence: Synthetic oligonucleotide
caaacuuccguaacugucu

SEQ ID NO: 2189743 - RNA, 19 nt, Artificial Sequence
  Description of Artificial Sequence: Synthetic oligonucleotide
auuauccaguguaugguau

SEQ ID NO: 2189744 - RNA, 19 nt, Artificial Sequence
  Description of Artificial Sequence: Synthetic oligonucleotide
ggucauguauagaugaaga

SEQ ID NO: 2189745 - RNA, 19 nt, Artificial Sequence
  Description of Artificial Sequence: Synthetic oligonucleotide
aacucccgggcuccgccag

SEQ ID NO: 2189746 - RNA, 19 nt, Artificial Sequence
  Description of Artificial Sequence: Synthetic oligonucleotide
caucucuuacuagagucuc

SEQ ID NO: 2189747 - RNA, 19 nt, Artificial Sequence
  Description of Artificial Sequence: Synthetic oligonucleotide
agccuaaaccucuacucuu

SEQ ID NO: 2189748 - RNA, 19 nt, Artificial Sequence
  Description of Artificial Sequence: Synthetic oligonucleotide
cuguggucucuuaaaauaa

SEQ ID NO: 2189749 - RNA, 19 nt, Artificial Sequence
  Description of Artificial Sequence: Synthetic oligonucleotide
ucaauccccuccugguaac

SEQ ID NO: 2189750 - RNA, 19 nt, Artificial Sequence
  Description of Artificial Sequence: Synthetic oligonucleotide
cagcugaugaguuugucua

SEQ ID NO: 2189751 - RNA, 19 nt, Artificial Sequence
  Description of Artificial Sequence: Synthetic oligonucleotide
cuauccauguagucagaga

SEQ ID NO: 2189752 - RNA, 19 nt, Artificial Sequence
  Description of Artificial Sequence: Synthetic oligonucleotide
ggaaguuauacagcugaug

SEQ ID NO: 2189753 - RNA, 19 nt, Artificial Sequence
  Description of Artificial Sequence: Synthetic oligonucleotide
uagagucucuggaccuuug

SEQ ID NO: 2189754 - RNA, 19 nt, Artificial Sequence
  Description of Artificial Sequence: Synthetic oligonucleotide
ccaaacuuccguaacuguc

SEQ ID NO: 2189755 - RNA, 19 nt, Artificial Sequence
  Description of Artificial Sequence: Synthetic oligonucleotide
gacuuagccaucacagcga

SEQ ID NO: 2189756 - RNA, 19 nt, Artificial Sequence
  Description of Artificial Sequence: Synthetic oligonucleotide
gcuucuuaacaucucacaa

SEQ ID NO: 2189757 - RNA, 19 nt, Artificial Sequence
  Description of Artificial Sequence: Synthetic oligonucleotide
acaaaaccgaaggaaguua

SEQ ID NO: 2189758 - RNA, 19 nt, Artificial Sequence
  Description of Artificial Sequence: Synthetic oligonucleotide
aucgaguccccuuccaauu

SEQ ID NO: 2189759 - RNA, 19 nt, Artificial Sequence
  Description of Artificial Sequence: Synthetic oligonucleotide
agaaggugaauaguucuua

SEQ ID NO: 2189760 - RNA, 19 nt, Artificial Sequence
  Description of Artificial Sequence: Synthetic oligonucleotide
ugaacccaguugcauucuc

SEQ ID NO: 2189761 - RNA, 19 nt, Artificial Sequence
  Description of Artificial Sequence: Synthetic oligonucleotide
agagucucuggaccuuuga

SEQ ID NO: 2189762 - RNA, 19 nt, Artificial Sequence
  Description of Artificial Sequence: Synthetic oligonucleotide
gguauucuuuaaaaguguc

SEQ ID NO: 2189763 - RNA, 19 nt, Artificial Sequence
  Description of Artificial Sequence: Synthetic oligonucleotide
auguauagaugaagaauaa

SEQ ID NO: 2189764 - RNA, 19 nt, Artificial Sequence
  Description of Artificial Sequence: Synthetic oligonucleotide
caguguaugguauucaguu

SEQ ID NO: 2189765 - RNA, 19 nt, Artificial Sequence
  Description of Artificial Sequence: Synthetic oligonucleotide
guggucucuuaaaauaauc

SEQ ID NO: 2189766 - RNA, 19 nt, Artificial Sequence
  Description of Artificial Sequence: Synthetic oligonucleotide
uaacugaacccaguugcau

SEQ ID NO: 2189767 - RNA, 19 nt, Artificial Sequence
  Description of Artificial Sequence: Synthetic oligonucleotide
guaccgggacucugcaucc

SEQ ID NO: 2189768 - RNA, 19 nt, Artificial Sequence
  Description of Artificial Sequence: Synthetic oligonucleotide
auguauaguuagguuauua

SEQ ID NO: 2189769 - RNA, 19 nt, Artificial Sequence
  Description of Artificial Sequence: Synthetic oligonucleotide
aauguauaguuagguuauu

SEQ ID NO: 2189770 - RNA, 19 nt, Artificial Sequence
  Description of Artificial Sequence: Synthetic oligonucleotide
caggccacuacuuugcugu

SEQ ID NO: 2189771 - RNA, 19 nt, Artificial Sequence
  Description of Artificial Sequence: Synthetic oligonucleotide
gugagaaggugaauaguuc

SEQ ID NO: 2189772 - RNA, 19 nt, Artificial Sequence
  Description of Artificial Sequence: Synthetic oligonucleotide
gucaauccccuccugguaa

SEQ ID NO: 2189773 - RNA, 19 nt, Artificial Sequence
  Description of Artificial Sequence: Synthetic oligonucleotide
gaaaauguccacuguuguu

SEQ ID NO: 2189774 - RNA, 19 nt, Artificial Sequence
  Description of Artificial Sequence: Synthetic oligonucleotide
uccauccaguguugaaccu

SEQ ID NO: 2189775 - RNA, 19 nt, Artificial Sequence
  Description of Artificial Sequence: Synthetic oligonucleotide
ugugcuuguuauggaaaau

SEQ ID NO: 2189776 - RNA, 19 nt, Artificial Sequence
  Description of Artificial Sequence: Synthetic oligonucleotide
agcacuccaugacuccuga

SEQ ID NO: 2189777 - RNA, 19 nt, Artificial Sequence
  Description of Artificial Sequence: Synthetic oligonucleotide
cuacuuugcugugcauucc

SEQ ID NO: 2189778 - RNA, 19 nt, Artificial Sequence
  Description of Artificial Sequence: Synthetic oligonucleotide
gaaggugaauaguucuuau

SEQ ID NO: 2189779 - RNA, 19 nt, Artificial Sequence
  Description of Artificial Sequence: Synthetic oligonucleotide
ugucuaauauaagggucuu

SEQ ID NO: 2189780 - RNA, 19 nt, Artificial Sequence
  Description of Artificial Sequence: Synthetic oligonucleotide
ggcuucuuaacaucucaca

SEQ ID NO: 2189781 - RNA, 19 nt, Artificial Sequence
  Description of Artificial Sequence: Synthetic oligonucleotide
uucauggcauggucucaga

SEQ ID NO: 2189782 - RNA, 19 nt, Artificial Sequence
  Description of Artificial Sequence: Synthetic oligonucleotide
cuaauauaagggucuucua

SEQ ID NO: 2189783 - RNA, 19 nt, Artificial Sequence
  Description of Artificial Sequence: Synthetic oligonucleotide
uucuuccaggccacuacuu

SEQ ID NO: 2189784 - RNA, 19 nt, Artificial Sequence
  Description of Artificial Sequence: Synthetic oligonucleotide
guauucuuuaaaagugucu

SEQ ID NO: 2189785 - RNA, 19 nt, Artificial Sequence
  Description of Artificial Sequence: Synthetic oligonucleotide
ccuuccaauuuuaaacauc

SEQ ID NO: 2189786 - RNA, 19 nt, Artificial Sequence
  Description of Artificial Sequence: Synthetic oligonucleotide
gggcugaaaccauccaaag

SEQ ID NO: 2189787 - RNA, 19 nt, Artificial Sequence
  Description of Artificial Sequence: Synthetic oligonucleotide
accgggacucugcauccag

SEQ ID NO: 2189788 - RNA, 19 nt, Artificial Sequence
  Description of Artificial Sequence: Synthetic oligonucleotide
ucgaguccccuuccaauuu

SEQ ID NO: 2189789 - RNA, 19 nt, Artificial Sequence
  Description of Artificial Sequence: Synthetic oligonucleotide
ucuggaccuuugagaaccu

SEQ ID NO: 2189790 - RNA, 19 nt, Artificial Sequence
  Description of Artificial Sequence: Synthetic oligonucleotide
accauccaaagcagaaaug

SEQ ID NO: 2189791 - RNA, 19 nt, Artificial Sequence
  Description of Artificial Sequence: Synthetic oligonucleotide
guaacugaacccaguugca

SEQ ID NO: 2189792 - RNA, 19 nt, Artificial Sequence
  Description of Artificial Sequence: Synthetic oligonucleotide
cauccaguguugaaccuaa

SEQ ID NO: 2189793 - RNA, 19 nt, Artificial Sequence
  Description of Artificial Sequence: Synthetic oligonucleotide
gucucguaacugaacccag

SEQ ID NO: 2189794 - RNA, 19 nt, Artificial Sequence
  Description of Artificial Sequence: Synthetic oligonucleotide
gacccuguggucucuuaaa

SEQ ID NO: 2189795 - RNA, 19 nt, Artificial Sequence
  Description of Artificial Sequence: Synthetic oligonucleotide
cauccaaagcagaaaugua

SEQ ID NO: 2189796 - RNA, 19 nt, Artificial Sequence
  Description of Artificial Sequence: Synthetic oligonucleotide
cacugcagcggugcugucg

SEQ ID NO: 2189797 - RNA, 19 nt, Artificial Sequence
  Description of Artificial Sequence: Synthetic oligonucleotide
guagucagagauuuucguu

SEQ ID NO: 2189798 - RNA, 19 nt, Artificial Sequence
  Description of Artificial Sequence: Synthetic oligonucleotide
acagcacuccaugacuccu

SEQ ID NO: 2189799 - RNA, 19 nt, Artificial Sequence
  Description of Artificial Sequence: Synthetic oligonucleotide
uccaggccacuacuuugcu

SEQ ID NO: 2189800 - RNA, 19 nt, Artificial Sequence
  Description of Artificial Sequence: Synthetic oligonucleotide
cuuugcugugcauucccaa

SEQ ID NO: 2189801 - RNA, 19 nt, Artificial Sequence
  Description of Artificial Sequence: Synthetic oligonucleotide
caaagcagaaauguauagu

SEQ ID NO: 2189802 - RNA, 19 nt, Artificial Sequence
  Description of Artificial Sequence: Synthetic oligonucleotide
guguugaaccuaauuucuc

SEQ ID NO: 2189803 - RNA, 19 nt, Artificial Sequence
  Description of Artificial Sequence: Synthetic oligonucleotide
cauggucucagaucuaaau

SEQ ID NO: 2189804 - RNA, 19 nt, Artificial Sequence
  Description of Artificial Sequence: Synthetic oligonucleotide
cuuccguaacugucucaug

SEQ ID NO: 2189805 - RNA, 19 nt, Artificial Sequence
  Description of Artificial Sequence: Synthetic oligonucleotide
caaagccuaaaccucuacu

SEQ ID NO: 2189806 - RNA, 19 nt, Artificial Sequence
  Description of Artificial Sequence: Synthetic oligonucleotide
ggucucagaucuaaaucac

SEQ ID NO: 2189807 - RNA, 19 nt, Artificial Sequence
  Description of Artificial Sequence: Synthetic oligonucleotide
cuuauuuuacauggcuucu

SEQ ID NO: 2189808 - RNA, 19 nt, Artificial Sequence
  Description of Artificial Sequence: Synthetic oligonucleotide
uaccauugggaugcagaaa

SEQ ID NO: 2189809 - RNA, 19 nt, Artificial Sequence
  Description of Artificial Sequence: Synthetic oligonucleotide
cuuuagcaccgccacugca

SEQ ID NO: 2189810 - RNA, 19 nt, Artificial Sequence
  Description of Artificial Sequence: Synthetic oligonucleotide
gugcugucggaauccuggc

SEQ ID NO: 2189811 - RNA, 19 nt, Artificial Sequence
  Description of Artificial Sequence: Synthetic oligonucleotide
cugugcauucccaaagccu

SEQ ID NO: 2189812 - RNA, 19 nt, Artificial Sequence
  Description of Artificial Sequence: Synthetic oligonucleotide
gcuuguuauggaaaauguc

SEQ ID NO: 2189813 - RNA, 19 nt, Artificial Sequence
  Description of Artificial Sequence: Synthetic oligonucleotide
gucucagaucuaaaucaca

SEQ ID NO: 2189814 - RNA, 19 nt, Artificial Sequence
  Description of Artificial Sequence: Synthetic oligonucleotide
cuuggucuaaguauuucuu

SEQ ID NO: 2189815 - RNA, 19 nt, Artificial Sequence
  Description of Artificial Sequence: Synthetic oligonucleotide
gcaacagaaaaugggcuga

SEQ ID NO: 2189816 - RNA, 19 nt, Artificial Sequence
  Description of Artificial Sequence: Synthetic oligonucleotide
cagcacuccaugacuccug

SEQ ID NO: 2189817 - RNA, 19 nt, Artificial Sequence
  Description of Artificial Sequence: Synthetic oligonucleotide
auccaguguaugguauuca

SEQ ID NO: 2189818 - RNA, 19 nt, Artificial Sequence
  Description of Artificial Sequence: Synthetic oligonucleotide
gucggaauccuggcccagg

SEQ ID NO: 2189819 - RNA, 19 nt, Artificial Sequence
  Description of Artificial Sequence: Synthetic oligonucleotide
gcuggacuuagccaucaca

SEQ ID NO: 2189820 - RNA, 19 nt, Artificial Sequence
  Description of Artificial Sequence: Synthetic oligonucleotide
auuuauuguuaaacucaua

SEQ ID NO: 2189821 - RNA, 19 nt, Artificial Sequence
  Description of Artificial Sequence: Synthetic oligonucleotide
gccacuacuuugcugugca

SEQ ID NO: 2189822 - RNA, 19 nt, Artificial Sequence
  Description of Artificial Sequence: Synthetic oligonucleotide
guccccuuccaauuuuaaa

SEQ ID NO: 2189823 - RNA, 19 nt, Artificial Sequence
  Description of Artificial Sequence: Synthetic oligonucleotide
gucuaauauaagggucuuc

SEQ ID NO: 2189824 - RNA, 19 nt, Artificial Sequence
  Description of Artificial Sequence: Synthetic oligonucleotide
aucucuuacuagagucucu

SEQ ID NO: 2189825 - RNA, 19 nt, Artificial Sequence
  Description of Artificial Sequence: Synthetic oligonucleotide
ugucggaauccuggcccag

SEQ ID NO: 2189826 - RNA, 19 nt, Artificial Sequence
  Description of Artificial Sequence: Synthetic oligonucleotide
ggucuucuauccaaacuuc

SEQ ID NO: 2189827 - RNA, 19 nt, Artificial Sequence
  Description of Artificial Sequence: Synthetic oligonucleotide
cuaauuucucggucaugua

SEQ ID NO: 2189828 - RNA, 19 nt, Artificial Sequence
  Description of Artificial Sequence: Synthetic oligonucleotide
accuaauuucucggucaug

SEQ ID NO: 2189829 - RNA, 19 nt, Artificial Sequence
  Description of Artificial Sequence: Synthetic oligonucleotide
ggugaauaguucuuauuuu

SEQ ID NO: 2189830 - RNA, 19 nt, Artificial Sequence
  Description of Artificial Sequence: Synthetic oligonucleotide
ggaccuuugagaaccugca

SEQ ID NO: 2189831 - RNA, 19 nt, Artificial Sequence
  Description of Artificial Sequence: Synthetic oligonucleotide
ugcagcggugcugucggaa

SEQ ID NO: 2189832 - RNA, 19 nt, Artificial Sequence
  Description of Artificial Sequence: Synthetic oligonucleotide
gucucaugaagguauucuu

SEQ ID NO: 2189833 - RNA, 19 nt, Artificial Sequence
  Description of Artificial Sequence: Synthetic oligonucleotide
cugaugaguuugucuaaua

SEQ ID NO: 2189834 - RNA, 19 nt, Artificial Sequence
  Description of Artificial Sequence: Synthetic oligonucleotide
guaacacaccagagccugc

SEQ ID NO: 2189835 - RNA, 19 nt, Artificial Sequence
  Description of Artificial Sequence: Synthetic oligonucleotide
aggaaguuauacagcugau

SEQ ID NO: 2189836 - RNA, 19 nt, Artificial Sequence
  Description of Artificial Sequence: Synthetic oligonucleotide
cugucucaugaagguauuc

SEQ ID NO: 2189837 - RNA, 19 nt, Artificial Sequence
  Description of Artificial Sequence: Synthetic oligonucleotide
ggugagaaggugaauaguu

SEQ ID NO: 2189838 - RNA, 19 nt, Artificial Sequence
  Description of Artificial Sequence: Synthetic oligonucleotide
ugacuccugagggauuguu

SEQ ID NO: 2189839 - RNA, 19 nt, Artificial Sequence
  Description of Artificial Sequence: Synthetic oligonucleotide
cugagggauuguuuuauuu

SEQ ID NO: 2189840 - RNA, 19 nt, Artificial Sequence
  Description of Artificial Sequence: Synthetic oligonucleotide
gaacucccgggcuccgcca

SEQ ID NO: 2189841 - RNA, 19 nt, Artificial Sequence
  Description of Artificial Sequence: Synthetic oligonucleotide
cugucggaauccuggccca

SEQ ID NO: 2189842 - RNA, 19 nt, Artificial Sequence
  Description of Artificial Sequence: Synthetic oligonucleotide
cccgcuuuagcaccgccac

SEQ ID NO: 2189843 - RNA, 19 nt, Artificial Sequence
  Description of Artificial Sequence: Synthetic oligonucleotide
gcugguaccgggacucugc

SEQ ID NO: 2189844 - RNA, 19 nt, Artificial Sequence
  Description of Artificial Sequence: Synthetic oligonucleotide
ccaguguugaaccuaauuu

SEQ ID NO: 2189845 - RNA, 19 nt, Artificial Sequence
  Description of Artificial Sequence: Synthetic oligonucleotide
cuaaaccucuacucuuuau

SEQ ID NO: 2189846 - RNA, 19 nt, Artificial Sequence
  Description of Artificial Sequence: Synthetic oligonucleotide
caggcuggacuuagccauc

SEQ ID NO: 2189847 - RNA, 19 nt, Artificial Sequence
  Description of Artificial Sequence: Synthetic oligonucleotide
ccaaagccuaaaccucuac

SEQ ID NO: 2189848 - RNA, 19 nt, Artificial Sequence
  Description of Artificial Sequence: Synthetic oligonucleotide
ugguaccgggacucugcau

SEQ ID NO: 2189849 - RNA, 19 nt, Artificial Sequence
  Description of Artificial Sequence: Synthetic oligonucleotide
cucuauccauguagucaga

SEQ ID NO: 2189850 - RNA, 19 nt, Artificial Sequence
  Description of Artificial Sequence: Synthetic oligonucleotide
cuuagccaucacagcgaga

SEQ ID NO: 2189851 - RNA, 19 nt, Artificial Sequence
  Description of Artificial Sequence: Synthetic oligonucleotide
cuggaccuuugagaaccug

SEQ ID NO: 2189852 - RNA, 19 nt, Artificial Sequence
  Description of Artificial Sequence: Synthetic oligonucleotide
cugguaccgggacucugca

SEQ ID NO: 2189853 - RNA, 19 nt, Artificial Sequence
  Description of Artificial Sequence: Synthetic oligonucleotide
cucguaacugaacccaguu

SEQ ID NO: 2189854 - RNA, 19 nt, Artificial Sequence
  Description of Artificial Sequence: Synthetic oligonucleotide
cccaaagccuucauccaca

SEQ ID NO: 2189855 - RNA, 19 nt, Artificial Sequence
  Description of Artificial Sequence: Synthetic oligonucleotide
cggucauguauagaugaag

SEQ ID NO: 2189856 - RNA, 19 nt, Artificial Sequence
  Description of Artificial Sequence: Synthetic oligonucleotide
cgcuuuagcaccgccacug

SEQ ID NO: 2189857 - RNA, 19 nt, Artificial Sequence
  Description of Artificial Sequence: Synthetic oligonucleotide
cagagccugcugguaccgg

SEQ ID NO: 2189858 - RNA, 19 nt, Artificial Sequence
  Description of Artificial Sequence: Synthetic oligonucleotide
cacaaaaccgaaggaaguu

SEQ ID NO: 2189859 - RNA, 19 nt, Artificial Sequence
  Description of Artificial Sequence: Synthetic oligonucleotide
uggcauggucucagaucua

SEQ ID NO: 2189860 - RNA, 19 nt, Artificial Sequence
  Description of Artificial Sequence: Synthetic oligonucleotide
gccaucacagcgagaacuc

SEQ ID NO: 2189861 - RNA, 19 nt, Artificial Sequence
  Description of Artificial Sequence: Synthetic oligonucleotide
aguccccuuccaauuuuaa

SEQ ID NO: 2189862 - RNA, 19 nt, Artificial Sequence
  Description of Artificial Sequence: Synthetic oligonucleotide
uaccgggacucugcaucca

SEQ ID NO: 2189863 - RNA, 19 nt, Artificial Sequence
  Description of Artificial Sequence: Synthetic oligonucleotide
cccaguugcauucucuucu

SEQ ID NO: 2189864 - RNA, 19 nt, Artificial Sequence
  Description of Artificial Sequence: Synthetic oligonucleotide
gaguccccuuccaauuuua

SEQ ID NO: 2189865 - RNA, 19 nt, Artificial Sequence
  Description of Artificial Sequence: Synthetic oligonucleotide
gcgagaacucccgggcucc

SEQ ID NO: 2189866 - RNA, 19 nt, Artificial Sequence
  Description of Artificial Sequence: Synthetic oligonucleotide
ggccacuacuuugcugugc

SEQ ID NO: 2189867 - RNA, 19 nt, Artificial Sequence
  Description of Artificial Sequence: Synthetic oligonucleotide
aacgacccuguggucucuu

SEQ ID NO: 2189868 - RNA, 19 nt, Artificial Sequence
  Description of Artificial Sequence: Synthetic oligonucleotide
ccaacagcacuccaugacu

SEQ ID NO: 2189869 - RNA, 19 nt, Artificial Sequence
  Description of Artificial Sequence: Synthetic oligonucleotide
acgacccuguggucucuua

SEQ ID NO: 2189870 - RNA, 19 nt, Artificial Sequence
  Description of Artificial Sequence: Synthetic oligonucleotide
ccccagaugccaaagccua

SEQ ID NO: 2189871 - RNA, 19 nt, Artificial Sequence
  Description of Artificial Sequence: Synthetic oligonucleotide
caauccccuccugguaaca

SEQ ID NO: 2189872 - RNA, 19 nt, Artificial Sequence
  Description of Artificial Sequence: Synthetic oligonucleotide
caguugcauucucuucuua

SEQ ID NO: 2189873 - RNA, 19 nt, Artificial Sequence
  Description of Artificial Sequence: Synthetic oligonucleotide
ggcuggacuuagccaucac

SEQ ID NO: 2189874 - RNA, 19 nt, Artificial Sequence
  Description of Artificial Sequence: Synthetic oligonucleotide
ccuaaaccucuacucuuua

SEQ ID NO: 2189875 - RNA, 19 nt, Artificial Sequence
  Description of Artificial Sequence: Synthetic oligonucleotide
caccgccacugcagcggug

SEQ ID NO: 2189876 - RNA, 19 nt, Artificial Sequence
  Description of Artificial Sequence: Synthetic oligonucleotide
cugcccgcuuuagcaccgc

SEQ ID NO: 2189877 - RNA, 19 nt, Artificial Sequence
  Description of Artificial Sequence: Synthetic oligonucleotide
auccaguguugaaccuaau

SEQ ID NO: 2189878 - RNA, 19 nt, Artificial Sequence
  Description of Artificial Sequence: Synthetic oligonucleotide
cuagagucucuggaccuuu

SEQ ID NO: 2189879 - RNA, 19 nt, Artificial Sequence
  Description of Artificial Sequence: Synthetic oligonucleotide
cugaacccaguugcauucu

SEQ ID NO: 2189880 - RNA, 19 nt, Artificial Sequence
  Description of Artificial Sequence: Synthetic oligonucleotide
ccauccaguguugaaccua

SEQ ID NO: 2189881 - RNA, 19 nt, Artificial Sequence
  Description of Artificial Sequence: Synthetic oligonucleotide
gcccgcuuuagcaccgcca

SEQ ID NO: 2189882 - RNA, 19 nt, Artificial Sequence
  Description of Artificial Sequence: Synthetic oligonucleotide
gccaaagccuaaaccucua

SEQ ID NO: 2189883 - RNA, 19 nt, Artificial Sequence
  Description of Artificial Sequence: Synthetic oligonucleotide
gccuaaaccucuacucuuu

SEQ ID NO: 2189884 - RNA, 19 nt, Artificial Sequence
  Description of Artificial Sequence: Synthetic oligonucleotide
cccuguggucucuuaaaau

SEQ ID NO: 2189885 - RNA, 19 nt, Artificial Sequence
  Description of Artificial Sequence: Synthetic oligonucleotide
cugcagcggugcugucgga

SEQ ID NO: 2189886 - RNA, 19 nt, Artificial Sequence
  Description of Artificial Sequence: Synthetic oligonucleotide
ccucuacucuuuauauauu

SEQ ID NO: 2189887 - RNA, 19 nt, Artificial Sequence
  Description of Artificial Sequence: Synthetic oligonucleotide
ccaguugcauucucuucuu

SEQ ID NO: 2189888 - RNA, 19 nt, Artificial Sequence
  Description of Artificial Sequence: Synthetic oligonucleotide
ccugagggauuguuuuauu

SEQ ID NO: 2189889 - RNA, 19 nt, Artificial Sequence
  Description of Artificial Sequence: Synthetic oligonucleotide
ccacuacuuugcugugcau

SEQ ID NO: 2189890 - RNA, 19 nt, Artificial Sequence
  Description of Artificial Sequence: Synthetic oligonucleotide
ccgcuuuagcaccgccacu

SEQ ID NO: 2189891 - RNA, 19 nt, Artificial Sequence
  Description of Artificial Sequence: Synthetic oligonucleotide
auuugaaaacuauagaugc

SEQ ID NO: 2189892 - RNA, 19 nt, Artificial Sequence
  Description of Artificial Sequence: Synthetic oligonucleotide
ucuugaaacacacagacag

SEQ ID NO: 2189893 - RNA, 19 nt, Artificial Sequence
  Description of Artificial Sequence: Synthetic oligonucleotide
agagauuacauccuaaccc

SEQ ID NO: 2189894 - RNA, 19 nt, Artificial Sequence
  Description of Artificial Sequence: Synthetic oligonucleotide
acuuccacgaaacagaggc

SEQ ID NO: 2189895 - RNA, 19 nt, Artificial Sequence
  Description of Artificial Sequence: Synthetic oligonucleotide
aaguaaacgaacauaaagc

SEQ ID NO: 2189896 - RNA, 19 nt, Artificial Sequence
  Description of Artificial Sequence: Synthetic oligonucleotide
uaaacgaacauaaagcugc

SEQ ID NO: 2189897 - RNA, 19 nt, Artificial Sequence
  Description of Artificial Sequence: Synthetic oligonucleotide
aaauauacagccgacacuc

SEQ ID NO: 2189898 - RNA, 19 nt, Artificial Sequence
  Description of Artificial Sequence: Synthetic oligonucleotide
agcacaaucggucagcagc

SEQ ID NO: 2189899 - RNA, 19 nt, Artificial Sequence
  Description of Artificial Sequence: Synthetic oligonucleotide
uuagaugaccagcucaugg

SEQ ID NO: 2189900 - RNA, 19 nt, Artificial Sequence
  Description of Artificial Sequence: Synthetic oligonucleotide
uuaaacgucaagcauuuca

SEQ ID NO: 2189901 - RNA, 19 nt, Artificial Sequence
  Description of Artificial Sequence: Synthetic oligonucleotide
gagauuacauccuaacccg

SEQ ID NO: 2189902 - RNA, 19 nt, Artificial Sequence
  Description of Artificial Sequence: Synthetic oligonucleotide
cagauauucuuuuagcugg

SEQ ID NO: 2189903 - RNA, 19 nt, Artificial Sequence
  Description of Artificial Sequence: Synthetic oligonucleotide
uuugaaaacuauagaugcg

SEQ ID NO: 2189904 - RNA, 19 nt, Artificial Sequence
  Description of Artificial Sequence: Synthetic oligonucleotide
uugaaaacuauagaugcgg

SEQ ID NO: 2189905 - RNA, 19 nt, Artificial Sequence
  Description of Artificial Sequence: Synthetic oligonucleotide
ucugucacgaacuucucgg

SEQ ID NO: 2189906 - RNA, 19 nt, Artificial Sequence
  Description of Artificial Sequence: Synthetic oligonucleotide
aguaaacgaacauaaagcu

SEQ ID NO: 2189907 - RNA, 19 nt, Artificial Sequence
  Description of Artificial Sequence: Synthetic oligonucleotide
agauuuggcaugaaaagcc

SEQ ID NO: 2189908 - RNA, 19 nt, Artificial Sequence
  Description of Artificial Sequence: Synthetic oligonucleotide
ucuucaacugcucugcaag

SEQ ID NO: 2189909 - RNA, 19 nt, Artificial Sequence
  Description of Artificial Sequence: Synthetic oligonucleotide
cuuuuagcuggauuaaacg

SEQ ID NO: 2189910 - RNA, 19 nt, Artificial Sequence
  Description of Artificial Sequence: Synthetic oligonucleotide
ugaacuuccacgaaacaga

SEQ ID NO: 2189911 - RNA, 19 nt, Artificial Sequence
  Description of Artificial Sequence: Synthetic oligonucleotide
augaccauccaacauuggc

SEQ ID NO: 2189912 - RNA, 19 nt, Artificial Sequence
  Description of Artificial Sequence: Synthetic oligonucleotide
ucagaaguagaucuuugcc

SEQ ID NO: 2189913 - RNA, 19 nt, Artificial Sequence
  Description of Artificial Sequence: Synthetic oligonucleotide
ugaaaacuauagaugcggg

SEQ ID NO: 2189914 - RNA, 19 nt, Artificial Sequence
  Description of Artificial Sequence: Synthetic oligonucleotide
uguuuagaugaccagcuca

SEQ ID NO: 2189915 - RNA, 19 nt, Artificial Sequence
  Description of Artificial Sequence: Synthetic oligonucleotide
agaugaaggaguccagacc

SEQ ID NO: 2189916 - RNA, 19 nt, Artificial Sequence
  Description of Artificial Sequence: Synthetic oligonucleotide
gaaauggcagcacaaucgg

SEQ ID NO: 2189917 - RNA, 19 nt, Artificial Sequence
  Description of Artificial Sequence: Synthetic oligonucleotide
uuuuagcuggauuaaacgu

SEQ ID NO: 2189918 - RNA, 19 nt, Artificial Sequence
  Description of Artificial Sequence: Synthetic oligonucleotide
ugaagcagagcgcaucugg

SEQ ID NO: 2189919 - RNA, 19 nt, Artificial Sequence
  Description of Artificial Sequence: Synthetic oligonucleotide
gaaaguaugggugacucag

SEQ ID NO: 2189920 - RNA, 19 nt, Artificial Sequence
  Description of Artificial Sequence: Synthetic oligonucleotide
aguuugauuuguccgcugc

SEQ ID NO: 2189921 - RNA, 19 nt, Artificial Sequence
  Description of Artificial Sequence: Synthetic oligonucleotide
aacuaggugguuuccuugg

SEQ ID NO: 2189922 - RNA, 19 nt, Artificial Sequence
  Description of Artificial Sequence: Synthetic oligonucleotide
uuuagcuggauuaaacguc

SEQ ID NO: 2189923 - RNA, 19 nt, Artificial Sequence
  Description of Artificial Sequence: Synthetic oligonucleotide
uccuaguugauccacgucu

SEQ ID NO: 2189924 - RNA, 19 nt, Artificial Sequence
  Description of Artificial Sequence: Synthetic oligonucleotide
ugagguaagggccauuuga

SEQ ID NO: 2189925 - RNA, 19 nt, Artificial Sequence
  Description of Artificial Sequence: Synthetic oligonucleotide
ucacgaacuucucggaugg

SEQ ID NO: 2189926 - RNA, 19 nt, Artificial Sequence
  Description of Artificial Sequence: Synthetic oligonucleotide
ucuuuuagcuggauuaaac

SEQ ID NO: 2189927 - RNA, 19 nt, Artificial Sequence
  Description of Artificial Sequence: Synthetic oligonucleotide
uauagaugcgggcaaggcc

SEQ ID NO: 2189928 - RNA, 19 nt, Artificial Sequence
  Description of Artificial Sequence: Synthetic oligonucleotide
uaggcagauauucuuuuag

SEQ ID NO: 2189929 - RNA, 19 nt, Artificial Sequence
  Description of Artificial Sequence: Synthetic oligonucleotide
aacgucaagcauuucagaa

SEQ ID NO: 2189930 - RNA, 19 nt, Artificial Sequence
  Description of Artificial Sequence: Synthetic oligonucleotide
aauguucuguggcuuuagg

SEQ ID NO: 2189931 - RNA, 19 nt, Artificial Sequence
  Description of Artificial Sequence: Synthetic oligonucleotide
aguugauccacgucugaac

SEQ ID NO: 2189932 - RNA, 19 nt, Artificial Sequence
  Description of Artificial Sequence: Synthetic oligonucleotide
gaaaacuauagaugcgggc

SEQ ID NO: 2189933 - RNA, 19 nt, Artificial Sequence
  Description of Artificial Sequence: Synthetic oligonucleotide
cauaaagcugcaaucacuc

SEQ ID NO: 2189934 - RNA, 19 nt, Artificial Sequence
  Description of Artificial Sequence: Synthetic oligonucleotide
auccuaacccgacugggcc

SEQ ID NO: 2189935 - RNA, 19 nt, Artificial Sequence
  Description of Artificial Sequence: Synthetic oligonucleotide
cucacaaguacccaagcag

SEQ ID NO: 2189936 - RNA, 19 nt, Artificial Sequence
  Description of Artificial Sequence: Synthetic oligonucleotide
gucacgaugcacuacgcgg

SEQ ID NO: 2189937 - RNA, 19 nt, Artificial Sequence
  Description of Artificial Sequence: Synthetic oligonucleotide
acagccgacacuccaaagg

SEQ ID NO: 2189938 - RNA, 19 nt, Artificial Sequence
  Description of Artificial Sequence: Synthetic oligonucleotide
ucaagcauuucagaaguag

SEQ ID NO: 2189939 - RNA, 19 nt, Artificial Sequence
  Description of Artificial Sequence: Synthetic oligonucleotide
aauaucugucacgaacuuc

SEQ ID NO: 2189940 - RNA, 19 nt, Artificial Sequence
  Description of Artificial Sequence: Synthetic oligonucleotide
uuuguaccucuccaggucc

SEQ ID NO: 2189941 - RNA, 19 nt, Artificial Sequence
  Description of Artificial Sequence: Synthetic oligonucleotide
cuugcauugauuucucaac

SEQ ID NO: 2189942 - RNA, 19 nt, Artificial Sequence
  Description of Artificial Sequence: Synthetic oligonucleotide
acagacaaacaaguaaacg

SEQ ID NO: 2189943 - RNA, 19 nt, Artificial Sequence
  Description of Artificial Sequence: Synthetic oligonucleotide
uucgucaauaucugucacg

SEQ ID NO: 2189944 - RNA, 19 nt, Artificial Sequence
  Description of Artificial Sequence: Synthetic oligonucleotide
uuacauccuaacccgacug

SEQ ID NO: 2189945 - RNA, 19 nt, Artificial Sequence
  Description of Artificial Sequence: Synthetic oligonucleotide
uucgaaacauuucugcaaa

SEQ ID NO: 2189946 - RNA, 19 nt, Artificial Sequence
  Description of Artificial Sequence: Synthetic oligonucleotide
aaacuaggugguuuccuug

SEQ ID NO: 2189947 - RNA, 19 nt, Artificial Sequence
  Description of Artificial Sequence: Synthetic oligonucleotide
uugcauugauuucucaaca

SEQ ID NO: 2189948 - RNA, 19 nt, Artificial Sequence
  Description of Artificial Sequence: Synthetic oligonucleotide
aguaugggugacucagggc

SEQ ID NO: 2189949 - RNA, 19 nt, Artificial Sequence
  Description of Artificial Sequence: Synthetic oligonucleotide
ugcauugauuucucaacag

SEQ ID NO: 2189950 - RNA, 19 nt, Artificial Sequence
  Description of Artificial Sequence: Synthetic oligonucleotide
uggauuaaacgucaagcau

SEQ ID NO: 2189951 - RNA, 19 nt, Artificial Sequence
  Description of Artificial Sequence: Synthetic oligonucleotide
ucucguaggggucuuguca

SEQ ID NO: 2189952 - RNA, 19 nt, Artificial Sequence
  Description of Artificial Sequence: Synthetic oligonucleotide
uagaugaccagcucauggc

SEQ ID NO: 2189953 - RNA, 19 nt, Artificial Sequence
  Description of Artificial Sequence: Synthetic oligonucleotide
ggaaauggcagcacaaucg

SEQ ID NO: 2189954 - RNA, 19 nt, Artificial Sequence
  Description of Artificial Sequence: Synthetic oligonucleotide
uacauccuaacccgacugg

SEQ ID NO: 2189955 - RNA, 19 nt, Artificial Sequence
  Description of Artificial Sequence: Synthetic oligonucleotide
aguucgucaauaucuguca

SEQ ID NO: 2189956 - RNA, 19 nt, Artificial Sequence
  Description of Artificial Sequence: Synthetic oligonucleotide
acgucaagcauuucagaag

SEQ ID NO: 2189957 - RNA, 19 nt, Artificial Sequence
  Description of Artificial Sequence: Synthetic oligonucleotide
ucuugcauugauuucucaa

SEQ ID NO: 2189958 - RNA, 19 nt, Artificial Sequence
  Description of Artificial Sequence: Synthetic oligonucleotide
acgaacauaaagcugcaau

SEQ ID NO: 2189959 - RNA, 19 nt, Artificial Sequence
  Description of Artificial Sequence: Synthetic oligonucleotide
agaaguagaucuuugccua

SEQ ID NO: 2189960 - RNA, 19 nt, Artificial Sequence
  Description of Artificial Sequence: Synthetic oligonucleotide
cucaacaguaaacuaggug

SEQ ID NO: 2189961 - RNA, 19 nt, Artificial Sequence
  Description of Artificial Sequence: Synthetic oligonucleotide
ucgucaauaucugucacga

SEQ ID NO: 2189962 - RNA, 19 nt, Artificial Sequence
  Description of Artificial Sequence: Synthetic oligonucleotide
cagagauuacauccuaacc

SEQ ID NO: 2189963 - RNA, 19 nt, Artificial Sequence
  Description of Artificial Sequence: Synthetic oligonucleotide
guaagggccauuugaaaac

SEQ ID NO: 2189964 - RNA, 19 nt, Artificial Sequence
  Description of Artificial Sequence: Synthetic oligonucleotide
aguaaacuaggugguuucc

SEQ ID NO: 2189965 - RNA, 19 nt, Artificial Sequence
  Description of Artificial Sequence: Synthetic oligonucleotide
ucaggcuguguucagcucu

SEQ ID NO: 2189966 - RNA, 19 nt, Artificial Sequence
  Description of Artificial Sequence: Synthetic oligonucleotide
caaguacccaagcaggccc

SEQ ID NO: 2189967 - RNA, 19 nt, Artificial Sequence
  Description of Artificial Sequence: Synthetic oligonucleotide
uggaugaccauccaacauu

SEQ ID NO: 2189968 - RNA, 19 nt, Artificial Sequence
  Description of Artificial Sequence: Synthetic oligonucleotide
ugaaggaguccagaccucg

SEQ ID NO: 2189969 - RNA, 19 nt, Artificial Sequence
  Description of Artificial Sequence: Synthetic oligonucleotide
ugcaaucacucuugcauug

SEQ ID NO: 2189970 - RNA, 19 nt, Artificial Sequence
  Description of Artificial Sequence: Synthetic oligonucleotide
cagauuuggcaugaaaagc

SEQ ID NO: 2189971 - RNA, 19 nt, Artificial Sequence
  Description of Artificial Sequence: Synthetic oligonucleotide
agugugacgaccacugagg

SEQ ID NO: 2189972 - RNA, 19 nt, Artificial Sequence
  Description of Artificial Sequence: Synthetic oligonucleotide
agcucugaggugcucuggc

SEQ ID NO: 2189973 - RNA, 19 nt, Artificial Sequence
  Description of Artificial Sequence: Synthetic oligonucleotide
ucucggauggguugggcag

SEQ ID NO: 2189974 - RNA, 19 nt, Artificial Sequence
  Description of Artificial Sequence: Synthetic oligonucleotide
acaaacaaguaaacgaaca

SEQ ID NO: 2189975 - RNA, 19 nt, Artificial Sequence
  Description of Artificial Sequence: Synthetic oligonucleotide
gcagauuuggcaugaaaag

SEQ ID NO: 2189976 - RNA, 19 nt, Artificial Sequence
  Description of Artificial Sequence: Synthetic oligonucleotide
cacagugugacgaccacug

SEQ ID NO: 2189977 - RNA, 19 nt, Artificial Sequence
  Description of Artificial Sequence: Synthetic oligonucleotide
ucuuuguaccucuccaggu

SEQ ID NO: 2189978 - RNA, 19 nt, Artificial Sequence
  Description of Artificial Sequence: Synthetic oligonucleotide
guaaacgaacauaaagcug

SEQ ID NO: 2189979 - RNA, 19 nt, Artificial Sequence
  Description of Artificial Sequence: Synthetic oligonucleotide
ucucccggaaguccaauca

SEQ ID NO: 2189980 - RNA, 19 nt, Artificial Sequence
  Description of Artificial Sequence: Synthetic oligonucleotide
auuacauccuaacccgacu

SEQ ID NO: 2189981 - RNA, 19 nt, Artificial Sequence
  Description of Artificial Sequence: Synthetic oligonucleotide
agcagagcgcaucuggaag

SEQ ID NO: 2189982 - RNA, 19 nt, Artificial Sequence
  Description of Artificial Sequence: Synthetic oligonucleotide
auagaugcgggcaaggcca

SEQ ID NO: 2189983 - RNA, 19 nt, Artificial Sequence
  Description of Artificial Sequence: Synthetic oligonucleotide
agaaaaggaaauggcagca

SEQ ID NO: 2189984 - RNA, 19 nt, Artificial Sequence
  Description of Artificial Sequence: Synthetic oligonucleotide
cucugcaaggcucucguag

SEQ ID NO: 2189985 - RNA, 19 nt, Artificial Sequence
  Description of Artificial Sequence: Synthetic oligonucleotide
cuggauuaaacgucaagca

SEQ ID NO: 2189986 - RNA, 19 nt, Artificial Sequence
  Description of Artificial Sequence: Synthetic oligonucleotide
acaaucggucagcagcuuc

SEQ ID NO: 2189987 - RNA, 19 nt, Artificial Sequence
  Description of Artificial Sequence: Synthetic oligonucleotide
uacgcggugagaugaagga

SEQ ID NO: 2189988 - RNA, 19 nt, Artificial Sequence
  Description of Artificial Sequence: Synthetic oligonucleotide
uggaaguuuuccagguucu

SEQ ID NO: 2189989 - RNA, 19 nt, Artificial Sequence
  Description of Artificial Sequence: Synthetic oligonucleotide
ucacgaugcacuacgcggu

SEQ ID NO: 2189990 - RNA, 19 nt, Artificial Sequence
  Description of Artificial Sequence: Synthetic oligonucleotide
cuacgcggugagaugaagg

SEQ ID NO: 2189991 - RNA, 19 nt, Artificial Sequence
  Description of Artificial Sequence: Synthetic oligonucleotide
gcaaauauacagccgacac

SEQ ID NO: 2189992 - RNA, 19 nt, Artificial Sequence
  Description of Artificial Sequence: Synthetic oligonucleotide
accauguuuagaugaccag

SEQ ID NO: 2189993 - RNA, 19 nt, Artificial Sequence
  Description of Artificial Sequence: Synthetic oligonucleotide
gcuggauuaaacgucaagc

SEQ ID NO: 2189994 - RNA, 19 nt, Artificial Sequence
  Description of Artificial Sequence: Synthetic oligonucleotide
auguucuguggcuuuaggu

SEQ ID NO: 2189995 - RNA, 19 nt, Artificial Sequence
  Description of Artificial Sequence: Synthetic oligonucleotide
auguuuagaugaccagcuc

SEQ ID NO: 2189996 - RNA, 19 nt, Artificial Sequence
  Description of Artificial Sequence: Synthetic oligonucleotide
agacagacaaacaaguaaa

SEQ ID NO: 2189997 - RNA, 19 nt, Artificial Sequence
  Description of Artificial Sequence: Synthetic oligonucleotide
cucguaggggucuugucag

SEQ ID NO: 2189998 - RNA, 19 nt, Artificial Sequence
  Description of Artificial Sequence: Synthetic oligonucleotide
agccaccauguuuagauga

SEQ ID NO: 2189999 - RNA, 19 nt, Artificial Sequence
  Description of Artificial Sequence: Synthetic oligonucleotide
augaccagcucauggcauc

SEQ ID NO: 2190000 - RNA, 19 nt, Artificial Sequence
  Description of Artificial Sequence: Synthetic oligonucleotide
ucugaacuuccacgaaaca

SEQ ID NO: 2190001 - RNA, 19 nt, Artificial Sequence
  Description of Artificial Sequence: Synthetic oligonucleotide
aaggaguccagaccucgga

SEQ ID NO: 2190002 - RNA, 19 nt, Artificial Sequence
  Description of Artificial Sequence: Synthetic oligonucleotide
ugcaaauauacagccgaca

SEQ ID NO: 2190003 - RNA, 19 nt, Artificial Sequence
  Description of Artificial Sequence: Synthetic oligonucleotide
ggcaugaaaagccugccug

SEQ ID NO: 2190004 - RNA, 19 nt, Artificial Sequence
  Description of Artificial Sequence: Synthetic oligonucleotide
uggaugacaggugggagug

SEQ ID NO: 2190005 - RNA, 19 nt, Artificial Sequence
  Description of Artificial Sequence: Synthetic oligonucleotide
cucagggcgccauaggcag

SEQ ID NO: 2190006 - RNA, 19 nt, Artificial Sequence
  Description of Artificial Sequence: Synthetic oligonucleotide
acucacaaguacccaagca

SEQ ID NO: 2190007 - RNA, 19 nt, Artificial Sequence
  Description of Artificial Sequence: Synthetic oligonucleotide
auggguugggcagauuugg

SEQ ID NO: 2190008 - RNA, 19 nt, Artificial Sequence
  Description of Artificial Sequence: Synthetic oligonucleotide
uaaacuaggugguuuccuu

SEQ ID NO: 2190009 - RNA, 19 nt, Artificial Sequence
  Description of Artificial Sequence: Synthetic oligonucleotide
agcuggauuaaacgucaag

SEQ ID NO: 2190010 - RNA, 19 nt, Artificial Sequence
  Description of Artificial Sequence: Synthetic oligonucleotide
gugacgaccacugagguaa

SEQ ID NO: 2190011 - RNA, 19 nt, Artificial Sequence
  Description of Artificial Sequence: Synthetic oligonucleotide
acuauagaugcgggcaagg

SEQ ID NO: 2190012 - RNA, 19 nt, Artificial Sequence
  Description of Artificial Sequence: Synthetic oligonucleotide
ugaaaguaugggugacuca

SEQ ID NO: 2190013 - RNA, 19 nt, Artificial Sequence
  Description of Artificial Sequence: Synthetic oligonucleotide
aagccugccugggaagggc

SEQ ID NO: 2190014 - RNA, 19 nt, Artificial Sequence
  Description of Artificial Sequence: Synthetic oligonucleotide
gacacuccaaagguccacg

SEQ ID NO: 2190015 - RNA, 19 nt, Artificial Sequence
  Description of Artificial Sequence: Synthetic oligonucleotide
acgaccacugagguaaggg

SEQ ID NO: 2190016 - RNA, 19 nt, Artificial Sequence
  Description of Artificial Sequence: Synthetic oligonucleotide
gauuacauccuaacccgac

SEQ ID NO: 2190017 - RNA, 19 nt, Artificial Sequence
  Description of Artificial Sequence: Synthetic oligonucleotide
cuuuguaccucuccagguc

SEQ ID NO: 2190018 - RNA, 19 nt, Artificial Sequence
  Description of Artificial Sequence: Synthetic oligonucleotide
caugaaaagccugccuggg

SEQ ID NO: 2190019 - RNA, 19 nt, Artificial Sequence
  Description of Artificial Sequence: Synthetic oligonucleotide
uaugggugacucagggcgc

SEQ ID NO: 2190020 - RNA, 19 nt, Artificial Sequence
  Description of Artificial Sequence: Synthetic oligonucleotide
acauccuaacccgacuggg

SEQ ID NO: 2190021 - RNA, 19 nt, Artificial Sequence
  Description of Artificial Sequence: Synthetic oligonucleotide
cagugugacgaccacugag

SEQ ID NO: 2190022 - RNA, 19 nt, Artificial Sequence
  Description of Artificial Sequence: Synthetic oligonucleotide
auugauuucucaacaguaa

SEQ ID NO: 2190023 - RNA, 19 nt, Artificial Sequence
  Description of Artificial Sequence: Synthetic oligonucleotide
guguucagcucugaggugc

SEQ ID NO: 2190024 - RNA, 19 nt, Artificial Sequence
  Description of Artificial Sequence: Synthetic oligonucleotide
ugcagagauuacauccuaa

SEQ ID NO: 2190025 - RNA, 19 nt, Artificial Sequence
  Description of Artificial Sequence: Synthetic oligonucleotide
caguaaacuaggugguuuc

SEQ ID NO: 2190026 - RNA, 19 nt, Artificial Sequence
  Description of Artificial Sequence: Synthetic oligonucleotide
ugacucagggcgccauagg

SEQ ID NO: 2190027 - RNA, 19 nt, Artificial Sequence
  Description of Artificial Sequence: Synthetic oligonucleotide
ucucaacaguaaacuaggu

SEQ ID NO: 2190028 - RNA, 19 nt, Artificial Sequence
  Description of Artificial Sequence: Synthetic oligonucleotide
gcaugaaaagccugccugg

SEQ ID NO: 2190029 - RNA, 19 nt, Artificial Sequence
  Description of Artificial Sequence: Synthetic oligonucleotide
cauccuaacccgacugggc

SEQ ID NO: 2190030 - RNA, 19 nt, Artificial Sequence
  Description of Artificial Sequence: Synthetic oligonucleotide
uuuaggucacgaugcacua

SEQ ID NO: 2190031 - RNA, 19 nt, Artificial Sequence
  Description of Artificial Sequence: Synthetic oligonucleotide
cugaaaguaugggugacuc

SEQ ID NO: 2190032 - RNA, 19 nt, Artificial Sequence
  Description of Artificial Sequence: Synthetic oligonucleotide
uuugccuaguucgucaaua

SEQ ID NO: 2190033 - RNA, 19 nt, Artificial Sequence
  Description of Artificial Sequence: Synthetic oligonucleotide
uccacgucugaacuuccac

SEQ ID NO: 2190034 - RNA, 19 nt, Artificial Sequence
  Description of Artificial Sequence: Synthetic oligonucleotide
cuuuaggucacgaugcacu

SEQ ID NO: 2190035 - RNA, 19 nt, Artificial Sequence
  Description of Artificial Sequence: Synthetic oligonucleotide
ugauuuguccgcugcuggu

SEQ ID NO: 2190036 - RNA, 19 nt, Artificial Sequence
  Description of Artificial Sequence: Synthetic oligonucleotide
cuggagcaagacuucuggg

SEQ ID NO: 2190037 - RNA, 19 nt, Artificial Sequence
  Description of Artificial Sequence: Synthetic oligonucleotide
aaggaaauggcagcacaau

SEQ ID NO: 2190038 - RNA, 19 nt, Artificial Sequence
  Description of Artificial Sequence: Synthetic oligonucleotide
gguaagggccauuugaaaa

SEQ ID NO: 2190039 - RNA, 19 nt, Artificial Sequence
  Description of Artificial Sequence: Synthetic oligonucleotide
cauguuuagaugaccagcu

SEQ ID NO: 2190040 - RNA, 19 nt, Artificial Sequence
  Description of Artificial Sequence: Synthetic oligonucleotide
aaucggucagcagcuucuc

SEQ ID NO: 2190041 - RNA, 19 nt, Artificial Sequence
  Description of Artificial Sequence: Synthetic oligonucleotide
gaugcgggcaaggccaaag

SEQ ID NO: 2190042 - RNA, 19 nt, Artificial Sequence
  Description of Artificial Sequence: Synthetic oligonucleotide
uuuagaugaccagcucaug

SEQ ID NO: 2190043 - RNA, 19 nt, Artificial Sequence
  Description of Artificial Sequence: Synthetic oligonucleotide
uaggggucuugucagccac

SEQ ID NO: 2190044 - RNA, 19 nt, Artificial Sequence
  Description of Artificial Sequence: Synthetic oligonucleotide
uuccagguucuugaaacac

SEQ ID NO: 2190045 - RNA, 19 nt, Artificial Sequence
  Description of Artificial Sequence: Synthetic oligonucleotide
ugcaaggcucucguagggg

SEQ ID NO: 2190046 - RNA, 19 nt, Artificial Sequence
  Description of Artificial Sequence: Synthetic oligonucleotide
ggugagaugaaggagucca

SEQ ID NO: 2190047 - RNA, 19 nt, Artificial Sequence
  Description of Artificial Sequence: Synthetic oligonucleotide
cacuccaaagguccacggg

SEQ ID NO: 2190048 - RNA, 19 nt, Artificial Sequence
  Description of Artificial Sequence: Synthetic oligonucleotide
ugcacuacgcggugagaug

SEQ ID NO: 2190049 - RNA, 19 nt, Artificial Sequence
  Description of Artificial Sequence: Synthetic oligonucleotide
gaguccagaccucggagca

SEQ ID NO: 2190050 - RNA, 19 nt, Artificial Sequence
  Description of Artificial Sequence: Synthetic oligonucleotide
aacuuccacgaaacagagg

SEQ ID NO: 2190051 - RNA, 19 nt, Artificial Sequence
  Description of Artificial Sequence: Synthetic oligonucleotide
uggcaugaaaagccugccu

SEQ ID NO: 2190052 - RNA, 19 nt, Artificial Sequence
  Description of Artificial Sequence: Synthetic oligonucleotide
gcagagauuacauccuaac

SEQ ID NO: 2190053 - RNA, 19 nt, Artificial Sequence
  Description of Artificial Sequence: Synthetic oligonucleotide
cugcaaauauacagccgac

SEQ ID NO: 2190054 - RNA, 19 nt, Artificial Sequence
  Description of Artificial Sequence: Synthetic oligonucleotide
auucaagguuagaaaagga

SEQ ID NO: 2190055 - RNA, 19 nt, Artificial Sequence
  Description of Artificial Sequence: Synthetic oligonucleotide
guugauccacgucugaacu

SEQ ID NO: 2190056 - RNA, 19 nt, Artificial Sequence
  Description of Artificial Sequence: Synthetic oligonucleotide
gucugaacuuccacgaaac

SEQ ID NO: 2190057 - RNA, 19 nt, Artificial Sequence
  Description of Artificial Sequence: Synthetic oligonucleotide
cacgucugaacuuccacga

SEQ ID NO: 2190058 - RNA, 19 nt, Artificial Sequence
  Description of Artificial Sequence: Synthetic oligonucleotide
guugggcagauuuggcaug

SEQ ID NO: 2190059 - RNA, 19 nt, Artificial Sequence
  Description of Artificial Sequence: Synthetic oligonucleotide
aaacgaacauaaagcugca

SEQ ID NO: 2190060 - RNA, 19 nt, Artificial Sequence
  Description of Artificial Sequence: Synthetic oligonucleotide
cuguguucagcucugaggu

SEQ ID NO: 2190061 - RNA, 19 nt, Artificial Sequence
  Description of Artificial Sequence: Synthetic oligonucleotide
uuccacgaaacagaggcuu

SEQ ID NO: 2190062 - RNA, 19 nt, Artificial Sequence
  Description of Artificial Sequence: Synthetic oligonucleotide
ucuuugccuaguucgucaa

SEQ ID NO: 2190063 - RNA, 19 nt, Artificial Sequence
  Description of Artificial Sequence: Synthetic oligonucleotide
augaaaagccugccuggga

SEQ ID NO: 2190064 - RNA, 19 nt, Artificial Sequence
  Description of Artificial Sequence: Synthetic oligonucleotide
ucagccaguuugauuuguc

SEQ ID NO: 2190065 - RNA, 19 nt, Artificial Sequence
  Description of Artificial Sequence: Synthetic oligonucleotide
ugccuaguucgucaauauc

SEQ ID NO: 2190066 - RNA, 19 nt, Artificial Sequence
  Description of Artificial Sequence: Synthetic oligonucleotide
acacucacaaguacccaag

SEQ ID NO: 2190067 - RNA, 19 nt, Artificial Sequence
  Description of Artificial Sequence: Synthetic oligonucleotide
cacucacaaguacccaagc

SEQ ID NO: 2190068 - RNA, 19 nt, Artificial Sequence
  Description of Artificial Sequence: Synthetic oligonucleotide
uguggcuuuaggucacgau

SEQ ID NO: 2190069 - RNA, 19 nt, Artificial Sequence
  Description of Artificial Sequence: Synthetic oligonucleotide
guucgucaauaucugucac

SEQ ID NO: 2190070 - RNA, 19 nt, Artificial Sequence
  Description of Artificial Sequence: Synthetic oligonucleotide
ucacucuugcauugauuuc

SEQ ID NO: 2190071 - RNA, 19 nt, Artificial Sequence
  Description of Artificial Sequence: Synthetic oligonucleotide
cugcaaggcucucguaggg

SEQ ID NO: 2190072 - RNA, 19 nt, Artificial Sequence
  Description of Artificial Sequence: Synthetic oligonucleotide
uucagcucugaggugcucu

SEQ ID NO: 2190073 - RNA, 19 nt, Artificial Sequence
  Description of Artificial Sequence: Synthetic oligonucleotide
ggucacgaugcacuacgcg

SEQ ID NO: 2190074 - RNA, 19 nt, Artificial Sequence
  Description of Artificial Sequence: Synthetic oligonucleotide
auaggcagauauucuuuua

SEQ ID NO: 2190075 - RNA, 19 nt, Artificial Sequence
  Description of Artificial Sequence: Synthetic oligonucleotide
guagcuggacuggagcaag

SEQ ID NO: 2190076 - RNA, 19 nt, Artificial Sequence
  Description of Artificial Sequence: Synthetic oligonucleotide
gaaccucaggcuguguuca

SEQ ID NO: 2190077 - RNA, 19 nt, Artificial Sequence
  Description of Artificial Sequence: Synthetic oligonucleotide
guccugaaaguauggguga

SEQ ID NO: 2190078 - RNA, 19 nt, Artificial Sequence
  Description of Artificial Sequence: Synthetic oligonucleotide
aaauggcagcacaaucggu

SEQ ID NO: 2190079 - RNA, 19 nt, Artificial Sequence
  Description of Artificial Sequence: Synthetic oligonucleotide
accucaggcuguguucagc

SEQ ID NO: 2190080 - RNA, 19 nt, Artificial Sequence
  Description of Artificial Sequence: Synthetic oligonucleotide
agguaagggccauuugaaa

SEQ ID NO: 2190081 - RNA, 19 nt, Artificial Sequence
  Description of Artificial Sequence: Synthetic oligonucleotide
ccuaguucgucaauaucug

SEQ ID NO: 2190082 - RNA, 19 nt, Artificial Sequence
  Description of Artificial Sequence: Synthetic oligonucleotide
gauuaaacgucaagcauuu

SEQ ID NO: 2190083 - RNA, 19 nt, Artificial Sequence
  Description of Artificial Sequence: Synthetic oligonucleotide
uccuaacccgacugggccu

SEQ ID NO: 2190084 - RNA, 19 nt, Artificial Sequence
  Description of Artificial Sequence: Synthetic oligonucleotide
ccacgucugaacuuccacg

SEQ ID NO: 2190085 - RNA, 19 nt, Artificial Sequence
  Description of Artificial Sequence: Synthetic oligonucleotide
auuaaacgucaagcauuuc

SEQ ID NO: 2190086 - RNA, 19 nt, Artificial Sequence
  Description of Artificial Sequence: Synthetic oligonucleotide
acuaggugguuuccuuggu

SEQ ID NO: 2190087 - RNA, 19 nt, Artificial Sequence
  Description of Artificial Sequence: Synthetic oligonucleotide
ugaccagcucauggcaucc

SEQ ID NO: 2190088 - RNA, 19 nt, Artificial Sequence
  Description of Artificial Sequence: Synthetic oligonucleotide
ggaguccagaccucggagc

SEQ ID NO: 2190089 - RNA, 19 nt, Artificial Sequence
  Description of Artificial Sequence: Synthetic oligonucleotide
aaucacucuugcauugauu

SEQ ID NO: 2190090 - RNA, 19 nt, Artificial Sequence
  Description of Artificial Sequence: Synthetic oligonucleotide
gcagcuggaaagcccacag

SEQ ID NO: 2190091 - RNA, 19 nt, Artificial Sequence
  Description of Artificial Sequence: Synthetic oligonucleotide
ggcagauuuggcaugaaaa

SEQ ID NO: 2190092 - RNA, 19 nt, Artificial Sequence
  Description of Artificial Sequence: Synthetic oligonucleotide
auacagccgacacuccaaa

SEQ ID NO: 2190093 - RNA, 19 nt, Artificial Sequence
  Description of Artificial Sequence: Synthetic oligonucleotide
uugggcagauuuggcauga

SEQ ID NO: 2190094 - RNA, 19 nt, Artificial Sequence
  Description of Artificial Sequence: Synthetic oligonucleotide
agaucuuugccuaguucgu

SEQ ID NO: 2190095 - RNA, 19 nt, Artificial Sequence
  Description of Artificial Sequence: Synthetic oligonucleotide
agucagccaguuugauuug

SEQ ID NO: 2190096 - RNA, 19 nt, Artificial Sequence
  Description of Artificial Sequence: Synthetic oligonucleotide
gccagcaaucuucaacugc

SEQ ID NO: 2190097 - RNA, 19 nt, Artificial Sequence
  Description of Artificial Sequence: Synthetic oligonucleotide
uccugaaaguaugggugac

SEQ ID NO: 2190098 - RNA, 19 nt, Artificial Sequence
  Description of Artificial Sequence: Synthetic oligonucleotide
uugauccacgucugaacuu

SEQ ID NO: 2190099 - RNA, 19 nt, Artificial Sequence
  Description of Artificial Sequence: Synthetic oligonucleotide
ugugacgaccacugaggua

SEQ ID NO: 2190100 - RNA, 19 nt, Artificial Sequence
  Description of Artificial Sequence: Synthetic oligonucleotide
gcagagcgcaucuggaagc

SEQ ID NO: 2190101 - RNA, 19 nt, Artificial Sequence
  Description of Artificial Sequence: Synthetic oligonucleotide
uccacgaaacagaggcuuu

SEQ ID NO: 2190102 - RNA, 19 nt, Artificial Sequence
  Description of Artificial Sequence: Synthetic oligonucleotide
cuggacuggagcaagacuu

SEQ ID NO: 2190103 - RNA, 19 nt, Artificial Sequence
  Description of Artificial Sequence: Synthetic oligonucleotide
cacacucacaaguacccaa

SEQ ID NO: 2190104 - RNA, 19 nt, Artificial Sequence
  Description of Artificial Sequence: Synthetic oligonucleotide
gacuggagcaagacuucug

SEQ ID NO: 2190105 - RNA, 19 nt, Artificial Sequence
  Description of Artificial Sequence: Synthetic oligonucleotide
cagccagcaaucuucaacu

SEQ ID NO: 2190106 - RNA, 19 nt, Artificial Sequence
  Description of Artificial Sequence: Synthetic oligonucleotide
gugacucagggcgccauag

SEQ ID NO: 2190107 - RNA, 19 nt, Artificial Sequence
  Description of Artificial Sequence: Synthetic oligonucleotide
agccagcaaucuucaacug

SEQ ID NO: 2190108 - RNA, 19 nt, Artificial Sequence
  Description of Artificial Sequence: Synthetic oligonucleotide
cucccggaaguccaaucac

SEQ ID NO: 2190109 - RNA, 19 nt, Artificial Sequence
  Description of Artificial Sequence: Synthetic oligonucleotide
aacgaacauaaagcugcaa

SEQ ID NO: 2190110 - RNA, 19 nt, Artificial Sequence
  Description of Artificial Sequence: Synthetic oligonucleotide
agcugcaaucacucuugca

SEQ ID NO: 2190111 - RNA, 19 nt, Artificial Sequence
  Description of Artificial Sequence: Synthetic oligonucleotide
augcacuacgcggugagau

SEQ ID NO: 2190112 - RNA, 19 nt, Artificial Sequence
  Description of Artificial Sequence: Synthetic oligonucleotide
gccgacacuccaaaggucc

SEQ ID NO: 2190113 - RNA, 19 nt, Artificial Sequence
  Description of Artificial Sequence: Synthetic oligonucleotide
acccgacugggccuggaug

SEQ ID NO: 2190114 - RNA, 19 nt, Artificial Sequence
  Description of Artificial Sequence: Synthetic oligonucleotide
uucucccggaaguccaauc

SEQ ID NO: 2190115 - RNA, 19 nt, Artificial Sequence
  Description of Artificial Sequence: Synthetic oligonucleotide
uggugaagcagagcgcauc

SEQ ID NO: 2190116 - RNA, 19 nt, Artificial Sequence
  Description of Artificial Sequence: Synthetic oligonucleotide
agcgcaucuggaagccagc

SEQ ID NO: 2190117 - RNA, 19 nt, Artificial Sequence
  Description of Artificial Sequence: Synthetic oligonucleotide
ucguaggggucuugucagc

SEQ ID NO: 2190118 - RNA, 19 nt, Artificial Sequence
  Description of Artificial Sequence: Synthetic oligonucleotide
aggucacgaugcacuacgc

SEQ ID NO: 2190119 - RNA, 19 nt, Artificial Sequence
  Description of Artificial Sequence: Synthetic oligonucleotide
acuacgcggugagaugaag

SEQ ID NO: 2190120 - RNA, 19 nt, Artificial Sequence
  Description of Artificial Sequence: Synthetic oligonucleotide
ccuaguugauccacgucug

SEQ ID NO: 2190121 - RNA, 19 nt, Artificial Sequence
  Description of Artificial Sequence: Synthetic oligonucleotide
agauuacauccuaacccga

SEQ ID NO: 2190122 - RNA, 19 nt, Artificial Sequence
  Description of Artificial Sequence: Synthetic oligonucleotide
uuuguccgcugcuggucac

SEQ ID NO: 2190123 - RNA, 19 nt, Artificial Sequence
  Description of Artificial Sequence: Synthetic oligonucleotide
cgaaacagaggcuuucuuc

SEQ ID NO: 2190124 - RNA, 19 nt, Artificial Sequence
  Description of Artificial Sequence: Synthetic oligonucleotide
ggaaccucaggcuguguuc

SEQ ID NO: 2190125 - RNA, 19 nt, Artificial Sequence
  Description of Artificial Sequence: Synthetic oligonucleotide
gacgaccacugagguaagg

SEQ ID NO: 2190126 - RNA, 19 nt, Artificial Sequence
  Description of Artificial Sequence: Synthetic oligonucleotide
acgaaacagaggcuuucuu

SEQ ID NO: 2190127 - RNA, 19 nt, Artificial Sequence
  Description of Artificial Sequence: Synthetic oligonucleotide
caguuugauuuguccgcug

SEQ ID NO: 2190128 - RNA, 19 nt, Artificial Sequence
  Description of Artificial Sequence: Synthetic oligonucleotide
ugacgaccacugagguaag

SEQ ID NO: 2190129 - RNA, 19 nt, Artificial Sequence
  Description of Artificial Sequence: Synthetic oligonucleotide
cugagguaagggccauuug

SEQ ID NO: 2190130 - RNA, 19 nt, Artificial Sequence
  Description of Artificial Sequence: Synthetic oligonucleotide
acagugugacgaccacuga

SEQ ID NO: 2190131 - RNA, 19 nt, Artificial Sequence
  Description of Artificial Sequence: Synthetic oligonucleotide
guuuagaugaccagcucau

SEQ ID NO: 2190132 - RNA, 19 nt, Artificial Sequence
  Description of Artificial Sequence: Synthetic oligonucleotide
uaccucuccagguccugaa

SEQ ID NO: 2190133 - RNA, 19 nt, Artificial Sequence
  Description of Artificial Sequence: Synthetic oligonucleotide
caaggcucucguagggguc

SEQ ID NO: 2190134 - RNA, 19 nt, Artificial Sequence
  Description of Artificial Sequence: Synthetic oligonucleotide
uguaccucuccagguccug

SEQ ID NO: 2190135 - RNA, 19 nt, Artificial Sequence
  Description of Artificial Sequence: Synthetic oligonucleotide
agggccauuugaaaacuau

SEQ ID NO: 2190136 - RNA, 19 nt, Artificial Sequence
  Description of Artificial Sequence: Synthetic oligonucleotide
ccagguccugaaaguaugg

SEQ ID NO: 2190137 - RNA, 19 nt, Artificial Sequence
  Description of Artificial Sequence: Synthetic oligonucleotide
gguuuccuuggugaagcag

SEQ ID NO: 2190138 - RNA, 19 nt, Artificial Sequence
  Description of Artificial Sequence: Synthetic oligonucleotide
augcgggcaaggccaaagu

SEQ ID NO: 2190139 - RNA, 19 nt, Artificial Sequence
  Description of Artificial Sequence: Synthetic oligonucleotide
acgcggugagaugaaggag

SEQ ID NO: 2190140 - RNA, 19 nt, Artificial Sequence
  Description of Artificial Sequence: Synthetic oligonucleotide
uagcuggauuaaacgucaa

SEQ ID NO: 2190141 - RNA, 19 nt, Artificial Sequence
  Description of Artificial Sequence: Synthetic oligonucleotide
gccuggaugaccauccaac

SEQ ID NO: 2190142 - RNA, 19 nt, Artificial Sequence
  Description of Artificial Sequence: Synthetic oligonucleotide
caagacuucuggggcucgg

SEQ ID NO: 2190143 - RNA, 19 nt, Artificial Sequence
  Description of Artificial Sequence: Synthetic oligonucleotide
agccugccugggaagggcc

SEQ ID NO: 2190144 - RNA, 19 nt, Artificial Sequence
  Description of Artificial Sequence: Synthetic oligonucleotide
aacccgacugggccuggau

SEQ ID NO: 2190145 - RNA, 19 nt, Artificial Sequence
  Description of Artificial Sequence: Synthetic oligonucleotide
cacgaugcacuacgcggug

SEQ ID NO: 2190146 - RNA, 19 nt, Artificial Sequence
  Description of Artificial Sequence: Synthetic oligonucleotide
ggauuaaacgucaagcauu

SEQ ID NO: 2190147 - RNA, 19 nt, Artificial Sequence
  Description of Artificial Sequence: Synthetic oligonucleotide
uagaugcgggcaaggccaa

SEQ ID NO: 2190148 - RNA, 19 nt, Artificial Sequence
  Description of Artificial Sequence: Synthetic oligonucleotide
guaggggucuugucagcca

SEQ ID NO: 2190149 - RNA, 19 nt, Artificial Sequence
  Description of Artificial Sequence: Synthetic oligonucleotide
cagcaaucuucaacugcuc

SEQ ID NO: 2190150 - RNA, 19 nt, Artificial Sequence
  Description of Artificial Sequence: Synthetic oligonucleotide
caaucggucagcagcuucu

SEQ ID NO: 2190151 - RNA, 19 nt, Artificial Sequence
  Description of Artificial Sequence: Synthetic oligonucleotide
cugcuggucaccagaaugu

SEQ ID NO: 2190152 - RNA, 19 nt, Artificial Sequence
  Description of Artificial Sequence: Synthetic oligonucleotide
agccgacacuccaaagguc

SEQ ID NO: 2190153 - RNA, 19 nt, Artificial Sequence
  Description of Artificial Sequence: Synthetic oligonucleotide
gguggcguagcuggacugg

SEQ ID NO: 2190154 - RNA, 19 nt, Artificial Sequence
  Description of Artificial Sequence: Synthetic oligonucleotide
uguccgcugcuggucacca

SEQ ID NO: 2190155 - RNA, 19 nt, Artificial Sequence
  Description of Artificial Sequence: Synthetic oligonucleotide
guaaacuaggugguuuccu

SEQ ID NO: 2190156 - RNA, 19 nt, Artificial Sequence
  Description of Artificial Sequence: Synthetic oligonucleotide
acgucugaacuuccacgaa

SEQ ID NO: 2190157 - RNA, 19 nt, Artificial Sequence
  Description of Artificial Sequence: Synthetic oligonucleotide
cucucguaggggucuuguc

SEQ ID NO: 2190158 - RNA, 19 nt, Artificial Sequence
  Description of Artificial Sequence: Synthetic oligonucleotide
cugucacgaacuucucgga

SEQ ID NO: 2190159 - RNA, 19 nt, Artificial Sequence
  Description of Artificial Sequence: Synthetic oligonucleotide
uggggaaccucaggcugug

SEQ ID NO: 2190160 - RNA, 19 nt, Artificial Sequence
  Description of Artificial Sequence: Synthetic oligonucleotide
caacauuggcagcauucaa

SEQ ID NO: 2190161 - RNA, 19 nt, Artificial Sequence
  Description of Artificial Sequence: Synthetic oligonucleotide
cuggaugacaggugggagu

SEQ ID NO: 2190162 - RNA, 19 nt, Artificial Sequence
  Description of Artificial Sequence: Synthetic oligonucleotide
aguacccaagcaggcccag

SEQ ID NO: 2190163 - RNA, 19 nt, Artificial Sequence
  Description of Artificial Sequence: Synthetic oligonucleotide
cucaggcuguguucagcuc

SEQ ID NO: 2190164 - RNA, 19 nt, Artificial Sequence
  Description of Artificial Sequence: Synthetic oligonucleotide
cuaguucgucaauaucugu

SEQ ID NO: 2190165 - RNA, 19 nt, Artificial Sequence
  Description of Artificial Sequence: Synthetic oligonucleotide
cuucucggauggguugggc

SEQ ID NO: 2190166 - RNA, 19 nt, Artificial Sequence
  Description of Artificial Sequence: Synthetic oligonucleotide
ccagcaaucuucaacugcu

SEQ ID NO: 2190167 - RNA, 19 nt, Artificial Sequence
  Description of Artificial Sequence: Synthetic oligonucleotide
gcgccauaggcagauauuc

SEQ ID NO: 2190168 - RNA, 19 nt, Artificial Sequence
  Description of Artificial Sequence: Synthetic oligonucleotide
aagggccauuugaaaacua

SEQ ID NO: 2190169 - RNA, 19 nt, Artificial Sequence
  Description of Artificial Sequence: Synthetic oligonucleotide
ggaaguccaaucacaucca

SEQ ID NO: 2190170 - RNA, 19 nt, Artificial Sequence
  Description of Artificial Sequence: Synthetic oligonucleotide
ggugaagcagagcgcaucu

SEQ ID NO: 2190171 - RNA, 19 nt, Artificial Sequence
  Description of Artificial Sequence: Synthetic oligonucleotide
cagccgacacuccaaaggu

SEQ ID NO: 2190172 - RNA, 19 nt, Artificial Sequence
  Description of Artificial Sequence: Synthetic oligonucleotide
ccauccaacauuggcagca

SEQ ID NO: 2190173 - RNA, 19 nt, Artificial Sequence
  Description of Artificial Sequence: Synthetic oligonucleotide
gaugaccagcucauggcau

SEQ ID NO: 2190174 - RNA, 19 nt, Artificial Sequence
  Description of Artificial Sequence: Synthetic oligonucleotide
gugugacgaccacugaggu

SEQ ID NO: 2190175 - RNA, 19 nt, Artificial Sequence
  Description of Artificial Sequence: Synthetic oligonucleotide
ggauggguugggcagauuu

SEQ ID NO: 2190176 - RNA, 19 nt, Artificial Sequence
  Description of Artificial Sequence: Synthetic oligonucleotide
gcacuacgcggugagauga

SEQ ID NO: 2190177 - RNA, 19 nt, Artificial Sequence
  Description of Artificial Sequence: Synthetic oligonucleotide
ccuggaugaccauccaaca

SEQ ID NO: 2190178 - RNA, 19 nt, Artificial Sequence
  Description of Artificial Sequence: Synthetic oligonucleotide
cacgaacuucucggauggg

SEQ ID NO: 2190179 - RNA, 19 nt, Artificial Sequence
  Description of Artificial Sequence: Synthetic oligonucleotide
acgaugcacuacgcgguga

SEQ ID NO: 2190180 - RNA, 19 nt, Artificial Sequence
  Description of Artificial Sequence: Synthetic oligonucleotide
cugcagagauuacauccua

SEQ ID NO: 2190181 - RNA, 19 nt, Artificial Sequence
  Description of Artificial Sequence: Synthetic oligonucleotide
cuggaugaccauccaacau

SEQ ID NO: 2190182 - RNA, 19 nt, Artificial Sequence
  Description of Artificial Sequence: Synthetic oligonucleotide
cauuggcagcauucaaggu

SEQ ID NO: 2190183 - RNA, 19 nt, Artificial Sequence
  Description of Artificial Sequence: Synthetic oligonucleotide
gccaccauguuuagaugac

SEQ ID NO: 2190184 - RNA, 19 nt, Artificial Sequence
  Description of Artificial Sequence: Synthetic oligonucleotide
auccacgucugaacuucca

SEQ ID NO: 2190185 - RNA, 19 nt, Artificial Sequence
  Description of Artificial Sequence: Synthetic oligonucleotide
ucggauggguugggcagau

SEQ ID NO: 2190186 - RNA, 19 nt, Artificial Sequence
  Description of Artificial Sequence: Synthetic oligonucleotide
cuuccacgaaacagaggcu

SEQ ID NO: 2190187 - RNA, 19 nt, Artificial Sequence
  Description of Artificial Sequence: Synthetic oligonucleotide
guacccaagcaggcccagc

SEQ ID NO: 2190188 - RNA, 19 nt, Artificial Sequence
  Description of Artificial Sequence: Synthetic oligonucleotide
gcuggaaagcccacagcca

SEQ ID NO: 2190189 - RNA, 19 nt, Artificial Sequence
  Description of Artificial Sequence: Synthetic oligonucleotide
cccgacugggccuggauga

SEQ ID NO: 2190190 - RNA, 19 nt, Artificial Sequence
  Description of Artificial Sequence: Synthetic oligonucleotide
agagcgcaucuggaagcca

SEQ ID NO: 2190191 - RNA, 19 nt, Artificial Sequence
  Description of Artificial Sequence: Synthetic oligonucleotide
cgaugcacuacgcggugag

SEQ ID NO: 2190192 - RNA, 19 nt, Artificial Sequence
  Description of Artificial Sequence: Synthetic oligonucleotide
caauaucugucacgaacuu

SEQ ID NO: 2190193 - RNA, 19 nt, Artificial Sequence
  Description of Artificial Sequence: Synthetic oligonucleotide
gccauaggcagauauucuu

SEQ ID NO: 2190194 - RNA, 19 nt, Artificial Sequence
  Description of Artificial Sequence: Synthetic oligonucleotide
cuaacccgacugggccugg

SEQ ID NO: 2190195 - RNA, 19 nt, Artificial Sequence
  Description of Artificial Sequence: Synthetic oligonucleotide
gggcagauuuggcaugaaa

SEQ ID NO: 2190196 - RNA, 19 nt, Artificial Sequence
  Description of Artificial Sequence: Synthetic oligonucleotide
gcaagacuucuggggcucg

SEQ ID NO: 2190197 - RNA, 19 nt, Artificial Sequence
  Description of Artificial Sequence: Synthetic oligonucleotide
gcaaucacucuugcauuga

SEQ ID NO: 2190198 - RNA, 19 nt, Artificial Sequence
  Description of Artificial Sequence: Synthetic oligonucleotide
cguaggggucuugucagcc

SEQ ID NO: 2190199 - RNA, 19 nt, Artificial Sequence
  Description of Artificial Sequence: Synthetic oligonucleotide
cgucaagcauuucagaagu

SEQ ID NO: 2190200 - RNA, 19 nt, Artificial Sequence
  Description of Artificial Sequence: Synthetic oligonucleotide
uaacccgacugggccugga

SEQ ID NO: 2190201 - RNA, 19 nt, Artificial Sequence
  Description of Artificial Sequence: Synthetic oligonucleotide
cuggggaaccucaggcugu

SEQ ID NO: 2190202 - RNA, 19 nt, Artificial Sequence
  Description of Artificial Sequence: Synthetic oligonucleotide
ugggugacucagggcgcca

SEQ ID NO: 2190203 - RNA, 19 nt, Artificial Sequence
  Description of Artificial Sequence: Synthetic oligonucleotide
ccggaaguccaaucacauc

SEQ ID NO: 2190204 - RNA, 19 nt, Artificial Sequence
  Description of Artificial Sequence: Synthetic oligonucleotide
ggaagccagcagcuggaaa

SEQ ID NO: 2190205 - RNA, 19 nt, Artificial Sequence
  Description of Artificial Sequence: Synthetic oligonucleotide
cucggauggguugggcaga

SEQ ID NO: 2190206 - RNA, 19 nt, Artificial Sequence
  Description of Artificial Sequence: Synthetic oligonucleotide
gggccauuugaaaacuaua

SEQ ID NO: 2190207 - RNA, 19 nt, Artificial Sequence
  Description of Artificial Sequence: Synthetic oligonucleotide
aggugggagugcaggcugu

SEQ ID NO: 2190208 - RNA, 19 nt, Artificial Sequence
  Description of Artificial Sequence: Synthetic oligonucleotide
gucaagcauuucagaagua

SEQ ID NO: 2190209 - RNA, 19 nt, Artificial Sequence
  Description of Artificial Sequence: Synthetic oligonucleotide
cacgaaacagaggcuuucu

SEQ ID NO: 2190210 - RNA, 19 nt, Artificial Sequence
  Description of Artificial Sequence: Synthetic oligonucleotide
ccacgaaacagaggcuuuc

SEQ ID NO: 2190211 - RNA, 19 nt, Artificial Sequence
  Description of Artificial Sequence: Synthetic oligonucleotide
cacuacgcggugagaugaa

SEQ ID NO: 2190212 - RNA, 19 nt, Artificial Sequence
  Description of Artificial Sequence: Synthetic oligonucleotide
ggaugacaggugggagugc

SEQ ID NO: 2190213 - RNA, 19 nt, Artificial Sequence
  Description of Artificial Sequence: Synthetic oligonucleotide
gcacaaucggucagcagcu

SEQ ID NO: 2190214 - RNA, 19 nt, Artificial Sequence
  Description of Artificial Sequence: Synthetic oligonucleotide
ggccuggaugaccauccaa

SEQ ID NO: 2190215 - RNA, 19 nt, Artificial Sequence
  Description of Artificial Sequence: Synthetic oligonucleotide
cuguggcuuuaggucacga

SEQ ID NO: 2190216 - RNA, 19 nt, Artificial Sequence
  Description of Artificial Sequence: Synthetic oligonucleotide
aggcuguguucagcucuga

SEQ ID NO: 2190217 - RNA, 19 nt, Artificial Sequence
  Description of Artificial Sequence: Synthetic oligonucleotide
cuuugccuaguucgucaau

SEQ ID NO: 2190218 - RNA, 19 nt, Artificial Sequence
  Description of Artificial Sequence: Synthetic oligonucleotide
ggugacucagggcgccaua

SEQ ID NO: 2190219 - RNA, 19 nt, Artificial Sequence
  Description of Artificial Sequence: Synthetic oligonucleotide
gggcgccauaggcagauau

SEQ ID NO: 2190220 - RNA, 19 nt, Artificial Sequence
  Description of Artificial Sequence: Synthetic oligonucleotide
gggguggcguagcuggacu

SEQ ID NO: 2190221 - RNA, 19 nt, Artificial Sequence
  Description of Artificial Sequence: Synthetic oligonucleotide
ccgacacuccaaaggucca

SEQ ID NO: 2190222 - RNA, 19 nt, Artificial Sequence
  Description of Artificial Sequence: Synthetic oligonucleotide
gcgcaucuggaagccagca

SEQ ID NO: 2190223 - RNA, 19 nt, Artificial Sequence
  Description of Artificial Sequence: Synthetic oligonucleotide
cugccugggaagggccaca

SEQ ID NO: 2190224 - RNA, 19 nt, Artificial Sequence
  Description of Artificial Sequence: Synthetic oligonucleotide
gggagugcaggcugucuuu

SEQ ID NO: 2190225 - RNA, 19 nt, Artificial Sequence
  Description of Artificial Sequence: Synthetic oligonucleotide
cccggaaguccaaucacau

SEQ ID NO: 2190226 - RNA, 19 nt, Artificial Sequence
  Description of Artificial Sequence: Synthetic oligonucleotide
ccaguuugauuuguccgcu

SEQ ID NO: 2190227 - RNA, 19 nt, Artificial Sequence
  Description of Artificial Sequence: Synthetic oligonucleotide
cggugagaugaaggagucc

SEQ ID NO: 2190228 - RNA, 19 nt, Artificial Sequence
  Description of Artificial Sequence: Synthetic oligonucleotide
cagggcgccauaggcagau

SEQ ID NO: 2190229 - RNA, 19 nt, Artificial Sequence
  Description of Artificial Sequence: Synthetic oligonucleotide
ccugaaaguaugggugacu

SEQ ID NO: 2190230 - RNA, 19 nt, Artificial Sequence
  Description of Artificial Sequence: Synthetic oligonucleotide
ggcaucccuggggaaccuc

SEQ ID NO: 2190231 - RNA, 19 nt, Artificial Sequence
  Description of Artificial Sequence: Synthetic oligonucleotide
gcucucguaggggucuugu

SEQ ID NO: 2190232 - RNA, 19 nt, Artificial Sequence
  Description of Artificial Sequence: Synthetic oligonucleotide
ccgacugggccuggaugac

SEQ ID NO: 2190233 - RNA, 19 nt, Artificial Sequence
  Description of Artificial Sequence: Synthetic oligonucleotide
cguagcuggacuggagcaa

SEQ ID NO: 2190234 - RNA, 19 nt, Artificial Sequence
  Description of Artificial Sequence: Synthetic oligonucleotide
ggcgccauaggcagauauu

SEQ ID NO: 2190235 - RNA, 19 nt, Artificial Sequence
  Description of Artificial Sequence: Synthetic oligonucleotide
cgccauaggcagauauucu

SEQ ID NO: 2190236 - RNA, 19 nt, Artificial Sequence
  Description of Artificial Sequence: Synthetic oligonucleotide
ccacagugugacgaccacu

SEQ ID NO: 2190237 - RNA, 19 nt, Artificial Sequence
  Description of Artificial Sequence: Synthetic oligonucleotide
agggcgccauaggcagaua

SEQ ID NO: 2190238 - RNA, 19 nt, Artificial Sequence
  Description of Artificial Sequence: Synthetic oligonucleotide
cacaaucggucagcagcuu

SEQ ID NO: 2190239 - RNA, 19 nt, Artificial Sequence
  Description of Artificial Sequence: Synthetic oligonucleotide
gggucuugucagccaccau

SEQ ID NO: 2190240 - RNA, 19 nt, Artificial Sequence
  Description of Artificial Sequence: Synthetic oligonucleotide
gggugacucagggcgccau

SEQ ID NO: 2190241 - RNA, 19 nt, Artificial Sequence
  Description of Artificial Sequence: Synthetic oligonucleotide
ggggaaccucaggcugugu

SEQ ID NO: 2190242 - RNA, 19 nt, Artificial Sequence
  Description of Artificial Sequence: Synthetic oligonucleotide
cggauggguugggcagauu

SEQ ID NO: 2190243 - RNA, 19 nt, Artificial Sequence
  Description of Artificial Sequence: Synthetic oligonucleotide
aauaaauuaggacuccuag

SEQ ID NO: 2190244 - RNA, 19 nt, Artificial Sequence
  Description of Artificial Sequence: Synthetic oligonucleotide
auacacuuaaaacacaaac

SEQ ID NO: 2190245 - RNA, 19 nt, Artificial Sequence
  Description of Artificial Sequence: Synthetic oligonucleotide
aauuaggacuccuaguggg

SEQ ID NO: 2190246 - RNA, 19 nt, Artificial Sequence
  Description of Artificial Sequence: Synthetic oligonucleotide
uaaauuaggacuccuagug

SEQ ID NO: 2190247 - RNA, 19 nt, Artificial Sequence
  Description of Artificial Sequence: Synthetic oligonucleotide
aaauugauggaugaacucg

SEQ ID NO: 2190248 - RNA, 19 nt, Artificial Sequence
  Description of Artificial Sequence: Synthetic oligonucleotide
acuuugcuauaacagaugc

SEQ ID NO: 2190249 - RNA, 19 nt, Artificial Sequence
  Description of Artificial Sequence: Synthetic oligonucleotide
aaagaugucgcucccagug

SEQ ID NO: 2190250 - RNA, 19 nt, Artificial Sequence
  Description of Artificial Sequence: Synthetic oligonucleotide
uaaguuuacgcaauuuucc

SEQ ID NO: 2190251 - RNA, 19 nt, Artificial Sequence
  Description of Artificial Sequence: Synthetic oligonucleotide
aacacgaugcaacaacuuc

SEQ ID NO: 2190252 - RNA, 19 nt, Artificial Sequence
  Description of Artificial Sequence: Synthetic oligonucleotide
uggagaagaaacaauacac

SEQ ID NO: 2190253 - RNA, 19 nt, Artificial Sequence
  Description of Artificial Sequence: Synthetic oligonucleotide
uuauuaaagaugucgcucc

SEQ ID NO: 2190254 - RNA, 19 nt, Artificial Sequence
  Description of Artificial Sequence: Synthetic oligonucleotide
uucuuauuaaagaugucgc

SEQ ID NO: 2190255 - RNA, 19 nt, Artificial Sequence
  Description of Artificial Sequence: Synthetic oligonucleotide
aaauuaggacuccuagugg

SEQ ID NO: 2190256 - RNA, 19 nt, Artificial Sequence
  Description of Artificial Sequence: Synthetic oligonucleotide
aguucuuagcuucuucucc

SEQ ID NO: 2190257 - RNA, 19 nt, Artificial Sequence
  Description of Artificial Sequence: Synthetic oligonucleotide
acucguaucauccugacga

SEQ ID NO: 2190258 - RNA, 19 nt, Artificial Sequence
  Description of Artificial Sequence: Synthetic oligonucleotide
uacucauugauugugaagc

SEQ ID NO: 2190259 - RNA, 19 nt, Artificial Sequence
  Description of Artificial Sequence: Synthetic oligonucleotide
ugaucuuuggggaucaacc

SEQ ID NO: 2190260 - RNA, 19 nt, Artificial Sequence
  Description of Artificial Sequence: Synthetic oligonucleotide
ucucauguucuuauuaaag

SEQ ID NO: 2190261 - RNA, 19 nt, Artificial Sequence
  Description of Artificial Sequence: Synthetic oligonucleotide
uuggggaucaaccugauau

SEQ ID NO: 2190262 - RNA, 19 nt, Artificial Sequence
  Description of Artificial Sequence: Synthetic oligonucleotide
uacgcaauuuuccaguugc

SEQ ID NO: 2190263 - RNA, 19 nt, Artificial Sequence
  Description of Artificial Sequence: Synthetic oligonucleotide
agugucuguaaugaaaugg

SEQ ID NO: 2190264 - RNA, 19 nt, Artificial Sequence
  Description of Artificial Sequence: Synthetic oligonucleotide
uacaaacuuaccuugcagc

SEQ ID NO: 2190265 - RNA, 19 nt, Artificial Sequence
  Description of Artificial Sequence: Synthetic oligonucleotide
agaacauccaugucuccgc

SEQ ID NO: 2190266 - RNA, 19 nt, Artificial Sequence
  Description of Artificial Sequence: Synthetic oligonucleotide
aguucuacgagcaugucgg

SEQ ID NO: 2190267 - RNA, 19 nt, Artificial Sequence
  Description of Artificial Sequence: Synthetic oligonucleotide
auaucaauucuucugugug

SEQ ID NO: 2190268 - RNA, 19 nt, Artificial Sequence
  Description of Artificial Sequence: Synthetic oligonucleotide
uaucaauucuucugugugg

SEQ ID NO: 2190269 - RNA, 19 nt, Artificial Sequence
  Description of Artificial Sequence: Synthetic oligonucleotide
aguaacucgagucaggaaa

SEQ ID NO: 2190270 - RNA, 19 nt, Artificial Sequence
  Description of Artificial Sequence: Synthetic oligonucleotide
aucaaccugauaucaauuc

SEQ ID NO: 2190271 - RNA, 19 nt, Artificial Sequence
  Description of Artificial Sequence: Synthetic oligonucleotide
aagaacauccaugucuccg

SEQ ID NO: 2190272 - RNA, 19 nt, Artificial Sequence
  Description of Artificial Sequence: Synthetic oligonucleotide
uuuuguuccaacuccuggc

SEQ ID NO: 2190273 - RNA, 19 nt, Artificial Sequence
  Description of Artificial Sequence: Synthetic oligonucleotide
ucuuuucuaaguuuacgca

SEQ ID NO: 2190274 - RNA, 19 nt, Artificial Sequence
  Description of Artificial Sequence: Synthetic oligonucleotide
aaacuuaccuugcagcaga

SEQ ID NO: 2190275 - RNA, 19 nt, Artificial Sequence
  Description of Artificial Sequence: Synthetic oligonucleotide
cuugcguuugcucauggcg

SEQ ID NO: 2190276 - RNA, 19 nt, Artificial Sequence
  Description of Artificial Sequence: Synthetic oligonucleotide
acacccaugaauuuugucu

SEQ ID NO: 2190277 - RNA, 19 nt, Artificial Sequence
  Description of Artificial Sequence: Synthetic oligonucleotide
uuuacugggaagcuggcaa

SEQ ID NO: 2190278 - RNA, 19 nt, Artificial Sequence
  Description of Artificial Sequence: Synthetic oligonucleotide
gagaacaccacaguaauac

SEQ ID NO: 2190279 - RNA, 19 nt, Artificial Sequence
  Description of Artificial Sequence: Synthetic oligonucleotide
aggaaauugauggaugaac

SEQ ID NO: 2190280 - RNA, 19 nt, Artificial Sequence
  Description of Artificial Sequence: Synthetic oligonucleotide
uaauacugaucuuugggga

SEQ ID NO: 2190281 - RNA, 19 nt, Artificial Sequence
  Description of Artificial Sequence: Synthetic oligonucleotide
aaguuuacgcaauuuucca

SEQ ID NO: 2190282 - RNA, 19 nt, Artificial Sequence
  Description of Artificial Sequence: Synthetic oligonucleotide
auagcaaagguuaagaaau

SEQ ID NO: 2190283 - RNA, 19 nt, Artificial Sequence
  Description of Artificial Sequence: Synthetic oligonucleotide
aacccuuacauagcaaagg

SEQ ID NO: 2190284 - RNA, 19 nt, Artificial Sequence
  Description of Artificial Sequence: Synthetic oligonucleotide
ucuaaguuuacgcaauuuu

SEQ ID NO: 2190285 - RNA, 19 nt, Artificial Sequence
  Description of Artificial Sequence: Synthetic oligonucleotide
uaaugaaauggacuuucug

SEQ ID NO: 2190286 - RNA, 19 nt, Artificial Sequence
  Description of Artificial Sequence: Synthetic oligonucleotide
gaguucuacgagcaugucg

SEQ ID NO: 2190287 - RNA, 19 nt, Artificial Sequence
  Description of Artificial Sequence: Synthetic oligonucleotide
ucuacgagcaugucgguga

SEQ ID NO: 2190288 - RNA, 19 nt, Artificial Sequence
  Description of Artificial Sequence: Synthetic oligonucleotide
caguacaugguaagcaugg

SEQ ID NO: 2190289 - RNA, 19 nt, Artificial Sequence
  Description of Artificial Sequence: Synthetic oligonucleotide
ucuuauuaaagaugucgcu

SEQ ID NO: 2190290 - RNA, 19 nt, Artificial Sequence
  Description of Artificial Sequence: Synthetic oligonucleotide
auaaauuaggacuccuagu

SEQ ID NO: 2190291 - RNA, 19 nt, Artificial Sequence
  Description of Artificial Sequence: Synthetic oligonucleotide
agugggauaugccagggug

SEQ ID NO: 2190292 - RNA, 19 nt, Artificial Sequence
  Description of Artificial Sequence: Synthetic oligonucleotide
ugacgugaaguuugggugg

SEQ ID NO: 2190293 - RNA, 19 nt, Artificial Sequence
  Description of Artificial Sequence: Synthetic oligonucleotide
uuaaaacacaaacccuuac

SEQ ID NO: 2190294 - RNA, 19 nt, Artificial Sequence
  Description of Artificial Sequence: Synthetic oligonucleotide
aauacugaucuuuggggau

SEQ ID NO: 2190295 - RNA, 19 nt, Artificial Sequence
  Description of Artificial Sequence: Synthetic oligonucleotide
gugaugucgcuguugagcg

SEQ ID NO: 2190296 - RNA, 19 nt, Artificial Sequence
  Description of Artificial Sequence: Synthetic oligonucleotide
acuacaguacaugguaagc

SEQ ID NO: 2190297 - RNA, 19 nt, Artificial Sequence
  Description of Artificial Sequence: Synthetic oligonucleotide
guaacugcuccacaacacg

SEQ ID NO: 2190298 - RNA, 19 nt, Artificial Sequence
  Description of Artificial Sequence: Synthetic oligonucleotide
gguuaagaaauaaauuagg

SEQ ID NO: 2190299 - RNA, 19 nt, Artificial Sequence
  Description of Artificial Sequence: Synthetic oligonucleotide
ucaggaaauugauggauga

SEQ ID NO: 2190300 - RNA, 19 nt, Artificial Sequence
  Description of Artificial Sequence: Synthetic oligonucleotide
uguaaugaaauggacuuuc

SEQ ID NO: 2190301 - RNA, 19 nt, Artificial Sequence
  Description of Artificial Sequence: Synthetic oligonucleotide
acaaacuuaccuugcagca

SEQ ID NO: 2190302 - RNA, 19 nt, Artificial Sequence
  Description of Artificial Sequence: Synthetic oligonucleotide
ucugacgugaaguuugggu

SEQ ID NO: 2190303 - RNA, 19 nt, Artificial Sequence
  Description of Artificial Sequence: Synthetic oligonucleotide
gaaauggacuuucuguaac

SEQ ID NO: 2190304 - RNA, 19 nt, Artificial Sequence
  Description of Artificial Sequence: Synthetic oligonucleotide
cuuauuaaagaugucgcuc

SEQ ID NO: 2190305 - RNA, 19 nt, Artificial Sequence
  Description of Artificial Sequence: Synthetic oligonucleotide
ugauggaugaacucguauc

SEQ ID NO: 2190306 - RNA, 19 nt, Artificial Sequence
  Description of Artificial Sequence: Synthetic oligonucleotide
aguuuacgcaauuuuccag

SEQ ID NO: 2190307 - RNA, 19 nt, Artificial Sequence
  Description of Artificial Sequence: Synthetic oligonucleotide
aaguuggcgaguucuacga

SEQ ID NO: 2190308 - RNA, 19 nt, Artificial Sequence
  Description of Artificial Sequence: Synthetic oligonucleotide
guuaagaaauaaauuagga

SEQ ID NO: 2190309 - RNA, 19 nt, Artificial Sequence
  Description of Artificial Sequence: Synthetic oligonucleotide
augcuguacucauugauug

SEQ ID NO: 2190310 - RNA, 19 nt, Artificial Sequence
  Description of Artificial Sequence: Synthetic oligonucleotide
uuugacucugacgugaagu

SEQ ID NO: 2190311 - RNA, 19 nt, Artificial Sequence
  Description of Artificial Sequence: Synthetic oligonucleotide
uuuguuccaacuccuggca

SEQ ID NO: 2190312 - RNA, 19 nt, Artificial Sequence
  Description of Artificial Sequence: Synthetic oligonucleotide
aacaacuucggcugcuugu

SEQ ID NO: 2190313 - RNA, 19 nt, Artificial Sequence
  Description of Artificial Sequence: Synthetic oligonucleotide
gaagcugcuacaaacuuac

SEQ ID NO: 2190314 - RNA, 19 nt, Artificial Sequence
  Description of Artificial Sequence: Synthetic oligonucleotide
uguaacugcuccacaacac

SEQ ID NO: 2190315 - RNA, 19 nt, Artificial Sequence
  Description of Artificial Sequence: Synthetic oligonucleotide
ugacgaaucuuuucuaagu

SEQ ID NO: 2190316 - RNA, 19 nt, Artificial Sequence
  Description of Artificial Sequence: Synthetic oligonucleotide
augaauuuugucucgcccu

SEQ ID NO: 2190317 - RNA, 19 nt, Artificial Sequence
  Description of Artificial Sequence: Synthetic oligonucleotide
cugacgugaaguuugggug

SEQ ID NO: 2190318 - RNA, 19 nt, Artificial Sequence
  Description of Artificial Sequence: Synthetic oligonucleotide
uauuaaagaugucgcuccc

SEQ ID NO: 2190319 - RNA, 19 nt, Artificial Sequence
  Description of Artificial Sequence: Synthetic oligonucleotide
gagcaugucggugaugucg

SEQ ID NO: 2190320 - RNA, 19 nt, Artificial Sequence
  Description of Artificial Sequence: Synthetic oligonucleotide
ugaacucguaucauccuga

SEQ ID NO: 2190321 - RNA, 19 nt, Artificial Sequence
  Description of Artificial Sequence: Synthetic oligonucleotide
uuugucucgcccuuugaca

SEQ ID NO: 2190322 - RNA, 19 nt, Artificial Sequence
  Description of Artificial Sequence: Synthetic oligonucleotide
uagagaacaccacaguaau

SEQ ID NO: 2190323 - RNA, 19 nt, Artificial Sequence
  Description of Artificial Sequence: Synthetic oligonucleotide
uugucucgcccuuugacag

SEQ ID NO: 2190324 - RNA, 19 nt, Artificial Sequence
  Description of Artificial Sequence: Synthetic oligonucleotide
uccuagugggauaugccag

SEQ ID NO: 2190325 - RNA, 19 nt, Artificial Sequence
  Description of Artificial Sequence: Synthetic oligonucleotide
guuugggugggucagaaga

SEQ ID NO: 2190326 - RNA, 19 nt, Artificial Sequence
  Description of Artificial Sequence: Synthetic oligonucleotide
uuuugucucgcccuuugac

SEQ ID NO: 2190327 - RNA, 19 nt, Artificial Sequence
  Description of Artificial Sequence: Synthetic oligonucleotide
aaccugauaucaauucuuc

SEQ ID NO: 2190328 - RNA, 19 nt, Artificial Sequence
  Description of Artificial Sequence: Synthetic oligonucleotide
ugcuuguuugacucugacg

SEQ ID NO: 2190329 - RNA, 19 nt, Artificial Sequence
  Description of Artificial Sequence: Synthetic oligonucleotide
uugcguuugcucauggcgc

SEQ ID NO: 2190330 - RNA, 19 nt, Artificial Sequence
  Description of Artificial Sequence: Synthetic oligonucleotide
cgagucaggaaauugaugg

SEQ ID NO: 2190331 - RNA, 19 nt, Artificial Sequence
  Description of Artificial Sequence: Synthetic oligonucleotide
agcugcuacaaacuuaccu

SEQ ID NO: 2190332 - RNA, 19 nt, Artificial Sequence
  Description of Artificial Sequence: Synthetic oligonucleotide
aacucguaucauccugacg

SEQ ID NO: 2190333 - RNA, 19 nt, Artificial Sequence
  Description of Artificial Sequence: Synthetic oligonucleotide
uacuuugcuauaacagaug

SEQ ID NO: 2190334 - RNA, 19 nt, Artificial Sequence
  Description of Artificial Sequence: Synthetic oligonucleotide
agagcgugagcucucaugu

SEQ ID NO: 2190335 - RNA, 19 nt, Artificial Sequence
  Description of Artificial Sequence: Synthetic oligonucleotide
aauugauggaugaacucgu

SEQ ID NO: 2190336 - RNA, 19 nt, Artificial Sequence
  Description of Artificial Sequence: Synthetic oligonucleotide
augguaagcauggagaaga

SEQ ID NO: 2190337 - RNA, 19 nt, Artificial Sequence
  Description of Artificial Sequence: Synthetic oligonucleotide
agugaaguagagaacacca

SEQ ID NO: 2190338 - RNA, 19 nt, Artificial Sequence
  Description of Artificial Sequence: Synthetic oligonucleotide
auucacuucuauccuuggg

SEQ ID NO: 2190339 - RNA, 19 nt, Artificial Sequence
  Description of Artificial Sequence: Synthetic oligonucleotide
caaacacccaugaauuuug

SEQ ID NO: 2190340 - RNA, 19 nt, Artificial Sequence
  Description of Artificial Sequence: Synthetic oligonucleotide
ugcuauaacagaugcugcu

SEQ ID NO: 2190341 - RNA, 19 nt, Artificial Sequence
  Description of Artificial Sequence: Synthetic oligonucleotide
uuucuguacgcguuguacu

SEQ ID NO: 2190342 - RNA, 19 nt, Artificial Sequence
  Description of Artificial Sequence: Synthetic oligonucleotide
aguagagaacaccacagua

SEQ ID NO: 2190343 - RNA, 19 nt, Artificial Sequence
  Description of Artificial Sequence: Synthetic oligonucleotide
guacaugguaagcauggag

SEQ ID NO: 2190344 - RNA, 19 nt, Artificial Sequence
  Description of Artificial Sequence: Synthetic oligonucleotide
uuacauagcaaagguuaag

SEQ ID NO: 2190345 - RNA, 19 nt, Artificial Sequence
  Description of Artificial Sequence: Synthetic oligonucleotide
agaugcugcuuuucuguac

SEQ ID NO: 2190346 - RNA, 19 nt, Artificial Sequence
  Description of Artificial Sequence: Synthetic oligonucleotide
acguucuucucaaaguugg

SEQ ID NO: 2190347 - RNA, 19 nt, Artificial Sequence
  Description of Artificial Sequence: Synthetic oligonucleotide
cauagcaaagguuaagaaa

SEQ ID NO: 2190348 - RNA, 19 nt, Artificial Sequence
  Description of Artificial Sequence: Synthetic oligonucleotide
gucugaagcugcuacaaac

SEQ ID NO: 2190349 - RNA, 19 nt, Artificial Sequence
  Description of Artificial Sequence: Synthetic oligonucleotide
cacaacacgaugcaacaac

SEQ ID NO: 2190350 - RNA, 19 nt, Artificial Sequence
  Description of Artificial Sequence: Synthetic oligonucleotide
ucacuucuauccuugggcu

SEQ ID NO: 2190351 - RNA, 19 nt, Artificial Sequence
  Description of Artificial Sequence: Synthetic oligonucleotide
aaacccuuacauagcaaag

SEQ ID NO: 2190352 - RNA, 19 nt, Artificial Sequence
  Description of Artificial Sequence: Synthetic oligonucleotide
uggaccaaugccaguaacu

SEQ ID NO: 2190353 - RNA, 19 nt, Artificial Sequence
  Description of Artificial Sequence: Synthetic oligonucleotide
augaacucguaucauccug

SEQ ID NO: 2190354 - RNA, 19 nt, Artificial Sequence
  Description of Artificial Sequence: Synthetic oligonucleotide
ugaaauggacuuucuguaa

SEQ ID NO: 2190355 - RNA, 19 nt, Artificial Sequence
  Description of Artificial Sequence: Synthetic oligonucleotide
cuacaaacuuaccuugcag

SEQ ID NO: 2190356 - RNA, 19 nt, Artificial Sequence
  Description of Artificial Sequence: Synthetic oligonucleotide
acuuaaaacacaaacccuu

SEQ ID NO: 2190357 - RNA, 19 nt, Artificial Sequence
  Description of Artificial Sequence: Synthetic oligonucleotide
gacucugacgugaaguuug

SEQ ID NO: 2190358 - RNA, 19 nt, Artificial Sequence
  Description of Artificial Sequence: Synthetic oligonucleotide
uggguacuuugcuauaaca

SEQ ID NO: 2190359 - RNA, 19 nt, Artificial Sequence
  Description of Artificial Sequence: Synthetic oligonucleotide
ucggugaugucgcuguuga

SEQ ID NO: 2190360 - RNA, 19 nt, Artificial Sequence
  Description of Artificial Sequence: Synthetic oligonucleotide
aucuuuggggaucaaccug

SEQ ID NO: 2190361 - RNA, 19 nt, Artificial Sequence
  Description of Artificial Sequence: Synthetic oligonucleotide
aucgccacuggauguaauc

SEQ ID NO: 2190362 - RNA, 19 nt, Artificial Sequence
  Description of Artificial Sequence: Synthetic oligonucleotide
cuugugaauggccuggcuc

SEQ ID NO: 2190363 - RNA, 19 nt, Artificial Sequence
  Description of Artificial Sequence: Synthetic oligonucleotide
uuguuugacucugacguga

SEQ ID NO: 2190364 - RNA, 19 nt, Artificial Sequence
  Description of Artificial Sequence: Synthetic oligonucleotide
uuaccuugcagcagaugga

SEQ ID NO: 2190365 - RNA, 19 nt, Artificial Sequence
  Description of Artificial Sequence: Synthetic oligonucleotide
ccugauaucaauucuucug

SEQ ID NO: 2190366 - RNA, 19 nt, Artificial Sequence
  Description of Artificial Sequence: Synthetic oligonucleotide
ucuauccuugggcucccgg

SEQ ID NO: 2190367 - RNA, 19 nt, Artificial Sequence
  Description of Artificial Sequence: Synthetic oligonucleotide
ugagcucucauguucuuau

SEQ ID NO: 2190368 - RNA, 19 nt, Artificial Sequence
  Description of Artificial Sequence: Synthetic oligonucleotide
uugagcgucuccugcggcg

SEQ ID NO: 2190369 - RNA, 19 nt, Artificial Sequence
  Description of Artificial Sequence: Synthetic oligonucleotide
gacagagugucuguaauga

SEQ ID NO: 2190370 - RNA, 19 nt, Artificial Sequence
  Description of Artificial Sequence: Synthetic oligonucleotide
ucgagucaggaaauugaug

SEQ ID NO: 2190371 - RNA, 19 nt, Artificial Sequence
  Description of Artificial Sequence: Synthetic oligonucleotide
gauaugccagggugggagg

SEQ ID NO: 2190372 - RNA, 19 nt, Artificial Sequence
  Description of Artificial Sequence: Synthetic oligonucleotide
aacucgagucaggaaauug

SEQ ID NO: 2190373 - RNA, 19 nt, Artificial Sequence
  Description of Artificial Sequence: Synthetic oligonucleotide
ugaauggccuggcucacgu

SEQ ID NO: 2190374 - RNA, 19 nt, Artificial Sequence
  Description of Artificial Sequence: Synthetic oligonucleotide
acccuuacauagcaaaggu

SEQ ID NO: 2190375 - RNA, 19 nt, Artificial Sequence
  Description of Artificial Sequence: Synthetic oligonucleotide
uuuucuagagcgugagcuc

SEQ ID NO: 2190376 - RNA, 19 nt, Artificial Sequence
  Description of Artificial Sequence: Synthetic oligonucleotide
uuacgcaauuuuccaguug

SEQ ID NO: 2190377 - RNA, 19 nt, Artificial Sequence
  Description of Artificial Sequence: Synthetic oligonucleotide
auggaccaaugccaguaac

SEQ ID NO: 2190378 - RNA, 19 nt, Artificial Sequence
  Description of Artificial Sequence: Synthetic oligonucleotide
guuggcgaguucuacgagc

SEQ ID NO: 2190379 - RNA, 19 nt, Artificial Sequence
  Description of Artificial Sequence: Synthetic oligonucleotide
gguacuuugcuauaacaga

SEQ ID NO: 2190380 - RNA, 19 nt, Artificial Sequence
  Description of Artificial Sequence: Synthetic oligonucleotide
uacgcguuguacuugugaa

SEQ ID NO: 2190381 - RNA, 19 nt, Artificial Sequence
  Description of Artificial Sequence: Synthetic oligonucleotide
agcaugucggugaugucgc

SEQ ID NO: 2190382 - RNA, 19 nt, Artificial Sequence
  Description of Artificial Sequence: Synthetic oligonucleotide
uguguggauauuccuuuuc

SEQ ID NO: 2190383 - RNA, 19 nt, Artificial Sequence
  Description of Artificial Sequence: Synthetic oligonucleotide
cucccagugaaguagagaa

SEQ ID NO: 2190384 - RNA, 19 nt, Artificial Sequence
  Description of Artificial Sequence: Synthetic oligonucleotide
ugggauaugccaggguggg

SEQ ID NO: 2190385 - RNA, 19 nt, Artificial Sequence
  Description of Artificial Sequence: Synthetic oligonucleotide
cugcuacaaacuuaccuug

SEQ ID NO: 2190386 - RNA, 19 nt, Artificial Sequence
  Description of Artificial Sequence: Synthetic oligonucleotide
aaauaaauuaggacuccua

SEQ ID NO: 2190387 - RNA, 19 nt, Artificial Sequence
  Description of Artificial Sequence: Synthetic oligonucleotide
uugauggaugaacucguau

SEQ ID NO: 2190388 - RNA, 19 nt, Artificial Sequence
  Description of Artificial Sequence: Synthetic oligonucleotide
aagaugucgcucccaguga

SEQ ID NO: 2190389 - RNA, 19 nt, Artificial Sequence
  Description of Artificial Sequence: Synthetic oligonucleotide
gauaucaauucuucugugu

SEQ ID NO: 2190390 - RNA, 19 nt, Artificial Sequence
  Description of Artificial Sequence: Synthetic oligonucleotide
uagagcgugagcucucaug

SEQ ID NO: 2190391 - RNA, 19 nt, Artificial Sequence
  Description of Artificial Sequence: Synthetic oligonucleotide
uuucuagagcgugagcucu

SEQ ID NO: 2190392 - RNA, 19 nt, Artificial Sequence
  Description of Artificial Sequence: Synthetic oligonucleotide
cacccaugaauuuugucuc

SEQ ID NO: 2190393 - RNA, 19 nt, Artificial Sequence
  Description of Artificial Sequence: Synthetic oligonucleotide
gcuuguuugacucugacgu

SEQ ID NO: 2190394 - RNA, 19 nt, Artificial Sequence
  Description of Artificial Sequence: Synthetic oligonucleotide
acacaaacccuuacauagc

SEQ ID NO: 2190395 - RNA, 19 nt, Artificial Sequence
  Description of Artificial Sequence: Synthetic oligonucleotide
gauugugaagcccuuuucu

SEQ ID NO: 2190396 - RNA, 19 nt, Artificial Sequence
  Description of Artificial Sequence: Synthetic oligonucleotide
ugcuuuucuguacgcguug

SEQ ID NO: 2190397 - RNA, 19 nt, Artificial Sequence
  Description of Artificial Sequence: Synthetic oligonucleotide
uguggauauuccuuuucau

SEQ ID NO: 2190398 - RNA, 19 nt, Artificial Sequence
  Description of Artificial Sequence: Synthetic oligonucleotide
ugacuacaguacaugguaa

SEQ ID NO: 2190399 - RNA, 19 nt, Artificial Sequence
  Description of Artificial Sequence: Synthetic oligonucleotide
aucaauucuucugugugga

SEQ ID NO: 2190400 - RNA, 19 nt, Artificial Sequence
  Description of Artificial Sequence: Synthetic oligonucleotide
auugugaagcccuuuucua

SEQ ID NO: 2190401 - RNA, 19 nt, Artificial Sequence
  Description of Artificial Sequence: Synthetic oligonucleotide
aauacacuuaaaacacaaa

SEQ ID NO: 2190402 - RNA, 19 nt, Artificial Sequence
  Description of Artificial Sequence: Synthetic oligonucleotide
accaaugccaguaacucga

SEQ ID NO: 2190403 - RNA, 19 nt, Artificial Sequence
  Description of Artificial Sequence: Synthetic oligonucleotide
caaacccuuacauagcaaa

SEQ ID NO: 2190404 - RNA, 19 nt, Artificial Sequence
  Description of Artificial Sequence: Synthetic oligonucleotide
acccaugaauuuugucucg

SEQ ID NO: 2190405 - RNA, 19 nt, Artificial Sequence
  Description of Artificial Sequence: Synthetic oligonucleotide
uggacucugcaccucgucu

SEQ ID NO: 2190406 - RNA, 19 nt, Artificial Sequence
  Description of Artificial Sequence: Synthetic oligonucleotide
auacugaucuuuggggauc

SEQ ID NO: 2190407 - RNA, 19 nt, Artificial Sequence
  Description of Artificial Sequence: Synthetic oligonucleotide
ugggugggucagaagaaca

SEQ ID NO: 2190408 - RNA, 19 nt, Artificial Sequence
  Description of Artificial Sequence: Synthetic oligonucleotide
uguucuuauuaaagauguc

SEQ ID NO: 2190409 - RNA, 19 nt, Artificial Sequence
  Description of Artificial Sequence: Synthetic oligonucleotide
acgaugcaacaacuucggc

SEQ ID NO: 2190410 - RNA, 19 nt, Artificial Sequence
  Description of Artificial Sequence: Synthetic oligonucleotide
gacuccuagugggauaugc

SEQ ID NO: 2190411 - RNA, 19 nt, Artificial Sequence
  Description of Artificial Sequence: Synthetic oligonucleotide
agaacaccacaguaauacu

SEQ ID NO: 2190412 - RNA, 19 nt, Artificial Sequence
  Description of Artificial Sequence: Synthetic oligonucleotide
uugacucugacgugaaguu

SEQ ID NO: 2190413 - RNA, 19 nt, Artificial Sequence
  Description of Artificial Sequence: Synthetic oligonucleotide
ugcguuugcucauggcgcc

SEQ ID NO: 2190414 - RNA, 19 nt, Artificial Sequence
  Description of Artificial Sequence: Synthetic oligonucleotide
ggugaugucgcuguugagc

SEQ ID NO: 2190415 - RNA, 19 nt, Artificial Sequence
  Description of Artificial Sequence: Synthetic oligonucleotide
cacguucuucucaaaguug

SEQ ID NO: 2190416 - RNA, 19 nt, Artificial Sequence
  Description of Artificial Sequence: Synthetic oligonucleotide
acgagcaugucggugaugu

SEQ ID NO: 2190417 - RNA, 19 nt, Artificial Sequence
  Description of Artificial Sequence: Synthetic oligonucleotide
guuuacgcaauuuuccagu

SEQ ID NO: 2190418 - RNA, 19 nt, Artificial Sequence
  Description of Artificial Sequence: Synthetic oligonucleotide
augucggugaugucgcugu

SEQ ID NO: 2190419 - RNA, 19 nt, Artificial Sequence
  Description of Artificial Sequence: Synthetic oligonucleotide
uuuacgcaauuuuccaguu

SEQ ID NO: 2190420 - RNA, 19 nt, Artificial Sequence
  Description of Artificial Sequence: Synthetic oligonucleotide
augcaacaacuucggcugc

SEQ ID NO: 2190421 - RNA, 19 nt, Artificial Sequence
  Description of Artificial Sequence: Synthetic oligonucleotide
caaacuuaccuugcagcag

SEQ ID NO: 2190422 - RNA, 19 nt, Artificial Sequence
  Description of Artificial Sequence: Synthetic oligonucleotide
ucaaaguuggcgaguucua

SEQ ID NO: 2190423 - RNA, 19 nt, Artificial Sequence
  Description of Artificial Sequence: Synthetic oligonucleotide
accugauaucaauucuucu

SEQ ID NO: 2190424 - RNA, 19 nt, Artificial Sequence
  Description of Artificial Sequence: Synthetic oligonucleotide
guagagaacaccacaguaa

SEQ ID NO: 2190425 - RNA, 19 nt, Artificial Sequence
  Description of Artificial Sequence: Synthetic oligonucleotide
cagugauccccaaggggcg

SEQ ID NO: 2190426 - RNA, 19 nt, Artificial Sequence
  Description of Artificial Sequence: Synthetic oligonucleotide
cuccgcuggacucugcacc

SEQ ID NO: 2190427 - RNA, 19 nt, Artificial Sequence
  Description of Artificial Sequence: Synthetic oligonucleotide
uuucuaaguuuacgcaauu

SEQ ID NO: 2190428 - RNA, 19 nt, Artificial Sequence
  Description of Artificial Sequence: Synthetic oligonucleotide
augcugcuuuucuguacgc

SEQ ID NO: 2190429 - RNA, 19 nt, Artificial Sequence
  Description of Artificial Sequence: Synthetic oligonucleotide
uuuuacugggaagcuggca

SEQ ID NO: 2190430 - RNA, 19 nt, Artificial Sequence
  Description of Artificial Sequence: Synthetic oligonucleotide
ugcaccucgucugaagcug

SEQ ID NO: 2190431 - RNA, 19 nt, Artificial Sequence
  Description of Artificial Sequence: Synthetic oligonucleotide
cuuuucuagagcgugagcu

SEQ ID NO: 2190432 - RNA, 19 nt, Artificial Sequence
  Description of Artificial Sequence: Synthetic oligonucleotide
gacgugaaguuuggguggg

SEQ ID NO: 2190433 - RNA, 19 nt, Artificial Sequence
  Description of Artificial Sequence: Synthetic oligonucleotide
cuuacauagcaaagguuaa

SEQ ID NO: 2190434 - RNA, 19 nt, Artificial Sequence
  Description of Artificial Sequence: Synthetic oligonucleotide
gugucuguaaugaaaugga

SEQ ID NO: 2190435 - RNA, 19 nt, Artificial Sequence
  Description of Artificial Sequence: Synthetic oligonucleotide
gaugucgcuguugagcguc

SEQ ID NO: 2190436 - RNA, 19 nt, Artificial Sequence
  Description of Artificial Sequence: Synthetic oligonucleotide
uucuguacgcguuguacuu

SEQ ID NO: 2190437 - RNA, 19 nt, Artificial Sequence
  Description of Artificial Sequence: Synthetic oligonucleotide
uguuugacucugacgugaa

SEQ ID NO: 2190438 - RNA, 19 nt, Artificial Sequence
  Description of Artificial Sequence: Synthetic oligonucleotide
cugauaucaauucuucugu

SEQ ID NO: 2190439 - RNA, 19 nt, Artificial Sequence
  Description of Artificial Sequence: Synthetic oligonucleotide
gucgcucccagugaaguag

SEQ ID NO: 2190440 - RNA, 19 nt, Artificial Sequence
  Description of Artificial Sequence: Synthetic oligonucleotide
gaacucguaucauccugac

SEQ ID NO: 2190441 - RNA, 19 nt, Artificial Sequence
  Description of Artificial Sequence: Synthetic oligonucleotide
ugccaguaacucgagucag

SEQ ID NO: 2190442 - RNA, 19 nt, Artificial Sequence
  Description of Artificial Sequence: Synthetic oligonucleotide
ccuuacauagcaaagguua

SEQ ID NO: 2190443 - RNA, 19 nt, Artificial Sequence
  Description of Artificial Sequence: Synthetic oligonucleotide
gugggauaugccagggugg

SEQ ID NO: 2190444 - RNA, 19 nt, Artificial Sequence
  Description of Artificial Sequence: Synthetic oligonucleotide
ugcuguacucauugauugu

SEQ ID NO: 2190445 - RNA, 19 nt, Artificial Sequence
  Description of Artificial Sequence: Synthetic oligonucleotide
uaaagaugucgcucccagu

SEQ ID NO: 2190446 - RNA, 19 nt, Artificial Sequence
  Description of Artificial Sequence: Synthetic oligonucleotide
uaccuugcagcagauggac

SEQ ID NO: 2190447 - RNA, 19 nt, Artificial Sequence
  Description of Artificial Sequence: Synthetic oligonucleotide
gaucuuuggggaucaaccu

SEQ ID NO: 2190448 - RNA, 19 nt, Artificial Sequence
  Description of Artificial Sequence: Synthetic oligonucleotide
cuacaguacaugguaagca

SEQ ID NO: 2190449 - RNA, 19 nt, Artificial Sequence
  Description of Artificial Sequence: Synthetic oligonucleotide
acucgagucaggaaauuga

SEQ ID NO: 2190450 - RNA, 19 nt, Artificial Sequence
  Description of Artificial Sequence: Synthetic oligonucleotide
auuaaagaugucgcuccca

SEQ ID NO: 2190451 - RNA, 19 nt, Artificial Sequence
  Description of Artificial Sequence: Synthetic oligonucleotide
aguuggcgaguucuacgag

SEQ ID NO: 2190452 - RNA, 19 nt, Artificial Sequence
  Description of Artificial Sequence: Synthetic oligonucleotide
uggggaucaaccugauauc

SEQ ID NO: 2190453 - RNA, 19 nt, Artificial Sequence
  Description of Artificial Sequence: Synthetic oligonucleotide
caguucuuagcuucuucuc

SEQ ID NO: 2190454 - RNA, 19 nt, Artificial Sequence
  Description of Artificial Sequence: Synthetic oligonucleotide
acaacacgaugcaacaacu

SEQ ID NO: 2190455 - RNA, 19 nt, Artificial Sequence
  Description of Artificial Sequence: Synthetic oligonucleotide
ucuguacgcguuguacuug

SEQ ID NO: 2190456 - RNA, 19 nt, Artificial Sequence
  Description of Artificial Sequence: Synthetic oligonucleotide
uguggguacuuugcuauaa

SEQ ID NO: 2190457 - RNA, 19 nt, Artificial Sequence
  Description of Artificial Sequence: Synthetic oligonucleotide
cuccuagugggauaugcca

SEQ ID NO: 2190458 - RNA, 19 nt, Artificial Sequence
  Description of Artificial Sequence: Synthetic oligonucleotide
cuagugggauaugccaggg

SEQ ID NO: 2190459 - RNA, 19 nt, Artificial Sequence
  Description of Artificial Sequence: Synthetic oligonucleotide
cucgcccuuugacagagug

SEQ ID NO: 2190460 - RNA, 19 nt, Artificial Sequence
  Description of Artificial Sequence: Synthetic oligonucleotide
uucuacgagcaugucggug

SEQ ID NO: 2190461 - RNA, 19 nt, Artificial Sequence
  Description of Artificial Sequence: Synthetic oligonucleotide
acaguacaugguaagcaug

SEQ ID NO: 2190462 - RNA, 19 nt, Artificial Sequence
  Description of Artificial Sequence: Synthetic oligonucleotide
cuguaacugcuccacaaca

SEQ ID NO: 2190463 - RNA, 19 nt, Artificial Sequence
  Description of Artificial Sequence: Synthetic oligonucleotide
ucgccacuggauguaauca

SEQ ID NO: 2190464 - RNA, 19 nt, Artificial Sequence
  Description of Artificial Sequence: Synthetic oligonucleotide
uaugccagggugggagggg

SEQ ID NO: 2190465 - RNA, 19 nt, Artificial Sequence
  Description of Artificial Sequence: Synthetic oligonucleotide
aaggggcggaugcuguacu

SEQ ID NO: 2190466 - RNA, 19 nt, Artificial Sequence
  Description of Artificial Sequence: Synthetic oligonucleotide
auaugccagggugggaggg

SEQ ID NO: 2190467 - RNA, 19 nt, Artificial Sequence
  Description of Artificial Sequence: Synthetic oligonucleotide
ugggcucccgguaucgcca

SEQ ID NO: 2190468 - RNA, 19 nt, Artificial Sequence
  Description of Artificial Sequence: Synthetic oligonucleotide
gugaaguuuggguggguca

SEQ ID NO: 2190469 - RNA, 19 nt, Artificial Sequence
  Description of Artificial Sequence: Synthetic oligonucleotide
gcucacguucuucucaaag

SEQ ID NO: 2190470 - RNA, 19 nt, Artificial Sequence
  Description of Artificial Sequence: Synthetic oligonucleotide
caaaguuggcgaguucuac

SEQ ID NO: 2190471 - RNA, 19 nt, Artificial Sequence
  Description of Artificial Sequence: Synthetic oligonucleotide
agcuggcaaacacccauga

SEQ ID NO: 2190472 - RNA, 19 nt, Artificial Sequence
  Description of Artificial Sequence: Synthetic oligonucleotide
agaugucgcucccagugaa

SEQ ID NO: 2190473 - RNA, 19 nt, Artificial Sequence
  Description of Artificial Sequence: Synthetic oligonucleotide
uuguguggguacuuugcua

SEQ ID NO: 2190474 - RNA, 19 nt, Artificial Sequence
  Description of Artificial Sequence: Synthetic oligonucleotide
uucuaaguuuacgcaauuu

SEQ ID NO: 2190475 - RNA, 19 nt, Artificial Sequence
  Description of Artificial Sequence: Synthetic oligonucleotide
uacugaucuuuggggauca

SEQ ID NO: 2190476 - RNA, 19 nt, Artificial Sequence
  Description of Artificial Sequence: Synthetic oligonucleotide
acgcaauuuuccaguugcc

SEQ ID NO: 2190477 - RNA, 19 nt, Artificial Sequence
  Description of Artificial Sequence: Synthetic oligonucleotide
ucgucugaagcugcuacaa

SEQ ID NO: 2190478 - RNA, 19 nt, Artificial Sequence
  Description of Artificial Sequence: Synthetic oligonucleotide
ucccguaccugggagcugc

SEQ ID NO: 2190479 - RNA, 19 nt, Artificial Sequence
  Description of Artificial Sequence: Synthetic oligonucleotide
gaugaacucguaucauccu

SEQ ID NO: 2190480 - RNA, 19 nt, Artificial Sequence
  Description of Artificial Sequence: Synthetic oligonucleotide
aaguuugggugggucagaa

SEQ ID NO: 2190481 - RNA, 19 nt, Artificial Sequence
  Description of Artificial Sequence: Synthetic oligonucleotide
ccuagugggauaugccagg

SEQ ID NO: 2190482 - RNA, 19 nt, Artificial Sequence
  Description of Artificial Sequence: Synthetic oligonucleotide
cuggcaaacacccaugaau

SEQ ID NO: 2190483 - RNA, 19 nt, Artificial Sequence
  Description of Artificial Sequence: Synthetic oligonucleotide
uucucaaaguuggcgaguu

SEQ ID NO: 2190484 - RNA, 19 nt, Artificial Sequence
  Description of Artificial Sequence: Synthetic oligonucleotide
agcccuuuucuagagcgug

SEQ ID NO: 2190485 - RNA, 19 nt, Artificial Sequence
  Description of Artificial Sequence: Synthetic oligonucleotide
uccgcuggacucugcaccu

SEQ ID NO: 2190486 - RNA, 19 nt, Artificial Sequence
  Description of Artificial Sequence: Synthetic oligonucleotide
gacgaaucuuuucuaaguu

SEQ ID NO: 2190487 - RNA, 19 nt, Artificial Sequence
  Description of Artificial Sequence: Synthetic oligonucleotide
gcuguacucauugauugug

SEQ ID NO: 2190488 - RNA, 19 nt, Artificial Sequence
  Description of Artificial Sequence: Synthetic oligonucleotide
cuguacucauugauuguga

SEQ ID NO: 2190489 - RNA, 19 nt, Artificial Sequence
  Description of Artificial Sequence: Synthetic oligonucleotide
ggcaucauucacuucuauc

SEQ ID NO: 2190490 - RNA, 19 nt, Artificial Sequence
  Description of Artificial Sequence: Synthetic oligonucleotide
ucuagagcgugagcucuca

SEQ ID NO: 2190491 - RNA, 19 nt, Artificial Sequence
  Description of Artificial Sequence: Synthetic oligonucleotide
cugaucuuuggggaucaac

SEQ ID NO: 2190492 - RNA, 19 nt, Artificial Sequence
  Description of Artificial Sequence: Synthetic oligonucleotide
gaugucgcucccagugaag

SEQ ID NO: 2190493 - RNA, 19 nt, Artificial Sequence
  Description of Artificial Sequence: Synthetic oligonucleotide
uagugggauaugccagggu

SEQ ID NO: 2190494 - RNA, 19 nt, Artificial Sequence
  Description of Artificial Sequence: Synthetic oligonucleotide
gcuguugagcgucuccugc

SEQ ID NO: 2190495 - RNA, 19 nt, Artificial Sequence
  Description of Artificial Sequence: Synthetic oligonucleotide
uccugacgaaucuuuucua

SEQ ID NO: 2190496 - RNA, 19 nt, Artificial Sequence
  Description of Artificial Sequence: Synthetic oligonucleotide
auuaggacuccuaguggga

SEQ ID NO: 2190497 - RNA, 19 nt, Artificial Sequence
  Description of Artificial Sequence: Synthetic oligonucleotide
cucucauguucuuauuaaa

SEQ ID NO: 2190498 - RNA, 19 nt, Artificial Sequence
  Description of Artificial Sequence: Synthetic oligonucleotide
ucucaaaguuggcgaguuc

SEQ ID NO: 2190499 - RNA, 19 nt, Artificial Sequence
  Description of Artificial Sequence: Synthetic oligonucleotide
uguacgcguuguacuugug

SEQ ID NO: 2190500 - RNA, 19 nt, Artificial Sequence
  Description of Artificial Sequence: Synthetic oligonucleotide
ucgcccuuugacagagugu

SEQ ID NO: 2190501 - RNA, 19 nt, Artificial Sequence
  Description of Artificial Sequence: Synthetic oligonucleotide
uggcucacguucuucucaa

SEQ ID NO: 2190502 - RNA, 19 nt, Artificial Sequence
  Description of Artificial Sequence: Synthetic oligonucleotide
uucuagagcgugagcucuc

SEQ ID NO: 2190503 - RNA, 19 nt, Artificial Sequence
  Description of Artificial Sequence: Synthetic oligonucleotide
guaucauccugacgaaucu

SEQ ID NO: 2190504 - RNA, 19 nt, Artificial Sequence
  Description of Artificial Sequence: Synthetic oligonucleotide
agugauccccaaggggcgg

SEQ ID NO: 2190505 - RNA, 19 nt, Artificial Sequence
  Description of Artificial Sequence: Synthetic oligonucleotide
guggguacuuugcuauaac

SEQ ID NO: 2190506 - RNA, 19 nt, Artificial Sequence
  Description of Artificial Sequence: Synthetic oligonucleotide
accuugcagcagauggacc

SEQ ID NO: 2190507 - RNA, 19 nt, Artificial Sequence
  Description of Artificial Sequence: Synthetic oligonucleotide
gauggaccaaugccaguaa

SEQ ID NO: 2190508 - RNA, 19 nt, Artificial Sequence
  Description of Artificial Sequence: Synthetic oligonucleotide
acucugacgugaaguuugg

SEQ ID NO: 2190509 - RNA, 19 nt, Artificial Sequence
  Description of Artificial Sequence: Synthetic oligonucleotide
ggaaauugauggaugaacu

SEQ ID NO: 2190510 - RNA, 19 nt, Artificial Sequence
  Description of Artificial Sequence: Synthetic oligonucleotide
cacuucuauccuugggcuc

SEQ ID NO: 2190511 - RNA, 19 nt, Artificial Sequence
  Description of Artificial Sequence: Synthetic oligonucleotide
gcguuguacuugugaaugg

SEQ ID NO: 2190512 - RNA, 19 nt, Artificial Sequence
  Description of Artificial Sequence: Synthetic oligonucleotide
ugagcgucuccugcggcgc

SEQ ID NO: 2190513 - RNA, 19 nt, Artificial Sequence
  Description of Artificial Sequence: Synthetic oligonucleotide
ucgcucccagugaaguaga

SEQ ID NO: 2190514 - RNA, 19 nt, Artificial Sequence
  Description of Artificial Sequence: Synthetic oligonucleotide
aggggcggaugcuguacuc

SEQ ID NO: 2190515 - RNA, 19 nt, Artificial Sequence
  Description of Artificial Sequence: Synthetic oligonucleotide
guacuuugcuauaacagau

SEQ ID NO: 2190516 - RNA, 19 nt, Artificial Sequence
  Description of Artificial Sequence: Synthetic oligonucleotide
ugcaacaacuucggcugcu

SEQ ID NO: 2190517 - RNA, 19 nt, Artificial Sequence
  Description of Artificial Sequence: Synthetic oligonucleotide
ccuggcaguucuuagcuuc

SEQ ID NO: 2190518 - RNA, 19 nt, Artificial Sequence
  Description of Artificial Sequence: Synthetic oligonucleotide
augucgcucccagugaagu

SEQ ID NO: 2190519 - RNA, 19 nt, Artificial Sequence
  Description of Artificial Sequence: Synthetic oligonucleotide
gucucgcccuuugacagag

SEQ ID NO: 2190520 - RNA, 19 nt, Artificial Sequence
  Description of Artificial Sequence: Synthetic oligonucleotide
gcuacaaacuuaccuugca

SEQ ID NO: 2190521 - RNA, 19 nt, Artificial Sequence
  Description of Artificial Sequence: Synthetic oligonucleotide
gacucugcaccucgucuga

SEQ ID NO: 2190522 - RNA, 19 nt, Artificial Sequence
  Description of Artificial Sequence: Synthetic oligonucleotide
gcagauggaccaaugccag

SEQ ID NO: 2190523 - RNA, 19 nt, Artificial Sequence
  Description of Artificial Sequence: Synthetic oligonucleotide
ugucucgcccuuugacaga

SEQ ID NO: 2190524 - RNA, 19 nt, Artificial Sequence
  Description of Artificial Sequence: Synthetic oligonucleotide
ucuccgcuggacucugcac

SEQ ID NO: 2190525 - RNA, 19 nt, Artificial Sequence
  Description of Artificial Sequence: Synthetic oligonucleotide
aggacuccuagugggauau

SEQ ID NO: 2190526 - RNA, 19 nt, Artificial Sequence
  Description of Artificial Sequence: Synthetic oligonucleotide
aucauccugacgaaucuuu

SEQ ID NO: 2190527 - RNA, 19 nt, Artificial Sequence
  Description of Artificial Sequence: Synthetic oligonucleotide
caugucggugaugucgcug

SEQ ID NO: 2190528 - RNA, 19 nt, Artificial Sequence
  Description of Artificial Sequence: Synthetic oligonucleotide
acaacuucggcugcuuguu

SEQ ID NO: 2190529 - RNA, 19 nt, Artificial Sequence
  Description of Artificial Sequence: Synthetic oligonucleotide
ucccgguaucgccacugga

SEQ ID NO: 2190530 - RNA, 19 nt, Artificial Sequence
  Description of Artificial Sequence: Synthetic oligonucleotide
ggcgaguucuacgagcaug

SEQ ID NO: 2190531 - RNA, 19 nt, Artificial Sequence
  Description of Artificial Sequence: Synthetic oligonucleotide
uaggacuccuagugggaua

SEQ ID NO: 2190532 - RNA, 19 nt, Artificial Sequence
  Description of Artificial Sequence: Synthetic oligonucleotide
ugaugucgcuguugagcgu

SEQ ID NO: 2190533 - RNA, 19 nt, Artificial Sequence
  Description of Artificial Sequence: Synthetic oligonucleotide
ggcgccuugcguuugcuca

SEQ ID NO: 2190534 - RNA, 19 nt, Artificial Sequence
  Description of Artificial Sequence: Synthetic oligonucleotide
ggagaagaaacaauacacu

SEQ ID NO: 2190535 - RNA, 19 nt, Artificial Sequence
  Description of Artificial Sequence: Synthetic oligonucleotide
acgcguuguacuugugaau

SEQ ID NO: 2190536 - RNA, 19 nt, Artificial Sequence
  Description of Artificial Sequence: Synthetic oligonucleotide
uccugcggcgccuugcguu

SEQ ID NO: 2190537 - RNA, 19 nt, Artificial Sequence
  Description of Artificial Sequence: Synthetic oligonucleotide
acugggaagcuggcaaaca

SEQ ID NO: 2190538 - RNA, 19 nt, Artificial Sequence
  Description of Artificial Sequence: Synthetic oligonucleotide
caucauucacuucuauccu

SEQ ID NO: 2190539 - RNA, 19 nt, Artificial Sequence
  Description of Artificial Sequence: Synthetic oligonucleotide
uaucgccacuggauguaau

SEQ ID NO: 2190540 - RNA, 19 nt, Artificial Sequence
  Description of Artificial Sequence: Synthetic oligonucleotide
ugacucugacgugaaguuu

SEQ ID NO: 2190541 - RNA, 19 nt, Artificial Sequence
  Description of Artificial Sequence: Synthetic oligonucleotide
gcugcuacaaacuuaccuu

SEQ ID NO: 2190542 - RNA, 19 nt, Artificial Sequence
  Description of Artificial Sequence: Synthetic oligonucleotide
cucgucugaagcugcuaca

SEQ ID NO: 2190543 - RNA, 19 nt, Artificial Sequence
  Description of Artificial Sequence: Synthetic oligonucleotide
acuuaccuugcagcagaug

SEQ ID NO: 2190544 - RNA, 19 nt, Artificial Sequence
  Description of Artificial Sequence: Synthetic oligonucleotide
ucguaucauccugacgaau

SEQ ID NO: 2190545 - RNA, 19 nt, Artificial Sequence
  Description of Artificial Sequence: Synthetic oligonucleotide
ugucgcucccagugaagua

SEQ ID NO: 2190546 - RNA, 19 nt, Artificial Sequence
  Description of Artificial Sequence: Synthetic oligonucleotide
caaccugauaucaauucuu

SEQ ID NO: 2190547 - RNA, 19 nt, Artificial Sequence
  Description of Artificial Sequence: Synthetic oligonucleotide
ggaucaaccugauaucaau

SEQ ID NO: 2190548 - RNA, 19 nt, Artificial Sequence
  Description of Artificial Sequence: Synthetic oligonucleotide
gaacauccaugucuccgcu

SEQ ID NO: 2190549 - RNA, 19 nt, Artificial Sequence
  Description of Artificial Sequence: Synthetic oligonucleotide
cucccgguaucgccacugg

SEQ ID NO: 2190550 - RNA, 19 nt, Artificial Sequence
  Description of Artificial Sequence: Synthetic oligonucleotide
caaggggcggaugcuguac

SEQ ID NO: 2190551 - RNA, 19 nt, Artificial Sequence
  Description of Artificial Sequence: Synthetic oligonucleotide
gucggugaugucgcuguug

SEQ ID NO: 2190552 - RNA, 19 nt, Artificial Sequence
  Description of Artificial Sequence: Synthetic oligonucleotide
aacuuaccuugcagcagau

SEQ ID NO: 2190553 - RNA, 19 nt, Artificial Sequence
  Description of Artificial Sequence: Synthetic oligonucleotide
uucuauccuugggcucccg

SEQ ID NO: 2190554 - RNA, 19 nt, Artificial Sequence
  Description of Artificial Sequence: Synthetic oligonucleotide
guaaugaaauggacuuucu

SEQ ID NO: 2190555 - RNA, 19 nt, Artificial Sequence
  Description of Artificial Sequence: Synthetic oligonucleotide
cuucuauccuugggcuccc

SEQ ID NO: 2190556 - RNA, 19 nt, Artificial Sequence
  Description of Artificial Sequence: Synthetic oligonucleotide
cccuuugacagagugucug

SEQ ID NO: 2190557 - RNA, 19 nt, Artificial Sequence
  Description of Artificial Sequence: Synthetic oligonucleotide
acaaacccuuacauagcaa

SEQ ID NO: 2190558 - RNA, 19 nt, Artificial Sequence
  Description of Artificial Sequence: Synthetic oligonucleotide
cucgagucaggaaauugau

SEQ ID NO: 2190559 - RNA, 19 nt, Artificial Sequence
  Description of Artificial Sequence: Synthetic oligonucleotide
uaacucgagucaggaaauu

SEQ ID NO: 2190560 - RNA, 19 nt, Artificial Sequence
  Description of Artificial Sequence: Synthetic oligonucleotide
cucguaucauccugacgaa

SEQ ID NO: 2190561 - RNA, 19 nt, Artificial Sequence
  Description of Artificial Sequence: Synthetic oligonucleotide
cuauccuugggcucccggu

SEQ ID NO: 2190562 - RNA, 19 nt, Artificial Sequence
  Description of Artificial Sequence: Synthetic oligonucleotide
gccaguaacucgagucagg

SEQ ID NO: 2190563 - RNA, 19 nt, Artificial Sequence
  Description of Artificial Sequence: Synthetic oligonucleotide
auugauggaugaacucgua

SEQ ID NO: 2190564 - RNA, 19 nt, Artificial Sequence
  Description of Artificial Sequence: Synthetic oligonucleotide
guaacucgagucaggaaau

SEQ ID NO: 2190565 - RNA, 19 nt, Artificial Sequence
  Description of Artificial Sequence: Synthetic oligonucleotide
ugucuccgcuggacucugc

SEQ ID NO: 2190566 - RNA, 19 nt, Artificial Sequence
  Description of Artificial Sequence: Synthetic oligonucleotide
ccgguaucgccacuggaug

SEQ ID NO: 2190567 - RNA, 19 nt, Artificial Sequence
  Description of Artificial Sequence: Synthetic oligonucleotide
cuuugacagagugucugua

SEQ ID NO: 2190568 - RNA, 19 nt, Artificial Sequence
  Description of Artificial Sequence: Synthetic oligonucleotide
ccugacgaaucuuuucuaa

SEQ ID NO: 2190569 - RNA, 19 nt, Artificial Sequence
  Description of Artificial Sequence: Synthetic oligonucleotide
cuucggcugcuuguuugac

SEQ ID NO: 2190570 - RNA, 19 nt, Artificial Sequence
  Description of Artificial Sequence: Synthetic oligonucleotide
uugcagcagauggaccaau

SEQ ID NO: 2190571 - RNA, 19 nt, Artificial Sequence
  Description of Artificial Sequence: Synthetic oligonucleotide
aucaaucuuuucagcuaau

SEQ ID NO: 2190572 - RNA, 19 nt, Artificial Sequence
  Description of Artificial Sequence: Synthetic oligonucleotide
gccuugcguuugcucaugg

SEQ ID NO: 2190573 - RNA, 19 nt, Artificial Sequence
  Description of Artificial Sequence: Synthetic oligonucleotide
ccuugcguuugcucauggc

SEQ ID NO: 2190574 - RNA, 19 nt, Artificial Sequence
  Description of Artificial Sequence: Synthetic oligonucleotide
cuguacgcguuguacuugu

SEQ ID NO: 2190575 - RNA, 19 nt, Artificial Sequence
  Description of Artificial Sequence: Synthetic oligonucleotide
augucuccgcuggacucug

SEQ ID NO: 2190576 - RNA, 19 nt, Artificial Sequence
  Description of Artificial Sequence: Synthetic oligonucleotide
cugaagcugcuacaaacuu

SEQ ID NO: 2190577 - RNA, 19 nt, Artificial Sequence
  Description of Artificial Sequence: Synthetic oligonucleotide
guaccugggagcugccggu

SEQ ID NO: 2190578 - RNA, 19 nt, Artificial Sequence
  Description of Artificial Sequence: Synthetic oligonucleotide
cuguccacuggaaggggcu

SEQ ID NO: 2190579 - RNA, 19 nt, Artificial Sequence
  Description of Artificial Sequence: Synthetic oligonucleotide
cgaugcaacaacuucggcu

SEQ ID NO: 2190580 - RNA, 19 nt, Artificial Sequence
  Description of Artificial Sequence: Synthetic oligonucleotide
gggucccguaccugggagc

SEQ ID NO: 2190581 - RNA, 19 nt, Artificial Sequence
  Description of Artificial Sequence: Synthetic oligonucleotide
ggagcugccggugggacaa

SEQ ID NO: 2190582 - RNA, 19 nt, Artificial Sequence
  Description of Artificial Sequence: Synthetic oligonucleotide
ccaguaacucgagucagga

SEQ ID NO: 2190583 - RNA, 19 nt, Artificial Sequence
  Description of Artificial Sequence: Synthetic oligonucleotide
ucucgcccuuugacagagu

SEQ ID NO: 2190584 - RNA, 19 nt, Artificial Sequence
  Description of Artificial Sequence: Synthetic oligonucleotide
ccacuggauguaaucaaaa

SEQ ID NO: 2190585 - RNA, 19 nt, Artificial Sequence
  Description of Artificial Sequence: Synthetic oligonucleotide
cccagcaacuccagugauc

SEQ ID NO: 2190586 - RNA, 19 nt, Artificial Sequence
  Description of Artificial Sequence: Synthetic oligonucleotide
caacacgaugcaacaacuu

SEQ ID NO: 2190587 - RNA, 19 nt, Artificial Sequence
  Description of Artificial Sequence: Synthetic oligonucleotide
guaucgccacuggauguaa

SEQ ID NO: 2190588 - RNA, 19 nt, Artificial Sequence
  Description of Artificial Sequence: Synthetic oligonucleotide
ggcgccggggucccguacc

SEQ ID NO: 2190589 - RNA, 19 nt, Artificial Sequence
  Description of Artificial Sequence: Synthetic oligonucleotide
guguggguacuuugcuaua

SEQ ID NO: 2190590 - RNA, 19 nt, Artificial Sequence
  Description of Artificial Sequence: Synthetic oligonucleotide
gguaucgccacuggaugua

SEQ ID NO: 2190591 - RNA, 19 nt, Artificial Sequence
  Description of Artificial Sequence: Synthetic oligonucleotide
cugcuuuucuguacgcguu

SEQ ID NO: 2190592 - RNA, 19 nt, Artificial Sequence
  Description of Artificial Sequence: Synthetic oligonucleotide
gcaaacacccaugaauuuu

SEQ ID NO: 2190593 - RNA, 19 nt, Artificial Sequence
  Description of Artificial Sequence: Synthetic oligonucleotide
ugucgcuguugagcgucuc

SEQ ID NO: 2190594 - RNA, 19 nt, Artificial Sequence
  Description of Artificial Sequence: Synthetic oligonucleotide
ugauccccaaggggcggau

SEQ ID NO: 2190595 - RNA, 19 nt, Artificial Sequence
  Description of Artificial Sequence: Synthetic oligonucleotide
cauugauugugaagcccuu

SEQ ID NO: 2190596 - RNA, 19 nt, Artificial Sequence
  Description of Artificial Sequence: Synthetic oligonucleotide
gaauuuugucucgcccuuu

SEQ ID NO: 2190597 - RNA, 19 nt, Artificial Sequence
  Description of Artificial Sequence: Synthetic oligonucleotide
guucuacgagcaugucggu

SEQ ID NO: 2190598 - RNA, 19 nt, Artificial Sequence
  Description of Artificial Sequence: Synthetic oligonucleotide
gcguuugcucauggcgccg

SEQ ID NO: 2190599 - RNA, 19 nt, Artificial Sequence
  Description of Artificial Sequence: Synthetic oligonucleotide
gcgaguucuacgagcaugu

SEQ ID NO: 2190600 - RNA, 19 nt, Artificial Sequence
  Description of Artificial Sequence: Synthetic oligonucleotide
acgugaaguuugggugggu

SEQ ID NO: 2190601 - RNA, 19 nt, Artificial Sequence
  Description of Artificial Sequence: Synthetic oligonucleotide
agcgucuccugcggcgccu

SEQ ID NO: 2190602 - RNA, 19 nt, Artificial Sequence
  Description of Artificial Sequence: Synthetic oligonucleotide
gugauccccaaggggcgga

SEQ ID NO: 2190603 - RNA, 19 nt, Artificial Sequence
  Description of Artificial Sequence: Synthetic oligonucleotide
augucgcuguugagcgucu

SEQ ID NO: 2190604 - RNA, 19 nt, Artificial Sequence
  Description of Artificial Sequence: Synthetic oligonucleotide
cgugaaguuuggguggguc

SEQ ID NO: 2190605 - RNA, 19 nt, Artificial Sequence
  Description of Artificial Sequence: Synthetic oligonucleotide
ggggcggaugcuguacuca

SEQ ID NO: 2190606 - RNA, 19 nt, Artificial Sequence
  Description of Artificial Sequence: Synthetic oligonucleotide
ggcaaacacccaugaauuu

SEQ ID NO: 2190607 - RNA, 19 nt, Artificial Sequence
  Description of Artificial Sequence: Synthetic oligonucleotide
cguuugcucauggcgccgg

SEQ ID NO: 2190608 - RNA, 19 nt, Artificial Sequence
  Description of Artificial Sequence: Synthetic oligonucleotide
accucgucugaagcugcua

SEQ ID NO: 2190609 - RNA, 19 nt, Artificial Sequence
  Description of Artificial Sequence: Synthetic oligonucleotide
gagcgugagcucucauguu

SEQ ID NO: 2190610 - RNA, 19 nt, Artificial Sequence
  Description of Artificial Sequence: Synthetic oligonucleotide
ggucccguaccugggagcu

SEQ ID NO: 2190611 - RNA, 19 nt, Artificial Sequence
  Description of Artificial Sequence: Synthetic oligonucleotide
gaauggccuggcucacguu

SEQ ID NO: 2190612 - RNA, 19 nt, Artificial Sequence
  Description of Artificial Sequence: Synthetic oligonucleotide
ccuuugacagagugucugu

SEQ ID NO: 2190613 - RNA, 19 nt, Artificial Sequence
  Description of Artificial Sequence: Synthetic oligonucleotide
gucccguaccugggagcug

SEQ ID NO: 2190614 - RNA, 19 nt, Artificial Sequence
  Description of Artificial Sequence: Synthetic oligonucleotide
cccgguaucgccacuggau

SEQ ID NO: 2190615 - RNA, 19 nt, Artificial Sequence
  Description of Artificial Sequence: Synthetic oligonucleotide
gggcucccgguaucgccac

SEQ ID NO: 2190616 - RNA, 19 nt, Artificial Sequence
  Description of Artificial Sequence: Synthetic oligonucleotide
gggugggucagaagaacau

SEQ ID NO: 2190617 - RNA, 19 nt, Artificial Sequence
  Description of Artificial Sequence: Synthetic oligonucleotide
auggcgccggggucccgua

SEQ ID NO: 2190618 - RNA, 19 nt, Artificial Sequence
  Description of Artificial Sequence: Synthetic oligonucleotide
ccguaccugggagcugccg

SEQ ID NO: 2190619 - RNA, 19 nt, Artificial Sequence
  Description of Artificial Sequence: Synthetic oligonucleotide
gcuccacaacacgaugcaa

SEQ ID NO: 2190620 - RNA, 19 nt, Artificial Sequence
  Description of Artificial Sequence: Synthetic oligonucleotide
caccucgucugaagcugcu

SEQ ID NO: 2190621 - RNA, 19 nt, Artificial Sequence
  Description of Artificial Sequence: Synthetic oligonucleotide
gcgugagcucucauguucu

SEQ ID NO: 2190622 - RNA, 19 nt, Artificial Sequence
  Description of Artificial Sequence: Synthetic oligonucleotide
gggcggaugcuguacucau

SEQ ID NO: 2190623 - RNA, 19 nt, Artificial Sequence
  Description of Artificial Sequence: Synthetic oligonucleotide
ggacuccuagugggauaug

SEQ ID NO: 2190624 - RNA, 19 nt, Artificial Sequence
  Description of Artificial Sequence: Synthetic oligonucleotide
cuagagcgugagcucucau

SEQ ID NO: 2190625 - RNA, 19 nt, Artificial Sequence
  Description of Artificial Sequence: Synthetic oligonucleotide
cugcggcgccuugcguuug

SEQ ID NO: 2190626 - RNA, 19 nt, Artificial Sequence
  Description of Artificial Sequence: Synthetic oligonucleotide
caacuucggcugcuuguuu

SEQ ID NO: 2190627 - RNA, 19 nt, Artificial Sequence
  Description of Artificial Sequence: Synthetic oligonucleotide
ccacaacacgaugcaacaa

SEQ ID NO: 2190628 - RNA, 19 nt, Artificial Sequence
  Description of Artificial Sequence: Synthetic oligonucleotide
cccguaccugggagcugcc

SEQ ID NO: 2190629 - RNA, 19 nt, Artificial Sequence
  Description of Artificial Sequence: Synthetic oligonucleotide
cauggcgccggggucccgu

SEQ ID NO: 2190630 - RNA, 19 nt, Artificial Sequence
  Description of Artificial Sequence: Synthetic oligonucleotide
cgagcaugucggugauguc

SEQ ID NO: 2190631 - RNA, 19 nt, Artificial Sequence
  Description of Artificial Sequence: Synthetic oligonucleotide
gcaugucggugaugucgcu

SEQ ID NO: 2190632 - RNA, 19 nt, Artificial Sequence
  Description of Artificial Sequence: Synthetic oligonucleotide
cgguaucgccacuggaugu

SEQ ID NO: 2190633 - RNA, 19 nt, Artificial Sequence
  Description of Artificial Sequence: Synthetic oligonucleotide
gcgccuugcguuugcucau

SEQ ID NO: 2190634 - RNA, 19 nt, Artificial Sequence
  Description of Artificial Sequence: Synthetic oligonucleotide
gcuggacucugcaccucgu

SEQ ID NO: 2190635 - RNA, 19 nt, Artificial Sequence
  Description of Artificial Sequence: Synthetic oligonucleotide
cgccuugcguuugcucaug

SEQ ID NO: 2190636 - RNA, 19 nt, Artificial Sequence
  Description of Artificial Sequence: Synthetic oligonucleotide
ccugcggcgccuugcguuu

SEQ ID NO: 2190637 - RNA, 19 nt, Artificial Sequence
  Description of Artificial Sequence: Synthetic oligonucleotide
ggcggaugcuguacucauu

SEQ ID NO: 2190638 - RNA, 19 nt, Artificial Sequence
  Description of Artificial Sequence: Synthetic oligonucleotide
gcgccggggucccguaccu

SEQ ID NO: 2190639 - RNA, 19 nt, Artificial Sequence
  Description of Artificial Sequence: Synthetic oligonucleotide
gagcugccggugggacaau

SEQ ID NO: 2190640 - RNA, 19 nt, Artificial Sequence
  Description of Artificial Sequence: Synthetic oligonucleotide
cgccggggucccguaccug

SEQ ID NO: 2190641 - RNA, 19 nt, Artificial Sequence
  Description of Artificial Sequence: Synthetic oligonucleotide
gcgucuccugcggcgccuu

SEQ ID NO: 2190642 - RNA, 19 nt, Artificial Sequence
  Description of Artificial Sequence: Synthetic oligonucleotide
auuuucuagaagcacaccc

SEQ ID NO: 2190643 - RNA, 19 nt, Artificial Sequence
  Description of Artificial Sequence: Synthetic oligonucleotide
ugaagcaucauuuugcucc

SEQ ID NO: 2190644 - RNA, 19 nt, Artificial Sequence
  Description of Artificial Sequence: Synthetic oligonucleotide
  modified_base (7)..(7): a, c, u, g, unknown or other
aaaaggnggauucaauaag

SEQ ID NO: 2190645 - RNA, 19 nt, Artificial Sequence
  Description of Artificial Sequence: Synthetic oligonucleotide
  modified_base (8)..(8): a, c, u, g, unknown or other
  modified_base (17)..(17): a, c, u, g, unknown or other
uuuggggnggaaaaggngg

SEQ ID NO: 2190646 - RNA, 19 nt, Artificial Sequence
  Description of Artificial Sequence: Synthetic oligonucleotide
gaugaaacagcuuauuuuc

SEQ ID NO: 2190647 - RNA, 19 nt, Artificial Sequence
  Description of Artificial Sequence: Synthetic oligonucleotide
aaaaucauuacagugucgu

SEQ ID NO: 2190648 - RNA, 19 nt, Artificial Sequence
  Description of Artificial Sequence: Synthetic oligonucleotide
cuuuccaacggcuucaggg

SEQ ID NO: 2190649 - RNA, 19 nt, Artificial Sequence
  Description of Artificial Sequence: Synthetic oligonucleotide
  modified_base (6)..(6): a, c, u, g, unknown or other
aaaggnggauucaauaagg

SEQ ID NO: 2190650 - RNA, 19 nt, Artificial Sequence
  Description of Artificial Sequence: Synthetic oligonucleotide
cuccguauucccuagaagg

SEQ ID NO: 2190651 - RNA, 19 nt, Artificial Sequence
  Description of Artificial Sequence: Synthetic oligonucleotide
ucauuuugcuccaaucucc

SEQ ID NO: 2190652 - RNA, 19 nt, Artificial Sequence
  Description of Artificial Sequence: Synthetic oligonucleotide
aguccgcccauucugagcc

SEQ ID NO: 2190653 - RNA, 19 nt, Artificial Sequence
  Description of Artificial Sequence: Synthetic oligonucleotide
ucugggaugaaacagcuua

SEQ ID NO: 2190654 - RNA, 19 nt, Artificial Sequence
  Description of Artificial Sequence: Synthetic oligonucleotide
uuauuuucuagaagcacac

SEQ ID NO: 2190655 - RNA, 19 nt, Artificial Sequence
  Description of Artificial Sequence: Synthetic oligonucleotide
acaagggacgcucuuggcc

SEQ ID NO: 2190656 - RNA, 19 nt, Artificial Sequence
  Description of Artificial Sequence: Synthetic oligonucleotide
  modified_base (4)..(4): a, c, u, g, unknown or other
aggnggauucaauaaggac

SEQ ID NO: 2190657 - RNA, 19 nt, Artificial Sequence
  Description of Artificial Sequence: Synthetic oligonucleotide
aagugaaugcccugugcac

SEQ ID NO: 2190658 - RNA, 19 nt, Artificial Sequence
  Description of Artificial Sequence: Synthetic oligonucleotide
uggccauuggacaaccucg

SEQ ID NO: 2190659 - RNA, 19 nt, Artificial Sequence
  Description of Artificial Sequence: Synthetic oligonucleotide
ucaauaaggacucccaguu

SEQ ID NO: 2190660 - RNA, 19 nt, Artificial Sequence
  Description of Artificial Sequence: Synthetic oligonucleotide
uccguauucccuagaaggg

SEQ ID NO: 2190661 - RNA, 19 nt, Artificial Sequence
  Description of Artificial Sequence: Synthetic oligonucleotide
ucuagaagcacacccuggc

SEQ ID NO: 2190662 - RNA, 19 nt, Artificial Sequence
  Description of Artificial Sequence: Synthetic oligonucleotide
uuuucuagaagcacacccu

SEQ ID NO: 2190663 - RNA, 19 nt, Artificial Sequence
  Description of Artificial Sequence: Synthetic oligonucleotide
uuggacaaccucgacaacg

SEQ ID NO: 2190664 - RNA, 19 nt, Artificial Sequence
  Description of Artificial Sequence: Synthetic oligonucleotide
agguugagcauguauauca

SEQ ID NO: 2190665 - RNA, 19 nt, Artificial Sequence
  Description of Artificial Sequence: Synthetic oligonucleotide
cacgauacgacgugggucg

SEQ ID NO: 2190666 - RNA, 19 nt, Artificial Sequence
  Description of Artificial Sequence: Synthetic oligonucleotide
guuagugagacaagggacg

SEQ ID NO: 2190667 - RNA, 19 nt, Artificial Sequence
  Description of Artificial Sequence: Synthetic oligonucleotide
aaucaguucugaugaaacu

SEQ ID NO: 2190668 - RNA, 19 nt, Artificial Sequence
  Description of Artificial Sequence: Synthetic oligonucleotide
agacaaacauccaaauagc

SEQ ID NO: 2190669 - RNA, 19 nt, Artificial Sequence
  Description of Artificial Sequence: Synthetic oligonucleotide
uggauaaagagguuccucu

SEQ ID NO: 2190670 - RNA, 19 nt, Artificial Sequence
  Description of Artificial Sequence: Synthetic oligonucleotide
aucaguucugaugaaacuc

SEQ ID NO: 2190671 - RNA, 19 nt, Artificial Sequence
  Description of Artificial Sequence: Synthetic oligonucleotide
uucacuccagggcagagug

SEQ ID NO: 2190672 - RNA, 19 nt, Artificial Sequence
  Description of Artificial Sequence: Synthetic oligonucleotide
  modified_base (2)..(2): a, c, u, g, unknown or other
cngaaaucaguucugauga

SEQ ID NO: 2190673 - RNA, 19 nt, Artificial Sequence
  Description of Artificial Sequence: Synthetic oligonucleotide
uggaguuagugagacaagg

SEQ ID NO: 2190674 - RNA, 19 nt, Artificial Sequence
  Description of Artificial Sequence: Synthetic oligonucleotide
guucugaugaaacucccag

SEQ ID NO: 2190675 - RNA, 19 nt, Artificial Sequence
  Description of Artificial Sequence: Synthetic oligonucleotide
acaacgaguguucuugcuc

SEQ ID NO: 2190676 - RNA, 19 nt, Artificial Sequence
  Description of Artificial Sequence: Synthetic oligonucleotide
ugucgugcaagacaaacau

SEQ ID NO: 2190677 - RNA, 19 nt, Artificial Sequence
  Description of Artificial Sequence: Synthetic oligonucleotide
  modified_base (7)..(7): a, c, u, g, unknown or other
  modified_base (16)..(16): a, c, u, g, unknown or other
uuggggnggaaaaggngga

SEQ ID NO: 2190678 - RNA, 19 nt, Artificial Sequence
  Description of Artificial Sequence: Synthetic oligonucleotide
  modified_base (8)..(8): a, c, u, g, unknown or other
gaaaaggnggauucaauaa

SEQ ID NO: 2190679 - RNA, 19 nt, Artificial Sequence
  Description of Artificial Sequence: Synthetic oligonucleotide
acaacacaacaccugguuc

SEQ ID NO: 2190680 - RNA, 19 nt, Artificial Sequence
  Description of Artificial Sequence: Synthetic oligonucleotide
uucaauaaggacucccagu

SEQ ID NO: 2190681 - RNA, 19 nt, Artificial Sequence
  Description of Artificial Sequence: Synthetic oligonucleotide
aaucccauuaguggguguc

SEQ ID NO: 2190682 - RNA, 19 nt, Artificial Sequence
  Description of Artificial Sequence: Synthetic oligonucleotide
gaugcuagaagugcacagg

SEQ ID NO: 2190683 - RNA, 19 nt, Artificial Sequence
  Description of Artificial Sequence: Synthetic oligonucleotide
aaaucauuacagugucgug

SEQ ID NO: 2190684 - RNA, 19 nt, Artificial Sequence
  Description of Artificial Sequence: Synthetic oligonucleotide
ugcgugaaucccauuagug

SEQ ID NO: 2190685 - RNA, 19 nt, Artificial Sequence
  Description of Artificial Sequence: Synthetic oligonucleotide
acagcuuauuuucuagaag

SEQ ID NO: 2190686 - RNA, 19 nt, Artificial Sequence
  Description of Artificial Sequence: Synthetic oligonucleotide
agcucugcaauguuccuuc

SEQ ID NO: 2190687 - RNA, 19 nt, Artificial Sequence
  Description of Artificial Sequence: Synthetic oligonucleotide
agugucgugcaagacaaac

SEQ ID NO: 2190688 - RNA, 19 nt, Artificial Sequence
  Description of Artificial Sequence: Synthetic oligonucleotide
ucugcgugaaucccauuag

SEQ ID NO: 2190689 - RNA, 19 nt, Artificial Sequence
  Description of Artificial Sequence: Synthetic oligonucleotide
gaguuagugagacaaggga

SEQ ID NO: 2190690 - RNA, 19 nt, Artificial Sequence
  Description of Artificial Sequence: Synthetic oligonucleotide
gacgcacugacuucggaag

SEQ ID NO: 2190691 - RNA, 19 nt, Artificial Sequence
  Description of Artificial Sequence: Synthetic oligonucleotide
gauaaagagguuccucuca

SEQ ID NO: 2190692 - RNA, 19 nt, Artificial Sequence
  Description of Artificial Sequence: Synthetic oligonucleotide
ugaagugaaugcccugugc

SEQ ID NO: 2190693 - RNA, 19 nt, Artificial Sequence
  Description of Artificial Sequence: Synthetic oligonucleotide
aacuccucgaccgaggggu

SEQ ID NO: 2190694 - RNA, 19 nt, Artificial Sequence
  Description of Artificial Sequence: Synthetic oligonucleotide
agacaagggacgcucuugg

SEQ ID NO: 2190695 - RNA, 19 nt, Artificial Sequence
  Description of Artificial Sequence: Synthetic oligonucleotide
ucgacaacgaguguucuug

SEQ ID NO: 2190696 - RNA, 19 nt, Artificial Sequence
  Description of Artificial Sequence: Synthetic oligonucleotide
uaaaauccuggaguuagug

SEQ ID NO: 2190697 - RNA, 19 nt, Artificial Sequence
  Description of Artificial Sequence: Synthetic oligonucleotide
  modified_base (18)..(18): a, c, u, g, unknown or other
gacucccaaaccuacucng

SEQ ID NO: 2190698 - RNA, 19 nt, Artificial Sequence
  Description of Artificial Sequence: Synthetic oligonucleotide
ucugcaauguuccuucuuu

SEQ ID NO: 2190699 - RNA, 19 nt, Artificial Sequence
  Description of Artificial Sequence: Synthetic oligonucleotide
ugcagguugagcauguaua

SEQ ID NO: 2190700 - RNA, 19 nt, Artificial Sequence
  Description of Artificial Sequence: Synthetic oligonucleotide
auuacagugucgugcaaga

SEQ ID NO: 2190701 - RNA, 19 nt, Artificial Sequence
  Description of Artificial Sequence: Synthetic oligonucleotide
ugcaugggaccccagccgg

SEQ ID NO: 2190702 - RNA, 19 nt, Artificial Sequence
  Description of Artificial Sequence: Synthetic oligonucleotide
  modified_base (2)..(2): a, c, u, g, unknown or other
gnggauucaauaaggacuc

SEQ ID NO: 2190703 - RNA, 19 nt, Artificial Sequence
  Description of Artificial Sequence: Synthetic oligonucleotide
agugagacaagggacgcuc

SEQ ID NO: 2190704 - RNA, 19 nt, Artificial Sequence
  Description of Artificial Sequence: Synthetic oligonucleotide
acaaccucgacaacgagug

SEQ ID NO: 2190705 - RNA, 19 nt, Artificial Sequence
  Description of Artificial Sequence: Synthetic oligonucleotide
caagggacgcucuuggccc

SEQ ID NO: 2190706 - RNA, 19 nt, Artificial Sequence
  Description of Artificial Sequence: Synthetic oligonucleotide
uaucaagugcuguuucuca

SEQ ID NO: 2190707 - RNA, 19 nt, Artificial Sequence
  Description of Artificial Sequence: Synthetic oligonucleotide
uuuccaacggcuucagggu

SEQ ID NO: 2190708 - RNA, 19 nt, Artificial Sequence
  Description of Artificial Sequence: Synthetic oligonucleotide
  modified_base (11)..(11): a, c, u, g, unknown or other
aaaccuacucngaaaucag

SEQ ID NO: 2190709 - RNA, 19 nt, Artificial Sequence
  Description of Artificial Sequence: Synthetic oligonucleotide
  modified_base (6)..(6): a, c, u, g, unknown or other
uacucngaaaucaguucug

SEQ ID NO: 2190710 - RNA, 19 nt, Artificial Sequence
  Description of Artificial Sequence: Synthetic oligonucleotide
gauggcagacucccaaacc

SEQ ID NO: 2190711 - RNA, 19 nt, Artificial Sequence
  Description of Artificial Sequence: Synthetic oligonucleotide
aacgaguguucuugcuccg

SEQ ID NO: 2190712 - RNA, 19 nt, Artificial Sequence
  Description of Artificial Sequence: Synthetic oligonucleotide
cugguucugaagugaaugc

SEQ ID NO: 2190713 - RNA, 19 nt, Artificial Sequence
  Description of Artificial Sequence: Synthetic oligonucleotide
uggacaaccucgacaacga

SEQ ID NO: 2190714 - RNA, 19 nt, Artificial Sequence
  Description of Artificial Sequence: Synthetic oligonucleotide
uucugcgugaaucccauua

SEQ ID NO: 2190715 - RNA, 19 nt, Artificial Sequence
  Description of Artificial Sequence: Synthetic oligonucleotide
ugaccggucagcuccgcgg

SEQ ID NO: 2190716 - RNA, 19 nt, Artificial Sequence
  Description of Artificial Sequence: Synthetic oligonucleotide
uagaagugcacaggaagcc

SEQ ID NO: 2190717 - RNA, 19 nt, Artificial Sequence
  Description of Artificial Sequence: Synthetic oligonucleotide
aggaagccagcuuuccaac

SEQ ID NO: 2190718 - RNA, 19 nt, Artificial Sequence
  Description of Artificial Sequence: Synthetic oligonucleotide
ucggcugcugagaugcuag

SEQ ID NO: 2190719 - RNA, 19 nt, Artificial Sequence
  Description of Artificial Sequence: Synthetic oligonucleotide
uggauguugaagcaucauu

SEQ ID NO: 2190720 - RNA, 19 nt, Artificial Sequence
  Description of Artificial Sequence: Synthetic oligonucleotide
aagggacgcucuuggcccc

SEQ ID NO: 2190721 - RNA, 19 nt, Artificial Sequence
  Description of Artificial Sequence: Synthetic oligonucleotide
ucugagcccggcacgauac

SEQ ID NO: 2190722 - RNA, 19 nt, Artificial Sequence
  Description of Artificial Sequence: Synthetic oligonucleotide
uucugaugaaacucccaga

SEQ ID NO: 2190723 - RNA, 19 nt, Artificial Sequence
  Description of Artificial Sequence: Synthetic oligonucleotide
  modified_base (12)..(12): a, c, u, g, unknown or other
caaaccuacucngaaauca

SEQ ID NO: 2190724 - RNA, 19 nt, Artificial Sequence
  Description of Artificial Sequence: Synthetic oligonucleotide
auaaagagguuccucucau

SEQ ID NO: 2190725 - RNA, 19 nt, Artificial Sequence
  Description of Artificial Sequence: Synthetic oligonucleotide
uuagugagacaagggacgc

SEQ ID NO: 2190726 - RNA, 19 nt, Artificial Sequence
  Description of Artificial Sequence: Synthetic oligonucleotide
ugauggcagacucccaaac

SEQ ID NO: 2190727 - RNA, 19 nt, Artificial Sequence
  Description of Artificial Sequence: Synthetic oligonucleotide
gcgugaaucccauuagugg

SEQ ID NO: 2190728 - RNA, 19 nt, Artificial Sequence
  Description of Artificial Sequence: Synthetic oligonucleotide
  modified_base (5)..(5): a, c, u, g, unknown or other
aaggnggauucaauaagga

SEQ ID NO: 2190729 - RNA, 19 nt, Artificial Sequence
  Description of Artificial Sequence: Synthetic oligonucleotide
gaagugcacaggaagccag

SEQ ID NO: 2190730 - RNA, 19 nt, Artificial Sequence
  Description of Artificial Sequence: Synthetic oligonucleotide
ugguucugaagugaaugcc

SEQ ID NO: 2190731 - RNA, 19 nt, Artificial Sequence
  Description of Artificial Sequence: Synthetic oligonucleotide
augcuagaagugcacagga

SEQ ID NO: 2190732 - RNA, 19 nt, Artificial Sequence
  Description of Artificial Sequence: Synthetic oligonucleotide
auguauaucaagugcuguu

SEQ ID NO: 2190733 - RNA, 19 nt, Artificial Sequence
  Description of Artificial Sequence: Synthetic oligonucleotide
cauuacagugucgugcaag

SEQ ID NO: 2190734 - RNA, 19 nt, Artificial Sequence
  Description of Artificial Sequence: Synthetic oligonucleotide
gaaugcccugugcacagcc

SEQ ID NO: 2190735 - RNA, 19 nt, Artificial Sequence
  Description of Artificial Sequence: Synthetic oligonucleotide
auaaggacucccaguugcc

SEQ ID NO: 2190736 - RNA, 19 nt, Artificial Sequence
  Description of Artificial Sequence: Synthetic oligonucleotide
guaaggccuaaaauccugg

SEQ ID NO: 2190737 - RNA, 19 nt, Artificial Sequence
  Description of Artificial Sequence: Synthetic oligonucleotide
uccaaucuccgcucggggc

SEQ ID NO: 2190738 - RNA, 19 nt, Artificial Sequence
  Description of Artificial Sequence: Synthetic oligonucleotide
agaggcgggcguucugucc

SEQ ID NO: 2190739 - RNA, 19 nt, Artificial Sequence
  Description of Artificial Sequence: Synthetic oligonucleotide
acugacuucggaagcagag

SEQ ID NO: 2190740 - RNA, 19 nt, Artificial Sequence
  Description of Artificial Sequence: Synthetic oligonucleotide
  modified_base (10)..(10): a, c, u, g, unknown or other
aaccuacucngaaaucagu

SEQ ID NO: 2190741 - RNA, 19 nt, Artificial Sequence
  Description of Artificial Sequence: Synthetic oligonucleotide
uauuuucuagaagcacacc

SEQ ID NO: 2190742 - RNA, 19 nt, Artificial Sequence
  Description of Artificial Sequence: Synthetic oligonucleotide
  modified_base (7)..(7): a, c, u, g, unknown or other
cuacucngaaaucaguucu

SEQ ID NO: 2190743 - RNA, 19 nt, Artificial Sequence
  Description of Artificial Sequence: Synthetic oligonucleotide
cuuugcaugggaccccagc

SEQ ID NO: 2190744 - RNA, 19 nt, Artificial Sequence
  Description of Artificial Sequence: Synthetic oligonucleotide
  modified_base (9)..(9): a, c, u, g, unknown or other
  modified_base (18)..(18): a, c, u, g, unknown or other
guuuggggnggaaaaggng

SEQ ID NO: 2190745 - RNA, 19 nt, Artificial Sequence
  Description of Artificial Sequence: Synthetic oligonucleotide
cgugaaucccauuaguggg

SEQ ID NO: 2190746 - RNA, 19 nt, Artificial Sequence
  Description of Artificial Sequence: Synthetic oligonucleotide
ucucaucuuccggaguccg

SEQ ID NO: 2190747 - RNA, 19 nt, Artificial Sequence
  Description of Artificial Sequence: Synthetic oligonucleotide
gacaacgcaguggucgccg

SEQ ID NO: 2190748 - RNA, 19 nt, Artificial Sequence
  Description of Artificial Sequence: Synthetic oligonucleotide
ugcaauguuccuucuuuua

SEQ ID NO: 2190749 - RNA, 19 nt, Artificial Sequence
  Description of Artificial Sequence: Synthetic oligonucleotide
uuaguggguguccugcuuu

SEQ ID NO: 2190750 - RNA, 19 nt, Artificial Sequence
  Description of Artificial Sequence: Synthetic oligonucleotide
cacaguucacuccagggca

SEQ ID NO: 2190751 - RNA, 19 nt, Artificial Sequence
  Description of Artificial Sequence: Synthetic oligonucleotide
ucccaccccaccuaccgag

SEQ ID NO: 2190752 - RNA, 19 nt, Artificial Sequence
  Description of Artificial Sequence: Synthetic oligonucleotide
  modified_base (3)..(3): a, c, u, g, unknown or other
ggnggauucaauaaggacu

SEQ ID NO: 2190753 - RNA, 19 nt, Artificial Sequence
  Description of Artificial Sequence: Synthetic oligonucleotide
agugaaugcccugugcaca

SEQ ID NO: 2190754 - RNA, 19 nt, Artificial Sequence
  Description of Artificial Sequence: Synthetic oligonucleotide
auuggacaaccucgacaac

SEQ ID NO: 2190755 - RNA, 19 nt, Artificial Sequence
  Description of Artificial Sequence: Synthetic oligonucleotide
aggaugguaaggccuaaaa

SEQ ID NO: 2190756 - RNA, 19 nt, Artificial Sequence
  Description of Artificial Sequence: Synthetic oligonucleotide
gauacgacgugggucggug

SEQ ID NO: 2190757 - RNA, 19 nt, Artificial Sequence
  Description of Artificial Sequence: Synthetic oligonucleotide
aacgcaguggucgccgcag

SEQ ID NO: 2190758 - RNA, 19 nt, Artificial Sequence
  Description of Artificial Sequence: Synthetic oligonucleotide
gaggcgggcguucuguccc

SEQ ID NO: 2190759 - RNA, 19 nt, Artificial Sequence
  Description of Artificial Sequence: Synthetic oligonucleotide
ugaaucccauuagugggug

SEQ ID NO: 2190760 - RNA, 19 nt, Artificial Sequence
  Description of Artificial Sequence: Synthetic oligonucleotide
cagagagcggccagaggcg

SEQ ID NO: 2190761 - RNA, 19 nt, Artificial Sequence
  Description of Artificial Sequence: Synthetic oligonucleotide
ggaguuagugagacaaggg

SEQ ID NO: 2190762 - RNA, 19 nt, Artificial Sequence
  Description of Artificial Sequence: Synthetic oligonucleotide
  modified_base (19)..(19): a, c, u, g, unknown or other
agacucccaaaccuacucn

SEQ ID NO: 2190763 - RNA, 19 nt, Artificial Sequence
  Description of Artificial Sequence: Synthetic oligonucleotide
aucccauuagugggugucc

SEQ ID NO: 2190764 - RNA, 19 nt, Artificial Sequence
  Description of Artificial Sequence: Synthetic oligonucleotide
auacgacgugggucggugc

SEQ ID NO: 2190765 - RNA, 19 nt, Artificial Sequence
  Description of Artificial Sequence: Synthetic oligonucleotide
ugccgcuuagcucugcaau

SEQ ID NO: 2190766 - RNA, 19 nt, Artificial Sequence
  Description of Artificial Sequence: Synthetic oligonucleotide
  modified_base (9)..(9): a, c, u, g, unknown or other
ggaaaaggnggauucaaua

SEQ ID NO: 2190767 - RNA, 19 nt, Artificial Sequence
  Description of Artificial Sequence: Synthetic oligonucleotide
ugcuccguauucccuagaa

SEQ ID NO: 2190768 - RNA, 19 nt, Artificial Sequence
  Description of Artificial Sequence: Synthetic oligonucleotide
cuugcuccguauucccuag

SEQ ID NO: 2190769 - RNA, 19 nt, Artificial Sequence
  Description of Artificial Sequence: Synthetic oligonucleotide
acaacgcaguggucgccgc

SEQ ID NO: 2190770 - RNA, 19 nt, Artificial Sequence
  Description of Artificial Sequence: Synthetic oligonucleotide
uaaggacucccaguugccc

SEQ ID NO: 2190771 - RNA, 19 nt, Artificial Sequence
  Description of Artificial Sequence: Synthetic oligonucleotide
ugcuccaaucuccgcucgg

SEQ ID NO: 2190772 - RNA, 19 nt, Artificial Sequence
  Description of Artificial Sequence: Synthetic oligonucleotide
agcccggcacgauacgacg

SEQ ID NO: 2190773 - RNA, 19 nt, Artificial Sequence
  Description of Artificial Sequence: Synthetic oligonucleotide
cacacccuggccauuggac

SEQ ID NO: 2190774 - RNA, 19 nt, Artificial Sequence
  Description of Artificial Sequence: Synthetic oligonucleotide
caucauuuugcuccaaucu

SEQ ID NO: 2190775 - RNA, 19 nt, Artificial Sequence
  Description of Artificial Sequence: Synthetic oligonucleotide
gaccggucagcuccgcggg

SEQ ID NO: 2190776 - RNA, 19 nt, Artificial Sequence
  Description of Artificial Sequence: Synthetic oligonucleotide
ugcuagaagugcacaggaa

SEQ ID NO: 2190777 - RNA, 19 nt, Artificial Sequence
  Description of Artificial Sequence: Synthetic oligonucleotide
  modified_base (15)..(15): a, c, u, g, unknown or other
ucccaaaccuacucngaaa

SEQ ID NO: 2190778 - RNA, 19 nt, Artificial Sequence
  Description of Artificial Sequence: Synthetic oligonucleotide
uaccgaggcggacacuucu

SEQ ID NO: 2190779 - RNA, 19 nt, Artificial Sequence
  Description of Artificial Sequence: Synthetic oligonucleotide
cugagaugcuagaagugca

SEQ ID NO: 2190780 - RNA, 19 nt, Artificial Sequence
  Description of Artificial Sequence: Synthetic oligonucleotide
  modified_base (14)..(14): a, c, u, g, unknown or other
ucaggguuuggggnggaaa

SEQ ID NO: 2190781 - RNA, 19 nt, Artificial Sequence
  Description of Artificial Sequence: Synthetic oligonucleotide
agacgcacugacuucggaa

SEQ ID NO: 2190782 - RNA, 19 nt, Artificial Sequence
  Description of Artificial Sequence: Synthetic oligonucleotide
agaagcacacccuggccau

SEQ ID NO: 2190783 - RNA, 19 nt, Artificial Sequence
  Description of Artificial Sequence: Synthetic oligonucleotide
ggauucaauaaggacuccc

SEQ ID NO: 2190784 - RNA, 19 nt, Artificial Sequence
  Description of Artificial Sequence: Synthetic oligonucleotide
gagacaagggacgcucuug

SEQ ID NO: 2190785 - RNA, 19 nt, Artificial Sequence
  Description of Artificial Sequence: Synthetic oligonucleotide
cagacucccaaaccuacuc

SEQ ID NO: 2190786 - RNA, 19 nt, Artificial Sequence
  Description of Artificial Sequence: Synthetic oligonucleotide
aacggcucucggcugcuga

SEQ ID NO: 2190787 - RNA, 19 nt, Artificial Sequence
  Description of Artificial Sequence: Synthetic oligonucleotide
guugaagcaucauuuugcu

SEQ ID NO: 2190788 - RNA, 19 nt, Artificial Sequence
  Description of Artificial Sequence: Synthetic oligonucleotide
  modified_base (5)..(5): a, c, u, g, unknown or other
acucngaaaucaguucuga

SEQ ID NO: 2190789 - RNA, 19 nt, Artificial Sequence
  Description of Artificial Sequence: Synthetic oligonucleotide
gcugagaugcuagaagugc

SEQ ID NO: 2190790 - RNA, 19 nt, Artificial Sequence
  Description of Artificial Sequence: Synthetic oligonucleotide
guucugucccgcuggcggg

SEQ ID NO: 2190791 - RNA, 19 nt, Artificial Sequence
  Description of Artificial Sequence: Synthetic oligonucleotide
ucgaccgaggggugagagg

SEQ ID NO: 2190792 - RNA, 19 nt, Artificial Sequence
  Description of Artificial Sequence: Synthetic oligonucleotide
ucggaagcagagaccuggc

SEQ ID NO: 2190793 - RNA, 19 nt, Artificial Sequence
  Description of Artificial Sequence: Synthetic oligonucleotide
cuggccauuggacaaccuc

SEQ ID NO: 2190794 - RNA, 19 nt, Artificial Sequence
  Description of Artificial Sequence: Synthetic oligonucleotide
ggaagccagcuuuccaacg

SEQ ID NO: 2190795 - RNA, 19 nt, Artificial Sequence
  Description of Artificial Sequence: Synthetic oligonucleotide
gacgcucuuggccccugcg

SEQ ID NO: 2190796 - RNA, 19 nt, Artificial Sequence
  Description of Artificial Sequence: Synthetic oligonucleotide
gacaagggacgcucuuggc

SEQ ID NO: 2190797 - RNA, 19 nt, Artificial Sequence
  Description of Artificial Sequence: Synthetic oligonucleotide
  modified_base (2)..(2): a, c, u, g, unknown or other
  modified_base (11)..(11): a, c, u, g, unknown or other
gnggaaaaggnggauucaa

SEQ ID NO: 2190798 - RNA, 19 nt, Artificial Sequence
  Description of Artificial Sequence: Synthetic oligonucleotide
agagcggccagaggcgggc

SEQ ID NO: 2190799 - RNA, 19 nt, Artificial Sequence
  Description of Artificial Sequence: Synthetic oligonucleotide
agaagugcacaggaagcca

SEQ ID NO: 2190800 - RNA, 19 nt, Artificial Sequence
  Description of Artificial Sequence: Synthetic oligonucleotide
caacacaacaccugguucu

SEQ ID NO: 2190801 - RNA, 19 nt, Artificial Sequence
  Description of Artificial Sequence: Synthetic oligonucleotide
  modified_base (11)..(11): a, c, u, g, unknown or other
ggguuuggggnggaaaagg

SEQ ID NO: 2190802 - RNA, 19 nt, Artificial Sequence
  Description of Artificial Sequence: Synthetic oligonucleotide
ggucccaccccaccuaccg

SEQ ID NO: 2190803 - RNA, 19 nt, Artificial Sequence
  Description of Artificial Sequence: Synthetic oligonucleotide
gugcaagacaaacauccaa

SEQ ID NO: 2190804 - RNA, 19 nt, Artificial Sequence
  Description of Artificial Sequence: Synthetic oligonucleotide
ugugcacagccaucuggga

SEQ ID NO: 2190805 - RNA, 19 nt, Artificial Sequence
  Description of Artificial Sequence: Synthetic oligonucleotide
agccaucugggaugaaaca

SEQ ID NO: 2190806 - RNA, 19 nt, Artificial Sequence
  Description of Artificial Sequence: Synthetic oligonucleotide
uaguggguguccugcuuug

SEQ ID NO: 2190807 - RNA, 19 nt, Artificial Sequence
  Description of Artificial Sequence: Synthetic oligonucleotide
  modified_base (18)..(18): a, c, u, g, unknown or other
ggcuucaggguuuggggng

SEQ ID NO: 2190808 - RNA, 19 nt, Artificial Sequence
  Description of Artificial Sequence: Synthetic oligonucleotide
caugauggcagacucccaa

SEQ ID NO: 2190809 - RNA, 19 nt, Artificial Sequence
  Description of Artificial Sequence: Synthetic oligonucleotide
aggcggacacuucugcgug

SEQ ID NO: 2190810 - RNA, 19 nt, Artificial Sequence
  Description of Artificial Sequence: Synthetic oligonucleotide
ggucggugcagguugagca

SEQ ID NO: 2190811 - RNA, 19 nt, Artificial Sequence
  Description of Artificial Sequence: Synthetic oligonucleotide
gcaguggcggcccuggucc

SEQ ID NO: 2190812 - RNA, 19 nt, Artificial Sequence
  Description of Artificial Sequence: Synthetic oligonucleotide
ccaaucuccgcucggggcg

SEQ ID NO: 2190813 - RNA, 19 nt, Artificial Sequence
  Description of Artificial Sequence: Synthetic oligonucleotide
augaaacagcuuauuuucu

SEQ ID NO: 2190814 - RNA, 19 nt, Artificial Sequence
  Description of Artificial Sequence: Synthetic oligonucleotide
  modified_base (12)..(12): a, c, u, g, unknown or other
aggguuuggggnggaaaag

SEQ ID NO: 2190815 - RNA, 19 nt, Artificial Sequence
  Description of Artificial Sequence: Synthetic oligonucleotide
ggauaaagagguuccucuc

SEQ ID NO: 2190816 - RNA, 19 nt, Artificial Sequence
  Description of Artificial Sequence: Synthetic oligonucleotide
agagagcggccagaggcgg

SEQ ID NO: 2190817 - RNA, 19 nt, Artificial Sequence
  Description of Artificial Sequence: Synthetic oligonucleotide
cucggggcggccagggucc

SEQ ID NO: 2190818 - RNA, 19 nt, Artificial Sequence
  Description of Artificial Sequence: Synthetic oligonucleotide
ggcagacgcacugacuucg

SEQ ID NO: 2190819 - RNA, 19 nt, Artificial Sequence
  Description of Artificial Sequence: Synthetic oligonucleotide
  modified_base (16)..(16): a, c, u, g, unknown or other
cucccaaaccuacucngaa

SEQ ID NO: 2190820 - RNA, 19 nt, Artificial Sequence
  Description of Artificial Sequence: Synthetic oligonucleotide
caguggucgccgcaggccc

SEQ ID NO: 2190821 - RNA, 19 nt, Artificial Sequence
  Description of Artificial Sequence: Synthetic oligonucleotide
ucugccggagcgcgggcug

SEQ ID NO: 2190822 - RNA, 19 nt, Artificial Sequence
  Description of Artificial Sequence: Synthetic oligonucleotide
  modified_base (9)..(9): a, c, u, g, unknown or other
accuacucngaaaucaguu

SEQ ID NO: 2190823 - RNA, 19 nt, Artificial Sequence
  Description of Artificial Sequence: Synthetic oligonucleotide
ugccccaacggcucucggc

SEQ ID NO: 2190824 - RNA, 19 nt, Artificial Sequence
  Description of Artificial Sequence: Synthetic oligonucleotide
  modified_base (8)..(8): a, c, u, g, unknown or other
ccuacucngaaaucaguuc

SEQ ID NO: 2190825 - RNA, 19 nt, Artificial Sequence
  Description of Artificial Sequence: Synthetic oligonucleotide
uggguguccugcuuugcau

SEQ ID NO: 2190826 - RNA, 19 nt, Artificial Sequence
  Description of Artificial Sequence: Synthetic oligonucleotide
augauggcagacucccaaa

SEQ ID NO: 2190827 - RNA, 19 nt, Artificial Sequence
  Description of Artificial Sequence: Synthetic oligonucleotide
uccggaguccgcccauucu

SEQ ID NO: 2190828 - RNA, 19 nt, Artificial Sequence
  Description of Artificial Sequence: Synthetic oligonucleotide
  modified_base (4)..(4): a, c, u, g, unknown or other
  modified_base (13)..(13): a, c, u, g, unknown or other
gggnggaaaaggnggauuc

SEQ ID NO: 2190829 - RNA, 19 nt, Artificial Sequence
  Description of Artificial Sequence: Synthetic oligonucleotide
uggcagacucccaaaccua

SEQ ID NO: 2190830 - RNA, 19 nt, Artificial Sequence
  Description of Artificial Sequence: Synthetic oligonucleotide
ccugguucugaagugaaug

SEQ ID NO: 2190831 - RNA, 19 nt, Artificial Sequence
  Description of Artificial Sequence: Synthetic oligonucleotide
ccacaguucacuccagggc

SEQ ID NO: 2190832 - RNA, 19 nt, Artificial Sequence
  Description of Artificial Sequence: Synthetic oligonucleotide
uccaacggcuucaggguuu

SEQ ID NO: 2190833 - RNA, 19 nt, Artificial Sequence
  Description of Artificial Sequence: Synthetic oligonucleotide
uuccaacggcuucaggguu

SEQ ID NO: 2190834 - RNA, 19 nt, Artificial Sequence
  Description of Artificial Sequence: Synthetic oligonucleotide
aguucugaugaaacuccca

SEQ ID NO: 2190835 - RNA, 19 nt, Artificial Sequence
  Description of Artificial Sequence: Synthetic oligonucleotide
ucauuacagugucgugcaa

SEQ ID NO: 2190836 - RNA, 19 nt, Artificial Sequence
  Description of Artificial Sequence: Synthetic oligonucleotide
uucugagcccggcacgaua

SEQ ID NO: 2190837 - RNA, 19 nt, Artificial Sequence
  Description of Artificial Sequence: Synthetic oligonucleotide
uuacagugucgugcaagac

SEQ ID NO: 2190838 - RNA, 19 nt, Artificial Sequence
  Description of Artificial Sequence: Synthetic oligonucleotide
  modified_base (13)..(13): a, c, u, g, unknown or other
caggguuuggggnggaaaa

SEQ ID NO: 2190839 - RNA, 19 nt, Artificial Sequence
  Description of Artificial Sequence: Synthetic oligonucleotide
caucuuccggaguccgccc

SEQ ID NO: 2190840 - RNA, 19 nt, Artificial Sequence
  Description of Artificial Sequence: Synthetic oligonucleotide
acaguucacuccagggcag

SEQ ID NO: 2190841 - RNA, 19 nt, Artificial Sequence
  Description of Artificial Sequence: Synthetic oligonucleotide
acgcccugccgcuuagcuc

SEQ ID NO: 2190842 - RNA, 19 nt, Artificial Sequence
  Description of Artificial Sequence: Synthetic oligonucleotide
ugagcccggcacgauacga

SEQ ID NO: 2190843 - RNA, 19 nt, Artificial Sequence
  Description of Artificial Sequence: Synthetic oligonucleotide
agggcucugccggagcgcg

SEQ ID NO: 2190844 - RNA, 19 nt, Artificial Sequence
  Description of Artificial Sequence: Synthetic oligonucleotide
gacaaccucgacaacgagu

SEQ ID NO: 2190845 - RNA, 19 nt, Artificial Sequence
  Description of Artificial Sequence: Synthetic oligonucleotide
aaugcccugugcacagcca

SEQ ID NO: 2190846 - RNA, 19 nt, Artificial Sequence
  Description of Artificial Sequence: Synthetic oligonucleotide
caugggaccccagccgggg

SEQ ID NO: 2190847 - RNA, 19 nt, Artificial Sequence
  Description of Artificial Sequence: Synthetic oligonucleotide
agcacacccuggccauugg

SEQ ID NO: 2190848 - RNA, 19 nt, Artificial Sequence
  Description of Artificial Sequence: Synthetic oligonucleotide
guauucccuagaagggaug

SEQ ID NO: 2190849 - RNA, 19 nt, Artificial Sequence
  Description of Artificial Sequence: Synthetic oligonucleotide
ugagaauggucaggauggu

SEQ ID NO: 2190850 - RNA, 19 nt, Artificial Sequence
  Description of Artificial Sequence: Synthetic oligonucleotide
gggacgauggcagacgcac

SEQ ID NO: 2190851 - RNA, 19 nt, Artificial Sequence
  Description of Artificial Sequence: Synthetic oligonucleotide
ugggaugaaacagcuuauu

SEQ ID NO: 2190852 - RNA, 19 nt, Artificial Sequence
  Description of Artificial Sequence: Synthetic oligonucleotide
ucccauuaguggguguccu

SEQ ID NO: 2190853 - RNA, 19 nt, Artificial Sequence
  Description of Artificial Sequence: Synthetic oligonucleotide
aaucuccgcucggggcggc

SEQ ID NO: 2190854 - RNA, 19 nt, Artificial Sequence
  Description of Artificial Sequence: Synthetic oligonucleotide
aguucacuccagggcagag

SEQ ID NO: 2190855 - RNA, 19 nt, Artificial Sequence
  Description of Artificial Sequence: Synthetic oligonucleotide
caggggacgauggcagacg

SEQ ID NO: 2190856 - RNA, 19 nt, Artificial Sequence
  Description of Artificial Sequence: Synthetic oligonucleotide
uccucgaccgaggggugag

SEQ ID NO: 2190857 - RNA, 19 nt, Artificial Sequence
  Description of Artificial Sequence: Synthetic oligonucleotide
gaggcggacacuucugcgu

SEQ ID NO: 2190858 - RNA, 19 nt, Artificial Sequence
  Description of Artificial Sequence: Synthetic oligonucleotide
caccccaccuaccgaggcg

SEQ ID NO: 2190859 - RNA, 19 nt, Artificial Sequence
  Description of Artificial Sequence: Synthetic oligonucleotide
cugaccggucagcuccgcg

SEQ ID NO: 2190860 - RNA, 19 nt, Artificial Sequence
  Description of Artificial Sequence: Synthetic oligonucleotide
gacaacgaguguucuugcu

SEQ ID NO: 2190861 - RNA, 19 nt, Artificial Sequence
  Description of Artificial Sequence: Synthetic oligonucleotide
gcuccguauucccuagaag

SEQ ID NO: 2190862 - RNA, 19 nt, Artificial Sequence
  Description of Artificial Sequence: Synthetic oligonucleotide
uccuggaguuagugagaca

SEQ ID NO: 2190863 - RNA, 19 nt, Artificial Sequence
  Description of Artificial Sequence: Synthetic oligonucleotide
cucgaccgaggggugagag

SEQ ID NO: 2190864 - RNA, 19 nt, Artificial Sequence
  Description of Artificial Sequence: Synthetic oligonucleotide
gccgcuuagcucugcaaug

SEQ ID NO: 2190865 - RNA, 19 nt, Artificial Sequence
  Description of Artificial Sequence: Synthetic oligonucleotide
ucuuccggaguccgcccau

SEQ ID NO: 2190866 - RNA, 19 nt, Artificial Sequence
  Description of Artificial Sequence: Synthetic oligonucleotide
uagugagacaagggacgcu

SEQ ID NO: 2190867 - RNA, 19 nt, Artificial Sequence
  Description of Artificial Sequence: Synthetic oligonucleotide
cagguugagcauguauauc

SEQ ID NO: 2190868 - RNA, 19 nt, Artificial Sequence
  Description of Artificial Sequence: Synthetic oligonucleotide
gggcguucugucccgcugg

SEQ ID NO: 2190869 - RNA, 19 nt, Artificial Sequence
  Description of Artificial Sequence: Synthetic oligonucleotide
acuucugcgugaaucccau

SEQ ID NO: 2190870 - RNA, 19 nt, Artificial Sequence
  Description of Artificial Sequence: Synthetic oligonucleotide
ggauguugaagcaucauuu

SEQ ID NO: 2190871 - RNA, 19 nt, Artificial Sequence
  Description of Artificial Sequence: Synthetic oligonucleotide
caaucuccgcucggggcgg

SEQ ID NO: 2190872 - RNA, 19 nt, Artificial Sequence
  Description of Artificial Sequence: Synthetic oligonucleotide
ugaaugcccugugcacagc

SEQ ID NO: 2190873 - RNA, 19 nt, Artificial Sequence
  Description of Artificial Sequence: Synthetic oligonucleotide
cuucggaagcagagaccug

SEQ ID NO: 2190874 - RNA, 19 nt, Artificial Sequence
  Description of Artificial Sequence: Synthetic oligonucleotide
  modified_base (17)..(17): a, c, u, g, unknown or other
acucccaaaccuacucnga

SEQ ID NO: 2190875 - RNA, 19 nt, Artificial Sequence
  Description of Artificial Sequence: Synthetic oligonucleotide
uugcuccguauucccuaga

SEQ ID NO: 2190876 - RNA, 19 nt, Artificial Sequence
  Description of Artificial Sequence: Synthetic oligonucleotide
cuggucccaccccaccuac

SEQ ID NO: 2190877 - RNA, 19 nt, Artificial Sequence
  Description of Artificial Sequence: Synthetic oligonucleotide
gcuccaaucuccgcucggg

SEQ ID NO: 2190878 - RNA, 19 nt, Artificial Sequence
  Description of Artificial Sequence: Synthetic oligonucleotide
guucugaagugaaugcccu

SEQ ID NO: 2190879 - RNA, 19 nt, Artificial Sequence
  Description of Artificial Sequence: Synthetic oligonucleotide
auucccuagaagggauggu

SEQ ID NO: 2190880 - RNA, 19 nt, Artificial Sequence
  Description of Artificial Sequence: Synthetic oligonucleotide
ugcccugugcacagccauc

SEQ ID NO: 2190881 - RNA, 19 nt, Artificial Sequence
  Description of Artificial Sequence: Synthetic oligonucleotide
cugagcccggcacgauacg

SEQ ID NO: 2190882 - RNA, 19 nt, Artificial Sequence
  Description of Artificial Sequence: Synthetic oligonucleotide
caccuaccgaggcggacac

SEQ ID NO: 2190883 - RNA, 19 nt, Artificial Sequence
  Description of Artificial Sequence: Synthetic oligonucleotide
  modified_base (13)..(13): a, c, u, g, unknown or other
ccaaaccuacucngaaauc

SEQ ID NO: 2190884 - RNA, 19 nt, Artificial Sequence
  Description of Artificial Sequence: Synthetic oligonucleotide
cugacuucggaagcagaga

SEQ ID NO: 2190885 - RNA, 19 nt, Artificial Sequence
  Description of Artificial Sequence: Synthetic oligonucleotide
cagagugggacaacgcagu

SEQ ID NO: 2190886 - RNA, 19 nt, Artificial Sequence
  Description of Artificial Sequence: Synthetic oligonucleotide
  modified_base (17)..(17): a, c, u, g, unknown or other
gcuucaggguuuggggngg

SEQ ID NO: 2190887 - RNA, 19 nt, Artificial Sequence
  Description of Artificial Sequence: Synthetic oligonucleotide
gagagcggccagaggcggg

SEQ ID NO: 2190888 - RNA, 19 nt, Artificial Sequence
  Description of Artificial Sequence: Synthetic oligonucleotide
accggucagcuccgcgggg

SEQ ID NO: 2190889 - RNA, 19 nt, Artificial Sequence
  Description of Artificial Sequence: Synthetic oligonucleotide
cuaaaauccuggaguuagu

SEQ ID NO: 2190890 - RNA, 19 nt, Artificial Sequence
  Description of Artificial Sequence: Synthetic oligonucleotide
ggaugguaaggccuaaaau

SEQ ID NO: 2190891 - RNA, 19 nt, Artificial Sequence
  Description of Artificial Sequence: Synthetic oligonucleotide
  modified_base (6)..(6): a, c, u, g, unknown or other
  modified_base (15)..(15): a, c, u, g, unknown or other
uggggnggaaaaggnggau

SEQ ID NO: 2190892 - RNA, 19 nt, Artificial Sequence
  Description of Artificial Sequence: Synthetic oligonucleotide
agcgcgggcugaccgguca

SEQ ID NO: 2190893 - RNA, 19 nt, Artificial Sequence
  Description of Artificial Sequence: Synthetic oligonucleotide
ggaguccgcccauucugag

SEQ ID NO: 2190894 - RNA, 19 nt, Artificial Sequence
  Description of Artificial Sequence: Synthetic oligonucleotide
ggacaaccucgacaacgag

SEQ ID NO: 2190895 - RNA, 19 nt, Artificial Sequence
  Description of Artificial Sequence: Synthetic oligonucleotide
gagaauggucaggauggua

SEQ ID NO: 2190896 - RNA, 19 nt, Artificial Sequence
  Description of Artificial Sequence: Synthetic oligonucleotide
gucgugcaagacaaacauc

SEQ ID NO: 2190897 - RNA, 19 nt, Artificial Sequence
  Description of Artificial Sequence: Synthetic oligonucleotide
ucaggaugguaaggccuaa

SEQ ID NO: 2190898 - RNA, 19 nt, Artificial Sequence
  Description of Artificial Sequence: Synthetic oligonucleotide
  modified_base (3)..(3): a, c, u, g, unknown or other
  modified_base (12)..(12): a, c, u, g, unknown or other
ggnggaaaaggnggauuca

SEQ ID NO: 2190899 - RNA, 19 nt, Artificial Sequence
  Description of Artificial Sequence: Synthetic oligonucleotide
ccggggaccagcuggauca

SEQ ID NO: 2190900 - RNA, 19 nt, Artificial Sequence
  Description of Artificial Sequence: Synthetic oligonucleotide
aggcgggcguucugucccg

SEQ ID NO: 2190901 - RNA, 19 nt, Artificial Sequence
  Description of Artificial Sequence: Synthetic oligonucleotide
ggcagacucccaaaccuac

SEQ ID NO: 2190902 - RNA, 19 nt, Artificial Sequence
  Description of Artificial Sequence: Synthetic oligonucleotide
cacugacuucggaagcaga

SEQ ID NO: 2190903 - RNA, 19 nt, Artificial Sequence
  Description of Artificial Sequence: Synthetic oligonucleotide
gggugagaggcaggggacg

SEQ ID NO: 2190904 - RNA, 19 nt, Artificial Sequence
  Description of Artificial Sequence: Synthetic oligonucleotide
cuaccgaggcggacacuuc

SEQ ID NO: 2190905 - RNA, 19 nt, Artificial Sequence
  Description of Artificial Sequence: Synthetic oligonucleotide
acgauggcagacgcacuga

SEQ ID NO: 2190906 - RNA, 19 nt, Artificial Sequence
  Description of Artificial Sequence: Synthetic oligonucleotide
acgauacgacgugggucgg

SEQ ID NO: 2190907 - RNA, 19 nt, Artificial Sequence
  Description of Artificial Sequence: Synthetic oligonucleotide
gugaaucccauuagugggu

SEQ ID NO: 2190908 - RNA, 19 nt, Artificial Sequence
  Description of Artificial Sequence: Synthetic oligonucleotide
gcacgauacgacguggguc

SEQ ID NO: 2190909 - RNA, 19 nt, Artificial Sequence
  Description of Artificial Sequence: Synthetic oligonucleotide
acgaguguucuugcuccgu

SEQ ID NO: 2190910 - RNA, 19 nt, Artificial Sequence
  Description of Artificial Sequence: Synthetic oligonucleotide
  modified_base (14)..(14): a, c, u, g, unknown or other
cccaaaccuacucngaaau

SEQ ID NO: 2190911 - RNA, 19 nt, Artificial Sequence
  Description of Artificial Sequence: Synthetic oligonucleotide
caccugguucugaagugaa

SEQ ID NO: 2190912 - RNA, 19 nt, Artificial Sequence
  Description of Artificial Sequence: Synthetic oligonucleotide
gaaucccauuagugggugu

SEQ ID NO: 2190913 - RNA, 19 nt, Artificial Sequence
  Description of Artificial Sequence: Synthetic oligonucleotide
gauggcagacgcacugacu

SEQ ID NO: 2190914 - RNA, 19 nt, Artificial Sequence
  Description of Artificial Sequence: Synthetic oligonucleotide
gagggcucugccggagcgc

SEQ ID NO: 2190915 - RNA, 19 nt, Artificial Sequence
  Description of Artificial Sequence: Synthetic oligonucleotide
ugggucggugcagguugag

SEQ ID NO: 2190916 - RNA, 19 nt, Artificial Sequence
  Description of Artificial Sequence: Synthetic oligonucleotide
gcacugacuucggaagcag

SEQ ID NO: 2190917 - RNA, 19 nt, Artificial Sequence
  Description of Artificial Sequence: Synthetic oligonucleotide
cauuaguggguguccugcu

SEQ ID NO: 2190918 - RNA, 19 nt, Artificial Sequence
  Description of Artificial Sequence: Synthetic oligonucleotide
accgaggcggacacuucug

SEQ ID NO: 2190919 - RNA, 19 nt, Artificial Sequence
  Description of Artificial Sequence: Synthetic oligonucleotide
gguugagcauguauaucaa

SEQ ID NO: 2190920 - RNA, 19 nt, Artificial Sequence
  Description of Artificial Sequence: Synthetic oligonucleotide
gccuggauguugaagcauc

SEQ ID NO: 2190921 - RNA, 19 nt, Artificial Sequence
  Description of Artificial Sequence: Synthetic oligonucleotide
gccccugcgccacaguuca

SEQ ID NO: 2190922 - RNA, 19 nt, Artificial Sequence
  Description of Artificial Sequence: Synthetic oligonucleotide
aucuccgcucggggcggcc

SEQ ID NO: 2190923 - RNA, 19 nt, Artificial Sequence
  Description of Artificial Sequence: Synthetic oligonucleotide
cgaggcggacacuucugcg

SEQ ID NO: 2190924 - RNA, 19 nt, Artificial Sequence
  Description of Artificial Sequence: Synthetic oligonucleotide
cugggaugaaacagcuuau

SEQ ID NO: 2190925 - RNA, 19 nt, Artificial Sequence
  Description of Artificial Sequence: Synthetic oligonucleotide
cugcgugaaucccauuagu

SEQ ID NO: 2190926 - RNA, 19 nt, Artificial Sequence
  Description of Artificial Sequence: Synthetic oligonucleotide
ccgaggcggacacuucugc

SEQ ID NO: 2190927 - RNA, 19 nt, Artificial Sequence
  Description of Artificial Sequence: Synthetic oligonucleotide
ggccuaaaauccuggaguu

SEQ ID NO: 2190928 - RNA, 19 nt, Artificial Sequence
  Description of Artificial Sequence: Synthetic oligonucleotide
cccaacggcucucggcugc

SEQ ID NO: 2190929 - RNA, 19 nt, Artificial Sequence
  Description of Artificial Sequence: Synthetic oligonucleotide
agcggccagaggcgggcgu

SEQ ID NO: 2190930 - RNA, 19 nt, Artificial Sequence
  Description of Artificial Sequence: Synthetic oligonucleotide
gccauuggacaaccucgac

SEQ ID NO: 2190931 - RNA, 19 nt, Artificial Sequence
  Description of Artificial Sequence: Synthetic oligonucleotide
caguggcggcccugguccc

SEQ ID NO: 2190932 - RNA, 19 nt, Artificial Sequence
  Description of Artificial Sequence: Synthetic oligonucleotide
cccauuaguggguguccug

SEQ ID NO: 2190933 - RNA, 19 nt, Artificial Sequence
  Description of Artificial Sequence: Synthetic oligonucleotide
cagacgcacugacuucgga

SEQ ID NO: 2190934 - RNA, 19 nt, Artificial Sequence
  Description of Artificial Sequence: Synthetic oligonucleotide
ccuagaagggaugguguca

SEQ ID NO: 2190935 - RNA, 19 nt, Artificial Sequence
  Description of Artificial Sequence: Synthetic oligonucleotide
gagcggccagaggcgggcg

SEQ ID NO: 2190936 - RNA, 19 nt, Artificial Sequence
  Description of Artificial Sequence: Synthetic oligonucleotide
ggcguucugucccgcuggc

SEQ ID NO: 2190937 - RNA, 19 nt, Artificial Sequence
  Description of Artificial Sequence: Synthetic oligonucleotide
cgacaacgaguguucuugc

SEQ ID NO: 2190938 - RNA, 19 nt, Artificial Sequence
  Description of Artificial Sequence: Synthetic oligonucleotide
cugccccaacggcucucgg

SEQ ID NO: 2190939 - RNA, 19 nt, Artificial Sequence
  Description of Artificial Sequence: Synthetic oligonucleotide
gcagacgcacugacuucgg

SEQ ID NO: 2190940 - RNA, 19 nt, Artificial Sequence
  Description of Artificial Sequence: Synthetic oligonucleotide
ggccauuggacaaccucga

SEQ ID NO: 2190941 - RNA, 19 nt, Artificial Sequence
  Description of Artificial Sequence: Synthetic oligonucleotide
  modified_base (16)..(16): a, c, u, g, unknown or other
cuucaggguuuggggngga

SEQ ID NO: 2190942 - RNA, 19 nt, Artificial Sequence
  Description of Artificial Sequence: Synthetic oligonucleotide
accugguucugaagugaau

SEQ ID NO: 2190943 - RNA, 19 nt, Artificial Sequence
  Description of Artificial Sequence: Synthetic oligonucleotide
cuccgcucggggcggccag

SEQ ID NO: 2190944 - RNA, 19 nt, Artificial Sequence
  Description of Artificial Sequence: Synthetic oligonucleotide
guccgcccauucugagccc

SEQ ID NO: 2190945 - RNA, 19 nt, Artificial Sequence
  Description of Artificial Sequence: Synthetic oligonucleotide
gcaggggacgauggcagac

SEQ ID NO: 2190946 - RNA, 19 nt, Artificial Sequence
  Description of Artificial Sequence: Synthetic oligonucleotide
caacgcaguggucgccgca

SEQ ID NO: 2190947 - RNA, 19 nt, Artificial Sequence
  Description of Artificial Sequence: Synthetic oligonucleotide
ucccgcuggcgggcgagca

SEQ ID NO: 2190948 - RNA, 19 nt, Artificial Sequence
  Description of Artificial Sequence: Synthetic oligonucleotide
auucugagcccggcacgau

SEQ ID NO: 2190949 - RNA, 19 nt, Artificial Sequence
  Description of Artificial Sequence: Synthetic oligonucleotide
aucugggaugaaacagcuu

SEQ ID NO: 2190950 - RNA, 19 nt, Artificial Sequence
  Description of Artificial Sequence: Synthetic oligonucleotide
gggucggugcagguugagc

SEQ ID NO: 2190951 - RNA, 19 nt, Artificial Sequence
  Description of Artificial Sequence: Synthetic oligonucleotide
ggacaacgcaguggucgcc

SEQ ID NO: 2190952 - RNA, 19 nt, Artificial Sequence
  Description of Artificial Sequence: Synthetic oligonucleotide
gcaugggaccccagccggg

SEQ ID NO: 2190953 - RNA, 19 nt, Artificial Sequence
  Description of Artificial Sequence: Synthetic oligonucleotide
cggcacgauacgacguggg

SEQ ID NO: 2190954 - RNA, 19 nt, Artificial Sequence
  Description of Artificial Sequence: Synthetic oligonucleotide
gccccaacggcucucggcu

SEQ ID NO: 2190955 - RNA, 19 nt, Artificial Sequence
  Description of Artificial Sequence: Synthetic oligonucleotide
cugccgcuuagcucugcaa

SEQ ID NO: 2190956 - RNA, 19 nt, Artificial Sequence
  Description of Artificial Sequence: Synthetic oligonucleotide
ccguauucccuagaaggga

SEQ ID NO: 2190957 - RNA, 19 nt, Artificial Sequence
  Description of Artificial Sequence: Synthetic oligonucleotide
caguucacuccagggcaga

SEQ ID NO: 2190958 - RNA, 19 nt, Artificial Sequence
  Description of Artificial Sequence: Synthetic oligonucleotide
aguggcggcccugguccca

SEQ ID NO: 2190959 - RNA, 19 nt, Artificial Sequence
  Description of Artificial Sequence: Synthetic oligonucleotide
ggcacgauacgacgugggu

SEQ ID NO: 2190960 - RNA, 19 nt, Artificial Sequence
  Description of Artificial Sequence: Synthetic oligonucleotide
ggcugaccggucagcuccg

SEQ ID NO: 2190961 - RNA, 19 nt, Artificial Sequence
  Description of Artificial Sequence: Synthetic oligonucleotide
gacgugggucggugcaggu

SEQ ID NO: 2190962 - RNA, 19 nt, Artificial Sequence
  Description of Artificial Sequence: Synthetic oligonucleotide
cgugcaagacaaacaucca

SEQ ID NO: 2190963 - RNA, 19 nt, Artificial Sequence
  Description of Artificial Sequence: Synthetic oligonucleotide
  modified_base (5)..(5): a, c, u, g, unknown or other
  modified_base (14)..(14): a, c, u, g, unknown or other
ggggnggaaaaggnggauu

SEQ ID NO: 2190964 - RNA, 19 nt, Artificial Sequence
  Description of Artificial Sequence: Synthetic oligonucleotide
acgugggucggugcagguu

SEQ ID NO: 2190965 - RNA, 19 nt, Artificial Sequence
  Description of Artificial Sequence: Synthetic oligonucleotide
cucgacaacgaguguucuu

SEQ ID NO: 2190966 - RNA, 19 nt, Artificial Sequence
  Description of Artificial Sequence: Synthetic oligonucleotide
ccugccccaacggcucucg

SEQ ID NO: 2190967 - RNA, 19 nt, Artificial Sequence
  Description of Artificial Sequence: Synthetic oligonucleotide
cacgcccugccgcuuagcu

SEQ ID NO: 2190968 - RNA, 19 nt, Artificial Sequence
  Description of Artificial Sequence: Synthetic oligonucleotide
ccaacggcuucaggguuug

SEQ ID NO: 2190969 - RNA, 19 nt, Artificial Sequence
  Description of Artificial Sequence: Synthetic oligonucleotide
caggaugguaaggccuaaa

SEQ ID NO: 2190970 - RNA, 19 nt, Artificial Sequence
  Description of Artificial Sequence: Synthetic oligonucleotide
ggcggacacuucugcguga

SEQ ID NO: 2190971 - RNA, 19 nt, Artificial Sequence
  Description of Artificial Sequence: Synthetic oligonucleotide
gcguucugucccgcuggcg

SEQ ID NO: 2190972 - RNA, 19 nt, Artificial Sequence
  Description of Artificial Sequence: Synthetic oligonucleotide
ggcaggggacgauggcaga

SEQ ID NO: 2190973 - RNA, 19 nt, Artificial Sequence
  Description of Artificial Sequence: Synthetic oligonucleotide
gccggggaccagcuggauc

SEQ ID NO: 2190974 - RNA, 19 nt, Artificial Sequence
  Description of Artificial Sequence: Synthetic oligonucleotide
cucggcugcugagaugcua

SEQ ID NO: 2190975 - RNA, 19 nt, Artificial Sequence
  Description of Artificial Sequence: Synthetic oligonucleotide
agggacgcucuuggccccu

SEQ ID NO: 2190976 - RNA, 19 nt, Artificial Sequence
  Description of Artificial Sequence: Synthetic oligonucleotide
cagugucgugcaagacaaa

SEQ ID NO: 2190977 - RNA, 19 nt, Artificial Sequence
  Description of Artificial Sequence: Synthetic oligonucleotide
cccuggccauuggacaacc

SEQ ID NO: 2190978 - RNA, 19 nt, Artificial Sequence
  Description of Artificial Sequence: Synthetic oligonucleotide
cuggauguugaagcaucau

SEQ ID NO: 2190979 - RNA, 19 nt, Artificial Sequence
  Description of Artificial Sequence: Synthetic oligonucleotide
gugggacaacgcagugguc

SEQ ID NO: 2190980 - RNA, 19 nt, Artificial Sequence
  Description of Artificial Sequence: Synthetic oligonucleotide
caacggcucucggcugcug

SEQ ID NO: 2190981 - RNA, 19 nt, Artificial Sequence
  Description of Artificial Sequence: Synthetic oligonucleotide
ccaccuaccgaggcggaca

SEQ ID NO: 2190982 - RNA, 19 nt, Artificial Sequence
  Description of Artificial Sequence: Synthetic oligonucleotide
cuccucgaccgagggguga

SEQ ID NO: 2190983 - RNA, 19 nt, Artificial Sequence
  Description of Artificial Sequence: Synthetic oligonucleotide
cguauucccuagaagggau

SEQ ID NO: 2190984 - RNA, 19 nt, Artificial Sequence
  Description of Artificial Sequence: Synthetic oligonucleotide
accuaccgaggcggacacu

SEQ ID NO: 2190985 - RNA, 19 nt, Artificial Sequence
  Description of Artificial Sequence: Synthetic oligonucleotide
ggcucucggcugcugagau

SEQ ID NO: 2190986 - RNA, 19 nt, Artificial Sequence
  Description of Artificial Sequence: Synthetic oligonucleotide
ggccccugcgccacaguuc

SEQ ID NO: 2190987 - RNA, 19 nt, Artificial Sequence
  Description of Artificial Sequence: Synthetic oligonucleotide
gcgcgggcugaccggucag

SEQ ID NO: 2190988 - RNA, 19 nt, Artificial Sequence
  Description of Artificial Sequence: Synthetic oligonucleotide
caaccucgacaacgagugu

SEQ ID NO: 2190989 - RNA, 19 nt, Artificial Sequence
  Description of Artificial Sequence: Synthetic oligonucleotide
ccugccgcuuagcucugca

SEQ ID NO: 2190990 - RNA, 19 nt, Artificial Sequence
  Description of Artificial Sequence: Synthetic oligonucleotide
gcggacacuucugcgugaa

SEQ ID NO: 2190991 - RNA, 19 nt, Artificial Sequence
  Description of Artificial Sequence: Synthetic oligonucleotide
gcagacucccaaaccuacu

SEQ ID NO: 2190992 - RNA, 19 nt, Artificial Sequence
  Description of Artificial Sequence: Synthetic oligonucleotide
ggcggccaggguccagaga

SEQ ID NO: 2190993 - RNA, 19 nt, Artificial Sequence
  Description of Artificial Sequence: Synthetic oligonucleotide
cgggcguucugucccgcug

SEQ ID NO: 2190994 - RNA, 19 nt, Artificial Sequence
  Description of Artificial Sequence: Synthetic oligonucleotide
cggaguccgcccauucuga

SEQ ID NO: 2190995 - RNA, 19 nt, Artificial Sequence
  Description of Artificial Sequence: Synthetic oligonucleotide
gcugaccggucagcuccgc

SEQ ID NO: 2190996 - RNA, 19 nt, Artificial Sequence
  Description of Artificial Sequence: Synthetic oligonucleotide
ccuaccgaggcggacacuu

SEQ ID NO: 2190997 - RNA, 19 nt, Artificial Sequence
  Description of Artificial Sequence: Synthetic oligonucleotide
cccaccuaccgaggcggac

SEQ ID NO: 2190998 - RNA, 19 nt, Artificial Sequence
  Description of Artificial Sequence: Synthetic oligonucleotide
cgaguguucuugcuccgua

SEQ ID NO: 2190999 - RNA, 19 nt, Artificial Sequence
  Description of Artificial Sequence: Synthetic oligonucleotide
cugccggagcgcgggcuga

SEQ ID NO: 2191000 - RNA, 19 nt, Artificial Sequence
  Description of Artificial Sequence: Synthetic oligonucleotide
cccgcuggcgggcgagcac

SEQ ID NO: 2191001 - RNA, 19 nt, Artificial Sequence
  Description of Artificial Sequence: Synthetic oligonucleotide
ggccuggauguugaagcau

SEQ ID NO: 2191002 - RNA, 19 nt, Artificial Sequence
  Description of Artificial Sequence: Synthetic oligonucleotide
ccgcuuagcucugcaaugu

SEQ ID NO: 2191003 - RNA, 19 nt, Artificial Sequence
  Description of Artificial Sequence: Synthetic oligonucleotide
gggacgcucuuggccccug

SEQ ID NO: 2191004 - RNA, 19 nt, Artificial Sequence
  Description of Artificial Sequence: Synthetic oligonucleotide
cuucugcgugaaucccauu

SEQ ID NO: 2191005 - RNA, 19 nt, Artificial Sequence
  Description of Artificial Sequence: Synthetic oligonucleotide
ggcgggcguucugucccgc

SEQ ID NO: 2191006 - RNA, 19 nt, Artificial Sequence
  Description of Artificial Sequence: Synthetic oligonucleotide
ggacgauggcagacgcacu

SEQ ID NO: 2191007 - RNA, 19 nt, Artificial Sequence
  Description of Artificial Sequence: Synthetic oligonucleotide
cgcgggcugaccggucagc

SEQ ID NO: 2191008 - RNA, 19 nt, Artificial Sequence
  Description of Artificial Sequence: Synthetic oligonucleotide
gcccggcacgauacgacgu

SEQ ID NO: 2191009 - RNA, 19 nt, Artificial Sequence
  Description of Artificial Sequence: Synthetic oligonucleotide
ccacgcccugccgcuuagc

SEQ ID NO: 2191010 - RNA, 19 nt, Artificial Sequence
  Description of Artificial Sequence: Synthetic oligonucleotide
cuuccggaguccgcccauu

SEQ ID NO: 2191011 - RNA, 19 nt, Artificial Sequence
  Description of Artificial Sequence: Synthetic oligonucleotide
ccucgacaacgaguguucu

SEQ ID NO: 2191012 - RNA, 19 nt, Artificial Sequence
  Description of Artificial Sequence: Synthetic oligonucleotide
cccugccgcuuagcucugc

SEQ ID NO: 2191013 - RNA, 19 nt, Artificial Sequence
  Description of Artificial Sequence: Synthetic oligonucleotide
ccuggccauuggacaaccu

SEQ ID NO: 2191014 - RNA, 19 nt, Artificial Sequence
  Description of Artificial Sequence: Synthetic oligonucleotide
ccccugcgccacaguucac

SEQ ID NO: 2191015 - RNA, 19 nt, Artificial Sequence
  Description of Artificial Sequence: Synthetic oligonucleotide
ccccaccuaccgaggcgga

SEQ ID NO: 2191016 - RNA, 19 nt, Artificial Sequence
  Description of Artificial Sequence: Synthetic oligonucleotide
cccugccccaacggcucuc

SEQ ID NO: 2191017 - RNA, 19 nt, Artificial Sequence
  Description of Artificial Sequence: Synthetic oligonucleotide
ccucgaccgaggggugaga

SEQ ID NO: 2191018 - RNA, 19 nt, Artificial Sequence
  Description of Artificial Sequence: Synthetic oligonucleotide
ccccacgcccugccgcuua

SEQ ID NO: 2191019 - RNA, 19 nt, Artificial Sequence
  Description of Artificial Sequence: Synthetic oligonucleotide
ccaacggcucucggcugcu

SEQ ID NO: 2191020 - RNA, 19 nt, Artificial Sequence
  Description of Artificial Sequence: Synthetic oligonucleotide
cgcuuagcucugcaauguu

SEQ ID NO: 2191021 - RNA, 19 nt, Artificial Sequence
  Description of Artificial Sequence: Synthetic oligonucleotide
cgauacgacgugggucggu

SEQ ID NO: 2191022 - RNA, 19 nt, Artificial Sequence
  Description of Artificial Sequence: Synthetic oligonucleotide
cggacacuucugcgugaau

SEQ ID NO: 2191023 - RNA, 19 nt, Artificial Sequence
  Description of Artificial Sequence: Synthetic oligonucleotide
cgcucggggcggccagggu

SEQ ID NO: 2191024 - RNA, 19 nt, Artificial Sequence
  Description of Artificial Sequence: Synthetic oligonucleotide
  modified_base (1)..(1): a, c, u, g, unknown or other
  modified_base (10)..(10): a, c, u, g, unknown or other
nggaaaaggnggauucaau

SEQ ID NO: 2191025 - RNA, 19 nt, Artificial Sequence
  Description of Artificial Sequence: Synthetic oligonucleotide
aaaauggacagacacacgg

SEQ ID NO: 2191026 - RNA, 19 nt, Artificial Sequence
  Description of Artificial Sequence: Synthetic oligonucleotide
acugagaucccuuuaaugc

SEQ ID NO: 2191027 - RNA, 19 nt, Artificial Sequence
  Description of Artificial Sequence: Synthetic oligonucleotide
auauuugccaucuuuacuc

SEQ ID NO: 2191028 - RNA, 19 nt, Artificial Sequence
  Description of Artificial Sequence: Synthetic oligonucleotide
uaugauaaccagaagauuc

SEQ ID NO: 2191029 - RNA, 19 nt, Artificial Sequence
  Description of Artificial Sequence: Synthetic oligonucleotide
gaugucacaagccugcugg

SEQ ID NO: 2191030 - RNA, 19 nt, Artificial Sequence
  Description of Artificial Sequence: Synthetic oligonucleotide
ucaacuaugauaaccagaa

SEQ ID NO: 2191031 - RNA, 19 nt, Artificial Sequence
  Description of Artificial Sequence: Synthetic oligonucleotide
agaaaauggacagacacac

SEQ ID NO: 2191032 - RNA, 19 nt, Artificial Sequence
  Description of Artificial Sequence: Synthetic oligonucleotide
auaaccagaagauucaacu

SEQ ID NO: 2191033 - RNA, 19 nt, Artificial Sequence
  Description of Artificial Sequence: Synthetic oligonucleotide
uguuguucaucacagagac

SEQ ID NO: 2191034 - RNA, 19 nt, Artificial Sequence
  Description of Artificial Sequence: Synthetic oligonucleotide
cugauuaucuuuaacugcc

SEQ ID NO: 2191035 - RNA, 19 nt, Artificial Sequence
  Description of Artificial Sequence: Synthetic oligonucleotide
acacggagcagacauagcc

SEQ ID NO: 2191036 - RNA, 19 nt, Artificial Sequence
  Description of Artificial Sequence: Synthetic oligonucleotide
aagucugccguucuucccc

SEQ ID NO: 2191037 - RNA, 19 nt, Artificial Sequence
  Description of Artificial Sequence: Synthetic oligonucleotide
uuuaugucacucuugguca

SEQ ID NO: 2191038 - RNA, 19 nt, Artificial Sequence
  Description of Artificial Sequence: Synthetic oligonucleotide
aaugcuugcuuuccccacc

SEQ ID NO: 2191039 - RNA, 19 nt, Artificial Sequence
  Description of Artificial Sequence: Synthetic oligonucleotide
aaccagaagauucaacuca

SEQ ID NO: 2191040 - RNA, 19 nt, Artificial Sequence
  Description of Artificial Sequence: Synthetic oligonucleotide
uaagaagcgacuuuccuga

SEQ ID NO: 2191041 - RNA, 19 nt, Artificial Sequence
  Description of Artificial Sequence: Synthetic oligonucleotide
cuguaguccacauggaucg

SEQ ID NO: 2191042 - RNA, 19 nt, Artificial Sequence
  Description of Artificial Sequence: Synthetic oligonucleotide
aaggcugucucgcacgugg

SEQ ID NO: 2191043 - RNA, 19 nt, Artificial Sequence
  Description of Artificial Sequence: Synthetic oligonucleotide
cuuuaugucacucuugguc

SEQ ID NO: 2191044 - RNA, 19 nt, Artificial Sequence
  Description of Artificial Sequence: Synthetic oligonucleotide
aaugagacuucgaugacag

SEQ ID NO: 2191045 - RNA, 19 nt, Artificial Sequence
  Description of Artificial Sequence: Synthetic oligonucleotide
cugugaauguagcagaggg

SEQ ID NO: 2191046 - RNA, 19 nt, Artificial Sequence
  Description of Artificial Sequence: Synthetic oligonucleotide
gaucuuaaaggcugucucg

SEQ ID NO: 2191047 - RNA, 19 nt, Artificial Sequence
  Description of Artificial Sequence: Synthetic oligonucleotide
agcccuguaguccacaugg

SEQ ID NO: 2191048 - RNA, 19 nt, Artificial Sequence
  Description of Artificial Sequence: Synthetic oligonucleotide
ggaggauuagcugagaucg

SEQ ID NO: 2191049 - RNA, 19 nt, Artificial Sequence
  Description of Artificial Sequence: Synthetic oligonucleotide
ucaccaauauccuugauuu

SEQ ID NO: 2191050 - RNA, 19 nt, Artificial Sequence
  Description of Artificial Sequence: Synthetic oligonucleotide
aucuuuaacugccuuguuc

SEQ ID NO: 2191051 - RNA, 19 nt, Artificial Sequence
  Description of Artificial Sequence: Synthetic oligonucleotide
uccugauuaucuuuaacug

SEQ ID NO: 2191052 - RNA, 19 nt, Artificial Sequence
  Description of Artificial Sequence: Synthetic oligonucleotide
uuuaaugcuugcuuucccc

SEQ ID NO: 2191053 - RNA, 19 nt, Artificial Sequence
  Description of Artificial Sequence: Synthetic oligonucleotide
uuaaaggcugucucgcacg

SEQ ID NO: 2191054 - RNA, 19 nt, Artificial Sequence
  Description of Artificial Sequence: Synthetic oligonucleotide
auaagaagcgacuuuccug

SEQ ID NO: 2191055 - RNA, 19 nt, Artificial Sequence
  Description of Artificial Sequence: Synthetic oligonucleotide
cucaaugagacuucgauga

SEQ ID NO: 2191056 - RNA, 19 nt, Artificial Sequence
  Description of Artificial Sequence: Synthetic oligonucleotide
aacugagaucccuuuaaug

SEQ ID NO: 2191057 - RNA, 19 nt, Artificial Sequence
  Description of Artificial Sequence: Synthetic oligonucleotide
uucgaugacagaagcaggc

SEQ ID NO: 2191058 - RNA, 19 nt, Artificial Sequence
  Description of Artificial Sequence: Synthetic oligonucleotide
uuaacugccuuguucauuc

SEQ ID NO: 2191059 - RNA, 19 nt, Artificial Sequence
  Description of Artificial Sequence: Synthetic oligonucleotide
gaaauugcagaaaauggac

SEQ ID NO: 2191060 - RNA, 19 nt, Artificial Sequence
  Description of Artificial Sequence: Synthetic oligonucleotide
ugugguaagagauggggac

SEQ ID NO: 2191061 - RNA, 19 nt, Artificial Sequence
  Description of Artificial Sequence: Synthetic oligonucleotide
uggacagacacacggagca

SEQ ID NO: 2191062 - RNA, 19 nt, Artificial Sequence
  Description of Artificial Sequence: Synthetic oligonucleotide
uucaguacaggagggaggg

SEQ ID NO: 2191063 - RNA, 19 nt, Artificial Sequence
  Description of Artificial Sequence: Synthetic oligonucleotide
ucaaugagaauguucugcu

SEQ ID NO: 2191064 - RNA, 19 nt, Artificial Sequence
  Description of Artificial Sequence: Synthetic oligonucleotide
uauaagaagcgacuuuccu

SEQ ID NO: 2191065 - RNA, 19 nt, Artificial Sequence
  Description of Artificial Sequence: Synthetic oligonucleotide
ugagcagcgaagaugacau

SEQ ID NO: 2191066 - RNA, 19 nt, Artificial Sequence
  Description of Artificial Sequence: Synthetic oligonucleotide
auucaacucaucuucguca

SEQ ID NO: 2191067 - RNA, 19 nt, Artificial Sequence
  Description of Artificial Sequence: Synthetic oligonucleotide
gaagucuccaagucugccg

SEQ ID NO: 2191068 - RNA, 19 nt, Artificial Sequence
  Description of Artificial Sequence: Synthetic oligonucleotide
aaaacccacaguaaguacu

SEQ ID NO: 2191069 - RNA, 19 nt, Artificial Sequence
  Description of Artificial Sequence: Synthetic oligonucleotide
agggauuacagucaggaaa

SEQ ID NO: 2191070 - RNA, 19 nt, Artificial Sequence
  Description of Artificial Sequence: Synthetic oligonucleotide
ucaacagcucauauuugcc

SEQ ID NO: 2191071 - RNA, 19 nt, Artificial Sequence
  Description of Artificial Sequence: Synthetic oligonucleotide
gauuacagucaggaaaggg

SEQ ID NO: 2191072 - RNA, 19 nt, Artificial Sequence
  Description of Artificial Sequence: Synthetic oligonucleotide
ucuuugaucuccucggcga

SEQ ID NO: 2191073 - RNA, 19 nt, Artificial Sequence
  Description of Artificial Sequence: Synthetic oligonucleotide
gaauguucugcuucugagc

SEQ ID NO: 2191074 - RNA, 19 nt, Artificial Sequence
  Description of Artificial Sequence: Synthetic oligonucleotide
aaaguaaacugagaucccu

SEQ ID NO: 2191075 - RNA, 19 nt, Artificial Sequence
  Description of Artificial Sequence: Synthetic oligonucleotide
uccgagucuaggaugcagg

SEQ ID NO: 2191076 - RNA, 19 nt, Artificial Sequence
  Description of Artificial Sequence: Synthetic oligonucleotide
uaaaguaaacugagauccc

SEQ ID NO: 2191077 - RNA, 19 nt, Artificial Sequence
  Description of Artificial Sequence: Synthetic oligonucleotide
ugugaauguagcagagggc

SEQ ID NO: 2191078 - RNA, 19 nt, Artificial Sequence
  Description of Artificial Sequence: Synthetic oligonucleotide
aaauugcagaaaauggaca

SEQ ID NO: 2191079 - RNA, 19 nt, Artificial Sequence
  Description of Artificial Sequence: Synthetic oligonucleotide
aagauucaacucaucuucg

SEQ ID NO: 2191080 - RNA, 19 nt, Artificial Sequence
  Description of Artificial Sequence: Synthetic oligonucleotide
ucacucuuggucaucagau

SEQ ID NO: 2191081 - RNA, 19 nt, Artificial Sequence
  Description of Artificial Sequence: Synthetic oligonucleotide
auucugugaauguagcaga

SEQ ID NO: 2191082 - RNA, 19 nt, Artificial Sequence
  Description of Artificial Sequence: Synthetic oligonucleotide
aagucuccaagucugccgu

SEQ ID NO: 2191083 - RNA, 19 nt, Artificial Sequence
  Description of Artificial Sequence: Synthetic oligonucleotide
cuaguagugucucugugug

SEQ ID NO: 2191084 - RNA, 19 nt, Artificial Sequence
  Description of Artificial Sequence: Synthetic oligonucleotide
uuccccggguauaagaagc

SEQ ID NO: 2191085 - RNA, 19 nt, Artificial Sequence
  Description of Artificial Sequence: Synthetic oligonucleotide
gccuugaucaccaauaucc

SEQ ID NO: 2191086 - RNA, 19 nt, Artificial Sequence
  Description of Artificial Sequence: Synthetic oligonucleotide
gaauuugccagcaccauca

SEQ ID NO: 2191087 - RNA, 19 nt, Artificial Sequence
  Description of Artificial Sequence: Synthetic oligonucleotide
guuggugucaacuaugaua

SEQ ID NO: 2191088 - RNA, 19 nt, Artificial Sequence
  Description of Artificial Sequence: Synthetic oligonucleotide
gaacagaugggaauuugcc

SEQ ID NO: 2191089 - RNA, 19 nt, Artificial Sequence
  Description of Artificial Sequence: Synthetic oligonucleotide
accaaaucggguugguguc

SEQ ID NO: 2191090 - RNA, 19 nt, Artificial Sequence
  Description of Artificial Sequence: Synthetic oligonucleotide
accaauauccuugauuuca

SEQ ID NO: 2191091 - RNA, 19 nt, Artificial Sequence
  Description of Artificial Sequence: Synthetic oligonucleotide
uguacugcagugcacuguc

SEQ ID NO: 2191092 - RNA, 19 nt, Artificial Sequence
  Description of Artificial Sequence: Synthetic oligonucleotide
acuuuccugaaugugacug

SEQ ID NO: 2191093 - RNA, 19 nt, Artificial Sequence
  Description of Artificial Sequence: Synthetic oligonucleotide
ugggaauuugccagcacca

SEQ ID NO: 2191094 - RNA, 19 nt, Artificial Sequence
  Description of Artificial Sequence: Synthetic oligonucleotide
gaugacauucaugaaguuc

SEQ ID NO: 2191095 - RNA, 19 nt, Artificial Sequence
  Description of Artificial Sequence: Synthetic oligonucleotide
ugucaacuaugauaaccag

SEQ ID NO: 2191096 - RNA, 19 nt, Artificial Sequence
  Description of Artificial Sequence: Synthetic oligonucleotide
augacagaagcaggcagcc

SEQ ID NO: 2191097 - RNA, 19 nt, Artificial Sequence
  Description of Artificial Sequence: Synthetic oligonucleotide
ugauuucaucuccugauua

SEQ ID NO: 2191098 - RNA, 19 nt, Artificial Sequence
  Description of Artificial Sequence: Synthetic oligonucleotide
cuucaguacaggagggagg

SEQ ID NO: 2191099 - RNA, 19 nt, Artificial Sequence
  Description of Artificial Sequence: Synthetic oligonucleotide
agacacacggagcagacau

SEQ ID NO: 2191100 - RNA, 19 nt, Artificial Sequence
  Description of Artificial Sequence: Synthetic oligonucleotide
auuucaucuccugauuauc

SEQ ID NO: 2191101 - RNA, 19 nt, Artificial Sequence
  Description of Artificial Sequence: Synthetic oligonucleotide
aguaaguacugcaggagag

SEQ ID NO: 2191102 - RNA, 19 nt, Artificial Sequence
  Description of Artificial Sequence: Synthetic oligonucleotide
gaauccgagucuaggaugc

SEQ ID NO: 2191103 - RNA, 19 nt, Artificial Sequence
  Description of Artificial Sequence: Synthetic oligonucleotide
cuucgaugacagaagcagg

SEQ ID NO: 2191104 - RNA, 19 nt, Artificial Sequence
  Description of Artificial Sequence: Synthetic oligonucleotide
aucauuugcugcugucaac

SEQ ID NO: 2191105 - RNA, 19 nt, Artificial Sequence
  Description of Artificial Sequence: Synthetic oligonucleotide
ugcaugaacagaugggaau

SEQ ID NO: 2191106 - RNA, 19 nt, Artificial Sequence
  Description of Artificial Sequence: Synthetic oligonucleotide
ucccagagggauuacaguc

SEQ ID NO: 2191107 - RNA, 19 nt, Artificial Sequence
  Description of Artificial Sequence: Synthetic oligonucleotide
uagcagagggcuuuggcga

SEQ ID NO: 2191108 - RNA, 19 nt, Artificial Sequence
  Description of Artificial Sequence: Synthetic oligonucleotide
aguagugucucugugugcu

SEQ ID NO: 2191109 - RNA, 19 nt, Artificial Sequence
  Description of Artificial Sequence: Synthetic oligonucleotide
cuuuaaugcuugcuuuccc

SEQ ID NO: 2191110 - RNA, 19 nt, Artificial Sequence
  Description of Artificial Sequence: Synthetic oligonucleotide
ucauucugugaauguagca

SEQ ID NO: 2191111 - RNA, 19 nt, Artificial Sequence
  Description of Artificial Sequence: Synthetic oligonucleotide
ucauguacugcagugcacu

SEQ ID NO: 2191112 - RNA, 19 nt, Artificial Sequence
  Description of Artificial Sequence: Synthetic oligonucleotide
agaagucuccaagucugcc

SEQ ID NO: 2191113 - RNA, 19 nt, Artificial Sequence
  Description of Artificial Sequence: Synthetic oligonucleotide
aucaccaauauccuugauu

SEQ ID NO: 2191114 - RNA, 19 nt, Artificial Sequence
  Description of Artificial Sequence: Synthetic oligonucleotide
aaacugagaucccuuuaau

SEQ ID NO: 2191115 - RNA, 19 nt, Artificial Sequence
  Description of Artificial Sequence: Synthetic oligonucleotide
guccacauggaucggaggc

SEQ ID NO: 2191116 - RNA, 19 nt, Artificial Sequence
  Description of Artificial Sequence: Synthetic oligonucleotide
ggcuaucacagccagcugg

SEQ ID NO: 2191117 - RNA, 19 nt, Artificial Sequence
  Description of Artificial Sequence: Synthetic oligonucleotide
uggcgagggauccugcuag

SEQ ID NO: 2191118 - RNA, 19 nt, Artificial Sequence
  Description of Artificial Sequence: Synthetic oligonucleotide
uccgaagaagucuccaagu

SEQ ID NO: 2191119 - RNA, 19 nt, Artificial Sequence
  Description of Artificial Sequence: Synthetic oligonucleotide
ucugugaauguagcagagg

SEQ ID NO: 2191120 - RNA, 19 nt, Artificial Sequence
  Description of Artificial Sequence: Synthetic oligonucleotide
aaacccacaguaaguacug

SEQ ID NO: 2191121 - RNA, 19 nt, Artificial Sequence
  Description of Artificial Sequence: Synthetic oligonucleotide
aacugccuuguucauucug

SEQ ID NO: 2191122 - RNA, 19 nt, Artificial Sequence
  Description of Artificial Sequence: Synthetic oligonucleotide
ggugucaacuaugauaacc

SEQ ID NO: 2191123 - RNA, 19 nt, Artificial Sequence
  Description of Artificial Sequence: Synthetic oligonucleotide
aaucggguuggugucaacu

SEQ ID NO: 2191124 - RNA, 19 nt, Artificial Sequence
  Description of Artificial Sequence: Synthetic oligonucleotide
ugauuaucuuuaacugccu

SEQ ID NO: 2191125 - RNA, 19 nt, Artificial Sequence
  Description of Artificial Sequence: Synthetic oligonucleotide
cugaucuugauccggaaga

SEQ ID NO: 2191126 - RNA, 19 nt, Artificial Sequence
  Description of Artificial Sequence: Synthetic oligonucleotide
uuuggccuucaguacagga

SEQ ID NO: 2191127 - RNA, 19 nt, Artificial Sequence
  Description of Artificial Sequence: Synthetic oligonucleotide
uccugaaugugacuggcua

SEQ ID NO: 2191128 - RNA, 19 nt, Artificial Sequence
  Description of Artificial Sequence: Synthetic oligonucleotide
acgcauguguuguucauca

SEQ ID NO: 2191129 - RNA, 19 nt, Artificial Sequence
  Description of Artificial Sequence: Synthetic oligonucleotide
ucacaagccugcuggagga

SEQ ID NO: 2191130 - RNA, 19 nt, Artificial Sequence
  Description of Artificial Sequence: Synthetic oligonucleotide
ugucaacagcucauauuug

SEQ ID NO: 2191131 - RNA, 19 nt, Artificial Sequence
  Description of Artificial Sequence: Synthetic oligonucleotide
cauccaugcacuuggauaa

SEQ ID NO: 2191132 - RNA, 19 nt, Artificial Sequence
  Description of Artificial Sequence: Synthetic oligonucleotide
ucuccugauuaucuuuaac

SEQ ID NO: 2191133 - RNA, 19 nt, Artificial Sequence
  Description of Artificial Sequence: Synthetic oligonucleotide
ccugauuaucuuuaacugc

SEQ ID NO: 2191134 - RNA, 19 nt, Artificial Sequence
  Description of Artificial Sequence: Synthetic oligonucleotide
uuguucauucugugaaugu

SEQ ID NO: 2191135 - RNA, 19 nt, Artificial Sequence
  Description of Artificial Sequence: Synthetic oligonucleotide
uccacauggaucggaggcg

SEQ ID NO: 2191136 - RNA, 19 nt, Artificial Sequence
  Description of Artificial Sequence: Synthetic oligonucleotide
cuuguucauucugugaaug

SEQ ID NO: 2191137 - RNA, 19 nt, Artificial Sequence
  Description of Artificial Sequence: Synthetic oligonucleotide
gggauuacagucaggaaag

SEQ ID NO: 2191138 - RNA, 19 nt, Artificial Sequence
  Description of Artificial Sequence: Synthetic oligonucleotide
cuuuccccaccaaaucggg

SEQ ID NO: 2191139 - RNA, 19 nt, Artificial Sequence
  Description of Artificial Sequence: Synthetic oligonucleotide
gauaaccagaagauucaac

SEQ ID NO: 2191140 - RNA, 19 nt, Artificial Sequence
  Description of Artificial Sequence: Synthetic oligonucleotide
guucauguacugcagugca

SEQ ID NO: 2191141 - RNA, 19 nt, Artificial Sequence
  Description of Artificial Sequence: Synthetic oligonucleotide
ucaaugagacuucgaugac

SEQ ID NO: 2191142 - RNA, 19 nt, Artificial Sequence
  Description of Artificial Sequence: Synthetic oligonucleotide
uccccggguauaagaagcg

SEQ ID NO: 2191143 - RNA, 19 nt, Artificial Sequence
  Description of Artificial Sequence: Synthetic oligonucleotide
uggucaucagaucuuugau

SEQ ID NO: 2191144 - RNA, 19 nt, Artificial Sequence
  Description of Artificial Sequence: Synthetic oligonucleotide
agaucccuuuaaugcuugc

SEQ ID NO: 2191145 - RNA, 19 nt, Artificial Sequence
  Description of Artificial Sequence: Synthetic oligonucleotide
guccgaagaagucuccaag

SEQ ID NO: 2191146 - RNA, 19 nt, Artificial Sequence
  Description of Artificial Sequence: Synthetic oligonucleotide
uggaggagcccugaauccg

SEQ ID NO: 2191147 - RNA, 19 nt, Artificial Sequence
  Description of Artificial Sequence: Synthetic oligonucleotide
uuggagcggugcaugaaca

SEQ ID NO: 2191148 - RNA, 19 nt, Artificial Sequence
  Description of Artificial Sequence: Synthetic oligonucleotide
ugagaucccuuuaaugcuu

SEQ ID NO: 2191149 - RNA, 19 nt, Artificial Sequence
  Description of Artificial Sequence: Synthetic oligonucleotide
ugguaagagauggggacgc

SEQ ID NO: 2191150 - RNA, 19 nt, Artificial Sequence
  Description of Artificial Sequence: Synthetic oligonucleotide
uugauuucaucuccugauu

SEQ ID NO: 2191151 - RNA, 19 nt, Artificial Sequence
  Description of Artificial Sequence: Synthetic oligonucleotide
gugucaacuaugauaacca

SEQ ID NO: 2191152 - RNA, 19 nt, Artificial Sequence
  Description of Artificial Sequence: Synthetic oligonucleotide
aaaucggguuggugucaac

SEQ ID NO: 2191153 - RNA, 19 nt, Artificial Sequence
  Description of Artificial Sequence: Synthetic oligonucleotide
gaucgcugaucuugauccg

SEQ ID NO: 2191154 - RNA, 19 nt, Artificial Sequence
  Description of Artificial Sequence: Synthetic oligonucleotide
gauggggcugaaauugcag

SEQ ID NO: 2191155 - RNA, 19 nt, Artificial Sequence
  Description of Artificial Sequence: Synthetic oligonucleotide
augauaaccagaagauuca

SEQ ID NO: 2191156 - RNA, 19 nt, Artificial Sequence
  Description of Artificial Sequence: Synthetic oligonucleotide
gacuggcuaucacagccag

SEQ ID NO: 2191157 - RNA, 19 nt, Artificial Sequence
  Description of Artificial Sequence: Synthetic oligonucleotide
aaauggacagacacacgga

SEQ ID NO: 2191158 - RNA, 19 nt, Artificial Sequence
  Description of Artificial Sequence: Synthetic oligonucleotide
uaaaggcugucucgcacgu

SEQ ID NO: 2191159 - RNA, 19 nt, Artificial Sequence
  Description of Artificial Sequence: Synthetic oligonucleotide
agccuugaucaccaauauc

SEQ ID NO: 2191160 - RNA, 19 nt, Artificial Sequence
  Description of Artificial Sequence: Synthetic oligonucleotide
augugacuggcuaucacag

SEQ ID NO: 2191161 - RNA, 19 nt, Artificial Sequence
  Description of Artificial Sequence: Synthetic oligonucleotide
ggauaaaguaaacugagau

SEQ ID NO: 2191162 - RNA, 19 nt, Artificial Sequence
  Description of Artificial Sequence: Synthetic oligonucleotide
aucuugauccggaagaaaa

SEQ ID NO: 2191163 - RNA, 19 nt, Artificial Sequence
  Description of Artificial Sequence: Synthetic oligonucleotide
ucaucuccugauuaucuuu

SEQ ID NO: 2191164 - RNA, 19 nt, Artificial Sequence
  Description of Artificial Sequence: Synthetic oligonucleotide
aguccacauggaucggagg

SEQ ID NO: 2191165 - RNA, 19 nt, Artificial Sequence
  Description of Artificial Sequence: Synthetic oligonucleotide
cuccugauuaucuuuaacu

SEQ ID NO: 2191166 - RNA, 19 nt, Artificial Sequence
  Description of Artificial Sequence: Synthetic oligonucleotide
gaaugugacuggcuaucac

SEQ ID NO: 2191167 - RNA, 19 nt, Artificial Sequence
  Description of Artificial Sequence: Synthetic oligonucleotide
uucauguacugcagugcac

SEQ ID NO: 2191168 - RNA, 19 nt, Artificial Sequence
  Description of Artificial Sequence: Synthetic oligonucleotide
guauaagaagcgacuuucc

SEQ ID NO: 2191169 - RNA, 19 nt, Artificial Sequence
  Description of Artificial Sequence: Synthetic oligonucleotide
gugguaagagauggggacg

SEQ ID NO: 2191170 - RNA, 19 nt, Artificial Sequence
  Description of Artificial Sequence: Synthetic oligonucleotide
auagccaaucucaaugaga

SEQ ID NO: 2191171 - RNA, 19 nt, Artificial Sequence
  Description of Artificial Sequence: Synthetic oligonucleotide
guuggagcggugcaugaac

SEQ ID NO: 2191172 - RNA, 19 nt, Artificial Sequence
  Description of Artificial Sequence: Synthetic oligonucleotide
ugugacuggcuaucacagc

SEQ ID NO: 2191173 - RNA, 19 nt, Artificial Sequence
  Description of Artificial Sequence: Synthetic oligonucleotide
aauguagcagagggcuuug

SEQ ID NO: 2191174 - RNA, 19 nt, Artificial Sequence
  Description of Artificial Sequence: Synthetic oligonucleotide
ucuuuacucccagagggau

SEQ ID NO: 2191175 - RNA, 19 nt, Artificial Sequence
  Description of Artificial Sequence: Synthetic oligonucleotide
cccuuuaugucacucuugg

SEQ ID NO: 2191176 - RNA, 19 nt, Artificial Sequence
  Description of Artificial Sequence: Synthetic oligonucleotide
acccacaguaaguacugca

SEQ ID NO: 2191177 - RNA, 19 nt, Artificial Sequence
  Description of Artificial Sequence: Synthetic oligonucleotide
aagcgacuuuccugaaugu

SEQ ID NO: 2191178 - RNA, 19 nt, Artificial Sequence
  Description of Artificial Sequence: Synthetic oligonucleotide
uggagcggugcaugaacag

SEQ ID NO: 2191179 - RNA, 19 nt, Artificial Sequence
  Description of Artificial Sequence: Synthetic oligonucleotide
aucgcugaucuugauccgg

SEQ ID NO: 2191180 - RNA, 19 nt, Artificial Sequence
  Description of Artificial Sequence: Synthetic oligonucleotide
gcagauggggcugaaauug

SEQ ID NO: 2191181 - RNA, 19 nt, Artificial Sequence
  Description of Artificial Sequence: Synthetic oligonucleotide
caagccugcuggaggagcc

SEQ ID NO: 2191182 - RNA, 19 nt, Artificial Sequence
  Description of Artificial Sequence: Synthetic oligonucleotide
ugaaugugacuggcuauca

SEQ ID NO: 2191183 - RNA, 19 nt, Artificial Sequence
  Description of Artificial Sequence: Synthetic oligonucleotide
ucaacucaucuucgucagc

SEQ ID NO: 2191184 - RNA, 19 nt, Artificial Sequence
  Description of Artificial Sequence: Synthetic oligonucleotide
acagagacaccuucuguuu

SEQ ID NO: 2191185 - RNA, 19 nt, Artificial Sequence
  Description of Artificial Sequence: Synthetic oligonucleotide
ugccuuguucauucuguga

SEQ ID NO: 2191186 - RNA, 19 nt, Artificial Sequence
  Description of Artificial Sequence: Synthetic oligonucleotide
gugaauguagcagagggcu

SEQ ID NO: 2191187 - RNA, 19 nt, Artificial Sequence
  Description of Artificial Sequence: Synthetic oligonucleotide
uccccaccaaaucggguug

SEQ ID NO: 2191188 - RNA, 19 nt, Artificial Sequence
  Description of Artificial Sequence: Synthetic oligonucleotide
cagauggggcugaaauugc

SEQ ID NO: 2191189 - RNA, 19 nt, Artificial Sequence
  Description of Artificial Sequence: Synthetic oligonucleotide
cuuccccggguauaagaag

SEQ ID NO: 2191190 - RNA, 19 nt, Artificial Sequence
  Description of Artificial Sequence: Synthetic oligonucleotide
gucaacuaugauaaccaga

SEQ ID NO: 2191191 - RNA, 19 nt, Artificial Sequence
  Description of Artificial Sequence: Synthetic oligonucleotide
uuuggcgagggauccugcu

SEQ ID NO: 2191192 - RNA, 19 nt, Artificial Sequence
  Description of Artificial Sequence: Synthetic oligonucleotide
ucgcugaucuugauccgga

SEQ ID NO: 2191193 - RNA, 19 nt, Artificial Sequence
  Description of Artificial Sequence: Synthetic oligonucleotide
aggauuagcugagaucgcu

SEQ ID NO: 2191194 - RNA, 19 nt, Artificial Sequence
  Description of Artificial Sequence: Synthetic oligonucleotide
auggaucggaggcgggagg

SEQ ID NO: 2191195 - RNA, 19 nt, Artificial Sequence
  Description of Artificial Sequence: Synthetic oligonucleotide
ugcuucugagcagcgaaga

SEQ ID NO: 2191196 - RNA, 19 nt, Artificial Sequence
  Description of Artificial Sequence: Synthetic oligonucleotide
ucggguuggugucaacuau

SEQ ID NO: 2191197 - RNA, 19 nt, Artificial Sequence
  Description of Artificial Sequence: Synthetic oligonucleotide
augaacagaugggaauuug

SEQ ID NO: 2191198 - RNA, 19 nt, Artificial Sequence
  Description of Artificial Sequence: Synthetic oligonucleotide
cugaggcaccuucagguac

SEQ ID NO: 2191199 - RNA, 19 nt, Artificial Sequence
  Description of Artificial Sequence: Synthetic oligonucleotide
cugaaugugacuggcuauc

SEQ ID NO: 2191200 - RNA, 19 nt, Artificial Sequence
  Description of Artificial Sequence: Synthetic oligonucleotide
agucugccguucuuccccg

SEQ ID NO: 2191201 - RNA, 19 nt, Artificial Sequence
  Description of Artificial Sequence: Synthetic oligonucleotide
ugauaaccagaagauucaa

SEQ ID NO: 2191202 - RNA, 19 nt, Artificial Sequence
  Description of Artificial Sequence: Synthetic oligonucleotide
ugaucuugauccggaagaa

SEQ ID NO: 2191203 - RNA, 19 nt, Artificial Sequence
  Description of Artificial Sequence: Synthetic oligonucleotide
augcacuuggauaaaguaa

SEQ ID NO: 2191204 - RNA, 19 nt, Artificial Sequence
  Description of Artificial Sequence: Synthetic oligonucleotide
ucgaugacagaagcaggca

SEQ ID NO: 2191205 - RNA, 19 nt, Artificial Sequence
  Description of Artificial Sequence: Synthetic oligonucleotide
gacauucaugaaguucaug

SEQ ID NO: 2191206 - RNA, 19 nt, Artificial Sequence
  Description of Artificial Sequence: Synthetic oligonucleotide
auguucugcuucugagcag

SEQ ID NO: 2191207 - RNA, 19 nt, Artificial Sequence
  Description of Artificial Sequence: Synthetic oligonucleotide
caguaaguacugcaggaga

SEQ ID NO: 2191208 - RNA, 19 nt, Artificial Sequence
  Description of Artificial Sequence: Synthetic oligonucleotide
auuagcugagaucgcugau

SEQ ID NO: 2191209 - RNA, 19 nt, Artificial Sequence
  Description of Artificial Sequence: Synthetic oligonucleotide
uuuccccaccaaaucgggu

SEQ ID NO: 2191210 - RNA, 19 nt, Artificial Sequence
  Description of Artificial Sequence: Synthetic oligonucleotide
gucacucuuggucaucaga

SEQ ID NO: 2191211 - RNA, 19 nt, Artificial Sequence
  Description of Artificial Sequence: Synthetic oligonucleotide
aaguaaacugagaucccuu

SEQ ID NO: 2191212 - RNA, 19 nt, Artificial Sequence
  Description of Artificial Sequence: Synthetic oligonucleotide
ugaauguagcagagggcuu

SEQ ID NO: 2191213 - RNA, 19 nt, Artificial Sequence
  Description of Artificial Sequence: Synthetic oligonucleotide
uguaguccacauggaucgg

SEQ ID NO: 2191214 - RNA, 19 nt, Artificial Sequence
  Description of Artificial Sequence: Synthetic oligonucleotide
cauguacugcagugcacug

SEQ ID NO: 2191215 - RNA, 19 nt, Artificial Sequence
  Description of Artificial Sequence: Synthetic oligonucleotide
gaugggaauuugccagcac

SEQ ID NO: 2191216 - RNA, 19 nt, Artificial Sequence
  Description of Artificial Sequence: Synthetic oligonucleotide
caccuucagguacaauccc

SEQ ID NO: 2191217 - RNA, 19 nt, Artificial Sequence
  Description of Artificial Sequence: Synthetic oligonucleotide
gagauggggacgcaugugu

SEQ ID NO: 2191218 - RNA, 19 nt, Artificial Sequence
  Description of Artificial Sequence: Synthetic oligonucleotide
gcugaucuugauccggaag

SEQ ID NO: 2191219 - RNA, 19 nt, Artificial Sequence
  Description of Artificial Sequence: Synthetic oligonucleotide
agcgacuuuccugaaugug

SEQ ID NO: 2191220 - RNA, 19 nt, Artificial Sequence
  Description of Artificial Sequence: Synthetic oligonucleotide
gcgaucacaucauuugcug

SEQ ID NO: 2191221 - RNA, 19 nt, Artificial Sequence
  Description of Artificial Sequence: Synthetic oligonucleotide
cccacaguaaguacugcag

SEQ ID NO: 2191222 - RNA, 19 nt, Artificial Sequence
  Description of Artificial Sequence: Synthetic oligonucleotide
cauucaugaaguucaugua

SEQ ID NO: 2191223 - RNA, 19 nt, Artificial Sequence
  Description of Artificial Sequence: Synthetic oligonucleotide
ugagaauguucugcuucug

SEQ ID NO: 2191224 - RNA, 19 nt, Artificial Sequence
  Description of Artificial Sequence: Synthetic oligonucleotide
ccacaguaaguacugcagg

SEQ ID NO: 2191225 - RNA, 19 nt, Artificial Sequence
  Description of Artificial Sequence: Synthetic oligonucleotide
gcuggaggagcccugaauc

SEQ ID NO: 2191226 - RNA, 19 nt, Artificial Sequence
  Description of Artificial Sequence: Synthetic oligonucleotide
gagaucccuuuaaugcuug

SEQ ID NO: 2191227 - RNA, 19 nt, Artificial Sequence
  Description of Artificial Sequence: Synthetic oligonucleotide
aggaugcaggcgucaauga

SEQ ID NO: 2191228 - RNA, 19 nt, Artificial Sequence
  Description of Artificial Sequence: Synthetic oligonucleotide
cugugguaagagaugggga

SEQ ID NO: 2191229 - RNA, 19 nt, Artificial Sequence
  Description of Artificial Sequence: Synthetic oligonucleotide
cacaucauuugcugcuguc

SEQ ID NO: 2191230 - RNA, 19 nt, Artificial Sequence
  Description of Artificial Sequence: Synthetic oligonucleotide
ugucacucuuggucaucag

SEQ ID NO: 2191231 - RNA, 19 nt, Artificial Sequence
  Description of Artificial Sequence: Synthetic oligonucleotide
cuccucggcgaucacauca

SEQ ID NO: 2191232 - RNA, 19 nt, Artificial Sequence
  Description of Artificial Sequence: Synthetic oligonucleotide
uggcccuuuaugucacucu

SEQ ID NO: 2191233 - RNA, 19 nt, Artificial Sequence
  Description of Artificial Sequence: Synthetic oligonucleotide
caccaaaucggguuggugu

SEQ ID NO: 2191234 - RNA, 19 nt, Artificial Sequence
  Description of Artificial Sequence: Synthetic oligonucleotide
guaaacugagaucccuuua

SEQ ID NO: 2191235 - RNA, 19 nt, Artificial Sequence
  Description of Artificial Sequence: Synthetic oligonucleotide
cagagacaccuucuguuuc

SEQ ID NO: 2191236 - RNA, 19 nt, Artificial Sequence
  Description of Artificial Sequence: Synthetic oligonucleotide
uaucuuuaacugccuuguu

SEQ ID NO: 2191237 - RNA, 19 nt, Artificial Sequence
  Description of Artificial Sequence: Synthetic oligonucleotide
cuugcuuuccccaccaaau

SEQ ID NO: 2191238 - RNA, 19 nt, Artificial Sequence
  Description of Artificial Sequence: Synthetic oligonucleotide
ugcuggcccuuuaugucac

SEQ ID NO: 2191239 - RNA, 19 nt, Artificial Sequence
  Description of Artificial Sequence: Synthetic oligonucleotide
cuuuggcgagggauccugc

SEQ ID NO: 2191240 - RNA, 19 nt, Artificial Sequence
  Description of Artificial Sequence: Synthetic oligonucleotide
ucuaggaugcaggcgucaa

SEQ ID NO: 2191241 - RNA, 19 nt, Artificial Sequence
  Description of Artificial Sequence: Synthetic oligonucleotide
gcaccuucagguacaaucc

SEQ ID NO: 2191242 - RNA, 19 nt, Artificial Sequence
  Description of Artificial Sequence: Synthetic oligonucleotide
ugcagugcacuguccucug

SEQ ID NO: 2191243 - RNA, 19 nt, Artificial Sequence
  Description of Artificial Sequence: Synthetic oligonucleotide
cauggaucggaggcgggag

SEQ ID NO: 2191244 - RNA, 19 nt, Artificial Sequence
  Description of Artificial Sequence: Synthetic oligonucleotide
aucggguuggugucaacua

SEQ ID NO: 2191245 - RNA, 19 nt, Artificial Sequence
  Description of Artificial Sequence: Synthetic oligonucleotide
cacggagcagacauagcca

SEQ ID NO: 2191246 - RNA, 19 nt, Artificial Sequence
  Description of Artificial Sequence: Synthetic oligonucleotide
cugagaucccuuuaaugcu

SEQ ID NO: 2191247 - RNA, 19 nt, Artificial Sequence
  Description of Artificial Sequence: Synthetic oligonucleotide
ggaauuugccagcaccauc

SEQ ID NO: 2191248 - RNA, 19 nt, Artificial Sequence
  Description of Artificial Sequence: Synthetic oligonucleotide
uuggcgagggauccugcua

SEQ ID NO: 2191249 - RNA, 19 nt, Artificial Sequence
  Description of Artificial Sequence: Synthetic oligonucleotide
gccuuguucauucugugaa

SEQ ID NO: 2191250 - RNA, 19 nt, Artificial Sequence
  Description of Artificial Sequence: Synthetic oligonucleotide
gacuucgaugacagaagca

SEQ ID NO: 2191251 - RNA, 19 nt, Artificial Sequence
  Description of Artificial Sequence: Synthetic oligonucleotide
uccucggcgaucacaucau

SEQ ID NO: 2191252 - RNA, 19 nt, Artificial Sequence
  Description of Artificial Sequence: Synthetic oligonucleotide
uggaucggaggcgggagga

SEQ ID NO: 2191253 - RNA, 19 nt, Artificial Sequence
  Description of Artificial Sequence: Synthetic oligonucleotide
auccugcuaguagugucuc

SEQ ID NO: 2191254 - RNA, 19 nt, Artificial Sequence
  Description of Artificial Sequence: Synthetic oligonucleotide
agaugggaauuugccagca

SEQ ID NO: 2191255 - RNA, 19 nt, Artificial Sequence
  Description of Artificial Sequence: Synthetic oligonucleotide
acuggcuaucacagccagc

SEQ ID NO: 2191256 - RNA, 19 nt, Artificial Sequence
  Description of Artificial Sequence: Synthetic oligonucleotide
cagacauagccaaucucaa

SEQ ID NO: 2191257 - RNA, 19 nt, Artificial Sequence
  Description of Artificial Sequence: Synthetic oligonucleotide
accagaagauucaacucau

SEQ ID NO: 2191258 - RNA, 19 nt, Artificial Sequence
  Description of Artificial Sequence: Synthetic oligonucleotide
caucuccugauuaucuuua

SEQ ID NO: 2191259 - RNA, 19 nt, Artificial Sequence
  Description of Artificial Sequence: Synthetic oligonucleotide
agagauggggacgcaugug

SEQ ID NO: 2191260 - RNA, 19 nt, Artificial Sequence
  Description of Artificial Sequence: Synthetic oligonucleotide
ccuuuaaugcuugcuuucc

SEQ ID NO: 2191261 - RNA, 19 nt, Artificial Sequence
  Description of Artificial Sequence: Synthetic oligonucleotide
gagaucuuaaaggcugucu

SEQ ID NO: 2191262 - RNA, 19 nt, Artificial Sequence
  Description of Artificial Sequence: Synthetic oligonucleotide
gaggauuagcugagaucgc

SEQ ID NO: 2191263 - RNA, 19 nt, Artificial Sequence
  Description of Artificial Sequence: Synthetic oligonucleotide
gcauccaugcacuuggaua

SEQ ID NO: 2191264 - RNA, 19 nt, Artificial Sequence
  Description of Artificial Sequence: Synthetic oligonucleotide
ggauccugcuaguaguguc

SEQ ID NO: 2191265 - RNA, 19 nt, Artificial Sequence
  Description of Artificial Sequence: Synthetic oligonucleotide
cugagcagcgaagaugaca

SEQ ID NO: 2191266 - RNA, 19 nt, Artificial Sequence
  Description of Artificial Sequence: Synthetic oligonucleotide
ucguccgaagaagucucca

SEQ ID NO: 2191267 - RNA, 19 nt, Artificial Sequence
  Description of Artificial Sequence: Synthetic oligonucleotide
gagggauuacagucaggaa

SEQ ID NO: 2191268 - RNA, 19 nt, Artificial Sequence
  Description of Artificial Sequence: Synthetic oligonucleotide
auguacugcagugcacugu

SEQ ID NO: 2191269 - RNA, 19 nt, Artificial Sequence
  Description of Artificial Sequence: Synthetic oligonucleotide
gacgcauguguuguucauc

SEQ ID NO: 2191270 - RNA, 19 nt, Artificial Sequence
  Description of Artificial Sequence: Synthetic oligonucleotide
cacauggaucggaggcggg

SEQ ID NO: 2191271 - RNA, 19 nt, Artificial Sequence
  Description of Artificial Sequence: Synthetic oligonucleotide
agccaaucucaaugagacu

SEQ ID NO: 2191272 - RNA, 19 nt, Artificial Sequence
  Description of Artificial Sequence: Synthetic oligonucleotide
uggcuaucacagccagcug

SEQ ID NO: 2191273 - RNA, 19 nt, Artificial Sequence
  Description of Artificial Sequence: Synthetic oligonucleotide
agggucguccgaagaaguc

SEQ ID NO: 2191274 - RNA, 19 nt, Artificial Sequence
  Description of Artificial Sequence: Synthetic oligonucleotide
augucacaagccugcugga

SEQ ID NO: 2191275 - RNA, 19 nt, Artificial Sequence
  Description of Artificial Sequence: Synthetic oligonucleotide
aaaggcugucucgcacgug

SEQ ID NO: 2191276 - RNA, 19 nt, Artificial Sequence
  Description of Artificial Sequence: Synthetic oligonucleotide
ucucgcacguggugcagau

SEQ ID NO: 2191277 - RNA, 19 nt, Artificial Sequence
  Description of Artificial Sequence: Synthetic oligonucleotide
ugagaucgcugaucuugau

SEQ ID NO: 2191278 - RNA, 19 nt, Artificial Sequence
  Description of Artificial Sequence: Synthetic oligonucleotide
gaucuugauccggaagaaa

SEQ ID NO: 2191279 - RNA, 19 nt, Artificial Sequence
  Description of Artificial Sequence: Synthetic oligonucleotide
gauccugcuaguagugucu

SEQ ID NO: 2191280 - RNA, 19 nt, Artificial Sequence
  Description of Artificial Sequence: Synthetic oligonucleotide
caggcagcccuguagucca

SEQ ID NO: 2191281 - RNA, 19 nt, Artificial Sequence
  Description of Artificial Sequence: Synthetic oligonucleotide
agucuaggaugcaggcguc

SEQ ID NO: 2191282 - RNA, 19 nt, Artificial Sequence
  Description of Artificial Sequence: Synthetic oligonucleotide
acauggaucggaggcggga

SEQ ID NO: 2191283 - RNA, 19 nt, Artificial Sequence
  Description of Artificial Sequence: Synthetic oligonucleotide
gcgucaaugagaauguucu

SEQ ID NO: 2191284 - RNA, 19 nt, Artificial Sequence
  Description of Artificial Sequence: Synthetic oligonucleotide
agauggggcugaaauugca

SEQ ID NO: 2191285 - RNA, 19 nt, Artificial Sequence
  Description of Artificial Sequence: Synthetic oligonucleotide
uccugcuaguagugucucu

SEQ ID NO: 2191286 - RNA, 19 nt, Artificial Sequence
  Description of Artificial Sequence: Synthetic oligonucleotide
gggcugaaauugcagaaaa

SEQ ID NO: 2191287 - RNA, 19 nt, Artificial Sequence
  Description of Artificial Sequence: Synthetic oligonucleotide
agaaggcaucugaggcacc

SEQ ID NO: 2191288 - RNA, 19 nt, Artificial Sequence
  Description of Artificial Sequence: Synthetic oligonucleotide
gcugucucgcacguggugc

SEQ ID NO: 2191289 - RNA, 19 nt, Artificial Sequence
  Description of Artificial Sequence: Synthetic oligonucleotide
ugccguucuuccccgggua

SEQ ID NO: 2191290 - RNA, 19 nt, Artificial Sequence
  Description of Artificial Sequence: Synthetic oligonucleotide
cccggguauaagaagcgac

SEQ ID NO: 2191291 - RNA, 19 nt, Artificial Sequence
  Description of Artificial Sequence: Synthetic oligonucleotide
ccugcuaguagugucucug

SEQ ID NO: 2191292 - RNA, 19 nt, Artificial Sequence
  Description of Artificial Sequence: Synthetic oligonucleotide
ccugaauccgagucuagga

SEQ ID NO: 2191293 - RNA, 19 nt, Artificial Sequence
  Description of Artificial Sequence: Synthetic oligonucleotide
gaauguagcagagggcuuu

SEQ ID NO: 2191294 - RNA, 19 nt, Artificial Sequence
  Description of Artificial Sequence: Synthetic oligonucleotide
ccgaagaagucuccaaguc

SEQ ID NO: 2191295 - RNA, 19 nt, Artificial Sequence
  Description of Artificial Sequence: Synthetic oligonucleotide
gcgacuuuccugaauguga

SEQ ID NO: 2191296 - RNA, 19 nt, Artificial Sequence
  Description of Artificial Sequence: Synthetic oligonucleotide
uggugucaacuaugauaac

SEQ ID NO: 2191297 - RNA, 19 nt, Artificial Sequence
  Description of Artificial Sequence: Synthetic oligonucleotide
guaguccacauggaucgga

SEQ ID NO: 2191298 - RNA, 19 nt, Artificial Sequence
  Description of Artificial Sequence: Synthetic oligonucleotide
cccuuuaaugcuugcuuuc

SEQ ID NO: 2191299 - RNA, 19 nt, Artificial Sequence
  Description of Artificial Sequence: Synthetic oligonucleotide
augagacuucgaugacaga

SEQ ID NO: 2191300 - RNA, 19 nt, Artificial Sequence
  Description of Artificial Sequence: Synthetic oligonucleotide
cgaucacaucauuugcugc

SEQ ID NO: 2191301 - RNA, 19 nt, Artificial Sequence
  Description of Artificial Sequence: Synthetic oligonucleotide
ccgagucuaggaugcaggc

SEQ ID NO: 2191302 - RNA, 19 nt, Artificial Sequence
  Description of Artificial Sequence: Synthetic oligonucleotide
gggguugccagggucgucc

SEQ ID NO: 2191303 - RNA, 19 nt, Artificial Sequence
  Description of Artificial Sequence: Synthetic oligonucleotide
gcuaguagugucucugugu

SEQ ID NO: 2191304 - RNA, 19 nt, Artificial Sequence
  Description of Artificial Sequence: Synthetic oligonucleotide
ggcgucaaugagaauguuc

SEQ ID NO: 2191305 - RNA, 19 nt, Artificial Sequence
  Description of Artificial Sequence: Synthetic oligonucleotide
caucacagagacaccuucu

SEQ ID NO: 2191306 - RNA, 19 nt, Artificial Sequence
  Description of Artificial Sequence: Synthetic oligonucleotide
cacuuggauaaaguaaacu

SEQ ID NO: 2191307 - RNA, 19 nt, Artificial Sequence
  Description of Artificial Sequence: Synthetic oligonucleotide
cugaauccgagucuaggau

SEQ ID NO: 2191308 - RNA, 19 nt, Artificial Sequence
  Description of Artificial Sequence: Synthetic oligonucleotide
cgacuuuccugaaugugac

SEQ ID NO: 2191309 - RNA, 19 nt, Artificial Sequence
  Description of Artificial Sequence: Synthetic oligonucleotide
ucggaggcgggaggauuag

SEQ ID NO: 2191310 - RNA, 19 nt, Artificial Sequence
  Description of Artificial Sequence: Synthetic oligonucleotide
ccccugugaugucacaagc

SEQ ID NO: 2191311 - RNA, 19 nt, Artificial Sequence
  Description of Artificial Sequence: Synthetic oligonucleotide
uguccucugcagccuugau

SEQ ID NO: 2191312 - RNA, 19 nt, Artificial Sequence
  Description of Artificial Sequence: Synthetic oligonucleotide
ucaguacaggagggaggga

SEQ ID NO: 2191313 - RNA, 19 nt, Artificial Sequence
  Description of Artificial Sequence: Synthetic oligonucleotide
ggccuucaguacaggaggg

SEQ ID NO: 2191314 - RNA, 19 nt, Artificial Sequence
  Description of Artificial Sequence: Synthetic oligonucleotide
cuugaucaccaauauccuu

SEQ ID NO: 2191315 - RNA, 19 nt, Artificial Sequence
  Description of Artificial Sequence: Synthetic oligonucleotide
cugucucgcacguggugca

SEQ ID NO: 2191316 - RNA, 19 nt, Artificial Sequence
  Description of Artificial Sequence: Synthetic oligonucleotide
agcccugaauccgagucua

SEQ ID NO: 2191317 - RNA, 19 nt, Artificial Sequence
  Description of Artificial Sequence: Synthetic oligonucleotide
cgagggauccugcuaguag

SEQ ID NO: 2191318 - RNA, 19 nt, Artificial Sequence
  Description of Artificial Sequence: Synthetic oligonucleotide
gcagccuugaucaccaaua

SEQ ID NO: 2191319 - RNA, 19 nt, Artificial Sequence
  Description of Artificial Sequence: Synthetic oligonucleotide
cccugaauccgagucuagg

SEQ ID NO: 2191320 - RNA, 19 nt, Artificial Sequence
  Description of Artificial Sequence: Synthetic oligonucleotide
guucuuccccggguauaag

SEQ ID NO: 2191321 - RNA, 19 nt, Artificial Sequence
  Description of Artificial Sequence: Synthetic oligonucleotide
gcuuuggcgagggauccug

SEQ ID NO: 2191322 - RNA, 19 nt, Artificial Sequence
  Description of Artificial Sequence: Synthetic oligonucleotide
gcagcgaagaugacauuca

SEQ ID NO: 2191323 - RNA, 19 nt, Artificial Sequence
  Description of Artificial Sequence: Synthetic oligonucleotide
guacugcagugcacugucc

SEQ ID NO: 2191324 - RNA, 19 nt, Artificial Sequence
  Description of Artificial Sequence: Synthetic oligonucleotide
ggucguccgaagaagucuc

SEQ ID NO: 2191325 - RNA, 19 nt, Artificial Sequence
  Description of Artificial Sequence: Synthetic oligonucleotide
ggcgggaggauuagcugag

SEQ ID NO: 2191326 - RNA, 19 nt, Artificial Sequence
  Description of Artificial Sequence: Synthetic oligonucleotide
gucguccgaagaagucucc

SEQ ID NO: 2191327 - RNA, 19 nt, Artificial Sequence
  Description of Artificial Sequence: Synthetic oligonucleotide
gggacgcauguguuguuca

SEQ ID NO: 2191328 - RNA, 19 nt, Artificial Sequence
  Description of Artificial Sequence: Synthetic oligonucleotide
gucugccguucuuccccgg

SEQ ID NO: 2191329 - RNA, 19 nt, Artificial Sequence
  Description of Artificial Sequence: Synthetic oligonucleotide
cccagagggauuacaguca

SEQ ID NO: 2191330 - RNA, 19 nt, Artificial Sequence
  Description of Artificial Sequence: Synthetic oligonucleotide
agcucauauuugccaucuu

SEQ ID NO: 2191331 - RNA, 19 nt, Artificial Sequence
  Description of Artificial Sequence: Synthetic oligonucleotide
cuaugauaaccagaagauu

SEQ ID NO: 2191332 - RNA, 19 nt, Artificial Sequence
  Description of Artificial Sequence: Synthetic oligonucleotide
ggagcggugcaugaacaga

SEQ ID NO: 2191333 - RNA, 19 nt, Artificial Sequence
  Description of Artificial Sequence: Synthetic oligonucleotide
ccagaagauucaacucauc

SEQ ID NO: 2191334 - RNA, 19 nt, Artificial Sequence
  Description of Artificial Sequence: Synthetic oligonucleotide
ggcugucucgcacguggug

SEQ ID NO: 2191335 - RNA, 19 nt, Artificial Sequence
  Description of Artificial Sequence: Synthetic oligonucleotide
ccagggucguccgaagaag

SEQ ID NO: 2191336 - RNA, 19 nt, Artificial Sequence
  Description of Artificial Sequence: Synthetic oligonucleotide
cuuuaacugccuuguucau

SEQ ID NO: 2191337 - RNA, 19 nt, Artificial Sequence
  Description of Artificial Sequence: Synthetic oligonucleotide
aucggaggcgggaggauua

SEQ ID NO: 2191338 - RNA, 19 nt, Artificial Sequence
  Description of Artificial Sequence: Synthetic oligonucleotide
caaaucggguuggugucaa

SEQ ID NO: 2191339 - RNA, 19 nt, Artificial Sequence
  Description of Artificial Sequence: Synthetic oligonucleotide
agucuccaagucugccguu

SEQ ID NO: 2191340 - RNA, 19 nt, Artificial Sequence
  Description of Artificial Sequence: Synthetic oligonucleotide
gucuaggaugcaggcguca

SEQ ID NO: 2191341 - RNA, 19 nt, Artificial Sequence
  Description of Artificial Sequence: Synthetic oligonucleotide
guaagagauggggacgcau

SEQ ID NO: 2191342 - RNA, 19 nt, Artificial Sequence
  Description of Artificial Sequence: Synthetic oligonucleotide
cacagccagcugguuggag

SEQ ID NO: 2191343 - RNA, 19 nt, Artificial Sequence
  Description of Artificial Sequence: Synthetic oligonucleotide
cggcgaucacaucauuugc

SEQ ID NO: 2191344 - RNA, 19 nt, Artificial Sequence
  Description of Artificial Sequence: Synthetic oligonucleotide
agcugagaucgcugaucuu

SEQ ID NO: 2191345 - RNA, 19 nt, Artificial Sequence
  Description of Artificial Sequence: Synthetic oligonucleotide
ggcgaucacaucauuugcu

SEQ ID NO: 2191346 - RNA, 19 nt, Artificial Sequence
  Description of Artificial Sequence: Synthetic oligonucleotide
cagggucguccgaagaagu

SEQ ID NO: 2191347 - RNA, 19 nt, Artificial Sequence
  Description of Artificial Sequence: Synthetic oligonucleotide
caaugagaauguucugcuu

SEQ ID NO: 2191348 - RNA, 19 nt, Artificial Sequence
  Description of Artificial Sequence: Synthetic oligonucleotide
cucggcgaucacaucauuu

SEQ ID NO: 2191349 - RNA, 19 nt, Artificial Sequence
  Description of Artificial Sequence: Synthetic oligonucleotide
cuuuacucccagagggauu

SEQ ID NO: 2191350 - RNA, 19 nt, Artificial Sequence
  Description of Artificial Sequence: Synthetic oligonucleotide
gccagggucguccgaagaa

SEQ ID NO: 2191351 - RNA, 19 nt, Artificial Sequence
  Description of Artificial Sequence: Synthetic oligonucleotide
gacacacggagcagacaua

SEQ ID NO: 2191352 - RNA, 19 nt, Artificial Sequence
  Description of Artificial Sequence: Synthetic oligonucleotide
cugcagugcacuguccucu

SEQ ID NO: 2191353 - RNA, 19 nt, Artificial Sequence
  Description of Artificial Sequence: Synthetic oligonucleotide
gaucaccaauauccuugau

SEQ ID NO: 2191354 - RNA, 19 nt, Artificial Sequence
  Description of Artificial Sequence: Synthetic oligonucleotide
uggggacgcauguguuguu

SEQ ID NO: 2191355 - RNA, 19 nt, Artificial Sequence
  Description of Artificial Sequence: Synthetic oligonucleotide
ggguauaagaagcgacuuu

SEQ ID NO: 2191356 - RNA, 19 nt, Artificial Sequence
  Description of Artificial Sequence: Synthetic oligonucleotide
ccuugaucaccaauauccu

SEQ ID NO: 2191357 - RNA, 19 nt, Artificial Sequence
  Description of Artificial Sequence: Synthetic oligonucleotide
ggggacgcauguguuguuc

SEQ ID NO: 2191358 - RNA, 19 nt, Artificial Sequence
  Description of Artificial Sequence: Synthetic oligonucleotide
gcaugaacagaugggaauu

SEQ ID NO: 2191359 - RNA, 19 nt, Artificial Sequence
  Description of Artificial Sequence: Synthetic oligonucleotide
ccggguauaagaagcgacu

SEQ ID NO: 2191360 - RNA, 19 nt, Artificial Sequence
  Description of Artificial Sequence: Synthetic oligonucleotide
cagcauccaugcacuugga

SEQ ID NO: 2191361 - RNA, 19 nt, Artificial Sequence
  Description of Artificial Sequence: Synthetic oligonucleotide
gucucgcacguggugcaga

SEQ ID NO: 2191362 - RNA, 19 nt, Artificial Sequence
  Description of Artificial Sequence: Synthetic oligonucleotide
gggucguccgaagaagucu

SEQ ID NO: 2191363 - RNA, 19 nt, Artificial Sequence
  Description of Artificial Sequence: Synthetic oligonucleotide
caugaacagaugggaauuu

SEQ ID NO: 2191364 - RNA, 19 nt, Artificial Sequence
  Description of Artificial Sequence: Synthetic oligonucleotide
gguaagagauggggacgca

SEQ ID NO: 2191365 - RNA, 19 nt, Artificial Sequence
  Description of Artificial Sequence: Synthetic oligonucleotide
cucgcacguggugcagaug

SEQ ID NO: 2191366 - RNA, 19 nt, Artificial Sequence
  Description of Artificial Sequence: Synthetic oligonucleotide
cuaggaugcaggcgucaau

SEQ ID NO: 2191367 - RNA, 19 nt, Artificial Sequence
  Description of Artificial Sequence: Synthetic oligonucleotide
gaucggaggcgggaggauu

SEQ ID NO: 2191368 - RNA, 19 nt, Artificial Sequence
  Description of Artificial Sequence: Synthetic oligonucleotide
aggcagcccuguaguccac

SEQ ID NO: 2191369 - RNA, 19 nt, Artificial Sequence
  Description of Artificial Sequence: Synthetic oligonucleotide
ggcccuuuaugucacucuu

SEQ ID NO: 2191370 - RNA, 19 nt, Artificial Sequence
  Description of Artificial Sequence: Synthetic oligonucleotide
ccaccaaaucggguuggug

SEQ ID NO: 2191371 - RNA, 19 nt, Artificial Sequence
  Description of Artificial Sequence: Synthetic oligonucleotide
gcugcugucaacagcucau

SEQ ID NO: 2191372 - RNA, 19 nt, Artificial Sequence
  Description of Artificial Sequence: Synthetic oligonucleotide
ccccaccaaaucggguugg

SEQ ID NO: 2191373 - RNA, 19 nt, Artificial Sequence
  Description of Artificial Sequence: Synthetic oligonucleotide
gccuucaguacaggaggga

SEQ ID NO: 2191374 - RNA, 19 nt, Artificial Sequence
  Description of Artificial Sequence: Synthetic oligonucleotide
aggcgucaaugagaauguu

SEQ ID NO: 2191375 - RNA, 19 nt, Artificial Sequence
  Description of Artificial Sequence: Synthetic oligonucleotide
cgcacguggugcagauggg

SEQ ID NO: 2191376 - RNA, 19 nt, Artificial Sequence
  Description of Artificial Sequence: Synthetic oligonucleotide
ccugaaugugacuggcuau

SEQ ID NO: 2191377 - RNA, 19 nt, Artificial Sequence
  Description of Artificial Sequence: Synthetic oligonucleotide
gguuggugucaacuaugau

SEQ ID NO: 2191378 - RNA, 19 nt, Artificial Sequence
  Description of Artificial Sequence: Synthetic oligonucleotide
cgcauguguuguucaucac

SEQ ID NO: 2191379 - RNA, 19 nt, Artificial Sequence
  Description of Artificial Sequence: Synthetic oligonucleotide
ccaaaucggguugguguca

SEQ ID NO: 2191380 - RNA, 19 nt, Artificial Sequence
  Description of Artificial Sequence: Synthetic oligonucleotide
ggaaagggguugccagggu

SEQ ID NO: 2191381 - RNA, 19 nt, Artificial Sequence
  Description of Artificial Sequence: Synthetic oligonucleotide
cugccguucuuccccgggu

SEQ ID NO: 2191382 - RNA, 19 nt, Artificial Sequence
  Description of Artificial Sequence: Synthetic oligonucleotide
caucuucgucagcagccau

SEQ ID NO: 2191383 - RNA, 19 nt, Artificial Sequence
  Description of Artificial Sequence: Synthetic oligonucleotide
gcccugaauccgagucuag

SEQ ID NO: 2191384 - RNA, 19 nt, Artificial Sequence
  Description of Artificial Sequence: Synthetic oligonucleotide
gggaauuugccagcaccau

SEQ ID NO: 2191385 - RNA, 19 nt, Artificial Sequence
  Description of Artificial Sequence: Synthetic oligonucleotide
ccuuuaugucacucuuggu

SEQ ID NO: 2191386 - RNA, 19 nt, Artificial Sequence
  Description of Artificial Sequence: Synthetic oligonucleotide
cguccgaagaagucuccaa

SEQ ID NO: 2191387 - RNA, 19 nt, Artificial Sequence
  Description of Artificial Sequence: Synthetic oligonucleotide
gagcagcgaagaugacauu

SEQ ID NO: 2191388 - RNA, 19 nt, Artificial Sequence
  Description of Artificial Sequence: Synthetic oligonucleotide
ggcgagggauccugcuagu

SEQ ID NO: 2191389 - RNA, 19 nt, Artificial Sequence
  Description of Artificial Sequence: Synthetic oligonucleotide
cguucuuccccggguauaa

SEQ ID NO: 2191390 - RNA, 19 nt, Artificial Sequence
  Description of Artificial Sequence: Synthetic oligonucleotide
gcagcccuguaguccacau

SEQ ID NO: 2191391 - RNA, 19 nt, Artificial Sequence
  Description of Artificial Sequence: Synthetic oligonucleotide
gcgagggauccugcuagua

SEQ ID NO: 2191392 - RNA, 19 nt, Artificial Sequence
  Description of Artificial Sequence: Synthetic oligonucleotide
ccccggguauaagaagcga

SEQ ID NO: 2191393 - RNA, 19 nt, Artificial Sequence
  Description of Artificial Sequence: Synthetic oligonucleotide
gccguucuuccccggguau

SEQ ID NO: 2191394 - RNA, 19 nt, Artificial Sequence
  Description of Artificial Sequence: Synthetic oligonucleotide
gcgggaggauuagcugaga

SEQ ID NO: 2191395 - RNA, 19 nt, Artificial Sequence
  Description of Artificial Sequence: Synthetic oligonucleotide
gcuggcccuuuaugucacu

SEQ ID NO: 2191396 - RNA, 19 nt, Artificial Sequence
  Description of Artificial Sequence: Synthetic oligonucleotide
ggcuuuggcgagggauccu

SEQ ID NO: 2191397 - RNA, 19 nt, Artificial Sequence
  Description of Artificial Sequence: Synthetic oligonucleotide
cgggaggauuagcugagau

SEQ ID NO: 2191398 - RNA, 19 nt, Artificial Sequence
  Description of Artificial Sequence: Synthetic oligonucleotide
ggaucggaggcgggaggau

SEQ ID NO: 2191399 - RNA, 19 nt, Artificial Sequence
  Description of Artificial Sequence: Synthetic oligonucleotide
cggguauaagaagcgacuu

SEQ ID NO: 2191400 - RNA, 19 nt, Artificial Sequence
  Description of Artificial Sequence: Synthetic oligonucleotide
ccguucuuccccggguaua

SEQ ID NO: 2191401 - RNA, 19 nt, Artificial Sequence
  Description of Artificial Sequence: Synthetic oligonucleotide
cccaccaaaucggguuggu

SEQ ID NO: 2191402 - RNA, 19 nt, Artificial Sequence
  Description of Artificial Sequence: Synthetic oligonucleotide
cggagcagacauagccaau

SEQ ID NO: 2191403 - RNA, 19 nt, Artificial Sequence
  Description of Artificial Sequence: Synthetic oligonucleotide
ccucggcgaucacaucauu

SEQ ID NO: 2191404 - RNA, 19 nt, Artificial Sequence
  Description of Artificial Sequence: Synthetic oligonucleotide
uuuggaacaaucuggaggg

SEQ ID NO: 2191405 - RNA, 19 nt, Artificial Sequence
  Description of Artificial Sequence: Synthetic oligonucleotide
aauuaagacacccuuucag

SEQ ID NO: 2191406 - RNA, 19 nt, Artificial Sequence
  Description of Artificial Sequence: Synthetic oligonucleotide
uucaguuucaugaggagcg

SEQ ID NO: 2191407 - RNA, 19 nt, Artificial Sequence
  Description of Artificial Sequence: Synthetic oligonucleotide
uuuaaauaagguuccgugg

SEQ ID NO: 2191408 - RNA, 19 nt, Artificial Sequence
  Description of Artificial Sequence: Synthetic oligonucleotide
augacuacaacccuccggc

SEQ ID NO: 2191409 - RNA, 19 nt, Artificial Sequence
  Description of Artificial Sequence: Synthetic oligonucleotide
uuuuaaauaagguuccgug

SEQ ID NO: 2191410 - RNA, 19 nt, Artificial Sequence
  Description of Artificial Sequence: Synthetic oligonucleotide
aauucucagccacagcgcc

SEQ ID NO: 2191411 - RNA, 19 nt, Artificial Sequence
  Description of Artificial Sequence: Synthetic oligonucleotide
aaugaaucgguuuggaaca

SEQ ID NO: 2191412 - RNA, 19 nt, Artificial Sequence
  Description of Artificial Sequence: Synthetic oligonucleotide
gaagaguugucccacaggg

SEQ ID NO: 2191413 - RNA, 19 nt, Artificial Sequence
  Description of Artificial Sequence: Synthetic oligonucleotide
aacacuuccgaaaaucugc

SEQ ID NO: 2191414 - RNA, 19 nt, Artificial Sequence
  Description of Artificial Sequence: Synthetic oligonucleotide
guuuggaacaaucuggagg

SEQ ID NO: 2191415 - RNA, 19 nt, Artificial Sequence
  Description of Artificial Sequence: Synthetic oligonucleotide
uuaaauaagguuccgugga

SEQ ID NO: 2191416 - RNA, 19 nt, Artificial Sequence
  Description of Artificial Sequence: Synthetic oligonucleotide
uccaauaaccuccagcucc

SEQ ID NO: 2191417 - RNA, 19 nt, Artificial Sequence
  Description of Artificial Sequence: Synthetic oligonucleotide
gaaugaaucgguuuggaac

SEQ ID NO: 2191418 - RNA, 19 nt, Artificial Sequence
  Description of Artificial Sequence: Synthetic oligonucleotide
agugguagaacucccacac

SEQ ID NO: 2191419 - RNA, 19 nt, Artificial Sequence
  Description of Artificial Sequence: Synthetic oligonucleotide
acaauuaagacacccuuuc

SEQ ID NO: 2191420 - RNA, 19 nt, Artificial Sequence
  Description of Artificial Sequence: Synthetic oligonucleotide
aaggacaauuaagacaccc

SEQ ID NO: 2191421 - RNA, 19 nt, Artificial Sequence
  Description of Artificial Sequence: Synthetic oligonucleotide
uuccauguuaaacucagcc

SEQ ID NO: 2191422 - RNA, 19 nt, Artificial Sequence
  Description of Artificial Sequence: Synthetic oligonucleotide
cagucuaugacacaacugg

SEQ ID NO: 2191423 - RNA, 19 nt, Artificial Sequence
  Description of Artificial Sequence: Synthetic oligonucleotide
uuuucuccgaaccacacca

SEQ ID NO: 2191424 - RNA, 19 nt, Artificial Sequence
  Description of Artificial Sequence: Synthetic oligonucleotide
guuaaacucagccacuggg

SEQ ID NO: 2191425 - RNA, 19 nt, Artificial Sequence
  Description of Artificial Sequence: Synthetic oligonucleotide
ugcgugaugacuacaaccc

SEQ ID NO: 2191426 - RNA, 19 nt, Artificial Sequence
  Description of Artificial Sequence: Synthetic oligonucleotide
cuagacacaggucacagag

SEQ ID NO: 2191427 - RNA, 19 nt, Artificial Sequence
  Description of Artificial Sequence: Synthetic oligonucleotide
aagacacccuuucaguuuc

SEQ ID NO: 2191428 - RNA, 19 nt, Artificial Sequence
  Description of Artificial Sequence: Synthetic oligonucleotide
gauucuggcgucuugaguc

SEQ ID NO: 2191429 - RNA, 19 nt, Artificial Sequence
  Description of Artificial Sequence: Synthetic oligonucleotide
ucuaugacacaacugggga

SEQ ID NO: 2191430 - RNA, 19 nt, Artificial Sequence
  Description of Artificial Sequence: Synthetic oligonucleotide
uccucugaaaguuggaacc

SEQ ID NO: 2191431 - RNA, 19 nt, Artificial Sequence
  Description of Artificial Sequence: Synthetic oligonucleotide
uuuguggggaggcuggagg

SEQ ID NO: 2191432 - RNA, 19 nt, Artificial Sequence
  Description of Artificial Sequence: Synthetic oligonucleotide
aaccugaaucuguuggugg

SEQ ID NO: 2191433 - RNA, 19 nt, Artificial Sequence
  Description of Artificial Sequence: Synthetic oligonucleotide
gaugacuacaacccuccgg

SEQ ID NO: 2191434 - RNA, 19 nt, Artificial Sequence
  Description of Artificial Sequence: Synthetic oligonucleotide
aaccacaccacaugagguc

SEQ ID NO: 2191435 - RNA, 19 nt, Artificial Sequence
  Description of Artificial Sequence: Synthetic oligonucleotide
aaaguuggaaccccacucu

SEQ ID NO: 2191436 - RNA, 19 nt, Artificial Sequence
  Description of Artificial Sequence: Synthetic oligonucleotide
ggaaaaugaaaccugaauc

SEQ ID NO: 2191437 - RNA, 19 nt, Artificial Sequence
  Description of Artificial Sequence: Synthetic oligonucleotide
auggcgaugugcuuugcgc

SEQ ID NO: 2191438 - RNA, 19 nt, Artificial Sequence
  Description of Artificial Sequence: Synthetic oligonucleotide
gcuaaagcuggacaaaucg

SEQ ID NO: 2191439 - RNA, 19 nt, Artificial Sequence
  Description of Artificial Sequence: Synthetic oligonucleotide
ugcaaaacacuuccgaaaa

SEQ ID NO: 2191440 - RNA, 19 nt, Artificial Sequence
  Description of Artificial Sequence: Synthetic oligonucleotide
aaucggacucuuguaauuc

SEQ ID NO: 2191441 - RNA, 19 nt, Artificial Sequence
  Description of Artificial Sequence: Synthetic oligonucleotide
agcuggacaaaucggacuc

SEQ ID NO: 2191442 - RNA, 19 nt, Artificial Sequence
  Description of Artificial Sequence: Synthetic oligonucleotide
uucacacugggcaauggcc

SEQ ID NO: 2191443 - RNA, 19 nt, Artificial Sequence
  Description of Artificial Sequence: Synthetic oligonucleotide
uacaccgaguuuuaaauaa

SEQ ID NO: 2191444 - RNA, 19 nt, Artificial Sequence
  Description of Artificial Sequence: Synthetic oligonucleotide
ccauauuugaacucggacg

SEQ ID NO: 2191445 - RNA, 19 nt, Artificial Sequence
  Description of Artificial Sequence: Synthetic oligonucleotide
aauaagguuccguggauuu

SEQ ID NO: 2191446 - RNA, 19 nt, Artificial Sequence
  Description of Artificial Sequence: Synthetic oligonucleotide
aaagcuggacaaaucggac

SEQ ID NO: 2191447 - RNA, 19 nt, Artificial Sequence
  Description of Artificial Sequence: Synthetic oligonucleotide
cauauuugaacucggacga

SEQ ID NO: 2191448 - RNA, 19 nt, Artificial Sequence
  Description of Artificial Sequence: Synthetic oligonucleotide
acuaacaccagccccugag

SEQ ID NO: 2191449 - RNA, 19 nt, Artificial Sequence
  Description of Artificial Sequence: Synthetic oligonucleotide
uucagucuaugacacaacu

SEQ ID NO: 2191450 - RNA, 19 nt, Artificial Sequence
  Description of Artificial Sequence: Synthetic oligonucleotide
uguuaaacucagccacugg

SEQ ID NO: 2191451 - RNA, 19 nt, Artificial Sequence
  Description of Artificial Sequence: Synthetic oligonucleotide
uccagguuuucuccgaacc

SEQ ID NO: 2191452 - RNA, 19 nt, Artificial Sequence
  Description of Artificial Sequence: Synthetic oligonucleotide
aaguuggaaccccacucuc

SEQ ID NO: 2191453 - RNA, 19 nt, Artificial Sequence
  Description of Artificial Sequence: Synthetic oligonucleotide
aucggguuuucuuugaagu

SEQ ID NO: 2191454 - RNA, 19 nt, Artificial Sequence
  Description of Artificial Sequence: Synthetic oligonucleotide
ucagucuaugacacaacug

SEQ ID NO: 2191455 - RNA, 19 nt, Artificial Sequence
  Description of Artificial Sequence: Synthetic oligonucleotide
auuugaacucggacgagcc

SEQ ID NO: 2191456 - RNA, 19 nt, Artificial Sequence
  Description of Artificial Sequence: Synthetic oligonucleotide
uuucuuugaaguacuacuu

SEQ ID NO: 2191457 - RNA, 19 nt, Artificial Sequence
  Description of Artificial Sequence: Synthetic oligonucleotide
uaauucucagccacagcgc

SEQ ID NO: 2191458 - RNA, 19 nt, Artificial Sequence
  Description of Artificial Sequence: Synthetic oligonucleotide
uucaugaggagcgagggcu

SEQ ID NO: 2191459 - RNA, 19 nt, Artificial Sequence
  Description of Artificial Sequence: Synthetic oligonucleotide
aucgguuuggaacaaucug

SEQ ID NO: 2191460 - RNA, 19 nt, Artificial Sequence
  Description of Artificial Sequence: Synthetic oligonucleotide
guuggaaccccacucuccg

SEQ ID NO: 2191461 - RNA, 19 nt, Artificial Sequence
  Description of Artificial Sequence: Synthetic oligonucleotide
aaaugaaaccugaaucugu

SEQ ID NO: 2191462 - RNA, 19 nt, Artificial Sequence
  Description of Artificial Sequence: Synthetic oligonucleotide
caccgaguuuuaaauaagg

SEQ ID NO: 2191463 - RNA, 19 nt, Artificial Sequence
  Description of Artificial Sequence: Synthetic oligonucleotide
gaggcuucagucuaugaca

SEQ ID NO: 2191464 - RNA, 19 nt, Artificial Sequence
  Description of Artificial Sequence: Synthetic oligonucleotide
cugcgugaugacuacaacc

SEQ ID NO: 2191465 - RNA, 19 nt, Artificial Sequence
  Description of Artificial Sequence: Synthetic oligonucleotide
ucacgaucggggaaguuug

SEQ ID NO: 2191466 - RNA, 19 nt, Artificial Sequence
  Description of Artificial Sequence: Synthetic oligonucleotide
ugaggucgcaguaagccac

SEQ ID NO: 2191467 - RNA, 19 nt, Artificial Sequence
  Description of Artificial Sequence: Synthetic oligonucleotide
acaaaucggacucuuguaa

SEQ ID NO: 2191468 - RNA, 19 nt, Artificial Sequence
  Description of Artificial Sequence: Synthetic oligonucleotide
gacucuuguaauucucagc

SEQ ID NO: 2191469 - RNA, 19 nt, Artificial Sequence
  Description of Artificial Sequence: Synthetic oligonucleotide
aagcuggacaaaucggacu

SEQ ID NO: 2191470 - RNA, 19 nt, Artificial Sequence
  Description of Artificial Sequence: Synthetic oligonucleotide
uauuugaacucggacgagc

SEQ ID NO: 2191471 - RNA, 19 nt, Artificial Sequence
  Description of Artificial Sequence: Synthetic oligonucleotide
uaagguuccguggauuucc

SEQ ID NO: 2191472 - RNA, 19 nt, Artificial Sequence
  Description of Artificial Sequence: Synthetic oligonucleotide
aacaaucuggaggggucgc

SEQ ID NO: 2191473 - RNA, 19 nt, Artificial Sequence
  Description of Artificial Sequence: Synthetic oligonucleotide
guuucaugaggagcgaggg

SEQ ID NO: 2191474 - RNA, 19 nt, Artificial Sequence
  Description of Artificial Sequence: Synthetic oligonucleotide
aaaccugaaucuguuggug

SEQ ID NO: 2191475 - RNA, 19 nt, Artificial Sequence
  Description of Artificial Sequence: Synthetic oligonucleotide
acucggacgagccauggug

SEQ ID NO: 2191476 - RNA, 19 nt, Artificial Sequence
  Description of Artificial Sequence: Synthetic oligonucleotide
gucuaugacacaacugggg

SEQ ID NO: 2191477 - RNA, 19 nt, Artificial Sequence
  Description of Artificial Sequence: Synthetic oligonucleotide
aauguucugcgugaugacu

SEQ ID NO: 2191478 - RNA, 19 nt, Artificial Sequence
  Description of Artificial Sequence: Synthetic oligonucleotide
acuuccgaaaaucugccau

SEQ ID NO: 2191479 - RNA, 19 nt, Artificial Sequence
  Description of Artificial Sequence: Synthetic oligonucleotide
aaaucggacucuuguaauu

SEQ ID NO: 2191480 - RNA, 19 nt, Artificial Sequence
  Description of Artificial Sequence: Synthetic oligonucleotide
uccgaaccacaccacauga

SEQ ID NO: 2191481 - RNA, 19 nt, Artificial Sequence
  Description of Artificial Sequence: Synthetic oligonucleotide
cuggcaaaggccugaggcg

SEQ ID NO: 2191482 - RNA, 19 nt, Artificial Sequence
  Description of Artificial Sequence: Synthetic oligonucleotide
aacaccagccccugagaug

SEQ ID NO: 2191483 - RNA, 19 nt, Artificial Sequence
  Description of Artificial Sequence: Synthetic oligonucleotide
gauggcgaugugcuuugcg

SEQ ID NO: 2191484 - RNA, 19 nt, Artificial Sequence
  Description of Artificial Sequence: Synthetic oligonucleotide
uaaauaagguuccguggau

SEQ ID NO: 2191485 - RNA, 19 nt, Artificial Sequence
  Description of Artificial Sequence: Synthetic oligonucleotide
ucgaagccgagcuucacac

SEQ ID NO: 2191486 - RNA, 19 nt, Artificial Sequence
  Description of Artificial Sequence: Synthetic oligonucleotide
gcagaucuugcuuuguggg

SEQ ID NO: 2191487 - RNA, 19 nt, Artificial Sequence
  Description of Artificial Sequence: Synthetic oligonucleotide
ugaaucuguugguggcugg

SEQ ID NO: 2191488 - RNA, 19 nt, Artificial Sequence
  Description of Artificial Sequence: Synthetic oligonucleotide
aggauccagguuuucuccg

SEQ ID NO: 2191489 - RNA, 19 nt, Artificial Sequence
  Description of Artificial Sequence: Synthetic oligonucleotide
acacuuccgaaaaucugcc

SEQ ID NO: 2191490 - RNA, 19 nt, Artificial Sequence
  Description of Artificial Sequence: Synthetic oligonucleotide
agaacucccacaccuguga

SEQ ID NO: 2191491 - RNA, 19 nt, Artificial Sequence
  Description of Artificial Sequence: Synthetic oligonucleotide
aaucuguugguggcugggg

SEQ ID NO: 2191492 - RNA, 19 nt, Artificial Sequence
  Description of Artificial Sequence: Synthetic oligonucleotide
aaucgguuuggaacaaucu

SEQ ID NO: 2191493 - RNA, 19 nt, Artificial Sequence
  Description of Artificial Sequence: Synthetic oligonucleotide
gaacaaucuggaggggucg

SEQ ID NO: 2191494 - RNA, 19 nt, Artificial Sequence
  Description of Artificial Sequence: Synthetic oligonucleotide
uccugcuaaagcuggacaa

SEQ ID NO: 2191495 - RNA, 19 nt, Artificial Sequence
  Description of Artificial Sequence: Synthetic oligonucleotide
uuucaugaggagcgagggc

SEQ ID NO: 2191496 - RNA, 19 nt, Artificial Sequence
  Description of Artificial Sequence: Synthetic oligonucleotide
aguuggaaccccacucucc

SEQ ID NO: 2191497 - RNA, 19 nt, Artificial Sequence
  Description of Artificial Sequence: Synthetic oligonucleotide
aacccuccggcccuggucu

SEQ ID NO: 2191498 - RNA, 19 nt, Artificial Sequence
  Description of Artificial Sequence: Synthetic oligonucleotide
gaucggggaaguuugucca

SEQ ID NO: 2191499 - RNA, 19 nt, Artificial Sequence
  Description of Artificial Sequence: Synthetic oligonucleotide
ugugauggguugcuggcaa

SEQ ID NO: 2191500 - RNA, 19 nt, Artificial Sequence
  Description of Artificial Sequence: Synthetic oligonucleotide
aaaggacaauuaagacacc

SEQ ID NO: 2191501 - RNA, 19 nt, Artificial Sequence
  Description of Artificial Sequence: Synthetic oligonucleotide
aacucccacaccugugaug

SEQ ID NO: 2191502 - RNA, 19 nt, Artificial Sequence
  Description of Artificial Sequence: Synthetic oligonucleotide
cuccgcacuaacaccagcc

SEQ ID NO: 2191503 - RNA, 19 nt, Artificial Sequence
  Description of Artificial Sequence: Synthetic oligonucleotide
uuccugcuaaagcuggaca

SEQ ID NO: 2191504 - RNA, 19 nt, Artificial Sequence
  Description of Artificial Sequence: Synthetic oligonucleotide
ugaugacuacaacccuccg

SEQ ID NO: 2191505 - RNA, 19 nt, Artificial Sequence
  Description of Artificial Sequence: Synthetic oligonucleotide
uucugcgugaugacuacaa

SEQ ID NO: 2191506 - RNA, 19 nt, Artificial Sequence
  Description of Artificial Sequence: Synthetic oligonucleotide
caggauccagguuuucucc

SEQ ID NO: 2191507 - RNA, 19 nt, Artificial Sequence
  Description of Artificial Sequence: Synthetic oligonucleotide
cacaugaggucgcaguaag

SEQ ID NO: 2191508 - RNA, 19 nt, Artificial Sequence
  Description of Artificial Sequence: Synthetic oligonucleotide
uccuugcuccgcaugaccu

SEQ ID NO: 2191509 - RNA, 19 nt, Artificial Sequence
  Description of Artificial Sequence: Synthetic oligonucleotide
acuacaacccuccggcccu

SEQ ID NO: 2191510 - RNA, 19 nt, Artificial Sequence
  Description of Artificial Sequence: Synthetic oligonucleotide
agucuaugacacaacuggg

SEQ ID NO: 2191511 - RNA, 19 nt, Artificial Sequence
  Description of Artificial Sequence: Synthetic oligonucleotide
uucuccgaaccacaccaca

SEQ ID NO: 2191512 - RNA, 19 nt, Artificial Sequence
  Description of Artificial Sequence: Synthetic oligonucleotide
uccgcacuaacaccagccc

SEQ ID NO: 2191513 - RNA, 19 nt, Artificial Sequence
  Description of Artificial Sequence: Synthetic oligonucleotide
accacaccacaugaggucg

SEQ ID NO: 2191514 - RNA, 19 nt, Artificial Sequence
  Description of Artificial Sequence: Synthetic oligonucleotide
cuucacacugggcaauggc

SEQ ID NO: 2191515 - RNA, 19 nt, Artificial Sequence
  Description of Artificial Sequence: Synthetic oligonucleotide
gaaucuguugguggcuggg

SEQ ID NO: 2191516 - RNA, 19 nt, Artificial Sequence
  Description of Artificial Sequence: Synthetic oligonucleotide
ugcgcuugcaaaacacuuc

SEQ ID NO: 2191517 - RNA, 19 nt, Artificial Sequence
  Description of Artificial Sequence: Synthetic oligonucleotide
gaucuugcuuuguggggag

SEQ ID NO: 2191518 - RNA, 19 nt, Artificial Sequence
  Description of Artificial Sequence: Synthetic oligonucleotide
uagugguagaacucccaca

SEQ ID NO: 2191519 - RNA, 19 nt, Artificial Sequence
  Description of Artificial Sequence: Synthetic oligonucleotide
gucgcaguaagccaccaca

SEQ ID NO: 2191520 - RNA, 19 nt, Artificial Sequence
  Description of Artificial Sequence: Synthetic oligonucleotide
gauggguugcuggcaaagg

SEQ ID NO: 2191521 - RNA, 19 nt, Artificial Sequence
  Description of Artificial Sequence: Synthetic oligonucleotide
uagaacucccacaccugug

SEQ ID NO: 2191522 - RNA, 19 nt, Artificial Sequence
  Description of Artificial Sequence: Synthetic oligonucleotide
aaauaagguuccguggauu

SEQ ID NO: 2191523 - RNA, 19 nt, Artificial Sequence
  Description of Artificial Sequence: Synthetic oligonucleotide
guagugguagaacucccac

SEQ ID NO: 2191524 - RNA, 19 nt, Artificial Sequence
  Description of Artificial Sequence: Synthetic oligonucleotide
agaccacagaggauguccc

SEQ ID NO: 2191525 - RNA, 19 nt, Artificial Sequence
  Description of Artificial Sequence: Synthetic oligonucleotide
guuuucuccgaaccacacc

SEQ ID NO: 2191526 - RNA, 19 nt, Artificial Sequence
  Description of Artificial Sequence: Synthetic oligonucleotide
guuccguggauuuccagca

SEQ ID NO: 2191527 - RNA, 19 nt, Artificial Sequence
  Description of Artificial Sequence: Synthetic oligonucleotide
ucuuuccaaaggacaauua

SEQ ID NO: 2191528 - RNA, 19 nt, Artificial Sequence
  Description of Artificial Sequence: Synthetic oligonucleotide
cuugcaaaacacuuccgaa

SEQ ID NO: 2191529 - RNA, 19 nt, Artificial Sequence
  Description of Artificial Sequence: Synthetic oligonucleotide
agaucuugcuuugugggga

SEQ ID NO: 2191530 - RNA, 19 nt, Artificial Sequence
  Description of Artificial Sequence: Synthetic oligonucleotide
acauccugccuccucacga

SEQ ID NO: 2191531 - RNA, 19 nt, Artificial Sequence
  Description of Artificial Sequence: Synthetic oligonucleotide
augaaaccugaaucuguug

SEQ ID NO: 2191532 - RNA, 19 nt, Artificial Sequence
  Description of Artificial Sequence: Synthetic oligonucleotide
acaccagccccugagauga

SEQ ID NO: 2191533 - RNA, 19 nt, Artificial Sequence
  Description of Artificial Sequence: Synthetic oligonucleotide
caucggguuuucuuugaag

SEQ ID NO: 2191534 - RNA, 19 nt, Artificial Sequence
  Description of Artificial Sequence: Synthetic oligonucleotide
ugcuaaagcuggacaaauc

SEQ ID NO: 2191535 - RNA, 19 nt, Artificial Sequence
  Description of Artificial Sequence: Synthetic oligonucleotide
gauguccccaccacuagac

SEQ ID NO: 2191536 - RNA, 19 nt, Artificial Sequence
  Description of Artificial Sequence: Synthetic oligonucleotide
acaugagguacaccgaguu

SEQ ID NO: 2191537 - RNA, 19 nt, Artificial Sequence
  Description of Artificial Sequence: Synthetic oligonucleotide
ugccauauuugaacucgga

SEQ ID NO: 2191538 - RNA, 19 nt, Artificial Sequence
  Description of Artificial Sequence: Synthetic oligonucleotide
gguuccguggauuuccagc

SEQ ID NO: 2191539 - RNA, 19 nt, Artificial Sequence
  Description of Artificial Sequence: Synthetic oligonucleotide
gaaucgguuuggaacaauc

SEQ ID NO: 2191540 - RNA, 19 nt, Artificial Sequence
  Description of Artificial Sequence: Synthetic oligonucleotide
uugaacucggacgagccau

SEQ ID NO: 2191541 - RNA, 19 nt, Artificial Sequence
  Description of Artificial Sequence: Synthetic oligonucleotide
uccgcaugaccucccuccg

SEQ ID NO: 2191542 - RNA, 19 nt, Artificial Sequence
  Description of Artificial Sequence: Synthetic oligonucleotide
auguuaaacucagccacug

SEQ ID NO: 2191543 - RNA, 19 nt, Artificial Sequence
  Description of Artificial Sequence: Synthetic oligonucleotide
ucugcgugaugacuacaac

SEQ ID NO: 2191544 - RNA, 19 nt, Artificial Sequence
  Description of Artificial Sequence: Synthetic oligonucleotide
uugcgcuugcaaaacacuu

SEQ ID NO: 2191545 - RNA, 19 nt, Artificial Sequence
  Description of Artificial Sequence: Synthetic oligonucleotide
ucuccgaaccacaccacau

SEQ ID NO: 2191546 - RNA, 19 nt, Artificial Sequence
  Description of Artificial Sequence: Synthetic oligonucleotide
acagcgccacaugagguac

SEQ ID NO: 2191547 - RNA, 19 nt, Artificial Sequence
  Description of Artificial Sequence: Synthetic oligonucleotide
uguucugcgugaugacuac

SEQ ID NO: 2191548 - RNA, 19 nt, Artificial Sequence
  Description of Artificial Sequence: Synthetic oligonucleotide
auaagguuccguggauuuc

SEQ ID NO: 2191549 - RNA, 19 nt, Artificial Sequence
  Description of Artificial Sequence: Synthetic oligonucleotide
uggaacaaucuggaggggu

SEQ ID NO: 2191550 - RNA, 19 nt, Artificial Sequence
  Description of Artificial Sequence: Synthetic oligonucleotide
augauggcgaugugcuuug

SEQ ID NO: 2191551 - RNA, 19 nt, Artificial Sequence
  Description of Artificial Sequence: Synthetic oligonucleotide
augaggucgcaguaagcca

SEQ ID NO: 2191552 - RNA, 19 nt, Artificial Sequence
  Description of Artificial Sequence: Synthetic oligonucleotide
ggguagaccacagaggaug

SEQ ID NO: 2191553 - RNA, 19 nt, Artificial Sequence
  Description of Artificial Sequence: Synthetic oligonucleotide
ggugguuuccauguuaaac

SEQ ID NO: 2191554 - RNA, 19 nt, Artificial Sequence
  Description of Artificial Sequence: Synthetic oligonucleotide
cugaaaguuggaaccccac

SEQ ID NO: 2191555 - RNA, 19 nt, Artificial Sequence
  Description of Artificial Sequence: Synthetic oligonucleotide
ggaagaguugucccacagg

SEQ ID NO: 2191556 - RNA, 19 nt, Artificial Sequence
  Description of Artificial Sequence: Synthetic oligonucleotide
accacuagacacaggucac

SEQ ID NO: 2191557 - RNA, 19 nt, Artificial Sequence
  Description of Artificial Sequence: Synthetic oligonucleotide
guccacugggauucuggcg

SEQ ID NO: 2191558 - RNA, 19 nt, Artificial Sequence
  Description of Artificial Sequence: Synthetic oligonucleotide
uggcgaugugcuuugcgcu

SEQ ID NO: 2191559 - RNA, 19 nt, Artificial Sequence
  Description of Artificial Sequence: Synthetic oligonucleotide
gacaaaucggacucuugua

SEQ ID NO: 2191560 - RNA, 19 nt, Artificial Sequence
  Description of Artificial Sequence: Synthetic oligonucleotide
cacucuccgcacuaacacc

SEQ ID NO: 2191561 - RNA, 19 nt, Artificial Sequence
  Description of Artificial Sequence: Synthetic oligonucleotide
cugggacuccccuggaagc

SEQ ID NO: 2191562 - RNA, 19 nt, Artificial Sequence
  Description of Artificial Sequence: Synthetic oligonucleotide
agguacaccgaguuuuaaa

SEQ ID NO: 2191563 - RNA, 19 nt, Artificial Sequence
  Description of Artificial Sequence: Synthetic oligonucleotide
aacauggcagcuggguaga

SEQ ID NO: 2191564 - RNA, 19 nt, Artificial Sequence
  Description of Artificial Sequence: Synthetic oligonucleotide
accgaguuuuaaauaaggu

SEQ ID NO: 2191565 - RNA, 19 nt, Artificial Sequence
  Description of Artificial Sequence: Synthetic oligonucleotide
ggacucuuguaauucucag

SEQ ID NO: 2191566 - RNA, 19 nt, Artificial Sequence
  Description of Artificial Sequence: Synthetic oligonucleotide
ucggguuuucuuugaagua

SEQ ID NO: 2191567 - RNA, 19 nt, Artificial Sequence
  Description of Artificial Sequence: Synthetic oligonucleotide
cuugcggugcagcucauca

SEQ ID NO: 2191568 - RNA, 19 nt, Artificial Sequence
  Description of Artificial Sequence: Synthetic oligonucleotide
aggauguccccaccacuag

SEQ ID NO: 2191569 - RNA, 19 nt, Artificial Sequence
  Description of Artificial Sequence: Synthetic oligonucleotide
ucgcaucggguuuucuuug

SEQ ID NO: 2191570 - RNA, 19 nt, Artificial Sequence
  Description of Artificial Sequence: Synthetic oligonucleotide
uuggugccagccuugcggu

SEQ ID NO: 2191571 - RNA, 19 nt, Artificial Sequence
  Description of Artificial Sequence: Synthetic oligonucleotide
aucuguugguggcuggggu

SEQ ID NO: 2191572 - RNA, 19 nt, Artificial Sequence
  Description of Artificial Sequence: Synthetic oligonucleotide
ucuccgcacuaacaccagc

SEQ ID NO: 2191573 - RNA, 19 nt, Artificial Sequence
  Description of Artificial Sequence: Synthetic oligonucleotide
uuccguggauuuccagcag

SEQ ID NO: 2191574 - RNA, 19 nt, Artificial Sequence
  Description of Artificial Sequence: Synthetic oligonucleotide
acaugaggucgcaguaagc

SEQ ID NO: 2191575 - RNA, 19 nt, Artificial Sequence
  Description of Artificial Sequence: Synthetic oligonucleotide
auucuggcgucuugagucu

SEQ ID NO: 2191576 - RNA, 19 nt, Artificial Sequence
  Description of Artificial Sequence: Synthetic oligonucleotide
cuugagucucugguucugg

SEQ ID NO: 2191577 - RNA, 19 nt, Artificial Sequence
  Description of Artificial Sequence: Synthetic oligonucleotide
cuugcuccgcaugaccucc

SEQ ID NO: 2191578 - RNA, 19 nt, Artificial Sequence
  Description of Artificial Sequence: Synthetic oligonucleotide
uggcaaaggccugaggcgu

SEQ ID NO: 2191579 - RNA, 19 nt, Artificial Sequence
  Description of Artificial Sequence: Synthetic oligonucleotide
ucgcaguaagccaccacau

SEQ ID NO: 2191580 - RNA, 19 nt, Artificial Sequence
  Description of Artificial Sequence: Synthetic oligonucleotide
agagggcgagcucucuguc

SEQ ID NO: 2191581 - RNA, 19 nt, Artificial Sequence
  Description of Artificial Sequence: Synthetic oligonucleotide
acucuccgcacuaacacca

SEQ ID NO: 2191582 - RNA, 19 nt, Artificial Sequence
  Description of Artificial Sequence: Synthetic oligonucleotide
aggacaauuaagacacccu

SEQ ID NO: 2191583 - RNA, 19 nt, Artificial Sequence
  Description of Artificial Sequence: Synthetic oligonucleotide
uccagcuccucugaaaguu

SEQ ID NO: 2191584 - RNA, 19 nt, Artificial Sequence
  Description of Artificial Sequence: Synthetic oligonucleotide
auauuugaacucggacgag

SEQ ID NO: 2191585 - RNA, 19 nt, Artificial Sequence
  Description of Artificial Sequence: Synthetic oligonucleotide
ucggacgagccauggugag

SEQ ID NO: 2191586 - RNA, 19 nt, Artificial Sequence
  Description of Artificial Sequence: Synthetic oligonucleotide
agccccugagaugauggcg

SEQ ID NO: 2191587 - RNA, 19 nt, Artificial Sequence
  Description of Artificial Sequence: Synthetic oligonucleotide
uuucuccgaaccacaccac

SEQ ID NO: 2191588 - RNA, 19 nt, Artificial Sequence
  Description of Artificial Sequence: Synthetic oligonucleotide
ggguccuggaaaaugaaac

SEQ ID NO: 2191589 - RNA, 19 nt, Artificial Sequence
  Description of Artificial Sequence: Synthetic oligonucleotide
ugacuacaacccuccggcc

SEQ ID NO: 2191590 - RNA, 19 nt, Artificial Sequence
  Description of Artificial Sequence: Synthetic oligonucleotide
gaaguuuguccacugggau

SEQ ID NO: 2191591 - RNA, 19 nt, Artificial Sequence
  Description of Artificial Sequence: Synthetic oligonucleotide
aagccgagcuucacacugg

SEQ ID NO: 2191592 - RNA, 19 nt, Artificial Sequence
  Description of Artificial Sequence: Synthetic oligonucleotide
uuccgaaaaucugccauau

SEQ ID NO: 2191593 - RNA, 19 nt, Artificial Sequence
  Description of Artificial Sequence: Synthetic oligonucleotide
caccugaggggcaaacaug

SEQ ID NO: 2191594 - RNA, 19 nt, Artificial Sequence
  Description of Artificial Sequence: Synthetic oligonucleotide
caauuaagacacccuuuca

SEQ ID NO: 2191595 - RNA, 19 nt, Artificial Sequence
  Description of Artificial Sequence: Synthetic oligonucleotide
gaacucggacgagccaugg

SEQ ID NO: 2191596 - RNA, 19 nt, Artificial Sequence
  Description of Artificial Sequence: Synthetic oligonucleotide
gcuugcaaaacacuuccga

SEQ ID NO: 2191597 - RNA, 19 nt, Artificial Sequence
  Description of Artificial Sequence: Synthetic oligonucleotide
aacucggacgagccauggu

SEQ ID NO: 2191598 - RNA, 19 nt, Artificial Sequence
  Description of Artificial Sequence: Synthetic oligonucleotide
cuccgaaccacaccacaug

SEQ ID NO: 2191599 - RNA, 19 nt, Artificial Sequence
  Description of Artificial Sequence: Synthetic oligonucleotide
cacacugggcaauggccag

SEQ ID NO: 2191600 - RNA, 19 nt, Artificial Sequence
  Description of Artificial Sequence: Synthetic oligonucleotide
uuggaacaaucuggagggg

SEQ ID NO: 2191601 - RNA, 19 nt, Artificial Sequence
  Description of Artificial Sequence: Synthetic oligonucleotide
cgaaccacaccacaugagg

SEQ ID NO: 2191602 - RNA, 19 nt, Artificial Sequence
  Description of Artificial Sequence: Synthetic oligonucleotide
gagggcgagcucucugucc

SEQ ID NO: 2191603 - RNA, 19 nt, Artificial Sequence
  Description of Artificial Sequence: Synthetic oligonucleotide
acagagggcgagcucucug

SEQ ID NO: 2191604 - RNA, 19 nt, Artificial Sequence
  Description of Artificial Sequence: Synthetic oligonucleotide
uggggugguuuccauguua

SEQ ID NO: 2191605 - RNA, 19 nt, Artificial Sequence
  Description of Artificial Sequence: Synthetic oligonucleotide
gguuuggaacaaucuggag

SEQ ID NO: 2191606 - RNA, 19 nt, Artificial Sequence
  Description of Artificial Sequence: Synthetic oligonucleotide
aagaguugucccacagggu

SEQ ID NO: 2191607 - RNA, 19 nt, Artificial Sequence
  Description of Artificial Sequence: Synthetic oligonucleotide
ugcuuugcgcuugcaaaac

SEQ ID NO: 2191608 - RNA, 19 nt, Artificial Sequence
  Description of Artificial Sequence: Synthetic oligonucleotide
ucuggcgucuugagucucu

SEQ ID NO: 2191609 - RNA, 19 nt, Artificial Sequence
  Description of Artificial Sequence: Synthetic oligonucleotide
ugacacaacuggggaauga

SEQ ID NO: 2191610 - RNA, 19 nt, Artificial Sequence
  Description of Artificial Sequence: Synthetic oligonucleotide
cacaggguccuggaaaaug

SEQ ID NO: 2191611 - RNA, 19 nt, Artificial Sequence
  Description of Artificial Sequence: Synthetic oligonucleotide
agcgccacaugagguacac

SEQ ID NO: 2191612 - RNA, 19 nt, Artificial Sequence
  Description of Artificial Sequence: Synthetic oligonucleotide
ggacgagccauggugaggc

SEQ ID NO: 2191613 - RNA, 19 nt, Artificial Sequence
  Description of Artificial Sequence: Synthetic oligonucleotide
ucaguuucaugaggagcga

SEQ ID NO: 2191614 - RNA, 19 nt, Artificial Sequence
  Description of Artificial Sequence: Synthetic oligonucleotide
guuuuaaauaagguuccgu

SEQ ID NO: 2191615 - RNA, 19 nt, Artificial Sequence
  Description of Artificial Sequence: Synthetic oligonucleotide
cugaaucuguugguggcug

SEQ ID NO: 2191616 - RNA, 19 nt, Artificial Sequence
  Description of Artificial Sequence: Synthetic oligonucleotide
gguacaccgaguuuuaaau

SEQ ID NO: 2191617 - RNA, 19 nt, Artificial Sequence
  Description of Artificial Sequence: Synthetic oligonucleotide
ugaggagcgagggcuucag

SEQ ID NO: 2191618 - RNA, 19 nt, Artificial Sequence
  Description of Artificial Sequence: Synthetic oligonucleotide
augaccucccuccgguagu

SEQ ID NO: 2191619 - RNA, 19 nt, Artificial Sequence
  Description of Artificial Sequence: Synthetic oligonucleotide
gacacaacuggggaaugaa

SEQ ID NO: 2191620 - RNA, 19 nt, Artificial Sequence
  Description of Artificial Sequence: Synthetic oligonucleotide
acgaucggggaaguuuguc

SEQ ID NO: 2191621 - RNA, 19 nt, Artificial Sequence
  Description of Artificial Sequence: Synthetic oligonucleotide
auccugccuccucacgauc

SEQ ID NO: 2191622 - RNA, 19 nt, Artificial Sequence
  Description of Artificial Sequence: Synthetic oligonucleotide
uggcgucuugagucucugg

SEQ ID NO: 2191623 - RNA, 19 nt, Artificial Sequence
  Description of Artificial Sequence: Synthetic oligonucleotide
cuggaggggucgcaucggg

SEQ ID NO: 2191624 - RNA, 19 nt, Artificial Sequence
  Description of Artificial Sequence: Synthetic oligonucleotide
ccagccccugagaugaugg

SEQ ID NO: 2191625 - RNA, 19 nt, Artificial Sequence
  Description of Artificial Sequence: Synthetic oligonucleotide
aggccugaggcgucgccag

SEQ ID NO: 2191626 - RNA, 19 nt, Artificial Sequence
  Description of Artificial Sequence: Synthetic oligonucleotide
cugaggcgucgccaggucc

SEQ ID NO: 2191627 - RNA, 19 nt, Artificial Sequence
  Description of Artificial Sequence: Synthetic oligonucleotide
uccggcccuggucucgaag

SEQ ID NO: 2191628 - RNA, 19 nt, Artificial Sequence
  Description of Artificial Sequence: Synthetic oligonucleotide
uuuguccacugggauucug

SEQ ID NO: 2191629 - RNA, 19 nt, Artificial Sequence
  Description of Artificial Sequence: Synthetic oligonucleotide
gaugauggcgaugugcuuu

SEQ ID NO: 2191630 - RNA, 19 nt, Artificial Sequence
  Description of Artificial Sequence: Synthetic oligonucleotide
ucaugaggagcgagggcuu

SEQ ID NO: 2191631 - RNA, 19 nt, Artificial Sequence
  Description of Artificial Sequence: Synthetic oligonucleotide
guacaccgaguuuuaaaua

SEQ ID NO: 2191632 - RNA, 19 nt, Artificial Sequence
  Description of Artificial Sequence: Synthetic oligonucleotide
gguuggguuccuugcuccg

SEQ ID NO: 2191633 - RNA, 19 nt, Artificial Sequence
  Description of Artificial Sequence: Synthetic oligonucleotide
guagaacucccacaccugu

SEQ ID NO: 2191634 - RNA, 19 nt, Artificial Sequence
  Description of Artificial Sequence: Synthetic oligonucleotide
ccacaugagguacaccgag

SEQ ID NO: 2191635 - RNA, 19 nt, Artificial Sequence
  Description of Artificial Sequence: Synthetic oligonucleotide
cucggacgagccaugguga

SEQ ID NO: 2191636 - RNA, 19 nt, Artificial Sequence
  Description of Artificial Sequence: Synthetic oligonucleotide
ggggaaugaaucgguuugg

SEQ ID NO: 2191637 - RNA, 19 nt, Artificial Sequence
  Description of Artificial Sequence: Synthetic oligonucleotide
uggguagaccacagaggau

SEQ ID NO: 2191638 - RNA, 19 nt, Artificial Sequence
  Description of Artificial Sequence: Synthetic oligonucleotide
cuccaauaaccuccagcuc

SEQ ID NO: 2191639 - RNA, 19 nt, Artificial Sequence
  Description of Artificial Sequence: Synthetic oligonucleotide
auguucugcgugaugacua

SEQ ID NO: 2191640 - RNA, 19 nt, Artificial Sequence
  Description of Artificial Sequence: Synthetic oligonucleotide
cuuccgaaaaucugccaua

SEQ ID NO: 2191641 - RNA, 19 nt, Artificial Sequence
  Description of Artificial Sequence: Synthetic oligonucleotide
caguuucaugaggagcgag

SEQ ID NO: 2191642 - RNA, 19 nt, Artificial Sequence
  Description of Artificial Sequence: Synthetic oligonucleotide
gaggauguccccaccacua

SEQ ID NO: 2191643 - RNA, 19 nt, Artificial Sequence
  Description of Artificial Sequence: Synthetic oligonucleotide
aguugucccacaggguccu

SEQ ID NO: 2191644 - RNA, 19 nt, Artificial Sequence
  Description of Artificial Sequence: Synthetic oligonucleotide
ucggggaaguuuguccacu

SEQ ID NO: 2191645 - RNA, 19 nt, Artificial Sequence
  Description of Artificial Sequence: Synthetic oligonucleotide
gcaggauccagguuuucuc

SEQ ID NO: 2191646 - RNA, 19 nt, Artificial Sequence
  Description of Artificial Sequence: Synthetic oligonucleotide
cuaacaccagccccugaga

SEQ ID NO: 2191647 - RNA, 19 nt, Artificial Sequence
  Description of Artificial Sequence: Synthetic oligonucleotide
agguuccguggauuuccag

SEQ ID NO: 2191648 - RNA, 19 nt, Artificial Sequence
  Description of Artificial Sequence: Synthetic oligonucleotide
acgagccauggugaggcag

SEQ ID NO: 2191649 - RNA, 19 nt, Artificial Sequence
  Description of Artificial Sequence: Synthetic oligonucleotide
ggaaugaaucgguuuggaa

SEQ ID NO: 2191650 - RNA, 19 nt, Artificial Sequence
  Description of Artificial Sequence: Synthetic oligonucleotide
cucccuccgguagugguag

SEQ ID NO: 2191651 - RNA, 19 nt, Artificial Sequence
  Description of Artificial Sequence: Synthetic oligonucleotide
ccacucuccgcacuaacac

SEQ ID NO: 2191652 - RNA, 19 nt, Artificial Sequence
  Description of Artificial Sequence: Synthetic oligonucleotide
cuuuguggggaggcuggag

SEQ ID NO: 2191653 - RNA, 19 nt, Artificial Sequence
  Description of Artificial Sequence: Synthetic oligonucleotide
ggaacaaucuggagggguc

SEQ ID NO: 2191654 - RNA, 19 nt, Artificial Sequence
  Description of Artificial Sequence: Synthetic oligonucleotide
accucccuccgguaguggu

SEQ ID NO: 2191655 - RNA, 19 nt, Artificial Sequence
  Description of Artificial Sequence: Synthetic oligonucleotide
guuggguuccuugcuccgc

SEQ ID NO: 2191656 - RNA, 19 nt, Artificial Sequence
  Description of Artificial Sequence: Synthetic oligonucleotide
cucuccgcacuaacaccag

SEQ ID NO: 2191657 - RNA, 19 nt, Artificial Sequence
  Description of Artificial Sequence: Synthetic oligonucleotide
uccgaaaaucugccauauu

SEQ ID NO: 2191658 - RNA, 19 nt, Artificial Sequence
  Description of Artificial Sequence: Synthetic oligonucleotide
cgaucggggaaguuugucc

SEQ ID NO: 2191659 - RNA, 19 nt, Artificial Sequence
  Description of Artificial Sequence: Synthetic oligonucleotide
gggauucuggcgucuugag

SEQ ID NO: 2191660 - RNA, 19 nt, Artificial Sequence
  Description of Artificial Sequence: Synthetic oligonucleotide
ccaggguuggguuccuugc

SEQ ID NO: 2191661 - RNA, 19 nt, Artificial Sequence
  Description of Artificial Sequence: Synthetic oligonucleotide
augacacaacuggggaaug

SEQ ID NO: 2191662 - RNA, 19 nt, Artificial Sequence
  Description of Artificial Sequence: Synthetic oligonucleotide
gaggucgcaguaagccacc

SEQ ID NO: 2191663 - RNA, 19 nt, Artificial Sequence
  Description of Artificial Sequence: Synthetic oligonucleotide
aagguuccguggauuucca

SEQ ID NO: 2191664 - RNA, 19 nt, Artificial Sequence
  Description of Artificial Sequence: Synthetic oligonucleotide
guucuuggugccagccuug

SEQ ID NO: 2191665 - RNA, 19 nt, Artificial Sequence
  Description of Artificial Sequence: Synthetic oligonucleotide
caaaucggacucuuguaau

SEQ ID NO: 2191666 - RNA, 19 nt, Artificial Sequence
  Description of Artificial Sequence: Synthetic oligonucleotide
aggucacagagggcgagcu

SEQ ID NO: 2191667 - RNA, 19 nt, Artificial Sequence
  Description of Artificial Sequence: Synthetic oligonucleotide
ggacaauuaagacacccuu

SEQ ID NO: 2191668 - RNA, 19 nt, Artificial Sequence
  Description of Artificial Sequence: Synthetic oligonucleotide
agaugauggcgaugugcuu

SEQ ID NO: 2191669 - RNA, 19 nt, Artificial Sequence
  Description of Artificial Sequence: Synthetic oligonucleotide
agccaccugaggggcaaac

SEQ ID NO: 2191670 - RNA, 19 nt, Artificial Sequence
  Description of Artificial Sequence: Synthetic oligonucleotide
ccucugaaaguuggaaccc

SEQ ID NO: 2191671 - RNA, 19 nt, Artificial Sequence
  Description of Artificial Sequence: Synthetic oligonucleotide
ccgguagugguagaacucc

SEQ ID NO: 2191672 - RNA, 19 nt, Artificial Sequence
  Description of Artificial Sequence: Synthetic oligonucleotide
gguuuucuccgaaccacac

SEQ ID NO: 2191673 - RNA, 19 nt, Artificial Sequence
  Description of Artificial Sequence: Synthetic oligonucleotide
cagccccugagaugauggc

SEQ ID NO: 2191674 - RNA, 19 nt, Artificial Sequence
  Description of Artificial Sequence: Synthetic oligonucleotide
ugcuccgcaugaccucccu

SEQ ID NO: 2191675 - RNA, 19 nt, Artificial Sequence
  Description of Artificial Sequence: Synthetic oligonucleotide
caguaagccaccacauccu

SEQ ID NO: 2191676 - RNA, 19 nt, Artificial Sequence
  Description of Artificial Sequence: Synthetic oligonucleotide
ggucucgaagccgagcuuc

SEQ ID NO: 2191677 - RNA, 19 nt, Artificial Sequence
  Description of Artificial Sequence: Synthetic oligonucleotide
acacaacuggggaaugaau

SEQ ID NO: 2191678 - RNA, 19 nt, Artificial Sequence
  Description of Artificial Sequence: Synthetic oligonucleotide
cuccgguagugguagaacu

SEQ ID NO: 2191679 - RNA, 19 nt, Artificial Sequence
  Description of Artificial Sequence: Synthetic oligonucleotide
gaagccaccugaggggcaa

SEQ ID NO: 2191680 - RNA, 19 nt, Artificial Sequence
  Description of Artificial Sequence: Synthetic oligonucleotide
gucgcaucggguuuucuuu

SEQ ID NO: 2191681 - RNA, 19 nt, Artificial Sequence
  Description of Artificial Sequence: Synthetic oligonucleotide
cacuuccgaaaaucugcca

SEQ ID NO: 2191682 - RNA, 19 nt, Artificial Sequence
  Description of Artificial Sequence: Synthetic oligonucleotide
cugagaugauggcgaugug

SEQ ID NO: 2191683 - RNA, 19 nt, Artificial Sequence
  Description of Artificial Sequence: Synthetic oligonucleotide
ggauccagguuuucuccga

SEQ ID NO: 2191684 - RNA, 19 nt, Artificial Sequence
  Description of Artificial Sequence: Synthetic oligonucleotide
augaaucgguuuggaacaa

SEQ ID NO: 2191685 - RNA, 19 nt, Artificial Sequence
  Description of Artificial Sequence: Synthetic oligonucleotide
uacaacccuccggcccugg

SEQ ID NO: 2191686 - RNA, 19 nt, Artificial Sequence
  Description of Artificial Sequence: Synthetic oligonucleotide
ccgaaaaucugccauauuu

SEQ ID NO: 2191687 - RNA, 19 nt, Artificial Sequence
  Description of Artificial Sequence: Synthetic oligonucleotide
ccgcacuaacaccagcccc

SEQ ID NO: 2191688 - RNA, 19 nt, Artificial Sequence
  Description of Artificial Sequence: Synthetic oligonucleotide
ggcgucuugagucucuggu

SEQ ID NO: 2191689 - RNA, 19 nt, Artificial Sequence
  Description of Artificial Sequence: Synthetic oligonucleotide
ccgaaccacaccacaugag

SEQ ID NO: 2191690 - RNA, 19 nt, Artificial Sequence
  Description of Artificial Sequence: Synthetic oligonucleotide
gcaaaggccugaggcgucg

SEQ ID NO: 2191691 - RNA, 19 nt, Artificial Sequence
  Description of Artificial Sequence: Synthetic oligonucleotide
ccggcccuggucucgaagc

SEQ ID NO: 2191692 - RNA, 19 nt, Artificial Sequence
  Description of Artificial Sequence: Synthetic oligonucleotide
augaggagcgagggcuuca

SEQ ID NO: 2191693 - RNA, 19 nt, Artificial Sequence
  Description of Artificial Sequence: Synthetic oligonucleotide
caggaagaguugucccaca

SEQ ID NO: 2191694 - RNA, 19 nt, Artificial Sequence
  Description of Artificial Sequence: Synthetic oligonucleotide
gcuuugcgcuugcaaaaca

SEQ ID NO: 2191695 - RNA, 19 nt, Artificial Sequence
  Description of Artificial Sequence: Synthetic oligonucleotide
accagccccugagaugaug

SEQ ID NO: 2191696 - RNA, 19 nt, Artificial Sequence
  Description of Artificial Sequence: Synthetic oligonucleotide
cacaugagguacaccgagu

SEQ ID NO: 2191697 - RNA, 19 nt, Artificial Sequence
  Description of Artificial Sequence: Synthetic oligonucleotide
caggguccuggaaaaugaa

SEQ ID NO: 2191698 - RNA, 19 nt, Artificial Sequence
  Description of Artificial Sequence: Synthetic oligonucleotide
uucuggcgucuugagucuc

SEQ ID NO: 2191699 - RNA, 19 nt, Artificial Sequence
  Description of Artificial Sequence: Synthetic oligonucleotide
guagaccacagaggauguc

SEQ ID NO: 2191700 - RNA, 19 nt, Artificial Sequence
  Description of Artificial Sequence: Synthetic oligonucleotide
uccucacgaucggggaagu

SEQ ID NO: 2191701 - RNA, 19 nt, Artificial Sequence
  Description of Artificial Sequence: Synthetic oligonucleotide
gaugugcuuugcgcuugca

SEQ ID NO: 2191702 - RNA, 19 nt, Artificial Sequence
  Description of Artificial Sequence: Synthetic oligonucleotide
caaaggccugaggcgucgc

SEQ ID NO: 2191703 - RNA, 19 nt, Artificial Sequence
  Description of Artificial Sequence: Synthetic oligonucleotide
ccacagaggauguccccac

SEQ ID NO: 2191704 - RNA, 19 nt, Artificial Sequence
  Description of Artificial Sequence: Synthetic oligonucleotide
cuggcgucuugagucucug

SEQ ID NO: 2191705 - RNA, 19 nt, Artificial Sequence
  Description of Artificial Sequence: Synthetic oligonucleotide
ggguuccuugcuccgcaug

SEQ ID NO: 2191706 - RNA, 19 nt, Artificial Sequence
  Description of Artificial Sequence: Synthetic oligonucleotide
gagguacaccgaguuuuaa

SEQ ID NO: 2191707 - RNA, 19 nt, Artificial Sequence
  Description of Artificial Sequence: Synthetic oligonucleotide
ggcccuggucucgaagccg

SEQ ID NO: 2191708 - RNA, 19 nt, Artificial Sequence
  Description of Artificial Sequence: Synthetic oligonucleotide
ccagguuuucuccgaacca

SEQ ID NO: 2191709 - RNA, 19 nt, Artificial Sequence
  Description of Artificial Sequence: Synthetic oligonucleotide
ccugaggggcaaacauggc

SEQ ID NO: 2191710 - RNA, 19 nt, Artificial Sequence
  Description of Artificial Sequence: Synthetic oligonucleotide
cagguccugagcuugccau

SEQ ID NO: 2191711 - RNA, 19 nt, Artificial Sequence
  Description of Artificial Sequence: Synthetic oligonucleotide
ggaaccccacucuccgcac

SEQ ID NO: 2191712 - RNA, 19 nt, Artificial Sequence
  Description of Artificial Sequence: Synthetic oligonucleotide
guucugcgugaugacuaca

SEQ ID NO: 2191713 - RNA, 19 nt, Artificial Sequence
  Description of Artificial Sequence: Synthetic oligonucleotide
cccuggaagccaccugagg

SEQ ID NO: 2191714 - RNA, 19 nt, Artificial Sequence
  Description of Artificial Sequence: Synthetic oligonucleotide
cucacgaucggggaaguuu

SEQ ID NO: 2191715 - RNA, 19 nt, Artificial Sequence
  Description of Artificial Sequence: Synthetic oligonucleotide
ggucgcaguaagccaccac

SEQ ID NO: 2191716 - RNA, 19 nt, Artificial Sequence
  Description of Artificial Sequence: Synthetic oligonucleotide
cagagggcgagcucucugu

SEQ ID NO: 2191717 - RNA, 19 nt, Artificial Sequence
  Description of Artificial Sequence: Synthetic oligonucleotide
gacgagccauggugaggca

SEQ ID NO: 2191718 - RNA, 19 nt, Artificial Sequence
  Description of Artificial Sequence: Synthetic oligonucleotide
ggcuggaggcuucagucua

SEQ ID NO: 2191719 - RNA, 19 nt, Artificial Sequence
  Description of Artificial Sequence: Synthetic oligonucleotide
cgcuugcaaaacacuuccg

SEQ ID NO: 2191720 - RNA, 19 nt, Artificial Sequence
  Description of Artificial Sequence: Synthetic oligonucleotide
acccuccggcccuggucuc

SEQ ID NO: 2191721 - RNA, 19 nt, Artificial Sequence
  Description of Artificial Sequence: Synthetic oligonucleotide
ggauucuggcgucuugagu

SEQ ID NO: 2191722 - RNA, 19 nt, Artificial Sequence
  Description of Artificial Sequence: Synthetic oligonucleotide
ccacaccacaugaggucgc

SEQ ID NO: 2191723 - RNA, 19 nt, Artificial Sequence
  Description of Artificial Sequence: Synthetic oligonucleotide
ggugaggcagaucuugcuu

SEQ ID NO: 2191724 - RNA, 19 nt, Artificial Sequence
  Description of Artificial Sequence: Synthetic oligonucleotide
gacuccccuggaagccacc

SEQ ID NO: 2191725 - RNA, 19 nt, Artificial Sequence
  Description of Artificial Sequence: Synthetic oligonucleotide
gguugcuggcaaaggccug

SEQ ID NO: 2191726 - RNA, 19 nt, Artificial Sequence
  Description of Artificial Sequence: Synthetic oligonucleotide
cgguagugguagaacuccc

SEQ ID NO: 2191727 - RNA, 19 nt, Artificial Sequence
  Description of Artificial Sequence: Synthetic oligonucleotide
ccaccacuagacacagguc

SEQ ID NO: 2191728 - RNA, 19 nt, Artificial Sequence
  Description of Artificial Sequence: Synthetic oligonucleotide
gcgaugugcuuugcgcuug

SEQ ID NO: 2191729 - RNA, 19 nt, Artificial Sequence
  Description of Artificial Sequence: Synthetic oligonucleotide
cacaccacaugaggucgca

SEQ ID NO: 2191730 - RNA, 19 nt, Artificial Sequence
  Description of Artificial Sequence: Synthetic oligonucleotide
caugagguacaccgaguuu

SEQ ID NO: 2191731 - RNA, 19 nt, Artificial Sequence
  Description of Artificial Sequence: Synthetic oligonucleotide
ccaauaaccuccagcuccu

SEQ ID NO: 2191732 - RNA, 19 nt, Artificial Sequence
  Description of Artificial Sequence: Synthetic oligonucleotide
gcggugcagcucaucaaug

SEQ ID NO: 2191733 - RNA, 19 nt, Artificial Sequence
  Description of Artificial Sequence: Synthetic oligonucleotide
gccuccucacgaucgggga

SEQ ID NO: 2191734 - RNA, 19 nt, Artificial Sequence
  Description of Artificial Sequence: Synthetic oligonucleotide
cuacaacccuccggcccug

SEQ ID NO: 2191735 - RNA, 19 nt, Artificial Sequence
  Description of Artificial Sequence: Synthetic oligonucleotide
ucccuccgguagugguaga

SEQ ID NO: 2191736 - RNA, 19 nt, Artificial Sequence
  Description of Artificial Sequence: Synthetic oligonucleotide
gaggggucgcaucggguuu

SEQ ID NO: 2191737 - RNA, 19 nt, Artificial Sequence
  Description of Artificial Sequence: Synthetic oligonucleotide
caggguuggguuccuugcu

SEQ ID NO: 2191738 - RNA, 19 nt, Artificial Sequence
  Description of Artificial Sequence: Synthetic oligonucleotide
agacacccuuucaguuuca

SEQ ID NO: 2191739 - RNA, 19 nt, Artificial Sequence
  Description of Artificial Sequence: Synthetic oligonucleotide
ggguugcuggcaaaggccu

SEQ ID NO: 2191740 - RNA, 19 nt, Artificial Sequence
  Description of Artificial Sequence: Synthetic oligonucleotide
aggggucgcaucggguuuu

SEQ ID NO: 2191741 - RNA, 19 nt, Artificial Sequence
  Description of Artificial Sequence: Synthetic oligonucleotide
ccuccgguagugguagaac

SEQ ID NO: 2191742 - RNA, 19 nt, Artificial Sequence
  Description of Artificial Sequence: Synthetic oligonucleotide
ccgcaugaccucccuccgg

SEQ ID NO: 2191743 - RNA, 19 nt, Artificial Sequence
  Description of Artificial Sequence: Synthetic oligonucleotide
gguagaccacagaggaugu

SEQ ID NO: 2191744 - RNA, 19 nt, Artificial Sequence
  Description of Artificial Sequence: Synthetic oligonucleotide
ggucgcaucggguuuucuu

SEQ ID NO: 2191745 - RNA, 19 nt, Artificial Sequence
  Description of Artificial Sequence: Synthetic oligonucleotide
cagcgccacaugagguaca

SEQ ID NO: 2191746 - RNA, 19 nt, Artificial Sequence
  Description of Artificial Sequence: Synthetic oligonucleotide
gagcuucacacugggcaau

SEQ ID NO: 2191747 - RNA, 19 nt, Artificial Sequence
  Description of Artificial Sequence: Synthetic oligonucleotide
ccugagcuugccauuuucu

SEQ ID NO: 2191748 - RNA, 19 nt, Artificial Sequence
  Description of Artificial Sequence: Synthetic oligonucleotide
cgcaguaagccaccacauc

SEQ ID NO: 2191749 - RNA, 19 nt, Artificial Sequence
  Description of Artificial Sequence: Synthetic oligonucleotide
gacacccuuucaguuucau

SEQ ID NO: 2191750 - RNA, 19 nt, Artificial Sequence
  Description of Artificial Sequence: Synthetic oligonucleotide
gcgugaugacuacaacccu

SEQ ID NO: 2191751 - RNA, 19 nt, Artificial Sequence
  Description of Artificial Sequence: Synthetic oligonucleotide
ggacuccccuggaagccac

SEQ ID NO: 2191752 - RNA, 19 nt, Artificial Sequence
  Description of Artificial Sequence: Synthetic oligonucleotide
guugucccacaggguccug

SEQ ID NO: 2191753 - RNA, 19 nt, Artificial Sequence
  Description of Artificial Sequence: Synthetic oligonucleotide
cacgaucggggaaguuugu

SEQ ID NO: 2191754 - RNA, 19 nt, Artificial Sequence
  Description of Artificial Sequence: Synthetic oligonucleotide
ugccagccuugcggugcag

SEQ ID NO: 2191755 - RNA, 19 nt, Artificial Sequence
  Description of Artificial Sequence: Synthetic oligonucleotide
gggacuccccuggaagcca

SEQ ID NO: 2191756 - RNA, 19 nt, Artificial Sequence
  Description of Artificial Sequence: Synthetic oligonucleotide
gcucaucaauguucugcgu

SEQ ID NO: 2191757 - RNA, 19 nt, Artificial Sequence
  Description of Artificial Sequence: Synthetic oligonucleotide
gcccuggucucgaagccga

SEQ ID NO: 2191758 - RNA, 19 nt, Artificial Sequence
  Description of Artificial Sequence: Synthetic oligonucleotide
gucgccagguccugagcuu

SEQ ID NO: 2191759 - RNA, 19 nt, Artificial Sequence
  Description of Artificial Sequence: Synthetic oligonucleotide
gggcaauggccaggugccc

SEQ ID NO: 2191760 - RNA, 19 nt, Artificial Sequence
  Description of Artificial Sequence: Synthetic oligonucleotide
ccugaggcgucgccagguc

SEQ ID NO: 2191761 - RNA, 19 nt, Artificial Sequence
  Description of Artificial Sequence: Synthetic oligonucleotide
ggcgaugugcuuugcgcuu

SEQ ID NO: 2191762 - RNA, 19 nt, Artificial Sequence
  Description of Artificial Sequence: Synthetic oligonucleotide
ggaagccaccugaggggca

SEQ ID NO: 2191763 - RNA, 19 nt, Artificial Sequence
  Description of Artificial Sequence: Synthetic oligonucleotide
cggacgagccauggugagg

SEQ ID NO: 2191764 - RNA, 19 nt, Artificial Sequence
  Description of Artificial Sequence: Synthetic oligonucleotide
gcgucuugagucucugguu

SEQ ID NO: 2191765 - RNA, 19 nt, Artificial Sequence
  Description of Artificial Sequence: Synthetic oligonucleotide
ccguggauuuccagcaggu

SEQ ID NO: 2191766 - RNA, 19 nt, Artificial Sequence
  Description of Artificial Sequence: Synthetic oligonucleotide
gggcgagcucucuguccac

SEQ ID NO: 2191767 - RNA, 19 nt, Artificial Sequence
  Description of Artificial Sequence: Synthetic oligonucleotide
guuuguccacugggauucu

SEQ ID NO: 2191768 - RNA, 19 nt, Artificial Sequence
  Description of Artificial Sequence: Synthetic oligonucleotide
gguccugagcuugccauuu

SEQ ID NO: 2191769 - RNA, 19 nt, Artificial Sequence
  Description of Artificial Sequence: Synthetic oligonucleotide
aggcgucgccagguccuga

SEQ ID NO: 2191770 - RNA, 19 nt, Artificial Sequence
  Description of Artificial Sequence: Synthetic oligonucleotide
ccuccucacgaucggggaa

SEQ ID NO: 2191771 - RNA, 19 nt, Artificial Sequence
  Description of Artificial Sequence: Synthetic oligonucleotide
gcgagcucucuguccaccu

SEQ ID NO: 2191772 - RNA, 19 nt, Artificial Sequence
  Description of Artificial Sequence: Synthetic oligonucleotide
gcuggacaaaucggacucu

SEQ ID NO: 2191773 - RNA, 19 nt, Artificial Sequence
  Description of Artificial Sequence: Synthetic oligonucleotide
cgccagguccugagcuugc

SEQ ID NO: 2191774 - RNA, 19 nt, Artificial Sequence
  Description of Artificial Sequence: Synthetic oligonucleotide
gcgccacaugagguacacc

SEQ ID NO: 2191775 - RNA, 19 nt, Artificial Sequence
  Description of Artificial Sequence: Synthetic oligonucleotide
ccuugcggugcagcucauc

SEQ ID NO: 2191776 - RNA, 19 nt, Artificial Sequence
  Description of Artificial Sequence: Synthetic oligonucleotide
gccugaggcgucgccaggu

SEQ ID NO: 2191777 - RNA, 19 nt, Artificial Sequence
  Description of Artificial Sequence: Synthetic oligonucleotide
ggggucgcaucggguuuuc

SEQ ID NO: 2191778 - RNA, 19 nt, Artificial Sequence
  Description of Artificial Sequence: Synthetic oligonucleotide
ccccugagaugauggcgau

SEQ ID NO: 2191779 - RNA, 19 nt, Artificial Sequence
  Description of Artificial Sequence: Synthetic oligonucleotide
gggucgcaucggguuuucu

SEQ ID NO: 2191780 - RNA, 19 nt, Artificial Sequence
  Description of Artificial Sequence: Synthetic oligonucleotide
cguggauuuccagcagguu

SEQ ID NO: 2191781 - RNA, 19 nt, Artificial Sequence
  Description of Artificial Sequence: Synthetic oligonucleotide
ccacaggguccuggaaaau

SEQ ID NO: 2191782 - RNA, 19 nt, Artificial Sequence
  Description of Artificial Sequence: Synthetic oligonucleotide
ccaccacauccugccuccu

SEQ ID NO: 2191783 - RNA, 19 nt, Artificial Sequence
  Description of Artificial Sequence: Synthetic oligonucleotide
ccucacgaucggggaaguu

SEQ ID NO: 2191784 - RNA, 19 nt, Artificial Sequence
  Description of Artificial Sequence: Synthetic oligonucleotide
gccuugcggugcagcucau

SEQ ID NO: 2191785 - RNA, 19 nt, Artificial Sequence
  Description of Artificial Sequence: Synthetic oligonucleotide
aaacucaguacucagcacc

SEQ ID NO: 2191786 - RNA, 19 nt, Artificial Sequence
  Description of Artificial Sequence: Synthetic oligonucleotide
aauggaaucacgaacacag

SEQ ID NO: 2191787 - RNA, 19 nt, Artificial Sequence
  Description of Artificial Sequence: Synthetic oligonucleotide
auuaagaucagcauucggc

SEQ ID NO: 2191788 - RNA, 19 nt, Artificial Sequence
  Description of Artificial Sequence: Synthetic oligonucleotide
aaucacaucaucacauucc

SEQ ID NO: 2191789 - RNA, 19 nt, Artificial Sequence
  Description of Artificial Sequence: Synthetic oligonucleotide
ucuacuauccccagcauug

SEQ ID NO: 2191790 - RNA, 19 nt, Artificial Sequence
  Description of Artificial Sequence: Synthetic oligonucleotide
uguguauuguguaucagca

SEQ ID NO: 2191791 - RNA, 19 nt, Artificial Sequence
  Description of Artificial Sequence: Synthetic oligonucleotide
ucucuccgcaccaagaugg

SEQ ID NO: 2191792 - RNA, 19 nt, Artificial Sequence
  Description of Artificial Sequence: Synthetic oligonucleotide
guagauaaaggccagcugc

SEQ ID NO: 2191793 - RNA, 19 nt, Artificial Sequence
  Description of Artificial Sequence: Synthetic oligonucleotide
aaaccuucucuccuaaguc

SEQ ID NO: 2191794 - RNA, 19 nt, Artificial Sequence
  Description of Artificial Sequence: Synthetic oligonucleotide
aauuaagaucagcauucgg

SEQ ID NO: 2191795 - RNA, 19 nt, Artificial Sequence
  Description of Artificial Sequence: Synthetic oligonucleotide
cuugagaucagacuucucc

SEQ ID NO: 2191796 - RNA, 19 nt, Artificial Sequence
  Description of Artificial Sequence: Synthetic oligonucleotide
ugcaauggaaucacgaaca

SEQ ID NO: 2191797 - RNA, 19 nt, Artificial Sequence
  Description of Artificial Sequence: Synthetic oligonucleotide
uggaaucacgaacacagag

SEQ ID NO: 2191798 - RNA, 19 nt, Artificial Sequence
  Description of Artificial Sequence: Synthetic oligonucleotide
uuaagaucagcauucggcu

SEQ ID NO: 2191799 - RNA, 19 nt, Artificial Sequence
  Description of Artificial Sequence: Synthetic oligonucleotide
uagagugccguauagaguc

SEQ ID NO: 2191800 - RNA, 19 nt, Artificial Sequence
  Description of Artificial Sequence: Synthetic oligonucleotide
gauaaaggccagcugcugg

SEQ ID NO: 2191801 - RNA, 19 nt, Artificial Sequence
  Description of Artificial Sequence: Synthetic oligonucleotide
uccgguggcaccaucaucc

SEQ ID NO: 2191802 - RNA, 19 nt, Artificial Sequence
  Description of Artificial Sequence: Synthetic oligonucleotide
uucccagugagaaagcgcc

SEQ ID NO: 2191803 - RNA, 19 nt, Artificial Sequence
  Description of Artificial Sequence: Synthetic oligonucleotide
gaaagcgccgcacaagccg

SEQ ID NO: 2191804 - RNA, 19 nt, Artificial Sequence
  Description of Artificial Sequence: Synthetic oligonucleotide
uguauuguguaucagcauu

SEQ ID NO: 2191805 - RNA, 19 nt, Artificial Sequence
  Description of Artificial Sequence: Synthetic oligonucleotide
gaacacagagacgucaucg

SEQ ID NO: 2191806 - RNA, 19 nt, Artificial Sequence
  Description of Artificial Sequence: Synthetic oligonucleotide
aagauggcucuacuauccc

SEQ ID NO: 2191807 - RNA, 19 nt, Artificial Sequence
  Description of Artificial Sequence: Synthetic oligonucleotide
aucacgaacacagagacgu

SEQ ID NO: 2191808 - RNA, 19 nt, Artificial Sequence
  Description of Artificial Sequence: Synthetic oligonucleotide
auuauagagugccguauag

SEQ ID NO: 2191809 - RNA, 19 nt, Artificial Sequence
  Description of Artificial Sequence: Synthetic oligonucleotide
aaauuaagaucagcauucg

SEQ ID NO: 2191810 - RNA, 19 nt, Artificial Sequence
  Description of Artificial Sequence: Synthetic oligonucleotide
aagaucagcauucggcugu

SEQ ID NO: 2191811 - RNA, 19 nt, Artificial Sequence
  Description of Artificial Sequence: Synthetic oligonucleotide
cuguccgugaaucaguggg

SEQ ID NO: 2191812 - RNA, 19 nt, Artificial Sequence
  Description of Artificial Sequence: Synthetic oligonucleotide
uuggccaacucugagaacc

SEQ ID NO: 2191813 - RNA, 19 nt, Artificial Sequence
  Description of Artificial Sequence: Synthetic oligonucleotide
uguuucugggguaaacuca

SEQ ID NO: 2191814 - RNA, 19 nt, Artificial Sequence
  Description of Artificial Sequence: Synthetic oligonucleotide
ucucccaaucacaucauca

SEQ ID NO: 2191815 - RNA, 19 nt, Artificial Sequence
  Description of Artificial Sequence: Synthetic oligonucleotide
ucguggaaacuccagucgg

SEQ ID NO: 2191816 - RNA, 19 nt, Artificial Sequence
  Description of Artificial Sequence: Synthetic oligonucleotide
ucaccugugggauggagag

SEQ ID NO: 2191817 - RNA, 19 nt, Artificial Sequence
  Description of Artificial Sequence: Synthetic oligonucleotide
uaucucaucucuccgcacc

SEQ ID NO: 2191818 - RNA, 19 nt, Artificial Sequence
  Description of Artificial Sequence: Synthetic oligonucleotide
aucagcauucggcuguggc

SEQ ID NO: 2191819 - RNA, 19 nt, Artificial Sequence
  Description of Artificial Sequence: Synthetic oligonucleotide
agagacgucaucguaggac

SEQ ID NO: 2191820 - RNA, 19 nt, Artificial Sequence
  Description of Artificial Sequence: Synthetic oligonucleotide
ucacauuccuggaaggcgc

SEQ ID NO: 2191821 - RNA, 19 nt, Artificial Sequence
  Description of Artificial Sequence: Synthetic oligonucleotide
aucaguugccaugaugacc

SEQ ID NO: 2191822 - RNA, 19 nt, Artificial Sequence
  Description of Artificial Sequence: Synthetic oligonucleotide
aaccuucucuccuaaguca

SEQ ID NO: 2191823 - RNA, 19 nt, Artificial Sequence
  Description of Artificial Sequence: Synthetic oligonucleotide
agauggcucuacuaucccc

SEQ ID NO: 2191824 - RNA, 19 nt, Artificial Sequence
  Description of Artificial Sequence: Synthetic oligonucleotide
cuguguauuguguaucagc

SEQ ID NO: 2191825 - RNA, 19 nt, Artificial Sequence
  Description of Artificial Sequence: Synthetic oligonucleotide
uucuccaccuguuuguagc

SEQ ID NO: 2191826 - RNA, 19 nt, Artificial Sequence
  Description of Artificial Sequence: Synthetic oligonucleotide
acagagacgucaucguagg

SEQ ID NO: 2191827 - RNA, 19 nt, Artificial Sequence
  Description of Artificial Sequence: Synthetic oligonucleotide
uugagaucagacuucucca

SEQ ID NO: 2191828 - RNA, 19 nt, Artificial Sequence
  Description of Artificial Sequence: Synthetic oligonucleotide
ucaucacauuccuggaagg

SEQ ID NO: 2191829 - RNA, 19 nt, Artificial Sequence
  Description of Artificial Sequence: Synthetic oligonucleotide
ugaaucaguggguacuuga

SEQ ID NO: 2191830 - RNA, 19 nt, Artificial Sequence
  Description of Artificial Sequence: Synthetic oligonucleotide
acccguaucucaucucucc

SEQ ID NO: 2191831 - RNA, 19 nt, Artificial Sequence
  Description of Artificial Sequence: Synthetic oligonucleotide
ugaugaucccugaacaaaa

SEQ ID NO: 2191832 - RNA, 19 nt, Artificial Sequence
  Description of Artificial Sequence: Synthetic oligonucleotide
aaugcuagcugguccacau

SEQ ID NO: 2191833 - RNA, 19 nt, Artificial Sequence
  Description of Artificial Sequence: Synthetic oligonucleotide
aacacagagacgucaucgu

SEQ ID NO: 2191834 - RNA, 19 nt, Artificial Sequence
  Description of Artificial Sequence: Synthetic oligonucleotide
ucugggguaaacucaguac

SEQ ID NO: 2191835 - RNA, 19 nt, Artificial Sequence
  Description of Artificial Sequence: Synthetic oligonucleotide
caugugaugaucccugaac

SEQ ID NO: 2191836 - RNA, 19 nt, Artificial Sequence
  Description of Artificial Sequence: Synthetic oligonucleotide
acuauccccagcauuggcc

SEQ ID NO: 2191837 - RNA, 19 nt, Artificial Sequence
  Description of Artificial Sequence: Synthetic oligonucleotide
cacagagacgucaucguag

SEQ ID NO: 2191838 - RNA, 19 nt, Artificial Sequence
  Description of Artificial Sequence: Synthetic oligonucleotide
uagauaaaggccagcugcu

SEQ ID NO: 2191839 - RNA, 19 nt, Artificial Sequence
  Description of Artificial Sequence: Synthetic oligonucleotide
aucaguggguacuugagau

SEQ ID NO: 2191840 - RNA, 19 nt, Artificial Sequence
  Description of Artificial Sequence: Synthetic oligonucleotide
uuccaaugcuagcuggucc

SEQ ID NO: 2191841 - RNA, 19 nt, Artificial Sequence
  Description of Artificial Sequence: Synthetic oligonucleotide
aucacaucaucacauuccu

SEQ ID NO: 2191842 - RNA, 19 nt, Artificial Sequence
  Description of Artificial Sequence: Synthetic oligonucleotide
accaagauggcucuacuau

SEQ ID NO: 2191843 - RNA, 19 nt, Artificial Sequence
  Description of Artificial Sequence: Synthetic oligonucleotide
auuuuggccaacucugaga

SEQ ID NO: 2191844 - RNA, 19 nt, Artificial Sequence
  Description of Artificial Sequence: Synthetic oligonucleotide
gucguggaaacuccagucg

SEQ ID NO: 2191845 - RNA, 19 nt, Artificial Sequence
  Description of Artificial Sequence: Synthetic oligonucleotide
ggacagaccagacagggcc

SEQ ID NO: 2191846 - RNA, 19 nt, Artificial Sequence
  Description of Artificial Sequence: Synthetic oligonucleotide
uguuuguagcuccagccau

SEQ ID NO: 2191847 - RNA, 19 nt, Artificial Sequence
  Description of Artificial Sequence: Synthetic oligonucleotide
gagaucagacuucuccacc

SEQ ID NO: 2191848 - RNA, 19 nt, Artificial Sequence
  Description of Artificial Sequence: Synthetic oligonucleotide
aagagauuauagagugccg

SEQ ID NO: 2191849 - RNA, 19 nt, Artificial Sequence
  Description of Artificial Sequence: Synthetic oligonucleotide
guauagaguccucacuggc

SEQ ID NO: 2191850 - RNA, 19 nt, Artificial Sequence
  Description of Artificial Sequence: Synthetic oligonucleotide
gucaucguaggacaccugc

SEQ ID NO: 2191851 - RNA, 19 nt, Artificial Sequence
  Description of Artificial Sequence: Synthetic oligonucleotide
ucacuggccacuauucccu

SEQ ID NO: 2191852 - RNA, 19 nt, Artificial Sequence
  Description of Artificial Sequence: Synthetic oligonucleotide
auuguguaucagcauuuug

SEQ ID NO: 2191853 - RNA, 19 nt, Artificial Sequence
  Description of Artificial Sequence: Synthetic oligonucleotide
agagauuauagagugccgu

SEQ ID NO: 2191854 - RNA, 19 nt, Artificial Sequence
  Description of Artificial Sequence: Synthetic oligonucleotide
acauccuccucuuccaaug

SEQ ID NO: 2191855 - RNA, 19 nt, Artificial Sequence
  Description of Artificial Sequence: Synthetic oligonucleotide
agcacagucaccuguggga

SEQ ID NO: 2191856 - RNA, 19 nt, Artificial Sequence
  Description of Artificial Sequence: Synthetic oligonucleotide
uggaaggcgcucuccacgg

SEQ ID NO: 2191857 - RNA, 19 nt, Artificial Sequence
  Description of Artificial Sequence: Synthetic oligonucleotide
ucaucguaggacaccugcc

SEQ ID NO: 2191858 - RNA, 19 nt, Artificial Sequence
  Description of Artificial Sequence: Synthetic oligonucleotide
ugagaucagacuucuccac

SEQ ID NO: 2191859 - RNA, 19 nt, Artificial Sequence
  Description of Artificial Sequence: Synthetic oligonucleotide
accagggcuguacagccac

SEQ ID NO: 2191860 - RNA, 19 nt, Artificial Sequence
  Description of Artificial Sequence: Synthetic oligonucleotide
uccaccuguuuguagcucc

SEQ ID NO: 2191861 - RNA, 19 nt, Artificial Sequence
  Description of Artificial Sequence: Synthetic oligonucleotide
gaaucaguggguacuugag

SEQ ID NO: 2191862 - RNA, 19 nt, Artificial Sequence
  Description of Artificial Sequence: Synthetic oligonucleotide
gagacgucaucguaggaca

SEQ ID NO: 2191863 - RNA, 19 nt, Artificial Sequence
  Description of Artificial Sequence: Synthetic oligonucleotide
ucagcauucggcuguggcu

SEQ ID NO: 2191864 - RNA, 19 nt, Artificial Sequence
  Description of Artificial Sequence: Synthetic oligonucleotide
cucccaaucacaucaucac

SEQ ID NO: 2191865 - RNA, 19 nt, Artificial Sequence
  Description of Artificial Sequence: Synthetic oligonucleotide
auaaaggccagcugcugga

SEQ ID NO: 2191866 - RNA, 19 nt, Artificial Sequence
  Description of Artificial Sequence: Synthetic oligonucleotide
ucccaaucacaucaucaca

SEQ ID NO: 2191867 - RNA, 19 nt, Artificial Sequence
  Description of Artificial Sequence: Synthetic oligonucleotide
caucguaggacaccugccc

SEQ ID NO: 2191868 - RNA, 19 nt, Artificial Sequence
  Description of Artificial Sequence: Synthetic oligonucleotide
uguggguccucucgguucc

SEQ ID NO: 2191869 - RNA, 19 nt, Artificial Sequence
  Description of Artificial Sequence: Synthetic oligonucleotide
uuauagagugccguauaga

SEQ ID NO: 2191870 - RNA, 19 nt, Artificial Sequence
  Description of Artificial Sequence: Synthetic oligonucleotide
aguacucagcacccguauc

SEQ ID NO: 2191871 - RNA, 19 nt, Artificial Sequence
  Description of Artificial Sequence: Synthetic oligonucleotide
aguaaccgagccugccuac

SEQ ID NO: 2191872 - RNA, 19 nt, Artificial Sequence
  Description of Artificial Sequence: Synthetic oligonucleotide
acuccagucgggugaacuc

SEQ ID NO: 2191873 - RNA, 19 nt, Artificial Sequence
  Description of Artificial Sequence: Synthetic oligonucleotide
ucuuccaaugcuagcuggu

SEQ ID NO: 2191874 - RNA, 19 nt, Artificial Sequence
  Description of Artificial Sequence: Synthetic oligonucleotide
acuauucccuuuguccugg

SEQ ID NO: 2191875 - RNA, 19 nt, Artificial Sequence
  Description of Artificial Sequence: Synthetic oligonucleotide
aaucacgaacacagagacg

SEQ ID NO: 2191876 - RNA, 19 nt, Artificial Sequence
  Description of Artificial Sequence: Synthetic oligonucleotide
aaagcgccgcacaagccgg

SEQ ID NO: 2191877 - RNA, 19 nt, Artificial Sequence
  Description of Artificial Sequence: Synthetic oligonucleotide
agugagaaagcgccgcaca

SEQ ID NO: 2191878 - RNA, 19 nt, Artificial Sequence
  Description of Artificial Sequence: Synthetic oligonucleotide
uaaacucaguacucagcac

SEQ ID NO: 2191879 - RNA, 19 nt, Artificial Sequence
  Description of Artificial Sequence: Synthetic oligonucleotide
cauuuuggccaacucugag

SEQ ID NO: 2191880 - RNA, 19 nt, Artificial Sequence
  Description of Artificial Sequence: Synthetic oligonucleotide
ugaucucccaggccucggg

SEQ ID NO: 2191881 - RNA, 19 nt, Artificial Sequence
  Description of Artificial Sequence: Synthetic oligonucleotide
ugagaaagcgccgcacaag

SEQ ID NO: 2191882 - RNA, 19 nt, Artificial Sequence
  Description of Artificial Sequence: Synthetic oligonucleotide
aguguuccuaguaaccgag

SEQ ID NO: 2191883 - RNA, 19 nt, Artificial Sequence
  Description of Artificial Sequence: Synthetic oligonucleotide
uucugggguaaacucagua

SEQ ID NO: 2191884 - RNA, 19 nt, Artificial Sequence
  Description of Artificial Sequence: Synthetic oligonucleotide
gucgggugaacucaccagc

SEQ ID NO: 2191885 - RNA, 19 nt, Artificial Sequence
  Description of Artificial Sequence: Synthetic oligonucleotide
gacaccugcccuucuccgg

SEQ ID NO: 2191886 - RNA, 19 nt, Artificial Sequence
  Description of Artificial Sequence: Synthetic oligonucleotide
ugggguaaacucaguacuc

SEQ ID NO: 2191887 - RNA, 19 nt, Artificial Sequence
  Description of Artificial Sequence: Synthetic oligonucleotide
uaugcccagacugcacugg

SEQ ID NO: 2191888 - RNA, 19 nt, Artificial Sequence
  Description of Artificial Sequence: Synthetic oligonucleotide
uacuauccccagcauuggc

SEQ ID NO: 2191889 - RNA, 19 nt, Artificial Sequence
  Description of Artificial Sequence: Synthetic oligonucleotide
ccuguuuguagcuccagcc

SEQ ID NO: 2191890 - RNA, 19 nt, Artificial Sequence
  Description of Artificial Sequence: Synthetic oligonucleotide
ugagaaccugugugggucc

SEQ ID NO: 2191891 - RNA, 19 nt, Artificial Sequence
  Description of Artificial Sequence: Synthetic oligonucleotide
uaaccgagccugccuaccc

SEQ ID NO: 2191892 - RNA, 19 nt, Artificial Sequence
  Description of Artificial Sequence: Synthetic oligonucleotide
gcucaggguagauaaaggc

SEQ ID NO: 2191893 - RNA, 19 nt, Artificial Sequence
  Description of Artificial Sequence: Synthetic oligonucleotide
gaaggcgcucuccacgggc

SEQ ID NO: 2191894 - RNA, 19 nt, Artificial Sequence
  Description of Artificial Sequence: Synthetic oligonucleotide
uguccgugaaucagugggu

SEQ ID NO: 2191895 - RNA, 19 nt, Artificial Sequence
  Description of Artificial Sequence: Synthetic oligonucleotide
gguccugaagagauuauag

SEQ ID NO: 2191896 - RNA, 19 nt, Artificial Sequence
  Description of Artificial Sequence: Synthetic oligonucleotide
uacuugagaucagacuucu

SEQ ID NO: 2191897 - RNA, 19 nt, Artificial Sequence
  Description of Artificial Sequence: Synthetic oligonucleotide
uuccccugcagggacacag

SEQ ID NO: 2191898 - RNA, 19 nt, Artificial Sequence
  Description of Artificial Sequence: Synthetic oligonucleotide
accugugggauggagagca

SEQ ID NO: 2191899 - RNA, 19 nt, Artificial Sequence
  Description of Artificial Sequence: Synthetic oligonucleotide
aacuccagucgggugaacu

SEQ ID NO: 2191900 - RNA, 19 nt, Artificial Sequence
  Description of Artificial Sequence: Synthetic oligonucleotide
gacugcacugguccugaag

SEQ ID NO: 2191901 - RNA, 19 nt, Artificial Sequence
  Description of Artificial Sequence: Synthetic oligonucleotide
uaguaaccgagccugccua

SEQ ID NO: 2191902 - RNA, 19 nt, Artificial Sequence
  Description of Artificial Sequence: Synthetic oligonucleotide
ucgggugaacucaccagcu

SEQ ID NO: 2191903 - RNA, 19 nt, Artificial Sequence
  Description of Artificial Sequence: Synthetic oligonucleotide
ucaugugaugaucccugaa

SEQ ID NO: 2191904 - RNA, 19 nt, Artificial Sequence
  Description of Artificial Sequence: Synthetic oligonucleotide
ucagccgucguggaaacuc

SEQ ID NO: 2191905 - RNA, 19 nt, Artificial Sequence
  Description of Artificial Sequence: Synthetic oligonucleotide
cauacagcuuccccugcag

SEQ ID NO: 2191906 - RNA, 19 nt, Artificial Sequence
  Description of Artificial Sequence: Synthetic oligonucleotide
cucugagaaccuguguggg

SEQ ID NO: 2191907 - RNA, 19 nt, Artificial Sequence
  Description of Artificial Sequence: Synthetic oligonucleotide
caucacauuccuggaaggc

SEQ ID NO: 2191908 - RNA, 19 nt, Artificial Sequence
  Description of Artificial Sequence: Synthetic oligonucleotide
accaucauccuuccccugu

SEQ ID NO: 2191909 - RNA, 19 nt, Artificial Sequence
  Description of Artificial Sequence: Synthetic oligonucleotide
uggaaacuccagucgggug

SEQ ID NO: 2191910 - RNA, 19 nt, Artificial Sequence
  Description of Artificial Sequence: Synthetic oligonucleotide
ucccagugagaaagcgccg

SEQ ID NO: 2191911 - RNA, 19 nt, Artificial Sequence
  Description of Artificial Sequence: Synthetic oligonucleotide
ccaucaguugccaugauga

SEQ ID NO: 2191912 - RNA, 19 nt, Artificial Sequence
  Description of Artificial Sequence: Synthetic oligonucleotide
agauuauagagugccguau

SEQ ID NO: 2191913 - RNA, 19 nt, Artificial Sequence
  Description of Artificial Sequence: Synthetic oligonucleotide
ggaaacuccagucggguga

SEQ ID NO: 2191914 - RNA, 19 nt, Artificial Sequence
  Description of Artificial Sequence: Synthetic oligonucleotide
gagauuauagagugccgua

SEQ ID NO: 2191915 - RNA, 19 nt, Artificial Sequence
  Description of Artificial Sequence: Synthetic oligonucleotide
cuccgcaccaagauggcuc

SEQ ID NO: 2191916 - RNA, 19 nt, Artificial Sequence
  Description of Artificial Sequence: Synthetic oligonucleotide
gggugaacucaccagcuag

SEQ ID NO: 2191917 - RNA, 19 nt, Artificial Sequence
  Description of Artificial Sequence: Synthetic oligonucleotide
ccacaguggacauaugccc

SEQ ID NO: 2191918 - RNA, 19 nt, Artificial Sequence
  Description of Artificial Sequence: Synthetic oligonucleotide
aucucuccgcaccaagaug

SEQ ID NO: 2191919 - RNA, 19 nt, Artificial Sequence
  Description of Artificial Sequence: Synthetic oligonucleotide
cugugcaauggaaucacga

SEQ ID NO: 2191920 - RNA, 19 nt, Artificial Sequence
  Description of Artificial Sequence: Synthetic oligonucleotide
aucagacuucuccaccugu

SEQ ID NO: 2191921 - RNA, 19 nt, Artificial Sequence
  Description of Artificial Sequence: Synthetic oligonucleotide
agccugccuacccuguccg

SEQ ID NO: 2191922 - RNA, 19 nt, Artificial Sequence
  Description of Artificial Sequence: Synthetic oligonucleotide
aucguaggacaccugcccu

SEQ ID NO: 2191923 - RNA, 19 nt, Artificial Sequence
  Description of Artificial Sequence: Synthetic oligonucleotide
agcucaggguagauaaagg

SEQ ID NO: 2191924 - RNA, 19 nt, Artificial Sequence
  Description of Artificial Sequence: Synthetic oligonucleotide
cauuggacaggacauccca

SEQ ID NO: 2191925 - RNA, 19 nt, Artificial Sequence
  Description of Artificial Sequence: Synthetic oligonucleotide
ucaguacucagcacccgua

SEQ ID NO: 2191926 - RNA, 19 nt, Artificial Sequence
  Description of Artificial Sequence: Synthetic oligonucleotide
uuuguagcuccagccauuc

SEQ ID NO: 2191927 - RNA, 19 nt, Artificial Sequence
  Description of Artificial Sequence: Synthetic oligonucleotide
aacucaccagcuagaagcu

SEQ ID NO: 2191928 - RNA, 19 nt, Artificial Sequence
  Description of Artificial Sequence: Synthetic oligonucleotide
cagcacagucaccuguggg

SEQ ID NO: 2191929 - RNA, 19 nt, Artificial Sequence
  Description of Artificial Sequence: Synthetic oligonucleotide
ugccguauagaguccucac

SEQ ID NO: 2191930 - RNA, 19 nt, Artificial Sequence
  Description of Artificial Sequence: Synthetic oligonucleotide
ggguaaacucaguacucag

SEQ ID NO: 2191931 - RNA, 19 nt, Artificial Sequence
  Description of Artificial Sequence: Synthetic oligonucleotide
caucaguugccaugaugac

SEQ ID NO: 2191932 - RNA, 19 nt, Artificial Sequence
  Description of Artificial Sequence: Synthetic oligonucleotide
cacuauucccuuuguccug

SEQ ID NO: 2191933 - RNA, 19 nt, Artificial Sequence
  Description of Artificial Sequence: Synthetic oligonucleotide
aaccgagccugccuacccu

SEQ ID NO: 2191934 - RNA, 19 nt, Artificial Sequence
  Description of Artificial Sequence: Synthetic oligonucleotide
cucaucucuccgcaccaag

SEQ ID NO: 2191935 - RNA, 19 nt, Artificial Sequence
  Description of Artificial Sequence: Synthetic oligonucleotide
uauucccuuuguccuggcu

SEQ ID NO: 2191936 - RNA, 19 nt, Artificial Sequence
  Description of Artificial Sequence: Synthetic oligonucleotide
acauaugcccagacugcac

SEQ ID NO: 2191937 - RNA, 19 nt, Artificial Sequence
  Description of Artificial Sequence: Synthetic oligonucleotide
acgggccccaaucaccaag

SEQ ID NO: 2191938 - RNA, 19 nt, Artificial Sequence
  Description of Artificial Sequence: Synthetic oligonucleotide
auuggacaggacaucccag

SEQ ID NO: 2191939 - RNA, 19 nt, Artificial Sequence
  Description of Artificial Sequence: Synthetic oligonucleotide
cacaguggacauaugccca

SEQ ID NO: 2191940 - RNA, 19 nt, Artificial Sequence
  Description of Artificial Sequence: Synthetic oligonucleotide
cauccuccucuuccaaugc

SEQ ID NO: 2191941 - RNA, 19 nt, Artificial Sequence
  Description of Artificial Sequence: Synthetic oligonucleotide
uccuaguaaccgagccugc

SEQ ID NO: 2191942 - RNA, 19 nt, Artificial Sequence
  Description of Artificial Sequence: Synthetic oligonucleotide
ccguauagaguccucacug

SEQ ID NO: 2191943 - RNA, 19 nt, Artificial Sequence
  Description of Artificial Sequence: Synthetic oligonucleotide
uccgugaaucaguggguac

SEQ ID NO: 2191944 - RNA, 19 nt, Artificial Sequence
  Description of Artificial Sequence: Synthetic oligonucleotide
uccgcaccaagauggcucu

SEQ ID NO: 2191945 - RNA, 19 nt, Artificial Sequence
  Description of Artificial Sequence: Synthetic oligonucleotide
cacaagccgggccaccugc

SEQ ID NO: 2191946 - RNA, 19 nt, Artificial Sequence
  Description of Artificial Sequence: Synthetic oligonucleotide
guacucagcacccguaucu

SEQ ID NO: 2191947 - RNA, 19 nt, Artificial Sequence
  Description of Artificial Sequence: Synthetic oligonucleotide
gagccugccuacccugucc

SEQ ID NO: 2191948 - RNA, 19 nt, Artificial Sequence
  Description of Artificial Sequence: Synthetic oligonucleotide
agcauucggcuguggcugg

SEQ ID NO: 2191949 - RNA, 19 nt, Artificial Sequence
  Description of Artificial Sequence: Synthetic oligonucleotide
gacagggcccacucuuggc

SEQ ID NO: 2191950 - RNA, 19 nt, Artificial Sequence
  Description of Artificial Sequence: Synthetic oligonucleotide
cuguuuguagcuccagcca

SEQ ID NO: 2191951 - RNA, 19 nt, Artificial Sequence
  Description of Artificial Sequence: Synthetic oligonucleotide
agcacccguaucucaucuc

SEQ ID NO: 2191952 - RNA, 19 nt, Artificial Sequence
  Description of Artificial Sequence: Synthetic oligonucleotide
agagugccguauagagucc

SEQ ID NO: 2191953 - RNA, 19 nt, Artificial Sequence
  Description of Artificial Sequence: Synthetic oligonucleotide
ucggcuguggcuggggaca

SEQ ID NO: 2191954 - RNA, 19 nt, Artificial Sequence
  Description of Artificial Sequence: Synthetic oligonucleotide
uauuguguaucagcauuuu

SEQ ID NO: 2191955 - RNA, 19 nt, Artificial Sequence
  Description of Artificial Sequence: Synthetic oligonucleotide
ccaguguuccuaguaaccg

SEQ ID NO: 2191956 - RNA, 19 nt, Artificial Sequence
  Description of Artificial Sequence: Synthetic oligonucleotide
acaccugcccuucuccggu

SEQ ID NO: 2191957 - RNA, 19 nt, Artificial Sequence
  Description of Artificial Sequence: Synthetic oligonucleotide
cugggguaaacucaguacu

SEQ ID NO: 2191958 - RNA, 19 nt, Artificial Sequence
  Description of Artificial Sequence: Synthetic oligonucleotide
gacuucuccaccuguuugu

SEQ ID NO: 2191959 - RNA, 19 nt, Artificial Sequence
  Description of Artificial Sequence: Synthetic oligonucleotide
cugugggauggagagcagg

SEQ ID NO: 2191960 - RNA, 19 nt, Artificial Sequence
  Description of Artificial Sequence: Synthetic oligonucleotide
cacccaccuggccugaggc

SEQ ID NO: 2191961 - RNA, 19 nt, Artificial Sequence
  Description of Artificial Sequence: Synthetic oligonucleotide
cucuccacgggccccaauc

SEQ ID NO: 2191962 - RNA, 19 nt, Artificial Sequence
  Description of Artificial Sequence: Synthetic oligonucleotide
augcuagcugguccacauc

SEQ ID NO: 2191963 - RNA, 19 nt, Artificial Sequence
  Description of Artificial Sequence: Synthetic oligonucleotide
acgucaucguaggacaccu

SEQ ID NO: 2191964 - RNA, 19 nt, Artificial Sequence
  Description of Artificial Sequence: Synthetic oligonucleotide
uaggacaccugcccuucuc

SEQ ID NO: 2191965 - RNA, 19 nt, Artificial Sequence
  Description of Artificial Sequence: Synthetic oligonucleotide
acucagcacccguaucuca

SEQ ID NO: 2191966 - RNA, 19 nt, Artificial Sequence
  Description of Artificial Sequence: Synthetic oligonucleotide
aucagcauuuuggccaacu

SEQ ID NO: 2191967 - RNA, 19 nt, Artificial Sequence
  Description of Artificial Sequence: Synthetic oligonucleotide
uccuggcugugcaauggaa

SEQ ID NO: 2191968 - RNA, 19 nt, Artificial Sequence
  Description of Artificial Sequence: Synthetic oligonucleotide
guaucagcauuuuggccaa

SEQ ID NO: 2191969 - RNA, 19 nt, Artificial Sequence
  Description of Artificial Sequence: Synthetic oligonucleotide
uggccaacucugagaaccu

SEQ ID NO: 2191970 - RNA, 19 nt, Artificial Sequence
  Description of Artificial Sequence: Synthetic oligonucleotide
acucaguacucagcacccg

SEQ ID NO: 2191971 - RNA, 19 nt, Artificial Sequence
  Description of Artificial Sequence: Synthetic oligonucleotide
cguauagaguccucacugg

SEQ ID NO: 2191972 - RNA, 19 nt, Artificial Sequence
  Description of Artificial Sequence: Synthetic oligonucleotide
gcccagacugcacuggucc

SEQ ID NO: 2191973 - RNA, 19 nt, Artificial Sequence
  Description of Artificial Sequence: Synthetic oligonucleotide
uuuggccaacucugagaac

SEQ ID NO: 2191974 - RNA, 19 nt, Artificial Sequence
  Description of Artificial Sequence: Synthetic oligonucleotide
ggacaggacaucccagagc

SEQ ID NO: 2191975 - RNA, 19 nt, Artificial Sequence
  Description of Artificial Sequence: Synthetic oligonucleotide
agacggccaguguuccuag

SEQ ID NO: 2191976 - RNA, 19 nt, Artificial Sequence
  Description of Artificial Sequence: Synthetic oligonucleotide
agacgucaucguaggacac

SEQ ID NO: 2191977 - RNA, 19 nt, Artificial Sequence
  Description of Artificial Sequence: Synthetic oligonucleotide
cagccgucguggaaacucc

SEQ ID NO: 2191978 - RNA, 19 nt, Artificial Sequence
  Description of Artificial Sequence: Synthetic oligonucleotide
cugccgcucuguuucuggg

SEQ ID NO: 2191979 - RNA, 19 nt, Artificial Sequence
  Description of Artificial Sequence: Synthetic oligonucleotide
cuucagccgucguggaaac

SEQ ID NO: 2191980 - RNA, 19 nt, Artificial Sequence
  Description of Artificial Sequence: Synthetic oligonucleotide
uucggcuguggcuggggac

SEQ ID NO: 2191981 - RNA, 19 nt, Artificial Sequence
  Description of Artificial Sequence: Synthetic oligonucleotide
ggacauaugcccagacugc

SEQ ID NO: 2191982 - RNA, 19 nt, Artificial Sequence
  Description of Artificial Sequence: Synthetic oligonucleotide
cuuccaaugcuagcugguc

SEQ ID NO: 2191983 - RNA, 19 nt, Artificial Sequence
  Description of Artificial Sequence: Synthetic oligonucleotide
caguguuccuaguaaccga

SEQ ID NO: 2191984 - RNA, 19 nt, Artificial Sequence
  Description of Artificial Sequence: Synthetic oligonucleotide
ugguccugaagagauuaua

SEQ ID NO: 2191985 - RNA, 19 nt, Artificial Sequence
  Description of Artificial Sequence: Synthetic oligonucleotide
ucagcacccguaucucauc

SEQ ID NO: 2191986 - RNA, 19 nt, Artificial Sequence
  Description of Artificial Sequence: Synthetic oligonucleotide
ucucucccaaucacaucau

SEQ ID NO: 2191987 - RNA, 19 nt, Artificial Sequence
  Description of Artificial Sequence: Synthetic oligonucleotide
accgagccugccuacccug

SEQ ID NO: 2191988 - RNA, 19 nt, Artificial Sequence
  Description of Artificial Sequence: Synthetic oligonucleotide
ccauucaugugaugauccc

SEQ ID NO: 2191989 - RNA, 19 nt, Artificial Sequence
  Description of Artificial Sequence: Synthetic oligonucleotide
ucacgaacacagagacguc

SEQ ID NO: 2191990 - RNA, 19 nt, Artificial Sequence
  Description of Artificial Sequence: Synthetic oligonucleotide
guugccaugaugaccacau

SEQ ID NO: 2191991 - RNA, 19 nt, Artificial Sequence
  Description of Artificial Sequence: Synthetic oligonucleotide
cacgaacacagagacguca

SEQ ID NO: 2191992 - RNA, 19 nt, Artificial Sequence
  Description of Artificial Sequence: Synthetic oligonucleotide
caggccucgggagacggcc

SEQ ID NO: 2191993 - RNA, 19 nt, Artificial Sequence
  Description of Artificial Sequence: Synthetic oligonucleotide
gaucucccaggccucggga

SEQ ID NO: 2191994 - RNA, 19 nt, Artificial Sequence
  Description of Artificial Sequence: Synthetic oligonucleotide
acucaccagcuagaagcuc

SEQ ID NO: 2191995 - RNA, 19 nt, Artificial Sequence
  Description of Artificial Sequence: Synthetic oligonucleotide
cagggcuguacagccaccc

SEQ ID NO: 2191996 - RNA, 19 nt, Artificial Sequence
  Description of Artificial Sequence: Synthetic oligonucleotide
guaaccgagccugccuacc

SEQ ID NO: 2191997 - RNA, 19 nt, Artificial Sequence
  Description of Artificial Sequence: Synthetic oligonucleotide
ucguaggacaccugcccuu

SEQ ID NO: 2191998 - RNA, 19 nt, Artificial Sequence
  Description of Artificial Sequence: Synthetic oligonucleotide
guuccuaguaaccgagccu

SEQ ID NO: 2191999 - RNA, 19 nt, Artificial Sequence
  Description of Artificial Sequence: Synthetic oligonucleotide
auucggcuguggcugggga

SEQ ID NO: 2192000 - RNA, 19 nt, Artificial Sequence
  Description of Artificial Sequence: Synthetic oligonucleotide
cauaugcccagacugcacu

SEQ ID NO: 2192001 - RNA, 19 nt, Artificial Sequence
  Description of Artificial Sequence: Synthetic oligonucleotide
cucuccgcaccaagauggc

SEQ ID NO: 2192002 - RNA, 19 nt, Artificial Sequence
  Description of Artificial Sequence: Synthetic oligonucleotide
caauggaaucacgaacaca

SEQ ID NO: 2192003 - RNA, 19 nt, Artificial Sequence
  Description of Artificial Sequence: Synthetic oligonucleotide
agcucucucccaaucacau

SEQ ID NO: 2192004 - RNA, 19 nt, Artificial Sequence
  Description of Artificial Sequence: Synthetic oligonucleotide
acggccaguguuccuagua

SEQ ID NO: 2192005 - RNA, 19 nt, Artificial Sequence
  Description of Artificial Sequence: Synthetic oligonucleotide
ccuguguggguccucucgg

SEQ ID NO: 2192006 - RNA, 19 nt, Artificial Sequence
  Description of Artificial Sequence: Synthetic oligonucleotide
cuguacagccacccaccug

SEQ ID NO: 2192007 - RNA, 19 nt, Artificial Sequence
  Description of Artificial Sequence: Synthetic oligonucleotide
cacauccagcacagucacc

SEQ ID NO: 2192008 - RNA, 19 nt, Artificial Sequence
  Description of Artificial Sequence: Synthetic oligonucleotide
uccagccauucaugugaug

SEQ ID NO: 2192009 - RNA, 19 nt, Artificial Sequence
  Description of Artificial Sequence: Synthetic oligonucleotide
cuauucccuuuguccuggc

SEQ ID NO: 2192010 - RNA, 19 nt, Artificial Sequence
  Description of Artificial Sequence: Synthetic oligonucleotide
agugccguauagaguccuc

SEQ ID NO: 2192011 - RNA, 19 nt, Artificial Sequence
  Description of Artificial Sequence: Synthetic oligonucleotide
cucucccaaucacaucauc

SEQ ID NO: 2192012 - RNA, 19 nt, Artificial Sequence
  Description of Artificial Sequence: Synthetic oligonucleotide
acauuccuggaaggcgcuc

SEQ ID NO: 2192013 - RNA, 19 nt, Artificial Sequence
  Description of Artificial Sequence: Synthetic oligonucleotide
gccaguguuccuaguaacc

SEQ ID NO: 2192014 - RNA, 19 nt, Artificial Sequence
  Description of Artificial Sequence: Synthetic oligonucleotide
gaucagcauucggcugugg

SEQ ID NO: 2192015 - RNA, 19 nt, Artificial Sequence
  Description of Artificial Sequence: Synthetic oligonucleotide
ggccaguguuccuaguaac

SEQ ID NO: 2192016 - RNA, 19 nt, Artificial Sequence
  Description of Artificial Sequence: Synthetic oligonucleotide
acuugagaucagacuucuc

SEQ ID NO: 2192017 - RNA, 19 nt, Artificial Sequence
  Description of Artificial Sequence: Synthetic oligonucleotide
ggccacauacagcuucccc

SEQ ID NO: 2192018 - RNA, 19 nt, Artificial Sequence
  Description of Artificial Sequence: Synthetic oligonucleotide
ugcccagacugcacugguc

SEQ ID NO: 2192019 - RNA, 19 nt, Artificial Sequence
  Description of Artificial Sequence: Synthetic oligonucleotide
cagucgggugaacucacca

SEQ ID NO: 2192020 - RNA, 19 nt, Artificial Sequence
  Description of Artificial Sequence: Synthetic oligonucleotide
agaucagcauucggcugug

SEQ ID NO: 2192021 - RNA, 19 nt, Artificial Sequence
  Description of Artificial Sequence: Synthetic oligonucleotide
cauucggcuguggcugggg

SEQ ID NO: 2192022 - RNA, 19 nt, Artificial Sequence
  Description of Artificial Sequence: Synthetic oligonucleotide
cagugagaaagcgccgcac

SEQ ID NO: 2192023 - RNA, 19 nt, Artificial Sequence
  Description of Artificial Sequence: Synthetic oligonucleotide
gugaaucaguggguacuug

SEQ ID NO: 2192024 - RNA, 19 nt, Artificial Sequence
  Description of Artificial Sequence: Synthetic oligonucleotide
ucuccgcaccaagauggcu

SEQ ID NO: 2192025 - RNA, 19 nt, Artificial Sequence
  Description of Artificial Sequence: Synthetic oligonucleotide
gucaccugugggauggaga

SEQ ID NO: 2192026 - RNA, 19 nt, Artificial Sequence
  Description of Artificial Sequence: Synthetic oligonucleotide
gagacggccaguguuccua

SEQ ID NO: 2192027 - RNA, 19 nt, Artificial Sequence
  Description of Artificial Sequence: Synthetic oligonucleotide
cguggaaacuccagucggg

SEQ ID NO: 2192028 - RNA, 19 nt, Artificial Sequence
  Description of Artificial Sequence: Synthetic oligonucleotide
cccguaucucaucucuccg

SEQ ID NO: 2192029 - RNA, 19 nt, Artificial Sequence
  Description of Artificial Sequence: Synthetic oligonucleotide
cuaguaaccgagccugccu

SEQ ID NO: 2192030 - RNA, 19 nt, Artificial Sequence
  Description of Artificial Sequence: Synthetic oligonucleotide
ugcccuucuccgguggcac

SEQ ID NO: 2192031 - RNA, 19 nt, Artificial Sequence
  Description of Artificial Sequence: Synthetic oligonucleotide
cagccacccaccuggccug

SEQ ID NO: 2192032 - RNA, 19 nt, Artificial Sequence
  Description of Artificial Sequence: Synthetic oligonucleotide
auggaaucacgaacacaga

SEQ ID NO: 2192033 - RNA, 19 nt, Artificial Sequence
  Description of Artificial Sequence: Synthetic oligonucleotide
cacccguaucucaucucuc

SEQ ID NO: 2192034 - RNA, 19 nt, Artificial Sequence
  Description of Artificial Sequence: Synthetic oligonucleotide
gugaacucaccagcuagaa

SEQ ID NO: 2192035 - RNA, 19 nt, Artificial Sequence
  Description of Artificial Sequence: Synthetic oligonucleotide
cuacccuguccgugaauca

SEQ ID NO: 2192036 - RNA, 19 nt, Artificial Sequence
  Description of Artificial Sequence: Synthetic oligonucleotide
guggacauaugcccagacu

SEQ ID NO: 2192037 - RNA, 19 nt, Artificial Sequence
  Description of Artificial Sequence: Synthetic oligonucleotide
gggguaaacucaguacuca

SEQ ID NO: 2192038 - RNA, 19 nt, Artificial Sequence
  Description of Artificial Sequence: Synthetic oligonucleotide
cagcucucucccaaucaca

SEQ ID NO: 2192039 - RNA, 19 nt, Artificial Sequence
  Description of Artificial Sequence: Synthetic oligonucleotide
cauucaugugaugaucccu

SEQ ID NO: 2192040 - RNA, 19 nt, Artificial Sequence
  Description of Artificial Sequence: Synthetic oligonucleotide
aagcgccgcacaagccggg

SEQ ID NO: 2192041 - RNA, 19 nt, Artificial Sequence
  Description of Artificial Sequence: Synthetic oligonucleotide
cugccuacccuguccguga

SEQ ID NO: 2192042 - RNA, 19 nt, Artificial Sequence
  Description of Artificial Sequence: Synthetic oligonucleotide
ucucaucucuccgcaccaa

SEQ ID NO: 2192043 - RNA, 19 nt, Artificial Sequence
  Description of Artificial Sequence: Synthetic oligonucleotide
guauuguguaucagcauuu

SEQ ID NO: 2192044 - RNA, 19 nt, Artificial Sequence
  Description of Artificial Sequence: Synthetic oligonucleotide
ccuaguaaccgagccugcc

SEQ ID NO: 2192045 - RNA, 19 nt, Artificial Sequence
  Description of Artificial Sequence: Synthetic oligonucleotide
ccagcauuggccacauaca

SEQ ID NO: 2192046 - RNA, 19 nt, Artificial Sequence
  Description of Artificial Sequence: Synthetic oligonucleotide
ccuacccuguccgugaauc

SEQ ID NO: 2192047 - RNA, 19 nt, Artificial Sequence
  Description of Artificial Sequence: Synthetic oligonucleotide
guggcuggggacagaccag

SEQ ID NO: 2192048 - RNA, 19 nt, Artificial Sequence
  Description of Artificial Sequence: Synthetic oligonucleotide
gugccguauagaguccuca

SEQ ID NO: 2192049 - RNA, 19 nt, Artificial Sequence
  Description of Artificial Sequence: Synthetic oligonucleotide
ugccuacccuguccgugaa

SEQ ID NO: 2192050 - RNA, 19 nt, Artificial Sequence
  Description of Artificial Sequence: Synthetic oligonucleotide
uccuuccccuguguauugu

SEQ ID NO: 2192051 - RNA, 19 nt, Artificial Sequence
  Description of Artificial Sequence: Synthetic oligonucleotide
ccaugaugaccacauccuc

SEQ ID NO: 2192052 - RNA, 19 nt, Artificial Sequence
  Description of Artificial Sequence: Synthetic oligonucleotide
cgucguggaaacuccaguc

SEQ ID NO: 2192053 - RNA, 19 nt, Artificial Sequence
  Description of Artificial Sequence: Synthetic oligonucleotide
gcugugcaauggaaucacg

SEQ ID NO: 2192054 - RNA, 19 nt, Artificial Sequence
  Description of Artificial Sequence: Synthetic oligonucleotide
agaccagacagggcccacu

SEQ ID NO: 2192055 - RNA, 19 nt, Artificial Sequence
  Description of Artificial Sequence: Synthetic oligonucleotide
guguauuguguaucagcau

SEQ ID NO: 2192056 - RNA, 19 nt, Artificial Sequence
  Description of Artificial Sequence: Synthetic oligonucleotide
cucaguacucagcacccgu

SEQ ID NO: 2192057 - RNA, 19 nt, Artificial Sequence
  Description of Artificial Sequence: Synthetic oligonucleotide
cuccgguggcaccaucauc

SEQ ID NO: 2192058 - RNA, 19 nt, Artificial Sequence
  Description of Artificial Sequence: Synthetic oligonucleotide
cccagugagaaagcgccgc

SEQ ID NO: 2192059 - RNA, 19 nt, Artificial Sequence
  Description of Artificial Sequence: Synthetic oligonucleotide
caccuguuuguagcuccag

SEQ ID NO: 2192060 - RNA, 19 nt, Artificial Sequence
  Description of Artificial Sequence: Synthetic oligonucleotide
ccucucgguucccagugag

SEQ ID NO: 2192061 - RNA, 19 nt, Artificial Sequence
  Description of Artificial Sequence: Synthetic oligonucleotide
acccuguccgugaaucagu

SEQ ID NO: 2192062 - RNA, 19 nt, Artificial Sequence
  Description of Artificial Sequence: Synthetic oligonucleotide
ccuguccgugaaucagugg

SEQ ID NO: 2192063 - RNA, 19 nt, Artificial Sequence
  Description of Artificial Sequence: Synthetic oligonucleotide
cucucgguucccagugaga

SEQ ID NO: 2192064 - RNA, 19 nt, Artificial Sequence
  Description of Artificial Sequence: Synthetic oligonucleotide
cuuccccuguguauugugu

SEQ ID NO: 2192065 - RNA, 19 nt, Artificial Sequence
  Description of Artificial Sequence: Synthetic oligonucleotide
gaaccuguguggguccucu

SEQ ID NO: 2192066 - RNA, 19 nt, Artificial Sequence
  Description of Artificial Sequence: Synthetic oligonucleotide
uggauccgcugccgcucug

SEQ ID NO: 2192067 - RNA, 19 nt, Artificial Sequence
  Description of Artificial Sequence: Synthetic oligonucleotide
caccagcuagaagcucagg

SEQ ID NO: 2192068 - RNA, 19 nt, Artificial Sequence
  Description of Artificial Sequence: Synthetic oligonucleotide
ggguagauaaaggccagcu

SEQ ID NO: 2192069 - RNA, 19 nt, Artificial Sequence
  Description of Artificial Sequence: Synthetic oligonucleotide
caagccgggccaccugcuc

SEQ ID NO: 2192070 - RNA, 19 nt, Artificial Sequence
  Description of Artificial Sequence: Synthetic oligonucleotide
ucccuuuguccuggcugug

SEQ ID NO: 2192071 - RNA, 19 nt, Artificial Sequence
  Description of Artificial Sequence: Synthetic oligonucleotide
caucucuccgcaccaagau

SEQ ID NO: 2192072 - RNA, 19 nt, Artificial Sequence
  Description of Artificial Sequence: Synthetic oligonucleotide
gcuguggcuggggacagac

SEQ ID NO: 2192073 - RNA, 19 nt, Artificial Sequence
  Description of Artificial Sequence: Synthetic oligonucleotide
uggguccucucgguuccca

SEQ ID NO: 2192074 - RNA, 19 nt, Artificial Sequence
  Description of Artificial Sequence: Synthetic oligonucleotide
cucuacuauccccagcauu

SEQ ID NO: 2192075 - RNA, 19 nt, Artificial Sequence
  Description of Artificial Sequence: Synthetic oligonucleotide
gcuagaagcucaggguaga

SEQ ID NO: 2192076 - RNA, 19 nt, Artificial Sequence
  Description of Artificial Sequence: Synthetic oligonucleotide
uucagccgucguggaaacu

SEQ ID NO: 2192077 - RNA, 19 nt, Artificial Sequence
  Description of Artificial Sequence: Synthetic oligonucleotide
caaugcuagcugguccaca

SEQ ID NO: 2192078 - RNA, 19 nt, Artificial Sequence
  Description of Artificial Sequence: Synthetic oligonucleotide
ggccacuauucccuuuguc

SEQ ID NO: 2192079 - RNA, 19 nt, Artificial Sequence
  Description of Artificial Sequence: Synthetic oligonucleotide
cccuguguauuguguauca

SEQ ID NO: 2192080 - RNA, 19 nt, Artificial Sequence
  Description of Artificial Sequence: Synthetic oligonucleotide
ccagcuagaagcucagggu

SEQ ID NO: 2192081 - RNA, 19 nt, Artificial Sequence
  Description of Artificial Sequence: Synthetic oligonucleotide
ccuuccccuguguauugug

SEQ ID NO: 2192082 - RNA, 19 nt, Artificial Sequence
  Description of Artificial Sequence: Synthetic oligonucleotide
guccgugaaucagugggua

SEQ ID NO: 2192083 - RNA, 19 nt, Artificial Sequence
  Description of Artificial Sequence: Synthetic oligonucleotide
gggcuugagcuggauguug

SEQ ID NO: 2192084 - RNA, 19 nt, Artificial Sequence
  Description of Artificial Sequence: Synthetic oligonucleotide
gagugccguauagaguccu

SEQ ID NO: 2192085 - RNA, 19 nt, Artificial Sequence
  Description of Artificial Sequence: Synthetic oligonucleotide
caacucugagaaccugugu

SEQ ID NO: 2192086 - RNA, 19 nt, Artificial Sequence
  Description of Artificial Sequence: Synthetic oligonucleotide
gggacagaccagacagggc

SEQ ID NO: 2192087 - RNA, 19 nt, Artificial Sequence
  Description of Artificial Sequence: Synthetic oligonucleotide
gggagacggccaguguucc

SEQ ID NO: 2192088 - RNA, 19 nt, Artificial Sequence
  Description of Artificial Sequence: Synthetic oligonucleotide
cagagacgucaucguagga

SEQ ID NO: 2192089 - RNA, 19 nt, Artificial Sequence
  Description of Artificial Sequence: Synthetic oligonucleotide
agggcuugagcuggauguu

SEQ ID NO: 2192090 - RNA, 19 nt, Artificial Sequence
  Description of Artificial Sequence: Synthetic oligonucleotide
acaagccgggccaccugcu

SEQ ID NO: 2192091 - RNA, 19 nt, Artificial Sequence
  Description of Artificial Sequence: Synthetic oligonucleotide
ggccucgggagacggccag

SEQ ID NO: 2192092 - RNA, 19 nt, Artificial Sequence
  Description of Artificial Sequence: Synthetic oligonucleotide
gccgucguggaaacuccag

SEQ ID NO: 2192093 - RNA, 19 nt, Artificial Sequence
  Description of Artificial Sequence: Synthetic oligonucleotide
gccguauagaguccucacu

SEQ ID NO: 2192094 - RNA, 19 nt, Artificial Sequence
  Description of Artificial Sequence: Synthetic oligonucleotide
ccugccuacccuguccgug

SEQ ID NO: 2192095 - RNA, 19 nt, Artificial Sequence
  Description of Artificial Sequence: Synthetic oligonucleotide
cacauuccuggaaggcgcu

SEQ ID NO: 2192096 - RNA, 19 nt, Artificial Sequence
  Description of Artificial Sequence: Synthetic oligonucleotide
caguacucagcacccguau

SEQ ID NO: 2192097 - RNA, 19 nt, Artificial Sequence
  Description of Artificial Sequence: Synthetic oligonucleotide
caccagggcuguacagcca

SEQ ID NO: 2192098 - RNA, 19 nt, Artificial Sequence
  Description of Artificial Sequence: Synthetic oligonucleotide
cacauccuccucuuccaau

SEQ ID NO: 2192099 - RNA, 19 nt, Artificial Sequence
  Description of Artificial Sequence: Synthetic oligonucleotide
cagcacccguaucucaucu

SEQ ID NO: 2192100 - RNA, 19 nt, Artificial Sequence
  Description of Artificial Sequence: Synthetic oligonucleotide
ccuucagccgucguggaaa

SEQ ID NO: 2192101 - RNA, 19 nt, Artificial Sequence
  Description of Artificial Sequence: Synthetic oligonucleotide
cauccuuccccuguguauu

SEQ ID NO: 2192102 - RNA, 19 nt, Artificial Sequence
  Description of Artificial Sequence: Synthetic oligonucleotide
ggccaacucugagaaccug

SEQ ID NO: 2192103 - RNA, 19 nt, Artificial Sequence
  Description of Artificial Sequence: Synthetic oligonucleotide
agccgucguggaaacucca

SEQ ID NO: 2192104 - RNA, 19 nt, Artificial Sequence
  Description of Artificial Sequence: Synthetic oligonucleotide
guuuguagcuccagccauu

SEQ ID NO: 2192105 - RNA, 19 nt, Artificial Sequence
  Description of Artificial Sequence: Synthetic oligonucleotide
ccacgggccccaaucacca

SEQ ID NO: 2192106 - RNA, 19 nt, Artificial Sequence
  Description of Artificial Sequence: Synthetic oligonucleotide
gagaaccuguguggguccu

SEQ ID NO: 2192107 - RNA, 19 nt, Artificial Sequence
  Description of Artificial Sequence: Synthetic oligonucleotide
agcuuccccugcagggaca

SEQ ID NO: 2192108 - RNA, 19 nt, Artificial Sequence
  Description of Artificial Sequence: Synthetic oligonucleotide
gcauucggcuguggcuggg

SEQ ID NO: 2192109 - RNA, 19 nt, Artificial Sequence
  Description of Artificial Sequence: Synthetic oligonucleotide
gcacugguccugaagagau

SEQ ID NO: 2192110 - RNA, 19 nt, Artificial Sequence
  Description of Artificial Sequence: Synthetic oligonucleotide
cgggagacggccaguguuc

SEQ ID NO: 2192111 - RNA, 19 nt, Artificial Sequence
  Description of Artificial Sequence: Synthetic oligonucleotide
ccagugagaaagcgccgca

SEQ ID NO: 2192112 - RNA, 19 nt, Artificial Sequence
  Description of Artificial Sequence: Synthetic oligonucleotide
ccaaugcuagcugguccac

SEQ ID NO: 2192113 - RNA, 19 nt, Artificial Sequence
  Description of Artificial Sequence: Synthetic oligonucleotide
guaggacaccugcccuucu

SEQ ID NO: 2192114 - RNA, 19 nt, Artificial Sequence
  Description of Artificial Sequence: Synthetic oligonucleotide
ggccaccugcucauuggac

SEQ ID NO: 2192115 - RNA, 19 nt, Artificial Sequence
  Description of Artificial Sequence: Synthetic oligonucleotide
gguccucucgguucccagu

SEQ ID NO: 2192116 - RNA, 19 nt, Artificial Sequence
  Description of Artificial Sequence: Synthetic oligonucleotide
ccugcccuucuccgguggc

SEQ ID NO: 2192117 - RNA, 19 nt, Artificial Sequence
  Description of Artificial Sequence: Synthetic oligonucleotide
cgcaccaagauggcucuac

SEQ ID NO: 2192118 - RNA, 19 nt, Artificial Sequence
  Description of Artificial Sequence: Synthetic oligonucleotide
gcuguacagccacccaccu

SEQ ID NO: 2192119 - RNA, 19 nt, Artificial Sequence
  Description of Artificial Sequence: Synthetic oligonucleotide
gacggccaguguuccuagu

SEQ ID NO: 2192120 - RNA, 19 nt, Artificial Sequence
  Description of Artificial Sequence: Synthetic oligonucleotide
ccucgggagacggccagug

SEQ ID NO: 2192121 - RNA, 19 nt, Artificial Sequence
  Description of Artificial Sequence: Synthetic oligonucleotide
cugguccugaagagauuau

SEQ ID NO: 2192122 - RNA, 19 nt, Artificial Sequence
  Description of Artificial Sequence: Synthetic oligonucleotide
gcccuucuccgguggcacc

SEQ ID NO: 2192123 - RNA, 19 nt, Artificial Sequence
  Description of Artificial Sequence: Synthetic oligonucleotide
ccaccuguuuguagcucca

SEQ ID NO: 2192124 - RNA, 19 nt, Artificial Sequence
  Description of Artificial Sequence: Synthetic oligonucleotide
gcgccgcacaagccgggcc

SEQ ID NO: 2192125 - RNA, 19 nt, Artificial Sequence
  Description of Artificial Sequence: Synthetic oligonucleotide
cuggauccgcugccgcucu

SEQ ID NO: 2192126 - RNA, 19 nt, Artificial Sequence
  Description of Artificial Sequence: Synthetic oligonucleotide
cgucaucguaggacaccug

SEQ ID NO: 2192127 - RNA, 19 nt, Artificial Sequence
  Description of Artificial Sequence: Synthetic oligonucleotide
ggagacggccaguguuccu

SEQ ID NO: 2192128 - RNA, 19 nt, Artificial Sequence
  Description of Artificial Sequence: Synthetic oligonucleotide
cacgggccccaaucaccaa

SEQ ID NO: 2192129 - RNA, 19 nt, Artificial Sequence
  Description of Artificial Sequence: Synthetic oligonucleotide
ccgucguggaaacuccagu

SEQ ID NO: 2192130 - RNA, 19 nt, Artificial Sequence
  Description of Artificial Sequence: Synthetic oligonucleotide
gcucuacuauccccagcau

SEQ ID NO: 2192131 - RNA, 19 nt, Artificial Sequence
  Description of Artificial Sequence: Synthetic oligonucleotide
cggccaguguuccuaguaa

SEQ ID NO: 2192132 - RNA, 19 nt, Artificial Sequence
  Description of Artificial Sequence: Synthetic oligonucleotide
cgccgcacaagccgggcca

SEQ ID NO: 2192133 - RNA, 19 nt, Artificial Sequence
  Description of Artificial Sequence: Synthetic oligonucleotide
cccuucagccgucguggaa

SEQ ID NO: 2192134 - RNA, 19 nt, Artificial Sequence
  Description of Artificial Sequence: Synthetic oligonucleotide
ggaagggcuugagcuggau

SEQ ID NO: 2192135 - RNA, 19 nt, Artificial Sequence
  Description of Artificial Sequence: Synthetic oligonucleotide
gcgcucuccacgggcccca

SEQ ID NO: 2192136 - RNA, 19 nt, Artificial Sequence
  Description of Artificial Sequence: Synthetic oligonucleotide
ggcuguggcuggggacaga

SEQ ID NO: 2192137 - RNA, 19 nt, Artificial Sequence
  Description of Artificial Sequence: Synthetic oligonucleotide
ccgguggcaccaucauccu

SEQ ID NO: 2192138 - RNA, 19 nt, Artificial Sequence
  Description of Artificial Sequence: Synthetic oligonucleotide
gccugccuacccuguccgu

SEQ ID NO: 2192139 - RNA, 19 nt, Artificial Sequence
  Description of Artificial Sequence: Synthetic oligonucleotide
ccgagccugccuacccugu

SEQ ID NO: 2192140 - RNA, 19 nt, Artificial Sequence
  Description of Artificial Sequence: Synthetic oligonucleotide
gccuacccuguccgugaau

SEQ ID NO: 2192141 - RNA, 19 nt, Artificial Sequence
  Description of Artificial Sequence: Synthetic oligonucleotide
cacagccaccagggcugua

SEQ ID NO: 2192142 - RNA, 19 nt, Artificial Sequence
  Description of Artificial Sequence: Synthetic oligonucleotide
gccucgggagacggccagu

SEQ ID NO: 2192143 - RNA, 19 nt, Artificial Sequence
  Description of Artificial Sequence: Synthetic oligonucleotide
ccgcaccaagauggcucua

SEQ ID NO: 2192144 - RNA, 19 nt, Artificial Sequence
  Description of Artificial Sequence: Synthetic oligonucleotide
cgcucuccacgggccccaa

SEQ ID NO: 2192145 - RNA, 19 nt, Artificial Sequence
  Description of Artificial Sequence: Synthetic oligonucleotide
auauagaucaucuagucac

SEQ ID NO: 2192146 - RNA, 19 nt, Artificial Sequence
  Description of Artificial Sequence: Synthetic oligonucleotide
aaauaaucaaguuuauuuc

SEQ ID NO: 2192147 - RNA, 19 nt, Artificial Sequence
  Description of Artificial Sequence: Synthetic oligonucleotide
aaaaugguguagcagauuc

SEQ ID NO: 2192148 - RNA, 19 nt, Artificial Sequence
  Description of Artificial Sequence: Synthetic oligonucleotide
agaaucuuuacaaagaggc

SEQ ID NO: 2192149 - RNA, 19 nt, Artificial Sequence
  Description of Artificial Sequence: Synthetic oligonucleotide
aaccaugccacaucaaagc

SEQ ID NO: 2192150 - RNA, 19 nt, Artificial Sequence
  Description of Artificial Sequence: Synthetic oligonucleotide
aauaaucaaguuuauuuca

SEQ ID NO: 2192151 - RNA, 19 nt, Artificial Sequence
  Description of Artificial Sequence: Synthetic oligonucleotide
acaauugccaugaugaugc

SEQ ID NO: 2192152 - RNA, 19 nt, Artificial Sequence
  Description of Artificial Sequence: Synthetic oligonucleotide
aaacaaguuggaaagaccg

SEQ ID NO: 2192153 - RNA, 19 nt, Artificial Sequence
  Description of Artificial Sequence: Synthetic oligonucleotide
agaauugcgacgaugaccc

SEQ ID NO: 2192154 - RNA, 19 nt, Artificial Sequence
  Description of Artificial Sequence: Synthetic oligonucleotide
aaugguguagcagauuccc

SEQ ID NO: 2192155 - RNA, 19 nt, Artificial Sequence
  Description of Artificial Sequence: Synthetic oligonucleotide
aagaauugcgacgaugacc

SEQ ID NO: 2192156 - RNA, 19 nt, Artificial Sequence
  Description of Artificial Sequence: Synthetic oligonucleotide
gauucgaccacaugaaggg

SEQ ID NO: 2192157 - RNA, 19 nt, Artificial Sequence
  Description of Artificial Sequence: Synthetic oligonucleotide
acgacgaucaugcaggccc

SEQ ID NO: 2192158 - RNA, 19 nt, Artificial Sequence
  Description of Artificial Sequence: Synthetic oligonucleotide
aaaccaacaauaaauaaca

SEQ ID NO: 2192159 - RNA, 19 nt, Artificial Sequence
  Description of Artificial Sequence: Synthetic oligonucleotide
caauaaauaacaguggggc

SEQ ID NO: 2192160 - RNA, 19 nt, Artificial Sequence
  Description of Artificial Sequence: Synthetic oligonucleotide
auaacaguggggcacggcc

SEQ ID NO: 2192161 - RNA, 19 nt, Artificial Sequence
  Description of Artificial Sequence: Synthetic oligonucleotide
aaucuuuacaaagaggcug

SEQ ID NO: 2192162 - RNA, 19 nt, Artificial Sequence
  Description of Artificial Sequence: Synthetic oligonucleotide
agaaguuucgguaaggaac

SEQ ID NO: 2192163 - RNA, 19 nt, Artificial Sequence
  Description of Artificial Sequence: Synthetic oligonucleotide
gauaaugcuaaccaaguuc

SEQ ID NO: 2192164 - RNA, 19 nt, Artificial Sequence
  Description of Artificial Sequence: Synthetic oligonucleotide
uaagccaaugcccagauuc

SEQ ID NO: 2192165 - RNA, 19 nt, Artificial Sequence
  Description of Artificial Sequence: Synthetic oligonucleotide
auaaauaacaguggggcac

SEQ ID NO: 2192166 - RNA, 19 nt, Artificial Sequence
  Description of Artificial Sequence: Synthetic oligonucleotide
ugaagaauugcgacgauga

SEQ ID NO: 2192167 - RNA, 19 nt, Artificial Sequence
  Description of Artificial Sequence: Synthetic oligonucleotide
aaaacaaguuggaaagacc

SEQ ID NO: 2192168 - RNA, 19 nt, Artificial Sequence
  Description of Artificial Sequence: Synthetic oligonucleotide
aaggcuaagggacacagcu

SEQ ID NO: 2192169 - RNA, 19 nt, Artificial Sequence
  Description of Artificial Sequence: Synthetic oligonucleotide
gagccgguaauauagaugc

SEQ ID NO: 2192170 - RNA, 19 nt, Artificial Sequence
  Description of Artificial Sequence: Synthetic oligonucleotide
aaaggcucagccauguugc

SEQ ID NO: 2192171 - RNA, 19 nt, Artificial Sequence
  Description of Artificial Sequence: Synthetic oligonucleotide
aaugacaauugccaugaug

SEQ ID NO: 2192172 - RNA, 19 nt, Artificial Sequence
  Description of Artificial Sequence: Synthetic oligonucleotide
ccaacaauaaauaacagug

SEQ ID NO: 2192173 - RNA, 19 nt, Artificial Sequence
  Description of Artificial Sequence: Synthetic oligonucleotide
uuuauuucacaaacaccgg

SEQ ID NO: 2192174 - RNA, 19 nt, Artificial Sequence
  Description of Artificial Sequence: Synthetic oligonucleotide
gaagauaaugcuaaccaag

SEQ ID NO: 2192175 - RNA, 19 nt, Artificial Sequence
  Description of Artificial Sequence: Synthetic oligonucleotide
auauagaugccccaggcug

SEQ ID NO: 2192176 - RNA, 19 nt, Artificial Sequence
  Description of Artificial Sequence: Synthetic oligonucleotide
auagugaacaggcagcaag

SEQ ID NO: 2192177 - RNA, 19 nt, Artificial Sequence
  Description of Artificial Sequence: Synthetic oligonucleotide
agauugcuaagccaaugcc

SEQ ID NO: 2192178 - RNA, 19 nt, Artificial Sequence
  Description of Artificial Sequence: Synthetic oligonucleotide
aauaaauaacaguggggca

SEQ ID NO: 2192179 - RNA, 19 nt, Artificial Sequence
  Description of Artificial Sequence: Synthetic oligonucleotide
ugagauaacaccgcgacca

SEQ ID NO: 2192180 - RNA, 19 nt, Artificial Sequence
  Description of Artificial Sequence: Synthetic oligonucleotide
aaagcggaagcccaaguca

SEQ ID NO: 2192181 - RNA, 19 nt, Artificial Sequence
  Description of Artificial Sequence: Synthetic oligonucleotide
gacuccacaaaacaaguug

SEQ ID NO: 2192182 - RNA, 19 nt, Artificial Sequence
  Description of Artificial Sequence: Synthetic oligonucleotide
acccauauagaucaucuag

SEQ ID NO: 2192183 - RNA, 19 nt, Artificial Sequence
  Description of Artificial Sequence: Synthetic oligonucleotide
acgaugaccccaaagaggc

SEQ ID NO: 2192184 - RNA, 19 nt, Artificial Sequence
  Description of Artificial Sequence: Synthetic oligonucleotide
acagaagauaaugcuaacc

SEQ ID NO: 2192185 - RNA, 19 nt, Artificial Sequence
  Description of Artificial Sequence: Synthetic oligonucleotide
aguuuauuucacaaacacc

SEQ ID NO: 2192186 - RNA, 19 nt, Artificial Sequence
  Description of Artificial Sequence: Synthetic oligonucleotide
ucacagaagauaaugcuaa

SEQ ID NO: 2192187 - RNA, 19 nt, Artificial Sequence
  Description of Artificial Sequence: Synthetic oligonucleotide
aaagaucccgguguagagc

SEQ ID NO: 2192188 - RNA, 19 nt, Artificial Sequence
  Description of Artificial Sequence: Synthetic oligonucleotide
augacaauugccaugauga

SEQ ID NO: 2192189 - RNA, 19 nt, Artificial Sequence
  Description of Artificial Sequence: Synthetic oligonucleotide
gauaacaccgcgaccaccg

SEQ ID NO: 2192190 - RNA, 19 nt, Artificial Sequence
  Description of Artificial Sequence: Synthetic oligonucleotide
aauggcacugccaaagauc

SEQ ID NO: 2192191 - RNA, 19 nt, Artificial Sequence
  Description of Artificial Sequence: Synthetic oligonucleotide
augcuaaccaaguucuugg

SEQ ID NO: 2192192 - RNA, 19 nt, Artificial Sequence
  Description of Artificial Sequence: Synthetic oligonucleotide
aauauagaugccccaggcu

SEQ ID NO: 2192193 - RNA, 19 nt, Artificial Sequence
  Description of Artificial Sequence: Synthetic oligonucleotide
acugccaaagaucuccacg

SEQ ID NO: 2192194 - RNA, 19 nt, Artificial Sequence
  Description of Artificial Sequence: Synthetic oligonucleotide
cauggaguagccugcaugg

SEQ ID NO: 2192195 - RNA, 19 nt, Artificial Sequence
  Description of Artificial Sequence: Synthetic oligonucleotide
gaaagaccgacugugaggc

SEQ ID NO: 2192196 - RNA, 19 nt, Artificial Sequence
  Description of Artificial Sequence: Synthetic oligonucleotide
aggucugaagaauugcgac

SEQ ID NO: 2192197 - RNA, 19 nt, Artificial Sequence
  Description of Artificial Sequence: Synthetic oligonucleotide
aguuucgauggccaauggc

SEQ ID NO: 2192198 - RNA, 19 nt, Artificial Sequence
  Description of Artificial Sequence: Synthetic oligonucleotide
accaacaauaaauaacagu

SEQ ID NO: 2192199 - RNA, 19 nt, Artificial Sequence
  Description of Artificial Sequence: Synthetic oligonucleotide
auaaucaaguuuauuucac

SEQ ID NO: 2192200 - RNA, 19 nt, Artificial Sequence
  Description of Artificial Sequence: Synthetic oligonucleotide
gaaguuucgguaaggaacc

SEQ ID NO: 2192201 - RNA, 19 nt, Artificial Sequence
  Description of Artificial Sequence: Synthetic oligonucleotide
aagaucccgguguagagca

SEQ ID NO: 2192202 - RNA, 19 nt, Artificial Sequence
  Description of Artificial Sequence: Synthetic oligonucleotide
aacaccgcgaccaccgucc

SEQ ID NO: 2192203 - RNA, 19 nt, Artificial Sequence
  Description of Artificial Sequence: Synthetic oligonucleotide
uauagaucaucuagucacc

SEQ ID NO: 2192204 - RNA, 19 nt, Artificial Sequence
  Description of Artificial Sequence: Synthetic oligonucleotide
guaauauagaugccccagg

SEQ ID NO: 2192205 - RNA, 19 nt, Artificial Sequence
  Description of Artificial Sequence: Synthetic oligonucleotide
ugcaaugccuccauaguga

SEQ ID NO: 2192206 - RNA, 19 nt, Artificial Sequence
  Description of Artificial Sequence: Synthetic oligonucleotide
gagauugcuaagccaaugc

SEQ ID NO: 2192207 - RNA, 19 nt, Artificial Sequence
  Description of Artificial Sequence: Synthetic oligonucleotide
uaaauaacaguggggcacg

SEQ ID NO: 2192208 - RNA, 19 nt, Artificial Sequence
  Description of Artificial Sequence: Synthetic oligonucleotide
uguugcuaaugacaauugc

SEQ ID NO: 2192209 - RNA, 19 nt, Artificial Sequence
  Description of Artificial Sequence: Synthetic oligonucleotide
acgaugagaaucuuuacaa

SEQ ID NO: 2192210 - RNA, 19 nt, Artificial Sequence
  Description of Artificial Sequence: Synthetic oligonucleotide
gauugcuaagccaaugccc

SEQ ID NO: 2192211 - RNA, 19 nt, Artificial Sequence
  Description of Artificial Sequence: Synthetic oligonucleotide
gaugaugccguagauggcc

SEQ ID NO: 2192212 - RNA, 19 nt, Artificial Sequence
  Description of Artificial Sequence: Synthetic oligonucleotide
aaaugguguagcagauucc

SEQ ID NO: 2192213 - RNA, 19 nt, Artificial Sequence
  Description of Artificial Sequence: Synthetic oligonucleotide
uggaaagaccgacugugag

SEQ ID NO: 2192214 - RNA, 19 nt, Artificial Sequence
  Description of Artificial Sequence: Synthetic oligonucleotide
uuucgguaaggaaccaugc

SEQ ID NO: 2192215 - RNA, 19 nt, Artificial Sequence
  Description of Artificial Sequence: Synthetic oligonucleotide
aagauaaugcuaaccaagu

SEQ ID NO: 2192216 - RNA, 19 nt, Artificial Sequence
  Description of Artificial Sequence: Synthetic oligonucleotide
ugucccaggaaaaccaaca

SEQ ID NO: 2192217 - RNA, 19 nt, Artificial Sequence
  Description of Artificial Sequence: Synthetic oligonucleotide
uccacgaugagaaucuuua

SEQ ID NO: 2192218 - RNA, 19 nt, Artificial Sequence
  Description of Artificial Sequence: Synthetic oligonucleotide
aacaccaagcccaggaaag

SEQ ID NO: 2192219 - RNA, 19 nt, Artificial Sequence
  Description of Artificial Sequence: Synthetic oligonucleotide
aaugcccagauucgaccac

SEQ ID NO: 2192220 - RNA, 19 nt, Artificial Sequence
  Description of Artificial Sequence: Synthetic oligonucleotide
agauucgaccacaugaagg

SEQ ID NO: 2192221 - RNA, 19 nt, Artificial Sequence
  Description of Artificial Sequence: Synthetic oligonucleotide
guagcagauucccacgacg

SEQ ID NO: 2192222 - RNA, 19 nt, Artificial Sequence
  Description of Artificial Sequence: Synthetic oligonucleotide
gacgaugaccccaaagagg

SEQ ID NO: 2192223 - RNA, 19 nt, Artificial Sequence
  Description of Artificial Sequence: Synthetic oligonucleotide
aauaacaguggggcacggc

SEQ ID NO: 2192224 - RNA, 19 nt, Artificial Sequence
  Description of Artificial Sequence: Synthetic oligonucleotide
auggccaauggcuuugggg

SEQ ID NO: 2192225 - RNA, 19 nt, Artificial Sequence
  Description of Artificial Sequence: Synthetic oligonucleotide
ucacccaucuucacucugg

SEQ ID NO: 2192226 - RNA, 19 nt, Artificial Sequence
  Description of Artificial Sequence: Synthetic oligonucleotide
auagaucaucuagucaccc

SEQ ID NO: 2192227 - RNA, 19 nt, Artificial Sequence
  Description of Artificial Sequence: Synthetic oligonucleotide
cagaagauaaugcuaacca

SEQ ID NO: 2192228 - RNA, 19 nt, Artificial Sequence
  Description of Artificial Sequence: Synthetic oligonucleotide
caaacauggaguagccugc

SEQ ID NO: 2192229 - RNA, 19 nt, Artificial Sequence
  Description of Artificial Sequence: Synthetic oligonucleotide
caugaagggagaaguuucg

SEQ ID NO: 2192230 - RNA, 19 nt, Artificial Sequence
  Description of Artificial Sequence: Synthetic oligonucleotide
gucaguggcacugaaaggc

SEQ ID NO: 2192231 - RNA, 19 nt, Artificial Sequence
  Description of Artificial Sequence: Synthetic oligonucleotide
aauugccaugaugaugccg

SEQ ID NO: 2192232 - RNA, 19 nt, Artificial Sequence
  Description of Artificial Sequence: Synthetic oligonucleotide
guuggaaagaccgacugug

SEQ ID NO: 2192233 - RNA, 19 nt, Artificial Sequence
  Description of Artificial Sequence: Synthetic oligonucleotide
aucuuuacaaagaggcugg

SEQ ID NO: 2192234 - RNA, 19 nt, Artificial Sequence
  Description of Artificial Sequence: Synthetic oligonucleotide
accaugccacaucaaagcg

SEQ ID NO: 2192235 - RNA, 19 nt, Artificial Sequence
  Description of Artificial Sequence: Synthetic oligonucleotide
aaggccacaaagaucccgg

SEQ ID NO: 2192236 - RNA, 19 nt, Artificial Sequence
  Description of Artificial Sequence: Synthetic oligonucleotide
ggaagagccgguaauauag

SEQ ID NO: 2192237 - RNA, 19 nt, Artificial Sequence
  Description of Artificial Sequence: Synthetic oligonucleotide
auggcuuuggggucagugg

SEQ ID NO: 2192238 - RNA, 19 nt, Artificial Sequence
  Description of Artificial Sequence: Synthetic oligonucleotide
aaagaucuccacgaugaga

SEQ ID NO: 2192239 - RNA, 19 nt, Artificial Sequence
  Description of Artificial Sequence: Synthetic oligonucleotide
agaagauaaugcuaaccaa

SEQ ID NO: 2192240 - RNA, 19 nt, Artificial Sequence
  Description of Artificial Sequence: Synthetic oligonucleotide
ucugcaaugccuccauagu

SEQ ID NO: 2192241 - RNA, 19 nt, Artificial Sequence
  Description of Artificial Sequence: Synthetic oligonucleotide
aaacaccgggaagaugggc

SEQ ID NO: 2192242 - RNA, 19 nt, Artificial Sequence
  Description of Artificial Sequence: Synthetic oligonucleotide
acauggaguagccugcaug

SEQ ID NO: 2192243 - RNA, 19 nt, Artificial Sequence
  Description of Artificial Sequence: Synthetic oligonucleotide
gcuccaaccacagagagag

SEQ ID NO: 2192244 - RNA, 19 nt, Artificial Sequence
  Description of Artificial Sequence: Synthetic oligonucleotide
gaaccaugccacaucaaag

SEQ ID NO: 2192245 - RNA, 19 nt, Artificial Sequence
  Description of Artificial Sequence: Synthetic oligonucleotide
ugaagggagaaguuucggu

SEQ ID NO: 2192246 - RNA, 19 nt, Artificial Sequence
  Description of Artificial Sequence: Synthetic oligonucleotide
gacaauugccaugaugaug

SEQ ID NO: 2192247 - RNA, 19 nt, Artificial Sequence
  Description of Artificial Sequence: Synthetic oligonucleotide
uagcagauucccacgacga

SEQ ID NO: 2192248 - RNA, 19 nt, Artificial Sequence
  Description of Artificial Sequence: Synthetic oligonucleotide
ugguguagcagauucccac

SEQ ID NO: 2192249 - RNA, 19 nt, Artificial Sequence
  Description of Artificial Sequence: Synthetic oligonucleotide
agaucaucuagucacccau

SEQ ID NO: 2192250 - RNA, 19 nt, Artificial Sequence
  Description of Artificial Sequence: Synthetic oligonucleotide
cuaaugacaauugccauga

SEQ ID NO: 2192251 - RNA, 19 nt, Artificial Sequence
  Description of Artificial Sequence: Synthetic oligonucleotide
aaagaccgacugugaggcc

SEQ ID NO: 2192252 - RNA, 19 nt, Artificial Sequence
  Description of Artificial Sequence: Synthetic oligonucleotide
ggaaagaccgacugugagg

SEQ ID NO: 2192253 - RNA, 19 nt, Artificial Sequence
  Description of Artificial Sequence: Synthetic oligonucleotide
ucccacgacgaucaugcag

SEQ ID NO: 2192254 - RNA, 19 nt, Artificial Sequence
  Description of Artificial Sequence: Synthetic oligonucleotide
gaccugagauaacaccgcg

SEQ ID NO: 2192255 - RNA, 19 nt, Artificial Sequence
  Description of Artificial Sequence: Synthetic oligonucleotide
aucaucuagucacccaucu

SEQ ID NO: 2192256 - RNA, 19 nt, Artificial Sequence
  Description of Artificial Sequence: Synthetic oligonucleotide
gugaacaggcagcaagagg

SEQ ID NO: 2192257 - RNA, 19 nt, Artificial Sequence
  Description of Artificial Sequence: Synthetic oligonucleotide
gggucaguggcacugaaag

SEQ ID NO: 2192258 - RNA, 19 nt, Artificial Sequence
  Description of Artificial Sequence: Synthetic oligonucleotide
aaaggcuaagggacacagc

SEQ ID NO: 2192259 - RNA, 19 nt, Artificial Sequence
  Description of Artificial Sequence: Synthetic oligonucleotide
aauugcgacgaugacccca

SEQ ID NO: 2192260 - RNA, 19 nt, Artificial Sequence
  Description of Artificial Sequence: Synthetic oligonucleotide
accacaugaagggagaagu

SEQ ID NO: 2192261 - RNA, 19 nt, Artificial Sequence
  Description of Artificial Sequence: Synthetic oligonucleotide
ugccacaucaaagcggaag

SEQ ID NO: 2192262 - RNA, 19 nt, Artificial Sequence
  Description of Artificial Sequence: Synthetic oligonucleotide
ggucugaagaauugcgacg

SEQ ID NO: 2192263 - RNA, 19 nt, Artificial Sequence
  Description of Artificial Sequence: Synthetic oligonucleotide
aaccaacaauaaauaacag

SEQ ID NO: 2192264 - RNA, 19 nt, Artificial Sequence
  Description of Artificial Sequence: Synthetic oligonucleotide
uaaggaaccaugccacauc

SEQ ID NO: 2192265 - RNA, 19 nt, Artificial Sequence
  Description of Artificial Sequence: Synthetic oligonucleotide
agagagauugcuaagccaa

SEQ ID NO: 2192266 - RNA, 19 nt, Artificial Sequence
  Description of Artificial Sequence: Synthetic oligonucleotide
gaaggccacaaagaucccg

SEQ ID NO: 2192267 - RNA, 19 nt, Artificial Sequence
  Description of Artificial Sequence: Synthetic oligonucleotide
aagccaaugcccagauucg

SEQ ID NO: 2192268 - RNA, 19 nt, Artificial Sequence
  Description of Artificial Sequence: Synthetic oligonucleotide
aagagccgguaauauagau

SEQ ID NO: 2192269 - RNA, 19 nt, Artificial Sequence
  Description of Artificial Sequence: Synthetic oligonucleotide
ugcgacgaugaccccaaag

SEQ ID NO: 2192270 - RNA, 19 nt, Artificial Sequence
  Description of Artificial Sequence: Synthetic oligonucleotide
uaacaguggggcacggccc

SEQ ID NO: 2192271 - RNA, 19 nt, Artificial Sequence
  Description of Artificial Sequence: Synthetic oligonucleotide
gguaauauagaugccccag

SEQ ID NO: 2192272 - RNA, 19 nt, Artificial Sequence
  Description of Artificial Sequence: Synthetic oligonucleotide
caugguaguuucgauggcc

SEQ ID NO: 2192273 - RNA, 19 nt, Artificial Sequence
  Description of Artificial Sequence: Synthetic oligonucleotide
ugauggaagagccgguaau

SEQ ID NO: 2192274 - RNA, 19 nt, Artificial Sequence
  Description of Artificial Sequence: Synthetic oligonucleotide
cauauagaucaucuaguca

SEQ ID NO: 2192275 - RNA, 19 nt, Artificial Sequence
  Description of Artificial Sequence: Synthetic oligonucleotide
ugugaggccggccccaaac

SEQ ID NO: 2192276 - RNA, 19 nt, Artificial Sequence
  Description of Artificial Sequence: Synthetic oligonucleotide
gggaccugagauaacaccg

SEQ ID NO: 2192277 - RNA, 19 nt, Artificial Sequence
  Description of Artificial Sequence: Synthetic oligonucleotide
uagaucaucuagucaccca

SEQ ID NO: 2192278 - RNA, 19 nt, Artificial Sequence
  Description of Artificial Sequence: Synthetic oligonucleotide
gcuaaugacaauugccaug

SEQ ID NO: 2192279 - RNA, 19 nt, Artificial Sequence
  Description of Artificial Sequence: Synthetic oligonucleotide
guuucgguaaggaaccaug

SEQ ID NO: 2192280 - RNA, 19 nt, Artificial Sequence
  Description of Artificial Sequence: Synthetic oligonucleotide
agauaacaccgcgaccacc

SEQ ID NO: 2192281 - RNA, 19 nt, Artificial Sequence
  Description of Artificial Sequence: Synthetic oligonucleotide
uaguuucgauggccaaugg

SEQ ID NO: 2192282 - RNA, 19 nt, Artificial Sequence
  Description of Artificial Sequence: Synthetic oligonucleotide
guaguuucgauggccaaug

SEQ ID NO: 2192283 - RNA, 19 nt, Artificial Sequence
  Description of Artificial Sequence: Synthetic oligonucleotide
gaggugagugcagagggcc

SEQ ID NO: 2192284 - RNA, 19 nt, Artificial Sequence
  Description of Artificial Sequence: Synthetic oligonucleotide
gaagaauugcgacgaugac

SEQ ID NO: 2192285 - RNA, 19 nt, Artificial Sequence
  Description of Artificial Sequence: Synthetic oligonucleotide
ggacaaauaaucaaguuua

SEQ ID NO: 2192286 - RNA, 19 nt, Artificial Sequence
  Description of Artificial Sequence: Synthetic oligonucleotide
cccacgacgaucaugcagg

SEQ ID NO: 2192287 - RNA, 19 nt, Artificial Sequence
  Description of Artificial Sequence: Synthetic oligonucleotide
ucuggaggucugaagaauu

SEQ ID NO: 2192288 - RNA, 19 nt, Artificial Sequence
  Description of Artificial Sequence: Synthetic oligonucleotide
ugggguucugugcaucagc

SEQ ID NO: 2192289 - RNA, 19 nt, Artificial Sequence
  Description of Artificial Sequence: Synthetic oligonucleotide
ggguagggaacacaggugc

SEQ ID NO: 2192290 - RNA, 19 nt, Artificial Sequence
  Description of Artificial Sequence: Synthetic oligonucleotide
aaauaacaguggggcacgg

SEQ ID NO: 2192291 - RNA, 19 nt, Artificial Sequence
  Description of Artificial Sequence: Synthetic oligonucleotide
ugcuaaugacaauugccau

SEQ ID NO: 2192292 - RNA, 19 nt, Artificial Sequence
  Description of Artificial Sequence: Synthetic oligonucleotide
gaugaccccaaagaggcca

SEQ ID NO: 2192293 - RNA, 19 nt, Artificial Sequence
  Description of Artificial Sequence: Synthetic oligonucleotide
ucaaagcggaagcccaagu

SEQ ID NO: 2192294 - RNA, 19 nt, Artificial Sequence
  Description of Artificial Sequence: Synthetic oligonucleotide
ccaaugauggaagagccgg

SEQ ID NO: 2192295 - RNA, 19 nt, Artificial Sequence
  Description of Artificial Sequence: Synthetic oligonucleotide
acagcuguacacagucacc

SEQ ID NO: 2192296 - RNA, 19 nt, Artificial Sequence
  Description of Artificial Sequence: Synthetic oligonucleotide
gguguagcagauucccacg

SEQ ID NO: 2192297 - RNA, 19 nt, Artificial Sequence
  Description of Artificial Sequence: Synthetic oligonucleotide
cacgaugagaaucuuuaca

SEQ ID NO: 2192298 - RNA, 19 nt, Artificial Sequence
  Description of Artificial Sequence: Synthetic oligonucleotide
aggaaaggcuaagggacac

SEQ ID NO: 2192299 - RNA, 19 nt, Artificial Sequence
  Description of Artificial Sequence: Synthetic oligonucleotide
ucuuuacaaagaggcuggg

SEQ ID NO: 2192300 - RNA, 19 nt, Artificial Sequence
  Description of Artificial Sequence: Synthetic oligonucleotide
gaucuccacgaugagaauc

SEQ ID NO: 2192301 - RNA, 19 nt, Artificial Sequence
  Description of Artificial Sequence: Synthetic oligonucleotide
aguuggaaagaccgacugu

SEQ ID NO: 2192302 - RNA, 19 nt, Artificial Sequence
  Description of Artificial Sequence: Synthetic oligonucleotide
agucuguuggcccgccccg

SEQ ID NO: 2192303 - RNA, 19 nt, Artificial Sequence
  Description of Artificial Sequence: Synthetic oligonucleotide
uccacaaaacaaguuggaa

SEQ ID NO: 2192304 - RNA, 19 nt, Artificial Sequence
  Description of Artificial Sequence: Synthetic oligonucleotide
agauaaugcuaaccaaguu

SEQ ID NO: 2192305 - RNA, 19 nt, Artificial Sequence
  Description of Artificial Sequence: Synthetic oligonucleotide
caaagcggaagcccaaguc

SEQ ID NO: 2192306 - RNA, 19 nt, Artificial Sequence
  Description of Artificial Sequence: Synthetic oligonucleotide
guacacagucaccaucagc

SEQ ID NO: 2192307 - RNA, 19 nt, Artificial Sequence
  Description of Artificial Sequence: Synthetic oligonucleotide
augaagggagaaguuucgg

SEQ ID NO: 2192308 - RNA, 19 nt, Artificial Sequence
  Description of Artificial Sequence: Synthetic oligonucleotide
gugcagagggcccugaaca

SEQ ID NO: 2192309 - RNA, 19 nt, Artificial Sequence
  Description of Artificial Sequence: Synthetic oligonucleotide
aaugauggaagagccggua

SEQ ID NO: 2192310 - RNA, 19 nt, Artificial Sequence
  Description of Artificial Sequence: Synthetic oligonucleotide
agagauugcuaagccaaug

SEQ ID NO: 2192311 - RNA, 19 nt, Artificial Sequence
  Description of Artificial Sequence: Synthetic oligonucleotide
uggaguagccugcauggua

SEQ ID NO: 2192312 - RNA, 19 nt, Artificial Sequence
  Description of Artificial Sequence: Synthetic oligonucleotide
gcagacuccacaaaacaag

SEQ ID NO: 2192313 - RNA, 19 nt, Artificial Sequence
  Description of Artificial Sequence: Synthetic oligonucleotide
gucugaagaauugcgacga

SEQ ID NO: 2192314 - RNA, 19 nt, Artificial Sequence
  Description of Artificial Sequence: Synthetic oligonucleotide
cacgcagacuccacaaaac

SEQ ID NO: 2192315 - RNA, 19 nt, Artificial Sequence
  Description of Artificial Sequence: Synthetic oligonucleotide
caaacaccgggaagauggg

SEQ ID NO: 2192316 - RNA, 19 nt, Artificial Sequence
  Description of Artificial Sequence: Synthetic oligonucleotide
cagauucgaccacaugaag

SEQ ID NO: 2192317 - RNA, 19 nt, Artificial Sequence
  Description of Artificial Sequence: Synthetic oligonucleotide
ugcuaaccaaguucuuggu

SEQ ID NO: 2192318 - RNA, 19 nt, Artificial Sequence
  Description of Artificial Sequence: Synthetic oligonucleotide
gaacaccaagcccaggaaa

SEQ ID NO: 2192319 - RNA, 19 nt, Artificial Sequence
  Description of Artificial Sequence: Synthetic oligonucleotide
agagccgguaauauagaug

SEQ ID NO: 2192320 - RNA, 19 nt, Artificial Sequence
  Description of Artificial Sequence: Synthetic oligonucleotide
cugaagaauugcgacgaug

SEQ ID NO: 2192321 - RNA, 19 nt, Artificial Sequence
  Description of Artificial Sequence: Synthetic oligonucleotide
ccugagauaacaccgcgac

SEQ ID NO: 2192322 - RNA, 19 nt, Artificial Sequence
  Description of Artificial Sequence: Synthetic oligonucleotide
ucuagucacccaucuucac

SEQ ID NO: 2192323 - RNA, 19 nt, Artificial Sequence
  Description of Artificial Sequence: Synthetic oligonucleotide
cugagauaacaccgcgacc

SEQ ID NO: 2192324 - RNA, 19 nt, Artificial Sequence
  Description of Artificial Sequence: Synthetic oligonucleotide
ugacaauugccaugaugau

SEQ ID NO: 2192325 - RNA, 19 nt, Artificial Sequence
  Description of Artificial Sequence: Synthetic oligonucleotide
ucggugggaccugagauaa

SEQ ID NO: 2192326 - RNA, 19 nt, Artificial Sequence
  Description of Artificial Sequence: Synthetic oligonucleotide
ccauauagaucaucuaguc

SEQ ID NO: 2192327 - RNA, 19 nt, Artificial Sequence
  Description of Artificial Sequence: Synthetic oligonucleotide
ggugcacagcuguacacag

SEQ ID NO: 2192328 - RNA, 19 nt, Artificial Sequence
  Description of Artificial Sequence: Synthetic oligonucleotide
caaagaucuccacgaugag

SEQ ID NO: 2192329 - RNA, 19 nt, Artificial Sequence
  Description of Artificial Sequence: Synthetic oligonucleotide
cuaagggacacagcuccag

SEQ ID NO: 2192330 - RNA, 19 nt, Artificial Sequence
  Description of Artificial Sequence: Synthetic oligonucleotide
uccagcugucccaggaaaa

SEQ ID NO: 2192331 - RNA, 19 nt, Artificial Sequence
  Description of Artificial Sequence: Synthetic oligonucleotide
gaggucugaagaauugcga

SEQ ID NO: 2192332 - RNA, 19 nt, Artificial Sequence
  Description of Artificial Sequence: Synthetic oligonucleotide
uggaagagccgguaauaua

SEQ ID NO: 2192333 - RNA, 19 nt, Artificial Sequence
  Description of Artificial Sequence: Synthetic oligonucleotide
cuggaugagggguagggaa

SEQ ID NO: 2192334 - RNA, 19 nt, Artificial Sequence
  Description of Artificial Sequence: Synthetic oligonucleotide
ugcuaagccaaugcccaga

SEQ ID NO: 2192335 - RNA, 19 nt, Artificial Sequence
  Description of Artificial Sequence: Synthetic oligonucleotide
augauggaagagccgguaa

SEQ ID NO: 2192336 - RNA, 19 nt, Artificial Sequence
  Description of Artificial Sequence: Synthetic oligonucleotide
uagggaacacaggugcaca

SEQ ID NO: 2192337 - RNA, 19 nt, Artificial Sequence
  Description of Artificial Sequence: Synthetic oligonucleotide
ccgguaauauagaugcccc

SEQ ID NO: 2192338 - RNA, 19 nt, Artificial Sequence
  Description of Artificial Sequence: Synthetic oligonucleotide
cagucuguuggcccgcccc

SEQ ID NO: 2192339 - RNA, 19 nt, Artificial Sequence
  Description of Artificial Sequence: Synthetic oligonucleotide
ccaugccacaucaaagcgg

SEQ ID NO: 2192340 - RNA, 19 nt, Artificial Sequence
  Description of Artificial Sequence: Synthetic oligonucleotide
auguugcuaaugacaauug

SEQ ID NO: 2192341 - RNA, 19 nt, Artificial Sequence
  Description of Artificial Sequence: Synthetic oligonucleotide
gagauaacaccgcgaccac

SEQ ID NO: 2192342 - RNA, 19 nt, Artificial Sequence
  Description of Artificial Sequence: Synthetic oligonucleotide
aggccggccccaaacaugg

SEQ ID NO: 2192343 - RNA, 19 nt, Artificial Sequence
  Description of Artificial Sequence: Synthetic oligonucleotide
aacauggaguagccugcau

SEQ ID NO: 2192344 - RNA, 19 nt, Artificial Sequence
  Description of Artificial Sequence: Synthetic oligonucleotide
ucgauggccaauggcuuug

SEQ ID NO: 2192345 - RNA, 19 nt, Artificial Sequence
  Description of Artificial Sequence: Synthetic oligonucleotide
gcgacgaugaccccaaaga

SEQ ID NO: 2192346 - RNA, 19 nt, Artificial Sequence
  Description of Artificial Sequence: Synthetic oligonucleotide
ggaaccaugccacaucaaa

SEQ ID NO: 2192347 - RNA, 19 nt, Artificial Sequence
  Description of Artificial Sequence: Synthetic oligonucleotide
ggaaaaccaacaauaaaua

SEQ ID NO: 2192348 - RNA, 19 nt, Artificial Sequence
  Description of Artificial Sequence: Synthetic oligonucleotide
cccagauucgaccacauga

SEQ ID NO: 2192349 - RNA, 19 nt, Artificial Sequence
  Description of Artificial Sequence: Synthetic oligonucleotide
uaaccaaguucuuggucuu

SEQ ID NO: 2192350 - RNA, 19 nt, Artificial Sequence
  Description of Artificial Sequence: Synthetic oligonucleotide
aagcggaagcccaagucaa

SEQ ID NO: 2192351 - RNA, 19 nt, Artificial Sequence
  Description of Artificial Sequence: Synthetic oligonucleotide
ccaaugcccagauucgacc

SEQ ID NO: 2192352 - RNA, 19 nt, Artificial Sequence
  Description of Artificial Sequence: Synthetic oligonucleotide
gccgguaauauagaugccc

SEQ ID NO: 2192353 - RNA, 19 nt, Artificial Sequence
  Description of Artificial Sequence: Synthetic oligonucleotide
caaugcccagauucgacca

SEQ ID NO: 2192354 - RNA, 19 nt, Artificial Sequence
  Description of Artificial Sequence: Synthetic oligonucleotide
caucagcagcccauucccc

SEQ ID NO: 2192355 - RNA, 19 nt, Artificial Sequence
  Description of Artificial Sequence: Synthetic oligonucleotide
gaucggugggaccugagau

SEQ ID NO: 2192356 - RNA, 19 nt, Artificial Sequence
  Description of Artificial Sequence: Synthetic oligonucleotide
acaggcagcaagaggugag

SEQ ID NO: 2192357 - RNA, 19 nt, Artificial Sequence
  Description of Artificial Sequence: Synthetic oligonucleotide
gccccacccauauagauca

SEQ ID NO: 2192358 - RNA, 19 nt, Artificial Sequence
  Description of Artificial Sequence: Synthetic oligonucleotide
uagauggccacagcuucac

SEQ ID NO: 2192359 - RNA, 19 nt, Artificial Sequence
  Description of Artificial Sequence: Synthetic oligonucleotide
uaacaccgcgaccaccguc

SEQ ID NO: 2192360 - RNA, 19 nt, Artificial Sequence
  Description of Artificial Sequence: Synthetic oligonucleotide
augguaguuucgauggcca

SEQ ID NO: 2192361 - RNA, 19 nt, Artificial Sequence
  Description of Artificial Sequence: Synthetic oligonucleotide
ucugaagaauugcgacgau

SEQ ID NO: 2192362 - RNA, 19 nt, Artificial Sequence
  Description of Artificial Sequence: Synthetic oligonucleotide
gauggaagagccgguaaua

SEQ ID NO: 2192363 - RNA, 19 nt, Artificial Sequence
  Description of Artificial Sequence: Synthetic oligonucleotide
ugaggccggccccaaacau

SEQ ID NO: 2192364 - RNA, 19 nt, Artificial Sequence
  Description of Artificial Sequence: Synthetic oligonucleotide
cugucccaggaaaaccaac

SEQ ID NO: 2192365 - RNA, 19 nt, Artificial Sequence
  Description of Artificial Sequence: Synthetic oligonucleotide
gggacaaauaaucaaguuu

SEQ ID NO: 2192366 - RNA, 19 nt, Artificial Sequence
  Description of Artificial Sequence: Synthetic oligonucleotide
agcaagaggugagugcaga

SEQ ID NO: 2192367 - RNA, 19 nt, Artificial Sequence
  Description of Artificial Sequence: Synthetic oligonucleotide
caucagccagggcagcccc

SEQ ID NO: 2192368 - RNA, 19 nt, Artificial Sequence
  Description of Artificial Sequence: Synthetic oligonucleotide
uucgauggccaauggcuuu

SEQ ID NO: 2192369 - RNA, 19 nt, Artificial Sequence
  Description of Artificial Sequence: Synthetic oligonucleotide
aguggggcacggccccacc

SEQ ID NO: 2192370 - RNA, 19 nt, Artificial Sequence
  Description of Artificial Sequence: Synthetic oligonucleotide
auggaagagccgguaauau

SEQ ID NO: 2192371 - RNA, 19 nt, Artificial Sequence
  Description of Artificial Sequence: Synthetic oligonucleotide
gaucaucuagucacccauc

SEQ ID NO: 2192372 - RNA, 19 nt, Artificial Sequence
  Description of Artificial Sequence: Synthetic oligonucleotide
gaagagccgguaauauaga

SEQ ID NO: 2192373 - RNA, 19 nt, Artificial Sequence
  Description of Artificial Sequence: Synthetic oligonucleotide
ugguaguuucgauggccaa

SEQ ID NO: 2192374 - RNA, 19 nt, Artificial Sequence
  Description of Artificial Sequence: Synthetic oligonucleotide
ugcccacgcagacuccaca

SEQ ID NO: 2192375 - RNA, 19 nt, Artificial Sequence
  Description of Artificial Sequence: Synthetic oligonucleotide
aucggugggaccugagaua

SEQ ID NO: 2192376 - RNA, 19 nt, Artificial Sequence
  Description of Artificial Sequence: Synthetic oligonucleotide
caauugccaugaugaugcc

SEQ ID NO: 2192377 - RNA, 19 nt, Artificial Sequence
  Description of Artificial Sequence: Synthetic oligonucleotide
cacaggugcacagcuguac

SEQ ID NO: 2192378 - RNA, 19 nt, Artificial Sequence
  Description of Artificial Sequence: Synthetic oligonucleotide
agcagauucccacgacgau

SEQ ID NO: 2192379 - RNA, 19 nt, Artificial Sequence
  Description of Artificial Sequence: Synthetic oligonucleotide
aaguuucgguaaggaacca

SEQ ID NO: 2192380 - RNA, 19 nt, Artificial Sequence
  Description of Artificial Sequence: Synthetic oligonucleotide
accaccguccgccccgcag

SEQ ID NO: 2192381 - RNA, 19 nt, Artificial Sequence
  Description of Artificial Sequence: Synthetic oligonucleotide
augccguagauggccacag

SEQ ID NO: 2192382 - RNA, 19 nt, Artificial Sequence
  Description of Artificial Sequence: Synthetic oligonucleotide
agucacccaucuucacucu

SEQ ID NO: 2192383 - RNA, 19 nt, Artificial Sequence
  Description of Artificial Sequence: Synthetic oligonucleotide
acugaaaggcucagccaug

SEQ ID NO: 2192384 - RNA, 19 nt, Artificial Sequence
  Description of Artificial Sequence: Synthetic oligonucleotide
ggugggaccugagauaaca

SEQ ID NO: 2192385 - RNA, 19 nt, Artificial Sequence
  Description of Artificial Sequence: Synthetic oligonucleotide
gcuaaccaaguucuugguc

SEQ ID NO: 2192386 - RNA, 19 nt, Artificial Sequence
  Description of Artificial Sequence: Synthetic oligonucleotide
agccgguaauauagaugcc

SEQ ID NO: 2192387 - RNA, 19 nt, Artificial Sequence
  Description of Artificial Sequence: Synthetic oligonucleotide
gaauugcgacgaugacccc

SEQ ID NO: 2192388 - RNA, 19 nt, Artificial Sequence
  Description of Artificial Sequence: Synthetic oligonucleotide
acaaagaggcugggguucu

SEQ ID NO: 2192389 - RNA, 19 nt, Artificial Sequence
  Description of Artificial Sequence: Synthetic oligonucleotide
cagacuccacaaaacaagu

SEQ ID NO: 2192390 - RNA, 19 nt, Artificial Sequence
  Description of Artificial Sequence: Synthetic oligonucleotide
ggcccugaacaccaagccc

SEQ ID NO: 2192391 - RNA, 19 nt, Artificial Sequence
  Description of Artificial Sequence: Synthetic oligonucleotide
auaacaccgcgaccaccgu

SEQ ID NO: 2192392 - RNA, 19 nt, Artificial Sequence
  Description of Artificial Sequence: Synthetic oligonucleotide
aguuucgguaaggaaccau

SEQ ID NO: 2192393 - RNA, 19 nt, Artificial Sequence
  Description of Artificial Sequence: Synthetic oligonucleotide
cuagucacccaucuucacu

SEQ ID NO: 2192394 - RNA, 19 nt, Artificial Sequence
  Description of Artificial Sequence: Synthetic oligonucleotide
gccacaaagaucccggugu

SEQ ID NO: 2192395 - RNA, 19 nt, Artificial Sequence
  Description of Artificial Sequence: Synthetic oligonucleotide
cagcaagaggugagugcag

SEQ ID NO: 2192396 - RNA, 19 nt, Artificial Sequence
  Description of Artificial Sequence: Synthetic oligonucleotide
gaggccggccccaaacaug

SEQ ID NO: 2192397 - RNA, 19 nt, Artificial Sequence
  Description of Artificial Sequence: Synthetic oligonucleotide
ugccguagauggccacagc

SEQ ID NO: 2192398 - RNA, 19 nt, Artificial Sequence
  Description of Artificial Sequence: Synthetic oligonucleotide
auugcgacgaugaccccaa

SEQ ID NO: 2192399 - RNA, 19 nt, Artificial Sequence
  Description of Artificial Sequence: Synthetic oligonucleotide
ggagaaguuucgguaagga

SEQ ID NO: 2192400 - RNA, 19 nt, Artificial Sequence
  Description of Artificial Sequence: Synthetic oligonucleotide
ccagaaggccacaaagauc

SEQ ID NO: 2192401 - RNA, 19 nt, Artificial Sequence
  Description of Artificial Sequence: Synthetic oligonucleotide
acagagagagagauugcua

SEQ ID NO: 2192402 - RNA, 19 nt, Artificial Sequence
  Description of Artificial Sequence: Synthetic oligonucleotide
gggguucugugcaucagcc

SEQ ID NO: 2192403 - RNA, 19 nt, Artificial Sequence
  Description of Artificial Sequence: Synthetic oligonucleotide
auagaugccccaggcugcu

SEQ ID NO: 2192404 - RNA, 19 nt, Artificial Sequence
  Description of Artificial Sequence: Synthetic oligonucleotide
agaccgacugugaggccgg

SEQ ID NO: 2192405 - RNA, 19 nt, Artificial Sequence
  Description of Artificial Sequence: Synthetic oligonucleotide
caaguuggaaagaccgacu

SEQ ID NO: 2192406 - RNA, 19 nt, Artificial Sequence
  Description of Artificial Sequence: Synthetic oligonucleotide
aucccgguguagagcagcg

SEQ ID NO: 2192407 - RNA, 19 nt, Artificial Sequence
  Description of Artificial Sequence: Synthetic oligonucleotide
ccgacugugaggccggccc

SEQ ID NO: 2192408 - RNA, 19 nt, Artificial Sequence
  Description of Artificial Sequence: Synthetic oligonucleotide
ggaccugagauaacaccgc

SEQ ID NO: 2192409 - RNA, 19 nt, Artificial Sequence
  Description of Artificial Sequence: Synthetic oligonucleotide
agaucuccacgaugagaau

SEQ ID NO: 2192410 - RNA, 19 nt, Artificial Sequence
  Description of Artificial Sequence: Synthetic oligonucleotide
accgacugugaggccggcc

SEQ ID NO: 2192411 - RNA, 19 nt, Artificial Sequence
  Description of Artificial Sequence: Synthetic oligonucleotide
augagggguagggaacaca

SEQ ID NO: 2192412 - RNA, 19 nt, Artificial Sequence
  Description of Artificial Sequence: Synthetic oligonucleotide
ugcccagauucgaccacau

SEQ ID NO: 2192413 - RNA, 19 nt, Artificial Sequence
  Description of Artificial Sequence: Synthetic oligonucleotide
gguaaggaaccaugccaca

SEQ ID NO: 2192414 - RNA, 19 nt, Artificial Sequence
  Description of Artificial Sequence: Synthetic oligonucleotide
accugagauaacaccgcga

SEQ ID NO: 2192415 - RNA, 19 nt, Artificial Sequence
  Description of Artificial Sequence: Synthetic oligonucleotide
cguagauggccacagcuuc

SEQ ID NO: 2192416 - RNA, 19 nt, Artificial Sequence
  Description of Artificial Sequence: Synthetic oligonucleotide
acaccgcgaccaccguccg

SEQ ID NO: 2192417 - RNA, 19 nt, Artificial Sequence
  Description of Artificial Sequence: Synthetic oligonucleotide
cgacgaugaccccaaagag

SEQ ID NO: 2192418 - RNA, 19 nt, Artificial Sequence
  Description of Artificial Sequence: Synthetic oligonucleotide
aggccacaaagaucccggu

SEQ ID NO: 2192419 - RNA, 19 nt, Artificial Sequence
  Description of Artificial Sequence: Synthetic oligonucleotide
agauggccacagcuucaca

SEQ ID NO: 2192420 - RNA, 19 nt, Artificial Sequence
  Description of Artificial Sequence: Synthetic oligonucleotide
augcccagauucgaccaca

SEQ ID NO: 2192421 - RNA, 19 nt, Artificial Sequence
  Description of Artificial Sequence: Synthetic oligonucleotide
cgucauggcagcagcgacg

SEQ ID NO: 2192422 - RNA, 19 nt, Artificial Sequence
  Description of Artificial Sequence: Synthetic oligonucleotide
gacgaucaugcaggcccag

SEQ ID NO: 2192423 - RNA, 19 nt, Artificial Sequence
  Description of Artificial Sequence: Synthetic oligonucleotide
ccagauucgaccacaugaa

SEQ ID NO: 2192424 - RNA, 19 nt, Artificial Sequence
  Description of Artificial Sequence: Synthetic oligonucleotide
gccggccccaaacauggag

SEQ ID NO: 2192425 - RNA, 19 nt, Artificial Sequence
  Description of Artificial Sequence: Synthetic oligonucleotide
augaugccguagauggcca

SEQ ID NO: 2192426 - RNA, 19 nt, Artificial Sequence
  Description of Artificial Sequence: Synthetic oligonucleotide
cacagagagagagauugcu

SEQ ID NO: 2192427 - RNA, 19 nt, Artificial Sequence
  Description of Artificial Sequence: Synthetic oligonucleotide
augguguagcagauuccca

SEQ ID NO: 2192428 - RNA, 19 nt, Artificial Sequence
  Description of Artificial Sequence: Synthetic oligonucleotide
cccgcagucuguuggcccg

SEQ ID NO: 2192429 - RNA, 19 nt, Artificial Sequence
  Description of Artificial Sequence: Synthetic oligonucleotide
gcgaccaccguccgccccg

SEQ ID NO: 2192430 - RNA, 19 nt, Artificial Sequence
  Description of Artificial Sequence: Synthetic oligonucleotide
gugggaccugagauaacac

SEQ ID NO: 2192431 - RNA, 19 nt, Artificial Sequence
  Description of Artificial Sequence: Synthetic oligonucleotide
gugaggccggccccaaaca

SEQ ID NO: 2192432 - RNA, 19 nt, Artificial Sequence
  Description of Artificial Sequence: Synthetic oligonucleotide
gggaacacaggugcacagc

SEQ ID NO: 2192433 - RNA, 19 nt, Artificial Sequence
  Description of Artificial Sequence: Synthetic oligonucleotide
cccacacugggguucaguc

SEQ ID NO: 2192434 - RNA, 19 nt, Artificial Sequence
  Description of Artificial Sequence: Synthetic oligonucleotide
guaaggaaccaugccacau

SEQ ID NO: 2192435 - RNA, 19 nt, Artificial Sequence
  Description of Artificial Sequence: Synthetic oligonucleotide
acacugggguucagucugg

SEQ ID NO: 2192436 - RNA, 19 nt, Artificial Sequence
  Description of Artificial Sequence: Synthetic oligonucleotide
auggaguagccugcauggu

SEQ ID NO: 2192437 - RNA, 19 nt, Artificial Sequence
  Description of Artificial Sequence: Synthetic oligonucleotide
cccauauagaucaucuagu

SEQ ID NO: 2192438 - RNA, 19 nt, Artificial Sequence
  Description of Artificial Sequence: Synthetic oligonucleotide
agccccgucauggcagcag

SEQ ID NO: 2192439 - RNA, 19 nt, Artificial Sequence
  Description of Artificial Sequence: Synthetic oligonucleotide
ccacgaugagaaucuuuac

SEQ ID NO: 2192440 - RNA, 19 nt, Artificial Sequence
  Description of Artificial Sequence: Synthetic oligonucleotide
ccacaucaaagcggaagcc

SEQ ID NO: 2192441 - RNA, 19 nt, Artificial Sequence
  Description of Artificial Sequence: Synthetic oligonucleotide
ccacagagagagagauugc

SEQ ID NO: 2192442 - RNA, 19 nt, Artificial Sequence
  Description of Artificial Sequence: Synthetic oligonucleotide
ugcccacaaugcccacgca

SEQ ID NO: 2192443 - RNA, 19 nt, Artificial Sequence
  Description of Artificial Sequence: Synthetic oligonucleotide
ggaucggugggaccugaga

SEQ ID NO: 2192444 - RNA, 19 nt, Artificial Sequence
  Description of Artificial Sequence: Synthetic oligonucleotide
cacccaucuucacucugga

SEQ ID NO: 2192445 - RNA, 19 nt, Artificial Sequence
  Description of Artificial Sequence: Synthetic oligonucleotide
gcaaugccuccauagugaa

SEQ ID NO: 2192446 - RNA, 19 nt, Artificial Sequence
  Description of Artificial Sequence: Synthetic oligonucleotide
aguagccugcaugguaguu

SEQ ID NO: 2192447 - RNA, 19 nt, Artificial Sequence
  Description of Artificial Sequence: Synthetic oligonucleotide
acgaucaugcaggcccaga

SEQ ID NO: 2192448 - RNA, 19 nt, Artificial Sequence
  Description of Artificial Sequence: Synthetic oligonucleotide
ucggaucggugggaccuga

SEQ ID NO: 2192449 - RNA, 19 nt, Artificial Sequence
  Description of Artificial Sequence: Synthetic oligonucleotide
cacccauauagaucaucua

SEQ ID NO: 2192450 - RNA, 19 nt, Artificial Sequence
  Description of Artificial Sequence: Synthetic oligonucleotide
caaugauggaagagccggu

SEQ ID NO: 2192451 - RNA, 19 nt, Artificial Sequence
  Description of Artificial Sequence: Synthetic oligonucleotide
gguguagagcagcgccagc

SEQ ID NO: 2192452 - RNA, 19 nt, Artificial Sequence
  Description of Artificial Sequence: Synthetic oligonucleotide
gccguagauggccacagcu

SEQ ID NO: 2192453 - RNA, 19 nt, Artificial Sequence
  Description of Artificial Sequence: Synthetic oligonucleotide
ucccgguguagagcagcgc

SEQ ID NO: 2192454 - RNA, 19 nt, Artificial Sequence
  Description of Artificial Sequence: Synthetic oligonucleotide
uccgccccgcagucuguug

SEQ ID NO: 2192455 - RNA, 19 nt, Artificial Sequence
  Description of Artificial Sequence: Synthetic oligonucleotide
aggcccagaaggccacaaa

SEQ ID NO: 2192456 - RNA, 19 nt, Artificial Sequence
  Description of Artificial Sequence: Synthetic oligonucleotide
ccagcugucccaggaaaac

SEQ ID NO: 2192457 - RNA, 19 nt, Artificial Sequence
  Description of Artificial Sequence: Synthetic oligonucleotide
ccacaaugcccacgcagac

SEQ ID NO: 2192458 - RNA, 19 nt, Artificial Sequence
  Description of Artificial Sequence: Synthetic oligonucleotide
gagugcagagggcccugaa

SEQ ID NO: 2192459 - RNA, 19 nt, Artificial Sequence
  Description of Artificial Sequence: Synthetic oligonucleotide
gguagggaacacaggugca

SEQ ID NO: 2192460 - RNA, 19 nt, Artificial Sequence
  Description of Artificial Sequence: Synthetic oligonucleotide
gccaaugcccagauucgac

SEQ ID NO: 2192461 - RNA, 19 nt, Artificial Sequence
  Description of Artificial Sequence: Synthetic oligonucleotide
gcugggguucugugcauca

SEQ ID NO: 2192462 - RNA, 19 nt, Artificial Sequence
  Description of Artificial Sequence: Synthetic oligonucleotide
ccaaccacagagagagaga

SEQ ID NO: 2192463 - RNA, 19 nt, Artificial Sequence
  Description of Artificial Sequence: Synthetic oligonucleotide
agccugcaugguaguuucg

SEQ ID NO: 2192464 - RNA, 19 nt, Artificial Sequence
  Description of Artificial Sequence: Synthetic oligonucleotide
gccagccccgucauggcag

SEQ ID NO: 2192465 - RNA, 19 nt, Artificial Sequence
  Description of Artificial Sequence: Synthetic oligonucleotide
cauagugaacaggcagcaa

SEQ ID NO: 2192466 - RNA, 19 nt, Artificial Sequence
  Description of Artificial Sequence: Synthetic oligonucleotide
gugagugcagagggcccug

SEQ ID NO: 2192467 - RNA, 19 nt, Artificial Sequence
  Description of Artificial Sequence: Synthetic oligonucleotide
cccugaacaccaagcccag

SEQ ID NO: 2192468 - RNA, 19 nt, Artificial Sequence
  Description of Artificial Sequence: Synthetic oligonucleotide
gucuguuggcccgccccgc

SEQ ID NO: 2192469 - RNA, 19 nt, Artificial Sequence
  Description of Artificial Sequence: Synthetic oligonucleotide
guagccugcaugguaguuu

SEQ ID NO: 2192470 - RNA, 19 nt, Artificial Sequence
  Description of Artificial Sequence: Synthetic oligonucleotide
ucuccacgaugagaaucuu

SEQ ID NO: 2192471 - RNA, 19 nt, Artificial Sequence
  Description of Artificial Sequence: Synthetic oligonucleotide
gagagauugcuaagccaau

SEQ ID NO: 2192472 - RNA, 19 nt, Artificial Sequence
  Description of Artificial Sequence: Synthetic oligonucleotide
ccccacugcccacaaugcc

SEQ ID NO: 2192473 - RNA, 19 nt, Artificial Sequence
  Description of Artificial Sequence: Synthetic oligonucleotide
ccgucauggcagcagcgac

SEQ ID NO: 2192474 - RNA, 19 nt, Artificial Sequence
  Description of Artificial Sequence: Synthetic oligonucleotide
ccgccccgcagucuguugg

SEQ ID NO: 2192475 - RNA, 19 nt, Artificial Sequence
  Description of Artificial Sequence: Synthetic oligonucleotide
ggccccaaacauggaguag

SEQ ID NO: 2192476 - RNA, 19 nt, Artificial Sequence
  Description of Artificial Sequence: Synthetic oligonucleotide
gccaauggcuuugggguca

SEQ ID NO: 2192477 - RNA, 19 nt, Artificial Sequence
  Description of Artificial Sequence: Synthetic oligonucleotide
gccccgucauggcagcagc

SEQ ID NO: 2192478 - RNA, 19 nt, Artificial Sequence
  Description of Artificial Sequence: Synthetic oligonucleotide
gccugcaugguaguuucga

SEQ ID NO: 2192479 - RNA, 19 nt, Artificial Sequence
  Description of Artificial Sequence: Synthetic oligonucleotide
ggccccacccauauagauc

SEQ ID NO: 2192480 - RNA, 19 nt, Artificial Sequence
  Description of Artificial Sequence: Synthetic oligonucleotide
ccacgacgaucaugcaggc

SEQ ID NO: 2192481 - RNA, 19 nt, Artificial Sequence
  Description of Artificial Sequence: Synthetic oligonucleotide
ggucggaucggugggaccu

SEQ ID NO: 2192482 - RNA, 19 nt, Artificial Sequence
  Description of Artificial Sequence: Synthetic oligonucleotide
ccacgcagacuccacaaaa

SEQ ID NO: 2192483 - RNA, 19 nt, Artificial Sequence
  Description of Artificial Sequence: Synthetic oligonucleotide
gucggaucggugggaccug

SEQ ID NO: 2192484 - RNA, 19 nt, Artificial Sequence
  Description of Artificial Sequence: Synthetic oligonucleotide
agcggaagcccaagucaaa

SEQ ID NO: 2192485 - RNA, 19 nt, Artificial Sequence
  Description of Artificial Sequence: Synthetic oligonucleotide
uugcgacgaugaccccaaa

SEQ ID NO: 2192486 - RNA, 19 nt, Artificial Sequence
  Description of Artificial Sequence: Synthetic oligonucleotide
gggucggaucggugggacc

SEQ ID NO: 2192487 - RNA, 19 nt, Artificial Sequence
  Description of Artificial Sequence: Synthetic oligonucleotide
gcccagauucgaccacaug

SEQ ID NO: 2192488 - RNA, 19 nt, Artificial Sequence
  Description of Artificial Sequence: Synthetic oligonucleotide
caccgcgaccaccguccgc

SEQ ID NO: 2192489 - RNA, 19 nt, Artificial Sequence
  Description of Artificial Sequence: Synthetic oligonucleotide
ccccgucauggcagcagcg

SEQ ID NO: 2192490 - RNA, 19 nt, Artificial Sequence
  Description of Artificial Sequence: Synthetic oligonucleotide
gcuaagccaaugcccagau

SEQ ID NO: 2192491 - RNA, 19 nt, Artificial Sequence
  Description of Artificial Sequence: Synthetic oligonucleotide
cccagaaggccacaaagau

SEQ ID NO: 2192492 - RNA, 19 nt, Artificial Sequence
  Description of Artificial Sequence: Synthetic oligonucleotide
gcggaagcccaagucaaaa

SEQ ID NO: 2192493 - RNA, 19 nt, Artificial Sequence
  Description of Artificial Sequence: Synthetic oligonucleotide
cacaaugcccacgcagacu

SEQ ID NO: 2192494 - RNA, 19 nt, Artificial Sequence
  Description of Artificial Sequence: Synthetic oligonucleotide
caccguccgccccgcaguc

SEQ ID NO: 2192495 - RNA, 19 nt, Artificial Sequence
  Description of Artificial Sequence: Synthetic oligonucleotide
acggccccacccauauaga

SEQ ID NO: 2192496 - RNA, 19 nt, Artificial Sequence
  Description of Artificial Sequence: Synthetic oligonucleotide
gcccacgcagacuccacaa

SEQ ID NO: 2192497 - RNA, 19 nt, Artificial Sequence
  Description of Artificial Sequence: Synthetic oligonucleotide
ccagccccgucauggcagc

SEQ ID NO: 2192498 - RNA, 19 nt, Artificial Sequence
  Description of Artificial Sequence: Synthetic oligonucleotide
gaccgacugugaggccggc

SEQ ID NO: 2192499 - RNA, 19 nt, Artificial Sequence
  Description of Artificial Sequence: Synthetic oligonucleotide
cccacccauauagaucauc

SEQ ID NO: 2192500 - RNA, 19 nt, Artificial Sequence
  Description of Artificial Sequence: Synthetic oligonucleotide
cgguaauauagaugcccca

SEQ ID NO: 2192501 - RNA, 19 nt, Artificial Sequence
  Description of Artificial Sequence: Synthetic oligonucleotide
gcuaagggacacagcucca

SEQ ID NO: 2192502 - RNA, 19 nt, Artificial Sequence
  Description of Artificial Sequence: Synthetic oligonucleotide
cgaugaccccaaagaggcc

SEQ ID NO: 2192503 - RNA, 19 nt, Artificial Sequence
  Description of Artificial Sequence: Synthetic oligonucleotide
gggguucagucuggucugc

SEQ ID NO: 2192504 - RNA, 19 nt, Artificial Sequence
  Description of Artificial Sequence: Synthetic oligonucleotide
ggugagugcagagggcccu

SEQ ID NO: 2192505 - RNA, 19 nt, Artificial Sequence
  Description of Artificial Sequence: Synthetic oligonucleotide
ggggucggaucggugggac

SEQ ID NO: 2192506 - RNA, 19 nt, Artificial Sequence
  Description of Artificial Sequence: Synthetic oligonucleotide
ccguccgccccgcagucug

SEQ ID NO: 2192507 - RNA, 19 nt, Artificial Sequence
  Description of Artificial Sequence: Synthetic oligonucleotide
ggcacggccccacccauau

SEQ ID NO: 2192508 - RNA, 19 nt, Artificial Sequence
  Description of Artificial Sequence: Synthetic oligonucleotide
cagcuucacagaagauaau

SEQ ID NO: 2192509 - RNA, 19 nt, Artificial Sequence
  Description of Artificial Sequence: Synthetic oligonucleotide
ccacaaagaucccggugua

SEQ ID NO: 2192510 - RNA, 19 nt, Artificial Sequence
  Description of Artificial Sequence: Synthetic oligonucleotide
accguccgccccgcagucu

SEQ ID NO: 2192511 - RNA, 19 nt, Artificial Sequence
  Description of Artificial Sequence: Synthetic oligonucleotide
gcgccagccccgucauggc

SEQ ID NO: 2192512 - RNA, 19 nt, Artificial Sequence
  Description of Artificial Sequence: Synthetic oligonucleotide
ggggucaguggcacugaaa

SEQ ID NO: 2192513 - RNA, 19 nt, Artificial Sequence
  Description of Artificial Sequence: Synthetic oligonucleotide
cgauggccaauggcuuugg

SEQ ID NO: 2192514 - RNA, 19 nt, Artificial Sequence
  Description of Artificial Sequence: Synthetic oligonucleotide
augccacaucaaagcggaa

SEQ ID NO: 2192515 - RNA, 19 nt, Artificial Sequence
  Description of Artificial Sequence: Synthetic oligonucleotide
cgacgaucaugcaggccca

SEQ ID NO: 2192516 - RNA, 19 nt, Artificial Sequence
  Description of Artificial Sequence: Synthetic oligonucleotide
cugugaggccggccccaaa

SEQ ID NO: 2192517 - RNA, 19 nt, Artificial Sequence
  Description of Artificial Sequence: Synthetic oligonucleotide
cggaucggugggaccugag

SEQ ID NO: 2192518 - RNA, 19 nt, Artificial Sequence
  Description of Artificial Sequence: Synthetic oligonucleotide
ccaugaugaugccguagau

SEQ ID NO: 2192519 - RNA, 19 nt, Artificial Sequence
  Description of Artificial Sequence: Synthetic oligonucleotide
cgcgaccaccguccgcccc

SEQ ID NO: 2192520 - RNA, 19 nt, Artificial Sequence
  Description of Artificial Sequence: Synthetic oligonucleotide
ccgcagucuguuggcccgc

SEQ ID NO: 2192521 - RNA, 19 nt, Artificial Sequence
  Description of Artificial Sequence: Synthetic oligonucleotide
cggccccaaacauggagua

SEQ ID NO: 2192522 - RNA, 19 nt, Artificial Sequence
  Description of Artificial Sequence: Synthetic oligonucleotide
ccgcgaccaccguccgccc

SEQ ID NO: 2192523 - RNA, 19 nt, Artificial Sequence
  Description of Artificial Sequence: Synthetic oligonucleotide
ccaccguccgccccgcagu

SEQ ID NO: 2192524 - RNA, 19 nt, Artificial Sequence
  Description of Artificial Sequence: Synthetic oligonucleotide
cggugggaccugagauaac

SEQ ID NO: 2192525 - RNA, 19 nt, Artificial Sequence
  Description of Artificial Sequence: Synthetic oligonucleotide
cgcagucuguuggcccgcc

SEQ ID NO: 2192526 - RNA, 19 nt, Artificial Sequence
  Description of Artificial Sequence: Synthetic oligonucleotide
cagccccgucauggcagca

SEQ ID NO: 2192527 - RNA, 19 nt, Artificial Sequence
  Description of Artificial Sequence: Synthetic oligonucleotide
ggggcacggccccacccau

SEQ ID NO: 2192528 - RNA, 19 nt, Artificial Sequence
  Description of Artificial Sequence: Synthetic oligonucleotide
gcucagccauguugcuaau

SEQ ID NO: 2192529 - RNA, 19 nt, Artificial Sequence
  Description of Artificial Sequence: Synthetic oligonucleotide
cgccagccccgucauggca

SEQ ID NO: 2192530 - RNA, 19 nt, Artificial Sequence
  Description of Artificial Sequence: Synthetic oligonucleotide
guccgccccgcagucuguu

SEQ ID NO: 2192531 - RNA, 19 nt, Artificial Sequence
  Description of Artificial Sequence: Synthetic oligonucleotide
gcacggccccacccauaua

SEQ ID NO: 2192532 - RNA, 19 nt, Artificial Sequence
  Description of Artificial Sequence: Synthetic oligonucleotide
cgaccaccguccgccccgc

SEQ ID NO: 2192533 - RNA, 19 nt, Artificial Sequence
  Description of Artificial Sequence: Synthetic oligonucleotide
cggccccacccauauagau

SEQ ID NO: 2192534 - RNA, 19 nt, Artificial Sequence
  Description of Artificial Sequence: Synthetic oligonucleotide
ggccggccccaaacaugga

SEQ ID NO: 2192535 - RNA, 19 nt, Artificial Sequence
  Description of Artificial Sequence: Synthetic oligonucleotide
gggcacggccccacccaua

SEQ ID NO: 2192536 - RNA, 19 nt, Artificial Sequence
  Description of Artificial Sequence: Synthetic oligonucleotide
ccccacacugggguucagu

SEQ ID NO: 2192537 - RNA, 19 nt, Artificial Sequence
  Description of Artificial Sequence: Synthetic oligonucleotide
ccccacccauauagaucau

SEQ ID NO: 2192538 - RNA, 19 nt, Artificial Sequence
  Description of Artificial Sequence: Synthetic oligonucleotide
cguccgccccgcagucugu

SEQ ID NO: 2192539 - RNA, 19 nt, Artificial Sequence
  Description of Artificial Sequence: Synthetic oligonucleotide
ucaaauaccaugaugcagg

SEQ ID NO: 2192540 - RNA, 19 nt, Artificial Sequence
  Description of Artificial Sequence: Synthetic oligonucleotide
aauaccaugaugcaggcgu

SEQ ID NO: 2192541 - RNA, 19 nt, Artificial Sequence
  Description of Artificial Sequence: Synthetic oligonucleotide
aauaccccaacucagccac

SEQ ID NO: 2192542 - RNA, 19 nt, Artificial Sequence
  Description of Artificial Sequence: Synthetic oligonucleotide
uugauuaagagggagacgg

SEQ ID NO: 2192543 - RNA, 19 nt, Artificial Sequence
  Description of Artificial Sequence: Synthetic oligonucleotide
agcuucacaacauugguac

SEQ ID NO: 2192544 - RNA, 19 nt, Artificial Sequence
  Description of Artificial Sequence: Synthetic oligonucleotide
uguuggguauuccaaaugg

SEQ ID NO: 2192545 - RNA, 19 nt, Artificial Sequence
  Description of Artificial Sequence: Synthetic oligonucleotide
ugagacaaaguacaggggc

SEQ ID NO: 2192546 - RNA, 19 nt, Artificial Sequence
  Description of Artificial Sequence: Synthetic oligonucleotide
agcuaaucgaauugcaucg

SEQ ID NO: 2192547 - RNA, 19 nt, Artificial Sequence
  Description of Artificial Sequence: Synthetic oligonucleotide
uguaaaaccucauccauga

SEQ ID NO: 2192548 - RNA, 19 nt, Artificial Sequence
  Description of Artificial Sequence: Synthetic oligonucleotide
gucugcaucaauuuuauug

SEQ ID NO: 2192549 - RNA, 19 nt, Artificial Sequence
  Description of Artificial Sequence: Synthetic oligonucleotide
agacauggaucccucaucc

SEQ ID NO: 2192550 - RNA, 19 nt, Artificial Sequence
  Description of Artificial Sequence: Synthetic oligonucleotide
uuuugagucaucuguaugu

SEQ ID NO: 2192551 - RNA, 19 nt, Artificial Sequence
  Description of Artificial Sequence: Synthetic oligonucleotide
uccgguagcagcuuggccg

SEQ ID NO: 2192552 - RNA, 19 nt, Artificial Sequence
  Description of Artificial Sequence: Synthetic oligonucleotide
aaugcuuggcuuugucccc

SEQ ID NO: 2192553 - RNA, 19 nt, Artificial Sequence
  Description of Artificial Sequence: Synthetic oligonucleotide
cuugaaguucucaagcucc

SEQ ID NO: 2192554 - RNA, 19 nt, Artificial Sequence
  Description of Artificial Sequence: Synthetic oligonucleotide
agcauauguggacagcugc

SEQ ID NO: 2192555 - RNA, 19 nt, Artificial Sequence
  Description of Artificial Sequence: Synthetic oligonucleotide
guuuguaggaaguugagca

SEQ ID NO: 2192556 - RNA, 19 nt, Artificial Sequence
  Description of Artificial Sequence: Synthetic oligonucleotide
uacucaaauucuuauaggu

SEQ ID NO: 2192557 - RNA, 19 nt, Artificial Sequence
  Description of Artificial Sequence: Synthetic oligonucleotide
aaauggcuccccaauaccc

SEQ ID NO: 2192558 - RNA, 19 nt, Artificial Sequence
  Description of Artificial Sequence: Synthetic oligonucleotide
aaucgaauugcaucguuga

SEQ ID NO: 2192559 - RNA, 19 nt, Artificial Sequence
  Description of Artificial Sequence: Synthetic oligonucleotide
aacacugguuuguaggaag

SEQ ID NO: 2192560 - RNA, 19 nt, Artificial Sequence
  Description of Artificial Sequence: Synthetic oligonucleotide
ugaaauccauccaugagaa

SEQ ID NO: 2192561 - RNA, 19 nt, Artificial Sequence
  Description of Artificial Sequence: Synthetic oligonucleotide
gcugagacaaaguacaggg

SEQ ID NO: 2192562 - RNA, 19 nt, Artificial Sequence
  Description of Artificial Sequence: Synthetic oligonucleotide
uguaagccacagcuaaucg

SEQ ID NO: 2192563 - RNA, 19 nt, Artificial Sequence
  Description of Artificial Sequence: Synthetic oligonucleotide
aucacuguccgcuaacagg

SEQ ID NO: 2192564 - RNA, 19 nt, Artificial Sequence
  Description of Artificial Sequence: Synthetic oligonucleotide
cucaaauucuuauagguga

SEQ ID NO: 2192565 - RNA, 19 nt, Artificial Sequence
  Description of Artificial Sequence: Synthetic oligonucleotide
gaauugguggauaucacgc

SEQ ID NO: 2192566 - RNA, 19 nt, Artificial Sequence
  Description of Artificial Sequence: Synthetic oligonucleotide
uguaggaaguugagcaggg

SEQ ID NO: 2192567 - RNA, 19 nt, Artificial Sequence
  Description of Artificial Sequence: Synthetic oligonucleotide
uucuuauaggugauuuucc

SEQ ID NO: 2192568 - RNA, 19 nt, Artificial Sequence
  Description of Artificial Sequence: Synthetic oligonucleotide
augaguuuggacuugccca

SEQ ID NO: 2192569 - RNA, 19 nt, Artificial Sequence
  Description of Artificial Sequence: Synthetic oligonucleotide
uaaucgaauugcaucguug

SEQ ID NO: 2192570 - RNA, 19 nt, Artificial Sequence
  Description of Artificial Sequence: Synthetic oligonucleotide
uuggguauuccaaauggcu

SEQ ID NO: 2192571 - RNA, 19 nt, Artificial Sequence
  Description of Artificial Sequence: Synthetic oligonucleotide
ugagaaaccucuccaugag

SEQ ID NO: 2192572 - RNA, 19 nt, Artificial Sequence
  Description of Artificial Sequence: Synthetic oligonucleotide
uuggcaaaacugaaguucu

SEQ ID NO: 2192573 - RNA, 19 nt, Artificial Sequence
  Description of Artificial Sequence: Synthetic oligonucleotide
aacugaaguucuuuugagu

SEQ ID NO: 2192574 - RNA, 19 nt, Artificial Sequence
  Description of Artificial Sequence: Synthetic oligonucleotide
ucgaauugcaucguugaag

SEQ ID NO: 2192575 - RNA, 19 nt, Artificial Sequence
  Description of Artificial Sequence: Synthetic oligonucleotide
ucguugaagagcuucacaa

SEQ ID NO: 2192576 - RNA, 19 nt, Artificial Sequence
  Description of Artificial Sequence: Synthetic oligonucleotide
caugaugcaggcgugagcc

SEQ ID NO: 2192577 - RNA, 19 nt, Artificial Sequence
  Description of Artificial Sequence: Synthetic oligonucleotide
ucuuauaggugauuuuccu

SEQ ID NO: 2192578 - RNA, 19 nt, Artificial Sequence
  Description of Artificial Sequence: Synthetic oligonucleotide
ucuugauuaagagggagac

SEQ ID NO: 2192579 - RNA, 19 nt, Artificial Sequence
  Description of Artificial Sequence: Synthetic oligonucleotide
guuuguguugaccucauca

SEQ ID NO: 2192580 - RNA, 19 nt, Artificial Sequence
  Description of Artificial Sequence: Synthetic oligonucleotide
guacucaaauucuuauagg

SEQ ID NO: 2192581 - RNA, 19 nt, Artificial Sequence
  Description of Artificial Sequence: Synthetic oligonucleotide
aauugguggauaucacgcu

SEQ ID NO: 2192582 - RNA, 19 nt, Artificial Sequence
  Description of Artificial Sequence: Synthetic oligonucleotide
cuuauacagggucagagca

SEQ ID NO: 2192583 - RNA, 19 nt, Artificial Sequence
  Description of Artificial Sequence: Synthetic oligonucleotide
ucuacuguggccgugugcu

SEQ ID NO: 2192584 - RNA, 19 nt, Artificial Sequence
  Description of Artificial Sequence: Synthetic oligonucleotide
augcaugggaucuccggcc

SEQ ID NO: 2192585 - RNA, 19 nt, Artificial Sequence
  Description of Artificial Sequence: Synthetic oligonucleotide
acaacauugguaccaucag

SEQ ID NO: 2192586 - RNA, 19 nt, Artificial Sequence
  Description of Artificial Sequence: Synthetic oligonucleotide
auagguuccccagagaugu

SEQ ID NO: 2192587 - RNA, 19 nt, Artificial Sequence
  Description of Artificial Sequence: Synthetic oligonucleotide
ugcuuauacagggucagag

SEQ ID NO: 2192588 - RNA, 19 nt, Artificial Sequence
  Description of Artificial Sequence: Synthetic oligonucleotide
gauaucacgcuuguccuag

SEQ ID NO: 2192589 - RNA, 19 nt, Artificial Sequence
  Description of Artificial Sequence: Synthetic oligonucleotide
augagaaaccucuccauga

SEQ ID NO: 2192590 - RNA, 19 nt, Artificial Sequence
  Description of Artificial Sequence: Synthetic oligonucleotide
aagagccagccuuggaguc

SEQ ID NO: 2192591 - RNA, 19 nt, Artificial Sequence
  Description of Artificial Sequence: Synthetic oligonucleotide
aucaaauaccaugaugcag

SEQ ID NO: 2192592 - RNA, 19 nt, Artificial Sequence
  Description of Artificial Sequence: Synthetic oligonucleotide
uuuguguugaccucaucau

SEQ ID NO: 2192593 - RNA, 19 nt, Artificial Sequence
  Description of Artificial Sequence: Synthetic oligonucleotide
aauucuuauaggugauuuu

SEQ ID NO: 2192594 - RNA, 19 nt, Artificial Sequence
  Description of Artificial Sequence: Synthetic oligonucleotide
uaucccagaaguccacaag

SEQ ID NO: 2192595 - RNA, 19 nt, Artificial Sequence
  Description of Artificial Sequence: Synthetic oligonucleotide
ggaauugguggauaucacg

SEQ ID NO: 2192596 - RNA, 19 nt, Artificial Sequence
  Description of Artificial Sequence: Synthetic oligonucleotide
uggagucuuaucacugucc

SEQ ID NO: 2192597 - RNA, 19 nt, Artificial Sequence
  Description of Artificial Sequence: Synthetic oligonucleotide
acauggaucccucauccug

SEQ ID NO: 2192598 - RNA, 19 nt, Artificial Sequence
  Description of Artificial Sequence: Synthetic oligonucleotide
uugaccucaucauggacca

SEQ ID NO: 2192599 - RNA, 19 nt, Artificial Sequence
  Description of Artificial Sequence: Synthetic oligonucleotide
auugguaccaucagcagcu

SEQ ID NO: 2192600 - RNA, 19 nt, Artificial Sequence
  Description of Artificial Sequence: Synthetic oligonucleotide
uuguguugaccucaucaug

SEQ ID NO: 2192601 - RNA, 19 nt, Artificial Sequence
  Description of Artificial Sequence: Synthetic oligonucleotide
auugcaucguugaagagcu

SEQ ID NO: 2192602 - RNA, 19 nt, Artificial Sequence
  Description of Artificial Sequence: Synthetic oligonucleotide
aaaccucuccaugaguuug

SEQ ID NO: 2192603 - RNA, 19 nt, Artificial Sequence
  Description of Artificial Sequence: Synthetic oligonucleotide
ucaaauucuuauaggugau

SEQ ID NO: 2192604 - RNA, 19 nt, Artificial Sequence
  Description of Artificial Sequence: Synthetic oligonucleotide
uuuggacuugcccaccgca

SEQ ID NO: 2192605 - RNA, 19 nt, Artificial Sequence
  Description of Artificial Sequence: Synthetic oligonucleotide
uaucacuguccgcuaacag

SEQ ID NO: 2192606 - RNA, 19 nt, Artificial Sequence
  Description of Artificial Sequence: Synthetic oligonucleotide
cuuauaggugauuuuccuc

SEQ ID NO: 2192607 - RNA, 19 nt, Artificial Sequence
  Description of Artificial Sequence: Synthetic oligonucleotide
ugugcuuauacagggucag

SEQ ID NO: 2192608 - RNA, 19 nt, Artificial Sequence
  Description of Artificial Sequence: Synthetic oligonucleotide
uggauaucacgcuuguccu

SEQ ID NO: 2192609 - RNA, 19 nt, Artificial Sequence
  Description of Artificial Sequence: Synthetic oligonucleotide
ugucgugagcaucauauuu

SEQ ID NO: 2192610 - RNA, 19 nt, Artificial Sequence
  Description of Artificial Sequence: Synthetic oligonucleotide
aacuuuccuuguaagccac

SEQ ID NO: 2192611 - RNA, 19 nt, Artificial Sequence
  Description of Artificial Sequence: Synthetic oligonucleotide
caacucagccacauguggg

SEQ ID NO: 2192612 - RNA, 19 nt, Artificial Sequence
  Description of Artificial Sequence: Synthetic oligonucleotide
cauggaucccucauccugc

SEQ ID NO: 2192613 - RNA, 19 nt, Artificial Sequence
  Description of Artificial Sequence: Synthetic oligonucleotide
uugguggauaucacgcuug

SEQ ID NO: 2192614 - RNA, 19 nt, Artificial Sequence
  Description of Artificial Sequence: Synthetic oligonucleotide
ucauggaccacagaacacu

SEQ ID NO: 2192615 - RNA, 19 nt, Artificial Sequence
  Description of Artificial Sequence: Synthetic oligonucleotide
ugaguuuggacuugcccac

SEQ ID NO: 2192616 - RNA, 19 nt, Artificial Sequence
  Description of Artificial Sequence: Synthetic oligonucleotide
uauuccaaauggcucccca

SEQ ID NO: 2192617 - RNA, 19 nt, Artificial Sequence
  Description of Artificial Sequence: Synthetic oligonucleotide
agagcuucacaacauuggu

SEQ ID NO: 2192618 - RNA, 19 nt, Artificial Sequence
  Description of Artificial Sequence: Synthetic oligonucleotide
cagcuaaucgaauugcauc

SEQ ID NO: 2192619 - RNA, 19 nt, Artificial Sequence
  Description of Artificial Sequence: Synthetic oligonucleotide
uguccuaguguguuugugu

SEQ ID NO: 2192620 - RNA, 19 nt, Artificial Sequence
  Description of Artificial Sequence: Synthetic oligonucleotide
cuguaaaaccucauccaug

SEQ ID NO: 2192621 - RNA, 19 nt, Artificial Sequence
  Description of Artificial Sequence: Synthetic oligonucleotide
uuaagagggagacgggcuc

SEQ ID NO: 2192622 - RNA, 19 nt, Artificial Sequence
  Description of Artificial Sequence: Synthetic oligonucleotide
cacaacauugguaccauca

SEQ ID NO: 2192623 - RNA, 19 nt, Artificial Sequence
  Description of Artificial Sequence: Synthetic oligonucleotide
ugggaacuuuccuuguaag

SEQ ID NO: 2192624 - RNA, 19 nt, Artificial Sequence
  Description of Artificial Sequence: Synthetic oligonucleotide
uauguggacagcugcugug

SEQ ID NO: 2192625 - RNA, 19 nt, Artificial Sequence
  Description of Artificial Sequence: Synthetic oligonucleotide
aguucuuuugagucaucug

SEQ ID NO: 2192626 - RNA, 19 nt, Artificial Sequence
  Description of Artificial Sequence: Synthetic oligonucleotide
cuuuugagucaucuguaug

SEQ ID NO: 2192627 - RNA, 19 nt, Artificial Sequence
  Description of Artificial Sequence: Synthetic oligonucleotide
caugagaaaccucuccaug

SEQ ID NO: 2192628 - RNA, 19 nt, Artificial Sequence
  Description of Artificial Sequence: Synthetic oligonucleotide
aguuuggacuugcccaccg

SEQ ID NO: 2192629 - RNA, 19 nt, Artificial Sequence
  Description of Artificial Sequence: Synthetic oligonucleotide
agccuuggagucuuaucac

SEQ ID NO: 2192630 - RNA, 19 nt, Artificial Sequence
  Description of Artificial Sequence: Synthetic oligonucleotide
uccacaaggauggucuugc

SEQ ID NO: 2192631 - RNA, 19 nt, Artificial Sequence
  Description of Artificial Sequence: Synthetic oligonucleotide
ugaaagacauggaucccuc

SEQ ID NO: 2192632 - RNA, 19 nt, Artificial Sequence
  Description of Artificial Sequence: Synthetic oligonucleotide
uaccagguacucaaauucu

SEQ ID NO: 2192633 - RNA, 19 nt, Artificial Sequence
  Description of Artificial Sequence: Synthetic oligonucleotide
caacauugguaccaucagc

SEQ ID NO: 2192634 - RNA, 19 nt, Artificial Sequence
  Description of Artificial Sequence: Synthetic oligonucleotide
cacaaggauggucuugccg

SEQ ID NO: 2192635 - RNA, 19 nt, Artificial Sequence
  Description of Artificial Sequence: Synthetic oligonucleotide
guccaguucacaaugcuug

SEQ ID NO: 2192636 - RNA, 19 nt, Artificial Sequence
  Description of Artificial Sequence: Synthetic oligonucleotide
cuguggcugaaauccaucc

SEQ ID NO: 2192637 - RNA, 19 nt, Artificial Sequence
  Description of Artificial Sequence: Synthetic oligonucleotide
uuuccuuguaagccacagc

SEQ ID NO: 2192638 - RNA, 19 nt, Artificial Sequence
  Description of Artificial Sequence: Synthetic oligonucleotide
cugagacaaaguacagggg

SEQ ID NO: 2192639 - RNA, 19 nt, Artificial Sequence
  Description of Artificial Sequence: Synthetic oligonucleotide
uauaggugauuuuccucug

SEQ ID NO: 2192640 - RNA, 19 nt, Artificial Sequence
  Description of Artificial Sequence: Synthetic oligonucleotide
aaauaccaugaugcaggcg

SEQ ID NO: 2192641 - RNA, 19 nt, Artificial Sequence
  Description of Artificial Sequence: Synthetic oligonucleotide
uuuuauuggccaccaggau

SEQ ID NO: 2192642 - RNA, 19 nt, Artificial Sequence
  Description of Artificial Sequence: Synthetic oligonucleotide
ucuuuugagucaucuguau

SEQ ID NO: 2192643 - RNA, 19 nt, Artificial Sequence
  Description of Artificial Sequence: Synthetic oligonucleotide
auuucuccugguccaguuc

SEQ ID NO: 2192644 - RNA, 19 nt, Artificial Sequence
  Description of Artificial Sequence: Synthetic oligonucleotide
uccaugaaguccugggaac

SEQ ID NO: 2192645 - RNA, 19 nt, Artificial Sequence
  Description of Artificial Sequence: Synthetic oligonucleotide
acucaaauucuuauaggug

SEQ ID NO: 2192646 - RNA, 19 nt, Artificial Sequence
  Description of Artificial Sequence: Synthetic oligonucleotide
ucgugagcaucauauuucu

SEQ ID NO: 2192647 - RNA, 19 nt, Artificial Sequence
  Description of Artificial Sequence: Synthetic oligonucleotide
acagaacacugguuuguag

SEQ ID NO: 2192648 - RNA, 19 nt, Artificial Sequence
  Description of Artificial Sequence: Synthetic oligonucleotide
accgcacuccgguagcagc

SEQ ID NO: 2192649 - RNA, 19 nt, Artificial Sequence
  Description of Artificial Sequence: Synthetic oligonucleotide
ggguauuccaaauggcucc

SEQ ID NO: 2192650 - RNA, 19 nt, Artificial Sequence
  Description of Artificial Sequence: Synthetic oligonucleotide
ggugauuuuccucuggaca

SEQ ID NO: 2192651 - RNA, 19 nt, Artificial Sequence
  Description of Artificial Sequence: Synthetic oligonucleotide
uuauacagggucagagcau

SEQ ID NO: 2192652 - RNA, 19 nt, Artificial Sequence
  Description of Artificial Sequence: Synthetic oligonucleotide
cuugauuaagagggagacg

SEQ ID NO: 2192653 - RNA, 19 nt, Artificial Sequence
  Description of Artificial Sequence: Synthetic oligonucleotide
auguuggguauuccaaaug

SEQ ID NO: 2192654 - RNA, 19 nt, Artificial Sequence
  Description of Artificial Sequence: Synthetic oligonucleotide
uaucacgcuuguccuagug

SEQ ID NO: 2192655 - RNA, 19 nt, Artificial Sequence
  Description of Artificial Sequence: Synthetic oligonucleotide
agcugagacaaaguacagg

SEQ ID NO: 2192656 - RNA, 19 nt, Artificial Sequence
  Description of Artificial Sequence: Synthetic oligonucleotide
agggagaacuucuuggcaa

SEQ ID NO: 2192657 - RNA, 19 nt, Artificial Sequence
  Description of Artificial Sequence: Synthetic oligonucleotide
auccaugaaguccugggaa

SEQ ID NO: 2192658 - RNA, 19 nt, Artificial Sequence
  Description of Artificial Sequence: Synthetic oligonucleotide
ugaacucccguaguucugc

SEQ ID NO: 2192659 - RNA, 19 nt, Artificial Sequence
  Description of Artificial Sequence: Synthetic oligonucleotide
uuguaagccacagcuaauc

SEQ ID NO: 2192660 - RNA, 19 nt, Artificial Sequence
  Description of Artificial Sequence: Synthetic oligonucleotide
caggcagaugaucuucacg

SEQ ID NO: 2192661 - RNA, 19 nt, Artificial Sequence
  Description of Artificial Sequence: Synthetic oligonucleotide
gaauugcaucguugaagag

SEQ ID NO: 2192662 - RNA, 19 nt, Artificial Sequence
  Description of Artificial Sequence: Synthetic oligonucleotide
cugguuuguaggaaguuga

SEQ ID NO: 2192663 - RNA, 19 nt, Artificial Sequence
  Description of Artificial Sequence: Synthetic oligonucleotide
uuccaaauggcuccccaau

SEQ ID NO: 2192664 - RNA, 19 nt, Artificial Sequence
  Description of Artificial Sequence: Synthetic oligonucleotide
gagucaucuguaugucugc

SEQ ID NO: 2192665 - RNA, 19 nt, Artificial Sequence
  Description of Artificial Sequence: Synthetic oligonucleotide
uuggagucuuaucacuguc

SEQ ID NO: 2192666 - RNA, 19 nt, Artificial Sequence
  Description of Artificial Sequence: Synthetic oligonucleotide
ucuuaucacuguccgcuaa

SEQ ID NO: 2192667 - RNA, 19 nt, Artificial Sequence
  Description of Artificial Sequence: Synthetic oligonucleotide
uccgcuaacaggcgaccgc

SEQ ID NO: 2192668 - RNA, 19 nt, Artificial Sequence
  Description of Artificial Sequence: Synthetic oligonucleotide
gauagguuccccagagaug

SEQ ID NO: 2192669 - RNA, 19 nt, Artificial Sequence
  Description of Artificial Sequence: Synthetic oligonucleotide
agacaaaguacaggggcag

SEQ ID NO: 2192670 - RNA, 19 nt, Artificial Sequence
  Description of Artificial Sequence: Synthetic oligonucleotide
guaagccacagcuaaucga

SEQ ID NO: 2192671 - RNA, 19 nt, Artificial Sequence
  Description of Artificial Sequence: Synthetic oligonucleotide
uuugagucaucuguauguc

SEQ ID NO: 2192672 - RNA, 19 nt, Artificial Sequence
  Description of Artificial Sequence: Synthetic oligonucleotide
uugagucaucuguaugucu

SEQ ID NO: 2192673 - RNA, 19 nt, Artificial Sequence
  Description of Artificial Sequence: Synthetic oligonucleotide
aacaggcgaccgcacuccg

SEQ ID NO: 2192674 - RNA, 19 nt, Artificial Sequence
  Description of Artificial Sequence: Synthetic oligonucleotide
cuuaucacuguccgcuaac

SEQ ID NO: 2192675 - RNA, 19 nt, Artificial Sequence
  Description of Artificial Sequence: Synthetic oligonucleotide
aucguugaagagcuucaca

SEQ ID NO: 2192676 - RNA, 19 nt, Artificial Sequence
  Description of Artificial Sequence: Synthetic oligonucleotide
ugcaucguugaagagcuuc

SEQ ID NO: 2192677 - RNA, 19 nt, Artificial Sequence
  Description of Artificial Sequence: Synthetic oligonucleotide
gcaggcgugagccuugugg

SEQ ID NO: 2192678 - RNA, 19 nt, Artificial Sequence
  Description of Artificial Sequence: Synthetic oligonucleotide
caugcaugcucuggaaccg

SEQ ID NO: 2192679 - RNA, 19 nt, Artificial Sequence
  Description of Artificial Sequence: Synthetic oligonucleotide
uggugcauccuccucuuuc

SEQ ID NO: 2192680 - RNA, 19 nt, Artificial Sequence
  Description of Artificial Sequence: Synthetic oligonucleotide
uuaucacuguccgcuaaca

SEQ ID NO: 2192681 - RNA, 19 nt, Artificial Sequence
  Description of Artificial Sequence: Synthetic oligonucleotide
ccagaaguccacaaggaug

SEQ ID NO: 2192682 - RNA, 19 nt, Artificial Sequence
  Description of Artificial Sequence: Synthetic oligonucleotide
auuaagagggagacgggcu

SEQ ID NO: 2192683 - RNA, 19 nt, Artificial Sequence
  Description of Artificial Sequence: Synthetic oligonucleotide
auugguggauaucacgcuu

SEQ ID NO: 2192684 - RNA, 19 nt, Artificial Sequence
  Description of Artificial Sequence: Synthetic oligonucleotide
guaguaggaggcaugcaug

SEQ ID NO: 2192685 - RNA, 19 nt, Artificial Sequence
  Description of Artificial Sequence: Synthetic oligonucleotide
ggaucccucauccugcugc

SEQ ID NO: 2192686 - RNA, 19 nt, Artificial Sequence
  Description of Artificial Sequence: Synthetic oligonucleotide
cagccuuggagucuuauca

SEQ ID NO: 2192687 - RNA, 19 nt, Artificial Sequence
  Description of Artificial Sequence: Synthetic oligonucleotide
aaccucuccaugaguuugg

SEQ ID NO: 2192688 - RNA, 19 nt, Artificial Sequence
  Description of Artificial Sequence: Synthetic oligonucleotide
ugugaaagacauggauccc

SEQ ID NO: 2192689 - RNA, 19 nt, Artificial Sequence
  Description of Artificial Sequence: Synthetic oligonucleotide
gcaugcaugcucuggaacc

SEQ ID NO: 2192690 - RNA, 19 nt, Artificial Sequence
  Description of Artificial Sequence: Synthetic oligonucleotide
cauggaccacagaacacug

SEQ ID NO: 2192691 - RNA, 19 nt, Artificial Sequence
  Description of Artificial Sequence: Synthetic oligonucleotide
gcagggguagccuggauag

SEQ ID NO: 2192692 - RNA, 19 nt, Artificial Sequence
  Description of Artificial Sequence: Synthetic oligonucleotide
aucauggaccacagaacac

SEQ ID NO: 2192693 - RNA, 19 nt, Artificial Sequence
  Description of Artificial Sequence: Synthetic oligonucleotide
agcucguggccacagagaa

SEQ ID NO: 2192694 - RNA, 19 nt, Artificial Sequence
  Description of Artificial Sequence: Synthetic oligonucleotide
caggaauugguggauauca

SEQ ID NO: 2192695 - RNA, 19 nt, Artificial Sequence
  Description of Artificial Sequence: Synthetic oligonucleotide
guuggguauuccaaauggc

SEQ ID NO: 2192696 - RNA, 19 nt, Artificial Sequence
  Description of Artificial Sequence: Synthetic oligonucleotide
uguggacagcugcuguggc

SEQ ID NO: 2192697 - RNA, 19 nt, Artificial Sequence
  Description of Artificial Sequence: Synthetic oligonucleotide
uccaaauggcuccccaaua

SEQ ID NO: 2192698 - RNA, 19 nt, Artificial Sequence
  Description of Artificial Sequence: Synthetic oligonucleotide
gagacaaaguacaggggca

SEQ ID NO: 2192699 - RNA, 19 nt, Artificial Sequence
  Description of Artificial Sequence: Synthetic oligonucleotide
cguaguucugcauaccagg

SEQ ID NO: 2192700 - RNA, 19 nt, Artificial Sequence
  Description of Artificial Sequence: Synthetic oligonucleotide
gguaccaucagcagcugag

SEQ ID NO: 2192701 - RNA, 19 nt, Artificial Sequence
  Description of Artificial Sequence: Synthetic oligonucleotide
guaggaggcaugcaugcuc

SEQ ID NO: 2192702 - RNA, 19 nt, Artificial Sequence
  Description of Artificial Sequence: Synthetic oligonucleotide
uuggacuugcccaccgcac

SEQ ID NO: 2192703 - RNA, 19 nt, Artificial Sequence
  Description of Artificial Sequence: Synthetic oligonucleotide
aucacgcuuguccuagugu

SEQ ID NO: 2192704 - RNA, 19 nt, Artificial Sequence
  Description of Artificial Sequence: Synthetic oligonucleotide
gccgugugcuuauacaggg

SEQ ID NO: 2192705 - RNA, 19 nt, Artificial Sequence
  Description of Artificial Sequence: Synthetic oligonucleotide
auguggacagcugcugugg

SEQ ID NO: 2192706 - RNA, 19 nt, Artificial Sequence
  Description of Artificial Sequence: Synthetic oligonucleotide
ggaugcaugggaucuccgg

SEQ ID NO: 2192707 - RNA, 19 nt, Artificial Sequence
  Description of Artificial Sequence: Synthetic oligonucleotide
ggucuugccgucuacugug

SEQ ID NO: 2192708 - RNA, 19 nt, Artificial Sequence
  Description of Artificial Sequence: Synthetic oligonucleotide
ucugcauaccagguacuca

SEQ ID NO: 2192709 - RNA, 19 nt, Artificial Sequence
  Description of Artificial Sequence: Synthetic oligonucleotide
guugagcagggguagccug

SEQ ID NO: 2192710 - RNA, 19 nt, Artificial Sequence
  Description of Artificial Sequence: Synthetic oligonucleotide
agaaaccucuccaugaguu

SEQ ID NO: 2192711 - RNA, 19 nt, Artificial Sequence
  Description of Artificial Sequence: Synthetic oligonucleotide
caucaaauaccaugaugca

SEQ ID NO: 2192712 - RNA, 19 nt, Artificial Sequence
  Description of Artificial Sequence: Synthetic oligonucleotide
aggaauugguggauaucac

SEQ ID NO: 2192713 - RNA, 19 nt, Artificial Sequence
  Description of Artificial Sequence: Synthetic oligonucleotide
uuggccgcgucccugccgc

SEQ ID NO: 2192714 - RNA, 19 nt, Artificial Sequence
  Description of Artificial Sequence: Synthetic oligonucleotide
gagucuuaucacuguccgc

SEQ ID NO: 2192715 - RNA, 19 nt, Artificial Sequence
  Description of Artificial Sequence: Synthetic oligonucleotide
aguccugggaacuuuccuu

SEQ ID NO: 2192716 - RNA, 19 nt, Artificial Sequence
  Description of Artificial Sequence: Synthetic oligonucleotide
ugcaggaauugguggauau

SEQ ID NO: 2192717 - RNA, 19 nt, Artificial Sequence
  Description of Artificial Sequence: Synthetic oligonucleotide
cucguggccacagagaaga

SEQ ID NO: 2192718 - RNA, 19 nt, Artificial Sequence
  Description of Artificial Sequence: Synthetic oligonucleotide
gggaacuuuccuuguaagc

SEQ ID NO: 2192719 - RNA, 19 nt, Artificial Sequence
  Description of Artificial Sequence: Synthetic oligonucleotide
cucuugauuaagagggaga

SEQ ID NO: 2192720 - RNA, 19 nt, Artificial Sequence
  Description of Artificial Sequence: Synthetic oligonucleotide
uaacaggcgaccgcacucc

SEQ ID NO: 2192721 - RNA, 19 nt, Artificial Sequence
  Description of Artificial Sequence: Synthetic oligonucleotide
ggagacgggcucuugauca

SEQ ID NO: 2192722 - RNA, 19 nt, Artificial Sequence
  Description of Artificial Sequence: Synthetic oligonucleotide
uguggguauccucuugauu

SEQ ID NO: 2192723 - RNA, 19 nt, Artificial Sequence
  Description of Artificial Sequence: Synthetic oligonucleotide
gagaacuucuuggcaaaac

SEQ ID NO: 2192724 - RNA, 19 nt, Artificial Sequence
  Description of Artificial Sequence: Synthetic oligonucleotide
agagaagagccagccuugg

SEQ ID NO: 2192725 - RNA, 19 nt, Artificial Sequence
  Description of Artificial Sequence: Synthetic oligonucleotide
gucgugagcaucauauuuc

SEQ ID NO: 2192726 - RNA, 19 nt, Artificial Sequence
  Description of Artificial Sequence: Synthetic oligonucleotide
gaggcaugcaugcucugga

SEQ ID NO: 2192727 - RNA, 19 nt, Artificial Sequence
  Description of Artificial Sequence: Synthetic oligonucleotide
guugucgugagcaucauau

SEQ ID NO: 2192728 - RNA, 19 nt, Artificial Sequence
  Description of Artificial Sequence: Synthetic oligonucleotide
ugguggauaucacgcuugu

SEQ ID NO: 2192729 - RNA, 19 nt, Artificial Sequence
  Description of Artificial Sequence: Synthetic oligonucleotide
uccaugaguuuggacuugc

SEQ ID NO: 2192730 - RNA, 19 nt, Artificial Sequence
  Description of Artificial Sequence: Synthetic oligonucleotide
uacagggucagagcauaug

SEQ ID NO: 2192731 - RNA, 19 nt, Artificial Sequence
  Description of Artificial Sequence: Synthetic oligonucleotide
agguacucaaauucuuaua

SEQ ID NO: 2192732 - RNA, 19 nt, Artificial Sequence
  Description of Artificial Sequence: Synthetic oligonucleotide
cuccccaauaccccaacuc

SEQ ID NO: 2192733 - RNA, 19 nt, Artificial Sequence
  Description of Artificial Sequence: Synthetic oligonucleotide
gcagcugagacaaaguaca

SEQ ID NO: 2192734 - RNA, 19 nt, Artificial Sequence
  Description of Artificial Sequence: Synthetic oligonucleotide
cugcauaccagguacucaa

SEQ ID NO: 2192735 - RNA, 19 nt, Artificial Sequence
  Description of Artificial Sequence: Synthetic oligonucleotide
gaagagccagccuuggagu

SEQ ID NO: 2192736 - RNA, 19 nt, Artificial Sequence
  Description of Artificial Sequence: Synthetic oligonucleotide
uguaucccagaaguccaca

SEQ ID NO: 2192737 - RNA, 19 nt, Artificial Sequence
  Description of Artificial Sequence: Synthetic oligonucleotide
acuccgguagcagcuuggc

SEQ ID NO: 2192738 - RNA, 19 nt, Artificial Sequence
  Description of Artificial Sequence: Synthetic oligonucleotide
gauguuggguauuccaaau

SEQ ID NO: 2192739 - RNA, 19 nt, Artificial Sequence
  Description of Artificial Sequence: Synthetic oligonucleotide
gccacagcuaaucgaauug

SEQ ID NO: 2192740 - RNA, 19 nt, Artificial Sequence
  Description of Artificial Sequence: Synthetic oligonucleotide
uggauagguuccccagaga

SEQ ID NO: 2192741 - RNA, 19 nt, Artificial Sequence
  Description of Artificial Sequence: Synthetic oligonucleotide
acgggcucuugaucaugcc

SEQ ID NO: 2192742 - RNA, 19 nt, Artificial Sequence
  Description of Artificial Sequence: Synthetic oligonucleotide
cacguugucgugagcauca

SEQ ID NO: 2192743 - RNA, 19 nt, Artificial Sequence
  Description of Artificial Sequence: Synthetic oligonucleotide
ucuugccgucuacuguggc

SEQ ID NO: 2192744 - RNA, 19 nt, Artificial Sequence
  Description of Artificial Sequence: Synthetic oligonucleotide
cugguccaguucacaaugc

SEQ ID NO: 2192745 - RNA, 19 nt, Artificial Sequence
  Description of Artificial Sequence: Synthetic oligonucleotide
acuguccgcuaacaggcga

SEQ ID NO: 2192746 - RNA, 19 nt, Artificial Sequence
  Description of Artificial Sequence: Synthetic oligonucleotide
gugguaguaggaggcaugc

SEQ ID NO: 2192747 - RNA, 19 nt, Artificial Sequence
  Description of Artificial Sequence: Synthetic oligonucleotide
uccuuguaagccacagcua

SEQ ID NO: 2192748 - RNA, 19 nt, Artificial Sequence
  Description of Artificial Sequence: Synthetic oligonucleotide
cuuggucuggugcauccuc

SEQ ID NO: 2192749 - RNA, 19 nt, Artificial Sequence
  Description of Artificial Sequence: Synthetic oligonucleotide
gaccacagaacacugguuu

SEQ ID NO: 2192750 - RNA, 19 nt, Artificial Sequence
  Description of Artificial Sequence: Synthetic oligonucleotide
gaaguccacaaggaugguc

SEQ ID NO: 2192751 - RNA, 19 nt, Artificial Sequence
  Description of Artificial Sequence: Synthetic oligonucleotide
ggaaguugagcagggguag

SEQ ID NO: 2192752 - RNA, 19 nt, Artificial Sequence
  Description of Artificial Sequence: Synthetic oligonucleotide
gguuuguaggaaguugagc

SEQ ID NO: 2192753 - RNA, 19 nt, Artificial Sequence
  Description of Artificial Sequence: Synthetic oligonucleotide
cucccguaguucugcauac

SEQ ID NO: 2192754 - RNA, 19 nt, Artificial Sequence
  Description of Artificial Sequence: Synthetic oligonucleotide
ugguaccaucagcagcuga

SEQ ID NO: 2192755 - RNA, 19 nt, Artificial Sequence
  Description of Artificial Sequence: Synthetic oligonucleotide
gacgggcucuugaucaugc

SEQ ID NO: 2192756 - RNA, 19 nt, Artificial Sequence
  Description of Artificial Sequence: Synthetic oligonucleotide
ugccaugagcucguggcca

SEQ ID NO: 2192757 - RNA, 19 nt, Artificial Sequence
  Description of Artificial Sequence: Synthetic oligonucleotide
augcaugcucuggaaccgc

SEQ ID NO: 2192758 - RNA, 19 nt, Artificial Sequence
  Description of Artificial Sequence: Synthetic oligonucleotide
uucugcauaccagguacuc

SEQ ID NO: 2192759 - RNA, 19 nt, Artificial Sequence
  Description of Artificial Sequence: Synthetic oligonucleotide
cagcugagacaaaguacag

SEQ ID NO: 2192760 - RNA, 19 nt, Artificial Sequence
  Description of Artificial Sequence: Synthetic oligonucleotide
cacagcuaaucgaauugca

SEQ ID NO: 2192761 - RNA, 19 nt, Artificial Sequence
  Description of Artificial Sequence: Synthetic oligonucleotide
cacuccgguagcagcuugg

SEQ ID NO: 2192762 - RNA, 19 nt, Artificial Sequence
  Description of Artificial Sequence: Synthetic oligonucleotide
cucuggaaccgcuccuggc

SEQ ID NO: 2192763 - RNA, 19 nt, Artificial Sequence
  Description of Artificial Sequence: Synthetic oligonucleotide
ggucagagcauauguggac

SEQ ID NO: 2192764 - RNA, 19 nt, Artificial Sequence
  Description of Artificial Sequence: Synthetic oligonucleotide
auggcuccccaauacccca

SEQ ID NO: 2192765 - RNA, 19 nt, Artificial Sequence
  Description of Artificial Sequence: Synthetic oligonucleotide
agccacagcuaaucgaauu

SEQ ID NO: 2192766 - RNA, 19 nt, Artificial Sequence
  Description of Artificial Sequence: Synthetic oligonucleotide
cuguccgcuaacaggcgac

SEQ ID NO: 2192767 - RNA, 19 nt, Artificial Sequence
  Description of Artificial Sequence: Synthetic oligonucleotide
uucacguugucgugagcau

SEQ ID NO: 2192768 - RNA, 19 nt, Artificial Sequence
  Description of Artificial Sequence: Synthetic oligonucleotide
guccccugccaugagcucg

SEQ ID NO: 2192769 - RNA, 19 nt, Artificial Sequence
  Description of Artificial Sequence: Synthetic oligonucleotide
ccaauaccccaacucagcc

SEQ ID NO: 2192770 - RNA, 19 nt, Artificial Sequence
  Description of Artificial Sequence: Synthetic oligonucleotide
acagcuaaucgaauugcau

SEQ ID NO: 2192771 - RNA, 19 nt, Artificial Sequence
  Description of Artificial Sequence: Synthetic oligonucleotide
aucuccggccugaacuccc

SEQ ID NO: 2192772 - RNA, 19 nt, Artificial Sequence
  Description of Artificial Sequence: Synthetic oligonucleotide
cauccaugagaaaccucuc

SEQ ID NO: 2192773 - RNA, 19 nt, Artificial Sequence
  Description of Artificial Sequence: Synthetic oligonucleotide
aacucccguaguucugcau

SEQ ID NO: 2192774 - RNA, 19 nt, Artificial Sequence
  Description of Artificial Sequence: Synthetic oligonucleotide
caauaccccaacucagcca

SEQ ID NO: 2192775 - RNA, 19 nt, Artificial Sequence
  Description of Artificial Sequence: Synthetic oligonucleotide
aaggauggucuugccgucu

SEQ ID NO: 2192776 - RNA, 19 nt, Artificial Sequence
  Description of Artificial Sequence: Synthetic oligonucleotide
ucuggacaucaaauaccau

SEQ ID NO: 2192777 - RNA, 19 nt, Artificial Sequence
  Description of Artificial Sequence: Synthetic oligonucleotide
ucuucacguugucgugagc

SEQ ID NO: 2192778 - RNA, 19 nt, Artificial Sequence
  Description of Artificial Sequence: Synthetic oligonucleotide
guuuggacuugcccaccgc

SEQ ID NO: 2192779 - RNA, 19 nt, Artificial Sequence
  Description of Artificial Sequence: Synthetic oligonucleotide
cugaacucccguaguucug

SEQ ID NO: 2192780 - RNA, 19 nt, Artificial Sequence
  Description of Artificial Sequence: Synthetic oligonucleotide
gaucccucauccugcugca

SEQ ID NO: 2192781 - RNA, 19 nt, Artificial Sequence
  Description of Artificial Sequence: Synthetic oligonucleotide
aggaaguugagcaggggua

SEQ ID NO: 2192782 - RNA, 19 nt, Artificial Sequence
  Description of Artificial Sequence: Synthetic oligonucleotide
gagggagacgggcucuuga

SEQ ID NO: 2192783 - RNA, 19 nt, Artificial Sequence
  Description of Artificial Sequence: Synthetic oligonucleotide
cacuguccgcuaacaggcg

SEQ ID NO: 2192784 - RNA, 19 nt, Artificial Sequence
  Description of Artificial Sequence: Synthetic oligonucleotide
caaggauggucuugccguc

SEQ ID NO: 2192785 - RNA, 19 nt, Artificial Sequence
  Description of Artificial Sequence: Synthetic oligonucleotide
gguuccccagagauguugg

SEQ ID NO: 2192786 - RNA, 19 nt, Artificial Sequence
  Description of Artificial Sequence: Synthetic oligonucleotide
ucacguugucgugagcauc

SEQ ID NO: 2192787 - RNA, 19 nt, Artificial Sequence
  Description of Artificial Sequence: Synthetic oligonucleotide
uguccgcuaacaggcgacc

SEQ ID NO: 2192788 - RNA, 19 nt, Artificial Sequence
  Description of Artificial Sequence: Synthetic oligonucleotide
cgaauugcaucguugaaga

SEQ ID NO: 2192789 - RNA, 19 nt, Artificial Sequence
  Description of Artificial Sequence: Synthetic oligonucleotide
gucuacuguggccgugugc

SEQ ID NO: 2192790 - RNA, 19 nt, Artificial Sequence
  Description of Artificial Sequence: Synthetic oligonucleotide
ucacaacauugguaccauc

SEQ ID NO: 2192791 - RNA, 19 nt, Artificial Sequence
  Description of Artificial Sequence: Synthetic oligonucleotide
gaucuccggccugaacucc

SEQ ID NO: 2192792 - RNA, 19 nt, Artificial Sequence
  Description of Artificial Sequence: Synthetic oligonucleotide
guggccgugugcuuauaca

SEQ ID NO: 2192793 - RNA, 19 nt, Artificial Sequence
  Description of Artificial Sequence: Synthetic oligonucleotide
ggauagguuccccagagau

SEQ ID NO: 2192794 - RNA, 19 nt, Artificial Sequence
  Description of Artificial Sequence: Synthetic oligonucleotide
gguaguaggaggcaugcau

SEQ ID NO: 2192795 - RNA, 19 nt, Artificial Sequence
  Description of Artificial Sequence: Synthetic oligonucleotide
gguauuccaaauggcuccc

SEQ ID NO: 2192796 - RNA, 19 nt, Artificial Sequence
  Description of Artificial Sequence: Synthetic oligonucleotide
caucguugaagagcuucac

SEQ ID NO: 2192797 - RNA, 19 nt, Artificial Sequence
  Description of Artificial Sequence: Synthetic oligonucleotide
cagagcauauguggacagc

SEQ ID NO: 2192798 - RNA, 19 nt, Artificial Sequence
  Description of Artificial Sequence: Synthetic oligonucleotide
caugagcucguggccacag

SEQ ID NO: 2192799 - RNA, 19 nt, Artificial Sequence
  Description of Artificial Sequence: Synthetic oligonucleotide
uugucgugagcaucauauu

SEQ ID NO: 2192800 - RNA, 19 nt, Artificial Sequence
  Description of Artificial Sequence: Synthetic oligonucleotide
auguggguauccucuugau

SEQ ID NO: 2192801 - RNA, 19 nt, Artificial Sequence
  Description of Artificial Sequence: Synthetic oligonucleotide
gagaagagccagccuugga

SEQ ID NO: 2192802 - RNA, 19 nt, Artificial Sequence
  Description of Artificial Sequence: Synthetic oligonucleotide
cuaguguguuuguguugac

SEQ ID NO: 2192803 - RNA, 19 nt, Artificial Sequence
  Description of Artificial Sequence: Synthetic oligonucleotide
gaguuuggacuugcccacc

SEQ ID NO: 2192804 - RNA, 19 nt, Artificial Sequence
  Description of Artificial Sequence: Synthetic oligonucleotide
cagagauguuggguauucc

SEQ ID NO: 2192805 - RNA, 19 nt, Artificial Sequence
  Description of Artificial Sequence: Synthetic oligonucleotide
uccccugccaugagcucgu

SEQ ID NO: 2192806 - RNA, 19 nt, Artificial Sequence
  Description of Artificial Sequence: Synthetic oligonucleotide
gguagccuggauagguucc

SEQ ID NO: 2192807 - RNA, 19 nt, Artificial Sequence
  Description of Artificial Sequence: Synthetic oligonucleotide
ccuuguaagccacagcuaa

SEQ ID NO: 2192808 - RNA, 19 nt, Artificial Sequence
  Description of Artificial Sequence: Synthetic oligonucleotide
ccauccaugagaaaccucu

SEQ ID NO: 2192809 - RNA, 19 nt, Artificial Sequence
  Description of Artificial Sequence: Synthetic oligonucleotide
cuuggccgcgucccugccg

SEQ ID NO: 2192810 - RNA, 19 nt, Artificial Sequence
  Description of Artificial Sequence: Synthetic oligonucleotide
uggcaaaacugaaguucuu

SEQ ID NO: 2192811 - RNA, 19 nt, Artificial Sequence
  Description of Artificial Sequence: Synthetic oligonucleotide
gugugcuuauacaggguca

SEQ ID NO: 2192812 - RNA, 19 nt, Artificial Sequence
  Description of Artificial Sequence: Synthetic oligonucleotide
cagggagaacuucuuggca

SEQ ID NO: 2192813 - RNA, 19 nt, Artificial Sequence
  Description of Artificial Sequence: Synthetic oligonucleotide
uacuguggccgugugcuua

SEQ ID NO: 2192814 - RNA, 19 nt, Artificial Sequence
  Description of Artificial Sequence: Synthetic oligonucleotide
gcuuguccuaguguguuug

SEQ ID NO: 2192815 - RNA, 19 nt, Artificial Sequence
  Description of Artificial Sequence: Synthetic oligonucleotide
cuccgguagcagcuuggcc

SEQ ID NO: 2192816 - RNA, 19 nt, Artificial Sequence
  Description of Artificial Sequence: Synthetic oligonucleotide
auaccaugaugcaggcgug

SEQ ID NO: 2192817 - RNA, 19 nt, Artificial Sequence
  Description of Artificial Sequence: Synthetic oligonucleotide
cuuggagucuuaucacugu

SEQ ID NO: 2192818 - RNA, 19 nt, Artificial Sequence
  Description of Artificial Sequence: Synthetic oligonucleotide
acuguggccgugugcuuau

SEQ ID NO: 2192819 - RNA, 19 nt, Artificial Sequence
  Description of Artificial Sequence: Synthetic oligonucleotide
auaucacgcuuguccuagu

SEQ ID NO: 2192820 - RNA, 19 nt, Artificial Sequence
  Description of Artificial Sequence: Synthetic oligonucleotide
cauaccagguacucaaauu

SEQ ID NO: 2192821 - RNA, 19 nt, Artificial Sequence
  Description of Artificial Sequence: Synthetic oligonucleotide
ggcgaccgcacuccgguag

SEQ ID NO: 2192822 - RNA, 19 nt, Artificial Sequence
  Description of Artificial Sequence: Synthetic oligonucleotide
guccgcuaacaggcgaccg

SEQ ID NO: 2192823 - RNA, 19 nt, Artificial Sequence
  Description of Artificial Sequence: Synthetic oligonucleotide
ugggaucuccggccugaac

SEQ ID NO: 2192824 - RNA, 19 nt, Artificial Sequence
  Description of Artificial Sequence: Synthetic oligonucleotide
ccccaauaccccaacucag

SEQ ID NO: 2192825 - RNA, 19 nt, Artificial Sequence
  Description of Artificial Sequence: Synthetic oligonucleotide
ccguaguucugcauaccag

SEQ ID NO: 2192826 - RNA, 19 nt, Artificial Sequence
  Description of Artificial Sequence: Synthetic oligonucleotide
cuuuguccccugccaugag

SEQ ID NO: 2192827 - RNA, 19 nt, Artificial Sequence
  Description of Artificial Sequence: Synthetic oligonucleotide
gaacucccguaguucugca

SEQ ID NO: 2192828 - RNA, 19 nt, Artificial Sequence
  Description of Artificial Sequence: Synthetic oligonucleotide
gugagccuugugguaguag

SEQ ID NO: 2192829 - RNA, 19 nt, Artificial Sequence
  Description of Artificial Sequence: Synthetic oligonucleotide
ggaucuccggccugaacuc

SEQ ID NO: 2192830 - RNA, 19 nt, Artificial Sequence
  Description of Artificial Sequence: Synthetic oligonucleotide
guucacaaugcuuggcuuu

SEQ ID NO: 2192831 - RNA, 19 nt, Artificial Sequence
  Description of Artificial Sequence: Synthetic oligonucleotide
ucccguaguucugcauacc

SEQ ID NO: 2192832 - RNA, 19 nt, Artificial Sequence
  Description of Artificial Sequence: Synthetic oligonucleotide
cagguacucaaauucuuau

SEQ ID NO: 2192833 - RNA, 19 nt, Artificial Sequence
  Description of Artificial Sequence: Synthetic oligonucleotide
ugguaguaggaggcaugca

SEQ ID NO: 2192834 - RNA, 19 nt, Artificial Sequence
  Description of Artificial Sequence: Synthetic oligonucleotide
guauuccaaauggcucccc

SEQ ID NO: 2192835 - RNA, 19 nt, Artificial Sequence
  Description of Artificial Sequence: Synthetic oligonucleotide
guccacaaggauggucuug

SEQ ID NO: 2192836 - RNA, 19 nt, Artificial Sequence
  Description of Artificial Sequence: Synthetic oligonucleotide
ggacuugcccaccgcacug

SEQ ID NO: 2192837 - RNA, 19 nt, Artificial Sequence
  Description of Artificial Sequence: Synthetic oligonucleotide
ccuaguguguuuguguuga

SEQ ID NO: 2192838 - RNA, 19 nt, Artificial Sequence
  Description of Artificial Sequence: Synthetic oligonucleotide
guaguucugcauaccaggu

SEQ ID NO: 2192839 - RNA, 19 nt, Artificial Sequence
  Description of Artificial Sequence: Synthetic oligonucleotide
gaccgcacuccgguagcag

SEQ ID NO: 2192840 - RNA, 19 nt, Artificial Sequence
  Description of Artificial Sequence: Synthetic oligonucleotide
gacauggaucccucauccu

SEQ ID NO: 2192841 - RNA, 19 nt, Artificial Sequence
  Description of Artificial Sequence: Synthetic oligonucleotide
agacgggcucuugaucaug

SEQ ID NO: 2192842 - RNA, 19 nt, Artificial Sequence
  Description of Artificial Sequence: Synthetic oligonucleotide
uccggccugaacucccgua

SEQ ID NO: 2192843 - RNA, 19 nt, Artificial Sequence
  Description of Artificial Sequence: Synthetic oligonucleotide
augagcucguggccacaga

SEQ ID NO: 2192844 - RNA, 19 nt, Artificial Sequence
  Description of Artificial Sequence: Synthetic oligonucleotide
gagcucguggccacagaga

SEQ ID NO: 2192845 - RNA, 19 nt, Artificial Sequence
  Description of Artificial Sequence: Synthetic oligonucleotide
acaggcgaccgcacuccgg

SEQ ID NO: 2192846 - RNA, 19 nt, Artificial Sequence
  Description of Artificial Sequence: Synthetic oligonucleotide
caggcgugagccuuguggu

SEQ ID NO: 2192847 - RNA, 19 nt, Artificial Sequence
  Description of Artificial Sequence: Synthetic oligonucleotide
guagcagcuuggccgcguc

SEQ ID NO: 2192848 - RNA, 19 nt, Artificial Sequence
  Description of Artificial Sequence: Synthetic oligonucleotide
guccuaguguguuuguguu

SEQ ID NO: 2192849 - RNA, 19 nt, Artificial Sequence
  Description of Artificial Sequence: Synthetic oligonucleotide
aagagggagacgggcucuu

SEQ ID NO: 2192850 - RNA, 19 nt, Artificial Sequence
  Description of Artificial Sequence: Synthetic oligonucleotide
ccaugaugcaggcgugagc

SEQ ID NO: 2192851 - RNA, 19 nt, Artificial Sequence
  Description of Artificial Sequence: Synthetic oligonucleotide
caugggaucuccggccuga

SEQ ID NO: 2192852 - RNA, 19 nt, Artificial Sequence
  Description of Artificial Sequence: Synthetic oligonucleotide
acgcuuguccuaguguguu

SEQ ID NO: 2192853 - RNA, 19 nt, Artificial Sequence
  Description of Artificial Sequence: Synthetic oligonucleotide
cuuguaagccacagcuaau

SEQ ID NO: 2192854 - RNA, 19 nt, Artificial Sequence
  Description of Artificial Sequence: Synthetic oligonucleotide
ccggccugaacucccguag

SEQ ID NO: 2192855 - RNA, 19 nt, Artificial Sequence
  Description of Artificial Sequence: Synthetic oligonucleotide
cuaaucgaauugcaucguu

SEQ ID NO: 2192856 - RNA, 19 nt, Artificial Sequence
  Description of Artificial Sequence: Synthetic oligonucleotide
gcaucguugaagagcuuca

SEQ ID NO: 2192857 - RNA, 19 nt, Artificial Sequence
  Description of Artificial Sequence: Synthetic oligonucleotide
cuccaacuugaaguucuca

SEQ ID NO: 2192858 - RNA, 19 nt, Artificial Sequence
  Description of Artificial Sequence: Synthetic oligonucleotide
ccugccgcugcuacgcgac

SEQ ID NO: 2192859 - RNA, 19 nt, Artificial Sequence
  Description of Artificial Sequence: Synthetic oligonucleotide
ugccgucuacuguggccgu

SEQ ID NO: 2192860 - RNA, 19 nt, Artificial Sequence
  Description of Artificial Sequence: Synthetic oligonucleotide
gggagacgggcucuugauc

SEQ ID NO: 2192861 - RNA, 19 nt, Artificial Sequence
  Description of Artificial Sequence: Synthetic oligonucleotide
ccagagauguuggguauuc

SEQ ID NO: 2192862 - RNA, 19 nt, Artificial Sequence
  Description of Artificial Sequence: Synthetic oligonucleotide
ggauaucacgcuuguccua

SEQ ID NO: 2192863 - RNA, 19 nt, Artificial Sequence
  Description of Artificial Sequence: Synthetic oligonucleotide
cccguaguucugcauacca

SEQ ID NO: 2192864 - RNA, 19 nt, Artificial Sequence
  Description of Artificial Sequence: Synthetic oligonucleotide
ccagguacucaaauucuua

SEQ ID NO: 2192865 - RNA, 19 nt, Artificial Sequence
  Description of Artificial Sequence: Synthetic oligonucleotide
ccacauguggguauccucu

SEQ ID NO: 2192866 - RNA, 19 nt, Artificial Sequence
  Description of Artificial Sequence: Synthetic oligonucleotide
aucaugccacucugcucuu

SEQ ID NO: 2192867 - RNA, 19 nt, Artificial Sequence
  Description of Artificial Sequence: Synthetic oligonucleotide
cuuguccuaguguguuugu

SEQ ID NO: 2192868 - RNA, 19 nt, Artificial Sequence
  Description of Artificial Sequence: Synthetic oligonucleotide
ggauggucuugccgucuac

SEQ ID NO: 2192869 - RNA, 19 nt, Artificial Sequence
  Description of Artificial Sequence: Synthetic oligonucleotide
cacagaacacugguuugua

SEQ ID NO: 2192870 - RNA, 19 nt, Artificial Sequence
  Description of Artificial Sequence: Synthetic oligonucleotide
ccugaacucccguaguucu

SEQ ID NO: 2192871 - RNA, 19 nt, Artificial Sequence
  Description of Artificial Sequence: Synthetic oligonucleotide
auacagggucagagcauau

SEQ ID NO: 2192872 - RNA, 19 nt, Artificial Sequence
  Description of Artificial Sequence: Synthetic oligonucleotide
ccuguaaaaccucauccau

SEQ ID NO: 2192873 - RNA, 19 nt, Artificial Sequence
  Description of Artificial Sequence: Synthetic oligonucleotide
gcaggaauugguggauauc

SEQ ID NO: 2192874 - RNA, 19 nt, Artificial Sequence
  Description of Artificial Sequence: Synthetic oligonucleotide
gugcuuauacagggucaga

SEQ ID NO: 2192875 - RNA, 19 nt, Artificial Sequence
  Description of Artificial Sequence: Synthetic oligonucleotide
gccuuggagucuuaucacu

SEQ ID NO: 2192876 - RNA, 19 nt, Artificial Sequence
  Description of Artificial Sequence: Synthetic oligonucleotide
cacgcuuguccuagugugu

SEQ ID NO: 2192877 - RNA, 19 nt, Artificial Sequence
  Description of Artificial Sequence: Synthetic oligonucleotide
gccugaacucccguaguuc

SEQ ID NO: 2192878 - RNA, 19 nt, Artificial Sequence
  Description of Artificial Sequence: Synthetic oligonucleotide
cucauccugcugcaggaau

SEQ ID NO: 2192879 - RNA, 19 nt, Artificial Sequence
  Description of Artificial Sequence: Synthetic oligonucleotide
gagacgggcucuugaucau

SEQ ID NO: 2192880 - RNA, 19 nt, Artificial Sequence
  Description of Artificial Sequence: Synthetic oligonucleotide
gcauaccagguacucaaau

SEQ ID NO: 2192881 - RNA, 19 nt, Artificial Sequence
  Description of Artificial Sequence: Synthetic oligonucleotide
uugcaucguugaagagcuu

SEQ ID NO: 2192882 - RNA, 19 nt, Artificial Sequence
  Description of Artificial Sequence: Synthetic oligonucleotide
gcuaacaggcgaccgcacu

SEQ ID NO: 2192883 - RNA, 19 nt, Artificial Sequence
  Description of Artificial Sequence: Synthetic oligonucleotide
gcgaccgcacuccgguagc

SEQ ID NO: 2192884 - RNA, 19 nt, Artificial Sequence
  Description of Artificial Sequence: Synthetic oligonucleotide
ggcaaaacugaaguucuuu

SEQ ID NO: 2192885 - RNA, 19 nt, Artificial Sequence
  Description of Artificial Sequence: Synthetic oligonucleotide
caaauucuuauaggugauu

SEQ ID NO: 2192886 - RNA, 19 nt, Artificial Sequence
  Description of Artificial Sequence: Synthetic oligonucleotide
gcauauguggacagcugcu

SEQ ID NO: 2192887 - RNA, 19 nt, Artificial Sequence
  Description of Artificial Sequence: Synthetic oligonucleotide
gcaugggaucuccggccug

SEQ ID NO: 2192888 - RNA, 19 nt, Artificial Sequence
  Description of Artificial Sequence: Synthetic oligonucleotide
ggcuccccaauaccccaac

SEQ ID NO: 2192889 - RNA, 19 nt, Artificial Sequence
  Description of Artificial Sequence: Synthetic oligonucleotide
gguggauaucacgcuuguc

SEQ ID NO: 2192890 - RNA, 19 nt, Artificial Sequence
  Description of Artificial Sequence: Synthetic oligonucleotide
augcaggcgugagccuugu

SEQ ID NO: 2192891 - RNA, 19 nt, Artificial Sequence
  Description of Artificial Sequence: Synthetic oligonucleotide
gcuaaucgaauugcaucgu

SEQ ID NO: 2192892 - RNA, 19 nt, Artificial Sequence
  Description of Artificial Sequence: Synthetic oligonucleotide
gcgucccugccgcugcuac

SEQ ID NO: 2192893 - RNA, 19 nt, Artificial Sequence
  Description of Artificial Sequence: Synthetic oligonucleotide
cacauguggguauccucuu

SEQ ID NO: 2192894 - RNA, 19 nt, Artificial Sequence
  Description of Artificial Sequence: Synthetic oligonucleotide
acguugucgugagcaucau

SEQ ID NO: 2192895 - RNA, 19 nt, Artificial Sequence
  Description of Artificial Sequence: Synthetic oligonucleotide
guacaggggcagggagaac

SEQ ID NO: 2192896 - RNA, 19 nt, Artificial Sequence
  Description of Artificial Sequence: Synthetic oligonucleotide
gguccaguucacaaugcuu

SEQ ID NO: 2192897 - RNA, 19 nt, Artificial Sequence
  Description of Artificial Sequence: Synthetic oligonucleotide
augggaucuccggccugaa

SEQ ID NO: 2192898 - RNA, 19 nt, Artificial Sequence
  Description of Artificial Sequence: Synthetic oligonucleotide
guguuuguguugaccucau

SEQ ID NO: 2192899 - RNA, 19 nt, Artificial Sequence
  Description of Artificial Sequence: Synthetic oligonucleotide
ggccugcuguaucccagaa

SEQ ID NO: 2192900 - RNA, 19 nt, Artificial Sequence
  Description of Artificial Sequence: Synthetic oligonucleotide
aggcgaccgcacuccggua

SEQ ID NO: 2192901 - RNA, 19 nt, Artificial Sequence
  Description of Artificial Sequence: Synthetic oligonucleotide
gcuuggccgcgucccugcc

SEQ ID NO: 2192902 - RNA, 19 nt, Artificial Sequence
  Description of Artificial Sequence: Synthetic oligonucleotide
ccgcuaacaggcgaccgca

SEQ ID NO: 2192903 - RNA, 19 nt, Artificial Sequence
  Description of Artificial Sequence: Synthetic oligonucleotide
gagccagccuuggagucuu

SEQ ID NO: 2192904 - RNA, 19 nt, Artificial Sequence
  Description of Artificial Sequence: Synthetic oligonucleotide
caucagcagcugagacaaa

SEQ ID NO: 2192905 - RNA, 19 nt, Artificial Sequence
  Description of Artificial Sequence: Synthetic oligonucleotide
cacugguuuguaggaaguu

SEQ ID NO: 2192906 - RNA, 19 nt, Artificial Sequence
  Description of Artificial Sequence: Synthetic oligonucleotide
ggccugaacucccguaguu

SEQ ID NO: 2192907 - RNA, 19 nt, Artificial Sequence
  Description of Artificial Sequence: Synthetic oligonucleotide
cgcuaacaggcgaccgcac

SEQ ID NO: 2192908 - RNA, 19 nt, Artificial Sequence
  Description of Artificial Sequence: Synthetic oligonucleotide
gccgucuacuguggccgug

SEQ ID NO: 2192909 - RNA, 19 nt, Artificial Sequence
  Description of Artificial Sequence: Synthetic oligonucleotide
gcuccccaauaccccaacu

SEQ ID NO: 2192910 - RNA, 19 nt, Artificial Sequence
  Description of Artificial Sequence: Synthetic oligonucleotide
ccaccaggaugcaugggau

SEQ ID NO: 2192911 - RNA, 19 nt, Artificial Sequence
  Description of Artificial Sequence: Synthetic oligonucleotide
cgucuacuguggccgugug

SEQ ID NO: 2192912 - RNA, 19 nt, Artificial Sequence
  Description of Artificial Sequence: Synthetic oligonucleotide
gguagcagcuuggccgcgu

SEQ ID NO: 2192913 - RNA, 19 nt, Artificial Sequence
  Description of Artificial Sequence: Synthetic oligonucleotide
ggccgcgucccugccgcug

SEQ ID NO: 2192914 - RNA, 19 nt, Artificial Sequence
  Description of Artificial Sequence: Synthetic oligonucleotide
cuacuguggccgugugcuu

SEQ ID NO: 2192915 - RNA, 19 nt, Artificial Sequence
  Description of Artificial Sequence: Synthetic oligonucleotide
ggaccacagaacacugguu

SEQ ID NO: 2192916 - RNA, 19 nt, Artificial Sequence
  Description of Artificial Sequence: Synthetic oligonucleotide
ccgcacuccgguagcagcu

SEQ ID NO: 2192917 - RNA, 19 nt, Artificial Sequence
  Description of Artificial Sequence: Synthetic oligonucleotide
cccugccgcugcuacgcga

SEQ ID NO: 2192918 - RNA, 19 nt, Artificial Sequence
  Description of Artificial Sequence: Synthetic oligonucleotide
ccgugugcuuauacagggu

SEQ ID NO: 2192919 - RNA, 19 nt, Artificial Sequence
  Description of Artificial Sequence: Synthetic oligonucleotide
cuccggccugaacucccgu

SEQ ID NO: 2192920 - RNA, 19 nt, Artificial Sequence
  Description of Artificial Sequence: Synthetic oligonucleotide
gggguagccuggauagguu

SEQ ID NO: 2192921 - RNA, 19 nt, Artificial Sequence
  Description of Artificial Sequence: Synthetic oligonucleotide
cguugucgugagcaucaua

SEQ ID NO: 2192922 - RNA, 19 nt, Artificial Sequence
  Description of Artificial Sequence: Synthetic oligonucleotide
ccaugagcucguggccaca

SEQ ID NO: 2192923 - RNA, 19 nt, Artificial Sequence
  Description of Artificial Sequence: Synthetic oligonucleotide
gccagccuuggagucuuau

SEQ ID NO: 2192924 - RNA, 19 nt, Artificial Sequence
  Description of Artificial Sequence: Synthetic oligonucleotide
cgguagcagcuuggccgcg

SEQ ID NO: 2192925 - RNA, 19 nt, Artificial Sequence
  Description of Artificial Sequence: Synthetic oligonucleotide
cuguggccgugugcuuaua

SEQ ID NO: 2192926 - RNA, 19 nt, Artificial Sequence
  Description of Artificial Sequence: Synthetic oligonucleotide
ccgucuacuguggccgugu

SEQ ID NO: 2192927 - RNA, 19 nt, Artificial Sequence
  Description of Artificial Sequence: Synthetic oligonucleotide
cgaccgcacuccgguagca

SEQ ID NO: 2192928 - RNA, 19 nt, Artificial Sequence
  Description of Artificial Sequence: Synthetic oligonucleotide
cgcuuguccuaguguguuu

SEQ ID NO: 2192929 - RNA, 19 nt, Artificial Sequence
  Description of Artificial Sequence: Synthetic oligonucleotide
cgcacuccgguagcagcuu

SEQ ID NO: 2192930 - RNA, 19 nt, Artificial Sequence
  Description of Artificial Sequence: Synthetic oligonucleotide
uggaauauuaaacagaagc

SEQ ID NO: 2192931 - RNA, 19 nt, Artificial Sequence
  Description of Artificial Sequence: Synthetic oligonucleotide
aauaucucgguucagacug

SEQ ID NO: 2192932 - RNA, 19 nt, Artificial Sequence
  Description of Artificial Sequence: Synthetic oligonucleotide
ugaaauaugaauagaaaga

SEQ ID NO: 2192933 - RNA, 19 nt, Artificial Sequence
  Description of Artificial Sequence: Synthetic oligonucleotide
aauaugaauagaaagauga

SEQ ID NO: 2192934 - RNA, 19 nt, Artificial Sequence
  Description of Artificial Sequence: Synthetic oligonucleotide
uugaaauaugaauagaaag

SEQ ID NO: 2192935 - RNA, 19 nt, Artificial Sequence
  Description of Artificial Sequence: Synthetic oligonucleotide
uaaauggaauauuaaacag

SEQ ID NO: 2192936 - RNA, 19 nt, Artificial Sequence
  Description of Artificial Sequence: Synthetic oligonucleotide
ucucgguucagacugaagg

SEQ ID NO: 2192937 - RNA, 19 nt, Artificial Sequence
  Description of Artificial Sequence: Synthetic oligonucleotide
uucuguaucaucaaaggac

SEQ ID NO: 2192938 - RNA, 19 nt, Artificial Sequence
  Description of Artificial Sequence: Synthetic oligonucleotide
aaagaugauagacauuuga

SEQ ID NO: 2192939 - RNA, 19 nt, Artificial Sequence
  Description of Artificial Sequence: Synthetic oligonucleotide
ucacccauuacgaugaugc

SEQ ID NO: 2192940 - RNA, 19 nt, Artificial Sequence
  Description of Artificial Sequence: Synthetic oligonucleotide
augauagacauuugaaaac

SEQ ID NO: 2192941 - RNA, 19 nt, Artificial Sequence
  Description of Artificial Sequence: Synthetic oligonucleotide
ugagucaucguccucaccc

SEQ ID NO: 2192942 - RNA, 19 nt, Artificial Sequence
  Description of Artificial Sequence: Synthetic oligonucleotide
aauauuaaacagaagcucu

SEQ ID NO: 2192943 - RNA, 19 nt, Artificial Sequence
  Description of Artificial Sequence: Synthetic oligonucleotide
acagucucaucucagaggg

SEQ ID NO: 2192944 - RNA, 19 nt, Artificial Sequence
  Description of Artificial Sequence: Synthetic oligonucleotide
uaauucuccuguaauaucu

SEQ ID NO: 2192945 - RNA, 19 nt, Artificial Sequence
  Description of Artificial Sequence: Synthetic oligonucleotide
uauacaagaucuuuguggu

SEQ ID NO: 2192946 - RNA, 19 nt, Artificial Sequence
  Description of Artificial Sequence: Synthetic oligonucleotide
ugacauugccuguaaaugg

SEQ ID NO: 2192947 - RNA, 19 nt, Artificial Sequence
  Description of Artificial Sequence: Synthetic oligonucleotide
gaugauagacauuugaaaa

SEQ ID NO: 2192948 - RNA, 19 nt, Artificial Sequence
  Description of Artificial Sequence: Synthetic oligonucleotide
auagaaagaugauagacau

SEQ ID NO: 2192949 - RNA, 19 nt, Artificial Sequence
  Description of Artificial Sequence: Synthetic oligonucleotide
aaaugaagugugucugugg

SEQ ID NO: 2192950 - RNA, 19 nt, Artificial Sequence
  Description of Artificial Sequence: Synthetic oligonucleotide
cuuucuguaucaucaaagg

SEQ ID NO: 2192951 - RNA, 19 nt, Artificial Sequence
  Description of Artificial Sequence: Synthetic oligonucleotide
uguagcauacucuaauucu

SEQ ID NO: 2192952 - RNA, 19 nt, Artificial Sequence
  Description of Artificial Sequence: Synthetic oligonucleotide
ugugguaucugcuccaaag

SEQ ID NO: 2192953 - RNA, 19 nt, Artificial Sequence
  Description of Artificial Sequence: Synthetic oligonucleotide
aaauguuauucuugacuuc

SEQ ID NO: 2192954 - RNA, 19 nt, Artificial Sequence
  Description of Artificial Sequence: Synthetic oligonucleotide
uguggaauguucuuguaca

SEQ ID NO: 2192955 - RNA, 19 nt, Artificial Sequence
  Description of Artificial Sequence: Synthetic oligonucleotide
aaaugcugagcaaugacag

SEQ ID NO: 2192956 - RNA, 19 nt, Artificial Sequence
  Description of Artificial Sequence: Synthetic oligonucleotide
aaaaccugccacaagcaac

SEQ ID NO: 2192957 - RNA, 19 nt, Artificial Sequence
  Description of Artificial Sequence: Synthetic oligonucleotide
gacauguguuucuaguugg

SEQ ID NO: 2192958 - RNA, 19 nt, Artificial Sequence
  Description of Artificial Sequence: Synthetic oligonucleotide
ugauagacauuugaaaacc

SEQ ID NO: 2192959 - RNA, 19 nt, Artificial Sequence
  Description of Artificial Sequence: Synthetic oligonucleotide
cuuguaugugacaugacac

SEQ ID NO: 2192960 - RNA, 19 nt, Artificial Sequence
  Description of Artificial Sequence: Synthetic oligonucleotide
agaaagaugauagacauuu

SEQ ID NO: 2192961 - RNA, 19 nt, Artificial Sequence
  Description of Artificial Sequence: Synthetic oligonucleotide
aagcaaauguuauucuuga

SEQ ID NO: 2192962 - RNA, 19 nt, Artificial Sequence
  Description of Artificial Sequence: Synthetic oligonucleotide
gaauauuaaacagaagcuc

SEQ ID NO: 2192963 - RNA, 19 nt, Artificial Sequence
  Description of Artificial Sequence: Synthetic oligonucleotide
aaauggaauauuaaacaga

SEQ ID NO: 2192964 - RNA, 19 nt, Artificial Sequence
  Description of Artificial Sequence: Synthetic oligonucleotide
uuccugauggcuaacacaa

SEQ ID NO: 2192965 - RNA, 19 nt, Artificial Sequence
  Description of Artificial Sequence: Synthetic oligonucleotide
ugagcaaugacagggagga

SEQ ID NO: 2192966 - RNA, 19 nt, Artificial Sequence
  Description of Artificial Sequence: Synthetic oligonucleotide
uuucuguaucaucaaagga

SEQ ID NO: 2192967 - RNA, 19 nt, Artificial Sequence
  Description of Artificial Sequence: Synthetic oligonucleotide
aaugcugagcaaugacagg

SEQ ID NO: 2192968 - RNA, 19 nt, Artificial Sequence
  Description of Artificial Sequence: Synthetic oligonucleotide
ucauuuaccaggagacucc

SEQ ID NO: 2192969 - RNA, 19 nt, Artificial Sequence
  Description of Artificial Sequence: Synthetic oligonucleotide
ucucaggccaauauacaag

SEQ ID NO: 2192970 - RNA, 19 nt, Artificial Sequence
  Description of Artificial Sequence: Synthetic oligonucleotide
ugacaugacaccagcuggg

SEQ ID NO: 2192971 - RNA, 19 nt, Artificial Sequence
  Description of Artificial Sequence: Synthetic oligonucleotide
uguuauucuugacuuccag

SEQ ID NO: 2192972 - RNA, 19 nt, Artificial Sequence
  Description of Artificial Sequence: Synthetic oligonucleotide
acuuguaugugacaugaca

SEQ ID NO: 2192973 - RNA, 19 nt, Artificial Sequence
  Description of Artificial Sequence: Synthetic oligonucleotide
agcaacaagacacuuggga

SEQ ID NO: 2192974 - RNA, 19 nt, Artificial Sequence
  Description of Artificial Sequence: Synthetic oligonucleotide
uuguaugugacaugacacc

SEQ ID NO: 2192975 - RNA, 19 nt, Artificial Sequence
  Description of Artificial Sequence: Synthetic oligonucleotide
ucguaauugcagaugguca

SEQ ID NO: 2192976 - RNA, 19 nt, Artificial Sequence
  Description of Artificial Sequence: Synthetic oligonucleotide
agaugauagacauuugaaa

SEQ ID NO: 2192977 - RNA, 19 nt, Artificial Sequence
  Description of Artificial Sequence: Synthetic oligonucleotide
uacgaugaugccuuugagc

SEQ ID NO: 2192978 - RNA, 19 nt, Artificial Sequence
  Description of Artificial Sequence: Synthetic oligonucleotide
auuacgaugaugccuuuga

SEQ ID NO: 2192979 - RNA, 19 nt, Artificial Sequence
  Description of Artificial Sequence: Synthetic oligonucleotide
gauagacauuugaaaaccg

SEQ ID NO: 2192980 - RNA, 19 nt, Artificial Sequence
  Description of Artificial Sequence: Synthetic oligonucleotide
ucuugcuagagccuccuca

SEQ ID NO: 2192981 - RNA, 19 nt, Artificial Sequence
  Description of Artificial Sequence: Synthetic oligonucleotide
gagaacaacugcuccuugg

SEQ ID NO: 2192982 - RNA, 19 nt, Artificial Sequence
  Description of Artificial Sequence: Synthetic oligonucleotide
auuaaacagaagcucuuca

SEQ ID NO: 2192983 - RNA, 19 nt, Artificial Sequence
  Description of Artificial Sequence: Synthetic oligonucleotide
ugguuguacaucuucacuc

SEQ ID NO: 2192984 - RNA, 19 nt, Artificial Sequence
  Description of Artificial Sequence: Synthetic oligonucleotide
uguaauaucucgguucaga

SEQ ID NO: 2192985 - RNA, 19 nt, Artificial Sequence
  Description of Artificial Sequence: Synthetic oligonucleotide
ugccuuagagaacaacugc

SEQ ID NO: 2192986 - RNA, 19 nt, Artificial Sequence
  Description of Artificial Sequence: Synthetic oligonucleotide
ucuaauucuccuguaauau

SEQ ID NO: 2192987 - RNA, 19 nt, Artificial Sequence
  Description of Artificial Sequence: Synthetic oligonucleotide
uccucucaggccaauauac

SEQ ID NO: 2192988 - RNA, 19 nt, Artificial Sequence
  Description of Artificial Sequence: Synthetic oligonucleotide
agccuaagcccauuucugc

SEQ ID NO: 2192989 - RNA, 19 nt, Artificial Sequence
  Description of Artificial Sequence: Synthetic oligonucleotide
uccuguaauaucucgguuc

SEQ ID NO: 2192990 - RNA, 19 nt, Artificial Sequence
  Description of Artificial Sequence: Synthetic oligonucleotide
uguuucuaguuggagaucu

SEQ ID NO: 2192991 - RNA, 19 nt, Artificial Sequence
  Description of Artificial Sequence: Synthetic oligonucleotide
uugaaaaccgggaaauuuu

SEQ ID NO: 2192992 - RNA, 19 nt, Artificial Sequence
  Description of Artificial Sequence: Synthetic oligonucleotide
uuguagcauacucuaauuc

SEQ ID NO: 2192993 - RNA, 19 nt, Artificial Sequence
  Description of Artificial Sequence: Synthetic oligonucleotide
accaagacagagccuggcc

SEQ ID NO: 2192994 - RNA, 19 nt, Artificial Sequence
  Description of Artificial Sequence: Synthetic oligonucleotide
gcuucguaauugcagaugg

SEQ ID NO: 2192995 - RNA, 19 nt, Artificial Sequence
  Description of Artificial Sequence: Synthetic oligonucleotide
uaguuggagaucuuccuga

SEQ ID NO: 2192996 - RNA, 19 nt, Artificial Sequence
  Description of Artificial Sequence: Synthetic oligonucleotide
aggccaauauacaagaucu

SEQ ID NO: 2192997 - RNA, 19 nt, Artificial Sequence
  Description of Artificial Sequence: Synthetic oligonucleotide
guaauaucucgguucagac

SEQ ID NO: 2192998 - RNA, 19 nt, Artificial Sequence
  Description of Artificial Sequence: Synthetic oligonucleotide
aagaugauagacauuugaa

SEQ ID NO: 2192999 - RNA, 19 nt, Artificial Sequence
  Description of Artificial Sequence: Synthetic oligonucleotide
ugaagugugucuguggggu

SEQ ID NO: 2193000 - RNA, 19 nt, Artificial Sequence
  Description of Artificial Sequence: Synthetic oligonucleotide
uuugaaaaccgggaaauuu

SEQ ID NO: 2193001 - RNA, 19 nt, Artificial Sequence
  Description of Artificial Sequence: Synthetic oligonucleotide
uaauaucucgguucagacu

SEQ ID NO: 2193002 - RNA, 19 nt, Artificial Sequence
  Description of Artificial Sequence: Synthetic oligonucleotide
cuugcuagagccuccucag

SEQ ID NO: 2193003 - RNA, 19 nt, Artificial Sequence
  Description of Artificial Sequence: Synthetic oligonucleotide
cagcccuuaagaaaugaag

SEQ ID NO: 2193004 - RNA, 19 nt, Artificial Sequence
  Description of Artificial Sequence: Synthetic oligonucleotide
ugggcagcccuuaagaaau

SEQ ID NO: 2193005 - RNA, 19 nt, Artificial Sequence
  Description of Artificial Sequence: Synthetic oligonucleotide
aauucuccuguaauaucuc

SEQ ID NO: 2193006 - RNA, 19 nt, Artificial Sequence
  Description of Artificial Sequence: Synthetic oligonucleotide
aaccaagacagagccuggc

SEQ ID NO: 2193007 - RNA, 19 nt, Artificial Sequence
  Description of Artificial Sequence: Synthetic oligonucleotide
ucacagugcaucugaagga

SEQ ID NO: 2193008 - RNA, 19 nt, Artificial Sequence
  Description of Artificial Sequence: Synthetic oligonucleotide
aaaccugccacaagcaaca

SEQ ID NO: 2193009 - RNA, 19 nt, Artificial Sequence
  Description of Artificial Sequence: Synthetic oligonucleotide
uuacgaugaugccuuugag

SEQ ID NO: 2193010 - RNA, 19 nt, Artificial Sequence
  Description of Artificial Sequence: Synthetic oligonucleotide
uuguacaucuucacucaca

SEQ ID NO: 2193011 - RNA, 19 nt, Artificial Sequence
  Description of Artificial Sequence: Synthetic oligonucleotide
gacauuugaaaaccgggaa

SEQ ID NO: 2193012 - RNA, 19 nt, Artificial Sequence
  Description of Artificial Sequence: Synthetic oligonucleotide
uucguaauugcagaugguc

SEQ ID NO: 2193013 - RNA, 19 nt, Artificial Sequence
  Description of Artificial Sequence: Synthetic oligonucleotide
gaaaugaagugugucugug

SEQ ID NO: 2193014 - RNA, 19 nt, Artificial Sequence
  Description of Artificial Sequence: Synthetic oligonucleotide
acauuugaaaaccgggaaa

SEQ ID NO: 2193015 - RNA, 19 nt, Artificial Sequence
  Description of Artificial Sequence: Synthetic oligonucleotide
aucaaaggacaucugugga

SEQ ID NO: 2193016 - RNA, 19 nt, Artificial Sequence
  Description of Artificial Sequence: Synthetic oligonucleotide
guacagucucaucucagag

SEQ ID NO: 2193017 - RNA, 19 nt, Artificial Sequence
  Description of Artificial Sequence: Synthetic oligonucleotide
ucguccucacccauuacga

SEQ ID NO: 2193018 - RNA, 19 nt, Artificial Sequence
  Description of Artificial Sequence: Synthetic oligonucleotide
uuuguagcauacucuaauu

SEQ ID NO: 2193019 - RNA, 19 nt, Artificial Sequence
  Description of Artificial Sequence: Synthetic oligonucleotide
cuguggggugaccugaugg

SEQ ID NO: 2193020 - RNA, 19 nt, Artificial Sequence
  Description of Artificial Sequence: Synthetic oligonucleotide
uacucuaauucuccuguaa

SEQ ID NO: 2193021 - RNA, 19 nt, Artificial Sequence
  Description of Artificial Sequence: Synthetic oligonucleotide
augaagugugucugugggg

SEQ ID NO: 2193022 - RNA, 19 nt, Artificial Sequence
  Description of Artificial Sequence: Synthetic oligonucleotide
agaggggugugagucaucg

SEQ ID NO: 2193023 - RNA, 19 nt, Artificial Sequence
  Description of Artificial Sequence: Synthetic oligonucleotide
gaugccacccagccuaagc

SEQ ID NO: 2193024 - RNA, 19 nt, Artificial Sequence
  Description of Artificial Sequence: Synthetic oligonucleotide
ggaauguucuuguacaguc

SEQ ID NO: 2193025 - RNA, 19 nt, Artificial Sequence
  Description of Artificial Sequence: Synthetic oligonucleotide
ggcacccugacacaaaugc

SEQ ID NO: 2193026 - RNA, 19 nt, Artificial Sequence
  Description of Artificial Sequence: Synthetic oligonucleotide
uucugcagugccuuagaga

SEQ ID NO: 2193027 - RNA, 19 nt, Artificial Sequence
  Description of Artificial Sequence: Synthetic oligonucleotide
ugggacacuuguaugugac

SEQ ID NO: 2193028 - RNA, 19 nt, Artificial Sequence
  Description of Artificial Sequence: Synthetic oligonucleotide
uauuaaacagaagcucuuc

SEQ ID NO: 2193029 - RNA, 19 nt, Artificial Sequence
  Description of Artificial Sequence: Synthetic oligonucleotide
guuauucuugacuuccaga

SEQ ID NO: 2193030 - RNA, 19 nt, Artificial Sequence
  Description of Artificial Sequence: Synthetic oligonucleotide
cuuugagcuugacauugcc

SEQ ID NO: 2193031 - RNA, 19 nt, Artificial Sequence
  Description of Artificial Sequence: Synthetic oligonucleotide
aucccauggucacacugac

SEQ ID NO: 2193032 - RNA, 19 nt, Artificial Sequence
  Description of Artificial Sequence: Synthetic oligonucleotide
cuaguuggagaucuuccug

SEQ ID NO: 2193033 - RNA, 19 nt, Artificial Sequence
  Description of Artificial Sequence: Synthetic oligonucleotide
uggguuagccgaugcuucg

SEQ ID NO: 2193034 - RNA, 19 nt, Artificial Sequence
  Description of Artificial Sequence: Synthetic oligonucleotide
uuuccacaggccagguucc

SEQ ID NO: 2193035 - RNA, 19 nt, Artificial Sequence
  Description of Artificial Sequence: Synthetic oligonucleotide
ccaauauacaagaucuuug

SEQ ID NO: 2193036 - RNA, 19 nt, Artificial Sequence
  Description of Artificial Sequence: Synthetic oligonucleotide
uggggugaccugauggacc

SEQ ID NO: 2193037 - RNA, 19 nt, Artificial Sequence
  Description of Artificial Sequence: Synthetic oligonucleotide
agggacauguguuucuagu

SEQ ID NO: 2193038 - RNA, 19 nt, Artificial Sequence
  Description of Artificial Sequence: Synthetic oligonucleotide
uggugaggcaguuuccaca

SEQ ID NO: 2193039 - RNA, 19 nt, Artificial Sequence
  Description of Artificial Sequence: Synthetic oligonucleotide
ucucagaggggugugaguc

SEQ ID NO: 2193040 - RNA, 19 nt, Artificial Sequence
  Description of Artificial Sequence: Synthetic oligonucleotide
augccggcgaagcucaguc

SEQ ID NO: 2193041 - RNA, 19 nt, Artificial Sequence
  Description of Artificial Sequence: Synthetic oligonucleotide
agucucaucucagaggggu

SEQ ID NO: 2193042 - RNA, 19 nt, Artificial Sequence
  Description of Artificial Sequence: Synthetic oligonucleotide
caggccaauauacaagauc

SEQ ID NO: 2193043 - RNA, 19 nt, Artificial Sequence
  Description of Artificial Sequence: Synthetic oligonucleotide
uggaaaagcaaauguuauu

SEQ ID NO: 2193044 - RNA, 19 nt, Artificial Sequence
  Description of Artificial Sequence: Synthetic oligonucleotide
cuugggaucccauggucac

SEQ ID NO: 2193045 - RNA, 19 nt, Artificial Sequence
  Description of Artificial Sequence: Synthetic oligonucleotide
ugguaucugcuccaaaguu

SEQ ID NO: 2193046 - RNA, 19 nt, Artificial Sequence
  Description of Artificial Sequence: Synthetic oligonucleotide
agcccuuaagaaaugaagu

SEQ ID NO: 2193047 - RNA, 19 nt, Artificial Sequence
  Description of Artificial Sequence: Synthetic oligonucleotide
cugacacaaaugcugagca

SEQ ID NO: 2193048 - RNA, 19 nt, Artificial Sequence
  Description of Artificial Sequence: Synthetic oligonucleotide
gagacuccuuccuuuccag

SEQ ID NO: 2193049 - RNA, 19 nt, Artificial Sequence
  Description of Artificial Sequence: Synthetic oligonucleotide
guaucaucaaaggacaucu

SEQ ID NO: 2193050 - RNA, 19 nt, Artificial Sequence
  Description of Artificial Sequence: Synthetic oligonucleotide
agacauuugaaaaccggga

SEQ ID NO: 2193051 - RNA, 19 nt, Artificial Sequence
  Description of Artificial Sequence: Synthetic oligonucleotide
ccagguuccugcaacaacc

SEQ ID NO: 2193052 - RNA, 19 nt, Artificial Sequence
  Description of Artificial Sequence: Synthetic oligonucleotide
uuucuaguuggagaucuuc

SEQ ID NO: 2193053 - RNA, 19 nt, Artificial Sequence
  Description of Artificial Sequence: Synthetic oligonucleotide
uaauugcagauggucaccu

SEQ ID NO: 2193054 - RNA, 19 nt, Artificial Sequence
  Description of Artificial Sequence: Synthetic oligonucleotide
ggacauguguuucuaguug

SEQ ID NO: 2193055 - RNA, 19 nt, Artificial Sequence
  Description of Artificial Sequence: Synthetic oligonucleotide
ugaguuucaggaggauucc

SEQ ID NO: 2193056 - RNA, 19 nt, Artificial Sequence
  Description of Artificial Sequence: Synthetic oligonucleotide
caaauguuauucuugacuu

SEQ ID NO: 2193057 - RNA, 19 nt, Artificial Sequence
  Description of Artificial Sequence: Synthetic oligonucleotide
agcauacucuaauucuccu

SEQ ID NO: 2193058 - RNA, 19 nt, Artificial Sequence
  Description of Artificial Sequence: Synthetic oligonucleotide
guccucacccauuacgaug

SEQ ID NO: 2193059 - RNA, 19 nt, Artificial Sequence
  Description of Artificial Sequence: Synthetic oligonucleotide
ucuccucucaggccaauau

SEQ ID NO: 2193060 - RNA, 19 nt, Artificial Sequence
  Description of Artificial Sequence: Synthetic oligonucleotide
uguucuuguacagucucau

SEQ ID NO: 2193061 - RNA, 19 nt, Artificial Sequence
  Description of Artificial Sequence: Synthetic oligonucleotide
guagcauacucuaauucuc

SEQ ID NO: 2193062 - RNA, 19 nt, Artificial Sequence
  Description of Artificial Sequence: Synthetic oligonucleotide
aggcaacucuugcuagagc

SEQ ID NO: 2193063 - RNA, 19 nt, Artificial Sequence
  Description of Artificial Sequence: Synthetic oligonucleotide
cccauggucacacugacug

SEQ ID NO: 2193064 - RNA, 19 nt, Artificial Sequence
  Description of Artificial Sequence: Synthetic oligonucleotide
uuagccgaugcuucguaau

SEQ ID NO: 2193065 - RNA, 19 nt, Artificial Sequence
  Description of Artificial Sequence: Synthetic oligonucleotide
uugccuguaaauggaauau

SEQ ID NO: 2193066 - RNA, 19 nt, Artificial Sequence
  Description of Artificial Sequence: Synthetic oligonucleotide
cagacugaaggucugaucu

SEQ ID NO: 2193067 - RNA, 19 nt, Artificial Sequence
  Description of Artificial Sequence: Synthetic oligonucleotide
cacagugcaucugaaggag

SEQ ID NO: 2193068 - RNA, 19 nt, Artificial Sequence
  Description of Artificial Sequence: Synthetic oligonucleotide
ucacacugacuggaaaagc

SEQ ID NO: 2193069 - RNA, 19 nt, Artificial Sequence
  Description of Artificial Sequence: Synthetic oligonucleotide
uccacucuccucucaggcc

SEQ ID NO: 2193070 - RNA, 19 nt, Artificial Sequence
  Description of Artificial Sequence: Synthetic oligonucleotide
cugauggcuaacacaaaca

SEQ ID NO: 2193071 - RNA, 19 nt, Artificial Sequence
  Description of Artificial Sequence: Synthetic oligonucleotide
ugcugagcaaugacaggga

SEQ ID NO: 2193072 - RNA, 19 nt, Artificial Sequence
  Description of Artificial Sequence: Synthetic oligonucleotide
ugcuucguaauugcagaug

SEQ ID NO: 2193073 - RNA, 19 nt, Artificial Sequence
  Description of Artificial Sequence: Synthetic oligonucleotide
ucagacugaaggucugauc

SEQ ID NO: 2193074 - RNA, 19 nt, Artificial Sequence
  Description of Artificial Sequence: Synthetic oligonucleotide
agacugaaggucugaucug

SEQ ID NO: 2193075 - RNA, 19 nt, Artificial Sequence
  Description of Artificial Sequence: Synthetic oligonucleotide
cauguguuucuaguuggag

SEQ ID NO: 2193076 - RNA, 19 nt, Artificial Sequence
  Description of Artificial Sequence: Synthetic oligonucleotide
aguccacucuccucucagg

SEQ ID NO: 2193077 - RNA, 19 nt, Artificial Sequence
  Description of Artificial Sequence: Synthetic oligonucleotide
aguuucaggaggauuccug

SEQ ID NO: 2193078 - RNA, 19 nt, Artificial Sequence
  Description of Artificial Sequence: Synthetic oligonucleotide
gcccuuaagaaaugaagug

SEQ ID NO: 2193079 - RNA, 19 nt, Artificial Sequence
  Description of Artificial Sequence: Synthetic oligonucleotide
uggaauguucuuguacagu

SEQ ID NO: 2193080 - RNA, 19 nt, Artificial Sequence
  Description of Artificial Sequence: Synthetic oligonucleotide
gcaaauguuauucuugacu

SEQ ID NO: 2193081 - RNA, 19 nt, Artificial Sequence
  Description of Artificial Sequence: Synthetic oligonucleotide
guaugugacaugacaccag

SEQ ID NO: 2193082 - RNA, 19 nt, Artificial Sequence
  Description of Artificial Sequence: Synthetic oligonucleotide
guuccugcaacaaccaaga

SEQ ID NO: 2193083 - RNA, 19 nt, Artificial Sequence
  Description of Artificial Sequence: Synthetic oligonucleotide
cagccuaagcccauuucug

SEQ ID NO: 2193084 - RNA, 19 nt, Artificial Sequence
  Description of Artificial Sequence: Synthetic oligonucleotide
uggagaucuuccugauggc

SEQ ID NO: 2193085 - RNA, 19 nt, Artificial Sequence
  Description of Artificial Sequence: Synthetic oligonucleotide
cauuucugcagugccuuag

SEQ ID NO: 2193086 - RNA, 19 nt, Artificial Sequence
  Description of Artificial Sequence: Synthetic oligonucleotide
ugaggcuauggcaggcaac

SEQ ID NO: 2193087 - RNA, 19 nt, Artificial Sequence
  Description of Artificial Sequence: Synthetic oligonucleotide
cuggguuagccgaugcuuc

SEQ ID NO: 2193088 - RNA, 19 nt, Artificial Sequence
  Description of Artificial Sequence: Synthetic oligonucleotide
acccauuacgaugaugccu

SEQ ID NO: 2193089 - RNA, 19 nt, Artificial Sequence
  Description of Artificial Sequence: Synthetic oligonucleotide
auaugaauagaaagaugau

SEQ ID NO: 2193090 - RNA, 19 nt, Artificial Sequence
  Description of Artificial Sequence: Synthetic oligonucleotide
uagaaagaugauagacauu

SEQ ID NO: 2193091 - RNA, 19 nt, Artificial Sequence
  Description of Artificial Sequence: Synthetic oligonucleotide
ucgguucagacugaagguc

SEQ ID NO: 2193092 - RNA, 19 nt, Artificial Sequence
  Description of Artificial Sequence: Synthetic oligonucleotide
accauccugggacacuugu

SEQ ID NO: 2193093 - RNA, 19 nt, Artificial Sequence
  Description of Artificial Sequence: Synthetic oligonucleotide
caggaggauuccugcagcc

SEQ ID NO: 2193094 - RNA, 19 nt, Artificial Sequence
  Description of Artificial Sequence: Synthetic oligonucleotide
gguuguacaucuucacuca

SEQ ID NO: 2193095 - RNA, 19 nt, Artificial Sequence
  Description of Artificial Sequence: Synthetic oligonucleotide
uugcagauggucaccucau

SEQ ID NO: 2193096 - RNA, 19 nt, Artificial Sequence
  Description of Artificial Sequence: Synthetic oligonucleotide
ccugauggcuaacacaaac

SEQ ID NO: 2193097 - RNA, 19 nt, Artificial Sequence
  Description of Artificial Sequence: Synthetic oligonucleotide
ugacacaaaugcugagcaa

SEQ ID NO: 2193098 - RNA, 19 nt, Artificial Sequence
  Description of Artificial Sequence: Synthetic oligonucleotide
ugugagucaucguccucac

SEQ ID NO: 2193099 - RNA, 19 nt, Artificial Sequence
  Description of Artificial Sequence: Synthetic oligonucleotide
gaagugugucuguggggug

SEQ ID NO: 2193100 - RNA, 19 nt, Artificial Sequence
  Description of Artificial Sequence: Synthetic oligonucleotide
ugacuuccagaugccaccc

SEQ ID NO: 2193101 - RNA, 19 nt, Artificial Sequence
  Description of Artificial Sequence: Synthetic oligonucleotide
gacacaaaugcugagcaau

SEQ ID NO: 2193102 - RNA, 19 nt, Artificial Sequence
  Description of Artificial Sequence: Synthetic oligonucleotide
caaccaagacagagccugg

SEQ ID NO: 2193103 - RNA, 19 nt, Artificial Sequence
  Description of Artificial Sequence: Synthetic oligonucleotide
gaucccauggucacacuga

SEQ ID NO: 2193104 - RNA, 19 nt, Artificial Sequence
  Description of Artificial Sequence: Synthetic oligonucleotide
acacuugggaucccauggu

SEQ ID NO: 2193105 - RNA, 19 nt, Artificial Sequence
  Description of Artificial Sequence: Synthetic oligonucleotide
acacaaaugcugagcaaug

SEQ ID NO: 2193106 - RNA, 19 nt, Artificial Sequence
  Description of Artificial Sequence: Synthetic oligonucleotide
gacccgguggucugcuggg

SEQ ID NO: 2193107 - RNA, 19 nt, Artificial Sequence
  Description of Artificial Sequence: Synthetic oligonucleotide
gcaacaaccaagacagagc

SEQ ID NO: 2193108 - RNA, 19 nt, Artificial Sequence
  Description of Artificial Sequence: Synthetic oligonucleotide
uagagaacaacugcuccuu

SEQ ID NO: 2193109 - RNA, 19 nt, Artificial Sequence
  Description of Artificial Sequence: Synthetic oligonucleotide
cuugacauugccuguaaau

SEQ ID NO: 2193110 - RNA, 19 nt, Artificial Sequence
  Description of Artificial Sequence: Synthetic oligonucleotide
agcagggacauguguuucu

SEQ ID NO: 2193111 - RNA, 19 nt, Artificial Sequence
  Description of Artificial Sequence: Synthetic oligonucleotide
acaucuguggaauguucuu

SEQ ID NO: 2193112 - RNA, 19 nt, Artificial Sequence
  Description of Artificial Sequence: Synthetic oligonucleotide
gaagcucaguccacucucc

SEQ ID NO: 2193113 - RNA, 19 nt, Artificial Sequence
  Description of Artificial Sequence: Synthetic oligonucleotide
accugccacaagcaacaag

SEQ ID NO: 2193114 - RNA, 19 nt, Artificial Sequence
  Description of Artificial Sequence: Synthetic oligonucleotide
aggaggauuccugcagccg

SEQ ID NO: 2193115 - RNA, 19 nt, Artificial Sequence
  Description of Artificial Sequence: Synthetic oligonucleotide
aaggagccugggcagcccu

SEQ ID NO: 2193116 - RNA, 19 nt, Artificial Sequence
  Description of Artificial Sequence: Synthetic oligonucleotide
ucaguccuucccagcaggu

SEQ ID NO: 2193117 - RNA, 19 nt, Artificial Sequence
  Description of Artificial Sequence: Synthetic oligonucleotide
auggaauauuaaacagaag

SEQ ID NO: 2193118 - RNA, 19 nt, Artificial Sequence
  Description of Artificial Sequence: Synthetic oligonucleotide
accugauggacccgguggu

SEQ ID NO: 2193119 - RNA, 19 nt, Artificial Sequence
  Description of Artificial Sequence: Synthetic oligonucleotide
uggucacacugacuggaaa

SEQ ID NO: 2193120 - RNA, 19 nt, Artificial Sequence
  Description of Artificial Sequence: Synthetic oligonucleotide
ucuguggggugaccugaug

SEQ ID NO: 2193121 - RNA, 19 nt, Artificial Sequence
  Description of Artificial Sequence: Synthetic oligonucleotide
uccagaugccacccagccu

SEQ ID NO: 2193122 - RNA, 19 nt, Artificial Sequence
  Description of Artificial Sequence: Synthetic oligonucleotide
ugggcacccugacacaaau

SEQ ID NO: 2193123 - RNA, 19 nt, Artificial Sequence
  Description of Artificial Sequence: Synthetic oligonucleotide
gcauacucuaauucuccug

SEQ ID NO: 2193124 - RNA, 19 nt, Artificial Sequence
  Description of Artificial Sequence: Synthetic oligonucleotide
gcuagagccuccucagucc

SEQ ID NO: 2193125 - RNA, 19 nt, Artificial Sequence
  Description of Artificial Sequence: Synthetic oligonucleotide
acaugacaccagcugggca

SEQ ID NO: 2193126 - RNA, 19 nt, Artificial Sequence
  Description of Artificial Sequence: Synthetic oligonucleotide
gaggcaguuuccacaggcc

SEQ ID NO: 2193127 - RNA, 19 nt, Artificial Sequence
  Description of Artificial Sequence: Synthetic oligonucleotide
cuuugugguaucugcucca

SEQ ID NO: 2193128 - RNA, 19 nt, Artificial Sequence
  Description of Artificial Sequence: Synthetic oligonucleotide
acuugggaucccaugguca

SEQ ID NO: 2193129 - RNA, 19 nt, Artificial Sequence
  Description of Artificial Sequence: Synthetic oligonucleotide
aaggucugaucugguucuc

SEQ ID NO: 2193130 - RNA, 19 nt, Artificial Sequence
  Description of Artificial Sequence: Synthetic oligonucleotide
cacccauuacgaugaugcc

SEQ ID NO: 2193131 - RNA, 19 nt, Artificial Sequence
  Description of Artificial Sequence: Synthetic oligonucleotide
cguaauugcagauggucac

SEQ ID NO: 2193132 - RNA, 19 nt, Artificial Sequence
  Description of Artificial Sequence: Synthetic oligonucleotide
agucauuuaccaggagacu

SEQ ID NO: 2193133 - RNA, 19 nt, Artificial Sequence
  Description of Artificial Sequence: Synthetic oligonucleotide
uagccgaugcuucguaauu

SEQ ID NO: 2193134 - RNA, 19 nt, Artificial Sequence
  Description of Artificial Sequence: Synthetic oligonucleotide
caggcaacucuugcuagag

SEQ ID NO: 2193135 - RNA, 19 nt, Artificial Sequence
  Description of Artificial Sequence: Synthetic oligonucleotide
ggaucccauggucacacug

SEQ ID NO: 2193136 - RNA, 19 nt, Artificial Sequence
  Description of Artificial Sequence: Synthetic oligonucleotide
aacaaccaagacagagccu

SEQ ID NO: 2193137 - RNA, 19 nt, Artificial Sequence
  Description of Artificial Sequence: Synthetic oligonucleotide
uuugugguaucugcuccaa

SEQ ID NO: 2193138 - RNA, 19 nt, Artificial Sequence
  Description of Artificial Sequence: Synthetic oligonucleotide
agccgaugcuucguaauug

SEQ ID NO: 2193139 - RNA, 19 nt, Artificial Sequence
  Description of Artificial Sequence: Synthetic oligonucleotide
ggggugaccugauggaccc

SEQ ID NO: 2193140 - RNA, 19 nt, Artificial Sequence
  Description of Artificial Sequence: Synthetic oligonucleotide
uucagacugaaggucugau

SEQ ID NO: 2193141 - RNA, 19 nt, Artificial Sequence
  Description of Artificial Sequence: Synthetic oligonucleotide
cauuacgaugaugccuuug

SEQ ID NO: 2193142 - RNA, 19 nt, Artificial Sequence
  Description of Artificial Sequence: Synthetic oligonucleotide
augcuucguaauugcagau

SEQ ID NO: 2193143 - RNA, 19 nt, Artificial Sequence
  Description of Artificial Sequence: Synthetic oligonucleotide
guucuuguacagucucauc

SEQ ID NO: 2193144 - RNA, 19 nt, Artificial Sequence
  Description of Artificial Sequence: Synthetic oligonucleotide
uugcuagagccuccucagu

SEQ ID NO: 2193145 - RNA, 19 nt, Artificial Sequence
  Description of Artificial Sequence: Synthetic oligonucleotide
ggucacacugacuggaaaa

SEQ ID NO: 2193146 - RNA, 19 nt, Artificial Sequence
  Description of Artificial Sequence: Synthetic oligonucleotide
ccugacacaaaugcugagc

SEQ ID NO: 2193147 - RNA, 19 nt, Artificial Sequence
  Description of Artificial Sequence: Synthetic oligonucleotide
cacuugggaucccaugguc

SEQ ID NO: 2193148 - RNA, 19 nt, Artificial Sequence
  Description of Artificial Sequence: Synthetic oligonucleotide
aucucagaggggugugagu

SEQ ID NO: 2193149 - RNA, 19 nt, Artificial Sequence
  Description of Artificial Sequence: Synthetic oligonucleotide
cagggacauguguuucuag

SEQ ID NO: 2193150 - RNA, 19 nt, Artificial Sequence
  Description of Artificial Sequence: Synthetic oligonucleotide
gaggcuauggcaggcaacu

SEQ ID NO: 2193151 - RNA, 19 nt, Artificial Sequence
  Description of Artificial Sequence: Synthetic oligonucleotide
ccaagcagucauuuaccag

SEQ ID NO: 2193152 - RNA, 19 nt, Artificial Sequence
  Description of Artificial Sequence: Synthetic oligonucleotide
ggacccgguggucugcugg

SEQ ID NO: 2193153 - RNA, 19 nt, Artificial Sequence
  Description of Artificial Sequence: Synthetic oligonucleotide
cgaugcuucguaauugcag

SEQ ID NO: 2193154 - RNA, 19 nt, Artificial Sequence
  Description of Artificial Sequence: Synthetic oligonucleotide
ucugcuggguuagccgaug

SEQ ID NO: 2193155 - RNA, 19 nt, Artificial Sequence
  Description of Artificial Sequence: Synthetic oligonucleotide
aggugguuguacaucuuca

SEQ ID NO: 2193156 - RNA, 19 nt, Artificial Sequence
  Description of Artificial Sequence: Synthetic oligonucleotide
gaucuuugugguaucugcu

SEQ ID NO: 2193157 - RNA, 19 nt, Artificial Sequence
  Description of Artificial Sequence: Synthetic oligonucleotide
caccucaugccggcgaagc

SEQ ID NO: 2193158 - RNA, 19 nt, Artificial Sequence
  Description of Artificial Sequence: Synthetic oligonucleotide
gccgaugcuucguaauugc

SEQ ID NO: 2193159 - RNA, 19 nt, Artificial Sequence
  Description of Artificial Sequence: Synthetic oligonucleotide
ggcaggcaacucuugcuag

SEQ ID NO: 2193160 - RNA, 19 nt, Artificial Sequence
  Description of Artificial Sequence: Synthetic oligonucleotide
cacuuguaugugacaugac

SEQ ID NO: 2193161 - RNA, 19 nt, Artificial Sequence
  Description of Artificial Sequence: Synthetic oligonucleotide
uugugguaucugcuccaaa

SEQ ID NO: 2193162 - RNA, 19 nt, Artificial Sequence
  Description of Artificial Sequence: Synthetic oligonucleotide
cugggcagcccuuaagaaa

SEQ ID NO: 2193163 - RNA, 19 nt, Artificial Sequence
  Description of Artificial Sequence: Synthetic oligonucleotide
agccgaggaagcuuccuuu

SEQ ID NO: 2193164 - RNA, 19 nt, Artificial Sequence
  Description of Artificial Sequence: Synthetic oligonucleotide
ucccauggucacacugacu

SEQ ID NO: 2193165 - RNA, 19 nt, Artificial Sequence
  Description of Artificial Sequence: Synthetic oligonucleotide
cagucucaucucagagggg

SEQ ID NO: 2193166 - RNA, 19 nt, Artificial Sequence
  Description of Artificial Sequence: Synthetic oligonucleotide
ccuguaauaucucgguuca

SEQ ID NO: 2193167 - RNA, 19 nt, Artificial Sequence
  Description of Artificial Sequence: Synthetic oligonucleotide
gugguuguacaucuucacu

SEQ ID NO: 2193168 - RNA, 19 nt, Artificial Sequence
  Description of Artificial Sequence: Synthetic oligonucleotide
guggugaggcaguuuccac

SEQ ID NO: 2193169 - RNA, 19 nt, Artificial Sequence
  Description of Artificial Sequence: Synthetic oligonucleotide
agccugggcagcccuuaag

SEQ ID NO: 2193170 - RNA, 19 nt, Artificial Sequence
  Description of Artificial Sequence: Synthetic oligonucleotide
uccugauggcuaacacaaa

SEQ ID NO: 2193171 - RNA, 19 nt, Artificial Sequence
  Description of Artificial Sequence: Synthetic oligonucleotide
acccugacacaaaugcuga

SEQ ID NO: 2193172 - RNA, 19 nt, Artificial Sequence
  Description of Artificial Sequence: Synthetic oligonucleotide
guuagccgaugcuucguaa

SEQ ID NO: 2193173 - RNA, 19 nt, Artificial Sequence
  Description of Artificial Sequence: Synthetic oligonucleotide
gugguaucugcuccaaagu

SEQ ID NO: 2193174 - RNA, 19 nt, Artificial Sequence
  Description of Artificial Sequence: Synthetic oligonucleotide
ugcagccgaggaagcuucc

SEQ ID NO: 2193175 - RNA, 19 nt, Artificial Sequence
  Description of Artificial Sequence: Synthetic oligonucleotide
ggagacuccuuccuuucca

SEQ ID NO: 2193176 - RNA, 19 nt, Artificial Sequence
  Description of Artificial Sequence: Synthetic oligonucleotide
acauguguuucuaguugga

SEQ ID NO: 2193177 - RNA, 19 nt, Artificial Sequence
  Description of Artificial Sequence: Synthetic oligonucleotide
aacugaguuucaggaggau

SEQ ID NO: 2193178 - RNA, 19 nt, Artificial Sequence
  Description of Artificial Sequence: Synthetic oligonucleotide
gcaacaagacacuugggau

SEQ ID NO: 2193179 - RNA, 19 nt, Artificial Sequence
  Description of Artificial Sequence: Synthetic oligonucleotide
ccuguaaauggaauauuaa

SEQ ID NO: 2193180 - RNA, 19 nt, Artificial Sequence
  Description of Artificial Sequence: Synthetic oligonucleotide
cucgguucagacugaaggu

SEQ ID NO: 2193181 - RNA, 19 nt, Artificial Sequence
  Description of Artificial Sequence: Synthetic oligonucleotide
uaucucgguucagacugaa

SEQ ID NO: 2193182 - RNA, 19 nt, Artificial Sequence
  Description of Artificial Sequence: Synthetic oligonucleotide
ugccuguaaauggaauauu

SEQ ID NO: 2193183 - RNA, 19 nt, Artificial Sequence
  Description of Artificial Sequence: Synthetic oligonucleotide
ugccggcgaagcucagucc

SEQ ID NO: 2193184 - RNA, 19 nt, Artificial Sequence
  Description of Artificial Sequence: Synthetic oligonucleotide
ggggugugagucaucgucc

SEQ ID NO: 2193185 - RNA, 19 nt, Artificial Sequence
  Description of Artificial Sequence: Synthetic oligonucleotide
accucaugccggcgaagcu

SEQ ID NO: 2193186 - RNA, 19 nt, Artificial Sequence
  Description of Artificial Sequence: Synthetic oligonucleotide
cagguuccugcaacaacca

SEQ ID NO: 2193187 - RNA, 19 nt, Artificial Sequence
  Description of Artificial Sequence: Synthetic oligonucleotide
cucaucucagaggggugug

SEQ ID NO: 2193188 - RNA, 19 nt, Artificial Sequence
  Description of Artificial Sequence: Synthetic oligonucleotide
uugggaucccauggucaca

SEQ ID NO: 2193189 - RNA, 19 nt, Artificial Sequence
  Description of Artificial Sequence: Synthetic oligonucleotide
cucacccauuacgaugaug

SEQ ID NO: 2193190 - RNA, 19 nt, Artificial Sequence
  Description of Artificial Sequence: Synthetic oligonucleotide
cugcagugccuuagagaac

SEQ ID NO: 2193191 - RNA, 19 nt, Artificial Sequence
  Description of Artificial Sequence: Synthetic oligonucleotide
ccagaugccacccagccua

SEQ ID NO: 2193192 - RNA, 19 nt, Artificial Sequence
  Description of Artificial Sequence: Synthetic oligonucleotide
caaaggacaucuguggaau

SEQ ID NO: 2193193 - RNA, 19 nt, Artificial Sequence
  Description of Artificial Sequence: Synthetic oligonucleotide
ucaccucaugccggcgaag

SEQ ID NO: 2193194 - RNA, 19 nt, Artificial Sequence
  Description of Artificial Sequence: Synthetic oligonucleotide
guaucugcuccaaaguuuu

SEQ ID NO: 2193195 - RNA, 19 nt, Artificial Sequence
  Description of Artificial Sequence: Synthetic oligonucleotide
gugagucaucguccucacc

SEQ ID NO: 2193196 - RNA, 19 nt, Artificial Sequence
  Description of Artificial Sequence: Synthetic oligonucleotide
aggacaucuguggaauguu

SEQ ID NO: 2193197 - RNA, 19 nt, Artificial Sequence
  Description of Artificial Sequence: Synthetic oligonucleotide
uggucaccucaugccggcg

SEQ ID NO: 2193198 - RNA, 19 nt, Artificial Sequence
  Description of Artificial Sequence: Synthetic oligonucleotide
cuucacucacagugcaucu

SEQ ID NO: 2193199 - RNA, 19 nt, Artificial Sequence
  Description of Artificial Sequence: Synthetic oligonucleotide
agccaccauccugggacac

SEQ ID NO: 2193200 - RNA, 19 nt, Artificial Sequence
  Description of Artificial Sequence: Synthetic oligonucleotide
aggcuauggcaggcaacuc

SEQ ID NO: 2193201 - RNA, 19 nt, Artificial Sequence
  Description of Artificial Sequence: Synthetic oligonucleotide
gguggugaggcaguuucca

SEQ ID NO: 2193202 - RNA, 19 nt, Artificial Sequence
  Description of Artificial Sequence: Synthetic oligonucleotide
gaucuuccugauggcuaac

SEQ ID NO: 2193203 - RNA, 19 nt, Artificial Sequence
  Description of Artificial Sequence: Synthetic oligonucleotide
gccuguaaauggaauauua

SEQ ID NO: 2193204 - RNA, 19 nt, Artificial Sequence
  Description of Artificial Sequence: Synthetic oligonucleotide
gagcaaugacagggaggag

SEQ ID NO: 2193205 - RNA, 19 nt, Artificial Sequence
  Description of Artificial Sequence: Synthetic oligonucleotide
ggcuauggcaggcaacucu

SEQ ID NO: 2193206 - RNA, 19 nt, Artificial Sequence
  Description of Artificial Sequence: Synthetic oligonucleotide
gccagguuccugcaacaac

SEQ ID NO: 2193207 - RNA, 19 nt, Artificial Sequence
  Description of Artificial Sequence: Synthetic oligonucleotide
cauugccuguaaauggaau

SEQ ID NO: 2193208 - RNA, 19 nt, Artificial Sequence
  Description of Artificial Sequence: Synthetic oligonucleotide
gccggcgaagcucagucca

SEQ ID NO: 2193209 - RNA, 19 nt, Artificial Sequence
  Description of Artificial Sequence: Synthetic oligonucleotide
auaucucgguucagacuga

SEQ ID NO: 2193210 - RNA, 19 nt, Artificial Sequence
  Description of Artificial Sequence: Synthetic oligonucleotide
cuaagcccauuucugcagu

SEQ ID NO: 2193211 - RNA, 19 nt, Artificial Sequence
  Description of Artificial Sequence: Synthetic oligonucleotide
caucguccucacccauuac

SEQ ID NO: 2193212 - RNA, 19 nt, Artificial Sequence
  Description of Artificial Sequence: Synthetic oligonucleotide
gucaccucaugccggcgaa

SEQ ID NO: 2193213 - RNA, 19 nt, Artificial Sequence
  Description of Artificial Sequence: Synthetic oligonucleotide
caagcagggacauguguuu

SEQ ID NO: 2193214 - RNA, 19 nt, Artificial Sequence
  Description of Artificial Sequence: Synthetic oligonucleotide
cuccucucaggccaauaua

SEQ ID NO: 2193215 - RNA, 19 nt, Artificial Sequence
  Description of Artificial Sequence: Synthetic oligonucleotide
cuucguaauugcagauggu

SEQ ID NO: 2193216 - RNA, 19 nt, Artificial Sequence
  Description of Artificial Sequence: Synthetic oligonucleotide
gcaggcaacucuugcuaga

SEQ ID NO: 2193217 - RNA, 19 nt, Artificial Sequence
  Description of Artificial Sequence: Synthetic oligonucleotide
ccacucuccucucaggcca

SEQ ID NO: 2193218 - RNA, 19 nt, Artificial Sequence
  Description of Artificial Sequence: Synthetic oligonucleotide
gccuuagagaacaacugcu

SEQ ID NO: 2193219 - RNA, 19 nt, Artificial Sequence
  Description of Artificial Sequence: Synthetic oligonucleotide
ugacaccagcugggcaccc

SEQ ID NO: 2193220 - RNA, 19 nt, Artificial Sequence
  Description of Artificial Sequence: Synthetic oligonucleotide
ggucaccucaugccggcga

SEQ ID NO: 2193221 - RNA, 19 nt, Artificial Sequence
  Description of Artificial Sequence: Synthetic oligonucleotide
gguaucugcuccaaaguuu

SEQ ID NO: 2193222 - RNA, 19 nt, Artificial Sequence
  Description of Artificial Sequence: Synthetic oligonucleotide
uggacccgguggucugcug

SEQ ID NO: 2193223 - RNA, 19 nt, Artificial Sequence
  Description of Artificial Sequence: Synthetic oligonucleotide
ugaugccuuugagcuugac

SEQ ID NO: 2193224 - RNA, 19 nt, Artificial Sequence
  Description of Artificial Sequence: Synthetic oligonucleotide
agaugccacccagccuaag

SEQ ID NO: 2193225 - RNA, 19 nt, Artificial Sequence
  Description of Artificial Sequence: Synthetic oligonucleotide
gccaauauacaagaucuuu

SEQ ID NO: 2193226 - RNA, 19 nt, Artificial Sequence
  Description of Artificial Sequence: Synthetic oligonucleotide
ggcgaagcucaguccacuc

SEQ ID NO: 2193227 - RNA, 19 nt, Artificial Sequence
  Description of Artificial Sequence: Synthetic oligonucleotide
auggucacacugacuggaa

SEQ ID NO: 2193228 - RNA, 19 nt, Artificial Sequence
  Description of Artificial Sequence: Synthetic oligonucleotide
aggagcaagcagggacaug

SEQ ID NO: 2193229 - RNA, 19 nt, Artificial Sequence
  Description of Artificial Sequence: Synthetic oligonucleotide
cccugacacaaaugcugag

SEQ ID NO: 2193230 - RNA, 19 nt, Artificial Sequence
  Description of Artificial Sequence: Synthetic oligonucleotide
ggugugagucaucguccuc

SEQ ID NO: 2193231 - RNA, 19 nt, Artificial Sequence
  Description of Artificial Sequence: Synthetic oligonucleotide
ccucaugccggcgaagcuc

SEQ ID NO: 2193232 - RNA, 19 nt, Artificial Sequence
  Description of Artificial Sequence: Synthetic oligonucleotide
cauuuaccaggagacuccu

SEQ ID NO: 2193233 - RNA, 19 nt, Artificial Sequence
  Description of Artificial Sequence: Synthetic oligonucleotide
ccucaguccuucccagcag

SEQ ID NO: 2193234 - RNA, 19 nt, Artificial Sequence
  Description of Artificial Sequence: Synthetic oligonucleotide
gggacauguguuucuaguu

SEQ ID NO: 2193235 - RNA, 19 nt, Artificial Sequence
  Description of Artificial Sequence: Synthetic oligonucleotide
cccauuacgaugaugccuu

SEQ ID NO: 2193236 - RNA, 19 nt, Artificial Sequence
  Description of Artificial Sequence: Synthetic oligonucleotide
gguuagccgaugcuucgua

SEQ ID NO: 2193237 - RNA, 19 nt, Artificial Sequence
  Description of Artificial Sequence: Synthetic oligonucleotide
ccucucaggccaauauaca

SEQ ID NO: 2193238 - RNA, 19 nt, Artificial Sequence
  Description of Artificial Sequence: Synthetic oligonucleotide
ccagccuaagcccauuucu

SEQ ID NO: 2193239 - RNA, 19 nt, Artificial Sequence
  Description of Artificial Sequence: Synthetic oligonucleotide
uucccagcaggugguugua

SEQ ID NO: 2193240 - RNA, 19 nt, Artificial Sequence
  Description of Artificial Sequence: Synthetic oligonucleotide
auggacccgguggucugcu

SEQ ID NO: 2193241 - RNA, 19 nt, Artificial Sequence
  Description of Artificial Sequence: Synthetic oligonucleotide
cugauggacccgguggucu

SEQ ID NO: 2193242 - RNA, 19 nt, Artificial Sequence
  Description of Artificial Sequence: Synthetic oligonucleotide
gcagcccuuaagaaaugaa

SEQ ID NO: 2193243 - RNA, 19 nt, Artificial Sequence
  Description of Artificial Sequence: Synthetic oligonucleotide
gaggagcaagcagggacau

SEQ ID NO: 2193244 - RNA, 19 nt, Artificial Sequence
  Description of Artificial Sequence: Synthetic oligonucleotide
cccagccuaagcccauuuc

SEQ ID NO: 2193245 - RNA, 19 nt, Artificial Sequence
  Description of Artificial Sequence: Synthetic oligonucleotide
ccgaugcuucguaauugca

SEQ ID NO: 2193246 - RNA, 19 nt, Artificial Sequence
  Description of Artificial Sequence: Synthetic oligonucleotide
ccugggcagcccuuaagaa

SEQ ID NO: 2193247 - RNA, 19 nt, Artificial Sequence
  Description of Artificial Sequence: Synthetic oligonucleotide
ggucugaucugguucucuu

SEQ ID NO: 2193248 - RNA, 19 nt, Artificial Sequence
  Description of Artificial Sequence: Synthetic oligonucleotide
gcgaagcucaguccacucu

SEQ ID NO: 2193249 - RNA, 19 nt, Artificial Sequence
  Description of Artificial Sequence: Synthetic oligonucleotide
cacucuccucucaggccaa

SEQ ID NO: 2193250 - RNA, 19 nt, Artificial Sequence
  Description of Artificial Sequence: Synthetic oligonucleotide
ccacaagcaacaagacacu

SEQ ID NO: 2193251 - RNA, 19 nt, Artificial Sequence
  Description of Artificial Sequence: Synthetic oligonucleotide
gcuggguuagccgaugcuu

SEQ ID NO: 2193252 - RNA, 19 nt, Artificial Sequence
  Description of Artificial Sequence: Synthetic oligonucleotide
gguggucugcuggguuagc

SEQ ID NO: 2193253 - RNA, 19 nt, Artificial Sequence
  Description of Artificial Sequence: Synthetic oligonucleotide
acccgguggucugcugggu

SEQ ID NO: 2193254 - RNA, 19 nt, Artificial Sequence
  Description of Artificial Sequence: Synthetic oligonucleotide
guuucuaguuggagaucuu

SEQ ID NO: 2193255 - RNA, 19 nt, Artificial Sequence
  Description of Artificial Sequence: Synthetic oligonucleotide
cacucacacugcuccuggu

SEQ ID NO: 2193256 - RNA, 19 nt, Artificial Sequence
  Description of Artificial Sequence: Synthetic oligonucleotide
cgguucagacugaaggucu

SEQ ID NO: 2193257 - RNA, 19 nt, Artificial Sequence
  Description of Artificial Sequence: Synthetic oligonucleotide
gcacccugacacaaaugcu

SEQ ID NO: 2193258 - RNA, 19 nt, Artificial Sequence
  Description of Artificial Sequence: Synthetic oligonucleotide
ccauccugggacacuugua

SEQ ID NO: 2193259 - RNA, 19 nt, Artificial Sequence
  Description of Artificial Sequence: Synthetic oligonucleotide
gccgaggaagcuuccuuuu

SEQ ID NO: 2193260 - RNA, 19 nt, Artificial Sequence
  Description of Artificial Sequence: Synthetic oligonucleotide
ccgguggucugcuggguua

SEQ ID NO: 2193261 - RNA, 19 nt, Artificial Sequence
  Description of Artificial Sequence: Synthetic oligonucleotide
cgguggucugcuggguuag

SEQ ID NO: 2193262 - RNA, 19 nt, Artificial Sequence
  Description of Artificial Sequence: Synthetic oligonucleotide
ggguuagccgaugcuucgu

SEQ ID NO: 2193263 - RNA, 19 nt, Artificial Sequence
  Description of Artificial Sequence: Synthetic oligonucleotide
ggccaauauacaagaucuu

SEQ ID NO: 2193264 - RNA, 19 nt, Artificial Sequence
  Description of Artificial Sequence: Synthetic oligonucleotide
gcagccgaggaagcuuccu

SEQ ID NO: 2193265 - RNA, 19 nt, Artificial Sequence
  Description of Artificial Sequence: Synthetic oligonucleotide
cguccucacccauuacgau

SEQ ID NO: 2193266 - RNA, 19 nt, Artificial Sequence
  Description of Artificial Sequence: Synthetic oligonucleotide
gcaggugguuguacaucuu

SEQ ID NO: 2193267 - RNA, 19 nt, Artificial Sequence
  Description of Artificial Sequence: Synthetic oligonucleotide
ccugguggugaggcaguuu

SEQ ID NO: 2193268 - RNA, 19 nt, Artificial Sequence
  Description of Artificial Sequence: Synthetic oligonucleotide
cggcgaagcucaguccacu

SEQ ID NO: 2193269 - RNA, 19 nt, Artificial Sequence
  Description of Artificial Sequence: Synthetic oligonucleotide
agauugauguaauucaugg

SEQ ID NO: 2193270 - RNA, 19 nt, Artificial Sequence
  Description of Artificial Sequence: Synthetic oligonucleotide
uucuuaaaguaacacacgc

SEQ ID NO: 2193271 - RNA, 19 nt, Artificial Sequence
  Description of Artificial Sequence: Synthetic oligonucleotide
ucuaaugcugccacgauca

SEQ ID NO: 2193272 - RNA, 19 nt, Artificial Sequence
  Description of Artificial Sequence: Synthetic oligonucleotide
ucuuaaaguaacacacgcg

SEQ ID NO: 2193273 - RNA, 19 nt, Artificial Sequence
  Description of Artificial Sequence: Synthetic oligonucleotide
uugauguaauucauggcgg

SEQ ID NO: 2193274 - RNA, 19 nt, Artificial Sequence
  Description of Artificial Sequence: Synthetic oligonucleotide
ugucacaacacccuguggc

SEQ ID NO: 2193275 - RNA, 19 nt, Artificial Sequence
  Description of Artificial Sequence: Synthetic oligonucleotide
aaagccuuucucuggaaag

SEQ ID NO: 2193276 - RNA, 19 nt, Artificial Sequence
  Description of Artificial Sequence: Synthetic oligonucleotide
uaaaguaacacacgcggca

SEQ ID NO: 2193277 - RNA, 19 nt, Artificial Sequence
  Description of Artificial Sequence: Synthetic oligonucleotide
aacccuaaccaccaggcag

SEQ ID NO: 2193278 - RNA, 19 nt, Artificial Sequence
  Description of Artificial Sequence: Synthetic oligonucleotide
ucuagucugggcuaaagca

SEQ ID NO: 2193279 - RNA, 19 nt, Artificial Sequence
  Description of Artificial Sequence: Synthetic oligonucleotide
aaaacuguccuucaucgau

SEQ ID NO: 2193280 - RNA, 19 nt, Artificial Sequence
  Description of Artificial Sequence: Synthetic oligonucleotide
ucauguguggagaagcugc

SEQ ID NO: 2193281 - RNA, 19 nt, Artificial Sequence
  Description of Artificial Sequence: Synthetic oligonucleotide
aaaaggcugugacaagcgg

SEQ ID NO: 2193282 - RNA, 19 nt, Artificial Sequence
  Description of Artificial Sequence: Synthetic oligonucleotide
ucaaacccuaaccaccagg

SEQ ID NO: 2193283 - RNA, 19 nt, Artificial Sequence
  Description of Artificial Sequence: Synthetic oligonucleotide
uaacacacgcggcacaccg

SEQ ID NO: 2193284 - RNA, 19 nt, Artificial Sequence
  Description of Artificial Sequence: Synthetic oligonucleotide
aaaguaacacacgcggcac

SEQ ID NO: 2193285 - RNA, 19 nt, Artificial Sequence
  Description of Artificial Sequence: Synthetic oligonucleotide
uggaugucaaacccuaacc

SEQ ID NO: 2193286 - RNA, 19 nt, Artificial Sequence
  Description of Artificial Sequence: Synthetic oligonucleotide
uuaaaguaacacacgcggc

SEQ ID NO: 2193287 - RNA, 19 nt, Artificial Sequence
  Description of Artificial Sequence: Synthetic oligonucleotide
accucugugucacaacacc

SEQ ID NO: 2193288 - RNA, 19 nt, Artificial Sequence
  Description of Artificial Sequence: Synthetic oligonucleotide
cuucuuaaaguaacacacg

SEQ ID NO: 2193289 - RNA, 19 nt, Artificial Sequence
  Description of Artificial Sequence: Synthetic oligonucleotide
uuggcauacuugaugacca

SEQ ID NO: 2193290 - RNA, 19 nt, Artificial Sequence
  Description of Artificial Sequence: Synthetic oligonucleotide
uucacagaauuccacgaug

SEQ ID NO: 2193291 - RNA, 19 nt, Artificial Sequence
  Description of Artificial Sequence: Synthetic oligonucleotide
gaugucaaacccuaaccac

SEQ ID NO: 2193292 - RNA, 19 nt, Artificial Sequence
  Description of Artificial Sequence: Synthetic oligonucleotide
gauugauguaauucauggc

SEQ ID NO: 2193293 - RNA, 19 nt, Artificial Sequence
  Description of Artificial Sequence: Synthetic oligonucleotide
augucaaacccuaaccacc

SEQ ID NO: 2193294 - RNA, 19 nt, Artificial Sequence
  Description of Artificial Sequence: Synthetic oligonucleotide
caaacccuaaccaccaggc

SEQ ID NO: 2193295 - RNA, 19 nt, Artificial Sequence
  Description of Artificial Sequence: Synthetic oligonucleotide
caggcauuuguucugggcg

SEQ ID NO: 2193296 - RNA, 19 nt, Artificial Sequence
  Description of Artificial Sequence: Synthetic oligonucleotide
acacacggcagucagcuuc

SEQ ID NO: 2193297 - RNA, 19 nt, Artificial Sequence
  Description of Artificial Sequence: Synthetic oligonucleotide
ggaaaguuccgucuaaugc

SEQ ID NO: 2193298 - RNA, 19 nt, Artificial Sequence
  Description of Artificial Sequence: Synthetic oligonucleotide
augagcucggugcuuuucc

SEQ ID NO: 2193299 - RNA, 19 nt, Artificial Sequence
  Description of Artificial Sequence: Synthetic oligonucleotide
ugucaaacccuaaccacca

SEQ ID NO: 2193300 - RNA, 19 nt, Artificial Sequence
  Description of Artificial Sequence: Synthetic oligonucleotide
cacauuguccaucaggcac

SEQ ID NO: 2193301 - RNA, 19 nt, Artificial Sequence
  Description of Artificial Sequence: Synthetic oligonucleotide
ucugagaauccaaccuggg

SEQ ID NO: 2193302 - RNA, 19 nt, Artificial Sequence
  Description of Artificial Sequence: Synthetic oligonucleotide
uuuguugucuggcccagca

SEQ ID NO: 2193303 - RNA, 19 nt, Artificial Sequence
  Description of Artificial Sequence: Synthetic oligonucleotide
ucucuuuguugucuggccc

SEQ ID NO: 2193304 - RNA, 19 nt, Artificial Sequence
  Description of Artificial Sequence: Synthetic oligonucleotide
ugauguaauucauggcggc

SEQ ID NO: 2193305 - RNA, 19 nt, Artificial Sequence
  Description of Artificial Sequence: Synthetic oligonucleotide
aguuccgucuaaugcugcc

SEQ ID NO: 2193306 - RNA, 19 nt, Artificial Sequence
  Description of Artificial Sequence: Synthetic oligonucleotide
ugcauuggccaucacuuca

SEQ ID NO: 2193307 - RNA, 19 nt, Artificial Sequence
  Description of Artificial Sequence: Synthetic oligonucleotide
uucugggcgaucuggaagc

SEQ ID NO: 2193308 - RNA, 19 nt, Artificial Sequence
  Description of Artificial Sequence: Synthetic oligonucleotide
gaauuccacgaugucaggg

SEQ ID NO: 2193309 - RNA, 19 nt, Artificial Sequence
  Description of Artificial Sequence: Synthetic oligonucleotide
agccucuugguguaggcgg

SEQ ID NO: 2193310 - RNA, 19 nt, Artificial Sequence
  Description of Artificial Sequence: Synthetic oligonucleotide
cucugagaauccaaccugg

SEQ ID NO: 2193311 - RNA, 19 nt, Artificial Sequence
  Description of Artificial Sequence: Synthetic oligonucleotide
uaaagcaucucagcaacca

SEQ ID NO: 2193312 - RNA, 19 nt, Artificial Sequence
  Description of Artificial Sequence: Synthetic oligonucleotide
ugugacaagcgggugagcc

SEQ ID NO: 2193313 - RNA, 19 nt, Artificial Sequence
  Description of Artificial Sequence: Synthetic oligonucleotide
ugguguuccggucaugugu

SEQ ID NO: 2193314 - RNA, 19 nt, Artificial Sequence
  Description of Artificial Sequence: Synthetic oligonucleotide
ugggguaggagcuggcagg

SEQ ID NO: 2193315 - RNA, 19 nt, Artificial Sequence
  Description of Artificial Sequence: Synthetic oligonucleotide
uauagcgcgugucuuuggc

SEQ ID NO: 2193316 - RNA, 19 nt, Artificial Sequence
  Description of Artificial Sequence: Synthetic oligonucleotide
uguccaucaggcacggcag

SEQ ID NO: 2193317 - RNA, 19 nt, Artificial Sequence
  Description of Artificial Sequence: Synthetic oligonucleotide
uguaccgaggacuucuuaa

SEQ ID NO: 2193318 - RNA, 19 nt, Artificial Sequence
  Description of Artificial Sequence: Synthetic oligonucleotide
ucggaagcacuccauacac

SEQ ID NO: 2193319 - RNA, 19 nt, Artificial Sequence
  Description of Artificial Sequence: Synthetic oligonucleotide
acggugggcagauugaugu

SEQ ID NO: 2193320 - RNA, 19 nt, Artificial Sequence
  Description of Artificial Sequence: Synthetic oligonucleotide
gugucuuuggcauacuuga

SEQ ID NO: 2193321 - RNA, 19 nt, Artificial Sequence
  Description of Artificial Sequence: Synthetic oligonucleotide
uguaauucauggcggcugu

SEQ ID NO: 2193322 - RNA, 19 nt, Artificial Sequence
  Description of Artificial Sequence: Synthetic oligonucleotide
aaaguuccgucuaaugcug

SEQ ID NO: 2193323 - RNA, 19 nt, Artificial Sequence
  Description of Artificial Sequence: Synthetic oligonucleotide
cuuccugacagcugaggcc

SEQ ID NO: 2193324 - RNA, 19 nt, Artificial Sequence
  Description of Artificial Sequence: Synthetic oligonucleotide
ugggcuaaagcaucucagc

SEQ ID NO: 2193325 - RNA, 19 nt, Artificial Sequence
  Description of Artificial Sequence: Synthetic oligonucleotide
cugagaauccaaccugggg

SEQ ID NO: 2193326 - RNA, 19 nt, Artificial Sequence
  Description of Artificial Sequence: Synthetic oligonucleotide
uaccgaggacuucuuaaag

SEQ ID NO: 2193327 - RNA, 19 nt, Artificial Sequence
  Description of Artificial Sequence: Synthetic oligonucleotide
aguaacacacgcggcacac

SEQ ID NO: 2193328 - RNA, 19 nt, Artificial Sequence
  Description of Artificial Sequence: Synthetic oligonucleotide
gacagccgcacccagggcc

SEQ ID NO: 2193329 - RNA, 19 nt, Artificial Sequence
  Description of Artificial Sequence: Synthetic oligonucleotide
gaggacuucuuaaaguaac

SEQ ID NO: 2193330 - RNA, 19 nt, Artificial Sequence
  Description of Artificial Sequence: Synthetic oligonucleotide
uaauucauggcggcugugc

SEQ ID NO: 2193331 - RNA, 19 nt, Artificial Sequence
  Description of Artificial Sequence: Synthetic oligonucleotide
aggcacggcagucccagcc

SEQ ID NO: 2193332 - RNA, 19 nt, Artificial Sequence
  Description of Artificial Sequence: Synthetic oligonucleotide
agcugaggccucuccaggc

SEQ ID NO: 2193333 - RNA, 19 nt, Artificial Sequence
  Description of Artificial Sequence: Synthetic oligonucleotide
agggcguccaugguguucc

SEQ ID NO: 2193334 - RNA, 19 nt, Artificial Sequence
  Description of Artificial Sequence: Synthetic oligonucleotide
cagauugauguaauucaug

SEQ ID NO: 2193335 - RNA, 19 nt, Artificial Sequence
  Description of Artificial Sequence: Synthetic oligonucleotide
uccuucaucgaugccaaug

SEQ ID NO: 2193336 - RNA, 19 nt, Artificial Sequence
  Description of Artificial Sequence: Synthetic oligonucleotide
ugcucucugagaauccaac

SEQ ID NO: 2193337 - RNA, 19 nt, Artificial Sequence
  Description of Artificial Sequence: Synthetic oligonucleotide
acauuguccaucaggcacg

SEQ ID NO: 2193338 - RNA, 19 nt, Artificial Sequence
  Description of Artificial Sequence: Synthetic oligonucleotide
aggggcaccagguucaaga

SEQ ID NO: 2193339 - RNA, 19 nt, Artificial Sequence
  Description of Artificial Sequence: Synthetic oligonucleotide
auacacacggcagucagcu

SEQ ID NO: 2193340 - RNA, 19 nt, Artificial Sequence
  Description of Artificial Sequence: Synthetic oligonucleotide
ucucggaagcacuccauac

SEQ ID NO: 2193341 - RNA, 19 nt, Artificial Sequence
  Description of Artificial Sequence: Synthetic oligonucleotide
cugggcuaaagcaucucag

SEQ ID NO: 2193342 - RNA, 19 nt, Artificial Sequence
  Description of Artificial Sequence: Synthetic oligonucleotide
aucuggaagcgccggacuc

SEQ ID NO: 2193343 - RNA, 19 nt, Artificial Sequence
  Description of Artificial Sequence: Synthetic oligonucleotide
ggcagauugauguaauuca

SEQ ID NO: 2193344 - RNA, 19 nt, Artificial Sequence
  Description of Artificial Sequence: Synthetic oligonucleotide
accgaggacuucuuaaagu

SEQ ID NO: 2193345 - RNA, 19 nt, Artificial Sequence
  Description of Artificial Sequence: Synthetic oligonucleotide
augccaaugacagccgcac

SEQ ID NO: 2193346 - RNA, 19 nt, Artificial Sequence
  Description of Artificial Sequence: Synthetic oligonucleotide
uuccugacagcugaggccu

SEQ ID NO: 2193347 - RNA, 19 nt, Artificial Sequence
  Description of Artificial Sequence: Synthetic oligonucleotide
ucucaguugguggaguugu

SEQ ID NO: 2193348 - RNA, 19 nt, Artificial Sequence
  Description of Artificial Sequence: Synthetic oligonucleotide
cucuagucugggcuaaagc

SEQ ID NO: 2193349 - RNA, 19 nt, Artificial Sequence
  Description of Artificial Sequence: Synthetic oligonucleotide
aaacccuaaccaccaggca

SEQ ID NO: 2193350 - RNA, 19 nt, Artificial Sequence
  Description of Artificial Sequence: Synthetic oligonucleotide
cuaaagcaucucagcaacc

SEQ ID NO: 2193351 - RNA, 19 nt, Artificial Sequence
  Description of Artificial Sequence: Synthetic oligonucleotide
ucgaugccaaugacagccg

SEQ ID NO: 2193352 - RNA, 19 nt, Artificial Sequence
  Description of Artificial Sequence: Synthetic oligonucleotide
acuccauacacacggcagu

SEQ ID NO: 2193353 - RNA, 19 nt, Artificial Sequence
  Description of Artificial Sequence: Synthetic oligonucleotide
aagcgggugagccucucca

SEQ ID NO: 2193354 - RNA, 19 nt, Artificial Sequence
  Description of Artificial Sequence: Synthetic oligonucleotide
aaguuccgucuaaugcugc

SEQ ID NO: 2193355 - RNA, 19 nt, Artificial Sequence
  Description of Artificial Sequence: Synthetic oligonucleotide
gugcuuuucccugagaaca

SEQ ID NO: 2193356 - RNA, 19 nt, Artificial Sequence
  Description of Artificial Sequence: Synthetic oligonucleotide
ugccgaaagccuuucucug

SEQ ID NO: 2193357 - RNA, 19 nt, Artificial Sequence
  Description of Artificial Sequence: Synthetic oligonucleotide
ggcacauuguccaucaggc

SEQ ID NO: 2193358 - RNA, 19 nt, Artificial Sequence
  Description of Artificial Sequence: Synthetic oligonucleotide
uuccgucuaaugcugccac

SEQ ID NO: 2193359 - RNA, 19 nt, Artificial Sequence
  Description of Artificial Sequence: Synthetic oligonucleotide
cuugcugaggggcgaagag

SEQ ID NO: 2193360 - RNA, 19 nt, Artificial Sequence
  Description of Artificial Sequence: Synthetic oligonucleotide
acacacgcggcacaccgag

SEQ ID NO: 2193361 - RNA, 19 nt, Artificial Sequence
  Description of Artificial Sequence: Synthetic oligonucleotide
ugagaacauggguccgagg

SEQ ID NO: 2193362 - RNA, 19 nt, Artificial Sequence
  Description of Artificial Sequence: Synthetic oligonucleotide
aagccuuucucuggaaagu

SEQ ID NO: 2193363 - RNA, 19 nt, Artificial Sequence
  Description of Artificial Sequence: Synthetic oligonucleotide
gaagcacuccauacacacg

SEQ ID NO: 2193364 - RNA, 19 nt, Artificial Sequence
  Description of Artificial Sequence: Synthetic oligonucleotide
acacgcggcacaccgagug

SEQ ID NO: 2193365 - RNA, 19 nt, Artificial Sequence
  Description of Artificial Sequence: Synthetic oligonucleotide
aggaucaccuggaucuggc

SEQ ID NO: 2193366 - RNA, 19 nt, Artificial Sequence
  Description of Artificial Sequence: Synthetic oligonucleotide
ggaugucaaacccuaacca

SEQ ID NO: 2193367 - RNA, 19 nt, Artificial Sequence
  Description of Artificial Sequence: Synthetic oligonucleotide
gguguaggcggcuucucgg

SEQ ID NO: 2193368 - RNA, 19 nt, Artificial Sequence
  Description of Artificial Sequence: Synthetic oligonucleotide
ugaggggcgaagagcuucc

SEQ ID NO: 2193369 - RNA, 19 nt, Artificial Sequence
  Description of Artificial Sequence: Synthetic oligonucleotide
guacuugucugcuccacca

SEQ ID NO: 2193370 - RNA, 19 nt, Artificial Sequence
  Description of Artificial Sequence: Synthetic oligonucleotide
accgagugguacuugucug

SEQ ID NO: 2193371 - RNA, 19 nt, Artificial Sequence
  Description of Artificial Sequence: Synthetic oligonucleotide
guuccggucauguguggag

SEQ ID NO: 2193372 - RNA, 19 nt, Artificial Sequence
  Description of Artificial Sequence: Synthetic oligonucleotide
ucaggcacggcagucccag

SEQ ID NO: 2193373 - RNA, 19 nt, Artificial Sequence
  Description of Artificial Sequence: Synthetic oligonucleotide
agcaccucugugucacaac

SEQ ID NO: 2193374 - RNA, 19 nt, Artificial Sequence
  Description of Artificial Sequence: Synthetic oligonucleotide
acccuaaccaccaggcagg

SEQ ID NO: 2193375 - RNA, 19 nt, Artificial Sequence
  Description of Artificial Sequence: Synthetic oligonucleotide
uccgucuaaugcugccacg

SEQ ID NO: 2193376 - RNA, 19 nt, Artificial Sequence
  Description of Artificial Sequence: Synthetic oligonucleotide
uccacgaugucagggaaaa

SEQ ID NO: 2193377 - RNA, 19 nt, Artificial Sequence
  Description of Artificial Sequence: Synthetic oligonucleotide
ugagcucggugcuuuuccc

SEQ ID NO: 2193378 - RNA, 19 nt, Artificial Sequence
  Description of Artificial Sequence: Synthetic oligonucleotide
gaauccaaccugggguagg

SEQ ID NO: 2193379 - RNA, 19 nt, Artificial Sequence
  Description of Artificial Sequence: Synthetic oligonucleotide
gggcacauuguccaucagg

SEQ ID NO: 2193380 - RNA, 19 nt, Artificial Sequence
  Description of Artificial Sequence: Synthetic oligonucleotide
gaacauggguccgaggauc

SEQ ID NO: 2193381 - RNA, 19 nt, Artificial Sequence
  Description of Artificial Sequence: Synthetic oligonucleotide
cauacacacggcagucagc

SEQ ID NO: 2193382 - RNA, 19 nt, Artificial Sequence
  Description of Artificial Sequence: Synthetic oligonucleotide
aauccaaccugggguagga

SEQ ID NO: 2193383 - RNA, 19 nt, Artificial Sequence
  Description of Artificial Sequence: Synthetic oligonucleotide
uggaguugugcuguaggac

SEQ ID NO: 2193384 - RNA, 19 nt, Artificial Sequence
  Description of Artificial Sequence: Synthetic oligonucleotide
gccaaugacagccgcaccc

SEQ ID NO: 2193385 - RNA, 19 nt, Artificial Sequence
  Description of Artificial Sequence: Synthetic oligonucleotide
agcucggugcuuuucccug

SEQ ID NO: 2193386 - RNA, 19 nt, Artificial Sequence
  Description of Artificial Sequence: Synthetic oligonucleotide
agaacauggguccgaggau

SEQ ID NO: 2193387 - RNA, 19 nt, Artificial Sequence
  Description of Artificial Sequence: Synthetic oligonucleotide
aucacuucacagaauucca

SEQ ID NO: 2193388 - RNA, 19 nt, Artificial Sequence
  Description of Artificial Sequence: Synthetic oligonucleotide
gucuaaugcugccacgauc

SEQ ID NO: 2193389 - RNA, 19 nt, Artificial Sequence
  Description of Artificial Sequence: Synthetic oligonucleotide
uccgaggaucaccuggauc

SEQ ID NO: 2193390 - RNA, 19 nt, Artificial Sequence
  Description of Artificial Sequence: Synthetic oligonucleotide
uucucggaagcacuccaua

SEQ ID NO: 2193391 - RNA, 19 nt, Artificial Sequence
  Description of Artificial Sequence: Synthetic oligonucleotide
ugacaagcgggugagccuc

SEQ ID NO: 2193392 - RNA, 19 nt, Artificial Sequence
  Description of Artificial Sequence: Synthetic oligonucleotide
guaggcggcuucucggaag

SEQ ID NO: 2193393 - RNA, 19 nt, Artificial Sequence
  Description of Artificial Sequence: Synthetic oligonucleotide
cuauagcgcgugucuuugg

SEQ ID NO: 2193394 - RNA, 19 nt, Artificial Sequence
  Description of Artificial Sequence: Synthetic oligonucleotide
caucaggcacggcaguccc

SEQ ID NO: 2193395 - RNA, 19 nt, Artificial Sequence
  Description of Artificial Sequence: Synthetic oligonucleotide
ugucuuuggcauacuugau

SEQ ID NO: 2193396 - RNA, 19 nt, Artificial Sequence
  Description of Artificial Sequence: Synthetic oligonucleotide
uaaugcugccacgaucacu

SEQ ID NO: 2193397 - RNA, 19 nt, Artificial Sequence
  Description of Artificial Sequence: Synthetic oligonucleotide
auagcgcgugucuuuggca

SEQ ID NO: 2193398 - RNA, 19 nt, Artificial Sequence
  Description of Artificial Sequence: Synthetic oligonucleotide
auuccacgaugucagggaa

SEQ ID NO: 2193399 - RNA, 19 nt, Artificial Sequence
  Description of Artificial Sequence: Synthetic oligonucleotide
uagcgcgugucuuuggcau

SEQ ID NO: 2193400 - RNA, 19 nt, Artificial Sequence
  Description of Artificial Sequence: Synthetic oligonucleotide
aacauggguccgaggauca

SEQ ID NO: 2193401 - RNA, 19 nt, Artificial Sequence
  Description of Artificial Sequence: Synthetic oligonucleotide
cuucaucgaugccaaugac

SEQ ID NO: 2193402 - RNA, 19 nt, Artificial Sequence
  Description of Artificial Sequence: Synthetic oligonucleotide
cauggguccgaggaucacc

SEQ ID NO: 2193403 - RNA, 19 nt, Artificial Sequence
  Description of Artificial Sequence: Synthetic oligonucleotide
cucugcucucugagaaucc

SEQ ID NO: 2193404 - RNA, 19 nt, Artificial Sequence
  Description of Artificial Sequence: Synthetic oligonucleotide
uggccccgggucuugcugg

SEQ ID NO: 2193405 - RNA, 19 nt, Artificial Sequence
  Description of Artificial Sequence: Synthetic oligonucleotide
cauacuugaugaccaggca

SEQ ID NO: 2193406 - RNA, 19 nt, Artificial Sequence
  Description of Artificial Sequence: Synthetic oligonucleotide
accaagaagggaacuaaaa

SEQ ID NO: 2193407 - RNA, 19 nt, Artificial Sequence
  Description of Artificial Sequence: Synthetic oligonucleotide
aaccaagaagggaacuaaa

SEQ ID NO: 2193408 - RNA, 19 nt, Artificial Sequence
  Description of Artificial Sequence: Synthetic oligonucleotide
ucuggaagcgccggacucu

SEQ ID NO: 2193409 - RNA, 19 nt, Artificial Sequence
  Description of Artificial Sequence: Synthetic oligonucleotide
uguuccggucaugugugga

SEQ ID NO: 2193410 - RNA, 19 nt, Artificial Sequence
  Description of Artificial Sequence: Synthetic oligonucleotide
cagcacggugggcagauug

SEQ ID NO: 2193411 - RNA, 19 nt, Artificial Sequence
  Description of Artificial Sequence: Synthetic oligonucleotide
gugucacaacacccugugg

SEQ ID NO: 2193412 - RNA, 19 nt, Artificial Sequence
  Description of Artificial Sequence: Synthetic oligonucleotide
aggacuucuuaaaguaaca

SEQ ID NO: 2193413 - RNA, 19 nt, Artificial Sequence
  Description of Artificial Sequence: Synthetic oligonucleotide
gguacuugucugcuccacc

SEQ ID NO: 2193414 - RNA, 19 nt, Artificial Sequence
  Description of Artificial Sequence: Synthetic oligonucleotide
ugcuauagcgcgugucuuu

SEQ ID NO: 2193415 - RNA, 19 nt, Artificial Sequence
  Description of Artificial Sequence: Synthetic oligonucleotide
ugccaaugacagccgcacc

SEQ ID NO: 2193416 - RNA, 19 nt, Artificial Sequence
  Description of Artificial Sequence: Synthetic oligonucleotide
guaccgaggacuucuuaaa

SEQ ID NO: 2193417 - RNA, 19 nt, Artificial Sequence
  Description of Artificial Sequence: Synthetic oligonucleotide
cucggaagcacuccauaca

SEQ ID NO: 2193418 - RNA, 19 nt, Artificial Sequence
  Description of Artificial Sequence: Synthetic oligonucleotide
caucgaugccaaugacagc

SEQ ID NO: 2193419 - RNA, 19 nt, Artificial Sequence
  Description of Artificial Sequence: Synthetic oligonucleotide
agcacuccauacacacggc

SEQ ID NO: 2193420 - RNA, 19 nt, Artificial Sequence
  Description of Artificial Sequence: Synthetic oligonucleotide
ggacuucuuaaaguaacac

SEQ ID NO: 2193421 - RNA, 19 nt, Artificial Sequence
  Description of Artificial Sequence: Synthetic oligonucleotide
agcaggcuguaccgaggac

SEQ ID NO: 2193422 - RNA, 19 nt, Artificial Sequence
  Description of Artificial Sequence: Synthetic oligonucleotide
cauuguccaucaggcacgg

SEQ ID NO: 2193423 - RNA, 19 nt, Artificial Sequence
  Description of Artificial Sequence: Synthetic oligonucleotide
aggcugucccagcaccggg

SEQ ID NO: 2193424 - RNA, 19 nt, Artificial Sequence
  Description of Artificial Sequence: Synthetic oligonucleotide
cacagaauuccacgauguc

SEQ ID NO: 2193425 - RNA, 19 nt, Artificial Sequence
  Description of Artificial Sequence: Synthetic oligonucleotide
gucauguguggagaagcug

SEQ ID NO: 2193426 - RNA, 19 nt, Artificial Sequence
  Description of Artificial Sequence: Synthetic oligonucleotide
gggcuaaagcaucucagca

SEQ ID NO: 2193427 - RNA, 19 nt, Artificial Sequence
  Description of Artificial Sequence: Synthetic oligonucleotide
cucucugagaauccaaccu

SEQ ID NO: 2193428 - RNA, 19 nt, Artificial Sequence
  Description of Artificial Sequence: Synthetic oligonucleotide
ucugggcgaucuggaagcg

SEQ ID NO: 2193429 - RNA, 19 nt, Artificial Sequence
  Description of Artificial Sequence: Synthetic oligonucleotide
gcuuuguccucaccucugg

SEQ ID NO: 2193430 - RNA, 19 nt, Artificial Sequence
  Description of Artificial Sequence: Synthetic oligonucleotide
augguguuccggucaugug

SEQ ID NO: 2193431 - RNA, 19 nt, Artificial Sequence
  Description of Artificial Sequence: Synthetic oligonucleotide
ggggcgaagagcuuccuga

SEQ ID NO: 2193432 - RNA, 19 nt, Artificial Sequence
  Description of Artificial Sequence: Synthetic oligonucleotide
agcgggugagccucuccag

SEQ ID NO: 2193433 - RNA, 19 nt, Artificial Sequence
  Description of Artificial Sequence: Synthetic oligonucleotide
ggaguugugcuguaggacu

SEQ ID NO: 2193434 - RNA, 19 nt, Artificial Sequence
  Description of Artificial Sequence: Synthetic oligonucleotide
cucuggcuggaugucaaac

SEQ ID NO: 2193435 - RNA, 19 nt, Artificial Sequence
  Description of Artificial Sequence: Synthetic oligonucleotide
gucaaacccuaaccaccag

SEQ ID NO: 2193436 - RNA, 19 nt, Artificial Sequence
  Description of Artificial Sequence: Synthetic oligonucleotide
uuccggucauguguggaga

SEQ ID NO: 2193437 - RNA, 19 nt, Artificial Sequence
  Description of Artificial Sequence: Synthetic oligonucleotide
caccucugugucacaacac

SEQ ID NO: 2193438 - RNA, 19 nt, Artificial Sequence
  Description of Artificial Sequence: Synthetic oligonucleotide
caaugacagccgcacccag

SEQ ID NO: 2193439 - RNA, 19 nt, Artificial Sequence
  Description of Artificial Sequence: Synthetic oligonucleotide
ccauacacacggcagucag

SEQ ID NO: 2193440 - RNA, 19 nt, Artificial Sequence
  Description of Artificial Sequence: Synthetic oligonucleotide
gauguaauucauggcggcu

SEQ ID NO: 2193441 - RNA, 19 nt, Artificial Sequence
  Description of Artificial Sequence: Synthetic oligonucleotide
gucuugccugcauuggcca

SEQ ID NO: 2193442 - RNA, 19 nt, Artificial Sequence
  Description of Artificial Sequence: Synthetic oligonucleotide
cuagucugggcuaaagcau

SEQ ID NO: 2193443 - RNA, 19 nt, Artificial Sequence
  Description of Artificial Sequence: Synthetic oligonucleotide
guccaugguguuccgguca

SEQ ID NO: 2193444 - RNA, 19 nt, Artificial Sequence
  Description of Artificial Sequence: Synthetic oligonucleotide
cugaggggcgaagagcuuc

SEQ ID NO: 2193445 - RNA, 19 nt, Artificial Sequence
  Description of Artificial Sequence: Synthetic oligonucleotide
auggguccgaggaucaccu

SEQ ID NO: 2193446 - RNA, 19 nt, Artificial Sequence
  Description of Artificial Sequence: Synthetic oligonucleotide
cuaaugcugccacgaucac

SEQ ID NO: 2193447 - RNA, 19 nt, Artificial Sequence
  Description of Artificial Sequence: Synthetic oligonucleotide
cacggugggcagauugaug

SEQ ID NO: 2193448 - RNA, 19 nt, Artificial Sequence
  Description of Artificial Sequence: Synthetic oligonucleotide
gcugugacaagcgggugag

SEQ ID NO: 2193449 - RNA, 19 nt, Artificial Sequence
  Description of Artificial Sequence: Synthetic oligonucleotide
aggggcgaagagcuuccug

SEQ ID NO: 2193450 - RNA, 19 nt, Artificial Sequence
  Description of Artificial Sequence: Synthetic oligonucleotide
cacccuguggcuuuguccu

SEQ ID NO: 2193451 - RNA, 19 nt, Artificial Sequence
  Description of Artificial Sequence: Synthetic oligonucleotide
ugguacuugucugcuccac

SEQ ID NO: 2193452 - RNA, 19 nt, Artificial Sequence
  Description of Artificial Sequence: Synthetic oligonucleotide
cagccucuugguguaggcg

SEQ ID NO: 2193453 - RNA, 19 nt, Artificial Sequence
  Description of Artificial Sequence: Synthetic oligonucleotide
cuccauacacacggcaguc

SEQ ID NO: 2193454 - RNA, 19 nt, Artificial Sequence
  Description of Artificial Sequence: Synthetic oligonucleotide
guguuccggucaugugugg

SEQ ID NO: 2193455 - RNA, 19 nt, Artificial Sequence
  Description of Artificial Sequence: Synthetic oligonucleotide
ugggcagauugauguaauu

SEQ ID NO: 2193456 - RNA, 19 nt, Artificial Sequence
  Description of Artificial Sequence: Synthetic oligonucleotide
cucggugcuuuucccugag

SEQ ID NO: 2193457 - RNA, 19 nt, Artificial Sequence
  Description of Artificial Sequence: Synthetic oligonucleotide
ccaggcauuuguucugggc

SEQ ID NO: 2193458 - RNA, 19 nt, Artificial Sequence
  Description of Artificial Sequence: Synthetic oligonucleotide
uccaucaggcacggcaguc

SEQ ID NO: 2193459 - RNA, 19 nt, Artificial Sequence
  Description of Artificial Sequence: Synthetic oligonucleotide
caccgggcaguucucuuug

SEQ ID NO: 2193460 - RNA, 19 nt, Artificial Sequence
  Description of Artificial Sequence: Synthetic oligonucleotide
ccuucaucgaugccaauga

SEQ ID NO: 2193461 - RNA, 19 nt, Artificial Sequence
  Description of Artificial Sequence: Synthetic oligonucleotide
cgugucuuuggcauacuug

SEQ ID NO: 2193462 - RNA, 19 nt, Artificial Sequence
  Description of Artificial Sequence: Synthetic oligonucleotide
gcaccucugugucacaaca

SEQ ID NO: 2193463 - RNA, 19 nt, Artificial Sequence
  Description of Artificial Sequence: Synthetic oligonucleotide
ugccacgaucacugucuug

SEQ ID NO: 2193464 - RNA, 19 nt, Artificial Sequence
  Description of Artificial Sequence: Synthetic oligonucleotide
cacgcggcacaccgagugg

SEQ ID NO: 2193465 - RNA, 19 nt, Artificial Sequence
  Description of Artificial Sequence: Synthetic oligonucleotide
gcugccgaaagccuuucuc

SEQ ID NO: 2193466 - RNA, 19 nt, Artificial Sequence
  Description of Artificial Sequence: Synthetic oligonucleotide
cacggcagucagcuucacc

SEQ ID NO: 2193467 - RNA, 19 nt, Artificial Sequence
  Description of Artificial Sequence: Synthetic oligonucleotide
ugcugcuauagcgcguguc

SEQ ID NO: 2193468 - RNA, 19 nt, Artificial Sequence
  Description of Artificial Sequence: Synthetic oligonucleotide
gcuauagcgcgugucuuug

SEQ ID NO: 2193469 - RNA, 19 nt, Artificial Sequence
  Description of Artificial Sequence: Synthetic oligonucleotide
ccgagugguacuugucugc

SEQ ID NO: 2193470 - RNA, 19 nt, Artificial Sequence
  Description of Artificial Sequence: Synthetic oligonucleotide
acauggguccgaggaucac

SEQ ID NO: 2193471 - RNA, 19 nt, Artificial Sequence
  Description of Artificial Sequence: Synthetic oligonucleotide
cugccgaaagccuuucucu

SEQ ID NO: 2193472 - RNA, 19 nt, Artificial Sequence
  Description of Artificial Sequence: Synthetic oligonucleotide
guaacacacgcggcacacc

SEQ ID NO: 2193473 - RNA, 19 nt, Artificial Sequence
  Description of Artificial Sequence: Synthetic oligonucleotide
ucggugcuuuucccugaga

SEQ ID NO: 2193474 - RNA, 19 nt, Artificial Sequence
  Description of Artificial Sequence: Synthetic oligonucleotide
guaauucauggcggcugug

SEQ ID NO: 2193475 - RNA, 19 nt, Artificial Sequence
  Description of Artificial Sequence: Synthetic oligonucleotide
caucccggagcaggcaggc

SEQ ID NO: 2193476 - RNA, 19 nt, Artificial Sequence
  Description of Artificial Sequence: Synthetic oligonucleotide
guuccgucuaaugcugcca

SEQ ID NO: 2193477 - RNA, 19 nt, Artificial Sequence
  Description of Artificial Sequence: Synthetic oligonucleotide
gcgggugagccucuccagg

SEQ ID NO: 2193478 - RNA, 19 nt, Artificial Sequence
  Description of Artificial Sequence: Synthetic oligonucleotide
ggaucaccuggaucuggcc

SEQ ID NO: 2193479 - RNA, 19 nt, Artificial Sequence
  Description of Artificial Sequence: Synthetic oligonucleotide
acuugaugaccaggcauuu

SEQ ID NO: 2193480 - RNA, 19 nt, Artificial Sequence
  Description of Artificial Sequence: Synthetic oligonucleotide
aacacacgcggcacaccga

SEQ ID NO: 2193481 - RNA, 19 nt, Artificial Sequence
  Description of Artificial Sequence: Synthetic oligonucleotide
caguugguggaguugugcu

SEQ ID NO: 2193482 - RNA, 19 nt, Artificial Sequence
  Description of Artificial Sequence: Synthetic oligonucleotide
ggcugugacaagcggguga

SEQ ID NO: 2193483 - RNA, 19 nt, Artificial Sequence
  Description of Artificial Sequence: Synthetic oligonucleotide
gacuugcugaggggcgaag

SEQ ID NO: 2193484 - RNA, 19 nt, Artificial Sequence
  Description of Artificial Sequence: Synthetic oligonucleotide
uggaagcgccggacucucc

SEQ ID NO: 2193485 - RNA, 19 nt, Artificial Sequence
  Description of Artificial Sequence: Synthetic oligonucleotide
cuuuguugucuggcccagc

SEQ ID NO: 2193486 - RNA, 19 nt, Artificial Sequence
  Description of Artificial Sequence: Synthetic oligonucleotide
cauuuguucugggcgaucu

SEQ ID NO: 2193487 - RNA, 19 nt, Artificial Sequence
  Description of Artificial Sequence: Synthetic oligonucleotide
agcacggugggcagauuga

SEQ ID NO: 2193488 - RNA, 19 nt, Artificial Sequence
  Description of Artificial Sequence: Synthetic oligonucleotide
agaugcugccgaaagccuu

SEQ ID NO: 2193489 - RNA, 19 nt, Artificial Sequence
  Description of Artificial Sequence: Synthetic oligonucleotide
ggugagccucuccagggca

SEQ ID NO: 2193490 - RNA, 19 nt, Artificial Sequence
  Description of Artificial Sequence: Synthetic oligonucleotide
gcuggcucuagucugggcu

SEQ ID NO: 2193491 - RNA, 19 nt, Artificial Sequence
  Description of Artificial Sequence: Synthetic oligonucleotide
ccggacucuccucaugagc

SEQ ID NO: 2193492 - RNA, 19 nt, Artificial Sequence
  Description of Artificial Sequence: Synthetic oligonucleotide
agccuuucucuggaaaguu

SEQ ID NO: 2193493 - RNA, 19 nt, Artificial Sequence
  Description of Artificial Sequence: Synthetic oligonucleotide
acaacacccuguggcuuug

SEQ ID NO: 2193494 - RNA, 19 nt, Artificial Sequence
  Description of Artificial Sequence: Synthetic oligonucleotide
gcuucucggaagcacucca

SEQ ID NO: 2193495 - RNA, 19 nt, Artificial Sequence
  Description of Artificial Sequence: Synthetic oligonucleotide
ggcacggcagucccagccc

SEQ ID NO: 2193496 - RNA, 19 nt, Artificial Sequence
  Description of Artificial Sequence: Synthetic oligonucleotide
cuucacagaauuccacgau

SEQ ID NO: 2193497 - RNA, 19 nt, Artificial Sequence
  Description of Artificial Sequence: Synthetic oligonucleotide
cauuggccaucacuucaca

SEQ ID NO: 2193498 - RNA, 19 nt, Artificial Sequence
  Description of Artificial Sequence: Synthetic oligonucleotide
acggcagucccagcccguc

SEQ ID NO: 2193499 - RNA, 19 nt, Artificial Sequence
  Description of Artificial Sequence: Synthetic oligonucleotide
gucccagcccguccucugc

SEQ ID NO: 2193500 - RNA, 19 nt, Artificial Sequence
  Description of Artificial Sequence: Synthetic oligonucleotide
cuggccccgggucuugcug

SEQ ID NO: 2193501 - RNA, 19 nt, Artificial Sequence
  Description of Artificial Sequence: Synthetic oligonucleotide
gcugcuauagcgcgugucu

SEQ ID NO: 2193502 - RNA, 19 nt, Artificial Sequence
  Description of Artificial Sequence: Synthetic oligonucleotide
gcacggcagucccagcccg

SEQ ID NO: 2193503 - RNA, 19 nt, Artificial Sequence
  Description of Artificial Sequence: Synthetic oligonucleotide
ggcgaucuggaagcgccgg

SEQ ID NO: 2193504 - RNA, 19 nt, Artificial Sequence
  Description of Artificial Sequence: Synthetic oligonucleotide
ccgaggacuucuuaaagua

SEQ ID NO: 2193505 - RNA, 19 nt, Artificial Sequence
  Description of Artificial Sequence: Synthetic oligonucleotide
guucaagaugcugccgaaa

SEQ ID NO: 2193506 - RNA, 19 nt, Artificial Sequence
  Description of Artificial Sequence: Synthetic oligonucleotide
uggguccgaggaucaccug

SEQ ID NO: 2193507 - RNA, 19 nt, Artificial Sequence
  Description of Artificial Sequence: Synthetic oligonucleotide
gcacuccauacacacggca

SEQ ID NO: 2193508 - RNA, 19 nt, Artificial Sequence
  Description of Artificial Sequence: Synthetic oligonucleotide
gguucaagaugcugccgaa

SEQ ID NO: 2193509 - RNA, 19 nt, Artificial Sequence
  Description of Artificial Sequence: Synthetic oligonucleotide
gugacaagcgggugagccu

SEQ ID NO: 2193510 - RNA, 19 nt, Artificial Sequence
  Description of Artificial Sequence: Synthetic oligonucleotide
cuggcucuagucugggcua

SEQ ID NO: 2193511 - RNA, 19 nt, Artificial Sequence
  Description of Artificial Sequence: Synthetic oligonucleotide
ucaugagcucggugcuuuu

SEQ ID NO: 2193512 - RNA, 19 nt, Artificial Sequence
  Description of Artificial Sequence: Synthetic oligonucleotide
gagcucggugcuuuucccu

SEQ ID NO: 2193513 - RNA, 19 nt, Artificial Sequence
  Description of Artificial Sequence: Synthetic oligonucleotide
gaucacugucuugccugca

SEQ ID NO: 2193514 - RNA, 19 nt, Artificial Sequence
  Description of Artificial Sequence: Synthetic oligonucleotide
gcucuagucugggcuaaag

SEQ ID NO: 2193515 - RNA, 19 nt, Artificial Sequence
  Description of Artificial Sequence: Synthetic oligonucleotide
cugggcgaucuggaagcgc

SEQ ID NO: 2193516 - RNA, 19 nt, Artificial Sequence
  Description of Artificial Sequence: Synthetic oligonucleotide
acgcggcacaccgaguggu

SEQ ID NO: 2193517 - RNA, 19 nt, Artificial Sequence
  Description of Artificial Sequence: Synthetic oligonucleotide
cuggaagcgccggacucuc

SEQ ID NO: 2193518 - RNA, 19 nt, Artificial Sequence
  Description of Artificial Sequence: Synthetic oligonucleotide
ccucugcucucugagaauc

SEQ ID NO: 2193519 - RNA, 19 nt, Artificial Sequence
  Description of Artificial Sequence: Synthetic oligonucleotide
ggagccgggcagcacggug

SEQ ID NO: 2193520 - RNA, 19 nt, Artificial Sequence
  Description of Artificial Sequence: Synthetic oligonucleotide
agccagcaccucuguguca

SEQ ID NO: 2193521 - RNA, 19 nt, Artificial Sequence
  Description of Artificial Sequence: Synthetic oligonucleotide
ccugcauuggccaucacuu

SEQ ID NO: 2193522 - RNA, 19 nt, Artificial Sequence
  Description of Artificial Sequence: Synthetic oligonucleotide
uggcucuagucugggcuaa

SEQ ID NO: 2193523 - RNA, 19 nt, Artificial Sequence
  Description of Artificial Sequence: Synthetic oligonucleotide
agcaccgggcaguucucuu

SEQ ID NO: 2193524 - RNA, 19 nt, Artificial Sequence
  Description of Artificial Sequence: Synthetic oligonucleotide
cccggagcaggcaggcugg

SEQ ID NO: 2193525 - RNA, 19 nt, Artificial Sequence
  Description of Artificial Sequence: Synthetic oligonucleotide
ggcuuuguccucaccucug

SEQ ID NO: 2193526 - RNA, 19 nt, Artificial Sequence
  Description of Artificial Sequence: Synthetic oligonucleotide
ccaucaggcacggcagucc

SEQ ID NO: 2193527 - RNA, 19 nt, Artificial Sequence
  Description of Artificial Sequence: Synthetic oligonucleotide
agccgcacccagggccucc

SEQ ID NO: 2193528 - RNA, 19 nt, Artificial Sequence
  Description of Artificial Sequence: Synthetic oligonucleotide
ccguccucugcucucugag

SEQ ID NO: 2193529 - RNA, 19 nt, Artificial Sequence
  Description of Artificial Sequence: Synthetic oligonucleotide
accgggcaguucucuuugu

SEQ ID NO: 2193530 - RNA, 19 nt, Artificial Sequence
  Description of Artificial Sequence: Synthetic oligonucleotide
cgggugagccucuccaggg

SEQ ID NO: 2193531 - RNA, 19 nt, Artificial Sequence
  Description of Artificial Sequence: Synthetic oligonucleotide
cugugucacaacacccugu

SEQ ID NO: 2193532 - RNA, 19 nt, Artificial Sequence
  Description of Artificial Sequence: Synthetic oligonucleotide
cgggcaguucucuuuguug

SEQ ID NO: 2193533 - RNA, 19 nt, Artificial Sequence
  Description of Artificial Sequence: Synthetic oligonucleotide
gaugcugccgaaagccuuu

SEQ ID NO: 2193534 - RNA, 19 nt, Artificial Sequence
  Description of Artificial Sequence: Synthetic oligonucleotide
agcgcgugucuuuggcaua

SEQ ID NO: 2193535 - RNA, 19 nt, Artificial Sequence
  Description of Artificial Sequence: Synthetic oligonucleotide
gaucuggccccgggucuug

SEQ ID NO: 2193536 - RNA, 19 nt, Artificial Sequence
  Description of Artificial Sequence: Synthetic oligonucleotide
uacacacggcagucagcuu

SEQ ID NO: 2193537 - RNA, 19 nt, Artificial Sequence
  Description of Artificial Sequence: Synthetic oligonucleotide
ggacucuccucaugagcuc

SEQ ID NO: 2193538 - RNA, 19 nt, Artificial Sequence
  Description of Artificial Sequence: Synthetic oligonucleotide
ggcuucucggaagcacucc

SEQ ID NO: 2193539 - RNA, 19 nt, Artificial Sequence
  Description of Artificial Sequence: Synthetic oligonucleotide
aggcuguaccgaggacuuc

SEQ ID NO: 2193540 - RNA, 19 nt, Artificial Sequence
  Description of Artificial Sequence: Synthetic oligonucleotide
gguccgaggaucaccugga

SEQ ID NO: 2193541 - RNA, 19 nt, Artificial Sequence
  Description of Artificial Sequence: Synthetic oligonucleotide
cgaucacugucuugccugc

SEQ ID NO: 2193542 - RNA, 19 nt, Artificial Sequence
  Description of Artificial Sequence: Synthetic oligonucleotide
aggcugugacaagcgggug

SEQ ID NO: 2193543 - RNA, 19 nt, Artificial Sequence
  Description of Artificial Sequence: Synthetic oligonucleotide
ccacgaucacugucuugcc

SEQ ID NO: 2193544 - RNA, 19 nt, Artificial Sequence
  Description of Artificial Sequence: Synthetic oligonucleotide
cacgaucacugucuugccu

SEQ ID NO: 2193545 - RNA, 19 nt, Artificial Sequence
  Description of Artificial Sequence: Synthetic oligonucleotide
gccggacucuccucaugag

SEQ ID NO: 2193546 - RNA, 19 nt, Artificial Sequence
  Description of Artificial Sequence: Synthetic oligonucleotide
cugugacaagcgggugagc

SEQ ID NO: 2193547 - RNA, 19 nt, Artificial Sequence
  Description of Artificial Sequence: Synthetic oligonucleotide
ccgaaagccuuucucugga

SEQ ID NO: 2193548 - RNA, 19 nt, Artificial Sequence
  Description of Artificial Sequence: Synthetic oligonucleotide
gcaucucagcaaccaagaa

SEQ ID NO: 2193549 - RNA, 19 nt, Artificial Sequence
  Description of Artificial Sequence: Synthetic oligonucleotide
gucugggcuaaagcaucuc

SEQ ID NO: 2193550 - RNA, 19 nt, Artificial Sequence
  Description of Artificial Sequence: Synthetic oligonucleotide
gccugcauuggccaucacu

SEQ ID NO: 2193551 - RNA, 19 nt, Artificial Sequence
  Description of Artificial Sequence: Synthetic oligonucleotide
cagcccguccucugcucuc

SEQ ID NO: 2193552 - RNA, 19 nt, Artificial Sequence
  Description of Artificial Sequence: Synthetic oligonucleotide
gcagauugauguaauucau

SEQ ID NO: 2193553 - RNA, 19 nt, Artificial Sequence
  Description of Artificial Sequence: Synthetic oligonucleotide
ggcuguaccgaggacuucu

SEQ ID NO: 2193554 - RNA, 19 nt, Artificial Sequence
  Description of Artificial Sequence: Synthetic oligonucleotide
agcugcugcuauagcgcgu

SEQ ID NO: 2193555 - RNA, 19 nt, Artificial Sequence
  Description of Artificial Sequence: Synthetic oligonucleotide
cgaugccaaugacagccgc

SEQ ID NO: 2193556 - RNA, 19 nt, Artificial Sequence
  Description of Artificial Sequence: Synthetic oligonucleotide
gccucuugguguaggcggc

SEQ ID NO: 2193557 - RNA, 19 nt, Artificial Sequence
  Description of Artificial Sequence: Synthetic oligonucleotide
cuucucggaagcacuccau

SEQ ID NO: 2193558 - RNA, 19 nt, Artificial Sequence
  Description of Artificial Sequence: Synthetic oligonucleotide
cacaacacccuguggcuuu

SEQ ID NO: 2193559 - RNA, 19 nt, Artificial Sequence
  Description of Artificial Sequence: Synthetic oligonucleotide
gggcgaucuggaagcgccg

SEQ ID NO: 2193560 - RNA, 19 nt, Artificial Sequence
  Description of Artificial Sequence: Synthetic oligonucleotide
cuguaccgaggacuucuua

SEQ ID NO: 2193561 - RNA, 19 nt, Artificial Sequence
  Description of Artificial Sequence: Synthetic oligonucleotide
ggggagccgggcagcacgg

SEQ ID NO: 2193562 - RNA, 19 nt, Artificial Sequence
  Description of Artificial Sequence: Synthetic oligonucleotide
aucaggcacggcaguccca

SEQ ID NO: 2193563 - RNA, 19 nt, Artificial Sequence
  Description of Artificial Sequence: Synthetic oligonucleotide
gcgcgugucuuuggcauac

SEQ ID NO: 2193564 - RNA, 19 nt, Artificial Sequence
  Description of Artificial Sequence: Synthetic oligonucleotide
cggacucuccucaugagcu

SEQ ID NO: 2193565 - RNA, 19 nt, Artificial Sequence
  Description of Artificial Sequence: Synthetic oligonucleotide
cagcaccucugugucacaa

SEQ ID NO: 2193566 - RNA, 19 nt, Artificial Sequence
  Description of Artificial Sequence: Synthetic oligonucleotide
cggugcuuuucccugagaa

SEQ ID NO: 2193567 - RNA, 19 nt, Artificial Sequence
  Description of Artificial Sequence: Synthetic oligonucleotide
cgcacccagggccuccugg

SEQ ID NO: 2193568 - RNA, 19 nt, Artificial Sequence
  Description of Artificial Sequence: Synthetic oligonucleotide
cucaugagcucggugcuuu

SEQ ID NO: 2193569 - RNA, 19 nt, Artificial Sequence
  Description of Artificial Sequence: Synthetic oligonucleotide
gcgaucuggaagcgccgga

SEQ ID NO: 2193570 - RNA, 19 nt, Artificial Sequence
  Description of Artificial Sequence: Synthetic oligonucleotide
caggccccagguccucuca

SEQ ID NO: 2193571 - RNA, 19 nt, Artificial Sequence
  Description of Artificial Sequence: Synthetic oligonucleotide
gcggcacaccgagugguac

SEQ ID NO: 2193572 - RNA, 19 nt, Artificial Sequence
  Description of Artificial Sequence: Synthetic oligonucleotide
cguccaugguguuccgguc

SEQ ID NO: 2193573 - RNA, 19 nt, Artificial Sequence
  Description of Artificial Sequence: Synthetic oligonucleotide
cccuaaccaccaggcaggc

SEQ ID NO: 2193574 - RNA, 19 nt, Artificial Sequence
  Description of Artificial Sequence: Synthetic oligonucleotide
cggcagucagcuucaccac

SEQ ID NO: 2193575 - RNA, 19 nt, Artificial Sequence
  Description of Artificial Sequence: Synthetic oligonucleotide
gcgcuggcucuagucuggg

SEQ ID NO: 2193576 - RNA, 19 nt, Artificial Sequence
  Description of Artificial Sequence: Synthetic oligonucleotide
gacaagcgggugagccucu

SEQ ID NO: 2193577 - RNA, 19 nt, Artificial Sequence
  Description of Artificial Sequence: Synthetic oligonucleotide
ccagcaccgggcaguucuc

SEQ ID NO: 2193578 - RNA, 19 nt, Artificial Sequence
  Description of Artificial Sequence: Synthetic oligonucleotide
gcgccggacucuccucaug

SEQ ID NO: 2193579 - RNA, 19 nt, Artificial Sequence
  Description of Artificial Sequence: Synthetic oligonucleotide
cggaagcacuccauacaca

SEQ ID NO: 2193580 - RNA, 19 nt, Artificial Sequence
  Description of Artificial Sequence: Synthetic oligonucleotide
guccgaggaucaccuggau

SEQ ID NO: 2193581 - RNA, 19 nt, Artificial Sequence
  Description of Artificial Sequence: Synthetic oligonucleotide
cugcuauagcgcgugucuu

SEQ ID NO: 2193582 - RNA, 19 nt, Artificial Sequence
  Description of Artificial Sequence: Synthetic oligonucleotide
ggacuugcugaggggcgaa

SEQ ID NO: 2193583 - RNA, 19 nt, Artificial Sequence
  Description of Artificial Sequence: Synthetic oligonucleotide
cgaggaucaccuggaucug

SEQ ID NO: 2193584 - RNA, 19 nt, Artificial Sequence
  Description of Artificial Sequence: Synthetic oligonucleotide
ggcauuuguucugggcgau

SEQ ID NO: 2193585 - RNA, 19 nt, Artificial Sequence
  Description of Artificial Sequence: Synthetic oligonucleotide
gaggggcgaagagcuuccu

SEQ ID NO: 2193586 - RNA, 19 nt, Artificial Sequence
  Description of Artificial Sequence: Synthetic oligonucleotide
cacacgcggcacaccgagu

SEQ ID NO: 2193587 - RNA, 19 nt, Artificial Sequence
  Description of Artificial Sequence: Synthetic oligonucleotide
cacggcagucccagcccgu

SEQ ID NO: 2193588 - RNA, 19 nt, Artificial Sequence
  Description of Artificial Sequence: Synthetic oligonucleotide
gcgugucuuuggcauacuu

SEQ ID NO: 2193589 - RNA, 19 nt, Artificial Sequence
  Description of Artificial Sequence: Synthetic oligonucleotide
gcaccgggcaguucucuuu

SEQ ID NO: 2193590 - RNA, 19 nt, Artificial Sequence
  Description of Artificial Sequence: Synthetic oligonucleotide
cugccacgaucacugucuu

SEQ ID NO: 2193591 - RNA, 19 nt, Artificial Sequence
  Description of Artificial Sequence: Synthetic oligonucleotide
gcccguccucugcucucug

SEQ ID NO: 2193592 - RNA, 19 nt, Artificial Sequence
  Description of Artificial Sequence: Synthetic oligonucleotide
cccguccucugcucucuga

SEQ ID NO: 2193593 - RNA, 19 nt, Artificial Sequence
  Description of Artificial Sequence: Synthetic oligonucleotide
gagccucuccagggcacau

SEQ ID NO: 2193594 - RNA, 19 nt, Artificial Sequence
  Description of Artificial Sequence: Synthetic oligonucleotide
ccuggaucuggccccgggu

SEQ ID NO: 2193595 - RNA, 19 nt, Artificial Sequence
  Description of Artificial Sequence: Synthetic oligonucleotide
gccccgggucuugcugggg

SEQ ID NO: 2193596 - RNA, 19 nt, Artificial Sequence
  Description of Artificial Sequence: Synthetic oligonucleotide
ggcucuagucugggcuaaa

SEQ ID NO: 2193597 - RNA, 19 nt, Artificial Sequence
  Description of Artificial Sequence: Synthetic oligonucleotide
gcacggugggcagauugau

SEQ ID NO: 2193598 - RNA, 19 nt, Artificial Sequence
  Description of Artificial Sequence: Synthetic oligonucleotide
cugcugcuauagcgcgugu

SEQ ID NO: 2193599 - RNA, 19 nt, Artificial Sequence
  Description of Artificial Sequence: Synthetic oligonucleotide
cagccgcacccagggccuc

SEQ ID NO: 2193600 - RNA, 19 nt, Artificial Sequence
  Description of Artificial Sequence: Synthetic oligonucleotide
ccucucaguugguggaguu

SEQ ID NO: 2193601 - RNA, 19 nt, Artificial Sequence
  Description of Artificial Sequence: Synthetic oligonucleotide
ccggagcaggcaggcuggc

SEQ ID NO: 2193602 - RNA, 19 nt, Artificial Sequence
  Description of Artificial Sequence: Synthetic oligonucleotide
caacacccuguggcuuugu

SEQ ID NO: 2193603 - RNA, 19 nt, Artificial Sequence
  Description of Artificial Sequence: Synthetic oligonucleotide
gccgggcagcacggugggc

SEQ ID NO: 2193604 - RNA, 19 nt, Artificial Sequence
  Description of Artificial Sequence: Synthetic oligonucleotide
cgucuaaugcugccacgau

SEQ ID NO: 2193605 - RNA, 19 nt, Artificial Sequence
  Description of Artificial Sequence: Synthetic oligonucleotide
cggcacaccgagugguacu

SEQ ID NO: 2193606 - RNA, 19 nt, Artificial Sequence
  Description of Artificial Sequence: Synthetic oligonucleotide
ccgggcaguucucuuuguu

SEQ ID NO: 2193607 - RNA, 19 nt, Artificial Sequence
  Description of Artificial Sequence: Synthetic oligonucleotide
ccucuugguguaggcggcu

SEQ ID NO: 2193608 - RNA, 19 nt, Artificial Sequence
  Description of Artificial Sequence: Synthetic oligonucleotide
ccgcacccagggccuccug

SEQ ID NO: 2193609 - RNA, 19 nt, Artificial Sequence
  Description of Artificial Sequence: Synthetic oligonucleotide
cgcggcacaccgaguggua

SEQ ID NO: 2193610 - RNA, 19 nt, Artificial Sequence
  Description of Artificial Sequence: Synthetic oligonucleotide
gccgcacccagggccuccu

SEQ ID NO: 2193611 - RNA, 19 nt, Artificial Sequence
  Description of Artificial Sequence: Synthetic oligonucleotide
cgcgugucuuuggcauacu

SEQ ID NO: 2193612 - RNA, 19 nt, Artificial Sequence
  Description of Artificial Sequence: Synthetic oligonucleotide
aauuuauucauaguaagac

SEQ ID NO: 2193613 - RNA, 19 nt, Artificial Sequence
  Description of Artificial Sequence: Synthetic oligonucleotide
agcaauagcagauuuaacc

SEQ ID NO: 2193614 - RNA, 19 nt, Artificial Sequence
  Description of Artificial Sequence: Synthetic oligonucleotide
ucagggaagauuaauaugg

SEQ ID NO: 2193615 - RNA, 19 nt, Artificial Sequence
  Description of Artificial Sequence: Synthetic oligonucleotide
uuuauucauaguaagacag

SEQ ID NO: 2193616 - RNA, 19 nt, Artificial Sequence
  Description of Artificial Sequence: Synthetic oligonucleotide
aaaauggucagaaaggggc

SEQ ID NO: 2193617 - RNA, 19 nt, Artificial Sequence
  Description of Artificial Sequence: Synthetic oligonucleotide
aauaauaauaauaauaaaa

SEQ ID NO: 2193618 - RNA, 19 nt, Artificial Sequence
  Description of Artificial Sequence: Synthetic oligonucleotide
uuaacgauaaauaagcaaa

SEQ ID NO: 2193619 - RNA, 19 nt, Artificial Sequence
  Description of Artificial Sequence: Synthetic oligonucleotide
agauuaacgauaaauaagc

SEQ ID NO: 2193620 - RNA, 19 nt, Artificial Sequence
  Description of Artificial Sequence: Synthetic oligonucleotide
ucaaauauugcucaugcca

SEQ ID NO: 2193621 - RNA, 19 nt, Artificial Sequence
  Description of Artificial Sequence: Synthetic oligonucleotide
aaaguuugggacuaaacca

SEQ ID NO: 2193622 - RNA, 19 nt, Artificial Sequence
  Description of Artificial Sequence: Synthetic oligonucleotide
aggaaguucagucaguccc

SEQ ID NO: 2193623 - RNA, 19 nt, Artificial Sequence
  Description of Artificial Sequence: Synthetic oligonucleotide
aaucguaccacuuagguuu

SEQ ID NO: 2193624 - RNA, 19 nt, Artificial Sequence
  Description of Artificial Sequence: Synthetic oligonucleotide
auagcuaucaaauauugcu

SEQ ID NO: 2193625 - RNA, 19 nt, Artificial Sequence
  Description of Artificial Sequence: Synthetic oligonucleotide
accucaagagcuuacaucg

SEQ ID NO: 2193626 - RNA, 19 nt, Artificial Sequence
  Description of Artificial Sequence: Synthetic oligonucleotide
uuaaacaucaugacugaag

SEQ ID NO: 2193627 - RNA, 19 nt, Artificial Sequence
  Description of Artificial Sequence: Synthetic oligonucleotide
agcacaucaguccaguucc

SEQ ID NO: 2193628 - RNA, 19 nt, Artificial Sequence
  Description of Artificial Sequence: Synthetic oligonucleotide
aguaagacaguucacuuuc

SEQ ID NO: 2193629 - RNA, 19 nt, Artificial Sequence
  Description of Artificial Sequence: Synthetic oligonucleotide
caaauaauaauaauaauaa

SEQ ID NO: 2193630 - RNA, 19 nt, Artificial Sequence
  Description of Artificial Sequence: Synthetic oligonucleotide
uguuguucuuccuuaaagg

SEQ ID NO: 2193631 - RNA, 19 nt, Artificial Sequence
  Description of Artificial Sequence: Synthetic oligonucleotide
agauccauugcccacaauc

SEQ ID NO: 2193632 - RNA, 19 nt, Artificial Sequence
  Description of Artificial Sequence: Synthetic oligonucleotide
uuacaucggaaauacauag

SEQ ID NO: 2193633 - RNA, 19 nt, Artificial Sequence
  Description of Artificial Sequence: Synthetic oligonucleotide
aagacaguacaacaaaaca

SEQ ID NO: 2193634 - RNA, 19 nt, Artificial Sequence
  Description of Artificial Sequence: Synthetic oligonucleotide
auaagcaaaagacaguaca

SEQ ID NO: 2193635 - RNA, 19 nt, Artificial Sequence
  Description of Artificial Sequence: Synthetic oligonucleotide
gagacaaucauccaguaga

SEQ ID NO: 2193636 - RNA, 19 nt, Artificial Sequence
  Description of Artificial Sequence: Synthetic oligonucleotide
ucuccuuuaaacauguuaa

SEQ ID NO: 2193637 - RNA, 19 nt, Artificial Sequence
  Description of Artificial Sequence: Synthetic oligonucleotide
aaauaauaauaauaauaaa

SEQ ID NO: 2193638 - RNA, 19 nt, Artificial Sequence
  Description of Artificial Sequence: Synthetic oligonucleotide
auuauucgaagcaaguagc

SEQ ID NO: 2193639 - RNA, 19 nt, Artificial Sequence
  Description of Artificial Sequence: Synthetic oligonucleotide
cauuauucgaagcaaguag

SEQ ID NO: 2193640 - RNA, 19 nt, Artificial Sequence
  Description of Artificial Sequence: Synthetic oligonucleotide
aaccucaagagcuuacauc

SEQ ID NO: 2193641 - RNA, 19 nt, Artificial Sequence
  Description of Artificial Sequence: Synthetic oligonucleotide
uuaaacauguuaaggcuca

SEQ ID NO: 2193642 - RNA, 19 nt, Artificial Sequence
  Description of Artificial Sequence: Synthetic oligonucleotide
aaucaucuugcuguaauuc

SEQ ID NO: 2193643 - RNA, 19 nt, Artificial Sequence
  Description of Artificial Sequence: Synthetic oligonucleotide
aguacaacaaaacacguua

SEQ ID NO: 2193644 - RNA, 19 nt, Artificial Sequence
  Description of Artificial Sequence: Synthetic oligonucleotide
aaaagauuaacgauaaaua

SEQ ID NO: 2193645 - RNA, 19 nt, Artificial Sequence
  Description of Artificial Sequence: Synthetic oligonucleotide
cauguuaaggcucaguuuc

SEQ ID NO: 2193646 - RNA, 19 nt, Artificial Sequence
  Description of Artificial Sequence: Synthetic oligonucleotide
aaacacguuauaaaacuuc

SEQ ID NO: 2193647 - RNA, 19 nt, Artificial Sequence
  Description of Artificial Sequence: Synthetic oligonucleotide
aaguuugggacuaaaccac

SEQ ID NO: 2193648 - RNA, 19 nt, Artificial Sequence
  Description of Artificial Sequence: Synthetic oligonucleotide
uccuuuaaacauguuaagg

SEQ ID NO: 2193649 - RNA, 19 nt, Artificial Sequence
  Description of Artificial Sequence: Synthetic oligonucleotide
acgauaaauaagcaaaaga

SEQ ID NO: 2193650 - RNA, 19 nt, Artificial Sequence
  Description of Artificial Sequence: Synthetic oligonucleotide
uuuaaaucuguuuccacuc

SEQ ID NO: 2193651 - RNA, 19 nt, Artificial Sequence
  Description of Artificial Sequence: Synthetic oligonucleotide
agagaaugcuuguuucucc

SEQ ID NO: 2193652 - RNA, 19 nt, Artificial Sequence
  Description of Artificial Sequence: Synthetic oligonucleotide
gagcuaacaaccucaagag

SEQ ID NO: 2193653 - RNA, 19 nt, Artificial Sequence
  Description of Artificial Sequence: Synthetic oligonucleotide
aaauaagcaaaagacagua

SEQ ID NO: 2193654 - RNA, 19 nt, Artificial Sequence
  Description of Artificial Sequence: Synthetic oligonucleotide
aaggaaguucagucagucc

SEQ ID NO: 2193655 - RNA, 19 nt, Artificial Sequence
  Description of Artificial Sequence: Synthetic oligonucleotide
aaugcaucaccaaacuggg

SEQ ID NO: 2193656 - RNA, 19 nt, Artificial Sequence
  Description of Artificial Sequence: Synthetic oligonucleotide
uuaccauucacugagucca

SEQ ID NO: 2193657 - RNA, 19 nt, Artificial Sequence
  Description of Artificial Sequence: Synthetic oligonucleotide
uuuccacucaagaauccgg

SEQ ID NO: 2193658 - RNA, 19 nt, Artificial Sequence
  Description of Artificial Sequence: Synthetic oligonucleotide
auuaacgauaaauaagcaa

SEQ ID NO: 2193659 - RNA, 19 nt, Artificial Sequence
  Description of Artificial Sequence: Synthetic oligonucleotide
ugggaagccauguucaucc

SEQ ID NO: 2193660 - RNA, 19 nt, Artificial Sequence
  Description of Artificial Sequence: Synthetic oligonucleotide
guauuguugaugcagguac

SEQ ID NO: 2193661 - RNA, 19 nt, Artificial Sequence
  Description of Artificial Sequence: Synthetic oligonucleotide
uagaaaagauuaacgauaa

SEQ ID NO: 2193662 - RNA, 19 nt, Artificial Sequence
  Description of Artificial Sequence: Synthetic oligonucleotide
aacauguuaaggcucaguu

SEQ ID NO: 2193663 - RNA, 19 nt, Artificial Sequence
  Description of Artificial Sequence: Synthetic oligonucleotide
auucgaagcaaguagcuca

SEQ ID NO: 2193664 - RNA, 19 nt, Artificial Sequence
  Description of Artificial Sequence: Synthetic oligonucleotide
aaaagguaaucguaccacu

SEQ ID NO: 2193665 - RNA, 19 nt, Artificial Sequence
  Description of Artificial Sequence: Synthetic oligonucleotide
ugggacuaaaccacuacag

SEQ ID NO: 2193666 - RNA, 19 nt, Artificial Sequence
  Description of Artificial Sequence: Synthetic oligonucleotide
aucaaauauugcucaugcc

SEQ ID NO: 2193667 - RNA, 19 nt, Artificial Sequence
  Description of Artificial Sequence: Synthetic oligonucleotide
aagcaaguagcucaccaug

SEQ ID NO: 2193668 - RNA, 19 nt, Artificial Sequence
  Description of Artificial Sequence: Synthetic oligonucleotide
aucggaaauacauagcuau

SEQ ID NO: 2193669 - RNA, 19 nt, Artificial Sequence
  Description of Artificial Sequence: Synthetic oligonucleotide
aacgauaaauaagcaaaag

SEQ ID NO: 2193670 - RNA, 19 nt, Artificial Sequence
  Description of Artificial Sequence: Synthetic oligonucleotide
aaauuuauucauaguaaga

SEQ ID NO: 2193671 - RNA, 19 nt, Artificial Sequence
  Description of Artificial Sequence: Synthetic oligonucleotide
gaaguauuguugaugcagg

SEQ ID NO: 2193672 - RNA, 19 nt, Artificial Sequence
  Description of Artificial Sequence: Synthetic oligonucleotide
uuguucuuccuuaaaggug

SEQ ID NO: 2193673 - RNA, 19 nt, Artificial Sequence
  Description of Artificial Sequence: Synthetic oligonucleotide
cuguuugcaaacugaacgg

SEQ ID NO: 2193674 - RNA, 19 nt, Artificial Sequence
  Description of Artificial Sequence: Synthetic oligonucleotide
aauaagcaaaagacaguac

SEQ ID NO: 2193675 - RNA, 19 nt, Artificial Sequence
  Description of Artificial Sequence: Synthetic oligonucleotide
caugacugaaguauuguug

SEQ ID NO: 2193676 - RNA, 19 nt, Artificial Sequence
  Description of Artificial Sequence: Synthetic oligonucleotide
augacugaaguauuguuga

SEQ ID NO: 2193677 - RNA, 19 nt, Artificial Sequence
  Description of Artificial Sequence: Synthetic oligonucleotide
aaccacuacagugagguug

SEQ ID NO: 2193678 - RNA, 19 nt, Artificial Sequence
  Description of Artificial Sequence: Synthetic oligonucleotide
agcaaaagacaguacaaca

SEQ ID NO: 2193679 - RNA, 19 nt, Artificial Sequence
  Description of Artificial Sequence: Synthetic oligonucleotide
uuccaaaagguaaucguac

SEQ ID NO: 2193680 - RNA, 19 nt, Artificial Sequence
  Description of Artificial Sequence: Synthetic oligonucleotide
ccuuuaaacauguuaaggc

SEQ ID NO: 2193681 - RNA, 19 nt, Artificial Sequence
  Description of Artificial Sequence: Synthetic oligonucleotide
ccuguuugcaaacugaacg

SEQ ID NO: 2193682 - RNA, 19 nt, Artificial Sequence
  Description of Artificial Sequence: Synthetic oligonucleotide
aaggggcaccuguaggucc

SEQ ID NO: 2193683 - RNA, 19 nt, Artificial Sequence
  Description of Artificial Sequence: Synthetic oligonucleotide
acaggguuacucuugagcu

SEQ ID NO: 2193684 - RNA, 19 nt, Artificial Sequence
  Description of Artificial Sequence: Synthetic oligonucleotide
caugccauuggacucagag

SEQ ID NO: 2193685 - RNA, 19 nt, Artificial Sequence
  Description of Artificial Sequence: Synthetic oligonucleotide
cgauaaauaagcaaaagac

SEQ ID NO: 2193686 - RNA, 19 nt, Artificial Sequence
  Description of Artificial Sequence: Synthetic oligonucleotide
uuuccaaaagguaaucgua

SEQ ID NO: 2193687 - RNA, 19 nt, Artificial Sequence
  Description of Artificial Sequence: Synthetic oligonucleotide
auuaauaugggcaacuuuu

SEQ ID NO: 2193688 - RNA, 19 nt, Artificial Sequence
  Description of Artificial Sequence: Synthetic oligonucleotide
cuuaccauucacugagucc

SEQ ID NO: 2193689 - RNA, 19 nt, Artificial Sequence
  Description of Artificial Sequence: Synthetic oligonucleotide
uucagggaagauuaauaug

SEQ ID NO: 2193690 - RNA, 19 nt, Artificial Sequence
  Description of Artificial Sequence: Synthetic oligonucleotide
uuauucgaagcaaguagcu

SEQ ID NO: 2193691 - RNA, 19 nt, Artificial Sequence
  Description of Artificial Sequence: Synthetic oligonucleotide
uacuguuccagaaugcauc

SEQ ID NO: 2193692 - RNA, 19 nt, Artificial Sequence
  Description of Artificial Sequence: Synthetic oligonucleotide
agcuaucaaauauugcuca

SEQ ID NO: 2193693 - RNA, 19 nt, Artificial Sequence
  Description of Artificial Sequence: Synthetic oligonucleotide
gaaaagauuaacgauaaau

SEQ ID NO: 2193694 - RNA, 19 nt, Artificial Sequence
  Description of Artificial Sequence: Synthetic oligonucleotide
aggcauguaccacacgucg

SEQ ID NO: 2193695 - RNA, 19 nt, Artificial Sequence
  Description of Artificial Sequence: Synthetic oligonucleotide
ggucuuaccauucacugag

SEQ ID NO: 2193696 - RNA, 19 nt, Artificial Sequence
  Description of Artificial Sequence: Synthetic oligonucleotide
gcaauagcagauuuaaccc

SEQ ID NO: 2193697 - RNA, 19 nt, Artificial Sequence
  Description of Artificial Sequence: Synthetic oligonucleotide
aagauuaauaugggcaacu

SEQ ID NO: 2193698 - RNA, 19 nt, Artificial Sequence
  Description of Artificial Sequence: Synthetic oligonucleotide
cucaccaugccguauuugc

SEQ ID NO: 2193699 - RNA, 19 nt, Artificial Sequence
  Description of Artificial Sequence: Synthetic oligonucleotide
uccucucuggucaugggag

SEQ ID NO: 2193700 - RNA, 19 nt, Artificial Sequence
  Description of Artificial Sequence: Synthetic oligonucleotide
uuaauaugggcaacuuuuc

SEQ ID NO: 2193701 - RNA, 19 nt, Artificial Sequence
  Description of Artificial Sequence: Synthetic oligonucleotide
uugcuacuguuccagaaug

SEQ ID NO: 2193702 - RNA, 19 nt, Artificial Sequence
  Description of Artificial Sequence: Synthetic oligonucleotide
aaaaggcugggaaaguuug

SEQ ID NO: 2193703 - RNA, 19 nt, Artificial Sequence
  Description of Artificial Sequence: Synthetic oligonucleotide
uccaaaagguaaucguacc

SEQ ID NO: 2193704 - RNA, 19 nt, Artificial Sequence
  Description of Artificial Sequence: Synthetic oligonucleotide
agaaaggggcaccuguagg

SEQ ID NO: 2193705 - RNA, 19 nt, Artificial Sequence
  Description of Artificial Sequence: Synthetic oligonucleotide
aauggucagaaaggggcac

SEQ ID NO: 2193706 - RNA, 19 nt, Artificial Sequence
  Description of Artificial Sequence: Synthetic oligonucleotide
aacacguuauaaaacuuca

SEQ ID NO: 2193707 - RNA, 19 nt, Artificial Sequence
  Description of Artificial Sequence: Synthetic oligonucleotide
acguuauaaaacuucacuu

SEQ ID NO: 2193708 - RNA, 19 nt, Artificial Sequence
  Description of Artificial Sequence: Synthetic oligonucleotide
aguuuccaaaagguaaucg

SEQ ID NO: 2193709 - RNA, 19 nt, Artificial Sequence
  Description of Artificial Sequence: Synthetic oligonucleotide
aaucauccaguagaaaaga

SEQ ID NO: 2193710 - RNA, 19 nt, Artificial Sequence
  Description of Artificial Sequence: Synthetic oligonucleotide
aagagcuuacaucggaaau

SEQ ID NO: 2193711 - RNA, 19 nt, Artificial Sequence
  Description of Artificial Sequence: Synthetic oligonucleotide
uagcuaucaaauauugcuc

SEQ ID NO: 2193712 - RNA, 19 nt, Artificial Sequence
  Description of Artificial Sequence: Synthetic oligonucleotide
cauagcuaucaaauauugc

SEQ ID NO: 2193713 - RNA, 19 nt, Artificial Sequence
  Description of Artificial Sequence: Synthetic oligonucleotide
aaguuuaaaucuguuucca

SEQ ID NO: 2193714 - RNA, 19 nt, Artificial Sequence
  Description of Artificial Sequence: Synthetic oligonucleotide
uggauauauggucccuccg

SEQ ID NO: 2193715 - RNA, 19 nt, Artificial Sequence
  Description of Artificial Sequence: Synthetic oligonucleotide
uugggacuaaaccacuaca

SEQ ID NO: 2193716 - RNA, 19 nt, Artificial Sequence
  Description of Artificial Sequence: Synthetic oligonucleotide
agguaaucguaccacuuag

SEQ ID NO: 2193717 - RNA, 19 nt, Artificial Sequence
  Description of Artificial Sequence: Synthetic oligonucleotide
acugaacggcaucuucucc

SEQ ID NO: 2193718 - RNA, 19 nt, Artificial Sequence
  Description of Artificial Sequence: Synthetic oligonucleotide
uacaucggaaauacauagc

SEQ ID NO: 2193719 - RNA, 19 nt, Artificial Sequence
  Description of Artificial Sequence: Synthetic oligonucleotide
uuugcaaacugaacggcau

SEQ ID NO: 2193720 - RNA, 19 nt, Artificial Sequence
  Description of Artificial Sequence: Synthetic oligonucleotide
uguugaugcagguaccuuc

SEQ ID NO: 2193721 - RNA, 19 nt, Artificial Sequence
  Description of Artificial Sequence: Synthetic oligonucleotide
ucauccucagcacaucagu

SEQ ID NO: 2193722 - RNA, 19 nt, Artificial Sequence
  Description of Artificial Sequence: Synthetic oligonucleotide
ggacuaaaccacuacagug

SEQ ID NO: 2193723 - RNA, 19 nt, Artificial Sequence
  Description of Artificial Sequence: Synthetic oligonucleotide
uuugcuacuguuccagaau

SEQ ID NO: 2193724 - RNA, 19 nt, Artificial Sequence
  Description of Artificial Sequence: Synthetic oligonucleotide
uacuuuauugccacuggau

SEQ ID NO: 2193725 - RNA, 19 nt, Artificial Sequence
  Description of Artificial Sequence: Synthetic oligonucleotide
guuauaaaacuucacuucu

SEQ ID NO: 2193726 - RNA, 19 nt, Artificial Sequence
  Description of Artificial Sequence: Synthetic oligonucleotide
uguaccacacgucgcagac

SEQ ID NO: 2193727 - RNA, 19 nt, Artificial Sequence
  Description of Artificial Sequence: Synthetic oligonucleotide
aaguauuguugaugcaggu

SEQ ID NO: 2193728 - RNA, 19 nt, Artificial Sequence
  Description of Artificial Sequence: Synthetic oligonucleotide
acacgucgcagacaauggc

SEQ ID NO: 2193729 - RNA, 19 nt, Artificial Sequence
  Description of Artificial Sequence: Synthetic oligonucleotide
agagacaaucauccaguag

SEQ ID NO: 2193730 - RNA, 19 nt, Artificial Sequence
  Description of Artificial Sequence: Synthetic oligonucleotide
gacuaaaccacuacaguga

SEQ ID NO: 2193731 - RNA, 19 nt, Artificial Sequence
  Description of Artificial Sequence: Synthetic oligonucleotide
aggcucaguuuccaaaagg

SEQ ID NO: 2193732 - RNA, 19 nt, Artificial Sequence
  Description of Artificial Sequence: Synthetic oligonucleotide
auauugcucaugccauugg

SEQ ID NO: 2193733 - RNA, 19 nt, Artificial Sequence
  Description of Artificial Sequence: Synthetic oligonucleotide
caaguagcucaccaugccg

SEQ ID NO: 2193734 - RNA, 19 nt, Artificial Sequence
  Description of Artificial Sequence: Synthetic oligonucleotide
caaaacacguuauaaaacu

SEQ ID NO: 2193735 - RNA, 19 nt, Artificial Sequence
  Description of Artificial Sequence: Synthetic oligonucleotide
ugcuguaauucuucuguug

SEQ ID NO: 2193736 - RNA, 19 nt, Artificial Sequence
  Description of Artificial Sequence: Synthetic oligonucleotide
caagaauccggucuuacca

SEQ ID NO: 2193737 - RNA, 19 nt, Artificial Sequence
  Description of Artificial Sequence: Synthetic oligonucleotide
acuuuauugccacuggaua

SEQ ID NO: 2193738 - RNA, 19 nt, Artificial Sequence
  Description of Artificial Sequence: Synthetic oligonucleotide
gcuuguuucuccuuuaaac

SEQ ID NO: 2193739 - RNA, 19 nt, Artificial Sequence
  Description of Artificial Sequence: Synthetic oligonucleotide
caaaagguaaucguaccac

SEQ ID NO: 2193740 - RNA, 19 nt, Artificial Sequence
  Description of Artificial Sequence: Synthetic oligonucleotide
ucuuaccauucacugaguc

SEQ ID NO: 2193741 - RNA, 19 nt, Artificial Sequence
  Description of Artificial Sequence: Synthetic oligonucleotide
uuuaacccuguuugcaaac

SEQ ID NO: 2193742 - RNA, 19 nt, Artificial Sequence
  Description of Artificial Sequence: Synthetic oligonucleotide
accaugccguauuugcuac

SEQ ID NO: 2193743 - RNA, 19 nt, Artificial Sequence
  Description of Artificial Sequence: Synthetic oligonucleotide
guauuugcuacuguuccag

SEQ ID NO: 2193744 - RNA, 19 nt, Artificial Sequence
  Description of Artificial Sequence: Synthetic oligonucleotide
auaguaagacaguucacuu

SEQ ID NO: 2193745 - RNA, 19 nt, Artificial Sequence
  Description of Artificial Sequence: Synthetic oligonucleotide
uaccacacgucgcagacaa

SEQ ID NO: 2193746 - RNA, 19 nt, Artificial Sequence
  Description of Artificial Sequence: Synthetic oligonucleotide
ugcagguaccuucagggaa

SEQ ID NO: 2193747 - RNA, 19 nt, Artificial Sequence
  Description of Artificial Sequence: Synthetic oligonucleotide
gguuauacuuuauugccac

SEQ ID NO: 2193748 - RNA, 19 nt, Artificial Sequence
  Description of Artificial Sequence: Synthetic oligonucleotide
uaaaggccaguucugggaa

SEQ ID NO: 2193749 - RNA, 19 nt, Artificial Sequence
  Description of Artificial Sequence: Synthetic oligonucleotide
cuuuaaacauguuaaggcu

SEQ ID NO: 2193750 - RNA, 19 nt, Artificial Sequence
  Description of Artificial Sequence: Synthetic oligonucleotide
cagauuuaacccuguuugc

SEQ ID NO: 2193751 - RNA, 19 nt, Artificial Sequence
  Description of Artificial Sequence: Synthetic oligonucleotide
uaaaaggcugggaaaguuu

SEQ ID NO: 2193752 - RNA, 19 nt, Artificial Sequence
  Description of Artificial Sequence: Synthetic oligonucleotide
guuuaaaucuguuuccacu

SEQ ID NO: 2193753 - RNA, 19 nt, Artificial Sequence
  Description of Artificial Sequence: Synthetic oligonucleotide
cuggauauauggucccucc

SEQ ID NO: 2193754 - RNA, 19 nt, Artificial Sequence
  Description of Artificial Sequence: Synthetic oligonucleotide
ucaagagcuuacaucggaa

SEQ ID NO: 2193755 - RNA, 19 nt, Artificial Sequence
  Description of Artificial Sequence: Synthetic oligonucleotide
acagcaauagcagauuuaa

SEQ ID NO: 2193756 - RNA, 19 nt, Artificial Sequence
  Description of Artificial Sequence: Synthetic oligonucleotide
cuguuuccacucaagaauc

SEQ ID NO: 2193757 - RNA, 19 nt, Artificial Sequence
  Description of Artificial Sequence: Synthetic oligonucleotide
aaaggggcaccuguagguc

SEQ ID NO: 2193758 - RNA, 19 nt, Artificial Sequence
  Description of Artificial Sequence: Synthetic oligonucleotide
uuccacucaagaauccggu

SEQ ID NO: 2193759 - RNA, 19 nt, Artificial Sequence
  Description of Artificial Sequence: Synthetic oligonucleotide
cacgucgcagacaauggcc

SEQ ID NO: 2193760 - RNA, 19 nt, Artificial Sequence
  Description of Artificial Sequence: Synthetic oligonucleotide
aaauauugcucaugccauu

SEQ ID NO: 2193761 - RNA, 19 nt, Artificial Sequence
  Description of Artificial Sequence: Synthetic oligonucleotide
auacuuuauugccacugga

SEQ ID NO: 2193762 - RNA, 19 nt, Artificial Sequence
  Description of Artificial Sequence: Synthetic oligonucleotide
caucaugacugaaguauug

SEQ ID NO: 2193763 - RNA, 19 nt, Artificial Sequence
  Description of Artificial Sequence: Synthetic oligonucleotide
caagcuccaaauaauaaua

SEQ ID NO: 2193764 - RNA, 19 nt, Artificial Sequence
  Description of Artificial Sequence: Synthetic oligonucleotide
cagguugggagauccauug

SEQ ID NO: 2193765 - RNA, 19 nt, Artificial Sequence
  Description of Artificial Sequence: Synthetic oligonucleotide
ggucccuccgauuucaaag

SEQ ID NO: 2193766 - RNA, 19 nt, Artificial Sequence
  Description of Artificial Sequence: Synthetic oligonucleotide
uucgaagcaaguagcucac

SEQ ID NO: 2193767 - RNA, 19 nt, Artificial Sequence
  Description of Artificial Sequence: Synthetic oligonucleotide
aaguagcucaccaugccgu

SEQ ID NO: 2193768 - RNA, 19 nt, Artificial Sequence
  Description of Artificial Sequence: Synthetic oligonucleotide
gagcuuacaucggaaauac

SEQ ID NO: 2193769 - RNA, 19 nt, Artificial Sequence
  Description of Artificial Sequence: Synthetic oligonucleotide
aauccggucuuaccauuca

SEQ ID NO: 2193770 - RNA, 19 nt, Artificial Sequence
  Description of Artificial Sequence: Synthetic oligonucleotide
ugcuacuguuccagaaugc

SEQ ID NO: 2193771 - RNA, 19 nt, Artificial Sequence
  Description of Artificial Sequence: Synthetic oligonucleotide
ucauuauucgaagcaagua

SEQ ID NO: 2193772 - RNA, 19 nt, Artificial Sequence
  Description of Artificial Sequence: Synthetic oligonucleotide
gauuaacgauaaauaagca

SEQ ID NO: 2193773 - RNA, 19 nt, Artificial Sequence
  Description of Artificial Sequence: Synthetic oligonucleotide
cuacagugagguugguggg

SEQ ID NO: 2193774 - RNA, 19 nt, Artificial Sequence
  Description of Artificial Sequence: Synthetic oligonucleotide
uccggucuuaccauucacu

SEQ ID NO: 2193775 - RNA, 19 nt, Artificial Sequence
  Description of Artificial Sequence: Synthetic oligonucleotide
agguugggagauccauugc

SEQ ID NO: 2193776 - RNA, 19 nt, Artificial Sequence
  Description of Artificial Sequence: Synthetic oligonucleotide
gggaagauuaauaugggca

SEQ ID NO: 2193777 - RNA, 19 nt, Artificial Sequence
  Description of Artificial Sequence: Synthetic oligonucleotide
gauccauugcccacaauca

SEQ ID NO: 2193778 - RNA, 19 nt, Artificial Sequence
  Description of Artificial Sequence: Synthetic oligonucleotide
uccgucccaaggaaguuca

SEQ ID NO: 2193779 - RNA, 19 nt, Artificial Sequence
  Description of Artificial Sequence: Synthetic oligonucleotide
augggcaacuuuucuuauc

SEQ ID NO: 2193780 - RNA, 19 nt, Artificial Sequence
  Description of Artificial Sequence: Synthetic oligonucleotide
uaaucguaccacuuagguu

SEQ ID NO: 2193781 - RNA, 19 nt, Artificial Sequence
  Description of Artificial Sequence: Synthetic oligonucleotide
cacacgucgcagacaaugg

SEQ ID NO: 2193782 - RNA, 19 nt, Artificial Sequence
  Description of Artificial Sequence: Synthetic oligonucleotide
gaagauuaauaugggcaac

SEQ ID NO: 2193783 - RNA, 19 nt, Artificial Sequence
  Description of Artificial Sequence: Synthetic oligonucleotide
ucugcuuaaaaggcuggga

SEQ ID NO: 2193784 - RNA, 19 nt, Artificial Sequence
  Description of Artificial Sequence: Synthetic oligonucleotide
agcuggucauuauucgaag

SEQ ID NO: 2193785 - RNA, 19 nt, Artificial Sequence
  Description of Artificial Sequence: Synthetic oligonucleotide
cuaaaccacuacagugagg

SEQ ID NO: 2193786 - RNA, 19 nt, Artificial Sequence
  Description of Artificial Sequence: Synthetic oligonucleotide
ccuuguacagcaauagcag

SEQ ID NO: 2193787 - RNA, 19 nt, Artificial Sequence
  Description of Artificial Sequence: Synthetic oligonucleotide
uugagcuaacaaccucaag

SEQ ID NO: 2193788 - RNA, 19 nt, Artificial Sequence
  Description of Artificial Sequence: Synthetic oligonucleotide
ucaugacugaaguauuguu

SEQ ID NO: 2193789 - RNA, 19 nt, Artificial Sequence
  Description of Artificial Sequence: Synthetic oligonucleotide
gguugggagauccauugcc

SEQ ID NO: 2193790 - RNA, 19 nt, Artificial Sequence
  Description of Artificial Sequence: Synthetic oligonucleotide
agcuccaaauaauaauaau

SEQ ID NO: 2193791 - RNA, 19 nt, Artificial Sequence
  Description of Artificial Sequence: Synthetic oligonucleotide
uugggagauccauugccca

SEQ ID NO: 2193792 - RNA, 19 nt, Artificial Sequence
  Description of Artificial Sequence: Synthetic oligonucleotide
uuaaaaggcugggaaaguu

SEQ ID NO: 2193793 - RNA, 19 nt, Artificial Sequence
  Description of Artificial Sequence: Synthetic oligonucleotide
acgucgcagacaauggccc

SEQ ID NO: 2193794 - RNA, 19 nt, Artificial Sequence
  Description of Artificial Sequence: Synthetic oligonucleotide
ucggaaauacauagcuauc

SEQ ID NO: 2193795 - RNA, 19 nt, Artificial Sequence
  Description of Artificial Sequence: Synthetic oligonucleotide
aaacauguuaaggcucagu

SEQ ID NO: 2193796 - RNA, 19 nt, Artificial Sequence
  Description of Artificial Sequence: Synthetic oligonucleotide
guuuccaaaagguaaucgu

SEQ ID NO: 2193797 - RNA, 19 nt, Artificial Sequence
  Description of Artificial Sequence: Synthetic oligonucleotide
ggaagauuaauaugggcaa

SEQ ID NO: 2193798 - RNA, 19 nt, Artificial Sequence
  Description of Artificial Sequence: Synthetic oligonucleotide
guaaucguaccacuuaggu

SEQ ID NO: 2193799 - RNA, 19 nt, Artificial Sequence
  Description of Artificial Sequence: Synthetic oligonucleotide
cuggucauuauucgaagca

SEQ ID NO: 2193800 - RNA, 19 nt, Artificial Sequence
  Description of Artificial Sequence: Synthetic oligonucleotide
auuggacucagagaaugcu

SEQ ID NO: 2193801 - RNA, 19 nt, Artificial Sequence
  Description of Artificial Sequence: Synthetic oligonucleotide
auggucagaaaggggcacc

SEQ ID NO: 2193802 - RNA, 19 nt, Artificial Sequence
  Description of Artificial Sequence: Synthetic oligonucleotide
acacguuauaaaacuucac

SEQ ID NO: 2193803 - RNA, 19 nt, Artificial Sequence
  Description of Artificial Sequence: Synthetic oligonucleotide
uuuaaacaucaugacugaa

SEQ ID NO: 2193804 - RNA, 19 nt, Artificial Sequence
  Description of Artificial Sequence: Synthetic oligonucleotide
auauggucccuccgauuuc

SEQ ID NO: 2193805 - RNA, 19 nt, Artificial Sequence
  Description of Artificial Sequence: Synthetic oligonucleotide
augggaggcauguaccaca

SEQ ID NO: 2193806 - RNA, 19 nt, Artificial Sequence
  Description of Artificial Sequence: Synthetic oligonucleotide
caguucacuuucuguacag

SEQ ID NO: 2193807 - RNA, 19 nt, Artificial Sequence
  Description of Artificial Sequence: Synthetic oligonucleotide
acucagagaaugcuuguuu

SEQ ID NO: 2193808 - RNA, 19 nt, Artificial Sequence
  Description of Artificial Sequence: Synthetic oligonucleotide
uauucgaagcaaguagcuc

SEQ ID NO: 2193809 - RNA, 19 nt, Artificial Sequence
  Description of Artificial Sequence: Synthetic oligonucleotide
acauguuaaggcucaguuu

SEQ ID NO: 2193810 - RNA, 19 nt, Artificial Sequence
  Description of Artificial Sequence: Synthetic oligonucleotide
auccggucuuaccauucac

SEQ ID NO: 2193811 - RNA, 19 nt, Artificial Sequence
  Description of Artificial Sequence: Synthetic oligonucleotide
ucagaaaggggcaccugua

SEQ ID NO: 2193812 - RNA, 19 nt, Artificial Sequence
  Description of Artificial Sequence: Synthetic oligonucleotide
cguuauaaaacuucacuuc

SEQ ID NO: 2193813 - RNA, 19 nt, Artificial Sequence
  Description of Artificial Sequence: Synthetic oligonucleotide
cuuguacagcaauagcaga

SEQ ID NO: 2193814 - RNA, 19 nt, Artificial Sequence
  Description of Artificial Sequence: Synthetic oligonucleotide
uauggucccuccgauuuca

SEQ ID NO: 2193815 - RNA, 19 nt, Artificial Sequence
  Description of Artificial Sequence: Synthetic oligonucleotide
uugccacuggauauauggu

SEQ ID NO: 2193816 - RNA, 19 nt, Artificial Sequence
  Description of Artificial Sequence: Synthetic oligonucleotide
uggucauuauucgaagcaa

SEQ ID NO: 2193817 - RNA, 19 nt, Artificial Sequence
  Description of Artificial Sequence: Synthetic oligonucleotide
ugcuuguuucuccuuuaaa

SEQ ID NO: 2193818 - RNA, 19 nt, Artificial Sequence
  Description of Artificial Sequence: Synthetic oligonucleotide
gaguccacacuauaacaaa

SEQ ID NO: 2193819 - RNA, 19 nt, Artificial Sequence
  Description of Artificial Sequence: Synthetic oligonucleotide
cagcacaucaguccaguuc

SEQ ID NO: 2193820 - RNA, 19 nt, Artificial Sequence
  Description of Artificial Sequence: Synthetic oligonucleotide
cauccucagcacaucaguc

SEQ ID NO: 2193821 - RNA, 19 nt, Artificial Sequence
  Description of Artificial Sequence: Synthetic oligonucleotide
agagcuuacaucggaaaua

SEQ ID NO: 2193822 - RNA, 19 nt, Artificial Sequence
  Description of Artificial Sequence: Synthetic oligonucleotide
cauaguaagacaguucacu

SEQ ID NO: 2193823 - RNA, 19 nt, Artificial Sequence
  Description of Artificial Sequence: Synthetic oligonucleotide
uguacagcaauagcagauu

SEQ ID NO: 2193824 - RNA, 19 nt, Artificial Sequence
  Description of Artificial Sequence: Synthetic oligonucleotide
uaaacauguuaaggcucag

SEQ ID NO: 2193825 - RNA, 19 nt, Artificial Sequence
  Description of Artificial Sequence: Synthetic oligonucleotide
guuccagguugggagaucc

SEQ ID NO: 2193826 - RNA, 19 nt, Artificial Sequence
  Description of Artificial Sequence: Synthetic oligonucleotide
ccguauuugcuacuguucc

SEQ ID NO: 2193827 - RNA, 19 nt, Artificial Sequence
  Description of Artificial Sequence: Synthetic oligonucleotide
caaggaaguucagucaguc

SEQ ID NO: 2193828 - RNA, 19 nt, Artificial Sequence
  Description of Artificial Sequence: Synthetic oligonucleotide
uucacuucuaaaggccagu

SEQ ID NO: 2193829 - RNA, 19 nt, Artificial Sequence
  Description of Artificial Sequence: Synthetic oligonucleotide
gucaugggaggcauguacc

SEQ ID NO: 2193830 - RNA, 19 nt, Artificial Sequence
  Description of Artificial Sequence: Synthetic oligonucleotide
acaguacaacaaaacacgu

SEQ ID NO: 2193831 - RNA, 19 nt, Artificial Sequence
  Description of Artificial Sequence: Synthetic oligonucleotide
caccuuugcucucuucagc

SEQ ID NO: 2193832 - RNA, 19 nt, Artificial Sequence
  Description of Artificial Sequence: Synthetic oligonucleotide
ugggaggcauguaccacac

SEQ ID NO: 2193833 - RNA, 19 nt, Artificial Sequence
  Description of Artificial Sequence: Synthetic oligonucleotide
ggucauuauucgaagcaag

SEQ ID NO: 2193834 - RNA, 19 nt, Artificial Sequence
  Description of Artificial Sequence: Synthetic oligonucleotide
cugcuuaaaaggcugggaa

SEQ ID NO: 2193835 - RNA, 19 nt, Artificial Sequence
  Description of Artificial Sequence: Synthetic oligonucleotide
ggauauauggucccuccga

SEQ ID NO: 2193836 - RNA, 19 nt, Artificial Sequence
  Description of Artificial Sequence: Synthetic oligonucleotide
ugccguauuugcuacuguu

SEQ ID NO: 2193837 - RNA, 19 nt, Artificial Sequence
  Description of Artificial Sequence: Synthetic oligonucleotide
ugggagauccauugcccac

SEQ ID NO: 2193838 - RNA, 19 nt, Artificial Sequence
  Description of Artificial Sequence: Synthetic oligonucleotide
cucaagagcuuacaucgga

SEQ ID NO: 2193839 - RNA, 19 nt, Artificial Sequence
  Description of Artificial Sequence: Synthetic oligonucleotide
agaaaagauuaacgauaaa

SEQ ID NO: 2193840 - RNA, 19 nt, Artificial Sequence
  Description of Artificial Sequence: Synthetic oligonucleotide
gguaaucguaccacuuagg

SEQ ID NO: 2193841 - RNA, 19 nt, Artificial Sequence
  Description of Artificial Sequence: Synthetic oligonucleotide
gauauauggucccuccgau

SEQ ID NO: 2193842 - RNA, 19 nt, Artificial Sequence
  Description of Artificial Sequence: Synthetic oligonucleotide
ucuucagcccuccguccca

SEQ ID NO: 2193843 - RNA, 19 nt, Artificial Sequence
  Description of Artificial Sequence: Synthetic oligonucleotide
guuugcaaacugaacggca

SEQ ID NO: 2193844 - RNA, 19 nt, Artificial Sequence
  Description of Artificial Sequence: Synthetic oligonucleotide
ugccucuggcaugaagagg

SEQ ID NO: 2193845 - RNA, 19 nt, Artificial Sequence
  Description of Artificial Sequence: Synthetic oligonucleotide
gauuaauaugggcaacuuu

SEQ ID NO: 2193846 - RNA, 19 nt, Artificial Sequence
  Description of Artificial Sequence: Synthetic oligonucleotide
ggaggcaagcuccaaauaa

SEQ ID NO: 2193847 - RNA, 19 nt, Artificial Sequence
  Description of Artificial Sequence: Synthetic oligonucleotide
guaauucuucuguuguucu

SEQ ID NO: 2193848 - RNA, 19 nt, Artificial Sequence
  Description of Artificial Sequence: Synthetic oligonucleotide
guagagacaaucauccagu

SEQ ID NO: 2193849 - RNA, 19 nt, Artificial Sequence
  Description of Artificial Sequence: Synthetic oligonucleotide
uuugcucucuucagcccuc

SEQ ID NO: 2193850 - RNA, 19 nt, Artificial Sequence
  Description of Artificial Sequence: Synthetic oligonucleotide
cucuugagcuaacaaccuc

SEQ ID NO: 2193851 - RNA, 19 nt, Artificial Sequence
  Description of Artificial Sequence: Synthetic oligonucleotide
aggguuacucuugagcuaa

SEQ ID NO: 2193852 - RNA, 19 nt, Artificial Sequence
  Description of Artificial Sequence: Synthetic oligonucleotide
gagaaugcuuguuucuccu

SEQ ID NO: 2193853 - RNA, 19 nt, Artificial Sequence
  Description of Artificial Sequence: Synthetic oligonucleotide
ucccuccgauuucaaagcu

SEQ ID NO: 2193854 - RNA, 19 nt, Artificial Sequence
  Description of Artificial Sequence: Synthetic oligonucleotide
uucuuccuuaaaggugucc

SEQ ID NO: 2193855 - RNA, 19 nt, Artificial Sequence
  Description of Artificial Sequence: Synthetic oligonucleotide
uagagacaaucauccagua

SEQ ID NO: 2193856 - RNA, 19 nt, Artificial Sequence
  Description of Artificial Sequence: Synthetic oligonucleotide
caugccguauuugcuacug

SEQ ID NO: 2193857 - RNA, 19 nt, Artificial Sequence
  Description of Artificial Sequence: Synthetic oligonucleotide
aguauuguugaugcaggua

SEQ ID NO: 2193858 - RNA, 19 nt, Artificial Sequence
  Description of Artificial Sequence: Synthetic oligonucleotide
cuucagggaagauuaauau

SEQ ID NO: 2193859 - RNA, 19 nt, Artificial Sequence
  Description of Artificial Sequence: Synthetic oligonucleotide
ugacugaaguauuguugau

SEQ ID NO: 2193860 - RNA, 19 nt, Artificial Sequence
  Description of Artificial Sequence: Synthetic oligonucleotide
aagguguccuucaccuuug

SEQ ID NO: 2193861 - RNA, 19 nt, Artificial Sequence
  Description of Artificial Sequence: Synthetic oligonucleotide
cccuuguacagcaauagca

SEQ ID NO: 2193862 - RNA, 19 nt, Artificial Sequence
  Description of Artificial Sequence: Synthetic oligonucleotide
auauauggucccuccgauu

SEQ ID NO: 2193863 - RNA, 19 nt, Artificial Sequence
  Description of Artificial Sequence: Synthetic oligonucleotide
cagcaauagcagauuuaac

SEQ ID NO: 2193864 - RNA, 19 nt, Artificial Sequence
  Description of Artificial Sequence: Synthetic oligonucleotide
caauagcagauuuaacccu

SEQ ID NO: 2193865 - RNA, 19 nt, Artificial Sequence
  Description of Artificial Sequence: Synthetic oligonucleotide
gccacuggauauauggucc

SEQ ID NO: 2193866 - RNA, 19 nt, Artificial Sequence
  Description of Artificial Sequence: Synthetic oligonucleotide
caagagcuuacaucggaaa

SEQ ID NO: 2193867 - RNA, 19 nt, Artificial Sequence
  Description of Artificial Sequence: Synthetic oligonucleotide
agauuaauaugggcaacuu

SEQ ID NO: 2193868 - RNA, 19 nt, Artificial Sequence
  Description of Artificial Sequence: Synthetic oligonucleotide
aggcugggaaaguuuggga

SEQ ID NO: 2193869 - RNA, 19 nt, Artificial Sequence
  Description of Artificial Sequence: Synthetic oligonucleotide
augcagguaccuucaggga

SEQ ID NO: 2193870 - RNA, 19 nt, Artificial Sequence
  Description of Artificial Sequence: Synthetic oligonucleotide
gaagcaaguagcucaccau

SEQ ID NO: 2193871 - RNA, 19 nt, Artificial Sequence
  Description of Artificial Sequence: Synthetic oligonucleotide
gcaaaagacaguacaacaa

SEQ ID NO: 2193872 - RNA, 19 nt, Artificial Sequence
  Description of Artificial Sequence: Synthetic oligonucleotide
ggaaaguuugggacuaaac

SEQ ID NO: 2193873 - RNA, 19 nt, Artificial Sequence
  Description of Artificial Sequence: Synthetic oligonucleotide
ugcucucuucagcccuccg

SEQ ID NO: 2193874 - RNA, 19 nt, Artificial Sequence
  Description of Artificial Sequence: Synthetic oligonucleotide
gaauccggucuuaccauuc

SEQ ID NO: 2193875 - RNA, 19 nt, Artificial Sequence
  Description of Artificial Sequence: Synthetic oligonucleotide
uagcucaccaugccguauu

SEQ ID NO: 2193876 - RNA, 19 nt, Artificial Sequence
  Description of Artificial Sequence: Synthetic oligonucleotide
uugcuguaauucuucuguu

SEQ ID NO: 2193877 - RNA, 19 nt, Artificial Sequence
  Description of Artificial Sequence: Synthetic oligonucleotide
uccagguugggagauccau

SEQ ID NO: 2193878 - RNA, 19 nt, Artificial Sequence
  Description of Artificial Sequence: Synthetic oligonucleotide
aguuugggacuaaaccacu

SEQ ID NO: 2193879 - RNA, 19 nt, Artificial Sequence
  Description of Artificial Sequence: Synthetic oligonucleotide
cucuggcaugaagagguag

SEQ ID NO: 2193880 - RNA, 19 nt, Artificial Sequence
  Description of Artificial Sequence: Synthetic oligonucleotide
gucagaaaggggcaccugu

SEQ ID NO: 2193881 - RNA, 19 nt, Artificial Sequence
  Description of Artificial Sequence: Synthetic oligonucleotide
uggucagaaaggggcaccu

SEQ ID NO: 2193882 - RNA, 19 nt, Artificial Sequence
  Description of Artificial Sequence: Synthetic oligonucleotide
agacaaucauccaguagaa

SEQ ID NO: 2193883 - RNA, 19 nt, Artificial Sequence
  Description of Artificial Sequence: Synthetic oligonucleotide
uaccauucacugaguccac

SEQ ID NO: 2193884 - RNA, 19 nt, Artificial Sequence
  Description of Artificial Sequence: Synthetic oligonucleotide
ccggucuuaccauucacug

SEQ ID NO: 2193885 - RNA, 19 nt, Artificial Sequence
  Description of Artificial Sequence: Synthetic oligonucleotide
cagcuggucauuauucgaa

SEQ ID NO: 2193886 - RNA, 19 nt, Artificial Sequence
  Description of Artificial Sequence: Synthetic oligonucleotide
agaaugcuuguuucuccuu

SEQ ID NO: 2193887 - RNA, 19 nt, Artificial Sequence
  Description of Artificial Sequence: Synthetic oligonucleotide
ccauuggacucagagaaug

SEQ ID NO: 2193888 - RNA, 19 nt, Artificial Sequence
  Description of Artificial Sequence: Synthetic oligonucleotide
cacaucaguccaguuccag

SEQ ID NO: 2193889 - RNA, 19 nt, Artificial Sequence
  Description of Artificial Sequence: Synthetic oligonucleotide
aaaccacuacagugagguu

SEQ ID NO: 2193890 - RNA, 19 nt, Artificial Sequence
  Description of Artificial Sequence: Synthetic oligonucleotide
gaggcauguaccacacguc

SEQ ID NO: 2193891 - RNA, 19 nt, Artificial Sequence
  Description of Artificial Sequence: Synthetic oligonucleotide
caucggaaauacauagcua

SEQ ID NO: 2193892 - RNA, 19 nt, Artificial Sequence
  Description of Artificial Sequence: Synthetic oligonucleotide
gcuuacaucggaaauacau

SEQ ID NO: 2193893 - RNA, 19 nt, Artificial Sequence
  Description of Artificial Sequence: Synthetic oligonucleotide
gucgcagacaauggcccag

SEQ ID NO: 2193894 - RNA, 19 nt, Artificial Sequence
  Description of Artificial Sequence: Synthetic oligonucleotide
uaacaaccucaagagcuua

SEQ ID NO: 2193895 - RNA, 19 nt, Artificial Sequence
  Description of Artificial Sequence: Synthetic oligonucleotide
gcagguaccuucagggaag

SEQ ID NO: 2193896 - RNA, 19 nt, Artificial Sequence
  Description of Artificial Sequence: Synthetic oligonucleotide
aucguaccacuuagguuuc

SEQ ID NO: 2193897 - RNA, 19 nt, Artificial Sequence
  Description of Artificial Sequence: Synthetic oligonucleotide
gucauuauucgaagcaagu

SEQ ID NO: 2193898 - RNA, 19 nt, Artificial Sequence
  Description of Artificial Sequence: Synthetic oligonucleotide
aguagcucaccaugccgua

SEQ ID NO: 2193899 - RNA, 19 nt, Artificial Sequence
  Description of Artificial Sequence: Synthetic oligonucleotide
cugaaguauuguugaugca

SEQ ID NO: 2193900 - RNA, 19 nt, Artificial Sequence
  Description of Artificial Sequence: Synthetic oligonucleotide
auagcagauuuaacccugu

SEQ ID NO: 2193901 - RNA, 19 nt, Artificial Sequence
  Description of Artificial Sequence: Synthetic oligonucleotide
uagcagauuuaacccuguu

SEQ ID NO: 2193902 - RNA, 19 nt, Artificial Sequence
  Description of Artificial Sequence: Synthetic oligonucleotide
uuccagguugggagaucca

SEQ ID NO: 2193903 - RNA, 19 nt, Artificial Sequence
  Description of Artificial Sequence: Synthetic oligonucleotide
ccaaaagguaaucguacca

SEQ ID NO: 2193904 - RNA, 19 nt, Artificial Sequence
  Description of Artificial Sequence: Synthetic oligonucleotide
aguuccagguugggagauc

SEQ ID NO: 2193905 - RNA, 19 nt, Artificial Sequence
  Description of Artificial Sequence: Synthetic oligonucleotide
agguccugccucuggcaug

SEQ ID NO: 2193906 - RNA, 19 nt, Artificial Sequence
  Description of Artificial Sequence: Synthetic oligonucleotide
guagguccugccucuggca

SEQ ID NO: 2193907 - RNA, 19 nt, Artificial Sequence
  Description of Artificial Sequence: Synthetic oligonucleotide
gcaagcuccaaauaauaau

SEQ ID NO: 2193908 - RNA, 19 nt, Artificial Sequence
  Description of Artificial Sequence: Synthetic oligonucleotide
ucgcagacaauggcccagc

SEQ ID NO: 2193909 - RNA, 19 nt, Artificial Sequence
  Description of Artificial Sequence: Synthetic oligonucleotide
augccguauuugcuacugu

SEQ ID NO: 2193910 - RNA, 19 nt, Artificial Sequence
  Description of Artificial Sequence: Synthetic oligonucleotide
ucgaagcaaguagcucacc

SEQ ID NO: 2193911 - RNA, 19 nt, Artificial Sequence
  Description of Artificial Sequence: Synthetic oligonucleotide
ccacacgucgcagacaaug

SEQ ID NO: 2193912 - RNA, 19 nt, Artificial Sequence
  Description of Artificial Sequence: Synthetic oligonucleotide
uggucccuccgauuucaaa

SEQ ID NO: 2193913 - RNA, 19 nt, Artificial Sequence
  Description of Artificial Sequence: Synthetic oligonucleotide
uuguugaugcagguaccuu

SEQ ID NO: 2193914 - RNA, 19 nt, Artificial Sequence
  Description of Artificial Sequence: Synthetic oligonucleotide
caccaugccguauuugcua

SEQ ID NO: 2193915 - RNA, 19 nt, Artificial Sequence
  Description of Artificial Sequence: Synthetic oligonucleotide
ccacuggauauaugguccc

SEQ ID NO: 2193916 - RNA, 19 nt, Artificial Sequence
  Description of Artificial Sequence: Synthetic oligonucleotide
augcaucaccaaacugggg

SEQ ID NO: 2193917 - RNA, 19 nt, Artificial Sequence
  Description of Artificial Sequence: Synthetic oligonucleotide
ccucaagagcuuacaucgg

SEQ ID NO: 2193918 - RNA, 19 nt, Artificial Sequence
  Description of Artificial Sequence: Synthetic oligonucleotide
gaggcaagcuccaaauaau

SEQ ID NO: 2193919 - RNA, 19 nt, Artificial Sequence
  Description of Artificial Sequence: Synthetic oligonucleotide
aggcaagcuccaaauaaua

SEQ ID NO: 2193920 - RNA, 19 nt, Artificial Sequence
  Description of Artificial Sequence: Synthetic oligonucleotide
cuaacaaccucaagagcuu

SEQ ID NO: 2193921 - RNA, 19 nt, Artificial Sequence
  Description of Artificial Sequence: Synthetic oligonucleotide
acccuguuugcaaacugaa

SEQ ID NO: 2193922 - RNA, 19 nt, Artificial Sequence
  Description of Artificial Sequence: Synthetic oligonucleotide
ugcccacaaucaucuugcu

SEQ ID NO: 2193923 - RNA, 19 nt, Artificial Sequence
  Description of Artificial Sequence: Synthetic oligonucleotide
agcccuccgucccaaggaa

SEQ ID NO: 2193924 - RNA, 19 nt, Artificial Sequence
  Description of Artificial Sequence: Synthetic oligonucleotide
uucagcccuccgucccaag

SEQ ID NO: 2193925 - RNA, 19 nt, Artificial Sequence
  Description of Artificial Sequence: Synthetic oligonucleotide
ggcauguaccacacgucgc

SEQ ID NO: 2193926 - RNA, 19 nt, Artificial Sequence
  Description of Artificial Sequence: Synthetic oligonucleotide
cuccgucccaaggaaguuc

SEQ ID NO: 2193927 - RNA, 19 nt, Artificial Sequence
  Description of Artificial Sequence: Synthetic oligonucleotide
guacagcaauagcagauuu

SEQ ID NO: 2193928 - RNA, 19 nt, Artificial Sequence
  Description of Artificial Sequence: Synthetic oligonucleotide
ggcaagcuccaaauaauaa

SEQ ID NO: 2193929 - RNA, 19 nt, Artificial Sequence
  Description of Artificial Sequence: Synthetic oligonucleotide
gcugggaaaguuugggacu

SEQ ID NO: 2193930 - RNA, 19 nt, Artificial Sequence
  Description of Artificial Sequence: Synthetic oligonucleotide
cccuguuugcaaacugaac

SEQ ID NO: 2193931 - RNA, 19 nt, Artificial Sequence
  Description of Artificial Sequence: Synthetic oligonucleotide
guuugggacuaaaccacua

SEQ ID NO: 2193932 - RNA, 19 nt, Artificial Sequence
  Description of Artificial Sequence: Synthetic oligonucleotide
ggcucaguuuccaaaaggu

SEQ ID NO: 2193933 - RNA, 19 nt, Artificial Sequence
  Description of Artificial Sequence: Synthetic oligonucleotide
agcucaccaugccguauuu

SEQ ID NO: 2193934 - RNA, 19 nt, Artificial Sequence
  Description of Artificial Sequence: Synthetic oligonucleotide
ucaugccauuggacucaga

SEQ ID NO: 2193935 - RNA, 19 nt, Artificial Sequence
  Description of Artificial Sequence: Synthetic oligonucleotide
caguacaacaaaacacguu

SEQ ID NO: 2193936 - RNA, 19 nt, Artificial Sequence
  Description of Artificial Sequence: Synthetic oligonucleotide
gccucuggcaugaagaggu

SEQ ID NO: 2193937 - RNA, 19 nt, Artificial Sequence
  Description of Artificial Sequence: Synthetic oligonucleotide
ccccuuguacagcaauagc

SEQ ID NO: 2193938 - RNA, 19 nt, Artificial Sequence
  Description of Artificial Sequence: Synthetic oligonucleotide
cugggaaaguuugggacua

SEQ ID NO: 2193939 - RNA, 19 nt, Artificial Sequence
  Description of Artificial Sequence: Synthetic oligonucleotide
gccguauuugcuacuguuc

SEQ ID NO: 2193940 - RNA, 19 nt, Artificial Sequence
  Description of Artificial Sequence: Synthetic oligonucleotide
gguuacucuugagcuaaca

SEQ ID NO: 2193941 - RNA, 19 nt, Artificial Sequence
  Description of Artificial Sequence: Synthetic oligonucleotide
cggaaauacauagcuauca

SEQ ID NO: 2193942 - RNA, 19 nt, Artificial Sequence
  Description of Artificial Sequence: Synthetic oligonucleotide
caggguuacucuugagcua

SEQ ID NO: 2193943 - RNA, 19 nt, Artificial Sequence
  Description of Artificial Sequence: Synthetic oligonucleotide
gggagauccauugcccaca

SEQ ID NO: 2193944 - RNA, 19 nt, Artificial Sequence
  Description of Artificial Sequence: Synthetic oligonucleotide
ugggaaaguuugggacuaa

SEQ ID NO: 2193945 - RNA, 19 nt, Artificial Sequence
  Description of Artificial Sequence: Synthetic oligonucleotide
gguaccuucagggaagauu

SEQ ID NO: 2193946 - RNA, 19 nt, Artificial Sequence
  Description of Artificial Sequence: Synthetic oligonucleotide
agcuuacaucggaaauaca

SEQ ID NO: 2193947 - RNA, 19 nt, Artificial Sequence
  Description of Artificial Sequence: Synthetic oligonucleotide
acucaagaauccggucuua

SEQ ID NO: 2193948 - RNA, 19 nt, Artificial Sequence
  Description of Artificial Sequence: Synthetic oligonucleotide
gcuaucaaauauugcucau

SEQ ID NO: 2193949 - RNA, 19 nt, Artificial Sequence
  Description of Artificial Sequence: Synthetic oligonucleotide
cuggucaugggaggcaugu

SEQ ID NO: 2193950 - RNA, 19 nt, Artificial Sequence
  Description of Artificial Sequence: Synthetic oligonucleotide
caaccucaagagcuuacau

SEQ ID NO: 2193951 - RNA, 19 nt, Artificial Sequence
  Description of Artificial Sequence: Synthetic oligonucleotide
ccacucaagaauccggucu

SEQ ID NO: 2193952 - RNA, 19 nt, Artificial Sequence
  Description of Artificial Sequence: Synthetic oligonucleotide
gacucagagaaugcuuguu

SEQ ID NO: 2193953 - RNA, 19 nt, Artificial Sequence
  Description of Artificial Sequence: Synthetic oligonucleotide
ucguaccacuuagguuucu

SEQ ID NO: 2193954 - RNA, 19 nt, Artificial Sequence
  Description of Artificial Sequence: Synthetic oligonucleotide
ggagauccauugcccacaa

SEQ ID NO: 2193955 - RNA, 19 nt, Artificial Sequence
  Description of Artificial Sequence: Synthetic oligonucleotide
guaccacacgucgcagaca

SEQ ID NO: 2193956 - RNA, 19 nt, Artificial Sequence
  Description of Artificial Sequence: Synthetic oligonucleotide
gcucaguuuccaaaaggua

SEQ ID NO: 2193957 - RNA, 19 nt, Artificial Sequence
  Description of Artificial Sequence: Synthetic oligonucleotide
cguauuugcuacuguucca

SEQ ID NO: 2193958 - RNA, 19 nt, Artificial Sequence
  Description of Artificial Sequence: Synthetic oligonucleotide
gggaaaguuugggacuaaa

SEQ ID NO: 2193959 - RNA, 19 nt, Artificial Sequence
  Description of Artificial Sequence: Synthetic oligonucleotide
gcucaccaugccguauuug

SEQ ID NO: 2193960 - RNA, 19 nt, Artificial Sequence
  Description of Artificial Sequence: Synthetic oligonucleotide
cagguaccuucagggaaga

SEQ ID NO: 2193961 - RNA, 19 nt, Artificial Sequence
  Description of Artificial Sequence: Synthetic oligonucleotide
gcucucuucagcccuccgu

SEQ ID NO: 2193962 - RNA, 19 nt, Artificial Sequence
  Description of Artificial Sequence: Synthetic oligonucleotide
cguaccacuuagguuucug

SEQ ID NO: 2193963 - RNA, 19 nt, Artificial Sequence
  Description of Artificial Sequence: Synthetic oligonucleotide
cggucuuaccauucacuga

SEQ ID NO: 2193964 - RNA, 19 nt, Artificial Sequence
  Description of Artificial Sequence: Synthetic oligonucleotide
gucuuaccauucacugagu

SEQ ID NO: 2193965 - RNA, 19 nt, Artificial Sequence
  Description of Artificial Sequence: Synthetic oligonucleotide
guagcucaccaugccguau

SEQ ID NO: 2193966 - RNA, 19 nt, Artificial Sequence
  Description of Artificial Sequence: Synthetic oligonucleotide
gcccuccgucccaaggaag

SEQ ID NO: 2193967 - RNA, 19 nt, Artificial Sequence
  Description of Artificial Sequence: Synthetic oligonucleotide
gagauccauugcccacaau

SEQ ID NO: 2193968 - RNA, 19 nt, Artificial Sequence
  Description of Artificial Sequence: Synthetic oligonucleotide
ccaaggaaguucagucagu

SEQ ID NO: 2193969 - RNA, 19 nt, Artificial Sequence
  Description of Artificial Sequence: Synthetic oligonucleotide
ccgucccaaggaaguucag

SEQ ID NO: 2193970 - RNA, 19 nt, Artificial Sequence
  Description of Artificial Sequence: Synthetic oligonucleotide
ggguuacucuugagcuaac

SEQ ID NO: 2193971 - RNA, 19 nt, Artificial Sequence
  Description of Artificial Sequence: Synthetic oligonucleotide
caguuccagguugggagau

SEQ ID NO: 2193972 - RNA, 19 nt, Artificial Sequence
  Description of Artificial Sequence: Synthetic oligonucleotide
accacacgucgcagacaau

SEQ ID NO: 2193973 - RNA, 19 nt, Artificial Sequence
  Description of Artificial Sequence: Synthetic oligonucleotide
cgucgcagacaauggccca

SEQ ID NO: 2193974 - RNA, 19 nt, Artificial Sequence
  Description of Artificial Sequence: Synthetic oligonucleotide
gcaaacugaacggcaucuu

SEQ ID NO: 2193975 - RNA, 19 nt, Artificial Sequence
  Description of Artificial Sequence: Synthetic oligonucleotide
ccagguugggagauccauu

SEQ ID NO: 2193976 - RNA, 19 nt, Artificial Sequence
  Description of Artificial Sequence: Synthetic oligonucleotide
gccauuggacucagagaau

SEQ ID NO: 2193977 - RNA, 19 nt, Artificial Sequence
  Description of Artificial Sequence: Synthetic oligonucleotide
cccuccgauuucaaagcuu

SEQ ID NO: 2193978 - RNA, 19 nt, Artificial Sequence
  Description of Artificial Sequence: Synthetic oligonucleotide
ccaugccguauuugcuacu

SEQ ID NO: 2193979 - RNA, 19 nt, Artificial Sequence
  Description of Artificial Sequence: Synthetic oligonucleotide
uacguuaugauccuaacag

SEQ ID NO: 2193980 - RNA, 19 nt, Artificial Sequence
  Description of Artificial Sequence: Synthetic oligonucleotide
aacgaacauaauuuuaugg

SEQ ID NO: 2193981 - RNA, 19 nt, Artificial Sequence
  Description of Artificial Sequence: Synthetic oligonucleotide
uaugaaauagcaacgaaca

SEQ ID NO: 2193982 - RNA, 19 nt, Artificial Sequence
  Description of Artificial Sequence: Synthetic oligonucleotide
aacgaaacccucuggaagc

SEQ ID NO: 2193983 - RNA, 19 nt, Artificial Sequence
  Description of Artificial Sequence: Synthetic oligonucleotide
aauagcaacgaacauaauu

SEQ ID NO: 2193984 - RNA, 19 nt, Artificial Sequence
  Description of Artificial Sequence: Synthetic oligonucleotide
gaaacuaagggccucgcgg

SEQ ID NO: 2193985 - RNA, 19 nt, Artificial Sequence
  Description of Artificial Sequence: Synthetic oligonucleotide
uuaugaaauagcaacgaac

SEQ ID NO: 2193986 - RNA, 19 nt, Artificial Sequence
  Description of Artificial Sequence: Synthetic oligonucleotide
ucuuugcgcagcaagaggg

SEQ ID NO: 2193987 - RNA, 19 nt, Artificial Sequence
  Description of Artificial Sequence: Synthetic oligonucleotide
auuugcaggguccaggcgc

SEQ ID NO: 2193988 - RNA, 19 nt, Artificial Sequence
  Description of Artificial Sequence: Synthetic oligonucleotide
agcucaauggcuuucgugg

SEQ ID NO: 2193989 - RNA, 19 nt, Artificial Sequence
  Description of Artificial Sequence: Synthetic oligonucleotide
uugaccuuugcguagagcc

SEQ ID NO: 2193990 - RNA, 19 nt, Artificial Sequence
  Description of Artificial Sequence: Synthetic oligonucleotide
ucuaucaggagccuucucc

SEQ ID NO: 2193991 - RNA, 19 nt, Artificial Sequence
  Description of Artificial Sequence: Synthetic oligonucleotide
cuacgguucacccagaagc

SEQ ID NO: 2193992 - RNA, 19 nt, Artificial Sequence
  Description of Artificial Sequence: Synthetic oligonucleotide
aaacuaagggccucgcggg

SEQ ID NO: 2193993 - RNA, 19 nt, Artificial Sequence
  Description of Artificial Sequence: Synthetic oligonucleotide
uuaugauccuaacaguagc

SEQ ID NO: 2193994 - RNA, 19 nt, Artificial Sequence
  Description of Artificial Sequence: Synthetic oligonucleotide
acguggauagccuaugcgc

SEQ ID NO: 2193995 - RNA, 19 nt, Artificial Sequence
  Description of Artificial Sequence: Synthetic oligonucleotide
aaugccaucaugaaacgug

SEQ ID NO: 2193996 - RNA, 19 nt, Artificial Sequence
  Description of Artificial Sequence: Synthetic oligonucleotide
acgaacauaauuuuauggu

SEQ ID NO: 2193997 - RNA, 19 nt, Artificial Sequence
  Description of Artificial Sequence: Synthetic oligonucleotide
aaacguggauagccuaugc

SEQ ID NO: 2193998 - RNA, 19 nt, Artificial Sequence
  Description of Artificial Sequence: Synthetic oligonucleotide
aacguggauagccuaugcg

SEQ ID NO: 2193999 - RNA, 19 nt, Artificial Sequence
  Description of Artificial Sequence: Synthetic oligonucleotide
agagaugucugugaaggcc

SEQ ID NO: 2194000 - RNA, 19 nt, Artificial Sequence
  Description of Artificial Sequence: Synthetic oligonucleotide
uugaagacgugccaggcgc

SEQ ID NO: 2194001 - RNA, 19 nt, Artificial Sequence
  Description of Artificial Sequence: Synthetic oligonucleotide
gaugcggccacauuugcag

SEQ ID NO: 2194002 - RNA, 19 nt, Artificial Sequence
  Description of Artificial Sequence: Synthetic oligonucleotide
gauccuaacaguagcaaag

SEQ ID NO: 2194003 - RNA, 19 nt, Artificial Sequence
  Description of Artificial Sequence: Synthetic oligonucleotide
gaacgaaacccucuggaag

SEQ ID NO: 2194004 - RNA, 19 nt, Artificial Sequence
  Description of Artificial Sequence: Synthetic oligonucleotide
ucaugaaacguggauagcc

SEQ ID NO: 2194005 - RNA, 19 nt, Artificial Sequence
  Description of Artificial Sequence: Synthetic oligonucleotide
uuugaagacgugccaggcg

SEQ ID NO: 2194006 - RNA, 19 nt, Artificial Sequence
  Description of Artificial Sequence: Synthetic oligonucleotide
gaaccagugcucuaucagg

SEQ ID NO: 2194007 - RNA, 19 nt, Artificial Sequence
  Description of Artificial Sequence: Synthetic oligonucleotide
uaugauccuaacaguagca

SEQ ID NO: 2194008 - RNA, 19 nt, Artificial Sequence
  Description of Artificial Sequence: Synthetic oligonucleotide
uccccguggaaacuaaggg

SEQ ID NO: 2194009 - RNA, 19 nt, Artificial Sequence
  Description of Artificial Sequence: Synthetic oligonucleotide
uuacguuaugauccuaaca

SEQ ID NO: 2194010 - RNA, 19 nt, Artificial Sequence
  Description of Artificial Sequence: Synthetic oligonucleotide
auagcaacgaacauaauuu

SEQ ID NO: 2194011 - RNA, 19 nt, Artificial Sequence
  Description of Artificial Sequence: Synthetic oligonucleotide
aaguccuugggucuagaga

SEQ ID NO: 2194012 - RNA, 19 nt, Artificial Sequence
  Description of Artificial Sequence: Synthetic oligonucleotide
uuggcuuugggauccagca

SEQ ID NO: 2194013 - RNA, 19 nt, Artificial Sequence
  Description of Artificial Sequence: Synthetic oligonucleotide
ucuaggucggggcacacga

SEQ ID NO: 2194014 - RNA, 19 nt, Artificial Sequence
  Description of Artificial Sequence: Synthetic oligonucleotide
uguggaagcagauggcaca

SEQ ID NO: 2194015 - RNA, 19 nt, Artificial Sequence
  Description of Artificial Sequence: Synthetic oligonucleotide
acagccucuccauugauga

SEQ ID NO: 2194016 - RNA, 19 nt, Artificial Sequence
  Description of Artificial Sequence: Synthetic oligonucleotide
uuugcaggguccaggcgcg

SEQ ID NO: 2194017 - RNA, 19 nt, Artificial Sequence
  Description of Artificial Sequence: Synthetic oligonucleotide
guacacauccaucaccgcc

SEQ ID NO: 2194018 - RNA, 19 nt, Artificial Sequence
  Description of Artificial Sequence: Synthetic oligonucleotide
guuaugauccuaacaguag

SEQ ID NO: 2194019 - RNA, 19 nt, Artificial Sequence
  Description of Artificial Sequence: Synthetic oligonucleotide
agauggcacacuccucucc

SEQ ID NO: 2194020 - RNA, 19 nt, Artificial Sequence
  Description of Artificial Sequence: Synthetic oligonucleotide
acaugagggacuguauuac

SEQ ID NO: 2194021 - RNA, 19 nt, Artificial Sequence
  Description of Artificial Sequence: Synthetic oligonucleotide
uuuacguuaugauccuaac

SEQ ID NO: 2194022 - RNA, 19 nt, Artificial Sequence
  Description of Artificial Sequence: Synthetic oligonucleotide
cucagcguuggccucaggg

SEQ ID NO: 2194023 - RNA, 19 nt, Artificial Sequence
  Description of Artificial Sequence: Synthetic oligonucleotide
auauuuacguuaugauccu

SEQ ID NO: 2194024 - RNA, 19 nt, Artificial Sequence
  Description of Artificial Sequence: Synthetic oligonucleotide
cugaugugacuucagacuc

SEQ ID NO: 2194025 - RNA, 19 nt, Artificial Sequence
  Description of Artificial Sequence: Synthetic oligonucleotide
aagggcggcaggcaggaug

SEQ ID NO: 2194026 - RNA, 19 nt, Artificial Sequence
  Description of Artificial Sequence: Synthetic oligonucleotide
acccauuagccucggcucc

SEQ ID NO: 2194027 - RNA, 19 nt, Artificial Sequence
  Description of Artificial Sequence: Synthetic oligonucleotide
ucagcguuggccucagggc

SEQ ID NO: 2194028 - RNA, 19 nt, Artificial Sequence
  Description of Artificial Sequence: Synthetic oligonucleotide
ucuacgguucacccagaag

SEQ ID NO: 2194029 - RNA, 19 nt, Artificial Sequence
  Description of Artificial Sequence: Synthetic oligonucleotide
cuggucauccagaugcacc

SEQ ID NO: 2194030 - RNA, 19 nt, Artificial Sequence
  Description of Artificial Sequence: Synthetic oligonucleotide
agcagcgcugcccacgugg

SEQ ID NO: 2194031 - RNA, 19 nt, Artificial Sequence
  Description of Artificial Sequence: Synthetic oligonucleotide
caggcuucagugaagguuc

SEQ ID NO: 2194032 - RNA, 19 nt, Artificial Sequence
  Description of Artificial Sequence: Synthetic oligonucleotide
agccuaugcgcugugcucc

SEQ ID NO: 2194033 - RNA, 19 nt, Artificial Sequence
  Description of Artificial Sequence: Synthetic oligonucleotide
auccagaugcaccugugug

SEQ ID NO: 2194034 - RNA, 19 nt, Artificial Sequence
  Description of Artificial Sequence: Synthetic oligonucleotide
ugauccuaacaguagcaaa

SEQ ID NO: 2194035 - RNA, 19 nt, Artificial Sequence
  Description of Artificial Sequence: Synthetic oligonucleotide
ugguacagccucuccauug

SEQ ID NO: 2194036 - RNA, 19 nt, Artificial Sequence
  Description of Artificial Sequence: Synthetic oligonucleotide
ugaaacguggauagccuau

SEQ ID NO: 2194037 - RNA, 19 nt, Artificial Sequence
  Description of Artificial Sequence: Synthetic oligonucleotide
ugaagguuccacagccacc

SEQ ID NO: 2194038 - RNA, 19 nt, Artificial Sequence
  Description of Artificial Sequence: Synthetic oligonucleotide
aaugaggcggguguuggca

SEQ ID NO: 2194039 - RNA, 19 nt, Artificial Sequence
  Description of Artificial Sequence: Synthetic oligonucleotide
caacgaacauaauuuuaug

SEQ ID NO: 2194040 - RNA, 19 nt, Artificial Sequence
  Description of Artificial Sequence: Synthetic oligonucleotide
acgaacgaaacccucugga

SEQ ID NO: 2194041 - RNA, 19 nt, Artificial Sequence
  Description of Artificial Sequence: Synthetic oligonucleotide
ugcacgaacgaaacccucu

SEQ ID NO: 2194042 - RNA, 19 nt, Artificial Sequence
  Description of Artificial Sequence: Synthetic oligonucleotide
ugcucuaucaggagccuuc

SEQ ID NO: 2194043 - RNA, 19 nt, Artificial Sequence
  Description of Artificial Sequence: Synthetic oligonucleotide
ugcggccacauuugcaggg

SEQ ID NO: 2194044 - RNA, 19 nt, Artificial Sequence
  Description of Artificial Sequence: Synthetic oligonucleotide
auagccuaugcgcugugcu

SEQ ID NO: 2194045 - RNA, 19 nt, Artificial Sequence
  Description of Artificial Sequence: Synthetic oligonucleotide
gaggcgggcacccauuagc

SEQ ID NO: 2194046 - RNA, 19 nt, Artificial Sequence
  Description of Artificial Sequence: Synthetic oligonucleotide
gucuuugcgcagcaagagg

SEQ ID NO: 2194047 - RNA, 19 nt, Artificial Sequence
  Description of Artificial Sequence: Synthetic oligonucleotide
aggaugcggccacauuugc

SEQ ID NO: 2194048 - RNA, 19 nt, Artificial Sequence
  Description of Artificial Sequence: Synthetic oligonucleotide
uucguggucccguacacau

SEQ ID NO: 2194049 - RNA, 19 nt, Artificial Sequence
  Description of Artificial Sequence: Synthetic oligonucleotide
guccucuugucgcagcacg

SEQ ID NO: 2194050 - RNA, 19 nt, Artificial Sequence
  Description of Artificial Sequence: Synthetic oligonucleotide
cucacggggcaccucagcg

SEQ ID NO: 2194051 - RNA, 19 nt, Artificial Sequence
  Description of Artificial Sequence: Synthetic oligonucleotide
cuuugcgcagcaagagggg

SEQ ID NO: 2194052 - RNA, 19 nt, Artificial Sequence
  Description of Artificial Sequence: Synthetic oligonucleotide
cagcgcuacacgcucaccg

SEQ ID NO: 2194053 - RNA, 19 nt, Artificial Sequence
  Description of Artificial Sequence: Synthetic oligonucleotide
acguuaugauccuaacagu

SEQ ID NO: 2194054 - RNA, 19 nt, Artificial Sequence
  Description of Artificial Sequence: Synthetic oligonucleotide
aucaugaaacguggauagc

SEQ ID NO: 2194055 - RNA, 19 nt, Artificial Sequence
  Description of Artificial Sequence: Synthetic oligonucleotide
agaccacauucccugcacg

SEQ ID NO: 2194056 - RNA, 19 nt, Artificial Sequence
  Description of Artificial Sequence: Synthetic oligonucleotide
cuggccgugucuuugaaga

SEQ ID NO: 2194057 - RNA, 19 nt, Artificial Sequence
  Description of Artificial Sequence: Synthetic oligonucleotide
gaccuuugcguagagccag

SEQ ID NO: 2194058 - RNA, 19 nt, Artificial Sequence
  Description of Artificial Sequence: Synthetic oligonucleotide
uucccugcacgaacgaaac

SEQ ID NO: 2194059 - RNA, 19 nt, Artificial Sequence
  Description of Artificial Sequence: Synthetic oligonucleotide
aggcgcgugaagcccacgc

SEQ ID NO: 2194060 - RNA, 19 nt, Artificial Sequence
  Description of Artificial Sequence: Synthetic oligonucleotide
agcgcuacacgcucaccgg

SEQ ID NO: 2194061 - RNA, 19 nt, Artificial Sequence
  Description of Artificial Sequence: Synthetic oligonucleotide
cucuccauugaugauccag

SEQ ID NO: 2194062 - RNA, 19 nt, Artificial Sequence
  Description of Artificial Sequence: Synthetic oligonucleotide
aaccagugcucuaucagga

SEQ ID NO: 2194063 - RNA, 19 nt, Artificial Sequence
  Description of Artificial Sequence: Synthetic oligonucleotide
agcguugaccuuugcguag

SEQ ID NO: 2194064 - RNA, 19 nt, Artificial Sequence
  Description of Artificial Sequence: Synthetic oligonucleotide
gaaacccucuggaagcagc

SEQ ID NO: 2194065 - RNA, 19 nt, Artificial Sequence
  Description of Artificial Sequence: Synthetic oligonucleotide
augagggacuguauuacag

SEQ ID NO: 2194066 - RNA, 19 nt, Artificial Sequence
  Description of Artificial Sequence: Synthetic oligonucleotide
ugcgcagcaagaggggacg

SEQ ID NO: 2194067 - RNA, 19 nt, Artificial Sequence
  Description of Artificial Sequence: Synthetic oligonucleotide
agcgcugcccacguggggc

SEQ ID NO: 2194068 - RNA, 19 nt, Artificial Sequence
  Description of Artificial Sequence: Synthetic oligonucleotide
caccgggccacacuggacg

SEQ ID NO: 2194069 - RNA, 19 nt, Artificial Sequence
  Description of Artificial Sequence: Synthetic oligonucleotide
agccgcagaagugugagug

SEQ ID NO: 2194070 - RNA, 19 nt, Artificial Sequence
  Description of Artificial Sequence: Synthetic oligonucleotide
aacccucuggaagcagcgc

SEQ ID NO: 2194071 - RNA, 19 nt, Artificial Sequence
  Description of Artificial Sequence: Synthetic oligonucleotide
ccguacacauccaucaccg

SEQ ID NO: 2194072 - RNA, 19 nt, Artificial Sequence
  Description of Artificial Sequence: Synthetic oligonucleotide
gcucugcucuucuaggucg

SEQ ID NO: 2194073 - RNA, 19 nt, Artificial Sequence
  Description of Artificial Sequence: Synthetic oligonucleotide
uggcuuugggauccagcag

SEQ ID NO: 2194074 - RNA, 19 nt, Artificial Sequence
  Description of Artificial Sequence: Synthetic oligonucleotide
gaaacguggauagccuaug

SEQ ID NO: 2194075 - RNA, 19 nt, Artificial Sequence
  Description of Artificial Sequence: Synthetic oligonucleotide
uuggcaggguuguggaagc

SEQ ID NO: 2194076 - RNA, 19 nt, Artificial Sequence
  Description of Artificial Sequence: Synthetic oligonucleotide
cugccagcggcacaugggg

SEQ ID NO: 2194077 - RNA, 19 nt, Artificial Sequence
  Description of Artificial Sequence: Synthetic oligonucleotide
gucccguacacauccauca

SEQ ID NO: 2194078 - RNA, 19 nt, Artificial Sequence
  Description of Artificial Sequence: Synthetic oligonucleotide
auuuacguuaugauccuaa

SEQ ID NO: 2194079 - RNA, 19 nt, Artificial Sequence
  Description of Artificial Sequence: Synthetic oligonucleotide
uugagaaccagugcucuau

SEQ ID NO: 2194080 - RNA, 19 nt, Artificial Sequence
  Description of Artificial Sequence: Synthetic oligonucleotide
gagaugucugugaaggcca

SEQ ID NO: 2194081 - RNA, 19 nt, Artificial Sequence
  Description of Artificial Sequence: Synthetic oligonucleotide
uccucuugucgcagcacgc

SEQ ID NO: 2194082 - RNA, 19 nt, Artificial Sequence
  Description of Artificial Sequence: Synthetic oligonucleotide
ccagaagcagaccacauuc

SEQ ID NO: 2194083 - RNA, 19 nt, Artificial Sequence
  Description of Artificial Sequence: Synthetic oligonucleotide
uagcaacgaacauaauuuu

SEQ ID NO: 2194084 - RNA, 19 nt, Artificial Sequence
  Description of Artificial Sequence: Synthetic oligonucleotide
ugaggcggguguuggcagg

SEQ ID NO: 2194085 - RNA, 19 nt, Artificial Sequence
  Description of Artificial Sequence: Synthetic oligonucleotide
acgcuggcugaacacaaug

SEQ ID NO: 2194086 - RNA, 19 nt, Artificial Sequence
  Description of Artificial Sequence: Synthetic oligonucleotide
uggcacacuccucuccuga

SEQ ID NO: 2194087 - RNA, 19 nt, Artificial Sequence
  Description of Artificial Sequence: Synthetic oligonucleotide
ucaaucugccagcggcaca

SEQ ID NO: 2194088 - RNA, 19 nt, Artificial Sequence
  Description of Artificial Sequence: Synthetic oligonucleotide
uugcguagagccagccucu

SEQ ID NO: 2194089 - RNA, 19 nt, Artificial Sequence
  Description of Artificial Sequence: Synthetic oligonucleotide
caccuccucaaucugccag

SEQ ID NO: 2194090 - RNA, 19 nt, Artificial Sequence
  Description of Artificial Sequence: Synthetic oligonucleotide
caagaggggacggccagcg

SEQ ID NO: 2194091 - RNA, 19 nt, Artificial Sequence
  Description of Artificial Sequence: Synthetic oligonucleotide
cacccauuagccucggcuc

SEQ ID NO: 2194092 - RNA, 19 nt, Artificial Sequence
  Description of Artificial Sequence: Synthetic oligonucleotide
gccucuacgguucacccag

SEQ ID NO: 2194093 - RNA, 19 nt, Artificial Sequence
  Description of Artificial Sequence: Synthetic oligonucleotide
ggaaacuaagggccucgcg

SEQ ID NO: 2194094 - RNA, 19 nt, Artificial Sequence
  Description of Artificial Sequence: Synthetic oligonucleotide
ugaagacgugccaggcgca

SEQ ID NO: 2194095 - RNA, 19 nt, Artificial Sequence
  Description of Artificial Sequence: Synthetic oligonucleotide
gugaagcccacgcggaggc

SEQ ID NO: 2194096 - RNA, 19 nt, Artificial Sequence
  Description of Artificial Sequence: Synthetic oligonucleotide
caaguccuugggucuagag

SEQ ID NO: 2194097 - RNA, 19 nt, Artificial Sequence
  Description of Artificial Sequence: Synthetic oligonucleotide
caggaugcggccacauuug

SEQ ID NO: 2194098 - RNA, 19 nt, Artificial Sequence
  Description of Artificial Sequence: Synthetic oligonucleotide
cacgaacgaaacccucugg

SEQ ID NO: 2194099 - RNA, 19 nt, Artificial Sequence
  Description of Artificial Sequence: Synthetic oligonucleotide
guggaaacuaagggccucg

SEQ ID NO: 2194100 - RNA, 19 nt, Artificial Sequence
  Description of Artificial Sequence: Synthetic oligonucleotide
cuuucguggucccguacac

SEQ ID NO: 2194101 - RNA, 19 nt, Artificial Sequence
  Description of Artificial Sequence: Synthetic oligonucleotide
aguggcauccccguggaaa

SEQ ID NO: 2194102 - RNA, 19 nt, Artificial Sequence
  Description of Artificial Sequence: Synthetic oligonucleotide
gaagguuccacagccaccu

SEQ ID NO: 2194103 - RNA, 19 nt, Artificial Sequence
  Description of Artificial Sequence: Synthetic oligonucleotide
augaggcggguguuggcag

SEQ ID NO: 2194104 - RNA, 19 nt, Artificial Sequence
  Description of Artificial Sequence: Synthetic oligonucleotide
acuggacgcuggcugaaca

SEQ ID NO: 2194105 - RNA, 19 nt, Artificial Sequence
  Description of Artificial Sequence: Synthetic oligonucleotide
augaaacguggauagccua

SEQ ID NO: 2194106 - RNA, 19 nt, Artificial Sequence
  Description of Artificial Sequence: Synthetic oligonucleotide
aagguuccacagccaccuc

SEQ ID NO: 2194107 - RNA, 19 nt, Artificial Sequence
  Description of Artificial Sequence: Synthetic oligonucleotide
aagacgugccaggcgcagg

SEQ ID NO: 2194108 - RNA, 19 nt, Artificial Sequence
  Description of Artificial Sequence: Synthetic oligonucleotide
aggcguuggcuuugggauc

SEQ ID NO: 2194109 - RNA, 19 nt, Artificial Sequence
  Description of Artificial Sequence: Synthetic oligonucleotide
ugaggcgggcacccauuag

SEQ ID NO: 2194110 - RNA, 19 nt, Artificial Sequence
  Description of Artificial Sequence: Synthetic oligonucleotide
uagccucggcuccuccugg

SEQ ID NO: 2194111 - RNA, 19 nt, Artificial Sequence
  Description of Artificial Sequence: Synthetic oligonucleotide
uucuaggucggggcacacg

SEQ ID NO: 2194112 - RNA, 19 nt, Artificial Sequence
  Description of Artificial Sequence: Synthetic oligonucleotide
accagccguccucuugucg

SEQ ID NO: 2194113 - RNA, 19 nt, Artificial Sequence
  Description of Artificial Sequence: Synthetic oligonucleotide
cacgcgcagcgcuacacgc

SEQ ID NO: 2194114 - RNA, 19 nt, Artificial Sequence
  Description of Artificial Sequence: Synthetic oligonucleotide
augcggccacauuugcagg

SEQ ID NO: 2194115 - RNA, 19 nt, Artificial Sequence
  Description of Artificial Sequence: Synthetic oligonucleotide
cagccucuacgguucaccc

SEQ ID NO: 2194116 - RNA, 19 nt, Artificial Sequence
  Description of Artificial Sequence: Synthetic oligonucleotide
agacgugccaggcgcagga

SEQ ID NO: 2194117 - RNA, 19 nt, Artificial Sequence
  Description of Artificial Sequence: Synthetic oligonucleotide
guggcauccccguggaaac

SEQ ID NO: 2194118 - RNA, 19 nt, Artificial Sequence
  Description of Artificial Sequence: Synthetic oligonucleotide
agaggggacggccagcguu

SEQ ID NO: 2194119 - RNA, 19 nt, Artificial Sequence
  Description of Artificial Sequence: Synthetic oligonucleotide
uggacgcuggcugaacaca

SEQ ID NO: 2194120 - RNA, 19 nt, Artificial Sequence
  Description of Artificial Sequence: Synthetic oligonucleotide
cguagagccagccucuacg

SEQ ID NO: 2194121 - RNA, 19 nt, Artificial Sequence
  Description of Artificial Sequence: Synthetic oligonucleotide
gagcggggcgcccuggacc

SEQ ID NO: 2194122 - RNA, 19 nt, Artificial Sequence
  Description of Artificial Sequence: Synthetic oligonucleotide
ucccguacacauccaucac

SEQ ID NO: 2194123 - RNA, 19 nt, Artificial Sequence
  Description of Artificial Sequence: Synthetic oligonucleotide
ggaagcagauggcacacuc

SEQ ID NO: 2194124 - RNA, 19 nt, Artificial Sequence
  Description of Artificial Sequence: Synthetic oligonucleotide
ggaccagcacgucuuugcg

SEQ ID NO: 2194125 - RNA, 19 nt, Artificial Sequence
  Description of Artificial Sequence: Synthetic oligonucleotide
uagccuaugcgcugugcuc

SEQ ID NO: 2194126 - RNA, 19 nt, Artificial Sequence
  Description of Artificial Sequence: Synthetic oligonucleotide
gaagacgugccaggcgcag

SEQ ID NO: 2194127 - RNA, 19 nt, Artificial Sequence
  Description of Artificial Sequence: Synthetic oligonucleotide
cccugcacgaacgaaaccc

SEQ ID NO: 2194128 - RNA, 19 nt, Artificial Sequence
  Description of Artificial Sequence: Synthetic oligonucleotide
gccagcguugaccuuugcg

SEQ ID NO: 2194129 - RNA, 19 nt, Artificial Sequence
  Description of Artificial Sequence: Synthetic oligonucleotide
ucacggggcaccucagcgu

SEQ ID NO: 2194130 - RNA, 19 nt, Artificial Sequence
  Description of Artificial Sequence: Synthetic oligonucleotide
gauggcacacuccucuccu

SEQ ID NO: 2194131 - RNA, 19 nt, Artificial Sequence
  Description of Artificial Sequence: Synthetic oligonucleotide
cuggacgcuggcugaacac

SEQ ID NO: 2194132 - RNA, 19 nt, Artificial Sequence
  Description of Artificial Sequence: Synthetic oligonucleotide
auucccugcacgaacgaaa

SEQ ID NO: 2194133 - RNA, 19 nt, Artificial Sequence
  Description of Artificial Sequence: Synthetic oligonucleotide
ucccugcacgaacgaaacc

SEQ ID NO: 2194134 - RNA, 19 nt, Artificial Sequence
  Description of Artificial Sequence: Synthetic oligonucleotide
uagagccagccucuacggu

SEQ ID NO: 2194135 - RNA, 19 nt, Artificial Sequence
  Description of Artificial Sequence: Synthetic oligonucleotide
caugaaacguggauagccu

SEQ ID NO: 2194136 - RNA, 19 nt, Artificial Sequence
  Description of Artificial Sequence: Synthetic oligonucleotide
uggaaacuaagggccucgc

SEQ ID NO: 2194137 - RNA, 19 nt, Artificial Sequence
  Description of Artificial Sequence: Synthetic oligonucleotide
agcacgcgcagcgcuacac

SEQ ID NO: 2194138 - RNA, 19 nt, Artificial Sequence
  Description of Artificial Sequence: Synthetic oligonucleotide
agcaacgaacauaauuuua

SEQ ID NO: 2194139 - RNA, 19 nt, Artificial Sequence
  Description of Artificial Sequence: Synthetic oligonucleotide
uuucguggucccguacaca

SEQ ID NO: 2194140 - RNA, 19 nt, Artificial Sequence
  Description of Artificial Sequence: Synthetic oligonucleotide
ccagugcucuaucaggagc

SEQ ID NO: 2194141 - RNA, 19 nt, Artificial Sequence
  Description of Artificial Sequence: Synthetic oligonucleotide
ccccguggaaacuaagggc

SEQ ID NO: 2194142 - RNA, 19 nt, Artificial Sequence
  Description of Artificial Sequence: Synthetic oligonucleotide
ggccgugucuuugaagacg

SEQ ID NO: 2194143 - RNA, 19 nt, Artificial Sequence
  Description of Artificial Sequence: Synthetic oligonucleotide
ccagccguccucuugucgc

SEQ ID NO: 2194144 - RNA, 19 nt, Artificial Sequence
  Description of Artificial Sequence: Synthetic oligonucleotide
uccucuccugaugugacuu

SEQ ID NO: 2194145 - RNA, 19 nt, Artificial Sequence
  Description of Artificial Sequence: Synthetic oligonucleotide
ggggcucugcucuucuagg

SEQ ID NO: 2194146 - RNA, 19 nt, Artificial Sequence
  Description of Artificial Sequence: Synthetic oligonucleotide
aggucggggcacacgaagg

SEQ ID NO: 2194147 - RNA, 19 nt, Artificial Sequence
  Description of Artificial Sequence: Synthetic oligonucleotide
guguuggcaggguugugga

SEQ ID NO: 2194148 - RNA, 19 nt, Artificial Sequence
  Description of Artificial Sequence: Synthetic oligonucleotide
guugaccuuugcguagagc

SEQ ID NO: 2194149 - RNA, 19 nt, Artificial Sequence
  Description of Artificial Sequence: Synthetic oligonucleotide
gaggggacggccagcguug

SEQ ID NO: 2194150 - RNA, 19 nt, Artificial Sequence
  Description of Artificial Sequence: Synthetic oligonucleotide
cauccccguggaaacuaag

SEQ ID NO: 2194151 - RNA, 19 nt, Artificial Sequence
  Description of Artificial Sequence: Synthetic oligonucleotide
ggucuagagaugucuguga

SEQ ID NO: 2194152 - RNA, 19 nt, Artificial Sequence
  Description of Artificial Sequence: Synthetic oligonucleotide
agcacgucuuugcgcagca

SEQ ID NO: 2194153 - RNA, 19 nt, Artificial Sequence
  Description of Artificial Sequence: Synthetic oligonucleotide
gaggcggguguuggcaggg

SEQ ID NO: 2194154 - RNA, 19 nt, Artificial Sequence
  Description of Artificial Sequence: Synthetic oligonucleotide
ggccucagggcugaggcgg

SEQ ID NO: 2194155 - RNA, 19 nt, Artificial Sequence
  Description of Artificial Sequence: Synthetic oligonucleotide
uggucccguacacauccau

SEQ ID NO: 2194156 - RNA, 19 nt, Artificial Sequence
  Description of Artificial Sequence: Synthetic oligonucleotide
gggcacaaguccuuggguc

SEQ ID NO: 2194157 - RNA, 19 nt, Artificial Sequence
  Description of Artificial Sequence: Synthetic oligonucleotide
uauuuacguuaugauccua

SEQ ID NO: 2194158 - RNA, 19 nt, Artificial Sequence
  Description of Artificial Sequence: Synthetic oligonucleotide
guggaagcagauggcacac

SEQ ID NO: 2194159 - RNA, 19 nt, Artificial Sequence
  Description of Artificial Sequence: Synthetic oligonucleotide
gguacagccucuccauuga

SEQ ID NO: 2194160 - RNA, 19 nt, Artificial Sequence
  Description of Artificial Sequence: Synthetic oligonucleotide
acgguucacccagaagcag

SEQ ID NO: 2194161 - RNA, 19 nt, Artificial Sequence
  Description of Artificial Sequence: Synthetic oligonucleotide
agccucuacgguucaccca

SEQ ID NO: 2194162 - RNA, 19 nt, Artificial Sequence
  Description of Artificial Sequence: Synthetic oligonucleotide
ggagccgcagaagugugag

SEQ ID NO: 2194163 - RNA, 19 nt, Artificial Sequence
  Description of Artificial Sequence: Synthetic oligonucleotide
ccagaugcaccugugugcc

SEQ ID NO: 2194164 - RNA, 19 nt, Artificial Sequence
  Description of Artificial Sequence: Synthetic oligonucleotide
gcgcgugaagcccacgcgg

SEQ ID NO: 2194165 - RNA, 19 nt, Artificial Sequence
  Description of Artificial Sequence: Synthetic oligonucleotide
uguuggcaggguuguggaa

SEQ ID NO: 2194166 - RNA, 19 nt, Artificial Sequence
  Description of Artificial Sequence: Synthetic oligonucleotide
acagggaaugaggcgggug

SEQ ID NO: 2194167 - RNA, 19 nt, Artificial Sequence
  Description of Artificial Sequence: Synthetic oligonucleotide
gaagcagaccacauucccu

SEQ ID NO: 2194168 - RNA, 19 nt, Artificial Sequence
  Description of Artificial Sequence: Synthetic oligonucleotide
acgucuuugcgcagcaaga

SEQ ID NO: 2194169 - RNA, 19 nt, Artificial Sequence
  Description of Artificial Sequence: Synthetic oligonucleotide
gaagcccacgcggaggcca

SEQ ID NO: 2194170 - RNA, 19 nt, Artificial Sequence
  Description of Artificial Sequence: Synthetic oligonucleotide
auggcacacuccucuccug

SEQ ID NO: 2194171 - RNA, 19 nt, Artificial Sequence
  Description of Artificial Sequence: Synthetic oligonucleotide
cccguacacauccaucacc

SEQ ID NO: 2194172 - RNA, 19 nt, Artificial Sequence
  Description of Artificial Sequence: Synthetic oligonucleotide
accuuugcguagagccagc

SEQ ID NO: 2194173 - RNA, 19 nt, Artificial Sequence
  Description of Artificial Sequence: Synthetic oligonucleotide
gguccaggcgcgugaagcc

SEQ ID NO: 2194174 - RNA, 19 nt, Artificial Sequence
  Description of Artificial Sequence: Synthetic oligonucleotide
caucaccgcccagagcggg

SEQ ID NO: 2194175 - RNA, 19 nt, Artificial Sequence
  Description of Artificial Sequence: Synthetic oligonucleotide
gcacgaacgaaacccucug

SEQ ID NO: 2194176 - RNA, 19 nt, Artificial Sequence
  Description of Artificial Sequence: Synthetic oligonucleotide
gaugauccaggcguuggcu

SEQ ID NO: 2194177 - RNA, 19 nt, Artificial Sequence
  Description of Artificial Sequence: Synthetic oligonucleotide
aagcccacgcggaggccac

SEQ ID NO: 2194178 - RNA, 19 nt, Artificial Sequence
  Description of Artificial Sequence: Synthetic oligonucleotide
gguuguggaagcagauggc

SEQ ID NO: 2194179 - RNA, 19 nt, Artificial Sequence
  Description of Artificial Sequence: Synthetic oligonucleotide
accugugugccaguggcau

SEQ ID NO: 2194180 - RNA, 19 nt, Artificial Sequence
  Description of Artificial Sequence: Synthetic oligonucleotide
caggcguuggcuuugggau

SEQ ID NO: 2194181 - RNA, 19 nt, Artificial Sequence
  Description of Artificial Sequence: Synthetic oligonucleotide
agggacuguauuacagggu

SEQ ID NO: 2194182 - RNA, 19 nt, Artificial Sequence
  Description of Artificial Sequence: Synthetic oligonucleotide
ucaccgggccacacuggac

SEQ ID NO: 2194183 - RNA, 19 nt, Artificial Sequence
  Description of Artificial Sequence: Synthetic oligonucleotide
acacuccucuccugaugug

SEQ ID NO: 2194184 - RNA, 19 nt, Artificial Sequence
  Description of Artificial Sequence: Synthetic oligonucleotide
cgugucuuugaagacgugc

SEQ ID NO: 2194185 - RNA, 19 nt, Artificial Sequence
  Description of Artificial Sequence: Synthetic oligonucleotide
aaauagcaacgaacauaau

SEQ ID NO: 2194186 - RNA, 19 nt, Artificial Sequence
  Description of Artificial Sequence: Synthetic oligonucleotide
ggcguuggcuuugggaucc

SEQ ID NO: 2194187 - RNA, 19 nt, Artificial Sequence
  Description of Artificial Sequence: Synthetic oligonucleotide
cacgcggaggccaccgcac

SEQ ID NO: 2194188 - RNA, 19 nt, Artificial Sequence
  Description of Artificial Sequence: Synthetic oligonucleotide
gcaacgaacauaauuuuau

SEQ ID NO: 2194189 - RNA, 19 nt, Artificial Sequence
  Description of Artificial Sequence: Synthetic oligonucleotide
acgaaacccucuggaagca

SEQ ID NO: 2194190 - RNA, 19 nt, Artificial Sequence
  Description of Artificial Sequence: Synthetic oligonucleotide
cacacuccucuccugaugu

SEQ ID NO: 2194191 - RNA, 19 nt, Artificial Sequence
  Description of Artificial Sequence: Synthetic oligonucleotide
gggacggccagcguugacc

SEQ ID NO: 2194192 - RNA, 19 nt, Artificial Sequence
  Description of Artificial Sequence: Synthetic oligonucleotide
gcuuucguggucccguaca

SEQ ID NO: 2194193 - RNA, 19 nt, Artificial Sequence
  Description of Artificial Sequence: Synthetic oligonucleotide
agugcucuaucaggagccu

SEQ ID NO: 2194194 - RNA, 19 nt, Artificial Sequence
  Description of Artificial Sequence: Synthetic oligonucleotide
ucguggucccguacacauc

SEQ ID NO: 2194195 - RNA, 19 nt, Artificial Sequence
  Description of Artificial Sequence: Synthetic oligonucleotide
gaagcagcgcugcccacgu

SEQ ID NO: 2194196 - RNA, 19 nt, Artificial Sequence
  Description of Artificial Sequence: Synthetic oligonucleotide
cguuaugauccuaacagua

SEQ ID NO: 2194197 - RNA, 19 nt, Artificial Sequence
  Description of Artificial Sequence: Synthetic oligonucleotide
gcgcuacacgcucaccggg

SEQ ID NO: 2194198 - RNA, 19 nt, Artificial Sequence
  Description of Artificial Sequence: Synthetic oligonucleotide
gggacuguauuacaggguu

SEQ ID NO: 2194199 - RNA, 19 nt, Artificial Sequence
  Description of Artificial Sequence: Synthetic oligonucleotide
cucggcuccuccuggggca

SEQ ID NO: 2194200 - RNA, 19 nt, Artificial Sequence
  Description of Artificial Sequence: Synthetic oligonucleotide
cacaaguccuugggucuag

SEQ ID NO: 2194201 - RNA, 19 nt, Artificial Sequence
  Description of Artificial Sequence: Synthetic oligonucleotide
cucaccgggccacacugga

SEQ ID NO: 2194202 - RNA, 19 nt, Artificial Sequence
  Description of Artificial Sequence: Synthetic oligonucleotide
cagggaaugaggcgggugu

SEQ ID NO: 2194203 - RNA, 19 nt, Artificial Sequence
  Description of Artificial Sequence: Synthetic oligonucleotide
gcgggcacccauuagccuc

SEQ ID NO: 2194204 - RNA, 19 nt, Artificial Sequence
  Description of Artificial Sequence: Synthetic oligonucleotide
ugcaggguccaggcgcgug

SEQ ID NO: 2194205 - RNA, 19 nt, Artificial Sequence
  Description of Artificial Sequence: Synthetic oligonucleotide
cucuccugaugugacuuca

SEQ ID NO: 2194206 - RNA, 19 nt, Artificial Sequence
  Description of Artificial Sequence: Synthetic oligonucleotide
aggccaccgcaccagccgu

SEQ ID NO: 2194207 - RNA, 19 nt, Artificial Sequence
  Description of Artificial Sequence: Synthetic oligonucleotide
ggccacauuugcagggucc

SEQ ID NO: 2194208 - RNA, 19 nt, Artificial Sequence
  Description of Artificial Sequence: Synthetic oligonucleotide
guccaggcgcgugaagccc

SEQ ID NO: 2194209 - RNA, 19 nt, Artificial Sequence
  Description of Artificial Sequence: Synthetic oligonucleotide
cucuaucaggagccuucuc

SEQ ID NO: 2194210 - RNA, 19 nt, Artificial Sequence
  Description of Artificial Sequence: Synthetic oligonucleotide
acggccagcguugaccuuu

SEQ ID NO: 2194211 - RNA, 19 nt, Artificial Sequence
  Description of Artificial Sequence: Synthetic oligonucleotide
ggacuguauuacaggguug

SEQ ID NO: 2194212 - RNA, 19 nt, Artificial Sequence
  Description of Artificial Sequence: Synthetic oligonucleotide
cagcguugaccuuugcgua

SEQ ID NO: 2194213 - RNA, 19 nt, Artificial Sequence
  Description of Artificial Sequence: Synthetic oligonucleotide
ugugugccaguggcauccc

SEQ ID NO: 2194214 - RNA, 19 nt, Artificial Sequence
  Description of Artificial Sequence: Synthetic oligonucleotide
agcguuggccucagggcug

SEQ ID NO: 2194215 - RNA, 19 nt, Artificial Sequence
  Description of Artificial Sequence: Synthetic oligonucleotide
gcacgcgcagcgcuacacg

SEQ ID NO: 2194216 - RNA, 19 nt, Artificial Sequence
  Description of Artificial Sequence: Synthetic oligonucleotide
ggcacaaguccuugggucu

SEQ ID NO: 2194217 - RNA, 19 nt, Artificial Sequence
  Description of Artificial Sequence: Synthetic oligonucleotide
gcacccauuagccucggcu

SEQ ID NO: 2194218 - RNA, 19 nt, Artificial Sequence
  Description of Artificial Sequence: Synthetic oligonucleotide
ugaagcccacgcggaggcc

SEQ ID NO: 2194219 - RNA, 19 nt, Artificial Sequence
  Description of Artificial Sequence: Synthetic oligonucleotide
aggguccaggcgcgugaag

SEQ ID NO: 2194220 - RNA, 19 nt, Artificial Sequence
  Description of Artificial Sequence: Synthetic oligonucleotide
auccaggcguuggcuuugg

SEQ ID NO: 2194221 - RNA, 19 nt, Artificial Sequence
  Description of Artificial Sequence: Synthetic oligonucleotide
gugugccaguggcaucccc

SEQ ID NO: 2194222 - RNA, 19 nt, Artificial Sequence
  Description of Artificial Sequence: Synthetic oligonucleotide
gacgugccaggcgcaggag

SEQ ID NO: 2194223 - RNA, 19 nt, Artificial Sequence
  Description of Artificial Sequence: Synthetic oligonucleotide
gggaaugaggcggguguug

SEQ ID NO: 2194224 - RNA, 19 nt, Artificial Sequence
  Description of Artificial Sequence: Synthetic oligonucleotide
gcacacgaagggcggcagg

SEQ ID NO: 2194225 - RNA, 19 nt, Artificial Sequence
  Description of Artificial Sequence: Synthetic oligonucleotide
caccgcaccagccguccuc

SEQ ID NO: 2194226 - RNA, 19 nt, Artificial Sequence
  Description of Artificial Sequence: Synthetic oligonucleotide
acgcucaccgggccacacu

SEQ ID NO: 2194227 - RNA, 19 nt, Artificial Sequence
  Description of Artificial Sequence: Synthetic oligonucleotide
gcucuucuaggucggggca

SEQ ID NO: 2194228 - RNA, 19 nt, Artificial Sequence
  Description of Artificial Sequence: Synthetic oligonucleotide
ccgcagaagugugaguggc

SEQ ID NO: 2194229 - RNA, 19 nt, Artificial Sequence
  Description of Artificial Sequence: Synthetic oligonucleotide
cuuugggauccagcagcuc

SEQ ID NO: 2194230 - RNA, 19 nt, Artificial Sequence
  Description of Artificial Sequence: Synthetic oligonucleotide
cagcguuggccucagggcu

SEQ ID NO: 2194231 - RNA, 19 nt, Artificial Sequence
  Description of Artificial Sequence: Synthetic oligonucleotide
cucuacgguucacccagaa

SEQ ID NO: 2194232 - RNA, 19 nt, Artificial Sequence
  Description of Artificial Sequence: Synthetic oligonucleotide
uggcuuucguggucccgua

SEQ ID NO: 2194233 - RNA, 19 nt, Artificial Sequence
  Description of Artificial Sequence: Synthetic oligonucleotide
cagcgcugcccacgugggg

SEQ ID NO: 2194234 - RNA, 19 nt, Artificial Sequence
  Description of Artificial Sequence: Synthetic oligonucleotide
ccaggcguuggcuuuggga

SEQ ID NO: 2194235 - RNA, 19 nt, Artificial Sequence
  Description of Artificial Sequence: Synthetic oligonucleotide
gggcaccucagcguuggcc

SEQ ID NO: 2194236 - RNA, 19 nt, Artificial Sequence
  Description of Artificial Sequence: Synthetic oligonucleotide
ggauagccuaugcgcugug

SEQ ID NO: 2194237 - RNA, 19 nt, Artificial Sequence
  Description of Artificial Sequence: Synthetic oligonucleotide
gcgugaagcccacgcggag

SEQ ID NO: 2194238 - RNA, 19 nt, Artificial Sequence
  Description of Artificial Sequence: Synthetic oligonucleotide
cauucccugcacgaacgaa

SEQ ID NO: 2194239 - RNA, 19 nt, Artificial Sequence
  Description of Artificial Sequence: Synthetic oligonucleotide
ggucccguacacauccauc

SEQ ID NO: 2194240 - RNA, 19 nt, Artificial Sequence
  Description of Artificial Sequence: Synthetic oligonucleotide
cuucuaggucggggcacac

SEQ ID NO: 2194241 - RNA, 19 nt, Artificial Sequence
  Description of Artificial Sequence: Synthetic oligonucleotide
agggaaugaggcggguguu

SEQ ID NO: 2194242 - RNA, 19 nt, Artificial Sequence
  Description of Artificial Sequence: Synthetic oligonucleotide
accuggccgugucuuugaa

SEQ ID NO: 2194243 - RNA, 19 nt, Artificial Sequence
  Description of Artificial Sequence: Synthetic oligonucleotide
agccguccucuugucgcag

SEQ ID NO: 2194244 - RNA, 19 nt, Artificial Sequence
  Description of Artificial Sequence: Synthetic oligonucleotide
cauugaugauccaggcguu

SEQ ID NO: 2194245 - RNA, 19 nt, Artificial Sequence
  Description of Artificial Sequence: Synthetic oligonucleotide
ccaucaccgcccagagcgg

SEQ ID NO: 2194246 - RNA, 19 nt, Artificial Sequence
  Description of Artificial Sequence: Synthetic oligonucleotide
gaugcaccugugugccagu

SEQ ID NO: 2194247 - RNA, 19 nt, Artificial Sequence
  Description of Artificial Sequence: Synthetic oligonucleotide
gagccuucuccaggcuuca

SEQ ID NO: 2194248 - RNA, 19 nt, Artificial Sequence
  Description of Artificial Sequence: Synthetic oligonucleotide
cuaggucggggcacacgaa

SEQ ID NO: 2194249 - RNA, 19 nt, Artificial Sequence
  Description of Artificial Sequence: Synthetic oligonucleotide
ugcguagagccagccucua

SEQ ID NO: 2194250 - RNA, 19 nt, Artificial Sequence
  Description of Artificial Sequence: Synthetic oligonucleotide
cgcagaagugugaguggcc

SEQ ID NO: 2194251 - RNA, 19 nt, Artificial Sequence
  Description of Artificial Sequence: Synthetic oligonucleotide
cgaacauaauuuuaugguu

SEQ ID NO: 2194252 - RNA, 19 nt, Artificial Sequence
  Description of Artificial Sequence: Synthetic oligonucleotide
agccagccucuacgguuca

SEQ ID NO: 2194253 - RNA, 19 nt, Artificial Sequence
  Description of Artificial Sequence: Synthetic oligonucleotide
ggcacacgaagggcggcag

SEQ ID NO: 2194254 - RNA, 19 nt, Artificial Sequence
  Description of Artificial Sequence: Synthetic oligonucleotide
cagccguccucuugucgca

SEQ ID NO: 2194255 - RNA, 19 nt, Artificial Sequence
  Description of Artificial Sequence: Synthetic oligonucleotide
ccuuugcguagagccagcc

SEQ ID NO: 2194256 - RNA, 19 nt, Artificial Sequence
  Description of Artificial Sequence: Synthetic oligonucleotide
ggaugcggccacauuugca

SEQ ID NO: 2194257 - RNA, 19 nt, Artificial Sequence
  Description of Artificial Sequence: Synthetic oligonucleotide
ggcgcaggagccgcagaag

SEQ ID NO: 2194258 - RNA, 19 nt, Artificial Sequence
  Description of Artificial Sequence: Synthetic oligonucleotide
ggcuuucguggucccguac

SEQ ID NO: 2194259 - RNA, 19 nt, Artificial Sequence
  Description of Artificial Sequence: Synthetic oligonucleotide
caaugccaucaugaaacgu

SEQ ID NO: 2194260 - RNA, 19 nt, Artificial Sequence
  Description of Artificial Sequence: Synthetic oligonucleotide
cguacacauccaucaccgc

SEQ ID NO: 2194261 - RNA, 19 nt, Artificial Sequence
  Description of Artificial Sequence: Synthetic oligonucleotide
cgcuacacgcucaccgggc

SEQ ID NO: 2194262 - RNA, 19 nt, Artificial Sequence
  Description of Artificial Sequence: Synthetic oligonucleotide
acacuggacgcuggcugaa

SEQ ID NO: 2194263 - RNA, 19 nt, Artificial Sequence
  Description of Artificial Sequence: Synthetic oligonucleotide
acgcgcagcgcuacacgcu

SEQ ID NO: 2194264 - RNA, 19 nt, Artificial Sequence
  Description of Artificial Sequence: Synthetic oligonucleotide
ggacggccagcguugaccu

SEQ ID NO: 2194265 - RNA, 19 nt, Artificial Sequence
  Description of Artificial Sequence: Synthetic oligonucleotide
gcaggguccaggcgcguga

SEQ ID NO: 2194266 - RNA, 19 nt, Artificial Sequence
  Description of Artificial Sequence: Synthetic oligonucleotide
agggccucgcgggccucac

SEQ ID NO: 2194267 - RNA, 19 nt, Artificial Sequence
  Description of Artificial Sequence: Synthetic oligonucleotide
cgaacgaaacccucuggaa

SEQ ID NO: 2194268 - RNA, 19 nt, Artificial Sequence
  Description of Artificial Sequence: Synthetic oligonucleotide
gcaagaggggacggccagc

SEQ ID NO: 2194269 - RNA, 19 nt, Artificial Sequence
  Description of Artificial Sequence: Synthetic oligonucleotide
cuaagggccucgcgggccu

SEQ ID NO: 2194270 - RNA, 19 nt, Artificial Sequence
  Description of Artificial Sequence: Synthetic oligonucleotide
cagaugcaccugugugcca

SEQ ID NO: 2194271 - RNA, 19 nt, Artificial Sequence
  Description of Artificial Sequence: Synthetic oligonucleotide
cugaggcgggcacccauua

SEQ ID NO: 2194272 - RNA, 19 nt, Artificial Sequence
  Description of Artificial Sequence: Synthetic oligonucleotide
cgcucaccgggccacacug

SEQ ID NO: 2194273 - RNA, 19 nt, Artificial Sequence
  Description of Artificial Sequence: Synthetic oligonucleotide
cacgcucaccgggccacac

SEQ ID NO: 2194274 - RNA, 19 nt, Artificial Sequence
  Description of Artificial Sequence: Synthetic oligonucleotide
gcucaccgggccacacugg

SEQ ID NO: 2194275 - RNA, 19 nt, Artificial Sequence
  Description of Artificial Sequence: Synthetic oligonucleotide
gccguccucuugucgcagc

SEQ ID NO: 2194276 - RNA, 19 nt, Artificial Sequence
  Description of Artificial Sequence: Synthetic oligonucleotide
ggacgcuggcugaacacaa

SEQ ID NO: 2194277 - RNA, 19 nt, Artificial Sequence
  Description of Artificial Sequence: Synthetic oligonucleotide
gcguagagccagccucuac

SEQ ID NO: 2194278 - RNA, 19 nt, Artificial Sequence
  Description of Artificial Sequence: Synthetic oligonucleotide
cccacguggggcucugcuc

SEQ ID NO: 2194279 - RNA, 19 nt, Artificial Sequence
  Description of Artificial Sequence: Synthetic oligonucleotide
gagccgcagaagugugagu

SEQ ID NO: 2194280 - RNA, 19 nt, Artificial Sequence
  Description of Artificial Sequence: Synthetic oligonucleotide
gccgugucuuugaagacgu

SEQ ID NO: 2194281 - RNA, 19 nt, Artificial Sequence
  Description of Artificial Sequence: Synthetic oligonucleotide
gcguugaccuuugcguaga

SEQ ID NO: 2194282 - RNA, 19 nt, Artificial Sequence
  Description of Artificial Sequence: Synthetic oligonucleotide
ccagcacgucuuugcgcag

SEQ ID NO: 2194283 - RNA, 19 nt, Artificial Sequence
  Description of Artificial Sequence: Synthetic oligonucleotide
ccuggggcacaaguccuug

SEQ ID NO: 2194284 - RNA, 19 nt, Artificial Sequence
  Description of Artificial Sequence: Synthetic oligonucleotide
cuccucuccugaugugacu

SEQ ID NO: 2194285 - RNA, 19 nt, Artificial Sequence
  Description of Artificial Sequence: Synthetic oligonucleotide
caggcgcgugaagcccacg

SEQ ID NO: 2194286 - RNA, 19 nt, Artificial Sequence
  Description of Artificial Sequence: Synthetic oligonucleotide
gugaguggccacagggaau

SEQ ID NO: 2194287 - RNA, 19 nt, Artificial Sequence
  Description of Artificial Sequence: Synthetic oligonucleotide
gcccacgcggaggccaccg

SEQ ID NO: 2194288 - RNA, 19 nt, Artificial Sequence
  Description of Artificial Sequence: Synthetic oligonucleotide
ccugcacgaacgaaacccu

SEQ ID NO: 2194289 - RNA, 19 nt, Artificial Sequence
  Description of Artificial Sequence: Synthetic oligonucleotide
aggggacggccagcguuga

SEQ ID NO: 2194290 - RNA, 19 nt, Artificial Sequence
  Description of Artificial Sequence: Synthetic oligonucleotide
gugcuccucuggucaucca

SEQ ID NO: 2194291 - RNA, 19 nt, Artificial Sequence
  Description of Artificial Sequence: Synthetic oligonucleotide
ggcauccccguggaaacua

SEQ ID NO: 2194292 - RNA, 19 nt, Artificial Sequence
  Description of Artificial Sequence: Synthetic oligonucleotide
cacggggcaccucagcguu

SEQ ID NO: 2194293 - RNA, 19 nt, Artificial Sequence
  Description of Artificial Sequence: Synthetic oligonucleotide
uaagggccucgcgggccuc

SEQ ID NO: 2194294 - RNA, 19 nt, Artificial Sequence
  Description of Artificial Sequence: Synthetic oligonucleotide
gcgcagcaagaggggacgg

SEQ ID NO: 2194295 - RNA, 19 nt, Artificial Sequence
  Description of Artificial Sequence: Synthetic oligonucleotide
gacgcuggcugaacacaau

SEQ ID NO: 2194296 - RNA, 19 nt, Artificial Sequence
  Description of Artificial Sequence: Synthetic oligonucleotide
cguggaaacuaagggccuc

SEQ ID NO: 2194297 - RNA, 19 nt, Artificial Sequence
  Description of Artificial Sequence: Synthetic oligonucleotide
ggggcacacgaagggcggc

SEQ ID NO: 2194298 - RNA, 19 nt, Artificial Sequence
  Description of Artificial Sequence: Synthetic oligonucleotide
acggggcaccucagcguug

SEQ ID NO: 2194299 - RNA, 19 nt, Artificial Sequence
  Description of Artificial Sequence: Synthetic oligonucleotide
cguugaccuuugcguagag

SEQ ID NO: 2194300 - RNA, 19 nt, Artificial Sequence
  Description of Artificial Sequence: Synthetic oligonucleotide
gcagcgcuacacgcucacc

SEQ ID NO: 2194301 - RNA, 19 nt, Artificial Sequence
  Description of Artificial Sequence: Synthetic oligonucleotide
cgcgcagcgcuacacgcuc

SEQ ID NO: 2194302 - RNA, 19 nt, Artificial Sequence
  Description of Artificial Sequence: Synthetic oligonucleotide
gcgcugugcuccucugguc

SEQ ID NO: 2194303 - RNA, 19 nt, Artificial Sequence
  Description of Artificial Sequence: Synthetic oligonucleotide
ccaggcuucagugaagguu

SEQ ID NO: 2194304 - RNA, 19 nt, Artificial Sequence
  Description of Artificial Sequence: Synthetic oligonucleotide
ccgugucuuugaagacgug

SEQ ID NO: 2194305 - RNA, 19 nt, Artificial Sequence
  Description of Artificial Sequence: Synthetic oligonucleotide
ccaggcgcgugaagcccac

SEQ ID NO: 2194306 - RNA, 19 nt, Artificial Sequence
  Description of Artificial Sequence: Synthetic oligonucleotide
gcacaaguccuugggucua

SEQ ID NO: 2194307 - RNA, 19 nt, Artificial Sequence
  Description of Artificial Sequence: Synthetic oligonucleotide
cgcgugaagcccacgcgga

SEQ ID NO: 2194308 - RNA, 19 nt, Artificial Sequence
  Description of Artificial Sequence: Synthetic oligonucleotide
ccguccucuugucgcagca

SEQ ID NO: 2194309 - RNA, 19 nt, Artificial Sequence
  Description of Artificial Sequence: Synthetic oligonucleotide
ccacgcggaggccaccgca

SEQ ID NO: 2194310 - RNA, 19 nt, Artificial Sequence
  Description of Artificial Sequence: Synthetic oligonucleotide
ggccagcguugaccuuugc

SEQ ID NO: 2194311 - RNA, 19 nt, Artificial Sequence
  Description of Artificial Sequence: Synthetic oligonucleotide
ggggacggccagcguugac

SEQ ID NO: 2194312 - RNA, 19 nt, Artificial Sequence
  Description of Artificial Sequence: Synthetic oligonucleotide
gccucacggggcaccucag

SEQ ID NO: 2194313 - RNA, 19 nt, Artificial Sequence
  Description of Artificial Sequence: Synthetic oligonucleotide
gcauccccguggaaacuaa

SEQ ID NO: 2194314 - RNA, 19 nt, Artificial Sequence
  Description of Artificial Sequence: Synthetic oligonucleotide
gcccuggaccagcacgucu

SEQ ID NO: 2194315 - RNA, 19 nt, Artificial Sequence
  Description of Artificial Sequence: Synthetic oligonucleotide
cagcacgcgcagcgcuaca

SEQ ID NO: 2194316 - RNA, 19 nt, Artificial Sequence
  Description of Artificial Sequence: Synthetic oligonucleotide
ggggcaccucagcguuggc

SEQ ID NO: 2194317 - RNA, 19 nt, Artificial Sequence
  Description of Artificial Sequence: Synthetic oligonucleotide
ccguggaaacuaagggccu

SEQ ID NO: 2194318 - RNA, 19 nt, Artificial Sequence
  Description of Artificial Sequence: Synthetic oligonucleotide
cccacgcggaggccaccgc

SEQ ID NO: 2194319 - RNA, 19 nt, Artificial Sequence
  Description of Artificial Sequence: Synthetic oligonucleotide
cccagagcggggcgcccug

SEQ ID NO: 2194320 - RNA, 19 nt, Artificial Sequence
  Description of Artificial Sequence: Synthetic oligonucleotide
gcguuggccucagggcuga

SEQ ID NO: 2194321 - RNA, 19 nt, Artificial Sequence
  Description of Artificial Sequence: Synthetic oligonucleotide
gugcucuaucaggagccuu

SEQ ID NO: 2194322 - RNA, 19 nt, Artificial Sequence
  Description of Artificial Sequence: Synthetic oligonucleotide
gcccacguggggcucugcu

SEQ ID NO: 2194323 - RNA, 19 nt, Artificial Sequence
  Description of Artificial Sequence: Synthetic oligonucleotide
gccuaugcgcugugcuccu

SEQ ID NO: 2194324 - RNA, 19 nt, Artificial Sequence
  Description of Artificial Sequence: Synthetic oligonucleotide
caguggcauccccguggaa

SEQ ID NO: 2194325 - RNA, 19 nt, Artificial Sequence
  Description of Artificial Sequence: Synthetic oligonucleotide
cguccucuugucgcagcac

SEQ ID NO: 2194326 - RNA, 19 nt, Artificial Sequence
  Description of Artificial Sequence: Synthetic oligonucleotide
cccuggaccagcacgucuu

SEQ ID NO: 2194327 - RNA, 19 nt, Artificial Sequence
  Description of Artificial Sequence: Synthetic oligonucleotide
cacagggaaugaggcgggu

SEQ ID NO: 2194328 - RNA, 19 nt, Artificial Sequence
  Description of Artificial Sequence: Synthetic oligonucleotide
ccucuacgguucacccaga

SEQ ID NO: 2194329 - RNA, 19 nt, Artificial Sequence
  Description of Artificial Sequence: Synthetic oligonucleotide
gacggccagcguugaccuu

SEQ ID NO: 2194330 - RNA, 19 nt, Artificial Sequence
  Description of Artificial Sequence: Synthetic oligonucleotide
gcgcccuggaccagcacgu

SEQ ID NO: 2194331 - RNA, 19 nt, Artificial Sequence
  Description of Artificial Sequence: Synthetic oligonucleotide
ccuaugcgcugugcuccuc

SEQ ID NO: 2194332 - RNA, 19 nt, Artificial Sequence
  Description of Artificial Sequence: Synthetic oligonucleotide
ccgcccagagcggggcgcc

SEQ ID NO: 2194333 - RNA, 19 nt, Artificial Sequence
  Description of Artificial Sequence: Synthetic oligonucleotide
gcggccacauuugcagggu

SEQ ID NO: 2194334 - RNA, 19 nt, Artificial Sequence
  Description of Artificial Sequence: Synthetic oligonucleotide
ggggcaccuggccgugucu

SEQ ID NO: 2194335 - RNA, 19 nt, Artificial Sequence
  Description of Artificial Sequence: Synthetic oligonucleotide
ccucuccauugaugaucca

SEQ ID NO: 2194336 - RNA, 19 nt, Artificial Sequence
  Description of Artificial Sequence: Synthetic oligonucleotide
gggcgcccuggaccagcac

SEQ ID NO: 2194337 - RNA, 19 nt, Artificial Sequence
  Description of Artificial Sequence: Synthetic oligonucleotide
ggcaccuggccgugucuuu

SEQ ID NO: 2194338 - RNA, 19 nt, Artificial Sequence
  Description of Artificial Sequence: Synthetic oligonucleotide
cacguggggcucugcucuu

SEQ ID NO: 2194339 - RNA, 19 nt, Artificial Sequence
  Description of Artificial Sequence: Synthetic oligonucleotide
gcgcugcccacguggggcu

SEQ ID NO: 2194340 - RNA, 19 nt, Artificial Sequence
  Description of Artificial Sequence: Synthetic oligonucleotide
gcgcagcgcuacacgcuca

SEQ ID NO: 2194341 - RNA, 19 nt, Artificial Sequence
  Description of Artificial Sequence: Synthetic oligonucleotide
gcacgucuuugcgcagcaa

SEQ ID NO: 2194342 - RNA, 19 nt, Artificial Sequence
  Description of Artificial Sequence: Synthetic oligonucleotide
gaagggcggcaggcaggau

SEQ ID NO: 2194343 - RNA, 19 nt, Artificial Sequence
  Description of Artificial Sequence: Synthetic oligonucleotide
cgcggaggccaccgcacca

SEQ ID NO: 2194344 - RNA, 19 nt, Artificial Sequence
  Description of Artificial Sequence: Synthetic oligonucleotide
cccauuagccucggcuccu

SEQ ID NO: 2194345 - RNA, 19 nt, Artificial Sequence
  Description of Artificial Sequence: Synthetic oligonucleotide
gcggcacauggggcaccug

SEQ ID NO: 2194346 - RNA, 19 nt, Artificial Sequence
  Description of Artificial Sequence: Synthetic oligonucleotide
gcguuggcuuugggaucca

SEQ ID NO: 2194347 - RNA, 19 nt, Artificial Sequence
  Description of Artificial Sequence: Synthetic oligonucleotide
gcggggcgcccuggaccag

SEQ ID NO: 2194348 - RNA, 19 nt, Artificial Sequence
  Description of Artificial Sequence: Synthetic oligonucleotide
ccaccgcaccagccguccu

SEQ ID NO: 2194349 - RNA, 19 nt, Artificial Sequence
  Description of Artificial Sequence: Synthetic oligonucleotide
cgcugcccacguggggcuc

SEQ ID NO: 2194350 - RNA, 19 nt, Artificial Sequence
  Description of Artificial Sequence: Synthetic oligonucleotide
cgcgggccucacggggcac

SEQ ID NO: 2194351 - RNA, 19 nt, Artificial Sequence
  Description of Artificial Sequence: Synthetic oligonucleotide
ccgcaccagccguccucuu

SEQ ID NO: 2194352 - RNA, 19 nt, Artificial Sequence
  Description of Artificial Sequence: Synthetic oligonucleotide
ugaauuaccacuuuaggag

SEQ ID NO: 2194353 - RNA, 19 nt, Artificial Sequence
  Description of Artificial Sequence: Synthetic oligonucleotide
agaaauaaugcuuuggcag

SEQ ID NO: 2194354 - RNA, 19 nt, Artificial Sequence
  Description of Artificial Sequence: Synthetic oligonucleotide
agagaaauaaugcuuuggc

SEQ ID NO: 2194355 - RNA, 19 nt, Artificial Sequence
  Description of Artificial Sequence: Synthetic oligonucleotide
ucgggugucauauaaaugg

SEQ ID NO: 2194356 - RNA, 19 nt, Artificial Sequence
  Description of Artificial Sequence: Synthetic oligonucleotide
uaaauuguagccuugugcc

SEQ ID NO: 2194357 - RNA, 19 nt, Artificial Sequence
  Description of Artificial Sequence: Synthetic oligonucleotide
guuaacuuaauucaaggcc

SEQ ID NO: 2194358 - RNA, 19 nt, Artificial Sequence
  Description of Artificial Sequence: Synthetic oligonucleotide
uuaacuuaauucaaggcca

SEQ ID NO: 2194359 - RNA, 19 nt, Artificial Sequence
  Description of Artificial Sequence: Synthetic oligonucleotide
uuaaauuguagccuugugc

SEQ ID NO: 2194360 - RNA, 19 nt, Artificial Sequence
  Description of Artificial Sequence: Synthetic oligonucleotide
uuuguuguuaacuuaauuc

SEQ ID NO: 2194361 - RNA, 19 nt, Artificial Sequence
  Description of Artificial Sequence: Synthetic oligonucleotide
ucuuugcucagaaaggucg

SEQ ID NO: 2194362 - RNA, 19 nt, Artificial Sequence
  Description of Artificial Sequence: Synthetic oligonucleotide
aauagugugauucccauaa

SEQ ID NO: 2194363 - RNA, 19 nt, Artificial Sequence
  Description of Artificial Sequence: Synthetic oligonucleotide
uucaagguuauucacacug

SEQ ID NO: 2194364 - RNA, 19 nt, Artificial Sequence
  Description of Artificial Sequence: Synthetic oligonucleotide
agcaaaagagaaauaaugc

SEQ ID NO: 2194365 - RNA, 19 nt, Artificial Sequence
  Description of Artificial Sequence: Synthetic oligonucleotide
acaaacaacaaccuugcag

SEQ ID NO: 2194366 - RNA, 19 nt, Artificial Sequence
  Description of Artificial Sequence: Synthetic oligonucleotide
uuguuaacuuaauucaagg

SEQ ID NO: 2194367 - RNA, 19 nt, Artificial Sequence
  Description of Artificial Sequence: Synthetic oligonucleotide
uuguuguuaacuuaauuca

SEQ ID NO: 2194368 - RNA, 19 nt, Artificial Sequence
  Description of Artificial Sequence: Synthetic oligonucleotide
uuccauaaggcccagaggu

SEQ ID NO: 2194369 - RNA, 19 nt, Artificial Sequence
  Description of Artificial Sequence: Synthetic oligonucleotide
ugugauucccauaaagcag

SEQ ID NO: 2194370 - RNA, 19 nt, Artificial Sequence
  Description of Artificial Sequence: Synthetic oligonucleotide
auaaacagauauuauucag

SEQ ID NO: 2194371 - RNA, 19 nt, Artificial Sequence
  Description of Artificial Sequence: Synthetic oligonucleotide
auugaauuaccacuuuagg

SEQ ID NO: 2194372 - RNA, 19 nt, Artificial Sequence
  Description of Artificial Sequence: Synthetic oligonucleotide
uuuaggaguuccauaaggc

SEQ ID NO: 2194373 - RNA, 19 nt, Artificial Sequence
  Description of Artificial Sequence: Synthetic oligonucleotide
aagugcauugaauuaccac

SEQ ID NO: 2194374 - RNA, 19 nt, Artificial Sequence
  Description of Artificial Sequence: Synthetic oligonucleotide
agugcauugaauuaccacu

SEQ ID NO: 2194375 - RNA, 19 nt, Artificial Sequence
  Description of Artificial Sequence: Synthetic oligonucleotide
gaaauaaugcuuuggcagc

SEQ ID NO: 2194376 - RNA, 19 nt, Artificial Sequence
  Description of Artificial Sequence: Synthetic oligonucleotide
acagauauuauucagucuu

SEQ ID NO: 2194377 - RNA, 19 nt, Artificial Sequence
  Description of Artificial Sequence: Synthetic oligonucleotide
auuccaauagugugauucc

SEQ ID NO: 2194378 - RNA, 19 nt, Artificial Sequence
  Description of Artificial Sequence: Synthetic oligonucleotide
aaguuccacucuuugaaag

SEQ ID NO: 2194379 - RNA, 19 nt, Artificial Sequence
  Description of Artificial Sequence: Synthetic oligonucleotide
gauucaagguuauucacac

SEQ ID NO: 2194380 - RNA, 19 nt, Artificial Sequence
  Description of Artificial Sequence: Synthetic oligonucleotide
uaagauuuuguuguuaacu

SEQ ID NO: 2194381 - RNA, 19 nt, Artificial Sequence
  Description of Artificial Sequence: Synthetic oligonucleotide
aagagaaauaaugcuuugg

SEQ ID NO: 2194382 - RNA, 19 nt, Artificial Sequence
  Description of Artificial Sequence: Synthetic oligonucleotide
gaaaggucgaguuuguuuc

SEQ ID NO: 2194383 - RNA, 19 nt, Artificial Sequence
  Description of Artificial Sequence: Synthetic oligonucleotide
cauugaauuaccacuuuag

SEQ ID NO: 2194384 - RNA, 19 nt, Artificial Sequence
  Description of Artificial Sequence: Synthetic oligonucleotide
ugauaaagugcauugaauu

SEQ ID NO: 2194385 - RNA, 19 nt, Artificial Sequence
  Description of Artificial Sequence: Synthetic oligonucleotide
gaaggguucaaucaguguc

SEQ ID NO: 2194386 - RNA, 19 nt, Artificial Sequence
  Description of Artificial Sequence: Synthetic oligonucleotide
ugugccaugcuacagacau

SEQ ID NO: 2194387 - RNA, 19 nt, Artificial Sequence
  Description of Artificial Sequence: Synthetic oligonucleotide
auauacacgucuuccauug

SEQ ID NO: 2194388 - RNA, 19 nt, Artificial Sequence
  Description of Artificial Sequence: Synthetic oligonucleotide
aaggguucaaucagugucc

SEQ ID NO: 2194389 - RNA, 19 nt, Artificial Sequence
  Description of Artificial Sequence: Synthetic oligonucleotide
acugaggccauauacacgu

SEQ ID NO: 2194390 - RNA, 19 nt, Artificial Sequence
  Description of Artificial Sequence: Synthetic oligonucleotide
uuaggaguuccauaaggcc

SEQ ID NO: 2194391 - RNA, 19 nt, Artificial Sequence
  Description of Artificial Sequence: Synthetic oligonucleotide
auaaugcuuuggcagcucc

SEQ ID NO: 2194392 - RNA, 19 nt, Artificial Sequence
  Description of Artificial Sequence: Synthetic oligonucleotide
aguuccauaaggcccagag

SEQ ID NO: 2194393 - RNA, 19 nt, Artificial Sequence
  Description of Artificial Sequence: Synthetic oligonucleotide
aaagggccguguuaaauug

SEQ ID NO: 2194394 - RNA, 19 nt, Artificial Sequence
  Description of Artificial Sequence: Synthetic oligonucleotide
agguuauucacacuguaca

SEQ ID NO: 2194395 - RNA, 19 nt, Artificial Sequence
  Description of Artificial Sequence: Synthetic oligonucleotide
aacaacaaccuugcagccc

SEQ ID NO: 2194396 - RNA, 19 nt, Artificial Sequence
  Description of Artificial Sequence: Synthetic oligonucleotide
aaugcuuuggcagcuccac

SEQ ID NO: 2194397 - RNA, 19 nt, Artificial Sequence
  Description of Artificial Sequence: Synthetic oligonucleotide
cuggcuaguaaagugaagg

SEQ ID NO: 2194398 - RNA, 19 nt, Artificial Sequence
  Description of Artificial Sequence: Synthetic oligonucleotide
uccuaacacaacaauugcc

SEQ ID NO: 2194399 - RNA, 19 nt, Artificial Sequence
  Description of Artificial Sequence: Synthetic oligonucleotide
gaggugguuuuguaaaggg

SEQ ID NO: 2194400 - RNA, 19 nt, Artificial Sequence
  Description of Artificial Sequence: Synthetic oligonucleotide
ucuuccauuccaauagugu

SEQ ID NO: 2194401 - RNA, 19 nt, Artificial Sequence
  Description of Artificial Sequence: Synthetic oligonucleotide
aggauucaagguuauucac

SEQ ID NO: 2194402 - RNA, 19 nt, Artificial Sequence
  Description of Artificial Sequence: Synthetic oligonucleotide
ggguauuucuuauaaacag

SEQ ID NO: 2194403 - RNA, 19 nt, Artificial Sequence
  Description of Artificial Sequence: Synthetic oligonucleotide
uaacacaacaauugccacc

SEQ ID NO: 2194404 - RNA, 19 nt, Artificial Sequence
  Description of Artificial Sequence: Synthetic oligonucleotide
cauuccaauagugugauuc

SEQ ID NO: 2194405 - RNA, 19 nt, Artificial Sequence
  Description of Artificial Sequence: Synthetic oligonucleotide
uauaaauggagcuguuccu

SEQ ID NO: 2194406 - RNA, 19 nt, Artificial Sequence
  Description of Artificial Sequence: Synthetic oligonucleotide
aacagauauuauucagucu

SEQ ID NO: 2194407 - RNA, 19 nt, Artificial Sequence
  Description of Artificial Sequence: Synthetic oligonucleotide
cuuccauuccaauagugug

SEQ ID NO: 2194408 - RNA, 19 nt, Artificial Sequence
  Description of Artificial Sequence: Synthetic oligonucleotide
uuccuaacacaacaauugc

SEQ ID NO: 2194409 - RNA, 19 nt, Artificial Sequence
  Description of Artificial Sequence: Synthetic oligonucleotide
caaagcaacuucuagguca

SEQ ID NO: 2194410 - RNA, 19 nt, Artificial Sequence
  Description of Artificial Sequence: Synthetic oligonucleotide
uguuguuaacuuaauucaa

SEQ ID NO: 2194411 - RNA, 19 nt, Artificial Sequence
  Description of Artificial Sequence: Synthetic oligonucleotide
agguugauaaagugcauug

SEQ ID NO: 2194412 - RNA, 19 nt, Artificial Sequence
  Description of Artificial Sequence: Synthetic oligonucleotide
uugaaaggauucaagguua

SEQ ID NO: 2194413 - RNA, 19 nt, Artificial Sequence
  Description of Artificial Sequence: Synthetic oligonucleotide
ucgaguuuguuuccuaaca

SEQ ID NO: 2194414 - RNA, 19 nt, Artificial Sequence
  Description of Artificial Sequence: Synthetic oligonucleotide
agcaacuucuaggucagcc

SEQ ID NO: 2194415 - RNA, 19 nt, Artificial Sequence
  Description of Artificial Sequence: Synthetic oligonucleotide
cagucuuccauuccaauag

SEQ ID NO: 2194416 - RNA, 19 nt, Artificial Sequence
  Description of Artificial Sequence: Synthetic oligonucleotide
aauugcaguuuucccaaca

SEQ ID NO: 2194417 - RNA, 19 nt, Artificial Sequence
  Description of Artificial Sequence: Synthetic oligonucleotide
aguaggguauuucuuauaa

SEQ ID NO: 2194418 - RNA, 19 nt, Artificial Sequence
  Description of Artificial Sequence: Synthetic oligonucleotide
uggcuaguaaagugaaggg

SEQ ID NO: 2194419 - RNA, 19 nt, Artificial Sequence
  Description of Artificial Sequence: Synthetic oligonucleotide
gacacugcggagcagugag

SEQ ID NO: 2194420 - RNA, 19 nt, Artificial Sequence
  Description of Artificial Sequence: Synthetic oligonucleotide
accacaaacaacaaccuug

SEQ ID NO: 2194421 - RNA, 19 nt, Artificial Sequence
  Description of Artificial Sequence: Synthetic oligonucleotide
uuuucagaauuggaguucc

SEQ ID NO: 2194422 - RNA, 19 nt, Artificial Sequence
  Description of Artificial Sequence: Synthetic oligonucleotide
uugauaaagugcauugaau

SEQ ID NO: 2194423 - RNA, 19 nt, Artificial Sequence
  Description of Artificial Sequence: Synthetic oligonucleotide
agauauuauucagucuuac

SEQ ID NO: 2194424 - RNA, 19 nt, Artificial Sequence
  Description of Artificial Sequence: Synthetic oligonucleotide
cuguacacaagaacaaaac

SEQ ID NO: 2194425 - RNA, 19 nt, Artificial Sequence
  Description of Artificial Sequence: Synthetic oligonucleotide
uccacugaggccauauaca

SEQ ID NO: 2194426 - RNA, 19 nt, Artificial Sequence
  Description of Artificial Sequence: Synthetic oligonucleotide
aaauuguagccuugugcca

SEQ ID NO: 2194427 - RNA, 19 nt, Artificial Sequence
  Description of Artificial Sequence: Synthetic oligonucleotide
aucugucacugucaccucc

SEQ ID NO: 2194428 - RNA, 19 nt, Artificial Sequence
  Description of Artificial Sequence: Synthetic oligonucleotide
agaauugcaguuuucccaa

SEQ ID NO: 2194429 - RNA, 19 nt, Artificial Sequence
  Description of Artificial Sequence: Synthetic oligonucleotide
uguuuccuaacacaacaau

SEQ ID NO: 2194430 - RNA, 19 nt, Artificial Sequence
  Description of Artificial Sequence: Synthetic oligonucleotide
agacauucaaggcuugacu

SEQ ID NO: 2194431 - RNA, 19 nt, Artificial Sequence
  Description of Artificial Sequence: Synthetic oligonucleotide
aaauaaugcuuuggcagcu

SEQ ID NO: 2194432 - RNA, 19 nt, Artificial Sequence
  Description of Artificial Sequence: Synthetic oligonucleotide
cuugacucaguuuucagaa

SEQ ID NO: 2194433 - RNA, 19 nt, Artificial Sequence
  Description of Artificial Sequence: Synthetic oligonucleotide
uuuguaaagggccguguua

SEQ ID NO: 2194434 - RNA, 19 nt, Artificial Sequence
  Description of Artificial Sequence: Synthetic oligonucleotide
ugacucaguuuucagaauu

SEQ ID NO: 2194435 - RNA, 19 nt, Artificial Sequence
  Description of Artificial Sequence: Synthetic oligonucleotide
auccacuugucuuugcuca

SEQ ID NO: 2194436 - RNA, 19 nt, Artificial Sequence
  Description of Artificial Sequence: Synthetic oligonucleotide
agaauuggaguucccuuug

SEQ ID NO: 2194437 - RNA, 19 nt, Artificial Sequence
  Description of Artificial Sequence: Synthetic oligonucleotide
gguucaaucaguguccucc

SEQ ID NO: 2194438 - RNA, 19 nt, Artificial Sequence
  Description of Artificial Sequence: Synthetic oligonucleotide
aauaaugcuuuggcagcuc

SEQ ID NO: 2194439 - RNA, 19 nt, Artificial Sequence
  Description of Artificial Sequence: Synthetic oligonucleotide
acgucuuccauuguuucac

SEQ ID NO: 2194440 - RNA, 19 nt, Artificial Sequence
  Description of Artificial Sequence: Synthetic oligonucleotide
aagcuugcuggcuaguaaa

SEQ ID NO: 2194441 - RNA, 19 nt, Artificial Sequence
  Description of Artificial Sequence: Synthetic oligonucleotide
cuaguaaagugaaggguuc

SEQ ID NO: 2194442 - RNA, 19 nt, Artificial Sequence
  Description of Artificial Sequence: Synthetic oligonucleotide
ucaagguuauucacacugu

SEQ ID NO: 2194443 - RNA, 19 nt, Artificial Sequence
  Description of Artificial Sequence: Synthetic oligonucleotide
aacuuaauucaaggccaac

SEQ ID NO: 2194444 - RNA, 19 nt, Artificial Sequence
  Description of Artificial Sequence: Synthetic oligonucleotide
gaggcagguugauaaagug

SEQ ID NO: 2194445 - RNA, 19 nt, Artificial Sequence
  Description of Artificial Sequence: Synthetic oligonucleotide
cuaacacaacaauugccac

SEQ ID NO: 2194446 - RNA, 19 nt, Artificial Sequence
  Description of Artificial Sequence: Synthetic oligonucleotide
ucccaacagacaacaaacc

SEQ ID NO: 2194447 - RNA, 19 nt, Artificial Sequence
  Description of Artificial Sequence: Synthetic oligonucleotide
uccauuguuucacagucuu

SEQ ID NO: 2194448 - RNA, 19 nt, Artificial Sequence
  Description of Artificial Sequence: Synthetic oligonucleotide
agaaaggucgaguuuguuu

SEQ ID NO: 2194449 - RNA, 19 nt, Artificial Sequence
  Description of Artificial Sequence: Synthetic oligonucleotide
guuaaauuguagccuugug

SEQ ID NO: 2194450 - RNA, 19 nt, Artificial Sequence
  Description of Artificial Sequence: Synthetic oligonucleotide
cagaauugcaguuuuccca

SEQ ID NO: 2194451 - RNA, 19 nt, Artificial Sequence
  Description of Artificial Sequence: Synthetic oligonucleotide
uuggaguucccuuuguuuu

SEQ ID NO: 2194452 - RNA, 19 nt, Artificial Sequence
  Description of Artificial Sequence: Synthetic oligonucleotide
acauucaaggcuugacuca

SEQ ID NO: 2194453 - RNA, 19 nt, Artificial Sequence
  Description of Artificial Sequence: Synthetic oligonucleotide
uguuucacagucuuccauu

SEQ ID NO: 2194454 - RNA, 19 nt, Artificial Sequence
  Description of Artificial Sequence: Synthetic oligonucleotide
ucacugucaccucccacag

SEQ ID NO: 2194455 - RNA, 19 nt, Artificial Sequence
  Description of Artificial Sequence: Synthetic oligonucleotide
aaccugucgcagugguggc

SEQ ID NO: 2194456 - RNA, 19 nt, Artificial Sequence
  Description of Artificial Sequence: Synthetic oligonucleotide
uaaagggccguguuaaauu

SEQ ID NO: 2194457 - RNA, 19 nt, Artificial Sequence
  Description of Artificial Sequence: Synthetic oligonucleotide
agagggaagcuggauuugc

SEQ ID NO: 2194458 - RNA, 19 nt, Artificial Sequence
  Description of Artificial Sequence: Synthetic oligonucleotide
acacgucuuccauuguuuc

SEQ ID NO: 2194459 - RNA, 19 nt, Artificial Sequence
  Description of Artificial Sequence: Synthetic oligonucleotide
uuguaaagggccguguuaa

SEQ ID NO: 2194460 - RNA, 19 nt, Artificial Sequence
  Description of Artificial Sequence: Synthetic oligonucleotide
guucaaucaguguccuccg

SEQ ID NO: 2194461 - RNA, 19 nt, Artificial Sequence
  Description of Artificial Sequence: Synthetic oligonucleotide
cuugugccaugcuacagac

SEQ ID NO: 2194462 - RNA, 19 nt, Artificial Sequence
  Description of Artificial Sequence: Synthetic oligonucleotide
uuuuguaaagggccguguu

SEQ ID NO: 2194463 - RNA, 19 nt, Artificial Sequence
  Description of Artificial Sequence: Synthetic oligonucleotide
acuuuaggaguuccauaag

SEQ ID NO: 2194464 - RNA, 19 nt, Artificial Sequence
  Description of Artificial Sequence: Synthetic oligonucleotide
uaacuuaauucaaggccaa

SEQ ID NO: 2194465 - RNA, 19 nt, Artificial Sequence
  Description of Artificial Sequence: Synthetic oligonucleotide
uuguuuccuaacacaacaa

SEQ ID NO: 2194466 - RNA, 19 nt, Artificial Sequence
  Description of Artificial Sequence: Synthetic oligonucleotide
ugccaugcuacagacauuc

SEQ ID NO: 2194467 - RNA, 19 nt, Artificial Sequence
  Description of Artificial Sequence: Synthetic oligonucleotide
uucagaauuggaguucccu

SEQ ID NO: 2194468 - RNA, 19 nt, Artificial Sequence
  Description of Artificial Sequence: Synthetic oligonucleotide
aauuggaguucccuuuguu

SEQ ID NO: 2194469 - RNA, 19 nt, Artificial Sequence
  Description of Artificial Sequence: Synthetic oligonucleotide
aggugguuuuguaaagggc

SEQ ID NO: 2194470 - RNA, 19 nt, Artificial Sequence
  Description of Artificial Sequence: Synthetic oligonucleotide
cacuuuaggaguuccauaa

SEQ ID NO: 2194471 - RNA, 19 nt, Artificial Sequence
  Description of Artificial Sequence: Synthetic oligonucleotide
agauuuuguuguuaacuua

SEQ ID NO: 2194472 - RNA, 19 nt, Artificial Sequence
  Description of Artificial Sequence: Synthetic oligonucleotide
gacaacucugacacugcgg

SEQ ID NO: 2194473 - RNA, 19 nt, Artificial Sequence
  Description of Artificial Sequence: Synthetic oligonucleotide
uccauaaggcccagaggug

SEQ ID NO: 2194474 - RNA, 19 nt, Artificial Sequence
  Description of Artificial Sequence: Synthetic oligonucleotide
uuauucagucuuacuuccu

SEQ ID NO: 2194475 - RNA, 19 nt, Artificial Sequence
  Description of Artificial Sequence: Synthetic oligonucleotide
cuccacugaggccauauac

SEQ ID NO: 2194476 - RNA, 19 nt, Artificial Sequence
  Description of Artificial Sequence: Synthetic oligonucleotide
acagacaacaaaccacaaa

SEQ ID NO: 2194477 - RNA, 19 nt, Artificial Sequence
  Description of Artificial Sequence: Synthetic oligonucleotide
ugucuuugaacuugucaau

SEQ ID NO: 2194478 - RNA, 19 nt, Artificial Sequence
  Description of Artificial Sequence: Synthetic oligonucleotide
uaaauggagcuguuccuuc

SEQ ID NO: 2194479 - RNA, 19 nt, Artificial Sequence
  Description of Artificial Sequence: Synthetic oligonucleotide
gcuggauuugcucuggggc

SEQ ID NO: 2194480 - RNA, 19 nt, Artificial Sequence
  Description of Artificial Sequence: Synthetic oligonucleotide
ccaacagacaacaaaccac

SEQ ID NO: 2194481 - RNA, 19 nt, Artificial Sequence
  Description of Artificial Sequence: Synthetic oligonucleotide
gauauuauucagucuuacu

SEQ ID NO: 2194482 - RNA, 19 nt, Artificial Sequence
  Description of Artificial Sequence: Synthetic oligonucleotide
cugcggagcagugagacag

SEQ ID NO: 2194483 - RNA, 19 nt, Artificial Sequence
  Description of Artificial Sequence: Synthetic oligonucleotide
gugguuuuguaaagggccg

SEQ ID NO: 2194484 - RNA, 19 nt, Artificial Sequence
  Description of Artificial Sequence: Synthetic oligonucleotide
agcuggauuugcucugggg

SEQ ID NO: 2194485 - RNA, 19 nt, Artificial Sequence
  Description of Artificial Sequence: Synthetic oligonucleotide
caaccuugcagcccuuucc

SEQ ID NO: 2194486 - RNA, 19 nt, Artificial Sequence
  Description of Artificial Sequence: Synthetic oligonucleotide
ugaaaggauucaagguuau

SEQ ID NO: 2194487 - RNA, 19 nt, Artificial Sequence
  Description of Artificial Sequence: Synthetic oligonucleotide
cuuugaaaggauucaaggu

SEQ ID NO: 2194488 - RNA, 19 nt, Artificial Sequence
  Description of Artificial Sequence: Synthetic oligonucleotide
cauucaaggcuugacucag

SEQ ID NO: 2194489 - RNA, 19 nt, Artificial Sequence
  Description of Artificial Sequence: Synthetic oligonucleotide
auuaccacuuuaggaguuc

SEQ ID NO: 2194490 - RNA, 19 nt, Artificial Sequence
  Description of Artificial Sequence: Synthetic oligonucleotide
gugagacagaggcacgcgg

SEQ ID NO: 2194491 - RNA, 19 nt, Artificial Sequence
  Description of Artificial Sequence: Synthetic oligonucleotide
caggacaacucugacacug

SEQ ID NO: 2194492 - RNA, 19 nt, Artificial Sequence
  Description of Artificial Sequence: Synthetic oligonucleotide
ucugacacugcggagcagu

SEQ ID NO: 2194493 - RNA, 19 nt, Artificial Sequence
  Description of Artificial Sequence: Synthetic oligonucleotide
ugaaggguucaaucagugu

SEQ ID NO: 2194494 - RNA, 19 nt, Artificial Sequence
  Description of Artificial Sequence: Synthetic oligonucleotide
gccguguuaaauuguagcc

SEQ ID NO: 2194495 - RNA, 19 nt, Artificial Sequence
  Description of Artificial Sequence: Synthetic oligonucleotide
gaauuaccacuuuaggagu

SEQ ID NO: 2194496 - RNA, 19 nt, Artificial Sequence
  Description of Artificial Sequence: Synthetic oligonucleotide
gacucaguuuucagaauug

SEQ ID NO: 2194497 - RNA, 19 nt, Artificial Sequence
  Description of Artificial Sequence: Synthetic oligonucleotide
cacugaggccauauacacg

SEQ ID NO: 2194498 - RNA, 19 nt, Artificial Sequence
  Description of Artificial Sequence: Synthetic oligonucleotide
uacacgucuuccauuguuu

SEQ ID NO: 2194499 - RNA, 19 nt, Artificial Sequence
  Description of Artificial Sequence: Synthetic oligonucleotide
aguuuucccaacagacaac

SEQ ID NO: 2194500 - RNA, 19 nt, Artificial Sequence
  Description of Artificial Sequence: Synthetic oligonucleotide
aaagugcauugaauuacca

SEQ ID NO: 2194501 - RNA, 19 nt, Artificial Sequence
  Description of Artificial Sequence: Synthetic oligonucleotide
uuuugcccacugcugugcc

SEQ ID NO: 2194502 - RNA, 19 nt, Artificial Sequence
  Description of Artificial Sequence: Synthetic oligonucleotide
cauaaagcaguugcuccag

SEQ ID NO: 2194503 - RNA, 19 nt, Artificial Sequence
  Description of Artificial Sequence: Synthetic oligonucleotide
uuucagaauuggaguuccc

SEQ ID NO: 2194504 - RNA, 19 nt, Artificial Sequence
  Description of Artificial Sequence: Synthetic oligonucleotide
ugcuggcuaguaaagugaa

SEQ ID NO: 2194505 - RNA, 19 nt, Artificial Sequence
  Description of Artificial Sequence: Synthetic oligonucleotide
ggccguguuaaauuguagc

SEQ ID NO: 2194506 - RNA, 19 nt, Artificial Sequence
  Description of Artificial Sequence: Synthetic oligonucleotide
aggccauauacacgucuuc

SEQ ID NO: 2194507 - RNA, 19 nt, Artificial Sequence
  Description of Artificial Sequence: Synthetic oligonucleotide
uuccauuguuucacagucu

SEQ ID NO: 2194508 - RNA, 19 nt, Artificial Sequence
  Description of Artificial Sequence: Synthetic oligonucleotide
caaucaguguccuccgauc

SEQ ID NO: 2194509 - RNA, 19 nt, Artificial Sequence
  Description of Artificial Sequence: Synthetic oligonucleotide
guuccuucaccccacgguc

SEQ ID NO: 2194510 - RNA, 19 nt, Artificial Sequence
  Description of Artificial Sequence: Synthetic oligonucleotide
uccacuugucuuugcucag

SEQ ID NO: 2194511 - RNA, 19 nt, Artificial Sequence
  Description of Artificial Sequence: Synthetic oligonucleotide
aaggcuugacucaguuuuc

SEQ ID NO: 2194512 - RNA, 19 nt, Artificial Sequence
  Description of Artificial Sequence: Synthetic oligonucleotide
ccacaaacaacaaccuugc

SEQ ID NO: 2194513 - RNA, 19 nt, Artificial Sequence
  Description of Artificial Sequence: Synthetic oligonucleotide
uaguaaagugaaggguuca

SEQ ID NO: 2194514 - RNA, 19 nt, Artificial Sequence
  Description of Artificial Sequence: Synthetic oligonucleotide
acgcgggucacugcggucc

SEQ ID NO: 2194515 - RNA, 19 nt, Artificial Sequence
  Description of Artificial Sequence: Synthetic oligonucleotide
cucgggugucauauaaaug

SEQ ID NO: 2194516 - RNA, 19 nt, Artificial Sequence
  Description of Artificial Sequence: Synthetic oligonucleotide
agcauccacuugucuuugc

SEQ ID NO: 2194517 - RNA, 19 nt, Artificial Sequence
  Description of Artificial Sequence: Synthetic oligonucleotide
cccauaaagcaguugcucc

SEQ ID NO: 2194518 - RNA, 19 nt, Artificial Sequence
  Description of Artificial Sequence: Synthetic oligonucleotide
cucaguuuucagaauugga

SEQ ID NO: 2194519 - RNA, 19 nt, Artificial Sequence
  Description of Artificial Sequence: Synthetic oligonucleotide
gaaguuccacucuuugaaa

SEQ ID NO: 2194520 - RNA, 19 nt, Artificial Sequence
  Description of Artificial Sequence: Synthetic oligonucleotide
ucauauaaauggagcuguu

SEQ ID NO: 2194521 - RNA, 19 nt, Artificial Sequence
  Description of Artificial Sequence: Synthetic oligonucleotide
guguccuccgaucugucac

SEQ ID NO: 2194522 - RNA, 19 nt, Artificial Sequence
  Description of Artificial Sequence: Synthetic oligonucleotide
auaaauggagcuguuccuu

SEQ ID NO: 2194523 - RNA, 19 nt, Artificial Sequence
  Description of Artificial Sequence: Synthetic oligonucleotide
auacacgucuuccauuguu

SEQ ID NO: 2194524 - RNA, 19 nt, Artificial Sequence
  Description of Artificial Sequence: Synthetic oligonucleotide
aauuaccacuuuaggaguu

SEQ ID NO: 2194525 - RNA, 19 nt, Artificial Sequence
  Description of Artificial Sequence: Synthetic oligonucleotide
uuuuccucccuggcagagg

SEQ ID NO: 2194526 - RNA, 19 nt, Artificial Sequence
  Description of Artificial Sequence: Synthetic oligonucleotide
uauacacgucuuccauugu

SEQ ID NO: 2194527 - RNA, 19 nt, Artificial Sequence
  Description of Artificial Sequence: Synthetic oligonucleotide
aggacaacucugacacugc

SEQ ID NO: 2194528 - RNA, 19 nt, Artificial Sequence
  Description of Artificial Sequence: Synthetic oligonucleotide
gucauauaaauggagcugu

SEQ ID NO: 2194529 - RNA, 19 nt, Artificial Sequence
  Description of Artificial Sequence: Synthetic oligonucleotide
acucugacacugcggagca

SEQ ID NO: 2194530 - RNA, 19 nt, Artificial Sequence
  Description of Artificial Sequence: Synthetic oligonucleotide
uaccacuuuaggaguucca

SEQ ID NO: 2194531 - RNA, 19 nt, Artificial Sequence
  Description of Artificial Sequence: Synthetic oligonucleotide
gcuacagacauucaaggcu

SEQ ID NO: 2194532 - RNA, 19 nt, Artificial Sequence
  Description of Artificial Sequence: Synthetic oligonucleotide
auucaagguuauucacacu

SEQ ID NO: 2194533 - RNA, 19 nt, Artificial Sequence
  Description of Artificial Sequence: Synthetic oligonucleotide
auuguagccuugugccaug

SEQ ID NO: 2194534 - RNA, 19 nt, Artificial Sequence
  Description of Artificial Sequence: Synthetic oligonucleotide
gucgaguuuguuuccuaac

SEQ ID NO: 2194535 - RNA, 19 nt, Artificial Sequence
  Description of Artificial Sequence: Synthetic oligonucleotide
cauccacuugucuuugcuc

SEQ ID NO: 2194536 - RNA, 19 nt, Artificial Sequence
  Description of Artificial Sequence: Synthetic oligonucleotide
gugaaggguucaaucagug

SEQ ID NO: 2194537 - RNA, 19 nt, Artificial Sequence
  Description of Artificial Sequence: Synthetic oligonucleotide
ugcauugaauuaccacuuu

SEQ ID NO: 2194538 - RNA, 19 nt, Artificial Sequence
  Description of Artificial Sequence: Synthetic oligonucleotide
ccagaauugcaguuuuccc

SEQ ID NO: 2194539 - RNA, 19 nt, Artificial Sequence
  Description of Artificial Sequence: Synthetic oligonucleotide
ggacaacucugacacugcg

SEQ ID NO: 2194540 - RNA, 19 nt, Artificial Sequence
  Description of Artificial Sequence: Synthetic oligonucleotide
cagaggcagguugauaaag

SEQ ID NO: 2194541 - RNA, 19 nt, Artificial Sequence
  Description of Artificial Sequence: Synthetic oligonucleotide
cuccacgccuuccugcagg

SEQ ID NO: 2194542 - RNA, 19 nt, Artificial Sequence
  Description of Artificial Sequence: Synthetic oligonucleotide
aaggucgaguuuguuuccu

SEQ ID NO: 2194543 - RNA, 19 nt, Artificial Sequence
  Description of Artificial Sequence: Synthetic oligonucleotide
caaggcuugacucaguuuu

SEQ ID NO: 2194544 - RNA, 19 nt, Artificial Sequence
  Description of Artificial Sequence: Synthetic oligonucleotide
gagcuguuccuucacccca

SEQ ID NO: 2194545 - RNA, 19 nt, Artificial Sequence
  Description of Artificial Sequence: Synthetic oligonucleotide
aggaguuccauaaggccca

SEQ ID NO: 2194546 - RNA, 19 nt, Artificial Sequence
  Description of Artificial Sequence: Synthetic oligonucleotide
uguaaagggccguguuaaa

SEQ ID NO: 2194547 - RNA, 19 nt, Artificial Sequence
  Description of Artificial Sequence: Synthetic oligonucleotide
aguaaagugaaggguucaa

SEQ ID NO: 2194548 - RNA, 19 nt, Artificial Sequence
  Description of Artificial Sequence: Synthetic oligonucleotide
uuccacucuuugaaaggau

SEQ ID NO: 2194549 - RNA, 19 nt, Artificial Sequence
  Description of Artificial Sequence: Synthetic oligonucleotide
cagacauucaaggcuugac

SEQ ID NO: 2194550 - RNA, 19 nt, Artificial Sequence
  Description of Artificial Sequence: Synthetic oligonucleotide
uugacucaguuuucagaau

SEQ ID NO: 2194551 - RNA, 19 nt, Artificial Sequence
  Description of Artificial Sequence: Synthetic oligonucleotide
uccccgaccugccuccuca

SEQ ID NO: 2194552 - RNA, 19 nt, Artificial Sequence
  Description of Artificial Sequence: Synthetic oligonucleotide
guuccacucuuugaaagga

SEQ ID NO: 2194553 - RNA, 19 nt, Artificial Sequence
  Description of Artificial Sequence: Synthetic oligonucleotide
acucuuugaaaggauucaa

SEQ ID NO: 2194554 - RNA, 19 nt, Artificial Sequence
  Description of Artificial Sequence: Synthetic oligonucleotide
cuuugcucagaaaggucga

SEQ ID NO: 2194555 - RNA, 19 nt, Artificial Sequence
  Description of Artificial Sequence: Synthetic oligonucleotide
accacuuuaggaguuccau

SEQ ID NO: 2194556 - RNA, 19 nt, Artificial Sequence
  Description of Artificial Sequence: Synthetic oligonucleotide
agaggcagguugauaaagu

SEQ ID NO: 2194557 - RNA, 19 nt, Artificial Sequence
  Description of Artificial Sequence: Synthetic oligonucleotide
aagcaacuucuaggucagc

SEQ ID NO: 2194558 - RNA, 19 nt, Artificial Sequence
  Description of Artificial Sequence: Synthetic oligonucleotide
ucgcucuggagccgguccc

SEQ ID NO: 2194559 - RNA, 19 nt, Artificial Sequence
  Description of Artificial Sequence: Synthetic oligonucleotide
acaacaauugccaccucuu

SEQ ID NO: 2194560 - RNA, 19 nt, Artificial Sequence
  Description of Artificial Sequence: Synthetic oligonucleotide
gucgcucuggagccggucc

SEQ ID NO: 2194561 - RNA, 19 nt, Artificial Sequence
  Description of Artificial Sequence: Synthetic oligonucleotide
ugguuuuguaaagggccgu

SEQ ID NO: 2194562 - RNA, 19 nt, Artificial Sequence
  Description of Artificial Sequence: Synthetic oligonucleotide
uccuaagauuuuguuguua

SEQ ID NO: 2194563 - RNA, 19 nt, Artificial Sequence
  Description of Artificial Sequence: Synthetic oligonucleotide
ggagcuguuccuucacccc

SEQ ID NO: 2194564 - RNA, 19 nt, Artificial Sequence
  Description of Artificial Sequence: Synthetic oligonucleotide
caccccacggucugucucc

SEQ ID NO: 2194565 - RNA, 19 nt, Artificial Sequence
  Description of Artificial Sequence: Synthetic oligonucleotide
uugcccacugcugugccac

SEQ ID NO: 2194566 - RNA, 19 nt, Artificial Sequence
  Description of Artificial Sequence: Synthetic oligonucleotide
guaggguauuucuuauaaa

SEQ ID NO: 2194567 - RNA, 19 nt, Artificial Sequence
  Description of Artificial Sequence: Synthetic oligonucleotide
uugugccaugcuacagaca

SEQ ID NO: 2194568 - RNA, 19 nt, Artificial Sequence
  Description of Artificial Sequence: Synthetic oligonucleotide
ggccauauacacgucuucc

SEQ ID NO: 2194569 - RNA, 19 nt, Artificial Sequence
  Description of Artificial Sequence: Synthetic oligonucleotide
agcuccacgccuuccugca

SEQ ID NO: 2194570 - RNA, 19 nt, Artificial Sequence
  Description of Artificial Sequence: Synthetic oligonucleotide
cucucaggacaacucugac

SEQ ID NO: 2194571 - RNA, 19 nt, Artificial Sequence
  Description of Artificial Sequence: Synthetic oligonucleotide
gcuugacucaguuuucaga

SEQ ID NO: 2194572 - RNA, 19 nt, Artificial Sequence
  Description of Artificial Sequence: Synthetic oligonucleotide
auagugugauucccauaaa

SEQ ID NO: 2194573 - RNA, 19 nt, Artificial Sequence
  Description of Artificial Sequence: Synthetic oligonucleotide
caacucugacacugcggag

SEQ ID NO: 2194574 - RNA, 19 nt, Artificial Sequence
  Description of Artificial Sequence: Synthetic oligonucleotide
guguuaaauuguagccuug

SEQ ID NO: 2194575 - RNA, 19 nt, Artificial Sequence
  Description of Artificial Sequence: Synthetic oligonucleotide
agcuugcuggcuaguaaag

SEQ ID NO: 2194576 - RNA, 19 nt, Artificial Sequence
  Description of Artificial Sequence: Synthetic oligonucleotide
ccuaagauuuuguuguuaa

SEQ ID NO: 2194577 - RNA, 19 nt, Artificial Sequence
  Description of Artificial Sequence: Synthetic oligonucleotide
cacucuuugaaaggauuca

SEQ ID NO: 2194578 - RNA, 19 nt, Artificial Sequence
  Description of Artificial Sequence: Synthetic oligonucleotide
gggaaagcuugcuggcuag

SEQ ID NO: 2194579 - RNA, 19 nt, Artificial Sequence
  Description of Artificial Sequence: Synthetic oligonucleotide
ggucacugcgguccgcggg

SEQ ID NO: 2194580 - RNA, 19 nt, Artificial Sequence
  Description of Artificial Sequence: Synthetic oligonucleotide
ccacucuuugaaaggauuc

SEQ ID NO: 2194581 - RNA, 19 nt, Artificial Sequence
  Description of Artificial Sequence: Synthetic oligonucleotide
aaggcccagaggugguuuu

SEQ ID NO: 2194582 - RNA, 19 nt, Artificial Sequence
  Description of Artificial Sequence: Synthetic oligonucleotide
aagggccguguuaaauugu

SEQ ID NO: 2194583 - RNA, 19 nt, Artificial Sequence
  Description of Artificial Sequence: Synthetic oligonucleotide
cagauauuauucagucuua

SEQ ID NO: 2194584 - RNA, 19 nt, Artificial Sequence
  Description of Artificial Sequence: Synthetic oligonucleotide
gaguaggguauuucuuaua

SEQ ID NO: 2194585 - RNA, 19 nt, Artificial Sequence
  Description of Artificial Sequence: Synthetic oligonucleotide
ggcuugacucaguuuucag

SEQ ID NO: 2194586 - RNA, 19 nt, Artificial Sequence
  Description of Artificial Sequence: Synthetic oligonucleotide
caaagaaaccugucgcagu

SEQ ID NO: 2194587 - RNA, 19 nt, Artificial Sequence
  Description of Artificial Sequence: Synthetic oligonucleotide
gguugauaaagugcauuga

SEQ ID NO: 2194588 - RNA, 19 nt, Artificial Sequence
  Description of Artificial Sequence: Synthetic oligonucleotide
gguuuuguaaagggccgug

SEQ ID NO: 2194589 - RNA, 19 nt, Artificial Sequence
  Description of Artificial Sequence: Synthetic oligonucleotide
gccauauacacgucuucca

SEQ ID NO: 2194590 - RNA, 19 nt, Artificial Sequence
  Description of Artificial Sequence: Synthetic oligonucleotide
cacaacaauugccaccucu

SEQ ID NO: 2194591 - RNA, 19 nt, Artificial Sequence
  Description of Artificial Sequence: Synthetic oligonucleotide
aggcuugacucaguuuuca

SEQ ID NO: 2194592 - RNA, 19 nt, Artificial Sequence
  Description of Artificial Sequence: Synthetic oligonucleotide
gcgggcgucgcucuggagc

SEQ ID NO: 2194593 - RNA, 19 nt, Artificial Sequence
  Description of Artificial Sequence: Synthetic oligonucleotide
cagucuuacuuccuaagau

SEQ ID NO: 2194594 - RNA, 19 nt, Artificial Sequence
  Description of Artificial Sequence: Synthetic oligonucleotide
cccaacagacaacaaacca

SEQ ID NO: 2194595 - RNA, 19 nt, Artificial Sequence
  Description of Artificial Sequence: Synthetic oligonucleotide
acugcggagcagugagaca

SEQ ID NO: 2194596 - RNA, 19 nt, Artificial Sequence
  Description of Artificial Sequence: Synthetic oligonucleotide
ugucgcagugguggcacac

SEQ ID NO: 2194597 - RNA, 19 nt, Artificial Sequence
  Description of Artificial Sequence: Synthetic oligonucleotide
aggccaacuuggucuacaa

SEQ ID NO: 2194598 - RNA, 19 nt, Artificial Sequence
  Description of Artificial Sequence: Synthetic oligonucleotide
ccagaggugguuuuguaaa

SEQ ID NO: 2194599 - RNA, 19 nt, Artificial Sequence
  Description of Artificial Sequence: Synthetic oligonucleotide
cuccgaucugucacuguca

SEQ ID NO: 2194600 - RNA, 19 nt, Artificial Sequence
  Description of Artificial Sequence: Synthetic oligonucleotide
cuuggucuacaaagcaacu

SEQ ID NO: 2194601 - RNA, 19 nt, Artificial Sequence
  Description of Artificial Sequence: Synthetic oligonucleotide
gcauugaauuaccacuuua

SEQ ID NO: 2194602 - RNA, 19 nt, Artificial Sequence
  Description of Artificial Sequence: Synthetic oligonucleotide
cagaauuggaguucccuuu

SEQ ID NO: 2194603 - RNA, 19 nt, Artificial Sequence
  Description of Artificial Sequence: Synthetic oligonucleotide
uaaggcccagaggugguuu

SEQ ID NO: 2194604 - RNA, 19 nt, Artificial Sequence
  Description of Artificial Sequence: Synthetic oligonucleotide
ucacugcgguccgcgggcg

SEQ ID NO: 2194605 - RNA, 19 nt, Artificial Sequence
  Description of Artificial Sequence: Synthetic oligonucleotide
ggucgaguuuguuuccuaa

SEQ ID NO: 2194606 - RNA, 19 nt, Artificial Sequence
  Description of Artificial Sequence: Synthetic oligonucleotide
caguccagaggcagaggca

SEQ ID NO: 2194607 - RNA, 19 nt, Artificial Sequence
  Description of Artificial Sequence: Synthetic oligonucleotide
guuuuguaaagggccgugu

SEQ ID NO: 2194608 - RNA, 19 nt, Artificial Sequence
  Description of Artificial Sequence: Synthetic oligonucleotide
guaaagugaaggguucaau

SEQ ID NO: 2194609 - RNA, 19 nt, Artificial Sequence
  Description of Artificial Sequence: Synthetic oligonucleotide
gcuguuccuucaccccacg

SEQ ID NO: 2194610 - RNA, 19 nt, Artificial Sequence
  Description of Artificial Sequence: Synthetic oligonucleotide
cacaaacaacaaccuugca

SEQ ID NO: 2194611 - RNA, 19 nt, Artificial Sequence
  Description of Artificial Sequence: Synthetic oligonucleotide
ggcuaguaaagugaagggu

SEQ ID NO: 2194612 - RNA, 19 nt, Artificial Sequence
  Description of Artificial Sequence: Synthetic oligonucleotide
cuucaccccacggucuguc

SEQ ID NO: 2194613 - RNA, 19 nt, Artificial Sequence
  Description of Artificial Sequence: Synthetic oligonucleotide
cugaggccauauacacguc

SEQ ID NO: 2194614 - RNA, 19 nt, Artificial Sequence
  Description of Artificial Sequence: Synthetic oligonucleotide
ccaugcuacagacauucaa

SEQ ID NO: 2194615 - RNA, 19 nt, Artificial Sequence
  Description of Artificial Sequence: Synthetic oligonucleotide
cacgccuuccugcaggccu

SEQ ID NO: 2194616 - RNA, 19 nt, Artificial Sequence
  Description of Artificial Sequence: Synthetic oligonucleotide
ccauuguuucacagucuuc

SEQ ID NO: 2194617 - RNA, 19 nt, Artificial Sequence
  Description of Artificial Sequence: Synthetic oligonucleotide
gcuggcuaguaaagugaag

SEQ ID NO: 2194618 - RNA, 19 nt, Artificial Sequence
  Description of Artificial Sequence: Synthetic oligonucleotide
guccuccgaucugucacug

SEQ ID NO: 2194619 - RNA, 19 nt, Artificial Sequence
  Description of Artificial Sequence: Synthetic oligonucleotide
ggccucgggugucauauaa

SEQ ID NO: 2194620 - RNA, 19 nt, Artificial Sequence
  Description of Artificial Sequence: Synthetic oligonucleotide
auaaggcccagaggugguu

SEQ ID NO: 2194621 - RNA, 19 nt, Artificial Sequence
  Description of Artificial Sequence: Synthetic oligonucleotide
cacggucugucuccacuga

SEQ ID NO: 2194622 - RNA, 19 nt, Artificial Sequence
  Description of Artificial Sequence: Synthetic oligonucleotide
aggcccagaggugguuuug

SEQ ID NO: 2194623 - RNA, 19 nt, Artificial Sequence
  Description of Artificial Sequence: Synthetic oligonucleotide
agccgguccccgaccugcc

SEQ ID NO: 2194624 - RNA, 19 nt, Artificial Sequence
  Description of Artificial Sequence: Synthetic oligonucleotide
accugucgcagugguggca

SEQ ID NO: 2194625 - RNA, 19 nt, Artificial Sequence
  Description of Artificial Sequence: Synthetic oligonucleotide
gcggagcagugagacagag

SEQ ID NO: 2194626 - RNA, 19 nt, Artificial Sequence
  Description of Artificial Sequence: Synthetic oligonucleotide
gggucacugcgguccgcgg

SEQ ID NO: 2194627 - RNA, 19 nt, Artificial Sequence
  Description of Artificial Sequence: Synthetic oligonucleotide
ccugucgcagugguggcac

SEQ ID NO: 2194628 - RNA, 19 nt, Artificial Sequence
  Description of Artificial Sequence: Synthetic oligonucleotide
ggcgucgcucuggagccgg

SEQ ID NO: 2194629 - RNA, 19 nt, Artificial Sequence
  Description of Artificial Sequence: Synthetic oligonucleotide
cugcgguccgcgggcgucg

SEQ ID NO: 2194630 - RNA, 19 nt, Artificial Sequence
  Description of Artificial Sequence: Synthetic oligonucleotide
cgggcgucgcucuggagcc

SEQ ID NO: 2194631 - RNA, 19 nt, Artificial Sequence
  Description of Artificial Sequence: Synthetic oligonucleotide
ugcccacugcugugccacu

SEQ ID NO: 2194632 - RNA, 19 nt, Artificial Sequence
  Description of Artificial Sequence: Synthetic oligonucleotide
caacaauugccaccucuuu

SEQ ID NO: 2194633 - RNA, 19 nt, Artificial Sequence
  Description of Artificial Sequence: Synthetic oligonucleotide
ccgaucugucacugucacc

SEQ ID NO: 2194634 - RNA, 19 nt, Artificial Sequence
  Description of Artificial Sequence: Synthetic oligonucleotide
cccagaggugguuuuguaa

SEQ ID NO: 2194635 - RNA, 19 nt, Artificial Sequence
  Description of Artificial Sequence: Synthetic oligonucleotide
gcagaggcagguugauaaa

SEQ ID NO: 2194636 - RNA, 19 nt, Artificial Sequence
  Description of Artificial Sequence: Synthetic oligonucleotide
cucugacacugcggagcag

SEQ ID NO: 2194637 - RNA, 19 nt, Artificial Sequence
  Description of Artificial Sequence: Synthetic oligonucleotide
cacgcgggucacugcgguc

SEQ ID NO: 2194638 - RNA, 19 nt, Artificial Sequence
  Description of Artificial Sequence: Synthetic oligonucleotide
cggagcagugagacagagg

SEQ ID NO: 2194639 - RNA, 19 nt, Artificial Sequence
  Description of Artificial Sequence: Synthetic oligonucleotide
ccgaccugccuccucagga

SEQ ID NO: 2194640 - RNA, 19 nt, Artificial Sequence
  Description of Artificial Sequence: Synthetic oligonucleotide
gaguuccauaaggcccaga

SEQ ID NO: 2194641 - RNA, 19 nt, Artificial Sequence
  Description of Artificial Sequence: Synthetic oligonucleotide
ccauauacacgucuuccau

SEQ ID NO: 2194642 - RNA, 19 nt, Artificial Sequence
  Description of Artificial Sequence: Synthetic oligonucleotide
cgaccugccuccucaggac

SEQ ID NO: 2194643 - RNA, 19 nt, Artificial Sequence
  Description of Artificial Sequence: Synthetic oligonucleotide
cgggugucauauaaaugga

SEQ ID NO: 2194644 - RNA, 19 nt, Artificial Sequence
  Description of Artificial Sequence: Synthetic oligonucleotide
ggguucaaucaguguccuc

SEQ ID NO: 2194645 - RNA, 19 nt, Artificial Sequence
  Description of Artificial Sequence: Synthetic oligonucleotide
ccguguuaaauuguagccu

SEQ ID NO: 2194646 - RNA, 19 nt, Artificial Sequence
  Description of Artificial Sequence: Synthetic oligonucleotide
ugcgguccgcgggcgucgc

SEQ ID NO: 2194647 - RNA, 19 nt, Artificial Sequence
  Description of Artificial Sequence: Synthetic oligonucleotide
gcuugcuggcuaguaaagu

SEQ ID NO: 2194648 - RNA, 19 nt, Artificial Sequence
  Description of Artificial Sequence: Synthetic oligonucleotide
cccacugcugugccacuuc

SEQ ID NO: 2194649 - RNA, 19 nt, Artificial Sequence
  Description of Artificial Sequence: Synthetic oligonucleotide
guccgcgggcgucgcucug

SEQ ID NO: 2194650 - RNA, 19 nt, Artificial Sequence
  Description of Artificial Sequence: Synthetic oligonucleotide
ugucuccacugaggccaua

SEQ ID NO: 2194651 - RNA, 19 nt, Artificial Sequence
  Description of Artificial Sequence: Synthetic oligonucleotide
guccccgaccugccuccuc

SEQ ID NO: 2194652 - RNA, 19 nt, Artificial Sequence
  Description of Artificial Sequence: Synthetic oligonucleotide
gcccagaggugguuuugua

SEQ ID NO: 2194653 - RNA, 19 nt, Artificial Sequence
  Description of Artificial Sequence: Synthetic oligonucleotide
gccaugcuacagacauuca

SEQ ID NO: 2194654 - RNA, 19 nt, Artificial Sequence
  Description of Artificial Sequence: Synthetic oligonucleotide
gggcgucgcucuggagccg

SEQ ID NO: 2194655 - RNA, 19 nt, Artificial Sequence
  Description of Artificial Sequence: Synthetic oligonucleotide
gcacgcgggucacugcggu

SEQ ID NO: 2194656 - RNA, 19 nt, Artificial Sequence
  Description of Artificial Sequence: Synthetic oligonucleotide
ccccgaccugccuccucag

SEQ ID NO: 2194657 - RNA, 19 nt, Artificial Sequence
  Description of Artificial Sequence: Synthetic oligonucleotide
cgcgggucacugcgguccg

SEQ ID NO: 2194658 - RNA, 19 nt, Artificial Sequence
  Description of Artificial Sequence: Synthetic oligonucleotide
gguccgcgggcgucgcucu

SEQ ID NO: 2194659 - RNA, 19 nt, Artificial Sequence
  Description of Artificial Sequence: Synthetic oligonucleotide
gcaggccucgggugucaua

SEQ ID NO: 2194660 - RNA, 19 nt, Artificial Sequence
  Description of Artificial Sequence: Synthetic oligonucleotide
gugccaugcuacagacauu

SEQ ID NO: 2194661 - RNA, 19 nt, Artificial Sequence
  Description of Artificial Sequence: Synthetic oligonucleotide
ccccacggucugucuccac

SEQ ID NO: 2194662 - RNA, 19 nt, Artificial Sequence
  Description of Artificial Sequence: Synthetic oligonucleotide
cacugcgguccgcgggcgu

SEQ ID NO: 2194663 - RNA, 19 nt, Artificial Sequence
  Description of Artificial Sequence: Synthetic oligonucleotide
cgguccgcgggcgucgcuc

SEQ ID NO: 2194664 - RNA, 19 nt, Artificial Sequence
  Description of Artificial Sequence: Synthetic oligonucleotide
cgucgcucuggagccgguc

SEQ ID NO: 2194665 - RNA, 19 nt, Artificial Sequence
  Description of Artificial Sequence: Synthetic oligonucleotide
cgcgggcgucgcucuggag

SEQ ID NO: 2194666 - RNA, 19 nt, Artificial Sequence
  Description of Artificial Sequence: Synthetic oligonucleotide
gccgguccccgaccugccu

SEQ ID NO: 2194667 - RNA, 19 nt, Artificial Sequence
  Description of Artificial Sequence: Synthetic oligonucleotide
ccgcgggcgucgcucugga

SEQ ID NO: 2194668 - RNA, 19 nt, Artificial Sequence
  Description of Artificial Sequence: Synthetic oligonucleotide
gguccccgaccugccuccu

SEQ ID NO: 2194669 - RNA, 19 nt, Artificial Sequence
  Description of Artificial Sequence: Synthetic oligonucleotide
gcgguccgcgggcgucgcu

SEQ ID NO: 2194670 - RNA, 19 nt, Artificial Sequence
  Description of Artificial Sequence: Synthetic oligonucleotide
uuggacaccagucacaucc

SEQ ID NO: 2194671 - RNA, 19 nt, Artificial Sequence
  Description of Artificial Sequence: Synthetic oligonucleotide
acugaugaccaucuagugc

SEQ ID NO: 2194672 - RNA, 19 nt, Artificial Sequence
  Description of Artificial Sequence: Synthetic oligonucleotide
agucacauccauucagugc

SEQ ID NO: 2194673 - RNA, 19 nt, Artificial Sequence
  Description of Artificial Sequence: Synthetic oligonucleotide
gaauacacagaguacucag

SEQ ID NO: 2194674 - RNA, 19 nt, Artificial Sequence
  Description of Artificial Sequence: Synthetic oligonucleotide
uuugggaccaacaccacca

SEQ ID NO: 2194675 - RNA, 19 nt, Artificial Sequence
  Description of Artificial Sequence: Synthetic oligonucleotide
acaccagucacauccauuc

SEQ ID NO: 2194676 - RNA, 19 nt, Artificial Sequence
  Description of Artificial Sequence: Synthetic oligonucleotide
agaacucuagcaccaaacg

SEQ ID NO: 2194677 - RNA, 19 nt, Artificial Sequence
  Description of Artificial Sequence: Synthetic oligonucleotide
cuugauauccccaucacca

SEQ ID NO: 2194678 - RNA, 19 nt, Artificial Sequence
  Description of Artificial Sequence: Synthetic oligonucleotide
ucuagcaccaaacggagaa

SEQ ID NO: 2194679 - RNA, 19 nt, Artificial Sequence
  Description of Artificial Sequence: Synthetic oligonucleotide
aaacgguuggcauucccuc

SEQ ID NO: 2194680 - RNA, 19 nt, Artificial Sequence
  Description of Artificial Sequence: Synthetic oligonucleotide
acaugagucagucagugca

SEQ ID NO: 2194681 - RNA, 19 nt, Artificial Sequence
  Description of Artificial Sequence: Synthetic oligonucleotide
aacgguuggcauucccucc

SEQ ID NO: 2194682 - RNA, 19 nt, Artificial Sequence
  Description of Artificial Sequence: Synthetic oligonucleotide
aaccucucuggucccagcc

SEQ ID NO: 2194683 - RNA, 19 nt, Artificial Sequence
  Description of Artificial Sequence: Synthetic oligonucleotide
aacucuagcaccaaacgga

SEQ ID NO: 2194684 - RNA, 19 nt, Artificial Sequence
  Description of Artificial Sequence: Synthetic oligonucleotide
cugacugcccaucaaagcc

SEQ ID NO: 2194685 - RNA, 19 nt, Artificial Sequence
  Description of Artificial Sequence: Synthetic oligonucleotide
agaguacucagagaagucg

SEQ ID NO: 2194686 - RNA, 19 nt, Artificial Sequence
  Description of Artificial Sequence: Synthetic oligonucleotide
cugaugaccaucuagugca

SEQ ID NO: 2194687 - RNA, 19 nt, Artificial Sequence
  Description of Artificial Sequence: Synthetic oligonucleotide
acagaauacacagaguacu

SEQ ID NO: 2194688 - RNA, 19 nt, Artificial Sequence
  Description of Artificial Sequence: Synthetic oligonucleotide
aacuucagggucgugguag

SEQ ID NO: 2194689 - RNA, 19 nt, Artificial Sequence
  Description of Artificial Sequence: Synthetic oligonucleotide
ucuagugcaucaugcaggc

SEQ ID NO: 2194690 - RNA, 19 nt, Artificial Sequence
  Description of Artificial Sequence: Synthetic oligonucleotide
guauaggcaguacaggagc

SEQ ID NO: 2194691 - RNA, 19 nt, Artificial Sequence
  Description of Artificial Sequence: Synthetic oligonucleotide
cacacagaacucuagcacc

SEQ ID NO: 2194692 - RNA, 19 nt, Artificial Sequence
  Description of Artificial Sequence: Synthetic oligonucleotide
aacugaugaccaucuagug

SEQ ID NO: 2194693 - RNA, 19 nt, Artificial Sequence
  Description of Artificial Sequence: Synthetic oligonucleotide
agucagucagugcagcuuc

SEQ ID NO: 2194694 - RNA, 19 nt, Artificial Sequence
  Description of Artificial Sequence: Synthetic oligonucleotide
gauauccccaucaccaucc

SEQ ID NO: 2194695 - RNA, 19 nt, Artificial Sequence
  Description of Artificial Sequence: Synthetic oligonucleotide
aucaugcaggcuucggccc

SEQ ID NO: 2194696 - RNA, 19 nt, Artificial Sequence
  Description of Artificial Sequence: Synthetic oligonucleotide
caucauuuccucugggacc

SEQ ID NO: 2194697 - RNA, 19 nt, Artificial Sequence
  Description of Artificial Sequence: Synthetic oligonucleotide
caucaugcaggcuucggcc

SEQ ID NO: 2194698 - RNA, 19 nt, Artificial Sequence
  Description of Artificial Sequence: Synthetic oligonucleotide
uauaggcaguacaggagcc

SEQ ID NO: 2194699 - RNA, 19 nt, Artificial Sequence
  Description of Artificial Sequence: Synthetic oligonucleotide
cucacggguuccaaaacgg

SEQ ID NO: 2194700 - RNA, 19 nt, Artificial Sequence
  Description of Artificial Sequence: Synthetic oligonucleotide
uagugcaucaugcaggcuu

SEQ ID NO: 2194701 - RNA, 19 nt, Artificial Sequence
  Description of Artificial Sequence: Synthetic oligonucleotide
aaucaggcccucuuugcca

SEQ ID NO: 2194702 - RNA, 19 nt, Artificial Sequence
  Description of Artificial Sequence: Synthetic oligonucleotide
uuugcguccugccaaucca

SEQ ID NO: 2194703 - RNA, 19 nt, Artificial Sequence
  Description of Artificial Sequence: Synthetic oligonucleotide
gaccaacaccaccaggugg

SEQ ID NO: 2194704 - RNA, 19 nt, Artificial Sequence
  Description of Artificial Sequence: Synthetic oligonucleotide
caggguauaggcaguacag

SEQ ID NO: 2194705 - RNA, 19 nt, Artificial Sequence
  Description of Artificial Sequence: Synthetic oligonucleotide
aggaacuucagggucgugg

SEQ ID NO: 2194706 - RNA, 19 nt, Artificial Sequence
  Description of Artificial Sequence: Synthetic oligonucleotide
ucgucaucaucuucagggg

SEQ ID NO: 2194707 - RNA, 19 nt, Artificial Sequence
  Description of Artificial Sequence: Synthetic oligonucleotide
ggaacugaugaccaucuag

SEQ ID NO: 2194708 - RNA, 19 nt, Artificial Sequence
  Description of Artificial Sequence: Synthetic oligonucleotide
uccugacugcccaucaaag

SEQ ID NO: 2194709 - RNA, 19 nt, Artificial Sequence
  Description of Artificial Sequence: Synthetic oligonucleotide
caucuagugcaucaugcag

SEQ ID NO: 2194710 - RNA, 19 nt, Artificial Sequence
  Description of Artificial Sequence: Synthetic oligonucleotide
aaaccagcuucucccuuag

SEQ ID NO: 2194711 - RNA, 19 nt, Artificial Sequence
  Description of Artificial Sequence: Synthetic oligonucleotide
cauucagugcccacacacg

SEQ ID NO: 2194712 - RNA, 19 nt, Artificial Sequence
  Description of Artificial Sequence: Synthetic oligonucleotide
cagaacucuagcaccaaac

SEQ ID NO: 2194713 - RNA, 19 nt, Artificial Sequence
  Description of Artificial Sequence: Synthetic oligonucleotide
aaaacgguuggcauucccu

SEQ ID NO: 2194714 - RNA, 19 nt, Artificial Sequence
  Description of Artificial Sequence: Synthetic oligonucleotide
uccaucaaggccacaggcu

SEQ ID NO: 2194715 - RNA, 19 nt, Artificial Sequence
  Description of Artificial Sequence: Synthetic oligonucleotide
aaacggagaauggcaggac

SEQ ID NO: 2194716 - RNA, 19 nt, Artificial Sequence
  Description of Artificial Sequence: Synthetic oligonucleotide
uccagugguagggagcagg

SEQ ID NO: 2194717 - RNA, 19 nt, Artificial Sequence
  Description of Artificial Sequence: Synthetic oligonucleotide
ucuucagggguaccuggcc

SEQ ID NO: 2194718 - RNA, 19 nt, Artificial Sequence
  Description of Artificial Sequence: Synthetic oligonucleotide
acggagaauggcaggaccc

SEQ ID NO: 2194719 - RNA, 19 nt, Artificial Sequence
  Description of Artificial Sequence: Synthetic oligonucleotide
aauacacagaguacucaga

SEQ ID NO: 2194720 - RNA, 19 nt, Artificial Sequence
  Description of Artificial Sequence: Synthetic oligonucleotide
agucagugcagcuucuccu

SEQ ID NO: 2194721 - RNA, 19 nt, Artificial Sequence
  Description of Artificial Sequence: Synthetic oligonucleotide
gacuacuuggggugggcag

SEQ ID NO: 2194722 - RNA, 19 nt, Artificial Sequence
  Description of Artificial Sequence: Synthetic oligonucleotide
uuggcauucccuccacagc

SEQ ID NO: 2194723 - RNA, 19 nt, Artificial Sequence
  Description of Artificial Sequence: Synthetic oligonucleotide
agcccgaugguaccagcgc

SEQ ID NO: 2194724 - RNA, 19 nt, Artificial Sequence
  Description of Artificial Sequence: Synthetic oligonucleotide
uccaaaacgguuggcauuc

SEQ ID NO: 2194725 - RNA, 19 nt, Artificial Sequence
  Description of Artificial Sequence: Synthetic oligonucleotide
acugacccggcacaccagg

SEQ ID NO: 2194726 - RNA, 19 nt, Artificial Sequence
  Description of Artificial Sequence: Synthetic oligonucleotide
caugagucagucagugcag

SEQ ID NO: 2194727 - RNA, 19 nt, Artificial Sequence
  Description of Artificial Sequence: Synthetic oligonucleotide
cuccaucaaggccacaggc

SEQ ID NO: 2194728 - RNA, 19 nt, Artificial Sequence
  Description of Artificial Sequence: Synthetic oligonucleotide
ugauauccccaucaccauc

SEQ ID NO: 2194729 - RNA, 19 nt, Artificial Sequence
  Description of Artificial Sequence: Synthetic oligonucleotide
cuguggacuacuuggggug

SEQ ID NO: 2194730 - RNA, 19 nt, Artificial Sequence
  Description of Artificial Sequence: Synthetic oligonucleotide
cuuugggaccaacaccacc

SEQ ID NO: 2194731 - RNA, 19 nt, Artificial Sequence
  Description of Artificial Sequence: Synthetic oligonucleotide
cuuugcguccugccaaucc

SEQ ID NO: 2194732 - RNA, 19 nt, Artificial Sequence
  Description of Artificial Sequence: Synthetic oligonucleotide
uucuccuuucuccccacga

SEQ ID NO: 2194733 - RNA, 19 nt, Artificial Sequence
  Description of Artificial Sequence: Synthetic oligonucleotide
caaucaggcccucuuugcc

SEQ ID NO: 2194734 - RNA, 19 nt, Artificial Sequence
  Description of Artificial Sequence: Synthetic oligonucleotide
accucucuggucccagccc

SEQ ID NO: 2194735 - RNA, 19 nt, Artificial Sequence
  Description of Artificial Sequence: Synthetic oligonucleotide
ucgugguaguccuccacag

SEQ ID NO: 2194736 - RNA, 19 nt, Artificial Sequence
  Description of Artificial Sequence: Synthetic oligonucleotide
aucaccaucccaaggaacu

SEQ ID NO: 2194737 - RNA, 19 nt, Artificial Sequence
  Description of Artificial Sequence: Synthetic oligonucleotide
agaauacacagaguacuca

SEQ ID NO: 2194738 - RNA, 19 nt, Artificial Sequence
  Description of Artificial Sequence: Synthetic oligonucleotide
cacccuuggguccugacug

SEQ ID NO: 2194739 - RNA, 19 nt, Artificial Sequence
  Description of Artificial Sequence: Synthetic oligonucleotide
auauccccaucaccauccc

SEQ ID NO: 2194740 - RNA, 19 nt, Artificial Sequence
  Description of Artificial Sequence: Synthetic oligonucleotide
acauccauucagugcccac

SEQ ID NO: 2194741 - RNA, 19 nt, Artificial Sequence
  Description of Artificial Sequence: Synthetic oligonucleotide
gagccaucauuuccucugg

SEQ ID NO: 2194742 - RNA, 19 nt, Artificial Sequence
  Description of Artificial Sequence: Synthetic oligonucleotide
uacaugagucagucagugc

SEQ ID NO: 2194743 - RNA, 19 nt, Artificial Sequence
  Description of Artificial Sequence: Synthetic oligonucleotide
aggguauaggcaguacagg

SEQ ID NO: 2194744 - RNA, 19 nt, Artificial Sequence
  Description of Artificial Sequence: Synthetic oligonucleotide
agacugacccggcacacca

SEQ ID NO: 2194745 - RNA, 19 nt, Artificial Sequence
  Description of Artificial Sequence: Synthetic oligonucleotide
ugcguccugccaauccagg

SEQ ID NO: 2194746 - RNA, 19 nt, Artificial Sequence
  Description of Artificial Sequence: Synthetic oligonucleotide
ucacaugccucacggguuc

SEQ ID NO: 2194747 - RNA, 19 nt, Artificial Sequence
  Description of Artificial Sequence: Synthetic oligonucleotide
accaaacggagaauggcag

SEQ ID NO: 2194748 - RNA, 19 nt, Artificial Sequence
  Description of Artificial Sequence: Synthetic oligonucleotide
ucccaaggaacuucagggu

SEQ ID NO: 2194749 - RNA, 19 nt, Artificial Sequence
  Description of Artificial Sequence: Synthetic oligonucleotide
aaagccucugucacccuug

SEQ ID NO: 2194750 - RNA, 19 nt, Artificial Sequence
  Description of Artificial Sequence: Synthetic oligonucleotide
aggggucugaaccucucug

SEQ ID NO: 2194751 - RNA, 19 nt, Artificial Sequence
  Description of Artificial Sequence: Synthetic oligonucleotide
ccaaggaacuucagggucg

SEQ ID NO: 2194752 - RNA, 19 nt, Artificial Sequence
  Description of Artificial Sequence: Synthetic oligonucleotide
caucaaggccacaggcucc

SEQ ID NO: 2194753 - RNA, 19 nt, Artificial Sequence
  Description of Artificial Sequence: Synthetic oligonucleotide
ucacccuggucacccuugg

SEQ ID NO: 2194754 - RNA, 19 nt, Artificial Sequence
  Description of Artificial Sequence: Synthetic oligonucleotide
caaaacgguuggcauuccc

SEQ ID NO: 2194755 - RNA, 19 nt, Artificial Sequence
  Description of Artificial Sequence: Synthetic oligonucleotide
gugguaguccuccacagaa

SEQ ID NO: 2194756 - RNA, 19 nt, Artificial Sequence
  Description of Artificial Sequence: Synthetic oligonucleotide
uugggaccaacaccaccag

SEQ ID NO: 2194757 - RNA, 19 nt, Artificial Sequence
  Description of Artificial Sequence: Synthetic oligonucleotide
gguauaggcaguacaggag

SEQ ID NO: 2194758 - RNA, 19 nt, Artificial Sequence
  Description of Artificial Sequence: Synthetic oligonucleotide
cucacgggcacacagaacu

SEQ ID NO: 2194759 - RNA, 19 nt, Artificial Sequence
  Description of Artificial Sequence: Synthetic oligonucleotide
acucuagcaccaaacggag

SEQ ID NO: 2194760 - RNA, 19 nt, Artificial Sequence
  Description of Artificial Sequence: Synthetic oligonucleotide
acggguuccaaaacgguug

SEQ ID NO: 2194761 - RNA, 19 nt, Artificial Sequence
  Description of Artificial Sequence: Synthetic oligonucleotide
uuccaaaacgguuggcauu

SEQ ID NO: 2194762 - RNA, 19 nt, Artificial Sequence
  Description of Artificial Sequence: Synthetic oligonucleotide
caucaccaucccaaggaac

SEQ ID NO: 2194763 - RNA, 19 nt, Artificial Sequence
  Description of Artificial Sequence: Synthetic oligonucleotide
ggcagcggcgcucacaugc

SEQ ID NO: 2194764 - RNA, 19 nt, Artificial Sequence
  Description of Artificial Sequence: Synthetic oligonucleotide
uucggcccuaggcagcacc

SEQ ID NO: 2194765 - RNA, 19 nt, Artificial Sequence
  Description of Artificial Sequence: Synthetic oligonucleotide
acagcccgaugguaccagc

SEQ ID NO: 2194766 - RNA, 19 nt, Artificial Sequence
  Description of Artificial Sequence: Synthetic oligonucleotide
uugauauccccaucaccau

SEQ ID NO: 2194767 - RNA, 19 nt, Artificial Sequence
  Description of Artificial Sequence: Synthetic oligonucleotide
cagguuggacaccagucac

SEQ ID NO: 2194768 - RNA, 19 nt, Artificial Sequence
  Description of Artificial Sequence: Synthetic oligonucleotide
caccaaacggagaauggca

SEQ ID NO: 2194769 - RNA, 19 nt, Artificial Sequence
  Description of Artificial Sequence: Synthetic oligonucleotide
cacccuugggaccaaucag

SEQ ID NO: 2194770 - RNA, 19 nt, Artificial Sequence
  Description of Artificial Sequence: Synthetic oligonucleotide
ucaucaucuucagggguac

SEQ ID NO: 2194771 - RNA, 19 nt, Artificial Sequence
  Description of Artificial Sequence: Synthetic oligonucleotide
accgcuagagccaucauuu

SEQ ID NO: 2194772 - RNA, 19 nt, Artificial Sequence
  Description of Artificial Sequence: Synthetic oligonucleotide
ggguauaggcaguacagga

SEQ ID NO: 2194773 - RNA, 19 nt, Artificial Sequence
  Description of Artificial Sequence: Synthetic oligonucleotide
cacgagggccagcaggucc

SEQ ID NO: 2194774 - RNA, 19 nt, Artificial Sequence
  Description of Artificial Sequence: Synthetic oligonucleotide
gaaaccagcuucucccuua

SEQ ID NO: 2194775 - RNA, 19 nt, Artificial Sequence
  Description of Artificial Sequence: Synthetic oligonucleotide
ucaugcaggcuucggcccu

SEQ ID NO: 2194776 - RNA, 19 nt, Artificial Sequence
  Description of Artificial Sequence: Synthetic oligonucleotide
ugcccaucaaagccucugu

SEQ ID NO: 2194777 - RNA, 19 nt, Artificial Sequence
  Description of Artificial Sequence: Synthetic oligonucleotide
gagaauggcaggaccccgc

SEQ ID NO: 2194778 - RNA, 19 nt, Artificial Sequence
  Description of Artificial Sequence: Synthetic oligonucleotide
agaauggcaggaccccgcu

SEQ ID NO: 2194779 - RNA, 19 nt, Artificial Sequence
  Description of Artificial Sequence: Synthetic oligonucleotide
ucuuugccaggagacccag

SEQ ID NO: 2194780 - RNA, 19 nt, Artificial Sequence
  Description of Artificial Sequence: Synthetic oligonucleotide
cagagaagucgucaucauc

SEQ ID NO: 2194781 - RNA, 19 nt, Artificial Sequence
  Description of Artificial Sequence: Synthetic oligonucleotide
aggcacagcccgaugguac

SEQ ID NO: 2194782 - RNA, 19 nt, Artificial Sequence
  Description of Artificial Sequence: Synthetic oligonucleotide
cagcccgaugguaccagcg

SEQ ID NO: 2194783 - RNA, 19 nt, Artificial Sequence
  Description of Artificial Sequence: Synthetic oligonucleotide
uccugccaauccagggcgg

SEQ ID NO: 2194784 - RNA, 19 nt, Artificial Sequence
  Description of Artificial Sequence: Synthetic oligonucleotide
uagagccaucauuuccucu

SEQ ID NO: 2194785 - RNA, 19 nt, Artificial Sequence
  Description of Artificial Sequence: Synthetic oligonucleotide
acgguuggcauucccucca

SEQ ID NO: 2194786 - RNA, 19 nt, Artificial Sequence
  Description of Artificial Sequence: Synthetic oligonucleotide
uggccuuccuccucuacau

SEQ ID NO: 2194787 - RNA, 19 nt, Artificial Sequence
  Description of Artificial Sequence: Synthetic oligonucleotide
uccccugcgucuccuuugc

SEQ ID NO: 2194788 - RNA, 19 nt, Artificial Sequence
  Description of Artificial Sequence: Synthetic oligonucleotide
uccccaucaccaucccaag

SEQ ID NO: 2194789 - RNA, 19 nt, Artificial Sequence
  Description of Artificial Sequence: Synthetic oligonucleotide
caaacggagaauggcagga

SEQ ID NO: 2194790 - RNA, 19 nt, Artificial Sequence
  Description of Artificial Sequence: Synthetic oligonucleotide
ccucacggguuccaaaacg

SEQ ID NO: 2194791 - RNA, 19 nt, Artificial Sequence
  Description of Artificial Sequence: Synthetic oligonucleotide
ccuucugacccugaagucc

SEQ ID NO: 2194792 - RNA, 19 nt, Artificial Sequence
  Description of Artificial Sequence: Synthetic oligonucleotide
ccuugauauccccaucacc

SEQ ID NO: 2194793 - RNA, 19 nt, Artificial Sequence
  Description of Artificial Sequence: Synthetic oligonucleotide
gaugguaccagcgcagggu

SEQ ID NO: 2194794 - RNA, 19 nt, Artificial Sequence
  Description of Artificial Sequence: Synthetic oligonucleotide
ccaaacggagaauggcagg

SEQ ID NO: 2194795 - RNA, 19 nt, Artificial Sequence
  Description of Artificial Sequence: Synthetic oligonucleotide
gguuccaaaacgguuggca

SEQ ID NO: 2194796 - RNA, 19 nt, Artificial Sequence
  Description of Artificial Sequence: Synthetic oligonucleotide
ggccuuugggaccaacacc

SEQ ID NO: 2194797 - RNA, 19 nt, Artificial Sequence
  Description of Artificial Sequence: Synthetic oligonucleotide
gaauggcaggaccccgcug

SEQ ID NO: 2194798 - RNA, 19 nt, Artificial Sequence
  Description of Artificial Sequence: Synthetic oligonucleotide
augguaccagcgcagggua

SEQ ID NO: 2194799 - RNA, 19 nt, Artificial Sequence
  Description of Artificial Sequence: Synthetic oligonucleotide
gaaccucucuggucccagc

SEQ ID NO: 2194800 - RNA, 19 nt, Artificial Sequence
  Description of Artificial Sequence: Synthetic oligonucleotide
gcaggcuucggcccuaggc

SEQ ID NO: 2194801 - RNA, 19 nt, Artificial Sequence
  Description of Artificial Sequence: Synthetic oligonucleotide
gacccggcacaccaggcuc

SEQ ID NO: 2194802 - RNA, 19 nt, Artificial Sequence
  Description of Artificial Sequence: Synthetic oligonucleotide
ucacccuucugacccugaa

SEQ ID NO: 2194803 - RNA, 19 nt, Artificial Sequence
  Description of Artificial Sequence: Synthetic oligonucleotide
ccaaucaggcccucuuugc

SEQ ID NO: 2194804 - RNA, 19 nt, Artificial Sequence
  Description of Artificial Sequence: Synthetic oligonucleotide
ugccaauccagggcggcca

SEQ ID NO: 2194805 - RNA, 19 nt, Artificial Sequence
  Description of Artificial Sequence: Synthetic oligonucleotide
cauucccuccacagccgcc

SEQ ID NO: 2194806 - RNA, 19 nt, Artificial Sequence
  Description of Artificial Sequence: Synthetic oligonucleotide
cauccagugguagggagca

SEQ ID NO: 2194807 - RNA, 19 nt, Artificial Sequence
  Description of Artificial Sequence: Synthetic oligonucleotide
ucacgggcacacagaacuc

SEQ ID NO: 2194808 - RNA, 19 nt, Artificial Sequence
  Description of Artificial Sequence: Synthetic oligonucleotide
ggguaccuggccuuccucc

SEQ ID NO: 2194809 - RNA, 19 nt, Artificial Sequence
  Description of Artificial Sequence: Synthetic oligonucleotide
ucggcccuaggcagcaccu

SEQ ID NO: 2194810 - RNA, 19 nt, Artificial Sequence
  Description of Artificial Sequence: Synthetic oligonucleotide
cugcgucuccuuugcgucc

SEQ ID NO: 2194811 - RNA, 19 nt, Artificial Sequence
  Description of Artificial Sequence: Synthetic oligonucleotide
ggagaauggcaggaccccg

SEQ ID NO: 2194812 - RNA, 19 nt, Artificial Sequence
  Description of Artificial Sequence: Synthetic oligonucleotide
uuucuucacccuggucacc

SEQ ID NO: 2194813 - RNA, 19 nt, Artificial Sequence
  Description of Artificial Sequence: Synthetic oligonucleotide
cugacccggcacaccaggc

SEQ ID NO: 2194814 - RNA, 19 nt, Artificial Sequence
  Description of Artificial Sequence: Synthetic oligonucleotide
gcaccaaacggagaauggc

SEQ ID NO: 2194815 - RNA, 19 nt, Artificial Sequence
  Description of Artificial Sequence: Synthetic oligonucleotide
cauccauucagugcccaca

SEQ ID NO: 2194816 - RNA, 19 nt, Artificial Sequence
  Description of Artificial Sequence: Synthetic oligonucleotide
gcagguuggacaccaguca

SEQ ID NO: 2194817 - RNA, 19 nt, Artificial Sequence
  Description of Artificial Sequence: Synthetic oligonucleotide
uggacuacuuggggugggc

SEQ ID NO: 2194818 - RNA, 19 nt, Artificial Sequence
  Description of Artificial Sequence: Synthetic oligonucleotide
gcaggguauaggcaguaca

SEQ ID NO: 2194819 - RNA, 19 nt, Artificial Sequence
  Description of Artificial Sequence: Synthetic oligonucleotide
cuucugacccugaaguccu

SEQ ID NO: 2194820 - RNA, 19 nt, Artificial Sequence
  Description of Artificial Sequence: Synthetic oligonucleotide
caccuccaggaacugauga

SEQ ID NO: 2194821 - RNA, 19 nt, Artificial Sequence
  Description of Artificial Sequence: Synthetic oligonucleotide
ccucuuugccaggagaccc

SEQ ID NO: 2194822 - RNA, 19 nt, Artificial Sequence
  Description of Artificial Sequence: Synthetic oligonucleotide
ugaccaucuagugcaucau

SEQ ID NO: 2194823 - RNA, 19 nt, Artificial Sequence
  Description of Artificial Sequence: Synthetic oligonucleotide
aauccagggcggccaggaa

SEQ ID NO: 2194824 - RNA, 19 nt, Artificial Sequence
  Description of Artificial Sequence: Synthetic oligonucleotide
gaugaccaucuagugcauc

SEQ ID NO: 2194825 - RNA, 19 nt, Artificial Sequence
  Description of Artificial Sequence: Synthetic oligonucleotide
uccuuugcguccugccaau

SEQ ID NO: 2194826 - RNA, 19 nt, Artificial Sequence
  Description of Artificial Sequence: Synthetic oligonucleotide
uaccagcgcaggguauagg

SEQ ID NO: 2194827 - RNA, 19 nt, Artificial Sequence
  Description of Artificial Sequence: Synthetic oligonucleotide
ggaccaacaccaccaggug

SEQ ID NO: 2194828 - RNA, 19 nt, Artificial Sequence
  Description of Artificial Sequence: Synthetic oligonucleotide
cugcccaucaaagccucug

SEQ ID NO: 2194829 - RNA, 19 nt, Artificial Sequence
  Description of Artificial Sequence: Synthetic oligonucleotide
guccugacugcccaucaaa

SEQ ID NO: 2194830 - RNA, 19 nt, Artificial Sequence
  Description of Artificial Sequence: Synthetic oligonucleotide
ugguagggagcaggggucu

SEQ ID NO: 2194831 - RNA, 19 nt, Artificial Sequence
  Description of Artificial Sequence: Synthetic oligonucleotide
agacccagacugacccggc

SEQ ID NO: 2194832 - RNA, 19 nt, Artificial Sequence
  Description of Artificial Sequence: Synthetic oligonucleotide
ggagacccagacugacccg

SEQ ID NO: 2194833 - RNA, 19 nt, Artificial Sequence
  Description of Artificial Sequence: Synthetic oligonucleotide
cccaaggaacuucaggguc

SEQ ID NO: 2194834 - RNA, 19 nt, Artificial Sequence
  Description of Artificial Sequence: Synthetic oligonucleotide
acccggcacaccaggcucc

SEQ ID NO: 2194835 - RNA, 19 nt, Artificial Sequence
  Description of Artificial Sequence: Synthetic oligonucleotide
ucagucagugcagcuucuc

SEQ ID NO: 2194836 - RNA, 19 nt, Artificial Sequence
  Description of Artificial Sequence: Synthetic oligonucleotide
ucugacccugaaguccuuc

SEQ ID NO: 2194837 - RNA, 19 nt, Artificial Sequence
  Description of Artificial Sequence: Synthetic oligonucleotide
caggaacugaugaccaucu

SEQ ID NO: 2194838 - RNA, 19 nt, Artificial Sequence
  Description of Artificial Sequence: Synthetic oligonucleotide
gggccuuugggaccaacac

SEQ ID NO: 2194839 - RNA, 19 nt, Artificial Sequence
  Description of Artificial Sequence: Synthetic oligonucleotide
guaccagcgcaggguauag

SEQ ID NO: 2194840 - RNA, 19 nt, Artificial Sequence
  Description of Artificial Sequence: Synthetic oligonucleotide
gcguccugccaauccaggg

SEQ ID NO: 2194841 - RNA, 19 nt, Artificial Sequence
  Description of Artificial Sequence: Synthetic oligonucleotide
cuccuuugcguccugccaa

SEQ ID NO: 2194842 - RNA, 19 nt, Artificial Sequence
  Description of Artificial Sequence: Synthetic oligonucleotide
ucucacccuucugacccug

SEQ ID NO: 2194843 - RNA, 19 nt, Artificial Sequence
  Description of Artificial Sequence: Synthetic oligonucleotide
ugcgucuccuuugcguccu

SEQ ID NO: 2194844 - RNA, 19 nt, Artificial Sequence
  Description of Artificial Sequence: Synthetic oligonucleotide
ggcacagcccgaugguacc

SEQ ID NO: 2194845 - RNA, 19 nt, Artificial Sequence
  Description of Artificial Sequence: Synthetic oligonucleotide
acaggagcccucauccagu

SEQ ID NO: 2194846 - RNA, 19 nt, Artificial Sequence
  Description of Artificial Sequence: Synthetic oligonucleotide
ccuggucacccuugggucc

SEQ ID NO: 2194847 - RNA, 19 nt, Artificial Sequence
  Description of Artificial Sequence: Synthetic oligonucleotide
ggagcccucauccaguggu

SEQ ID NO: 2194848 - RNA, 19 nt, Artificial Sequence
  Description of Artificial Sequence: Synthetic oligonucleotide
caccaucccaaggaacuuc

SEQ ID NO: 2194849 - RNA, 19 nt, Artificial Sequence
  Description of Artificial Sequence: Synthetic oligonucleotide
ggcgcucacaugccucacg

SEQ ID NO: 2194850 - RNA, 19 nt, Artificial Sequence
  Description of Artificial Sequence: Synthetic oligonucleotide
ggcagguuggacaccaguc

SEQ ID NO: 2194851 - RNA, 19 nt, Artificial Sequence
  Description of Artificial Sequence: Synthetic oligonucleotide
ugguaccagcgcaggguau

SEQ ID NO: 2194852 - RNA, 19 nt, Artificial Sequence
  Description of Artificial Sequence: Synthetic oligonucleotide
ggaacuucagggucguggu

SEQ ID NO: 2194853 - RNA, 19 nt, Artificial Sequence
  Description of Artificial Sequence: Synthetic oligonucleotide
ccugcgucuccuuugcguc

SEQ ID NO: 2194854 - RNA, 19 nt, Artificial Sequence
  Description of Artificial Sequence: Synthetic oligonucleotide
aggcagcaccuguucuuug

SEQ ID NO: 2194855 - RNA, 19 nt, Artificial Sequence
  Description of Artificial Sequence: Synthetic oligonucleotide
ucaccaucccaaggaacuu

SEQ ID NO: 2194856 - RNA, 19 nt, Artificial Sequence
  Description of Artificial Sequence: Synthetic oligonucleotide
gacugacccggcacaccag

SEQ ID NO: 2194857 - RNA, 19 nt, Artificial Sequence
  Description of Artificial Sequence: Synthetic oligonucleotide
ggcauucccuccacagccg

SEQ ID NO: 2194858 - RNA, 19 nt, Artificial Sequence
  Description of Artificial Sequence: Synthetic oligonucleotide
agggccuuugggaccaaca

SEQ ID NO: 2194859 - RNA, 19 nt, Artificial Sequence
  Description of Artificial Sequence: Synthetic oligonucleotide
cagacugacccggcacacc

SEQ ID NO: 2194860 - RNA, 19 nt, Artificial Sequence
  Description of Artificial Sequence: Synthetic oligonucleotide
gcucacaugccucacgggu

SEQ ID NO: 2194861 - RNA, 19 nt, Artificial Sequence
  Description of Artificial Sequence: Synthetic oligonucleotide
gacaaagggauggcaggcu

SEQ ID NO: 2194862 - RNA, 19 nt, Artificial Sequence
  Description of Artificial Sequence: Synthetic oligonucleotide
gaacuucagggucguggua

SEQ ID NO: 2194863 - RNA, 19 nt, Artificial Sequence
  Description of Artificial Sequence: Synthetic oligonucleotide
cucuagcaccaaacggaga

SEQ ID NO: 2194864 - RNA, 19 nt, Artificial Sequence
  Description of Artificial Sequence: Synthetic oligonucleotide
aaggaacuucagggucgug

SEQ ID NO: 2194865 - RNA, 19 nt, Artificial Sequence
  Description of Artificial Sequence: Synthetic oligonucleotide
caauccagggcggccagga

SEQ ID NO: 2194866 - RNA, 19 nt, Artificial Sequence
  Description of Artificial Sequence: Synthetic oligonucleotide
cugccaauccagggcggcc

SEQ ID NO: 2194867 - RNA, 19 nt, Artificial Sequence
  Description of Artificial Sequence: Synthetic oligonucleotide
gcauucccuccacagccgc

SEQ ID NO: 2194868 - RNA, 19 nt, Artificial Sequence
  Description of Artificial Sequence: Synthetic oligonucleotide
acgagggccagcagguccu

SEQ ID NO: 2194869 - RNA, 19 nt, Artificial Sequence
  Description of Artificial Sequence: Synthetic oligonucleotide
augccucacggguuccaaa

SEQ ID NO: 2194870 - RNA, 19 nt, Artificial Sequence
  Description of Artificial Sequence: Synthetic oligonucleotide
aggccacaggcucccuuca

SEQ ID NO: 2194871 - RNA, 19 nt, Artificial Sequence
  Description of Artificial Sequence: Synthetic oligonucleotide
gaccgcuagagccaucauu

SEQ ID NO: 2194872 - RNA, 19 nt, Artificial Sequence
  Description of Artificial Sequence: Synthetic oligonucleotide
cguccugccaauccagggc

SEQ ID NO: 2194873 - RNA, 19 nt, Artificial Sequence
  Description of Artificial Sequence: Synthetic oligonucleotide
cacagcccgaugguaccag

SEQ ID NO: 2194874 - RNA, 19 nt, Artificial Sequence
  Description of Artificial Sequence: Synthetic oligonucleotide
cccgaugguaccagcgcag

SEQ ID NO: 2194875 - RNA, 19 nt, Artificial Sequence
  Description of Artificial Sequence: Synthetic oligonucleotide
ccaggaacugaugaccauc

SEQ ID NO: 2194876 - RNA, 19 nt, Artificial Sequence
  Description of Artificial Sequence: Synthetic oligonucleotide
guaccuggccuuccuccuc

SEQ ID NO: 2194877 - RNA, 19 nt, Artificial Sequence
  Description of Artificial Sequence: Synthetic oligonucleotide
cuuagcuccuuuucuccau

SEQ ID NO: 2194878 - RNA, 19 nt, Artificial Sequence
  Description of Artificial Sequence: Synthetic oligonucleotide
guuggacaccagucacauc

SEQ ID NO: 2194879 - RNA, 19 nt, Artificial Sequence
  Description of Artificial Sequence: Synthetic oligonucleotide
cucccuuagcuccuuuucu

SEQ ID NO: 2194880 - RNA, 19 nt, Artificial Sequence
  Description of Artificial Sequence: Synthetic oligonucleotide
uggguccugacugcccauc

SEQ ID NO: 2194881 - RNA, 19 nt, Artificial Sequence
  Description of Artificial Sequence: Synthetic oligonucleotide
gucacccuuggguccugac

SEQ ID NO: 2194882 - RNA, 19 nt, Artificial Sequence
  Description of Artificial Sequence: Synthetic oligonucleotide
cccuggucacccuuggguc

SEQ ID NO: 2194883 - RNA, 19 nt, Artificial Sequence
  Description of Artificial Sequence: Synthetic oligonucleotide
caccagucacauccauuca

SEQ ID NO: 2194884 - RNA, 19 nt, Artificial Sequence
  Description of Artificial Sequence: Synthetic oligonucleotide
ccuuucuccccacgagggc

SEQ ID NO: 2194885 - RNA, 19 nt, Artificial Sequence
  Description of Artificial Sequence: Synthetic oligonucleotide
uggcaggaccccgcugagc

SEQ ID NO: 2194886 - RNA, 19 nt, Artificial Sequence
  Description of Artificial Sequence: Synthetic oligonucleotide
cacaugccucacggguucc

SEQ ID NO: 2194887 - RNA, 19 nt, Artificial Sequence
  Description of Artificial Sequence: Synthetic oligonucleotide
cuucagggucgugguaguc

SEQ ID NO: 2194888 - RNA, 19 nt, Artificial Sequence
  Description of Artificial Sequence: Synthetic oligonucleotide
gggaccgcuagagccauca

SEQ ID NO: 2194889 - RNA, 19 nt, Artificial Sequence
  Description of Artificial Sequence: Synthetic oligonucleotide
gucacccuugggaccaauc

SEQ ID NO: 2194890 - RNA, 19 nt, Artificial Sequence
  Description of Artificial Sequence: Synthetic oligonucleotide
gcccaucaaagccucuguc

SEQ ID NO: 2194891 - RNA, 19 nt, Artificial Sequence
  Description of Artificial Sequence: Synthetic oligonucleotide
cuccccacgagggccagca

SEQ ID NO: 2194892 - RNA, 19 nt, Artificial Sequence
  Description of Artificial Sequence: Synthetic oligonucleotide
cacggguuccaaaacgguu

SEQ ID NO: 2194893 - RNA, 19 nt, Artificial Sequence
  Description of Artificial Sequence: Synthetic oligonucleotide
cucacaugccucacggguu

SEQ ID NO: 2194894 - RNA, 19 nt, Artificial Sequence
  Description of Artificial Sequence: Synthetic oligonucleotide
gccucacggguuccaaaac

SEQ ID NO: 2194895 - RNA, 19 nt, Artificial Sequence
  Description of Artificial Sequence: Synthetic oligonucleotide
gccaauccagggcggccag

SEQ ID NO: 2194896 - RNA, 19 nt, Artificial Sequence
  Description of Artificial Sequence: Synthetic oligonucleotide
gcccgaugguaccagcgca

SEQ ID NO: 2194897 - RNA, 19 nt, Artificial Sequence
  Description of Artificial Sequence: Synthetic oligonucleotide
ccgaugguaccagcgcagg

SEQ ID NO: 2194898 - RNA, 19 nt, Artificial Sequence
  Description of Artificial Sequence: Synthetic oligonucleotide
cgaugguaccagcgcaggg

SEQ ID NO: 2194899 - RNA, 19 nt, Artificial Sequence
  Description of Artificial Sequence: Synthetic oligonucleotide
ccaucccaaggaacuucag

SEQ ID NO: 2194900 - RNA, 19 nt, Artificial Sequence
  Description of Artificial Sequence: Synthetic oligonucleotide
ccgccauagacaaagggau

SEQ ID NO: 2194901 - RNA, 19 nt, Artificial Sequence
  Description of Artificial Sequence: Synthetic oligonucleotide
ccuuugggaccaacaccac

SEQ ID NO: 2194902 - RNA, 19 nt, Artificial Sequence
  Description of Artificial Sequence: Synthetic oligonucleotide
ccacagccgccauagacaa

SEQ ID NO: 2194903 - RNA, 19 nt, Artificial Sequence
  Description of Artificial Sequence: Synthetic oligonucleotide
acgcucacgggcacacaga

SEQ ID NO: 2194904 - RNA, 19 nt, Artificial Sequence
  Description of Artificial Sequence: Synthetic oligonucleotide
cagugcccacacacgcuca

SEQ ID NO: 2194905 - RNA, 19 nt, Artificial Sequence
  Description of Artificial Sequence: Synthetic oligonucleotide
ggguccugacugcccauca

SEQ ID NO: 2194906 - RNA, 19 nt, Artificial Sequence
  Description of Artificial Sequence: Synthetic oligonucleotide
acgggcacacagaacucua

SEQ ID NO: 2194907 - RNA, 19 nt, Artificial Sequence
  Description of Artificial Sequence: Synthetic oligonucleotide
cucacccuucugacccuga

SEQ ID NO: 2194908 - RNA, 19 nt, Artificial Sequence
  Description of Artificial Sequence: Synthetic oligonucleotide
ccagucacauccauucagu

SEQ ID NO: 2194909 - RNA, 19 nt, Artificial Sequence
  Description of Artificial Sequence: Synthetic oligonucleotide
cccgcugagcccugccacc

SEQ ID NO: 2194910 - RNA, 19 nt, Artificial Sequence
  Description of Artificial Sequence: Synthetic oligonucleotide
cugagcccugccaccucca

SEQ ID NO: 2194911 - RNA, 19 nt, Artificial Sequence
  Description of Artificial Sequence: Synthetic oligonucleotide
ggacuacuuggggugggca

SEQ ID NO: 2194912 - RNA, 19 nt, Artificial Sequence
  Description of Artificial Sequence: Synthetic oligonucleotide
ccugccaauccagggcggc

SEQ ID NO: 2194913 - RNA, 19 nt, Artificial Sequence
  Description of Artificial Sequence: Synthetic oligonucleotide
ccagcgcaggguauaggca

SEQ ID NO: 2194914 - RNA, 19 nt, Artificial Sequence
  Description of Artificial Sequence: Synthetic oligonucleotide
gcaccuguucuuuggcugu

SEQ ID NO: 2194915 - RNA, 19 nt, Artificial Sequence
  Description of Artificial Sequence: Synthetic oligonucleotide
caaagccucugucacccuu

SEQ ID NO: 2194916 - RNA, 19 nt, Artificial Sequence
  Description of Artificial Sequence: Synthetic oligonucleotide
caaggaacuucagggucgu

SEQ ID NO: 2194917 - RNA, 19 nt, Artificial Sequence
  Description of Artificial Sequence: Synthetic oligonucleotide
ggguuccaaaacgguuggc

SEQ ID NO: 2194918 - RNA, 19 nt, Artificial Sequence
  Description of Artificial Sequence: Synthetic oligonucleotide
gguagggagcaggggucug

SEQ ID NO: 2194919 - RNA, 19 nt, Artificial Sequence
  Description of Artificial Sequence: Synthetic oligonucleotide
caugccucacggguuccaa

SEQ ID NO: 2194920 - RNA, 19 nt, Artificial Sequence
  Description of Artificial Sequence: Synthetic oligonucleotide
cacgggcacacagaacucu

SEQ ID NO: 2194921 - RNA, 19 nt, Artificial Sequence
  Description of Artificial Sequence: Synthetic oligonucleotide
ccagacugacccggcacac

SEQ ID NO: 2194922 - RNA, 19 nt, Artificial Sequence
  Description of Artificial Sequence: Synthetic oligonucleotide
cccagacugacccggcaca

SEQ ID NO: 2194923 - RNA, 19 nt, Artificial Sequence
  Description of Artificial Sequence: Synthetic oligonucleotide
ggaccaaucaggcccucuu

SEQ ID NO: 2194924 - RNA, 19 nt, Artificial Sequence
  Description of Artificial Sequence: Synthetic oligonucleotide
gcagcggcgcucacaugcc

SEQ ID NO: 2194925 - RNA, 19 nt, Artificial Sequence
  Description of Artificial Sequence: Synthetic oligonucleotide
gggguaccuggccuuccuc

SEQ ID NO: 2194926 - RNA, 19 nt, Artificial Sequence
  Description of Artificial Sequence: Synthetic oligonucleotide
ccaaaacgguuggcauucc

SEQ ID NO: 2194927 - RNA, 19 nt, Artificial Sequence
  Description of Artificial Sequence: Synthetic oligonucleotide
uggucacccuuggguccug

SEQ ID NO: 2194928 - RNA, 19 nt, Artificial Sequence
  Description of Artificial Sequence: Synthetic oligonucleotide
ccgcuagagccaucauuuc

SEQ ID NO: 2194929 - RNA, 19 nt, Artificial Sequence
  Description of Artificial Sequence: Synthetic oligonucleotide
ggcccuaggcagcaccugu

SEQ ID NO: 2194930 - RNA, 19 nt, Artificial Sequence
  Description of Artificial Sequence: Synthetic oligonucleotide
cuagcaccaaacggagaau

SEQ ID NO: 2194931 - RNA, 19 nt, Artificial Sequence
  Description of Artificial Sequence: Synthetic oligonucleotide
gggcagguuggacaccagu

SEQ ID NO: 2194932 - RNA, 19 nt, Artificial Sequence
  Description of Artificial Sequence: Synthetic oligonucleotide
gcuucggcccuaggcagca

SEQ ID NO: 2194933 - RNA, 19 nt, Artificial Sequence
  Description of Artificial Sequence: Synthetic oligonucleotide
gggaccucucucacccuuc

SEQ ID NO: 2194934 - RNA, 19 nt, Artificial Sequence
  Description of Artificial Sequence: Synthetic oligonucleotide
ugggaccaaucaggcccuc

SEQ ID NO: 2194935 - RNA, 19 nt, Artificial Sequence
  Description of Artificial Sequence: Synthetic oligonucleotide
ccucuacaugagucaguca

SEQ ID NO: 2194936 - RNA, 19 nt, Artificial Sequence
  Description of Artificial Sequence: Synthetic oligonucleotide
ccaauccagggcggccagg

SEQ ID NO: 2194937 - RNA, 19 nt, Artificial Sequence
  Description of Artificial Sequence: Synthetic oligonucleotide
gccaggaaaccagcuucuc

SEQ ID NO: 2194938 - RNA, 19 nt, Artificial Sequence
  Description of Artificial Sequence: Synthetic oligonucleotide
cuggucacccuuggguccu

SEQ ID NO: 2194939 - RNA, 19 nt, Artificial Sequence
  Description of Artificial Sequence: Synthetic oligonucleotide
gcucacgggcacacagaac

SEQ ID NO: 2194940 - RNA, 19 nt, Artificial Sequence
  Description of Artificial Sequence: Synthetic oligonucleotide
cuucggcccuaggcagcac

SEQ ID NO: 2194941 - RNA, 19 nt, Artificial Sequence
  Description of Artificial Sequence: Synthetic oligonucleotide
cacagccgccauagacaaa

SEQ ID NO: 2194942 - RNA, 19 nt, Artificial Sequence
  Description of Artificial Sequence: Synthetic oligonucleotide
gggcggccaggaaaccagc

SEQ ID NO: 2194943 - RNA, 19 nt, Artificial Sequence
  Description of Artificial Sequence: Synthetic oligonucleotide
ccuaggcagcaccuguucu

SEQ ID NO: 2194944 - RNA, 19 nt, Artificial Sequence
  Description of Artificial Sequence: Synthetic oligonucleotide
cgugguaguccuccacaga

SEQ ID NO: 2194945 - RNA, 19 nt, Artificial Sequence
  Description of Artificial Sequence: Synthetic oligonucleotide
gcacagcccgaugguacca

SEQ ID NO: 2194946 - RNA, 19 nt, Artificial Sequence
  Description of Artificial Sequence: Synthetic oligonucleotide
caugcaggcuucggcccua

SEQ ID NO: 2194947 - RNA, 19 nt, Artificial Sequence
  Description of Artificial Sequence: Synthetic oligonucleotide
cccugcgucuccuuugcgu

SEQ ID NO: 2194948 - RNA, 19 nt, Artificial Sequence
  Description of Artificial Sequence: Synthetic oligonucleotide
cuagugcaucaugcaggcu

SEQ ID NO: 2194949 - RNA, 19 nt, Artificial Sequence
  Description of Artificial Sequence: Synthetic oligonucleotide
ccccugcgucuccuuugcg

SEQ ID NO: 2194950 - RNA, 19 nt, Artificial Sequence
  Description of Artificial Sequence: Synthetic oligonucleotide
gccacaggcucccuucauu

SEQ ID NO: 2194951 - RNA, 19 nt, Artificial Sequence
  Description of Artificial Sequence: Synthetic oligonucleotide
ccuuugcguccugccaauc

SEQ ID NO: 2194952 - RNA, 19 nt, Artificial Sequence
  Description of Artificial Sequence: Synthetic oligonucleotide
cccggcacaccaggcuccc

SEQ ID NO: 2194953 - RNA, 19 nt, Artificial Sequence
  Description of Artificial Sequence: Synthetic oligonucleotide
ccagggcggccaggaaacc

SEQ ID NO: 2194954 - RNA, 19 nt, Artificial Sequence
  Description of Artificial Sequence: Synthetic oligonucleotide
gcggccaggaaaccagcuu

SEQ ID NO: 2194955 - RNA, 19 nt, Artificial Sequence
  Description of Artificial Sequence: Synthetic oligonucleotide
cgcaggguauaggcaguac

SEQ ID NO: 2194956 - RNA, 19 nt, Artificial Sequence
  Description of Artificial Sequence: Synthetic oligonucleotide
cgguuggcauucccuccac

SEQ ID NO: 2194957 - RNA, 19 nt, Artificial Sequence
  Description of Artificial Sequence: Synthetic oligonucleotide
gcgucuccuuugcguccug

SEQ ID NO: 2194958 - RNA, 19 nt, Artificial Sequence
  Description of Artificial Sequence: Synthetic oligonucleotide
cagcggcgcucacaugccu

SEQ ID NO: 2194959 - RNA, 19 nt, Artificial Sequence
  Description of Artificial Sequence: Synthetic oligonucleotide
ggucacccuuggguccuga

SEQ ID NO: 2194960 - RNA, 19 nt, Artificial Sequence
  Description of Artificial Sequence: Synthetic oligonucleotide
gggaccaaucaggcccucu

SEQ ID NO: 2194961 - RNA, 19 nt, Artificial Sequence
  Description of Artificial Sequence: Synthetic oligonucleotide
gcgcaggguauaggcagua

SEQ ID NO: 2194962 - RNA, 19 nt, Artificial Sequence
  Description of Artificial Sequence: Synthetic oligonucleotide
ccacgagggccagcagguc

SEQ ID NO: 2194963 - RNA, 19 nt, Artificial Sequence
  Description of Artificial Sequence: Synthetic oligonucleotide
ggaccgcuagagccaucau

SEQ ID NO: 2194964 - RNA, 19 nt, Artificial Sequence
  Description of Artificial Sequence: Synthetic oligonucleotide
cgcugagcccugccaccuc

SEQ ID NO: 2194965 - RNA, 19 nt, Artificial Sequence
  Description of Artificial Sequence: Synthetic oligonucleotide
cggcccuaggcagcaccug

SEQ ID NO: 2194966 - RNA, 19 nt, Artificial Sequence
  Description of Artificial Sequence: Synthetic oligonucleotide
ggggaccgcuagagccauc

SEQ ID NO: 2194967 - RNA, 19 nt, Artificial Sequence
  Description of Artificial Sequence: Synthetic oligonucleotide
gcccuaggcagcaccuguu

SEQ ID NO: 2194968 - RNA, 19 nt, Artificial Sequence
  Description of Artificial Sequence: Synthetic oligonucleotide
ccaccaggcacagcccgau

SEQ ID NO: 2194969 - RNA, 19 nt, Artificial Sequence
  Description of Artificial Sequence: Synthetic oligonucleotide
cggcgcucacaugccucac

SEQ ID NO: 2194970 - RNA, 19 nt, Artificial Sequence
  Description of Artificial Sequence: Synthetic oligonucleotide
aacaaguggacucaagccc

SEQ ID NO: 2194971 - RNA, 19 nt, Artificial Sequence
  Description of Artificial Sequence: Synthetic oligonucleotide
uugguaaauguccaaaccg

SEQ ID NO: 2194972 - RNA, 19 nt, Artificial Sequence
  Description of Artificial Sequence: Synthetic oligonucleotide
agaauaugggaucagguuc

SEQ ID NO: 2194973 - RNA, 19 nt, Artificial Sequence
  Description of Artificial Sequence: Synthetic oligonucleotide
aaauguccaaaccguaggc

SEQ ID NO: 2194974 - RNA, 19 nt, Artificial Sequence
  Description of Artificial Sequence: Synthetic oligonucleotide
uuaugaaucgcucugcaug

SEQ ID NO: 2194975 - RNA, 19 nt, Artificial Sequence
  Description of Artificial Sequence: Synthetic oligonucleotide
cucuuugugaucauggugg

SEQ ID NO: 2194976 - RNA, 19 nt, Artificial Sequence
  Description of Artificial Sequence: Synthetic oligonucleotide
uaaauguccaaaccguagg

SEQ ID NO: 2194977 - RNA, 19 nt, Artificial Sequence
  Description of Artificial Sequence: Synthetic oligonucleotide
uggacucaagcccugaugg

SEQ ID NO: 2194978 - RNA, 19 nt, Artificial Sequence
  Description of Artificial Sequence: Synthetic oligonucleotide
uuugguaaauguccaaacc

SEQ ID NO: 2194979 - RNA, 19 nt, Artificial Sequence
  Description of Artificial Sequence: Synthetic oligonucleotide
aaauucuccuuccaguuca

SEQ ID NO: 2194980 - RNA, 19 nt, Artificial Sequence
  Description of Artificial Sequence: Synthetic oligonucleotide
uaugaaucgcucugcaugg

SEQ ID NO: 2194981 - RNA, 19 nt, Artificial Sequence
  Description of Artificial Sequence: Synthetic oligonucleotide
ucuuaaucuggcuucgagg

SEQ ID NO: 2194982 - RNA, 19 nt, Artificial Sequence
  Description of Artificial Sequence: Synthetic oligonucleotide
aauguccaaaccguaggcc

SEQ ID NO: 2194983 - RNA, 19 nt, Artificial Sequence
  Description of Artificial Sequence: Synthetic oligonucleotide
auaagcugagaagacaggc

SEQ ID NO: 2194984 - RNA, 19 nt, Artificial Sequence
  Description of Artificial Sequence: Synthetic oligonucleotide
uuaaacagccucagaagag

SEQ ID NO: 2194985 - RNA, 19 nt, Artificial Sequence
  Description of Artificial Sequence: Synthetic oligonucleotide
uuaccuaaagucaauuuaa

SEQ ID NO: 2194986 - RNA, 19 nt, Artificial Sequence
  Description of Artificial Sequence: Synthetic oligonucleotide
uaggccacaaccaaacaag

SEQ ID NO: 2194987 - RNA, 19 nt, Artificial Sequence
  Description of Artificial Sequence: Synthetic oligonucleotide
accuaaagucaauuuaaac

SEQ ID NO: 2194988 - RNA, 19 nt, Artificial Sequence
  Description of Artificial Sequence: Synthetic oligonucleotide
gaugcuuccguuuuaccgc

SEQ ID NO: 2194989 - RNA, 19 nt, Artificial Sequence
  Description of Artificial Sequence: Synthetic oligonucleotide
caaaccguaggccacaacc

SEQ ID NO: 2194990 - RNA, 19 nt, Artificial Sequence
  Description of Artificial Sequence: Synthetic oligonucleotide
aaaaggacacugcugauua

SEQ ID NO: 2194991 - RNA, 19 nt, Artificial Sequence
  Description of Artificial Sequence: Synthetic oligonucleotide
cagaagguuaccuaaaguc

SEQ ID NO: 2194992 - RNA, 19 nt, Artificial Sequence
  Description of Artificial Sequence: Synthetic oligonucleotide
ucgagaaacugucugguug

SEQ ID NO: 2194993 - RNA, 19 nt, Artificial Sequence
  Description of Artificial Sequence: Synthetic oligonucleotide
caucgaacugcuuggaugg

SEQ ID NO: 2194994 - RNA, 19 nt, Artificial Sequence
  Description of Artificial Sequence: Synthetic oligonucleotide
cuggaggucucauaaaagg

SEQ ID NO: 2194995 - RNA, 19 nt, Artificial Sequence
  Description of Artificial Sequence: Synthetic oligonucleotide
gaauaugggaucagguucg

SEQ ID NO: 2194996 - RNA, 19 nt, Artificial Sequence
  Description of Artificial Sequence: Synthetic oligonucleotide
ucaauguugaucucauucu

SEQ ID NO: 2194997 - RNA, 19 nt, Artificial Sequence
  Description of Artificial Sequence: Synthetic oligonucleotide
ugcugauuagcacauaguc

SEQ ID NO: 2194998 - RNA, 19 nt, Artificial Sequence
  Description of Artificial Sequence: Synthetic oligonucleotide
uaguuuaugaaucgcucug

SEQ ID NO: 2194999 - RNA, 19 nt, Artificial Sequence
  Description of Artificial Sequence: Synthetic oligonucleotide
agguccaccaucuccagac

SEQ ID NO: 2195000 - RNA, 19 nt, Artificial Sequence
  Description of Artificial Sequence: Synthetic oligonucleotide
uuagcacauagucauaguc

SEQ ID NO: 2195001 - RNA, 19 nt, Artificial Sequence
  Description of Artificial Sequence: Synthetic oligonucleotide
guugaucucauucuuaauc

SEQ ID NO: 2195002 - RNA, 19 nt, Artificial Sequence
  Description of Artificial Sequence: Synthetic oligonucleotide
auagcuccuuagcugaccc

SEQ ID NO: 2195003 - RNA, 19 nt, Artificial Sequence
  Description of Artificial Sequence: Synthetic oligonucleotide
aggcguuucaggaacaucc

SEQ ID NO: 2195004 - RNA, 19 nt, Artificial Sequence
  Description of Artificial Sequence: Synthetic oligonucleotide
aaauuguuagaggguuucc

SEQ ID NO: 2195005 - RNA, 19 nt, Artificial Sequence
  Description of Artificial Sequence: Synthetic oligonucleotide
gaucucauucuuaaucugg

SEQ ID NO: 2195006 - RNA, 19 nt, Artificial Sequence
  Description of Artificial Sequence: Synthetic oligonucleotide
agcaucguagaacauuuuc

SEQ ID NO: 2195007 - RNA, 19 nt, Artificial Sequence
  Description of Artificial Sequence: Synthetic oligonucleotide
uaugggaucagguucgaac

SEQ ID NO: 2195008 - RNA, 19 nt, Artificial Sequence
  Description of Artificial Sequence: Synthetic oligonucleotide
guaaacucgaguuugguaa

SEQ ID NO: 2195009 - RNA, 19 nt, Artificial Sequence
  Description of Artificial Sequence: Synthetic oligonucleotide
aucagguucgaacucaucu

SEQ ID NO: 2195010 - RNA, 19 nt, Artificial Sequence
  Description of Artificial Sequence: Synthetic oligonucleotide
auuguuagaggguuuccag

SEQ ID NO: 2195011 - RNA, 19 nt, Artificial Sequence
  Description of Artificial Sequence: Synthetic oligonucleotide
gauuagcacauagucauag

SEQ ID NO: 2195012 - RNA, 19 nt, Artificial Sequence
  Description of Artificial Sequence: Synthetic oligonucleotide
aaguucuacaugaagguca

SEQ ID NO: 2195013 - RNA, 19 nt, Artificial Sequence
  Description of Artificial Sequence: Synthetic oligonucleotide
ugguaaauguccaaaccgu

SEQ ID NO: 2195014 - RNA, 19 nt, Artificial Sequence
  Description of Artificial Sequence: Synthetic oligonucleotide
acugcugauuagcacauag

SEQ ID NO: 2195015 - RNA, 19 nt, Artificial Sequence
  Description of Artificial Sequence: Synthetic oligonucleotide
uuguaguuuaugaaucgcu

SEQ ID NO: 2195016 - RNA, 19 nt, Artificial Sequence
  Description of Artificial Sequence: Synthetic oligonucleotide
ucaauuuaaacagccucag

SEQ ID NO: 2195017 - RNA, 19 nt, Artificial Sequence
  Description of Artificial Sequence: Synthetic oligonucleotide
gccacaaccaaacaagugg

SEQ ID NO: 2195018 - RNA, 19 nt, Artificial Sequence
  Description of Artificial Sequence: Synthetic oligonucleotide
uuagaggguuuccaguaag

SEQ ID NO: 2195019 - RNA, 19 nt, Artificial Sequence
  Description of Artificial Sequence: Synthetic oligonucleotide
ggaaugccaacuuugaagc

SEQ ID NO: 2195020 - RNA, 19 nt, Artificial Sequence
  Description of Artificial Sequence: Synthetic oligonucleotide
auggccauagcuccuuagc

SEQ ID NO: 2195021 - RNA, 19 nt, Artificial Sequence
  Description of Artificial Sequence: Synthetic oligonucleotide
cauucgagaaacugucugg

SEQ ID NO: 2195022 - RNA, 19 nt, Artificial Sequence
  Description of Artificial Sequence: Synthetic oligonucleotide
ggagaauaaauuguuagag

SEQ ID NO: 2195023 - RNA, 19 nt, Artificial Sequence
  Description of Artificial Sequence: Synthetic oligonucleotide
uuugugaucaugguggcaa

SEQ ID NO: 2195024 - RNA, 19 nt, Artificial Sequence
  Description of Artificial Sequence: Synthetic oligonucleotide
gacacugcugauuagcaca

SEQ ID NO: 2195025 - RNA, 19 nt, Artificial Sequence
  Description of Artificial Sequence: Synthetic oligonucleotide
acaucgaacugcuuggaug

SEQ ID NO: 2195026 - RNA, 19 nt, Artificial Sequence
  Description of Artificial Sequence: Synthetic oligonucleotide
ccuaaagucaauuuaaaca

SEQ ID NO: 2195027 - RNA, 19 nt, Artificial Sequence
  Description of Artificial Sequence: Synthetic oligonucleotide
cacaucuggagaauauggg

SEQ ID NO: 2195028 - RNA, 19 nt, Artificial Sequence
  Description of Artificial Sequence: Synthetic oligonucleotide
uuggaagcaagagauggag

SEQ ID NO: 2195029 - RNA, 19 nt, Artificial Sequence
  Description of Artificial Sequence: Synthetic oligonucleotide
ucguagaacauuuuccaaa

SEQ ID NO: 2195030 - RNA, 19 nt, Artificial Sequence
  Description of Artificial Sequence: Synthetic oligonucleotide
aauuguuagaggguuucca

SEQ ID NO: 2195031 - RNA, 19 nt, Artificial Sequence
  Description of Artificial Sequence: Synthetic oligonucleotide
aguuucaccugugccagcc

SEQ ID NO: 2195032 - RNA, 19 nt, Artificial Sequence
  Description of Artificial Sequence: Synthetic oligonucleotide
cacacaggaacccagccag

SEQ ID NO: 2195033 - RNA, 19 nt, Artificial Sequence
  Description of Artificial Sequence: Synthetic oligonucleotide
cuaucugucccacaaggac

SEQ ID NO: 2195034 - RNA, 19 nt, Artificial Sequence
  Description of Artificial Sequence: Synthetic oligonucleotide
acaucuggagaauauggga

SEQ ID NO: 2195035 - RNA, 19 nt, Artificial Sequence
  Description of Artificial Sequence: Synthetic oligonucleotide
ucugguuguaguuuaugaa

SEQ ID NO: 2195036 - RNA, 19 nt, Artificial Sequence
  Description of Artificial Sequence: Synthetic oligonucleotide
caacuuugaagccagccug

SEQ ID NO: 2195037 - RNA, 19 nt, Artificial Sequence
  Description of Artificial Sequence: Synthetic oligonucleotide
ucgauugaggaguuucacc

SEQ ID NO: 2195038 - RNA, 19 nt, Artificial Sequence
  Description of Artificial Sequence: Synthetic oligonucleotide
uuuuccaaaggugggaagu

SEQ ID NO: 2195039 - RNA, 19 nt, Artificial Sequence
  Description of Artificial Sequence: Synthetic oligonucleotide
aggaguuucaccugugcca

SEQ ID NO: 2195040 - RNA, 19 nt, Artificial Sequence
  Description of Artificial Sequence: Synthetic oligonucleotide
ugugccagccucuuuguga

SEQ ID NO: 2195041 - RNA, 19 nt, Artificial Sequence
  Description of Artificial Sequence: Synthetic oligonucleotide
gguuguaguuuaugaaucg

SEQ ID NO: 2195042 - RNA, 19 nt, Artificial Sequence
  Description of Artificial Sequence: Synthetic oligonucleotide
guaaauguccaaaccguag

SEQ ID NO: 2195043 - RNA, 19 nt, Artificial Sequence
  Description of Artificial Sequence: Synthetic oligonucleotide
uuccgagcaucguagaaca

SEQ ID NO: 2195044 - RNA, 19 nt, Artificial Sequence
  Description of Artificial Sequence: Synthetic oligonucleotide
guuaccuaaagucaauuua

SEQ ID NO: 2195045 - RNA, 19 nt, Artificial Sequence
  Description of Artificial Sequence: Synthetic oligonucleotide
caauccaccaauccauggc

SEQ ID NO: 2195046 - RNA, 19 nt, Artificial Sequence
  Description of Artificial Sequence: Synthetic oligonucleotide
ccagacucaagugagaugg

SEQ ID NO: 2195047 - RNA, 19 nt, Artificial Sequence
  Description of Artificial Sequence: Synthetic oligonucleotide
uggagaauaugggaucagg

SEQ ID NO: 2195048 - RNA, 19 nt, Artificial Sequence
  Description of Artificial Sequence: Synthetic oligonucleotide
uguuagaggguuuccagua

SEQ ID NO: 2195049 - RNA, 19 nt, Artificial Sequence
  Description of Artificial Sequence: Synthetic oligonucleotide
augggaucagguucgaacu

SEQ ID NO: 2195050 - RNA, 19 nt, Artificial Sequence
  Description of Artificial Sequence: Synthetic oligonucleotide
aacuucaccaauccaccaa

SEQ ID NO: 2195051 - RNA, 19 nt, Artificial Sequence
  Description of Artificial Sequence: Synthetic oligonucleotide
ucgagguuuccgagcaucg

SEQ ID NO: 2195052 - RNA, 19 nt, Artificial Sequence
  Description of Artificial Sequence: Synthetic oligonucleotide
gaggaguuucaccugugcc

SEQ ID NO: 2195053 - RNA, 19 nt, Artificial Sequence
  Description of Artificial Sequence: Synthetic oligonucleotide
gauaagcugagaagacagg

SEQ ID NO: 2195054 - RNA, 19 nt, Artificial Sequence
  Description of Artificial Sequence: Synthetic oligonucleotide
agaagguuaccuaaaguca

SEQ ID NO: 2195055 - RNA, 19 nt, Artificial Sequence
  Description of Artificial Sequence: Synthetic oligonucleotide
uuccaguaagaauggaaac

SEQ ID NO: 2195056 - RNA, 19 nt, Artificial Sequence
  Description of Artificial Sequence: Synthetic oligonucleotide
ucugcauggaucugcacau

SEQ ID NO: 2195057 - RNA, 19 nt, Artificial Sequence
  Description of Artificial Sequence: Synthetic oligonucleotide
guuucaggaacauccccag

SEQ ID NO: 2195058 - RNA, 19 nt, Artificial Sequence
  Description of Artificial Sequence: Synthetic oligonucleotide
aaagcugagguggcuaucu

SEQ ID NO: 2195059 - RNA, 19 nt, Artificial Sequence
  Description of Artificial Sequence: Synthetic oligonucleotide
uccaaaggugggaagucca

SEQ ID NO: 2195060 - RNA, 19 nt, Artificial Sequence
  Description of Artificial Sequence: Synthetic oligonucleotide
ucgcauucgagaaacuguc

SEQ ID NO: 2195061 - RNA, 19 nt, Artificial Sequence
  Description of Artificial Sequence: Synthetic oligonucleotide
caucguagaacauuuucca

SEQ ID NO: 2195062 - RNA, 19 nt, Artificial Sequence
  Description of Artificial Sequence: Synthetic oligonucleotide
acucgaguuugguaaaugu

SEQ ID NO: 2195063 - RNA, 19 nt, Artificial Sequence
  Description of Artificial Sequence: Synthetic oligonucleotide
acagaagguuaccuaaagu

SEQ ID NO: 2195064 - RNA, 19 nt, Artificial Sequence
  Description of Artificial Sequence: Synthetic oligonucleotide
cuucaggacaucgaacugc

SEQ ID NO: 2195065 - RNA, 19 nt, Artificial Sequence
  Description of Artificial Sequence: Synthetic oligonucleotide
aaaggacacugcugauuag

SEQ ID NO: 2195066 - RNA, 19 nt, Artificial Sequence
  Description of Artificial Sequence: Synthetic oligonucleotide
uuguuagaggguuuccagu

SEQ ID NO: 2195067 - RNA, 19 nt, Artificial Sequence
  Description of Artificial Sequence: Synthetic oligonucleotide
gcuuggaagcaagagaugg

SEQ ID NO: 2195068 - RNA, 19 nt, Artificial Sequence
  Description of Artificial Sequence: Synthetic oligonucleotide
acucaagcccugauggugc

SEQ ID NO: 2195069 - RNA, 19 nt, Artificial Sequence
  Description of Artificial Sequence: Synthetic oligonucleotide
ggauaagcugagaagacag

SEQ ID NO: 2195070 - RNA, 19 nt, Artificial Sequence
  Description of Artificial Sequence: Synthetic oligonucleotide
auggguaaacucgaguuug

SEQ ID NO: 2195071 - RNA, 19 nt, Artificial Sequence
  Description of Artificial Sequence: Synthetic oligonucleotide
ggcuaucugucccacaagg

SEQ ID NO: 2195072 - RNA, 19 nt, Artificial Sequence
  Description of Artificial Sequence: Synthetic oligonucleotide
gauugaggaguuucaccug

SEQ ID NO: 2195073 - RNA, 19 nt, Artificial Sequence
  Description of Artificial Sequence: Synthetic oligonucleotide
uuccguuuuaccgccaggc

SEQ ID NO: 2195074 - RNA, 19 nt, Artificial Sequence
  Description of Artificial Sequence: Synthetic oligonucleotide
cagaggcuaaggcaggagg

SEQ ID NO: 2195075 - RNA, 19 nt, Artificial Sequence
  Description of Artificial Sequence: Synthetic oligonucleotide
uuuccgagcaucguagaac

SEQ ID NO: 2195076 - RNA, 19 nt, Artificial Sequence
  Description of Artificial Sequence: Synthetic oligonucleotide
cuuaaucuggcuucgaggu

SEQ ID NO: 2195077 - RNA, 19 nt, Artificial Sequence
  Description of Artificial Sequence: Synthetic oligonucleotide
uguagaugccucgcauucg

SEQ ID NO: 2195078 - RNA, 19 nt, Artificial Sequence
  Description of Artificial Sequence: Synthetic oligonucleotide
uuuaccgccaggcucgauu

SEQ ID NO: 2195079 - RNA, 19 nt, Artificial Sequence
  Description of Artificial Sequence: Synthetic oligonucleotide
gcuuggauggguaaacucg

SEQ ID NO: 2195080 - RNA, 19 nt, Artificial Sequence
  Description of Artificial Sequence: Synthetic oligonucleotide
gagaugggaacccaaccca

SEQ ID NO: 2195081 - RNA, 19 nt, Artificial Sequence
  Description of Artificial Sequence: Synthetic oligonucleotide
gucaauuuaaacagccuca

SEQ ID NO: 2195082 - RNA, 19 nt, Artificial Sequence
  Description of Artificial Sequence: Synthetic oligonucleotide
acaaccaaacaaguggacu

SEQ ID NO: 2195083 - RNA, 19 nt, Artificial Sequence
  Description of Artificial Sequence: Synthetic oligonucleotide
gaugccucgcauucgagaa

SEQ ID NO: 2195084 - RNA, 19 nt, Artificial Sequence
  Description of Artificial Sequence: Synthetic oligonucleotide
cugauuagcacauagucau

SEQ ID NO: 2195085 - RNA, 19 nt, Artificial Sequence
  Description of Artificial Sequence: Synthetic oligonucleotide
uggauggguaaacucgagu

SEQ ID NO: 2195086 - RNA, 19 nt, Artificial Sequence
  Description of Artificial Sequence: Synthetic oligonucleotide
guuguaguuuaugaaucgc

SEQ ID NO: 2195087 - RNA, 19 nt, Artificial Sequence
  Description of Artificial Sequence: Synthetic oligonucleotide
uggccauagcuccuuagcu

SEQ ID NO: 2195088 - RNA, 19 nt, Artificial Sequence
  Description of Artificial Sequence: Synthetic oligonucleotide
aggaugcuuccguuuuacc

SEQ ID NO: 2195089 - RNA, 19 nt, Artificial Sequence
  Description of Artificial Sequence: Synthetic oligonucleotide
aaccaaacaaguggacuca

SEQ ID NO: 2195090 - RNA, 19 nt, Artificial Sequence
  Description of Artificial Sequence: Synthetic oligonucleotide
uagaggguuuccaguaaga

SEQ ID NO: 2195091 - RNA, 19 nt, Artificial Sequence
  Description of Artificial Sequence: Synthetic oligonucleotide
ugugccucacuguauccca

SEQ ID NO: 2195092 - RNA, 19 nt, Artificial Sequence
  Description of Artificial Sequence: Synthetic oligonucleotide
uuaccgccaggcucgauug

SEQ ID NO: 2195093 - RNA, 19 nt, Artificial Sequence
  Description of Artificial Sequence: Synthetic oligonucleotide
acccaacccaacuucacca

SEQ ID NO: 2195094 - RNA, 19 nt, Artificial Sequence
  Description of Artificial Sequence: Synthetic oligonucleotide
ucucauucuuaaucuggcu

SEQ ID NO: 2195095 - RNA, 19 nt, Artificial Sequence
  Description of Artificial Sequence: Synthetic oligonucleotide
aaaccguaggccacaacca

SEQ ID NO: 2195096 - RNA, 19 nt, Artificial Sequence
  Description of Artificial Sequence: Synthetic oligonucleotide
gguucgaacucaucucugg

SEQ ID NO: 2195097 - RNA, 19 nt, Artificial Sequence
  Description of Artificial Sequence: Synthetic oligonucleotide
uaaacucgaguuugguaaa

SEQ ID NO: 2195098 - RNA, 19 nt, Artificial Sequence
  Description of Artificial Sequence: Synthetic oligonucleotide
uuggauggguaaacucgag

SEQ ID NO: 2195099 - RNA, 19 nt, Artificial Sequence
  Description of Artificial Sequence: Synthetic oligonucleotide
auuagcacauagucauagu

SEQ ID NO: 2195100 - RNA, 19 nt, Artificial Sequence
  Description of Artificial Sequence: Synthetic oligonucleotide
gacucaagcccugauggug

SEQ ID NO: 2195101 - RNA, 19 nt, Artificial Sequence
  Description of Artificial Sequence: Synthetic oligonucleotide
cuuagcugacccucuuccc

SEQ ID NO: 2195102 - RNA, 19 nt, Artificial Sequence
  Description of Artificial Sequence: Synthetic oligonucleotide
uguccaaaccguaggccac

SEQ ID NO: 2195103 - RNA, 19 nt, Artificial Sequence
  Description of Artificial Sequence: Synthetic oligonucleotide
aacucgaguuugguaaaug

SEQ ID NO: 2195104 - RNA, 19 nt, Artificial Sequence
  Description of Artificial Sequence: Synthetic oligonucleotide
guucgaacucaucucuggc

SEQ ID NO: 2195105 - RNA, 19 nt, Artificial Sequence
  Description of Artificial Sequence: Synthetic oligonucleotide
ugcacaucuggagaauaug

SEQ ID NO: 2195106 - RNA, 19 nt, Artificial Sequence
  Description of Artificial Sequence: Synthetic oligonucleotide
aauguugaucucauucuua

SEQ ID NO: 2195107 - RNA, 19 nt, Artificial Sequence
  Description of Artificial Sequence: Synthetic oligonucleotide
caggauaagcugagaagac

SEQ ID NO: 2195108 - RNA, 19 nt, Artificial Sequence
  Description of Artificial Sequence: Synthetic oligonucleotide
uccucucggcuccacaaca

SEQ ID NO: 2195109 - RNA, 19 nt, Artificial Sequence
  Description of Artificial Sequence: Synthetic oligonucleotide
guuuaugaaucgcucugca

SEQ ID NO: 2195110 - RNA, 19 nt, Artificial Sequence
  Description of Artificial Sequence: Synthetic oligonucleotide
caagagauggagaauaaau

SEQ ID NO: 2195111 - RNA, 19 nt, Artificial Sequence
  Description of Artificial Sequence: Synthetic oligonucleotide
aaccguaggccacaaccaa

SEQ ID NO: 2195112 - RNA, 19 nt, Artificial Sequence
  Description of Artificial Sequence: Synthetic oligonucleotide
gucugguuguaguuuauga

SEQ ID NO: 2195113 - RNA, 19 nt, Artificial Sequence
  Description of Artificial Sequence: Synthetic oligonucleotide
aucccagaaguucuacaug

SEQ ID NO: 2195114 - RNA, 19 nt, Artificial Sequence
  Description of Artificial Sequence: Synthetic oligonucleotide
gaaguucuacaugaagguc

SEQ ID NO: 2195115 - RNA, 19 nt, Artificial Sequence
  Description of Artificial Sequence: Synthetic oligonucleotide
cuuggauggguaaacucga

SEQ ID NO: 2195116 - RNA, 19 nt, Artificial Sequence
  Description of Artificial Sequence: Synthetic oligonucleotide
auucgagaaacugucuggu

SEQ ID NO: 2195117 - RNA, 19 nt, Artificial Sequence
  Description of Artificial Sequence: Synthetic oligonucleotide
agaugccucgcauucgaga

SEQ ID NO: 2195118 - RNA, 19 nt, Artificial Sequence
  Description of Artificial Sequence: Synthetic oligonucleotide
uggcccaucaggcuuggaa

SEQ ID NO: 2195119 - RNA, 19 nt, Artificial Sequence
  Description of Artificial Sequence: Synthetic oligonucleotide
gagauggagaauaaauugu

SEQ ID NO: 2195120 - RNA, 19 nt, Artificial Sequence
  Description of Artificial Sequence: Synthetic oligonucleotide
guguagaugccucgcauuc

SEQ ID NO: 2195121 - RNA, 19 nt, Artificial Sequence
  Description of Artificial Sequence: Synthetic oligonucleotide
ugaaucgcucugcauggau

SEQ ID NO: 2195122 - RNA, 19 nt, Artificial Sequence
  Description of Artificial Sequence: Synthetic oligonucleotide
guaggccacaaccaaacaa

SEQ ID NO: 2195123 - RNA, 19 nt, Artificial Sequence
  Description of Artificial Sequence: Synthetic oligonucleotide
gagcaggauaagcugagaa

SEQ ID NO: 2195124 - RNA, 19 nt, Artificial Sequence
  Description of Artificial Sequence: Synthetic oligonucleotide
gaauaaauuguuagagggu

SEQ ID NO: 2195125 - RNA, 19 nt, Artificial Sequence
  Description of Artificial Sequence: Synthetic oligonucleotide
aucguagaacauuuuccaa

SEQ ID NO: 2195126 - RNA, 19 nt, Artificial Sequence
  Description of Artificial Sequence: Synthetic oligonucleotide
uguguagaugccucgcauu

SEQ ID NO: 2195127 - RNA, 19 nt, Artificial Sequence
  Description of Artificial Sequence: Synthetic oligonucleotide
aggcuuggaagcaagagau

SEQ ID NO: 2195128 - RNA, 19 nt, Artificial Sequence
  Description of Artificial Sequence: Synthetic oligonucleotide
gcauucgagaaacugucug

SEQ ID NO: 2195129 - RNA, 19 nt, Artificial Sequence
  Description of Artificial Sequence: Synthetic oligonucleotide
cagacacaccacuucugcc

SEQ ID NO: 2195130 - RNA, 19 nt, Artificial Sequence
  Description of Artificial Sequence: Synthetic oligonucleotide
caaaggugggaaguccagg

SEQ ID NO: 2195131 - RNA, 19 nt, Artificial Sequence
  Description of Artificial Sequence: Synthetic oligonucleotide
uggccaaugugucaauguu

SEQ ID NO: 2195132 - RNA, 19 nt, Artificial Sequence
  Description of Artificial Sequence: Synthetic oligonucleotide
guaguuuaugaaucgcucu

SEQ ID NO: 2195133 - RNA, 19 nt, Artificial Sequence
  Description of Artificial Sequence: Synthetic oligonucleotide
uccguuuuaccgccaggcu

SEQ ID NO: 2195134 - RNA, 19 nt, Artificial Sequence
  Description of Artificial Sequence: Synthetic oligonucleotide
aggacugugccucacugua

SEQ ID NO: 2195135 - RNA, 19 nt, Artificial Sequence
  Description of Artificial Sequence: Synthetic oligonucleotide
acaaguggacucaagcccu

SEQ ID NO: 2195136 - RNA, 19 nt, Artificial Sequence
  Description of Artificial Sequence: Synthetic oligonucleotide
aggauaagcugagaagaca

SEQ ID NO: 2195137 - RNA, 19 nt, Artificial Sequence
  Description of Artificial Sequence: Synthetic oligonucleotide
gcaucguagaacauuuucc

SEQ ID NO: 2195138 - RNA, 19 nt, Artificial Sequence
  Description of Artificial Sequence: Synthetic oligonucleotide
cguuuuaccgccaggcucg

SEQ ID NO: 2195139 - RNA, 19 nt, Artificial Sequence
  Description of Artificial Sequence: Synthetic oligonucleotide
ucucuggccaaugugucaa

SEQ ID NO: 2195140 - RNA, 19 nt, Artificial Sequence
  Description of Artificial Sequence: Synthetic oligonucleotide
cauagucauccuucaggac

SEQ ID NO: 2195141 - RNA, 19 nt, Artificial Sequence
  Description of Artificial Sequence: Synthetic oligonucleotide
cacaccacuucugccaggg

SEQ ID NO: 2195142 - RNA, 19 nt, Artificial Sequence
  Description of Artificial Sequence: Synthetic oligonucleotide
guagaugccucgcauucga

SEQ ID NO: 2195143 - RNA, 19 nt, Artificial Sequence
  Description of Artificial Sequence: Synthetic oligonucleotide
gagaauaugggaucagguu

SEQ ID NO: 2195144 - RNA, 19 nt, Artificial Sequence
  Description of Artificial Sequence: Synthetic oligonucleotide
uguaucccagaaguucuac

SEQ ID NO: 2195145 - RNA, 19 nt, Artificial Sequence
  Description of Artificial Sequence: Synthetic oligonucleotide
agauggagaauaaauuguu

SEQ ID NO: 2195146 - RNA, 19 nt, Artificial Sequence
  Description of Artificial Sequence: Synthetic oligonucleotide
agguuuccgagcaucguag

SEQ ID NO: 2195147 - RNA, 19 nt, Artificial Sequence
  Description of Artificial Sequence: Synthetic oligonucleotide
uuuccaaaggugggaaguc

SEQ ID NO: 2195148 - RNA, 19 nt, Artificial Sequence
  Description of Artificial Sequence: Synthetic oligonucleotide
agcugagguggcuaucugu

SEQ ID NO: 2195149 - RNA, 19 nt, Artificial Sequence
  Description of Artificial Sequence: Synthetic oligonucleotide
accaauccauggccauagc

SEQ ID NO: 2195150 - RNA, 19 nt, Artificial Sequence
  Description of Artificial Sequence: Synthetic oligonucleotide
uguugaucucauucuuaau

SEQ ID NO: 2195151 - RNA, 19 nt, Artificial Sequence
  Description of Artificial Sequence: Synthetic oligonucleotide
ccaguaagaauggaaacac

SEQ ID NO: 2195152 - RNA, 19 nt, Artificial Sequence
  Description of Artificial Sequence: Synthetic oligonucleotide
uagaugccucgcauucgag

SEQ ID NO: 2195153 - RNA, 19 nt, Artificial Sequence
  Description of Artificial Sequence: Synthetic oligonucleotide
cugagguggcuaucugucc

SEQ ID NO: 2195154 - RNA, 19 nt, Artificial Sequence
  Description of Artificial Sequence: Synthetic oligonucleotide
uuaaucuggcuucgagguu

SEQ ID NO: 2195155 - RNA, 19 nt, Artificial Sequence
  Description of Artificial Sequence: Synthetic oligonucleotide
ugccucgcauucgagaaac

SEQ ID NO: 2195156 - RNA, 19 nt, Artificial Sequence
  Description of Artificial Sequence: Synthetic oligonucleotide
ggcccaucaggcuuggaag

SEQ ID NO: 2195157 - RNA, 19 nt, Artificial Sequence
  Description of Artificial Sequence: Synthetic oligonucleotide
cacaccccacacaggaacc

SEQ ID NO: 2195158 - RNA, 19 nt, Artificial Sequence
  Description of Artificial Sequence: Synthetic oligonucleotide
cuuggaagcaagagaugga

SEQ ID NO: 2195159 - RNA, 19 nt, Artificial Sequence
  Description of Artificial Sequence: Synthetic oligonucleotide
aauucuccuuccaguucag

SEQ ID NO: 2195160 - RNA, 19 nt, Artificial Sequence
  Description of Artificial Sequence: Synthetic oligonucleotide
ugccagggacuccucucgg

SEQ ID NO: 2195161 - RNA, 19 nt, Artificial Sequence
  Description of Artificial Sequence: Synthetic oligonucleotide
ugauuagcacauagucaua

SEQ ID NO: 2195162 - RNA, 19 nt, Artificial Sequence
  Description of Artificial Sequence: Synthetic oligonucleotide
ugauggugcuguguagaug

SEQ ID NO: 2195163 - RNA, 19 nt, Artificial Sequence
  Description of Artificial Sequence: Synthetic oligonucleotide
guggcuaucugucccacaa

SEQ ID NO: 2195164 - RNA, 19 nt, Artificial Sequence
  Description of Artificial Sequence: Synthetic oligonucleotide
caggaacauccccagcaag

SEQ ID NO: 2195165 - RNA, 19 nt, Artificial Sequence
  Description of Artificial Sequence: Synthetic oligonucleotide
aauaugggaucagguucga

SEQ ID NO: 2195166 - RNA, 19 nt, Artificial Sequence
  Description of Artificial Sequence: Synthetic oligonucleotide
uggcuucgagguuuccgag

SEQ ID NO: 2195167 - RNA, 19 nt, Artificial Sequence
  Description of Artificial Sequence: Synthetic oligonucleotide
cugguuguaguuuaugaau

SEQ ID NO: 2195168 - RNA, 19 nt, Artificial Sequence
  Description of Artificial Sequence: Synthetic oligonucleotide
cauagcuccuuagcugacc

SEQ ID NO: 2195169 - RNA, 19 nt, Artificial Sequence
  Description of Artificial Sequence: Synthetic oligonucleotide
ugcuguguagaugccucgc

SEQ ID NO: 2195170 - RNA, 19 nt, Artificial Sequence
  Description of Artificial Sequence: Synthetic oligonucleotide
gugcuguguagaugccucg

SEQ ID NO: 2195171 - RNA, 19 nt, Artificial Sequence
  Description of Artificial Sequence: Synthetic oligonucleotide
agacucaagugagauggga

SEQ ID NO: 2195172 - RNA, 19 nt, Artificial Sequence
  Description of Artificial Sequence: Synthetic oligonucleotide
cuuccguuuuaccgccagg

SEQ ID NO: 2195173 - RNA, 19 nt, Artificial Sequence
  Description of Artificial Sequence: Synthetic oligonucleotide
ggccauagcuccuuagcug

SEQ ID NO: 2195174 - RNA, 19 nt, Artificial Sequence
  Description of Artificial Sequence: Synthetic oligonucleotide
cagacucaagugagauggg

SEQ ID NO: 2195175 - RNA, 19 nt, Artificial Sequence
  Description of Artificial Sequence: Synthetic oligonucleotide
agaggguuuccaguaagaa

SEQ ID NO: 2195176 - RNA, 19 nt, Artificial Sequence
  Description of Artificial Sequence: Synthetic oligonucleotide
uccccaagguucuccacuc

SEQ ID NO: 2195177 - RNA, 19 nt, Artificial Sequence
  Description of Artificial Sequence: Synthetic oligonucleotide
cucgauugaggaguuucac

SEQ ID NO: 2195178 - RNA, 19 nt, Artificial Sequence
  Description of Artificial Sequence: Synthetic oligonucleotide
aagguuaccuaaagucaau

SEQ ID NO: 2195179 - RNA, 19 nt, Artificial Sequence
  Description of Artificial Sequence: Synthetic oligonucleotide
gaugggaacccaacccaac

SEQ ID NO: 2195180 - RNA, 19 nt, Artificial Sequence
  Description of Artificial Sequence: Synthetic oligonucleotide
aaacucgaguuugguaaau

SEQ ID NO: 2195181 - RNA, 19 nt, Artificial Sequence
  Description of Artificial Sequence: Synthetic oligonucleotide
cuucaccaauccaccaauc

SEQ ID NO: 2195182 - RNA, 19 nt, Artificial Sequence
  Description of Artificial Sequence: Synthetic oligonucleotide
uccaccaauccauggccau

SEQ ID NO: 2195183 - RNA, 19 nt, Artificial Sequence
  Description of Artificial Sequence: Synthetic oligonucleotide
ucacuguaucccagaaguu

SEQ ID NO: 2195184 - RNA, 19 nt, Artificial Sequence
  Description of Artificial Sequence: Synthetic oligonucleotide
caguaagaauggaaacaca

SEQ ID NO: 2195185 - RNA, 19 nt, Artificial Sequence
  Description of Artificial Sequence: Synthetic oligonucleotide
ccaauccaccaauccaugg

SEQ ID NO: 2195186 - RNA, 19 nt, Artificial Sequence
  Description of Artificial Sequence: Synthetic oligonucleotide
uucagccugugccccaguc

SEQ ID NO: 2195187 - RNA, 19 nt, Artificial Sequence
  Description of Artificial Sequence: Synthetic oligonucleotide
ucugcacaucuggagaaua

SEQ ID NO: 2195188 - RNA, 19 nt, Artificial Sequence
  Description of Artificial Sequence: Synthetic oligonucleotide
gaggguuuccaguaagaau

SEQ ID NO: 2195189 - RNA, 19 nt, Artificial Sequence
  Description of Artificial Sequence: Synthetic oligonucleotide
ugugaucaugguggcaaaa

SEQ ID NO: 2195190 - RNA, 19 nt, Artificial Sequence
  Description of Artificial Sequence: Synthetic oligonucleotide
ggggagguccaccaucucc

SEQ ID NO: 2195191 - RNA, 19 nt, Artificial Sequence
  Description of Artificial Sequence: Synthetic oligonucleotide
gauggguaaacucgaguuu

SEQ ID NO: 2195192 - RNA, 19 nt, Artificial Sequence
  Description of Artificial Sequence: Synthetic oligonucleotide
cucgcauucgagaaacugu

SEQ ID NO: 2195193 - RNA, 19 nt, Artificial Sequence
  Description of Artificial Sequence: Synthetic oligonucleotide
uucgagaaacugucugguu

SEQ ID NO: 2195194 - RNA, 19 nt, Artificial Sequence
  Description of Artificial Sequence: Synthetic oligonucleotide
cagcaagccaucugccuuc

SEQ ID NO: 2195195 - RNA, 19 nt, Artificial Sequence
  Description of Artificial Sequence: Synthetic oligonucleotide
gaacccaacccaacuucac

SEQ ID NO: 2195196 - RNA, 19 nt, Artificial Sequence
  Description of Artificial Sequence: Synthetic oligonucleotide
uugugaucaugguggcaaa

SEQ ID NO: 2195197 - RNA, 19 nt, Artificial Sequence
  Description of Artificial Sequence: Synthetic oligonucleotide
gguaaacucgaguuuggua

SEQ ID NO: 2195198 - RNA, 19 nt, Artificial Sequence
  Description of Artificial Sequence: Synthetic oligonucleotide
caggccuggagcaggauaa

SEQ ID NO: 2195199 - RNA, 19 nt, Artificial Sequence
  Description of Artificial Sequence: Synthetic oligonucleotide
gagguggcuaucuguccca

SEQ ID NO: 2195200 - RNA, 19 nt, Artificial Sequence
  Description of Artificial Sequence: Synthetic oligonucleotide
aguggacucaagcccugau

SEQ ID NO: 2195201 - RNA, 19 nt, Artificial Sequence
  Description of Artificial Sequence: Synthetic oligonucleotide
gcuucgagguuuccgagca

SEQ ID NO: 2195202 - RNA, 19 nt, Artificial Sequence
  Description of Artificial Sequence: Synthetic oligonucleotide
ggguuuccaguaagaaugg

SEQ ID NO: 2195203 - RNA, 19 nt, Artificial Sequence
  Description of Artificial Sequence: Synthetic oligonucleotide
caggaugcuuccguuuuac

SEQ ID NO: 2195204 - RNA, 19 nt, Artificial Sequence
  Description of Artificial Sequence: Synthetic oligonucleotide
gggaacccaacccaacuuc

SEQ ID NO: 2195205 - RNA, 19 nt, Artificial Sequence
  Description of Artificial Sequence: Synthetic oligonucleotide
acccaacuucaccaaucca

SEQ ID NO: 2195206 - RNA, 19 nt, Artificial Sequence
  Description of Artificial Sequence: Synthetic oligonucleotide
caacuucaccaauccacca

SEQ ID NO: 2195207 - RNA, 19 nt, Artificial Sequence
  Description of Artificial Sequence: Synthetic oligonucleotide
accgccaggcucgauugag

SEQ ID NO: 2195208 - RNA, 19 nt, Artificial Sequence
  Description of Artificial Sequence: Synthetic oligonucleotide
aggucucauaaaaggaaaa

SEQ ID NO: 2195209 - RNA, 19 nt, Artificial Sequence
  Description of Artificial Sequence: Synthetic oligonucleotide
ggccaaugugucaauguug

SEQ ID NO: 2195210 - RNA, 19 nt, Artificial Sequence
  Description of Artificial Sequence: Synthetic oligonucleotide
gaacugcuuggauggguaa

SEQ ID NO: 2195211 - RNA, 19 nt, Artificial Sequence
  Description of Artificial Sequence: Synthetic oligonucleotide
ggauggguaaacucgaguu

SEQ ID NO: 2195212 - RNA, 19 nt, Artificial Sequence
  Description of Artificial Sequence: Synthetic oligonucleotide
caccaauccaccaauccau

SEQ ID NO: 2195213 - RNA, 19 nt, Artificial Sequence
  Description of Artificial Sequence: Synthetic oligonucleotide
auggugcuguguagaugcc

SEQ ID NO: 2195214 - RNA, 19 nt, Artificial Sequence
  Description of Artificial Sequence: Synthetic oligonucleotide
gaguuucaccugugccagc

SEQ ID NO: 2195215 - RNA, 19 nt, Artificial Sequence
  Description of Artificial Sequence: Synthetic oligonucleotide
agguuaccuaaagucaauu

SEQ ID NO: 2195216 - RNA, 19 nt, Artificial Sequence
  Description of Artificial Sequence: Synthetic oligonucleotide
ccguaggccacaaccaaac

SEQ ID NO: 2195217 - RNA, 19 nt, Artificial Sequence
  Description of Artificial Sequence: Synthetic oligonucleotide
ggacacugcugauuagcac

SEQ ID NO: 2195218 - RNA, 19 nt, Artificial Sequence
  Description of Artificial Sequence: Synthetic oligonucleotide
ccaaacaaguggacucaag

SEQ ID NO: 2195219 - RNA, 19 nt, Artificial Sequence
  Description of Artificial Sequence: Synthetic oligonucleotide
ggcuucgagguuuccgagc

SEQ ID NO: 2195220 - RNA, 19 nt, Artificial Sequence
  Description of Artificial Sequence: Synthetic oligonucleotide
gcguuucaggaacaucccc

SEQ ID NO: 2195221 - RNA, 19 nt, Artificial Sequence
  Description of Artificial Sequence: Synthetic oligonucleotide
agcaagagauggagaauaa

SEQ ID NO: 2195222 - RNA, 19 nt, Artificial Sequence
  Description of Artificial Sequence: Synthetic oligonucleotide
agguucgaacucaucucug

SEQ ID NO: 2195223 - RNA, 19 nt, Artificial Sequence
  Description of Artificial Sequence: Synthetic oligonucleotide
uccacucuggcaggaugcu

SEQ ID NO: 2195224 - RNA, 19 nt, Artificial Sequence
  Description of Artificial Sequence: Synthetic oligonucleotide
gcuuccguuuuaccgccag

SEQ ID NO: 2195225 - RNA, 19 nt, Artificial Sequence
  Description of Artificial Sequence: Synthetic oligonucleotide
gccaaauucuccuuccagu

SEQ ID NO: 2195226 - RNA, 19 nt, Artificial Sequence
  Description of Artificial Sequence: Synthetic oligonucleotide
cagguucgaacucaucucu

SEQ ID NO: 2195227 - RNA, 19 nt, Artificial Sequence
  Description of Artificial Sequence: Synthetic oligonucleotide
aggccacaaccaaacaagu

SEQ ID NO: 2195228 - RNA, 19 nt, Artificial Sequence
  Description of Artificial Sequence: Synthetic oligonucleotide
uagcuccuuagcugacccu

SEQ ID NO: 2195229 - RNA, 19 nt, Artificial Sequence
  Description of Artificial Sequence: Synthetic oligonucleotide
ggaggaaugccaacuuuga

SEQ ID NO: 2195230 - RNA, 19 nt, Artificial Sequence
  Description of Artificial Sequence: Synthetic oligonucleotide
ggcucgauugaggaguuuc

SEQ ID NO: 2195231 - RNA, 19 nt, Artificial Sequence
  Description of Artificial Sequence: Synthetic oligonucleotide
gcugagguggcuaucuguc

SEQ ID NO: 2195232 - RNA, 19 nt, Artificial Sequence
  Description of Artificial Sequence: Synthetic oligonucleotide
ccguuuuaccgccaggcuc

SEQ ID NO: 2195233 - RNA, 19 nt, Artificial Sequence
  Description of Artificial Sequence: Synthetic oligonucleotide
gguaaauguccaaaccgua

SEQ ID NO: 2195234 - RNA, 19 nt, Artificial Sequence
  Description of Artificial Sequence: Synthetic oligonucleotide
gaucagguucgaacucauc

SEQ ID NO: 2195235 - RNA, 19 nt, Artificial Sequence
  Description of Artificial Sequence: Synthetic oligonucleotide
gacuccucucggcuccaca

SEQ ID NO: 2195236 - RNA, 19 nt, Artificial Sequence
  Description of Artificial Sequence: Synthetic oligonucleotide
ggagaauaugggaucaggu

SEQ ID NO: 2195237 - RNA, 19 nt, Artificial Sequence
  Description of Artificial Sequence: Synthetic oligonucleotide
uccgagcaucguagaacau

SEQ ID NO: 2195238 - RNA, 19 nt, Artificial Sequence
  Description of Artificial Sequence: Synthetic oligonucleotide
ggcguuucaggaacauccc

SEQ ID NO: 2195239 - RNA, 19 nt, Artificial Sequence
  Description of Artificial Sequence: Synthetic oligonucleotide
gacaucgaacugcuuggau

SEQ ID NO: 2195240 - RNA, 19 nt, Artificial Sequence
  Description of Artificial Sequence: Synthetic oligonucleotide
uaccgccaggcucgauuga

SEQ ID NO: 2195241 - RNA, 19 nt, Artificial Sequence
  Description of Artificial Sequence: Synthetic oligonucleotide
augccucgcauucgagaaa

SEQ ID NO: 2195242 - RNA, 19 nt, Artificial Sequence
  Description of Artificial Sequence: Synthetic oligonucleotide
ggaacccaacccaacuuca

SEQ ID NO: 2195243 - RNA, 19 nt, Artificial Sequence
  Description of Artificial Sequence: Synthetic oligonucleotide
cgauugaggaguuucaccu

SEQ ID NO: 2195244 - RNA, 19 nt, Artificial Sequence
  Description of Artificial Sequence: Synthetic oligonucleotide
cccacacaggaacccagcc

SEQ ID NO: 2195245 - RNA, 19 nt, Artificial Sequence
  Description of Artificial Sequence: Synthetic oligonucleotide
augaaucgcucugcaugga

SEQ ID NO: 2195246 - RNA, 19 nt, Artificial Sequence
  Description of Artificial Sequence: Synthetic oligonucleotide
gguuaccuaaagucaauuu

SEQ ID NO: 2195247 - RNA, 19 nt, Artificial Sequence
  Description of Artificial Sequence: Synthetic oligonucleotide
uccaaaccguaggccacaa

SEQ ID NO: 2195248 - RNA, 19 nt, Artificial Sequence
  Description of Artificial Sequence: Synthetic oligonucleotide
gacaggcguuucaggaaca

SEQ ID NO: 2195249 - RNA, 19 nt, Artificial Sequence
  Description of Artificial Sequence: Synthetic oligonucleotide
ccucgcauucgagaaacug

SEQ ID NO: 2195250 - RNA, 19 nt, Artificial Sequence
  Description of Artificial Sequence: Synthetic oligonucleotide
cugcugauuagcacauagu

SEQ ID NO: 2195251 - RNA, 19 nt, Artificial Sequence
  Description of Artificial Sequence: Synthetic oligonucleotide
acauccccagcaagccauc

SEQ ID NO: 2195252 - RNA, 19 nt, Artificial Sequence
  Description of Artificial Sequence: Synthetic oligonucleotide
gcuguguagaugccucgca

SEQ ID NO: 2195253 - RNA, 19 nt, Artificial Sequence
  Description of Artificial Sequence: Synthetic oligonucleotide
cacaaggacugugccucac

SEQ ID NO: 2195254 - RNA, 19 nt, Artificial Sequence
  Description of Artificial Sequence: Synthetic oligonucleotide
cgaguuugguaaaugucca

SEQ ID NO: 2195255 - RNA, 19 nt, Artificial Sequence
  Description of Artificial Sequence: Synthetic oligonucleotide
acaggcguuucaggaacau

SEQ ID NO: 2195256 - RNA, 19 nt, Artificial Sequence
  Description of Artificial Sequence: Synthetic oligonucleotide
accguaggccacaaccaaa

SEQ ID NO: 2195257 - RNA, 19 nt, Artificial Sequence
  Description of Artificial Sequence: Synthetic oligonucleotide
cucuggcaggaugcuuccg

SEQ ID NO: 2195258 - RNA, 19 nt, Artificial Sequence
  Description of Artificial Sequence: Synthetic oligonucleotide
gcuaucugucccacaagga

SEQ ID NO: 2195259 - RNA, 19 nt, Artificial Sequence
  Description of Artificial Sequence: Synthetic oligonucleotide
gugccagccucuuugugau

SEQ ID NO: 2195260 - RNA, 19 nt, Artificial Sequence
  Description of Artificial Sequence: Synthetic oligonucleotide
caggcguuucaggaacauc

SEQ ID NO: 2195261 - RNA, 19 nt, Artificial Sequence
  Description of Artificial Sequence: Synthetic oligonucleotide
aucgcucugcauggaucug

SEQ ID NO: 2195262 - RNA, 19 nt, Artificial Sequence
  Description of Artificial Sequence: Synthetic oligonucleotide
auaugggaucagguucgaa

SEQ ID NO: 2195263 - RNA, 19 nt, Artificial Sequence
  Description of Artificial Sequence: Synthetic oligonucleotide
cuguaucccagaaguucua

SEQ ID NO: 2195264 - RNA, 19 nt, Artificial Sequence
  Description of Artificial Sequence: Synthetic oligonucleotide
acaccacuucugccaggga

SEQ ID NO: 2195265 - RNA, 19 nt, Artificial Sequence
  Description of Artificial Sequence: Synthetic oligonucleotide
agcaagccaucugccuucu

SEQ ID NO: 2195266 - RNA, 19 nt, Artificial Sequence
  Description of Artificial Sequence: Synthetic oligonucleotide
guccaaaccguaggccaca

SEQ ID NO: 2195267 - RNA, 19 nt, Artificial Sequence
  Description of Artificial Sequence: Synthetic oligonucleotide
aggccuggagcaggauaag

SEQ ID NO: 2195268 - RNA, 19 nt, Artificial Sequence
  Description of Artificial Sequence: Synthetic oligonucleotide
aggaacccagccagaggcu

SEQ ID NO: 2195269 - RNA, 19 nt, Artificial Sequence
  Description of Artificial Sequence: Synthetic oligonucleotide
ccaacuuugaagccagccu

SEQ ID NO: 2195270 - RNA, 19 nt, Artificial Sequence
  Description of Artificial Sequence: Synthetic oligonucleotide
ucugucccacaaggacugu

SEQ ID NO: 2195271 - RNA, 19 nt, Artificial Sequence
  Description of Artificial Sequence: Synthetic oligonucleotide
gcaagagauggagaauaaa

SEQ ID NO: 2195272 - RNA, 19 nt, Artificial Sequence
  Description of Artificial Sequence: Synthetic oligonucleotide
cugcacaucuggagaauau

SEQ ID NO: 2195273 - RNA, 19 nt, Artificial Sequence
  Description of Artificial Sequence: Synthetic oligonucleotide
ccugauggugcuguguaga

SEQ ID NO: 2195274 - RNA, 19 nt, Artificial Sequence
  Description of Artificial Sequence: Synthetic oligonucleotide
gcucgauugaggaguuuca

SEQ ID NO: 2195275 - RNA, 19 nt, Artificial Sequence
  Description of Artificial Sequence: Synthetic oligonucleotide
cugauggugcuguguagau

SEQ ID NO: 2195276 - RNA, 19 nt, Artificial Sequence
  Description of Artificial Sequence: Synthetic oligonucleotide
gguuuccaguaagaaugga

SEQ ID NO: 2195277 - RNA, 19 nt, Artificial Sequence
  Description of Artificial Sequence: Synthetic oligonucleotide
ccgccaggcucgauugagg

SEQ ID NO: 2195278 - RNA, 19 nt, Artificial Sequence
  Description of Artificial Sequence: Synthetic oligonucleotide
ccauagcuccuuagcugac

SEQ ID NO: 2195279 - RNA, 19 nt, Artificial Sequence
  Description of Artificial Sequence: Synthetic oligonucleotide
gguggcuaucugucccaca

SEQ ID NO: 2195280 - RNA, 19 nt, Artificial Sequence
  Description of Artificial Sequence: Synthetic oligonucleotide
ccaauccauggccauagcu

SEQ ID NO: 2195281 - RNA, 19 nt, Artificial Sequence
  Description of Artificial Sequence: Synthetic oligonucleotide
ggacaucgaacugcuugga

SEQ ID NO: 2195282 - RNA, 19 nt, Artificial Sequence
  Description of Artificial Sequence: Synthetic oligonucleotide
uuuuaccgccaggcucgau

SEQ ID NO: 2195283 - RNA, 19 nt, Artificial Sequence
  Description of Artificial Sequence: Synthetic oligonucleotide
ccaggcucgauugaggagu

SEQ ID NO: 2195284 - RNA, 19 nt, Artificial Sequence
  Description of Artificial Sequence: Synthetic oligonucleotide
guuuuaccgccaggcucga

SEQ ID NO: 2195285 - RNA, 19 nt, Artificial Sequence
  Description of Artificial Sequence: Synthetic oligonucleotide
caggaggaaugccaacuuu

SEQ ID NO: 2195286 - RNA, 19 nt, Artificial Sequence
  Description of Artificial Sequence: Synthetic oligonucleotide
ggagcaggauaagcugaga

SEQ ID NO: 2195287 - RNA, 19 nt, Artificial Sequence
  Description of Artificial Sequence: Synthetic oligonucleotide
ggacucaagcccugauggu

SEQ ID NO: 2195288 - RNA, 19 nt, Artificial Sequence
  Description of Artificial Sequence: Synthetic oligonucleotide
gcucugcauggaucugcac

SEQ ID NO: 2195289 - RNA, 19 nt, Artificial Sequence
  Description of Artificial Sequence: Synthetic oligonucleotide
ggguaaacucgaguuuggu

SEQ ID NO: 2195290 - RNA, 19 nt, Artificial Sequence
  Description of Artificial Sequence: Synthetic oligonucleotide
gcaggaugcuuccguuuua

SEQ ID NO: 2195291 - RNA, 19 nt, Artificial Sequence
  Description of Artificial Sequence: Synthetic oligonucleotide
cugucugguuguaguuuau

SEQ ID NO: 2195292 - RNA, 19 nt, Artificial Sequence
  Description of Artificial Sequence: Synthetic oligonucleotide
gagcaucguagaacauuuu

SEQ ID NO: 2195293 - RNA, 19 nt, Artificial Sequence
  Description of Artificial Sequence: Synthetic oligonucleotide
ccagcaagccaucugccuu

SEQ ID NO: 2195294 - RNA, 19 nt, Artificial Sequence
  Description of Artificial Sequence: Synthetic oligonucleotide
cguaggccacaaccaaaca

SEQ ID NO: 2195295 - RNA, 19 nt, Artificial Sequence
  Description of Artificial Sequence: Synthetic oligonucleotide
caggcucgauugaggaguu

SEQ ID NO: 2195296 - RNA, 19 nt, Artificial Sequence
  Description of Artificial Sequence: Synthetic oligonucleotide
cauccccagcaagccaucu

SEQ ID NO: 2195297 - RNA, 19 nt, Artificial Sequence
  Description of Artificial Sequence: Synthetic oligonucleotide
cuucgagguuuccgagcau

SEQ ID NO: 2195298 - RNA, 19 nt, Artificial Sequence
  Description of Artificial Sequence: Synthetic oligonucleotide
aggcucgauugaggaguuu

SEQ ID NO: 2195299 - RNA, 19 nt, Artificial Sequence
  Description of Artificial Sequence: Synthetic oligonucleotide
cucuggccaaugugucaau

SEQ ID NO: 2195300 - RNA, 19 nt, Artificial Sequence
  Description of Artificial Sequence: Synthetic oligonucleotide
cacugcugauuagcacaua

SEQ ID NO: 2195301 - RNA, 19 nt, Artificial Sequence
  Description of Artificial Sequence: Synthetic oligonucleotide
gcuccuuagcugacccucu

SEQ ID NO: 2195302 - RNA, 19 nt, Artificial Sequence
  Description of Artificial Sequence: Synthetic oligonucleotide
ccaacccaacuucaccaau

SEQ ID NO: 2195303 - RNA, 19 nt, Artificial Sequence
  Description of Artificial Sequence: Synthetic oligonucleotide
ccgagcaucguagaacauu

SEQ ID NO: 2195304 - RNA, 19 nt, Artificial Sequence
  Description of Artificial Sequence: Synthetic oligonucleotide
ggacugugccucacuguau

SEQ ID NO: 2195305 - RNA, 19 nt, Artificial Sequence
  Description of Artificial Sequence: Synthetic oligonucleotide
cgcauucgagaaacugucu

SEQ ID NO: 2195306 - RNA, 19 nt, Artificial Sequence
  Description of Artificial Sequence: Synthetic oligonucleotide
ccccagacucaagugagau

SEQ ID NO: 2195307 - RNA, 19 nt, Artificial Sequence
  Description of Artificial Sequence: Synthetic oligonucleotide
ccccaagguucuccacucu

SEQ ID NO: 2195308 - RNA, 19 nt, Artificial Sequence
  Description of Artificial Sequence: Synthetic oligonucleotide
cgagguuuccgagcaucgu

SEQ ID NO: 2195309 - RNA, 19 nt, Artificial Sequence
  Description of Artificial Sequence: Synthetic oligonucleotide
gccucgcauucgagaaacu

SEQ ID NO: 2195310 - RNA, 19 nt, Artificial Sequence
  Description of Artificial Sequence: Synthetic oligonucleotide
ccacucuggcaggaugcuu

SEQ ID NO: 2195311 - RNA, 19 nt, Artificial Sequence
  Description of Artificial Sequence: Synthetic oligonucleotide
aaaaguagaaagcacuggg

SEQ ID NO: 2195312 - RNA, 19 nt, Artificial Sequence
  Description of Artificial Sequence: Synthetic oligonucleotide
ugaaccagagcuuaaagcg

SEQ ID NO: 2195313 - RNA, 19 nt, Artificial Sequence
  Description of Artificial Sequence: Synthetic oligonucleotide
aauugagcaacccacuugg

SEQ ID NO: 2195314 - RNA, 19 nt, Artificial Sequence
  Description of Artificial Sequence: Synthetic oligonucleotide
acacacaccagcuugagac

SEQ ID NO: 2195315 - RNA, 19 nt, Artificial Sequence
  Description of Artificial Sequence: Synthetic oligonucleotide
ucagggacuuucaagaugg

SEQ ID NO: 2195316 - RNA, 19 nt, Artificial Sequence
  Description of Artificial Sequence: Synthetic oligonucleotide
ucuuuugugaauagcacag

SEQ ID NO: 2195317 - RNA, 19 nt, Artificial Sequence
  Description of Artificial Sequence: Synthetic oligonucleotide
uguagguccaaccuucugg

SEQ ID NO: 2195318 - RNA, 19 nt, Artificial Sequence
  Description of Artificial Sequence: Synthetic oligonucleotide
uugugaauagcacagcuug

SEQ ID NO: 2195319 - RNA, 19 nt, Artificial Sequence
  Description of Artificial Sequence: Synthetic oligonucleotide
agaguaagcagccccaccc

SEQ ID NO: 2195320 - RNA, 19 nt, Artificial Sequence
  Description of Artificial Sequence: Synthetic oligonucleotide
cuucgaaccagauagguag

SEQ ID NO: 2195321 - RNA, 19 nt, Artificial Sequence
  Description of Artificial Sequence: Synthetic oligonucleotide
uuuuccagcauaauugagc

SEQ ID NO: 2195322 - RNA, 19 nt, Artificial Sequence
  Description of Artificial Sequence: Synthetic oligonucleotide
uucaagauggcccggauca

SEQ ID NO: 2195323 - RNA, 19 nt, Artificial Sequence
  Description of Artificial Sequence: Synthetic oligonucleotide
gauuauguccuuuucaguc

SEQ ID NO: 2195324 - RNA, 19 nt, Artificial Sequence
  Description of Artificial Sequence: Synthetic oligonucleotide
gauacacacacacacacac

SEQ ID NO: 2195325 - RNA, 19 nt, Artificial Sequence
  Description of Artificial Sequence: Synthetic oligonucleotide
ucuucagggacuuucaaga

SEQ ID NO: 2195326 - RNA, 19 nt, Artificial Sequence
  Description of Artificial Sequence: Synthetic oligonucleotide
aaauuuggggugcacaccu

SEQ ID NO: 2195327 - RNA, 19 nt, Artificial Sequence
  Description of Artificial Sequence: Synthetic oligonucleotide
aaaccuugaugacaagauc

SEQ ID NO: 2195328 - RNA, 19 nt, Artificial Sequence
  Description of Artificial Sequence: Synthetic oligonucleotide
cagauugccaucaauucgg

SEQ ID NO: 2195329 - RNA, 19 nt, Artificial Sequence
  Description of Artificial Sequence: Synthetic oligonucleotide
aauucgggcagagagguag

SEQ ID NO: 2195330 - RNA, 19 nt, Artificial Sequence
  Description of Artificial Sequence: Synthetic oligonucleotide
aggauuauguccuuuucag

SEQ ID NO: 2195331 - RNA, 19 nt, Artificial Sequence
  Description of Artificial Sequence: Synthetic oligonucleotide
aaagcacuggguuggaucu

SEQ ID NO: 2195332 - RNA, 19 nt, Artificial Sequence
  Description of Artificial Sequence: Synthetic oligonucleotide
uuuugugaauagcacagcu

SEQ ID NO: 2195333 - RNA, 19 nt, Artificial Sequence
  Description of Artificial Sequence: Synthetic oligonucleotide
aaaauucccuuuuccagca

SEQ ID NO: 2195334 - RNA, 19 nt, Artificial Sequence
  Description of Artificial Sequence: Synthetic oligonucleotide
ugagcaacccacuuggccc

SEQ ID NO: 2195335 - RNA, 19 nt, Artificial Sequence
  Description of Artificial Sequence: Synthetic oligonucleotide
uacacacacacacacacac

SEQ ID NO: 2195336 - RNA, 19 nt, Artificial Sequence
  Description of Artificial Sequence: Synthetic oligonucleotide
auuucuuugccacucgcag

SEQ ID NO: 2195337 - RNA, 19 nt, Artificial Sequence
  Description of Artificial Sequence: Synthetic oligonucleotide
cuguaguuccucuaggucc

SEQ ID NO: 2195338 - RNA, 19 nt, Artificial Sequence
  Description of Artificial Sequence: Synthetic oligonucleotide
ugacaagauccacauagcc

SEQ ID NO: 2195339 - RNA, 19 nt, Artificial Sequence
  Description of Artificial Sequence: Synthetic oligonucleotide
uaaaccuugaugacaagau

SEQ ID NO: 2195340 - RNA, 19 nt, Artificial Sequence
  Description of Artificial Sequence: Synthetic oligonucleotide
aguguaaggccugaugacc

SEQ ID NO: 2195341 - RNA, 19 nt, Artificial Sequence
  Description of Artificial Sequence: Synthetic oligonucleotide
gagauacacacacacacac

SEQ ID NO: 2195342 - RNA, 19 nt, Artificial Sequence
  Description of Artificial Sequence: Synthetic oligonucleotide
auagccucggucuucauca

SEQ ID NO: 2195343 - RNA, 19 nt, Artificial Sequence
  Description of Artificial Sequence: Synthetic oligonucleotide
aagcgguugggauacuggg

SEQ ID NO: 2195344 - RNA, 19 nt, Artificial Sequence
  Description of Artificial Sequence: Synthetic oligonucleotide
accagauugccaucaauuc

SEQ ID NO: 2195345 - RNA, 19 nt, Artificial Sequence
  Description of Artificial Sequence: Synthetic oligonucleotide
ugaauagcacagcuugucc

SEQ ID NO: 2195346 - RNA, 19 nt, Artificial Sequence
  Description of Artificial Sequence: Synthetic oligonucleotide
ugaaucgcaucuuuuguga

SEQ ID NO: 2195347 - RNA, 19 nt, Artificial Sequence
  Description of Artificial Sequence: Synthetic oligonucleotide
aaguagaaagcacuggguu

SEQ ID NO: 2195348 - RNA, 19 nt, Artificial Sequence
  Description of Artificial Sequence: Synthetic oligonucleotide
uccagcauaauugagcaac

SEQ ID NO: 2195349 - RNA, 19 nt, Artificial Sequence
  Description of Artificial Sequence: Synthetic oligonucleotide
uuagauaaaccuugaugac

SEQ ID NO: 2195350 - RNA, 19 nt, Artificial Sequence
  Description of Artificial Sequence: Synthetic oligonucleotide
uccaaguuaggauggcagg

SEQ ID NO: 2195351 - RNA, 19 nt, Artificial Sequence
  Description of Artificial Sequence: Synthetic oligonucleotide
aaagcggaaccucuuggug

SEQ ID NO: 2195352 - RNA, 19 nt, Artificial Sequence
  Description of Artificial Sequence: Synthetic oligonucleotide
cuuguccaaguuaggaugg

SEQ ID NO: 2195353 - RNA, 19 nt, Artificial Sequence
  Description of Artificial Sequence: Synthetic oligonucleotide
uagcagguacuucucaucc

SEQ ID NO: 2195354 - RNA, 19 nt, Artificial Sequence
  Description of Artificial Sequence: Synthetic oligonucleotide
uguuuuggcucacagucgu

SEQ ID NO: 2195355 - RNA, 19 nt, Artificial Sequence
  Description of Artificial Sequence: Synthetic oligonucleotide
uugucgagcaaucguagca

SEQ ID NO: 2195356 - RNA, 19 nt, Artificial Sequence
  Description of Artificial Sequence: Synthetic oligonucleotide
uagauaaaccuugaugaca

SEQ ID NO: 2195357 - RNA, 19 nt, Artificial Sequence
  Description of Artificial Sequence: Synthetic oligonucleotide
agguccaaccuucuggagg

SEQ ID NO: 2195358 - RNA, 19 nt, Artificial Sequence
  Description of Artificial Sequence: Synthetic oligonucleotide
ucuugucgagcaaucguag

SEQ ID NO: 2195359 - RNA, 19 nt, Artificial Sequence
  Description of Artificial Sequence: Synthetic oligonucleotide
gguguuuuggcucacaguc

SEQ ID NO: 2195360 - RNA, 19 nt, Artificial Sequence
  Description of Artificial Sequence: Synthetic oligonucleotide
auuauguccuuuucagucu

SEQ ID NO: 2195361 - RNA, 19 nt, Artificial Sequence
  Description of Artificial Sequence: Synthetic oligonucleotide
cacaccuuuuagauaaacc

SEQ ID NO: 2195362 - RNA, 19 nt, Artificial Sequence
  Description of Artificial Sequence: Synthetic oligonucleotide
ucccguaggauuauguccu

SEQ ID NO: 2195363 - RNA, 19 nt, Artificial Sequence
  Description of Artificial Sequence: Synthetic oligonucleotide
aggccugaugaccagauug

SEQ ID NO: 2195364 - RNA, 19 nt, Artificial Sequence
  Description of Artificial Sequence: Synthetic oligonucleotide
uguaguuccucuagguccu

SEQ ID NO: 2195365 - RNA, 19 nt, Artificial Sequence
  Description of Artificial Sequence: Synthetic oligonucleotide
uucagggacuuucaagaug

SEQ ID NO: 2195366 - RNA, 19 nt, Artificial Sequence
  Description of Artificial Sequence: Synthetic oligonucleotide
uaggcggcggcccacagag

SEQ ID NO: 2195367 - RNA, 19 nt, Artificial Sequence
  Description of Artificial Sequence: Synthetic oligonucleotide
uuauguccuuuucagucug

SEQ ID NO: 2195368 - RNA, 19 nt, Artificial Sequence
  Description of Artificial Sequence: Synthetic oligonucleotide
aagcggaaccucuuggugu

SEQ ID NO: 2195369 - RNA, 19 nt, Artificial Sequence
  Description of Artificial Sequence: Synthetic oligonucleotide
cuuaaagcgguugggauac

SEQ ID NO: 2195370 - RNA, 19 nt, Artificial Sequence
  Description of Artificial Sequence: Synthetic oligonucleotide
agcauaauugagcaaccca

SEQ ID NO: 2195371 - RNA, 19 nt, Artificial Sequence
  Description of Artificial Sequence: Synthetic oligonucleotide
caugcuugcccacaggcag

SEQ ID NO: 2195372 - RNA, 19 nt, Artificial Sequence
  Description of Artificial Sequence: Synthetic oligonucleotide
agucccagaaugugguugg

SEQ ID NO: 2195373 - RNA, 19 nt, Artificial Sequence
  Description of Artificial Sequence: Synthetic oligonucleotide
cacacacacacacacacac

SEQ ID NO: 2195374 - RNA, 19 nt, Artificial Sequence
  Description of Artificial Sequence: Synthetic oligonucleotide
ucaauucgggcagagaggu

SEQ ID NO: 2195375 - RNA, 19 nt, Artificial Sequence
  Description of Artificial Sequence: Synthetic oligonucleotide
acacacacacaccagcuug

SEQ ID NO: 2195376 - RNA, 19 nt, Artificial Sequence
  Description of Artificial Sequence: Synthetic oligonucleotide
gaaccagauagguagccac

SEQ ID NO: 2195377 - RNA, 19 nt, Artificial Sequence
  Description of Artificial Sequence: Synthetic oligonucleotide
gaaagcacuggguuggauc

SEQ ID NO: 2195378 - RNA, 19 nt, Artificial Sequence
  Description of Artificial Sequence: Synthetic oligonucleotide
aaugugguuggcggugggc

SEQ ID NO: 2195379 - RNA, 19 nt, Artificial Sequence
  Description of Artificial Sequence: Synthetic oligonucleotide
gagguagacaugcuugccc

SEQ ID NO: 2195380 - RNA, 19 nt, Artificial Sequence
  Description of Artificial Sequence: Synthetic oligonucleotide
gaauagcacagcuugucca

SEQ ID NO: 2195381 - RNA, 19 nt, Artificial Sequence
  Description of Artificial Sequence: Synthetic oligonucleotide
cucccguaggauuaugucc

SEQ ID NO: 2195382 - RNA, 19 nt, Artificial Sequence
  Description of Artificial Sequence: Synthetic oligonucleotide
uccgagcagaguaagcagc

SEQ ID NO: 2195383 - RNA, 19 nt, Artificial Sequence
  Description of Artificial Sequence: Synthetic oligonucleotide
aaaguagaaagcacugggu

SEQ ID NO: 2195384 - RNA, 19 nt, Artificial Sequence
  Description of Artificial Sequence: Synthetic oligonucleotide
caucuuuugugaauagcac

SEQ ID NO: 2195385 - RNA, 19 nt, Artificial Sequence
  Description of Artificial Sequence: Synthetic oligonucleotide
aaagcgguugggauacugg

SEQ ID NO: 2195386 - RNA, 19 nt, Artificial Sequence
  Description of Artificial Sequence: Synthetic oligonucleotide
uuuguuggucugaauguaa

SEQ ID NO: 2195387 - RNA, 19 nt, Artificial Sequence
  Description of Artificial Sequence: Synthetic oligonucleotide
aaguuaggauggcaggcca

SEQ ID NO: 2195388 - RNA, 19 nt, Artificial Sequence
  Description of Artificial Sequence: Synthetic oligonucleotide
aggugaaucgcaucuuuug

SEQ ID NO: 2195389 - RNA, 19 nt, Artificial Sequence
  Description of Artificial Sequence: Synthetic oligonucleotide
agugugaccugcgaccggc

SEQ ID NO: 2195390 - RNA, 19 nt, Artificial Sequence
  Description of Artificial Sequence: Synthetic oligonucleotide
ugagacgcucaguagguga

SEQ ID NO: 2195391 - RNA, 19 nt, Artificial Sequence
  Description of Artificial Sequence: Synthetic oligonucleotide
uuugugaauagcacagcuu

SEQ ID NO: 2195392 - RNA, 19 nt, Artificial Sequence
  Description of Artificial Sequence: Synthetic oligonucleotide
aagccccggcuguaggucc

SEQ ID NO: 2195393 - RNA, 19 nt, Artificial Sequence
  Description of Artificial Sequence: Synthetic oligonucleotide
aaucgcaucuuuugugaau

SEQ ID NO: 2195394 - RNA, 19 nt, Artificial Sequence
  Description of Artificial Sequence: Synthetic oligonucleotide
gugcacaccuuuuagauaa

SEQ ID NO: 2195395 - RNA, 19 nt, Artificial Sequence
  Description of Artificial Sequence: Synthetic oligonucleotide
uagacaugcuugcccacag

SEQ ID NO: 2195396 - RNA, 19 nt, Artificial Sequence
  Description of Artificial Sequence: Synthetic oligonucleotide
cagagcuuaaagcgguugg

SEQ ID NO: 2195397 - RNA, 19 nt, Artificial Sequence
  Description of Artificial Sequence: Synthetic oligonucleotide
aggcuauccagguacugag

SEQ ID NO: 2195398 - RNA, 19 nt, Artificial Sequence
  Description of Artificial Sequence: Synthetic oligonucleotide
ugucccaccagcaaucauu

SEQ ID NO: 2195399 - RNA, 19 nt, Artificial Sequence
  Description of Artificial Sequence: Synthetic oligonucleotide
ugugaauagcacagcuugu

SEQ ID NO: 2195400 - RNA, 19 nt, Artificial Sequence
  Description of Artificial Sequence: Synthetic oligonucleotide
cacacacacacacaccagc

SEQ ID NO: 2195401 - RNA, 19 nt, Artificial Sequence
  Description of Artificial Sequence: Synthetic oligonucleotide
ucgcaguucagauggagaa

SEQ ID NO: 2195402 - RNA, 19 nt, Artificial Sequence
  Description of Artificial Sequence: Synthetic oligonucleotide
aauuucuuugccacucgca

SEQ ID NO: 2195403 - RNA, 19 nt, Artificial Sequence
  Description of Artificial Sequence: Synthetic oligonucleotide
augacaagauccacauagc

SEQ ID NO: 2195404 - RNA, 19 nt, Artificial Sequence
  Description of Artificial Sequence: Synthetic oligonucleotide
cucacagucgucuugucga

SEQ ID NO: 2195405 - RNA, 19 nt, Artificial Sequence
  Description of Artificial Sequence: Synthetic oligonucleotide
ugggauacugggccuguag

SEQ ID NO: 2195406 - RNA, 19 nt, Artificial Sequence
  Description of Artificial Sequence: Synthetic oligonucleotide
accggcgggaucuucgaac

SEQ ID NO: 2195407 - RNA, 19 nt, Artificial Sequence
  Description of Artificial Sequence: Synthetic oligonucleotide
gggacuuucaagauggccc

SEQ ID NO: 2195408 - RNA, 19 nt, Artificial Sequence
  Description of Artificial Sequence: Synthetic oligonucleotide
agagcuuaaagcgguuggg

SEQ ID NO: 2195409 - RNA, 19 nt, Artificial Sequence
  Description of Artificial Sequence: Synthetic oligonucleotide
accgggcucgguugaaucc

SEQ ID NO: 2195410 - RNA, 19 nt, Artificial Sequence
  Description of Artificial Sequence: Synthetic oligonucleotide
uuuuggcucacagucgucu

SEQ ID NO: 2195411 - RNA, 19 nt, Artificial Sequence
  Description of Artificial Sequence: Synthetic oligonucleotide
ggacuuucaagauggcccg

SEQ ID NO: 2195412 - RNA, 19 nt, Artificial Sequence
  Description of Artificial Sequence: Synthetic oligonucleotide
gagcaaucguagcagguac

SEQ ID NO: 2195413 - RNA, 19 nt, Artificial Sequence
  Description of Artificial Sequence: Synthetic oligonucleotide
uguaccauaggcggcggcc

SEQ ID NO: 2195414 - RNA, 19 nt, Artificial Sequence
  Description of Artificial Sequence: Synthetic oligonucleotide
acagucgucuugucgagca

SEQ ID NO: 2195415 - RNA, 19 nt, Artificial Sequence
  Description of Artificial Sequence: Synthetic oligonucleotide
gaaauuuggggugcacacc

SEQ ID NO: 2195416 - RNA, 19 nt, Artificial Sequence
  Description of Artificial Sequence: Synthetic oligonucleotide
uugaauccccaugaccuag

SEQ ID NO: 2195417 - RNA, 19 nt, Artificial Sequence
  Description of Artificial Sequence: Synthetic oligonucleotide
uucaggaaauuuggggugc

SEQ ID NO: 2195418 - RNA, 19 nt, Artificial Sequence
  Description of Artificial Sequence: Synthetic oligonucleotide
uucgaaccagauagguagc

SEQ ID NO: 2195419 - RNA, 19 nt, Artificial Sequence
  Description of Artificial Sequence: Synthetic oligonucleotide
gaguguaaggccugaugac

SEQ ID NO: 2195420 - RNA, 19 nt, Artificial Sequence
  Description of Artificial Sequence: Synthetic oligonucleotide
acgcucaguaggugaaucg

SEQ ID NO: 2195421 - RNA, 19 nt, Artificial Sequence
  Description of Artificial Sequence: Synthetic oligonucleotide
cacacacacacacacacca

SEQ ID NO: 2195422 - RNA, 19 nt, Artificial Sequence
  Description of Artificial Sequence: Synthetic oligonucleotide
cuugucgagcaaucguagc

SEQ ID NO: 2195423 - RNA, 19 nt, Artificial Sequence
  Description of Artificial Sequence: Synthetic oligonucleotide
ucuucgaaccagauaggua

SEQ ID NO: 2195424 - RNA, 19 nt, Artificial Sequence
  Description of Artificial Sequence: Synthetic oligonucleotide
caauuucuuugccacucgc

SEQ ID NO: 2195425 - RNA, 19 nt, Artificial Sequence
  Description of Artificial Sequence: Synthetic oligonucleotide
ccacucgcaguucagaugg

SEQ ID NO: 2195426 - RNA, 19 nt, Artificial Sequence
  Description of Artificial Sequence: Synthetic oligonucleotide
uguuggucugaauguaaaa

SEQ ID NO: 2195427 - RNA, 19 nt, Artificial Sequence
  Description of Artificial Sequence: Synthetic oligonucleotide
aggaguguaaggccugaug

SEQ ID NO: 2195428 - RNA, 19 nt, Artificial Sequence
  Description of Artificial Sequence: Synthetic oligonucleotide
ucauccgggucccggagug

SEQ ID NO: 2195429 - RNA, 19 nt, Artificial Sequence
  Description of Artificial Sequence: Synthetic oligonucleotide
ggaugguccagagugaacc

SEQ ID NO: 2195430 - RNA, 19 nt, Artificial Sequence
  Description of Artificial Sequence: Synthetic oligonucleotide
gauacugggccuguaguuc

SEQ ID NO: 2195431 - RNA, 19 nt, Artificial Sequence
  Description of Artificial Sequence: Synthetic oligonucleotide
aguccgagcagaguaagca

SEQ ID NO: 2195432 - RNA, 19 nt, Artificial Sequence
  Description of Artificial Sequence: Synthetic oligonucleotide
agcuguaccauaggcggcg

SEQ ID NO: 2195433 - RNA, 19 nt, Artificial Sequence
  Description of Artificial Sequence: Synthetic oligonucleotide
caaguuaggauggcaggcc

SEQ ID NO: 2195434 - RNA, 19 nt, Artificial Sequence
  Description of Artificial Sequence: Synthetic oligonucleotide
uccaccacauccccaauuu

SEQ ID NO: 2195435 - RNA, 19 nt, Artificial Sequence
  Description of Artificial Sequence: Synthetic oligonucleotide
agcuuaaagcgguugggau

SEQ ID NO: 2195436 - RNA, 19 nt, Artificial Sequence
  Description of Artificial Sequence: Synthetic oligonucleotide
ccagauugccaucaauucg

SEQ ID NO: 2195437 - RNA, 19 nt, Artificial Sequence
  Description of Artificial Sequence: Synthetic oligonucleotide
caagauccacauagccucg

SEQ ID NO: 2195438 - RNA, 19 nt, Artificial Sequence
  Description of Artificial Sequence: Synthetic oligonucleotide
gauugccaucaauucgggc

SEQ ID NO: 2195439 - RNA, 19 nt, Artificial Sequence
  Description of Artificial Sequence: Synthetic oligonucleotide
guccaaguuaggauggcag

SEQ ID NO: 2195440 - RNA, 19 nt, Artificial Sequence
  Description of Artificial Sequence: Synthetic oligonucleotide
cagagaggcuagcaggacc

SEQ ID NO: 2195441 - RNA, 19 nt, Artificial Sequence
  Description of Artificial Sequence: Synthetic oligonucleotide
cacacaccagcuugagacg

SEQ ID NO: 2195442 - RNA, 19 nt, Artificial Sequence
  Description of Artificial Sequence: Synthetic oligonucleotide
guagguccaaccuucugga

SEQ ID NO: 2195443 - RNA, 19 nt, Artificial Sequence
  Description of Artificial Sequence: Synthetic oligonucleotide
gcauaauugagcaacccac

SEQ ID NO: 2195444 - RNA, 19 nt, Artificial Sequence
  Description of Artificial Sequence: Synthetic oligonucleotide
uuggcucacagucgucuug

SEQ ID NO: 2195445 - RNA, 19 nt, Artificial Sequence
  Description of Artificial Sequence: Synthetic oligonucleotide
gaguaagcagccccacccc

SEQ ID NO: 2195446 - RNA, 19 nt, Artificial Sequence
  Description of Artificial Sequence: Synthetic oligonucleotide
cagcacaucgucugcuggg

SEQ ID NO: 2195447 - RNA, 19 nt, Artificial Sequence
  Description of Artificial Sequence: Synthetic oligonucleotide
cacaggcagucccagaaug

SEQ ID NO: 2195448 - RNA, 19 nt, Artificial Sequence
  Description of Artificial Sequence: Synthetic oligonucleotide
ucgagcaaucguagcaggu

SEQ ID NO: 2195449 - RNA, 19 nt, Artificial Sequence
  Description of Artificial Sequence: Synthetic oligonucleotide
ucgucuugucgagcaaucg

SEQ ID NO: 2195450 - RNA, 19 nt, Artificial Sequence
  Description of Artificial Sequence: Synthetic oligonucleotide
ucacagucgucuugucgag

SEQ ID NO: 2195451 - RNA, 19 nt, Artificial Sequence
  Description of Artificial Sequence: Synthetic oligonucleotide
cuuuugugaauagcacagc

SEQ ID NO: 2195452 - RNA, 19 nt, Artificial Sequence
  Description of Artificial Sequence: Synthetic oligonucleotide
uuuucaggcuauccaggua

SEQ ID NO: 2195453 - RNA, 19 nt, Artificial Sequence
  Description of Artificial Sequence: Synthetic oligonucleotide
uaaagcgguugggauacug

SEQ ID NO: 2195454 - RNA, 19 nt, Artificial Sequence
  Description of Artificial Sequence: Synthetic oligonucleotide
cucuagguccucccguagg

SEQ ID NO: 2195455 - RNA, 19 nt, Artificial Sequence
  Description of Artificial Sequence: Synthetic oligonucleotide
ucccagaaugugguuggcg

SEQ ID NO: 2195456 - RNA, 19 nt, Artificial Sequence
  Description of Artificial Sequence: Synthetic oligonucleotide
acacacacacacacacacc

SEQ ID NO: 2195457 - RNA, 19 nt, Artificial Sequence
  Description of Artificial Sequence: Synthetic oligonucleotide
accagauagguagccacag

SEQ ID NO: 2195458 - RNA, 19 nt, Artificial Sequence
  Description of Artificial Sequence: Synthetic oligonucleotide
ucaguaggugaaucgcauc

SEQ ID NO: 2195459 - RNA, 19 nt, Artificial Sequence
  Description of Artificial Sequence: Synthetic oligonucleotide
agcgguugggauacugggc

SEQ ID NO: 2195460 - RNA, 19 nt, Artificial Sequence
  Description of Artificial Sequence: Synthetic oligonucleotide
gcaaagcggaaccucuugg

SEQ ID NO: 2195461 - RNA, 19 nt, Artificial Sequence
  Description of Artificial Sequence: Synthetic oligonucleotide
cucgguugaauccccauga

SEQ ID NO: 2195462 - RNA, 19 nt, Artificial Sequence
  Description of Artificial Sequence: Synthetic oligonucleotide
aucuucgaaccagauaggu

SEQ ID NO: 2195463 - RNA, 19 nt, Artificial Sequence
  Description of Artificial Sequence: Synthetic oligonucleotide
gaaugugguuggcgguggg

SEQ ID NO: 2195464 - RNA, 19 nt, Artificial Sequence
  Description of Artificial Sequence: Synthetic oligonucleotide
gauccacauagccucgguc

SEQ ID NO: 2195465 - RNA, 19 nt, Artificial Sequence
  Description of Artificial Sequence: Synthetic oligonucleotide
uuccucuagguccucccgu

SEQ ID NO: 2195466 - RNA, 19 nt, Artificial Sequence
  Description of Artificial Sequence: Synthetic oligonucleotide
ucgaaccagauagguagcc

SEQ ID NO: 2195467 - RNA, 19 nt, Artificial Sequence
  Description of Artificial Sequence: Synthetic oligonucleotide
ugguguuuuggcucacagu

SEQ ID NO: 2195468 - RNA, 19 nt, Artificial Sequence
  Description of Artificial Sequence: Synthetic oligonucleotide
cuggugacaggaguguaag

SEQ ID NO: 2195469 - RNA, 19 nt, Artificial Sequence
  Description of Artificial Sequence: Synthetic oligonucleotide
gcuauccagguacugagac

SEQ ID NO: 2195470 - RNA, 19 nt, Artificial Sequence
  Description of Artificial Sequence: Synthetic oligonucleotide
uccucccguaggauuaugu

SEQ ID NO: 2195471 - RNA, 19 nt, Artificial Sequence
  Description of Artificial Sequence: Synthetic oligonucleotide
cccaccagcaaucauuccc

SEQ ID NO: 2195472 - RNA, 19 nt, Artificial Sequence
  Description of Artificial Sequence: Synthetic oligonucleotide
uagguagccacagccaguc

SEQ ID NO: 2195473 - RNA, 19 nt, Artificial Sequence
  Description of Artificial Sequence: Synthetic oligonucleotide
gcaucuuuugugaauagca

SEQ ID NO: 2195474 - RNA, 19 nt, Artificial Sequence
  Description of Artificial Sequence: Synthetic oligonucleotide
gaugguccagagugaacca

SEQ ID NO: 2195475 - RNA, 19 nt, Artificial Sequence
  Description of Artificial Sequence: Synthetic oligonucleotide
agcacaucgucugcugggg

SEQ ID NO: 2195476 - RNA, 19 nt, Artificial Sequence
  Description of Artificial Sequence: Synthetic oligonucleotide
agccaguccgagcagagua

SEQ ID NO: 2195477 - RNA, 19 nt, Artificial Sequence
  Description of Artificial Sequence: Synthetic oligonucleotide
auugagcaacccacuuggc

SEQ ID NO: 2195478 - RNA, 19 nt, Artificial Sequence
  Description of Artificial Sequence: Synthetic oligonucleotide
aaccagauagguagccaca

SEQ ID NO: 2195479 - RNA, 19 nt, Artificial Sequence
  Description of Artificial Sequence: Synthetic oligonucleotide
ucgguugaauccccaugac

SEQ ID NO: 2195480 - RNA, 19 nt, Artificial Sequence
  Description of Artificial Sequence: Synthetic oligonucleotide
gugaccugcgaccggcggg

SEQ ID NO: 2195481 - RNA, 19 nt, Artificial Sequence
  Description of Artificial Sequence: Synthetic oligonucleotide
gguugaauccccaugaccu

SEQ ID NO: 2195482 - RNA, 19 nt, Artificial Sequence
  Description of Artificial Sequence: Synthetic oligonucleotide
gcgguugggauacugggcc

SEQ ID NO: 2195483 - RNA, 19 nt, Artificial Sequence
  Description of Artificial Sequence: Synthetic oligonucleotide
cauagccucggucuucauc

SEQ ID NO: 2195484 - RNA, 19 nt, Artificial Sequence
  Description of Artificial Sequence: Synthetic oligonucleotide
agcacuggguuggaucuuc

SEQ ID NO: 2195485 - RNA, 19 nt, Artificial Sequence
  Description of Artificial Sequence: Synthetic oligonucleotide
gcucacagucgucuugucg

SEQ ID NO: 2195486 - RNA, 19 nt, Artificial Sequence
  Description of Artificial Sequence: Synthetic oligonucleotide
agauagguagccacagcca

SEQ ID NO: 2195487 - RNA, 19 nt, Artificial Sequence
  Description of Artificial Sequence: Synthetic oligonucleotide
aucgcaucuuuugugaaua

SEQ ID NO: 2195488 - RNA, 19 nt, Artificial Sequence
  Description of Artificial Sequence: Synthetic oligonucleotide
gaaucgcaucuuuugugaa

SEQ ID NO: 2195489 - RNA, 19 nt, Artificial Sequence
  Description of Artificial Sequence: Synthetic oligonucleotide
uagguccaaccuucuggag

SEQ ID NO: 2195490 - RNA, 19 nt, Artificial Sequence
  Description of Artificial Sequence: Synthetic oligonucleotide
gguccaaccuucuggagga

SEQ ID NO: 2195491 - RNA, 19 nt, Artificial Sequence
  Description of Artificial Sequence: Synthetic oligonucleotide
cagcauaauugagcaaccc

SEQ ID NO: 2195492 - RNA, 19 nt, Artificial Sequence
  Description of Artificial Sequence: Synthetic oligonucleotide
agauugccaucaauucggg

SEQ ID NO: 2195493 - RNA, 19 nt, Artificial Sequence
  Description of Artificial Sequence: Synthetic oligonucleotide
uuuggggugcacaccuuuu

SEQ ID NO: 2195494 - RNA, 19 nt, Artificial Sequence
  Description of Artificial Sequence: Synthetic oligonucleotide
cugaugaccagauugccau

SEQ ID NO: 2195495 - RNA, 19 nt, Artificial Sequence
  Description of Artificial Sequence: Synthetic oligonucleotide
cagaguaagcagccccacc

SEQ ID NO: 2195496 - RNA, 19 nt, Artificial Sequence
  Description of Artificial Sequence: Synthetic oligonucleotide
cauaauugagcaacccacu

SEQ ID NO: 2195497 - RNA, 19 nt, Artificial Sequence
  Description of Artificial Sequence: Synthetic oligonucleotide
gcuagcaggaccgggcucg

SEQ ID NO: 2195498 - RNA, 19 nt, Artificial Sequence
  Description of Artificial Sequence: Synthetic oligonucleotide
uuggggugcacaccuuuua

SEQ ID NO: 2195499 - RNA, 19 nt, Artificial Sequence
  Description of Artificial Sequence: Synthetic oligonucleotide
gagcuuaaagcgguuggga

SEQ ID NO: 2195500 - RNA, 19 nt, Artificial Sequence
  Description of Artificial Sequence: Synthetic oligonucleotide
uuggcggugggcagggcaa

SEQ ID NO: 2195501 - RNA, 19 nt, Artificial Sequence
  Description of Artificial Sequence: Synthetic oligonucleotide
ggagugugaccugcgaccg

SEQ ID NO: 2195502 - RNA, 19 nt, Artificial Sequence
  Description of Artificial Sequence: Synthetic oligonucleotide
aucguagcagguacuucuc

SEQ ID NO: 2195503 - RNA, 19 nt, Artificial Sequence
  Description of Artificial Sequence: Synthetic oligonucleotide
ugccacucgcaguucagau

SEQ ID NO: 2195504 - RNA, 19 nt, Artificial Sequence
  Description of Artificial Sequence: Synthetic oligonucleotide
ggcagggcaaagcggaacc

SEQ ID NO: 2195505 - RNA, 19 nt, Artificial Sequence
  Description of Artificial Sequence: Synthetic oligonucleotide
cuggaucaugucagcaguc

SEQ ID NO: 2195506 - RNA, 19 nt, Artificial Sequence
  Description of Artificial Sequence: Synthetic oligonucleotide
agauccacauagccucggu

SEQ ID NO: 2195507 - RNA, 19 nt, Artificial Sequence
  Description of Artificial Sequence: Synthetic oligonucleotide
gacuuucaagauggcccgg

SEQ ID NO: 2195508 - RNA, 19 nt, Artificial Sequence
  Description of Artificial Sequence: Synthetic oligonucleotide
aguucagauggagaauuuu

SEQ ID NO: 2195509 - RNA, 19 nt, Artificial Sequence
  Description of Artificial Sequence: Synthetic oligonucleotide
acacacacacacaccagcu

SEQ ID NO: 2195510 - RNA, 19 nt, Artificial Sequence
  Description of Artificial Sequence: Synthetic oligonucleotide
cuucaucacuggugacagg

SEQ ID NO: 2195511 - RNA, 19 nt, Artificial Sequence
  Description of Artificial Sequence: Synthetic oligonucleotide
agauacacacacacacaca

SEQ ID NO: 2195512 - RNA, 19 nt, Artificial Sequence
  Description of Artificial Sequence: Synthetic oligonucleotide
ugaugacaagauccacaua

SEQ ID NO: 2195513 - RNA, 19 nt, Artificial Sequence
  Description of Artificial Sequence: Synthetic oligonucleotide
cucgcaguucagauggaga

SEQ ID NO: 2195514 - RNA, 19 nt, Artificial Sequence
  Description of Artificial Sequence: Synthetic oligonucleotide
aguuaggauggcaggccag

SEQ ID NO: 2195515 - RNA, 19 nt, Artificial Sequence
  Description of Artificial Sequence: Synthetic oligonucleotide
gagugugaccugcgaccgg

SEQ ID NO: 2195516 - RNA, 19 nt, Artificial Sequence
  Description of Artificial Sequence: Synthetic oligonucleotide
uggcucacagucgucuugu

SEQ ID NO: 2195517 - RNA, 19 nt, Artificial Sequence
  Description of Artificial Sequence: Synthetic oligonucleotide
aggccagcuguaccauagg

SEQ ID NO: 2195518 - RNA, 19 nt, Artificial Sequence
  Description of Artificial Sequence: Synthetic oligonucleotide
ccagcauaauugagcaacc

SEQ ID NO: 2195519 - RNA, 19 nt, Artificial Sequence
  Description of Artificial Sequence: Synthetic oligonucleotide
agcggaaccucuugguguu

SEQ ID NO: 2195520 - RNA, 19 nt, Artificial Sequence
  Description of Artificial Sequence: Synthetic oligonucleotide
ucccggagugugaccugcg

SEQ ID NO: 2195521 - RNA, 19 nt, Artificial Sequence
  Description of Artificial Sequence: Synthetic oligonucleotide
ccaaguuaggauggcaggc

SEQ ID NO: 2195522 - RNA, 19 nt, Artificial Sequence
  Description of Artificial Sequence: Synthetic oligonucleotide
ugaccugcgaccggcggga

SEQ ID NO: 2195523 - RNA, 19 nt, Artificial Sequence
  Description of Artificial Sequence: Synthetic oligonucleotide
uugagacgcucaguaggug

SEQ ID NO: 2195524 - RNA, 19 nt, Artificial Sequence
  Description of Artificial Sequence: Synthetic oligonucleotide
uaccauaggcggcggccca

SEQ ID NO: 2195525 - RNA, 19 nt, Artificial Sequence
  Description of Artificial Sequence: Synthetic oligonucleotide
caguccgagcagaguaagc

SEQ ID NO: 2195526 - RNA, 19 nt, Artificial Sequence
  Description of Artificial Sequence: Synthetic oligonucleotide
cuugagacgcucaguaggu

SEQ ID NO: 2195527 - RNA, 19 nt, Artificial Sequence
  Description of Artificial Sequence: Synthetic oligonucleotide
gacgcucaguaggugaauc

SEQ ID NO: 2195528 - RNA, 19 nt, Artificial Sequence
  Description of Artificial Sequence: Synthetic oligonucleotide
agcagaguaagcagcccca

SEQ ID NO: 2195529 - RNA, 19 nt, Artificial Sequence
  Description of Artificial Sequence: Synthetic oligonucleotide
guaccauaggcggcggccc

SEQ ID NO: 2195530 - RNA, 19 nt, Artificial Sequence
  Description of Artificial Sequence: Synthetic oligonucleotide
guuggcggugggcagggca

SEQ ID NO: 2195531 - RNA, 19 nt, Artificial Sequence
  Description of Artificial Sequence: Synthetic oligonucleotide
agcagcaccagcacaucgu

SEQ ID NO: 2195532 - RNA, 19 nt, Artificial Sequence
  Description of Artificial Sequence: Synthetic oligonucleotide
accagcaaucauucccaau

SEQ ID NO: 2195533 - RNA, 19 nt, Artificial Sequence
  Description of Artificial Sequence: Synthetic oligonucleotide
agggcaaagcggaaccucu

SEQ ID NO: 2195534 - RNA, 19 nt, Artificial Sequence
  Description of Artificial Sequence: Synthetic oligonucleotide
auacacacacacacacaca

SEQ ID NO: 2195535 - RNA, 19 nt, Artificial Sequence
  Description of Artificial Sequence: Synthetic oligonucleotide
guagacaugcuugcccaca

SEQ ID NO: 2195536 - RNA, 19 nt, Artificial Sequence
  Description of Artificial Sequence: Synthetic oligonucleotide
acacacacacacacaccag

SEQ ID NO: 2195537 - RNA, 19 nt, Artificial Sequence
  Description of Artificial Sequence: Synthetic oligonucleotide
gaccagauugccaucaauu

SEQ ID NO: 2195538 - RNA, 19 nt, Artificial Sequence
  Description of Artificial Sequence: Synthetic oligonucleotide
gaccgggcucgguugaauc

SEQ ID NO: 2195539 - RNA, 19 nt, Artificial Sequence
  Description of Artificial Sequence: Synthetic oligonucleotide
ucgggcagagagguagaca

SEQ ID NO: 2195540 - RNA, 19 nt, Artificial Sequence
  Description of Artificial Sequence: Synthetic oligonucleotide
cuguagguccaaccuucug

SEQ ID NO: 2195541 - RNA, 19 nt, Artificial Sequence
  Description of Artificial Sequence: Synthetic oligonucleotide
gagugaaccagagcuuaaa

SEQ ID NO: 2195542 - RNA, 19 nt, Artificial Sequence
  Description of Artificial Sequence: Synthetic oligonucleotide
agcaggaccgggcucgguu

SEQ ID NO: 2195543 - RNA, 19 nt, Artificial Sequence
  Description of Artificial Sequence: Synthetic oligonucleotide
aaggccugaugaccagauu

SEQ ID NO: 2195544 - RNA, 19 nt, Artificial Sequence
  Description of Artificial Sequence: Synthetic oligonucleotide
ccgagcagaguaagcagcc

SEQ ID NO: 2195545 - RNA, 19 nt, Artificial Sequence
  Description of Artificial Sequence: Synthetic oligonucleotide
guugaauccccaugaccua

SEQ ID NO: 2195546 - RNA, 19 nt, Artificial Sequence
  Description of Artificial Sequence: Synthetic oligonucleotide
gggccuguaguuccucuag

SEQ ID NO: 2195547 - RNA, 19 nt, Artificial Sequence
  Description of Artificial Sequence: Synthetic oligonucleotide
agucgucuugucgagcaau

SEQ ID NO: 2195548 - RNA, 19 nt, Artificial Sequence
  Description of Artificial Sequence: Synthetic oligonucleotide
uugccacucgcaguucaga

SEQ ID NO: 2195549 - RNA, 19 nt, Artificial Sequence
  Description of Artificial Sequence: Synthetic oligonucleotide
gucuugucgagcaaucgua

SEQ ID NO: 2195550 - RNA, 19 nt, Artificial Sequence
  Description of Artificial Sequence: Synthetic oligonucleotide
acaugcuugcccacaggca

SEQ ID NO: 2195551 - RNA, 19 nt, Artificial Sequence
  Description of Artificial Sequence: Synthetic oligonucleotide
gcuuaaagcgguugggaua

SEQ ID NO: 2195552 - RNA, 19 nt, Artificial Sequence
  Description of Artificial Sequence: Synthetic oligonucleotide
ggccugaugaccagauugc

SEQ ID NO: 2195553 - RNA, 19 nt, Artificial Sequence
  Description of Artificial Sequence: Synthetic oligonucleotide
cccaauuuucaggcuaucc

SEQ ID NO: 2195554 - RNA, 19 nt, Artificial Sequence
  Description of Artificial Sequence: Synthetic oligonucleotide
cagcuuguccaaguuagga

SEQ ID NO: 2195555 - RNA, 19 nt, Artificial Sequence
  Description of Artificial Sequence: Synthetic oligonucleotide
gagaggcuagcaggaccgg

SEQ ID NO: 2195556 - RNA, 19 nt, Artificial Sequence
  Description of Artificial Sequence: Synthetic oligonucleotide
ccuguaguuccucuagguc

SEQ ID NO: 2195557 - RNA, 19 nt, Artificial Sequence
  Description of Artificial Sequence: Synthetic oligonucleotide
ugcacaccuuuuagauaaa

SEQ ID NO: 2195558 - RNA, 19 nt, Artificial Sequence
  Description of Artificial Sequence: Synthetic oligonucleotide
cggagugugaccugcgacc

SEQ ID NO: 2195559 - RNA, 19 nt, Artificial Sequence
  Description of Artificial Sequence: Synthetic oligonucleotide
gcucgguugaauccccaug

SEQ ID NO: 2195560 - RNA, 19 nt, Artificial Sequence
  Description of Artificial Sequence: Synthetic oligonucleotide
agcaaucguagcagguacu

SEQ ID NO: 2195561 - RNA, 19 nt, Artificial Sequence
  Description of Artificial Sequence: Synthetic oligonucleotide
gaagccccggcuguagguc

SEQ ID NO: 2195562 - RNA, 19 nt, Artificial Sequence
  Description of Artificial Sequence: Synthetic oligonucleotide
aguaggugaaucgcaucuu

SEQ ID NO: 2195563 - RNA, 19 nt, Artificial Sequence
  Description of Artificial Sequence: Synthetic oligonucleotide
caaucguagcagguacuuc

SEQ ID NO: 2195564 - RNA, 19 nt, Artificial Sequence
  Description of Artificial Sequence: Synthetic oligonucleotide
ggugggcagggcaaagcgg

SEQ ID NO: 2195565 - RNA, 19 nt, Artificial Sequence
  Description of Artificial Sequence: Synthetic oligonucleotide
auaggcggcggcccacaga

SEQ ID NO: 2195566 - RNA, 19 nt, Artificial Sequence
  Description of Artificial Sequence: Synthetic oligonucleotide
caccuuuuagauaaaccuu

SEQ ID NO: 2195567 - RNA, 19 nt, Artificial Sequence
  Description of Artificial Sequence: Synthetic oligonucleotide
ggcgggaucuucgaaccag

SEQ ID NO: 2195568 - RNA, 19 nt, Artificial Sequence
  Description of Artificial Sequence: Synthetic oligonucleotide
caaagcggaaccucuuggu

SEQ ID NO: 2195569 - RNA, 19 nt, Artificial Sequence
  Description of Artificial Sequence: Synthetic oligonucleotide
uucgggcagagagguagac

SEQ ID NO: 2195570 - RNA, 19 nt, Artificial Sequence
  Description of Artificial Sequence: Synthetic oligonucleotide
guagccacagccaguccga

SEQ ID NO: 2195571 - RNA, 19 nt, Artificial Sequence
  Description of Artificial Sequence: Synthetic oligonucleotide
accauaggcggcggcccac

SEQ ID NO: 2195572 - RNA, 19 nt, Artificial Sequence
  Description of Artificial Sequence: Synthetic oligonucleotide
cagggacuuucaagauggc

SEQ ID NO: 2195573 - RNA, 19 nt, Artificial Sequence
  Description of Artificial Sequence: Synthetic oligonucleotide
acacacacacacacacaca

SEQ ID NO: 2195574 - RNA, 19 nt, Artificial Sequence
  Description of Artificial Sequence: Synthetic oligonucleotide
cuguaccauaggcggcggc

SEQ ID NO: 2195575 - RNA, 19 nt, Artificial Sequence
  Description of Artificial Sequence: Synthetic oligonucleotide
ccagcacaucgucugcugg

SEQ ID NO: 2195576 - RNA, 19 nt, Artificial Sequence
  Description of Artificial Sequence: Synthetic oligonucleotide
gccacucgcaguucagaug

SEQ ID NO: 2195577 - RNA, 19 nt, Artificial Sequence
  Description of Artificial Sequence: Synthetic oligonucleotide
cagagugaaccagagcuua

SEQ ID NO: 2195578 - RNA, 19 nt, Artificial Sequence
  Description of Artificial Sequence: Synthetic oligonucleotide
cacagucgucuugucgagc

SEQ ID NO: 2195579 - RNA, 19 nt, Artificial Sequence
  Description of Artificial Sequence: Synthetic oligonucleotide
cagggcaaagcggaaccuc

SEQ ID NO: 2195580 - RNA, 19 nt, Artificial Sequence
  Description of Artificial Sequence: Synthetic oligonucleotide
accugcgaccggcgggauc

SEQ ID NO: 2195581 - RNA, 19 nt, Artificial Sequence
  Description of Artificial Sequence: Synthetic oligonucleotide
uccgggucccggaguguga

SEQ ID NO: 2195582 - RNA, 19 nt, Artificial Sequence
  Description of Artificial Sequence: Synthetic oligonucleotide
gucgucuugucgagcaauc

SEQ ID NO: 2195583 - RNA, 19 nt, Artificial Sequence
  Description of Artificial Sequence: Synthetic oligonucleotide
auccgggucccggagugug

SEQ ID NO: 2195584 - RNA, 19 nt, Artificial Sequence
  Description of Artificial Sequence: Synthetic oligonucleotide
ccggcgggaucuucgaacc

SEQ ID NO: 2195585 - RNA, 19 nt, Artificial Sequence
  Description of Artificial Sequence: Synthetic oligonucleotide
ggggugcacaccuuuuaga

SEQ ID NO: 2195586 - RNA, 19 nt, Artificial Sequence
  Description of Artificial Sequence: Synthetic oligonucleotide
caggaaauuuggggugcac

SEQ ID NO: 2195587 - RNA, 19 nt, Artificial Sequence
  Description of Artificial Sequence: Synthetic oligonucleotide
cacauagccucggucuuca

SEQ ID NO: 2195588 - RNA, 19 nt, Artificial Sequence
  Description of Artificial Sequence: Synthetic oligonucleotide
ccaccagcaaucauuccca

SEQ ID NO: 2195589 - RNA, 19 nt, Artificial Sequence
  Description of Artificial Sequence: Synthetic oligonucleotide
ccugaugaccagauugcca

SEQ ID NO: 2195590 - RNA, 19 nt, Artificial Sequence
  Description of Artificial Sequence: Synthetic oligonucleotide
gguugggauacugggccug

SEQ ID NO: 2195591 - RNA, 19 nt, Artificial Sequence
  Description of Artificial Sequence: Synthetic oligonucleotide
cauaggcggcggcccacag

SEQ ID NO: 2195592 - RNA, 19 nt, Artificial Sequence
  Description of Artificial Sequence: Synthetic oligonucleotide
ccucccguaggauuauguc

SEQ ID NO: 2195593 - RNA, 19 nt, Artificial Sequence
  Description of Artificial Sequence: Synthetic oligonucleotide
gucccggagugugaccugc

SEQ ID NO: 2195594 - RNA, 19 nt, Artificial Sequence
  Description of Artificial Sequence: Synthetic oligonucleotide
gcaggaccgggcucgguug

SEQ ID NO: 2195595 - RNA, 19 nt, Artificial Sequence
  Description of Artificial Sequence: Synthetic oligonucleotide
cuucccuccuucaggaaau

SEQ ID NO: 2195596 - RNA, 19 nt, Artificial Sequence
  Description of Artificial Sequence: Synthetic oligonucleotide
agagugaaccagagcuuaa

SEQ ID NO: 2195597 - RNA, 19 nt, Artificial Sequence
  Description of Artificial Sequence: Synthetic oligonucleotide
ucuuugccacucgcaguuc

SEQ ID NO: 2195598 - RNA, 19 nt, Artificial Sequence
  Description of Artificial Sequence: Synthetic oligonucleotide
agguccucccguaggauua

SEQ ID NO: 2195599 - RNA, 19 nt, Artificial Sequence
  Description of Artificial Sequence: Synthetic oligonucleotide
uuaaagcgguugggauacu

SEQ ID NO: 2195600 - RNA, 19 nt, Artificial Sequence
  Description of Artificial Sequence: Synthetic oligonucleotide
ccagcaaucauucccaauu

SEQ ID NO: 2195601 - RNA, 19 nt, Artificial Sequence
  Description of Artificial Sequence: Synthetic oligonucleotide
gccugaugaccagauugcc

SEQ ID NO: 2195602 - RNA, 19 nt, Artificial Sequence
  Description of Artificial Sequence: Synthetic oligonucleotide
gugugaccugcgaccggcg

SEQ ID NO: 2195603 - RNA, 19 nt, Artificial Sequence
  Description of Artificial Sequence: Synthetic oligonucleotide
auucgggcagagagguaga

SEQ ID NO: 2195604 - RNA, 19 nt, Artificial Sequence
  Description of Artificial Sequence: Synthetic oligonucleotide
ccuugaugacaagauccac

SEQ ID NO: 2195605 - RNA, 19 nt, Artificial Sequence
  Description of Artificial Sequence: Synthetic oligonucleotide
gcucaguaggugaaucgca

SEQ ID NO: 2195606 - RNA, 19 nt, Artificial Sequence
  Description of Artificial Sequence: Synthetic oligonucleotide
gccaucaauucgggcagag

SEQ ID NO: 2195607 - RNA, 19 nt, Artificial Sequence
  Description of Artificial Sequence: Synthetic oligonucleotide
guuuuggcucacagucguc

SEQ ID NO: 2195608 - RNA, 19 nt, Artificial Sequence
  Description of Artificial Sequence: Synthetic oligonucleotide
gggauacugggccuguagu

SEQ ID NO: 2195609 - RNA, 19 nt, Artificial Sequence
  Description of Artificial Sequence: Synthetic oligonucleotide
gcgaccggcgggaucuucg

SEQ ID NO: 2195610 - RNA, 19 nt, Artificial Sequence
  Description of Artificial Sequence: Synthetic oligonucleotide
gguuggaucuucagggacu

SEQ ID NO: 2195611 - RNA, 19 nt, Artificial Sequence
  Description of Artificial Sequence: Synthetic oligonucleotide
ggggugauuccugucccac

SEQ ID NO: 2195612 - RNA, 19 nt, Artificial Sequence
  Description of Artificial Sequence: Synthetic oligonucleotide
cgcucaguaggugaaucgc

SEQ ID NO: 2195613 - RNA, 19 nt, Artificial Sequence
  Description of Artificial Sequence: Synthetic oligonucleotide
cagagagguagacaugcuu

SEQ ID NO: 2195614 - RNA, 19 nt, Artificial Sequence
  Description of Artificial Sequence: Synthetic oligonucleotide
aagcacuggguuggaucuu

SEQ ID NO: 2195615 - RNA, 19 nt, Artificial Sequence
  Description of Artificial Sequence: Synthetic oligonucleotide
ccggagugugaccugcgac

SEQ ID NO: 2195616 - RNA, 19 nt, Artificial Sequence
  Description of Artificial Sequence: Synthetic oligonucleotide
ggauacugggccuguaguu

SEQ ID NO: 2195617 - RNA, 19 nt, Artificial Sequence
  Description of Artificial Sequence: Synthetic oligonucleotide
ccaguccgagcagaguaag

SEQ ID NO: 2195618 - RNA, 19 nt, Artificial Sequence
  Description of Artificial Sequence: Synthetic oligonucleotide
gucccagaaugugguuggc

SEQ ID NO: 2195619 - RNA, 19 nt, Artificial Sequence
  Description of Artificial Sequence: Synthetic oligonucleotide
agacgcucaguaggugaau

SEQ ID NO: 2195620 - RNA, 19 nt, Artificial Sequence
  Description of Artificial Sequence: Synthetic oligonucleotide
ggaggaugguccagaguga

SEQ ID NO: 2195621 - RNA, 19 nt, Artificial Sequence
  Description of Artificial Sequence: Synthetic oligonucleotide
gcuguaccauaggcggcgg

SEQ ID NO: 2195622 - RNA, 19 nt, Artificial Sequence
  Description of Artificial Sequence: Synthetic oligonucleotide
uugggauacugggccugua

SEQ ID NO: 2195623 - RNA, 19 nt, Artificial Sequence
  Description of Artificial Sequence: Synthetic oligonucleotide
cagcaaucauucccaauuu

SEQ ID NO: 2195624 - RNA, 19 nt, Artificial Sequence
  Description of Artificial Sequence: Synthetic oligonucleotide
caccagcaaucauucccaa

SEQ ID NO: 2195625 - RNA, 19 nt, Artificial Sequence
  Description of Artificial Sequence: Synthetic oligonucleotide
uucccuccuucaggaaauu

SEQ ID NO: 2195626 - RNA, 19 nt, Artificial Sequence
  Description of Artificial Sequence: Synthetic oligonucleotide
ggcuauccagguacugaga

SEQ ID NO: 2195627 - RNA, 19 nt, Artificial Sequence
  Description of Artificial Sequence: Synthetic oligonucleotide
ccuuuucagucugguuggc

SEQ ID NO: 2195628 - RNA, 19 nt, Artificial Sequence
  Description of Artificial Sequence: Synthetic oligonucleotide
ggucccggagugugaccug

SEQ ID NO: 2195629 - RNA, 19 nt, Artificial Sequence
  Description of Artificial Sequence: Synthetic oligonucleotide
cccgaaacuccaccacauc

SEQ ID NO: 2195630 - RNA, 19 nt, Artificial Sequence
  Description of Artificial Sequence: Synthetic oligonucleotide
guugggauacugggccugu

SEQ ID NO: 2195631 - RNA, 19 nt, Artificial Sequence
  Description of Artificial Sequence: Synthetic oligonucleotide
caauucgggcagagaggua

SEQ ID NO: 2195632 - RNA, 19 nt, Artificial Sequence
  Description of Artificial Sequence: Synthetic oligonucleotide
cacacacacacaccagcuu

SEQ ID NO: 2195633 - RNA, 19 nt, Artificial Sequence
  Description of Artificial Sequence: Synthetic oligonucleotide
caguucagauggagaauuu

SEQ ID NO: 2195634 - RNA, 19 nt, Artificial Sequence
  Description of Artificial Sequence: Synthetic oligonucleotide
guccucccguaggauuaug

SEQ ID NO: 2195635 - RNA, 19 nt, Artificial Sequence
  Description of Artificial Sequence: Synthetic oligonucleotide
ggcuagcaggaccgggcuc

SEQ ID NO: 2195636 - RNA, 19 nt, Artificial Sequence
  Description of Artificial Sequence: Synthetic oligonucleotide
cacucgcaguucagaugga

SEQ ID NO: 2195637 - RNA, 19 nt, Artificial Sequence
  Description of Artificial Sequence: Synthetic oligonucleotide
ugcgaccggcgggaucuuc

SEQ ID NO: 2195638 - RNA, 19 nt, Artificial Sequence
  Description of Artificial Sequence: Synthetic oligonucleotide
gcggugggcagggcaaagc

SEQ ID NO: 2195639 - RNA, 19 nt, Artificial Sequence
  Description of Artificial Sequence: Synthetic oligonucleotide
cagucgucuugucgagcaa

SEQ ID NO: 2195640 - RNA, 19 nt, Artificial Sequence
  Description of Artificial Sequence: Synthetic oligonucleotide
cucauccgggucccggagu

SEQ ID NO: 2195641 - RNA, 19 nt, Artificial Sequence
  Description of Artificial Sequence: Synthetic oligonucleotide
uagcaggaccgggcucggu

SEQ ID NO: 2195642 - RNA, 19 nt, Artificial Sequence
  Description of Artificial Sequence: Synthetic oligonucleotide
cagucacgaagccccggcu

SEQ ID NO: 2195643 - RNA, 19 nt, Artificial Sequence
  Description of Artificial Sequence: Synthetic oligonucleotide
gggucccggagugugaccu

SEQ ID NO: 2195644 - RNA, 19 nt, Artificial Sequence
  Description of Artificial Sequence: Synthetic oligonucleotide
ccacauagccucggucuuc

SEQ ID NO: 2195645 - RNA, 19 nt, Artificial Sequence
  Description of Artificial Sequence: Synthetic oligonucleotide
gcaaucguagcagguacuu

SEQ ID NO: 2195646 - RNA, 19 nt, Artificial Sequence
  Description of Artificial Sequence: Synthetic oligonucleotide
gcgggaucuucgaaccaga

SEQ ID NO: 2195647 - RNA, 19 nt, Artificial Sequence
  Description of Artificial Sequence: Synthetic oligonucleotide
ccggcuguagguccaaccu

SEQ ID NO: 2195648 - RNA, 19 nt, Artificial Sequence
  Description of Artificial Sequence: Synthetic oligonucleotide
agccccggcuguaggucca

SEQ ID NO: 2195649 - RNA, 19 nt, Artificial Sequence
  Description of Artificial Sequence: Synthetic oligonucleotide
aggaccgggcucgguugaa

SEQ ID NO: 2195650 - RNA, 19 nt, Artificial Sequence
  Description of Artificial Sequence: Synthetic oligonucleotide
ccugcgaccggcgggaucu

SEQ ID NO: 2195651 - RNA, 19 nt, Artificial Sequence
  Description of Artificial Sequence: Synthetic oligonucleotide
cgucuugucgagcaaucgu

SEQ ID NO: 2195652 - RNA, 19 nt, Artificial Sequence
  Description of Artificial Sequence: Synthetic oligonucleotide
cuagguccucccguaggau

SEQ ID NO: 2195653 - RNA, 19 nt, Artificial Sequence
  Description of Artificial Sequence: Synthetic oligonucleotide
ccgggucccggagugugac

SEQ ID NO: 2195654 - RNA, 19 nt, Artificial Sequence
  Description of Artificial Sequence: Synthetic oligonucleotide
cgagcaaucguagcaggua

SEQ ID NO: 2195655 - RNA, 19 nt, Artificial Sequence
  Description of Artificial Sequence: Synthetic oligonucleotide
cguagcagguacuucucau

SEQ ID NO: 2195656 - RNA, 19 nt, Artificial Sequence
  Description of Artificial Sequence: Synthetic oligonucleotide
ggcucgguugaauccccau

SEQ ID NO: 2195657 - RNA, 19 nt, Artificial Sequence
  Description of Artificial Sequence: Synthetic oligonucleotide
gcuguagguccaaccuucu

SEQ ID NO: 2195658 - RNA, 19 nt, Artificial Sequence
  Description of Artificial Sequence: Synthetic oligonucleotide
gcagagagguagacaugcu

SEQ ID NO: 2195659 - RNA, 19 nt, Artificial Sequence
  Description of Artificial Sequence: Synthetic oligonucleotide
cugucccaccagcaaucau

SEQ ID NO: 2195660 - RNA, 19 nt, Artificial Sequence
  Description of Artificial Sequence: Synthetic oligonucleotide
cccggagugugaccugcga

SEQ ID NO: 2195661 - RNA, 19 nt, Artificial Sequence
  Description of Artificial Sequence: Synthetic oligonucleotide
gcagggcaaagcggaaccu

SEQ ID NO: 2195662 - RNA, 19 nt, Artificial Sequence
  Description of Artificial Sequence: Synthetic oligonucleotide
gggcucgguugaaucccca

SEQ ID NO: 2195663 - RNA, 19 nt, Artificial Sequence
  Description of Artificial Sequence: Synthetic oligonucleotide
caggaguguaaggccugau

SEQ ID NO: 2195664 - RNA, 19 nt, Artificial Sequence
  Description of Artificial Sequence: Synthetic oligonucleotide
ccagcuugagacgcucagu

SEQ ID NO: 2195665 - RNA, 19 nt, Artificial Sequence
  Description of Artificial Sequence: Synthetic oligonucleotide
ccauaggcggcggcccaca

SEQ ID NO: 2195666 - RNA, 19 nt, Artificial Sequence
  Description of Artificial Sequence: Synthetic oligonucleotide
cgaccggcgggaucuucga

SEQ ID NO: 2195667 - RNA, 19 nt, Artificial Sequence
  Description of Artificial Sequence: Synthetic oligonucleotide
cgaagccccggcuguaggu

SEQ ID NO: 2195668 - RNA, 19 nt, Artificial Sequence
  Description of Artificial Sequence: Synthetic oligonucleotide
cauccgggucccggagugu

SEQ ID NO: 2195669 - RNA, 19 nt, Artificial Sequence
  Description of Artificial Sequence: Synthetic oligonucleotide
gcugcagcauuggggugau

SEQ ID NO: 2195670 - RNA, 19 nt, Artificial Sequence
  Description of Artificial Sequence: Synthetic oligonucleotide
guccaaccuucuggaggau

SEQ ID NO: 2195671 - RNA, 19 nt, Artificial Sequence
  Description of Artificial Sequence: Synthetic oligonucleotide
gguccucccguaggauuau

SEQ ID NO: 2195672 - RNA, 19 nt, Artificial Sequence
  Description of Artificial Sequence: Synthetic oligonucleotide
ggaccgggcucgguugaau

SEQ ID NO: 2195673 - RNA, 19 nt, Artificial Sequence
  Description of Artificial Sequence: Synthetic oligonucleotide
ccggaucagcugcagcauu

SEQ ID NO: 2195674 - RNA, 19 nt, Artificial Sequence
  Description of Artificial Sequence: Synthetic oligonucleotide
gaccugcgaccggcgggau

SEQ ID NO: 2195675 - RNA, 19 nt, Artificial Sequence
  Description of Artificial Sequence: Synthetic oligonucleotide
cggcgggaucuucgaacca

SEQ ID NO: 2195676 - RNA, 19 nt, Artificial Sequence
  Description of Artificial Sequence: Synthetic oligonucleotide
ccccggcuguagguccaac

SEQ ID NO: 2195677 - RNA, 19 nt, Artificial Sequence
  Description of Artificial Sequence: Synthetic oligonucleotide
ccguaggauuauguccuuu

SEQ ID NO: 2195678 - RNA, 19 nt, Artificial Sequence
  Description of Artificial Sequence: Synthetic oligonucleotide
cccguaggauuauguccuu

SEQ ID NO: 2195679 - RNA, 19 nt, Artificial Sequence
  Description of Artificial Sequence: Synthetic oligonucleotide
cggcuguagguccaaccuu

SEQ ID NO: 2195680 - RNA, 19 nt, Artificial Sequence
  Description of Artificial Sequence: Synthetic oligonucleotide
gccccggcuguagguccaa

SEQ ID NO: 2195681 - RNA, 19 nt, Artificial Sequence
  Description of Artificial Sequence: Synthetic oligonucleotide
gcggaaccucuugguguuu

SEQ ID NO: 2195682 - RNA, 19 nt, Artificial Sequence
  Description of Artificial Sequence: Synthetic oligonucleotide
aacaugaugauucuaaguc

SEQ ID NO: 2195683 - RNA, 19 nt, Artificial Sequence
  Description of Artificial Sequence: Synthetic oligonucleotide
aaaacugugcaccugacgg

SEQ ID NO: 2195684 - RNA, 19 nt, Artificial Sequence
  Description of Artificial Sequence: Synthetic oligonucleotide
aaacuuauuagauggcugc

SEQ ID NO: 2195685 - RNA, 19 nt, Artificial Sequence
  Description of Artificial Sequence: Synthetic oligonucleotide
aaauucacaacuauuuccc

SEQ ID NO: 2195686 - RNA, 19 nt, Artificial Sequence
  Description of Artificial Sequence: Synthetic oligonucleotide
agagauauaggacuccugc

SEQ ID NO: 2195687 - RNA, 19 nt, Artificial Sequence
  Description of Artificial Sequence: Synthetic oligonucleotide
ucauguuucauccggaucc

SEQ ID NO: 2195688 - RNA, 19 nt, Artificial Sequence
  Description of Artificial Sequence: Synthetic oligonucleotide
aaauucauccuugucgucc

SEQ ID NO: 2195689 - RNA, 19 nt, Artificial Sequence
  Description of Artificial Sequence: Synthetic oligonucleotide
cuugagaugccaaugauag

SEQ ID NO: 2195690 - RNA, 19 nt, Artificial Sequence
  Description of Artificial Sequence: Synthetic oligonucleotide
aauaaaaggguccuuugga

SEQ ID NO: 2195691 - RNA, 19 nt, Artificial Sequence
  Description of Artificial Sequence: Synthetic oligonucleotide
ugaacaaggcaaaugaugu

SEQ ID NO: 2195692 - RNA, 19 nt, Artificial Sequence
  Description of Artificial Sequence: Synthetic oligonucleotide
aaugccccaaaugacaccc

SEQ ID NO: 2195693 - RNA, 19 nt, Artificial Sequence
  Description of Artificial Sequence: Synthetic oligonucleotide
aaagaugauccaaaugacc

SEQ ID NO: 2195694 - RNA, 19 nt, Artificial Sequence
  Description of Artificial Sequence: Synthetic oligonucleotide
aauucauccuugucguccc

SEQ ID NO: 2195695 - RNA, 19 nt, Artificial Sequence
  Description of Artificial Sequence: Synthetic oligonucleotide
uaauaaaaggguccuuugg

SEQ ID NO: 2195696 - RNA, 19 nt, Artificial Sequence
  Description of Artificial Sequence: Synthetic oligonucleotide
ugacggagaacuaaggaag

SEQ ID NO: 2195697 - RNA, 19 nt, Artificial Sequence
  Description of Artificial Sequence: Synthetic oligonucleotide
uuuggauuggacagaagag

SEQ ID NO: 2195698 - RNA, 19 nt, Artificial Sequence
  Description of Artificial Sequence: Synthetic oligonucleotide
aaaagaugauccaaaugac

SEQ ID NO: 2195699 - RNA, 19 nt, Artificial Sequence
  Description of Artificial Sequence: Synthetic oligonucleotide
ugaaguagagauauaggac

SEQ ID NO: 2195700 - RNA, 19 nt, Artificial Sequence
  Description of Artificial Sequence: Synthetic oligonucleotide
ugugcaauggcucacgcac

SEQ ID NO: 2195701 - RNA, 19 nt, Artificial Sequence
  Description of Artificial Sequence: Synthetic oligonucleotide
ucaaguauccgaaaacacu

SEQ ID NO: 2195702 - RNA, 19 nt, Artificial Sequence
  Description of Artificial Sequence: Synthetic oligonucleotide
ucugugcuguaauaaaagg

SEQ ID NO: 2195703 - RNA, 19 nt, Artificial Sequence
  Description of Artificial Sequence: Synthetic oligonucleotide
aagaugauccaaaugacca

SEQ ID NO: 2195704 - RNA, 19 nt, Artificial Sequence
  Description of Artificial Sequence: Synthetic oligonucleotide
ugauaaacaaauucacaac

SEQ ID NO: 2195705 - RNA, 19 nt, Artificial Sequence
  Description of Artificial Sequence: Synthetic oligonucleotide
aacaccaaugcccaacaug

SEQ ID NO: 2195706 - RNA, 19 nt, Artificial Sequence
  Description of Artificial Sequence: Synthetic oligonucleotide
uggucugugauaaacaaau

SEQ ID NO: 2195707 - RNA, 19 nt, Artificial Sequence
  Description of Artificial Sequence: Synthetic oligonucleotide
uauucaaguauccgaaaac

SEQ ID NO: 2195708 - RNA, 19 nt, Artificial Sequence
  Description of Artificial Sequence: Synthetic oligonucleotide
ugcuguaauaaaagggucc

SEQ ID NO: 2195709 - RNA, 19 nt, Artificial Sequence
  Description of Artificial Sequence: Synthetic oligonucleotide
caaaugaugucaugaaccc

SEQ ID NO: 2195710 - RNA, 19 nt, Artificial Sequence
  Description of Artificial Sequence: Synthetic oligonucleotide
cugugcuguaauaaaaggg

SEQ ID NO: 2195711 - RNA, 19 nt, Artificial Sequence
  Description of Artificial Sequence: Synthetic oligonucleotide
gaagagaugguagcaaacg

SEQ ID NO: 2195712 - RNA, 19 nt, Artificial Sequence
  Description of Artificial Sequence: Synthetic oligonucleotide
aacaagcauguaucugugc

SEQ ID NO: 2195713 - RNA, 19 nt, Artificial Sequence
  Description of Artificial Sequence: Synthetic oligonucleotide
uccgaaaacacucuacagu

SEQ ID NO: 2195714 - RNA, 19 nt, Artificial Sequence
  Description of Artificial Sequence: Synthetic oligonucleotide
ggugcguaagauuagacag

SEQ ID NO: 2195715 - RNA, 19 nt, Artificial Sequence
  Description of Artificial Sequence: Synthetic oligonucleotide
ucuucucaguaccacgugg

SEQ ID NO: 2195716 - RNA, 19 nt, Artificial Sequence
  Description of Artificial Sequence: Synthetic oligonucleotide
uauccgaaaacacucuaca

SEQ ID NO: 2195717 - RNA, 19 nt, Artificial Sequence
  Description of Artificial Sequence: Synthetic oligonucleotide
aacaaggcaaaugauguca

SEQ ID NO: 2195718 - RNA, 19 nt, Artificial Sequence
  Description of Artificial Sequence: Synthetic oligonucleotide
cuuguuuauucaaguaucc

SEQ ID NO: 2195719 - RNA, 19 nt, Artificial Sequence
  Description of Artificial Sequence: Synthetic oligonucleotide
cuuauuagauggcugcccg

SEQ ID NO: 2195720 - RNA, 19 nt, Artificial Sequence
  Description of Artificial Sequence: Synthetic oligonucleotide
cuaaguccaagagacaugg

SEQ ID NO: 2195721 - RNA, 19 nt, Artificial Sequence
  Description of Artificial Sequence: Synthetic oligonucleotide
aauggucugugauaaacaa

SEQ ID NO: 2195722 - RNA, 19 nt, Artificial Sequence
  Description of Artificial Sequence: Synthetic oligonucleotide
aacuuauuagauggcugcc

SEQ ID NO: 2195723 - RNA, 19 nt, Artificial Sequence
  Description of Artificial Sequence: Synthetic oligonucleotide
ugauucuaaguccaagaga

SEQ ID NO: 2195724 - RNA, 19 nt, Artificial Sequence
  Description of Artificial Sequence: Synthetic oligonucleotide
augauucuaaguccaagag

SEQ ID NO: 2195725 - RNA, 19 nt, Artificial Sequence
  Description of Artificial Sequence: Synthetic oligonucleotide
ugucggaaccaguagauca

SEQ ID NO: 2195726 - RNA, 19 nt, Artificial Sequence
  Description of Artificial Sequence: Synthetic oligonucleotide
ugcugaaguagagauauag

SEQ ID NO: 2195727 - RNA, 19 nt, Artificial Sequence
  Description of Artificial Sequence: Synthetic oligonucleotide
aaaacaccaaugcccaaca

SEQ ID NO: 2195728 - RNA, 19 nt, Artificial Sequence
  Description of Artificial Sequence: Synthetic oligonucleotide
gaaguagagauauaggacu

SEQ ID NO: 2195729 - RNA, 19 nt, Artificial Sequence
  Description of Artificial Sequence: Synthetic oligonucleotide
cuccacuuggcaaacagcc

SEQ ID NO: 2195730 - RNA, 19 nt, Artificial Sequence
  Description of Artificial Sequence: Synthetic oligonucleotide
ucuuuggugagcucccacg

SEQ ID NO: 2195731 - RNA, 19 nt, Artificial Sequence
  Description of Artificial Sequence: Synthetic oligonucleotide
aguggaaacuuauuagaug

SEQ ID NO: 2195732 - RNA, 19 nt, Artificial Sequence
  Description of Artificial Sequence: Synthetic oligonucleotide
gaugauucuaaguccaaga

SEQ ID NO: 2195733 - RNA, 19 nt, Artificial Sequence
  Description of Artificial Sequence: Synthetic oligonucleotide
agcaauaaucugucggaac

SEQ ID NO: 2195734 - RNA, 19 nt, Artificial Sequence
  Description of Artificial Sequence: Synthetic oligonucleotide
aaggcaaaugaugucauga

SEQ ID NO: 2195735 - RNA, 19 nt, Artificial Sequence
  Description of Artificial Sequence: Synthetic oligonucleotide
uccuugucgucccaggccg

SEQ ID NO: 2195736 - RNA, 19 nt, Artificial Sequence
  Description of Artificial Sequence: Synthetic oligonucleotide
gauccaaaugaccaugaac

SEQ ID NO: 2195737 - RNA, 19 nt, Artificial Sequence
  Description of Artificial Sequence: Synthetic oligonucleotide
acaagcauguaucugugcu

SEQ ID NO: 2195738 - RNA, 19 nt, Artificial Sequence
  Description of Artificial Sequence: Synthetic oligonucleotide
caauggcucacgcacaugg

SEQ ID NO: 2195739 - RNA, 19 nt, Artificial Sequence
  Description of Artificial Sequence: Synthetic oligonucleotide
ucuaguuagacuuguuuau

SEQ ID NO: 2195740 - RNA, 19 nt, Artificial Sequence
  Description of Artificial Sequence: Synthetic oligonucleotide
cugugauaaacaaauucac

SEQ ID NO: 2195741 - RNA, 19 nt, Artificial Sequence
  Description of Artificial Sequence: Synthetic oligonucleotide
acuuauuagauggcugccc

SEQ ID NO: 2195742 - RNA, 19 nt, Artificial Sequence
  Description of Artificial Sequence: Synthetic oligonucleotide
aaucugucggaaccaguag

SEQ ID NO: 2195743 - RNA, 19 nt, Artificial Sequence
  Description of Artificial Sequence: Synthetic oligonucleotide
uuguuuauucaaguauccg

SEQ ID NO: 2195744 - RNA, 19 nt, Artificial Sequence
  Description of Artificial Sequence: Synthetic oligonucleotide
aauaaucugucggaaccag

SEQ ID NO: 2195745 - RNA, 19 nt, Artificial Sequence
  Description of Artificial Sequence: Synthetic oligonucleotide
guuucauccggauccagag

SEQ ID NO: 2195746 - RNA, 19 nt, Artificial Sequence
  Description of Artificial Sequence: Synthetic oligonucleotide
cucaguaccacguggcagg

SEQ ID NO: 2195747 - RNA, 19 nt, Artificial Sequence
  Description of Artificial Sequence: Synthetic oligonucleotide
ugagaugccaaugauaguu

SEQ ID NO: 2195748 - RNA, 19 nt, Artificial Sequence
  Description of Artificial Sequence: Synthetic oligonucleotide
auuuguagguaguugcuga

SEQ ID NO: 2195749 - RNA, 19 nt, Artificial Sequence
  Description of Artificial Sequence: Synthetic oligonucleotide
aacagccauuacaugaugg

SEQ ID NO: 2195750 - RNA, 19 nt, Artificial Sequence
  Description of Artificial Sequence: Synthetic oligonucleotide
acagcaauaaucugucgga

SEQ ID NO: 2195751 - RNA, 19 nt, Artificial Sequence
  Description of Artificial Sequence: Synthetic oligonucleotide
cuuugaaaaguuucacaac

SEQ ID NO: 2195752 - RNA, 19 nt, Artificial Sequence
  Description of Artificial Sequence: Synthetic oligonucleotide
aaugaugucaugaacccuu

SEQ ID NO: 2195753 - RNA, 19 nt, Artificial Sequence
  Description of Artificial Sequence: Synthetic oligonucleotide
uagguaguugcugaaguag

SEQ ID NO: 2195754 - RNA, 19 nt, Artificial Sequence
  Description of Artificial Sequence: Synthetic oligonucleotide
uaucugugcuguaauaaaa

SEQ ID NO: 2195755 - RNA, 19 nt, Artificial Sequence
  Description of Artificial Sequence: Synthetic oligonucleotide
ucuaaguccaagagacaug

SEQ ID NO: 2195756 - RNA, 19 nt, Artificial Sequence
  Description of Artificial Sequence: Synthetic oligonucleotide
uaaucugucggaaccagua

SEQ ID NO: 2195757 - RNA, 19 nt, Artificial Sequence
  Description of Artificial Sequence: Synthetic oligonucleotide
auauaggacuccugcauug

SEQ ID NO: 2195758 - RNA, 19 nt, Artificial Sequence
  Description of Artificial Sequence: Synthetic oligonucleotide
caagaccacagcaauaauc

SEQ ID NO: 2195759 - RNA, 19 nt, Artificial Sequence
  Description of Artificial Sequence: Synthetic oligonucleotide
gaaccaguagaucacaucu

SEQ ID NO: 2195760 - RNA, 19 nt, Artificial Sequence
  Description of Artificial Sequence: Synthetic oligonucleotide
aggacuccugcauugauca

SEQ ID NO: 2195761 - RNA, 19 nt, Artificial Sequence
  Description of Artificial Sequence: Synthetic oligonucleotide
cucgucaauuuguagguag

SEQ ID NO: 2195762 - RNA, 19 nt, Artificial Sequence
  Description of Artificial Sequence: Synthetic oligonucleotide
augaccaugaacaaggcaa

SEQ ID NO: 2195763 - RNA, 19 nt, Artificial Sequence
  Description of Artificial Sequence: Synthetic oligonucleotide
gcaauaaucugucggaacc

SEQ ID NO: 2195764 - RNA, 19 nt, Artificial Sequence
  Description of Artificial Sequence: Synthetic oligonucleotide
uuucauccggauccagagg

SEQ ID NO: 2195765 - RNA, 19 nt, Artificial Sequence
  Description of Artificial Sequence: Synthetic oligonucleotide
caucagucauaguggaugg

SEQ ID NO: 2195766 - RNA, 19 nt, Artificial Sequence
  Description of Artificial Sequence: Synthetic oligonucleotide
guagcaaacgccaucaguc

SEQ ID NO: 2195767 - RNA, 19 nt, Artificial Sequence
  Description of Artificial Sequence: Synthetic oligonucleotide
augaacaaggcaaaugaug

SEQ ID NO: 2195768 - RNA, 19 nt, Artificial Sequence
  Description of Artificial Sequence: Synthetic oligonucleotide
uguaucugugcuguaauaa

SEQ ID NO: 2195769 - RNA, 19 nt, Artificial Sequence
  Description of Artificial Sequence: Synthetic oligonucleotide
acaugguguuuucagaaga

SEQ ID NO: 2195770 - RNA, 19 nt, Artificial Sequence
  Description of Artificial Sequence: Synthetic oligonucleotide
aaggagucggagucuuggg

SEQ ID NO: 2195771 - RNA, 19 nt, Artificial Sequence
  Description of Artificial Sequence: Synthetic oligonucleotide
aguaccacguggcaggagu

SEQ ID NO: 2195772 - RNA, 19 nt, Artificial Sequence
  Description of Artificial Sequence: Synthetic oligonucleotide
gcauugaucaggcagaauc

SEQ ID NO: 2195773 - RNA, 19 nt, Artificial Sequence
  Description of Artificial Sequence: Synthetic oligonucleotide
gacuccugcauugaucagg

SEQ ID NO: 2195774 - RNA, 19 nt, Artificial Sequence
  Description of Artificial Sequence: Synthetic oligonucleotide
guuuucagaagacuugaga

SEQ ID NO: 2195775 - RNA, 19 nt, Artificial Sequence
  Description of Artificial Sequence: Synthetic oligonucleotide
auuagauggcugcccguac

SEQ ID NO: 2195776 - RNA, 19 nt, Artificial Sequence
  Description of Artificial Sequence: Synthetic oligonucleotide
gaaaacaccaaugcccaac

SEQ ID NO: 2195777 - RNA, 19 nt, Artificial Sequence
  Description of Artificial Sequence: Synthetic oligonucleotide
uuucacaacccuugcagaa

SEQ ID NO: 2195778 - RNA, 19 nt, Artificial Sequence
  Description of Artificial Sequence: Synthetic oligonucleotide
uggaaacuuauuagauggc

SEQ ID NO: 2195779 - RNA, 19 nt, Artificial Sequence
  Description of Artificial Sequence: Synthetic oligonucleotide
aaacacucuacaguggaaa

SEQ ID NO: 2195780 - RNA, 19 nt, Artificial Sequence
  Description of Artificial Sequence: Synthetic oligonucleotide
aacuauuuccccaaaggua

SEQ ID NO: 2195781 - RNA, 19 nt, Artificial Sequence
  Description of Artificial Sequence: Synthetic oligonucleotide
aaauggucugugauaaaca

SEQ ID NO: 2195782 - RNA, 19 nt, Artificial Sequence
  Description of Artificial Sequence: Synthetic oligonucleotide
ugaugauucuaaguccaag

SEQ ID NO: 2195783 - RNA, 19 nt, Artificial Sequence
  Description of Artificial Sequence: Synthetic oligonucleotide
auccgaaaacacucuacag

SEQ ID NO: 2195784 - RNA, 19 nt, Artificial Sequence
  Description of Artificial Sequence: Synthetic oligonucleotide
ugcguaagauuagacagca

SEQ ID NO: 2195785 - RNA, 19 nt, Artificial Sequence
  Description of Artificial Sequence: Synthetic oligonucleotide
uccucgucaauuuguaggu

SEQ ID NO: 2195786 - RNA, 19 nt, Artificial Sequence
  Description of Artificial Sequence: Synthetic oligonucleotide
aacugugcaccugacggag

SEQ ID NO: 2195787 - RNA, 19 nt, Artificial Sequence
  Description of Artificial Sequence: Synthetic oligonucleotide
aagcauguaucugugcugu

SEQ ID NO: 2195788 - RNA, 19 nt, Artificial Sequence
  Description of Artificial Sequence: Synthetic oligonucleotide
aaacugugcaccugacgga

SEQ ID NO: 2195789 - RNA, 19 nt, Artificial Sequence
  Description of Artificial Sequence: Synthetic oligonucleotide
uugaucaggcagaauccug

SEQ ID NO: 2195790 - RNA, 19 nt, Artificial Sequence
  Description of Artificial Sequence: Synthetic oligonucleotide
acugugcaauggcucacgc

SEQ ID NO: 2195791 - RNA, 19 nt, Artificial Sequence
  Description of Artificial Sequence: Synthetic oligonucleotide
caggagugccccaacaagc

SEQ ID NO: 2195792 - RNA, 19 nt, Artificial Sequence
  Description of Artificial Sequence: Synthetic oligonucleotide
aagguagaugguucuuuga

SEQ ID NO: 2195793 - RNA, 19 nt, Artificial Sequence
  Description of Artificial Sequence: Synthetic oligonucleotide
ggcacaaugccccaaauga

SEQ ID NO: 2195794 - RNA, 19 nt, Artificial Sequence
  Description of Artificial Sequence: Synthetic oligonucleotide
uaagauuagacagcagcuc

SEQ ID NO: 2195795 - RNA, 19 nt, Artificial Sequence
  Description of Artificial Sequence: Synthetic oligonucleotide
cguaagauuagacagcagc

SEQ ID NO: 2195796 - RNA, 19 nt, Artificial Sequence
  Description of Artificial Sequence: Synthetic oligonucleotide
ucugucggaaccaguagau

SEQ ID NO: 2195797 - RNA, 19 nt, Artificial Sequence
  Description of Artificial Sequence: Synthetic oligonucleotide
caacccuugcagaaaacac

SEQ ID NO: 2195798 - RNA, 19 nt, Artificial Sequence
  Description of Artificial Sequence: Synthetic oligonucleotide
aggugcguaagauuagaca

SEQ ID NO: 2195799 - RNA, 19 nt, Artificial Sequence
  Description of Artificial Sequence: Synthetic oligonucleotide
uucauguuucauccggauc

SEQ ID NO: 2195800 - RNA, 19 nt, Artificial Sequence
  Description of Artificial Sequence: Synthetic oligonucleotide
cagaaaacaccaaugccca

SEQ ID NO: 2195801 - RNA, 19 nt, Artificial Sequence
  Description of Artificial Sequence: Synthetic oligonucleotide
uuacaugaugguguccaag

SEQ ID NO: 2195802 - RNA, 19 nt, Artificial Sequence
  Description of Artificial Sequence: Synthetic oligonucleotide
uuagauggcugcccguacu

SEQ ID NO: 2195803 - RNA, 19 nt, Artificial Sequence
  Description of Artificial Sequence: Synthetic oligonucleotide
gaugguagcaaacgccauc

SEQ ID NO: 2195804 - RNA, 19 nt, Artificial Sequence
  Description of Artificial Sequence: Synthetic oligonucleotide
uagagauauaggacuccug

SEQ ID NO: 2195805 - RNA, 19 nt, Artificial Sequence
  Description of Artificial Sequence: Synthetic oligonucleotide
agcuccacuuggcaaacag

SEQ ID NO: 2195806 - RNA, 19 nt, Artificial Sequence
  Description of Artificial Sequence: Synthetic oligonucleotide
aucugugcuguaauaaaag

SEQ ID NO: 2195807 - RNA, 19 nt, Artificial Sequence
  Description of Artificial Sequence: Synthetic oligonucleotide
ugccccaacaagcauguau

SEQ ID NO: 2195808 - RNA, 19 nt, Artificial Sequence
  Description of Artificial Sequence: Synthetic oligonucleotide
ucacaacccuugcagaaaa

SEQ ID NO: 2195809 - RNA, 19 nt, Artificial Sequence
  Description of Artificial Sequence: Synthetic oligonucleotide
aaaggguccuuuggauugg

SEQ ID NO: 2195810 - RNA, 19 nt, Artificial Sequence
  Description of Artificial Sequence: Synthetic oligonucleotide
accaguagaucacaucuaa

SEQ ID NO: 2195811 - RNA, 19 nt, Artificial Sequence
  Description of Artificial Sequence: Synthetic oligonucleotide
gucaauuuguagguaguug

SEQ ID NO: 2195812 - RNA, 19 nt, Artificial Sequence
  Description of Artificial Sequence: Synthetic oligonucleotide
cauuacaugauggugucca

SEQ ID NO: 2195813 - RNA, 19 nt, Artificial Sequence
  Description of Artificial Sequence: Synthetic oligonucleotide
aucugucggaaccaguaga

SEQ ID NO: 2195814 - RNA, 19 nt, Artificial Sequence
  Description of Artificial Sequence: Synthetic oligonucleotide
uuuggugagcucccacgug

SEQ ID NO: 2195815 - RNA, 19 nt, Artificial Sequence
  Description of Artificial Sequence: Synthetic oligonucleotide
ucgucaauuuguagguagu

SEQ ID NO: 2195816 - RNA, 19 nt, Artificial Sequence
  Description of Artificial Sequence: Synthetic oligonucleotide
aggaagacaauuucauguu

SEQ ID NO: 2195817 - RNA, 19 nt, Artificial Sequence
  Description of Artificial Sequence: Synthetic oligonucleotide
uagcaaacgccaucaguca

SEQ ID NO: 2195818 - RNA, 19 nt, Artificial Sequence
  Description of Artificial Sequence: Synthetic oligonucleotide
uuuguagguaguugcugaa

SEQ ID NO: 2195819 - RNA, 19 nt, Artificial Sequence
  Description of Artificial Sequence: Synthetic oligonucleotide
augaacccuucuuugguga

SEQ ID NO: 2195820 - RNA, 19 nt, Artificial Sequence
  Description of Artificial Sequence: Synthetic oligonucleotide
caugaacccuucuuuggug

SEQ ID NO: 2195821 - RNA, 19 nt, Artificial Sequence
  Description of Artificial Sequence: Synthetic oligonucleotide
acgcacaugguguuuucag

SEQ ID NO: 2195822 - RNA, 19 nt, Artificial Sequence
  Description of Artificial Sequence: Synthetic oligonucleotide
uggcucacgcacauggugu

SEQ ID NO: 2195823 - RNA, 19 nt, Artificial Sequence
  Description of Artificial Sequence: Synthetic oligonucleotide
uuucauguuucauccggau

SEQ ID NO: 2195824 - RNA, 19 nt, Artificial Sequence
  Description of Artificial Sequence: Synthetic oligonucleotide
agccauuacaugauggugu

SEQ ID NO: 2195825 - RNA, 19 nt, Artificial Sequence
  Description of Artificial Sequence: Synthetic oligonucleotide
ucauccucccgucgcgccg

SEQ ID NO: 2195826 - RNA, 19 nt, Artificial Sequence
  Description of Artificial Sequence: Synthetic oligonucleotide
cacaugguguuuucagaag

SEQ ID NO: 2195827 - RNA, 19 nt, Artificial Sequence
  Description of Artificial Sequence: Synthetic oligonucleotide
aacccuucuuuggugagcu

SEQ ID NO: 2195828 - RNA, 19 nt, Artificial Sequence
  Description of Artificial Sequence: Synthetic oligonucleotide
auggcucacgcacauggug

SEQ ID NO: 2195829 - RNA, 19 nt, Artificial Sequence
  Description of Artificial Sequence: Synthetic oligonucleotide
gauggcugcccguacugug

SEQ ID NO: 2195830 - RNA, 19 nt, Artificial Sequence
  Description of Artificial Sequence: Synthetic oligonucleotide
uucucaguaccacguggca

SEQ ID NO: 2195831 - RNA, 19 nt, Artificial Sequence
  Description of Artificial Sequence: Synthetic oligonucleotide
caacaagcauguaucugug

SEQ ID NO: 2195832 - RNA, 19 nt, Artificial Sequence
  Description of Artificial Sequence: Synthetic oligonucleotide
accauacucuuccucguca

SEQ ID NO: 2195833 - RNA, 19 nt, Artificial Sequence
  Description of Artificial Sequence: Synthetic oligonucleotide
agaugauccaaaugaccau

SEQ ID NO: 2195834 - RNA, 19 nt, Artificial Sequence
  Description of Artificial Sequence: Synthetic oligonucleotide
ugccaaugauaguuuaaaa

SEQ ID NO: 2195835 - RNA, 19 nt, Artificial Sequence
  Description of Artificial Sequence: Synthetic oligonucleotide
acaacccuugcagaaaaca

SEQ ID NO: 2195836 - RNA, 19 nt, Artificial Sequence
  Description of Artificial Sequence: Synthetic oligonucleotide
guucuuugaaaaguuucac

SEQ ID NO: 2195837 - RNA, 19 nt, Artificial Sequence
  Description of Artificial Sequence: Synthetic oligonucleotide
uuauuagauggcugcccgu

SEQ ID NO: 2195838 - RNA, 19 nt, Artificial Sequence
  Description of Artificial Sequence: Synthetic oligonucleotide
aagagacaugggucuucuc

SEQ ID NO: 2195839 - RNA, 19 nt, Artificial Sequence
  Description of Artificial Sequence: Synthetic oligonucleotide
uaggacuccugcauugauc

SEQ ID NO: 2195840 - RNA, 19 nt, Artificial Sequence
  Description of Artificial Sequence: Synthetic oligonucleotide
auugaucaggcagaauccu

SEQ ID NO: 2195841 - RNA, 19 nt, Artificial Sequence
  Description of Artificial Sequence: Synthetic oligonucleotide
aaguauccgaaaacacucu

SEQ ID NO: 2195842 - RNA, 19 nt, Artificial Sequence
  Description of Artificial Sequence: Synthetic oligonucleotide
gucauaguggauggcagug

SEQ ID NO: 2195843 - RNA, 19 nt, Artificial Sequence
  Description of Artificial Sequence: Synthetic oligonucleotide
agccaaaaggagucggagu

SEQ ID NO: 2195844 - RNA, 19 nt, Artificial Sequence
  Description of Artificial Sequence: Synthetic oligonucleotide
uauuagauggcugcccgua

SEQ ID NO: 2195845 - RNA, 19 nt, Artificial Sequence
  Description of Artificial Sequence: Synthetic oligonucleotide
guaucugugcuguaauaaa

SEQ ID NO: 2195846 - RNA, 19 nt, Artificial Sequence
  Description of Artificial Sequence: Synthetic oligonucleotide
acgccaucagucauagugg

SEQ ID NO: 2195847 - RNA, 19 nt, Artificial Sequence
  Description of Artificial Sequence: Synthetic oligonucleotide
uauaggacuccugcauuga

SEQ ID NO: 2195848 - RNA, 19 nt, Artificial Sequence
  Description of Artificial Sequence: Synthetic oligonucleotide
aguauccgaaaacacucua

SEQ ID NO: 2195849 - RNA, 19 nt, Artificial Sequence
  Description of Artificial Sequence: Synthetic oligonucleotide
gcugaaguagagauauagg

SEQ ID NO: 2195850 - RNA, 19 nt, Artificial Sequence
  Description of Artificial Sequence: Synthetic oligonucleotide
guuucacaacccuugcaga

SEQ ID NO: 2195851 - RNA, 19 nt, Artificial Sequence
  Description of Artificial Sequence: Synthetic oligonucleotide
ugcaauggcucacgcacau

SEQ ID NO: 2195852 - RNA, 19 nt, Artificial Sequence
  Description of Artificial Sequence: Synthetic oligonucleotide
aggcaaaugaugucaugaa

SEQ ID NO: 2195853 - RNA, 19 nt, Artificial Sequence
  Description of Artificial Sequence: Synthetic oligonucleotide
aucagucauaguggauggc

SEQ ID NO: 2195854 - RNA, 19 nt, Artificial Sequence
  Description of Artificial Sequence: Synthetic oligonucleotide
accacguggcaggagugcc

SEQ ID NO: 2195855 - RNA, 19 nt, Artificial Sequence
  Description of Artificial Sequence: Synthetic oligonucleotide
cuuccucgucaauuuguag

SEQ ID NO: 2195856 - RNA, 19 nt, Artificial Sequence
  Description of Artificial Sequence: Synthetic oligonucleotide
uucuuuggugagcucccac

SEQ ID NO: 2195857 - RNA, 19 nt, Artificial Sequence
  Description of Artificial Sequence: Synthetic oligonucleotide
ggagucggagucuugggug

SEQ ID NO: 2195858 - RNA, 19 nt, Artificial Sequence
  Description of Artificial Sequence: Synthetic oligonucleotide
aggagucggagucuugggu

SEQ ID NO: 2195859 - RNA, 19 nt, Artificial Sequence
  Description of Artificial Sequence: Synthetic oligonucleotide
ccaugaacaaggcaaauga

SEQ ID NO: 2195860 - RNA, 19 nt, Artificial Sequence
  Description of Artificial Sequence: Synthetic oligonucleotide
guauccgaaaacacucuac

SEQ ID NO: 2195861 - RNA, 19 nt, Artificial Sequence
  Description of Artificial Sequence: Synthetic oligonucleotide
ugagcucccacgugccacc

SEQ ID NO: 2195862 - RNA, 19 nt, Artificial Sequence
  Description of Artificial Sequence: Synthetic oligonucleotide
guaagauuagacagcagcu

SEQ ID NO: 2195863 - RNA, 19 nt, Artificial Sequence
  Description of Artificial Sequence: Synthetic oligonucleotide
aaacaccaaugcccaacau

SEQ ID NO: 2195864 - RNA, 19 nt, Artificial Sequence
  Description of Artificial Sequence: Synthetic oligonucleotide
ucauccggauccagaggug

SEQ ID NO: 2195865 - RNA, 19 nt, Artificial Sequence
  Description of Artificial Sequence: Synthetic oligonucleotide
ugcccguacugugcaaugg

SEQ ID NO: 2195866 - RNA, 19 nt, Artificial Sequence
  Description of Artificial Sequence: Synthetic oligonucleotide
caugaugguguccaagaaa

SEQ ID NO: 2195867 - RNA, 19 nt, Artificial Sequence
  Description of Artificial Sequence: Synthetic oligonucleotide
auuagacagcagcuccacu

SEQ ID NO: 2195868 - RNA, 19 nt, Artificial Sequence
  Description of Artificial Sequence: Synthetic oligonucleotide
uucacaacccuugcagaaa

SEQ ID NO: 2195869 - RNA, 19 nt, Artificial Sequence
  Description of Artificial Sequence: Synthetic oligonucleotide
uugagaugccaaugauagu

SEQ ID NO: 2195870 - RNA, 19 nt, Artificial Sequence
  Description of Artificial Sequence: Synthetic oligonucleotide
gauccagaggugcguaaga

SEQ ID NO: 2195871 - RNA, 19 nt, Artificial Sequence
  Description of Artificial Sequence: Synthetic oligonucleotide
uggugagcucccacgugcc

SEQ ID NO: 2195872 - RNA, 19 nt, Artificial Sequence
  Description of Artificial Sequence: Synthetic oligonucleotide
ugguagcaaacgccaucag

SEQ ID NO: 2195873 - RNA, 19 nt, Artificial Sequence
  Description of Artificial Sequence: Synthetic oligonucleotide
ucauaguggauggcagugu

SEQ ID NO: 2195874 - RNA, 19 nt, Artificial Sequence
  Description of Artificial Sequence: Synthetic oligonucleotide
cauccggauccagaggugc

SEQ ID NO: 2195875 - RNA, 19 nt, Artificial Sequence
  Description of Artificial Sequence: Synthetic oligonucleotide
agcaaacgccaucagucau

SEQ ID NO: 2195876 - RNA, 19 nt, Artificial Sequence
  Description of Artificial Sequence: Synthetic oligonucleotide
augacacccaagaccacag

SEQ ID NO: 2195877 - RNA, 19 nt, Artificial Sequence
  Description of Artificial Sequence: Synthetic oligonucleotide
auuucauguuucauccgga

SEQ ID NO: 2195878 - RNA, 19 nt, Artificial Sequence
  Description of Artificial Sequence: Synthetic oligonucleotide
gaccacagcaauaaucugu

SEQ ID NO: 2195879 - RNA, 19 nt, Artificial Sequence
  Description of Artificial Sequence: Synthetic oligonucleotide
augguguuuucagaagacu

SEQ ID NO: 2195880 - RNA, 19 nt, Artificial Sequence
  Description of Artificial Sequence: Synthetic oligonucleotide
acagaagagaugguagcaa

SEQ ID NO: 2195881 - RNA, 19 nt, Artificial Sequence
  Description of Artificial Sequence: Synthetic oligonucleotide
gguaguugcugaaguagag

SEQ ID NO: 2195882 - RNA, 19 nt, Artificial Sequence
  Description of Artificial Sequence: Synthetic oligonucleotide
aggcagaauccugcuauuc

SEQ ID NO: 2195883 - RNA, 19 nt, Artificial Sequence
  Description of Artificial Sequence: Synthetic oligonucleotide
uccuuuggauuggacagaa

SEQ ID NO: 2195884 - RNA, 19 nt, Artificial Sequence
  Description of Artificial Sequence: Synthetic oligonucleotide
ccaucagucauaguggaug

SEQ ID NO: 2195885 - RNA, 19 nt, Artificial Sequence
  Description of Artificial Sequence: Synthetic oligonucleotide
auuuccccaaagguagaug

SEQ ID NO: 2195886 - RNA, 19 nt, Artificial Sequence
  Description of Artificial Sequence: Synthetic oligonucleotide
gugcguaagauuagacagc

SEQ ID NO: 2195887 - RNA, 19 nt, Artificial Sequence
  Description of Artificial Sequence: Synthetic oligonucleotide
cagaggugcguaagauuag

SEQ ID NO: 2195888 - RNA, 19 nt, Artificial Sequence
  Description of Artificial Sequence: Synthetic oligonucleotide
uauuuccccaaagguagau

SEQ ID NO: 2195889 - RNA, 19 nt, Artificial Sequence
  Description of Artificial Sequence: Synthetic oligonucleotide
agauuagacagcagcucca

SEQ ID NO: 2195890 - RNA, 19 nt, Artificial Sequence
  Description of Artificial Sequence: Synthetic oligonucleotide
auuacaugaugguguccaa

SEQ ID NO: 2195891 - RNA, 19 nt, Artificial Sequence
  Description of Artificial Sequence: Synthetic oligonucleotide
agaggugcguaagauuaga

SEQ ID NO: 2195892 - RNA, 19 nt, Artificial Sequence
  Description of Artificial Sequence: Synthetic oligonucleotide
ucggagucuuggguggcgg

SEQ ID NO: 2195893 - RNA, 19 nt, Artificial Sequence
  Description of Artificial Sequence: Synthetic oligonucleotide
aaugcccaacaugaugauu

SEQ ID NO: 2195894 - RNA, 19 nt, Artificial Sequence
  Description of Artificial Sequence: Synthetic oligonucleotide
augaugucaugaacccuuc

SEQ ID NO: 2195895 - RNA, 19 nt, Artificial Sequence
  Description of Artificial Sequence: Synthetic oligonucleotide
auacucuuccucgucaauu

SEQ ID NO: 2195896 - RNA, 19 nt, Artificial Sequence
  Description of Artificial Sequence: Synthetic oligonucleotide
auaggacuccugcauugau

SEQ ID NO: 2195897 - RNA, 19 nt, Artificial Sequence
  Description of Artificial Sequence: Synthetic oligonucleotide
aaaaggagucggagucuug

SEQ ID NO: 2195898 - RNA, 19 nt, Artificial Sequence
  Description of Artificial Sequence: Synthetic oligonucleotide
agguaguugcugaaguaga

SEQ ID NO: 2195899 - RNA, 19 nt, Artificial Sequence
  Description of Artificial Sequence: Synthetic oligonucleotide
acuugagaugccaaugaua

SEQ ID NO: 2195900 - RNA, 19 nt, Artificial Sequence
  Description of Artificial Sequence: Synthetic oligonucleotide
gacggagaacuaaggaaga

SEQ ID NO: 2195901 - RNA, 19 nt, Artificial Sequence
  Description of Artificial Sequence: Synthetic oligonucleotide
caacaugaugauucuaagu

SEQ ID NO: 2195902 - RNA, 19 nt, Artificial Sequence
  Description of Artificial Sequence: Synthetic oligonucleotide
caauaaucugucggaacca

SEQ ID NO: 2195903 - RNA, 19 nt, Artificial Sequence
  Description of Artificial Sequence: Synthetic oligonucleotide
ucggaaccaguagaucaca

SEQ ID NO: 2195904 - RNA, 19 nt, Artificial Sequence
  Description of Artificial Sequence: Synthetic oligonucleotide
accugacggagaacuaagg

SEQ ID NO: 2195905 - RNA, 19 nt, Artificial Sequence
  Description of Artificial Sequence: Synthetic oligonucleotide
gaggugcguaagauuagac

SEQ ID NO: 2195906 - RNA, 19 nt, Artificial Sequence
  Description of Artificial Sequence: Synthetic oligonucleotide
ggaaccaguagaucacauc

SEQ ID NO: 2195907 - RNA, 19 nt, Artificial Sequence
  Description of Artificial Sequence: Synthetic oligonucleotide
cucauccucccgucgcgcc

SEQ ID NO: 2195908 - RNA, 19 nt, Artificial Sequence
  Description of Artificial Sequence: Synthetic oligonucleotide
agugccccaacaagcaugu

SEQ ID NO: 2195909 - RNA, 19 nt, Artificial Sequence
  Description of Artificial Sequence: Synthetic oligonucleotide
agucggagucuuggguggc

SEQ ID NO: 2195910 - RNA, 19 nt, Artificial Sequence
  Description of Artificial Sequence: Synthetic oligonucleotide
ggguccuuuggauuggaca

SEQ ID NO: 2195911 - RNA, 19 nt, Artificial Sequence
  Description of Artificial Sequence: Synthetic oligonucleotide
ccucgcaagggcacaaugc

SEQ ID NO: 2195912 - RNA, 19 nt, Artificial Sequence
  Description of Artificial Sequence: Synthetic oligonucleotide
gucggaaccaguagaucac

SEQ ID NO: 2195913 - RNA, 19 nt, Artificial Sequence
  Description of Artificial Sequence: Synthetic oligonucleotide
gaugguucuuugaaaaguu

SEQ ID NO: 2195914 - RNA, 19 nt, Artificial Sequence
  Description of Artificial Sequence: Synthetic oligonucleotide
cacggacaccuugagggcc

SEQ ID NO: 2195915 - RNA, 19 nt, Artificial Sequence
  Description of Artificial Sequence: Synthetic oligonucleotide
gaacuaaggaagacaauuu

SEQ ID NO: 2195916 - RNA, 19 nt, Artificial Sequence
  Description of Artificial Sequence: Synthetic oligonucleotide
caaacagccauuacaugau

SEQ ID NO: 2195917 - RNA, 19 nt, Artificial Sequence
  Description of Artificial Sequence: Synthetic oligonucleotide
auaaucugucggaaccagu

SEQ ID NO: 2195918 - RNA, 19 nt, Artificial Sequence
  Description of Artificial Sequence: Synthetic oligonucleotide
gcuauucccaagaagccuc

SEQ ID NO: 2195919 - RNA, 19 nt, Artificial Sequence
  Description of Artificial Sequence: Synthetic oligonucleotide
aggagugccccaacaagca

SEQ ID NO: 2195920 - RNA, 19 nt, Artificial Sequence
  Description of Artificial Sequence: Synthetic oligonucleotide
aaccaguagaucacaucua

SEQ ID NO: 2195921 - RNA, 19 nt, Artificial Sequence
  Description of Artificial Sequence: Synthetic oligonucleotide
uuggguggcgggucucggc

SEQ ID NO: 2195922 - RNA, 19 nt, Artificial Sequence
  Description of Artificial Sequence: Synthetic oligonucleotide
cgcaagggcacaaugcccc

SEQ ID NO: 2195923 - RNA, 19 nt, Artificial Sequence
  Description of Artificial Sequence: Synthetic oligonucleotide
agucuuggguggcgggucu

SEQ ID NO: 2195924 - RNA, 19 nt, Artificial Sequence
  Description of Artificial Sequence: Synthetic oligonucleotide
cauaguggauggcagugua

SEQ ID NO: 2195925 - RNA, 19 nt, Artificial Sequence
  Description of Artificial Sequence: Synthetic oligonucleotide
ccagaggugcguaagauua

SEQ ID NO: 2195926 - RNA, 19 nt, Artificial Sequence
  Description of Artificial Sequence: Synthetic oligonucleotide
cacaacccuugcagaaaac

SEQ ID NO: 2195927 - RNA, 19 nt, Artificial Sequence
  Description of Artificial Sequence: Synthetic oligonucleotide
cacguggcaggagugcccc

SEQ ID NO: 2195928 - RNA, 19 nt, Artificial Sequence
  Description of Artificial Sequence: Synthetic oligonucleotide
gggcacaaugccccaaaug

SEQ ID NO: 2195929 - RNA, 19 nt, Artificial Sequence
  Description of Artificial Sequence: Synthetic oligonucleotide
cuauuuccccaaagguaga

SEQ ID NO: 2195930 - RNA, 19 nt, Artificial Sequence
  Description of Artificial Sequence: Synthetic oligonucleotide
guagagauauaggacuccu

SEQ ID NO: 2195931 - RNA, 19 nt, Artificial Sequence
  Description of Artificial Sequence: Synthetic oligonucleotide
ggaaacuuauuagauggcu

SEQ ID NO: 2195932 - RNA, 19 nt, Artificial Sequence
  Description of Artificial Sequence: Synthetic oligonucleotide
gccauuacaugaugguguc

SEQ ID NO: 2195933 - RNA, 19 nt, Artificial Sequence
  Description of Artificial Sequence: Synthetic oligonucleotide
caguggaaacuuauuagau

SEQ ID NO: 2195934 - RNA, 19 nt, Artificial Sequence
  Description of Artificial Sequence: Synthetic oligonucleotide
auccggauccagaggugcg

SEQ ID NO: 2195935 - RNA, 19 nt, Artificial Sequence
  Description of Artificial Sequence: Synthetic oligonucleotide
ucccacgugccaccauacu

SEQ ID NO: 2195936 - RNA, 19 nt, Artificial Sequence
  Description of Artificial Sequence: Synthetic oligonucleotide
ggauccagaggugcguaag

SEQ ID NO: 2195937 - RNA, 19 nt, Artificial Sequence
  Description of Artificial Sequence: Synthetic oligonucleotide
ggauuggacagaagagaug

SEQ ID NO: 2195938 - RNA, 19 nt, Artificial Sequence
  Description of Artificial Sequence: Synthetic oligonucleotide
aucaggcagaauccugcua

SEQ ID NO: 2195939 - RNA, 19 nt, Artificial Sequence
  Description of Artificial Sequence: Synthetic oligonucleotide
cucccacgugccaccauac

SEQ ID NO: 2195940 - RNA, 19 nt, Artificial Sequence
  Description of Artificial Sequence: Synthetic oligonucleotide
ugcaccugacggagaacua

SEQ ID NO: 2195941 - RNA, 19 nt, Artificial Sequence
  Description of Artificial Sequence: Synthetic oligonucleotide
uccggauccagaggugcgu

SEQ ID NO: 2195942 - RNA, 19 nt, Artificial Sequence
  Description of Artificial Sequence: Synthetic oligonucleotide
caugaacaaggcaaaugau

SEQ ID NO: 2195943 - RNA, 19 nt, Artificial Sequence
  Description of Artificial Sequence: Synthetic oligonucleotide
ucacgcacaugguguuuuc

SEQ ID NO: 2195944 - RNA, 19 nt, Artificial Sequence
  Description of Artificial Sequence: Synthetic oligonucleotide
auucauccuugucguccca

SEQ ID NO: 2195945 - RNA, 19 nt, Artificial Sequence
  Description of Artificial Sequence: Synthetic oligonucleotide
gguagcaaacgccaucagu

SEQ ID NO: 2195946 - RNA, 19 nt, Artificial Sequence
  Description of Artificial Sequence: Synthetic oligonucleotide
gucgcuccgcagcaccuug

SEQ ID NO: 2195947 - RNA, 19 nt, Artificial Sequence
  Description of Artificial Sequence: Synthetic oligonucleotide
aaggguccuuuggauugga

SEQ ID NO: 2195948 - RNA, 19 nt, Artificial Sequence
  Description of Artificial Sequence: Synthetic oligonucleotide
cugugcaauggcucacgca

SEQ ID NO: 2195949 - RNA, 19 nt, Artificial Sequence
  Description of Artificial Sequence: Synthetic oligonucleotide
cucuacaguggaaacuuau

SEQ ID NO: 2195950 - RNA, 19 nt, Artificial Sequence
  Description of Artificial Sequence: Synthetic oligonucleotide
cuuuggugagcucccacgu

SEQ ID NO: 2195951 - RNA, 19 nt, Artificial Sequence
  Description of Artificial Sequence: Synthetic oligonucleotide
aguugcugaaguagagaua

SEQ ID NO: 2195952 - RNA, 19 nt, Artificial Sequence
  Description of Artificial Sequence: Synthetic oligonucleotide
gccccaacaagcauguauc

SEQ ID NO: 2195953 - RNA, 19 nt, Artificial Sequence
  Description of Artificial Sequence: Synthetic oligonucleotide
cauguaucugugcuguaau

SEQ ID NO: 2195954 - RNA, 19 nt, Artificial Sequence
  Description of Artificial Sequence: Synthetic oligonucleotide
gagucuuggguggcggguc

SEQ ID NO: 2195955 - RNA, 19 nt, Artificial Sequence
  Description of Artificial Sequence: Synthetic oligonucleotide
gucggagucuuggguggcg

SEQ ID NO: 2195956 - RNA, 19 nt, Artificial Sequence
  Description of Artificial Sequence: Synthetic oligonucleotide
guacugugcaauggcucac

SEQ ID NO: 2195957 - RNA, 19 nt, Artificial Sequence
  Description of Artificial Sequence: Synthetic oligonucleotide
gcuguaauaaaaggguccu

SEQ ID NO: 2195958 - RNA, 19 nt, Artificial Sequence
  Description of Artificial Sequence: Synthetic oligonucleotide
cauguuucauccggaucca

SEQ ID NO: 2195959 - RNA, 19 nt, Artificial Sequence
  Description of Artificial Sequence: Synthetic oligonucleotide
auaguggauggcaguguaa

SEQ ID NO: 2195960 - RNA, 19 nt, Artificial Sequence
  Description of Artificial Sequence: Synthetic oligonucleotide
ccugacggagaacuaagga

SEQ ID NO: 2195961 - RNA, 19 nt, Artificial Sequence
  Description of Artificial Sequence: Synthetic oligonucleotide
gcccguacugugcaauggc

SEQ ID NO: 2195962 - RNA, 19 nt, Artificial Sequence
  Description of Artificial Sequence: Synthetic oligonucleotide
cugucggaaccaguagauc

SEQ ID NO: 2195963 - RNA, 19 nt, Artificial Sequence
  Description of Artificial Sequence: Synthetic oligonucleotide
ccccaaagguagaugguuc

SEQ ID NO: 2195964 - RNA, 19 nt, Artificial Sequence
  Description of Artificial Sequence: Synthetic oligonucleotide
cccacgugccaccauacuc

SEQ ID NO: 2195965 - RNA, 19 nt, Artificial Sequence
  Description of Artificial Sequence: Synthetic oligonucleotide
gugcaccugacggagaacu

SEQ ID NO: 2195966 - RNA, 19 nt, Artificial Sequence
  Description of Artificial Sequence: Synthetic oligonucleotide
ccguacugugcaauggcuc

SEQ ID NO: 2195967 - RNA, 19 nt, Artificial Sequence
  Description of Artificial Sequence: Synthetic oligonucleotide
cauccucccgucgcgccgc

SEQ ID NO: 2195968 - RNA, 19 nt, Artificial Sequence
  Description of Artificial Sequence: Synthetic oligonucleotide
ugcauugaucaggcagaau

SEQ ID NO: 2195969 - RNA, 19 nt, Artificial Sequence
  Description of Artificial Sequence: Synthetic oligonucleotide
ccacacggacaccuugagg

SEQ ID NO: 2195970 - RNA, 19 nt, Artificial Sequence
  Description of Artificial Sequence: Synthetic oligonucleotide
cguacugugcaauggcuca

SEQ ID NO: 2195971 - RNA, 19 nt, Artificial Sequence
  Description of Artificial Sequence: Synthetic oligonucleotide
guccuuuggauuggacaga

SEQ ID NO: 2195972 - RNA, 19 nt, Artificial Sequence
  Description of Artificial Sequence: Synthetic oligonucleotide
ggccgagccaaaaggaguc

SEQ ID NO: 2195973 - RNA, 19 nt, Artificial Sequence
  Description of Artificial Sequence: Synthetic oligonucleotide
agcauguaucugugcugua

SEQ ID NO: 2195974 - RNA, 19 nt, Artificial Sequence
  Description of Artificial Sequence: Synthetic oligonucleotide
gccucgcaagggcacaaug

SEQ ID NO: 2195975 - RNA, 19 nt, Artificial Sequence
  Description of Artificial Sequence: Synthetic oligonucleotide
gcauguaucugugcuguaa

SEQ ID NO: 2195976 - RNA, 19 nt, Artificial Sequence
  Description of Artificial Sequence: Synthetic oligonucleotide
ggaagacaauuucauguuu

SEQ ID NO: 2195977 - RNA, 19 nt, Artificial Sequence
  Description of Artificial Sequence: Synthetic oligonucleotide
ggacuccugcauugaucag

SEQ ID NO: 2195978 - RNA, 19 nt, Artificial Sequence
  Description of Artificial Sequence: Synthetic oligonucleotide
ccgagccaaaaggagucgg

SEQ ID NO: 2195979 - RNA, 19 nt, Artificial Sequence
  Description of Artificial Sequence: Synthetic oligonucleotide
gccgcucauccucccgucg

SEQ ID NO: 2195980 - RNA, 19 nt, Artificial Sequence
  Description of Artificial Sequence: Synthetic oligonucleotide
gugcaauggcucacgcaca

SEQ ID NO: 2195981 - RNA, 19 nt, Artificial Sequence
  Description of Artificial Sequence: Synthetic oligonucleotide
ggccgcgucgcuccgcagc

SEQ ID NO: 2195982 - RNA, 19 nt, Artificial Sequence
  Description of Artificial Sequence: Synthetic oligonucleotide
caagagacaugggucuucu

SEQ ID NO: 2195983 - RNA, 19 nt, Artificial Sequence
  Description of Artificial Sequence: Synthetic oligonucleotide
uugucgucccaggccgcgu

SEQ ID NO: 2195984 - RNA, 19 nt, Artificial Sequence
  Description of Artificial Sequence: Synthetic oligonucleotide
gccgagccaaaaggagucg

SEQ ID NO: 2195985 - RNA, 19 nt, Artificial Sequence
  Description of Artificial Sequence: Synthetic oligonucleotide
acgugccaccauacucuuc

SEQ ID NO: 2195986 - RNA, 19 nt, Artificial Sequence
  Description of Artificial Sequence: Synthetic oligonucleotide
cacgcacaugguguuuuca

SEQ ID NO: 2195987 - RNA, 19 nt, Artificial Sequence
  Description of Artificial Sequence: Synthetic oligonucleotide
ccacguggcaggagugccc

SEQ ID NO: 2195988 - RNA, 19 nt, Artificial Sequence
  Description of Artificial Sequence: Synthetic oligonucleotide
acugugcaccugacggaga

SEQ ID NO: 2195989 - RNA, 19 nt, Artificial Sequence
  Description of Artificial Sequence: Synthetic oligonucleotide
acucuacaguggaaacuua

SEQ ID NO: 2195990 - RNA, 19 nt, Artificial Sequence
  Description of Artificial Sequence: Synthetic oligonucleotide
ccacgugccaccauacucu

SEQ ID NO: 2195991 - RNA, 19 nt, Artificial Sequence
  Description of Artificial Sequence: Synthetic oligonucleotide
ccucccgucgcgccgcccg

SEQ ID NO: 2195992 - RNA, 19 nt, Artificial Sequence
  Description of Artificial Sequence: Synthetic oligonucleotide
cugcauugaucaggcagaa

SEQ ID NO: 2195993 - RNA, 19 nt, Artificial Sequence
  Description of Artificial Sequence: Synthetic oligonucleotide
ccaguagaucacaucuaaa

SEQ ID NO: 2195994 - RNA, 19 nt, Artificial Sequence
  Description of Artificial Sequence: Synthetic oligonucleotide
ccgcucauccucccgucgc

SEQ ID NO: 2195995 - RNA, 19 nt, Artificial Sequence
  Description of Artificial Sequence: Synthetic oligonucleotide
cgggccgagccaaaaggag

SEQ ID NO: 2195996 - RNA, 19 nt, Artificial Sequence
  Description of Artificial Sequence: Synthetic oligonucleotide
caaaaggagucggagucuu

SEQ ID NO: 2195997 - RNA, 19 nt, Artificial Sequence
  Description of Artificial Sequence: Synthetic oligonucleotide
ccaagagacaugggucuuc

SEQ ID NO: 2195998 - RNA, 19 nt, Artificial Sequence
  Description of Artificial Sequence: Synthetic oligonucleotide
gcaccugacggagaacuaa

SEQ ID NO: 2195999 - RNA, 19 nt, Artificial Sequence
  Description of Artificial Sequence: Synthetic oligonucleotide
gcguaagauuagacagcag

SEQ ID NO: 2196000 - RNA, 19 nt, Artificial Sequence
  Description of Artificial Sequence: Synthetic oligonucleotide
gcaaacgccaucagucaua

SEQ ID NO: 2196001 - RNA, 19 nt, Artificial Sequence
  Description of Artificial Sequence: Synthetic oligonucleotide
gccccguuggccagcugcg

SEQ ID NO: 2196002 - RNA, 19 nt, Artificial Sequence
  Description of Artificial Sequence: Synthetic oligonucleotide
caaugcccaacaugaugau

SEQ ID NO: 2196003 - RNA, 19 nt, Artificial Sequence
  Description of Artificial Sequence: Synthetic oligonucleotide
cccaaagguagaugguucu

SEQ ID NO: 2196004 - RNA, 19 nt, Artificial Sequence
  Description of Artificial Sequence: Synthetic oligonucleotide
cgcacaugguguuuucaga

SEQ ID NO: 2196005 - RNA, 19 nt, Artificial Sequence
  Description of Artificial Sequence: Synthetic oligonucleotide
ucccgucgcgccgcccgag

SEQ ID NO: 2196006 - RNA, 19 nt, Artificial Sequence
  Description of Artificial Sequence: Synthetic oligonucleotide
acguggcaggagugcccca

SEQ ID NO: 2196007 - RNA, 19 nt, Artificial Sequence
  Description of Artificial Sequence: Synthetic oligonucleotide
cgcucauccucccgucgcg

SEQ ID NO: 2196008 - RNA, 19 nt, Artificial Sequence
  Description of Artificial Sequence: Synthetic oligonucleotide
agcucccacgugccaccau

SEQ ID NO: 2196009 - RNA, 19 nt, Artificial Sequence
  Description of Artificial Sequence: Synthetic oligonucleotide
augccccaaaugacaccca

SEQ ID NO: 2196010 - RNA, 19 nt, Artificial Sequence
  Description of Artificial Sequence: Synthetic oligonucleotide
gcgcgggccgagccaaaag

SEQ ID NO: 2196011 - RNA, 19 nt, Artificial Sequence
  Description of Artificial Sequence: Synthetic oligonucleotide
cggagucuuggguggcggg

SEQ ID NO: 2196012 - RNA, 19 nt, Artificial Sequence
  Description of Artificial Sequence: Synthetic oligonucleotide
cgagccaaaaggagucgga

SEQ ID NO: 2196013 - RNA, 19 nt, Artificial Sequence
  Description of Artificial Sequence: Synthetic oligonucleotide
gcgggucucggcgcgcggg

SEQ ID NO: 2196014 - RNA, 19 nt, Artificial Sequence
  Description of Artificial Sequence: Synthetic oligonucleotide
gcgggccgagccaaaagga

SEQ ID NO: 2196015 - RNA, 19 nt, Artificial Sequence
  Description of Artificial Sequence: Synthetic oligonucleotide
aggccgcgucgcuccgcag

SEQ ID NO: 2196016 - RNA, 19 nt, Artificial Sequence
  Description of Artificial Sequence: Synthetic oligonucleotide
cucacgcacaugguguuuu

SEQ ID NO: 2196017 - RNA, 19 nt, Artificial Sequence
  Description of Artificial Sequence: Synthetic oligonucleotide
agccucgcaagggcacaau

SEQ ID NO: 2196018 - RNA, 19 nt, Artificial Sequence
  Description of Artificial Sequence: Synthetic oligonucleotide
cgcgucgcuccgcagcacc

SEQ ID NO: 2196019 - RNA, 19 nt, Artificial Sequence
  Description of Artificial Sequence: Synthetic oligonucleotide
gggccgagccaaaaggagu

SEQ ID NO: 2196020 - RNA, 19 nt, Artificial Sequence
  Description of Artificial Sequence: Synthetic oligonucleotide
cuguaauaaaaggguccuu

SEQ ID NO: 2196021 - RNA, 19 nt, Artificial Sequence
  Description of Artificial Sequence: Synthetic oligonucleotide
ggacaccuugagggccccg

SEQ ID NO: 2196022 - RNA, 19 nt, Artificial Sequence
  Description of Artificial Sequence: Synthetic oligonucleotide
ggagucuuggguggcgggu

SEQ ID NO: 2196023 - RNA, 19 nt, Artificial Sequence
  Description of Artificial Sequence: Synthetic oligonucleotide
caggcagaauccugcuauu

SEQ ID NO: 2196024 - RNA, 19 nt, Artificial Sequence
  Description of Artificial Sequence: Synthetic oligonucleotide
uccucccgucgcgccgccc

SEQ ID NO: 2196025 - RNA, 19 nt, Artificial Sequence
  Description of Artificial Sequence: Synthetic oligonucleotide
cccguacugugcaauggcu

SEQ ID NO: 2196026 - RNA, 19 nt, Artificial Sequence
  Description of Artificial Sequence: Synthetic oligonucleotide
cacgugccaccauacucuu

SEQ ID NO: 2196027 - RNA, 19 nt, Artificial Sequence
  Description of Artificial Sequence: Synthetic oligonucleotide
ccaaaaggagucggagucu

SEQ ID NO: 2196028 - RNA, 19 nt, Artificial Sequence
  Description of Artificial Sequence: Synthetic oligonucleotide
ccccaacaagcauguaucu

SEQ ID NO: 2196029 - RNA, 19 nt, Artificial Sequence
  Description of Artificial Sequence: Synthetic oligonucleotide
cuuccgccgcccgccgcuc

SEQ ID NO: 2196030 - RNA, 19 nt, Artificial Sequence
  Description of Artificial Sequence: Synthetic oligonucleotide
ggcucacgcacaugguguu

SEQ ID NO: 2196031 - RNA, 19 nt, Artificial Sequence
  Description of Artificial Sequence: Synthetic oligonucleotide
cagcuccacuuggcaaaca

SEQ ID NO: 2196032 - RNA, 19 nt, Artificial Sequence
  Description of Artificial Sequence: Synthetic oligonucleotide
ccccguuggccagcugcgg

SEQ ID NO: 2196033 - RNA, 19 nt, Artificial Sequence
  Description of Artificial Sequence: Synthetic oligonucleotide
cucccgucgcgccgcccga

SEQ ID NO: 2196034 - RNA, 19 nt, Artificial Sequence
  Description of Artificial Sequence: Synthetic oligonucleotide
gcugcccguacugugcaau

SEQ ID NO: 2196035 - RNA, 19 nt, Artificial Sequence
  Description of Artificial Sequence: Synthetic oligonucleotide
ccguuggccagcugcggcu

SEQ ID NO: 2196036 - RNA, 19 nt, Artificial Sequence
  Description of Artificial Sequence: Synthetic oligonucleotide
ccaagaccacagcaauaau

SEQ ID NO: 2196037 - RNA, 19 nt, Artificial Sequence
  Description of Artificial Sequence: Synthetic oligonucleotide
gccaucagucauaguggau

SEQ ID NO: 2196038 - RNA, 19 nt, Artificial Sequence
  Description of Artificial Sequence: Synthetic oligonucleotide
ccucgucaauuuguaggua

SEQ ID NO: 2196039 - RNA, 19 nt, Artificial Sequence
  Description of Artificial Sequence: Synthetic oligonucleotide
ccaaagguagaugguucuu

SEQ ID NO: 2196040 - RNA, 19 nt, Artificial Sequence
  Description of Artificial Sequence: Synthetic oligonucleotide
cgccgcucauccucccguc

SEQ ID NO: 2196041 - RNA, 19 nt, Artificial Sequence
  Description of Artificial Sequence: Synthetic oligonucleotide
cggauccagaggugcguaa

SEQ ID NO: 2196042 - RNA, 19 nt, Artificial Sequence
  Description of Artificial Sequence: Synthetic oligonucleotide
ccggauccagaggugcgua

SEQ ID NO: 2196043 - RNA, 19 nt, Artificial Sequence
  Description of Artificial Sequence: Synthetic oligonucleotide
ccugaggcgcgcgggccga

SEQ ID NO: 2196044 - RNA, 19 nt, Artificial Sequence
  Description of Artificial Sequence: Synthetic oligonucleotide
ccgccgcucauccucccgu

SEQ ID NO: 2196045 - RNA, 19 nt, Artificial Sequence
  Description of Artificial Sequence: Synthetic oligonucleotide
ccgcagcaccuugcuccac

SEQ ID NO: 2196046 - RNA, 19 nt, Artificial Sequence
  Description of Artificial Sequence: Synthetic oligonucleotide
ccgccgcccgccgcucauc

SEQ ID NO: 2196047 - RNA, 19 nt, Artificial Sequence
  Description of Artificial Sequence: Synthetic oligonucleotide
cgcgcgggccgagccaaaa

SEQ ID NO: 2196048 - RNA, 19 nt, Artificial Sequence
  Description of Artificial Sequence: Synthetic oligonucleotide
gcgcgcgggccgagccaaa

SEQ ID NO: 2196049 - RNA, 19 nt, Artificial Sequence
  Description of Artificial Sequence: Synthetic oligonucleotide
aacaccuugcucaagagag

SEQ ID NO: 2196050 - RNA, 19 nt, Artificial Sequence
  Description of Artificial Sequence: Synthetic oligonucleotide
ucuagcuccuuccaccagg

SEQ ID NO: 2196051 - RNA, 19 nt, Artificial Sequence
  Description of Artificial Sequence: Synthetic oligonucleotide
uguucuagcuccuuccacc

SEQ ID NO: 2196052 - RNA, 19 nt, Artificial Sequence
  Description of Artificial Sequence: Synthetic oligonucleotide
acaacagcccaacaccuug

SEQ ID NO: 2196053 - RNA, 19 nt, Artificial Sequence
  Description of Artificial Sequence: Synthetic oligonucleotide
ugggcucagcccaagcugc

SEQ ID NO: 2196054 - RNA, 19 nt, Artificial Sequence
  Description of Artificial Sequence: Synthetic oligonucleotide
cuagcuccuuccaccaggg

SEQ ID NO: 2196055 - RNA, 19 nt, Artificial Sequence
  Description of Artificial Sequence: Synthetic oligonucleotide
agugggaacaucaaacaau

SEQ ID NO: 2196056 - RNA, 19 nt, Artificial Sequence
  Description of Artificial Sequence: Synthetic oligonucleotide
guugguugggugaggagag

SEQ ID NO: 2196057 - RNA, 19 nt, Artificial Sequence
  Description of Artificial Sequence: Synthetic oligonucleotide
uuguucuagcuccuuccac

SEQ ID NO: 2196058 - RNA, 19 nt, Artificial Sequence
  Description of Artificial Sequence: Synthetic oligonucleotide
cccacaacagcccaacacc

SEQ ID NO: 2196059 - RNA, 19 nt, Artificial Sequence
  Description of Artificial Sequence: Synthetic oligonucleotide
gugggcucagcccaagcug

SEQ ID NO: 2196060 - RNA, 19 nt, Artificial Sequence
  Description of Artificial Sequence: Synthetic oligonucleotide
caacagcccaacaccuugc

SEQ ID NO: 2196061 - RNA, 19 nt, Artificial Sequence
  Description of Artificial Sequence: Synthetic oligonucleotide
guucuagcuccuuccacca

SEQ ID NO: 2196062 - RNA, 19 nt, Artificial Sequence
  Description of Artificial Sequence: Synthetic oligonucleotide
augcagugggaacaucaaa

SEQ ID NO: 2196063 - RNA, 19 nt, Artificial Sequence
  Description of Artificial Sequence: Synthetic oligonucleotide
uugguugggugaggagagg

SEQ ID NO: 2196064 - RNA, 19 nt, Artificial Sequence
  Description of Artificial Sequence: Synthetic oligonucleotide
gguugguugggugaggaga

SEQ ID NO: 2196065 - RNA, 19 nt, Artificial Sequence
  Description of Artificial Sequence: Synthetic oligonucleotide
caacaccuugcucaagaga

SEQ ID NO: 2196066 - RNA, 19 nt, Artificial Sequence
  Description of Artificial Sequence: Synthetic oligonucleotide
gguccuggugggcucagcc

SEQ ID NO: 2196067 - RNA, 19 nt, Artificial Sequence
  Description of Artificial Sequence: Synthetic oligonucleotide
guccuggugggcucagccc

SEQ ID NO: 2196068 - RNA, 19 nt, Artificial Sequence
  Description of Artificial Sequence: Synthetic oligonucleotide
caugcagugggaacaucaa

SEQ ID NO: 2196069 - RNA, 19 nt, Artificial Sequence
  Description of Artificial Sequence: Synthetic oligonucleotide
cagugggaacaucaaacaa

SEQ ID NO: 2196070 - RNA, 19 nt, Artificial Sequence
  Description of Artificial Sequence: Synthetic oligonucleotide
uggugggcucagcccaagc

SEQ ID NO: 2196071 - RNA, 19 nt, Artificial Sequence
  Description of Artificial Sequence: Synthetic oligonucleotide
ccaacaccuugcucaagag

SEQ ID NO: 2196072 - RNA, 19 nt, Artificial Sequence
  Description of Artificial Sequence: Synthetic oligonucleotide
cccaacaccuugcucaaga

SEQ ID NO: 2196073 - RNA, 19 nt, Artificial Sequence
  Description of Artificial Sequence: Synthetic oligonucleotide
ggguugguugggugaggag

SEQ ID NO: 2196074 - RNA, 19 nt, Artificial Sequence
  Description of Artificial Sequence: Synthetic oligonucleotide
ggugggcucagcccaagcu

SEQ ID NO: 2196075 - RNA, 19 nt, Artificial Sequence
  Description of Artificial Sequence: Synthetic oligonucleotide
cuggugggcucagcccaag

SEQ ID NO: 2196076 - RNA, 19 nt, Artificial Sequence
  Description of Artificial Sequence: Synthetic oligonucleotide
gggguugguugggugagga

SEQ ID NO: 2196077 - RNA, 19 nt, Artificial Sequence
  Description of Artificial Sequence: Synthetic oligonucleotide
cuccuuccaccaggggcac

SEQ ID NO: 2196078 - RNA, 19 nt, Artificial Sequence
  Description of Artificial Sequence: Synthetic oligonucleotide
ccacaacagcccaacaccu

SEQ ID NO: 2196079 - RNA, 19 nt, Artificial Sequence
  Description of Artificial Sequence: Synthetic oligonucleotide
gcccaacaccuugcucaag

SEQ ID NO: 2196080 - RNA, 19 nt, Artificial Sequence
  Description of Artificial Sequence: Synthetic oligonucleotide
ccuggugggcucagcccaa

SEQ ID NO: 2196081 - RNA, 19 nt, Artificial Sequence
  Description of Artificial Sequence: Synthetic oligonucleotide
auucauaagaauuuucucc

SEQ ID NO: 2196082 - RNA, 19 nt, Artificial Sequence
  Description of Artificial Sequence: Synthetic oligonucleotide
uuuucaacugaauaaaugc

SEQ ID NO: 2196083 - RNA, 19 nt, Artificial Sequence
  Description of Artificial Sequence: Synthetic oligonucleotide
aacuauuauagucaucggg

SEQ ID NO: 2196084 - RNA, 19 nt, Artificial Sequence
  Description of Artificial Sequence: Synthetic oligonucleotide
ucacagauugcucacaugg

SEQ ID NO: 2196085 - RNA, 19 nt, Artificial Sequence
  Description of Artificial Sequence: Synthetic oligonucleotide
acaacuauuauagucaucg

SEQ ID NO: 2196086 - RNA, 19 nt, Artificial Sequence
  Description of Artificial Sequence: Synthetic oligonucleotide
guauguaagacacagagac

SEQ ID NO: 2196087 - RNA, 19 nt, Artificial Sequence
  Description of Artificial Sequence: Synthetic oligonucleotide
ugguauguaagacacagag

SEQ ID NO: 2196088 - RNA, 19 nt, Artificial Sequence
  Description of Artificial Sequence: Synthetic oligonucleotide
aacguuugaaugcuuuccc

SEQ ID NO: 2196089 - RNA, 19 nt, Artificial Sequence
  Description of Artificial Sequence: Synthetic oligonucleotide
uucaugauucauaaaauga

SEQ ID NO: 2196090 - RNA, 19 nt, Artificial Sequence
  Description of Artificial Sequence: Synthetic oligonucleotide
uucacaacuauuauaguca

SEQ ID NO: 2196091 - RNA, 19 nt, Artificial Sequence
  Description of Artificial Sequence: Synthetic oligonucleotide
gaaauuaccacaauaggug

SEQ ID NO: 2196092 - RNA, 19 nt, Artificial Sequence
  Description of Artificial Sequence: Synthetic oligonucleotide
aaggguuacaugcaaaaug

SEQ ID NO: 2196093 - RNA, 19 nt, Artificial Sequence
  Description of Artificial Sequence: Synthetic oligonucleotide
guaauaggaacucugacug

SEQ ID NO: 2196094 - RNA, 19 nt, Artificial Sequence
  Description of Artificial Sequence: Synthetic oligonucleotide
uuuacauauguaaaguuuc

SEQ ID NO: 2196095 - RNA, 19 nt, Artificial Sequence
  Description of Artificial Sequence: Synthetic oligonucleotide
aauauuuucuucuacuguu

SEQ ID NO: 2196096 - RNA, 19 nt, Artificial Sequence
  Description of Artificial Sequence: Synthetic oligonucleotide
uauguaucuuucaugacug

SEQ ID NO: 2196097 - RNA, 19 nt, Artificial Sequence
  Description of Artificial Sequence: Synthetic oligonucleotide
aguguuuacauauguaaag

SEQ ID NO: 2196098 - RNA, 19 nt, Artificial Sequence
  Description of Artificial Sequence: Synthetic oligonucleotide
aaacguuugaaugcuuucc

SEQ ID NO: 2196099 - RNA, 19 nt, Artificial Sequence
  Description of Artificial Sequence: Synthetic oligonucleotide
auuaugagaccuuguaugg

SEQ ID NO: 2196100 - RNA, 19 nt, Artificial Sequence
  Description of Artificial Sequence: Synthetic oligonucleotide
uauagcaugaauucuuuca

SEQ ID NO: 2196101 - RNA, 19 nt, Artificial Sequence
  Description of Artificial Sequence: Synthetic oligonucleotide
augaauaaggcuucucuac

SEQ ID NO: 2196102 - RNA, 19 nt, Artificial Sequence
  Description of Artificial Sequence: Synthetic oligonucleotide
ucaugauucauaaaaugac

SEQ ID NO: 2196103 - RNA, 19 nt, Artificial Sequence
  Description of Artificial Sequence: Synthetic oligonucleotide
ugugaauccuuucacaacu

SEQ ID NO: 2196104 - RNA, 19 nt, Artificial Sequence
  Description of Artificial Sequence: Synthetic oligonucleotide
uguugcaauguuuacaugu

SEQ ID NO: 2196105 - RNA, 19 nt, Artificial Sequence
  Description of Artificial Sequence: Synthetic oligonucleotide
cauuaugagaccuuguaug

SEQ ID NO: 2196106 - RNA, 19 nt, Artificial Sequence
  Description of Artificial Sequence: Synthetic oligonucleotide
augauucauaaaaugaccc

SEQ ID NO: 2196107 - RNA, 19 nt, Artificial Sequence
  Description of Artificial Sequence: Synthetic oligonucleotide
uuucaugauucauaaaaug

SEQ ID NO: 2196108 - RNA, 19 nt, Artificial Sequence
  Description of Artificial Sequence: Synthetic oligonucleotide
uguaauaggaacucugacu

SEQ ID NO: 2196109 - RNA, 19 nt, Artificial Sequence
  Description of Artificial Sequence: Synthetic oligonucleotide
uucaucacaaucucuguag

SEQ ID NO: 2196110 - RNA, 19 nt, Artificial Sequence
  Description of Artificial Sequence: Synthetic oligonucleotide
gaugguauguaagacacag

SEQ ID NO: 2196111 - RNA, 19 nt, Artificial Sequence
  Description of Artificial Sequence: Synthetic oligonucleotide
auacaaagggauucucucc

SEQ ID NO: 2196112 - RNA, 19 nt, Artificial Sequence
  Description of Artificial Sequence: Synthetic oligonucleotide
gagaccuuuucacagauug

SEQ ID NO: 2196113 - RNA, 19 nt, Artificial Sequence
  Description of Artificial Sequence: Synthetic oligonucleotide
caugauucauaaaaugacc

SEQ ID NO: 2196114 - RNA, 19 nt, Artificial Sequence
  Description of Artificial Sequence: Synthetic oligonucleotide
gaggaaauuaccacaauag

SEQ ID NO: 2196115 - RNA, 19 nt, Artificial Sequence
  Description of Artificial Sequence: Synthetic oligonucleotide
uuccacaaggguuacaugc

SEQ ID NO: 2196116 - RNA, 19 nt, Artificial Sequence
  Description of Artificial Sequence: Synthetic oligonucleotide
aauucuuucccacaguguu

SEQ ID NO: 2196117 - RNA, 19 nt, Artificial Sequence
  Description of Artificial Sequence: Synthetic oligonucleotide
uuggaaauagugaagacuu

SEQ ID NO: 2196118 - RNA, 19 nt, Artificial Sequence
  Description of Artificial Sequence: Synthetic oligonucleotide
ugaauucuuucccacagug

SEQ ID NO: 2196119 - RNA, 19 nt, Artificial Sequence
  Description of Artificial Sequence: Synthetic oligonucleotide
aaauuaccacaauagguga

SEQ ID NO: 2196120 - RNA, 19 nt, Artificial Sequence
  Description of Artificial Sequence: Synthetic oligonucleotide
aggaaauuaccacaauagg

SEQ ID NO: 2196121 - RNA, 19 nt, Artificial Sequence
  Description of Artificial Sequence: Synthetic oligonucleotide
uuaugaguguaauaggaac

SEQ ID NO: 2196122 - RNA, 19 nt, Artificial Sequence
  Description of Artificial Sequence: Synthetic oligonucleotide
uacuguuucuucuauggag

SEQ ID NO: 2196123 - RNA, 19 nt, Artificial Sequence
  Description of Artificial Sequence: Synthetic oligonucleotide
aucacaaucucuguagagc

SEQ ID NO: 2196124 - RNA, 19 nt, Artificial Sequence
  Description of Artificial Sequence: Synthetic oligonucleotide
aggguuacaugcaaaaugc

SEQ ID NO: 2196125 - RNA, 19 nt, Artificial Sequence
  Description of Artificial Sequence: Synthetic oligonucleotide
uaugaguguaauaggaacu

SEQ ID NO: 2196126 - RNA, 19 nt, Artificial Sequence
  Description of Artificial Sequence: Synthetic oligonucleotide
uuuguugcaauguuuacau

SEQ ID NO: 2196127 - RNA, 19 nt, Artificial Sequence
  Description of Artificial Sequence: Synthetic oligonucleotide
uuucaacugaauaaaugcu

SEQ ID NO: 2196128 - RNA, 19 nt, Artificial Sequence
  Description of Artificial Sequence: Synthetic oligonucleotide
acagauugcucacauggac

SEQ ID NO: 2196129 - RNA, 19 nt, Artificial Sequence
  Description of Artificial Sequence: Synthetic oligonucleotide
uuguauggguuugugaugg

SEQ ID NO: 2196130 - RNA, 19 nt, Artificial Sequence
  Description of Artificial Sequence: Synthetic oligonucleotide
uuucaugacuguuacgggc

SEQ ID NO: 2196131 - RNA, 19 nt, Artificial Sequence
  Description of Artificial Sequence: Synthetic oligonucleotide
ucuuucgugacaaaggguu

SEQ ID NO: 2196132 - RNA, 19 nt, Artificial Sequence
  Description of Artificial Sequence: Synthetic oligonucleotide
ugcaaaaugcuucucugca

SEQ ID NO: 2196133 - RNA, 19 nt, Artificial Sequence
  Description of Artificial Sequence: Synthetic oligonucleotide
ugacccaaacguuugaaug

SEQ ID NO: 2196134 - RNA, 19 nt, Artificial Sequence
  Description of Artificial Sequence: Synthetic oligonucleotide
uucuauggagaucagguuc

SEQ ID NO: 2196135 - RNA, 19 nt, Artificial Sequence
  Description of Artificial Sequence: Synthetic oligonucleotide
ugugaugguauguaagaca

SEQ ID NO: 2196136 - RNA, 19 nt, Artificial Sequence
  Description of Artificial Sequence: Synthetic oligonucleotide
gacucuauagcaugaauuc

SEQ ID NO: 2196137 - RNA, 19 nt, Artificial Sequence
  Description of Artificial Sequence: Synthetic oligonucleotide
ucuauggagaucagguuca

SEQ ID NO: 2196138 - RNA, 19 nt, Artificial Sequence
  Description of Artificial Sequence: Synthetic oligonucleotide
gaacucugacuguugaagg

SEQ ID NO: 2196139 - RNA, 19 nt, Artificial Sequence
  Description of Artificial Sequence: Synthetic oligonucleotide
uuuaugaguguaauaggaa

SEQ ID NO: 2196140 - RNA, 19 nt, Artificial Sequence
  Description of Artificial Sequence: Synthetic oligonucleotide
uuucaugacuguuacgugu

SEQ ID NO: 2196141 - RNA, 19 nt, Artificial Sequence
  Description of Artificial Sequence: Synthetic oligonucleotide
uuuacauguauaaggcuuc

SEQ ID NO: 2196142 - RNA, 19 nt, Artificial Sequence
  Description of Artificial Sequence: Synthetic oligonucleotide
ugauucauaaaaugaccca

SEQ ID NO: 2196143 - RNA, 19 nt, Artificial Sequence
  Description of Artificial Sequence: Synthetic oligonucleotide
ucaugcuugaggaaauuac

SEQ ID NO: 2196144 - RNA, 19 nt, Artificial Sequence
  Description of Artificial Sequence: Synthetic oligonucleotide
aaguuucucuuucauagaa

SEQ ID NO: 2196145 - RNA, 19 nt, Artificial Sequence
  Description of Artificial Sequence: Synthetic oligonucleotide
caugcuugaggaaauuacc

SEQ ID NO: 2196146 - RNA, 19 nt, Artificial Sequence
  Description of Artificial Sequence: Synthetic oligonucleotide
acuauuauagucaucggga

SEQ ID NO: 2196147 - RNA, 19 nt, Artificial Sequence
  Description of Artificial Sequence: Synthetic oligonucleotide
auguaagacacagagaccu

SEQ ID NO: 2196148 - RNA, 19 nt, Artificial Sequence
  Description of Artificial Sequence: Synthetic oligonucleotide
uaucuuucaugacuguuac

SEQ ID NO: 2196149 - RNA, 19 nt, Artificial Sequence
  Description of Artificial Sequence: Synthetic oligonucleotide
gaauucuuucgugacaaag

SEQ ID NO: 2196150 - RNA, 19 nt, Artificial Sequence
  Description of Artificial Sequence: Synthetic oligonucleotide
aauccuuucacaacuauua

SEQ ID NO: 2196151 - RNA, 19 nt, Artificial Sequence
  Description of Artificial Sequence: Synthetic oligonucleotide
auugcucacauggacaagg

SEQ ID NO: 2196152 - RNA, 19 nt, Artificial Sequence
  Description of Artificial Sequence: Synthetic oligonucleotide
ugaggaaauuaccacaaua

SEQ ID NO: 2196153 - RNA, 19 nt, Artificial Sequence
  Description of Artificial Sequence: Synthetic oligonucleotide
uuacauauguaaaguuucu

SEQ ID NO: 2196154 - RNA, 19 nt, Artificial Sequence
  Description of Artificial Sequence: Synthetic oligonucleotide
gacccaaacguuugaaugc

SEQ ID NO: 2196155 - RNA, 19 nt, Artificial Sequence
  Description of Artificial Sequence: Synthetic oligonucleotide
uuuuguugcaauguuuaca

SEQ ID NO: 2196156 - RNA, 19 nt, Artificial Sequence
  Description of Artificial Sequence: Synthetic oligonucleotide
uucauuaugagaccuugua

SEQ ID NO: 2196157 - RNA, 19 nt, Artificial Sequence
  Description of Artificial Sequence: Synthetic oligonucleotide
guuucuucuauggagauca

SEQ ID NO: 2196158 - RNA, 19 nt, Artificial Sequence
  Description of Artificial Sequence: Synthetic oligonucleotide
uucaugacuguuacgggca

SEQ ID NO: 2196159 - RNA, 19 nt, Artificial Sequence
  Description of Artificial Sequence: Synthetic oligonucleotide
auggagaucagguucaaaa

SEQ ID NO: 2196160 - RNA, 19 nt, Artificial Sequence
  Description of Artificial Sequence: Synthetic oligonucleotide
uauuauagucaucgggacu

SEQ ID NO: 2196161 - RNA, 19 nt, Artificial Sequence
  Description of Artificial Sequence: Synthetic oligonucleotide
uaugagaccuuguaugggu

SEQ ID NO: 2196162 - RNA, 19 nt, Artificial Sequence
  Description of Artificial Sequence: Synthetic oligonucleotide
uucaacugaauaaaugcuu

SEQ ID NO: 2196163 - RNA, 19 nt, Artificial Sequence
  Description of Artificial Sequence: Synthetic oligonucleotide
uauguaagacacagagacc

SEQ ID NO: 2196164 - RNA, 19 nt, Artificial Sequence
  Description of Artificial Sequence: Synthetic oligonucleotide
aagacacagagaccuuuuc

SEQ ID NO: 2196165 - RNA, 19 nt, Artificial Sequence
  Description of Artificial Sequence: Synthetic oligonucleotide
augaacaugaucagcauug

SEQ ID NO: 2196166 - RNA, 19 nt, Artificial Sequence
  Description of Artificial Sequence: Synthetic oligonucleotide
auguuugcaugcauaaggc

SEQ ID NO: 2196167 - RNA, 19 nt, Artificial Sequence
  Description of Artificial Sequence: Synthetic oligonucleotide
uguaaaguuucucuuucau

SEQ ID NO: 2196168 - RNA, 19 nt, Artificial Sequence
  Description of Artificial Sequence: Synthetic oligonucleotide
aguauguaucuuucaugac

SEQ ID NO: 2196169 - RNA, 19 nt, Artificial Sequence
  Description of Artificial Sequence: Synthetic oligonucleotide
aaaaugacccaaacguuug

SEQ ID NO: 2196170 - RNA, 19 nt, Artificial Sequence
  Description of Artificial Sequence: Synthetic oligonucleotide
auuggaaauagugaagacu

SEQ ID NO: 2196171 - RNA, 19 nt, Artificial Sequence
  Description of Artificial Sequence: Synthetic oligonucleotide
augacuguuacguguacug

SEQ ID NO: 2196172 - RNA, 19 nt, Artificial Sequence
  Description of Artificial Sequence: Synthetic oligonucleotide
guuacaugcaaaaugcuuc

SEQ ID NO: 2196173 - RNA, 19 nt, Artificial Sequence
  Description of Artificial Sequence: Synthetic oligonucleotide
uguuacguguacuggaagu

SEQ ID NO: 2196174 - RNA, 19 nt, Artificial Sequence
  Description of Artificial Sequence: Synthetic oligonucleotide
guuacgggcacuugaagug

SEQ ID NO: 2196175 - RNA, 19 nt, Artificial Sequence
  Description of Artificial Sequence: Synthetic oligonucleotide
uuucaugacuguuacgguc

SEQ ID NO: 2196176 - RNA, 19 nt, Artificial Sequence
  Description of Artificial Sequence: Synthetic oligonucleotide
ugaucagcauuggaaauag

SEQ ID NO: 2196177 - RNA, 19 nt, Artificial Sequence
  Description of Artificial Sequence: Synthetic oligonucleotide
uugagcaaguucuucauua

SEQ ID NO: 2196178 - RNA, 19 nt, Artificial Sequence
  Description of Artificial Sequence: Synthetic oligonucleotide
ucuguagagcuucuuuuga

SEQ ID NO: 2196179 - RNA, 19 nt, Artificial Sequence
  Description of Artificial Sequence: Synthetic oligonucleotide
aacucugacuguugaaggu

SEQ ID NO: 2196180 - RNA, 19 nt, Artificial Sequence
  Description of Artificial Sequence: Synthetic oligonucleotide
cacagagaccuuuucacag

SEQ ID NO: 2196181 - RNA, 19 nt, Artificial Sequence
  Description of Artificial Sequence: Synthetic oligonucleotide
cuauuauagucaucgggac

SEQ ID NO: 2196182 - RNA, 19 nt, Artificial Sequence
  Description of Artificial Sequence: Synthetic oligonucleotide
cauucauaagaauuuucuc

SEQ ID NO: 2196183 - RNA, 19 nt, Artificial Sequence
  Description of Artificial Sequence: Synthetic oligonucleotide
aucagcauuggaaauagug

SEQ ID NO: 2196184 - RNA, 19 nt, Artificial Sequence
  Description of Artificial Sequence: Synthetic oligonucleotide
caguauguaucuuucauga

SEQ ID NO: 2196185 - RNA, 19 nt, Artificial Sequence
  Description of Artificial Sequence: Synthetic oligonucleotide
uauggguuugugaugguau

SEQ ID NO: 2196186 - RNA, 19 nt, Artificial Sequence
  Description of Artificial Sequence: Synthetic oligonucleotide
acaugaucagcauuggaaa

SEQ ID NO: 2196187 - RNA, 19 nt, Artificial Sequence
  Description of Artificial Sequence: Synthetic oligonucleotide
ucuucauuaugagaccuug

SEQ ID NO: 2196188 - RNA, 19 nt, Artificial Sequence
  Description of Artificial Sequence: Synthetic oligonucleotide
uguuuacauauguaaaguu

SEQ ID NO: 2196189 - RNA, 19 nt, Artificial Sequence
  Description of Artificial Sequence: Synthetic oligonucleotide
auagcaugaauucuuucau

SEQ ID NO: 2196190 - RNA, 19 nt, Artificial Sequence
  Description of Artificial Sequence: Synthetic oligonucleotide
cucacauggacaaggacuc

SEQ ID NO: 2196191 - RNA, 19 nt, Artificial Sequence
  Description of Artificial Sequence: Synthetic oligonucleotide
acaugcaaaaugcuucucu

SEQ ID NO: 2196192 - RNA, 19 nt, Artificial Sequence
  Description of Artificial Sequence: Synthetic oligonucleotide
ugcaauguuuacauguaua

SEQ ID NO: 2196193 - RNA, 19 nt, Artificial Sequence
  Description of Artificial Sequence: Synthetic oligonucleotide
uuaugagaccuuguauggg

SEQ ID NO: 2196194 - RNA, 19 nt, Artificial Sequence
  Description of Artificial Sequence: Synthetic oligonucleotide
uuacguguacuggaagugg

SEQ ID NO: 2196195 - RNA, 19 nt, Artificial Sequence
  Description of Artificial Sequence: Synthetic oligonucleotide
acaauguuugcaugcauaa

SEQ ID NO: 2196196 - RNA, 19 nt, Artificial Sequence
  Description of Artificial Sequence: Synthetic oligonucleotide
uuuucaugacuguuacgug

SEQ ID NO: 2196197 - RNA, 19 nt, Artificial Sequence
  Description of Artificial Sequence: Synthetic oligonucleotide
uagucaucgggacuaguga

SEQ ID NO: 2196198 - RNA, 19 nt, Artificial Sequence
  Description of Artificial Sequence: Synthetic oligonucleotide
ugcauaaggcuucucucca

SEQ ID NO: 2196199 - RNA, 19 nt, Artificial Sequence
  Description of Artificial Sequence: Synthetic oligonucleotide
auuauagucaucgggacua

SEQ ID NO: 2196200 - RNA, 19 nt, Artificial Sequence
  Description of Artificial Sequence: Synthetic oligonucleotide
ugcuugaggaaauuaccac

SEQ ID NO: 2196201 - RNA, 19 nt, Artificial Sequence
  Description of Artificial Sequence: Synthetic oligonucleotide
accacaauaggugaauucu

SEQ ID NO: 2196202 - RNA, 19 nt, Artificial Sequence
  Description of Artificial Sequence: Synthetic oligonucleotide
augacuguuacggucacug

SEQ ID NO: 2196203 - RNA, 19 nt, Artificial Sequence
  Description of Artificial Sequence: Synthetic oligonucleotide
ucaucacaaucucuguaga

SEQ ID NO: 2196204 - RNA, 19 nt, Artificial Sequence
  Description of Artificial Sequence: Synthetic oligonucleotide
gacuagugaaagcuuuccc

SEQ ID NO: 2196205 - RNA, 19 nt, Artificial Sequence
  Description of Artificial Sequence: Synthetic oligonucleotide
aaugucuccuucaucacaa

SEQ ID NO: 2196206 - RNA, 19 nt, Artificial Sequence
  Description of Artificial Sequence: Synthetic oligonucleotide
gugaugguauguaagacac

SEQ ID NO: 2196207 - RNA, 19 nt, Artificial Sequence
  Description of Artificial Sequence: Synthetic oligonucleotide
aauaggaacucugacuguu

SEQ ID NO: 2196208 - RNA, 19 nt, Artificial Sequence
  Description of Artificial Sequence: Synthetic oligonucleotide
uacuggaaguggcaaaagu

SEQ ID NO: 2196209 - RNA, 19 nt, Artificial Sequence
  Description of Artificial Sequence: Synthetic oligonucleotide
uucuucuacuguuucuucu

SEQ ID NO: 2196210 - RNA, 19 nt, Artificial Sequence
  Description of Artificial Sequence: Synthetic oligonucleotide
aaaugacccaaacguuuga

SEQ ID NO: 2196211 - RNA, 19 nt, Artificial Sequence
  Description of Artificial Sequence: Synthetic oligonucleotide
ucccacaguguuuacauau

SEQ ID NO: 2196212 - RNA, 19 nt, Artificial Sequence
  Description of Artificial Sequence: Synthetic oligonucleotide
ucuauagcaugaauucuuu

SEQ ID NO: 2196213 - RNA, 19 nt, Artificial Sequence
  Description of Artificial Sequence: Synthetic oligonucleotide
guuacggucacuggaacug

SEQ ID NO: 2196214 - RNA, 19 nt, Artificial Sequence
  Description of Artificial Sequence: Synthetic oligonucleotide
acaaggguuacaugcaaaa

SEQ ID NO: 2196215 - RNA, 19 nt, Artificial Sequence
  Description of Artificial Sequence: Synthetic oligonucleotide
gaguguaauaggaacucug

SEQ ID NO: 2196216 - RNA, 19 nt, Artificial Sequence
  Description of Artificial Sequence: Synthetic oligonucleotide
uuucacagauugcucacau

SEQ ID NO: 2196217 - RNA, 19 nt, Artificial Sequence
  Description of Artificial Sequence: Synthetic oligonucleotide
ucaucgggacuagugaaag

SEQ ID NO: 2196218 - RNA, 19 nt, Artificial Sequence
  Description of Artificial Sequence: Synthetic oligonucleotide
caucacaaucucuguagag

SEQ ID NO: 2196219 - RNA, 19 nt, Artificial Sequence
  Description of Artificial Sequence: Synthetic oligonucleotide
ugacuguuacguguacugg

SEQ ID NO: 2196220 - RNA, 19 nt, Artificial Sequence
  Description of Artificial Sequence: Synthetic oligonucleotide
gugacaaaggguuucucuc

SEQ ID NO: 2196221 - RNA, 19 nt, Artificial Sequence
  Description of Artificial Sequence: Synthetic oligonucleotide
cuuguauggguuugugaug

SEQ ID NO: 2196222 - RNA, 19 nt, Artificial Sequence
  Description of Artificial Sequence: Synthetic oligonucleotide
aucgggacuagugaaagcu

SEQ ID NO: 2196223 - RNA, 19 nt, Artificial Sequence
  Description of Artificial Sequence: Synthetic oligonucleotide
ugaauucuuuggugcauga

SEQ ID NO: 2196224 - RNA, 19 nt, Artificial Sequence
  Description of Artificial Sequence: Synthetic oligonucleotide
gacuguuacggucacugga

SEQ ID NO: 2196225 - RNA, 19 nt, Artificial Sequence
  Description of Artificial Sequence: Synthetic oligonucleotide
uuacgggcacuugaagugg

SEQ ID NO: 2196226 - RNA, 19 nt, Artificial Sequence
  Description of Artificial Sequence: Synthetic oligonucleotide
uguacuggaaguggcaaaa

SEQ ID NO: 2196227 - RNA, 19 nt, Artificial Sequence
  Description of Artificial Sequence: Synthetic oligonucleotide
gacuguuacguguacugga

SEQ ID NO: 2196228 - RNA, 19 nt, Artificial Sequence
  Description of Artificial Sequence: Synthetic oligonucleotide
cauuggaaauagugaagac

SEQ ID NO: 2196229 - RNA, 19 nt, Artificial Sequence
  Description of Artificial Sequence: Synthetic oligonucleotide
cuugaggaaauuaccacaa

SEQ ID NO: 2196230 - RNA, 19 nt, Artificial Sequence
  Description of Artificial Sequence: Synthetic oligonucleotide
uucuuucgugacaaagggu

SEQ ID NO: 2196231 - RNA, 19 nt, Artificial Sequence
  Description of Artificial Sequence: Synthetic oligonucleotide
ucacaacuauuauagucau

SEQ ID NO: 2196232 - RNA, 19 nt, Artificial Sequence
  Description of Artificial Sequence: Synthetic oligonucleotide
uguuucuaguugagcaagu

SEQ ID NO: 2196233 - RNA, 19 nt, Artificial Sequence
  Description of Artificial Sequence: Synthetic oligonucleotide
auguuuacauucauaagaa

SEQ ID NO: 2196234 - RNA, 19 nt, Artificial Sequence
  Description of Artificial Sequence: Synthetic oligonucleotide
uguuacggucacuggaacu

SEQ ID NO: 2196235 - RNA, 19 nt, Artificial Sequence
  Description of Artificial Sequence: Synthetic oligonucleotide
uaggugaauucuuucccac

SEQ ID NO: 2196236 - RNA, 19 nt, Artificial Sequence
  Description of Artificial Sequence: Synthetic oligonucleotide
ucucuguagagcuucuuuu

SEQ ID NO: 2196237 - RNA, 19 nt, Artificial Sequence
  Description of Artificial Sequence: Synthetic oligonucleotide
uucuacuguuucuucuaug

SEQ ID NO: 2196238 - RNA, 19 nt, Artificial Sequence
  Description of Artificial Sequence: Synthetic oligonucleotide
acuguuucuucuauggaga

SEQ ID NO: 2196239 - RNA, 19 nt, Artificial Sequence
  Description of Artificial Sequence: Synthetic oligonucleotide
uguuuacauucauaagaau

SEQ ID NO: 2196240 - RNA, 19 nt, Artificial Sequence
  Description of Artificial Sequence: Synthetic oligonucleotide
ugcuuacaugaauaaggcu

SEQ ID NO: 2196241 - RNA, 19 nt, Artificial Sequence
  Description of Artificial Sequence: Synthetic oligonucleotide
auagucaucgggacuagug

SEQ ID NO: 2196242 - RNA, 19 nt, Artificial Sequence
  Description of Artificial Sequence: Synthetic oligonucleotide
uggaaguggcaaaaguuuu

SEQ ID NO: 2196243 - RNA, 19 nt, Artificial Sequence
  Description of Artificial Sequence: Synthetic oligonucleotide
guguaauaggaacucugac

SEQ ID NO: 2196244 - RNA, 19 nt, Artificial Sequence
  Description of Artificial Sequence: Synthetic oligonucleotide
ugacuguuacggucacugg

SEQ ID NO: 2196245 - RNA, 19 nt, Artificial Sequence
  Description of Artificial Sequence: Synthetic oligonucleotide
guuacguguacuggaagug

SEQ ID NO: 2196246 - RNA, 19 nt, Artificial Sequence
  Description of Artificial Sequence: Synthetic oligonucleotide
uaccacaauaggugaauuc

SEQ ID NO: 2196247 - RNA, 19 nt, Artificial Sequence
  Description of Artificial Sequence: Synthetic oligonucleotide
ggaacucugacuguugaag

SEQ ID NO: 2196248 - RNA, 19 nt, Artificial Sequence
  Description of Artificial Sequence: Synthetic oligonucleotide
caaacguuugaaugcuuuc

SEQ ID NO: 2196249 - RNA, 19 nt, Artificial Sequence
  Description of Artificial Sequence: Synthetic oligonucleotide
aguguaauaggaacucuga

SEQ ID NO: 2196250 - RNA, 19 nt, Artificial Sequence
  Description of Artificial Sequence: Synthetic oligonucleotide
cuguuucuaguugagcaag

SEQ ID NO: 2196251 - RNA, 19 nt, Artificial Sequence
  Description of Artificial Sequence: Synthetic oligonucleotide
uggugcaugaguagguuuu

SEQ ID NO: 2196252 - RNA, 19 nt, Artificial Sequence
  Description of Artificial Sequence: Synthetic oligonucleotide
acacagagaccuuuucaca

SEQ ID NO: 2196253 - RNA, 19 nt, Artificial Sequence
  Description of Artificial Sequence: Synthetic oligonucleotide
auguaaaguuucucuuuca

SEQ ID NO: 2196254 - RNA, 19 nt, Artificial Sequence
  Description of Artificial Sequence: Synthetic oligonucleotide
uugugaugguauguaagac

SEQ ID NO: 2196255 - RNA, 19 nt, Artificial Sequence
  Description of Artificial Sequence: Synthetic oligonucleotide
gaauucuuuggugcaugag

SEQ ID NO: 2196256 - RNA, 19 nt, Artificial Sequence
  Description of Artificial Sequence: Synthetic oligonucleotide
agaccuuuucacagauugc

SEQ ID NO: 2196257 - RNA, 19 nt, Artificial Sequence
  Description of Artificial Sequence: Synthetic oligonucleotide
aaugacccaaacguuugaa

SEQ ID NO: 2196258 - RNA, 19 nt, Artificial Sequence
  Description of Artificial Sequence: Synthetic oligonucleotide
aguugagcaaguucuucau

SEQ ID NO: 2196259 - RNA, 19 nt, Artificial Sequence
  Description of Artificial Sequence: Synthetic oligonucleotide
agcauuggaaauagugaag

SEQ ID NO: 2196260 - RNA, 19 nt, Artificial Sequence
  Description of Artificial Sequence: Synthetic oligonucleotide
auggguuugugaugguaug

SEQ ID NO: 2196261 - RNA, 19 nt, Artificial Sequence
  Description of Artificial Sequence: Synthetic oligonucleotide
gacuguuacgggcacuuga

SEQ ID NO: 2196262 - RNA, 19 nt, Artificial Sequence
  Description of Artificial Sequence: Synthetic oligonucleotide
aauuaccacaauaggugaa

SEQ ID NO: 2196263 - RNA, 19 nt, Artificial Sequence
  Description of Artificial Sequence: Synthetic oligonucleotide
uugcaauguuuacauguau

SEQ ID NO: 2196264 - RNA, 19 nt, Artificial Sequence
  Description of Artificial Sequence: Synthetic oligonucleotide
uaauaggaacucugacugu

SEQ ID NO: 2196265 - RNA, 19 nt, Artificial Sequence
  Description of Artificial Sequence: Synthetic oligonucleotide
acagagaccuuuucacaga

SEQ ID NO: 2196266 - RNA, 19 nt, Artificial Sequence
  Description of Artificial Sequence: Synthetic oligonucleotide
acuugaaguggugaaggcu

SEQ ID NO: 2196267 - RNA, 19 nt, Artificial Sequence
  Description of Artificial Sequence: Synthetic oligonucleotide
cagcauuggaaauagugaa

SEQ ID NO: 2196268 - RNA, 19 nt, Artificial Sequence
  Description of Artificial Sequence: Synthetic oligonucleotide
agucaucgggacuagugaa

SEQ ID NO: 2196269 - RNA, 19 nt, Artificial Sequence
  Description of Artificial Sequence: Synthetic oligonucleotide
ucaugaacaugaucagcau

SEQ ID NO: 2196270 - RNA, 19 nt, Artificial Sequence
  Description of Artificial Sequence: Synthetic oligonucleotide
uucacagauugcucacaug

SEQ ID NO: 2196271 - RNA, 19 nt, Artificial Sequence
  Description of Artificial Sequence: Synthetic oligonucleotide
ugaugguauguaagacaca

SEQ ID NO: 2196272 - RNA, 19 nt, Artificial Sequence
  Description of Artificial Sequence: Synthetic oligonucleotide
uuuccacaaggguuacaug

SEQ ID NO: 2196273 - RNA, 19 nt, Artificial Sequence
  Description of Artificial Sequence: Synthetic oligonucleotide
uuacggucacuggaacugg

SEQ ID NO: 2196274 - RNA, 19 nt, Artificial Sequence
  Description of Artificial Sequence: Synthetic oligonucleotide
auuaccacaauaggugaau

SEQ ID NO: 2196275 - RNA, 19 nt, Artificial Sequence
  Description of Artificial Sequence: Synthetic oligonucleotide
cacuugaaguggugaaggc

SEQ ID NO: 2196276 - RNA, 19 nt, Artificial Sequence
  Description of Artificial Sequence: Synthetic oligonucleotide
auaaaaugacccaaacguu

SEQ ID NO: 2196277 - RNA, 19 nt, Artificial Sequence
  Description of Artificial Sequence: Synthetic oligonucleotide
uguaucuuucaugacuguu

SEQ ID NO: 2196278 - RNA, 19 nt, Artificial Sequence
  Description of Artificial Sequence: Synthetic oligonucleotide
acguuugaaugcuuuccca

SEQ ID NO: 2196279 - RNA, 19 nt, Artificial Sequence
  Description of Artificial Sequence: Synthetic oligonucleotide
guaaaguuucucuuucaua

SEQ ID NO: 2196280 - RNA, 19 nt, Artificial Sequence
  Description of Artificial Sequence: Synthetic oligonucleotide
uuucgugacaaaggguuuc

SEQ ID NO: 2196281 - RNA, 19 nt, Artificial Sequence
  Description of Artificial Sequence: Synthetic oligonucleotide
cuccaauauuuucuucuac

SEQ ID NO: 2196282 - RNA, 19 nt, Artificial Sequence
  Description of Artificial Sequence: Synthetic oligonucleotide
ugaguguaauaggaacucu

SEQ ID NO: 2196283 - RNA, 19 nt, Artificial Sequence
  Description of Artificial Sequence: Synthetic oligonucleotide
aggucuuugcaguccucuc

SEQ ID NO: 2196284 - RNA, 19 nt, Artificial Sequence
  Description of Artificial Sequence: Synthetic oligonucleotide
uucucuacacagugaaguu

SEQ ID NO: 2196285 - RNA, 19 nt, Artificial Sequence
  Description of Artificial Sequence: Synthetic oligonucleotide
cagauugcucacauggaca

SEQ ID NO: 2196286 - RNA, 19 nt, Artificial Sequence
  Description of Artificial Sequence: Synthetic oligonucleotide
uugcaguccucuccaauau

SEQ ID NO: 2196287 - RNA, 19 nt, Artificial Sequence
  Description of Artificial Sequence: Synthetic oligonucleotide
gaacaugaucagcauugga

SEQ ID NO: 2196288 - RNA, 19 nt, Artificial Sequence
  Description of Artificial Sequence: Synthetic oligonucleotide
gugugaauccuuucacaac

SEQ ID NO: 2196289 - RNA, 19 nt, Artificial Sequence
  Description of Artificial Sequence: Synthetic oligonucleotide
uuucuucuauggagaucag

SEQ ID NO: 2196290 - RNA, 19 nt, Artificial Sequence
  Description of Artificial Sequence: Synthetic oligonucleotide
ggaaauuaccacaauaggu

SEQ ID NO: 2196291 - RNA, 19 nt, Artificial Sequence
  Description of Artificial Sequence: Synthetic oligonucleotide
uugcucacauggacaagga

SEQ ID NO: 2196292 - RNA, 19 nt, Artificial Sequence
  Description of Artificial Sequence: Synthetic oligonucleotide
ugcucacauggacaaggac

SEQ ID NO: 2196293 - RNA, 19 nt, Artificial Sequence
  Description of Artificial Sequence: Synthetic oligonucleotide
uuguugcaauguuuacaug

SEQ ID NO: 2196294 - RNA, 19 nt, Artificial Sequence
  Description of Artificial Sequence: Synthetic oligonucleotide
aggugaauucuuucccaca

SEQ ID NO: 2196295 - RNA, 19 nt, Artificial Sequence
  Description of Artificial Sequence: Synthetic oligonucleotide
gcuugaggaaauuaccaca

SEQ ID NO: 2196296 - RNA, 19 nt, Artificial Sequence
  Description of Artificial Sequence: Synthetic oligonucleotide
accuuguauggguuuguga

SEQ ID NO: 2196297 - RNA, 19 nt, Artificial Sequence
  Description of Artificial Sequence: Synthetic oligonucleotide
gcaaaaugcuucucugcag

SEQ ID NO: 2196298 - RNA, 19 nt, Artificial Sequence
  Description of Artificial Sequence: Synthetic oligonucleotide
augacccaaacguuugaau

SEQ ID NO: 2196299 - RNA, 19 nt, Artificial Sequence
  Description of Artificial Sequence: Synthetic oligonucleotide
gcacuugaaguggugaagg

SEQ ID NO: 2196300 - RNA, 19 nt, Artificial Sequence
  Description of Artificial Sequence: Synthetic oligonucleotide
uuacauguauaaggcuucu

SEQ ID NO: 2196301 - RNA, 19 nt, Artificial Sequence
  Description of Artificial Sequence: Synthetic oligonucleotide
gaccuuuucacagauugcu

SEQ ID NO: 2196302 - RNA, 19 nt, Artificial Sequence
  Description of Artificial Sequence: Synthetic oligonucleotide
cacaauguuuacaugcaua

SEQ ID NO: 2196303 - RNA, 19 nt, Artificial Sequence
  Description of Artificial Sequence: Synthetic oligonucleotide
caauguuugcaugcauaag

SEQ ID NO: 2196304 - RNA, 19 nt, Artificial Sequence
  Description of Artificial Sequence: Synthetic oligonucleotide
uuauagucaucgggacuag

SEQ ID NO: 2196305 - RNA, 19 nt, Artificial Sequence
  Description of Artificial Sequence: Synthetic oligonucleotide
uugaggaaauuaccacaau

SEQ ID NO: 2196306 - RNA, 19 nt, Artificial Sequence
  Description of Artificial Sequence: Synthetic oligonucleotide
ucaugacuguuacguguac

SEQ ID NO: 2196307 - RNA, 19 nt, Artificial Sequence
  Description of Artificial Sequence: Synthetic oligonucleotide
ucaugacuguuacgggcac

SEQ ID NO: 2196308 - RNA, 19 nt, Artificial Sequence
  Description of Artificial Sequence: Synthetic oligonucleotide
cuguuacguguacuggaag

SEQ ID NO: 2196309 - RNA, 19 nt, Artificial Sequence
  Description of Artificial Sequence: Synthetic oligonucleotide
uucaugcuugaggaaauua

SEQ ID NO: 2196310 - RNA, 19 nt, Artificial Sequence
  Description of Artificial Sequence: Synthetic oligonucleotide
cuuucaugauucauaaaau

SEQ ID NO: 2196311 - RNA, 19 nt, Artificial Sequence
  Description of Artificial Sequence: Synthetic oligonucleotide
guaucuuucaugacuguua

SEQ ID NO: 2196312 - RNA, 19 nt, Artificial Sequence
  Description of Artificial Sequence: Synthetic oligonucleotide
uccucuccaauauuuucuu

SEQ ID NO: 2196313 - RNA, 19 nt, Artificial Sequence
  Description of Artificial Sequence: Synthetic oligonucleotide
ucucuacacagugaaguuu

SEQ ID NO: 2196314 - RNA, 19 nt, Artificial Sequence
  Description of Artificial Sequence: Synthetic oligonucleotide
ucaugacuguuacggucac

SEQ ID NO: 2196315 - RNA, 19 nt, Artificial Sequence
  Description of Artificial Sequence: Synthetic oligonucleotide
cuucucuacacagugaagu

SEQ ID NO: 2196316 - RNA, 19 nt, Artificial Sequence
  Description of Artificial Sequence: Synthetic oligonucleotide
uggguuugugaugguaugu

SEQ ID NO: 2196317 - RNA, 19 nt, Artificial Sequence
  Description of Artificial Sequence: Synthetic oligonucleotide
uguaagacacagagaccuu

SEQ ID NO: 2196318 - RNA, 19 nt, Artificial Sequence
  Description of Artificial Sequence: Synthetic oligonucleotide
gcauuggaaauagugaaga

SEQ ID NO: 2196319 - RNA, 19 nt, Artificial Sequence
  Description of Artificial Sequence: Synthetic oligonucleotide
cacaauguuugcaugcaua

SEQ ID NO: 2196320 - RNA, 19 nt, Artificial Sequence
  Description of Artificial Sequence: Synthetic oligonucleotide
uucuuucaugauucauaaa

SEQ ID NO: 2196321 - RNA, 19 nt, Artificial Sequence
  Description of Artificial Sequence: Synthetic oligonucleotide
uucuuucaugcuugaggaa

SEQ ID NO: 2196322 - RNA, 19 nt, Artificial Sequence
  Description of Artificial Sequence: Synthetic oligonucleotide
acuguuacggucacuggaa

SEQ ID NO: 2196323 - RNA, 19 nt, Artificial Sequence
  Description of Artificial Sequence: Synthetic oligonucleotide
uucgugacaaaggguuucu

SEQ ID NO: 2196324 - RNA, 19 nt, Artificial Sequence
  Description of Artificial Sequence: Synthetic oligonucleotide
uguuucuucuauggagauc

SEQ ID NO: 2196325 - RNA, 19 nt, Artificial Sequence
  Description of Artificial Sequence: Synthetic oligonucleotide
cuguuacgggcacuugaag

SEQ ID NO: 2196326 - RNA, 19 nt, Artificial Sequence
  Description of Artificial Sequence: Synthetic oligonucleotide
caucgggacuagugaaagc

SEQ ID NO: 2196327 - RNA, 19 nt, Artificial Sequence
  Description of Artificial Sequence: Synthetic oligonucleotide
cuugaaguggugaaggcuu

SEQ ID NO: 2196328 - RNA, 19 nt, Artificial Sequence
  Description of Artificial Sequence: Synthetic oligonucleotide
ugagaccuuguauggguuu

SEQ ID NO: 2196329 - RNA, 19 nt, Artificial Sequence
  Description of Artificial Sequence: Synthetic oligonucleotide
auguaucuuucaugacugu

SEQ ID NO: 2196330 - RNA, 19 nt, Artificial Sequence
  Description of Artificial Sequence: Synthetic oligonucleotide
guguuuacauauguaaagu

SEQ ID NO: 2196331 - RNA, 19 nt, Artificial Sequence
  Description of Artificial Sequence: Synthetic oligonucleotide
ucacuggaacugguguaag

SEQ ID NO: 2196332 - RNA, 19 nt, Artificial Sequence
  Description of Artificial Sequence: Synthetic oligonucleotide
uugaaguggugaaggcuuu

SEQ ID NO: 2196333 - RNA, 19 nt, Artificial Sequence
  Description of Artificial Sequence: Synthetic oligonucleotide
uuggugcaugaguagguuu

SEQ ID NO: 2196334 - RNA, 19 nt, Artificial Sequence
  Description of Artificial Sequence: Synthetic oligonucleotide
uuuggugcaugaguagguu

SEQ ID NO: 2196335 - RNA, 19 nt, Artificial Sequence
  Description of Artificial Sequence: Synthetic oligonucleotide
uacgggcacuugaaguggu

SEQ ID NO: 2196336 - RNA, 19 nt, Artificial Sequence
  Description of Artificial Sequence: Synthetic oligonucleotide
cuguuacggucacuggaac

SEQ ID NO: 2196337 - RNA, 19 nt, Artificial Sequence
  Description of Artificial Sequence: Synthetic oligonucleotide
auaggaacucugacuguug

SEQ ID NO: 2196338 - RNA, 19 nt, Artificial Sequence
  Description of Artificial Sequence: Synthetic oligonucleotide
gcuuacaugaauaaggcuu

SEQ ID NO: 2196339 - RNA, 19 nt, Artificial Sequence
  Description of Artificial Sequence: Synthetic oligonucleotide
acuguuacguguacuggaa

SEQ ID NO: 2196340 - RNA, 19 nt, Artificial Sequence
  Description of Artificial Sequence: Synthetic oligonucleotide
ggacuagugaaagcuuucc

SEQ ID NO: 2196341 - RNA, 19 nt, Artificial Sequence
  Description of Artificial Sequence: Synthetic oligonucleotide
aguuucucuuucauagaau

SEQ ID NO: 2196342 - RNA, 19 nt, Artificial Sequence
  Description of Artificial Sequence: Synthetic oligonucleotide
acuguuacgggcacuugaa

SEQ ID NO: 2196343 - RNA, 19 nt, Artificial Sequence
  Description of Artificial Sequence: Synthetic oligonucleotide
cucuauagcaugaauucuu

SEQ ID NO: 2196344 - RNA, 19 nt, Artificial Sequence
  Description of Artificial Sequence: Synthetic oligonucleotide
uauagucaucgggacuagu

SEQ ID NO: 2196345 - RNA, 19 nt, Artificial Sequence
  Description of Artificial Sequence: Synthetic oligonucleotide
cacagauugcucacaugga

SEQ ID NO: 2196346 - RNA, 19 nt, Artificial Sequence
  Description of Artificial Sequence: Synthetic oligonucleotide
ucgggacuagugaaagcuu

SEQ ID NO: 2196347 - RNA, 19 nt, Artificial Sequence
  Description of Artificial Sequence: Synthetic oligonucleotide
guacuggaaguggcaaaag

SEQ ID NO: 2196348 - RNA, 19 nt, Artificial Sequence
  Description of Artificial Sequence: Synthetic oligonucleotide
guugcaauguuuacaugua

SEQ ID NO: 2196349 - RNA, 19 nt, Artificial Sequence
  Description of Artificial Sequence: Synthetic oligonucleotide
uuaccacaauaggugaauu

SEQ ID NO: 2196350 - RNA, 19 nt, Artificial Sequence
  Description of Artificial Sequence: Synthetic oligonucleotide
cuggaaguggcaaaaguuu

SEQ ID NO: 2196351 - RNA, 19 nt, Artificial Sequence
  Description of Artificial Sequence: Synthetic oligonucleotide
gaccuuguauggguuugug

SEQ ID NO: 2196352 - RNA, 19 nt, Artificial Sequence
  Description of Artificial Sequence: Synthetic oligonucleotide
augacuguuacgggcacuu

SEQ ID NO: 2196353 - RNA, 19 nt, Artificial Sequence
  Description of Artificial Sequence: Synthetic oligonucleotide
acucugacuguugaagguu

SEQ ID NO: 2196354 - RNA, 19 nt, Artificial Sequence
  Description of Artificial Sequence: Synthetic oligonucleotide
uuucccacacugaggucuu

SEQ ID NO: 2196355 - RNA, 19 nt, Artificial Sequence
  Description of Artificial Sequence: Synthetic oligonucleotide
ucccacacugaggucuuug

SEQ ID NO: 2196356 - RNA, 19 nt, Artificial Sequence
  Description of Artificial Sequence: Synthetic oligonucleotide
cguuugaaugcuuucccac

SEQ ID NO: 2196357 - RNA, 19 nt, Artificial Sequence
  Description of Artificial Sequence: Synthetic oligonucleotide
ugcaguccucuccaauauu

SEQ ID NO: 2196358 - RNA, 19 nt, Artificial Sequence
  Description of Artificial Sequence: Synthetic oligonucleotide
cucuacacagugaaguuuu

SEQ ID NO: 2196359 - RNA, 19 nt, Artificial Sequence
  Description of Artificial Sequence: Synthetic oligonucleotide
gguauguaagacacagaga

SEQ ID NO: 2196360 - RNA, 19 nt, Artificial Sequence
  Description of Artificial Sequence: Synthetic oligonucleotide
uauggagaucagguucaaa

SEQ ID NO: 2196361 - RNA, 19 nt, Artificial Sequence
  Description of Artificial Sequence: Synthetic oligonucleotide
gguuugugaugguauguaa

SEQ ID NO: 2196362 - RNA, 19 nt, Artificial Sequence
  Description of Artificial Sequence: Synthetic oligonucleotide
uuucaugcuugaggaaauu

SEQ ID NO: 2196363 - RNA, 19 nt, Artificial Sequence
  Description of Artificial Sequence: Synthetic oligonucleotide
cacaaggguuacaugcaaa

SEQ ID NO: 2196364 - RNA, 19 nt, Artificial Sequence
  Description of Artificial Sequence: Synthetic oligonucleotide
ccauacuguuucuaguuga

SEQ ID NO: 2196365 - RNA, 19 nt, Artificial Sequence
  Description of Artificial Sequence: Synthetic oligonucleotide
ugaggucuuugcaguccuc

SEQ ID NO: 2196366 - RNA, 19 nt, Artificial Sequence
  Description of Artificial Sequence: Synthetic oligonucleotide
gcucacauggacaaggacu

SEQ ID NO: 2196367 - RNA, 19 nt, Artificial Sequence
  Description of Artificial Sequence: Synthetic oligonucleotide
acauggacaaggacucuau

SEQ ID NO: 2196368 - RNA, 19 nt, Artificial Sequence
  Description of Artificial Sequence: Synthetic oligonucleotide
gacaaggacucuauagcau

SEQ ID NO: 2196369 - RNA, 19 nt, Artificial Sequence
  Description of Artificial Sequence: Synthetic oligonucleotide
caugaucagcauuggaaau

SEQ ID NO: 2196370 - RNA, 19 nt, Artificial Sequence
  Description of Artificial Sequence: Synthetic oligonucleotide
cuuucaugacuguuacggu

SEQ ID NO: 2196371 - RNA, 19 nt, Artificial Sequence
  Description of Artificial Sequence: Synthetic oligonucleotide
guguacuggaaguggcaaa

SEQ ID NO: 2196372 - RNA, 19 nt, Artificial Sequence
  Description of Artificial Sequence: Synthetic oligonucleotide
cacaauaggugaauucuuu

SEQ ID NO: 2196373 - RNA, 19 nt, Artificial Sequence
  Description of Artificial Sequence: Synthetic oligonucleotide
ugacuguuacgggcacuug

SEQ ID NO: 2196374 - RNA, 19 nt, Artificial Sequence
  Description of Artificial Sequence: Synthetic oligonucleotide
cuuucaugcuugaggaaau

SEQ ID NO: 2196375 - RNA, 19 nt, Artificial Sequence
  Description of Artificial Sequence: Synthetic oligonucleotide
gaauccuuucacaacuauu

SEQ ID NO: 2196376 - RNA, 19 nt, Artificial Sequence
  Description of Artificial Sequence: Synthetic oligonucleotide
ucacauggacaaggacucu

SEQ ID NO: 2196377 - RNA, 19 nt, Artificial Sequence
  Description of Artificial Sequence: Synthetic oligonucleotide
ccuuguauggguuugugau

SEQ ID NO: 2196378 - RNA, 19 nt, Artificial Sequence
  Description of Artificial Sequence: Synthetic oligonucleotide
cuucauuaugagaccuugu

SEQ ID NO: 2196379 - RNA, 19 nt, Artificial Sequence
  Description of Artificial Sequence: Synthetic oligonucleotide
ugaaguggugaaggcuuuu

SEQ ID NO: 2196380 - RNA, 19 nt, Artificial Sequence
  Description of Artificial Sequence: Synthetic oligonucleotide
acguguacuggaaguggca

SEQ ID NO: 2196381 - RNA, 19 nt, Artificial Sequence
  Description of Artificial Sequence: Synthetic oligonucleotide
cccacacugaggucuuugc

SEQ ID NO: 2196382 - RNA, 19 nt, Artificial Sequence
  Description of Artificial Sequence: Synthetic oligonucleotide
caugaacaugaucagcauu

SEQ ID NO: 2196383 - RNA, 19 nt, Artificial Sequence
  Description of Artificial Sequence: Synthetic oligonucleotide
gucaucgggacuagugaaa

SEQ ID NO: 2196384 - RNA, 19 nt, Artificial Sequence
  Description of Artificial Sequence: Synthetic oligonucleotide
guauggguuugugauggua

SEQ ID NO: 2196385 - RNA, 19 nt, Artificial Sequence
  Description of Artificial Sequence: Synthetic oligonucleotide
augucuccuucaucacaau

SEQ ID NO: 2196386 - RNA, 19 nt, Artificial Sequence
  Description of Artificial Sequence: Synthetic oligonucleotide
cuucuauggagaucagguu

SEQ ID NO: 2196387 - RNA, 19 nt, Artificial Sequence
  Description of Artificial Sequence: Synthetic oligonucleotide
gguuacaugcaaaaugcuu

SEQ ID NO: 2196388 - RNA, 19 nt, Artificial Sequence
  Description of Artificial Sequence: Synthetic oligonucleotide
guaagacacagagaccuuu

SEQ ID NO: 2196389 - RNA, 19 nt, Artificial Sequence
  Description of Artificial Sequence: Synthetic oligonucleotide
gcuucucuacacagugaag

SEQ ID NO: 2196390 - RNA, 19 nt, Artificial Sequence
  Description of Artificial Sequence: Synthetic oligonucleotide
augagaccuuguauggguu

SEQ ID NO: 2196391 - RNA, 19 nt, Artificial Sequence
  Description of Artificial Sequence: Synthetic oligonucleotide
ggacucuauagcaugaauu

SEQ ID NO: 2196392 - RNA, 19 nt, Artificial Sequence
  Description of Artificial Sequence: Synthetic oligonucleotide
gcaugaauucuuucaugcu

SEQ ID NO: 2196393 - RNA, 19 nt, Artificial Sequence
  Description of Artificial Sequence: Synthetic oligonucleotide
cuggaacugguguaaggau

SEQ ID NO: 2196394 - RNA, 19 nt, Artificial Sequence
  Description of Artificial Sequence: Synthetic oligonucleotide
cacauggacaaggacucua

SEQ ID NO: 2196395 - RNA, 19 nt, Artificial Sequence
  Description of Artificial Sequence: Synthetic oligonucleotide
cauggacaaggacucuaua

SEQ ID NO: 2196396 - RNA, 19 nt, Artificial Sequence
  Description of Artificial Sequence: Synthetic oligonucleotide
gggacuagugaaagcuuuc

SEQ ID NO: 2196397 - RNA, 19 nt, Artificial Sequence
  Description of Artificial Sequence: Synthetic oligonucleotide
cuguuucuucuauggagau

SEQ ID NO: 2196398 - RNA, 19 nt, Artificial Sequence
  Description of Artificial Sequence: Synthetic oligonucleotide
caugacuguuacguguacu

SEQ ID NO: 2196399 - RNA, 19 nt, Artificial Sequence
  Description of Artificial Sequence: Synthetic oligonucleotide
gggcacuugaaguggugaa

SEQ ID NO: 2196400 - RNA, 19 nt, Artificial Sequence
  Description of Artificial Sequence: Synthetic oligonucleotide
guuucuaguugagcaaguu

SEQ ID NO: 2196401 - RNA, 19 nt, Artificial Sequence
  Description of Artificial Sequence: Synthetic oligonucleotide
cuuucgugacaaaggguuu

SEQ ID NO: 2196402 - RNA, 19 nt, Artificial Sequence
  Description of Artificial Sequence: Synthetic oligonucleotide
cagagaccuuuucacagau

SEQ ID NO: 2196403 - RNA, 19 nt, Artificial Sequence
  Description of Artificial Sequence: Synthetic oligonucleotide
cuuugcaguccucuccaau

SEQ ID NO: 2196404 - RNA, 19 nt, Artificial Sequence
  Description of Artificial Sequence: Synthetic oligonucleotide
ccucuccaauauuuucuuc

SEQ ID NO: 2196405 - RNA, 19 nt, Artificial Sequence
  Description of Artificial Sequence: Synthetic oligonucleotide
ggguuugugaugguaugua

SEQ ID NO: 2196406 - RNA, 19 nt, Artificial Sequence
  Description of Artificial Sequence: Synthetic oligonucleotide
caaggguuacaugcaaaau

SEQ ID NO: 2196407 - RNA, 19 nt, Artificial Sequence
  Description of Artificial Sequence: Synthetic oligonucleotide
acgggcacuugaaguggug

SEQ ID NO: 2196408 - RNA, 19 nt, Artificial Sequence
  Description of Artificial Sequence: Synthetic oligonucleotide
agagaccuuuucacagauu

SEQ ID NO: 2196409 - RNA, 19 nt, Artificial Sequence
  Description of Artificial Sequence: Synthetic oligonucleotide
ccacacugaggucuuugca

SEQ ID NO: 2196410 - RNA, 19 nt, Artificial Sequence
  Description of Artificial Sequence: Synthetic oligonucleotide
gaucagcauuggaaauagu

SEQ ID NO: 2196411 - RNA, 19 nt, Artificial Sequence
  Description of Artificial Sequence: Synthetic oligonucleotide
cuauggagaucagguucaa

SEQ ID NO: 2196412 - RNA, 19 nt, Artificial Sequence
  Description of Artificial Sequence: Synthetic oligonucleotide
cgugacaaaggguuucucu

SEQ ID NO: 2196413 - RNA, 19 nt, Artificial Sequence
  Description of Artificial Sequence: Synthetic oligonucleotide
ccaaacguuugaaugcuuu

SEQ ID NO: 2196414 - RNA, 19 nt, Artificial Sequence
  Description of Artificial Sequence: Synthetic oligonucleotide
ccacaguguuuacauaugu

SEQ ID NO: 2196415 - RNA, 19 nt, Artificial Sequence
  Description of Artificial Sequence: Synthetic oligonucleotide
cacaaucucuguagagcuu

SEQ ID NO: 2196416 - RNA, 19 nt, Artificial Sequence
  Description of Artificial Sequence: Synthetic oligonucleotide
caguccucuccaauauuuu

SEQ ID NO: 2196417 - RNA, 19 nt, Artificial Sequence
  Description of Artificial Sequence: Synthetic oligonucleotide
ccacaaggguuacaugcaa

SEQ ID NO: 2196418 - RNA, 19 nt, Artificial Sequence
  Description of Artificial Sequence: Synthetic oligonucleotide
ggguuacaugcaaaaugcu

SEQ ID NO: 2196419 - RNA, 19 nt, Artificial Sequence
  Description of Artificial Sequence: Synthetic oligonucleotide
ccacaauaggugaauucuu

SEQ ID NO: 2196420 - RNA, 19 nt, Artificial Sequence
  Description of Artificial Sequence: Synthetic oligonucleotide
caugacuguuacggucacu

SEQ ID NO: 2196421 - RNA, 19 nt, Artificial Sequence
  Description of Artificial Sequence: Synthetic oligonucleotide
cgggcacuugaagugguga

SEQ ID NO: 2196422 - RNA, 19 nt, Artificial Sequence
  Description of Artificial Sequence: Synthetic oligonucleotide
cgggacuagugaaagcuuu

SEQ ID NO: 2196423 - RNA, 19 nt, Artificial Sequence
  Description of Artificial Sequence: Synthetic oligonucleotide
cccaaacguuugaaugcuu

SEQ ID NO: 2196424 - RNA, 19 nt, Artificial Sequence
  Description of Artificial Sequence: Synthetic oligonucleotide
aaaaugauaaacuugaaac

SEQ ID NO: 2196425 - RNA, 19 nt, Artificial Sequence
  Description of Artificial Sequence: Synthetic oligonucleotide
aauacuacuauucaauuuc

SEQ ID NO: 2196426 - RNA, 19 nt, Artificial Sequence
  Description of Artificial Sequence: Synthetic oligonucleotide
auugaaacaaaguugaugg

SEQ ID NO: 2196427 - RNA, 19 nt, Artificial Sequence
  Description of Artificial Sequence: Synthetic oligonucleotide
uuauacaugaaucaaaagc

SEQ ID NO: 2196428 - RNA, 19 nt, Artificial Sequence
  Description of Artificial Sequence: Synthetic oligonucleotide
aaguguauaaaauuaagcu

SEQ ID NO: 2196429 - RNA, 19 nt, Artificial Sequence
  Description of Artificial Sequence: Synthetic oligonucleotide
ucuuaaaacaaaccuaagg

SEQ ID NO: 2196430 - RNA, 19 nt, Artificial Sequence
  Description of Artificial Sequence: Synthetic oligonucleotide
aaauacauaaaugaaaugu

SEQ ID NO: 2196431 - RNA, 19 nt, Artificial Sequence
  Description of Artificial Sequence: Synthetic oligonucleotide
uauaauauuaguaguggag

SEQ ID NO: 2196432 - RNA, 19 nt, Artificial Sequence
  Description of Artificial Sequence: Synthetic oligonucleotide
aagucuaagauccuguauc

SEQ ID NO: 2196433 - RNA, 19 nt, Artificial Sequence
  Description of Artificial Sequence: Synthetic oligonucleotide
ugaauuugaauaucuaagg

SEQ ID NO: 2196434 - RNA, 19 nt, Artificial Sequence
  Description of Artificial Sequence: Synthetic oligonucleotide
uuaaugucagaaaucauag

SEQ ID NO: 2196435 - RNA, 19 nt, Artificial Sequence
  Description of Artificial Sequence: Synthetic oligonucleotide
aauuugaauaucuaaggga

SEQ ID NO: 2196436 - RNA, 19 nt, Artificial Sequence
  Description of Artificial Sequence: Synthetic oligonucleotide
uauguaagcacacauacac

SEQ ID NO: 2196437 - RNA, 19 nt, Artificial Sequence
  Description of Artificial Sequence: Synthetic oligonucleotide
auaguguagcuuuaaaagc

SEQ ID NO: 2196438 - RNA, 19 nt, Artificial Sequence
  Description of Artificial Sequence: Synthetic oligonucleotide
aagaacaucccugugaaac

SEQ ID NO: 2196439 - RNA, 19 nt, Artificial Sequence
  Description of Artificial Sequence: Synthetic oligonucleotide
augcuuaacuaacugaucc

SEQ ID NO: 2196440 - RNA, 19 nt, Artificial Sequence
  Description of Artificial Sequence: Synthetic oligonucleotide
aagcauguaaguuccagcg

SEQ ID NO: 2196441 - RNA, 19 nt, Artificial Sequence
  Description of Artificial Sequence: Synthetic oligonucleotide
aaaauugacauacuaaauu

SEQ ID NO: 2196442 - RNA, 19 nt, Artificial Sequence
  Description of Artificial Sequence: Synthetic oligonucleotide
aaagcauguaaguuccagc

SEQ ID NO: 2196443 - RNA, 19 nt, Artificial Sequence
  Description of Artificial Sequence: Synthetic oligonucleotide
gaauuugaauaucuaaggg

SEQ ID NO: 2196444 - RNA, 19 nt, Artificial Sequence
  Description of Artificial Sequence: Synthetic oligonucleotide
auaaaauuaagcuggcauc

SEQ ID NO: 2196445 - RNA, 19 nt, Artificial Sequence
  Description of Artificial Sequence: Synthetic oligonucleotide
cauaguguagcuuuaaaag

SEQ ID NO: 2196446 - RNA, 19 nt, Artificial Sequence
  Description of Artificial Sequence: Synthetic oligonucleotide
aauacauaaaugaaauguc

SEQ ID NO: 2196447 - RNA, 19 nt, Artificial Sequence
  Description of Artificial Sequence: Synthetic oligonucleotide
aaaguugauggacuaaaag

SEQ ID NO: 2196448 - RNA, 19 nt, Artificial Sequence
  Description of Artificial Sequence: Synthetic oligonucleotide
aauuaagcuggcaucaccc

SEQ ID NO: 2196449 - RNA, 19 nt, Artificial Sequence
  Description of Artificial Sequence: Synthetic oligonucleotide
guguauaaaauuaagcugg

SEQ ID NO: 2196450 - RNA, 19 nt, Artificial Sequence
  Description of Artificial Sequence: Synthetic oligonucleotide
aguguauaaaauuaagcug

SEQ ID NO: 2196451 - RNA, 19 nt, Artificial Sequence
  Description of Artificial Sequence: Synthetic oligonucleotide
uguaugcuuaaguacaagg

SEQ ID NO: 2196452 - RNA, 19 nt, Artificial Sequence
  Description of Artificial Sequence: Synthetic oligonucleotide
uguauaauauuaguagugg

SEQ ID NO: 2196453 - RNA, 19 nt, Artificial Sequence
  Description of Artificial Sequence: Synthetic oligonucleotide
ucuuauguaacaccuaugu

SEQ ID NO: 2196454 - RNA, 19 nt, Artificial Sequence
  Description of Artificial Sequence: Synthetic oligonucleotide
aguggaaugaauuugaaua

SEQ ID NO: 2196455 - RNA, 19 nt, Artificial Sequence
  Description of Artificial Sequence: Synthetic oligonucleotide
aauuucuaaguauaauugu

SEQ ID NO: 2196456 - RNA, 19 nt, Artificial Sequence
  Description of Artificial Sequence: Synthetic oligonucleotide
uuaacuaacugauccaaag

SEQ ID NO: 2196457 - RNA, 19 nt, Artificial Sequence
  Description of Artificial Sequence: Synthetic oligonucleotide
uagaaugggagcaucaugc

SEQ ID NO: 2196458 - RNA, 19 nt, Artificial Sequence
  Description of Artificial Sequence: Synthetic oligonucleotide
uaucuaagggaaaagaagu

SEQ ID NO: 2196459 - RNA, 19 nt, Artificial Sequence
  Description of Artificial Sequence: Synthetic oligonucleotide
ugaaaugucucaaaauuga

SEQ ID NO: 2196460 - RNA, 19 nt, Artificial Sequence
  Description of Artificial Sequence: Synthetic oligonucleotide
ugaaacuaguuauacauga

SEQ ID NO: 2196461 - RNA, 19 nt, Artificial Sequence
  Description of Artificial Sequence: Synthetic oligonucleotide
uuguauaauauuaguagug

SEQ ID NO: 2196462 - RNA, 19 nt, Artificial Sequence
  Description of Artificial Sequence: Synthetic oligonucleotide
cuaacugauccaaaggugg

SEQ ID NO: 2196463 - RNA, 19 nt, Artificial Sequence
  Description of Artificial Sequence: Synthetic oligonucleotide
uccaaauugaaacaaaguu

SEQ ID NO: 2196464 - RNA, 19 nt, Artificial Sequence
  Description of Artificial Sequence: Synthetic oligonucleotide
agugcaguaaugccaaccc

SEQ ID NO: 2196465 - RNA, 19 nt, Artificial Sequence
  Description of Artificial Sequence: Synthetic oligonucleotide
auaauuguucucuuaaugu

SEQ ID NO: 2196466 - RNA, 19 nt, Artificial Sequence
  Description of Artificial Sequence: Synthetic oligonucleotide
aacuaguuauacaugaauc

SEQ ID NO: 2196467 - RNA, 19 nt, Artificial Sequence
  Description of Artificial Sequence: Synthetic oligonucleotide
uguuaaauacuacuauuca

SEQ ID NO: 2196468 - RNA, 19 nt, Artificial Sequence
  Description of Artificial Sequence: Synthetic oligonucleotide
aauugaaacaaaguugaug

SEQ ID NO: 2196469 - RNA, 19 nt, Artificial Sequence
  Description of Artificial Sequence: Synthetic oligonucleotide
caacccgauacuaagaucc

SEQ ID NO: 2196470 - RNA, 19 nt, Artificial Sequence
  Description of Artificial Sequence: Synthetic oligonucleotide
caauuucuaaguauaauug

SEQ ID NO: 2196471 - RNA, 19 nt, Artificial Sequence
  Description of Artificial Sequence: Synthetic oligonucleotide
agucuaagauccuguaucc

SEQ ID NO: 2196472 - RNA, 19 nt, Artificial Sequence
  Description of Artificial Sequence: Synthetic oligonucleotide
aaaauagcuuucaucaguc

SEQ ID NO: 2196473 - RNA, 19 nt, Artificial Sequence
  Description of Artificial Sequence: Synthetic oligonucleotide
aacuugaaacuaguuauac

SEQ ID NO: 2196474 - RNA, 19 nt, Artificial Sequence
  Description of Artificial Sequence: Synthetic oligonucleotide
uauucaauuucuaaguaua

SEQ ID NO: 2196475 - RNA, 19 nt, Artificial Sequence
  Description of Artificial Sequence: Synthetic oligonucleotide
aacaaaacagcuucaugcu

SEQ ID NO: 2196476 - RNA, 19 nt, Artificial Sequence
  Description of Artificial Sequence: Synthetic oligonucleotide
cuacuauucaauuucuaag

SEQ ID NO: 2196477 - RNA, 19 nt, Artificial Sequence
  Description of Artificial Sequence: Synthetic oligonucleotide
aaaccuaagguagaauggg

SEQ ID NO: 2196478 - RNA, 19 nt, Artificial Sequence
  Description of Artificial Sequence: Synthetic oligonucleotide
uuguuaaauacuacuauuc

SEQ ID NO: 2196479 - RNA, 19 nt, Artificial Sequence
  Description of Artificial Sequence: Synthetic oligonucleotide
ucugugguuacuuaagugu

SEQ ID NO: 2196480 - RNA, 19 nt, Artificial Sequence
  Description of Artificial Sequence: Synthetic oligonucleotide
acuaguuauacaugaauca

SEQ ID NO: 2196481 - RNA, 19 nt, Artificial Sequence
  Description of Artificial Sequence: Synthetic oligonucleotide
uaguguagcuuuaaaagca

SEQ ID NO: 2196482 - RNA, 19 nt, Artificial Sequence
  Description of Artificial Sequence: Synthetic oligonucleotide
uacuauucaauuucuaagu

SEQ ID NO: 2196483 - RNA, 19 nt, Artificial Sequence
  Description of Artificial Sequence: Synthetic oligonucleotide
gcuuguauaauauuaguag

SEQ ID NO: 2196484 - RNA, 19 nt, Artificial Sequence
  Description of Artificial Sequence: Synthetic oligonucleotide
aaacuaguuauacaugaau

SEQ ID NO: 2196485 - RNA, 19 nt, Artificial Sequence
  Description of Artificial Sequence: Synthetic oligonucleotide
aaagcuuguauaauauuag

SEQ ID NO: 2196486 - RNA, 19 nt, Artificial Sequence
  Description of Artificial Sequence: Synthetic oligonucleotide
aaugauaaacuugaaacua

SEQ ID NO: 2196487 - RNA, 19 nt, Artificial Sequence
  Description of Artificial Sequence: Synthetic oligonucleotide
ucuugaaaguguaaguccu

SEQ ID NO: 2196488 - RNA, 19 nt, Artificial Sequence
  Description of Artificial Sequence: Synthetic oligonucleotide
ugucucaaaauugacauac

SEQ ID NO: 2196489 - RNA, 19 nt, Artificial Sequence
  Description of Artificial Sequence: Synthetic oligonucleotide
uguaagcacacauacacuc

SEQ ID NO: 2196490 - RNA, 19 nt, Artificial Sequence
  Description of Artificial Sequence: Synthetic oligonucleotide
uuuaagucuaagauccugu

SEQ ID NO: 2196491 - RNA, 19 nt, Artificial Sequence
  Description of Artificial Sequence: Synthetic oligonucleotide
uucucuuaaugucagaaau

SEQ ID NO: 2196492 - RNA, 19 nt, Artificial Sequence
  Description of Artificial Sequence: Synthetic oligonucleotide
uuucuaaguauaauuguuc

SEQ ID NO: 2196493 - RNA, 19 nt, Artificial Sequence
  Description of Artificial Sequence: Synthetic oligonucleotide
augaauuugaauaucuaag

SEQ ID NO: 2196494 - RNA, 19 nt, Artificial Sequence
  Description of Artificial Sequence: Synthetic oligonucleotide
auaaacuugaaacuaguua

SEQ ID NO: 2196495 - RNA, 19 nt, Artificial Sequence
  Description of Artificial Sequence: Synthetic oligonucleotide
caaaccuaagguagaaugg

SEQ ID NO: 2196496 - RNA, 19 nt, Artificial Sequence
  Description of Artificial Sequence: Synthetic oligonucleotide
acauaaaugaaaugucuca

SEQ ID NO: 2196497 - RNA, 19 nt, Artificial Sequence
  Description of Artificial Sequence: Synthetic oligonucleotide
ucguguaugcuuaaguaca

SEQ ID NO: 2196498 - RNA, 19 nt, Artificial Sequence
  Description of Artificial Sequence: Synthetic oligonucleotide
aguauaauuguucucuuaa

SEQ ID NO: 2196499 - RNA, 19 nt, Artificial Sequence
  Description of Artificial Sequence: Synthetic oligonucleotide
agucacuuaaacuuuauua

SEQ ID NO: 2196500 - RNA, 19 nt, Artificial Sequence
  Description of Artificial Sequence: Synthetic oligonucleotide
uucagagaacaaaacagcu

SEQ ID NO: 2196501 - RNA, 19 nt, Artificial Sequence
  Description of Artificial Sequence: Synthetic oligonucleotide
uacauaaaugaaaugucuc

SEQ ID NO: 2196502 - RNA, 19 nt, Artificial Sequence
  Description of Artificial Sequence: Synthetic oligonucleotide
agaaaaugucaauguacac

SEQ ID NO: 2196503 - RNA, 19 nt, Artificial Sequence
  Description of Artificial Sequence: Synthetic oligonucleotide
uucuaaguauaauuguucu

SEQ ID NO: 2196504 - RNA, 19 nt, Artificial Sequence
  Description of Artificial Sequence: Synthetic oligonucleotide
acacauaaccuucagagaa

SEQ ID NO: 2196505 - RNA, 19 nt, Artificial Sequence
  Description of Artificial Sequence: Synthetic oligonucleotide
ucuuguuaaauacuacuau

SEQ ID NO: 2196506 - RNA, 19 nt, Artificial Sequence
  Description of Artificial Sequence: Synthetic oligonucleotide
uaagauccaaauugaaaca

SEQ ID NO: 2196507 - RNA, 19 nt, Artificial Sequence
  Description of Artificial Sequence: Synthetic oligonucleotide
aaauacuacuauucaauuu

SEQ ID NO: 2196508 - RNA, 19 nt, Artificial Sequence
  Description of Artificial Sequence: Synthetic oligonucleotide
aaaagcuuguauaauauua

SEQ ID NO: 2196509 - RNA, 19 nt, Artificial Sequence
  Description of Artificial Sequence: Synthetic oligonucleotide
uguauaaaauuaagcuggc

SEQ ID NO: 2196510 - RNA, 19 nt, Artificial Sequence
  Description of Artificial Sequence: Synthetic oligonucleotide
uggacuaaaagugaagugu

SEQ ID NO: 2196511 - RNA, 19 nt, Artificial Sequence
  Description of Artificial Sequence: Synthetic oligonucleotide
augucaauguacacaaugc

SEQ ID NO: 2196512 - RNA, 19 nt, Artificial Sequence
  Description of Artificial Sequence: Synthetic oligonucleotide
ugucuuccaaacaaggaac

SEQ ID NO: 2196513 - RNA, 19 nt, Artificial Sequence
  Description of Artificial Sequence: Synthetic oligonucleotide
auaucuaagggaaaagaag

SEQ ID NO: 2196514 - RNA, 19 nt, Artificial Sequence
  Description of Artificial Sequence: Synthetic oligonucleotide
gaaucaaaagcuuguauaa

SEQ ID NO: 2196515 - RNA, 19 nt, Artificial Sequence
  Description of Artificial Sequence: Synthetic oligonucleotide
gauccaaauugaaacaaag

SEQ ID NO: 2196516 - RNA, 19 nt, Artificial Sequence
  Description of Artificial Sequence: Synthetic oligonucleotide
auaauauuaguaguggagu

SEQ ID NO: 2196517 - RNA, 19 nt, Artificial Sequence
  Description of Artificial Sequence: Synthetic oligonucleotide
guaugcuuaaguacaaggg

SEQ ID NO: 2196518 - RNA, 19 nt, Artificial Sequence
  Description of Artificial Sequence: Synthetic oligonucleotide
uaauuguucucuuaauguc

SEQ ID NO: 2196519 - RNA, 19 nt, Artificial Sequence
  Description of Artificial Sequence: Synthetic oligonucleotide
ugauaaacuugaaacuagu

SEQ ID NO: 2196520 - RNA, 19 nt, Artificial Sequence
  Description of Artificial Sequence: Synthetic oligonucleotide
agcuuuaaaagcauguaag

SEQ ID NO: 2196521 - RNA, 19 nt, Artificial Sequence
  Description of Artificial Sequence: Synthetic oligonucleotide
ugcaguaaugccaacccga

SEQ ID NO: 2196522 - RNA, 19 nt, Artificial Sequence
  Description of Artificial Sequence: Synthetic oligonucleotide
acuacuauucaauuucuaa

SEQ ID NO: 2196523 - RNA, 19 nt, Artificial Sequence
  Description of Artificial Sequence: Synthetic oligonucleotide
aaugggagcaucaugcacu

SEQ ID NO: 2196524 - RNA, 19 nt, Artificial Sequence
  Description of Artificial Sequence: Synthetic oligonucleotide
aagcuuguauaauauuagu

SEQ ID NO: 2196525 - RNA, 19 nt, Artificial Sequence
  Description of Artificial Sequence: Synthetic oligonucleotide
uucucaaagaaaauacaua

SEQ ID NO: 2196526 - RNA, 19 nt, Artificial Sequence
  Description of Artificial Sequence: Synthetic oligonucleotide
aacacauaaccuucagaga

SEQ ID NO: 2196527 - RNA, 19 nt, Artificial Sequence
  Description of Artificial Sequence: Synthetic oligonucleotide
aucccugugaaacacauaa

SEQ ID NO: 2196528 - RNA, 19 nt, Artificial Sequence
  Description of Artificial Sequence: Synthetic oligonucleotide
aaguacaagggguuucuca

SEQ ID NO: 2196529 - RNA, 19 nt, Artificial Sequence
  Description of Artificial Sequence: Synthetic oligonucleotide
ugaaacacauaaccuucag

SEQ ID NO: 2196530 - RNA, 19 nt, Artificial Sequence
  Description of Artificial Sequence: Synthetic oligonucleotide
aaggugggagugccuaacc

SEQ ID NO: 2196531 - RNA, 19 nt, Artificial Sequence
  Description of Artificial Sequence: Synthetic oligonucleotide
auuugaauaucuaagggaa

SEQ ID NO: 2196532 - RNA, 19 nt, Artificial Sequence
  Description of Artificial Sequence: Synthetic oligonucleotide
ugauggacuaaaagugaag

SEQ ID NO: 2196533 - RNA, 19 nt, Artificial Sequence
  Description of Artificial Sequence: Synthetic oligonucleotide
cuuaaugucagaaaucaua

SEQ ID NO: 2196534 - RNA, 19 nt, Artificial Sequence
  Description of Artificial Sequence: Synthetic oligonucleotide
ucuaagauccuguauccuc

SEQ ID NO: 2196535 - RNA, 19 nt, Artificial Sequence
  Description of Artificial Sequence: Synthetic oligonucleotide
ccaaauugaaacaaaguug

SEQ ID NO: 2196536 - RNA, 19 nt, Artificial Sequence
  Description of Artificial Sequence: Synthetic oligonucleotide
aauauuaguaguggaguau

SEQ ID NO: 2196537 - RNA, 19 nt, Artificial Sequence
  Description of Artificial Sequence: Synthetic oligonucleotide
uuuuaagucuaagauccug

SEQ ID NO: 2196538 - RNA, 19 nt, Artificial Sequence
  Description of Artificial Sequence: Synthetic oligonucleotide
acaaugcuuaacuaacuga

SEQ ID NO: 2196539 - RNA, 19 nt, Artificial Sequence
  Description of Artificial Sequence: Synthetic oligonucleotide
aaugcuuaacuaacugauc

SEQ ID NO: 2196540 - RNA, 19 nt, Artificial Sequence
  Description of Artificial Sequence: Synthetic oligonucleotide
ucucaaaauugacauacua

SEQ ID NO: 2196541 - RNA, 19 nt, Artificial Sequence
  Description of Artificial Sequence: Synthetic oligonucleotide
caaacaaggaacucucgug

SEQ ID NO: 2196542 - RNA, 19 nt, Artificial Sequence
  Description of Artificial Sequence: Synthetic oligonucleotide
uagcuuuaaaagcauguaa

SEQ ID NO: 2196543 - RNA, 19 nt, Artificial Sequence
  Description of Artificial Sequence: Synthetic oligonucleotide
ugaauaucuaagggaaaag

SEQ ID NO: 2196544 - RNA, 19 nt, Artificial Sequence
  Description of Artificial Sequence: Synthetic oligonucleotide
uuucaucagucacuuaaac

SEQ ID NO: 2196545 - RNA, 19 nt, Artificial Sequence
  Description of Artificial Sequence: Synthetic oligonucleotide
agugccuaaccucuguaag

SEQ ID NO: 2196546 - RNA, 19 nt, Artificial Sequence
  Description of Artificial Sequence: Synthetic oligonucleotide
uugaauaucuaagggaaaa

SEQ ID NO: 2196547 - RNA, 19 nt, Artificial Sequence
  Description of Artificial Sequence: Synthetic oligonucleotide
cucuguaaagaaaauguca

SEQ ID NO: 2196548 - RNA, 19 nt, Artificial Sequence
  Description of Artificial Sequence: Synthetic oligonucleotide
aacaccuauguaagcacac

SEQ ID NO: 2196549 - RNA, 19 nt, Artificial Sequence
  Description of Artificial Sequence: Synthetic oligonucleotide
uuugguugucuuccaaaca

SEQ ID NO: 2196550 - RNA, 19 nt, Artificial Sequence
  Description of Artificial Sequence: Synthetic oligonucleotide
accuucagagaacaaaaca

SEQ ID NO: 2196551 - RNA, 19 nt, Artificial Sequence
  Description of Artificial Sequence: Synthetic oligonucleotide
ucucuuaaugucagaaauc

SEQ ID NO: 2196552 - RNA, 19 nt, Artificial Sequence
  Description of Artificial Sequence: Synthetic oligonucleotide
ucuaagggaaaagaaguaa

SEQ ID NO: 2196553 - RNA, 19 nt, Artificial Sequence
  Description of Artificial Sequence: Synthetic oligonucleotide
ugucagaaaucauagugua

SEQ ID NO: 2196554 - RNA, 19 nt, Artificial Sequence
  Description of Artificial Sequence: Synthetic oligonucleotide
guagcucuuauguaacacc

SEQ ID NO: 2196555 - RNA, 19 nt, Artificial Sequence
  Description of Artificial Sequence: Synthetic oligonucleotide
auguaacaccuauguaagc

SEQ ID NO: 2196556 - RNA, 19 nt, Artificial Sequence
  Description of Artificial Sequence: Synthetic oligonucleotide
ugaucuuguuaaauacuac

SEQ ID NO: 2196557 - RNA, 19 nt, Artificial Sequence
  Description of Artificial Sequence: Synthetic oligonucleotide
uugauggacuaaaagugaa

SEQ ID NO: 2196558 - RNA, 19 nt, Artificial Sequence
  Description of Artificial Sequence: Synthetic oligonucleotide
ucuaaguauaauuguucuc

SEQ ID NO: 2196559 - RNA, 19 nt, Artificial Sequence
  Description of Artificial Sequence: Synthetic oligonucleotide
cauacacucacugaucuug

SEQ ID NO: 2196560 - RNA, 19 nt, Artificial Sequence
  Description of Artificial Sequence: Synthetic oligonucleotide
auacauaaaugaaaugucu

SEQ ID NO: 2196561 - RNA, 19 nt, Artificial Sequence
  Description of Artificial Sequence: Synthetic oligonucleotide
acaucuugaaaguguaagu

SEQ ID NO: 2196562 - RNA, 19 nt, Artificial Sequence
  Description of Artificial Sequence: Synthetic oligonucleotide
cucguguaugcuuaaguac

SEQ ID NO: 2196563 - RNA, 19 nt, Artificial Sequence
  Description of Artificial Sequence: Synthetic oligonucleotide
aguacaagggguuucucaa

SEQ ID NO: 2196564 - RNA, 19 nt, Artificial Sequence
  Description of Artificial Sequence: Synthetic oligonucleotide
gaucuuguuaaauacuacu

SEQ ID NO: 2196565 - RNA, 19 nt, Artificial Sequence
  Description of Artificial Sequence: Synthetic oligonucleotide
aaaggugggagugccuaac

SEQ ID NO: 2196566 - RNA, 19 nt, Artificial Sequence
  Description of Artificial Sequence: Synthetic oligonucleotide
gaaaucauaguguagcuuu

SEQ ID NO: 2196567 - RNA, 19 nt, Artificial Sequence
  Description of Artificial Sequence: Synthetic oligonucleotide
aagauccaaauugaaacaa

SEQ ID NO: 2196568 - RNA, 19 nt, Artificial Sequence
  Description of Artificial Sequence: Synthetic oligonucleotide
augaaaugucucaaaauug

SEQ ID NO: 2196569 - RNA, 19 nt, Artificial Sequence
  Description of Artificial Sequence: Synthetic oligonucleotide
guauguagcucuuauguaa

SEQ ID NO: 2196570 - RNA, 19 nt, Artificial Sequence
  Description of Artificial Sequence: Synthetic oligonucleotide
auggacuaaaagugaagug

SEQ ID NO: 2196571 - RNA, 19 nt, Artificial Sequence
  Description of Artificial Sequence: Synthetic oligonucleotide
uuugaauaucuaagggaaa

SEQ ID NO: 2196572 - RNA, 19 nt, Artificial Sequence
  Description of Artificial Sequence: Synthetic oligonucleotide
uaacaccuauguaagcaca

SEQ ID NO: 2196573 - RNA, 19 nt, Artificial Sequence
  Description of Artificial Sequence: Synthetic oligonucleotide
aaauagcuuucaucaguca

SEQ ID NO: 2196574 - RNA, 19 nt, Artificial Sequence
  Description of Artificial Sequence: Synthetic oligonucleotide
guauaauauuaguagugga

SEQ ID NO: 2196575 - RNA, 19 nt, Artificial Sequence
  Description of Artificial Sequence: Synthetic oligonucleotide
augauaaacuugaaacuag

SEQ ID NO: 2196576 - RNA, 19 nt, Artificial Sequence
  Description of Artificial Sequence: Synthetic oligonucleotide
acuugaaacuaguuauaca

SEQ ID NO: 2196577 - RNA, 19 nt, Artificial Sequence
  Description of Artificial Sequence: Synthetic oligonucleotide
aguuauacaugaaucaaaa

SEQ ID NO: 2196578 - RNA, 19 nt, Artificial Sequence
  Description of Artificial Sequence: Synthetic oligonucleotide
guaaguuccagcgagugga

SEQ ID NO: 2196579 - RNA, 19 nt, Artificial Sequence
  Description of Artificial Sequence: Synthetic oligonucleotide
ugaaaguguaaguccuuga

SEQ ID NO: 2196580 - RNA, 19 nt, Artificial Sequence
  Description of Artificial Sequence: Synthetic oligonucleotide
ugcuuaacuaacugaucca

SEQ ID NO: 2196581 - RNA, 19 nt, Artificial Sequence
  Description of Artificial Sequence: Synthetic oligonucleotide
uaagucuaagauccuguau

SEQ ID NO: 2196582 - RNA, 19 nt, Artificial Sequence
  Description of Artificial Sequence: Synthetic oligonucleotide
aaguauaauuguucucuua

SEQ ID NO: 2196583 - RNA, 19 nt, Artificial Sequence
  Description of Artificial Sequence: Synthetic oligonucleotide
ucucguguaugcuuaagua

SEQ ID NO: 2196584 - RNA, 19 nt, Artificial Sequence
  Description of Artificial Sequence: Synthetic oligonucleotide
uguacacaaugcuuaacua

SEQ ID NO: 2196585 - RNA, 19 nt, Artificial Sequence
  Description of Artificial Sequence: Synthetic oligonucleotide
acuauucaauuucuaagua

SEQ ID NO: 2196586 - RNA, 19 nt, Artificial Sequence
  Description of Artificial Sequence: Synthetic oligonucleotide
ccuauguaagcacacauac

SEQ ID NO: 2196587 - RNA, 19 nt, Artificial Sequence
  Description of Artificial Sequence: Synthetic oligonucleotide
uuaaguacaagggguuucu

SEQ ID NO: 2196588 - RNA, 19 nt, Artificial Sequence
  Description of Artificial Sequence: Synthetic oligonucleotide
guaacaccuauguaagcac

SEQ ID NO: 2196589 - RNA, 19 nt, Artificial Sequence
  Description of Artificial Sequence: Synthetic oligonucleotide
guaagaacaucccugugaa

SEQ ID NO: 2196590 - RNA, 19 nt, Artificial Sequence
  Description of Artificial Sequence: Synthetic oligonucleotide
aaucaaaagcuuguauaau

SEQ ID NO: 2196591 - RNA, 19 nt, Artificial Sequence
  Description of Artificial Sequence: Synthetic oligonucleotide
aagguagaaugggagcauc

SEQ ID NO: 2196592 - RNA, 19 nt, Artificial Sequence
  Description of Artificial Sequence: Synthetic oligonucleotide
aauugacauacuaaauuuu

SEQ ID NO: 2196593 - RNA, 19 nt, Artificial Sequence
  Description of Artificial Sequence: Synthetic oligonucleotide
uacuaagauccaaauugaa

SEQ ID NO: 2196594 - RNA, 19 nt, Artificial Sequence
  Description of Artificial Sequence: Synthetic oligonucleotide
augaaucaaaagcuuguau

SEQ ID NO: 2196595 - RNA, 19 nt, Artificial Sequence
  Description of Artificial Sequence: Synthetic oligonucleotide
agaacaucccugugaaaca

SEQ ID NO: 2196596 - RNA, 19 nt, Artificial Sequence
  Description of Artificial Sequence: Synthetic oligonucleotide
cuaaguauaauuguucucu

SEQ ID NO: 2196597 - RNA, 19 nt, Artificial Sequence
  Description of Artificial Sequence: Synthetic oligonucleotide
uguagcucuuauguaacac

SEQ ID NO: 2196598 - RNA, 19 nt, Artificial Sequence
  Description of Artificial Sequence: Synthetic oligonucleotide
uuaagcuggcaucacccaa

SEQ ID NO: 2196599 - RNA, 19 nt, Artificial Sequence
  Description of Artificial Sequence: Synthetic oligonucleotide
guagaaugggagcaucaug

SEQ ID NO: 2196600 - RNA, 19 nt, Artificial Sequence
  Description of Artificial Sequence: Synthetic oligonucleotide
uuaagucuaagauccugua

SEQ ID NO: 2196601 - RNA, 19 nt, Artificial Sequence
  Description of Artificial Sequence: Synthetic oligonucleotide
augccaacccgauacuaag

SEQ ID NO: 2196602 - RNA, 19 nt, Artificial Sequence
  Description of Artificial Sequence: Synthetic oligonucleotide
acuaacugauccaaaggug

SEQ ID NO: 2196603 - RNA, 19 nt, Artificial Sequence
  Description of Artificial Sequence: Synthetic oligonucleotide
cuuguauaauauuaguagu

SEQ ID NO: 2196604 - RNA, 19 nt, Artificial Sequence
  Description of Artificial Sequence: Synthetic oligonucleotide
cuaagauccuguauccuca

SEQ ID NO: 2196605 - RNA, 19 nt, Artificial Sequence
  Description of Artificial Sequence: Synthetic oligonucleotide
guacacaaugcuuaacuaa

SEQ ID NO: 2196606 - RNA, 19 nt, Artificial Sequence
  Description of Artificial Sequence: Synthetic oligonucleotide
acugauccaaaggugggag

SEQ ID NO: 2196607 - RNA, 19 nt, Artificial Sequence
  Description of Artificial Sequence: Synthetic oligonucleotide
auuucuaaguauaauuguu

SEQ ID NO: 2196608 - RNA, 19 nt, Artificial Sequence
  Description of Artificial Sequence: Synthetic oligonucleotide
cccugugaaacacauaacc

SEQ ID NO: 2196609 - RNA, 19 nt, Artificial Sequence
  Description of Artificial Sequence: Synthetic oligonucleotide
ucacccaaaggcagugcag

SEQ ID NO: 2196610 - RNA, 19 nt, Artificial Sequence
  Description of Artificial Sequence: Synthetic oligonucleotide
aaacaaaccuaagguagaa

SEQ ID NO: 2196611 - RNA, 19 nt, Artificial Sequence
  Description of Artificial Sequence: Synthetic oligonucleotide
agggguuucucaaagaaaa

SEQ ID NO: 2196612 - RNA, 19 nt, Artificial Sequence
  Description of Artificial Sequence: Synthetic oligonucleotide
ucuuaaugucagaaaucau

SEQ ID NO: 2196613 - RNA, 19 nt, Artificial Sequence
  Description of Artificial Sequence: Synthetic oligonucleotide
ugugguuacuuaaguguau

SEQ ID NO: 2196614 - RNA, 19 nt, Artificial Sequence
  Description of Artificial Sequence: Synthetic oligonucleotide
gaaacaaaguugauggacu

SEQ ID NO: 2196615 - RNA, 19 nt, Artificial Sequence
  Description of Artificial Sequence: Synthetic oligonucleotide
gauggacuaaaagugaagu

SEQ ID NO: 2196616 - RNA, 19 nt, Artificial Sequence
  Description of Artificial Sequence: Synthetic oligonucleotide
auacuaagauccaaauuga

SEQ ID NO: 2196617 - RNA, 19 nt, Artificial Sequence
  Description of Artificial Sequence: Synthetic oligonucleotide
aacaaggaacucucgugua

SEQ ID NO: 2196618 - RNA, 19 nt, Artificial Sequence
  Description of Artificial Sequence: Synthetic oligonucleotide
aguauguagcucuuaugua

SEQ ID NO: 2196619 - RNA, 19 nt, Artificial Sequence
  Description of Artificial Sequence: Synthetic oligonucleotide
augcuuaaguacaaggggu

SEQ ID NO: 2196620 - RNA, 19 nt, Artificial Sequence
  Description of Artificial Sequence: Synthetic oligonucleotide
cuaagguagaaugggagca

SEQ ID NO: 2196621 - RNA, 19 nt, Artificial Sequence
  Description of Artificial Sequence: Synthetic oligonucleotide
uaaguauaauuguucucuu

SEQ ID NO: 2196622 - RNA, 19 nt, Artificial Sequence
  Description of Artificial Sequence: Synthetic oligonucleotide
accuaagguagaaugggag

SEQ ID NO: 2196623 - RNA, 19 nt, Artificial Sequence
  Description of Artificial Sequence: Synthetic oligonucleotide
uauuaguaguggaguauuu

SEQ ID NO: 2196624 - RNA, 19 nt, Artificial Sequence
  Description of Artificial Sequence: Synthetic oligonucleotide
aucacccaaaggcagugca

SEQ ID NO: 2196625 - RNA, 19 nt, Artificial Sequence
  Description of Artificial Sequence: Synthetic oligonucleotide
uggaaugaauuugaauauc

SEQ ID NO: 2196626 - RNA, 19 nt, Artificial Sequence
  Description of Artificial Sequence: Synthetic oligonucleotide
gguugucuuccaaacaagg

SEQ ID NO: 2196627 - RNA, 19 nt, Artificial Sequence
  Description of Artificial Sequence: Synthetic oligonucleotide
agcaucaugcacucuguaa

SEQ ID NO: 2196628 - RNA, 19 nt, Artificial Sequence
  Description of Artificial Sequence: Synthetic oligonucleotide
agcgaguggaaugaauuug

SEQ ID NO: 2196629 - RNA, 19 nt, Artificial Sequence
  Description of Artificial Sequence: Synthetic oligonucleotide
aaugccaacccgauacuaa

SEQ ID NO: 2196630 - RNA, 19 nt, Artificial Sequence
  Description of Artificial Sequence: Synthetic oligonucleotide
cucuuauguaacaccuaug

SEQ ID NO: 2196631 - RNA, 19 nt, Artificial Sequence
  Description of Artificial Sequence: Synthetic oligonucleotide
guugauggacuaaaaguga

SEQ ID NO: 2196632 - RNA, 19 nt, Artificial Sequence
  Description of Artificial Sequence: Synthetic oligonucleotide
caguauguagcucuuaugu

SEQ ID NO: 2196633 - RNA, 19 nt, Artificial Sequence
  Description of Artificial Sequence: Synthetic oligonucleotide
agaaugggagcaucaugca

SEQ ID NO: 2196634 - RNA, 19 nt, Artificial Sequence
  Description of Artificial Sequence: Synthetic oligonucleotide
acugaucuuguuaaauacu

SEQ ID NO: 2196635 - RNA, 19 nt, Artificial Sequence
  Description of Artificial Sequence: Synthetic oligonucleotide
aacugauccaaagguggga

SEQ ID NO: 2196636 - RNA, 19 nt, Artificial Sequence
  Description of Artificial Sequence: Synthetic oligonucleotide
gugcaguaaugccaacccg

SEQ ID NO: 2196637 - RNA, 19 nt, Artificial Sequence
  Description of Artificial Sequence: Synthetic oligonucleotide
auccaaauugaaacaaagu

SEQ ID NO: 2196638 - RNA, 19 nt, Artificial Sequence
  Description of Artificial Sequence: Synthetic oligonucleotide
ugguuacuuaaguguauaa

SEQ ID NO: 2196639 - RNA, 19 nt, Artificial Sequence
  Description of Artificial Sequence: Synthetic oligonucleotide
auauuaguaguggaguauu

SEQ ID NO: 2196640 - RNA, 19 nt, Artificial Sequence
  Description of Artificial Sequence: Synthetic oligonucleotide
cuaguuauacaugaaucaa

SEQ ID NO: 2196641 - RNA, 19 nt, Artificial Sequence
  Description of Artificial Sequence: Synthetic oligonucleotide
ugccuaaccucuguaagaa

SEQ ID NO: 2196642 - RNA, 19 nt, Artificial Sequence
  Description of Artificial Sequence: Synthetic oligonucleotide
aaacuugaaacuaguuaua

SEQ ID NO: 2196643 - RNA, 19 nt, Artificial Sequence
  Description of Artificial Sequence: Synthetic oligonucleotide
ccuaagguagaaugggagc

SEQ ID NO: 2196644 - RNA, 19 nt, Artificial Sequence
  Description of Artificial Sequence: Synthetic oligonucleotide
uacuacuauucaauuucua

SEQ ID NO: 2196645 - RNA, 19 nt, Artificial Sequence
  Description of Artificial Sequence: Synthetic oligonucleotide
gggagcaucaugcacucug

SEQ ID NO: 2196646 - RNA, 19 nt, Artificial Sequence
  Description of Artificial Sequence: Synthetic oligonucleotide
aucuuguuaaauacuacua

SEQ ID NO: 2196647 - RNA, 19 nt, Artificial Sequence
  Description of Artificial Sequence: Synthetic oligonucleotide
ugcacucuguaaagaaaau

SEQ ID NO: 2196648 - RNA, 19 nt, Artificial Sequence
  Description of Artificial Sequence: Synthetic oligonucleotide
cuauguaagcacacauaca

SEQ ID NO: 2196649 - RNA, 19 nt, Artificial Sequence
  Description of Artificial Sequence: Synthetic oligonucleotide
caaugcuuaacuaacugau

SEQ ID NO: 2196650 - RNA, 19 nt, Artificial Sequence
  Description of Artificial Sequence: Synthetic oligonucleotide
agcuuguauaauauuagua

SEQ ID NO: 2196651 - RNA, 19 nt, Artificial Sequence
  Description of Artificial Sequence: Synthetic oligonucleotide
cacucacugaucuuguuaa

SEQ ID NO: 2196652 - RNA, 19 nt, Artificial Sequence
  Description of Artificial Sequence: Synthetic oligonucleotide
auuaguaguggaguauuuu

SEQ ID NO: 2196653 - RNA, 19 nt, Artificial Sequence
  Description of Artificial Sequence: Synthetic oligonucleotide
aacaaaccuaagguagaau

SEQ ID NO: 2196654 - RNA, 19 nt, Artificial Sequence
  Description of Artificial Sequence: Synthetic oligonucleotide
aaauugaaacaaaguugau

SEQ ID NO: 2196655 - RNA, 19 nt, Artificial Sequence
  Description of Artificial Sequence: Synthetic oligonucleotide
acaagggguuucucaaaga

SEQ ID NO: 2196656 - RNA, 19 nt, Artificial Sequence
  Description of Artificial Sequence: Synthetic oligonucleotide
cacauaaaaugauaaacuu

SEQ ID NO: 2196657 - RNA, 19 nt, Artificial Sequence
  Description of Artificial Sequence: Synthetic oligonucleotide
gauccaaaggugggagugc

SEQ ID NO: 2196658 - RNA, 19 nt, Artificial Sequence
  Description of Artificial Sequence: Synthetic oligonucleotide
uggccaccggacaucaaac

SEQ ID NO: 2196659 - RNA, 19 nt, Artificial Sequence
  Description of Artificial Sequence: Synthetic oligonucleotide
gaaacuaguuauacaugaa

SEQ ID NO: 2196660 - RNA, 19 nt, Artificial Sequence
  Description of Artificial Sequence: Synthetic oligonucleotide
auguagcucuuauguaaca

SEQ ID NO: 2196661 - RNA, 19 nt, Artificial Sequence
  Description of Artificial Sequence: Synthetic oligonucleotide
caagggguuucucaaagaa

SEQ ID NO: 2196662 - RNA, 19 nt, Artificial Sequence
  Description of Artificial Sequence: Synthetic oligonucleotide
cuauucaauuucuaaguau

SEQ ID NO: 2196663 - RNA, 19 nt, Artificial Sequence
  Description of Artificial Sequence: Synthetic oligonucleotide
ccuaaccucuguaagaaca

SEQ ID NO: 2196664 - RNA, 19 nt, Artificial Sequence
  Description of Artificial Sequence: Synthetic oligonucleotide
aagggguuucucaaagaaa

SEQ ID NO: 2196665 - RNA, 19 nt, Artificial Sequence
  Description of Artificial Sequence: Synthetic oligonucleotide
agaaaucauaguguagcuu

SEQ ID NO: 2196666 - RNA, 19 nt, Artificial Sequence
  Description of Artificial Sequence: Synthetic oligonucleotide
caaaauugacauacuaaau

SEQ ID NO: 2196667 - RNA, 19 nt, Artificial Sequence
  Description of Artificial Sequence: Synthetic oligonucleotide
aaaucauaguguagcuuua

SEQ ID NO: 2196668 - RNA, 19 nt, Artificial Sequence
  Description of Artificial Sequence: Synthetic oligonucleotide
aggugggagugccuaaccu

SEQ ID NO: 2196669 - RNA, 19 nt, Artificial Sequence
  Description of Artificial Sequence: Synthetic oligonucleotide
aagauccuguauccucaaa

SEQ ID NO: 2196670 - RNA, 19 nt, Artificial Sequence
  Description of Artificial Sequence: Synthetic oligonucleotide
caugcacucuguaaagaaa

SEQ ID NO: 2196671 - RNA, 19 nt, Artificial Sequence
  Description of Artificial Sequence: Synthetic oligonucleotide
uaagguagaaugggagcau

SEQ ID NO: 2196672 - RNA, 19 nt, Artificial Sequence
  Description of Artificial Sequence: Synthetic oligonucleotide
aucaugcacucuguaaaga

SEQ ID NO: 2196673 - RNA, 19 nt, Artificial Sequence
  Description of Artificial Sequence: Synthetic oligonucleotide
cacacauacacucacugau

SEQ ID NO: 2196674 - RNA, 19 nt, Artificial Sequence
  Description of Artificial Sequence: Synthetic oligonucleotide
uccagcgaguggaaugaau

SEQ ID NO: 2196675 - RNA, 19 nt, Artificial Sequence
  Description of Artificial Sequence: Synthetic oligonucleotide
caaaggcagugcaguaaug

SEQ ID NO: 2196676 - RNA, 19 nt, Artificial Sequence
  Description of Artificial Sequence: Synthetic oligonucleotide
caaaguugauggacuaaaa

SEQ ID NO: 2196677 - RNA, 19 nt, Artificial Sequence
  Description of Artificial Sequence: Synthetic oligonucleotide
aguguagcuuuaaaagcau

SEQ ID NO: 2196678 - RNA, 19 nt, Artificial Sequence
  Description of Artificial Sequence: Synthetic oligonucleotide
cugugguuacuuaagugua

SEQ ID NO: 2196679 - RNA, 19 nt, Artificial Sequence
  Description of Artificial Sequence: Synthetic oligonucleotide
gagugccuaaccucuguaa

SEQ ID NO: 2196680 - RNA, 19 nt, Artificial Sequence
  Description of Artificial Sequence: Synthetic oligonucleotide
cuguaagaacaucccugug

SEQ ID NO: 2196681 - RNA, 19 nt, Artificial Sequence
  Description of Artificial Sequence: Synthetic oligonucleotide
cugugaaacacauaaccuu

SEQ ID NO: 2196682 - RNA, 19 nt, Artificial Sequence
  Description of Artificial Sequence: Synthetic oligonucleotide
agauccaaauugaaacaaa

SEQ ID NO: 2196683 - RNA, 19 nt, Artificial Sequence
  Description of Artificial Sequence: Synthetic oligonucleotide
caauguacacaaugcuuaa

SEQ ID NO: 2196684 - RNA, 19 nt, Artificial Sequence
  Description of Artificial Sequence: Synthetic oligonucleotide
guagcuuuaaaagcaugua

SEQ ID NO: 2196685 - RNA, 19 nt, Artificial Sequence
  Description of Artificial Sequence: Synthetic oligonucleotide
uaaugccaacccgauacua

SEQ ID NO: 2196686 - RNA, 19 nt, Artificial Sequence
  Description of Artificial Sequence: Synthetic oligonucleotide
aacucucguguaugcuuaa

SEQ ID NO: 2196687 - RNA, 19 nt, Artificial Sequence
  Description of Artificial Sequence: Synthetic oligonucleotide
guuccagcgaguggaauga

SEQ ID NO: 2196688 - RNA, 19 nt, Artificial Sequence
  Description of Artificial Sequence: Synthetic oligonucleotide
uccaaaggugggagugccu

SEQ ID NO: 2196689 - RNA, 19 nt, Artificial Sequence
  Description of Artificial Sequence: Synthetic oligonucleotide
gcacucuguaaagaaaaug

SEQ ID NO: 2196690 - RNA, 19 nt, Artificial Sequence
  Description of Artificial Sequence: Synthetic oligonucleotide
guauaauuguucucuuaau

SEQ ID NO: 2196691 - RNA, 19 nt, Artificial Sequence
  Description of Artificial Sequence: Synthetic oligonucleotide
augucucaaaauugacaua

SEQ ID NO: 2196692 - RNA, 19 nt, Artificial Sequence
  Description of Artificial Sequence: Synthetic oligonucleotide
aucgcuggccaccggacau

SEQ ID NO: 2196693 - RNA, 19 nt, Artificial Sequence
  Description of Artificial Sequence: Synthetic oligonucleotide
aucuaagggaaaagaagua

SEQ ID NO: 2196694 - RNA, 19 nt, Artificial Sequence
  Description of Artificial Sequence: Synthetic oligonucleotide
cuuccaaacaaggaacucu

SEQ ID NO: 2196695 - RNA, 19 nt, Artificial Sequence
  Description of Artificial Sequence: Synthetic oligonucleotide
ugggagugccuaaccucug

SEQ ID NO: 2196696 - RNA, 19 nt, Artificial Sequence
  Description of Artificial Sequence: Synthetic oligonucleotide
acaccuauguaagcacaca

SEQ ID NO: 2196697 - RNA, 19 nt, Artificial Sequence
  Description of Artificial Sequence: Synthetic oligonucleotide
ggugggagugccuaaccuc

SEQ ID NO: 2196698 - RNA, 19 nt, Artificial Sequence
  Description of Artificial Sequence: Synthetic oligonucleotide
aacccgauacuaagaucca

SEQ ID NO: 2196699 - RNA, 19 nt, Artificial Sequence
  Description of Artificial Sequence: Synthetic oligonucleotide
caccggacaucaaacaucu

SEQ ID NO: 2196700 - RNA, 19 nt, Artificial Sequence
  Description of Artificial Sequence: Synthetic oligonucleotide
auacacucacugaucuugu

SEQ ID NO: 2196701 - RNA, 19 nt, Artificial Sequence
  Description of Artificial Sequence: Synthetic oligonucleotide
agguagaaugggagcauca

SEQ ID NO: 2196702 - RNA, 19 nt, Artificial Sequence
  Description of Artificial Sequence: Synthetic oligonucleotide
uaaguacaagggguuucuc

SEQ ID NO: 2196703 - RNA, 19 nt, Artificial Sequence
  Description of Artificial Sequence: Synthetic oligonucleotide
gaucgcuggccaccggaca

SEQ ID NO: 2196704 - RNA, 19 nt, Artificial Sequence
  Description of Artificial Sequence: Synthetic oligonucleotide
acucucguguaugcuuaag

SEQ ID NO: 2196705 - RNA, 19 nt, Artificial Sequence
  Description of Artificial Sequence: Synthetic oligonucleotide
cagaaaucauaguguagcu

SEQ ID NO: 2196706 - RNA, 19 nt, Artificial Sequence
  Description of Artificial Sequence: Synthetic oligonucleotide
accuauguaagcacacaua

SEQ ID NO: 2196707 - RNA, 19 nt, Artificial Sequence
  Description of Artificial Sequence: Synthetic oligonucleotide
guacaagggguuucucaaa

SEQ ID NO: 2196708 - RNA, 19 nt, Artificial Sequence
  Description of Artificial Sequence: Synthetic oligonucleotide
gcuuaacuaacugauccaa

SEQ ID NO: 2196709 - RNA, 19 nt, Artificial Sequence
  Description of Artificial Sequence: Synthetic oligonucleotide
aaguuccagcgaguggaau

SEQ ID NO: 2196710 - RNA, 19 nt, Artificial Sequence
  Description of Artificial Sequence: Synthetic oligonucleotide
ggguuucucaaagaaaaua

SEQ ID NO: 2196711 - RNA, 19 nt, Artificial Sequence
  Description of Artificial Sequence: Synthetic oligonucleotide
ccaccggacaucaaacauc

SEQ ID NO: 2196712 - RNA, 19 nt, Artificial Sequence
  Description of Artificial Sequence: Synthetic oligonucleotide
cuggccaccggacaucaaa

SEQ ID NO: 2196713 - RNA, 19 nt, Artificial Sequence
  Description of Artificial Sequence: Synthetic oligonucleotide
caucacccaaaggcagugc

SEQ ID NO: 2196714 - RNA, 19 nt, Artificial Sequence
  Description of Artificial Sequence: Synthetic oligonucleotide
gugguuacuuaaguguaua

SEQ ID NO: 2196715 - RNA, 19 nt, Artificial Sequence
  Description of Artificial Sequence: Synthetic oligonucleotide
cucucguguaugcuuaagu

SEQ ID NO: 2196716 - RNA, 19 nt, Artificial Sequence
  Description of Artificial Sequence: Synthetic oligonucleotide
gcucuuauguaacaccuau

SEQ ID NO: 2196717 - RNA, 19 nt, Artificial Sequence
  Description of Artificial Sequence: Synthetic oligonucleotide
gcgaguggaaugaauuuga

SEQ ID NO: 2196718 - RNA, 19 nt, Artificial Sequence
  Description of Artificial Sequence: Synthetic oligonucleotide
cauguaaguuccagcgagu

SEQ ID NO: 2196719 - RNA, 19 nt, Artificial Sequence
  Description of Artificial Sequence: Synthetic oligonucleotide
gagcaucaugcacucugua

SEQ ID NO: 2196720 - RNA, 19 nt, Artificial Sequence
  Description of Artificial Sequence: Synthetic oligonucleotide
gugggagugccuaaccucu

SEQ ID NO: 2196721 - RNA, 19 nt, Artificial Sequence
  Description of Artificial Sequence: Synthetic oligonucleotide
caccuauguaagcacacau

SEQ ID NO: 2196722 - RNA, 19 nt, Artificial Sequence
  Description of Artificial Sequence: Synthetic oligonucleotide
ccaacccgauacuaagauc

SEQ ID NO: 2196723 - RNA, 19 nt, Artificial Sequence
  Description of Artificial Sequence: Synthetic oligonucleotide
caaaggugggagugccuaa

SEQ ID NO: 2196724 - RNA, 19 nt, Artificial Sequence
  Description of Artificial Sequence: Synthetic oligonucleotide
ggaacucucguguaugcuu

SEQ ID NO: 2196725 - RNA, 19 nt, Artificial Sequence
  Description of Artificial Sequence: Synthetic oligonucleotide
cccgauacuaagauccaaa

SEQ ID NO: 2196726 - RNA, 19 nt, Artificial Sequence
  Description of Artificial Sequence: Synthetic oligonucleotide
acccgauacuaagauccaa

SEQ ID NO: 2196727 - RNA, 19 nt, Artificial Sequence
  Description of Artificial Sequence: Synthetic oligonucleotide
cuugaaaguguaaguccuu

SEQ ID NO: 2196728 - RNA, 19 nt, Artificial Sequence
  Description of Artificial Sequence: Synthetic oligonucleotide
gucuaagauccuguauccu

SEQ ID NO: 2196729 - RNA, 19 nt, Artificial Sequence
  Description of Artificial Sequence: Synthetic oligonucleotide
gccuaaccucuguaagaac

SEQ ID NO: 2196730 - RNA, 19 nt, Artificial Sequence
  Description of Artificial Sequence: Synthetic oligonucleotide
ggccaccggacaucaaaca

SEQ ID NO: 2196731 - RNA, 19 nt, Artificial Sequence
  Description of Artificial Sequence: Synthetic oligonucleotide
uuccagcgaguggaaugaa

SEQ ID NO: 2196732 - RNA, 19 nt, Artificial Sequence
  Description of Artificial Sequence: Synthetic oligonucleotide
gccaacccgauacuaagau

SEQ ID NO: 2196733 - RNA, 19 nt, Artificial Sequence
  Description of Artificial Sequence: Synthetic oligonucleotide
ggagugccuaaccucugua

SEQ ID NO: 2196734 - RNA, 19 nt, Artificial Sequence
  Description of Artificial Sequence: Synthetic oligonucleotide
caucccugugaaacacaua

SEQ ID NO: 2196735 - RNA, 19 nt, Artificial Sequence
  Description of Artificial Sequence: Synthetic oligonucleotide
cagcgaguggaaugaauuu

SEQ ID NO: 2196736 - RNA, 19 nt, Artificial Sequence
  Description of Artificial Sequence: Synthetic oligonucleotide
ugggagcaucaugcacucu

SEQ ID NO: 2196737 - RNA, 19 nt, Artificial Sequence
  Description of Artificial Sequence: Synthetic oligonucleotide
ucgcuggccaccggacauc

SEQ ID NO: 2196738 - RNA, 19 nt, Artificial Sequence
  Description of Artificial Sequence: Synthetic oligonucleotide
cagucacuuaaacuuuauu

SEQ ID NO: 2196739 - RNA, 19 nt, Artificial Sequence
  Description of Artificial Sequence: Synthetic oligonucleotide
gguagaaugggagcaucau

SEQ ID NO: 2196740 - RNA, 19 nt, Artificial Sequence
  Description of Artificial Sequence: Synthetic oligonucleotide
ccagcgaguggaaugaauu

SEQ ID NO: 2196741 - RNA, 19 nt, Artificial Sequence
  Description of Artificial Sequence: Synthetic oligonucleotide
ccgauacuaagauccaaau

SEQ ID NO: 2196742 - RNA, 19 nt, Artificial Sequence
  Description of Artificial Sequence: Synthetic oligonucleotide
ccaaaggcagugcaguaau

SEQ ID NO: 2196743 - RNA, 19 nt, Artificial Sequence
  Description of Artificial Sequence: Synthetic oligonucleotide
gcagugcaguaaugccaac

SEQ ID NO: 2196744 - RNA, 19 nt, Artificial Sequence
  Description of Artificial Sequence: Synthetic oligonucleotide
ccaaaggugggagugccua

SEQ ID NO: 2196745 - RNA, 19 nt, Artificial Sequence
  Description of Artificial Sequence: Synthetic oligonucleotide
ggagcaucaugcacucugu

SEQ ID NO: 2196746 - RNA, 19 nt, Artificial Sequence
  Description of Artificial Sequence: Synthetic oligonucleotide
gggagugccuaaccucugu

SEQ ID NO: 2196747 - RNA, 19 nt, Artificial Sequence
  Description of Artificial Sequence: Synthetic oligonucleotide
gcaguaaugccaacccgau

SEQ ID NO: 2196748 - RNA, 19 nt, Artificial Sequence
  Description of Artificial Sequence: Synthetic oligonucleotide
ggcaucacccaaaggcagu

SEQ ID NO: 2196749 - RNA, 19 nt, Artificial Sequence
  Description of Artificial Sequence: Synthetic oligonucleotide
gcuuaaguacaagggguuu

SEQ ID NO: 2196750 - RNA, 19 nt, Artificial Sequence
  Description of Artificial Sequence: Synthetic oligonucleotide
cgaguggaaugaauuugaa

SEQ ID NO: 2196751 - RNA, 19 nt, Artificial Sequence
  Description of Artificial Sequence: Synthetic oligonucleotide
gggguuucucaaagaaaau

SEQ ID NO: 2196752 - RNA, 19 nt, Artificial Sequence
  Description of Artificial Sequence: Synthetic oligonucleotide
cgauacuaagauccaaauu

SEQ ID NO: 2196753 - RNA, 19 nt, Artificial Sequence
  Description of Artificial Sequence: Synthetic oligonucleotide
accggacaucaaacaucuu

SEQ ID NO: 2196754 - RNA, 19 nt, Artificial Sequence
  Description of Artificial Sequence: Synthetic oligonucleotide
ccugcugcguaggggaugu

SEQ ID NO: 2196755 - RNA, 19 nt, Artificial Sequence
  Description of Artificial Sequence: Synthetic oligonucleotide
uuucaaaucagccaggagg

SEQ ID NO: 2196756 - RNA, 19 nt, Artificial Sequence
  Description of Artificial Sequence: Synthetic oligonucleotide
ugaugauucucuaagacag

SEQ ID NO: 2196757 - RNA, 19 nt, Artificial Sequence
  Description of Artificial Sequence: Synthetic oligonucleotide
agaauaauuaucaaggagg

SEQ ID NO: 2196758 - RNA, 19 nt, Artificial Sequence
  Description of Artificial Sequence: Synthetic oligonucleotide
uucucaguaguucagaugc

SEQ ID NO: 2196759 - RNA, 19 nt, Artificial Sequence
  Description of Artificial Sequence: Synthetic oligonucleotide
uguuccaacugucugaagg

SEQ ID NO: 2196760 - RNA, 19 nt, Artificial Sequence
  Description of Artificial Sequence: Synthetic oligonucleotide
acaauauagucuaugaagc

SEQ ID NO: 2196761 - RNA, 19 nt, Artificial Sequence
  Description of Artificial Sequence: Synthetic oligonucleotide
aaguaaaucacaaguauuc

SEQ ID NO: 2196762 - RNA, 19 nt, Artificial Sequence
  Description of Artificial Sequence: Synthetic oligonucleotide
ucuuggagcaacuugaagc

SEQ ID NO: 2196763 - RNA, 19 nt, Artificial Sequence
  Description of Artificial Sequence: Synthetic oligonucleotide
aagaacuccuccauuaucc

SEQ ID NO: 2196764 - RNA, 19 nt, Artificial Sequence
  Description of Artificial Sequence: Synthetic oligonucleotide
gaugccacaagcuauuucc

SEQ ID NO: 2196765 - RNA, 19 nt, Artificial Sequence
  Description of Artificial Sequence: Synthetic oligonucleotide
uccaaaguguccaagaugu

SEQ ID NO: 2196766 - RNA, 19 nt, Artificial Sequence
  Description of Artificial Sequence: Synthetic oligonucleotide
uaagguuaguucaaacugg

SEQ ID NO: 2196767 - RNA, 19 nt, Artificial Sequence
  Description of Artificial Sequence: Synthetic oligonucleotide
aaaguuuccucagaggcac

SEQ ID NO: 2196768 - RNA, 19 nt, Artificial Sequence
  Description of Artificial Sequence: Synthetic oligonucleotide
gaguggaugaacaauauag

SEQ ID NO: 2196769 - RNA, 19 nt, Artificial Sequence
  Description of Artificial Sequence: Synthetic oligonucleotide
aucacaaguauuccuuucc

SEQ ID NO: 2196770 - RNA, 19 nt, Artificial Sequence
  Description of Artificial Sequence: Synthetic oligonucleotide
aaggacaaugucaaugacc

SEQ ID NO: 2196771 - RNA, 19 nt, Artificial Sequence
  Description of Artificial Sequence: Synthetic oligonucleotide
aagucuccguaccagauag

SEQ ID NO: 2196772 - RNA, 19 nt, Artificial Sequence
  Description of Artificial Sequence: Synthetic oligonucleotide
ugaacaauauagucuauga

SEQ ID NO: 2196773 - RNA, 19 nt, Artificial Sequence
  Description of Artificial Sequence: Synthetic oligonucleotide
caaguauuccuuuccaugg

SEQ ID NO: 2196774 - RNA, 19 nt, Artificial Sequence
  Description of Artificial Sequence: Synthetic oligonucleotide
cuaagguuaguucaaacug

SEQ ID NO: 2196775 - RNA, 19 nt, Artificial Sequence
  Description of Artificial Sequence: Synthetic oligonucleotide
uucuuaguuuccaccaucg

SEQ ID NO: 2196776 - RNA, 19 nt, Artificial Sequence
  Description of Artificial Sequence: Synthetic oligonucleotide
uaauuaucaaggaggagga

SEQ ID NO: 2196777 - RNA, 19 nt, Artificial Sequence
  Description of Artificial Sequence: Synthetic oligonucleotide
aaucacaaguauuccuuuc

SEQ ID NO: 2196778 - RNA, 19 nt, Artificial Sequence
  Description of Artificial Sequence: Synthetic oligonucleotide
ucuaagguuaguucaaacu

SEQ ID NO: 2196779 - RNA, 19 nt, Artificial Sequence
  Description of Artificial Sequence: Synthetic oligonucleotide
accagauagggcuccaucc

SEQ ID NO: 2196780 - RNA, 19 nt, Artificial Sequence
  Description of Artificial Sequence: Synthetic oligonucleotide
aguaaaucacaaguauucc

SEQ ID NO: 2196781 - RNA, 19 nt, Artificial Sequence
  Description of Artificial Sequence: Synthetic oligonucleotide
uucaaaucagccaggaggu

SEQ ID NO: 2196782 - RNA, 19 nt, Artificial Sequence
  Description of Artificial Sequence: Synthetic oligonucleotide
auuggugagaucugcacag

SEQ ID NO: 2196783 - RNA, 19 nt, Artificial Sequence
  Description of Artificial Sequence: Synthetic oligonucleotide
ucugauucgcuucucaagu

SEQ ID NO: 2196784 - RNA, 19 nt, Artificial Sequence
  Description of Artificial Sequence: Synthetic oligonucleotide
augaccauuuuccuuaaag

SEQ ID NO: 2196785 - RNA, 19 nt, Artificial Sequence
  Description of Artificial Sequence: Synthetic oligonucleotide
cuuggagcaacuugaagcc

SEQ ID NO: 2196786 - RNA, 19 nt, Artificial Sequence
  Description of Artificial Sequence: Synthetic oligonucleotide
uucucuaagacagaggagu

SEQ ID NO: 2196787 - RNA, 19 nt, Artificial Sequence
  Description of Artificial Sequence: Synthetic oligonucleotide
ucaaugaccauuuuccuua

SEQ ID NO: 2196788 - RNA, 19 nt, Artificial Sequence
  Description of Artificial Sequence: Synthetic oligonucleotide
uccacucaaaagcaacugg

SEQ ID NO: 2196789 - RNA, 19 nt, Artificial Sequence
  Description of Artificial Sequence: Synthetic oligonucleotide
uaaagauugucuuugcuuu

SEQ ID NO: 2196790 - RNA, 19 nt, Artificial Sequence
  Description of Artificial Sequence: Synthetic oligonucleotide
augggacuuaucuccaugc

SEQ ID NO: 2196791 - RNA, 19 nt, Artificial Sequence
  Description of Artificial Sequence: Synthetic oligonucleotide
cagaauaauuaucaaggag

SEQ ID NO: 2196792 - RNA, 19 nt, Artificial Sequence
  Description of Artificial Sequence: Synthetic oligonucleotide
agcaacuugaagcccacgg

SEQ ID NO: 2196793 - RNA, 19 nt, Artificial Sequence
  Description of Artificial Sequence: Synthetic oligonucleotide
ugcuuugacaugucugucg

SEQ ID NO: 2196794 - RNA, 19 nt, Artificial Sequence
  Description of Artificial Sequence: Synthetic oligonucleotide
cagaugaugauucucuaag

SEQ ID NO: 2196795 - RNA, 19 nt, Artificial Sequence
  Description of Artificial Sequence: Synthetic oligonucleotide
ucagaauaauuaucaagga

SEQ ID NO: 2196796 - RNA, 19 nt, Artificial Sequence
  Description of Artificial Sequence: Synthetic oligonucleotide
ugucgcaaggacaauguca

SEQ ID NO: 2196797 - RNA, 19 nt, Artificial Sequence
  Description of Artificial Sequence: Synthetic oligonucleotide
caucguuuucaaaucagcc

SEQ ID NO: 2196798 - RNA, 19 nt, Artificial Sequence
  Description of Artificial Sequence: Synthetic oligonucleotide
uuuggucagauucuggaaa

SEQ ID NO: 2196799 - RNA, 19 nt, Artificial Sequence
  Description of Artificial Sequence: Synthetic oligonucleotide
uaguucagaugccacaagc

SEQ ID NO: 2196800 - RNA, 19 nt, Artificial Sequence
  Description of Artificial Sequence: Synthetic oligonucleotide
ugugcuuugacaugucugu

SEQ ID NO: 2196801 - RNA, 19 nt, Artificial Sequence
  Description of Artificial Sequence: Synthetic oligonucleotide
acaguuguccacucaaaag

SEQ ID NO: 2196802 - RNA, 19 nt, Artificial Sequence
  Description of Artificial Sequence: Synthetic oligonucleotide
uuugcuccgagaaaguaaa

SEQ ID NO: 2196803 - RNA, 19 nt, Artificial Sequence
  Description of Artificial Sequence: Synthetic oligonucleotide
uauuuccaccgucagucgg

SEQ ID NO: 2196804 - RNA, 19 nt, Artificial Sequence
  Description of Artificial Sequence: Synthetic oligonucleotide
ugauucucuaagacagagg

SEQ ID NO: 2196805 - RNA, 19 nt, Artificial Sequence
  Description of Artificial Sequence: Synthetic oligonucleotide
caauauagucuaugaagcc

SEQ ID NO: 2196806 - RNA, 19 nt, Artificial Sequence
  Description of Artificial Sequence: Synthetic oligonucleotide
aaugcaaaguuuccucaga

SEQ ID NO: 2196807 - RNA, 19 nt, Artificial Sequence
  Description of Artificial Sequence: Synthetic oligonucleotide
aucaggguguacgaggucc

SEQ ID NO: 2196808 - RNA, 19 nt, Artificial Sequence
  Description of Artificial Sequence: Synthetic oligonucleotide
ugcaccauauucuggagga

SEQ ID NO: 2196809 - RNA, 19 nt, Artificial Sequence
  Description of Artificial Sequence: Synthetic oligonucleotide
uuuccuuaaagauugucuu

SEQ ID NO: 2196810 - RNA, 19 nt, Artificial Sequence
  Description of Artificial Sequence: Synthetic oligonucleotide
augaugauucucuaagaca

SEQ ID NO: 2196811 - RNA, 19 nt, Artificial Sequence
  Description of Artificial Sequence: Synthetic oligonucleotide
aucguuuucaaaucagcca

SEQ ID NO: 2196812 - RNA, 19 nt, Artificial Sequence
  Description of Artificial Sequence: Synthetic oligonucleotide
ugcaaaguuuccucagagg

SEQ ID NO: 2196813 - RNA, 19 nt, Artificial Sequence
  Description of Artificial Sequence: Synthetic oligonucleotide
uuccucuaagguuaguuca

SEQ ID NO: 2196814 - RNA, 19 nt, Artificial Sequence
  Description of Artificial Sequence: Synthetic oligonucleotide
uccuuaaagauugucuuug

SEQ ID NO: 2196815 - RNA, 19 nt, Artificial Sequence
  Description of Artificial Sequence: Synthetic oligonucleotide
uuucaguuuggcccugccg

SEQ ID NO: 2196816 - RNA, 19 nt, Artificial Sequence
  Description of Artificial Sequence: Synthetic oligonucleotide
gaaugcaaaguuuccucag

SEQ ID NO: 2196817 - RNA, 19 nt, Artificial Sequence
  Description of Artificial Sequence: Synthetic oligonucleotide
gcaaaguuuccucagaggc

SEQ ID NO: 2196818 - RNA, 19 nt, Artificial Sequence
  Description of Artificial Sequence: Synthetic oligonucleotide
uccuacagaggcauugugc

SEQ ID NO: 2196819 - RNA, 19 nt, Artificial Sequence
  Description of Artificial Sequence: Synthetic oligonucleotide
ucauuacuggaaugcaaag

SEQ ID NO: 2196820 - RNA, 19 nt, Artificial Sequence
  Description of Artificial Sequence: Synthetic oligonucleotide
ucacgauuguccuccaaag

SEQ ID NO: 2196821 - RNA, 19 nt, Artificial Sequence
  Description of Artificial Sequence: Synthetic oligonucleotide
auuaucaaggaggaggaca

SEQ ID NO: 2196822 - RNA, 19 nt, Artificial Sequence
  Description of Artificial Sequence: Synthetic oligonucleotide
aacaguuguccacucaaaa

SEQ ID NO: 2196823 - RNA, 19 nt, Artificial Sequence
  Description of Artificial Sequence: Synthetic oligonucleotide
ugauucgcuucucaaguca

SEQ ID NO: 2196824 - RNA, 19 nt, Artificial Sequence
  Description of Artificial Sequence: Synthetic oligonucleotide
uccauuauccggucugucc

SEQ ID NO: 2196825 - RNA, 19 nt, Artificial Sequence
  Description of Artificial Sequence: Synthetic oligonucleotide
caacuugaagcccacggcc

SEQ ID NO: 2196826 - RNA, 19 nt, Artificial Sequence
  Description of Artificial Sequence: Synthetic oligonucleotide
ucuaugaagcccaccugug

SEQ ID NO: 2196827 - RNA, 19 nt, Artificial Sequence
  Description of Artificial Sequence: Synthetic oligonucleotide
uucagaugccacaagcuau

SEQ ID NO: 2196828 - RNA, 19 nt, Artificial Sequence
  Description of Artificial Sequence: Synthetic oligonucleotide
aguuucuucuuggagcaac

SEQ ID NO: 2196829 - RNA, 19 nt, Artificial Sequence
  Description of Artificial Sequence: Synthetic oligonucleotide
acaagcuauuuccaccguc

SEQ ID NO: 2196830 - RNA, 19 nt, Artificial Sequence
  Description of Artificial Sequence: Synthetic oligonucleotide
ugcgggaugaaagucuccg

SEQ ID NO: 2196831 - RNA, 19 nt, Artificial Sequence
  Description of Artificial Sequence: Synthetic oligonucleotide
ucagucgguacucucgcug

SEQ ID NO: 2196832 - RNA, 19 nt, Artificial Sequence
  Description of Artificial Sequence: Synthetic oligonucleotide
ucugucgcaaggacaaugu

SEQ ID NO: 2196833 - RNA, 19 nt, Artificial Sequence
  Description of Artificial Sequence: Synthetic oligonucleotide
ugcucugguaccacucacg

SEQ ID NO: 2196834 - RNA, 19 nt, Artificial Sequence
  Description of Artificial Sequence: Synthetic oligonucleotide
guggaugaacaauauaguc

SEQ ID NO: 2196835 - RNA, 19 nt, Artificial Sequence
  Description of Artificial Sequence: Synthetic oligonucleotide
gucguuguaauguucucug

SEQ ID NO: 2196836 - RNA, 19 nt, Artificial Sequence
  Description of Artificial Sequence: Synthetic oligonucleotide
gagggagcuggauacugcg

SEQ ID NO: 2196837 - RNA, 19 nt, Artificial Sequence
  Description of Artificial Sequence: Synthetic oligonucleotide
guaauguucucugauucgc

SEQ ID NO: 2196838 - RNA, 19 nt, Artificial Sequence
  Description of Artificial Sequence: Synthetic oligonucleotide
aauguucucugauucgcuu

SEQ ID NO: 2196839 - RNA, 19 nt, Artificial Sequence
  Description of Artificial Sequence: Synthetic oligonucleotide
uggagcaacuugaagccca

SEQ ID NO: 2196840 - RNA, 19 nt, Artificial Sequence
  Description of Artificial Sequence: Synthetic oligonucleotide
uggaaugcaaaguuuccuc

SEQ ID NO: 2196841 - RNA, 19 nt, Artificial Sequence
  Description of Artificial Sequence: Synthetic oligonucleotide
aguauuccuuuccauggug

SEQ ID NO: 2196842 - RNA, 19 nt, Artificial Sequence
  Description of Artificial Sequence: Synthetic oligonucleotide
uguccacucaaaagcaacu

SEQ ID NO: 2196843 - RNA, 19 nt, Artificial Sequence
  Description of Artificial Sequence: Synthetic oligonucleotide
uaagacagaggagucguug

SEQ ID NO: 2196844 - RNA, 19 nt, Artificial Sequence
  Description of Artificial Sequence: Synthetic oligonucleotide
gaagcccacggccagauga

SEQ ID NO: 2196845 - RNA, 19 nt, Artificial Sequence
  Description of Artificial Sequence: Synthetic oligonucleotide
aucuccaugccacguuccc

SEQ ID NO: 2196846 - RNA, 19 nt, Artificial Sequence
  Description of Artificial Sequence: Synthetic oligonucleotide
gaacaauauagucuaugaa

SEQ ID NO: 2196847 - RNA, 19 nt, Artificial Sequence
  Description of Artificial Sequence: Synthetic oligonucleotide
ugaaagucuccguaccaga

SEQ ID NO: 2196848 - RNA, 19 nt, Artificial Sequence
  Description of Artificial Sequence: Synthetic oligonucleotide
acucaaaagcaacuggaau

SEQ ID NO: 2196849 - RNA, 19 nt, Artificial Sequence
  Description of Artificial Sequence: Synthetic oligonucleotide
ugacucgccaucuuccucu

SEQ ID NO: 2196850 - RNA, 19 nt, Artificial Sequence
  Description of Artificial Sequence: Synthetic oligonucleotide
cauauucuggaggaccugg

SEQ ID NO: 2196851 - RNA, 19 nt, Artificial Sequence
  Description of Artificial Sequence: Synthetic oligonucleotide
ucaggguguacgagguccg

SEQ ID NO: 2196852 - RNA, 19 nt, Artificial Sequence
  Description of Artificial Sequence: Synthetic oligonucleotide
agaugaugauucucuaaga

SEQ ID NO: 2196853 - RNA, 19 nt, Artificial Sequence
  Description of Artificial Sequence: Synthetic oligonucleotide
uccugucagaauaauuauc

SEQ ID NO: 2196854 - RNA, 19 nt, Artificial Sequence
  Description of Artificial Sequence: Synthetic oligonucleotide
cucugauucgcuucucaag

SEQ ID NO: 2196855 - RNA, 19 nt, Artificial Sequence
  Description of Artificial Sequence: Synthetic oligonucleotide
uacugcgggaugaaagucu

SEQ ID NO: 2196856 - RNA, 19 nt, Artificial Sequence
  Description of Artificial Sequence: Synthetic oligonucleotide
uaauguucucugauucgcu

SEQ ID NO: 2196857 - RNA, 19 nt, Artificial Sequence
  Description of Artificial Sequence: Synthetic oligonucleotide
cucgcugcaacaguugucc

SEQ ID NO: 2196858 - RNA, 19 nt, Artificial Sequence
  Description of Artificial Sequence: Synthetic oligonucleotide
gaugaaagucuccguacca

SEQ ID NO: 2196859 - RNA, 19 nt, Artificial Sequence
  Description of Artificial Sequence: Synthetic oligonucleotide
ucuucauuacuggaaugca

SEQ ID NO: 2196860 - RNA, 19 nt, Artificial Sequence
  Description of Artificial Sequence: Synthetic oligonucleotide
auccggucuguccacuggc

SEQ ID NO: 2196861 - RNA, 19 nt, Artificial Sequence
  Description of Artificial Sequence: Synthetic oligonucleotide
aaaucagccaggagguuca

SEQ ID NO: 2196862 - RNA, 19 nt, Artificial Sequence
  Description of Artificial Sequence: Synthetic oligonucleotide
cuuccucuaagguuaguuc

SEQ ID NO: 2196863 - RNA, 19 nt, Artificial Sequence
  Description of Artificial Sequence: Synthetic oligonucleotide
uccaccgucagucgguacu

SEQ ID NO: 2196864 - RNA, 19 nt, Artificial Sequence
  Description of Artificial Sequence: Synthetic oligonucleotide
guuaguucaaacuggaauu

SEQ ID NO: 2196865 - RNA, 19 nt, Artificial Sequence
  Description of Artificial Sequence: Synthetic oligonucleotide
aagguuaguucaaacugga

SEQ ID NO: 2196866 - RNA, 19 nt, Artificial Sequence
  Description of Artificial Sequence: Synthetic oligonucleotide
cuccgagaaaguaaaucac

SEQ ID NO: 2196867 - RNA, 19 nt, Artificial Sequence
  Description of Artificial Sequence: Synthetic oligonucleotide
cagauucuggaaaauguca

SEQ ID NO: 2196868 - RNA, 19 nt, Artificial Sequence
  Description of Artificial Sequence: Synthetic oligonucleotide
ggaugaacaauauagucua

SEQ ID NO: 2196869 - RNA, 19 nt, Artificial Sequence
  Description of Artificial Sequence: Synthetic oligonucleotide
gacuuaucuccaugccacg

SEQ ID NO: 2196870 - RNA, 19 nt, Artificial Sequence
  Description of Artificial Sequence: Synthetic oligonucleotide
ugggacuuaucuccaugcc

SEQ ID NO: 2196871 - RNA, 19 nt, Artificial Sequence
  Description of Artificial Sequence: Synthetic oligonucleotide
uggugagaucugcacagug

SEQ ID NO: 2196872 - RNA, 19 nt, Artificial Sequence
  Description of Artificial Sequence: Synthetic oligonucleotide
uucucagugucugacucgc

SEQ ID NO: 2196873 - RNA, 19 nt, Artificial Sequence
  Description of Artificial Sequence: Synthetic oligonucleotide
ucucuaagacagaggaguc

SEQ ID NO: 2196874 - RNA, 19 nt, Artificial Sequence
  Description of Artificial Sequence: Synthetic oligonucleotide
uuuucaguuuggcccugcc

SEQ ID NO: 2196875 - RNA, 19 nt, Artificial Sequence
  Description of Artificial Sequence: Synthetic oligonucleotide
gauucgcuucucaagucag

SEQ ID NO: 2196876 - RNA, 19 nt, Artificial Sequence
  Description of Artificial Sequence: Synthetic oligonucleotide
acgagguccgcccaugucu

SEQ ID NO: 2196877 - RNA, 19 nt, Artificial Sequence
  Description of Artificial Sequence: Synthetic oligonucleotide
ugugcucugguaccacuca

SEQ ID NO: 2196878 - RNA, 19 nt, Artificial Sequence
  Description of Artificial Sequence: Synthetic oligonucleotide
aaagucuccguaccagaua

SEQ ID NO: 2196879 - RNA, 19 nt, Artificial Sequence
  Description of Artificial Sequence: Synthetic oligonucleotide
cuagaguggaugaacaaua

SEQ ID NO: 2196880 - RNA, 19 nt, Artificial Sequence
  Description of Artificial Sequence: Synthetic oligonucleotide
caagcuauuuccaccguca

SEQ ID NO: 2196881 - RNA, 19 nt, Artificial Sequence
  Description of Artificial Sequence: Synthetic oligonucleotide
cuccaugccacguucccgc

SEQ ID NO: 2196882 - RNA, 19 nt, Artificial Sequence
  Description of Artificial Sequence: Synthetic oligonucleotide
ucuccguaccagauagggc

SEQ ID NO: 2196883 - RNA, 19 nt, Artificial Sequence
  Description of Artificial Sequence: Synthetic oligonucleotide
gauacugcgggaugaaagu

SEQ ID NO: 2196884 - RNA, 19 nt, Artificial Sequence
  Description of Artificial Sequence: Synthetic oligonucleotide
cucuaagguuaguucaaac

SEQ ID NO: 2196885 - RNA, 19 nt, Artificial Sequence
  Description of Artificial Sequence: Synthetic oligonucleotide
aguggaugaacaauauagu

SEQ ID NO: 2196886 - RNA, 19 nt, Artificial Sequence
  Description of Artificial Sequence: Synthetic oligonucleotide
uagaguggaugaacaauau

SEQ ID NO: 2196887 - RNA, 19 nt, Artificial Sequence
  Description of Artificial Sequence: Synthetic oligonucleotide
cucuaagacagaggagucg

SEQ ID NO: 2196888 - RNA, 19 nt, Artificial Sequence
  Description of Artificial Sequence: Synthetic oligonucleotide
ucuuaguuuccaccaucgu

SEQ ID NO: 2196889 - RNA, 19 nt, Artificial Sequence
  Description of Artificial Sequence: Synthetic oligonucleotide
acgaaagggguccucuucu

SEQ ID NO: 2196890 - RNA, 19 nt, Artificial Sequence
  Description of Artificial Sequence: Synthetic oligonucleotide
caccauauucuggaggacc

SEQ ID NO: 2196891 - RNA, 19 nt, Artificial Sequence
  Description of Artificial Sequence: Synthetic oligonucleotide
uuccuacagaggcauugug

SEQ ID NO: 2196892 - RNA, 19 nt, Artificial Sequence
  Description of Artificial Sequence: Synthetic oligonucleotide
aguucucaguaguucagau

SEQ ID NO: 2196893 - RNA, 19 nt, Artificial Sequence
  Description of Artificial Sequence: Synthetic oligonucleotide
cuucuuaguuuccaccauc

SEQ ID NO: 2196894 - RNA, 19 nt, Artificial Sequence
  Description of Artificial Sequence: Synthetic oligonucleotide
uucgcuucucaagucagcu

SEQ ID NO: 2196895 - RNA, 19 nt, Artificial Sequence
  Description of Artificial Sequence: Synthetic oligonucleotide
aguaguucagaugccacaa

SEQ ID NO: 2196896 - RNA, 19 nt, Artificial Sequence
  Description of Artificial Sequence: Synthetic oligonucleotide
uauagucuaugaagcccac

SEQ ID NO: 2196897 - RNA, 19 nt, Artificial Sequence
  Description of Artificial Sequence: Synthetic oligonucleotide
guaccacucacgauugucc

SEQ ID NO: 2196898 - RNA, 19 nt, Artificial Sequence
  Description of Artificial Sequence: Synthetic oligonucleotide
uccggucuguccacuggcg

SEQ ID NO: 2196899 - RNA, 19 nt, Artificial Sequence
  Description of Artificial Sequence: Synthetic oligonucleotide
auccugucagaauaauuau

SEQ ID NO: 2196900 - RNA, 19 nt, Artificial Sequence
  Description of Artificial Sequence: Synthetic oligonucleotide
caucccacgaaaggggucc

SEQ ID NO: 2196901 - RNA, 19 nt, Artificial Sequence
  Description of Artificial Sequence: Synthetic oligonucleotide
ugcuccgagaaaguaaauc

SEQ ID NO: 2196902 - RNA, 19 nt, Artificial Sequence
  Description of Artificial Sequence: Synthetic oligonucleotide
ucucugauucgcuucucaa

SEQ ID NO: 2196903 - RNA, 19 nt, Artificial Sequence
  Description of Artificial Sequence: Synthetic oligonucleotide
ugcaacaguuguccacuca

SEQ ID NO: 2196904 - RNA, 19 nt, Artificial Sequence
  Description of Artificial Sequence: Synthetic oligonucleotide
ccacaagcuauuuccaccg

SEQ ID NO: 2196905 - RNA, 19 nt, Artificial Sequence
  Description of Artificial Sequence: Synthetic oligonucleotide
caaaucagccaggagguuc

SEQ ID NO: 2196906 - RNA, 19 nt, Artificial Sequence
  Description of Artificial Sequence: Synthetic oligonucleotide
aacuugaagcccacggcca

SEQ ID NO: 2196907 - RNA, 19 nt, Artificial Sequence
  Description of Artificial Sequence: Synthetic oligonucleotide
caaaguuuccucagaggca

SEQ ID NO: 2196908 - RNA, 19 nt, Artificial Sequence
  Description of Artificial Sequence: Synthetic oligonucleotide
ggaugaaagucuccguacc

SEQ ID NO: 2196909 - RNA, 19 nt, Artificial Sequence
  Description of Artificial Sequence: Synthetic oligonucleotide
ggcaagaggagggagcugg

SEQ ID NO: 2196910 - RNA, 19 nt, Artificial Sequence
  Description of Artificial Sequence: Synthetic oligonucleotide
uccaucccacgaaaggggu

SEQ ID NO: 2196911 - RNA, 19 nt, Artificial Sequence
  Description of Artificial Sequence: Synthetic oligonucleotide
ggauacugcgggaugaaag

SEQ ID NO: 2196912 - RNA, 19 nt, Artificial Sequence
  Description of Artificial Sequence: Synthetic oligonucleotide
auacugcgggaugaaaguc

SEQ ID NO: 2196913 - RNA, 19 nt, Artificial Sequence
  Description of Artificial Sequence: Synthetic oligonucleotide
ucaguuuggcccugccggc

SEQ ID NO: 2196914 - RNA, 19 nt, Artificial Sequence
  Description of Artificial Sequence: Synthetic oligonucleotide
caagucagcuuguuccaac

SEQ ID NO: 2196915 - RNA, 19 nt, Artificial Sequence
  Description of Artificial Sequence: Synthetic oligonucleotide
aguguccaagauguccugg

SEQ ID NO: 2196916 - RNA, 19 nt, Artificial Sequence
  Description of Artificial Sequence: Synthetic oligonucleotide
ucuccaugccacguucccg

SEQ ID NO: 2196917 - RNA, 19 nt, Artificial Sequence
  Description of Artificial Sequence: Synthetic oligonucleotide
cacggccagaugaugauuc

SEQ ID NO: 2196918 - RNA, 19 nt, Artificial Sequence
  Description of Artificial Sequence: Synthetic oligonucleotide
ugggauuggugagaucugc

SEQ ID NO: 2196919 - RNA, 19 nt, Artificial Sequence
  Description of Artificial Sequence: Synthetic oligonucleotide
agucguuguaauguucucu

SEQ ID NO: 2196920 - RNA, 19 nt, Artificial Sequence
  Description of Artificial Sequence: Synthetic oligonucleotide
ucuuccucuaagguuaguu

SEQ ID NO: 2196921 - RNA, 19 nt, Artificial Sequence
  Description of Artificial Sequence: Synthetic oligonucleotide
accggagcuugucaccuuc

SEQ ID NO: 2196922 - RNA, 19 nt, Artificial Sequence
  Description of Artificial Sequence: Synthetic oligonucleotide
gacaccggagcuugucacc

SEQ ID NO: 2196923 - RNA, 19 nt, Artificial Sequence
  Description of Artificial Sequence: Synthetic oligonucleotide
caugggacuuaucuccaug

SEQ ID NO: 2196924 - RNA, 19 nt, Artificial Sequence
  Description of Artificial Sequence: Synthetic oligonucleotide
cuccguaccagauagggcu

SEQ ID NO: 2196925 - RNA, 19 nt, Artificial Sequence
  Description of Artificial Sequence: Synthetic oligonucleotide
gcuuugacaugucugucgc

SEQ ID NO: 2196926 - RNA, 19 nt, Artificial Sequence
  Description of Artificial Sequence: Synthetic oligonucleotide
ugccacaagcuauuuccac

SEQ ID NO: 2196927 - RNA, 19 nt, Artificial Sequence
  Description of Artificial Sequence: Synthetic oligonucleotide
auucgcuucucaagucagc

SEQ ID NO: 2196928 - RNA, 19 nt, Artificial Sequence
  Description of Artificial Sequence: Synthetic oligonucleotide
cagugcaccauauucugga

SEQ ID NO: 2196929 - RNA, 19 nt, Artificial Sequence
  Description of Artificial Sequence: Synthetic oligonucleotide
agauagggcuccaucccac

SEQ ID NO: 2196930 - RNA, 19 nt, Artificial Sequence
  Description of Artificial Sequence: Synthetic oligonucleotide
ucguuguaauguucucuga

SEQ ID NO: 2196931 - RNA, 19 nt, Artificial Sequence
  Description of Artificial Sequence: Synthetic oligonucleotide
cagucgguacucucgcugc

SEQ ID NO: 2196932 - RNA, 19 nt, Artificial Sequence
  Description of Artificial Sequence: Synthetic oligonucleotide
uuauccggucuguccacug

SEQ ID NO: 2196933 - RNA, 19 nt, Artificial Sequence
  Description of Artificial Sequence: Synthetic oligonucleotide
acagaggagucguuguaau

SEQ ID NO: 2196934 - RNA, 19 nt, Artificial Sequence
  Description of Artificial Sequence: Synthetic oligonucleotide
uggucauccggugcagggg

SEQ ID NO: 2196935 - RNA, 19 nt, Artificial Sequence
  Description of Artificial Sequence: Synthetic oligonucleotide
accaucguuuucaaaucag

SEQ ID NO: 2196936 - RNA, 19 nt, Artificial Sequence
  Description of Artificial Sequence: Synthetic oligonucleotide
ggaaugcaaaguuuccuca

SEQ ID NO: 2196937 - RNA, 19 nt, Artificial Sequence
  Description of Artificial Sequence: Synthetic oligonucleotide
ggacuuaucuccaugccac

SEQ ID NO: 2196938 - RNA, 19 nt, Artificial Sequence
  Description of Artificial Sequence: Synthetic oligonucleotide
uuuccuacagaggcauugu

SEQ ID NO: 2196939 - RNA, 19 nt, Artificial Sequence
  Description of Artificial Sequence: Synthetic oligonucleotide
uacucucgcugcaacaguu

SEQ ID NO: 2196940 - RNA, 19 nt, Artificial Sequence
  Description of Artificial Sequence: Synthetic oligonucleotide
gacaaugucaaugaccauu

SEQ ID NO: 2196941 - RNA, 19 nt, Artificial Sequence
  Description of Artificial Sequence: Synthetic oligonucleotide
ggcuccaucccacgaaagg

SEQ ID NO: 2196942 - RNA, 19 nt, Artificial Sequence
  Description of Artificial Sequence: Synthetic oligonucleotide
cuucauuacuggaaugcaa

SEQ ID NO: 2196943 - RNA, 19 nt, Artificial Sequence
  Description of Artificial Sequence: Synthetic oligonucleotide
acaaugucaaugaccauuu

SEQ ID NO: 2196944 - RNA, 19 nt, Artificial Sequence
  Description of Artificial Sequence: Synthetic oligonucleotide
gguuaguucaaacuggaau

SEQ ID NO: 2196945 - RNA, 19 nt, Artificial Sequence
  Description of Artificial Sequence: Synthetic oligonucleotide
agcuauuuccaccgucagu

SEQ ID NO: 2196946 - RNA, 19 nt, Artificial Sequence
  Description of Artificial Sequence: Synthetic oligonucleotide
ggcacuuuugcuccgagaa

SEQ ID NO: 2196947 - RNA, 19 nt, Artificial Sequence
  Description of Artificial Sequence: Synthetic oligonucleotide
agaguggaugaacaauaua

SEQ ID NO: 2196948 - RNA, 19 nt, Artificial Sequence
  Description of Artificial Sequence: Synthetic oligonucleotide
caaggacaaugucaaugac

SEQ ID NO: 2196949 - RNA, 19 nt, Artificial Sequence
  Description of Artificial Sequence: Synthetic oligonucleotide
aggguguacgagguccgcc

SEQ ID NO: 2196950 - RNA, 19 nt, Artificial Sequence
  Description of Artificial Sequence: Synthetic oligonucleotide
auucucuaagacagaggag

SEQ ID NO: 2196951 - RNA, 19 nt, Artificial Sequence
  Description of Artificial Sequence: Synthetic oligonucleotide
gucgcaaggacaaugucaa

SEQ ID NO: 2196952 - RNA, 19 nt, Artificial Sequence
  Description of Artificial Sequence: Synthetic oligonucleotide
accgucagucgguacucuc

SEQ ID NO: 2196953 - RNA, 19 nt, Artificial Sequence
  Description of Artificial Sequence: Synthetic oligonucleotide
ccaucguuuucaaaucagc

SEQ ID NO: 2196954 - RNA, 19 nt, Artificial Sequence
  Description of Artificial Sequence: Synthetic oligonucleotide
gcaacuugaagcccacggc

SEQ ID NO: 2196955 - RNA, 19 nt, Artificial Sequence
  Description of Artificial Sequence: Synthetic oligonucleotide
cauuauccggucuguccac

SEQ ID NO: 2196956 - RNA, 19 nt, Artificial Sequence
  Description of Artificial Sequence: Synthetic oligonucleotide
ggauuggugagaucugcac

SEQ ID NO: 2196957 - RNA, 19 nt, Artificial Sequence
  Description of Artificial Sequence: Synthetic oligonucleotide
accauauucuggaggaccu

SEQ ID NO: 2196958 - RNA, 19 nt, Artificial Sequence
  Description of Artificial Sequence: Synthetic oligonucleotide
gucuaugaagcccaccugu

SEQ ID NO: 2196959 - RNA, 19 nt, Artificial Sequence
  Description of Artificial Sequence: Synthetic oligonucleotide
ucgguacucucgcugcaac

SEQ ID NO: 2196960 - RNA, 19 nt, Artificial Sequence
  Description of Artificial Sequence: Synthetic oligonucleotide
caugguggaguucucagua

SEQ ID NO: 2196961 - RNA, 19 nt, Artificial Sequence
  Description of Artificial Sequence: Synthetic oligonucleotide
gggauugugcucugguacc

SEQ ID NO: 2196962 - RNA, 19 nt, Artificial Sequence
  Description of Artificial Sequence: Synthetic oligonucleotide
aagggguccucuucuucau

SEQ ID NO: 2196963 - RNA, 19 nt, Artificial Sequence
  Description of Artificial Sequence: Synthetic oligonucleotide
cagaggagucguuguaaug

SEQ ID NO: 2196964 - RNA, 19 nt, Artificial Sequence
  Description of Artificial Sequence: Synthetic oligonucleotide
ucauccggugcaggggagg

SEQ ID NO: 2196965 - RNA, 19 nt, Artificial Sequence
  Description of Artificial Sequence: Synthetic oligonucleotide
ucucgcugcaacaguuguc

SEQ ID NO: 2196966 - RNA, 19 nt, Artificial Sequence
  Description of Artificial Sequence: Synthetic oligonucleotide
aguggcuucgugggauugg

SEQ ID NO: 2196967 - RNA, 19 nt, Artificial Sequence
  Description of Artificial Sequence: Synthetic oligonucleotide
auagggcuccaucccacga

SEQ ID NO: 2196968 - RNA, 19 nt, Artificial Sequence
  Description of Artificial Sequence: Synthetic oligonucleotide
uguacgagguccgcccaug

SEQ ID NO: 2196969 - RNA, 19 nt, Artificial Sequence
  Description of Artificial Sequence: Synthetic oligonucleotide
agcuggauacugcgggaug

SEQ ID NO: 2196970 - RNA, 19 nt, Artificial Sequence
  Description of Artificial Sequence: Synthetic oligonucleotide
guccacucaaaagcaacug

SEQ ID NO: 2196971 - RNA, 19 nt, Artificial Sequence
  Description of Artificial Sequence: Synthetic oligonucleotide
aggacaccggagcuuguca

SEQ ID NO: 2196972 - RNA, 19 nt, Artificial Sequence
  Description of Artificial Sequence: Synthetic oligonucleotide
cuuaaagauugucuuugcu

SEQ ID NO: 2196973 - RNA, 19 nt, Artificial Sequence
  Description of Artificial Sequence: Synthetic oligonucleotide
ggucagauucuggaaaaug

SEQ ID NO: 2196974 - RNA, 19 nt, Artificial Sequence
  Description of Artificial Sequence: Synthetic oligonucleotide
ggcauugugcuugucacac

SEQ ID NO: 2196975 - RNA, 19 nt, Artificial Sequence
  Description of Artificial Sequence: Synthetic oligonucleotide
gucugucgcaaggacaaug

SEQ ID NO: 2196976 - RNA, 19 nt, Artificial Sequence
  Description of Artificial Sequence: Synthetic oligonucleotide
cacucaaaagcaacuggaa

SEQ ID NO: 2196977 - RNA, 19 nt, Artificial Sequence
  Description of Artificial Sequence: Synthetic oligonucleotide
aggagucguuguaauguuc

SEQ ID NO: 2196978 - RNA, 19 nt, Artificial Sequence
  Description of Artificial Sequence: Synthetic oligonucleotide
caguaguucagaugccaca

SEQ ID NO: 2196979 - RNA, 19 nt, Artificial Sequence
  Description of Artificial Sequence: Synthetic oligonucleotide
gaugauucucuaagacaga

SEQ ID NO: 2196980 - RNA, 19 nt, Artificial Sequence
  Description of Artificial Sequence: Synthetic oligonucleotide
ccuuaaagauugucuuugc

SEQ ID NO: 2196981 - RNA, 19 nt, Artificial Sequence
  Description of Artificial Sequence: Synthetic oligonucleotide
cucacgauuguccuccaaa

SEQ ID NO: 2196982 - RNA, 19 nt, Artificial Sequence
  Description of Artificial Sequence: Synthetic oligonucleotide
ggcuucgugggauugguga

SEQ ID NO: 2196983 - RNA, 19 nt, Artificial Sequence
  Description of Artificial Sequence: Synthetic oligonucleotide
gauugucuuugcuuuuggu

SEQ ID NO: 2196984 - RNA, 19 nt, Artificial Sequence
  Description of Artificial Sequence: Synthetic oligonucleotide
cacgaaagggguccucuuc

SEQ ID NO: 2196985 - RNA, 19 nt, Artificial Sequence
  Description of Artificial Sequence: Synthetic oligonucleotide
gagucguuguaauguucuc

SEQ ID NO: 2196986 - RNA, 19 nt, Artificial Sequence
  Description of Artificial Sequence: Synthetic oligonucleotide
aagauguccugggcaucag

SEQ ID NO: 2196987 - RNA, 19 nt, Artificial Sequence
  Description of Artificial Sequence: Synthetic oligonucleotide
uuccaugguggaguucuca

SEQ ID NO: 2196988 - RNA, 19 nt, Artificial Sequence
  Description of Artificial Sequence: Synthetic oligonucleotide
gagguucaugugcuuugac

SEQ ID NO: 2196989 - RNA, 19 nt, Artificial Sequence
  Description of Artificial Sequence: Synthetic oligonucleotide
auuuccaccgucagucggu

SEQ ID NO: 2196990 - RNA, 19 nt, Artificial Sequence
  Description of Artificial Sequence: Synthetic oligonucleotide
ccaacugucugaaggcaag

SEQ ID NO: 2196991 - RNA, 19 nt, Artificial Sequence
  Description of Artificial Sequence: Synthetic oligonucleotide
uccguaccagauagggcuc

SEQ ID NO: 2196992 - RNA, 19 nt, Artificial Sequence
  Description of Artificial Sequence: Synthetic oligonucleotide
cuuaguuuccaccaucguu

SEQ ID NO: 2196993 - RNA, 19 nt, Artificial Sequence
  Description of Artificial Sequence: Synthetic oligonucleotide
cucaguaguucagaugcca

SEQ ID NO: 2196994 - RNA, 19 nt, Artificial Sequence
  Description of Artificial Sequence: Synthetic oligonucleotide
gggacuuaucuccaugcca

SEQ ID NO: 2196995 - RNA, 19 nt, Artificial Sequence
  Description of Artificial Sequence: Synthetic oligonucleotide
gacagaggagucguuguaa

SEQ ID NO: 2196996 - RNA, 19 nt, Artificial Sequence
  Description of Artificial Sequence: Synthetic oligonucleotide
ggcgguacagcugcagugg

SEQ ID NO: 2196997 - RNA, 19 nt, Artificial Sequence
  Description of Artificial Sequence: Synthetic oligonucleotide
uuguuccaacugucugaag

SEQ ID NO: 2196998 - RNA, 19 nt, Artificial Sequence
  Description of Artificial Sequence: Synthetic oligonucleotide
gcuucgugggauuggugag

SEQ ID NO: 2196999 - RNA, 19 nt, Artificial Sequence
  Description of Artificial Sequence: Synthetic oligonucleotide
ggguguacgagguccgccc

SEQ ID NO: 2197000 - RNA, 19 nt, Artificial Sequence
  Description of Artificial Sequence: Synthetic oligonucleotide
cuuggucauccggugcagg

SEQ ID NO: 2197001 - RNA, 19 nt, Artificial Sequence
  Description of Artificial Sequence: Synthetic oligonucleotide
uaguucaaacuggaauuuu

SEQ ID NO: 2197002 - RNA, 19 nt, Artificial Sequence
  Description of Artificial Sequence: Synthetic oligonucleotide
uucgugggauuggugagau

SEQ ID NO: 2197003 - RNA, 19 nt, Artificial Sequence
  Description of Artificial Sequence: Synthetic oligonucleotide
cugccggccuuccucuugg

SEQ ID NO: 2197004 - RNA, 19 nt, Artificial Sequence
  Description of Artificial Sequence: Synthetic oligonucleotide
cuugucaccuucuuaguuu

SEQ ID NO: 2197005 - RNA, 19 nt, Artificial Sequence
  Description of Artificial Sequence: Synthetic oligonucleotide
caccaucguuuucaaauca

SEQ ID NO: 2197006 - RNA, 19 nt, Artificial Sequence
  Description of Artificial Sequence: Synthetic oligonucleotide
gcaacaguuguccacucaa

SEQ ID NO: 2197007 - RNA, 19 nt, Artificial Sequence
  Description of Artificial Sequence: Synthetic oligonucleotide
acagaggcauugugcuugu

SEQ ID NO: 2197008 - RNA, 19 nt, Artificial Sequence
  Description of Artificial Sequence: Synthetic oligonucleotide
cauccggugcaggggaggg

SEQ ID NO: 2197009 - RNA, 19 nt, Artificial Sequence
  Description of Artificial Sequence: Synthetic oligonucleotide
cacaugggacuuaucucca

SEQ ID NO: 2197010 - RNA, 19 nt, Artificial Sequence
  Description of Artificial Sequence: Synthetic oligonucleotide
caagauguccugggcauca

SEQ ID NO: 2197011 - RNA, 19 nt, Artificial Sequence
  Description of Artificial Sequence: Synthetic oligonucleotide
auuauccggucuguccacu

SEQ ID NO: 2197012 - RNA, 19 nt, Artificial Sequence
  Description of Artificial Sequence: Synthetic oligonucleotide
cgcuucucaagucagcuug

SEQ ID NO: 2197013 - RNA, 19 nt, Artificial Sequence
  Description of Artificial Sequence: Synthetic oligonucleotide
auauucuggaggaccugga

SEQ ID NO: 2197014 - RNA, 19 nt, Artificial Sequence
  Description of Artificial Sequence: Synthetic oligonucleotide
ccgucagucgguacucucg

SEQ ID NO: 2197015 - RNA, 19 nt, Artificial Sequence
  Description of Artificial Sequence: Synthetic oligonucleotide
agggcuccaucccacgaaa

SEQ ID NO: 2197016 - RNA, 19 nt, Artificial Sequence
  Description of Artificial Sequence: Synthetic oligonucleotide
uccgcccaugucucccuag

SEQ ID NO: 2197017 - RNA, 19 nt, Artificial Sequence
  Description of Artificial Sequence: Synthetic oligonucleotide
acaccggagcuugucaccu

SEQ ID NO: 2197018 - RNA, 19 nt, Artificial Sequence
  Description of Artificial Sequence: Synthetic oligonucleotide
cagauagggcuccauccca

SEQ ID NO: 2197019 - RNA, 19 nt, Artificial Sequence
  Description of Artificial Sequence: Synthetic oligonucleotide
agucgguacucucgcugca

SEQ ID NO: 2197020 - RNA, 19 nt, Artificial Sequence
  Description of Artificial Sequence: Synthetic oligonucleotide
uuuccaugguggaguucuc

SEQ ID NO: 2197021 - RNA, 19 nt, Artificial Sequence
  Description of Artificial Sequence: Synthetic oligonucleotide
gagcaacuugaagcccacg

SEQ ID NO: 2197022 - RNA, 19 nt, Artificial Sequence
  Description of Artificial Sequence: Synthetic oligonucleotide
gucaaugaccauuuuccuu

SEQ ID NO: 2197023 - RNA, 19 nt, Artificial Sequence
  Description of Artificial Sequence: Synthetic oligonucleotide
acggccagaugaugauucu

SEQ ID NO: 2197024 - RNA, 19 nt, Artificial Sequence
  Description of Artificial Sequence: Synthetic oligonucleotide
uugaagcccacggccagau

SEQ ID NO: 2197025 - RNA, 19 nt, Artificial Sequence
  Description of Artificial Sequence: Synthetic oligonucleotide
accuggauccugucagaau

SEQ ID NO: 2197026 - RNA, 19 nt, Artificial Sequence
  Description of Artificial Sequence: Synthetic oligonucleotide
uuggugagaucugcacagu

SEQ ID NO: 2197027 - RNA, 19 nt, Artificial Sequence
  Description of Artificial Sequence: Synthetic oligonucleotide
acaugggacuuaucuccau

SEQ ID NO: 2197028 - RNA, 19 nt, Artificial Sequence
  Description of Artificial Sequence: Synthetic oligonucleotide
cguuuucaaaucagccagg

SEQ ID NO: 2197029 - RNA, 19 nt, Artificial Sequence
  Description of Artificial Sequence: Synthetic oligonucleotide
ccauuauccggucugucca

SEQ ID NO: 2197030 - RNA, 19 nt, Artificial Sequence
  Description of Artificial Sequence: Synthetic oligonucleotide
ugaagcccacggccagaug

SEQ ID NO: 2197031 - RNA, 19 nt, Artificial Sequence
  Description of Artificial Sequence: Synthetic oligonucleotide
cugucgcaaggacaauguc

SEQ ID NO: 2197032 - RNA, 19 nt, Artificial Sequence
  Description of Artificial Sequence: Synthetic oligonucleotide
gguaccacucacgauuguc

SEQ ID NO: 2197033 - RNA, 19 nt, Artificial Sequence
  Description of Artificial Sequence: Synthetic oligonucleotide
uggauacugcgggaugaaa

SEQ ID NO: 2197034 - RNA, 19 nt, Artificial Sequence
  Description of Artificial Sequence: Synthetic oligonucleotide
cugacucgccaucuuccuc

SEQ ID NO: 2197035 - RNA, 19 nt, Artificial Sequence
  Description of Artificial Sequence: Synthetic oligonucleotide
cugcgggaugaaagucucc

SEQ ID NO: 2197036 - RNA, 19 nt, Artificial Sequence
  Description of Artificial Sequence: Synthetic oligonucleotide
ggacaccggagcuugucac

SEQ ID NO: 2197037 - RNA, 19 nt, Artificial Sequence
  Description of Artificial Sequence: Synthetic oligonucleotide
ccgagaaaguaaaucacaa

SEQ ID NO: 2197038 - RNA, 19 nt, Artificial Sequence
  Description of Artificial Sequence: Synthetic oligonucleotide
ugguaccacucacgauugu

SEQ ID NO: 2197039 - RNA, 19 nt, Artificial Sequence
  Description of Artificial Sequence: Synthetic oligonucleotide
cuuugacaugucugucgca

SEQ ID NO: 2197040 - RNA, 19 nt, Artificial Sequence
  Description of Artificial Sequence: Synthetic oligonucleotide
ucgcugcaacaguugucca

SEQ ID NO: 2197041 - RNA, 19 nt, Artificial Sequence
  Description of Artificial Sequence: Synthetic oligonucleotide
caacaguuguccacucaaa

SEQ ID NO: 2197042 - RNA, 19 nt, Artificial Sequence
  Description of Artificial Sequence: Synthetic oligonucleotide
uugcuccgagaaaguaaau

SEQ ID NO: 2197043 - RNA, 19 nt, Artificial Sequence
  Description of Artificial Sequence: Synthetic oligonucleotide
acucucgcugcaacaguug

SEQ ID NO: 2197044 - RNA, 19 nt, Artificial Sequence
  Description of Artificial Sequence: Synthetic oligonucleotide
ccaccaucguuuucaaauc

SEQ ID NO: 2197045 - RNA, 19 nt, Artificial Sequence
  Description of Artificial Sequence: Synthetic oligonucleotide
ggucauccggugcagggga

SEQ ID NO: 2197046 - RNA, 19 nt, Artificial Sequence
  Description of Artificial Sequence: Synthetic oligonucleotide
guccuccaaaguguccaag

SEQ ID NO: 2197047 - RNA, 19 nt, Artificial Sequence
  Description of Artificial Sequence: Synthetic oligonucleotide
gaggacaccggagcuuguc

SEQ ID NO: 2197048 - RNA, 19 nt, Artificial Sequence
  Description of Artificial Sequence: Synthetic oligonucleotide
agucuccguaccagauagg

SEQ ID NO: 2197049 - RNA, 19 nt, Artificial Sequence
  Description of Artificial Sequence: Synthetic oligonucleotide
augccacaagcuauuucca

SEQ ID NO: 2197050 - RNA, 19 nt, Artificial Sequence
  Description of Artificial Sequence: Synthetic oligonucleotide
ugccacguucccgcucccg

SEQ ID NO: 2197051 - RNA, 19 nt, Artificial Sequence
  Description of Artificial Sequence: Synthetic oligonucleotide
uccaugccacguucccgcu

SEQ ID NO: 2197052 - RNA, 19 nt, Artificial Sequence
  Description of Artificial Sequence: Synthetic oligonucleotide
caguuuggcccugccggcc

SEQ ID NO: 2197053 - RNA, 19 nt, Artificial Sequence
  Description of Artificial Sequence: Synthetic oligonucleotide
gagguccgcccaugucucc

SEQ ID NO: 2197054 - RNA, 19 nt, Artificial Sequence
  Description of Artificial Sequence: Synthetic oligonucleotide
aagcccacggccagaugau

SEQ ID NO: 2197055 - RNA, 19 nt, Artificial Sequence
  Description of Artificial Sequence: Synthetic oligonucleotide
uuuccaccgucagucggua

SEQ ID NO: 2197056 - RNA, 19 nt, Artificial Sequence
  Description of Artificial Sequence: Synthetic oligonucleotide
cugcaacaguuguccacuc

SEQ ID NO: 2197057 - RNA, 19 nt, Artificial Sequence
  Description of Artificial Sequence: Synthetic oligonucleotide
ggagucguuguaauguucu

SEQ ID NO: 2197058 - RNA, 19 nt, Artificial Sequence
  Description of Artificial Sequence: Synthetic oligonucleotide
uuccgcuguccuucucagu

SEQ ID NO: 2197059 - RNA, 19 nt, Artificial Sequence
  Description of Artificial Sequence: Synthetic oligonucleotide
cuggaaugcaaaguuuccu

SEQ ID NO: 2197060 - RNA, 19 nt, Artificial Sequence
  Description of Artificial Sequence: Synthetic oligonucleotide
cacaaguauuccuuuccau

SEQ ID NO: 2197061 - RNA, 19 nt, Artificial Sequence
  Description of Artificial Sequence: Synthetic oligonucleotide
agaggcacuuuugcuccga

SEQ ID NO: 2197062 - RNA, 19 nt, Artificial Sequence
  Description of Artificial Sequence: Synthetic oligonucleotide
gaggagucguuguaauguu

SEQ ID NO: 2197063 - RNA, 19 nt, Artificial Sequence
  Description of Artificial Sequence: Synthetic oligonucleotide
caucaggguguacgagguc

SEQ ID NO: 2197064 - RNA, 19 nt, Artificial Sequence
  Description of Artificial Sequence: Synthetic oligonucleotide
ccucuuggucauccggugc

SEQ ID NO: 2197065 - RNA, 19 nt, Artificial Sequence
  Description of Artificial Sequence: Synthetic oligonucleotide
acucacgauuguccuccaa

SEQ ID NO: 2197066 - RNA, 19 nt, Artificial Sequence
  Description of Artificial Sequence: Synthetic oligonucleotide
cuccauuauccggucuguc

SEQ ID NO: 2197067 - RNA, 19 nt, Artificial Sequence
  Description of Artificial Sequence: Synthetic oligonucleotide
agguuaguucaaacuggaa

SEQ ID NO: 2197068 - RNA, 19 nt, Artificial Sequence
  Description of Artificial Sequence: Synthetic oligonucleotide
cacgauuguccuccaaagu

SEQ ID NO: 2197069 - RNA, 19 nt, Artificial Sequence
  Description of Artificial Sequence: Synthetic oligonucleotide
ggagcuggauacugcggga

SEQ ID NO: 2197070 - RNA, 19 nt, Artificial Sequence
  Description of Artificial Sequence: Synthetic oligonucleotide
ggagcuugucaccuucuua

SEQ ID NO: 2197071 - RNA, 19 nt, Artificial Sequence
  Description of Artificial Sequence: Synthetic oligonucleotide
ucgcaaggacaaugucaau

SEQ ID NO: 2197072 - RNA, 19 nt, Artificial Sequence
  Description of Artificial Sequence: Synthetic oligonucleotide
uuccaccgucagucgguac

SEQ ID NO: 2197073 - RNA, 19 nt, Artificial Sequence
  Description of Artificial Sequence: Synthetic oligonucleotide
cuuaucuccaugccacguu

SEQ ID NO: 2197074 - RNA, 19 nt, Artificial Sequence
  Description of Artificial Sequence: Synthetic oligonucleotide
gcaggggaggggcucugag

SEQ ID NO: 2197075 - RNA, 19 nt, Artificial Sequence
  Description of Artificial Sequence: Synthetic oligonucleotide
gcucugagggauugugcuc

SEQ ID NO: 2197076 - RNA, 19 nt, Artificial Sequence
  Description of Artificial Sequence: Synthetic oligonucleotide
caacugucugaaggcaaga

SEQ ID NO: 2197077 - RNA, 19 nt, Artificial Sequence
  Description of Artificial Sequence: Synthetic oligonucleotide
ccggucuguccacuggcgg

SEQ ID NO: 2197078 - RNA, 19 nt, Artificial Sequence
  Description of Artificial Sequence: Synthetic oligonucleotide
gucauccggugcaggggag

SEQ ID NO: 2197079 - RNA, 19 nt, Artificial Sequence
  Description of Artificial Sequence: Synthetic oligonucleotide
guacucucgcugcaacagu

SEQ ID NO: 2197080 - RNA, 19 nt, Artificial Sequence
  Description of Artificial Sequence: Synthetic oligonucleotide
caggguguacgagguccgc

SEQ ID NO: 2197081 - RNA, 19 nt, Artificial Sequence
  Description of Artificial Sequence: Synthetic oligonucleotide
cgucagucgguacucucgc

SEQ ID NO: 2197082 - RNA, 19 nt, Artificial Sequence
  Description of Artificial Sequence: Synthetic oligonucleotide
caguggcuucgugggauug

SEQ ID NO: 2197083 - RNA, 19 nt, Artificial Sequence
  Description of Artificial Sequence: Synthetic oligonucleotide
gcgguacagcugcaguggc

SEQ ID NO: 2197084 - RNA, 19 nt, Artificial Sequence
  Description of Artificial Sequence: Synthetic oligonucleotide
gguguacgagguccgccca

SEQ ID NO: 2197085 - RNA, 19 nt, Artificial Sequence
  Description of Artificial Sequence: Synthetic oligonucleotide
ggagguucaugugcuuuga

SEQ ID NO: 2197086 - RNA, 19 nt, Artificial Sequence
  Description of Artificial Sequence: Synthetic oligonucleotide
ggagcaacuugaagcccac

SEQ ID NO: 2197087 - RNA, 19 nt, Artificial Sequence
  Description of Artificial Sequence: Synthetic oligonucleotide
ugucugucgcaaggacaau

SEQ ID NO: 2197088 - RNA, 19 nt, Artificial Sequence
  Description of Artificial Sequence: Synthetic oligonucleotide
ccaaaguguccaagauguc

SEQ ID NO: 2197089 - RNA, 19 nt, Artificial Sequence
  Description of Artificial Sequence: Synthetic oligonucleotide
ucgugggauuggugagauc

SEQ ID NO: 2197090 - RNA, 19 nt, Artificial Sequence
  Description of Artificial Sequence: Synthetic oligonucleotide
agcccacggccagaugaug

SEQ ID NO: 2197091 - RNA, 19 nt, Artificial Sequence
  Description of Artificial Sequence: Synthetic oligonucleotide
cgcugcaacaguuguccac

SEQ ID NO: 2197092 - RNA, 19 nt, Artificial Sequence
  Description of Artificial Sequence: Synthetic oligonucleotide
aggcaagaggagggagcug

SEQ ID NO: 2197093 - RNA, 19 nt, Artificial Sequence
  Description of Artificial Sequence: Synthetic oligonucleotide
aucuuccucuaagguuagu

SEQ ID NO: 2197094 - RNA, 19 nt, Artificial Sequence
  Description of Artificial Sequence: Synthetic oligonucleotide
uuuggcccugccggccuuc

SEQ ID NO: 2197095 - RNA, 19 nt, Artificial Sequence
  Description of Artificial Sequence: Synthetic oligonucleotide
gcauugugcuugucacaca

SEQ ID NO: 2197096 - RNA, 19 nt, Artificial Sequence
  Description of Artificial Sequence: Synthetic oligonucleotide
ccaucccacgaaagggguc

SEQ ID NO: 2197097 - RNA, 19 nt, Artificial Sequence
  Description of Artificial Sequence: Synthetic oligonucleotide
gucgguacucucgcugcaa

SEQ ID NO: 2197098 - RNA, 19 nt, Artificial Sequence
  Description of Artificial Sequence: Synthetic oligonucleotide
gcccaugucucccuagagu

SEQ ID NO: 2197099 - RNA, 19 nt, Artificial Sequence
  Description of Artificial Sequence: Synthetic oligonucleotide
gcuugucaccuucuuaguu

SEQ ID NO: 2197100 - RNA, 19 nt, Artificial Sequence
  Description of Artificial Sequence: Synthetic oligonucleotide
aucccacgaaagggguccu

SEQ ID NO: 2197101 - RNA, 19 nt, Artificial Sequence
  Description of Artificial Sequence: Synthetic oligonucleotide
ucccacgaaagggguccuc

SEQ ID NO: 2197102 - RNA, 19 nt, Artificial Sequence
  Description of Artificial Sequence: Synthetic oligonucleotide
guacgagguccgcccaugu

SEQ ID NO: 2197103 - RNA, 19 nt, Artificial Sequence
  Description of Artificial Sequence: Synthetic oligonucleotide
cgauuguccuccaaagugu

SEQ ID NO: 2197104 - RNA, 19 nt, Artificial Sequence
  Description of Artificial Sequence: Synthetic oligonucleotide
gucagucgguacucucgcu

SEQ ID NO: 2197105 - RNA, 19 nt, Artificial Sequence
  Description of Artificial Sequence: Synthetic oligonucleotide
guggcuucgugggauuggu

SEQ ID NO: 2197106 - RNA, 19 nt, Artificial Sequence
  Description of Artificial Sequence: Synthetic oligonucleotide
cuacagaggcauugugcuu

SEQ ID NO: 2197107 - RNA, 19 nt, Artificial Sequence
  Description of Artificial Sequence: Synthetic oligonucleotide
gcaucaggguguacgaggu

SEQ ID NO: 2197108 - RNA, 19 nt, Artificial Sequence
  Description of Artificial Sequence: Synthetic oligonucleotide
cuaagacagaggagucguu

SEQ ID NO: 2197109 - RNA, 19 nt, Artificial Sequence
  Description of Artificial Sequence: Synthetic oligonucleotide
ccguaccagauagggcucc

SEQ ID NO: 2197110 - RNA, 19 nt, Artificial Sequence
  Description of Artificial Sequence: Synthetic oligonucleotide
cacaagcuauuuccaccgu

SEQ ID NO: 2197111 - RNA, 19 nt, Artificial Sequence
  Description of Artificial Sequence: Synthetic oligonucleotide
gcaccauauucuggaggac

SEQ ID NO: 2197112 - RNA, 19 nt, Artificial Sequence
  Description of Artificial Sequence: Synthetic oligonucleotide
cacucacgauuguccucca

SEQ ID NO: 2197113 - RNA, 19 nt, Artificial Sequence
  Description of Artificial Sequence: Synthetic oligonucleotide
cccuagaguggaugaacaa

SEQ ID NO: 2197114 - RNA, 19 nt, Artificial Sequence
  Description of Artificial Sequence: Synthetic oligonucleotide
cgagguccgcccaugucuc

SEQ ID NO: 2197115 - RNA, 19 nt, Artificial Sequence
  Description of Artificial Sequence: Synthetic oligonucleotide
gcccacggccagaugauga

SEQ ID NO: 2197116 - RNA, 19 nt, Artificial Sequence
  Description of Artificial Sequence: Synthetic oligonucleotide
ccuagaguggaugaacaau

SEQ ID NO: 2197117 - RNA, 19 nt, Artificial Sequence
  Description of Artificial Sequence: Synthetic oligonucleotide
cucugguaccacucacgau

SEQ ID NO: 2197118 - RNA, 19 nt, Artificial Sequence
  Description of Artificial Sequence: Synthetic oligonucleotide
ggucuguccacuggcggua

SEQ ID NO: 2197119 - RNA, 19 nt, Artificial Sequence
  Description of Artificial Sequence: Synthetic oligonucleotide
ccucagaggcacuuuugcu

SEQ ID NO: 2197120 - RNA, 19 nt, Artificial Sequence
  Description of Artificial Sequence: Synthetic oligonucleotide
cguuguaauguucucugau

SEQ ID NO: 2197121 - RNA, 19 nt, Artificial Sequence
  Description of Artificial Sequence: Synthetic oligonucleotide
gccggccuuccucuugguc

SEQ ID NO: 2197122 - RNA, 19 nt, Artificial Sequence
  Description of Artificial Sequence: Synthetic oligonucleotide
gguggaguucucaguaguu

SEQ ID NO: 2197123 - RNA, 19 nt, Artificial Sequence
  Description of Artificial Sequence: Synthetic oligonucleotide
cagaggcauugugcuuguc

SEQ ID NO: 2197124 - RNA, 19 nt, Artificial Sequence
  Description of Artificial Sequence: Synthetic oligonucleotide
gcaagaggagggagcugga

SEQ ID NO: 2197125 - RNA, 19 nt, Artificial Sequence
  Description of Artificial Sequence: Synthetic oligonucleotide
ccucuaagguuaguucaaa

SEQ ID NO: 2197126 - RNA, 19 nt, Artificial Sequence
  Description of Artificial Sequence: Synthetic oligonucleotide
gcgggaugaaagucuccgu

SEQ ID NO: 2197127 - RNA, 19 nt, Artificial Sequence
  Description of Artificial Sequence: Synthetic oligonucleotide
cuucucaagucagcuuguu

SEQ ID NO: 2197128 - RNA, 19 nt, Artificial Sequence
  Description of Artificial Sequence: Synthetic oligonucleotide
gcuucucaagucagcuugu

SEQ ID NO: 2197129 - RNA, 19 nt, Artificial Sequence
  Description of Artificial Sequence: Synthetic oligonucleotide
guaccagauagggcuccau

SEQ ID NO: 2197130 - RNA, 19 nt, Artificial Sequence
  Description of Artificial Sequence: Synthetic oligonucleotide
guccgcccaugucucccua

SEQ ID NO: 2197131 - RNA, 19 nt, Artificial Sequence
  Description of Artificial Sequence: Synthetic oligonucleotide
ccgcccaugucucccuaga

SEQ ID NO: 2197132 - RNA, 19 nt, Artificial Sequence
  Description of Artificial Sequence: Synthetic oligonucleotide
gguccgcccaugucucccu

SEQ ID NO: 2197133 - RNA, 19 nt, Artificial Sequence
  Description of Artificial Sequence: Synthetic oligonucleotide
cggccagaugaugauucuc

SEQ ID NO: 2197134 - RNA, 19 nt, Artificial Sequence
  Description of Artificial Sequence: Synthetic oligonucleotide
cccacgaaagggguccucu

SEQ ID NO: 2197135 - RNA, 19 nt, Artificial Sequence
  Description of Artificial Sequence: Synthetic oligonucleotide
cgccaucuuccucuaaggu

SEQ ID NO: 2197136 - RNA, 19 nt, Artificial Sequence
  Description of Artificial Sequence: Synthetic oligonucleotide
cccacggccagaugaugau

SEQ ID NO: 2197137 - RNA, 19 nt, Artificial Sequence
  Description of Artificial Sequence: Synthetic oligonucleotide
caccgucagucgguacucu

SEQ ID NO: 2197138 - RNA, 19 nt, Artificial Sequence
  Description of Artificial Sequence: Synthetic oligonucleotide
ccuccauuauccggucugu

SEQ ID NO: 2197139 - RNA, 19 nt, Artificial Sequence
  Description of Artificial Sequence: Synthetic oligonucleotide
cggucuguccacuggcggu

SEQ ID NO: 2197140 - RNA, 19 nt, Artificial Sequence
  Description of Artificial Sequence: Synthetic oligonucleotide
caccggagcuugucaccuu

SEQ ID NO: 2197141 - RNA, 19 nt, Artificial Sequence
  Description of Artificial Sequence: Synthetic oligonucleotide
ccacgaaagggguccucuu

SEQ ID NO: 2197142 - RNA, 19 nt, Artificial Sequence
  Description of Artificial Sequence: Synthetic oligonucleotide
ccugggcaucaggguguac

SEQ ID NO: 2197143 - RNA, 19 nt, Artificial Sequence
  Description of Artificial Sequence: Synthetic oligonucleotide
cggccuuccucuuggucau

SEQ ID NO: 2197144 - RNA, 19 nt, Artificial Sequence
  Description of Artificial Sequence: Synthetic oligonucleotide
ccacggccagaugaugauu

SEQ ID NO: 2197145 - RNA, 19 nt, Artificial Sequence
  Description of Artificial Sequence: Synthetic oligonucleotide
cccugccggccuuccucuu

SEQ ID NO: 2197146 - RNA, 19 nt, Artificial Sequence
  Description of Artificial Sequence: Synthetic oligonucleotide
  modified_base (9)..(9): a, c, u, g, unknown or other
uuuuauuanaaaauaagga

SEQ ID NO: 2197147 - RNA, 19 nt, Artificial Sequence
  Description of Artificial Sequence: Synthetic oligonucleotide
uuauuuaucacauuuguga

SEQ ID NO: 2197148 - RNA, 19 nt, Artificial Sequence
  Description of Artificial Sequence: Synthetic oligonucleotide
  modified_base (8)..(8): a, c, u, g, unknown or other
uuuauuanaaaauaaggau

SEQ ID NO: 2197149 - RNA, 19 nt, Artificial Sequence
  Description of Artificial Sequence: Synthetic oligonucleotide
  modified_base (2)..(2): a, c, u, g, unknown or other
anaaaauaaggauuuauuu

SEQ ID NO: 2197150 - RNA, 19 nt, Artificial Sequence
  Description of Artificial Sequence: Synthetic oligonucleotide
  modified_base (7)..(7): a, c, u, g, unknown or other
uuauuanaaaauaaggauu

SEQ ID NO: 2197151 - RNA, 19 nt, Artificial Sequence
  Description of Artificial Sequence: Synthetic oligonucleotide
aauaaggauuuauuuauca

SEQ ID NO: 2197152 - RNA, 19 nt, Artificial Sequence
  Description of Artificial Sequence: Synthetic oligonucleotide
  modified_base (6)..(6): a, c, u, g, unknown or other
uauuanaaaauaaggauuu

SEQ ID NO: 2197153 - RNA, 19 nt, Artificial Sequence
  Description of Artificial Sequence: Synthetic oligonucleotide
uuuauugugcagauaaaga

SEQ ID NO: 2197154 - RNA, 19 nt, Artificial Sequence
  Description of Artificial Sequence: Synthetic oligonucleotide
auaaggauuuauuuaucac

SEQ ID NO: 2197155 - RNA, 19 nt, Artificial Sequence
  Description of Artificial Sequence: Synthetic oligonucleotide
uucgccauggacaagacac

SEQ ID NO: 2197156 - RNA, 19 nt, Artificial Sequence
  Description of Artificial Sequence: Synthetic oligonucleotide
  modified_base (3)..(3): a, c, u, g, unknown or other
uanaaaauaaggauuuauu

SEQ ID NO: 2197157 - RNA, 19 nt, Artificial Sequence
  Description of Artificial Sequence: Synthetic oligonucleotide
uuuauuuaucacauuugug

SEQ ID NO: 2197158 - RNA, 19 nt, Artificial Sequence
  Description of Artificial Sequence: Synthetic oligonucleotide
ugacaaucuucuuagaugu

SEQ ID NO: 2197159 - RNA, 19 nt, Artificial Sequence
  Description of Artificial Sequence: Synthetic oligonucleotide
uuauugugcagauaaagaa

SEQ ID NO: 2197160 - RNA, 19 nt, Artificial Sequence
  Description of Artificial Sequence: Synthetic oligonucleotide
gacgacuuagcucaacugg

SEQ ID NO: 2197161 - RNA, 19 nt, Artificial Sequence
  Description of Artificial Sequence: Synthetic oligonucleotide
uuggcgacgacuuagcuca

SEQ ID NO: 2197162 - RNA, 19 nt, Artificial Sequence
  Description of Artificial Sequence: Synthetic oligonucleotide
uuuagcuccagcaccacgc

SEQ ID NO: 2197163 - RNA, 19 nt, Artificial Sequence
  Description of Artificial Sequence: Synthetic oligonucleotide
cucaguaagggacauaggc

SEQ ID NO: 2197164 - RNA, 19 nt, Artificial Sequence
  Description of Artificial Sequence: Synthetic oligonucleotide
ugaauggcaauucuggggu

SEQ ID NO: 2197165 - RNA, 19 nt, Artificial Sequence
  Description of Artificial Sequence: Synthetic oligonucleotide
uauugugcagauaaagaac

SEQ ID NO: 2197166 - RNA, 19 nt, Artificial Sequence
  Description of Artificial Sequence: Synthetic oligonucleotide
uguccuagcaccuuggcga

SEQ ID NO: 2197167 - RNA, 19 nt, Artificial Sequence
  Description of Artificial Sequence: Synthetic oligonucleotide
acaacaucugccuuuagcu

SEQ ID NO: 2197168 - RNA, 19 nt, Artificial Sequence
  Description of Artificial Sequence: Synthetic oligonucleotide
augacaaucuucuuagaug

SEQ ID NO: 2197169 - RNA, 19 nt, Artificial Sequence
  Description of Artificial Sequence: Synthetic oligonucleotide
aggaguucgggucucgugc

SEQ ID NO: 2197170 - RNA, 19 nt, Artificial Sequence
  Description of Artificial Sequence: Synthetic oligonucleotide
aaguacacgagcggguucc

SEQ ID NO: 2197171 - RNA, 19 nt, Artificial Sequence
  Description of Artificial Sequence: Synthetic oligonucleotide
  modified_base (4)..(4): a, c, u, g, unknown or other
uuanaaaauaaggauuuau

SEQ ID NO: 2197172 - RNA, 19 nt, Artificial Sequence
  Description of Artificial Sequence: Synthetic oligonucleotide
ugucuuuggcacaacaucu

SEQ ID NO: 2197173 - RNA, 19 nt, Artificial Sequence
  Description of Artificial Sequence: Synthetic oligonucleotide
ugugaugacaaucuucuua

SEQ ID NO: 2197174 - RNA, 19 nt, Artificial Sequence
  Description of Artificial Sequence: Synthetic oligonucleotide
uacucaguaagggacauag

SEQ ID NO: 2197175 - RNA, 19 nt, Artificial Sequence
  Description of Artificial Sequence: Synthetic oligonucleotide
aacacaacaugcuugccau

SEQ ID NO: 2197176 - RNA, 19 nt, Artificial Sequence
  Description of Artificial Sequence: Synthetic oligonucleotide
uccaaggcacacaugaaug

SEQ ID NO: 2197177 - RNA, 19 nt, Artificial Sequence
  Description of Artificial Sequence: Synthetic oligonucleotide
cuuuauugugcagauaaag

SEQ ID NO: 2197178 - RNA, 19 nt, Artificial Sequence
  Description of Artificial Sequence: Synthetic oligonucleotide
gaaaucgccagccuggcac

SEQ ID NO: 2197179 - RNA, 19 nt, Artificial Sequence
  Description of Artificial Sequence: Synthetic oligonucleotide
cagauaaagaacugagagc

SEQ ID NO: 2197180 - RNA, 19 nt, Artificial Sequence
  Description of Artificial Sequence: Synthetic oligonucleotide
gacaacuggucaucgaugc

SEQ ID NO: 2197181 - RNA, 19 nt, Artificial Sequence
  Description of Artificial Sequence: Synthetic oligonucleotide
acaugaauggcaauucugg

SEQ ID NO: 2197182 - RNA, 19 nt, Artificial Sequence
  Description of Artificial Sequence: Synthetic oligonucleotide
cacacugaugcccagaaac

SEQ ID NO: 2197183 - RNA, 19 nt, Artificial Sequence
  Description of Artificial Sequence: Synthetic oligonucleotide
gaugggaucacccuaugga

SEQ ID NO: 2197184 - RNA, 19 nt, Artificial Sequence
  Description of Artificial Sequence: Synthetic oligonucleotide
gaaacaggaucugagggag

SEQ ID NO: 2197185 - RNA, 19 nt, Artificial Sequence
  Description of Artificial Sequence: Synthetic oligonucleotide
ucuucuuagaugucuuccc

SEQ ID NO: 2197186 - RNA, 19 nt, Artificial Sequence
  Description of Artificial Sequence: Synthetic oligonucleotide
uucucaccagugcacaggg

SEQ ID NO: 2197187 - RNA, 19 nt, Artificial Sequence
  Description of Artificial Sequence: Synthetic oligonucleotide
aaggauuuauuuaucacau

SEQ ID NO: 2197188 - RNA, 19 nt, Artificial Sequence
  Description of Artificial Sequence: Synthetic oligonucleotide
uuuggcacaacaucugccu

SEQ ID NO: 2197189 - RNA, 19 nt, Artificial Sequence
  Description of Artificial Sequence: Synthetic oligonucleotide
acuuagcucaacuggccac

SEQ ID NO: 2197190 - RNA, 19 nt, Artificial Sequence
  Description of Artificial Sequence: Synthetic oligonucleotide
agcgacagcaucguggucg

SEQ ID NO: 2197191 - RNA, 19 nt, Artificial Sequence
  Description of Artificial Sequence: Synthetic oligonucleotide
ugugcucagagcacuuggg

SEQ ID NO: 2197192 - RNA, 19 nt, Artificial Sequence
  Description of Artificial Sequence: Synthetic oligonucleotide
aaacaguucuuuggggcac

SEQ ID NO: 2197193 - RNA, 19 nt, Artificial Sequence
  Description of Artificial Sequence: Synthetic oligonucleotide
auggacuucccucccgugc

SEQ ID NO: 2197194 - RNA, 19 nt, Artificial Sequence
  Description of Artificial Sequence: Synthetic oligonucleotide
ucuuugacauggccgaaca

SEQ ID NO: 2197195 - RNA, 19 nt, Artificial Sequence
  Description of Artificial Sequence: Synthetic oligonucleotide
auugugcagauaaagaacu

SEQ ID NO: 2197196 - RNA, 19 nt, Artificial Sequence
  Description of Artificial Sequence: Synthetic oligonucleotide
auggccgaacacaacaugc

SEQ ID NO: 2197197 - RNA, 19 nt, Artificial Sequence
  Description of Artificial Sequence: Synthetic oligonucleotide
acauuugugacaacugguc

SEQ ID NO: 2197198 - RNA, 19 nt, Artificial Sequence
  Description of Artificial Sequence: Synthetic oligonucleotide
ucuuagaugucuucccacu

SEQ ID NO: 2197199 - RNA, 19 nt, Artificial Sequence
  Description of Artificial Sequence: Synthetic oligonucleotide
gacauggccgaacacaaca

SEQ ID NO: 2197200 - RNA, 19 nt, Artificial Sequence
  Description of Artificial Sequence: Synthetic oligonucleotide
gagaguugagagcagcgug

SEQ ID NO: 2197201 - RNA, 19 nt, Artificial Sequence
  Description of Artificial Sequence: Synthetic oligonucleotide
ugccuuuagcuccagcacc

SEQ ID NO: 2197202 - RNA, 19 nt, Artificial Sequence
  Description of Artificial Sequence: Synthetic oligonucleotide
gggacauaggcacaaacag

SEQ ID NO: 2197203 - RNA, 19 nt, Artificial Sequence
  Description of Artificial Sequence: Synthetic oligonucleotide
ugguuggugaaaucgccag

SEQ ID NO: 2197204 - RNA, 19 nt, Artificial Sequence
  Description of Artificial Sequence: Synthetic oligonucleotide
acgacuuagcucaacuggc

SEQ ID NO: 2197205 - RNA, 19 nt, Artificial Sequence
  Description of Artificial Sequence: Synthetic oligonucleotide
uacacgagcggguuccggg

SEQ ID NO: 2197206 - RNA, 19 nt, Artificial Sequence
  Description of Artificial Sequence: Synthetic oligonucleotide
gaugcccagaaacaggauc

SEQ ID NO: 2197207 - RNA, 19 nt, Artificial Sequence
  Description of Artificial Sequence: Synthetic oligonucleotide
ugacaacuggucaucgaug

SEQ ID NO: 2197208 - RNA, 19 nt, Artificial Sequence
  Description of Artificial Sequence: Synthetic oligonucleotide
augaaggaugggaucaccc

SEQ ID NO: 2197209 - RNA, 19 nt, Artificial Sequence
  Description of Artificial Sequence: Synthetic oligonucleotide
cuuuggcacaacaucugcc

SEQ ID NO: 2197210 - RNA, 19 nt, Artificial Sequence
  Description of Artificial Sequence: Synthetic oligonucleotide
caauucuggggucacuugc

SEQ ID NO: 2197211 - RNA, 19 nt, Artificial Sequence
  Description of Artificial Sequence: Synthetic oligonucleotide
agccagucugucuuuauug

SEQ ID NO: 2197212 - RNA, 19 nt, Artificial Sequence
  Description of Artificial Sequence: Synthetic oligonucleotide
acaacuggucaucgaugcc

SEQ ID NO: 2197213 - RNA, 19 nt, Artificial Sequence
  Description of Artificial Sequence: Synthetic oligonucleotide
uggugaaaucgccagccug

SEQ ID NO: 2197214 - RNA, 19 nt, Artificial Sequence
  Description of Artificial Sequence: Synthetic oligonucleotide
ugaaggaugggaucacccu

SEQ ID NO: 2197215 - RNA, 19 nt, Artificial Sequence
  Description of Artificial Sequence: Synthetic oligonucleotide
guuggugaaaucgccagcc

SEQ ID NO: 2197216 - RNA, 19 nt, Artificial Sequence
  Description of Artificial Sequence: Synthetic oligonucleotide
ggaugcauugcccaguggc

SEQ ID NO: 2197217 - RNA, 19 nt, Artificial Sequence
  Description of Artificial Sequence: Synthetic oligonucleotide
agaguugagagcagcgugg

SEQ ID NO: 2197218 - RNA, 19 nt, Artificial Sequence
  Description of Artificial Sequence: Synthetic oligonucleotide
uggacuucccucccgugcc

SEQ ID NO: 2197219 - RNA, 19 nt, Artificial Sequence
  Description of Artificial Sequence: Synthetic oligonucleotide
uagauggacuucccucccg

SEQ ID NO: 2197220 - RNA, 19 nt, Artificial Sequence
  Description of Artificial Sequence: Synthetic oligonucleotide
agagcacuuggguggcugc

SEQ ID NO: 2197221 - RNA, 19 nt, Artificial Sequence
  Description of Artificial Sequence: Synthetic oligonucleotide
acgugcuucagugugaagu

SEQ ID NO: 2197222 - RNA, 19 nt, Artificial Sequence
  Description of Artificial Sequence: Synthetic oligonucleotide
uuagaugucuucccacuuu

SEQ ID NO: 2197223 - RNA, 19 nt, Artificial Sequence
  Description of Artificial Sequence: Synthetic oligonucleotide
gggaucacccuauggaagg

SEQ ID NO: 2197224 - RNA, 19 nt, Artificial Sequence
  Description of Artificial Sequence: Synthetic oligonucleotide
ucgcgugacgggcaaaggc

SEQ ID NO: 2197225 - RNA, 19 nt, Artificial Sequence
  Description of Artificial Sequence: Synthetic oligonucleotide
gaugcauugcccaguggcc

SEQ ID NO: 2197226 - RNA, 19 nt, Artificial Sequence
  Description of Artificial Sequence: Synthetic oligonucleotide
gaugacaaucuucuuagau

SEQ ID NO: 2197227 - RNA, 19 nt, Artificial Sequence
  Description of Artificial Sequence: Synthetic oligonucleotide
uccaaguacacgagcgggu

SEQ ID NO: 2197228 - RNA, 19 nt, Artificial Sequence
  Description of Artificial Sequence: Synthetic oligonucleotide
aaaucgccagccuggcaca

SEQ ID NO: 2197229 - RNA, 19 nt, Artificial Sequence
  Description of Artificial Sequence: Synthetic oligonucleotide
ucccgugccauugugguug

SEQ ID NO: 2197230 - RNA, 19 nt, Artificial Sequence
  Description of Artificial Sequence: Synthetic oligonucleotide
acguccaaguacacgagcg

SEQ ID NO: 2197231 - RNA, 19 nt, Artificial Sequence
  Description of Artificial Sequence: Synthetic oligonucleotide
agucugucuuuauugugca

SEQ ID NO: 2197232 - RNA, 19 nt, Artificial Sequence
  Description of Artificial Sequence: Synthetic oligonucleotide
acugaugcccagaaacagg

SEQ ID NO: 2197233 - RNA, 19 nt, Artificial Sequence
  Description of Artificial Sequence: Synthetic oligonucleotide
cuuccguagauggacuucc

SEQ ID NO: 2197234 - RNA, 19 nt, Artificial Sequence
  Description of Artificial Sequence: Synthetic oligonucleotide
cugcuacuguccuagcacc

SEQ ID NO: 2197235 - RNA, 19 nt, Artificial Sequence
  Description of Artificial Sequence: Synthetic oligonucleotide
cuucauacucaguaaggga

SEQ ID NO: 2197236 - RNA, 19 nt, Artificial Sequence
  Description of Artificial Sequence: Synthetic oligonucleotide
cuuuagcuccagcaccacg

SEQ ID NO: 2197237 - RNA, 19 nt, Artificial Sequence
  Description of Artificial Sequence: Synthetic oligonucleotide
ugugccugaguaaccuucu

SEQ ID NO: 2197238 - RNA, 19 nt, Artificial Sequence
  Description of Artificial Sequence: Synthetic oligonucleotide
cuuggcgacgacuuagcuc

SEQ ID NO: 2197239 - RNA, 19 nt, Artificial Sequence
  Description of Artificial Sequence: Synthetic oligonucleotide
acacaugaauggcaauucu

SEQ ID NO: 2197240 - RNA, 19 nt, Artificial Sequence
  Description of Artificial Sequence: Synthetic oligonucleotide
ugcugaggaugcauugccc

SEQ ID NO: 2197241 - RNA, 19 nt, Artificial Sequence
  Description of Artificial Sequence: Synthetic oligonucleotide
cuguccuagcaccuuggcg

SEQ ID NO: 2197242 - RNA, 19 nt, Artificial Sequence
  Description of Artificial Sequence: Synthetic oligonucleotide
ugcugucuuuggcacaaca

SEQ ID NO: 2197243 - RNA, 19 nt, Artificial Sequence
  Description of Artificial Sequence: Synthetic oligonucleotide
aauucuggggucacuugcu

SEQ ID NO: 2197244 - RNA, 19 nt, Artificial Sequence
  Description of Artificial Sequence: Synthetic oligonucleotide
ucuucacaacauccaugcc

SEQ ID NO: 2197245 - RNA, 19 nt, Artificial Sequence
  Description of Artificial Sequence: Synthetic oligonucleotide
aucacccuauggaaggugg

SEQ ID NO: 2197246 - RNA, 19 nt, Artificial Sequence
  Description of Artificial Sequence: Synthetic oligonucleotide
agccgaaagauucuauuuu

SEQ ID NO: 2197247 - RNA, 19 nt, Artificial Sequence
  Description of Artificial Sequence: Synthetic oligonucleotide
ucaacuggccacagucugu

SEQ ID NO: 2197248 - RNA, 19 nt, Artificial Sequence
  Description of Artificial Sequence: Synthetic oligonucleotide
caagacaccuggucccacg

SEQ ID NO: 2197249 - RNA, 19 nt, Artificial Sequence
  Description of Artificial Sequence: Synthetic oligonucleotide
gaccaugugccugaguaac

SEQ ID NO: 2197250 - RNA, 19 nt, Artificial Sequence
  Description of Artificial Sequence: Synthetic oligonucleotide
ucaggaaagcggcuuccgu

SEQ ID NO: 2197251 - RNA, 19 nt, Artificial Sequence
  Description of Artificial Sequence: Synthetic oligonucleotide
ugugacaacuggucaucga

SEQ ID NO: 2197252 - RNA, 19 nt, Artificial Sequence
  Description of Artificial Sequence: Synthetic oligonucleotide
cuucucaccagugcacagg

SEQ ID NO: 2197253 - RNA, 19 nt, Artificial Sequence
  Description of Artificial Sequence: Synthetic oligonucleotide
uggccgaacacaacaugcu

SEQ ID NO: 2197254 - RNA, 19 nt, Artificial Sequence
  Description of Artificial Sequence: Synthetic oligonucleotide
agggcucugaaguucucug

SEQ ID NO: 2197255 - RNA, 19 nt, Artificial Sequence
  Description of Artificial Sequence: Synthetic oligonucleotide
aaaggcgcgcgaagaaguc

SEQ ID NO: 2197256 - RNA, 19 nt, Artificial Sequence
  Description of Artificial Sequence: Synthetic oligonucleotide
gacuuagcucaacuggcca

SEQ ID NO: 2197257 - RNA, 19 nt, Artificial Sequence
  Description of Artificial Sequence: Synthetic oligonucleotide
caacaucugccuuuagcuc

SEQ ID NO: 2197258 - RNA, 19 nt, Artificial Sequence
  Description of Artificial Sequence: Synthetic oligonucleotide
ugugaaggaccaugugccu

SEQ ID NO: 2197259 - RNA, 19 nt, Artificial Sequence
  Description of Artificial Sequence: Synthetic oligonucleotide
uuccgggaggaggaguucg

SEQ ID NO: 2197260 - RNA, 19 nt, Artificial Sequence
  Description of Artificial Sequence: Synthetic oligonucleotide
  modified_base (5)..(5): a, c, u, g, unknown or other
auuanaaaauaaggauuua

SEQ ID NO: 2197261 - RNA, 19 nt, Artificial Sequence
  Description of Artificial Sequence: Synthetic oligonucleotide
agcaucguggucgcgugac

SEQ ID NO: 2197262 - RNA, 19 nt, Artificial Sequence
  Description of Artificial Sequence: Synthetic oligonucleotide
ucucgugcuccgcugucgc

SEQ ID NO: 2197263 - RNA, 19 nt, Artificial Sequence
  Description of Artificial Sequence: Synthetic oligonucleotide
agcagcgugguccugugaa

SEQ ID NO: 2197264 - RNA, 19 nt, Artificial Sequence
  Description of Artificial Sequence: Synthetic oligonucleotide
ugcccucuuugacauggcc

SEQ ID NO: 2197265 - RNA, 19 nt, Artificial Sequence
  Description of Artificial Sequence: Synthetic oligonucleotide
cacugaugcccagaaacag

SEQ ID NO: 2197266 - RNA, 19 nt, Artificial Sequence
  Description of Artificial Sequence: Synthetic oligonucleotide
agggacauaggcacaaaca

SEQ ID NO: 2197267 - RNA, 19 nt, Artificial Sequence
  Description of Artificial Sequence: Synthetic oligonucleotide
ucgccauggacaagacacc

SEQ ID NO: 2197268 - RNA, 19 nt, Artificial Sequence
  Description of Artificial Sequence: Synthetic oligonucleotide
aucguggucgcgugacggg

SEQ ID NO: 2197269 - RNA, 19 nt, Artificial Sequence
  Description of Artificial Sequence: Synthetic oligonucleotide
gaaggaugggaucacccua

SEQ ID NO: 2197270 - RNA, 19 nt, Artificial Sequence
  Description of Artificial Sequence: Synthetic oligonucleotide
guagauggacuucccuccc

SEQ ID NO: 2197271 - RNA, 19 nt, Artificial Sequence
  Description of Artificial Sequence: Synthetic oligonucleotide
uugagagcagcgugguccu

SEQ ID NO: 2197272 - RNA, 19 nt, Artificial Sequence
  Description of Artificial Sequence: Synthetic oligonucleotide
cuagagagcaggcccagca

SEQ ID NO: 2197273 - RNA, 19 nt, Artificial Sequence
  Description of Artificial Sequence: Synthetic oligonucleotide
uggaagguggagccuuugu

SEQ ID NO: 2197274 - RNA, 19 nt, Artificial Sequence
  Description of Artificial Sequence: Synthetic oligonucleotide
aaacaggaucugagggagg

SEQ ID NO: 2197275 - RNA, 19 nt, Artificial Sequence
  Description of Artificial Sequence: Synthetic oligonucleotide
ugaugacaaucuucuuaga

SEQ ID NO: 2197276 - RNA, 19 nt, Artificial Sequence
  Description of Artificial Sequence: Synthetic oligonucleotide
agcaccacgcggccgagug

SEQ ID NO: 2197277 - RNA, 19 nt, Artificial Sequence
  Description of Artificial Sequence: Synthetic oligonucleotide
uccgggaggaggaguucgg

SEQ ID NO: 2197278 - RNA, 19 nt, Artificial Sequence
  Description of Artificial Sequence: Synthetic oligonucleotide
cacaugaaggaugggauca

SEQ ID NO: 2197279 - RNA, 19 nt, Artificial Sequence
  Description of Artificial Sequence: Synthetic oligonucleotide
agauggacuucccucccgu

SEQ ID NO: 2197280 - RNA, 19 nt, Artificial Sequence
  Description of Artificial Sequence: Synthetic oligonucleotide
ggucccacgugcuucagug

SEQ ID NO: 2197281 - RNA, 19 nt, Artificial Sequence
  Description of Artificial Sequence: Synthetic oligonucleotide
uuggugaaaucgccagccu

SEQ ID NO: 2197282 - RNA, 19 nt, Artificial Sequence
  Description of Artificial Sequence: Synthetic oligonucleotide
ugcuacuguccuagcaccu

SEQ ID NO: 2197283 - RNA, 19 nt, Artificial Sequence
  Description of Artificial Sequence: Synthetic oligonucleotide
gaggaguucgggucucgug

SEQ ID NO: 2197284 - RNA, 19 nt, Artificial Sequence
  Description of Artificial Sequence: Synthetic oligonucleotide
ggagcagcggugcggagcg

SEQ ID NO: 2197285 - RNA, 19 nt, Artificial Sequence
  Description of Artificial Sequence: Synthetic oligonucleotide
agucgcggagaggagcagc

SEQ ID NO: 2197286 - RNA, 19 nt, Artificial Sequence
  Description of Artificial Sequence: Synthetic oligonucleotide
cacacaugaauggcaauuc

SEQ ID NO: 2197287 - RNA, 19 nt, Artificial Sequence
  Description of Artificial Sequence: Synthetic oligonucleotide
caucguggucgcgugacgg

SEQ ID NO: 2197288 - RNA, 19 nt, Artificial Sequence
  Description of Artificial Sequence: Synthetic oligonucleotide
aguugagagcagcgugguc

SEQ ID NO: 2197289 - RNA, 19 nt, Artificial Sequence
  Description of Artificial Sequence: Synthetic oligonucleotide
cauggccgaacacaacaug

SEQ ID NO: 2197290 - RNA, 19 nt, Artificial Sequence
  Description of Artificial Sequence: Synthetic oligonucleotide
acuuggguggcugcuacug

SEQ ID NO: 2197291 - RNA, 19 nt, Artificial Sequence
  Description of Artificial Sequence: Synthetic oligonucleotide
ugaaaucgccagccuggca

SEQ ID NO: 2197292 - RNA, 19 nt, Artificial Sequence
  Description of Artificial Sequence: Synthetic oligonucleotide
ucacccuauggaaggugga

SEQ ID NO: 2197293 - RNA, 19 nt, Artificial Sequence
  Description of Artificial Sequence: Synthetic oligonucleotide
uuugagccgaaagauucua

SEQ ID NO: 2197294 - RNA, 19 nt, Artificial Sequence
  Description of Artificial Sequence: Synthetic oligonucleotide
aucaggaaagcggcuuccg

SEQ ID NO: 2197295 - RNA, 19 nt, Artificial Sequence
  Description of Artificial Sequence: Synthetic oligonucleotide
gcugcuacuguccuagcac

SEQ ID NO: 2197296 - RNA, 19 nt, Artificial Sequence
  Description of Artificial Sequence: Synthetic oligonucleotide
cuuuggggcaccugugcuc

SEQ ID NO: 2197297 - RNA, 19 nt, Artificial Sequence
  Description of Artificial Sequence: Synthetic oligonucleotide
cauaggcacaaacaguucu

SEQ ID NO: 2197298 - RNA, 19 nt, Artificial Sequence
  Description of Artificial Sequence: Synthetic oligonucleotide
ccgaacacaacaugcuugc

SEQ ID NO: 2197299 - RNA, 19 nt, Artificial Sequence
  Description of Artificial Sequence: Synthetic oligonucleotide
cacguccaaguacacgagc

SEQ ID NO: 2197300 - RNA, 19 nt, Artificial Sequence
  Description of Artificial Sequence: Synthetic oligonucleotide
uugagccgaaagauucuau

SEQ ID NO: 2197301 - RNA, 19 nt, Artificial Sequence
  Description of Artificial Sequence: Synthetic oligonucleotide
ggaugggaucacccuaugg

SEQ ID NO: 2197302 - RNA, 19 nt, Artificial Sequence
  Description of Artificial Sequence: Synthetic oligonucleotide
uuagcucaacuggccacag

SEQ ID NO: 2197303 - RNA, 19 nt, Artificial Sequence
  Description of Artificial Sequence: Synthetic oligonucleotide
agcggugcggagcgcgggc

SEQ ID NO: 2197304 - RNA, 19 nt, Artificial Sequence
  Description of Artificial Sequence: Synthetic oligonucleotide
ugcauugcccaguggccac

SEQ ID NO: 2197305 - RNA, 19 nt, Artificial Sequence
  Description of Artificial Sequence: Synthetic oligonucleotide
ugacgggcaaaggcgcgcg

SEQ ID NO: 2197306 - RNA, 19 nt, Artificial Sequence
  Description of Artificial Sequence: Synthetic oligonucleotide
auggcaauucuggggucac

SEQ ID NO: 2197307 - RNA, 19 nt, Artificial Sequence
  Description of Artificial Sequence: Synthetic oligonucleotide
cccuauggaagguggagcc

SEQ ID NO: 2197308 - RNA, 19 nt, Artificial Sequence
  Description of Artificial Sequence: Synthetic oligonucleotide
gccgaaagauucuauuuuc

SEQ ID NO: 2197309 - RNA, 19 nt, Artificial Sequence
  Description of Artificial Sequence: Synthetic oligonucleotide
cagcgugguccugugaagg

SEQ ID NO: 2197310 - RNA, 19 nt, Artificial Sequence
  Description of Artificial Sequence: Synthetic oligonucleotide
uggcacaacaucugccuuu

SEQ ID NO: 2197311 - RNA, 19 nt, Artificial Sequence
  Description of Artificial Sequence: Synthetic oligonucleotide
accuuggcgacgacuuagc

SEQ ID NO: 2197312 - RNA, 19 nt, Artificial Sequence
  Description of Artificial Sequence: Synthetic oligonucleotide
acacugaugcccagaaaca

SEQ ID NO: 2197313 - RNA, 19 nt, Artificial Sequence
  Description of Artificial Sequence: Synthetic oligonucleotide
gucgcggagaggagcagcg

SEQ ID NO: 2197314 - RNA, 19 nt, Artificial Sequence
  Description of Artificial Sequence: Synthetic oligonucleotide
caucaggaaagcggcuucc

SEQ ID NO: 2197315 - RNA, 19 nt, Artificial Sequence
  Description of Artificial Sequence: Synthetic oligonucleotide
aucugagggaggauggaga

SEQ ID NO: 2197316 - RNA, 19 nt, Artificial Sequence
  Description of Artificial Sequence: Synthetic oligonucleotide
aggaugcauugcccagugg

SEQ ID NO: 2197317 - RNA, 19 nt, Artificial Sequence
  Description of Artificial Sequence: Synthetic oligonucleotide
gaauggcaauucugggguc

SEQ ID NO: 2197318 - RNA, 19 nt, Artificial Sequence
  Description of Artificial Sequence: Synthetic oligonucleotide
ucgugcuccgcugucgcug

SEQ ID NO: 2197319 - RNA, 19 nt, Artificial Sequence
  Description of Artificial Sequence: Synthetic oligonucleotide
cauugugguuggugaaauc

SEQ ID NO: 2197320 - RNA, 19 nt, Artificial Sequence
  Description of Artificial Sequence: Synthetic oligonucleotide
uuggcacaacaucugccuu

SEQ ID NO: 2197321 - RNA, 19 nt, Artificial Sequence
  Description of Artificial Sequence: Synthetic oligonucleotide
ucucaccagugcacagggc

SEQ ID NO: 2197322 - RNA, 19 nt, Artificial Sequence
  Description of Artificial Sequence: Synthetic oligonucleotide
ugcccaucggcgcccacgu

SEQ ID NO: 2197323 - RNA, 19 nt, Artificial Sequence
  Description of Artificial Sequence: Synthetic oligonucleotide
acgagcggguuccgggagg

SEQ ID NO: 2197324 - RNA, 19 nt, Artificial Sequence
  Description of Artificial Sequence: Synthetic oligonucleotide
augcauugcccaguggcca

SEQ ID NO: 2197325 - RNA, 19 nt, Artificial Sequence
  Description of Artificial Sequence: Synthetic oligonucleotide
acucaguaagggacauagg

SEQ ID NO: 2197326 - RNA, 19 nt, Artificial Sequence
  Description of Artificial Sequence: Synthetic oligonucleotide
guucgggucucgugcuccg

SEQ ID NO: 2197327 - RNA, 19 nt, Artificial Sequence
  Description of Artificial Sequence: Synthetic oligonucleotide
cucuuugacauggccgaac

SEQ ID NO: 2197328 - RNA, 19 nt, Artificial Sequence
  Description of Artificial Sequence: Synthetic oligonucleotide
agcagcggugcggagcgcg

SEQ ID NO: 2197329 - RNA, 19 nt, Artificial Sequence
  Description of Artificial Sequence: Synthetic oligonucleotide
agcgugguccugugaagga

SEQ ID NO: 2197330 - RNA, 19 nt, Artificial Sequence
  Description of Artificial Sequence: Synthetic oligonucleotide
cucaccagugcacagggcu

SEQ ID NO: 2197331 - RNA, 19 nt, Artificial Sequence
  Description of Artificial Sequence: Synthetic oligonucleotide
ccugcguucgccauggaca

SEQ ID NO: 2197332 - RNA, 19 nt, Artificial Sequence
  Description of Artificial Sequence: Synthetic oligonucleotide
ucgggucucgugcuccgcu

SEQ ID NO: 2197333 - RNA, 19 nt, Artificial Sequence
  Description of Artificial Sequence: Synthetic oligonucleotide
aguaagggacauaggcaca

SEQ ID NO: 2197334 - RNA, 19 nt, Artificial Sequence
  Description of Artificial Sequence: Synthetic oligonucleotide
agagcagcgugguccugug

SEQ ID NO: 2197335 - RNA, 19 nt, Artificial Sequence
  Description of Artificial Sequence: Synthetic oligonucleotide
gugacaacuggucaucgau

SEQ ID NO: 2197336 - RNA, 19 nt, Artificial Sequence
  Description of Artificial Sequence: Synthetic oligonucleotide
cuuagcucaacuggccaca

SEQ ID NO: 2197337 - RNA, 19 nt, Artificial Sequence
  Description of Artificial Sequence: Synthetic oligonucleotide
guaagggacauaggcacaa

SEQ ID NO: 2197338 - RNA, 19 nt, Artificial Sequence
  Description of Artificial Sequence: Synthetic oligonucleotide
ggucacuugcugaggaugc

SEQ ID NO: 2197339 - RNA, 19 nt, Artificial Sequence
  Description of Artificial Sequence: Synthetic oligonucleotide
acacgagcggguuccggga

SEQ ID NO: 2197340 - RNA, 19 nt, Artificial Sequence
  Description of Artificial Sequence: Synthetic oligonucleotide
gagccgaaagauucuauuu

SEQ ID NO: 2197341 - RNA, 19 nt, Artificial Sequence
  Description of Artificial Sequence: Synthetic oligonucleotide
gcccucuuugacauggccg

SEQ ID NO: 2197342 - RNA, 19 nt, Artificial Sequence
  Description of Artificial Sequence: Synthetic oligonucleotide
aaggaccaugugccugagu

SEQ ID NO: 2197343 - RNA, 19 nt, Artificial Sequence
  Description of Artificial Sequence: Synthetic oligonucleotide
ucguggucgcgugacgggc

SEQ ID NO: 2197344 - RNA, 19 nt, Artificial Sequence
  Description of Artificial Sequence: Synthetic oligonucleotide
guggcugcccaucggcgcc

SEQ ID NO: 2197345 - RNA, 19 nt, Artificial Sequence
  Description of Artificial Sequence: Synthetic oligonucleotide
gccgaacacaacaugcuug

SEQ ID NO: 2197346 - RNA, 19 nt, Artificial Sequence
  Description of Artificial Sequence: Synthetic oligonucleotide
aggaugggaucacccuaug

SEQ ID NO: 2197347 - RNA, 19 nt, Artificial Sequence
  Description of Artificial Sequence: Synthetic oligonucleotide
ucggcgcccacguccaagu

SEQ ID NO: 2197348 - RNA, 19 nt, Artificial Sequence
  Description of Artificial Sequence: Synthetic oligonucleotide
auaggcacaaacaguucuu

SEQ ID NO: 2197349 - RNA, 19 nt, Artificial Sequence
  Description of Artificial Sequence: Synthetic oligonucleotide
caaaggcgcgcgaagaagu

SEQ ID NO: 2197350 - RNA, 19 nt, Artificial Sequence
  Description of Artificial Sequence: Synthetic oligonucleotide
gugaaaucgccagccuggc

SEQ ID NO: 2197351 - RNA, 19 nt, Artificial Sequence
  Description of Artificial Sequence: Synthetic oligonucleotide
ugucgcugcaggcgcgagu

SEQ ID NO: 2197352 - RNA, 19 nt, Artificial Sequence
  Description of Artificial Sequence: Synthetic oligonucleotide
cggagcgcgggcuagagag

SEQ ID NO: 2197353 - RNA, 19 nt, Artificial Sequence
  Description of Artificial Sequence: Synthetic oligonucleotide
cuucccucccgugccauug

SEQ ID NO: 2197354 - RNA, 19 nt, Artificial Sequence
  Description of Artificial Sequence: Synthetic oligonucleotide
cgcgugacgggcaaaggcg

SEQ ID NO: 2197355 - RNA, 19 nt, Artificial Sequence
  Description of Artificial Sequence: Synthetic oligonucleotide
agcaccuuggcgacgacuu

SEQ ID NO: 2197356 - RNA, 19 nt, Artificial Sequence
  Description of Artificial Sequence: Synthetic oligonucleotide
caggaaagcggcuuccgua

SEQ ID NO: 2197357 - RNA, 19 nt, Artificial Sequence
  Description of Artificial Sequence: Synthetic oligonucleotide
gacaagacaccugguccca

SEQ ID NO: 2197358 - RNA, 19 nt, Artificial Sequence
  Description of Artificial Sequence: Synthetic oligonucleotide
gucucgugcuccgcugucg

SEQ ID NO: 2197359 - RNA, 19 nt, Artificial Sequence
  Description of Artificial Sequence: Synthetic oligonucleotide
cacgcggccgaguggcugc

SEQ ID NO: 2197360 - RNA, 19 nt, Artificial Sequence
  Description of Artificial Sequence: Synthetic oligonucleotide
gcaauucuggggucacuug

SEQ ID NO: 2197361 - RNA, 19 nt, Artificial Sequence
  Description of Artificial Sequence: Synthetic oligonucleotide
ccguagauggacuucccuc

SEQ ID NO: 2197362 - RNA, 19 nt, Artificial Sequence
  Description of Artificial Sequence: Synthetic oligonucleotide
guccuagcaccuuggcgac

SEQ ID NO: 2197363 - RNA, 19 nt, Artificial Sequence
  Description of Artificial Sequence: Synthetic oligonucleotide
ugucuuuauugugcagaua

SEQ ID NO: 2197364 - RNA, 19 nt, Artificial Sequence
  Description of Artificial Sequence: Synthetic oligonucleotide
gguguuggggccugcguuc

SEQ ID NO: 2197365 - RNA, 19 nt, Artificial Sequence
  Description of Artificial Sequence: Synthetic oligonucleotide
guguuggggccugcguucg

SEQ ID NO: 2197366 - RNA, 19 nt, Artificial Sequence
  Description of Artificial Sequence: Synthetic oligonucleotide
ccagucugucuuuauugug

SEQ ID NO: 2197367 - RNA, 19 nt, Artificial Sequence
  Description of Artificial Sequence: Synthetic oligonucleotide
uagcucaacuggccacagu

SEQ ID NO: 2197368 - RNA, 19 nt, Artificial Sequence
  Description of Artificial Sequence: Synthetic oligonucleotide
ggagaggagcagcggugcg

SEQ ID NO: 2197369 - RNA, 19 nt, Artificial Sequence
  Description of Artificial Sequence: Synthetic oligonucleotide
ucccucccgugccauugug

SEQ ID NO: 2197370 - RNA, 19 nt, Artificial Sequence
  Description of Artificial Sequence: Synthetic oligonucleotide
ucgcugcaggcgcgagucg

SEQ ID NO: 2197371 - RNA, 19 nt, Artificial Sequence
  Description of Artificial Sequence: Synthetic oligonucleotide
gagagccauugguguuggg

SEQ ID NO: 2197372 - RNA, 19 nt, Artificial Sequence
  Description of Artificial Sequence: Synthetic oligonucleotide
gggucacuugcugaggaug

SEQ ID NO: 2197373 - RNA, 19 nt, Artificial Sequence
  Description of Artificial Sequence: Synthetic oligonucleotide
aggcgcgagucgcggagag

SEQ ID NO: 2197374 - RNA, 19 nt, Artificial Sequence
  Description of Artificial Sequence: Synthetic oligonucleotide
guucgccauggacaagaca

SEQ ID NO: 2197375 - RNA, 19 nt, Artificial Sequence
  Description of Artificial Sequence: Synthetic oligonucleotide
aggcacacaugaauggcaa

SEQ ID NO: 2197376 - RNA, 19 nt, Artificial Sequence
  Description of Artificial Sequence: Synthetic oligonucleotide
cagagcacuuggguggcug

SEQ ID NO: 2197377 - RNA, 19 nt, Artificial Sequence
  Description of Artificial Sequence: Synthetic oligonucleotide
cugcccaucggcgcccacg

SEQ ID NO: 2197378 - RNA, 19 nt, Artificial Sequence
  Description of Artificial Sequence: Synthetic oligonucleotide
uccuagcaccuuggcgacg

SEQ ID NO: 2197379 - RNA, 19 nt, Artificial Sequence
  Description of Artificial Sequence: Synthetic oligonucleotide
uagcaccuuggcgacgacu

SEQ ID NO: 2197380 - RNA, 19 nt, Artificial Sequence
  Description of Artificial Sequence: Synthetic oligonucleotide
guacacgagcggguuccgg

SEQ ID NO: 2197381 - RNA, 19 nt, Artificial Sequence
  Description of Artificial Sequence: Synthetic oligonucleotide
gagcgcgggcuagagagca

SEQ ID NO: 2197382 - RNA, 19 nt, Artificial Sequence
  Description of Artificial Sequence: Synthetic oligonucleotide
cacgagcggguuccgggag

SEQ ID NO: 2197383 - RNA, 19 nt, Artificial Sequence
  Description of Artificial Sequence: Synthetic oligonucleotide
gaaagcggcuuccguagau

SEQ ID NO: 2197384 - RNA, 19 nt, Artificial Sequence
  Description of Artificial Sequence: Synthetic oligonucleotide
cugcguucgccauggacaa

SEQ ID NO: 2197385 - RNA, 19 nt, Artificial Sequence
  Description of Artificial Sequence: Synthetic oligonucleotide
ugcuccgcugucgcugcag

SEQ ID NO: 2197386 - RNA, 19 nt, Artificial Sequence
  Description of Artificial Sequence: Synthetic oligonucleotide
acauggccgaacacaacau

SEQ ID NO: 2197387 - RNA, 19 nt, Artificial Sequence
  Description of Artificial Sequence: Synthetic oligonucleotide
cccucuuugacauggccga

SEQ ID NO: 2197388 - RNA, 19 nt, Artificial Sequence
  Description of Artificial Sequence: Synthetic oligonucleotide
ugcggagcgcgggcuagag

SEQ ID NO: 2197389 - RNA, 19 nt, Artificial Sequence
  Description of Artificial Sequence: Synthetic oligonucleotide
cgugguccugugaaggacc

SEQ ID NO: 2197390 - RNA, 19 nt, Artificial Sequence
  Description of Artificial Sequence: Synthetic oligonucleotide
agcgcagcgacagcaucgu

SEQ ID NO: 2197391 - RNA, 19 nt, Artificial Sequence
  Description of Artificial Sequence: Synthetic oligonucleotide
cgacuuagcucaacuggcc

SEQ ID NO: 2197392 - RNA, 19 nt, Artificial Sequence
  Description of Artificial Sequence: Synthetic oligonucleotide
gugacgggcaaaggcgcgc

SEQ ID NO: 2197393 - RNA, 19 nt, Artificial Sequence
  Description of Artificial Sequence: Synthetic oligonucleotide
cugucuuuauugugcagau

SEQ ID NO: 2197394 - RNA, 19 nt, Artificial Sequence
  Description of Artificial Sequence: Synthetic oligonucleotide
gaguucgggucucgugcuc

SEQ ID NO: 2197395 - RNA, 19 nt, Artificial Sequence
  Description of Artificial Sequence: Synthetic oligonucleotide
aucggcgcccacguccaag

SEQ ID NO: 2197396 - RNA, 19 nt, Artificial Sequence
  Description of Artificial Sequence: Synthetic oligonucleotide
gccgaguggcugcccaucg

SEQ ID NO: 2197397 - RNA, 19 nt, Artificial Sequence
  Description of Artificial Sequence: Synthetic oligonucleotide
augcccucuuugacauggc

SEQ ID NO: 2197398 - RNA, 19 nt, Artificial Sequence
  Description of Artificial Sequence: Synthetic oligonucleotide
gucgcgugacgggcaaagg

SEQ ID NO: 2197399 - RNA, 19 nt, Artificial Sequence
  Description of Artificial Sequence: Synthetic oligonucleotide
ugcaggcgcgagucgcgga

SEQ ID NO: 2197400 - RNA, 19 nt, Artificial Sequence
  Description of Artificial Sequence: Synthetic oligonucleotide
gcagcgugguccugugaag

SEQ ID NO: 2197401 - RNA, 19 nt, Artificial Sequence
  Description of Artificial Sequence: Synthetic oligonucleotide
ggucgcgugacgggcaaag

SEQ ID NO: 2197402 - RNA, 19 nt, Artificial Sequence
  Description of Artificial Sequence: Synthetic oligonucleotide
cguccaaguacacgagcgg

SEQ ID NO: 2197403 - RNA, 19 nt, Artificial Sequence
  Description of Artificial Sequence: Synthetic oligonucleotide
gugcucagagcacuugggu

SEQ ID NO: 2197404 - RNA, 19 nt, Artificial Sequence
  Description of Artificial Sequence: Synthetic oligonucleotide
ggcgcccacguccaaguac

SEQ ID NO: 2197405 - RNA, 19 nt, Artificial Sequence
  Description of Artificial Sequence: Synthetic oligonucleotide
gcggcuuccguagauggac

SEQ ID NO: 2197406 - RNA, 19 nt, Artificial Sequence
  Description of Artificial Sequence: Synthetic oligonucleotide
gcaggcgcgagucgcggag

SEQ ID NO: 2197407 - RNA, 19 nt, Artificial Sequence
  Description of Artificial Sequence: Synthetic oligonucleotide
gccaauguccaaggcacac

SEQ ID NO: 2197408 - RNA, 19 nt, Artificial Sequence
  Description of Artificial Sequence: Synthetic oligonucleotide
aaucgccagccuggcacau

SEQ ID NO: 2197409 - RNA, 19 nt, Artificial Sequence
  Description of Artificial Sequence: Synthetic oligonucleotide
ggucaucgaugccaauguc

SEQ ID NO: 2197410 - RNA, 19 nt, Artificial Sequence
  Description of Artificial Sequence: Synthetic oligonucleotide
acaguucuuuggggcaccu

SEQ ID NO: 2197411 - RNA, 19 nt, Artificial Sequence
  Description of Artificial Sequence: Synthetic oligonucleotide
gcuccgcugucgcugcagg

SEQ ID NO: 2197412 - RNA, 19 nt, Artificial Sequence
  Description of Artificial Sequence: Synthetic oligonucleotide
gguggagccuuuguagcca

SEQ ID NO: 2197413 - RNA, 19 nt, Artificial Sequence
  Description of Artificial Sequence: Synthetic oligonucleotide
gcaucguggucgcgugacg

SEQ ID NO: 2197414 - RNA, 19 nt, Artificial Sequence
  Description of Artificial Sequence: Synthetic oligonucleotide
cuuagaugucuucccacuu

SEQ ID NO: 2197415 - RNA, 19 nt, Artificial Sequence
  Description of Artificial Sequence: Synthetic oligonucleotide
cugcaggcgcgagucgcgg

SEQ ID NO: 2197416 - RNA, 19 nt, Artificial Sequence
  Description of Artificial Sequence: Synthetic oligonucleotide
gaguugagagcagcguggu

SEQ ID NO: 2197417 - RNA, 19 nt, Artificial Sequence
  Description of Artificial Sequence: Synthetic oligonucleotide
gggccugcguucgccaugg

SEQ ID NO: 2197418 - RNA, 19 nt, Artificial Sequence
  Description of Artificial Sequence: Synthetic oligonucleotide
gcgacagcaucguggucgc

SEQ ID NO: 2197419 - RNA, 19 nt, Artificial Sequence
  Description of Artificial Sequence: Synthetic oligonucleotide
uggcugcuacuguccuagc

SEQ ID NO: 2197420 - RNA, 19 nt, Artificial Sequence
  Description of Artificial Sequence: Synthetic oligonucleotide
cauugcccaguggccacac

SEQ ID NO: 2197421 - RNA, 19 nt, Artificial Sequence
  Description of Artificial Sequence: Synthetic oligonucleotide
uucgggucucgugcuccgc

SEQ ID NO: 2197422 - RNA, 19 nt, Artificial Sequence
  Description of Artificial Sequence: Synthetic oligonucleotide
ugcguucgccauggacaag

SEQ ID NO: 2197423 - RNA, 19 nt, Artificial Sequence
  Description of Artificial Sequence: Synthetic oligonucleotide
acaccuggucccacgugcu

SEQ ID NO: 2197424 - RNA, 19 nt, Artificial Sequence
  Description of Artificial Sequence: Synthetic oligonucleotide
gcguucgccauggacaaga

SEQ ID NO: 2197425 - RNA, 19 nt, Artificial Sequence
  Description of Artificial Sequence: Synthetic oligonucleotide
cgcgaagaagucacagcag

SEQ ID NO: 2197426 - RNA, 19 nt, Artificial Sequence
  Description of Artificial Sequence: Synthetic oligonucleotide
gagucgcggagaggagcag

SEQ ID NO: 2197427 - RNA, 19 nt, Artificial Sequence
  Description of Artificial Sequence: Synthetic oligonucleotide
ccacguccaaguacacgag

SEQ ID NO: 2197428 - RNA, 19 nt, Artificial Sequence
  Description of Artificial Sequence: Synthetic oligonucleotide
ggacauaggcacaaacagu

SEQ ID NO: 2197429 - RNA, 19 nt, Artificial Sequence
  Description of Artificial Sequence: Synthetic oligonucleotide
uggcaauucuggggucacu

SEQ ID NO: 2197430 - RNA, 19 nt, Artificial Sequence
  Description of Artificial Sequence: Synthetic oligonucleotide
ggcaaaggcgcgcgaagaa

SEQ ID NO: 2197431 - RNA, 19 nt, Artificial Sequence
  Description of Artificial Sequence: Synthetic oligonucleotide
gcagcgacagcaucguggu

SEQ ID NO: 2197432 - RNA, 19 nt, Artificial Sequence
  Description of Artificial Sequence: Synthetic oligonucleotide
ggaccaugugccugaguaa

SEQ ID NO: 2197433 - RNA, 19 nt, Artificial Sequence
  Description of Artificial Sequence: Synthetic oligonucleotide
cgacgacuuagcucaacug

SEQ ID NO: 2197434 - RNA, 19 nt, Artificial Sequence
  Description of Artificial Sequence: Synthetic oligonucleotide
cgcgcgaagaagucacagc

SEQ ID NO: 2197435 - RNA, 19 nt, Artificial Sequence
  Description of Artificial Sequence: Synthetic oligonucleotide
gccagucugucuuuauugu

SEQ ID NO: 2197436 - RNA, 19 nt, Artificial Sequence
  Description of Artificial Sequence: Synthetic oligonucleotide
gcccacguccaaguacacg

SEQ ID NO: 2197437 - RNA, 19 nt, Artificial Sequence
  Description of Artificial Sequence: Synthetic oligonucleotide
gccugcguucgccauggac

SEQ ID NO: 2197438 - RNA, 19 nt, Artificial Sequence
  Description of Artificial Sequence: Synthetic oligonucleotide
gcgcgggcuagagagcagg

SEQ ID NO: 2197439 - RNA, 19 nt, Artificial Sequence
  Description of Artificial Sequence: Synthetic oligonucleotide
gcgugacgggcaaaggcgc

SEQ ID NO: 2197440 - RNA, 19 nt, Artificial Sequence
  Description of Artificial Sequence: Synthetic oligonucleotide
acgggcaaaggcgcgcgaa

SEQ ID NO: 2197441 - RNA, 19 nt, Artificial Sequence
  Description of Artificial Sequence: Synthetic oligonucleotide
ggaaagcggcuuccguaga

SEQ ID NO: 2197442 - RNA, 19 nt, Artificial Sequence
  Description of Artificial Sequence: Synthetic oligonucleotide
caguucuuuggggcaccug

SEQ ID NO: 2197443 - RNA, 19 nt, Artificial Sequence
  Description of Artificial Sequence: Synthetic oligonucleotide
gcgcgagucgcggagagga

SEQ ID NO: 2197444 - RNA, 19 nt, Artificial Sequence
  Description of Artificial Sequence: Synthetic oligonucleotide
gcgcgcgaagaagucacag

SEQ ID NO: 2197445 - RNA, 19 nt, Artificial Sequence
  Description of Artificial Sequence: Synthetic oligonucleotide
ggcuagagagcaggcccag

SEQ ID NO: 2197446 - RNA, 19 nt, Artificial Sequence
  Description of Artificial Sequence: Synthetic oligonucleotide
cgugacgggcaaaggcgcg

SEQ ID NO: 2197447 - RNA, 19 nt, Artificial Sequence
  Description of Artificial Sequence: Synthetic oligonucleotide
ccgaaagauucuauuuucu

SEQ ID NO: 2197448 - RNA, 19 nt, Artificial Sequence
  Description of Artificial Sequence: Synthetic oligonucleotide
gacgggcaaaggcgcgcga

SEQ ID NO: 2197449 - RNA, 19 nt, Artificial Sequence
  Description of Artificial Sequence: Synthetic oligonucleotide
gcgacgacuuagcucaacu

SEQ ID NO: 2197450 - RNA, 19 nt, Artificial Sequence
  Description of Artificial Sequence: Synthetic oligonucleotide
uggcugcccaucggcgccc

SEQ ID NO: 2197451 - RNA, 19 nt, Artificial Sequence
  Description of Artificial Sequence: Synthetic oligonucleotide
gagcagcgugguccuguga

SEQ ID NO: 2197452 - RNA, 19 nt, Artificial Sequence
  Description of Artificial Sequence: Synthetic oligonucleotide
guccugugaaggaccaugu

SEQ ID NO: 2197453 - RNA, 19 nt, Artificial Sequence
  Description of Artificial Sequence: Synthetic oligonucleotide
gcggagaggagcagcggug

SEQ ID NO: 2197454 - RNA, 19 nt, Artificial Sequence
  Description of Artificial Sequence: Synthetic oligonucleotide
acgcggccgaguggcugcc

SEQ ID NO: 2197455 - RNA, 19 nt, Artificial Sequence
  Description of Artificial Sequence: Synthetic oligonucleotide
acuucccucccgugccauu

SEQ ID NO: 2197456 - RNA, 19 nt, Artificial Sequence
  Description of Artificial Sequence: Synthetic oligonucleotide
ggugcggagcgcgggcuag

SEQ ID NO: 2197457 - RNA, 19 nt, Artificial Sequence
  Description of Artificial Sequence: Synthetic oligonucleotide
gcgcccacguccaaguaca

SEQ ID NO: 2197458 - RNA, 19 nt, Artificial Sequence
  Description of Artificial Sequence: Synthetic oligonucleotide
guuccgggaggaggaguuc

SEQ ID NO: 2197459 - RNA, 19 nt, Artificial Sequence
  Description of Artificial Sequence: Synthetic oligonucleotide
gggcaaaggcgcgcgaaga

SEQ ID NO: 2197460 - RNA, 19 nt, Artificial Sequence
  Description of Artificial Sequence: Synthetic oligonucleotide
ccgcugucgcugcaggcgc

SEQ ID NO: 2197461 - RNA, 19 nt, Artificial Sequence
  Description of Artificial Sequence: Synthetic oligonucleotide
guggucgcgugacgggcaa

SEQ ID NO: 2197462 - RNA, 19 nt, Artificial Sequence
  Description of Artificial Sequence: Synthetic oligonucleotide
ccgaguggcugcccaucgg

SEQ ID NO: 2197463 - RNA, 19 nt, Artificial Sequence
  Description of Artificial Sequence: Synthetic oligonucleotide
gcgggcuagagagcaggcc

SEQ ID NO: 2197464 - RNA, 19 nt, Artificial Sequence
  Description of Artificial Sequence: Synthetic oligonucleotide
gcgugguccugugaaggac

SEQ ID NO: 2197465 - RNA, 19 nt, Artificial Sequence
  Description of Artificial Sequence: Synthetic oligonucleotide
gcaccugugcucagagcac

SEQ ID NO: 2197466 - RNA, 19 nt, Artificial Sequence
  Description of Artificial Sequence: Synthetic oligonucleotide
uggcgacgacuuagcucaa

SEQ ID NO: 2197467 - RNA, 19 nt, Artificial Sequence
  Description of Artificial Sequence: Synthetic oligonucleotide
gggcuagagagcaggccca

SEQ ID NO: 2197468 - RNA, 19 nt, Artificial Sequence
  Description of Artificial Sequence: Synthetic oligonucleotide
gcuagagagcaggcccagc

SEQ ID NO: 2197469 - RNA, 19 nt, Artificial Sequence
  Description of Artificial Sequence: Synthetic oligonucleotide
gagcggguuccgggaggag

SEQ ID NO: 2197470 - RNA, 19 nt, Artificial Sequence
  Description of Artificial Sequence: Synthetic oligonucleotide
cugucgcugcaggcgcgag

SEQ ID NO: 2197471 - RNA, 19 nt, Artificial Sequence
  Description of Artificial Sequence: Synthetic oligonucleotide
agcgcgggcuagagagcag

SEQ ID NO: 2197472 - RNA, 19 nt, Artificial Sequence
  Description of Artificial Sequence: Synthetic oligonucleotide
gcugucuuuggcacaacau

SEQ ID NO: 2197473 - RNA, 19 nt, Artificial Sequence
  Description of Artificial Sequence: Synthetic oligonucleotide
cgugcuccgcugucgcugc

SEQ ID NO: 2197474 - RNA, 19 nt, Artificial Sequence
  Description of Artificial Sequence: Synthetic oligonucleotide
cccgugccauugugguugg

SEQ ID NO: 2197475 - RNA, 19 nt, Artificial Sequence
  Description of Artificial Sequence: Synthetic oligonucleotide
cgagucgcggagaggagca

SEQ ID NO: 2197476 - RNA, 19 nt, Artificial Sequence
  Description of Artificial Sequence: Synthetic oligonucleotide
gcccagaaacaggaucuga

SEQ ID NO: 2197477 - RNA, 19 nt, Artificial Sequence
  Description of Artificial Sequence: Synthetic oligonucleotide
cagcgacagcaucgugguc

SEQ ID NO: 2197478 - RNA, 19 nt, Artificial Sequence
  Description of Artificial Sequence: Synthetic oligonucleotide
cggagaggagcagcggugc

SEQ ID NO: 2197479 - RNA, 19 nt, Artificial Sequence
  Description of Artificial Sequence: Synthetic oligonucleotide
gucccacgugcuucagugu

SEQ ID NO: 2197480 - RNA, 19 nt, Artificial Sequence
  Description of Artificial Sequence: Synthetic oligonucleotide
accugugcucagagcacuu

SEQ ID NO: 2197481 - RNA, 19 nt, Artificial Sequence
  Description of Artificial Sequence: Synthetic oligonucleotide
cagcaucguggucgcguga

SEQ ID NO: 2197482 - RNA, 19 nt, Artificial Sequence
  Description of Artificial Sequence: Synthetic oligonucleotide
caccugugcucagagcacu

SEQ ID NO: 2197483 - RNA, 19 nt, Artificial Sequence
  Description of Artificial Sequence: Synthetic oligonucleotide
cgaaagauucuauuuucuu

SEQ ID NO: 2197484 - RNA, 19 nt, Artificial Sequence
  Description of Artificial Sequence: Synthetic oligonucleotide
cgggcaaaggcgcgcgaag

SEQ ID NO: 2197485 - RNA, 19 nt, Artificial Sequence
  Description of Artificial Sequence: Synthetic oligonucleotide
ggccgaacacaacaugcuu

SEQ ID NO: 2197486 - RNA, 19 nt, Artificial Sequence
  Description of Artificial Sequence: Synthetic oligonucleotide
cagggcucugaaguucucu

SEQ ID NO: 2197487 - RNA, 19 nt, Artificial Sequence
  Description of Artificial Sequence: Synthetic oligonucleotide
ccaucggcgcccacgucca

SEQ ID NO: 2197488 - RNA, 19 nt, Artificial Sequence
  Description of Artificial Sequence: Synthetic oligonucleotide
ccucccgugccauuguggu

SEQ ID NO: 2197489 - RNA, 19 nt, Artificial Sequence
  Description of Artificial Sequence: Synthetic oligonucleotide
ggcgacgacuuagcucaac

SEQ ID NO: 2197490 - RNA, 19 nt, Artificial Sequence
  Description of Artificial Sequence: Synthetic oligonucleotide
cguucgccauggacaagac

SEQ ID NO: 2197491 - RNA, 19 nt, Artificial Sequence
  Description of Artificial Sequence: Synthetic oligonucleotide
uggucgcgugacgggcaaa

SEQ ID NO: 2197492 - RNA, 19 nt, Artificial Sequence
  Description of Artificial Sequence: Synthetic oligonucleotide
ccaugugccugaguaaccu

SEQ ID NO: 2197493 - RNA, 19 nt, Artificial Sequence
  Description of Artificial Sequence: Synthetic oligonucleotide
cgcgggcuagagagcaggc

SEQ ID NO: 2197494 - RNA, 19 nt, Artificial Sequence
  Description of Artificial Sequence: Synthetic oligonucleotide
gguuccgggaggaggaguu

SEQ ID NO: 2197495 - RNA, 19 nt, Artificial Sequence
  Description of Artificial Sequence: Synthetic oligonucleotide
ggaucacccuauggaaggu

SEQ ID NO: 2197496 - RNA, 19 nt, Artificial Sequence
  Description of Artificial Sequence: Synthetic oligonucleotide
gcggccgaguggcugccca

SEQ ID NO: 2197497 - RNA, 19 nt, Artificial Sequence
  Description of Artificial Sequence: Synthetic oligonucleotide
ccugaguaaccuucuucau

SEQ ID NO: 2197498 - RNA, 19 nt, Artificial Sequence
  Description of Artificial Sequence: Synthetic oligonucleotide
gacuucccucccgugccau

SEQ ID NO: 2197499 - RNA, 19 nt, Artificial Sequence
  Description of Artificial Sequence: Synthetic oligonucleotide
cgcugucgcugcaggcgcg

SEQ ID NO: 2197500 - RNA, 19 nt, Artificial Sequence
  Description of Artificial Sequence: Synthetic oligonucleotide
cucgugcuccgcugucgcu

SEQ ID NO: 2197501 - RNA, 19 nt, Artificial Sequence
  Description of Artificial Sequence: Synthetic oligonucleotide
caggcgcgagucgcggaga

SEQ ID NO: 2197502 - RNA, 19 nt, Artificial Sequence
  Description of Artificial Sequence: Synthetic oligonucleotide
gcugucgcugcaggcgcga

SEQ ID NO: 2197503 - RNA, 19 nt, Artificial Sequence
  Description of Artificial Sequence: Synthetic oligonucleotide
ggggucacuugcugaggau

SEQ ID NO: 2197504 - RNA, 19 nt, Artificial Sequence
  Description of Artificial Sequence: Synthetic oligonucleotide
gcgcagcgacagcaucgug

SEQ ID NO: 2197505 - RNA, 19 nt, Artificial Sequence
  Description of Artificial Sequence: Synthetic oligonucleotide
gcaccuuggcgacgacuua

SEQ ID NO: 2197506 - RNA, 19 nt, Artificial Sequence
  Description of Artificial Sequence: Synthetic oligonucleotide
accacgcggccgaguggcu

SEQ ID NO: 2197507 - RNA, 19 nt, Artificial Sequence
  Description of Artificial Sequence: Synthetic oligonucleotide
gugcuccgcugucgcugca

SEQ ID NO: 2197508 - RNA, 19 nt, Artificial Sequence
  Description of Artificial Sequence: Synthetic oligonucleotide
cgcgagucgcggagaggag

SEQ ID NO: 2197509 - RNA, 19 nt, Artificial Sequence
  Description of Artificial Sequence: Synthetic oligonucleotide
ccacgcggccgaguggcug

SEQ ID NO: 2197510 - RNA, 19 nt, Artificial Sequence
  Description of Artificial Sequence: Synthetic oligonucleotide
gcuacuguccuagcaccuu

SEQ ID NO: 2197511 - RNA, 19 nt, Artificial Sequence
  Description of Artificial Sequence: Synthetic oligonucleotide
gcggagcgcgggcuagaga

SEQ ID NO: 2197512 - RNA, 19 nt, Artificial Sequence
  Description of Artificial Sequence: Synthetic oligonucleotide
cguggucgcgugacgggca

SEQ ID NO: 2197513 - RNA, 19 nt, Artificial Sequence
  Description of Artificial Sequence: Synthetic oligonucleotide
ggcgcgcgaagaagucaca

SEQ ID NO: 2197514 - RNA, 19 nt, Artificial Sequence
  Description of Artificial Sequence: Synthetic oligonucleotide
cucccgugccauugugguu

SEQ ID NO: 2197515 - RNA, 19 nt, Artificial Sequence
  Description of Artificial Sequence: Synthetic oligonucleotide
ccuauggaagguggagccu

SEQ ID NO: 2197516 - RNA, 19 nt, Artificial Sequence
  Description of Artificial Sequence: Synthetic oligonucleotide
ccaaguacacgagcggguu

SEQ ID NO: 2197517 - RNA, 19 nt, Artificial Sequence
  Description of Artificial Sequence: Synthetic oligonucleotide
ggguuccgggaggaggagu

SEQ ID NO: 2197518 - RNA, 19 nt, Artificial Sequence
  Description of Artificial Sequence: Synthetic oligonucleotide
caucggcgcccacguccaa

SEQ ID NO: 2197519 - RNA, 19 nt, Artificial Sequence
  Description of Artificial Sequence: Synthetic oligonucleotide
caccuggucccacgugcuu

SEQ ID NO: 2197520 - RNA, 19 nt, Artificial Sequence
  Description of Artificial Sequence: Synthetic oligonucleotide
ccucuuugacauggccgaa

SEQ ID NO: 2197521 - RNA, 19 nt, Artificial Sequence
  Description of Artificial Sequence: Synthetic oligonucleotide
cgcccacguccaaguacac

SEQ ID NO: 2197522 - RNA, 19 nt, Artificial Sequence
  Description of Artificial Sequence: Synthetic oligonucleotide
cgcggagaggagcagcggu

SEQ ID NO: 2197523 - RNA, 19 nt, Artificial Sequence
  Description of Artificial Sequence: Synthetic oligonucleotide
gcugcccaucggcgcccac

SEQ ID NO: 2197524 - RNA, 19 nt, Artificial Sequence
  Description of Artificial Sequence: Synthetic oligonucleotide
cgccauggacaagacaccu

SEQ ID NO: 2197525 - RNA, 19 nt, Artificial Sequence
  Description of Artificial Sequence: Synthetic oligonucleotide
cggguuccgggaggaggag

SEQ ID NO: 2197526 - RNA, 19 nt, Artificial Sequence
  Description of Artificial Sequence: Synthetic oligonucleotide
ggcugcccaucggcgccca

SEQ ID NO: 2197527 - RNA, 19 nt, Artificial Sequence
  Description of Artificial Sequence: Synthetic oligonucleotide
cggcuuccguagauggacu

SEQ ID NO: 2197528 - RNA, 19 nt, Artificial Sequence
  Description of Artificial Sequence: Synthetic oligonucleotide
gcggugcggagcgcgggcu

SEQ ID NO: 2197529 - RNA, 19 nt, Artificial Sequence
  Description of Artificial Sequence: Synthetic oligonucleotide
cagcaccacgcggccgagu

SEQ ID NO: 2197530 - RNA, 19 nt, Artificial Sequence
  Description of Artificial Sequence: Synthetic oligonucleotide
cggugcggagcgcgggcua

SEQ ID NO: 2197531 - RNA, 19 nt, Artificial Sequence
  Description of Artificial Sequence: Synthetic oligonucleotide
cggccgaguggcugcccau

SEQ ID NO: 2197532 - RNA, 19 nt, Artificial Sequence
  Description of Artificial Sequence: Synthetic oligonucleotide
ccgugccauugugguuggu

SEQ ID NO: 2197533 - RNA, 19 nt, Artificial Sequence
  Description of Artificial Sequence: Synthetic oligonucleotide
aaggcauucauuuuguugg

SEQ ID NO: 2197534 - RNA, 19 nt, Artificial Sequence
  Description of Artificial Sequence: Synthetic oligonucleotide
aauuuuccaauucaauuac

SEQ ID NO: 2197535 - RNA, 19 nt, Artificial Sequence
  Description of Artificial Sequence: Synthetic oligonucleotide
ugagauguauuauaaagcg

SEQ ID NO: 2197536 - RNA, 19 nt, Artificial Sequence
  Description of Artificial Sequence: Synthetic oligonucleotide
uuaaccugaaaucacaugc

SEQ ID NO: 2197537 - RNA, 19 nt, Artificial Sequence
  Description of Artificial Sequence: Synthetic oligonucleotide
uuggaauccaguuugaggg

SEQ ID NO: 2197538 - RNA, 19 nt, Artificial Sequence
  Description of Artificial Sequence: Synthetic oligonucleotide
aacuauuuaguauguuucc

SEQ ID NO: 2197539 - RNA, 19 nt, Artificial Sequence
  Description of Artificial Sequence: Synthetic oligonucleotide
aauaguuuuguccuugcag

SEQ ID NO: 2197540 - RNA, 19 nt, Artificial Sequence
  Description of Artificial Sequence: Synthetic oligonucleotide
uaaaacaucucuuucauuc

SEQ ID NO: 2197541 - RNA, 19 nt, Artificial Sequence
  Description of Artificial Sequence: Synthetic oligonucleotide
ucugcaugaacauagauaa

SEQ ID NO: 2197542 - RNA, 19 nt, Artificial Sequence
  Description of Artificial Sequence: Synthetic oligonucleotide
uuaauauaacuucacuucc

SEQ ID NO: 2197543 - RNA, 19 nt, Artificial Sequence
  Description of Artificial Sequence: Synthetic oligonucleotide
aaaguuguagcaucaugac

SEQ ID NO: 2197544 - RNA, 19 nt, Artificial Sequence
  Description of Artificial Sequence: Synthetic oligonucleotide
uaagaccucaucaacaaag

SEQ ID NO: 2197545 - RNA, 19 nt, Artificial Sequence
  Description of Artificial Sequence: Synthetic oligonucleotide
uuguggacaaaucugauca

SEQ ID NO: 2197546 - RNA, 19 nt, Artificial Sequence
  Description of Artificial Sequence: Synthetic oligonucleotide
aaauucugcuccuccaccc

SEQ ID NO: 2197547 - RNA, 19 nt, Artificial Sequence
  Description of Artificial Sequence: Synthetic oligonucleotide
cuaaauacagcucucuucc

SEQ ID NO: 2197548 - RNA, 19 nt, Artificial Sequence
  Description of Artificial Sequence: Synthetic oligonucleotide
auguuuaaagcuuucuugg

SEQ ID NO: 2197549 - RNA, 19 nt, Artificial Sequence
  Description of Artificial Sequence: Synthetic oligonucleotide
aaacuauuuaguauguuuc

SEQ ID NO: 2197550 - RNA, 19 nt, Artificial Sequence
  Description of Artificial Sequence: Synthetic oligonucleotide
auucugauucuucugaagg

SEQ ID NO: 2197551 - RNA, 19 nt, Artificial Sequence
  Description of Artificial Sequence: Synthetic oligonucleotide
aaaacuauuuaguauguuu

SEQ ID NO: 2197552 - RNA, 19 nt, Artificial Sequence
  Description of Artificial Sequence: Synthetic oligonucleotide
auagucauuaaccugaaau

SEQ ID NO: 2197553 - RNA, 19 nt, Artificial Sequence
  Description of Artificial Sequence: Synthetic oligonucleotide
uccauagucauuaaccuga

SEQ ID NO: 2197554 - RNA, 19 nt, Artificial Sequence
  Description of Artificial Sequence: Synthetic oligonucleotide
uuuuaaaccuucuaaugac

SEQ ID NO: 2197555 - RNA, 19 nt, Artificial Sequence
  Description of Artificial Sequence: Synthetic oligonucleotide
uuagcaauagccucuaggu

SEQ ID NO: 2197556 - RNA, 19 nt, Artificial Sequence
  Description of Artificial Sequence: Synthetic oligonucleotide
aaaaguuguagcaucauga

SEQ ID NO: 2197557 - RNA, 19 nt, Artificial Sequence
  Description of Artificial Sequence: Synthetic oligonucleotide
ucuaaugacuucuggaggc

SEQ ID NO: 2197558 - RNA, 19 nt, Artificial Sequence
  Description of Artificial Sequence: Synthetic oligonucleotide
uucacuuccauccauguuc

SEQ ID NO: 2197559 - RNA, 19 nt, Artificial Sequence
  Description of Artificial Sequence: Synthetic oligonucleotide
auuucaaccagccggcugg

SEQ ID NO: 2197560 - RNA, 19 nt, Artificial Sequence
  Description of Artificial Sequence: Synthetic oligonucleotide
uucuaaugacuucuggagg

SEQ ID NO: 2197561 - RNA, 19 nt, Artificial Sequence
  Description of Artificial Sequence: Synthetic oligonucleotide
ucucauugaagcuucaacu

SEQ ID NO: 2197562 - RNA, 19 nt, Artificial Sequence
  Description of Artificial Sequence: Synthetic oligonucleotide
aaagcgacaccccuguuug

SEQ ID NO: 2197563 - RNA, 19 nt, Artificial Sequence
  Description of Artificial Sequence: Synthetic oligonucleotide
cuucuaaugacuucuggag

SEQ ID NO: 2197564 - RNA, 19 nt, Artificial Sequence
  Description of Artificial Sequence: Synthetic oligonucleotide
cauguuuaaagcuuucuug

SEQ ID NO: 2197565 - RNA, 19 nt, Artificial Sequence
  Description of Artificial Sequence: Synthetic oligonucleotide
cagcauucagaucagaucc

SEQ ID NO: 2197566 - RNA, 19 nt, Artificial Sequence
  Description of Artificial Sequence: Synthetic oligonucleotide
uuuguaacuaaacggauuu

SEQ ID NO: 2197567 - RNA, 19 nt, Artificial Sequence
  Description of Artificial Sequence: Synthetic oligonucleotide
aacauagauaaggccaccc

SEQ ID NO: 2197568 - RNA, 19 nt, Artificial Sequence
  Description of Artificial Sequence: Synthetic oligonucleotide
guauuauaaagcgacaccc

SEQ ID NO: 2197569 - RNA, 19 nt, Artificial Sequence
  Description of Artificial Sequence: Synthetic oligonucleotide
uauuauaaagcgacacccc

SEQ ID NO: 2197570 - RNA, 19 nt, Artificial Sequence
  Description of Artificial Sequence: Synthetic oligonucleotide
acuauuuaguauguuuccc

SEQ ID NO: 2197571 - RNA, 19 nt, Artificial Sequence
  Description of Artificial Sequence: Synthetic oligonucleotide
ucaucaacaaagcccaugu

SEQ ID NO: 2197572 - RNA, 19 nt, Artificial Sequence
  Description of Artificial Sequence: Synthetic oligonucleotide
ccacuuaacacuuugagag

SEQ ID NO: 2197573 - RNA, 19 nt, Artificial Sequence
  Description of Artificial Sequence: Synthetic oligonucleotide
cuuggaauccaguuugagg

SEQ ID NO: 2197574 - RNA, 19 nt, Artificial Sequence
  Description of Artificial Sequence: Synthetic oligonucleotide
cuguaguaaauucugcucc

SEQ ID NO: 2197575 - RNA, 19 nt, Artificial Sequence
  Description of Artificial Sequence: Synthetic oligonucleotide
acagcauucagaucagauc

SEQ ID NO: 2197576 - RNA, 19 nt, Artificial Sequence
  Description of Artificial Sequence: Synthetic oligonucleotide
gacaaaucugaucacacuc

SEQ ID NO: 2197577 - RNA, 19 nt, Artificial Sequence
  Description of Artificial Sequence: Synthetic oligonucleotide
ucauugaagcuucaacuug

SEQ ID NO: 2197578 - RNA, 19 nt, Artificial Sequence
  Description of Artificial Sequence: Synthetic oligonucleotide
aaucacaugcuguaguaaa

SEQ ID NO: 2197579 - RNA, 19 nt, Artificial Sequence
  Description of Artificial Sequence: Synthetic oligonucleotide
gaaggcauucauuuuguug

SEQ ID NO: 2197580 - RNA, 19 nt, Artificial Sequence
  Description of Artificial Sequence: Synthetic oligonucleotide
uaauauaacuucacuucca

SEQ ID NO: 2197581 - RNA, 19 nt, Artificial Sequence
  Description of Artificial Sequence: Synthetic oligonucleotide
uguccaauuuuccaauuca

SEQ ID NO: 2197582 - RNA, 19 nt, Artificial Sequence
  Description of Artificial Sequence: Synthetic oligonucleotide
ugaacauagauaaggccac

SEQ ID NO: 2197583 - RNA, 19 nt, Artificial Sequence
  Description of Artificial Sequence: Synthetic oligonucleotide
uauaaagcgacaccccugu

SEQ ID NO: 2197584 - RNA, 19 nt, Artificial Sequence
  Description of Artificial Sequence: Synthetic oligonucleotide
uccuaaaacaucucuuuca

SEQ ID NO: 2197585 - RNA, 19 nt, Artificial Sequence
  Description of Artificial Sequence: Synthetic oligonucleotide
acugacaaauugcucuagc

SEQ ID NO: 2197586 - RNA, 19 nt, Artificial Sequence
  Description of Artificial Sequence: Synthetic oligonucleotide
acaaagcccauguuuaaag

SEQ ID NO: 2197587 - RNA, 19 nt, Artificial Sequence
  Description of Artificial Sequence: Synthetic oligonucleotide
auuauaaagcgacaccccu

SEQ ID NO: 2197588 - RNA, 19 nt, Artificial Sequence
  Description of Artificial Sequence: Synthetic oligonucleotide
uuuaaagcuuucuuggaau

SEQ ID NO: 2197589 - RNA, 19 nt, Artificial Sequence
  Description of Artificial Sequence: Synthetic oligonucleotide
auucagaucagauccugag

SEQ ID NO: 2197590 - RNA, 19 nt, Artificial Sequence
  Description of Artificial Sequence: Synthetic oligonucleotide
aagaccucaucaacaaagc

SEQ ID NO: 2197591 - RNA, 19 nt, Artificial Sequence
  Description of Artificial Sequence: Synthetic oligonucleotide
ugaaaucacaugcuguagu

SEQ ID NO: 2197592 - RNA, 19 nt, Artificial Sequence
  Description of Artificial Sequence: Synthetic oligonucleotide
aacacuuugagagcuuguc

SEQ ID NO: 2197593 - RNA, 19 nt, Artificial Sequence
  Description of Artificial Sequence: Synthetic oligonucleotide
aaaccuucuaaugacuucu

SEQ ID NO: 2197594 - RNA, 19 nt, Artificial Sequence
  Description of Artificial Sequence: Synthetic oligonucleotide
ucuucugaaggucaacgga

SEQ ID NO: 2197595 - RNA, 19 nt, Artificial Sequence
  Description of Artificial Sequence: Synthetic oligonucleotide
uggaacuaugcccaucucc

SEQ ID NO: 2197596 - RNA, 19 nt, Artificial Sequence
  Description of Artificial Sequence: Synthetic oligonucleotide
uguuaagguguucugcaug

SEQ ID NO: 2197597 - RNA, 19 nt, Artificial Sequence
  Description of Artificial Sequence: Synthetic oligonucleotide
auuuuguugggguuguuca

SEQ ID NO: 2197598 - RNA, 19 nt, Artificial Sequence
  Description of Artificial Sequence: Synthetic oligonucleotide
ucuugugccucuucuagag

SEQ ID NO: 2197599 - RNA, 19 nt, Artificial Sequence
  Description of Artificial Sequence: Synthetic oligonucleotide
ucuccuuguggacaaaucu

SEQ ID NO: 2197600 - RNA, 19 nt, Artificial Sequence
  Description of Artificial Sequence: Synthetic oligonucleotide
uagucauuaaccugaaauc

SEQ ID NO: 2197601 - RNA, 19 nt, Artificial Sequence
  Description of Artificial Sequence: Synthetic oligonucleotide
aauuacccuuuccaaaagu

SEQ ID NO: 2197602 - RNA, 19 nt, Artificial Sequence
  Description of Artificial Sequence: Synthetic oligonucleotide
aaugcuuccucuaaauaca

SEQ ID NO: 2197603 - RNA, 19 nt, Artificial Sequence
  Description of Artificial Sequence: Synthetic oligonucleotide
caugcuguaguaaauucug

SEQ ID NO: 2197604 - RNA, 19 nt, Artificial Sequence
  Description of Artificial Sequence: Synthetic oligonucleotide
guauguuucccucucuuag

SEQ ID NO: 2197605 - RNA, 19 nt, Artificial Sequence
  Description of Artificial Sequence: Synthetic oligonucleotide
uucaacuuguaguacuccc

SEQ ID NO: 2197606 - RNA, 19 nt, Artificial Sequence
  Description of Artificial Sequence: Synthetic oligonucleotide
aacuaugcccaucuccuug

SEQ ID NO: 2197607 - RNA, 19 nt, Artificial Sequence
  Description of Artificial Sequence: Synthetic oligonucleotide
ucccacuuaacacuuugag

SEQ ID NO: 2197608 - RNA, 19 nt, Artificial Sequence
  Description of Artificial Sequence: Synthetic oligonucleotide
aaaucugaucacacucucc

SEQ ID NO: 2197609 - RNA, 19 nt, Artificial Sequence
  Description of Artificial Sequence: Synthetic oligonucleotide
uuacccuuuccaaaaguug

SEQ ID NO: 2197610 - RNA, 19 nt, Artificial Sequence
  Description of Artificial Sequence: Synthetic oligonucleotide
uuauaaagcgacaccccug

SEQ ID NO: 2197611 - RNA, 19 nt, Artificial Sequence
  Description of Artificial Sequence: Synthetic oligonucleotide
uuuaguauguuucccucuc

SEQ ID NO: 2197612 - RNA, 19 nt, Artificial Sequence
  Description of Artificial Sequence: Synthetic oligonucleotide
uguaagaccucaucaacaa

SEQ ID NO: 2197613 - RNA, 19 nt, Artificial Sequence
  Description of Artificial Sequence: Synthetic oligonucleotide
ucugcugccaaugauuuca

SEQ ID NO: 2197614 - RNA, 19 nt, Artificial Sequence
  Description of Artificial Sequence: Synthetic oligonucleotide
caacgcuuauuaaagguag

SEQ ID NO: 2197615 - RNA, 19 nt, Artificial Sequence
  Description of Artificial Sequence: Synthetic oligonucleotide
uucucauugaagcuucaac

SEQ ID NO: 2197616 - RNA, 19 nt, Artificial Sequence
  Description of Artificial Sequence: Synthetic oligonucleotide
uucugcaugaacauagaua

SEQ ID NO: 2197617 - RNA, 19 nt, Artificial Sequence
  Description of Artificial Sequence: Synthetic oligonucleotide
uguaauaguuuuguccuug

SEQ ID NO: 2197618 - RNA, 19 nt, Artificial Sequence
  Description of Artificial Sequence: Synthetic oligonucleotide
uucaauuacccuuuccaaa

SEQ ID NO: 2197619 - RNA, 19 nt, Artificial Sequence
  Description of Artificial Sequence: Synthetic oligonucleotide
agucucauaaaucuuguua

SEQ ID NO: 2197620 - RNA, 19 nt, Artificial Sequence
  Description of Artificial Sequence: Synthetic oligonucleotide
ucaacuuguaguacuccca

SEQ ID NO: 2197621 - RNA, 19 nt, Artificial Sequence
  Description of Artificial Sequence: Synthetic oligonucleotide
cugacaaauugcucuagcc

SEQ ID NO: 2197622 - RNA, 19 nt, Artificial Sequence
  Description of Artificial Sequence: Synthetic oligonucleotide
uugagggucccacuuaaca

SEQ ID NO: 2197623 - RNA, 19 nt, Artificial Sequence
  Description of Artificial Sequence: Synthetic oligonucleotide
agcaauagccucuagguuu

SEQ ID NO: 2197624 - RNA, 19 nt, Artificial Sequence
  Description of Artificial Sequence: Synthetic oligonucleotide
acuuguaguacucccauau

SEQ ID NO: 2197625 - RNA, 19 nt, Artificial Sequence
  Description of Artificial Sequence: Synthetic oligonucleotide
agucauuaaccugaaauca

SEQ ID NO: 2197626 - RNA, 19 nt, Artificial Sequence
  Description of Artificial Sequence: Synthetic oligonucleotide
agagcaacgcuuauuaaag

SEQ ID NO: 2197627 - RNA, 19 nt, Artificial Sequence
  Description of Artificial Sequence: Synthetic oligonucleotide
cuugcagacagagauguag

SEQ ID NO: 2197628 - RNA, 19 nt, Artificial Sequence
  Description of Artificial Sequence: Synthetic oligonucleotide
uuccaauucaauuacccuu

SEQ ID NO: 2197629 - RNA, 19 nt, Artificial Sequence
  Description of Artificial Sequence: Synthetic oligonucleotide
uucagaucagauccugagc

SEQ ID NO: 2197630 - RNA, 19 nt, Artificial Sequence
  Description of Artificial Sequence: Synthetic oligonucleotide
cuucugaaggucaacggac

SEQ ID NO: 2197631 - RNA, 19 nt, Artificial Sequence
  Description of Artificial Sequence: Synthetic oligonucleotide
cauucucugagguggagag

SEQ ID NO: 2197632 - RNA, 19 nt, Artificial Sequence
  Description of Artificial Sequence: Synthetic oligonucleotide
uguuuaaagcuuucuugga

SEQ ID NO: 2197633 - RNA, 19 nt, Artificial Sequence
  Description of Artificial Sequence: Synthetic oligonucleotide
auauaacuucacuuccauc

SEQ ID NO: 2197634 - RNA, 19 nt, Artificial Sequence
  Description of Artificial Sequence: Synthetic oligonucleotide
cacuuugagagcuugucug

SEQ ID NO: 2197635 - RNA, 19 nt, Artificial Sequence
  Description of Artificial Sequence: Synthetic oligonucleotide
caucugaagacuguaagac

SEQ ID NO: 2197636 - RNA, 19 nt, Artificial Sequence
  Description of Artificial Sequence: Synthetic oligonucleotide
aauugcucuagccauucuu

SEQ ID NO: 2197637 - RNA, 19 nt, Artificial Sequence
  Description of Artificial Sequence: Synthetic oligonucleotide
auagccucuagguuugcag

SEQ ID NO: 2197638 - RNA, 19 nt, Artificial Sequence
  Description of Artificial Sequence: Synthetic oligonucleotide
aaugccaaugccauucuga

SEQ ID NO: 2197639 - RNA, 19 nt, Artificial Sequence
  Description of Artificial Sequence: Synthetic oligonucleotide
uguaaugcuuccucuaaau

SEQ ID NO: 2197640 - RNA, 19 nt, Artificial Sequence
  Description of Artificial Sequence: Synthetic oligonucleotide
agcaacgcuuauuaaaggu

SEQ ID NO: 2197641 - RNA, 19 nt, Artificial Sequence
  Description of Artificial Sequence: Synthetic oligonucleotide
agauaaggccaccccauuc

SEQ ID NO: 2197642 - RNA, 19 nt, Artificial Sequence
  Description of Artificial Sequence: Synthetic oligonucleotide
uuagcuucaucugaagacu

SEQ ID NO: 2197643 - RNA, 19 nt, Artificial Sequence
  Description of Artificial Sequence: Synthetic oligonucleotide
ucuuguuaagguguucugc

SEQ ID NO: 2197644 - RNA, 19 nt, Artificial Sequence
  Description of Artificial Sequence: Synthetic oligonucleotide
ucucuuucauucuguaaug

SEQ ID NO: 2197645 - RNA, 19 nt, Artificial Sequence
  Description of Artificial Sequence: Synthetic oligonucleotide
gaucacacucuccauaguc

SEQ ID NO: 2197646 - RNA, 19 nt, Artificial Sequence
  Description of Artificial Sequence: Synthetic oligonucleotide
ucuucuagagccuuagcuu

SEQ ID NO: 2197647 - RNA, 19 nt, Artificial Sequence
  Description of Artificial Sequence: Synthetic oligonucleotide
aaggucaacggacccacca

SEQ ID NO: 2197648 - RNA, 19 nt, Artificial Sequence
  Description of Artificial Sequence: Synthetic oligonucleotide
uguaguaaauucugcuccu

SEQ ID NO: 2197649 - RNA, 19 nt, Artificial Sequence
  Description of Artificial Sequence: Synthetic oligonucleotide
aacggacccaccaggaaac

SEQ ID NO: 2197650 - RNA, 19 nt, Artificial Sequence
  Description of Artificial Sequence: Synthetic oligonucleotide
uaaccugaaaucacaugcu

SEQ ID NO: 2197651 - RNA, 19 nt, Artificial Sequence
  Description of Artificial Sequence: Synthetic oligonucleotide
aaauacagcucucuuccuu

SEQ ID NO: 2197652 - RNA, 19 nt, Artificial Sequence
  Description of Artificial Sequence: Synthetic oligonucleotide
uuuuguugggguuguucag

SEQ ID NO: 2197653 - RNA, 19 nt, Artificial Sequence
  Description of Artificial Sequence: Synthetic oligonucleotide
agcucucuuccuuuguaac

SEQ ID NO: 2197654 - RNA, 19 nt, Artificial Sequence
  Description of Artificial Sequence: Synthetic oligonucleotide
uguuccuaaaacaucucuu

SEQ ID NO: 2197655 - RNA, 19 nt, Artificial Sequence
  Description of Artificial Sequence: Synthetic oligonucleotide
cuucuagagccuuagcuuc

SEQ ID NO: 2197656 - RNA, 19 nt, Artificial Sequence
  Description of Artificial Sequence: Synthetic oligonucleotide
agcaucaugacaccugaga

SEQ ID NO: 2197657 - RNA, 19 nt, Artificial Sequence
  Description of Artificial Sequence: Synthetic oligonucleotide
uaugcccaucuccuugugg

SEQ ID NO: 2197658 - RNA, 19 nt, Artificial Sequence
  Description of Artificial Sequence: Synthetic oligonucleotide
uucugauucuucugaaggu

SEQ ID NO: 2197659 - RNA, 19 nt, Artificial Sequence
  Description of Artificial Sequence: Synthetic oligonucleotide
ugagggucccacuuaacac

SEQ ID NO: 2197660 - RNA, 19 nt, Artificial Sequence
  Description of Artificial Sequence: Synthetic oligonucleotide
aauccaguuugaggguccc

SEQ ID NO: 2197661 - RNA, 19 nt, Artificial Sequence
  Description of Artificial Sequence: Synthetic oligonucleotide
gcugccaaugauuucaacc

SEQ ID NO: 2197662 - RNA, 19 nt, Artificial Sequence
  Description of Artificial Sequence: Synthetic oligonucleotide
aaugaggccuuucccuucu

SEQ ID NO: 2197663 - RNA, 19 nt, Artificial Sequence
  Description of Artificial Sequence: Synthetic oligonucleotide
gagaaugccaaugccauuc

SEQ ID NO: 2197664 - RNA, 19 nt, Artificial Sequence
  Description of Artificial Sequence: Synthetic oligonucleotide
ugccaaugauuucaaccag

SEQ ID NO: 2197665 - RNA, 19 nt, Artificial Sequence
  Description of Artificial Sequence: Synthetic oligonucleotide
gagcaacgcuuauuaaagg

SEQ ID NO: 2197666 - RNA, 19 nt, Artificial Sequence
  Description of Artificial Sequence: Synthetic oligonucleotide
guuaagguguucugcauga

SEQ ID NO: 2197667 - RNA, 19 nt, Artificial Sequence
  Description of Artificial Sequence: Synthetic oligonucleotide
aaaucuuguuaagguguuc

SEQ ID NO: 2197668 - RNA, 19 nt, Artificial Sequence
  Description of Artificial Sequence: Synthetic oligonucleotide
acuuaacacuuugagagcu

SEQ ID NO: 2197669 - RNA, 19 nt, Artificial Sequence
  Description of Artificial Sequence: Synthetic oligonucleotide
uuccuaaaacaucucuuuc

SEQ ID NO: 2197670 - RNA, 19 nt, Artificial Sequence
  Description of Artificial Sequence: Synthetic oligonucleotide
gcuuauuaaagguagucuc

SEQ ID NO: 2197671 - RNA, 19 nt, Artificial Sequence
  Description of Artificial Sequence: Synthetic oligonucleotide
agcuucaacuuguaguacu

SEQ ID NO: 2197672 - RNA, 19 nt, Artificial Sequence
  Description of Artificial Sequence: Synthetic oligonucleotide
cauucugauucuucugaag

SEQ ID NO: 2197673 - RNA, 19 nt, Artificial Sequence
  Description of Artificial Sequence: Synthetic oligonucleotide
uaaaccuucuaaugacuuc

SEQ ID NO: 2197674 - RNA, 19 nt, Artificial Sequence
  Description of Artificial Sequence: Synthetic oligonucleotide
agguuugcagguccacccc

SEQ ID NO: 2197675 - RNA, 19 nt, Artificial Sequence
  Description of Artificial Sequence: Synthetic oligonucleotide
gauuucaaccagccggcug

SEQ ID NO: 2197676 - RNA, 19 nt, Artificial Sequence
  Description of Artificial Sequence: Synthetic oligonucleotide
uaaagcgacaccccuguuu

SEQ ID NO: 2197677 - RNA, 19 nt, Artificial Sequence
  Description of Artificial Sequence: Synthetic oligonucleotide
agugcuuucacagcauuca

SEQ ID NO: 2197678 - RNA, 19 nt, Artificial Sequence
  Description of Artificial Sequence: Synthetic oligonucleotide
uaaaucuuguuaagguguu

SEQ ID NO: 2197679 - RNA, 19 nt, Artificial Sequence
  Description of Artificial Sequence: Synthetic oligonucleotide
ucugauucuucugaagguc

SEQ ID NO: 2197680 - RNA, 19 nt, Artificial Sequence
  Description of Artificial Sequence: Synthetic oligonucleotide
acgcuuauuaaagguaguc

SEQ ID NO: 2197681 - RNA, 19 nt, Artificial Sequence
  Description of Artificial Sequence: Synthetic oligonucleotide
cuuguggacaaaucugauc

SEQ ID NO: 2197682 - RNA, 19 nt, Artificial Sequence
  Description of Artificial Sequence: Synthetic oligonucleotide
guuuaaagcuuucuuggaa

SEQ ID NO: 2197683 - RNA, 19 nt, Artificial Sequence
  Description of Artificial Sequence: Synthetic oligonucleotide
gacaaauugcucuagccau

SEQ ID NO: 2197684 - RNA, 19 nt, Artificial Sequence
  Description of Artificial Sequence: Synthetic oligonucleotide
uguucagagugagaaugcc

SEQ ID NO: 2197685 - RNA, 19 nt, Artificial Sequence
  Description of Artificial Sequence: Synthetic oligonucleotide
auguuucccucucuuagca

SEQ ID NO: 2197686 - RNA, 19 nt, Artificial Sequence
  Description of Artificial Sequence: Synthetic oligonucleotide
accagagcaacgcuuauua

SEQ ID NO: 2197687 - RNA, 19 nt, Artificial Sequence
  Description of Artificial Sequence: Synthetic oligonucleotide
acaguguuccuaaaacauc

SEQ ID NO: 2197688 - RNA, 19 nt, Artificial Sequence
  Description of Artificial Sequence: Synthetic oligonucleotide
uguuuguaauaguuuuguc

SEQ ID NO: 2197689 - RNA, 19 nt, Artificial Sequence
  Description of Artificial Sequence: Synthetic oligonucleotide
auugcucuagccauucuug

SEQ ID NO: 2197690 - RNA, 19 nt, Artificial Sequence
  Description of Artificial Sequence: Synthetic oligonucleotide
uuucccuucuguccaauuu

SEQ ID NO: 2197691 - RNA, 19 nt, Artificial Sequence
  Description of Artificial Sequence: Synthetic oligonucleotide
acacuuugagagcuugucu

SEQ ID NO: 2197692 - RNA, 19 nt, Artificial Sequence
  Description of Artificial Sequence: Synthetic oligonucleotide
ugaaggucaacggacccac

SEQ ID NO: 2197693 - RNA, 19 nt, Artificial Sequence
  Description of Artificial Sequence: Synthetic oligonucleotide
cuguaagaccucaucaaca

SEQ ID NO: 2197694 - RNA, 19 nt, Artificial Sequence
  Description of Artificial Sequence: Synthetic oligonucleotide
aggcauucauuuuguuggg

SEQ ID NO: 2197695 - RNA, 19 nt, Artificial Sequence
  Description of Artificial Sequence: Synthetic oligonucleotide
aacuucacuuccauccaug

SEQ ID NO: 2197696 - RNA, 19 nt, Artificial Sequence
  Description of Artificial Sequence: Synthetic oligonucleotide
ugcucuagccauucuugug

SEQ ID NO: 2197697 - RNA, 19 nt, Artificial Sequence
  Description of Artificial Sequence: Synthetic oligonucleotide
uucuagagccuuagcuuca

SEQ ID NO: 2197698 - RNA, 19 nt, Artificial Sequence
  Description of Artificial Sequence: Synthetic oligonucleotide
gacaaugaggccuuucccu

SEQ ID NO: 2197699 - RNA, 19 nt, Artificial Sequence
  Description of Artificial Sequence: Synthetic oligonucleotide
uugcagguccaccccacag

SEQ ID NO: 2197700 - RNA, 19 nt, Artificial Sequence
  Description of Artificial Sequence: Synthetic oligonucleotide
aaaucacaugcuguaguaa

SEQ ID NO: 2197701 - RNA, 19 nt, Artificial Sequence
  Description of Artificial Sequence: Synthetic oligonucleotide
acaaaucugaucacacucu

SEQ ID NO: 2197702 - RNA, 19 nt, Artificial Sequence
  Description of Artificial Sequence: Synthetic oligonucleotide
gauguauuauaaagcgaca

SEQ ID NO: 2197703 - RNA, 19 nt, Artificial Sequence
  Description of Artificial Sequence: Synthetic oligonucleotide
gauaaggccaccccauucu

SEQ ID NO: 2197704 - RNA, 19 nt, Artificial Sequence
  Description of Artificial Sequence: Synthetic oligonucleotide
caauuacccuuuccaaaag

SEQ ID NO: 2197705 - RNA, 19 nt, Artificial Sequence
  Description of Artificial Sequence: Synthetic oligonucleotide
guuguagcaucaugacacc

SEQ ID NO: 2197706 - RNA, 19 nt, Artificial Sequence
  Description of Artificial Sequence: Synthetic oligonucleotide
gcucuagccauucuugugc

SEQ ID NO: 2197707 - RNA, 19 nt, Artificial Sequence
  Description of Artificial Sequence: Synthetic oligonucleotide
acuaugcccaucuccuugu

SEQ ID NO: 2197708 - RNA, 19 nt, Artificial Sequence
  Description of Artificial Sequence: Synthetic oligonucleotide
gaggcccacugacaaauug

SEQ ID NO: 2197709 - RNA, 19 nt, Artificial Sequence
  Description of Artificial Sequence: Synthetic oligonucleotide
aaauugcucuagccauucu

SEQ ID NO: 2197710 - RNA, 19 nt, Artificial Sequence
  Description of Artificial Sequence: Synthetic oligonucleotide
uucuugugccucuucuaga

SEQ ID NO: 2197711 - RNA, 19 nt, Artificial Sequence
  Description of Artificial Sequence: Synthetic oligonucleotide
cucuagccauucuugugcc

SEQ ID NO: 2197712 - RNA, 19 nt, Artificial Sequence
  Description of Artificial Sequence: Synthetic oligonucleotide
uaaauacagcucucuuccu

SEQ ID NO: 2197713 - RNA, 19 nt, Artificial Sequence
  Description of Artificial Sequence: Synthetic oligonucleotide
uucccuucuguccaauuuu

SEQ ID NO: 2197714 - RNA, 19 nt, Artificial Sequence
  Description of Artificial Sequence: Synthetic oligonucleotide
uauuaaagguagucucaua

SEQ ID NO: 2197715 - RNA, 19 nt, Artificial Sequence
  Description of Artificial Sequence: Synthetic oligonucleotide
uguggacaaaucugaucac

SEQ ID NO: 2197716 - RNA, 19 nt, Artificial Sequence
  Description of Artificial Sequence: Synthetic oligonucleotide
uccaguuugagggucccac

SEQ ID NO: 2197717 - RNA, 19 nt, Artificial Sequence
  Description of Artificial Sequence: Synthetic oligonucleotide
uaaugacuucuggaggccc

SEQ ID NO: 2197718 - RNA, 19 nt, Artificial Sequence
  Description of Artificial Sequence: Synthetic oligonucleotide
cagagcaacgcuuauuaaa

SEQ ID NO: 2197719 - RNA, 19 nt, Artificial Sequence
  Description of Artificial Sequence: Synthetic oligonucleotide
gacuucuggaggcccacug

SEQ ID NO: 2197720 - RNA, 19 nt, Artificial Sequence
  Description of Artificial Sequence: Synthetic oligonucleotide
acaugcuguaguaaauucu

SEQ ID NO: 2197721 - RNA, 19 nt, Artificial Sequence
  Description of Artificial Sequence: Synthetic oligonucleotide
ugcagacagagauguaguc

SEQ ID NO: 2197722 - RNA, 19 nt, Artificial Sequence
  Description of Artificial Sequence: Synthetic oligonucleotide
aggucaacggacccaccag

SEQ ID NO: 2197723 - RNA, 19 nt, Artificial Sequence
  Description of Artificial Sequence: Synthetic oligonucleotide
cuaaugacuucuggaggcc

SEQ ID NO: 2197724 - RNA, 19 nt, Artificial Sequence
  Description of Artificial Sequence: Synthetic oligonucleotide
cuucuggaggcccacugac

SEQ ID NO: 2197725 - RNA, 19 nt, Artificial Sequence
  Description of Artificial Sequence: Synthetic oligonucleotide
ugggguuguucagagugag

SEQ ID NO: 2197726 - RNA, 19 nt, Artificial Sequence
  Description of Artificial Sequence: Synthetic oligonucleotide
cuauuuaguauguuucccu

SEQ ID NO: 2197727 - RNA, 19 nt, Artificial Sequence
  Description of Artificial Sequence: Synthetic oligonucleotide
aguauguuucccucucuua

SEQ ID NO: 2197728 - RNA, 19 nt, Artificial Sequence
  Description of Artificial Sequence: Synthetic oligonucleotide
cugaaaucacaugcuguag

SEQ ID NO: 2197729 - RNA, 19 nt, Artificial Sequence
  Description of Artificial Sequence: Synthetic oligonucleotide
uccucuaaauacagcucuc

SEQ ID NO: 2197730 - RNA, 19 nt, Artificial Sequence
  Description of Artificial Sequence: Synthetic oligonucleotide
uaacuucacuuccauccau

SEQ ID NO: 2197731 - RNA, 19 nt, Artificial Sequence
  Description of Artificial Sequence: Synthetic oligonucleotide
gaaugccaaugccauucug

SEQ ID NO: 2197732 - RNA, 19 nt, Artificial Sequence
  Description of Artificial Sequence: Synthetic oligonucleotide
uugcucuagccauucuugu

SEQ ID NO: 2197733 - RNA, 19 nt, Artificial Sequence
  Description of Artificial Sequence: Synthetic oligonucleotide
ucaugacaccugagaaggc

SEQ ID NO: 2197734 - RNA, 19 nt, Artificial Sequence
  Description of Artificial Sequence: Synthetic oligonucleotide
gcuguaguaaauucugcuc

SEQ ID NO: 2197735 - RNA, 19 nt, Artificial Sequence
  Description of Artificial Sequence: Synthetic oligonucleotide
ggagagugcuuucacagca

SEQ ID NO: 2197736 - RNA, 19 nt, Artificial Sequence
  Description of Artificial Sequence: Synthetic oligonucleotide
cagcuuggaacuaugccca

SEQ ID NO: 2197737 - RNA, 19 nt, Artificial Sequence
  Description of Artificial Sequence: Synthetic oligonucleotide
uccucguggaagccaugag

SEQ ID NO: 2197738 - RNA, 19 nt, Artificial Sequence
  Description of Artificial Sequence: Synthetic oligonucleotide
aauagccucuagguuugca

SEQ ID NO: 2197739 - RNA, 19 nt, Artificial Sequence
  Description of Artificial Sequence: Synthetic oligonucleotide
cauuuuguugggguuguuc

SEQ ID NO: 2197740 - RNA, 19 nt, Artificial Sequence
  Description of Artificial Sequence: Synthetic oligonucleotide
auccauguucucauugaag

SEQ ID NO: 2197741 - RNA, 19 nt, Artificial Sequence
  Description of Artificial Sequence: Synthetic oligonucleotide
cucaucaacaaagcccaug

SEQ ID NO: 2197742 - RNA, 19 nt, Artificial Sequence
  Description of Artificial Sequence: Synthetic oligonucleotide
ggucaacggacccaccagg

SEQ ID NO: 2197743 - RNA, 19 nt, Artificial Sequence
  Description of Artificial Sequence: Synthetic oligonucleotide
uucuggaggcccacugaca

SEQ ID NO: 2197744 - RNA, 19 nt, Artificial Sequence
  Description of Artificial Sequence: Synthetic oligonucleotide
uuugagggucccacuuaac

SEQ ID NO: 2197745 - RNA, 19 nt, Artificial Sequence
  Description of Artificial Sequence: Synthetic oligonucleotide
auacagcucucuuccuuug

SEQ ID NO: 2197746 - RNA, 19 nt, Artificial Sequence
  Description of Artificial Sequence: Synthetic oligonucleotide
caguguuccuaaaacaucu

SEQ ID NO: 2197747 - RNA, 19 nt, Artificial Sequence
  Description of Artificial Sequence: Synthetic oligonucleotide
aacgcuuauuaaagguagu

SEQ ID NO: 2197748 - RNA, 19 nt, Artificial Sequence
  Description of Artificial Sequence: Synthetic oligonucleotide
auuacccuuuccaaaaguu

SEQ ID NO: 2197749 - RNA, 19 nt, Artificial Sequence
  Description of Artificial Sequence: Synthetic oligonucleotide
agaaugccaaugccauucu

SEQ ID NO: 2197750 - RNA, 19 nt, Artificial Sequence
  Description of Artificial Sequence: Synthetic oligonucleotide
aguuuuguccuugcagaca

SEQ ID NO: 2197751 - RNA, 19 nt, Artificial Sequence
  Description of Artificial Sequence: Synthetic oligonucleotide
uuugcagguccaccccaca

SEQ ID NO: 2197752 - RNA, 19 nt, Artificial Sequence
  Description of Artificial Sequence: Synthetic oligonucleotide
aacuuguaguacucccaua

SEQ ID NO: 2197753 - RNA, 19 nt, Artificial Sequence
  Description of Artificial Sequence: Synthetic oligonucleotide
ucacaugcuguaguaaauu

SEQ ID NO: 2197754 - RNA, 19 nt, Artificial Sequence
  Description of Artificial Sequence: Synthetic oligonucleotide
aguguuccuaaaacaucuc

SEQ ID NO: 2197755 - RNA, 19 nt, Artificial Sequence
  Description of Artificial Sequence: Synthetic oligonucleotide
gaggccuuucccuucuguc

SEQ ID NO: 2197756 - RNA, 19 nt, Artificial Sequence
  Description of Artificial Sequence: Synthetic oligonucleotide
auugcccagccuugaacca

SEQ ID NO: 2197757 - RNA, 19 nt, Artificial Sequence
  Description of Artificial Sequence: Synthetic oligonucleotide
caaauugcucuagccauuc

SEQ ID NO: 2197758 - RNA, 19 nt, Artificial Sequence
  Description of Artificial Sequence: Synthetic oligonucleotide
guaguacucccauauuuua

SEQ ID NO: 2197759 - RNA, 19 nt, Artificial Sequence
  Description of Artificial Sequence: Synthetic oligonucleotide
uucccucucuuagcaauag

SEQ ID NO: 2197760 - RNA, 19 nt, Artificial Sequence
  Description of Artificial Sequence: Synthetic oligonucleotide
agccucuagguuugcaggu

SEQ ID NO: 2197761 - RNA, 19 nt, Artificial Sequence
  Description of Artificial Sequence: Synthetic oligonucleotide
acaccccuguuuguaauag

SEQ ID NO: 2197762 - RNA, 19 nt, Artificial Sequence
  Description of Artificial Sequence: Synthetic oligonucleotide
ucauucuguaaugcuuccu

SEQ ID NO: 2197763 - RNA, 19 nt, Artificial Sequence
  Description of Artificial Sequence: Synthetic oligonucleotide
guaaugcuuccucuaaaua

SEQ ID NO: 2197764 - RNA, 19 nt, Artificial Sequence
  Description of Artificial Sequence: Synthetic oligonucleotide
caccaccccagcuuggaac

SEQ ID NO: 2197765 - RNA, 19 nt, Artificial Sequence
  Description of Artificial Sequence: Synthetic oligonucleotide
gagggucccacuuaacacu

SEQ ID NO: 2197766 - RNA, 19 nt, Artificial Sequence
  Description of Artificial Sequence: Synthetic oligonucleotide
cuuggaacuaugcccaucu

SEQ ID NO: 2197767 - RNA, 19 nt, Artificial Sequence
  Description of Artificial Sequence: Synthetic oligonucleotide
aucuccuuguggacaaauc

SEQ ID NO: 2197768 - RNA, 19 nt, Artificial Sequence
  Description of Artificial Sequence: Synthetic oligonucleotide
ucccucucuuagcaauagc

SEQ ID NO: 2197769 - RNA, 19 nt, Artificial Sequence
  Description of Artificial Sequence: Synthetic oligonucleotide
ggacaaugaggccuuuccc

SEQ ID NO: 2197770 - RNA, 19 nt, Artificial Sequence
  Description of Artificial Sequence: Synthetic oligonucleotide
uuguaauaguuuuguccuu

SEQ ID NO: 2197771 - RNA, 19 nt, Artificial Sequence
  Description of Artificial Sequence: Synthetic oligonucleotide
guuugagggucccacuuaa

SEQ ID NO: 2197772 - RNA, 19 nt, Artificial Sequence
  Description of Artificial Sequence: Synthetic oligonucleotide
agguccaccccacaguguu

SEQ ID NO: 2197773 - RNA, 19 nt, Artificial Sequence
  Description of Artificial Sequence: Synthetic oligonucleotide
aaccuucuaaugacuucug

SEQ ID NO: 2197774 - RNA, 19 nt, Artificial Sequence
  Description of Artificial Sequence: Synthetic oligonucleotide
guuccuaaaacaucucuuu

SEQ ID NO: 2197775 - RNA, 19 nt, Artificial Sequence
  Description of Artificial Sequence: Synthetic oligonucleotide
aguuugagggucccacuua

SEQ ID NO: 2197776 - RNA, 19 nt, Artificial Sequence
  Description of Artificial Sequence: Synthetic oligonucleotide
caugacaccugagaaggca

SEQ ID NO: 2197777 - RNA, 19 nt, Artificial Sequence
  Description of Artificial Sequence: Synthetic oligonucleotide
ucuguccaauuuuccaauu

SEQ ID NO: 2197778 - RNA, 19 nt, Artificial Sequence
  Description of Artificial Sequence: Synthetic oligonucleotide
uagauaaggccaccccauu

SEQ ID NO: 2197779 - RNA, 19 nt, Artificial Sequence
  Description of Artificial Sequence: Synthetic oligonucleotide
uugcccagccuugaaccag

SEQ ID NO: 2197780 - RNA, 19 nt, Artificial Sequence
  Description of Artificial Sequence: Synthetic oligonucleotide
ucuagguuugcagguccac

SEQ ID NO: 2197781 - RNA, 19 nt, Artificial Sequence
  Description of Artificial Sequence: Synthetic oligonucleotide
ccuugaaccagagcaacgc

SEQ ID NO: 2197782 - RNA, 19 nt, Artificial Sequence
  Description of Artificial Sequence: Synthetic oligonucleotide
ugcccagccuugaaccaga

SEQ ID NO: 2197783 - RNA, 19 nt, Artificial Sequence
  Description of Artificial Sequence: Synthetic oligonucleotide
agagugcuuucacagcauu

SEQ ID NO: 2197784 - RNA, 19 nt, Artificial Sequence
  Description of Artificial Sequence: Synthetic oligonucleotide
gacaccugagaaggcauuc

SEQ ID NO: 2197785 - RNA, 19 nt, Artificial Sequence
  Description of Artificial Sequence: Synthetic oligonucleotide
ucuagccauucuugugccu

SEQ ID NO: 2197786 - RNA, 19 nt, Artificial Sequence
  Description of Artificial Sequence: Synthetic oligonucleotide
cuggcaccaccccagcuug

SEQ ID NO: 2197787 - RNA, 19 nt, Artificial Sequence
  Description of Artificial Sequence: Synthetic oligonucleotide
ggacccaccaggaaacugc

SEQ ID NO: 2197788 - RNA, 19 nt, Artificial Sequence
  Description of Artificial Sequence: Synthetic oligonucleotide
gcaucaugacaccugagaa

SEQ ID NO: 2197789 - RNA, 19 nt, Artificial Sequence
  Description of Artificial Sequence: Synthetic oligonucleotide
caaugaggccuuucccuuc

SEQ ID NO: 2197790 - RNA, 19 nt, Artificial Sequence
  Description of Artificial Sequence: Synthetic oligonucleotide
uagucucauaaaucuuguu

SEQ ID NO: 2197791 - RNA, 19 nt, Artificial Sequence
  Description of Artificial Sequence: Synthetic oligonucleotide
ugagaaugccaaugccauu

SEQ ID NO: 2197792 - RNA, 19 nt, Artificial Sequence
  Description of Artificial Sequence: Synthetic oligonucleotide
cucguggaagccaugagau

SEQ ID NO: 2197793 - RNA, 19 nt, Artificial Sequence
  Description of Artificial Sequence: Synthetic oligonucleotide
ugacaccugagaaggcauu

SEQ ID NO: 2197794 - RNA, 19 nt, Artificial Sequence
  Description of Artificial Sequence: Synthetic oligonucleotide
gagugcuuucacagcauuc

SEQ ID NO: 2197795 - RNA, 19 nt, Artificial Sequence
  Description of Artificial Sequence: Synthetic oligonucleotide
gauguagucaaaagacuuu

SEQ ID NO: 2197796 - RNA, 19 nt, Artificial Sequence
  Description of Artificial Sequence: Synthetic oligonucleotide
uuggaacuaugcccaucuc

SEQ ID NO: 2197797 - RNA, 19 nt, Artificial Sequence
  Description of Artificial Sequence: Synthetic oligonucleotide
cuuuguaacuaaacggauu

SEQ ID NO: 2197798 - RNA, 19 nt, Artificial Sequence
  Description of Artificial Sequence: Synthetic oligonucleotide
guccaccccacaguguucc

SEQ ID NO: 2197799 - RNA, 19 nt, Artificial Sequence
  Description of Artificial Sequence: Synthetic oligonucleotide
cuguuuguaauaguuuugu

SEQ ID NO: 2197800 - RNA, 19 nt, Artificial Sequence
  Description of Artificial Sequence: Synthetic oligonucleotide
caacggacccaccaggaaa

SEQ ID NO: 2197801 - RNA, 19 nt, Artificial Sequence
  Description of Artificial Sequence: Synthetic oligonucleotide
aucacaugcuguaguaaau

SEQ ID NO: 2197802 - RNA, 19 nt, Artificial Sequence
  Description of Artificial Sequence: Synthetic oligonucleotide
guaagaccucaucaacaaa

SEQ ID NO: 2197803 - RNA, 19 nt, Artificial Sequence
  Description of Artificial Sequence: Synthetic oligonucleotide
guaguaaauucugcuccuc

SEQ ID NO: 2197804 - RNA, 19 nt, Artificial Sequence
  Description of Artificial Sequence: Synthetic oligonucleotide
aaccagagcaacgcuuauu

SEQ ID NO: 2197805 - RNA, 19 nt, Artificial Sequence
  Description of Artificial Sequence: Synthetic oligonucleotide
uuguaacuaaacggauuuu

SEQ ID NO: 2197806 - RNA, 19 nt, Artificial Sequence
  Description of Artificial Sequence: Synthetic oligonucleotide
gcaauagccucuagguuug

SEQ ID NO: 2197807 - RNA, 19 nt, Artificial Sequence
  Description of Artificial Sequence: Synthetic oligonucleotide
uuaagguguucugcaugaa

SEQ ID NO: 2197808 - RNA, 19 nt, Artificial Sequence
  Description of Artificial Sequence: Synthetic oligonucleotide
aagcgacaccccuguuugu

SEQ ID NO: 2197809 - RNA, 19 nt, Artificial Sequence
  Description of Artificial Sequence: Synthetic oligonucleotide
ugauuucaaccagccggcu

SEQ ID NO: 2197810 - RNA, 19 nt, Artificial Sequence
  Description of Artificial Sequence: Synthetic oligonucleotide
uuucaaccagccggcuggc

SEQ ID NO: 2197811 - RNA, 19 nt, Artificial Sequence
  Description of Artificial Sequence: Synthetic oligonucleotide
ggaacuaugcccaucuccu

SEQ ID NO: 2197812 - RNA, 19 nt, Artificial Sequence
  Description of Artificial Sequence: Synthetic oligonucleotide
cuuucuuggaauccaguuu

SEQ ID NO: 2197813 - RNA, 19 nt, Artificial Sequence
  Description of Artificial Sequence: Synthetic oligonucleotide
gguggagagugcuuucaca

SEQ ID NO: 2197814 - RNA, 19 nt, Artificial Sequence
  Description of Artificial Sequence: Synthetic oligonucleotide
acaccugagaaggcauuca

SEQ ID NO: 2197815 - RNA, 19 nt, Artificial Sequence
  Description of Artificial Sequence: Synthetic oligonucleotide
caacaaagcccauguuuaa

SEQ ID NO: 2197816 - RNA, 19 nt, Artificial Sequence
  Description of Artificial Sequence: Synthetic oligonucleotide
gagguggagagugcuuuca

SEQ ID NO: 2197817 - RNA, 19 nt, Artificial Sequence
  Description of Artificial Sequence: Synthetic oligonucleotide
ucuagagccuuagcuucau

SEQ ID NO: 2197818 - RNA, 19 nt, Artificial Sequence
  Description of Artificial Sequence: Synthetic oligonucleotide
agccggcuggcaccacccc

SEQ ID NO: 2197819 - RNA, 19 nt, Artificial Sequence
  Description of Artificial Sequence: Synthetic oligonucleotide
ccuucuguccaauuuucca

SEQ ID NO: 2197820 - RNA, 19 nt, Artificial Sequence
  Description of Artificial Sequence: Synthetic oligonucleotide
gugagaaugccaaugccau

SEQ ID NO: 2197821 - RNA, 19 nt, Artificial Sequence
  Description of Artificial Sequence: Synthetic oligonucleotide
ccucuagguuugcaggucc

SEQ ID NO: 2197822 - RNA, 19 nt, Artificial Sequence
  Description of Artificial Sequence: Synthetic oligonucleotide
acaaauugcucuagccauu

SEQ ID NO: 2197823 - RNA, 19 nt, Artificial Sequence
  Description of Artificial Sequence: Synthetic oligonucleotide
uggaagccaugagauguau

SEQ ID NO: 2197824 - RNA, 19 nt, Artificial Sequence
  Description of Artificial Sequence: Synthetic oligonucleotide
gacaccccuguuuguaaua

SEQ ID NO: 2197825 - RNA, 19 nt, Artificial Sequence
  Description of Artificial Sequence: Synthetic oligonucleotide
cagccggcuggcaccaccc

SEQ ID NO: 2197826 - RNA, 19 nt, Artificial Sequence
  Description of Artificial Sequence: Synthetic oligonucleotide
uuccuccucguggaagcca

SEQ ID NO: 2197827 - RNA, 19 nt, Artificial Sequence
  Description of Artificial Sequence: Synthetic oligonucleotide
cccacuuaacacuuugaga

SEQ ID NO: 2197828 - RNA, 19 nt, Artificial Sequence
  Description of Artificial Sequence: Synthetic oligonucleotide
gccaugagauguauuauaa

SEQ ID NO: 2197829 - RNA, 19 nt, Artificial Sequence
  Description of Artificial Sequence: Synthetic oligonucleotide
cucuagguuugcaggucca

SEQ ID NO: 2197830 - RNA, 19 nt, Artificial Sequence
  Description of Artificial Sequence: Synthetic oligonucleotide
gucaacggacccaccagga

SEQ ID NO: 2197831 - RNA, 19 nt, Artificial Sequence
  Description of Artificial Sequence: Synthetic oligonucleotide
cuaugcccaucuccuugug

SEQ ID NO: 2197832 - RNA, 19 nt, Artificial Sequence
  Description of Artificial Sequence: Synthetic oligonucleotide
cagaucagauccugagcaa

SEQ ID NO: 2197833 - RNA, 19 nt, Artificial Sequence
  Description of Artificial Sequence: Synthetic oligonucleotide
cauguucucauugaagcuu

SEQ ID NO: 2197834 - RNA, 19 nt, Artificial Sequence
  Description of Artificial Sequence: Synthetic oligonucleotide
cauucauuuuguugggguu

SEQ ID NO: 2197835 - RNA, 19 nt, Artificial Sequence
  Description of Artificial Sequence: Synthetic oligonucleotide
gccuugaaccagagcaacg

SEQ ID NO: 2197836 - RNA, 19 nt, Artificial Sequence
  Description of Artificial Sequence: Synthetic oligonucleotide
ggccaccccauucucugag

SEQ ID NO: 2197837 - RNA, 19 nt, Artificial Sequence
  Description of Artificial Sequence: Synthetic oligonucleotide
gaaggucaacggacccacc

SEQ ID NO: 2197838 - RNA, 19 nt, Artificial Sequence
  Description of Artificial Sequence: Synthetic oligonucleotide
cuugaaccagagcaacgcu

SEQ ID NO: 2197839 - RNA, 19 nt, Artificial Sequence
  Description of Artificial Sequence: Synthetic oligonucleotide
auaaagcgacaccccuguu

SEQ ID NO: 2197840 - RNA, 19 nt, Artificial Sequence
  Description of Artificial Sequence: Synthetic oligonucleotide
agcgacaccccuguuugua

SEQ ID NO: 2197841 - RNA, 19 nt, Artificial Sequence
  Description of Artificial Sequence: Synthetic oligonucleotide
cuagagccuuagcuucauc

SEQ ID NO: 2197842 - RNA, 19 nt, Artificial Sequence
  Description of Artificial Sequence: Synthetic oligonucleotide
ggacaaaucugaucacacu

SEQ ID NO: 2197843 - RNA, 19 nt, Artificial Sequence
  Description of Artificial Sequence: Synthetic oligonucleotide
ugccucuucuagagccuua

SEQ ID NO: 2197844 - RNA, 19 nt, Artificial Sequence
  Description of Artificial Sequence: Synthetic oligonucleotide
gcaacgcuuauuaaaggua

SEQ ID NO: 2197845 - RNA, 19 nt, Artificial Sequence
  Description of Artificial Sequence: Synthetic oligonucleotide
agguagucucauaaaucuu

SEQ ID NO: 2197846 - RNA, 19 nt, Artificial Sequence
  Description of Artificial Sequence: Synthetic oligonucleotide
cauagucauuaaccugaaa

SEQ ID NO: 2197847 - RNA, 19 nt, Artificial Sequence
  Description of Artificial Sequence: Synthetic oligonucleotide
agcccauguuuaaagcuuu

SEQ ID NO: 2197848 - RNA, 19 nt, Artificial Sequence
  Description of Artificial Sequence: Synthetic oligonucleotide
agcuuggaacuaugcccau

SEQ ID NO: 2197849 - RNA, 19 nt, Artificial Sequence
  Description of Artificial Sequence: Synthetic oligonucleotide
cuccucguggaagccauga

SEQ ID NO: 2197850 - RNA, 19 nt, Artificial Sequence
  Description of Artificial Sequence: Synthetic oligonucleotide
ccucguggaagccaugaga

SEQ ID NO: 2197851 - RNA, 19 nt, Artificial Sequence
  Description of Artificial Sequence: Synthetic oligonucleotide
cucuaaauacagcucucuu

SEQ ID NO: 2197852 - RNA, 19 nt, Artificial Sequence
  Description of Artificial Sequence: Synthetic oligonucleotide
gucccacuuaacacuuuga

SEQ ID NO: 2197853 - RNA, 19 nt, Artificial Sequence
  Description of Artificial Sequence: Synthetic oligonucleotide
caauagccucuagguuugc

SEQ ID NO: 2197854 - RNA, 19 nt, Artificial Sequence
  Description of Artificial Sequence: Synthetic oligonucleotide
agggucccacuuaacacuu

SEQ ID NO: 2197855 - RNA, 19 nt, Artificial Sequence
  Description of Artificial Sequence: Synthetic oligonucleotide
cuuaacacuuugagagcuu

SEQ ID NO: 2197856 - RNA, 19 nt, Artificial Sequence
  Description of Artificial Sequence: Synthetic oligonucleotide
gaaccagagcaacgcuuau

SEQ ID NO: 2197857 - RNA, 19 nt, Artificial Sequence
  Description of Artificial Sequence: Synthetic oligonucleotide
acccauugcccagccuuga

SEQ ID NO: 2197858 - RNA, 19 nt, Artificial Sequence
  Description of Artificial Sequence: Synthetic oligonucleotide
cuuguaguacucccauauu

SEQ ID NO: 2197859 - RNA, 19 nt, Artificial Sequence
  Description of Artificial Sequence: Synthetic oligonucleotide
accccagcuuggaacuaug

SEQ ID NO: 2197860 - RNA, 19 nt, Artificial Sequence
  Description of Artificial Sequence: Synthetic oligonucleotide
ucauuuuguugggguuguu

SEQ ID NO: 2197861 - RNA, 19 nt, Artificial Sequence
  Description of Artificial Sequence: Synthetic oligonucleotide
gguuguucagagugagaau

SEQ ID NO: 2197862 - RNA, 19 nt, Artificial Sequence
  Description of Artificial Sequence: Synthetic oligonucleotide
cccuguuuguaauaguuuu

SEQ ID NO: 2197863 - RNA, 19 nt, Artificial Sequence
  Description of Artificial Sequence: Synthetic oligonucleotide
cuggaggcccacugacaaa

SEQ ID NO: 2197864 - RNA, 19 nt, Artificial Sequence
  Description of Artificial Sequence: Synthetic oligonucleotide
acggacccaccaggaaacu

SEQ ID NO: 2197865 - RNA, 19 nt, Artificial Sequence
  Description of Artificial Sequence: Synthetic oligonucleotide
gcuuggaacuaugcccauc

SEQ ID NO: 2197866 - RNA, 19 nt, Artificial Sequence
  Description of Artificial Sequence: Synthetic oligonucleotide
ccacugacaaauugcucua

SEQ ID NO: 2197867 - RNA, 19 nt, Artificial Sequence
  Description of Artificial Sequence: Synthetic oligonucleotide
ggcccacugacaaauugcu

SEQ ID NO: 2197868 - RNA, 19 nt, Artificial Sequence
  Description of Artificial Sequence: Synthetic oligonucleotide
gcgacaccccuguuuguaa

SEQ ID NO: 2197869 - RNA, 19 nt, Artificial Sequence
  Description of Artificial Sequence: Synthetic oligonucleotide
gccucuagguuugcagguc

SEQ ID NO: 2197870 - RNA, 19 nt, Artificial Sequence
  Description of Artificial Sequence: Synthetic oligonucleotide
ccagagcaacgcuuauuaa

SEQ ID NO: 2197871 - RNA, 19 nt, Artificial Sequence
  Description of Artificial Sequence: Synthetic oligonucleotide
cccauucucugagguggag

SEQ ID NO: 2197872 - RNA, 19 nt, Artificial Sequence
  Description of Artificial Sequence: Synthetic oligonucleotide
gccggcuggcaccacccca

SEQ ID NO: 2197873 - RNA, 19 nt, Artificial Sequence
  Description of Artificial Sequence: Synthetic oligonucleotide
cgcuuauuaaagguagucu

SEQ ID NO: 2197874 - RNA, 19 nt, Artificial Sequence
  Description of Artificial Sequence: Synthetic oligonucleotide
ccucuaaauacagcucucu

SEQ ID NO: 2197875 - RNA, 19 nt, Artificial Sequence
  Description of Artificial Sequence: Synthetic oligonucleotide
gguccaccccacaguguuc

SEQ ID NO: 2197876 - RNA, 19 nt, Artificial Sequence
  Description of Artificial Sequence: Synthetic oligonucleotide
ccaguuugagggucccacu

SEQ ID NO: 2197877 - RNA, 19 nt, Artificial Sequence
  Description of Artificial Sequence: Synthetic oligonucleotide
gcccagccuugaaccagag

SEQ ID NO: 2197878 - RNA, 19 nt, Artificial Sequence
  Description of Artificial Sequence: Synthetic oligonucleotide
ccaccccauucucugaggu

SEQ ID NO: 2197879 - RNA, 19 nt, Artificial Sequence
  Description of Artificial Sequence: Synthetic oligonucleotide
ccccauucucugaggugga

SEQ ID NO: 2197880 - RNA, 19 nt, Artificial Sequence
  Description of Artificial Sequence: Synthetic oligonucleotide
cggacccaccaggaaacug

SEQ ID NO: 2197881 - RNA, 19 nt, Artificial Sequence
  Description of Artificial Sequence: Synthetic oligonucleotide
ggaagccaugagauguauu

SEQ ID NO: 2197882 - RNA, 19 nt, Artificial Sequence
  Description of Artificial Sequence: Synthetic oligonucleotide
caccccagcuuggaacuau

SEQ ID NO: 2197883 - RNA, 19 nt, Artificial Sequence
  Description of Artificial Sequence: Synthetic oligonucleotide
ccuugcagacagagaugua

SEQ ID NO: 2197884 - RNA, 19 nt, Artificial Sequence
  Description of Artificial Sequence: Synthetic oligonucleotide
ccacggacaaugaggccuu

SEQ ID NO: 2197885 - RNA, 19 nt, Artificial Sequence
  Description of Artificial Sequence: Synthetic oligonucleotide
cgacaccccuguuuguaau

SEQ ID NO: 2197886 - RNA, 19 nt, Artificial Sequence
  Description of Artificial Sequence: Synthetic oligonucleotide
ccucaucaacaaagcccau

SEQ ID NO: 2197887 - RNA, 19 nt, Artificial Sequence
  Description of Artificial Sequence: Synthetic oligonucleotide
cacggacaaugaggccuuu

SEQ ID NO: 2197888 - RNA, 19 nt, Artificial Sequence
  Description of Artificial Sequence: Synthetic oligonucleotide
ccaccccagcuuggaacua

SEQ ID NO: 2197889 - RNA, 19 nt, Artificial Sequence
  Description of Artificial Sequence: Synthetic oligonucleotide
aaaacaaccugagaaagug

SEQ ID NO: 2197890 - RNA, 19 nt, Artificial Sequence
  Description of Artificial Sequence: Synthetic oligonucleotide
aaugaugcacugaacagac

SEQ ID NO: 2197891 - RNA, 19 nt, Artificial Sequence
  Description of Artificial Sequence: Synthetic oligonucleotide
caucucuaaggaaagaggg

SEQ ID NO: 2197892 - RNA, 19 nt, Artificial Sequence
  Description of Artificial Sequence: Synthetic oligonucleotide
ugucuuuaaggccagagaa

SEQ ID NO: 2197893 - RNA, 19 nt, Artificial Sequence
  Description of Artificial Sequence: Synthetic oligonucleotide
agaaguuguacugacaguc

SEQ ID NO: 2197894 - RNA, 19 nt, Artificial Sequence
  Description of Artificial Sequence: Synthetic oligonucleotide
aaugucacgaaugauuuga

SEQ ID NO: 2197895 - RNA, 19 nt, Artificial Sequence
  Description of Artificial Sequence: Synthetic oligonucleotide
ucaaaugucacgaaugauu

SEQ ID NO: 2197896 - RNA, 19 nt, Artificial Sequence
  Description of Artificial Sequence: Synthetic oligonucleotide
aguaagcaucuguugaccc

SEQ ID NO: 2197897 - RNA, 19 nt, Artificial Sequence
  Description of Artificial Sequence: Synthetic oligonucleotide
ugaacagacaccgagugcc

SEQ ID NO: 2197898 - RNA, 19 nt, Artificial Sequence
  Description of Artificial Sequence: Synthetic oligonucleotide
aacaaccugagaaaguggg

SEQ ID NO: 2197899 - RNA, 19 nt, Artificial Sequence
  Description of Artificial Sequence: Synthetic oligonucleotide
agauccugaacccaaauga

SEQ ID NO: 2197900 - RNA, 19 nt, Artificial Sequence
  Description of Artificial Sequence: Synthetic oligonucleotide
ugaaaacaaccugagaaag

SEQ ID NO: 2197901 - RNA, 19 nt, Artificial Sequence
  Description of Artificial Sequence: Synthetic oligonucleotide
uuuaaggccagagaagaag

SEQ ID NO: 2197902 - RNA, 19 nt, Artificial Sequence
  Description of Artificial Sequence: Synthetic oligonucleotide
uauggaaugcagaggggcg

SEQ ID NO: 2197903 - RNA, 19 nt, Artificial Sequence
  Description of Artificial Sequence: Synthetic oligonucleotide
aggguuucuguguaguccc

SEQ ID NO: 2197904 - RNA, 19 nt, Artificial Sequence
  Description of Artificial Sequence: Synthetic oligonucleotide
agcacccugucuuuaaggc

SEQ ID NO: 2197905 - RNA, 19 nt, Artificial Sequence
  Description of Artificial Sequence: Synthetic oligonucleotide
ucacgaaugauuugaaagu

SEQ ID NO: 2197906 - RNA, 19 nt, Artificial Sequence
  Description of Artificial Sequence: Synthetic oligonucleotide
aagucauaggguuucugug

SEQ ID NO: 2197907 - RNA, 19 nt, Artificial Sequence
  Description of Artificial Sequence: Synthetic oligonucleotide
agaaaguggggacuguggg

SEQ ID NO: 2197908 - RNA, 19 nt, Artificial Sequence
  Description of Artificial Sequence: Synthetic oligonucleotide
aaccugagaaaguggggac

SEQ ID NO: 2197909 - RNA, 19 nt, Artificial Sequence
  Description of Artificial Sequence: Synthetic oligonucleotide
uuagcuaugccaccuguga

SEQ ID NO: 2197910 - RNA, 19 nt, Artificial Sequence
  Description of Artificial Sequence: Synthetic oligonucleotide
caaaugaugcacugaacag

SEQ ID NO: 2197911 - RNA, 19 nt, Artificial Sequence
  Description of Artificial Sequence: Synthetic oligonucleotide
aaaugaugcacugaacaga

SEQ ID NO: 2197912 - RNA, 19 nt, Artificial Sequence
  Description of Artificial Sequence: Synthetic oligonucleotide
uuaaggccagagaagaagu

SEQ ID NO: 2197913 - RNA, 19 nt, Artificial Sequence
  Description of Artificial Sequence: Synthetic oligonucleotide
uuauggaaugcagaggggc

SEQ ID NO: 2197914 - RNA, 19 nt, Artificial Sequence
  Description of Artificial Sequence: Synthetic oligonucleotide
  modified_base (5)..(5): a, c, u, g, unknown or other
uuccncuuuaccaggaggu

SEQ ID NO: 2197915 - RNA, 19 nt, Artificial Sequence
  Description of Artificial Sequence: Synthetic oligonucleotide
uaagucauaggguuucugu

SEQ ID NO: 2197916 - RNA, 19 nt, Artificial Sequence
  Description of Artificial Sequence: Synthetic oligonucleotide
agcuaugccaccugugaac

SEQ ID NO: 2197917 - RNA, 19 nt, Artificial Sequence
  Description of Artificial Sequence: Synthetic oligonucleotide
gaaaguggggacugugggg

SEQ ID NO: 2197918 - RNA, 19 nt, Artificial Sequence
  Description of Artificial Sequence: Synthetic oligonucleotide
ugucagggaaacaagcccu

SEQ ID NO: 2197919 - RNA, 19 nt, Artificial Sequence
  Description of Artificial Sequence: Synthetic oligonucleotide
acugaacagacaccgagug

SEQ ID NO: 2197920 - RNA, 19 nt, Artificial Sequence
  Description of Artificial Sequence: Synthetic oligonucleotide
gaaaacuugcccucccacc

SEQ ID NO: 2197921 - RNA, 19 nt, Artificial Sequence
  Description of Artificial Sequence: Synthetic oligonucleotide
gucaacuugggacuggcag

SEQ ID NO: 2197922 - RNA, 19 nt, Artificial Sequence
  Description of Artificial Sequence: Synthetic oligonucleotide
ucccugagcacccauuucc

SEQ ID NO: 2197923 - RNA, 19 nt, Artificial Sequence
  Description of Artificial Sequence: Synthetic oligonucleotide
cucucaaugacacuuccug

SEQ ID NO: 2197924 - RNA, 19 nt, Artificial Sequence
  Description of Artificial Sequence: Synthetic oligonucleotide
guucccaugacgcagguca

SEQ ID NO: 2197925 - RNA, 19 nt, Artificial Sequence
  Description of Artificial Sequence: Synthetic oligonucleotide
caucuguugacccugguuc

SEQ ID NO: 2197926 - RNA, 19 nt, Artificial Sequence
  Description of Artificial Sequence: Synthetic oligonucleotide
  modified_base (10)..(10): a, c, u, g, unknown or other
agcccuuccncuuuaccag

SEQ ID NO: 2197927 - RNA, 19 nt, Artificial Sequence
  Description of Artificial Sequence: Synthetic oligonucleotide
uagauccugaacccaaaug

SEQ ID NO: 2197928 - RNA, 19 nt, Artificial Sequence
  Description of Artificial Sequence: Synthetic oligonucleotide
gaagaaguccccuggggug

SEQ ID NO: 2197929 - RNA, 19 nt, Artificial Sequence
  Description of Artificial Sequence: Synthetic oligonucleotide
ugaguucccaugacgcagg

SEQ ID NO: 2197930 - RNA, 19 nt, Artificial Sequence
  Description of Artificial Sequence: Synthetic oligonucleotide
uuugaaaguagauccugaa

SEQ ID NO: 2197931 - RNA, 19 nt, Artificial Sequence
  Description of Artificial Sequence: Synthetic oligonucleotide
aacaagcccuccuggcuac

SEQ ID NO: 2197932 - RNA, 19 nt, Artificial Sequence
  Description of Artificial Sequence: Synthetic oligonucleotide
gagaagaaguccccugggg

SEQ ID NO: 2197933 - RNA, 19 nt, Artificial Sequence
  Description of Artificial Sequence: Synthetic oligonucleotide
accgcuagcagcucaaaug

SEQ ID NO: 2197934 - RNA, 19 nt, Artificial Sequence
  Description of Artificial Sequence: Synthetic oligonucleotide
ucaguaagcaucuguugac

SEQ ID NO: 2197935 - RNA, 19 nt, Artificial Sequence
  Description of Artificial Sequence: Synthetic oligonucleotide
accggugcuacaucucucc

SEQ ID NO: 2197936 - RNA, 19 nt, Artificial Sequence
  Description of Artificial Sequence: Synthetic oligonucleotide
gaaagagggugcuaaguca

SEQ ID NO: 2197937 - RNA, 19 nt, Artificial Sequence
  Description of Artificial Sequence: Synthetic oligonucleotide
ugggauagaaacuucuuuu

SEQ ID NO: 2197938 - RNA, 19 nt, Artificial Sequence
  Description of Artificial Sequence: Synthetic oligonucleotide
caugacgcaggucaguaag

SEQ ID NO: 2197939 - RNA, 19 nt, Artificial Sequence
  Description of Artificial Sequence: Synthetic oligonucleotide
ugaacccaaaugaugcacu

SEQ ID NO: 2197940 - RNA, 19 nt, Artificial Sequence
  Description of Artificial Sequence: Synthetic oligonucleotide
agagaagaaguccccuggg

SEQ ID NO: 2197941 - RNA, 19 nt, Artificial Sequence
  Description of Artificial Sequence: Synthetic oligonucleotide
ugaaaacuugcccucccac

SEQ ID NO: 2197942 - RNA, 19 nt, Artificial Sequence
  Description of Artificial Sequence: Synthetic oligonucleotide
  modified_base (2)..(2): a, c, u, g, unknown or other
cncuuuaccaggagguccc

SEQ ID NO: 2197943 - RNA, 19 nt, Artificial Sequence
  Description of Artificial Sequence: Synthetic oligonucleotide
  modified_base (6)..(6): a, c, u, g, unknown or other
cuuccncuuuaccaggagg

SEQ ID NO: 2197944 - RNA, 19 nt, Artificial Sequence
  Description of Artificial Sequence: Synthetic oligonucleotide
uuggcugacaggcuucagc

SEQ ID NO: 2197945 - RNA, 19 nt, Artificial Sequence
  Description of Artificial Sequence: Synthetic oligonucleotide
uaaggaaagagggugcuaa

SEQ ID NO: 2197946 - RNA, 19 nt, Artificial Sequence
  Description of Artificial Sequence: Synthetic oligonucleotide
cugucagggaaacaagccc

SEQ ID NO: 2197947 - RNA, 19 nt, Artificial Sequence
  Description of Artificial Sequence: Synthetic oligonucleotide
accaucucuaaggaaagag

SEQ ID NO: 2197948 - RNA, 19 nt, Artificial Sequence
  Description of Artificial Sequence: Synthetic oligonucleotide
uuuaccaggaggucccaac

SEQ ID NO: 2197949 - RNA, 19 nt, Artificial Sequence
  Description of Artificial Sequence: Synthetic oligonucleotide
agggugaguucccaugacg

SEQ ID NO: 2197950 - RNA, 19 nt, Artificial Sequence
  Description of Artificial Sequence: Synthetic oligonucleotide
cucuaaggaaagagggugc

SEQ ID NO: 2197951 - RNA, 19 nt, Artificial Sequence
  Description of Artificial Sequence: Synthetic oligonucleotide
ccaccugugaacuaagggg

SEQ ID NO: 2197952 - RNA, 19 nt, Artificial Sequence
  Description of Artificial Sequence: Synthetic oligonucleotide
aaaguagauccugaaccca

SEQ ID NO: 2197953 - RNA, 19 nt, Artificial Sequence
  Description of Artificial Sequence: Synthetic oligonucleotide
cuggccuuagcuaugccac

SEQ ID NO: 2197954 - RNA, 19 nt, Artificial Sequence
  Description of Artificial Sequence: Synthetic oligonucleotide
aaacaagcccuccuggcua

SEQ ID NO: 2197955 - RNA, 19 nt, Artificial Sequence
  Description of Artificial Sequence: Synthetic oligonucleotide
uuaccaggaggucccaaca

SEQ ID NO: 2197956 - RNA, 19 nt, Artificial Sequence
  Description of Artificial Sequence: Synthetic oligonucleotide
cuuggugcugccacugggg

SEQ ID NO: 2197957 - RNA, 19 nt, Artificial Sequence
  Description of Artificial Sequence: Synthetic oligonucleotide
ucucaaugacacuuccugu

SEQ ID NO: 2197958 - RNA, 19 nt, Artificial Sequence
  Description of Artificial Sequence: Synthetic oligonucleotide
uguugacccugguucacag

SEQ ID NO: 2197959 - RNA, 19 nt, Artificial Sequence
  Description of Artificial Sequence: Synthetic oligonucleotide
  modified_base (19)..(19): a, c, u, g, unknown or other
uuggcugacagcccuuccn

SEQ ID NO: 2197960 - RNA, 19 nt, Artificial Sequence
  Description of Artificial Sequence: Synthetic oligonucleotide
aaagagggugcuaagucau

SEQ ID NO: 2197961 - RNA, 19 nt, Artificial Sequence
  Description of Artificial Sequence: Synthetic oligonucleotide
gagggugcuaagucauagg

SEQ ID NO: 2197962 - RNA, 19 nt, Artificial Sequence
  Description of Artificial Sequence: Synthetic oligonucleotide
ugcuacaucucuccccaca

SEQ ID NO: 2197963 - RNA, 19 nt, Artificial Sequence
  Description of Artificial Sequence: Synthetic oligonucleotide
caggcacucucaaugacac

SEQ ID NO: 2197964 - RNA, 19 nt, Artificial Sequence
  Description of Artificial Sequence: Synthetic oligonucleotide
gccuuuauggaaugcagag

SEQ ID NO: 2197965 - RNA, 19 nt, Artificial Sequence
  Description of Artificial Sequence: Synthetic oligonucleotide
agcuacuuucccugagcac

SEQ ID NO: 2197966 - RNA, 19 nt, Artificial Sequence
  Description of Artificial Sequence: Synthetic oligonucleotide
agcagcucaaaugucacga

SEQ ID NO: 2197967 - RNA, 19 nt, Artificial Sequence
  Description of Artificial Sequence: Synthetic oligonucleotide
agcucaaaugucacgaaug

SEQ ID NO: 2197968 - RNA, 19 nt, Artificial Sequence
  Description of Artificial Sequence: Synthetic oligonucleotide
agcacaaaucccagggugg

SEQ ID NO: 2197969 - RNA, 19 nt, Artificial Sequence
  Description of Artificial Sequence: Synthetic oligonucleotide
ucuaaggaaagagggugcu

SEQ ID NO: 2197970 - RNA, 19 nt, Artificial Sequence
  Description of Artificial Sequence: Synthetic oligonucleotide
aguuguacugacagucaac

SEQ ID NO: 2197971 - RNA, 19 nt, Artificial Sequence
  Description of Artificial Sequence: Synthetic oligonucleotide
gcuacuuucccugagcacc

SEQ ID NO: 2197972 - RNA, 19 nt, Artificial Sequence
  Description of Artificial Sequence: Synthetic oligonucleotide
acgcaggucaguaagcauc

SEQ ID NO: 2197973 - RNA, 19 nt, Artificial Sequence
  Description of Artificial Sequence: Synthetic oligonucleotide
acaaaucccaggguggucu

SEQ ID NO: 2197974 - RNA, 19 nt, Artificial Sequence
  Description of Artificial Sequence: Synthetic oligonucleotide
cagcacaaaucccagggug

SEQ ID NO: 2197975 - RNA, 19 nt, Artificial Sequence
  Description of Artificial Sequence: Synthetic oligonucleotide
agcacccauuucccaaagc

SEQ ID NO: 2197976 - RNA, 19 nt, Artificial Sequence
  Description of Artificial Sequence: Synthetic oligonucleotide
gacacuuccugucccuggc

SEQ ID NO: 2197977 - RNA, 19 nt, Artificial Sequence
  Description of Artificial Sequence: Synthetic oligonucleotide
cuuagcuaugccaccugug

SEQ ID NO: 2197978 - RNA, 19 nt, Artificial Sequence
  Description of Artificial Sequence: Synthetic oligonucleotide
uaugccaccugugaacuaa

SEQ ID NO: 2197979 - RNA, 19 nt, Artificial Sequence
  Description of Artificial Sequence: Synthetic oligonucleotide
acccauuucccaaagccag

SEQ ID NO: 2197980 - RNA, 19 nt, Artificial Sequence
  Description of Artificial Sequence: Synthetic oligonucleotide
acugacagucaacuuggga

SEQ ID NO: 2197981 - RNA, 19 nt, Artificial Sequence
  Description of Artificial Sequence: Synthetic oligonucleotide
acgaaugauuugaaaguag

SEQ ID NO: 2197982 - RNA, 19 nt, Artificial Sequence
  Description of Artificial Sequence: Synthetic oligonucleotide
ugucccuggccuuagcuau

SEQ ID NO: 2197983 - RNA, 19 nt, Artificial Sequence
  Description of Artificial Sequence: Synthetic oligonucleotide
ccaucucuaaggaaagagg

SEQ ID NO: 2197984 - RNA, 19 nt, Artificial Sequence
  Description of Artificial Sequence: Synthetic oligonucleotide
gggacuggcagaucaaacc

SEQ ID NO: 2197985 - RNA, 19 nt, Artificial Sequence
  Description of Artificial Sequence: Synthetic oligonucleotide
gcgggaucagcacaaaucc

SEQ ID NO: 2197986 - RNA, 19 nt, Artificial Sequence
  Description of Artificial Sequence: Synthetic oligonucleotide
gcacccauuucccaaagcc

SEQ ID NO: 2197987 - RNA, 19 nt, Artificial Sequence
  Description of Artificial Sequence: Synthetic oligonucleotide
cuugcccucccacccaugg

SEQ ID NO: 2197988 - RNA, 19 nt, Artificial Sequence
  Description of Artificial Sequence: Synthetic oligonucleotide
aaacuugcccucccaccca

SEQ ID NO: 2197989 - RNA, 19 nt, Artificial Sequence
  Description of Artificial Sequence: Synthetic oligonucleotide
gauagggcgggaucagcac

SEQ ID NO: 2197990 - RNA, 19 nt, Artificial Sequence
  Description of Artificial Sequence: Synthetic oligonucleotide
agugggguaggcaugaaaa

SEQ ID NO: 2197991 - RNA, 19 nt, Artificial Sequence
  Description of Artificial Sequence: Synthetic oligonucleotide
uggcagaucaaaccaucuc

SEQ ID NO: 2197992 - RNA, 19 nt, Artificial Sequence
  Description of Artificial Sequence: Synthetic oligonucleotide
ugucacgaaugauuugaaa

SEQ ID NO: 2197993 - RNA, 19 nt, Artificial Sequence
  Description of Artificial Sequence: Synthetic oligonucleotide
agggcucucagcagggacc

SEQ ID NO: 2197994 - RNA, 19 nt, Artificial Sequence
  Description of Artificial Sequence: Synthetic oligonucleotide
acuggcagaucaaaccauc

SEQ ID NO: 2197995 - RNA, 19 nt, Artificial Sequence
  Description of Artificial Sequence: Synthetic oligonucleotide
ugggguguuggcugacagg

SEQ ID NO: 2197996 - RNA, 19 nt, Artificial Sequence
  Description of Artificial Sequence: Synthetic oligonucleotide
ggaaagagggugcuaaguc

SEQ ID NO: 2197997 - RNA, 19 nt, Artificial Sequence
  Description of Artificial Sequence: Synthetic oligonucleotide
uaaggccagagaagaaguc

SEQ ID NO: 2197998 - RNA, 19 nt, Artificial Sequence
  Description of Artificial Sequence: Synthetic oligonucleotide
ugcuaagucauaggguuuc

SEQ ID NO: 2197999 - RNA, 19 nt, Artificial Sequence
  Description of Artificial Sequence: Synthetic oligonucleotide
aacagcacccugucuuuaa

SEQ ID NO: 2198000 - RNA, 19 nt, Artificial Sequence
  Description of Artificial Sequence: Synthetic oligonucleotide
ugguccugaaggacaccgg

SEQ ID NO: 2198001 - RNA, 19 nt, Artificial Sequence
  Description of Artificial Sequence: Synthetic oligonucleotide
gugaguucccaugacgcag

SEQ ID NO: 2198002 - RNA, 19 nt, Artificial Sequence
  Description of Artificial Sequence: Synthetic oligonucleotide
ugggacuggcagaucaaac

SEQ ID NO: 2198003 - RNA, 19 nt, Artificial Sequence
  Description of Artificial Sequence: Synthetic oligonucleotide
acaggcagcuacuuucccu

SEQ ID NO: 2198004 - RNA, 19 nt, Artificial Sequence
  Description of Artificial Sequence: Synthetic oligonucleotide
uuucccugagcacccauuu

SEQ ID NO: 2198005 - RNA, 19 nt, Artificial Sequence
  Description of Artificial Sequence: Synthetic oligonucleotide
cacccugucuuuaaggcca

SEQ ID NO: 2198006 - RNA, 19 nt, Artificial Sequence
  Description of Artificial Sequence: Synthetic oligonucleotide
augaaaacuugcccuccca

SEQ ID NO: 2198007 - RNA, 19 nt, Artificial Sequence
  Description of Artificial Sequence: Synthetic oligonucleotide
cugaacagacaccgagugc

SEQ ID NO: 2198008 - RNA, 19 nt, Artificial Sequence
  Description of Artificial Sequence: Synthetic oligonucleotide
aaguagauccugaacccaa

SEQ ID NO: 2198009 - RNA, 19 nt, Artificial Sequence
  Description of Artificial Sequence: Synthetic oligonucleotide
aaggacaccggugcuacau

SEQ ID NO: 2198010 - RNA, 19 nt, Artificial Sequence
  Description of Artificial Sequence: Synthetic oligonucleotide
ugacgcaggucaguaagca

SEQ ID NO: 2198011 - RNA, 19 nt, Artificial Sequence
  Description of Artificial Sequence: Synthetic oligonucleotide
acaaccugagaaagugggg

SEQ ID NO: 2198012 - RNA, 19 nt, Artificial Sequence
  Description of Artificial Sequence: Synthetic oligonucleotide
uuuggcugacagcccuucc

SEQ ID NO: 2198013 - RNA, 19 nt, Artificial Sequence
  Description of Artificial Sequence: Synthetic oligonucleotide
augacgcaggucaguaagc

SEQ ID NO: 2198014 - RNA, 19 nt, Artificial Sequence
  Description of Artificial Sequence: Synthetic oligonucleotide
gccaccugugaacuaaggg

SEQ ID NO: 2198015 - RNA, 19 nt, Artificial Sequence
  Description of Artificial Sequence: Synthetic oligonucleotide
uagcuaugccaccugugaa

SEQ ID NO: 2198016 - RNA, 19 nt, Artificial Sequence
  Description of Artificial Sequence: Synthetic oligonucleotide
auagggcgggaucagcaca

SEQ ID NO: 2198017 - RNA, 19 nt, Artificial Sequence
  Description of Artificial Sequence: Synthetic oligonucleotide
gaggucaggacagggugag

SEQ ID NO: 2198018 - RNA, 19 nt, Artificial Sequence
  Description of Artificial Sequence: Synthetic oligonucleotide
gaaacaagcccuccuggcu

SEQ ID NO: 2198019 - RNA, 19 nt, Artificial Sequence
  Description of Artificial Sequence: Synthetic oligonucleotide
gaaguuguacugacaguca

SEQ ID NO: 2198020 - RNA, 19 nt, Artificial Sequence
  Description of Artificial Sequence: Synthetic oligonucleotide
aggcgcuugcugccaaggc

SEQ ID NO: 2198021 - RNA, 19 nt, Artificial Sequence
  Description of Artificial Sequence: Synthetic oligonucleotide
acaccggugcuacaucucu

SEQ ID NO: 2198022 - RNA, 19 nt, Artificial Sequence
  Description of Artificial Sequence: Synthetic oligonucleotide
aaucccaggguggucucug

SEQ ID NO: 2198023 - RNA, 19 nt, Artificial Sequence
  Description of Artificial Sequence: Synthetic oligonucleotide
guaggcaugaaaacaaccu

SEQ ID NO: 2198024 - RNA, 19 nt, Artificial Sequence
  Description of Artificial Sequence: Synthetic oligonucleotide
ccugucagggaaacaagcc

SEQ ID NO: 2198025 - RNA, 19 nt, Artificial Sequence
  Description of Artificial Sequence: Synthetic oligonucleotide
uccccugggguguuggcug

SEQ ID NO: 2198026 - RNA, 19 nt, Artificial Sequence
  Description of Artificial Sequence: Synthetic oligonucleotide
gguaggcaugaaaacaacc

SEQ ID NO: 2198027 - RNA, 19 nt, Artificial Sequence
  Description of Artificial Sequence: Synthetic oligonucleotide
acagacaccgagugcccug

SEQ ID NO: 2198028 - RNA, 19 nt, Artificial Sequence
  Description of Artificial Sequence: Synthetic oligonucleotide
ggcaugaaaacaaccugag

SEQ ID NO: 2198029 - RNA, 19 nt, Artificial Sequence
  Description of Artificial Sequence: Synthetic oligonucleotide
guugacccugguucacagg

SEQ ID NO: 2198030 - RNA, 19 nt, Artificial Sequence
  Description of Artificial Sequence: Synthetic oligonucleotide
uguguagucccuggagcca

SEQ ID NO: 2198031 - RNA, 19 nt, Artificial Sequence
  Description of Artificial Sequence: Synthetic oligonucleotide
ggucaguaagcaucuguug

SEQ ID NO: 2198032 - RNA, 19 nt, Artificial Sequence
  Description of Artificial Sequence: Synthetic oligonucleotide
aggaaagagggugcuaagu

SEQ ID NO: 2198033 - RNA, 19 nt, Artificial Sequence
  Description of Artificial Sequence: Synthetic oligonucleotide
ggugcuacaucucucccca

SEQ ID NO: 2198034 - RNA, 19 nt, Artificial Sequence
  Description of Artificial Sequence: Synthetic oligonucleotide
gcuacaucucuccccacag

SEQ ID NO: 2198035 - RNA, 19 nt, Artificial Sequence
  Description of Artificial Sequence: Synthetic oligonucleotide
uccucccaccgcuagcagc

SEQ ID NO: 2198036 - RNA, 19 nt, Artificial Sequence
  Description of Artificial Sequence: Synthetic oligonucleotide
gggguguuggcugacaggc

SEQ ID NO: 2198037 - RNA, 19 nt, Artificial Sequence
  Description of Artificial Sequence: Synthetic oligonucleotide
aggacaccggugcuacauc

SEQ ID NO: 2198038 - RNA, 19 nt, Artificial Sequence
  Description of Artificial Sequence: Synthetic oligonucleotide
aggauagggcgggaucagc

SEQ ID NO: 2198039 - RNA, 19 nt, Artificial Sequence
  Description of Artificial Sequence: Synthetic oligonucleotide
  modified_base (11)..(11): a, c, u, g, unknown or other
cagcccuuccncuuuacca

SEQ ID NO: 2198040 - RNA, 19 nt, Artificial Sequence
  Description of Artificial Sequence: Synthetic oligonucleotide
gugggguaggcaugaaaac

SEQ ID NO: 2198041 - RNA, 19 nt, Artificial Sequence
  Description of Artificial Sequence: Synthetic oligonucleotide
uagggcgggaucagcacaa

SEQ ID NO: 2198042 - RNA, 19 nt, Artificial Sequence
  Description of Artificial Sequence: Synthetic oligonucleotide
ggacuggcagaucaaacca

SEQ ID NO: 2198043 - RNA, 19 nt, Artificial Sequence
  Description of Artificial Sequence: Synthetic oligonucleotide
aggcuucagcaccucagug

SEQ ID NO: 2198044 - RNA, 19 nt, Artificial Sequence
  Description of Artificial Sequence: Synthetic oligonucleotide
aaguccccugggguguugg

SEQ ID NO: 2198045 - RNA, 19 nt, Artificial Sequence
  Description of Artificial Sequence: Synthetic oligonucleotide
aacuugcccucccacccau

SEQ ID NO: 2198046 - RNA, 19 nt, Artificial Sequence
  Description of Artificial Sequence: Synthetic oligonucleotide
cacccauuucccaaagcca

SEQ ID NO: 2198047 - RNA, 19 nt, Artificial Sequence
  Description of Artificial Sequence: Synthetic oligonucleotide
  modified_base (4)..(4): a, c, u, g, unknown or other
uccncuuuaccaggagguc

SEQ ID NO: 2198048 - RNA, 19 nt, Artificial Sequence
  Description of Artificial Sequence: Synthetic oligonucleotide
cuaagucauaggguuucug

SEQ ID NO: 2198049 - RNA, 19 nt, Artificial Sequence
  Description of Artificial Sequence: Synthetic oligonucleotide
aagcccuccuggcuaccug

SEQ ID NO: 2198050 - RNA, 19 nt, Artificial Sequence
  Description of Artificial Sequence: Synthetic oligonucleotide
agccaggcacucucaauga

SEQ ID NO: 2198051 - RNA, 19 nt, Artificial Sequence
  Description of Artificial Sequence: Synthetic oligonucleotide
caaggauagggcgggauca

SEQ ID NO: 2198052 - RNA, 19 nt, Artificial Sequence
  Description of Artificial Sequence: Synthetic oligonucleotide
agcugccuuuauggaaugc

SEQ ID NO: 2198053 - RNA, 19 nt, Artificial Sequence
  Description of Artificial Sequence: Synthetic oligonucleotide
ggcagaucaaaccaucucu

SEQ ID NO: 2198054 - RNA, 19 nt, Artificial Sequence
  Description of Artificial Sequence: Synthetic oligonucleotide
gggugaguucccaugacgc

SEQ ID NO: 2198055 - RNA, 19 nt, Artificial Sequence
  Description of Artificial Sequence: Synthetic oligonucleotide
gaaugauuugaaaguagau

SEQ ID NO: 2198056 - RNA, 19 nt, Artificial Sequence
  Description of Artificial Sequence: Synthetic oligonucleotide
acagucaacuugggacugg

SEQ ID NO: 2198057 - RNA, 19 nt, Artificial Sequence
  Description of Artificial Sequence: Synthetic oligonucleotide
aguccccugggguguuggc

SEQ ID NO: 2198058 - RNA, 19 nt, Artificial Sequence
  Description of Artificial Sequence: Synthetic oligonucleotide
gagcacccauuucccaaag

SEQ ID NO: 2198059 - RNA, 19 nt, Artificial Sequence
  Description of Artificial Sequence: Synthetic oligonucleotide
gacaccgagugcccugcug

SEQ ID NO: 2198060 - RNA, 19 nt, Artificial Sequence
  Description of Artificial Sequence: Synthetic oligonucleotide
gggaucagcacaaauccca

SEQ ID NO: 2198061 - RNA, 19 nt, Artificial Sequence
  Description of Artificial Sequence: Synthetic oligonucleotide
uggccuuagcuaugccacc

SEQ ID NO: 2198062 - RNA, 19 nt, Artificial Sequence
  Description of Artificial Sequence: Synthetic oligonucleotide
cauggccugaggucaggac

SEQ ID NO: 2198063 - RNA, 19 nt, Artificial Sequence
  Description of Artificial Sequence: Synthetic oligonucleotide
ccuuuauggaaugcagagg

SEQ ID NO: 2198064 - RNA, 19 nt, Artificial Sequence
  Description of Artificial Sequence: Synthetic oligonucleotide
uguuggcugacaggcuuca

SEQ ID NO: 2198065 - RNA, 19 nt, Artificial Sequence
  Description of Artificial Sequence: Synthetic oligonucleotide
ucuguugacccugguucac

SEQ ID NO: 2198066 - RNA, 19 nt, Artificial Sequence
  Description of Artificial Sequence: Synthetic oligonucleotide
cccaggaacaguugagaag

SEQ ID NO: 2198067 - RNA, 19 nt, Artificial Sequence
  Description of Artificial Sequence: Synthetic oligonucleotide
uuguacugacagucaacuu

SEQ ID NO: 2198068 - RNA, 19 nt, Artificial Sequence
  Description of Artificial Sequence: Synthetic oligonucleotide
ggcgcuugcugccaaggcc

SEQ ID NO: 2198069 - RNA, 19 nt, Artificial Sequence
  Description of Artificial Sequence: Synthetic oligonucleotide
aucucuccccacaggcagc

SEQ ID NO: 2198070 - RNA, 19 nt, Artificial Sequence
  Description of Artificial Sequence: Synthetic oligonucleotide
guaagcaucuguugacccu

SEQ ID NO: 2198071 - RNA, 19 nt, Artificial Sequence
  Description of Artificial Sequence: Synthetic oligonucleotide
ggaccaaggauagggcggg

SEQ ID NO: 2198072 - RNA, 19 nt, Artificial Sequence
  Description of Artificial Sequence: Synthetic oligonucleotide
caccccacaccuagcuggg

SEQ ID NO: 2198073 - RNA, 19 nt, Artificial Sequence
  Description of Artificial Sequence: Synthetic oligonucleotide
guguagucccuggagccag

SEQ ID NO: 2198074 - RNA, 19 nt, Artificial Sequence
  Description of Artificial Sequence: Synthetic oligonucleotide
accugagaaaguggggacu

SEQ ID NO: 2198075 - RNA, 19 nt, Artificial Sequence
  Description of Artificial Sequence: Synthetic oligonucleotide
gagaaguuguacugacagu

SEQ ID NO: 2198076 - RNA, 19 nt, Artificial Sequence
  Description of Artificial Sequence: Synthetic oligonucleotide
cuuuaaggccagagaagaa

SEQ ID NO: 2198077 - RNA, 19 nt, Artificial Sequence
  Description of Artificial Sequence: Synthetic oligonucleotide
cagaucaaaccaucucuaa

SEQ ID NO: 2198078 - RNA, 19 nt, Artificial Sequence
  Description of Artificial Sequence: Synthetic oligonucleotide
cagucaacuugggacuggc

SEQ ID NO: 2198079 - RNA, 19 nt, Artificial Sequence
  Description of Artificial Sequence: Synthetic oligonucleotide
gucaggacagggugaguuc

SEQ ID NO: 2198080 - RNA, 19 nt, Artificial Sequence
  Description of Artificial Sequence: Synthetic oligonucleotide
  modified_base (3)..(3): a, c, u, g, unknown or other
ccncuuuaccaggaggucc

SEQ ID NO: 2198081 - RNA, 19 nt, Artificial Sequence
  Description of Artificial Sequence: Synthetic oligonucleotide
uugggacuggcagaucaaa

SEQ ID NO: 2198082 - RNA, 19 nt, Artificial Sequence
  Description of Artificial Sequence: Synthetic oligonucleotide
aaaucccaggguggucucu

SEQ ID NO: 2198083 - RNA, 19 nt, Artificial Sequence
  Description of Artificial Sequence: Synthetic oligonucleotide
gaacaguugagaaguugua

SEQ ID NO: 2198084 - RNA, 19 nt, Artificial Sequence
  Description of Artificial Sequence: Synthetic oligonucleotide
cgaaugauuugaaaguaga

SEQ ID NO: 2198085 - RNA, 19 nt, Artificial Sequence
  Description of Artificial Sequence: Synthetic oligonucleotide
guucacaggcauccuggga

SEQ ID NO: 2198086 - RNA, 19 nt, Artificial Sequence
  Description of Artificial Sequence: Synthetic oligonucleotide
cacgaaugauuugaaagua

SEQ ID NO: 2198087 - RNA, 19 nt, Artificial Sequence
  Description of Artificial Sequence: Synthetic oligonucleotide
ggaacaguugagaaguugu

SEQ ID NO: 2198088 - RNA, 19 nt, Artificial Sequence
  Description of Artificial Sequence: Synthetic oligonucleotide
ggggcucuuuggcugacag

SEQ ID NO: 2198089 - RNA, 19 nt, Artificial Sequence
  Description of Artificial Sequence: Synthetic oligonucleotide
uuucuggagcugccuuuau

SEQ ID NO: 2198090 - RNA, 19 nt, Artificial Sequence
  Description of Artificial Sequence: Synthetic oligonucleotide
ucucuccccacaggcagcu

SEQ ID NO: 2198091 - RNA, 19 nt, Artificial Sequence
  Description of Artificial Sequence: Synthetic oligonucleotide
ucccaccgcuagcagcuca

SEQ ID NO: 2198092 - RNA, 19 nt, Artificial Sequence
  Description of Artificial Sequence: Synthetic oligonucleotide
gcacccugucuuuaaggcc

SEQ ID NO: 2198093 - RNA, 19 nt, Artificial Sequence
  Description of Artificial Sequence: Synthetic oligonucleotide
ggcgggaucagcacaaauc

SEQ ID NO: 2198094 - RNA, 19 nt, Artificial Sequence
  Description of Artificial Sequence: Synthetic oligonucleotide
acucucaaugacacuuccu

SEQ ID NO: 2198095 - RNA, 19 nt, Artificial Sequence
  Description of Artificial Sequence: Synthetic oligonucleotide
ucccaacagcacccugucu

SEQ ID NO: 2198096 - RNA, 19 nt, Artificial Sequence
  Description of Artificial Sequence: Synthetic oligonucleotide
  modified_base (9)..(9): a, c, u, g, unknown or other
gcccuuccncuuuaccagg

SEQ ID NO: 2198097 - RNA, 19 nt, Artificial Sequence
  Description of Artificial Sequence: Synthetic oligonucleotide
agccugucagggaaacaag

SEQ ID NO: 2198098 - RNA, 19 nt, Artificial Sequence
  Description of Artificial Sequence: Synthetic oligonucleotide
caaaucccaggguggucuc

SEQ ID NO: 2198099 - RNA, 19 nt, Artificial Sequence
  Description of Artificial Sequence: Synthetic oligonucleotide
ggugaguucccaugacgca

SEQ ID NO: 2198100 - RNA, 19 nt, Artificial Sequence
  Description of Artificial Sequence: Synthetic oligonucleotide
gucccaacagcacccuguc

SEQ ID NO: 2198101 - RNA, 19 nt, Artificial Sequence
  Description of Artificial Sequence: Synthetic oligonucleotide
acaggcgcuugcugccaag

SEQ ID NO: 2198102 - RNA, 19 nt, Artificial Sequence
  Description of Artificial Sequence: Synthetic oligonucleotide
cagccugucagggaaacaa

SEQ ID NO: 2198103 - RNA, 19 nt, Artificial Sequence
  Description of Artificial Sequence: Synthetic oligonucleotide
aguucccaugacgcagguc

SEQ ID NO: 2198104 - RNA, 19 nt, Artificial Sequence
  Description of Artificial Sequence: Synthetic oligonucleotide
cagacaccgagugcccugc

SEQ ID NO: 2198105 - RNA, 19 nt, Artificial Sequence
  Description of Artificial Sequence: Synthetic oligonucleotide
gcuaccugguccugaagga

SEQ ID NO: 2198106 - RNA, 19 nt, Artificial Sequence
  Description of Artificial Sequence: Synthetic oligonucleotide
aguagauccugaacccaaa

SEQ ID NO: 2198107 - RNA, 19 nt, Artificial Sequence
  Description of Artificial Sequence: Synthetic oligonucleotide
cuggagcugccuuuaugga

SEQ ID NO: 2198108 - RNA, 19 nt, Artificial Sequence
  Description of Artificial Sequence: Synthetic oligonucleotide
caggcgcuugcugccaagg

SEQ ID NO: 2198109 - RNA, 19 nt, Artificial Sequence
  Description of Artificial Sequence: Synthetic oligonucleotide
acuuucccugagcacccau

SEQ ID NO: 2198110 - RNA, 19 nt, Artificial Sequence
  Description of Artificial Sequence: Synthetic oligonucleotide
ccuuggugcugccacuggg

SEQ ID NO: 2198111 - RNA, 19 nt, Artificial Sequence
  Description of Artificial Sequence: Synthetic oligonucleotide
cagggugaguucccaugac

SEQ ID NO: 2198112 - RNA, 19 nt, Artificial Sequence
  Description of Artificial Sequence: Synthetic oligonucleotide
agcaucuguugacccuggu

SEQ ID NO: 2198113 - RNA, 19 nt, Artificial Sequence
  Description of Artificial Sequence: Synthetic oligonucleotide
gccugucagggaaacaagc

SEQ ID NO: 2198114 - RNA, 19 nt, Artificial Sequence
  Description of Artificial Sequence: Synthetic oligonucleotide
acaagcccuccuggcuacc

SEQ ID NO: 2198115 - RNA, 19 nt, Artificial Sequence
  Description of Artificial Sequence: Synthetic oligonucleotide
cauuucccaaagccaggca

SEQ ID NO: 2198116 - RNA, 19 nt, Artificial Sequence
  Description of Artificial Sequence: Synthetic oligonucleotide
cacccauggccugagguca

SEQ ID NO: 2198117 - RNA, 19 nt, Artificial Sequence
  Description of Artificial Sequence: Synthetic oligonucleotide
ggggcgguuggccaucccc

SEQ ID NO: 2198118 - RNA, 19 nt, Artificial Sequence
  Description of Artificial Sequence: Synthetic oligonucleotide
ggccugcaauccuuccugg

SEQ ID NO: 2198119 - RNA, 19 nt, Artificial Sequence
  Description of Artificial Sequence: Synthetic oligonucleotide
  modified_base (7)..(7): a, c, u, g, unknown or other
ccuuccncuuuaccaggag

SEQ ID NO: 2198120 - RNA, 19 nt, Artificial Sequence
  Description of Artificial Sequence: Synthetic oligonucleotide
agaggggcgguuggccauc
